United States Patent Application Publication US 2015/0141320 A1 - sequence listing, part 30

SEQ ID NO: 1098879 - DNA, 15 bp, Homo sapiens
tcctgcaaggcccaa

SEQ ID NO: 1098880 - DNA, 15 bp, Homo sapiens
atcctgcaaggccca

SEQ ID NO: 1098881 - DNA, 15 bp, Homo sapiens
catcctgcaaggccc

SEQ ID NO: 1098882 - DNA, 15 bp, Homo sapiens
acatcctgcaaggcc

SEQ ID NO: 1098883 - DNA, 15 bp, Homo sapiens
aacatcctgcaaggc

SEQ ID NO: 1098884 - DNA, 15 bp, Homo sapiens
aaacatcctgcaagg

SEQ ID NO: 1098885 - DNA, 15 bp, Homo sapiens
taaacatcctgcaag

SEQ ID NO: 1098886 - DNA, 15 bp, Homo sapiens
ctaaacatcctgcaa

SEQ ID NO: 1098887 - DNA, 15 bp, Homo sapiens
gctaaacatcctgca

SEQ ID NO: 1098888 - DNA, 15 bp, Homo sapiens
tcgtgatggcctctc

SEQ ID NO: 1098889 - DNA, 15 bp, Homo sapiens
ctcgtgatggcctct

SEQ ID NO: 1098890 - DNA, 15 bp, Homo sapiens
cctcgtgatggcctc

SEQ ID NO: 1098891 - DNA, 15 bp, Homo sapiens
ccctcgtgatggcct

SEQ ID NO: 1098892 - DNA, 15 bp, Homo sapiens
accctcgtgatggcc

SEQ ID NO: 1098893 - DNA, 15 bp, Homo sapiens
aaccctcgtgatggc

SEQ ID NO: 1098894 - DNA, 15 bp, Homo sapiens
caaccctcgtgatgg

SEQ ID NO: 1098895 - DNA, 15 bp, Homo sapiens
acaaccctcgtgatg

SEQ ID NO: 1098896 - DNA, 15 bp, Homo sapiens
tacaaccctcgtgat

SEQ ID NO: 1098897 - DNA, 15 bp, Homo sapiens
gtacaaccctcgtga

SEQ ID NO: 1098898 - DNA, 15 bp, Homo sapiens
agtacaaccctcgtg

SEQ ID NO: 1098899 - DNA, 15 bp, Homo sapiens
aagtacaaccctcgt

SEQ ID NO: 1098900 - DNA, 15 bp, Homo sapiens
gaagtacaaccctcg

SEQ ID NO: 1098901 - DNA, 15 bp, Homo sapiens
tgaagtacaaccctc

SEQ ID NO: 1098902 - DNA, 15 bp, Homo sapiens
ttgaagtacaaccct

SEQ ID NO: 1098903 - DNA, 15 bp, Homo sapiens
cttgaagtacaaccc

SEQ ID NO: 1098904 - DNA, 15 bp, Homo sapiens
tcttgaagtacaacc

SEQ ID NO: 1098905 - DNA, 15 bp, Homo sapiens
ttcttgaagtacaac

SEQ ID NO: 1098906 - DNA, 15 bp, Homo sapiens
gttcttgaagtacaa

SEQ ID NO: 1098907 - DNA, 15 bp, Homo sapiens
ggttcttgaagtaca

SEQ ID NO: 1098908 - DNA, 15 bp, Homo sapiens
tggttcttgaagtac

SEQ ID NO: 1098909 - DNA, 15 bp, Homo sapiens
gtggttcttgaagta

SEQ ID NO: 1098910 - DNA, 15 bp, Homo sapiens
agtggttcttgaagt

SEQ ID NO: 1098911 - DNA, 15 bp, Homo sapiens
tagtggttcttgaag

SEQ ID NO: 1098912 - DNA, 15 bp, Homo sapiens
atagtggttcttgaa

SEQ ID NO: 1098913 - DNA, 15 bp, Homo sapiens
gatagtggttcttga

SEQ ID NO: 1098914 - DNA, 15 bp, Homo sapiens
ggatagtggttcttg

SEQ ID NO: 1098915 - DNA, 15 bp, Homo sapiens
aggatagtggttctt

SEQ ID NO: 1098916 - DNA, 15 bp, Homo sapiens
aaggatagtggttct

SEQ ID NO: 1098917 - DNA, 15 bp, Homo sapiens
caaggatagtggttc

SEQ ID NO: 1098918 - DNA, 15 bp, Homo sapiens
tcaaggatagtggtt

SEQ ID NO: 1098919 - DNA, 15 bp, Homo sapiens
ctcaaggatagtggt

SEQ ID NO: 1098920 - DNA, 15 bp, Homo sapiens
gctcaaggatagtgg

SEQ ID NO: 1098921 - DNA, 15 bp, Homo sapiens
agctcaaggatagtg

SEQ ID NO: 1098922 - DNA, 15 bp, Homo sapiens
tagctcaaggatagt

SEQ ID NO: 1098923 - DNA, 15 bp, Homo sapiens
gtagctcaaggatag

SEQ ID NO: 1098924 - DNA, 15 bp, Homo sapiens
ggtagctcaaggata

SEQ ID NO: 1098925 - DNA, 15 bp, Homo sapiens
aggtagctcaaggat

SEQ ID NO: 1098926 - DNA, 15 bp, Homo sapiens
taggtagctcaagga

SEQ ID NO: 1098927 - DNA, 15 bp, Homo sapiens
ctaggtagctcaagg

SEQ ID NO: 1098928 - DNA, 15 bp, Homo sapiens
cctaggtagctcaag

SEQ ID NO: 1098929 - DNA, 15 bp, Homo sapiens
tcctaggtagctcaa

SEQ ID NO: 1098930 - DNA, 15 bp, Homo sapiens
ctcctaggtagctca

SEQ ID NO: 1098931 - DNA, 15 bp, Homo sapiens
gctcctaggtagctc

SEQ ID NO: 1098932 - DNA, 15 bp, Homo sapiens
agctcctaggtagct

SEQ ID NO: 1098933 - DNA, 15 bp, Homo sapiens
cagctcctaggtagc

SEQ ID NO: 1098934 - DNA, 15 bp, Homo sapiens
gcagctcctaggtag

SEQ ID NO: 1098935 - DNA, 15 bp, Homo sapiens
tgcagctcctaggta

SEQ ID NO: 1098936 - DNA, 15 bp, Homo sapiens
ctgcagctcctaggt

SEQ ID NO: 1098937 - DNA, 15 bp, Homo sapiens
tctgcagctcctagg

SEQ ID NO: 1098938 - DNA, 15 bp, Homo sapiens
ttctgcagctcctag

SEQ ID NO: 1098939 - DNA, 15 bp, Homo sapiens
attctgcagctccta

SEQ ID NO: 1098940 - DNA, 15 bp, Homo sapiens
cattctgcagctcct

SEQ ID NO: 1098941 - DNA, 15 bp, Homo sapiens
acattctgcagctcc

SEQ ID NO: 1098942 - DNA, 15 bp, Homo sapiens
cacattctgcagctc

SEQ ID NO: 1098943 - DNA, 15 bp, Homo sapiens
gcacattctgcagct

SEQ ID NO: 1098944 - DNA, 15 bp, Homo sapiens
tgcacattctgcagc

SEQ ID NO: 1098945 - DNA, 15 bp, Homo sapiens
gtgcacattctgcag

SEQ ID NO: 1098946 - DNA, 15 bp, Homo sapiens
agtgcacattctgca

SEQ ID NO: 1098947 - DNA, 15 bp, Homo sapiens
gagtgcacattctgc

SEQ ID NO: 1098948 - DNA, 15 bp, Homo sapiens
agagtgcacattctg

SEQ ID NO: 1098949 - DNA, 15 bp, Homo sapiens
cagagtgcacattct

SEQ ID NO: 1098950 - DNA, 15 bp, Homo sapiens
gcagagtgcacattc

SEQ ID NO: 1098951 - DNA, 15 bp, Homo sapiens
tgcagagtgcacatt

SEQ ID NO: 1098952 - DNA, 15 bp, Homo sapiens
ctgcagagtgcacat

SEQ ID NO: 1098953 - DNA, 15 bp, Homo sapiens
cctgcagagtgcaca

SEQ ID NO: 1098954 - DNA, 15 bp, Homo sapiens
ccctgcagagtgcac

SEQ ID NO: 1098955 - DNA, 15 bp, Homo sapiens
gccctgcagagtgca

SEQ ID NO: 1098956 - DNA, 15 bp, Homo sapiens
agccctgcagagtgc

SEQ ID NO: 1098957 - DNA, 15 bp, Homo sapiens
aagccctgcagagtg

SEQ ID NO: 1098958 - DNA, 15 bp, Homo sapiens
taagccctgcagagt

SEQ ID NO: 1098959 - DNA, 15 bp, Homo sapiens
ctaagccctgcagag

SEQ ID NO: 1098960 - DNA, 15 bp, Homo sapiens
cctaagccctgcaga

SEQ ID NO: 1098961 - DNA, 15 bp, Homo sapiens
ccctaagccctgcag

SEQ ID NO: 1098962 - DNA, 15 bp, Homo sapiens
gccctaagccctgca

SEQ ID NO: 1098963 - DNA, 15 bp, Homo sapiens
ggccctaagccctgc

SEQ ID NO: 1098964 - DNA, 15 bp, Homo sapiens
aggccctaagccctg

SEQ ID NO: 1098965 - DNA, 15 bp, Homo sapiens
caggccctaagccct

SEQ ID NO: 1098966 - DNA, 15 bp, Homo sapiens
gcaggccctaagccc

SEQ ID NO: 1098967 - DNA, 15 bp, Homo sapiens
tgcaggccctaagcc

SEQ ID NO: 1098968 - DNA, 15 bp, Homo sapiens
ctgcaggccctaagc

SEQ ID NO: 1098969 - DNA, 15 bp, Homo sapiens
tctgcaggccctaag

SEQ ID NO: 1098970 - DNA, 15 bp, Homo sapiens
gtctgcaggccctaa

SEQ ID NO: 1098971 - DNA, 15 bp, Homo sapiens
tgtctgcaggcccta

SEQ ID NO: 1098972 - DNA, 15 bp, Homo sapiens
ttgtctgcaggccct

SEQ ID NO: 1098973 - DNA, 15 bp, Homo sapiens
cttgtctgcaggccc

SEQ ID NO: 1098974 - DNA, 15 bp, Homo sapiens
tcttgtctgcaggcc

SEQ ID NO: 1098975 - DNA, 15 bp, Homo sapiens
atcttgtctgcaggc

SEQ ID NO: 1098976 - DNA, 15 bp, Homo sapiens
tatcttgtctgcagg

SEQ ID NO: 1098977 - DNA, 15 bp, Homo sapiens
ctatcttgtctgcag

SEQ ID NO: 1098978 - DNA, 15 bp, Homo sapiens
tctatcttgtctgca

SEQ ID NO: 1098979 - DNA, 15 bp, Homo sapiens
atctatcttgtctgc

SEQ ID NO: 1098980 - DNA, 15 bp, Homo sapiens
catctatcttgtctg

SEQ ID NO: 1098981 - DNA, 15 bp, Homo sapiens
gcatctatcttgtct

SEQ ID NO: 1098982 - DNA, 15 bp, Homo sapiens
tgcatctatcttgtc

SEQ ID NO: 1098983 - DNA, 15 bp, Homo sapiens
ctgcatctatcttgt

SEQ ID NO: 1098984 - DNA, 15 bp, Homo sapiens
cctgcatctatcttg

SEQ ID NO: 1098985 - DNA, 15 bp, Homo sapiens
ccctgcatctatctt

SEQ ID NO: 1098986 - DNA, 15 bp, Homo sapiens
accctgcatctatct

SEQ ID NO: 1098987 - DNA, 15 bp, Homo sapiens
caccctgcatctatc

SEQ ID NO: 1098988 - DNA, 15 bp, Homo sapiens
acaccctgcatctat

SEQ ID NO: 1098989 - DNA, 15 bp, Homo sapiens
gacaccctgcatcta

SEQ ID NO: 1098990 - DNA, 15 bp, Homo sapiens
agacaccctgcatct

SEQ ID NO: 1098991 - DNA, 15 bp, Homo sapiens
tagacaccctgcatc

SEQ ID NO: 1098992 - DNA, 15 bp, Homo sapiens
ctagacaccctgcat

SEQ ID NO: 1098993 - DNA, 15 bp, Homo sapiens
actagacaccctgca

SEQ ID NO: 1098994 - DNA, 15 bp, Homo sapiens
aactagacaccctgc

SEQ ID NO: 1098995 - DNA, 15 bp, Homo sapiens
taactagacaccctg

SEQ ID NO: 1098996 - DNA, 15 bp, Homo sapiens
ttaactagacaccct

SEQ ID NO: 1098997 - DNA, 15 bp, Homo sapiens
tttaactagacaccc

SEQ ID NO: 1098998 - DNA, 15 bp, Homo sapiens
atttaactagacacc

SEQ ID NO: 1098999 - DNA, 15 bp, Homo sapiens
aatttaactagacac

SEQ ID NO: 1099000 - DNA, 15 bp, Homo sapiens
gaatttaactagaca

SEQ ID NO: 1099001 - DNA, 15 bp, Homo sapiens
cgaatttaactagac

SEQ ID NO: 1099002 - DNA, 15 bp, Homo sapiens
tcgaatttaactaga

SEQ ID NO: 1099003 - DNA, 15 bp, Homo sapiens
ttcgaatttaactag

SEQ ID NO: 1099004 - DNA, 15 bp, Homo sapiens
gttcgaatttaacta

SEQ ID NO: 1099005 - DNA, 15 bp, Homo sapiens
agttcgaatttaact

SEQ ID NO: 1099006 - DNA, 15 bp, Homo sapiens
aagttcgaatttaac

SEQ ID NO: 1099007 - DNA, 15 bp, Homo sapiens
gaagttcgaatttaa

SEQ ID NO: 1099008 - DNA, 15 bp, Homo sapiens
tgaagttcgaattta

SEQ ID NO: 1099009 - DNA, 15 bp, Homo sapiens
ctgaagttcgaattt

SEQ ID NO: 1099010 - DNA, 15 bp, Homo sapiens
tctgaagttcgaatt

SEQ ID NO: 1099011 - DNA, 15 bp, Homo sapiens
atctgaagttcgaat

SEQ ID NO: 1099012 - DNA, 15 bp, Homo sapiens
tatctgaagttcgaa

SEQ ID NO: 1099013 - DNA, 15 bp, Homo sapiens
ttatctgaagttcga

SEQ ID NO: 1099014 - DNA, 15 bp, Homo sapiens
tttatctgaagttcg

SEQ ID NO: 1099015 - DNA, 15 bp, Homo sapiens
gtttatctgaagttc

SEQ ID NO: 1099016 - DNA, 15 bp, Homo sapiens
tgtttatctgaagtt

SEQ ID NO: 1099017 - DNA, 15 bp, Homo sapiens
ttgtttatctgaagt

SEQ ID NO: 1099018 - DNA, 15 bp, Homo sapiens
gttgtttatctgaag

SEQ ID NO: 1099019 - DNA, 15 bp, Homo sapiens
tgttgtttatctgaa

SEQ ID NO: 1099020 - DNA, 15 bp, Homo sapiens
ttgttgtttatctga

SEQ ID NO: 1099021 - DNA, 15 bp, Homo sapiens
tttgttgtttatctg

SEQ ID NO: 1099022 - DNA, 15 bp, Homo sapiens
atttgttgtttatct

SEQ ID NO: 1099023 - DNA, 15 bp, Homo sapiens
tatttgttgtttatc

SEQ ID NO: 1099024 - DNA, 15 bp, Homo sapiens
ttatttgttgtttat

SEQ ID NO: 1099025 - DNA, 15 bp, Homo sapiens
attatttgttgttta

SEQ ID NO: 1099026 - DNA, 15 bp, Homo sapiens
aattatttgttgttt

SEQ ID NO: 1099027 - DNA, 15 bp, Homo sapiens
aaattatttgttgtt

SEQ ID NO: 1099028 - DNA, 15 bp, Homo sapiens
aaaattatttgttgt

SEQ ID NO: 1099029 - DNA, 15 bp, Homo sapiens
aaaaattatttgttg

SEQ ID NO: 1099030 - DNA, 15 bp, Homo sapiens
aaaaaattatttgtt

SEQ ID NO: 1099031 - DNA, 15 bp, Homo sapiens
gaaaaaattatttgt

SEQ ID NO: 1099032 - DNA, 15 bp, Homo sapiens
tgaaaaaattatttg

SEQ ID NO: 1099033 - DNA, 15 bp, Homo sapiens
ttgaaaaaattattt

SEQ ID NO: 1099034 - DNA, 15 bp, Homo sapiens
tttgaaaaaattatt

SEQ ID NO: 1099035 - DNA, 15 bp, Homo sapiens
atttgaaaaaattat

SEQ ID NO: 1099036 - DNA, 15 bp, Homo sapiens
tatttgaaaaaatta

SEQ ID NO: 1099037 - DNA, 15 bp, Homo sapiens
ttatttgaaaaaatt

SEQ ID NO: 1099038 - DNA, 15 bp, Homo sapiens
attatttgaaaaaat

SEQ ID NO: 1099039 - DNA, 15 bp, Homo sapiens
aattatttgaaaaaa

SEQ ID NO: 1099040 - DNA, 15 bp, Homo sapiens
caattatttgaaaaa

SEQ ID NO: 1099041 - DNA, 15 bp, Homo sapiens
acaattatttgaaaa

SEQ ID NO: 1099042 - DNA, 15 bp, Homo sapiens
cacaattatttgaaa

SEQ ID NO: 1099043 - DNA, 15 bp, Homo sapiens
acacaattatttgaa

SEQ ID NO: 1099044 - DNA, 15 bp, Homo sapiens
aacacaattatttga

SEQ ID NO: 1099045 - DNA, 15 bp, Homo sapiens
gaacacaattatttg

SEQ ID NO: 1099046 - DNA, 15 bp, Homo sapiens
agaacacaattattt

SEQ ID NO: 1099047 - DNA, 15 bp, Homo sapiens
tagaacacaattatt

SEQ ID NO: 1099048 - DNA, 15 bp, Homo sapiens
atagaacacaattat

SEQ ID NO: 1099049 - DNA, 15 bp, Homo sapiens
aatagaacacaatta

SEQ ID NO: 1099050 - DNA, 15 bp, Homo sapiens
gaatagaacacaatt

SEQ ID NO: 1099051 - DNA, 15 bp, Homo sapiens
cgaatagaacacaat

SEQ ID NO: 1099052 - DNA, 15 bp, Homo sapiens
ccgaatagaacacaa

SEQ ID NO: 1099053 - DNA, 15 bp, Homo sapiens
accgaatagaacaca

SEQ ID NO: 1099054 - DNA, 15 bp, Homo sapiens
gaccgaatagaacac

SEQ ID NO: 1099055 - DNA, 15 bp, Homo sapiens
ggaccgaatagaaca

SEQ ID NO: 1099056 - DNA, 15 bp, Homo sapiens
gggaccgaatagaac

SEQ ID NO: 1099057 - DNA, 15 bp, Homo sapiens
agggaccgaatagaa

SEQ ID NO: 1099058 - DNA, 15 bp, Homo sapiens
tagggaccgaataga

SEQ ID NO: 1099059 - DNA, 15 bp, Homo sapiens
atagggaccgaatag

SEQ ID NO: 1099060 - DNA, 15 bp, Homo sapiens
aatagggaccgaata

SEQ ID NO: 1099061 - DNA, 15 bp, Homo sapiens
aaatagggaccgaat

SEQ ID NO: 1099062 - DNA, 15 bp, Homo sapiens
caaatagggaccgaa

SEQ ID NO: 1099063 - DNA, 15 bp, Homo sapiens
ccaaatagggaccga

SEQ ID NO: 1099064 - DNA, 15 bp, Homo sapiens
cccaaatagggaccg

SEQ ID NO: 1099065 - DNA, 15 bp, Homo sapiens
tcccaaatagggacc

SEQ ID NO: 1099066 - DNA, 15 bp, Homo sapiens
gtcccaaatagggac

SEQ ID NO: 1099067 - DNA, 15 bp, Homo sapiens
tgtcccaaataggga

SEQ ID NO: 1099068 - DNA, 15 bp, Homo sapiens
atgtcccaaataggg

SEQ ID NO: 1099069 - DNA, 15 bp, Homo sapiens
tatgtcccaaatagg

SEQ ID NO: 1099070 - DNA, 15 bp, Homo sapiens
atatgtcccaaatag

SEQ ID NO: 1099071 - DNA, 15 bp, Homo sapiens
aatatgtcccaaata

SEQ ID NO: 1099072 - DNA, 15 bp, Homo sapiens
aaatatgtcccaaat

SEQ ID NO: 1099073 - DNA, 15 bp, Homo sapiens
caaatatgtcccaaa

SEQ ID NO: 1099074 - DNA, 15 bp, Homo sapiens
acaaatatgtcccaa

SEQ ID NO: 1099075 - DNA, 15 bp, Homo sapiens
tacaaatatgtccca

SEQ ID NO: 1099076 - DNA, 15 bp, Homo sapiens
gtacaaatatgtccc

SEQ ID NO: 1099077 - DNA, 15 bp, Homo sapiens
agtacaaatatgtcc

SEQ ID NO: 1099078 - DNA, 15 bp, Homo sapiens
tagtacaaatatgtc

SEQ ID NO: 1099079 - DNA, 15 bp, Homo sapiens
ttagtacaaatatgt

SEQ ID NO: 1099080 - DNA, 15 bp, Homo sapiens
tttagtacaaatatg

SEQ ID NO: 1099081 - DNA, 15 bp, Homo sapiens
ttttagtacaaatat

SEQ ID NO: 1099082 - DNA, 15 bp, Homo sapiens
tttttagtacaaata

SEQ ID NO: 1099083 - DNA, 15 bp, Homo sapiens
ctttttagtacaaat

SEQ ID NO: 1099084 - DNA, 15 bp, Homo sapiens
actttttagtacaaa

SEQ ID NO: 1099085 - DNA, 15 bp, Homo sapiens
tactttttagtacaa

SEQ ID NO: 1099086 - DNA, 15 bp, Homo sapiens
atactttttagtaca

SEQ ID NO: 1099087 - DNA, 15 bp, Homo sapiens
aatactttttagtac

SEQ ID NO: 1099088 - DNA, 15 bp, Homo sapiens
gaatactttttagta

SEQ ID NO: 1099089 - DNA, 15 bp, Homo sapiens
tgaatactttttagt

SEQ ID NO: 1099090 - DNA, 15 bp, Homo sapiens
atgaatactttttag

SEQ ID NO: 1099091 - DNA, 15 bp, Homo sapiens
aatgaatacttttta

SEQ ID NO: 1099092 - DNA, 15 bp, Homo sapiens
aaatgaatacttttt

SEQ ID NO: 1099093 - DNA, 15 bp, Homo sapiens
taaatgaatactttt

SEQ ID NO: 1099094 - DNA, 15 bp, Homo sapiens
ataaatgaatacttt

SEQ ID NO: 1099095 - DNA, 15 bp, Homo sapiens
gataaatgaatactt

SEQ ID NO: 1099096 - DNA, 15 bp, Homo sapiens
agataaatgaatact

SEQ ID NO: 1099097 - DNA, 15 bp, Homo sapiens
cagataaatgaatac

SEQ ID NO: 1099098 - DNA, 15 bp, Homo sapiens
tcagataaatgaata

SEQ ID NO: 1099099 - DNA, 15 bp, Homo sapiens
ttcagataaatgaat

SEQ ID NO: 1099100 - DNA, 15 bp, Homo sapiens
tttcagataaatgaa

SEQ ID NO: 1099101 - DNA, 15 bp, Homo sapiens
atttcagataaatga

SEQ ID NO: 1099102 - DNA, 15 bp, Homo sapiens
aatttcagataaatg

SEQ ID NO: 1099103 - DNA, 15 bp, Homo sapiens
gaatttcagataaat

SEQ ID NO: 1099104 - DNA, 15 bp, Homo sapiens
tgaatttcagataaa

SEQ ID NO: 1099105 - DNA, 15 bp, Homo sapiens
ctgaatttcagataa

SEQ ID NO: 1099106 - DNA, 15 bp, Homo sapiens
tctgaatttcagata

SEQ ID NO: 1099107 - DNA, 15 bp, Homo sapiens
atctgaatttcagat

SEQ ID NO: 1099108 - DNA, 15 bp, Homo sapiens
aatctgaatttcaga

SEQ ID NO: 1099109 - DNA, 15 bp, Homo sapiens
gaatctgaatttcag

SEQ ID NO: 1099110 - DNA, 15 bp, Homo sapiens
cgaatctgaatttca

SEQ ID NO: 1099111 - DNA, 15 bp, Homo sapiens
tcgaatctgaatttc

SEQ ID NO: 1099112 - DNA, 15 bp, Homo sapiens
gtcgaatctgaattt

SEQ ID NO: 1099113 - DNA, 15 bp, Homo sapiens
agtcgaatctgaatt

SEQ ID NO: 1099114 - DNA, 15 bp, Homo sapiens
cagtcgaatctgaat

SEQ ID NO: 1099115 - DNA, 15 bp, Homo sapiens
ccagtcgaatctgaa

SEQ ID NO: 1099116 - DNA, 15 bp, Homo sapiens
cccagtcgaatctga

SEQ ID NO: 1099117 - DNA, 15 bp, Homo sapiens
gcccagtcgaatctg

SEQ ID NO: 1099118 - DNA, 15 bp, Homo sapiens
tgcccagtcgaatct

SEQ ID NO: 1099119 - DNA, 15 bp, Homo sapiens
atgcccagtcgaatc

SEQ ID NO: 1099120 - DNA, 15 bp, Homo sapiens
gatgcccagtcgaat

SEQ ID NO: 1099121 - DNA, 15 bp, Homo sapiens
agatgcccagtcgaa

SEQ ID NO: 1099122 - DNA, 15 bp, Homo sapiens
cagatgcccagtcga

SEQ ID NO: 1099123 - DNA, 15 bp, Homo sapiens
ccagatgcccagtcg

SEQ ID NO: 1099124 - DNA, 15 bp, Homo sapiens
accagatgcccagtc

SEQ ID NO: 1099125 - DNA, 15 bp, Homo sapiens
caccagatgcccagt

SEQ ID NO: 1099126 - DNA, 15 bp, Homo sapiens
gcaccagatgcccag

SEQ ID NO: 1099127 - DNA, 15 bp, Homo sapiens
agcaccagatgccca

SEQ ID NO: 1099128 - DNA, 15 bp, Homo sapiens
aagcaccagatgccc

SEQ ID NO: 1099129 - DNA, 15 bp, Homo sapiens
aaagcaccagatgcc

SEQ ID NO: 1099130 - DNA, 15 bp, Homo sapiens
aaaagcaccagatgc

SEQ ID NO: 1099131 - DNA, 15 bp, Homo sapiens
caaaagcaccagatg

SEQ ID NO: 1099132 - DNA, 15 bp, Homo sapiens
acaaaagcaccagat

SEQ ID NO: 1099133 - DNA, 15 bp, Homo sapiens
aacaaaagcaccaga

SEQ ID NO: 1099134 - DNA, 15 bp, Homo sapiens
aaacaaaagcaccag

SEQ ID NO: 1099135 - DNA, 15 bp, Homo sapiens
caaacaaaagcacca

SEQ ID NO: 1099136 - DNA, 15 bp, Homo sapiens
gcaaacaaaagcacc

SEQ ID NO: 1099137 - DNA, 15 bp, Homo sapiens
agcaaacaaaagcac

SEQ ID NO: 1099138 - DNA, 15 bp, Homo sapiens
tagcaaacaaaagca

SEQ ID NO: 1099139 - DNA, 15 bp, Homo sapiens
ttagcaaacaaaagc

SEQ ID NO: 1099140 - DNA, 15 bp, Homo sapiens
tttagcaaacaaaag

SEQ ID NO: 1099141 - DNA, 15 bp, Homo sapiens
atttagcaaacaaaa

SEQ ID NO: 1099142 - DNA, 15 bp, Homo sapiens
gatttagcaaacaaa

SEQ ID NO: 1099143 - DNA, 15 bp, Homo sapiens
ggatttagcaaacaa

SEQ ID NO: 1099144 - DNA, 15 bp, Homo sapiens
tggatttagcaaaca

SEQ ID NO: 1099145 - DNA, 15 bp, Homo sapiens
ttggatttagcaaac

SEQ ID NO: 1099146 - DNA, 15 bp, Homo sapiens
cttggatttagcaaa

SEQ ID NO: 1099147 - DNA, 15 bp, Homo sapiens
tcttggatttagcaa

SEQ ID NO: 1099148 - DNA, 15 bp, Homo sapiens
ctcttggatttagca

SEQ ID NO: 1099149 - DNA, 15 bp, Homo sapiens
gctcttggatttagc

SEQ ID NO: 1099150 - DNA, 15 bp, Homo sapiens
tgctcttggatttag

SEQ ID NO: 1099151 - DNA, 15 bp, Homo sapiens
ttgctcttggattta

SEQ ID NO: 1099152 - DNA, 15 bp, Homo sapiens
tttgctcttggattt

SEQ ID NO: 1099153 - DNA, 15 bp, Homo sapiens
atttgctcttggatt

SEQ ID NO: 1099154 - DNA, 15 bp, Homo sapiens
aatttgctcttggat

SEQ ID NO: 1099155 - DNA, 15 bp, Homo sapiens
aaatttgctcttgga

SEQ ID NO: 1099156 - DNA, 15 bp, Homo sapiens
caaatttgctcttgg

SEQ ID NO: 1099157 - DNA, 15 bp, Homo sapiens
acaaatttgctcttg

SEQ ID NO: 1099158 - DNA, 15 bp, Homo sapiens
aacaaatttgctctt

SEQ ID NO: 1099159 - DNA, 15 bp, Homo sapiens
gaacaaatttgctct

SEQ ID NO: 1099160 - DNA, 15 bp, Homo sapiens
agaacaaatttgctc

SEQ ID NO: 1099161 - DNA, 15 bp, Homo sapiens
tagaacaaatttgct

SEQ ID NO: 1099162 - DNA, 15 bp, Homo sapiens
ctagaacaaatttgc

SEQ ID NO: 1099163 - DNA, 15 bp, Homo sapiens
gctagaacaaatttg

SEQ ID NO: 1099164 - DNA, 15 bp, Homo sapiens
agctagaacaaattt

SEQ ID NO: 1099165 - DNA, 15 bp, Homo sapiens
tagctagaacaaatt

SEQ ID NO: 1099166 - DNA, 15 bp, Homo sapiens
gtagctagaacaaat

SEQ ID NO: 1099167 - DNA, 15 bp, Homo sapiens
agtagctagaacaaa

SEQ ID NO: 1099168 - DNA, 15 bp, Homo sapiens
aagtagctagaacaa

SEQ ID NO: 1099169 - DNA, 15 bp, Homo sapiens
gaagtagctagaaca

SEQ ID NO: 1099170 - DNA, 15 bp, Homo sapiens
agaagtagctagaac

SEQ ID NO: 1099171 - DNA, 15 bp, Homo sapiens
gagaagtagctagaa

SEQ ID NO: 1099172 - DNA, 15 bp, Homo sapiens
tgagaagtagctaga

SEQ ID NO: 1099173 - DNA, 15 bp, Homo sapiens
ttgagaagtagctag

SEQ ID NO: 1099174 - DNA, 15 bp, Homo sapiens
gttgagaagtagcta

SEQ ID NO: 1099175 - DNA, 15 bp, Homo sapiens
ggttgagaagtagct

SEQ ID NO: 1099176 - DNA, 15 bp, Homo sapiens
gggttgagaagtagc

SEQ ID NO: 1099177 - DNA, 15 bp, Homo sapiens
ggggttgagaagtag

SEQ ID NO: 1099178 - DNA, 15 bp, Homo sapiens
tggggttgagaagta

SEQ ID NO: 1099179 - DNA, 15 bp, Homo sapiens
gtggggttgagaagt

SEQ ID NO: 1099180 - DNA, 15 bp, Homo sapiens
ggtggggttgagaag

SEQ ID NO: 1099181 - DNA, 15 bp, Homo sapiens
aggtggggttgagaa

SEQ ID NO: 1099182 - DNA, 15 bp, Homo sapiens
aaggtggggttgaga

SEQ ID NO: 1099183 - DNA, 15 bp, Homo sapiens
gaaggtggggttgag

SEQ ID NO: 1099184 - DNA, 15 bp, Homo sapiens
tgaaggtggggttga

SEQ ID NO: 1099185 - DNA, 15 bp, Homo sapiens
ctgaaggtggggttg

SEQ ID NO: 1099186 - DNA, 15 bp, Homo sapiens
tctgaaggtggggtt

SEQ ID NO: 1099187 - DNA, 15 bp, Homo sapiens
ctctgaaggtggggt

SEQ ID NO: 1099188 - DNA, 15 bp, Homo sapiens
tctctgaaggtgggg

SEQ ID NO: 1099189 - DNA, 15 bp, Homo sapiens
ctctctgaaggtggg

SEQ ID NO: 1099190 - DNA, 15 bp, Homo sapiens
cctctctgaaggtgg

SEQ ID NO: 1099191 - DNA, 15 bp, Homo sapiens
tcctctctgaaggtg

SEQ ID NO: 1099192 - DNA, 15 bp, Homo sapiens
ttcctctctgaaggt

SEQ ID NO: 1099193 - DNA, 15 bp, Homo sapiens
cttcctctctgaagg

SEQ ID NO: 1099194 - DNA, 15 bp, Homo sapiens
gcttcctctctgaag

SEQ ID NO: 1099195 - DNA, 15 bp, Homo sapiens
ggcttcctctctgaa

SEQ ID NO: 1099196 - DNA, 15 bp, Homo sapiens
aggcttcctctctga

SEQ ID NO: 1099197 - DNA, 15 bp, Homo sapiens
agagacagtggcaga

SEQ ID NO: 1099198 - DNA, 15 bp, Homo sapiens
gagagacagtggcag

SEQ ID NO: 1099199 - DNA, 15 bp, Homo sapiens
agagagacagtggca

SEQ ID NO: 1099200 - DNA, 15 bp, Homo sapiens
cagagagacagtggc

SEQ ID NO: 1099201 - DNA, 15 bp, Homo sapiens
ccagagagacagtgg

SEQ ID NO: 1099202 - DNA, 15 bp, Homo sapiens
cccagagagacagtg

SEQ ID NO: 1099203 - DNA, 15 bp, Homo sapiens
acccagagagacagt

SEQ ID NO: 1099204 - DNA, 15 bp, Homo sapiens
cacccagagagacag

SEQ ID NO: 1099205 - DNA, 15 bp, Homo sapiens
tcacccagagagaca

SEQ ID NO: 1099206 - DNA, 15 bp, Homo sapiens
gtcacccagagagac

SEQ ID NO: 1099207 - DNA, 15 bp, Homo sapiens
ggtcacccagagaga

SEQ ID NO: 1099208 - DNA, 15 bp, Homo sapiens
aggtcacccagagag

SEQ ID NO: 1099209 - DNA, 15 bp, Homo sapiens
gaggtcacccagaga

SEQ ID NO: 1099210 - DNA, 15 bp, Homo sapiens
tgaggtcacccagag

SEQ ID NO: 1099211 - DNA, 15 bp, Homo sapiens
ctgaggtcacccaga

SEQ ID NO: 1099212 - DNA, 15 bp, Homo sapiens
cctgaggtcacccag

SEQ ID NO: 1099213 - DNA, 15 bp, Homo sapiens
gcctgaggtcaccca

SEQ ID NO: 1099214 - DNA, 15 bp, Homo sapiens
tgcctgaggtcaccc

SEQ ID NO: 1099215 - DNA, 15 bp, Homo sapiens
ctgcctgaggtcacc

SEQ ID NO: 1099216 - DNA, 15 bp, Homo sapiens
cctgcctgaggtcac

SEQ ID NO: 1099217 - DNA, 15 bp, Homo sapiens
acctgcctgaggtca

SEQ ID NO: 1099218 - DNA, 15 bp, Homo sapiens
gacctgcctgaggtc

SEQ ID NO: 1099219 - DNA, 15 bp, Homo sapiens
agacctgcctgaggt

SEQ ID NO: 1099220 - DNA, 15 bp, Homo sapiens
gagacctgcctgagg

SEQ ID NO: 1099221 - DNA, 15 bp, Homo sapiens
ggagacctgcctgag

SEQ ID NO: 1099222 - DNA, 15 bp, Homo sapiens
aggagacctgcctga

SEQ ID NO: 1099223 - DNA, 15 bp, Homo sapiens
gaggagacctgcctg

SEQ ID NO: 1099224 - DNA, 15 bp, Homo sapiens
tgaggagacctgcct

SEQ ID NO: 1099225 - DNA, 15 bp, Homo sapiens
ttgaggagacctgcc

SEQ ID NO: 1099226 - DNA, 15 bp, Homo sapiens
tttgaggagacctgc

SEQ ID NO: 1099227 - DNA, 15 bp, Homo sapiens
ttttgaggagacctg

SEQ ID NO: 1099228 - DNA, 15 bp, Homo sapiens
tttttgaggagacct

SEQ ID NO: 1099229 - DNA, 15 bp, Homo sapiens
ttttttgaggagacc

SEQ ID NO: 1099230 - DNA, 15 bp, Homo sapiens
tttttttgaggagac

SEQ ID NO: 1099231 - DNA, 15 bp, Homo sapiens
atttttttgaggaga

SEQ ID NO: 1099232 - DNA, 15 bp, Homo sapiens
tatttttttgaggag

SEQ ID NO: 1099233 - DNA, 15 bp, Homo sapiens
ttatttttttgagga

SEQ ID NO: 1099234 - DNA, 15 bp, Homo sapiens
cttatttttttgagg

SEQ ID NO: 1099235 - DNA, 15 bp, Homo sapiens
tcttatttttttgag

SEQ ID NO: 1099236 - DNA, 15 bp, Homo sapiens
atcttatttttttga

SEQ ID NO: 1099237 - DNA, 15 bp, Homo sapiens
tatcttatttttttg

SEQ ID NO: 1099238 - DNA, 15 bp, Homo sapiens
gtatcttattttttt

SEQ ID NO: 1099239 - DNA, 15 bp, Homo sapiens
agtatcttatttttt

SEQ ID NO: 1099240 - DNA, 15 bp, Homo sapiens
aagtatcttattttt

SEQ ID NO: 1099241 - DNA, 15 bp, Homo sapiens
aaagtatcttatttt

SEQ ID NO: 1099242 - DNA, 15 bp, Homo sapiens
taaagtatcttattt

SEQ ID NO: 1099243 - DNA, 15 bp, Homo sapiens
ataaagtatcttatt

SEQ ID NO: 1099244 - DNA, 15 bp, Homo sapiens
tataaagtatcttat

SEQ ID NO: 1099245 - DNA, 15 bp, Homo sapiens
ttataaagtatctta

SEQ ID NO: 1099246 - DNA, 15 bp, Homo sapiens
tttataaagtatctt

SEQ ID NO: 1099247 - DNA, 15 bp, Homo sapiens
ctttataaagtatct

SEQ ID NO: 1099248 - DNA, 15 bp, Homo sapiens
gctttataaagtatc

SEQ ID NO: 1099249 - DNA, 15 bp, Homo sapiens
agctttataaagtat

SEQ ID NO: 1099250 - DNA, 15 bp, Homo sapiens
gagctttataaagta

SEQ ID NO: 1099251 - DNA, 15 bp, Homo sapiens
tgagctttataaagt

SEQ ID NO: 1099252 - DNA, 15 bp, Homo sapiens
ctgagctttataaag

SEQ ID NO: 1099253 - DNA, 15 bp, Homo sapiens
actgagctttataaa

SEQ ID NO: 1099254 - DNA, 15 bp, Homo sapiens
aactgagctttataa

SEQ ID NO: 1099255 - DNA, 15 bp, Homo sapiens
aaactgagctttata

SEQ ID NO: 1099256 - DNA, 15 bp, Homo sapiens
gaaactgagctttat

SEQ ID NO: 1099257 - DNA, 15 bp, Homo sapiens
ggaaactgagcttta

SEQ ID NO: 1099258 - DNA, 15 bp, Homo sapiens
aggaaactgagcttt

SEQ ID NO: 1099259 - DNA, 15 bp, Homo sapiens
gaggaaactgagctt

SEQ ID NO: 1099260 - DNA, 15 bp, Homo sapiens
agaggaaactgagct

SEQ ID NO: 1099261 - DNA, 15 bp, Homo sapiens
aagaggaaactgagc

SEQ ID NO: 1099262 - DNA, 15 bp, Homo sapiens
tgaagaggaaactga

SEQ ID NO: 1099263 - DNA, 15 bp, Homo sapiens
ctgaagaggaaactg

SEQ ID NO: 1099264 - DNA, 15 bp, Homo sapiens
actgaagaggaaact

SEQ ID NO: 1099265 - DNA, 15 bp, Homo sapiens
tactgaagaggaaac

SEQ ID NO: 1099266 - DNA, 15 bp, Homo sapiens
ttactgaagaggaaa

SEQ ID NO: 1099267 - DNA, 15 bp, Homo sapiens
tttactgaagaggaa

SEQ ID NO: 1099268 - DNA, 15 bp, Homo sapiens
ttttactgaagagga

SEQ ID NO: 1099269 - DNA, 15 bp, Homo sapiens
attttactgaagagg

SEQ ID NO: 1099270 - DNA, 15 bp, Homo sapiens
cattttactgaagag

SEQ ID NO: 1099271 - DNA, 15 bp, Homo sapiens
tcattttactgaaga

SEQ ID NO: 1099272 - DNA, 15 bp, Homo sapiens
ctcattttactgaag

SEQ ID NO: 1099273 - DNA, 15 bp, Homo sapiens
cctcattttactgaa

SEQ ID NO: 1099274 - DNA, 15 bp, Homo sapiens
tcctcattttactga

SEQ ID NO: 1099275 - DNA, 15 bp, Homo sapiens
atcctcattttactg

SEQ ID NO: 1099276 - DNA, 15 bp, Homo sapiens
aatcctcattttact

SEQ ID NO: 1099277 - DNA, 15 bp, Homo sapiens
gaatcctcattttac

SEQ ID NO: 1099278 - DNA, 15 bp, Homo sapiens
ggaatcctcatttta

SEQ ID NO: 1099279 - DNA, 15 bp, Homo sapiens
tggaatcctcatttt

SEQ ID NO: 1099280 - DNA, 15 bp, Homo sapiens
ctggaatcctcattt

SEQ ID NO: 1099281 - DNA, 15 bp, Homo sapiens
cctggaatcctcatt

SEQ ID NO: 1099282 - DNA, 15 bp, Homo sapiens
acctggaatcctcat

SEQ ID NO: 1099283 - DNA, 15 bp, Homo sapiens
tacctggaatcctca

SEQ ID NO: 1099284 - DNA, 15 bp, Homo sapiens
ttacctggaatcctc

SEQ ID NO: 1099285 - DNA, 15 bp, Homo sapiens
gttacctggaatcct

SEQ ID NO: 1099286 - DNA, 15 bp, Homo sapiens
agttacctggaatcc

SEQ ID NO: 1099287 - DNA, 15 bp, Homo sapiens
gagttacctggaatc

SEQ ID NO: 1099288 - DNA, 15 bp, Homo sapiens
tgagttacctggaat

SEQ ID NO: 1099289 - DNA, 15 bp, Homo sapiens
gtgagttacctggaa

SEQ ID NO: 1099290 - DNA, 15 bp, Homo sapiens
tgtgagttacctgga

SEQ ID NO: 1099291 - DNA, 15 bp, Homo sapiens
ctgtgagttacctgg

SEQ ID NO: 1099292 - DNA, 15 bp, Homo sapiens
tctgtgagttacctg

SEQ ID NO: 1099293 - DNA, 15 bp, Homo sapiens
atctgtgagttacct

SEQ ID NO: 1099294 - DNA, 15 bp, Homo sapiens
tatctgtgagttacc

SEQ ID NO: 1099295 - DNA, 15 bp, Homo sapiens
ctatctgtgagttac

SEQ ID NO: 1099296 - DNA, 15 bp, Homo sapiens
actatctgtgagtta

SEQ ID NO: 1099297 - DNA, 15 bp, Homo sapiens
aactatctgtgagtt

SEQ ID NO: 1099298 - DNA, 15 bp, Homo sapiens
aaactatctgtgagt

SEQ ID NO: 1099299 - DNA, 15 bp, Homo sapiens
caaactatctgtgag

SEQ ID NO: 1099300 - DNA, 15 bp, Homo sapiens
acaaactatctgtga

SEQ ID NO: 1099301 - DNA, 15 bp, Homo sapiens
cacaaactatctgtg

SEQ ID NO: 1099302 - DNA, 15 bp, Homo sapiens
ccacaaactatctgt

SEQ ID NO: 1099303 - DNA, 15 bp, Homo sapiens
cccacaaactatctg

SEQ ID NO: 1099304 - DNA, 15 bp, Homo sapiens
ccccacaaactatct

SEQ ID NO: 1099305 - DNA, 15 bp, Homo sapiens
tccccacaaactatc

SEQ ID NO: 1099306 - DNA, 15 bp, Homo sapiens
atccccacaaactat

SEQ ID NO: 1099307 - DNA, 15 bp, Homo sapiens
catccccacaaacta

SEQ ID NO: 1099308 - DNA, 15 bp, Homo sapiens
tcatccccacaaact

SEQ ID NO: 1099309 - DNA, 15 bp, Homo sapiens
ttcatccccacaaac

SEQ ID NO: 1099310 - DNA, 15 bp, Homo sapiens
attcatccccacaaa

SEQ ID NO: 1099311 - DNA, 15 bp, Homo sapiens
gattcatccccacaa

SEQ ID NO: 1099312 - DNA, 15 bp, Homo sapiens
agattcatccccaca

SEQ ID NO: 1099313 - DNA, 15 bp, Homo sapiens
cagattcatccccac

SEQ ID NO: 1099314 - DNA, 15 bp, Homo sapiens
acagattcatcccca

SEQ ID NO: 1099315 - DNA, 15 bp, Homo sapiens
aacagattcatcccc

SEQ ID NO: 1099316 - DNA, 15 bp, Homo sapiens
gaacagattcatccc

SEQ ID NO: 1099317 - DNA, 15 bp, Homo sapiens
aaggaacagattcat

SEQ ID NO: 1099318 - DNA, 15 bp, Homo sapiens
taaggaacagattca

SEQ ID NO: 1099319 - DNA, 15 bp, Homo sapiens
ttaaggaacagattc

SEQ ID NO: 1099320 - DNA, 15 bp, Homo sapiens
tttaaggaacagatt

SEQ ID NO: 1099321 - DNA, 15 bp, Homo sapiens
ctttaaggaacagat

SEQ ID NO: 1099322 - DNA, 15 bp, Homo sapiens
gctttaaggaacaga

SEQ ID NO: 1099323 - DNA, 15 bp, Homo sapiens
ggctttaaggaacag

SEQ ID NO: 1099324 - DNA, 15 bp, Homo sapiens
aggctttaaggaaca

SEQ ID NO: 1099325 - DNA, 15 bp, Homo sapiens
caggctttaaggaac

SEQ ID NO: 1099326 - DNA, 15 bp, Homo sapiens
gcaggctttaaggaa

SEQ ID NO: 1099327 - DNA, 15 bp, Homo sapiens
tgcaggctttaagga

SEQ ID NO: 1099328 - DNA, 15 bp, Homo sapiens
ctgcaggctttaagg

SEQ ID NO: 1099329 - DNA, 15 bp, Homo sapiens
actgcaggctttaag

SEQ ID NO: 1099330 - DNA, 15 bp, Homo sapiens
tactgcaggctttaa

SEQ ID NO: 1099331 - DNA, 15 bp, Homo sapiens
gtactgcaggcttta

SEQ ID NO: 1099332 - DNA, 15 bp, Homo sapiens
tgtactgcaggcttt

SEQ ID NO: 1099333 - DNA, 15 bp, Homo sapiens
atgtactgcaggctt

SEQ ID NO: 1099334 - DNA, 15 bp, Homo sapiens
gatgtactgcaggct

SEQ ID NO: 1099335 - DNA, 15 bp, Homo sapiens
tgatgtactgcaggc

SEQ ID NO: 1099336 - DNA, 15 bp, Homo sapiens
ttgatgtactgcagg

SEQ ID NO: 1099337 - DNA, 15 bp, Homo sapiens
attgatgtactgcag

SEQ ID NO: 1099338 - DNA, 15 bp, Homo sapiens
tattgatgtactgca

SEQ ID NO: 1099339 - DNA, 15 bp, Homo sapiens
ttattgatgtactgc

SEQ ID NO: 1099340 - DNA, 15 bp, Homo sapiens
gttattgatgtactg

SEQ ID NO: 1099341 - DNA, 15 bp, Homo sapiens
ggttattgatgtact

SEQ ID NO: 1099342 - DNA, 15 bp, Homo sapiens
gggttattgatgtac

SEQ ID NO: 1099343 - DNA, 15 bp, Homo sapiens
tgggttattgatgta

SEQ ID NO: 1099344 - DNA, 15 bp, Homo sapiens
ctgggttattgatgt

SEQ ID NO: 1099345 - DNA, 15 bp, Homo sapiens
actgggttattgatg

SEQ ID NO: 1099346 - DNA, 15 bp, Homo sapiens
gactgggttattgat

SEQ ID NO: 1099347 - DNA, 15 bp, Homo sapiens
agactgggttattga

SEQ ID NO: 1099348 - DNA, 15 bp, Homo sapiens
aagactgggttattg

SEQ ID NO: 1099349 - DNA, 15 bp, Homo sapiens
gaagactgggttatt

SEQ ID NO: 1099350 - DNA, 15 bp, Homo sapiens
ggaagactgggttat

SEQ ID NO: 1099351 - DNA, 15 bp, Homo sapiens
aggaagactgggtta

SEQ ID NO: 1099352 - DNA, 15 bp, Homo sapiens
caggaagactgggtt

SEQ ID NO: 1099353 - DNA, 15 bp, Homo sapiens
gcaggaagactgggt

SEQ ID NO: 1099354 - DNA, 15 bp, Homo sapiens
agcaggaagactggg

SEQ ID NO: 1099355 - DNA, 15 bp, Homo sapiens
aagcaggaagactgg

SEQ ID NO: 1099356 - DNA, 15 bp, Homo sapiens
caagcaggaagactg

SEQ ID NO: 1099357 - DNA, 15 bp, Homo sapiens
gcaagcaggaagact

SEQ ID NO: 1099358 - DNA, 15 bp, Homo sapiens
agcaagcaggaagac

SEQ ID NO: 1099359 - DNA, 15 bp, Homo sapiens
aagcaagcaggaaga

SEQ ID NO: 1099360 - DNA, 15 bp, Homo sapiens
aaagcaagcaggaag

SEQ ID NO: 1099361 - DNA, 15 bp, Homo sapiens
gaaagcaagcaggaa

SEQ ID NO: 1099362 - DNA, 15 bp, Homo sapiens
ggaaagcaagcagga

SEQ ID NO: 1099363 - DNA, 15 bp, Homo sapiens
gggaaagcaagcagg

SEQ ID NO: 1099364 - DNA, 15 bp, Homo sapiens
ggggaaagcaagcag

SEQ ID NO: 1099365 - DNA, 15 bp, Homo sapiens
gggggaaagcaagca

SEQ ID NO: 1099366 - DNA, 15 bp, Homo sapiens
ggggggaaagcaagc

SEQ ID NO: 1099367 - DNA, 15 bp, Homo sapiens
aggggggaaagcaag

SEQ ID NO: 1099368 - DNA, 15 bp, Homo sapiens
gaggggggaaagcaa

SEQ ID NO: 1099369 - DNA, 15 bp, Homo sapiens
agaggggggaaagca

SEQ ID NO: 1099370 - DNA, 15 bp, Homo sapiens
gagaggggggaaagc

SEQ ID NO: 1099371 - DNA, 15 bp, Homo sapiens
ggagaggggggaaag

SEQ ID NO: 1099372 - DNA, 15 bp, Homo sapiens
tggagaggggggaaa

SEQ ID NO: 1099373 - DNA, 15 bp, Homo sapiens
gtggagaggggggaa

SEQ ID NO: 1099374 - DNA, 15 bp, Homo sapiens
agtggagagggggga

SEQ ID NO: 1099375 - DNA, 15 bp, Homo sapiens
tagtggagagggggg

SEQ ID NO: 1099376 - DNA, 15 bp, Homo sapiens
gtagtggagaggggg

SEQ ID NO: 1099377 - DNA, 15 bp, Homo sapiens
ggtagtggagagggg

SEQ ID NO: 1099378 - DNA, 15 bp, Homo sapiens
tggtagtggagaggg

SEQ ID NO: 1099379 - DNA, 15 bp, Homo sapiens
ctggtagtggagagg

SEQ ID NO: 1099380 - DNA, 15 bp, Homo sapiens
actggtagtggagag

SEQ ID NO: 1099381 - DNA, 15 bp, Homo sapiens
cactggtagtggaga

SEQ ID NO: 1099382 - DNA, 15 bp, Homo sapiens
tcactggtagtggag

SEQ ID NO: 1099383 - DNA, 15 bp, Homo sapiens
atcactggtagtgga

SEQ ID NO: 1099384 - DNA, 15 bp, Homo sapiens
gatcactggtagtgg

SEQ ID NO: 1099385 - DNA, 15 bp, Homo sapiens
tgatcactggtagtg

SEQ ID NO: 1099386 - DNA, 15 bp, Homo sapiens
atgatcactggtagt

SEQ ID NO: 1099387 - DNA, 15 bp, Homo sapiens
tatgatcactggtag

SEQ ID NO: 1099388 - DNA, 15 bp, Homo sapiens
ctatgatcactggta

SEQ ID NO: 1099389 - DNA, 15 bp, Homo sapiens
actatgatcactggt

SEQ ID NO: 1099390 - DNA, 15 bp, Homo sapiens
gactatgatcactgg

SEQ ID NO: 1099391 - DNA, 15 bp, Homo sapiens
agactatgatcactg

SEQ ID NO: 1099392 - DNA, 15 bp, Homo sapiens
cagactatgatcact

SEQ ID NO: 1099393 - DNA, 15 bp, Homo sapiens
tcagactatgatcac

SEQ ID NO: 1099394 - DNA, 15 bp, Homo sapiens
atcagactatgatca

SEQ ID NO: 1099395 - DNA, 15 bp, Homo sapiens
gatcagactatgatc

SEQ ID NO: 1099396 - DNA, 15 bp, Homo sapiens
ggatcagactatgat

SEQ ID NO: 1099397 - DNA, 15 bp, Homo sapiens
gggatcagactatga

SEQ ID NO: 1099398 - DNA, 15 bp, Homo sapiens
tgggatcagactatg

SEQ ID NO: 1099399 - DNA, 15 bp, Homo sapiens
atgggatcagactat

SEQ ID NO: 1099400 - DNA, 15 bp, Homo sapiens
tatgggatcagacta

SEQ ID NO: 1099401 - DNA, 15 bp, Homo sapiens
ctatgggatcagact

SEQ ID NO: 1099402 - DNA, 15 bp, Homo sapiens
cctatgggatcagac

SEQ ID NO: 1099403 - DNA, 15 bp, Homo sapiens
acctatgggatcaga

SEQ ID NO: 1099404 - DNA, 15 bp, Homo sapiens
cacctatgggatcag

SEQ ID NO: 1099405 - DNA, 15 bp, Homo sapiens
tcacctatgggatca

SEQ ID NO: 1099406 - DNA, 15 bp, Homo sapiens
atcacctatgggatc

SEQ ID NO: 1099407 - DNA, 15 bp, Homo sapiens
tatcacctatgggat

SEQ ID NO: 1099408 - DNA, 15 bp, Homo sapiens
atatcacctatggga

SEQ ID NO: 1099409 - DNA, 15 bp, Homo sapiens
gatatcacctatggg

SEQ ID NO: 1099410 - DNA, 15 bp, Homo sapiens
ggatatcacctatgg

SEQ ID NO: 1099411 - DNA, 15 bp, Homo sapiens
gggatatcacctatg

SEQ ID NO: 1099412 - DNA, 15 bp, Homo sapiens
tgggatatcacctat

SEQ ID NO: 1099413 - DNA, 15 bp, Homo sapiens
ctgggatatcaccta

SEQ ID NO: 1099414 - DNA, 15 bp, Homo sapiens
gctgggatatcacct

SEQ ID NO: 1099415 - DNA, 15 bp, Homo sapiens
agctgggatatcacc

SEQ ID NO: 1099416 - DNA, 15 bp, Homo sapiens
gagctgggatatcac

SEQ ID NO: 1099417 - DNA, 15 bp, Homo sapiens
tgagctgggatatca

SEQ ID NO: 1099418 - DNA, 15 bp, Homo sapiens
ttgagctgggatatc

SEQ ID NO: 1099419 - DNA, 15 bp, Homo sapiens
tttgagctgggatat

SEQ ID NO: 1099420 - DNA, 15 bp, Homo sapiens
ttttgagctgggata

SEQ ID NO: 1099421 - DNA, 15 bp, Homo sapiens
gttttgagctgggat

SEQ ID NO: 1099422 - DNA, 15 bp, Homo sapiens
ggttttgagctggga

SEQ ID NO: 1099423 - DNA, 15 bp, Homo sapiens
gggttttgagctggg

SEQ ID NO: 1099424 - DNA, 15 bp, Homo sapiens
agggttttgagctgg

SEQ ID NO: 1099425 - DNA, 15 bp, Homo sapiens
tagggttttgagctg

SEQ ID NO: 1099426 - DNA, 15 bp, Homo sapiens
gtagggttttgagct

SEQ ID NO: 1099427 - DNA, 15 bp, Homo sapiens
tgtagggttttgagc

SEQ ID NO: 1099428 - DNA, 15 bp, Homo sapiens
atgtagggttttgag

SEQ ID NO: 1099429 - DNA, 15 bp, Homo sapiens
aatgtagggttttga

SEQ ID NO: 1099430 - DNA, 15 bp, Homo sapiens
taatgtagggttttg

SEQ ID NO: 1099431 - DNA, 15 bp, Homo sapiens
ctaatgtagggtttt

SEQ ID NO: 1099432 - DNA, 15 bp, Homo sapiens
gctaatgtagggttt

SEQ ID NO: 1099433 - DNA, 15 bp, Homo sapiens
agctaatgtagggtt

SEQ ID NO: 1099434 - DNA, 15 bp, Homo sapiens
aagctaatgtagggt

SEQ ID NO: 1099435 - DNA, 15 bp, Homo sapiens
gaagctaatgtaggg

SEQ ID NO: 1099436 - DNA, 15 bp, Homo sapiens
agaagctaatgtagg

SEQ ID NO: 1099437 - DNA, 15 bp, Homo sapiens
cagaagctaatgtag

SEQ ID NO: 1099438 - DNA, 15 bp, Homo sapiens
acagaagctaatgta

SEQ ID NO: 1099439 - DNA, 15 bp, Homo sapiens
cacagaagctaatgt

SEQ ID NO: 1099440 - DNA, 15 bp, Homo sapiens
ccacagaagctaatg

SEQ ID NO: 1099441 - DNA, 15 bp, Homo sapiens
gccacagaagctaat

SEQ ID NO: 1099442 - DNA, 15 bp, Homo sapiens
agccacagaagctaa

SEQ ID NO: 1099443 - DNA, 15 bp, Homo sapiens
cagccacagaagcta

SEQ ID NO: 1099444 - DNA, 15 bp, Homo sapiens
acagccacagaagct

SEQ ID NO: 1099445 - DNA, 15 bp, Homo sapiens
aacagccacagaagc

SEQ ID NO: 1099446 - DNA, 15 bp, Homo sapiens
aaacagccacagaag

SEQ ID NO: 1099447 - DNA, 15 bp, Homo sapiens
taaacagccacagaa

SEQ ID NO: 1099448 - DNA, 15 bp, Homo sapiens
ttaaacagccacaga

SEQ ID NO: 1099449 - DNA, 15 bp, Homo sapiens
cttaaacagccacag

SEQ ID NO: 1099450 - DNA, 15 bp, Homo sapiens
ccttaaacagccaca

SEQ ID NO: 1099451 - DNA, 15 bp, Homo sapiens
gccttaaacagccac

SEQ ID NO: 1099452 - DNA, 15 bp, Homo sapiens
ggccttaaacagcca

SEQ ID NO: 1099453 - DNA, 15 bp, Homo sapiens
aggccttaaacagcc

SEQ ID NO: 1099454 - DNA, 15 bp, Homo sapiens
caggccttaaacagc

SEQ ID NO: 1099455 - DNA, 15 bp, Homo sapiens
gcaggccttaaacag

SEQ ID NO: 1099456 - DNA, 15 bp, Homo sapiens
ggcaggccttaaaca

SEQ ID NO: 1099457 - DNA, 15 bp, Homo sapiens
gggcaggccttaaac

SEQ ID NO: 1099458 - DNA, 15 bp, Homo sapiens
tgggcaggccttaaa

SEQ ID NO: 1099459 - DNA, 15 bp, Homo sapiens
ctgggcaggccttaa

SEQ ID NO: 1099460 - DNA, 15 bp, Homo sapiens
tctgggcaggcctta

SEQ ID NO: 1099461 - DNA, 15 bp, Homo sapiens
ttctgggcaggcctt

SEQ ID NO: 1099462 - DNA, 15 bp, Homo sapiens
gttctgggcaggcct

SEQ ID NO: 1099463 - DNA, 15 bp, Homo sapiens
agttctgggcaggcc

SEQ ID NO: 1099464 - DNA, 15 bp, Homo sapiens
gagttctgggcaggc

SEQ ID NO: 1099465 - DNA, 15 bp, Homo sapiens
ggagttctgggcagg

SEQ ID NO: 1099466 - DNA, 15 bp, Homo sapiens
gggagttctgggcag

SEQ ID NO: 1099467 - DNA, 15 bp, Homo sapiens
ggggagttctgggca

SEQ ID NO: 1099468 - DNA, 15 bp, Homo sapiens
aggggagttctgggc

SEQ ID NO: 1099469 - DNA, 15 bp, Homo sapiens
caggggagttctggg

SEQ ID NO: 1099470 - DNA, 15 bp, Homo sapiens
ccaggggagttctgg

SEQ ID NO: 1099471 - DNA, 15 bp, Homo sapiens
accaggggagttctg

SEQ ID NO: 1099472 - DNA, 15 bp, Homo sapiens
gaccaggggagttct

SEQ ID NO: 1099473 - DNA, 15 bp, Homo sapiens
agaccaggggagttc

SEQ ID NO: 1099474 - DNA, 15 bp, Homo sapiens
aagaccaggggagtt

SEQ ID NO: 1099475 - DNA, 15 bp, Homo sapiens
taagaccaggggagt

SEQ ID NO: 1099476 - DNA, 15 bp, Homo sapiens
ctaagaccaggggag

SEQ ID NO: 1099477 - DNA, 15 bp, Homo sapiens
gctaagaccagggga

SEQ ID NO: 1099478 - DNA, 15 bp, Homo sapiens
tgctaagaccagggg

SEQ ID NO: 1099479 - DNA, 15 bp, Homo sapiens
gtgctaagaccaggg

SEQ ID NO: 1099480 - DNA, 15 bp, Homo sapiens
agtgctaagaccagg

SEQ ID NO: 1099481 - DNA, 15 bp, Homo sapiens
cagtgctaagaccag

SEQ ID NO: 1099482 - DNA, 15 bp, Homo sapiens
tcagtgctaagacca

SEQ ID NO: 1099483 - DNA, 15 bp, Homo sapiens
ttcagtgctaagacc

SEQ ID NO: 1099484 - DNA, 15 bp, Homo sapiens
tttcagtgctaagac

SEQ ID NO: 1099485 - DNA, 15 bp, Homo sapiens
ctttcagtgctaaga

SEQ ID NO: 1099486 - DNA, 15 bp, Homo sapiens
gctttcagtgctaag

SEQ ID NO: 1099487 - DNA, 15 bp, Homo sapiens
tgctttcagtgctaa

SEQ ID NO: 1099488 - DNA, 15 bp, Homo sapiens
gtgctttcagtgcta

SEQ ID NO: 1099489 - DNA, 15 bp, Homo sapiens
cgtgctttcagtgct

SEQ ID NO: 1099490 - DNA, 15 bp, Homo sapiens
acgtgctttcagtgc

SEQ ID NO: 1099491 - DNA, 15 bp, Homo sapiens
cacgtgctttcagtg

SEQ ID NO: 1099492 - DNA, 15 bp, Homo sapiens
acacgtgctttcagt

SEQ ID NO: 1099493 - DNA, 15 bp, Homo sapiens
gacacgtgctttcag

SEQ ID NO: 1099494 - DNA, 15 bp, Homo sapiens
ggacacgtgctttca

SEQ ID NO: 1099495 - DNA, 15 bp, Homo sapiens
cggacacgtgctttc

SEQ ID NO: 1099496 - DNA, 15 bp, Homo sapiens
ccggacacgtgcttt

SEQ ID NO: 1099497 - DNA, 15 bp, Homo sapiens
cccggacacgtgctt

SEQ ID NO: 1099498 - DNA, 15 bp, Homo sapiens
ccccggacacgtgct

SEQ ID NO: 1099499 - DNA, 15 bp, Homo sapiens
tccccggacacgtgc

SEQ ID NO: 1099500 - DNA, 15 bp, Homo sapiens
ttccccggacacgtg

SEQ ID NO: 1099501 - DNA, 15 bp, Homo sapiens
cttccccggacacgt

SEQ ID NO: 1099502 - DNA, 15 bp, Homo sapiens
gcttccccggacacg

SEQ ID NO: 1099503 - DNA, 15 bp, Homo sapiens
ggcttccccggacac

SEQ ID NO: 1099504 - DNA, 15 bp, Homo sapiens
gggcttccccggaca

SEQ ID NO: 1099505 - DNA, 15 bp, Homo sapiens
agggcttccccggac

SEQ ID NO: 1099506 - DNA, 15 bp, Homo sapiens
cagggcttccccgga

SEQ ID NO: 1099507 - DNA, 15 bp, Homo sapiens
gcagggcttccccgg

SEQ ID NO: 1099508 - DNA, 15 bp, Homo sapiens
tgcagggcttccccg

SEQ ID NO: 1099509 - DNA, 15 bp, Homo sapiens
atgcagggcttcccc

SEQ ID NO: 1099510 - DNA, 15 bp, Homo sapiens
aatgcagggcttccc

SEQ ID NO: 1099511 - DNA, 15 bp, Homo sapiens
caatgcagggcttcc

SEQ ID NO: 1099512 - DNA, 15 bp, Homo sapiens
ccaatgcagggcttc

SEQ ID NO: 1099513 - DNA, 15 bp, Homo sapiens
accaatgcagggctt

SEQ ID NO: 1099514 - DNA, 15 bp, Homo sapiens
gaccaatgcagggct

SEQ ID NO: 1099515 - DNA, 15 bp, Homo sapiens
cgaccaatgcagggc

SEQ ID NO: 1099516 - DNA, 15 bp, Homo sapiens
acgaccaatgcaggg

SEQ ID NO: 1099517 - DNA, 15 bp, Homo sapiens
aacgaccaatgcagg

SEQ ID NO: 1099518 - DNA, 15 bp, Homo sapiens
gaacgaccaatgcag

SEQ ID NO: 1099519 - DNA, 15 bp, Homo sapiens
tgaacgaccaatgca

SEQ ID NO: 1099520 - DNA, 15 bp, Homo sapiens
atgaacgaccaatgc

SEQ ID NO: 1099521 - DNA, 15 bp, Homo sapiens
tatgaacgaccaatg

SEQ ID NO: 1099522 - DNA, 15 bp, Homo sapiens
gtatgaacgaccaat

SEQ ID NO: 1099523 - DNA, 15 bp, Homo sapiens
agtatgaacgaccaa

SEQ ID NO: 1099524 - DNA, 15 bp, Homo sapiens
tagtatgaacgacca

SEQ ID NO: 1099525 - DNA, 15 bp, Homo sapiens
gtagtatgaacgacc

SEQ ID NO: 1099526 - DNA, 15 bp, Homo sapiens
agtagtatgaacgac

SEQ ID NO: 1099527 - DNA, 15 bp, Homo sapiens
cagtagtatgaacga

SEQ ID NO: 1099528 - DNA, 15 bp, Homo sapiens
tcagtagtatgaacg

SEQ ID NO: 1099529 - DNA, 15 bp, Homo sapiens
ctcagtagtatgaac

SEQ ID NO: 1099530 - DNA, 15 bp, Homo sapiens
actcagtagtatgaa

SEQ ID NO: 1099531 - DNA, 15 bp, Homo sapiens
gactcagtagtatga

SEQ ID NO: 1099532 - DNA, 15 bp, Homo sapiens
ggactcagtagtatg

SEQ ID NO: 1099533 - DNA, 15 bp, Homo sapiens
gggactcagtagtat

SEQ ID NO: 1099534 - DNA, 15 bp, Homo sapiens
cgggactcagtagta

SEQ ID NO: 1099535 - DNA, 15 bp, Homo sapiens
gcgggactcagtagt

SEQ ID NO: 1099536 - DNA, 15 bp, Homo sapiens
tgcgggactcagtag

SEQ ID NO: 1099537 - DNA, 15 bp, Homo sapiens
ctgcgggactcagta

SEQ ID NO: 1099538 - DNA, 15 bp, Homo sapiens
cctgcgggactcagt

SEQ ID NO: 1099539 - DNA, 15 bp, Homo sapiens
ccctgcgggactcag

SEQ ID NO: 1099540 - DNA, 15 bp, Homo sapiens
gccctgcgggactca

SEQ ID NO: 1099541 - DNA, 15 bp, Homo sapiens
tgccctgcgggactc

SEQ ID NO: 1099542 - DNA, 15 bp, Homo sapiens
ttgccctgcgggact

SEQ ID NO: 1099543 - DNA, 15 bp, Homo sapiens
tttgccctgcgggac

SEQ ID NO: 1099544 - DNA, 15 bp, Homo sapiens
gtttgccctgcggga

SEQ ID NO: 1099545 - DNA, 15 bp, Homo sapiens
ggtttgccctgcggg

SEQ ID NO: 1099546 - DNA, 15 bp, Homo sapiens
cggtttgccctgcgg

SEQ ID NO: 1099547 - DNA, 15 bp, Homo sapiens
acggtttgccctgcg

SEQ ID NO: 1099548 - DNA, 15 bp, Homo sapiens
gacggtttgccctgc

SEQ ID NO: 1099549 - DNA, 15 bp, Homo sapiens
ggacggtttgccctg

SEQ ID NO: 1099550 - DNA, 15 bp, Homo sapiens
cggacggtttgccct

SEQ ID NO: 1099551 - DNA, 15 bp, Homo sapiens
ccggacggtttgccc

SEQ ID NO: 1099552 - DNA, 15 bp, Homo sapiens
accggacggtttgcc

SEQ ID NO: 1099553 - DNA, 15 bp, Homo sapiens
gaccggacggtttgc

SEQ ID NO: 1099554 - DNA, 15 bp, Homo sapiens
ggaccggacggtttg

SEQ ID NO: 1099555 - DNA, 15 bp, Homo sapiens
gggaccggacggttt

SEQ ID NO: 1099556 - DNA, 15 bp, Homo sapiens
tgggaccggacggtt

SEQ ID NO: 1099557 - DNA, 15 bp, Homo sapiens
gtgggaccggacggt

SEQ ID NO: 1099558 - DNA, 15 bp, Homo sapiens
ggtgggaccggacgg

SEQ ID NO: 1099559 - DNA, 15 bp, Homo sapiens
gggtgggaccggacg

SEQ ID NO: 1099560 - DNA, 15 bp, Homo sapiens
agggtgggaccggac

SEQ ID NO: 1099561 - DNA, 15 bp, Homo sapiens
gagggtgggaccgga

SEQ ID NO: 1099562 - DNA, 15 bp, Homo sapiens
ggagggtgggaccgg

SEQ ID NO: 1099563 - DNA, 15 bp, Homo sapiens
aggagggtgggaccg

SEQ ID NO: 1099564 - DNA, 15 bp, Homo sapiens
aaggagggtgggacc

SEQ ID NO: 1099565 - DNA, 15 bp, Homo sapiens
aaaggagggtgggac

SEQ ID NO: 1099566 - DNA, 15 bp, Homo sapiens
gaaaggagggtggga

SEQ ID NO: 1099567 - DNA, 15 bp, Homo sapiens
agaaaggagggtggg

SEQ ID NO: 1099568 - DNA, 15 bp, Homo sapiens
tagaaaggagggtgg

SEQ ID NO: 1099569 - DNA, 15 bp, Homo sapiens
ctagaaaggagggtg

SEQ ID NO: 1099570 - DNA, 15 bp, Homo sapiens
actagaaaggagggt

SEQ ID NO: 1099571 - DNA, 15 bp, Homo sapiens
cactagaaaggaggg

SEQ ID NO: 1099572 - DNA, 15 bp, Homo sapiens
gcactagaaaggagg

SEQ ID NO: 1099573 - DNA, 15 bp, Homo sapiens
agcactagaaaggag

SEQ ID NO: 1099574 - DNA, 15 bp, Homo sapiens
cagcactagaaagga

SEQ ID NO: 1099575 - DNA, 15 bp, Homo sapiens
gcagcactagaaagg

SEQ ID NO: 1099576 - DNA, 15 bp, Homo sapiens
agcagcactagaaag

SEQ ID NO: 1099577 - DNA, 15 bp, Homo sapiens
cagcagcactagaaa

SEQ ID NO: 1099578 - DNA, 15 bp, Homo sapiens
acagcagcactagaa

SEQ ID NO: 1099579 - DNA, 15 bp, Homo sapiens
gacagcagcactaga

SEQ ID NO: 1099580 - DNA, 15 bp, Homo sapiens
tgacagcagcactag

SEQ ID NO: 1099581 - DNA, 15 bp, Homo sapiens
gtgacagcagcacta

SEQ ID NO: 1099582 - DNA, 15 bp, Homo sapiens
tgtgacagcagcact

SEQ ID NO: 1099583 - DNA, 15 bp, Homo sapiens
gtgtgacagcagcac

SEQ ID NO: 1099584 - DNA, 15 bp, Homo sapiens
agtgtgacagcagca

SEQ ID NO: 1099585 - DNA, 15 bp, Homo sapiens
gagtgtgacagcagc

SEQ ID NO: 1099586 - DNA, 15 bp, Homo sapiens
tgagtgtgacagcag

SEQ ID NO: 1099587 - DNA, 15 bp, Homo sapiens
gtgagtgtgacagca

SEQ ID NO: 1099588 - DNA, 15 bp, Homo sapiens
ggtgagtgtgacagc

SEQ ID NO: 1099589 - DNA, 15 bp, Homo sapiens
aggtgagtgtgacag

SEQ ID NO: 1099590 - DNA, 15 bp, Homo sapiens
gaggtgagtgtgaca

SEQ ID NO: 1099591 - DNA, 15 bp, Homo sapiens
ggaggtgagtgtgac

SEQ ID NO: 1099592 - DNA, 15 bp, Homo sapiens
gggaggtgagtgtga

SEQ ID NO: 1099593 - DNA, 15 bp, Homo sapiens
agggaggtgagtgtg

SEQ ID NO: 1099594 - DNA, 15 bp, Homo sapiens
aagggaggtgagtgt

SEQ ID NO: 1099595 - DNA, 15 bp, Homo sapiens
gaagggaggtgagtg

SEQ ID NO: 1099596 - DNA, 15 bp, Homo sapiens
tgaagggaggtgagt

SEQ ID NO: 1099597 - DNA, 15 bp, Homo sapiens
gtgaagggaggtgag

SEQ ID NO: 1099598 - DNA, 15 bp, Homo sapiens
ggtgaagggaggtga

SEQ ID NO: 1099599 - DNA, 15 bp, Homo sapiens
gggtgaagggaggtg

SEQ ID NO: 1099600 - DNA, 15 bp, Homo sapiens
agggtgaagggaggt

SEQ ID NO: 1099601 - DNA, 15 bp, Homo sapiens
tagggtgaagggagg

SEQ ID NO: 1099602 - DNA, 15 bp, Homo sapiens
gtagggtgaagggag

SEQ ID NO: 1099603 - DNA, 15 bp, Homo sapiens
tgtagggtgaaggga

SEQ ID NO: 1099604 - DNA, 15 bp, Homo sapiens
gtgtagggtgaaggg

SEQ ID NO: 1099605 - DNA, 15 bp, Homo sapiens
agtgtagggtgaagg

SEQ ID NO: 1099606 - DNA, 15 bp, Homo sapiens
gagtgtagggtgaag

SEQ ID NO: 1099607 - DNA, 15 bp, Homo sapiens
ggagtgtagggtgaa

SEQ ID NO: 1099608 - DNA, 15 bp, Homo sapiens
gggagtgtagggtga

SEQ ID NO: 1099609 - DNA, 15 bp, Homo sapiens
agggagtgtagggtg

SEQ ID NO: 1099610 - DNA, 15 bp, Homo sapiens
aagggagtgtagggt

SEQ ID NO: 1099611 - DNA, 15 bp, Homo sapiens
gaagggagtgtaggg

SEQ ID NO: 1099612 - DNA, 15 bp, Homo sapiens
agaagggagtgtagg

SEQ ID NO: 1099613 - DNA, 15 bp, Homo sapiens
cagaagggagtgtag

SEQ ID NO: 1099614 - DNA, 15 bp, Homo sapiens
acagaagggagtgta

SEQ ID NO: 1099615 - DNA, 15 bp, Homo sapiens
cacagaagggagtgt

SEQ ID NO: 1099616 - DNA, 15 bp, Homo sapiens
gcacagaagggagtg

SEQ ID NO: 1099617 - DNA, 15 bp, Homo sapiens
ggcacagaagggagt

SEQ ID NO: 1099618 - DNA, 15 bp, Homo sapiens
aggcacagaagggag

SEQ ID NO: 1099619 - DNA, 15 bp, Homo sapiens
aaggcacagaaggga

SEQ ID NO: 1099620 - DNA, 15 bp, Homo sapiens
caaggcacagaaggg

SEQ ID NO: 1099621 - DNA, 15 bp, Homo sapiens
gcaaggcacagaagg

SEQ ID NO: 1099622 - DNA, 15 bp, Homo sapiens
tgcaaggcacagaag

SEQ ID NO: 1099623 - DNA, 15 bp, Homo sapiens
ttgcaaggcacagaa

SEQ ID NO: 1099624 - DNA, 15 bp, Homo sapiens
attgcaaggcacaga

SEQ ID NO: 1099625 - DNA, 15 bp, Homo sapiens
aattgcaaggcacag

SEQ ID NO: 1099626 - DNA, 15 bp, Homo sapiens
taattgcaaggcaca

SEQ ID NO: 1099627 - DNA, 15 bp, Homo sapiens
gtaattgcaaggcac

SEQ ID NO: 1099628 - DNA, 15 bp, Homo sapiens
ggtaattgcaaggca

SEQ ID NO: 1099629 - DNA, 15 bp, Homo sapiens
aggtaattgcaaggc

SEQ ID NO: 1099630 - DNA, 15 bp, Homo sapiens
taggtaattgcaagg

SEQ ID NO: 1099631 - DNA, 15 bp, Homo sapiens
ctaggtaattgcaag

SEQ ID NO: 1099632 - DNA, 15 bp, Homo sapiens
cctaggtaattgcaa

SEQ ID NO: 1099633 - DNA, 15 bp, Homo sapiens
ccctaggtaattgca

SEQ ID NO: 1099634 - DNA, 15 bp, Homo sapiens
tccctaggtaattgc

SEQ ID NO: 1099635 - DNA, 15 bp, Homo sapiens
ctccctaggtaattg

SEQ ID NO: 1099636 - DNA, 15 bp, Homo sapiens
actccctaggtaatt

SEQ ID NO: 1099637 - DNA, 15 bp, Homo sapiens
aactccctaggtaat

SEQ ID NO: 1099638 - DNA, 15 bp, Homo sapiens
aaactccctaggtaa

SEQ ID NO: 1099639 - DNA, 15 bp, Homo sapiens
aaaactccctaggta

SEQ ID NO: 1099640 - DNA, 15 bp, Homo sapiens
aaaaactccctaggt

SEQ ID NO: 1099641 - DNA, 15 bp, Homo sapiens
aaaaaactccctagg

SEQ ID NO: 1099642 - DNA, 15 bp, Homo sapiens
taaaaaactccctag

SEQ ID NO: 1099643 - DNA, 15 bp, Homo sapiens
gtaaaaaactcccta

SEQ ID NO: 1099644 - DNA, 15 bp, Homo sapiens
tgtaaaaaactccct

SEQ ID NO: 1099645 - DNA, 15 bp, Homo sapiens
ttgtaaaaaactccc

SEQ ID NO: 1099646 - DNA, 15 bp, Homo sapiens
cttgtaaaaaactcc

SEQ ID NO: 1099647 - DNA, 15 bp, Homo sapiens
tcttgtaaaaaactc

SEQ ID NO: 1099648 - DNA, 15 bp, Homo sapiens
atcttgtaaaaaact

SEQ ID NO: 1099649 - DNA, 15 bp, Homo sapiens
tatcttgtaaaaaac

SEQ ID NO: 1099650 - DNA, 15 bp, Homo sapiens
atatcttgtaaaaaa

SEQ ID NO: 1099651 - DNA, 15 bp, Homo sapiens
catatcttgtaaaaa

SEQ ID NO: 1099652 - DNA, 15 bp, Homo sapiens
ccatatcttgtaaaa

SEQ ID NO: 1099653 - DNA, 15 bp, Homo sapiens
tccatatcttgtaaa

SEQ ID NO: 1099654 - DNA, 15 bp, Homo sapiens
atccatatcttgtaa

SEQ ID NO: 1099655 - DNA, 15 bp, Homo sapiens
catccatatcttgta

SEQ ID NO: 1099656 - DNA, 15 bp, Homo sapiens
gcatccatatcttgt

SEQ ID NO: 1099657 - DNA, 15 bp, Homo sapiens
ggcatccatatcttg

SEQ ID NO: 1099658 - DNA, 15 bp, Homo sapiens
gggcatccatatctt

SEQ ID NO: 1099659 - DNA, 15 bp, Homo sapiens
agggcatccatatct

SEQ ID NO: 1099660 - DNA, 15 bp, Homo sapiens
cagggcatccatatc

SEQ ID NO: 1099661 - DNA, 15 bp, Homo sapiens
ccagggcatccatat

SEQ ID NO: 1099662 - DNA, 15 bp, Homo sapiens
gccagggcatccata

SEQ ID NO: 1099663 - DNA, 15 bp, Homo sapiens
ggccagggcatccat

SEQ ID NO: 1099664 - DNA, 15 bp, Homo sapiens
gggccagggcatcca

SEQ ID NO: 1099665 - DNA, 15 bp, Homo sapiens
agggccagggcatcc

SEQ ID NO: 1099666 - DNA, 15 bp, Homo sapiens
cagggccagggcatc

SEQ ID NO: 1099667 - DNA, 15 bp, Homo sapiens
gcagggccagggcat

SEQ ID NO: 1099668 - DNA, 15 bp, Homo sapiens
ggcagggccagggca

SEQ ID NO: 1099669 - DNA, 15 bp, Homo sapiens
tggcagggccagggc

SEQ ID NO: 1099670 - DNA, 15 bp, Homo sapiens
gtggcagggccaggg

SEQ ID NO: 1099671 - DNA, 15 bp, Homo sapiens
agtggcagggccagg

SEQ ID NO: 1099672 - DNA, 15 bp, Homo sapiens
tagtggcagggccag

SEQ ID NO: 1099673 - DNA, 15 bp, Homo sapiens
ctagtggcagggcca

SEQ ID NO: 1099674 - DNA, 15 bp, Homo sapiens
tctagtggcagggcc

SEQ ID NO: 1099675 - DNA, 15 bp, Homo sapiens
ctctagtggcagggc

SEQ ID NO: 1099676 - DNA, 15 bp, Homo sapiens
tctctagtggcaggg

SEQ ID NO: 1099677 - DNA, 15 bp, Homo sapiens
atctctagtggcagg

SEQ ID NO: 1099678 - DNA, 15 bp, Homo sapiens
aatctctagtggcag

SEQ ID NO: 1099679 - DNA, 15 bp, Homo sapiens
gaatctctagtggca

SEQ ID NO: 1099680 - DNA, 15 bp, Homo sapiens
agaatctctagtggc

SEQ ID NO: 1099681 - DNA, 15 bp, Homo sapiens
cagaatctctagtgg

SEQ ID NO: 1099682 - DNA, 15 bp, Homo sapiens
tcagaatctctagtg

SEQ ID NO: 1099683 - DNA, 15 bp, Homo sapiens
atcagaatctctagt

SEQ ID NO: 1099684 - DNA, 15 bp, Homo sapiens
aatcagaatctctag

SEQ ID NO: 1099685 - DNA, 15 bp, Homo sapiens
aaatcagaatctcta

SEQ ID NO: 1099686 - DNA, 15 bp, Homo sapiens
taaatcagaatctct

SEQ ID NO: 1099687 - DNA, 15 bp, Homo sapiens
ttaaatcagaatctc

SEQ ID NO: 1099688 - DNA, 15 bp, Homo sapiens
attaaatcagaatct

SEQ ID NO: 1099689 - DNA, 15 bp, Homo sapiens
aattaaatcagaatc

SEQ ID NO: 1099690 - DNA, 15 bp, Homo sapiens
caattaaatcagaat

SEQ ID NO: 1099691 - DNA, 15 bp, Homo sapiens
gcaattaaatcagaa

SEQ ID NO: 1099692 - DNA, 15 bp, Homo sapiens
agcaattaaatcaga

SEQ ID NO: 1099693 - DNA, 15 bp, Homo sapiens
aagcaattaaatcag

SEQ ID NO: 1099694 - DNA, 15 bp, Homo sapiens
caagcaattaaatca

SEQ ID NO: 1099695 - DNA, 15 bp, Homo sapiens
ccaagcaattaaatc

SEQ ID NO: 1099696 - DNA, 15 bp, Homo sapiens
cccaagcaattaaat

SEQ ID NO: 1099697 - DNA, 15 bp, Homo sapiens
ccccaagcaattaaa

SEQ ID NO: 1099698 - DNA, 15 bp, Homo sapiens
accccaagcaattaa

SEQ ID NO: 1099699 - DNA, 15 bp, Homo sapiens
taccccaagcaatta

SEQ ID NO: 1099700 - DNA, 15 bp, Homo sapiens
ctaccccaagcaatt

SEQ ID NO: 1099701 - DNA, 15 bp, Homo sapiens
cctaccccaagcaat

SEQ ID NO: 1099702 - DNA, 15 bp, Homo sapiens
ccctaccccaagcaa

SEQ ID NO: 1099703 - DNA, 15 bp, Homo sapiens
gccctaccccaagca

SEQ ID NO: 1099704 - DNA, 15 bp, Homo sapiens
ggccctaccccaagc

SEQ ID NO: 1099705 - DNA, 15 bp, Homo sapiens
aggccctaccccaag

SEQ ID NO: 1099706 - DNA, 15 bp, Homo sapiens
caggccctaccccaa

SEQ ID NO: 1099707 - DNA, 15 bp, Homo sapiens
ccaggccctacccca

SEQ ID NO: 1099708 - DNA, 15 bp, Homo sapiens
gccaggccctacccc

SEQ ID NO: 1099709 - DNA, 15 bp, Homo sapiens
tgccaggccctaccc

SEQ ID NO: 1099710 - DNA, 15 bp, Homo sapiens
atgccaggccctacc

SEQ ID NO: 1099711 - DNA, 15 bp, Homo sapiens
tatgccaggccctac

SEQ ID NO: 1099712 - DNA, 15 bp, Homo sapiens
ctatgccaggcccta

SEQ ID NO: 1099713 - DNA, 15 bp, Homo sapiens
cctatgccaggccct

SEQ ID NO: 1099714 - DNA, 15 bp, Homo sapiens
acctatgccaggccc

SEQ ID NO: 1099715 - DNA, 15 bp, Homo sapiens
tacctatgccaggcc

SEQ ID NO: 1099716 - DNA, 15 bp, Homo sapiens
atacctatgccaggc

SEQ ID NO: 1099717 - DNA, 15 bp, Homo sapiens
gatacctatgccagg

SEQ ID NO: 1099718 - DNA, 15 bp, Homo sapiens
agatacctatgccag

SEQ ID NO: 1099719 - DNA, 15 bp, Homo sapiens
aagatacctatgcca

SEQ ID NO: 1099720 - DNA, 15 bp, Homo sapiens
aaagatacctatgcc

SEQ ID NO: 1099721 - DNA, 15 bp, Homo sapiens
aaaagatacctatgc

SEQ ID NO: 1099722 - DNA, 15 bp, Homo sapiens
taaaagatacctatg

SEQ ID NO: 1099723 - DNA, 15 bp, Homo sapiens
ttaaaagatacctat

SEQ ID NO: 1099724 - DNA, 15 bp, Homo sapiens
tttaaaagataccta

SEQ ID NO: 1099725 - DNA, 15 bp, Homo sapiens
ctttaaaagatacct

SEQ ID NO: 1099726 - DNA, 15 bp, Homo sapiens
gctttaaaagatacc

SEQ ID NO: 1099727 - DNA, 15 bp, Homo sapiens
agctttaaaagatac

SEQ ID NO: 1099728 - DNA, 15 bp, Homo sapiens
gagctttaaaagata

SEQ ID NO: 1099729 - DNA, 15 bp, Homo sapiens
ggagctttaaaagat

SEQ ID NO: 1099730 - DNA, 15 bp, Homo sapiens
cggagctttaaaaga

SEQ ID NO: 1099731 - DNA, 15 bp, Homo sapiens
gcggagctttaaaag

SEQ ID NO: 1099732 - DNA, 15 bp, Homo sapiens
tgcggagctttaaaa

SEQ ID NO: 1099733 - DNA, 15 bp, Homo sapiens
ctgcggagctttaaa

SEQ ID NO: 1099734 - DNA, 15 bp, Homo sapiens
actgcggagctttaa

SEQ ID NO: 1099735 - DNA, 15 bp, Homo sapiens
cactgcggagcttta

SEQ ID NO: 1099736 - DNA, 15 bp, Homo sapiens
ccactgcggagcttt

SEQ ID NO: 1099737 - DNA, 15 bp, Homo sapiens
accactgcggagctt

SEQ ID NO: 1099738 - DNA, 15 bp, Homo sapiens
aaccactgcggagct

SEQ ID NO: 1099739 - DNA, 15 bp, Homo sapiens
gaaccactgcggagc

SEQ ID NO: 1099740 - DNA, 15 bp, Homo sapiens
agaaccactgcggag

SEQ ID NO: 1099741 - DNA, 15 bp, Homo sapiens
tagaaccactgcgga

SEQ ID NO: 1099742 - DNA, 15 bp, Homo sapiens
ttagaaccactgcgg

SEQ ID NO: 1099743 - DNA, 15 bp, Homo sapiens
tttagaaccactgcg

SEQ ID NO: 1099744 - DNA, 15 bp, Homo sapiens
ctttagaaccactgc

SEQ ID NO: 1099745 - DNA, 15 bp, Homo sapiens
gctttagaaccactg

SEQ ID NO: 1099746 - DNA, 15 bp, Homo sapiens
tgctttagaaccact

SEQ ID NO: 1099747 - DNA, 15 bp, Homo sapiens
gtgctttagaaccac

SEQ ID NO: 1099748 - DNA, 15 bp, Homo sapiens
tgtgctttagaacca

SEQ ID NO: 1099749 - DNA, 15 bp, Homo sapiens
ctgtgctttagaacc

SEQ ID NO: 1099750 - DNA, 15 bp, Homo sapiens
gctgtgctttagaac

SEQ ID NO: 1099751 - DNA, 15 bp, Homo sapiens
ggctgtgctttagaa

SEQ ID NO: 1099752 - DNA, 15 bp, Homo sapiens
tggctgtgctttaga

SEQ ID NO: 1099753 - DNA, 15 bp, Homo sapiens
gtggctgtgctttag

SEQ ID NO: 1099754 - DNA, 15 bp, Homo sapiens
tgtggctgtgcttta

SEQ ID NO: 1099755 - DNA, 15 bp, Homo sapiens
ctgtggctgtgcttt

SEQ ID NO: 1099756 - DNA, 15 bp, Homo sapiens
tctgtggctgtgctt

SEQ ID NO: 1099757 - DNA, 15 bp, Homo sapiens
atctgtggctgtgct

SEQ ID NO: 1099758 - DNA, 15 bp, Homo sapiens
catctgtggctgtgc

SEQ ID NO: 1099759 - DNA, 15 bp, Homo sapiens
ccatctgtggctgtg

SEQ ID NO: 1099760 - DNA, 15 bp, Homo sapiens
cccatctgtggctgt

SEQ ID NO: 1099761 - DNA, 15 bp, Homo sapiens
tcccatctgtggctg

SEQ ID NO: 1099762 - DNA, 15 bp, Homo sapiens
ttcccatctgtggct

SEQ ID NO: 1099763 - DNA, 15 bp, Homo sapiens
gttcccatctgtggc

SEQ ID NO: 1099764 - DNA, 15 bp, Homo sapiens
ggttcccatctgtgg

SEQ ID NO: 1099765 - DNA, 15 bp, Homo sapiens
tggttcccatctgtg

SEQ ID NO: 1099766 - DNA, 15 bp, Homo sapiens
gtggttcccatctgt

SEQ ID NO: 1099767 - DNA, 15 bp, Homo sapiens
agtggttcccatctg

SEQ ID NO: 1099768 - DNA, 15 bp, Homo sapiens
cagtggttcccatct

SEQ ID NO: 1099769 - DNA, 15 bp, Homo sapiens
tcagtggttcccatc

SEQ ID NO: 1099770 - DNA, 15 bp, Homo sapiens
atcagtggttcccat

SEQ ID NO: 1099771 - DNA, 15 bp, Homo sapiens
gatcagtggttccca

SEQ ID NO: 1099772 - DNA, 15 bp, Homo sapiens
agatcagtggttccc

SEQ ID NO: 1099773 - DNA, 15 bp, Homo sapiens
tagatcagtggttcc

SEQ ID NO: 1099774 - DNA, 15 bp, Homo sapiens
atagatcagtggttc

SEQ ID NO: 1099775 - DNA, 15 bp, Homo sapiens
aatagatcagtggtt

SEQ ID NO: 1099776 - DNA, 15 bp, Homo sapiens
gaatagatcagtggt

SEQ ID NO: 1099777 - DNA, 15 bp, Homo sapiens
agaatagatcagtgg

SEQ ID NO: 1099778 - DNA, 15 bp, Homo sapiens
aagaatagatcagtg

SEQ ID NO: 1099779 - DNA, 15 bp, Homo sapiens
caagaatagatcagt

SEQ ID NO: 1099780 - DNA, 15 bp, Homo sapiens
acaagaatagatcag

SEQ ID NO: 1099781 - DNA, 15 bp, Homo sapiens
tacaagaatagatca

SEQ ID NO: 1099782 - DNA, 15 bp, Homo sapiens
ctacaagaatagatc

SEQ ID NO: 1099783 - DNA, 15 bp, Homo sapiens
cctacaagaatagat

SEQ ID NO: 1099784 - DNA, 15 bp, Homo sapiens
acctacaagaataga

SEQ ID NO: 1099785 - DNA, 15 bp, Homo sapiens
gacctacaagaatag

SEQ ID NO: 1099786 - DNA, 15 bp, Homo sapiens
ggacctacaagaata

SEQ ID NO: 1099787 - DNA, 15 bp, Homo sapiens
gggacctacaagaat

SEQ ID NO: 1099788 - DNA, 15 bp, Homo sapiens
ggggacctacaagaa

SEQ ID NO: 1099789 - DNA, 15 bp, Homo sapiens
tggggacctacaaga

SEQ ID NO: 1099790 - DNA, 15 bp, Homo sapiens
ctggggacctacaag

SEQ ID NO: 1099791 - DNA, 15 bp, Homo sapiens
tctggggacctacaa

SEQ ID NO: 1099792 - DNA, 15 bp, Homo sapiens
atctggggacctaca

SEQ ID NO: 1099793 - DNA, 15 bp, Homo sapiens
tatctggggacctac

SEQ ID NO: 1099794 - DNA, 15 bp, Homo sapiens
gtatctggggaccta

SEQ ID NO: 1099795 - DNA, 15 bp, Homo sapiens
ggtatctggggacct

SEQ ID NO: 1099796 - DNA, 15 bp, Homo sapiens
aggtatctggggacc

SEQ ID NO: 1099797 - DNA, 15 bp, Homo sapiens
gaggtatctggggac

SEQ ID NO: 1099798 - DNA, 15 bp, Homo sapiens
tgaggtatctgggga

SEQ ID NO: 1099799 - DNA, 15 bp, Homo sapiens
atgaggtatctgggg

SEQ ID NO: 1099800 - DNA, 15 bp, Homo sapiens
catgaggtatctggg

SEQ ID NO: 1099801 - DNA, 15 bp, Homo sapiens
acatgaggtatctgg

SEQ ID NO: 1099802 - DNA, 15 bp, Homo sapiens
cacatgaggtatctg

SEQ ID NO: 1099803 - DNA, 15 bp, Homo sapiens
gcacatgaggtatct

SEQ ID NO: 1099804 - DNA, 15 bp, Homo sapiens
agcacatgaggtatc

SEQ ID NO: 1099805 - DNA, 15 bp, Homo sapiens
cagcacatgaggtat

SEQ ID NO: 1099806 - DNA, 15 bp, Homo sapiens
acagcacatgaggta

SEQ ID NO: 1099807 - DNA, 15 bp, Homo sapiens
aacagcacatgaggt

SEQ ID NO: 1099808 - DNA, 15 bp, Homo sapiens
gaacagcacatgagg

SEQ ID NO: 1099809 - DNA, 15 bp, Homo sapiens
ggaacagcacatgag

SEQ ID NO: 1099810 - DNA, 15 bp, Homo sapiens
gggaacagcacatga

SEQ ID NO: 1099811 - DNA, 15 bp, Homo sapiens
cagggaacagcacat

SEQ ID NO: 1099812 - DNA, 15 bp, Homo sapiens
acagggaacagcaca

SEQ ID NO: 1099813 - DNA, 15 bp, Homo sapiens
cacagggaacagcac

SEQ ID NO: 1099814 - DNA, 15 bp, Homo sapiens
gcacagggaacagca

SEQ ID NO: 1099815 - DNA, 15 bp, Homo sapiens
ggcacagggaacagc

SEQ ID NO: 1099816 - DNA, 15 bp, Homo sapiens
aggcacagggaacag

SEQ ID NO: 1099817 - DNA, 15 bp, Homo sapiens
caggcacagggaaca

SEQ ID NO: 1099818 - DNA, 15 bp, Homo sapiens
tcaggcacagggaac

SEQ ID NO: 1099819 - DNA, 15 bp, Homo sapiens
ctcaggcacagggaa

SEQ ID NO: 1099820 - DNA, 15 bp, Homo sapiens
gctcaggcacaggga

SEQ ID NO: 1099821 - DNA, 15 bp, Homo sapiens
agctcaggcacaggg

SEQ ID NO: 1099822 - DNA, 15 bp, Homo sapiens
cagctcaggcacagg

SEQ ID NO: 1099823 - DNA, 15 bp, Homo sapiens
tcagctcaggcacag

SEQ ID NO: 1099824 - DNA, 15 bp, Homo sapiens
gtcagctcaggcaca

SEQ ID NO: 1099825 - DNA, 15 bp, Homo sapiens
ggtcagctcaggcac

SEQ ID NO: 1099826 - DNA, 15 bp, Homo sapiens
aggtcagctcaggca

SEQ ID NO: 1099827 - DNA, 15 bp, Homo sapiens
aaggtcagctcaggc

SEQ ID NO: 1099828 - DNA, 15 bp, Homo sapiens
aaaggtcagctcagg

SEQ ID NO: 1099829 - DNA, 15 bp, Homo sapiens
gaaaggtcagctcag

SEQ ID NO: 1099830 - DNA, 15 bp, Homo sapiens
ggaaaggtcagctca

SEQ ID NO: 1099831 - DNA, 15 bp, Homo sapiens
gggaaaggtcagctc

SEQ ID NO: 1099832 - DNA, 15 bp, Homo sapiens
ggggaaaggtcagct

SEQ ID NO: 1099833 - DNA, 15 bp, Homo sapiens
gggggaaaggtcagc

SEQ ID NO: 1099834 - DNA, 15 bp, Homo sapiens
tgggggaaaggtcag

SEQ ID NO: 1099835 - DNA, 15 bp, Homo sapiens
gtgggggaaaggtca

SEQ ID NO: 1099836 - DNA, 15 bp, Homo sapiens
agtgggggaaaggtc

SEQ ID NO: 1099837 - DNA, 15 bp, Homo sapiens
aagtgggggaaaggt

SEQ ID NO: 1099838 - DNA, 15 bp, Homo sapiens
aaagtgggggaaagg

SEQ ID NO: 1099839 - DNA, 15 bp, Homo sapiens
gaaagtgggggaaag

SEQ ID NO: 1099840 - DNA, 15 bp, Homo sapiens
ggaaagtgggggaaa

SEQ ID NO: 1099841 - DNA, 15 bp, Homo sapiens
aggaaagtgggggaa

SEQ ID NO: 1099842 - DNA, 15 bp, Homo sapiens
gaggaaagtggggga

SEQ ID NO: 1099843 - DNA, 15 bp, Homo sapiens
agaggaaagtggggg

SEQ ID NO: 1099844 - DNA, 15 bp, Homo sapiens
gagaggaaagtgggg

SEQ ID NO: 1099845 - DNA, 15 bp, Homo sapiens
ggagaggaaagtggg

SEQ ID NO: 1099846 - DNA, 15 bp, Homo sapiens
aggagaggaaagtgg

SEQ ID NO: 1099847 - DNA, 15 bp, Homo sapiens
gaggagaggaaagtg

SEQ ID NO: 1099848 - DNA, 15 bp, Homo sapiens
cgaggagaggaaagt

SEQ ID NO: 1099849 - DNA, 15 bp, Homo sapiens
ccgaggagaggaaag

SEQ ID NO: 1099850 - DNA, 15 bp, Homo sapiens
gccgaggagaggaaa

SEQ ID NO: 1099851 - DNA, 15 bp, Homo sapiens
agccgaggagaggaa

SEQ ID NO: 1099852 - DNA, 15 bp, Homo sapiens
tagccgaggagagga

SEQ ID NO: 1099853 - DNA, 15 bp, Homo sapiens
ttagccgaggagagg

SEQ ID NO: 1099854 - DNA, 15 bp, Homo sapiens
attagccgaggagag

SEQ ID NO: 1099855 - DNA, 15 bp, Homo sapiens
aattagccgaggaga

SEQ ID NO: 1099856 - DNA, 15 bp, Homo sapiens
gaattagccgaggag

SEQ ID NO: 1099857 - DNA, 15 bp, Homo sapiens
ggaattagccgagga

SEQ ID NO: 1099858 - DNA, 15 bp, Homo sapiens
aggaattagccgagg

SEQ ID NO: 1099859 - DNA, 15 bp, Homo sapiens
caggaattagccgag

SEQ ID NO: 1099860 - DNA, 15 bp, Homo sapiens
gcaggaattagccga

SEQ ID NO: 1099861 - DNA, 15 bp, Homo sapiens
agcaggaattagccg

SEQ ID NO: 1099862 - DNA, 15 bp, Homo sapiens
aagcaggaattagcc

SEQ ID NO: 1099863 - DNA, 15 bp, Homo sapiens
taagcaggaattagc

SEQ ID NO: 1099864 - DNA, 15 bp, Homo sapiens
ataagcaggaattag

SEQ ID NO: 1099865 - DNA, 15 bp, Homo sapiens
gataagcaggaatta

SEQ ID NO: 1099866 - DNA, 15 bp, Homo sapiens
ggataagcaggaatt

SEQ ID NO: 1099867 - DNA, 15 bp, Homo sapiens
aggataagcaggaat

SEQ ID NO: 1099868 - DNA, 15 bp, Homo sapiens
gaggataagcaggaa

SEQ ID NO: 1099869 - DNA, 15 bp, Homo sapiens
ggaggataagcagga

SEQ ID NO: 1099870 - DNA, 15 bp, Homo sapiens
aggaggataagcagg

SEQ ID NO: 1099871 - DNA, 15 bp, Homo sapiens
taggaggataagcag

SEQ ID NO: 1099872 - DNA, 15 bp, Homo sapiens
gtaggaggataagca

SEQ ID NO: 1099873 - DNA, 15 bp, Homo sapiens
agtaggaggataagc

SEQ ID NO: 1099874 - DNA, 15 bp, Homo sapiens
gagtaggaggataag

SEQ ID NO: 1099875 - DNA, 15 bp, Homo sapiens
tgagtaggaggataa

SEQ ID NO: 1099876 - DNA, 15 bp, Homo sapiens
ctgagtaggaggata

SEQ ID NO: 1099877 - DNA, 15 bp, Homo sapiens
cctgagtaggaggat

SEQ ID NO: 1099878 - DNA, 15 bp, Homo sapiens
tcctgagtaggagga

SEQ ID NO: 1099879 - DNA, 15 bp, Homo sapiens
ctcctgagtaggagg

SEQ ID NO: 1099880 - DNA, 15 bp, Homo sapiens
cctcctgagtaggag

SEQ ID NO: 1099881 - DNA, 15 bp, Homo sapiens
gcctcctgagtagga

SEQ ID NO: 1099882 - DNA, 15 bp, Homo sapiens
gagcctcctgagtag

SEQ ID NO: 1099883 - DNA, 15 bp, Homo sapiens
agagcctcctgagta

SEQ ID NO: 1099884 - DNA, 15 bp, Homo sapiens
aagagcctcctgagt

SEQ ID NO: 1099885 - DNA, 15 bp, Homo sapiens
gaagagcctcctgag

SEQ ID NO: 1099886 - DNA, 15 bp, Homo sapiens
ggaagagcctcctga

SEQ ID NO: 1099887 - DNA, 15 bp, Homo sapiens
aggaagagcctcctg

SEQ ID NO: 1099888 - DNA, 15 bp, Homo sapiens
gaggaagagcctcct

SEQ ID NO: 1099889 - DNA, 15 bp, Homo sapiens
ggaggaagagcctcc

SEQ ID NO: 1099890 - DNA, 15 bp, Homo sapiens
tggaggaagagcctc

SEQ ID NO: 1099891 - DNA, 15 bp, Homo sapiens
ctggaggaagagcct

SEQ ID NO: 1099892 - DNA, 15 bp, Homo sapiens
cctggaggaagagcc

SEQ ID NO: 1099893 - DNA, 15 bp, Homo sapiens
gcctggaggaagagc

SEQ ID NO: 1099894 - DNA, 15 bp, Homo sapiens
tgcctggaggaagag

SEQ ID NO: 1099895 - DNA, 15 bp, Homo sapiens
ctgcctggaggaaga

SEQ ID NO: 1099896 - DNA, 15 bp, Homo sapiens
gctgcctggaggaag

SEQ ID NO: 1099897 - DNA, 15 bp, Homo sapiens
ggctgcctggaggaa

SEQ ID NO: 1099898 - DNA, 15 bp, Homo sapiens
aggctgcctggagga

SEQ ID NO: 1099899 - DNA, 15 bp, Homo sapiens
aaggctgcctggagg

SEQ ID NO: 1099900 - DNA, 15 bp, Homo sapiens
gaaggctgcctggag

SEQ ID NO: 1099901 - DNA, 15 bp, Homo sapiens
ggaaggctgcctgga

SEQ ID NO: 1099902 - DNA, 15 bp, Homo sapiens
gggaaggctgcctgg

SEQ ID NO: 1099903 - DNA, 15 bp, Homo sapiens
agggaaggctgcctg

SEQ ID NO: 1099904 - DNA, 15 bp, Homo sapiens
cagggaaggctgcct

SEQ ID NO: 1099905 - DNA, 15 bp, Homo sapiens
tcagggaaggctgcc

SEQ ID NO: 1099906 - DNA, 15 bp, Homo sapiens
atcagggaaggctgc

SEQ ID NO: 1099907 - DNA, 15 bp, Homo sapiens
gatcagggaaggctg

SEQ ID NO: 1099908 - DNA, 15 bp, Homo sapiens
ggatcagggaaggct

SEQ ID NO: 1099909 - DNA, 15 bp, Homo sapiens
gggatcagggaaggc

SEQ ID NO: 1099910 - DNA, 15 bp, Homo sapiens
agggatcagggaagg

SEQ ID NO: 1099911 - DNA, 15 bp, Homo sapiens
gagggatcagggaag

SEQ ID NO: 1099912 - DNA, 15 bp, Homo sapiens
ggagggatcagggaa

SEQ ID NO: 1099913 - DNA, 15 bp, Homo sapiens
tggagggatcaggga

SEQ ID NO: 1099914 - DNA, 15 bp, Homo sapiens
ctggagggatcaggg

SEQ ID NO: 1099915 - DNA, 15 bp, Homo sapiens
cctggagggatcagg

SEQ ID NO: 1099916 - DNA, 15 bp, Homo sapiens
tcctggagggatcag

SEQ ID NO: 1099917 - DNA, 15 bp, Homo sapiens
ttcctggagggatca

SEQ ID NO: 1099918 - DNA, 15 bp, Homo sapiens
cttcctggagggatc

SEQ ID NO: 1099919 - DNA, 15 bp, Homo sapiens
tcttcctggagggat

SEQ ID NO: 1099920 - DNA, 15 bp, Homo sapiens
gtcttcctggaggga

SEQ ID NO: 1099921 - DNA, 15 bp, Homo sapiens
agtcttcctggaggg

SEQ ID NO: 1099922 - DNA, 15 bp, Homo sapiens
aagtcttcctggagg

SEQ ID NO: 1099923 - DNA, 15 bp, Homo sapiens
taagtcttcctggag

SEQ ID NO: 1099924 - DNA, 15 bp, Homo sapiens
ctaagtcttcctgga

SEQ ID NO: 1099925 - DNA, 15 bp, Homo sapiens
gctaagtcttcctgg

SEQ ID NO: 1099926 - DNA, 15 bp, Homo sapiens
agctaagtcttcctg

SEQ ID NO: 1099927 - DNA, 15 bp, Homo sapiens
cagctaagtcttcct

SEQ ID NO: 1099928 - DNA, 15 bp, Homo sapiens
gcagctaagtcttcc

SEQ ID NO: 1099929 - DNA, 15 bp, Homo sapiens
cgcagctaagtcttc

SEQ ID NO: 1099930 - DNA, 15 bp, Homo sapiens
acgcagctaagtctt

SEQ ID NO: 1099931 - DNA, 15 bp, Homo sapiens
gacgcagctaagtct

SEQ ID NO: 1099932 - DNA, 15 bp, Homo sapiens
ggacgcagctaagtc

SEQ ID NO: 1099933 - DNA, 15 bp, Homo sapiens
gggacgcagctaagt

SEQ ID NO: 1099934 - DNA, 15 bp, Homo sapiens
agggacgcagctaag

SEQ ID NO: 1099935 - DNA, 15 bp, Homo sapiens
gagggacgcagctaa

SEQ ID NO: 1099936 - DNA, 15 bp, Homo sapiens
ggagggacgcagcta

SEQ ID NO: 1099937 - DNA, 15 bp, Homo sapiens
cggagggacgcagct

SEQ ID NO: 1099938 - DNA, 15 bp, Homo sapiens
gcggagggacgcagc

SEQ ID NO: 1099939 - DNA, 15 bp, Homo sapiens
agcggagggacgcag

SEQ ID NO: 1099940 - DNA, 15 bp, Homo sapiens
cagcggagggacgca

SEQ ID NO: 1099941 - DNA, 15 bp, Homo sapiens
ccagcggagggacgc

SEQ ID NO: 1099942 - DNA, 15 bp, Homo sapiens
cccagcggagggacg

SEQ ID NO: 1099943 - DNA, 15 bp, Homo sapiens
gcccagcggagggac

SEQ ID NO: 1099944 - DNA, 15 bp, Homo sapiens
agcccagcggaggga

SEQ ID NO: 1099945 - DNA, 15 bp, Homo sapiens
aagcccagcggaggg

SEQ ID NO: 1099946 - DNA, 15 bp, Homo sapiens
gaagcccagcggagg

SEQ ID NO: 1099947 - DNA, 15 bp, Homo sapiens
ggaagcccagcggag

SEQ ID NO: 1099948 - DNA, 15 bp, Homo sapiens
gggaagcccagcgga

SEQ ID NO: 1099949 - DNA, 15 bp, Homo sapiens
ggggaagcccagcgg

SEQ ID NO: 1099950 - DNA, 15 bp, Homo sapiens
tggggaagcccagcg

SEQ ID NO: 1099951 - DNA, 15 bp, Homo sapiens
ttggggaagcccagc

SEQ ID NO: 1099952 - DNA, 15 bp, Homo sapiens
attggggaagcccag

SEQ ID NO: 1099953 - DNA, 15 bp, Homo sapiens
tattggggaagccca

SEQ ID NO: 1099954 - DNA, 15 bp, Homo sapiens
gtattggggaagccc

SEQ ID NO: 1099955 - DNA, 15 bp, Homo sapiens
tgtattggggaagcc

SEQ ID NO: 1099956 - DNA, 15 bp, Homo sapiens
gtgtattggggaagc

SEQ ID NO: 1099957 - DNA, 15 bp, Homo sapiens
agtgtattggggaag

SEQ ID NO: 1099958 - DNA, 15 bp, Homo sapiens
cagtgtattggggaa

SEQ ID NO: 1099959 - DNA, 15 bp, Homo sapiens
ccagtgtattgggga

SEQ ID NO: 1099960 - DNA, 15 bp, Homo sapiens
cccagtgtattgggg

SEQ ID NO: 1099961 - DNA, 15 bp, Homo sapiens
gcccagtgtattggg

SEQ ID NO: 1099962 - DNA, 15 bp, Homo sapiens
agcccagtgtattgg

SEQ ID NO: 1099963 - DNA, 15 bp, Homo sapiens
aagcccagtgtattg

SEQ ID NO: 1099964 - DNA, 15 bp, Homo sapiens
caagcccagtgtatt

SEQ ID NO: 1099965 - DNA, 15 bp, Homo sapiens
gcaagcccagtgtat

SEQ ID NO: 1099966 - DNA, 15 bp, Homo sapiens
agcaagcccagtgta

SEQ ID NO: 1099967 - DNA, 15 bp, Homo sapiens
aagcaagcccagtgt

SEQ ID NO: 1099968 - DNA, 15 bp, Homo sapiens
aaagcaagcccagtg

SEQ ID NO: 1099969 - DNA, 15 bp, Homo sapiens
gaaagcaagcccagt

SEQ ID NO: 1099970 - DNA, 15 bp, Homo sapiens
tgaaagcaagcccag

SEQ ID NO: 1099971 - DNA, 15 bp, Homo sapiens
atgaaagcaagccca

SEQ ID NO: 1099972 - DNA, 15 bp, Homo sapiens
aatgaaagcaagccc

SEQ ID NO: 1099973 - DNA, 15 bp, Homo sapiens
taatgaaagcaagcc

SEQ ID NO: 1099974 - DNA, 15 bp, Homo sapiens
ctaatgaaagcaagc

SEQ ID NO: 1099975 - DNA, 15 bp, Homo sapiens
tctaatgaaagcaag

SEQ ID NO: 1099976 - DNA, 15 bp, Homo sapiens
ttctaatgaaagcaa

SEQ ID NO: 1099977 - DNA, 15 bp, Homo sapiens
gttctaatgaaagca

SEQ ID NO: 1099978 - DNA, 15 bp, Homo sapiens
ggttctaatgaaagc

SEQ ID NO: 1099979 - DNA, 15 bp, Homo sapiens
aggttctaatgaaag

SEQ ID NO: 1099980 - DNA, 15 bp, Homo sapiens
caggttctaatgaaa

SEQ ID NO: 1099981 - DNA, 15 bp, Homo sapiens
tcaggttctaatgaa

SEQ ID NO: 1099982 - DNA, 15 bp, Homo sapiens
atcaggttctaatga

SEQ ID NO: 1099983 - DNA, 15 bp, Homo sapiens
gatcaggttctaatg

SEQ ID NO: 1099984 - DNA, 15 bp, Homo sapiens
ggatcaggttctaat

SEQ ID NO: 1099985 - DNA, 15 bp, Homo sapiens
aggatcaggttctaa

SEQ ID NO: 1099986 - DNA, 15 bp, Homo sapiens
aaggatcaggttcta

SEQ ID NO: 1099987 - DNA, 15 bp, Homo sapiens
gaaggatcaggttct

SEQ ID NO: 1099988 - DNA, 15 bp, Homo sapiens
ggaaggatcaggttc

SEQ ID NO: 1099989 - DNA, 15 bp, Homo sapiens
tggaaggatcaggtt

SEQ ID NO: 1099990 - DNA, 15 bp, Homo sapiens
gtggaaggatcaggt

SEQ ID NO: 1099991 - DNA, 15 bp, Homo sapiens
tgtggaaggatcagg

SEQ ID NO: 1099992 - DNA, 15 bp, Homo sapiens
atgtggaaggatcag

SEQ ID NO: 1099993 - DNA, 15 bp, Homo sapiens
aatgtggaaggatca

SEQ ID NO: 1099994 - DNA, 15 bp, Homo sapiens
taatgtggaaggatc

SEQ ID NO: 1099995 - DNA, 15 bp, Homo sapiens
ataatgtggaaggat

SEQ ID NO: 1099996 - DNA, 15 bp, Homo sapiens
cataatgtggaagga

SEQ ID NO: 1099997 - DNA, 15 bp, Homo sapiens
ccataatgtggaagg

SEQ ID NO: 1099998 - DNA, 15 bp, Homo sapiens
accataatgtggaag

SEQ ID NO: 1099999 - DNA, 15 bp, Homo sapiens
aaccataatgtggaa

SEQ ID NO: 1100000 - DNA, 15 bp, Homo sapiens
caaccataatgtgga

SEQ ID NO: 1100001 - DNA, 15 bp, Homo sapiens
acaaccataatgtgg

SEQ ID NO: 1100002 - DNA, 15 bp, Homo sapiens
aacaaccataatgtg

SEQ ID NO: 1100003 - DNA, 15 bp, Homo sapiens
caacaaccataatgt

SEQ ID NO: 1100004 - DNA, 15 bp, Homo sapiens
ccaacaaccataatg

SEQ ID NO: 1100005 - DNA, 15 bp, Homo sapiens
accaacaaccataat

SEQ ID NO: 1100006 - DNA, 15 bp, Homo sapiens
aaccaacaaccataa

SEQ ID NO: 1100007 - DNA, 15 bp, Homo sapiens
aaaccaacaaccata

SEQ ID NO: 1100008 - DNA, 15 bp, Homo sapiens
caaaccaacaaccat

SEQ ID NO: 1100009 - DNA, 15 bp, Homo sapiens
gcaaaccaacaacca

SEQ ID NO: 1100010 - DNA, 15 bp, Homo sapiens
agcaaaccaacaacc

SEQ ID NO: 1100011 - DNA, 15 bp, Homo sapiens
gagcaaaccaacaac

SEQ ID NO: 1100012 - DNA, 15 bp, Homo sapiens
ggagcaaaccaacaa

SEQ ID NO: 1100013 - DNA, 15 bp, Homo sapiens
tggagcaaaccaaca

SEQ ID NO: 1100014 - DNA, 15 bp, Homo sapiens
ttggagcaaaccaac

SEQ ID NO: 1100015 - DNA, 15 bp, Homo sapiens
attggagcaaaccaa

SEQ ID NO: 1100016 - DNA, 15 bp, Homo sapiens
gattggagcaaacca

SEQ ID NO: 1100017 - DNA, 15 bp, Homo sapiens
ggattggagcaaacc

SEQ ID NO: 1100018 - DNA, 15 bp, Homo sapiens
aggattggagcaaac

SEQ ID NO: 1100019 - DNA, 15 bp, Homo sapiens
gaggattggagcaaa

SEQ ID NO: 1100020 - DNA, 15 bp, Homo sapiens
agaggattggagcaa

SEQ ID NO: 1100021 - DNA, 15 bp, Homo sapiens
gagaggattggagca

SEQ ID NO: 1100022 - DNA, 15 bp, Homo sapiens
ggagaggattggagc

SEQ ID NO: 1100023 - DNA, 15 bp, Homo sapiens
gggagaggattggag

SEQ ID NO: 1100024 - DNA, 15 bp, Homo sapiens
agggagaggattgga

SEQ ID NO: 1100025 - DNA, 15 bp, Homo sapiens
gagggagaggattgg

SEQ ID NO: 1100026 - DNA, 15 bp, Homo sapiens
tgagggagaggattg

SEQ ID NO: 1100027 - DNA, 15 bp, Homo sapiens
atgagggagaggatt

SEQ ID NO: 1100028 - DNA, 15 bp, Homo sapiens
aatgagggagaggat

SEQ ID NO: 1100029 - DNA, 15 bp, Homo sapiens
taatgagggagagga

SEQ ID NO: 1100030 - DNA, 15 bp, Homo sapiens
ctaatgagggagagg

SEQ ID NO: 1100031 - DNA, 15 bp, Homo sapiens
gctaatgagggagag

SEQ ID NO: 1100032 - DNA, 15 bp, Homo sapiens
agctaatgagggaga

SEQ ID NO: 1100033 - DNA, 15 bp, Homo sapiens
gagctaatgagggag

SEQ ID NO: 1100034 - DNA, 15 bp, Homo sapiens
agagctaatgaggga

SEQ ID NO: 1100035 - DNA, 15 bp, Homo sapiens
gagagctaatgaggg

SEQ ID NO: 1100036 - DNA, 15 bp, Homo sapiens
tgagagctaatgagg

SEQ ID NO: 1100037 - DNA, 15 bp, Homo sapiens
ttgagagctaatgag

SEQ ID NO: 1100038 - DNA, 15 bp, Homo sapiens
gttgagagctaatga

SEQ ID NO: 1100039 - DNA, 15 bp, Homo sapiens
agttgagagctaatg

SEQ ID NO: 1100040 - DNA, 15 bp, Homo sapiens
aagttgagagctaat

SEQ ID NO: 1100041 - DNA, 15 bp, Homo sapiens
aaagttgagagctaa

SEQ ID NO: 1100042 - DNA, 15 bp, Homo sapiens
gaaagttgagagcta

SEQ ID NO: 1100043 - DNA, 15 bp, Homo sapiens
agaaagttgagagct

SEQ ID NO: 1100044 - DNA, 15 bp, Homo sapiens
aagaaagttgagagc

SEQ ID NO: 1100045 - DNA, 15 bp, Homo sapiens
aaagaaagttgagag

SEQ ID NO: 1100046 - DNA, 15 bp, Homo sapiens
gaaagaaagttgaga

SEQ ID NO: 1100047 - DNA, 15 bp, Homo sapiens
tgaaagaaagttgag

SEQ ID NO: 1100048 - DNA, 15 bp, Homo sapiens
ctgaaagaaagttga

SEQ ID NO: 1100049 - DNA, 15 bp, Homo sapiens
cctgaaagaaagttg

SEQ ID NO: 1100050 - DNA, 15 bp, Homo sapiens
tcctgaaagaaagtt

SEQ ID NO: 1100051 - DNA, 15 bp, Homo sapiens
ttcctgaaagaaagt

SEQ ID NO: 1100052 - DNA, 15 bp, Homo sapiens
cttcctgaaagaaag

SEQ ID NO: 1100053 - DNA, 15 bp, Homo sapiens
tcttcctgaaagaaa

SEQ ID NO: 1100054 - DNA, 15 bp, Homo sapiens
ctcttcctgaaagaa

SEQ ID NO: 1100055 - DNA, 15 bp, Homo sapiens
tctcttcctgaaaga

SEQ ID NO: 1100056 - DNA, 15 bp, Homo sapiens
atctcttcctgaaag

SEQ ID NO: 1100057 - DNA, 15 bp, Homo sapiens
catctcttcctgaaa

SEQ ID NO: 1100058 - DNA, 15 bp, Homo sapiens
acatctcttcctgaa

SEQ ID NO: 1100059 - DNA, 15 bp, Homo sapiens
aacatctcttcctga

SEQ ID NO: 1100060 - DNA, 15 bp, Homo sapiens
aaacatctcttcctg

SEQ ID NO: 1100061 - DNA, 15 bp, Homo sapiens
taaacatctcttcct

SEQ ID NO: 1100062 - DNA, 15 bp, Homo sapiens
ataaacatctcttcc

SEQ ID NO: 1100063 - DNA, 15 bp, Homo sapiens
gataaacatctcttc

SEQ ID NO: 1100064 - DNA, 15 bp, Homo sapiens
agataaacatctctt

SEQ ID NO: 1100065 - DNA, 15 bp, Homo sapiens
aagataaacatctct

SEQ ID NO: 1100066 - DNA, 15 bp, Homo sapiens
aaagataaacatctc

SEQ ID NO: 1100067 - DNA, 15 bp, Homo sapiens
gaaagataaacatct

SEQ ID NO: 1100068 - DNA, 15 bp, Homo sapiens
ggaaagataaacatc

SEQ ID NO: 1100069 - DNA, 15 bp, Homo sapiens
aggaaagataaacat

SEQ ID NO: 1100070 - DNA, 15 bp, Homo sapiens
aaggaaagataaaca

SEQ ID NO: 1100071 - DNA, 15 bp, Homo sapiens
gaaggaaagataaac

SEQ ID NO: 1100072 - DNA, 15 bp, Homo sapiens
agaaggaaagataaa

SEQ ID NO: 1100073 - DNA, 15 bp, Homo sapiens
aagaaggaaagataa

SEQ ID NO: 1100074 - DNA, 15 bp, Homo sapiens
caagaaggaaagata

SEQ ID NO: 1100075 - DNA, 15 bp, Homo sapiens
acaagaaggaaagat

SEQ ID NO: 1100076 - DNA, 15 bp, Homo sapiens
tacaagaaggaaaga

SEQ ID NO: 1100077 - DNA, 15 bp, Homo sapiens
atacaagaaggaaag

SEQ ID NO: 1100078 - DNA, 15 bp, Homo sapiens
aatacaagaaggaaa

SEQ ID NO: 1100079 - DNA, 15 bp, Homo sapiens
gaatacaagaaggaa

SEQ ID NO: 1100080 - DNA, 15 bp, Homo sapiens
ggaatacaagaagga

SEQ ID NO: 1100081 - DNA, 15 bp, Homo sapiens
aggaatacaagaagg

SEQ ID NO: 1100082 - DNA, 15 bp, Homo sapiens
taggaatacaagaag

SEQ ID NO: 1100083 - DNA, 15 bp, Homo sapiens
ctaggaatacaagaa

SEQ ID NO: 1100084 - DNA, 15 bp, Homo sapiens
tctaggaatacaaga

SEQ ID NO: 1100085 - DNA, 15 bp, Homo sapiens
ctctaggaatacaag

SEQ ID NO: 1100086 - DNA, 15 bp, Homo sapiens
actctaggaatacaa

SEQ ID NO: 1100087 - DNA, 15 bp, Homo sapiens
gactctaggaataca

SEQ ID NO: 1100088 - DNA, 15 bp, Homo sapiens
cgactctaggaatac

SEQ ID NO: 1100089 - DNA, 15 bp, Homo sapiens
tcgactctaggaata

SEQ ID NO: 1100090 - DNA, 15 bp, Homo sapiens
gtcgactctaggaat

SEQ ID NO: 1100091 - DNA, 15 bp, Homo sapiens
ggtcgactctaggaa

SEQ ID NO: 1100092 - DNA, 15 bp, Homo sapiens
tggtcgactctagga

SEQ ID NO: 1100093 - DNA, 15 bp, Homo sapiens
ctggtcgactctagg

SEQ ID NO: 1100094 - DNA, 15 bp, Homo sapiens
cctggtcgactctag

SEQ ID NO: 1100095 - DNA, 15 bp, Homo sapiens
gcctggtcgactcta

SEQ ID NO: 1100096 - DNA, 15 bp, Homo sapiens
agcctggtcgactct

SEQ ID NO: 1100097 - DNA, 15 bp, Homo sapiens
gagcctggtcgactc

SEQ ID NO: 1100098 - DNA, 15 bp, Homo sapiens
agagcctggtcgact

SEQ ID NO: 1100099 - DNA, 15 bp, Homo sapiens
cagagcctggtcgac

SEQ ID NO: 1100100 - DNA, 15 bp, Homo sapiens
ccagagcctggtcga

SEQ ID NO: 1100101 - DNA, 15 bp, Homo sapiens
gccagagcctggtcg

SEQ ID NO: 1100102 - DNA, 15 bp, Homo sapiens
tgccagagcctggtc

SEQ ID NO: 1100103 - DNA, 15 bp, Homo sapiens
gtgccagagcctggt

SEQ ID NO: 1100104 - DNA, 15 bp, Homo sapiens
tgtgccagagcctgg

SEQ ID NO: 1100105 - DNA, 15 bp, Homo sapiens
atgtgccagagcctg

SEQ ID NO: 1100106 - DNA, 15 bp, Homo sapiens
aatgtgccagagcct

SEQ ID NO: 1100107 - DNA, 15 bp, Homo sapiens
caatgtgccagagcc

SEQ ID NO: 1100108 - DNA, 15 bp, Homo sapiens
gcaatgtgccagagc

SEQ ID NO: 1100109 - DNA, 15 bp, Homo sapiens
tgcaatgtgccagag

SEQ ID NO: 1100110 - DNA, 15 bp, Homo sapiens
ctgcaatgtgccaga

SEQ ID NO: 1100111 - DNA, 15 bp, Homo sapiens
tctgcaatgtgccag

SEQ ID NO: 1100112 - DNA, 15 bp, Homo sapiens
atctgcaatgtgcca

SEQ ID NO: 1100113 - DNA, 15 bp, Homo sapiens
aatctgcaatgtgcc

SEQ ID NO: 1100114 - DNA, 15 bp, Homo sapiens
gaatctgcaatgtgc

SEQ ID NO: 1100115 - DNA, 15 bp, Homo sapiens
agaatctgcaatgtg

SEQ ID NO: 1100116 - DNA, 15 bp, Homo sapiens
gagaatctgcaatgt

SEQ ID NO: 1100117 - DNA, 15 bp, Homo sapiens
tgagaatctgcaatg

SEQ ID NO: 1100118 - DNA, 15 bp, Homo sapiens
ctgagaatctgcaat

SEQ ID NO: 1100119 - DNA, 15 bp, Homo sapiens
actgagaatctgcaa

SEQ ID NO: 1100120 - DNA, 15 bp, Homo sapiens
tactgagaatctgca

SEQ ID NO: 1100121 - DNA, 15 bp, Homo sapiens
atactgagaatctgc

SEQ ID NO: 1100122 - DNA, 15 bp, Homo sapiens
catactgagaatctg

SEQ ID NO: 1100123 - DNA, 15 bp, Homo sapiens
gcatactgagaatct

SEQ ID NO: 1100124 - DNA, 15 bp, Homo sapiens
tgcatactgagaatc

SEQ ID NO: 1100125 - DNA, 15 bp, Homo sapiens
atgcatactgagaat

SEQ ID NO: 1100126 - DNA, 15 bp, Homo sapiens
aatgcatactgagaa

SEQ ID NO: 1100127 - DNA, 15 bp, Homo sapiens
gaatgcatactgaga

SEQ ID NO: 1100128 - DNA, 15 bp, Homo sapiens
tgaatgcatactgag

SEQ ID NO: 1100129 - DNA, 15 bp, Homo sapiens
ctgaatgcatactga

SEQ ID NO: 1100130 - DNA, 15 bp, Homo sapiens
cctgaatgcatactg

SEQ ID NO: 1100131 - DNA, 15 bp, Homo sapiens
ccctgaatgcatact

SEQ ID NO: 1100132 - DNA, 15 bp, Homo sapiens
tccctgaatgcatac

SEQ ID NO: 1100133 - DNA, 15 bp, Homo sapiens
ttccctgaatgcata

SEQ ID NO: 1100134 - DNA, 15 bp, Homo sapiens
gttccctgaatgcat

SEQ ID NO: 1100135 - DNA, 15 bp, Homo sapiens
tgttccctgaatgca

SEQ ID NO: 1100136 - DNA, 15 bp, Homo sapiens
ttgttccctgaatgc

SEQ ID NO: 1100137 - DNA, 15 bp, Homo sapiens
gttgttccctgaatg

SEQ ID NO: 1100138 - DNA, 15 bp, Homo sapiens
agttgttccctgaat

SEQ ID NO: 1100139 - DNA, 15 bp, Homo sapiens
aagttgttccctgaa

SEQ ID NO: 1100140 - DNA, 15 bp, Homo sapiens
taagttgttccctga

SEQ ID NO: 1100141 - DNA, 15 bp, Homo sapiens
ttaagttgttccctg

SEQ ID NO: 1100142 - DNA, 15 bp, Homo sapiens
attaagttgttccct

SEQ ID NO: 1100143 - DNA, 15 bp, Homo sapiens
gattaagttgttccc

SEQ ID NO: 1100144 - DNA, 15 bp, Homo sapiens
tgattaagttgttcc

SEQ ID NO: 1100145 - DNA, 15 bp, Homo sapiens
ttgattaagttgttc

SEQ ID NO: 1100146 - DNA, 15 bp, Homo sapiens
cttgattaagttgtt

SEQ ID NO: 1100147 - DNA, 15 bp, Homo sapiens
tcttgattaagttgt

SEQ ID NO: 1100148 - DNA, 15 bp, Homo sapiens
gtcttgattaagttg

SEQ ID NO: 1100149 - DNA, 15 bp, Homo sapiens
tgtcttgattaagtt

SEQ ID NO: 1100150 - DNA, 15 bp, Homo sapiens
ttgtcttgattaagt

SEQ ID NO: 1100151 - DNA, 15 bp, Homo sapiens
cttgtcttgattaag

SEQ ID NO: 1100152 - DNA, 15 bp, Homo sapiens
tcttgtcttgattaa

SEQ ID NO: 1100153 - DNA, 15 bp, Homo sapiens
gtcttgtcttgatta

SEQ ID NO: 1100154 - DNA, 15 bp, Homo sapiens
ggtcttgtcttgatt

SEQ ID NO: 1100155 - DNA, 15 bp, Homo sapiens
tggtcttgtcttgat

SEQ ID NO: 1100156 - DNA, 15 bp, Homo sapiens
atggtcttgtcttga

SEQ ID NO: 1100157 - DNA, 15 bp, Homo sapiens
gatggtcttgtcttg

SEQ ID NO: 1100158 - DNA, 15 bp, Homo sapiens
agatggtcttgtctt

SEQ ID NO: 1100159 - DNA, 15 bp, Homo sapiens
cagatggtcttgtct

SEQ ID NO: 1100160 - DNA, 15 bp, Homo sapiens
tcagatggtcttgtc

SEQ ID NO: 1100161 - DNA, 15 bp, Homo sapiens
gtcagatggtcttgt

SEQ ID NO: 1100162 - DNA, 15 bp, Homo sapiens
agtcagatggtcttg

SEQ ID NO: 1100163 - DNA, 15 bp, Homo sapiens
aagtcagatggtctt

SEQ ID NO: 1100164 - DNA, 15 bp, Homo sapiens
gaagtcagatggtct

SEQ ID NO: 1100165 - DNA, 15 bp, Homo sapiens
agaagtcagatggtc

SEQ ID NO: 1100166 - DNA, 15 bp, Homo sapiens
aagaagtcagatggt

SEQ ID NO: 1100167 - DNA, 15 bp, Homo sapiens
caagaagtcagatgg

SEQ ID NO: 1100168 - DNA, 15 bp, Homo sapiens
acaagaagtcagatg

SEQ ID NO: 1100169 - DNA, 15 bp, Homo sapiens
cacaagaagtcagat

SEQ ID NO: 1100170 - DNA, 15 bp, Homo sapiens
tcacaagaagtcaga

SEQ ID NO: 1100171 - DNA, 15 bp, Homo sapiens
ctcacaagaagtcag

SEQ ID NO: 1100172 - DNA, 15 bp, Homo sapiens
actcacaagaagtca

SEQ ID NO: 1100173 - DNA, 15 bp, Homo sapiens
aactcacaagaagtc

SEQ ID NO: 1100174 - DNA, 15 bp, Homo sapiens
taactcacaagaagt

SEQ ID NO: 1100175 - DNA, 15 bp, Homo sapiens
gtaactcacaagaag

SEQ ID NO: 1100176 - DNA, 15 bp, Homo sapiens
tgtaactcacaagaa

SEQ ID NO: 1100177 - DNA, 15 bp, Homo sapiens
atgtaactcacaaga

SEQ ID NO: 1100178 - DNA, 15 bp, Homo sapiens
catgtaactcacaag

SEQ ID NO: 1100179 - DNA, 15 bp, Homo sapiens
gcatgtaactcacaa

SEQ ID NO: 1100180 - DNA, 15 bp, Homo sapiens
agcatgtaactcaca

SEQ ID NO: 1100181 - DNA, 15 bp, Homo sapiens
tagcatgtaactcac

SEQ ID NO: 1100182 - DNA, 15 bp, Homo sapiens
ttagcatgtaactca

SEQ ID NO: 1100183 - DNA, 15 bp, Homo sapiens
cttagcatgtaactc

SEQ ID NO: 1100184 - DNA, 15 bp, Homo sapiens
tcttagcatgtaact

SEQ ID NO: 1100185 - DNA, 15 bp, Homo sapiens
ttcttagcatgtaac

SEQ ID NO: 1100186 - DNA, 15 bp, Homo sapiens
tttcttagcatgtaa

SEQ ID NO: 1100187 - DNA, 15 bp, Homo sapiens
ctttcttagcatgta

SEQ ID NO: 1100188 - DNA, 15 bp, Homo sapiens
tctttcttagcatgt

SEQ ID NO: 1100189 - DNA, 15 bp, Homo sapiens
ttctttcttagcatg

SEQ ID NO: 1100190 - DNA, 15 bp, Homo sapiens
tttctttcttagcat

SEQ ID NO: 1100191 - DNA, 15 bp, Homo sapiens
atttctttcttagca

SEQ ID NO: 1100192 - DNA, 15 bp, Homo sapiens
catttctttcttagc

SEQ ID NO: 1100193 - DNA, 15 bp, Homo sapiens
acatttctttcttag

SEQ ID NO: 1100194 - DNA, 15 bp, Homo sapiens
gacatttctttctta

SEQ ID NO: 1100195 - DNA, 15 bp, Homo sapiens
cgacatttctttctt

SEQ ID NO: 1100196 - DNA, 15 bp, Homo sapiens
tcgacatttctttct

SEQ ID NO: 1100197 - DNA, 15 bp, Homo sapiens
gtcgacatttctttc

SEQ ID NO: 1100198 - DNA, 15 bp, Homo sapiens
tgtcgacatttcttt

SEQ ID NO: 1100199 - DNA, 15 bp, Homo sapiens
gtgtcgacatttctt

SEQ ID NO: 1100200 - DNA, 15 bp, Homo sapiens
ggtgtcgacatttct

SEQ ID NO: 1100201 - DNA, 15 bp, Homo sapiens
tggtgtcgacatttc

SEQ ID NO: 1100202 - DNA, 15 bp, Homo sapiens
ttggtgtcgacattt

SEQ ID NO: 1100203 - DNA, 15 bp, Homo sapiens
attggtgtcgacatt

SEQ ID NO: 1100204 - DNA, 15 bp, Homo sapiens
tattggtgtcgacat

SEQ ID NO: 1100205 - DNA, 15 bp, Homo sapiens
ctattggtgtcgaca

SEQ ID NO: 1100206 - DNA, 15 bp, Homo sapiens
gctattggtgtcgac

SEQ ID NO: 1100207 - DNA, 15 bp, Homo sapiens
ggctattggtgtcga

SEQ ID NO: 1100208 - DNA, 15 bp, Homo sapiens
gggctattggtgtcg

SEQ ID NO: 1100209 - DNA, 15 bp, Homo sapiens
agggctattggtgtc

SEQ ID NO: 1100210 - DNA, 15 bp, Homo sapiens
gagggctattggtgt

SEQ ID NO: 1100211 - DNA, 15 bp, Homo sapiens
tgagggctattggtg

SEQ ID NO: 1100212 - DNA, 15 bp, Homo sapiens
gtgagggctattggt

SEQ ID NO: 1100213 - DNA, 15 bp, Homo sapiens
tgtgagggctattgg

SEQ ID NO: 1100214 - DNA, 15 bp, Homo sapiens
ttgtgagggctattg

SEQ ID NO: 1100215 - DNA, 15 bp, Homo sapiens
attgtgagggctatt

SEQ ID NO: 1100216 - DNA, 15 bp, Homo sapiens
cattgtgagggctat

SEQ ID NO: 1100217 - DNA, 15 bp, Homo sapiens
tcattgtgagggcta

SEQ ID NO: 1100218 - DNA, 15 bp, Homo sapiens
atcattgtgagggct

SEQ ID NO: 1100219 - DNA, 15 bp, Homo sapiens
tatcattgtgagggc

SEQ ID NO: 1100220 - DNA, 15 bp, Homo sapiens
ctatcattgtgaggg

SEQ ID NO: 1100221 - DNA, 15 bp, Homo sapiens
cctatcattgtgagg

SEQ ID NO: 1100222 - DNA, 15 bp, Homo sapiens
tcctatcattgtgag

SEQ ID NO: 1100223 - DNA, 15 bp, Homo sapiens
ttcctatcattgtga

SEQ ID NO: 1100224 - DNA, 15 bp, Homo sapiens
gttcctatcattgtg

SEQ ID NO: 1100225 - DNA, 15 bp, Homo sapiens
tgttcctatcattgt

SEQ ID NO: 1100226 - DNA, 15 bp, Homo sapiens
ctgttcctatcattg

SEQ ID NO: 1100227 - DNA, 15 bp, Homo sapiens
cctgttcctatcatt

SEQ ID NO: 1100228 - DNA, 15 bp, Homo sapiens
tcctgttcctatcat

SEQ ID NO: 1100229 - DNA, 15 bp, Homo sapiens
ctcctgttcctatca

SEQ ID NO: 1100230 - DNA, 15 bp, Homo sapiens
cctcctgttcctatc

SEQ ID NO: 1100231 - DNA, 15 bp, Homo sapiens
acctcctgttcctat

SEQ ID NO: 1100232 - DNA, 15 bp, Homo sapiens
aacctcctgttccta

SEQ ID NO: 1100233 - DNA, 15 bp, Homo sapiens
taacctcctgttcct

SEQ ID NO: 1100234 - DNA, 15 bp, Homo sapiens
ttaacctcctgttcc

SEQ ID NO: 1100235 - DNA, 15 bp, Homo sapiens
tttaacctcctgttc

SEQ ID NO: 1100236 - DNA, 15 bp, Homo sapiens
ctttaacctcctgtt

SEQ ID NO: 1100237 - DNA, 15 bp, Homo sapiens
tctttaacctcctgt

SEQ ID NO: 1100238 - DNA, 15 bp, Homo sapiens
ttctttaacctcctg

SEQ ID NO: 1100239 - DNA, 15 bp, Homo sapiens
tttctttaacctcct

SEQ ID NO: 1100240 - DNA, 15 bp, Homo sapiens
ttttctttaacctcc

SEQ ID NO: 1100241 - DNA, 15 bp, Homo sapiens
cttttctttaacctc

SEQ ID NO: 1100242 - DNA, 15 bp, Homo sapiens
ccttttctttaacct

SEQ ID NO: 1100243 - DNA, 15 bp, Homo sapiens
tccttttctttaacc

SEQ ID NO: 1100244 - DNA, 15 bp, Homo sapiens
ttccttttctttaac

SEQ ID NO: 1100245 - DNA, 15 bp, Homo sapiens
tttccttttctttaa

SEQ ID NO: 1100246 - DNA, 15 bp, Homo sapiens
atttccttttcttta

SEQ ID NO: 1100247 - DNA, 15 bp, Homo sapiens
tatttccttttcttt

SEQ ID NO: 1100248 - DNA, 15 bp, Homo sapiens
ctatttccttttctt

SEQ ID NO: 1100249 - DNA, 15 bp, Homo sapiens
tctatttccttttct

SEQ ID NO: 1100250 - DNA, 15 bp, Homo sapiens
atctatttccttttc

SEQ ID NO: 1100251 - DNA, 15 bp, Homo sapiens
catctatttcctttt

SEQ ID NO: 1100252 - DNA, 15 bp, Homo sapiens
gcatctatttccttt

SEQ ID NO: 1100253 - DNA, 15 bp, Homo sapiens
tgcatctatttcctt

SEQ ID NO: 1100254 - DNA, 15 bp, Homo sapiens
ttgcatctatttcct

SEQ ID NO: 1100255 - DNA, 15 bp, Homo sapiens
tttgcatctatttcc

SEQ ID NO: 1100256 - DNA, 15 bp, Homo sapiens
atttgcatctatttc

SEQ ID NO: 1100257 - DNA, 15 bp, Homo sapiens
tatttgcatctattt

SEQ ID NO: 1100258 - DNA, 15 bp, Homo sapiens
ctatttgcatctatt

SEQ ID NO: 1100259 - DNA, 15 bp, Homo sapiens
gctatttgcatctat

SEQ ID NO: 1100260 - DNA, 15 bp, Homo sapiens
tgctatttgcatcta

SEQ ID NO: 1100261 - DNA, 15 bp, Homo sapiens
ttgctatttgcatct

SEQ ID NO: 1100262 - DNA, 15 bp, Homo sapiens
attgctatttgcatc

SEQ ID NO: 1100263 - DNA, 15 bp, Homo sapiens
tattgctatttgcat

SEQ ID NO: 1100264 - DNA, 15 bp, Homo sapiens
atattgctatttgca

SEQ ID NO: 1100265 - DNA, 15 bp, Homo sapiens
tatattgctatttgc

SEQ ID NO: 1100266 - DNA, 15 bp, Homo sapiens
ttatattgctatttg

SEQ ID NO: 1100267 - DNA, 15 bp, Homo sapiens
cttatattgctattt

SEQ ID NO: 1100268 - DNA, 15 bp, Homo sapiens
acttatattgctatt

SEQ ID NO: 1100269 - DNA, 15 bp, Homo sapiens
cacttatattgctat

SEQ ID NO: 1100270 - DNA, 15 bp, Homo sapiens
gcacttatattgcta

SEQ ID NO: 1100271 - DNA, 15 bp, Homo sapiens
agcacttatattgct

SEQ ID NO: 1100272 - DNA, 15 bp, Homo sapiens
aagcacttatattgc

SEQ ID NO: 1100273 - DNA, 15 bp, Homo sapiens
aaagcacttatattg

SEQ ID NO: 1100274 - DNA, 15 bp, Homo sapiens
taaagcacttatatt

SEQ ID NO: 1100275 - DNA, 15 bp, Homo sapiens
ttaaagcacttatat

SEQ ID NO: 1100276 - DNA, 15 bp, Homo sapiens
gttaaagcacttata

SEQ ID NO: 1100277 - DNA, 15 bp, Homo sapiens
tgttaaagcacttat

SEQ ID NO: 1100278 - DNA, 15 bp, Homo sapiens
ttgttaaagcactta

SEQ ID NO: 1100279 - DNA, 15 bp, Homo sapiens
tttgttaaagcactt

SEQ ID NO: 1100280 - DNA, 15 bp, Homo sapiens
atttgttaaagcact

SEQ ID NO: 1100281 - DNA, 15 bp, Homo sapiens
gatttgttaaagcac

SEQ ID NO: 1100282 - DNA, 15 bp, Homo sapiens
agatttgttaaagca

SEQ ID NO: 1100283 - DNA, 15 bp, Homo sapiens
tagatttgttaaagc

SEQ ID NO: 1100284 - DNA, 15 bp, Homo sapiens
atagatttgttaaag

SEQ ID NO: 1100285 - DNA, 15 bp, Homo sapiens
tatagatttgttaaa

SEQ ID NO: 1100286 - DNA, 15 bp, Homo sapiens
gtatagatttgttaa

SEQ ID NO: 1100287 - DNA, 15 bp, Homo sapiens
tgtatagatttgtta

SEQ ID NO: 1100288 - DNA, 15 bp, Homo sapiens
ctgtatagatttgtt

SEQ ID NO: 1100289 - DNA, 15 bp, Homo sapiens
cctgtatagatttgt

SEQ ID NO: 1100290 - DNA, 15 bp, Homo sapiens
tcctgtatagatttg

SEQ ID NO: 1100291 - DNA, 15 bp, Homo sapiens
ctcctgtatagattt

SEQ ID NO: 1100292 - DNA, 15 bp, Homo sapiens
cctcctgtatagatt

SEQ ID NO: 1100293 - DNA, 15 bp, Homo sapiens
tcctcctgtatagat

SEQ ID NO: 1100294 - DNA, 15 bp, Homo sapiens
gtcctcctgtataga

SEQ ID NO: 1100295 - DNA, 15 bp, Homo sapiens
tgtcctcctgtatag

SEQ ID NO: 1100296 - DNA, 15 bp, Homo sapiens
ttgtcctcctgtata

SEQ ID NO: 1100297 - DNA, 15 bp, Homo sapiens
gttgtcctcctgtat

SEQ ID NO: 1100298 - DNA, 15 bp, Homo sapiens
ggttgtcctcctgta

SEQ ID NO: 1100299 - DNA, 15 bp, Homo sapiens
tggttgtcctcctgt

SEQ ID NO: 1100300 - DNA, 15 bp, Homo sapiens
atggttgtcctcctg

SEQ ID NO: 1100301 - DNA, 15 bp, Homo sapiens
gatggttgtcctcct

SEQ ID NO: 1100302 - DNA, 15 bp, Homo sapiens
tgatggttgtcctcc

SEQ ID NO: 1100303 - DNA, 15 bp, Homo sapiens
atgatggttgtcctc

SEQ ID NO: 1100304 - DNA, 15 bp, Homo sapiens
tatgatggttgtcct

SEQ ID NO: 1100305 - DNA, 15 bp, Homo sapiens
atatgatggttgtcc

SEQ ID NO: 1100306 - DNA, 15 bp, Homo sapiens
aatatgatggttgtc

SEQ ID NO: 1100307 - DNA, 15 bp, Homo sapiens
gaatatgatggttgt

SEQ ID NO: 1100308 - DNA, 15 bp, Homo sapiens
tgaatatgatggttg

SEQ ID NO: 1100309 - DNA, 15 bp, Homo sapiens
ttgaatatgatggtt

SEQ ID NO: 1100310 - DNA, 15 bp, Homo sapiens
tttgaatatgatggt

SEQ ID NO: 1100311 - DNA, 15 bp, Homo sapiens
atttgaatatgatgg

SEQ ID NO: 1100312 - DNA, 15 bp, Homo sapiens
aatttgaatatgatg

SEQ ID NO: 1100313 - DNA, 15 bp, Homo sapiens
aaatttgaatatgat

SEQ ID NO: 1100314 - DNA, 15 bp, Homo sapiens
aaaatttgaatatga

SEQ ID NO: 1100315 - DNA, 15 bp, Homo sapiens
gaaaatttgaatatg

SEQ ID NO: 1100316 - DNA, 15 bp, Homo sapiens
tgaaaatttgaatat

SEQ ID NO: 1100317 - DNA, 15 bp, Homo sapiens
ttgaaaatttgaata

SEQ ID NO: 1100318 - DNA, 15 bp, Homo sapiens
tttgaaaatttgaat

SEQ ID NO: 1100319 - DNA, 15 bp, Homo sapiens
gtttgaaaatttgaa

SEQ ID NO: 1100320 - DNA, 15 bp, Homo sapiens
tgtttgaaaatttga

SEQ ID NO: 1100321 - DNA, 15 bp, Homo sapiens
atgtttgaaaatttg

SEQ ID NO: 1100322 - DNA, 15 bp, Homo sapiens
aatgtttgaaaattt

SEQ ID NO: 1100323 - DNA, 15 bp, Homo sapiens
gaatgtttgaaaatt

SEQ ID NO: 1100324 - DNA, 15 bp, Homo sapiens
agaatgtttgaaaat

SEQ ID NO: 1100325 - DNA, 15 bp, Homo sapiens
aagaatgtttgaaaa

SEQ ID NO: 1100326 - DNA, 15 bp, Homo sapiens
taagaatgtttgaaa

SEQ ID NO: 1100327 - DNA, 15 bp, Homo sapiens
ctaagaatgtttgaa

SEQ ID NO: 1100328 - DNA, 15 bp, Homo sapiens
actaagaatgtttga

SEQ ID NO: 1100329 - DNA, 15 bp, Homo sapiens
aactaagaatgtttg

SEQ ID NO: 1100330 - DNA, 15 bp, Homo sapiens
gaactaagaatgttt

SEQ ID NO: 1100331 - DNA, 15 bp, Homo sapiens
agaactaagaatgtt

SEQ ID NO: 1100332 - DNA, 15 bp, Homo sapiens
cagaactaagaatgt

SEQ ID NO: 1100333 - DNA, 15 bp, Homo sapiens
gcagaactaagaatg

SEQ ID NO: 1100334 - DNA, 15 bp, Homo sapiens
agcagaactaagaat

SEQ ID NO: 1100335 - DNA, 15 bp, Homo sapiens
gagcagaactaagaa

SEQ ID NO: 1100336 - DNA, 15 bp, Homo sapiens
agagcagaactaaga

SEQ ID NO: 1100337 - DNA, 15 bp, Homo sapiens
aagagcagaactaag

SEQ ID NO: 1100338 - DNA, 15 bp, Homo sapiens
aaagagcagaactaa

SEQ ID NO: 1100339 - DNA, 15 bp, Homo sapiens
aaaagagcagaacta

SEQ ID NO: 1100340 - DNA, 15 bp, Homo sapiens
caaaagagcagaact

SEQ ID NO: 1100341 - DNA, 15 bp, Homo sapiens
acaaaagagcagaac

SEQ ID NO: 1100342 - DNA, 15 bp, Homo sapiens
cacaaaagagcagaa

SEQ ID NO: 1100343 - DNA, 15 bp, Homo sapiens
ccacaaaagagcaga

SEQ ID NO: 1100344 - DNA, 15 bp, Homo sapiens
cccacaaaagagcag

SEQ ID NO: 1100345 - DNA, 15 bp, Homo sapiens
acccacaaaagagca

SEQ ID NO: 1100346 - DNA, 15 bp, Homo sapiens
tacccacaaaagagc

SEQ ID NO: 1100347 - DNA, 15 bp, Homo sapiens
ttacccacaaaagag

SEQ ID NO: 1100348 - DNA, 15 bp, Homo sapiens
attacccacaaaaga

SEQ ID NO: 1100349 - DNA, 15 bp, Homo sapiens
cattacccacaaaag

SEQ ID NO: 1100350 - DNA, 15 bp, Homo sapiens
ccattacccacaaaa

SEQ ID NO: 1100351 - DNA, 15 bp, Homo sapiens
accattacccacaaa

SEQ ID NO: 1100352 - DNA, 15 bp, Homo sapiens
aaccattacccacaa

SEQ ID NO: 1100353 - DNA, 15 bp, Homo sapiens
aaaccattacccaca

SEQ ID NO: 1100354 - DNA, 15 bp, Homo sapiens
aaaaccattacccac

SEQ ID NO: 1100355 - DNA, 15 bp, Homo sapiens
aaaaaccattaccca

SEQ ID NO: 1100356 - DNA, 15 bp, Homo sapiens
aaaaaaccattaccc

SEQ ID NO: 1100357 - DNA, 15 bp, Homo sapiens
aaaaaaaccattacc

SEQ ID NO: 1100358 - DNA, 15 bp, Homo sapiens
aaaaaaaaccattac

SEQ ID NO: 1100359 - DNA, 15 bp, Homo sapiens
aaaaaaaaaccatta

SEQ ID NO: 1100360 - DNA, 15 bp, Homo sapiens
aaaaaaaaaaccatt

SEQ ID NO: 1100361 - DNA, 15 bp, Homo sapiens
aaaaaaaaaaaccat

SEQ ID NO: 1100362 - DNA, 15 bp, Homo sapiens
gaaaaaaaaaaacca

SEQ ID NO: 1100363 - DNA, 15 bp, Homo sapiens
ggaaaaaaaaaaacc

SEQ ID NO: 1100364 - DNA, 15 bp, Homo sapiens
gaagaggaaaaaaaa

SEQ ID NO: 1100365 - DNA, 15 bp, Homo sapiens
ggaagaggaaaaaaa

SEQ ID NO: 1100366 - DNA, 15 bp, Homo sapiens
tggaagaggaaaaaa

SEQ ID NO: 1100367 - DNA, 15 bp, Homo sapiens
ctggaagaggaaaaa

SEQ ID NO: 1100368 - DNA, 15 bp, Homo sapiens
cctggaagaggaaaa

SEQ ID NO: 1100369 - DNA, 15 bp, Homo sapiens
tcctggaagaggaaa

SEQ ID NO: 1100370 - DNA, 15 bp, Homo sapiens
ctcctggaagaggaa

SEQ ID NO: 1100371 - DNA, 15 bp, Homo sapiens
tctcctggaagagga

SEQ ID NO: 1100372 - DNA, 15 bp, Homo sapiens
ttctcctggaagagg

SEQ ID NO: 1100373 - DNA, 15 bp, Homo sapiens
cttctcctggaagag

SEQ ID NO: 1100374 - DNA, 15 bp, Homo sapiens
tcttctcctggaaga

SEQ ID NO: 1100375 - DNA, 15 bp, Homo sapiens
ttcttctcctggaag

SEQ ID NO: 1100376 - DNA, 15 bp, Homo sapiens
tttcttctcctggaa

SEQ ID NO: 1100377 - DNA, 15 bp, Homo sapiens
ttttcttctcctgga

SEQ ID NO: 1100378 - DNA, 15 bp, Homo sapiens
cttttcttctcctgg

SEQ ID NO: 1100379 - DNA, 15 bp, Homo sapiens
tcttttcttctcctg

SEQ ID NO: 1100380 - DNA, 15 bp, Homo sapiens
ctcttttcttctcct

SEQ ID NO: 1100381 - DNA, 15 bp, Homo sapiens
cctcttttcttctcc

SEQ ID NO: 1100382 - DNA, 15 bp, Homo sapiens
gcctcttttcttctc

SEQ ID NO: 1100383 - DNA, 15 bp, Homo sapiens
tgcctcttttcttct

SEQ ID NO: 1100384 - DNA, 15 bp, Homo sapiens
atgcctcttttcttc

SEQ ID NO: 1100385 - DNA, 15 bp, Homo sapiens
tatgcctcttttctt

SEQ ID NO: 1100386 - DNA, 15 bp, Homo sapiens
atatgcctcttttct

SEQ ID NO: 1100387 - DNA, 15 bp, Homo sapiens
aatatgcctcttttc

SEQ ID NO: 1100388 - DNA, 15 bp, Homo sapiens
taatatgcctctttt

SEQ ID NO: 1100389 - DNA, 15 bp, Homo sapiens
ataatatgcctcttt

SEQ ID NO: 1100390 - DNA, 15 bp, Homo sapiens
tataatatgcctctt

SEQ ID NO: 1100391 - DNA, 15 bp, Homo sapiens
ctataatatgcctct

SEQ ID NO: 1100392 - DNA, 15 bp, Homo sapiens
tctataatatgcctc

SEQ ID NO: 1100393 - DNA, 15 bp, Homo sapiens
ttctataatatgcct

SEQ ID NO: 1100394 - DNA, 15 bp, Homo sapiens
tttctataatatgcc

SEQ ID NO: 1100395 - DNA, 15 bp, Homo sapiens
atttctataatatgc

SEQ ID NO: 1100396 - DNA, 15 bp, Homo sapiens
aatttctataatatg

SEQ ID NO: 1100397 - DNA, 15 bp, Homo sapiens
gaatttctataatat

SEQ ID NO: 1100398 - DNA, 15 bp, Homo sapiens
ggaatttctataata

SEQ ID NO: 1100399 - DNA, 15 bp, Homo sapiens
aggaatttctataat

SEQ ID NO: 1100400 - DNA, 15 bp, Homo sapiens
gaggaatttctataa

SEQ ID NO: 1100401 - DNA, 15 bp, Homo sapiens
ggaggaatttctata

SEQ ID NO: 1100402 - DNA, 15 bp, Homo sapiens
aggaggaatttctat

SEQ ID NO: 1100403 - DNA, 15 bp, Homo sapiens
gaggaggaatttcta

SEQ ID NO: 1100404 - DNA, 15 bp, Homo sapiens
ggaggaggaatttct

SEQ ID NO: 1100405 - DNA, 15 bp, Homo sapiens
gggaggaggaatttc

SEQ ID NO: 1100406 - DNA, 15 bp, Homo sapiens
ggggaggaggaattt

SEQ ID NO: 1100407 - DNA, 15 bp, Homo sapiens
gggggaggaggaatt

SEQ ID NO: 1100408 - DNA, 15 bp, Homo sapiens
tgggggaggaggaat

SEQ ID NO: 1100409 - DNA, 15 bp, Homo sapiens
ctgggggaggaggaa

SEQ ID NO: 1100410 - DNA, 15 bp, Homo sapiens
gctgggggaggagga

SEQ ID NO: 1100411 - DNA, 15 bp, Homo sapiens
tgctgggggaggagg

SEQ ID NO: 1100412 - DNA, 15 bp, Homo sapiens
atgctgggggaggag

SEQ ID NO: 1100413 - DNA, 15 bp, Homo sapiens
aatgctgggggagga

SEQ ID NO: 1100414 - DNA, 15 bp, Homo sapiens
taatgctgggggagg

SEQ ID NO: 1100415 - DNA, 15 bp, Homo sapiens
gtaatgctgggggag

SEQ ID NO: 1100416 - DNA, 15 bp, Homo sapiens
agtaatgctggggga

SEQ ID NO: 1100417 - DNA, 15 bp, Homo sapiens
aagtaatgctggggg

SEQ ID NO: 1100418 - DNA, 15 bp, Homo sapiens
caagtaatgctgggg

SEQ ID NO: 1100419 - DNA, 15 bp, Homo sapiens
acaagtaatgctggg

SEQ ID NO: 1100420 - DNA, 15 bp, Homo sapiens
gacaagtaatgctgg

SEQ ID NO: 1100421 - DNA, 15 bp, Homo sapiens
tgacaagtaatgctg

SEQ ID NO: 1100422 - DNA, 15 bp, Homo sapiens
gtgacaagtaatgct

SEQ ID NO: 1100423 - DNA, 15 bp, Homo sapiens
tgtgacaagtaatgc

SEQ ID NO: 1100424 - DNA, 15 bp, Homo sapiens
ctgtgacaagtaatg

SEQ ID NO: 1100425 - DNA, 15 bp, Homo sapiens
tctgtgacaagtaat

SEQ ID NO: 1100426 - DNA, 15 bp, Homo sapiens
ttctgtgacaagtaa

SEQ ID NO: 1100427 - DNA, 15 bp, Homo sapiens
attctgtgacaagta

SEQ ID NO: 1100428 - DNA, 15 bp, Homo sapiens
aattctgtgacaagt

SEQ ID NO: 1100429 - DNA, 15 bp, Homo sapiens
caattctgtgacaag

SEQ ID NO: 1100430 - DNA, 15 bp, Homo sapiens
acaattctgtgacaa

SEQ ID NO: 1100431 - DNA, 15 bp, Homo sapiens
tacaattctgtgaca

SEQ ID NO: 1100432 - DNA, 15 bp, Homo sapiens
ttacaattctgtgac

SEQ ID NO: 1100433 - DNA, 15 bp, Homo sapiens
attacaattctgtga

SEQ ID NO: 1100434 - DNA, 15 bp, Homo sapiens
aattacaattctgtg

SEQ ID NO: 1100435 - DNA, 15 bp, Homo sapiens
caattacaattctgt

SEQ ID NO: 1100436 - DNA, 15 bp, Homo sapiens
ccaattacaattctg

SEQ ID NO: 1100437 - DNA, 15 bp, Homo sapiens
tccaattacaattct

SEQ ID NO: 1100438 - DNA, 15 bp, Homo sapiens
ttccaattacaattc

SEQ ID NO: 1100439 - DNA, 15 bp, Homo sapiens
cttccaattacaatt

SEQ ID NO: 1100440 - DNA, 15 bp, Homo sapiens
acttccaattacaat

SEQ ID NO: 1100441 - DNA, 15 bp, Homo sapiens
cacttccaattacaa

SEQ ID NO: 1100442 - DNA, 15 bp, Homo sapiens
tcacttccaattaca

SEQ ID NO: 1100443 - DNA, 15 bp, Homo sapiens
atcacttccaattac

SEQ ID NO: 1100444 - DNA, 15 bp, Homo sapiens
aatcacttccaatta

SEQ ID NO: 1100445 - DNA, 15 bp, Homo sapiens
aaatcacttccaatt

SEQ ID NO: 1100446 - DNA, 15 bp, Homo sapiens
gaaatcacttccaat

SEQ ID NO: 1100447 - DNA, 15 bp, Homo sapiens
ggaaatcacttccaa

SEQ ID NO: 1100448 - DNA, 15 bp, Homo sapiens
gggaaatcacttcca

SEQ ID NO: 1100449 - DNA, 15 bp, Homo sapiens
agggaaatcacttcc

SEQ ID NO: 1100450 - DNA, 15 bp, Homo sapiens
cagggaaatcacttc

SEQ ID NO: 1100451 - DNA, 15 bp, Homo sapiens
tcagggaaatcactt

SEQ ID NO: 1100452 - DNA, 15 bp, Homo sapiens
gtcagggaaatcact

SEQ ID NO: 1100453 - DNA, 15 bp, Homo sapiens
agtcagggaaatcac

SEQ ID NO: 1100454 - DNA, 15 bp, Homo sapiens
tagtcagggaaatca

SEQ ID NO: 1100455 - DNA, 15 bp, Homo sapiens
ttagtcagggaaatc

SEQ ID NO: 1100456 - DNA, 15 bp, Homo sapiens
cttagtcagggaaat

SEQ ID NO: 1100457 - DNA, 15 bp, Homo sapiens
acttagtcagggaaa

SEQ ID NO: 1100458 - DNA, 15 bp, Homo sapiens
aacttagtcagggaa

SEQ ID NO: 1100459 - DNA, 15 bp, Homo sapiens
taacttagtcaggga

SEQ ID NO: 1100460 - DNA, 15 bp, Homo sapiens
ataacttagtcaggg

SEQ ID NO: 1100461 - DNA, 15 bp, Homo sapiens
aataacttagtcagg

SEQ ID NO: 1100462 - DNA, 15 bp, Homo sapiens
aaataacttagtcag

SEQ ID NO: 1100463 - DNA, 15 bp, Homo sapiens
aaaataacttagtca

SEQ ID NO: 1100464 - DNA, 15 bp, Homo sapiens
caaaataacttagtc

SEQ ID NO: 1100465 - DNA, 15 bp, Homo sapiens
ccaaaataacttagt

SEQ ID NO: 1100466 - DNA, 15 bp, Homo sapiens
gccaaaataacttag

SEQ ID NO: 1100467 - DNA, 15 bp, Homo sapiens
agccaaaataactta

SEQ ID NO: 1100468 - DNA, 15 bp, Homo sapiens
cagccaaaataactt

SEQ ID NO: 1100469 - DNA, 15 bp, Homo sapiens
acagccaaaataact

SEQ ID NO: 1100470 - DNA, 15 bp, Homo sapiens
gacagccaaaataac

SEQ ID NO: 1100471 - DNA, 15 bp, Homo sapiens
agacagccaaaataa

SEQ ID NO: 1100472 - DNA, 15 bp, Homo sapiens
cagacagccaaaata

SEQ ID NO: 1100473 - DNA, 15 bp, Homo sapiens
acagacagccaaaat

SEQ ID NO: 1100474 - DNA, 15 bp, Homo sapiens
aacagacagccaaaa

SEQ ID NO: 1100475 - DNA, 15 bp, Homo sapiens
taacagacagccaaa

SEQ ID NO: 1100476 - DNA, 15 bp, Homo sapiens
ataacagacagccaa

SEQ ID NO: 1100477 - DNA, 15 bp, Homo sapiens
aataacagacagcca

SEQ ID NO: 1100478 - DNA, 15 bp, Homo sapiens
aaataacagacagcc

SEQ ID NO: 1100479 - DNA, 15 bp, Homo sapiens
aaaataacagacagc

SEQ ID NO: 1100480 - DNA, 15 bp, Homo sapiens
gaaaataacagacag

SEQ ID NO: 1100481 - DNA, 15 bp, Homo sapiens
agaaaataacagaca

SEQ ID NO: 1100482 - DNA, 15 bp, Homo sapiens
gagaaaataacagac

SEQ ID NO: 1100483 - DNA, 15 bp, Homo sapiens
agagaaaataacaga

SEQ ID NO: 1100484 - DNA, 15 bp, Homo sapiens
gagagaaaataacag

SEQ ID NO: 1100485 - DNA, 15 bp, Homo sapiens
agagagaaaataaca

SEQ ID NO: 1100486 - DNA, 15 bp, Homo sapiens
aagagagaaaataac

SEQ ID NO: 1100487 - DNA, 15 bp, Homo sapiens
gaagagagaaaataa

SEQ ID NO: 1100488 - DNA, 15 bp, Homo sapiens
ggaagagagaaaata

SEQ ID NO: 1100489 - DNA, 15 bp, Homo sapiens
aggaagagagaaaat

SEQ ID NO: 1100490 - DNA, 15 bp, Homo sapiens
gaggaagagagaaaa

SEQ ID NO: 1100491 - DNA, 15 bp, Homo sapiens
ggaggaagagagaaa

SEQ ID NO: 1100492 - DNA, 15 bp, Homo sapiens
aggaggaagagagaa

SEQ ID NO: 1100493 - DNA, 15 bp, Homo sapiens
aaggaggaagagaga

SEQ ID NO: 1100494 - DNA, 15 bp, Homo sapiens
caaggaggaagagag

SEQ ID NO: 1100495 - DNA, 15 bp, Homo sapiens
gcaaggaggaagaga

SEQ ID NO: 1100496 - DNA, 15 bp, Homo sapiens
agcaaggaggaagag

SEQ ID NO: 1100497 - DNA, 15 bp, Homo sapiens
gagcaaggaggaaga

SEQ ID NO: 1100498 - DNA, 15 bp, Homo sapiens
agagcaaggaggaag

SEQ ID NO: 1100499 - DNA, 15 bp, Homo sapiens
aagagcaaggaggaa

SEQ ID NO: 1100500 - DNA, 15 bp, Homo sapiens
gaagagcaaggagga

SEQ ID NO: 1100501 - DNA, 15 bp, Homo sapiens
ggaagagcaaggagg

SEQ ID NO: 1100502 - DNA, 15 bp, Homo sapiens
gggaagagcaaggag

SEQ ID NO: 1100503 - DNA, 15 bp, Homo sapiens
agggaagagcaagga

SEQ ID NO: 1100504 - DNA, 15 bp, Homo sapiens
gagggaagagcaagg

SEQ ID NO: 1100505 - DNA, 15 bp, Homo sapiens
tgagggaagagcaag

SEQ ID NO: 1100506 - DNA, 15 bp, Homo sapiens
ctgagggaagagcaa

SEQ ID NO: 1100507 - DNA, 15 bp, Homo sapiens
gctgagggaagagca

SEQ ID NO: 1100508 - DNA, 15 bp, Homo sapiens
agctgagggaagagc

SEQ ID NO: 1100509 - DNA, 15 bp, Homo sapiens
cagctgagggaagag

SEQ ID NO: 1100510 - DNA, 15 bp, Homo sapiens
ccagctgagggaaga

SEQ ID NO: 1100511 - DNA, 15 bp, Homo sapiens
gccagctgagggaag

SEQ ID NO: 1100512 - DNA, 15 bp, Homo sapiens
ggccagctgagggaa

SEQ ID NO: 1100513 - DNA, 15 bp, Homo sapiens
tggccagctgaggga

SEQ ID NO: 1100514 - DNA, 15 bp, Homo sapiens
atggccagctgaggg

SEQ ID NO: 1100515 - DNA, 15 bp, Homo sapiens
gatggccagctgagg

SEQ ID NO: 1100516 - DNA, 15 bp, Homo sapiens
ggatggccagctgag

SEQ ID NO: 1100517 - DNA, 15 bp, Homo sapiens
aggatggccagctga

SEQ ID NO: 1100518 - DNA, 15 bp, Homo sapiens
caggatggccagctg

SEQ ID NO: 1100519 - DNA, 15 bp, Homo sapiens
acaggatggccagct

SEQ ID NO: 1100520 - DNA, 15 bp, Homo sapiens
cacaggatggccagc

SEQ ID NO: 1100521 - DNA, 15 bp, Homo sapiens
acacaggatggccag

SEQ ID NO: 1100522 - DNA, 15 bp, Homo sapiens
cacacaggatggcca

SEQ ID NO: 1100523 - DNA, 15 bp, Homo sapiens
acacacaggatggcc

SEQ ID NO: 1100524 - DNA, 15 bp, Homo sapiens
aacacacaggatggc

SEQ ID NO: 1100525 - DNA, 15 bp, Homo sapiens
aaacacacaggatgg

SEQ ID NO: 1100526 - DNA, 15 bp, Homo sapiens
caaacacacaggatg

SEQ ID NO: 1100527 - DNA, 15 bp, Homo sapiens
ccaaacacacaggat

SEQ ID NO: 1100528 - DNA, 15 bp, Homo sapiens
tccaaacacacagga

SEQ ID NO: 1100529 - DNA, 15 bp, Homo sapiens
ctccaaacacacagg

SEQ ID NO: 1100530 - DNA, 15 bp, Homo sapiens
tctccaaacacacag

SEQ ID NO: 1100531 - DNA, 15 bp, Homo sapiens
ctctccaaacacaca

SEQ ID NO: 1100532 - DNA, 15 bp, Homo sapiens
tctctccaaacacac

SEQ ID NO: 1100533 - DNA, 15 bp, Homo sapiens
ctctctccaaacaca

SEQ ID NO: 1100534 - DNA, 15 bp, Homo sapiens
gctctctccaaacac

SEQ ID NO: 1100535 - DNA, 15 bp, Homo sapiens
ggctctctccaaaca

SEQ ID NO: 1100536 - DNA, 15 bp, Homo sapiens
tggctctctccaaac

SEQ ID NO: 1100537 - DNA, 15 bp, Homo sapiens
ctggctctctccaaa

SEQ ID NO: 1100538 - DNA, 15 bp, Homo sapiens
tctggctctctccaa

SEQ ID NO: 1100539 - DNA, 15 bp, Homo sapiens
ttctggctctctcca

SEQ ID NO: 1100540 - DNA, 15 bp, Homo sapiens
tttctggctctctcc

SEQ ID NO: 1100541 - DNA, 15 bp, Homo sapiens
ctttctggctctctc

SEQ ID NO: 1100542 - DNA, 15 bp, Homo sapiens
cctttctggctctct

SEQ ID NO: 1100543 - DNA, 15 bp, Homo sapiens
acctttctggctctc

SEQ ID NO: 1100544 - DNA, 15 bp, Homo sapiens
aacctttctggctct

SEQ ID NO: 1100545 - DNA, 15 bp, Homo sapiens
gaacctttctggctc

SEQ ID NO: 1100546 - DNA, 15 bp, Homo sapiens
tgaacctttctggct

SEQ ID NO: 1100547 - DNA, 15 bp, Homo sapiens
ttgaacctttctggc

SEQ ID NO: 1100548 - DNA, 15 bp, Homo sapiens
cttgaacctttctgg

SEQ ID NO: 1100549 - DNA, 15 bp, Homo sapiens
ccttgaacctttctg

SEQ ID NO: 1100550 - DNA, 15 bp, Homo sapiens
gccttgaacctttct

SEQ ID NO: 1100551 - DNA, 15 bp, Homo sapiens
agccttgaacctttc

SEQ ID NO: 1100552 - DNA, 15 bp, Homo sapiens
tagccttgaaccttt

SEQ ID NO: 1100553 - DNA, 15 bp, Homo sapiens
ctagccttgaacctt

SEQ ID NO: 1100554 - DNA, 15 bp, Homo sapiens
cctagccttgaacct

SEQ ID NO: 1100555 - DNA, 15 bp, Homo sapiens
tcctagccttgaacc

SEQ ID NO: 1100556 - DNA, 15 bp, Homo sapiens
ttcctagccttgaac

SEQ ID NO: 1100557 - DNA, 15 bp, Homo sapiens
attcctagccttgaa

SEQ ID NO: 1100558 - DNA, 15 bp, Homo sapiens
cattcctagccttga

SEQ ID NO: 1100559 - DNA, 15 bp, Homo sapiens
acattcctagccttg

SEQ ID NO: 1100560 - DNA, 15 bp, Homo sapiens
aacattcctagcctt

SEQ ID NO: 1100561 - DNA, 15 bp, Homo sapiens
aaacattcctagcct

SEQ ID NO: 1100562 - DNA, 15 bp, Homo sapiens
gaaacattcctagcc

SEQ ID NO: 1100563 - DNA, 15 bp, Homo sapiens
agaaacattcctagc

SEQ ID NO: 1100564 - DNA, 15 bp, Homo sapiens
gagaaacattcctag

SEQ ID NO: 1100565 - DNA, 15 bp, Homo sapiens
agagaaacattccta

SEQ ID NO: 1100566 - DNA, 15 bp, Homo sapiens
gagagaaacattcct

SEQ ID NO: 1100567 - DNA, 15 bp, Homo sapiens
agagagaaacattcc

SEQ ID NO: 1100568 - DNA, 15 bp, Homo sapiens
agagagagaaacatt

SEQ ID NO: 1100569 - DNA, 15 bp, Homo sapiens
gagagagagaaacat

SEQ ID NO: 1100570 - DNA, 15 bp, Homo sapiens
agagagagagaaaca

SEQ ID NO: 1100571 - DNA, 15 bp, Homo sapiens
aagagagagagaaac

SEQ ID NO: 1100572 - DNA, 15 bp, Homo sapiens
aaagagagagagaaa

SEQ ID NO: 1100573 - DNA, 15 bp, Homo sapiens
taaagagagagagaa

SEQ ID NO: 1100574 - DNA, 15 bp, Homo sapiens
ttaaagagagagaga

SEQ ID NO: 1100575 - DNA, 15 bp, Homo sapiens
tttaaagagagagag

SEQ ID NO: 1100576 - DNA, 15 bp, Homo sapiens
ctttaaagagagaga

SEQ ID NO: 1100577 - DNA, 15 bp, Homo sapiens
gctttaaagagagag

SEQ ID NO: 1100578 - DNA, 15 bp, Homo sapiens
agctttaaagagaga

SEQ ID NO: 1100579 - DNA, 15 bp, Homo sapiens
gagctttaaagagag

SEQ ID NO: 1100580 - DNA, 15 bp, Homo sapiens
agagctttaaagaga

SEQ ID NO: 1100581 - DNA, 15 bp, Homo sapiens
aagagctttaaagag

SEQ ID NO: 1100582 - DNA, 15 bp, Homo sapiens
aaagagctttaaaga

SEQ ID NO: 1100583 - DNA, 15 bp, Homo sapiens
taaagagctttaaag

SEQ ID NO: 1100584 - DNA, 15 bp, Homo sapiens
ttaaagagctttaaa

SEQ ID NO: 1100585 - DNA, 15 bp, Homo sapiens
attaaagagctttaa

SEQ ID NO: 1100586 - DNA, 15 bp, Homo sapiens
gattaaagagcttta

SEQ ID NO: 1100587 - DNA, 15 bp, Homo sapiens
cgattaaagagcttt

SEQ ID NO: 1100588 - DNA, 15 bp, Homo sapiens
acgattaaagagctt

SEQ ID NO: 1100589 - DNA, 15 bp, Homo sapiens
gacgattaaagagct

SEQ ID NO: 1100590 - DNA, 15 bp, Homo sapiens
tgacgattaaagagc

SEQ ID NO: 1100591 - DNA, 15 bp, Homo sapiens
ctgacgattaaagag

SEQ ID NO: 1100592 - DNA, 15 bp, Homo sapiens
cctgacgattaaaga

SEQ ID NO: 1100593 - DNA, 15 bp, Homo sapiens
gcctgacgattaaag

SEQ ID NO: 1100594 - DNA, 15 bp, Homo sapiens
agcctgacgattaaa

SEQ ID NO: 1100595 - DNA, 15 bp, Homo sapiens
aagcctgacgattaa

SEQ ID NO: 1100596 - DNA, 15 bp, Homo sapiens
aaagcctgacgatta

SEQ ID NO: 1100597 - DNA, 15 bp, Homo sapiens
gaaagcctgacgatt

SEQ ID NO: 1100598 - DNA, 15 bp, Homo sapiens
agaaagcctgacgat

SEQ ID NO: 1100599 - DNA, 15 bp, Homo sapiens
cagaaagcctgacga

SEQ ID NO: 1100600 - DNA, 15 bp, Homo sapiens
tcagaaagcctgacg

SEQ ID NO: 1100601 - DNA, 15 bp, Homo sapiens
atcagaaagcctgac

SEQ ID NO: 1100602 - DNA, 15 bp, Homo sapiens
gatcagaaagcctga

SEQ ID NO: 1100603 - DNA, 15 bp, Homo sapiens
agatcagaaagcctg

SEQ ID NO: 1100604 - DNA, 15 bp, Homo sapiens
aagatcagaaagcct

SEQ ID NO: 1100605 - DNA, 15 bp, Homo sapiens
gaagatcagaaagcc

SEQ ID NO: 1100606 - DNA, 15 bp, Homo sapiens
tgaagatcagaaagc

SEQ ID NO: 1100607 - DNA, 15 bp, Homo sapiens
ttgaagatcagaaag

SEQ ID NO: 1100608 - DNA, 15 bp, Homo sapiens
tttgaagatcagaaa

SEQ ID NO: 1100609 - DNA, 15 bp, Homo sapiens
ctttgaagatcagaa

SEQ ID NO: 1100610 - DNA, 15 bp, Homo sapiens
gctttgaagatcaga

SEQ ID NO: 1100611 - DNA, 15 bp, Homo sapiens
tgctttgaagatcag

SEQ ID NO: 1100612 - DNA, 15 bp, Homo sapiens
ctgctttgaagatca

SEQ ID NO: 1100613 - DNA, 15 bp, Homo sapiens
cctgctttgaagatc

SEQ ID NO: 1100614 - DNA, 15 bp, Homo sapiens
gcctgctttgaagat

SEQ ID NO: 1100615 - DNA, 15 bp, Homo sapiens
agcctgctttgaaga

SEQ ID NO: 1100616 - DNA, 15 bp, Homo sapiens
cagcctgctttgaag

SEQ ID NO: 1100617 - DNA, 15 bp, Homo sapiens
acagcctgctttgaa

SEQ ID NO: 1100618 - DNA, 15 bp, Homo sapiens
tacagcctgctttga

SEQ ID NO: 1100619 - DNA, 15 bp, Homo sapiens
ctacagcctgctttg

SEQ ID NO: 1100620 - DNA, 15 bp, Homo sapiens
gctacagcctgcttt

SEQ ID NO: 1100621 - DNA, 15 bp, Homo sapiens
ggctacagcctgctt

SEQ ID NO: 1100622 - DNA, 15 bp, Homo sapiens
tggctacagcctgct

SEQ ID NO: 1100623 - DNA, 15 bp, Homo sapiens
ctggctacagcctgc

SEQ ID NO: 1100624 - DNA, 15 bp, Homo sapiens
actggctacagcctg

SEQ ID NO: 1100625 - DNA, 15 bp, Homo sapiens
cactggctacagcct

SEQ ID NO: 1100626 - DNA, 15 bp, Homo sapiens
acactggctacagcc

SEQ ID NO: 1100627 - DNA, 15 bp, Homo sapiens
cacactggctacagc

SEQ ID NO: 1100628 - DNA, 15 bp, Homo sapiens
tcacactggctacag

SEQ ID NO: 1100629 - DNA, 15 bp, Homo sapiens
gtcacactggctaca

SEQ ID NO: 1100630 - DNA, 15 bp, Homo sapiens
ggtcacactggctac

SEQ ID NO: 1100631 - DNA, 15 bp, Homo sapiens
gggtcacactggcta

SEQ ID NO: 1100632 - DNA, 15 bp, Homo sapiens
ggggtcacactggct

SEQ ID NO: 1100633 - DNA, 15 bp, Homo sapiens
tggggtcacactggc

SEQ ID NO: 1100634 - DNA, 15 bp, Homo sapiens
gtggggtcacactgg

SEQ ID NO: 1100635 - DNA, 15 bp, Homo sapiens
agtggggtcacactg

SEQ ID NO: 1100636 - DNA, 15 bp, Homo sapiens
gagtggggtcacact

SEQ ID NO: 1100637 - DNA, 15 bp, Homo sapiens
ggagtggggtcacac

SEQ ID NO: 1100638 - DNA, 15 bp, Homo sapiens
gggagtggggtcaca

SEQ ID NO: 1100639 - DNA, 15 bp, Homo sapiens
agggagtggggtcac

SEQ ID NO: 1100640 - DNA, 15 bp, Homo sapiens
gagggagtggggtca

SEQ ID NO: 1100641 - DNA, 15 bp, Homo sapiens
cgagggagtggggtc

SEQ ID NO: 1100642 - DNA, 15 bp, Homo sapiens
gcgagggagtggggt

SEQ ID NO: 1100643 - DNA, 15 bp, Homo sapiens
ggcgagggagtgggg

SEQ ID NO: 1100644 - DNA, 15 bp, Homo sapiens
aggcgagggagtggg

SEQ ID NO: 1100645 - DNA, 15 bp, Homo sapiens
gaggcgagggagtgg

SEQ ID NO: 1100646 - DNA, 15 bp, Homo sapiens
ggaggcgagggagtg

SEQ ID NO: 1100647 - DNA, 15 bp, Homo sapiens
gggaggcgagggagt

SEQ ID NO: 1100648 - DNA, 15 bp, Homo sapiens
ggggaggcgagggag

SEQ ID NO: 1100649 - DNA, 15 bp, Homo sapiens
tggggaggcgaggga

SEQ ID NO: 1100650 - DNA, 15 bp, Homo sapiens
atggggaggcgaggg

SEQ ID NO: 1100651 - DNA, 15 bp, Homo sapiens
catggggaggcgagg

SEQ ID NO: 1100652 - DNA, 15 bp, Homo sapiens
gcatggggaggcgag

SEQ ID NO: 1100653 - DNA, 15 bp, Homo sapiens
agcatggggaggcga

SEQ ID NO: 1100654 - DNA, 15 bp, Homo sapiens
cagcatggggaggcg

SEQ ID NO: 1100655 - DNA, 15 bp, Homo sapiens
ccagcatggggaggc

SEQ ID NO: 1100656 - DNA, 15 bp, Homo sapiens
tccagcatggggagg

SEQ ID NO: 1100657 - DNA, 15 bp, Homo sapiens
ctccagcatggggag

SEQ ID NO: 1100658 - DNA, 15 bp, Homo sapiens
tctccagcatgggga

SEQ ID NO: 1100659 - DNA, 15 bp, Homo sapiens
ctctccagcatgggg

SEQ ID NO: 1100660 - DNA, 15 bp, Homo sapiens
actctccagcatggg

SEQ ID NO: 1100661 - DNA, 15 bp, Homo sapiens
tactctccagcatgg

SEQ ID NO: 1100662 - DNA, 15 bp, Homo sapiens
ttactctccagcatg

SEQ ID NO: 1100663 - DNA, 15 bp, Homo sapiens
tttactctccagcat

SEQ ID NO: 1100664 - DNA, 15 bp, Homo sapiens
ttttactctccagca

SEQ ID NO: 1100665 - DNA, 15 bp, Homo sapiens
cttttactctccagc

SEQ ID NO: 1100666 - DNA, 15 bp, Homo sapiens
gcttttactctccag

SEQ ID NO: 1100667 - DNA, 15 bp, Homo sapiens
ggcttttactctcca

SEQ ID NO: 1100668 - DNA, 15 bp, Homo sapiens
aggcttttactctcc

SEQ ID NO: 1100669 - DNA, 15 bp, Homo sapiens
caggcttttactctc

SEQ ID NO: 1100670 - DNA, 15 bp, Homo sapiens
ccaggcttttactct

SEQ ID NO: 1100671 - DNA, 15 bp, Homo sapiens
tccaggcttttactc

SEQ ID NO: 1100672 - DNA, 15 bp, Homo sapiens
ctccaggcttttact

SEQ ID NO: 1100673 - DNA, 15 bp, Homo sapiens
actccaggcttttac

SEQ ID NO: 1100674 - DNA, 15 bp, Homo sapiens
tactccaggctttta

SEQ ID NO: 1100675 - DNA, 15 bp, Homo sapiens
atactccaggctttt

SEQ ID NO: 1100676 - DNA, 15 bp, Homo sapiens
aatactccaggcttt

SEQ ID NO: 1100677 - DNA, 15 bp, Homo sapiens
aaatactccaggctt

SEQ ID NO: 1100678 - DNA, 15 bp, Homo sapiens
aaaatactccaggct

SEQ ID NO: 1100679 - DNA, 15 bp, Homo sapiens
aaaaatactccaggc

SEQ ID NO: 1100680 - DNA, 15 bp, Homo sapiens
caaaaatactccagg

SEQ ID NO: 1100681 - DNA, 15 bp, Homo sapiens
acaaaaatactccag

SEQ ID NO: 1100682 - DNA, 15 bp, Homo sapiens
gacaaaaatactcca

SEQ ID NO: 1100683 - DNA, 15 bp, Homo sapiens
tgacaaaaatactcc

SEQ ID NO: 1100684 - DNA, 15 bp, Homo sapiens
atgacaaaaatactc

SEQ ID NO: 1100685 - DNA, 15 bp, Homo sapiens
aatgacaaaaatact

SEQ ID NO: 1100686 - DNA, 15 bp, Homo sapiens
aaatgacaaaaatac

SEQ ID NO: 1100687 - DNA, 15 bp, Homo sapiens
aaaatgacaaaaata

SEQ ID NO: 1100688 - DNA, 15 bp, Homo sapiens
caaaatgacaaaaat

SEQ ID NO: 1100689 - DNA, 15 bp, Homo sapiens
tcaaaatgacaaaaa

SEQ ID NO: 1100690 - DNA, 15 bp, Homo sapiens
ttcaaaatgacaaaa

SEQ ID NO: 1100691 - DNA, 15 bp, Homo sapiens
cttcaaaatgacaaa

SEQ ID NO: 1100692 - DNA, 15 bp, Homo sapiens
tcttcaaaatgacaa

SEQ ID NO: 1100693 - DNA, 15 bp, Homo sapiens
gtcttcaaaatgaca

SEQ ID NO: 1100694 - DNA, 15 bp, Homo sapiens
agtcttcaaaatgac

SEQ ID NO: 1100695 - DNA, 15 bp, Homo sapiens
aagtcttcaaaatga

SEQ ID NO: 1100696 - DNA, 15 bp, Homo sapiens
caagtcttcaaaatg

SEQ ID NO: 1100697 - DNA, 15 bp, Homo sapiens
gcaagtcttcaaaat

SEQ ID NO: 1100698 - DNA, 15 bp, Homo sapiens
tgcaagtcttcaaaa

SEQ ID NO: 1100699 - DNA, 15 bp, Homo sapiens
atgcaagtcttcaaa

SEQ ID NO: 1100700 - DNA, 15 bp, Homo sapiens
tatgcaagtcttcaa

SEQ ID NO: 1100701 - DNA, 15 bp, Homo sapiens
atatgcaagtcttca

SEQ ID NO: 1100702 - DNA, 15 bp, Homo sapiens
aatatgcaagtcttc

SEQ ID NO: 1100703 - DNA, 15 bp, Homo sapiens
caaatatgcaagtct

SEQ ID NO: 1100704 - DNA, 15 bp, Homo sapiens
ccaaatatgcaagtc

SEQ ID NO: 1100705 - DNA, 15 bp, Homo sapiens
tccaaatatgcaagt

SEQ ID NO: 1100706 - DNA, 15 bp, Homo sapiens
gtccaaatatgcaag

SEQ ID NO: 1100707 - DNA, 15 bp, Homo sapiens
tgtccaaatatgcaa

SEQ ID NO: 1100708 - DNA, 15 bp, Homo sapiens
ctgtccaaatatgca

SEQ ID NO: 1100709 - DNA, 15 bp, Homo sapiens
gctgtccaaatatgc

SEQ ID NO: 1100710 - DNA, 15 bp, Homo sapiens
ggctgtccaaatatg

SEQ ID NO: 1100711 - DNA, 15 bp, Homo sapiens
aggctgtccaaatat

SEQ ID NO: 1100712 - DNA, 15 bp, Homo sapiens
aaggctgtccaaata

SEQ ID NO: 1100713 - DNA, 15 bp, Homo sapiens
caaggctgtccaaat

SEQ ID NO: 1100714 - DNA, 15 bp, Homo sapiens
ccaaggctgtccaaa

SEQ ID NO: 1100715 - DNA, 15 bp, Homo sapiens
tccaaggctgtccaa

SEQ ID NO: 1100716 - DNA, 15 bp, Homo sapiens
gtccaaggctgtcca

SEQ ID NO: 1100717 - DNA, 15 bp, Homo sapiens
tgtccaaggctgtcc

SEQ ID NO: 1100718 - DNA, 15 bp, Homo sapiens
atgtccaaggctgtc

SEQ ID NO: 1100719 - DNA, 15 bp, Homo sapiens
gatgtccaaggctgt

SEQ ID NO: 1100720 - DNA, 15 bp, Homo sapiens
agatgtccaaggctg

SEQ ID NO: 1100721 - DNA, 15 bp, Homo sapiens
cagatgtccaaggct

SEQ ID NO: 1100722 - DNA, 15 bp, Homo sapiens
ccagatgtccaaggc

SEQ ID NO: 1100723 - DNA, 15 bp, Homo sapiens
tccagatgtccaagg

SEQ ID NO: 1100724 - DNA, 15 bp, Homo sapiens
ttccagatgtccaag

SEQ ID NO: 1100725 - DNA, 15 bp, Homo sapiens
tttccagatgtccaa

SEQ ID NO: 1100726 - DNA, 15 bp, Homo sapiens
ctttccagatgtcca

SEQ ID NO: 1100727 - DNA, 15 bp, Homo sapiens
actttccagatgtcc

SEQ ID NO: 1100728 - DNA, 15 bp, Homo sapiens
cactttccagatgtc

SEQ ID NO: 1100729 - DNA, 15 bp, Homo sapiens
acactttccagatgt

SEQ ID NO: 1100730 - DNA, 15 bp, Homo sapiens
cacactttccagatg

SEQ ID NO: 1100731 - DNA, 15 bp, Homo sapiens
ccacactttccagat

SEQ ID NO: 1100732 - DNA, 15 bp, Homo sapiens
accacactttccaga

SEQ ID NO: 1100733 - DNA, 15 bp, Homo sapiens
gaccacactttccag

SEQ ID NO: 1100734 - DNA, 15 bp, Homo sapiens
ggaccacactttcca

SEQ ID NO: 1100735 - DNA, 15 bp, Homo sapiens
aggaccacactttcc

SEQ ID NO: 1100736 - DNA, 15 bp, Homo sapiens
gaggaccacactttc

SEQ ID NO: 1100737 - DNA, 15 bp, Homo sapiens
tgaggaccacacttt

SEQ ID NO: 1100738 - DNA, 15 bp, Homo sapiens
gtgaggaccacactt

SEQ ID NO: 1100739 - DNA, 15 bp, Homo sapiens
agtgaggaccacact

SEQ ID NO: 1100740 - DNA, 15 bp, Homo sapiens
tagtgaggaccacac

SEQ ID NO: 1100741 - DNA, 15 bp, Homo sapiens
ctagtgaggaccaca

SEQ ID NO: 1100742 - DNA, 15 bp, Homo sapiens
gctagtgaggaccac

SEQ ID NO: 1100743 - DNA, 15 bp, Homo sapiens
agctagtgaggacca

SEQ ID NO: 1100744 - DNA, 15 bp, Homo sapiens
gagctagtgaggacc

SEQ ID NO: 1100745 - DNA, 15 bp, Homo sapiens
agagctagtgaggac

SEQ ID NO: 1100746 - DNA, 15 bp, Homo sapiens
cagagctagtgagga

SEQ ID NO: 1100747 - DNA, 15 bp, Homo sapiens
gcagagctagtgagg

SEQ ID NO: 1100748 - DNA, 15 bp, Homo sapiens
tgcagagctagtgag

SEQ ID NO: 1100749 - DNA, 15 bp, Homo sapiens
ctgcagagctagtga

SEQ ID NO: 1100750 - DNA, 15 bp, Homo sapiens
cctgcagagctagtg

SEQ ID NO: 1100751 - DNA, 15 bp, Homo sapiens
ccctgcagagctagt

SEQ ID NO: 1100752 - DNA, 15 bp, Homo sapiens
tccctgcagagctag

SEQ ID NO: 1100753 - DNA, 15 bp, Homo sapiens
atccctgcagagcta

SEQ ID NO: 1100754 - DNA, 15 bp, Homo sapiens
tatccctgcagagct

SEQ ID NO: 1100755 - DNA, 15 bp, Homo sapiens
ttatccctgcagagc

SEQ ID NO: 1100756 - DNA, 15 bp, Homo sapiens
cttatccctgcagag

SEQ ID NO: 1100757 - DNA, 15 bp, Homo sapiens
tcttatccctgcaga

SEQ ID NO: 1100758 - DNA, 15 bp, Homo sapiens
ctcttatccctgcag

SEQ ID NO: 1100759 - DNA, 15 bp, Homo sapiens
gctcttatccctgca

SEQ ID NO: 1100760 - DNA, 15 bp, Homo sapiens
tgctcttatccctgc

SEQ ID NO: 1100761 - DNA, 15 bp, Homo sapiens
gtgctcttatccctg

SEQ ID NO: 1100762 - DNA, 15 bp, Homo sapiens
cgtgctcttatccct

SEQ ID NO: 1100763 - DNA, 15 bp, Homo sapiens
acgtgctcttatccc

SEQ ID NO: 1100764 - DNA, 15 bp, Homo sapiens
gacgtgctcttatcc

SEQ ID NO: 1100765 - DNA, 15 bp, Homo sapiens
tgacgtgctcttatc

SEQ ID NO: 1100766 - DNA, 15 bp, Homo sapiens
ctgacgtgctcttat

SEQ ID NO: 1100767 - DNA, 15 bp, Homo sapiens
gctgacgtgctctta

SEQ ID NO: 1100768 - DNA, 15 bp, Homo sapiens
tgctgacgtgctctt

SEQ ID NO: 1100769 - DNA, 15 bp, Homo sapiens
gtgctgacgtgctct

SEQ ID NO: 1100770 - DNA, 15 bp, Homo sapiens
agtgctgacgtgctc

SEQ ID NO: 1100771 - DNA, 15 bp, Homo sapiens
aagtgctgacgtgct

SEQ ID NO: 1100772 - DNA, 15 bp, Homo sapiens
gaagtgctgacgtgc

SEQ ID NO: 1100773 - DNA, 15 bp, Homo sapiens
ggaagtgctgacgtg

SEQ ID NO: 1100774 - DNA, 15 bp, Homo sapiens
tggaagtgctgacgt

SEQ ID NO: 1100775 - DNA, 15 bp, Homo sapiens
ttggaagtgctgacg

SEQ ID NO: 1100776 - DNA, 15 bp, Homo sapiens
cttggaagtgctgac

SEQ ID NO: 1100777 - DNA, 15 bp, Homo sapiens
gcttggaagtgctga

SEQ ID NO: 1100778 - DNA, 15 bp, Homo sapiens
agcttggaagtgctg

SEQ ID NO: 1100779 - DNA, 15 bp, Homo sapiens
gagcttggaagtgct

SEQ ID NO: 1100780 - DNA, 15 bp, Homo sapiens
agagcttggaagtgc

SEQ ID NO: 1100781 - DNA, 15 bp, Homo sapiens
gagagcttggaagtg

SEQ ID NO: 1100782 - DNA, 15 bp, Homo sapiens
agagagcttggaagt

SEQ ID NO: 1100783 - DNA, 15 bp, Homo sapiens
cagagagcttggaag

SEQ ID NO: 1100784 - DNA, 15 bp, Homo sapiens
ccagagagcttggaa

SEQ ID NO: 1100785 - DNA, 15 bp, Homo sapiens
gccagagagcttgga

SEQ ID NO: 1100786 - DNA, 15 bp, Homo sapiens
cgccagagagcttgg

SEQ ID NO: 1100787 - DNA, 15 bp, Homo sapiens
gcgccagagagcttg

SEQ ID NO: 1100788 - DNA, 15 bp, Homo sapiens
ggcgccagagagctt

SEQ ID NO: 1100789 - DNA, 15 bp, Homo sapiens
gggcgccagagagct

SEQ ID NO: 1100790 - DNA, 15 bp, Homo sapiens
ggggcgccagagagc

SEQ ID NO: 1100791 - DNA, 15 bp, Homo sapiens
aggggcgccagagag

SEQ ID NO: 1100792 - DNA, 15 bp, Homo sapiens
taggggcgccagaga

SEQ ID NO: 1100793 - DNA, 15 bp, Homo sapiens
gtaggggcgccagag

SEQ ID NO: 1100794 - DNA, 15 bp, Homo sapiens
tgtaggggcgccaga

SEQ ID NO: 1100795 - DNA, 15 bp, Homo sapiens
atgtaggggcgccag

SEQ ID NO: 1100796 - DNA, 15 bp, Homo sapiens
gatgtaggggcgcca

SEQ ID NO: 1100797 - DNA, 15 bp, Homo sapiens
agatgtaggggcgcc

SEQ ID NO: 1100798 - DNA, 15 bp, Homo sapiens
cagatgtaggggcgc

SEQ ID NO: 1100799 - DNA, 15 bp, Homo sapiens
ccagatgtaggggcg

SEQ ID NO: 1100800 - DNA, 15 bp, Homo sapiens
tccagatgtaggggc

SEQ ID NO: 1100801 - DNA, 15 bp, Homo sapiens
gtccagatgtagggg

SEQ ID NO: 1100802 - DNA, 15 bp, Homo sapiens
tgtccagatgtaggg

SEQ ID NO: 1100803 - DNA, 15 bp, Homo sapiens
gtgtccagatgtagg

SEQ ID NO: 1100804 - DNA, 15 bp, Homo sapiens
cgtgtccagatgtag

SEQ ID NO: 1100805 - DNA, 15 bp, Homo sapiens
acgtgtccagatgta

SEQ ID NO: 1100806 - DNA, 15 bp, Homo sapiens
aacgtgtccagatgt

SEQ ID NO: 1100807 - DNA, 15 bp, Homo sapiens
caacgtgtccagatg

SEQ ID NO: 1100808 - DNA, 15 bp, Homo sapiens
tcaacgtgtccagat

SEQ ID NO: 1100809 - DNA, 15 bp, Homo sapiens
ttcaacgtgtccaga

SEQ ID NO: 1100810 - DNA, 15 bp, Homo sapiens
tttcaacgtgtccag

SEQ ID NO: 1100811 - DNA, 15 bp, Homo sapiens
ttttcaacgtgtcca

SEQ ID NO: 1100812 - DNA, 15 bp, Homo sapiens
tttttcaacgtgtcc

SEQ ID NO: 1100813 - DNA, 15 bp, Homo sapiens
atttttcaacgtgtc

SEQ ID NO: 1100814 - DNA, 15 bp, Homo sapiens
aatttttcaacgtgt

SEQ ID NO: 1100815 - DNA, 15 bp, Homo sapiens
taatttttcaacgtg

SEQ ID NO: 1100816 - DNA, 15 bp, Homo sapiens
ttaatttttcaacgt

SEQ ID NO: 1100817 - DNA, 15 bp, Homo sapiens
gttaatttttcaacg

SEQ ID NO: 1100818 - DNA, 15 bp, Homo sapiens
tgttaatttttcaac

SEQ ID NO: 1100819 - DNA, 15 bp, Homo sapiens
gtgttaatttttcaa

SEQ ID NO: 1100820 - DNA, 15 bp, Homo sapiens
ggtgttaatttttca

SEQ ID NO: 1100821 - DNA, 15 bp, Homo sapiens
tggtgttaatttttc

SEQ ID NO: 1100822 - DNA, 15 bp, Homo sapiens
ctggtgttaattttt

SEQ ID NO: 1100823 - DNA, 15 bp, Homo sapiens
tctggtgttaatttt

SEQ ID NO: 1100824 - DNA, 15 bp, Homo sapiens
gtctggtgttaattt

SEQ ID NO: 1100825 - DNA, 15 bp, Homo sapiens
agtctggtgttaatt

SEQ ID NO: 1100826 - DNA, 15 bp, Homo sapiens
gagtctggtgttaat

SEQ ID NO: 1100827 - DNA, 15 bp, Homo sapiens
agagtctggtgttaa

SEQ ID NO: 1100828 - DNA, 15 bp, Homo sapiens
cagagtctggtgtta

SEQ ID NO: 1100829 - DNA, 15 bp, Homo sapiens
ccagagtctggtgtt

SEQ ID NO: 1100830 - DNA, 15 bp, Homo sapiens
tccagagtctggtgt

SEQ ID NO: 1100831 - DNA, 15 bp, Homo sapiens
ctccagagtctggtg

SEQ ID NO: 1100832 - DNA, 15 bp, Homo sapiens
actccagagtctggt

SEQ ID NO: 1100833 - DNA, 15 bp, Homo sapiens
aactccagagtctgg

SEQ ID NO: 1100834 - DNA, 15 bp, Homo sapiens
taactccagagtctg

SEQ ID NO: 1100835 - DNA, 15 bp, Homo sapiens
ttaactccagagtct

SEQ ID NO: 1100836 - DNA, 15 bp, Homo sapiens
cttaactccagagtc

SEQ ID NO: 1100837 - DNA, 15 bp, Homo sapiens
gcttaactccagagt

SEQ ID NO: 1100838 - DNA, 15 bp, Homo sapiens
tgcttaactccagag

SEQ ID NO: 1100839 - DNA, 15 bp, Homo sapiens
ttgcttaactccaga

SEQ ID NO: 1100840 - DNA, 15 bp, Homo sapiens
tttgcttaactccag

SEQ ID NO: 1100841 - DNA, 15 bp, Homo sapiens
gtttgcttaactcca

SEQ ID NO: 1100842 - DNA, 15 bp, Homo sapiens
tgtttgcttaactcc

SEQ ID NO: 1100843 - DNA, 15 bp, Homo sapiens
atgtttgcttaactc

SEQ ID NO: 1100844 - DNA, 15 bp, Homo sapiens
aatgtttgcttaact

SEQ ID NO: 1100845 - DNA, 15 bp, Homo sapiens
taatgtttgcttaac

SEQ ID NO: 1100846 - DNA, 15 bp, Homo sapiens
ttaatgtttgcttaa

SEQ ID NO: 1100847 - DNA, 15 bp, Homo sapiens
cttaatgtttgctta

SEQ ID NO: 1100848 - DNA, 15 bp, Homo sapiens
acttaatgtttgctt

SEQ ID NO: 1100849 - DNA, 15 bp, Homo sapiens
aacttaatgtttgct

SEQ ID NO: 1100850 - DNA, 15 bp, Homo sapiens
aaacttaatgtttgc

SEQ ID NO: 1100851 - DNA, 15 bp, Homo sapiens
taaacttaatgtttg

SEQ ID NO: 1100852 - DNA, 15 bp, Homo sapiens
ataaacttaatgttt

SEQ ID NO: 1100853 - DNA, 15 bp, Homo sapiens
tataaacttaatgtt

SEQ ID NO: 1100854 - DNA, 15 bp, Homo sapiens
ctataaacttaatgt

SEQ ID NO: 1100855 - DNA, 15 bp, Homo sapiens
cctataaacttaatg

SEQ ID NO: 1100856 - DNA, 15 bp, Homo sapiens
gcctataaacttaat

SEQ ID NO: 1100857 - DNA, 15 bp, Homo sapiens
ggcctataaacttaa

SEQ ID NO: 1100858 - DNA, 15 bp, Homo sapiens
aggcctataaactta

SEQ ID NO: 1100859 - DNA, 15 bp, Homo sapiens
gaggcctataaactt

SEQ ID NO: 1100860 - DNA, 15 bp, Homo sapiens
ggaggcctataaact

SEQ ID NO: 1100861 - DNA, 15 bp, Homo sapiens
aggaggcctataaac

SEQ ID NO: 1100862 - DNA, 15 bp, Homo sapiens
aaggaggcctataaa

SEQ ID NO: 1100863 - DNA, 15 bp, Homo sapiens
caaggaggcctataa

SEQ ID NO: 1100864 - DNA, 15 bp, Homo sapiens
gcaaggaggcctata

SEQ ID NO: 1100865 - DNA, 15 bp, Homo sapiens
tgcaaggaggcctat

SEQ ID NO: 1100866 - DNA, 15 bp, Homo sapiens
atgcaaggaggccta

SEQ ID NO: 1100867 - DNA, 15 bp, Homo sapiens
aatgcaaggaggcct

SEQ ID NO: 1100868 - DNA, 15 bp, Homo sapiens
aaatgcaaggaggcc

SEQ ID NO: 1100869 - DNA, 15 bp, Homo sapiens
caaatgcaaggaggc

SEQ ID NO: 1100870 - DNA, 15 bp, Homo sapiens
tcaaatgcaaggagg

SEQ ID NO: 1100871 - DNA, 15 bp, Homo sapiens
gtcaaatgcaaggag

SEQ ID NO: 1100872 - DNA, 15 bp, Homo sapiens
ggtcaaatgcaagga

SEQ ID NO: 1100873 - DNA, 15 bp, Homo sapiens
tggtcaaatgcaagg

SEQ ID NO: 1100874 - DNA, 15 bp, Homo sapiens
atggtcaaatgcaag

SEQ ID NO: 1100875 - DNA, 15 bp, Homo sapiens
aatggtcaaatgcaa

SEQ ID NO: 1100876 - DNA, 15 bp, Homo sapiens
aaatggtcaaatgca

SEQ ID NO: 1100877 - DNA, 15 bp, Homo sapiens
gaaatggtcaaatgc

SEQ ID NO: 1100878 - DNA, 15 bp, Homo sapiens
ggaaatggtcaaatg

SEQ ID NO: 1100879 - DNA, 15 bp, Homo sapiens
aggaaatggtcaaat

SEQ ID NO: 1100880 - DNA, 15 bp, Homo sapiens
caggaaatggtcaaa

SEQ ID NO: 1100881 - DNA, 15 bp, Homo sapiens
ccaggaaatggtcaa

SEQ ID NO: 1100882 - DNA, 15 bp, Homo sapiens
cccaggaaatggtca

SEQ ID NO: 1100883 - DNA, 15 bp, Homo sapiens
tcccaggaaatggtc

SEQ ID NO: 1100884 - DNA, 15 bp, Homo sapiens
gtcccaggaaatggt

SEQ ID NO: 1100885 - DNA, 15 bp, Homo sapiens
tgtcccaggaaatgg

SEQ ID NO: 1100886 - DNA, 15 bp, Homo sapiens
ctgtcccaggaaatg

SEQ ID NO: 1100887 - DNA, 15 bp, Homo sapiens
gctgtcccaggaaat

SEQ ID NO: 1100888 - DNA, 15 bp, Homo sapiens
tgctgtcccaggaaa

SEQ ID NO: 1100889 - DNA, 15 bp, Homo sapiens
ctgctgtcccaggaa

SEQ ID NO: 1100890 - DNA, 15 bp, Homo sapiens
gctgctgtcccagga

SEQ ID NO: 1100891 - DNA, 15 bp, Homo sapiens
ggctgctgtcccagg

SEQ ID NO: 1100892 - DNA, 15 bp, Homo sapiens
gggctgctgtcccag

SEQ ID NO: 1100893 - DNA, 15 bp, Homo sapiens
agggctgctgtccca

SEQ ID NO: 1100894 - DNA, 15 bp, Homo sapiens
aagggctgctgtccc

SEQ ID NO: 1100895 - DNA, 15 bp, Homo sapiens
taagggctgctgtcc

SEQ ID NO: 1100896 - DNA, 15 bp, Homo sapiens
ataagggctgctgtc

SEQ ID NO: 1100897 - DNA, 15 bp, Homo sapiens
gataagggctgctgt

SEQ ID NO: 1100898 - DNA, 15 bp, Homo sapiens
ggataagggctgctg

SEQ ID NO: 1100899 - DNA, 15 bp, Homo sapiens
aggataagggctgct

SEQ ID NO: 1100900 - DNA, 15 bp, Homo sapiens
caggataagggctgc

SEQ ID NO: 1100901 - DNA, 15 bp, Homo sapiens
acaggataagggctg

SEQ ID NO: 1100902 - DNA, 15 bp, Homo sapiens
cacaggataagggct

SEQ ID NO: 1100903 - DNA, 15 bp, Homo sapiens
tcacaggataagggc

SEQ ID NO: 1100904 - DNA, 15 bp, Homo sapiens
gtcacaggataaggg

SEQ ID NO: 1100905 - DNA, 15 bp, Homo sapiens
agtcacaggataagg

SEQ ID NO: 1100906 - DNA, 15 bp, Homo sapiens
aagtcacaggataag

SEQ ID NO: 1100907 - DNA, 15 bp, Homo sapiens
aaagtcacaggataa

SEQ ID NO: 1100908 - DNA, 15 bp, Homo sapiens
gaaagtcacaggata

SEQ ID NO: 1100909 - DNA, 15 bp, Homo sapiens
agaaagtcacaggat

SEQ ID NO: 1100910 - DNA, 15 bp, Homo sapiens
cagaaagtcacagga

SEQ ID NO: 1100911 - DNA, 15 bp, Homo sapiens
acagaaagtcacagg

SEQ ID NO: 1100912 - DNA, 15 bp, Homo sapiens
cacagaaagtcacag

SEQ ID NO: 1100913 - DNA, 15 bp, Homo sapiens
acacagaaagtcaca

SEQ ID NO: 1100914 - DNA, 15 bp, Homo sapiens
cacacagaaagtcac

SEQ ID NO: 1100915 - DNA, 15 bp, Homo sapiens
acacacagaaagtca

SEQ ID NO: 1100916 - DNA, 15 bp, Homo sapiens
tacacacagaaagtc

SEQ ID NO: 1100917 - DNA, 15 bp, Homo sapiens
ctacacacagaaagt

SEQ ID NO: 1100918 - DNA, 15 bp, Homo sapiens
tctacacacagaaag

SEQ ID NO: 1100919 - DNA, 15 bp, Homo sapiens
ctctacacacagaaa

SEQ ID NO: 1100920 - DNA, 15 bp, Homo sapiens
actctacacacagaa

SEQ ID NO: 1100921 - DNA, 15 bp, Homo sapiens
aactctacacacaga

SEQ ID NO: 1100922 - DNA, 15 bp, Homo sapiens
caactctacacacag

SEQ ID NO: 1100923 - DNA, 15 bp, Homo sapiens
tcaactctacacaca

SEQ ID NO: 1100924 - DNA, 15 bp, Homo sapiens
ctcaactctacacac

SEQ ID NO: 1100925 - DNA, 15 bp, Homo sapiens
actcaactctacaca

SEQ ID NO: 1100926 - DNA, 15 bp, Homo sapiens
gactcaactctacac

SEQ ID NO: 1100927 - DNA, 15 bp, Homo sapiens
agactcaactctaca

SEQ ID NO: 1100928 - DNA, 15 bp, Homo sapiens
aagactcaactctac

SEQ ID NO: 1100929 - DNA, 15 bp, Homo sapiens
aaagactcaactcta

SEQ ID NO: 1100930 - DNA, 15 bp, Homo sapiens
caaagactcaactct

SEQ ID NO: 1100931 - DNA, 15 bp, Homo sapiens
gcaaagactcaactc

SEQ ID NO: 1100932 - DNA, 15 bp, Homo sapiens
tgcaaagactcaact

SEQ ID NO: 1100933 - DNA, 15 bp, Homo sapiens
ctgcaaagactcaac

SEQ ID NO: 1100934 - DNA, 15 bp, Homo sapiens
actgcaaagactcaa

SEQ ID NO: 1100935 - DNA, 15 bp, Homo sapiens
aactgcaaagactca

SEQ ID NO: 1100936 - DNA, 15 bp, Homo sapiens
caactgcaaagactc

SEQ ID NO: 1100937 - DNA, 15 bp, Homo sapiens
ccaactgcaaagact

SEQ ID NO: 1100938 - DNA, 15 bp, Homo sapiens
accaactgcaaagac

SEQ ID NO: 1100939 - DNA, 15 bp, Homo sapiens
gaccaactgcaaaga

SEQ ID NO: 1100940 - DNA, 15 bp, Homo sapiens
ggaccaactgcaaag

SEQ ID NO: 1100941 - DNA, 15 bp, Homo sapiens
aggaccaactgcaaa

SEQ ID NO: 1100942 - DNA, 15 bp, Homo sapiens
gaggaccaactgcaa

SEQ ID NO: 1100943 - DNA, 15 bp, Homo sapiens
ggaggaccaactgca

SEQ ID NO: 1100944 - DNA, 15 bp, Homo sapiens
aggaggaccaactgc

SEQ ID NO: 1100945 - DNA, 15 bp, Homo sapiens
gaggaggaccaactg

SEQ ID NO: 1100946 - DNA, 15 bp, Homo sapiens
tgaggaggaccaact

SEQ ID NO: 1100947 - DNA, 15 bp, Homo sapiens
gtgaggaggaccaac

SEQ ID NO: 1100948 - DNA, 15 bp, Homo sapiens
tgtgaggaggaccaa

SEQ ID NO: 1100949 - DNA, 15 bp, Homo sapiens
gtgtgaggaggacca

SEQ ID NO: 1100950 - DNA, 15 bp, Homo sapiens
agtgtgaggaggacc

SEQ ID NO: 1100951 - DNA, 15 bp, Homo sapiens
gagtgtgaggaggac

SEQ ID NO: 1100952 - DNA, 15 bp, Homo sapiens
agagtgtgaggagga

SEQ ID NO: 1100953 - DNA, 15 bp, Homo sapiens
gagagtgtgaggagg

SEQ ID NO: 1100954 - DNA, 15 bp, Homo sapiens
agagagtgtgaggag

SEQ ID NO: 1100955 - DNA, 15 bp, Homo sapiens
gagagagtgtgagga

SEQ ID NO: 1100956 - DNA, 15 bp, Homo sapiens
tgagagagtgtgagg

SEQ ID NO: 1100957 - DNA, 15 bp, Homo sapiens
ttgagagagtgtgag

SEQ ID NO: 1100958 - DNA, 15 bp, Homo sapiens
gttgagagagtgtga

SEQ ID NO: 1100959 - DNA, 15 bp, Homo sapiens
agttgagagagtgtg

SEQ ID NO: 1100960 - DNA, 15 bp, Homo sapiens
aagttgagagagtgt

SEQ ID NO: 1100961 - DNA, 15 bp, Homo sapiens
aaagttgagagagtg

SEQ ID NO: 1100962 - DNA, 15 bp, Homo sapiens
caaagttgagagagt

SEQ ID NO: 1100963 - DNA, 15 bp, Homo sapiens
acaaagttgagagag

SEQ ID NO: 1100964 - DNA, 15 bp, Homo sapiens
cacaaagttgagaga

SEQ ID NO: 1100965 - DNA, 15 bp, Homo sapiens
tcacaaagttgagag

SEQ ID NO: 1100966 - DNA, 15 bp, Homo sapiens
gtcacaaagttgaga

SEQ ID NO: 1100967 - DNA, 15 bp, Homo sapiens
agtcacaaagttgag

SEQ ID NO: 1100968 - DNA, 15 bp, Homo sapiens
gagtcacaaagttga

SEQ ID NO: 1100969 - DNA, 15 bp, Homo sapiens
agagtcacaaagttg

SEQ ID NO: 1100970 - DNA, 15 bp, Homo sapiens
gagagtcacaaagtt

SEQ ID NO: 1100971 - DNA, 15 bp, Homo sapiens
agagagtcacaaagt

SEQ ID NO: 1100972 - DNA, 15 bp, Homo sapiens
cagagagtcacaaag

SEQ ID NO: 1100973 - DNA, 15 bp, Homo sapiens
gcagagagtcacaaa

SEQ ID NO: 1100974 - DNA, 15 bp, Homo sapiens
tgcagagagtcacaa

SEQ ID NO: 1100975 - DNA, 15 bp, Homo sapiens
ctgcagagagtcaca

SEQ ID NO: 1100976 - DNA, 15 bp, Homo sapiens
actgcagagagtcac

SEQ ID NO: 1100977 - DNA, 15 bp, Homo sapiens
cactgcagagagtca

SEQ ID NO: 1100978 - DNA, 15 bp, Homo sapiens
gcactgcagagagtc

SEQ ID NO: 1100979 - DNA, 15 bp, Homo sapiens
agcactgcagagagt

SEQ ID NO: 1100980 - DNA, 15 bp, Homo sapiens
aagcactgcagagag

SEQ ID NO: 1100981 - DNA, 15 bp, Homo sapiens
caagcactgcagaga

SEQ ID NO: 1100982 - DNA, 15 bp, Homo sapiens
ccaagcactgcagag

SEQ ID NO: 1100983 - DNA, 15 bp, Homo sapiens
accaagcactgcaga

SEQ ID NO: 1100984 - DNA, 15 bp, Homo sapiens
gaccaagcactgcag

SEQ ID NO: 1100985 - DNA, 15 bp, Homo sapiens
ggaccaagcactgca

SEQ ID NO: 1100986 - DNA, 15 bp, Homo sapiens
aggaccaagcactgc

SEQ ID NO: 1100987 - DNA, 15 bp, Homo sapiens
caggaccaagcactg

SEQ ID NO: 1100988 - DNA, 15 bp, Homo sapiens
ccaggaccaagcact

SEQ ID NO: 1100989 - DNA, 15 bp, Homo sapiens
tccaggaccaagcac

SEQ ID NO: 1100990 - DNA, 15 bp, Homo sapiens
atccaggaccaagca

SEQ ID NO: 1100991 - DNA, 15 bp, Homo sapiens
tatccaggaccaagc

SEQ ID NO: 1100992 - DNA, 15 bp, Homo sapiens
ttatccaggaccaag

SEQ ID NO: 1100993 - DNA, 15 bp, Homo sapiens
cttatccaggaccaa

SEQ ID NO: 1100994 - DNA, 15 bp, Homo sapiens
acttatccaggacca

SEQ ID NO: 1100995 - DNA, 15 bp, Homo sapiens
aacttatccaggacc

SEQ ID NO: 1100996 - DNA, 15 bp, Homo sapiens
aaacttatccaggac

SEQ ID NO: 1100997 - DNA, 15 bp, Homo sapiens
caaacttatccagga

SEQ ID NO: 1100998 - DNA, 15 bp, Homo sapiens
tcaaacttatccagg

SEQ ID NO: 1100999 - DNA, 15 bp, Homo sapiens
ttcaaacttatccag

SEQ ID NO: 1101000 - DNA, 15 bp, Homo sapiens
tttcaaacttatcca

SEQ ID NO: 1101001 - DNA, 15 bp, Homo sapiens
ctttcaaacttatcc

SEQ ID NO: 1101002 - DNA, 15 bp, Homo sapiens
gctttcaaacttatc

SEQ ID NO: 1101003 - DNA, 15 bp, Homo sapiens
agctttcaaacttat

SEQ ID NO: 1101004 - DNA, 15 bp, Homo sapiens
tagctttcaaactta

SEQ ID NO: 1101005 - DNA, 15 bp, Homo sapiens
gtagctttcaaactt

SEQ ID NO: 1101006 - DNA, 15 bp, Homo sapiens
tgtagctttcaaact

SEQ ID NO: 1101007 - DNA, 15 bp, Homo sapiens
ttgtagctttcaaac

SEQ ID NO: 1101008 - DNA, 15 bp, Homo sapiens
attgtagctttcaaa

SEQ ID NO: 1101009 - DNA, 15 bp, Homo sapiens
cattgtagctttcaa

SEQ ID NO: 1101010 - DNA, 15 bp, Homo sapiens
tcattgtagctttca

SEQ ID NO: 1101011 - DNA, 15 bp, Homo sapiens
atcattgtagctttc

SEQ ID NO: 1101012 - DNA, 15 bp, Homo sapiens
catcattgtagcttt

SEQ ID NO: 1101013 - DNA, 15 bp, Homo sapiens
tcatcattgtagctt

SEQ ID NO: 1101014 - DNA, 15 bp, Homo sapiens
ttcatcattgtagct

SEQ ID NO: 1101015 - DNA, 15 bp, Homo sapiens
tttcatcattgtagc

SEQ ID NO: 1101016 - DNA, 15 bp, Homo sapiens
gtttcatcattgtag

SEQ ID NO: 1101017 - DNA, 15 bp, Homo sapiens
agtttcatcattgta

SEQ ID NO: 1101018 - DNA, 15 bp, Homo sapiens
gagtttcatcattgt

SEQ ID NO: 1101019 - DNA, 15 bp, Homo sapiens
tgagtttcatcattg

SEQ ID NO: 1101020 - DNA, 15 bp, Homo sapiens
ctgagtttcatcatt

SEQ ID NO: 1101021 - DNA, 15 bp, Homo sapiens
gctgagtttcatcat

SEQ ID NO: 1101022 - DNA, 15 bp, Homo sapiens
agctgagtttcatca

SEQ ID NO: 1101023 - DNA, 15 bp, Homo sapiens
gagctgagtttcatc

SEQ ID NO: 1101024 - DNA, 15 bp, Homo sapiens
tgagctgagtttcat

SEQ ID NO: 1101025 - DNA, 15 bp, Homo sapiens
gtgagctgagtttca

SEQ ID NO: 1101026 - DNA, 15 bp, Homo sapiens
ggtgagctgagtttc

SEQ ID NO: 1101027 - DNA, 15 bp, Homo sapiens
gggtgagctgagttt

SEQ ID NO: 1101028 - DNA, 15 bp, Homo sapiens
tgggtgagctgagtt

SEQ ID NO: 1101029 - DNA, 15 bp, Homo sapiens
ttgggtgagctgagt

SEQ ID NO: 1101030 - DNA, 15 bp, Homo sapiens
gttgggtgagctgag

SEQ ID NO: 1101031 - DNA, 15 bp, Homo sapiens
cgttgggtgagctga

SEQ ID NO: 1101032 - DNA, 15 bp, Homo sapiens
acgttgggtgagctg

SEQ ID NO: 1101033 - DNA, 15 bp, Homo sapiens
cacgttgggtgagct

SEQ ID NO: 1101034 - DNA, 15 bp, Homo sapiens
gcacgttgggtgagc

SEQ ID NO: 1101035 - DNA, 15 bp, Homo sapiens
ggcacgttgggtgag

SEQ ID NO: 1101036 - DNA, 15 bp, Homo sapiens
gggcacgttgggtga

SEQ ID NO: 1101037 - DNA, 15 bp, Homo sapiens
agggcacgttgggtg

SEQ ID NO: 1101038 - DNA, 15 bp, Homo sapiens
gagggcacgttgggt

SEQ ID NO: 1101039 - DNA, 15 bp, Homo sapiens
agagggcacgttggg

SEQ ID NO: 1101040 - DNA, 15 bp, Homo sapiens
gagagggcacgttgg

SEQ ID NO: 1101041 - DNA, 15 bp, Homo sapiens
agagagggcacgttg

SEQ ID NO: 1101042 - DNA, 15 bp, Homo sapiens
gagagagggcacgtt

SEQ ID NO: 1101043 - DNA, 15 bp, Homo sapiens
agagagagggcacgt

SEQ ID NO: 1101044 - DNA, 15 bp, Homo sapiens
tagagagagggcacg

SEQ ID NO: 1101045 - DNA, 15 bp, Homo sapiens
gtagagagagggcac

SEQ ID NO: 1101046 - DNA, 15 bp, Homo sapiens
agtagagagagggca

SEQ ID NO: 1101047 - DNA, 15 bp, Homo sapiens
cagtagagagagggc

SEQ ID NO: 1101048 - DNA, 15 bp, Homo sapiens
ccagtagagagaggg

SEQ ID NO: 1101049 - DNA, 15 bp, Homo sapiens
tccagtagagagagg

SEQ ID NO: 1101050 - DNA, 15 bp, Homo sapiens
ctccagtagagagag

SEQ ID NO: 1101051 - DNA, 15 bp, Homo sapiens
cctccagtagagaga

SEQ ID NO: 1101052 - DNA, 15 bp, Homo sapiens
tcctccagtagagag

SEQ ID NO: 1101053 - DNA, 15 bp, Homo sapiens
ttcctccagtagaga

SEQ ID NO: 1101054 - DNA, 15 bp, Homo sapiens
tttcctccagtagag

SEQ ID NO: 1101055 - DNA, 15 bp, Homo sapiens
ttttcctccagtaga

SEQ ID NO: 1101056 - DNA, 15 bp, Homo sapiens
gttttcctccagtag

SEQ ID NO: 1101057 - DNA, 15 bp, Homo sapiens
tgttttcctccagta

SEQ ID NO: 1101058 - DNA, 15 bp, Homo sapiens
atgttttcctccagt

SEQ ID NO: 1101059 - DNA, 15 bp, Homo sapiens
catgttttcctccag

SEQ ID NO: 1101060 - DNA, 15 bp, Homo sapiens
acatgttttcctcca

SEQ ID NO: 1101061 - DNA, 15 bp, Homo sapiens
aacatgttttcctcc

SEQ ID NO: 1101062 - DNA, 15 bp, Homo sapiens
gaacatgttttcctc

SEQ ID NO: 1101063 - DNA, 15 bp, Homo sapiens
agaacatgttttcct

SEQ ID NO: 1101064 - DNA, 15 bp, Homo sapiens
cagaacatgttttcc

SEQ ID NO: 1101065 - DNA, 15 bp, Homo sapiens
ccagaacatgttttc

SEQ ID NO: 1101066 - DNA, 15 bp, Homo sapiens
cccagaacatgtttt

SEQ ID NO: 1101067 - DNA, 15 bp, Homo sapiens
gcccagaacatgttt

SEQ ID NO: 1101068 - DNA, 15 bp, Homo sapiens
ggcccagaacatgtt

SEQ ID NO: 1101069 - DNA, 15 bp, Homo sapiens
cggcccagaacatgt

SEQ ID NO: 1101070 - DNA, 15 bp, Homo sapiens
ccggcccagaacatg

SEQ ID NO: 1101071 - DNA, 15 bp, Homo sapiens
tccggcccagaacat

SEQ ID NO: 1101072 - DNA, 15 bp, Homo sapiens
ctccggcccagaaca

SEQ ID NO: 1101073 - DNA, 15 bp, Homo sapiens
actccggcccagaac

SEQ ID NO: 1101074 - DNA, 15 bp, Homo sapiens
cactccggcccagaa

SEQ ID NO: 1101075 - DNA, 15 bp, Homo sapiens
ccactccggcccaga

SEQ ID NO: 1101076 - DNA, 15 bp, Homo sapiens
accactccggcccag

SEQ ID NO: 1101077 - DNA, 15 bp, Homo sapiens
taccactccggccca

SEQ ID NO: 1101078 - DNA, 15 bp, Homo sapiens
ataccactccggccc

SEQ ID NO: 1101079 - DNA, 15 bp, Homo sapiens
aataccactccggcc

SEQ ID NO: 1101080 - DNA, 15 bp, Homo sapiens
gaataccactccggc

SEQ ID NO: 1101081 - DNA, 15 bp, Homo sapiens
ggaataccactccgg

SEQ ID NO: 1101082 - DNA, 15 bp, Homo sapiens
gggaataccactccg

SEQ ID NO: 1101083 - DNA, 15 bp, Homo sapiens
agggaataccactcc

SEQ ID NO: 1101084 - DNA, 15 bp, Homo sapiens
cagggaataccactc

SEQ ID NO: 1101085 - DNA, 15 bp, Homo sapiens
tcagggaataccact

SEQ ID NO: 1101086 - DNA, 15 bp, Homo sapiens
gtcagggaataccac

SEQ ID NO: 1101087 - DNA, 15 bp, Homo sapiens
tgtcagggaatacca

SEQ ID NO: 1101088 - DNA, 15 bp, Homo sapiens
atgtcagggaatacc

SEQ ID NO: 1101089 - DNA, 15 bp, Homo sapiens
catgtcagggaatac

SEQ ID NO: 1101090 - DNA, 15 bp, Homo sapiens
acatgtcagggaata

SEQ ID NO: 1101091 - DNA, 15 bp, Homo sapiens
tacatgtcagggaat

SEQ ID NO: 1101092 - DNA, 15 bp, Homo sapiens
atacatgtcagggaa

SEQ ID NO: 1101093 - DNA, 15 bp, Homo sapiens
gatacatgtcaggga

SEQ ID NO: 1101094 - DNA, 15 bp, Homo sapiens
ggatacatgtcaggg

SEQ ID NO: 1101095 - DNA, 15 bp, Homo sapiens
gggatacatgtcagg

SEQ ID NO: 1101096 - DNA, 15 bp, Homo sapiens
agggatacatgtcag

SEQ ID NO: 1101097 - DNA, 15 bp, Homo sapiens
cagggatacatgtca

SEQ ID NO: 1101098 - DNA, 15 bp, Homo sapiens
ccagggatacatgtc

SEQ ID NO: 1101099 - DNA, 15 bp, Homo sapiens
tccagggatacatgt

SEQ ID NO: 1101100 - DNA, 15 bp, Homo sapiens
gtccagggatacatg

SEQ ID NO: 1101101 - DNA, 15 bp, Homo sapiens
ggtccagggatacat

SEQ ID NO: 1101102 - DNA, 15 bp, Homo sapiens
tggtccagggataca

SEQ ID NO: 1101103 - DNA, 15 bp, Homo sapiens
ctggtccagggatac

SEQ ID NO: 1101104 - DNA, 15 bp, Homo sapiens
gctggtccagggata

SEQ ID NO: 1101105 - DNA, 15 bp, Homo sapiens
agctggtccagggat

SEQ ID NO: 1101106 - DNA, 15 bp, Homo sapiens
gagctggtccaggga

SEQ ID NO: 1101107 - DNA, 15 bp, Homo sapiens
agagctggtccaggg

SEQ ID NO: 1101108 - DNA, 15 bp, Homo sapiens
gagagctggtccagg

SEQ ID NO: 1101109 - DNA, 15 bp, Homo sapiens
agagagctggtccag

SEQ ID NO: 1101110 - DNA, 15 bp, Homo sapiens
tagagagctggtcca

SEQ ID NO: 1101111 - DNA, 15 bp, Homo sapiens
gtagagagctggtcc

SEQ ID NO: 1101112 - DNA, 15 bp, Homo sapiens
ggtagagagctggtc

SEQ ID NO: 1101113 - DNA, 15 bp, Homo sapiens
tggtagagagctggt

SEQ ID NO: 1101114 - DNA, 15 bp, Homo sapiens
gtggtagagagctgg

SEQ ID NO: 1101115 - DNA, 15 bp, Homo sapiens
ggtggtagagagctg

SEQ ID NO: 1101116 - DNA, 15 bp, Homo sapiens
gggtggtagagagct

SEQ ID NO: 1101117 - DNA, 15 bp, Homo sapiens
ggggtggtagagagc

SEQ ID NO: 1101118 - DNA, 15 bp, Homo sapiens
tggggtggtagagag

SEQ ID NO: 1101119 - DNA, 15 bp, Homo sapiens
gtggggtggtagaga

SEQ ID NO: 1101120 - DNA, 15 bp, Homo sapiens
cgtggggtggtagag

SEQ ID NO: 1101121 - DNA, 15 bp, Homo sapiens
acgtggggtggtaga

SEQ ID NO: 1101122 - DNA, 15 bp, Homo sapiens
cacgtggggtggtag

SEQ ID NO: 1101123 - DNA, 15 bp, Homo sapiens
tcacgtggggtggta

SEQ ID NO: 1101124 - DNA, 15 bp, Homo sapiens
ttcacgtggggtggt

SEQ ID NO: 1101125 - DNA, 15 bp, Homo sapiens
cttcacgtggggtgg

SEQ ID NO: 1101126 - DNA, 15 bp, Homo sapiens
acttcacgtggggtg

SEQ ID NO: 1101127 - DNA, 15 bp, Homo sapiens
tacttcacgtggggt

SEQ ID NO: 1101128 - DNA, 15 bp, Homo sapiens
atacttcacgtgggg

SEQ ID NO: 1101129 - DNA, 15 bp, Homo sapiens
tatacttcacgtggg

SEQ ID NO: 1101130 - DNA, 15 bp, Homo sapiens
ttatacttcacgtgg

SEQ ID NO: 1101131 - DNA, 15 bp, Homo sapiens
cttatacttcacgtg

SEQ ID NO: 1101132 - DNA, 15 bp, Homo sapiens
tcttatacttcacgt

SEQ ID NO: 1101133 - DNA, 15 bp, Homo sapiens
atcttatacttcacg

SEQ ID NO: 1101134 - DNA, 15 bp, Homo sapiens
gatcttatacttcac

SEQ ID NO: 1101135 - DNA, 15 bp, Homo sapiens
ggatcttatacttca

SEQ ID NO: 1101136 - DNA, 15 bp, Homo sapiens
cggatcttatacttc

SEQ ID NO: 1101137 - DNA, 15 bp, Homo sapiens
tcggatcttatactt

SEQ ID NO: 1101138 - DNA, 15 bp, Homo sapiens
ttcggatcttatact

SEQ ID NO: 1101139 - DNA, 15 bp, Homo sapiens
attcggatcttatac

SEQ ID NO: 1101140 - DNA, 15 bp, Homo sapiens
cattcggatcttata

SEQ ID NO: 1101141 - DNA, 15 bp, Homo sapiens
ccattcggatcttat

SEQ ID NO: 1101142 - DNA, 15 bp, Homo sapiens
tccattcggatctta

SEQ ID NO: 1101143 - DNA, 15 bp, Homo sapiens
gtccattcggatctt

SEQ ID NO: 1101144 - DNA, 15 bp, Homo sapiens
tgtccattcggatct

SEQ ID NO: 1101145 - DNA, 15 bp, Homo sapiens
atgtccattcggatc

SEQ ID NO: 1101146 - DNA, 15 bp, Homo sapiens
tatgtccattcggat

SEQ ID NO: 1101147 - DNA, 15 bp, Homo sapiens
ctatgtccattcgga

SEQ ID NO: 1101148 - DNA, 15 bp, Homo sapiens
tctatgtccattcgg

SEQ ID NO: 1101149 - DNA, 15 bp, Homo sapiens
gtctatgtccattcg

SEQ ID NO: 1101150 - DNA, 15 bp, Homo sapiens
cgtctatgtccattc

SEQ ID NO: 1101151 - DNA, 15 bp, Homo sapiens
acgtctatgtccatt

SEQ ID NO: 1101152 - DNA, 15 bp, Homo sapiens
cacgtctatgtccat

SEQ ID NO: 1101153 - DNA, 15 bp, Homo sapiens
ccacgtctatgtcca

SEQ ID NO: 1101154 - DNA, 15 bp, Homo sapiens
accacgtctatgtcc

SEQ ID NO: 1101155 - DNA, 15 bp, Homo sapiens
caccacgtctatgtc

SEQ ID NO: 1101156 - DNA, 15 bp, Homo sapiens
ccaccacgtctatgt

SEQ ID NO: 1101157 - DNA, 15 bp, Homo sapiens
tccaccacgtctatg

SEQ ID NO: 1101158 - DNA, 15 bp, Homo sapiens
aaacaggaaaacctc

SEQ ID NO: 1101159 - DNA, 15 bp, Homo sapiens
aaaacaggaaaacct

SEQ ID NO: 1101160 - DNA, 15 bp, Homo sapiens
gaaaacaggaaaacc

SEQ ID NO: 1101161 - DNA, 15 bp, Homo sapiens
ggaaaacaggaaaac

SEQ ID NO: 1101162 - DNA, 15 bp, Homo sapiens
aggaaaacaggaaaa

SEQ ID NO: 1101163 - DNA, 15 bp, Homo sapiens
aaggaaaacaggaaa

SEQ ID NO: 1101164 - DNA, 15 bp, Homo sapiens
aaaggaaaacaggaa

SEQ ID NO: 1101165 - DNA, 15 bp, Homo sapiens
gaaaggaaaacagga

SEQ ID NO: 1101166 - DNA, 15 bp, Homo sapiens
ggaaaggaaaacagg

SEQ ID NO: 1101167 - DNA, 15 bp, Homo sapiens
gggaaaggaaaacag

SEQ ID NO: 1101168 - DNA, 15 bp, Homo sapiens
agggaaaggaaaaca

SEQ ID NO: 1101169 - DNA, 15 bp, Homo sapiens
gagggaaaggaaaac

SEQ ID NO: 1101170 - DNA, 15 bp, Homo sapiens
ggagggaaaggaaaa

SEQ ID NO: 1101171 - DNA, 15 bp, Homo sapiens
tggagggaaaggaaa

SEQ ID NO: 1101172 - DNA, 15 bp, Homo sapiens
atggagggaaaggaa

SEQ ID NO: 1101173 - DNA, 15 bp, Homo sapiens
gatggagggaaagga

SEQ ID NO: 1101174 - DNA, 15 bp, Homo sapiens
agatggagggaaagg

SEQ ID NO: 1101175 - DNA, 15 bp, Homo sapiens
cagatggagggaaag

SEQ ID NO: 1101176 - DNA, 15 bp, Homo sapiens
ccagatggagggaaa

SEQ ID NO: 1101177 - DNA, 15 bp, Homo sapiens
cccagatggagggaa

SEQ ID NO: 1101178 - DNA, 15 bp, Homo sapiens
gcccagatggaggga

SEQ ID NO: 1101179 - DNA, 15 bp, Homo sapiens
agcccagatggaggg

SEQ ID NO: 1101180 - DNA, 15 bp, Homo sapiens
aagcccagatggagg

SEQ ID NO: 1101181 - DNA, 15 bp, Homo sapiens
aaagcccagatggag

SEQ ID NO: 1101182 - DNA, 15 bp, Homo sapiens
caaagcccagatgga

SEQ ID NO: 1101183 - DNA, 15 bp, Homo sapiens
acaaagcccagatgg

SEQ ID NO: 1101184 - DNA, 15 bp, Homo sapiens
aacaaagcccagatg

SEQ ID NO: 1101185 - DNA, 15 bp, Homo sapiens
gaacaaagcccagat

SEQ ID NO: 1101186 - DNA, 15 bp, Homo sapiens
agaacaaagcccaga

SEQ ID NO: 1101187 - DNA, 15 bp, Homo sapiens
gagaacaaagcccag

SEQ ID NO: 1101188 - DNA, 15 bp, Homo sapiens
tgagaacaaagccca

SEQ ID NO: 1101189 - DNA, 15 bp, Homo sapiens
ttgagaacaaagccc

SEQ ID NO: 1101190 - DNA, 15 bp, Homo sapiens
gttgagaacaaagcc

SEQ ID NO: 1101191 - DNA, 15 bp, Homo sapiens
tgttgagaacaaagc

SEQ ID NO: 1101192 - DNA, 15 bp, Homo sapiens
gtgttgagaacaaag

SEQ ID NO: 1101193 - DNA, 15 bp, Homo sapiens
tgtgttgagaacaaa

SEQ ID NO: 1101194 - DNA, 15 bp, Homo sapiens
atgtgttgagaacaa

SEQ ID NO: 1101195 - DNA, 15 bp, Homo sapiens
aatgtgttgagaaca

SEQ ID NO: 1101196 - DNA, 15 bp, Homo sapiens
gaatgtgttgagaac

SEQ ID NO: 1101197 - DNA, 15 bp, Homo sapiens
tgaatgtgttgagaa

SEQ ID NO: 1101198 - DNA, 15 bp, Homo sapiens
atgaatgtgttgaga

SEQ ID NO: 1101199 - DNA, 15 bp, Homo sapiens
aatgaatgtgttgag

SEQ ID NO: 1101200 - DNA, 15 bp, Homo sapiens
gaatgaatgtgttga

SEQ ID NO: 1101201 - DNA, 15 bp, Homo sapiens
tgaatgaatgtgttg

SEQ ID NO: 1101202 - DNA, 15 bp, Homo sapiens
ttgaatgaatgtgtt

SEQ ID NO: 1101203 - DNA, 15 bp, Homo sapiens
gttgaatgaatgtgt

SEQ ID NO: 1101204 - DNA, 15 bp, Homo sapiens
tgttgaatgaatgtg

SEQ ID NO: 1101205 - DNA, 15 bp, Homo sapiens
ttgttgaatgaatgt

SEQ ID NO: 1101206 - DNA, 15 bp, Homo sapiens
tttgttgaatgaatg

SEQ ID NO: 1101207 - DNA, 15 bp, Homo sapiens
gtttgttgaatgaat

SEQ ID NO: 1101208 - DNA, 15 bp, Homo sapiens
tgtttgttgaatgaa

SEQ ID NO: 1101209 - DNA, 15 bp, Homo sapiens
atgtttgttgaatga

SEQ ID NO: 1101210 - DNA, 15 bp, Homo sapiens
aatgtttgttgaatg

SEQ ID NO: 1101211 - DNA, 15 bp, Homo sapiens
aaatgtttgttgaat

SEQ ID NO: 1101212 - DNA, 15 bp, Homo sapiens
taaatgtttgttgaa

SEQ ID NO: 1101213 - DNA, 15 bp, Homo sapiens
ataaatgtttgttga

SEQ ID NO: 1101214 - DNA, 15 bp, Homo sapiens
gaataaatgtttgtt

SEQ ID NO: 1101215 - DNA, 15 bp, Homo sapiens
agaataaatgtttgt

SEQ ID NO: 1101216 - DNA, 15 bp, Homo sapiens
cagaataaatgtttg

SEQ ID NO: 1101217 - DNA, 15 bp, Homo sapiens
gcagaataaatgttt

SEQ ID NO: 1101218 - DNA, 15 bp, Homo sapiens
ggcagaataaatgtt

SEQ ID NO: 1101219 - DNA, 15 bp, Homo sapiens
aggcagaataaatgt

SEQ ID NO: 1101220 - DNA, 15 bp, Homo sapiens
gaggcagaataaatg

SEQ ID NO: 1101221 - DNA, 15 bp, Homo sapiens
agaggcagaataaat

SEQ ID NO: 1101222 - DNA, 15 bp, Homo sapiens
tagaggcagaataaa

SEQ ID NO: 1101223 - DNA, 15 bp, Homo sapiens
gtagaggcagaataa

SEQ ID NO: 1101224 - DNA, 15 bp, Homo sapiens
ggtagaggcagaata

SEQ ID NO: 1101225 - DNA, 15 bp, Homo sapiens
tggtagaggcagaat

SEQ ID NO: 1101226 - DNA, 15 bp, Homo sapiens
ctggtagaggcagaa

SEQ ID NO: 1101227 - DNA, 15 bp, Homo sapiens
cctggtagaggcaga

SEQ ID NO: 1101228 - DNA, 15 bp, Homo sapiens
acctggtagaggcag

SEQ ID NO: 1101229 - DNA, 15 bp, Homo sapiens
tacctggtagaggca

SEQ ID NO: 1101230 - DNA, 15 bp, Homo sapiens
gtacctggtagaggc

SEQ ID NO: 1101231 - DNA, 15 bp, Homo sapiens
tgtacctggtagagg

SEQ ID NO: 1101232 - DNA, 15 bp, Homo sapiens
ctgtacctggtagag

SEQ ID NO: 1101233 - DNA, 15 bp, Homo sapiens
tctgtacctggtaga

SEQ ID NO: 1101234 - DNA, 15 bp, Homo sapiens
ctctgtacctggtag

SEQ ID NO: 1101235 - DNA, 15 bp, Homo sapiens
gctctgtacctggta

SEQ ID NO: 1101236 - DNA, 15 bp, Homo sapiens
tgctctgtacctggt

SEQ ID NO: 1101237 - DNA, 15 bp, Homo sapiens
gtgctctgtacctgg

SEQ ID NO: 1101238 - DNA, 15 bp, Homo sapiens
agtgctctgtacctg

SEQ ID NO: 1101239 - DNA, 15 bp, Homo sapiens
gagtgctctgtacct

SEQ ID NO: 1101240 - DNA, 15 bp, Homo sapiens
agagtgctctgtacc

SEQ ID NO: 1101241 - DNA, 15 bp, Homo sapiens
tagagtgctctgtac

SEQ ID NO: 1101242 - DNA, 15 bp, Homo sapiens
gtagagtgctctgta

SEQ ID NO: 1101243 - DNA, 15 bp, Homo sapiens
agtagagtgctctgt

SEQ ID NO: 1101244 - DNA, 15 bp, Homo sapiens
tagtagagtgctctg

SEQ ID NO: 1101245 - DNA, 15 bp, Homo sapiens
atagtagagtgctct

SEQ ID NO: 1101246 - DNA, 15 bp, Homo sapiens
aatagtagagtgctc

SEQ ID NO: 1101247 - DNA, 15 bp, Homo sapiens
gaatagtagagtgct

SEQ ID NO: 1101248 - DNA, 15 bp, Homo sapiens
agaatagtagagtgc

SEQ ID NO: 1101249 - DNA, 15 bp, Homo sapiens
cagaatagtagagtg

SEQ ID NO: 1101250 - DNA, 15 bp, Homo sapiens
gcagaatagtagagt

SEQ ID NO: 1101251 - DNA, 15 bp, Homo sapiens
agcagaatagtagag

SEQ ID NO: 1101252 - DNA, 15 bp, Homo sapiens
aagcagaatagtaga

SEQ ID NO: 1101253 - DNA, 15 bp, Homo sapiens
gaagcagaatagtag

SEQ ID NO: 1101254 - DNA, 15 bp, Homo sapiens
agaagcagaatagta

SEQ ID NO: 1101255 - DNA, 15 bp, Homo sapiens
gagaagcagaatagt

SEQ ID NO: 1101256 - DNA, 15 bp, Homo sapiens
agagaagcagaatag

SEQ ID NO: 1101257 - DNA, 15 bp, Homo sapiens
gagagaagcagaata

SEQ ID NO: 1101258 - DNA, 15 bp, Homo sapiens
ggagagaagcagaat

SEQ ID NO: 1101259 - DNA, 15 bp, Homo sapiens
aggagagaagcagaa

SEQ ID NO: 1101260 - DNA, 15 bp, Homo sapiens
aaggagagaagcaga

SEQ ID NO: 1101261 - DNA, 15 bp, Homo sapiens
aaaggagagaagcag

SEQ ID NO: 1101262 - DNA, 15 bp, Homo sapiens
aaaaggagagaagca

SEQ ID NO: 1101263 - DNA, 15 bp, Homo sapiens
caaaaggagagaagc

SEQ ID NO: 1101264 - DNA, 15 bp, Homo sapiens
gcaaaaggagagaag

SEQ ID NO: 1101265 - DNA, 15 bp, Homo sapiens
agcaaaaggagagaa

SEQ ID NO: 1101266 - DNA, 15 bp, Homo sapiens
aagcaaaaggagaga

SEQ ID NO: 1101267 - DNA, 15 bp, Homo sapiens
aaagcaaaaggagag

SEQ ID NO: 1101268 - DNA, 15 bp, Homo sapiens
taaagcaaaaggaga

SEQ ID NO: 1101269 - DNA, 15 bp, Homo sapiens
ctaaagcaaaaggag

SEQ ID NO: 1101270 - DNA, 15 bp, Homo sapiens
actaaagcaaaagga

SEQ ID NO: 1101271 - DNA, 15 bp, Homo sapiens
aactaaagcaaaagg

SEQ ID NO: 1101272 - DNA, 15 bp, Homo sapiens
aaactaaagcaaaag

SEQ ID NO: 1101273 - DNA, 15 bp, Homo sapiens
gaaactaaagcaaaa

SEQ ID NO: 1101274 - DNA, 15 bp, Homo sapiens
tgaaactaaagcaaa

SEQ ID NO: 1101275 - DNA, 15 bp, Homo sapiens
atgaaactaaagcaa

SEQ ID NO: 1101276 - DNA, 15 bp, Homo sapiens
catgaaactaaagca

SEQ ID NO: 1101277 - DNA, 15 bp, Homo sapiens
tcatgaaactaaagc

SEQ ID NO: 1101278 - DNA, 15 bp, Homo sapiens
atcatgaaactaaag

SEQ ID NO: 1101279 - DNA, 15 bp, Homo sapiens
gatcatgaaactaaa

SEQ ID NO: 1101280 - DNA, 15 bp, Homo sapiens
tgatcatgaaactaa

SEQ ID NO: 1101281 - DNA, 15 bp, Homo sapiens
atgatcatgaaacta

SEQ ID NO: 1101282 - DNA, 15 bp, Homo sapiens
gatgatcatgaaact

SEQ ID NO: 1101283 - DNA, 15 bp, Homo sapiens
ggatgatcatgaaac

SEQ ID NO: 1101284 - DNA, 15 bp, Homo sapiens
aggatgatcatgaaa

SEQ ID NO: 1101285 - DNA, 15 bp, Homo sapiens
caggatgatcatgaa

SEQ ID NO: 1101286 - DNA, 15 bp, Homo sapiens
tcaggatgatcatga

SEQ ID NO: 1101287 - DNA, 15 bp, Homo sapiens
ttcaggatgatcatg

SEQ ID NO: 1101288 - DNA, 15 bp, Homo sapiens
gttcaggatgatcat

SEQ ID NO: 1101289 - DNA, 15 bp, Homo sapiens
ggttcaggatgatca

SEQ ID NO: 1101290 - DNA, 15 bp, Homo sapiens
cggttcaggatgatc

SEQ ID NO: 1101291 - DNA, 15 bp, Homo sapiens
gcggttcaggatgat

SEQ ID NO: 1101292 - DNA, 15 bp, Homo sapiens
agcggttcaggatga

SEQ ID NO: 1101293 - DNA, 15 bp, Homo sapiens
cagcggttcaggatg

SEQ ID NO: 1101294 - DNA, 15 bp, Homo sapiens
acagcggttcaggat

SEQ ID NO: 1101295 - DNA, 15 bp, Homo sapiens
aacagcggttcagga

SEQ ID NO: 1101296 - DNA, 15 bp, Homo sapiens
aaacagcggttcagg

SEQ ID NO: 1101297 - DNA, 15 bp, Homo sapiens
gaaacagcggttcag

SEQ ID NO: 1101298 - DNA, 15 bp, Homo sapiens
ggaaacagcggttca

SEQ ID NO: 1101299 - DNA, 15 bp, Homo sapiens
gggaaacagcggttc

SEQ ID NO: 1101300 - DNA, 15 bp, Homo sapiens
agggaaacagcggtt

SEQ ID NO: 1101301 - DNA, 15 bp, Homo sapiens
tagggaaacagcggt

SEQ ID NO: 1101302 - DNA, 15 bp, Homo sapiens
atagggaaacagcgg

SEQ ID NO: 1101303 - DNA, 15 bp, Homo sapiens
gatagggaaacagcg

SEQ ID NO: 1101304 - DNA, 15 bp, Homo sapiens
agatagggaaacagc

SEQ ID NO: 1101305 - DNA, 15 bp, Homo sapiens
aagatagggaaacag

SEQ ID NO: 1101306 - DNA, 15 bp, Homo sapiens
gaagatagggaaaca

SEQ ID NO: 1101307 - DNA, 15 bp, Homo sapiens
tgaagatagggaaac

SEQ ID NO: 1101308 - DNA, 15 bp, Homo sapiens
atgaagatagggaaa

SEQ ID NO: 1101309 - DNA, 15 bp, Homo sapiens
catgaagatagggaa

SEQ ID NO: 1101310 - DNA, 15 bp, Homo sapiens
ccatgaagataggga

SEQ ID NO: 1101311 - DNA, 15 bp, Homo sapiens
accatgaagataggg

SEQ ID NO: 1101312 - DNA, 15 bp, Homo sapiens
caccatgaagatagg

SEQ ID NO: 1101313 - DNA, 15 bp, Homo sapiens
gcaccatgaagatag

SEQ ID NO: 1101314 - DNA, 15 bp, Homo sapiens
agcaccatgaagata

SEQ ID NO: 1101315 - DNA, 15 bp, Homo sapiens
cagcaccatgaagat

SEQ ID NO: 1101316 - DNA, 15 bp, Homo sapiens
ccagcaccatgaaga

SEQ ID NO: 1101317 - DNA, 15 bp, Homo sapiens
gccagcaccatgaag

SEQ ID NO: 1101318 - DNA, 15 bp, Homo sapiens
tgccagcaccatgaa

SEQ ID NO: 1101319 - DNA, 15 bp, Homo sapiens
atgccagcaccatga

SEQ ID NO: 1101320 - DNA, 15 bp, Homo sapiens
catgccagcaccatg

SEQ ID NO: 1101321 - DNA, 15 bp, Homo sapiens
ccatgccagcaccat

SEQ ID NO: 1101322 - DNA, 15 bp, Homo sapiens
tccatgccagcacca

SEQ ID NO: 1101323 - DNA, 15 bp, Homo sapiens
atccatgccagcacc

SEQ ID NO: 1101324 - DNA, 15 bp, Homo sapiens
gatccatgccagcac

SEQ ID NO: 1101325 - DNA, 15 bp, Homo sapiens
agatccatgccagca

SEQ ID NO: 1101326 - DNA, 15 bp, Homo sapiens
tagatccatgccagc

SEQ ID NO: 1101327 - DNA, 15 bp, Homo sapiens
gtagatccatgccag

SEQ ID NO: 1101328 - DNA, 15 bp, Homo sapiens
agtagatccatgcca

SEQ ID NO: 1101329 - DNA, 15 bp, Homo sapiens
gagtagatccatgcc

SEQ ID NO: 1101330 - DNA, 15 bp, Homo sapiens
agagtagatccatgc

SEQ ID NO: 1101331 - DNA, 15 bp, Homo sapiens
cagagtagatccatg

SEQ ID NO: 1101332 - DNA, 15 bp, Homo sapiens
acagagtagatccat

SEQ ID NO: 1101333 - DNA, 15 bp, Homo sapiens
gacagagtagatcca

SEQ ID NO: 1101334 - DNA, 15 bp, Homo sapiens
agacagagtagatcc

SEQ ID NO: 1101335 - DNA, 15 bp, Homo sapiens
gagacagagtagatc

SEQ ID NO: 1101336 - DNA, 15 bp, Homo sapiens
ggagacagagtagat

SEQ ID NO: 1101337 - DNA, 15 bp, Homo sapiens
tggagacagagtaga

SEQ ID NO: 1101338 - DNA, 15 bp, Homo sapiens
atggagacagagtag

SEQ ID NO: 1101339 - DNA, 15 bp, Homo sapiens
catggagacagagta

SEQ ID NO: 1101340 - DNA, 15 bp, Homo sapiens
tcatggagacagagt

SEQ ID NO: 1101341 - DNA, 15 bp, Homo sapiens
gtcatggagacagag

SEQ ID NO: 1101342 - DNA, 15 bp, Homo sapiens
agtcatggagacaga

SEQ ID NO: 1101343 - DNA, 15 bp, Homo sapiens
cagtcatggagacag

SEQ ID NO: 1101344 - DNA, 15 bp, Homo sapiens
acagtcatggagaca

SEQ ID NO: 1101345 - DNA, 15 bp, Homo sapiens
cacagtcatggagac

SEQ ID NO: 1101346 - DNA, 15 bp, Homo sapiens
tcacagtcatggaga

SEQ ID NO: 1101347 - DNA, 15 bp, Homo sapiens
ttcacagtcatggag

SEQ ID NO: 1101348 - DNA, 15 bp, Homo sapiens
cttcacagtcatgga

SEQ ID NO: 1101349 - DNA, 15 bp, Homo sapiens
tcttcacagtcatgg

SEQ ID NO: 1101350 - DNA, 15 bp, Homo sapiens
ctcttcacagtcatg

SEQ ID NO: 1101351 - DNA, 15 bp, Homo sapiens
gctcttcacagtcat

SEQ ID NO: 1101352 - DNA, 15 bp, Homo sapiens
tgctcttcacagtca

SEQ ID NO: 1101353 - DNA, 15 bp, Homo sapiens
atgctcttcacagtc

SEQ ID NO: 1101354 - DNA, 15 bp, Homo sapiens
gatgctcttcacagt

SEQ ID NO: 1101355 - DNA, 15 bp, Homo sapiens
cgatgctcttcacag

SEQ ID NO: 1101356 - DNA, 15 bp, Homo sapiens
acgatgctcttcaca

SEQ ID NO: 1101357 - DNA, 15 bp, Homo sapiens
gacgatgctcttcac

SEQ ID NO: 1101358 - DNA, 15 bp, Homo sapiens
agacgatgctcttca

SEQ ID NO: 1101359 - DNA, 15 bp, Homo sapiens
aagacgatgctcttc

SEQ ID NO: 1101360 - DNA, 15 bp, Homo sapiens
caagacgatgctctt

SEQ ID NO: 1101361 - DNA, 15 bp, Homo sapiens
ccaagacgatgctct

SEQ ID NO: 1101362 - DNA, 15 bp, Homo sapiens
tccaagacgatgctc

SEQ ID NO: 1101363 - DNA, 15 bp, Homo sapiens
ctccaagacgatgct

SEQ ID NO: 1101364 - DNA, 15 bp, Homo sapiens
tctccaagacgatgc

SEQ ID NO: 1101365 - DNA, 15 bp, Homo sapiens
ttctccaagacgatg

SEQ ID NO: 1101366 - DNA, 15 bp, Homo sapiens
cttctccaagacgat

SEQ ID NO: 1101367 - DNA, 15 bp, Homo sapiens
ccttctccaagacga

SEQ ID NO: 1101368 - DNA, 15 bp, Homo sapiens
tccttctccaagacg

SEQ ID NO: 1101369 - DNA, 15 bp, Homo sapiens
ctccttctccaagac

SEQ ID NO: 1101370 - DNA, 15 bp, Homo sapiens
actccttctccaaga

SEQ ID NO: 1101371 - DNA, 15 bp, Homo sapiens
aactccttctccaag

SEQ ID NO: 1101372 - DNA, 15 bp, Homo sapiens
caactccttctccaa

SEQ ID NO: 1101373 - DNA, 15 bp, Homo sapiens
gcaactccttctcca

SEQ ID NO: 1101374 - DNA, 15 bp, Homo sapiens
cgcaactccttctcc

SEQ ID NO: 1101375 - DNA, 15 bp, Homo sapiens
tcgcaactccttctc

SEQ ID NO: 1101376 - DNA, 15 bp, Homo sapiens
gtcgcaactccttct

SEQ ID NO: 1101377 - DNA, 15 bp, Homo sapiens
agtcgcaactccttc

SEQ ID NO: 1101378 - DNA, 15 bp, Homo sapiens
cagtcgcaactcctt

SEQ ID NO: 1101379 - DNA, 15 bp, Homo sapiens
tcagtcgcaactcct

SEQ ID NO: 1101380 - DNA, 15 bp, Homo sapiens
ttcagtcgcaactcc

SEQ ID NO: 1101381 - DNA, 15 bp, Homo sapiens
cttcagtcgcaactc

SEQ ID NO: 1101382 - DNA, 15 bp, Homo sapiens
ccttcagtcgcaact

SEQ ID NO: 1101383 - DNA, 15 bp, Homo sapiens
tccttcagtcgcaac

SEQ ID NO: 1101384 - DNA, 15 bp, Homo sapiens
ctccttcagtcgcaa

SEQ ID NO: 1101385 - DNA, 15 bp, Homo sapiens
tctccttcagtcgca

SEQ ID NO: 1101386 - DNA, 15 bp, Homo sapiens
gtctccttcagtcgc

SEQ ID NO: 1101387 - DNA, 15 bp, Homo sapiens
ggtctccttcagtcg

SEQ ID NO: 1101388 - DNA, 15 bp, Homo sapiens
aggtctccttcagtc

SEQ ID NO: 1101389 - DNA, 15 bp, Homo sapiens
aaggtctccttcagt

SEQ ID NO: 1101390 - DNA, 15 bp, Homo sapiens
caaggtctccttcag

SEQ ID NO: 1101391 - DNA, 15 bp, Homo sapiens
tcaaggtctccttca

SEQ ID NO: 1101392 - DNA, 15 bp, Homo sapiens
ttcaaggtctccttc

SEQ ID NO: 1101393 - DNA, 15 bp, Homo sapiens
tttcaaggtctcctt

SEQ ID NO: 1101394 - DNA, 15 bp, Homo sapiens
ttttcaaggtctcct

SEQ ID NO: 1101395 - DNA, 15 bp, Homo sapiens
tttttcaaggtctcc

SEQ ID NO: 1101396 - DNA, 15 bp, Homo sapiens
atttttcaaggtctc

SEQ ID NO: 1101397 - DNA, 15 bp, Homo sapiens
gatttttcaaggtct

SEQ ID NO: 1101398 - DNA, 15 bp, Homo sapiens
tgatttttcaaggtc

SEQ ID NO: 1101399 - DNA, 15 bp, Homo sapiens
ctgatttttcaaggt

SEQ ID NO: 1101400 - DNA, 15 bp, Homo sapiens
cctgatttttcaagg

SEQ ID NO: 1101401 - DNA, 15 bp, Homo sapiens
ccctgatttttcaag

SEQ ID NO: 1101402 - DNA, 15 bp, Homo sapiens
accctgatttttcaa

SEQ ID NO: 1101403 - DNA, 15 bp, Homo sapiens
caccctgatttttca

SEQ ID NO: 1101404 - DNA, 15 bp, Homo sapiens
acaccctgatttttc

SEQ ID NO: 1101405 - DNA, 15 bp, Homo sapiens
gacaccctgattttt

SEQ ID NO: 1101406 - DNA, 15 bp, Homo sapiens
agacaccctgatttt

SEQ ID NO: 1101407 - DNA, 15 bp, Homo sapiens
gagacaccctgattt

SEQ ID NO: 1101408 - DNA, 15 bp, Homo sapiens
ggagacaccctgatt

SEQ ID NO: 1101409 - DNA, 15 bp, Homo sapiens
tggagacaccctgat

SEQ ID NO: 1101410 - DNA, 15 bp, Homo sapiens
ttggagacaccctga

SEQ ID NO: 1101411 - DNA, 15 bp, Homo sapiens
attggagacaccctg

SEQ ID NO: 1101412 - DNA, 15 bp, Homo sapiens
cattggagacaccct

SEQ ID NO: 1101413 - DNA, 15 bp, Homo sapiens
gcattggagacaccc

SEQ ID NO: 1101414 - DNA, 15 bp, Homo sapiens
tgcattggagacacc

SEQ ID NO: 1101415 - DNA, 15 bp, Homo sapiens
ctgcattggagacac

SEQ ID NO: 1101416 - DNA, 15 bp, Homo sapiens
actgcattggagaca

SEQ ID NO: 1101417 - DNA, 15 bp, Homo sapiens
cactgcattggagac

SEQ ID NO: 1101418 - DNA, 15 bp, Homo sapiens
tcactgcattggaga

SEQ ID NO: 1101419 - DNA, 15 bp, Homo sapiens
atcactgcattggag

SEQ ID NO: 1101420 - DNA, 15 bp, Homo sapiens
aatcactgcattgga

SEQ ID NO: 1101421 - DNA, 15 bp, Homo sapiens
aaatcactgcattgg

SEQ ID NO: 1101422 - DNA, 15 bp, Homo sapiens
caaatcactgcattg

SEQ ID NO: 1101423 - DNA, 15 bp, Homo sapiens
ccaaatcactgcatt

SEQ ID NO: 1101424 - DNA, 15 bp, Homo sapiens
accaaatcactgcat

SEQ ID NO: 1101425 - DNA, 15 bp, Homo sapiens
caccaaatcactgca

SEQ ID NO: 1101426 - DNA, 15 bp, Homo sapiens
acaccaaatcactgc

SEQ ID NO: 1101427 - DNA, 15 bp, Homo sapiens
tacaccaaatcactg

SEQ ID NO: 1101428 - DNA, 15 bp, Homo sapiens
gtacaccaaatcact

SEQ ID NO: 1101429 - DNA, 15 bp, Homo sapiens
ggtacaccaaatcac

SEQ ID NO: 1101430 - DNA, 15 bp, Homo sapiens
aggtacaccaaatca

SEQ ID NO: 1101431 - DNA, 15 bp, Homo sapiens
caggtacaccaaatc

SEQ ID NO: 1101432 - DNA, 15 bp, Homo sapiens
ccaggtacaccaaat

SEQ ID NO: 1101433 - DNA, 15 bp, Homo sapiens
accaggtacaccaaa

SEQ ID NO: 1101434 - DNA, 15 bp, Homo sapiens
aaccaggtacaccaa

SEQ ID NO: 1101435 - DNA, 15 bp, Homo sapiens
gaaccaggtacacca

SEQ ID NO: 1101436 - DNA, 15 bp, Homo sapiens
ggaaccaggtacacc

SEQ ID NO: 1101437 - DNA, 15 bp, Homo sapiens
aggaaccaggtacac

SEQ ID NO: 1101438 - DNA, 15 bp, Homo sapiens
caggaaccaggtaca

SEQ ID NO: 1101439 - DNA, 15 bp, Homo sapiens
ccaggaaccaggtac

SEQ ID NO: 1101440 - DNA, 15 bp, Homo sapiens
tccaggaaccaggta

SEQ ID NO: 1101441 - DNA, 15 bp, Homo sapiens
gtccaggaaccaggt

SEQ ID NO: 1101442 - DNA, 15 bp, Homo sapiens
tgtccaggaaccagg

SEQ ID NO: 1101443 - DNA, 15 bp, Homo sapiens
ctgtccaggaaccag

SEQ ID NO: 1101444 - DNA, 15 bp, Homo sapiens
gctgtccaggaacca

SEQ ID NO: 1101445 - DNA, 15 bp, Homo sapiens
agctgtccaggaacc

SEQ ID NO: 1101446 - DNA, 15 bp, Homo sapiens
aagctgtccaggaac

SEQ ID NO: 1101447 - DNA, 15 bp, Homo sapiens
gaagctgtccaggaa

SEQ ID NO: 1101448 - DNA, 15 bp, Homo sapiens
agaagctgtccagga

SEQ ID NO: 1101449 - DNA, 15 bp, Homo sapiens
gagaagctgtccagg

SEQ ID NO: 1101450 - DNA, 15 bp, Homo sapiens
ggagaagctgtccag

SEQ ID NO: 1101451 - DNA, 15 bp, Homo sapiens
tggagaagctgtcca

SEQ ID NO: 1101452 - DNA, 15 bp, Homo sapiens
atggagaagctgtcc

SEQ ID NO: 1101453 - DNA, 15 bp, Homo sapiens
gatggagaagctgtc

SEQ ID NO: 1101454 - DNA, 15 bp, Homo sapiens
tgatggagaagctgt

SEQ ID NO: 1101455 - DNA, 15 bp, Homo sapiens
atgatggagaagctg

SEQ ID NO: 1101456 - DNA, 15 bp, Homo sapiens
catgatggagaagct

SEQ ID NO: 1101457 - DNA, 15 bp, Homo sapiens
acatgatggagaagc

SEQ ID NO: 1101458 - DNA, 15 bp, Homo sapiens
gacatgatggagaag

SEQ ID NO: 1101459 - DNA, 15 bp, Homo sapiens
cgacatgatggagaa

SEQ ID NO: 1101460 - DNA, 15 bp, Homo sapiens
tcgacatgatggaga

SEQ ID NO: 1101461 - DNA, 15 bp, Homo sapiens
atcgacatgatggag

SEQ ID NO: 1101462 - DNA, 15 bp, Homo sapiens
catcgacatgatgga

SEQ ID NO: 1101463 - DNA, 15 bp, Homo sapiens
tcatcgacatgatgg

SEQ ID NO: 1101464 - DNA, 15 bp, Homo sapiens
ctcatcgacatgatg

SEQ ID NO: 1101465 - DNA, 15 bp, Homo sapiens
gctcatcgacatgat

SEQ ID NO: 1101466 - DNA, 15 bp, Homo sapiens
tgctcatcgacatga

SEQ ID NO: 1101467 - DNA, 15 bp, Homo sapiens
atgctcatcgacatg

SEQ ID NO: 1101468 - DNA, 15 bp, Homo sapiens
gatgctcatcgacat

SEQ ID NO: 1101469 - DNA, 15 bp, Homo sapiens
agatgctcatcgaca

SEQ ID NO: 1101470 - DNA, 15 bp, Homo sapiens
aagatgctcatcgac

SEQ ID NO: 1101471 - DNA, 15 bp, Homo sapiens
gaagatgctcatcga

SEQ ID NO: 1101472 - DNA, 15 bp, Homo sapiens
ggaagatgctcatcg

SEQ ID NO: 1101473 - DNA, 15 bp, Homo sapiens
aggaagatgctcatc

SEQ ID NO: 1101474 - DNA, 15 bp, Homo sapiens
gaggaagatgctcat

SEQ ID NO: 1101475 - DNA, 15 bp, Homo sapiens
ggaggaagatgctca

SEQ ID NO: 1101476 - DNA, 15 bp, Homo sapiens
aggaggaagatgctc

SEQ ID NO: 1101477 - DNA, 15 bp, Homo sapiens
caggaggaagatgct

SEQ ID NO: 1101478 - DNA, 15 bp, Homo sapiens
tcaggaggaagatgc

SEQ ID NO: 1101479 - DNA, 15 bp, Homo sapiens
gtcaggaggaagatg

SEQ ID NO: 1101480 - DNA, 15 bp, Homo sapiens
cgtcaggaggaagat

SEQ ID NO: 1101481 - DNA, 15 bp, Homo sapiens
tcgtcaggaggaaga

SEQ ID NO: 1101482 - DNA, 15 bp, Homo sapiens
atcgtcaggaggaag

SEQ ID NO: 1101483 - DNA, 15 bp, Homo sapiens
tatcgtcaggaggaa

SEQ ID NO: 1101484 - DNA, 15 bp, Homo sapiens
atatcgtcaggagga

SEQ ID NO: 1101485 - DNA, 15 bp, Homo sapiens
aatatcgtcaggagg

SEQ ID NO: 1101486 - DNA, 15 bp, Homo sapiens
gaatatcgtcaggag

SEQ ID NO: 1101487 - DNA, 15 bp, Homo sapiens
tgaatatcgtcagga

SEQ ID NO: 1101488 - DNA, 15 bp, Homo sapiens
atgaatatcgtcagg

SEQ ID NO: 1101489 - DNA, 15 bp, Homo sapiens
gatgaatatcgtcag

SEQ ID NO: 1101490 - DNA, 15 bp, Homo sapiens
tgatgaatatcgtca

SEQ ID NO: 1101491 - DNA, 15 bp, Homo sapiens
atgatgaatatcgtc

SEQ ID NO: 1101492 - DNA, 15 bp, Homo sapiens
catgatgaatatcgt

SEQ ID NO: 1101493 - DNA, 15 bp, Homo sapiens
ccatgatgaatatcg

SEQ ID NO: 1101494 - DNA, 15 bp, Homo sapiens
accatgatgaatatc

SEQ ID NO: 1101495 - DNA, 15 bp, Homo sapiens
taccatgatgaatat

SEQ ID NO: 1101496 - DNA, 15 bp, Homo sapiens
ttaccatgatgaata

SEQ ID NO: 1101497 - DNA, 15 bp, Homo sapiens
cttaccatgatgaat

SEQ ID NO: 1101498 - DNA, 15 bp, Homo sapiens
gcttaccatgatgaa

SEQ ID NO: 1101499 - DNA, 15 bp, Homo sapiens
ggcttaccatgatga

SEQ ID NO: 1101500 - DNA, 15 bp, Homo sapiens
tggcttaccatgatg

SEQ ID NO: 1101501 - DNA, 15 bp, Homo sapiens
ttggcttaccatgat

SEQ ID NO: 1101502 - DNA, 15 bp, Homo sapiens
tttggcttaccatga

SEQ ID NO: 1101503 - DNA, 15 bp, Homo sapiens
atttggcttaccatg

SEQ ID NO: 1101504 - DNA, 15 bp, Homo sapiens
catttggcttaccat

SEQ ID NO: 1101505 - DNA, 15 bp, Homo sapiens
ccatttggcttacca

SEQ ID NO: 1101506 - DNA, 15 bp, Homo sapiens
tccatttggcttacc

SEQ ID NO: 1101507 - DNA, 15 bp, Homo sapiens
ctccatttggcttac

SEQ ID NO: 1101508 - DNA, 15 bp, Homo sapiens
tctccatttggctta

SEQ ID NO: 1101509 - DNA, 15 bp, Homo sapiens
ttctccatttggctt

SEQ ID NO: 1101510 - DNA, 15 bp, Homo sapiens
cttctccatttggct

SEQ ID NO: 1101511 - DNA, 15 bp, Homo sapiens
ccttctccatttggc

SEQ ID NO: 1101512 - DNA, 15 bp, Homo sapiens
gccttctccatttgg

SEQ ID NO: 1101513 - DNA, 15 bp, Homo sapiens
ggccttctccatttg

SEQ ID NO: 1101514 - DNA, 15 bp, Homo sapiens
gggccttctccattt

SEQ ID NO: 1101515 - DNA, 15 bp, Homo sapiens
tgggccttctccatt

SEQ ID NO: 1101516 - DNA, 15 bp, Homo sapiens
ctgggccttctccat

SEQ ID NO: 1101517 - DNA, 15 bp, Homo sapiens
tctgggccttctcca

SEQ ID NO: 1101518 - DNA, 15 bp, Homo sapiens
ttctgggccttctcc

SEQ ID NO: 1101519 - DNA, 15 bp, Homo sapiens
tttctgggccttctc

SEQ ID NO: 1101520 - DNA, 15 bp, Homo sapiens
ttttctgggccttct

SEQ ID NO: 1101521 - DNA, 15 bp, Homo sapiens
attttctgggccttc

SEQ ID NO: 1101522 - DNA, 15 bp, Homo sapiens
gattttctgggcctt

SEQ ID NO: 1101523 - DNA, 15 bp, Homo sapiens
agattttctgggcct

SEQ ID NO: 1101524 - DNA, 15 bp, Homo sapiens
aagattttctgggcc

SEQ ID NO: 1101525 - DNA, 15 bp, Homo sapiens
caagattttctgggc

SEQ ID NO: 1101526 - DNA, 15 bp, Homo sapiens
tcaagattttctggg

SEQ ID NO: 1101527 - DNA, 15 bp, Homo sapiens
ttcaagattttctgg

SEQ ID NO: 1101528 - DNA, 15 bp, Homo sapiens
attcaagattttctg

SEQ ID NO: 1101529 - DNA, 15 bp, Homo sapiens
tattcaagattttct

SEQ ID NO: 1101530 - DNA, 15 bp, Homo sapiens
gtattcaagattttc

SEQ ID NO: 1101531 - DNA, 15 bp, Homo sapiens
agtattcaagatttt

SEQ ID NO: 1101532 - DNA, 15 bp, Homo sapiens
aagtattcaagattt

SEQ ID NO: 1101533 - DNA, 15 bp, Homo sapiens
aaagtattcaagatt

SEQ ID NO: 1101534 - DNA, 15 bp, Homo sapiens
caaagtattcaagat

SEQ ID NO: 1101535 - DNA, 15 bp, Homo sapiens
ccaaagtattcaaga

SEQ ID NO: 1101536 - DNA, 15 bp, Homo sapiens
accaaagtattcaag

SEQ ID NO: 1101537 - DNA, 15 bp, Homo sapiens
aaccaaagtattcaa

SEQ ID NO: 1101538 - DNA, 15 bp, Homo sapiens
gaaccaaagtattca

SEQ ID NO: 1101539 - DNA, 15 bp, Homo sapiens
ggaaccaaagtattc

SEQ ID NO: 1101540 - DNA, 15 bp, Homo sapiens
aggaaccaaagtatt

SEQ ID NO: 1101541 - DNA, 15 bp, Homo sapiens
aaggaaccaaagtat

SEQ ID NO: 1101542 - DNA, 15 bp, Homo sapiens
aaaggaaccaaagta

SEQ ID NO: 1101543 - DNA, 15 bp, Homo sapiens
gaaaggaaccaaagt

SEQ ID NO: 1101544 - DNA, 15 bp, Homo sapiens
ggaaaggaaccaaag

SEQ ID NO: 1101545 - DNA, 15 bp, Homo sapiens
gggaaaggaaccaaa

SEQ ID NO: 1101546 - DNA, 15 bp, Homo sapiens
ggggaaaggaaccaa

SEQ ID NO: 1101547 - DNA, 15 bp, Homo sapiens
aggggaaaggaacca

SEQ ID NO: 1101548 - DNA, 15 bp, Homo sapiens
aaggggaaaggaacc

SEQ ID NO: 1101549 - DNA, 15 bp, Homo sapiens
aaaggggaaaggaac

SEQ ID NO: 1101550 - DNA, 15 bp, Homo sapiens
gaaaggggaaaggaa

SEQ ID NO: 1101551 - DNA, 15 bp, Homo sapiens
ggaaaggggaaagga

SEQ ID NO: 1101552 - DNA, 15 bp, Homo sapiens
aggaaaggggaaagg

SEQ ID NO: 1101553 - DNA, 15 bp, Homo sapiens
gaggaaaggggaaag

SEQ ID NO: 1101554 - DNA, 15 bp, Homo sapiens
ggaggaaaggggaaa

SEQ ID NO: 1101555 - DNA, 15 bp, Homo sapiens
aggaggaaaggggaa

SEQ ID NO: 1101556 - DNA, 15 bp, Homo sapiens
caggaggaaagggga

SEQ ID NO: 1101557 - DNA, 15 bp, Homo sapiens
acaggaggaaagggg

SEQ ID NO: 1101558 - DNA, 15 bp, Homo sapiens
aacaggaggaaaggg

SEQ ID NO: 1101559 - DNA, 15 bp, Homo sapiens
gaacaggaggaaagg

SEQ ID NO: 1101560 - DNA, 15 bp, Homo sapiens
tgaacaggaggaaag

SEQ ID NO: 1101561 - DNA, 15 bp, Homo sapiens
atgaacaggaggaaa

SEQ ID NO: 1101562 - DNA, 15 bp, Homo sapiens
catgaacaggaggaa

SEQ ID NO: 1101563 - DNA, 15 bp, Homo sapiens
acatgaacaggagga

SEQ ID NO: 1101564 - DNA, 15 bp, Homo sapiens
cacatgaacaggagg

SEQ ID NO: 1101565 - DNA, 15 bp, Homo sapiens
gcacatgaacaggag

SEQ ID NO: 1101566 - DNA, 15 bp, Homo sapiens
ggcacatgaacagga

SEQ ID NO: 1101567 - DNA, 15 bp, Homo sapiens
aggcacatgaacagg

SEQ ID NO: 1101568 - DNA, 15 bp, Homo sapiens
caggcacatgaacag

SEQ ID NO: 1101569 - DNA, 15 bp, Homo sapiens
ccaggcacatgaaca

SEQ ID NO: 1101570 - DNA, 15 bp, Homo sapiens
tccaggcacatgaac

SEQ ID NO: 1101571 - DNA, 15 bp, Homo sapiens
atccaggcacatgaa

SEQ ID NO: 1101572 - DNA, 15 bp, Homo sapiens
aatccaggcacatga

SEQ ID NO: 1101573 - DNA, 15 bp, Homo sapiens
taatccaggcacatg

SEQ ID NO: 1101574 - DNA, 15 bp, Homo sapiens
ctaatccaggcacat

SEQ ID NO: 1101575 - DNA, 15 bp, Homo sapiens
actaatccaggcaca

SEQ ID NO: 1101576 - DNA, 15 bp, Homo sapiens
gactaatccaggcac

SEQ ID NO: 1101577 - DNA, 15 bp, Homo sapiens
tgactaatccaggca

SEQ ID NO: 1101578 - DNA, 15 bp, Homo sapiens
atgactaatccaggc

SEQ ID NO: 1101579 - DNA, 15 bp, Homo sapiens
catgactaatccagg

SEQ ID NO: 1101580 - DNA, 15 bp, Homo sapiens
acatgactaatccag

SEQ ID NO: 1101581 - DNA, 15 bp, Homo sapiens
cacatgactaatcca

SEQ ID NO: 1101582 - DNA, 15 bp, Homo sapiens
ccacatgactaatcc

SEQ ID NO: 1101583 - DNA, 15 bp, Homo sapiens
gccacatgactaatc

SEQ ID NO: 1101584 - DNA, 15 bp, Homo sapiens
ggccacatgactaat

SEQ ID NO: 1101585 - DNA, 15 bp, Homo sapiens
tggccacatgactaa

SEQ ID NO: 1101586 - DNA, 15 bp, Homo sapiens
gtggccacatgacta

SEQ ID NO: 1101587 - DNA, 15 bp, Homo sapiens
ggtggccacatgact

SEQ ID NO: 1101588 - DNA, 15 bp, Homo sapiens
tggtggccacatgac

SEQ ID NO: 1101589 - DNA, 15 bp, Homo sapiens
ttggtggccacatga

SEQ ID NO: 1101590 - DNA, 15 bp, Homo sapiens
cttggtggccacatg

SEQ ID NO: 1101591 - DNA, 15 bp, Homo sapiens
ccttggtggccacat

SEQ ID NO: 1101592 - DNA, 15 bp, Homo sapiens
tccttggtggccaca

SEQ ID NO: 1101593 - DNA, 15 bp, Homo sapiens
ctccttggtggccac

SEQ ID NO: 1101594 - DNA, 15 bp, Homo sapiens
tctccttggtggcca

SEQ ID NO: 1101595 - DNA, 15 bp, Homo sapiens
ctctccttggtggcc

SEQ ID NO: 1101596 - DNA, 15 bp, Homo sapiens
gctctccttggtggc

SEQ ID NO: 1101597 - DNA, 15 bp, Homo sapiens
cgctctccttggtgg

SEQ ID NO: 1101598 - DNA, 15 bp, Homo sapiens
acgctctccttggtg

SEQ ID NO: 1101599 - DNA, 15 bp, Homo sapiens
cacgctctccttggt

SEQ ID NO: 1101600 - DNA, 15 bp, Homo sapiens
tcacgctctccttgg

SEQ ID NO: 1101601 - DNA, 15 bp, Homo sapiens
gtcacgctctccttg

SEQ ID NO: 1101602 - DNA, 15 bp, Homo sapiens
tgtcacgctctcctt

SEQ ID NO: 1101603 - DNA, 15 bp, Homo sapiens
atgtcacgctctcct

SEQ ID NO: 1101604 - DNA, 15 bp, Homo sapiens
gatgtcacgctctcc

SEQ ID NO: 1101605 - DNA, 15 bp, Homo sapiens
agatgtcacgctctc

SEQ ID NO: 1101606 - DNA, 15 bp, Homo sapiens
tagatgtcacgctct

SEQ ID NO: 1101607 - DNA, 15 bp, Homo sapiens
ctagatgtcacgctc

SEQ ID NO: 1101608 - DNA, 15 bp, Homo sapiens
gctagatgtcacgct

SEQ ID NO: 1101609 - DNA, 15 bp, Homo sapiens
agctagatgtcacgc

SEQ ID NO: 1101610 - DNA, 15 bp, Homo sapiens
aagctagatgtcacg

SEQ ID NO: 1101611 - DNA, 15 bp, Homo sapiens
gaagctagatgtcac

SEQ ID NO: 1101612 - DNA, 15 bp, Homo sapiens
ggaagctagatgtca

SEQ ID NO: 1101613 - DNA, 15 bp, Homo sapiens
gggaagctagatgtc

SEQ ID NO: 1101614 - DNA, 15 bp, Homo sapiens
tgggaagctagatgt

SEQ ID NO: 1101615 - DNA, 15 bp, Homo sapiens
ctgggaagctagatg

SEQ ID NO: 1101616 - DNA, 15 bp, Homo sapiens
gctgggaagctagat

SEQ ID NO: 1101617 - DNA, 15 bp, Homo sapiens
ggctgggaagctaga

SEQ ID NO: 1101618 - DNA, 15 bp, Homo sapiens
gggctgggaagctag

SEQ ID NO: 1101619 - DNA, 15 bp, Homo sapiens
agggctgggaagcta

SEQ ID NO: 1101620 - DNA, 15 bp, Homo sapiens
aagggctgggaagct

SEQ ID NO: 1101621 - DNA, 15 bp, Homo sapiens
gaagggctgggaagc

SEQ ID NO: 1101622 - DNA, 15 bp, Homo sapiens
ggaagggctgggaag

SEQ ID NO: 1101623 - DNA, 15 bp, Homo sapiens
aggaagggctgggaa

SEQ ID NO: 1101624 - DNA, 15 bp, Homo sapiens
aaggaagggctggga

SEQ ID NO: 1101625 - DNA, 15 bp, Homo sapiens
aaaggaagggctggg

SEQ ID NO: 1101626 - DNA, 15 bp, Homo sapiens
aaaaggaagggctgg

SEQ ID NO: 1101627 - DNA, 15 bp, Homo sapiens
taaaaggaagggctg

SEQ ID NO: 1101628 - DNA, 15 bp, Homo sapiens
ctaaaaggaagggct

SEQ ID NO: 1101629 - DNA, 15 bp, Homo sapiens
gctaaaaggaagggc

SEQ ID NO: 1101630 - DNA, 15 bp, Homo sapiens
ggctaaaaggaaggg

SEQ ID NO: 1101631 - DNA, 15 bp, Homo sapiens
tggctaaaaggaagg

SEQ ID NO: 1101632 - DNA, 15 bp, Homo sapiens
ttggctaaaaggaag

SEQ ID NO: 1101633 - DNA, 15 bp, Homo sapiens
gttggctaaaaggaa

SEQ ID NO: 1101634 - DNA, 15 bp, Homo sapiens
cgttggctaaaagga

SEQ ID NO: 1101635 - DNA, 15 bp, Homo sapiens
acgttggctaaaagg

SEQ ID NO: 1101636 - DNA, 15 bp, Homo sapiens
cacgttggctaaaag

SEQ ID NO: 1101637 - DNA, 15 bp, Homo sapiens
ccacgttggctaaaa

SEQ ID NO: 1101638 - DNA, 15 bp, Homo sapiens
cccacgttggctaaa

SEQ ID NO: 1101639 - DNA, 15 bp, Homo sapiens
tcccacgttggctaa

SEQ ID NO: 1101640 - DNA, 15 bp, Homo sapiens
ctcccacgttggcta

SEQ ID NO: 1101641 - DNA, 15 bp, Homo sapiens
tctcccacgttggct

SEQ ID NO: 1101642 - DNA, 15 bp, Homo sapiens
gtctcccacgttggc

SEQ ID NO: 1101643 - DNA, 15 bp, Homo sapiens
tgtctcccacgttgg

SEQ ID NO: 1101644 - DNA, 15 bp, Homo sapiens
gtgtctcccacgttg

SEQ ID NO: 1101645 - DNA, 15 bp, Homo sapiens
agtgtctcccacgtt

SEQ ID NO: 1101646 - DNA, 15 bp, Homo sapiens
gagtgtctcccacgt

SEQ ID NO: 1101647 - DNA, 15 bp, Homo sapiens
tgagtgtctcccacg

SEQ ID NO: 1101648 - DNA, 15 bp, Homo sapiens
ttgagtgtctcccac

SEQ ID NO: 1101649 - DNA, 15 bp, Homo sapiens
tttgagtgtctccca

SEQ ID NO: 1101650 - DNA, 15 bp, Homo sapiens
ctttgagtgtctccc

SEQ ID NO: 1101651 - DNA, 15 bp, Homo sapiens
tctttgagtgtctcc

SEQ ID NO: 1101652 - DNA, 15 bp, Homo sapiens
ctctttgagtgtctc

SEQ ID NO: 1101653 - DNA, 15 bp, Homo sapiens
tctctttgagtgtct

SEQ ID NO: 1101654 - DNA, 15 bp, Homo sapiens
gtctctttgagtgtc

SEQ ID NO: 1101655 - DNA, 15 bp, Homo sapiens
cgtctctttgagtgt

SEQ ID NO: 1101656 - DNA, 15 bp, Homo sapiens
tcgtctctttgagtg

SEQ ID NO: 1101657 - DNA, 15 bp, Homo sapiens
ttcgtctctttgagt

SEQ ID NO: 1101658 - DNA, 15 bp, Homo sapiens
tttcgtctctttgag

SEQ ID NO: 1101659 - DNA, 15 bp, Homo sapiens
atttcgtctctttga

SEQ ID NO: 1101660 - DNA, 15 bp, Homo sapiens
gatttcgtctctttg

SEQ ID NO: 1101661 - DNA, 15 bp, Homo sapiens
agatttcgtctcttt

SEQ ID NO: 1101662 - DNA, 15 bp, Homo sapiens
gagatttcgtctctt

SEQ ID NO: 1101663 - DNA, 15 bp, Homo sapiens
ggagatttcgtctct

SEQ ID NO: 1101664 - DNA, 15 bp, Homo sapiens
aggagatttcgtctc

SEQ ID NO: 1101665 - DNA, 15 bp, Homo sapiens
caggagatttcgtct

SEQ ID NO: 1101666 - DNA, 15 bp, Homo sapiens
tcaggagatttcgtc

SEQ ID NO: 1101667 - DNA, 15 bp, Homo sapiens
ttcaggagatttcgt

SEQ ID NO: 1101668 - DNA, 15 bp, Homo sapiens
cttcaggagatttcg

SEQ ID NO: 1101669 - DNA, 15 bp, Homo sapiens
ccttcaggagatttc

SEQ ID NO: 1101670 - DNA, 15 bp, Homo sapiens
tccttcaggagattt

SEQ ID NO: 1101671 - DNA, 15 bp, Homo sapiens
ctccttcaggagatt

SEQ ID NO: 1101672 - DNA, 15 bp, Homo sapiens
gctccttcaggagat

SEQ ID NO: 1101673 - DNA, 15 bp, Homo sapiens
ggctccttcaggaga

SEQ ID NO: 1101674 - DNA, 15 bp, Homo sapiens
tggctccttcaggag

SEQ ID NO: 1101675 - DNA, 15 bp, Homo sapiens
gtggctccttcagga

SEQ ID NO: 1101676 - DNA, 15 bp, Homo sapiens
agtggctccttcagg

SEQ ID NO: 1101677 - DNA, 15 bp, Homo sapiens
cagtggctccttcag

SEQ ID NO: 1101678 - DNA, 15 bp, Homo sapiens
acagtggctccttca

SEQ ID NO: 1101679 - DNA, 15 bp, Homo sapiens
tacagtggctccttc

SEQ ID NO: 1101680 - DNA, 15 bp, Homo sapiens
atacagtggctcctt

SEQ ID NO: 1101681 - DNA, 15 bp, Homo sapiens
gatacagtggctcct

SEQ ID NO: 1101682 - DNA, 15 bp, Homo sapiens
tgatacagtggctcc

SEQ ID NO: 1101683 - DNA, 15 bp, Homo sapiens
gtgatacagtggctc

SEQ ID NO: 1101684 - DNA, 15 bp, Homo sapiens
tgtgatacagtggct

SEQ ID NO: 1101685 - DNA, 15 bp, Homo sapiens
ctgtgatacagtggc

SEQ ID NO: 1101686 - DNA, 15 bp, Homo sapiens
gctgtgatacagtgg

SEQ ID NO: 1101687 - DNA, 15 bp, Homo sapiens
tgctgtgatacagtg

SEQ ID NO: 1101688 - DNA, 15 bp, Homo sapiens
atgctgtgatacagt

SEQ ID NO: 1101689 - DNA, 15 bp, Homo sapiens
gatgctgtgatacag

SEQ ID NO: 1101690 - DNA, 15 bp, Homo sapiens
ggatgctgtgataca

SEQ ID NO: 1101691 - DNA, 15 bp, Homo sapiens
aggatgctgtgatac

SEQ ID NO: 1101692 - DNA, 15 bp, Homo sapiens
gaggatgctgtgata

SEQ ID NO: 1101693 - DNA, 15 bp, Homo sapiens
ggaggatgctgtgat

SEQ ID NO: 1101694 - DNA, 15 bp, Homo sapiens
gggaggatgctgtga

SEQ ID NO: 1101695 - DNA, 15 bp, Homo sapiens
tgggaggatgctgtg

SEQ ID NO: 1101696 - DNA, 15 bp, Homo sapiens
atgggaggatgctgt

SEQ ID NO: 1101697 - DNA, 15 bp, Homo sapiens
gatgggaggatgctg

SEQ ID NO: 1101698 - DNA, 15 bp, Homo sapiens
agatgggaggatgct

SEQ ID NO: 1101699 - DNA, 15 bp, Homo sapiens
gagatgggaggatgc

SEQ ID NO: 1101700 - DNA, 15 bp, Homo sapiens
ggagatgggaggatg

SEQ ID NO: 1101701 - DNA, 15 bp, Homo sapiens
gggagatgggaggat

SEQ ID NO: 1101702 - DNA, 15 bp, Homo sapiens
tgggagatgggagga

SEQ ID NO: 1101703 - DNA, 15 bp, Homo sapiens
gtgggagatgggagg

SEQ ID NO: 1101704 - DNA, 15 bp, Homo sapiens
agtgggagatgggag

SEQ ID NO: 1101705 - DNA, 15 bp, Homo sapiens
aagtgggagatggga

SEQ ID NO: 1101706 - DNA, 15 bp, Homo sapiens
gaagtgggagatggg

SEQ ID NO: 1101707 - DNA, 15 bp, Homo sapiens
ggaagtgggagatgg

SEQ ID NO: 1101708 - DNA, 15 bp, Homo sapiens
aggaagtgggagatg

SEQ ID NO: 1101709 - DNA, 15 bp, Homo sapiens
caggaagtgggagat

SEQ ID NO: 1101710 - DNA, 15 bp, Homo sapiens
gcaggaagtgggaga

SEQ ID NO: 1101711 - DNA, 15 bp, Homo sapiens
ggcaggaagtgggag

SEQ ID NO: 1101712 - DNA, 15 bp, Homo sapiens
gggcaggaagtggga

SEQ ID NO: 1101713 - DNA, 15 bp, Homo sapiens
tgggcaggaagtggg

SEQ ID NO: 1101714 - DNA, 15 bp, Homo sapiens
ctgggcaggaagtgg

SEQ ID NO: 1101715 - DNA, 15 bp, Homo sapiens
cctgggcaggaagtg

SEQ ID NO: 1101716 - DNA, 15 bp, Homo sapiens
ccctgggcaggaagt

SEQ ID NO: 1101717 - DNA, 15 bp, Homo sapiens
cccctgggcaggaag

SEQ ID NO: 1101718 - DNA, 15 bp, Homo sapiens
acccctgggcaggaa

SEQ ID NO: 1101719 - DNA, 15 bp, Homo sapiens
gacccctgggcagga

SEQ ID NO: 1101720 - DNA, 15 bp, Homo sapiens
ggacccctgggcagg

SEQ ID NO: 1101721 - DNA, 15 bp, Homo sapiens
tggacccctgggcag

SEQ ID NO: 1101722 - DNA, 15 bp, Homo sapiens
atggacccctgggca

SEQ ID NO: 1101723 - DNA, 15 bp, Homo sapiens
catggacccctgggc

SEQ ID NO: 1101724 - DNA, 15 bp, Homo sapiens
ccatggacccctggg

SEQ ID NO: 1101725 - DNA, 15 bp, Homo sapiens
accatggacccctgg

SEQ ID NO: 1101726 - DNA, 15 bp, Homo sapiens
gaccatggacccctg

SEQ ID NO: 1101727 - DNA, 15 bp, Homo sapiens
ggaccatggacccct

SEQ ID NO: 1101728 - DNA, 15 bp, Homo sapiens
tggaccatggacccc

SEQ ID NO: 1101729 - DNA, 15 bp, Homo sapiens
gtggaccatggaccc

SEQ ID NO: 1101730 - DNA, 15 bp, Homo sapiens
tgtggaccatggacc

SEQ ID NO: 1101731 - DNA, 15 bp, Homo sapiens
gtgtggaccatggac

SEQ ID NO: 1101732 - DNA, 15 bp, Homo sapiens
tgtgtggaccatgga

SEQ ID NO: 1101733 - DNA, 15 bp, Homo sapiens
ctgtgtggaccatgg

SEQ ID NO: 1101734 - DNA, 15 bp, Homo sapiens
tctgtgtggaccatg

SEQ ID NO: 1101735 - DNA, 15 bp, Homo sapiens
gtctgtgtggaccat

SEQ ID NO: 1101736 - DNA, 15 bp, Homo sapiens
agtctgtgtggacca

SEQ ID NO: 1101737 - DNA, 15 bp, Homo sapiens
aagtctgtgtggacc

SEQ ID NO: 1101738 - DNA, 15 bp, Homo sapiens
gaagtctgtgtggac

SEQ ID NO: 1101739 - DNA, 15 bp, Homo sapiens
ggaagtctgtgtgga

SEQ ID NO: 1101740 - DNA, 15 bp, Homo sapiens
gggaagtctgtgtgg

SEQ ID NO: 1101741 - DNA, 15 bp, Homo sapiens
tgggaagtctgtgtg

SEQ ID NO: 1101742 - DNA, 15 bp, Homo sapiens
ctgggaagtctgtgt

SEQ ID NO: 1101743 - DNA, 15 bp, Homo sapiens
actgggaagtctgtg

SEQ ID NO: 1101744 - DNA, 15 bp, Homo sapiens
gactgggaagtctgt

SEQ ID NO: 1101745 - DNA, 15 bp, Homo sapiens
ggactgggaagtctg

SEQ ID NO: 1101746 - DNA, 15 bp, Homo sapiens
gggactgggaagtct

SEQ ID NO: 1101747 - DNA, 15 bp, Homo sapiens
tgggactgggaagtc

SEQ ID NO: 1101748 - DNA, 15 bp, Homo sapiens
atgggactgggaagt

SEQ ID NO: 1101749 - DNA, 15 bp, Homo sapiens
aatgggactgggaag

SEQ ID NO: 1101750 - DNA, 15 bp, Homo sapiens
gaatgggactgggaa

SEQ ID NO: 1101751 - DNA, 15 bp, Homo sapiens
ggaatgggactggga

SEQ ID NO: 1101752 - DNA, 15 bp, Homo sapiens
cggaatgggactggg

SEQ ID NO: 1101753 - DNA, 15 bp, Homo sapiens
acggaatgggactgg

SEQ ID NO: 1101754 - DNA, 15 bp, Homo sapiens
cacggaatgggactg

SEQ ID NO: 1101755 - DNA, 15 bp, Homo sapiens
tcacggaatgggact

SEQ ID NO: 1101756 - DNA, 15 bp, Homo sapiens
gtcacggaatgggac

SEQ ID NO: 1101757 - DNA, 15 bp, Homo sapiens
ggtcacggaatggga

SEQ ID NO: 1101758 - DNA, 15 bp, Homo sapiens
tggtcacggaatggg

SEQ ID NO: 1101759 - DNA, 15 bp, Homo sapiens
atggtcacggaatgg

SEQ ID NO: 1101760 - DNA, 15 bp, Homo sapiens
gatggtcacggaatg

SEQ ID NO: 1101761 - DNA, 15 bp, Homo sapiens
agatggtcacggaat

SEQ ID NO: 1101762 - DNA, 15 bp, Homo sapiens
cagatggtcacggaa

SEQ ID NO: 1101763 - DNA, 15 bp, Homo sapiens
ccagatggtcacgga

SEQ ID NO: 1101764 - DNA, 15 bp, Homo sapiens
tccagatggtcacgg

SEQ ID NO: 1101765 - DNA, 15 bp, Homo sapiens
ctccagatggtcacg

SEQ ID NO: 1101766 - DNA, 15 bp, Homo sapiens
tctccagatggtcac

SEQ ID NO: 1101767 - DNA, 15 bp, Homo sapiens
ttctccagatggtca

SEQ ID NO: 1101768 - DNA, 15 bp, Homo sapiens
cttctccagatggtc

SEQ ID NO: 1101769 - DNA, 15 bp, Homo sapiens
gcttctccagatggt

SEQ ID NO: 1101770 - DNA, 15 bp, Homo sapiens
agcttctccagatgg

SEQ ID NO: 1101771 - DNA, 15 bp, Homo sapiens
cagcttctccagatg

SEQ ID NO: 1101772 - DNA, 15 bp, Homo sapiens
gcagcttctccagat

SEQ ID NO: 1101773 - DNA, 15 bp, Homo sapiens
agcagcttctccaga

SEQ ID NO: 1101774 - DNA, 15 bp, Homo sapiens
tagcagcttctccag

SEQ ID NO: 1101775 - DNA, 15 bp, Homo sapiens
atagcagcttctcca

SEQ ID NO: 1101776 - DNA, 15 bp, Homo sapiens
aatagcagcttctcc

SEQ ID NO: 1101777 - DNA, 15 bp, Homo sapiens
taatagcagcttctc

SEQ ID NO: 1101778 - DNA, 15 bp, Homo sapiens
ctaatagcagcttct

SEQ ID NO: 1101779 - DNA, 15 bp, Homo sapiens
gctaatagcagcttc

SEQ ID NO: 1101780 - DNA, 15 bp, Homo sapiens
tgctaatagcagctt

SEQ ID NO: 1101781 - DNA, 15 bp, Homo sapiens
ctgctaatagcagct

SEQ ID NO: 1101782 - DNA, 15 bp, Homo sapiens
tctgctaatagcagc

SEQ ID NO: 1101783 - DNA, 15 bp, Homo sapiens
ctctgctaatagcag

SEQ ID NO: 1101784 - DNA, 15 bp, Homo sapiens
gctctgctaatagca

SEQ ID NO: 1101785 - DNA, 15 bp, Homo sapiens
ggctctgctaatagc

SEQ ID NO: 1101786 - DNA, 15 bp, Homo sapiens
gggctctgctaatag

SEQ ID NO: 1101787 - DNA, 15 bp, Homo sapiens
agggctctgctaata

SEQ ID NO: 1101788 - DNA, 15 bp, Homo sapiens
cagggctctgctaat

SEQ ID NO: 1101789 - DNA, 15 bp, Homo sapiens
gcagggctctgctaa

SEQ ID NO: 1101790 - DNA, 15 bp, Homo sapiens
tgcagggctctgcta

SEQ ID NO: 1101791 - DNA, 15 bp, Homo sapiens
gtgcagggctctgct

SEQ ID NO: 1101792 - DNA, 15 bp, Homo sapiens
tgtgcagggctctgc

SEQ ID NO: 1101793 - DNA, 15 bp, Homo sapiens
ctgtgcagggctctg

SEQ ID NO: 1101794 - DNA, 15 bp, Homo sapiens
cctgtgcagggctct

SEQ ID NO: 1101795 - DNA, 15 bp, Homo sapiens
ccctgtgcagggctc

SEQ ID NO: 1101796 - DNA, 15 bp, Homo sapiens
accctgtgcagggct

SEQ ID NO: 1101797 - DNA, 15 bp, Homo sapiens
caccctgtgcagggc

SEQ ID NO: 1101798 - DNA, 15 bp, Homo sapiens
tcaccctgtgcaggg

SEQ ID NO: 1101799 - DNA, 15 bp, Homo sapiens
atcaccctgtgcagg

SEQ ID NO: 1101800 - DNA, 15 bp, Homo sapiens
tatcaccctgtgcag

SEQ ID NO: 1101801 - DNA, 15 bp, Homo sapiens
ctatcaccctgtgca

SEQ ID NO: 1101802 - DNA, 15 bp, Homo sapiens
actatcaccctgtgc

SEQ ID NO: 1101803 - DNA, 15 bp, Homo sapiens
cactatcaccctgtg

SEQ ID NO: 1101804 - DNA, 15 bp, Homo sapiens
acactatcaccctgt

SEQ ID NO: 1101805 - DNA, 15 bp, Homo sapiens
tacactatcaccctg

SEQ ID NO: 1101806 - DNA, 15 bp, Homo sapiens
ttacactatcaccct

SEQ ID NO: 1101807 - DNA, 15 bp, Homo sapiens
attacactatcaccc

SEQ ID NO: 1101808 - DNA, 15 bp, Homo sapiens
aattacactatcacc

SEQ ID NO: 1101809 - DNA, 15 bp, Homo sapiens
taattacactatcac

SEQ ID NO: 1101810 - DNA, 15 bp, Homo sapiens
ttaattacactatca

SEQ ID NO: 1101811 - DNA, 15 bp, Homo sapiens
tttaattacactatc

SEQ ID NO: 1101812 - DNA, 15 bp, Homo sapiens
ctttaattacactat

SEQ ID NO: 1101813 - DNA, 15 bp, Homo sapiens
actttaattacacta

SEQ ID NO: 1101814 - DNA, 15 bp, Homo sapiens
cactttaattacact

SEQ ID NO: 1101815 - DNA, 15 bp, Homo sapiens
ccactttaattacac

SEQ ID NO: 1101816 - DNA, 15 bp, Homo sapiens
accactttaattaca

SEQ ID NO: 1101817 - DNA, 15 bp, Homo sapiens
gaccactttaattac

SEQ ID NO: 1101818 - DNA, 15 bp, Homo sapiens
agaccactttaatta

SEQ ID NO: 1101819 - DNA, 15 bp, Homo sapiens
aagaccactttaatt

SEQ ID NO: 1101820 - DNA, 15 bp, Homo sapiens
gaagaccactttaat

SEQ ID NO: 1101821 - DNA, 15 bp, Homo sapiens
agaagaccactttaa

SEQ ID NO: 1101822 - DNA, 15 bp, Homo sapiens
gagaagaccacttta

SEQ ID NO: 1101823 - DNA, 15 bp, Homo sapiens
agagaagaccacttt

SEQ ID NO: 1101824 - DNA, 15 bp, Homo sapiens
aagagaagaccactt

SEQ ID NO: 1101825 - DNA, 15 bp, Homo sapiens
aaagagaagaccact

SEQ ID NO: 1101826 - DNA, 15 bp, Homo sapiens
gaaagagaagaccac

SEQ ID NO: 1101827 - DNA, 15 bp, Homo sapiens
ggaaagagaagacca

SEQ ID NO: 1101828 - DNA, 15 bp, Homo sapiens
tggaaagagaagacc

SEQ ID NO: 1101829 - DNA, 15 bp, Homo sapiens
ttggaaagagaagac

SEQ ID NO: 1101830 - DNA, 15 bp, Homo sapiens
tttggaaagagaaga

SEQ ID NO: 1101831 - DNA, 15 bp, Homo sapiens
gtttggaaagagaag

SEQ ID NO: 1101832 - DNA, 15 bp, Homo sapiens
tgtttggaaagagaa

SEQ ID NO: 1101833 - DNA, 15 bp, Homo sapiens
gtgtttggaaagaga

SEQ ID NO: 1101834 - DNA, 15 bp, Homo sapiens
tgtgtttggaaagag

SEQ ID NO: 1101835 - DNA, 15 bp, Homo sapiens
ctgtgtttggaaaga

SEQ ID NO: 1101836 - DNA, 15 bp, Homo sapiens
tctgtgtttggaaag

SEQ ID NO: 1101837 - DNA, 15 bp, Homo sapiens
ttctgtgtttggaaa

SEQ ID NO: 1101838 - DNA, 15 bp, Homo sapiens
tttctgtgtttggaa

SEQ ID NO: 1101839 - DNA, 15 bp, Homo sapiens
ttttctgtgtttgga

SEQ ID NO: 1101840 - DNA, 15 bp, Homo sapiens
tttttctgtgtttgg

SEQ ID NO: 1101841 - DNA, 15 bp, Homo sapiens
ttttttctgtgtttg

SEQ ID NO: 1101842 - DNA, 15 bp, Homo sapiens
attttttctgtgttt

SEQ ID NO: 1101843 - DNA, 15 bp, Homo sapiens
gattttttctgtgtt

SEQ ID NO: 1101844 - DNA, 15 bp, Homo sapiens
tgattttttctgtgt

SEQ ID NO: 1101845 - DNA, 15 bp, Homo sapiens
ctgattttttctgtg

SEQ ID NO: 1101846 - DNA, 15 bp, Homo sapiens
actgattttttctgt

SEQ ID NO: 1101847 - DNA, 15 bp, Homo sapiens
aactgattttttctg

SEQ ID NO: 1101848 - DNA, 15 bp, Homo sapiens
gaactgattttttct

SEQ ID NO: 1101849 - DNA, 15 bp, Homo sapiens
tgaactgattttttc

SEQ ID NO: 1101850 - DNA, 15 bp, Homo sapiens
ctgaactgatttttt

SEQ ID NO: 1101851 - DNA, 15 bp, Homo sapiens
cctgaactgattttt

SEQ ID NO: 1101852 - DNA, 15 bp, Homo sapiens
ccctgaactgatttt

SEQ ID NO: 1101853 - DNA, 15 bp, Homo sapiens
tccctgaactgattt

SEQ ID NO: 1101854 - DNA, 15 bp, Homo sapiens
ctccctgaactgatt

SEQ ID NO: 1101855 - DNA, 15 bp, Homo sapiens
actccctgaactgat

SEQ ID NO: 1101856 - DNA, 15 bp, Homo sapiens
cactccctgaactga

SEQ ID NO: 1101857 - DNA, 15 bp, Homo sapiens
acactccctgaactg

SEQ ID NO: 1101858 - DNA, 15 bp, Homo sapiens
aacactccctgaact

SEQ ID NO: 1101859 - DNA, 15 bp, Homo sapiens
aaacactccctgaac

SEQ ID NO: 1101860 - DNA, 15 bp, Homo sapiens
aaaacactccctgaa

SEQ ID NO: 1101861 - DNA, 15 bp, Homo sapiens
gaaaacactccctga

SEQ ID NO: 1101862 - DNA, 15 bp, Homo sapiens
ggaaaacactccctg

SEQ ID NO: 1101863 - DNA, 15 bp, Homo sapiens
aggaaaacactccct

SEQ ID NO: 1101864 - DNA, 15 bp, Homo sapiens
caggaaaacactccc

SEQ ID NO: 1101865 - DNA, 15 bp, Homo sapiens
ccaggaaaacactcc

SEQ ID NO: 1101866 - DNA, 15 bp, Homo sapiens
cccaggaaaacactc

SEQ ID NO: 1101867 - DNA, 15 bp, Homo sapiens
gcccaggaaaacact

SEQ ID NO: 1101868 - DNA, 15 bp, Homo sapiens
agcccaggaaaacac

SEQ ID NO: 1101869 - DNA, 15 bp, Homo sapiens
aagcccaggaaaaca

SEQ ID NO: 1101870 - DNA, 15 bp, Homo sapiens
taagcccaggaaaac

SEQ ID NO: 1101871 - DNA, 15 bp, Homo sapiens
gtaagcccaggaaaa

SEQ ID NO: 1101872 - DNA, 15 bp, Homo sapiens
tgtaagcccaggaaa

SEQ ID NO: 1101873 - DNA, 15 bp, Homo sapiens
ttgtaagcccaggaa

SEQ ID NO: 1101874 - DNA, 15 bp, Homo sapiens
attgtaagcccagga

SEQ ID NO: 1101875 - DNA, 15 bp, Homo sapiens
aattgtaagcccagg

SEQ ID NO: 1101876 - DNA, 15 bp, Homo sapiens
aaattgtaagcccag

SEQ ID NO: 1101877 - DNA, 15 bp, Homo sapiens
aaaattgtaagccca

SEQ ID NO: 1101878 - DNA, 15 bp, Homo sapiens
taaaattgtaagccc

SEQ ID NO: 1101879 - DNA, 15 bp, Homo sapiens
ttaaaattgtaagcc

SEQ ID NO: 1101880 - DNA, 15 bp, Homo sapiens
gttaaaattgtaagc

SEQ ID NO: 1101881 - DNA, 15 bp, Homo sapiens
agttaaaattgtaag

SEQ ID NO: 1101882 - DNA, 15 bp, Homo sapiens
tagttaaaattgtaa

SEQ ID NO: 1101883 - DNA, 15 bp, Homo sapiens
gtagttaaaattgta

SEQ ID NO: 1101884 - DNA, 15 bp, Homo sapiens
agtagttaaaattgt

SEQ ID NO: 1101885 - DNA, 15 bp, Homo sapiens
cagtagttaaaattg

SEQ ID NO: 1101886 - DNA, 15 bp, Homo sapiens
ccagtagttaaaatt

SEQ ID NO: 1101887 - DNA, 15 bp, Homo sapiens
gccagtagttaaaat

SEQ ID NO: 1101888 - DNA, 15 bp, Homo sapiens
agccagtagttaaaa

SEQ ID NO: 1101889 - DNA, 15 bp, Homo sapiens
tagccagtagttaaa

SEQ ID NO: 1101890 - DNA, 15 bp, Homo sapiens
ctagccagtagttaa

SEQ ID NO: 1101891 - DNA, 15 bp, Homo sapiens
tctagccagtagtta

SEQ ID NO: 1101892 - DNA, 15 bp, Homo sapiens
ctctagccagtagtt

SEQ ID NO: 1101893 - DNA, 15 bp, Homo sapiens
actctagccagtagt

SEQ ID NO: 1101894 - DNA, 15 bp, Homo sapiens
aactctagccagtag

SEQ ID NO: 1101895 - DNA, 15 bp, Homo sapiens
caactctagccagta

SEQ ID NO: 1101896 - DNA, 15 bp, Homo sapiens
tcaactctagccagt

SEQ ID NO: 1101897 - DNA, 15 bp, Homo sapiens
ttcaactctagccag

SEQ ID NO: 1101898 - DNA, 15 bp, Homo sapiens
tttcaactctagcca

SEQ ID NO: 1101899 - DNA, 15 bp, Homo sapiens
atttcaactctagcc

SEQ ID NO: 1101900 - DNA, 15 bp, Homo sapiens
catttcaactctagc

SEQ ID NO: 1101901 - DNA, 15 bp, Homo sapiens
ccatttcaactctag

SEQ ID NO: 1101902 - DNA, 15 bp, Homo sapiens
cccatttcaactcta

SEQ ID NO: 1101903 - DNA, 15 bp, Homo sapiens
ccccatttcaactct

SEQ ID NO: 1101904 - DNA, 15 bp, Homo sapiens
tccccatttcaactc

SEQ ID NO: 1101905 - DNA, 15 bp, Homo sapiens
ttccccatttcaact

SEQ ID NO: 1101906 - DNA, 15 bp, Homo sapiens
tttccccatttcaac

SEQ ID NO: 1101907 - DNA, 15 bp, Homo sapiens
ctttccccatttcaa

SEQ ID NO: 1101908 - DNA, 15 bp, Homo sapiens
gctttccccatttca

SEQ ID NO: 1101909 - DNA, 15 bp, Homo sapiens
ggctttccccatttc

SEQ ID NO: 1101910 - DNA, 15 bp, Homo sapiens
aggctttccccattt

SEQ ID NO: 1101911 - DNA, 15 bp, Homo sapiens
aaggctttccccatt

SEQ ID NO: 1101912 - DNA, 15 bp, Homo sapiens
aaaggctttccccat

SEQ ID NO: 1101913 - DNA, 15 bp, Homo sapiens
aaaaggctttcccca

SEQ ID NO: 1101914 - DNA, 15 bp, Homo sapiens
caaaaggctttcccc

SEQ ID NO: 1101915 - DNA, 15 bp, Homo sapiens
gcaaaaggctttccc

SEQ ID NO: 1101916 - DNA, 15 bp, Homo sapiens
ggcaaaaggctttcc

SEQ ID NO: 1101917 - DNA, 15 bp, Homo sapiens
aggcaaaaggctttc

SEQ ID NO: 1101918 - DNA, 15 bp, Homo sapiens
aaggcaaaaggcttt

SEQ ID NO: 1101919 - DNA, 15 bp, Homo sapiens
aaaggcaaaaggctt

SEQ ID NO: 1101920 - DNA, 15 bp, Homo sapiens
aaaaggcaaaaggct

SEQ ID NO: 1101921 - DNA, 15 bp, Homo sapiens
gaaaaggcaaaaggc

SEQ ID NO: 1101922 - DNA, 15 bp, Homo sapiens
tgaaaaggcaaaagg

SEQ ID NO: 1101923 - DNA, 15 bp, Homo sapiens
ctgaaaaggcaaaag

SEQ ID NO: 1101924 - DNA, 15 bp, Homo sapiens
actgaaaaggcaaaa

SEQ ID NO: 1101925 - DNA, 15 bp, Homo sapiens
tactgaaaaggcaaa

SEQ ID NO: 1101926 - DNA, 15 bp, Homo sapiens
ctactgaaaaggcaa

SEQ ID NO: 1101927 - DNA, 15 bp, Homo sapiens
gctactgaaaaggca

SEQ ID NO: 1101928 - DNA, 15 bp, Homo sapiens
tgctactgaaaaggc

SEQ ID NO: 1101929 - DNA, 15 bp, Homo sapiens
ctgctactgaaaagg

SEQ ID NO: 1101930 - DNA, 15 bp, Homo sapiens
actgctactgaaaag

SEQ ID NO: 1101931 - DNA, 15 bp, Homo sapiens
tactgctactgaaaa

SEQ ID NO: 1101932 - DNA, 15 bp, Homo sapiens
ctactgctactgaaa

SEQ ID NO: 1101933 - DNA, 15 bp, Homo sapiens
cctactgctactgaa

SEQ ID NO: 1101934 - DNA, 15 bp, Homo sapiens
ccctactgctactga

SEQ ID NO: 1101935 - DNA, 15 bp, Homo sapiens
cccctactgctactg

SEQ ID NO: 1101936 - DNA, 15 bp, Homo sapiens
tcccctactgctact

SEQ ID NO: 1101937 - DNA, 15 bp, Homo sapiens
ctcccctactgctac

SEQ ID NO: 1101938 - DNA, 15 bp, Homo sapiens
cctcccctactgcta

SEQ ID NO: 1101939 - DNA, 15 bp, Homo sapiens
tcctcccctactgct

SEQ ID NO: 1101940 - DNA, 15 bp, Homo sapiens
ctcctcccctactgc

SEQ ID NO: 1101941 - DNA, 15 bp, Homo sapiens
tctcctcccctactg

SEQ ID NO: 1101942 - DNA, 15 bp, Homo sapiens
atctcctcccctact

SEQ ID NO: 1101943 - DNA, 15 bp, Homo sapiens
gatctcctcccctac

SEQ ID NO: 1101944 - DNA, 15 bp, Homo sapiens
agatctcctccccta

SEQ ID NO: 1101945 - DNA, 15 bp, Homo sapiens
cagatctcctcccct

SEQ ID NO: 1101946 - DNA, 15 bp, Homo sapiens
ccagatctcctcccc

SEQ ID NO: 1101947 - DNA, 15 bp, Homo sapiens
tccagatctcctccc

SEQ ID NO: 1101948 - DNA, 15 bp, Homo sapiens
atccagatctcctcc

SEQ ID NO: 1101949 - DNA, 15 bp, Homo sapiens
aatccagatctcctc

SEQ ID NO: 1101950 - DNA, 15 bp, Homo sapiens
taatccagatctcct

SEQ ID NO: 1101951 - DNA, 15 bp, Homo sapiens
ataatccagatctcc

SEQ ID NO: 1101952 - DNA, 15 bp, Homo sapiens
aataatccagatctc

SEQ ID NO: 1101953 - DNA, 15 bp, Homo sapiens
aaataatccagatct

SEQ ID NO: 1101954 - DNA, 15 bp, Homo sapiens
taaataatccagatc

SEQ ID NO: 1101955 - DNA, 15 bp, Homo sapiens
gtaaataatccagat

SEQ ID NO: 1101956 - DNA, 15 bp, Homo sapiens
agtaaataatccaga

SEQ ID NO: 1101957 - DNA, 15 bp, Homo sapiens
aagtaaataatccag

SEQ ID NO: 1101958 - DNA, 15 bp, Homo sapiens
taagtaaataatcca

SEQ ID NO: 1101959 - DNA, 15 bp, Homo sapiens
ataagtaaataatcc

SEQ ID NO: 1101960 - DNA, 15 bp, Homo sapiens
gataagtaaataatc

SEQ ID NO: 1101961 - DNA, 15 bp, Homo sapiens
tgataagtaaataat

SEQ ID NO: 1101962 - DNA, 15 bp, Homo sapiens
atgataagtaaataa

SEQ ID NO: 1101963 - DNA, 15 bp, Homo sapiens
gatgataagtaaata

SEQ ID NO: 1101964 - DNA, 15 bp, Homo sapiens
tgatgataagtaaat

SEQ ID NO: 1101965 - DNA, 15 bp, Homo sapiens
atgatgataagtaaa

SEQ ID NO: 1101966 - DNA, 15 bp, Homo sapiens
gatgatgataagtaa

SEQ ID NO: 1101967 - DNA, 15 bp, Homo sapiens
tgatgatgataagta

SEQ ID NO: 1101968 - DNA, 15 bp, Homo sapiens
atgatgatgataagt

SEQ ID NO: 1101969 - DNA, 15 bp, Homo sapiens
catgatgatgataag

SEQ ID NO: 1101970 - DNA, 15 bp, Homo sapiens
ccatgatgatgataa

SEQ ID NO: 1101971 - DNA, 15 bp, Homo sapiens
accatgatgatgata

SEQ ID NO: 1101972 - DNA, 15 bp, Homo sapiens
gaccatgatgatgat

SEQ ID NO: 1101973 - DNA, 15 bp, Homo sapiens
tgaccatgatgatga

SEQ ID NO: 1101974 - DNA, 15 bp, Homo sapiens
gtgaccatgatgatg

SEQ ID NO: 1101975 - DNA, 15 bp, Homo sapiens
ggtgaccatgatgat

SEQ ID NO: 1101976 - DNA, 15 bp, Homo sapiens
aggtgaccatgatga

SEQ ID NO: 1101977 - DNA, 15 bp, Homo sapiens
gaggtgaccatgatg

SEQ ID NO: 1101978 - DNA, 15 bp, Homo sapiens
ggaggtgaccatgat

SEQ ID NO: 1101979 - DNA, 15 bp, Homo sapiens
aggaggtgaccatga

SEQ ID NO: 1101980 - DNA, 15 bp, Homo sapiens
taggaggtgaccatg

SEQ ID NO: 1101981 - DNA, 15 bp, Homo sapiens
gtaggaggtgaccat

SEQ ID NO: 1101982 - DNA, 15 bp, Homo sapiens
tgtaggaggtgacca

SEQ ID NO: 1101983 - DNA, 15 bp, Homo sapiens
atgtaggaggtgacc

SEQ ID NO: 1101984 - DNA, 15 bp, Homo sapiens
catgtaggaggtgac

SEQ ID NO: 1101985 - DNA, 15 bp, Homo sapiens
ccatgtaggaggtga

SEQ ID NO: 1101986 - DNA, 15 bp, Homo sapiens
gccatgtaggaggtg

SEQ ID NO: 1101987 - DNA, 15 bp, Homo sapiens
agccatgtaggaggt

SEQ ID NO: 1101988 - DNA, 15 bp, Homo sapiens
aagccatgtaggagg

SEQ ID NO: 1101989 - DNA, 15 bp, Homo sapiens
gaagccatgtaggag

SEQ ID NO: 1101990 - DNA, 15 bp, Homo sapiens
tgaagccatgtagga

SEQ ID NO: 1101991 - DNA, 15 bp, Homo sapiens
gtgaagccatgtagg

SEQ ID NO: 1101992 - DNA, 15 bp, Homo sapiens
ggtgaagccatgtag

SEQ ID NO: 1101993 - DNA, 15 bp, Homo sapiens
tggtgaagccatgta

SEQ ID NO: 1101994 - DNA, 15 bp, Homo sapiens
ttggtgaagccatgt

SEQ ID NO: 1101995 - DNA, 15 bp, Homo sapiens
tttggtgaagccatg

SEQ ID NO: 1101996 - DNA, 15 bp, Homo sapiens
ttttggtgaagccat

SEQ ID NO: 1101997 - DNA, 15 bp, Homo sapiens
tttttggtgaagcca

SEQ ID NO: 1101998 - DNA, 15 bp, Homo sapiens
ttttttggtgaagcc

SEQ ID NO: 1101999 - DNA, 15 bp, Homo sapiens
gttttttggtgaagc

SEQ ID NO: 1102000 - DNA, 15 bp, Homo sapiens
tgttttttggtgaag

SEQ ID NO: 1102001 - DNA, 15 bp, Homo sapiens
atgttttttggtgaa

SEQ ID NO: 1102002 - DNA, 15 bp, Homo sapiens
aatgttttttggtga

SEQ ID NO: 1102003 - DNA, 15 bp, Homo sapiens
gaatgttttttggtg

SEQ ID NO: 1102004 - DNA, 15 bp, Homo sapiens
agaatgttttttggt

SEQ ID NO: 1102005 - DNA, 15 bp, Homo sapiens
cagaatgttttttgg

SEQ ID NO: 1102006 - DNA, 15 bp, Homo sapiens
gcagaatgttttttg

SEQ ID NO: 1102007 - DNA, 15 bp, Homo sapiens
agcagaatgtttttt

SEQ ID NO: 1102008 - DNA, 15 bp, Homo sapiens
cagcagaatgttttt

SEQ ID NO: 1102009 - DNA, 15 bp, Homo sapiens
gcagcagaatgtttt

SEQ ID NO: 1102010 - DNA, 15 bp, Homo sapiens
ggcagcagaatgttt

SEQ ID NO: 1102011 - DNA, 15 bp, Homo sapiens
aggcagcagaatgtt

SEQ ID NO: 1102012 - DNA, 15 bp, Homo sapiens
caggcagcagaatgt

SEQ ID NO: 1102013 - DNA, 15 bp, Homo sapiens
tcaggcagcagaatg

SEQ ID NO: 1102014 - DNA, 15 bp, Homo sapiens
ttcaggcagcagaat

SEQ ID NO: 1102015 - DNA, 15 bp, Homo sapiens
tttcaggcagcagaa

SEQ ID NO: 1102016 - DNA, 15 bp, Homo sapiens
ttttcaggcagcaga

SEQ ID NO: 1102017 - DNA, 15 bp, Homo sapiens
tttttcaggcagcag

SEQ ID NO: 1102018 - DNA, 15 bp, Homo sapiens
ctttttcaggcagca

SEQ ID NO: 1102019 - DNA, 15 bp, Homo sapiens
gctttttcaggcagc

SEQ ID NO: 1102020 - DNA, 15 bp, Homo sapiens
agctttttcaggcag

SEQ ID NO: 1102021 - DNA, 15 bp, Homo sapiens
gagctttttcaggca

SEQ ID NO: 1102022 - DNA, 15 bp, Homo sapiens
ggagctttttcaggc

SEQ ID NO: 1102023 - DNA, 15 bp, Homo sapiens
tggagctttttcagg

SEQ ID NO: 1102024 - DNA, 15 bp, Homo sapiens
ttggagctttttcag

SEQ ID NO: 1102025 - DNA, 15 bp, Homo sapiens
gttggagctttttca

SEQ ID NO: 1102026 - DNA, 15 bp, Homo sapiens
tgttggagctttttc

SEQ ID NO: 1102027 - DNA, 15 bp, Homo sapiens
gtgttggagcttttt

SEQ ID NO: 1102028 - DNA, 15 bp, Homo sapiens
ggtgttggagctttt

SEQ ID NO: 1102029 - DNA, 15 bp, Homo sapiens
aggtgttggagcttt

SEQ ID NO: 1102030 - DNA, 15 bp, Homo sapiens
gaggtgttggagctt

SEQ ID NO: 1102031 - DNA, 15 bp, Homo sapiens
agaggtgttggagct

SEQ ID NO: 1102032 - DNA, 15 bp, Homo sapiens
gagaggtgttggagc

SEQ ID NO: 1102033 - DNA, 15 bp, Homo sapiens
agagaggtgttggag

SEQ ID NO: 1102034 - DNA, 15 bp, Homo sapiens
gagagaggtgttgga

SEQ ID NO: 1102035 - DNA, 15 bp, Homo sapiens
agagagaggtgttgg

SEQ ID NO: 1102036 - DNA, 15 bp, Homo sapiens
gagagagaggtgttg

SEQ ID NO: 1102037 - DNA, 15 bp, Homo sapiens
agagagagaggtgtt

SEQ ID NO: 1102038 - DNA, 15 bp, Homo sapiens
aagagagagaggtgt

SEQ ID NO: 1102039 - DNA, 15 bp, Homo sapiens
aaagagagagaggtg

SEQ ID NO: 1102040 - DNA, 15 bp, Homo sapiens
aaaagagagagaggt

SEQ ID NO: 1102041 - DNA, 15 bp, Homo sapiens
taaaagagagagagg

SEQ ID NO: 1102042 - DNA, 15 bp, Homo sapiens
ttaaaagagagagag

SEQ ID NO: 1102043 - DNA, 15 bp, Homo sapiens
tttaaaagagagaga

SEQ ID NO: 1102044 - DNA, 15 bp, Homo sapiens
ctttaaaagagagag

SEQ ID NO: 1102045 - DNA, 15 bp, Homo sapiens
cctttaaaagagaga

SEQ ID NO: 1102046 - DNA, 15 bp, Homo sapiens
tcctttaaaagagag

SEQ ID NO: 1102047 - DNA, 15 bp, Homo sapiens
atcctttaaaagaga

SEQ ID NO: 1102048 - DNA, 15 bp, Homo sapiens
catcctttaaaagag

SEQ ID NO: 1102049 - DNA, 15 bp, Homo sapiens
ccatcctttaaaaga

SEQ ID NO: 1102050 - DNA, 15 bp, Homo sapiens
tccatcctttaaaag

SEQ ID NO: 1102051 - DNA, 15 bp, Homo sapiens
ttccatcctttaaaa

SEQ ID NO: 1102052 - DNA, 15 bp, Homo sapiens
attccatcctttaaa

SEQ ID NO: 1102053 - DNA, 15 bp, Homo sapiens
aattccatcctttaa

SEQ ID NO: 1102054 - DNA, 15 bp, Homo sapiens
aaattccatccttta

SEQ ID NO: 1102055 - DNA, 15 bp, Homo sapiens
caaattccatccttt

SEQ ID NO: 1102056 - DNA, 15 bp, Homo sapiens
ccaaattccatcctt

SEQ ID NO: 1102057 - DNA, 15 bp, Homo sapiens
tccaaattccatcct

SEQ ID NO: 1102058 - DNA, 15 bp, Homo sapiens
ctccaaattccatcc

SEQ ID NO: 1102059 - DNA, 15 bp, Homo sapiens
actccaaattccatc

SEQ ID NO: 1102060 - DNA, 15 bp, Homo sapiens
gactccaaattccat

SEQ ID NO: 1102061 - DNA, 15 bp, Homo sapiens
ggactccaaattcca

SEQ ID NO: 1102062 - DNA, 15 bp, Homo sapiens
tggactccaaattcc

SEQ ID NO: 1102063 - DNA, 15 bp, Homo sapiens
atggactccaaattc

SEQ ID NO: 1102064 - DNA, 15 bp, Homo sapiens
gatggactccaaatt

SEQ ID NO: 1102065 - DNA, 15 bp, Homo sapiens
ggatggactccaaat

SEQ ID NO: 1102066 - DNA, 15 bp, Homo sapiens
aggatggactccaaa

SEQ ID NO: 1102067 - DNA, 15 bp, Homo sapiens
aaggatggactccaa

SEQ ID NO: 1102068 - DNA, 15 bp, Homo sapiens
gaaggatggactcca

SEQ ID NO: 1102069 - DNA, 15 bp, Homo sapiens
ggaaggatggactcc

SEQ ID NO: 1102070 - DNA, 15 bp, Homo sapiens
aggaaggatggactc

SEQ ID NO: 1102071 - DNA, 15 bp, Homo sapiens
gaggaaggatggact

SEQ ID NO: 1102072 - DNA, 15 bp, Homo sapiens
tgaggaaggatggac

SEQ ID NO: 1102073 - DNA, 15 bp, Homo sapiens
ctgaggaaggatgga

SEQ ID NO: 1102074 - DNA, 15 bp, Homo sapiens
actgaggaaggatgg

SEQ ID NO: 1102075 - DNA, 15 bp, Homo sapiens
cactgaggaaggatg

SEQ ID NO: 1102076 - DNA, 15 bp, Homo sapiens
tcactgaggaaggat

SEQ ID NO: 1102077 - DNA, 15 bp, Homo sapiens
atcactgaggaagga

SEQ ID NO: 1102078 - DNA, 15 bp, Homo sapiens
tatcactgaggaagg

SEQ ID NO: 1102079 - DNA, 15 bp, Homo sapiens
ttatcactgaggaag

SEQ ID NO: 1102080 - DNA, 15 bp, Homo sapiens
cttatcactgaggaa

SEQ ID NO: 1102081 - DNA, 15 bp, Homo sapiens
ccttatcactgagga

SEQ ID NO: 1102082 - DNA, 15 bp, Homo sapiens
tccttatcactgagg

SEQ ID NO: 1102083 - DNA, 15 bp, Homo sapiens
ctccttatcactgag

SEQ ID NO: 1102084 - DNA, 15 bp, Homo sapiens
actccttatcactga

SEQ ID NO: 1102085 - DNA, 15 bp, Homo sapiens
aactccttatcactg

SEQ ID NO: 1102086 - DNA, 15 bp, Homo sapiens
aaactccttatcact

SEQ ID NO: 1102087 - DNA, 15 bp, Homo sapiens
aaaactccttatcac

SEQ ID NO: 1102088 - DNA, 15 bp, Homo sapiens
aaaaactccttatca

SEQ ID NO: 1102089 - DNA, 15 bp, Homo sapiens
taaaaactccttatc

SEQ ID NO: 1102090 - DNA, 15 bp, Homo sapiens
ataaaaactccttat

SEQ ID NO: 1102091 - DNA, 15 bp, Homo sapiens
tataaaaactcctta

SEQ ID NO: 1102092 - DNA, 15 bp, Homo sapiens
ctataaaaactcctt

SEQ ID NO: 1102093 - DNA, 15 bp, Homo sapiens
gctataaaaactcct

SEQ ID NO: 1102094 - DNA, 15 bp, Homo sapiens
ggctataaaaactcc

SEQ ID NO: 1102095 - DNA, 15 bp, Homo sapiens
tggctataaaaactc

SEQ ID NO: 1102096 - DNA, 15 bp, Homo sapiens
gtggctataaaaact

SEQ ID NO: 1102097 - DNA, 15 bp, Homo sapiens
tgtggctataaaaac

SEQ ID NO: 1102098 - DNA, 15 bp, Homo sapiens
ctgtggctataaaaa

SEQ ID NO: 1102099 - DNA, 15 bp, Homo sapiens
cctgtggctataaaa

SEQ ID NO: 1102100 - DNA, 15 bp, Homo sapiens
gcctgtggctataaa

SEQ ID NO: 1102101 - DNA, 15 bp, Homo sapiens
tgcctgtggctataa

SEQ ID NO: 1102102 - DNA, 15 bp, Homo sapiens
ctgcctgtggctata

SEQ ID NO: 1102103 - DNA, 15 bp, Homo sapiens
gctgcctgtggctat

SEQ ID NO: 1102104 - DNA, 15 bp, Homo sapiens
tgctgcctgtggcta

SEQ ID NO: 1102105 - DNA, 15 bp, Homo sapiens
atgctgcctgtggct

SEQ ID NO: 1102106 - DNA, 15 bp, Homo sapiens
gatgctgcctgtggc

SEQ ID NO: 1102107 - DNA, 15 bp, Homo sapiens
agatgctgcctgtgg

SEQ ID NO: 1102108 - DNA, 15 bp, Homo sapiens
tagatgctgcctgtg

SEQ ID NO: 1102109 - DNA, 15 bp, Homo sapiens
atagatgctgcctgt

SEQ ID NO: 1102110 - DNA, 15 bp, Homo sapiens
aatagatgctgcctg

SEQ ID NO: 1102111 - DNA, 15 bp, Homo sapiens
caatagatgctgcct

SEQ ID NO: 1102112 - DNA, 15 bp, Homo sapiens
ccaatagatgctgcc

SEQ ID NO: 1102113 - DNA, 15 bp, Homo sapiens
accaatagatgctgc

SEQ ID NO: 1102114 - DNA, 15 bp, Homo sapiens
gaccaatagatgctg

SEQ ID NO: 1102115 - DNA, 15 bp, Homo sapiens
agaccaatagatgct

SEQ ID NO: 1102116 - DNA, 15 bp, Homo sapiens
cagaccaatagatgc

SEQ ID NO: 1102117 - DNA, 15 bp, Homo sapiens
acagaccaatagatg

SEQ ID NO: 1102118 - DNA, 15 bp, Homo sapiens
gacagaccaatagat

SEQ ID NO: 1102119 - DNA, 15 bp, Homo sapiens
ggacagaccaataga

SEQ ID NO: 1102120 - DNA, 15 bp, Homo sapiens
aggacagaccaatag

SEQ ID NO: 1102121 - DNA, 15 bp, Homo sapiens
gaggacagaccaata

SEQ ID NO: 1102122 - DNA, 15 bp, Homo sapiens
agaggacagaccaat

SEQ ID NO: 1102123 - DNA, 15 bp, Homo sapiens
cagaggacagaccaa

SEQ ID NO: 1102124 - DNA, 15 bp, Homo sapiens
gcagaggacagacca

SEQ ID NO: 1102125 - DNA, 15 bp, Homo sapiens
tgcagaggacagacc

SEQ ID NO: 1102126 - DNA, 15 bp, Homo sapiens
ttgcagaggacagac

SEQ ID NO: 1102127 - DNA, 15 bp, Homo sapiens
tttgcagaggacaga

SEQ ID NO: 1102128 - DNA, 15 bp, Homo sapiens
gtttgcagaggacag

SEQ ID NO: 1102129 - DNA, 15 bp, Homo sapiens
agtttgcagaggaca

SEQ ID NO: 1102130 - DNA, 15 bp, Homo sapiens
aagtttgcagaggac

SEQ ID NO: 1102131 - DNA, 15 bp, Homo sapiens
caagtttgcagagga

SEQ ID NO: 1102132 - DNA, 15 bp, Homo sapiens
gcaagtttgcagagg

SEQ ID NO: 1102133 - DNA, 15 bp, Homo sapiens
tgcaagtttgcagag

SEQ ID NO: 1102134 - DNA, 15 bp, Homo sapiens
ttgcaagtttgcaga

SEQ ID NO: 1102135 - DNA, 15 bp, Homo sapiens
gttgcaagtttgcag

SEQ ID NO: 1102136 - DNA, 15 bp, Homo sapiens
agttgcaagtttgca

SEQ ID NO: 1102137 - DNA, 15 bp, Homo sapiens
gagttgcaagtttgc

SEQ ID NO: 1102138 - DNA, 15 bp, Homo sapiens
ggagttgcaagtttg

SEQ ID NO: 1102139 - DNA, 15 bp, Homo sapiens
aggagttgcaagttt

SEQ ID NO: 1102140 - DNA, 15 bp, Homo sapiens
gaggagttgcaagtt

SEQ ID NO: 1102141 - DNA, 15 bp, Homo sapiens
agaggagttgcaagt

SEQ ID NO: 1102142 - DNA, 15 bp, Homo sapiens
cagaggagttgcaag

SEQ ID NO: 1102143 - DNA, 15 bp, Homo sapiens
tcagaggagttgcaa

SEQ ID NO: 1102144 - DNA, 15 bp, Homo sapiens
ctcagaggagttgca

SEQ ID NO: 1102145 - DNA, 15 bp, Homo sapiens
tctcagaggagttgc

SEQ ID NO: 1102146 - DNA, 15 bp, Homo sapiens
ctctcagaggagttg

SEQ ID NO: 1102147 - DNA, 15 bp, Homo sapiens
gctctcagaggagtt

SEQ ID NO: 1102148 - DNA, 15 bp, Homo sapiens
agctctcagaggagt

SEQ ID NO: 1102149 - DNA, 15 bp, Homo sapiens
tagctctcagaggag

SEQ ID NO: 1102150 - DNA, 15 bp, Homo sapiens
ctagctctcagagga

SEQ ID NO: 1102151 - DNA, 15 bp, Homo sapiens
tctagctctcagagg

SEQ ID NO: 1102152 - DNA, 15 bp, Homo sapiens
gtctagctctcagag

SEQ ID NO: 1102153 - DNA, 15 bp, Homo sapiens
agtctagctctcaga

SEQ ID NO: 1102154 - DNA, 15 bp, Homo sapiens
aagtctagctctcag

SEQ ID NO: 1102155 - DNA, 15 bp, Homo sapiens
caagtctagctctca

SEQ ID NO: 1102156 - DNA, 15 bp, Homo sapiens
ccaagtctagctctc

SEQ ID NO: 1102157 - DNA, 15 bp, Homo sapiens
tccaagtctagctct

SEQ ID NO: 1102158 - DNA, 15 bp, Homo sapiens
ttccaagtctagctc

SEQ ID NO: 1102159 - DNA, 15 bp, Homo sapiens
tttccaagtctagct

SEQ ID NO: 1102160 - DNA, 15 bp, Homo sapiens
atttccaagtctagc

SEQ ID NO: 1102161 - DNA, 15 bp, Homo sapiens
catttccaagtctag

SEQ ID NO: 1102162 - DNA, 15 bp, Homo sapiens
tcatttccaagtcta

SEQ ID NO: 1102163 - DNA, 15 bp, Homo sapiens
ttcatttccaagtct

SEQ ID NO: 1102164 - DNA, 15 bp, Homo sapiens
tttcatttccaagtc

SEQ ID NO: 1102165 - DNA, 15 bp, Homo sapiens
atgtttcatttccaa

SEQ ID NO: 1102166 - DNA, 15 bp, Homo sapiens
aatgtttcatttcca

SEQ ID NO: 1102167 - DNA, 15 bp, Homo sapiens
taatgtttcatttcc

SEQ ID NO: 1102168 - DNA, 15 bp, Homo sapiens
ataatgtttcatttc

SEQ ID NO: 1102169 - DNA, 15 bp, Homo sapiens
aataatgtttcattt

SEQ ID NO: 1102170 - DNA, 15 bp, Homo sapiens
aaataatgtttcatt

SEQ ID NO: 1102171 - DNA, 15 bp, Homo sapiens
aaaataatgtttcat

SEQ ID NO: 1102172 - DNA, 15 bp, Homo sapiens
caaaataatgtttca

SEQ ID NO: 1102173 - DNA, 15 bp, Homo sapiens
gcaaaataatgtttc

SEQ ID NO: 1102174 - DNA, 15 bp, Homo sapiens
tgcaaaataatgttt

SEQ ID NO: 1102175 - DNA, 15 bp, Homo sapiens
ttgcaaaataatgtt

SEQ ID NO: 1102176 - DNA, 15 bp, Homo sapiens
attgcaaaataatgt

SEQ ID NO: 1102177 - DNA, 15 bp, Homo sapiens
cattgcaaaataatg

SEQ ID NO: 1102178 - DNA, 15 bp, Homo sapiens
gcattgcaaaataat

SEQ ID NO: 1102179 - DNA, 15 bp, Homo sapiens
cgcattgcaaaataa

SEQ ID NO: 1102180 - DNA, 15 bp, Homo sapiens
gcgcattgcaaaata

SEQ ID NO: 1102181 - DNA, 15 bp, Homo sapiens
agcgcattgcaaaat

SEQ ID NO: 1102182 - DNA, 15 bp, Homo sapiens
cagcgcattgcaaaa

SEQ ID NO: 1102183 - DNA, 15 bp, Homo sapiens
gcagcgcattgcaaa

SEQ ID NO: 1102184 - DNA, 15 bp, Homo sapiens
agcagcgcattgcaa

SEQ ID NO: 1102185 - DNA, 15 bp, Homo sapiens
tagcagcgcattgca

SEQ ID NO: 1102186 - DNA, 15 bp, Homo sapiens
atagcagcgcattgc

SEQ ID NO: 1102187 - DNA, 15 bp, Homo sapiens
gatagcagcgcattg

SEQ ID NO: 1102188 - DNA, 15 bp, Homo sapiens
ggatagcagcgcatt

SEQ ID NO: 1102189 - DNA, 15 bp, Homo sapiens
aggatagcagcgcat

SEQ ID NO: 1102190 - DNA, 15 bp, Homo sapiens
aaggatagcagcgca

SEQ ID NO: 1102191 - DNA, 15 bp, Homo sapiens
gaaggatagcagcgc

SEQ ID NO: 1102192 - DNA, 15 bp, Homo sapiens
tgaaggatagcagcg

SEQ ID NO: 1102193 - DNA, 15 bp, Homo sapiens
atgaaggatagcagc

SEQ ID NO: 1102194 - DNA, 15 bp, Homo sapiens
aatgaaggatagcag

SEQ ID NO: 1102195 - DNA, 15 bp, Homo sapiens
aaatgaaggatagca

SEQ ID NO: 1102196 - DNA, 15 bp, Homo sapiens
aaaatgaaggatagc

SEQ ID NO: 1102197 - DNA, 15 bp, Homo sapiens
aaaaatgaaggatag

SEQ ID NO: 1102198 - DNA, 15 bp, Homo sapiens
taaaaatgaaggata

SEQ ID NO: 1102199 - DNA, 15 bp, Homo sapiens
ctaaaaatgaaggat

SEQ ID NO: 1102200 - DNA, 15 bp, Homo sapiens
gctaaaaatgaagga

SEQ ID NO: 1102201 - DNA, 15 bp, Homo sapiens
agctaaaaatgaagg

SEQ ID NO: 1102202 - DNA, 15 bp, Homo sapiens
gagctaaaaatgaag

SEQ ID NO: 1102203 - DNA, 15 bp, Homo sapiens
ggagctaaaaatgaa

SEQ ID NO: 1102204 - DNA, 15 bp, Homo sapiens
aggagctaaaaatga

SEQ ID NO: 1102205 - DNA, 15 bp, Homo sapiens
gaggagctaaaaatg

SEQ ID NO: 1102206 - DNA, 15 bp, Homo sapiens
ggaggagctaaaaat

SEQ ID NO: 1102207 - DNA, 15 bp, Homo sapiens
tggaggagctaaaaa

SEQ ID NO: 1102208 - DNA, 15 bp, Homo sapiens
gtggaggagctaaaa

SEQ ID NO: 1102209 - DNA, 15 bp, Homo sapiens
ggtggaggagctaaa

SEQ ID NO: 1102210 - DNA, 15 bp, Homo sapiens
cggtggaggagctaa

SEQ ID NO: 1102211 - DNA, 15 bp, Homo sapiens
acggtggaggagcta

SEQ ID NO: 1102212 - DNA, 15 bp, Homo sapiens
tacggtggaggagct

SEQ ID NO: 1102213 - DNA, 15 bp, Homo sapiens
ctacggtggaggagc

SEQ ID NO: 1102214 - DNA, 15 bp, Homo sapiens
tctacggtggaggag

SEQ ID NO: 1102215 - DNA, 15 bp, Homo sapiens
atctacggtggagga

SEQ ID NO: 1102216 - DNA, 15 bp, Homo sapiens
catctacggtggagg

SEQ ID NO: 1102217 - DNA, 15 bp, Homo sapiens
tcatctacggtggag

SEQ ID NO: 1102218 - DNA, 15 bp, Homo sapiens
atcatctacggtgga

SEQ ID NO: 1102219 - DNA, 15 bp, Homo sapiens
tatcatctacggtgg

SEQ ID NO: 1102220 - DNA, 15 bp, Homo sapiens
ctatcatctacggtg

SEQ ID NO: 1102221 - DNA, 15 bp, Homo sapiens
actatcatctacggt

SEQ ID NO: 1102222 - DNA, 15 bp, Homo sapiens
aactatcatctacgg

SEQ ID NO: 1102223 - DNA, 15 bp, Homo sapiens
aaactatcatctacg

SEQ ID NO: 1102224 - DNA, 15 bp, Homo sapiens
caaactatcatctac

SEQ ID NO: 1102225 - DNA, 15 bp, Homo sapiens
acaaactatcatcta

SEQ ID NO: 1102226 - DNA, 15 bp, Homo sapiens
tacaaactatcatct

SEQ ID NO: 1102227 - DNA, 15 bp, Homo sapiens
gtacaaactatcatc

SEQ ID NO: 1102228 - DNA, 15 bp, Homo sapiens
agtacaaactatcat

SEQ ID NO: 1102229 - DNA, 15 bp, Homo sapiens
aagtacaaactatca

SEQ ID NO: 1102230 - DNA, 15 bp, Homo sapiens
caagtacaaactatc

SEQ ID NO: 1102231 - DNA, 15 bp, Homo sapiens
acaagtacaaactat

SEQ ID NO: 1102232 - DNA, 15 bp, Homo sapiens
aacaagtacaaacta

SEQ ID NO: 1102233 - DNA, 15 bp, Homo sapiens
taacaagtacaaact

SEQ ID NO: 1102234 - DNA, 15 bp, Homo sapiens
ttaacaagtacaaac

SEQ ID NO: 1102235 - DNA, 15 bp, Homo sapiens
tttaacaagtacaaa

SEQ ID NO: 1102236 - DNA, 15 bp, Homo sapiens
atttaacaagtacaa

SEQ ID NO: 1102237 - DNA, 15 bp, Homo sapiens
catttaacaagtaca

SEQ ID NO: 1102238 - DNA, 15 bp, Homo sapiens
tcatttaacaagtac

SEQ ID NO: 1102239 - DNA, 15 bp, Homo sapiens
atcatttaacaagta

SEQ ID NO: 1102240 - DNA, 15 bp, Homo sapiens
tatcatttaacaagt

SEQ ID NO: 1102241 - DNA, 15 bp, Homo sapiens
ttatcatttaacaag

SEQ ID NO: 1102242 - DNA, 15 bp, Homo sapiens
cttatcatttaacaa

SEQ ID NO: 1102243 - DNA, 15 bp, Homo sapiens
ccttatcatttaaca

SEQ ID NO: 1102244 - DNA, 15 bp, Homo sapiens
tccttatcatttaac

SEQ ID NO: 1102245 - DNA, 15 bp, Homo sapiens
atccttatcatttaa

SEQ ID NO: 1102246 - DNA, 15 bp, Homo sapiens
tatccttatcattta

SEQ ID NO: 1102247 - DNA, 15 bp, Homo sapiens
atatccttatcattt

SEQ ID NO: 1102248 - DNA, 15 bp, Homo sapiens
tatatccttatcatt

SEQ ID NO: 1102249 - DNA, 15 bp, Homo sapiens
ttatatccttatcat

SEQ ID NO: 1102250 - DNA, 15 bp, Homo sapiens
tttatatccttatca

SEQ ID NO: 1102251 - DNA, 15 bp, Homo sapiens
atttatatccttatc

SEQ ID NO: 1102252 - DNA, 15 bp, Homo sapiens
aatttatatccttat

SEQ ID NO: 1102253 - DNA, 15 bp, Homo sapiens
aaatttatatcctta

SEQ ID NO: 1102254 - DNA, 15 bp, Homo sapiens
taaatttatatcctt

SEQ ID NO: 1102255 - DNA, 15 bp, Homo sapiens
ctaaatttatatcct

SEQ ID NO: 1102256 - DNA, 15 bp, Homo sapiens
cctaaatttatatcc

SEQ ID NO: 1102257 - DNA, 15 bp, Homo sapiens
acctaaatttatatc

SEQ ID NO: 1102258 - DNA, 15 bp, Homo sapiens
tgacctaaatttata

SEQ ID NO: 1102259 - DNA, 15 bp, Homo sapiens
atgacctaaatttat

SEQ ID NO: 1102260 - DNA, 15 bp, Homo sapiens
aatgacctaaattta

SEQ ID NO: 1102261 - DNA, 15 bp, Homo sapiens
aaatgacctaaattt

SEQ ID NO: 1102262 - DNA, 15 bp, Homo sapiens
aaaatgacctaaatt

SEQ ID NO: 1102263 - DNA, 15 bp, Homo sapiens
aaaaaatgacctaaa

SEQ ID NO: 1102264 - DNA, 15 bp, Homo sapiens
taaaaaatgacctaa

SEQ ID NO: 1102265 - DNA, 15 bp, Homo sapiens
ataaaaaatgaccta

SEQ ID NO: 1102266 - DNA, 15 bp, Homo sapiens
tataaaaaatgacct

SEQ ID NO: 1102267 - DNA, 15 bp, Homo sapiens
atataaaaaatgacc

SEQ ID NO: 1102268 - DNA, 15 bp, Homo sapiens
aatataaaaaatgac

SEQ ID NO: 1102269 - DNA, 15 bp, Homo sapiens
aaatataaaaaatga

SEQ ID NO: 1102270 - DNA, 15 bp, Homo sapiens
aaaatataaaaaatg

SEQ ID NO: 1102271 - DNA, 15 bp, Homo sapiens
taaaatataaaaaat

SEQ ID NO: 1102272 - DNA, 15 bp, Homo sapiens
ataaaatataaaaaa

SEQ ID NO: 1102273 - DNA, 15 bp, Homo sapiens
aataaaatataaaaa

SEQ ID NO: 1102274 - DNA, 15 bp, Homo sapiens
caataaaatataaaa

SEQ ID NO: 1102275 - DNA, 15 bp, Homo sapiens
ccaataaaatataaa

SEQ ID NO: 1102276 - DNA, 15 bp, Homo sapiens
cccaataaaatataa

SEQ ID NO: 1102277 - DNA, 15 bp, Homo sapiens
acccaataaaatata

SEQ ID NO: 1102278 - DNA, 15 bp, Homo sapiens
cacccaataaaatat

SEQ ID NO: 1102279 - DNA, 15 bp, Homo sapiens
ccacccaataaaata

SEQ ID NO: 1102280 - DNA, 15 bp, Homo sapiens
tccacccaataaaat

SEQ ID NO: 1102281 - DNA, 15 bp, Homo sapiens
ttccacccaataaaa

SEQ ID NO: 1102282 - DNA, 15 bp, Homo sapiens
attccacccaataaa

SEQ ID NO: 1102283 - DNA, 15 bp, Homo sapiens
aattccacccaataa

SEQ ID NO: 1102284 - DNA, 15 bp, Homo sapiens
aaattccacccaata

SEQ ID NO: 1102285 - DNA, 15 bp, Homo sapiens
caaattccacccaat

SEQ ID NO: 1102286 - DNA, 15 bp, Homo sapiens
ccaaattccacccaa

SEQ ID NO: 1102287 - DNA, 15 bp, Homo sapiens
accaaattccaccca

SEQ ID NO: 1102288 - DNA, 15 bp, Homo sapiens
taccaaattccaccc

SEQ ID NO: 1102289 - DNA, 15 bp, Homo sapiens
ataccaaattccacc

SEQ ID NO: 1102290 - DNA, 15 bp, Homo sapiens
tataccaaattccac

SEQ ID NO: 1102291 - DNA, 15 bp, Homo sapiens
ttataccaaattcca

SEQ ID NO: 1102292 - DNA, 15 bp, Homo sapiens
attataccaaattcc

SEQ ID NO: 1102293 - DNA, 15 bp, Homo sapiens
aattataccaaattc

SEQ ID NO: 1102294 - DNA, 15 bp, Homo sapiens
aaattataccaaatt

SEQ ID NO: 1102295 - DNA, 15 bp, Homo sapiens
aaaattataccaaat

SEQ ID NO: 1102296 - DNA, 15 bp, Homo sapiens
aaaaattataccaaa

SEQ ID NO: 1102297 - DNA, 15 bp, Homo sapiens
taaaaattataccaa

SEQ ID NO: 1102298 - DNA, 15 bp, Homo sapiens
ctaaaaattatacca

SEQ ID NO: 1102299 - DNA, 15 bp, Homo sapiens
tctaaaaattatacc

SEQ ID NO: 1102300 - DNA, 15 bp, Homo sapiens
gtctaaaaattatac

SEQ ID NO: 1102301 - DNA, 15 bp, Homo sapiens
agtctaaaaattata

SEQ ID NO: 1102302 - DNA, 15 bp, Homo sapiens
aagtctaaaaattat

SEQ ID NO: 1102303 - DNA, 15 bp, Homo sapiens
gaagtctaaaaatta

SEQ ID NO: 1102304 - DNA, 15 bp, Homo sapiens
tgaagtctaaaaatt

SEQ ID NO: 1102305 - DNA, 15 bp, Homo sapiens
ctgaagtctaaaaat

SEQ ID NO: 1102306 - DNA, 15 bp, Homo sapiens
cctgaagtctaaaaa

SEQ ID NO: 1102307 - DNA, 15 bp, Homo sapiens
gcctgaagtctaaaa

SEQ ID NO: 1102308 - DNA, 15 bp, Homo sapiens
agcctgaagtctaaa

SEQ ID NO: 1102309 - DNA, 15 bp, Homo sapiens
aagcctgaagtctaa

SEQ ID NO: 1102310 - DNA, 15 bp, Homo sapiens
aaagcctgaagtcta

SEQ ID NO: 1102311 - DNA, 15 bp, Homo sapiens
taaagcctgaagtct

SEQ ID NO: 1102312 - DNA, 15 bp, Homo sapiens
gtaaagcctgaagtc

SEQ ID NO: 1102313 - DNA, 15 bp, Homo sapiens
tgtaaagcctgaagt

SEQ ID NO: 1102314 - DNA, 15 bp, Homo sapiens
ctgtaaagcctgaag

SEQ ID NO: 1102315 - DNA, 15 bp, Homo sapiens
cctgtaaagcctgaa

SEQ ID NO: 1102316 - DNA, 15 bp, Homo sapiens
gcctgtaaagcctga

SEQ ID NO: 1102317 - DNA, 15 bp, Homo sapiens
agcctgtaaagcctg

SEQ ID NO: 1102318 - DNA, 15 bp, Homo sapiens
gagcctgtaaagcct

SEQ ID NO: 1102319 - DNA, 15 bp, Homo sapiens
ggagcctgtaaagcc

SEQ ID NO: 1102320 - DNA, 15 bp, Homo sapiens
aggagcctgtaaagc

SEQ ID NO: 1102321 - DNA, 15 bp, Homo sapiens
caggagcctgtaaag

SEQ ID NO: 1102322 - DNA, 15 bp, Homo sapiens
tcaggagcctgtaaa

SEQ ID NO: 1102323 - DNA, 15 bp, Homo sapiens
ctcaggagcctgtaa

SEQ ID NO: 1102324 - DNA, 15 bp, Homo sapiens
tctcaggagcctgta

SEQ ID NO: 1102325 - DNA, 15 bp, Homo sapiens
atctcaggagcctgt

SEQ ID NO: 1102326 - DNA, 15 bp, Homo sapiens
catctcaggagcctg

SEQ ID NO: 1102327 - DNA, 15 bp, Homo sapiens
ccatctcaggagcct

SEQ ID NO: 1102328 - DNA, 15 bp, Homo sapiens
tccatctcaggagcc

SEQ ID NO: 1102329 - DNA, 15 bp, Homo sapiens
gtccatctcaggagc

SEQ ID NO: 1102330 - DNA, 15 bp, Homo sapiens
agtccatctcaggag

SEQ ID NO: 1102331 - DNA, 15 bp, Homo sapiens
cagtccatctcagga

SEQ ID NO: 1102332 - DNA, 15 bp, Homo sapiens
tcagtccatctcagg

SEQ ID NO: 1102333 - DNA, 15 bp, Homo sapiens
atcagtccatctcag

SEQ ID NO: 1102334 - DNA, 15 bp, Homo sapiens
aatcagtccatctca

SEQ ID NO: 1102335 - DNA, 15 bp, Homo sapiens
caatcagtccatctc

SEQ ID NO: 1102336 - DNA, 15 bp, Homo sapiens
tcaatcagtccatct

SEQ ID NO: 1102337 - DNA, 15 bp, Homo sapiens
ctcaatcagtccatc

SEQ ID NO: 1102338 - DNA, 15 bp, Homo sapiens
gctcaatcagtccat

SEQ ID NO: 1102339 - DNA, 15 bp, Homo sapiens
agctcaatcagtcca

SEQ ID NO: 1102340 - DNA, 15 bp, Homo sapiens
aagctcaatcagtcc

SEQ ID NO: 1102341 - DNA, 15 bp, Homo sapiens
caagctcaatcagtc

SEQ ID NO: 1102342 - DNA, 15 bp, Homo sapiens
acaagctcaatcagt

SEQ ID NO: 1102343 - DNA, 15 bp, Homo sapiens
aacaagctcaatcag

SEQ ID NO: 1102344 - DNA, 15 bp, Homo sapiens
gaacaagctcaatca

SEQ ID NO: 1102345 - DNA, 15 bp, Homo sapiens
agaacaagctcaatc

SEQ ID NO: 1102346 - DNA, 15 bp, Homo sapiens
tagaacaagctcaat

SEQ ID NO: 1102347 - DNA, 15 bp, Homo sapiens
gtagaacaagctcaa

SEQ ID NO: 1102348 - DNA, 15 bp, Homo sapiens
agtagaacaagctca

SEQ ID NO: 1102349 - DNA, 15 bp, Homo sapiens
aagtagaacaagctc

SEQ ID NO: 1102350 - DNA, 15 bp, Homo sapiens
gaagtagaacaagct

SEQ ID NO: 1102351 - DNA, 15 bp, Homo sapiens
agaagtagaacaagc

SEQ ID NO: 1102352 - DNA, 15 bp, Homo sapiens
aagaagtagaacaag

SEQ ID NO: 1102353 - DNA, 15 bp, Homo sapiens
gaagaagtagaacaa

SEQ ID NO: 1102354 - DNA, 15 bp, Homo sapiens
ggaagaagtagaaca

SEQ ID NO: 1102355 - DNA, 15 bp, Homo sapiens
gggaagaagtagaac

SEQ ID NO: 1102356 - DNA, 15 bp, Homo sapiens
ggggaagaagtagaa

SEQ ID NO: 1102357 - DNA, 15 bp, Homo sapiens
tggggaagaagtaga

SEQ ID NO: 1102358 - DNA, 15 bp, Homo sapiens
atggggaagaagtag

SEQ ID NO: 1102359 - DNA, 15 bp, Homo sapiens
gatggggaagaagta

SEQ ID NO: 1102360 - DNA, 15 bp, Homo sapiens
tgatggggaagaagt

SEQ ID NO: 1102361 - DNA, 15 bp, Homo sapiens
atgatggggaagaag

SEQ ID NO: 1102362 - DNA, 15 bp, Homo sapiens
catgatggggaagaa

SEQ ID NO: 1102363 - DNA, 15 bp, Homo sapiens
tcatgatggggaaga

SEQ ID NO: 1102364 - DNA, 15 bp, Homo sapiens
atcatgatggggaag

SEQ ID NO: 1102365 - DNA, 15 bp, Homo sapiens
tatcatgatggggaa

SEQ ID NO: 1102366 - DNA, 15 bp, Homo sapiens
ctatcatgatgggga

SEQ ID NO: 1102367 - DNA, 15 bp, Homo sapiens
cctatcatgatgggg

SEQ ID NO: 1102368 - DNA, 15 bp, Homo sapiens
tcctatcatgatggg

SEQ ID NO: 1102369 - DNA, 15 bp, Homo sapiens
ttcctatcatgatgg

SEQ ID NO: 1102370 - DNA, 15 bp, Homo sapiens
cttcctatcatgatg

SEQ ID NO: 1102371 - DNA, 15 bp, Homo sapiens
acttcctatcatgat

SEQ ID NO: 1102372 - DNA, 15 bp, Homo sapiens
cacttcctatcatga

SEQ ID NO: 1102373 - DNA, 15 bp, Homo sapiens
gcacttcctatcatg

SEQ ID NO: 1102374 - DNA, 15 bp, Homo sapiens
agcacttcctatcat

SEQ ID NO: 1102375 - DNA, 15 bp, Homo sapiens
cagcacttcctatca

SEQ ID NO: 1102376 - DNA, 15 bp, Homo sapiens
acagcacttcctatc

SEQ ID NO: 1102377 - DNA, 15 bp, Homo sapiens
tacagcacttcctat

SEQ ID NO: 1102378 - DNA, 15 bp, Homo sapiens
gtacagcacttccta

SEQ ID NO: 1102379 - DNA, 15 bp, Homo sapiens
ggtacagcacttcct

SEQ ID NO: 1102380 - DNA, 15 bp, Homo sapiens
tggtacagcacttcc

SEQ ID NO: 1102381 - DNA, 15 bp, Homo sapiens
gtggtacagcacttc

SEQ ID NO: 1102382 - DNA, 15 bp, Homo sapiens
tgtggtacagcactt

SEQ ID NO: 1102383 - DNA, 15 bp, Homo sapiens
gtgtggtacagcact

SEQ ID NO: 1102384 - DNA, 15 bp, Homo sapiens
agtgtggtacagcac

SEQ ID NO: 1102385 - DNA, 15 bp, Homo sapiens
tagtgtggtacagca

SEQ ID NO: 1102386 - DNA, 15 bp, Homo sapiens
ctagtgtggtacagc

SEQ ID NO: 1102387 - DNA, 15 bp, Homo sapiens
cctagtgtggtacag

SEQ ID NO: 1102388 - DNA, 15 bp, Homo sapiens
gcctagtgtggtaca

SEQ ID NO: 1102389 - DNA, 15 bp, Homo sapiens
tgcctagtgtggtac

SEQ ID NO: 1102390 - DNA, 15 bp, Homo sapiens
ctgcctagtgtggta

SEQ ID NO: 1102391 - DNA, 15 bp, Homo sapiens
actgcctagtgtggt

SEQ ID NO: 1102392 - DNA, 15 bp, Homo sapiens
cactgcctagtgtgg

SEQ ID NO: 1102393 - DNA, 15 bp, Homo sapiens
acactgcctagtgtg

SEQ ID NO: 1102394 - DNA, 15 bp, Homo sapiens
cacactgcctagtgt

SEQ ID NO: 1102395 - DNA, 15 bp, Homo sapiens
acacactgcctagtg

SEQ ID NO: 1102396 - DNA, 15 bp, Homo sapiens
cacacactgcctagt

SEQ ID NO: 1102397 - DNA, 15 bp, Homo sapiens
acacacactgcctag

SEQ ID NO: 1102398 - DNA, 15 bp, Homo sapiens
tacacacactgccta

SEQ ID NO: 1102399 - DNA, 15 bp, Homo sapiens
ctacacacactgcct

SEQ ID NO: 1102400 - DNA, 15 bp, Homo sapiens
actacacacactgcc

SEQ ID NO: 1102401 - DNA, 15 bp, Homo sapiens
cactacacacactgc

SEQ ID NO: 1102402 - DNA, 15 bp, Homo sapiens
tcactacacacactg

SEQ ID NO: 1102403 - DNA, 15 bp, Homo sapiens
gtcactacacacact

SEQ ID NO: 1102404 - DNA, 15 bp, Homo sapiens
ggtcactacacacac

SEQ ID NO: 1102405 - DNA, 15 bp, Homo sapiens
tggtcactacacaca

SEQ ID NO: 1102406 - DNA, 15 bp, Homo sapiens
gtggtcactacacac

SEQ ID NO: 1102407 - DNA, 15 bp, Homo sapiens
tgtggtcactacaca

SEQ ID NO: 1102408 - DNA, 15 bp, Homo sapiens
ctgtggtcactacac

SEQ ID NO: 1102409 - DNA, 15 bp, Homo sapiens
tctgtggtcactaca

SEQ ID NO: 1102410 - DNA, 15 bp, Homo sapiens
gtctgtggtcactac

SEQ ID NO: 1102411 - DNA, 15 bp, Homo sapiens
agtctgtggtcacta

SEQ ID NO: 1102412 - DNA, 15 bp, Homo sapiens
cagtctgtggtcact

SEQ ID NO: 1102413 - DNA, 15 bp, Homo sapiens
ccagtctgtggtcac

SEQ ID NO: 1102414 - DNA, 15 bp, Homo sapiens
gccagtctgtggtca

SEQ ID NO: 1102415 - DNA, 15 bp, Homo sapiens
agccagtctgtggtc

SEQ ID NO: 1102416 - DNA, 15 bp, Homo sapiens
cagccagtctgtggt

SEQ ID NO: 1102417 - DNA, 15 bp, Homo sapiens
tcagccagtctgtgg

SEQ ID NO: 1102418 - DNA, 15 bp, Homo sapiens
ctcagccagtctgtg

SEQ ID NO: 1102419 - DNA, 15 bp, Homo sapiens
actcagccagtctgt

SEQ ID NO: 1102420 - DNA, 15 bp, Homo sapiens
cactcagccagtctg

SEQ ID NO: 1102421 - DNA, 15 bp, Homo sapiens
acactcagccagtct

SEQ ID NO: 1102422 - DNA, 15 bp, Homo sapiens
gacactcagccagtc

SEQ ID NO: 1102423 - DNA, 15 bp, Homo sapiens
agacactcagccagt

SEQ ID NO: 1102424 - DNA, 15 bp, Homo sapiens
gagacactcagccag

SEQ ID NO: 1102425 - DNA, 15 bp, Homo sapiens
ggagacactcagcca

SEQ ID NO: 1102426 - DNA, 15 bp, Homo sapiens
gggagacactcagcc

SEQ ID NO: 1102427 - DNA, 15 bp, Homo sapiens
tgggagacactcagc

SEQ ID NO: 1102428 - DNA, 15 bp, Homo sapiens
atgggagacactcag

SEQ ID NO: 1102429 - DNA, 15 bp, Homo sapiens
gatgggagacactca

SEQ ID NO: 1102430 - DNA, 15 bp, Homo sapiens
ggatgggagacactc

SEQ ID NO: 1102431 - DNA, 15 bp, Homo sapiens
gggatgggagacact

SEQ ID NO: 1102432 - DNA, 15 bp, Homo sapiens
tgggatgggagacac

SEQ ID NO: 1102433 - DNA, 15 bp, Homo sapiens
atgggatgggagaca

SEQ ID NO: 1102434 - DNA, 15 bp, Homo sapiens
catgggatgggagac

SEQ ID NO: 1102435 - DNA, 15 bp, Homo sapiens
gcatgggatgggaga

SEQ ID NO: 1102436 - DNA, 15 bp, Homo sapiens
agcatgggatgggag

SEQ ID NO: 1102437 - DNA, 15 bp, Homo sapiens
cagcatgggatggga

SEQ ID NO: 1102438 - DNA, 15 bp, Homo sapiens
ccagcatgggatggg

SEQ ID NO: 1102439 - DNA, 15 bp, Homo sapiens
gccagcatgggatgg

SEQ ID NO: 1102440 - DNA, 15 bp, Homo sapiens
ggccagcatgggatg

SEQ ID NO: 1102441 - DNA, 15 bp, Homo sapiens
gggccagcatgggat

SEQ ID NO: 1102442 - DNA, 15 bp, Homo sapiens
tgggccagcatggga

SEQ ID NO: 1102443 - DNA, 15 bp, Homo sapiens
atgggccagcatggg

SEQ ID NO: 1102444 - DNA, 15 bp, Homo sapiens
tatgggccagcatgg

SEQ ID NO: 1102445 - DNA, 15 bp, Homo sapiens
atatgggccagcatg

SEQ ID NO: 1102446 - DNA, 15 bp, Homo sapiens
gatatgggccagcat

SEQ ID NO: 1102447 - DNA, 15 bp, Homo sapiens
agatatgggccagca

SEQ ID NO: 1102448 - DNA, 15 bp, Homo sapiens
cagatatgggccagc

SEQ ID NO: 1102449 - DNA, 15 bp, Homo sapiens
ccagatatgggccag

SEQ ID NO: 1102450 - DNA, 15 bp, Homo sapiens
accagatatgggcca

SEQ ID NO: 1102451 - DNA, 15 bp, Homo sapiens
taccagatatgggcc

SEQ ID NO: 1102452 - DNA, 15 bp, Homo sapiens
gtaccagatatgggc

SEQ ID NO: 1102453 - DNA, 15 bp, Homo sapiens
ggtaccagatatggg

SEQ ID NO: 1102454 - DNA, 15 bp, Homo sapiens
gggtaccagatatgg

SEQ ID NO: 1102455 - DNA, 15 bp, Homo sapiens
tgggtaccagatatg

SEQ ID NO: 1102456 - DNA, 15 bp, Homo sapiens
gtgggtaccagatat

SEQ ID NO: 1102457 - DNA, 15 bp, Homo sapiens
ggtgggtaccagata

SEQ ID NO: 1102458 - DNA, 15 bp, Homo sapiens
aggtgggtaccagat

SEQ ID NO: 1102459 - DNA, 15 bp, Homo sapiens
caggtgggtaccaga

SEQ ID NO: 1102460 - DNA, 15 bp, Homo sapiens
tcaggtgggtaccag

SEQ ID NO: 1102461 - DNA, 15 bp, Homo sapiens
atcaggtgggtacca

SEQ ID NO: 1102462 - DNA, 15 bp, Homo sapiens
gatcaggtgggtacc

SEQ ID NO: 1102463 - DNA, 15 bp, Homo sapiens
ggatcaggtgggtac

SEQ ID NO: 1102464 - DNA, 15 bp, Homo sapiens
tggatcaggtgggta

SEQ ID NO: 1102465 - DNA, 15 bp, Homo sapiens
gtggatcaggtgggt

SEQ ID NO: 1102466 - DNA, 15 bp, Homo sapiens
tgtggatcaggtggg

SEQ ID NO: 1102467 - DNA, 15 bp, Homo sapiens
ttgtggatcaggtgg

SEQ ID NO: 1102468 - DNA, 15 bp, Homo sapiens
tttgtggatcaggtg

SEQ ID NO: 1102469 - DNA, 15 bp, Homo sapiens
atttgtggatcaggt

SEQ ID NO: 1102470 - DNA, 15 bp, Homo sapiens
catttgtggatcagg

SEQ ID NO: 1102471 - DNA, 15 bp, Homo sapiens
acatttgtggatcag

SEQ ID NO: 1102472 - DNA, 15 bp, Homo sapiens
aacatttgtggatca

SEQ ID NO: 1102473 - DNA, 15 bp, Homo sapiens
gaacatttgtggatc

SEQ ID NO: 1102474 - DNA, 15 bp, Homo sapiens
ggaacatttgtggat

SEQ ID NO: 1102475 - DNA, 15 bp, Homo sapiens
tggaacatttgtgga

SEQ ID NO: 1102476 - DNA, 15 bp, Homo sapiens
atggaacatttgtgg

SEQ ID NO: 1102477 - DNA, 15 bp, Homo sapiens
gatggaacatttgtg

SEQ ID NO: 1102478 - DNA, 15 bp, Homo sapiens
tgatggaacatttgt

SEQ ID NO: 1102479 - DNA, 15 bp, Homo sapiens
ctgatggaacatttg

SEQ ID NO: 1102480 - DNA, 15 bp, Homo sapiens
tctgatggaacattt

SEQ ID NO: 1102481 - DNA, 15 bp, Homo sapiens
atctgatggaacatt

SEQ ID NO: 1102482 - DNA, 15 bp, Homo sapiens
gatctgatggaacat

SEQ ID NO: 1102483 - DNA, 15 bp, Homo sapiens
ggatctgatggaaca

SEQ ID NO: 1102484 - DNA, 15 bp, Homo sapiens
aggatctgatggaac

SEQ ID NO: 1102485 - DNA, 15 bp, Homo sapiens
caggatctgatggaa

SEQ ID NO: 1102486 - DNA, 15 bp, Homo sapiens
acaggatctgatgga

SEQ ID NO: 1102487 - DNA, 15 bp, Homo sapiens
aacaggatctgatgg

SEQ ID NO: 1102488 - DNA, 15 bp, Homo sapiens
gaacaggatctgatg

SEQ ID NO: 1102489 - DNA, 15 bp, Homo sapiens
tgaacaggatctgat

SEQ ID NO: 1102490 - DNA, 15 bp, Homo sapiens
ttgaacaggatctga

SEQ ID NO: 1102491 - DNA, 15 bp, Homo sapiens
tttgaacaggatctg

SEQ ID NO: 1102492 - DNA, 15 bp, Homo sapiens
gtttgaacaggatct

SEQ ID NO: 1102493 - DNA, 15 bp, Homo sapiens
tgtttgaacaggatc

SEQ ID NO: 1102494 - DNA, 15 bp, Homo sapiens
ttgtttgaacaggat

SEQ ID NO: 1102495 - DNA, 15 bp, Homo sapiens
gttgtttgaacagga

SEQ ID NO: 1102496 - DNA, 15 bp, Homo sapiens
tgttgtttgaacagg

SEQ ID NO: 1102497 - DNA, 15 bp, Homo sapiens
gtgttgtttgaacag

SEQ ID NO: 1102498 - DNA, 15 bp, Homo sapiens
tgtgttgtttgaaca

SEQ ID NO: 1102499 - DNA, 15 bp, Homo sapiens
atgtgttgtttgaac

SEQ ID NO: 1102500 - DNA, 15 bp, Homo sapiens
gatgtgttgtttgaa

SEQ ID NO: 1102501 - DNA, 15 bp, Homo sapiens
agatgtgttgtttga

SEQ ID NO: 1102502 - DNA, 15 bp, Homo sapiens
gagatgtgttgtttg

SEQ ID NO: 1102503 - DNA, 15 bp, Homo sapiens
ggagatgtgttgttt

SEQ ID NO: 1102504 - DNA, 15 bp, Homo sapiens
tggagatgtgttgtt

SEQ ID NO: 1102505 - DNA, 15 bp, Homo sapiens
ctggagatgtgttgt

SEQ ID NO: 1102506 - DNA, 15 bp, Homo sapiens
actggagatgtgttg

SEQ ID NO: 1102507 - DNA, 15 bp, Homo sapiens
aactggagatgtgtt

SEQ ID NO: 1102508 - DNA, 15 bp, Homo sapiens
taactggagatgtgt

SEQ ID NO: 1102509 - DNA, 15 bp, Homo sapiens
ttaactggagatgtg

SEQ ID NO: 1102510 - DNA, 15 bp, Homo sapiens
cttaactggagatgt

SEQ ID NO: 1102511 - DNA, 15 bp, Homo sapiens
gcttaactggagatg

SEQ ID NO: 1102512 - DNA, 15 bp, Homo sapiens
ggcttaactggagat

SEQ ID NO: 1102513 - DNA, 15 bp, Homo sapiens
tggcttaactggaga

SEQ ID NO: 1102514 - DNA, 15 bp, Homo sapiens
ttggcttaactggag

SEQ ID NO: 1102515 - DNA, 15 bp, Homo sapiens
tttggcttaactgga

SEQ ID NO: 1102516 - DNA, 15 bp, Homo sapiens
atttggcttaactgg

SEQ ID NO: 1102517 - DNA, 15 bp, Homo sapiens
gatttggcttaactg

SEQ ID NO: 1102518 - DNA, 15 bp, Homo sapiens
agatttggcttaact

SEQ ID NO: 1102519 - DNA, 15 bp, Homo sapiens
aagatttggcttaac

SEQ ID NO: 1102520 - DNA, 15 bp, Homo sapiens
caagatttggcttaa

SEQ ID NO: 1102521 - DNA, 15 bp, Homo sapiens
gcaagatttggctta

SEQ ID NO: 1102522 - DNA, 15 bp, Homo sapiens
ggcaagatttggctt

SEQ ID NO: 1102523 - DNA, 15 bp, Homo sapiens
gggcaagatttggct

SEQ ID NO: 1102524 - DNA, 15 bp, Homo sapiens
agggcaagatttggc

SEQ ID NO: 1102525 - DNA, 15 bp, Homo sapiens
aagggcaagatttgg

SEQ ID NO: 1102526 - DNA, 15 bp, Homo sapiens
aaagggcaagatttg

SEQ ID NO: 1102527 - DNA, 15 bp, Homo sapiens
gaaagggcaagattt

SEQ ID NO: 1102528 - DNA, 15 bp, Homo sapiens
agaaagggcaagatt

SEQ ID NO: 1102529 - DNA, 15 bp, Homo sapiens
gagaaagggcaagat

SEQ ID NO: 1102530 - DNA, 15 bp, Homo sapiens
ggagaaagggcaaga

SEQ ID NO: 1102531 - DNA, 15 bp, Homo sapiens
aggagaaagggcaag

SEQ ID NO: 1102532 - DNA, 15 bp, Homo sapiens
aaggagaaagggcaa

SEQ ID NO: 1102533 - DNA, 15 bp, Homo sapiens
taaggagaaagggca

SEQ ID NO: 1102534 - DNA, 15 bp, Homo sapiens
gtaaggagaaagggc

SEQ ID NO: 1102535 - DNA, 15 bp, Homo sapiens
cgtaaggagaaaggg

SEQ ID NO: 1102536 - DNA, 15 bp, Homo sapiens
ccgtaaggagaaagg

SEQ ID NO: 1102537 - DNA, 15 bp, Homo sapiens
accgtaaggagaaag

SEQ ID NO: 1102538 - DNA, 15 bp, Homo sapiens
taccgtaaggagaaa

SEQ ID NO: 1102539 - DNA, 15 bp, Homo sapiens
ttaccgtaaggagaa

SEQ ID NO: 1102540 - DNA, 15 bp, Homo sapiens
tttaccgtaaggaga

SEQ ID NO: 1102541 - DNA, 15 bp, Homo sapiens
ttttaccgtaaggag

SEQ ID NO: 1102542 - DNA, 15 bp, Homo sapiens
attttaccgtaagga

SEQ ID NO: 1102543 - DNA, 15 bp, Homo sapiens
cattttaccgtaagg

SEQ ID NO: 1102544 - DNA, 15 bp, Homo sapiens
acattttaccgtaag

SEQ ID NO: 1102545 - DNA, 15 bp, Homo sapiens
tacattttaccgtaa

SEQ ID NO: 1102546 - DNA, 15 bp, Homo sapiens
gtacattttaccgta

SEQ ID NO: 1102547 - DNA, 15 bp, Homo sapiens
agtacattttaccgt

SEQ ID NO: 1102548 - DNA, 15 bp, Homo sapiens
tagtacattttaccg

SEQ ID NO: 1102549 - DNA, 15 bp, Homo sapiens
ttagtacattttacc

SEQ ID NO: 1102550 - DNA, 15 bp, Homo sapiens
tttagtacattttac

SEQ ID NO: 1102551 - DNA, 15 bp, Homo sapiens
atttagtacatttta

SEQ ID NO: 1102552 - DNA, 15 bp, Homo sapiens
gatttagtacatttt

SEQ ID NO: 1102553 - DNA, 15 bp, Homo sapiens
agatttagtacattt

SEQ ID NO: 1102554 - DNA, 15 bp, Homo sapiens
cagatttagtacatt

SEQ ID NO: 1102555 - DNA, 15 bp, Homo sapiens
tcagatttagtacat

SEQ ID NO: 1102556 - DNA, 15 bp, Homo sapiens
ttcagatttagtaca

SEQ ID NO: 1102557 - DNA, 15 bp, Homo sapiens
cttcagatttagtac

SEQ ID NO: 1102558 - DNA, 15 bp, Homo sapiens
ccttcagatttagta

SEQ ID NO: 1102559 - DNA, 15 bp, Homo sapiens
accttcagatttagt

SEQ ID NO: 1102560 - DNA, 15 bp, Homo sapiens
aaccttcagatttag

SEQ ID NO: 1102561 - DNA, 15 bp, Homo sapiens
aaaccttcagattta

SEQ ID NO: 1102562 - DNA, 15 bp, Homo sapiens
aaaaccttcagattt

SEQ ID NO: 1102563 - DNA, 15 bp, Homo sapiens
caaaaccttcagatt

SEQ ID NO: 1102564 - DNA, 15 bp, Homo sapiens
acaaaaccttcagat

SEQ ID NO: 1102565 - DNA, 15 bp, Homo sapiens
gacaaaaccttcaga

SEQ ID NO: 1102566 - DNA, 15 bp, Homo sapiens
agacaaaaccttcag

SEQ ID NO: 1102567 - DNA, 15 bp, Homo sapiens
aagacaaaaccttca

SEQ ID NO: 1102568 - DNA, 15 bp, Homo sapiens
aaagacaaaaccttc

SEQ ID NO: 1102569 - DNA, 15 bp, Homo sapiens
aaaagacaaaacctt

SEQ ID NO: 1102570 - DNA, 15 bp, Homo sapiens
aaaaagacaaaacct

SEQ ID NO: 1102571 - DNA, 15 bp, Homo sapiens
taaaaagacaaaacc

SEQ ID NO: 1102572 - DNA, 15 bp, Homo sapiens
ttaaaaagacaaaac

SEQ ID NO: 1102573 - DNA, 15 bp, Homo sapiens
attaaaaagacaaaa

SEQ ID NO: 1102574 - DNA, 15 bp, Homo sapiens
cattaaaaagacaaa

SEQ ID NO: 1102575 - DNA, 15 bp, Homo sapiens
actgacagaacagac

SEQ ID NO: 1102576 - DNA, 15 bp, Homo sapiens
tactgacagaacaga

SEQ ID NO: 1102577 - DNA, 15 bp, Homo sapiens
gtactgacagaacag

SEQ ID NO: 1102578 - DNA, 15 bp, Homo sapiens
ggtactgacagaaca

SEQ ID NO: 1102579 - DNA, 15 bp, Homo sapiens
gggtactgacagaac

SEQ ID NO: 1102580 - DNA, 15 bp, Homo sapiens
tgggtactgacagaa

SEQ ID NO: 1102581 - DNA, 15 bp, Homo sapiens
gtgggtactgacaga

SEQ ID NO: 1102582 - DNA, 15 bp, Homo sapiens
tgtgggtactgacag

SEQ ID NO: 1102583 - DNA, 15 bp, Homo sapiens
ctgtgggtactgaca

SEQ ID NO: 1102584 - DNA, 15 bp, Homo sapiens
cctgtgggtactgac

SEQ ID NO: 1102585 - DNA, 15 bp, Homo sapiens
gcctgtgggtactga

SEQ ID NO: 1102586 - DNA, 15 bp, Homo sapiens
tgcctgtgggtactg

SEQ ID NO: 1102587 - DNA, 15 bp, Homo sapiens
ctgcctgtgggtact

SEQ ID NO: 1102588 - DNA, 15 bp, Homo sapiens
cctgcctgtgggtac

SEQ ID NO: 1102589 - DNA, 15 bp, Homo sapiens
tcctgcctgtgggta

SEQ ID NO: 1102590 - DNA, 15 bp, Homo sapiens
ctcctgcctgtgggt

SEQ ID NO: 1102591 - DNA, 15 bp, Homo sapiens
tctcctgcctgtggg

SEQ ID NO: 1102592 - DNA, 15 bp, Homo sapiens
ctctcctgcctgtgg

SEQ ID NO: 1102593 - DNA, 15 bp, Homo sapiens
gctctcctgcctgtg

SEQ ID NO: 1102594 - DNA, 15 bp, Homo sapiens
tgctctcctgcctgt

SEQ ID NO: 1102595 - DNA, 15 bp, Homo sapiens
ctgctctcctgcctg

SEQ ID NO: 1102596 - DNA, 15 bp, Homo sapiens
tctgctctcctgcct

SEQ ID NO: 1102597 - DNA, 15 bp, Homo sapiens
ttctgctctcctgcc

SEQ ID NO: 1102598 - DNA, 15 bp, Homo sapiens
tttctgctctcctgc

SEQ ID NO: 1102599 - DNA, 15 bp, Homo sapiens
ctttctgctctcctg

SEQ ID NO: 1102600 - DNA, 15 bp, Homo sapiens
cctttctgctctcct

SEQ ID NO: 1102601 - DNA, 15 bp, Homo sapiens
tcctttctgctctcc

SEQ ID NO: 1102602 - DNA, 15 bp, Homo sapiens
ctcctttctgctctc

SEQ ID NO: 1102603 - DNA, 15 bp, Homo sapiens
tctcctttctgctct

SEQ ID NO: 1102604 - DNA, 15 bp, Homo sapiens
ttctcctttctgctc

SEQ ID NO: 1102605 - DNA, 15 bp, Homo sapiens
tttctcctttctgct

SEQ ID NO: 1102606 - DNA, 15 bp, Homo sapiens
atttctcctttctgc

SEQ ID NO: 1102607 - DNA, 15 bp, Homo sapiens
catttctcctttctg

SEQ ID NO: 1102608 - DNA, 15 bp, Homo sapiens
ccatttctcctttct

SEQ ID NO: 1102609 - DNA, 15 bp, Homo sapiens
gccatttctcctttc

SEQ ID NO: 1102610 - DNA, 15 bp, Homo sapiens
tgccatttctccttt

SEQ ID NO: 1102611 - DNA, 15 bp, Homo sapiens
ctgccatttctcctt

SEQ ID NO: 1102612 - DNA, 15 bp, Homo sapiens
gctgccatttctcct

SEQ ID NO: 1102613 - DNA, 15 bp, Homo sapiens
ggctgccatttctcc

SEQ ID NO: 1102614 - DNA, 15 bp, Homo sapiens
tggctgccatttctc

SEQ ID NO: 1102615 - DNA, 15 bp, Homo sapiens
gtggctgccatttct

SEQ ID NO: 1102616 - DNA, 15 bp, Homo sapiens
tgtggctgccatttc

SEQ ID NO: 1102617 - DNA, 15 bp, Homo sapiens
ctgtggctgccattt

SEQ ID NO: 1102618 - DNA, 15 bp, Homo sapiens
gctgtggctgccatt

SEQ ID NO: 1102619 - DNA, 15 bp, Homo sapiens
tgctgtggctgccat

SEQ ID NO: 1102620 - DNA, 15 bp, Homo sapiens
ctgctgtggctgcca

SEQ ID NO: 1102621 - DNA, 15 bp, Homo sapiens
tctgctgtggctgcc

SEQ ID NO: 1102622 - DNA, 15 bp, Homo sapiens
gtctgctgtggctgc

SEQ ID NO: 1102623 - DNA, 15 bp, Homo sapiens
tgtctgctgtggctg

SEQ ID NO: 1102624 - DNA, 15 bp, Homo sapiens
ttgtctgctgtggct

SEQ ID NO: 1102625 - DNA, 15 bp, Homo sapiens
tttgtctgctgtggc

SEQ ID NO: 1102626 - DNA, 15 bp, Homo sapiens
atttgtctgctgtgg

SEQ ID NO: 1102627 - DNA, 15 bp, Homo sapiens
catttgtctgctgtg

SEQ ID NO: 1102628 - DNA, 15 bp, Homo sapiens
ccatttgtctgctgt

SEQ ID NO: 1102629 - DNA, 15 bp, Homo sapiens
gccatttgtctgctg

SEQ ID NO: 1102630 - DNA, 15 bp, Homo sapiens
tgccatttgtctgct

SEQ ID NO: 1102631 - DNA, 15 bp, Homo sapiens
gtgccatttgtctgc

SEQ ID NO: 1102632 - DNA, 15 bp, Homo sapiens
tgtgccatttgtctg

SEQ ID NO: 1102633 - DNA, 15 bp, Homo sapiens
atgtgccatttgtct

SEQ ID NO: 1102634 - DNA, 15 bp, Homo sapiens
aatgtgccatttgtc

SEQ ID NO: 1102635 - DNA, 15 bp, Homo sapiens
gaatgtgccatttgt

SEQ ID NO: 1102636 - DNA, 15 bp, Homo sapiens
cgaatgtgccatttg

SEQ ID NO: 1102637 - DNA, 15 bp, Homo sapiens
acgaatgtgccattt

SEQ ID NO: 1102638 - DNA, 15 bp, Homo sapiens
aacgaatgtgccatt

SEQ ID NO: 1102639 - DNA, 15 bp, Homo sapiens
gaacgaatgtgccat

SEQ ID NO: 1102640 - DNA, 15 bp, Homo sapiens
ggaacgaatgtgcca

SEQ ID NO: 1102641 - DNA, 15 bp, Homo sapiens
tggaacgaatgtgcc

SEQ ID NO: 1102642 - DNA, 15 bp, Homo sapiens
gtggaacgaatgtgc

SEQ ID NO: 1102643 - DNA, 15 bp, Homo sapiens
agtggaacgaatgtg

SEQ ID NO: 1102644 - DNA, 15 bp, Homo sapiens
gagtggaacgaatgt

SEQ ID NO: 1102645 - DNA, 15 bp, Homo sapiens
tgagtggaacgaatg

SEQ ID NO: 1102646 - DNA, 15 bp, Homo sapiens
ctgagtggaacgaat

SEQ ID NO: 1102647 - DNA, 15 bp, Homo sapiens
gctgagtggaacgaa

SEQ ID NO: 1102648 - DNA, 15 bp, Homo sapiens
agctgagtggaacga

SEQ ID NO: 1102649 - DNA, 15 bp, Homo sapiens
gagctgagtggaacg

SEQ ID NO: 1102650 - DNA, 15 bp, Homo sapiens
agagctgagtggaac

SEQ ID NO: 1102651 - DNA, 15 bp, Homo sapiens
gagagctgagtggaa

SEQ ID NO: 1102652 - DNA, 15 bp, Homo sapiens
cgagagctgagtgga

SEQ ID NO: 1102653 - DNA, 15 bp, Homo sapiens
gcgagagctgagtgg

SEQ ID NO: 1102654 - DNA, 15 bp, Homo sapiens
tgcgagagctgagtg

SEQ ID NO: 1102655 - DNA, 15 bp, Homo sapiens
atgcgagagctgagt

SEQ ID NO: 1102656 - DNA, 15 bp, Homo sapiens
catgcgagagctgag

SEQ ID NO: 1102657 - DNA, 15 bp, Homo sapiens
gcatgcgagagctga

SEQ ID NO: 1102658 - DNA, 15 bp, Homo sapiens
ggcatgcgagagctg

SEQ ID NO: 1102659 - DNA, 15 bp, Homo sapiens
gggcatgcgagagct

SEQ ID NO: 1102660 - DNA, 15 bp, Homo sapiens
tgggcatgcgagagc

SEQ ID NO: 1102661 - DNA, 15 bp, Homo sapiens
atgggcatgcgagag

SEQ ID NO: 1102662 - DNA, 15 bp, Homo sapiens
gatgggcatgcgaga

SEQ ID NO: 1102663 - DNA, 15 bp, Homo sapiens
tgatgggcatgcgag

SEQ ID NO: 1102664 - DNA, 15 bp, Homo sapiens
gtgatgggcatgcga

SEQ ID NO: 1102665 - DNA, 15 bp, Homo sapiens
tgtgatgggcatgcg

SEQ ID NO: 1102666 - DNA, 15 bp, Homo sapiens
ctgtgatgggcatgc

SEQ ID NO: 1102667 - DNA, 15 bp, Homo sapiens
tctgtgatgggcatg

SEQ ID NO: 1102668 - DNA, 15 bp, Homo sapiens
atctgtgatgggcat

SEQ ID NO: 1102669 - DNA, 15 bp, Homo sapiens
tatctgtgatgggca

SEQ ID NO: 1102670 - DNA, 15 bp, Homo sapiens
gtatctgtgatgggc

SEQ ID NO: 1102671 - DNA, 15 bp, Homo sapiens
tgtatctgtgatggg

SEQ ID NO: 1102672 - DNA, 15 bp, Homo sapiens
ctgtatctgtgatgg

SEQ ID NO: 1102673 - DNA, 15 bp, Homo sapiens
gctgtatctgtgatg

SEQ ID NO: 1102674 - DNA, 15 bp, Homo sapiens
agctgtatctgtgat

SEQ ID NO: 1102675 - DNA, 15 bp, Homo sapiens
gagctgtatctgtga

SEQ ID NO: 1102676 - DNA, 15 bp, Homo sapiens
tgagctgtatctgtg

SEQ ID NO: 1102677 - DNA, 15 bp, Homo sapiens
atgagctgtatctgt

SEQ ID NO: 1102678 - DNA, 15 bp, Homo sapiens
aatgagctgtatctg

SEQ ID NO: 1102679 - DNA, 15 bp, Homo sapiens
caatgagctgtatct

SEQ ID NO: 1102680 - DNA, 15 bp, Homo sapiens
ccaatgagctgtatc

SEQ ID NO: 1102681 - DNA, 15 bp, Homo sapiens
accaatgagctgtat

SEQ ID NO: 1102682 - DNA, 15 bp, Homo sapiens
gaccaatgagctgta

SEQ ID NO: 1102683 - DNA, 15 bp, Homo sapiens
agaccaatgagctgt

SEQ ID NO: 1102684 - DNA, 15 bp, Homo sapiens
gagaccaatgagctg

SEQ ID NO: 1102685 - DNA, 15 bp, Homo sapiens
agagaccaatgagct

SEQ ID NO: 1102686 - DNA, 15 bp, Homo sapiens
aagagaccaatgagc

SEQ ID NO: 1102687 - DNA, 15 bp, Homo sapiens
aaagagaccaatgag

SEQ ID NO: 1102688 - DNA, 15 bp, Homo sapiens
aaaagagaccaatga

SEQ ID NO: 1102689 - DNA, 15 bp, Homo sapiens
gaaaagagaccaatg

SEQ ID NO: 1102690 - DNA, 15 bp, Homo sapiens
agaaaagagaccaat

SEQ ID NO: 1102691 - DNA, 15 bp, Homo sapiens
tagaaaagagaccaa

SEQ ID NO: 1102692 - DNA, 15 bp, Homo sapiens
atagaaaagagacca

SEQ ID NO: 1102693 - DNA, 15 bp, Homo sapiens
catagaaaagagacc

SEQ ID NO: 1102694 - DNA, 15 bp, Homo sapiens
tcatagaaaagagac

SEQ ID NO: 1102695 - DNA, 15 bp, Homo sapiens
ctcatagaaaagaga

SEQ ID NO: 1102696 - DNA, 15 bp, Homo sapiens
tctcatagaaaagag

SEQ ID NO: 1102697 - DNA, 15 bp, Homo sapiens
ctctcatagaaaaga

SEQ ID NO: 1102698 - DNA, 15 bp, Homo sapiens
cctctcatagaaaag

SEQ ID NO: 1102699 - DNA, 15 bp, Homo sapiens
tcctctcatagaaaa

SEQ ID NO: 1102700 - DNA, 15 bp, Homo sapiens
ttcctctcatagaaa

SEQ ID NO: 1102701 - DNA, 15 bp, Homo sapiens
cttcctctcatagaa

SEQ ID NO: 1102702 - DNA, 15 bp, Homo sapiens
gcttcctctcataga

SEQ ID NO: 1102703 - DNA, 15 bp, Homo sapiens
ggcttcctctcatag

SEQ ID NO: 1102704 - DNA, 15 bp, Homo sapiens
tggcttcctctcata

SEQ ID NO: 1102705 - DNA, 15 bp, Homo sapiens
ctggcttcctctcat

SEQ ID NO: 1102706 - DNA, 15 bp, Homo sapiens
tctggcttcctctca

SEQ ID NO: 1102707 - DNA, 15 bp, Homo sapiens
ctctggcttcctctc

SEQ ID NO: 1102708 - DNA, 15 bp, Homo sapiens
gctctggcttcctct

SEQ ID NO: 1102709 - DNA, 15 bp, Homo sapiens
agctctggcttcctc

SEQ ID NO: 1102710 - DNA, 15 bp, Homo sapiens
gagctctggcttcct

SEQ ID NO: 1102711 - DNA, 15 bp, Homo sapiens
ggagctctggcttcc

SEQ ID NO: 1102712 - DNA, 15 bp, Homo sapiens
tggagctctggcttc

SEQ ID NO: 1102713 - DNA, 15 bp, Homo sapiens
ctggagctctggctt

SEQ ID NO: 1102714 - DNA, 15 bp, Homo sapiens
cctggagctctggct

SEQ ID NO: 1102715 - DNA, 15 bp, Homo sapiens
ccctggagctctggc

SEQ ID NO: 1102716 - DNA, 15 bp, Homo sapiens
tccctggagctctgg

SEQ ID NO: 1102717 - DNA, 15 bp, Homo sapiens
ttccctggagctctg

SEQ ID NO: 1102718 - DNA, 15 bp, Homo sapiens
gttccctggagctct

SEQ ID NO: 1102719 - DNA, 15 bp, Homo sapiens
agttccctggagctc

SEQ ID NO: 1102720 - DNA, 15 bp, Homo sapiens
tagttccctggagct

SEQ ID NO: 1102721 - DNA, 15 bp, Homo sapiens
gtagttccctggagc

SEQ ID NO: 1102722 - DNA, 15 bp, Homo sapiens
agtagttccctggag

SEQ ID NO: 1102723 - DNA, 15 bp, Homo sapiens
cagtagttccctgga

SEQ ID NO: 1102724 - DNA, 15 bp, Homo sapiens
gcagtagttccctgg

SEQ ID NO: 1102725 - DNA, 15 bp, Homo sapiens
ggcagtagttccctg

SEQ ID NO: 1102726 - DNA, 15 bp, Homo sapiens
tggcagtagttccct

SEQ ID NO: 1102727 - DNA, 15 bp, Homo sapiens
ttggcagtagttccc

SEQ ID NO: 1102728 - DNA, 15 bp, Homo sapiens
gttggcagtagttcc

SEQ ID NO: 1102729 - DNA, 15 bp, Homo sapiens
agttggcagtagttc

SEQ ID NO: 1102730 - DNA, 15 bp, Homo sapiens
cagttggcagtagtt

SEQ ID NO: 1102731 - DNA, 15 bp, Homo sapiens
tcagttggcagtagt

SEQ ID NO: 1102732 - DNA, 15 bp, Homo sapiens
atcagttggcagtag

SEQ ID NO: 1102733 - DNA, 15 bp, Homo sapiens
gatcagttggcagta

SEQ ID NO: 1102734 - DNA, 15 bp, Homo sapiens
tgatcagttggcagt

SEQ ID NO: 1102735 - DNA, 15 bp, Homo sapiens
ctgatcagttggcag

SEQ ID NO: 1102736 - DNA, 15 bp, Homo sapiens
tctgatcagttggca

SEQ ID NO: 1102737 - DNA, 15 bp, Homo sapiens
ttctgatcagttggc

SEQ ID NO: 1102738 - DNA, 15 bp, Homo sapiens
gttctgatcagttgg

SEQ ID NO: 1102739 - DNA, 15 bp, Homo sapiens
agttctgatcagttg

SEQ ID NO: 1102740 - DNA, 15 bp, Homo sapiens
gagttctgatcagtt

SEQ ID NO: 1102741 - DNA, 15 bp, Homo sapiens
tgagttctgatcagt

SEQ ID NO: 1102742 - DNA, 15 bp, Homo sapiens
atgagttctgatcag

SEQ ID NO: 1102743 - DNA, 15 bp, Homo sapiens
aatgagttctgatca

SEQ ID NO: 1102744 - DNA, 15 bp, Homo sapiens
aaatgagttctgatc

SEQ ID NO: 1102745 - DNA, 15 bp, Homo sapiens
taaatgagttctgat

SEQ ID NO: 1102746 - DNA, 15 bp, Homo sapiens
ctaaatgagttctga

SEQ ID NO: 1102747 - DNA, 15 bp, Homo sapiens
cctaaatgagttctg

SEQ ID NO: 1102748 - DNA, 15 bp, Homo sapiens
tcctaaatgagttct

SEQ ID NO: 1102749 - DNA, 15 bp, Homo sapiens
gtcctaaatgagttc

SEQ ID NO: 1102750 - DNA, 15 bp, Homo sapiens
tgtcctaaatgagtt

SEQ ID NO: 1102751 - DNA, 15 bp, Homo sapiens
atgtcctaaatgagt

SEQ ID NO: 1102752 - DNA, 15 bp, Homo sapiens
catgtcctaaatgag

SEQ ID NO: 1102753 - DNA, 15 bp, Homo sapiens
ccatgtcctaaatga

SEQ ID NO: 1102754 - DNA, 15 bp, Homo sapiens
tccatgtcctaaatg

SEQ ID NO: 1102755 - DNA, 15 bp, Homo sapiens
gtccatgtcctaaat

SEQ ID NO: 1102756 - DNA, 15 bp, Homo sapiens
ggtccatgtcctaaa

SEQ ID NO: 1102757 - DNA, 15 bp, Homo sapiens
aggtccatgtcctaa

SEQ ID NO: 1102758 - DNA, 15 bp, Homo sapiens
taggtccatgtccta

SEQ ID NO: 1102759 - DNA, 15 bp, Homo sapiens
ataggtccatgtcct

SEQ ID NO: 1102760 - DNA, 15 bp, Homo sapiens
aataggtccatgtcc

SEQ ID NO: 1102761 - DNA, 15 bp, Homo sapiens
aaataggtccatgtc

SEQ ID NO: 1102762 - DNA, 15 bp, Homo sapiens
caaataggtccatgt

SEQ ID NO: 1102763 - DNA, 15 bp, Homo sapiens
acaaataggtccatg

SEQ ID NO: 1102764 - DNA, 15 bp, Homo sapiens
aacaaataggtccat

SEQ ID NO: 1102765 - DNA, 15 bp, Homo sapiens
gaacaaataggtcca

SEQ ID NO: 1102766 - DNA, 15 bp, Homo sapiens
ggaacaaataggtcc

SEQ ID NO: 1102767 - DNA, 15 bp, Homo sapiens
aggaacaaataggtc

SEQ ID NO: 1102768 - DNA, 15 bp, Homo sapiens
aaggaacaaataggt

SEQ ID NO: 1102769 - DNA, 15 bp, Homo sapiens
aaaggaacaaatagg

SEQ ID NO: 1102770 - DNA, 15 bp, Homo sapiens
taaaggaacaaatag

SEQ ID NO: 1102771 - DNA, 15 bp, Homo sapiens
ataaaggaacaaata

SEQ ID NO: 1102772 - DNA, 15 bp, Homo sapiens
cataaaggaacaaat

SEQ ID NO: 1102773 - DNA, 15 bp, Homo sapiens
acataaaggaacaaa

SEQ ID NO: 1102774 - DNA, 15 bp, Homo sapiens
aacataaaggaacaa

SEQ ID NO: 1102775 - DNA, 15 bp, Homo sapiens
gaacataaaggaaca

SEQ ID NO: 1102776 - DNA, 15 bp, Homo sapiens
ggaacataaaggaac

SEQ ID NO: 1102777 - DNA, 15 bp, Homo sapiens
aggaacataaaggaa

SEQ ID NO: 1102778 - DNA, 15 bp, Homo sapiens
caggaacataaagga

SEQ ID NO: 1102779 - DNA, 15 bp, Homo sapiens
ccaggaacataaagg

SEQ ID NO: 1102780 - DNA, 15 bp, Homo sapiens
cccaggaacataaag

SEQ ID NO: 1102781 - DNA, 15 bp, Homo sapiens
tcccaggaacataaa

SEQ ID NO: 1102782 - DNA, 15 bp, Homo sapiens
ttcccaggaacataa

SEQ ID NO: 1102783 - DNA, 15 bp, Homo sapiens
cttcccaggaacata

SEQ ID NO: 1102784 - DNA, 15 bp, Homo sapiens
tcttcccaggaacat

SEQ ID NO: 1102785 - DNA, 15 bp, Homo sapiens
ctcttcccaggaaca

SEQ ID NO: 1102786 - DNA, 15 bp, Homo sapiens
gctcttcccaggaac

SEQ ID NO: 1102787 - DNA, 15 bp, Homo sapiens
tgctcttcccaggaa

SEQ ID NO: 1102788 - DNA, 15 bp, Homo sapiens
gtgctcttcccagga

SEQ ID NO: 1102789 - DNA, 15 bp, Homo sapiens
tgtgctcttcccagg

SEQ ID NO: 1102790 - DNA, 15 bp, Homo sapiens
ctgtgctcttcccag

SEQ ID NO: 1102791 - DNA, 15 bp, Homo sapiens
cctgtgctcttccca

SEQ ID NO: 1102792 - DNA, 15 bp, Homo sapiens
tcctgtgctcttccc

SEQ ID NO: 1102793 - DNA, 15 bp, Homo sapiens
atcctgtgctcttcc

SEQ ID NO: 1102794 - DNA, 15 bp, Homo sapiens
catcctgtgctcttc

SEQ ID NO: 1102795 - DNA, 15 bp, Homo sapiens
tcatcctgtgctctt

SEQ ID NO: 1102796 - DNA, 15 bp, Homo sapiens
ttcatcctgtgctct

SEQ ID NO: 1102797 - DNA, 15 bp, Homo sapiens
attcatcctgtgctc

SEQ ID NO: 1102798 - DNA, 15 bp, Homo sapiens
aattcatcctgtgct

SEQ ID NO: 1102799 - DNA, 15 bp, Homo sapiens
gaattcatcctgtgc

SEQ ID NO: 1102800 - DNA, 15 bp, Homo sapiens
agaattcatcctgtg

SEQ ID NO: 1102801 - DNA, 15 bp, Homo sapiens
tagaattcatcctgt

SEQ ID NO: 1102802 - DNA, 15 bp, Homo sapiens
atagaattcatcctg

SEQ ID NO: 1102803 - DNA, 15 bp, Homo sapiens
catagaattcatcct

SEQ ID NO: 1102804 - DNA, 15 bp, Homo sapiens
acatagaattcatcc

SEQ ID NO: 1102805 - DNA, 15 bp, Homo sapiens
tacatagaattcatc

SEQ ID NO: 1102806 - DNA, 15 bp, Homo sapiens
gtacatagaattcat

SEQ ID NO: 1102807 - DNA, 15 bp, Homo sapiens
agtacatagaattca

SEQ ID NO: 1102808 - DNA, 15 bp, Homo sapiens
gagtacatagaattc

SEQ ID NO: 1102809 - DNA, 15 bp, Homo sapiens
tgagtacatagaatt

SEQ ID NO: 1102810 - DNA, 15 bp, Homo sapiens
atgagtacatagaat

SEQ ID NO: 1102811 - DNA, 15 bp, Homo sapiens
aatgagtacatagaa

SEQ ID NO: 1102812 - DNA, 15 bp, Homo sapiens
aaatgagtacataga

SEQ ID NO: 1102813 - DNA, 15 bp, Homo sapiens
taaatgagtacatag

SEQ ID NO: 1102814 - DNA, 15 bp, Homo sapiens
gtaaatgagtacata

SEQ ID NO: 1102815 - DNA, 15 bp, Homo sapiens
cgtaaatgagtacat

SEQ ID NO: 1102816 - DNA, 15 bp, Homo sapiens
acgtaaatgagtaca

SEQ ID NO: 1102817 - DNA, 15 bp, Homo sapiens
cacgtaaatgagtac

SEQ ID NO: 1102818 - DNA, 15 bp, Homo sapiens
acacgtaaatgagta

SEQ ID NO: 1102819 - DNA, 15 bp, Homo sapiens
aacacgtaaatgagt

SEQ ID NO: 1102820 - DNA, 15 bp, Homo sapiens
gaacacgtaaatgag

SEQ ID NO: 1102821 - DNA, 15 bp, Homo sapiens
tgaacacgtaaatga

SEQ ID NO: 1102822 - DNA, 15 bp, Homo sapiens
ctgaacacgtaaatg

SEQ ID NO: 1102823 - DNA, 15 bp, Homo sapiens
tctgaacacgtaaat

SEQ ID NO: 1102824 - DNA, 15 bp, Homo sapiens
ctctgaacacgtaaa

SEQ ID NO: 1102825 - DNA, 15 bp, Homo sapiens
tctctgaacacgtaa

SEQ ID NO: 1102826 - DNA, 15 bp, Homo sapiens
ctctctgaacacgta

SEQ ID NO: 1102827 - DNA, 15 bp, Homo sapiens
actctctgaacacgt

SEQ ID NO: 1102828 - DNA, 15 bp, Homo sapiens
tactctctgaacacg

SEQ ID NO: 1102829 - DNA, 15 bp, Homo sapiens
ttactctctgaacac

SEQ ID NO: 1102830 - DNA, 15 bp, Homo sapiens
tttactctctgaaca

SEQ ID NO: 1102831 - DNA, 15 bp, Homo sapiens
ctttactctctgaac

SEQ ID NO: 1102832 - DNA, 15 bp, Homo sapiens
actttactctctgaa

SEQ ID NO: 1102833 - DNA, 15 bp, Homo sapiens
cactttactctctga

SEQ ID NO: 1102834 - DNA, 15 bp, Homo sapiens
gcactttactctctg

SEQ ID NO: 1102835 - DNA, 15 bp, Homo sapiens
ggcactttactctct

SEQ ID NO: 1102836 - DNA, 15 bp, Homo sapiens
aggcactttactctc

SEQ ID NO: 1102837 - DNA, 15 bp, Homo sapiens
gaggcactttactct

SEQ ID NO: 1102838 - DNA, 15 bp, Homo sapiens
tgaggcactttactc

SEQ ID NO: 1102839 - DNA, 15 bp, Homo sapiens
atgaggcactttact

SEQ ID NO: 1102840 - DNA, 15 bp, Homo sapiens
tatgaggcactttac

SEQ ID NO: 1102841 - DNA, 15 bp, Homo sapiens
ctatgaggcacttta

SEQ ID NO: 1102842 - DNA, 15 bp, Homo sapiens
cctatgaggcacttt

SEQ ID NO: 1102843 - DNA, 15 bp, Homo sapiens
tcctatgaggcactt

SEQ ID NO: 1102844 - DNA, 15 bp, Homo sapiens
atcctatgaggcact

SEQ ID NO: 1102845 - DNA, 15 bp, Homo sapiens
catcctatgaggcac

SEQ ID NO: 1102846 - DNA, 15 bp, Homo sapiens
gcatcctatgaggca

SEQ ID NO: 1102847 - DNA, 15 bp, Homo sapiens
ggcatcctatgaggc

SEQ ID NO: 1102848 - DNA, 15 bp, Homo sapiens
aggcatcctatgagg

SEQ ID NO: 1102849 - DNA, 15 bp, Homo sapiens
gaggcatcctatgag

SEQ ID NO: 1102850 - DNA, 15 bp, Homo sapiens
ggaggcatcctatga

SEQ ID NO: 1102851 - DNA, 15 bp, Homo sapiens
tggaggcatcctatg

SEQ ID NO: 1102852 - DNA, 15 bp, Homo sapiens
ctggaggcatcctat

SEQ ID NO: 1102853 - DNA, 15 bp, Homo sapiens
gctggaggcatccta

SEQ ID NO: 1102854 - DNA, 15 bp, Homo sapiens
tgctggaggcatcct

SEQ ID NO: 1102855 - DNA, 15 bp, Homo sapiens
ttgctggaggcatcc

SEQ ID NO: 1102856 - DNA, 15 bp, Homo sapiens
tttgctggaggcatc

SEQ ID NO: 1102857 - DNA, 15 bp, Homo sapiens
ttttgctggaggcat

SEQ ID NO: 1102858 - DNA, 15 bp, Homo sapiens
cttttgctggaggca

SEQ ID NO: 1102859 - DNA, 15 bp, Homo sapiens
tcttttgctggaggc

SEQ ID NO: 1102860 - DNA, 15 bp, Homo sapiens
atcttttgctggagg

SEQ ID NO: 1102861 - DNA, 15 bp, Homo sapiens
tatcttttgctggag

SEQ ID NO: 1102862 - DNA, 15 bp, Homo sapiens
ttatcttttgctgga

SEQ ID NO: 1102863 - DNA, 15 bp, Homo sapiens
gttatcttttgctgg

SEQ ID NO: 1102864 - DNA, 15 bp, Homo sapiens
ggttatcttttgctg

SEQ ID NO: 1102865 - DNA, 15 bp, Homo sapiens
tggttatcttttgct

SEQ ID NO: 1102866 - DNA, 15 bp, Homo sapiens
ttggttatcttttgc

SEQ ID NO: 1102867 - DNA, 15 bp, Homo sapiens
cttggttatcttttg

SEQ ID NO: 1102868 - DNA, 15 bp, Homo sapiens
tcttggttatctttt

SEQ ID NO: 1102869 - DNA, 15 bp, Homo sapiens
ttcttggttatcttt

SEQ ID NO: 1102870 - DNA, 15 bp, Homo sapiens
cttcttggttatctt

SEQ ID NO: 1102871 - DNA, 15 bp, Homo sapiens
ccttcttggttatct

SEQ ID NO: 1102872 - DNA, 15 bp, Homo sapiens
accttcttggttatc

SEQ ID NO: 1102873 - DNA, 15 bp, Homo sapiens
gaccttcttggttat

SEQ ID NO: 1102874 - DNA, 15 bp, Homo sapiens
agaccttcttggtta

SEQ ID NO: 1102875 - DNA, 15 bp, Homo sapiens
tagaccttcttggtt

SEQ ID NO: 1102876 - DNA, 15 bp, Homo sapiens
ttagaccttcttggt

SEQ ID NO: 1102877 - DNA, 15 bp, Homo sapiens
attagaccttcttgg

SEQ ID NO: 1102878 - DNA, 15 bp, Homo sapiens
tattagaccttcttg

SEQ ID NO: 1102879 - DNA, 15 bp, Homo sapiens
gtattagaccttctt

SEQ ID NO: 1102880 - DNA, 15 bp, Homo sapiens
ggtattagaccttct

SEQ ID NO: 1102881 - DNA, 15 bp, Homo sapiens
aggtattagaccttc

SEQ ID NO: 1102882 - DNA, 15 bp, Homo sapiens
aaggtattagacctt

SEQ ID NO: 1102883 - DNA, 15 bp, Homo sapiens
aaaggtattagacct

SEQ ID NO: 1102884 - DNA, 15 bp, Homo sapiens
caaaggtattagacc

SEQ ID NO: 1102885 - DNA, 15 bp, Homo sapiens
tcaaaggtattagac

SEQ ID NO: 1102886 - DNA, 15 bp, Homo sapiens
gtcaaaggtattaga

SEQ ID NO: 1102887 - DNA, 15 bp, Homo sapiens
tgtcaaaggtattag

SEQ ID NO: 1102888 - DNA, 15 bp, Homo sapiens
ttgtcaaaggtatta

SEQ ID NO: 1102889 - DNA, 15 bp, Homo sapiens
attgtcaaaggtatt

SEQ ID NO: 1102890 - DNA, 15 bp, Homo sapiens
gattgtcaaaggtat

SEQ ID NO: 1102891 - DNA, 15 bp, Homo sapiens
agattgtcaaaggta

SEQ ID NO: 1102892 - DNA, 15 bp, Homo sapiens
gagattgtcaaaggt

SEQ ID NO: 1102893 - DNA, 15 bp, Homo sapiens
tgagattgtcaaagg

SEQ ID NO: 1102894 - DNA, 15 bp, Homo sapiens
ctgagattgtcaaag

SEQ ID NO: 1102895 - DNA, 15 bp, Homo sapiens
actgagattgtcaaa

SEQ ID NO: 1102896 - DNA, 15 bp, Homo sapiens
aactgagattgtcaa

SEQ ID NO: 1102897 - DNA, 15 bp, Homo sapiens
aaactgagattgtca

SEQ ID NO: 1102898 - DNA, 15 bp, Homo sapiens
taaactgagattgtc

SEQ ID NO: 1102899 - DNA, 15 bp, Homo sapiens
ataaactgagattgt

SEQ ID NO: 1102900 - DNA, 15 bp, Homo sapiens
gataaactgagattg

SEQ ID NO: 1102901 - DNA, 15 bp, Homo sapiens
ggataaactgagatt

SEQ ID NO: 1102902 - DNA, 15 bp, Homo sapiens
aggataaactgagat

SEQ ID NO: 1102903 - DNA, 15 bp, Homo sapiens
taggataaactgaga

SEQ ID NO: 1102904 - DNA, 15 bp, Homo sapiens
ataggataaactgag

SEQ ID NO: 1102905 - DNA, 15 bp, Homo sapiens
tataggataaactga

SEQ ID NO: 1102906 - DNA, 15 bp, Homo sapiens
ctataggataaactg

SEQ ID NO: 1102907 - DNA, 15 bp, Homo sapiens
actataggataaact

SEQ ID NO: 1102908 - DNA, 15 bp, Homo sapiens
cactataggataaac

SEQ ID NO: 1102909 - DNA, 15 bp, Homo sapiens
acactataggataaa

SEQ ID NO: 1102910 - DNA, 15 bp, Homo sapiens
tacactataggataa

SEQ ID NO: 1102911 - DNA, 15 bp, Homo sapiens
ttacactataggata

SEQ ID NO: 1102912 - DNA, 15 bp, Homo sapiens
attacactataggat

SEQ ID NO: 1102913 - DNA, 15 bp, Homo sapiens
aattacactatagga

SEQ ID NO: 1102914 - DNA, 15 bp, Homo sapiens
caattacactatagg

SEQ ID NO: 1102915 - DNA, 15 bp, Homo sapiens
ccaattacactatag

SEQ ID NO: 1102916 - DNA, 15 bp, Homo sapiens
tccaattacactata

SEQ ID NO: 1102917 - DNA, 15 bp, Homo sapiens
atccaattacactat

SEQ ID NO: 1102918 - DNA, 15 bp, Homo sapiens
tatccaattacacta

SEQ ID NO: 1102919 - DNA, 15 bp, Homo sapiens
ctatccaattacact

SEQ ID NO: 1102920 - DNA, 15 bp, Homo sapiens
gctatccaattacac

SEQ ID NO: 1102921 - DNA, 15 bp, Homo sapiens
tgctatccaattaca

SEQ ID NO: 1102922 - DNA, 15 bp, Homo sapiens
ctgctatccaattac

SEQ ID NO: 1102923 - DNA, 15 bp, Homo sapiens
actgctatccaatta

SEQ ID NO: 1102924 - DNA, 15 bp, Homo sapiens
aactgctatccaatt

SEQ ID NO: 1102925 - DNA, 15 bp, Homo sapiens
gaactgctatccaat

SEQ ID NO: 1102926 - DNA, 15 bp, Homo sapiens
ggaactgctatccaa

SEQ ID NO: 1102927 - DNA, 15 bp, Homo sapiens
gggaactgctatcca

SEQ ID NO: 1102928 - DNA, 15 bp, Homo sapiens
ggggaactgctatcc

SEQ ID NO: 1102929 - DNA, 15 bp, Homo sapiens
aggggaactgctatc

SEQ ID NO: 1102930 - DNA, 15 bp, Homo sapiens
taggggaactgctat

SEQ ID NO: 1102931 - DNA, 15 bp, Homo sapiens
ctaggggaactgcta

SEQ ID NO: 1102932 - DNA, 15 bp, Homo sapiens
gctaggggaactgct

SEQ ID NO: 1102933 - DNA, 15 bp, Homo sapiens
tgctaggggaactgc

SEQ ID NO: 1102934 - DNA, 15 bp, Homo sapiens
ttgctaggggaactg

SEQ ID NO: 1102935 - DNA, 15 bp, Homo sapiens
tttgctaggggaact

SEQ ID NO: 1102936 - DNA, 15 bp, Homo sapiens
ttttgctaggggaac

SEQ ID NO: 1102937 - DNA, 15 bp, Homo sapiens
cttttgctaggggaa

SEQ ID NO: 1102938 - DNA, 15 bp, Homo sapiens
acttttgctagggga

SEQ ID NO: 1102939 - DNA, 15 bp, Homo sapiens
aacttttgctagggg

SEQ ID NO: 1102940 - DNA, 15 bp, Homo sapiens
caacttttgctaggg

SEQ ID NO: 1102941 - DNA, 15 bp, Homo sapiens
gcaacttttgctagg

SEQ ID NO: 1102942 - DNA, 15 bp, Homo sapiens
agcaacttttgctag

SEQ ID NO: 1102943 - DNA, 15 bp, Homo sapiens
tagcaacttttgcta

SEQ ID NO: 1102944 - DNA, 15 bp, Homo sapiens
ctagcaacttttgct

SEQ ID NO: 1102945 - DNA, 15 bp, Homo sapiens
actagcaacttttgc

SEQ ID NO: 1102946 - DNA, 15 bp, Homo sapiens
aactagcaacttttg

SEQ ID NO: 1102947 - DNA, 15 bp, Homo sapiens
aaactagcaactttt

SEQ ID NO: 1102948 - DNA, 15 bp, Homo sapiens
caaactagcaacttt

SEQ ID NO: 1102949 - DNA, 15 bp, Homo sapiens
ccaaactagcaactt

SEQ ID NO: 1102950 - DNA, 15 bp, Homo sapiens
accaaactagcaact

SEQ ID NO: 1102951 - DNA, 15 bp, Homo sapiens
gaccaaactagcaac

SEQ ID NO: 1102952 - DNA, 15 bp, Homo sapiens
ggaccaaactagcaa

SEQ ID NO: 1102953 - DNA, 15 bp, Homo sapiens
aggaccaaactagca

SEQ ID NO: 1102954 - DNA, 15 bp, Homo sapiens
taggaccaaactagc

SEQ ID NO: 1102955 - DNA, 15 bp, Homo sapiens
ataggaccaaactag

SEQ ID NO: 1102956 - DNA, 15 bp, Homo sapiens
aataggaccaaacta

SEQ ID NO: 1102957 - DNA, 15 bp, Homo sapiens
aaataggaccaaact

SEQ ID NO: 1102958 - DNA, 15 bp, Homo sapiens
aaaataggaccaaac

SEQ ID NO: 1102959 - DNA, 15 bp, Homo sapiens
gaaaataggaccaaa

SEQ ID NO: 1102960 - DNA, 15 bp, Homo sapiens
agaaaataggaccaa

SEQ ID NO: 1102961 - DNA, 15 bp, Homo sapiens
tagaaaataggacca

SEQ ID NO: 1102962 - DNA, 15 bp, Homo sapiens
gtagaaaataggacc

SEQ ID NO: 1102963 - DNA, 15 bp, Homo sapiens
tgtagaaaataggac

SEQ ID NO: 1102964 - DNA, 15 bp, Homo sapiens
atgtagaaaatagga

SEQ ID NO: 1102965 - DNA, 15 bp, Homo sapiens
tatgtagaaaatagg

SEQ ID NO: 1102966 - DNA, 15 bp, Homo sapiens
ctatgtagaaaatag

SEQ ID NO: 1102967 - DNA, 15 bp, Homo sapiens
gctatgtagaaaata

SEQ ID NO: 1102968 - DNA, 15 bp, Homo sapiens
ggctatgtagaaaat

SEQ ID NO: 1102969 - DNA, 15 bp, Homo sapiens
tggctatgtagaaaa

SEQ ID NO: 1102970 - DNA, 15 bp, Homo sapiens
ttggctatgtagaaa

SEQ ID NO: 1102971 - DNA, 15 bp, Homo sapiens
tttggctatgtagaa

SEQ ID NO: 1102972 - DNA, 15 bp, Homo sapiens
ctttggctatgtaga

SEQ ID NO: 1102973 - DNA, 15 bp, Homo sapiens
actttggctatgtag

SEQ ID NO: 1102974 - DNA, 15 bp, Homo sapiens
cactttggctatgta

SEQ ID NO: 1102975 - DNA, 15 bp, Homo sapiens
tcactttggctatgt

SEQ ID NO: 1102976 - DNA, 15 bp, Homo sapiens
atcactttggctatg

SEQ ID NO: 1102977 - DNA, 15 bp, Homo sapiens
aatcactttggctat

SEQ ID NO: 1102978 - DNA, 15 bp, Homo sapiens
caatcactttggcta

SEQ ID NO: 1102979 - DNA, 15 bp, Homo sapiens
tcaatcactttggct

SEQ ID NO: 1102980 - DNA, 15 bp, Homo sapiens
atcaatcactttggc

SEQ ID NO: 1102981 - DNA, 15 bp, Homo sapiens
aatcaatcactttgg

SEQ ID NO: 1102982 - DNA, 15 bp, Homo sapiens
gaatcaatcactttg

SEQ ID NO: 1102983 - DNA, 15 bp, Homo sapiens
tgaatcaatcacttt

SEQ ID NO: 1102984 - DNA, 15 bp, Homo sapiens
atgaatcaatcactt

SEQ ID NO: 1102985 - DNA, 15 bp, Homo sapiens
aatgaatcaatcact

SEQ ID NO: 1102986 - DNA, 15 bp, Homo sapiens
caatgaatcaatcac

SEQ ID NO: 1102987 - DNA, 15 bp, Homo sapiens
ccaatgaatcaatca

SEQ ID NO: 1102988 - DNA, 15 bp, Homo sapiens
accaatgaatcaatc

SEQ ID NO: 1102989 - DNA, 15 bp, Homo sapiens
aaccaatgaatcaat

SEQ ID NO: 1102990 - DNA, 15 bp, Homo sapiens
taaccaatgaatcaa

SEQ ID NO: 1102991 - DNA, 15 bp, Homo sapiens
ttaaccaatgaatca

SEQ ID NO: 1102992 - DNA, 15 bp, Homo sapiens
attaaccaatgaatc

SEQ ID NO: 1102993 - DNA, 15 bp, Homo sapiens
cattaaccaatgaat

SEQ ID NO: 1102994 - DNA, 15 bp, Homo sapiens
acattaaccaatgaa

SEQ ID NO: 1102995 - DNA, 15 bp, Homo sapiens
cacattaaccaatga

SEQ ID NO: 1102996 - DNA, 15 bp, Homo sapiens
tcacattaaccaatg

SEQ ID NO: 1102997 - DNA, 15 bp, Homo sapiens
ttcacattaaccaat

SEQ ID NO: 1102998 - DNA, 15 bp, Homo sapiens
tttcacattaaccaa

SEQ ID NO: 1102999 - DNA, 15 bp, Homo sapiens
ctttcacattaacca

SEQ ID NO: 1103000 - DNA, 15 bp, Homo sapiens
actttcacattaacc

SEQ ID NO: 1103001 - DNA, 15 bp, Homo sapiens
aactttcacattaac

SEQ ID NO: 1103002 - DNA, 15 bp, Homo sapiens
taactttcacattaa

SEQ ID NO: 1103003 - DNA, 15 bp, Homo sapiens
gtaactttcacatta

SEQ ID NO: 1103004 - DNA, 15 bp, Homo sapiens
agtaactttcacatt

SEQ ID NO: 1103005 - DNA, 15 bp, Homo sapiens
cagtaactttcacat

SEQ ID NO: 1103006 - DNA, 15 bp, Homo sapiens
tcagtaactttcaca

SEQ ID NO: 1103007 - DNA, 15 bp, Homo sapiens
ctcagtaactttcac

SEQ ID NO: 1103008 - DNA, 15 bp, Homo sapiens
actcagtaactttca

SEQ ID NO: 1103009 - DNA, 15 bp, Homo sapiens
tactcagtaactttc

SEQ ID NO: 1103010 - DNA, 15 bp, Homo sapiens
gtactcagtaacttt

SEQ ID NO: 1103011 - DNA, 15 bp, Homo sapiens
agtactcagtaactt

SEQ ID NO: 1103012 - DNA, 15 bp, Homo sapiens
cagtactcagtaact

SEQ ID NO: 1103013 - DNA, 15 bp, Homo sapiens
gcagtactcagtaac

SEQ ID NO: 1103014 - DNA, 15 bp, Homo sapiens
ggcagtactcagtaa

SEQ ID NO: 1103015 - DNA, 15 bp, Homo sapiens
tggcagtactcagta

SEQ ID NO: 1103016 - DNA, 15 bp, Homo sapiens
ctggcagtactcagt

SEQ ID NO: 1103017 - DNA, 15 bp, Homo sapiens
gctggcagtactcag

SEQ ID NO: 1103018 - DNA, 15 bp, Homo sapiens
tgctggcagtactca

SEQ ID NO: 1103019 - DNA, 15 bp, Homo sapiens
ctgctggcagtactc

SEQ ID NO: 1103020 - DNA, 15 bp, Homo sapiens
cctgctggcagtact

SEQ ID NO: 1103021 - DNA, 15 bp, Homo sapiens
acctgctggcagtac

SEQ ID NO: 1103022 - DNA, 15 bp, Homo sapiens
aacctgctggcagta

SEQ ID NO: 1103023 - DNA, 15 bp, Homo sapiens
gaacctgctggcagt

SEQ ID NO: 1103024 - DNA, 15 bp, Homo sapiens
agaacctgctggcag

SEQ ID NO: 1103025 - DNA, 15 bp, Homo sapiens
tagaacctgctggca

SEQ ID NO: 1103026 - DNA, 15 bp, Homo sapiens
ctagaacctgctggc

SEQ ID NO: 1103027 - DNA, 15 bp, Homo sapiens
cctagaacctgctgg

SEQ ID NO: 1103028 - DNA, 15 bp, Homo sapiens
tcctagaacctgctg

SEQ ID NO: 1103029 - DNA, 15 bp, Homo sapiens
ttcctagaacctgct

SEQ ID NO: 1103030 - DNA, 15 bp, Homo sapiens
tttcctagaacctgc

SEQ ID NO: 1103031 - DNA, 15 bp, Homo sapiens
atttcctagaacctg

SEQ ID NO: 1103032 - DNA, 15 bp, Homo sapiens
tatttcctagaacct

SEQ ID NO: 1103033 - DNA, 15 bp, Homo sapiens
atatttcctagaacc

SEQ ID NO: 1103034 - DNA, 15 bp, Homo sapiens
tatatttcctagaac

SEQ ID NO: 1103035 - DNA, 15 bp, Homo sapiens
atatatttcctagaa

SEQ ID NO: 1103036 - DNA, 15 bp, Homo sapiens
aatatatttcctaga

SEQ ID NO: 1103037 - DNA, 15 bp, Homo sapiens
aaatatatttcctag

SEQ ID NO: 1103038 - DNA, 15 bp, Homo sapiens
caaatatatttccta

SEQ ID NO: 1103039 - DNA, 15 bp, Homo sapiens
acaaatatatttcct

SEQ ID NO: 1103040 - DNA, 15 bp, Homo sapiens
cacaaatatatttcc

SEQ ID NO: 1103041 - DNA, 15 bp, Homo sapiens
acacaaatatatttc

SEQ ID NO: 1103042 - DNA, 15 bp, Homo sapiens
cacacaaatatattt

SEQ ID NO: 1103043 - DNA, 15 bp, Homo sapiens
tcacacaaatatatt

SEQ ID NO: 1103044 - DNA, 15 bp, Homo sapiens
atcacacaaatatat

SEQ ID NO: 1103045 - DNA, 15 bp, Homo sapiens
tatcacacaaatata

SEQ ID NO: 1103046 - DNA, 15 bp, Homo sapiens
atatcacacaaatat

SEQ ID NO: 1103047 - DNA, 15 bp, Homo sapiens
aatatcacacaaata

SEQ ID NO: 1103048 - DNA, 15 bp, Homo sapiens
gaatatcacacaaat

SEQ ID NO: 1103049 - DNA, 15 bp, Homo sapiens
tgaatatcacacaaa

SEQ ID NO: 1103050 - DNA, 15 bp, Homo sapiens
atgaatatcacacaa

SEQ ID NO: 1103051 - DNA, 15 bp, Homo sapiens
catgaatatcacaca

SEQ ID NO: 1103052 - DNA, 15 bp, Homo sapiens
ccatgaatatcacac

SEQ ID NO: 1103053 - DNA, 15 bp, Homo sapiens
tccatgaatatcaca

SEQ ID NO: 1103054 - DNA, 15 bp, Homo sapiens
atccatgaatatcac

SEQ ID NO: 1103055 - DNA, 15 bp, Homo sapiens
catccatgaatatca

SEQ ID NO: 1103056 - DNA, 15 bp, Homo sapiens
ccatccatgaatatc

SEQ ID NO: 1103057 - DNA, 15 bp, Homo sapiens
cccatccatgaatat

SEQ ID NO: 1103058 - DNA, 15 bp, Homo sapiens
ccccatccatgaata

SEQ ID NO: 1103059 - DNA, 15 bp, Homo sapiens
tccccatccatgaat

SEQ ID NO: 1103060 - DNA, 15 bp, Homo sapiens
ctccccatccatgaa

SEQ ID NO: 1103061 - DNA, 15 bp, Homo sapiens
cctccccatccatga

SEQ ID NO: 1103062 - DNA, 15 bp, Homo sapiens
tcctccccatccatg

SEQ ID NO: 1103063 - DNA, 15 bp, Homo sapiens
atcctccccatccat

SEQ ID NO: 1103064 - DNA, 15 bp, Homo sapiens
gatcctccccatcca

SEQ ID NO: 1103065 - DNA, 15 bp, Homo sapiens
tgatcctccccatcc

SEQ ID NO: 1103066 - DNA, 15 bp, Homo sapiens
ttgatcctccccatc

SEQ ID NO: 1103067 - DNA, 15 bp, Homo sapiens
attgatcctccccat

SEQ ID NO: 1103068 - DNA, 15 bp, Homo sapiens
gattgatcctcccca

SEQ ID NO: 1103069 - DNA, 15 bp, Homo sapiens
ggattgatcctcccc

SEQ ID NO: 1103070 - DNA, 15 bp, Homo sapiens
tggattgatcctccc

SEQ ID NO: 1103071 - DNA, 15 bp, Homo sapiens
gtggattgatcctcc

SEQ ID NO: 1103072 - DNA, 15 bp, Homo sapiens
agtggattgatcctc

SEQ ID NO: 1103073 - DNA, 15 bp, Homo sapiens
aagtggattgatcct

SEQ ID NO: 1103074 - DNA, 15 bp, Homo sapiens
gaagtggattgatcc

SEQ ID NO: 1103075 - DNA, 15 bp, Homo sapiens
ggaagtggattgatc

SEQ ID NO: 1103076 - DNA, 15 bp, Homo sapiens
tggaagtggattgat

SEQ ID NO: 1103077 - DNA, 15 bp, Homo sapiens
ttggaagtggattga

SEQ ID NO: 1103078 - DNA, 15 bp, Homo sapiens
cttggaagtggattg

SEQ ID NO: 1103079 - DNA, 15 bp, Homo sapiens
acttggaagtggatt

SEQ ID NO: 1103080 - DNA, 15 bp, Homo sapiens
cacttggaagtggat

SEQ ID NO: 1103081 - DNA, 15 bp, Homo sapiens
tcacttggaagtgga

SEQ ID NO: 1103082 - DNA, 15 bp, Homo sapiens
atcacttggaagtgg

SEQ ID NO: 1103083 - DNA, 15 bp, Homo sapiens
aatcacttggaagtg

SEQ ID NO: 1103084 - DNA, 15 bp, Homo sapiens
aaatcacttggaagt

SEQ ID NO: 1103085 - DNA, 15 bp, Homo sapiens
caaatcacttggaag

SEQ ID NO: 1103086 - DNA, 15 bp, Homo sapiens
ccaaatcacttggaa

SEQ ID NO: 1103087 - DNA, 15 bp, Homo sapiens
tccaaatcacttgga

SEQ ID NO: 1103088 - DNA, 15 bp, Homo sapiens
atccaaatcacttgg

SEQ ID NO: 1103089 - DNA, 15 bp, Homo sapiens
aatccaaatcacttg

SEQ ID NO: 1103090 - DNA, 15 bp, Homo sapiens
taatccaaatcactt

SEQ ID NO: 1103091 - DNA, 15 bp, Homo sapiens
ttaatccaaatcact

SEQ ID NO: 1103092 - DNA, 15 bp, Homo sapiens
attaatccaaatcac

SEQ ID NO: 1103093 - DNA, 15 bp, Homo sapiens
aattaatccaaatca

SEQ ID NO: 1103094 - DNA, 15 bp, Homo sapiens
taattaatccaaatc

SEQ ID NO: 1103095 - DNA, 15 bp, Homo sapiens
gtaattaatccaaat

SEQ ID NO: 1103096 - DNA, 15 bp, Homo sapiens
agtaattaatccaaa

SEQ ID NO: 1103097 - DNA, 15 bp, Homo sapiens
cagtaattaatccaa

SEQ ID NO: 1103098 - DNA, 15 bp, Homo sapiens
ccagtaattaatcca

SEQ ID NO: 1103099 - DNA, 15 bp, Homo sapiens
accagtaattaatcc

SEQ ID NO: 1103100 - DNA, 15 bp, Homo sapiens
taccagtaattaatc

SEQ ID NO: 1103101 - DNA, 15 bp, Homo sapiens
ataccagtaattaat

SEQ ID NO: 1103102 - DNA, 15 bp, Homo sapiens
aataccagtaattaa

SEQ ID NO: 1103103 - DNA, 15 bp, Homo sapiens
aaataccagtaatta

SEQ ID NO: 1103104 - DNA, 15 bp, Homo sapiens
aaaataccagtaatt

SEQ ID NO: 1103105 - DNA, 15 bp, Homo sapiens
gaaaataccagtaat

SEQ ID NO: 1103106 - DNA, 15 bp, Homo sapiens
tgaaaataccagtaa

SEQ ID NO: 1103107 - DNA, 15 bp, Homo sapiens
gtgaaaataccagta

SEQ ID NO: 1103108 - DNA, 15 bp, Homo sapiens
ggtgaaaataccagt

SEQ ID NO: 1103109 - DNA, 15 bp, Homo sapiens
aggtgaaaataccag

SEQ ID NO: 1103110 - DNA, 15 bp, Homo sapiens
caggtgaaaatacca

SEQ ID NO: 1103111 - DNA, 15 bp, Homo sapiens
acaggtgaaaatacc

SEQ ID NO: 1103112 - DNA, 15 bp, Homo sapiens
cacaggtgaaaatac

SEQ ID NO: 1103113 - DNA, 15 bp, Homo sapiens
acacaggtgaaaata

SEQ ID NO: 1103114 - DNA, 15 bp, Homo sapiens
cacacaggtgaaaat

SEQ ID NO: 1103115 - DNA, 15 bp, Homo sapiens
ccacacaggtgaaaa

SEQ ID NO: 1103116 - DNA, 15 bp, Homo sapiens
cccacacaggtgaaa

SEQ ID NO: 1103117 - DNA, 15 bp, Homo sapiens
acccacacaggtgaa

SEQ ID NO: 1103118 - DNA, 15 bp, Homo sapiens
tacccacacaggtga

SEQ ID NO: 1103119 - DNA, 15 bp, Homo sapiens
ctacccacacaggtg

SEQ ID NO: 1103120 - DNA, 15 bp, Homo sapiens
gctacccacacaggt

SEQ ID NO: 1103121 - DNA, 15 bp, Homo sapiens
tgctacccacacagg

SEQ ID NO: 1103122 - DNA, 15 bp, Homo sapiens
ttgctacccacacag

SEQ ID NO: 1103123 - DNA, 15 bp, Homo sapiens
tttgctacccacaca

SEQ ID NO: 1103124 - DNA, 15 bp, Homo sapiens
gtttgctacccacac

SEQ ID NO: 1103125 - DNA, 15 bp, Homo sapiens
ggtttgctacccaca

SEQ ID NO: 1103126 - DNA, 15 bp, Homo sapiens
aggtttgctacccac

SEQ ID NO: 1103127 - DNA, 15 bp, Homo sapiens
gaggtttgctaccca

SEQ ID NO: 1103128 - DNA, 15 bp, Homo sapiens
tgaggtttgctaccc

SEQ ID NO: 1103129 - DNA, 15 bp, Homo sapiens
ctgaggtttgctacc

SEQ ID NO: 1103130 - DNA, 15 bp, Homo sapiens
tctgaggtttgctac

SEQ ID NO: 1103131 - DNA, 15 bp, Homo sapiens
ttctgaggtttgcta

SEQ ID NO: 1103132 - DNA, 15 bp, Homo sapiens
tttctgaggtttgct

SEQ ID NO: 1103133 - DNA, 15 bp, Homo sapiens
ttttctgaggtttgc

SEQ ID NO: 1103134 - DNA, 15 bp, Homo sapiens
attttctgaggtttg

SEQ ID NO: 1103135 - DNA, 15 bp, Homo sapiens
gattttctgaggttt

SEQ ID NO: 1103136 - DNA, 15 bp, Homo sapiens
tgattttctgaggtt

SEQ ID NO: 1103137 - DNA, 15 bp, Homo sapiens
ttgattttctgaggt

SEQ ID NO: 1103138 - DNA, 15 bp, Homo sapiens
cttgattttctgagg

SEQ ID NO: 1103139 - DNA, 15 bp, Homo sapiens
acttgattttctgag

SEQ ID NO: 1103140 - DNA, 15 bp, Homo sapiens
tacttgattttctga

SEQ ID NO: 1103141 - DNA, 15 bp, Homo sapiens
atacttgattttctg

SEQ ID NO: 1103142 - DNA, 15 bp, Homo sapiens
tatacttgattttct

SEQ ID NO: 1103143 - DNA, 15 bp, Homo sapiens
ctatacttgattttc

SEQ ID NO: 1103144 - DNA, 15 bp, Homo sapiens
tctatacttgatttt

SEQ ID NO: 1103145 - DNA, 15 bp, Homo sapiens
atctatacttgattt

SEQ ID NO: 1103146 - DNA, 15 bp, Homo sapiens
catctatacttgatt

SEQ ID NO: 1103147 - DNA, 15 bp, Homo sapiens
tcatctatacttgat

SEQ ID NO: 1103148 - DNA, 15 bp, Homo sapiens
gtcatctatacttga

SEQ ID NO: 1103149 - DNA, 15 bp, Homo sapiens
cgtcatctatacttg

SEQ ID NO: 1103150 - DNA, 15 bp, Homo sapiens
ccgtcatctatactt

SEQ ID NO: 1103151 - DNA, 15 bp, Homo sapiens
gccgtcatctatact

SEQ ID NO: 1103152 - DNA, 15 bp, Homo sapiens
tgccgtcatctatac

SEQ ID NO: 1103153 - DNA, 15 bp, Homo sapiens
atgccgtcatctata

SEQ ID NO: 1103154 - DNA, 15 bp, Homo sapiens
tatgccgtcatctat

SEQ ID NO: 1103155 - DNA, 15 bp, Homo sapiens
ctatgccgtcatcta

SEQ ID NO: 1103156 - DNA, 15 bp, Homo sapiens
cctatgccgtcatct

SEQ ID NO: 1103157 - DNA, 15 bp, Homo sapiens
tcctatgccgtcatc

SEQ ID NO: 1103158 - DNA, 15 bp, Homo sapiens
gtcctatgccgtcat

SEQ ID NO: 1103159 - DNA, 15 bp, Homo sapiens
tgtcctatgccgtca

SEQ ID NO: 1103160 - DNA, 15 bp, Homo sapiens
ctgtcctatgccgtc

SEQ ID NO: 1103161 - DNA, 15 bp, Homo sapiens
cctgtcctatgccgt

SEQ ID NO: 1103162 - DNA, 15 bp, Homo sapiens
gcctgtcctatgccg

SEQ ID NO: 1103163 - DNA, 15 bp, Homo sapiens
ggcctgtcctatgcc

SEQ ID NO: 1103164 - DNA, 15 bp, Homo sapiens
tggcctgtcctatgc

SEQ ID NO: 1103165 - DNA, 15 bp, Homo sapiens
ctggcctgtcctatg

SEQ ID NO: 1103166 - DNA, 15 bp, Homo sapiens
cctggcctgtcctat

SEQ ID NO: 1103167 - DNA, 15 bp, Homo sapiens
gcctggcctgtccta

SEQ ID NO: 1103168 - DNA, 15 bp, Homo sapiens
ggcctggcctgtcct

SEQ ID NO: 1103169 - DNA, 15 bp, Homo sapiens
gggcctggcctgtcc

SEQ ID NO: 1103170 - DNA, 15 bp, Homo sapiens
ggggcctggcctgtc

SEQ ID NO: 1103171 - DNA, 15 bp, Homo sapiens
tggggcctggcctgt

SEQ ID NO: 1103172 - DNA, 15 bp, Homo sapiens
ctggggcctggcctg

SEQ ID NO: 1103173 - DNA, 15 bp, Homo sapiens
cctggggcctggcct

SEQ ID NO: 1103174 - DNA, 15 bp, Homo sapiens
gcctggggcctggcc

SEQ ID NO: 1103175 - DNA, 15 bp, Homo sapiens
tgcctggggcctggc

SEQ ID NO: 1103176 - DNA, 15 bp, Homo sapiens
ttgcctggggcctgg

SEQ ID NO: 1103177 - DNA, 15 bp, Homo sapiens
tttgcctggggcctg

SEQ ID NO: 1103178 - DNA, 15 bp, Homo sapiens
ttttgcctggggcct

SEQ ID NO: 1103179 - DNA, 15 bp, Homo sapiens
attttgcctggggcc

SEQ ID NO: 1103180 - DNA, 15 bp, Homo sapiens
cattttgcctggggc

SEQ ID NO: 1103181 - DNA, 15 bp, Homo sapiens
acattttgcctgggg

SEQ ID NO: 1103182 - DNA, 15 bp, Homo sapiens
aacattttgcctggg

SEQ ID NO: 1103183 - DNA, 15 bp, Homo sapiens
caacattttgcctgg

SEQ ID NO: 1103184 - DNA, 15 bp, Homo sapiens
tcaacattttgcctg

SEQ ID NO: 1103185 - DNA, 15 bp, Homo sapiens
ttcaacattttgcct

SEQ ID NO: 1103186 - DNA, 15 bp, Homo sapiens
cttcaacattttgcc

SEQ ID NO: 1103187 - DNA, 15 bp, Homo sapiens
gcttcaacattttgc

SEQ ID NO: 1103188 - DNA, 15 bp, Homo sapiens
agcttcaacattttg

SEQ ID NO: 1103189 - DNA, 15 bp, Homo sapiens
gagcttcaacatttt

SEQ ID NO: 1103190 - DNA, 15 bp, Homo sapiens
ggagcttcaacattt

SEQ ID NO: 1103191 - DNA, 15 bp, Homo sapiens
aggagcttcaacatt

SEQ ID NO: 1103192 - DNA, 15 bp, Homo sapiens
gaggagcttcaacat

SEQ ID NO: 1103193 - DNA, 15 bp, Homo sapiens
agaggagcttcaaca

SEQ ID NO: 1103194 - DNA, 15 bp, Homo sapiens
cagaggagcttcaac

SEQ ID NO: 1103195 - DNA, 15 bp, Homo sapiens
ccagaggagcttcaa

SEQ ID NO: 1103196 - DNA, 15 bp, Homo sapiens
tccagaggagcttca

SEQ ID NO: 1103197 - DNA, 15 bp, Homo sapiens
ctccagaggagcttc

SEQ ID NO: 1103198 - DNA, 15 bp, Homo sapiens
actccagaggagctt

SEQ ID NO: 1103199 - DNA, 15 bp, Homo sapiens
aactccagaggagct

SEQ ID NO: 1103200 - DNA, 15 bp, Homo sapiens
gaactccagaggagc

SEQ ID NO: 1103201 - DNA, 15 bp, Homo sapiens
ggaactccagaggag

SEQ ID NO: 1103202 - DNA, 15 bp, Homo sapiens
gggaactccagagga

SEQ ID NO: 1103203 - DNA, 15 bp, Homo sapiens
agggaactccagagg

SEQ ID NO: 1103204 - DNA, 15 bp, Homo sapiens
gagggaactccagag

SEQ ID NO: 1103205 - DNA, 15 bp, Homo sapiens
ggagggaactccaga

SEQ ID NO: 1103206 - DNA, 15 bp, Homo sapiens
gggagggaactccag

SEQ ID NO: 1103207 - DNA, 15 bp, Homo sapiens
tgggagggaactcca

SEQ ID NO: 1103208 - DNA, 15 bp, Homo sapiens
atgggagggaactcc

SEQ ID NO: 1103209 - DNA, 15 bp, Homo sapiens
gatgggagggaactc

SEQ ID NO: 1103210 - DNA, 15 bp, Homo sapiens
agatgggagggaact

SEQ ID NO: 1103211 - DNA, 15 bp, Homo sapiens
gagatgggagggaac

SEQ ID NO: 1103212 - DNA, 15 bp, Homo sapiens
ggagatgggagggaa

SEQ ID NO: 1103213 - DNA, 15 bp, Homo sapiens
gggagatgggaggga

SEQ ID NO: 1103214 - DNA, 15 bp, Homo sapiens
agggagatgggaggg

SEQ ID NO: 1103215 - DNA, 15 bp, Homo sapiens
gagggagatgggagg

SEQ ID NO: 1103216 - DNA, 15 bp, Homo sapiens
agagggagatgggag

SEQ ID NO: 1103217 - DNA, 15 bp, Homo sapiens
aagagggagatggga

SEQ ID NO: 1103218 - DNA, 15 bp, Homo sapiens
aaagagggagatggg

SEQ ID NO: 1103219 - DNA, 15 bp, Homo sapiens
aaaagagggagatgg

SEQ ID NO: 1103220 - DNA, 15 bp, Homo sapiens
caaaagagggagatg

SEQ ID NO: 1103221 - DNA, 15 bp, Homo sapiens
acaaaagagggagat

SEQ ID NO: 1103222 - DNA, 15 bp, Homo sapiens
aacaaaagagggaga

SEQ ID NO: 1103223 - DNA, 15 bp, Homo sapiens
aaacaaaagagggag

SEQ ID NO: 1103224 - DNA, 15 bp, Homo sapiens
aaaacaaaagaggga

SEQ ID NO: 1103225 - DNA, 15 bp, Homo sapiens
gaaaacaaaagaggg

SEQ ID NO: 1103226 - DNA, 15 bp, Homo sapiens
ggaaaacaaaagagg

SEQ ID NO: 1103227 - DNA, 15 bp, Homo sapiens
tggaaaacaaaagag

SEQ ID NO: 1103228 - DNA, 15 bp, Homo sapiens
atggaaaacaaaaga

SEQ ID NO: 1103229 - DNA, 15 bp, Homo sapiens
tatggaaaacaaaag

SEQ ID NO: 1103230 - DNA, 15 bp, Homo sapiens
atatggaaaacaaaa

SEQ ID NO: 1103231 - DNA, 15 bp, Homo sapiens
tatatggaaaacaaa

SEQ ID NO: 1103232 - DNA, 15 bp, Homo sapiens
gtatatggaaaacaa

SEQ ID NO: 1103233 - DNA, 15 bp, Homo sapiens
ggtatatggaaaaca

SEQ ID NO: 1103234 - DNA, 15 bp, Homo sapiens
aggtatatggaaaac

SEQ ID NO: 1103235 - DNA, 15 bp, Homo sapiens
caggtatatggaaaa

SEQ ID NO: 1103236 - DNA, 15 bp, Homo sapiens
ccaggtatatggaaa

SEQ ID NO: 1103237 - DNA, 15 bp, Homo sapiens
accaggtatatggaa

SEQ ID NO: 1103238 - DNA, 15 bp, Homo sapiens
aaccaggtatatgga

SEQ ID NO: 1103239 - DNA, 15 bp, Homo sapiens
aaaccaggtatatgg

SEQ ID NO: 1103240 - DNA, 15 bp, Homo sapiens
taaaccaggtatatg

SEQ ID NO: 1103241 - DNA, 15 bp, Homo sapiens
ataaaccaggtatat

SEQ ID NO: 1103242 - DNA, 15 bp, Homo sapiens
gataaaccaggtata

SEQ ID NO: 1103243 - DNA, 15 bp, Homo sapiens
ggataaaccaggtat

SEQ ID NO: 1103244 - DNA, 15 bp, Homo sapiens
tggataaaccaggta

SEQ ID NO: 1103245 - DNA, 15 bp, Homo sapiens
ctggataaaccaggt

SEQ ID NO: 1103246 - DNA, 15 bp, Homo sapiens
cctggataaaccagg

SEQ ID NO: 1103247 - DNA, 15 bp, Homo sapiens
ccctggataaaccag

SEQ ID NO: 1103248 - DNA, 15 bp, Homo sapiens
gccctggataaacca

SEQ ID NO: 1103249 - DNA, 15 bp, Homo sapiens
ggccctggataaacc

SEQ ID NO: 1103250 - DNA, 15 bp, Homo sapiens
gggccctggataaac

SEQ ID NO: 1103251 - DNA, 15 bp, Homo sapiens
agggccctggataaa

SEQ ID NO: 1103252 - DNA, 15 bp, Homo sapiens
cagggccctggataa

SEQ ID NO: 1103253 - DNA, 15 bp, Homo sapiens
ccagggccctggata

SEQ ID NO: 1103254 - DNA, 15 bp, Homo sapiens
tccagggccctggat

SEQ ID NO: 1103255 - DNA, 15 bp, Homo sapiens
ctccagggccctgga

SEQ ID NO: 1103256 - DNA, 15 bp, Homo sapiens
tctccagggccctgg

SEQ ID NO: 1103257 - DNA, 15 bp, Homo sapiens
atctccagggccctg

SEQ ID NO: 1103258 - DNA, 15 bp, Homo sapiens
catctccagggccct

SEQ ID NO: 1103259 - DNA, 15 bp, Homo sapiens
gcatctccagggccc

SEQ ID NO: 1103260 - DNA, 15 bp, Homo sapiens
agcatctccagggcc

SEQ ID NO: 1103261 - DNA, 15 bp, Homo sapiens
gagcatctccagggc

SEQ ID NO: 1103262 - DNA, 15 bp, Homo sapiens
ggagcatctccaggg

SEQ ID NO: 1103263 - DNA, 15 bp, Homo sapiens
tggagcatctccagg

SEQ ID NO: 1103264 - DNA, 15 bp, Homo sapiens
ttggagcatctccag

SEQ ID NO: 1103265 - DNA, 15 bp, Homo sapiens
cttggagcatctcca

SEQ ID NO: 1103266 - DNA, 15 bp, Homo sapiens
tcttggagcatctcc

SEQ ID NO: 1103267 - DNA, 15 bp, Homo sapiens
gtcttggagcatctc

SEQ ID NO: 1103268 - DNA, 15 bp, Homo sapiens
ggtcttggagcatct

SEQ ID NO: 1103269 - DNA, 15 bp, Homo sapiens
gggtcttggagcatc

SEQ ID NO: 1103270 - DNA, 15 bp, Homo sapiens
ggggtcttggagcat

SEQ ID NO: 1103271 - DNA, 15 bp, Homo sapiens
gggggtcttggagca

SEQ ID NO: 1103272 - DNA, 15 bp, Homo sapiens
agggggtcttggagc

SEQ ID NO: 1103273 - DNA, 15 bp, Homo sapiens
tagggggtcttggag

SEQ ID NO: 1103274 - DNA, 15 bp, Homo sapiens
gtagggggtcttgga

SEQ ID NO: 1103275 - DNA, 15 bp, Homo sapiens
ggtagggggtcttgg

SEQ ID NO: 1103276 - DNA, 15 bp, Homo sapiens
gggtagggggtcttg

SEQ ID NO: 1103277 - DNA, 15 bp, Homo sapiens
tgggtagggggtctt

SEQ ID NO: 1103278 - DNA, 15 bp, Homo sapiens
ctgggtagggggtct

SEQ ID NO: 1103279 - DNA, 15 bp, Homo sapiens
cctgggtagggggtc

SEQ ID NO: 1103280 - DNA, 15 bp, Homo sapiens
acctgggtagggggt

SEQ ID NO: 1103281 - DNA, 15 bp, Homo sapiens
gacctgggtaggggg

SEQ ID NO: 1103282 - DNA, 15 bp, Homo sapiens
agacctgggtagggg

SEQ ID NO: 1103283 - DNA, 15 bp, Homo sapiens
aagacctgggtaggg

SEQ ID NO: 1103284 - DNA, 15 bp, Homo sapiens
gaagacctgggtagg

SEQ ID NO: 1103285 - DNA, 15 bp, Homo sapiens
ggaagacctgggtag

SEQ ID NO: 1103286 - DNA, 15 bp, Homo sapiens
aggaagacctgggta

SEQ ID NO: 1103287 - DNA, 15 bp, Homo sapiens
gaggaagacctgggt

SEQ ID NO: 1103288 - DNA, 15 bp, Homo sapiens
ggaggaagacctggg

SEQ ID NO: 1103289 - DNA, 15 bp, Homo sapiens
gggaggaagacctgg

SEQ ID NO: 1103290 - DNA, 15 bp, Homo sapiens
agggaggaagacctg

SEQ ID NO: 1103291 - DNA, 15 bp, Homo sapiens
aagggaggaagacct

SEQ ID NO: 1103292 - DNA, 15 bp, Homo sapiens
caagggaggaagacc

SEQ ID NO: 1103293 - DNA, 15 bp, Homo sapiens
acaagggaggaagac

SEQ ID NO: 1103294 - DNA, 15 bp, Homo sapiens
gacaagggaggaaga

SEQ ID NO: 1103295 - DNA, 15 bp, Homo sapiens
ggacaagggaggaag

SEQ ID NO: 1103296 - DNA, 15 bp, Homo sapiens
gggacaagggaggaa

SEQ ID NO: 1103297 - DNA, 15 bp, Homo sapiens
tgggacaagggagga

SEQ ID NO: 1103298 - DNA, 15 bp, Homo sapiens
ctgggacaagggagg

SEQ ID NO: 1103299 - DNA, 15 bp, Homo sapiens
gctgggacaagggag

SEQ ID NO: 1103300 - DNA, 15 bp, Homo sapiens
agctgggacaaggga

SEQ ID NO: 1103301 - DNA, 15 bp, Homo sapiens
tagctgggacaaggg

SEQ ID NO: 1103302 - DNA, 15 bp, Homo sapiens
atagctgggacaagg

SEQ ID NO: 1103303 - DNA, 15 bp, Homo sapiens
tatagctgggacaag

SEQ ID NO: 1103304 - DNA, 15 bp, Homo sapiens
atatagctgggacaa

SEQ ID NO: 1103305 - DNA, 15 bp, Homo sapiens
aatatagctgggaca

SEQ ID NO: 1103306 - DNA, 15 bp, Homo sapiens
aaatatagctgggac

SEQ ID NO: 1103307 - DNA, 15 bp, Homo sapiens
gaaatatagctggga

SEQ ID NO: 1103308 - DNA, 15 bp, Homo sapiens
agaaatatagctggg

SEQ ID NO: 1103309 - DNA, 15 bp, Homo sapiens
gagaaatatagctgg

SEQ ID NO: 1103310 - DNA, 15 bp, Homo sapiens
ggagaaatatagctg

SEQ ID NO: 1103311 - DNA, 15 bp, Homo sapiens
tggagaaatatagct

SEQ ID NO: 1103312 - DNA, 15 bp, Homo sapiens
atggagaaatatagc

SEQ ID NO: 1103313 - DNA, 15 bp, Homo sapiens
tatggagaaatatag

SEQ ID NO: 1103314 - DNA, 15 bp, Homo sapiens
atatggagaaatata

SEQ ID NO: 1103315 - DNA, 15 bp, Homo sapiens
aatatggagaaatat

SEQ ID NO: 1103316 - DNA, 15 bp, Homo sapiens
taatatggagaaata

SEQ ID NO: 1103317 - DNA, 15 bp, Homo sapiens
gtaatatggagaaat

SEQ ID NO: 1103318 - DNA, 15 bp, Homo sapiens
ggtaatatggagaaa

SEQ ID NO: 1103319 - DNA, 15 bp, Homo sapiens
tggtaatatggagaa

SEQ ID NO: 1103320 - DNA, 15 bp, Homo sapiens
gtggtaatatggaga

SEQ ID NO: 1103321 - DNA, 15 bp, Homo sapiens
agtggtaatatggag

SEQ ID NO: 1103322 - DNA, 15 bp, Homo sapiens
gagtggtaatatgga

SEQ ID NO: 1103323 - DNA, 15 bp, Homo sapiens
agagtggtaatatgg

SEQ ID NO: 1103324 - DNA, 15 bp, Homo sapiens
aagagtggtaatatg

SEQ ID NO: 1103325 - DNA, 15 bp, Homo sapiens
gaagagtggtaatat

SEQ ID NO: 1103326 - DNA, 15 bp, Homo sapiens
agaagagtggtaata

SEQ ID NO: 1103327 - DNA, 15 bp, Homo sapiens
gagaagagtggtaat

SEQ ID NO: 1103328 - DNA, 15 bp, Homo sapiens
tgagaagagtggtaa

SEQ ID NO: 1103329 - DNA, 15 bp, Homo sapiens
gtgagaagagtggta

SEQ ID NO: 1103330 - DNA, 15 bp, Homo sapiens
ggtgagaagagtggt

SEQ ID NO: 1103331 - DNA, 15 bp, Homo sapiens
cggtgagaagagtgg

SEQ ID NO: 1103332 - DNA, 15 bp, Homo sapiens
tcggtgagaagagtg

SEQ ID NO: 1103333 - DNA, 15 bp, Homo sapiens
ctcggtgagaagagt

SEQ ID NO: 1103334 - DNA, 15 bp, Homo sapiens
cctcggtgagaagag

SEQ ID NO: 1103335 - DNA, 15 bp, Homo sapiens
tcctcggtgagaaga

SEQ ID NO: 1103336 - DNA, 15 bp, Homo sapiens
atcctcggtgagaag

SEQ ID NO: 1103337 - DNA, 15 bp, Homo sapiens
aatcctcggtgagaa

SEQ ID NO: 1103338 - DNA, 15 bp, Homo sapiens
aaatcctcggtgaga

SEQ ID NO: 1103339 - DNA, 15 bp, Homo sapiens
caaatcctcggtgag

SEQ ID NO: 1103340 - DNA, 15 bp, Homo sapiens
gcaaatcctcggtga

SEQ ID NO: 1103341 - DNA, 15 bp, Homo sapiens
agcaaatcctcggtg

SEQ ID NO: 1103342 - DNA, 15 bp, Homo sapiens
aagcaaatcctcggt

SEQ ID NO: 1103343 - DNA, 15 bp, Homo sapiens
taagcaaatcctcgg

SEQ ID NO: 1103344 - DNA, 15 bp, Homo sapiens
gtaagcaaatcctcg

SEQ ID NO: 1103345 - DNA, 15 bp, Homo sapiens
agtaagcaaatcctc

SEQ ID NO: 1103346 - DNA, 15 bp, Homo sapiens
aagtaagcaaatcct

SEQ ID NO: 1103347 - DNA, 15 bp, Homo sapiens
taagtaagcaaatcc

SEQ ID NO: 1103348 - DNA, 15 bp, Homo sapiens
ttaagtaagcaaatc

SEQ ID NO: 1103349 - DNA, 15 bp, Homo sapiens
gttaagtaagcaaat

SEQ ID NO: 1103350 - DNA, 15 bp, Homo sapiens
tgttaagtaagcaaa

SEQ ID NO: 1103351 - DNA, 15 bp, Homo sapiens
gtgttaagtaagcaa

SEQ ID NO: 1103352 - DNA, 15 bp, Homo sapiens
tgtgttaagtaagca

SEQ ID NO: 1103353 - DNA, 15 bp, Homo sapiens
atgtgttaagtaagc

SEQ ID NO: 1103354 - DNA, 15 bp, Homo sapiens
tatgtgttaagtaag

SEQ ID NO: 1103355 - DNA, 15 bp, Homo sapiens
ttatgtgttaagtaa

SEQ ID NO: 1103356 - DNA, 15 bp, Homo sapiens
attatgtgttaagta

SEQ ID NO: 1103357 - DNA, 15 bp, Homo sapiens
tattatgtgttaagt

SEQ ID NO: 1103358 - DNA, 15 bp, Homo sapiens
ttattatgtgttaag

SEQ ID NO: 1103359 - DNA, 15 bp, Homo sapiens
tttattatgtgttaa

SEQ ID NO: 1103360 - DNA, 15 bp, Homo sapiens
atttattatgtgtta

SEQ ID NO: 1103361 - DNA, 15 bp, Homo sapiens
tatttattatgtgtt

SEQ ID NO: 1103362 - DNA, 15 bp, Homo sapiens
gtatttattatgtgt

SEQ ID NO: 1103363 - DNA, 15 bp, Homo sapiens
agtatttattatgtg

SEQ ID NO: 1103364 - DNA, 15 bp, Homo sapiens
tagtatttattatgt

SEQ ID NO: 1103365 - DNA, 15 bp, Homo sapiens
atagtatttattatg

SEQ ID NO: 1103366 - DNA, 15 bp, Homo sapiens
aatagtatttattat

SEQ ID NO: 1103367 - DNA, 15 bp, Homo sapiens
taatagtatttatta

SEQ ID NO: 1103368 - DNA, 15 bp, Homo sapiens
ttaatagtatttatt

SEQ ID NO: 1103369 - DNA, 15 bp, Homo sapiens
tttaatagtatttat

SEQ ID NO: 1103370 - DNA, 15 bp, Homo sapiens
ttttaatagtattta

SEQ ID NO: 1103371 - DNA, 15 bp, Homo sapiens
cttttaatagtattt

SEQ ID NO: 1103372 - DNA, 15 bp, Homo sapiens
tcttttaatagtatt

SEQ ID NO: 1103373 - DNA, 15 bp, Homo sapiens
ctcttttaatagtat

SEQ ID NO: 1103374 - DNA, 15 bp, Homo sapiens
tctcttttaatagta

SEQ ID NO: 1103375 - DNA, 15 bp, Homo sapiens
ttctcttttaatagt

SEQ ID NO: 1103376 - DNA, 15 bp, Homo sapiens
tttctcttttaatag

SEQ ID NO: 1103377 - DNA, 15 bp, Homo sapiens
gtttctcttttaata

SEQ ID NO: 1103378 - DNA, 15 bp, Homo sapiens
agtttctcttttaat

SEQ ID NO: 1103379 - DNA, 15 bp, Homo sapiens
aagtttctcttttaa

SEQ ID NO: 1103380 - DNA, 15 bp, Homo sapiens
taagtttctctttta

SEQ ID NO: 1103381 - DNA, 15 bp, Homo sapiens
ctaagtttctctttt

SEQ ID NO: 1103382 - DNA, 15 bp, Homo sapiens
cctaagtttctcttt

SEQ ID NO: 1103383 - DNA, 15 bp, Homo sapiens
gcctaagtttctctt

SEQ ID NO: 1103384 - DNA, 15 bp, Homo sapiens
tgcctaagtttctct

SEQ ID NO: 1103385 - DNA, 15 bp, Homo sapiens
gtgcctaagtttctc

SEQ ID NO: 1103386 - DNA, 15 bp, Homo sapiens
tgtgcctaagtttct

SEQ ID NO: 1103387 - DNA, 15 bp, Homo sapiens
atgtgcctaagtttc

SEQ ID NO: 1103388 - DNA, 15 bp, Homo sapiens
aatgtgcctaagttt

SEQ ID NO: 1103389 - DNA, 15 bp, Homo sapiens
taatgtgcctaagtt

SEQ ID NO: 1103390 - DNA, 15 bp, Homo sapiens
ttaatgtgcctaagt

SEQ ID NO: 1103391 - DNA, 15 bp, Homo sapiens
tttaatgtgcctaag

SEQ ID NO: 1103392 - DNA, 15 bp, Homo sapiens
ttttaatgtgcctaa

SEQ ID NO: 1103393 - DNA, 15 bp, Homo sapiens
attttaatgtgccta

SEQ ID NO: 1103394 - DNA, 15 bp, Homo sapiens
cattttaatgtgcct

SEQ ID NO: 1103395 - DNA, 15 bp, Homo sapiens
acattttaatgtgcc

SEQ ID NO: 1103396 - DNA, 15 bp, Homo sapiens
aacattttaatgtgc

SEQ ID NO: 1103397 - DNA, 15 bp, Homo sapiens
taacattttaatgtg

SEQ ID NO: 1103398 - DNA, 15 bp, Homo sapiens
ctaacattttaatgt

SEQ ID NO: 1103399 - DNA, 15 bp, Homo sapiens
tctaacattttaatg

SEQ ID NO: 1103400 - DNA, 15 bp, Homo sapiens
actctaacattttaa

SEQ ID NO: 1103401 - DNA, 15 bp, Homo sapiens
aactctaacatttta

SEQ ID NO: 1103402 - DNA, 15 bp, Homo sapiens
caactctaacatttt

SEQ ID NO: 1103403 - DNA, 15 bp, Homo sapiens
tcaactctaacattt

SEQ ID NO: 1103404 - DNA, 15 bp, Homo sapiens
atcaactctaacatt

SEQ ID NO: 1103405 - DNA, 15 bp, Homo sapiens
aatcaactctaacat

SEQ ID NO: 1103406 - DNA, 15 bp, Homo sapiens
gaatcaactctaaca

SEQ ID NO: 1103407 - DNA, 15 bp, Homo sapiens
ggaatcaactctaac

SEQ ID NO: 1103408 - DNA, 15 bp, Homo sapiens
tggaatcaactctaa

SEQ ID NO: 1103409 - DNA, 15 bp, Homo sapiens
ctggaatcaactcta

SEQ ID NO: 1103410 - DNA, 15 bp, Homo sapiens
gctggaatcaactct

SEQ ID NO: 1103411 - DNA, 15 bp, Homo sapiens
tgctggaatcaactc

SEQ ID NO: 1103412 - DNA, 15 bp, Homo sapiens
ttgctggaatcaact

SEQ ID NO: 1103413 - DNA, 15 bp, Homo sapiens
tttgctggaatcaac

SEQ ID NO: 1103414 - DNA, 15 bp, Homo sapiens
gtttgctggaatcaa

SEQ ID NO: 1103415 - DNA, 15 bp, Homo sapiens
tgtttgctggaatca

SEQ ID NO: 1103416 - DNA, 15 bp, Homo sapiens
ctgtttgctggaatc

SEQ ID NO: 1103417 - DNA, 15 bp, Homo sapiens
actgtttgctggaat

SEQ ID NO: 1103418 - DNA, 15 bp, Homo sapiens
cactgtttgctggaa

SEQ ID NO: 1103419 - DNA, 15 bp, Homo sapiens
tcactgtttgctgga

SEQ ID NO: 1103420 - DNA, 15 bp, Homo sapiens
atcactgtttgctgg

SEQ ID NO: 1103421 - DNA, 15 bp, Homo sapiens
aatcactgtttgctg

SEQ ID NO: 1103422 - DNA, 15 bp, Homo sapiens
gaatcactgtttgct

SEQ ID NO: 1103423 - DNA, 15 bp, Homo sapiens
tgaatcactgtttgc

SEQ ID NO: 1103424 - DNA, 15 bp, Homo sapiens
gtgaatcactgtttg

SEQ ID NO: 1103425 - DNA, 15 bp, Homo sapiens
tgtgaatcactgttt

SEQ ID NO: 1103426 - DNA, 15 bp, Homo sapiens
ctgtgaatcactgtt

SEQ ID NO: 1103427 - DNA, 15 bp, Homo sapiens
cctgtgaatcactgt

SEQ ID NO: 1103428 - DNA, 15 bp, Homo sapiens
tcctgtgaatcactg

SEQ ID NO: 1103429 - DNA, 15 bp, Homo sapiens
ctcctgtgaatcact

SEQ ID NO: 1103430 - DNA, 15 bp, Homo sapiens
cctcctgtgaatcac

SEQ ID NO: 1103431 - DNA, 15 bp, Homo sapiens
gcctcctgtgaatca

SEQ ID NO: 1103432 - DNA, 15 bp, Homo sapiens
agcctcctgtgaatc

SEQ ID NO: 1103433 - DNA, 15 bp, Homo sapiens
gagcctcctgtgaat

SEQ ID NO: 1103434 - DNA, 15 bp, Homo sapiens
ggagcctcctgtgaa

SEQ ID NO: 1103435 - DNA, 15 bp, Homo sapiens
tggagcctcctgtga

SEQ ID NO: 1103436 - DNA, 15 bp, Homo sapiens
ctggagcctcctgtg

SEQ ID NO: 1103437 - DNA, 15 bp, Homo sapiens
tctggagcctcctgt

SEQ ID NO: 1103438 - DNA, 15 bp, Homo sapiens
atctggagcctcctg

SEQ ID NO: 1103439 - DNA, 15 bp, Homo sapiens
gatctggagcctcct

SEQ ID NO: 1103440 - DNA, 15 bp, Homo sapiens
tgatctggagcctcc

SEQ ID NO: 1103441 - DNA, 15 bp, Homo sapiens
gtgatctggagcctc

SEQ ID NO: 1103442 - DNA, 15 bp, Homo sapiens
tgtgatctggagcct

SEQ ID NO: 1103443 - DNA, 15 bp, Homo sapiens
ttgtgatctggagcc

SEQ ID NO: 1103444 - DNA, 15 bp, Homo sapiens
cttgtgatctggagc

SEQ ID NO: 1103445 - DNA, 15 bp, Homo sapiens
acttgtgatctggag

SEQ ID NO: 1103446 - DNA, 15 bp, Homo sapiens
cacttgtgatctgga

SEQ ID NO: 1103447 - DNA, 15 bp, Homo sapiens
ccacttgtgatctgg

SEQ ID NO: 1103448 - DNA, 15 bp, Homo sapiens
accacttgtgatctg

SEQ ID NO: 1103449 - DNA, 15 bp, Homo sapiens
aaccacttgtgatct

SEQ ID NO: 1103450 - DNA, 15 bp, Homo sapiens
gaaccacttgtgatc

SEQ ID NO: 1103451 - DNA, 15 bp, Homo sapiens
tgaaccacttgtgat

SEQ ID NO: 1103452 - DNA, 15 bp, Homo sapiens
ctgaaccacttgtga

SEQ ID NO: 1103453 - DNA, 15 bp, Homo sapiens
cctgaaccacttgtg

SEQ ID NO: 1103454 - DNA, 15 bp, Homo sapiens
ccctgaaccacttgt

SEQ ID NO: 1103455 - DNA, 15 bp, Homo sapiens
gccctgaaccacttg

SEQ ID NO: 1103456 - DNA, 15 bp, Homo sapiens
ggccctgaaccactt

SEQ ID NO: 1103457 - DNA, 15 bp, Homo sapiens
gggccctgaaccact

SEQ ID NO: 1103458 - DNA, 15 bp, Homo sapiens
ggggccctgaaccac

SEQ ID NO: 1103459 - DNA, 15 bp, Homo sapiens
tggggccctgaacca

SEQ ID NO: 1103460 - DNA, 15 bp, Homo sapiens
gtggggccctgaacc

SEQ ID NO: 1103461 - DNA, 15 bp, Homo sapiens
agtggggccctgaac

SEQ ID NO: 1103462 - DNA, 15 bp, Homo sapiens
cagtggggccctgaa

SEQ ID NO: 1103463 - DNA, 15 bp, Homo sapiens
tcagtggggccctga

SEQ ID NO: 1103464 - DNA, 15 bp, Homo sapiens
ctcagtggggccctg

SEQ ID NO: 1103465 - DNA, 15 bp, Homo sapiens
cctcagtggggccct

SEQ ID NO: 1103466 - DNA, 15 bp, Homo sapiens
ccctcagtggggccc

SEQ ID NO: 1103467 - DNA, 15 bp, Homo sapiens
cccctcagtggggcc

SEQ ID NO: 1103468 - DNA, 15 bp, Homo sapiens
acccctcagtggggc

SEQ ID NO: 1103469 - DNA, 15 bp, Homo sapiens
tacccctcagtgggg

SEQ ID NO: 1103470 - DNA, 15 bp, Homo sapiens
ctacccctcagtggg

SEQ ID NO: 1103471 - DNA, 15 bp, Homo sapiens
cctacccctcagtgg

SEQ ID NO: 1103472 - DNA, 15 bp, Homo sapiens
ccctacccctcagtg

SEQ ID NO: 1103473 - DNA, 15 bp, Homo sapiens
tccctacccctcagt

SEQ ID NO: 1103474 - DNA, 15 bp, Homo sapiens
ttccctacccctcag

SEQ ID NO: 1103475 - DNA, 15 bp, Homo sapiens
cttccctacccctca

SEQ ID NO: 1103476 - DNA, 15 bp, Homo sapiens
gcttccctacccctc

SEQ ID NO: 1103477 - DNA, 15 bp, Homo sapiens
tgcttccctacccct

SEQ ID NO: 1103478 - DNA, 15 bp, Homo sapiens
ttgcttccctacccc

SEQ ID NO: 1103479 - DNA, 15 bp, Homo sapiens
cttgcttccctaccc

SEQ ID NO: 1103480 - DNA, 15 bp, Homo sapiens
tcttgcttccctacc

SEQ ID NO: 1103481 - DNA, 15 bp, Homo sapiens
gtcttgcttccctac

SEQ ID NO: 1103482 - DNA, 15 bp, Homo sapiens
tgtcttgcttcccta

SEQ ID NO: 1103483 - DNA, 15 bp, Homo sapiens
ttgtcttgcttccct

SEQ ID NO: 1103484 - DNA, 15 bp, Homo sapiens
tttgtcttgcttccc

SEQ ID NO: 1103485 - DNA, 15 bp, Homo sapiens
ctttgtcttgcttcc

SEQ ID NO: 1103486 - DNA, 15 bp, Homo sapiens
tctttgtcttgcttc

SEQ ID NO: 1103487 - DNA, 15 bp, Homo sapiens
ttctttgtcttgctt

SEQ ID NO: 1103488 - DNA, 15 bp, Homo sapiens
tttctttgtcttgct

SEQ ID NO: 1103489 - DNA, 15 bp, Homo sapiens
ttttctttgtcttgc

SEQ ID NO: 1103490 - DNA, 15 bp, Homo sapiens
tttttctttgtcttg

SEQ ID NO: 1103491 - DNA, 15 bp, Homo sapiens
gtttttctttgtctt

SEQ ID NO: 1103492 - DNA, 15 bp, Homo sapiens
tgtttttctttgtct

SEQ ID NO: 1103493 - DNA, 15 bp, Homo sapiens
ttgtttttctttgtc

SEQ ID NO: 1103494 - DNA, 15 bp, Homo sapiens
tttgtttttctttgt

SEQ ID NO: 1103495 - DNA, 15 bp, Homo sapiens
ctttgtttttctttg

SEQ ID NO: 1103496 - DNA, 15 bp, Homo sapiens
gctttgtttttcttt

SEQ ID NO: 1103497 - DNA, 15 bp, Homo sapiens
tgctttgtttttctt

SEQ ID NO: 1103498 - DNA, 15 bp, Homo sapiens
ttgctttgtttttct

SEQ ID NO: 1103499 - DNA, 15 bp, Homo sapiens
tttgctttgtttttc

SEQ ID NO: 1103500 - DNA, 15 bp, Homo sapiens
atttgctttgttttt

SEQ ID NO: 1103501 - DNA, 15 bp, Homo sapiens
tatttgctttgtttt

SEQ ID NO: 1103502 - DNA, 15 bp, Homo sapiens
atatttgctttgttt

SEQ ID NO: 1103503 - DNA, 15 bp, Homo sapiens
aatatttgctttgtt

SEQ ID NO: 1103504 - DNA, 15 bp, Homo sapiens
aaatatttgctttgt

SEQ ID NO: 1103505 - DNA, 15 bp, Homo sapiens
caaatatttgctttg

SEQ ID NO: 1103506 - DNA, 15 bp, Homo sapiens
tcaaatatttgcttt

SEQ ID NO: 1103507 - DNA, 15 bp, Homo sapiens
atcaaatatttgctt

SEQ ID NO: 1103508 - DNA, 15 bp, Homo sapiens
aatcaaatatttgct

SEQ ID NO: 1103509 - DNA, 15 bp, Homo sapiens
caatcaaatatttgc

SEQ ID NO: 1103510 - DNA, 15 bp, Homo sapiens
ccaatcaaatatttg

SEQ ID NO: 1103511 - DNA, 15 bp, Homo sapiens
accaatcaaatattt

SEQ ID NO: 1103512 - DNA, 15 bp, Homo sapiens
aaccaatcaaatatt

SEQ ID NO: 1103513 - DNA, 15 bp, Homo sapiens
gaaccaatcaaatat

SEQ ID NO: 1103514 - DNA, 15 bp, Homo sapiens
tgaaccaatcaaata

SEQ ID NO: 1103515 - DNA, 15 bp, Homo sapiens
ttgaaccaatcaaat

SEQ ID NO: 1103516 - DNA, 15 bp, Homo sapiens
cttgaaccaatcaaa

SEQ ID NO: 1103517 - DNA, 15 bp, Homo sapiens
acttgaaccaatcaa

SEQ ID NO: 1103518 - DNA, 15 bp, Homo sapiens
cacttgaaccaatca

SEQ ID NO: 1103519 - DNA, 15 bp, Homo sapiens
ccacttgaaccaatc

SEQ ID NO: 1103520 - DNA, 15 bp, Homo sapiens
tccacttgaaccaat

SEQ ID NO: 1103521 - DNA, 15 bp, Homo sapiens
ttccacttgaaccaa

SEQ ID NO: 1103522 - DNA, 15 bp, Homo sapiens
tttccacttgaacca

SEQ ID NO: 1103523 - DNA, 15 bp, Homo sapiens
ctttccacttgaacc

SEQ ID NO: 1103524 - DNA, 15 bp, Homo sapiens
actttccacttgaac

SEQ ID NO: 1103525 - DNA, 15 bp, Homo sapiens
gactttccacttgaa

SEQ ID NO: 1103526 - DNA, 15 bp, Homo sapiens
ggactttccacttga

SEQ ID NO: 1103527 - DNA, 15 bp, Homo sapiens
gggactttccacttg

SEQ ID NO: 1103528 - DNA, 15 bp, Homo sapiens
agggactttccactt

SEQ ID NO: 1103529 - DNA, 15 bp, Homo sapiens
cagggactttccact

SEQ ID NO: 1103530 - DNA, 15 bp, Homo sapiens
tcagggactttccac

SEQ ID NO: 1103531 - DNA, 15 bp, Homo sapiens
atcagggactttcca

SEQ ID NO: 1103532 - DNA, 15 bp, Homo sapiens
aatcagggactttcc

SEQ ID NO: 1103533 - DNA, 15 bp, Homo sapiens
taatcagggactttc

SEQ ID NO: 1103534 - DNA, 15 bp, Homo sapiens
gtaatcagggacttt

SEQ ID NO: 1103535 - DNA, 15 bp, Homo sapiens
tgtaatcagggactt

SEQ ID NO: 1103536 - DNA, 15 bp, Homo sapiens
ctgtaatcagggact

SEQ ID NO: 1103537 - DNA, 15 bp, Homo sapiens
cctgtaatcagggac

SEQ ID NO: 1103538 - DNA, 15 bp, Homo sapiens
acctgtaatcaggga

SEQ ID NO: 1103539 - DNA, 15 bp, Homo sapiens
aacctgtaatcaggg

SEQ ID NO: 1103540 - DNA, 15 bp, Homo sapiens
taacctgtaatcagg

SEQ ID NO: 1103541 - DNA, 15 bp, Homo sapiens
ctaacctgtaatcag

SEQ ID NO: 1103542 - DNA, 15 bp, Homo sapiens
actaacctgtaatca

SEQ ID NO: 1103543 - DNA, 15 bp, Homo sapiens
cactaacctgtaatc

SEQ ID NO: 1103544 - DNA, 15 bp, Homo sapiens
ccactaacctgtaat

SEQ ID NO: 1103545 - DNA, 15 bp, Homo sapiens
cccactaacctgtaa

SEQ ID NO: 1103546 - DNA, 15 bp, Homo sapiens
gcccactaacctgta

SEQ ID NO: 1103547 - DNA, 15 bp, Homo sapiens
tgcccactaacctgt

SEQ ID NO: 1103548 - DNA, 15 bp, Homo sapiens
ctgcccactaacctg

SEQ ID NO: 1103549 - DNA, 15 bp, Homo sapiens
actgcccactaacct

SEQ ID NO: 1103550 - DNA, 15 bp, Homo sapiens
aactgcccactaacc

SEQ ID NO: 1103551 - DNA, 15 bp, Homo sapiens
aaactgcccactaac

SEQ ID NO: 1103552 - DNA, 15 bp, Homo sapiens
caaactgcccactaa

SEQ ID NO: 1103553 - DNA, 15 bp, Homo sapiens
acaaactgcccacta

SEQ ID NO: 1103554 - DNA, 15 bp, Homo sapiens
cacaaactgcccact

SEQ ID NO: 1103555 - DNA, 15 bp, Homo sapiens
tcacaaactgcccac

SEQ ID NO: 1103556 - DNA, 15 bp, Homo sapiens
atcacaaactgccca

SEQ ID NO: 1103557 - DNA, 15 bp, Homo sapiens
aatcacaaactgccc

SEQ ID NO: 1103558 - DNA, 15 bp, Homo sapiens
taatcacaaactgcc

SEQ ID NO: 1103559 - DNA, 15 bp, Homo sapiens
ctaatcacaaactgc

SEQ ID NO: 1103560 - DNA, 15 bp, Homo sapiens
actaatcacaaactg

SEQ ID NO: 1103561 - DNA, 15 bp, Homo sapiens
aactaatcacaaact

SEQ ID NO: 1103562 - DNA, 15 bp, Homo sapiens
taactaatcacaaac

SEQ ID NO: 1103563 - DNA, 15 bp, Homo sapiens
ttaactaatcacaaa

SEQ ID NO: 1103564 - DNA, 15 bp, Homo sapiens
cttaactaatcacaa

SEQ ID NO: 1103565 - DNA, 15 bp, Homo sapiens
acttaactaatcaca

SEQ ID NO: 1103566 - DNA, 15 bp, Homo sapiens
aacttaactaatcac

SEQ ID NO: 1103567 - DNA, 15 bp, Homo sapiens
aaacttaactaatca

SEQ ID NO: 1103568 - DNA, 15 bp, Homo sapiens
gaaacttaactaatc

SEQ ID NO: 1103569 - DNA, 15 bp, Homo sapiens
agaaacttaactaat

SEQ ID NO: 1103570 - DNA, 15 bp, Homo sapiens
gagaaacttaactaa

SEQ ID NO: 1103571 - DNA, 15 bp, Homo sapiens
agagaaacttaacta

SEQ ID NO: 1103572 - DNA, 15 bp, Homo sapiens
tagagaaacttaact

SEQ ID NO: 1103573 - DNA, 15 bp, Homo sapiens
ttagagaaacttaac

SEQ ID NO: 1103574 - DNA, 15 bp, Homo sapiens
cttagagaaacttaa

SEQ ID NO: 1103575 - DNA, 15 bp, Homo sapiens
acttagagaaactta

SEQ ID NO: 1103576 - DNA, 15 bp, Homo sapiens
aacttagagaaactt

SEQ ID NO: 1103577 - DNA, 15 bp, Homo sapiens
caacttagagaaact

SEQ ID NO: 1103578 - DNA, 15 bp, Homo sapiens
ccaacttagagaaac

SEQ ID NO: 1103579 - DNA, 15 bp, Homo sapiens
cccaacttagagaaa

SEQ ID NO: 1103580 - DNA, 15 bp, Homo sapiens
acccaacttagagaa

SEQ ID NO: 1103581 - DNA, 15 bp, Homo sapiens
aacccaacttagaga

SEQ ID NO: 1103582 - DNA, 15 bp, Homo sapiens
aaacccaacttagag

SEQ ID NO: 1103583 - DNA, 15 bp, Homo sapiens
aaaacccaacttaga

SEQ ID NO: 1103584 - DNA, 15 bp, Homo sapiens
caaaacccaacttag

SEQ ID NO: 1103585 - DNA, 15 bp, Homo sapiens
ccaaaacccaactta

SEQ ID NO: 1103586 - DNA, 15 bp, Homo sapiens
accaaaacccaactt

SEQ ID NO: 1103587 - DNA, 15 bp, Homo sapiens
aaccaaaacccaact

SEQ ID NO: 1103588 - DNA, 15 bp, Homo sapiens
aaaccaaaacccaac

SEQ ID NO: 1103589 - DNA, 15 bp, Homo sapiens
agcaaaccaaaaccc

SEQ ID NO: 1103590 - DNA, 15 bp, Homo sapiens
cagcaaaccaaaacc

SEQ ID NO: 1103591 - DNA, 15 bp, Homo sapiens
tcagcaaaccaaaac

SEQ ID NO: 1103592 - DNA, 15 bp, Homo sapiens
atcagcaaaccaaaa

SEQ ID NO: 1103593 - DNA, 15 bp, Homo sapiens
catcagcaaaccaaa

SEQ ID NO: 1103594 - DNA, 15 bp, Homo sapiens
acatcagcaaaccaa

SEQ ID NO: 1103595 - DNA, 15 bp, Homo sapiens
tacatcagcaaacca

SEQ ID NO: 1103596 - DNA, 15 bp, Homo sapiens
ctacatcagcaaacc

SEQ ID NO: 1103597 - DNA, 15 bp, Homo sapiens
cctacatcagcaaac

SEQ ID NO: 1103598 - DNA, 15 bp, Homo sapiens
tcctacatcagcaaa

SEQ ID NO: 1103599 - DNA, 15 bp, Homo sapiens
ttcctacatcagcaa

SEQ ID NO: 1103600 - DNA, 15 bp, Homo sapiens
gttcctacatcagca

SEQ ID NO: 1103601 - DNA, 15 bp, Homo sapiens
tgttcctacatcagc

SEQ ID NO: 1103602 - DNA, 15 bp, Homo sapiens
gtgttcctacatcag

SEQ ID NO: 1103603 - DNA, 15 bp, Homo sapiens
tgtgttcctacatca

SEQ ID NO: 1103604 - DNA, 15 bp, Homo sapiens
ctgtgttcctacatc

SEQ ID NO: 1103605 - DNA, 15 bp, Homo sapiens
tctgtgttcctacat

SEQ ID NO: 1103606 - DNA, 15 bp, Homo sapiens
ttctgtgttcctaca

SEQ ID NO: 1103607 - DNA, 15 bp, Homo sapiens
attctgtgttcctac

SEQ ID NO: 1103608 - DNA, 15 bp, Homo sapiens
cattctgtgttccta

SEQ ID NO: 1103609 - DNA, 15 bp, Homo sapiens
gcattctgtgttcct

SEQ ID NO: 1103610 - DNA, 15 bp, Homo sapiens
agcattctgtgttcc

SEQ ID NO: 1103611 - DNA, 15 bp, Homo sapiens
cagcattctgtgttc

SEQ ID NO: 1103612 - DNA, 15 bp, Homo sapiens
ccagcattctgtgtt

SEQ ID NO: 1103613 - DNA, 15 bp, Homo sapiens
cccagcattctgtgt

SEQ ID NO: 1103614 - DNA, 15 bp, Homo sapiens
ccccagcattctgtg

SEQ ID NO: 1103615 - DNA, 15 bp, Homo sapiens
gccccagcattctgt

SEQ ID NO: 1103616 - DNA, 15 bp, Homo sapiens
ggccccagcattctg

SEQ ID NO: 1103617 - DNA, 15 bp, Homo sapiens
cggccccagcattct

SEQ ID NO: 1103618 - DNA, 15 bp, Homo sapiens
acggccccagcattc

SEQ ID NO: 1103619 - DNA, 15 bp, Homo sapiens
aacggccccagcatt

SEQ ID NO: 1103620 - DNA, 15 bp, Homo sapiens
aaacggccccagcat

SEQ ID NO: 1103621 - DNA, 15 bp, Homo sapiens
gaaacggccccagca

SEQ ID NO: 1103622 - DNA, 15 bp, Homo sapiens
tgaaacggccccagc

SEQ ID NO: 1103623 - DNA, 15 bp, Homo sapiens
ttgaaacggccccag

SEQ ID NO: 1103624 - DNA, 15 bp, Homo sapiens
gttgaaacggcccca

SEQ ID NO: 1103625 - DNA, 15 bp, Homo sapiens
ggttgaaacggcccc

SEQ ID NO: 1103626 - DNA, 15 bp, Homo sapiens
aggttgaaacggccc

SEQ ID NO: 1103627 - DNA, 15 bp, Homo sapiens
taggttgaaacggcc

SEQ ID NO: 1103628 - DNA, 15 bp, Homo sapiens
ttaggttgaaacggc

SEQ ID NO: 1103629 - DNA, 15 bp, Homo sapiens
attaggttgaaacgg

SEQ ID NO: 1103630 - DNA, 15 bp, Homo sapiens
cattaggttgaaacg

SEQ ID NO: 1103631 - DNA, 15 bp, Homo sapiens
ccattaggttgaaac

SEQ ID NO: 1103632 - DNA, 15 bp, Homo sapiens
accattaggttgaaa

SEQ ID NO: 1103633 - DNA, 15 bp, Homo sapiens
gaccattaggttgaa

SEQ ID NO: 1103634 - DNA, 15 bp, Homo sapiens
agaccattaggttga

SEQ ID NO: 1103635 - DNA, 15 bp, Homo sapiens
gagaccattaggttg

SEQ ID NO: 1103636 - DNA, 15 bp, Homo sapiens
ggagaccattaggtt

SEQ ID NO: 1103637 - DNA, 15 bp, Homo sapiens
gggagaccattaggt

SEQ ID NO: 1103638 - DNA, 15 bp, Homo sapiens
tgggagaccattagg

SEQ ID NO: 1103639 - DNA, 15 bp, Homo sapiens
ttgggagaccattag

SEQ ID NO: 1103640 - DNA, 15 bp, Homo sapiens
attgggagaccatta

SEQ ID NO: 1103641 - DNA, 15 bp, Homo sapiens
aattgggagaccatt

SEQ ID NO: 1103642 - DNA, 15 bp, Homo sapiens
taattgggagaccat

SEQ ID NO: 1103643 - DNA, 15 bp, Homo sapiens
ttaattgggagacca

SEQ ID NO: 1103644 - DNA, 15 bp, Homo sapiens
attaattgggagacc

SEQ ID NO: 1103645 - DNA, 15 bp, Homo sapiens
aattaattgggagac

SEQ ID NO: 1103646 - DNA, 15 bp, Homo sapiens
aaattaattgggaga

SEQ ID NO: 1103647 - DNA, 15 bp, Homo sapiens
aaaattaattgggag

SEQ ID NO: 1103648 - DNA, 15 bp, Homo sapiens
aaaaattaattggga

SEQ ID NO: 1103649 - DNA, 15 bp, Homo sapiens
aaaaaattaattggg

SEQ ID NO: 1103650 - DNA, 15 bp, Homo sapiens
aaaaaaattaattgg

SEQ ID NO: 1103651 - DNA, 15 bp, Homo sapiens
taaaaaaattaattg

SEQ ID NO: 1103652 - DNA, 15 bp, Homo sapiens
ttaaaaaaattaatt

SEQ ID NO: 1103653 - DNA, 15 bp, Homo sapiens
gttaaaaaaattaat

SEQ ID NO: 1103654 - DNA, 15 bp, Homo sapiens
tgttaaaaaaattaa

SEQ ID NO: 1103655 - DNA, 15 bp, Homo sapiens
atgttaaaaaaatta

SEQ ID NO: 1103656 - DNA, 15 bp, Homo sapiens
aatgttaaaaaaatt

SEQ ID NO: 1103657 - DNA, 15 bp, Homo sapiens
taatgttaaaaaaat

SEQ ID NO: 1103658 - DNA, 15 bp, Homo sapiens
gtaatgttaaaaaaa

SEQ ID NO: 1103659 - DNA, 15 bp, Homo sapiens
agtaatgttaaaaaa

SEQ ID NO: 1103660 - DNA, 15 bp, Homo sapiens
cagtaatgttaaaaa

SEQ ID NO: 1103661 - DNA, 15 bp, Homo sapiens
tcagtaatgttaaaa

SEQ ID NO: 1103662 - DNA, 15 bp, Homo sapiens
atcagtaatgttaaa

SEQ ID NO: 1103663 - DNA, 15 bp, Homo sapiens
catcagtaatgttaa

SEQ ID NO: 1103664 - DNA, 15 bp, Homo sapiens
tcatcagtaatgtta

SEQ ID NO: 1103665 - DNA, 15 bp, Homo sapiens
gtcatcagtaatgtt

SEQ ID NO: 1103666 - DNA, 15 bp, Homo sapiens
agtcatcagtaatgt

SEQ ID NO: 1103667 - DNA, 15 bp, Homo sapiens
cagtcatcagtaatg

SEQ ID NO: 1103668 - DNA, 15 bp, Homo sapiens
acagtcatcagtaat

SEQ ID NO: 1103669 - DNA, 15 bp, Homo sapiens
aacagtcatcagtaa

SEQ ID NO: 1103670 - DNA, 15 bp, Homo sapiens
taacagtcatcagta

SEQ ID NO: 1103671 - DNA, 15 bp, Homo sapiens
ctaacagtcatcagt

SEQ ID NO: 1103672 - DNA, 15 bp, Homo sapiens
cctaacagtcatcag

SEQ ID NO: 1103673 - DNA, 15 bp, Homo sapiens
tcctaacagtcatca

SEQ ID NO: 1103674 - DNA, 15 bp, Homo sapiens
ctcctaacagtcatc

SEQ ID NO: 1103675 - DNA, 15 bp, Homo sapiens
actcctaacagtcat

SEQ ID NO: 1103676 - DNA, 15 bp, Homo sapiens
gactcctaacagtca

SEQ ID NO: 1103677 - DNA, 15 bp, Homo sapiens
agactcctaacagtc

SEQ ID NO: 1103678 - DNA, 15 bp, Homo sapiens
tagactcctaacagt

SEQ ID NO: 1103679 - DNA, 15 bp, Homo sapiens
ttagactcctaacag

SEQ ID NO: 1103680 - DNA, 15 bp, Homo sapiens
attagactcctaaca

SEQ ID NO: 1103681 - DNA, 15 bp, Homo sapiens
cattagactcctaac

SEQ ID NO: 1103682 - DNA, 15 bp, Homo sapiens
acattagactcctaa

SEQ ID NO: 1103683 - DNA, 15 bp, Homo sapiens
cacattagactccta

SEQ ID NO: 1103684 - DNA, 15 bp, Homo sapiens
gcacattagactcct

SEQ ID NO: 1103685 - DNA, 15 bp, Homo sapiens
agcacattagactcc

SEQ ID NO: 1103686 - DNA, 15 bp, Homo sapiens
tagcacattagactc

SEQ ID NO: 1103687 - DNA, 15 bp, Homo sapiens
gtagcacattagact

SEQ ID NO: 1103688 - DNA, 15 bp, Homo sapiens
agtagcacattagac

SEQ ID NO: 1103689 - DNA, 15 bp, Homo sapiens
gagtagcacattaga

SEQ ID NO: 1103690 - DNA, 15 bp, Homo sapiens
ggagtagcacattag

SEQ ID NO: 1103691 - DNA, 15 bp, Homo sapiens
aggagtagcacatta

SEQ ID NO: 1103692 - DNA, 15 bp, Homo sapiens
gaggagtagcacatt

SEQ ID NO: 1103693 - DNA, 15 bp, Homo sapiens
ggaggagtagcacat

SEQ ID NO: 1103694 - DNA, 15 bp, Homo sapiens
gggaggagtagcaca

SEQ ID NO: 1103695 - DNA, 15 bp, Homo sapiens
tgggaggagtagcac

SEQ ID NO: 1103696 - DNA, 15 bp, Homo sapiens
ctgggaggagtagca

SEQ ID NO: 1103697 - DNA, 15 bp, Homo sapiens
cctgggaggagtagc

SEQ ID NO: 1103698 - DNA, 15 bp, Homo sapiens
ccctgggaggagtag

SEQ ID NO: 1103699 - DNA, 15 bp, Homo sapiens
tccctgggaggagta

SEQ ID NO: 1103700 - DNA, 15 bp, Homo sapiens
ttccctgggaggagt

SEQ ID NO: 1103701 - DNA, 15 bp, Homo sapiens
tttccctgggaggag

SEQ ID NO: 1103702 - DNA, 15 bp, Homo sapiens
ttttccctgggagga

SEQ ID NO: 1103703 - DNA, 15 bp, Homo sapiens
attttccctgggagg

SEQ ID NO: 1103704 - DNA, 15 bp, Homo sapiens
cattttccctgggag

SEQ ID NO: 1103705 - DNA, 15 bp, Homo sapiens
ccattttccctggga

SEQ ID NO: 1103706 - DNA, 15 bp, Homo sapiens
gccattttccctggg

SEQ ID NO: 1103707 - DNA, 15 bp, Homo sapiens
tgccattttccctgg

SEQ ID NO: 1103708 - DNA, 15 bp, Homo sapiens
atgccattttccctg

SEQ ID NO: 1103709 - DNA, 15 bp, Homo sapiens
aatgccattttccct

SEQ ID NO: 1103710 - DNA, 15 bp, Homo sapiens
gaatgccattttccc

SEQ ID NO: 1103711 - DNA, 15 bp, Homo sapiens
ggaatgccattttcc

SEQ ID NO: 1103712 - DNA, 15 bp, Homo sapiens
aggaatgccattttc

SEQ ID NO: 1103713 - DNA, 15 bp, Homo sapiens
taggaatgccatttt

SEQ ID NO: 1103714 - DNA, 15 bp, Homo sapiens
ctaggaatgccattt

SEQ ID NO: 1103715 - DNA, 15 bp, Homo sapiens
cctaggaatgccatt

SEQ ID NO: 1103716 - DNA, 15 bp, Homo sapiens
tcctaggaatgccat

SEQ ID NO: 1103717 - DNA, 15 bp, Homo sapiens
atcctaggaatgcca

SEQ ID NO: 1103718 - DNA, 15 bp, Homo sapiens
aatcctaggaatgcc

SEQ ID NO: 1103719 - DNA, 15 bp, Homo sapiens
taatcctaggaatgc

SEQ ID NO: 1103720 - DNA, 15 bp, Homo sapiens
ttaatcctaggaatg

SEQ ID NO: 1103721 - DNA, 15 bp, Homo sapiens
tttaatcctaggaat

SEQ ID NO: 1103722 - DNA, 15 bp, Homo sapiens
ctttaatcctaggaa

SEQ ID NO: 1103723 - DNA, 15 bp, Homo sapiens
cctttaatcctagga

SEQ ID NO: 1103724 - DNA, 15 bp, Homo sapiens
tcctttaatcctagg

SEQ ID NO: 1103725 - DNA, 15 bp, Homo sapiens
ttcctttaatcctag

SEQ ID NO: 1103726 - DNA, 15 bp, Homo sapiens
gttcctttaatccta

SEQ ID NO: 1103727 - DNA, 15 bp, Homo sapiens
agttcctttaatcct

SEQ ID NO: 1103728 - DNA, 15 bp, Homo sapiens
gagttcctttaatcc

SEQ ID NO: 1103729 - DNA, 15 bp, Homo sapiens
tgagttcctttaatc

SEQ ID NO: 1103730 - DNA, 15 bp, Homo sapiens
ctgagttcctttaat

SEQ ID NO: 1103731 - DNA, 15 bp, Homo sapiens
gctgagttcctttaa

SEQ ID NO: 1103732 - DNA, 15 bp, Homo sapiens
tgctgagttccttta

SEQ ID NO: 1103733 - DNA, 15 bp, Homo sapiens
gtgctgagttccttt

SEQ ID NO: 1103734 - DNA, 15 bp, Homo sapiens
tgtgctgagttcctt

SEQ ID NO: 1103735 - DNA, 15 bp, Homo sapiens
atgtgctgagttcct

SEQ ID NO: 1103736 - DNA, 15 bp, Homo sapiens
catgtgctgagttcc

SEQ ID NO: 1103737 - DNA, 15 bp, Homo sapiens
ccatgtgctgagttc

SEQ ID NO: 1103738 - DNA, 15 bp, Homo sapiens
tccatgtgctgagtt

SEQ ID NO: 1103739 - DNA, 15 bp, Homo sapiens
ctccatgtgctgagt

SEQ ID NO: 1103740 - DNA, 15 bp, Homo sapiens
actccatgtgctgag

SEQ ID NO: 1103741 - DNA, 15 bp, Homo sapiens
cactccatgtgctga

SEQ ID NO: 1103742 - DNA, 15 bp, Homo sapiens
acactccatgtgctg

SEQ ID NO: 1103743 - DNA, 15 bp, Homo sapiens
cacactccatgtgct

SEQ ID NO: 1103744 - DNA, 15 bp, Homo sapiens
gcacactccatgtgc

SEQ ID NO: 1103745 - DNA, 15 bp, Homo sapiens
cgcacactccatgtg

SEQ ID NO: 1103746 - DNA, 15 bp, Homo sapiens
acgcacactccatgt

SEQ ID NO: 1103747 - DNA, 15 bp, Homo sapiens
tacgcacactccatg

SEQ ID NO: 1103748 - DNA, 15 bp, Homo sapiens
ctacgcacactccat

SEQ ID NO: 1103749 - DNA, 15 bp, Homo sapiens
tctacgcacactcca

SEQ ID NO: 1103750 - DNA, 15 bp, Homo sapiens
ttctacgcacactcc

SEQ ID NO: 1103751 - DNA, 15 bp, Homo sapiens
tttctacgcacactc

SEQ ID NO: 1103752 - DNA, 15 bp, Homo sapiens
atttctacgcacact

SEQ ID NO: 1103753 - DNA, 15 bp, Homo sapiens
aatttctacgcacac

SEQ ID NO: 1103754 - DNA, 15 bp, Homo sapiens
aaatttctacgcaca

SEQ ID NO: 1103755 - DNA, 15 bp, Homo sapiens
taaatttctacgcac

SEQ ID NO: 1103756 - DNA, 15 bp, Homo sapiens
ctaaatttctacgca

SEQ ID NO: 1103757 - DNA, 15 bp, Homo sapiens
tctaaatttctacgc

SEQ ID NO: 1103758 - DNA, 15 bp, Homo sapiens
gtctaaatttctacg

SEQ ID NO: 1103759 - DNA, 15 bp, Homo sapiens
tgtctaaatttctac

SEQ ID NO: 1103760 - DNA, 15 bp, Homo sapiens
gtgtctaaatttcta

SEQ ID NO: 1103761 - DNA, 15 bp, Homo sapiens
agtgtctaaatttct

SEQ ID NO: 1103762 - DNA, 15 bp, Homo sapiens
tagtgtctaaatttc

SEQ ID NO: 1103763 - DNA, 15 bp, Homo sapiens
ttagtgtctaaattt

SEQ ID NO: 1103764 - DNA, 15 bp, Homo sapiens
gttagtgtctaaatt

SEQ ID NO: 1103765 - DNA, 15 bp, Homo sapiens
agttagtgtctaaat

SEQ ID NO: 1103766 - DNA, 15 bp, Homo sapiens
cagttagtgtctaaa

SEQ ID NO: 1103767 - DNA, 15 bp, Homo sapiens
gcagttagtgtctaa

SEQ ID NO: 1103768 - DNA, 15 bp, Homo sapiens
tgcagttagtgtcta

SEQ ID NO: 1103769 - DNA, 15 bp, Homo sapiens
ctgcagttagtgtct

SEQ ID NO: 1103770 - DNA, 15 bp, Homo sapiens
cctgcagttagtgtc

SEQ ID NO: 1103771 - DNA, 15 bp, Homo sapiens
gcctgcagttagtgt

SEQ ID NO: 1103772 - DNA, 15 bp, Homo sapiens
agcctgcagttagtg

SEQ ID NO: 1103773 - DNA, 15 bp, Homo sapiens
cagcctgcagttagt

SEQ ID NO: 1103774 - DNA, 15 bp, Homo sapiens
ccagcctgcagttag

SEQ ID NO: 1103775 - DNA, 15 bp, Homo sapiens
accagcctgcagtta

SEQ ID NO: 1103776 - DNA, 15 bp, Homo sapiens
caccagcctgcagtt

SEQ ID NO: 1103777 - DNA, 15 bp, Homo sapiens
ccaccagcctgcagt

SEQ ID NO: 1103778 - DNA, 15 bp, Homo sapiens
cccaccagcctgcag

SEQ ID NO: 1103779 - DNA, 15 bp, Homo sapiens
tcccaccagcctgca

SEQ ID NO: 1103780 - DNA, 15 bp, Homo sapiens
ctcccaccagcctgc

SEQ ID NO: 1103781 - DNA, 15 bp, Homo sapiens
tctcccaccagcctg

SEQ ID NO: 1103782 - DNA, 15 bp, Homo sapiens
tctctcccaccagcc

SEQ ID NO: 1103783 - DNA, 15 bp, Homo sapiens
ctctctcccaccagc

SEQ ID NO: 1103784 - DNA, 15 bp, Homo sapiens
gctctctcccaccag

SEQ ID NO: 1103785 - DNA, 15 bp, Homo sapiens
ggctctctcccacca

SEQ ID NO: 1103786 - DNA, 15 bp, Homo sapiens
gggctctctcccacc

SEQ ID NO: 1103787 - DNA, 15 bp, Homo sapiens
agggctctctcccac

SEQ ID NO: 1103788 - DNA, 15 bp, Homo sapiens
aagggctctctccca

SEQ ID NO: 1103789 - DNA, 15 bp, Homo sapiens
aaagggctctctccc

SEQ ID NO: 1103790 - DNA, 15 bp, Homo sapiens
taaagggctctctcc

SEQ ID NO: 1103791 - DNA, 15 bp, Homo sapiens
ctaaagggctctctc

SEQ ID NO: 1103792 - DNA, 15 bp, Homo sapiens
cctaaagggctctct

SEQ ID NO: 1103793 - DNA, 15 bp, Homo sapiens
ccctaaagggctctc

SEQ ID NO: 1103794 - DNA, 15 bp, Homo sapiens
gccctaaagggctct

SEQ ID NO: 1103795 - DNA, 15 bp, Homo sapiens
tgccctaaagggctc

SEQ ID NO: 1103796 - DNA, 15 bp, Homo sapiens
ctgccctaaagggct

SEQ ID NO: 1103797 - DNA, 15 bp, Homo sapiens
tctgccctaaagggc

SEQ ID NO: 1103798 - DNA, 15 bp, Homo sapiens
ttctgccctaaaggg

SEQ ID NO: 1103799 - DNA, 15 bp, Homo sapiens
attctgccctaaagg

SEQ ID NO: 1103800 - DNA, 15 bp, Homo sapiens
cattctgccctaaag

SEQ ID NO: 1103801 - DNA, 15 bp, Homo sapiens
tcattctgccctaaa

SEQ ID NO: 1103802 - DNA, 15 bp, Homo sapiens
ctcattctgccctaa

SEQ ID NO: 1103803 - DNA, 15 bp, Homo sapiens
tctcattctgcccta

SEQ ID NO: 1103804 - DNA, 15 bp, Homo sapiens
ttctcattctgccct

SEQ ID NO: 1103805 - DNA, 15 bp, Homo sapiens
cttctcattctgccc

SEQ ID NO: 1103806 - DNA, 15 bp, Homo sapiens
ccttctcattctgcc

SEQ ID NO: 1103807 - DNA, 15 bp, Homo sapiens
gccttctcattctgc

SEQ ID NO: 1103808 - DNA, 15 bp, Homo sapiens
cgccttctcattctg

SEQ ID NO: 1103809 - DNA, 15 bp, Homo sapiens
acgccttctcattct

SEQ ID NO: 1103810 - DNA, 15 bp, Homo sapiens
gacgccttctcattc

SEQ ID NO: 1103811 - DNA, 15 bp, Homo sapiens
ggacgccttctcatt

SEQ ID NO: 1103812 - DNA, 15 bp, Homo sapiens
cggacgccttctcat

SEQ ID NO: 1103813 - DNA, 15 bp, Homo sapiens
ccggacgccttctca

SEQ ID NO: 1103814 - DNA, 15 bp, Homo sapiens
gccggacgccttctc

SEQ ID NO: 1103815 - DNA, 15 bp, Homo sapiens
ggccggacgccttct

SEQ ID NO: 1103816 - DNA, 15 bp, Homo sapiens
tggccggacgccttc

SEQ ID NO: 1103817 - DNA, 15 bp, Homo sapiens
ttggccggacgcctt

SEQ ID NO: 1103818 - DNA, 15 bp, Homo sapiens
cttggccggacgcct

SEQ ID NO: 1103819 - DNA, 15 bp, Homo sapiens
ccttggccggacgcc

SEQ ID NO: 1103820 - DNA, 15 bp, Homo sapiens
cccttggccggacgc

SEQ ID NO: 1103821 - DNA, 15 bp, Homo sapiens
gcccttggccggacg

SEQ ID NO: 1103822 - DNA, 15 bp, Homo sapiens
tgcccttggccggac

SEQ ID NO: 1103823 - DNA, 15 bp, Homo sapiens
ctgcccttggccgga

SEQ ID NO: 1103824 - DNA, 15 bp, Homo sapiens
cctgcccttggccgg

SEQ ID NO: 1103825 - DNA, 15 bp, Homo sapiens
tcctgcccttggccg

SEQ ID NO: 1103826 - DNA, 15 bp, Homo sapiens
ctcctgcccttggcc

SEQ ID NO: 1103827 - DNA, 15 bp, Homo sapiens
actcctgcccttggc

SEQ ID NO: 1103828 - DNA, 15 bp, Homo sapiens
aactcctgcccttgg

SEQ ID NO: 1103829 - DNA, 15 bp, Homo sapiens
taactcctgcccttg

SEQ ID NO: 1103830 - DNA, 15 bp, Homo sapiens
gtaactcctgccctt

SEQ ID NO: 1103831 - DNA, 15 bp, Homo sapiens
agtaactcctgccct

SEQ ID NO: 1103832 - DNA, 15 bp, Homo sapiens
cagtaactcctgccc

SEQ ID NO: 1103833 - DNA, 15 bp, Homo sapiens
tcagtaactcctgcc

SEQ ID NO: 1103834 - DNA, 15 bp, Homo sapiens
gtcagtaactcctgc

SEQ ID NO: 1103835 - DNA, 15 bp, Homo sapiens
cgtcagtaactcctg

SEQ ID NO: 1103836 - DNA, 15 bp, Homo sapiens
gcgtcagtaactcct

SEQ ID NO: 1103837 - DNA, 15 bp, Homo sapiens
tgcgtcagtaactcc

SEQ ID NO: 1103838 - DNA, 15 bp, Homo sapiens
atgcgtcagtaactc

SEQ ID NO: 1103839 - DNA, 15 bp, Homo sapiens
catgcgtcagtaact

SEQ ID NO: 1103840 - DNA, 15 bp, Homo sapiens
ccatgcgtcagtaac

SEQ ID NO: 1103841 - DNA, 15 bp, Homo sapiens
gccatgcgtcagtaa

SEQ ID NO: 1103842 - DNA, 15 bp, Homo sapiens
ggccatgcgtcagta

SEQ ID NO: 1103843 - DNA, 15 bp, Homo sapiens
aggccatgcgtcagt

SEQ ID NO: 1103844 - DNA, 15 bp, Homo sapiens
gaggccatgcgtcag

SEQ ID NO: 1103845 - DNA, 15 bp, Homo sapiens
agaggccatgcgtca

SEQ ID NO: 1103846 - DNA, 15 bp, Homo sapiens
aagaggccatgcgtc

SEQ ID NO: 1103847 - DNA, 15 bp, Homo sapiens
caagaggccatgcgt

SEQ ID NO: 1103848 - DNA, 15 bp, Homo sapiens
ccaagaggccatgcg

SEQ ID NO: 1103849 - DNA, 15 bp, Homo sapiens
accaagaggccatgc

SEQ ID NO: 1103850 - DNA, 15 bp, Homo sapiens
aaccaagaggccatg

SEQ ID NO: 1103851 - DNA, 15 bp, Homo sapiens
aaaccaagaggccat

SEQ ID NO: 1103852 - DNA, 15 bp, Homo sapiens
gaaaccaagaggcca

SEQ ID NO: 1103853 - DNA, 15 bp, Homo sapiens
tgaaaccaagaggcc

SEQ ID NO: 1103854 - DNA, 15 bp, Homo sapiens
ctgaaaccaagaggc

SEQ ID NO: 1103855 - DNA, 15 bp, Homo sapiens
gctgaaaccaagagg

SEQ ID NO: 1103856 - DNA, 15 bp, Homo sapiens
tgctgaaaccaagag

SEQ ID NO: 1103857 - DNA, 15 bp, Homo sapiens
atgctgaaaccaaga

SEQ ID NO: 1103858 - DNA, 15 bp, Homo sapiens
catgctgaaaccaag

SEQ ID NO: 1103859 - DNA, 15 bp, Homo sapiens
ccatgctgaaaccaa

SEQ ID NO: 1103860 - DNA, 15 bp, Homo sapiens
tccatgctgaaacca

SEQ ID NO: 1103861 - DNA, 15 bp, Homo sapiens
ttccatgctgaaacc

SEQ ID NO: 1103862 - DNA, 15 bp, Homo sapiens
ccctggcacctgcac

SEQ ID NO: 1103863 - DNA, 15 bp, Homo sapiens
gccctggcacctgca

SEQ ID NO: 1103864 - DNA, 15 bp, Homo sapiens
agccctggcacctgc

SEQ ID NO: 1103865 - DNA, 15 bp, Homo sapiens
cagccctggcacctg

SEQ ID NO: 1103866 - DNA, 15 bp, Homo sapiens
ccagccctggcacct

SEQ ID NO: 1103867 - DNA, 15 bp, Homo sapiens
cccagccctggcacc

SEQ ID NO: 1103868 - DNA, 15 bp, Homo sapiens
ccccagccctggcac

SEQ ID NO: 1103869 - DNA, 15 bp, Homo sapiens
gccccagccctggca

SEQ ID NO: 1103870 - DNA, 15 bp, Homo sapiens
agccccagccctggc

SEQ ID NO: 1103871 - DNA, 15 bp, Homo sapiens
cagccccagccctgg

SEQ ID NO: 1103872 - DNA, 15 bp, Homo sapiens
gcagccccagccctg

SEQ ID NO: 1103873 - DNA, 15 bp, Homo sapiens
ggcagccccagccct

SEQ ID NO: 1103874 - DNA, 15 bp, Homo sapiens
tggcagccccagccc

SEQ ID NO: 1103875 - DNA, 15 bp, Homo sapiens
gtggcagccccagcc

SEQ ID NO: 1103876 - DNA, 15 bp, Homo sapiens
ggtggcagccccagc

SEQ ID NO: 1103877 - DNA, 15 bp, Homo sapiens
gggtggcagccccag

SEQ ID NO: 1103878 - DNA, 15 bp, Homo sapiens
tgggtggcagcccca

SEQ ID NO: 1103879 - DNA, 15 bp, Homo sapiens
ctgggtggcagcccc

SEQ ID NO: 1103880 - DNA, 15 bp, Homo sapiens
gctgggtggcagccc

SEQ ID NO: 1103881 - DNA, 15 bp, Homo sapiens
ggctgggtggcagcc

SEQ ID NO: 1103882 - DNA, 15 bp, Homo sapiens
aggctgggtggcagc

SEQ ID NO: 1103883 - DNA, 15 bp, Homo sapiens
aaggctgggtggcag

SEQ ID NO: 1103884 - DNA, 15 bp, Homo sapiens
gaaggctgggtggca

SEQ ID NO: 1103885 - DNA, 15 bp, Homo sapiens
cgaaggctgggtggc

SEQ ID NO: 1103886 - DNA, 15 bp, Homo sapiens
gcgaaggctgggtgg

SEQ ID NO: 1103887 - DNA, 15 bp, Homo sapiens
tgcgaaggctgggtg

SEQ ID NO: 1103888 - DNA, 15 bp, Homo sapiens
atgcgaaggctgggt

SEQ ID NO: 1103889 - DNA, 15 bp, Homo sapiens
gatgcgaaggctggg

SEQ ID NO: 1103890 - DNA, 15 bp, Homo sapiens
ggatgcgaaggctgg

SEQ ID NO: 1103891 - DNA, 15 bp, Homo sapiens
gggatgcgaaggctg

SEQ ID NO: 1103892 - DNA, 15 bp, Homo sapiens
tgggatgcgaaggct

SEQ ID NO: 1103893 - DNA, 15 bp, Homo sapiens
ctgggatgcgaaggc

SEQ ID NO: 1103894 - DNA, 15 bp, Homo sapiens
cctgggatgcgaagg

SEQ ID NO: 1103895 - DNA, 15 bp, Homo sapiens
gcctgggatgcgaag

SEQ ID NO: 1103896 - DNA, 15 bp, Homo sapiens
ggcctgggatgcgaa

SEQ ID NO: 1103897 - DNA, 15 bp, Homo sapiens
aggcctgggatgcga

SEQ ID NO: 1103898 - DNA, 15 bp, Homo sapiens
caggcctgggatgcg

SEQ ID NO: 1103899 - DNA, 15 bp, Homo sapiens
ccaggcctgggatgc

SEQ ID NO: 1103900 - DNA, 15 bp, Homo sapiens
gccaggcctgggatg

SEQ ID NO: 1103901 - DNA, 15 bp, Homo sapiens
tgccaggcctgggat

SEQ ID NO: 1103902 - DNA, 15 bp, Homo sapiens
gtgccaggcctggga

SEQ ID NO: 1103903 - DNA, 15 bp, Homo sapiens
cgtgccaggcctggg

SEQ ID NO: 1103904 - DNA, 15 bp, Homo sapiens
acgtgccaggcctgg

SEQ ID NO: 1103905 - DNA, 15 bp, Homo sapiens
gacgtgccaggcctg

SEQ ID NO: 1103906 - DNA, 15 bp, Homo sapiens
tgacgtgccaggcct

SEQ ID NO: 1103907 - DNA, 15 bp, Homo sapiens
atgacgtgccaggcc

SEQ ID NO: 1103908 - DNA, 15 bp, Homo sapiens
tatgacgtgccaggc

SEQ ID NO: 1103909 - DNA, 15 bp, Homo sapiens
ctatgacgtgccagg

SEQ ID NO: 1103910 - DNA, 15 bp, Homo sapiens
cctatgacgtgccag

SEQ ID NO: 1103911 - DNA, 15 bp, Homo sapiens
acctatgacgtgcca

SEQ ID NO: 1103912 - DNA, 15 bp, Homo sapiens
tacctatgacgtgcc

SEQ ID NO: 1103913 - DNA, 15 bp, Homo sapiens
ttacctatgacgtgc

SEQ ID NO: 1103914 - DNA, 15 bp, Homo sapiens
tttacctatgacgtg

SEQ ID NO: 1103915 - DNA, 15 bp, Homo sapiens
atttacctatgacgt

SEQ ID NO: 1103916 - DNA, 15 bp, Homo sapiens
catttacctatgacg

SEQ ID NO: 1103917 - DNA, 15 bp, Homo sapiens
acatttacctatgac

SEQ ID NO: 1103918 - DNA, 15 bp, Homo sapiens
tacatttacctatga

SEQ ID NO: 1103919 - DNA, 15 bp, Homo sapiens
ctacatttacctatg

SEQ ID NO: 1103920 - DNA, 15 bp, Homo sapiens
actacatttacctat

SEQ ID NO: 1103921 - DNA, 15 bp, Homo sapiens
aactacatttaccta

SEQ ID NO: 1103922 - DNA, 15 bp, Homo sapiens
caactacatttacct

SEQ ID NO: 1103923 - DNA, 15 bp, Homo sapiens
tcaactacatttacc

SEQ ID NO: 1103924 - DNA, 15 bp, Homo sapiens
ttcaactacatttac

SEQ ID NO: 1103925 - DNA, 15 bp, Homo sapiens
tttcaactacattta

SEQ ID NO: 1103926 - DNA, 15 bp, Homo sapiens
ctttcaactacattt

SEQ ID NO: 1103927 - DNA, 15 bp, Homo sapiens
cctttcaactacatt

SEQ ID NO: 1103928 - DNA, 15 bp, Homo sapiens
tcctttcaactacat

SEQ ID NO: 1103929 - DNA, 15 bp, Homo sapiens
atcctttcaactaca

SEQ ID NO: 1103930 - DNA, 15 bp, Homo sapiens
catcctttcaactac

SEQ ID NO: 1103931 - DNA, 15 bp, Homo sapiens
tcatcctttcaacta

SEQ ID NO: 1103932 - DNA, 15 bp, Homo sapiens
gtcatcctttcaact

SEQ ID NO: 1103933 - DNA, 15 bp, Homo sapiens
agtcatcctttcaac

SEQ ID NO: 1103934 - DNA, 15 bp, Homo sapiens
cagtcatcctttcaa

SEQ ID NO: 1103935 - DNA, 15 bp, Homo sapiens
tcagtcatcctttca

SEQ ID NO: 1103936 - DNA, 15 bp, Homo sapiens
ctcagtcatcctttc

SEQ ID NO: 1103937 - DNA, 15 bp, Homo sapiens
gctcagtcatccttt

SEQ ID NO: 1103938 - DNA, 15 bp, Homo sapiens
agctcagtcatcctt

SEQ ID NO: 1103939 - DNA, 15 bp, Homo sapiens
cagctcagtcatcct

SEQ ID NO: 1103940 - DNA, 15 bp, Homo sapiens
tcagctcagtcatcc

SEQ ID NO: 1103941 - DNA, 15 bp, Homo sapiens
atcagctcagtcatc

SEQ ID NO: 1103942 - DNA, 15 bp, Homo sapiens
gatcagctcagtcat

SEQ ID NO: 1103943 - DNA, 15 bp, Homo sapiens
ggatcagctcagtca

SEQ ID NO: 1103944 - DNA, 15 bp, Homo sapiens
tggatcagctcagtc

SEQ ID NO: 1103945 - DNA, 15 bp, Homo sapiens
ttggatcagctcagt

SEQ ID NO: 1103946 - DNA, 15 bp, Homo sapiens
attggatcagctcag

SEQ ID NO: 1103947 - DNA, 15 bp, Homo sapiens
aattggatcagctca

SEQ ID NO: 1103948 - DNA, 15 bp, Homo sapiens
gaattggatcagctc

SEQ ID NO: 1103949 - DNA, 15 bp, Homo sapiens
ggaattggatcagct

SEQ ID NO: 1103950 - DNA, 15 bp, Homo sapiens
gggaattggatcagc

SEQ ID NO: 1103951 - DNA, 15 bp, Homo sapiens
agggaattggatcag

SEQ ID NO: 1103952 - DNA, 15 bp, Homo sapiens
aagggaattggatca

SEQ ID NO: 1103953 - DNA, 15 bp, Homo sapiens
aaagggaattggatc

SEQ ID NO: 1103954 - DNA, 15 bp, Homo sapiens
taaagggaattggat

SEQ ID NO: 1103955 - DNA, 15 bp, Homo sapiens
gtaaagggaattgga

SEQ ID NO: 1103956 - DNA, 15 bp, Homo sapiens
tgtaaagggaattgg

SEQ ID NO: 1103957 - DNA, 15 bp, Homo sapiens
ttgtaaagggaattg

SEQ ID NO: 1103958 - DNA, 15 bp, Homo sapiens
gttgtaaagggaatt

SEQ ID NO: 1103959 - DNA, 15 bp, Homo sapiens
agttgtaaagggaat

SEQ ID NO: 1103960 - DNA, 15 bp, Homo sapiens
cagttgtaaagggaa

SEQ ID NO: 1103961 - DNA, 15 bp, Homo sapiens
acagttgtaaaggga

SEQ ID NO: 1103962 - DNA, 15 bp, Homo sapiens
gacagttgtaaaggg

SEQ ID NO: 1103963 - DNA, 15 bp, Homo sapiens
ggacagttgtaaagg

SEQ ID NO: 1103964 - DNA, 15 bp, Homo sapiens
aggacagttgtaaag

SEQ ID NO: 1103965 - DNA, 15 bp, Homo sapiens
aaggacagttgtaaa

SEQ ID NO: 1103966 - DNA, 15 bp, Homo sapiens
caaggacagttgtaa

SEQ ID NO: 1103967 - DNA, 15 bp, Homo sapiens
acaaggacagttgta

SEQ ID NO: 1103968 - DNA, 15 bp, Homo sapiens
gacaaggacagttgt

SEQ ID NO: 1103969 - DNA, 15 bp, Homo sapiens
ggacaaggacagttg

SEQ ID NO: 1103970 - DNA, 15 bp, Homo sapiens
aggacaaggacagtt

SEQ ID NO: 1103971 - DNA, 15 bp, Homo sapiens
caggacaaggacagt

SEQ ID NO: 1103972 - DNA, 15 bp, Homo sapiens
ccaggacaaggacag

SEQ ID NO: 1103973 - DNA, 15 bp, Homo sapiens
cccaggacaaggaca

SEQ ID NO: 1103974 - DNA, 15 bp, Homo sapiens
ccccaggacaaggac

SEQ ID NO: 1103975 - DNA, 15 bp, Homo sapiens
cccccaggacaagga

SEQ ID NO: 1103976 - DNA, 15 bp, Homo sapiens
tcccccaggacaagg

SEQ ID NO: 1103977 - DNA, 15 bp, Homo sapiens
gtcccccaggacaag

SEQ ID NO: 1103978 - DNA, 15 bp, Homo sapiens
agtcccccaggacaa

SEQ ID NO: 1103979 - DNA, 15 bp, Homo sapiens
aagtcccccaggaca

SEQ ID NO: 1103980 - DNA, 15 bp, Homo sapiens
caagtcccccaggac

SEQ ID NO: 1103981 - DNA, 15 bp, Homo sapiens
tcaagtcccccagga

SEQ ID NO: 1103982 - DNA, 15 bp, Homo sapiens
ctcaagtcccccagg

SEQ ID NO: 1103983 - DNA, 15 bp, Homo sapiens
cctcaagtcccccag

SEQ ID NO: 1103984 - DNA, 15 bp, Homo sapiens
tcctcaagtccccca

SEQ ID NO: 1103985 - DNA, 15 bp, Homo sapiens
ctcctcaagtccccc

SEQ ID NO: 1103986 - DNA, 15 bp, Homo sapiens
cctcctcaagtcccc

SEQ ID NO: 1103987 - DNA, 15 bp, Homo sapiens
ccctcctcaagtccc

SEQ ID NO: 1103988 - DNA, 15 bp, Homo sapiens
accctcctcaagtcc

SEQ ID NO: 1103989 - DNA, 15 bp, Homo sapiens
aaccctcctcaagtc

SEQ ID NO: 1103990 - DNA, 15 bp, Homo sapiens
taaccctcctcaagt

SEQ ID NO: 1103991 - DNA, 15 bp, Homo sapiens
ttaaccctcctcaag

SEQ ID NO: 1103992 - DNA, 15 bp, Homo sapiens
cttaaccctcctcaa

SEQ ID NO: 1103993 - DNA, 15 bp, Homo sapiens
tcttaaccctcctca

SEQ ID NO: 1103994 - DNA, 15 bp, Homo sapiens
ttcttaaccctcctc

SEQ ID NO: 1103995 - DNA, 15 bp, Homo sapiens
tttcttaaccctcct

SEQ ID NO: 1103996 - DNA, 15 bp, Homo sapiens
ctttcttaaccctcc

SEQ ID NO: 1103997 - DNA, 15 bp, Homo sapiens
gctttcttaaccctc

SEQ ID NO: 1103998 - DNA, 15 bp, Homo sapiens
tgctttcttaaccct

SEQ ID NO: 1103999 - DNA, 15 bp, Homo sapiens
ctgctttcttaaccc

SEQ ID NO: 1104000 - DNA, 15 bp, Homo sapiens
gctgctttcttaacc

SEQ ID NO: 1104001 - DNA, 15 bp, Homo sapiens
agctgctttcttaac

SEQ ID NO: 1104002 - DNA, 15 bp, Homo sapiens
cagctgctttcttaa

SEQ ID NO: 1104003 - DNA, 15 bp, Homo sapiens
ccagctgctttctta

SEQ ID NO: 1104004 - DNA, 15 bp, Homo sapiens
cccagctgctttctt

SEQ ID NO: 1104005 - DNA, 15 bp, Homo sapiens
ccccagctgctttct

SEQ ID NO: 1104006 - DNA, 15 bp, Homo sapiens
tccccagctgctttc

SEQ ID NO: 1104007 - DNA, 15 bp, Homo sapiens
gtccccagctgcttt

SEQ ID NO: 1104008 - DNA, 15 bp, Homo sapiens
ggtccccagctgctt

SEQ ID NO: 1104009 - DNA, 15 bp, Homo sapiens
tggtccccagctgct

SEQ ID NO: 1104010 - DNA, 15 bp, Homo sapiens
ttggtccccagctgc

SEQ ID NO: 1104011 - DNA, 15 bp, Homo sapiens
gttggtccccagctg

SEQ ID NO: 1104012 - DNA, 15 bp, Homo sapiens
ggttggtccccagct

SEQ ID NO: 1104013 - DNA, 15 bp, Homo sapiens
tggttggtccccagc

SEQ ID NO: 1104014 - DNA, 15 bp, Homo sapiens
ttggttggtccccag

SEQ ID NO: 1104015 - DNA, 15 bp, Homo sapiens
gttggttggtcccca

SEQ ID NO: 1104016 - DNA, 15 bp, Homo sapiens
tgttggttggtcccc

SEQ ID NO: 1104017 - DNA, 15 bp, Homo sapiens
ctgttggttggtccc

SEQ ID NO: 1104018 - DNA, 15 bp, Homo sapiens
actgttggttggtcc

SEQ ID NO: 1104019 - DNA, 15 bp, Homo sapiens
gactgttggttggtc

SEQ ID NO: 1104020 - DNA, 15 bp, Homo sapiens
ggactgttggttggt

SEQ ID NO: 1104021 - DNA, 15 bp, Homo sapiens
aggactgttggttgg

SEQ ID NO: 1104022 - DNA, 15 bp, Homo sapiens
gaggactgttggttg

SEQ ID NO: 1104023 - DNA, 15 bp, Homo sapiens
agaggactgttggtt

SEQ ID NO: 1104024 - DNA, 15 bp, Homo sapiens
tagaggactgttggt

SEQ ID NO: 1104025 - DNA, 15 bp, Homo sapiens
ctagaggactgttgg

SEQ ID NO: 1104026 - DNA, 15 bp, Homo sapiens
cctagaggactgttg

SEQ ID NO: 1104027 - DNA, 15 bp, Homo sapiens
gcctagaggactgtt

SEQ ID NO: 1104028 - DNA, 15 bp, Homo sapiens
agcctagaggactgt

SEQ ID NO: 1104029 - DNA, 15 bp, Homo sapiens
gagcctagaggactg

SEQ ID NO: 1104030 - DNA, 15 bp, Homo sapiens
agagcctagaggact

SEQ ID NO: 1104031 - DNA, 15 bp, Homo sapiens
gagagcctagaggac

SEQ ID NO: 1104032 - DNA, 15 bp, Homo sapiens
ggagagcctagagga

SEQ ID NO: 1104033 - DNA, 15 bp, Homo sapiens
tggagagcctagagg

SEQ ID NO: 1104034 - DNA, 15 bp, Homo sapiens
atggagagcctagag

SEQ ID NO: 1104035 - DNA, 15 bp, Homo sapiens
catggagagcctaga

SEQ ID NO: 1104036 - DNA, 15 bp, Homo sapiens
acatggagagcctag

SEQ ID NO: 1104037 - DNA, 15 bp, Homo sapiens
gacatggagagccta

SEQ ID NO: 1104038 - DNA, 15 bp, Homo sapiens
ggacatggagagcct

SEQ ID NO: 1104039 - DNA, 15 bp, Homo sapiens
tggacatggagagcc

SEQ ID NO: 1104040 - DNA, 15 bp, Homo sapiens
ctggacatggagagc

SEQ ID NO: 1104041 - DNA, 15 bp, Homo sapiens
gctggacatggagag

SEQ ID NO: 1104042 - DNA, 15 bp, Homo sapiens
tgctggacatggaga

SEQ ID NO: 1104043 - DNA, 15 bp, Homo sapiens
ttgctggacatggag

SEQ ID NO: 1104044 - DNA, 15 bp, Homo sapiens
attgctggacatgga

SEQ ID NO: 1104045 - DNA, 15 bp, Homo sapiens
tattgctggacatgg

SEQ ID NO: 1104046 - DNA, 15 bp, Homo sapiens
ctattgctggacatg

SEQ ID NO: 1104047 - DNA, 15 bp, Homo sapiens
actattgctggacat

SEQ ID NO: 1104048 - DNA, 15 bp, Homo sapiens
aactattgctggaca

SEQ ID NO: 1104049 - DNA, 15 bp, Homo sapiens
caactattgctggac

SEQ ID NO: 1104050 - DNA, 15 bp, Homo sapiens
acaactattgctgga

SEQ ID NO: 1104051 - DNA, 15 bp, Homo sapiens
aacaactattgctgg

SEQ ID NO: 1104052 - DNA, 15 bp, Homo sapiens
gaacaactattgctg

SEQ ID NO: 1104053 - DNA, 15 bp, Homo sapiens
tgaacaactattgct

SEQ ID NO: 1104054 - DNA, 15 bp, Homo sapiens
ctgaacaactattgc

SEQ ID NO: 1104055 - DNA, 15 bp, Homo sapiens
gctgaacaactattg

SEQ ID NO: 1104056 - DNA, 15 bp, Homo sapiens
tgctgaacaactatt

SEQ ID NO: 1104057 - DNA, 15 bp, Homo sapiens
ttgctgaacaactat

SEQ ID NO: 1104058 - DNA, 15 bp, Homo sapiens
tttgctgaacaacta

SEQ ID NO: 1104059 - DNA, 15 bp, Homo sapiens
atttgctgaacaact

SEQ ID NO: 1104060 - DNA, 15 bp, Homo sapiens
catttgctgaacaac

SEQ ID NO: 1104061 - DNA, 15 bp, Homo sapiens
tcatttgctgaacaa

SEQ ID NO: 1104062 - DNA, 15 bp, Homo sapiens
ctcatttgctgaaca

SEQ ID NO: 1104063 - DNA, 15 bp, Homo sapiens
gctcatttgctgaac

SEQ ID NO: 1104064 - DNA, 15 bp, Homo sapiens
tgctcatttgctgaa

SEQ ID NO: 1104065 - DNA, 15 bp, Homo sapiens
atgctcatttgctga

SEQ ID NO: 1104066 - DNA, 15 bp, Homo sapiens
aatgctcatttgctg

SEQ ID NO: 1104067 - DNA, 15 bp, Homo sapiens
taatgctcatttgct

SEQ ID NO: 1104068 - DNA, 15 bp, Homo sapiens
ttaatgctcatttgc

SEQ ID NO: 1104069 - DNA, 15 bp, Homo sapiens
attaatgctcatttg

SEQ ID NO: 1104070 - DNA, 15 bp, Homo sapiens
gattaatgctcattt

SEQ ID NO: 1104071 - DNA, 15 bp, Homo sapiens
tgattaatgctcatt

SEQ ID NO: 1104072 - DNA, 15 bp, Homo sapiens
ctgattaatgctcat

SEQ ID NO: 1104073 - DNA, 15 bp, Homo sapiens
actgattaatgctca

SEQ ID NO: 1104074 - DNA, 15 bp, Homo sapiens
cactgattaatgctc

SEQ ID NO: 1104075 - DNA, 15 bp, Homo sapiens
tcactgattaatgct

SEQ ID NO: 1104076 - DNA, 15 bp, Homo sapiens
gtcactgattaatgc

SEQ ID NO: 1104077 - DNA, 15 bp, Homo sapiens
agtcactgattaatg

SEQ ID NO: 1104078 - DNA, 15 bp, Homo sapiens
tagtcactgattaat

SEQ ID NO: 1104079 - DNA, 15 bp, Homo sapiens
atagtcactgattaa

SEQ ID NO: 1104080 - DNA, 15 bp, Homo sapiens
tatagtcactgatta

SEQ ID NO: 1104081 - DNA, 15 bp, Homo sapiens
ttatagtcactgatt

SEQ ID NO: 1104082 - DNA, 15 bp, Homo sapiens
tttatagtcactgat

SEQ ID NO: 1104083 - DNA, 15 bp, Homo sapiens
gtttatagtcactga

SEQ ID NO: 1104084 - DNA, 15 bp, Homo sapiens
agtttatagtcactg

SEQ ID NO: 1104085 - DNA, 15 bp, Homo sapiens
cagtttatagtcact

SEQ ID NO: 1104086 - DNA, 15 bp, Homo sapiens
acagtttatagtcac

SEQ ID NO: 1104087 - DNA, 15 bp, Homo sapiens
tacagtttatagtca

SEQ ID NO: 1104088 - DNA, 15 bp, Homo sapiens
ctacagtttatagtc

SEQ ID NO: 1104089 - DNA, 15 bp, Homo sapiens
gctacagtttatagt

SEQ ID NO: 1104090 - DNA, 15 bp, Homo sapiens
agctacagtttatag

SEQ ID NO: 1104091 - DNA, 15 bp, Homo sapiens
aagctacagtttata

SEQ ID NO: 1104092 - DNA, 15 bp, Homo sapiens
gaagctacagtttat

SEQ ID NO: 1104093 - DNA, 15 bp, Homo sapiens
tgaagctacagttta

SEQ ID NO: 1104094 - DNA, 15 bp, Homo sapiens
ttgaagctacagttt

SEQ ID NO: 1104095 - DNA, 15 bp, Homo sapiens
gttgaagctacagtt

SEQ ID NO: 1104096 - DNA, 15 bp, Homo sapiens
tgttgaagctacagt

SEQ ID NO: 1104097 - DNA, 15 bp, Homo sapiens
atgttgaagctacag

SEQ ID NO: 1104098 - DNA, 15 bp, Homo sapiens
tatgttgaagctaca

SEQ ID NO: 1104099 - DNA, 15 bp, Homo sapiens
ttatgttgaagctac

SEQ ID NO: 1104100 - DNA, 15 bp, Homo sapiens
gttatgttgaagcta

SEQ ID NO: 1104101 - DNA, 15 bp, Homo sapiens
ggttatgttgaagct

SEQ ID NO: 1104102 - DNA, 15 bp, Homo sapiens
cggttatgttgaagc

SEQ ID NO: 1104103 - DNA, 15 bp, Homo sapiens
tcggttatgttgaag

SEQ ID NO: 1104104 - DNA, 15 bp, Homo sapiens
gtcggttatgttgaa

SEQ ID NO: 1104105 - DNA, 15 bp, Homo sapiens
tgtcggttatgttga

SEQ ID NO: 1104106 - DNA, 15 bp, Homo sapiens
ttgtcggttatgttg

SEQ ID NO: 1104107 - DNA, 15 bp, Homo sapiens
gttgtcggttatgtt

SEQ ID NO: 1104108 - DNA, 15 bp, Homo sapiens
agttgtcggttatgt

SEQ ID NO: 1104109 - DNA, 15 bp, Homo sapiens
aagttgtcggttatg

SEQ ID NO: 1104110 - DNA, 15 bp, Homo sapiens
caagttgtcggttat

SEQ ID NO: 1104111 - DNA, 15 bp, Homo sapiens
gcaagttgtcggtta

SEQ ID NO: 1104112 - DNA, 15 bp, Homo sapiens
tgcaagttgtcggtt

SEQ ID NO: 1104113 - DNA, 15 bp, Homo sapiens
ttgcaagttgtcggt

SEQ ID NO: 1104114 - DNA, 15 bp, Homo sapiens
attgcaagttgtcgg

SEQ ID NO: 1104115 - DNA, 15 bp, Homo sapiens
cattgcaagttgtcg

SEQ ID NO: 1104116 - DNA, 15 bp, Homo sapiens
ccattgcaagttgtc

SEQ ID NO: 1104117 - DNA, 15 bp, Homo sapiens
accattgcaagttgt

SEQ ID NO: 1104118 - DNA, 15 bp, Homo sapiens
aaccattgcaagttg

SEQ ID NO: 1104119 - DNA, 15 bp, Homo sapiens
aaaccattgcaagtt

SEQ ID NO: 1104120 - DNA, 15 bp, Homo sapiens
gaaaccattgcaagt

SEQ ID NO: 1104121 - DNA, 15 bp, Homo sapiens
agaaaccattgcaag

SEQ ID NO: 1104122 - DNA, 15 bp, Homo sapiens
tagaaaccattgcaa

SEQ ID NO: 1104123 - DNA, 15 bp, Homo sapiens
ctagaaaccattgca

SEQ ID NO: 1104124 - DNA, 15 bp, Homo sapiens
tctagaaaccattgc

SEQ ID NO: 1104125 - DNA, 15 bp, Homo sapiens
ctctagaaaccattg

SEQ ID NO: 1104126 - DNA, 15 bp, Homo sapiens
gctctagaaaccatt

SEQ ID NO: 1104127 - DNA, 15 bp, Homo sapiens
tgctctagaaaccat

SEQ ID NO: 1104128 - DNA, 15 bp, Homo sapiens
atgctctagaaacca

SEQ ID NO: 1104129 - DNA, 15 bp, Homo sapiens
catgctctagaaacc

SEQ ID NO: 1104130 - DNA, 15 bp, Homo sapiens
gcatgctctagaaac

SEQ ID NO: 1104131 - DNA, 15 bp, Homo sapiens
agcatgctctagaaa

SEQ ID NO: 1104132 - DNA, 15 bp, Homo sapiens
gagcatgctctagaa

SEQ ID NO: 1104133 - DNA, 15 bp, Homo sapiens
ggagcatgctctaga

SEQ ID NO: 1104134 - DNA, 15 bp, Homo sapiens
gggagcatgctctag

SEQ ID NO: 1104135 - DNA, 15 bp, Homo sapiens
tgggagcatgctcta

SEQ ID NO: 1104136 - DNA, 15 bp, Homo sapiens
atgggagcatgctct

SEQ ID NO: 1104137 - DNA, 15 bp, Homo sapiens
catgggagcatgctc

SEQ ID NO: 1104138 - DNA, 15 bp, Homo sapiens
acatgggagcatgct

SEQ ID NO: 1104139 - DNA, 15 bp, Homo sapiens
cacatgggagcatgc

SEQ ID NO: 1104140 - DNA, 15 bp, Homo sapiens
acacatgggagcatg

SEQ ID NO: 1104141 - DNA, 15 bp, Homo sapiens
aacacatgggagcat

SEQ ID NO: 1104142 - DNA, 15 bp, Homo sapiens
taacacatgggagca

SEQ ID NO: 1104143 - DNA, 15 bp, Homo sapiens
ataacacatgggagc

SEQ ID NO: 1104144 - DNA, 15 bp, Homo sapiens
gataacacatgggag

SEQ ID NO: 1104145 - DNA, 15 bp, Homo sapiens
agataacacatggga

SEQ ID NO: 1104146 - DNA, 15 bp, Homo sapiens
gagataacacatggg

SEQ ID NO: 1104147 - DNA, 15 bp, Homo sapiens
tgagataacacatgg

SEQ ID NO: 1104148 - DNA, 15 bp, Homo sapiens
atgagataacacatg

SEQ ID NO: 1104149 - DNA, 15 bp, Homo sapiens
aatgagataacacat

SEQ ID NO: 1104150 - DNA, 15 bp, Homo sapiens
aaatgagataacaca

SEQ ID NO: 1104151 - DNA, 15 bp, Homo sapiens
taaatgagataacac

SEQ ID NO: 1104152 - DNA, 15 bp, Homo sapiens
ttaaatgagataaca

SEQ ID NO: 1104153 - DNA, 15 bp, Homo sapiens
tttaaatgagataac

SEQ ID NO: 1104154 - DNA, 15 bp, Homo sapiens
atttaaatgagataa

SEQ ID NO: 1104155 - DNA, 15 bp, Homo sapiens
aatttaaatgagata

SEQ ID NO: 1104156 - DNA, 15 bp, Homo sapiens
aaatttaaatgagat

SEQ ID NO: 1104157 - DNA, 15 bp, Homo sapiens
gaaatttaaatgaga

SEQ ID NO: 1104158 - DNA, 15 bp, Homo sapiens
ggaaatttaaatgag

SEQ ID NO: 1104159 - DNA, 15 bp, Homo sapiens
tggaaatttaaatga

SEQ ID NO: 1104160 - DNA, 15 bp, Homo sapiens
ttggaaatttaaatg

SEQ ID NO: 1104161 - DNA, 15 bp, Homo sapiens
tttggaaatttaaat

SEQ ID NO: 1104162 - DNA, 15 bp, Homo sapiens
gtttggaaatttaaa

SEQ ID NO: 1104163 - DNA, 15 bp, Homo sapiens
ggtttggaaatttaa

SEQ ID NO: 1104164 - DNA, 15 bp, Homo sapiens
tggtttggaaattta

SEQ ID NO: 1104165 - DNA, 15 bp, Homo sapiens
ttggtttggaaattt

SEQ ID NO: 1104166 - DNA, 15 bp, Homo sapiens
attggtttggaaatt

SEQ ID NO: 1104167 - DNA, 15 bp, Homo sapiens
gattggtttggaaat

SEQ ID NO: 1104168 - DNA, 15 bp, Homo sapiens
ggattggtttggaaa

SEQ ID NO: 1104169 - DNA, 15 bp, Homo sapiens
aggattggtttggaa

SEQ ID NO: 1104170 - DNA, 15 bp, Homo sapiens
caggattggtttgga

SEQ ID NO: 1104171 - DNA, 15 bp, Homo sapiens
acaggattggtttgg

SEQ ID NO: 1104172 - DNA, 15 bp, Homo sapiens
cacaggattggtttg

SEQ ID NO: 1104173 - DNA, 15 bp, Homo sapiens
tcacaggattggttt

SEQ ID NO: 1104174 - DNA, 15 bp, Homo sapiens
ttcacaggattggtt

SEQ ID NO: 1104175 - DNA, 15 bp, Homo sapiens
tttcacaggattggt

SEQ ID NO: 1104176 - DNA, 15 bp, Homo sapiens
atttcacaggattgg

SEQ ID NO: 1104177 - DNA, 15 bp, Homo sapiens
catttcacaggattg

SEQ ID NO: 1104178 - DNA, 15 bp, Homo sapiens
acatttcacaggatt

SEQ ID NO: 1104179 - DNA, 15 bp, Homo sapiens
aacatttcacaggat

SEQ ID NO: 1104180 - DNA, 15 bp, Homo sapiens
gaacatttcacagga

SEQ ID NO: 1104181 - DNA, 15 bp, Homo sapiens
agaacatttcacagg

SEQ ID NO: 1104182 - DNA, 15 bp, Homo sapiens
aagaacatttcacag

SEQ ID NO: 1104183 - DNA, 15 bp, Homo sapiens
aaagaacatttcaca

SEQ ID NO: 1104184 - DNA, 15 bp, Homo sapiens
aaaagaacatttcac

SEQ ID NO: 1104185 - DNA, 15 bp, Homo sapiens
aaaaagaacatttca

SEQ ID NO: 1104186 - DNA, 15 bp, Homo sapiens
aaaaaagaacatttc

SEQ ID NO: 1104187 - DNA, 15 bp, Homo sapiens
aaaaaaagaacattt

SEQ ID NO: 1104188 - DNA, 15 bp, Homo sapiens
aaaaaaaagaacatt

SEQ ID NO: 1104189 - DNA, 15 bp, Homo sapiens
aaaaaaaaagaacat

SEQ ID NO: 1104190 - DNA, 15 bp, Homo sapiens
aaaaaaaaaagaaca

SEQ ID NO: 1104191 - DNA, 15 bp, Homo sapiens
aaaaaaaaaaagaac

SEQ ID NO: 1104192 - DNA, 15 bp, Homo sapiens
agaaaaaaaaaaaga

SEQ ID NO: 1104193 - DNA, 15 bp, Homo sapiens
aagaaaaaaaaaaag

SEQ ID NO: 1104194 - DNA, 15 bp, Homo sapiens
ctctatctcaaaaaa

SEQ ID NO: 1104195 - DNA, 15 bp, Homo sapiens
actctatctcaaaaa

SEQ ID NO: 1104196 - DNA, 15 bp, Homo sapiens
aactctatctcaaaa

SEQ ID NO: 1104197 - DNA, 15 bp, Homo sapiens
aaactctatctcaaa

SEQ ID NO: 1104198 - DNA, 15 bp, Homo sapiens
aaaactctatctcaa

SEQ ID NO: 1104199 - DNA, 15 bp, Homo sapiens
caaaactctatctca

SEQ ID NO: 1104200 - DNA, 15 bp, Homo sapiens
gcaaaactctatctc

SEQ ID NO: 1104201 - DNA, 15 bp, Homo sapiens
agcaaaactctatct

SEQ ID NO: 1104202 - DNA, 15 bp, Homo sapiens
gagcaaaactctatc

SEQ ID NO: 1104203 - DNA, 15 bp, Homo sapiens
agagcaaaactctat

SEQ ID NO: 1104204 - DNA, 15 bp, Homo sapiens
cagagcaaaactcta

SEQ ID NO: 1104205 - DNA, 15 bp, Homo sapiens
acagagcaaaactct

SEQ ID NO: 1104206 - DNA, 15 bp, Homo sapiens
gacagagcaaaactc

SEQ ID NO: 1104207 - DNA, 15 bp, Homo sapiens
tgacagagcaaaact

SEQ ID NO: 1104208 - DNA, 15 bp, Homo sapiens
gtgacagagcaaaac

SEQ ID NO: 1104209 - DNA, 15 bp, Homo sapiens
ggtgacagagcaaaa

SEQ ID NO: 1104210 - DNA, 15 bp, Homo sapiens
gggtgacagagcaaa

SEQ ID NO: 1104211 - DNA, 15 bp, Homo sapiens
ttccagcctgggtga

SEQ ID NO: 1104212 - DNA, 15 bp, Homo sapiens
attccagcctgggtg

SEQ ID NO: 1104213 - DNA, 15 bp, Homo sapiens
tattccagcctgggt

SEQ ID NO: 1104214 - DNA, 15 bp, Homo sapiens
gtattccagcctggg

SEQ ID NO: 1104215 - DNA, 15 bp, Homo sapiens
tgtattccagcctgg

SEQ ID NO: 1104216 - DNA, 15 bp, Homo sapiens
ctgtattccagcctg

SEQ ID NO: 1104217 - DNA, 15 bp, Homo sapiens
gctgtattccagcct

SEQ ID NO: 1104218 - DNA, 15 bp, Homo sapiens
ctaactccacttata

SEQ ID NO: 1104219 - DNA, 15 bp, Homo sapiens
cctaactccacttat

SEQ ID NO: 1104220 - DNA, 15 bp, Homo sapiens
acctaactccactta

SEQ ID NO: 1104221 - DNA, 15 bp, Homo sapiens
cacctaactccactt

SEQ ID NO: 1104222 - DNA, 15 bp, Homo sapiens
gcacctaactccact

SEQ ID NO: 1104223 - DNA, 15 bp, Homo sapiens
agcacctaactccac

SEQ ID NO: 1104224 - DNA, 15 bp, Homo sapiens
cagcacctaactcca

SEQ ID NO: 1104225 - DNA, 15 bp, Homo sapiens
gcagcacctaactcc

SEQ ID NO: 1104226 - DNA, 15 bp, Homo sapiens
agcagcacctaactc

SEQ ID NO: 1104227 - DNA, 15 bp, Homo sapiens
cagcagcacctaact

SEQ ID NO: 1104228 - DNA, 15 bp, Homo sapiens
tcagcagcacctaac

SEQ ID NO: 1104229 - DNA, 15 bp, Homo sapiens
gtcagcagcacctaa

SEQ ID NO: 1104230 - DNA, 15 bp, Homo sapiens
tgtcagcagcaccta

SEQ ID NO: 1104231 - DNA, 15 bp, Homo sapiens
atgtcagcagcacct

SEQ ID NO: 1104232 - DNA, 15 bp, Homo sapiens
gatgtcagcagcacc

SEQ ID NO: 1104233 - DNA, 15 bp, Homo sapiens
agatgtcagcagcac

SEQ ID NO: 1104234 - DNA, 15 bp, Homo sapiens
cagatgtcagcagca

SEQ ID NO: 1104235 - DNA, 15 bp, Homo sapiens
acagatgtcagcagc

SEQ ID NO: 1104236 - DNA, 15 bp, Homo sapiens
gacagatgtcagcag

SEQ ID NO: 1104237 - DNA, 15 bp, Homo sapiens
ggacagatgtcagca

SEQ ID NO: 1104238 - DNA, 15 bp, Homo sapiens
tggacagatgtcagc

SEQ ID NO: 1104239 - DNA, 15 bp, Homo sapiens
ctggacagatgtcag

SEQ ID NO: 1104240 - DNA, 15 bp, Homo sapiens
gctggacagatgtca

SEQ ID NO: 1104241 - DNA, 15 bp, Homo sapiens
tgctggacagatgtc

SEQ ID NO: 1104242 - DNA, 15 bp, Homo sapiens
atgctggacagatgt

SEQ ID NO: 1104243 - DNA, 15 bp, Homo sapiens
gatgctggacagatg

SEQ ID NO: 1104244 - DNA, 15 bp, Homo sapiens
agatgctggacagat

SEQ ID NO: 1104245 - DNA, 15 bp, Homo sapiens
cagatgctggacaga

SEQ ID NO: 1104246 - DNA, 15 bp, Homo sapiens
gcagatgctggacag

SEQ ID NO: 1104247 - DNA, 15 bp, Homo sapiens
agcagatgctggaca

SEQ ID NO: 1104248 - DNA, 15 bp, Homo sapiens
aagcagatgctggac

SEQ ID NO: 1104249 - DNA, 15 bp, Homo sapiens
caagcagatgctgga

SEQ ID NO: 1104250 - DNA, 15 bp, Homo sapiens
tcaagcagatgctgg

SEQ ID NO: 1104251 - DNA, 15 bp, Homo sapiens
gtcaagcagatgctg

SEQ ID NO: 1104252 - DNA, 15 bp, Homo sapiens
agtcaagcagatgct

SEQ ID NO: 1104253 - DNA, 15 bp, Homo sapiens
cagtcaagcagatgc

SEQ ID NO: 1104254 - DNA, 15 bp, Homo sapiens
ccagtcaagcagatg

SEQ ID NO: 1104255 - DNA, 15 bp, Homo sapiens
cccagtcaagcagat

SEQ ID NO: 1104256 - DNA, 15 bp, Homo sapiens
ccccagtcaagcaga

SEQ ID NO: 1104257 - DNA, 15 bp, Homo sapiens
gccccagtcaagcag

SEQ ID NO: 1104258 - DNA, 15 bp, Homo sapiens
ggccccagtcaagca

SEQ ID NO: 1104259 - DNA, 15 bp, Homo sapiens
aggccccagtcaagc

SEQ ID NO: 1104260 - DNA, 15 bp, Homo sapiens
gaggccccagtcaag

SEQ ID NO: 1104261 - DNA, 15 bp, Homo sapiens
agaggccccagtcaa

SEQ ID NO: 1104262 - DNA, 15 bp, Homo sapiens
aagaggccccagtca

SEQ ID NO: 1104263 - DNA, 15 bp, Homo sapiens
gaagaggccccagtc

SEQ ID NO: 1104264 - DNA, 15 bp, Homo sapiens
ggaagaggccccagt

SEQ ID NO: 1104265 - DNA, 15 bp, Homo sapiens
aggaagaggccccag

SEQ ID NO: 1104266 - DNA, 15 bp, Homo sapiens
gaggaagaggcccca

SEQ ID NO: 1104267 - DNA, 15 bp, Homo sapiens
agaggaagaggcccc

SEQ ID NO: 1104268 - DNA, 15 bp, Homo sapiens
gagaggaagaggccc

SEQ ID NO: 1104269 - DNA, 15 bp, Homo sapiens
agagaggaagaggcc

SEQ ID NO: 1104270 - DNA, 15 bp, Homo sapiens
gagagaggaagaggc

SEQ ID NO: 1104271 - DNA, 15 bp, Homo sapiens
ggagagaggaagagg

SEQ ID NO: 1104272 - DNA, 15 bp, Homo sapiens
aggagagaggaagag

SEQ ID NO: 1104273 - DNA, 15 bp, Homo sapiens
caggagagaggaaga

SEQ ID NO: 1104274 - DNA, 15 bp, Homo sapiens
tcaggagagaggaag

SEQ ID NO: 1104275 - DNA, 15 bp, Homo sapiens
ttcaggagagaggaa

SEQ ID NO: 1104276 - DNA, 15 bp, Homo sapiens
tttcaggagagagga

SEQ ID NO: 1104277 - DNA, 15 bp, Homo sapiens
ctttcaggagagagg

SEQ ID NO: 1104278 - DNA, 15 bp, Homo sapiens
gctttcaggagagag

SEQ ID NO: 1104279 - DNA, 15 bp, Homo sapiens
ggctttcaggagaga

SEQ ID NO: 1104280 - DNA, 15 bp, Homo sapiens
tggctttcaggagag

SEQ ID NO: 1104281 - DNA, 15 bp, Homo sapiens
atggctttcaggaga

SEQ ID NO: 1104282 - DNA, 15 bp, Homo sapiens
ggatggctttcagga

SEQ ID NO: 1104283 - DNA, 15 bp, Homo sapiens
aggatggctttcagg

SEQ ID NO: 1104284 - DNA, 15 bp, Homo sapiens
gaggatggctttcag

SEQ ID NO: 1104285 - DNA, 15 bp, Homo sapiens
tgaggatggctttca

SEQ ID NO: 1104286 - DNA, 15 bp, Homo sapiens
ctgaggatggctttc

SEQ ID NO: 1104287 - DNA, 15 bp, Homo sapiens
gctgaggatggcttt

SEQ ID NO: 1104288 - DNA, 15 bp, Homo sapiens
tgctgaggatggctt

SEQ ID NO: 1104289 - DNA, 15 bp, Homo sapiens
atgctgaggatggct

SEQ ID NO: 1104290 - DNA, 15 bp, Homo sapiens
catgctgaggatggc

SEQ ID NO: 1104291 - DNA, 15 bp, Homo sapiens
ccatgctgaggatgg

SEQ ID NO: 1104292 - DNA, 15 bp, Homo sapiens
gccatgctgaggatg

SEQ ID NO: 1104293 - DNA, 15 bp, Homo sapiens
ggccatgctgaggat

SEQ ID NO: 1104294 - DNA, 15 bp, Homo sapiens
gggccatgctgagga

SEQ ID NO: 1104295 - DNA, 15 bp, Homo sapiens
tgggccatgctgagg

SEQ ID NO: 1104296 - DNA, 15 bp, Homo sapiens
ttgggccatgctgag

SEQ ID NO: 1104297 - DNA, 15 bp, Homo sapiens
attgggccatgctga

SEQ ID NO: 1104298 - DNA, 15 bp, Homo sapiens
cattgggccatgctg

SEQ ID NO: 1104299 - DNA, 15 bp, Homo sapiens
gcattgggccatgct

SEQ ID NO: 1104300 - DNA, 15 bp, Homo sapiens
ggcattgggccatgc

SEQ ID NO: 1104301 - DNA, 15 bp, Homo sapiens
gggcattgggccatg

SEQ ID NO: 1104302 - DNA, 15 bp, Homo sapiens
tgggcattgggccat

SEQ ID NO: 1104303 - DNA, 15 bp, Homo sapiens
ctgggcattgggcca

SEQ ID NO: 1104304 - DNA, 15 bp, Homo sapiens
actgggcattgggcc

SEQ ID NO: 1104305 - DNA, 15 bp, Homo sapiens
cactgggcattgggc

SEQ ID NO: 1104306 - DNA, 15 bp, Homo sapiens
ccactgggcattggg

SEQ ID NO: 1104307 - DNA, 15 bp, Homo sapiens
cccactgggcattgg

SEQ ID NO: 1104308 - DNA, 15 bp, Homo sapiens
gcccactgggcattg

SEQ ID NO: 1104309 - DNA, 15 bp, Homo sapiens
tgcccactgggcatt

SEQ ID NO: 1104310 - DNA, 15 bp, Homo sapiens
ctgcccactgggcat

SEQ ID NO: 1104311 - DNA, 15 bp, Homo sapiens
gtcctgcccactggg

SEQ ID NO: 1104312 - DNA, 15 bp, Homo sapiens
cgtcctgcccactgg

SEQ ID NO: 1104313 - DNA, 15 bp, Homo sapiens
tcgtcctgcccactg

SEQ ID NO: 1104314 - DNA, 15 bp, Homo sapiens
ctcgtcctgcccact

SEQ ID NO: 1104315 - DNA, 15 bp, Homo sapiens
actcgtcctgcccac

SEQ ID NO: 1104316 - DNA, 15 bp, Homo sapiens
gactcgtcctgccca

SEQ ID NO: 1104317 - DNA, 15 bp, Homo sapiens
ggactcgtcctgccc

SEQ ID NO: 1104318 - DNA, 15 bp, Homo sapiens
aggactcgtcctgcc

SEQ ID NO: 1104319 - DNA, 15 bp, Homo sapiens
caggactcgtcctgc

SEQ ID NO: 1104320 - DNA, 15 bp, Homo sapiens
tcaggactcgtcctg

SEQ ID NO: 1104321 - DNA, 15 bp, Homo sapiens
ctcaggactcgtcct

SEQ ID NO: 1104322 - DNA, 15 bp, Homo sapiens
gctcaggactcgtcc

SEQ ID NO: 1104323 - DNA, 15 bp, Homo sapiens
tgctcaggactcgtc

SEQ ID NO: 1104324 - DNA, 15 bp, Homo sapiens
gtgctcaggactcgt

SEQ ID NO: 1104325 - DNA, 15 bp, Homo sapiens
cgtgctcaggactcg

SEQ ID NO: 1104326 - DNA, 15 bp, Homo sapiens
gcgtgctcaggactc

SEQ ID NO: 1104327 - DNA, 15 bp, Homo sapiens
agcgtgctcaggact

SEQ ID NO: 1104328 - DNA, 15 bp, Homo sapiens
aagcgtgctcaggac

SEQ ID NO: 1104329 - DNA, 15 bp, Homo sapiens
gaagcgtgctcagga

SEQ ID NO: 1104330 - DNA, 15 bp, Homo sapiens
tgaagcgtgctcagg

SEQ ID NO: 1104331 - DNA, 15 bp, Homo sapiens
gtgaagcgtgctcag

SEQ ID NO: 1104332 - DNA, 15 bp, Homo sapiens
agtgaagcgtgctca

SEQ ID NO: 1104333 - DNA, 15 bp, Homo sapiens
cagtgaagcgtgctc

SEQ ID NO: 1104334 - DNA, 15 bp, Homo sapiens
ccagtgaagcgtgct

SEQ ID NO: 1104335 - DNA, 15 bp, Homo sapiens
gccagtgaagcgtgc

SEQ ID NO: 1104336 - DNA, 15 bp, Homo sapiens
agccagtgaagcgtg

SEQ ID NO: 1104337 - DNA, 15 bp, Homo sapiens
gagccagtgaagcgt

SEQ ID NO: 1104338 - DNA, 15 bp, Homo sapiens
tgagccagtgaagcg

SEQ ID NO: 1104339 - DNA, 15 bp, Homo sapiens
ctgagccagtgaagc

SEQ ID NO: 1104340 - DNA, 15 bp, Homo sapiens
tctgagccagtgaag

SEQ ID NO: 1104341 - DNA, 15 bp, Homo sapiens
gtctgagccagtgaa

SEQ ID NO: 1104342 - DNA, 15 bp, Homo sapiens
tgtctgagccagtga

SEQ ID NO: 1104343 - DNA, 15 bp, Homo sapiens
ctgtctgagccagtg

SEQ ID NO: 1104344 - DNA, 15 bp, Homo sapiens
cctgtctgagccagt

SEQ ID NO: 1104345 - DNA, 15 bp, Homo sapiens
tcctgtctgagccag

SEQ ID NO: 1104346 - DNA, 15 bp, Homo sapiens
atcctgtctgagcca

SEQ ID NO: 1104347 - DNA, 15 bp, Homo sapiens
catcctgtctgagcc

SEQ ID NO: 1104348 - DNA, 15 bp, Homo sapiens
tcatcctgtctgagc

SEQ ID NO: 1104349 - DNA, 15 bp, Homo sapiens
ttcatcctgtctgag

SEQ ID NO: 1104350 - DNA, 15 bp, Homo sapiens
attcatcctgtctga

SEQ ID NO: 1104351 - DNA, 15 bp, Homo sapiens
aattcatcctgtctg

SEQ ID NO: 1104352 - DNA, 15 bp, Homo sapiens
aaattcatcctgtct

SEQ ID NO: 1104353 - DNA, 15 bp, Homo sapiens
caaattcatcctgtc

SEQ ID NO: 1104354 - DNA, 15 bp, Homo sapiens
tcaaattcatcctgt

SEQ ID NO: 1104355 - DNA, 15 bp, Homo sapiens
atcaaattcatcctg

SEQ ID NO: 1104356 - DNA, 15 bp, Homo sapiens
aatcaaattcatcct

SEQ ID NO: 1104357 - DNA, 15 bp, Homo sapiens
gaatcaaattcatcc

SEQ ID NO: 1104358 - DNA, 15 bp, Homo sapiens
agaatcaaattcatc

SEQ ID NO: 1104359 - DNA, 15 bp, Homo sapiens
aagaatcaaattcat

SEQ ID NO: 1104360 - DNA, 15 bp, Homo sapiens
aaagaatcaaattca

SEQ ID NO: 1104361 - DNA, 15 bp, Homo sapiens
caaagaatcaaattc

SEQ ID NO: 1104362 - DNA, 15 bp, Homo sapiens
ccaaagaatcaaatt

SEQ ID NO: 1104363 - DNA, 15 bp, Homo sapiens
gccaaagaatcaaat

SEQ ID NO: 1104364 - DNA, 15 bp, Homo sapiens
ggccaaagaatcaaa

SEQ ID NO: 1104365 - DNA, 15 bp, Homo sapiens
aggccaaagaatcaa

SEQ ID NO: 1104366 - DNA, 15 bp, Homo sapiens
gaggccaaagaatca

SEQ ID NO: 1104367 - DNA, 15 bp, Homo sapiens
ggaggccaaagaatc

SEQ ID NO: 1104368 - DNA, 15 bp, Homo sapiens
tggaggccaaagaat

SEQ ID NO: 1104369 - DNA, 15 bp, Homo sapiens
atggaggccaaagaa

SEQ ID NO: 1104370 - DNA, 15 bp, Homo sapiens
tatggaggccaaaga

SEQ ID NO: 1104371 - DNA, 15 bp, Homo sapiens
ctatggaggccaaag

SEQ ID NO: 1104372 - DNA, 15 bp, Homo sapiens
gctatggaggccaaa

SEQ ID NO: 1104373 - DNA, 15 bp, Homo sapiens
ggctatggaggccaa

SEQ ID NO: 1104374 - DNA, 15 bp, Homo sapiens
tggctatggaggcca

SEQ ID NO: 1104375 - DNA, 15 bp, Homo sapiens
ctggctatggaggcc

SEQ ID NO: 1104376 - DNA, 15 bp, Homo sapiens
gctggctatggaggc

SEQ ID NO: 1104377 - DNA, 15 bp, Homo sapiens
ggctggctatggagg

SEQ ID NO: 1104378 - DNA, 15 bp, Homo sapiens
gggctggctatggag

SEQ ID NO: 1104379 - DNA, 15 bp, Homo sapiens
agggctggctatgga

SEQ ID NO: 1104380 - DNA, 15 bp, Homo sapiens
tagggctggctatgg

SEQ ID NO: 1104381 - DNA, 15 bp, Homo sapiens
gtagggctggctatg

SEQ ID NO: 1104382 - DNA, 15 bp, Homo sapiens
agtagggctggctat

SEQ ID NO: 1104383 - DNA, 15 bp, Homo sapiens
cagtagggctggcta

SEQ ID NO: 1104384 - DNA, 15 bp, Homo sapiens
ccagtagggctggct

SEQ ID NO: 1104385 - DNA, 15 bp, Homo sapiens
cccagtagggctggc

SEQ ID NO: 1104386 - DNA, 15 bp, Homo sapiens
acccagtagggctgg

SEQ ID NO: 1104387 - DNA, 15 bp, Homo sapiens
aacccagtagggctg

SEQ ID NO: 1104388 - DNA, 15 bp, Homo sapiens
aaacccagtagggct

SEQ ID NO: 1104389 - DNA, 15 bp, Homo sapiens
taaacccagtagggc

SEQ ID NO: 1104390 - DNA, 15 bp, Homo sapiens
gtaaacccagtaggg

SEQ ID NO: 1104391 - DNA, 15 bp, Homo sapiens
tgtaaacccagtagg

SEQ ID NO: 1104392 - DNA, 15 bp, Homo sapiens
ctgtaaacccagtag

SEQ ID NO: 1104393 - DNA, 15 bp, Homo sapiens
tctgtaaacccagta

SEQ ID NO: 1104394 - DNA, 15 bp, Homo sapiens
ttctgtaaacccagt

SEQ ID NO: 1104395 - DNA, 15 bp, Homo sapiens
tttctgtaaacccag

SEQ ID NO: 1104396 - DNA, 15 bp, Homo sapiens
ttttctgtaaaccca

SEQ ID NO: 1104397 - DNA, 15 bp, Homo sapiens
cttttctgtaaaccc

SEQ ID NO: 1104398 - DNA, 15 bp, Homo sapiens
ccttttctgtaaacc

SEQ ID NO: 1104399 - DNA, 15 bp, Homo sapiens
cccttttctgtaaac

SEQ ID NO: 1104400 - DNA, 15 bp, Homo sapiens
tcccttttctgtaaa

SEQ ID NO: 1104401 - DNA, 15 bp, Homo sapiens
gtcccttttctgtaa

SEQ ID NO: 1104402 - DNA, 15 bp, Homo sapiens
tgtcccttttctgta

SEQ ID NO: 1104403 - DNA, 15 bp, Homo sapiens
ctgtcccttttctgt

SEQ ID NO: 1104404 - DNA, 15 bp, Homo sapiens
cctgtcccttttctg

SEQ ID NO: 1104405 - DNA, 15 bp, Homo sapiens
gcctgtcccttttct

SEQ ID NO: 1104406 - DNA, 15 bp, Homo sapiens
tgcctgtcccttttc

SEQ ID NO: 1104407 - DNA, 15 bp, Homo sapiens
ctgcctgtccctttt

SEQ ID NO: 1104408 - DNA, 15 bp, Homo sapiens
cctgcctgtcccttt

SEQ ID NO: 1104409 - DNA, 15 bp, Homo sapiens
ccctgcctgtccctt

SEQ ID NO: 1104410 - DNA, 15 bp, Homo sapiens
cccctgcctgtccct

SEQ ID NO: 1104411 - DNA, 15 bp, Homo sapiens
acccctgcctgtccc

SEQ ID NO: 1104412 - DNA, 15 bp, Homo sapiens
cacccctgcctgtcc

SEQ ID NO: 1104413 - DNA, 15 bp, Homo sapiens
tcacccctgcctgtc

SEQ ID NO: 1104414 - DNA, 15 bp, Homo sapiens
ttcacccctgcctgt

SEQ ID NO: 1104415 - DNA, 15 bp, Homo sapiens
cttcacccctgcctg

SEQ ID NO: 1104416 - DNA, 15 bp, Homo sapiens
gcttcacccctgcct

SEQ ID NO: 1104417 - DNA, 15 bp, Homo sapiens
ggcttcacccctgcc

SEQ ID NO: 1104418 - DNA, 15 bp, Homo sapiens
tggcttcacccctgc

SEQ ID NO: 1104419 - DNA, 15 bp, Homo sapiens
ctggcttcacccctg

SEQ ID NO: 1104420 - DNA, 15 bp, Homo sapiens
cctggcttcacccct

SEQ ID NO: 1104421 - DNA, 15 bp, Homo sapiens
acctggcttcacccc

SEQ ID NO: 1104422 - DNA, 15 bp, Homo sapiens
gacctggcttcaccc

SEQ ID NO: 1104423 - DNA, 15 bp, Homo sapiens
tgacctggcttcacc

SEQ ID NO: 1104424 - DNA, 15 bp, Homo sapiens
atgacctggcttcac

SEQ ID NO: 1104425 - DNA, 15 bp, Homo sapiens
catgacctggcttca

SEQ ID NO: 1104426 - DNA, 15 bp, Homo sapiens
ccatgacctggcttc

SEQ ID NO: 1104427 - DNA, 15 bp, Homo sapiens
gccatgacctggctt

SEQ ID NO: 1104428 - DNA, 15 bp, Homo sapiens
agccatgacctggct

SEQ ID NO: 1104429 - DNA, 15 bp, Homo sapiens
cagccatgacctggc

SEQ ID NO: 1104430 - DNA, 15 bp, Homo sapiens
tcagccatgacctgg

SEQ ID NO: 1104431 - DNA, 15 bp, Homo sapiens
ctcagccatgacctg

SEQ ID NO: 1104432 - DNA, 15 bp, Homo sapiens
actcagccatgacct

SEQ ID NO: 1104433 - DNA, 15 bp, Homo sapiens
gactcagccatgacc

SEQ ID NO: 1104434 - DNA, 15 bp, Homo sapiens
ggactcagccatgac

SEQ ID NO: 1104435 - DNA, 15 bp, Homo sapiens
tggactcagccatga

SEQ ID NO: 1104436 - DNA, 15 bp, Homo sapiens
atggactcagccatg

SEQ ID NO: 1104437 - DNA, 15 bp, Homo sapiens
gatggactcagccat

SEQ ID NO: 1104438 - DNA, 15 bp, Homo sapiens
agatggactcagcca

SEQ ID NO: 1104439 - DNA, 15 bp, Homo sapiens
gagatggactcagcc

SEQ ID NO: 1104440 - DNA, 15 bp, Homo sapiens
tgagatggactcagc

SEQ ID NO: 1104441 - DNA, 15 bp, Homo sapiens
ttgagatggactcag

SEQ ID NO: 1104442 - DNA, 15 bp, Homo sapiens
gttgagatggactca

SEQ ID NO: 1104443 - DNA, 15 bp, Homo sapiens
tgttgagatggactc

SEQ ID NO: 1104444 - DNA, 15 bp, Homo sapiens
ctgttgagatggact

SEQ ID NO: 1104445 - DNA, 15 bp, Homo sapiens
tctgttgagatggac

SEQ ID NO: 1104446 - DNA, 15 bp, Homo sapiens
atctgttgagatgga

SEQ ID NO: 1104447 - DNA, 15 bp, Homo sapiens
gatctgttgagatgg

SEQ ID NO: 1104448 - DNA, 15 bp, Homo sapiens
ggatctgttgagatg

SEQ ID NO: 1104449 - DNA, 15 bp, Homo sapiens
tggatctgttgagat

SEQ ID NO: 1104450 - DNA, 15 bp, Homo sapiens
ctggatctgttgaga

SEQ ID NO: 1104451 - DNA, 15 bp, Homo sapiens
gctggatctgttgag

SEQ ID NO: 1104452 - DNA, 15 bp, Homo sapiens
agctggatctgttga

SEQ ID NO: 1104453 - DNA, 15 bp, Homo sapiens
aagctggatctgttg

SEQ ID NO: 1104454 - DNA, 15 bp, Homo sapiens
gaagctggatctgtt

SEQ ID NO: 1104455 - DNA, 15 bp, Homo sapiens
tgaagctggatctgt

SEQ ID NO: 1104456 - DNA, 15 bp, Homo sapiens
gtgaagctggatctg

SEQ ID NO: 1104457 - DNA, 15 bp, Homo sapiens
ggtgaagctggatct

SEQ ID NO: 1104458 - DNA, 15 bp, Homo sapiens
aggtgaagctggatc

SEQ ID NO: 1104459 - DNA, 15 bp, Homo sapiens
caggtgaagctggat

SEQ ID NO: 1104460 - DNA, 15 bp, Homo sapiens
gcaggtgaagctgga

SEQ ID NO: 1104461 - DNA, 15 bp, Homo sapiens
tgcaggtgaagctgg

SEQ ID NO: 1104462 - DNA, 15 bp, Homo sapiens
ttgcaggtgaagctg

SEQ ID NO: 1104463 - DNA, 15 bp, Homo sapiens
cttgcaggtgaagct

SEQ ID NO: 1104464 - DNA, 15 bp, Homo sapiens
acttgcaggtgaagc

SEQ ID NO: 1104465 - DNA, 15 bp, Homo sapiens
cacttgcaggtgaag

SEQ ID NO: 1104466 - DNA, 15 bp, Homo sapiens
tcacttgcaggtgaa

SEQ ID NO: 1104467 - DNA, 15 bp, Homo sapiens
gtcacttgcaggtga

SEQ ID NO: 1104468 - DNA, 15 bp, Homo sapiens
ggtcacttgcaggtg

SEQ ID NO: 1104469 - DNA, 15 bp, Homo sapiens
tggtcacttgcaggt

SEQ ID NO: 1104470 - DNA, 15 bp, Homo sapiens
tttgagggtaaatta

SEQ ID NO: 1104471 - DNA, 15 bp, Homo sapiens
atttgagggtaaatt

SEQ ID NO: 1104472 - DNA, 15 bp, Homo sapiens
catttgagggtaaat

SEQ ID NO: 1104473 - DNA, 15 bp, Homo sapiens
ccatttgagggtaaa

SEQ ID NO: 1104474 - DNA, 15 bp, Homo sapiens
cccatttgagggtaa

SEQ ID NO: 1104475 - DNA, 15 bp, Homo sapiens
acccatttgagggta

SEQ ID NO: 1104476 - DNA, 15 bp, Homo sapiens
gacccatttgagggt

SEQ ID NO: 1104477 - DNA, 15 bp, Homo sapiens
tgacccatttgaggg

SEQ ID NO: 1104478 - DNA, 15 bp, Homo sapiens
gtgacccatttgagg

SEQ ID NO: 1104479 - DNA, 15 bp, Homo sapiens
tgtgacccatttgag

SEQ ID NO: 1104480 - DNA, 15 bp, Homo sapiens
ttgtgacccatttga

SEQ ID NO: 1104481 - DNA, 15 bp, Homo sapiens
tttgtgacccatttg

SEQ ID NO: 1104482 - DNA, 15 bp, Homo sapiens
ttttgtgacccattt

SEQ ID NO: 1104483 - DNA, 15 bp, Homo sapiens
tttttgtgacccatt

SEQ ID NO: 1104484 - DNA, 15 bp, Homo sapiens
ttttttgtgacccat

SEQ ID NO: 1104485 - DNA, 15 bp, Homo sapiens
attttttgtgaccca

SEQ ID NO: 1104486 - DNA, 15 bp, Homo sapiens
aattttttgtgaccc

SEQ ID NO: 1104487 - DNA, 15 bp, Homo sapiens
caattttttgtgacc

SEQ ID NO: 1104488 - DNA, 15 bp, Homo sapiens
acaattttttgtgac

SEQ ID NO: 1104489 - DNA, 15 bp, Homo sapiens
cacaattttttgtga

SEQ ID NO: 1104490 - DNA, 15 bp, Homo sapiens
acacaattttttgtg

SEQ ID NO: 1104491 - DNA, 15 bp, Homo sapiens
cacacaattttttgt

SEQ ID NO: 1104492 - DNA, 15 bp, Homo sapiens
acacacaattttttg

SEQ ID NO: 1104493 - DNA, 15 bp, Homo sapiens
cacacacaatttttt

SEQ ID NO: 1104494 - DNA, 15 bp, Homo sapiens
tcacacacaattttt

SEQ ID NO: 1104495 - DNA, 15 bp, Homo sapiens
ctcacacacaatttt

SEQ ID NO: 1104496 - DNA, 15 bp, Homo sapiens
tctcacacacaattt

SEQ ID NO: 1104497 - DNA, 15 bp, Homo sapiens
ctctcacacacaatt

SEQ ID NO: 1104498 - DNA, 15 bp, Homo sapiens
tctctcacacacaat

SEQ ID NO: 1104499 - DNA, 15 bp, Homo sapiens
ctctctcacacacaa

SEQ ID NO: 1104500 - DNA, 15 bp, Homo sapiens
ctctctctcacacac

SEQ ID NO: 1104501 - DNA, 15 bp, Homo sapiens
tctctctctcacaca

SEQ ID NO: 1104502 - DNA, 15 bp, Homo sapiens
ttctctctctcacac

SEQ ID NO: 1104503 - DNA, 15 bp, Homo sapiens
cttctctctctcaca

SEQ ID NO: 1104504 - DNA, 15 bp, Homo sapiens
ccttctctctctcac

SEQ ID NO: 1104505 - DNA, 15 bp, Homo sapiens
cccttctctctctca

SEQ ID NO: 1104506 - DNA, 15 bp, Homo sapiens
acccttctctctctc

SEQ ID NO: 1104507 - DNA, 15 bp, Homo sapiens
aacccttctctctct

SEQ ID NO: 1104508 - DNA, 15 bp, Homo sapiens
aaacccttctctctc

SEQ ID NO: 1104509 - DNA, 15 bp, Homo sapiens
aaaacccttctctct

SEQ ID NO: 1104510 - DNA, 15 bp, Homo sapiens
taaaacccttctctc

SEQ ID NO: 1104511 - DNA, 15 bp, Homo sapiens
ataaaacccttctct

SEQ ID NO: 1104512 - DNA, 15 bp, Homo sapiens
aataaaacccttctc

SEQ ID NO: 1104513 - DNA, 15 bp, Homo sapiens
taataaaacccttct

SEQ ID NO: 1104514 - DNA, 15 bp, Homo sapiens
ctaataaaacccttc

SEQ ID NO: 1104515 - DNA, 15 bp, Homo sapiens
actaataaaaccctt

SEQ ID NO: 1104516 - DNA, 15 bp, Homo sapiens
aactaataaaaccct

SEQ ID NO: 1104517 - DNA, 15 bp, Homo sapiens
taactaataaaaccc

SEQ ID NO: 1104518 - DNA, 15 bp, Homo sapiens
ttaactaataaaacc

SEQ ID NO: 1104519 - DNA, 15 bp, Homo sapiens
attaactaataaaac

SEQ ID NO: 1104520 - DNA, 15 bp, Homo sapiens
tattaactaataaaa

SEQ ID NO: 1104521 - DNA, 15 bp, Homo sapiens
ttattaactaataaa

SEQ ID NO: 1104522 - DNA, 15 bp, Homo sapiens
attattaactaataa

SEQ ID NO: 1104523 - DNA, 15 bp, Homo sapiens
aattattaactaata

SEQ ID NO: 1104524 - DNA, 15 bp, Homo sapiens
gaattattaactaat

SEQ ID NO: 1104525 - DNA, 15 bp, Homo sapiens
agaattattaactaa

SEQ ID NO: 1104526 - DNA, 15 bp, Homo sapiens
tagaattattaacta

SEQ ID NO: 1104527 - DNA, 15 bp, Homo sapiens
atagaattattaact

SEQ ID NO: 1104528 - DNA, 15 bp, Homo sapiens
catagaattattaac

SEQ ID NO: 1104529 - DNA, 15 bp, Homo sapiens
tcatagaattattaa

SEQ ID NO: 1104530 - DNA, 15 bp, Homo sapiens
ttcatagaattatta

SEQ ID NO: 1104531 - DNA, 15 bp, Homo sapiens
gttcatagaattatt

SEQ ID NO: 1104532 - DNA, 15 bp, Homo sapiens
agttcatagaattat

SEQ ID NO: 1104533 - DNA, 15 bp, Homo sapiens
tagttcatagaatta

SEQ ID NO: 1104534 - DNA, 15 bp, Homo sapiens
atagttcatagaatt

SEQ ID NO: 1104535 - DNA, 15 bp, Homo sapiens
aatagttcatagaat

SEQ ID NO: 1104536 - DNA, 15 bp, Homo sapiens
aaatagttcatagaa

SEQ ID NO: 1104537 - DNA, 15 bp, Homo sapiens
aaaatagttcataga

SEQ ID NO: 1104538 - DNA, 15 bp, Homo sapiens
aaaaatagttcatag

SEQ ID NO: 1104539 - DNA, 15 bp, Homo sapiens
taaaaatagttcata

SEQ ID NO: 1104540 - DNA, 15 bp, Homo sapiens
ataaaaatagttcat

SEQ ID NO: 1104541 - DNA, 15 bp, Homo sapiens
aataaaaatagttca

SEQ ID NO: 1104542 - DNA, 15 bp, Homo sapiens
gaataaaaatagttc

SEQ ID NO: 1104543 - DNA, 15 bp, Homo sapiens
ggaataaaaatagtt

SEQ ID NO: 1104544 - DNA, 15 bp, Homo sapiens
aggaataaaaatagt

SEQ ID NO: 1104545 - DNA, 15 bp, Homo sapiens
taggaataaaaatag

SEQ ID NO: 1104546 - DNA, 15 bp, Homo sapiens
ataggaataaaaata

SEQ ID NO: 1104547 - DNA, 15 bp, Homo sapiens
tataggaataaaaat

SEQ ID NO: 1104548 - DNA, 15 bp, Homo sapiens
atataggaataaaaa

SEQ ID NO: 1104549 - DNA, 15 bp, Homo sapiens
catataggaataaaa

SEQ ID NO: 1104550 - DNA, 15 bp, Homo sapiens
acatataggaataaa

SEQ ID NO: 1104551 - DNA, 15 bp, Homo sapiens
aacatataggaataa

SEQ ID NO: 1104552 - DNA, 15 bp, Homo sapiens
aaacatataggaata

SEQ ID NO: 1104553 - DNA, 15 bp, Homo sapiens
caaacatataggaat

SEQ ID NO: 1104554 - DNA, 15 bp, Homo sapiens
acaaacatataggaa

SEQ ID NO: 1104555 - DNA, 15 bp, Homo sapiens
cacaaacatatagga

SEQ ID NO: 1104556 - DNA, 15 bp, Homo sapiens
acacaaacatatagg

SEQ ID NO: 1104557 - DNA, 15 bp, Homo sapiens
cacacaaacatatag

SEQ ID NO: 1104558 - DNA, 15 bp, Homo sapiens
tcacacaaacatata

SEQ ID NO: 1104559 - DNA, 15 bp, Homo sapiens
ctcacacaaacatat

SEQ ID NO: 1104560 - DNA, 15 bp, Homo sapiens
actcacacaaacata

SEQ ID NO: 1104561 - DNA, 15 bp, Homo sapiens
aactcacacaaacat

SEQ ID NO: 1104562 - DNA, 15 bp, Homo sapiens
aaactcacacaaaca

SEQ ID NO: 1104563 - DNA, 15 bp, Homo sapiens
caaactcacacaaac

SEQ ID NO: 1104564 - DNA, 15 bp, Homo sapiens
tcaaactcacacaaa

SEQ ID NO: 1104565 - DNA, 15 bp, Homo sapiens
ttcaaactcacacaa

SEQ ID NO: 1104566 - DNA, 15 bp, Homo sapiens
tttcaaactcacaca

SEQ ID NO: 1104567 - DNA, 15 bp, Homo sapiens
gtttcaaactcacac

SEQ ID NO: 1104568 - DNA, 15 bp, Homo sapiens
agtttcaaactcaca

SEQ ID NO: 1104569 - DNA, 15 bp, Homo sapiens
tagtttcaaactcac

SEQ ID NO: 1104570 - DNA, 15 bp, Homo sapiens
atagtttcaaactca

SEQ ID NO: 1104571 - DNA, 15 bp, Homo sapiens
aatagtttcaaactc

SEQ ID NO: 1104572 - DNA, 15 bp, Homo sapiens
aaatagtttcaaact

SEQ ID NO: 1104573 - DNA, 15 bp, Homo sapiens
gaaatagtttcaaac

SEQ ID NO: 1104574 - DNA, 15 bp, Homo sapiens
ggaaatagtttcaaa

SEQ ID NO: 1104575 - DNA, 15 bp, Homo sapiens
tggaaatagtttcaa

SEQ ID NO: 1104576 - DNA, 15 bp, Homo sapiens
ttggaaatagtttca

SEQ ID NO: 1104577 - DNA, 15 bp, Homo sapiens
tttggaaatagtttc

SEQ ID NO: 1104578 - DNA, 15 bp, Homo sapiens
atttggaaatagttt

SEQ ID NO: 1104579 - DNA, 15 bp, Homo sapiens
tatttggaaatagtt

SEQ ID NO: 1104580 - DNA, 15 bp, Homo sapiens
ttatttggaaatagt

SEQ ID NO: 1104581 - DNA, 15 bp, Homo sapiens
tttatttggaaatag

SEQ ID NO: 1104582 - DNA, 15 bp, Homo sapiens
ttttatttggaaata

SEQ ID NO: 1104583 - DNA, 15 bp, Homo sapiens
tttttatttggaaat

SEQ ID NO: 1104584 - DNA, 15 bp, Homo sapiens
ctttttatttggaaa

SEQ ID NO: 1104585 - DNA, 15 bp, Homo sapiens
actttttatttggaa

SEQ ID NO: 1104586 - DNA, 15 bp, Homo sapiens
aactttttatttgga

SEQ ID NO: 1104587 - DNA, 15 bp, Homo sapiens
taactttttatttgg

SEQ ID NO: 1104588 - DNA, 15 bp, Homo sapiens
ttaactttttatttg

SEQ ID NO: 1104589 - DNA, 15 bp, Homo sapiens
tttaactttttattt

SEQ ID NO: 1104590 - DNA, 15 bp, Homo sapiens
ttttaactttttatt

SEQ ID NO: 1104591 - DNA, 15 bp, Homo sapiens
tttttaactttttat

SEQ ID NO: 1104592 - DNA, 15 bp, Homo sapiens
atttttaacttttta

SEQ ID NO: 1104593 - DNA, 15 bp, Homo sapiens
catttttaacttttt

SEQ ID NO: 1104594 - DNA, 15 bp, Homo sapiens
ccatttttaactttt

SEQ ID NO: 1104595 - DNA, 15 bp, Homo sapiens
tccatttttaacttt

SEQ ID NO: 1104596 - DNA, 15 bp, Homo sapiens
ctccatttttaactt

SEQ ID NO: 1104597 - DNA, 15 bp, Homo sapiens
tctccatttttaact

SEQ ID NO: 1104598 - DNA, 15 bp, Homo sapiens
atctccatttttaac

SEQ ID NO: 1104599 - DNA, 15 bp, Homo sapiens
aatctccatttttaa

SEQ ID NO: 1104600 - DNA, 15 bp, Homo sapiens
taatctccattttta

SEQ ID NO: 1104601 - DNA, 15 bp, Homo sapiens
gtaatctccattttt

SEQ ID NO: 1104602 - DNA, 15 bp, Homo sapiens
tgtaatctccatttt

SEQ ID NO: 1104603 - DNA, 15 bp, Homo sapiens
atgtaatctccattt

SEQ ID NO: 1104604 - DNA, 15 bp, Homo sapiens
aatgtaatctccatt

SEQ ID NO: 1104605 - DNA, 15 bp, Homo sapiens
gaatgtaatctccat

SEQ ID NO: 1104606 - DNA, 15 bp, Homo sapiens
agaatgtaatctcca

SEQ ID NO: 1104607 - DNA, 15 bp, Homo sapiens
tagaatgtaatctcc

SEQ ID NO: 1104608 - DNA, 15 bp, Homo sapiens
ctagaatgtaatctc

SEQ ID NO: 1104609 - DNA, 15 bp, Homo sapiens
actagaatgtaatct

SEQ ID NO: 1104610 - DNA, 15 bp, Homo sapiens
cactagaatgtaatc

SEQ ID NO: 1104611 - DNA, 15 bp, Homo sapiens
ccactagaatgtaat

SEQ ID NO: 1104612 - DNA, 15 bp, Homo sapiens
tcccactagaatgta

SEQ ID NO: 1104613 - DNA, 15 bp, Homo sapiens
ctcccactagaatgt

SEQ ID NO: 1104614 - DNA, 15 bp, Homo sapiens
cctcccactagaatg

SEQ ID NO: 1104615 - DNA, 15 bp, Homo sapiens
ccctcccactagaat

SEQ ID NO: 1104616 - DNA, 15 bp, Homo sapiens
tccctcccactagaa

SEQ ID NO: 1104617 - DNA, 15 bp, Homo sapiens
atccctcccactaga

SEQ ID NO: 1104618 - DNA, 15 bp, Homo sapiens
tatccctcccactag

SEQ ID NO: 1104619 - DNA, 15 bp, Homo sapiens
ctatccctcccacta

SEQ ID NO: 1104620 - DNA, 15 bp, Homo sapiens
tctatccctcccact

SEQ ID NO: 1104621 - DNA, 15 bp, Homo sapiens
gtctatccctcccac

SEQ ID NO: 1104622 - DNA, 15 bp, Homo sapiens
cgtctatccctccca

SEQ ID NO: 1104623 - DNA, 15 bp, Homo sapiens
tcgtctatccctccc

SEQ ID NO: 1104624 - DNA, 15 bp, Homo sapiens
atcgtctatccctcc

SEQ ID NO: 1104625 - DNA, 15 bp, Homo sapiens
gatcgtctatccctc

SEQ ID NO: 1104626 - DNA, 15 bp, Homo sapiens
agatcgtctatccct

SEQ ID NO: 1104627 - DNA, 15 bp, Homo sapiens
cagatcgtctatccc

SEQ ID NO: 1104628 - DNA, 15 bp, Homo sapiens
acagatcgtctatcc

SEQ ID NO: 1104629 - DNA, 15 bp, Homo sapiens
tacagatcgtctatc

SEQ ID NO: 1104630 - DNA, 15 bp, Homo sapiens
ctacagatcgtctat

SEQ ID NO: 1104631 - DNA, 15 bp, Homo sapiens
tctacagatcgtcta

SEQ ID NO: 1104632 - DNA, 15 bp, Homo sapiens
atctacagatcgtct

SEQ ID NO: 1104633 - DNA, 15 bp, Homo sapiens
tatctacagatcgtc

SEQ ID NO: 1104634 - DNA, 15 bp, Homo sapiens
ttatctacagatcgt

SEQ ID NO: 1104635 - DNA, 15 bp, Homo sapiens
tttatctacagatcg

SEQ ID NO: 1104636 - DNA, 15 bp, Homo sapiens
atttatctacagatc

SEQ ID NO: 1104637 - DNA, 15 bp, Homo sapiens
tatttatctacagat

SEQ ID NO: 1104638 - DNA, 15 bp, Homo sapiens
ctatttatctacaga

SEQ ID NO: 1104639 - DNA, 15 bp, Homo sapiens
cctatttatctacag

SEQ ID NO: 1104640 - DNA, 15 bp, Homo sapiens
acctatttatctaca

SEQ ID NO: 1104641 - DNA, 15 bp, Homo sapiens
tacctatttatctac

SEQ ID NO: 1104642 - DNA, 15 bp, Homo sapiens
ttacctatttatcta

SEQ ID NO: 1104643 - DNA, 15 bp, Homo sapiens
tttacctatttatct

SEQ ID NO: 1104644 - DNA, 15 bp, Homo sapiens
ttttacctatttatc

SEQ ID NO: 1104645 - DNA, 15 bp, Homo sapiens
attttacctatttat

SEQ ID NO: 1104646 - DNA, 15 bp, Homo sapiens
tattttacctattta

SEQ ID NO: 1104647 - DNA, 15 bp, Homo sapiens
atattttacctattt

SEQ ID NO: 1104648 - DNA, 15 bp, Homo sapiens
gatattttacctatt

SEQ ID NO: 1104649 - DNA, 15 bp, Homo sapiens
ggatattttacctat

SEQ ID NO: 1104650 - DNA, 15 bp, Homo sapiens
tggatattttaccta

SEQ ID NO: 1104651 - DNA, 15 bp, Homo sapiens
ctggatattttacct

SEQ ID NO: 1104652 - DNA, 15 bp, Homo sapiens
actggatattttacc

SEQ ID NO: 1104653 - DNA, 15 bp, Homo sapiens
tactggatattttac

SEQ ID NO: 1104654 - DNA, 15 bp, Homo sapiens
gtactggatatttta

SEQ ID NO: 1104655 - DNA, 15 bp, Homo sapiens
tgtactggatatttt

SEQ ID NO: 1104656 - DNA, 15 bp, Homo sapiens
atgtactggatattt

SEQ ID NO: 1104657 - DNA, 15 bp, Homo sapiens
aatgtactggatatt

SEQ ID NO: 1104658 - DNA, 15 bp, Homo sapiens
taatgtactggatat

SEQ ID NO: 1104659 - DNA, 15 bp, Homo sapiens
ctaatgtactggata

SEQ ID NO: 1104660 - DNA, 15 bp, Homo sapiens
tctaatgtactggat

SEQ ID NO: 1104661 - DNA, 15 bp, Homo sapiens
ctctaatgtactgga

SEQ ID NO: 1104662 - DNA, 15 bp, Homo sapiens
tctctaatgtactgg

SEQ ID NO: 1104663 - DNA, 15 bp, Homo sapiens
ctctctaatgtactg

SEQ ID NO: 1104664 - DNA, 15 bp, Homo sapiens
actctctaatgtact

SEQ ID NO: 1104665 - DNA, 15 bp, Homo sapiens
cactctctaatgtac

SEQ ID NO: 1104666 - DNA, 15 bp, Homo sapiens
tcactctctaatgta

SEQ ID NO: 1104667 - DNA, 15 bp, Homo sapiens
ttcactctctaatgt

SEQ ID NO: 1104668 - DNA, 15 bp, Homo sapiens
tttcactctctaatg

SEQ ID NO: 1104669 - DNA, 15 bp, Homo sapiens
ttttcactctctaat

SEQ ID NO: 1104670 - DNA, 15 bp, Homo sapiens
cttttcactctctaa

SEQ ID NO: 1104671 - DNA, 15 bp, Homo sapiens
acttttcactctcta

SEQ ID NO: 1104672 - DNA, 15 bp, Homo sapiens
gacttttcactctct

SEQ ID NO: 1104673 - DNA, 15 bp, Homo sapiens
ggacttttcactctc

SEQ ID NO: 1104674 - DNA, 15 bp, Homo sapiens
aggacttttcactct

SEQ ID NO: 1104675 - DNA, 15 bp, Homo sapiens
gaggacttttcactc

SEQ ID NO: 1104676 - DNA, 15 bp, Homo sapiens
tgaggacttttcact

SEQ ID NO: 1104677 - DNA, 15 bp, Homo sapiens
ctgaggacttttcac

SEQ ID NO: 1104678 - DNA, 15 bp, Homo sapiens
cctgaggacttttca

SEQ ID NO: 1104679 - DNA, 15 bp, Homo sapiens
ccctgaggacttttc

SEQ ID NO: 1104680 - DNA, 15 bp, Homo sapiens
tccctgaggactttt

SEQ ID NO: 1104681 - DNA, 15 bp, Homo sapiens
ttccctgaggacttt

SEQ ID NO: 1104682 - DNA, 15 bp, Homo sapiens
tttccctgaggactt

SEQ ID NO: 1104683 - DNA, 15 bp, Homo sapiens
ttttccctgaggact

SEQ ID NO: 1104684 - DNA, 15 bp, Homo sapiens
cttttccctgaggac

SEQ ID NO: 1104685 - DNA, 15 bp, Homo sapiens
acttttccctgagga

SEQ ID NO: 1104686 - DNA, 15 bp, Homo sapiens
tacttttccctgagg

SEQ ID NO: 1104687 - DNA, 15 bp, Homo sapiens
ttacttttccctgag

SEQ ID NO: 1104688 - DNA, 15 bp, Homo sapiens
gttacttttccctga

SEQ ID NO: 1104689 - DNA, 15 bp, Homo sapiens
cgttacttttccctg

SEQ ID NO: 1104690 - DNA, 15 bp, Homo sapiens
gcgttacttttccct

SEQ ID NO: 1104691 - DNA, 15 bp, Homo sapiens
tgcgttacttttccc

SEQ ID NO: 1104692 - DNA, 15 bp, Homo sapiens
ctgcgttacttttcc

SEQ ID NO: 1104693 - DNA, 15 bp, Homo sapiens
cctgcgttacttttc

SEQ ID NO: 1104694 - DNA, 15 bp, Homo sapiens
ccctgcgttactttt

SEQ ID NO: 1104695 - DNA, 15 bp, Homo sapiens
tccctgcgttacttt

SEQ ID NO: 1104696 - DNA, 15 bp, Homo sapiens
ctccctgcgttactt

SEQ ID NO: 1104697 - DNA, 15 bp, Homo sapiens
cctccctgcgttact

SEQ ID NO: 1104698 - DNA, 15 bp, Homo sapiens
tcctccctgcgttac

SEQ ID NO: 1104699 - DNA, 15 bp, Homo sapiens
ttcctccctgcgtta

SEQ ID NO: 1104700 - DNA, 15 bp, Homo sapiens
gttcctccctgcgtt

SEQ ID NO: 1104701 - DNA, 15 bp, Homo sapiens
agttcctccctgcgt

SEQ ID NO: 1104702 - DNA, 15 bp, Homo sapiens
cagttcctccctgcg

SEQ ID NO: 1104703 - DNA, 15 bp, Homo sapiens
gcagttcctccctgc

SEQ ID NO: 1104704 - DNA, 15 bp, Homo sapiens
agcagttcctccctg

SEQ ID NO: 1104705 - DNA, 15 bp, Homo sapiens
cagcagttcctccct

SEQ ID NO: 1104706 - DNA, 15 bp, Homo sapiens
ccagcagttcctccc

SEQ ID NO: 1104707 - DNA, 15 bp, Homo sapiens
cccagcagttcctcc

SEQ ID NO: 1104708 - DNA, 15 bp, Homo sapiens
ccccagcagttcctc

SEQ ID NO: 1104709 - DNA, 15 bp, Homo sapiens
gccccagcagttcct

SEQ ID NO: 1104710 - DNA, 15 bp, Homo sapiens
tgccccagcagttcc

SEQ ID NO: 1104711 - DNA, 15 bp, Homo sapiens
ctgccccagcagttc

SEQ ID NO: 1104712 - DNA, 15 bp, Homo sapiens
cctgccccagcagtt

SEQ ID NO: 1104713 - DNA, 15 bp, Homo sapiens
ccctgccccagcagt

SEQ ID NO: 1104714 - DNA, 15 bp, Homo sapiens
accctgccccagcag

SEQ ID NO: 1104715 - DNA, 15 bp, Homo sapiens
aaccctgccccagca

SEQ ID NO: 1104716 - DNA, 15 bp, Homo sapiens
aaaccctgccccagc

SEQ ID NO: 1104717 - DNA, 15 bp, Homo sapiens
caaaccctgccccag

SEQ ID NO: 1104718 - DNA, 15 bp, Homo sapiens
gcaaaccctgcccca

SEQ ID NO: 1104719 - DNA, 15 bp, Homo sapiens
tgcaaaccctgcccc

SEQ ID NO: 1104720 - DNA, 15 bp, Homo sapiens
atgcaaaccctgccc

SEQ ID NO: 1104721 - DNA, 15 bp, Homo sapiens
aatgcaaaccctgcc

SEQ ID NO: 1104722 - DNA, 15 bp, Homo sapiens
aaatgcaaaccctgc

SEQ ID NO: 1104723 - DNA, 15 bp, Homo sapiens
aaaatgcaaaccctg

SEQ ID NO: 1104724 - DNA, 15 bp, Homo sapiens
tctgggtagggctcc

SEQ ID NO: 1104725 - DNA, 15 bp, Homo sapiens
gtctgggtagggctc

SEQ ID NO: 1104726 - DNA, 15 bp, Homo sapiens
tgtctgggtagggct

SEQ ID NO: 1104727 - DNA, 15 bp, Homo sapiens
atgtctgggtagggc

SEQ ID NO: 1104728 - DNA, 15 bp, Homo sapiens
catgtctgggtaggg

SEQ ID NO: 1104729 - DNA, 15 bp, Homo sapiens
tcatgtctgggtagg

SEQ ID NO: 1104730 - DNA, 15 bp, Homo sapiens
atcatgtctgggtag

SEQ ID NO: 1104731 - DNA, 15 bp, Homo sapiens
catcatgtctgggta

SEQ ID NO: 1104732 - DNA, 15 bp, Homo sapiens
acatcatgtctgggt

SEQ ID NO: 1104733 - DNA, 15 bp, Homo sapiens
cacatcatgtctggg

SEQ ID NO: 1104734 - DNA, 15 bp, Homo sapiens
ccacatcatgtctgg

SEQ ID NO: 1104735 - DNA, 15 bp, Homo sapiens
tccacatcatgtctg

SEQ ID NO: 1104736 - DNA, 15 bp, Homo sapiens
ctccacatcatgtct

SEQ ID NO: 1104737 - DNA, 15 bp, Homo sapiens
cctccacatcatgtc

SEQ ID NO: 1104738 - DNA, 15 bp, Homo sapiens
acctccacatcatgt

SEQ ID NO: 1104739 - DNA, 15 bp, Homo sapiens
cacctccacatcatg

SEQ ID NO: 1104740 - DNA, 15 bp, Homo sapiens
ccacctccacatcat

SEQ ID NO: 1104741 - DNA, 15 bp, Homo sapiens
tccacctccacatca

SEQ ID NO: 1104742 - DNA, 15 bp, Homo sapiens
ctccacctccacatc

SEQ ID NO: 1104743 - DNA, 15 bp, Homo sapiens
gctccacctccacat

SEQ ID NO: 1104744 - DNA, 15 bp, Homo sapiens
tgctccacctccaca

SEQ ID NO: 1104745 - DNA, 15 bp, Homo sapiens
ttgctccacctccac

SEQ ID NO: 1104746 - DNA, 15 bp, Homo sapiens
tttgctccacctcca

SEQ ID NO: 1104747 - DNA, 15 bp, Homo sapiens
gtttgctccacctcc

SEQ ID NO: 1104748 - DNA, 15 bp, Homo sapiens
agtttgctccacctc

SEQ ID NO: 1104749 - DNA, 15 bp, Homo sapiens
tagtttgctccacct

SEQ ID NO: 1104750 - DNA, 15 bp, Homo sapiens
ctagtttgctccacc

SEQ ID NO: 1104751 - DNA, 15 bp, Homo sapiens
cctagtttgctccac

SEQ ID NO: 1104752 - DNA, 15 bp, Homo sapiens
gcctagtttgctcca

SEQ ID NO: 1104753 - DNA, 15 bp, Homo sapiens
tgcctagtttgctcc

SEQ ID NO: 1104754 - DNA, 15 bp, Homo sapiens
gtgcctagtttgctc

SEQ ID NO: 1104755 - DNA, 15 bp, Homo sapiens
agtgcctagtttgct

SEQ ID NO: 1104756 - DNA, 15 bp, Homo sapiens
cagtgcctagtttgc

SEQ ID NO: 1104757 - DNA, 15 bp, Homo sapiens
tcagtgcctagtttg

SEQ ID NO: 1104758 - DNA, 15 bp, Homo sapiens
ctcagtgcctagttt

SEQ ID NO: 1104759 - DNA, 15 bp, Homo sapiens
gctcagtgcctagtt

SEQ ID NO: 1104760 - DNA, 15 bp, Homo sapiens
ggctcagtgcctagt

SEQ ID NO: 1104761 - DNA, 15 bp, Homo sapiens
tggctcagtgcctag

SEQ ID NO: 1104762 - DNA, 15 bp, Homo sapiens
ttggctcagtgccta

SEQ ID NO: 1104763 - DNA, 15 bp, Homo sapiens
tttggctcagtgcct

SEQ ID NO: 1104764 - DNA, 15 bp, Homo sapiens
ctttggctcagtgcc

SEQ ID NO: 1104765 - DNA, 15 bp, Homo sapiens
cctttggctcagtgc

SEQ ID NO: 1104766 - DNA, 15 bp, Homo sapiens
ccctttggctcagtg

SEQ ID NO: 1104767 - DNA, 15 bp, Homo sapiens
cccctttggctcagt

SEQ ID NO: 1104768 - DNA, 15 bp, Homo sapiens
tcccctttggctcag

SEQ ID NO: 1104769 - DNA, 15 bp, Homo sapiens
atcccctttggctca

SEQ ID NO: 1104770 - DNA, 15 bp, Homo sapiens
gatcccctttggctc

SEQ ID NO: 1104771 - DNA, 15 bp, Homo sapiens
tgatcccctttggct

SEQ ID NO: 1104772 - DNA, 15 bp, Homo sapiens
ctgatcccctttggc

SEQ ID NO: 1104773 - DNA, 15 bp, Homo sapiens
actgatcccctttgg

SEQ ID NO: 1104774 - DNA, 15 bp, Homo sapiens
cactgatcccctttg

SEQ ID NO: 1104775 - DNA, 15 bp, Homo sapiens
tcactgatccccttt

SEQ ID NO: 1104776 - DNA, 15 bp, Homo sapiens
atcactgatcccctt

SEQ ID NO: 1104777 - DNA, 15 bp, Homo sapiens
tatcactgatcccct

SEQ ID NO: 1104778 - DNA, 15 bp, Homo sapiens
ctatcactgatcccc

SEQ ID NO: 1104779 - DNA, 15 bp, Homo sapiens
gctatcactgatccc

SEQ ID NO: 1104780 - DNA, 15 bp, Homo sapiens
ggctatcactgatcc

SEQ ID NO: 1104781 - DNA, 15 bp, Homo sapiens
tggctatcactgatc

SEQ ID NO: 1104782 - DNA, 15 bp, Homo sapiens
ctggctatcactgat

SEQ ID NO: 1104783 - DNA, 15 bp, Homo sapiens
gctggctatcactga

SEQ ID NO: 1104784 - DNA, 15 bp, Homo sapiens
agctggctatcactg

SEQ ID NO: 1104785 - DNA, 15 bp, Homo sapiens
aagctggctatcact

SEQ ID NO: 1104786 - DNA, 15 bp, Homo sapiens
aaagctggctatcac

SEQ ID NO: 1104787 - DNA, 15 bp, Homo sapiens
aaaagctggctatca

SEQ ID NO: 1104788 - DNA, 15 bp, Homo sapiens
caaaagctggctatc

SEQ ID NO: 1104789 - DNA, 15 bp, Homo sapiens
ccaaaagctggctat

SEQ ID NO: 1104790 - DNA, 15 bp, Homo sapiens
cccaaaagctggcta

SEQ ID NO: 1104791 - DNA, 15 bp, Homo sapiens
tcccaaaagctggct

SEQ ID NO: 1104792 - DNA, 15 bp, Homo sapiens
ctcccaaaagctggc

SEQ ID NO: 1104793 - DNA, 15 bp, Homo sapiens
tctcccaaaagctgg

SEQ ID NO: 1104794 - DNA, 15 bp, Homo sapiens
ctctcccaaaagctg

SEQ ID NO: 1104795 - DNA, 15 bp, Homo sapiens
gctctcccaaaagct

SEQ ID NO: 1104796 - DNA, 15 bp, Homo sapiens
ggctctcccaaaagc

SEQ ID NO: 1104797 - DNA, 15 bp, Homo sapiens
tggctctcccaaaag

SEQ ID NO: 1104798 - DNA, 15 bp, Homo sapiens
ctggctctcccaaaa

SEQ ID NO: 1104799 - DNA, 15 bp, Homo sapiens
tctggctctcccaaa

SEQ ID NO: 1104800 - DNA, 15 bp, Homo sapiens
atctggctctcccaa

SEQ ID NO: 1104801 - DNA, 15 bp, Homo sapiens
catctggctctccca

SEQ ID NO: 1104802 - DNA, 15 bp, Homo sapiens
tcatctggctctccc

SEQ ID NO: 1104803 - DNA, 15 bp, Homo sapiens
ctcatctggctctcc

SEQ ID NO: 1104804 - DNA, 15 bp, Homo sapiens
cctcatctggctctc

SEQ ID NO: 1104805 - DNA, 15 bp, Homo sapiens
gcctcatctggctct

SEQ ID NO: 1104806 - DNA, 15 bp, Homo sapiens
tgcctcatctggctc

SEQ ID NO: 1104807 - DNA, 15 bp, Homo sapiens
ctgcctcatctggct

SEQ ID NO: 1104808 - DNA, 15 bp, Homo sapiens
tctgcctcatctggc

SEQ ID NO: 1104809 - DNA, 15 bp, Homo sapiens
ctctgcctcatctgg

SEQ ID NO: 1104810 - DNA, 15 bp, Homo sapiens
tctctgcctcatctg

SEQ ID NO: 1104811 - DNA, 15 bp, Homo sapiens
ctctctgcctcatct

SEQ ID NO: 1104812 - DNA, 15 bp, Homo sapiens
gctctctgcctcatc

SEQ ID NO: 1104813 - DNA, 15 bp, Homo sapiens
agctctctgcctcat

SEQ ID NO: 1104814 - DNA, 15 bp, Homo sapiens
cagctctctgcctca

SEQ ID NO: 1104815 - DNA, 15 bp, Homo sapiens
ccagctctctgcctc

SEQ ID NO: 1104816 - DNA, 15 bp, Homo sapiens
cccagctctctgcct

SEQ ID NO: 1104817 - DNA, 15 bp, Homo sapiens
tcccagctctctgcc

SEQ ID NO: 1104818 - DNA, 15 bp, Homo sapiens
atcccagctctctgc

SEQ ID NO: 1104819 - DNA, 15 bp, Homo sapiens
tatcccagctctctg

SEQ ID NO: 1104820 - DNA, 15 bp, Homo sapiens
ctatcccagctctct

SEQ ID NO: 1104821 - DNA, 15 bp, Homo sapiens
cctatcccagctctc

SEQ ID NO: 1104822 - DNA, 15 bp, Homo sapiens
ccctatcccagctct

SEQ ID NO: 1104823 - DNA, 15 bp, Homo sapiens
accctatcccagctc

SEQ ID NO: 1104824 - DNA, 15 bp, Homo sapiens
caccctatcccagct

SEQ ID NO: 1104825 - DNA, 15 bp, Homo sapiens
ccaccctatcccagc

SEQ ID NO: 1104826 - DNA, 15 bp, Homo sapiens
tccaccctatcccag

SEQ ID NO: 1104827 - DNA, 15 bp, Homo sapiens
atccaccctatccca

SEQ ID NO: 1104828 - DNA, 15 bp, Homo sapiens
gatccaccctatccc

SEQ ID NO: 1104829 - DNA, 15 bp, Homo sapiens
agatccaccctatcc

SEQ ID NO: 1104830 - DNA, 15 bp, Homo sapiens
tagatccaccctatc

SEQ ID NO: 1104831 - DNA, 15 bp, Homo sapiens
gtagatccaccctat

SEQ ID NO: 1104832 - DNA, 15 bp, Homo sapiens
ggtagatccacccta

SEQ ID NO: 1104833 - DNA, 15 bp, Homo sapiens
aggtagatccaccct

SEQ ID NO: 1104834 - DNA, 15 bp, Homo sapiens
gaggtagatccaccc

SEQ ID NO: 1104835 - DNA, 15 bp, Homo sapiens
ggaggtagatccacc

SEQ ID NO: 1104836 - DNA, 15 bp, Homo sapiens
tggaggtagatccac

SEQ ID NO: 1104837 - DNA, 15 bp, Homo sapiens
ctggaggtagatcca

SEQ ID NO: 1104838 - DNA, 15 bp, Homo sapiens
cctggaggtagatcc

SEQ ID NO: 1104839 - DNA, 15 bp, Homo sapiens
acctggaggtagatc

SEQ ID NO: 1104840 - DNA, 15 bp, Homo sapiens
aacctggaggtagat

SEQ ID NO: 1104841 - DNA, 15 bp, Homo sapiens
gaacctggaggtaga

SEQ ID NO: 1104842 - DNA, 15 bp, Homo sapiens
tgaacctggaggtag

SEQ ID NO: 1104843 - DNA, 15 bp, Homo sapiens
ctgaacctggaggta

SEQ ID NO: 1104844 - DNA, 15 bp, Homo sapiens
cctgaacctggaggt

SEQ ID NO: 1104845 - DNA, 15 bp, Homo sapiens
tcctgaacctggagg

SEQ ID NO: 1104846 - DNA, 15 bp, Homo sapiens
gtcctgaacctggag

SEQ ID NO: 1104847 - DNA, 15 bp, Homo sapiens
tgtcctgaacctgga

SEQ ID NO: 1104848 - DNA, 15 bp, Homo sapiens
atgtcctgaacctgg

SEQ ID NO: 1104849 - DNA, 15 bp, Homo sapiens
aatgtcctgaacctg

SEQ ID NO: 1104850 - DNA, 15 bp, Homo sapiens
gaatgtcctgaacct

SEQ ID NO: 1104851 - DNA, 15 bp, Homo sapiens
tgaatgtcctgaacc

SEQ ID NO: 1104852 - DNA, 15 bp, Homo sapiens
ctgaatgtcctgaac

SEQ ID NO: 1104853 - DNA, 15 bp, Homo sapiens
cctgaatgtcctgaa

SEQ ID NO: 1104854 - DNA, 15 bp, Homo sapiens
ccctgaatgtcctga

SEQ ID NO: 1104855 - DNA, 15 bp, Homo sapiens
gccctgaatgtcctg

SEQ ID NO: 1104856 - DNA, 15 bp, Homo sapiens
tgccctgaatgtcct

SEQ ID NO: 1104857 - DNA, 15 bp, Homo sapiens
gtgccctgaatgtcc

SEQ ID NO: 1104858 - DNA, 15 bp, Homo sapiens
tgtgccctgaatgtc

SEQ ID NO: 1104859 - DNA, 15 bp, Homo sapiens
gtgtgccctgaatgt

SEQ ID NO: 1104860 - DNA, 15 bp, Homo sapiens
ggtgtgccctgaatg

SEQ ID NO: 1104861 - DNA, 15 bp, Homo sapiens
tggtgtgccctgaat

SEQ ID NO: 1104862 - DNA, 15 bp, Homo sapiens
gtggtgtgccctgaa

SEQ ID NO: 1104863 - DNA, 15 bp, Homo sapiens
agtggtgtgccctga

SEQ ID NO: 1104864 - DNA, 15 bp, Homo sapiens
cagtggtgtgccctg

SEQ ID NO: 1104865 - DNA, 15 bp, Homo sapiens
tcagtggtgtgccct

SEQ ID NO: 1104866 - DNA, 15 bp, Homo sapiens
ctcagtggtgtgccc

SEQ ID NO: 1104867 - DNA, 15 bp, Homo sapiens
gctcagtggtgtgcc

SEQ ID NO: 1104868 - DNA, 15 bp, Homo sapiens
tgctcagtggtgtgc

SEQ ID NO: 1104869 - DNA, 15 bp, Homo sapiens
ctgctcagtggtgtg

SEQ ID NO: 1104870 - DNA, 15 bp, Homo sapiens
cctgctcagtggtgt

SEQ ID NO: 1104871 - DNA, 15 bp, Homo sapiens
tcctgctcagtggtg

SEQ ID NO: 1104872 - DNA, 15 bp, Homo sapiens
ctcctgctcagtggt

SEQ ID NO: 1104873 - DNA, 15 bp, Homo sapiens
gctcctgctcagtgg

SEQ ID NO: 1104874 - DNA, 15 bp, Homo sapiens
tgctcctgctcagtg

SEQ ID NO: 1104875 - DNA, 15 bp, Homo sapiens
atgctcctgctcagt

SEQ ID NO: 1104876 - DNA, 15 bp, Homo sapiens
gatgctcctgctcag

SEQ ID NO: 1104877 - DNA, 15 bp, Homo sapiens
tgatgctcctgctca

SEQ ID NO: 1104878 - DNA, 15 bp, Homo sapiens
ctgatgctcctgctc

SEQ ID NO: 1104879 - DNA, 15 bp, Homo sapiens
cctgatgctcctgct

SEQ ID NO: 1104880 - DNA, 15 bp, Homo sapiens
acctgatgctcctgc

SEQ ID NO: 1104881 - DNA, 15 bp, Homo sapiens
tacctgatgctcctg

SEQ ID NO: 1104882 - DNA, 15 bp, Homo sapiens
gtacctgatgctcct

SEQ ID NO: 1104883 - DNA, 15 bp, Homo sapiens
ggtacctgatgctcc

SEQ ID NO: 1104884 - DNA, 15 bp, Homo sapiens
tggtacctgatgctc

SEQ ID NO: 1104885 - DNA, 15 bp, Homo sapiens
atggtacctgatgct

SEQ ID NO: 1104886 - DNA, 15 bp, Homo sapiens
catggtacctgatgc

SEQ ID NO: 1104887 - DNA, 15 bp, Homo sapiens
tcatggtacctgatg

SEQ ID NO: 1104888 - DNA, 15 bp, Homo sapiens
gtcatggtacctgat

SEQ ID NO: 1104889 - DNA, 15 bp, Homo sapiens
tgtcatggtacctga

SEQ ID NO: 1104890 - DNA, 15 bp, Homo sapiens
gtgtcatggtacctg

SEQ ID NO: 1104891 - DNA, 15 bp, Homo sapiens
tgtgtcatggtacct

SEQ ID NO: 1104892 - DNA, 15 bp, Homo sapiens
ctgtgtcatggtacc

SEQ ID NO: 1104893 - DNA, 15 bp, Homo sapiens
cctgtgtcatggtac

SEQ ID NO: 1104894 - DNA, 15 bp, Homo sapiens
ccctgtgtcatggta

SEQ ID NO: 1104895 - DNA, 15 bp, Homo sapiens
gccctgtgtcatggt

SEQ ID NO: 1104896 - DNA, 15 bp, Homo sapiens
agccctgtgtcatgg

SEQ ID NO: 1104897 - DNA, 15 bp, Homo sapiens
cagccctgtgtcatg

SEQ ID NO: 1104898 - DNA, 15 bp, Homo sapiens
ccagccctgtgtcat

SEQ ID NO: 1104899 - DNA, 15 bp, Homo sapiens
accagccctgtgtca

SEQ ID NO: 1104900 - DNA, 15 bp, Homo sapiens
gaccagccctgtgtc

SEQ ID NO: 1104901 - DNA, 15 bp, Homo sapiens
agaccagccctgtgt

SEQ ID NO: 1104902 - DNA, 15 bp, Homo sapiens
cagaccagccctgtg

SEQ ID NO: 1104903 - DNA, 15 bp, Homo sapiens
acagaccagccctgt

SEQ ID NO: 1104904 - DNA, 15 bp, Homo sapiens
cacagaccagccctg

SEQ ID NO: 1104905 - DNA, 15 bp, Homo sapiens
acacagaccagccct

SEQ ID NO: 1104906 - DNA, 15 bp, Homo sapiens
aacacagaccagccc

SEQ ID NO: 1104907 - DNA, 15 bp, Homo sapiens
taacacagaccagcc

SEQ ID NO: 1104908 - DNA, 15 bp, Homo sapiens
ctaacacagaccagc

SEQ ID NO: 1104909 - DNA, 15 bp, Homo sapiens
cctaacacagaccag

SEQ ID NO: 1104910 - DNA, 15 bp, Homo sapiens
tcctaacacagacca

SEQ ID NO: 1104911 - DNA, 15 bp, Homo sapiens
atcctaacacagacc

SEQ ID NO: 1104912 - DNA, 15 bp, Homo sapiens
tatcctaacacagac

SEQ ID NO: 1104913 - DNA, 15 bp, Homo sapiens
ttatcctaacacaga

SEQ ID NO: 1104914 - DNA, 15 bp, Homo sapiens
tttatcctaacacag

SEQ ID NO: 1104915 - DNA, 15 bp, Homo sapiens
ctttatcctaacaca

SEQ ID NO: 1104916 - DNA, 15 bp, Homo sapiens
gctttatcctaacac

SEQ ID NO: 1104917 - DNA, 15 bp, Homo sapiens
tgctttatcctaaca

SEQ ID NO: 1104918 - DNA, 15 bp, Homo sapiens
ttgctttatcctaac

SEQ ID NO: 1104919 - DNA, 15 bp, Homo sapiens
cttgctttatcctaa

SEQ ID NO: 1104920 - DNA, 15 bp, Homo sapiens
acttgctttatccta

SEQ ID NO: 1104921 - DNA, 15 bp, Homo sapiens
aacttgctttatcct

SEQ ID NO: 1104922 - DNA, 15 bp, Homo sapiens
gaacttgctttatcc

SEQ ID NO: 1104923 - DNA, 15 bp, Homo sapiens
agaacttgctttatc

SEQ ID NO: 1104924 - DNA, 15 bp, Homo sapiens
aagaacttgctttat

SEQ ID NO: 1104925 - DNA, 15 bp, Homo sapiens
taagaacttgcttta

SEQ ID NO: 1104926 - DNA, 15 bp, Homo sapiens
ttaagaacttgcttt

SEQ ID NO: 1104927 - DNA, 15 bp, Homo sapiens
attaagaacttgctt

SEQ ID NO: 1104928 - DNA, 15 bp, Homo sapiens
cattaagaacttgct

SEQ ID NO: 1104929 - DNA, 15 bp, Homo sapiens
ccattaagaacttgc

SEQ ID NO: 1104930 - DNA, 15 bp, Homo sapiens
cccattaagaacttg

SEQ ID NO: 1104931 - DNA, 15 bp, Homo sapiens
gcccattaagaactt

SEQ ID NO: 1104932 - DNA, 15 bp, Homo sapiens
agcccattaagaact

SEQ ID NO: 1104933 - DNA, 15 bp, Homo sapiens
aagcccattaagaac

SEQ ID NO: 1104934 - DNA, 15 bp, Homo sapiens
aaagcccattaagaa

SEQ ID NO: 1104935 - DNA, 15 bp, Homo sapiens
caaagcccattaaga

SEQ ID NO: 1104936 - DNA, 15 bp, Homo sapiens
tcaaagcccattaag

SEQ ID NO: 1104937 - DNA, 15 bp, Homo sapiens
ttcaaagcccattaa

SEQ ID NO: 1104938 - DNA, 15 bp, Homo sapiens
attcaaagcccatta

SEQ ID NO: 1104939 - DNA, 15 bp, Homo sapiens
gattcaaagcccatt

SEQ ID NO: 1104940 - DNA, 15 bp, Homo sapiens
ggattcaaagcccat

SEQ ID NO: 1104941 - DNA, 15 bp, Homo sapiens
tggattcaaagccca

SEQ ID NO: 1104942 - DNA, 15 bp, Homo sapiens
gtggattcaaagccc

SEQ ID NO: 1104943 - DNA, 15 bp, Homo sapiens
tgtggattcaaagcc

SEQ ID NO: 1104944 - DNA, 15 bp, Homo sapiens
ctgtggattcaaagc

SEQ ID NO: 1104945 - DNA, 15 bp, Homo sapiens
tctgtggattcaaag

SEQ ID NO: 1104946 - DNA, 15 bp, Homo sapiens
ttctgtggattcaaa

SEQ ID NO: 1104947 - DNA, 15 bp, Homo sapiens
tttctgtggattcaa

SEQ ID NO: 1104948 - DNA, 15 bp, Homo sapiens
gtttctgtggattca

SEQ ID NO: 1104949 - DNA, 15 bp, Homo sapiens
agtttctgtggattc

SEQ ID NO: 1104950 - DNA, 15 bp, Homo sapiens
aagtttctgtggatt

SEQ ID NO: 1104951 - DNA, 15 bp, Homo sapiens
aaagtttctgtggat

SEQ ID NO: 1104952 - DNA, 15 bp, Homo sapiens
caaagtttctgtgga

SEQ ID NO: 1104953 - DNA, 15 bp, Homo sapiens
gcaaagtttctgtgg

SEQ ID NO: 1104954 - DNA, 15 bp, Homo sapiens
agcaaagtttctgtg

SEQ ID NO: 1104955 - DNA, 15 bp, Homo sapiens
aagcaaagtttctgt

SEQ ID NO: 1104956 - DNA, 15 bp, Homo sapiens
caagcaaagtttctg

SEQ ID NO: 1104957 - DNA, 15 bp, Homo sapiens
acaagcaaagtttct

SEQ ID NO: 1104958 - DNA, 15 bp, Homo sapiens
cacaagcaaagtttc

SEQ ID NO: 1104959 - DNA, 15 bp, Homo sapiens
tcacaagcaaagttt

SEQ ID NO: 1104960 - DNA, 15 bp, Homo sapiens
atcacaagcaaagtt

SEQ ID NO: 1104961 - DNA, 15 bp, Homo sapiens
catcacaagcaaagt

SEQ ID NO: 1104962 - DNA, 15 bp, Homo sapiens
acatcacaagcaaag

SEQ ID NO: 1104963 - DNA, 15 bp, Homo sapiens
gacatcacaagcaaa

SEQ ID NO: 1104964 - DNA, 15 bp, Homo sapiens
ggacatcacaagcaa

SEQ ID NO: 1104965 - DNA, 15 bp, Homo sapiens
tggacatcacaagca

SEQ ID NO: 1104966 - DNA, 15 bp, Homo sapiens
ctggacatcacaagc

SEQ ID NO: 1104967 - DNA, 15 bp, Homo sapiens
tctggacatcacaag

SEQ ID NO: 1104968 - DNA, 15 bp, Homo sapiens
atctggacatcacaa

SEQ ID NO: 1104969 - DNA, 15 bp, Homo sapiens
catctggacatcaca

SEQ ID NO: 1104970 - DNA, 15 bp, Homo sapiens
tcatctggacatcac

SEQ ID NO: 1104971 - DNA, 15 bp, Homo sapiens
gtcatctggacatca

SEQ ID NO: 1104972 - DNA, 15 bp, Homo sapiens
cgtcatctggacatc

SEQ ID NO: 1104973 - DNA, 15 bp, Homo sapiens
ccgtcatctggacat

SEQ ID NO: 1104974 - DNA, 15 bp, Homo sapiens
gccgtcatctggaca

SEQ ID NO: 1104975 - DNA, 15 bp, Homo sapiens
ggccgtcatctggac

SEQ ID NO: 1104976 - DNA, 15 bp, Homo sapiens
gggccgtcatctgga

SEQ ID NO: 1104977 - DNA, 15 bp, Homo sapiens
ggggccgtcatctgg

SEQ ID NO: 1104978 - DNA, 15 bp, Homo sapiens
tggggccgtcatctg

SEQ ID NO: 1104979 - DNA, 15 bp, Homo sapiens
atggggccgtcatct

SEQ ID NO: 1104980 - DNA, 15 bp, Homo sapiens
gatggggccgtcatc

SEQ ID NO: 1104981 - DNA, 15 bp, Homo sapiens
ggatggggccgtcat

SEQ ID NO: 1104982 - DNA, 15 bp, Homo sapiens
gggatggggccgtca

SEQ ID NO: 1104983 - DNA, 15 bp, Homo sapiens
agggatggggccgtc

SEQ ID NO: 1104984 - DNA, 15 bp, Homo sapiens
aagggatggggccgt

SEQ ID NO: 1104985 - DNA, 15 bp, Homo sapiens
gaagggatggggccg

SEQ ID NO: 1104986 - DNA, 15 bp, Homo sapiens
agaagggatggggcc

SEQ ID NO: 1104987 - DNA, 15 bp, Homo sapiens
cagaagggatggggc

SEQ ID NO: 1104988 - DNA, 15 bp, Homo sapiens
gcagaagggatgggg

SEQ ID NO: 1104989 - DNA, 15 bp, Homo sapiens
tgcagaagggatggg

SEQ ID NO: 1104990 - DNA, 15 bp, Homo sapiens
ctgcagaagggatgg

SEQ ID NO: 1104991 - DNA, 15 bp, Homo sapiens
tctgcagaagggatg

SEQ ID NO: 1104992 - DNA, 15 bp, Homo sapiens
ttctgcagaagggat

SEQ ID NO: 1104993 - DNA, 15 bp, Homo sapiens
cttctgcagaaggga

SEQ ID NO: 1104994 - DNA, 15 bp, Homo sapiens
acttctgcagaaggg

SEQ ID NO: 1104995 - DNA, 15 bp, Homo sapiens
gacttctgcagaagg

SEQ ID NO: 1104996 - DNA, 15 bp, Homo sapiens
tgacttctgcagaag

SEQ ID NO: 1104997 - DNA, 15 bp, Homo sapiens
ctgacttctgcagaa

SEQ ID NO: 1104998 - DNA, 15 bp, Homo sapiens
tctgacttctgcaga

SEQ ID NO: 1104999 - DNA, 15 bp, Homo sapiens
ctctgacttctgcag

SEQ ID NO: 1105000 - DNA, 15 bp, Homo sapiens
actctgacttctgca

SEQ ID NO: 1105001 - DNA, 15 bp, Homo sapiens
aactctgacttctgc

SEQ ID NO: 1105002 - DNA, 15 bp, Homo sapiens
aaactctgacttctg

SEQ ID NO: 1105003 - DNA, 15 bp, Homo sapiens
aaaactctgacttct

SEQ ID NO: 1105004 - DNA, 15 bp, Homo sapiens
gaaaactctgacttc

SEQ ID NO: 1105005 - DNA, 15 bp, Homo sapiens
ggaaaactctgactt

SEQ ID NO: 1105006 - DNA, 15 bp, Homo sapiens
gggaaaactctgact

SEQ ID NO: 1105007 - DNA, 15 bp, Homo sapiens
tgggaaaactctgac

SEQ ID NO: 1105008 - DNA, 15 bp, Homo sapiens
ctgggaaaactctga

SEQ ID NO: 1105009 - DNA, 15 bp, Homo sapiens
tctgggaaaactctg

SEQ ID NO: 1105010 - DNA, 15 bp, Homo sapiens
ttctgggaaaactct

SEQ ID NO: 1105011 - DNA, 15 bp, Homo sapiens
tttctgggaaaactc

SEQ ID NO: 1105012 - DNA, 15 bp, Homo sapiens
ttttctgggaaaact

SEQ ID NO: 1105013 - DNA, 15 bp, Homo sapiens
tttttctgggaaaac

SEQ ID NO: 1105014 - DNA, 15 bp, Homo sapiens
ttttttctgggaaaa

SEQ ID NO: 1105015 - DNA, 15 bp, Homo sapiens
tttttttctgggaaa

SEQ ID NO: 1105016 - DNA, 15 bp, Homo sapiens
ctttttttctgggaa

SEQ ID NO: 1105017 - DNA, 15 bp, Homo sapiens
gctttttttctggga

SEQ ID NO: 1105018 - DNA, 15 bp, Homo sapiens
tgctttttttctggg

SEQ ID NO: 1105019 - DNA, 15 bp, Homo sapiens
ttgctttttttctgg

SEQ ID NO: 1105020 - DNA, 15 bp, Homo sapiens
attgctttttttctg

SEQ ID NO: 1105021 - DNA, 15 bp, Homo sapiens
cattgctttttttct

SEQ ID NO: 1105022 - DNA, 15 bp, Homo sapiens
tcattgctttttttc

SEQ ID NO: 1105023 - DNA, 15 bp, Homo sapiens
gtcattgcttttttt

SEQ ID NO: 1105024 - DNA, 15 bp, Homo sapiens
agtcattgctttttt

SEQ ID NO: 1105025 - DNA, 15 bp, Homo sapiens
cagtcattgcttttt

SEQ ID NO: 1105026 - DNA, 15 bp, Homo sapiens
tcagtcattgctttt

SEQ ID NO: 1105027 - DNA, 15 bp, Homo sapiens
ttcagtcattgcttt

SEQ ID NO: 1105028 - DNA, 15 bp, Homo sapiens
gttcagtcattgctt

SEQ ID NO: 1105029 - DNA, 15 bp, Homo sapiens
agttcagtcattgct

SEQ ID NO: 1105030 - DNA, 15 bp, Homo sapiens
tagttcagtcattgc

SEQ ID NO: 1105031 - DNA, 15 bp, Homo sapiens
gtagttcagtcattg

SEQ ID NO: 1105032 - DNA, 15 bp, Homo sapiens
tgtagttcagtcatt

SEQ ID NO: 1105033 - DNA, 15 bp, Homo sapiens
ctgtagttcagtcat

SEQ ID NO: 1105034 - DNA, 15 bp, Homo sapiens
gctgtagttcagtca

SEQ ID NO: 1105035 - DNA, 15 bp, Homo sapiens
agctgtagttcagtc

SEQ ID NO: 1105036 - DNA, 15 bp, Homo sapiens
tagctgtagttcagt

SEQ ID NO: 1105037 - DNA, 15 bp, Homo sapiens
ttagctgtagttcag

SEQ ID NO: 1105038 - DNA, 15 bp, Homo sapiens
attagctgtagttca

SEQ ID NO: 1105039 - DNA, 15 bp, Homo sapiens
tattagctgtagttc

SEQ ID NO: 1105040 - DNA, 15 bp, Homo sapiens
atattagctgtagtt

SEQ ID NO: 1105041 - DNA, 15 bp, Homo sapiens
aatattagctgtagt

SEQ ID NO: 1105042 - DNA, 15 bp, Homo sapiens
aaatattagctgtag

SEQ ID NO: 1105043 - DNA, 15 bp, Homo sapiens
caaatattagctgta

SEQ ID NO: 1105044 - DNA, 15 bp, Homo sapiens
ccaaatattagctgt

SEQ ID NO: 1105045 - DNA, 15 bp, Homo sapiens
tccaaatattagctg

SEQ ID NO: 1105046 - DNA, 15 bp, Homo sapiens
ctccaaatattagct

SEQ ID NO: 1105047 - DNA, 15 bp, Homo sapiens
tctccaaatattagc

SEQ ID NO: 1105048 - DNA, 15 bp, Homo sapiens
ttctccaaatattag

SEQ ID NO: 1105049 - DNA, 15 bp, Homo sapiens
gttctccaaatatta

SEQ ID NO: 1105050 - DNA, 15 bp, Homo sapiens
tgttctccaaatatt

SEQ ID NO: 1105051 - DNA, 15 bp, Homo sapiens
gtgttctccaaatat

SEQ ID NO: 1105052 - DNA, 15 bp, Homo sapiens
ggtgttctccaaata

SEQ ID NO: 1105053 - DNA, 15 bp, Homo sapiens
gggtgttctccaaat

SEQ ID NO: 1105054 - DNA, 15 bp, Homo sapiens
tgggtgttctccaaa

SEQ ID NO: 1105055 - DNA, 15 bp, Homo sapiens
gtgggtgttctccaa

SEQ ID NO: 1105056 - DNA, 15 bp, Homo sapiens
tgtgggtgttctcca

SEQ ID NO: 1105057 - DNA, 15 bp, Homo sapiens
atgtgggtgttctcc

SEQ ID NO: 1105058 - DNA, 15 bp, Homo sapiens
tatgtgggtgttctc

SEQ ID NO: 1105059 - DNA, 15 bp, Homo sapiens
ctatgtgggtgttct

SEQ ID NO: 1105060 - DNA, 15 bp, Homo sapiens
actatgtgggtgttc

SEQ ID NO: 1105061 - DNA, 15 bp, Homo sapiens
aactatgtgggtgtt

SEQ ID NO: 1105062 - DNA, 15 bp, Homo sapiens
caactatgtgggtgt

SEQ ID NO: 1105063 - DNA, 15 bp, Homo sapiens
acaactatgtgggtg

SEQ ID NO: 1105064 - DNA, 15 bp, Homo sapiens
tacaactatgtgggt

SEQ ID NO: 1105065 - DNA, 15 bp, Homo sapiens
gtacaactatgtggg

SEQ ID NO: 1105066 - DNA, 15 bp, Homo sapiens
agtacaactatgtgg

SEQ ID NO: 1105067 - DNA, 15 bp, Homo sapiens
gagtacaactatgtg

SEQ ID NO: 1105068 - DNA, 15 bp, Homo sapiens
agagtacaactatgt

SEQ ID NO: 1105069 - DNA, 15 bp, Homo sapiens
gagagtacaactatg

SEQ ID NO: 1105070 - DNA, 15 bp, Homo sapiens
agagagtacaactat

SEQ ID NO: 1105071 - DNA, 15 bp, Homo sapiens
tagagagtacaacta

SEQ ID NO: 1105072 - DNA, 15 bp, Homo sapiens
atagagagtacaact

SEQ ID NO: 1105073 - DNA, 15 bp, Homo sapiens
catagagagtacaac

SEQ ID NO: 1105074 - DNA, 15 bp, Homo sapiens
acatagagagtacaa

SEQ ID NO: 1105075 - DNA, 15 bp, Homo sapiens
tacatagagagtaca

SEQ ID NO: 1105076 - DNA, 15 bp, Homo sapiens
atacatagagagtac

SEQ ID NO: 1105077 - DNA, 15 bp, Homo sapiens
aatacatagagagta

SEQ ID NO: 1105078 - DNA, 15 bp, Homo sapiens
aaatacatagagagt

SEQ ID NO: 1105079 - DNA, 15 bp, Homo sapiens
gaaatacatagagag

SEQ ID NO: 1105080 - DNA, 15 bp, Homo sapiens
agaaatacatagaga

SEQ ID NO: 1105081 - DNA, 15 bp, Homo sapiens
tagaaatacatagag

SEQ ID NO: 1105082 - DNA, 15 bp, Homo sapiens
ttagaaatacataga

SEQ ID NO: 1105083 - DNA, 15 bp, Homo sapiens
tttagaaatacatag

SEQ ID NO: 1105084 - DNA, 15 bp, Homo sapiens
ttttagaaatacata

SEQ ID NO: 1105085 - DNA, 15 bp, Homo sapiens
tttttagaaatacat

SEQ ID NO: 1105086 - DNA, 15 bp, Homo sapiens
atttttagaaataca

SEQ ID NO: 1105087 - DNA, 15 bp, Homo sapiens
gatttttagaaatac

SEQ ID NO: 1105088 - DNA, 15 bp, Homo sapiens
tgatttttagaaata

SEQ ID NO: 1105089 - DNA, 15 bp, Homo sapiens
atgatttttagaaat

SEQ ID NO: 1105090 - DNA, 15 bp, Homo sapiens
aatgatttttagaaa

SEQ ID NO: 1105091 - DNA, 15 bp, Homo sapiens
taatgatttttagaa

SEQ ID NO: 1105092 - DNA, 15 bp, Homo sapiens
ttaatgatttttaga

SEQ ID NO: 1105093 - DNA, 15 bp, Homo sapiens
attaatgatttttag

SEQ ID NO: 1105094 - DNA, 15 bp, Homo sapiens
tattaatgattttta

SEQ ID NO: 1105095 - DNA, 15 bp, Homo sapiens
ttattaatgattttt

SEQ ID NO: 1105096 - DNA, 15 bp, Homo sapiens
tttattaatgatttt

SEQ ID NO: 1105097 - DNA, 15 bp, Homo sapiens
ttttattaatgattt

SEQ ID NO: 1105098 - DNA, 15 bp, Homo sapiens
attttattaatgatt

SEQ ID NO: 1105099 - DNA, 15 bp, Homo sapiens
aattttattaatgat

SEQ ID NO: 1105100 - DNA, 15 bp, Homo sapiens
aaattttattaatga

SEQ ID NO: 1105101 - DNA, 15 bp, Homo sapiens
aaaattttattaatg

SEQ ID NO: 1105102 - DNA, 15 bp, Homo sapiens
taaaattttattaat

SEQ ID NO: 1105103 - DNA, 15 bp, Homo sapiens
ataaaattttattaa

SEQ ID NO: 1105104 - DNA, 15 bp, Homo sapiens
aataaaattttatta

SEQ ID NO: 1105105 - DNA, 15 bp, Homo sapiens
taataaaattttatt

SEQ ID NO: 1105106 - DNA, 15 bp, Homo sapiens
ataataaaattttat

SEQ ID NO: 1105107 - DNA, 15 bp, Homo sapiens
cataataaaatttta

SEQ ID NO: 1105108 - DNA, 15 bp, Homo sapiens
gcataataaaatttt

SEQ ID NO: 1105109 - DNA, 15 bp, Homo sapiens
tgcataataaaattt

SEQ ID NO: 1105110 - DNA, 15 bp, Homo sapiens
atgcataataaaatt

SEQ ID NO: 1105111 - DNA, 15 bp, Homo sapiens
aatgcataataaaat

SEQ ID NO: 1105112 - DNA, 15 bp, Homo sapiens
taatgcataataaaa

SEQ ID NO: 1105113 - DNA, 15 bp, Homo sapiens
ataatgcataataaa

SEQ ID NO: 1105114 - DNA, 15 bp, Homo sapiens
aataatgcataataa

SEQ ID NO: 1105115 - DNA, 15 bp, Homo sapiens
taataatgcataata

SEQ ID NO: 1105116 - DNA, 15 bp, Homo sapiens
ataataatgcataat

SEQ ID NO: 1105117 - DNA, 15 bp, Homo sapiens
aataataatgcataa

SEQ ID NO: 1105118 - DNA, 15 bp, Homo sapiens
caataataatgcata

SEQ ID NO: 1105119 - DNA, 15 bp, Homo sapiens
tcaataataatgcat

SEQ ID NO: 1105120 - DNA, 15 bp, Homo sapiens
atcaataataatgca

SEQ ID NO: 1105121 - DNA, 15 bp, Homo sapiens
tatcaataataatgc

SEQ ID NO: 1105122 - DNA, 15 bp, Homo sapiens
atatcaataataatg

SEQ ID NO: 1105123 - DNA, 15 bp, Homo sapiens
aatatcaataataat

SEQ ID NO: 1105124 - DNA, 15 bp, Homo sapiens
aaatatcaataataa

SEQ ID NO: 1105125 - DNA, 15 bp, Homo sapiens
gaaatatcaataata

SEQ ID NO: 1105126 - DNA, 15 bp, Homo sapiens
ggaaatatcaataat

SEQ ID NO: 1105127 - DNA, 15 bp, Homo sapiens
aggaaatatcaataa

SEQ ID NO: 1105128 - DNA, 15 bp, Homo sapiens
aaggaaatatcaata

SEQ ID NO: 1105129 - DNA, 15 bp, Homo sapiens
aaaggaaatatcaat

SEQ ID NO: 1105130 - DNA, 15 bp, Homo sapiens
caaaggaaatatcaa

SEQ ID NO: 1105131 - DNA, 15 bp, Homo sapiens
acaaaggaaatatca

SEQ ID NO: 1105132 - DNA, 15 bp, Homo sapiens
gacaaaggaaatatc

SEQ ID NO: 1105133 - DNA, 15 bp, Homo sapiens
tgacaaaggaaatat

SEQ ID NO: 1105134 - DNA, 15 bp, Homo sapiens
atgacaaaggaaata

SEQ ID NO: 1105135 - DNA, 15 bp, Homo sapiens
tatgacaaaggaaat

SEQ ID NO: 1105136 - DNA, 15 bp, Homo sapiens
atatgacaaaggaaa

SEQ ID NO: 1105137 - DNA, 15 bp, Homo sapiens
aatatgacaaaggaa

SEQ ID NO: 1105138 - DNA, 15 bp, Homo sapiens
gaatatgacaaagga

SEQ ID NO: 1105139 - DNA, 15 bp, Homo sapiens
tgaatatgacaaagg

SEQ ID NO: 1105140 - DNA, 15 bp, Homo sapiens
atgaatatgacaaag

SEQ ID NO: 1105141 - DNA, 15 bp, Homo sapiens
aatgaatatgacaaa

SEQ ID NO: 1105142 - DNA, 15 bp, Homo sapiens
taatgaatatgacaa

SEQ ID NO: 1105143 - DNA, 15 bp, Homo sapiens
ataatgaatatgaca

SEQ ID NO: 1105144 - DNA, 15 bp, Homo sapiens
aataatgaatatgac

SEQ ID NO: 1105145 - DNA, 15 bp, Homo sapiens
aaataatgaatatga

SEQ ID NO: 1105146 - DNA, 15 bp, Homo sapiens
aaaataatgaatatg

SEQ ID NO: 1105147 - DNA, 15 bp, Homo sapiens
gaaaataatgaatat

SEQ ID NO: 1105148 - DNA, 15 bp, Homo sapiens
tgaaaataatgaata

SEQ ID NO: 1105149 - DNA, 15 bp, Homo sapiens
atgaaaataatgaat

SEQ ID NO: 1105150 - DNA, 15 bp, Homo sapiens
aatgaaaataatgaa

SEQ ID NO: 1105151 - DNA, 15 bp, Homo sapiens
aaatgaaaataatga

SEQ ID NO: 1105152 - DNA, 15 bp, Homo sapiens
taaatgaaaataatg

SEQ ID NO: 1105153 - DNA, 15 bp, Homo sapiens
attaaatgaaaataa

SEQ ID NO: 1105154 - DNA, 15 bp, Homo sapiens
tattaaatgaaaata

SEQ ID NO: 1105155 - DNA, 15 bp, Homo sapiens
ttattaaatgaaaat

SEQ ID NO: 1105156 - DNA, 15 bp, Homo sapiens
gttattaaatgaaaa

SEQ ID NO: 1105157 - DNA, 15 bp, Homo sapiens
agttattaaatgaaa

SEQ ID NO: 1105158 - DNA, 15 bp, Homo sapiens
aagttattaaatgaa

SEQ ID NO: 1105159 - DNA, 15 bp, Homo sapiens
taagttattaaatga

SEQ ID NO: 1105160 - DNA, 15 bp, Homo sapiens
ataagttattaaatg

SEQ ID NO: 1105161 - DNA, 15 bp, Homo sapiens
tataagttattaaat

SEQ ID NO: 1105162 - DNA, 15 bp, Homo sapiens
atataagttattaaa

SEQ ID NO: 1105163 - DNA, 15 bp, Homo sapiens
catataagttattaa

SEQ ID NO: 1105164 - DNA, 15 bp, Homo sapiens
acatataagttatta

SEQ ID NO: 1105165 - DNA, 15 bp, Homo sapiens
aacatataagttatt

SEQ ID NO: 1105166 - DNA, 15 bp, Homo sapiens
aaacatataagttat

SEQ ID NO: 1105167 - DNA, 15 bp, Homo sapiens
taaacatataagtta

SEQ ID NO: 1105168 - DNA, 15 bp, Homo sapiens
ttaaacatataagtt

SEQ ID NO: 1105169 - DNA, 15 bp, Homo sapiens
tttaaacatataagt

SEQ ID NO: 1105170 - DNA, 15 bp, Homo sapiens
ttttaaacatataag

SEQ ID NO: 1105171 - DNA, 15 bp, Homo sapiens
tttttaaacatataa

SEQ ID NO: 1105172 - DNA, 15 bp, Homo sapiens
ttttttaaacatata

SEQ ID NO: 1105173 - DNA, 15 bp, Homo sapiens
attttttaaacatat

SEQ ID NO: 1105174 - DNA, 15 bp, Homo sapiens
tattttttaaacata

SEQ ID NO: 1105175 - DNA, 15 bp, Homo sapiens
ctattttttaaacat

SEQ ID NO: 1105176 - DNA, 15 bp, Homo sapiens
actattttttaaaca

SEQ ID NO: 1105177 - DNA, 15 bp, Homo sapiens
aactattttttaaac

SEQ ID NO: 1105178 - DNA, 15 bp, Homo sapiens
aaactattttttaaa

SEQ ID NO: 1105179 - DNA, 15 bp, Homo sapiens
taaactattttttaa

SEQ ID NO: 1105180 - DNA, 15 bp, Homo sapiens
gtaaactatttttta

SEQ ID NO: 1105181 - DNA, 15 bp, Homo sapiens
ggtaaactatttttt

SEQ ID NO: 1105182 - DNA, 15 bp, Homo sapiens
gggtaaactattttt

SEQ ID NO: 1105183 - DNA, 15 bp, Homo sapiens
agggtaaactatttt

SEQ ID NO: 1105184 - DNA, 15 bp, Homo sapiens
aagggtaaactattt

SEQ ID NO: 1105185 - DNA, 15 bp, Homo sapiens
taagggtaaactatt

SEQ ID NO: 1105186 - DNA, 15 bp, Homo sapiens
ataagggtaaactat

SEQ ID NO: 1105187 - DNA, 15 bp, Homo sapiens
aataagggtaaacta

SEQ ID NO: 1105188 - DNA, 15 bp, Homo sapiens
caataagggtaaact

SEQ ID NO: 1105189 - DNA, 15 bp, Homo sapiens
acaataagggtaaac

SEQ ID NO: 1105190 - DNA, 15 bp, Homo sapiens
tacaataagggtaaa

SEQ ID NO: 1105191 - DNA, 15 bp, Homo sapiens
atacaataagggtaa

SEQ ID NO: 1105192 - DNA, 15 bp, Homo sapiens
tatacaataagggta

SEQ ID NO: 1105193 - DNA, 15 bp, Homo sapiens
atatacaataagggt

SEQ ID NO: 1105194 - DNA, 15 bp, Homo sapiens
tatatacaataaggg

SEQ ID NO: 1105195 - DNA, 15 bp, Homo sapiens
ttatatacaataagg

SEQ ID NO: 1105196 - DNA, 15 bp, Homo sapiens
attatatacaataag

SEQ ID NO: 1105197 - DNA, 15 bp, Homo sapiens
aattatatacaataa

SEQ ID NO: 1105198 - DNA, 15 bp, Homo sapiens
aaattatatacaata

SEQ ID NO: 1105199 - DNA, 15 bp, Homo sapiens
taaattatatacaat

SEQ ID NO: 1105200 - DNA, 15 bp, Homo sapiens
ctaaattatatacaa

SEQ ID NO: 1105201 - DNA, 15 bp, Homo sapiens
tctaaattatataca

SEQ ID NO: 1105202 - DNA, 15 bp, Homo sapiens
ttctaaattatatac

SEQ ID NO: 1105203 - DNA, 15 bp, Homo sapiens
cttctaaattatata

SEQ ID NO: 1105204 - DNA, 15 bp, Homo sapiens
tcttctaaattatat

SEQ ID NO: 1105205 - DNA, 15 bp, Homo sapiens
atcttctaaattata

SEQ ID NO: 1105206 - DNA, 15 bp, Homo sapiens
catcttctaaattat

SEQ ID NO: 1105207 - DNA, 15 bp, Homo sapiens
gcatcttctaaatta

SEQ ID NO: 1105208 - DNA, 15 bp, Homo sapiens
tgcatcttctaaatt

SEQ ID NO: 1105209 - DNA, 15 bp, Homo sapiens
ctgcatcttctaaat

SEQ ID NO: 1105210 - DNA, 15 bp, Homo sapiens
tctgcatcttctaaa

SEQ ID NO: 1105211 - DNA, 15 bp, Homo sapiens
ttctgcatcttctaa

SEQ ID NO: 1105212 - DNA, 15 bp, Homo sapiens
tttctgcatcttcta

SEQ ID NO: 1105213 - DNA, 15 bp, Homo sapiens
ttttctgcatcttct

SEQ ID NO: 1105214 - DNA, 15 bp, Homo sapiens
cttttctgcatcttc

SEQ ID NO: 1105215 - DNA, 15 bp, Homo sapiens
gcttttctgcatctt

SEQ ID NO: 1105216 - DNA, 15 bp, Homo sapiens
tgcttttctgcatct

SEQ ID NO: 1105217 - DNA, 15 bp, Homo sapiens
atgcttttctgcatc

SEQ ID NO: 1105218 - DNA, 15 bp, Homo sapiens
catgcttttctgcat

SEQ ID NO: 1105219 - DNA, 15 bp, Homo sapiens
tcatgcttttctgca

SEQ ID NO: 1105220 - DNA, 15 bp, Homo sapiens
ctcatgcttttctgc

SEQ ID NO: 1105221 - DNA, 15 bp, Homo sapiens
cctcatgcttttctg

SEQ ID NO: 1105222 - DNA, 15 bp, Homo sapiens
tcctcatgcttttct

SEQ ID NO: 1105223 - DNA, 15 bp, Homo sapiens
ttcctcatgcttttc

SEQ ID NO: 1105224 - DNA, 15 bp, Homo sapiens
cttcctcatgctttt

SEQ ID NO: 1105225 - DNA, 15 bp, Homo sapiens
tcttcctcatgcttt

SEQ ID NO: 1105226 - DNA, 15 bp, Homo sapiens
ttcttcctcatgctt

SEQ ID NO: 1105227 - DNA, 15 bp, Homo sapiens
tttcttcctcatgct

SEQ ID NO: 1105228 - DNA, 15 bp, Homo sapiens
ttttcttcctcatgc

SEQ ID NO: 1105229 - DNA, 15 bp, Homo sapiens
attttcttcctcatg

SEQ ID NO: 1105230 - DNA, 15 bp, Homo sapiens
cattttcttcctcat

SEQ ID NO: 1105231 - DNA, 15 bp, Homo sapiens
tcattttcttcctca

SEQ ID NO: 1105232 - DNA, 15 bp, Homo sapiens
ttcattttcttcctc

SEQ ID NO: 1105233 - DNA, 15 bp, Homo sapiens
tttcattttcttcct

SEQ ID NO: 1105234 - DNA, 15 bp, Homo sapiens
ttttcattttcttcc

SEQ ID NO: 1105235 - DNA, 15 bp, Homo sapiens
gttttcattttcttc

SEQ ID NO: 1105236 - DNA, 15 bp, Homo sapiens
ggttttcattttctt

SEQ ID NO: 1105237 - DNA, 15 bp, Homo sapiens
tggttttcattttct

SEQ ID NO: 1105238 - DNA, 15 bp, Homo sapiens
gtggttttcattttc

SEQ ID NO: 1105239 - DNA, 15 bp, Homo sapiens
ggtggttttcatttt

SEQ ID NO: 1105240 - DNA, 15 bp, Homo sapiens
gggtggttttcattt

SEQ ID NO: 1105241 - DNA, 15 bp, Homo sapiens
agggtggttttcatt

SEQ ID NO: 1105242 - DNA, 15 bp, Homo sapiens
gagggtggttttcat

SEQ ID NO: 1105243 - DNA, 15 bp, Homo sapiens
tgagggtggttttca

SEQ ID NO: 1105244 - DNA, 15 bp, Homo sapiens
atgagggtggttttc

SEQ ID NO: 1105245 - DNA, 15 bp, Homo sapiens
aatgagggtggtttt

SEQ ID NO: 1105246 - DNA, 15 bp, Homo sapiens
gaatgagggtggttt

SEQ ID NO: 1105247 - DNA, 15 bp, Homo sapiens
tgaatgagggtggtt

SEQ ID NO: 1105248 - DNA, 15 bp, Homo sapiens
gtgaatgagggtggt

SEQ ID NO: 1105249 - DNA, 15 bp, Homo sapiens
tgtgaatgagggtgg

SEQ ID NO: 1105250 - DNA, 15 bp, Homo sapiens
atgtgaatgagggtg

SEQ ID NO: 1105251 - DNA, 15 bp, Homo sapiens
aatgtgaatgagggt

SEQ ID NO: 1105252 - DNA, 15 bp, Homo sapiens
aaatgtgaatgaggg

SEQ ID NO: 1105253 - DNA, 15 bp, Homo sapiens
caaatgtgaatgagg

SEQ ID NO: 1105254 - DNA, 15 bp, Homo sapiens
gcaaatgtgaatgag

SEQ ID NO: 1105255 - DNA, 15 bp, Homo sapiens
tgcaaatgtgaatga

SEQ ID NO: 1105256 - DNA, 15 bp, Homo sapiens
atgcaaatgtgaatg

SEQ ID NO: 1105257 - DNA, 15 bp, Homo sapiens
tatgcaaatgtgaat

SEQ ID NO: 1105258 - DNA, 15 bp, Homo sapiens
ttatgcaaatgtgaa

SEQ ID NO: 1105259 - DNA, 15 bp, Homo sapiens
gttatgcaaatgtga

SEQ ID NO: 1105260 - DNA, 15 bp, Homo sapiens
ggttatgcaaatgtg

SEQ ID NO: 1105261 - DNA, 15 bp, Homo sapiens
aggttatgcaaatgt

SEQ ID NO: 1105262 - DNA, 15 bp, Homo sapiens
taggttatgcaaatg

SEQ ID NO: 1105263 - DNA, 15 bp, Homo sapiens
gtaggttatgcaaat

SEQ ID NO: 1105264 - DNA, 15 bp, Homo sapiens
tgtaggttatgcaaa

SEQ ID NO: 1105265 - DNA, 15 bp, Homo sapiens
ctgtaggttatgcaa

SEQ ID NO: 1105266 - DNA, 15 bp, Homo sapiens
tctgtaggttatgca

SEQ ID NO: 1105267 - DNA, 15 bp, Homo sapiens
atctgtaggttatgc

SEQ ID NO: 1105268 - DNA, 15 bp, Homo sapiens
tatctgtaggttatg

SEQ ID NO: 1105269 - DNA, 15 bp, Homo sapiens
ttatctgtaggttat

SEQ ID NO: 1105270 - DNA, 15 bp, Homo sapiens
cttatctgtaggtta

SEQ ID NO: 1105271 - DNA, 15 bp, Homo sapiens
gcttatctgtaggtt

SEQ ID NO: 1105272 - DNA, 15 bp, Homo sapiens
tgcttatctgtaggt

SEQ ID NO: 1105273 - DNA, 15 bp, Homo sapiens
gtgcttatctgtagg

SEQ ID NO: 1105274 - DNA, 15 bp, Homo sapiens
agtgcttatctgtag

SEQ ID NO: 1105275 - DNA, 15 bp, Homo sapiens
aagtgcttatctgta

SEQ ID NO: 1105276 - DNA, 15 bp, Homo sapiens
aaagtgcttatctgt

SEQ ID NO: 1105277 - DNA, 15 bp, Homo sapiens
aaaagtgcttatctg

SEQ ID NO: 1105278 - DNA, 15 bp, Homo sapiens
aaaaagtgcttatct

SEQ ID NO: 1105279 - DNA, 15 bp, Homo sapiens
taaaaagtgcttatc

SEQ ID NO: 1105280 - DNA, 15 bp, Homo sapiens
ataaaaagtgcttat

SEQ ID NO: 1105281 - DNA, 15 bp, Homo sapiens
tataaaaagtgctta

SEQ ID NO: 1105282 - DNA, 15 bp, Homo sapiens
atataaaaagtgctt

SEQ ID NO: 1105283 - DNA, 15 bp, Homo sapiens
aatataaaaagtgct

SEQ ID NO: 1105284 - DNA, 15 bp, Homo sapiens
caatataaaaagtgc

SEQ ID NO: 1105285 - DNA, 15 bp, Homo sapiens
acaatataaaaagtg

SEQ ID NO: 1105286 - DNA, 15 bp, Homo sapiens
tacaatataaaaagt

SEQ ID NO: 1105287 - DNA, 15 bp, Homo sapiens
gtacaatataaaaag

SEQ ID NO: 1105288 - DNA, 15 bp, Homo sapiens
agtacaatataaaaa

SEQ ID NO: 1105289 - DNA, 15 bp, Homo sapiens
aagtacaatataaaa

SEQ ID NO: 1105290 - DNA, 15 bp, Homo sapiens
gaagtacaatataaa

SEQ ID NO: 1105291 - DNA, 15 bp, Homo sapiens
agaagtacaatataa

SEQ ID NO: 1105292 - DNA, 15 bp, Homo sapiens
aagaagtacaatata

SEQ ID NO: 1105293 - DNA, 15 bp, Homo sapiens
gaagaagtacaatat

SEQ ID NO: 1105294 - DNA, 15 bp, Homo sapiens
ggaagaagtacaata

SEQ ID NO: 1105295 - DNA, 15 bp, Homo sapiens
tggaagaagtacaat

SEQ ID NO: 1105296 - DNA, 15 bp, Homo sapiens
ctggaagaagtacaa

SEQ ID NO: 1105297 - DNA, 15 bp, Homo sapiens
actggaagaagtaca

SEQ ID NO: 1105298 - DNA, 15 bp, Homo sapiens
gactggaagaagtac

SEQ ID NO: 1105299 - DNA, 15 bp, Homo sapiens
agactggaagaagta

SEQ ID NO: 1105300 - DNA, 15 bp, Homo sapiens
aagactggaagaagt

SEQ ID NO: 1105301 - DNA, 15 bp, Homo sapiens
aaagactggaagaag

SEQ ID NO: 1105302 - DNA, 15 bp, Homo sapiens
aaaagactggaagaa

SEQ ID NO: 1105303 - DNA, 15 bp, Homo sapiens
gaaaagactggaaga

SEQ ID NO: 1105304 - DNA, 15 bp, Homo sapiens
agaaaagactggaag

SEQ ID NO: 1105305 - DNA, 15 bp, Homo sapiens
tagaaaagactggaa

SEQ ID NO: 1105306 - DNA, 15 bp, Homo sapiens
gtagaaaagactgga

SEQ ID NO: 1105307 - DNA, 15 bp, Homo sapiens
tgtagaaaagactgg

SEQ ID NO: 1105308 - DNA, 15 bp, Homo sapiens
atgtagaaaagactg

SEQ ID NO: 1105309 - DNA, 15 bp, Homo sapiens
catgtagaaaagact

SEQ ID NO: 1105310 - DNA, 15 bp, Homo sapiens
acatgtagaaaagac

SEQ ID NO: 1105311 - DNA, 15 bp, Homo sapiens
cacatgtagaaaaga

SEQ ID NO: 1105312 - DNA, 15 bp, Homo sapiens
acacatgtagaaaag

SEQ ID NO: 1105313 - DNA, 15 bp, Homo sapiens
tacacatgtagaaaa

SEQ ID NO: 1105314 - DNA, 15 bp, Homo sapiens
gtacacatgtagaaa

SEQ ID NO: 1105315 - DNA, 15 bp, Homo sapiens
tgtacacatgtagaa

SEQ ID NO: 1105316 - DNA, 15 bp, Homo sapiens
atgtacacatgtaga

SEQ ID NO: 1105317 - DNA, 15 bp, Homo sapiens
catgtacacatgtag

SEQ ID NO: 1105318 - DNA, 15 bp, Homo sapiens
tcatgtacacatgta

SEQ ID NO: 1105319 - DNA, 15 bp, Homo sapiens
gtcatgtacacatgt

SEQ ID NO: 1105320 - DNA, 15 bp, Homo sapiens
tgtcatgtacacatg

SEQ ID NO: 1105321 - DNA, 15 bp, Homo sapiens
ttgtcatgtacacat

SEQ ID NO: 1105322 - DNA, 15 bp, Homo sapiens
tttgtcatgtacaca

SEQ ID NO: 1105323 - DNA, 15 bp, Homo sapiens
ttttgtcatgtacac

SEQ ID NO: 1105324 - DNA, 15 bp, Homo sapiens
attttgtcatgtaca

SEQ ID NO: 1105325 - DNA, 15 bp, Homo sapiens
aattttgtcatgtac

SEQ ID NO: 1105326 - DNA, 15 bp, Homo sapiens
taattttgtcatgta

SEQ ID NO: 1105327 - DNA, 15 bp, Homo sapiens
ctaattttgtcatgt

SEQ ID NO: 1105328 - DNA, 15 bp, Homo sapiens
cctaattttgtcatg

SEQ ID NO: 1105329 - DNA, 15 bp, Homo sapiens
tcctaattttgtcat

SEQ ID NO: 1105330 - DNA, 15 bp, Homo sapiens
ttcctaattttgtca

SEQ ID NO: 1105331 - DNA, 15 bp, Homo sapiens
attcctaattttgtc

SEQ ID NO: 1105332 - DNA, 15 bp, Homo sapiens
tattcctaattttgt

SEQ ID NO: 1105333 - DNA, 15 bp, Homo sapiens
gtattcctaattttg

SEQ ID NO: 1105334 - DNA, 15 bp, Homo sapiens
tgtattcctaatttt

SEQ ID NO: 1105335 - DNA, 15 bp, Homo sapiens
gtgtattcctaattt

SEQ ID NO: 1105336 - DNA, 15 bp, Homo sapiens
agtgtattcctaatt

SEQ ID NO: 1105337 - DNA, 15 bp, Homo sapiens
tagtgtattcctaat

SEQ ID NO: 1105338 - DNA, 15 bp, Homo sapiens
ttagtgtattcctaa

SEQ ID NO: 1105339 - DNA, 15 bp, Homo sapiens
attagtgtattccta

SEQ ID NO: 1105340 - DNA, 15 bp, Homo sapiens
aattagtgtattcct

SEQ ID NO: 1105341 - DNA, 15 bp, Homo sapiens
aaattagtgtattcc

SEQ ID NO: 1105342 - DNA, 15 bp, Homo sapiens
aaaattagtgtattc

SEQ ID NO: 1105343 - DNA, 15 bp, Homo sapiens
caaaattagtgtatt

SEQ ID NO: 1105344 - DNA, 15 bp, Homo sapiens
ccaaaattagtgtat

SEQ ID NO: 1105345 - DNA, 15 bp, Homo sapiens
accaaaattagtgta

SEQ ID NO: 1105346 - DNA, 15 bp, Homo sapiens
taccaaaattagtgt

SEQ ID NO: 1105347 - DNA, 15 bp, Homo sapiens
ctaccaaaattagtg

SEQ ID NO: 1105348 - DNA, 15 bp, Homo sapiens
cctaccaaaattagt

SEQ ID NO: 1105349 - DNA, 15 bp, Homo sapiens
acctaccaaaattag

SEQ ID NO: 1105350 - DNA, 15 bp, Homo sapiens
tacctaccaaaatta

SEQ ID NO: 1105351 - DNA, 15 bp, Homo sapiens
ttacctaccaaaatt

SEQ ID NO: 1105352 - DNA, 15 bp, Homo sapiens
tttacctaccaaaat

SEQ ID NO: 1105353 - DNA, 15 bp, Homo sapiens
ttttacctaccaaaa

SEQ ID NO: 1105354 - DNA, 15 bp, Homo sapiens
tttttacctaccaaa

SEQ ID NO: 1105355 - DNA, 15 bp, Homo sapiens
ttttttacctaccaa

SEQ ID NO: 1105356 - DNA, 15 bp, Homo sapiens
tttttttacctacca

SEQ ID NO: 1105357 - DNA, 15 bp, Homo sapiens
atttttttacctacc

SEQ ID NO: 1105358 - DNA, 15 bp, Homo sapiens
tatttttttacctac

SEQ ID NO: 1105359 - DNA, 15 bp, Homo sapiens
atatttttttaccta

SEQ ID NO: 1105360 - DNA, 15 bp, Homo sapiens
gtgtatattttttta

SEQ ID NO: 1105361 - DNA, 15 bp, Homo sapiens
tgtgtatattttttt

SEQ ID NO: 1105362 - DNA, 15 bp, Homo sapiens
ttgtgtatatttttt

SEQ ID NO: 1105363 - DNA, 15 bp, Homo sapiens
attgtgtatattttt

SEQ ID NO: 1105364 - DNA, 15 bp, Homo sapiens
aattgtgtatatttt

SEQ ID NO: 1105365 - DNA, 15 bp, Homo sapiens
gaattgtgtatattt

SEQ ID NO: 1105366 - DNA, 15 bp, Homo sapiens
tgaattgtgtatatt

SEQ ID NO: 1105367 - DNA, 15 bp, Homo sapiens
ttgaattgtgtatat

SEQ ID NO: 1105368 - DNA, 15 bp, Homo sapiens
attgaattgtgtata

SEQ ID NO: 1105369 - DNA, 15 bp, Homo sapiens
aattgaattgtgtat

SEQ ID NO: 1105370 - DNA, 15 bp, Homo sapiens
taattgaattgtgta

SEQ ID NO: 1105371 - DNA, 15 bp, Homo sapiens
ttaattgaattgtgt

SEQ ID NO: 1105372 - DNA, 15 bp, Homo sapiens
tttaattgaattgtg

SEQ ID NO: 1105373 - DNA, 15 bp, Homo sapiens
atttaattgaattgt

SEQ ID NO: 1105374 - DNA, 15 bp, Homo sapiens
catttaattgaattg

SEQ ID NO: 1105375 - DNA, 15 bp, Homo sapiens
ccatttaattgaatt

SEQ ID NO: 1105376 - DNA, 15 bp, Homo sapiens
gccatttaattgaat

SEQ ID NO: 1105377 - DNA, 15 bp, Homo sapiens
agccatttaattgaa

SEQ ID NO: 1105378 - DNA, 15 bp, Homo sapiens
tagccatttaattga

SEQ ID NO: 1105379 - DNA, 15 bp, Homo sapiens
gtagccatttaattg

SEQ ID NO: 1105380 - DNA, 15 bp, Homo sapiens
agtagccatttaatt

SEQ ID NO: 1105381 - DNA, 15 bp, Homo sapiens
aagtagccatttaat

SEQ ID NO: 1105382 - DNA, 15 bp, Homo sapiens
caagtagccatttaa

SEQ ID NO: 1105383 - DNA, 15 bp, Homo sapiens
ccaagtagccattta

SEQ ID NO: 1105384 - DNA, 15 bp, Homo sapiens
cccaagtagccattt

SEQ ID NO: 1105385 - DNA, 15 bp, Homo sapiens
ccccaagtagccatt

SEQ ID NO: 1105386 - DNA, 15 bp, Homo sapiens
cccccaagtagccat

SEQ ID NO: 1105387 - DNA, 15 bp, Homo sapiens
tcccccaagtagcca

SEQ ID NO: 1105388 - DNA, 15 bp, Homo sapiens
ctcccccaagtagcc

SEQ ID NO: 1105389 - DNA, 15 bp, Homo sapiens
cctcccccaagtagc

SEQ ID NO: 1105390 - DNA, 15 bp, Homo sapiens
tcctcccccaagtag

SEQ ID NO: 1105391 - DNA, 15 bp, Homo sapiens
ttcctcccccaagta

SEQ ID NO: 1105392 - DNA, 15 bp, Homo sapiens
gttcctcccccaagt

SEQ ID NO: 1105393 - DNA, 15 bp, Homo sapiens
agttcctcccccaag

SEQ ID NO: 1105394 - DNA, 15 bp, Homo sapiens
gagttcctcccccaa

SEQ ID NO: 1105395 - DNA, 15 bp, Homo sapiens
ggagttcctccccca

SEQ ID NO: 1105396 - DNA, 15 bp, Homo sapiens
gggagttcctccccc

SEQ ID NO: 1105397 - DNA, 15 bp, Homo sapiens
tgggagttcctcccc

SEQ ID NO: 1105398 - DNA, 15 bp, Homo sapiens
ttgggagttcctccc

SEQ ID NO: 1105399 - DNA, 15 bp, Homo sapiens
attgggagttcctcc

SEQ ID NO: 1105400 - DNA, 15 bp, Homo sapiens
gattgggagttcctc

SEQ ID NO: 1105401 - DNA, 15 bp, Homo sapiens
ggattgggagttcct

SEQ ID NO: 1105402 - DNA, 15 bp, Homo sapiens
tggattgggagttcc

SEQ ID NO: 1105403 - DNA, 15 bp, Homo sapiens
ctggattgggagttc

SEQ ID NO: 1105404 - DNA, 15 bp, Homo sapiens
tctggattgggagtt

SEQ ID NO: 1105405 - DNA, 15 bp, Homo sapiens
ttctggattgggagt

SEQ ID NO: 1105406 - DNA, 15 bp, Homo sapiens
attctggattgggag

SEQ ID NO: 1105407 - DNA, 15 bp, Homo sapiens
gattctggattggga

SEQ ID NO: 1105408 - DNA, 15 bp, Homo sapiens
agattctggattggg

SEQ ID NO: 1105409 - DNA, 15 bp, Homo sapiens
tagattctggattgg

SEQ ID NO: 1105410 - DNA, 15 bp, Homo sapiens
atagattctggattg

SEQ ID NO: 1105411 - DNA, 15 bp, Homo sapiens
catagattctggatt

SEQ ID NO: 1105412 - DNA, 15 bp, Homo sapiens
ccatagattctggat

SEQ ID NO: 1105413 - DNA, 15 bp, Homo sapiens
gccatagattctgga

SEQ ID NO: 1105414 - DNA, 15 bp, Homo sapiens
tgccatagattctgg

SEQ ID NO: 1105415 - DNA, 15 bp, Homo sapiens
gtgccatagattctg

SEQ ID NO: 1105416 - DNA, 15 bp, Homo sapiens
tgtgccatagattct

SEQ ID NO: 1105417 - DNA, 15 bp, Homo sapiens
ctgtgccatagattc

SEQ ID NO: 1105418 - DNA, 15 bp, Homo sapiens
cctgtgccatagatt

SEQ ID NO: 1105419 - DNA, 15 bp, Homo sapiens
ccctgtgccatagat

SEQ ID NO: 1105420 - DNA, 15 bp, Homo sapiens
tccctgtgccataga

SEQ ID NO: 1105421 - DNA, 15 bp, Homo sapiens
ttccctgtgccatag

SEQ ID NO: 1105422 - DNA, 15 bp, Homo sapiens
cttccctgtgccata

SEQ ID NO: 1105423 - DNA, 15 bp, Homo sapiens
acttccctgtgccat

SEQ ID NO: 1105424 - DNA, 15 bp, Homo sapiens
aacttccctgtgcca

SEQ ID NO: 1105425 - DNA, 15 bp, Homo sapiens
gaacttccctgtgcc

SEQ ID NO: 1105426 - DNA, 15 bp, Homo sapiens
tgaacttccctgtgc

SEQ ID NO: 1105427 - DNA, 15 bp, Homo sapiens
ctgaacttccctgtg

SEQ ID NO: 1105428 - DNA, 15 bp, Homo sapiens
cctgaacttccctgt

SEQ ID NO: 1105429 - DNA, 15 bp, Homo sapiens
gcctgaacttccctg

SEQ ID NO: 1105430 - DNA, 15 bp, Homo sapiens
tgcctgaacttccct

SEQ ID NO: 1105431 - DNA, 15 bp, Homo sapiens
ctgcctgaacttccc

SEQ ID NO: 1105432 - DNA, 15 bp, Homo sapiens
cctgcctgaacttcc

SEQ ID NO: 1105433 - DNA, 15 bp, Homo sapiens
gcctgcctgaacttc

SEQ ID NO: 1105434 - DNA, 15 bp, Homo sapiens
ggcctgcctgaactt

SEQ ID NO: 1105435 - DNA, 15 bp, Homo sapiens
aggcctgcctgaact

SEQ ID NO: 1105436 - DNA, 15 bp, Homo sapiens
gaggcctgcctgaac

SEQ ID NO: 1105437 - DNA, 15 bp, Homo sapiens
tgaggcctgcctgaa

SEQ ID NO: 1105438 - DNA, 15 bp, Homo sapiens
atgaggcctgcctga

SEQ ID NO: 1105439 - DNA, 15 bp, Homo sapiens
gatgaggcctgcctg

SEQ ID NO: 1105440 - DNA, 15 bp, Homo sapiens
tgatgaggcctgcct

SEQ ID NO: 1105441 - DNA, 15 bp, Homo sapiens
atgatgaggcctgcc

SEQ ID NO: 1105442 - DNA, 15 bp, Homo sapiens
gatgatgaggcctgc

SEQ ID NO: 1105443 - DNA, 15 bp, Homo sapiens
ggatgatgaggcctg

SEQ ID NO: 1105444 - DNA, 15 bp, Homo sapiens
aggatgatgaggcct

SEQ ID NO: 1105445 - DNA, 15 bp, Homo sapiens
caggatgatgaggcc

SEQ ID NO: 1105446 - DNA, 15 bp, Homo sapiens
acaggatgatgaggc

SEQ ID NO: 1105447 - DNA, 15 bp, Homo sapiens
cacaggatgatgagg

SEQ ID NO: 1105448 - DNA, 15 bp, Homo sapiens
gcacaggatgatgag

SEQ ID NO: 1105449 - DNA, 15 bp, Homo sapiens
tgcacaggatgatga

SEQ ID NO: 1105450 - DNA, 15 bp, Homo sapiens
ctgcacaggatgatg

SEQ ID NO: 1105451 - DNA, 15 bp, Homo sapiens
cctgcacaggatgat

SEQ ID NO: 1105452 - DNA, 15 bp, Homo sapiens
acctgcacaggatga

SEQ ID NO: 1105453 - DNA, 15 bp, Homo sapiens
cacctgcacaggatg

SEQ ID NO: 1105454 - DNA, 15 bp, Homo sapiens
ccacctgcacaggat

SEQ ID NO: 1105455 - DNA, 15 bp, Homo sapiens
accacctgcacagga

SEQ ID NO: 1105456 - DNA, 15 bp, Homo sapiens
taccacctgcacagg

SEQ ID NO: 1105457 - DNA, 15 bp, Homo sapiens
ataccacctgcacag

SEQ ID NO: 1105458 - DNA, 15 bp, Homo sapiens
aataccacctgcaca

SEQ ID NO: 1105459 - DNA, 15 bp, Homo sapiens
gaataccacctgcac

SEQ ID NO: 1105460 - DNA, 15 bp, Homo sapiens
agaataccacctgca

SEQ ID NO: 1105461 - DNA, 15 bp, Homo sapiens
gagaataccacctgc

SEQ ID NO: 1105462 - DNA, 15 bp, Homo sapiens
tgagaataccacctg

SEQ ID NO: 1105463 - DNA, 15 bp, Homo sapiens
gtgagaataccacct

SEQ ID NO: 1105464 - DNA, 15 bp, Homo sapiens
agtgagaataccacc

SEQ ID NO: 1105465 - DNA, 15 bp, Homo sapiens
gagtgagaataccac

SEQ ID NO: 1105466 - DNA, 15 bp, Homo sapiens
ggagtgagaatacca

SEQ ID NO: 1105467 - DNA, 15 bp, Homo sapiens
gggagtgagaatacc

SEQ ID NO: 1105468 - DNA, 15 bp, Homo sapiens
tgggagtgagaatac

SEQ ID NO: 1105469 - DNA, 15 bp, Homo sapiens
atgggagtgagaata

SEQ ID NO: 1105470 - DNA, 15 bp, Homo sapiens
aatgggagtgagaat

SEQ ID NO: 1105471 - DNA, 15 bp, Homo sapiens
aaatgggagtgagaa

SEQ ID NO: 1105472 - DNA, 15 bp, Homo sapiens
aaaatgggagtgaga

SEQ ID NO: 1105473 - DNA, 15 bp, Homo sapiens
taaaatgggagtgag

SEQ ID NO: 1105474 - DNA, 15 bp, Homo sapiens
gtaaaatgggagtga

SEQ ID NO: 1105475 - DNA, 15 bp, Homo sapiens
tgtaaaatgggagtg

SEQ ID NO: 1105476 - DNA, 15 bp, Homo sapiens
ctgtaaaatgggagt

SEQ ID NO: 1105477 - DNA, 15 bp, Homo sapiens
tctgtaaaatgggag

SEQ ID NO: 1105478 - DNA, 15 bp, Homo sapiens
ttcatctgtaaaatg

SEQ ID NO: 1105479 - DNA, 15 bp, Homo sapiens
cttcatctgtaaaat

SEQ ID NO: 1105480 - DNA, 15 bp, Homo sapiens
tcttcatctgtaaaa

SEQ ID NO: 1105481 - DNA, 15 bp, Homo sapiens
attagcctcagtttc

SEQ ID NO: 1105482 - DNA, 15 bp, Homo sapiens
cattagcctcagttt

SEQ ID NO: 1105483 - DNA, 15 bp, Homo sapiens
ccattagcctcagtt

SEQ ID NO: 1105484 - DNA, 15 bp, Homo sapiens
tccattagcctcagt

SEQ ID NO: 1105485 - DNA, 15 bp, Homo sapiens
tctccattagcctca

SEQ ID NO: 1105486 - DNA, 15 bp, Homo sapiens
atctccattagcctc

SEQ ID NO: 1105487 - DNA, 15 bp, Homo sapiens
aatctccattagcct

SEQ ID NO: 1105488 - DNA, 15 bp, Homo sapiens
taatctccattagcc

SEQ ID NO: 1105489 - DNA, 15 bp, Homo sapiens
ttaatctccattagc

SEQ ID NO: 1105490 - DNA, 15 bp, Homo sapiens
cttaatctccattag

SEQ ID NO: 1105491 - DNA, 15 bp, Homo sapiens
acttaatctccatta

SEQ ID NO: 1105492 - DNA, 15 bp, Homo sapiens
tacttaatctccatt

SEQ ID NO: 1105493 - DNA, 15 bp, Homo sapiens
ttacttaatctccat

SEQ ID NO: 1105494 - DNA, 15 bp, Homo sapiens
agttacttaatctcc

SEQ ID NO: 1105495 - DNA, 15 bp, Homo sapiens
caagttacttaatct

SEQ ID NO: 1105496 - DNA, 15 bp, Homo sapiens
acaagttacttaatc

SEQ ID NO: 1105497 - DNA, 15 bp, Homo sapiens
gacaagttacttaat

SEQ ID NO: 1105498 - DNA, 15 bp, Homo sapiens
ggacaagttacttaa

SEQ ID NO: 1105499 - DNA, 15 bp, Homo sapiens
tggacaagttactta

SEQ ID NO: 1105500 - DNA, 15 bp, Homo sapiens
ttggacaagttactt

SEQ ID NO: 1105501 - DNA, 15 bp, Homo sapiens
tttggacaagttact

SEQ ID NO: 1105502 - DNA, 15 bp, Homo sapiens
ctttggacaagttac

SEQ ID NO: 1105503 - DNA, 15 bp, Homo sapiens
actttggacaagtta

SEQ ID NO: 1105504 - DNA, 15 bp, Homo sapiens
aactttggacaagtt

SEQ ID NO: 1105505 - DNA, 15 bp, Homo sapiens
taactttggacaagt

SEQ ID NO: 1105506 - DNA, 15 bp, Homo sapiens
ctaactttggacaag

SEQ ID NO: 1105507 - DNA, 15 bp, Homo sapiens
tctaactttggacaa

SEQ ID NO: 1105508 - DNA, 15 bp, Homo sapiens
atctaactttggaca

SEQ ID NO: 1105509 - DNA, 15 bp, Homo sapiens
tatctaactttggac

SEQ ID NO: 1105510 - DNA, 15 bp, Homo sapiens
ctatctaactttgga

SEQ ID NO: 1105511 - DNA, 15 bp, Homo sapiens
gctatctaactttgg

SEQ ID NO: 1105512 - DNA, 15 bp, Homo sapiens
agctatctaactttg

SEQ ID NO: 1105513 - DNA, 15 bp, Homo sapiens
tagctatctaacttt

SEQ ID NO: 1105514 - DNA, 15 bp, Homo sapiens
ctagctatctaactt

SEQ ID NO: 1105515 - DNA, 15 bp, Homo sapiens
actagctatctaact

SEQ ID NO: 1105516 - DNA, 15 bp, Homo sapiens
tactagctatctaac

SEQ ID NO: 1105517 - DNA, 15 bp, Homo sapiens
ttactagctatctaa

SEQ ID NO: 1105518 - DNA, 15 bp, Homo sapiens
cttactagctatcta

SEQ ID NO: 1105519 - DNA, 15 bp, Homo sapiens
acttactagctatct

SEQ ID NO: 1105520 - DNA, 15 bp, Homo sapiens
cacttactagctatc

SEQ ID NO: 1105521 - DNA, 15 bp, Homo sapiens
tcacttactagctat

SEQ ID NO: 1105522 - DNA, 15 bp, Homo sapiens
ttcacttactagcta

SEQ ID NO: 1105523 - DNA, 15 bp, Homo sapiens
gttcacttactagct

SEQ ID NO: 1105524 - DNA, 15 bp, Homo sapiens
tgttcacttactagc

SEQ ID NO: 1105525 - DNA, 15 bp, Homo sapiens
gtgttcacttactag

SEQ ID NO: 1105526 - DNA, 15 bp, Homo sapiens
tgtgttcacttacta

SEQ ID NO: 1105527 - DNA, 15 bp, Homo sapiens
ttgtgttcacttact

SEQ ID NO: 1105528 - DNA, 15 bp, Homo sapiens
tttgtgttcacttac

SEQ ID NO: 1105529 - DNA, 15 bp, Homo sapiens
gtttgtgttcactta

SEQ ID NO: 1105530 - DNA, 15 bp, Homo sapiens
ggtttgtgttcactt

SEQ ID NO: 1105531 - DNA, 15 bp, Homo sapiens
aggtttgtgttcact

SEQ ID NO: 1105532 - DNA, 15 bp, Homo sapiens
aaggtttgtgttcac

SEQ ID NO: 1105533 - DNA, 15 bp, Homo sapiens
aaaggtttgtgttca

SEQ ID NO: 1105534 - DNA, 15 bp, Homo sapiens
caaaggtttgtgttc

SEQ ID NO: 1105535 - DNA, 15 bp, Homo sapiens
acaaaggtttgtgtt

SEQ ID NO: 1105536 - DNA, 15 bp, Homo sapiens
cacaaaggtttgtgt

SEQ ID NO: 1105537 - DNA, 15 bp, Homo sapiens
tcacaaaggtttgtg

SEQ ID NO: 1105538 - DNA, 15 bp, Homo sapiens
atcacaaaggtttgt

SEQ ID NO: 1105539 - DNA, 15 bp, Homo sapiens
aatcacaaaggtttg

SEQ ID NO: 1105540 - DNA, 15 bp, Homo sapiens
aaatcacaaaggttt

SEQ ID NO: 1105541 - DNA, 15 bp, Homo sapiens
gaaatcacaaaggtt

SEQ ID NO: 1105542 - DNA, 15 bp, Homo sapiens
tgaaatcacaaaggt

SEQ ID NO: 1105543 - DNA, 15 bp, Homo sapiens
ttgaaatcacaaagg

SEQ ID NO: 1105544 - DNA, 15 bp, Homo sapiens
tttgaaatcacaaag

SEQ ID NO: 1105545 - DNA, 15 bp, Homo sapiens
ctttgaaatcacaaa

SEQ ID NO: 1105546 - DNA, 15 bp, Homo sapiens
tctttgaaatcacaa

SEQ ID NO: 1105547 - DNA, 15 bp, Homo sapiens
gtctttgaaatcaca

SEQ ID NO: 1105548 - DNA, 15 bp, Homo sapiens
ggtctttgaaatcac

SEQ ID NO: 1105549 - DNA, 15 bp, Homo sapiens
tggtctttgaaatca

SEQ ID NO: 1105550 - DNA, 15 bp, Homo sapiens
atggtctttgaaatc

SEQ ID NO: 1105551 - DNA, 15 bp, Homo sapiens
gatggtctttgaaat

SEQ ID NO: 1105552 - DNA, 15 bp, Homo sapiens
agatggtctttgaaa

SEQ ID NO: 1105553 - DNA, 15 bp, Homo sapiens
gagatggtctttgaa

SEQ ID NO: 1105554 - DNA, 15 bp, Homo sapiens
agagatggtctttga

SEQ ID NO: 1105555 - DNA, 15 bp, Homo sapiens
aagagatggtctttg

SEQ ID NO: 1105556 - DNA, 15 bp, Homo sapiens
caagagatggtcttt

SEQ ID NO: 1105557 - DNA, 15 bp, Homo sapiens
tcaagagatggtctt

SEQ ID NO: 1105558 - DNA, 15 bp, Homo sapiens
ctcaagagatggtct

SEQ ID NO: 1105559 - DNA, 15 bp, Homo sapiens
tctcaagagatggtc

SEQ ID NO: 1105560 - DNA, 15 bp, Homo sapiens
atctcaagagatggt

SEQ ID NO: 1105561 - DNA, 15 bp, Homo sapiens
aatctcaagagatgg

SEQ ID NO: 1105562 - DNA, 15 bp, Homo sapiens
caatctcaagagatg

SEQ ID NO: 1105563 - DNA, 15 bp, Homo sapiens
ccaatctcaagagat

SEQ ID NO: 1105564 - DNA, 15 bp, Homo sapiens
accaatctcaagaga

SEQ ID NO: 1105565 - DNA, 15 bp, Homo sapiens
aaccaatctcaagag

SEQ ID NO: 1105566 - DNA, 15 bp, Homo sapiens
taaccaatctcaaga

SEQ ID NO: 1105567 - DNA, 15 bp, Homo sapiens
ttaaccaatctcaag

SEQ ID NO: 1105568 - DNA, 15 bp, Homo sapiens
gttaaccaatctcaa

SEQ ID NO: 1105569 - DNA, 15 bp, Homo sapiens
agttaaccaatctca

SEQ ID NO: 1105570 - DNA, 15 bp, Homo sapiens
aagttaaccaatctc

SEQ ID NO: 1105571 - DNA, 15 bp, Homo sapiens
aaagttaaccaatct

SEQ ID NO: 1105572 - DNA, 15 bp, Homo sapiens
aaaagttaaccaatc

SEQ ID NO: 1105573 - DNA, 15 bp, Homo sapiens
taaaagttaaccaat

SEQ ID NO: 1105574 - DNA, 15 bp, Homo sapiens
ttaaaagttaaccaa

SEQ ID NO: 1105575 - DNA, 15 bp, Homo sapiens
gttaaaagttaacca

SEQ ID NO: 1105576 - DNA, 15 bp, Homo sapiens
agttaaaagttaacc

SEQ ID NO: 1105577 - DNA, 15 bp, Homo sapiens
tagttaaaagttaac

SEQ ID NO: 1105578 - DNA, 15 bp, Homo sapiens
ttagttaaaagttaa

SEQ ID NO: 1105579 - DNA, 15 bp, Homo sapiens
tttagttaaaagtta

SEQ ID NO: 1105580 - DNA, 15 bp, Homo sapiens
gtttagttaaaagtt

SEQ ID NO: 1105581 - DNA, 15 bp, Homo sapiens
ggtttagttaaaagt

SEQ ID NO: 1105582 - DNA, 15 bp, Homo sapiens
aggtttagttaaaag

SEQ ID NO: 1105583 - DNA, 15 bp, Homo sapiens
gaggtttagttaaaa

SEQ ID NO: 1105584 - DNA, 15 bp, Homo sapiens
ggaggtttagttaaa

SEQ ID NO: 1105585 - DNA, 15 bp, Homo sapiens
gggaggtttagttaa

SEQ ID NO: 1105586 - DNA, 15 bp, Homo sapiens
tgggaggtttagtta

SEQ ID NO: 1105587 - DNA, 15 bp, Homo sapiens
ctgggaggtttagtt

SEQ ID NO: 1105588 - DNA, 15 bp, Homo sapiens
tctgggaggtttagt

SEQ ID NO: 1105589 - DNA, 15 bp, Homo sapiens
gtctgggaggtttag

SEQ ID NO: 1105590 - DNA, 15 bp, Homo sapiens
tgtctgggaggttta

SEQ ID NO: 1105591 - DNA, 15 bp, Homo sapiens
gtgtctgggaggttt

SEQ ID NO: 1105592 - DNA, 15 bp, Homo sapiens
tgtgtctgggaggtt

SEQ ID NO: 1105593 - DNA, 15 bp, Homo sapiens
gtgtgtctgggaggt

SEQ ID NO: 1105594 - DNA, 15 bp, Homo sapiens
tgtgtgtctgggagg

SEQ ID NO: 1105595 - DNA, 15 bp, Homo sapiens
ctgtgtgtctgggag

SEQ ID NO: 1105596 - DNA, 15 bp, Homo sapiens
gctgtgtgtctggga

SEQ ID NO: 1105597 - DNA, 15 bp, Homo sapiens
ggctgtgtgtctggg

SEQ ID NO: 1105598 - DNA, 15 bp, Homo sapiens
aggctgtgtgtctgg

SEQ ID NO: 1105599 - DNA, 15 bp, Homo sapiens
caggctgtgtgtctg

SEQ ID NO: 1105600 - DNA, 15 bp, Homo sapiens
tcaggctgtgtgtct

SEQ ID NO: 1105601 - DNA, 15 bp, Homo sapiens
gtcaggctgtgtgtc

SEQ ID NO: 1105602 - DNA, 15 bp, Homo sapiens
ggtcaggctgtgtgt

SEQ ID NO: 1105603 - DNA, 15 bp, Homo sapiens
aggtcaggctgtgtg

SEQ ID NO: 1105604 - DNA, 15 bp, Homo sapiens
aaggtcaggctgtgt

SEQ ID NO: 1105605 - DNA, 15 bp, Homo sapiens
taaggtcaggctgtg

SEQ ID NO: 1105606 - DNA, 15 bp, Homo sapiens
ataaggtcaggctgt

SEQ ID NO: 1105607 - DNA, 15 bp, Homo sapiens
gataaggtcaggctg

SEQ ID NO: 1105608 - DNA, 15 bp, Homo sapiens
agataaggtcaggct

SEQ ID NO: 1105609 - DNA, 15 bp, Homo sapiens
aagataaggtcaggc

SEQ ID NO: 1105610 - DNA, 15 bp, Homo sapiens
gaagataaggtcagg

SEQ ID NO: 1105611 - DNA, 15 bp, Homo sapiens
ggaagataaggtcag

SEQ ID NO: 1105612 - DNA, 15 bp, Homo sapiens
tggaagataaggtca

SEQ ID NO: 1105613 - DNA, 15 bp, Homo sapiens
ttggaagataaggtc

SEQ ID NO: 1105614 - DNA, 15 bp, Homo sapiens
attggaagataaggt

SEQ ID NO: 1105615 - DNA, 15 bp, Homo sapiens
gattggaagataagg

SEQ ID NO: 1105616 - DNA, 15 bp, Homo sapiens
agattggaagataag

SEQ ID NO: 1105617 - DNA, 15 bp, Homo sapiens
aagattggaagataa

SEQ ID NO: 1105618 - DNA, 15 bp, Homo sapiens
aaagattggaagata

SEQ ID NO: 1105619 - DNA, 15 bp, Homo sapiens
gaaagattggaagat

SEQ ID NO: 1105620 - DNA, 15 bp, Homo sapiens
agaaagattggaaga

SEQ ID NO: 1105621 - DNA, 15 bp, Homo sapiens
aagaaagattggaag

SEQ ID NO: 1105622 - DNA, 15 bp, Homo sapiens
caagaaagattggaa

SEQ ID NO: 1105623 - DNA, 15 bp, Homo sapiens
gcaagaaagattgga

SEQ ID NO: 1105624 - DNA, 15 bp, Homo sapiens
tgcaagaaagattgg

SEQ ID NO: 1105625 - DNA, 15 bp, Homo sapiens
ctgcaagaaagattg

SEQ ID NO: 1105626 - DNA, 15 bp, Homo sapiens
actgcaagaaagatt

SEQ ID NO: 1105627 - DNA, 15 bp, Homo sapiens
aactgcaagaaagat

SEQ ID NO: 1105628 - DNA, 15 bp, Homo sapiens
taactgcaagaaaga

SEQ ID NO: 1105629 - DNA, 15 bp, Homo sapiens
ctaactgcaagaaag

SEQ ID NO: 1105630 - DNA, 15 bp, Homo sapiens
cctaactgcaagaaa

SEQ ID NO: 1105631 - DNA, 15 bp, Homo sapiens
acctaactgcaagaa

SEQ ID NO: 1105632 - DNA, 15 bp, Homo sapiens
cacctaactgcaaga

SEQ ID NO: 1105633 - DNA, 15 bp, Homo sapiens
acacctaactgcaag

SEQ ID NO: 1105634 - DNA, 15 bp, Homo sapiens
cacacctaactgcaa

SEQ ID NO: 1105635 - DNA, 15 bp, Homo sapiens
ccacacctaactgca

SEQ ID NO: 1105636 - DNA, 15 bp, Homo sapiens
accacacctaactgc

SEQ ID NO: 1105637 - DNA, 15 bp, Homo sapiens
aaccacacctaactg

SEQ ID NO: 1105638 - DNA, 15 bp, Homo sapiens
taaccacacctaact

SEQ ID NO: 1105639 - DNA, 15 bp, Homo sapiens
ataaccacacctaac

SEQ ID NO: 1105640 - DNA, 15 bp, Homo sapiens
cataaccacacctaa

SEQ ID NO: 1105641 - DNA, 15 bp, Homo sapiens
acataaccacaccta

SEQ ID NO: 1105642 - DNA, 15 bp, Homo sapiens
cacataaccacacct

SEQ ID NO: 1105643 - DNA, 15 bp, Homo sapiens
ccacataaccacacc

SEQ ID NO: 1105644 - DNA, 15 bp, Homo sapiens
gccacataaccacac

SEQ ID NO: 1105645 - DNA, 15 bp, Homo sapiens
tgccacataaccaca

SEQ ID NO: 1105646 - DNA, 15 bp, Homo sapiens
gtgccacataaccac

SEQ ID NO: 1105647 - DNA, 15 bp, Homo sapiens
tgtgccacataacca

SEQ ID NO: 1105648 - DNA, 15 bp, Homo sapiens
ctgtgccacataacc

SEQ ID NO: 1105649 - DNA, 15 bp, Homo sapiens
actgtgccacataac

SEQ ID NO: 1105650 - DNA, 15 bp, Homo sapiens
gactgtgccacataa

SEQ ID NO: 1105651 - DNA, 15 bp, Homo sapiens
ggactgtgccacata

SEQ ID NO: 1105652 - DNA, 15 bp, Homo sapiens
aggactgtgccacat

SEQ ID NO: 1105653 - DNA, 15 bp, Homo sapiens
gaggactgtgccaca

SEQ ID NO: 1105654 - DNA, 15 bp, Homo sapiens
agaggactgtgccac

SEQ ID NO: 1105655 - DNA, 15 bp, Homo sapiens
gagaggactgtgcca

SEQ ID NO: 1105656 - DNA, 15 bp, Homo sapiens
ggagaggactgtgcc

SEQ ID NO: 1105657 - DNA, 15 bp, Homo sapiens
tggagaggactgtgc

SEQ ID NO: 1105658 - DNA, 15 bp, Homo sapiens
ctggagaggactgtg

SEQ ID NO: 1105659 - DNA, 15 bp, Homo sapiens
actggagaggactgt

SEQ ID NO: 1105660 - DNA, 15 bp, Homo sapiens
cactggagaggactg

SEQ ID NO: 1105661 - DNA, 15 bp, Homo sapiens
ccactggagaggact

SEQ ID NO: 1105662 - DNA, 15 bp, Homo sapiens
tccactggagaggac

SEQ ID NO: 1105663 - DNA, 15 bp, Homo sapiens
ttccactggagagga

SEQ ID NO: 1105664 - DNA, 15 bp, Homo sapiens
attccactggagagg

SEQ ID NO: 1105665 - DNA, 15 bp, Homo sapiens
gattccactggagag

SEQ ID NO: 1105666 - DNA, 15 bp, Homo sapiens
agattccactggaga

SEQ ID NO: 1105667 - DNA, 15 bp, Homo sapiens
cagattccactggag

SEQ ID NO: 1105668 - DNA, 15 bp, Homo sapiens
tcagattccactgga

SEQ ID NO: 1105669 - DNA, 15 bp, Homo sapiens
ctcagattccactgg

SEQ ID NO: 1105670 - DNA, 15 bp, Homo sapiens
actcagattccactg

SEQ ID NO: 1105671 - DNA, 15 bp, Homo sapiens
tactcagattccact

SEQ ID NO: 1105672 - DNA, 15 bp, Homo sapiens
ctactcagattccac

SEQ ID NO: 1105673 - DNA, 15 bp, Homo sapiens
tctactcagattcca

SEQ ID NO: 1105674 - DNA, 15 bp, Homo sapiens
ttctactcagattcc

SEQ ID NO: 1105675 - DNA, 15 bp, Homo sapiens
cttctactcagattc

SEQ ID NO: 1105676 - DNA, 15 bp, Homo sapiens
acttctactcagatt

SEQ ID NO: 1105677 - DNA, 15 bp, Homo sapiens
tacttctactcagat

SEQ ID NO: 1105678 - DNA, 15 bp, Homo sapiens
ttacttctactcaga

SEQ ID NO: 1105679 - DNA, 15 bp, Homo sapiens
attacttctactcag

SEQ ID NO: 1105680 - DNA, 15 bp, Homo sapiens
cattacttctactca

SEQ ID NO: 1105681 - DNA, 15 bp, Homo sapiens
ccattacttctactc

SEQ ID NO: 1105682 - DNA, 15 bp, Homo sapiens
tccattacttctact

SEQ ID NO: 1105683 - DNA, 15 bp, Homo sapiens
atccattacttctac

SEQ ID NO: 1105684 - DNA, 15 bp, Homo sapiens
catccattacttcta

SEQ ID NO: 1105685 - DNA, 15 bp, Homo sapiens
gcatccattacttct

SEQ ID NO: 1105686 - DNA, 15 bp, Homo sapiens
ggcatccattacttc

SEQ ID NO: 1105687 - DNA, 15 bp, Homo sapiens
tggcatccattactt

SEQ ID NO: 1105688 - DNA, 15 bp, Homo sapiens
gtggcatccattact

SEQ ID NO: 1105689 - DNA, 15 bp, Homo sapiens
agtggcatccattac

SEQ ID NO: 1105690 - DNA, 15 bp, Homo sapiens
aagtggcatccatta

SEQ ID NO: 1105691 - DNA, 15 bp, Homo sapiens
gaagtggcatccatt

SEQ ID NO: 1105692 - DNA, 15 bp, Homo sapiens
ggaagtggcatccat

SEQ ID NO: 1105693 - DNA, 15 bp, Homo sapiens
tggaagtggcatcca

SEQ ID NO: 1105694 - DNA, 15 bp, Homo sapiens
ctggaagtggcatcc

SEQ ID NO: 1105695 - DNA, 15 bp, Homo sapiens
cctggaagtggcatc

SEQ ID NO: 1105696 - DNA, 15 bp, Homo sapiens
tcctggaagtggcat

SEQ ID NO: 1105697 - DNA, 15 bp, Homo sapiens
atcctggaagtggca

SEQ ID NO: 1105698 - DNA, 15 bp, Homo sapiens
aatcctggaagtggc

SEQ ID NO: 1105699 - DNA, 15 bp, Homo sapiens
caatcctggaagtgg

SEQ ID NO: 1105700 - DNA, 15 bp, Homo sapiens
ccaatcctggaagtg

SEQ ID NO: 1105701 - DNA, 15 bp, Homo sapiens
gccaatcctggaagt

SEQ ID NO: 1105702 - DNA, 15 bp, Homo sapiens
ggccaatcctggaag

SEQ ID NO: 1105703 - DNA, 15 bp, Homo sapiens
gggccaatcctggaa

SEQ ID NO: 1105704 - DNA, 15 bp, Homo sapiens
tgggccaatcctgga

SEQ ID NO: 1105705 - DNA, 15 bp, Homo sapiens
gtgggccaatcctgg

SEQ ID NO: 1105706 - DNA, 15 bp, Homo sapiens
tgtgggccaatcctg

SEQ ID NO: 1105707 - DNA, 15 bp, Homo sapiens
ctgtgggccaatcct

SEQ ID NO: 1105708 - DNA, 15 bp, Homo sapiens
cctgtgggccaatcc

SEQ ID NO: 1105709 - DNA, 15 bp, Homo sapiens
tcctgtgggccaatc

SEQ ID NO: 1105710 - DNA, 15 bp, Homo sapiens
ttcctgtgggccaat

SEQ ID NO: 1105711 - DNA, 15 bp, Homo sapiens
gttcctgtgggccaa

SEQ ID NO: 1105712 - DNA, 15 bp, Homo sapiens
agttcctgtgggcca

SEQ ID NO: 1105713 - DNA, 15 bp, Homo sapiens
aagttcctgtgggcc

SEQ ID NO: 1105714 - DNA, 15 bp, Homo sapiens
aaagttcctgtgggc

SEQ ID NO: 1105715 - DNA, 15 bp, Homo sapiens
gaaagttcctgtggg

SEQ ID NO: 1105716 - DNA, 15 bp, Homo sapiens
ggaaagttcctgtgg

SEQ ID NO: 1105717 - DNA, 15 bp, Homo sapiens
tggaaagttcctgtg

SEQ ID NO: 1105718 - DNA, 15 bp, Homo sapiens
atggaaagttcctgt

SEQ ID NO: 1105719 - DNA, 15 bp, Homo sapiens
tatggaaagttcctg

SEQ ID NO: 1105720 - DNA, 15 bp, Homo sapiens
gtatggaaagttcct

SEQ ID NO: 1105721 - DNA, 15 bp, Homo sapiens
tgtatggaaagttcc

SEQ ID NO: 1105722 - DNA, 15 bp, Homo sapiens
ttgtatggaaagttc

SEQ ID NO: 1105723 - DNA, 15 bp, Homo sapiens
tttgtatggaaagtt

SEQ ID NO: 1105724 - DNA, 15 bp, Homo sapiens
ttttgtatggaaagt

SEQ ID NO: 1105725 - DNA, 15 bp, Homo sapiens
attttgtatggaaag

SEQ ID NO: 1105726 - DNA, 15 bp, Homo sapiens
cattttgtatggaaa

SEQ ID NO: 1105727 - DNA, 15 bp, Homo sapiens
gcattttgtatggaa

SEQ ID NO: 1105728 - DNA, 15 bp, Homo sapiens
agcattttgtatgga

SEQ ID NO: 1105729 - DNA, 15 bp, Homo sapiens
gagcattttgtatgg

SEQ ID NO: 1105730 - DNA, 15 bp, Homo sapiens
ggagcattttgtatg

SEQ ID NO: 1105731 - DNA, 15 bp, Homo sapiens
tggagcattttgtat

SEQ ID NO: 1105732 - DNA, 15 bp, Homo sapiens
atggagcattttgta

SEQ ID NO: 1105733 - DNA, 15 bp, Homo sapiens
tatggagcattttgt

SEQ ID NO: 1105734 - DNA, 15 bp, Homo sapiens
atatggagcattttg

SEQ ID NO: 1105735 - DNA, 15 bp, Homo sapiens
aatatggagcatttt

SEQ ID NO: 1105736 - DNA, 15 bp, Homo sapiens
aaatatggagcattt

SEQ ID NO: 1105737 - DNA, 15 bp, Homo sapiens
aaaatatggagcatt

SEQ ID NO: 1105738 - DNA, 15 bp, Homo sapiens
gaaaatatggagcat

SEQ ID NO: 1105739 - DNA, 15 bp, Homo sapiens
agaaaatatggagca

SEQ ID NO: 1105740 - DNA, 15 bp, Homo sapiens
gagaaaatatggagc

SEQ ID NO: 1105741 - DNA, 15 bp, Homo sapiens
agagaaaatatggag

SEQ ID NO: 1105742 - DNA, 15 bp, Homo sapiens
aagagaaaatatgga

SEQ ID NO: 1105743 - DNA, 15 bp, Homo sapiens
gaagagaaaatatgg

SEQ ID NO: 1105744 - DNA, 15 bp, Homo sapiens
ggaagagaaaatatg

SEQ ID NO: 1105745 - DNA, 15 bp, Homo sapiens
gggaagagaaaatat

SEQ ID NO: 1105746 - DNA, 15 bp, Homo sapiens
agggaagagaaaata

SEQ ID NO: 1105747 - DNA, 15 bp, Homo sapiens
cagggaagagaaaat

SEQ ID NO: 1105748 - DNA, 15 bp, Homo sapiens
acagggaagagaaaa

SEQ ID NO: 1105749 - DNA, 15 bp, Homo sapiens
cacagggaagagaaa

SEQ ID NO: 1105750 - DNA, 15 bp, Homo sapiens
acacagggaagagaa

SEQ ID NO: 1105751 - DNA, 15 bp, Homo sapiens
cacacagggaagaga

SEQ ID NO: 1105752 - DNA, 15 bp, Homo sapiens
tcacacagggaagag

SEQ ID NO: 1105753 - DNA, 15 bp, Homo sapiens
atcacacagggaaga

SEQ ID NO: 1105754 - DNA, 15 bp, Homo sapiens
catcacacagggaag

SEQ ID NO: 1105755 - DNA, 15 bp, Homo sapiens
ccatcacacagggaa

SEQ ID NO: 1105756 - DNA, 15 bp, Homo sapiens
tccatcacacaggga

SEQ ID NO: 1105757 - DNA, 15 bp, Homo sapiens
atccatcacacaggg

SEQ ID NO: 1105758 - DNA, 15 bp, Homo sapiens
tatccatcacacagg

SEQ ID NO: 1105759 - DNA, 15 bp, Homo sapiens
gtatccatcacacag

SEQ ID NO: 1105760 - DNA, 15 bp, Homo sapiens
tgtatccatcacaca

SEQ ID NO: 1105761 - DNA, 15 bp, Homo sapiens
atgtatccatcacac

SEQ ID NO: 1105762 - DNA, 15 bp, Homo sapiens
ggacatgtatccatc

SEQ ID NO: 1105763 - DNA, 15 bp, Homo sapiens
tggacatgtatccat

SEQ ID NO: 1105764 - DNA, 15 bp, Homo sapiens
atggacatgtatcca

SEQ ID NO: 1105765 - DNA, 15 bp, Homo sapiens
catggacatgtatcc

SEQ ID NO: 1105766 - DNA, 15 bp, Homo sapiens
acatggacatgtatc

SEQ ID NO: 1105767 - DNA, 15 bp, Homo sapiens
gacatggacatgtat

SEQ ID NO: 1105768 - DNA, 15 bp, Homo sapiens
ggacatggacatgta

SEQ ID NO: 1105769 - DNA, 15 bp, Homo sapiens
tggacatggacatgt

SEQ ID NO: 1105770 - DNA, 15 bp, Homo sapiens
ttggacatggacatg

SEQ ID NO: 1105771 - DNA, 15 bp, Homo sapiens
cttggacatggacat

SEQ ID NO: 1105772 - DNA, 15 bp, Homo sapiens
ccttggacatggaca

SEQ ID NO: 1105773 - DNA, 15 bp, Homo sapiens
tccttggacatggac

SEQ ID NO: 1105774 - DNA, 15 bp, Homo sapiens
ctccttggacatgga

SEQ ID NO: 1105775 - DNA, 15 bp, Homo sapiens
tctccttggacatgg

SEQ ID NO: 1105776 - DNA, 15 bp, Homo sapiens
gtctccttggacatg

SEQ ID NO: 1105777 - DNA, 15 bp, Homo sapiens
ggtctccttggacat

SEQ ID NO: 1105778 - DNA, 15 bp, Homo sapiens
aggtctccttggaca

SEQ ID NO: 1105779 - DNA, 15 bp, Homo sapiens
aaggtctccttggac

SEQ ID NO: 1105780 - DNA, 15 bp, Homo sapiens
taaggtctccttgga

SEQ ID NO: 1105781 - DNA, 15 bp, Homo sapiens
ttaaggtctccttgg

SEQ ID NO: 1105782 - DNA, 15 bp, Homo sapiens
tttaaggtctccttg

SEQ ID NO: 1105783 - DNA, 15 bp, Homo sapiens
ttttaaggtctcctt

SEQ ID NO: 1105784 - DNA, 15 bp, Homo sapiens
cttttaaggtctcct

SEQ ID NO: 1105785 - DNA, 15 bp, Homo sapiens
gcttttaaggtctcc

SEQ ID NO: 1105786 - DNA, 15 bp, Homo sapiens
ggcttttaaggtctc

SEQ ID NO: 1105787 - DNA, 15 bp, Homo sapiens
tggcttttaaggtct

SEQ ID NO: 1105788 - DNA, 15 bp, Homo sapiens
gtggcttttaaggtc

SEQ ID NO: 1105789 - DNA, 15 bp, Homo sapiens
tgtggcttttaaggt

SEQ ID NO: 1105790 - DNA, 15 bp, Homo sapiens
atgtggcttttaagg

SEQ ID NO: 1105791 - DNA, 15 bp, Homo sapiens
catgtggcttttaag

SEQ ID NO: 1105792 - DNA, 15 bp, Homo sapiens
acatgtggcttttaa

SEQ ID NO: 1105793 - DNA, 15 bp, Homo sapiens
aacatgtggctttta

SEQ ID NO: 1105794 - DNA, 15 bp, Homo sapiens
caacatgtggctttt

SEQ ID NO: 1105795 - DNA, 15 bp, Homo sapiens
tcaacatgtggcttt

SEQ ID NO: 1105796 - DNA, 15 bp, Homo sapiens
ctcaacatgtggctt

SEQ ID NO: 1105797 - DNA, 15 bp, Homo sapiens
cctcaacatgtggct

SEQ ID NO: 1105798 - DNA, 15 bp, Homo sapiens
tcctcaacatgtggc

SEQ ID NO: 1105799 - DNA, 15 bp, Homo sapiens
atcctcaacatgtgg

SEQ ID NO: 1105800 - DNA, 15 bp, Homo sapiens
catcctcaacatgtg

SEQ ID NO: 1105801 - DNA, 15 bp, Homo sapiens
ccatcctcaacatgt

SEQ ID NO: 1105802 - DNA, 15 bp, Homo sapiens
accatcctcaacatg

SEQ ID NO: 1105803 - DNA, 15 bp, Homo sapiens
taccatcctcaacat

SEQ ID NO: 1105804 - DNA, 15 bp, Homo sapiens
ctaccatcctcaaca

SEQ ID NO: 1105805 - DNA, 15 bp, Homo sapiens
tctaccatcctcaac

SEQ ID NO: 1105806 - DNA, 15 bp, Homo sapiens
ctctaccatcctcaa

SEQ ID NO: 1105807 - DNA, 15 bp, Homo sapiens
gctctaccatcctca

SEQ ID NO: 1105808 - DNA, 15 bp, Homo sapiens
agctctaccatcctc

SEQ ID NO: 1105809 - DNA, 15 bp, Homo sapiens
aagctctaccatcct

SEQ ID NO: 1105810 - DNA, 15 bp, Homo sapiens
gaagctctaccatcc

SEQ ID NO: 1105811 - DNA, 15 bp, Homo sapiens
agaagctctaccatc

SEQ ID NO: 1105812 - DNA, 15 bp, Homo sapiens
cagaagctctaccat

SEQ ID NO: 1105813 - DNA, 15 bp, Homo sapiens
acagaagctctacca

SEQ ID NO: 1105814 - DNA, 15 bp, Homo sapiens
gacagaagctctacc

SEQ ID NO: 1105815 - DNA, 15 bp, Homo sapiens
tgacagaagctctac

SEQ ID NO: 1105816 - DNA, 15 bp, Homo sapiens
ctgacagaagctcta

SEQ ID NO: 1105817 - DNA, 15 bp, Homo sapiens
gctgacagaagctct

SEQ ID NO: 1105818 - DNA, 15 bp, Homo sapiens
ggctgacagaagctc

SEQ ID NO: 1105819 - DNA, 15 bp, Homo sapiens
aggctgacagaagct

SEQ ID NO: 1105820 - DNA, 15 bp, Homo sapiens
caggctgacagaagc

SEQ ID NO: 1105821 - DNA, 15 bp, Homo sapiens
ccaggctgacagaag

SEQ ID NO: 1105822 - DNA, 15 bp, Homo sapiens
cccaggctgacagaa

SEQ ID NO: 1105823 - DNA, 15 bp, Homo sapiens
acccaggctgacaga

SEQ ID NO: 1105824 - DNA, 15 bp, Homo sapiens
gacccaggctgacag

SEQ ID NO: 1105825 - DNA, 15 bp, Homo sapiens
agacccaggctgaca

SEQ ID NO: 1105826 - DNA, 15 bp, Homo sapiens
gagacccaggctgac

SEQ ID NO: 1105827 - DNA, 15 bp, Homo sapiens
agagacccaggctga

SEQ ID NO: 1105828 - DNA, 15 bp, Homo sapiens
cagagacccaggctg

SEQ ID NO: 1105829 - DNA, 15 bp, Homo sapiens
tcagagacccaggct

SEQ ID NO: 1105830 - DNA, 15 bp, Homo sapiens
ttcagagacccaggc

SEQ ID NO: 1105831 - DNA, 15 bp, Homo sapiens
attcagagacccagg

SEQ ID NO: 1105832 - DNA, 15 bp, Homo sapiens
cattcagagacccag

SEQ ID NO: 1105833 - DNA, 15 bp, Homo sapiens
tcattcagagaccca

SEQ ID NO: 1105834 - DNA, 15 bp, Homo sapiens
gtcattcagagaccc

SEQ ID NO: 1105835 - DNA, 15 bp, Homo sapiens
agtcattcagagacc

SEQ ID NO: 1105836 - DNA, 15 bp, Homo sapiens
cagtcattcagagac

SEQ ID NO: 1105837 - DNA, 15 bp, Homo sapiens
gcagtcattcagaga

SEQ ID NO: 1105838 - DNA, 15 bp, Homo sapiens
tgcagtcattcagag

SEQ ID NO: 1105839 - DNA, 15 bp, Homo sapiens
atgcagtcattcaga

SEQ ID NO: 1105840 - DNA, 15 bp, Homo sapiens
catgcagtcattcag

SEQ ID NO: 1105841 - DNA, 15 bp, Homo sapiens
ccatgcagtcattca

SEQ ID NO: 1105842 - DNA, 15 bp, Homo sapiens
tccatgcagtcattc

SEQ ID NO: 1105843 - DNA, 15 bp, Homo sapiens
ctccatgcagtcatt

SEQ ID NO: 1105844 - DNA, 15 bp, Homo sapiens
gctccatgcagtcat

SEQ ID NO: 1105845 - DNA, 15 bp, Homo sapiens
tgctccatgcagtca

SEQ ID NO: 1105846 - DNA, 15 bp, Homo sapiens
ctgctccatgcagtc

SEQ ID NO: 1105847 - DNA, 15 bp, Homo sapiens
tctgctccatgcagt

SEQ ID NO: 1105848 - DNA, 15 bp, Homo sapiens
ctctgctccatgcag

SEQ ID NO: 1105849 - DNA, 15 bp, Homo sapiens
gctctgctccatgca

SEQ ID NO: 1105850 - DNA, 15 bp, Homo sapiens
tgctctgctccatgc

SEQ ID NO: 1105851 - DNA, 15 bp, Homo sapiens
gtgctctgctccatg

SEQ ID NO: 1105852 - DNA, 15 bp, Homo sapiens
ggtgctctgctccat

SEQ ID NO: 1105853 - DNA, 15 bp, Homo sapiens
aggtgctctgctcca

SEQ ID NO: 1105854 - DNA, 15 bp, Homo sapiens
aaggtgctctgctcc

SEQ ID NO: 1105855 - DNA, 15 bp, Homo sapiens
aaaggtgctctgctc

SEQ ID NO: 1105856 - DNA, 15 bp, Homo sapiens
caaaggtgctctgct

SEQ ID NO: 1105857 - DNA, 15 bp, Homo sapiens
gcaaaggtgctctgc

SEQ ID NO: 1105858 - DNA, 15 bp, Homo sapiens
ggcaaaggtgctctg

SEQ ID NO: 1105859 - DNA, 15 bp, Homo sapiens
gggcaaaggtgctct

SEQ ID NO: 1105860 - DNA, 15 bp, Homo sapiens
tgggcaaaggtgctc

SEQ ID NO: 1105861 - DNA, 15 bp, Homo sapiens
ttgggcaaaggtgct

SEQ ID NO: 1105862 - DNA, 15 bp, Homo sapiens
gttgggcaaaggtgc

SEQ ID NO: 1105863 - DNA, 15 bp, Homo sapiens
tgttgggcaaaggtg

SEQ ID NO: 1105864 - DNA, 15 bp, Homo sapiens
gtgttgggcaaaggt

SEQ ID NO: 1105865 - DNA, 15 bp, Homo sapiens
ggtgttgggcaaagg

SEQ ID NO: 1105866 - DNA, 15 bp, Homo sapiens
cggtgttgggcaaag

SEQ ID NO: 1105867 - DNA, 15 bp, Homo sapiens
tcggtgttgggcaaa

SEQ ID NO: 1105868 - DNA, 15 bp, Homo sapiens
atcggtgttgggcaa

SEQ ID NO: 1105869 - DNA, 15 bp, Homo sapiens
aatcggtgttgggca

SEQ ID NO: 1105870 - DNA, 15 bp, Homo sapiens
aaatcggtgttgggc

SEQ ID NO: 1105871 - DNA, 15 bp, Homo sapiens
gaaatcggtgttggg

SEQ ID NO: 1105872 - DNA, 15 bp, Homo sapiens
ggaaatcggtgttgg

SEQ ID NO: 1105873 - DNA, 15 bp, Homo sapiens
gggaaatcggtgttg

SEQ ID NO: 1105874 - DNA, 15 bp, Homo sapiens
ggggaaatcggtgtt

SEQ ID NO: 1105875 - DNA, 15 bp, Homo sapiens
aggggaaatcggtgt

SEQ ID NO: 1105876 - DNA, 15 bp, Homo sapiens
aaggggaaatcggtg

SEQ ID NO: 1105877 - DNA, 15 bp, Homo sapiens
taaggggaaatcggt

SEQ ID NO: 1105878 - DNA, 15 bp, Homo sapiens
ataaggggaaatcgg

SEQ ID NO: 1105879 - DNA, 15 bp, Homo sapiens
aataaggggaaatcg

SEQ ID NO: 1105880 - DNA, 15 bp, Homo sapiens
gaataaggggaaatc

SEQ ID NO: 1105881 - DNA, 15 bp, Homo sapiens
tgaataaggggaaat

SEQ ID NO: 1105882 - DNA, 15 bp, Homo sapiens
ttgaataaggggaaa

SEQ ID NO: 1105883 - DNA, 15 bp, Homo sapiens
cttgaataaggggaa

SEQ ID NO: 1105884 - DNA, 15 bp, Homo sapiens
ccttgaataagggga

SEQ ID NO: 1105885 - DNA, 15 bp, Homo sapiens
gccttgaataagggg

SEQ ID NO: 1105886 - DNA, 15 bp, Homo sapiens
ggccttgaataaggg

SEQ ID NO: 1105887 - DNA, 15 bp, Homo sapiens
aggccttgaataagg

SEQ ID NO: 1105888 - DNA, 15 bp, Homo sapiens
taggccttgaataag

SEQ ID NO: 1105889 - DNA, 15 bp, Homo sapiens
gtaggccttgaataa

SEQ ID NO: 1105890 - DNA, 15 bp, Homo sapiens
agtaggccttgaata

SEQ ID NO: 1105891 - DNA, 15 bp, Homo sapiens
cagtaggccttgaat

SEQ ID NO: 1105892 - DNA, 15 bp, Homo sapiens
ccagtaggccttgaa

SEQ ID NO: 1105893 - DNA, 15 bp, Homo sapiens
tccagtaggccttga

SEQ ID NO: 1105894 - DNA, 15 bp, Homo sapiens
gtccagtaggccttg

SEQ ID NO: 1105895 - DNA, 15 bp, Homo sapiens
agtccagtaggcctt

SEQ ID NO: 1105896 - DNA, 15 bp, Homo sapiens
aagtccagtaggcct

SEQ ID NO: 1105897 - DNA, 15 bp, Homo sapiens
gaagtccagtaggcc

SEQ ID NO: 1105898 - DNA, 15 bp, Homo sapiens
tgaagtccagtaggc

SEQ ID NO: 1105899 - DNA, 15 bp, Homo sapiens
gtgaagtccagtagg

SEQ ID NO: 1105900 - DNA, 15 bp, Homo sapiens
tgtgaagtccagtag

SEQ ID NO: 1105901 - DNA, 15 bp, Homo sapiens
atgtgaagtccagta

SEQ ID NO: 1105902 - DNA, 15 bp, Homo sapiens
catgtgaagtccagt

SEQ ID NO: 1105903 - DNA, 15 bp, Homo sapiens
tcatgtgaagtccag

SEQ ID NO: 1105904 - DNA, 15 bp, Homo sapiens
ctcatgtgaagtcca

SEQ ID NO: 1105905 - DNA, 15 bp, Homo sapiens
cctcatgtgaagtcc

SEQ ID NO: 1105906 - DNA, 15 bp, Homo sapiens
ccctcatgtgaagtc

SEQ ID NO: 1105907 - DNA, 15 bp, Homo sapiens
cccctcatgtgaagt

SEQ ID NO: 1105908 - DNA, 15 bp, Homo sapiens
tcccctcatgtgaag

SEQ ID NO: 1105909 - DNA, 15 bp, Homo sapiens
ttcccctcatgtgaa

SEQ ID NO: 1105910 - DNA, 15 bp, Homo sapiens
tttcccctcatgtga

SEQ ID NO: 1105911 - DNA, 15 bp, Homo sapiens
atttcccctcatgtg

SEQ ID NO: 1105912 - DNA, 15 bp, Homo sapiens
tatttcccctcatgt

SEQ ID NO: 1105913 - DNA, 15 bp, Homo sapiens
ttatttcccctcatg

SEQ ID NO: 1105914 - DNA, 15 bp, Homo sapiens
attatttcccctcat

SEQ ID NO: 1105915 - DNA, 15 bp, Homo sapiens
aattatttcccctca

SEQ ID NO: 1105916 - DNA, 15 bp, Homo sapiens
taattatttcccctc

SEQ ID NO: 1105917 - DNA, 15 bp, Homo sapiens
ctaattatttcccct

SEQ ID NO: 1105918 - DNA, 15 bp, Homo sapiens
gctaattatttcccc

SEQ ID NO: 1105919 - DNA, 15 bp, Homo sapiens
tgctaattatttccc

SEQ ID NO: 1105920 - DNA, 15 bp, Homo sapiens
ttgctaattatttcc

SEQ ID NO: 1105921 - DNA, 15 bp, Homo sapiens
cttgctaattatttc

SEQ ID NO: 1105922 - DNA, 15 bp, Homo sapiens
acttgctaattattt

SEQ ID NO: 1105923 - DNA, 15 bp, Homo sapiens
tacttgctaattatt

SEQ ID NO: 1105924 - DNA, 15 bp, Homo sapiens
atacttgctaattat

SEQ ID NO: 1105925 - DNA, 15 bp, Homo sapiens
gatacttgctaatta

SEQ ID NO: 1105926 - DNA, 15 bp, Homo sapiens
tgatacttgctaatt

SEQ ID NO: 1105927 - DNA, 15 bp, Homo sapiens
gtgatacttgctaat

SEQ ID NO: 1105928 - DNA, 15 bp, Homo sapiens
agtgatacttgctaa

SEQ ID NO: 1105929 - DNA, 15 bp, Homo sapiens
tagtgatacttgcta

SEQ ID NO: 1105930 - DNA, 15 bp, Homo sapiens
gtagtgatacttgct

SEQ ID NO: 1105931 - DNA, 15 bp, Homo sapiens
ggtagtgatacttgc

SEQ ID NO: 1105932 - DNA, 15 bp, Homo sapiens
aggtagtgatacttg

SEQ ID NO: 1105933 - DNA, 15 bp, Homo sapiens
aaggtagtgatactt

SEQ ID NO: 1105934 - DNA, 15 bp, Homo sapiens
taaggtagtgatact

SEQ ID NO: 1105935 - DNA, 15 bp, Homo sapiens
ttaaggtagtgatac

SEQ ID NO: 1105936 - DNA, 15 bp, Homo sapiens
gttaaggtagtgata

SEQ ID NO: 1105937 - DNA, 15 bp, Homo sapiens
ggttaaggtagtgat

SEQ ID NO: 1105938 - DNA, 15 bp, Homo sapiens
tggttaaggtagtga

SEQ ID NO: 1105939 - DNA, 15 bp, Homo sapiens
ttggttaaggtagtg

SEQ ID NO: 1105940 - DNA, 15 bp, Homo sapiens
tttggttaaggtagt

SEQ ID NO: 1105941 - DNA, 15 bp, Homo sapiens
atttggttaaggtag

SEQ ID NO: 1105942 - DNA, 15 bp, Homo sapiens
gatttggttaaggta

SEQ ID NO: 1105943 - DNA, 15 bp, Homo sapiens
tgatttggttaaggt

SEQ ID NO: 1105944 - DNA, 15 bp, Homo sapiens
atgatttggttaagg

SEQ ID NO: 1105945 - DNA, 15 bp, Homo sapiens
gatgatttggttaag

SEQ ID NO: 1105946 - DNA, 15 bp, Homo sapiens
ggatgatttggttaa

SEQ ID NO: 1105947 - DNA, 15 bp, Homo sapiens
tggatgatttggtta

SEQ ID NO: 1105948 - DNA, 15 bp, Homo sapiens
ttggatgatttggtt

SEQ ID NO: 1105949 - DNA, 15 bp, Homo sapiens
gttggatgatttggt

SEQ ID NO: 1105950 - DNA, 15 bp, Homo sapiens
tgttggatgatttgg

SEQ ID NO: 1105951 - DNA, 15 bp, Homo sapiens
ttgttggatgatttg

SEQ ID NO: 1105952 - DNA, 15 bp, Homo sapiens
cttgttggatgattt

SEQ ID NO: 1105953 - DNA, 15 bp, Homo sapiens
acttgttggatgatt

SEQ ID NO: 1105954 - DNA, 15 bp, Homo sapiens
tacttgttggatgat

SEQ ID NO: 1105955 - DNA, 15 bp, Homo sapiens
ttacttgttggatga

SEQ ID NO: 1105956 - DNA, 15 bp, Homo sapiens
cttacttgttggatg

SEQ ID NO: 1105957 - DNA, 15 bp, Homo sapiens
acttacttgttggat

SEQ ID NO: 1105958 - DNA, 15 bp, Homo sapiens
cacttacttgttgga

SEQ ID NO: 1105959 - DNA, 15 bp, Homo sapiens
ccacttacttgttgg

SEQ ID NO: 1105960 - DNA, 15 bp, Homo sapiens
gccacttacttgttg

SEQ ID NO: 1105961 - DNA, 15 bp, Homo sapiens
tgccacttacttgtt

SEQ ID NO: 1105962 - DNA, 15 bp, Homo sapiens
ttgccacttacttgt

SEQ ID NO: 1105963 - DNA, 15 bp, Homo sapiens
tttgccacttacttg

SEQ ID NO: 1105964 - DNA, 15 bp, Homo sapiens
gttttgccacttact

SEQ ID NO: 1105965 - DNA, 15 bp, Homo sapiens
ggttttgccacttac

SEQ ID NO: 1105966 - DNA, 15 bp, Homo sapiens
tggttttgccactta

SEQ ID NO: 1105967 - DNA, 15 bp, Homo sapiens
ctggttttgccactt

SEQ ID NO: 1105968 - DNA, 15 bp, Homo sapiens
cctggttttgccact

SEQ ID NO: 1105969 - DNA, 15 bp, Homo sapiens
tcctggttttgccac

SEQ ID NO: 1105970 - DNA, 15 bp, Homo sapiens
atcctggttttgcca

SEQ ID NO: 1105971 - DNA, 15 bp, Homo sapiens
gatcctggttttgcc

SEQ ID NO: 1105972 - DNA, 15 bp, Homo sapiens
agatcctggttttgc

SEQ ID NO: 1105973 - DNA, 15 bp, Homo sapiens
tagatcctggttttg

SEQ ID NO: 1105974 - DNA, 15 bp, Homo sapiens
ttagatcctggtttt

SEQ ID NO: 1105975 - DNA, 15 bp, Homo sapiens
tttagatcctggttt

SEQ ID NO: 1105976 - DNA, 15 bp, Homo sapiens
ctttagatcctggtt

SEQ ID NO: 1105977 - DNA, 15 bp, Homo sapiens
gctttagatcctggt

SEQ ID NO: 1105978 - DNA, 15 bp, Homo sapiens
ggctttagatcctgg

SEQ ID NO: 1105979 - DNA, 15 bp, Homo sapiens
tggctttagatcctg

SEQ ID NO: 1105980 - DNA, 15 bp, Homo sapiens
ctggctttagatcct

SEQ ID NO: 1105981 - DNA, 15 bp, Homo sapiens
actggctttagatcc

SEQ ID NO: 1105982 - DNA, 15 bp, Homo sapiens
aactggctttagatc

SEQ ID NO: 1105983 - DNA, 15 bp, Homo sapiens
gaactggctttagat

SEQ ID NO: 1105984 - DNA, 15 bp, Homo sapiens
agaactggctttaga

SEQ ID NO: 1105985 - DNA, 15 bp, Homo sapiens
aagaactggctttag

SEQ ID NO: 1105986 - DNA, 15 bp, Homo sapiens
aaagaactggcttta

SEQ ID NO: 1105987 - DNA, 15 bp, Homo sapiens
caaagaactggcttt

SEQ ID NO: 1105988 - DNA, 15 bp, Homo sapiens
acaaagaactggctt

SEQ ID NO: 1105989 - DNA, 15 bp, Homo sapiens
cacaaagaactggct

SEQ ID NO: 1105990 - DNA, 15 bp, Homo sapiens
tcacaaagaactggc

SEQ ID NO: 1105991 - DNA, 15 bp, Homo sapiens
gtcacaaagaactgg

SEQ ID NO: 1105992 - DNA, 15 bp, Homo sapiens
agtcacaaagaactg

SEQ ID NO: 1105993 - DNA, 15 bp, Homo sapiens
aagtcacaaagaact

SEQ ID NO: 1105994 - DNA, 15 bp, Homo sapiens
gaagtcacaaagaac

SEQ ID NO: 1105995 - DNA, 15 bp, Homo sapiens
tgaagtcacaaagaa

SEQ ID NO: 1105996 - DNA, 15 bp, Homo sapiens
gtgaagtcacaaaga

SEQ ID NO: 1105997 - DNA, 15 bp, Homo sapiens
tgtgaagtcacaaag

SEQ ID NO: 1105998 - DNA, 15 bp, Homo sapiens
ttgtgaagtcacaaa

SEQ ID NO: 1105999 - DNA, 15 bp, Homo sapiens
cttgtgaagtcacaa

SEQ ID NO: 1106000 - DNA, 15 bp, Homo sapiens
gcttgtgaagtcaca

SEQ ID NO: 1106001 - DNA, 15 bp, Homo sapiens
ggcttgtgaagtcac

SEQ ID NO: 1106002 - DNA, 15 bp, Homo sapiens
aggcttgtgaagtca

SEQ ID NO: 1106003 - DNA, 15 bp, Homo sapiens
caggcttgtgaagtc

SEQ ID NO: 1106004 - DNA, 15 bp, Homo sapiens
acaggcttgtgaagt

SEQ ID NO: 1106005 - DNA, 15 bp, Homo sapiens
cacaggcttgtgaag

SEQ ID NO: 1106006 - DNA, 15 bp, Homo sapiens
gcacaggcttgtgaa

SEQ ID NO: 1106007 - DNA, 15 bp, Homo sapiens
agcacaggcttgtga

SEQ ID NO: 1106008 - DNA, 15 bp, Homo sapiens
gagcacaggcttgtg

SEQ ID NO: 1106009 - DNA, 15 bp, Homo sapiens
agagcacaggcttgt

SEQ ID NO: 1106010 - DNA, 15 bp, Homo sapiens
aagagcacaggcttg

SEQ ID NO: 1106011 - DNA, 15 bp, Homo sapiens
aaagagcacaggctt

SEQ ID NO: 1106012 - DNA, 15 bp, Homo sapiens
aaaagagcacaggct

SEQ ID NO: 1106013 - DNA, 15 bp, Homo sapiens
gaaaagagcacaggc

SEQ ID NO: 1106014 - DNA, 15 bp, Homo sapiens
tgaaaagagcacagg

SEQ ID NO: 1106015 - DNA, 15 bp, Homo sapiens
gtgaaaagagcacag

SEQ ID NO: 1106016 - DNA, 15 bp, Homo sapiens
agtgaaaagagcaca

SEQ ID NO: 1106017 - DNA, 15 bp, Homo sapiens
tagtgaaaagagcac

SEQ ID NO: 1106018 - DNA, 15 bp, Homo sapiens
atagtgaaaagagca

SEQ ID NO: 1106019 - DNA, 15 bp, Homo sapiens
tatagtgaaaagagc

SEQ ID NO: 1106020 - DNA, 15 bp, Homo sapiens
gtatagtgaaaagag

SEQ ID NO: 1106021 - DNA, 15 bp, Homo sapiens
ggtatagtgaaaaga

SEQ ID NO: 1106022 - DNA, 15 bp, Homo sapiens
tggtatagtgaaaag

SEQ ID NO: 1106023 - DNA, 15 bp, Homo sapiens
atggtatagtgaaaa

SEQ ID NO: 1106024 - DNA, 15 bp, Homo sapiens
aatggtatagtgaaa

SEQ ID NO: 1106025 - DNA, 15 bp, Homo sapiens
gaatggtatagtgaa

SEQ ID NO: 1106026 - DNA, 15 bp, Homo sapiens
agaatggtatagtga

SEQ ID NO: 1106027 - DNA, 15 bp, Homo sapiens
cagaatggtatagtg

SEQ ID NO: 1106028 - DNA, 15 bp, Homo sapiens
gcagaatggtatagt

SEQ ID NO: 1106029 - DNA, 15 bp, Homo sapiens
ggcagaatggtatag

SEQ ID NO: 1106030 - DNA, 15 bp, Homo sapiens
aggcagaatggtata

SEQ ID NO: 1106031 - DNA, 15 bp, Homo sapiens
gaggcagaatggtat

SEQ ID NO: 1106032 - DNA, 15 bp, Homo sapiens
ggaggcagaatggta

SEQ ID NO: 1106033 - DNA, 15 bp, Homo sapiens
gggaggcagaatggt

SEQ ID NO: 1106034 - DNA, 15 bp, Homo sapiens
agggaggcagaatgg

SEQ ID NO: 1106035 - DNA, 15 bp, Homo sapiens
gagggaggcagaatg

SEQ ID NO: 1106036 - DNA, 15 bp, Homo sapiens
agagggaggcagaat

SEQ ID NO: 1106037 - DNA, 15 bp, Homo sapiens
cagagggaggcagaa

SEQ ID NO: 1106038 - DNA, 15 bp, Homo sapiens
gcagagggaggcaga

SEQ ID NO: 1106039 - DNA, 15 bp, Homo sapiens
tgcagagggaggcag

SEQ ID NO: 1106040 - DNA, 15 bp, Homo sapiens
ctgcagagggaggca

SEQ ID NO: 1106041 - DNA, 15 bp, Homo sapiens
actgcagagggaggc

SEQ ID NO: 1106042 - DNA, 15 bp, Homo sapiens
gactgcagagggagg

SEQ ID NO: 1106043 - DNA, 15 bp, Homo sapiens
tgactgcagagggag

SEQ ID NO: 1106044 - DNA, 15 bp, Homo sapiens
ttgactgcagaggga

SEQ ID NO: 1106045 - DNA, 15 bp, Homo sapiens
gttgactgcagaggg

SEQ ID NO: 1106046 - DNA, 15 bp, Homo sapiens
agttgactgcagagg

SEQ ID NO: 1106047 - DNA, 15 bp, Homo sapiens
tagttgactgcagag

SEQ ID NO: 1106048 - DNA, 15 bp, Homo sapiens
ttagttgactgcaga

SEQ ID NO: 1106049 - DNA, 15 bp, Homo sapiens
tttagttgactgcag

SEQ ID NO: 1106050 - DNA, 15 bp, Homo sapiens
gtttagttgactgca

SEQ ID NO: 1106051 - DNA, 15 bp, Homo sapiens
agtttagttgactgc

SEQ ID NO: 1106052 - DNA, 15 bp, Homo sapiens
tagtttagttgactg

SEQ ID NO: 1106053 - DNA, 15 bp, Homo sapiens
gtagtttagttgact

SEQ ID NO: 1106054 - DNA, 15 bp, Homo sapiens
tgtagtttagttgac

SEQ ID NO: 1106055 - DNA, 15 bp, Homo sapiens
ctgtagtttagttga

SEQ ID NO: 1106056 - DNA, 15 bp, Homo sapiens
tctgtagtttagttg

SEQ ID NO: 1106057 - DNA, 15 bp, Homo sapiens
ttctgtagtttagtt

SEQ ID NO: 1106058 - DNA, 15 bp, Homo sapiens
tttctgtagtttagt

SEQ ID NO: 1106059 - DNA, 15 bp, Homo sapiens
atttctgtagtttag

SEQ ID NO: 1106060 - DNA, 15 bp, Homo sapiens
aatttctgtagttta

SEQ ID NO: 1106061 - DNA, 15 bp, Homo sapiens
caatttctgtagttt

SEQ ID NO: 1106062 - DNA, 15 bp, Homo sapiens
acaatttctgtagtt

SEQ ID NO: 1106063 - DNA, 15 bp, Homo sapiens
cacaatttctgtagt

SEQ ID NO: 1106064 - DNA, 15 bp, Homo sapiens
acacaatttctgtag

SEQ ID NO: 1106065 - DNA, 15 bp, Homo sapiens
gacacaatttctgta

SEQ ID NO: 1106066 - DNA, 15 bp, Homo sapiens
ggacacaatttctgt

SEQ ID NO: 1106067 - DNA, 15 bp, Homo sapiens
aggacacaatttctg

SEQ ID NO: 1106068 - DNA, 15 bp, Homo sapiens
aaggacacaatttct

SEQ ID NO: 1106069 - DNA, 15 bp, Homo sapiens
gaaggacacaatttc

SEQ ID NO: 1106070 - DNA, 15 bp, Homo sapiens
ggaaggacacaattt

SEQ ID NO: 1106071 - DNA, 15 bp, Homo sapiens
tggaaggacacaatt

SEQ ID NO: 1106072 - DNA, 15 bp, Homo sapiens
gtggaaggacacaat

SEQ ID NO: 1106073 - DNA, 15 bp, Homo sapiens
tgtggaaggacacaa

SEQ ID NO: 1106074 - DNA, 15 bp, Homo sapiens
gtgtggaaggacaca

SEQ ID NO: 1106075 - DNA, 15 bp, Homo sapiens
tgtgtggaaggacac

SEQ ID NO: 1106076 - DNA, 15 bp, Homo sapiens
ctgtgtggaaggaca

SEQ ID NO: 1106077 - DNA, 15 bp, Homo sapiens
gctgtgtggaaggac

SEQ ID NO: 1106078 - DNA, 15 bp, Homo sapiens
agctgtgtggaagga

SEQ ID NO: 1106079 - DNA, 15 bp, Homo sapiens
aagctgtgtggaagg

SEQ ID NO: 1106080 - DNA, 15 bp, Homo sapiens
caagctgtgtggaag

SEQ ID NO: 1106081 - DNA, 15 bp, Homo sapiens
gcaagctgtgtggaa

SEQ ID NO: 1106082 - DNA, 15 bp, Homo sapiens
agcaagctgtgtgga

SEQ ID NO: 1106083 - DNA, 15 bp, Homo sapiens
aagcaagctgtgtgg

SEQ ID NO: 1106084 - DNA, 15 bp, Homo sapiens
aaagcaagctgtgtg

SEQ ID NO: 1106085 - DNA, 15 bp, Homo sapiens
taaagcaagctgtgt

SEQ ID NO: 1106086 - DNA, 15 bp, Homo sapiens
ttaaagcaagctgtg

SEQ ID NO: 1106087 - DNA, 15 bp, Homo sapiens
tttaaagcaagctgt

SEQ ID NO: 1106088 - DNA, 15 bp, Homo sapiens
ttttaaagcaagctg

SEQ ID NO: 1106089 - DNA, 15 bp, Homo sapiens
tttttaaagcaagct

SEQ ID NO: 1106090 - DNA, 15 bp, Homo sapiens
atttttaaagcaagc

SEQ ID NO: 1106091 - DNA, 15 bp, Homo sapiens
tatttttaaagcaag

SEQ ID NO: 1106092 - DNA, 15 bp, Homo sapiens
gtatttttaaagcaa

SEQ ID NO: 1106093 - DNA, 15 bp, Homo sapiens
tgtatttttaaagca

SEQ ID NO: 1106094 - DNA, 15 bp, Homo sapiens
atgtatttttaaagc

SEQ ID NO: 1106095 - DNA, 15 bp, Homo sapiens
tatgtatttttaaag

SEQ ID NO: 1106096 - DNA, 15 bp, Homo sapiens
ttatgtatttttaaa

SEQ ID NO: 1106097 - DNA, 15 bp, Homo sapiens
cttatgtatttttaa

SEQ ID NO: 1106098 - DNA, 15 bp, Homo sapiens
gcttatgtattttta

SEQ ID NO: 1106099 - DNA, 15 bp, Homo sapiens
agcttatgtattttt

SEQ ID NO: 1106100 - DNA, 15 bp, Homo sapiens
tagcttatgtatttt

SEQ ID NO: 1106101 - DNA, 15 bp, Homo sapiens
gtagcttatgtattt

SEQ ID NO: 1106102 - DNA, 15 bp, Homo sapiens
ggtagcttatgtatt

SEQ ID NO: 1106103 - DNA, 15 bp, Homo sapiens
aggtagcttatgtat

SEQ ID NO: 1106104 - DNA, 15 bp, Homo sapiens
taggtagcttatgta

SEQ ID NO: 1106105 - DNA, 15 bp, Homo sapiens
ttaggtagcttatgt

SEQ ID NO: 1106106 - DNA, 15 bp, Homo sapiens
cttaggtagcttatg

SEQ ID NO: 1106107 - DNA, 15 bp, Homo sapiens
tcttaggtagcttat

SEQ ID NO: 1106108 - DNA, 15 bp, Homo sapiens
ttcttaggtagctta

SEQ ID NO: 1106109 - DNA, 15 bp, Homo sapiens
tttcttaggtagctt

SEQ ID NO: 1106110 - DNA, 15 bp, Homo sapiens
ctttcttaggtagct

SEQ ID NO: 1106111 - DNA, 15 bp, Homo sapiens
gctttcttaggtagc

SEQ ID NO: 1106112 - DNA, 15 bp, Homo sapiens
agctttcttaggtag

SEQ ID NO: 1106113 - DNA, 15 bp, Homo sapiens
gagctttcttaggta

SEQ ID NO: 1106114 - DNA, 15 bp, Homo sapiens
agagctttcttaggt

SEQ ID NO: 1106115 - DNA, 15 bp, Homo sapiens
tagagctttcttagg

SEQ ID NO: 1106116 - DNA, 15 bp, Homo sapiens
ttagagctttcttag

SEQ ID NO: 1106117 - DNA, 15 bp, Homo sapiens
attagagctttctta

SEQ ID NO: 1106118 - DNA, 15 bp, Homo sapiens
aattagagctttctt

SEQ ID NO: 1106119 - DNA, 15 bp, Homo sapiens
aaattagagctttct

SEQ ID NO: 1106120 - DNA, 15 bp, Homo sapiens
taaattagagctttc

SEQ ID NO: 1106121 - DNA, 15 bp, Homo sapiens
ctaaattagagcttt

SEQ ID NO: 1106122 - DNA, 15 bp, Homo sapiens
tctaaattagagctt

SEQ ID NO: 1106123 - DNA, 15 bp, Homo sapiens
gtctaaattagagct

SEQ ID NO: 1106124 - DNA, 15 bp, Homo sapiens
tgtctaaattagagc

SEQ ID NO: 1106125 - DNA, 15 bp, Homo sapiens
atgtctaaattagag

SEQ ID NO: 1106126 - DNA, 15 bp, Homo sapiens
aatgtctaaattaga

SEQ ID NO: 1106127 - DNA, 15 bp, Homo sapiens
aaatgtctaaattag

SEQ ID NO: 1106128 - DNA, 15 bp, Homo sapiens
aaaatgtctaaatta

SEQ ID NO: 1106129 - DNA, 15 bp, Homo sapiens
aaaaatgtctaaatt

SEQ ID NO: 1106130 - DNA, 15 bp, Homo sapiens
gaaaaatgtctaaat

SEQ ID NO: 1106131 - DNA, 15 bp, Homo sapiens
agaaaaatgtctaaa

SEQ ID NO: 1106132 - DNA, 15 bp, Homo sapiens
gagaaaaatgtctaa

SEQ ID NO: 1106133 - DNA, 15 bp, Homo sapiens
agagaaaaatgtcta

SEQ ID NO: 1106134 - DNA, 15 bp, Homo sapiens
gagagaaaaatgtct

SEQ ID NO: 1106135 - DNA, 15 bp, Homo sapiens
agagagaaaaatgtc

SEQ ID NO: 1106136 - DNA, 15 bp, Homo sapiens
cagagagaaaaatgt

SEQ ID NO: 1106137 - DNA, 15 bp, Homo sapiens
gcagagagaaaaatg

SEQ ID NO: 1106138 - DNA, 15 bp, Homo sapiens
agcagagagaaaaat

SEQ ID NO: 1106139 - DNA, 15 bp, Homo sapiens
tagcagagagaaaaa

SEQ ID NO: 1106140 - DNA, 15 bp, Homo sapiens
ctagcagagagaaaa

SEQ ID NO: 1106141 - DNA, 15 bp, Homo sapiens
actagcagagagaaa

SEQ ID NO: 1106142 - DNA, 15 bp, Homo sapiens
gactagcagagagaa

SEQ ID NO: 1106143 - DNA, 15 bp, Homo sapiens
agactagcagagaga

SEQ ID NO: 1106144 - DNA, 15 bp, Homo sapiens
gagactagcagagag

SEQ ID NO: 1106145 - DNA, 15 bp, Homo sapiens
agagactagcagaga

SEQ ID NO: 1106146 - DNA, 15 bp, Homo sapiens
tagagactagcagag

SEQ ID NO: 1106147 - DNA, 15 bp, Homo sapiens
atagagactagcaga

SEQ ID NO: 1106148 - DNA, 15 bp, Homo sapiens
catagagactagcag

SEQ ID NO: 1106149 - DNA, 15 bp, Homo sapiens
gcatagagactagca

SEQ ID NO: 1106150 - DNA, 15 bp, Homo sapiens
ggcatagagactagc

SEQ ID NO: 1106151 - DNA, 15 bp, Homo sapiens
tggcatagagactag

SEQ ID NO: 1106152 - DNA, 15 bp, Homo sapiens
gtggcatagagacta

SEQ ID NO: 1106153 - DNA, 15 bp, Homo sapiens
tgtggcatagagact

SEQ ID NO: 1106154 - DNA, 15 bp, Homo sapiens
ttgtggcatagagac

SEQ ID NO: 1106155 - DNA, 15 bp, Homo sapiens
tttgtggcatagaga

SEQ ID NO: 1106156 - DNA, 15 bp, Homo sapiens
ttttgtggcatagag

SEQ ID NO: 1106157 - DNA, 15 bp, Homo sapiens
tttttgtggcataga

SEQ ID NO: 1106158 - DNA, 15 bp, Homo sapiens
ttttttgtggcatag

SEQ ID NO: 1106159 - DNA, 15 bp, Homo sapiens
tttttttgtggcata

SEQ ID NO: 1106160 - DNA, 15 bp, Homo sapiens
gtttttttgtggcat

SEQ ID NO: 1106161 - DNA, 15 bp, Homo sapiens
tgtttttttgtggca

SEQ ID NO: 1106162 - DNA, 15 bp, Homo sapiens
atgtttttttgtggc

SEQ ID NO: 1106163 - DNA, 15 bp, Homo sapiens
tatgtttttttgtgg

SEQ ID NO: 1106164 - DNA, 15 bp, Homo sapiens
ctatgtttttttgtg

SEQ ID NO: 1106165 - DNA, 15 bp, Homo sapiens
gctatgtttttttgt

SEQ ID NO: 1106166 - DNA, 15 bp, Homo sapiens
ggctatgtttttttg

SEQ ID NO: 1106167 - DNA, 15 bp, Homo sapiens
tggctatgttttttt

SEQ ID NO: 1106168 - DNA, 15 bp, Homo sapiens
ttggctatgtttttt

SEQ ID NO: 1106169 - DNA, 15 bp, Homo sapiens
attggctatgttttt

SEQ ID NO: 1106170 - DNA, 15 bp, Homo sapiens
aattggctatgtttt

SEQ ID NO: 1106171 - DNA, 15 bp, Homo sapiens
taattggctatgttt

SEQ ID NO: 1106172 - DNA, 15 bp, Homo sapiens
ataattggctatgtt

SEQ ID NO: 1106173 - DNA, 15 bp, Homo sapiens
tataattggctatgt

SEQ ID NO: 1106174 - DNA, 15 bp, Homo sapiens
atataattggctatg

SEQ ID NO: 1106175 - DNA, 15 bp, Homo sapiens
aatataattggctat

SEQ ID NO: 1106176 - DNA, 15 bp, Homo sapiens
caatataattggcta

SEQ ID NO: 1106177 - DNA, 15 bp, Homo sapiens
acaatataattggct

SEQ ID NO: 1106178 - DNA, 15 bp, Homo sapiens
cacaatataattggc

SEQ ID NO: 1106179 - DNA, 15 bp, Homo sapiens
acacaatataattgg

SEQ ID NO: 1106180 - DNA, 15 bp, Homo sapiens
aacacaatataattg

SEQ ID NO: 1106181 - DNA, 15 bp, Homo sapiens
taacacaatataatt

SEQ ID NO: 1106182 - DNA, 15 bp, Homo sapiens
ttaacacaatataat

SEQ ID NO: 1106183 - DNA, 15 bp, Homo sapiens
gttaacacaatataa

SEQ ID NO: 1106184 - DNA, 15 bp, Homo sapiens
agttaacacaatata

SEQ ID NO: 1106185 - DNA, 15 bp, Homo sapiens
cagttaacacaatat

SEQ ID NO: 1106186 - DNA, 15 bp, Homo sapiens
tcagttaacacaata

SEQ ID NO: 1106187 - DNA, 15 bp, Homo sapiens
gtcagttaacacaat

SEQ ID NO: 1106188 - DNA, 15 bp, Homo sapiens
agtcagttaacacaa

SEQ ID NO: 1106189 - DNA, 15 bp, Homo sapiens
gagtcagttaacaca

SEQ ID NO: 1106190 - DNA, 15 bp, Homo sapiens
tgagtcagttaacac

SEQ ID NO: 1106191 - DNA, 15 bp, Homo sapiens
atgagtcagttaaca

SEQ ID NO: 1106192 - DNA, 15 bp, Homo sapiens
catgagtcagttaac

SEQ ID NO: 1106193 - DNA, 15 bp, Homo sapiens
gcatgagtcagttaa

SEQ ID NO: 1106194 - DNA, 15 bp, Homo sapiens
agcatgagtcagtta

SEQ ID NO: 1106195 - DNA, 15 bp, Homo sapiens
cagcatgagtcagtt

SEQ ID NO: 1106196 - DNA, 15 bp, Homo sapiens
ccagcatgagtcagt

SEQ ID NO: 1106197 - DNA, 15 bp, Homo sapiens
gccagcatgagtcag

SEQ ID NO: 1106198 - DNA, 15 bp, Homo sapiens
agccagcatgagtca

SEQ ID NO: 1106199 - DNA, 15 bp, Homo sapiens
aagccagcatgagtc

SEQ ID NO: 1106200 - DNA, 15 bp, Homo sapiens
aaagccagcatgagt

SEQ ID NO: 1106201 - DNA, 15 bp, Homo sapiens
taaagccagcatgag

SEQ ID NO: 1106202 - DNA, 15 bp, Homo sapiens
gtaaagccagcatga

SEQ ID NO: 1106203 - DNA, 15 bp, Homo sapiens
tgtaaagccagcatg

SEQ ID NO: 1106204 - DNA, 15 bp, Homo sapiens
gtgtaaagccagcat

SEQ ID NO: 1106205 - DNA, 15 bp, Homo sapiens
tgtgtaaagccagca

SEQ ID NO: 1106206 - DNA, 15 bp, Homo sapiens
ttgtgtaaagccagc

SEQ ID NO: 1106207 - DNA, 15 bp, Homo sapiens
attgtgtaaagccag

SEQ ID NO: 1106208 - DNA, 15 bp, Homo sapiens
aattgtgtaaagcca

SEQ ID NO: 1106209 - DNA, 15 bp, Homo sapiens
aaattgtgtaaagcc

SEQ ID NO: 1106210 - DNA, 15 bp, Homo sapiens
taaattgtgtaaagc

SEQ ID NO: 1106211 - DNA, 15 bp, Homo sapiens
ataaattgtgtaaag

SEQ ID NO: 1106212 - DNA, 15 bp, Homo sapiens
tataaattgtgtaaa

SEQ ID NO: 1106213 - DNA, 15 bp, Homo sapiens
atataaattgtgtaa

SEQ ID NO: 1106214 - DNA, 15 bp, Homo sapiens
aatataaattgtgta

SEQ ID NO: 1106215 - DNA, 15 bp, Homo sapiens
caatataaattgtgt

SEQ ID NO: 1106216 - DNA, 15 bp, Homo sapiens
tcaatataaattgtg

SEQ ID NO: 1106217 - DNA, 15 bp, Homo sapiens
atcaatataaattgt

SEQ ID NO: 1106218 - DNA, 15 bp, Homo sapiens
aatcaatataaattg

SEQ ID NO: 1106219 - DNA, 15 bp, Homo sapiens
aaatcaatataaatt

SEQ ID NO: 1106220 - DNA, 15 bp, Homo sapiens
aaaatcaatataaat

SEQ ID NO: 1106221 - DNA, 15 bp, Homo sapiens
gaaaatcaatataaa

SEQ ID NO: 1106222 - DNA, 15 bp, Homo sapiens
tgaaaatcaatataa

SEQ ID NO: 1106223 - DNA, 15 bp, Homo sapiens
ctgaaaatcaatata

SEQ ID NO: 1106224 - DNA, 15 bp, Homo sapiens
cctgaaaatcaatat

SEQ ID NO: 1106225 - DNA, 15 bp, Homo sapiens
ccctgaaaatcaata

SEQ ID NO: 1106226 - DNA, 15 bp, Homo sapiens
accctgaaaatcaat

SEQ ID NO: 1106227 - DNA, 15 bp, Homo sapiens
caccctgaaaatcaa

SEQ ID NO: 1106228 - DNA, 15 bp, Homo sapiens
ccaccctgaaaatca

SEQ ID NO: 1106229 - DNA, 15 bp, Homo sapiens
accaccctgaaaatc

SEQ ID NO: 1106230 - DNA, 15 bp, Homo sapiens
taccaccctgaaaat

SEQ ID NO: 1106231 - DNA, 15 bp, Homo sapiens
ttaccaccctgaaaa

SEQ ID NO: 1106232 - DNA, 15 bp, Homo sapiens
attaccaccctgaaa

SEQ ID NO: 1106233 - DNA, 15 bp, Homo sapiens
tattaccaccctgaa

SEQ ID NO: 1106234 - DNA, 15 bp, Homo sapiens
ttattaccaccctga

SEQ ID NO: 1106235 - DNA, 15 bp, Homo sapiens
gttattaccaccctg

SEQ ID NO: 1106236 - DNA, 15 bp, Homo sapiens
ggttattaccaccct

SEQ ID NO: 1106237 - DNA, 15 bp, Homo sapiens
tggttattaccaccc

SEQ ID NO: 1106238 - DNA, 15 bp, Homo sapiens
ctggttattaccacc

SEQ ID NO: 1106239 - DNA, 15 bp, Homo sapiens
gctggttattaccac

SEQ ID NO: 1106240 - DNA, 15 bp, Homo sapiens
agctggttattacca

SEQ ID NO: 1106241 - DNA, 15 bp, Homo sapiens
aagctggttattacc

SEQ ID NO: 1106242 - DNA, 15 bp, Homo sapiens
gaagctggttattac

SEQ ID NO: 1106243 - DNA, 15 bp, Homo sapiens
agaagctggttatta

SEQ ID NO: 1106244 - DNA, 15 bp, Homo sapiens
cagaagctggttatt

SEQ ID NO: 1106245 - DNA, 15 bp, Homo sapiens
acagaagctggttat

SEQ ID NO: 1106246 - DNA, 15 bp, Homo sapiens
cacagaagctggtta

SEQ ID NO: 1106247 - DNA, 15 bp, Homo sapiens
tcacagaagctggtt

SEQ ID NO: 1106248 - DNA, 15 bp, Homo sapiens
atcacagaagctggt

SEQ ID NO: 1106249 - DNA, 15 bp, Homo sapiens
aatcacagaagctgg

SEQ ID NO: 1106250 - DNA, 15 bp, Homo sapiens
caatcacagaagctg

SEQ ID NO: 1106251 - DNA, 15 bp, Homo sapiens
ccaatcacagaagct

SEQ ID NO: 1106252 - DNA, 15 bp, Homo sapiens
accaatcacagaagc

SEQ ID NO: 1106253 - DNA, 15 bp, Homo sapiens
caccaatcacagaag

SEQ ID NO: 1106254 - DNA, 15 bp, Homo sapiens
acaccaatcacagaa

SEQ ID NO: 1106255 - DNA, 15 bp, Homo sapiens
cacaccaatcacaga

SEQ ID NO: 1106256 - DNA, 15 bp, Homo sapiens
gcacaccaatcacag

SEQ ID NO: 1106257 - DNA, 15 bp, Homo sapiens
tgcacaccaatcaca

SEQ ID NO: 1106258 - DNA, 15 bp, Homo sapiens
atgcacaccaatcac

SEQ ID NO: 1106259 - DNA, 15 bp, Homo sapiens
catgcacaccaatca

SEQ ID NO: 1106260 - DNA, 15 bp, Homo sapiens
acatgcacaccaatc

SEQ ID NO: 1106261 - DNA, 15 bp, Homo sapiens
cacatgcacaccaat

SEQ ID NO: 1106262 - DNA, 15 bp, Homo sapiens
gcacatgcacaccaa

SEQ ID NO: 1106263 - DNA, 15 bp, Homo sapiens
tgcacatgcacacca

SEQ ID NO: 1106264 - DNA, 15 bp, Homo sapiens
ttgcacatgcacacc

SEQ ID NO: 1106265 - DNA, 15 bp, Homo sapiens
cttgcacatgcacac

SEQ ID NO: 1106266 - DNA, 15 bp, Homo sapiens
tcttgcacatgcaca

SEQ ID NO: 1106267 - DNA, 15 bp, Homo sapiens
gtcttgcacatgcac

SEQ ID NO: 1106268 - DNA, 15 bp, Homo sapiens
agtcttgcacatgca

SEQ ID NO: 1106269 - DNA, 15 bp, Homo sapiens
aagtcttgcacatgc

SEQ ID NO: 1106270 - DNA, 15 bp, Homo sapiens
gaagtcttgcacatg

SEQ ID NO: 1106271 - DNA, 15 bp, Homo sapiens
ggaagtcttgcacat

SEQ ID NO: 1106272 - DNA, 15 bp, Homo sapiens
aggaagtcttgcaca

SEQ ID NO: 1106273 - DNA, 15 bp, Homo sapiens
caggaagtcttgcac

SEQ ID NO: 1106274 - DNA, 15 bp, Homo sapiens
gcaggaagtcttgca

SEQ ID NO: 1106275 - DNA, 15 bp, Homo sapiens
ggcaggaagtcttgc

SEQ ID NO: 1106276 - DNA, 15 bp, Homo sapiens
aggcaggaagtcttg

SEQ ID NO: 1106277 - DNA, 15 bp, Homo sapiens
taggcaggaagtctt

SEQ ID NO: 1106278 - DNA, 15 bp, Homo sapiens
ttaggcaggaagtct

SEQ ID NO: 1106279 - DNA, 15 bp, Homo sapiens
gttaggcaggaagtc

SEQ ID NO: 1106280 - DNA, 15 bp, Homo sapiens
ggttaggcaggaagt

SEQ ID NO: 1106281 - DNA, 15 bp, Homo sapiens
gggttaggcaggaag

SEQ ID NO: 1106282 - DNA, 15 bp, Homo sapiens
tgggttaggcaggaa

SEQ ID NO: 1106283 - DNA, 15 bp, Homo sapiens
atgggttaggcagga

SEQ ID NO: 1106284 - DNA, 15 bp, Homo sapiens
gatgggttaggcagg

SEQ ID NO: 1106285 - DNA, 15 bp, Homo sapiens
ggatgggttaggcag

SEQ ID NO: 1106286 - DNA, 15 bp, Homo sapiens
aggatgggttaggca

SEQ ID NO: 1106287 - DNA, 15 bp, Homo sapiens
aaggatgggttaggc

SEQ ID NO: 1106288 - DNA, 15 bp, Homo sapiens
gaaggatgggttagg

SEQ ID NO: 1106289 - DNA, 15 bp, Homo sapiens
agaaggatgggttag

SEQ ID NO: 1106290 - DNA, 15 bp, Homo sapiens
aagaaggatgggtta

SEQ ID NO: 1106291 - DNA, 15 bp, Homo sapiens
caagaaggatgggtt

SEQ ID NO: 1106292 - DNA, 15 bp, Homo sapiens
acaagaaggatgggt

SEQ ID NO: 1106293 - DNA, 15 bp, Homo sapiens
cacaagaaggatggg

SEQ ID NO: 1106294 - DNA, 15 bp, Homo sapiens
ccacaagaaggatgg

SEQ ID NO: 1106295 - DNA, 15 bp, Homo sapiens
gccacaagaaggatg

SEQ ID NO: 1106296 - DNA, 15 bp, Homo sapiens
agccacaagaaggat

SEQ ID NO: 1106297 - DNA, 15 bp, Homo sapiens
gagccacaagaagga

SEQ ID NO: 1106298 - DNA, 15 bp, Homo sapiens
tgagccacaagaagg

SEQ ID NO: 1106299 - DNA, 15 bp, Homo sapiens
ctgagccacaagaag

SEQ ID NO: 1106300 - DNA, 15 bp, Homo sapiens
gctgagccacaagaa

SEQ ID NO: 1106301 - DNA, 15 bp, Homo sapiens
agctgagccacaaga

SEQ ID NO: 1106302 - DNA, 15 bp, Homo sapiens
aagctgagccacaag

SEQ ID NO: 1106303 - DNA, 15 bp, Homo sapiens
aaagctgagccacaa

SEQ ID NO: 1106304 - DNA, 15 bp, Homo sapiens
caaagctgagccaca

SEQ ID NO: 1106305 - DNA, 15 bp, Homo sapiens
acaaagctgagccac

SEQ ID NO: 1106306 - DNA, 15 bp, Homo sapiens
tacaaagctgagcca

SEQ ID NO: 1106307 - DNA, 15 bp, Homo sapiens
ttacaaagctgagcc

SEQ ID NO: 1106308 - DNA, 15 bp, Homo sapiens
tttacaaagctgagc

SEQ ID NO: 1106309 - DNA, 15 bp, Homo sapiens
gtttacaaagctgag

SEQ ID NO: 1106310 - DNA, 15 bp, Homo sapiens
tgtttacaaagctga

SEQ ID NO: 1106311 - DNA, 15 bp, Homo sapiens
gtgtttacaaagctg

SEQ ID NO: 1106312 - DNA, 15 bp, Homo sapiens
agtgtttacaaagct

SEQ ID NO: 1106313 - DNA, 15 bp, Homo sapiens
cagtgtttacaaagc

SEQ ID NO: 1106314 - DNA, 15 bp, Homo sapiens
ccagtgtttacaaag

SEQ ID NO: 1106315 - DNA, 15 bp, Homo sapiens
gccagtgtttacaaa

SEQ ID NO: 1106316 - DNA, 15 bp, Homo sapiens
ggccagtgtttacaa

SEQ ID NO: 1106317 - DNA, 15 bp, Homo sapiens
gggccagtgtttaca

SEQ ID NO: 1106318 - DNA, 15 bp, Homo sapiens
agggccagtgtttac

SEQ ID NO: 1106319 - DNA, 15 bp, Homo sapiens
cagggccagtgttta

SEQ ID NO: 1106320 - DNA, 15 bp, Homo sapiens
ccagggccagtgttt

SEQ ID NO: 1106321 - DNA, 15 bp, Homo sapiens
cccagggccagtgtt

SEQ ID NO: 1106322 - DNA, 15 bp, Homo sapiens
acccagggccagtgt

SEQ ID NO: 1106323 - DNA, 15 bp, Homo sapiens
cacccagggccagtg

SEQ ID NO: 1106324 - DNA, 15 bp, Homo sapiens
ccacccagggccagt

SEQ ID NO: 1106325 - DNA, 15 bp, Homo sapiens
gccacccagggccag

SEQ ID NO: 1106326 - DNA, 15 bp, Homo sapiens
ggccacccagggcca

SEQ ID NO: 1106327 - DNA, 15 bp, Homo sapiens
cggccacccagggcc

SEQ ID NO: 1106328 - DNA, 15 bp, Homo sapiens
acggccacccagggc

SEQ ID NO: 1106329 - DNA, 15 bp, Homo sapiens
cacggccacccaggg

SEQ ID NO: 1106330 - DNA, 15 bp, Homo sapiens
tcacggccacccagg

SEQ ID NO: 1106331 - DNA, 15 bp, Homo sapiens
ttcacggccacccag

SEQ ID NO: 1106332 - DNA, 15 bp, Homo sapiens
gttcacggccaccca

SEQ ID NO: 1106333 - DNA, 15 bp, Homo sapiens
tgttcacggccaccc

SEQ ID NO: 1106334 - DNA, 15 bp, Homo sapiens
ctgttcacggccacc

SEQ ID NO: 1106335 - DNA, 15 bp, Homo sapiens
tctgttcacggccac

SEQ ID NO: 1106336 - DNA, 15 bp, Homo sapiens
ttctgttcacggcca

SEQ ID NO: 1106337 - DNA, 15 bp, Homo sapiens
cttctgttcacggcc

SEQ ID NO: 1106338 - DNA, 15 bp, Homo sapiens
acttctgttcacggc

SEQ ID NO: 1106339 - DNA, 15 bp, Homo sapiens
aacttctgttcacgg

SEQ ID NO: 1106340 - DNA, 15 bp, Homo sapiens
gaacttctgttcacg

SEQ ID NO: 1106341 - DNA, 15 bp, Homo sapiens
agaacttctgttcac

SEQ ID NO: 1106342 - DNA, 15 bp, Homo sapiens
aagaacttctgttca

SEQ ID NO: 1106343 - DNA, 15 bp, Homo sapiens
taagaacttctgttc

SEQ ID NO: 1106344 - DNA, 15 bp, Homo sapiens
ataagaacttctgtt

SEQ ID NO: 1106345 - DNA, 15 bp, Homo sapiens
gataagaacttctgt

SEQ ID NO: 1106346 - DNA, 15 bp, Homo sapiens
agataagaacttctg

SEQ ID NO: 1106347 - DNA, 15 bp, Homo sapiens
aagataagaacttct

SEQ ID NO: 1106348 - DNA, 15 bp, Homo sapiens
taagataagaacttc

SEQ ID NO: 1106349 - DNA, 15 bp, Homo sapiens
ctaagataagaactt

SEQ ID NO: 1106350 - DNA, 15 bp, Homo sapiens
tctaagataagaact

SEQ ID NO: 1106351 - DNA, 15 bp, Homo sapiens
gtctaagataagaac

SEQ ID NO: 1106352 - DNA, 15 bp, Homo sapiens
agtctaagataagaa

SEQ ID NO: 1106353 - DNA, 15 bp, Homo sapiens
cagtctaagataaga

SEQ ID NO: 1106354 - DNA, 15 bp, Homo sapiens
gcagtctaagataag

SEQ ID NO: 1106355 - DNA, 15 bp, Homo sapiens
tgcagtctaagataa

SEQ ID NO: 1106356 - DNA, 15 bp, Homo sapiens
atgcagtctaagata

SEQ ID NO: 1106357 - DNA, 15 bp, Homo sapiens
catgcagtctaagat

SEQ ID NO: 1106358 - DNA, 15 bp, Homo sapiens
gcatgcagtctaaga

SEQ ID NO: 1106359 - DNA, 15 bp, Homo sapiens
tgcatgcagtctaag

SEQ ID NO: 1106360 - DNA, 15 bp, Homo sapiens
ttgcatgcagtctaa

SEQ ID NO: 1106361 - DNA, 15 bp, Homo sapiens
gttgcatgcagtcta

SEQ ID NO: 1106362 - DNA, 15 bp, Homo sapiens
agttgcatgcagtct

SEQ ID NO: 1106363 - DNA, 15 bp, Homo sapiens
gagttgcatgcagtc

SEQ ID NO: 1106364 - DNA, 15 bp, Homo sapiens
tgagttgcatgcagt

SEQ ID NO: 1106365 - DNA, 15 bp, Homo sapiens
atgagttgcatgcag

SEQ ID NO: 1106366 - DNA, 15 bp, Homo sapiens
gatgagttgcatgca

SEQ ID NO: 1106367 - DNA, 15 bp, Homo sapiens
ggatgagttgcatgc

SEQ ID NO: 1106368 - DNA, 15 bp, Homo sapiens
aggatgagttgcatg

SEQ ID NO: 1106369 - DNA, 15 bp, Homo sapiens
taggatgagttgcat

SEQ ID NO: 1106370 - DNA, 15 bp, Homo sapiens
gtaggatgagttgca

SEQ ID NO: 1106371 - DNA, 15 bp, Homo sapiens
agtaggatgagttgc

SEQ ID NO: 1106372 - DNA, 15 bp, Homo sapiens
cagtaggatgagttg

SEQ ID NO: 1106373 - DNA, 15 bp, Homo sapiens
ccagtaggatgagtt

SEQ ID NO: 1106374 - DNA, 15 bp, Homo sapiens
gccagtaggatgagt

SEQ ID NO: 1106375 - DNA, 15 bp, Homo sapiens
tgccagtaggatgag

SEQ ID NO: 1106376 - DNA, 15 bp, Homo sapiens
gtgccagtaggatga

SEQ ID NO: 1106377 - DNA, 15 bp, Homo sapiens
agtgccagtaggatg

SEQ ID NO: 1106378 - DNA, 15 bp, Homo sapiens
cagtgccagtaggat

SEQ ID NO: 1106379 - DNA, 15 bp, Homo sapiens
tcagtgccagtagga

SEQ ID NO: 1106380 - DNA, 15 bp, Homo sapiens
ttcagtgccagtagg

SEQ ID NO: 1106381 - DNA, 15 bp, Homo sapiens
tttcagtgccagtag

SEQ ID NO: 1106382 - DNA, 15 bp, Homo sapiens
ctttcagtgccagta

SEQ ID NO: 1106383 - DNA, 15 bp, Homo sapiens
gctttcagtgccagt

SEQ ID NO: 1106384 - DNA, 15 bp, Homo sapiens
ggctttcagtgccag

SEQ ID NO: 1106385 - DNA, 15 bp, Homo sapiens
gggctttcagtgcca

SEQ ID NO: 1106386 - DNA, 15 bp, Homo sapiens
agggctttcagtgcc

SEQ ID NO: 1106387 - DNA, 15 bp, Homo sapiens
aagggctttcagtgc

SEQ ID NO: 1106388 - DNA, 15 bp, Homo sapiens
gaagggctttcagtg

SEQ ID NO: 1106389 - DNA, 15 bp, Homo sapiens
agaagggctttcagt

SEQ ID NO: 1106390 - DNA, 15 bp, Homo sapiens
aagaagggctttcag

SEQ ID NO: 1106391 - DNA, 15 bp, Homo sapiens
aaagaagggctttca

SEQ ID NO: 1106392 - DNA, 15 bp, Homo sapiens
caaagaagggctttc

SEQ ID NO: 1106393 - DNA, 15 bp, Homo sapiens
acaaagaagggcttt

SEQ ID NO: 1106394 - DNA, 15 bp, Homo sapiens
gacaaagaagggctt

SEQ ID NO: 1106395 - DNA, 15 bp, Homo sapiens
agacaaagaagggct

SEQ ID NO: 1106396 - DNA, 15 bp, Homo sapiens
aagacaaagaagggc

SEQ ID NO: 1106397 - DNA, 15 bp, Homo sapiens
aaagacaaagaaggg

SEQ ID NO: 1106398 - DNA, 15 bp, Homo sapiens
gaaagacaaagaagg

SEQ ID NO: 1106399 - DNA, 15 bp, Homo sapiens
agaaagacaaagaag

SEQ ID NO: 1106400 - DNA, 15 bp, Homo sapiens
gtgaagaaagacaaa

SEQ ID NO: 1106401 - DNA, 15 bp, Homo sapiens
ggtgaagaaagacaa

SEQ ID NO: 1106402 - DNA, 15 bp, Homo sapiens
aggtgaagaaagaca

SEQ ID NO: 1106403 - DNA, 15 bp, Homo sapiens
taggtgaagaaagac

SEQ ID NO: 1106404 - DNA, 15 bp, Homo sapiens
gtaggtgaagaaaga

SEQ ID NO: 1106405 - DNA, 15 bp, Homo sapiens
agtaggtgaagaaag

SEQ ID NO: 1106406 - DNA, 15 bp, Homo sapiens
aagtaggtgaagaaa

SEQ ID NO: 1106407 - DNA, 15 bp, Homo sapiens
taagtaggtgaagaa

SEQ ID NO: 1106408 - DNA, 15 bp, Homo sapiens
ttaagtaggtgaaga

SEQ ID NO: 1106409 - DNA, 15 bp, Homo sapiens
cttaagtaggtgaag

SEQ ID NO: 1106410 - DNA, 15 bp, Homo sapiens
gcttaagtaggtgaa

SEQ ID NO: 1106411 - DNA, 15 bp, Homo sapiens
tgcttaagtaggtga

SEQ ID NO: 1106412 - DNA, 15 bp, Homo sapiens
ttgcttaagtaggtg

SEQ ID NO: 1106413 - DNA, 15 bp, Homo sapiens
tttgcttaagtaggt

SEQ ID NO: 1106414 - DNA, 15 bp, Homo sapiens
atttgcttaagtagg

SEQ ID NO: 1106415 - DNA, 15 bp, Homo sapiens
aatttgcttaagtag

SEQ ID NO: 1106416 - DNA, 15 bp, Homo sapiens
aaatttgcttaagta

SEQ ID NO: 1106417 - DNA, 15 bp, Homo sapiens
taaatttgcttaagt

SEQ ID NO: 1106418 - DNA, 15 bp, Homo sapiens
gtaaatttgcttaag

SEQ ID NO: 1106419 - DNA, 15 bp, Homo sapiens
tgtaaatttgcttaa

SEQ ID NO: 1106420 - DNA, 15 bp, Homo sapiens
ttgtaaatttgctta

SEQ ID NO: 1106421 - DNA, 15 bp, Homo sapiens
cttgtaaatttgctt

SEQ ID NO: 1106422 - DNA, 15 bp, Homo sapiens
gcttgtaaatttgct

SEQ ID NO: 1106423 - DNA, 15 bp, Homo sapiens
ggcttgtaaatttgc

SEQ ID NO: 1106424 - DNA, 15 bp, Homo sapiens
tggcttgtaaatttg

SEQ ID NO: 1106425 - DNA, 15 bp, Homo sapiens
gtggcttgtaaattt

SEQ ID NO: 1106426 - DNA, 15 bp, Homo sapiens
agtggcttgtaaatt

SEQ ID NO: 1106427 - DNA, 15 bp, Homo sapiens
aagtggcttgtaaat

SEQ ID NO: 1106428 - DNA, 15 bp, Homo sapiens
aaagtggcttgtaaa

SEQ ID NO: 1106429 - DNA, 15 bp, Homo sapiens
aaaagtggcttgtaa

SEQ ID NO: 1106430 - DNA, 15 bp, Homo sapiens
aaaaagtggcttgta

SEQ ID NO: 1106431 - DNA, 15 bp, Homo sapiens
caaaaagtggcttgt

SEQ ID NO: 1106432 - DNA, 15 bp, Homo sapiens
gcaaaaagtggcttg

SEQ ID NO: 1106433 - DNA, 15 bp, Homo sapiens
ggcaaaaagtggctt

SEQ ID NO: 1106434 - DNA, 15 bp, Homo sapiens
aggcaaaaagtggct

SEQ ID NO: 1106435 - DNA, 15 bp, Homo sapiens
gaggcaaaaagtggc

SEQ ID NO: 1106436 - DNA, 15 bp, Homo sapiens
agaggcaaaaagtgg

SEQ ID NO: 1106437 - DNA, 15 bp, Homo sapiens
aagaggcaaaaagtg

SEQ ID NO: 1106438 - DNA, 15 bp, Homo sapiens
gaagaggcaaaaagt

SEQ ID NO: 1106439 - DNA, 15 bp, Homo sapiens
agaagaggcaaaaag

SEQ ID NO: 1106440 - DNA, 15 bp, Homo sapiens
gagaagaggcaaaaa

SEQ ID NO: 1106441 - DNA, 15 bp, Homo sapiens
agagaagaggcaaaa

SEQ ID NO: 1106442 - DNA, 15 bp, Homo sapiens
gagagaagaggcaaa

SEQ ID NO: 1106443 - DNA, 15 bp, Homo sapiens
tgagagaagaggcaa

SEQ ID NO: 1106444 - DNA, 15 bp, Homo sapiens
ctgagagaagaggca

SEQ ID NO: 1106445 - DNA, 15 bp, Homo sapiens
gctgagagaagaggc

SEQ ID NO: 1106446 - DNA, 15 bp, Homo sapiens
tgctgagagaagagg

SEQ ID NO: 1106447 - DNA, 15 bp, Homo sapiens
ctgctgagagaagag

SEQ ID NO: 1106448 - DNA, 15 bp, Homo sapiens
gctgctgagagaaga

SEQ ID NO: 1106449 - DNA, 15 bp, Homo sapiens
ggctgctgagagaag

SEQ ID NO: 1106450 - DNA, 15 bp, Homo sapiens
tggctgctgagagaa

SEQ ID NO: 1106451 - DNA, 15 bp, Homo sapiens
atggctgctgagaga

SEQ ID NO: 1106452 - DNA, 15 bp, Homo sapiens
gatggctgctgagag

SEQ ID NO: 1106453 - DNA, 15 bp, Homo sapiens
agatggctgctgaga

SEQ ID NO: 1106454 - DNA, 15 bp, Homo sapiens
aagatggctgctgag

SEQ ID NO: 1106455 - DNA, 15 bp, Homo sapiens
caagatggctgctga

SEQ ID NO: 1106456 - DNA, 15 bp, Homo sapiens
ccaagatggctgctg

SEQ ID NO: 1106457 - DNA, 15 bp, Homo sapiens
accaagatggctgct

SEQ ID NO: 1106458 - DNA, 15 bp, Homo sapiens
gaccaagatggctgc

SEQ ID NO: 1106459 - DNA, 15 bp, Homo sapiens
ggaccaagatggctg

SEQ ID NO: 1106460 - DNA, 15 bp, Homo sapiens
aggaccaagatggct

SEQ ID NO: 1106461 - DNA, 15 bp, Homo sapiens
aaggaccaagatggc

SEQ ID NO: 1106462 - DNA, 15 bp, Homo sapiens
aaaggaccaagatgg

SEQ ID NO: 1106463 - DNA, 15 bp, Homo sapiens
gaaaggaccaagatg

SEQ ID NO: 1106464 - DNA, 15 bp, Homo sapiens
tgaaaggaccaagat

SEQ ID NO: 1106465 - DNA, 15 bp, Homo sapiens
ttgaaaggaccaaga

SEQ ID NO: 1106466 - DNA, 15 bp, Homo sapiens
attgaaaggaccaag

SEQ ID NO: 1106467 - DNA, 15 bp, Homo sapiens
cattgaaaggaccaa

SEQ ID NO: 1106468 - DNA, 15 bp, Homo sapiens
acattgaaaggacca

SEQ ID NO: 1106469 - DNA, 15 bp, Homo sapiens
aacattgaaaggacc

SEQ ID NO: 1106470 - DNA, 15 bp, Homo sapiens
caacattgaaaggac

SEQ ID NO: 1106471 - DNA, 15 bp, Homo sapiens
gcaacattgaaagga

SEQ ID NO: 1106472 - DNA, 15 bp, Homo sapiens
ggcaacattgaaagg

SEQ ID NO: 1106473 - DNA, 15 bp, Homo sapiens
aggcaacattgaaag

SEQ ID NO: 1106474 - DNA, 15 bp, Homo sapiens
caggcaacattgaaa

SEQ ID NO: 1106475 - DNA, 15 bp, Homo sapiens
acaggcaacattgaa

SEQ ID NO: 1106476 - DNA, 15 bp, Homo sapiens
cacaggcaacattga

SEQ ID NO: 1106477 - DNA, 15 bp, Homo sapiens
acacaggcaacattg

SEQ ID NO: 1106478 - DNA, 15 bp, Homo sapiens
cacacaggcaacatt

SEQ ID NO: 1106479 - DNA, 15 bp, Homo sapiens
gcacacaggcaacat

SEQ ID NO: 1106480 - DNA, 15 bp, Homo sapiens
tgcacacaggcaaca

SEQ ID NO: 1106481 - DNA, 15 bp, Homo sapiens
gtgcacacaggcaac

SEQ ID NO: 1106482 - DNA, 15 bp, Homo sapiens
agtgcacacaggcaa

SEQ ID NO: 1106483 - DNA, 15 bp, Homo sapiens
gagtgcacacaggca

SEQ ID NO: 1106484 - DNA, 15 bp, Homo sapiens
tgagtgcacacaggc

SEQ ID NO: 1106485 - DNA, 15 bp, Homo sapiens
atgagtgcacacagg

SEQ ID NO: 1106486 - DNA, 15 bp, Homo sapiens
catgagtgcacacag

SEQ ID NO: 1106487 - DNA, 15 bp, Homo sapiens
gcatgagtgcacaca

SEQ ID NO: 1106488 - DNA, 15 bp, Homo sapiens
agcatgagtgcacac

SEQ ID NO: 1106489 - DNA, 15 bp, Homo sapiens
cagcatgagtgcaca

SEQ ID NO: 1106490 - DNA, 15 bp, Homo sapiens
acagcatgagtgcac

SEQ ID NO: 1106491 - DNA, 15 bp, Homo sapiens
tacagcatgagtgca

SEQ ID NO: 1106492 - DNA, 15 bp, Homo sapiens
atacagcatgagtgc

SEQ ID NO: 1106493 - DNA, 15 bp, Homo sapiens
aatacagcatgagtg

SEQ ID NO: 1106494 - DNA, 15 bp, Homo sapiens
aaatacagcatgagt

SEQ ID NO: 1106495 - DNA, 15 bp, Homo sapiens
taaatacagcatgag

SEQ ID NO: 1106496 - DNA, 15 bp, Homo sapiens
ataaatacagcatga

SEQ ID NO: 1106497 - DNA, 15 bp, Homo sapiens
cataaatacagcatg

SEQ ID NO: 1106498 - DNA, 15 bp, Homo sapiens
tcataaatacagcat

SEQ ID NO: 1106499 - DNA, 15 bp, Homo sapiens
gtcataaatacagca

SEQ ID NO: 1106500 - DNA, 15 bp, Homo sapiens
ggtcataaatacagc

SEQ ID NO: 1106501 - DNA, 15 bp, Homo sapiens
aggtcataaatacag

SEQ ID NO: 1106502 - DNA, 15 bp, Homo sapiens
caggtcataaataca

SEQ ID NO: 1106503 - DNA, 15 bp, Homo sapiens
ccaggtcataaatac

SEQ ID NO: 1106504 - DNA, 15 bp, Homo sapiens
accaggtcataaata

SEQ ID NO: 1106505 - DNA, 15 bp, Homo sapiens
gaccaggtcataaat

SEQ ID NO: 1106506 - DNA, 15 bp, Homo sapiens
ggaccaggtcataaa

SEQ ID NO: 1106507 - DNA, 15 bp, Homo sapiens
gggaccaggtcataa

SEQ ID NO: 1106508 - DNA, 15 bp, Homo sapiens
agggaccaggtcata

SEQ ID NO: 1106509 - DNA, 15 bp, Homo sapiens
gagggaccaggtcat

SEQ ID NO: 1106510 - DNA, 15 bp, Homo sapiens
agagggaccaggtca

SEQ ID NO: 1106511 - DNA, 15 bp, Homo sapiens
gagagggaccaggtc

SEQ ID NO: 1106512 - DNA, 15 bp, Homo sapiens
tgagagggaccaggt

SEQ ID NO: 1106513 - DNA, 15 bp, Homo sapiens
atgagagggaccagg

SEQ ID NO: 1106514 - DNA, 15 bp, Homo sapiens
tatgagagggaccag

SEQ ID NO: 1106515 - DNA, 15 bp, Homo sapiens
gtatgagagggacca

SEQ ID NO: 1106516 - DNA, 15 bp, Homo sapiens
agtatgagagggacc

SEQ ID NO: 1106517 - DNA, 15 bp, Homo sapiens
aagtatgagagggac

SEQ ID NO: 1106518 - DNA, 15 bp, Homo sapiens
aaagtatgagaggga

SEQ ID NO: 1106519 - DNA, 15 bp, Homo sapiens
caaagtatgagaggg

SEQ ID NO: 1106520 - DNA, 15 bp, Homo sapiens
tcaaagtatgagagg

SEQ ID NO: 1106521 - DNA, 15 bp, Homo sapiens
ctcaaagtatgagag

SEQ ID NO: 1106522 - DNA, 15 bp, Homo sapiens
tctcaaagtatgaga

SEQ ID NO: 1106523 - DNA, 15 bp, Homo sapiens
atctcaaagtatgag

SEQ ID NO: 1106524 - DNA, 15 bp, Homo sapiens
tatctcaaagtatga

SEQ ID NO: 1106525 - DNA, 15 bp, Homo sapiens
atatctcaaagtatg

SEQ ID NO: 1106526 - DNA, 15 bp, Homo sapiens
tatatctcaaagtat

SEQ ID NO: 1106527 - DNA, 15 bp, Homo sapiens
ttatatctcaaagta

SEQ ID NO: 1106528 - DNA, 15 bp, Homo sapiens
gttatatctcaaagt

SEQ ID NO: 1106529 - DNA, 15 bp, Homo sapiens
agttatatctcaaag

SEQ ID NO: 1106530 - DNA, 15 bp, Homo sapiens
gagttatatctcaaa

SEQ ID NO: 1106531 - DNA, 15 bp, Homo sapiens
tgagttatatctcaa

SEQ ID NO: 1106532 - DNA, 15 bp, Homo sapiens
ttgagttatatctca

SEQ ID NO: 1106533 - DNA, 15 bp, Homo sapiens
cttgagttatatctc

SEQ ID NO: 1106534 - DNA, 15 bp, Homo sapiens
acttgagttatatct

SEQ ID NO: 1106535 - DNA, 15 bp, Homo sapiens
gacttgagttatatc

SEQ ID NO: 1106536 - DNA, 15 bp, Homo sapiens
ggacttgagttatat

SEQ ID NO: 1106537 - DNA, 15 bp, Homo sapiens
aggacttgagttata

SEQ ID NO: 1106538 - DNA, 15 bp, Homo sapiens
aaggacttgagttat

SEQ ID NO: 1106539 - DNA, 15 bp, Homo sapiens
gaaggacttgagtta

SEQ ID NO: 1106540 - DNA, 15 bp, Homo sapiens
ggaaggacttgagtt

SEQ ID NO: 1106541 - DNA, 15 bp, Homo sapiens
aggaaggacttgagt

SEQ ID NO: 1106542 - DNA, 15 bp, Homo sapiens
aaggaaggacttgag

SEQ ID NO: 1106543 - DNA, 15 bp, Homo sapiens
gaaggaaggacttga

SEQ ID NO: 1106544 - DNA, 15 bp, Homo sapiens
agaaggaaggacttg

SEQ ID NO: 1106545 - DNA, 15 bp, Homo sapiens
aagaaggaaggactt

SEQ ID NO: 1106546 - DNA, 15 bp, Homo sapiens
aaagaaggaaggact

SEQ ID NO: 1106547 - DNA, 15 bp, Homo sapiens
caaagaaggaaggac

SEQ ID NO: 1106548 - DNA, 15 bp, Homo sapiens
tcaaagaaggaagga

SEQ ID NO: 1106549 - DNA, 15 bp, Homo sapiens
ctcaaagaaggaagg

SEQ ID NO: 1106550 - DNA, 15 bp, Homo sapiens
tctcaaagaaggaag

SEQ ID NO: 1106551 - DNA, 15 bp, Homo sapiens
ttctcaaagaaggaa

SEQ ID NO: 1106552 - DNA, 15 bp, Homo sapiens
attctcaaagaagga

SEQ ID NO: 1106553 - DNA, 15 bp, Homo sapiens
gattctcaaagaagg

SEQ ID NO: 1106554 - DNA, 15 bp, Homo sapiens
ggattctcaaagaag

SEQ ID NO: 1106555 - DNA, 15 bp, Homo sapiens
tggattctcaaagaa

SEQ ID NO: 1106556 - DNA, 15 bp, Homo sapiens
atggattctcaaaga

SEQ ID NO: 1106557 - DNA, 15 bp, Homo sapiens
tatggattctcaaag

SEQ ID NO: 1106558 - DNA, 15 bp, Homo sapiens
gtatggattctcaaa

SEQ ID NO: 1106559 - DNA, 15 bp, Homo sapiens
agtatggattctcaa

SEQ ID NO: 1106560 - DNA, 15 bp, Homo sapiens
cagtatggattctca

SEQ ID NO: 1106561 - DNA, 15 bp, Homo sapiens
tcagtatggattctc

SEQ ID NO: 1106562 - DNA, 15 bp, Homo sapiens
atcagtatggattct

SEQ ID NO: 1106563 - DNA, 15 bp, Homo sapiens
catcagtatggattc

SEQ ID NO: 1106564 - DNA, 15 bp, Homo sapiens
ccatcagtatggatt

SEQ ID NO: 1106565 - DNA, 15 bp, Homo sapiens
cccatcagtatggat

SEQ ID NO: 1106566 - DNA, 15 bp, Homo sapiens
acccatcagtatgga

SEQ ID NO: 1106567 - DNA, 15 bp, Homo sapiens
gacccatcagtatgg

SEQ ID NO: 1106568 - DNA, 15 bp, Homo sapiens
tgacccatcagtatg

SEQ ID NO: 1106569 - DNA, 15 bp, Homo sapiens
gtgacccatcagtat

SEQ ID NO: 1106570 - DNA, 15 bp, Homo sapiens
agtgacccatcagta

SEQ ID NO: 1106571 - DNA, 15 bp, Homo sapiens
aagtgacccatcagt

SEQ ID NO: 1106572 - DNA, 15 bp, Homo sapiens
aaagtgacccatcag

SEQ ID NO: 1106573 - DNA, 15 bp, Homo sapiens
aaaagtgacccatca

SEQ ID NO: 1106574 - DNA, 15 bp, Homo sapiens
aaaaagtgacccatc

SEQ ID NO: 1106575 - DNA, 15 bp, Homo sapiens
taaaaagtgacccat

SEQ ID NO: 1106576 - DNA, 15 bp, Homo sapiens
ttaaaaagtgaccca

SEQ ID NO: 1106577 - DNA, 15 bp, Homo sapiens
tttaaaaagtgaccc

SEQ ID NO: 1106578 - DNA, 15 bp, Homo sapiens
atttaaaaagtgacc

SEQ ID NO: 1106579 - DNA, 15 bp, Homo sapiens
tatttaaaaagtgac

SEQ ID NO: 1106580 - DNA, 15 bp, Homo sapiens
gtatttaaaaagtga

SEQ ID NO: 1106581 - DNA, 15 bp, Homo sapiens
agtatttaaaaagtg

SEQ ID NO: 1106582 - DNA, 15 bp, Homo sapiens
aagtatttaaaaagt

SEQ ID NO: 1106583 - DNA, 15 bp, Homo sapiens
taagtatttaaaaag

SEQ ID NO: 1106584 - DNA, 15 bp, Homo sapiens
ttaagtatttaaaaa

SEQ ID NO: 1106585 - DNA, 15 bp, Homo sapiens
cttaagtatttaaaa

SEQ ID NO: 1106586 - DNA, 15 bp, Homo sapiens
ccttaagtatttaaa

SEQ ID NO: 1106587 - DNA, 15 bp, Homo sapiens
accttaagtatttaa

SEQ ID NO: 1106588 - DNA, 15 bp, Homo sapiens
gaccttaagtattta

SEQ ID NO: 1106589 - DNA, 15 bp, Homo sapiens
agaccttaagtattt

SEQ ID NO: 1106590 - DNA, 15 bp, Homo sapiens
cagaccttaagtatt

SEQ ID NO: 1106591 - DNA, 15 bp, Homo sapiens
gcagaccttaagtat

SEQ ID NO: 1106592 - DNA, 15 bp, Homo sapiens
tgcagaccttaagta

SEQ ID NO: 1106593 - DNA, 15 bp, Homo sapiens
atgcagaccttaagt

SEQ ID NO: 1106594 - DNA, 15 bp, Homo sapiens
gatgcagaccttaag

SEQ ID NO: 1106595 - DNA, 15 bp, Homo sapiens
tgatgcagaccttaa

SEQ ID NO: 1106596 - DNA, 15 bp, Homo sapiens
ttgatgcagacctta

SEQ ID NO: 1106597 - DNA, 15 bp, Homo sapiens
tttgatgcagacctt

SEQ ID NO: 1106598 - DNA, 15 bp, Homo sapiens
gtttgatgcagacct

SEQ ID NO: 1106599 - DNA, 15 bp, Homo sapiens
tgtttgatgcagacc

SEQ ID NO: 1106600 - DNA, 15 bp, Homo sapiens
atgtttgatgcagac

SEQ ID NO: 1106601 - DNA, 15 bp, Homo sapiens
aatgtttgatgcaga

SEQ ID NO: 1106602 - DNA, 15 bp, Homo sapiens
taatgtttgatgcag

SEQ ID NO: 1106603 - DNA, 15 bp, Homo sapiens
ataatgtttgatgca

SEQ ID NO: 1106604 - DNA, 15 bp, Homo sapiens
tataatgtttgatgc

SEQ ID NO: 1106605 - DNA, 15 bp, Homo sapiens
ttataatgtttgatg

SEQ ID NO: 1106606 - DNA, 15 bp, Homo sapiens
gttataatgtttgat

SEQ ID NO: 1106607 - DNA, 15 bp, Homo sapiens
tgttataatgtttga

SEQ ID NO: 1106608 - DNA, 15 bp, Homo sapiens
atgttataatgtttg

SEQ ID NO: 1106609 - DNA, 15 bp, Homo sapiens
aatgttataatgttt

SEQ ID NO: 1106610 - DNA, 15 bp, Homo sapiens
aaatgttataatgtt

SEQ ID NO: 1106611 - DNA, 15 bp, Homo sapiens
caaatgttataatgt

SEQ ID NO: 1106612 - DNA, 15 bp, Homo sapiens
gcaaatgttataatg

SEQ ID NO: 1106613 - DNA, 15 bp, Homo sapiens
agcaaatgttataat

SEQ ID NO: 1106614 - DNA, 15 bp, Homo sapiens
cagcaaatgttataa

SEQ ID NO: 1106615 - DNA, 15 bp, Homo sapiens
acagcaaatgttata

SEQ ID NO: 1106616 - DNA, 15 bp, Homo sapiens
aacagcaaatgttat

SEQ ID NO: 1106617 - DNA, 15 bp, Homo sapiens
gaacagcaaatgtta

SEQ ID NO: 1106618 - DNA, 15 bp, Homo sapiens
agaacagcaaatgtt

SEQ ID NO: 1106619 - DNA, 15 bp, Homo sapiens
aagaacagcaaatgt

SEQ ID NO: 1106620 - DNA, 15 bp, Homo sapiens
gaagaacagcaaatg

SEQ ID NO: 1106621 - DNA, 15 bp, Homo sapiens
agaagaacagcaaat

SEQ ID NO: 1106622 - DNA, 15 bp, Homo sapiens
aagaagaacagcaaa

SEQ ID NO: 1106623 - DNA, 15 bp, Homo sapiens
aaagaagaacagcaa

SEQ ID NO: 1106624 - DNA, 15 bp, Homo sapiens
aaaagaagaacagca

SEQ ID NO: 1106625 - DNA, 15 bp, Homo sapiens
aaaaagaagaacagc

SEQ ID NO: 1106626 - DNA, 15 bp, Homo sapiens
aaaaaagaagaacag

SEQ ID NO: 1106627 - DNA, 15 bp, Homo sapiens
taaaaaagaagaaca

SEQ ID NO: 1106628 - DNA, 15 bp, Homo sapiens
ataaaaaagaagaac

SEQ ID NO: 1106629 - DNA, 15 bp, Homo sapiens
aataaaaaagaagaa

SEQ ID NO: 1106630 - DNA, 15 bp, Homo sapiens
gaataaaaaagaaga

SEQ ID NO: 1106631 - DNA, 15 bp, Homo sapiens
agaataaaaaagaag

SEQ ID NO: 1106632 - DNA, 15 bp, Homo sapiens
aagaataaaaaagaa

SEQ ID NO: 1106633 - DNA, 15 bp, Homo sapiens
taagaataaaaaaga

SEQ ID NO: 1106634 - DNA, 15 bp, Homo sapiens
gtaagaataaaaaag

SEQ ID NO: 1106635 - DNA, 15 bp, Homo sapiens
agtaagaataaaaaa

SEQ ID NO: 1106636 - DNA, 15 bp, Homo sapiens
aagtaagaataaaaa

SEQ ID NO: 1106637 - DNA, 15 bp, Homo sapiens
caagtaagaataaaa

SEQ ID NO: 1106638 - DNA, 15 bp, Homo sapiens
ccaagtaagaataaa

SEQ ID NO: 1106639 - DNA, 15 bp, Homo sapiens
accaagtaagaataa

SEQ ID NO: 1106640 - DNA, 15 bp, Homo sapiens
aaccaagtaagaata

SEQ ID NO: 1106641 - DNA, 15 bp, Homo sapiens
aaaccaagtaagaat

SEQ ID NO: 1106642 - DNA, 15 bp, Homo sapiens
taaaccaagtaagaa

SEQ ID NO: 1106643 - DNA, 15 bp, Homo sapiens
ataaaccaagtaaga

SEQ ID NO: 1106644 - DNA, 15 bp, Homo sapiens
tataaaccaagtaag

SEQ ID NO: 1106645 - DNA, 15 bp, Homo sapiens
atataaaccaagtaa

SEQ ID NO: 1106646 - DNA, 15 bp, Homo sapiens
tatataaaccaagta

SEQ ID NO: 1106647 - DNA, 15 bp, Homo sapiens
gtatataaaccaagt

SEQ ID NO: 1106648 - DNA, 15 bp, Homo sapiens
agtatataaaccaag

SEQ ID NO: 1106649 - DNA, 15 bp, Homo sapiens
tagtatataaaccaa

SEQ ID NO: 1106650 - DNA, 15 bp, Homo sapiens
ttagtatataaacca

SEQ ID NO: 1106651 - DNA, 15 bp, Homo sapiens
cttagtatataaacc

SEQ ID NO: 1106652 - DNA, 15 bp, Homo sapiens
gcttagtatataaac

SEQ ID NO: 1106653 - DNA, 15 bp, Homo sapiens
agcttagtatataaa

SEQ ID NO: 1106654 - DNA, 15 bp, Homo sapiens
aagcttagtatataa

SEQ ID NO: 1106655 - DNA, 15 bp, Homo sapiens
aaagcttagtatata

SEQ ID NO: 1106656 - DNA, 15 bp, Homo sapiens
taaagcttagtatat

SEQ ID NO: 1106657 - DNA, 15 bp, Homo sapiens
ataaagcttagtata

SEQ ID NO: 1106658 - DNA, 15 bp, Homo sapiens
aataaagcttagtat

SEQ ID NO: 1106659 - DNA, 15 bp, Homo sapiens
taataaagcttagta

SEQ ID NO: 1106660 - DNA, 15 bp, Homo sapiens
ataataaagcttagt

SEQ ID NO: 1106661 - DNA, 15 bp, Homo sapiens
gataataaagcttag

SEQ ID NO: 1106662 - DNA, 15 bp, Homo sapiens
ggataataaagctta

SEQ ID NO: 1106663 - DNA, 15 bp, Homo sapiens
aggataataaagctt

SEQ ID NO: 1106664 - DNA, 15 bp, Homo sapiens
aaggataataaagct

SEQ ID NO: 1106665 - DNA, 15 bp, Homo sapiens
aaaggataataaagc

SEQ ID NO: 1106666 - DNA, 15 bp, Homo sapiens
aaaaggataataaag

SEQ ID NO: 1106667 - DNA, 15 bp, Homo sapiens
taaaaggataataaa

SEQ ID NO: 1106668 - DNA, 15 bp, Homo sapiens
ttaaaaggataataa

SEQ ID NO: 1106669 - DNA, 15 bp, Homo sapiens
cttaaaaggataata

SEQ ID NO: 1106670 - DNA, 15 bp, Homo sapiens
ccttaaaaggataat

SEQ ID NO: 1106671 - DNA, 15 bp, Homo sapiens
accttaaaaggataa

SEQ ID NO: 1106672 - DNA, 15 bp, Homo sapiens
aaccttaaaaggata

SEQ ID NO: 1106673 - DNA, 15 bp, Homo sapiens
taaccttaaaaggat

SEQ ID NO: 1106674 - DNA, 15 bp, Homo sapiens
ttaaccttaaaagga

SEQ ID NO: 1106675 - DNA, 15 bp, Homo sapiens
tttaaccttaaaagg

SEQ ID NO: 1106676 - DNA, 15 bp, Homo sapiens
ttttaaccttaaaag

SEQ ID NO: 1106677 - DNA, 15 bp, Homo sapiens
gttttaaccttaaaa

SEQ ID NO: 1106678 - DNA, 15 bp, Homo sapiens
agttttaaccttaaa

SEQ ID NO: 1106679 - DNA, 15 bp, Homo sapiens
aagttttaaccttaa

SEQ ID NO: 1106680 - DNA, 15 bp, Homo sapiens
aaagttttaacctta

SEQ ID NO: 1106681 - DNA, 15 bp, Homo sapiens
gaaagttttaacctt

SEQ ID NO: 1106682 - DNA, 15 bp, Homo sapiens
agaaagttttaacct

SEQ ID NO: 1106683 - DNA, 15 bp, Homo sapiens
gagaaagttttaacc

SEQ ID NO: 1106684 - DNA, 15 bp, Homo sapiens
tgagaaagttttaac

SEQ ID NO: 1106685 - DNA, 15 bp, Homo sapiens
ttgagaaagttttaa

SEQ ID NO: 1106686 - DNA, 15 bp, Homo sapiens
cttgagaaagtttta

SEQ ID NO: 1106687 - DNA, 15 bp, Homo sapiens
ccttgagaaagtttt

SEQ ID NO: 1106688 - DNA, 15 bp, Homo sapiens
tccttgagaaagttt

SEQ ID NO: 1106689 - DNA, 15 bp, Homo sapiens
gtccttgagaaagtt

SEQ ID NO: 1106690 - DNA, 15 bp, Homo sapiens
tgtccttgagaaagt

SEQ ID NO: 1106691 - DNA, 15 bp, Homo sapiens
gtgtccttgagaaag

SEQ ID NO: 1106692 - DNA, 15 bp, Homo sapiens
agtgtccttgagaaa

SEQ ID NO: 1106693 - DNA, 15 bp, Homo sapiens
tagtgtccttgagaa

SEQ ID NO: 1106694 - DNA, 15 bp, Homo sapiens
ttagtgtccttgaga

SEQ ID NO: 1106695 - DNA, 15 bp, Homo sapiens
gttagtgtccttgag

SEQ ID NO: 1106696 - DNA, 15 bp, Homo sapiens
agttagtgtccttga

SEQ ID NO: 1106697 - DNA, 15 bp, Homo sapiens
cagttagtgtccttg

SEQ ID NO: 1106698 - DNA, 15 bp, Homo sapiens
acagttagtgtcctt

SEQ ID NO: 1106699 - DNA, 15 bp, Homo sapiens
tacagttagtgtcct

SEQ ID NO: 1106700 - DNA, 15 bp, Homo sapiens
ttacagttagtgtcc

SEQ ID NO: 1106701 - DNA, 15 bp, Homo sapiens
attacagttagtgtc

SEQ ID NO: 1106702 - DNA, 15 bp, Homo sapiens
cattacagttagtgt

SEQ ID NO: 1106703 - DNA, 15 bp, Homo sapiens
acattacagttagtg

SEQ ID NO: 1106704 - DNA, 15 bp, Homo sapiens
cacattacagttagt

SEQ ID NO: 1106705 - DNA, 15 bp, Homo sapiens
acacattacagttag

SEQ ID NO: 1106706 - DNA, 15 bp, Homo sapiens
tacacattacagtta

SEQ ID NO: 1106707 - DNA, 15 bp, Homo sapiens
gtacacattacagtt

SEQ ID NO: 1106708 - DNA, 15 bp, Homo sapiens
tgtacacattacagt

SEQ ID NO: 1106709 - DNA, 15 bp, Homo sapiens
ttgtacacattacag

SEQ ID NO: 1106710 - DNA, 15 bp, Homo sapiens
gttgtacacattaca

SEQ ID NO: 1106711 - DNA, 15 bp, Homo sapiens
agttgtacacattac

SEQ ID NO: 1106712 - DNA, 15 bp, Homo sapiens
aagttgtacacatta

SEQ ID NO: 1106713 - DNA, 15 bp, Homo sapiens
caagttgtacacatt

SEQ ID NO: 1106714 - DNA, 15 bp, Homo sapiens
ccaagttgtacacat

SEQ ID NO: 1106715 - DNA, 15 bp, Homo sapiens
accaagttgtacaca

SEQ ID NO: 1106716 - DNA, 15 bp, Homo sapiens
taccaagttgtacac

SEQ ID NO: 1106717 - DNA, 15 bp, Homo sapiens
ctaccaagttgtaca

SEQ ID NO: 1106718 - DNA, 15 bp, Homo sapiens
gctaccaagttgtac

SEQ ID NO: 1106719 - DNA, 15 bp, Homo sapiens
ggctaccaagttgta

SEQ ID NO: 1106720 - DNA, 15 bp, Homo sapiens
tggctaccaagttgt

SEQ ID NO: 1106721 - DNA, 15 bp, Homo sapiens
ctggctaccaagttg

SEQ ID NO: 1106722 - DNA, 15 bp, Homo sapiens
gctggctaccaagtt

SEQ ID NO: 1106723 - DNA, 15 bp, Homo sapiens
cgctggctaccaagt

SEQ ID NO: 1106724 - DNA, 15 bp, Homo sapiens
acgctggctaccaag

SEQ ID NO: 1106725 - DNA, 15 bp, Homo sapiens
tacgctggctaccaa

SEQ ID NO: 1106726 - DNA, 15 bp, Homo sapiens
ttacgctggctacca

SEQ ID NO: 1106727 - DNA, 15 bp, Homo sapiens
gttacgctggctacc

SEQ ID NO: 1106728 - DNA, 15 bp, Homo sapiens
tgttacgctggctac

SEQ ID NO: 1106729 - DNA, 15 bp, Homo sapiens
atgttacgctggcta

SEQ ID NO: 1106730 - DNA, 15 bp, Homo sapiens
aatgttacgctggct

SEQ ID NO: 1106731 - DNA, 15 bp, Homo sapiens
aaatgttacgctggc

SEQ ID NO: 1106732 - DNA, 15 bp, Homo sapiens
caaatgttacgctgg

SEQ ID NO: 1106733 - DNA, 15 bp, Homo sapiens
tcaaatgttacgctg

SEQ ID NO: 1106734 - DNA, 15 bp, Homo sapiens
gtcaaatgttacgct

SEQ ID NO: 1106735 - DNA, 15 bp, Homo sapiens
tgtcaaatgttacgc

SEQ ID NO: 1106736 - DNA, 15 bp, Homo sapiens
atgtcaaatgttacg

SEQ ID NO: 1106737 - DNA, 15 bp, Homo sapiens
tatgtcaaatgttac

SEQ ID NO: 1106738 - DNA, 15 bp, Homo sapiens
ctatgtcaaatgtta

SEQ ID NO: 1106739 - DNA, 15 bp, Homo sapiens
actatgtcaaatgtt

SEQ ID NO: 1106740 - DNA, 15 bp, Homo sapiens
cactatgtcaaatgt

SEQ ID NO: 1106741 - DNA, 15 bp, Homo sapiens
acactatgtcaaatg

SEQ ID NO: 1106742 - DNA, 15 bp, Homo sapiens
gacactatgtcaaat

SEQ ID NO: 1106743 - DNA, 15 bp, Homo sapiens
agacactatgtcaaa

SEQ ID NO: 1106744 - DNA, 15 bp, Homo sapiens
aagacactatgtcaa

SEQ ID NO: 1106745 - DNA, 15 bp, Homo sapiens
caagacactatgtca

SEQ ID NO: 1106746 - DNA, 15 bp, Homo sapiens
acaagacactatgtc

SEQ ID NO: 1106747 - DNA, 15 bp, Homo sapiens
tacaagacactatgt

SEQ ID NO: 1106748 - DNA, 15 bp, Homo sapiens
ttacaagacactatg

SEQ ID NO: 1106749 - DNA, 15 bp, Homo sapiens
tttacaagacactat

SEQ ID NO: 1106750 - DNA, 15 bp, Homo sapiens
ttttacaagacacta

SEQ ID NO: 1106751 - DNA, 15 bp, Homo sapiens
tttttacaagacact

SEQ ID NO: 1106752 - DNA, 15 bp, Homo sapiens
ctttttacaagacac

SEQ ID NO: 1106753 - DNA, 15 bp, Homo sapiens
tctttttacaagaca

SEQ ID NO: 1106754 - DNA, 15 bp, Homo sapiens
ttctttttacaagac

SEQ ID NO: 1106755 - DNA, 15 bp, Homo sapiens
cttctttttacaaga

SEQ ID NO: 1106756 - DNA, 15 bp, Homo sapiens
tcttctttttacaag

SEQ ID NO: 1106757 - DNA, 15 bp, Homo sapiens
atcttctttttacaa

SEQ ID NO: 1106758 - DNA, 15 bp, Homo sapiens
tatcttctttttaca

SEQ ID NO: 1106759 - DNA, 15 bp, Homo sapiens
gtatcttctttttac

SEQ ID NO: 1106760 - DNA, 15 bp, Homo sapiens
agtatcttcttttta

SEQ ID NO: 1106761 - DNA, 15 bp, Homo sapiens
gagtatcttcttttt

SEQ ID NO: 1106762 - DNA, 15 bp, Homo sapiens
tgagtatcttctttt

SEQ ID NO: 1106763 - DNA, 15 bp, Homo sapiens
ttgagtatcttcttt

SEQ ID NO: 1106764 - DNA, 15 bp, Homo sapiens
attgagtatcttctt

SEQ ID NO: 1106765 - DNA, 15 bp, Homo sapiens
gattgagtatcttct

SEQ ID NO: 1106766 - DNA, 15 bp, Homo sapiens
tgattgagtatcttc

SEQ ID NO: 1106767 - DNA, 15 bp, Homo sapiens
ctgattgagtatctt

SEQ ID NO: 1106768 - DNA, 15 bp, Homo sapiens
actgattgagtatct

SEQ ID NO: 1106769 - DNA, 15 bp, Homo sapiens
aactgattgagtatc

SEQ ID NO: 1106770 - DNA, 15 bp, Homo sapiens
aaactgattgagtat

SEQ ID NO: 1106771 - DNA, 15 bp, Homo sapiens
aaaactgattgagta

SEQ ID NO: 1106772 - DNA, 15 bp, Homo sapiens
aaaaactgattgagt

SEQ ID NO: 1106773 - DNA, 15 bp, Homo sapiens
caaaaactgattgag

SEQ ID NO: 1106774 - DNA, 15 bp, Homo sapiens
tcaaaaactgattga

SEQ ID NO: 1106775 - DNA, 15 bp, Homo sapiens
ttcaaaaactgattg

SEQ ID NO: 1106776 - DNA, 15 bp, Homo sapiens
attcaaaaactgatt

SEQ ID NO: 1106777 - DNA, 15 bp, Homo sapiens
cattcaaaaactgat

SEQ ID NO: 1106778 - DNA, 15 bp, Homo sapiens
tcattcaaaaactga

SEQ ID NO: 1106779 - DNA, 15 bp, Homo sapiens
atcattcaaaaactg

SEQ ID NO: 1106780 - DNA, 15 bp, Homo sapiens
aatcattcaaaaact

SEQ ID NO: 1106781 - DNA, 15 bp, Homo sapiens
gaatcattcaaaaac

SEQ ID NO: 1106782 - DNA, 15 bp, Homo sapiens
tgaatcattcaaaaa

SEQ ID NO: 1106783 - DNA, 15 bp, Homo sapiens
ttgaatcattcaaaa

SEQ ID NO: 1106784 - DNA, 15 bp, Homo sapiens
tttgaatcattcaaa

SEQ ID NO: 1106785 - DNA, 15 bp, Homo sapiens
ctttgaatcattcaa

SEQ ID NO: 1106786 - DNA, 15 bp, Homo sapiens
tctttgaatcattca

SEQ ID NO: 1106787 - DNA, 15 bp, Homo sapiens
ctctttgaatcattc

SEQ ID NO: 1106788 - DNA, 15 bp, Homo sapiens
actctttgaatcatt

SEQ ID NO: 1106789 - DNA, 15 bp, Homo sapiens
tactctttgaatcat

SEQ ID NO: 1106790 - DNA, 15 bp, Homo sapiens
ttactctttgaatca

SEQ ID NO: 1106791 - DNA, 15 bp, Homo sapiens
tttactctttgaatc

SEQ ID NO: 1106792 - DNA, 15 bp, Homo sapiens
ttttactctttgaat

SEQ ID NO: 1106793 - DNA, 15 bp, Homo sapiens
attttactctttgaa

SEQ ID NO: 1106794 - DNA, 15 bp, Homo sapiens
tattttactctttga

SEQ ID NO: 1106795 - DNA, 15 bp, Homo sapiens
ttattttactctttg

SEQ ID NO: 1106796 - DNA, 15 bp, Homo sapiens
attattttactcttt

SEQ ID NO: 1106797 - DNA, 15 bp, Homo sapiens
cattattttactctt

SEQ ID NO: 1106798 - DNA, 15 bp, Homo sapiens
ccattattttactct

SEQ ID NO: 1106799 - DNA, 15 bp, Homo sapiens
gccattattttactc

SEQ ID NO: 1106800 - DNA, 15 bp, Homo sapiens
tgccattattttact

SEQ ID NO: 1106801 - DNA, 15 bp, Homo sapiens
ttgccattattttac

SEQ ID NO: 1106802 - DNA, 15 bp, Homo sapiens
gttgccattatttta

SEQ ID NO: 1106803 - DNA, 15 bp, Homo sapiens
agttgccattatttt

SEQ ID NO: 1106804 - DNA, 15 bp, Homo sapiens
aagttgccattattt

SEQ ID NO: 1106805 - DNA, 15 bp, Homo sapiens
gaagttgccattatt

SEQ ID NO: 1106806 - DNA, 15 bp, Homo sapiens
agaagttgccattat

SEQ ID NO: 1106807 - DNA, 15 bp, Homo sapiens
aagaagttgccatta

SEQ ID NO: 1106808 - DNA, 15 bp, Homo sapiens
aaagaagttgccatt

SEQ ID NO: 1106809 - DNA, 15 bp, Homo sapiens
aaaagaagttgccat

SEQ ID NO: 1106810 - DNA, 15 bp, Homo sapiens
taaaagaagttgcca

SEQ ID NO: 1106811 - DNA, 15 bp, Homo sapiens
ataaaagaagttgcc

SEQ ID NO: 1106812 - DNA, 15 bp, Homo sapiens
gataaaagaagttgc

SEQ ID NO: 1106813 - DNA, 15 bp, Homo sapiens
agataaaagaagttg

SEQ ID NO: 1106814 - DNA, 15 bp, Homo sapiens
gagataaaagaagtt

SEQ ID NO: 1106815 - DNA, 15 bp, Homo sapiens
agagataaaagaagt

SEQ ID NO: 1106816 - DNA, 15 bp, Homo sapiens
aagagataaaagaag

SEQ ID NO: 1106817 - DNA, 15 bp, Homo sapiens
gaagagataaaagaa

SEQ ID NO: 1106818 - DNA, 15 bp, Homo sapiens
ggaagagataaaaga

SEQ ID NO: 1106819 - DNA, 15 bp, Homo sapiens
tggaagagataaaag

SEQ ID NO: 1106820 - DNA, 15 bp, Homo sapiens
atggaagagataaaa

SEQ ID NO: 1106821 - DNA, 15 bp, Homo sapiens
tatggaagagataaa

SEQ ID NO: 1106822 - DNA, 15 bp, Homo sapiens
ctatggaagagataa

SEQ ID NO: 1106823 - DNA, 15 bp, Homo sapiens
actatggaagagata

SEQ ID NO: 1106824 - DNA, 15 bp, Homo sapiens
cactatggaagagat

SEQ ID NO: 1106825 - DNA, 15 bp, Homo sapiens
gcactatggaagaga

SEQ ID NO: 1106826 - DNA, 15 bp, Homo sapiens
tgcactatggaagag

SEQ ID NO: 1106827 - DNA, 15 bp, Homo sapiens
ttgcactatggaaga

SEQ ID NO: 1106828 - DNA, 15 bp, Homo sapiens
attgcactatggaag

SEQ ID NO: 1106829 - DNA, 15 bp, Homo sapiens
gattgcactatggaa

SEQ ID NO: 1106830 - DNA, 15 bp, Homo sapiens
agattgcactatgga

SEQ ID NO: 1106831 - DNA, 15 bp, Homo sapiens
aagattgcactatgg

SEQ ID NO: 1106832 - DNA, 15 bp, Homo sapiens
gaagattgcactatg

SEQ ID NO: 1106833 - DNA, 15 bp, Homo sapiens
tgaagattgcactat

SEQ ID NO: 1106834 - DNA, 15 bp, Homo sapiens
ttgaagattgcacta

SEQ ID NO: 1106835 - DNA, 15 bp, Homo sapiens
attgaagattgcact

SEQ ID NO: 1106836 - DNA, 15 bp, Homo sapiens
tattgaagattgcac

SEQ ID NO: 1106837 - DNA, 15 bp, Homo sapiens
atattgaagattgca

SEQ ID NO: 1106838 - DNA, 15 bp, Homo sapiens
aatattgaagattgc

SEQ ID NO: 1106839 - DNA, 15 bp, Homo sapiens
aaatattgaagattg

SEQ ID NO: 1106840 - DNA, 15 bp, Homo sapiens
aaaatattgaagatt

SEQ ID NO: 1106841 - DNA, 15 bp, Homo sapiens
aaaaatattgaagat

SEQ ID NO: 1106842 - DNA, 15 bp, Homo sapiens
aaaaaatattgaaga

SEQ ID NO: 1106843 - DNA, 15 bp, Homo sapiens
taaaaaatattgaag

SEQ ID NO: 1106844 - DNA, 15 bp, Homo sapiens
ttaaaaaatattgaa

SEQ ID NO: 1106845 - DNA, 15 bp, Homo sapiens
tttaaaaaatattga

SEQ ID NO: 1106846 - DNA, 15 bp, Homo sapiens
gtttaaaaaatattg

SEQ ID NO: 1106847 - DNA, 15 bp, Homo sapiens
gttgtttaaaaaata

SEQ ID NO: 1106848 - DNA, 15 bp, Homo sapiens
agttgtttaaaaaat

SEQ ID NO: 1106849 - DNA, 15 bp, Homo sapiens
tagttgtttaaaaaa

SEQ ID NO: 1106850 - DNA, 15 bp, Homo sapiens
atagttgtttaaaaa

SEQ ID NO: 1106851 - DNA, 15 bp, Homo sapiens
aatagttgtttaaaa

SEQ ID NO: 1106852 - DNA, 15 bp, Homo sapiens
caatagttgtttaaa

SEQ ID NO: 1106853 - DNA, 15 bp, Homo sapiens
ccaatagttgtttaa

SEQ ID NO: 1106854 - DNA, 15 bp, Homo sapiens
gccaatagttgttta

SEQ ID NO: 1106855 - DNA, 15 bp, Homo sapiens
agccaatagttgttt

SEQ ID NO: 1106856 - DNA, 15 bp, Homo sapiens
cagccaatagttgtt

SEQ ID NO: 1106857 - DNA, 15 bp, Homo sapiens
tcagccaatagttgt

SEQ ID NO: 1106858 - DNA, 15 bp, Homo sapiens
ttcagccaatagttg

SEQ ID NO: 1106859 - DNA, 15 bp, Homo sapiens
attcagccaatagtt

SEQ ID NO: 1106860 - DNA, 15 bp, Homo sapiens
aattcagccaatagt

SEQ ID NO: 1106861 - DNA, 15 bp, Homo sapiens
gaattcagccaatag

SEQ ID NO: 1106862 - DNA, 15 bp, Homo sapiens
agaattcagccaata

SEQ ID NO: 1106863 - DNA, 15 bp, Homo sapiens
tagaattcagccaat

SEQ ID NO: 1106864 - DNA, 15 bp, Homo sapiens
gtagaattcagccaa

SEQ ID NO: 1106865 - DNA, 15 bp, Homo sapiens
ggtagaattcagcca

SEQ ID NO: 1106866 - DNA, 15 bp, Homo sapiens
tggtagaattcagcc

SEQ ID NO: 1106867 - DNA, 15 bp, Homo sapiens
atggtagaattcagc

SEQ ID NO: 1106868 - DNA, 15 bp, Homo sapiens
aatggtagaattcag

SEQ ID NO: 1106869 - DNA, 15 bp, Homo sapiens
caatggtagaattca

SEQ ID NO: 1106870 - DNA, 15 bp, Homo sapiens
acaatggtagaattc

SEQ ID NO: 1106871 - DNA, 15 bp, Homo sapiens
cacaatggtagaatt

SEQ ID NO: 1106872 - DNA, 15 bp, Homo sapiens
ccacaatggtagaat

SEQ ID NO: 1106873 - DNA, 15 bp, Homo sapiens
accacaatggtagaa

SEQ ID NO: 1106874 - DNA, 15 bp, Homo sapiens
aaccacaatggtaga

SEQ ID NO: 1106875 - DNA, 15 bp, Homo sapiens
aaaccacaatggtag

SEQ ID NO: 1106876 - DNA, 15 bp, Homo sapiens
taaaccacaatggta

SEQ ID NO: 1106877 - DNA, 15 bp, Homo sapiens
ctaaaccacaatggt

SEQ ID NO: 1106878 - DNA, 15 bp, Homo sapiens
tctaaaccacaatgg

SEQ ID NO: 1106879 - DNA, 15 bp, Homo sapiens
ctctaaaccacaatg

SEQ ID NO: 1106880 - DNA, 15 bp, Homo sapiens
gctctaaaccacaat

SEQ ID NO: 1106881 - DNA, 15 bp, Homo sapiens
agctctaaaccacaa

SEQ ID NO: 1106882 - DNA, 15 bp, Homo sapiens
aagctctaaaccaca

SEQ ID NO: 1106883 - DNA, 15 bp, Homo sapiens
aaagctctaaaccac

SEQ ID NO: 1106884 - DNA, 15 bp, Homo sapiens
gaaagctctaaacca

SEQ ID NO: 1106885 - DNA, 15 bp, Homo sapiens
agaaagctctaaacc

SEQ ID NO: 1106886 - DNA, 15 bp, Homo sapiens
gagaaagctctaaac

SEQ ID NO: 1106887 - DNA, 15 bp, Homo sapiens
agagaaagctctaaa

SEQ ID NO: 1106888 - DNA, 15 bp, Homo sapiens
cagagaaagctctaa

SEQ ID NO: 1106889 - DNA, 15 bp, Homo sapiens
tcagagaaagctcta

SEQ ID NO: 1106890 - DNA, 15 bp, Homo sapiens
ctcagagaaagctct

SEQ ID NO: 1106891 - DNA, 15 bp, Homo sapiens
tctcagagaaagctc

SEQ ID NO: 1106892 - DNA, 15 bp, Homo sapiens
gtctcagagaaagct

SEQ ID NO: 1106893 - DNA, 15 bp, Homo sapiens
tgtctcagagaaagc

SEQ ID NO: 1106894 - DNA, 15 bp, Homo sapiens
atgtctcagagaaag

SEQ ID NO: 1106895 - DNA, 15 bp, Homo sapiens
aatgtctcagagaaa

SEQ ID NO: 1106896 - DNA, 15 bp, Homo sapiens
aaatgtctcagagaa

SEQ ID NO: 1106897 - DNA, 15 bp, Homo sapiens
aaaatgtctcagaga

SEQ ID NO: 1106898 - DNA, 15 bp, Homo sapiens
aaaaatgtctcagag

SEQ ID NO: 1106899 - DNA, 15 bp, Homo sapiens
caaaaatgtctcaga

SEQ ID NO: 1106900 - DNA, 15 bp, Homo sapiens
gcaaaaatgtctcag

SEQ ID NO: 1106901 - DNA, 15 bp, Homo sapiens
agcaaaaatgtctca

SEQ ID NO: 1106902 - DNA, 15 bp, Homo sapiens
tagcaaaaatgtctc

SEQ ID NO: 1106903 - DNA, 15 bp, Homo sapiens
ttagcaaaaatgtct

SEQ ID NO: 1106904 - DNA, 15 bp, Homo sapiens
cttagcaaaaatgtc

SEQ ID NO: 1106905 - DNA, 15 bp, Homo sapiens
ccttagcaaaaatgt

SEQ ID NO: 1106906 - DNA, 15 bp, Homo sapiens
accttagcaaaaatg

SEQ ID NO: 1106907 - DNA, 15 bp, Homo sapiens
aaccttagcaaaaat

SEQ ID NO: 1106908 - DNA, 15 bp, Homo sapiens
aaaccttagcaaaaa

SEQ ID NO: 1106909 - DNA, 15 bp, Homo sapiens
aaaaccttagcaaaa

SEQ ID NO: 1106910 - DNA, 15 bp, Homo sapiens
caaaaccttagcaaa

SEQ ID NO: 1106911 - DNA, 15 bp, Homo sapiens
tcaaaaccttagcaa

SEQ ID NO: 1106912 - DNA, 15 bp, Homo sapiens
ttcaaaaccttagca

SEQ ID NO: 1106913 - DNA, 15 bp, Homo sapiens
tttcaaaaccttagc

SEQ ID NO: 1106914 - DNA, 15 bp, Homo sapiens
gtttcaaaaccttag

SEQ ID NO: 1106915 - DNA, 15 bp, Homo sapiens
tgtttcaaaacctta

SEQ ID NO: 1106916 - DNA, 15 bp, Homo sapiens
ctgtttcaaaacctt

SEQ ID NO: 1106917 - DNA, 15 bp, Homo sapiens
cctgtttcaaaacct

SEQ ID NO: 1106918 - DNA, 15 bp, Homo sapiens
acctgtttcaaaacc

SEQ ID NO: 1106919 - DNA, 15 bp, Homo sapiens
aacctgtttcaaaac

SEQ ID NO: 1106920 - DNA, 15 bp, Homo sapiens
gaacctgtttcaaaa

SEQ ID NO: 1106921 - DNA, 15 bp, Homo sapiens
ggaacctgtttcaaa

SEQ ID NO: 1106922 - DNA, 15 bp, Homo sapiens
tggaacctgtttcaa

SEQ ID NO: 1106923 - DNA, 15 bp, Homo sapiens
ttggaacctgtttca

SEQ ID NO: 1106924 - DNA, 15 bp, Homo sapiens
tttggaacctgtttc

SEQ ID NO: 1106925 - DNA, 15 bp, Homo sapiens
atttggaacctgttt

SEQ ID NO: 1106926 - DNA, 15 bp, Homo sapiens
aatttggaacctgtt

SEQ ID NO: 1106927 - DNA, 15 bp, Homo sapiens
caatttggaacctgt

SEQ ID NO: 1106928 - DNA, 15 bp, Homo sapiens
ccaatttggaacctg

SEQ ID NO: 1106929 - DNA, 15 bp, Homo sapiens
accaatttggaacct

SEQ ID NO: 1106930 - DNA, 15 bp, Homo sapiens
gaccaatttggaacc

SEQ ID NO: 1106931 - DNA, 15 bp, Homo sapiens
ggaccaatttggaac

SEQ ID NO: 1106932 - DNA, 15 bp, Homo sapiens
tggaccaatttggaa

SEQ ID NO: 1106933 - DNA, 15 bp, Homo sapiens
gtggaccaatttgga

SEQ ID NO: 1106934 - DNA, 15 bp, Homo sapiens
tgtggaccaatttgg

SEQ ID NO: 1106935 - DNA, 15 bp, Homo sapiens
ctgtggaccaatttg

SEQ ID NO: 1106936 - DNA, 15 bp, Homo sapiens
actgtggaccaattt

SEQ ID NO: 1106937 - DNA, 15 bp, Homo sapiens
cactgtggaccaatt

SEQ ID NO: 1106938 - DNA, 15 bp, Homo sapiens
tcactgtggaccaat

SEQ ID NO: 1106939 - DNA, 15 bp, Homo sapiens
gtcactgtggaccaa

SEQ ID NO: 1106940 - DNA, 15 bp, Homo sapiens
ggtcactgtggacca

SEQ ID NO: 1106941 - DNA, 15 bp, Homo sapiens
aggtcactgtggacc

SEQ ID NO: 1106942 - DNA, 15 bp, Homo sapiens
gaggtcactgtggac

SEQ ID NO: 1106943 - DNA, 15 bp, Homo sapiens
ggaggtcactgtgga

SEQ ID NO: 1106944 - DNA, 15 bp, Homo sapiens
tggaggtcactgtgg

SEQ ID NO: 1106945 - DNA, 15 bp, Homo sapiens
ttggaggtcactgtg

SEQ ID NO: 1106946 - DNA, 15 bp, Homo sapiens
cttggaggtcactgt

SEQ ID NO: 1106947 - DNA, 15 bp, Homo sapiens
ccttggaggtcactg

SEQ ID NO: 1106948 - DNA, 15 bp, Homo sapiens
gccttggaggtcact

SEQ ID NO: 1106949 - DNA, 15 bp, Homo sapiens
agccttggaggtcac

SEQ ID NO: 1106950 - DNA, 15 bp, Homo sapiens
gagccttggaggtca

SEQ ID NO: 1106951 - DNA, 15 bp, Homo sapiens
agagccttggaggtc

SEQ ID NO: 1106952 - DNA, 15 bp, Homo sapiens
tagagccttggaggt

SEQ ID NO: 1106953 - DNA, 15 bp, Homo sapiens
gtagagccttggagg

SEQ ID NO: 1106954 - DNA, 15 bp, Homo sapiens
tgtagagccttggag

SEQ ID NO: 1106955 - DNA, 15 bp, Homo sapiens
ctgtagagccttgga

SEQ ID NO: 1106956 - DNA, 15 bp, Homo sapiens
cctgtagagccttgg

SEQ ID NO: 1106957 - DNA, 15 bp, Homo sapiens
tcctgtagagccttg

SEQ ID NO: 1106958 - DNA, 15 bp, Homo sapiens
ctcctgtagagcctt

SEQ ID NO: 1106959 - DNA, 15 bp, Homo sapiens
actcctgtagagcct

SEQ ID NO: 1106960 - DNA, 15 bp, Homo sapiens
cactcctgtagagcc

SEQ ID NO: 1106961 - DNA, 15 bp, Homo sapiens
ccactcctgtagagc

SEQ ID NO: 1106962 - DNA, 15 bp, Homo sapiens
accactcctgtagag

SEQ ID NO: 1106963 - DNA, 15 bp, Homo sapiens
gaccactcctgtaga

SEQ ID NO: 1106964 - DNA, 15 bp, Homo sapiens
ggaccactcctgtag

SEQ ID NO: 1106965 - DNA, 15 bp, Homo sapiens
aggaccactcctgta

SEQ ID NO: 1106966 - DNA, 15 bp, Homo sapiens
gaggaccactcctgt

SEQ ID NO: 1106967 - DNA, 15 bp, Homo sapiens
tgaggaccactcctg

SEQ ID NO: 1106968 - DNA, 15 bp, Homo sapiens
ttgaggaccactcct

SEQ ID NO: 1106969 - DNA, 15 bp, Homo sapiens
cttgaggaccactcc

SEQ ID NO: 1106970 - DNA, 15 bp, Homo sapiens
gcttgaggaccactc

SEQ ID NO: 1106971 - DNA, 15 bp, Homo sapiens
agcttgaggaccact

SEQ ID NO: 1106972 - DNA, 15 bp, Homo sapiens
aagcttgaggaccac

SEQ ID NO: 1106973 - DNA, 15 bp, Homo sapiens
gaagcttgaggacca

SEQ ID NO: 1106974 - DNA, 15 bp, Homo sapiens
tgaagcttgaggacc

SEQ ID NO: 1106975 - DNA, 15 bp, Homo sapiens
ctgaagcttgaggac

SEQ ID NO: 1106976 - DNA, 15 bp, Homo sapiens
gctgaagcttgagga

SEQ ID NO: 1106977 - DNA, 15 bp, Homo sapiens
agctgaagcttgagg

SEQ ID NO: 1106978 - DNA, 15 bp, Homo sapiens
gagctgaagcttgag

SEQ ID NO: 1106979 - DNA, 15 bp, Homo sapiens
tgagctgaagcttga

SEQ ID NO: 1106980 - DNA, 15 bp, Homo sapiens
atgagctgaagcttg

SEQ ID NO: 1106981 - DNA, 15 bp, Homo sapiens
aatgagctgaagctt

SEQ ID NO: 1106982 - DNA, 15 bp, Homo sapiens
caatgagctgaagct

SEQ ID NO: 1106983 - DNA, 15 bp, Homo sapiens
ccaatgagctgaagc

SEQ ID NO: 1106984 - DNA, 15 bp, Homo sapiens
cccaatgagctgaag

SEQ ID NO: 1106985 - DNA, 15 bp, Homo sapiens
gcccaatgagctgaa

SEQ ID NO: 1106986 - DNA, 15 bp, Homo sapiens
ggcccaatgagctga

SEQ ID NO: 1106987 - DNA, 15 bp, Homo sapiens
gggcccaatgagctg

SEQ ID NO: 1106988 - DNA, 15 bp, Homo sapiens
ggggcccaatgagct

SEQ ID NO: 1106989 - DNA, 15 bp, Homo sapiens
tggggcccaatgagc

SEQ ID NO: 1106990 - DNA, 15 bp, Homo sapiens
gtggggcccaatgag

SEQ ID NO: 1106991 - DNA, 15 bp, Homo sapiens
agtggggcccaatga

SEQ ID NO: 1106992 - DNA, 15 bp, Homo sapiens
gagtggggcccaatg

SEQ ID NO: 1106993 - DNA, 15 bp, Homo sapiens
ggagtggggcccaat

SEQ ID NO: 1106994 - DNA, 15 bp, Homo sapiens
gggagtggggcccaa

SEQ ID NO: 1106995 - DNA, 15 bp, Homo sapiens
tgggagtggggccca

SEQ ID NO: 1106996 - DNA, 15 bp, Homo sapiens
ctgggagtggggccc

SEQ ID NO: 1106997 - DNA, 15 bp, Homo sapiens
tctgggagtggggcc

SEQ ID NO: 1106998 - DNA, 15 bp, Homo sapiens
ctctgggagtggggc

SEQ ID NO: 1106999 - DNA, 15 bp, Homo sapiens
actctgggagtgggg

SEQ ID NO: 1107000 - DNA, 15 bp, Homo sapiens
aactctgggagtggg

SEQ ID NO: 1107001 - DNA, 15 bp, Homo sapiens
aaactctgggagtgg

SEQ ID NO: 1107002 - DNA, 15 bp, Homo sapiens
gaaactctgggagtg

SEQ ID NO: 1107003 - DNA, 15 bp, Homo sapiens
agaaactctgggagt

SEQ ID NO: 1107004 - DNA, 15 bp, Homo sapiens
cagaaactctgggag

SEQ ID NO: 1107005 - DNA, 15 bp, Homo sapiens
tcagaaactctggga

SEQ ID NO: 1107006 - DNA, 15 bp, Homo sapiens
atcagaaactctggg

SEQ ID NO: 1107007 - DNA, 15 bp, Homo sapiens
aatcagaaactctgg

SEQ ID NO: 1107008 - DNA, 15 bp, Homo sapiens
actgaatcagaaact

SEQ ID NO: 1107009 - DNA, 15 bp, Homo sapiens
tactgaatcagaaac

SEQ ID NO: 1107010 - DNA, 15 bp, Homo sapiens
cctactgaatcagaa

SEQ ID NO: 1107011 - DNA, 15 bp, Homo sapiens
acctactgaatcaga

SEQ ID NO: 1107012 - DNA, 15 bp, Homo sapiens
gacctactgaatcag

SEQ ID NO: 1107013 - DNA, 15 bp, Homo sapiens
agacctactgaatca

SEQ ID NO: 1107014 - DNA, 15 bp, Homo sapiens
gagacctactgaatc

SEQ ID NO: 1107015 - DNA, 15 bp, Homo sapiens
tgagacctactgaat

SEQ ID NO: 1107016 - DNA, 15 bp, Homo sapiens
ctgagacctactgaa

SEQ ID NO: 1107017 - DNA, 15 bp, Homo sapiens
cctgagacctactga

SEQ ID NO: 1107018 - DNA, 15 bp, Homo sapiens
tcctgagacctactg

SEQ ID NO: 1107019 - DNA, 15 bp, Homo sapiens
ttcctgagacctact

SEQ ID NO: 1107020 - DNA, 15 bp, Homo sapiens
tttcctgagacctac

SEQ ID NO: 1107021 - DNA, 15 bp, Homo sapiens
ctttcctgagaccta

SEQ ID NO: 1107022 - DNA, 15 bp, Homo sapiens
cctttcctgagacct

SEQ ID NO: 1107023 - DNA, 15 bp, Homo sapiens
tcctttcctgagacc

SEQ ID NO: 1107024 - DNA, 15 bp, Homo sapiens
gtcctttcctgagac

SEQ ID NO: 1107025 - DNA, 15 bp, Homo sapiens
ggtcctttcctgaga

SEQ ID NO: 1107026 - DNA, 15 bp, Homo sapiens
tggtcctttcctgag

SEQ ID NO: 1107027 - DNA, 15 bp, Homo sapiens
ttggtcctttcctga

SEQ ID NO: 1107028 - DNA, 15 bp, Homo sapiens
cttggtcctttcctg

SEQ ID NO: 1107029 - DNA, 15 bp, Homo sapiens
tcttggtcctttcct

SEQ ID NO: 1107030 - DNA, 15 bp, Homo sapiens
ttcttggtcctttcc

SEQ ID NO: 1107031 - DNA, 15 bp, Homo sapiens
gttcttggtcctttc

SEQ ID NO: 1107032 - DNA, 15 bp, Homo sapiens
tgttcttggtccttt

SEQ ID NO: 1107033 - DNA, 15 bp, Homo sapiens
atgttcttggtcctt

SEQ ID NO: 1107034 - DNA, 15 bp, Homo sapiens
tatgttcttggtcct

SEQ ID NO: 1107035 - DNA, 15 bp, Homo sapiens
gtatgttcttggtcc

SEQ ID NO: 1107036 - DNA, 15 bp, Homo sapiens
tgtatgttcttggtc

SEQ ID NO: 1107037 - DNA, 15 bp, Homo sapiens
atgtatgttcttggt

SEQ ID NO: 1107038 - DNA, 15 bp, Homo sapiens
aatgtatgttcttgg

SEQ ID NO: 1107039 - DNA, 15 bp, Homo sapiens
gaatgtatgttcttg

SEQ ID NO: 1107040 - DNA, 15 bp, Homo sapiens
ggaatgtatgttctt

SEQ ID NO: 1107041 - DNA, 15 bp, Homo sapiens
aggaatgtatgttct

SEQ ID NO: 1107042 - DNA, 15 bp, Homo sapiens
taggaatgtatgttc

SEQ ID NO: 1107043 - DNA, 15 bp, Homo sapiens
gtaggaatgtatgtt

SEQ ID NO: 1107044 - DNA, 15 bp, Homo sapiens
agtaggaatgtatgt

SEQ ID NO: 1107045 - DNA, 15 bp, Homo sapiens
cagtaggaatgtatg

SEQ ID NO: 1107046 - DNA, 15 bp, Homo sapiens
ccagtaggaatgtat

SEQ ID NO: 1107047 - DNA, 15 bp, Homo sapiens
cccagtaggaatgta

SEQ ID NO: 1107048 - DNA, 15 bp, Homo sapiens
acccagtaggaatgt

SEQ ID NO: 1107049 - DNA, 15 bp, Homo sapiens
tacccagtaggaatg

SEQ ID NO: 1107050 - DNA, 15 bp, Homo sapiens
ttacccagtaggaat

SEQ ID NO: 1107051 - DNA, 15 bp, Homo sapiens
attacccagtaggaa

SEQ ID NO: 1107052 - DNA, 15 bp, Homo sapiens
cattacccagtagga

SEQ ID NO: 1107053 - DNA, 15 bp, Homo sapiens
tcattacccagtagg

SEQ ID NO: 1107054 - DNA, 15 bp, Homo sapiens
ctcattacccagtag

SEQ ID NO: 1107055 - DNA, 15 bp, Homo sapiens
cctcattacccagta

SEQ ID NO: 1107056 - DNA, 15 bp, Homo sapiens
tcctcattacccagt

SEQ ID NO: 1107057 - DNA, 15 bp, Homo sapiens
ctcctcattacccag

SEQ ID NO: 1107058 - DNA, 15 bp, Homo sapiens
cctcctcattaccca

SEQ ID NO: 1107059 - DNA, 15 bp, Homo sapiens
gcctcctcattaccc

SEQ ID NO: 1107060 - DNA, 15 bp, Homo sapiens
agcctcctcattacc

SEQ ID NO: 1107061 - DNA, 15 bp, Homo sapiens
cagcctcctcattac

SEQ ID NO: 1107062 - DNA, 15 bp, Homo sapiens
gcagcctcctcatta

SEQ ID NO: 1107063 - DNA, 15 bp, Homo sapiens
agcagcctcctcatt

SEQ ID NO: 1107064 - DNA, 15 bp, Homo sapiens
cagcagcctcctcat

SEQ ID NO: 1107065 - DNA, 15 bp, Homo sapiens
gcagcagcctcctca

SEQ ID NO: 1107066 - DNA, 15 bp, Homo sapiens
agcagcagcctcctc

SEQ ID NO: 1107067 - DNA, 15 bp, Homo sapiens
cagcagcagcctcct

SEQ ID NO: 1107068 - DNA, 15 bp, Homo sapiens
ccagcagcagcctcc

SEQ ID NO: 1107069 - DNA, 15 bp, Homo sapiens
accagcagcagcctc

SEQ ID NO: 1107070 - DNA, 15 bp, Homo sapiens
gaccagcagcagcct

SEQ ID NO: 1107071 - DNA, 15 bp, Homo sapiens
ggaccagcagcagcc

SEQ ID NO: 1107072 - DNA, 15 bp, Homo sapiens
tggaccagcagcagc

SEQ ID NO: 1107073 - DNA, 15 bp, Homo sapiens
ctggaccagcagcag

SEQ ID NO: 1107074 - DNA, 15 bp, Homo sapiens
actggaccagcagca

SEQ ID NO: 1107075 - DNA, 15 bp, Homo sapiens
tactggaccagcagc

SEQ ID NO: 1107076 - DNA, 15 bp, Homo sapiens
ctactggaccagcag

SEQ ID NO: 1107077 - DNA, 15 bp, Homo sapiens
actactggaccagca

SEQ ID NO: 1107078 - DNA, 15 bp, Homo sapiens
gactactggaccagc

SEQ ID NO: 1107079 - DNA, 15 bp, Homo sapiens
tgactactggaccag

SEQ ID NO: 1107080 - DNA, 15 bp, Homo sapiens
gtgactactggacca

SEQ ID NO: 1107081 - DNA, 15 bp, Homo sapiens
tgtgactactggacc

SEQ ID NO: 1107082 - DNA, 15 bp, Homo sapiens
gtgtgactactggac

SEQ ID NO: 1107083 - DNA, 15 bp, Homo sapiens
agtgtgactactgga

SEQ ID NO: 1107084 - DNA, 15 bp, Homo sapiens
aagtgtgactactgg

SEQ ID NO: 1107085 - DNA, 15 bp, Homo sapiens
aaagtgtgactactg

SEQ ID NO: 1107086 - DNA, 15 bp, Homo sapiens
gaaagtgtgactact

SEQ ID NO: 1107087 - DNA, 15 bp, Homo sapiens
tgaaagtgtgactac

SEQ ID NO: 1107088 - DNA, 15 bp, Homo sapiens
ctgaaagtgtgacta

SEQ ID NO: 1107089 - DNA, 15 bp, Homo sapiens
tctgaaagtgtgact

SEQ ID NO: 1107090 - DNA, 15 bp, Homo sapiens
ctctgaaagtgtgac

SEQ ID NO: 1107091 - DNA, 15 bp, Homo sapiens
gctctgaaagtgtga

SEQ ID NO: 1107092 - DNA, 15 bp, Homo sapiens
ggctctgaaagtgtg

SEQ ID NO: 1107093 - DNA, 15 bp, Homo sapiens
tggctctgaaagtgt

SEQ ID NO: 1107094 - DNA, 15 bp, Homo sapiens
gtggctctgaaagtg

SEQ ID NO: 1107095 - DNA, 15 bp, Homo sapiens
agtggctctgaaagt

SEQ ID NO: 1107096 - DNA, 15 bp, Homo sapiens
cagtggctctgaaag

SEQ ID NO: 1107097 - DNA, 15 bp, Homo sapiens
gcagtggctctgaaa

SEQ ID NO: 1107098 - DNA, 15 bp, Homo sapiens
ggcagtggctctgaa

SEQ ID NO: 1107099 - DNA, 15 bp, Homo sapiens
gggcagtggctctga

SEQ ID NO: 1107100 - DNA, 15 bp, Homo sapiens
agggcagtggctctg

SEQ ID NO: 1107101 - DNA, 15 bp, Homo sapiens
cagggcagtggctct

SEQ ID NO: 1107102 - DNA, 15 bp, Homo sapiens
acagggcagtggctc

SEQ ID NO: 1107103 - DNA, 15 bp, Homo sapiens
cacagggcagtggct

SEQ ID NO: 1107104 - DNA, 15 bp, Homo sapiens
tcacagggcagtggc

SEQ ID NO: 1107105 - DNA, 15 bp, Homo sapiens
ctcacagggcagtgg

SEQ ID NO: 1107106 - DNA, 15 bp, Homo sapiens
gctcacagggcagtg

SEQ ID NO: 1107107 - DNA, 15 bp, Homo sapiens
agctcacagggcagt

SEQ ID NO: 1107108 - DNA, 15 bp, Homo sapiens
gagctcacagggcag

SEQ ID NO: 1107109 - DNA, 15 bp, Homo sapiens
tgagctcacagggca

SEQ ID NO: 1107110 - DNA, 15 bp, Homo sapiens
atgagctcacagggc

SEQ ID NO: 1107111 - DNA, 15 bp, Homo sapiens
catgagctcacaggg

SEQ ID NO: 1107112 - DNA, 15 bp, Homo sapiens
ccatgagctcacagg

SEQ ID NO: 1107113 - DNA, 15 bp, Homo sapiens
gccatgagctcacag

SEQ ID NO: 1107114 - DNA, 15 bp, Homo sapiens
tgccatgagctcaca

SEQ ID NO: 1107115 - DNA, 15 bp, Homo sapiens
gtgccatgagctcac

SEQ ID NO: 1107116 - DNA, 15 bp, Homo sapiens
agtgccatgagctca

SEQ ID NO: 1107117 - DNA, 15 bp, Homo sapiens
gagtgccatgagctc

SEQ ID NO: 1107118 - DNA, 15 bp, Homo sapiens
ggagtgccatgagct

SEQ ID NO: 1107119 - DNA, 15 bp, Homo sapiens
tggagtgccatgagc

SEQ ID NO: 1107120 - DNA, 15 bp, Homo sapiens
atggagtgccatgag

SEQ ID NO: 1107121 - DNA, 15 bp, Homo sapiens
catggagtgccatga

SEQ ID NO: 1107122 - DNA, 15 bp, Homo sapiens
tcatggagtgccatg

SEQ ID NO: 1107123 - DNA, 15 bp, Homo sapiens
atcatggagtgccat

SEQ ID NO: 1107124 - DNA, 15 bp, Homo sapiens
aatcatggagtgcca

SEQ ID NO: 1107125 - DNA, 15 bp, Homo sapiens
gaatcatggagtgcc

SEQ ID NO: 1107126 - DNA, 15 bp, Homo sapiens
ggaatcatggagtgc

SEQ ID NO: 1107127 - DNA, 15 bp, Homo sapiens
gggaatcatggagtg

SEQ ID NO: 1107128 - DNA, 15 bp, Homo sapiens
cgggaatcatggagt

SEQ ID NO: 1107129 - DNA, 15 bp, Homo sapiens
gcgggaatcatggag

SEQ ID NO: 1107130 - DNA, 15 bp, Homo sapiens
ggcgggaatcatgga

SEQ ID NO: 1107131 - DNA, 15 bp, Homo sapiens
tggcgggaatcatgg

SEQ ID NO: 1107132 - DNA, 15 bp, Homo sapiens
gtggcgggaatcatg

SEQ ID NO: 1107133 - DNA, 15 bp, Homo sapiens
tgtggcgggaatcat

SEQ ID NO: 1107134 - DNA, 15 bp, Homo sapiens
gtgtggcgggaatca

SEQ ID NO: 1107135 - DNA, 15 bp, Homo sapiens
agtgtggcgggaatc

SEQ ID NO: 1107136 - DNA, 15 bp, Homo sapiens
cagtgtggcgggaat

SEQ ID NO: 1107137 - DNA, 15 bp, Homo sapiens
tcagtgtggcgggaa

SEQ ID NO: 1107138 - DNA, 15 bp, Homo sapiens
gtcagtgtggcggga

SEQ ID NO: 1107139 - DNA, 15 bp, Homo sapiens
tgtcagtgtggcggg

SEQ ID NO: 1107140 - DNA, 15 bp, Homo sapiens
atgtcagtgtggcgg

SEQ ID NO: 1107141 - DNA, 15 bp, Homo sapiens
tatgtcagtgtggcg

SEQ ID NO: 1107142 - DNA, 15 bp, Homo sapiens
ttatgtcagtgtggc

SEQ ID NO: 1107143 - DNA, 15 bp, Homo sapiens
attatgtcagtgtgg

SEQ ID NO: 1107144 - DNA, 15 bp, Homo sapiens
gattatgtcagtgtg

SEQ ID NO: 1107145 - DNA, 15 bp, Homo sapiens
ggattatgtcagtgt

SEQ ID NO: 1107146 - DNA, 15 bp, Homo sapiens
gggattatgtcagtg

SEQ ID NO: 1107147 - DNA, 15 bp, Homo sapiens
ggggattatgtcagt

SEQ ID NO: 1107148 - DNA, 15 bp, Homo sapiens
tggggattatgtcag

SEQ ID NO: 1107149 - DNA, 15 bp, Homo sapiens
ctggggattatgtca

SEQ ID NO: 1107150 - DNA, 15 bp, Homo sapiens
gctggggattatgtc

SEQ ID NO: 1107151 - DNA, 15 bp, Homo sapiens
agctggggattatgt

SEQ ID NO: 1107152 - DNA, 15 bp, Homo sapiens
cagctggggattatg

SEQ ID NO: 1107153 - DNA, 15 bp, Homo sapiens
tcagctggggattat

SEQ ID NO: 1107154 - DNA, 15 bp, Homo sapiens
gtcagctggggatta

SEQ ID NO: 1107155 - DNA, 15 bp, Homo sapiens
agtcagctggggatt

SEQ ID NO: 1107156 - DNA, 15 bp, Homo sapiens
aagtcagctggggat

SEQ ID NO: 1107157 - DNA, 15 bp, Homo sapiens
gaagtcagctgggga

SEQ ID NO: 1107158 - DNA, 15 bp, Homo sapiens
tgaagtcagctgggg

SEQ ID NO: 1107159 - DNA, 15 bp, Homo sapiens
ctgaagtcagctggg

SEQ ID NO: 1107160 - DNA, 15 bp, Homo sapiens
actgaagtcagctgg

SEQ ID NO: 1107161 - DNA, 15 bp, Homo sapiens
gactgaagtcagctg

SEQ ID NO: 1107162 - DNA, 15 bp, Homo sapiens
agactgaagtcagct

SEQ ID NO: 1107163 - DNA, 15 bp, Homo sapiens
aagactgaagtcagc

SEQ ID NO: 1107164 - DNA, 15 bp, Homo sapiens
caagactgaagtcag

SEQ ID NO: 1107165 - DNA, 15 bp, Homo sapiens
gcaagactgaagtca

SEQ ID NO: 1107166 - DNA, 15 bp, Homo sapiens
agcaagactgaagtc

SEQ ID NO: 1107167 - DNA, 15 bp, Homo sapiens
aagcaagactgaagt

SEQ ID NO: 1107168 - DNA, 15 bp, Homo sapiens
taagcaagactgaag

SEQ ID NO: 1107169 - DNA, 15 bp, Homo sapiens
gtaagcaagactgaa

SEQ ID NO: 1107170 - DNA, 15 bp, Homo sapiens
agtaagcaagactga

SEQ ID NO: 1107171 - DNA, 15 bp, Homo sapiens
gagtaagcaagactg

SEQ ID NO: 1107172 - DNA, 15 bp, Homo sapiens
ggagtaagcaagact

SEQ ID NO: 1107173 - DNA, 15 bp, Homo sapiens
tggagtaagcaagac

SEQ ID NO: 1107174 - DNA, 15 bp, Homo sapiens
gtggagtaagcaaga

SEQ ID NO: 1107175 - DNA, 15 bp, Homo sapiens
agtggagtaagcaag

SEQ ID NO: 1107176 - DNA, 15 bp, Homo sapiens
gagtggagtaagcaa

SEQ ID NO: 1107177 - DNA, 15 bp, Homo sapiens
ggagtggagtaagca

SEQ ID NO: 1107178 - DNA, 15 bp, Homo sapiens
tggagtggagtaagc

SEQ ID NO: 1107179 - DNA, 15 bp, Homo sapiens
ctggagtggagtaag

SEQ ID NO: 1107180 - DNA, 15 bp, Homo sapiens
cctggagtggagtaa

SEQ ID NO: 1107181 - DNA, 15 bp, Homo sapiens
acctggagtggagta

SEQ ID NO: 1107182 - DNA, 15 bp, Homo sapiens
aacctggagtggagt

SEQ ID NO: 1107183 - DNA, 15 bp, Homo sapiens
gaacctggagtggag

SEQ ID NO: 1107184 - DNA, 15 bp, Homo sapiens
tgaacctggagtgga

SEQ ID NO: 1107185 - DNA, 15 bp, Homo sapiens
ctgaacctggagtgg

SEQ ID NO: 1107186 - DNA, 15 bp, Homo sapiens
gctgaacctggagtg

SEQ ID NO: 1107187 - DNA, 15 bp, Homo sapiens
agctgaacctggagt

SEQ ID NO: 1107188 - DNA, 15 bp, Homo sapiens
aagctgaacctggag

SEQ ID NO: 1107189 - DNA, 15 bp, Homo sapiens
gaagctgaacctgga

SEQ ID NO: 1107190 - DNA, 15 bp, Homo sapiens
ggaagctgaacctgg

SEQ ID NO: 1107191 - DNA, 15 bp, Homo sapiens
aggaagctgaacctg

SEQ ID NO: 1107192 - DNA, 15 bp, Homo sapiens
aaggaagctgaacct

SEQ ID NO: 1107193 - DNA, 15 bp, Homo sapiens
taaggaagctgaacc

SEQ ID NO: 1107194 - DNA, 15 bp, Homo sapiens
gtaaggaagctgaac

SEQ ID NO: 1107195 - DNA, 15 bp, Homo sapiens
tgtaaggaagctgaa

SEQ ID NO: 1107196 - DNA, 15 bp, Homo sapiens
atgtaaggaagctga

SEQ ID NO: 1107197 - DNA, 15 bp, Homo sapiens
tatgtaaggaagctg

SEQ ID NO: 1107198 - DNA, 15 bp, Homo sapiens
gtatgtaaggaagct

SEQ ID NO: 1107199 - DNA, 15 bp, Homo sapiens
tgtatgtaaggaagc

SEQ ID NO: 1107200 - DNA, 15 bp, Homo sapiens
gtgtatgtaaggaag

SEQ ID NO: 1107201 - DNA, 15 bp, Homo sapiens
ggtgtatgtaaggaa

SEQ ID NO: 1107202 - DNA, 15 bp, Homo sapiens
tggtgtatgtaagga

SEQ ID NO: 1107203 - DNA, 15 bp, Homo sapiens
ctggtgtatgtaagg

SEQ ID NO: 1107204 - DNA, 15 bp, Homo sapiens
cctggtgtatgtaag

SEQ ID NO: 1107205 - DNA, 15 bp, Homo sapiens
gcctggtgtatgtaa

SEQ ID NO: 1107206 - DNA, 15 bp, Homo sapiens
tgcctggtgtatgta

SEQ ID NO: 1107207 - DNA, 15 bp, Homo sapiens
atgcctggtgtatgt

SEQ ID NO: 1107208 - DNA, 15 bp, Homo sapiens
catgcctggtgtatg

SEQ ID NO: 1107209 - DNA, 15 bp, Homo sapiens
gcatgcctggtgtat

SEQ ID NO: 1107210 - DNA, 15 bp, Homo sapiens
agcatgcctggtgta

SEQ ID NO: 1107211 - DNA, 15 bp, Homo sapiens
gagcatgcctggtgt

SEQ ID NO: 1107212 - DNA, 15 bp, Homo sapiens
ggagcatgcctggtg

SEQ ID NO: 1107213 - DNA, 15 bp, Homo sapiens
aggagcatgcctggt

SEQ ID NO: 1107214 - DNA, 15 bp, Homo sapiens
caggagcatgcctgg

SEQ ID NO: 1107215 - DNA, 15 bp, Homo sapiens
gcaggagcatgcctg

SEQ ID NO: 1107216 - DNA, 15 bp, Homo sapiens
ggcaggagcatgcct

SEQ ID NO: 1107217 - DNA, 15 bp, Homo sapiens
gggcaggagcatgcc

SEQ ID NO: 1107218 - DNA, 15 bp, Homo sapiens
tgggcaggagcatgc

SEQ ID NO: 1107219 - DNA, 15 bp, Homo sapiens
ctgggcaggagcatg

SEQ ID NO: 1107220 - DNA, 15 bp, Homo sapiens
tctgggcaggagcat

SEQ ID NO: 1107221 - DNA, 15 bp, Homo sapiens
ctctgggcaggagca

SEQ ID NO: 1107222 - DNA, 15 bp, Homo sapiens
gctctgggcaggagc

SEQ ID NO: 1107223 - DNA, 15 bp, Homo sapiens
agctctgggcaggag

SEQ ID NO: 1107224 - DNA, 15 bp, Homo sapiens
aagctctgggcagga

SEQ ID NO: 1107225 - DNA, 15 bp, Homo sapiens
aaagctctgggcagg

SEQ ID NO: 1107226 - DNA, 15 bp, Homo sapiens
caaagctctgggcag

SEQ ID NO: 1107227 - DNA, 15 bp, Homo sapiens
gcaaagctctgggca

SEQ ID NO: 1107228 - DNA, 15 bp, Homo sapiens
ggcaaagctctgggc

SEQ ID NO: 1107229 - DNA, 15 bp, Homo sapiens
gggcaaagctctggg

SEQ ID NO: 1107230 - DNA, 15 bp, Homo sapiens
tgggcaaagctctgg

SEQ ID NO: 1107231 - DNA, 15 bp, Homo sapiens
atgggcaaagctctg

SEQ ID NO: 1107232 - DNA, 15 bp, Homo sapiens
catgggcaaagctct

SEQ ID NO: 1107233 - DNA, 15 bp, Homo sapiens
acatgggcaaagctc

SEQ ID NO: 1107234 - DNA, 15 bp, Homo sapiens
cacatgggcaaagct

SEQ ID NO: 1107235 - DNA, 15 bp, Homo sapiens
ccacatgggcaaagc

SEQ ID NO: 1107236 - DNA, 15 bp, Homo sapiens
accacatgggcaaag

SEQ ID NO: 1107237 - DNA, 15 bp, Homo sapiens
aaccacatgggcaaa

SEQ ID NO: 1107238 - DNA, 15 bp, Homo sapiens
aaaccacatgggcaa

SEQ ID NO: 1107239 - DNA, 15 bp, Homo sapiens
gaaaccacatgggca

SEQ ID NO: 1107240 - DNA, 15 bp, Homo sapiens
ggaaaccacatgggc

SEQ ID NO: 1107241 - DNA, 15 bp, Homo sapiens
gggaaaccacatggg

SEQ ID NO: 1107242 - DNA, 15 bp, Homo sapiens
ggggaaaccacatgg

SEQ ID NO: 1107243 - DNA, 15 bp, Homo sapiens
tggggaaaccacatg

SEQ ID NO: 1107244 - DNA, 15 bp, Homo sapiens
ctggggaaaccacat

SEQ ID NO: 1107245 - DNA, 15 bp, Homo sapiens
tctggggaaaccaca

SEQ ID NO: 1107246 - DNA, 15 bp, Homo sapiens
atctggggaaaccac

SEQ ID NO: 1107247 - DNA, 15 bp, Homo sapiens
tatctggggaaacca

SEQ ID NO: 1107248 - DNA, 15 bp, Homo sapiens
gtatctggggaaacc

SEQ ID NO: 1107249 - DNA, 15 bp, Homo sapiens
ggtatctggggaaac

SEQ ID NO: 1107250 - DNA, 15 bp, Homo sapiens
gggtatctggggaaa

SEQ ID NO: 1107251 - DNA, 15 bp, Homo sapiens
tgggtatctggggaa

SEQ ID NO: 1107252 - DNA, 15 bp, Homo sapiens
atgggtatctgggga

SEQ ID NO: 1107253 - DNA, 15 bp, Homo sapiens
catgggtatctgggg

SEQ ID NO: 1107254 - DNA, 15 bp, Homo sapiens
acatgggtatctggg

SEQ ID NO: 1107255 - DNA, 15 bp, Homo sapiens
tacatgggtatctgg

SEQ ID NO: 1107256 - DNA, 15 bp, Homo sapiens
gtacatgggtatctg

SEQ ID NO: 1107257 - DNA, 15 bp, Homo sapiens
agtacatgggtatct

SEQ ID NO: 1107258 - DNA, 15 bp, Homo sapiens
aagtacatgggtatc

SEQ ID NO: 1107259 - DNA, 15 bp, Homo sapiens
caagtacatgggtat

SEQ ID NO: 1107260 - DNA, 15 bp, Homo sapiens
acaagtacatgggta

SEQ ID NO: 1107261 - DNA, 15 bp, Homo sapiens
aacaagtacatgggt

SEQ ID NO: 1107262 - DNA, 15 bp, Homo sapiens
gaacaagtacatggg

SEQ ID NO: 1107263 - DNA, 15 bp, Homo sapiens
ggaacaagtacatgg

SEQ ID NO: 1107264 - DNA, 15 bp, Homo sapiens
aggaacaagtacatg

SEQ ID NO: 1107265 - DNA, 15 bp, Homo sapiens
aaggaacaagtacat

SEQ ID NO: 1107266 - DNA, 15 bp, Homo sapiens
aaaggaacaagtaca

SEQ ID NO: 1107267 - DNA, 15 bp, Homo sapiens
taaaggaacaagtac

SEQ ID NO: 1107268 - DNA, 15 bp, Homo sapiens
gtaaaggaacaagta

SEQ ID NO: 1107269 - DNA, 15 bp, Homo sapiens
ggtaaaggaacaagt

SEQ ID NO: 1107270 - DNA, 15 bp, Homo sapiens
aggtaaaggaacaag

SEQ ID NO: 1107271 - DNA, 15 bp, Homo sapiens
gaggtaaaggaacaa

SEQ ID NO: 1107272 - DNA, 15 bp, Homo sapiens
ggaggtaaaggaaca

SEQ ID NO: 1107273 - DNA, 15 bp, Homo sapiens
gggaggtaaaggaac

SEQ ID NO: 1107274 - DNA, 15 bp, Homo sapiens
agggaggtaaaggaa

SEQ ID NO: 1107275 - DNA, 15 bp, Homo sapiens
gagggaggtaaagga

SEQ ID NO: 1107276 - DNA, 15 bp, Homo sapiens
tgagggaggtaaagg

SEQ ID NO: 1107277 - DNA, 15 bp, Homo sapiens
ctgagggaggtaaag

SEQ ID NO: 1107278 - DNA, 15 bp, Homo sapiens
cctgagggaggtaaa

SEQ ID NO: 1107279 - DNA, 15 bp, Homo sapiens
acctgagggaggtaa

SEQ ID NO: 1107280 - DNA, 15 bp, Homo sapiens
gacctgagggaggta

SEQ ID NO: 1107281 - DNA, 15 bp, Homo sapiens
tgacctgagggaggt

SEQ ID NO: 1107282 - DNA, 15 bp, Homo sapiens
atgacctgagggagg

SEQ ID NO: 1107283 - DNA, 15 bp, Homo sapiens
aatgacctgagggag

SEQ ID NO: 1107284 - DNA, 15 bp, Homo sapiens
gaatgacctgaggga

SEQ ID NO: 1107285 - DNA, 15 bp, Homo sapiens
ggaatgacctgaggg

SEQ ID NO: 1107286 - DNA, 15 bp, Homo sapiens
aggaatgacctgagg

SEQ ID NO: 1107287 - DNA, 15 bp, Homo sapiens
gaggaatgacctgag

SEQ ID NO: 1107288 - DNA, 15 bp, Homo sapiens
tgaggaatgacctga

SEQ ID NO: 1107289 - DNA, 15 bp, Homo sapiens
atgaggaatgacctg

SEQ ID NO: 1107290 - DNA, 15 bp, Homo sapiens
tatgaggaatgacct

SEQ ID NO: 1107291 - DNA, 15 bp, Homo sapiens
atatgaggaatgacc

SEQ ID NO: 1107292 - DNA, 15 bp, Homo sapiens
catatgaggaatgac

SEQ ID NO: 1107293 - DNA, 15 bp, Homo sapiens
acatatgaggaatga

SEQ ID NO: 1107294 - DNA, 15 bp, Homo sapiens
gacatatgaggaatg

SEQ ID NO: 1107295 - DNA, 15 bp, Homo sapiens
tgacatatgaggaat

SEQ ID NO: 1107296 - DNA, 15 bp, Homo sapiens
gtgacatatgaggaa

SEQ ID NO: 1107297 - DNA, 15 bp, Homo sapiens
ggtgacatatgagga

SEQ ID NO: 1107298 - DNA, 15 bp, Homo sapiens
tggtgacatatgagg

SEQ ID NO: 1107299 - DNA, 15 bp, Homo sapiens
atggtgacatatgag

SEQ ID NO: 1107300 - DNA, 15 bp, Homo sapiens
gatggtgacatatga

SEQ ID NO: 1107301 - DNA, 15 bp, Homo sapiens
agatggtgacatatg

SEQ ID NO: 1107302 - DNA, 15 bp, Homo sapiens
gagatggtgacatat

SEQ ID NO: 1107303 - DNA, 15 bp, Homo sapiens
tgagatggtgacata

SEQ ID NO: 1107304 - DNA, 15 bp, Homo sapiens
ctgagatggtgacat

SEQ ID NO: 1107305 - DNA, 15 bp, Homo sapiens
actgagatggtgaca

SEQ ID NO: 1107306 - DNA, 15 bp, Homo sapiens
cactgagatggtgac

SEQ ID NO: 1107307 - DNA, 15 bp, Homo sapiens
ccactgagatggtga

SEQ ID NO: 1107308 - DNA, 15 bp, Homo sapiens
cccactgagatggtg

SEQ ID NO: 1107309 - DNA, 15 bp, Homo sapiens
gcccactgagatggt

SEQ ID NO: 1107310 - DNA, 15 bp, Homo sapiens
ggcccactgagatgg

SEQ ID NO: 1107311 - DNA, 15 bp, Homo sapiens
gggcccactgagatg

SEQ ID NO: 1107312 - DNA, 15 bp, Homo sapiens
agggcccactgagat

SEQ ID NO: 1107313 - DNA, 15 bp, Homo sapiens
aagggcccactgaga

SEQ ID NO: 1107314 - DNA, 15 bp, Homo sapiens
gaagggcccactgag

SEQ ID NO: 1107315 - DNA, 15 bp, Homo sapiens
ggaagggcccactga

SEQ ID NO: 1107316 - DNA, 15 bp, Homo sapiens
tggaagggcccactg

SEQ ID NO: 1107317 - DNA, 15 bp, Homo sapiens
atggaagggcccact

SEQ ID NO: 1107318 - DNA, 15 bp, Homo sapiens
tatggaagggcccac

SEQ ID NO: 1107319 - DNA, 15 bp, Homo sapiens
ttatggaagggccca

SEQ ID NO: 1107320 - DNA, 15 bp, Homo sapiens
tttatggaagggccc

SEQ ID NO: 1107321 - DNA, 15 bp, Homo sapiens
ttttatggaagggcc

SEQ ID NO: 1107322 - DNA, 15 bp, Homo sapiens
gttttatggaagggc

SEQ ID NO: 1107323 - DNA, 15 bp, Homo sapiens
ggttttatggaaggg

SEQ ID NO: 1107324 - DNA, 15 bp, Homo sapiens
gggttttatggaagg

SEQ ID NO: 1107325 - DNA, 15 bp, Homo sapiens
tgggttttatggaag

SEQ ID NO: 1107326 - DNA, 15 bp, Homo sapiens
ctgggttttatggaa

SEQ ID NO: 1107327 - DNA, 15 bp, Homo sapiens
actgggttttatgga

SEQ ID NO: 1107328 - DNA, 15 bp, Homo sapiens
aactgggttttatgg

SEQ ID NO: 1107329 - DNA, 15 bp, Homo sapiens
taactgggttttatg

SEQ ID NO: 1107330 - DNA, 15 bp, Homo sapiens
ttaactgggttttat

SEQ ID NO: 1107331 - DNA, 15 bp, Homo sapiens
tttaactgggtttta

SEQ ID NO: 1107332 - DNA, 15 bp, Homo sapiens
ttttaactgggtttt

SEQ ID NO: 1107333 - DNA, 15 bp, Homo sapiens
tttttaactgggttt

SEQ ID NO: 1107334 - DNA, 15 bp, Homo sapiens
atttttaactgggtt

SEQ ID NO: 1107335 - DNA, 15 bp, Homo sapiens
catttttaactgggt

SEQ ID NO: 1107336 - DNA, 15 bp, Homo sapiens
ccatttttaactggg

SEQ ID NO: 1107337 - DNA, 15 bp, Homo sapiens
gccatttttaactgg

SEQ ID NO: 1107338 - DNA, 15 bp, Homo sapiens
tgccatttttaactg

SEQ ID NO: 1107339 - DNA, 15 bp, Homo sapiens
ttgccatttttaact

SEQ ID NO: 1107340 - DNA, 15 bp, Homo sapiens
gttgccatttttaac

SEQ ID NO: 1107341 - DNA, 15 bp, Homo sapiens
tgttgccatttttaa

SEQ ID NO: 1107342 - DNA, 15 bp, Homo sapiens
atgttgccattttta

SEQ ID NO: 1107343 - DNA, 15 bp, Homo sapiens
gatgttgccattttt

SEQ ID NO: 1107344 - DNA, 15 bp, Homo sapiens
ggatgttgccatttt

SEQ ID NO: 1107345 - DNA, 15 bp, Homo sapiens
aggatgttgccattt

SEQ ID NO: 1107346 - DNA, 15 bp, Homo sapiens
aaggatgttgccatt

SEQ ID NO: 1107347 - DNA, 15 bp, Homo sapiens
gaaggatgttgccat

SEQ ID NO: 1107348 - DNA, 15 bp, Homo sapiens
agaaggatgttgcca

SEQ ID NO: 1107349 - DNA, 15 bp, Homo sapiens
gagaaggatgttgcc

SEQ ID NO: 1107350 - DNA, 15 bp, Homo sapiens
ggagaaggatgttgc

SEQ ID NO: 1107351 - DNA, 15 bp, Homo sapiens
gggagaaggatgttg

SEQ ID NO: 1107352 - DNA, 15 bp, Homo sapiens
ggggagaaggatgtt

SEQ ID NO: 1107353 - DNA, 15 bp, Homo sapiens
aggggagaaggatgt

SEQ ID NO: 1107354 - DNA, 15 bp, Homo sapiens
gaggggagaaggatg

SEQ ID NO: 1107355 - DNA, 15 bp, Homo sapiens
tgaggggagaaggat

SEQ ID NO: 1107356 - DNA, 15 bp, Homo sapiens
gtgaggggagaagga

SEQ ID NO: 1107357 - DNA, 15 bp, Homo sapiens
tgtgaggggagaagg

SEQ ID NO: 1107358 - DNA, 15 bp, Homo sapiens
gtgtgaggggagaag

SEQ ID NO: 1107359 - DNA, 15 bp, Homo sapiens
cgtgtgaggggagaa

SEQ ID NO: 1107360 - DNA, 15 bp, Homo sapiens
gcgtgtgaggggaga

SEQ ID NO: 1107361 - DNA, 15 bp, Homo sapiens
agcgtgtgaggggag

SEQ ID NO: 1107362 - DNA, 15 bp, Homo sapiens
tagcgtgtgagggga

SEQ ID NO: 1107363 - DNA, 15 bp, Homo sapiens
ttagcgtgtgagggg

SEQ ID NO: 1107364 - DNA, 15 bp, Homo sapiens
gttagcgtgtgaggg

SEQ ID NO: 1107365 - DNA, 15 bp, Homo sapiens
agttagcgtgtgagg

SEQ ID NO: 1107366 - DNA, 15 bp, Homo sapiens
cagttagcgtgtgag

SEQ ID NO: 1107367 - DNA, 15 bp, Homo sapiens
tcagttagcgtgtga

SEQ ID NO: 1107368 - DNA, 15 bp, Homo sapiens
gtcagttagcgtgtg

SEQ ID NO: 1107369 - DNA, 15 bp, Homo sapiens
tgtcagttagcgtgt

SEQ ID NO: 1107370 - DNA, 15 bp, Homo sapiens
gtgtcagttagcgtg

SEQ ID NO: 1107371 - DNA, 15 bp, Homo sapiens
tgtgtcagttagcgt

SEQ ID NO: 1107372 - DNA, 15 bp, Homo sapiens
gtgtgtcagttagcg

SEQ ID NO: 1107373 - DNA, 15 bp, Homo sapiens
tgtgtgtcagttagc

SEQ ID NO: 1107374 - DNA, 15 bp, Homo sapiens
gtgtgtgtcagttag

SEQ ID NO: 1107375 - DNA, 15 bp, Homo sapiens
tgtgtgtgtcagtta

SEQ ID NO: 1107376 - DNA, 15 bp, Homo sapiens
gtgtgtgtgtcagtt

SEQ ID NO: 1107377 - DNA, 15 bp, Homo sapiens
tgtgtgtgtgtcagt

SEQ ID NO: 1107378 - DNA, 15 bp, Homo sapiens
atgtgtgtgtgtcag

SEQ ID NO: 1107379 - DNA, 15 bp, Homo sapiens
tatgtgtgtgtgtca

SEQ ID NO: 1107380 - DNA, 15 bp, Homo sapiens
gtatgtgtgtgtgtc

SEQ ID NO: 1107381 - DNA, 15 bp, Homo sapiens
tgtatgtgtgtgtgt

SEQ ID NO: 1107382 - DNA, 15 bp, Homo sapiens
gtgtatgtgtgtgtg

SEQ ID NO: 1107383 - DNA, 15 bp, Homo sapiens
tgtgtatgtgtgtgt

SEQ ID NO: 1107384 - DNA, 15 bp, Homo sapiens
ttgtgtatgtgtgtg

SEQ ID NO: 1107385 - DNA, 15 bp, Homo sapiens
tttgtgtatgtgtgt

SEQ ID NO: 1107386 - DNA, 15 bp, Homo sapiens
gtttgtgtatgtgtg

SEQ ID NO: 1107387 - DNA, 15 bp, Homo sapiens
tgtttgtgtatgtgt

SEQ ID NO: 1107388 - DNA, 15 bp, Homo sapiens
gtgtttgtgtatgtg

SEQ ID NO: 1107389 - DNA, 15 bp, Homo sapiens
agtgtgtttgtgtat

SEQ ID NO: 1107390 - DNA, 15 bp, Homo sapiens
gagtgtgtttgtgta

SEQ ID NO: 1107391 - DNA, 15 bp, Homo sapiens
agagtgtgtttgtgt

SEQ ID NO: 1107392 - DNA, 15 bp, Homo sapiens
gagagtgtgtttgtg

SEQ ID NO: 1107393 - DNA, 15 bp, Homo sapiens
agagagtgtgtttgt

SEQ ID NO: 1107394 - DNA, 15 bp, Homo sapiens
gagagagtgtgtttg

SEQ ID NO: 1107395 - DNA, 15 bp, Homo sapiens
agagagagtgtgttt

SEQ ID NO: 1107396 - DNA, 15 bp, Homo sapiens
gagagagagtgtgtt

SEQ ID NO: 1107397 - DNA, 15 bp, Homo sapiens
agagagagagtgtgt

SEQ ID NO: 1107398 - DNA, 15 bp, Homo sapiens
gagagagagagtgtg

SEQ ID NO: 1107399 - DNA, 15 bp, Homo sapiens
tgagagagagagtgt

SEQ ID NO: 1107400 - DNA, 15 bp, Homo sapiens
gtgagagagagagtg

SEQ ID NO: 1107401 - DNA, 15 bp, Homo sapiens
tgtgagagagagagt

SEQ ID NO: 1107402 - DNA, 15 bp, Homo sapiens
ctgtgtgagagagag

SEQ ID NO: 1107403 - DNA, 15 bp, Homo sapiens
gctgtgtgagagaga

SEQ ID NO: 1107404 - DNA, 15 bp, Homo sapiens
tgctgtgtgagagag

SEQ ID NO: 1107405 - DNA, 15 bp, Homo sapiens
atgctgtgtgagaga

SEQ ID NO: 1107406 - DNA, 15 bp, Homo sapiens
tatgctgtgtgagag

SEQ ID NO: 1107407 - DNA, 15 bp, Homo sapiens
gtatgctgtgtgaga

SEQ ID NO: 1107408 - DNA, 15 bp, Homo sapiens
cgtatgctgtgtgag

SEQ ID NO: 1107409 - DNA, 15 bp, Homo sapiens
acgtatgctgtgtga

SEQ ID NO: 1107410 - DNA, 15 bp, Homo sapiens
tacgtatgctgtgtg

SEQ ID NO: 1107411 - DNA, 15 bp, Homo sapiens
gtacgtatgctgtgt

SEQ ID NO: 1107412 - DNA, 15 bp, Homo sapiens
tgtacgtatgctgtg

SEQ ID NO: 1107413 - DNA, 15 bp, Homo sapiens
gtgtacgtatgctgt

SEQ ID NO: 1107414 - DNA, 15 bp, Homo sapiens
tgtgtacgtatgctg

SEQ ID NO: 1107415 - DNA, 15 bp, Homo sapiens
gtgtgtacgtatgct

SEQ ID NO: 1107416 - DNA, 15 bp, Homo sapiens
tgtgtgtacgtatgc

SEQ ID NO: 1107417 - DNA, 15 bp, Homo sapiens
gtgtgtgtacgtatg

SEQ ID NO: 1107418 - DNA, 15 bp, Homo sapiens
agtgtgtgtacgtat

SEQ ID NO: 1107419 - DNA, 15 bp, Homo sapiens
gagtgtgtgtacgta

SEQ ID NO: 1107420 - DNA, 15 bp, Homo sapiens
ggagtgtgtgtacgt

SEQ ID NO: 1107421 - DNA, 15 bp, Homo sapiens
gggagtgtgtgtacg

SEQ ID NO: 1107422 - DNA, 15 bp, Homo sapiens
agggagtgtgtgtac

SEQ ID NO: 1107423 - DNA, 15 bp, Homo sapiens
tagggagtgtgtgta

SEQ ID NO: 1107424 - DNA, 15 bp, Homo sapiens
atagggagtgtgtgt

SEQ ID NO: 1107425 - DNA, 15 bp, Homo sapiens
gatagggagtgtgtg

SEQ ID NO: 1107426 - DNA, 15 bp, Homo sapiens
tgatagggagtgtgt

SEQ ID NO: 1107427 - DNA, 15 bp, Homo sapiens
atgatagggagtgtg

SEQ ID NO: 1107428 - DNA, 15 bp, Homo sapiens
tatgatagggagtgt

SEQ ID NO: 1107429 - DNA, 15 bp, Homo sapiens
atatgatagggagtg

SEQ ID NO: 1107430 - DNA, 15 bp, Homo sapiens
gatatgatagggagt

SEQ ID NO: 1107431 - DNA, 15 bp, Homo sapiens
ggatatgatagggag

SEQ ID NO: 1107432 - DNA, 15 bp, Homo sapiens
gggatatgataggga

SEQ ID NO: 1107433 - DNA, 15 bp, Homo sapiens
agggatatgataggg

SEQ ID NO: 1107434 - DNA, 15 bp, Homo sapiens
aagggatatgatagg

SEQ ID NO: 1107435 - DNA, 15 bp, Homo sapiens
aaagggatatgatag

SEQ ID NO: 1107436 - DNA, 15 bp, Homo sapiens
gaaagggatatgata

SEQ ID NO: 1107437 - DNA, 15 bp, Homo sapiens
ggaaagggatatgat

SEQ ID NO: 1107438 - DNA, 15 bp, Homo sapiens
aggaaagggatatga

SEQ ID NO: 1107439 - DNA, 15 bp, Homo sapiens
caggaaagggatatg

SEQ ID NO: 1107440 - DNA, 15 bp, Homo sapiens
gcaggaaagggatat

SEQ ID NO: 1107441 - DNA, 15 bp, Homo sapiens
tgcaggaaagggata

SEQ ID NO: 1107442 - DNA, 15 bp, Homo sapiens
ttgcaggaaagggat

SEQ ID NO: 1107443 - DNA, 15 bp, Homo sapiens
attgcaggaaaggga

SEQ ID NO: 1107444 - DNA, 15 bp, Homo sapiens
cattgcaggaaaggg

SEQ ID NO: 1107445 - DNA, 15 bp, Homo sapiens
gcattgcaggaaagg

SEQ ID NO: 1107446 - DNA, 15 bp, Homo sapiens
agcattgcaggaaag

SEQ ID NO: 1107447 - DNA, 15 bp, Homo sapiens
aagcattgcaggaaa

SEQ ID NO: 1107448 - DNA, 15 bp, Homo sapiens
aaagcattgcaggaa

SEQ ID NO: 1107449 - DNA, 15 bp, Homo sapiens
aaaagcattgcagga

SEQ ID NO: 1107450 - DNA, 15 bp, Homo sapiens
gaaaagcattgcagg

SEQ ID NO: 1107451 - DNA, 15 bp, Homo sapiens
agaaaagcattgcag

SEQ ID NO: 1107452 - DNA, 15 bp, Homo sapiens
gagaaaagcattgca

SEQ ID NO: 1107453 - DNA, 15 bp, Homo sapiens
ggagaaaagcattgc

SEQ ID NO: 1107454 - DNA, 15 bp, Homo sapiens
tggagaaaagcattg

SEQ ID NO: 1107455 - DNA, 15 bp, Homo sapiens
atggagaaaagcatt

SEQ ID NO: 1107456 - DNA, 15 bp, Homo sapiens
tatggagaaaagcat

SEQ ID NO: 1107457 - DNA, 15 bp, Homo sapiens
gtatggagaaaagca

SEQ ID NO: 1107458 - DNA, 15 bp, Homo sapiens
ggtatggagaaaagc

SEQ ID NO: 1107459 - DNA, 15 bp, Homo sapiens
tggtatggagaaaag

SEQ ID NO: 1107460 - DNA, 15 bp, Homo sapiens
atggtatggagaaaa

SEQ ID NO: 1107461 - DNA, 15 bp, Homo sapiens
aatggtatggagaaa

SEQ ID NO: 1107462 - DNA, 15 bp, Homo sapiens
aaatggtatggagaa

SEQ ID NO: 1107463 - DNA, 15 bp, Homo sapiens
taaatggtatggaga

SEQ ID NO: 1107464 - DNA, 15 bp, Homo sapiens
gtaaatggtatggag

SEQ ID NO: 1107465 - DNA, 15 bp, Homo sapiens
tgtaaatggtatgga

SEQ ID NO: 1107466 - DNA, 15 bp, Homo sapiens
gtgtaaatggtatgg

SEQ ID NO: 1107467 - DNA, 15 bp, Homo sapiens
ggtgtaaatggtatg

SEQ ID NO: 1107468 - DNA, 15 bp, Homo sapiens
tggtgtaaatggtat

SEQ ID NO: 1107469 - DNA, 15 bp, Homo sapiens
atggtgtaaatggta

SEQ ID NO: 1107470 - DNA, 15 bp, Homo sapiens
gatggtgtaaatggt

SEQ ID NO: 1107471 - DNA, 15 bp, Homo sapiens
agatggtgtaaatgg

SEQ ID NO: 1107472 - DNA, 15 bp, Homo sapiens
cagatggtgtaaatg

SEQ ID NO: 1107473 - DNA, 15 bp, Homo sapiens
tcagatggtgtaaat

SEQ ID NO: 1107474 - DNA, 15 bp, Homo sapiens
atcagatggtgtaaa

SEQ ID NO: 1107475 - DNA, 15 bp, Homo sapiens
catcagatggtgtaa

SEQ ID NO: 1107476 - DNA, 15 bp, Homo sapiens
acatcagatggtgta

SEQ ID NO: 1107477 - DNA, 15 bp, Homo sapiens
tacatcagatggtgt

SEQ ID NO: 1107478 - DNA, 15 bp, Homo sapiens
atacatcagatggtg

SEQ ID NO: 1107479 - DNA, 15 bp, Homo sapiens
aatacatcagatggt

SEQ ID NO: 1107480 - DNA, 15 bp, Homo sapiens
caatacatcagatgg

SEQ ID NO: 1107481 - DNA, 15 bp, Homo sapiens
acaatacatcagatg

SEQ ID NO: 1107482 - DNA, 15 bp, Homo sapiens
tacaatacatcagat

SEQ ID NO: 1107483 - DNA, 15 bp, Homo sapiens
atacaatacatcaga

SEQ ID NO: 1107484 - DNA, 15 bp, Homo sapiens
catacaatacatcag

SEQ ID NO: 1107485 - DNA, 15 bp, Homo sapiens
acatacaatacatca

SEQ ID NO: 1107486 - DNA, 15 bp, Homo sapiens
cacatacaatacatc

SEQ ID NO: 1107487 - DNA, 15 bp, Homo sapiens
acacatacaatacat

SEQ ID NO: 1107488 - DNA, 15 bp, Homo sapiens
aacacatacaataca

SEQ ID NO: 1107489 - DNA, 15 bp, Homo sapiens
taacacatacaatac

SEQ ID NO: 1107490 - DNA, 15 bp, Homo sapiens
gtaacacatacaata

SEQ ID NO: 1107491 - DNA, 15 bp, Homo sapiens
agtaacacatacaat

SEQ ID NO: 1107492 - DNA, 15 bp, Homo sapiens
aagtaacacatacaa

SEQ ID NO: 1107493 - DNA, 15 bp, Homo sapiens
gaagtaacacataca

SEQ ID NO: 1107494 - DNA, 15 bp, Homo sapiens
agaagtaacacatac

SEQ ID NO: 1107495 - DNA, 15 bp, Homo sapiens
aagaagtaacacata

SEQ ID NO: 1107496 - DNA, 15 bp, Homo sapiens
aaagaagtaacacat

SEQ ID NO: 1107497 - DNA, 15 bp, Homo sapiens
caaagaagtaacaca

SEQ ID NO: 1107498 - DNA, 15 bp, Homo sapiens
acaaagaagtaacac

SEQ ID NO: 1107499 - DNA, 15 bp, Homo sapiens
gacaaagaagtaaca

SEQ ID NO: 1107500 - DNA, 15 bp, Homo sapiens
agacaaagaagtaac

SEQ ID NO: 1107501 - DNA, 15 bp, Homo sapiens
gagacaaagaagtaa

SEQ ID NO: 1107502 - DNA, 15 bp, Homo sapiens
ggagacaaagaagta

SEQ ID NO: 1107503 - DNA, 15 bp, Homo sapiens
aggagacaaagaagt

SEQ ID NO: 1107504 - DNA, 15 bp, Homo sapiens
gaggagacaaagaag

SEQ ID NO: 1107505 - DNA, 15 bp, Homo sapiens
agaggagacaaagaa

SEQ ID NO: 1107506 - DNA, 15 bp, Homo sapiens
gagaggagacaaaga

SEQ ID NO: 1107507 - DNA, 15 bp, Homo sapiens
agagaggagacaaag

SEQ ID NO: 1107508 - DNA, 15 bp, Homo sapiens
tagagaggagacaaa

SEQ ID NO: 1107509 - DNA, 15 bp, Homo sapiens
atagagaggagacaa

SEQ ID NO: 1107510 - DNA, 15 bp, Homo sapiens
tatagagaggagaca

SEQ ID NO: 1107511 - DNA, 15 bp, Homo sapiens
gtatagagaggagac

SEQ ID NO: 1107512 - DNA, 15 bp, Homo sapiens
agtatagagaggaga

SEQ ID NO: 1107513 - DNA, 15 bp, Homo sapiens
cagtatagagaggag

SEQ ID NO: 1107514 - DNA, 15 bp, Homo sapiens
gcagtatagagagga

SEQ ID NO: 1107515 - DNA, 15 bp, Homo sapiens
ggcagtatagagagg

SEQ ID NO: 1107516 - DNA, 15 bp, Homo sapiens
gggcagtatagagag

SEQ ID NO: 1107517 - DNA, 15 bp, Homo sapiens
ggggcagtatagaga

SEQ ID NO: 1107518 - DNA, 15 bp, Homo sapiens
gggggcagtatagag

SEQ ID NO: 1107519 - DNA, 15 bp, Homo sapiens
agggggcagtataga

SEQ ID NO: 1107520 - DNA, 15 bp, Homo sapiens
gagggggcagtatag

SEQ ID NO: 1107521 - DNA, 15 bp, Homo sapiens
ggagggggcagtata

SEQ ID NO: 1107522 - DNA, 15 bp, Homo sapiens
gggagggggcagtat

SEQ ID NO: 1107523 - DNA, 15 bp, Homo sapiens
agggagggggcagta

SEQ ID NO: 1107524 - DNA, 15 bp, Homo sapiens
cagggagggggcagt

SEQ ID NO: 1107525 - DNA, 15 bp, Homo sapiens
gcagggagggggcag

SEQ ID NO: 1107526 - DNA, 15 bp, Homo sapiens
ggcagggagggggca

SEQ ID NO: 1107527 - DNA, 15 bp, Homo sapiens
gggcagggagggggc

SEQ ID NO: 1107528 - DNA, 15 bp, Homo sapiens
ggggcagggaggggg

SEQ ID NO: 1107529 - DNA, 15 bp, Homo sapiens
gggggcagggagggg

SEQ ID NO: 1107530 - DNA, 15 bp, Homo sapiens
tctgggggcagggag

SEQ ID NO: 1107531 - DNA, 15 bp, Homo sapiens
ttctgggggcaggga

SEQ ID NO: 1107532 - DNA, 15 bp, Homo sapiens
attctgggggcaggg

SEQ ID NO: 1107533 - DNA, 15 bp, Homo sapiens
cattctgggggcagg

SEQ ID NO: 1107534 - DNA, 15 bp, Homo sapiens
acattctgggggcag

SEQ ID NO: 1107535 - DNA, 15 bp, Homo sapiens
tacattctgggggca

SEQ ID NO: 1107536 - DNA, 15 bp, Homo sapiens
ttacattctgggggc

SEQ ID NO: 1107537 - DNA, 15 bp, Homo sapiens
cttacattctggggg

SEQ ID NO: 1107538 - DNA, 15 bp, Homo sapiens
tcttacattctgggg

SEQ ID NO: 1107539 - DNA, 15 bp, Homo sapiens
atcttacattctggg

SEQ ID NO: 1107540 - DNA, 15 bp, Homo sapiens
aatcttacattctgg

SEQ ID NO: 1107541 - DNA, 15 bp, Homo sapiens
gaatcttacattctg

SEQ ID NO: 1107542 - DNA, 15 bp, Homo sapiens
ggaatcttacattct

SEQ ID NO: 1107543 - DNA, 15 bp, Homo sapiens
aggaatcttacattc

SEQ ID NO: 1107544 - DNA, 15 bp, Homo sapiens
caggaatcttacatt

SEQ ID NO: 1107545 - DNA, 15 bp, Homo sapiens
tcaggaatcttacat

SEQ ID NO: 1107546 - DNA, 15 bp, Homo sapiens
ctcaggaatcttaca

SEQ ID NO: 1107547 - DNA, 15 bp, Homo sapiens
cctcaggaatcttac

SEQ ID NO: 1107548 - DNA, 15 bp, Homo sapiens
gcctcaggaatctta

SEQ ID NO: 1107549 - DNA, 15 bp, Homo sapiens
tgcctcaggaatctt

SEQ ID NO: 1107550 - DNA, 15 bp, Homo sapiens
tctgcctcaggaatc

SEQ ID NO: 1107551 - DNA, 15 bp, Homo sapiens
ctctgcctcaggaat

SEQ ID NO: 1107552 - DNA, 15 bp, Homo sapiens
tctctgcctcaggaa

SEQ ID NO: 1107553 - DNA, 15 bp, Homo sapiens
atctctgcctcagga

SEQ ID NO: 1107554 - DNA, 15 bp, Homo sapiens
aatctctgcctcagg

SEQ ID NO: 1107555 - DNA, 15 bp, Homo sapiens
gaatctctgcctcag

SEQ ID NO: 1107556 - DNA, 15 bp, Homo sapiens
agaatctctgcctca

SEQ ID NO: 1107557 - DNA, 15 bp, Homo sapiens
gagaatctctgcctc

SEQ ID NO: 1107558 - DNA, 15 bp, Homo sapiens
cgagaatctctgcct

SEQ ID NO: 1107559 - DNA, 15 bp, Homo sapiens
acgagaatctctgcc

SEQ ID NO: 1107560 - DNA, 15 bp, Homo sapiens
gacgagaatctctgc

SEQ ID NO: 1107561 - DNA, 15 bp, Homo sapiens
agacgagaatctctg

SEQ ID NO: 1107562 - DNA, 15 bp, Homo sapiens
cagacgagaatctct

SEQ ID NO: 1107563 - DNA, 15 bp, Homo sapiens
acagacgagaatctc

SEQ ID NO: 1107564 - DNA, 15 bp, Homo sapiens
gacagacgagaatct

SEQ ID NO: 1107565 - DNA, 15 bp, Homo sapiens
agacagacgagaatc

SEQ ID NO: 1107566 - DNA, 15 bp, Homo sapiens
aagacagacgagaat

SEQ ID NO: 1107567 - DNA, 15 bp, Homo sapiens
taagacagacgagaa

SEQ ID NO: 1107568 - DNA, 15 bp, Homo sapiens
ataagacagacgaga

SEQ ID NO: 1107569 - DNA, 15 bp, Homo sapiens
aataagacagacgag

SEQ ID NO: 1107570 - DNA, 15 bp, Homo sapiens
gaataagacagacga

SEQ ID NO: 1107571 - DNA, 15 bp, Homo sapiens
tgaataagacagacg

SEQ ID NO: 1107572 - DNA, 15 bp, Homo sapiens
atgaataagacagac

SEQ ID NO: 1107573 - DNA, 15 bp, Homo sapiens
aatgaataagacaga

SEQ ID NO: 1107574 - DNA, 15 bp, Homo sapiens
gaatgaataagacag

SEQ ID NO: 1107575 - DNA, 15 bp, Homo sapiens
ggaatgaataagaca

SEQ ID NO: 1107576 - DNA, 15 bp, Homo sapiens
aggaatgaataagac

SEQ ID NO: 1107577 - DNA, 15 bp, Homo sapiens
caggaatgaataaga

SEQ ID NO: 1107578 - DNA, 15 bp, Homo sapiens
tcaggaatgaataag

SEQ ID NO: 1107579 - DNA, 15 bp, Homo sapiens
ttcaggaatgaataa

SEQ ID NO: 1107580 - DNA, 15 bp, Homo sapiens
attcaggaatgaata

SEQ ID NO: 1107581 - DNA, 15 bp, Homo sapiens
gattcaggaatgaat

SEQ ID NO: 1107582 - DNA, 15 bp, Homo sapiens
ggattcaggaatgaa

SEQ ID NO: 1107583 - DNA, 15 bp, Homo sapiens
gggattcaggaatga

SEQ ID NO: 1107584 - DNA, 15 bp, Homo sapiens
tgggattcaggaatg

SEQ ID NO: 1107585 - DNA, 15 bp, Homo sapiens
ctgggattcaggaat

SEQ ID NO: 1107586 - DNA, 15 bp, Homo sapiens
tctgggattcaggaa

SEQ ID NO: 1107587 - DNA, 15 bp, Homo sapiens
ttctgggattcagga

SEQ ID NO: 1107588 - DNA, 15 bp, Homo sapiens
gttctgggattcagg

SEQ ID NO: 1107589 - DNA, 15 bp, Homo sapiens
agttctgggattcag

SEQ ID NO: 1107590 - DNA, 15 bp, Homo sapiens
cagttctgggattca

SEQ ID NO: 1107591 - DNA, 15 bp, Homo sapiens
tcagttctgggattc

SEQ ID NO: 1107592 - DNA, 15 bp, Homo sapiens
ctcagttctgggatt

SEQ ID NO: 1107593 - DNA, 15 bp, Homo sapiens
tctcagttctgggat

SEQ ID NO: 1107594 - DNA, 15 bp, Homo sapiens
ttctcagttctggga

SEQ ID NO: 1107595 - DNA, 15 bp, Homo sapiens
gttctcagttctggg

SEQ ID NO: 1107596 - DNA, 15 bp, Homo sapiens
tgttctcagttctgg

SEQ ID NO: 1107597 - DNA, 15 bp, Homo sapiens
ctgttctcagttctg

SEQ ID NO: 1107598 - DNA, 15 bp, Homo sapiens
actgttctcagttct

SEQ ID NO: 1107599 - DNA, 15 bp, Homo sapiens
cactgttctcagttc

SEQ ID NO: 1107600 - DNA, 15 bp, Homo sapiens
acactgttctcagtt

SEQ ID NO: 1107601 - DNA, 15 bp, Homo sapiens
aacactgttctcagt

SEQ ID NO: 1107602 - DNA, 15 bp, Homo sapiens
aaacactgttctcag

SEQ ID NO: 1107603 - DNA, 15 bp, Homo sapiens
caaacactgttctca

SEQ ID NO: 1107604 - DNA, 15 bp, Homo sapiens
ccaaacactgttctc

SEQ ID NO: 1107605 - DNA, 15 bp, Homo sapiens
gccaaacactgttct

SEQ ID NO: 1107606 - DNA, 15 bp, Homo sapiens
tgccaaacactgttc

SEQ ID NO: 1107607 - DNA, 15 bp, Homo sapiens
gtgccaaacactgtt

SEQ ID NO: 1107608 - DNA, 15 bp, Homo sapiens
tgtgccaaacactgt

SEQ ID NO: 1107609 - DNA, 15 bp, Homo sapiens
atgtgccaaacactg

SEQ ID NO: 1107610 - DNA, 15 bp, Homo sapiens
tatgtgccaaacact

SEQ ID NO: 1107611 - DNA, 15 bp, Homo sapiens
ttatgtgccaaacac

SEQ ID NO: 1107612 - DNA, 15 bp, Homo sapiens
tttatgtgccaaaca

SEQ ID NO: 1107613 - DNA, 15 bp, Homo sapiens
gtttatgtgccaaac

SEQ ID NO: 1107614 - DNA, 15 bp, Homo sapiens
tgtttatgtgccaaa

SEQ ID NO: 1107615 - DNA, 15 bp, Homo sapiens
atgtttatgtgccaa

SEQ ID NO: 1107616 - DNA, 15 bp, Homo sapiens
aatgtttatgtgcca

SEQ ID NO: 1107617 - DNA, 15 bp, Homo sapiens
gaatgtttatgtgcc

SEQ ID NO: 1107618 - DNA, 15 bp, Homo sapiens
tgaatgtttatgtgc

SEQ ID NO: 1107619 - DNA, 15 bp, Homo sapiens
ttgaatgtttatgtg

SEQ ID NO: 1107620 - DNA, 15 bp, Homo sapiens
tttgaatgtttatgt

SEQ ID NO: 1107621 - DNA, 15 bp, Homo sapiens
ttttgaatgtttatg

SEQ ID NO: 1107622 - DNA, 15 bp, Homo sapiens
tttttgaatgtttat

SEQ ID NO: 1107623 - DNA, 15 bp, Homo sapiens
ctttttgaatgttta

SEQ ID NO: 1107624 - DNA, 15 bp, Homo sapiens
tctttttgaatgttt

SEQ ID NO: 1107625 - DNA, 15 bp, Homo sapiens
ctctttttgaatgtt

SEQ ID NO: 1107626 - DNA, 15 bp, Homo sapiens
gctctttttgaatgt

SEQ ID NO: 1107627 - DNA, 15 bp, Homo sapiens
ggctctttttgaatg

SEQ ID NO: 1107628 - DNA, 15 bp, Homo sapiens
cggctctttttgaat

SEQ ID NO: 1107629 - DNA, 15 bp, Homo sapiens
ccggctctttttgaa

SEQ ID NO: 1107630 - DNA, 15 bp, Homo sapiens
accggctctttttga

SEQ ID NO: 1107631 - DNA, 15 bp, Homo sapiens
taccggctctttttg

SEQ ID NO: 1107632 - DNA, 15 bp, Homo sapiens
ataccggctcttttt

SEQ ID NO: 1107633 - DNA, 15 bp, Homo sapiens
aataccggctctttt

SEQ ID NO: 1107634 - DNA, 15 bp, Homo sapiens
aaataccggctcttt

SEQ ID NO: 1107635 - DNA, 15 bp, Homo sapiens
aaaataccggctctt

SEQ ID NO: 1107636 - DNA, 15 bp, Homo sapiens
taaaataccggctct

SEQ ID NO: 1107637 - DNA, 15 bp, Homo sapiens
ttaaaataccggctc

SEQ ID NO: 1107638 - DNA, 15 bp, Homo sapiens
attaaaataccggct

SEQ ID NO: 1107639 - DNA, 15 bp, Homo sapiens
aattaaaataccggc

SEQ ID NO: 1107640 - DNA, 15 bp, Homo sapiens
caattaaaataccgg

SEQ ID NO: 1107641 - DNA, 15 bp, Homo sapiens
ccaattaaaataccg

SEQ ID NO: 1107642 - DNA, 15 bp, Homo sapiens
cccaattaaaatacc

SEQ ID NO: 1107643 - DNA, 15 bp, Homo sapiens
acccaattaaaatac

SEQ ID NO: 1107644 - DNA, 15 bp, Homo sapiens
cacccaattaaaata

SEQ ID NO: 1107645 - DNA, 15 bp, Homo sapiens
tcacccaattaaaat

SEQ ID NO: 1107646 - DNA, 15 bp, Homo sapiens
gtcacccaattaaaa

SEQ ID NO: 1107647 - DNA, 15 bp, Homo sapiens
agtcacccaattaaa

SEQ ID NO: 1107648 - DNA, 15 bp, Homo sapiens
cagtcacccaattaa

SEQ ID NO: 1107649 - DNA, 15 bp, Homo sapiens
acagtcacccaatta

SEQ ID NO: 1107650 - DNA, 15 bp, Homo sapiens
tacagtcacccaatt

SEQ ID NO: 1107651 - DNA, 15 bp, Homo sapiens
ctacagtcacccaat

SEQ ID NO: 1107652 - DNA, 15 bp, Homo sapiens
cctacagtcacccaa

SEQ ID NO: 1107653 - DNA, 15 bp, Homo sapiens
ccctacagtcaccca

SEQ ID NO: 1107654 - DNA, 15 bp, Homo sapiens
tccctacagtcaccc

SEQ ID NO: 1107655 - DNA, 15 bp, Homo sapiens
gtccctacagtcacc

SEQ ID NO: 1107656 - DNA, 15 bp, Homo sapiens
ggtccctacagtcac

SEQ ID NO: 1107657 - DNA, 15 bp, Homo sapiens
tggtccctacagtca

SEQ ID NO: 1107658 - DNA, 15 bp, Homo sapiens
gtggtccctacagtc

SEQ ID NO: 1107659 - DNA, 15 bp, Homo sapiens
tgtggtccctacagt

SEQ ID NO: 1107660 - DNA, 15 bp, Homo sapiens
ttgtggtccctacag

SEQ ID NO: 1107661 - DNA, 15 bp, Homo sapiens
gttgtggtccctaca

SEQ ID NO: 1107662 - DNA, 15 bp, Homo sapiens
ggttgtggtccctac

SEQ ID NO: 1107663 - DNA, 15 bp, Homo sapiens
gggttgtggtcccta

SEQ ID NO: 1107664 - DNA, 15 bp, Homo sapiens
agggttgtggtccct

SEQ ID NO: 1107665 - DNA, 15 bp, Homo sapiens
tagggttgtggtccc

SEQ ID NO: 1107666 - DNA, 15 bp, Homo sapiens
gtagggttgtggtcc

SEQ ID NO: 1107667 - DNA, 15 bp, Homo sapiens
ggtagggttgtggtc

SEQ ID NO: 1107668 - DNA, 15 bp, Homo sapiens
aggtagggttgtggt

SEQ ID NO: 1107669 - DNA, 15 bp, Homo sapiens
taggtagggttgtgg

SEQ ID NO: 1107670 - DNA, 15 bp, Homo sapiens
ataggtagggttgtg

SEQ ID NO: 1107671 - DNA, 15 bp, Homo sapiens
aataggtagggttgt

SEQ ID NO: 1107672 - DNA, 15 bp, Homo sapiens
aaataggtagggttg

SEQ ID NO: 1107673 - DNA, 15 bp, Homo sapiens
aaaataggtagggtt

SEQ ID NO: 1107674 - DNA, 15 bp, Homo sapiens
gaaaataggtagggt

SEQ ID NO: 1107675 - DNA, 15 bp, Homo sapiens
tgaaaataggtaggg

SEQ ID NO: 1107676 - DNA, 15 bp, Homo sapiens
ctgaaaataggtagg

SEQ ID NO: 1107677 - DNA, 15 bp, Homo sapiens
tctgaaaataggtag

SEQ ID NO: 1107678 - DNA, 15 bp, Homo sapiens
gtctgaaaataggta

SEQ ID NO: 1107679 - DNA, 15 bp, Homo sapiens
ggtctgaaaataggt

SEQ ID NO: 1107680 - DNA, 15 bp, Homo sapiens
cggtctgaaaatagg

SEQ ID NO: 1107681 - DNA, 15 bp, Homo sapiens
acggtctgaaaatag

SEQ ID NO: 1107682 - DNA, 15 bp, Homo sapiens
cacggtctgaaaata

SEQ ID NO: 1107683 - DNA, 15 bp, Homo sapiens
tcacggtctgaaaat

SEQ ID NO: 1107684 - DNA, 15 bp, Homo sapiens
ttcacggtctgaaaa

SEQ ID NO: 1107685 - DNA, 15 bp, Homo sapiens
gttcacggtctgaaa

SEQ ID NO: 1107686 - DNA, 15 bp, Homo sapiens
ggttcacggtctgaa

SEQ ID NO: 1107687 - DNA, 15 bp, Homo sapiens
tggttcacggtctga

SEQ ID NO: 1107688 - DNA, 15 bp, Homo sapiens
atggttcacggtctg

SEQ ID NO: 1107689 - DNA, 15 bp, Homo sapiens
tatggttcacggtct

SEQ ID NO: 1107690 - DNA, 15 bp, Homo sapiens
ttatggttcacggtc

SEQ ID NO: 1107691 - DNA, 15 bp, Homo sapiens
tttatggttcacggt

SEQ ID NO: 1107692 - DNA, 15 bp, Homo sapiens
ctttatggttcacgg

SEQ ID NO: 1107693 - DNA, 15 bp, Homo sapiens
tctttatggttcacg

SEQ ID NO: 1107694 - DNA, 15 bp, Homo sapiens
ttctttatggttcac

SEQ ID NO: 1107695 - DNA, 15 bp, Homo sapiens
cttctttatggttca

SEQ ID NO: 1107696 - DNA, 15 bp, Homo sapiens
tcttctttatggttc

SEQ ID NO: 1107697 - DNA, 15 bp, Homo sapiens
gtcttctttatggtt

SEQ ID NO: 1107698 - DNA, 15 bp, Homo sapiens
tgtcttctttatggt

SEQ ID NO: 1107699 - DNA, 15 bp, Homo sapiens
ttgtcttctttatgg

SEQ ID NO: 1107700 - DNA, 15 bp, Homo sapiens
cttgtcttctttatg

SEQ ID NO: 1107701 - DNA, 15 bp, Homo sapiens
gcttgtcttctttat

SEQ ID NO: 1107702 - DNA, 15 bp, Homo sapiens
agcttgtcttcttta

SEQ ID NO: 1107703 - DNA, 15 bp, Homo sapiens
aagcttgtcttcttt

SEQ ID NO: 1107704 - DNA, 15 bp, Homo sapiens
taagcttgtcttctt

SEQ ID NO: 1107705 - DNA, 15 bp, Homo sapiens
ataagcttgtcttct

SEQ ID NO: 1107706 - DNA, 15 bp, Homo sapiens
tataagcttgtcttc

SEQ ID NO: 1107707 - DNA, 15 bp, Homo sapiens
ctataagcttgtctt

SEQ ID NO: 1107708 - DNA, 15 bp, Homo sapiens
gctataagcttgtct

SEQ ID NO: 1107709 - DNA, 15 bp, Homo sapiens
agctataagcttgtc

SEQ ID NO: 1107710 - DNA, 15 bp, Homo sapiens
cagctataagcttgt

SEQ ID NO: 1107711 - DNA, 15 bp, Homo sapiens
tcagctataagcttg

SEQ ID NO: 1107712 - DNA, 15 bp, Homo sapiens
ttcagctataagctt

SEQ ID NO: 1107713 - DNA, 15 bp, Homo sapiens
cttcagctataagct

SEQ ID NO: 1107714 - DNA, 15 bp, Homo sapiens
acttcagctataagc

SEQ ID NO: 1107715 - DNA, 15 bp, Homo sapiens
cacttcagctataag

SEQ ID NO: 1107716 - DNA, 15 bp, Homo sapiens
tcacttcagctataa

SEQ ID NO: 1107717 - DNA, 15 bp, Homo sapiens
ttcacttcagctata

SEQ ID NO: 1107718 - DNA, 15 bp, Homo sapiens
attcacttcagctat

SEQ ID NO: 1107719 - DNA, 15 bp, Homo sapiens
aattcacttcagcta

SEQ ID NO: 1107720 - DNA, 15 bp, Homo sapiens
taattcacttcagct

SEQ ID NO: 1107721 - DNA, 15 bp, Homo sapiens
ttaattcacttcagc

SEQ ID NO: 1107722 - DNA, 15 bp, Homo sapiens
cttaattcacttcag

SEQ ID NO: 1107723 - DNA, 15 bp, Homo sapiens
gcttaattcacttca

SEQ ID NO: 1107724 - DNA, 15 bp, Homo sapiens
tgcttaattcacttc

SEQ ID NO: 1107725 - DNA, 15 bp, Homo sapiens
gtgcttaattcactt

SEQ ID NO: 1107726 - DNA, 15 bp, Homo sapiens
cgtgcttaattcact

SEQ ID NO: 1107727 - DNA, 15 bp, Homo sapiens
tcgtgcttaattcac

SEQ ID NO: 1107728 - DNA, 15 bp, Homo sapiens
atcgtgcttaattca

SEQ ID NO: 1107729 - DNA, 15 bp, Homo sapiens
gatcgtgcttaattc

SEQ ID NO: 1107730 - DNA, 15 bp, Homo sapiens
tgatcgtgcttaatt

SEQ ID NO: 1107731 - DNA, 15 bp, Homo sapiens
ttgatcgtgcttaat

SEQ ID NO: 1107732 - DNA, 15 bp, Homo sapiens
gttgatcgtgcttaa

SEQ ID NO: 1107733 - DNA, 15 bp, Homo sapiens
agttgatcgtgctta

SEQ ID NO: 1107734 - DNA, 15 bp, Homo sapiens
gagttgatcgtgctt

SEQ ID NO: 1107735 - DNA, 15 bp, Homo sapiens
tgagttgatcgtgct

SEQ ID NO: 1107736 - DNA, 15 bp, Homo sapiens
ctgagttgatcgtgc

SEQ ID NO: 1107737 - DNA, 15 bp, Homo sapiens
actgagttgatcgtg

SEQ ID NO: 1107738 - DNA, 15 bp, Homo sapiens
tactgagttgatcgt

SEQ ID NO: 1107739 - DNA, 15 bp, Homo sapiens
gtactgagttgatcg

SEQ ID NO: 1107740 - DNA, 15 bp, Homo sapiens
agtactgagttgatc

SEQ ID NO: 1107741 - DNA, 15 bp, Homo sapiens
gagtactgagttgat

SEQ ID NO: 1107742 - DNA, 15 bp, Homo sapiens
tgagtactgagttga

SEQ ID NO: 1107743 - DNA, 15 bp, Homo sapiens
gtgagtactgagttg

SEQ ID NO: 1107744 - DNA, 15 bp, Homo sapiens
tgtgagtactgagtt

SEQ ID NO: 1107745 - DNA, 15 bp, Homo sapiens
gtgtgagtactgagt

SEQ ID NO: 1107746 - DNA, 15 bp, Homo sapiens
agtgtgagtactgag

SEQ ID NO: 1107747 - DNA, 15 bp, Homo sapiens
cagtgtgagtactga

SEQ ID NO: 1107748 - DNA, 15 bp, Homo sapiens
gcagtgtgagtactg

SEQ ID NO: 1107749 - DNA, 15 bp, Homo sapiens
ggcagtgtgagtact

SEQ ID NO: 1107750 - DNA, 15 bp, Homo sapiens
gggcagtgtgagtac

SEQ ID NO: 1107751 - DNA, 15 bp, Homo sapiens
tgggcagtgtgagta

SEQ ID NO: 1107752 - DNA, 15 bp, Homo sapiens
ctgggcagtgtgagt

SEQ ID NO: 1107753 - DNA, 15 bp, Homo sapiens
tctgggcagtgtgag

SEQ ID NO: 1107754 - DNA, 15 bp, Homo sapiens
atctgggcagtgtga

SEQ ID NO: 1107755 - DNA, 15 bp, Homo sapiens
catctgggcagtgtg

SEQ ID NO: 1107756 - DNA, 15 bp, Homo sapiens
acatctgggcagtgt

SEQ ID NO: 1107757 - DNA, 15 bp, Homo sapiens
cacatctgggcagtg

SEQ ID NO: 1107758 - DNA, 15 bp, Homo sapiens
acacatctgggcagt

SEQ ID NO: 1107759 - DNA, 15 bp, Homo sapiens
gacacatctgggcag

SEQ ID NO: 1107760 - DNA, 15 bp, Homo sapiens
agacacatctgggca

SEQ ID NO: 1107761 - DNA, 15 bp, Homo sapiens
cagacacatctgggc

SEQ ID NO: 1107762 - DNA, 15 bp, Homo sapiens
ccagacacatctggg

SEQ ID NO: 1107763 - DNA, 15 bp, Homo sapiens
gccagacacatctgg

SEQ ID NO: 1107764 - DNA, 15 bp, Homo sapiens
ggccagacacatctg

SEQ ID NO: 1107765 - DNA, 15 bp, Homo sapiens
tggccagacacatct

SEQ ID NO: 1107766 - DNA, 15 bp, Homo sapiens
ctggccagacacatc

SEQ ID NO: 1107767 - DNA, 15 bp, Homo sapiens
gctggccagacacat

SEQ ID NO: 1107768 - DNA, 15 bp, Homo sapiens
tgctggccagacaca

SEQ ID NO: 1107769 - DNA, 15 bp, Homo sapiens
atgctggccagacac

SEQ ID NO: 1107770 - DNA, 15 bp, Homo sapiens
catgctggccagaca

SEQ ID NO: 1107771 - DNA, 15 bp, Homo sapiens
tcatgctggccagac

SEQ ID NO: 1107772 - DNA, 15 bp, Homo sapiens
ctcatgctggccaga

SEQ ID NO: 1107773 - DNA, 15 bp, Homo sapiens
cctcatgctggccag

SEQ ID NO: 1107774 - DNA, 15 bp, Homo sapiens
ccctcatgctggcca

SEQ ID NO: 1107775 - DNA, 15 bp, Homo sapiens
accctcatgctggcc

SEQ ID NO: 1107776 - DNA, 15 bp, Homo sapiens
caccctcatgctggc

SEQ ID NO: 1107777 - DNA, 15 bp, Homo sapiens
gcaccctcatgctgg

SEQ ID NO: 1107778 - DNA, 15 bp, Homo sapiens
tgcaccctcatgctg

SEQ ID NO: 1107779 - DNA, 15 bp, Homo sapiens
ctgcaccctcatgct

SEQ ID NO: 1107780 - DNA, 15 bp, Homo sapiens
tctgcaccctcatgc

SEQ ID NO: 1107781 - DNA, 15 bp, Homo sapiens
ctctgcaccctcatg

SEQ ID NO: 1107782 - DNA, 15 bp, Homo sapiens
cctctgcaccctcat

SEQ ID NO: 1107783 - DNA, 15 bp, Homo sapiens
tcctctgcaccctca

SEQ ID NO: 1107784 - DNA, 15 bp, Homo sapiens
ttcctctgcaccctc

SEQ ID NO: 1107785 - DNA, 15 bp, Homo sapiens
cttcctctgcaccct

SEQ ID NO: 1107786 - DNA, 15 bp, Homo sapiens
tcttcctctgcaccc

SEQ ID NO: 1107787 - DNA, 15 bp, Homo sapiens
gtcttcctctgcacc

SEQ ID NO: 1107788 - DNA, 15 bp, Homo sapiens
tgtcttcctctgcac

SEQ ID NO: 1107789 - DNA, 15 bp, Homo sapiens
gtgtcttcctctgca

SEQ ID NO: 1107790 - DNA, 15 bp, Homo sapiens
ggtgtcttcctctgc

SEQ ID NO: 1107791 - DNA, 15 bp, Homo sapiens
gggtgtcttcctctg

SEQ ID NO: 1107792 - DNA, 15 bp, Homo sapiens
agggtgtcttcctct

SEQ ID NO: 1107793 - DNA, 15 bp, Homo sapiens
cagggtgtcttcctc

SEQ ID NO: 1107794 - DNA, 15 bp, Homo sapiens
tcagggtgtcttcct

SEQ ID NO: 1107795 - DNA, 15 bp, Homo sapiens
ttcagggtgtcttcc

SEQ ID NO: 1107796 - DNA, 15 bp, Homo sapiens
gttcagggtgtcttc

SEQ ID NO: 1107797 - DNA, 15 bp, Homo sapiens
agttcagggtgtctt

SEQ ID NO: 1107798 - DNA, 15 bp, Homo sapiens
gagttcagggtgtct

SEQ ID NO: 1107799 - DNA, 15 bp, Homo sapiens
agagttcagggtgtc

SEQ ID NO: 1107800 - DNA, 15 bp, Homo sapiens
gagagttcagggtgt

SEQ ID NO: 1107801 - DNA, 15 bp, Homo sapiens
ggagagttcagggtg

SEQ ID NO: 1107802 - DNA, 15 bp, Homo sapiens
tggagagttcagggt

SEQ ID NO: 1107803 - DNA, 15 bp, Homo sapiens
ctggagagttcaggg

SEQ ID NO: 1107804 - DNA, 15 bp, Homo sapiens
cctggagagttcagg

SEQ ID NO: 1107805 - DNA, 15 bp, Homo sapiens
ccctggagagttcag

SEQ ID NO: 1107806 - DNA, 15 bp, Homo sapiens
gccctggagagttca

SEQ ID NO: 1107807 - DNA, 15 bp, Homo sapiens
ggccctggagagttc

SEQ ID NO: 1107808 - DNA, 15 bp, Homo sapiens
gggccctggagagtt

SEQ ID NO: 1107809 - DNA, 15 bp, Homo sapiens
agggccctggagagt

SEQ ID NO: 1107810 - DNA, 15 bp, Homo sapiens
cagggccctggagag

SEQ ID NO: 1107811 - DNA, 15 bp, Homo sapiens
gtccagggccctgga

SEQ ID NO: 1107812 - DNA, 15 bp, Homo sapiens
tgtccagggccctgg

SEQ ID NO: 1107813 - DNA, 15 bp, Homo sapiens
ctgtccagggccctg

SEQ ID NO: 1107814 - DNA, 15 bp, Homo sapiens
tctgtccagggccct

SEQ ID NO: 1107815 - DNA, 15 bp, Homo sapiens
atctgtccagggccc

SEQ ID NO: 1107816 - DNA, 15 bp, Homo sapiens
catctgtccagggcc

SEQ ID NO: 1107817 - DNA, 15 bp, Homo sapiens
ccatctgtccagggc

SEQ ID NO: 1107818 - DNA, 15 bp, Homo sapiens
gccatctgtccaggg

SEQ ID NO: 1107819 - DNA, 15 bp, Homo sapiens
ggccatctgtccagg

SEQ ID NO: 1107820 - DNA, 15 bp, Homo sapiens
tggccatctgtccag

SEQ ID NO: 1107821 - DNA, 15 bp, Homo sapiens
gtggccatctgtcca

SEQ ID NO: 1107822 - DNA, 15 bp, Homo sapiens
agtggccatctgtcc

SEQ ID NO: 1107823 - DNA, 15 bp, Homo sapiens
gagtggccatctgtc

SEQ ID NO: 1107824 - DNA, 15 bp, Homo sapiens
agagtggccatctgt

SEQ ID NO: 1107825 - DNA, 15 bp, Homo sapiens
cagagtggccatctg

SEQ ID NO: 1107826 - DNA, 15 bp, Homo sapiens
acagagtggccatct

SEQ ID NO: 1107827 - DNA, 15 bp, Homo sapiens
gacagagtggccatc

SEQ ID NO: 1107828 - DNA, 15 bp, Homo sapiens
agacagagtggccat

SEQ ID NO: 1107829 - DNA, 15 bp, Homo sapiens
aagacagagtggcca

SEQ ID NO: 1107830 - DNA, 15 bp, Homo sapiens
gaagacagagtggcc

SEQ ID NO: 1107831 - DNA, 15 bp, Homo sapiens
tgaagacagagtggc

SEQ ID NO: 1107832 - DNA, 15 bp, Homo sapiens
gtgaagacagagtgg

SEQ ID NO: 1107833 - DNA, 15 bp, Homo sapiens
agtgaagacagagtg

SEQ ID NO: 1107834 - DNA, 15 bp, Homo sapiens
aagtgaagacagagt

SEQ ID NO: 1107835 - DNA, 15 bp, Homo sapiens
aaagtgaagacagag

SEQ ID NO: 1107836 - DNA, 15 bp, Homo sapiens
aaaagtgaagacaga

SEQ ID NO: 1107837 - DNA, 15 bp, Homo sapiens
gaaaagtgaagacag

SEQ ID NO: 1107838 - DNA, 15 bp, Homo sapiens
agaaaagtgaagaca

SEQ ID NO: 1107839 - DNA, 15 bp, Homo sapiens
gagaaaagtgaagac

SEQ ID NO: 1107840 - DNA, 15 bp, Homo sapiens
tgagaaaagtgaaga

SEQ ID NO: 1107841 - DNA, 15 bp, Homo sapiens
atgagaaaagtgaag

SEQ ID NO: 1107842 - DNA, 15 bp, Homo sapiens
gatgagaaaagtgaa

SEQ ID NO: 1107843 - DNA, 15 bp, Homo sapiens
agatgagaaaagtga

SEQ ID NO: 1107844 - DNA, 15 bp, Homo sapiens
tagatgagaaaagtg

SEQ ID NO: 1107845 - DNA, 15 bp, Homo sapiens
atagatgagaaaagt

SEQ ID NO: 1107846 - DNA, 15 bp, Homo sapiens
tatagatgagaaaag

SEQ ID NO: 1107847 - DNA, 15 bp, Homo sapiens
ttatagatgagaaaa

SEQ ID NO: 1107848 - DNA, 15 bp, Homo sapiens
cttatagatgagaaa

SEQ ID NO: 1107849 - DNA, 15 bp, Homo sapiens
tcttatagatgagaa

SEQ ID NO: 1107850 - DNA, 15 bp, Homo sapiens
atcttatagatgaga

SEQ ID NO: 1107851 - DNA, 15 bp, Homo sapiens
catcttatagatgag

SEQ ID NO: 1107852 - DNA, 15 bp, Homo sapiens
tcatcttatagatga

SEQ ID NO: 1107853 - DNA, 15 bp, Homo sapiens
ttcatcttatagatg

SEQ ID NO: 1107854 - DNA, 15 bp, Homo sapiens
cttcatcttatagat

SEQ ID NO: 1107855 - DNA, 15 bp, Homo sapiens
acttcatcttataga

SEQ ID NO: 1107856 - DNA, 15 bp, Homo sapiens
aacttcatcttatag

SEQ ID NO: 1107857 - DNA, 15 bp, Homo sapiens
caacttcatcttata

SEQ ID NO: 1107858 - DNA, 15 bp, Homo sapiens
acaacttcatcttat

SEQ ID NO: 1107859 - DNA, 15 bp, Homo sapiens
aacaacttcatctta

SEQ ID NO: 1107860 - DNA, 15 bp, Homo sapiens
caacaacttcatctt

SEQ ID NO: 1107861 - DNA, 15 bp, Homo sapiens
ccaacaacttcatct

SEQ ID NO: 1107862 - DNA, 15 bp, Homo sapiens
tccaacaacttcatc

SEQ ID NO: 1107863 - DNA, 15 bp, Homo sapiens
atccaacaacttcat

SEQ ID NO: 1107864 - DNA, 15 bp, Homo sapiens
catccaacaacttca

SEQ ID NO: 1107865 - DNA, 15 bp, Homo sapiens
tcatccaacaacttc

SEQ ID NO: 1107866 - DNA, 15 bp, Homo sapiens
atcatccaacaactt

SEQ ID NO: 1107867 - DNA, 15 bp, Homo sapiens
tatcatccaacaact

SEQ ID NO: 1107868 - DNA, 15 bp, Homo sapiens
atatcatccaacaac

SEQ ID NO: 1107869 - DNA, 15 bp, Homo sapiens
tatatcatccaacaa

SEQ ID NO: 1107870 - DNA, 15 bp, Homo sapiens
atatatcatccaaca

SEQ ID NO: 1107871 - DNA, 15 bp, Homo sapiens
gatatatcatccaac

SEQ ID NO: 1107872 - DNA, 15 bp, Homo sapiens
tgatatatcatccaa

SEQ ID NO: 1107873 - DNA, 15 bp, Homo sapiens
ttgatatatcatcca

SEQ ID NO: 1107874 - DNA, 15 bp, Homo sapiens
attgatatatcatcc

SEQ ID NO: 1107875 - DNA, 15 bp, Homo sapiens
tattgatatatcatc

SEQ ID NO: 1107876 - DNA, 15 bp, Homo sapiens
atattgatatatcat

SEQ ID NO: 1107877 - DNA, 15 bp, Homo sapiens
aatattgatatatca

SEQ ID NO: 1107878 - DNA, 15 bp, Homo sapiens
aaatattgatatatc

SEQ ID NO: 1107879 - DNA, 15 bp, Homo sapiens
taaatattgatatat

SEQ ID NO: 1107880 - DNA, 15 bp, Homo sapiens
gtaaatattgatata

SEQ ID NO: 1107881 - DNA, 15 bp, Homo sapiens
tgtaaatattgatat

SEQ ID NO: 1107882 - DNA, 15 bp, Homo sapiens
ttgtaaatattgata

SEQ ID NO: 1107883 - DNA, 15 bp, Homo sapiens
attgtaaatattgat

SEQ ID NO: 1107884 - DNA, 15 bp, Homo sapiens
cattgtaaatattga

SEQ ID NO: 1107885 - DNA, 15 bp, Homo sapiens
acattgtaaatattg

SEQ ID NO: 1107886 - DNA, 15 bp, Homo sapiens
aacattgtaaatatt

SEQ ID NO: 1107887 - DNA, 15 bp, Homo sapiens
caacattgtaaatat

SEQ ID NO: 1107888 - DNA, 15 bp, Homo sapiens
acaacattgtaaata

SEQ ID NO: 1107889 - DNA, 15 bp, Homo sapiens
aacaacattgtaaat

SEQ ID NO: 1107890 - DNA, 15 bp, Homo sapiens
aaacaacattgtaaa

SEQ ID NO: 1107891 - DNA, 15 bp, Homo sapiens
gaaacaacattgtaa

SEQ ID NO: 1107892 - DNA, 15 bp, Homo sapiens
agaaacaacattgta

SEQ ID NO: 1107893 - DNA, 15 bp, Homo sapiens
tagaaacaacattgt

SEQ ID NO: 1107894 - DNA, 15 bp, Homo sapiens
ctagaaacaacattg

SEQ ID NO: 1107895 - DNA, 15 bp, Homo sapiens
gctagaaacaacatt

SEQ ID NO: 1107896 - DNA, 15 bp, Homo sapiens
agctagaaacaacat

SEQ ID NO: 1107897 - DNA, 15 bp, Homo sapiens
gagctagaaacaaca

SEQ ID NO: 1107898 - DNA, 15 bp, Homo sapiens
agagctagaaacaac

SEQ ID NO: 1107899 - DNA, 15 bp, Homo sapiens
tagagctagaaacaa

SEQ ID NO: 1107900 - DNA, 15 bp, Homo sapiens
ttagagctagaaaca

SEQ ID NO: 1107901 - DNA, 15 bp, Homo sapiens
tttagagctagaaac

SEQ ID NO: 1107902 - DNA, 15 bp, Homo sapiens
ttttagagctagaaa

SEQ ID NO: 1107903 - DNA, 15 bp, Homo sapiens
gttttagagctagaa

SEQ ID NO: 1107904 - DNA, 15 bp, Homo sapiens
agttttagagctaga

SEQ ID NO: 1107905 - DNA, 15 bp, Homo sapiens
gagttttagagctag

SEQ ID NO: 1107906 - DNA, 15 bp, Homo sapiens
agagttttagagcta

SEQ ID NO: 1107907 - DNA, 15 bp, Homo sapiens
tagagttttagagct

SEQ ID NO: 1107908 - DNA, 15 bp, Homo sapiens
atagagttttagagc

SEQ ID NO: 1107909 - DNA, 15 bp, Homo sapiens
catagagttttagag

SEQ ID NO: 1107910 - DNA, 15 bp, Homo sapiens
gcatagagttttaga

SEQ ID NO: 1107911 - DNA, 15 bp, Homo sapiens
agcatagagttttag

SEQ ID NO: 1107912 - DNA, 15 bp, Homo sapiens
aagcatagagtttta

SEQ ID NO: 1107913 - DNA, 15 bp, Homo sapiens
aaagcatagagtttt

SEQ ID NO: 1107914 - DNA, 15 bp, Homo sapiens
aaaagcatagagttt

SEQ ID NO: 1107915 - DNA, 15 bp, Homo sapiens
taaaagcatagagtt

SEQ ID NO: 1107916 - DNA, 15 bp, Homo sapiens
ataaaagcatagagt

SEQ ID NO: 1107917 - DNA, 15 bp, Homo sapiens
gataaaagcatagag

SEQ ID NO: 1107918 - DNA, 15 bp, Homo sapiens
agataaaagcataga

SEQ ID NO: 1107919 - DNA, 15 bp, Homo sapiens
aagataaaagcatag

SEQ ID NO: 1107920 - DNA, 15 bp, Homo sapiens
gaagataaaagcata

SEQ ID NO: 1107921 - DNA, 15 bp, Homo sapiens
ggaagataaaagcat

SEQ ID NO: 1107922 - DNA, 15 bp, Homo sapiens
gggaagataaaagca

SEQ ID NO: 1107923 - DNA, 15 bp, Homo sapiens
agggaagataaaagc

SEQ ID NO: 1107924 - DNA, 15 bp, Homo sapiens
aagggaagataaaag

SEQ ID NO: 1107925 - DNA, 15 bp, Homo sapiens
caagggaagataaaa

SEQ ID NO: 1107926 - DNA, 15 bp, Homo sapiens
ccaagggaagataaa

SEQ ID NO: 1107927 - DNA, 15 bp, Homo sapiens
tccaagggaagataa

SEQ ID NO: 1107928 - DNA, 15 bp, Homo sapiens
atccaagggaagata

SEQ ID NO: 1107929 - DNA, 15 bp, Homo sapiens
gatccaagggaagat

SEQ ID NO: 1107930 - DNA, 15 bp, Homo sapiens
agatccaagggaaga

SEQ ID NO: 1107931 - DNA, 15 bp, Homo sapiens
aagatccaagggaag

SEQ ID NO: 1107932 - DNA, 15 bp, Homo sapiens
gaagatccaagggaa

SEQ ID NO: 1107933 - DNA, 15 bp, Homo sapiens
tgaagatccaaggga

SEQ ID NO: 1107934 - DNA, 15 bp, Homo sapiens
atgaagatccaaggg

SEQ ID NO: 1107935 - DNA, 15 bp, Homo sapiens
catgaagatccaagg

SEQ ID NO: 1107936 - DNA, 15 bp, Homo sapiens
ccatgaagatccaag

SEQ ID NO: 1107937 - DNA, 15 bp, Homo sapiens
gccatgaagatccaa

SEQ ID NO: 1107938 - DNA, 15 bp, Homo sapiens
tgccatgaagatcca

SEQ ID NO: 1107939 - DNA, 15 bp, Homo sapiens
gtgccatgaagatcc

SEQ ID NO: 1107940 - DNA, 15 bp, Homo sapiens
ggtgccatgaagatc

SEQ ID NO: 1107941 - DNA, 15 bp, Homo sapiens
tggtgccatgaagat

SEQ ID NO: 1107942 - DNA, 15 bp, Homo sapiens
ctggtgccatgaaga

SEQ ID NO: 1107943 - DNA, 15 bp, Homo sapiens
tctggtgccatgaag

SEQ ID NO: 1107944 - DNA, 15 bp, Homo sapiens
ttctggtgccatgaa

SEQ ID NO: 1107945 - DNA, 15 bp, Homo sapiens
cttctggtgccatga

SEQ ID NO: 1107946 - DNA, 15 bp, Homo sapiens
ccttctggtgccatg

SEQ ID NO: 1107947 - DNA, 15 bp, Homo sapiens
tccttctggtgccat

SEQ ID NO: 1107948 - DNA, 15 bp, Homo sapiens
ttccttctggtgcca

SEQ ID NO: 1107949 - DNA, 15 bp, Homo sapiens
tttccttctggtgcc

SEQ ID NO: 1107950 - DNA, 15 bp, Homo sapiens
ctttccttctggtgc

SEQ ID NO: 1107951 - DNA, 15 bp, Homo sapiens
actttccttctggtg

SEQ ID NO: 1107952 - DNA, 15 bp, Homo sapiens
gactttccttctggt

SEQ ID NO: 1107953 - DNA, 15 bp, Homo sapiens
agactttccttctgg

SEQ ID NO: 1107954 - DNA, 15 bp, Homo sapiens
aagactttccttctg

SEQ ID NO: 1107955 - DNA, 15 bp, Homo sapiens
taagactttccttct

SEQ ID NO: 1107956 - DNA, 15 bp, Homo sapiens
ctaagactttccttc

SEQ ID NO: 1107957 - DNA, 15 bp, Homo sapiens
cctaagactttcctt

SEQ ID NO: 1107958 - DNA, 15 bp, Homo sapiens
tcctaagactttcct

SEQ ID NO: 1107959 - DNA, 15 bp, Homo sapiens
gtcctaagactttcc

SEQ ID NO: 1107960 - DNA, 15 bp, Homo sapiens
ggtcctaagactttc

SEQ ID NO: 1107961 - DNA, 15 bp, Homo sapiens
gggtcctaagacttt

SEQ ID NO: 1107962 - DNA, 15 bp, Homo sapiens
agggtcctaagactt

SEQ ID NO: 1107963 - DNA, 15 bp, Homo sapiens
aagggtcctaagact

SEQ ID NO: 1107964 - DNA, 15 bp, Homo sapiens
caagggtcctaagac

SEQ ID NO: 1107965 - DNA, 15 bp, Homo sapiens
ccaagggtcctaaga

SEQ ID NO: 1107966 - DNA, 15 bp, Homo sapiens
tccaagggtcctaag

SEQ ID NO: 1107967 - DNA, 15 bp, Homo sapiens
gtccaagggtcctaa

SEQ ID NO: 1107968 - DNA, 15 bp, Homo sapiens
ggtccaagggtccta

SEQ ID NO: 1107969 - DNA, 15 bp, Homo sapiens
aggtccaagggtcct

SEQ ID NO: 1107970 - DNA, 15 bp, Homo sapiens
caggtccaagggtcc

SEQ ID NO: 1107971 - DNA, 15 bp, Homo sapiens
acaggtccaagggtc

SEQ ID NO: 1107972 - DNA, 15 bp, Homo sapiens
cacaggtccaagggt

SEQ ID NO: 1107973 - DNA, 15 bp, Homo sapiens
tcacaggtccaaggg

SEQ ID NO: 1107974 - DNA, 15 bp, Homo sapiens
ctcacaggtccaagg

SEQ ID NO: 1107975 - DNA, 15 bp, Homo sapiens
gctcacaggtccaag

SEQ ID NO: 1107976 - DNA, 15 bp, Homo sapiens
tgctcacaggtccaa

SEQ ID NO: 1107977 - DNA, 15 bp, Homo sapiens
ctgctcacaggtcca

SEQ ID NO: 1107978 - DNA, 15 bp, Homo sapiens
tctgctcacaggtcc

SEQ ID NO: 1107979 - DNA, 15 bp, Homo sapiens
atctgctcacaggtc

SEQ ID NO: 1107980 - DNA, 15 bp, Homo sapiens
gatctgctcacaggt

SEQ ID NO: 1107981 - DNA, 15 bp, Homo sapiens
tgatctgctcacagg

SEQ ID NO: 1107982 - DNA, 15 bp, Homo sapiens
ctgatctgctcacag

SEQ ID NO: 1107983 - DNA, 15 bp, Homo sapiens
gctgatctgctcaca

SEQ ID NO: 1107984 - DNA, 15 bp, Homo sapiens
agctgatctgctcac

SEQ ID NO: 1107985 - DNA, 15 bp, Homo sapiens
tagctgatctgctca

SEQ ID NO: 1107986 - DNA, 15 bp, Homo sapiens
atagctgatctgctc

SEQ ID NO: 1107987 - DNA, 15 bp, Homo sapiens
tatagctgatctgct

SEQ ID NO: 1107988 - DNA, 15 bp, Homo sapiens
ctatagctgatctgc

SEQ ID NO: 1107989 - DNA, 15 bp, Homo sapiens
actatagctgatctg

SEQ ID NO: 1107990 - DNA, 15 bp, Homo sapiens
gactatagctgatct

SEQ ID NO: 1107991 - DNA, 15 bp, Homo sapiens
ggactatagctgatc

SEQ ID NO: 1107992 - DNA, 15 bp, Homo sapiens
aggactatagctgat

SEQ ID NO: 1107993 - DNA, 15 bp, Homo sapiens
caggactatagctga

SEQ ID NO: 1107994 - DNA, 15 bp, Homo sapiens
tcaggactatagctg

SEQ ID NO: 1107995 - DNA, 15 bp, Homo sapiens
ctcaggactatagct

SEQ ID NO: 1107996 - DNA, 15 bp, Homo sapiens
actcaggactatagc

SEQ ID NO: 1107997 - DNA, 15 bp, Homo sapiens
aactcaggactatag

SEQ ID NO: 1107998 - DNA, 15 bp, Homo sapiens
caactcaggactata

SEQ ID NO: 1107999 - DNA, 15 bp, Homo sapiens
tcaactcaggactat

SEQ ID NO: 1108000 - DNA, 15 bp, Homo sapiens
gtcaactcaggacta

SEQ ID NO: 1108001 - DNA, 15 bp, Homo sapiens
tgtcaactcaggact

SEQ ID NO: 1108002 - DNA, 15 bp, Homo sapiens
ttgtcaactcaggac

SEQ ID NO: 1108003 - DNA, 15 bp, Homo sapiens
tttgtcaactcagga

SEQ ID NO: 1108004 - DNA, 15 bp, Homo sapiens
atttgtcaactcagg

SEQ ID NO: 1108005 - DNA, 15 bp, Homo sapiens
aatttgtcaactcag

SEQ ID NO: 1108006 - DNA, 15 bp, Homo sapiens
aaatttgtcaactca

SEQ ID NO: 1108007 - DNA, 15 bp, Homo sapiens
gaaatttgtcaactc

SEQ ID NO: 1108008 - DNA, 15 bp, Homo sapiens
agaaatttgtcaact

SEQ ID NO: 1108009 - DNA, 15 bp, Homo sapiens
gagaaatttgtcaac

SEQ ID NO: 1108010 - DNA, 15 bp, Homo sapiens
agagaaatttgtcaa

SEQ ID NO: 1108011 - DNA, 15 bp, Homo sapiens
aagagaaatttgtca

SEQ ID NO: 1108012 - DNA, 15 bp, Homo sapiens
caagagaaatttgtc

SEQ ID NO: 1108013 - DNA, 15 bp, Homo sapiens
ccaagagaaatttgt

SEQ ID NO: 1108014 - DNA, 15 bp, Homo sapiens
gccaagagaaatttg

SEQ ID NO: 1108015 - DNA, 15 bp, Homo sapiens
tgccaagagaaattt

SEQ ID NO: 1108016 - DNA, 15 bp, Homo sapiens
atgccaagagaaatt

SEQ ID NO: 1108017 - DNA, 15 bp, Homo sapiens
aatgccaagagaaat

SEQ ID NO: 1108018 - DNA, 15 bp, Homo sapiens
aaatgccaagagaaa

SEQ ID NO: 1108019 - DNA, 15 bp, Homo sapiens
aaaatgccaagagaa

SEQ ID NO: 1108020 - DNA, 15 bp, Homo sapiens
aaaaatgccaagaga

SEQ ID NO: 1108021 - DNA, 15 bp, Homo sapiens
taaaaatgccaagag

SEQ ID NO: 1108022 - DNA, 15 bp, Homo sapiens
gtaaaaatgccaaga

SEQ ID NO: 1108023 - DNA, 15 bp, Homo sapiens
ggtaaaaatgccaag

SEQ ID NO: 1108024 - DNA, 15 bp, Homo sapiens
gggtaaaaatgccaa

SEQ ID NO: 1108025 - DNA, 15 bp, Homo sapiens
agggtaaaaatgcca

SEQ ID NO: 1108026 - DNA, 15 bp, Homo sapiens
aagggtaaaaatgcc

SEQ ID NO: 1108027 - DNA, 15 bp, Homo sapiens
aaagggtaaaaatgc

SEQ ID NO: 1108028 - DNA, 15 bp, Homo sapiens
caaagggtaaaaatg

SEQ ID NO: 1108029 - DNA, 15 bp, Homo sapiens
tcaaagggtaaaaat

SEQ ID NO: 1108030 - DNA, 15 bp, Homo sapiens
gtcaaagggtaaaaa

SEQ ID NO: 1108031 - DNA, 15 bp, Homo sapiens
agtcaaagggtaaaa

SEQ ID NO: 1108032 - DNA, 15 bp, Homo sapiens
cagtcaaagggtaaa

SEQ ID NO: 1108033 - DNA, 15 bp, Homo sapiens
gcagtcaaagggtaa

SEQ ID NO: 1108034 - DNA, 15 bp, Homo sapiens
agcagtcaaagggta

SEQ ID NO: 1108035 - DNA, 15 bp, Homo sapiens
cagcagtcaaagggt

SEQ ID NO: 1108036 - DNA, 15 bp, Homo sapiens
acagcagtcaaaggg

SEQ ID NO: 1108037 - DNA, 15 bp, Homo sapiens
gacagcagtcaaagg

SEQ ID NO: 1108038 - DNA, 15 bp, Homo sapiens
tgacagcagtcaaag

SEQ ID NO: 1108039 - DNA, 15 bp, Homo sapiens
ttgacagcagtcaaa

SEQ ID NO: 1108040 - DNA, 15 bp, Homo sapiens
attgacagcagtcaa

SEQ ID NO: 1108041 - DNA, 15 bp, Homo sapiens
tattgacagcagtca

SEQ ID NO: 1108042 - DNA, 15 bp, Homo sapiens
ttattgacagcagtc

SEQ ID NO: 1108043 - DNA, 15 bp, Homo sapiens
gttattgacagcagt

SEQ ID NO: 1108044 - DNA, 15 bp, Homo sapiens
agttattgacagcag

SEQ ID NO: 1108045 - DNA, 15 bp, Homo sapiens
aagttattgacagca

SEQ ID NO: 1108046 - DNA, 15 bp, Homo sapiens
gaagttattgacagc

SEQ ID NO: 1108047 - DNA, 15 bp, Homo sapiens
tgaagttattgacag

SEQ ID NO: 1108048 - DNA, 15 bp, Homo sapiens
ctgaagttattgaca

SEQ ID NO: 1108049 - DNA, 15 bp, Homo sapiens
gctgaagttattgac

SEQ ID NO: 1108050 - DNA, 15 bp, Homo sapiens
tgctgaagttattga

SEQ ID NO: 1108051 - DNA, 15 bp, Homo sapiens
gtgctgaagttattg

SEQ ID NO: 1108052 - DNA, 15 bp, Homo sapiens
tgtgctgaagttatt

SEQ ID NO: 1108053 - DNA, 15 bp, Homo sapiens
ctgtgctgaagttat

SEQ ID NO: 1108054 - DNA, 15 bp, Homo sapiens
gctgtgctgaagtta

SEQ ID NO: 1108055 - DNA, 15 bp, Homo sapiens
tgctgtgctgaagtt

SEQ ID NO: 1108056 - DNA, 15 bp, Homo sapiens
ttgctgtgctgaagt

SEQ ID NO: 1108057 - DNA, 15 bp, Homo sapiens
tttgctgtgctgaag

SEQ ID NO: 1108058 - DNA, 15 bp, Homo sapiens
ctttgctgtgctgaa

SEQ ID NO: 1108059 - DNA, 15 bp, Homo sapiens
cctttgctgtgctga

SEQ ID NO: 1108060 - DNA, 15 bp, Homo sapiens
acctttgctgtgctg

SEQ ID NO: 1108061 - DNA, 15 bp, Homo sapiens
tacctttgctgtgct

SEQ ID NO: 1108062 - DNA, 15 bp, Homo sapiens
ctacctttgctgtgc

SEQ ID NO: 1108063 - DNA, 15 bp, Homo sapiens
gctacctttgctgtg

SEQ ID NO: 1108064 - DNA, 15 bp, Homo sapiens
tgctacctttgctgt

SEQ ID NO: 1108065 - DNA, 15 bp, Homo sapiens
ttgctacctttgctg

SEQ ID NO: 1108066 - DNA, 15 bp, Homo sapiens
tttgctacctttgct

SEQ ID NO: 1108067 - DNA, 15 bp, Homo sapiens
ttttgctacctttgc

SEQ ID NO: 1108068 - DNA, 15 bp, Homo sapiens
attttgctacctttg

SEQ ID NO: 1108069 - DNA, 15 bp, Homo sapiens
aattttgctaccttt

SEQ ID NO: 1108070 - DNA, 15 bp, Homo sapiens
gaattttgctacctt

SEQ ID NO: 1108071 - DNA, 15 bp, Homo sapiens
agaattttgctacct

SEQ ID NO: 1108072 - DNA, 15 bp, Homo sapiens
tagaattttgctacc

SEQ ID NO: 1108073 - DNA, 15 bp, Homo sapiens
atagaattttgctac

SEQ ID NO: 1108074 - DNA, 15 bp, Homo sapiens
aatagaattttgcta

SEQ ID NO: 1108075 - DNA, 15 bp, Homo sapiens
caatagaattttgct

SEQ ID NO: 1108076 - DNA, 15 bp, Homo sapiens
ccaatagaattttgc

SEQ ID NO: 1108077 - DNA, 15 bp, Homo sapiens
cccaatagaattttg

SEQ ID NO: 1108078 - DNA, 15 bp, Homo sapiens
tcccaatagaatttt

SEQ ID NO: 1108079 - DNA, 15 bp, Homo sapiens
ttcccaatagaattt

SEQ ID NO: 1108080 - DNA, 15 bp, Homo sapiens
attcccaatagaatt

SEQ ID NO: 1108081 - DNA, 15 bp, Homo sapiens
gattcccaatagaat

SEQ ID NO: 1108082 - DNA, 15 bp, Homo sapiens
agattcccaatagaa

SEQ ID NO: 1108083 - DNA, 15 bp, Homo sapiens
aagattcccaataga

SEQ ID NO: 1108084 - DNA, 15 bp, Homo sapiens
aaagattcccaatag

SEQ ID NO: 1108085 - DNA, 15 bp, Homo sapiens
aaaagattcccaata

SEQ ID NO: 1108086 - DNA, 15 bp, Homo sapiens
gaaaagattcccaat

SEQ ID NO: 1108087 - DNA, 15 bp, Homo sapiens
ggaaaagattcccaa

SEQ ID NO: 1108088 - DNA, 15 bp, Homo sapiens
gggaaaagattccca

SEQ ID NO: 1108089 - DNA, 15 bp, Homo sapiens
tgggaaaagattccc

SEQ ID NO: 1108090 - DNA, 15 bp, Homo sapiens
ttgggaaaagattcc

SEQ ID NO: 1108091 - DNA, 15 bp, Homo sapiens
attgggaaaagattc

SEQ ID NO: 1108092 - DNA, 15 bp, Homo sapiens
gattgggaaaagatt

SEQ ID NO: 1108093 - DNA, 15 bp, Homo sapiens
tgattgggaaaagat

SEQ ID NO: 1108094 - DNA, 15 bp, Homo sapiens
ttgattgggaaaaga

SEQ ID NO: 1108095 - DNA, 15 bp, Homo sapiens
tttgattgggaaaag

SEQ ID NO: 1108096 - DNA, 15 bp, Homo sapiens
ctttgattgggaaaa

SEQ ID NO: 1108097 - DNA, 15 bp, Homo sapiens
gctttgattgggaaa

SEQ ID NO: 1108098 - DNA, 15 bp, Homo sapiens
agctttgattgggaa

SEQ ID NO: 1108099 - DNA, 15 bp, Homo sapiens
tagctttgattggga

SEQ ID NO: 1108100 - DNA, 15 bp, Homo sapiens
gtagctttgattggg

SEQ ID NO: 1108101 - DNA, 15 bp, Homo sapiens
tgtagctttgattgg

SEQ ID NO: 1108102 - DNA, 15 bp, Homo sapiens
ctgtagctttgattg

SEQ ID NO: 1108103 - DNA, 15 bp, Homo sapiens
gctgtagctttgatt

SEQ ID NO: 1108104 - DNA, 15 bp, Homo sapiens
ggctgtagctttgat

SEQ ID NO: 1108105 - DNA, 15 bp, Homo sapiens
gggctgtagctttga

SEQ ID NO: 1108106 - DNA, 15 bp, Homo sapiens
ggggctgtagctttg

SEQ ID NO: 1108107 - DNA, 15 bp, Homo sapiens
tggggctgtagcttt

SEQ ID NO: 1108108 - DNA, 15 bp, Homo sapiens
atggggctgtagctt

SEQ ID NO: 1108109 - DNA, 15 bp, Homo sapiens
tatggggctgtagct

SEQ ID NO: 1108110 - DNA, 15 bp, Homo sapiens
ctatggggctgtagc

SEQ ID NO: 1108111 - DNA, 15 bp, Homo sapiens
gctatggggctgtag

SEQ ID NO: 1108112 - DNA, 15 bp, Homo sapiens
agctatggggctgta

SEQ ID NO: 1108113 - DNA, 15 bp, Homo sapiens
cagctatggggctgt

SEQ ID NO: 1108114 - DNA, 15 bp, Homo sapiens
acagctatggggctg

SEQ ID NO: 1108115 - DNA, 15 bp, Homo sapiens
cacagctatggggct

SEQ ID NO: 1108116 - DNA, 15 bp, Homo sapiens
acacagctatggggc

SEQ ID NO: 1108117 - DNA, 15 bp, Homo sapiens
aacacagctatgggg

SEQ ID NO: 1108118 - DNA, 15 bp, Homo sapiens
caacacagctatggg

SEQ ID NO: 1108119 - DNA, 15 bp, Homo sapiens
gcaacacagctatgg

SEQ ID NO: 1108120 - DNA, 15 bp, Homo sapiens
ggcaacacagctatg

SEQ ID NO: 1108121 - DNA, 15 bp, Homo sapiens
aggcaacacagctat

SEQ ID NO: 1108122 - DNA, 15 bp, Homo sapiens
aaggcaacacagcta

SEQ ID NO: 1108123 - DNA, 15 bp, Homo sapiens
aaaggcaacacagct

SEQ ID NO: 1108124 - DNA, 15 bp, Homo sapiens
aaaaggcaacacagc

SEQ ID NO: 1108125 - DNA, 15 bp, Homo sapiens
aaaaaggcaacacag

SEQ ID NO: 1108126 - DNA, 15 bp, Homo sapiens
caaaaaggcaacaca

SEQ ID NO: 1108127 - DNA, 15 bp, Homo sapiens
ccaaaaaggcaacac

SEQ ID NO: 1108128 - DNA, 15 bp, Homo sapiens
accaaaaaggcaaca

SEQ ID NO: 1108129 - DNA, 15 bp, Homo sapiens
aaccaaaaaggcaac

SEQ ID NO: 1108130 - DNA, 15 bp, Homo sapiens
aaaccaaaaaggcaa

SEQ ID NO: 1108131 - DNA, 15 bp, Homo sapiens
aaaaccaaaaaggca

SEQ ID NO: 1108132 - DNA, 15 bp, Homo sapiens
caaaaccaaaaaggc

SEQ ID NO: 1108133 - DNA, 15 bp, Homo sapiens
acaaaaccaaaaagg

SEQ ID NO: 1108134 - DNA, 15 bp, Homo sapiens
cacaaaaccaaaaag

SEQ ID NO: 1108135 - DNA, 15 bp, Homo sapiens
acacaaaaccaaaaa

SEQ ID NO: 1108136 - DNA, 15 bp, Homo sapiens
cacacaaaaccaaaa

SEQ ID NO: 1108137 - DNA, 15 bp, Homo sapiens
tcacacaaaaccaaa

SEQ ID NO: 1108138 - DNA, 15 bp, Homo sapiens
ttcacacaaaaccaa

SEQ ID NO: 1108139 - DNA, 15 bp, Homo sapiens
cttcacacaaaacca

SEQ ID NO: 1108140 - DNA, 15 bp, Homo sapiens
gcttcacacaaaacc

SEQ ID NO: 1108141 - DNA, 15 bp, Homo sapiens
tgcttcacacaaaac

SEQ ID NO: 1108142 - DNA, 15 bp, Homo sapiens
ttgcttcacacaaaa

SEQ ID NO: 1108143 - DNA, 15 bp, Homo sapiens
tttgcttcacacaaa

SEQ ID NO: 1108144 - DNA, 15 bp, Homo sapiens
ttttgcttcacacaa

SEQ ID NO: 1108145 - DNA, 15 bp, Homo sapiens
attttgcttcacaca

SEQ ID NO: 1108146 - DNA, 15 bp, Homo sapiens
aattttgcttcacac

SEQ ID NO: 1108147 - DNA, 15 bp, Homo sapiens
aaattttgcttcaca

SEQ ID NO: 1108148 - DNA, 15 bp, Homo sapiens
aaaattttgcttcac

SEQ ID NO: 1108149 - DNA, 15 bp, Homo sapiens
aaaaattttgcttca

SEQ ID NO: 1108150 - DNA, 15 bp, Homo sapiens
aaaaaattttgcttc

SEQ ID NO: 1108151 - DNA, 15 bp, Homo sapiens
aaaaaaattttgctt

SEQ ID NO: 1108152 - DNA, 15 bp, Homo sapiens
gaaaaaaattttgct

SEQ ID NO: 1108153 - DNA, 15 bp, Homo sapiens
ggaaaaaaattttgc

SEQ ID NO: 1108154 - DNA, 15 bp, Homo sapiens
aggaaaaaaattttg

SEQ ID NO: 1108155 - DNA, 15 bp, Homo sapiens
caggaaaaaaatttt

SEQ ID NO: 1108156 - DNA, 15 bp, Homo sapiens
ccaggaaaaaaattt

SEQ ID NO: 1108157 - DNA, 15 bp, Homo sapiens
cccaggaaaaaaatt

SEQ ID NO: 1108158 - DNA, 15 bp, Homo sapiens
acccaggaaaaaaat

SEQ ID NO: 1108159 - DNA, 15 bp, Homo sapiens
gacccaggaaaaaaa

SEQ ID NO: 1108160 - DNA, 15 bp, Homo sapiens
ggacccaggaaaaaa

SEQ ID NO: 1108161 - DNA, 15 bp, Homo sapiens
aggacccaggaaaaa

SEQ ID NO: 1108162 - DNA, 15 bp, Homo sapiens
taggacccaggaaaa

SEQ ID NO: 1108163 - DNA, 15 bp, Homo sapiens
ttaggacccaggaaa

SEQ ID NO: 1108164 - DNA, 15 bp, Homo sapiens
attaggacccaggaa

SEQ ID NO: 1108165 - DNA, 15 bp, Homo sapiens
aattaggacccagga

SEQ ID NO: 1108166 - DNA, 15 bp, Homo sapiens
caattaggacccagg

SEQ ID NO: 1108167 - DNA, 15 bp, Homo sapiens
ccaattaggacccag

SEQ ID NO: 1108168 - DNA, 15 bp, Homo sapiens
accaattaggaccca

SEQ ID NO: 1108169 - DNA, 15 bp, Homo sapiens
caccaattaggaccc

SEQ ID NO: 1108170 - DNA, 15 bp, Homo sapiens
gcaccaattaggacc

SEQ ID NO: 1108171 - DNA, 15 bp, Homo sapiens
ggcaccaattaggac

SEQ ID NO: 1108172 - DNA, 15 bp, Homo sapiens
tggcaccaattagga

SEQ ID NO: 1108173 - DNA, 15 bp, Homo sapiens
ttggcaccaattagg

SEQ ID NO: 1108174 - DNA, 15 bp, Homo sapiens
tttggcaccaattag

SEQ ID NO: 1108175 - DNA, 15 bp, Homo sapiens
atttggcaccaatta

SEQ ID NO: 1108176 - DNA, 15 bp, Homo sapiens
gatttggcaccaatt

SEQ ID NO: 1108177 - DNA, 15 bp, Homo sapiens
ggatttggcaccaat

SEQ ID NO: 1108178 - DNA, 15 bp, Homo sapiens
tggatttggcaccaa

SEQ ID NO: 1108179 - DNA, 15 bp, Homo sapiens
ttggatttggcacca

SEQ ID NO: 1108180 - DNA, 15 bp, Homo sapiens
attggatttggcacc

SEQ ID NO: 1108181 - DNA, 15 bp, Homo sapiens
tattggatttggcac

SEQ ID NO: 1108182 - DNA, 15 bp, Homo sapiens
atattggatttggca

SEQ ID NO: 1108183 - DNA, 15 bp, Homo sapiens
aatattggatttggc

SEQ ID NO: 1108184 - DNA, 15 bp, Homo sapiens
taatattggatttgg

SEQ ID NO: 1108185 - DNA, 15 bp, Homo sapiens
gtaatattggatttg

SEQ ID NO: 1108186 - DNA, 15 bp, Homo sapiens
agtaatattggattt

SEQ ID NO: 1108187 - DNA, 15 bp, Homo sapiens
tagtaatattggatt

SEQ ID NO: 1108188 - DNA, 15 bp, Homo sapiens
gtagtaatattggat

SEQ ID NO: 1108189 - DNA, 15 bp, Homo sapiens
tgtagtaatattgga

SEQ ID NO: 1108190 - DNA, 15 bp, Homo sapiens
atgtagtaatattgg

SEQ ID NO: 1108191 - DNA, 15 bp, Homo sapiens
aatgtagtaatattg

SEQ ID NO: 1108192 - DNA, 15 bp, Homo sapiens
aaatgtagtaatatt

SEQ ID NO: 1108193 - DNA, 15 bp, Homo sapiens
caaatgtagtaatat

SEQ ID NO: 1108194 - DNA, 15 bp, Homo sapiens
gcaaatgtagtaata

SEQ ID NO: 1108195 - DNA, 15 bp, Homo sapiens
cgcaaatgtagtaat

SEQ ID NO: 1108196 - DNA, 15 bp, Homo sapiens
acgcaaatgtagtaa

SEQ ID NO: 1108197 - DNA, 15 bp, Homo sapiens
gacgcaaatgtagta

SEQ ID NO: 1108198 - DNA, 15 bp, Homo sapiens
tgacgcaaatgtagt

SEQ ID NO: 1108199 - DNA, 15 bp, Homo sapiens
ttgacgcaaatgtag

SEQ ID NO: 1108200 - DNA, 15 bp, Homo sapiens
gttgacgcaaatgta

SEQ ID NO: 1108201 - DNA, 15 bp, Homo sapiens
agttgacgcaaatgt

SEQ ID NO: 1108202 - DNA, 15 bp, Homo sapiens
gagttgacgcaaatg

SEQ ID NO: 1108203 - DNA, 15 bp, Homo sapiens
tgagttgacgcaaat

SEQ ID NO: 1108204 - DNA, 15 bp, Homo sapiens
ctgagttgacgcaaa

SEQ ID NO: 1108205 - DNA, 15 bp, Homo sapiens
tctgagttgacgcaa

SEQ ID NO: 1108206 - DNA, 15 bp, Homo sapiens
ttctgagttgacgca

SEQ ID NO: 1108207 - DNA, 15 bp, Homo sapiens
cttctgagttgacgc

SEQ ID NO: 1108208 - DNA, 15 bp, Homo sapiens
acttctgagttgacg

SEQ ID NO: 1108209 - DNA, 15 bp, Homo sapiens
gacttctgagttgac

SEQ ID NO: 1108210 - DNA, 15 bp, Homo sapiens
tgacttctgagttga

SEQ ID NO: 1108211 - DNA, 15 bp, Homo sapiens
ttgacttctgagttg

SEQ ID NO: 1108212 - DNA, 15 bp, Homo sapiens
gttgacttctgagtt

SEQ ID NO: 1108213 - DNA, 15 bp, Homo sapiens
ggttgacttctgagt

SEQ ID NO: 1108214 - DNA, 15 bp, Homo sapiens
gggttgacttctgag

SEQ ID NO: 1108215 - DNA, 15 bp, Homo sapiens
tgggttgacttctga

SEQ ID NO: 1108216 - DNA, 15 bp, Homo sapiens
atgggttgacttctg

SEQ ID NO: 1108217 - DNA, 15 bp, Homo sapiens
aatgggttgacttct

SEQ ID NO: 1108218 - DNA, 15 bp, Homo sapiens
gaatgggttgacttc

SEQ ID NO: 1108219 - DNA, 15 bp, Homo sapiens
tgaatgggttgactt

SEQ ID NO: 1108220 - DNA, 15 bp, Homo sapiens
ctgaatgggttgact

SEQ ID NO: 1108221 - DNA, 15 bp, Homo sapiens
actgaatgggttgac

SEQ ID NO: 1108222 - DNA, 15 bp, Homo sapiens
aactgaatgggttga

SEQ ID NO: 1108223 - DNA, 15 bp, Homo sapiens
aaactgaatgggttg

SEQ ID NO: 1108224 - DNA, 15 bp, Homo sapiens
caaactgaatgggtt

SEQ ID NO: 1108225 - DNA, 15 bp, Homo sapiens
gcaaactgaatgggt

SEQ ID NO: 1108226 - DNA, 15 bp, Homo sapiens
tgcaaactgaatggg

SEQ ID NO: 1108227 - DNA, 15 bp, Homo sapiens
atgcaaactgaatgg

SEQ ID NO: 1108228 - DNA, 15 bp, Homo sapiens
tatgcaaactgaatg

SEQ ID NO: 1108229 - DNA, 15 bp, Homo sapiens
ctatgcaaactgaat

SEQ ID NO: 1108230 - DNA, 15 bp, Homo sapiens
tctatgcaaactgaa

SEQ ID NO: 1108231 - DNA, 15 bp, Homo sapiens
ctctatgcaaactga

SEQ ID NO: 1108232 - DNA, 15 bp, Homo sapiens
cctctatgcaaactg

SEQ ID NO: 1108233 - DNA, 15 bp, Homo sapiens
tcctctatgcaaact

SEQ ID NO: 1108234 - DNA, 15 bp, Homo sapiens
ttcctctatgcaaac

SEQ ID NO: 1108235 - DNA, 15 bp, Homo sapiens
tttcctctatgcaaa

SEQ ID NO: 1108236 - DNA, 15 bp, Homo sapiens
gtttcctctatgcaa

SEQ ID NO: 1108237 - DNA, 15 bp, Homo sapiens
tgtttcctctatgca

SEQ ID NO: 1108238 - DNA, 15 bp, Homo sapiens
atgtttcctctatgc

SEQ ID NO: 1108239 - DNA, 15 bp, Homo sapiens
gatgtttcctctatg

SEQ ID NO: 1108240 - DNA, 15 bp, Homo sapiens
agatgtttcctctat

SEQ ID NO: 1108241 - DNA, 15 bp, Homo sapiens
tagatgtttcctcta

SEQ ID NO: 1108242 - DNA, 15 bp, Homo sapiens
ctagatgtttcctct

SEQ ID NO: 1108243 - DNA, 15 bp, Homo sapiens
tctagatgtttcctc

SEQ ID NO: 1108244 - DNA, 15 bp, Homo sapiens
ttctagatgtttcct

SEQ ID NO: 1108245 - DNA, 15 bp, Homo sapiens
tttctagatgtttcc

SEQ ID NO: 1108246 - DNA, 15 bp, Homo sapiens
atttctagatgtttc

SEQ ID NO: 1108247 - DNA, 15 bp, Homo sapiens
gatttctagatgttt

SEQ ID NO: 1108248 - DNA, 15 bp, Homo sapiens
agatttctagatgtt

SEQ ID NO: 1108249 - DNA, 15 bp, Homo sapiens
aagatttctagatgt

SEQ ID NO: 1108250 - DNA, 15 bp, Homo sapiens
caagatttctagatg

SEQ ID NO: 1108251 - DNA, 15 bp, Homo sapiens
gcaagatttctagat

SEQ ID NO: 1108252 - DNA, 15 bp, Homo sapiens
agcaagatttctaga

SEQ ID NO: 1108253 - DNA, 15 bp, Homo sapiens
aagcaagatttctag

SEQ ID NO: 1108254 - DNA, 15 bp, Homo sapiens
aaagcaagatttcta

SEQ ID NO: 1108255 - DNA, 15 bp, Homo sapiens
aaaagcaagatttct

SEQ ID NO: 1108256 - DNA, 15 bp, Homo sapiens
gaaaagcaagatttc

SEQ ID NO: 1108257 - DNA, 15 bp, Homo sapiens
agaaaagcaagattt

SEQ ID NO: 1108258 - DNA, 15 bp, Homo sapiens
aagaaaagcaagatt

SEQ ID NO: 1108259 - DNA, 15 bp, Homo sapiens
aaagaaaagcaagat

SEQ ID NO: 1108260 - DNA, 15 bp, Homo sapiens
caaagaaaagcaaga

SEQ ID NO: 1108261 - DNA, 15 bp, Homo sapiens
gcaaagaaaagcaag

SEQ ID NO: 1108262 - DNA, 15 bp, Homo sapiens
agcaaagaaaagcaa

SEQ ID NO: 1108263 - DNA, 15 bp, Homo sapiens
cagcaaagaaaagca

SEQ ID NO: 1108264 - DNA, 15 bp, Homo sapiens
tcagcaaagaaaagc

SEQ ID NO: 1108265 - DNA, 15 bp, Homo sapiens
gtcagcaaagaaaag

SEQ ID NO: 1108266 - DNA, 15 bp, Homo sapiens
ggtcagcaaagaaaa

SEQ ID NO: 1108267 - DNA, 15 bp, Homo sapiens
aggtcagcaaagaaa

SEQ ID NO: 1108268 - DNA, 15 bp, Homo sapiens
aaggtcagcaaagaa

SEQ ID NO: 1108269 - DNA, 15 bp, Homo sapiens
caaggtcagcaaaga

SEQ ID NO: 1108270 - DNA, 15 bp, Homo sapiens
tcaaggtcagcaaag

SEQ ID NO: 1108271 - DNA, 15 bp, Homo sapiens
atcaaggtcagcaaa

SEQ ID NO: 1108272 - DNA, 15 bp, Homo sapiens
tatcaaggtcagcaa

SEQ ID NO: 1108273 - DNA, 15 bp, Homo sapiens
atatcaaggtcagca

SEQ ID NO: 1108274 - DNA, 15 bp, Homo sapiens
tatatcaaggtcagc

SEQ ID NO: 1108275 - DNA, 15 bp, Homo sapiens
atatatcaaggtcag

SEQ ID NO: 1108276 - DNA, 15 bp, Homo sapiens
aatatatcaaggtca

SEQ ID NO: 1108277 - DNA, 15 bp, Homo sapiens
aaatatatcaaggtc

SEQ ID NO: 1108278 - DNA, 15 bp, Homo sapiens
caaatatatcaaggt

SEQ ID NO: 1108279 - DNA, 15 bp, Homo sapiens
tcaaatatatcaagg

SEQ ID NO: 1108280 - DNA, 15 bp, Homo sapiens
ctcaaatatatcaag

SEQ ID NO: 1108281 - DNA, 15 bp, Homo sapiens
tctcaaatatatcaa

SEQ ID NO: 1108282 - DNA, 15 bp, Homo sapiens
atctcaaatatatca

SEQ ID NO: 1108283 - DNA, 15 bp, Homo sapiens
aatctcaaatatatc

SEQ ID NO: 1108284 - DNA, 15 bp, Homo sapiens
aaatctcaaatatat

SEQ ID NO: 1108285 - DNA, 15 bp, Homo sapiens
caaatctcaaatata

SEQ ID NO: 1108286 - DNA, 15 bp, Homo sapiens
tcaaatctcaaatat

SEQ ID NO: 1108287 - DNA, 15 bp, Homo sapiens
ttcaaatctcaaata

SEQ ID NO: 1108288 - DNA, 15 bp, Homo sapiens
gttcaaatctcaaat

SEQ ID NO: 1108289 - DNA, 15 bp, Homo sapiens
tgttcaaatctcaaa

SEQ ID NO: 1108290 - DNA, 15 bp, Homo sapiens
atgttcaaatctcaa

SEQ ID NO: 1108291 - DNA, 15 bp, Homo sapiens
tatgttcaaatctca

SEQ ID NO: 1108292 - DNA, 15 bp, Homo sapiens
atatgttcaaatctc

SEQ ID NO: 1108293 - DNA, 15 bp, Homo sapiens
tatatgttcaaatct

SEQ ID NO: 1108294 - DNA, 15 bp, Homo sapiens
ttatatgttcaaatc

SEQ ID NO: 1108295 - DNA, 15 bp, Homo sapiens
attatatgttcaaat

SEQ ID NO: 1108296 - DNA, 15 bp, Homo sapiens
tattatatgttcaaa

SEQ ID NO: 1108297 - DNA, 15 bp, Homo sapiens
ttattatatgttcaa

SEQ ID NO: 1108298 - DNA, 15 bp, Homo sapiens
gttattatatgttca

SEQ ID NO: 1108299 - DNA, 15 bp, Homo sapiens
tgttattatatgttc

SEQ ID NO: 1108300 - DNA, 15 bp, Homo sapiens
atgttattatatgtt

SEQ ID NO: 1108301 - DNA, 15 bp, Homo sapiens
tatgttattatatgt

SEQ ID NO: 1108302 - DNA, 15 bp, Homo sapiens
atatgttattatatg

SEQ ID NO: 1108303 - DNA, 15 bp, Homo sapiens
tatatgttattatat

SEQ ID NO: 1108304 - DNA, 15 bp, Homo sapiens
ttatatgttattata

SEQ ID NO: 1108305 - DNA, 15 bp, Homo sapiens
tttatatgttattat

SEQ ID NO: 1108306 - DNA, 15 bp, Homo sapiens
ttttatatgttatta

SEQ ID NO: 1108307 - DNA, 15 bp, Homo sapiens
attttatatgttatt

SEQ ID NO: 1108308 - DNA, 15 bp, Homo sapiens
aattttatatgttat

SEQ ID NO: 1108309 - DNA, 15 bp, Homo sapiens
taattttatatgtta

SEQ ID NO: 1108310 - DNA, 15 bp, Homo sapiens
ataattttatatgtt

SEQ ID NO: 1108311 - DNA, 15 bp, Homo sapiens
tataattttatatgt

SEQ ID NO: 1108312 - DNA, 15 bp, Homo sapiens
atataattttatatg

SEQ ID NO: 1108313 - DNA, 15 bp, Homo sapiens
catataattttatat

SEQ ID NO: 1108314 - DNA, 15 bp, Homo sapiens
acatataattttata

SEQ ID NO: 1108315 - DNA, 15 bp, Homo sapiens
aacatataattttat

SEQ ID NO: 1108316 - DNA, 15 bp, Homo sapiens
taacatataatttta

SEQ ID NO: 1108317 - DNA, 15 bp, Homo sapiens
ataacatataatttt

SEQ ID NO: 1108318 - DNA, 15 bp, Homo sapiens
tataacatataattt

SEQ ID NO: 1108319 - DNA, 15 bp, Homo sapiens
ttataacatataatt

SEQ ID NO: 1108320 - DNA, 15 bp, Homo sapiens
attataacatataat

SEQ ID NO: 1108321 - DNA, 15 bp, Homo sapiens
aattataacatataa

SEQ ID NO: 1108322 - DNA, 15 bp, Homo sapiens
aaattataacatata

SEQ ID NO: 1108323 - DNA, 15 bp, Homo sapiens
aaaattataacatat

SEQ ID NO: 1108324 - DNA, 15 bp, Homo sapiens
caaaattataacata

SEQ ID NO: 1108325 - DNA, 15 bp, Homo sapiens
ccaaaattataacat

SEQ ID NO: 1108326 - DNA, 15 bp, Homo sapiens
cccaaaattataaca

SEQ ID NO: 1108327 - DNA, 15 bp, Homo sapiens
acccaaaattataac

SEQ ID NO: 1108328 - DNA, 15 bp, Homo sapiens
aacccaaaattataa

SEQ ID NO: 1108329 - DNA, 15 bp, Homo sapiens
aaacccaaaattata

SEQ ID NO: 1108330 - DNA, 15 bp, Homo sapiens
aaaacccaaaattat

SEQ ID NO: 1108331 - DNA, 15 bp, Homo sapiens
taaaacccaaaatta

SEQ ID NO: 1108332 - DNA, 15 bp, Homo sapiens
ataaaacccaaaatt

SEQ ID NO: 1108333 - DNA, 15 bp, Homo sapiens
cataaaacccaaaat

SEQ ID NO: 1108334 - DNA, 15 bp, Homo sapiens
ccataaaacccaaaa

SEQ ID NO: 1108335 - DNA, 15 bp, Homo sapiens
cccataaaacccaaa

SEQ ID NO: 1108336 - DNA, 15 bp, Homo sapiens
gcccataaaacccaa

SEQ ID NO: 1108337 - DNA, 15 bp, Homo sapiens
agcccataaaaccca

SEQ ID NO: 1108338 - DNA, 15 bp, Homo sapiens
tagcccataaaaccc

SEQ ID NO: 1108339 - DNA, 15 bp, Homo sapiens
ttagcccataaaacc

SEQ ID NO: 1108340 - DNA, 15 bp, Homo sapiens
cttagcccataaaac

SEQ ID NO: 1108341 - DNA, 15 bp, Homo sapiens
acttagcccataaaa

SEQ ID NO: 1108342 - DNA, 15 bp, Homo sapiens
gacttagcccataaa

SEQ ID NO: 1108343 - DNA, 15 bp, Homo sapiens
tgacttagcccataa

SEQ ID NO: 1108344 - DNA, 15 bp, Homo sapiens
atgacttagcccata

SEQ ID NO: 1108345 - DNA, 15 bp, Homo sapiens
tatgacttagcccat

SEQ ID NO: 1108346 - DNA, 15 bp, Homo sapiens
ttatgacttagccca

SEQ ID NO: 1108347 - DNA, 15 bp, Homo sapiens
tttatgacttagccc

SEQ ID NO: 1108348 - DNA, 15 bp, Homo sapiens
gtttatgacttagcc

SEQ ID NO: 1108349 - DNA, 15 bp, Homo sapiens
ggtttatgacttagc

SEQ ID NO: 1108350 - DNA, 15 bp, Homo sapiens
tggtttatgacttag

SEQ ID NO: 1108351 - DNA, 15 bp, Homo sapiens
atggtttatgactta

SEQ ID NO: 1108352 - DNA, 15 bp, Homo sapiens
gatggtttatgactt

SEQ ID NO: 1108353 - DNA, 15 bp, Homo sapiens
agatggtttatgact

SEQ ID NO: 1108354 - DNA, 15 bp, Homo sapiens
aagatggtttatgac

SEQ ID NO: 1108355 - DNA, 15 bp, Homo sapiens
taagatggtttatga

SEQ ID NO: 1108356 - DNA, 15 bp, Homo sapiens
ataagatggtttatg

SEQ ID NO: 1108357 - DNA, 15 bp, Homo sapiens
tataagatggtttat

SEQ ID NO: 1108358 - DNA, 15 bp, Homo sapiens
gtataagatggttta

SEQ ID NO: 1108359 - DNA, 15 bp, Homo sapiens
tgtataagatggttt

SEQ ID NO: 1108360 - DNA, 15 bp, Homo sapiens
atgtataagatggtt

SEQ ID NO: 1108361 - DNA, 15 bp, Homo sapiens
tatgtataagatggt

SEQ ID NO: 1108362 - DNA, 15 bp, Homo sapiens
ttatgtataagatgg

SEQ ID NO: 1108363 - DNA, 15 bp, Homo sapiens
tttatgtataagatg

SEQ ID NO: 1108364 - DNA, 15 bp, Homo sapiens
atttatgtataagat

SEQ ID NO: 1108365 - DNA, 15 bp, Homo sapiens
aatttatgtataaga

SEQ ID NO: 1108366 - DNA, 15 bp, Homo sapiens
gaatttatgtataag

SEQ ID NO: 1108367 - DNA, 15 bp, Homo sapiens
ggaatttatgtataa

SEQ ID NO: 1108368 - DNA, 15 bp, Homo sapiens
tggaatttatgtata

SEQ ID NO: 1108369 - DNA, 15 bp, Homo sapiens
ttggaatttatgtat

SEQ ID NO: 1108370 - DNA, 15 bp, Homo sapiens
attggaatttatgta

SEQ ID NO: 1108371 - DNA, 15 bp, Homo sapiens
tattggaatttatgt

SEQ ID NO: 1108372 - DNA, 15 bp, Homo sapiens
ctattggaatttatg

SEQ ID NO: 1108373 - DNA, 15 bp, Homo sapiens
tctattggaatttat

SEQ ID NO: 1108374 - DNA, 15 bp, Homo sapiens
ctctattggaattta

SEQ ID NO: 1108375 - DNA, 15 bp, Homo sapiens
tctctattggaattt

SEQ ID NO: 1108376 - DNA, 15 bp, Homo sapiens
ttctctattggaatt

SEQ ID NO: 1108377 - DNA, 15 bp, Homo sapiens
tttctctattggaat

SEQ ID NO: 1108378 - DNA, 15 bp, Homo sapiens
ttttctctattggaa

SEQ ID NO: 1108379 - DNA, 15 bp, Homo sapiens
tttttctctattgga

SEQ ID NO: 1108380 - DNA, 15 bp, Homo sapiens
ttttttctctattgg

SEQ ID NO: 1108381 - DNA, 15 bp, Homo sapiens
attttttctctattg

SEQ ID NO: 1108382 - DNA, 15 bp, Homo sapiens
cattttttctctatt

SEQ ID NO: 1108383 - DNA, 15 bp, Homo sapiens
ccattttttctctat

SEQ ID NO: 1108384 - DNA, 15 bp, Homo sapiens
accattttttctcta

SEQ ID NO: 1108385 - DNA, 15 bp, Homo sapiens
caccattttttctct

SEQ ID NO: 1108386 - DNA, 15 bp, Homo sapiens
ccaccattttttctc

SEQ ID NO: 1108387 - DNA, 15 bp, Homo sapiens
tccaccattttttct

SEQ ID NO: 1108388 - DNA, 15 bp, Homo sapiens
atccaccattttttc

SEQ ID NO: 1108389 - DNA, 15 bp, Homo sapiens
catccaccatttttt

SEQ ID NO: 1108390 - DNA, 15 bp, Homo sapiens
gcatccaccattttt

SEQ ID NO: 1108391 - DNA, 15 bp, Homo sapiens
agcatccaccatttt

SEQ ID NO: 1108392 - DNA, 15 bp, Homo sapiens
cagcatccaccattt

SEQ ID NO: 1108393 - DNA, 15 bp, Homo sapiens
tcagcatccaccatt

SEQ ID NO: 1108394 - DNA, 15 bp, Homo sapiens
ttcagcatccaccat

SEQ ID NO: 1108395 - DNA, 15 bp, Homo sapiens
attcagcatccacca

SEQ ID NO: 1108396 - DNA, 15 bp, Homo sapiens
aattcagcatccacc

SEQ ID NO: 1108397 - DNA, 15 bp, Homo sapiens
aaattcagcatccac

SEQ ID NO: 1108398 - DNA, 15 bp, Homo sapiens
aaaattcagcatcca

SEQ ID NO: 1108399 - DNA, 15 bp, Homo sapiens
taaaattcagcatcc

SEQ ID NO: 1108400 - DNA, 15 bp, Homo sapiens
ttaaaattcagcatc

SEQ ID NO: 1108401 - DNA, 15 bp, Homo sapiens
attaaaattcagcat

SEQ ID NO: 1108402 - DNA, 15 bp, Homo sapiens
tattaaaattcagca

SEQ ID NO: 1108403 - DNA, 15 bp, Homo sapiens
ttattaaaattcagc

SEQ ID NO: 1108404 - DNA, 15 bp, Homo sapiens
tttattaaaattcag

SEQ ID NO: 1108405 - DNA, 15 bp, Homo sapiens
ttttattaaaattca

SEQ ID NO: 1108406 - DNA, 15 bp, Homo sapiens
tttttattaaaattc

SEQ ID NO: 1108407 - DNA, 15 bp, Homo sapiens
ttttttattaaaatt

SEQ ID NO: 1108408 - DNA, 15 bp, Homo sapiens
attttttattaaaat

SEQ ID NO: 1108409 - DNA, 15 bp, Homo sapiens
aattttttattaaaa

SEQ ID NO: 1108410 - DNA, 15 bp, Homo sapiens
aaattttttattaaa

SEQ ID NO: 1108411 - DNA, 15 bp, Homo sapiens
taaattttttattaa

SEQ ID NO: 1108412 - DNA, 15 bp, Homo sapiens
ataaattttttatta

SEQ ID NO: 1108413 - DNA, 15 bp, Homo sapiens
cataaattttttatt

SEQ ID NO: 1108414 - DNA, 15 bp, Homo sapiens
tcataaattttttat

SEQ ID NO: 1108415 - DNA, 15 bp, Homo sapiens
gtcataaatttttta

SEQ ID NO: 1108416 - DNA, 15 bp, Homo sapiens
tgtcataaatttttt

SEQ ID NO: 1108417 - DNA, 15 bp, Homo sapiens
ctgtcataaattttt

SEQ ID NO: 1108418 - DNA, 15 bp, Homo sapiens
tctgtcataaatttt

SEQ ID NO: 1108419 - DNA, 15 bp, Homo sapiens
ctctgtcataaattt

SEQ ID NO: 1108420 - DNA, 15 bp, Homo sapiens
tctctgtcataaatt

SEQ ID NO: 1108421 - DNA, 15 bp, Homo sapiens
ttctctgtcataaat

SEQ ID NO: 1108422 - DNA, 15 bp, Homo sapiens
tttctctgtcataaa

SEQ ID NO: 1108423 - DNA, 15 bp, Homo sapiens
gtttctctgtcataa

SEQ ID NO: 1108424 - DNA, 15 bp, Homo sapiens
ggtttctctgtcata

SEQ ID NO: 1108425 - DNA, 15 bp, Homo sapiens
aggtttctctgtcat

SEQ ID NO: 1108426 - DNA, 15 bp, Homo sapiens
taggtttctctgtca

SEQ ID NO: 1108427 - DNA, 15 bp, Homo sapiens
ttaggtttctctgtc

SEQ ID NO: 1108428 - DNA, 15 bp, Homo sapiens
tttaggtttctctgt

SEQ ID NO: 1108429 - DNA, 15 bp, Homo sapiens
ttttaggtttctctg

SEQ ID NO: 1108430 - DNA, 15 bp, Homo sapiens
attttaggtttctct

SEQ ID NO: 1108431 - DNA, 15 bp, Homo sapiens
aattttaggtttctc

SEQ ID NO: 1108432 - DNA, 15 bp, Homo sapiens
caattttaggtttct

SEQ ID NO: 1108433 - DNA, 15 bp, Homo sapiens
tcaattttaggtttc

SEQ ID NO: 1108434 - DNA, 15 bp, Homo sapiens
ctcaattttaggttt

SEQ ID NO: 1108435 - DNA, 15 bp, Homo sapiens
tctcaattttaggtt

SEQ ID NO: 1108436 - DNA, 15 bp, Homo sapiens
ttctcaattttaggt

SEQ ID NO: 1108437 - DNA, 15 bp, Homo sapiens
tttctcaattttagg

SEQ ID NO: 1108438 - DNA, 15 bp, Homo sapiens
ttttctcaattttag

SEQ ID NO: 1108439 - DNA, 15 bp, Homo sapiens
attttctcaatttta

SEQ ID NO: 1108440 - DNA, 15 bp, Homo sapiens
aattttctcaatttt

SEQ ID NO: 1108441 - DNA, 15 bp, Homo sapiens
aaattttctcaattt

SEQ ID NO: 1108442 - DNA, 15 bp, Homo sapiens
caaattttctcaatt

SEQ ID NO: 1108443 - DNA, 15 bp, Homo sapiens
tcaaattttctcaat

SEQ ID NO: 1108444 - DNA, 15 bp, Homo sapiens
atcaaattttctcaa

SEQ ID NO: 1108445 - DNA, 15 bp, Homo sapiens
gatcaaattttctca

SEQ ID NO: 1108446 - DNA, 15 bp, Homo sapiens
agatcaaattttctc

SEQ ID NO: 1108447 - DNA, 15 bp, Homo sapiens
aagatcaaattttct

SEQ ID NO: 1108448 - DNA, 15 bp, Homo sapiens
taagatcaaattttc

SEQ ID NO: 1108449 - DNA, 15 bp, Homo sapiens
gtaagatcaaatttt

SEQ ID NO: 1108450 - DNA, 15 bp, Homo sapiens
tgtaagatcaaattt

SEQ ID NO: 1108451 - DNA, 15 bp, Homo sapiens
ctgtaagatcaaatt

SEQ ID NO: 1108452 - DNA, 15 bp, Homo sapiens
actgtaagatcaaat

SEQ ID NO: 1108453 - DNA, 15 bp, Homo sapiens
aactgtaagatcaaa

SEQ ID NO: 1108454 - DNA, 15 bp, Homo sapiens
aaactgtaagatcaa

SEQ ID NO: 1108455 - DNA, 15 bp, Homo sapiens
taaactgtaagatca

SEQ ID NO: 1108456 - DNA, 15 bp, Homo sapiens
ttaaactgtaagatc

SEQ ID NO: 1108457 - DNA, 15 bp, Homo sapiens
attaaactgtaagat

SEQ ID NO: 1108458 - DNA, 15 bp, Homo sapiens
aattaaactgtaaga

SEQ ID NO: 1108459 - DNA, 15 bp, Homo sapiens
aaattaaactgtaag

SEQ ID NO: 1108460 - DNA, 15 bp, Homo sapiens
gaaattaaactgtaa

SEQ ID NO: 1108461 - DNA, 15 bp, Homo sapiens
agaaattaaactgta

SEQ ID NO: 1108462 - DNA, 15 bp, Homo sapiens
cagaaattaaactgt

SEQ ID NO: 1108463 - DNA, 15 bp, Homo sapiens
gcagaaattaaactg

SEQ ID NO: 1108464 - DNA, 15 bp, Homo sapiens
tgcagaaattaaact

SEQ ID NO: 1108465 - DNA, 15 bp, Homo sapiens
ttgcagaaattaaac

SEQ ID NO: 1108466 - DNA, 15 bp, Homo sapiens
tttgcagaaattaaa

SEQ ID NO: 1108467 - DNA, 15 bp, Homo sapiens
atttgcagaaattaa

SEQ ID NO: 1108468 - DNA, 15 bp, Homo sapiens
aatttgcagaaatta

SEQ ID NO: 1108469 - DNA, 15 bp, Homo sapiens
taatttgcagaaatt

SEQ ID NO: 1108470 - DNA, 15 bp, Homo sapiens
ttaatttgcagaaat

SEQ ID NO: 1108471 - DNA, 15 bp, Homo sapiens
cttaatttgcagaaa

SEQ ID NO: 1108472 - DNA, 15 bp, Homo sapiens
tcttaatttgcagaa

SEQ ID NO: 1108473 - DNA, 15 bp, Homo sapiens
ttcttaatttgcaga

SEQ ID NO: 1108474 - DNA, 15 bp, Homo sapiens
cttcttaatttgcag

SEQ ID NO: 1108475 - DNA, 15 bp, Homo sapiens
gcttcttaatttgca

SEQ ID NO: 1108476 - DNA, 15 bp, Homo sapiens
tgcttcttaatttgc

SEQ ID NO: 1108477 - DNA, 15 bp, Homo sapiens
gtgcttcttaatttg

SEQ ID NO: 1108478 - DNA, 15 bp, Homo sapiens
agtgcttcttaattt

SEQ ID NO: 1108479 - DNA, 15 bp, Homo sapiens
cagtgcttcttaatt

SEQ ID NO: 1108480 - DNA, 15 bp, Homo sapiens
ccagtgcttcttaat

SEQ ID NO: 1108481 - DNA, 15 bp, Homo sapiens
gccagtgcttcttaa

SEQ ID NO: 1108482 - DNA, 15 bp, Homo sapiens
ggccagtgcttctta

SEQ ID NO: 1108483 - DNA, 15 bp, Homo sapiens
gggccagtgcttctt

SEQ ID NO: 1108484 - DNA, 15 bp, Homo sapiens
tgggccagtgcttct

SEQ ID NO: 1108485 - DNA, 15 bp, Homo sapiens
atgggccagtgcttc

SEQ ID NO: 1108486 - DNA, 15 bp, Homo sapiens
gatgggccagtgctt

SEQ ID NO: 1108487 - DNA, 15 bp, Homo sapiens
tgatgggccagtgct

SEQ ID NO: 1108488 - DNA, 15 bp, Homo sapiens
ttgatgggccagtgc

SEQ ID NO: 1108489 - DNA, 15 bp, Homo sapiens
attgatgggccagtg

SEQ ID NO: 1108490 - DNA, 15 bp, Homo sapiens
aattgatgggccagt

SEQ ID NO: 1108491 - DNA, 15 bp, Homo sapiens
caattgatgggccag

SEQ ID NO: 1108492 - DNA, 15 bp, Homo sapiens
gcaattgatgggcca

SEQ ID NO: 1108493 - DNA, 15 bp, Homo sapiens
tgcaattgatgggcc

SEQ ID NO: 1108494 - DNA, 15 bp, Homo sapiens
atgcaattgatgggc

SEQ ID NO: 1108495 - DNA, 15 bp, Homo sapiens
aatgcaattgatggg

SEQ ID NO: 1108496 - DNA, 15 bp, Homo sapiens
aaatgcaattgatgg

SEQ ID NO: 1108497 - DNA, 15 bp, Homo sapiens
gaaatgcaattgatg

SEQ ID NO: 1108498 - DNA, 15 bp, Homo sapiens
tgaaatgcaattgat

SEQ ID NO: 1108499 - DNA, 15 bp, Homo sapiens
ctgaaatgcaattga

SEQ ID NO: 1108500 - DNA, 15 bp, Homo sapiens
tctgaaatgcaattg

SEQ ID NO: 1108501 - DNA, 15 bp, Homo sapiens
ctctgaaatgcaatt

SEQ ID NO: 1108502 - DNA, 15 bp, Homo sapiens
gctctgaaatgcaat

SEQ ID NO: 1108503 - DNA, 15 bp, Homo sapiens
tgctctgaaatgcaa

SEQ ID NO: 1108504 - DNA, 15 bp, Homo sapiens
gtgctctgaaatgca

SEQ ID NO: 1108505 - DNA, 15 bp, Homo sapiens
tgtgctctgaaatgc

SEQ ID NO: 1108506 - DNA, 15 bp, Homo sapiens
ctgtgctctgaaatg

SEQ ID NO: 1108507 - DNA, 15 bp, Homo sapiens
tctgtgctctgaaat

SEQ ID NO: 1108508 - DNA, 15 bp, Homo sapiens
ctctgtgctctgaaa

SEQ ID NO: 1108509 - DNA, 15 bp, Homo sapiens
actctgtgctctgaa

SEQ ID NO: 1108510 - DNA, 15 bp, Homo sapiens
cactctgtgctctga

SEQ ID NO: 1108511 - DNA, 15 bp, Homo sapiens
ccactctgtgctctg

SEQ ID NO: 1108512 - DNA, 15 bp, Homo sapiens
tccactctgtgctct

SEQ ID NO: 1108513 - DNA, 15 bp, Homo sapiens
ttccactctgtgctc

SEQ ID NO: 1108514 - DNA, 15 bp, Homo sapiens
cttccactctgtgct

SEQ ID NO: 1108515 - DNA, 15 bp, Homo sapiens
tcttccactctgtgc

SEQ ID NO: 1108516 - DNA, 15 bp, Homo sapiens
ttcttccactctgtg

SEQ ID NO: 1108517 - DNA, 15 bp, Homo sapiens
cttcttccactctgt

SEQ ID NO: 1108518 - DNA, 15 bp, Homo sapiens
ccttcttccactctg

SEQ ID NO: 1108519 - DNA, 15 bp, Homo sapiens
accttcttccactct

SEQ ID NO: 1108520 - DNA, 15 bp, Homo sapiens
aaccttcttccactc

SEQ ID NO: 1108521 - DNA, 15 bp, Homo sapiens
taaccttcttccact

SEQ ID NO: 1108522 - DNA, 15 bp, Homo sapiens
ctaaccttcttccac

SEQ ID NO: 1108523 - DNA, 15 bp, Homo sapiens
gctaaccttcttcca

SEQ ID NO: 1108524 - DNA, 15 bp, Homo sapiens
tgctaaccttcttcc

SEQ ID NO: 1108525 - DNA, 15 bp, Homo sapiens
gtgctaaccttcttc

SEQ ID NO: 1108526 - DNA, 15 bp, Homo sapiens
tgtgctaaccttctt

SEQ ID NO: 1108527 - DNA, 15 bp, Homo sapiens
ctgtgctaaccttct

SEQ ID NO: 1108528 - DNA, 15 bp, Homo sapiens
tctgtgctaaccttc

SEQ ID NO: 1108529 - DNA, 15 bp, Homo sapiens
gtctgtgctaacctt

SEQ ID NO: 1108530 - DNA, 15 bp, Homo sapiens
agtctgtgctaacct

SEQ ID NO: 1108531 - DNA, 15 bp, Homo sapiens
cagtctgtgctaacc

SEQ ID NO: 1108532 - DNA, 15 bp, Homo sapiens
ccagtctgtgctaac

SEQ ID NO: 1108533 - DNA, 15 bp, Homo sapiens
gccagtctgtgctaa

SEQ ID NO: 1108534 - DNA, 15 bp, Homo sapiens
tgccagtctgtgcta

SEQ ID NO: 1108535 - DNA, 15 bp, Homo sapiens
atgccagtctgtgct

SEQ ID NO: 1108536 - DNA, 15 bp, Homo sapiens
catgccagtctgtgc

SEQ ID NO: 1108537 - DNA, 15 bp, Homo sapiens
acatgccagtctgtg

SEQ ID NO: 1108538 - DNA, 15 bp, Homo sapiens
cacatgccagtctgt

SEQ ID NO: 1108539 - DNA, 15 bp, Homo sapiens
ccacatgccagtctg

SEQ ID NO: 1108540 - DNA, 15 bp, Homo sapiens
gccacatgccagtct

SEQ ID NO: 1108541 - DNA, 15 bp, Homo sapiens
agccacatgccagtc

SEQ ID NO: 1108542 - DNA, 15 bp, Homo sapiens
aagccacatgccagt

SEQ ID NO: 1108543 - DNA, 15 bp, Homo sapiens
gaagccacatgccag

SEQ ID NO: 1108544 - DNA, 15 bp, Homo sapiens
tgaagccacatgcca

SEQ ID NO: 1108545 - DNA, 15 bp, Homo sapiens
gtgaagccacatgcc

SEQ ID NO: 1108546 - DNA, 15 bp, Homo sapiens
tgtgaagccacatgc

SEQ ID NO: 1108547 - DNA, 15 bp, Homo sapiens
atgtgaagccacatg

SEQ ID NO: 1108548 - DNA, 15 bp, Homo sapiens
gatgtgaagccacat

SEQ ID NO: 1108549 - DNA, 15 bp, Homo sapiens
agatgtgaagccaca

SEQ ID NO: 1108550 - DNA, 15 bp, Homo sapiens
tagatgtgaagccac

SEQ ID NO: 1108551 - DNA, 15 bp, Homo sapiens
gtagatgtgaagcca

SEQ ID NO: 1108552 - DNA, 15 bp, Homo sapiens
agtagatgtgaagcc

SEQ ID NO: 1108553 - DNA, 15 bp, Homo sapiens
tagtagatgtgaagc

SEQ ID NO: 1108554 - DNA, 15 bp, Homo sapiens
ctagtagatgtgaag

SEQ ID NO: 1108555 - DNA, 15 bp, Homo sapiens
actagtagatgtgaa

SEQ ID NO: 1108556 - DNA, 15 bp, Homo sapiens
aactagtagatgtga

SEQ ID NO: 1108557 - DNA, 15 bp, Homo sapiens
caactagtagatgtg

SEQ ID NO: 1108558 - DNA, 15 bp, Homo sapiens
acaactagtagatgt

SEQ ID NO: 1108559 - DNA, 15 bp, Homo sapiens
aacaactagtagatg

SEQ ID NO: 1108560 - DNA, 15 bp, Homo sapiens
taacaactagtagat

SEQ ID NO: 1108561 - DNA, 15 bp, Homo sapiens
gtaacaactagtaga

SEQ ID NO: 1108562 - DNA, 15 bp, Homo sapiens
tgtaacaactagtag

SEQ ID NO: 1108563 - DNA, 15 bp, Homo sapiens
gtgtaacaactagta

SEQ ID NO: 1108564 - DNA, 15 bp, Homo sapiens
ggtgtaacaactagt

SEQ ID NO: 1108565 - DNA, 15 bp, Homo sapiens
aggtgtaacaactag

SEQ ID NO: 1108566 - DNA, 15 bp, Homo sapiens
aaggtgtaacaacta

SEQ ID NO: 1108567 - DNA, 15 bp, Homo sapiens
taaggtgtaacaact

SEQ ID NO: 1108568 - DNA, 15 bp, Homo sapiens
ctaaggtgtaacaac

SEQ ID NO: 1108569 - DNA, 15 bp, Homo sapiens
cctaaggtgtaacaa

SEQ ID NO: 1108570 - DNA, 15 bp, Homo sapiens
tcctaaggtgtaaca

SEQ ID NO: 1108571 - DNA, 15 bp, Homo sapiens
ctcctaaggtgtaac

SEQ ID NO: 1108572 - DNA, 15 bp, Homo sapiens
cctcctaaggtgtaa

SEQ ID NO: 1108573 - DNA, 15 bp, Homo sapiens
tcctcctaaggtgta

SEQ ID NO: 1108574 - DNA, 15 bp, Homo sapiens
atcctcctaaggtgt

SEQ ID NO: 1108575 - DNA, 15 bp, Homo sapiens
aatcctcctaaggtg

SEQ ID NO: 1108576 - DNA, 15 bp, Homo sapiens
taatcctcctaaggt

SEQ ID NO: 1108577 - DNA, 15 bp, Homo sapiens
ataatcctcctaagg

SEQ ID NO: 1108578 - DNA, 15 bp, Homo sapiens
aataatcctcctaag

SEQ ID NO: 1108579 - DNA, 15 bp, Homo sapiens
aaataatcctcctaa

SEQ ID NO: 1108580 - DNA, 15 bp, Homo sapiens
taaataatcctccta

SEQ ID NO: 1108581 - DNA, 15 bp, Homo sapiens
ttaaataatcctcct

SEQ ID NO: 1108582 - DNA, 15 bp, Homo sapiens
gttaaataatcctcc

SEQ ID NO: 1108583 - DNA, 15 bp, Homo sapiens
ggttaaataatcctc

SEQ ID NO: 1108584 - DNA, 15 bp, Homo sapiens
aggttaaataatcct

SEQ ID NO: 1108585 - DNA, 15 bp, Homo sapiens
gaggttaaataatcc

SEQ ID NO: 1108586 - DNA, 15 bp, Homo sapiens
agaggttaaataatc

SEQ ID NO: 1108587 - DNA, 15 bp, Homo sapiens
gagaggttaaataat

SEQ ID NO: 1108588 - DNA, 15 bp, Homo sapiens
agagaggttaaataa

SEQ ID NO: 1108589 - DNA, 15 bp, Homo sapiens
acagagaggttaaat

SEQ ID NO: 1108590 - DNA, 15 bp, Homo sapiens
cacagagaggttaaa

SEQ ID NO: 1108591 - DNA, 15 bp, Homo sapiens
gcacagagaggttaa

SEQ ID NO: 1108592 - DNA, 15 bp, Homo sapiens
agcacagagaggtta

SEQ ID NO: 1108593 - DNA, 15 bp, Homo sapiens
aagcacagagaggtt

SEQ ID NO: 1108594 - DNA, 15 bp, Homo sapiens
gaagcacagagaggt

SEQ ID NO: 1108595 - DNA, 15 bp, Homo sapiens
tgaagcacagagagg

SEQ ID NO: 1108596 - DNA, 15 bp, Homo sapiens
ctgaagcacagagag

SEQ ID NO: 1108597 - DNA, 15 bp, Homo sapiens
actgaagcacagaga

SEQ ID NO: 1108598 - DNA, 15 bp, Homo sapiens
aactgaagcacagag

SEQ ID NO: 1108599 - DNA, 15 bp, Homo sapiens
aaactgaagcacaga

SEQ ID NO: 1108600 - DNA, 15 bp, Homo sapiens
gaaactgaagcacag

SEQ ID NO: 1108601 - DNA, 15 bp, Homo sapiens
ggaaactgaagcaca

SEQ ID NO: 1108602 - DNA, 15 bp, Homo sapiens
gggaaactgaagcac

SEQ ID NO: 1108603 - DNA, 15 bp, Homo sapiens
ggggaaactgaagca

SEQ ID NO: 1108604 - DNA, 15 bp, Homo sapiens
tggggaaactgaagc

SEQ ID NO: 1108605 - DNA, 15 bp, Homo sapiens
ttggggaaactgaag

SEQ ID NO: 1108606 - DNA, 15 bp, Homo sapiens
gttggggaaactgaa

SEQ ID NO: 1108607 - DNA, 15 bp, Homo sapiens
agttggggaaactga

SEQ ID NO: 1108608 - DNA, 15 bp, Homo sapiens
tagttggggaaactg

SEQ ID NO: 1108609 - DNA, 15 bp, Homo sapiens
atagttggggaaact

SEQ ID NO: 1108610 - DNA, 15 bp, Homo sapiens
tatagttggggaaac

SEQ ID NO: 1108611 - DNA, 15 bp, Homo sapiens
ttatagttggggaaa

SEQ ID NO: 1108612 - DNA, 15 bp, Homo sapiens
tttatagttggggaa

SEQ ID NO: 1108613 - DNA, 15 bp, Homo sapiens
ttttatagttgggga

SEQ ID NO: 1108614 - DNA, 15 bp, Homo sapiens
attttatagttgggg

SEQ ID NO: 1108615 - DNA, 15 bp, Homo sapiens
tattttatagttggg

SEQ ID NO: 1108616 - DNA, 15 bp, Homo sapiens
ctattttatagttgg

SEQ ID NO: 1108617 - DNA, 15 bp, Homo sapiens
tctattttatagttg

SEQ ID NO: 1108618 - DNA, 15 bp, Homo sapiens
ttctattttatagtt

SEQ ID NO: 1108619 - DNA, 15 bp, Homo sapiens
tttctattttatagt

SEQ ID NO: 1108620 - DNA, 15 bp, Homo sapiens
atttctattttatag

SEQ ID NO: 1108621 - DNA, 15 bp, Homo sapiens
catttctattttata

SEQ ID NO: 1108622 - DNA, 15 bp, Homo sapiens
tcatttctattttat

SEQ ID NO: 1108623 - DNA, 15 bp, Homo sapiens
gtcatttctatttta

SEQ ID NO: 1108624 - DNA, 15 bp, Homo sapiens
tgtcatttctatttt

SEQ ID NO: 1108625 - DNA, 15 bp, Homo sapiens
atgtcatttctattt

SEQ ID NO: 1108626 - DNA, 15 bp, Homo sapiens
catgtcatttctatt

SEQ ID NO: 1108627 - DNA, 15 bp, Homo sapiens
tcatgtcatttctat

SEQ ID NO: 1108628 - DNA, 15 bp, Homo sapiens
atcatgtcatttcta

SEQ ID NO: 1108629 - DNA, 15 bp, Homo sapiens
tatcatgtcatttct

SEQ ID NO: 1108630 - DNA, 15 bp, Homo sapiens
ctatcatgtcatttc

SEQ ID NO: 1108631 - DNA, 15 bp, Homo sapiens
gctatcatgtcattt

SEQ ID NO: 1108632 - DNA, 15 bp, Homo sapiens
tgctatcatgtcatt

SEQ ID NO: 1108633 - DNA, 15 bp, Homo sapiens
gtgctatcatgtcat

SEQ ID NO: 1108634 - DNA, 15 bp, Homo sapiens
ggtgctatcatgtca

SEQ ID NO: 1108635 - DNA, 15 bp, Homo sapiens
gggtgctatcatgtc

SEQ ID NO: 1108636 - DNA, 15 bp, Homo sapiens
tgggtgctatcatgt

SEQ ID NO: 1108637 - DNA, 15 bp, Homo sapiens
ttgggtgctatcatg

SEQ ID NO: 1108638 - DNA, 15 bp, Homo sapiens
gttgggtgctatcat

SEQ ID NO: 1108639 - DNA, 15 bp, Homo sapiens
agttgggtgctatca

SEQ ID NO: 1108640 - DNA, 15 bp, Homo sapiens
gagttgggtgctatc

SEQ ID NO: 1108641 - DNA, 15 bp, Homo sapiens
ggagttgggtgctat

SEQ ID NO: 1108642 - DNA, 15 bp, Homo sapiens
aggagttgggtgcta

SEQ ID NO: 1108643 - DNA, 15 bp, Homo sapiens
taggagttgggtgct

SEQ ID NO: 1108644 - DNA, 15 bp, Homo sapiens
ctaggagttgggtgc

SEQ ID NO: 1108645 - DNA, 15 bp, Homo sapiens
cctaggagttgggtg

SEQ ID NO: 1108646 - DNA, 15 bp, Homo sapiens
ccctaggagttgggt

SEQ ID NO: 1108647 - DNA, 15 bp, Homo sapiens
gccctaggagttggg

SEQ ID NO: 1108648 - DNA, 15 bp, Homo sapiens
agccctaggagttgg

SEQ ID NO: 1108649 - DNA, 15 bp, Homo sapiens
cagccctaggagttg

SEQ ID NO: 1108650 - DNA, 15 bp, Homo sapiens
acagccctaggagtt

SEQ ID NO: 1108651 - DNA, 15 bp, Homo sapiens
aacagccctaggagt

SEQ ID NO: 1108652 - DNA, 15 bp, Homo sapiens
caacagccctaggag

SEQ ID NO: 1108653 - DNA, 15 bp, Homo sapiens
tcaacagccctagga

SEQ ID NO: 1108654 - DNA, 15 bp, Homo sapiens
ctcaacagccctagg

SEQ ID NO: 1108655 - DNA, 15 bp, Homo sapiens
tctcaacagccctag

SEQ ID NO: 1108656 - DNA, 15 bp, Homo sapiens
ctctcaacagcccta

SEQ ID NO: 1108657 - DNA, 15 bp, Homo sapiens
cctctcaacagccct

SEQ ID NO: 1108658 - DNA, 15 bp, Homo sapiens
gcctctcaacagccc

SEQ ID NO: 1108659 - DNA, 15 bp, Homo sapiens
ggcctctcaacagcc

SEQ ID NO: 1108660 - DNA, 15 bp, Homo sapiens
gggcctctcaacagc

SEQ ID NO: 1108661 - DNA, 15 bp, Homo sapiens
tgggcctctcaacag

SEQ ID NO: 1108662 - DNA, 15 bp, Homo sapiens
ttgggcctctcaaca

SEQ ID NO: 1108663 - DNA, 15 bp, Homo sapiens
tttgggcctctcaac

SEQ ID NO: 1108664 - DNA, 15 bp, Homo sapiens
atttgggcctctcaa

SEQ ID NO: 1108665 - DNA, 15 bp, Homo sapiens
catttgggcctctca

SEQ ID NO: 1108666 - DNA, 15 bp, Homo sapiens
tcatttgggcctctc

SEQ ID NO: 1108667 - DNA, 15 bp, Homo sapiens
ctcatttgggcctct

SEQ ID NO: 1108668 - DNA, 15 bp, Homo sapiens
cctcatttgggcctc

SEQ ID NO: 1108669 - DNA, 15 bp, Homo sapiens
acctcatttgggcct

SEQ ID NO: 1108670 - DNA, 15 bp, Homo sapiens
cacctcatttgggcc

SEQ ID NO: 1108671 - DNA, 15 bp, Homo sapiens
tcacctcatttgggc

SEQ ID NO: 1108672 - DNA, 15 bp, Homo sapiens
atcacctcatttggg

SEQ ID NO: 1108673 - DNA, 15 bp, Homo sapiens
tatcacctcatttgg

SEQ ID NO: 1108674 - DNA, 15 bp, Homo sapiens
gtatcacctcatttg

SEQ ID NO: 1108675 - DNA, 15 bp, Homo sapiens
tgtatcacctcattt

SEQ ID NO: 1108676 - DNA, 15 bp, Homo sapiens
ttgtatcacctcatt

SEQ ID NO: 1108677 - DNA, 15 bp, Homo sapiens
tttgtatcacctcat

SEQ ID NO: 1108678 - DNA, 15 bp, Homo sapiens
atttgtatcacctca

SEQ ID NO: 1108679 - DNA, 15 bp, Homo sapiens
tatttgtatcacctc

SEQ ID NO: 1108680 - DNA, 15 bp, Homo sapiens
ttatttgtatcacct

SEQ ID NO: 1108681 - DNA, 15 bp, Homo sapiens
gttatttgtatcacc

SEQ ID NO: 1108682 - DNA, 15 bp, Homo sapiens
tgttatttgtatcac

SEQ ID NO: 1108683 - DNA, 15 bp, Homo sapiens
atgttatttgtatca

SEQ ID NO: 1108684 - DNA, 15 bp, Homo sapiens
aatgttatttgtatc

SEQ ID NO: 1108685 - DNA, 15 bp, Homo sapiens
aaatgttatttgtat

SEQ ID NO: 1108686 - DNA, 15 bp, Homo sapiens
aaaatgttatttgta

SEQ ID NO: 1108687 - DNA, 15 bp, Homo sapiens
aaaaatgttatttgt

SEQ ID NO: 1108688 - DNA, 15 bp, Homo sapiens
caaaaatgttatttg

SEQ ID NO: 1108689 - DNA, 15 bp, Homo sapiens
tcaaaaatgttattt

SEQ ID NO: 1108690 - DNA, 15 bp, Homo sapiens
ttcaaaaatgttatt

SEQ ID NO: 1108691 - DNA, 15 bp, Homo sapiens
cttcaaaaatgttat

SEQ ID NO: 1108692 - DNA, 15 bp, Homo sapiens
acttcaaaaatgtta

SEQ ID NO: 1108693 - DNA, 15 bp, Homo sapiens
cacttcaaaaatgtt

SEQ ID NO: 1108694 - DNA, 15 bp, Homo sapiens
ccacttcaaaaatgt

SEQ ID NO: 1108695 - DNA, 15 bp, Homo sapiens
cccacttcaaaaatg

SEQ ID NO: 1108696 - DNA, 15 bp, Homo sapiens
gcccacttcaaaaat

SEQ ID NO: 1108697 - DNA, 15 bp, Homo sapiens
ggcccacttcaaaaa

SEQ ID NO: 1108698 - DNA, 15 bp, Homo sapiens
tggcccacttcaaaa

SEQ ID NO: 1108699 - DNA, 15 bp, Homo sapiens
ctggcccacttcaaa

SEQ ID NO: 1108700 - DNA, 15 bp, Homo sapiens
cctggcccacttcaa

SEQ ID NO: 1108701 - DNA, 15 bp, Homo sapiens
gcctggcccacttca

SEQ ID NO: 1108702 - DNA, 15 bp, Homo sapiens
tgcctggcccacttc

SEQ ID NO: 1108703 - DNA, 15 bp, Homo sapiens
gtgcctggcccactt

SEQ ID NO: 1108704 - DNA, 15 bp, Homo sapiens
ggtgcctggcccact

SEQ ID NO: 1108705 - DNA, 15 bp, Homo sapiens
gggtgcctggcccac

SEQ ID NO: 1108706 - DNA, 15 bp, Homo sapiens
tgggtgcctggccca

SEQ ID NO: 1108707 - DNA, 15 bp, Homo sapiens
ttgggtgcctggccc

SEQ ID NO: 1108708 - DNA, 15 bp, Homo sapiens
gttgggtgcctggcc

SEQ ID NO: 1108709 - DNA, 15 bp, Homo sapiens
ggttgggtgcctggc

SEQ ID NO: 1108710 - DNA, 15 bp, Homo sapiens
tggttgggtgcctgg

SEQ ID NO: 1108711 - DNA, 15 bp, Homo sapiens
ttggttgggtgcctg

SEQ ID NO: 1108712 - DNA, 15 bp, Homo sapiens
cttggttgggtgcct

SEQ ID NO: 1108713 - DNA, 15 bp, Homo sapiens
acttggttgggtgcc

SEQ ID NO: 1108714 - DNA, 15 bp, Homo sapiens
gacttggttgggtgc

SEQ ID NO: 1108715 - DNA, 15 bp, Homo sapiens
agacttggttgggtg

SEQ ID NO: 1108716 - DNA, 15 bp, Homo sapiens
aagacttggttgggt

SEQ ID NO: 1108717 - DNA, 15 bp, Homo sapiens
caagacttggttggg

SEQ ID NO: 1108718 - DNA, 15 bp, Homo sapiens
tcaagacttggttgg

SEQ ID NO: 1108719 - DNA, 15 bp, Homo sapiens
gtcaagacttggttg

SEQ ID NO: 1108720 - DNA, 15 bp, Homo sapiens
ggtcaagacttggtt

SEQ ID NO: 1108721 - DNA, 15 bp, Homo sapiens
tggtcaagacttggt

SEQ ID NO: 1108722 - DNA, 15 bp, Homo sapiens
ttggtcaagacttgg

SEQ ID NO: 1108723 - DNA, 15 bp, Homo sapiens
attggtcaagacttg

SEQ ID NO: 1108724 - DNA, 15 bp, Homo sapiens
cattggtcaagactt

SEQ ID NO: 1108725 - DNA, 15 bp, Homo sapiens
acattggtcaagact

SEQ ID NO: 1108726 - DNA, 15 bp, Homo sapiens
aacattggtcaagac

SEQ ID NO: 1108727 - DNA, 15 bp, Homo sapiens
caacattggtcaaga

SEQ ID NO: 1108728 - DNA, 15 bp, Homo sapiens
gcaacattggtcaag

SEQ ID NO: 1108729 - DNA, 15 bp, Homo sapiens
ggcaacattggtcaa

SEQ ID NO: 1108730 - DNA, 15 bp, Homo sapiens
aggcaacattggtca

SEQ ID NO: 1108731 - DNA, 15 bp, Homo sapiens
taggcaacattggtc

SEQ ID NO: 1108732 - DNA, 15 bp, Homo sapiens
ataggcaacattggt

SEQ ID NO: 1108733 - DNA, 15 bp, Homo sapiens
aataggcaacattgg

SEQ ID NO: 1108734 - DNA, 15 bp, Homo sapiens
taataggcaacattg

SEQ ID NO: 1108735 - DNA, 15 bp, Homo sapiens
ataataggcaacatt

SEQ ID NO: 1108736 - DNA, 15 bp, Homo sapiens
aataataggcaacat

SEQ ID NO: 1108737 - DNA, 15 bp, Homo sapiens
taataataggcaaca

SEQ ID NO: 1108738 - DNA, 15 bp, Homo sapiens
ataataataggcaac

SEQ ID NO: 1108739 - DNA, 15 bp, Homo sapiens
aataataataggcaa

SEQ ID NO: 1108740 - DNA, 15 bp, Homo sapiens
gaataataataggca

SEQ ID NO: 1108741 - DNA, 15 bp, Homo sapiens
tgaataataataggc

SEQ ID NO: 1108742 - DNA, 15 bp, Homo sapiens
atgaataataatagg

SEQ ID NO: 1108743 - DNA, 15 bp, Homo sapiens
aatgaataataatag

SEQ ID NO: 1108744 - DNA, 15 bp, Homo sapiens
caatgaataataata

SEQ ID NO: 1108745 - DNA, 15 bp, Homo sapiens
gcaatgaataataat

SEQ ID NO: 1108746 - DNA, 15 bp, Homo sapiens
agcaatgaataataa

SEQ ID NO: 1108747 - DNA, 15 bp, Homo sapiens
cagcaatgaataata

SEQ ID NO: 1108748 - DNA, 15 bp, Homo sapiens
tcagcaatgaataat

SEQ ID NO: 1108749 - DNA, 15 bp, Homo sapiens
ttcagcaatgaataa

SEQ ID NO: 1108750 - DNA, 15 bp, Homo sapiens
cttcagcaatgaata

SEQ ID NO: 1108751 - DNA, 15 bp, Homo sapiens
ccttcagcaatgaat

SEQ ID NO: 1108752 - DNA, 15 bp, Homo sapiens
gccttcagcaatgaa

SEQ ID NO: 1108753 - DNA, 15 bp, Homo sapiens
agccttcagcaatga

SEQ ID NO: 1108754 - DNA, 15 bp, Homo sapiens
cagccttcagcaatg

SEQ ID NO: 1108755 - DNA, 15 bp, Homo sapiens
ccagccttcagcaat

SEQ ID NO: 1108756 - DNA, 15 bp, Homo sapiens
tccagccttcagcaa

SEQ ID NO: 1108757 - DNA, 15 bp, Homo sapiens
ctccagccttcagca

SEQ ID NO: 1108758 - DNA, 15 bp, Homo sapiens
actccagccttcagc

SEQ ID NO: 1108759 - DNA, 15 bp, Homo sapiens
cactccagccttcag

SEQ ID NO: 1108760 - DNA, 15 bp, Homo sapiens
tcactccagccttca

SEQ ID NO: 1108761 - DNA, 15 bp, Homo sapiens
ctcactccagccttc

SEQ ID NO: 1108762 - DNA, 15 bp, Homo sapiens
tctcactccagcctt

SEQ ID NO: 1108763 - DNA, 15 bp, Homo sapiens
ctctcactccagcct

SEQ ID NO: 1108764 - DNA, 15 bp, Homo sapiens
cctctcactccagcc

SEQ ID NO: 1108765 - DNA, 15 bp, Homo sapiens
gcctctcactccagc

SEQ ID NO: 1108766 - DNA, 15 bp, Homo sapiens
tgcctctcactccag

SEQ ID NO: 1108767 - DNA, 15 bp, Homo sapiens
atgcctctcactcca

SEQ ID NO: 1108768 - DNA, 15 bp, Homo sapiens
aatgcctctcactcc

SEQ ID NO: 1108769 - DNA, 15 bp, Homo sapiens
aaatgcctctcactc

SEQ ID NO: 1108770 - DNA, 15 bp, Homo sapiens
taaatgcctctcact

SEQ ID NO: 1108771 - DNA, 15 bp, Homo sapiens
ctaaatgcctctcac

SEQ ID NO: 1108772 - DNA, 15 bp, Homo sapiens
cctaaatgcctctca

SEQ ID NO: 1108773 - DNA, 15 bp, Homo sapiens
ccctaaatgcctctc

SEQ ID NO: 1108774 - DNA, 15 bp, Homo sapiens
tccctaaatgcctct

SEQ ID NO: 1108775 - DNA, 15 bp, Homo sapiens
ttccctaaatgcctc

SEQ ID NO: 1108776 - DNA, 15 bp, Homo sapiens
tttccctaaatgcct

SEQ ID NO: 1108777 - DNA, 15 bp, Homo sapiens
ttttccctaaatgcc

SEQ ID NO: 1108778 - DNA, 15 bp, Homo sapiens
cttttccctaaatgc

SEQ ID NO: 1108779 - DNA, 15 bp, Homo sapiens
acttttccctaaatg

SEQ ID NO: 1108780 - DNA, 15 bp, Homo sapiens
tacttttccctaaat

SEQ ID NO: 1108781 - DNA, 15 bp, Homo sapiens
ttacttttccctaaa

SEQ ID NO: 1108782 - DNA, 15 bp, Homo sapiens
cttacttttccctaa

SEQ ID NO: 1108783 - DNA, 15 bp, Homo sapiens
gcttacttttcccta

SEQ ID NO: 1108784 - DNA, 15 bp, Homo sapiens
agcttacttttccct

SEQ ID NO: 1108785 - DNA, 15 bp, Homo sapiens
gagcttacttttccc

SEQ ID NO: 1108786 - DNA, 15 bp, Homo sapiens
tgagcttacttttcc

SEQ ID NO: 1108787 - DNA, 15 bp, Homo sapiens
ctgagcttacttttc

SEQ ID NO: 1108788 - DNA, 15 bp, Homo sapiens
cctgagcttactttt

SEQ ID NO: 1108789 - DNA, 15 bp, Homo sapiens
gcctgagcttacttt

SEQ ID NO: 1108790 - DNA, 15 bp, Homo sapiens
tgcctgagcttactt

SEQ ID NO: 1108791 - DNA, 15 bp, Homo sapiens
ttgcctgagcttact

SEQ ID NO: 1108792 - DNA, 15 bp, Homo sapiens
tttgcctgagcttac

SEQ ID NO: 1108793 - DNA, 15 bp, Homo sapiens
ctttgcctgagctta

SEQ ID NO: 1108794 - DNA, 15 bp, Homo sapiens
cctttgcctgagctt

SEQ ID NO: 1108795 - DNA, 15 bp, Homo sapiens
tcctttgcctgagct

SEQ ID NO: 1108796 - DNA, 15 bp, Homo sapiens
ctcctttgcctgagc

SEQ ID NO: 1108797 - DNA, 15 bp, Homo sapiens
tctcctttgcctgag

SEQ ID NO: 1108798 - DNA, 15 bp, Homo sapiens
ttctcctttgcctga

SEQ ID NO: 1108799 - DNA, 15 bp, Homo sapiens
tttctcctttgcctg

SEQ ID NO: 1108800 - DNA, 15 bp, Homo sapiens
ttttctcctttgcct

SEQ ID NO: 1108801 - DNA, 15 bp, Homo sapiens
tttttctcctttgcc

SEQ ID NO: 1108802 - DNA, 15 bp, Homo sapiens
ttttttctcctttgc

SEQ ID NO: 1108803 - DNA, 15 bp, Homo sapiens
attttttctcctttg

SEQ ID NO: 1108804 - DNA, 15 bp, Homo sapiens
tattttttctccttt

SEQ ID NO: 1108805 - DNA, 15 bp, Homo sapiens
ttattttttctcctt

SEQ ID NO: 1108806 - DNA, 15 bp, Homo sapiens
cttattttttctcct

SEQ ID NO: 1108807 - DNA, 15 bp, Homo sapiens
tcttattttttctcc

SEQ ID NO: 1108808 - DNA, 15 bp, Homo sapiens
ttcttattttttctc

SEQ ID NO: 1108809 - DNA, 15 bp, Homo sapiens
gttcttattttttct

SEQ ID NO: 1108810 - DNA, 15 bp, Homo sapiens
tgttcttattttttc

SEQ ID NO: 1108811 - DNA, 15 bp, Homo sapiens
atgttcttatttttt

SEQ ID NO: 1108812 - DNA, 15 bp, Homo sapiens
aatgttcttattttt

SEQ ID NO: 1108813 - DNA, 15 bp, Homo sapiens
caatgttcttatttt

SEQ ID NO: 1108814 - DNA, 15 bp, Homo sapiens
acaatgttcttattt

SEQ ID NO: 1108815 - DNA, 15 bp, Homo sapiens
tacaatgttcttatt

SEQ ID NO: 1108816 - DNA, 15 bp, Homo sapiens
ctacaatgttcttat

SEQ ID NO: 1108817 - DNA, 15 bp, Homo sapiens
cctacaatgttctta

SEQ ID NO: 1108818 - DNA, 15 bp, Homo sapiens
tcctacaatgttctt

SEQ ID NO: 1108819 - DNA, 15 bp, Homo sapiens
ttcctacaatgttct

SEQ ID NO: 1108820 - DNA, 15 bp, Homo sapiens
tttcctacaatgttc

SEQ ID NO: 1108821 - DNA, 15 bp, Homo sapiens
ttttcctacaatgtt

SEQ ID NO: 1108822 - DNA, 15 bp, Homo sapiens
tttttcctacaatgt

SEQ ID NO: 1108823 - DNA, 15 bp, Homo sapiens
atttttcctacaatg

SEQ ID NO: 1108824 - DNA, 15 bp, Homo sapiens
catttttcctacaat

SEQ ID NO: 1108825 - DNA, 15 bp, Homo sapiens
ccatttttcctacaa

SEQ ID NO: 1108826 - DNA, 15 bp, Homo sapiens
tccatttttcctaca

SEQ ID NO: 1108827 - DNA, 15 bp, Homo sapiens
ttccatttttcctac

SEQ ID NO: 1108828 - DNA, 15 bp, Homo sapiens
tttccatttttccta

SEQ ID NO: 1108829 - DNA, 15 bp, Homo sapiens
ctttccatttttcct

SEQ ID NO: 1108830 - DNA, 15 bp, Homo sapiens
tctttccatttttcc

SEQ ID NO: 1108831 - DNA, 15 bp, Homo sapiens
atctttccatttttc

SEQ ID NO: 1108832 - DNA, 15 bp, Homo sapiens
aatctttccattttt

SEQ ID NO: 1108833 - DNA, 15 bp, Homo sapiens
gaatctttccatttt

SEQ ID NO: 1108834 - DNA, 15 bp, Homo sapiens
tgaatctttccattt

SEQ ID NO: 1108835 - DNA, 15 bp, Homo sapiens
gtgaatctttccatt

SEQ ID NO: 1108836 - DNA, 15 bp, Homo sapiens
tgtgaatctttccat

SEQ ID NO: 1108837 - DNA, 15 bp, Homo sapiens
ttgtgaatctttcca

SEQ ID NO: 1108838 - DNA, 15 bp, Homo sapiens
cttgtgaatctttcc

SEQ ID NO: 1108839 - DNA, 15 bp, Homo sapiens
tcttgtgaatctttc

SEQ ID NO: 1108840 - DNA, 15 bp, Homo sapiens
ttcttgtgaatcttt

SEQ ID NO: 1108841 - DNA, 15 bp, Homo sapiens
cttcttgtgaatctt

SEQ ID NO: 1108842 - DNA, 15 bp, Homo sapiens
ccttcttgtgaatct

SEQ ID NO: 1108843 - DNA, 15 bp, Homo sapiens
cccttcttgtgaatc

SEQ ID NO: 1108844 - DNA, 15 bp, Homo sapiens
tcccttcttgtgaat

SEQ ID NO: 1108845 - DNA, 15 bp, Homo sapiens
ctcccttcttgtgaa

SEQ ID NO: 1108846 - DNA, 15 bp, Homo sapiens
tctcccttcttgtga

SEQ ID NO: 1108847 - DNA, 15 bp, Homo sapiens
ctctcccttcttgtg

SEQ ID NO: 1108848 - DNA, 15 bp, Homo sapiens
cctctcccttcttgt

SEQ ID NO: 1108849 - DNA, 15 bp, Homo sapiens
tcctctcccttcttg

SEQ ID NO: 1108850 - DNA, 15 bp, Homo sapiens
ttcctctcccttctt

SEQ ID NO: 1108851 - DNA, 15 bp, Homo sapiens
ctcttcctctccctt

SEQ ID NO: 1108852 - DNA, 15 bp, Homo sapiens
cctcttcctctccct

SEQ ID NO: 1108853 - DNA, 15 bp, Homo sapiens
gcctcttcctctccc

SEQ ID NO: 1108854 - DNA, 15 bp, Homo sapiens
tgcctcttcctctcc

SEQ ID NO: 1108855 - DNA, 15 bp, Homo sapiens
ctgcctcttcctctc

SEQ ID NO: 1108856 - DNA, 15 bp, Homo sapiens
gctgcctcttcctct

SEQ ID NO: 1108857 - DNA, 15 bp, Homo sapiens
tgctgcctcttcctc

SEQ ID NO: 1108858 - DNA, 15 bp, Homo sapiens
gtgctgcctcttcct

SEQ ID NO: 1108859 - DNA, 15 bp, Homo sapiens
tgtgctgcctcttcc

SEQ ID NO: 1108860 - DNA, 15 bp, Homo sapiens
ttgtgctgcctcttc

SEQ ID NO: 1108861 - DNA, 15 bp, Homo sapiens
tttgtgctgcctctt

SEQ ID NO: 1108862 - DNA, 15 bp, Homo sapiens
atttgtgctgcctct

SEQ ID NO: 1108863 - DNA, 15 bp, Homo sapiens
tatttgtgctgcctc

SEQ ID NO: 1108864 - DNA, 15 bp, Homo sapiens
atatttgtgctgcct

SEQ ID NO: 1108865 - DNA, 15 bp, Homo sapiens
tatatttgtgctgcc

SEQ ID NO: 1108866 - DNA, 15 bp, Homo sapiens
atatatttgtgctgc

SEQ ID NO: 1108867 - DNA, 15 bp, Homo sapiens
aatatatttgtgctg

SEQ ID NO: 1108868 - DNA, 15 bp, Homo sapiens
caatatatttgtgct

SEQ ID NO: 1108869 - DNA, 15 bp, Homo sapiens
ccaatatatttgtgc

SEQ ID NO: 1108870 - DNA, 15 bp, Homo sapiens
tccaatatatttgtg

SEQ ID NO: 1108871 - DNA, 15 bp, Homo sapiens
ctccaatatatttgt

SEQ ID NO: 1108872 - DNA, 15 bp, Homo sapiens
cctccaatatatttg

SEQ ID NO: 1108873 - DNA, 15 bp, Homo sapiens
tcctccaatatattt

SEQ ID NO: 1108874 - DNA, 15 bp, Homo sapiens
ctcctccaatatatt

SEQ ID NO: 1108875 - DNA, 15 bp, Homo sapiens
gctcctccaatatat

SEQ ID NO: 1108876 - DNA, 15 bp, Homo sapiens
agctcctccaatata

SEQ ID NO: 1108877 - DNA, 15 bp, Homo sapiens
gagctcctccaatat

SEQ ID NO: 1108878 - DNA, 15 bp, Homo sapiens
ggagctcctccaata

SEQ ID NO: 1108879 - DNA, 15 bp, Homo sapiens
tggagctcctccaat

SEQ ID NO: 1108880 - DNA, 15 bp, Homo sapiens
gtggagctcctccaa

SEQ ID NO: 1108881 - DNA, 15 bp, Homo sapiens
tgtggagctcctcca

SEQ ID NO: 1108882 - DNA, 15 bp, Homo sapiens
atgtggagctcctcc

SEQ ID NO: 1108883 - DNA, 15 bp, Homo sapiens
catgtggagctcctc

SEQ ID NO: 1108884 - DNA, 15 bp, Homo sapiens
gcatgtggagctcct

SEQ ID NO: 1108885 - DNA, 15 bp, Homo sapiens
agcatgtggagctcc

SEQ ID NO: 1108886 - DNA, 15 bp, Homo sapiens
aagcatgtggagctc

SEQ ID NO: 1108887 - DNA, 15 bp, Homo sapiens
taagcatgtggagct

SEQ ID NO: 1108888 - DNA, 15 bp, Homo sapiens
ataagcatgtggagc

SEQ ID NO: 1108889 - DNA, 15 bp, Homo sapiens
aataagcatgtggag

SEQ ID NO: 1108890 - DNA, 15 bp, Homo sapiens
aaataagcatgtgga

SEQ ID NO: 1108891 - DNA, 15 bp, Homo sapiens
caaataagcatgtgg

SEQ ID NO: 1108892 - DNA, 15 bp, Homo sapiens
tcaaataagcatgtg

SEQ ID NO: 1108893 - DNA, 15 bp, Homo sapiens
gtcaaataagcatgt

SEQ ID NO: 1108894 - DNA, 15 bp, Homo sapiens
agtcaaataagcatg

SEQ ID NO: 1108895 - DNA, 15 bp, Homo sapiens
gagtcaaataagcat

SEQ ID NO: 1108896 - DNA, 15 bp, Homo sapiens
tgagtcaaataagca

SEQ ID NO: 1108897 - DNA, 15 bp, Homo sapiens
ttgagtcaaataagc

SEQ ID NO: 1108898 - DNA, 15 bp, Homo sapiens
cttgagtcaaataag

SEQ ID NO: 1108899 - DNA, 15 bp, Homo sapiens
tcttgagtcaaataa

SEQ ID NO: 1108900 - DNA, 15 bp, Homo sapiens
gtcttgagtcaaata

SEQ ID NO: 1108901 - DNA, 15 bp, Homo sapiens
ggtcttgagtcaaat

SEQ ID NO: 1108902 - DNA, 15 bp, Homo sapiens
aggtcttgagtcaaa

SEQ ID NO: 1108903 - DNA, 15 bp, Homo sapiens
caggtcttgagtcaa

SEQ ID NO: 1108904 - DNA, 15 bp, Homo sapiens
acaggtcttgagtca

SEQ ID NO: 1108905 - DNA, 15 bp, Homo sapiens
aacaggtcttgagtc

SEQ ID NO: 1108906 - DNA, 15 bp, Homo sapiens
gaacaggtcttgagt

SEQ ID NO: 1108907 - DNA, 15 bp, Homo sapiens
tgaacaggtcttgag

SEQ ID NO: 1108908 - DNA, 15 bp, Homo sapiens
atgaacaggtcttga

SEQ ID NO: 1108909 - DNA, 15 bp, Homo sapiens
aatgaacaggtcttg

SEQ ID NO: 1108910 - DNA, 15 bp, Homo sapiens
aaatgaacaggtctt

SEQ ID NO: 1108911 - DNA, 15 bp, Homo sapiens
caaatgaacaggtct

SEQ ID NO: 1108912 - DNA, 15 bp, Homo sapiens
tcaaatgaacaggtc

SEQ ID NO: 1108913 - DNA, 15 bp, Homo sapiens
ttcaaatgaacaggt

SEQ ID NO: 1108914 - DNA, 15 bp, Homo sapiens
gttcaaatgaacagg

SEQ ID NO: 1108915 - DNA, 15 bp, Homo sapiens
ggttcaaatgaacag

SEQ ID NO: 1108916 - DNA, 15 bp, Homo sapiens
aggttcaaatgaaca

SEQ ID NO: 1108917 - DNA, 15 bp, Homo sapiens
aaggttcaaatgaac

SEQ ID NO: 1108918 - DNA, 15 bp, Homo sapiens
aaaggttcaaatgaa

SEQ ID NO: 1108919 - DNA, 15 bp, Homo sapiens
taaaggttcaaatga

SEQ ID NO: 1108920 - DNA, 15 bp, Homo sapiens
ctaaaggttcaaatg

SEQ ID NO: 1108921 - DNA, 15 bp, Homo sapiens
tctaaaggttcaaat

SEQ ID NO: 1108922 - DNA, 15 bp, Homo sapiens
ttctaaaggttcaaa

SEQ ID NO: 1108923 - DNA, 15 bp, Homo sapiens
tttctaaaggttcaa

SEQ ID NO: 1108924 - DNA, 15 bp, Homo sapiens
ttttctaaaggttca

SEQ ID NO: 1108925 - DNA, 15 bp, Homo sapiens
attttctaaaggttc

SEQ ID NO: 1108926 - DNA, 15 bp, Homo sapiens
gattttctaaaggtt

SEQ ID NO: 1108927 - DNA, 15 bp, Homo sapiens
cgattttctaaaggt

SEQ ID NO: 1108928 - DNA, 15 bp, Homo sapiens
acgattttctaaagg

SEQ ID NO: 1108929 - DNA, 15 bp, Homo sapiens
aacgattttctaaag

SEQ ID NO: 1108930 - DNA, 15 bp, Homo sapiens
gaacgattttctaaa

SEQ ID NO: 1108931 - DNA, 15 bp, Homo sapiens
tgaacgattttctaa

SEQ ID NO: 1108932 - DNA, 15 bp, Homo sapiens
atgaacgattttcta

SEQ ID NO: 1108933 - DNA, 15 bp, Homo sapiens
gatgaacgattttct

SEQ ID NO: 1108934 - DNA, 15 bp, Homo sapiens
agatgaacgattttc

SEQ ID NO: 1108935 - DNA, 15 bp, Homo sapiens
aagatgaacgatttt

SEQ ID NO: 1108936 - DNA, 15 bp, Homo sapiens
aaagatgaacgattt

SEQ ID NO: 1108937 - DNA, 15 bp, Homo sapiens
caaagatgaacgatt

SEQ ID NO: 1108938 - DNA, 15 bp, Homo sapiens
gcaaagatgaacgat

SEQ ID NO: 1108939 - DNA, 15 bp, Homo sapiens
agcaaagatgaacga

SEQ ID NO: 1108940 - DNA, 15 bp, Homo sapiens
aagcaaagatgaacg

SEQ ID NO: 1108941 - DNA, 15 bp, Homo sapiens
taagcaaagatgaac

SEQ ID NO: 1108942 - DNA, 15 bp, Homo sapiens
ataagcaaagatgaa

SEQ ID NO: 1108943 - DNA, 15 bp, Homo sapiens
tataagcaaagatga

SEQ ID NO: 1108944 - DNA, 15 bp, Homo sapiens
gtataagcaaagatg

SEQ ID NO: 1108945 - DNA, 15 bp, Homo sapiens
tgtataagcaaagat

SEQ ID NO: 1108946 - DNA, 15 bp, Homo sapiens
ctgtataagcaaaga

SEQ ID NO: 1108947 - DNA, 15 bp, Homo sapiens
tctgtataagcaaag

SEQ ID NO: 1108948 - DNA, 15 bp, Homo sapiens
ctctgtataagcaaa

SEQ ID NO: 1108949 - DNA, 15 bp, Homo sapiens
gctctgtataagcaa

SEQ ID NO: 1108950 - DNA, 15 bp, Homo sapiens
agctctgtataagca

SEQ ID NO: 1108951 - DNA, 15 bp, Homo sapiens
aagctctgtataagc

SEQ ID NO: 1108952 - DNA, 15 bp, Homo sapiens
gaagctctgtataag

SEQ ID NO: 1108953 - DNA, 15 bp, Homo sapiens
tgaagctctgtataa

SEQ ID NO: 1108954 - DNA, 15 bp, Homo sapiens
atgaagctctgtata

SEQ ID NO: 1108955 - DNA, 15 bp, Homo sapiens
gatgaagctctgtat

SEQ ID NO: 1108956 - DNA, 15 bp, Homo sapiens
agatgaagctctgta

SEQ ID NO: 1108957 - DNA, 15 bp, Homo sapiens
cagatgaagctctgt

SEQ ID NO: 1108958 - DNA, 15 bp, Homo sapiens
ccagatgaagctctg

SEQ ID NO: 1108959 - DNA, 15 bp, Homo sapiens
accagatgaagctct

SEQ ID NO: 1108960 - DNA, 15 bp, Homo sapiens
caccagatgaagctc

SEQ ID NO: 1108961 - DNA, 15 bp, Homo sapiens
acaccagatgaagct

SEQ ID NO: 1108962 - DNA, 15 bp, Homo sapiens
cacaccagatgaagc

SEQ ID NO: 1108963 - DNA, 15 bp, Homo sapiens
acacaccagatgaag

SEQ ID NO: 1108964 - DNA, 15 bp, Homo sapiens
gacacaccagatgaa

SEQ ID NO: 1108965 - DNA, 15 bp, Homo sapiens
ggacacaccagatga

SEQ ID NO: 1108966 - DNA, 15 bp, Homo sapiens
tggacacaccagatg

SEQ ID NO: 1108967 - DNA, 15 bp, Homo sapiens
atggacacaccagat

SEQ ID NO: 1108968 - DNA, 15 bp, Homo sapiens
catggacacaccaga

SEQ ID NO: 1108969 - DNA, 15 bp, Homo sapiens
gcatggacacaccag

SEQ ID NO: 1108970 - DNA, 15 bp, Homo sapiens
ggcatggacacacca

SEQ ID NO: 1108971 - DNA, 15 bp, Homo sapiens
tggcatggacacacc

SEQ ID NO: 1108972 - DNA, 15 bp, Homo sapiens
ctggcatggacacac

SEQ ID NO: 1108973 - DNA, 15 bp, Homo sapiens
cctggcatggacaca

SEQ ID NO: 1108974 - DNA, 15 bp, Homo sapiens
ccctggcatggacac

SEQ ID NO: 1108975 - DNA, 15 bp, Homo sapiens
accctggcatggaca

SEQ ID NO: 1108976 - DNA, 15 bp, Homo sapiens
caccctggcatggac

SEQ ID NO: 1108977 - DNA, 15 bp, Homo sapiens
gcaccctggcatgga

SEQ ID NO: 1108978 - DNA, 15 bp, Homo sapiens
tgcaccctggcatgg

SEQ ID NO: 1108979 - DNA, 15 bp, Homo sapiens
ttgcaccctggcatg

SEQ ID NO: 1108980 - DNA, 15 bp, Homo sapiens
cttgcaccctggcat

SEQ ID NO: 1108981 - DNA, 15 bp, Homo sapiens
tcttgcaccctggca

SEQ ID NO: 1108982 - DNA, 15 bp, Homo sapiens
ctcttgcaccctggc

SEQ ID NO: 1108983 - DNA, 15 bp, Homo sapiens
actcttgcaccctgg

SEQ ID NO: 1108984 - DNA, 15 bp, Homo sapiens
aactcttgcaccctg

SEQ ID NO: 1108985 - DNA, 15 bp, Homo sapiens
caactcttgcaccct

SEQ ID NO: 1108986 - DNA, 15 bp, Homo sapiens
acaactcttgcaccc

SEQ ID NO: 1108987 - DNA, 15 bp, Homo sapiens
gacaactcttgcacc

SEQ ID NO: 1108988 - DNA, 15 bp, Homo sapiens
agacaactcttgcac

SEQ ID NO: 1108989 - DNA, 15 bp, Homo sapiens
cagacaactcttgca

SEQ ID NO: 1108990 - DNA, 15 bp, Homo sapiens
acagacaactcttgc

SEQ ID NO: 1108991 - DNA, 15 bp, Homo sapiens
cacagacaactcttg

SEQ ID NO: 1108992 - DNA, 15 bp, Homo sapiens
gcacagacaactctt

SEQ ID NO: 1108993 - DNA, 15 bp, Homo sapiens
tgcacagacaactct

SEQ ID NO: 1108994 - DNA, 15 bp, Homo sapiens
gtgcacagacaactc

SEQ ID NO: 1108995 - DNA, 15 bp, Homo sapiens
agtgcacagacaact

SEQ ID NO: 1108996 - DNA, 15 bp, Homo sapiens
gagtgcacagacaac

SEQ ID NO: 1108997 - DNA, 15 bp, Homo sapiens
tgagtgcacagacaa

SEQ ID NO: 1108998 - DNA, 15 bp, Homo sapiens
ctgagtgcacagaca

SEQ ID NO: 1108999 - DNA, 15 bp, Homo sapiens
tctgagtgcacagac

SEQ ID NO: 1109000 - DNA, 15 bp, Homo sapiens
gtctgagtgcacaga

SEQ ID NO: 1109001 - DNA, 15 bp, Homo sapiens
agtctgagtgcacag

SEQ ID NO: 1109002 - DNA, 15 bp, Homo sapiens
aagtctgagtgcaca

SEQ ID NO: 1109003 - DNA, 15 bp, Homo sapiens
aaagtctgagtgcac

SEQ ID NO: 1109004 - DNA, 15 bp, Homo sapiens
aaaagtctgagtgca

SEQ ID NO: 1109005 - DNA, 15 bp, Homo sapiens
caaaagtctgagtgc

SEQ ID NO: 1109006 - DNA, 15 bp, Homo sapiens
tcaaaagtctgagtg

SEQ ID NO: 1109007 - DNA, 15 bp, Homo sapiens
ctcaaaagtctgagt

SEQ ID NO: 1109008 - DNA, 15 bp, Homo sapiens
gctcaaaagtctgag

SEQ ID NO: 1109009 - DNA, 15 bp, Homo sapiens
tgctcaaaagtctga

SEQ ID NO: 1109010 - DNA, 15 bp, Homo sapiens
ttgctcaaaagtctg

SEQ ID NO: 1109011 - DNA, 15 bp, Homo sapiens
cttgctcaaaagtct

SEQ ID NO: 1109012 - DNA, 15 bp, Homo sapiens
ccttgctcaaaagtc

SEQ ID NO: 1109013 - DNA, 15 bp, Homo sapiens
gccttgctcaaaagt

SEQ ID NO: 1109014 - DNA, 15 bp, Homo sapiens
agccttgctcaaaag

SEQ ID NO: 1109015 - DNA, 15 bp, Homo sapiens
cagccttgctcaaaa

SEQ ID NO: 1109016 - DNA, 15 bp, Homo sapiens
acagccttgctcaaa

SEQ ID NO: 1109017 - DNA, 15 bp, Homo sapiens
aacagccttgctcaa

SEQ ID NO: 1109018 - DNA, 15 bp, Homo sapiens
aaacagccttgctca

SEQ ID NO: 1109019 - DNA, 15 bp, Homo sapiens
gaaacagccttgctc

SEQ ID NO: 1109020 - DNA, 15 bp, Homo sapiens
tgaaacagccttgct

SEQ ID NO: 1109021 - DNA, 15 bp, Homo sapiens
ttgaaacagccttgc

SEQ ID NO: 1109022 - DNA, 15 bp, Homo sapiens
tttgaaacagccttg

SEQ ID NO: 1109023 - DNA, 15 bp, Homo sapiens
atttgaaacagcctt

SEQ ID NO: 1109024 - DNA, 15 bp, Homo sapiens
catttgaaacagcct

SEQ ID NO: 1109025 - DNA, 15 bp, Homo sapiens
acatttgaaacagcc

SEQ ID NO: 1109026 - DNA, 15 bp, Homo sapiens
aacatttgaaacagc

SEQ ID NO: 1109027 - DNA, 15 bp, Homo sapiens
gaacatttgaaacag

SEQ ID NO: 1109028 - DNA, 15 bp, Homo sapiens
agaacatttgaaaca

SEQ ID NO: 1109029 - DNA, 15 bp, Homo sapiens
aagaacatttgaaac

SEQ ID NO: 1109030 - DNA, 15 bp, Homo sapiens
aaagaacatttgaaa

SEQ ID NO: 1109031 - DNA, 15 bp, Homo sapiens
aaaagaacatttgaa

SEQ ID NO: 1109032 - DNA, 15 bp, Homo sapiens
taaaagaacatttga

SEQ ID NO: 1109033 - DNA, 15 bp, Homo sapiens
ctaaaagaacatttg

SEQ ID NO: 1109034 - DNA, 15 bp, Homo sapiens
cctaaaagaacattt

SEQ ID NO: 1109035 - DNA, 15 bp, Homo sapiens
ccctaaaagaacatt

SEQ ID NO: 1109036 - DNA, 15 bp, Homo sapiens
accctaaaagaacat

SEQ ID NO: 1109037 - DNA, 15 bp, Homo sapiens
taccctaaaagaaca

SEQ ID NO: 1109038 - DNA, 15 bp, Homo sapiens
ataccctaaaagaac

SEQ ID NO: 1109039 - DNA, 15 bp, Homo sapiens
aataccctaaaagaa

SEQ ID NO: 1109040 - DNA, 15 bp, Homo sapiens
aaataccctaaaaga

SEQ ID NO: 1109041 - DNA, 15 bp, Homo sapiens
caaataccctaaaag

SEQ ID NO: 1109042 - DNA, 15 bp, Homo sapiens
acaaataccctaaaa

SEQ ID NO: 1109043 - DNA, 15 bp, Homo sapiens
gacaaataccctaaa

SEQ ID NO: 1109044 - DNA, 15 bp, Homo sapiens
agacaaataccctaa

SEQ ID NO: 1109045 - DNA, 15 bp, Homo sapiens
gagacaaatacccta

SEQ ID NO: 1109046 - DNA, 15 bp, Homo sapiens
ggagacaaataccct

SEQ ID NO: 1109047 - DNA, 15 bp, Homo sapiens
tggagacaaataccc

SEQ ID NO: 1109048 - DNA, 15 bp, Homo sapiens
gtggagacaaatacc

SEQ ID NO: 1109049 - DNA, 15 bp, Homo sapiens
tgtggagacaaatac

SEQ ID NO: 1109050 - DNA, 15 bp, Homo sapiens
ttgtggagacaaata

SEQ ID NO: 1109051 - DNA, 15 bp, Homo sapiens
tttgtggagacaaat

SEQ ID NO: 1109052 - DNA, 15 bp, Homo sapiens
ttttgtggagacaaa

SEQ ID NO: 1109053 - DNA, 15 bp, Homo sapiens
gttttgtggagacaa

SEQ ID NO: 1109054 - DNA, 15 bp, Homo sapiens
agttttgtggagaca

SEQ ID NO: 1109055 - DNA, 15 bp, Homo sapiens
gagttttgtggagac

SEQ ID NO: 1109056 - DNA, 15 bp, Homo sapiens
agagttttgtggaga

SEQ ID NO: 1109057 - DNA, 15 bp, Homo sapiens
tagagttttgtggag

SEQ ID NO: 1109058 - DNA, 15 bp, Homo sapiens
atagagttttgtgga

SEQ ID NO: 1109059 - DNA, 15 bp, Homo sapiens
tatagagttttgtgg

SEQ ID NO: 1109060 - DNA, 15 bp, Homo sapiens
ctatagagttttgtg

SEQ ID NO: 1109061 - DNA, 15 bp, Homo sapiens
gctatagagttttgt

SEQ ID NO: 1109062 - DNA, 15 bp, Homo sapiens
agctatagagttttg

SEQ ID NO: 1109063 - DNA, 15 bp, Homo sapiens
cagctatagagtttt

SEQ ID NO: 1109064 - DNA, 15 bp, Homo sapiens
ccagctatagagttt

SEQ ID NO: 1109065 - DNA, 15 bp, Homo sapiens
cccagctatagagtt

SEQ ID NO: 1109066 - DNA, 15 bp, Homo sapiens
gcccagctatagagt

SEQ ID NO: 1109067 - DNA, 15 bp, Homo sapiens
ggcccagctatagag

SEQ ID NO: 1109068 - DNA, 15 bp, Homo sapiens
tggcccagctataga

SEQ ID NO: 1109069 - DNA, 15 bp, Homo sapiens
ctggcccagctatag

SEQ ID NO: 1109070 - DNA, 15 bp, Homo sapiens
cctggcccagctata

SEQ ID NO: 1109071 - DNA, 15 bp, Homo sapiens
tcctggcccagctat

SEQ ID NO: 1109072 - DNA, 15 bp, Homo sapiens
ctcctggcccagcta

SEQ ID NO: 1109073 - DNA, 15 bp, Homo sapiens
gctcctggcccagct

SEQ ID NO: 1109074 - DNA, 15 bp, Homo sapiens
tgctcctggcccagc

SEQ ID NO: 1109075 - DNA, 15 bp, Homo sapiens
atgctcctggcccag

SEQ ID NO: 1109076 - DNA, 15 bp, Homo sapiens
gatgctcctggccca

SEQ ID NO: 1109077 - DNA, 15 bp, Homo sapiens
agatgctcctggccc

SEQ ID NO: 1109078 - DNA, 15 bp, Homo sapiens
cagatgctcctggcc

SEQ ID NO: 1109079 - DNA, 15 bp, Homo sapiens
ccagatgctcctggc

SEQ ID NO: 1109080 - DNA, 15 bp, Homo sapiens
tccagatgctcctgg

SEQ ID NO: 1109081 - DNA, 15 bp, Homo sapiens
atccagatgctcctg

SEQ ID NO: 1109082 - DNA, 15 bp, Homo sapiens
gatccagatgctcct

SEQ ID NO: 1109083 - DNA, 15 bp, Homo sapiens
ggatccagatgctcc

SEQ ID NO: 1109084 - DNA, 15 bp, Homo sapiens
aggatccagatgctc

SEQ ID NO: 1109085 - DNA, 15 bp, Homo sapiens
caggatccagatgct

SEQ ID NO: 1109086 - DNA, 15 bp, Homo sapiens
gcaggatccagatgc

SEQ ID NO: 1109087 - DNA, 15 bp, Homo sapiens
tgcaggatccagatg

SEQ ID NO: 1109088 - DNA, 15 bp, Homo sapiens
ttgcaggatccagat

SEQ ID NO: 1109089 - DNA, 15 bp, Homo sapiens
gttgcaggatccaga

SEQ ID NO: 1109090 - DNA, 15 bp, Homo sapiens
ggttgcaggatccag

SEQ ID NO: 1109091 - DNA, 15 bp, Homo sapiens
tggttgcaggatcca

SEQ ID NO: 1109092 - DNA, 15 bp, Homo sapiens
ctggttgcaggatcc

SEQ ID NO: 1109093 - DNA, 15 bp, Homo sapiens
cctggttgcaggatc

SEQ ID NO: 1109094 - DNA, 15 bp, Homo sapiens
ccctggttgcaggat

SEQ ID NO: 1109095 - DNA, 15 bp, Homo sapiens
tccctggttgcagga

SEQ ID NO: 1109096 - DNA, 15 bp, Homo sapiens
atccctggttgcagg

SEQ ID NO: 1109097 - DNA, 15 bp, Homo sapiens
aatccctggttgcag

SEQ ID NO: 1109098 - DNA, 15 bp, Homo sapiens
aaatccctggttgca

SEQ ID NO: 1109099 - DNA, 15 bp, Homo sapiens
aaaatccctggttgc

SEQ ID NO: 1109100 - DNA, 15 bp, Homo sapiens
gaaaatccctggttg

SEQ ID NO: 1109101 - DNA, 15 bp, Homo sapiens
ggaaaatccctggtt

SEQ ID NO: 1109102 - DNA, 15 bp, Homo sapiens
tggaaaatccctggt

SEQ ID NO: 1109103 - DNA, 15 bp, Homo sapiens
ttggaaaatccctgg

SEQ ID NO: 1109104 - DNA, 15 bp, Homo sapiens
cttggaaaatccctg

SEQ ID NO: 1109105 - DNA, 15 bp, Homo sapiens
tcttggaaaatccct

SEQ ID NO: 1109106 - DNA, 15 bp, Homo sapiens
ctcttggaaaatccc

SEQ ID NO: 1109107 - DNA, 15 bp, Homo sapiens
gctcttggaaaatcc

SEQ ID NO: 1109108 - DNA, 15 bp, Homo sapiens
tgctcttggaaaatc

SEQ ID NO: 1109109 - DNA, 15 bp, Homo sapiens
ttgctcttggaaaat

SEQ ID NO: 1109110 - DNA, 15 bp, Homo sapiens
attgctcttggaaaa

SEQ ID NO: 1109111 - DNA, 15 bp, Homo sapiens
gattgctcttggaaa

SEQ ID NO: 1109112 - DNA, 15 bp, Homo sapiens
agattgctcttggaa

SEQ ID NO: 1109113 - DNA, 15 bp, Homo sapiens
aagattgctcttgga

SEQ ID NO: 1109114 - DNA, 15 bp, Homo sapiens
aaagattgctcttgg

SEQ ID NO: 1109115 - DNA, 15 bp, Homo sapiens
aaaagattgctcttg

SEQ ID NO: 1109116 - DNA, 15 bp, Homo sapiens
taaaagattgctctt

SEQ ID NO: 1109117 - DNA, 15 bp, Homo sapiens
ataaaagattgctct

SEQ ID NO: 1109118 - DNA, 15 bp, Homo sapiens
tataaaagattgctc

SEQ ID NO: 1109119 - DNA, 15 bp, Homo sapiens
atataaaagattgct

SEQ ID NO: 1109120 - DNA, 15 bp, Homo sapiens
aatataaaagattgc

SEQ ID NO: 1109121 - DNA, 15 bp, Homo sapiens
caatataaaagattg

SEQ ID NO: 1109122 - DNA, 15 bp, Homo sapiens
tcaatataaaagatt

SEQ ID NO: 1109123 - DNA, 15 bp, Homo sapiens
ctcaatataaaagat

SEQ ID NO: 1109124 - DNA, 15 bp, Homo sapiens
cctcaatataaaaga

SEQ ID NO: 1109125 - DNA, 15 bp, Homo sapiens
ccctcaatataaaag

SEQ ID NO: 1109126 - DNA, 15 bp, Homo sapiens
cccctcaatataaaa

SEQ ID NO: 1109127 - DNA, 15 bp, Homo sapiens
ccccctcaatataaa

SEQ ID NO: 1109128 - DNA, 15 bp, Homo sapiens
tccccctcaatataa

SEQ ID NO: 1109129 - DNA, 15 bp, Homo sapiens
ttccccctcaatata

SEQ ID NO: 1109130 - DNA, 15 bp, Homo sapiens
tttccccctcaatat

SEQ ID NO: 1109131 - DNA, 15 bp, Homo sapiens
ctttccccctcaata

SEQ ID NO: 1109132 - DNA, 15 bp, Homo sapiens
actttccccctcaat

SEQ ID NO: 1109133 - DNA, 15 bp, Homo sapiens
aactttccccctcaa

SEQ ID NO: 1109134 - DNA, 15 bp, Homo sapiens
aaactttccccctca

SEQ ID NO: 1109135 - DNA, 15 bp, Homo sapiens
taaactttccccctc

SEQ ID NO: 1109136 - DNA, 15 bp, Homo sapiens
ttaaactttccccct

SEQ ID NO: 1109137 - DNA, 15 bp, Homo sapiens
tttaaactttccccc

SEQ ID NO: 1109138 - DNA, 15 bp, Homo sapiens
ctttaaactttcccc

SEQ ID NO: 1109139 - DNA, 15 bp, Homo sapiens
cctttaaactttccc

SEQ ID NO: 1109140 - DNA, 15 bp, Homo sapiens
acctttaaactttcc

SEQ ID NO: 1109141 - DNA, 15 bp, Homo sapiens
tacctttaaactttc

SEQ ID NO: 1109142 - DNA, 15 bp, Homo sapiens
atacctttaaacttt

SEQ ID NO: 1109143 - DNA, 15 bp, Homo sapiens
aatacctttaaactt

SEQ ID NO: 1109144 - DNA, 15 bp, Homo sapiens
aaatacctttaaact

SEQ ID NO: 1109145 - DNA, 15 bp, Homo sapiens
aaaatacctttaaac

SEQ ID NO: 1109146 - DNA, 15 bp, Homo sapiens
aaaaatacctttaaa

SEQ ID NO: 1109147 - DNA, 15 bp, Homo sapiens
aaaaaatacctttaa

SEQ ID NO: 1109148 - DNA, 15 bp, Homo sapiens
aaaaaaataccttta

SEQ ID NO: 1109149 - DNA, 15 bp, Homo sapiens
aaaaaaaataccttt

SEQ ID NO: 1109150 - DNA, 15 bp, Homo sapiens
aaaaaaaaatacctt

SEQ ID NO: 1109151 - DNA, 15 bp, Homo sapiens
aaaaaaaaaatacct

SEQ ID NO: 1109152 - DNA, 15 bp, Homo sapiens
caaaaaaaaaaaata

SEQ ID NO: 1109153 - DNA, 15 bp, Homo sapiens
caagacaaaaaaaaa

SEQ ID NO: 1109154 - DNA, 15 bp, Homo sapiens
acaagacaaaaaaaa

SEQ ID NO: 1109155 - DNA, 15 bp, Homo sapiens
aacaagacaaaaaaa

SEQ ID NO: 1109156 - DNA, 15 bp, Homo sapiens
taacaagacaaaaaa

SEQ ID NO: 1109157 - DNA, 15 bp, Homo sapiens
ataacaagacaaaaa

SEQ ID NO: 1109158 - DNA, 15 bp, Homo sapiens
cataacaagacaaaa

SEQ ID NO: 1109159 - DNA, 15 bp, Homo sapiens
acataacaagacaaa

SEQ ID NO: 1109160 - DNA, 15 bp, Homo sapiens
aacataacaagacaa

SEQ ID NO: 1109161 - DNA, 15 bp, Homo sapiens
aaacataacaagaca

SEQ ID NO: 1109162 - DNA, 15 bp, Homo sapiens
aaaacataacaagac

SEQ ID NO: 1109163 - DNA, 15 bp, Homo sapiens
aaaaacataacaaga

SEQ ID NO: 1109164 - DNA, 15 bp, Homo sapiens
taaaaacataacaag

SEQ ID NO: 1109165 - DNA, 15 bp, Homo sapiens
ttaaaaacataacaa

SEQ ID NO: 1109166 - DNA, 15 bp, Homo sapiens
cttaaaaacataaca

SEQ ID NO: 1109167 - DNA, 15 bp, Homo sapiens
acttaaaaacataac

SEQ ID NO: 1109168 - DNA, 15 bp, Homo sapiens
tacttaaaaacataa

SEQ ID NO: 1109169 - DNA, 15 bp, Homo sapiens
ttacttaaaaacata

SEQ ID NO: 1109170 - DNA, 15 bp, Homo sapiens
gttacttaaaaacat

SEQ ID NO: 1109171 - DNA, 15 bp, Homo sapiens
agttacttaaaaaca

SEQ ID NO: 1109172 - DNA, 15 bp, Homo sapiens
aagttacttaaaaac

SEQ ID NO: 1109173 - DNA, 15 bp, Homo sapiens
aaagttacttaaaaa

SEQ ID NO: 1109174 - DNA, 15 bp, Homo sapiens
aaaagttacttaaaa

SEQ ID NO: 1109175 - DNA, 15 bp, Homo sapiens
gaaaagttacttaaa

SEQ ID NO: 1109176 - DNA, 15 bp, Homo sapiens
tgaaaagttacttaa

SEQ ID NO: 1109177 - DNA, 15 bp, Homo sapiens
gtgaaaagttactta

SEQ ID NO: 1109178 - DNA, 15 bp, Homo sapiens
tgtgaaaagttactt

SEQ ID NO: 1109179 - DNA, 15 bp, Homo sapiens
ttgtgaaaagttact

SEQ ID NO: 1109180 - DNA, 15 bp, Homo sapiens
gttgtgaaaagttac

SEQ ID NO: 1109181 - DNA, 15 bp, Homo sapiens
agttgtgaaaagtta

SEQ ID NO: 1109182 - DNA, 15 bp, Homo sapiens
tagttgtgaaaagtt

SEQ ID NO: 1109183 - DNA, 15 bp, Homo sapiens
gtagttgtgaaaagt

SEQ ID NO: 1109184 - DNA, 15 bp, Homo sapiens
tgtagttgtgaaaag

SEQ ID NO: 1109185 - DNA, 15 bp, Homo sapiens
ctgtagttgtgaaaa

SEQ ID NO: 1109186 - DNA, 15 bp, Homo sapiens
cctgtagttgtgaaa

SEQ ID NO: 1109187 - DNA, 15 bp, Homo sapiens
gcctgtagttgtgaa

SEQ ID NO: 1109188 - DNA, 15 bp, Homo sapiens
ggcctgtagttgtga

SEQ ID NO: 1109189 - DNA, 15 bp, Homo sapiens
aggcctgtagttgtg

SEQ ID NO: 1109190 - DNA, 15 bp, Homo sapiens
caggcctgtagttgt

SEQ ID NO: 1109191 - DNA, 15 bp, Homo sapiens
acaggcctgtagttg

SEQ ID NO: 1109192 - DNA, 15 bp, Homo sapiens
tacaggcctgtagtt

SEQ ID NO: 1109193 - DNA, 15 bp, Homo sapiens
ttacaggcctgtagt

SEQ ID NO: 1109194 - DNA, 15 bp, Homo sapiens
tttacaggcctgtag

SEQ ID NO: 1109195 - DNA, 15 bp, Homo sapiens
ttttacaggcctgta

SEQ ID NO: 1109196 - DNA, 15 bp, Homo sapiens
tttttacaggcctgt

SEQ ID NO: 1109197 - DNA, 15 bp, Homo sapiens
ttttttacaggcctg

SEQ ID NO: 1109198 - DNA, 15 bp, Homo sapiens
attttttacaggcct

SEQ ID NO: 1109199 - DNA, 15 bp, Homo sapiens
tattttttacaggcc

SEQ ID NO: 1109200 - DNA, 15 bp, Homo sapiens
ttattttttacaggc

SEQ ID NO: 1109201 - DNA, 15 bp, Homo sapiens
cttattttttacagg

SEQ ID NO: 1109202 - DNA, 15 bp, Homo sapiens
ccttattttttacag

SEQ ID NO: 1109203 - DNA, 15 bp, Homo sapiens
cccttattttttaca

SEQ ID NO: 1109204 - DNA, 15 bp, Homo sapiens
acccttattttttac

SEQ ID NO: 1109205 - DNA, 15 bp, Homo sapiens
aacccttatttttta

SEQ ID NO: 1109206 - DNA, 15 bp, Homo sapiens
caacccttatttttt

SEQ ID NO: 1109207 - DNA, 15 bp, Homo sapiens
ccaacccttattttt

SEQ ID NO: 1109208 - DNA, 15 bp, Homo sapiens
cccaacccttatttt

SEQ ID NO: 1109209 - DNA, 15 bp, Homo sapiens
tcccaacccttattt

SEQ ID NO: 1109210 - DNA, 15 bp, Homo sapiens
atcccaacccttatt

SEQ ID NO: 1109211 - DNA, 15 bp, Homo sapiens
tatcccaacccttat

SEQ ID NO: 1109212 - DNA, 15 bp, Homo sapiens
ctatcccaaccctta

SEQ ID NO: 1109213 - DNA, 15 bp, Homo sapiens
gctatcccaaccctt

SEQ ID NO: 1109214 - DNA, 15 bp, Homo sapiens
ggctatcccaaccct

SEQ ID NO: 1109215 - DNA, 15 bp, Homo sapiens
aggctatcccaaccc

SEQ ID NO: 1109216 - DNA, 15 bp, Homo sapiens
caggctatcccaacc

SEQ ID NO: 1109217 - DNA, 15 bp, Homo sapiens
tcaggctatcccaac

SEQ ID NO: 1109218 - DNA, 15 bp, Homo sapiens
ttcaggctatcccaa

SEQ ID NO: 1109219 - DNA, 15 bp, Homo sapiens
attcaggctatccca

SEQ ID NO: 1109220 - DNA, 15 bp, Homo sapiens
aattcaggctatccc

SEQ ID NO: 1109221 - DNA, 15 bp, Homo sapiens
gaattcaggctatcc

SEQ ID NO: 1109222 - DNA, 15 bp, Homo sapiens
ggaattcaggctatc

SEQ ID NO: 1109223 - DNA, 15 bp, Homo sapiens
tggaattcaggctat

SEQ ID NO: 1109224 - DNA, 15 bp, Homo sapiens
ctggaattcaggcta

SEQ ID NO: 1109225 - DNA, 15 bp, Homo sapiens
cctggaattcaggct

SEQ ID NO: 1109226 - DNA, 15 bp, Homo sapiens
ccctggaattcaggc

SEQ ID NO: 1109227 - DNA, 15 bp, Homo sapiens
gccctggaattcagg

SEQ ID NO: 1109228 - DNA, 15 bp, Homo sapiens
agccctggaattcag

SEQ ID NO: 1109229 - DNA, 15 bp, Homo sapiens
gagccctggaattca

SEQ ID NO: 1109230 - DNA, 15 bp, Homo sapiens
agagccctggaattc

SEQ ID NO: 1109231 - DNA, 15 bp, Homo sapiens
aagagccctggaatt

SEQ ID NO: 1109232 - DNA, 15 bp, Homo sapiens
caagagccctggaat

SEQ ID NO: 1109233 - DNA, 15 bp, Homo sapiens
gcaagagccctggaa

SEQ ID NO: 1109234 - DNA, 15 bp, Homo sapiens
agcaagagccctgga

SEQ ID NO: 1109235 - DNA, 15 bp, Homo sapiens
cagcaagagccctgg

SEQ ID NO: 1109236 - DNA, 15 bp, Homo sapiens
ccagcaagagccctg

SEQ ID NO: 1109237 - DNA, 15 bp, Homo sapiens
cccagcaagagccct

SEQ ID NO: 1109238 - DNA, 15 bp, Homo sapiens
gcccagcaagagccc

SEQ ID NO: 1109239 - DNA, 15 bp, Homo sapiens
ggcccagcaagagcc

SEQ ID NO: 1109240 - DNA, 15 bp, Homo sapiens
gggcccagcaagagc

SEQ ID NO: 1109241 - DNA, 15 bp, Homo sapiens
tgggcccagcaagag

SEQ ID NO: 1109242 - DNA, 15 bp, Homo sapiens
gtgggcccagcaaga

SEQ ID NO: 1109243 - DNA, 15 bp, Homo sapiens
agtgggcccagcaag

SEQ ID NO: 1109244 - DNA, 15 bp, Homo sapiens
gagtgggcccagcaa

SEQ ID NO: 1109245 - DNA, 15 bp, Homo sapiens
agagtgggcccagca

SEQ ID NO: 1109246 - DNA, 15 bp, Homo sapiens
cagagtgggcccagc

SEQ ID NO: 1109247 - DNA, 15 bp, Homo sapiens
gcagagtgggcccag

SEQ ID NO: 1109248 - DNA, 15 bp, Homo sapiens
agcagagtgggccca

SEQ ID NO: 1109249 - DNA, 15 bp, Homo sapiens
gagcagagtgggccc

SEQ ID NO: 1109250 - DNA, 15 bp, Homo sapiens
tgagcagagtgggcc

SEQ ID NO: 1109251 - DNA, 15 bp, Homo sapiens
ttgagcagagtgggc

SEQ ID NO: 1109252 - DNA, 15 bp, Homo sapiens
attgagcagagtggg

SEQ ID NO: 1109253 - DNA, 15 bp, Homo sapiens
aattgagcagagtgg

SEQ ID NO: 1109254 - DNA, 15 bp, Homo sapiens
aaattgagcagagtg

SEQ ID NO: 1109255 - DNA, 15 bp, Homo sapiens
caaattgagcagagt

SEQ ID NO: 1109256 - DNA, 15 bp, Homo sapiens
gcaaattgagcagag

SEQ ID NO: 1109257 - DNA, 15 bp, Homo sapiens
ggcaaattgagcaga

SEQ ID NO: 1109258 - DNA, 15 bp, Homo sapiens
aggcaaattgagcag

SEQ ID NO: 1109259 - DNA, 15 bp, Homo sapiens
gaggcaaattgagca

SEQ ID NO: 1109260 - DNA, 15 bp, Homo sapiens
agaggcaaattgagc

SEQ ID NO: 1109261 - DNA, 15 bp, Homo sapiens
gagaggcaaattgag

SEQ ID NO: 1109262 - DNA, 15 bp, Homo sapiens
cgagaggcaaattga

SEQ ID NO: 1109263 - DNA, 15 bp, Homo sapiens
acgagaggcaaattg

SEQ ID NO: 1109264 - DNA, 15 bp, Homo sapiens
aacgagaggcaaatt

SEQ ID NO: 1109265 - DNA, 15 bp, Homo sapiens
gaacgagaggcaaat

SEQ ID NO: 1109266 - DNA, 15 bp, Homo sapiens
ggaacgagaggcaaa

SEQ ID NO: 1109267 - DNA, 15 bp, Homo sapiens
tggaacgagaggcaa

SEQ ID NO: 1109268 - DNA, 15 bp, Homo sapiens
ttggaacgagaggca

SEQ ID NO: 1109269 - DNA, 15 bp, Homo sapiens
cttggaacgagaggc

SEQ ID NO: 1109270 - DNA, 15 bp, Homo sapiens
ccttggaacgagagg

SEQ ID NO: 1109271 - DNA, 15 bp, Homo sapiens
accttggaacgagag

SEQ ID NO: 1109272 - DNA, 15 bp, Homo sapiens
caccttggaacgaga

SEQ ID NO: 1109273 - DNA, 15 bp, Homo sapiens
tcaccttggaacgag

SEQ ID NO: 1109274 - DNA, 15 bp, Homo sapiens
ttcaccttggaacga

SEQ ID NO: 1109275 - DNA, 15 bp, Homo sapiens
attcaccttggaacg

SEQ ID NO: 1109276 - DNA, 15 bp, Homo sapiens
gattcaccttggaac

SEQ ID NO: 1109277 - DNA, 15 bp, Homo sapiens
tgattcaccttggaa

SEQ ID NO: 1109278 - DNA, 15 bp, Homo sapiens
ctgattcaccttgga

SEQ ID NO: 1109279 - DNA, 15 bp, Homo sapiens
gctgattcaccttgg

SEQ ID NO: 1109280 - DNA, 15 bp, Homo sapiens
tgctgattcaccttg

SEQ ID NO: 1109281 - DNA, 15 bp, Homo sapiens
ttgctgattcacctt

SEQ ID NO: 1109282 - DNA, 15 bp, Homo sapiens
attgctgattcacct

SEQ ID NO: 1109283 - DNA, 15 bp, Homo sapiens
aattgctgattcacc

SEQ ID NO: 1109284 - DNA, 15 bp, Homo sapiens
aaattgctgattcac

SEQ ID NO: 1109285 - DNA, 15 bp, Homo sapiens
gaaattgctgattca

SEQ ID NO: 1109286 - DNA, 15 bp, Homo sapiens
ggaaattgctgattc

SEQ ID NO: 1109287 - DNA, 15 bp, Homo sapiens
tggaaattgctgatt

SEQ ID NO: 1109288 - DNA, 15 bp, Homo sapiens
ttggaaattgctgat

SEQ ID NO: 1109289 - DNA, 15 bp, Homo sapiens
cttggaaattgctga

SEQ ID NO: 1109290 - DNA, 15 bp, Homo sapiens
ccttggaaattgctg

SEQ ID NO: 1109291 - DNA, 15 bp, Homo sapiens
gccttggaaattgct

SEQ ID NO: 1109292 - DNA, 15 bp, Homo sapiens
ggccttggaaattgc

SEQ ID NO: 1109293 - DNA, 15 bp, Homo sapiens
aggccttggaaattg

SEQ ID NO: 1109294 - DNA, 15 bp, Homo sapiens
caggccttggaaatt

SEQ ID NO: 1109295 - DNA, 15 bp, Homo sapiens
acaggccttggaaat

SEQ ID NO: 1109296 - DNA, 15 bp, Homo sapiens
aacaggccttggaaa

SEQ ID NO: 1109297 - DNA, 15 bp, Homo sapiens
caacaggccttggaa

SEQ ID NO: 1109298 - DNA, 15 bp, Homo sapiens
tcaacaggccttgga

SEQ ID NO: 1109299 - DNA, 15 bp, Homo sapiens
gtcaacaggccttgg

SEQ ID NO: 1109300 - DNA, 15 bp, Homo sapiens
tgtcaacaggccttg

SEQ ID NO: 1109301 - DNA, 15 bp, Homo sapiens
gtgtcaacaggcctt

SEQ ID NO: 1109302 - DNA, 15 bp, Homo sapiens
ggtgtcaacaggcct

SEQ ID NO: 1109303 - DNA, 15 bp, Homo sapiens
gggtgtcaacaggcc

SEQ ID NO: 1109304 - DNA, 15 bp, Homo sapiens
agggtgtcaacaggc

SEQ ID NO: 1109305 - DNA, 15 bp, Homo sapiens
gagggtgtcaacagg

SEQ ID NO: 1109306 - DNA, 15 bp, Homo sapiens
tgagggtgtcaacag

SEQ ID NO: 1109307 - DNA, 15 bp, Homo sapiens
ctgagggtgtcaaca

SEQ ID NO: 1109308 - DNA, 15 bp, Homo sapiens
tctgagggtgtcaac

SEQ ID NO: 1109309 - DNA, 15 bp, Homo sapiens
ctctgagggtgtcaa

SEQ ID NO: 1109310 - DNA, 15 bp, Homo sapiens
cctctgagggtgtca

SEQ ID NO: 1109311 - DNA, 15 bp, Homo sapiens
ccctctgagggtgtc

SEQ ID NO: 1109312 - DNA, 15 bp, Homo sapiens
accctctgagggtgt

SEQ ID NO: 1109313 - DNA, 15 bp, Homo sapiens
aaccctctgagggtg

SEQ ID NO: 1109314 - DNA, 15 bp, Homo sapiens
aaaccctctgagggt

SEQ ID NO: 1109315 - DNA, 15 bp, Homo sapiens
gaaaccctctgaggg

SEQ ID NO: 1109316 - DNA, 15 bp, Homo sapiens
ggaaaccctctgagg

SEQ ID NO: 1109317 - DNA, 15 bp, Homo sapiens
gggaaaccctctgag

SEQ ID NO: 1109318 - DNA, 15 bp, Homo sapiens
tgggaaaccctctga

SEQ ID NO: 1109319 - DNA, 15 bp, Homo sapiens
ttgggaaaccctctg

SEQ ID NO: 1109320 - DNA, 15 bp, Homo sapiens
cttgggaaaccctct

SEQ ID NO: 1109321 - DNA, 15 bp, Homo sapiens
gcttgggaaaccctc

SEQ ID NO: 1109322 - DNA, 15 bp, Homo sapiens
tgcttgggaaaccct

SEQ ID NO: 1109323 - DNA, 15 bp, Homo sapiens
gtgcttgggaaaccc

SEQ ID NO: 1109324 - DNA, 15 bp, Homo sapiens
tgtgcttgggaaacc

SEQ ID NO: 1109325 - DNA, 15 bp, Homo sapiens
gtgtgcttgggaaac

SEQ ID NO: 1109326 - DNA, 15 bp, Homo sapiens
agtgtgcttgggaaa

SEQ ID NO: 1109327 - DNA, 15 bp, Homo sapiens
gagtgtgcttgggaa

SEQ ID NO: 1109328 - DNA, 15 bp, Homo sapiens
agagtgtgcttggga

SEQ ID NO: 1109329 - DNA, 15 bp, Homo sapiens
cagagtgtgcttggg

SEQ ID NO: 1109330 - DNA, 15 bp, Homo sapiens
acagagtgtgcttgg

SEQ ID NO: 1109331 - DNA, 15 bp, Homo sapiens
cacagagtgtgcttg

SEQ ID NO: 1109332 - DNA, 15 bp, Homo sapiens
acacagagtgtgctt

SEQ ID NO: 1109333 - DNA, 15 bp, Homo sapiens
aacacagagtgtgct

SEQ ID NO: 1109334 - DNA, 15 bp, Homo sapiens
aaacacagagtgtgc

SEQ ID NO: 1109335 - DNA, 15 bp, Homo sapiens
caaacacagagtgtg

SEQ ID NO: 1109336 - DNA, 15 bp, Homo sapiens
ccaaacacagagtgt

SEQ ID NO: 1109337 - DNA, 15 bp, Homo sapiens
cccaaacacagagtg

SEQ ID NO: 1109338 - DNA, 15 bp, Homo sapiens
ccccaaacacagagt

SEQ ID NO: 1109339 - DNA, 15 bp, Homo sapiens
accccaaacacagag

SEQ ID NO: 1109340 - DNA, 15 bp, Homo sapiens
aaccccaaacacaga

SEQ ID NO: 1109341 - DNA, 15 bp, Homo sapiens
taaccccaaacacag

SEQ ID NO: 1109342 - DNA, 15 bp, Homo sapiens
ataaccccaaacaca

SEQ ID NO: 1109343 - DNA, 15 bp, Homo sapiens
aataaccccaaacac

SEQ ID NO: 1109344 - DNA, 15 bp, Homo sapiens
caataaccccaaaca

SEQ ID NO: 1109345 - DNA, 15 bp, Homo sapiens
gcaataaccccaaac

SEQ ID NO: 1109346 - DNA, 15 bp, Homo sapiens
agcaataaccccaaa

SEQ ID NO: 1109347 - DNA, 15 bp, Homo sapiens
gagcaataaccccaa

SEQ ID NO: 1109348 - DNA, 15 bp, Homo sapiens
agagcaataacccca

SEQ ID NO: 1109349 - DNA, 15 bp, Homo sapiens
cagagcaataacccc

SEQ ID NO: 1109350 - DNA, 15 bp, Homo sapiens
tcagagcaataaccc

SEQ ID NO: 1109351 - DNA, 15 bp, Homo sapiens
ctcagagcaataacc

SEQ ID NO: 1109352 - DNA, 15 bp, Homo sapiens
actcagagcaataac

SEQ ID NO: 1109353 - DNA, 15 bp, Homo sapiens
tactcagagcaataa

SEQ ID NO: 1109354 - DNA, 15 bp, Homo sapiens
atactcagagcaata

SEQ ID NO: 1109355 - DNA, 15 bp, Homo sapiens
catactcagagcaat

SEQ ID NO: 1109356 - DNA, 15 bp, Homo sapiens
acatactcagagcaa

SEQ ID NO: 1109357 - DNA, 15 bp, Homo sapiens
aacatactcagagca

SEQ ID NO: 1109358 - DNA, 15 bp, Homo sapiens
aaacatactcagagc

SEQ ID NO: 1109359 - DNA, 15 bp, Homo sapiens
gaaacatactcagag

SEQ ID NO: 1109360 - DNA, 15 bp, Homo sapiens
agaaacatactcaga

SEQ ID NO: 1109361 - DNA, 15 bp, Homo sapiens
gagaaacatactcag

SEQ ID NO: 1109362 - DNA, 15 bp, Homo sapiens
cgagaaacatactca

SEQ ID NO: 1109363 - DNA, 15 bp, Homo sapiens
acgagaaacatactc

SEQ ID NO: 1109364 - DNA, 15 bp, Homo sapiens
tacgagaaacatact

SEQ ID NO: 1109365 - DNA, 15 bp, Homo sapiens
atacgagaaacatac

SEQ ID NO: 1109366 - DNA, 15 bp, Homo sapiens
catacgagaaacata

SEQ ID NO: 1109367 - DNA, 15 bp, Homo sapiens
acatacgagaaacat

SEQ ID NO: 1109368 - DNA, 15 bp, Homo sapiens
gacatacgagaaaca

SEQ ID NO: 1109369 - DNA, 15 bp, Homo sapiens
tgacatacgagaaac

SEQ ID NO: 1109370 - DNA, 15 bp, Homo sapiens
gtgacatacgagaaa

SEQ ID NO: 1109371 - DNA, 15 bp, Homo sapiens
agtgacatacgagaa

SEQ ID NO: 1109372 - DNA, 15 bp, Homo sapiens
cagtgacatacgaga

SEQ ID NO: 1109373 - DNA, 15 bp, Homo sapiens
tcagtgacatacgag

SEQ ID NO: 1109374 - DNA, 15 bp, Homo sapiens
ttcagtgacatacga

SEQ ID NO: 1109375 - DNA, 15 bp, Homo sapiens
gttcagtgacatacg

SEQ ID NO: 1109376 - DNA, 15 bp, Homo sapiens
agttcagtgacatac

SEQ ID NO: 1109377 - DNA, 15 bp, Homo sapiens
cagttcagtgacata

SEQ ID NO: 1109378 - DNA, 15 bp, Homo sapiens
acagttcagtgacat

SEQ ID NO: 1109379 - DNA, 15 bp, Homo sapiens
cacagttcagtgaca

SEQ ID NO: 1109380 - DNA, 15 bp, Homo sapiens
gcacagttcagtgac

SEQ ID NO: 1109381 - DNA, 15 bp, Homo sapiens
agcacagttcagtga

SEQ ID NO: 1109382 - DNA, 15 bp, Homo sapiens
aagcacagttcagtg

SEQ ID NO: 1109383 - DNA, 15 bp, Homo sapiens
caagcacagttcagt

SEQ ID NO: 1109384 - DNA, 15 bp, Homo sapiens
ccaagcacagttcag

SEQ ID NO: 1109385 - DNA, 15 bp, Homo sapiens
cccaagcacagttca

SEQ ID NO: 1109386 - DNA, 15 bp, Homo sapiens
gcccaagcacagttc

SEQ ID NO: 1109387 - DNA, 15 bp, Homo sapiens
agcccaagcacagtt

SEQ ID NO: 1109388 - DNA, 15 bp, Homo sapiens
cagcccaagcacagt

SEQ ID NO: 1109389 - DNA, 15 bp, Homo sapiens
gcagcccaagcacag

SEQ ID NO: 1109390 - DNA, 15 bp, Homo sapiens
ggcagcccaagcaca

SEQ ID NO: 1109391 - DNA, 15 bp, Homo sapiens
gggcagcccaagcac

SEQ ID NO: 1109392 - DNA, 15 bp, Homo sapiens
agggcagcccaagca

SEQ ID NO: 1109393 - DNA, 15 bp, Homo sapiens
aagggcagcccaagc

SEQ ID NO: 1109394 - DNA, 15 bp, Homo sapiens
taagggcagcccaag

SEQ ID NO: 1109395 - DNA, 15 bp, Homo sapiens
ctaagggcagcccaa

SEQ ID NO: 1109396 - DNA, 15 bp, Homo sapiens
cctaagggcagccca

SEQ ID NO: 1109397 - DNA, 15 bp, Homo sapiens
ccctaagggcagccc

SEQ ID NO: 1109398 - DNA, 15 bp, Homo sapiens
tccctaagggcagcc

SEQ ID NO: 1109399 - DNA, 15 bp, Homo sapiens
gtccctaagggcagc

SEQ ID NO: 1109400 - DNA, 15 bp, Homo sapiens
tgtccctaagggcag

SEQ ID NO: 1109401 - DNA, 15 bp, Homo sapiens
atgtccctaagggca

SEQ ID NO: 1109402 - DNA, 15 bp, Homo sapiens
aatgtccctaagggc

SEQ ID NO: 1109403 - DNA, 15 bp, Homo sapiens
caatgtccctaaggg

SEQ ID NO: 1109404 - DNA, 15 bp, Homo sapiens
tcaatgtccctaagg

SEQ ID NO: 1109405 - DNA, 15 bp, Homo sapiens
atcaatgtccctaag

SEQ ID NO: 1109406 - DNA, 15 bp, Homo sapiens
gatcaatgtccctaa

SEQ ID NO: 1109407 - DNA, 15 bp, Homo sapiens
ggatcaatgtcccta

SEQ ID NO: 1109408 - DNA, 15 bp, Homo sapiens
aggatcaatgtccct

SEQ ID NO: 1109409 - DNA, 15 bp, Homo sapiens
aaggatcaatgtccc

SEQ ID NO: 1109410 - DNA, 15 bp, Homo sapiens
taaggatcaatgtcc

SEQ ID NO: 1109411 - DNA, 15 bp, Homo sapiens
ctaaggatcaatgtc

SEQ ID NO: 1109412 - DNA, 15 bp, Homo sapiens
cctaaggatcaatgt

SEQ ID NO: 1109413 - DNA, 15 bp, Homo sapiens
gcctaaggatcaatg

SEQ ID NO: 1109414 - DNA, 15 bp, Homo sapiens
tgcctaaggatcaat

SEQ ID NO: 1109415 - DNA, 15 bp, Homo sapiens
ttgcctaaggatcaa

SEQ ID NO: 1109416 - DNA, 15 bp, Homo sapiens
tttgcctaaggatca

SEQ ID NO: 1109417 - DNA, 15 bp, Homo sapiens
atttgcctaaggatc

SEQ ID NO: 1109418 - DNA, 15 bp, Homo sapiens
tatttgcctaaggat

SEQ ID NO: 1109419 - DNA, 15 bp, Homo sapiens
ctatttgcctaagga

SEQ ID NO: 1109420 - DNA, 15 bp, Homo sapiens
tctatttgcctaagg

SEQ ID NO: 1109421 - DNA, 15 bp, Homo sapiens
atctatttgcctaag

SEQ ID NO: 1109422 - DNA, 15 bp, Homo sapiens
tatctatttgcctaa

SEQ ID NO: 1109423 - DNA, 15 bp, Homo sapiens
ttatctatttgccta

SEQ ID NO: 1109424 - DNA, 15 bp, Homo sapiens
attatctatttgcct

SEQ ID NO: 1109425 - DNA, 15 bp, Homo sapiens
cattatctatttgcc

SEQ ID NO: 1109426 - DNA, 15 bp, Homo sapiens
acattatctatttgc

SEQ ID NO: 1109427 - DNA, 15 bp, Homo sapiens
aacattatctatttg

SEQ ID NO: 1109428 - DNA, 15 bp, Homo sapiens
gaacattatctattt

SEQ ID NO: 1109429 - DNA, 15 bp, Homo sapiens
agaacattatctatt

SEQ ID NO: 1109430 - DNA, 15 bp, Homo sapiens
aagaacattatctat

SEQ ID NO: 1109431 - DNA, 15 bp, Homo sapiens
caagaacattatcta

SEQ ID NO: 1109432 - DNA, 15 bp, Homo sapiens
tcaagaacattatct

SEQ ID NO: 1109433 - DNA, 15 bp, Homo sapiens
ttcaagaacattatc

SEQ ID NO: 1109434 - DNA, 15 bp, Homo sapiens
tttcaagaacattat

SEQ ID NO: 1109435 - DNA, 15 bp, Homo sapiens
ttttcaagaacatta

SEQ ID NO: 1109436 - DNA, 15 bp, Homo sapiens
tttttcaagaacatt

SEQ ID NO: 1109437 - DNA, 15 bp, Homo sapiens
ctttttcaagaacat

SEQ ID NO: 1109438 - DNA, 15 bp, Homo sapiens
actttttcaagaaca

SEQ ID NO: 1109439 - DNA, 15 bp, Homo sapiens
aactttttcaagaac

SEQ ID NO: 1109440 - DNA, 15 bp, Homo sapiens
aaactttttcaagaa

SEQ ID NO: 1109441 - DNA, 15 bp, Homo sapiens
caaactttttcaaga

SEQ ID NO: 1109442 - DNA, 15 bp, Homo sapiens
tcaaactttttcaag

SEQ ID NO: 1109443 - DNA, 15 bp, Homo sapiens
ttcaaactttttcaa

SEQ ID NO: 1109444 - DNA, 15 bp, Homo sapiens
attcaaactttttca

SEQ ID NO: 1109445 - DNA, 15 bp, Homo sapiens
aattcaaactttttc

SEQ ID NO: 1109446 - DNA, 15 bp, Homo sapiens
gaattcaaacttttt

SEQ ID NO: 1109447 - DNA, 15 bp, Homo sapiens
agaattcaaactttt

SEQ ID NO: 1109448 - DNA, 15 bp, Homo sapiens
cagaattcaaacttt

SEQ ID NO: 1109449 - DNA, 15 bp, Homo sapiens
acagaattcaaactt

SEQ ID NO: 1109450 - DNA, 15 bp, Homo sapiens
aacagaattcaaact

SEQ ID NO: 1109451 - DNA, 15 bp, Homo sapiens
gaacagaattcaaac

SEQ ID NO: 1109452 - DNA, 15 bp, Homo sapiens
tgaacagaattcaaa

SEQ ID NO: 1109453 - DNA, 15 bp, Homo sapiens
ctgaacagaattcaa

SEQ ID NO: 1109454 - DNA, 15 bp, Homo sapiens
actgaacagaattca

SEQ ID NO: 1109455 - DNA, 15 bp, Homo sapiens
cactgaacagaattc

SEQ ID NO: 1109456 - DNA, 15 bp, Homo sapiens
gcactgaacagaatt

SEQ ID NO: 1109457 - DNA, 15 bp, Homo sapiens
agcactgaacagaat

SEQ ID NO: 1109458 - DNA, 15 bp, Homo sapiens
aagcactgaacagaa

SEQ ID NO: 1109459 - DNA, 15 bp, Homo sapiens
aaagcactgaacaga

SEQ ID NO: 1109460 - DNA, 15 bp, Homo sapiens
taaagcactgaacag

SEQ ID NO: 1109461 - DNA, 15 bp, Homo sapiens
ctaaagcactgaaca

SEQ ID NO: 1109462 - DNA, 15 bp, Homo sapiens
tctaaagcactgaac

SEQ ID NO: 1109463 - DNA, 15 bp, Homo sapiens
ttctaaagcactgaa

SEQ ID NO: 1109464 - DNA, 15 bp, Homo sapiens
attctaaagcactga

SEQ ID NO: 1109465 - DNA, 15 bp, Homo sapiens
cattctaaagcactg

SEQ ID NO: 1109466 - DNA, 15 bp, Homo sapiens
tcattctaaagcact

SEQ ID NO: 1109467 - DNA, 15 bp, Homo sapiens
atcattctaaagcac

SEQ ID NO: 1109468 - DNA, 15 bp, Homo sapiens
catcattctaaagca

SEQ ID NO: 1109469 - DNA, 15 bp, Homo sapiens
tcatcattctaaagc

SEQ ID NO: 1109470 - DNA, 15 bp, Homo sapiens
ttcatcattctaaag

SEQ ID NO: 1109471 - DNA, 15 bp, Homo sapiens
tttcatcattctaaa

SEQ ID NO: 1109472 - DNA, 15 bp, Homo sapiens
ttttcatcattctaa

SEQ ID NO: 1109473 - DNA, 15 bp, Homo sapiens
gttttcatcattcta

SEQ ID NO: 1109474 - DNA, 15 bp, Homo sapiens
ggttttcatcattct

SEQ ID NO: 1109475 - DNA, 15 bp, Homo sapiens
cggttttcatcattc

SEQ ID NO: 1109476 - DNA, 15 bp, Homo sapiens
tcggttttcatcatt

SEQ ID NO: 1109477 - DNA, 15 bp, Homo sapiens
ctcggttttcatcat

SEQ ID NO: 1109478 - DNA, 15 bp, Homo sapiens
cctcggttttcatca

SEQ ID NO: 1109479 - DNA, 15 bp, Homo sapiens
acctcggttttcatc

SEQ ID NO: 1109480 - DNA, 15 bp, Homo sapiens
aacctcggttttcat

SEQ ID NO: 1109481 - DNA, 15 bp, Homo sapiens
caacctcggttttca

SEQ ID NO: 1109482 - DNA, 15 bp, Homo sapiens
ccaacctcggttttc

SEQ ID NO: 1109483 - DNA, 15 bp, Homo sapiens
tccaacctcggtttt

SEQ ID NO: 1109484 - DNA, 15 bp, Homo sapiens
ttccaacctcggttt

SEQ ID NO: 1109485 - DNA, 15 bp, Homo sapiens
tttccaacctcggtt

SEQ ID NO: 1109486 - DNA, 15 bp, Homo sapiens
ttttccaacctcggt

SEQ ID NO: 1109487 - DNA, 15 bp, Homo sapiens
cttttccaacctcgg

SEQ ID NO: 1109488 - DNA, 15 bp, Homo sapiens
ccttttccaacctcg

SEQ ID NO: 1109489 - DNA, 15 bp, Homo sapiens
accttttccaacctc

SEQ ID NO: 1109490 - DNA, 15 bp, Homo sapiens
aaccttttccaacct

SEQ ID NO: 1109491 - DNA, 15 bp, Homo sapiens
caaccttttccaacc

SEQ ID NO: 1109492 - DNA, 15 bp, Homo sapiens
acaaccttttccaac

SEQ ID NO: 1109493 - DNA, 15 bp, Homo sapiens
cacaaccttttccaa

SEQ ID NO: 1109494 - DNA, 15 bp, Homo sapiens
tcacaaccttttcca

SEQ ID NO: 1109495 - DNA, 15 bp, Homo sapiens
ttcacaaccttttcc

SEQ ID NO: 1109496 - DNA, 15 bp, Homo sapiens
tttcacaaccttttc

SEQ ID NO: 1109497 - DNA, 15 bp, Homo sapiens
gtttcacaacctttt

SEQ ID NO: 1109498 - DNA, 15 bp, Homo sapiens
ggtttcacaaccttt

SEQ ID NO: 1109499 - DNA, 15 bp, Homo sapiens
aggtttcacaacctt

SEQ ID NO: 1109500 - DNA, 15 bp, Homo sapiens
aaggtttcacaacct

SEQ ID NO: 1109501 - DNA, 15 bp, Homo sapiens
aaaggtttcacaacc

SEQ ID NO: 1109502 - DNA, 15 bp, Homo sapiens
aaaaggtttcacaac

SEQ ID NO: 1109503 - DNA, 15 bp, Homo sapiens
taaaaggtttcacaa

SEQ ID NO: 1109504 - DNA, 15 bp, Homo sapiens
ttaaaaggtttcaca

SEQ ID NO: 1109505 - DNA, 15 bp, Homo sapiens
gttaaaaggtttcac

SEQ ID NO: 1109506 - DNA, 15 bp, Homo sapiens
agttaaaaggtttca

SEQ ID NO: 1109507 - DNA, 15 bp, Homo sapiens
gagttaaaaggtttc

SEQ ID NO: 1109508 - DNA, 15 bp, Homo sapiens
agagttaaaaggttt

SEQ ID NO: 1109509 - DNA, 15 bp, Homo sapiens
gagagttaaaaggtt

SEQ ID NO: 1109510 - DNA, 15 bp, Homo sapiens
ggagagttaaaaggt

SEQ ID NO: 1109511 - DNA, 15 bp, Homo sapiens
tggagagttaaaagg

SEQ ID NO: 1109512 - DNA, 15 bp, Homo sapiens
gtggagagttaaaag

SEQ ID NO: 1109513 - DNA, 15 bp, Homo sapiens
tgtggagagttaaaa

SEQ ID NO: 1109514 - DNA, 15 bp, Homo sapiens
ctgtggagagttaaa

SEQ ID NO: 1109515 - DNA, 15 bp, Homo sapiens
actgtggagagttaa

SEQ ID NO: 1109516 - DNA, 15 bp, Homo sapiens
cactgtggagagtta

SEQ ID NO: 1109517 - DNA, 15 bp, Homo sapiens
ccactgtggagagtt

SEQ ID NO: 1109518 - DNA, 15 bp, Homo sapiens
tccactgtggagagt

SEQ ID NO: 1109519 - DNA, 15 bp, Homo sapiens
ctccactgtggagag

SEQ ID NO: 1109520 - DNA, 15 bp, Homo sapiens
actccactgtggaga

SEQ ID NO: 1109521 - DNA, 15 bp, Homo sapiens
gactccactgtggag

SEQ ID NO: 1109522 - DNA, 15 bp, Homo sapiens
ggactccactgtgga

SEQ ID NO: 1109523 - DNA, 15 bp, Homo sapiens
tggactccactgtgg

SEQ ID NO: 1109524 - DNA, 15 bp, Homo sapiens
atggactccactgtg

SEQ ID NO: 1109525 - DNA, 15 bp, Homo sapiens
aatggactccactgt

SEQ ID NO: 1109526 - DNA, 15 bp, Homo sapiens
taatggactccactg

SEQ ID NO: 1109527 - DNA, 15 bp, Homo sapiens
ataatggactccact

SEQ ID NO: 1109528 - DNA, 15 bp, Homo sapiens
aataatggactccac

SEQ ID NO: 1109529 - DNA, 15 bp, Homo sapiens
aaataatggactcca

SEQ ID NO: 1109530 - DNA, 15 bp, Homo sapiens
gaaataatggactcc

SEQ ID NO: 1109531 - DNA, 15 bp, Homo sapiens
ggaaataatggactc

SEQ ID NO: 1109532 - DNA, 15 bp, Homo sapiens
aggaaataatggact

SEQ ID NO: 1109533 - DNA, 15 bp, Homo sapiens
gaggaaataatggac

SEQ ID NO: 1109534 - DNA, 15 bp, Homo sapiens
agaggaaataatgga

SEQ ID NO: 1109535 - DNA, 15 bp, Homo sapiens
cagaggaaataatgg

SEQ ID NO: 1109536 - DNA, 15 bp, Homo sapiens
ccagaggaaataatg

SEQ ID NO: 1109537 - DNA, 15 bp, Homo sapiens
gccagaggaaataat

SEQ ID NO: 1109538 - DNA, 15 bp, Homo sapiens
agccagaggaaataa

SEQ ID NO: 1109539 - DNA, 15 bp, Homo sapiens
aagccagaggaaata

SEQ ID NO: 1109540 - DNA, 15 bp, Homo sapiens
gaagccagaggaaat

SEQ ID NO: 1109541 - DNA, 15 bp, Homo sapiens
ggaagccagaggaaa

SEQ ID NO: 1109542 - DNA, 15 bp, Homo sapiens
aggaagccagaggaa

SEQ ID NO: 1109543 - DNA, 15 bp, Homo sapiens
gaggaagccagagga

SEQ ID NO: 1109544 - DNA, 15 bp, Homo sapiens
tgaggaagccagagg

SEQ ID NO: 1109545 - DNA, 15 bp, Homo sapiens
ttgaggaagccagag

SEQ ID NO: 1109546 - DNA, 15 bp, Homo sapiens
tttgaggaagccaga

SEQ ID NO: 1109547 - DNA, 15 bp, Homo sapiens
atttgaggaagccag

SEQ ID NO: 1109548 - DNA, 15 bp, Homo sapiens
aatttgaggaagcca

SEQ ID NO: 1109549 - DNA, 15 bp, Homo sapiens
gaatttgaggaagcc

SEQ ID NO: 1109550 - DNA, 15 bp, Homo sapiens
tgaatttgaggaagc

SEQ ID NO: 1109551 - DNA, 15 bp, Homo sapiens
atgaatttgaggaag

SEQ ID NO: 1109552 - DNA, 15 bp, Homo sapiens
tatgaatttgaggaa

SEQ ID NO: 1109553 - DNA, 15 bp, Homo sapiens
atatgaatttgagga

SEQ ID NO: 1109554 - DNA, 15 bp, Homo sapiens
aatatgaatttgagg

SEQ ID NO: 1109555 - DNA, 15 bp, Homo sapiens
gaatatgaatttgag

SEQ ID NO: 1109556 - DNA, 15 bp, Homo sapiens
tgaatatgaatttga

SEQ ID NO: 1109557 - DNA, 15 bp, Homo sapiens
gtgaatatgaatttg

SEQ ID NO: 1109558 - DNA, 15 bp, Homo sapiens
tgtgaatatgaattt

SEQ ID NO: 1109559 - DNA, 15 bp, Homo sapiens
ctgtgaatatgaatt

SEQ ID NO: 1109560 - DNA, 15 bp, Homo sapiens
cctgtgaatatgaat

SEQ ID NO: 1109561 - DNA, 15 bp, Homo sapiens
acctgtgaatatgaa

SEQ ID NO: 1109562 - DNA, 15 bp, Homo sapiens
tacctgtgaatatga

SEQ ID NO: 1109563 - DNA, 15 bp, Homo sapiens
ttacctgtgaatatg

SEQ ID NO: 1109564 - DNA, 15 bp, Homo sapiens
cttacctgtgaatat

SEQ ID NO: 1109565 - DNA, 15 bp, Homo sapiens
acttacctgtgaata

SEQ ID NO: 1109566 - DNA, 15 bp, Homo sapiens
tacttacctgtgaat

SEQ ID NO: 1109567 - DNA, 15 bp, Homo sapiens
ttacttacctgtgaa

SEQ ID NO: 1109568 - DNA, 15 bp, Homo sapiens
gttacttacctgtga

SEQ ID NO: 1109569 - DNA, 15 bp, Homo sapiens
agttacttacctgtg

SEQ ID NO: 1109570 - DNA, 15 bp, Homo sapiens
aagttacttacctgt

SEQ ID NO: 1109571 - DNA, 15 bp, Homo sapiens
taagttacttacctg

SEQ ID NO: 1109572 - DNA, 15 bp, Homo sapiens
ataagttacttacct

SEQ ID NO: 1109573 - DNA, 15 bp, Homo sapiens
tataagttacttacc

SEQ ID NO: 1109574 - DNA, 15 bp, Homo sapiens
gtataagttacttac

SEQ ID NO: 1109575 - DNA, 15 bp, Homo sapiens
agtataagttactta

SEQ ID NO: 1109576 - DNA, 15 bp, Homo sapiens
aagtataagttactt

SEQ ID NO: 1109577 - DNA, 15 bp, Homo sapiens
caagtataagttact

SEQ ID NO: 1109578 - DNA, 15 bp, Homo sapiens
acaagtataagttac

SEQ ID NO: 1109579 - DNA, 15 bp, Homo sapiens
gacaagtataagtta

SEQ ID NO: 1109580 - DNA, 15 bp, Homo sapiens
agacaagtataagtt

SEQ ID NO: 1109581 - DNA, 15 bp, Homo sapiens
gagacaagtataagt

SEQ ID NO: 1109582 - DNA, 15 bp, Homo sapiens
agagacaagtataag

SEQ ID NO: 1109583 - DNA, 15 bp, Homo sapiens
cagagacaagtataa

SEQ ID NO: 1109584 - DNA, 15 bp, Homo sapiens
gcagagacaagtata

SEQ ID NO: 1109585 - DNA, 15 bp, Homo sapiens
tgcagagacaagtat

SEQ ID NO: 1109586 - DNA, 15 bp, Homo sapiens
ttgcagagacaagta

SEQ ID NO: 1109587 - DNA, 15 bp, Homo sapiens
tttgcagagacaagt

SEQ ID NO: 1109588 - DNA, 15 bp, Homo sapiens
atttgcagagacaag

SEQ ID NO: 1109589 - DNA, 15 bp, Homo sapiens
gatttgcagagacaa

SEQ ID NO: 1109590 - DNA, 15 bp, Homo sapiens
ggatttgcagagaca

SEQ ID NO: 1109591 - DNA, 15 bp, Homo sapiens
tggatttgcagagac

SEQ ID NO: 1109592 - DNA, 15 bp, Homo sapiens
atggatttgcagaga

SEQ ID NO: 1109593 - DNA, 15 bp, Homo sapiens
aatggatttgcagag

SEQ ID NO: 1109594 - DNA, 15 bp, Homo sapiens
gaatggatttgcaga

SEQ ID NO: 1109595 - DNA, 15 bp, Homo sapiens
ggaatggatttgcag

SEQ ID NO: 1109596 - DNA, 15 bp, Homo sapiens
gggaatggatttgca

SEQ ID NO: 1109597 - DNA, 15 bp, Homo sapiens
agggaatggatttgc

SEQ ID NO: 1109598 - DNA, 15 bp, Homo sapiens
gagggaatggatttg

SEQ ID NO: 1109599 - DNA, 15 bp, Homo sapiens
agagggaatggattt

SEQ ID NO: 1109600 - DNA, 15 bp, Homo sapiens
aagagggaatggatt

SEQ ID NO: 1109601 - DNA, 15 bp, Homo sapiens
gaagagggaatggat

SEQ ID NO: 1109602 - DNA, 15 bp, Homo sapiens
ggaagagggaatgga

SEQ ID NO: 1109603 - DNA, 15 bp, Homo sapiens
gggaagagggaatgg

SEQ ID NO: 1109604 - DNA, 15 bp, Homo sapiens
agggaagagggaatg

SEQ ID NO: 1109605 - DNA, 15 bp, Homo sapiens
aagggaagagggaat

SEQ ID NO: 1109606 - DNA, 15 bp, Homo sapiens
aaagggaagagggaa

SEQ ID NO: 1109607 - DNA, 15 bp, Homo sapiens
taaagggaagaggga

SEQ ID NO: 1109608 - DNA, 15 bp, Homo sapiens
ttaaagggaagaggg

SEQ ID NO: 1109609 - DNA, 15 bp, Homo sapiens
gttaaagggaagagg

SEQ ID NO: 1109610 - DNA, 15 bp, Homo sapiens
agttaaagggaagag

SEQ ID NO: 1109611 - DNA, 15 bp, Homo sapiens
gagttaaagggaaga

SEQ ID NO: 1109612 - DNA, 15 bp, Homo sapiens
agagttaaagggaag

SEQ ID NO: 1109613 - DNA, 15 bp, Homo sapiens
aagagttaaagggaa

SEQ ID NO: 1109614 - DNA, 15 bp, Homo sapiens
taagagttaaaggga

SEQ ID NO: 1109615 - DNA, 15 bp, Homo sapiens
gtaagagttaaaggg

SEQ ID NO: 1109616 - DNA, 15 bp, Homo sapiens
agtaagagttaaagg

SEQ ID NO: 1109617 - DNA, 15 bp, Homo sapiens
aagtaagagttaaag

SEQ ID NO: 1109618 - DNA, 15 bp, Homo sapiens
aaagtaagagttaaa

SEQ ID NO: 1109619 - DNA, 15 bp, Homo sapiens
caaagtaagagttaa

SEQ ID NO: 1109620 - DNA, 15 bp, Homo sapiens
acaaagtaagagtta

SEQ ID NO: 1109621 - DNA, 15 bp, Homo sapiens
cacaaagtaagagtt

SEQ ID NO: 1109622 - DNA, 15 bp, Homo sapiens
ccacaaagtaagagt

SEQ ID NO: 1109623 - DNA, 15 bp, Homo sapiens
tccacaaagtaagag

SEQ ID NO: 1109624 - DNA, 15 bp, Homo sapiens
ctccacaaagtaaga

SEQ ID NO: 1109625 - DNA, 15 bp, Homo sapiens
actccacaaagtaag

SEQ ID NO: 1109626 - DNA, 15 bp, Homo sapiens
cactccacaaagtaa

SEQ ID NO: 1109627 - DNA, 15 bp, Homo sapiens
ccactccacaaagta

SEQ ID NO: 1109628 - DNA, 15 bp, Homo sapiens
tccactccacaaagt

SEQ ID NO: 1109629 - DNA, 15 bp, Homo sapiens
ctccactccacaaag

SEQ ID NO: 1109630 - DNA, 15 bp, Homo sapiens
actccactccacaaa

SEQ ID NO: 1109631 - DNA, 15 bp, Homo sapiens
cactccactccacaa

SEQ ID NO: 1109632 - DNA, 15 bp, Homo sapiens
acactccactccaca

SEQ ID NO: 1109633 - DNA, 15 bp, Homo sapiens
aacactccactccac

SEQ ID NO: 1109634 - DNA, 15 bp, Homo sapiens
aaacactccactcca

SEQ ID NO: 1109635 - DNA, 15 bp, Homo sapiens
gaaacactccactcc

SEQ ID NO: 1109636 - DNA, 15 bp, Homo sapiens
agaaacactccactc

SEQ ID NO: 1109637 - DNA, 15 bp, Homo sapiens
cagaaacactccact

SEQ ID NO: 1109638 - DNA, 15 bp, Homo sapiens
ccagaaacactccac

SEQ ID NO: 1109639 - DNA, 15 bp, Homo sapiens
accagaaacactcca

SEQ ID NO: 1109640 - DNA, 15 bp, Homo sapiens
aaccagaaacactcc

SEQ ID NO: 1109641 - DNA, 15 bp, Homo sapiens
aaaccagaaacactc

SEQ ID NO: 1109642 - DNA, 15 bp, Homo sapiens
taaaccagaaacact

SEQ ID NO: 1109643 - DNA, 15 bp, Homo sapiens
ataaaccagaaacac

SEQ ID NO: 1109644 - DNA, 15 bp, Homo sapiens
aataaaccagaaaca

SEQ ID NO: 1109645 - DNA, 15 bp, Homo sapiens
taataaaccagaaac

SEQ ID NO: 1109646 - DNA, 15 bp, Homo sapiens
tttaataaaccagaa

SEQ ID NO: 1109647 - DNA, 15 bp, Homo sapiens
gtttaataaaccaga

SEQ ID NO: 1109648 - DNA, 15 bp, Homo sapiens
tgtttaataaaccag

SEQ ID NO: 1109649 - DNA, 15 bp, Homo sapiens
atgtttaataaacca

SEQ ID NO: 1109650 - DNA, 15 bp, Homo sapiens
aatgtttaataaacc

SEQ ID NO: 1109651 - DNA, 15 bp, Homo sapiens
caatgtttaataaac

SEQ ID NO: 1109652 - DNA, 15 bp, Homo sapiens
ccaatgtttaataaa

SEQ ID NO: 1109653 - DNA, 15 bp, Homo sapiens
accaatgtttaataa

SEQ ID NO: 1109654 - DNA, 15 bp, Homo sapiens
gaccaatgtttaata

SEQ ID NO: 1109655 - DNA, 15 bp, Homo sapiens
agaccaatgtttaat

SEQ ID NO: 1109656 - DNA, 15 bp, Homo sapiens
gagaccaatgtttaa

SEQ ID NO: 1109657 - DNA, 15 bp, Homo sapiens
agagaccaatgttta

SEQ ID NO: 1109658 - DNA, 15 bp, Homo sapiens
aagagaccaatgttt

SEQ ID NO: 1109659 - DNA, 15 bp, Homo sapiens
caagagaccaatgtt

SEQ ID NO: 1109660 - DNA, 15 bp, Homo sapiens
acaagagaccaatgt

SEQ ID NO: 1109661 - DNA, 15 bp, Homo sapiens
gacaagagaccaatg

SEQ ID NO: 1109662 - DNA, 15 bp, Homo sapiens
ggacaagagaccaat

SEQ ID NO: 1109663 - DNA, 15 bp, Homo sapiens
tggacaagagaccaa

SEQ ID NO: 1109664 - DNA, 15 bp, Homo sapiens
ctggacaagagacca

SEQ ID NO: 1109665 - DNA, 15 bp, Homo sapiens
actggacaagagacc

SEQ ID NO: 1109666 - DNA, 15 bp, Homo sapiens
cactggacaagagac

SEQ ID NO: 1109667 - DNA, 15 bp, Homo sapiens
acactggacaagaga

SEQ ID NO: 1109668 - DNA, 15 bp, Homo sapiens
tacactggacaagag

SEQ ID NO: 1109669 - DNA, 15 bp, Homo sapiens
ttacactggacaaga

SEQ ID NO: 1109670 - DNA, 15 bp, Homo sapiens
tttacactggacaag

SEQ ID NO: 1109671 - DNA, 15 bp, Homo sapiens
gtttacactggacaa

SEQ ID NO: 1109672 - DNA, 15 bp, Homo sapiens
tgtttacactggaca

SEQ ID NO: 1109673 - DNA, 15 bp, Homo sapiens
ttgtttacactggac

SEQ ID NO: 1109674 - DNA, 15 bp, Homo sapiens
gttgtttacactgga

SEQ ID NO: 1109675 - DNA, 15 bp, Homo sapiens
cgttgtttacactgg

SEQ ID NO: 1109676 - DNA, 15 bp, Homo sapiens
gcgttgtttacactg

SEQ ID NO: 1109677 - DNA, 15 bp, Homo sapiens
agcgttgtttacact

SEQ ID NO: 1109678 - DNA, 15 bp, Homo sapiens
tagcgttgtttacac

SEQ ID NO: 1109679 - DNA, 15 bp, Homo sapiens
gtagcgttgtttaca

SEQ ID NO: 1109680 - DNA, 15 bp, Homo sapiens
tgtagcgttgtttac

SEQ ID NO: 1109681 - DNA, 15 bp, Homo sapiens
ttgtagcgttgttta

SEQ ID NO: 1109682 - DNA, 15 bp, Homo sapiens
attgtagcgttgttt

SEQ ID NO: 1109683 - DNA, 15 bp, Homo sapiens
tattgtagcgttgtt

SEQ ID NO: 1109684 - DNA, 15 bp, Homo sapiens
gtattgtagcgttgt

SEQ ID NO: 1109685 - DNA, 15 bp, Homo sapiens
agtattgtagcgttg

SEQ ID NO: 1109686 - DNA, 15 bp, Homo sapiens
aagtattgtagcgtt

SEQ ID NO: 1109687 - DNA, 15 bp, Homo sapiens
caagtattgtagcgt

SEQ ID NO: 1109688 - DNA, 15 bp, Homo sapiens
ccaagtattgtagcg

SEQ ID NO: 1109689 - DNA, 15 bp, Homo sapiens
tccaagtattgtagc

SEQ ID NO: 1109690 - DNA, 15 bp, Homo sapiens
atccaagtattgtag

SEQ ID NO: 1109691 - DNA, 15 bp, Homo sapiens
tatccaagtattgta

SEQ ID NO: 1109692 - DNA, 15 bp, Homo sapiens
ctatccaagtattgt

SEQ ID NO: 1109693 - DNA, 15 bp, Homo sapiens
tctatccaagtattg

SEQ ID NO: 1109694 - DNA, 15 bp, Homo sapiens
ttctatccaagtatt

SEQ ID NO: 1109695 - DNA, 15 bp, Homo sapiens
tttctatccaagtat

SEQ ID NO: 1109696 - DNA, 15 bp, Homo sapiens
gtttctatccaagta

SEQ ID NO: 1109697 - DNA, 15 bp, Homo sapiens
agtttctatccaagt

SEQ ID NO: 1109698 - DNA, 15 bp, Homo sapiens
aagtttctatccaag

SEQ ID NO: 1109699 - DNA, 15 bp, Homo sapiens
taagtttctatccaa

SEQ ID NO: 1109700 - DNA, 15 bp, Homo sapiens
gtaagtttctatcca

SEQ ID NO: 1109701 - DNA, 15 bp, Homo sapiens
tgtaagtttctatcc

SEQ ID NO: 1109702 - DNA, 15 bp, Homo sapiens
ctgtaagtttctatc

SEQ ID NO: 1109703 - DNA, 15 bp, Homo sapiens
cctgtaagtttctat

SEQ ID NO: 1109704 - DNA, 15 bp, Homo sapiens
tcctgtaagtttcta

SEQ ID NO: 1109705 - DNA, 15 bp, Homo sapiens
atcctgtaagtttct

SEQ ID NO: 1109706 - DNA, 15 bp, Homo sapiens
catcctgtaagtttc

SEQ ID NO: 1109707 - DNA, 15 bp, Homo sapiens
gcatcctgtaagttt

SEQ ID NO: 1109708 - DNA, 15 bp, Homo sapiens
tgcatcctgtaagtt

SEQ ID NO: 1109709 - DNA, 15 bp, Homo sapiens
atgcatcctgtaagt

SEQ ID NO: 1109710 - DNA, 15 bp, Homo sapiens
aatgcatcctgtaag

SEQ ID NO: 1109711 - DNA, 15 bp, Homo sapiens
taatgcatcctgtaa

SEQ ID NO: 1109712 - DNA, 15 bp, Homo sapiens
ttaatgcatcctgta

SEQ ID NO: 1109713 - DNA, 15 bp, Homo sapiens
attaatgcatcctgt

SEQ ID NO: 1109714 - DNA, 15 bp, Homo sapiens
cattaatgcatcctg

SEQ ID NO: 1109715 - DNA, 15 bp, Homo sapiens
tcattaatgcatcct

SEQ ID NO: 1109716 - DNA, 15 bp, Homo sapiens
atcattaatgcatcc

SEQ ID NO: 1109717 - DNA, 15 bp, Homo sapiens
aatcattaatgcatc

SEQ ID NO: 1109718 - DNA, 15 bp, Homo sapiens
aaatcattaatgcat

SEQ ID NO: 1109719 - DNA, 15 bp, Homo sapiens
gaaatcattaatgca

SEQ ID NO: 1109720 - DNA, 15 bp, Homo sapiens
tgaaatcattaatgc

SEQ ID NO: 1109721 - DNA, 15 bp, Homo sapiens
gtgaaatcattaatg

SEQ ID NO: 1109722 - DNA, 15 bp, Homo sapiens
tgtgaaatcattaat

SEQ ID NO: 1109723 - DNA, 15 bp, Homo sapiens
ttgtgaaatcattaa

SEQ ID NO: 1109724 - DNA, 15 bp, Homo sapiens
gttgtgaaatcatta

SEQ ID NO: 1109725 - DNA, 15 bp, Homo sapiens
tgttgtgaaatcatt

SEQ ID NO: 1109726 - DNA, 15 bp, Homo sapiens
atgttgtgaaatcat

SEQ ID NO: 1109727 - DNA, 15 bp, Homo sapiens
aatgttgtgaaatca

SEQ ID NO: 1109728 - DNA, 15 bp, Homo sapiens
caatgttgtgaaatc

SEQ ID NO: 1109729 - DNA, 15 bp, Homo sapiens
acaatgttgtgaaat

SEQ ID NO: 1109730 - DNA, 15 bp, Homo sapiens
tacaatgttgtgaaa

SEQ ID NO: 1109731 - DNA, 15 bp, Homo sapiens
atacaatgttgtgaa

SEQ ID NO: 1109732 - DNA, 15 bp, Homo sapiens
tatacaatgttgtga

SEQ ID NO: 1109733 - DNA, 15 bp, Homo sapiens
gtatacaatgttgtg

SEQ ID NO: 1109734 - DNA, 15 bp, Homo sapiens
tgtatacaatgttgt

SEQ ID NO: 1109735 - DNA, 15 bp, Homo sapiens
ttgtatacaatgttg

SEQ ID NO: 1109736 - DNA, 15 bp, Homo sapiens
attgtatacaatgtt

SEQ ID NO: 1109737 - DNA, 15 bp, Homo sapiens
tattgtatacaatgt

SEQ ID NO: 1109738 - DNA, 15 bp, Homo sapiens
gtattgtatacaatg

SEQ ID NO: 1109739 - DNA, 15 bp, Homo sapiens
tgtattgtatacaat

SEQ ID NO: 1109740 - DNA, 15 bp, Homo sapiens
ctgtattgtatacaa

SEQ ID NO: 1109741 - DNA, 15 bp, Homo sapiens
tctgtattgtataca

SEQ ID NO: 1109742 - DNA, 15 bp, Homo sapiens
atctgtattgtatac

SEQ ID NO: 1109743 - DNA, 15 bp, Homo sapiens
catctgtattgtata

SEQ ID NO: 1109744 - DNA, 15 bp, Homo sapiens
tcatctgtattgtat

SEQ ID NO: 1109745 - DNA, 15 bp, Homo sapiens
gtcatctgtattgta

SEQ ID NO: 1109746 - DNA, 15 bp, Homo sapiens
agtcatctgtattgt

SEQ ID NO: 1109747 - DNA, 15 bp, Homo sapiens
gagtcatctgtattg

SEQ ID NO: 1109748 - DNA, 15 bp, Homo sapiens
agagtcatctgtatt

SEQ ID NO: 1109749 - DNA, 15 bp, Homo sapiens
aagagtcatctgtat

SEQ ID NO: 1109750 - DNA, 15 bp, Homo sapiens
caagagtcatctgta

SEQ ID NO: 1109751 - DNA, 15 bp, Homo sapiens
ccaagagtcatctgt

SEQ ID NO: 1109752 - DNA, 15 bp, Homo sapiens
accaagagtcatctg

SEQ ID NO: 1109753 - DNA, 15 bp, Homo sapiens
aaccaagagtcatct

SEQ ID NO: 1109754 - DNA, 15 bp, Homo sapiens
caaccaagagtcatc

SEQ ID NO: 1109755 - DNA, 15 bp, Homo sapiens
gcaaccaagagtcat

SEQ ID NO: 1109756 - DNA, 15 bp, Homo sapiens
agcaaccaagagtca

SEQ ID NO: 1109757 - DNA, 15 bp, Homo sapiens
cagcaaccaagagtc

SEQ ID NO: 1109758 - DNA, 15 bp, Homo sapiens
acagcaaccaagagt

SEQ ID NO: 1109759 - DNA, 15 bp, Homo sapiens
gacagcaaccaagag

SEQ ID NO: 1109760 - DNA, 15 bp, Homo sapiens
agacagcaaccaaga

SEQ ID NO: 1109761 - DNA, 15 bp, Homo sapiens
aagacagcaaccaag

SEQ ID NO: 1109762 - DNA, 15 bp, Homo sapiens
gaagacagcaaccaa

SEQ ID NO: 1109763 - DNA, 15 bp, Homo sapiens
agaagacagcaacca

SEQ ID NO: 1109764 - DNA, 15 bp, Homo sapiens
aagaagacagcaacc

SEQ ID NO: 1109765 - DNA, 15 bp, Homo sapiens
aaagaagacagcaac

SEQ ID NO: 1109766 - DNA, 15 bp, Homo sapiens
taaagaagacagcaa

SEQ ID NO: 1109767 - DNA, 15 bp, Homo sapiens
ataaagaagacagca

SEQ ID NO: 1109768 - DNA, 15 bp, Homo sapiens
tataaagaagacagc

SEQ ID NO: 1109769 - DNA, 15 bp, Homo sapiens
ctataaagaagacag

SEQ ID NO: 1109770 - DNA, 15 bp, Homo sapiens
gctataaagaagaca

SEQ ID NO: 1109771 - DNA, 15 bp, Homo sapiens
tgctataaagaagac

SEQ ID NO: 1109772 - DNA, 15 bp, Homo sapiens
ttgctataaagaaga

SEQ ID NO: 1109773 - DNA, 15 bp, Homo sapiens
attgctataaagaag

SEQ ID NO: 1109774 - DNA, 15 bp, Homo sapiens
cattgctataaagaa

SEQ ID NO: 1109775 - DNA, 15 bp, Homo sapiens
gcattgctataaaga

SEQ ID NO: 1109776 - DNA, 15 bp, Homo sapiens
agcattgctataaag

SEQ ID NO: 1109777 - DNA, 15 bp, Homo sapiens
tagcattgctataaa

SEQ ID NO: 1109778 - DNA, 15 bp, Homo sapiens
atagcattgctataa

SEQ ID NO: 1109779 - DNA, 15 bp, Homo sapiens
aatagcattgctata

SEQ ID NO: 1109780 - DNA, 15 bp, Homo sapiens
aaatagcattgctat

SEQ ID NO: 1109781 - DNA, 15 bp, Homo sapiens
gaaatagcattgcta

SEQ ID NO: 1109782 - DNA, 15 bp, Homo sapiens
tgaaatagcattgct

SEQ ID NO: 1109783 - DNA, 15 bp, Homo sapiens
atgaaatagcattgc

SEQ ID NO: 1109784 - DNA, 15 bp, Homo sapiens
catgaaatagcattg

SEQ ID NO: 1109785 - DNA, 15 bp, Homo sapiens
acatgaaatagcatt

SEQ ID NO: 1109786 - DNA, 15 bp, Homo sapiens
tacatgaaatagcat

SEQ ID NO: 1109787 - DNA, 15 bp, Homo sapiens
atacatgaaatagca

SEQ ID NO: 1109788 - DNA, 15 bp, Homo sapiens
gatacatgaaatagc

SEQ ID NO: 1109789 - DNA, 15 bp, Homo sapiens
tgatacatgaaatag

SEQ ID NO: 1109790 - DNA, 15 bp, Homo sapiens
ttgatacatgaaata

SEQ ID NO: 1109791 - DNA, 15 bp, Homo sapiens
attgatacatgaaat

SEQ ID NO: 1109792 - DNA, 15 bp, Homo sapiens
gattgatacatgaaa

SEQ ID NO: 1109793 - DNA, 15 bp, Homo sapiens
agattgatacatgaa

SEQ ID NO: 1109794 - DNA, 15 bp, Homo sapiens
gagattgatacatga

SEQ ID NO: 1109795 - DNA, 15 bp, Homo sapiens
agagattgatacatg

SEQ ID NO: 1109796 - DNA, 15 bp, Homo sapiens
aagagattgatacat

SEQ ID NO: 1109797 - DNA, 15 bp, Homo sapiens
taagagattgataca

SEQ ID NO: 1109798 - DNA, 15 bp, Homo sapiens
ctaagagattgatac

SEQ ID NO: 1109799 - DNA, 15 bp, Homo sapiens
tctaagagattgata

SEQ ID NO: 1109800 - DNA, 15 bp, Homo sapiens
ctctaagagattgat

SEQ ID NO: 1109801 - DNA, 15 bp, Homo sapiens
tctctaagagattga

SEQ ID NO: 1109802 - DNA, 15 bp, Homo sapiens
ctctctaagagattg

SEQ ID NO: 1109803 - DNA, 15 bp, Homo sapiens
tctctctaagagatt

SEQ ID NO: 1109804 - DNA, 15 bp, Homo sapiens
ctctctctaagagat

SEQ ID NO: 1109805 - DNA, 15 bp, Homo sapiens
tctctctctaagaga

SEQ ID NO: 1109806 - DNA, 15 bp, Homo sapiens
ctctctctctaagag

SEQ ID NO: 1109807 - DNA, 15 bp, Homo sapiens
tctctctctctaaga

SEQ ID NO: 1109808 - DNA, 15 bp, Homo sapiens
ctctctctctctaag

SEQ ID NO: 1109809 - DNA, 15 bp, Homo sapiens
tctctctctctctaa

SEQ ID NO: 1109810 - DNA, 15 bp, Homo sapiens
ccactctctctctct

SEQ ID NO: 1109811 - DNA, 15 bp, Homo sapiens
accactctctctctc

SEQ ID NO: 1109812 - DNA, 15 bp, Homo sapiens
caccactctctctct

SEQ ID NO: 1109813 - DNA, 15 bp, Homo sapiens
acaccactctctctc

SEQ ID NO: 1109814 - DNA, 15 bp, Homo sapiens
tacaccactctctct

SEQ ID NO: 1109815 - DNA, 15 bp, Homo sapiens
gtacaccactctctc

SEQ ID NO: 1109816 - DNA, 15 bp, Homo sapiens
tgtacaccactctct

SEQ ID NO: 1109817 - DNA, 15 bp, Homo sapiens
atgtacaccactctc

SEQ ID NO: 1109818 - DNA, 15 bp, Homo sapiens
catgtacaccactct

SEQ ID NO: 1109819 - DNA, 15 bp, Homo sapiens
ccatgtacaccactc

SEQ ID NO: 1109820 - DNA, 15 bp, Homo sapiens
cccatgtacaccact

SEQ ID NO: 1109821 - DNA, 15 bp, Homo sapiens
acccatgtacaccac

SEQ ID NO: 1109822 - DNA, 15 bp, Homo sapiens
cacccatgtacacca

SEQ ID NO: 1109823 - DNA, 15 bp, Homo sapiens
acacccatgtacacc

SEQ ID NO: 1109824 - DNA, 15 bp, Homo sapiens
cacacccatgtacac

SEQ ID NO: 1109825 - DNA, 15 bp, Homo sapiens
acacacccatgtaca

SEQ ID NO: 1109826 - DNA, 15 bp, Homo sapiens
cacacacccatgtac

SEQ ID NO: 1109827 - DNA, 15 bp, Homo sapiens
ccacacacccatgta

SEQ ID NO: 1109828 - DNA, 15 bp, Homo sapiens
accacacacccatgt

SEQ ID NO: 1109829 - DNA, 15 bp, Homo sapiens
cctgaggaaactgct

SEQ ID NO: 1109830 - DNA, 15 bp, Homo sapiens
ccctgaggaaactgc

SEQ ID NO: 1109831 - DNA, 15 bp, Homo sapiens
accctgaggaaactg

SEQ ID NO: 1109832 - DNA, 15 bp, Homo sapiens
gaccctgaggaaact

SEQ ID NO: 1109833 - DNA, 15 bp, Homo sapiens
agaccctgaggaaac

SEQ ID NO: 1109834 - DNA, 15 bp, Homo sapiens
aagaccctgaggaaa

SEQ ID NO: 1109835 - DNA, 15 bp, Homo sapiens
gaagaccctgaggaa

SEQ ID NO: 1109836 - DNA, 15 bp, Homo sapiens
agaagaccctgagga

SEQ ID NO: 1109837 - DNA, 15 bp, Homo sapiens
gagaagaccctgagg

SEQ ID NO: 1109838 - DNA, 15 bp, Homo sapiens
tgagaagaccctgag

SEQ ID NO: 1109839 - DNA, 15 bp, Homo sapiens
ctgagaagaccctga

SEQ ID NO: 1109840 - DNA, 15 bp, Homo sapiens
gctgagaagaccctg

SEQ ID NO: 1109841 - DNA, 15 bp, Homo sapiens
tgctgagaagaccct

SEQ ID NO: 1109842 - DNA, 15 bp, Homo sapiens
ctgctgagaagaccc

SEQ ID NO: 1109843 - DNA, 15 bp, Homo sapiens
actgctgagaagacc

SEQ ID NO: 1109844 - DNA, 15 bp, Homo sapiens
cactgctgagaagac

SEQ ID NO: 1109845 - DNA, 15 bp, Homo sapiens
gcactgctgagaaga

SEQ ID NO: 1109846 - DNA, 15 bp, Homo sapiens
tgcactgctgagaag

SEQ ID NO: 1109847 - DNA, 15 bp, Homo sapiens
atgcactgctgagaa

SEQ ID NO: 1109848 - DNA, 15 bp, Homo sapiens
catgcactgctgaga

SEQ ID NO: 1109849 - DNA, 15 bp, Homo sapiens
ccatgcactgctgag

SEQ ID NO: 1109850 - DNA, 15 bp, Homo sapiens
cccatgcactgctga

SEQ ID NO: 1109851 - DNA, 15 bp, Homo sapiens
ccccatgcactgctg

SEQ ID NO: 1109852 - DNA, 15 bp, Homo sapiens
gccccatgcactgct

SEQ ID NO: 1109853 - DNA, 15 bp, Homo sapiens
ggccccatgcactgc

SEQ ID NO: 1109854 - DNA, 15 bp, Homo sapiens
gggccccatgcactg

SEQ ID NO: 1109855 - DNA, 15 bp, Homo sapiens
tgggccccatgcact

SEQ ID NO: 1109856 - DNA, 15 bp, Homo sapiens
gtgggccccatgcac

SEQ ID NO: 1109857 - DNA, 15 bp, Homo sapiens
tgtgggccccatgca

SEQ ID NO: 1109858 - DNA, 15 bp, Homo sapiens
atgtgggccccatgc

SEQ ID NO: 1109859 - DNA, 15 bp, Homo sapiens
aatgtgggccccatg

SEQ ID NO: 1109860 - DNA, 15 bp, Homo sapiens
taatgtgggccccat

SEQ ID NO: 1109861 - DNA, 15 bp, Homo sapiens
ctaatgtgggcccca

SEQ ID NO: 1109862 - DNA, 15 bp, Homo sapiens
gctaatgtgggcccc

SEQ ID NO: 1109863 - DNA, 15 bp, Homo sapiens
agctaatgtgggccc

SEQ ID NO: 1109864 - DNA, 15 bp, Homo sapiens
gagctaatgtgggcc

SEQ ID NO: 1109865 - DNA, 15 bp, Homo sapiens
ggagctaatgtgggc

SEQ ID NO: 1109866 - DNA, 15 bp, Homo sapiens
aggagctaatgtggg

SEQ ID NO: 1109867 - DNA, 15 bp, Homo sapiens
gaggagctaatgtgg

SEQ ID NO: 1109868 - DNA, 15 bp, Homo sapiens
agaggagctaatgtg

SEQ ID NO: 1109869 - DNA, 15 bp, Homo sapiens
cagaggagctaatgt

SEQ ID NO: 1109870 - DNA, 15 bp, Homo sapiens
ccagaggagctaatg

SEQ ID NO: 1109871 - DNA, 15 bp, Homo sapiens
gccagaggagctaat

SEQ ID NO: 1109872 - DNA, 15 bp, Homo sapiens
agccagaggagctaa

SEQ ID NO: 1109873 - DNA, 15 bp, Homo sapiens
gagccagaggagcta

SEQ ID NO: 1109874 - DNA, 15 bp, Homo sapiens
ggagccagaggagct

SEQ ID NO: 1109875 - DNA, 15 bp, Homo sapiens
tggagccagaggagc

SEQ ID NO: 1109876 - DNA, 15 bp, Homo sapiens
ttggagccagaggag

SEQ ID NO: 1109877 - DNA, 15 bp, Homo sapiens
cttggagccagagga

SEQ ID NO: 1109878 - DNA, 15 bp, Homo sapiens
gcttggagccagagg

SEQ ID NO: 1109879 - DNA, 15 bp, Homo sapiens
cgcttggagccagag

SEQ ID NO: 1109880 - DNA, 15 bp, Homo sapiens
tcgcttggagccaga

SEQ ID NO: 1109881 - DNA, 15 bp, Homo sapiens
ttcgcttggagccag

SEQ ID NO: 1109882 - DNA, 15 bp, Homo sapiens
cttcgcttggagcca

SEQ ID NO: 1109883 - DNA, 15 bp, Homo sapiens
tcttcgcttggagcc

SEQ ID NO: 1109884 - DNA, 15 bp, Homo sapiens
ctcttcgcttggagc

SEQ ID NO: 1109885 - DNA, 15 bp, Homo sapiens
tctcttcgcttggag

SEQ ID NO: 1109886 - DNA, 15 bp, Homo sapiens
atctcttcgcttgga

SEQ ID NO: 1109887 - DNA, 15 bp, Homo sapiens
catctcttcgcttgg

SEQ ID NO: 1109888 - DNA, 15 bp, Homo sapiens
ccatctcttcgcttg

SEQ ID NO: 1109889 - DNA, 15 bp, Homo sapiens
accatctcttcgctt

SEQ ID NO: 1109890 - DNA, 15 bp, Homo sapiens
gaccatctcttcgct

SEQ ID NO: 1109891 - DNA, 15 bp, Homo sapiens
agaccatctcttcgc

SEQ ID NO: 1109892 - DNA, 15 bp, Homo sapiens
gagaccatctcttcg

SEQ ID NO: 1109893 - DNA, 15 bp, Homo sapiens
agagaccatctcttc

SEQ ID NO: 1109894 - DNA, 15 bp, Homo sapiens
tagagaccatctctt

SEQ ID NO: 1109895 - DNA, 15 bp, Homo sapiens
ctagagaccatctct

SEQ ID NO: 1109896 - DNA, 15 bp, Homo sapiens
gctagagaccatctc

SEQ ID NO: 1109897 - DNA, 15 bp, Homo sapiens
ggctagagaccatct

SEQ ID NO: 1109898 - DNA, 15 bp, Homo sapiens
gggctagagaccatc

SEQ ID NO: 1109899 - DNA, 15 bp, Homo sapiens
ggggctagagaccat

SEQ ID NO: 1109900 - DNA, 15 bp, Homo sapiens
gggggctagagacca

SEQ ID NO: 1109901 - DNA, 15 bp, Homo sapiens
agggggctagagacc

SEQ ID NO: 1109902 - DNA, 15 bp, Homo sapiens
cagggggctagagac

SEQ ID NO: 1109903 - DNA, 15 bp, Homo sapiens
acagggggctagaga

SEQ ID NO: 1109904 - DNA, 15 bp, Homo sapiens
aacagggggctagag

SEQ ID NO: 1109905 - DNA, 15 bp, Homo sapiens
aaacagggggctaga

SEQ ID NO: 1109906 - DNA, 15 bp, Homo sapiens
caaacagggggctag

SEQ ID NO: 1109907 - DNA, 15 bp, Homo sapiens
tcaaacagggggcta

SEQ ID NO: 1109908 - DNA, 15 bp, Homo sapiens
atcaaacagggggct

SEQ ID NO: 1109909 - DNA, 15 bp, Homo sapiens
aatcaaacagggggc

SEQ ID NO: 1109910 - DNA, 15 bp, Homo sapiens
aaatcaaacaggggg

SEQ ID NO: 1109911 - DNA, 15 bp, Homo sapiens
caaatcaaacagggg

SEQ ID NO: 1109912 - DNA, 15 bp, Homo sapiens
ccaaatcaaacaggg

SEQ ID NO: 1109913 - DNA, 15 bp, Homo sapiens
cccaaatcaaacagg

SEQ ID NO: 1109914 - DNA, 15 bp, Homo sapiens
ccccaaatcaaacag

SEQ ID NO: 1109915 - DNA, 15 bp, Homo sapiens
gccccaaatcaaaca

SEQ ID NO: 1109916 - DNA, 15 bp, Homo sapiens
tgccccaaatcaaac

SEQ ID NO: 1109917 - DNA, 15 bp, Homo sapiens
gtgccccaaatcaaa

SEQ ID NO: 1109918 - DNA, 15 bp, Homo sapiens
agtgccccaaatcaa

SEQ ID NO: 1109919 - DNA, 15 bp, Homo sapiens
aagtgccccaaatca

SEQ ID NO: 1109920 - DNA, 15 bp, Homo sapiens
taagtgccccaaatc

SEQ ID NO: 1109921 - DNA, 15 bp, Homo sapiens
gtaagtgccccaaat

SEQ ID NO: 1109922 - DNA, 15 bp, Homo sapiens
tgtaagtgccccaaa

SEQ ID NO: 1109923 - DNA, 15 bp, Homo sapiens
ctgtaagtgccccaa

SEQ ID NO: 1109924 - DNA, 15 bp, Homo sapiens
actgtaagtgcccca

SEQ ID NO: 1109925 - DNA, 15 bp, Homo sapiens
gactgtaagtgcccc

SEQ ID NO: 1109926 - DNA, 15 bp, Homo sapiens
ggactgtaagtgccc

SEQ ID NO: 1109927 - DNA, 15 bp, Homo sapiens
aggactgtaagtgcc

SEQ ID NO: 1109928 - DNA, 15 bp, Homo sapiens
gaggactgtaagtgc

SEQ ID NO: 1109929 - DNA, 15 bp, Homo sapiens
agaggactgtaagtg

SEQ ID NO: 1109930 - DNA, 15 bp, Homo sapiens
gagaggactgtaagt

SEQ ID NO: 1109931 - DNA, 15 bp, Homo sapiens
cgagaggactgtaag

SEQ ID NO: 1109932 - DNA, 15 bp, Homo sapiens
gcgagaggactgtaa

SEQ ID NO: 1109933 - DNA, 15 bp, Homo sapiens
ggcgagaggactgta

SEQ ID NO: 1109934 - DNA, 15 bp, Homo sapiens
tggcgagaggactgt

SEQ ID NO: 1109935 - DNA, 15 bp, Homo sapiens
ctggcgagaggactg

SEQ ID NO: 1109936 - DNA, 15 bp, Homo sapiens
gctggcgagaggact

SEQ ID NO: 1109937 - DNA, 15 bp, Homo sapiens
agctggcgagaggac

SEQ ID NO: 1109938 - DNA, 15 bp, Homo sapiens
tagctggcgagagga

SEQ ID NO: 1109939 - DNA, 15 bp, Homo sapiens
ttagctggcgagagg

SEQ ID NO: 1109940 - DNA, 15 bp, Homo sapiens
tttagctggcgagag

SEQ ID NO: 1109941 - DNA, 15 bp, Homo sapiens
gtttagctggcgaga

SEQ ID NO: 1109942 - DNA, 15 bp, Homo sapiens
agtttagctggcgag

SEQ ID NO: 1109943 - DNA, 15 bp, Homo sapiens
gagtttagctggcga

SEQ ID NO: 1109944 - DNA, 15 bp, Homo sapiens
agagtttagctggcg

SEQ ID NO: 1109945 - DNA, 15 bp, Homo sapiens
gagagtttagctggc

SEQ ID NO: 1109946 - DNA, 15 bp, Homo sapiens
tgagagtttagctgg

SEQ ID NO: 1109947 - DNA, 15 bp, Homo sapiens
gtgagagtttagctg

SEQ ID NO: 1109948 - DNA, 15 bp, Homo sapiens
tgtgagagtttagct

SEQ ID NO: 1109949 - DNA, 15 bp, Homo sapiens
gtgtgagagtttagc

SEQ ID NO: 1109950 - DNA, 15 bp, Homo sapiens
agtgtgagagtttag

SEQ ID NO: 1109951 - DNA, 15 bp, Homo sapiens
gagtgtgagagttta

SEQ ID NO: 1109952 - DNA, 15 bp, Homo sapiens
cgagtgtgagagttt

SEQ ID NO: 1109953 - DNA, 15 bp, Homo sapiens
acgagtgtgagagtt

SEQ ID NO: 1109954 - DNA, 15 bp, Homo sapiens
gacgagtgtgagagt

SEQ ID NO: 1109955 - DNA, 15 bp, Homo sapiens
tgacgagtgtgagag

SEQ ID NO: 1109956 - DNA, 15 bp, Homo sapiens
ctgacgagtgtgaga

SEQ ID NO: 1109957 - DNA, 15 bp, Homo sapiens
gctgacgagtgtgag

SEQ ID NO: 1109958 - DNA, 15 bp, Homo sapiens
tgctgacgagtgtga

SEQ ID NO: 1109959 - DNA, 15 bp, Homo sapiens
atgctgacgagtgtg

SEQ ID NO: 1109960 - DNA, 15 bp, Homo sapiens
gatgctgacgagtgt

SEQ ID NO: 1109961 - DNA, 15 bp, Homo sapiens
ggatgctgacgagtg

SEQ ID NO: 1109962 - DNA, 15 bp, Homo sapiens
tggatgctgacgagt

SEQ ID NO: 1109963 - DNA, 15 bp, Homo sapiens
ctggatgctgacgag

SEQ ID NO: 1109964 - DNA, 15 bp, Homo sapiens
tctggatgctgacga

SEQ ID NO: 1109965 - DNA, 15 bp, Homo sapiens
gtctggatgctgacg

SEQ ID NO: 1109966 - DNA, 15 bp, Homo sapiens
cgtctggatgctgac

SEQ ID NO: 1109967 - DNA, 15 bp, Homo sapiens
gcgtctggatgctga

SEQ ID NO: 1109968 - DNA, 15 bp, Homo sapiens
agcgtctggatgctg

SEQ ID NO: 1109969 - DNA, 15 bp, Homo sapiens
cagcgtctggatgct

SEQ ID NO: 1109970 - DNA, 15 bp, Homo sapiens
tcagcgtctggatgc

SEQ ID NO: 1109971 - DNA, 15 bp, Homo sapiens
ctcagcgtctggatg

SEQ ID NO: 1109972 - DNA, 15 bp, Homo sapiens
cctcagcgtctggat

SEQ ID NO: 1109973 - DNA, 15 bp, Homo sapiens
ccctcagcgtctgga

SEQ ID NO: 1109974 - DNA, 15 bp, Homo sapiens
cccctcagcgtctgg

SEQ ID NO: 1109975 - DNA, 15 bp, Homo sapiens
tcccctcagcgtctg

SEQ ID NO: 1109976 - DNA, 15 bp, Homo sapiens
ttcccctcagcgtct

SEQ ID NO: 1109977 - DNA, 15 bp, Homo sapiens
tttcccctcagcgtc

SEQ ID NO: 1109978 - DNA, 15 bp, Homo sapiens
ttttcccctcagcgt

SEQ ID NO: 1109979 - DNA, 15 bp, Homo sapiens
attttcccctcagcg

SEQ ID NO: 1109980 - DNA, 15 bp, Homo sapiens
tattttcccctcagc

SEQ ID NO: 1109981 - DNA, 15 bp, Homo sapiens
gtattttcccctcag

SEQ ID NO: 1109982 - DNA, 15 bp, Homo sapiens
ggtattttcccctca

SEQ ID NO: 1109983 - DNA, 15 bp, Homo sapiens
tggtattttcccctc

SEQ ID NO: 1109984 - DNA, 15 bp, Homo sapiens
ctggtattttcccct

SEQ ID NO: 1109985 - DNA, 15 bp, Homo sapiens
gctggtattttcccc

SEQ ID NO: 1109986 - DNA, 15 bp, Homo sapiens
agctggtattttccc

SEQ ID NO: 1109987 - DNA, 15 bp, Homo sapiens
cagctggtattttcc

SEQ ID NO: 1109988 - DNA, 15 bp, Homo sapiens
gcagctggtattttc

SEQ ID NO: 1109989 - DNA, 15 bp, Homo sapiens
agcagctggtatttt

SEQ ID NO: 1109990 - DNA, 15 bp, Homo sapiens
aagcagctggtattt

SEQ ID NO: 1109991 - DNA, 15 bp, Homo sapiens
gaagcagctggtatt

SEQ ID NO: 1109992 - DNA, 15 bp, Homo sapiens
agaagcagctggtat

SEQ ID NO: 1109993 - DNA, 15 bp, Homo sapiens
cagaagcagctggta

SEQ ID NO: 1109994 - DNA, 15 bp, Homo sapiens
acagaagcagctggt

SEQ ID NO: 1109995 - DNA, 15 bp, Homo sapiens
cacagaagcagctgg

SEQ ID NO: 1109996 - DNA, 15 bp, Homo sapiens
gcacagaagcagctg

SEQ ID NO: 1109997 - DNA, 15 bp, Homo sapiens
agcacagaagcagct

SEQ ID NO: 1109998 - DNA, 15 bp, Homo sapiens
gagcacagaagcagc

SEQ ID NO: 1109999 - DNA, 15 bp, Homo sapiens
agagcacagaagcag

SEQ ID NO: 1110000 - DNA, 15 bp, Homo sapiens
cagagcacagaagca

SEQ ID NO: 1110001 - DNA, 15 bp, Homo sapiens
gcagagcacagaagc

SEQ ID NO: 1110002 - DNA, 15 bp, Homo sapiens
agcagagcacagaag

SEQ ID NO: 1110003 - DNA, 15 bp, Homo sapiens
aagcagagcacagaa

SEQ ID NO: 1110004 - DNA, 15 bp, Homo sapiens
taagcagagcacaga

SEQ ID NO: 1110005 - DNA, 15 bp, Homo sapiens
gtaagcagagcacag

SEQ ID NO: 1110006 - DNA, 15 bp, Homo sapiens
agtaagcagagcaca

SEQ ID NO: 1110007 - DNA, 15 bp, Homo sapiens
gagtaagcagagcac

SEQ ID NO: 1110008 - DNA, 15 bp, Homo sapiens
agagtaagcagagca

SEQ ID NO: 1110009 - DNA, 15 bp, Homo sapiens
aagagtaagcagagc

SEQ ID NO: 1110010 - DNA, 15 bp, Homo sapiens
gaagagtaagcagag

SEQ ID NO: 1110011 - DNA, 15 bp, Homo sapiens
cgaagagtaagcaga

SEQ ID NO: 1110012 - DNA, 15 bp, Homo sapiens
ccgaagagtaagcag

SEQ ID NO: 1110013 - DNA, 15 bp, Homo sapiens
accgaagagtaagca

SEQ ID NO: 1110014 - DNA, 15 bp, Homo sapiens
taccgaagagtaagc

SEQ ID NO: 1110015 - DNA, 15 bp, Homo sapiens
gtaccgaagagtaag

SEQ ID NO: 1110016 - DNA, 15 bp, Homo sapiens
agtaccgaagagtaa

SEQ ID NO: 1110017 - DNA, 15 bp, Homo sapiens
aagtaccgaagagta

SEQ ID NO: 1110018 - DNA, 15 bp, Homo sapiens
gaagtaccgaagagt

SEQ ID NO: 1110019 - DNA, 15 bp, Homo sapiens
agaagtaccgaagag

SEQ ID NO: 1110020 - DNA, 15 bp, Homo sapiens
gagaagtaccgaaga

SEQ ID NO: 1110021 - DNA, 15 bp, Homo sapiens
agagaagtaccgaag

SEQ ID NO: 1110022 - DNA, 15 bp, Homo sapiens
cagagaagtaccgaa

SEQ ID NO: 1110023 - DNA, 15 bp, Homo sapiens
gcagagaagtaccga

SEQ ID NO: 1110024 - DNA, 15 bp, Homo sapiens
ggcagagaagtaccg

SEQ ID NO: 1110025 - DNA, 15 bp, Homo sapiens
tggcagagaagtacc

SEQ ID NO: 1110026 - DNA, 15 bp, Homo sapiens
atggcagagaagtac

SEQ ID NO: 1110027 - DNA, 15 bp, Homo sapiens
aatggcagagaagta

SEQ ID NO: 1110028 - DNA, 15 bp, Homo sapiens
aaatggcagagaagt

SEQ ID NO: 1110029 - DNA, 15 bp, Homo sapiens
gaaatggcagagaag

SEQ ID NO: 1110030 - DNA, 15 bp, Homo sapiens
agaaatggcagagaa

SEQ ID NO: 1110031 - DNA, 15 bp, Homo sapiens
cagaaatggcagaga

SEQ ID NO: 1110032 - DNA, 15 bp, Homo sapiens
ccagaaatggcagag

SEQ ID NO: 1110033 - DNA, 15 bp, Homo sapiens
accagaaatggcaga

SEQ ID NO: 1110034 - DNA, 15 bp, Homo sapiens
aaccagaaatggcag

SEQ ID NO: 1110035 - DNA, 15 bp, Homo sapiens
gaaccagaaatggca

SEQ ID NO: 1110036 - DNA, 15 bp, Homo sapiens
ggaaccagaaatggc

SEQ ID NO: 1110037 - DNA, 15 bp, Homo sapiens
aggaaccagaaatgg

SEQ ID NO: 1110038 - DNA, 15 bp, Homo sapiens
caggaaccagaaatg

SEQ ID NO: 1110039 - DNA, 15 bp, Homo sapiens
tcaggaaccagaaat

SEQ ID NO: 1110040 - DNA, 15 bp, Homo sapiens
ttcaggaaccagaaa

SEQ ID NO: 1110041 - DNA, 15 bp, Homo sapiens
cttcaggaaccagaa

SEQ ID NO: 1110042 - DNA, 15 bp, Homo sapiens
tcttcaggaaccaga

SEQ ID NO: 1110043 - DNA, 15 bp, Homo sapiens
atcttcaggaaccag

SEQ ID NO: 1110044 - DNA, 15 bp, Homo sapiens
catcttcaggaacca

SEQ ID NO: 1110045 - DNA, 15 bp, Homo sapiens
acatcttcaggaacc

SEQ ID NO: 1110046 - DNA, 15 bp, Homo sapiens
aacatcttcaggaac

SEQ ID NO: 1110047 - DNA, 15 bp, Homo sapiens
aaacatcttcaggaa

SEQ ID NO: 1110048 - DNA, 15 bp, Homo sapiens
taaacatcttcagga

SEQ ID NO: 1110049 - DNA, 15 bp, Homo sapiens
ataaacatcttcagg

SEQ ID NO: 1110050 - DNA, 15 bp, Homo sapiens
aataaacatcttcag

SEQ ID NO: 1110051 - DNA, 15 bp, Homo sapiens
aaataaacatcttca

SEQ ID NO: 1110052 - DNA, 15 bp, Homo sapiens
aaaataaacatcttc

SEQ ID NO: 1110053 - DNA, 15 bp, Homo sapiens
aaaaataaacatctt

SEQ ID NO: 1110054 - DNA, 15 bp, Homo sapiens
taaaaataaacatct

SEQ ID NO: 1110055 - DNA, 15 bp, Homo sapiens
ataaaaataaacatc

SEQ ID NO: 1110056 - DNA, 15 bp, Homo sapiens
aataaaaataaacat

SEQ ID NO: 1110057 - DNA, 15 bp, Homo sapiens
aataaataaaaataa

SEQ ID NO: 1110058 - DNA, 15 bp, Homo sapiens
aaataaataaaaata

SEQ ID NO: 1110059 - DNA, 15 bp, Homo sapiens
caaataaataaaaat

SEQ ID NO: 1110060 - DNA, 15 bp, Homo sapiens
tcaaataaataaaaa

SEQ ID NO: 1110061 - DNA, 15 bp, Homo sapiens
ctcaaataaataaaa

SEQ ID NO: 1110062 - DNA, 15 bp, Homo sapiens
actcaaataaataaa

SEQ ID NO: 1110063 - DNA, 15 bp, Homo sapiens
gactcaaataaataa

SEQ ID NO: 1110064 - DNA, 15 bp, Homo sapiens
agactcaaataaata

SEQ ID NO: 1110065 - DNA, 15 bp, Homo sapiens
cagactcaaataaat

SEQ ID NO: 1110066 - DNA, 15 bp, Homo sapiens
tcagactcaaataaa

SEQ ID NO: 1110067 - DNA, 15 bp, Homo sapiens
gtcagactcaaataa

SEQ ID NO: 1110068 - DNA, 15 bp, Homo sapiens
agtcagactcaaata

SEQ ID NO: 1110069 - DNA, 15 bp, Homo sapiens
cagtcagactcaaat

SEQ ID NO: 1110070 - DNA, 15 bp, Homo sapiens
acagtcagactcaaa

SEQ ID NO: 1110071 - DNA, 15 bp, Homo sapiens
tacagtcagactcaa

SEQ ID NO: 1110072 - DNA, 15 bp, Homo sapiens
atacagtcagactca

SEQ ID NO: 1110073 - DNA, 15 bp, Homo sapiens
gatacagtcagactc

SEQ ID NO: 1110074 - DNA, 15 bp, Homo sapiens
agatacagtcagact

SEQ ID NO: 1110075 - DNA, 15 bp, Homo sapiens
gagatacagtcagac

SEQ ID NO: 1110076 - DNA, 15 bp, Homo sapiens
agagatacagtcaga

SEQ ID NO: 1110077 - DNA, 15 bp, Homo sapiens
aagagatacagtcag

SEQ ID NO: 1110078 - DNA, 15 bp, Homo sapiens
aaagagatacagtca

SEQ ID NO: 1110079 - DNA, 15 bp, Homo sapiens
aaaagagatacagtc

SEQ ID NO: 1110080 - DNA, 15 bp, Homo sapiens
aaaaagagatacagt

SEQ ID NO: 1110081 - DNA, 15 bp, Homo sapiens
taaaaagagatacag

SEQ ID NO: 1110082 - DNA, 15 bp, Homo sapiens
ttaaaaagagataca

SEQ ID NO: 1110083 - DNA, 15 bp, Homo sapiens
tttaaaaagagatac

SEQ ID NO: 1110084 - DNA, 15 bp, Homo sapiens
ttttaaaaagagata

SEQ ID NO: 1110085 - DNA, 15 bp, Homo sapiens
tttttaaaaagagat

SEQ ID NO: 1110086 - DNA, 15 bp, Homo sapiens
gtttttaaaaagaga

SEQ ID NO: 1110087 - DNA, 15 bp, Homo sapiens
tgtttttaaaaagag

SEQ ID NO: 1110088 - DNA, 15 bp, Homo sapiens
atgtttttaaaaaga

SEQ ID NO: 1110089 - DNA, 15 bp, Homo sapiens
catgtttttaaaaag

SEQ ID NO: 1110090 - DNA, 15 bp, Homo sapiens
acatgtttttaaaaa

SEQ ID NO: 1110091 - DNA, 15 bp, Homo sapiens
aacatgtttttaaaa

SEQ ID NO: 1110092 - DNA, 15 bp, Homo sapiens
taacatgtttttaaa

SEQ ID NO: 1110093 - DNA, 15 bp, Homo sapiens
ataacatgtttttaa

SEQ ID NO: 1110094 - DNA, 15 bp, Homo sapiens
gataacatgttttta

SEQ ID NO: 1110095 - DNA, 15 bp, Homo sapiens
ggataacatgttttt

SEQ ID NO: 1110096 - DNA, 15 bp, Homo sapiens
tggataacatgtttt

SEQ ID NO: 1110097 - DNA, 15 bp, Homo sapiens
gtggataacatgttt

SEQ ID NO: 1110098 - DNA, 15 bp, Homo sapiens
ggtggataacatgtt

SEQ ID NO: 1110099 - DNA, 15 bp, Homo sapiens
tggtggataacatgt

SEQ ID NO: 1110100 - DNA, 15 bp, Homo sapiens
atggtggataacatg

SEQ ID NO: 1110101 - DNA, 15 bp, Homo sapiens
aatggtggataacat

SEQ ID NO: 1110102 - DNA, 15 bp, Homo sapiens
caatggtggataaca

SEQ ID NO: 1110103 - DNA, 15 bp, Homo sapiens
gcaatggtggataac

SEQ ID NO: 1110104 - DNA, 15 bp, Homo sapiens
agcaatggtggataa

SEQ ID NO: 1110105 - DNA, 15 bp, Homo sapiens
tagcaatggtggata

SEQ ID NO: 1110106 - DNA, 15 bp, Homo sapiens
atagcaatggtggat

SEQ ID NO: 1110107 - DNA, 15 bp, Homo sapiens
tatagcaatggtgga

SEQ ID NO: 1110108 - DNA, 15 bp, Homo sapiens
atatagcaatggtgg

SEQ ID NO: 1110109 - DNA, 15 bp, Homo sapiens
tatatagcaatggtg

SEQ ID NO: 1110110 - DNA, 15 bp, Homo sapiens
atatatagcaatggt

SEQ ID NO: 1110111 - DNA, 15 bp, Homo sapiens
aatatatagcaatgg

SEQ ID NO: 1110112 - DNA, 15 bp, Homo sapiens
aaatatatagcaatg

SEQ ID NO: 1110113 - DNA, 15 bp, Homo sapiens
caaatatatagcaat

SEQ ID NO: 1110114 - DNA, 15 bp, Homo sapiens
tcaaatatatagcaa

SEQ ID NO: 1110115 - DNA, 15 bp, Homo sapiens
ttcaaatatatagca

SEQ ID NO: 1110116 - DNA, 15 bp, Homo sapiens
cttcaaatatatagc

SEQ ID NO: 1110117 - DNA, 15 bp, Homo sapiens
gcttcaaatatatag

SEQ ID NO: 1110118 - DNA, 15 bp, Homo sapiens
tgcttcaaatatata

SEQ ID NO: 1110119 - DNA, 15 bp, Homo sapiens
ctgcttcaaatatat

SEQ ID NO: 1110120 - DNA, 15 bp, Homo sapiens
tctgcttcaaatata

SEQ ID NO: 1110121 - DNA, 15 bp, Homo sapiens
ctctgcttcaaatat

SEQ ID NO: 1110122 - DNA, 15 bp, Homo sapiens
tctctgcttcaaata

SEQ ID NO: 1110123 - DNA, 15 bp, Homo sapiens
ttctctgcttcaaat

SEQ ID NO: 1110124 - DNA, 15 bp, Homo sapiens
tttctctgcttcaaa

SEQ ID NO: 1110125 - DNA, 15 bp, Homo sapiens
ctttctctgcttcaa

SEQ ID NO: 1110126 - DNA, 15 bp, Homo sapiens
actttctctgcttca

SEQ ID NO: 1110127 - DNA, 15 bp, Homo sapiens
aactttctctgcttc

SEQ ID NO: 1110128 - DNA, 15 bp, Homo sapiens
taactttctctgctt

SEQ ID NO: 1110129 - DNA, 15 bp, Homo sapiens
ctaactttctctgct

SEQ ID NO: 1110130 - DNA, 15 bp, Homo sapiens
actaactttctctgc

SEQ ID NO: 1110131 - DNA, 15 bp, Homo sapiens
cactaactttctctg

SEQ ID NO: 1110132 - DNA, 15 bp, Homo sapiens
tcactaactttctct

SEQ ID NO: 1110133 - DNA, 15 bp, Homo sapiens
ttcactaactttctc

SEQ ID NO: 1110134 - DNA, 15 bp, Homo sapiens
cttcactaactttct

SEQ ID NO: 1110135 - DNA, 15 bp, Homo sapiens
gcttcactaactttc

SEQ ID NO: 1110136 - DNA, 15 bp, Homo sapiens
tgcttcactaacttt

SEQ ID NO: 1110137 - DNA, 15 bp, Homo sapiens
atgcttcactaactt

SEQ ID NO: 1110138 - DNA, 15 bp, Homo sapiens
tatgcttcactaact

SEQ ID NO: 1110139 - DNA, 15 bp, Homo sapiens
ttatgcttcactaac

SEQ ID NO: 1110140 - DNA, 15 bp, Homo sapiens
tttatgcttcactaa

SEQ ID NO: 1110141 - DNA, 15 bp, Homo sapiens
gtttatgcttcacta

SEQ ID NO: 1110142 - DNA, 15 bp, Homo sapiens
agtttatgcttcact

SEQ ID NO: 1110143 - DNA, 15 bp, Homo sapiens
aagtttatgcttcac

SEQ ID NO: 1110144 - DNA, 15 bp, Homo sapiens
gaagtttatgcttca

SEQ ID NO: 1110145 - DNA, 15 bp, Homo sapiens
tgaagtttatgcttc

SEQ ID NO: 1110146 - DNA, 15 bp, Homo sapiens
atgaagtttatgctt

SEQ ID NO: 1110147 - DNA, 15 bp, Homo sapiens
catgaagtttatgct

SEQ ID NO: 1110148 - DNA, 15 bp, Homo sapiens
gcatgaagtttatgc

SEQ ID NO: 1110149 - DNA, 15 bp, Homo sapiens
agcatgaagtttatg

SEQ ID NO: 1110150 - DNA, 15 bp, Homo sapiens
cagcatgaagtttat

SEQ ID NO: 1110151 - DNA, 15 bp, Homo sapiens
tcagcatgaagttta

SEQ ID NO: 1110152 - DNA, 15 bp, Homo sapiens
ttcagcatgaagttt

SEQ ID NO: 1110153 - DNA, 15 bp, Homo sapiens
attcagcatgaagtt

SEQ ID NO: 1110154 - DNA, 15 bp, Homo sapiens
gattcagcatgaagt

SEQ ID NO: 1110155 - DNA, 15 bp, Homo sapiens
cgattcagcatgaag

SEQ ID NO: 1110156 - DNA, 15 bp, Homo sapiens
tcgattcagcatgaa

SEQ ID NO: 1110157 - DNA, 15 bp, Homo sapiens
ctcgattcagcatga

SEQ ID NO: 1110158 - DNA, 15 bp, Homo sapiens
actcgattcagcatg

SEQ ID NO: 1110159 - DNA, 15 bp, Homo sapiens
cactcgattcagcat

SEQ ID NO: 1110160 - DNA, 15 bp, Homo sapiens
acactcgattcagca

SEQ ID NO: 1110161 - DNA, 15 bp, Homo sapiens
gacactcgattcagc

SEQ ID NO: 1110162 - DNA, 15 bp, Homo sapiens
agacactcgattcag

SEQ ID NO: 1110163 - DNA, 15 bp, Homo sapiens
tagacactcgattca

SEQ ID NO: 1110164 - DNA, 15 bp, Homo sapiens
atagacactcgattc

SEQ ID NO: 1110165 - DNA, 15 bp, Homo sapiens
tatagacactcgatt

SEQ ID NO: 1110166 - DNA, 15 bp, Homo sapiens
atatagacactcgat

SEQ ID NO: 1110167 - DNA, 15 bp, Homo sapiens
gatatagacactcga

SEQ ID NO: 1110168 - DNA, 15 bp, Homo sapiens
ggatatagacactcg

SEQ ID NO: 1110169 - DNA, 15 bp, Homo sapiens
aggatatagacactc

SEQ ID NO: 1110170 - DNA, 15 bp, Homo sapiens
caggatatagacact

SEQ ID NO: 1110171 - DNA, 15 bp, Homo sapiens
ccaggatatagacac

SEQ ID NO: 1110172 - DNA, 15 bp, Homo sapiens
tccaggatatagaca

SEQ ID NO: 1110173 - DNA, 15 bp, Homo sapiens
ttccaggatatagac

SEQ ID NO: 1110174 - DNA, 15 bp, Homo sapiens
attccaggatataga

SEQ ID NO: 1110175 - DNA, 15 bp, Homo sapiens
aattccaggatatag

SEQ ID NO: 1110176 - DNA, 15 bp, Homo sapiens
gaattccaggatata

SEQ ID NO: 1110177 - DNA, 15 bp, Homo sapiens
agaattccaggatat

SEQ ID NO: 1110178 - DNA, 15 bp, Homo sapiens
gagaattccaggata

SEQ ID NO: 1110179 - DNA, 15 bp, Homo sapiens
tgagaattccaggat

SEQ ID NO: 1110180 - DNA, 15 bp, Homo sapiens
ctgagaattccagga

SEQ ID NO: 1110181 - DNA, 15 bp, Homo sapiens
gctgagaattccagg

SEQ ID NO: 1110182 - DNA, 15 bp, Homo sapiens
ggctgagaattccag

SEQ ID NO: 1110183 - DNA, 15 bp, Homo sapiens
aggctgagaattcca

SEQ ID NO: 1110184 - DNA, 15 bp, Homo sapiens
caggctgagaattcc

SEQ ID NO: 1110185 - DNA, 15 bp, Homo sapiens
acaggctgagaattc

SEQ ID NO: 1110186 - DNA, 15 bp, Homo sapiens
tacaggctgagaatt

SEQ ID NO: 1110187 - DNA, 15 bp, Homo sapiens
gtacaggctgagaat

SEQ ID NO: 1110188 - DNA, 15 bp, Homo sapiens
ggtacaggctgagaa

SEQ ID NO: 1110189 - DNA, 15 bp, Homo sapiens
gggtacaggctgaga

SEQ ID NO: 1110190 - DNA, 15 bp, Homo sapiens
agggtacaggctgag

SEQ ID NO: 1110191 - DNA, 15 bp, Homo sapiens
gagggtacaggctga

SEQ ID NO: 1110192 - DNA, 15 bp, Homo sapiens
agagggtacaggctg

SEQ ID NO: 1110193 - DNA, 15 bp, Homo sapiens
tagagggtacaggct

SEQ ID NO: 1110194 - DNA, 15 bp, Homo sapiens
atagagggtacaggc

SEQ ID NO: 1110195 - DNA, 15 bp, Homo sapiens
tatagagggtacagg

SEQ ID NO: 1110196 - DNA, 15 bp, Homo sapiens
ttatagagggtacag

SEQ ID NO: 1110197 - DNA, 15 bp, Homo sapiens
tttatagagggtaca

SEQ ID NO: 1110198 - DNA, 15 bp, Homo sapiens
gtttatagagggtac

SEQ ID NO: 1110199 - DNA, 15 bp, Homo sapiens
agtttatagagggta

SEQ ID NO: 1110200 - DNA, 15 bp, Homo sapiens
tagtttatagagggt

SEQ ID NO: 1110201 - DNA, 15 bp, Homo sapiens
ttagtttatagaggg

SEQ ID NO: 1110202 - DNA, 15 bp, Homo sapiens
attagtttatagagg

SEQ ID NO: 1110203 - DNA, 15 bp, Homo sapiens
aattagtttatagag

SEQ ID NO: 1110204 - DNA, 15 bp, Homo sapiens
aaattagtttataga

SEQ ID NO: 1110205 - DNA, 15 bp, Homo sapiens
aaaattagtttatag

SEQ ID NO: 1110206 - DNA, 15 bp, Homo sapiens
aaaaattagtttata

SEQ ID NO: 1110207 - DNA, 15 bp, Homo sapiens
gaaaaattagtttat

SEQ ID NO: 1110208 - DNA, 15 bp, Homo sapiens
ggaaaaattagttta

SEQ ID NO: 1110209 - DNA, 15 bp, Homo sapiens
tggaaaaattagttt

SEQ ID NO: 1110210 - DNA, 15 bp, Homo sapiens
gtggaaaaattagtt

SEQ ID NO: 1110211 - DNA, 15 bp, Homo sapiens
agtggaaaaattagt

SEQ ID NO: 1110212 - DNA, 15 bp, Homo sapiens
cagtggaaaaattag

SEQ ID NO: 1110213 - DNA, 15 bp, Homo sapiens
acagtggaaaaatta

SEQ ID NO: 1110214 - DNA, 15 bp, Homo sapiens
cacagtggaaaaatt

SEQ ID NO: 1110215 - DNA, 15 bp, Homo sapiens
tcacagtggaaaaat

SEQ ID NO: 1110216 - DNA, 15 bp, Homo sapiens
ttcacagtggaaaaa

SEQ ID NO: 1110217 - DNA, 15 bp, Homo sapiens
attcacagtggaaaa

SEQ ID NO: 1110218 - DNA, 15 bp, Homo sapiens
tattcacagtggaaa

SEQ ID NO: 1110219 - DNA, 15 bp, Homo sapiens
ttattcacagtggaa

SEQ ID NO: 1110220 - DNA, 15 bp, Homo sapiens
cttattcacagtgga

SEQ ID NO: 1110221 - DNA, 15 bp, Homo sapiens
tcttattcacagtgg

SEQ ID NO: 1110222 - DNA, 15 bp, Homo sapiens
gtcttattcacagtg

SEQ ID NO: 1110223 - DNA, 15 bp, Homo sapiens
agtcttattcacagt

SEQ ID NO: 1110224 - DNA, 15 bp, Homo sapiens
tagtcttattcacag

SEQ ID NO: 1110225 - DNA, 15 bp, Homo sapiens
ttagtcttattcaca

SEQ ID NO: 1110226 - DNA, 15 bp, Homo sapiens
attagtcttattcac

SEQ ID NO: 1110227 - DNA, 15 bp, Homo sapiens
gattagtcttattca

SEQ ID NO: 1110228 - DNA, 15 bp, Homo sapiens
tgattagtcttattc

SEQ ID NO: 1110229 - DNA, 15 bp, Homo sapiens
atgattagtcttatt

SEQ ID NO: 1110230 - DNA, 15 bp, Homo sapiens
catgattagtcttat

SEQ ID NO: 1110231 - DNA, 15 bp, Homo sapiens
tcatgattagtctta

SEQ ID NO: 1110232 - DNA, 15 bp, Homo sapiens
gtcatgattagtctt

SEQ ID NO: 1110233 - DNA, 15 bp, Homo sapiens
agtcatgattagtct

SEQ ID NO: 1110234 - DNA, 15 bp, Homo sapiens
gagtcatgattagtc

SEQ ID NO: 1110235 - DNA, 15 bp, Homo sapiens
agagtcatgattagt

SEQ ID NO: 1110236 - DNA, 15 bp, Homo sapiens
cagagtcatgattag

SEQ ID NO: 1110237 - DNA, 15 bp, Homo sapiens
acagagtcatgatta

SEQ ID NO: 1110238 - DNA, 15 bp, Homo sapiens
gacagagtcatgatt

SEQ ID NO: 1110239 - DNA, 15 bp, Homo sapiens
cgacagagtcatgat

SEQ ID NO: 1110240 - DNA, 15 bp, Homo sapiens
tcgacagagtcatga

SEQ ID NO: 1110241 - DNA, 15 bp, Homo sapiens
gtcgacagagtcatg

SEQ ID NO: 1110242 - DNA, 15 bp, Homo sapiens
tgtcgacagagtcat

SEQ ID NO: 1110243 - DNA, 15 bp, Homo sapiens
atgtcgacagagtca

SEQ ID NO: 1110244 - DNA, 15 bp, Homo sapiens
aatgtcgacagagtc

SEQ ID NO: 1110245 - DNA, 15 bp, Homo sapiens
aaatgtcgacagagt

SEQ ID NO: 1110246 - DNA, 15 bp, Homo sapiens
taaatgtcgacagag

SEQ ID NO: 1110247 - DNA, 15 bp, Homo sapiens
gtaaatgtcgacaga

SEQ ID NO: 1110248 - DNA, 15 bp, Homo sapiens
tgtaaatgtcgacag

SEQ ID NO: 1110249 - DNA, 15 bp, Homo sapiens
atgtaaatgtcgaca

SEQ ID NO: 1110250 - DNA, 15 bp, Homo sapiens
aatgtaaatgtcgac

SEQ ID NO: 1110251 - DNA, 15 bp, Homo sapiens
aaatgtaaatgtcga

SEQ ID NO: 1110252 - DNA, 15 bp, Homo sapiens
aaaatgtaaatgtcg

SEQ ID NO: 1110253 - DNA, 15 bp, Homo sapiens
taaaatgtaaatgtc

SEQ ID NO: 1110254 - DNA, 15 bp, Homo sapiens
ataaaatgtaaatgt

SEQ ID NO: 1110255 - DNA, 15 bp, Homo sapiens
aataaaatgtaaatg

SEQ ID NO: 1110256 - DNA, 15 bp, Homo sapiens
aaataaaatgtaaat

SEQ ID NO: 1110257 - DNA, 15 bp, Homo sapiens
taaataaaatgtaaa

SEQ ID NO: 1110258 - DNA, 15 bp, Homo sapiens
ctaaataaaatgtaa

SEQ ID NO: 1110259 - DNA, 15 bp, Homo sapiens
tctaaataaaatgta

SEQ ID NO: 1110260 - DNA, 15 bp, Homo sapiens
ttctaaataaaatgt

SEQ ID NO: 1110261 - DNA, 15 bp, Homo sapiens
tttctaaataaaatg

SEQ ID NO: 1110262 - DNA, 15 bp, Homo sapiens
ttttctaaataaaat

SEQ ID NO: 1110263 - DNA, 15 bp, Homo sapiens
attttctaaataaaa

SEQ ID NO: 1110264 - DNA, 15 bp, Homo sapiens
cattttctaaataaa

SEQ ID NO: 1110265 - DNA, 15 bp, Homo sapiens
acattttctaaataa

SEQ ID NO: 1110266 - DNA, 15 bp, Homo sapiens
gacattttctaaata

SEQ ID NO: 1110267 - DNA, 15 bp, Homo sapiens
agacattttctaaat

SEQ ID NO: 1110268 - DNA, 15 bp, Homo sapiens
aagacattttctaaa

SEQ ID NO: 1110269 - DNA, 15 bp, Homo sapiens
gaagacattttctaa

SEQ ID NO: 1110270 - DNA, 15 bp, Homo sapiens
ggaagacattttcta

SEQ ID NO: 1110271 - DNA, 15 bp, Homo sapiens
aggaagacattttct

SEQ ID NO: 1110272 - DNA, 15 bp, Homo sapiens
aaggaagacattttc

SEQ ID NO: 1110273 - DNA, 15 bp, Homo sapiens
gaaggaagacatttt

SEQ ID NO: 1110274 - DNA, 15 bp, Homo sapiens
agaaggaagacattt

SEQ ID NO: 1110275 - DNA, 15 bp, Homo sapiens
cagaaggaagacatt

SEQ ID NO: 1110276 - DNA, 15 bp, Homo sapiens
acagaaggaagacat

SEQ ID NO: 1110277 - DNA, 15 bp, Homo sapiens
aacagaaggaagaca

SEQ ID NO: 1110278 - DNA, 15 bp, Homo sapiens
gaacagaaggaagac

SEQ ID NO: 1110279 - DNA, 15 bp, Homo sapiens
ggaacagaaggaaga

SEQ ID NO: 1110280 - DNA, 15 bp, Homo sapiens
aggaacagaaggaag

SEQ ID NO: 1110281 - DNA, 15 bp, Homo sapiens
aaggaacagaaggaa

SEQ ID NO: 1110282 - DNA, 15 bp, Homo sapiens
aaaggaacagaagga

SEQ ID NO: 1110283 - DNA, 15 bp, Homo sapiens
caaaggaacagaagg

SEQ ID NO: 1110284 - DNA, 15 bp, Homo sapiens
tcaaaggaacagaag

SEQ ID NO: 1110285 - DNA, 15 bp, Homo sapiens
atcaaaggaacagaa

SEQ ID NO: 1110286 - DNA, 15 bp, Homo sapiens
gatcaaaggaacaga

SEQ ID NO: 1110287 - DNA, 15 bp, Homo sapiens
ggatcaaaggaacag

SEQ ID NO: 1110288 - DNA, 15 bp, Homo sapiens
tggatcaaaggaaca

SEQ ID NO: 1110289 - DNA, 15 bp, Homo sapiens
ttggatcaaaggaac

SEQ ID NO: 1110290 - DNA, 15 bp, Homo sapiens
cttggatcaaaggaa

SEQ ID NO: 1110291 - DNA, 15 bp, Homo sapiens
gcttggatcaaagga

SEQ ID NO: 1110292 - DNA, 15 bp, Homo sapiens
agcttggatcaaagg

SEQ ID NO: 1110293 - DNA, 15 bp, Homo sapiens
aagcttggatcaaag

SEQ ID NO: 1110294 - DNA, 15 bp, Homo sapiens
caagcttggatcaaa

SEQ ID NO: 1110295 - DNA, 15 bp, Homo sapiens
tcaagcttggatcaa

SEQ ID NO: 1110296 - DNA, 15 bp, Homo sapiens
gtcaagcttggatca

SEQ ID NO: 1110297 - DNA, 15 bp, Homo sapiens
agtcaagcttggatc

SEQ ID NO: 1110298 - DNA, 15 bp, Homo sapiens
gagtcaagcttggat

SEQ ID NO: 1110299 - DNA, 15 bp, Homo sapiens
tgagtcaagcttgga

SEQ ID NO: 1110300 - DNA, 15 bp, Homo sapiens
gtgagtcaagcttgg

SEQ ID NO: 1110301 - DNA, 15 bp, Homo sapiens
ggtgagtcaagcttg

SEQ ID NO: 1110302 - DNA, 15 bp, Homo sapiens
aggtgagtcaagctt

SEQ ID NO: 1110303 - DNA, 15 bp, Homo sapiens
aaggtgagtcaagct

SEQ ID NO: 1110304 - DNA, 15 bp, Homo sapiens
taaggtgagtcaagc

SEQ ID NO: 1110305 - DNA, 15 bp, Homo sapiens
gtaaggtgagtcaag

SEQ ID NO: 1110306 - DNA, 15 bp, Homo sapiens
ggtaaggtgagtcaa

SEQ ID NO: 1110307 - DNA, 15 bp, Homo sapiens
aggtaaggtgagtca

SEQ ID NO: 1110308 - DNA, 15 bp, Homo sapiens
aaggtaaggtgagtc

SEQ ID NO: 1110309 - DNA, 15 bp, Homo sapiens
caaggtaaggtgagt

SEQ ID NO: 1110310 - DNA, 15 bp, Homo sapiens
tcaaggtaaggtgag

SEQ ID NO: 1110311 - DNA, 15 bp, Homo sapiens
ctcaaggtaaggtga

SEQ ID NO: 1110312 - DNA, 15 bp, Homo sapiens
cctcaaggtaaggtg

SEQ ID NO: 1110313 - DNA, 15 bp, Homo sapiens
acctcaaggtaaggt

SEQ ID NO: 1110314 - DNA, 15 bp, Homo sapiens
aacctcaaggtaagg

SEQ ID NO: 1110315 - DNA, 15 bp, Homo sapiens
caacctcaaggtaag

SEQ ID NO: 1110316 - DNA, 15 bp, Homo sapiens
gcaacctcaaggtaa

SEQ ID NO: 1110317 - DNA, 15 bp, Homo sapiens
tgcaacctcaaggta

SEQ ID NO: 1110318 - DNA, 15 bp, Homo sapiens
atgcaacctcaaggt

SEQ ID NO: 1110319 - DNA, 15 bp, Homo sapiens
aatgcaacctcaagg

SEQ ID NO: 1110320 - DNA, 15 bp, Homo sapiens
aaatgcaacctcaag

SEQ ID NO: 1110321 - DNA, 15 bp, Homo sapiens
taaatgcaacctcaa

SEQ ID NO: 1110322 - DNA, 15 bp, Homo sapiens
gtaaatgcaacctca

SEQ ID NO: 1110323 - DNA, 15 bp, Homo sapiens
tgtaaatgcaacctc

SEQ ID NO: 1110324 - DNA, 15 bp, Homo sapiens
ttgtaaatgcaacct

SEQ ID NO: 1110325 - DNA, 15 bp, Homo sapiens
tttgtaaatgcaacc

SEQ ID NO: 1110326 - DNA, 15 bp, Homo sapiens
ctttgtaaatgcaac

SEQ ID NO: 1110327 - DNA, 15 bp, Homo sapiens
cctttgtaaatgcaa

SEQ ID NO: 1110328 - DNA, 15 bp, Homo sapiens
tcctttgtaaatgca

SEQ ID NO: 1110329 - DNA, 15 bp, Homo sapiens
ttcctttgtaaatgc

SEQ ID NO: 1110330 - DNA, 15 bp, Homo sapiens
gttcctttgtaaatg

SEQ ID NO: 1110331 - DNA, 15 bp, Homo sapiens
tgttcctttgtaaat

SEQ ID NO: 1110332 - DNA, 15 bp, Homo sapiens
gtgttcctttgtaaa

SEQ ID NO: 1110333 - DNA, 15 bp, Homo sapiens
agtgttcctttgtaa

SEQ ID NO: 1110334 - DNA, 15 bp, Homo sapiens
cagtgttcctttgta

SEQ ID NO: 1110335 - DNA, 15 bp, Homo sapiens
tcagtgttcctttgt

SEQ ID NO: 1110336 - DNA, 15 bp, Homo sapiens
ttcagtgttcctttg

SEQ ID NO: 1110337 - DNA, 15 bp, Homo sapiens
cttcagtgttccttt

SEQ ID NO: 1110338 - DNA, 15 bp, Homo sapiens
ccttcagtgttcctt

SEQ ID NO: 1110339 - DNA, 15 bp, Homo sapiens
accttcagtgttcct

SEQ ID NO: 1110340 - DNA, 15 bp, Homo sapiens
aaccttcagtgttcc

SEQ ID NO: 1110341 - DNA, 15 bp, Homo sapiens
taaccttcagtgttc

SEQ ID NO: 1110342 - DNA, 15 bp, Homo sapiens
gtaaccttcagtgtt

SEQ ID NO: 1110343 - DNA, 15 bp, Homo sapiens
ggtaaccttcagtgt

SEQ ID NO: 1110344 - DNA, 15 bp, Homo sapiens
gggtaaccttcagtg

SEQ ID NO: 1110345 - DNA, 15 bp, Homo sapiens
tgggtaaccttcagt

SEQ ID NO: 1110346 - DNA, 15 bp, Homo sapiens
ttgggtaaccttcag

SEQ ID NO: 1110347 - DNA, 15 bp, Homo sapiens
gttgggtaaccttca

SEQ ID NO: 1110348 - DNA, 15 bp, Homo sapiens
tgttgggtaaccttc

SEQ ID NO: 1110349 - DNA, 15 bp, Homo sapiens
ctgttgggtaacctt

SEQ ID NO: 1110350 - DNA, 15 bp, Homo sapiens
actgttgggtaacct

SEQ ID NO: 1110351 - DNA, 15 bp, Homo sapiens
tactgttgggtaacc

SEQ ID NO: 1110352 - DNA, 15 bp, Homo sapiens
atactgttgggtaac

SEQ ID NO: 1110353 - DNA, 15 bp, Homo sapiens
catactgttgggtaa

SEQ ID NO: 1110354 - DNA, 15 bp, Homo sapiens
acatactgttgggta

SEQ ID NO: 1110355 - DNA, 15 bp, Homo sapiens
cacatactgttgggt

SEQ ID NO: 1110356 - DNA, 15 bp, Homo sapiens
ccacatactgttggg

SEQ ID NO: 1110357 - DNA, 15 bp, Homo sapiens
cccacatactgttgg

SEQ ID NO: 1110358 - DNA, 15 bp, Homo sapiens
acccacatactgttg

SEQ ID NO: 1110359 - DNA, 15 bp, Homo sapiens
cacccacatactgtt

SEQ ID NO: 1110360 - DNA, 15 bp, Homo sapiens
acacccacatactgt

SEQ ID NO: 1110361 - DNA, 15 bp, Homo sapiens
gacacccacatactg

SEQ ID NO: 1110362 - DNA, 15 bp, Homo sapiens
cgacacccacatact

SEQ ID NO: 1110363 - DNA, 15 bp, Homo sapiens
acgacacccacatac

SEQ ID NO: 1110364 - DNA, 15 bp, Homo sapiens
aacgacacccacata

SEQ ID NO: 1110365 - DNA, 15 bp, Homo sapiens
gaacgacacccacat

SEQ ID NO: 1110366 - DNA, 15 bp, Homo sapiens
tgaacgacacccaca

SEQ ID NO: 1110367 - DNA, 15 bp, Homo sapiens
atgaacgacacccac

SEQ ID NO: 1110368 - DNA, 15 bp, Homo sapiens
gatgaacgacaccca

SEQ ID NO: 1110369 - DNA, 15 bp, Homo sapiens
tgatgaacgacaccc

SEQ ID NO: 1110370 - DNA, 15 bp, Homo sapiens
ttgatgaacgacacc

SEQ ID NO: 1110371 - DNA, 15 bp, Homo sapiens
gttgatgaacgacac

SEQ ID NO: 1110372 - DNA, 15 bp, Homo sapiens
agttgatgaacgaca

SEQ ID NO: 1110373 - DNA, 15 bp, Homo sapiens
tagttgatgaacgac

SEQ ID NO: 1110374 - DNA, 15 bp, Homo sapiens
gtagttgatgaacga

SEQ ID NO: 1110375 - DNA, 15 bp, Homo sapiens
tgtagttgatgaacg

SEQ ID NO: 1110376 - DNA, 15 bp, Homo sapiens
ctgtagttgatgaac

SEQ ID NO: 1110377 - DNA, 15 bp, Homo sapiens
actgtagttgatgaa

SEQ ID NO: 1110378 - DNA, 15 bp, Homo sapiens
cactgtagttgatga

SEQ ID NO: 1110379 - DNA, 15 bp, Homo sapiens
tcactgtagttgatg

SEQ ID NO: 1110380 - DNA, 15 bp, Homo sapiens
gtcactgtagttgat

SEQ ID NO: 1110381 - DNA, 15 bp, Homo sapiens
agtcactgtagttga

SEQ ID NO: 1110382 - DNA, 15 bp, Homo sapiens
gagtcactgtagttg

SEQ ID NO: 1110383 - DNA, 15 bp, Homo sapiens
tgagtcactgtagtt

SEQ ID NO: 1110384 - DNA, 15 bp, Homo sapiens
ttgagtcactgtagt

SEQ ID NO: 1110385 - DNA, 15 bp, Homo sapiens
cttgagtcactgtag

SEQ ID NO: 1110386 - DNA, 15 bp, Homo sapiens
tcttgagtcactgta

SEQ ID NO: 1110387 - DNA, 15 bp, Homo sapiens
ttcttgagtcactgt

SEQ ID NO: 1110388 - DNA, 15 bp, Homo sapiens
attcttgagtcactg

SEQ ID NO: 1110389 - DNA, 15 bp, Homo sapiens
tattcttgagtcact

SEQ ID NO: 1110390 - DNA, 15 bp, Homo sapiens
atattcttgagtcac

SEQ ID NO: 1110391 - DNA, 15 bp, Homo sapiens
gatattcttgagtca

SEQ ID NO: 1110392 - DNA, 15 bp, Homo sapiens
tgatattcttgagtc

SEQ ID NO: 1110393 - DNA, 15 bp, Homo sapiens
gtgatattcttgagt

SEQ ID NO: 1110394 - DNA, 15 bp, Homo sapiens
ggtgatattcttgag

SEQ ID NO: 1110395 - DNA, 15 bp, Homo sapiens
tggtgatattcttga

SEQ ID NO: 1110396 - DNA, 15 bp, Homo sapiens
ctggtgatattcttg

SEQ ID NO: 1110397 - DNA, 15 bp, Homo sapiens
actggtgatattctt

SEQ ID NO: 1110398 - DNA, 15 bp, Homo sapiens
aactggtgatattct

SEQ ID NO: 1110399 - DNA, 15 bp, Homo sapiens
caactggtgatattc

SEQ ID NO: 1110400 - DNA, 15 bp, Homo sapiens
ccaactggtgatatt

SEQ ID NO: 1110401 - DNA, 15 bp, Homo sapiens
accaactggtgatat

SEQ ID NO: 1110402 - DNA, 15 bp, Homo sapiens
aaccaactggtgata

SEQ ID NO: 1110403 - DNA, 15 bp, Homo sapiens
aaaccaactggtgat

SEQ ID NO: 1110404 - DNA, 15 bp, Homo sapiens
caaaccaactggtga

SEQ ID NO: 1110405 - DNA, 15 bp, Homo sapiens
gcaaaccaactggtg

SEQ ID NO: 1110406 - DNA, 15 bp, Homo sapiens
ggcaaaccaactggt

SEQ ID NO: 1110407 - DNA, 15 bp, Homo sapiens
aggcaaaccaactgg

SEQ ID NO: 1110408 - DNA, 15 bp, Homo sapiens
aaggcaaaccaactg

SEQ ID NO: 1110409 - DNA, 15 bp, Homo sapiens
aaaggcaaaccaact

SEQ ID NO: 1110410 - DNA, 15 bp, Homo sapiens
gaaaggcaaaccaac

SEQ ID NO: 1110411 - DNA, 15 bp, Homo sapiens
agaaaggcaaaccaa

SEQ ID NO: 1110412 - DNA, 15 bp, Homo sapiens
gagaaaggcaaacca

SEQ ID NO: 1110413 - DNA, 15 bp, Homo sapiens
tgagaaaggcaaacc

SEQ ID NO: 1110414 - DNA, 15 bp, Homo sapiens
atgagaaaggcaaac

SEQ ID NO: 1110415 - DNA, 15 bp, Homo sapiens
catgagaaaggcaaa

SEQ ID NO: 1110416 - DNA, 15 bp, Homo sapiens
ccatgagaaaggcaa

SEQ ID NO: 1110417 - DNA, 15 bp, Homo sapiens
accatgagaaaggca

SEQ ID NO: 1110418 - DNA, 15 bp, Homo sapiens
aaccatgagaaaggc

SEQ ID NO: 1110419 - DNA, 15 bp, Homo sapiens
aaaccatgagaaagg

SEQ ID NO: 1110420 - DNA, 15 bp, Homo sapiens
aaaaccatgagaaag

SEQ ID NO: 1110421 - DNA, 15 bp, Homo sapiens
taaaaccatgagaaa

SEQ ID NO: 1110422 - DNA, 15 bp, Homo sapiens
ttaaaaccatgagaa

SEQ ID NO: 1110423 - DNA, 15 bp, Homo sapiens
attaaaaccatgaga

SEQ ID NO: 1110424 - DNA, 15 bp, Homo sapiens
cattaaaaccatgag

SEQ ID NO: 1110425 - DNA, 15 bp, Homo sapiens
acattaaaaccatga

SEQ ID NO: 1110426 - DNA, 15 bp, Homo sapiens
aacattaaaaccatg

SEQ ID NO: 1110427 - DNA, 15 bp, Homo sapiens
aaacattaaaaccat

SEQ ID NO: 1110428 - DNA, 15 bp, Homo sapiens
aaaacattaaaacca

SEQ ID NO: 1110429 - DNA, 15 bp, Homo sapiens
gaaaacattaaaacc

SEQ ID NO: 1110430 - DNA, 15 bp, Homo sapiens
agaaaacattaaaac

SEQ ID NO: 1110431 - DNA, 15 bp, Homo sapiens
gagaaaacattaaaa

SEQ ID NO: 1110432 - DNA, 15 bp, Homo sapiens
tgagaaaacattaaa

SEQ ID NO: 1110433 - DNA, 15 bp, Homo sapiens
atgagaaaacattaa

SEQ ID NO: 1110434 - DNA, 15 bp, Homo sapiens
aatgagaaaacatta

SEQ ID NO: 1110435 - DNA, 15 bp, Homo sapiens
taatgagaaaacatt

SEQ ID NO: 1110436 - DNA, 15 bp, Homo sapiens
ttaatgagaaaacat

SEQ ID NO: 1110437 - DNA, 15 bp, Homo sapiens
tttaatgagaaaaca

SEQ ID NO: 1110438 - DNA, 15 bp, Homo sapiens
ttttaatgagaaaac

SEQ ID NO: 1110439 - DNA, 15 bp, Homo sapiens
tttttaatgagaaaa

SEQ ID NO: 1110440 - DNA, 15 bp, Homo sapiens
atttttaatgagaaa

SEQ ID NO: 1110441 - DNA, 15 bp, Homo sapiens
tatttttaatgagaa

SEQ ID NO: 1110442 - DNA, 15 bp, Homo sapiens
ttatttttaatgaga

SEQ ID NO: 1110443 - DNA, 15 bp, Homo sapiens
tttatttttaatgag

SEQ ID NO: 1110444 - DNA, 15 bp, Homo sapiens
atttatttttaatga

SEQ ID NO: 1110445 - DNA, 15 bp, Homo sapiens
tatttatttttaatg

SEQ ID NO: 1110446 - DNA, 15 bp, Homo sapiens
ttatttatttttaat

SEQ ID NO: 1110447 - DNA, 15 bp, Homo sapiens
ctttatttattttta

SEQ ID NO: 1110448 - DNA, 15 bp, Homo sapiens
gctttatttattttt

SEQ ID NO: 1110449 - DNA, 15 bp, Homo sapiens
tgctttatttatttt

SEQ ID NO: 1110450 - DNA, 15 bp, Homo sapiens
gtgctttatttattt

SEQ ID NO: 1110451 - DNA, 15 bp, Homo sapiens
tgtgctttatttatt

SEQ ID NO: 1110452 - DNA, 15 bp, Homo sapiens
ctgtgctttatttat

SEQ ID NO: 1110453 - DNA, 15 bp, Homo sapiens
tctgtgctttattta

SEQ ID NO: 1110454 - DNA, 15 bp, Homo sapiens
atctgtgctttattt

SEQ ID NO: 1110455 - DNA, 15 bp, Homo sapiens
tatctgtgctttatt

SEQ ID NO: 1110456 - DNA, 15 bp, Homo sapiens
ttatctgtgctttat

SEQ ID NO: 1110457 - DNA, 15 bp, Homo sapiens
cttatctgtgcttta

SEQ ID NO: 1110458 - DNA, 15 bp, Homo sapiens
gcttatctgtgcttt

SEQ ID NO: 1110459 - DNA, 15 bp, Homo sapiens
tgcttatctgtgctt

SEQ ID NO: 1110460 - DNA, 15 bp, Homo sapiens
ctgcttatctgtgct

SEQ ID NO: 1110461 - DNA, 15 bp, Homo sapiens
tctgcttatctgtgc

SEQ ID NO: 1110462 - DNA, 15 bp, Homo sapiens
ttctgcttatctgtg

SEQ ID NO: 1110463 - DNA, 15 bp, Homo sapiens
tttctgcttatctgt

SEQ ID NO: 1110464 - DNA, 15 bp, Homo sapiens
ctttctgcttatctg

SEQ ID NO: 1110465 - DNA, 15 bp, Homo sapiens
tctttctgcttatct

SEQ ID NO: 1110466 - DNA, 15 bp, Homo sapiens
ttctttctgcttatc

SEQ ID NO: 1110467 - DNA, 15 bp, Homo sapiens
attctttctgcttat

SEQ ID NO: 1110468 - DNA, 15 bp, Homo sapiens
tattctttctgctta

SEQ ID NO: 1110469 - DNA, 15 bp, Homo sapiens
ttattctttctgctt

SEQ ID NO: 1110470 - DNA, 15 bp, Homo sapiens
gttattctttctgct

SEQ ID NO: 1110471 - DNA, 15 bp, Homo sapiens
ggttattctttctgc

SEQ ID NO: 1110472 - DNA, 15 bp, Homo sapiens
tggttattctttctg

SEQ ID NO: 1110473 - DNA, 15 bp, Homo sapiens
atggttattctttct

SEQ ID NO: 1110474 - DNA, 15 bp, Homo sapiens
gatggttattctttc

SEQ ID NO: 1110475 - DNA, 15 bp, Homo sapiens
ggatggttattcttt

SEQ ID NO: 1110476 - DNA, 15 bp, Homo sapiens
tggatggttattctt

SEQ ID NO: 1110477 - DNA, 15 bp, Homo sapiens
atggatggttattct

SEQ ID NO: 1110478 - DNA, 15 bp, Homo sapiens
gatggatggttattc

SEQ ID NO: 1110479 - DNA, 15 bp, Homo sapiens
ggatggatggttatt

SEQ ID NO: 1110480 - DNA, 15 bp, Homo sapiens
tggatggatggttat

SEQ ID NO: 1110481 - DNA, 15 bp, Homo sapiens
ttggatggatggtta

SEQ ID NO: 1110482 - DNA, 15 bp, Homo sapiens
gttggatggatggtt

SEQ ID NO: 1110483 - DNA, 15 bp, Homo sapiens
tgttggatggatggt

SEQ ID NO: 1110484 - DNA, 15 bp, Homo sapiens
ttgttggatggatgg

SEQ ID NO: 1110485 - DNA, 15 bp, Homo sapiens
gttgttggatggatg

SEQ ID NO: 1110486 - DNA, 15 bp, Homo sapiens
agttgttggatggat

SEQ ID NO: 1110487 - DNA, 15 bp, Homo sapiens
tagttgttggatgga

SEQ ID NO: 1110488 - DNA, 15 bp, Homo sapiens
ctagttgttggatgg

SEQ ID NO: 1110489 - DNA, 15 bp, Homo sapiens
tctagttgttggatg

SEQ ID NO: 1110490 - DNA, 15 bp, Homo sapiens
ctctagttgttggat

SEQ ID NO: 1110491 - DNA, 15 bp, Homo sapiens
cctctagttgttgga

SEQ ID NO: 1110492 - DNA, 15 bp, Homo sapiens
tcctctagttgttgg

SEQ ID NO: 1110493 - DNA, 15 bp, Homo sapiens
ttcctctagttgttg

SEQ ID NO: 1110494 - DNA, 15 bp, Homo sapiens
tttcctctagttgtt

SEQ ID NO: 1110495 - DNA, 15 bp, Homo sapiens
ttttcctctagttgt

SEQ ID NO: 1110496 - DNA, 15 bp, Homo sapiens
attttcctctagttg

SEQ ID NO: 1110497 - DNA, 15 bp, Homo sapiens
aattttcctctagtt

SEQ ID NO: 1110498 - DNA, 15 bp, Homo sapiens
aaattttcctctagt

SEQ ID NO: 1110499 - DNA, 15 bp, Homo sapiens
taaattttcctctag

SEQ ID NO: 1110500 - DNA, 15 bp, Homo sapiens
ataaattttcctcta

SEQ ID NO: 1110501 - DNA, 15 bp, Homo sapiens
gataaattttcctct

SEQ ID NO: 1110502 - DNA, 15 bp, Homo sapiens
tgataaattttcctc

SEQ ID NO: 1110503 - DNA, 15 bp, Homo sapiens
ttgataaattttcct

SEQ ID NO: 1110504 - DNA, 15 bp, Homo sapiens
attgataaattttcc

SEQ ID NO: 1110505 - DNA, 15 bp, Homo sapiens
cattgataaattttc

SEQ ID NO: 1110506 - DNA, 15 bp, Homo sapiens
ccattgataaatttt

SEQ ID NO: 1110507 - DNA, 15 bp, Homo sapiens
accattgataaattt

SEQ ID NO: 1110508 - DNA, 15 bp, Homo sapiens
aaccattgataaatt

SEQ ID NO: 1110509 - DNA, 15 bp, Homo sapiens
aaaccattgataaat

SEQ ID NO: 1110510 - DNA, 15 bp, Homo sapiens
aaaaccattgataaa

SEQ ID NO: 1110511 - DNA, 15 bp, Homo sapiens
caaaaccattgataa

SEQ ID NO: 1110512 - DNA, 15 bp, Homo sapiens
gcaaaaccattgata

SEQ ID NO: 1110513 - DNA, 15 bp, Homo sapiens
agcaaaaccattgat

SEQ ID NO: 1110514 - DNA, 15 bp, Homo sapiens
aagcaaaaccattga

SEQ ID NO: 1110515 - DNA, 15 bp, Homo sapiens
aaagcaaaaccattg

SEQ ID NO: 1110516 - DNA, 15 bp, Homo sapiens
taaagcaaaaccatt

SEQ ID NO: 1110517 - DNA, 15 bp, Homo sapiens
ataaagcaaaaccat

SEQ ID NO: 1110518 - DNA, 15 bp, Homo sapiens
gataaagcaaaacca

SEQ ID NO: 1110519 - DNA, 15 bp, Homo sapiens
agataaagcaaaacc

SEQ ID NO: 1110520 - DNA, 15 bp, Homo sapiens
aagataaagcaaaac

SEQ ID NO: 1110521 - DNA, 15 bp, Homo sapiens
aaagataaagcaaaa

SEQ ID NO: 1110522 - DNA, 15 bp, Homo sapiens
gaaagataaagcaaa

SEQ ID NO: 1110523 - DNA, 15 bp, Homo sapiens
ggaaagataaagcaa

SEQ ID NO: 1110524 - DNA, 15 bp, Homo sapiens
aggaaagataaagca

SEQ ID NO: 1110525 - DNA, 15 bp, Homo sapiens
taggaaagataaagc

SEQ ID NO: 1110526 - DNA, 15 bp, Homo sapiens
ataggaaagataaag

SEQ ID NO: 1110527 - DNA, 15 bp, Homo sapiens
tataggaaagataaa

SEQ ID NO: 1110528 - DNA, 15 bp, Homo sapiens
ttataggaaagataa

SEQ ID NO: 1110529 - DNA, 15 bp, Homo sapiens
attataggaaagata

SEQ ID NO: 1110530 - DNA, 15 bp, Homo sapiens
aattataggaaagat

SEQ ID NO: 1110531 - DNA, 15 bp, Homo sapiens
taattataggaaaga

SEQ ID NO: 1110532 - DNA, 15 bp, Homo sapiens
ttaattataggaaag

SEQ ID NO: 1110533 - DNA, 15 bp, Homo sapiens
cttaattataggaaa

SEQ ID NO: 1110534 - DNA, 15 bp, Homo sapiens
gcttaattataggaa

SEQ ID NO: 1110535 - DNA, 15 bp, Homo sapiens
agcttaattatagga

SEQ ID NO: 1110536 - DNA, 15 bp, Homo sapiens
tagcttaattatagg

SEQ ID NO: 1110537 - DNA, 15 bp, Homo sapiens
atagcttaattatag

SEQ ID NO: 1110538 - DNA, 15 bp, Homo sapiens
tatagcttaattata

SEQ ID NO: 1110539 - DNA, 15 bp, Homo sapiens
ttatagcttaattat

SEQ ID NO: 1110540 - DNA, 15 bp, Homo sapiens
tttatagcttaatta

SEQ ID NO: 1110541 - DNA, 15 bp, Homo sapiens
ttttatagcttaatt

SEQ ID NO: 1110542 - DNA, 15 bp, Homo sapiens
tttttatagcttaat

SEQ ID NO: 1110543 - DNA, 15 bp, Homo sapiens
ttttttatagcttaa

SEQ ID NO: 1110544 - DNA, 15 bp, Homo sapiens
gttttttatagctta

SEQ ID NO: 1110545 - DNA, 15 bp, Homo sapiens
tgttttttatagctt

SEQ ID NO: 1110546 - DNA, 15 bp, Homo sapiens
ttgttttttatagct

SEQ ID NO: 1110547 - DNA, 15 bp, Homo sapiens
gttgttttttatagc

SEQ ID NO: 1110548 - DNA, 15 bp, Homo sapiens
ggttgttttttatag

SEQ ID NO: 1110549 - DNA, 15 bp, Homo sapiens
tggttgttttttata

SEQ ID NO: 1110550 - DNA, 15 bp, Homo sapiens
atggttgttttttat

SEQ ID NO: 1110551 - DNA, 15 bp, Homo sapiens
gatggttgtttttta

SEQ ID NO: 1110552 - DNA, 15 bp, Homo sapiens
ggatggttgtttttt

SEQ ID NO: 1110553 - DNA, 15 bp, Homo sapiens
tggatggttgttttt

SEQ ID NO: 1110554 - DNA, 15 bp, Homo sapiens
atggatggttgtttt

SEQ ID NO: 1110555 - DNA, 15 bp, Homo sapiens
catggatggttgttt

SEQ ID NO: 1110556 - DNA, 15 bp, Homo sapiens
acatggatggttgtt

SEQ ID NO: 1110557 - DNA, 15 bp, Homo sapiens
tacatggatggttgt

SEQ ID NO: 1110558 - DNA, 15 bp, Homo sapiens
ttacatggatggttg

SEQ ID NO: 1110559 - DNA, 15 bp, Homo sapiens
gttacatggatggtt

SEQ ID NO: 1110560 - DNA, 15 bp, Homo sapiens
tgttacatggatggt

SEQ ID NO: 1110561 - DNA, 15 bp, Homo sapiens
ttgttacatggatgg

SEQ ID NO: 1110562 - DNA, 15 bp, Homo sapiens
gttgttacatggatg

SEQ ID NO: 1110563 - DNA, 15 bp, Homo sapiens
agttgttacatggat

SEQ ID NO: 1110564 - DNA, 15 bp, Homo sapiens
tagttgttacatgga

SEQ ID NO: 1110565 - DNA, 15 bp, Homo sapiens
ctagttgttacatgg

SEQ ID NO: 1110566 - DNA, 15 bp, Homo sapiens
tctagttgttacatg

SEQ ID NO: 1110567 - DNA, 15 bp, Homo sapiens
ctctagttgttacat

SEQ ID NO: 1110568 - DNA, 15 bp, Homo sapiens
tctctagttgttaca

SEQ ID NO: 1110569 - DNA, 15 bp, Homo sapiens
ttctctagttgttac

SEQ ID NO: 1110570 - DNA, 15 bp, Homo sapiens
tttctctagttgtta

SEQ ID NO: 1110571 - DNA, 15 bp, Homo sapiens
ttttctctagttgtt

SEQ ID NO: 1110572 - DNA, 15 bp, Homo sapiens
gttttctctagttgt

SEQ ID NO: 1110573 - DNA, 15 bp, Homo sapiens
ggttttctctagttg

SEQ ID NO: 1110574 - DNA, 15 bp, Homo sapiens
aggttttctctagtt

SEQ ID NO: 1110575 - DNA, 15 bp, Homo sapiens
aaggttttctctagt

SEQ ID NO: 1110576 - DNA, 15 bp, Homo sapiens
aaaggttttctctag

SEQ ID NO: 1110577 - DNA, 15 bp, Homo sapiens
taaaggttttctcta

SEQ ID NO: 1110578 - DNA, 15 bp, Homo sapiens
ataaaggttttctct

SEQ ID NO: 1110579 - DNA, 15 bp, Homo sapiens
gataaaggttttctc

SEQ ID NO: 1110580 - DNA, 15 bp, Homo sapiens
tgataaaggttttct

SEQ ID NO: 1110581 - DNA, 15 bp, Homo sapiens
ttgataaaggttttc

SEQ ID NO: 1110582 - DNA, 15 bp, Homo sapiens
attgataaaggtttt

SEQ ID NO: 1110583 - DNA, 15 bp, Homo sapiens
cattgataaaggttt

SEQ ID NO: 1110584 - DNA, 15 bp, Homo sapiens
tcattgataaaggtt

SEQ ID NO: 1110585 - DNA, 15 bp, Homo sapiens
gtcattgataaaggt

SEQ ID NO: 1110586 - DNA, 15 bp, Homo sapiens
agtcattgataaagg

SEQ ID NO: 1110587 - DNA, 15 bp, Homo sapiens
cagtcattgataaag

SEQ ID NO: 1110588 - DNA, 15 bp, Homo sapiens
acagtcattgataaa

SEQ ID NO: 1110589 - DNA, 15 bp, Homo sapiens
cacagtcattgataa

SEQ ID NO: 1110590 - DNA, 15 bp, Homo sapiens
ccacagtcattgata

SEQ ID NO: 1110591 - DNA, 15 bp, Homo sapiens
gccacagtcattgat

SEQ ID NO: 1110592 - DNA, 15 bp, Homo sapiens
agccacagtcattga

SEQ ID NO: 1110593 - DNA, 15 bp, Homo sapiens
aagccacagtcattg

SEQ ID NO: 1110594 - DNA, 15 bp, Homo sapiens
taagccacagtcatt

SEQ ID NO: 1110595 - DNA, 15 bp, Homo sapiens
ataagccacagtcat

SEQ ID NO: 1110596 - DNA, 15 bp, Homo sapiens
gataagccacagtca

SEQ ID NO: 1110597 - DNA, 15 bp, Homo sapiens
agataagccacagtc

SEQ ID NO: 1110598 - DNA, 15 bp, Homo sapiens
aagataagccacagt

SEQ ID NO: 1110599 - DNA, 15 bp, Homo sapiens
aaagataagccacag

SEQ ID NO: 1110600 - DNA, 15 bp, Homo sapiens
gaaagataagccaca

SEQ ID NO: 1110601 - DNA, 15 bp, Homo sapiens
ggaaagataagccac

SEQ ID NO: 1110602 - DNA, 15 bp, Homo sapiens
aggaaagataagcca

SEQ ID NO: 1110603 - DNA, 15 bp, Homo sapiens
caggaaagataagcc

SEQ ID NO: 1110604 - DNA, 15 bp, Homo sapiens
tcaggaaagataagc

SEQ ID NO: 1110605 - DNA, 15 bp, Homo sapiens
atcaggaaagataag

SEQ ID NO: 1110606 - DNA, 15 bp, Homo sapiens
tatcaggaaagataa

SEQ ID NO: 1110607 - DNA, 15 bp, Homo sapiens
ttatcaggaaagata

SEQ ID NO: 1110608 - DNA, 15 bp, Homo sapiens
attatcaggaaagat

SEQ ID NO: 1110609 - DNA, 15 bp, Homo sapiens
aattatcaggaaaga

SEQ ID NO: 1110610 - DNA, 15 bp, Homo sapiens
taattatcaggaaag

SEQ ID NO: 1110611 - DNA, 15 bp, Homo sapiens
ctaattatcaggaaa

SEQ ID NO: 1110612 - DNA, 15 bp, Homo sapiens
cctaattatcaggaa

SEQ ID NO: 1110613 - DNA, 15 bp, Homo sapiens
gcctaattatcagga

SEQ ID NO: 1110614 - DNA, 15 bp, Homo sapiens
agcctaattatcagg

SEQ ID NO: 1110615 - DNA, 15 bp, Homo sapiens
gagcctaattatcag

SEQ ID NO: 1110616 - DNA, 15 bp, Homo sapiens
agagcctaattatca

SEQ ID NO: 1110617 - DNA, 15 bp, Homo sapiens
aagagcctaattatc

SEQ ID NO: 1110618 - DNA, 15 bp, Homo sapiens
aaagagcctaattat

SEQ ID NO: 1110619 - DNA, 15 bp, Homo sapiens
gaaagagcctaatta

SEQ ID NO: 1110620 - DNA, 15 bp, Homo sapiens
tgaaagagcctaatt

SEQ ID NO: 1110621 - DNA, 15 bp, Homo sapiens
ctgaaagagcctaat

SEQ ID NO: 1110622 - DNA, 15 bp, Homo sapiens
cctgaaagagcctaa

SEQ ID NO: 1110623 - DNA, 15 bp, Homo sapiens
ccctgaaagagccta

SEQ ID NO: 1110624 - DNA, 15 bp, Homo sapiens
tccctgaaagagcct

SEQ ID NO: 1110625 - DNA, 15 bp, Homo sapiens
ctccctgaaagagcc

SEQ ID NO: 1110626 - DNA, 15 bp, Homo sapiens
actccctgaaagagc

SEQ ID NO: 1110627 - DNA, 15 bp, Homo sapiens
aactccctgaaagag

SEQ ID NO: 1110628 - DNA, 15 bp, Homo sapiens
taactccctgaaaga

SEQ ID NO: 1110629 - DNA, 15 bp, Homo sapiens
ataactccctgaaag

SEQ ID NO: 1110630 - DNA, 15 bp, Homo sapiens
aataactccctgaaa

SEQ ID NO: 1110631 - DNA, 15 bp, Homo sapiens
taataactccctgaa

SEQ ID NO: 1110632 - DNA, 15 bp, Homo sapiens
ttaataactccctga

SEQ ID NO: 1110633 - DNA, 15 bp, Homo sapiens
gttaataactccctg

SEQ ID NO: 1110634 - DNA, 15 bp, Homo sapiens
ggttaataactccct

SEQ ID NO: 1110635 - DNA, 15 bp, Homo sapiens
cggttaataactccc

SEQ ID NO: 1110636 - DNA, 15 bp, Homo sapiens
tcggttaataactcc

SEQ ID NO: 1110637 - DNA, 15 bp, Homo sapiens
atcggttaataactc

SEQ ID NO: 1110638 - DNA, 15 bp, Homo sapiens
aatcggttaataact

SEQ ID NO: 1110639 - DNA, 15 bp, Homo sapiens
aaatcggttaataac

SEQ ID NO: 1110640 - DNA, 15 bp, Homo sapiens
aaaatcggttaataa

SEQ ID NO: 1110641 - DNA, 15 bp, Homo sapiens
taaaatcggttaata

SEQ ID NO: 1110642 - DNA, 15 bp, Homo sapiens
ttaaaatcggttaat

SEQ ID NO: 1110643 - DNA, 15 bp, Homo sapiens
tttaaaatcggttaa

SEQ ID NO: 1110644 - DNA, 15 bp, Homo sapiens
ttttaaaatcggtta

SEQ ID NO: 1110645 - DNA, 15 bp, Homo sapiens
gttttaaaatcggtt

SEQ ID NO: 1110646 - DNA, 15 bp, Homo sapiens
agttttaaaatcggt

SEQ ID NO: 1110647 - DNA, 15 bp, Homo sapiens
aagttttaaaatcgg

SEQ ID NO: 1110648 - DNA, 15 bp, Homo sapiens
aaagttttaaaatcg

SEQ ID NO: 1110649 - DNA, 15 bp, Homo sapiens
aaaagttttaaaatc

SEQ ID NO: 1110650 - DNA, 15 bp, Homo sapiens
caaaagttttaaaat

SEQ ID NO: 1110651 - DNA, 15 bp, Homo sapiens
acaaaagttttaaaa

SEQ ID NO: 1110652 - DNA, 15 bp, Homo sapiens
gacaaaagttttaaa

SEQ ID NO: 1110653 - DNA, 15 bp, Homo sapiens
agacaaaagttttaa

SEQ ID NO: 1110654 - DNA, 15 bp, Homo sapiens
cagacaaaagtttta

SEQ ID NO: 1110655 - DNA, 15 bp, Homo sapiens
tcagacaaaagtttt

SEQ ID NO: 1110656 - DNA, 15 bp, Homo sapiens
ctcagacaaaagttt

SEQ ID NO: 1110657 - DNA, 15 bp, Homo sapiens
tctcagacaaaagtt

SEQ ID NO: 1110658 - DNA, 15 bp, Homo sapiens
atctcagacaaaagt

SEQ ID NO: 1110659 - DNA, 15 bp, Homo sapiens
aatctcagacaaaag

SEQ ID NO: 1110660 - DNA, 15 bp, Homo sapiens
caatctcagacaaaa

SEQ ID NO: 1110661 - DNA, 15 bp, Homo sapiens
tcaatctcagacaaa

SEQ ID NO: 1110662 - DNA, 15 bp, Homo sapiens
atcaatctcagacaa

SEQ ID NO: 1110663 - DNA, 15 bp, Homo sapiens
aatcaatctcagaca

SEQ ID NO: 1110664 - DNA, 15 bp, Homo sapiens
taatcaatctcagac

SEQ ID NO: 1110665 - DNA, 15 bp, Homo sapiens
ctaatcaatctcaga

SEQ ID NO: 1110666 - DNA, 15 bp, Homo sapiens
actaatcaatctcag

SEQ ID NO: 1110667 - DNA, 15 bp, Homo sapiens
tactaatcaatctca

SEQ ID NO: 1110668 - DNA, 15 bp, Homo sapiens
ttactaatcaatctc

SEQ ID NO: 1110669 - DNA, 15 bp, Homo sapiens
tttactaatcaatct

SEQ ID NO: 1110670 - DNA, 15 bp, Homo sapiens
ctttactaatcaatc

SEQ ID NO: 1110671 - DNA, 15 bp, Homo sapiens
tctttactaatcaat

SEQ ID NO: 1110672 - DNA, 15 bp, Homo sapiens
atctttactaatcaa

SEQ ID NO: 1110673 - DNA, 15 bp, Homo sapiens
aatctttactaatca

SEQ ID NO: 1110674 - DNA, 15 bp, Homo sapiens
taatctttactaatc

SEQ ID NO: 1110675 - DNA, 15 bp, Homo sapiens
ataatctttactaat

SEQ ID NO: 1110676 - DNA, 15 bp, Homo sapiens
aataatctttactaa

SEQ ID NO: 1110677 - DNA, 15 bp, Homo sapiens
aaataatctttacta

SEQ ID NO: 1110678 - DNA, 15 bp, Homo sapiens
gaaataatctttact

SEQ ID NO: 1110679 - DNA, 15 bp, Homo sapiens
agaaataatctttac

SEQ ID NO: 1110680 - DNA, 15 bp, Homo sapiens
aagaaataatcttta

SEQ ID NO: 1110681 - DNA, 15 bp, Homo sapiens
caagaaataatcttt

SEQ ID NO: 1110682 - DNA, 15 bp, Homo sapiens
tcaagaaataatctt

SEQ ID NO: 1110683 - DNA, 15 bp, Homo sapiens
ttcaagaaataatct

SEQ ID NO: 1110684 - DNA, 15 bp, Homo sapiens
gttcaagaaataatc

SEQ ID NO: 1110685 - DNA, 15 bp, Homo sapiens
ggttcaagaaataat

SEQ ID NO: 1110686 - DNA, 15 bp, Homo sapiens
tggttcaagaaataa

SEQ ID NO: 1110687 - DNA, 15 bp, Homo sapiens
ttggttcaagaaata

SEQ ID NO: 1110688 - DNA, 15 bp, Homo sapiens
tttggttcaagaaat

SEQ ID NO: 1110689 - DNA, 15 bp, Homo sapiens
atttggttcaagaaa

SEQ ID NO: 1110690 - DNA, 15 bp, Homo sapiens
aatttggttcaagaa

SEQ ID NO: 1110691 - DNA, 15 bp, Homo sapiens
caatttggttcaaga

SEQ ID NO: 1110692 - DNA, 15 bp, Homo sapiens
acaatttggttcaag

SEQ ID NO: 1110693 - DNA, 15 bp, Homo sapiens
aacaatttggttcaa

SEQ ID NO: 1110694 - DNA, 15 bp, Homo sapiens
gaacaatttggttca

SEQ ID NO: 1110695 - DNA, 15 bp, Homo sapiens
agaacaatttggttc

SEQ ID NO: 1110696 - DNA, 15 bp, Homo sapiens
aagaacaatttggtt

SEQ ID NO: 1110697 - DNA, 15 bp, Homo sapiens
aaagaacaatttggt

SEQ ID NO: 1110698 - DNA, 15 bp, Homo sapiens
gaaagaacaatttgg

SEQ ID NO: 1110699 - DNA, 15 bp, Homo sapiens
cgaaagaacaatttg

SEQ ID NO: 1110700 - DNA, 15 bp, Homo sapiens
acgaaagaacaattt

SEQ ID NO: 1110701 - DNA, 15 bp, Homo sapiens
aacgaaagaacaatt

SEQ ID NO: 1110702 - DNA, 15 bp, Homo sapiens
aaacgaaagaacaat

SEQ ID NO: 1110703 - DNA, 15 bp, Homo sapiens
caaacgaaagaacaa

SEQ ID NO: 1110704 - DNA, 15 bp, Homo sapiens
ccaaacgaaagaaca

SEQ ID NO: 1110705 - DNA, 15 bp, Homo sapiens
gccaaacgaaagaac

SEQ ID NO: 1110706 - DNA, 15 bp, Homo sapiens
agccaaacgaaagaa

SEQ ID NO: 1110707 - DNA, 15 bp, Homo sapiens
tagccaaacgaaaga

SEQ ID NO: 1110708 - DNA, 15 bp, Homo sapiens
gtagccaaacgaaag

SEQ ID NO: 1110709 - DNA, 15 bp, Homo sapiens
agtagccaaacgaaa

SEQ ID NO: 1110710 - DNA, 15 bp, Homo sapiens
aagtagccaaacgaa

SEQ ID NO: 1110711 - DNA, 15 bp, Homo sapiens
aaagtagccaaacga

SEQ ID NO: 1110712 - DNA, 15 bp, Homo sapiens
caaagtagccaaacg

SEQ ID NO: 1110713 - DNA, 15 bp, Homo sapiens
tcaaagtagccaaac

SEQ ID NO: 1110714 - DNA, 15 bp, Homo sapiens
atcaaagtagccaaa

SEQ ID NO: 1110715 - DNA, 15 bp, Homo sapiens
aatcaaagtagccaa

SEQ ID NO: 1110716 - DNA, 15 bp, Homo sapiens
taatcaaagtagcca

SEQ ID NO: 1110717 - DNA, 15 bp, Homo sapiens
ttaatcaaagtagcc

SEQ ID NO: 1110718 - DNA, 15 bp, Homo sapiens
tttaatcaaagtagc

SEQ ID NO: 1110719 - DNA, 15 bp, Homo sapiens
ctttaatcaaagtag

SEQ ID NO: 1110720 - DNA, 15 bp, Homo sapiens
tctttaatcaaagta

SEQ ID NO: 1110721 - DNA, 15 bp, Homo sapiens
ttctttaatcaaagt

SEQ ID NO: 1110722 - DNA, 15 bp, Homo sapiens
cttctttaatcaaag

SEQ ID NO: 1110723 - DNA, 15 bp, Homo sapiens
tcttctttaatcaaa

SEQ ID NO: 1110724 - DNA, 15 bp, Homo sapiens
ttcttctttaatcaa

SEQ ID NO: 1110725 - DNA, 15 bp, Homo sapiens
tttcttctttaatca

SEQ ID NO: 1110726 - DNA, 15 bp, Homo sapiens
ctttcttctttaatc

SEQ ID NO: 1110727 - DNA, 15 bp, Homo sapiens
tctttcttctttaat

SEQ ID NO: 1110728 - DNA, 15 bp, Homo sapiens
ttctttcttctttaa

SEQ ID NO: 1110729 - DNA, 15 bp, Homo sapiens
cttctttcttcttta

SEQ ID NO: 1110730 - DNA, 15 bp, Homo sapiens
tcttctttcttcttt

SEQ ID NO: 1110731 - DNA, 15 bp, Homo sapiens
ctcttctttcttctt

SEQ ID NO: 1110732 - DNA, 15 bp, Homo sapiens
tctcttctttcttct

SEQ ID NO: 1110733 - DNA, 15 bp, Homo sapiens
atctcttctttcttc

SEQ ID NO: 1110734 - DNA, 15 bp, Homo sapiens
tatctcttctttctt

SEQ ID NO: 1110735 - DNA, 15 bp, Homo sapiens
ttatctcttctttct

SEQ ID NO: 1110736 - DNA, 15 bp, Homo sapiens
attatctcttctttc

SEQ ID NO: 1110737 - DNA, 15 bp, Homo sapiens
tattatctcttcttt

SEQ ID NO: 1110738 - DNA, 15 bp, Homo sapiens
ttattatctcttctt

SEQ ID NO: 1110739 - DNA, 15 bp, Homo sapiens
attattatctcttct

SEQ ID NO: 1110740 - DNA, 15 bp, Homo sapiens
aattattatctcttc

SEQ ID NO: 1110741 - DNA, 15 bp, Homo sapiens
caattattatctctt

SEQ ID NO: 1110742 - DNA, 15 bp, Homo sapiens
gcaattattatctct

SEQ ID NO: 1110743 - DNA, 15 bp, Homo sapiens
tgcaattattatctc

SEQ ID NO: 1110744 - DNA, 15 bp, Homo sapiens
ttgcaattattatct

SEQ ID NO: 1110745 - DNA, 15 bp, Homo sapiens
attgcaattattatc

SEQ ID NO: 1110746 - DNA, 15 bp, Homo sapiens
cattgcaattattat

SEQ ID NO: 1110747 - DNA, 15 bp, Homo sapiens
tcattgcaattatta

SEQ ID NO: 1110748 - DNA, 15 bp, Homo sapiens
atcattgcaattatt

SEQ ID NO: 1110749 - DNA, 15 bp, Homo sapiens
aatcattgcaattat

SEQ ID NO: 1110750 - DNA, 15 bp, Homo sapiens
gaatcattgcaatta

SEQ ID NO: 1110751 - DNA, 15 bp, Homo sapiens
agaatcattgcaatt

SEQ ID NO: 1110752 - DNA, 15 bp, Homo sapiens
aagaatcattgcaat

SEQ ID NO: 1110753 - DNA, 15 bp, Homo sapiens
aaagaatcattgcaa

SEQ ID NO: 1110754 - DNA, 15 bp, Homo sapiens
aaaagaatcattgca

SEQ ID NO: 1110755 - DNA, 15 bp, Homo sapiens
taaaagaatcattgc

SEQ ID NO: 1110756 - DNA, 15 bp, Homo sapiens
ataaaagaatcattg

SEQ ID NO: 1110757 - DNA, 15 bp, Homo sapiens
aataaaagaatcatt

SEQ ID NO: 1110758 - DNA, 15 bp, Homo sapiens
aaataaaagaatcat

SEQ ID NO: 1110759 - DNA, 15 bp, Homo sapiens
aaaataaaagaatca

SEQ ID NO: 1110760 - DNA, 15 bp, Homo sapiens
taaaataaaagaatc

SEQ ID NO: 1110761 - DNA, 15 bp, Homo sapiens
ataaaataaaagaat

SEQ ID NO: 1110762 - DNA, 15 bp, Homo sapiens
tataaaataaaataa

SEQ ID NO: 1110763 - DNA, 15 bp, Homo sapiens
ctataaaataaaata

SEQ ID NO: 1110764 - DNA, 15 bp, Homo sapiens
cctataaaataaaat

SEQ ID NO: 1110765 - DNA, 15 bp, Homo sapiens
ccctataaaataaaa

SEQ ID NO: 1110766 - DNA, 15 bp, Homo sapiens
accctataaaataaa

SEQ ID NO: 1110767 - DNA, 15 bp, Homo sapiens
gaccctataaaataa

SEQ ID NO: 1110768 - DNA, 15 bp, Homo sapiens
cgaccctataaaata

SEQ ID NO: 1110769 - DNA, 15 bp, Homo sapiens
acgaccctataaaat

SEQ ID NO: 1110770 - DNA, 15 bp, Homo sapiens
aacgaccctataaaa

SEQ ID NO: 1110771 - DNA, 15 bp, Homo sapiens
caacgaccctataaa

SEQ ID NO: 1110772 - DNA, 15 bp, Homo sapiens
ccaacgaccctataa

SEQ ID NO: 1110773 - DNA, 15 bp, Homo sapiens
gccaacgaccctata

SEQ ID NO: 1110774 - DNA, 15 bp, Homo sapiens
agccaacgaccctat

SEQ ID NO: 1110775 - DNA, 15 bp, Homo sapiens
cagccaacgacccta

SEQ ID NO: 1110776 - DNA, 15 bp, Homo sapiens
acagccaacgaccct

SEQ ID NO: 1110777 - DNA, 15 bp, Homo sapiens
cacagccaacgaccc

SEQ ID NO: 1110778 - DNA, 15 bp, Homo sapiens
ccacagccaacgacc

SEQ ID NO: 1110779 - DNA, 15 bp, Homo sapiens
cccacagccaacgac

SEQ ID NO: 1110780 - DNA, 15 bp, Homo sapiens
acccacagccaacga

SEQ ID NO: 1110781 - DNA, 15 bp, Homo sapiens
aacccacagccaacg

SEQ ID NO: 1110782 - DNA, 15 bp, Homo sapiens
caacccacagccaac

SEQ ID NO: 1110783 - DNA, 15 bp, Homo sapiens
gcaacccacagccaa

SEQ ID NO: 1110784 - DNA, 15 bp, Homo sapiens
tgcaacccacagcca

SEQ ID NO: 1110785 - DNA, 15 bp, Homo sapiens
ttgcaacccacagcc

SEQ ID NO: 1110786 - DNA, 15 bp, Homo sapiens
attgcaacccacagc

SEQ ID NO: 1110787 - DNA, 15 bp, Homo sapiens
aattgcaacccacag

SEQ ID NO: 1110788 - DNA, 15 bp, Homo sapiens
taattgcaacccaca

SEQ ID NO: 1110789 - DNA, 15 bp, Homo sapiens
gtaattgcaacccac

SEQ ID NO: 1110790 - DNA, 15 bp, Homo sapiens
ggtaattgcaaccca

SEQ ID NO: 1110791 - DNA, 15 bp, Homo sapiens
tggtaattgcaaccc

SEQ ID NO: 1110792 - DNA, 15 bp, Homo sapiens
atggtaattgcaacc

SEQ ID NO: 1110793 - DNA, 15 bp, Homo sapiens
catggtaattgcaac

SEQ ID NO: 1110794 - DNA, 15 bp, Homo sapiens
acatggtaattgcaa

SEQ ID NO: 1110795 - DNA, 15 bp, Homo sapiens
gacatggtaattgca

SEQ ID NO: 1110796 - DNA, 15 bp, Homo sapiens
agacatggtaattgc

SEQ ID NO: 1110797 - DNA, 15 bp, Homo sapiens
cagacatggtaattg

SEQ ID NO: 1110798 - DNA, 15 bp, Homo sapiens
tcagacatggtaatt

SEQ ID NO: 1110799 - DNA, 15 bp, Homo sapiens
gtcagacatggtaat

SEQ ID NO: 1110800 - DNA, 15 bp, Homo sapiens
agtcagacatggtaa

SEQ ID NO: 1110801 - DNA, 15 bp, Homo sapiens
gagtcagacatggta

SEQ ID NO: 1110802 - DNA, 15 bp, Homo sapiens
tgagtcagacatggt

SEQ ID NO: 1110803 - DNA, 15 bp, Homo sapiens
ctgagtcagacatgg

SEQ ID NO: 1110804 - DNA, 15 bp, Homo sapiens
actgagtcagacatg

SEQ ID NO: 1110805 - DNA, 15 bp, Homo sapiens
tactgagtcagacat

SEQ ID NO: 1110806 - DNA, 15 bp, Homo sapiens
ttactgagtcagaca

SEQ ID NO: 1110807 - DNA, 15 bp, Homo sapiens
attactgagtcagac

SEQ ID NO: 1110808 - DNA, 15 bp, Homo sapiens
aattactgagtcaga

SEQ ID NO: 1110809 - DNA, 15 bp, Homo sapiens
gaattactgagtcag

SEQ ID NO: 1110810 - DNA, 15 bp, Homo sapiens
agaattactgagtca

SEQ ID NO: 1110811 - DNA, 15 bp, Homo sapiens
aagaattactgagtc

SEQ ID NO: 1110812 - DNA, 15 bp, Homo sapiens
gaagaattactgagt

SEQ ID NO: 1110813 - DNA, 15 bp, Homo sapiens
cgaagaattactgag

SEQ ID NO: 1110814 - DNA, 15 bp, Homo sapiens
tcgaagaattactga

SEQ ID NO: 1110815 - DNA, 15 bp, Homo sapiens
ttcgaagaattactg

SEQ ID NO: 1110816 - DNA, 15 bp, Homo sapiens
cttcgaagaattact

SEQ ID NO: 1110817 - DNA, 15 bp, Homo sapiens
acttcgaagaattac

SEQ ID NO: 1110818 - DNA, 15 bp, Homo sapiens
tacttcgaagaatta

SEQ ID NO: 1110819 - DNA, 15 bp, Homo sapiens
atacttcgaagaatt

SEQ ID NO: 1110820 - DNA, 15 bp, Homo sapiens
tatacttcgaagaat

SEQ ID NO: 1110821 - DNA, 15 bp, Homo sapiens
ttatacttcgaagaa

SEQ ID NO: 1110822 - DNA, 15 bp, Homo sapiens
tttatacttcgaaga

SEQ ID NO: 1110823 - DNA, 15 bp, Homo sapiens
ctttatacttcgaag

SEQ ID NO: 1110824 - DNA, 15 bp, Homo sapiens
tctttatacttcgaa

SEQ ID NO: 1110825 - DNA, 15 bp, Homo sapiens
ttctttatacttcga

SEQ ID NO: 1110826 - DNA, 15 bp, Homo sapiens
tttctttatacttcg

SEQ ID NO: 1110827 - DNA, 15 bp, Homo sapiens
atttctttatacttc

SEQ ID NO: 1110828 - DNA, 15 bp, Homo sapiens
aatttctttatactt

SEQ ID NO: 1110829 - DNA, 15 bp, Homo sapiens
aaatttctttatact

SEQ ID NO: 1110830 - DNA, 15 bp, Homo sapiens
caaatttctttatac

SEQ ID NO: 1110831 - DNA, 15 bp, Homo sapiens
ccaaatttctttata

SEQ ID NO: 1110832 - DNA, 15 bp, Homo sapiens
tccaaatttctttat

SEQ ID NO: 1110833 - DNA, 15 bp, Homo sapiens
ctccaaatttcttta

SEQ ID NO: 1110834 - DNA, 15 bp, Homo sapiens
tctccaaatttcttt

SEQ ID NO: 1110835 - DNA, 15 bp, Homo sapiens
ctctccaaatttctt

SEQ ID NO: 1110836 - DNA, 15 bp, Homo sapiens
cctctccaaatttct

SEQ ID NO: 1110837 - DNA, 15 bp, Homo sapiens
tcctctccaaatttc

SEQ ID NO: 1110838 - DNA, 15 bp, Homo sapiens
ctcctctccaaattt

SEQ ID NO: 1110839 - DNA, 15 bp, Homo sapiens
tctcctctccaaatt

SEQ ID NO: 1110840 - DNA, 15 bp, Homo sapiens
ttctcctctccaaat

SEQ ID NO: 1110841 - DNA, 15 bp, Homo sapiens
attctcctctccaaa

SEQ ID NO: 1110842 - DNA, 15 bp, Homo sapiens
cattctcctctccaa

SEQ ID NO: 1110843 - DNA, 15 bp, Homo sapiens
tcattctcctctcca

SEQ ID NO: 1110844 - DNA, 15 bp, Homo sapiens
atcattctcctctcc

SEQ ID NO: 1110845 - DNA, 15 bp, Homo sapiens
catcattctcctctc

SEQ ID NO: 1110846 - DNA, 15 bp, Homo sapiens
ccatcattctcctct

SEQ ID NO: 1110847 - DNA, 15 bp, Homo sapiens
accatcattctcctc

SEQ ID NO: 1110848 - DNA, 15 bp, Homo sapiens
aaccatcattctcct

SEQ ID NO: 1110849 - DNA, 15 bp, Homo sapiens
aaaccatcattctcc

SEQ ID NO: 1110850 - DNA, 15 bp, Homo sapiens
caaaaccatcattct

SEQ ID NO: 1110851 - DNA, 15 bp, Homo sapiens
tcaaaaccatcattc

SEQ ID NO: 1110852 - DNA, 15 bp, Homo sapiens
ctcaaaaccatcatt

SEQ ID NO: 1110853 - DNA, 15 bp, Homo sapiens
actcaaaaccatcat

SEQ ID NO: 1110854 - DNA, 15 bp, Homo sapiens
gactcaaaaccatca

SEQ ID NO: 1110855 - DNA, 15 bp, Homo sapiens
tgactcaaaaccatc

SEQ ID NO: 1110856 - DNA, 15 bp, Homo sapiens
ctgactcaaaaccat

SEQ ID NO: 1110857 - DNA, 15 bp, Homo sapiens
tctgactcaaaacca

SEQ ID NO: 1110858 - DNA, 15 bp, Homo sapiens
atctgactcaaaacc

SEQ ID NO: 1110859 - DNA, 15 bp, Homo sapiens
tatctgactcaaaac

SEQ ID NO: 1110860 - DNA, 15 bp, Homo sapiens
ttatctgactcaaaa

SEQ ID NO: 1110861 - DNA, 15 bp, Homo sapiens
tttatctgactcaaa

SEQ ID NO: 1110862 - DNA, 15 bp, Homo sapiens
atttatctgactcaa

SEQ ID NO: 1110863 - DNA, 15 bp, Homo sapiens
gatttatctgactca

SEQ ID NO: 1110864 - DNA, 15 bp, Homo sapiens
tgatttatctgactc

SEQ ID NO: 1110865 - DNA, 15 bp, Homo sapiens
atgatttatctgact

SEQ ID NO: 1110866 - DNA, 15 bp, Homo sapiens
catgatttatctgac

SEQ ID NO: 1110867 - DNA, 15 bp, Homo sapiens
acatgatttatctga

SEQ ID NO: 1110868 - DNA, 15 bp, Homo sapiens
cacatgatttatctg

SEQ ID NO: 1110869 - DNA, 15 bp, Homo sapiens
tcacatgatttatct

SEQ ID NO: 1110870 - DNA, 15 bp, Homo sapiens
ctcacatgatttatc

SEQ ID NO: 1110871 - DNA, 15 bp, Homo sapiens
actcacatgatttat

SEQ ID NO: 1110872 - DNA, 15 bp, Homo sapiens
cactcacatgattta

SEQ ID NO: 1110873 - DNA, 15 bp, Homo sapiens
ccactcacatgattt

SEQ ID NO: 1110874 - DNA, 15 bp, Homo sapiens
gccactcacatgatt

SEQ ID NO: 1110875 - DNA, 15 bp, Homo sapiens
agccactcacatgat

SEQ ID NO: 1110876 - DNA, 15 bp, Homo sapiens
aagccactcacatga

SEQ ID NO: 1110877 - DNA, 15 bp, Homo sapiens
aaagccactcacatg

SEQ ID NO: 1110878 - DNA, 15 bp, Homo sapiens
aaaagccactcacat

SEQ ID NO: 1110879 - DNA, 15 bp, Homo sapiens
aaaaagccactcaca

SEQ ID NO: 1110880 - DNA, 15 bp, Homo sapiens
aaaaaagccactcac

SEQ ID NO: 1110881 - DNA, 15 bp, Homo sapiens
gaaaaaagccactca

SEQ ID NO: 1110882 - DNA, 15 bp, Homo sapiens
ggaaaaaagccactc

SEQ ID NO: 1110883 - DNA, 15 bp, Homo sapiens
gggaaaaaagccact

SEQ ID NO: 1110884 - DNA, 15 bp, Homo sapiens
agggaaaaaagccac

SEQ ID NO: 1110885 - DNA, 15 bp, Homo sapiens
gagggaaaaaagcca

SEQ ID NO: 1110886 - DNA, 15 bp, Homo sapiens
tgagggaaaaaagcc

SEQ ID NO: 1110887 - DNA, 15 bp, Homo sapiens
gtgagggaaaaaagc

SEQ ID NO: 1110888 - DNA, 15 bp, Homo sapiens
agtgagggaaaaaag

SEQ ID NO: 1110889 - DNA, 15 bp, Homo sapiens
cagtgagggaaaaaa

SEQ ID NO: 1110890 - DNA, 15 bp, Homo sapiens
gcagtgagggaaaaa

SEQ ID NO: 1110891 - DNA, 15 bp, Homo sapiens
tgcagtgagggaaaa

SEQ ID NO: 1110892 - DNA, 15 bp, Homo sapiens
atgcagtgagggaaa

SEQ ID NO: 1110893 - DNA, 15 bp, Homo sapiens
gatgcagtgagggaa

SEQ ID NO: 1110894 - DNA, 15 bp, Homo sapiens
agatgcagtgaggga

SEQ ID NO: 1110895 - DNA, 15 bp, Homo sapiens
aagatgcagtgaggg

SEQ ID NO: 1110896 - DNA, 15 bp, Homo sapiens
caagatgcagtgagg

SEQ ID NO: 1110897 - DNA, 15 bp, Homo sapiens
acaagatgcagtgag

SEQ ID NO: 1110898 - DNA, 15 bp, Homo sapiens
tacaagatgcagtga

SEQ ID NO: 1110899 - DNA, 15 bp, Homo sapiens
gtacaagatgcagtg

SEQ ID NO: 1110900 - DNA, 15 bp, Homo sapiens
tgtacaagatgcagt

SEQ ID NO: 1110901 - DNA, 15 bp, Homo sapiens
ttgtacaagatgcag

SEQ ID NO: 1110902 - DNA, 15 bp, Homo sapiens
cttgtacaagatgca

SEQ ID NO: 1110903 - DNA, 15 bp, Homo sapiens
ccttgtacaagatgc

SEQ ID NO: 1110904 - DNA, 15 bp, Homo sapiens
tccttgtacaagatg

SEQ ID NO: 1110905 - DNA, 15 bp, Homo sapiens
ctccttgtacaagat

SEQ ID NO: 1110906 - DNA, 15 bp, Homo sapiens
tctccttgtacaaga

SEQ ID NO: 1110907 - DNA, 15 bp, Homo sapiens
ctctccttgtacaag

SEQ ID NO: 1110908 - DNA, 15 bp, Homo sapiens
cctctccttgtacaa

SEQ ID NO: 1110909 - DNA, 15 bp, Homo sapiens
acctctccttgtaca

SEQ ID NO: 1110910 - DNA, 15 bp, Homo sapiens
cacctctccttgtac

SEQ ID NO: 1110911 - DNA, 15 bp, Homo sapiens
tcacctctccttgta

SEQ ID NO: 1110912 - DNA, 15 bp, Homo sapiens
ctcacctctccttgt

SEQ ID NO: 1110913 - DNA, 15 bp, Homo sapiens
tctcacctctccttg

SEQ ID NO: 1110914 - DNA, 15 bp, Homo sapiens
ttctcacctctcctt

SEQ ID NO: 1110915 - DNA, 15 bp, Homo sapiens
gttctcacctctcct

SEQ ID NO: 1110916 - DNA, 15 bp, Homo sapiens
tgttctcacctctcc

SEQ ID NO: 1110917 - DNA, 15 bp, Homo sapiens
ttgttctcacctctc

SEQ ID NO: 1110918 - DNA, 15 bp, Homo sapiens
tttgttctcacctct

SEQ ID NO: 1110919 - DNA, 15 bp, Homo sapiens
ttttgttctcacctc

SEQ ID NO: 1110920 - DNA, 15 bp, Homo sapiens
cttttgttctcacct

SEQ ID NO: 1110921 - DNA, 15 bp, Homo sapiens
acttttgttctcacc

SEQ ID NO: 1110922 - DNA, 15 bp, Homo sapiens
tacttttgttctcac

SEQ ID NO: 1110923 - DNA, 15 bp, Homo sapiens
ctacttttgttctca

SEQ ID NO: 1110924 - DNA, 15 bp, Homo sapiens
cctacttttgttctc

SEQ ID NO: 1110925 - DNA, 15 bp, Homo sapiens
tcctacttttgttct

SEQ ID NO: 1110926 - DNA, 15 bp, Homo sapiens
gtcctacttttgttc

SEQ ID NO: 1110927 - DNA, 15 bp, Homo sapiens
tgtcctacttttgtt

SEQ ID NO: 1110928 - DNA, 15 bp, Homo sapiens
ttgtcctacttttgt

SEQ ID NO: 1110929 - DNA, 15 bp, Homo sapiens
cttgtcctacttttg

SEQ ID NO: 1110930 - DNA, 15 bp, Homo sapiens
gcttgtcctactttt

SEQ ID NO: 1110931 - DNA, 15 bp, Homo sapiens
agcttgtcctacttt

SEQ ID NO: 1110932 - DNA, 15 bp, Homo sapiens
cagcttgtcctactt

SEQ ID NO: 1110933 - DNA, 15 bp, Homo sapiens
ccagcttgtcctact

SEQ ID NO: 1110934 - DNA, 15 bp, Homo sapiens
accagcttgtcctac

SEQ ID NO: 1110935 - DNA, 15 bp, Homo sapiens
gaccagcttgtccta

SEQ ID NO: 1110936 - DNA, 15 bp, Homo sapiens
tgaccagcttgtcct

SEQ ID NO: 1110937 - DNA, 15 bp, Homo sapiens
ttgaccagcttgtcc

SEQ ID NO: 1110938 - DNA, 15 bp, Homo sapiens
cttgaccagcttgtc

SEQ ID NO: 1110939 - DNA, 15 bp, Homo sapiens
acttgaccagcttgt

SEQ ID NO: 1110940 - DNA, 15 bp, Homo sapiens
aacttgaccagcttg

SEQ ID NO: 1110941 - DNA, 15 bp, Homo sapiens
aaacttgaccagctt

SEQ ID NO: 1110942 - DNA, 15 bp, Homo sapiens
gaaacttgaccagct

SEQ ID NO: 1110943 - DNA, 15 bp, Homo sapiens
tgaaacttgaccagc

SEQ ID NO: 1110944 - DNA, 15 bp, Homo sapiens
ttgaaacttgaccag

SEQ ID NO: 1110945 - DNA, 15 bp, Homo sapiens
cttgaaacttgacca

SEQ ID NO: 1110946 - DNA, 15 bp, Homo sapiens
ccttgaaacttgacc

SEQ ID NO: 1110947 - DNA, 15 bp, Homo sapiens
tccttgaaacttgac

SEQ ID NO: 1110948 - DNA, 15 bp, Homo sapiens
ctccttgaaacttga

SEQ ID NO: 1110949 - DNA, 15 bp, Homo sapiens
gctccttgaaacttg

SEQ ID NO: 1110950 - DNA, 15 bp, Homo sapiens
tgctccttgaaactt

SEQ ID NO: 1110951 - DNA, 15 bp, Homo sapiens
ctgctccttgaaact

SEQ ID NO: 1110952 - DNA, 15 bp, Homo sapiens
tctgctccttgaaac

SEQ ID NO: 1110953 - DNA, 15 bp, Homo sapiens
ttctgctccttgaaa

SEQ ID NO: 1110954 - DNA, 15 bp, Homo sapiens
tttctgctccttgaa

SEQ ID NO: 1110955 - DNA, 15 bp, Homo sapiens
ttttctgctccttga

SEQ ID NO: 1110956 - DNA, 15 bp, Homo sapiens
tttttctgctccttg

SEQ ID NO: 1110957 - DNA, 15 bp, Homo sapiens
ttttttctgctcctt

SEQ ID NO: 1110958 - DNA, 15 bp, Homo sapiens
tttttttctgctcct

SEQ ID NO: 1110959 - DNA, 15 bp, Homo sapiens
atttttttctgctcc

SEQ ID NO: 1110960 - DNA, 15 bp, Homo sapiens
gatttttttctgctc

SEQ ID NO: 1110961 - DNA, 15 bp, Homo sapiens
tgatttttttctgct

SEQ ID NO: 1110962 - DNA, 15 bp, Homo sapiens
ctgatttttttctgc

SEQ ID NO: 1110963 - DNA, 15 bp, Homo sapiens
gctgatttttttctg

SEQ ID NO: 1110964 - DNA, 15 bp, Homo sapiens
tgctgatttttttct

SEQ ID NO: 1110965 - DNA, 15 bp, Homo sapiens
ttgctgatttttttc

SEQ ID NO: 1110966 - DNA, 15 bp, Homo sapiens
gttgctgattttttt

SEQ ID NO: 1110967 - DNA, 15 bp, Homo sapiens
tgttgctgatttttt

SEQ ID NO: 1110968 - DNA, 15 bp, Homo sapiens
ctgttgctgattttt

SEQ ID NO: 1110969 - DNA, 15 bp, Homo sapiens
actgttgctgatttt

SEQ ID NO: 1110970 - DNA, 15 bp, Homo sapiens
tactgttgctgattt

SEQ ID NO: 1110971 - DNA, 15 bp, Homo sapiens
ctactgttgctgatt

SEQ ID NO: 1110972 - DNA, 15 bp, Homo sapiens
cctactgttgctgat

SEQ ID NO: 1110973 - DNA, 15 bp, Homo sapiens
acctactgttgctga

SEQ ID NO: 1110974 - DNA, 15 bp, Homo sapiens
tacctactgttgctg

SEQ ID NO: 1110975 - DNA, 15 bp, Homo sapiens
ctacctactgttgct

SEQ ID NO: 1110976 - DNA, 15 bp, Homo sapiens
tctacctactgttgc

SEQ ID NO: 1110977 - DNA, 15 bp, Homo sapiens
ttctacctactgttg

SEQ ID NO: 1110978 - DNA, 15 bp, Homo sapiens
cttctacctactgtt

SEQ ID NO: 1110979 - DNA, 15 bp, Homo sapiens
acttctacctactgt

SEQ ID NO: 1110980 - DNA, 15 bp, Homo sapiens
tacttctacctactg

SEQ ID NO: 1110981 - DNA, 15 bp, Homo sapiens
atacttctacctact

SEQ ID NO: 1110982 - DNA, 15 bp, Homo sapiens
gatacttctacctac

SEQ ID NO: 1110983 - DNA, 15 bp, Homo sapiens
tgatacttctaccta

SEQ ID NO: 1110984 - DNA, 15 bp, Homo sapiens
atgatacttctacct

SEQ ID NO: 1110985 - DNA, 15 bp, Homo sapiens
aatgatacttctacc

SEQ ID NO: 1110986 - DNA, 15 bp, Homo sapiens
caatgatacttctac

SEQ ID NO: 1110987 - DNA, 15 bp, Homo sapiens
acaatgatacttcta

SEQ ID NO: 1110988 - DNA, 15 bp, Homo sapiens
cacaatgatacttct

SEQ ID NO: 1110989 - DNA, 15 bp, Homo sapiens
acacaatgatacttc

SEQ ID NO: 1110990 - DNA, 15 bp, Homo sapiens
cacacaatgatactt

SEQ ID NO: 1110991 - DNA, 15 bp, Homo sapiens
acacacaatgatact

SEQ ID NO: 1110992 - DNA, 15 bp, Homo sapiens
cacacacaatgatac

SEQ ID NO: 1110993 - DNA, 15 bp, Homo sapiens
tcacacacaatgata

SEQ ID NO: 1110994 - DNA, 15 bp, Homo sapiens
atcacacacaatgat

SEQ ID NO: 1110995 - DNA, 15 bp, Homo sapiens
aatcacacacaatga

SEQ ID NO: 1110996 - DNA, 15 bp, Homo sapiens
gaatcacacacaatg

SEQ ID NO: 1110997 - DNA, 15 bp, Homo sapiens
agaatcacacacaat

SEQ ID NO: 1110998 - DNA, 15 bp, Homo sapiens
aagaatcacacacaa

SEQ ID NO: 1110999 - DNA, 15 bp, Homo sapiens
taagaatcacacaca

SEQ ID NO: 1111000 - DNA, 15 bp, Homo sapiens
ataagaatcacacac

SEQ ID NO: 1111001 - DNA, 15 bp, Homo sapiens
tataagaatcacaca

SEQ ID NO: 1111002 - DNA, 15 bp, Homo sapiens
gtataagaatcacac

SEQ ID NO: 1111003 - DNA, 15 bp, Homo sapiens
tgtataagaatcaca

SEQ ID NO: 1111004 - DNA, 15 bp, Homo sapiens
gtgtataagaatcac

SEQ ID NO: 1111005 - DNA, 15 bp, Homo sapiens
tgtgtataagaatca

SEQ ID NO: 1111006 - DNA, 15 bp, Homo sapiens
ttgtgtataagaatc

SEQ ID NO: 1111007 - DNA, 15 bp, Homo sapiens
gttgtgtataagaat

SEQ ID NO: 1111008 - DNA, 15 bp, Homo sapiens
agttgtgtataagaa

SEQ ID NO: 1111009 - DNA, 15 bp, Homo sapiens
cagttgtgtataaga

SEQ ID NO: 1111010 - DNA, 15 bp, Homo sapiens
acagttgtgtataag

SEQ ID NO: 1111011 - DNA, 15 bp, Homo sapiens
cacagttgtgtataa

SEQ ID NO: 1111012 - DNA, 15 bp, Homo sapiens
acacagttgtgtata

SEQ ID NO: 1111013 - DNA, 15 bp, Homo sapiens
cacacagttgtgtat

SEQ ID NO: 1111014 - DNA, 15 bp, Homo sapiens
ccacacagttgtgta

SEQ ID NO: 1111015 - DNA, 15 bp, Homo sapiens
gccacacagttgtgt

SEQ ID NO: 1111016 - DNA, 15 bp, Homo sapiens
agccacacagttgtg

SEQ ID NO: 1111017 - DNA, 15 bp, Homo sapiens
gagccacacagttgt

SEQ ID NO: 1111018 - DNA, 15 bp, Homo sapiens
agagccacacagttg

SEQ ID NO: 1111019 - DNA, 15 bp, Homo sapiens
gagagccacacagtt

SEQ ID NO: 1111020 - DNA, 15 bp, Homo sapiens
ggagagccacacagt

SEQ ID NO: 1111021 - DNA, 15 bp, Homo sapiens
gggagagccacacag

SEQ ID NO: 1111022 - DNA, 15 bp, Homo sapiens
agggagagccacaca

SEQ ID NO: 1111023 - DNA, 15 bp, Homo sapiens
tagggagagccacac

SEQ ID NO: 1111024 - DNA, 15 bp, Homo sapiens
ctagggagagccaca

SEQ ID NO: 1111025 - DNA, 15 bp, Homo sapiens
tctagggagagccac

SEQ ID NO: 1111026 - DNA, 15 bp, Homo sapiens
ttctagggagagcca

SEQ ID NO: 1111027 - DNA, 15 bp, Homo sapiens
attctagggagagcc

SEQ ID NO: 1111028 - DNA, 15 bp, Homo sapiens
gattctagggagagc

SEQ ID NO: 1111029 - DNA, 15 bp, Homo sapiens
ggattctagggagag

SEQ ID NO: 1111030 - DNA, 15 bp, Homo sapiens
tggattctagggaga

SEQ ID NO: 1111031 - DNA, 15 bp, Homo sapiens
atggattctagggag

SEQ ID NO: 1111032 - DNA, 15 bp, Homo sapiens
catggattctaggga

SEQ ID NO: 1111033 - DNA, 15 bp, Homo sapiens
acatggattctaggg

SEQ ID NO: 1111034 - DNA, 15 bp, Homo sapiens
tacatggattctagg

SEQ ID NO: 1111035 - DNA, 15 bp, Homo sapiens
ttacatggattctag

SEQ ID NO: 1111036 - DNA, 15 bp, Homo sapiens
gttacatggattcta

SEQ ID NO: 1111037 - DNA, 15 bp, Homo sapiens
cgttacatggattct

SEQ ID NO: 1111038 - DNA, 15 bp, Homo sapiens
acgttacatggattc

SEQ ID NO: 1111039 - DNA, 15 bp, Homo sapiens
tacgttacatggatt

SEQ ID NO: 1111040 - DNA, 15 bp, Homo sapiens
ttacgttacatggat

SEQ ID NO: 1111041 - DNA, 15 bp, Homo sapiens
attacgttacatgga

SEQ ID NO: 1111042 - DNA, 15 bp, Homo sapiens
tattacgttacatgg

SEQ ID NO: 1111043 - DNA, 15 bp, Homo sapiens
atattacgttacatg

SEQ ID NO: 1111044 - DNA, 15 bp, Homo sapiens
gatattacgttacat

SEQ ID NO: 1111045 - DNA, 15 bp, Homo sapiens
agatattacgttaca

SEQ ID NO: 1111046 - DNA, 15 bp, Homo sapiens
cagatattacgttac

SEQ ID NO: 1111047 - DNA, 15 bp, Homo sapiens
tcagatattacgtta

SEQ ID NO: 1111048 - DNA, 15 bp, Homo sapiens
ttcagatattacgtt

SEQ ID NO: 1111049 - DNA, 15 bp, Homo sapiens
tttcagatattacgt

SEQ ID NO: 1111050 - DNA, 15 bp, Homo sapiens
ctttcagatattacg

SEQ ID NO: 1111051 - DNA, 15 bp, Homo sapiens
gctttcagatattac

SEQ ID NO: 1111052 - DNA, 15 bp, Homo sapiens
tgctttcagatatta

SEQ ID NO: 1111053 - DNA, 15 bp, Homo sapiens
gtgctttcagatatt

SEQ ID NO: 1111054 - DNA, 15 bp, Homo sapiens
agtgctttcagatat

SEQ ID NO: 1111055 - DNA, 15 bp, Homo sapiens
tagtgctttcagata

SEQ ID NO: 1111056 - DNA, 15 bp, Homo sapiens
ctagtgctttcagat

SEQ ID NO: 1111057 - DNA, 15 bp, Homo sapiens
cctagtgctttcaga

SEQ ID NO: 1111058 - DNA, 15 bp, Homo sapiens
acctagtgctttcag

SEQ ID NO: 1111059 - DNA, 15 bp, Homo sapiens
tacctagtgctttca

SEQ ID NO: 1111060 - DNA, 15 bp, Homo sapiens
ttacctagtgctttc

SEQ ID NO: 1111061 - DNA, 15 bp, Homo sapiens
cttacctagtgcttt

SEQ ID NO: 1111062 - DNA, 15 bp, Homo sapiens
tcttacctagtgctt

SEQ ID NO: 1111063 - DNA, 15 bp, Homo sapiens
ttcttacctagtgct

SEQ ID NO: 1111064 - DNA, 15 bp, Homo sapiens
gttcttacctagtgc

SEQ ID NO: 1111065 - DNA, 15 bp, Homo sapiens
tgttcttacctagtg

SEQ ID NO: 1111066 - DNA, 15 bp, Homo sapiens
gtgttcttacctagt

SEQ ID NO: 1111067 - DNA, 15 bp, Homo sapiens
tgtgttcttacctag

SEQ ID NO: 1111068 - DNA, 15 bp, Homo sapiens
gtgtgttcttaccta

SEQ ID NO: 1111069 - DNA, 15 bp, Homo sapiens
ggtgtgttcttacct

SEQ ID NO: 1111070 - DNA, 15 bp, Homo sapiens
tggtgtgttcttacc

SEQ ID NO: 1111071 - DNA, 15 bp, Homo sapiens
ccttcataccagact

SEQ ID NO: 1111072 - DNA, 15 bp, Homo sapiens
gccttcataccagac

SEQ ID NO: 1111073 - DNA, 15 bp, Homo sapiens
cgccttcataccaga

SEQ ID NO: 1111074 - DNA, 15 bp, Homo sapiens
ccgccttcataccag

SEQ ID NO: 1111075 - DNA, 15 bp, Homo sapiens
cccgccttcatacca

SEQ ID NO: 1111076 - DNA, 15 bp, Homo sapiens
tcccgccttcatacc

SEQ ID NO: 1111077 - DNA, 15 bp, Homo sapiens
atcccgccttcatac

SEQ ID NO: 1111078 - DNA, 15 bp, Homo sapiens
aatcccgccttcata

SEQ ID NO: 1111079 - DNA, 15 bp, Homo sapiens
taatcccgccttcat

SEQ ID NO: 1111080 - DNA, 15 bp, Homo sapiens
ctaatcccgccttca

SEQ ID NO: 1111081 - DNA, 15 bp, Homo sapiens
tctaatcccgccttc

SEQ ID NO: 1111082 - DNA, 15 bp, Homo sapiens
atctaatcccgcctt

SEQ ID NO: 1111083 - DNA, 15 bp, Homo sapiens
catctaatcccgcct

SEQ ID NO: 1111084 - DNA, 15 bp, Homo sapiens
tcatctaatcccgcc

SEQ ID NO: 1111085 - DNA, 15 bp, Homo sapiens
ctcatctaatcccgc

SEQ ID NO: 1111086 - DNA, 15 bp, Homo sapiens
cctcatctaatcccg

SEQ ID NO: 1111087 - DNA, 15 bp, Homo sapiens
acctcatctaatccc

SEQ ID NO: 1111088 - DNA, 15 bp, Homo sapiens
gacctcatctaatcc

SEQ ID NO: 1111089 - DNA, 15 bp, Homo sapiens
agacctcatctaatc

SEQ ID NO: 1111090 - DNA, 15 bp, Homo sapiens
tagacctcatctaat

SEQ ID NO: 1111091 - DNA, 15 bp, Homo sapiens
ttagacctcatctaa

SEQ ID NO: 1111092 - DNA, 15 bp, Homo sapiens
attagacctcatcta

SEQ ID NO: 1111093 - DNA, 15 bp, Homo sapiens
aattagacctcatct

SEQ ID NO: 1111094 - DNA, 15 bp, Homo sapiens
aaattagacctcatc

SEQ ID NO: 1111095 - DNA, 15 bp, Homo sapiens
taaattagacctcat

SEQ ID NO: 1111096 - DNA, 15 bp, Homo sapiens
ctaaattagacctca

SEQ ID NO: 1111097 - DNA, 15 bp, Homo sapiens
tctaaattagacctc

SEQ ID NO: 1111098 - DNA, 15 bp, Homo sapiens
ttctaaattagacct

SEQ ID NO: 1111099 - DNA, 15 bp, Homo sapiens
cttctaaattagacc

SEQ ID NO: 1111100 - DNA, 15 bp, Homo sapiens
tcttctaaattagac

SEQ ID NO: 1111101 - DNA, 15 bp, Homo sapiens
gtcttctaaattaga

SEQ ID NO: 1111102 - DNA, 15 bp, Homo sapiens
tgtcttctaaattag

SEQ ID NO: 1111103 - DNA, 15 bp, Homo sapiens
ctgtcttctaaatta

SEQ ID NO: 1111104 - DNA, 15 bp, Homo sapiens
tctgtcttctaaatt

SEQ ID NO: 1111105 - DNA, 15 bp, Homo sapiens
ttctgtcttctaaat

SEQ ID NO: 1111106 - DNA, 15 bp, Homo sapiens
cttctgtcttctaaa

SEQ ID NO: 1111107 - DNA, 15 bp, Homo sapiens
cacttctgtcttcta

SEQ ID NO: 1111108 - DNA, 15 bp, Homo sapiens
tcacttctgtcttct

SEQ ID NO: 1111109 - DNA, 15 bp, Homo sapiens
ctcacttctgtcttc

SEQ ID NO: 1111110 - DNA, 15 bp, Homo sapiens
cctcacttctgtctt

SEQ ID NO: 1111111 - DNA, 15 bp, Homo sapiens
gcctcacttctgtct

SEQ ID NO: 1111112 - DNA, 15 bp, Homo sapiens
tgcctcacttctgtc

SEQ ID NO: 1111113 - DNA, 15 bp, Homo sapiens
atgcctcacttctgt

SEQ ID NO: 1111114 - DNA, 15 bp, Homo sapiens
gatgcctcacttctg

SEQ ID NO: 1111115 - DNA, 15 bp, Homo sapiens
tgatgcctcacttct

SEQ ID NO: 1111116 - DNA, 15 bp, Homo sapiens
ctgatgcctcacttc

SEQ ID NO: 1111117 - DNA, 15 bp, Homo sapiens
cctgatgcctcactt

SEQ ID NO: 1111118 - DNA, 15 bp, Homo sapiens
acctgatgcctcact

SEQ ID NO: 1111119 - DNA, 15 bp, Homo sapiens
tacctgatgcctcac

SEQ ID NO: 1111120 - DNA, 15 bp, Homo sapiens
ttacctgatgcctca

SEQ ID NO: 1111121 - DNA, 15 bp, Homo sapiens
cttacctgatgcctc

SEQ ID NO: 1111122 - DNA, 15 bp, Homo sapiens
acttacctgatgcct

SEQ ID NO: 1111123 - DNA, 15 bp, Homo sapiens
aacttacctgatgcc

SEQ ID NO: 1111124 - DNA, 15 bp, Homo sapiens
gaacttacctgatgc

SEQ ID NO: 1111125 - DNA, 15 bp, Homo sapiens
ggaacttacctgatg

SEQ ID NO: 1111126 - DNA, 15 bp, Homo sapiens
aggaacttacctgat

SEQ ID NO: 1111127 - DNA, 15 bp, Homo sapiens
caggaacttacctga

SEQ ID NO: 1111128 - DNA, 15 bp, Homo sapiens
tcaggaacttacctg

SEQ ID NO: 1111129 - DNA, 15 bp, Homo sapiens
ttcaggaacttacct

SEQ ID NO: 1111130 - DNA, 15 bp, Homo sapiens
cttcaggaacttacc

SEQ ID NO: 1111131 - DNA, 15 bp, Homo sapiens
acttcaggaacttac

SEQ ID NO: 1111132 - DNA, 15 bp, Homo sapiens
cacttcaggaactta

SEQ ID NO: 1111133 - DNA, 15 bp, Homo sapiens
ccacttcaggaactt

SEQ ID NO: 1111134 - DNA, 15 bp, Homo sapiens
tccacttcaggaact

SEQ ID NO: 1111135 - DNA, 15 bp, Homo sapiens
ctccacttcaggaac

SEQ ID NO: 1111136 - DNA, 15 bp, Homo sapiens
cctccacttcaggaa

SEQ ID NO: 1111137 - DNA, 15 bp, Homo sapiens
acctccacttcagga

SEQ ID NO: 1111138 - DNA, 15 bp, Homo sapiens
cacctccacttcagg

SEQ ID NO: 1111139 - DNA, 15 bp, Homo sapiens
ccacctccacttcag

SEQ ID NO: 1111140 - DNA, 15 bp, Homo sapiens
accacctccacttca

SEQ ID NO: 1111141 - DNA, 15 bp, Homo sapiens
caccacctccacttc

SEQ ID NO: 1111142 - DNA, 15 bp, Homo sapiens
ccaccacctccactt

SEQ ID NO: 1111143 - DNA, 15 bp, Homo sapiens
tccaccacctccact

SEQ ID NO: 1111144 - DNA, 15 bp, Homo sapiens
ttccaccacctccac

SEQ ID NO: 1111145 - DNA, 15 bp, Homo sapiens
tttccaccacctcca

SEQ ID NO: 1111146 - DNA, 15 bp, Homo sapiens
gtttccaccacctcc

SEQ ID NO: 1111147 - DNA, 15 bp, Homo sapiens
cgtttccaccacctc

SEQ ID NO: 1111148 - DNA, 15 bp, Homo sapiens
ccgtttccaccacct

SEQ ID NO: 1111149 - DNA, 15 bp, Homo sapiens
tccgtttccaccacc

SEQ ID NO: 1111150 - DNA, 15 bp, Homo sapiens
ttccgtttccaccac

SEQ ID NO: 1111151 - DNA, 15 bp, Homo sapiens
cttccgtttccacca

SEQ ID NO: 1111152 - DNA, 15 bp, Homo sapiens
ccttccgtttccacc

SEQ ID NO: 1111153 - DNA, 15 bp, Homo sapiens
cccttccgtttccac

SEQ ID NO: 1111154 - DNA, 15 bp, Homo sapiens
acccttccgtttcca

SEQ ID NO: 1111155 - DNA, 15 bp, Homo sapiens
aacccttccgtttcc

SEQ ID NO: 1111156 - DNA, 15 bp, Homo sapiens
taacccttccgtttc

SEQ ID NO: 1111157 - DNA, 15 bp, Homo sapiens
ttaacccttccgttt

SEQ ID NO: 1111158 - DNA, 15 bp, Homo sapiens
tttaacccttccgtt

SEQ ID NO: 1111159 - DNA, 15 bp, Homo sapiens
ctttaacccttccgt

SEQ ID NO: 1111160 - DNA, 15 bp, Homo sapiens
cctttaacccttccg

SEQ ID NO: 1111161 - DNA, 15 bp, Homo sapiens
acctttaacccttcc

SEQ ID NO: 1111162 - DNA, 15 bp, Homo sapiens
tacctttaacccttc

SEQ ID NO: 1111163 - DNA, 15 bp, Homo sapiens
atacctttaaccctt

SEQ ID NO: 1111164 - DNA, 15 bp, Homo sapiens
aatacctttaaccct

SEQ ID NO: 1111165 - DNA, 15 bp, Homo sapiens
aaatacctttaaccc

SEQ ID NO: 1111166 - DNA, 15 bp, Homo sapiens
aaaatacctttaacc

SEQ ID NO: 1111167 - DNA, 15 bp, Homo sapiens
taaaatacctttaac

SEQ ID NO: 1111168 - DNA, 15 bp, Homo sapiens
ctaaaatacctttaa

SEQ ID NO: 1111169 - DNA, 15 bp, Homo sapiens
tctaaaataccttta

SEQ ID NO: 1111170 - DNA, 15 bp, Homo sapiens
ttctaaaataccttt

SEQ ID NO: 1111171 - DNA, 15 bp, Homo sapiens
tttctaaaatacctt

SEQ ID NO: 1111172 - DNA, 15 bp, Homo sapiens
atttctaaaatacct

SEQ ID NO: 1111173 - DNA, 15 bp, Homo sapiens
aatttctaaaatacc

SEQ ID NO: 1111174 - DNA, 15 bp, Homo sapiens
aaatttctaaaatac

SEQ ID NO: 1111175 - DNA, 15 bp, Homo sapiens
aaaatttctaaaata

SEQ ID NO: 1111176 - DNA, 15 bp, Homo sapiens
taaaatttctaaaat

SEQ ID NO: 1111177 - DNA, 15 bp, Homo sapiens
ttaaaatttctaaaa

SEQ ID NO: 1111178 - DNA, 15 bp, Homo sapiens
cttaaaatttctaaa

SEQ ID NO: 1111179 - DNA, 15 bp, Homo sapiens
acttaaaatttctaa

SEQ ID NO: 1111180 - DNA, 15 bp, Homo sapiens
tacttaaaatttcta

SEQ ID NO: 1111181 - DNA, 15 bp, Homo sapiens
ttacttaaaatttct

SEQ ID NO: 1111182 - DNA, 15 bp, Homo sapiens
attacttaaaatttc

SEQ ID NO: 1111183 - DNA, 15 bp, Homo sapiens
aattacttaaaattt

SEQ ID NO: 1111184 - DNA, 15 bp, Homo sapiens
gaattacttaaaatt

SEQ ID NO: 1111185 - DNA, 15 bp, Homo sapiens
tgaattacttaaaat

SEQ ID NO: 1111186 - DNA, 15 bp, Homo sapiens
gtgaattacttaaaa

SEQ ID NO: 1111187 - DNA, 15 bp, Homo sapiens
tgtgaattacttaaa

SEQ ID NO: 1111188 - DNA, 15 bp, Homo sapiens
ctgtgaattacttaa

SEQ ID NO: 1111189 - DNA, 15 bp, Homo sapiens
gctgtgaattactta

SEQ ID NO: 1111190 - DNA, 15 bp, Homo sapiens
tgctgtgaattactt

SEQ ID NO: 1111191 - DNA, 15 bp, Homo sapiens
ctgctgtgaattact

SEQ ID NO: 1111192 - DNA, 15 bp, Homo sapiens
tctgctgtgaattac

SEQ ID NO: 1111193 - DNA, 15 bp, Homo sapiens
ctctgctgtgaatta

SEQ ID NO: 1111194 - DNA, 15 bp, Homo sapiens
cctctgctgtgaatt

SEQ ID NO: 1111195 - DNA, 15 bp, Homo sapiens
ccctctgctgtgaat

SEQ ID NO: 1111196 - DNA, 15 bp, Homo sapiens
tccctctgctgtgaa

SEQ ID NO: 1111197 - DNA, 15 bp, Homo sapiens
ctccctctgctgtga

SEQ ID NO: 1111198 - DNA, 15 bp, Homo sapiens
cctccctctgctgtg

SEQ ID NO: 1111199 - DNA, 15 bp, Homo sapiens
tcctccctctgctgt

SEQ ID NO: 1111200 - DNA, 15 bp, Homo sapiens
ttcctccctctgctg

SEQ ID NO: 1111201 - DNA, 15 bp, Homo sapiens
cttcctccctctgct

SEQ ID NO: 1111202 - DNA, 15 bp, Homo sapiens
acttcctccctctgc

SEQ ID NO: 1111203 - DNA, 15 bp, Homo sapiens
cacttcctccctctg

SEQ ID NO: 1111204 - DNA, 15 bp, Homo sapiens
ccacttcctccctct

SEQ ID NO: 1111205 - DNA, 15 bp, Homo sapiens
cccacttcctccctc

SEQ ID NO: 1111206 - DNA, 15 bp, Homo sapiens
tcccacttcctccct

SEQ ID NO: 1111207 - DNA, 15 bp, Homo sapiens
ctcccacttcctccc

SEQ ID NO: 1111208 - DNA, 15 bp, Homo sapiens
actcccacttcctcc

SEQ ID NO: 1111209 - DNA, 15 bp, Homo sapiens
cactcccacttcctc

SEQ ID NO: 1111210 - DNA, 15 bp, Homo sapiens
ccactcccacttcct

SEQ ID NO: 1111211 - DNA, 15 bp, Homo sapiens
accactcccacttcc

SEQ ID NO: 1111212 - DNA, 15 bp, Homo sapiens
taccactcccacttc

SEQ ID NO: 1111213 - DNA, 15 bp, Homo sapiens
ttaccactcccactt

SEQ ID NO: 1111214 - DNA, 15 bp, Homo sapiens
cttaccactcccact

SEQ ID NO: 1111215 - DNA, 15 bp, Homo sapiens
tcttaccactcccac

SEQ ID NO: 1111216 - DNA, 15 bp, Homo sapiens
atcttaccactccca

SEQ ID NO: 1111217 - DNA, 15 bp, Homo sapiens
aatcttaccactccc

SEQ ID NO: 1111218 - DNA, 15 bp, Homo sapiens
taatcttaccactcc

SEQ ID NO: 1111219 - DNA, 15 bp, Homo sapiens
ctaatcttaccactc

SEQ ID NO: 1111220 - DNA, 15 bp, Homo sapiens
gctaatcttaccact

SEQ ID NO: 1111221 - DNA, 15 bp, Homo sapiens
agctaatcttaccac

SEQ ID NO: 1111222 - DNA, 15 bp, Homo sapiens
aagctaatcttacca

SEQ ID NO: 1111223 - DNA, 15 bp, Homo sapiens
aaagctaatcttacc

SEQ ID NO: 1111224 - DNA, 15 bp, Homo sapiens
caaagctaatcttac

SEQ ID NO: 1111225 - DNA, 15 bp, Homo sapiens
ccaaagctaatctta

SEQ ID NO: 1111226 - DNA, 15 bp, Homo sapiens
cccaaagctaatctt

SEQ ID NO: 1111227 - DNA, 15 bp, Homo sapiens
gcccaaagctaatct

SEQ ID NO: 1111228 - DNA, 15 bp, Homo sapiens
agcccaaagctaatc

SEQ ID NO: 1111229 - DNA, 15 bp, Homo sapiens
cagcccaaagctaat

SEQ ID NO: 1111230 - DNA, 15 bp, Homo sapiens
ccagcccaaagctaa

SEQ ID NO: 1111231 - DNA, 15 bp, Homo sapiens
cccagcccaaagcta

SEQ ID NO: 1111232 - DNA, 15 bp, Homo sapiens
tcccagcccaaagct

SEQ ID NO: 1111233 - DNA, 15 bp, Homo sapiens
ctcccagcccaaagc

SEQ ID NO: 1111234 - DNA, 15 bp, Homo sapiens
actcccagcccaaag

SEQ ID NO: 1111235 - DNA, 15 bp, Homo sapiens
cactcccagcccaaa

SEQ ID NO: 1111236 - DNA, 15 bp, Homo sapiens
ccactcccagcccaa

SEQ ID NO: 1111237 - DNA, 15 bp, Homo sapiens
accactcccagccca

SEQ ID NO: 1111238 - DNA, 15 bp, Homo sapiens
gaccactcccagccc

SEQ ID NO: 1111239 - DNA, 15 bp, Homo sapiens
tgaccactcccagcc

SEQ ID NO: 1111240 - DNA, 15 bp, Homo sapiens
ctgaccactcccagc

SEQ ID NO: 1111241 - DNA, 15 bp, Homo sapiens
cctgaccactcccag

SEQ ID NO: 1111242 - DNA, 15 bp, Homo sapiens
acctgaccactccca

SEQ ID NO: 1111243 - DNA, 15 bp, Homo sapiens
gacctgaccactccc

SEQ ID NO: 1111244 - DNA, 15 bp, Homo sapiens
tgacctgaccactcc

SEQ ID NO: 1111245 - DNA, 15 bp, Homo sapiens
ctgacctgaccactc

SEQ ID NO: 1111246 - DNA, 15 bp, Homo sapiens
gctgacctgaccact

SEQ ID NO: 1111247 - DNA, 15 bp, Homo sapiens
ggctgacctgaccac

SEQ ID NO: 1111248 - DNA, 15 bp, Homo sapiens
aggctgacctgacca

SEQ ID NO: 1111249 - DNA, 15 bp, Homo sapiens
caggctgacctgacc

SEQ ID NO: 1111250 - DNA, 15 bp, Homo sapiens
ccaggctgacctgac

SEQ ID NO: 1111251 - DNA, 15 bp, Homo sapiens
cccaggctgacctga

SEQ ID NO: 1111252 - DNA, 15 bp, Homo sapiens
gcccaggctgacctg

SEQ ID NO: 1111253 - DNA, 15 bp, Homo sapiens
ggcccaggctgacct

SEQ ID NO: 1111254 - DNA, 15 bp, Homo sapiens
aggcccaggctgacc

SEQ ID NO: 1111255 - DNA, 15 bp, Homo sapiens
cagaggcccaggctg

SEQ ID NO: 1111256 - DNA, 15 bp, Homo sapiens
tcagaggcccaggct

SEQ ID NO: 1111257 - DNA, 15 bp, Homo sapiens
ctcagaggcccaggc

SEQ ID NO: 1111258 - DNA, 15 bp, Homo sapiens
tctcagaggcccagg

SEQ ID NO: 1111259 - DNA, 15 bp, Homo sapiens
ctctcagaggcccag

SEQ ID NO: 1111260 - DNA, 15 bp, Homo sapiens
gctctcagaggccca

SEQ ID NO: 1111261 - DNA, 15 bp, Homo sapiens
ggctctcagaggccc

SEQ ID NO: 1111262 - DNA, 15 bp, Homo sapiens
tggctctcagaggcc

SEQ ID NO: 1111263 - DNA, 15 bp, Homo sapiens
gtggctctcagaggc

SEQ ID NO: 1111264 - DNA, 15 bp, Homo sapiens
tgtggctctcagagg

SEQ ID NO: 1111265 - DNA, 15 bp, Homo sapiens
gtgtggctctcagag

SEQ ID NO: 1111266 - DNA, 15 bp, Homo sapiens
cgtgtggctctcaga

SEQ ID NO: 1111267 - DNA, 15 bp, Homo sapiens
acgtgtggctctcag

SEQ ID NO: 1111268 - DNA, 15 bp, Homo sapiens
aacgtgtggctctca

SEQ ID NO: 1111269 - DNA, 15 bp, Homo sapiens
aaacgtgtggctctc

SEQ ID NO: 1111270 - DNA, 15 bp, Homo sapiens
gaaacgtgtggctct

SEQ ID NO: 1111271 - DNA, 15 bp, Homo sapiens
agaaacgtgtggctc

SEQ ID NO: 1111272 - DNA, 15 bp, Homo sapiens
aagaaacgtgtggct

SEQ ID NO: 1111273 - DNA, 15 bp, Homo sapiens
taagaaacgtgtggc

SEQ ID NO: 1111274 - DNA, 15 bp, Homo sapiens
ataagaaacgtgtgg

SEQ ID NO: 1111275 - DNA, 15 bp, Homo sapiens
aataagaaacgtgtg

SEQ ID NO: 1111276 - DNA, 15 bp, Homo sapiens
caataagaaacgtgt

SEQ ID NO: 1111277 - DNA, 15 bp, Homo sapiens
gcaataagaaacgtg

SEQ ID NO: 1111278 - DNA, 15 bp, Homo sapiens
cgcaataagaaacgt

SEQ ID NO: 1111279 - DNA, 15 bp, Homo sapiens
acgcaataagaaacg

SEQ ID NO: 1111280 - DNA, 15 bp, Homo sapiens
cacgcaataagaaac

SEQ ID NO: 1111281 - DNA, 15 bp, Homo sapiens
ccacgcaataagaaa

SEQ ID NO: 1111282 - DNA, 15 bp, Homo sapiens
cccacgcaataagaa

SEQ ID NO: 1111283 - DNA, 15 bp, Homo sapiens
tcccacgcaataaga

SEQ ID NO: 1111284 - DNA, 15 bp, Homo sapiens
ttcccacgcaataag

SEQ ID NO: 1111285 - DNA, 15 bp, Homo sapiens
cttcccacgcaataa

SEQ ID NO: 1111286 - DNA, 15 bp, Homo sapiens
acttcccacgcaata

SEQ ID NO: 1111287 - DNA, 15 bp, Homo sapiens
aacttcccacgcaat

SEQ ID NO: 1111288 - DNA, 15 bp, Homo sapiens
aaacttcccacgcaa

SEQ ID NO: 1111289 - DNA, 15 bp, Homo sapiens
taaacttcccacgca

SEQ ID NO: 1111290 - DNA, 15 bp, Homo sapiens
ttaaacttcccacgc

SEQ ID NO: 1111291 - DNA, 15 bp, Homo sapiens
tttaaacttcccacg

SEQ ID NO: 1111292 - DNA, 15 bp, Homo sapiens
ttttaaacttcccac

SEQ ID NO: 1111293 - DNA, 15 bp, Homo sapiens
tttttaaacttccca

SEQ ID NO: 1111294 - DNA, 15 bp, Homo sapiens
ttttttaaacttccc

SEQ ID NO: 1111295 - DNA, 15 bp, Homo sapiens
attttttaaacttcc

SEQ ID NO: 1111296 - DNA, 15 bp, Homo sapiens
cattttttaaacttc

SEQ ID NO: 1111297 - DNA, 15 bp, Homo sapiens
ccattttttaaactt

SEQ ID NO: 1111298 - DNA, 15 bp, Homo sapiens
cccattttttaaact

SEQ ID NO: 1111299 - DNA, 15 bp, Homo sapiens
acccattttttaaac

SEQ ID NO: 1111300 - DNA, 15 bp, Homo sapiens
cacccattttttaaa

SEQ ID NO: 1111301 - DNA, 15 bp, Homo sapiens
acacccattttttaa

SEQ ID NO: 1111302 - DNA, 15 bp, Homo sapiens
cacacccatttttta

SEQ ID NO: 1111303 - DNA, 15 bp, Homo sapiens
ccacacccatttttt

SEQ ID NO: 1111304 - DNA, 15 bp, Homo sapiens
tccacacccattttt

SEQ ID NO: 1111305 - DNA, 15 bp, Homo sapiens
atccacacccatttt

SEQ ID NO: 1111306 - DNA, 15 bp, Homo sapiens
catccacacccattt

SEQ ID NO: 1111307 - DNA, 15 bp, Homo sapiens
acatccacacccatt

SEQ ID NO: 1111308 - DNA, 15 bp, Homo sapiens
tacatccacacccat

SEQ ID NO: 1111309 - DNA, 15 bp, Homo sapiens
ctacatccacaccca

SEQ ID NO: 1111310 - DNA, 15 bp, Homo sapiens
tctacatccacaccc

SEQ ID NO: 1111311 - DNA, 15 bp, Homo sapiens
atctacatccacacc

SEQ ID NO: 1111312 - DNA, 15 bp, Homo sapiens
catctacatccacac

SEQ ID NO: 1111313 - DNA, 15 bp, Homo sapiens
tcatctacatccaca

SEQ ID NO: 1111314 - DNA, 15 bp, Homo sapiens
ttcatctacatccac

SEQ ID NO: 1111315 - DNA, 15 bp, Homo sapiens
attcatctacatcca

SEQ ID NO: 1111316 - DNA, 15 bp, Homo sapiens
cattcatctacatcc

SEQ ID NO: 1111317 - DNA, 15 bp, Homo sapiens
ccattcatctacatc

SEQ ID NO: 1111318 - DNA, 15 bp, Homo sapiens
gccattcatctacat

SEQ ID NO: 1111319 - DNA, 15 bp, Homo sapiens
tgccattcatctaca

SEQ ID NO: 1111320 - DNA, 15 bp, Homo sapiens
ttgccattcatctac

SEQ ID NO: 1111321 - DNA, 15 bp, Homo sapiens
cttgccattcatcta

SEQ ID NO: 1111322 - DNA, 15 bp, Homo sapiens
ccttgccattcatct

SEQ ID NO: 1111323 - DNA, 15 bp, Homo sapiens
tccttgccattcatc

SEQ ID NO: 1111324 - DNA, 15 bp, Homo sapiens
ctccttgccattcat

SEQ ID NO: 1111325 - DNA, 15 bp, Homo sapiens
tctccttgccattca

SEQ ID NO: 1111326 - DNA, 15 bp, Homo sapiens
ctctccttgccattc

SEQ ID NO: 1111327 - DNA, 15 bp, Homo sapiens
cctctccttgccatt

SEQ ID NO: 1111328 - DNA, 15 bp, Homo sapiens
tcctctccttgccat

SEQ ID NO: 1111329 - DNA, 15 bp, Homo sapiens
atcctctccttgcca

SEQ ID NO: 1111330 - DNA, 15 bp, Homo sapiens
catcctctccttgcc

SEQ ID NO: 1111331 - DNA, 15 bp, Homo sapiens
tcatcctctccttgc

SEQ ID NO: 1111332 - DNA, 15 bp, Homo sapiens
ctcatcctctccttg

SEQ ID NO: 1111333 - DNA, 15 bp, Homo sapiens
actcatcctctcctt

SEQ ID NO: 1111334 - DNA, 15 bp, Homo sapiens
tactcatcctctcct

SEQ ID NO: 1111335 - DNA, 15 bp, Homo sapiens
ctactcatcctctcc

SEQ ID NO: 1111336 - DNA, 15 bp, Homo sapiens
cctactcatcctctc

SEQ ID NO: 1111337 - DNA, 15 bp, Homo sapiens
tcctactcatcctct

SEQ ID NO: 1111338 - DNA, 15 bp, Homo sapiens
ttcctactcatcctc

SEQ ID NO: 1111339 - DNA, 15 bp, Homo sapiens
cttcctactcatcct

SEQ ID NO: 1111340 - DNA, 15 bp, Homo sapiens
acttcctactcatcc

SEQ ID NO: 1111341 - DNA, 15 bp, Homo sapiens
aacttcctactcatc

SEQ ID NO: 1111342 - DNA, 15 bp, Homo sapiens
caacttcctactcat

SEQ ID NO: 1111343 - DNA, 15 bp, Homo sapiens
tcaacttcctactca

SEQ ID NO: 1111344 - DNA, 15 bp, Homo sapiens
ttcaacttcctactc

SEQ ID NO: 1111345 - DNA, 15 bp, Homo sapiens
attcaacttcctact

SEQ ID NO: 1111346 - DNA, 15 bp, Homo sapiens
cattcaacttcctac

SEQ ID NO: 1111347 - DNA, 15 bp, Homo sapiens
tcattcaacttccta

SEQ ID NO: 1111348 - DNA, 15 bp, Homo sapiens
ctcattcaacttcct

SEQ ID NO: 1111349 - DNA, 15 bp, Homo sapiens
actcattcaacttcc

SEQ ID NO: 1111350 - DNA, 15 bp, Homo sapiens
aactcattcaacttc

SEQ ID NO: 1111351 - DNA, 15 bp, Homo sapiens
caactcattcaactt

SEQ ID NO: 1111352 - DNA, 15 bp, Homo sapiens
gcaactcattcaact

SEQ ID NO: 1111353 - DNA, 15 bp, Homo sapiens
agcaactcattcaac

SEQ ID NO: 1111354 - DNA, 15 bp, Homo sapiens
aagcaactcattcaa

SEQ ID NO: 1111355 - DNA, 15 bp, Homo sapiens
aaagcaactcattca

SEQ ID NO: 1111356 - DNA, 15 bp, Homo sapiens
caaagcaactcattc

SEQ ID NO: 1111357 - DNA, 15 bp, Homo sapiens
acaaagcaactcatt

SEQ ID NO: 1111358 - DNA, 15 bp, Homo sapiens
aacaaagcaactcat

SEQ ID NO: 1111359 - DNA, 15 bp, Homo sapiens
aaacaaagcaactca

SEQ ID NO: 1111360 - DNA, 15 bp, Homo sapiens
aaaacaaagcaactc

SEQ ID NO: 1111361 - DNA, 15 bp, Homo sapiens
aaaaacaaagcaact

SEQ ID NO: 1111362 - DNA, 15 bp, Homo sapiens
taaaaacaaagcaac

SEQ ID NO: 1111363 - DNA, 15 bp, Homo sapiens
ctaaaaacaaagcaa

SEQ ID NO: 1111364 - DNA, 15 bp, Homo sapiens
tctaaaaacaaagca

SEQ ID NO: 1111365 - DNA, 15 bp, Homo sapiens
ctctaaaaacaaagc

SEQ ID NO: 1111366 - DNA, 15 bp, Homo sapiens
cctctaaaaacaaag

SEQ ID NO: 1111367 - DNA, 15 bp, Homo sapiens
tcctctaaaaacaaa

SEQ ID NO: 1111368 - DNA, 15 bp, Homo sapiens
ctcctctaaaaacaa

SEQ ID NO: 1111369 - DNA, 15 bp, Homo sapiens
cctcctctaaaaaca

SEQ ID NO: 1111370 - DNA, 15 bp, Homo sapiens
acctcctctaaaaac

SEQ ID NO: 1111371 - DNA, 15 bp, Homo sapiens
cacctcctctaaaaa

SEQ ID NO: 1111372 - DNA, 15 bp, Homo sapiens
tcacctcctctaaaa

SEQ ID NO: 1111373 - DNA, 15 bp, Homo sapiens
ctcacctcctctaaa

SEQ ID NO: 1111374 - DNA, 15 bp, Homo sapiens
gctcacctcctctaa

SEQ ID NO: 1111375 - DNA, 15 bp, Homo sapiens
tgctcacctcctcta

SEQ ID NO: 1111376 - DNA, 15 bp, Homo sapiens
atgctcacctcctct

SEQ ID NO: 1111377 - DNA, 15 bp, Homo sapiens
catgctcacctcctc

SEQ ID NO: 1111378 - DNA, 15 bp, Homo sapiens
ccatgctcacctcct

SEQ ID NO: 1111379 - DNA, 15 bp, Homo sapiens
tccatgctcacctcc

SEQ ID NO: 1111380 - DNA, 15 bp, Homo sapiens
ttccatgctcacctc

SEQ ID NO: 1111381 - DNA, 15 bp, Homo sapiens
attccatgctcacct

SEQ ID NO: 1111382 - DNA, 15 bp, Homo sapiens
cattccatgctcacc

SEQ ID NO: 1111383 - DNA, 15 bp, Homo sapiens
tcattccatgctcac

SEQ ID NO: 1111384 - DNA, 15 bp, Homo sapiens
ctcattccatgctca

SEQ ID NO: 1111385 - DNA, 15 bp, Homo sapiens
tctcattccatgctc

SEQ ID NO: 1111386 - DNA, 15 bp, Homo sapiens
ttctcattccatgct

SEQ ID NO: 1111387 - DNA, 15 bp, Homo sapiens
cttctcattccatgc

SEQ ID NO: 1111388 - DNA, 15 bp, Homo sapiens
tcttctcattccatg

SEQ ID NO: 1111389 - DNA, 15 bp, Homo sapiens
atcttctcattccat

SEQ ID NO: 1111390 - DNA, 15 bp, Homo sapiens
gatcttctcattcca

SEQ ID NO: 1111391 - DNA, 15 bp, Homo sapiens
tgatcttctcattcc

SEQ ID NO: 1111392 - DNA, 15 bp, Homo sapiens
gtgatcttctcattc

SEQ ID NO: 1111393 - DNA, 15 bp, Homo sapiens
tgtgatcttctcatt

SEQ ID NO: 1111394 - DNA, 15 bp, Homo sapiens
ctgtgatcttctcat

SEQ ID NO: 1111395 - DNA, 15 bp, Homo sapiens
gctgtgatcttctca

SEQ ID NO: 1111396 - DNA, 15 bp, Homo sapiens
tgctgtgatcttctc

SEQ ID NO: 1111397 - DNA, 15 bp, Homo sapiens
ttgctgtgatcttct

SEQ ID NO: 1111398 - DNA, 15 bp, Homo sapiens
tttgctgtgatcttc

SEQ ID NO: 1111399 - DNA, 15 bp, Homo sapiens
atttgctgtgatctt

SEQ ID NO: 1111400 - DNA, 15 bp, Homo sapiens
aatttgctgtgatct

SEQ ID NO: 1111401 - DNA, 15 bp, Homo sapiens
aaatttgctgtgatc

SEQ ID NO: 1111402 - DNA, 15 bp, Homo sapiens
aaaatttgctgtgat

SEQ ID NO: 1111403 - DNA, 15 bp, Homo sapiens
caaaatttgctgtga

SEQ ID NO: 1111404 - DNA, 15 bp, Homo sapiens
gcaaaatttgctgtg

SEQ ID NO: 1111405 - DNA, 15 bp, Homo sapiens
ggcaaaatttgctgt

SEQ ID NO: 1111406 - DNA, 15 bp, Homo sapiens
tggcaaaatttgctg

SEQ ID NO: 1111407 - DNA, 15 bp, Homo sapiens
ctggcaaaatttgct

SEQ ID NO: 1111408 - DNA, 15 bp, Homo sapiens
tctggcaaaatttgc

SEQ ID NO: 1111409 - DNA, 15 bp, Homo sapiens
ctctggcaaaatttg

SEQ ID NO: 1111410 - DNA, 15 bp, Homo sapiens
gctctggcaaaattt

SEQ ID NO: 1111411 - DNA, 15 bp, Homo sapiens
agctctggcaaaatt

SEQ ID NO: 1111412 - DNA, 15 bp, Homo sapiens
cagctctggcaaaat

SEQ ID NO: 1111413 - DNA, 15 bp, Homo sapiens
gcagctctggcaaaa

SEQ ID NO: 1111414 - DNA, 15 bp, Homo sapiens
agcagctctggcaaa

SEQ ID NO: 1111415 - DNA, 15 bp, Homo sapiens
cagcagctctggcaa

SEQ ID NO: 1111416 - DNA, 15 bp, Homo sapiens
tcagcagctctggca

SEQ ID NO: 1111417 - DNA, 15 bp, Homo sapiens
ctcagcagctctggc

SEQ ID NO: 1111418 - DNA, 15 bp, Homo sapiens
tctcagcagctctgg

SEQ ID NO: 1111419 - DNA, 15 bp, Homo sapiens
ttctcagcagctctg

SEQ ID NO: 1111420 - DNA, 15 bp, Homo sapiens
cttctcagcagctct

SEQ ID NO: 1111421 - DNA, 15 bp, Homo sapiens
tcttctcagcagctc

SEQ ID NO: 1111422 - DNA, 15 bp, Homo sapiens
ttcttctcagcagct

SEQ ID NO: 1111423 - DNA, 15 bp, Homo sapiens
attcttctcagcagc

SEQ ID NO: 1111424 - DNA, 15 bp, Homo sapiens
cattcttctcagcag

SEQ ID NO: 1111425 - DNA, 15 bp, Homo sapiens
ccattcttctcagca

SEQ ID NO: 1111426 - DNA, 15 bp, Homo sapiens
cccattcttctcagc

SEQ ID NO: 1111427 - DNA, 15 bp, Homo sapiens
tcccattcttctcag

SEQ ID NO: 1111428 - DNA, 15 bp, Homo sapiens
ctcccattcttctca

SEQ ID NO: 1111429 - DNA, 15 bp, Homo sapiens
gctcccattcttctc

SEQ ID NO: 1111430 - DNA, 15 bp, Homo sapiens
tgctcccattcttct

SEQ ID NO: 1111431 - DNA, 15 bp, Homo sapiens
ttgctcccattcttc

SEQ ID NO: 1111432 - DNA, 15 bp, Homo sapiens
attgctcccattctt

SEQ ID NO: 1111433 - DNA, 15 bp, Homo sapiens
gattgctcccattct

SEQ ID NO: 1111434 - DNA, 15 bp, Homo sapiens
ggattgctcccattc

SEQ ID NO: 1111435 - DNA, 15 bp, Homo sapiens
cggattgctcccatt

SEQ ID NO: 1111436 - DNA, 15 bp, Homo sapiens
gcggattgctcccat

SEQ ID NO: 1111437 - DNA, 15 bp, Homo sapiens
tgcggattgctccca

SEQ ID NO: 1111438 - DNA, 15 bp, Homo sapiens
ctgcggattgctccc

SEQ ID NO: 1111439 - DNA, 15 bp, Homo sapiens
tctgcggattgctcc

SEQ ID NO: 1111440 - DNA, 15 bp, Homo sapiens
ctctgcggattgctc

SEQ ID NO: 1111441 - DNA, 15 bp, Homo sapiens
tctctgcggattgct

SEQ ID NO: 1111442 - DNA, 15 bp, Homo sapiens
ttctctgcggattgc

SEQ ID NO: 1111443 - DNA, 15 bp, Homo sapiens
tttctctgcggattg

SEQ ID NO: 1111444 - DNA, 15 bp, Homo sapiens
atttctctgcggatt

SEQ ID NO: 1111445 - DNA, 15 bp, Homo sapiens
catttctctgcggat

SEQ ID NO: 1111446 - DNA, 15 bp, Homo sapiens
tcatttctctgcgga

SEQ ID NO: 1111447 - DNA, 15 bp, Homo sapiens
ttcatttctctgcgg

SEQ ID NO: 1111448 - DNA, 15 bp, Homo sapiens
cttcatttctctgcg

SEQ ID NO: 1111449 - DNA, 15 bp, Homo sapiens
acttcatttctctgc

SEQ ID NO: 1111450 - DNA, 15 bp, Homo sapiens
cacttcatttctctg

SEQ ID NO: 1111451 - DNA, 15 bp, Homo sapiens
acacttcatttctct

SEQ ID NO: 1111452 - DNA, 15 bp, Homo sapiens
cacacttcatttctc

SEQ ID NO: 1111453 - DNA, 15 bp, Homo sapiens
gcacacttcatttct

SEQ ID NO: 1111454 - DNA, 15 bp, Homo sapiens
tgcacacttcatttc

SEQ ID NO: 1111455 - DNA, 15 bp, Homo sapiens
atgcacacttcattt

SEQ ID NO: 1111456 - DNA, 15 bp, Homo sapiens
aatgcacacttcatt

SEQ ID NO: 1111457 - DNA, 15 bp, Homo sapiens
caatgcacacttcat

SEQ ID NO: 1111458 - DNA, 15 bp, Homo sapiens
gcaatgcacacttca

SEQ ID NO: 1111459 - DNA, 15 bp, Homo sapiens
tgcaatgcacacttc

SEQ ID NO: 1111460 - DNA, 15 bp, Homo sapiens
atgcaatgcacactt

SEQ ID NO: 1111461 - DNA, 15 bp, Homo sapiens
catgcaatgcacact

SEQ ID NO: 1111462 - DNA, 15 bp, Homo sapiens
acatgcaatgcacac

SEQ ID NO: 1111463 - DNA, 15 bp, Homo sapiens
aacatgcaatgcaca

SEQ ID NO: 1111464 - DNA, 15 bp, Homo sapiens
caacatgcaatgcac

SEQ ID NO: 1111465 - DNA, 15 bp, Homo sapiens
tcaacatgcaatgca

SEQ ID NO: 1111466 - DNA, 15 bp, Homo sapiens
ctcaacatgcaatgc

SEQ ID NO: 1111467 - DNA, 15 bp, Homo sapiens
gctcaacatgcaatg

SEQ ID NO: 1111468 - DNA, 15 bp, Homo sapiens
agctcaacatgcaat

SEQ ID NO: 1111469 - DNA, 15 bp, Homo sapiens
cagctcaacatgcaa

SEQ ID NO: 1111470 - DNA, 15 bp, Homo sapiens
ccagctcaacatgca

SEQ ID NO: 1111471 - DNA, 15 bp, Homo sapiens
tccagctcaacatgc

SEQ ID NO: 1111472 - DNA, 15 bp, Homo sapiens
ctccagctcaacatg

SEQ ID NO: 1111473 - DNA, 15 bp, Homo sapiens
tctccagctcaacat

SEQ ID NO: 1111474 - DNA, 15 bp, Homo sapiens
ctctccagctcaaca

SEQ ID NO: 1111475 - DNA, 15 bp, Homo sapiens
gctctccagctcaac

SEQ ID NO: 1111476 - DNA, 15 bp, Homo sapiens
tgctctccagctcaa

SEQ ID NO: 1111477 - DNA, 15 bp, Homo sapiens
gtgctctccagctca

SEQ ID NO: 1111478 - DNA, 15 bp, Homo sapiens
tgtgctctccagctc

SEQ ID NO: 1111479 - DNA, 15 bp, Homo sapiens
gtgtgctctccagct

SEQ ID NO: 1111480 - DNA, 15 bp, Homo sapiens
tgtgtgctctccagc

SEQ ID NO: 1111481 - DNA, 15 bp, Homo sapiens
atgtgtgctctccag

SEQ ID NO: 1111482 - DNA, 15 bp, Homo sapiens
aatgtgtgctctcca

SEQ ID NO: 1111483 - DNA, 15 bp, Homo sapiens
gaatgtgtgctctcc

SEQ ID NO: 1111484 - DNA, 15 bp, Homo sapiens
tgaatgtgtgctctc

SEQ ID NO: 1111485 - DNA, 15 bp, Homo sapiens
gtgaatgtgtgctct

SEQ ID NO: 1111486 - DNA, 15 bp, Homo sapiens
agtgaatgtgtgctc

SEQ ID NO: 1111487 - DNA, 15 bp, Homo sapiens
gagtgaatgtgtgct

SEQ ID NO: 1111488 - DNA, 15 bp, Homo sapiens
ggagtgaatgtgtgc

SEQ ID NO: 1111489 - DNA, 15 bp, Homo sapiens
tggagtgaatgtgtg

SEQ ID NO: 1111490 - DNA, 15 bp, Homo sapiens
atggagtgaatgtgt

SEQ ID NO: 1111491 - DNA, 15 bp, Homo sapiens
aatggagtgaatgtg

SEQ ID NO: 1111492 - DNA, 15 bp, Homo sapiens
taatggagtgaatgt

SEQ ID NO: 1111493 - DNA, 15 bp, Homo sapiens
ttaatggagtgaatg

SEQ ID NO: 1111494 - DNA, 15 bp, Homo sapiens
attaatggagtgaat

SEQ ID NO: 1111495 - DNA, 15 bp, Homo sapiens
aattaatggagtgaa

SEQ ID NO: 1111496 - DNA, 15 bp, Homo sapiens
gaattaatggagtga

SEQ ID NO: 1111497 - DNA, 15 bp, Homo sapiens
tgaattaatggagtg

SEQ ID NO: 1111498 - DNA, 15 bp, Homo sapiens
atgaattaatggagt

SEQ ID NO: 1111499 - DNA, 15 bp, Homo sapiens
aatgaattaatggag

SEQ ID NO: 1111500 - DNA, 15 bp, Homo sapiens
gaatgaattaatgga

SEQ ID NO: 1111501 - DNA, 15 bp, Homo sapiens
cgaatgaattaatgg

SEQ ID NO: 1111502 - DNA, 15 bp, Homo sapiens
acgaatgaattaatg

SEQ ID NO: 1111503 - DNA, 15 bp, Homo sapiens
aacgaatgaattaat

SEQ ID NO: 1111504 - DNA, 15 bp, Homo sapiens
aaacgaatgaattaa

SEQ ID NO: 1111505 - DNA, 15 bp, Homo sapiens
aaaacgaatgaatta

SEQ ID NO: 1111506 - DNA, 15 bp, Homo sapiens
caaaacgaatgaatt

SEQ ID NO: 1111507 - DNA, 15 bp, Homo sapiens
gcaaaacgaatgaat

SEQ ID NO: 1111508 - DNA, 15 bp, Homo sapiens
tgcaaaacgaatgaa

SEQ ID NO: 1111509 - DNA, 15 bp, Homo sapiens
ttgcaaaacgaatga

SEQ ID NO: 1111510 - DNA, 15 bp, Homo sapiens
tttgcaaaacgaatg

SEQ ID NO: 1111511 - DNA, 15 bp, Homo sapiens
atttgcaaaacgaat

SEQ ID NO: 1111512 - DNA, 15 bp, Homo sapiens
tatttgcaaaacgaa

SEQ ID NO: 1111513 - DNA, 15 bp, Homo sapiens
atatttgcaaaacga

SEQ ID NO: 1111514 - DNA, 15 bp, Homo sapiens
aatatttgcaaaacg

SEQ ID NO: 1111515 - DNA, 15 bp, Homo sapiens
caatatttgcaaaac

SEQ ID NO: 1111516 - DNA, 15 bp, Homo sapiens
tcaatatttgcaaaa

SEQ ID NO: 1111517 - DNA, 15 bp, Homo sapiens
ctcaatatttgcaaa

SEQ ID NO: 1111518 - DNA, 15 bp, Homo sapiens
actcaatatttgcaa

SEQ ID NO: 1111519 - DNA, 15 bp, Homo sapiens
cactcaatatttgca

SEQ ID NO: 1111520 - DNA, 15 bp, Homo sapiens
acactcaatatttgc

SEQ ID NO: 1111521 - DNA, 15 bp, Homo sapiens
gacactcaatatttg

SEQ ID NO: 1111522 - DNA, 15 bp, Homo sapiens
agacactcaatattt

SEQ ID NO: 1111523 - DNA, 15 bp, Homo sapiens
tagacactcaatatt

SEQ ID NO: 1111524 - DNA, 15 bp, Homo sapiens
atagacactcaatat

SEQ ID NO: 1111525 - DNA, 15 bp, Homo sapiens
aatagacactcaata

SEQ ID NO: 1111526 - DNA, 15 bp, Homo sapiens
aaatagacactcaat

SEQ ID NO: 1111527 - DNA, 15 bp, Homo sapiens
caaatagacactcaa

SEQ ID NO: 1111528 - DNA, 15 bp, Homo sapiens
ccaaatagacactca

SEQ ID NO: 1111529 - DNA, 15 bp, Homo sapiens
accaaatagacactc

SEQ ID NO: 1111530 - DNA, 15 bp, Homo sapiens
taccaaatagacact

SEQ ID NO: 1111531 - DNA, 15 bp, Homo sapiens
ataccaaatagacac

SEQ ID NO: 1111532 - DNA, 15 bp, Homo sapiens
gataccaaatagaca

SEQ ID NO: 1111533 - DNA, 15 bp, Homo sapiens
tgataccaaatagac

SEQ ID NO: 1111534 - DNA, 15 bp, Homo sapiens
ctgataccaaataga

SEQ ID NO: 1111535 - DNA, 15 bp, Homo sapiens
tctgataccaaatag

SEQ ID NO: 1111536 - DNA, 15 bp, Homo sapiens
gtctgataccaaata

SEQ ID NO: 1111537 - DNA, 15 bp, Homo sapiens
tgtctgataccaaat

SEQ ID NO: 1111538 - DNA, 15 bp, Homo sapiens
gtgtctgataccaaa

SEQ ID NO: 1111539 - DNA, 15 bp, Homo sapiens
agtgtctgataccaa

SEQ ID NO: 1111540 - DNA, 15 bp, Homo sapiens
tagtgtctgatacca

SEQ ID NO: 1111541 - DNA, 15 bp, Homo sapiens
atagtgtctgatacc

SEQ ID NO: 1111542 - DNA, 15 bp, Homo sapiens
aatagtgtctgatac

SEQ ID NO: 1111543 - DNA, 15 bp, Homo sapiens
caatagtgtctgata

SEQ ID NO: 1111544 - DNA, 15 bp, Homo sapiens
acaatagtgtctgat

SEQ ID NO: 1111545 - DNA, 15 bp, Homo sapiens
tacaatagtgtctga

SEQ ID NO: 1111546 - DNA, 15 bp, Homo sapiens
ctacaatagtgtctg

SEQ ID NO: 1111547 - DNA, 15 bp, Homo sapiens
cctacaatagtgtct

SEQ ID NO: 1111548 - DNA, 15 bp, Homo sapiens
acctacaatagtgtc

SEQ ID NO: 1111549 - DNA, 15 bp, Homo sapiens
cacctacaatagtgt

SEQ ID NO: 1111550 - DNA, 15 bp, Homo sapiens
gcacctacaatagtg

SEQ ID NO: 1111551 - DNA, 15 bp, Homo sapiens
agcacctacaatagt

SEQ ID NO: 1111552 - DNA, 15 bp, Homo sapiens
cagcacctacaatag

SEQ ID NO: 1111553 - DNA, 15 bp, Homo sapiens
gcagcacctacaata

SEQ ID NO: 1111554 - DNA, 15 bp, Homo sapiens
cgcagcacctacaat

SEQ ID NO: 1111555 - DNA, 15 bp, Homo sapiens
ccgcagcacctacaa

SEQ ID NO: 1111556 - DNA, 15 bp, Homo sapiens
cccgcagcacctaca

SEQ ID NO: 1111557 - DNA, 15 bp, Homo sapiens
acccgcagcacctac

SEQ ID NO: 1111558 - DNA, 15 bp, Homo sapiens
tacccgcagcaccta

SEQ ID NO: 1111559 - DNA, 15 bp, Homo sapiens
atacccgcagcacct

SEQ ID NO: 1111560 - DNA, 15 bp, Homo sapiens
tatacccgcagcacc

SEQ ID NO: 1111561 - DNA, 15 bp, Homo sapiens
ctatacccgcagcac

SEQ ID NO: 1111562 - DNA, 15 bp, Homo sapiens
tctatacccgcagca

SEQ ID NO: 1111563 - DNA, 15 bp, Homo sapiens
ttctatacccgcagc

SEQ ID NO: 1111564 - DNA, 15 bp, Homo sapiens
tttctatacccgcag

SEQ ID NO: 1111565 - DNA, 15 bp, Homo sapiens
ttttctatacccgca

SEQ ID NO: 1111566 - DNA, 15 bp, Homo sapiens
cttttctatacccgc

SEQ ID NO: 1111567 - DNA, 15 bp, Homo sapiens
tcttttctatacccg

SEQ ID NO: 1111568 - DNA, 15 bp, Homo sapiens
ttcttttctataccc

SEQ ID NO: 1111569 - DNA, 15 bp, Homo sapiens
gttcttttctatacc

SEQ ID NO: 1111570 - DNA, 15 bp, Homo sapiens
tgttcttttctatac

SEQ ID NO: 1111571 - DNA, 15 bp, Homo sapiens
tttgttcttttctat

SEQ ID NO: 1111572 - DNA, 15 bp, Homo sapiens
ttttgttcttttcta

SEQ ID NO: 1111573 - DNA, 15 bp, Homo sapiens
attttgttcttttct

SEQ ID NO: 1111574 - DNA, 15 bp, Homo sapiens
tattttgttcttttc

SEQ ID NO: 1111575 - DNA, 15 bp, Homo sapiens
ctattttgttctttt

SEQ ID NO: 1111576 - DNA, 15 bp, Homo sapiens
cctattttgttcttt

SEQ ID NO: 1111577 - DNA, 15 bp, Homo sapiens
gcctattttgttctt

SEQ ID NO: 1111578 - DNA, 15 bp, Homo sapiens
tgcctattttgttct

SEQ ID NO: 1111579 - DNA, 15 bp, Homo sapiens
ttgcctattttgttc

SEQ ID NO: 1111580 - DNA, 15 bp, Homo sapiens
tttgcctattttgtt

SEQ ID NO: 1111581 - DNA, 15 bp, Homo sapiens
ttttgcctattttgt

SEQ ID NO: 1111582 - DNA, 15 bp, Homo sapiens
tttttgcctattttg

SEQ ID NO: 1111583 - DNA, 15 bp, Homo sapiens
atttttgcctatttt

SEQ ID NO: 1111584 - DNA, 15 bp, Homo sapiens
catttttgcctattt

SEQ ID NO: 1111585 - DNA, 15 bp, Homo sapiens
acatttttgcctatt

SEQ ID NO: 1111586 - DNA, 15 bp, Homo sapiens
aacatttttgcctat

SEQ ID NO: 1111587 - DNA, 15 bp, Homo sapiens
caacatttttgccta

SEQ ID NO: 1111588 - DNA, 15 bp, Homo sapiens
ccaacatttttgcct

SEQ ID NO: 1111589 - DNA, 15 bp, Homo sapiens
gccaacatttttgcc

SEQ ID NO: 1111590 - DNA, 15 bp, Homo sapiens
ggccaacatttttgc

SEQ ID NO: 1111591 - DNA, 15 bp, Homo sapiens
gggccaacatttttg

SEQ ID NO: 1111592 - DNA, 15 bp, Homo sapiens
agggccaacattttt

SEQ ID NO: 1111593 - DNA, 15 bp, Homo sapiens
aagggccaacatttt

SEQ ID NO: 1111594 - DNA, 15 bp, Homo sapiens
caagggccaacattt

SEQ ID NO: 1111595 - DNA, 15 bp, Homo sapiens
tcaagggccaacatt

SEQ ID NO: 1111596 - DNA, 15 bp, Homo sapiens
ctcaagggccaacat

SEQ ID NO: 1111597 - DNA, 15 bp, Homo sapiens
cctcaagggccaaca

SEQ ID NO: 1111598 - DNA, 15 bp, Homo sapiens
tcctcaagggccaac

SEQ ID NO: 1111599 - DNA, 15 bp, Homo sapiens
ctcctcaagggccaa

SEQ ID NO: 1111600 - DNA, 15 bp, Homo sapiens
actcctcaagggcca

SEQ ID NO: 1111601 - DNA, 15 bp, Homo sapiens
aactcctcaagggcc

SEQ ID NO: 1111602 - DNA, 15 bp, Homo sapiens
aaactcctcaagggc

SEQ ID NO: 1111603 - DNA, 15 bp, Homo sapiens
taaactcctcaaggg

SEQ ID NO: 1111604 - DNA, 15 bp, Homo sapiens
gtaaactcctcaagg

SEQ ID NO: 1111605 - DNA, 15 bp, Homo sapiens
tgtaaactcctcaag

SEQ ID NO: 1111606 - DNA, 15 bp, Homo sapiens
atgtaaactcctcaa

SEQ ID NO: 1111607 - DNA, 15 bp, Homo sapiens
aatgtaaactcctca

SEQ ID NO: 1111608 - DNA, 15 bp, Homo sapiens
aaatgtaaactcctc

SEQ ID NO: 1111609 - DNA, 15 bp, Homo sapiens
aaaatgtaaactcct

SEQ ID NO: 1111610 - DNA, 15 bp, Homo sapiens
taaaatgtaaactcc

SEQ ID NO: 1111611 - DNA, 15 bp, Homo sapiens
ctaaaatgtaaactc

SEQ ID NO: 1111612 - DNA, 15 bp, Homo sapiens
actaaaatgtaaact

SEQ ID NO: 1111613 - DNA, 15 bp, Homo sapiens
cactaaaatgtaaac

SEQ ID NO: 1111614 - DNA, 15 bp, Homo sapiens
tcactaaaatgtaaa

SEQ ID NO: 1111615 - DNA, 15 bp, Homo sapiens
ctcactaaaatgtaa

SEQ ID NO: 1111616 - DNA, 15 bp, Homo sapiens
cctcactaaaatgta

SEQ ID NO: 1111617 - DNA, 15 bp, Homo sapiens
ccctcactaaaatgt

SEQ ID NO: 1111618 - DNA, 15 bp, Homo sapiens
tccctcactaaaatg

SEQ ID NO: 1111619 - DNA, 15 bp, Homo sapiens
ctccctcactaaaat

SEQ ID NO: 1111620 - DNA, 15 bp, Homo sapiens
tctccctcactaaaa

SEQ ID NO: 1111621 - DNA, 15 bp, Homo sapiens
atctccctcactaaa

SEQ ID NO: 1111622 - DNA, 15 bp, Homo sapiens
tatctccctcactaa

SEQ ID NO: 1111623 - DNA, 15 bp, Homo sapiens
atatctccctcacta

SEQ ID NO: 1111624 - DNA, 15 bp, Homo sapiens
tatatctccctcact

SEQ ID NO: 1111625 - DNA, 15 bp, Homo sapiens
ttatatctccctcac

SEQ ID NO: 1111626 - DNA, 15 bp, Homo sapiens
attatatctccctca

SEQ ID NO: 1111627 - DNA, 15 bp, Homo sapiens
tattatatctccctc

SEQ ID NO: 1111628 - DNA, 15 bp, Homo sapiens
ttattatatctccct

SEQ ID NO: 1111629 - DNA, 15 bp, Homo sapiens
tttattatatctccc

SEQ ID NO: 1111630 - DNA, 15 bp, Homo sapiens
gtttattatatctcc

SEQ ID NO: 1111631 - DNA, 15 bp, Homo sapiens
tgtttattatatctc

SEQ ID NO: 1111632 - DNA, 15 bp, Homo sapiens
atgtttattatatct

SEQ ID NO: 1111633 - DNA, 15 bp, Homo sapiens
aatgtttattatatc

SEQ ID NO: 1111634 - DNA, 15 bp, Homo sapiens
caatgtttattatat

SEQ ID NO: 1111635 - DNA, 15 bp, Homo sapiens
acaatgtttattata

SEQ ID NO: 1111636 - DNA, 15 bp, Homo sapiens
tacaatgtttattat

SEQ ID NO: 1111637 - DNA, 15 bp, Homo sapiens
ttacaatgtttatta

SEQ ID NO: 1111638 - DNA, 15 bp, Homo sapiens
tttacaatgtttatt

SEQ ID NO: 1111639 - DNA, 15 bp, Homo sapiens
atttacaatgtttat

SEQ ID NO: 1111640 - DNA, 15 bp, Homo sapiens
tatttacaatgttta

SEQ ID NO: 1111641 - DNA, 15 bp, Homo sapiens
ttatttacaatgttt

SEQ ID NO: 1111642 - DNA, 15 bp, Homo sapiens
tttatttacaatgtt

SEQ ID NO: 1111643 - DNA, 15 bp, Homo sapiens
atttatttacaatgt

SEQ ID NO: 1111644 - DNA, 15 bp, Homo sapiens
gatttatttacaatg

SEQ ID NO: 1111645 - DNA, 15 bp, Homo sapiens
tgatttatttacaat

SEQ ID NO: 1111646 - DNA, 15 bp, Homo sapiens
ttgatttatttacaa

SEQ ID NO: 1111647 - DNA, 15 bp, Homo sapiens
tttgatttatttaca

SEQ ID NO: 1111648 - DNA, 15 bp, Homo sapiens
atttgatttatttac

SEQ ID NO: 1111649 - DNA, 15 bp, Homo sapiens
catttgatttattta

SEQ ID NO: 1111650 - DNA, 15 bp, Homo sapiens
acatttgatttattt

SEQ ID NO: 1111651 - DNA, 15 bp, Homo sapiens
tacatttgatttatt

SEQ ID NO: 1111652 - DNA, 15 bp, Homo sapiens
atacatttgatttat

SEQ ID NO: 1111653 - DNA, 15 bp, Homo sapiens
tatacatttgattta

SEQ ID NO: 1111654 - DNA, 15 bp, Homo sapiens
ctatacatttgattt

SEQ ID NO: 1111655 - DNA, 15 bp, Homo sapiens
gctatacatttgatt

SEQ ID NO: 1111656 - DNA, 15 bp, Homo sapiens
tgctatacatttgat

SEQ ID NO: 1111657 - DNA, 15 bp, Homo sapiens
atgctatacatttga

SEQ ID NO: 1111658 - DNA, 15 bp, Homo sapiens
catgctatacatttg

SEQ ID NO: 1111659 - DNA, 15 bp, Homo sapiens
ccatgctatacattt

SEQ ID NO: 1111660 - DNA, 15 bp, Homo sapiens
accatgctatacatt

SEQ ID NO: 1111661 - DNA, 15 bp, Homo sapiens
taccatgctatacat

SEQ ID NO: 1111662 - DNA, 15 bp, Homo sapiens
ctaccatgctataca

SEQ ID NO: 1111663 - DNA, 15 bp, Homo sapiens
gctaccatgctatac

SEQ ID NO: 1111664 - DNA, 15 bp, Homo sapiens
agctaccatgctata

SEQ ID NO: 1111665 - DNA, 15 bp, Homo sapiens
tagctaccatgctat

SEQ ID NO: 1111666 - DNA, 15 bp, Homo sapiens
ctagctaccatgcta

SEQ ID NO: 1111667 - DNA, 15 bp, Homo sapiens
actagctaccatgct

SEQ ID NO: 1111668 - DNA, 15 bp, Homo sapiens
cactagctaccatgc

SEQ ID NO: 1111669 - DNA, 15 bp, Homo sapiens
tcactagctaccatg

SEQ ID NO: 1111670 - DNA, 15 bp, Homo sapiens
atcactagctaccat

SEQ ID NO: 1111671 - DNA, 15 bp, Homo sapiens
tatcactagctacca

SEQ ID NO: 1111672 - DNA, 15 bp, Homo sapiens
ttatcactagctacc

SEQ ID NO: 1111673 - DNA, 15 bp, Homo sapiens
attatcactagctac

SEQ ID NO: 1111674 - DNA, 15 bp, Homo sapiens
gattatcactagcta

SEQ ID NO: 1111675 - DNA, 15 bp, Homo sapiens
agattatcactagct

SEQ ID NO: 1111676 - DNA, 15 bp, Homo sapiens
tagattatcactagc

SEQ ID NO: 1111677 - DNA, 15 bp, Homo sapiens
atagattatcactag

SEQ ID NO: 1111678 - DNA, 15 bp, Homo sapiens
gatagattatcacta

SEQ ID NO: 1111679 - DNA, 15 bp, Homo sapiens
tgatagattatcact

SEQ ID NO: 1111680 - DNA, 15 bp, Homo sapiens
gtgatagattatcac

SEQ ID NO: 1111681 - DNA, 15 bp, Homo sapiens
agtgatagattatca

SEQ ID NO: 1111682 - DNA, 15 bp, Homo sapiens
aagtgatagattatc

SEQ ID NO: 1111683 - DNA, 15 bp, Homo sapiens
aaagtgatagattat

SEQ ID NO: 1111684 - DNA, 15 bp, Homo sapiens
gaaagtgatagatta

SEQ ID NO: 1111685 - DNA, 15 bp, Homo sapiens
agaaagtgatagatt

SEQ ID NO: 1111686 - DNA, 15 bp, Homo sapiens
aagaaagtgatagat

SEQ ID NO: 1111687 - DNA, 15 bp, Homo sapiens
aaagaaagtgataga

SEQ ID NO: 1111688 - DNA, 15 bp, Homo sapiens
gaaagaaagtgatag

SEQ ID NO: 1111689 - DNA, 15 bp, Homo sapiens
agaaagaaagtgata

SEQ ID NO: 1111690 - DNA, 15 bp, Homo sapiens
cagaaagaaagtgat

SEQ ID NO: 1111691 - DNA, 15 bp, Homo sapiens
tcagaaagaaagtga

SEQ ID NO: 1111692 - DNA, 15 bp, Homo sapiens
ctcagaaagaaagtg

SEQ ID NO: 1111693 - DNA, 15 bp, Homo sapiens
tctcagaaagaaagt

SEQ ID NO: 1111694 - DNA, 15 bp, Homo sapiens
ttctcagaaagaaag

SEQ ID NO: 1111695 - DNA, 15 bp, Homo sapiens
cttctcagaaagaaa

SEQ ID NO: 1111696 - DNA, 15 bp, Homo sapiens
ccttctcagaaagaa

SEQ ID NO: 1111697 - DNA, 15 bp, Homo sapiens
tccttctcagaaaga

SEQ ID NO: 1111698 - DNA, 15 bp, Homo sapiens
ttccttctcagaaag

SEQ ID NO: 1111699 - DNA, 15 bp, Homo sapiens
tttccttctcagaaa

SEQ ID NO: 1111700 - DNA, 15 bp, Homo sapiens
ttttccttctcagaa

SEQ ID NO: 1111701 - DNA, 15 bp, Homo sapiens
tttttccttctcaga

SEQ ID NO: 1111702 - DNA, 15 bp, Homo sapiens
atttttccttctcag

SEQ ID NO: 1111703 - DNA, 15 bp, Homo sapiens
tatttttccttctca

SEQ ID NO: 1111704 - DNA, 15 bp, Homo sapiens
ttatttttccttctc

SEQ ID NO: 1111705 - DNA, 15 bp, Homo sapiens
tttatttttccttct

SEQ ID NO: 1111706 - DNA, 15 bp, Homo sapiens
gtttatttttccttc

SEQ ID NO: 1111707 - DNA, 15 bp, Homo sapiens
agtttatttttcctt

SEQ ID NO: 1111708 - DNA, 15 bp, Homo sapiens
cagtttatttttcct

SEQ ID NO: 1111709 - DNA, 15 bp, Homo sapiens
ccagtttatttttcc

SEQ ID NO: 1111710 - DNA, 15 bp, Homo sapiens
tccagtttatttttc

SEQ ID NO: 1111711 - DNA, 15 bp, Homo sapiens
ttccagtttattttt

SEQ ID NO: 1111712 - DNA, 15 bp, Homo sapiens
tttccagtttatttt

SEQ ID NO: 1111713 - DNA, 15 bp, Homo sapiens
atttccagtttattt

SEQ ID NO: 1111714 - DNA, 15 bp, Homo sapiens
catttccagtttatt

SEQ ID NO: 1111715 - DNA, 15 bp, Homo sapiens
ccatttccagtttat

SEQ ID NO: 1111716 - DNA, 15 bp, Homo sapiens
tccatttccagttta

SEQ ID NO: 1111717 - DNA, 15 bp, Homo sapiens
ctccatttccagttt

SEQ ID NO: 1111718 - DNA, 15 bp, Homo sapiens
gctccatttccagtt

SEQ ID NO: 1111719 - DNA, 15 bp, Homo sapiens
agctccatttccagt

SEQ ID NO: 1111720 - DNA, 15 bp, Homo sapiens
tagctccatttccag

SEQ ID NO: 1111721 - DNA, 15 bp, Homo sapiens
atagctccatttcca

SEQ ID NO: 1111722 - DNA, 15 bp, Homo sapiens
catagctccatttcc

SEQ ID NO: 1111723 - DNA, 15 bp, Homo sapiens
tcatagctccatttc

SEQ ID NO: 1111724 - DNA, 15 bp, Homo sapiens
ttcatagctccattt

SEQ ID NO: 1111725 - DNA, 15 bp, Homo sapiens
tttcatagctccatt

SEQ ID NO: 1111726 - DNA, 15 bp, Homo sapiens
atttcatagctccat

SEQ ID NO: 1111727 - DNA, 15 bp, Homo sapiens
catttcatagctcca

SEQ ID NO: 1111728 - DNA, 15 bp, Homo sapiens
ccatttcatagctcc

SEQ ID NO: 1111729 - DNA, 15 bp, Homo sapiens
accatttcatagctc

SEQ ID NO: 1111730 - DNA, 15 bp, Homo sapiens
caccatttcatagct

SEQ ID NO: 1111731 - DNA, 15 bp, Homo sapiens
gcaccatttcatagc

SEQ ID NO: 1111732 - DNA, 15 bp, Homo sapiens
cgcaccatttcatag

SEQ ID NO: 1111733 - DNA, 15 bp, Homo sapiens
acgcaccatttcata

SEQ ID NO: 1111734 - DNA, 15 bp, Homo sapiens
cacgcaccatttcat

SEQ ID NO: 1111735 - DNA, 15 bp, Homo sapiens
ccacgcaccatttca

SEQ ID NO: 1111736 - DNA, 15 bp, Homo sapiens
cccacgcaccatttc

SEQ ID NO: 1111737 - DNA, 15 bp, Homo sapiens
ccccacgcaccattt

SEQ ID NO: 1111738 - DNA, 15 bp, Homo sapiens
cccccacgcaccatt

SEQ ID NO: 1111739 - DNA, 15 bp, Homo sapiens
ccccccacgcaccat

SEQ ID NO: 1111740 - DNA, 15 bp, Homo sapiens
accccccacgcacca

SEQ ID NO: 1111741 - DNA, 15 bp, Homo sapiens
caccccccacgcacc

SEQ ID NO: 1111742 - DNA, 15 bp, Homo sapiens
ccaccccccacgcac

SEQ ID NO: 1111743 - DNA, 15 bp, Homo sapiens
cccaccccccacgca

SEQ ID NO: 1111744 - DNA, 15 bp, Homo sapiens
ccccaccccccacgc

SEQ ID NO: 1111745 - DNA, 15 bp, Homo sapiens
accccaccccccacg

SEQ ID NO: 1111746 - DNA, 15 bp, Homo sapiens
aaccccaccccccac

SEQ ID NO: 1111747 - DNA, 15 bp, Homo sapiens
caaccccacccccca

SEQ ID NO: 1111748 - DNA, 15 bp, Homo sapiens
tcaaccccacccccc

SEQ ID NO: 1111749 - DNA, 15 bp, Homo sapiens
ttcaaccccaccccc

SEQ ID NO: 1111750 - DNA, 15 bp, Homo sapiens
tttcaaccccacccc

SEQ ID NO: 1111751 - DNA, 15 bp, Homo sapiens
atttcaaccccaccc

SEQ ID NO: 1111752 - DNA, 15 bp, Homo sapiens
aatttcaaccccacc

SEQ ID NO: 1111753 - DNA, 15 bp, Homo sapiens
aaatttcaaccccac

SEQ ID NO: 1111754 - DNA, 15 bp, Homo sapiens
taaaatttcaacccc

SEQ ID NO: 1111755 - DNA, 15 bp, Homo sapiens
ttaaaatttcaaccc

SEQ ID NO: 1111756 - DNA, 15 bp, Homo sapiens
tttaaaatttcaacc

SEQ ID NO: 1111757 - DNA, 15 bp, Homo sapiens
ctttaaaatttcaac

SEQ ID NO: 1111758 - DNA, 15 bp, Homo sapiens
tctttaaaatttcaa

SEQ ID NO: 1111759 - DNA, 15 bp, Homo sapiens
gtctttaaaatttca

SEQ ID NO: 1111760 - DNA, 15 bp, Homo sapiens
agtctttaaaatttc

SEQ ID NO: 1111761 - DNA, 15 bp, Homo sapiens
aagtctttaaaattt

SEQ ID NO: 1111762 - DNA, 15 bp, Homo sapiens
aaagtctttaaaatt

SEQ ID NO: 1111763 - DNA, 15 bp, Homo sapiens
caaagtctttaaaat

SEQ ID NO: 1111764 - DNA, 15 bp, Homo sapiens
ccaaagtctttaaaa

SEQ ID NO: 1111765 - DNA, 15 bp, Homo sapiens
gccaaagtctttaaa

SEQ ID NO: 1111766 - DNA, 15 bp, Homo sapiens
ggccaaagtctttaa

SEQ ID NO: 1111767 - DNA, 15 bp, Homo sapiens
tggccaaagtcttta

SEQ ID NO: 1111768 - DNA, 15 bp, Homo sapiens
ctggccaaagtcttt

SEQ ID NO: 1111769 - DNA, 15 bp, Homo sapiens
cctggccaaagtctt

SEQ ID NO: 1111770 - DNA, 15 bp, Homo sapiens
gcctggccaaagtct

SEQ ID NO: 1111771 - DNA, 15 bp, Homo sapiens
tgcctggccaaagtc

SEQ ID NO: 1111772 - DNA, 15 bp, Homo sapiens
ttgcctggccaaagt

SEQ ID NO: 1111773 - DNA, 15 bp, Homo sapiens
cttgcctggccaaag

SEQ ID NO: 1111774 - DNA, 15 bp, Homo sapiens
tcttgcctggccaaa

SEQ ID NO: 1111775 - DNA, 15 bp, Homo sapiens
gtcttgcctggccaa

SEQ ID NO: 1111776 - DNA, 15 bp, Homo sapiens
agtcttgcctggcca

SEQ ID NO: 1111777 - DNA, 15 bp, Homo sapiens
gagtcttgcctggcc

SEQ ID NO: 1111778 - DNA, 15 bp, Homo sapiens
agagtcttgcctggc

SEQ ID NO: 1111779 - DNA, 15 bp, Homo sapiens
cagagtcttgcctgg

SEQ ID NO: 1111780 - DNA, 15 bp, Homo sapiens
acagagtcttgcctg

SEQ ID NO: 1111781 - DNA, 15 bp, Homo sapiens
aacagagtcttgcct

SEQ ID NO: 1111782 - DNA, 15 bp, Homo sapiens
caacagagtcttgcc

SEQ ID NO: 1111783 - DNA, 15 bp, Homo sapiens
tcaacagagtcttgc

SEQ ID NO: 1111784 - DNA, 15 bp, Homo sapiens
ctcaacagagtcttg

SEQ ID NO: 1111785 - DNA, 15 bp, Homo sapiens
actcaacagagtctt

SEQ ID NO: 1111786 - DNA, 15 bp, Homo sapiens
tactcaacagagtct

SEQ ID NO: 1111787 - DNA, 15 bp, Homo sapiens
ctactcaacagagtc

SEQ ID NO: 1111788 - DNA, 15 bp, Homo sapiens
cctactcaacagagt

SEQ ID NO: 1111789 - DNA, 15 bp, Homo sapiens
acctactcaacagag

SEQ ID NO: 1111790 - DNA, 15 bp, Homo sapiens
cacctactcaacaga

SEQ ID NO: 1111791 - DNA, 15 bp, Homo sapiens
tcacctactcaacag

SEQ ID NO: 1111792 - DNA, 15 bp, Homo sapiens
atcacctactcaaca

SEQ ID NO: 1111793 - DNA, 15 bp, Homo sapiens
aatcacctactcaac

SEQ ID NO: 1111794 - DNA, 15 bp, Homo sapiens
aaatcacctactcaa

SEQ ID NO: 1111795 - DNA, 15 bp, Homo sapiens
gaaatcacctactca

SEQ ID NO: 1111796 - DNA, 15 bp, Homo sapiens
tgaaatcacctactc

SEQ ID NO: 1111797 - DNA, 15 bp, Homo sapiens
ttgaaatcacctact

SEQ ID NO: 1111798 - DNA, 15 bp, Homo sapiens
tttgaaatcacctac

SEQ ID NO: 1111799 - DNA, 15 bp, Homo sapiens
ctttgaaatcaccta

SEQ ID NO: 1111800 - DNA, 15 bp, Homo sapiens
cctttgaaatcacct

SEQ ID NO: 1111801 - DNA, 15 bp, Homo sapiens
tcctttgaaatcacc

SEQ ID NO: 1111802 - DNA, 15 bp, Homo sapiens
ttcctttgaaatcac

SEQ ID NO: 1111803 - DNA, 15 bp, Homo sapiens
cttcctttgaaatca

SEQ ID NO: 1111804 - DNA, 15 bp, Homo sapiens
ccttcctttgaaatc

SEQ ID NO: 1111805 - DNA, 15 bp, Homo sapiens
accttcctttgaaat

SEQ ID NO: 1111806 - DNA, 15 bp, Homo sapiens
gaccttcctttgaaa

SEQ ID NO: 1111807 - DNA, 15 bp, Homo sapiens
agaccttcctttgaa

SEQ ID NO: 1111808 - DNA, 15 bp, Homo sapiens
tagaccttcctttga

SEQ ID NO: 1111809 - DNA, 15 bp, Homo sapiens
ctagaccttcctttg

SEQ ID NO: 1111810 - DNA, 15 bp, Homo sapiens
gctagaccttccttt

SEQ ID NO: 1111811 - DNA, 15 bp, Homo sapiens
cgctagaccttcctt

SEQ ID NO: 1111812 - DNA, 15 bp, Homo sapiens
ccgctagaccttcct

SEQ ID NO: 1111813 - DNA, 15 bp, Homo sapiens
tccgctagaccttcc

SEQ ID NO: 1111814 - DNA, 15 bp, Homo sapiens
ctccgctagaccttc

SEQ ID NO: 1111815 - DNA, 15 bp, Homo sapiens
cctccgctagacctt

SEQ ID NO: 1111816 - DNA, 15 bp, Homo sapiens
acctccgctagacct

SEQ ID NO: 1111817 - DNA, 15 bp, Homo sapiens
cacctccgctagacc

SEQ ID NO: 1111818 - DNA, 15 bp, Homo sapiens
tcacctccgctagac

SEQ ID NO: 1111819 - DNA, 15 bp, Homo sapiens
atcacctccgctaga

SEQ ID NO: 1111820 - DNA, 15 bp, Homo sapiens
catcacctccgctag

SEQ ID NO: 1111821 - DNA, 15 bp, Homo sapiens
ccatcacctccgcta

SEQ ID NO: 1111822 - DNA, 15 bp, Homo sapiens
tccatcacctccgct

SEQ ID NO: 1111823 - DNA, 15 bp, Homo sapiens
ctccatcacctccgc

SEQ ID NO: 1111824 - DNA, 15 bp, Homo sapiens
gctccatcacctccg

SEQ ID NO: 1111825 - DNA, 15 bp, Homo sapiens
agctccatcacctcc

SEQ ID NO: 1111826 - DNA, 15 bp, Homo sapiens
cagctccatcacctc

SEQ ID NO: 1111827 - DNA, 15 bp, Homo sapiens
acagctccatcacct

SEQ ID NO: 1111828 - DNA, 15 bp, Homo sapiens
gacagctccatcacc

SEQ ID NO: 1111829 - DNA, 15 bp, Homo sapiens
ggacagctccatcac

SEQ ID NO: 1111830 - DNA, 15 bp, Homo sapiens
gggacagctccatca

SEQ ID NO: 1111831 - DNA, 15 bp, Homo sapiens
agggacagctccatc

SEQ ID NO: 1111832 - DNA, 15 bp, Homo sapiens
cagggacagctccat

SEQ ID NO: 1111833 - DNA, 15 bp, Homo sapiens
acagggacagctcca

SEQ ID NO: 1111834 - DNA, 15 bp, Homo sapiens
cacagggacagctcc

SEQ ID NO: 1111835 - DNA, 15 bp, Homo sapiens
ccacagggacagctc

SEQ ID NO: 1111836 - DNA, 15 bp, Homo sapiens
accacagggacagct

SEQ ID NO: 1111837 - DNA, 15 bp, Homo sapiens
aaccacagggacagc

SEQ ID NO: 1111838 - DNA, 15 bp, Homo sapiens
taaccacagggacag

SEQ ID NO: 1111839 - DNA, 15 bp, Homo sapiens
gtaaccacagggaca

SEQ ID NO: 1111840 - DNA, 15 bp, Homo sapiens
ggtaaccacagggac

SEQ ID NO: 1111841 - DNA, 15 bp, Homo sapiens
aggtaaccacaggga

SEQ ID NO: 1111842 - DNA, 15 bp, Homo sapiens
taggtaaccacaggg

SEQ ID NO: 1111843 - DNA, 15 bp, Homo sapiens
ttaggtaaccacagg

SEQ ID NO: 1111844 - DNA, 15 bp, Homo sapiens
tttaggtaaccacag

SEQ ID NO: 1111845 - DNA, 15 bp, Homo sapiens
ctttaggtaaccaca

SEQ ID NO: 1111846 - DNA, 15 bp, Homo sapiens
tctttaggtaaccac

SEQ ID NO: 1111847 - DNA, 15 bp, Homo sapiens
ttctttaggtaacca

SEQ ID NO: 1111848 - DNA, 15 bp, Homo sapiens
tttctttaggtaacc

SEQ ID NO: 1111849 - DNA, 15 bp, Homo sapiens
ttttctttaggtaac

SEQ ID NO: 1111850 - DNA, 15 bp, Homo sapiens
attttctttaggtaa

SEQ ID NO: 1111851 - DNA, 15 bp, Homo sapiens
cattttctttaggta

SEQ ID NO: 1111852 - DNA, 15 bp, Homo sapiens
gcattttctttaggt

SEQ ID NO: 1111853 - DNA, 15 bp, Homo sapiens
tgcattttctttagg

SEQ ID NO: 1111854 - DNA, 15 bp, Homo sapiens
gtgcattttctttag

SEQ ID NO: 1111855 - DNA, 15 bp, Homo sapiens
ggtgcattttcttta

SEQ ID NO: 1111856 - DNA, 15 bp, Homo sapiens
aggtgcattttcttt

SEQ ID NO: 1111857 - DNA, 15 bp, Homo sapiens
caggtgcattttctt

SEQ ID NO: 1111858 - DNA, 15 bp, Homo sapiens
ccaggtgcattttct

SEQ ID NO: 1111859 - DNA, 15 bp, Homo sapiens
cccaggtgcattttc

SEQ ID NO: 1111860 - DNA, 15 bp, Homo sapiens
ccccaggtgcatttt

SEQ ID NO: 1111861 - DNA, 15 bp, Homo sapiens
tccccaggtgcattt

SEQ ID NO: 1111862 - DNA, 15 bp, Homo sapiens
ctccccaggtgcatt

SEQ ID NO: 1111863 - DNA, 15 bp, Homo sapiens
tctccccaggtgcat

SEQ ID NO: 1111864 - DNA, 15 bp, Homo sapiens
ttctccccaggtgca

SEQ ID NO: 1111865 - DNA, 15 bp, Homo sapiens
cttctccccaggtgc

SEQ ID NO: 1111866 - DNA, 15 bp, Homo sapiens
ccttctccccaggtg

SEQ ID NO: 1111867 - DNA, 15 bp, Homo sapiens
tccttctccccaggt

SEQ ID NO: 1111868 - DNA, 15 bp, Homo sapiens
ctccttctccccagg

SEQ ID NO: 1111869 - DNA, 15 bp, Homo sapiens
actccttctccccag

SEQ ID NO: 1111870 - DNA, 15 bp, Homo sapiens
tactccttctcccca

SEQ ID NO: 1111871 - DNA, 15 bp, Homo sapiens
ctactccttctcccc

SEQ ID NO: 1111872 - DNA, 15 bp, Homo sapiens
gctactccttctccc

SEQ ID NO: 1111873 - DNA, 15 bp, Homo sapiens
tgctactccttctcc

SEQ ID NO: 1111874 - DNA, 15 bp, Homo sapiens
ctgctactccttctc

SEQ ID NO: 1111875 - DNA, 15 bp, Homo sapiens
cctgctactccttct

SEQ ID NO: 1111876 - DNA, 15 bp, Homo sapiens
acctgctactccttc

SEQ ID NO: 1111877 - DNA, 15 bp, Homo sapiens
cacctgctactcctt

SEQ ID NO: 1111878 - DNA, 15 bp, Homo sapiens
gcacctgctactcct

SEQ ID NO: 1111879 - DNA, 15 bp, Homo sapiens
ggcacctgctactcc

SEQ ID NO: 1111880 - DNA, 15 bp, Homo sapiens
gggcacctgctactc

SEQ ID NO: 1111881 - DNA, 15 bp, Homo sapiens
cgggcacctgctact

SEQ ID NO: 1111882 - DNA, 15 bp, Homo sapiens
gcgggcacctgctac

SEQ ID NO: 1111883 - DNA, 15 bp, Homo sapiens
tgcgggcacctgcta

SEQ ID NO: 1111884 - DNA, 15 bp, Homo sapiens
gtgcgggcacctgct

SEQ ID NO: 1111885 - DNA, 15 bp, Homo sapiens
ggtgcgggcacctgc

SEQ ID NO: 1111886 - DNA, 15 bp, Homo sapiens
gggtgcgggcacctg

SEQ ID NO: 1111887 - DNA, 15 bp, Homo sapiens
tgggtgcgggcacct

SEQ ID NO: 1111888 - DNA, 15 bp, Homo sapiens
ctgggtgcgggcacc

SEQ ID NO: 1111889 - DNA, 15 bp, Homo sapiens
tctgggtgcgggcac

SEQ ID NO: 1111890 - DNA, 15 bp, Homo sapiens
ctctgggtgcgggca

SEQ ID NO: 1111891 - DNA, 15 bp, Homo sapiens
cctctgggtgcgggc

SEQ ID NO: 1111892 - DNA, 15 bp, Homo sapiens
acctctgggtgcggg

SEQ ID NO: 1111893 - DNA, 15 bp, Homo sapiens
cacctctgggtgcgg

SEQ ID NO: 1111894 - DNA, 15 bp, Homo sapiens
ccacctctgggtgcg

SEQ ID NO: 1111895 - DNA, 15 bp, Homo sapiens
cccacctctgggtgc

SEQ ID NO: 1111896 - DNA, 15 bp, Homo sapiens
tcccacctctgggtg

SEQ ID NO: 1111897 - DNA, 15 bp, Homo sapiens
ttcccacctctgggt

SEQ ID NO: 1111898 - DNA, 15 bp, Homo sapiens
gttcccacctctggg

SEQ ID NO: 1111899 - DNA, 15 bp, Homo sapiens
tgttcccacctctgg

SEQ ID NO: 1111900 - DNA, 15 bp, Homo sapiens
ctgttcccacctctg

SEQ ID NO: 1111901 - DNA, 15 bp, Homo sapiens
actgttcccacctct

SEQ ID NO: 1111902 - DNA, 15 bp, Homo sapiens
aactgttcccacctc

SEQ ID NO: 1111903 - DNA, 15 bp, Homo sapiens
caactgttcccacct

SEQ ID NO: 1111904 - DNA, 15 bp, Homo sapiens
ccaactgttcccacc

SEQ ID NO: 1111905 - DNA, 15 bp, Homo sapiens
cccaactgttcccac

SEQ ID NO: 1111906 - DNA, 15 bp, Homo sapiens
gcccaactgttccca

SEQ ID NO: 1111907 - DNA, 15 bp, Homo sapiens
tgcccaactgttccc

SEQ ID NO: 1111908 - DNA, 15 bp, Homo sapiens
atgcccaactgttcc

SEQ ID NO: 1111909 - DNA, 15 bp, Homo sapiens
catgcccaactgttc

SEQ ID NO: 1111910 - DNA, 15 bp, Homo sapiens
ccatgcccaactgtt

SEQ ID NO: 1111911 - DNA, 15 bp, Homo sapiens
tccatgcccaactgt

SEQ ID NO: 1111912 - DNA, 15 bp, Homo sapiens
gtccatgcccaactg

SEQ ID NO: 1111913 - DNA, 15 bp, Homo sapiens
tgtccatgcccaact

SEQ ID NO: 1111914 - DNA, 15 bp, Homo sapiens
ttgtccatgcccaac

SEQ ID NO: 1111915 - DNA, 15 bp, Homo sapiens
tttgtccatgcccaa

SEQ ID NO: 1111916 - DNA, 15 bp, Homo sapiens
ctttgtccatgccca

SEQ ID NO: 1111917 - DNA, 15 bp, Homo sapiens
cctttgtccatgccc

SEQ ID NO: 1111918 - DNA, 15 bp, Homo sapiens
acctttgtccatgcc

SEQ ID NO: 1111919 - DNA, 15 bp, Homo sapiens
gacctttgtccatgc

SEQ ID NO: 1111920 - DNA, 15 bp, Homo sapiens
tgacctttgtccatg

SEQ ID NO: 1111921 - DNA, 15 bp, Homo sapiens
ctgacctttgtccat

SEQ ID NO: 1111922 - DNA, 15 bp, Homo sapiens
gctgacctttgtcca

SEQ ID NO: 1111923 - DNA, 15 bp, Homo sapiens
tgctgacctttgtcc

SEQ ID NO: 1111924 - DNA, 15 bp, Homo sapiens
ttgctgacctttgtc

SEQ ID NO: 1111925 - DNA, 15 bp, Homo sapiens
cttgctgacctttgt

SEQ ID NO: 1111926 - DNA, 15 bp, Homo sapiens
tcttgctgacctttg

SEQ ID NO: 1111927 - DNA, 15 bp, Homo sapiens
ctcttgctgaccttt

SEQ ID NO: 1111928 - DNA, 15 bp, Homo sapiens
cctcttgctgacctt

SEQ ID NO: 1111929 - DNA, 15 bp, Homo sapiens
gcctcttgctgacct

SEQ ID NO: 1111930 - DNA, 15 bp, Homo sapiens
ggcctcttgctgacc

SEQ ID NO: 1111931 - DNA, 15 bp, Homo sapiens
tggcctcttgctgac

SEQ ID NO: 1111932 - DNA, 15 bp, Homo sapiens
ctggcctcttgctga

SEQ ID NO: 1111933 - DNA, 15 bp, Homo sapiens
cctggcctcttgctg

SEQ ID NO: 1111934 - DNA, 15 bp, Homo sapiens
gcctggcctcttgct

SEQ ID NO: 1111935 - DNA, 15 bp, Homo sapiens
tgcctggcctcttgc

SEQ ID NO: 1111936 - DNA, 15 bp, Homo sapiens
ttgcctggcctcttg

SEQ ID NO: 1111937 - DNA, 15 bp, Homo sapiens
cttgcctggcctctt

SEQ ID NO: 1111938 - DNA, 15 bp, Homo sapiens
acttgcctggcctct

SEQ ID NO: 1111939 - DNA, 15 bp, Homo sapiens
cacttgcctggcctc

SEQ ID NO: 1111940 - DNA, 15 bp, Homo sapiens
ccacttgcctggcct

SEQ ID NO: 1111941 - DNA, 15 bp, Homo sapiens
cccacttgcctggcc

SEQ ID NO: 1111942 - DNA, 15 bp, Homo sapiens
ccccacttgcctggc

SEQ ID NO: 1111943 - DNA, 15 bp, Homo sapiens
accccacttgcctgg

SEQ ID NO: 1111944 - DNA, 15 bp, Homo sapiens
caccccacttgcctg

SEQ ID NO: 1111945 - DNA, 15 bp, Homo sapiens
acaccccacttgcct

SEQ ID NO: 1111946 - DNA, 15 bp, Homo sapiens
aacaccccacttgcc

SEQ ID NO: 1111947 - DNA, 15 bp, Homo sapiens
caacaccccacttgc

SEQ ID NO: 1111948 - DNA, 15 bp, Homo sapiens
tcaacaccccacttg

SEQ ID NO: 1111949 - DNA, 15 bp, Homo sapiens
ctcaacaccccactt

SEQ ID NO: 1111950 - DNA, 15 bp, Homo sapiens
tctcaacaccccact

SEQ ID NO: 1111951 - DNA, 15 bp, Homo sapiens
ttctcaacaccccac

SEQ ID NO: 1111952 - DNA, 15 bp, Homo sapiens
gttctcaacacccca

SEQ ID NO: 1111953 - DNA, 15 bp, Homo sapiens
agttctcaacacccc

SEQ ID NO: 1111954 - DNA, 15 bp, Homo sapiens
tagttctcaacaccc

SEQ ID NO: 1111955 - DNA, 15 bp, Homo sapiens
ctagttctcaacacc

SEQ ID NO: 1111956 - DNA, 15 bp, Homo sapiens
tctagttctcaacac

SEQ ID NO: 1111957 - DNA, 15 bp, Homo sapiens
ttctagttctcaaca

SEQ ID NO: 1111958 - DNA, 15 bp, Homo sapiens
attctagttctcaac

SEQ ID NO: 1111959 - DNA, 15 bp, Homo sapiens
tattctagttctcaa

SEQ ID NO: 1111960 - DNA, 15 bp, Homo sapiens
atattctagttctca

SEQ ID NO: 1111961 - DNA, 15 bp, Homo sapiens
tatattctagttctc

SEQ ID NO: 1111962 - DNA, 15 bp, Homo sapiens
ctatattctagttct

SEQ ID NO: 1111963 - DNA, 15 bp, Homo sapiens
actatattctagttc

SEQ ID NO: 1111964 - DNA, 15 bp, Homo sapiens
aactatattctagtt

SEQ ID NO: 1111965 - DNA, 15 bp, Homo sapiens
caactatattctagt

SEQ ID NO: 1111966 - DNA, 15 bp, Homo sapiens
ccaactatattctag

SEQ ID NO: 1111967 - DNA, 15 bp, Homo sapiens
tccaactatattcta

SEQ ID NO: 1111968 - DNA, 15 bp, Homo sapiens
ctccaactatattct

SEQ ID NO: 1111969 - DNA, 15 bp, Homo sapiens
cctccaactatattc

SEQ ID NO: 1111970 - DNA, 15 bp, Homo sapiens
tcctccaactatatt

SEQ ID NO: 1111971 - DNA, 15 bp, Homo sapiens
ctcctccaactatat

SEQ ID NO: 1111972 - DNA, 15 bp, Homo sapiens
cctcctccaactata

SEQ ID NO: 1111973 - DNA, 15 bp, Homo sapiens
acctcctccaactat

SEQ ID NO: 1111974 - DNA, 15 bp, Homo sapiens
cacctcctccaacta

SEQ ID NO: 1111975 - DNA, 15 bp, Homo sapiens
tcacctcctccaact

SEQ ID NO: 1111976 - DNA, 15 bp, Homo sapiens
ctcacctcctccaac

SEQ ID NO: 1111977 - DNA, 15 bp, Homo sapiens
cctcacctcctccaa

SEQ ID NO: 1111978 - DNA, 15 bp, Homo sapiens
acctcacctcctcca

SEQ ID NO: 1111979 - DNA, 15 bp, Homo sapiens
gacctcacctcctcc

SEQ ID NO: 1111980 - DNA, 15 bp, Homo sapiens
tgacctcacctcctc

SEQ ID NO: 1111981 - DNA, 15 bp, Homo sapiens
ctgacctcacctcct

SEQ ID NO: 1111982 - DNA, 15 bp, Homo sapiens
tctgacctcacctcc

SEQ ID NO: 1111983 - DNA, 15 bp, Homo sapiens
ctctgacctcacctc

SEQ ID NO: 1111984 - DNA, 15 bp, Homo sapiens
tctctgacctcacct

SEQ ID NO: 1111985 - DNA, 15 bp, Homo sapiens
ctctctgacctcacc

SEQ ID NO: 1111986 - DNA, 15 bp, Homo sapiens
gctctctgacctcac

SEQ ID NO: 1111987 - DNA, 15 bp, Homo sapiens
ggctctctgacctca

SEQ ID NO: 1111988 - DNA, 15 bp, Homo sapiens
tggctctctgacctc

SEQ ID NO: 1111989 - DNA, 15 bp, Homo sapiens
ttggctctctgacct

SEQ ID NO: 1111990 - DNA, 15 bp, Homo sapiens
cttggctctctgacc

SEQ ID NO: 1111991 - DNA, 15 bp, Homo sapiens
ccttggctctctgac

SEQ ID NO: 1111992 - DNA, 15 bp, Homo sapiens
cccttggctctctga

SEQ ID NO: 1111993 - DNA, 15 bp, Homo sapiens
gcccttggctctctg

SEQ ID NO: 1111994 - DNA, 15 bp, Homo sapiens
ggcccttggctctct

SEQ ID NO: 1111995 - DNA, 15 bp, Homo sapiens
tggcccttggctctc

SEQ ID NO: 1111996 - DNA, 15 bp, Homo sapiens
ctggcccttggctct

SEQ ID NO: 1111997 - DNA, 15 bp, Homo sapiens
tctggcccttggctc

SEQ ID NO: 1111998 - DNA, 15 bp, Homo sapiens
gtctggcccttggct

SEQ ID NO: 1111999 - DNA, 15 bp, Homo sapiens
ggtctggcccttggc

SEQ ID NO: 1112000 - DNA, 15 bp, Homo sapiens
cggtctggcccttgg

SEQ ID NO: 1112001 - DNA, 15 bp, Homo sapiens
acggtctggcccttg

SEQ ID NO: 1112002 - DNA, 15 bp, Homo sapiens
cacggtctggccctt

SEQ ID NO: 1112003 - DNA, 15 bp, Homo sapiens
ccacggtctggccct

SEQ ID NO: 1112004 - DNA, 15 bp, Homo sapiens
cccacggtctggccc

SEQ ID NO: 1112005 - DNA, 15 bp, Homo sapiens
ccccacggtctggcc

SEQ ID NO: 1112006 - DNA, 15 bp, Homo sapiens
tccccacggtctggc

SEQ ID NO: 1112007 - DNA, 15 bp, Homo sapiens
ctccccacggtctgg

SEQ ID NO: 1112008 - DNA, 15 bp, Homo sapiens
actccccacggtctg

SEQ ID NO: 1112009 - DNA, 15 bp, Homo sapiens
gactccccacggtct

SEQ ID NO: 1112010 - DNA, 15 bp, Homo sapiens
agactccccacggtc

SEQ ID NO: 1112011 - DNA, 15 bp, Homo sapiens
gagactccccacggt

SEQ ID NO: 1112012 - DNA, 15 bp, Homo sapiens
tgagactccccacgg

SEQ ID NO: 1112013 - DNA, 15 bp, Homo sapiens
ctgagactccccacg

SEQ ID NO: 1112014 - DNA, 15 bp, Homo sapiens
tctgagactccccac

SEQ ID NO: 1112015 - DNA, 15 bp, Homo sapiens
ttctgagactcccca

SEQ ID NO: 1112016 - DNA, 15 bp, Homo sapiens
tttctgagactcccc

SEQ ID NO: 1112017 - DNA, 15 bp, Homo sapiens
ttttctgagactccc

SEQ ID NO: 1112018 - DNA, 15 bp, Homo sapiens
tttttctgagactcc

SEQ ID NO: 1112019 - DNA, 15 bp, Homo sapiens
ttttttctgagactc

SEQ ID NO: 1112020 - DNA, 15 bp, Homo sapiens
attttttctgagact

SEQ ID NO: 1112021 - DNA, 15 bp, Homo sapiens
aattttttctgagac

SEQ ID NO: 1112022 - DNA, 15 bp, Homo sapiens
aaattttttctgaga

SEQ ID NO: 1112023 - DNA, 15 bp, Homo sapiens
taaattttttctgag

SEQ ID NO: 1112024 - DNA, 15 bp, Homo sapiens
ctaaattttttctga

SEQ ID NO: 1112025 - DNA, 15 bp, Homo sapiens
cctaaattttttctg

SEQ ID NO: 1112026 - DNA, 15 bp, Homo sapiens
tcctaaattttttct

SEQ ID NO: 1112027 - DNA, 15 bp, Homo sapiens
atcctaaattttttc

SEQ ID NO: 1112028 - DNA, 15 bp, Homo sapiens
aatcctaaatttttt

SEQ ID NO: 1112029 - DNA, 15 bp, Homo sapiens
gaatcctaaattttt

SEQ ID NO: 1112030 - DNA, 15 bp, Homo sapiens
agaatcctaaatttt

SEQ ID NO: 1112031 - DNA, 15 bp, Homo sapiens
aagaatcctaaattt

SEQ ID NO: 1112032 - DNA, 15 bp, Homo sapiens
aaagaatcctaaatt

SEQ ID NO: 1112033 - DNA, 15 bp, Homo sapiens
aaaagaatcctaaat

SEQ ID NO: 1112034 - DNA, 15 bp, Homo sapiens
gaaaagaatcctaaa

SEQ ID NO: 1112035 - DNA, 15 bp, Homo sapiens
agaaaagaatcctaa

SEQ ID NO: 1112036 - DNA, 15 bp, Homo sapiens
cagaaaagaatccta

SEQ ID NO: 1112037 - DNA, 15 bp, Homo sapiens
ccagaaaagaatcct

SEQ ID NO: 1112038 - DNA, 15 bp, Homo sapiens
cccagaaaagaatcc

SEQ ID NO: 1112039 - DNA, 15 bp, Homo sapiens
gcccagaaaagaatc

SEQ ID NO: 1112040 - DNA, 15 bp, Homo sapiens
ggcccagaaaagaat

SEQ ID NO: 1112041 - DNA, 15 bp, Homo sapiens
tggcccagaaaagaa

SEQ ID NO: 1112042 - DNA, 15 bp, Homo sapiens
ctggcccagaaaaga

SEQ ID NO: 1112043 - DNA, 15 bp, Homo sapiens
tctggcccagaaaag

SEQ ID NO: 1112044 - DNA, 15 bp, Homo sapiens
ttctggcccagaaaa

SEQ ID NO: 1112045 - DNA, 15 bp, Homo sapiens
cttctggcccagaaa

SEQ ID NO: 1112046 - DNA, 15 bp, Homo sapiens
ccttctggcccagaa

SEQ ID NO: 1112047 - DNA, 15 bp, Homo sapiens
cccttctggcccaga

SEQ ID NO: 1112048 - DNA, 15 bp, Homo sapiens
tcccttctggcccag

SEQ ID NO: 1112049 - DNA, 15 bp, Homo sapiens
ttcccttctggccca

SEQ ID NO: 1112050 - DNA, 15 bp, Homo sapiens
cttcccttctggccc

SEQ ID NO: 1112051 - DNA, 15 bp, Homo sapiens
gcttcccttctggcc

SEQ ID NO: 1112052 - DNA, 15 bp, Homo sapiens
agcttcccttctggc

SEQ ID NO: 1112053 - DNA, 15 bp, Homo sapiens
aagcttcccttctgg

SEQ ID NO: 1112054 - DNA, 15 bp, Homo sapiens
taagcttcccttctg

SEQ ID NO: 1112055 - DNA, 15 bp, Homo sapiens
ctaagcttcccttct

SEQ ID NO: 1112056 - DNA, 15 bp, Homo sapiens
cctaagcttcccttc

SEQ ID NO: 1112057 - DNA, 15 bp, Homo sapiens
ccctaagcttccctt

SEQ ID NO: 1112058 - DNA, 15 bp, Homo sapiens
gccctaagcttccct

SEQ ID NO: 1112059 - DNA, 15 bp, Homo sapiens
tgccctaagcttccc

SEQ ID NO: 1112060 - DNA, 15 bp, Homo sapiens
ctgccctaagcttcc

SEQ ID NO: 1112061 - DNA, 15 bp, Homo sapiens
gctgccctaagcttc

SEQ ID NO: 1112062 - DNA, 15 bp, Homo sapiens
agctgccctaagctt

SEQ ID NO: 1112063 - DNA, 15 bp, Homo sapiens
cagctgccctaagct

SEQ ID NO: 1112064 - DNA, 15 bp, Homo sapiens
tcagctgccctaagc

SEQ ID NO: 1112065 - DNA, 15 bp, Homo sapiens
ctcagctgccctaag

SEQ ID NO: 1112066 - DNA, 15 bp, Homo sapiens
actcagctgccctaa

SEQ ID NO: 1112067 - DNA, 15 bp, Homo sapiens
tactcagctgcccta

SEQ ID NO: 1112068 - DNA, 15 bp, Homo sapiens
gtactcagctgccct

SEQ ID NO: 1112069 - DNA, 15 bp, Homo sapiens
agtactcagctgccc

SEQ ID NO: 1112070 - DNA, 15 bp, Homo sapiens
tagtactcagctgcc

SEQ ID NO: 1112071 - DNA, 15 bp, Homo sapiens
ctagtactcagctgc

SEQ ID NO: 1112072 - DNA, 15 bp, Homo sapiens
tctagtactcagctg

SEQ ID NO: 1112073 - DNA, 15 bp, Homo sapiens
gtctagtactcagct

SEQ ID NO: 1112074 - DNA, 15 bp, Homo sapiens
agtctagtactcagc

SEQ ID NO: 1112075 - DNA, 15 bp, Homo sapiens
gagtctagtactcag

SEQ ID NO: 1112076 - DNA, 15 bp, Homo sapiens
agagtctagtactca

SEQ ID NO: 1112077 - DNA, 15 bp, Homo sapiens
cagagtctagtactc

SEQ ID NO: 1112078 - DNA, 15 bp, Homo sapiens
gcagagtctagtact

SEQ ID NO: 1112079 - DNA, 15 bp, Homo sapiens
ggcagagtctagtac

SEQ ID NO: 1112080 - DNA, 15 bp, Homo sapiens
aggcagagtctagta

SEQ ID NO: 1112081 - DNA, 15 bp, Homo sapiens
caggcagagtctagt

SEQ ID NO: 1112082 - DNA, 15 bp, Homo sapiens
acaggcagagtctag

SEQ ID NO: 1112083 - DNA, 15 bp, Homo sapiens
cacaggcagagtcta

SEQ ID NO: 1112084 - DNA, 15 bp, Homo sapiens
acacaggcagagtct

SEQ ID NO: 1112085 - DNA, 15 bp, Homo sapiens
aacacaggcagagtc

SEQ ID NO: 1112086 - DNA, 15 bp, Homo sapiens
caacacaggcagagt

SEQ ID NO: 1112087 - DNA, 15 bp, Homo sapiens
ccaacacaggcagag

SEQ ID NO: 1112088 - DNA, 15 bp, Homo sapiens
accaacacaggcaga

SEQ ID NO: 1112089 - DNA, 15 bp, Homo sapiens
taccaacacaggcag

SEQ ID NO: 1112090 - DNA, 15 bp, Homo sapiens
ataccaacacaggca

SEQ ID NO: 1112091 - DNA, 15 bp, Homo sapiens
gataccaacacaggc

SEQ ID NO: 1112092 - DNA, 15 bp, Homo sapiens
ggataccaacacagg

SEQ ID NO: 1112093 - DNA, 15 bp, Homo sapiens
tggataccaacacag

SEQ ID NO: 1112094 - DNA, 15 bp, Homo sapiens
atggataccaacaca

SEQ ID NO: 1112095 - DNA, 15 bp, Homo sapiens
aatggataccaacac

SEQ ID NO: 1112096 - DNA, 15 bp, Homo sapiens
gaatggataccaaca

SEQ ID NO: 1112097 - DNA, 15 bp, Homo sapiens
tgaatggataccaac

SEQ ID NO: 1112098 - DNA, 15 bp, Homo sapiens
gtgaatggataccaa

SEQ ID NO: 1112099 - DNA, 15 bp, Homo sapiens
tgtgaatggatacca

SEQ ID NO: 1112100 - DNA, 15 bp, Homo sapiens
ttgtgaatggatacc

SEQ ID NO: 1112101 - DNA, 15 bp, Homo sapiens
cttgtgaatggatac

SEQ ID NO: 1112102 - DNA, 15 bp, Homo sapiens
ccttgtgaatggata

SEQ ID NO: 1112103 - DNA, 15 bp, Homo sapiens
accttgtgaatggat

SEQ ID NO: 1112104 - DNA, 15 bp, Homo sapiens
caccttgtgaatgga

SEQ ID NO: 1112105 - DNA, 15 bp, Homo sapiens
ccaccttgtgaatgg

SEQ ID NO: 1112106 - DNA, 15 bp, Homo sapiens
accaccttgtgaatg

SEQ ID NO: 1112107 - DNA, 15 bp, Homo sapiens
caccaccttgtgaat

SEQ ID NO: 1112108 - DNA, 15 bp, Homo sapiens
tcaccaccttgtgaa

SEQ ID NO: 1112109 - DNA, 15 bp, Homo sapiens
ctcaccaccttgtga

SEQ ID NO: 1112110 - DNA, 15 bp, Homo sapiens
cctcaccaccttgtg

SEQ ID NO: 1112111 - DNA, 15 bp, Homo sapiens
acctcaccaccttgt

SEQ ID NO: 1112112 - DNA, 15 bp, Homo sapiens
aacctcaccaccttg

SEQ ID NO: 1112113 - DNA, 15 bp, Homo sapiens
caacctcaccacctt

SEQ ID NO: 1112114 - DNA, 15 bp, Homo sapiens
acaacctcaccacct

SEQ ID NO: 1112115 - DNA, 15 bp, Homo sapiens
cacaacctcaccacc

SEQ ID NO: 1112116 - DNA, 15 bp, Homo sapiens
acacaacctcaccac

SEQ ID NO: 1112117 - DNA, 15 bp, Homo sapiens
gacacaacctcacca

SEQ ID NO: 1112118 - DNA, 15 bp, Homo sapiens
ggacacaacctcacc

SEQ ID NO: 1112119 - DNA, 15 bp, Homo sapiens
tggacacaacctcac

SEQ ID NO: 1112120 - DNA, 15 bp, Homo sapiens
ctggacacaacctca

SEQ ID NO: 1112121 - DNA, 15 bp, Homo sapiens
gctggacacaacctc

SEQ ID NO: 1112122 - DNA, 15 bp, Homo sapiens
tgctggacacaacct

SEQ ID NO: 1112123 - DNA, 15 bp, Homo sapiens
ctgctggacacaacc

SEQ ID NO: 1112124 - DNA, 15 bp, Homo sapiens
cctgctggacacaac

SEQ ID NO: 1112125 - DNA, 15 bp, Homo sapiens
gcctgctggacacaa

SEQ ID NO: 1112126 - DNA, 15 bp, Homo sapiens
ggcctgctggacaca

SEQ ID NO: 1112127 - DNA, 15 bp, Homo sapiens
gggcctgctggacac

SEQ ID NO: 1112128 - DNA, 15 bp, Homo sapiens
tgggcctgctggaca

SEQ ID NO: 1112129 - DNA, 15 bp, Homo sapiens
ctgggcctgctggac

SEQ ID NO: 1112130 - DNA, 15 bp, Homo sapiens
gctgggcctgctgga

SEQ ID NO: 1112131 - DNA, 15 bp, Homo sapiens
tgctgggcctgctgg

SEQ ID NO: 1112132 - DNA, 15 bp, Homo sapiens
ctgctgggcctgctg

SEQ ID NO: 1112133 - DNA, 15 bp, Homo sapiens
gctgctgggcctgct

SEQ ID NO: 1112134 - DNA, 15 bp, Homo sapiens
ggctgctgggcctgc

SEQ ID NO: 1112135 - DNA, 15 bp, Homo sapiens
aggctgctgggcctg

SEQ ID NO: 1112136 - DNA, 15 bp, Homo sapiens
caggctgctgggcct

SEQ ID NO: 1112137 - DNA, 15 bp, Homo sapiens
ccaggctgctgggcc

SEQ ID NO: 1112138 - DNA, 15 bp, Homo sapiens
gccaggctgctgggc

SEQ ID NO: 1112139 - DNA, 15 bp, Homo sapiens
agccaggctgctggg

SEQ ID NO: 1112140 - DNA, 15 bp, Homo sapiens
aagccaggctgctgg

SEQ ID NO: 1112141 - DNA, 15 bp, Homo sapiens
taagccaggctgctg

SEQ ID NO: 1112142 - DNA, 15 bp, Homo sapiens
ttaagccaggctgct

SEQ ID NO: 1112143 - DNA, 15 bp, Homo sapiens
cttaagccaggctgc

SEQ ID NO: 1112144 - DNA, 15 bp, Homo sapiens
ccttaagccaggctg

SEQ ID NO: 1112145 - DNA, 15 bp, Homo sapiens
tccttaagccaggct

SEQ ID NO: 1112146 - DNA, 15 bp, Homo sapiens
ctccttaagccaggc

SEQ ID NO: 1112147 - DNA, 15 bp, Homo sapiens
tctccttaagccagg

SEQ ID NO: 1112148 - DNA, 15 bp, Homo sapiens
ttctccttaagccag

SEQ ID NO: 1112149 - DNA, 15 bp, Homo sapiens
cttctccttaagcca

SEQ ID NO: 1112150 - DNA, 15 bp, Homo sapiens
tcttctccttaagcc

SEQ ID NO: 1112151 - DNA, 15 bp, Homo sapiens
ctcttctccttaagc

SEQ ID NO: 1112152 - DNA, 15 bp, Homo sapiens
cctcttctccttaag

SEQ ID NO: 1112153 - DNA, 15 bp, Homo sapiens
ccctcttctccttaa

SEQ ID NO: 1112154 - DNA, 15 bp, Homo sapiens
gccctcttctcctta

SEQ ID NO: 1112155 - DNA, 15 bp, Homo sapiens
tgccctcttctcctt

SEQ ID NO: 1112156 - DNA, 15 bp, Homo sapiens
ttgccctcttctcct

SEQ ID NO: 1112157 - DNA, 15 bp, Homo sapiens
tttgccctcttctcc

SEQ ID NO: 1112158 - DNA, 15 bp, Homo sapiens
gtttgccctcttctc

SEQ ID NO: 1112159 - DNA, 15 bp, Homo sapiens
tgtttgccctcttct

SEQ ID NO: 1112160 - DNA, 15 bp, Homo sapiens
ctgtttgccctcttc

SEQ ID NO: 1112161 - DNA, 15 bp, Homo sapiens
gctgtttgccctctt

SEQ ID NO: 1112162 - DNA, 15 bp, Homo sapiens
agctgtttgccctct

SEQ ID NO: 1112163 - DNA, 15 bp, Homo sapiens
cagctgtttgccctc

SEQ ID NO: 1112164 - DNA, 15 bp, Homo sapiens
ccagctgtttgccct

SEQ ID NO: 1112165 - DNA, 15 bp, Homo sapiens
tccagctgtttgccc

SEQ ID NO: 1112166 - DNA, 15 bp, Homo sapiens
atccagctgtttgcc

SEQ ID NO: 1112167 - DNA, 15 bp, Homo sapiens
catccagctgtttgc

SEQ ID NO: 1112168 - DNA, 15 bp, Homo sapiens
tccatccagctgttt

SEQ ID NO: 1112169 - DNA, 15 bp, Homo sapiens
atccatccagctgtt

SEQ ID NO: 1112170 - DNA, 15 bp, Homo sapiens
catccatccagctgt

SEQ ID NO: 1112171 - DNA, 15 bp, Homo sapiens
gcatccatccagctg

SEQ ID NO: 1112172 - DNA, 15 bp, Homo sapiens
tgcatccatccagct

SEQ ID NO: 1112173 - DNA, 15 bp, Homo sapiens
ctgcatccatccagc

SEQ ID NO: 1112174 - DNA, 15 bp, Homo sapiens
cctgcatccatccag

SEQ ID NO: 1112175 - DNA, 15 bp, Homo sapiens
tcctgcatccatcca

SEQ ID NO: 1112176 - DNA, 15 bp, Homo sapiens
atcctgcatccatcc

SEQ ID NO: 1112177 - DNA, 15 bp, Homo sapiens
catcctgcatccatc

SEQ ID NO: 1112178 - DNA, 15 bp, Homo sapiens
tcatcctgcatccat

SEQ ID NO: 1112179 - DNA, 15 bp, Homo sapiens
ttcatcctgcatcca

SEQ ID NO: 1112180 - DNA, 15 bp, Homo sapiens
cttcatcctgcatcc

SEQ ID NO: 1112181 - DNA, 15 bp, Homo sapiens
acttcatcctgcatc

SEQ ID NO: 1112182 - DNA, 15 bp, Homo sapiens
aacttcatcctgcat

SEQ ID NO: 1112183 - DNA, 15 bp, Homo sapiens
aaacttcatcctgca

SEQ ID NO: 1112184 - DNA, 15 bp, Homo sapiens
taaacttcatcctgc

SEQ ID NO: 1112185 - DNA, 15 bp, Homo sapiens
gtaaacttcatcctg

SEQ ID NO: 1112186 - DNA, 15 bp, Homo sapiens
tgtaaacttcatcct

SEQ ID NO: 1112187 - DNA, 15 bp, Homo sapiens
ttgtaaacttcatcc

SEQ ID NO: 1112188 - DNA, 15 bp, Homo sapiens
cttgtaaacttcatc

SEQ ID NO: 1112189 - DNA, 15 bp, Homo sapiens
ccttgtaaacttcat

SEQ ID NO: 1112190 - DNA, 15 bp, Homo sapiens
tccttgtaaacttca

SEQ ID NO: 1112191 - DNA, 15 bp, Homo sapiens
atccttgtaaacttc

SEQ ID NO: 1112192 - DNA, 15 bp, Homo sapiens
catccttgtaaactt

SEQ ID NO: 1112193 - DNA, 15 bp, Homo sapiens
tcatccttgtaaact

SEQ ID NO: 1112194 - DNA, 15 bp, Homo sapiens
atcatccttgtaaac

SEQ ID NO: 1112195 - DNA, 15 bp, Homo sapiens
catcatccttgtaaa

SEQ ID NO: 1112196 - DNA, 15 bp, Homo sapiens
acatcatccttgtaa

SEQ ID NO: 1112197 - DNA, 15 bp, Homo sapiens
tacatcatccttgta

SEQ ID NO: 1112198 - DNA, 15 bp, Homo sapiens
ctacatcatccttgt

SEQ ID NO: 1112199 - DNA, 15 bp, Homo sapiens
tctacatcatccttg

SEQ ID NO: 1112200 - DNA, 15 bp, Homo sapiens
ctctacatcatcctt

SEQ ID NO: 1112201 - DNA, 15 bp, Homo sapiens
tctctacatcatcct

SEQ ID NO: 1112202 - DNA, 15 bp, Homo sapiens
ttctctacatcatcc

SEQ ID NO: 1112203 - DNA, 15 bp, Homo sapiens
tttctctacatcatc

SEQ ID NO: 1112204 - DNA, 15 bp, Homo sapiens
ttttctctacatcat

SEQ ID NO: 1112205 - DNA, 15 bp, Homo sapiens
attttctctacatca

SEQ ID NO: 1112206 - DNA, 15 bp, Homo sapiens
tattttctctacatc

SEQ ID NO: 1112207 - DNA, 15 bp, Homo sapiens
ttattttctctacat

SEQ ID NO: 1112208 - DNA, 15 bp, Homo sapiens
attattttctctaca

SEQ ID NO: 1112209 - DNA, 15 bp, Homo sapiens
aattattttctctac

SEQ ID NO: 1112210 - DNA, 15 bp, Homo sapiens
caattattttctcta

SEQ ID NO: 1112211 - DNA, 15 bp, Homo sapiens
tcaattattttctct

SEQ ID NO: 1112212 - DNA, 15 bp, Homo sapiens
ctcaattattttctc

SEQ ID NO: 1112213 - DNA, 15 bp, Homo sapiens
cctcaattattttct

SEQ ID NO: 1112214 - DNA, 15 bp, Homo sapiens
tcctcaattattttc

SEQ ID NO: 1112215 - DNA, 15 bp, Homo sapiens
atcctcaattatttt

SEQ ID NO: 1112216 - DNA, 15 bp, Homo sapiens
catcctcaattattt

SEQ ID NO: 1112217 - DNA, 15 bp, Homo sapiens
tcatcctcaattatt

SEQ ID NO: 1112218 - DNA, 15 bp, Homo sapiens
atcatcctcaattat

SEQ ID NO: 1112219 - DNA, 15 bp, Homo sapiens
catcatcctcaatta

SEQ ID NO: 1112220 - DNA, 15 bp, Homo sapiens
ccatcatcctcaatt

SEQ ID NO: 1112221 - DNA, 15 bp, Homo sapiens
accatcatcctcaat

SEQ ID NO: 1112222 - DNA, 15 bp, Homo sapiens
caccatcatcctcaa

SEQ ID NO: 1112223 - DNA, 15 bp, Homo sapiens
tcaccatcatcctca

SEQ ID NO: 1112224 - DNA, 15 bp, Homo sapiens
ctcaccatcatcctc

SEQ ID NO: 1112225 - DNA, 15 bp, Homo sapiens
tctcaccatcatcct

SEQ ID NO: 1112226 - DNA, 15 bp, Homo sapiens
ctctcaccatcatcc

SEQ ID NO: 1112227 - DNA, 15 bp, Homo sapiens
actctcaccatcatc

SEQ ID NO: 1112228 - DNA, 15 bp, Homo sapiens
cactctcaccatcat

SEQ ID NO: 1112229 - DNA, 15 bp, Homo sapiens
acactctcaccatca

SEQ ID NO: 1112230 - DNA, 15 bp, Homo sapiens
cacactctcaccatc

SEQ ID NO: 1112231 - DNA, 15 bp, Homo sapiens
ccacactctcaccat

SEQ ID NO: 1112232 - DNA, 15 bp, Homo sapiens
accacactctcacca

SEQ ID NO: 1112233 - DNA, 15 bp, Homo sapiens
aaccacactctcacc

SEQ ID NO: 1112234 - DNA, 15 bp, Homo sapiens
gaaccacactctcac

SEQ ID NO: 1112235 - DNA, 15 bp, Homo sapiens
tgaaccacactctca

SEQ ID NO: 1112236 - DNA, 15 bp, Homo sapiens
ttgaaccacactctc

SEQ ID NO: 1112237 - DNA, 15 bp, Homo sapiens
tttgaaccacactct

SEQ ID NO: 1112238 - DNA, 15 bp, Homo sapiens
atttgaaccacactc

SEQ ID NO: 1112239 - DNA, 15 bp, Homo sapiens
catttgaaccacact

SEQ ID NO: 1112240 - DNA, 15 bp, Homo sapiens
gcatttgaaccacac

SEQ ID NO: 1112241 - DNA, 15 bp, Homo sapiens
ggcatttgaaccaca

SEQ ID NO: 1112242 - DNA, 15 bp, Homo sapiens
aggcatttgaaccac

SEQ ID NO: 1112243 - DNA, 15 bp, Homo sapiens
caggcatttgaacca

SEQ ID NO: 1112244 - DNA, 15 bp, Homo sapiens
ccaggcatttgaacc

SEQ ID NO: 1112245 - DNA, 15 bp, Homo sapiens
gccaggcatttgaac

SEQ ID NO: 1112246 - DNA, 15 bp, Homo sapiens
tgccaggcatttgaa

SEQ ID NO: 1112247 - DNA, 15 bp, Homo sapiens
ctgccaggcatttga

SEQ ID NO: 1112248 - DNA, 15 bp, Homo sapiens
tctgccaggcatttg

SEQ ID NO: 1112249 - DNA, 15 bp, Homo sapiens
ctctgccaggcattt

SEQ ID NO: 1112250 - DNA, 15 bp, Homo sapiens
cctctgccaggcatt

SEQ ID NO: 1112251 - DNA, 15 bp, Homo sapiens
ccctctgccaggcat

SEQ ID NO: 1112252 - DNA, 15 bp, Homo sapiens
tccctctgccaggca

SEQ ID NO: 1112253 - DNA, 15 bp, Homo sapiens
gtccctctgccaggc

SEQ ID NO: 1112254 - DNA, 15 bp, Homo sapiens
ggtccctctgccagg

SEQ ID NO: 1112255 - DNA, 15 bp, Homo sapiens
aggtccctctgccag

SEQ ID NO: 1112256 - DNA, 15 bp, Homo sapiens
aaggtccctctgcca

SEQ ID NO: 1112257 - DNA, 15 bp, Homo sapiens
caaggtccctctgcc

SEQ ID NO: 1112258 - DNA, 15 bp, Homo sapiens
ccaaggtccctctgc

SEQ ID NO: 1112259 - DNA, 15 bp, Homo sapiens
gccaaggtccctctg

SEQ ID NO: 1112260 - DNA, 15 bp, Homo sapiens
agccaaggtccctct

SEQ ID NO: 1112261 - DNA, 15 bp, Homo sapiens
cagccaaggtccctc

SEQ ID NO: 1112262 - DNA, 15 bp, Homo sapiens
gcagccaaggtccct

SEQ ID NO: 1112263 - DNA, 15 bp, Homo sapiens
tgcagccaaggtccc

SEQ ID NO: 1112264 - DNA, 15 bp, Homo sapiens
atgcagccaaggtcc

SEQ ID NO: 1112265 - DNA, 15 bp, Homo sapiens
catgcagccaaggtc

SEQ ID NO: 1112266 - DNA, 15 bp, Homo sapiens
ccatgcagccaaggt

SEQ ID NO: 1112267 - DNA, 15 bp, Homo sapiens
cccatgcagccaagg

SEQ ID NO: 1112268 - DNA, 15 bp, Homo sapiens
ccccatgcagccaag

SEQ ID NO: 1112269 - DNA, 15 bp, Homo sapiens
tccccatgcagccaa

SEQ ID NO: 1112270 - DNA, 15 bp, Homo sapiens
ttccccatgcagcca

SEQ ID NO: 1112271 - DNA, 15 bp, Homo sapiens
cttccccatgcagcc

SEQ ID NO: 1112272 - DNA, 15 bp, Homo sapiens
ccttccccatgcagc

SEQ ID NO: 1112273 - DNA, 15 bp, Homo sapiens
tccttccccatgcag

SEQ ID NO: 1112274 - DNA, 15 bp, Homo sapiens
ttccttccccatgca

SEQ ID NO: 1112275 - DNA, 15 bp, Homo sapiens
cttccttccccatgc

SEQ ID NO: 1112276 - DNA, 15 bp, Homo sapiens
gcttccttccccatg

SEQ ID NO: 1112277 - DNA, 15 bp, Homo sapiens
tgcttccttccccat

SEQ ID NO: 1112278 - DNA, 15 bp, Homo sapiens
ttgcttccttcccca

SEQ ID NO: 1112279 - DNA, 15 bp, Homo sapiens
tttgcttccttcccc

SEQ ID NO: 1112280 - DNA, 15 bp, Homo sapiens
ttttgcttccttccc

SEQ ID NO: 1112281 - DNA, 15 bp, Homo sapiens
attttgcttccttcc

SEQ ID NO: 1112282 - DNA, 15 bp, Homo sapiens
gattttgcttccttc

SEQ ID NO: 1112283 - DNA, 15 bp, Homo sapiens
agattttgcttcctt

SEQ ID NO: 1112284 - DNA, 15 bp, Homo sapiens
aagattttgcttcct

SEQ ID NO: 1112285 - DNA, 15 bp, Homo sapiens
taagattttgcttcc

SEQ ID NO: 1112286 - DNA, 15 bp, Homo sapiens
ttaagattttgcttc

SEQ ID NO: 1112287 - DNA, 15 bp, Homo sapiens
attaagattttgctt

SEQ ID NO: 1112288 - DNA, 15 bp, Homo sapiens
cattaagattttgct

SEQ ID NO: 1112289 - DNA, 15 bp, Homo sapiens
ccattaagattttgc

SEQ ID NO: 1112290 - DNA, 15 bp, Homo sapiens
cccattaagattttg

SEQ ID NO: 1112291 - DNA, 15 bp, Homo sapiens
ccccattaagatttt

SEQ ID NO: 1112292 - DNA, 15 bp, Homo sapiens
accccattaagattt

SEQ ID NO: 1112293 - DNA, 15 bp, Homo sapiens
aaccccattaagatt

SEQ ID NO: 1112294 - DNA, 15 bp, Homo sapiens
aaaccccattaagat

SEQ ID NO: 1112295 - DNA, 15 bp, Homo sapiens
taaaccccattaaga

SEQ ID NO: 1112296 - DNA, 15 bp, Homo sapiens
ctaaaccccattaag

SEQ ID NO: 1112297 - DNA, 15 bp, Homo sapiens
gctaaaccccattaa

SEQ ID NO: 1112298 - DNA, 15 bp, Homo sapiens
tgctaaaccccatta

SEQ ID NO: 1112299 - DNA, 15 bp, Homo sapiens
ttgctaaaccccatt

SEQ ID NO: 1112300 - DNA, 15 bp, Homo sapiens
attgctaaaccccat

SEQ ID NO: 1112301 - DNA, 15 bp, Homo sapiens
cattgctaaacccca

SEQ ID NO: 1112302 - DNA, 15 bp, Homo sapiens
ccattgctaaacccc

SEQ ID NO: 1112303 - DNA, 15 bp, Homo sapiens
tccattgctaaaccc

SEQ ID NO: 1112304 - DNA, 15 bp, Homo sapiens
ttccattgctaaacc

SEQ ID NO: 1112305 - DNA, 15 bp, Homo sapiens
cttccattgctaaac

SEQ ID NO: 1112306 - DNA, 15 bp, Homo sapiens
ccttccattgctaaa

SEQ ID NO: 1112307 - DNA, 15 bp, Homo sapiens
tccttccattgctaa

SEQ ID NO: 1112308 - DNA, 15 bp, Homo sapiens
ttccttccattgcta

SEQ ID NO: 1112309 - DNA, 15 bp, Homo sapiens
tttccttccattgct

SEQ ID NO: 1112310 - DNA, 15 bp, Homo sapiens
atttccttccattgc

SEQ ID NO: 1112311 - DNA, 15 bp, Homo sapiens
catttccttccattg

SEQ ID NO: 1112312 - DNA, 15 bp, Homo sapiens
tcatttccttccatt

SEQ ID NO: 1112313 - DNA, 15 bp, Homo sapiens
ttcatttccttccat

SEQ ID NO: 1112314 - DNA, 15 bp, Homo sapiens
cttcatttccttcca

SEQ ID NO: 1112315 - DNA, 15 bp, Homo sapiens
ccttcatttccttcc

SEQ ID NO: 1112316 - DNA, 15 bp, Homo sapiens
tccttcatttccttc

SEQ ID NO: 1112317 - DNA, 15 bp, Homo sapiens
atccttcatttcctt

SEQ ID NO: 1112318 - DNA, 15 bp, Homo sapiens
aatccttcatttcct

SEQ ID NO: 1112319 - DNA, 15 bp, Homo sapiens
aaatccttcatttcc

SEQ ID NO: 1112320 - DNA, 15 bp, Homo sapiens
taaatccttcatttc

SEQ ID NO: 1112321 - DNA, 15 bp, Homo sapiens
ttaaatccttcattt

SEQ ID NO: 1112322 - DNA, 15 bp, Homo sapiens
tttaaatccttcatt

SEQ ID NO: 1112323 - DNA, 15 bp, Homo sapiens
ctttaaatccttcat

SEQ ID NO: 1112324 - DNA, 15 bp, Homo sapiens
cctttaaatccttca

SEQ ID NO: 1112325 - DNA, 15 bp, Homo sapiens
tcctttaaatccttc

SEQ ID NO: 1112326 - DNA, 15 bp, Homo sapiens
gtcctttaaatcctt

SEQ ID NO: 1112327 - DNA, 15 bp, Homo sapiens
agtcctttaaatcct

SEQ ID NO: 1112328 - DNA, 15 bp, Homo sapiens
cagtcctttaaatcc

SEQ ID NO: 1112329 - DNA, 15 bp, Homo sapiens
gcagtcctttaaatc

SEQ ID NO: 1112330 - DNA, 15 bp, Homo sapiens
tgcagtcctttaaat

SEQ ID NO: 1112331 - DNA, 15 bp, Homo sapiens
atgcagtcctttaaa

SEQ ID NO: 1112332 - DNA, 15 bp, Homo sapiens
catgcagtcctttaa

SEQ ID NO: 1112333 - DNA, 15 bp, Homo sapiens
ccatgcagtccttta

SEQ ID NO: 1112334 - DNA, 15 bp, Homo sapiens
gccatgcagtccttt

SEQ ID NO: 1112335 - DNA, 15 bp, Homo sapiens
agccatgcagtcctt

SEQ ID NO: 1112336 - DNA, 15 bp, Homo sapiens
gagccatgcagtcct

SEQ ID NO: 1112337 - DNA, 15 bp, Homo sapiens
tgagccatgcagtcc

SEQ ID NO: 1112338 - DNA, 15 bp, Homo sapiens
ttgagccatgcagtc

SEQ ID NO: 1112339 - DNA, 15 bp, Homo sapiens
cttgagccatgcagt

SEQ ID NO: 1112340 - DNA, 15 bp, Homo sapiens
acttgagccatgcag

SEQ ID NO: 1112341 - DNA, 15 bp, Homo sapiens
cacttgagccatgca

SEQ ID NO: 1112342 - DNA, 15 bp, Homo sapiens
tcacttgagccatgc

SEQ ID NO: 1112343 - DNA, 15 bp, Homo sapiens
ctcacttgagccatg

SEQ ID NO: 1112344 - DNA, 15 bp, Homo sapiens
cctcacttgagccat

SEQ ID NO: 1112345 - DNA, 15 bp, Homo sapiens
acctcacttgagcca

SEQ ID NO: 1112346 - DNA, 15 bp, Homo sapiens
aacctcacttgagcc

SEQ ID NO: 1112347 - DNA, 15 bp, Homo sapiens
caacctcacttgagc

SEQ ID NO: 1112348 - DNA, 15 bp, Homo sapiens
tcaacctcacttgag

SEQ ID NO: 1112349 - DNA, 15 bp, Homo sapiens
gtcaacctcacttga

SEQ ID NO: 1112350 - DNA, 15 bp, Homo sapiens
tgtcaacctcacttg

SEQ ID NO: 1112351 - DNA, 15 bp, Homo sapiens
ttgtcaacctcactt

SEQ ID NO: 1112352 - DNA, 15 bp, Homo sapiens
tttgtcaacctcact

SEQ ID NO: 1112353 - DNA, 15 bp, Homo sapiens
atttgtcaacctcac

SEQ ID NO: 1112354 - DNA, 15 bp, Homo sapiens
tatttgtcaacctca

SEQ ID NO: 1112355 - DNA, 15 bp, Homo sapiens
ctatttgtcaacctc

SEQ ID NO: 1112356 - DNA, 15 bp, Homo sapiens
cctatttgtcaacct

SEQ ID NO: 1112357 - DNA, 15 bp, Homo sapiens
acctatttgtcaacc

SEQ ID NO: 1112358 - DNA, 15 bp, Homo sapiens
cacctatttgtcaac

SEQ ID NO: 1112359 - DNA, 15 bp, Homo sapiens
acacctatttgtcaa

SEQ ID NO: 1112360 - DNA, 15 bp, Homo sapiens
cacacctatttgtca

SEQ ID NO: 1112361 - DNA, 15 bp, Homo sapiens
ccacacctatttgtc

SEQ ID NO: 1112362 - DNA, 15 bp, Homo sapiens
tccacacctatttgt

SEQ ID NO: 1112363 - DNA, 15 bp, Homo sapiens
ttccacacctatttg

SEQ ID NO: 1112364 - DNA, 15 bp, Homo sapiens
cttccacacctattt

SEQ ID NO: 1112365 - DNA, 15 bp, Homo sapiens
ccttccacacctatt

SEQ ID NO: 1112366 - DNA, 15 bp, Homo sapiens
tccttccacacctat

SEQ ID NO: 1112367 - DNA, 15 bp, Homo sapiens
ctccttccacaccta

SEQ ID NO: 1112368 - DNA, 15 bp, Homo sapiens
cctccttccacacct

SEQ ID NO: 1112369 - DNA, 15 bp, Homo sapiens
tcctccttccacacc

SEQ ID NO: 1112370 - DNA, 15 bp, Homo sapiens
ttcctccttccacac

SEQ ID NO: 1112371 - DNA, 15 bp, Homo sapiens
cttcctccttccaca

SEQ ID NO: 1112372 - DNA, 15 bp, Homo sapiens
attacaattgacatg

SEQ ID NO: 1112373 - DNA, 15 bp, Homo sapiens
gattacaattgacat

SEQ ID NO: 1112374 - DNA, 15 bp, Homo sapiens
agattacaattgaca

SEQ ID NO: 1112375 - DNA, 15 bp, Homo sapiens
tagattacaattgac

SEQ ID NO: 1112376 - DNA, 15 bp, Homo sapiens
ctagattacaattga

SEQ ID NO: 1112377 - DNA, 15 bp, Homo sapiens
actagattacaattg

SEQ ID NO: 1112378 - DNA, 15 bp, Homo sapiens
tactagattacaatt

SEQ ID NO: 1112379 - DNA, 15 bp, Homo sapiens
ctactagattacaat

SEQ ID NO: 1112380 - DNA, 15 bp, Homo sapiens
tctactagattacaa

SEQ ID NO: 1112381 - DNA, 15 bp, Homo sapiens
atctactagattaca

SEQ ID NO: 1112382 - DNA, 15 bp, Homo sapiens
catctactagattac

SEQ ID NO: 1112383 - DNA, 15 bp, Homo sapiens
ccatctactagatta

SEQ ID NO: 1112384 - DNA, 15 bp, Homo sapiens
tccatctactagatt

SEQ ID NO: 1112385 - DNA, 15 bp, Homo sapiens
ttccatctactagat

SEQ ID NO: 1112386 - DNA, 15 bp, Homo sapiens
attccatctactaga

SEQ ID NO: 1112387 - DNA, 15 bp, Homo sapiens
aattccatctactag

SEQ ID NO: 1112388 - DNA, 15 bp, Homo sapiens
aaattccatctacta

SEQ ID NO: 1112389 - DNA, 15 bp, Homo sapiens
aaaattccatctact

SEQ ID NO: 1112390 - DNA, 15 bp, Homo sapiens
aaaaattccatctac

SEQ ID NO: 1112391 - DNA, 15 bp, Homo sapiens
taaaaattccatcta

SEQ ID NO: 1112392 - DNA, 15 bp, Homo sapiens
ttaaaaattccatct

SEQ ID NO: 1112393 - DNA, 15 bp, Homo sapiens
cttaaaaattccatc

SEQ ID NO: 1112394 - DNA, 15 bp, Homo sapiens
acttaaaaattccat

SEQ ID NO: 1112395 - DNA, 15 bp, Homo sapiens
aacttaaaaattcca

SEQ ID NO: 1112396 - DNA, 15 bp, Homo sapiens
taacttaaaaattcc

SEQ ID NO: 1112397 - DNA, 15 bp, Homo sapiens
ttaacttaaaaattc

SEQ ID NO: 1112398 - DNA, 15 bp, Homo sapiens
tttaacttaaaaatt

SEQ ID NO: 1112399 - DNA, 15 bp, Homo sapiens
ctttaacttaaaaat

SEQ ID NO: 1112400 - DNA, 15 bp, Homo sapiens
gctttaacttaaaaa

SEQ ID NO: 1112401 - DNA, 15 bp, Homo sapiens
ggctttaacttaaaa

SEQ ID NO: 1112402 - DNA, 15 bp, Homo sapiens
aggctttaacttaaa

SEQ ID NO: 1112403 - DNA, 15 bp, Homo sapiens
aaggctttaacttaa

SEQ ID NO: 1112404 - DNA, 15 bp, Homo sapiens
gaaggctttaactta

SEQ ID NO: 1112405 - DNA, 15 bp, Homo sapiens
ggaaggctttaactt

SEQ ID NO: 1112406 - DNA, 15 bp, Homo sapiens
tggaaggctttaact

SEQ ID NO: 1112407 - DNA, 15 bp, Homo sapiens
ctggaaggctttaac

SEQ ID NO: 1112408 - DNA, 15 bp, Homo sapiens
tctggaaggctttaa

SEQ ID NO: 1112409 - DNA, 15 bp, Homo sapiens
atctggaaggcttta

SEQ ID NO: 1112410 - DNA, 15 bp, Homo sapiens
catctggaaggcttt

SEQ ID NO: 1112411 - DNA, 15 bp, Homo sapiens
ccatctggaaggctt

SEQ ID NO: 1112412 - DNA, 15 bp, Homo sapiens
gccatctggaaggct

SEQ ID NO: 1112413 - DNA, 15 bp, Homo sapiens
agccatctggaaggc

SEQ ID NO: 1112414 - DNA, 15 bp, Homo sapiens
cagccatctggaagg

SEQ ID NO: 1112415 - DNA, 15 bp, Homo sapiens
acagccatctggaag

SEQ ID NO: 1112416 - DNA, 15 bp, Homo sapiens
gacagccatctggaa

SEQ ID NO: 1112417 - DNA, 15 bp, Homo sapiens
tgacagccatctgga

SEQ ID NO: 1112418 - DNA, 15 bp, Homo sapiens
ctgacagccatctgg

SEQ ID NO: 1112419 - DNA, 15 bp, Homo sapiens
actgacagccatctg

SEQ ID NO: 1112420 - DNA, 15 bp, Homo sapiens
cactgacagccatct

SEQ ID NO: 1112421 - DNA, 15 bp, Homo sapiens
tcactgacagccatc

SEQ ID NO: 1112422 - DNA, 15 bp, Homo sapiens
ttcactgacagccat

SEQ ID NO: 1112423 - DNA, 15 bp, Homo sapiens
attcactgacagcca

SEQ ID NO: 1112424 - DNA, 15 bp, Homo sapiens
aattcactgacagcc

SEQ ID NO: 1112425 - DNA, 15 bp, Homo sapiens
taattcactgacagc

SEQ ID NO: 1112426 - DNA, 15 bp, Homo sapiens
gtaattcactgacag

SEQ ID NO: 1112427 - DNA, 15 bp, Homo sapiens
tgtaattcactgaca

SEQ ID NO: 1112428 - DNA, 15 bp, Homo sapiens
gtgtaattcactgac

SEQ ID NO: 1112429 - DNA, 15 bp, Homo sapiens
agtgtaattcactga

SEQ ID NO: 1112430 - DNA, 15 bp, Homo sapiens
cagtgtaattcactg

SEQ ID NO: 1112431 - DNA, 15 bp, Homo sapiens
tcagtgtaattcact

SEQ ID NO: 1112432 - DNA, 15 bp, Homo sapiens
atcagtgtaattcac

SEQ ID NO: 1112433 - DNA, 15 bp, Homo sapiens
tatcagtgtaattca

SEQ ID NO: 1112434 - DNA, 15 bp, Homo sapiens
ttatcagtgtaattc

SEQ ID NO: 1112435 - DNA, 15 bp, Homo sapiens
cttatcagtgtaatt

SEQ ID NO: 1112436 - DNA, 15 bp, Homo sapiens
ccttatcagtgtaat

SEQ ID NO: 1112437 - DNA, 15 bp, Homo sapiens
tccttatcagtgtaa

SEQ ID NO: 1112438 - DNA, 15 bp, Homo sapiens
atccttatcagtgta

SEQ ID NO: 1112439 - DNA, 15 bp, Homo sapiens
aatccttatcagtgt

SEQ ID NO: 1112440 - DNA, 15 bp, Homo sapiens
taatccttatcagtg

SEQ ID NO: 1112441 - DNA, 15 bp, Homo sapiens
gtaatccttatcagt

SEQ ID NO: 1112442 - DNA, 15 bp, Homo sapiens
tgtaatccttatcag

SEQ ID NO: 1112443 - DNA, 15 bp, Homo sapiens
ctgtaatccttatca

SEQ ID NO: 1112444 - DNA, 15 bp, Homo sapiens
tctgtaatccttatc

SEQ ID NO: 1112445 - DNA, 15 bp, Homo sapiens
ctctgtaatccttat

SEQ ID NO: 1112446 - DNA, 15 bp, Homo sapiens
actctgtaatcctta

SEQ ID NO: 1112447 - DNA, 15 bp, Homo sapiens
cactctgtaatcctt

SEQ ID NO: 1112448 - DNA, 15 bp, Homo sapiens
acactctgtaatcct

SEQ ID NO: 1112449 - DNA, 15 bp, Homo sapiens
gacactctgtaatcc

SEQ ID NO: 1112450 - DNA, 15 bp, Homo sapiens
tgacactctgtaatc

SEQ ID NO: 1112451 - DNA, 15 bp, Homo sapiens
ctgacactctgtaat

SEQ ID NO: 1112452 - DNA, 15 bp, Homo sapiens
cctgacactctgtaa

SEQ ID NO: 1112453 - DNA, 15 bp, Homo sapiens
acctgacactctgta

SEQ ID NO: 1112454 - DNA, 15 bp, Homo sapiens
gacctgacactctgt

SEQ ID NO: 1112455 - DNA, 15 bp, Homo sapiens
agacctgacactctg

SEQ ID NO: 1112456 - DNA, 15 bp, Homo sapiens
gagacctgacactct

SEQ ID NO: 1112457 - DNA, 15 bp, Homo sapiens
agagacctgacactc

SEQ ID NO: 1112458 - DNA, 15 bp, Homo sapiens
aagagacctgacact

SEQ ID NO: 1112459 - DNA, 15 bp, Homo sapiens
caagagacctgacac

SEQ ID NO: 1112460 - DNA, 15 bp, Homo sapiens
tcaagagacctgaca

SEQ ID NO: 1112461 - DNA, 15 bp, Homo sapiens
atcaagagacctgac

SEQ ID NO: 1112462 - DNA, 15 bp, Homo sapiens
aatcaagagacctga

SEQ ID NO: 1112463 - DNA, 15 bp, Homo sapiens
taatcaagagacctg

SEQ ID NO: 1112464 - DNA, 15 bp, Homo sapiens
ctaatcaagagacct

SEQ ID NO: 1112465 - DNA, 15 bp, Homo sapiens
gctaatcaagagacc

SEQ ID NO: 1112466 - DNA, 15 bp, Homo sapiens
agctaatcaagagac

SEQ ID NO: 1112467 - DNA, 15 bp, Homo sapiens
aagctaatcaagaga

SEQ ID NO: 1112468 - DNA, 15 bp, Homo sapiens
taagctaatcaagag

SEQ ID NO: 1112469 - DNA, 15 bp, Homo sapiens
ataagctaatcaaga

SEQ ID NO: 1112470 - DNA, 15 bp, Homo sapiens
gataagctaatcaag

SEQ ID NO: 1112471 - DNA, 15 bp, Homo sapiens
tgataagctaatcaa

SEQ ID NO: 1112472 - DNA, 15 bp, Homo sapiens
ctgataagctaatca

SEQ ID NO: 1112473 - DNA, 15 bp, Homo sapiens
tctgataagctaatc

SEQ ID NO: 1112474 - DNA, 15 bp, Homo sapiens
ttctgataagctaat

SEQ ID NO: 1112475 - DNA, 15 bp, Homo sapiens
attctgataagctaa

SEQ ID NO: 1112476 - DNA, 15 bp, Homo sapiens
aattctgataagcta

SEQ ID NO: 1112477 - DNA, 15 bp, Homo sapiens
aaattctgataagct

SEQ ID NO: 1112478 - DNA, 15 bp, Homo sapiens
gaaattctgataagc

SEQ ID NO: 1112479 - DNA, 15 bp, Homo sapiens
agaaattctgataag

SEQ ID NO: 1112480 - DNA, 15 bp, Homo sapiens
cagaaattctgataa

SEQ ID NO: 1112481 - DNA, 15 bp, Homo sapiens
ccagaaattctgata

SEQ ID NO: 1112482 - DNA, 15 bp, Homo sapiens
accagaaattctgat

SEQ ID NO: 1112483 - DNA, 15 bp, Homo sapiens
gaccagaaattctga

SEQ ID NO: 1112484 - DNA, 15 bp, Homo sapiens
tgaccagaaattctg

SEQ ID NO: 1112485 - DNA, 15 bp, Homo sapiens
ctgaccagaaattct

SEQ ID NO: 1112486 - DNA, 15 bp, Homo sapiens
tctgaccagaaattc

SEQ ID NO: 1112487 - DNA, 15 bp, Homo sapiens
ttctgaccagaaatt

SEQ ID NO: 1112488 - DNA, 15 bp, Homo sapiens
gttctgaccagaaat

SEQ ID NO: 1112489 - DNA, 15 bp, Homo sapiens
tgttctgaccagaaa

SEQ ID NO: 1112490 - DNA, 15 bp, Homo sapiens
ctgttctgaccagaa

SEQ ID NO: 1112491 - DNA, 15 bp, Homo sapiens
actgttctgaccaga

SEQ ID NO: 1112492 - DNA, 15 bp, Homo sapiens
gactgttctgaccag

SEQ ID NO: 1112493 - DNA, 15 bp, Homo sapiens
cgactgttctgacca

SEQ ID NO: 1112494 - DNA, 15 bp, Homo sapiens
tcgactgttctgacc

SEQ ID NO: 1112495 - DNA, 15 bp, Homo sapiens
ttcgactgttctgac

SEQ ID NO: 1112496 - DNA, 15 bp, Homo sapiens
attcgactgttctga

SEQ ID NO: 1112497 - DNA, 15 bp, Homo sapiens
tattcgactgttctg

SEQ ID NO: 1112498 - DNA, 15 bp, Homo sapiens
ttattcgactgttct

SEQ ID NO: 1112499 - DNA, 15 bp, Homo sapiens
attattcgactgttc

SEQ ID NO: 1112500 - DNA, 15 bp, Homo sapiens
tattattcgactgtt

SEQ ID NO: 1112501 - DNA, 15 bp, Homo sapiens
ctattattcgactgt

SEQ ID NO: 1112502 - DNA, 15 bp, Homo sapiens
tctattattcgactg

SEQ ID NO: 1112503 - DNA, 15 bp, Homo sapiens
atctattattcgact

SEQ ID NO: 1112504 - DNA, 15 bp, Homo sapiens
tatctattattcgac

SEQ ID NO: 1112505 - DNA, 15 bp, Homo sapiens
ttatctattattcga

SEQ ID NO: 1112506 - DNA, 15 bp, Homo sapiens
tttatctattattcg

SEQ ID NO: 1112507 - DNA, 15 bp, Homo sapiens
ttttatctattattc

SEQ ID NO: 1112508 - DNA, 15 bp, Homo sapiens
tttttatctattatt

SEQ ID NO: 1112509 - DNA, 15 bp, Homo sapiens
ttttttatctattat

SEQ ID NO: 1112510 - DNA, 15 bp, Homo sapiens
tttttttatctatta

SEQ ID NO: 1112511 - DNA, 15 bp, Homo sapiens
atttttttatctatt

SEQ ID NO: 1112512 - DNA, 15 bp, Homo sapiens
catttttttatctat

SEQ ID NO: 1112513 - DNA, 15 bp, Homo sapiens
tcatttttttatcta

SEQ ID NO: 1112514 - DNA, 15 bp, Homo sapiens
ttcatttttttatct

SEQ ID NO: 1112515 - DNA, 15 bp, Homo sapiens
tttcatttttttatc

SEQ ID NO: 1112516 - DNA, 15 bp, Homo sapiens
ctttcatttttttat

SEQ ID NO: 1112517 - DNA, 15 bp, Homo sapiens
gctttcattttttta

SEQ ID NO: 1112518 - DNA, 15 bp, Homo sapiens
tgctttcattttttt

SEQ ID NO: 1112519 - DNA, 15 bp, Homo sapiens
ctgctttcatttttt

SEQ ID NO: 1112520 - DNA, 15 bp, Homo sapiens
tctgctttcattttt

SEQ ID NO: 1112521 - DNA, 15 bp, Homo sapiens
atctgctttcatttt

SEQ ID NO: 1112522 - DNA, 15 bp, Homo sapiens
catctgctttcattt

SEQ ID NO: 1112523 - DNA, 15 bp, Homo sapiens
tcatctgctttcatt

SEQ ID NO: 1112524 - DNA, 15 bp, Homo sapiens
ttcatctgctttcat

SEQ ID NO: 1112525 - DNA, 15 bp, Homo sapiens
cttcatctgctttca

SEQ ID NO: 1112526 - DNA, 15 bp, Homo sapiens
ccttcatctgctttc

SEQ ID NO: 1112527 - DNA, 15 bp, Homo sapiens
tccttcatctgcttt

SEQ ID NO: 1112528 - DNA, 15 bp, Homo sapiens
ttccttcatctgctt

SEQ ID NO: 1112529 - DNA, 15 bp, Homo sapiens
attccttcatctgct

SEQ ID NO: 1112530 - DNA, 15 bp, Homo sapiens
tattccttcatctgc

SEQ ID NO: 1112531 - DNA, 15 bp, Homo sapiens
ctattccttcatctg

SEQ ID NO: 1112532 - DNA, 15 bp, Homo sapiens
cctattccttcatct

SEQ ID NO: 1112533 - DNA, 15 bp, Homo sapiens
tcctattccttcatc

SEQ ID NO: 1112534 - DNA, 15 bp, Homo sapiens
ttcctattccttcat

SEQ ID NO: 1112535 - DNA, 15 bp, Homo sapiens
cttcctattccttca

SEQ ID NO: 1112536 - DNA, 15 bp, Homo sapiens
acttcctattccttc

SEQ ID NO: 1112537 - DNA, 15 bp, Homo sapiens
aacttcctattcctt

SEQ ID NO: 1112538 - DNA, 15 bp, Homo sapiens
taacttcctattcct

SEQ ID NO: 1112539 - DNA, 15 bp, Homo sapiens
ttaacttcctattcc

SEQ ID NO: 1112540 - DNA, 15 bp, Homo sapiens
tttaacttcctattc

SEQ ID NO: 1112541 - DNA, 15 bp, Homo sapiens
ttttaacttcctatt

SEQ ID NO: 1112542 - DNA, 15 bp, Homo sapiens
attttaacttcctat

SEQ ID NO: 1112543 - DNA, 15 bp, Homo sapiens
tattttaacttccta

SEQ ID NO: 1112544 - DNA, 15 bp, Homo sapiens
gtattttaacttcct

SEQ ID NO: 1112545 - DNA, 15 bp, Homo sapiens
ggtattttaacttcc

SEQ ID NO: 1112546 - DNA, 15 bp, Homo sapiens
tggtattttaacttc

SEQ ID NO: 1112547 - DNA, 15 bp, Homo sapiens
gtggtattttaactt

SEQ ID NO: 1112548 - DNA, 15 bp, Homo sapiens
tgtggtattttaact

SEQ ID NO: 1112549 - DNA, 15 bp, Homo sapiens
ctgtggtattttaac

SEQ ID NO: 1112550 - DNA, 15 bp, Homo sapiens
actgtggtattttaa

SEQ ID NO: 1112551 - DNA, 15 bp, Homo sapiens
aactgtggtatttta

SEQ ID NO: 1112552 - DNA, 15 bp, Homo sapiens
caactgtggtatttt

SEQ ID NO: 1112553 - DNA, 15 bp, Homo sapiens
gcaactgtggtattt

SEQ ID NO: 1112554 - DNA, 15 bp, Homo sapiens
tgcaactgtggtatt

SEQ ID NO: 1112555 - DNA, 15 bp, Homo sapiens
ttgcaactgtggtat

SEQ ID NO: 1112556 - DNA, 15 bp, Homo sapiens
attgcaactgtggta

SEQ ID NO: 1112557 - DNA, 15 bp, Homo sapiens
aattgcaactgtggt

SEQ ID NO: 1112558 - DNA, 15 bp, Homo sapiens
aaattgcaactgtgg

SEQ ID NO: 1112559 - DNA, 15 bp, Homo sapiens
gaaattgcaactgtg

SEQ ID NO: 1112560 - DNA, 15 bp, Homo sapiens
tgaaattgcaactgt

SEQ ID NO: 1112561 - DNA, 15 bp, Homo sapiens
atgaaattgcaactg

SEQ ID NO: 1112562 - DNA, 15 bp, Homo sapiens
aatgaaattgcaact

SEQ ID NO: 1112563 - DNA, 15 bp, Homo sapiens
aaatgaaattgcaac

SEQ ID NO: 1112564 - DNA, 15 bp, Homo sapiens
aaaatgaaattgcaa

SEQ ID NO: 1112565 - DNA, 15 bp, Homo sapiens
taaaatgaaattgca

SEQ ID NO: 1112566 - DNA, 15 bp, Homo sapiens
ataaaatgaaattgc

SEQ ID NO: 1112567 - DNA, 15 bp, Homo sapiens
aataaaatgaaattg

SEQ ID NO: 1112568 - DNA, 15 bp, Homo sapiens
aaataaaatgaaatt

SEQ ID NO: 1112569 - DNA, 15 bp, Homo sapiens
gaaaataaaatgaaa

SEQ ID NO: 1112570 - DNA, 15 bp, Homo sapiens
agaaaataaaatgaa

SEQ ID NO: 1112571 - DNA, 15 bp, Homo sapiens
aaagaaaataaaatg

SEQ ID NO: 1112572 - DNA, 15 bp, Homo sapiens
ataaaagaaaataaa

SEQ ID NO: 1112573 - DNA, 15 bp, Homo sapiens
gataaaagaaaataa

SEQ ID NO: 1112574 - DNA, 15 bp, Homo sapiens
ggataaaagaaaata

SEQ ID NO: 1112575 - DNA, 15 bp, Homo sapiens
tggataaaagaaaat

SEQ ID NO: 1112576 - DNA, 15 bp, Homo sapiens
ttggataaaagaaaa

SEQ ID NO: 1112577 - DNA, 15 bp, Homo sapiens
attggataaaagaaa

SEQ ID NO: 1112578 - DNA, 15 bp, Homo sapiens
aattggataaaagaa

SEQ ID NO: 1112579 - DNA, 15 bp, Homo sapiens
taattggataaaaga

SEQ ID NO: 1112580 - DNA, 15 bp, Homo sapiens
ttaattggataaaag

SEQ ID NO: 1112581 - DNA, 15 bp, Homo sapiens
tttaattggataaaa

SEQ ID NO: 1112582 - DNA, 15 bp, Homo sapiens
ctttaattggataaa

SEQ ID NO: 1112583 - DNA, 15 bp, Homo sapiens
actttaattggataa

SEQ ID NO: 1112584 - DNA, 15 bp, Homo sapiens
cactttaattggata

SEQ ID NO: 1112585 - DNA, 15 bp, Homo sapiens
acactttaattggat

SEQ ID NO: 1112586 - DNA, 15 bp, Homo sapiens
tacactttaattgga

SEQ ID NO: 1112587 - DNA, 15 bp, Homo sapiens
ttacactttaattgg

SEQ ID NO: 1112588 - DNA, 15 bp, Homo sapiens
tttacactttaattg

SEQ ID NO: 1112589 - DNA, 15 bp, Homo sapiens
gtttacactttaatt

SEQ ID NO: 1112590 - DNA, 15 bp, Homo sapiens
tgtttacactttaat

SEQ ID NO: 1112591 - DNA, 15 bp, Homo sapiens
gtgtttacactttaa

SEQ ID NO: 1112592 - DNA, 15 bp, Homo sapiens
agtgtttacacttta

SEQ ID NO: 1112593 - DNA, 15 bp, Homo sapiens
gagtgtttacacttt

SEQ ID NO: 1112594 - DNA, 15 bp, Homo sapiens
tgagtgtttacactt

SEQ ID NO: 1112595 - DNA, 15 bp, Homo sapiens
ttgagtgtttacact

SEQ ID NO: 1112596 - DNA, 15 bp, Homo sapiens
tttgagtgtttacac

SEQ ID NO: 1112597 - DNA, 15 bp, Homo sapiens
atttgagtgtttaca

SEQ ID NO: 1112598 - DNA, 15 bp, Homo sapiens
catttgagtgtttac

SEQ ID NO: 1112599 - DNA, 15 bp, Homo sapiens
ccatttgagtgttta

SEQ ID NO: 1112600 - DNA, 15 bp, Homo sapiens
tccatttgagtgttt

SEQ ID NO: 1112601 - DNA, 15 bp, Homo sapiens
ttccatttgagtgtt

SEQ ID NO: 1112602 - DNA, 15 bp, Homo sapiens
cttccatttgagtgt

SEQ ID NO: 1112603 - DNA, 15 bp, Homo sapiens
gcttccatttgagtg

SEQ ID NO: 1112604 - DNA, 15 bp, Homo sapiens
ggcttccatttgagt

SEQ ID NO: 1112605 - DNA, 15 bp, Homo sapiens
tggcttccatttgag

SEQ ID NO: 1112606 - DNA, 15 bp, Homo sapiens
gtggcttccatttga

SEQ ID NO: 1112607 - DNA, 15 bp, Homo sapiens
tgtggcttccatttg

SEQ ID NO: 1112608 - DNA, 15 bp, Homo sapiens
ttgtggcttccattt

SEQ ID NO: 1112609 - DNA, 15 bp, Homo sapiens
tttgtggcttccatt

SEQ ID NO: 1112610 - DNA, 15 bp, Homo sapiens
ctttgtggcttccat

SEQ ID NO: 1112611 - DNA, 15 bp, Homo sapiens
actttgtggcttcca

SEQ ID NO: 1112612 - DNA, 15 bp, Homo sapiens
gactttgtggcttcc

SEQ ID NO: 1112613 - DNA, 15 bp, Homo sapiens
agactttgtggcttc

SEQ ID NO: 1112614 - DNA, 15 bp, Homo sapiens
gagactttgtggctt

SEQ ID NO: 1112615 - DNA, 15 bp, Homo sapiens
cgagactttgtggct

SEQ ID NO: 1112616 - DNA, 15 bp, Homo sapiens
acgagactttgtggc

SEQ ID NO: 1112617 - DNA, 15 bp, Homo sapiens
cacgagactttgtgg

SEQ ID NO: 1112618 - DNA, 15 bp, Homo sapiens
acacgagactttgtg

SEQ ID NO: 1112619 - DNA, 15 bp, Homo sapiens
tacacgagactttgt

SEQ ID NO: 1112620 - DNA, 15 bp, Homo sapiens
ttacacgagactttg

SEQ ID NO: 1112621 - DNA, 15 bp, Homo sapiens
gttacacgagacttt

SEQ ID NO: 1112622 - DNA, 15 bp, Homo sapiens
agttacacgagactt

SEQ ID NO: 1112623 - DNA, 15 bp, Homo sapiens
aagttacacgagact

SEQ ID NO: 1112624 - DNA, 15 bp, Homo sapiens
taagttacacgagac

SEQ ID NO: 1112625 - DNA, 15 bp, Homo sapiens
ttaagttacacgaga

SEQ ID NO: 1112626 - DNA, 15 bp, Homo sapiens
attaagttacacgag

SEQ ID NO: 1112627 - DNA, 15 bp, Homo sapiens
aattaagttacacga

SEQ ID NO: 1112628 - DNA, 15 bp, Homo sapiens
caattaagttacacg

SEQ ID NO: 1112629 - DNA, 15 bp, Homo sapiens
acaattaagttacac

SEQ ID NO: 1112630 - DNA, 15 bp, Homo sapiens
tacaattaagttaca

SEQ ID NO: 1112631 - DNA, 15 bp, Homo sapiens
ctacaattaagttac

SEQ ID NO: 1112632 - DNA, 15 bp, Homo sapiens
tctacaattaagtta

SEQ ID NO: 1112633 - DNA, 15 bp, Homo sapiens
ttctacaattaagtt

SEQ ID NO: 1112634 - DNA, 15 bp, Homo sapiens
cttctacaattaagt

SEQ ID NO: 1112635 - DNA, 15 bp, Homo sapiens
tcttctacaattaag

SEQ ID NO: 1112636 - DNA, 15 bp, Homo sapiens
ctcttctacaattaa

SEQ ID NO: 1112637 - DNA, 15 bp, Homo sapiens
tctcttctacaatta

SEQ ID NO: 1112638 - DNA, 15 bp, Homo sapiens
gtctcttctacaatt

SEQ ID NO: 1112639 - DNA, 15 bp, Homo sapiens
tgtctcttctacaat

SEQ ID NO: 1112640 - DNA, 15 bp, Homo sapiens
atgtctcttctacaa

SEQ ID NO: 1112641 - DNA, 15 bp, Homo sapiens
tatgtctcttctaca

SEQ ID NO: 1112642 - DNA, 15 bp, Homo sapiens
gtatgtctcttctac

SEQ ID NO: 1112643 - DNA, 15 bp, Homo sapiens
cagtatgtctcttct

SEQ ID NO: 1112644 - DNA, 15 bp, Homo sapiens
acagtatgtctcttc

SEQ ID NO: 1112645 - DNA, 15 bp, Homo sapiens
tacagtatgtctctt

SEQ ID NO: 1112646 - DNA, 15 bp, Homo sapiens
ttacagtatgtctct

SEQ ID NO: 1112647 - DNA, 15 bp, Homo sapiens
attacagtatgtctc

SEQ ID NO: 1112648 - DNA, 15 bp, Homo sapiens
aattacagtatgtct

SEQ ID NO: 1112649 - DNA, 15 bp, Homo sapiens
aaattacagtatgtc

SEQ ID NO: 1112650 - DNA, 15 bp, Homo sapiens
gaaattacagtatgt

SEQ ID NO: 1112651 - DNA, 15 bp, Homo sapiens
agaaattacagtatg

SEQ ID NO: 1112652 - DNA, 15 bp, Homo sapiens
cagaaattacagtat

SEQ ID NO: 1112653 - DNA, 15 bp, Homo sapiens
gcagaaattacagta

SEQ ID NO: 1112654 - DNA, 15 bp, Homo sapiens
ggcagaaattacagt

SEQ ID NO: 1112655 - DNA, 15 bp, Homo sapiens
tggcagaaattacag

SEQ ID NO: 1112656 - DNA, 15 bp, Homo sapiens
atggcagaaattaca

SEQ ID NO: 1112657 - DNA, 15 bp, Homo sapiens
tatggcagaaattac

SEQ ID NO: 1112658 - DNA, 15 bp, Homo sapiens
atatggcagaaatta

SEQ ID NO: 1112659 - DNA, 15 bp, Homo sapiens
aatatggcagaaatt

SEQ ID NO: 1112660 - DNA, 15 bp, Homo sapiens
gaatatggcagaaat

SEQ ID NO: 1112661 - DNA, 15 bp, Homo sapiens
agaatatggcagaaa

SEQ ID NO: 1112662 - DNA, 15 bp, Homo sapiens
tagaatatggcagaa

SEQ ID NO: 1112663 - DNA, 15 bp, Homo sapiens
atagaatatggcaga

SEQ ID NO: 1112664 - DNA, 15 bp, Homo sapiens
catagaatatggcag

SEQ ID NO: 1112665 - DNA, 15 bp, Homo sapiens
ccatagaatatggca

SEQ ID NO: 1112666 - DNA, 15 bp, Homo sapiens
cccatagaatatggc

SEQ ID NO: 1112667 - DNA, 15 bp, Homo sapiens
acccatagaatatgg

SEQ ID NO: 1112668 - DNA, 15 bp, Homo sapiens
gacccatagaatatg

SEQ ID NO: 1112669 - DNA, 15 bp, Homo sapiens
tgacccatagaatat

SEQ ID NO: 1112670 - DNA, 15 bp, Homo sapiens
gtgacccatagaata

SEQ ID NO: 1112671 - DNA, 15 bp, Homo sapiens
tgtgacccatagaat

SEQ ID NO: 1112672 - DNA, 15 bp, Homo sapiens
ctgtgacccatagaa

SEQ ID NO: 1112673 - DNA, 15 bp, Homo sapiens
tctgtgacccataga

SEQ ID NO: 1112674 - DNA, 15 bp, Homo sapiens
ttctgtgacccatag

SEQ ID NO: 1112675 - DNA, 15 bp, Homo sapiens
tttctgtgacccata

SEQ ID NO: 1112676 - DNA, 15 bp, Homo sapiens
gtttctgtgacccat

SEQ ID NO: 1112677 - DNA, 15 bp, Homo sapiens
ggtttctgtgaccca

SEQ ID NO: 1112678 - DNA, 15 bp, Homo sapiens
tggtttctgtgaccc

SEQ ID NO: 1112679 - DNA, 15 bp, Homo sapiens
ttggtttctgtgacc

SEQ ID NO: 1112680 - DNA, 15 bp, Homo sapiens
gttggtttctgtgac

SEQ ID NO: 1112681 - DNA, 15 bp, Homo sapiens
ggttggtttctgtga

SEQ ID NO: 1112682 - DNA, 15 bp, Homo sapiens
gggttggtttctgtg

SEQ ID NO: 1112683 - DNA, 15 bp, Homo sapiens
agggttggtttctgt

SEQ ID NO: 1112684 - DNA, 15 bp, Homo sapiens
cagggttggtttctg

SEQ ID NO: 1112685 - DNA, 15 bp, Homo sapiens
ccagggttggtttct

SEQ ID NO: 1112686 - DNA, 15 bp, Homo sapiens
accagggttggtttc

SEQ ID NO: 1112687 - DNA, 15 bp, Homo sapiens
caccagggttggttt

SEQ ID NO: 1112688 - DNA, 15 bp, Homo sapiens
acaccagggttggtt

SEQ ID NO: 1112689 - DNA, 15 bp, Homo sapiens
tacaccagggttggt

SEQ ID NO: 1112690 - DNA, 15 bp, Homo sapiens
ttacaccagggttgg

SEQ ID NO: 1112691 - DNA, 15 bp, Homo sapiens
attacaccagggttg

SEQ ID NO: 1112692 - DNA, 15 bp, Homo sapiens
aattacaccagggtt

SEQ ID NO: 1112693 - DNA, 15 bp, Homo sapiens
aaattacaccagggt

SEQ ID NO: 1112694 - DNA, 15 bp, Homo sapiens
caaattacaccaggg

SEQ ID NO: 1112695 - DNA, 15 bp, Homo sapiens
ccaaattacaccagg

SEQ ID NO: 1112696 - DNA, 15 bp, Homo sapiens
tccaaattacaccag

SEQ ID NO: 1112697 - DNA, 15 bp, Homo sapiens
ttccaaattacacca

SEQ ID NO: 1112698 - DNA, 15 bp, Homo sapiens
cttccaaattacacc

SEQ ID NO: 1112699 - DNA, 15 bp, Homo sapiens
ccttccaaattacac

SEQ ID NO: 1112700 - DNA, 15 bp, Homo sapiens
tccttccaaattaca

SEQ ID NO: 1112701 - DNA, 15 bp, Homo sapiens
ctccttccaaattac

SEQ ID NO: 1112702 - DNA, 15 bp, Homo sapiens
actccttccaaatta

SEQ ID NO: 1112703 - DNA, 15 bp, Homo sapiens
gactccttccaaatt

SEQ ID NO: 1112704 - DNA, 15 bp, Homo sapiens
agactccttccaaat

SEQ ID NO: 1112705 - DNA, 15 bp, Homo sapiens
tttagactccttcca

SEQ ID NO: 1112706 - DNA, 15 bp, Homo sapiens
gtttagactccttcc

SEQ ID NO: 1112707 - DNA, 15 bp, Homo sapiens
tgtttagactccttc

SEQ ID NO: 1112708 - DNA, 15 bp, Homo sapiens
ttgtttagactcctt

SEQ ID NO: 1112709 - DNA, 15 bp, Homo sapiens
cttgtttagactcct

SEQ ID NO: 1112710 - DNA, 15 bp, Homo sapiens
acttgtttagactcc

SEQ ID NO: 1112711 - DNA, 15 bp, Homo sapiens
cacttgtttagactc

SEQ ID NO: 1112712 - DNA, 15 bp, Homo sapiens
acacttgtttagact

SEQ ID NO: 1112713 - DNA, 15 bp, Homo sapiens
cacacttgtttagac

SEQ ID NO: 1112714 - DNA, 15 bp, Homo sapiens
tcacacttgtttaga

SEQ ID NO: 1112715 - DNA, 15 bp, Homo sapiens
ttcacacttgtttag

SEQ ID NO: 1112716 - DNA, 15 bp, Homo sapiens
attcacacttgttta

SEQ ID NO: 1112717 - DNA, 15 bp, Homo sapiens
tattcacacttgttt

SEQ ID NO: 1112718 - DNA, 15 bp, Homo sapiens
atattcacacttgtt

SEQ ID NO: 1112719 - DNA, 15 bp, Homo sapiens
aatattcacacttgt

SEQ ID NO: 1112720 - DNA, 15 bp, Homo sapiens
caatattcacacttg

SEQ ID NO: 1112721 - DNA, 15 bp, Homo sapiens
gcaatattcacactt

SEQ ID NO: 1112722 - DNA, 15 bp, Homo sapiens
ggcaatattcacact

SEQ ID NO: 1112723 - DNA, 15 bp, Homo sapiens
tggcaatattcacac

SEQ ID NO: 1112724 - DNA, 15 bp, Homo sapiens
ctggcaatattcaca

SEQ ID NO: 1112725 - DNA, 15 bp, Homo sapiens
tctggcaatattcac

SEQ ID NO: 1112726 - DNA, 15 bp, Homo sapiens
atctggcaatattca

SEQ ID NO: 1112727 - DNA, 15 bp, Homo sapiens
catctggcaatattc

SEQ ID NO: 1112728 - DNA, 15 bp, Homo sapiens
tcatctggcaatatt

SEQ ID NO: 1112729 - DNA, 15 bp, Homo sapiens
ctcatctggcaatat

SEQ ID NO: 1112730 - DNA, 15 bp, Homo sapiens
tctcatctggcaata

SEQ ID NO: 1112731 - DNA, 15 bp, Homo sapiens
ttctcatctggcaat

SEQ ID NO: 1112732 - DNA, 15 bp, Homo sapiens
attctcatctggcaa

SEQ ID NO: 1112733 - DNA, 15 bp, Homo sapiens
aattctcatctggca

SEQ ID NO: 1112734 - DNA, 15 bp, Homo sapiens
aaattctcatctggc

SEQ ID NO: 1112735 - DNA, 15 bp, Homo sapiens
aaaattctcatctgg

SEQ ID NO: 1112736 - DNA, 15 bp, Homo sapiens
taaaattctcatctg

SEQ ID NO: 1112737 - DNA, 15 bp, Homo sapiens
ctaaaattctcatct

SEQ ID NO: 1112738 - DNA, 15 bp, Homo sapiens
cctaaaattctcatc

SEQ ID NO: 1112739 - DNA, 15 bp, Homo sapiens
ccctaaaattctcat

SEQ ID NO: 1112740 - DNA, 15 bp, Homo sapiens
cccctaaaattctca

SEQ ID NO: 1112741 - DNA, 15 bp, Homo sapiens
gcccctaaaattctc

SEQ ID NO: 1112742 - DNA, 15 bp, Homo sapiens
agcccctaaaattct

SEQ ID NO: 1112743 - DNA, 15 bp, Homo sapiens
aagcccctaaaattc

SEQ ID NO: 1112744 - DNA, 15 bp, Homo sapiens
aaagcccctaaaatt

SEQ ID NO: 1112745 - DNA, 15 bp, Homo sapiens
aaaagcccctaaaat

SEQ ID NO: 1112746 - DNA, 15 bp, Homo sapiens
aaaaagcccctaaaa

SEQ ID NO: 1112747 - DNA, 15 bp, Homo sapiens
caaaaagcccctaaa

SEQ ID NO: 1112748 - DNA, 15 bp, Homo sapiens
ccaaaaagcccctaa

SEQ ID NO: 1112749 - DNA, 15 bp, Homo sapiens
tccaaaaagccccta

SEQ ID NO: 1112750 - DNA, 15 bp, Homo sapiens
ctccaaaaagcccct

SEQ ID NO: 1112751 - DNA, 15 bp, Homo sapiens
cctccaaaaagcccc

SEQ ID NO: 1112752 - DNA, 15 bp, Homo sapiens
gcctccaaaaagccc

SEQ ID NO: 1112753 - DNA, 15 bp, Homo sapiens
agcctccaaaaagcc

SEQ ID NO: 1112754 - DNA, 15 bp, Homo sapiens
cagcctccaaaaagc

SEQ ID NO: 1112755 - DNA, 15 bp, Homo sapiens
tcagcctccaaaaag

SEQ ID NO: 1112756 - DNA, 15 bp, Homo sapiens
atcagcctccaaaaa

SEQ ID NO: 1112757 - DNA, 15 bp, Homo sapiens
aatcagcctccaaaa

SEQ ID NO: 1112758 - DNA, 15 bp, Homo sapiens
taatcagcctccaaa

SEQ ID NO: 1112759 - DNA, 15 bp, Homo sapiens
gtaatcagcctccaa

SEQ ID NO: 1112760 - DNA, 15 bp, Homo sapiens
agtaatcagcctcca

SEQ ID NO: 1112761 - DNA, 15 bp, Homo sapiens
tagtaatcagcctcc

SEQ ID NO: 1112762 - DNA, 15 bp, Homo sapiens
gtagtaatcagcctc

SEQ ID NO: 1112763 - DNA, 15 bp, Homo sapiens
agtagtaatcagcct

SEQ ID NO: 1112764 - DNA, 15 bp, Homo sapiens
cagtagtaatcagcc

SEQ ID NO: 1112765 - DNA, 15 bp, Homo sapiens
gcagtagtaatcagc

SEQ ID NO: 1112766 - DNA, 15 bp, Homo sapiens
cgcagtagtaatcag

SEQ ID NO: 1112767 - DNA, 15 bp, Homo sapiens
ccgcagtagtaatca

SEQ ID NO: 1112768 - DNA, 15 bp, Homo sapiens
cccgcagtagtaatc

SEQ ID NO: 1112769 - DNA, 15 bp, Homo sapiens
gcccgcagtagtaat

SEQ ID NO: 1112770 - DNA, 15 bp, Homo sapiens
tgcccgcagtagtaa

SEQ ID NO: 1112771 - DNA, 15 bp, Homo sapiens
atgcccgcagtagta

SEQ ID NO: 1112772 - DNA, 15 bp, Homo sapiens
aatgcccgcagtagt

SEQ ID NO: 1112773 - DNA, 15 bp, Homo sapiens
caatgcccgcagtag

SEQ ID NO: 1112774 - DNA, 15 bp, Homo sapiens
ccaatgcccgcagta

SEQ ID NO: 1112775 - DNA, 15 bp, Homo sapiens
cccaatgcccgcagt

SEQ ID NO: 1112776 - DNA, 15 bp, Homo sapiens
ccccaatgcccgcag

SEQ ID NO: 1112777 - DNA, 15 bp, Homo sapiens
tccccaatgcccgca

SEQ ID NO: 1112778 - DNA, 15 bp, Homo sapiens
ctccccaatgcccgc

SEQ ID NO: 1112779 - DNA, 15 bp, Homo sapiens
gctccccaatgcccg

SEQ ID NO: 1112780 - DNA, 15 bp, Homo sapiens
agctccccaatgccc

SEQ ID NO: 1112781 - DNA, 15 bp, Homo sapiens
gagctccccaatgcc

SEQ ID NO: 1112782 - DNA, 15 bp, Homo sapiens
tgagctccccaatgc

SEQ ID NO: 1112783 - DNA, 15 bp, Homo sapiens
ttgagctccccaatg

SEQ ID NO: 1112784 - DNA, 15 bp, Homo sapiens
cttgagctccccaat

SEQ ID NO: 1112785 - DNA, 15 bp, Homo sapiens
acttgagctccccaa

SEQ ID NO: 1112786 - DNA, 15 bp, Homo sapiens
gacttgagctcccca

SEQ ID NO: 1112787 - DNA, 15 bp, Homo sapiens
agacttgagctcccc

SEQ ID NO: 1112788 - DNA, 15 bp, Homo sapiens
aagacttgagctccc

SEQ ID NO: 1112789 - DNA, 15 bp, Homo sapiens
gaagacttgagctcc

SEQ ID NO: 1112790 - DNA, 15 bp, Homo sapiens
tgaagacttgagctc

SEQ ID NO: 1112791 - DNA, 15 bp, Homo sapiens
gtgaagacttgagct

SEQ ID NO: 1112792 - DNA, 15 bp, Homo sapiens
agtgaagacttgagc

SEQ ID NO: 1112793 - DNA, 15 bp, Homo sapiens
aagtgaagacttgag

SEQ ID NO: 1112794 - DNA, 15 bp, Homo sapiens
gaagtgaagacttga

SEQ ID NO: 1112795 - DNA, 15 bp, Homo sapiens
ggaagtgaagacttg

SEQ ID NO: 1112796 - DNA, 15 bp, Homo sapiens
aggaagtgaagactt

SEQ ID NO: 1112797 - DNA, 15 bp, Homo sapiens
gaggaagtgaagact

SEQ ID NO: 1112798 - DNA, 15 bp, Homo sapiens
agaggaagtgaagac

SEQ ID NO: 1112799 - DNA, 15 bp, Homo sapiens
gagaggaagtgaaga

SEQ ID NO: 1112800 - DNA, 15 bp, Homo sapiens
tgagaggaagtgaag

SEQ ID NO: 1112801 - DNA, 15 bp, Homo sapiens
atgagaggaagtgaa

SEQ ID NO: 1112802 - DNA, 15 bp, Homo sapiens
tatgagaggaagtga

SEQ ID NO: 1112803 - DNA, 15 bp, Homo sapiens
gtatgagaggaagtg

SEQ ID NO: 1112804 - DNA, 15 bp, Homo sapiens
tgtatgagaggaagt

SEQ ID NO: 1112805 - DNA, 15 bp, Homo sapiens
ctgtatgagaggaag

SEQ ID NO: 1112806 - DNA, 15 bp, Homo sapiens
tctgtatgagaggaa

SEQ ID NO: 1112807 - DNA, 15 bp, Homo sapiens
atctgtatgagagga

SEQ ID NO: 1112808 - DNA, 15 bp, Homo sapiens
tatctgtatgagagg

SEQ ID NO: 1112809 - DNA, 15 bp, Homo sapiens
ttatctgtatgagag

SEQ ID NO: 1112810 - DNA, 15 bp, Homo sapiens
tttatctgtatgaga

SEQ ID NO: 1112811 - DNA, 15 bp, Homo sapiens
atttatctgtatgag

SEQ ID NO: 1112812 - DNA, 15 bp, Homo sapiens
gatttatctgtatga

SEQ ID NO: 1112813 - DNA, 15 bp, Homo sapiens
tgatttatctgtatg

SEQ ID NO: 1112814 - DNA, 15 bp, Homo sapiens
ttgatttatctgtat

SEQ ID NO: 1112815 - DNA, 15 bp, Homo sapiens
attgatttatctgta

SEQ ID NO: 1112816 - DNA, 15 bp, Homo sapiens
cattgatttatctgt

SEQ ID NO: 1112817 - DNA, 15 bp, Homo sapiens
gcattgatttatctg

SEQ ID NO: 1112818 - DNA, 15 bp, Homo sapiens
tgcattgatttatct

SEQ ID NO: 1112819 - DNA, 15 bp, Homo sapiens
ctgcattgatttatc

SEQ ID NO: 1112820 - DNA, 15 bp, Homo sapiens
tctgcattgatttat

SEQ ID NO: 1112821 - DNA, 15 bp, Homo sapiens
ttctgcattgattta

SEQ ID NO: 1112822 - DNA, 15 bp, Homo sapiens
tttctgcattgattt

SEQ ID NO: 1112823 - DNA, 15 bp, Homo sapiens
atttctgcattgatt

SEQ ID NO: 1112824 - DNA, 15 bp, Homo sapiens
gatttctgcattgat

SEQ ID NO: 1112825 - DNA, 15 bp, Homo sapiens
agatttctgcattga

SEQ ID NO: 1112826 - DNA, 15 bp, Homo sapiens
tagatttctgcattg

SEQ ID NO: 1112827 - DNA, 15 bp, Homo sapiens
ctagatttctgcatt

SEQ ID NO: 1112828 - DNA, 15 bp, Homo sapiens
cctagatttctgcat

SEQ ID NO: 1112829 - DNA, 15 bp, Homo sapiens
gcctagatttctgca

SEQ ID NO: 1112830 - DNA, 15 bp, Homo sapiens
ggcctagatttctgc

SEQ ID NO: 1112831 - DNA, 15 bp, Homo sapiens
aggcctagatttctg

SEQ ID NO: 1112832 - DNA, 15 bp, Homo sapiens
caggcctagatttct

SEQ ID NO: 1112833 - DNA, 15 bp, Homo sapiens
acaggcctagatttc

SEQ ID NO: 1112834 - DNA, 15 bp, Homo sapiens
gacaggcctagattt

SEQ ID NO: 1112835 - DNA, 15 bp, Homo sapiens
ggacaggcctagatt

SEQ ID NO: 1112836 - DNA, 15 bp, Homo sapiens
aggacaggcctagat

SEQ ID NO: 1112837 - DNA, 15 bp, Homo sapiens
aaggacaggcctaga

SEQ ID NO: 1112838 - DNA, 15 bp, Homo sapiens
aaaggacaggcctag

SEQ ID NO: 1112839 - DNA, 15 bp, Homo sapiens
gaaaggacaggccta

SEQ ID NO: 1112840 - DNA, 15 bp, Homo sapiens
tgaaaggacaggcct

SEQ ID NO: 1112841 - DNA, 15 bp, Homo sapiens
gtgaaaggacaggcc

SEQ ID NO: 1112842 - DNA, 15 bp, Homo sapiens
agtgaaaggacaggc

SEQ ID NO: 1112843 - DNA, 15 bp, Homo sapiens
aagtgaaaggacagg

SEQ ID NO: 1112844 - DNA, 15 bp, Homo sapiens
caagtgaaaggacag

SEQ ID NO: 1112845 - DNA, 15 bp, Homo sapiens
ccaagtgaaaggaca

SEQ ID NO: 1112846 - DNA, 15 bp, Homo sapiens
tccaagtgaaaggac

SEQ ID NO: 1112847 - DNA, 15 bp, Homo sapiens
atccaagtgaaagga

SEQ ID NO: 1112848 - DNA, 15 bp, Homo sapiens
aatccaagtgaaagg

SEQ ID NO: 1112849 - DNA, 15 bp, Homo sapiens
aaatccaagtgaaag

SEQ ID NO: 1112850 - DNA, 15 bp, Homo sapiens
gaaatccaagtgaaa

SEQ ID NO: 1112851 - DNA, 15 bp, Homo sapiens
tgaaatccaagtgaa

SEQ ID NO: 1112852 - DNA, 15 bp, Homo sapiens
ctgaaatccaagtga

SEQ ID NO: 1112853 - DNA, 15 bp, Homo sapiens
actgaaatccaagtg

SEQ ID NO: 1112854 - DNA, 15 bp, Homo sapiens
gactgaaatccaagt

SEQ ID NO: 1112855 - DNA, 15 bp, Homo sapiens
agactgaaatccaag

SEQ ID NO: 1112856 - DNA, 15 bp, Homo sapiens
tagactgaaatccaa

SEQ ID NO: 1112857 - DNA, 15 bp, Homo sapiens
atagactgaaatcca

SEQ ID NO: 1112858 - DNA, 15 bp, Homo sapiens
catagactgaaatcc

SEQ ID NO: 1112859 - DNA, 15 bp, Homo sapiens
acatagactgaaatc

SEQ ID NO: 1112860 - DNA, 15 bp, Homo sapiens
aacatagactgaaat

SEQ ID NO: 1112861 - DNA, 15 bp, Homo sapiens
gaacatagactgaaa

SEQ ID NO: 1112862 - DNA, 15 bp, Homo sapiens
agaacatagactgaa

SEQ ID NO: 1112863 - DNA, 15 bp, Homo sapiens
aagaacatagactga

SEQ ID NO: 1112864 - DNA, 15 bp, Homo sapiens
taagaacatagactg

SEQ ID NO: 1112865 - DNA, 15 bp, Homo sapiens
ctaagaacatagact

SEQ ID NO: 1112866 - DNA, 15 bp, Homo sapiens
gctaagaacatagac

SEQ ID NO: 1112867 - DNA, 15 bp, Homo sapiens
tgctaagaacataga

SEQ ID NO: 1112868 - DNA, 15 bp, Homo sapiens
ttgctaagaacatag

SEQ ID NO: 1112869 - DNA, 15 bp, Homo sapiens
attgctaagaacata

SEQ ID NO: 1112870 - DNA, 15 bp, Homo sapiens
tattgctaagaacat

SEQ ID NO: 1112871 - DNA, 15 bp, Homo sapiens
atattgctaagaaca

SEQ ID NO: 1112872 - DNA, 15 bp, Homo sapiens
tatattgctaagaac

SEQ ID NO: 1112873 - DNA, 15 bp, Homo sapiens
atatattgctaagaa

SEQ ID NO: 1112874 - DNA, 15 bp, Homo sapiens
tatatattgctaaga

SEQ ID NO: 1112875 - DNA, 15 bp, Homo sapiens
atatatattgctaag

SEQ ID NO: 1112876 - DNA, 15 bp, Homo sapiens
aatatatattgctaa

SEQ ID NO: 1112877 - DNA, 15 bp, Homo sapiens
gaatatatattgcta

SEQ ID NO: 1112878 - DNA, 15 bp, Homo sapiens
tgaatatatattgct

SEQ ID NO: 1112879 - DNA, 15 bp, Homo sapiens
ctgaatatatattgc

SEQ ID NO: 1112880 - DNA, 15 bp, Homo sapiens
actgaatatatattg

SEQ ID NO: 1112881 - DNA, 15 bp, Homo sapiens
aactgaatatatatt

SEQ ID NO: 1112882 - DNA, 15 bp, Homo sapiens
aaactgaatatatat

SEQ ID NO: 1112883 - DNA, 15 bp, Homo sapiens
caaactgaatatata

SEQ ID NO: 1112884 - DNA, 15 bp, Homo sapiens
acaaactgaatatat

SEQ ID NO: 1112885 - DNA, 15 bp, Homo sapiens
tacaaactgaatata

SEQ ID NO: 1112886 - DNA, 15 bp, Homo sapiens
atacaaactgaatat

SEQ ID NO: 1112887 - DNA, 15 bp, Homo sapiens
tatacaaactgaata

SEQ ID NO: 1112888 - DNA, 15 bp, Homo sapiens
ttatacaaactgaat

SEQ ID NO: 1112889 - DNA, 15 bp, Homo sapiens
cttatacaaactgaa

SEQ ID NO: 1112890 - DNA, 15 bp, Homo sapiens
gcttatacaaactga

SEQ ID NO: 1112891 - DNA, 15 bp, Homo sapiens
tgcttatacaaactg

SEQ ID NO: 1112892 - DNA, 15 bp, Homo sapiens
ttgcttatacaaact

SEQ ID NO: 1112893 - DNA, 15 bp, Homo sapiens
cttgcttatacaaac

SEQ ID NO: 1112894 - DNA, 15 bp, Homo sapiens
gcttgcttatacaaa

SEQ ID NO: 1112895 - DNA, 15 bp, Homo sapiens
tgcttgcttatacaa

SEQ ID NO: 1112896 - DNA, 15 bp, Homo sapiens
gtgcttgcttataca

SEQ ID NO: 1112897 - DNA, 15 bp, Homo sapiens
agtgcttgcttatac

SEQ ID NO: 1112898 - DNA, 15 bp, Homo sapiens
tagtgcttgcttata

SEQ ID NO: 1112899 - DNA, 15 bp, Homo sapiens
atagtgcttgcttat

SEQ ID NO: 1112900 - DNA, 15 bp, Homo sapiens
aatagtgcttgctta

SEQ ID NO: 1112901 - DNA, 15 bp, Homo sapiens
aaatagtgcttgctt

SEQ ID NO: 1112902 - DNA, 15 bp, Homo sapiens
aaaatagtgcttgct

SEQ ID NO: 1112903 - DNA, 15 bp, Homo sapiens
caaaatagtgcttgc

SEQ ID NO: 1112904 - DNA, 15 bp, Homo sapiens
acaaaatagtgcttg

SEQ ID NO: 1112905 - DNA, 15 bp, Homo sapiens
tacaaaatagtgctt

SEQ ID NO: 1112906 - DNA, 15 bp, Homo sapiens
ctacaaaatagtgct

SEQ ID NO: 1112907 - DNA, 15 bp, Homo sapiens
gctacaaaatagtgc

SEQ ID NO: 1112908 - DNA, 15 bp, Homo sapiens
agctacaaaatagtg

SEQ ID NO: 1112909 - DNA, 15 bp, Homo sapiens
tagctacaaaatagt

SEQ ID NO: 1112910 - DNA, 15 bp, Homo sapiens
ctagctacaaaatag

SEQ ID NO: 1112911 - DNA, 15 bp, Homo sapiens
tctagctacaaaata

SEQ ID NO: 1112912 - DNA, 15 bp, Homo sapiens
gtctagctacaaaat

SEQ ID NO: 1112913 - DNA, 15 bp, Homo sapiens
tgtctagctacaaaa

SEQ ID NO: 1112914 - DNA, 15 bp, Homo sapiens
ctgtctagctacaaa

SEQ ID NO: 1112915 - DNA, 15 bp, Homo sapiens
actgtctagctacaa

SEQ ID NO: 1112916 - DNA, 15 bp, Homo sapiens
aactgtctagctaca

SEQ ID NO: 1112917 - DNA, 15 bp, Homo sapiens
aaactgtctagctac

SEQ ID NO: 1112918 - DNA, 15 bp, Homo sapiens
taaactgtctagcta

SEQ ID NO: 1112919 - DNA, 15 bp, Homo sapiens
ctaaactgtctagct

SEQ ID NO: 1112920 - DNA, 15 bp, Homo sapiens
cctaaactgtctagc

SEQ ID NO: 1112921 - DNA, 15 bp, Homo sapiens
gcctaaactgtctag

SEQ ID NO: 1112922 - DNA, 15 bp, Homo sapiens
agcctaaactgtcta

SEQ ID NO: 1112923 - DNA, 15 bp, Homo sapiens
tagcctaaactgtct

SEQ ID NO: 1112924 - DNA, 15 bp, Homo sapiens
atagcctaaactgtc

SEQ ID NO: 1112925 - DNA, 15 bp, Homo sapiens
tatagcctaaactgt

SEQ ID NO: 1112926 - DNA, 15 bp, Homo sapiens
atatagcctaaactg

SEQ ID NO: 1112927 - DNA, 15 bp, Homo sapiens
tatatagcctaaact

SEQ ID NO: 1112928 - DNA, 15 bp, Homo sapiens
gtatatagcctaaac

SEQ ID NO: 1112929 - DNA, 15 bp, Homo sapiens
agtatatagcctaaa

SEQ ID NO: 1112930 - DNA, 15 bp, Homo sapiens
aagtatatagcctaa

SEQ ID NO: 1112931 - DNA, 15 bp, Homo sapiens
aaagtatatagccta

SEQ ID NO: 1112932 - DNA, 15 bp, Homo sapiens
aaaagtatatagcct

SEQ ID NO: 1112933 - DNA, 15 bp, Homo sapiens
caaaagtatatagcc

SEQ ID NO: 1112934 - DNA, 15 bp, Homo sapiens
acaaaagtatatagc

SEQ ID NO: 1112935 - DNA, 15 bp, Homo sapiens
tacaaaagtatatag

SEQ ID NO: 1112936 - DNA, 15 bp, Homo sapiens
ttacaaaagtatata

SEQ ID NO: 1112937 - DNA, 15 bp, Homo sapiens
attacaaaagtatat

SEQ ID NO: 1112938 - DNA, 15 bp, Homo sapiens
cattacaaaagtata

SEQ ID NO: 1112939 - DNA, 15 bp, Homo sapiens
ccattacaaaagtat

SEQ ID NO: 1112940 - DNA, 15 bp, Homo sapiens
gccattacaaaagta

SEQ ID NO: 1112941 - DNA, 15 bp, Homo sapiens
agccattacaaaagt

SEQ ID NO: 1112942 - DNA, 15 bp, Homo sapiens
aagccattacaaaag

SEQ ID NO: 1112943 - DNA, 15 bp, Homo sapiens
aaagccattacaaaa

SEQ ID NO: 1112944 - DNA, 15 bp, Homo sapiens
caaagccattacaaa

SEQ ID NO: 1112945 - DNA, 15 bp, Homo sapiens
acaaagccattacaa

SEQ ID NO: 1112946 - DNA, 15 bp, Homo sapiens
aacaaagccattaca

SEQ ID NO: 1112947 - DNA, 15 bp, Homo sapiens
caacaaagccattac

SEQ ID NO: 1112948 - DNA, 15 bp, Homo sapiens
tcaacaaagccatta

SEQ ID NO: 1112949 - DNA, 15 bp, Homo sapiens
ctcaacaaagccatt

SEQ ID NO: 1112950 - DNA, 15 bp, Homo sapiens
tctcaacaaagccat

SEQ ID NO: 1112951 - DNA, 15 bp, Homo sapiens
atctcaacaaagcca

SEQ ID NO: 1112952 - DNA, 15 bp, Homo sapiens
tatctcaacaaagcc

SEQ ID NO: 1112953 - DNA, 15 bp, Homo sapiens
gtatctcaacaaagc

SEQ ID NO: 1112954 - DNA, 15 bp, Homo sapiens
tgtatctcaacaaag

SEQ ID NO: 1112955 - DNA, 15 bp, Homo sapiens
ttgtatctcaacaaa

SEQ ID NO: 1112956 - DNA, 15 bp, Homo sapiens
attgtatctcaacaa

SEQ ID NO: 1112957 - DNA, 15 bp, Homo sapiens
aattgtatctcaaca

SEQ ID NO: 1112958 - DNA, 15 bp, Homo sapiens
gaattgtatctcaac

SEQ ID NO: 1112959 - DNA, 15 bp, Homo sapiens
tgaattgtatctcaa

SEQ ID NO: 1112960 - DNA, 15 bp, Homo sapiens
gtgaattgtatctca

SEQ ID NO: 1112961 - DNA, 15 bp, Homo sapiens
tgtgaattgtatctc

SEQ ID NO: 1112962 - DNA, 15 bp, Homo sapiens
atgtgaattgtatct

SEQ ID NO: 1112963 - DNA, 15 bp, Homo sapiens
tatgtgaattgtatc

SEQ ID NO: 1112964 - DNA, 15 bp, Homo sapiens
gtatgtgaattgtat

SEQ ID NO: 1112965 - DNA, 15 bp, Homo sapiens
agtatgtgaattgta

SEQ ID NO: 1112966 - DNA, 15 bp, Homo sapiens
tagtatgtgaattgt

SEQ ID NO: 1112967 - DNA, 15 bp, Homo sapiens
atagtatgtgaattg

SEQ ID NO: 1112968 - DNA, 15 bp, Homo sapiens
tatagtatgtgaatt

SEQ ID NO: 1112969 - DNA, 15 bp, Homo sapiens
ttatagtatgtgaat

SEQ ID NO: 1112970 - DNA, 15 bp, Homo sapiens
tttatagtatgtgaa

SEQ ID NO: 1112971 - DNA, 15 bp, Homo sapiens
ttttatagtatgtga

SEQ ID NO: 1112972 - DNA, 15 bp, Homo sapiens
attttatagtatgtg

SEQ ID NO: 1112973 - DNA, 15 bp, Homo sapiens
aattttatagtatgt

SEQ ID NO: 1112974 - DNA, 15 bp, Homo sapiens
gaattttatagtatg

SEQ ID NO: 1112975 - DNA, 15 bp, Homo sapiens
tgaattttatagtat

SEQ ID NO: 1112976 - DNA, 15 bp, Homo sapiens
gtgaattttatagta

SEQ ID NO: 1112977 - DNA, 15 bp, Homo sapiens
ggtgaattttatagt

SEQ ID NO: 1112978 - DNA, 15 bp, Homo sapiens
gggtgaattttatag

SEQ ID NO: 1112979 - DNA, 15 bp, Homo sapiens
tgggtgaattttata

SEQ ID NO: 1112980 - DNA, 15 bp, Homo sapiens
gtgggtgaattttat

SEQ ID NO: 1112981 - DNA, 15 bp, Homo sapiens
agtgggtgaatttta

SEQ ID NO: 1112982 - DNA, 15 bp, Homo sapiens
gagtgggtgaatttt

SEQ ID NO: 1112983 - DNA, 15 bp, Homo sapiens
cgagtgggtgaattt

SEQ ID NO: 1112984 - DNA, 15 bp, Homo sapiens
tcgagtgggtgaatt

SEQ ID NO: 1112985 - DNA, 15 bp, Homo sapiens
ttcgagtgggtgaat

SEQ ID NO: 1112986 - DNA, 15 bp, Homo sapiens
cttcgagtgggtgaa

SEQ ID NO: 1112987 - DNA, 15 bp, Homo sapiens
acttcgagtgggtga

SEQ ID NO: 1112988 - DNA, 15 bp, Homo sapiens
cacttcgagtgggtg

SEQ ID NO: 1112989 - DNA, 15 bp, Homo sapiens
acacttcgagtgggt

SEQ ID NO: 1112990 - DNA, 15 bp, Homo sapiens
tacacttcgagtggg

SEQ ID NO: 1112991 - DNA, 15 bp, Homo sapiens
gtacacttcgagtgg

SEQ ID NO: 1112992 - DNA, 15 bp, Homo sapiens
tgtacacttcgagtg

SEQ ID NO: 1112993 - DNA, 15 bp, Homo sapiens
ttgtacacttcgagt

SEQ ID NO: 1112994 - DNA, 15 bp, Homo sapiens
attgtacacttcgag

SEQ ID NO: 1112995 - DNA, 15 bp, Homo sapiens
aattgtacacttcga

SEQ ID NO: 1112996 - DNA, 15 bp, Homo sapiens
taattgtacacttcg

SEQ ID NO: 1112997 - DNA, 15 bp, Homo sapiens
ctaattgtacacttc

SEQ ID NO: 1112998 - DNA, 15 bp, Homo sapiens
tctaattgtacactt

SEQ ID NO: 1112999 - DNA, 15 bp, Homo sapiens
atctaattgtacact

SEQ ID NO: 1113000 - DNA, 15 bp, Homo sapiens
catctaattgtacac

SEQ ID NO: 1113001 - DNA, 15 bp, Homo sapiens
acatctaattgtaca

SEQ ID NO: 1113002 - DNA, 15 bp, Homo sapiens
aacatctaattgtac

SEQ ID NO: 1113003 - DNA, 15 bp, Homo sapiens
aaacatctaattgta

SEQ ID NO: 1113004 - DNA, 15 bp, Homo sapiens
aaaacatctaattgt

SEQ ID NO: 1113005 - DNA, 15 bp, Homo sapiens
aaaaacatctaattg

SEQ ID NO: 1113006 - DNA, 15 bp, Homo sapiens
aaaaaacatctaatt

SEQ ID NO: 1113007 - DNA, 15 bp, Homo sapiens
taaaaaacatctaat

SEQ ID NO: 1113008 - DNA, 15 bp, Homo sapiens
ctaaaaaacatctaa

SEQ ID NO: 1113009 - DNA, 15 bp, Homo sapiens
actaaaaaacatcta

SEQ ID NO: 1113010 - DNA, 15 bp, Homo sapiens
tactaaaaaacatct

SEQ ID NO: 1113011 - DNA, 15 bp, Homo sapiens
atactaaaaaacatc

SEQ ID NO: 1113012 - DNA, 15 bp, Homo sapiens
tatactaaaaaacat

SEQ ID NO: 1113013 - DNA, 15 bp, Homo sapiens
atatactaaaaaaca

SEQ ID NO: 1113014 - DNA, 15 bp, Homo sapiens
aatatactaaaaaac

SEQ ID NO: 1113015 - DNA, 15 bp, Homo sapiens
aaatatactaaaaaa

SEQ ID NO: 1113016 - DNA, 15 bp, Homo sapiens
taaatatactaaaaa

SEQ ID NO: 1113017 - DNA, 15 bp, Homo sapiens
gtaaatatactaaaa

SEQ ID NO: 1113018 - DNA, 15 bp, Homo sapiens
tgtaaatatactaaa

SEQ ID NO: 1113019 - DNA, 15 bp, Homo sapiens
ctgtaaatatactaa

SEQ ID NO: 1113020 - DNA, 15 bp, Homo sapiens
tctgtaaatatacta

SEQ ID NO: 1113021 - DNA, 15 bp, Homo sapiens
ctctgtaaatatact

SEQ ID NO: 1113022 - DNA, 15 bp, Homo sapiens
actctgtaaatatac

SEQ ID NO: 1113023 - DNA, 15 bp, Homo sapiens
aactctgtaaatata

SEQ ID NO: 1113024 - DNA, 15 bp, Homo sapiens
caactctgtaaatat

SEQ ID NO: 1113025 - DNA, 15 bp, Homo sapiens
acaactctgtaaata

SEQ ID NO: 1113026 - DNA, 15 bp, Homo sapiens
cacaactctgtaaat

SEQ ID NO: 1113027 - DNA, 15 bp, Homo sapiens
gcacaactctgtaaa

SEQ ID NO: 1113028 - DNA, 15 bp, Homo sapiens
tgcacaactctgtaa

SEQ ID NO: 1113029 - DNA, 15 bp, Homo sapiens
atgcacaactctgta

SEQ ID NO: 1113030 - DNA, 15 bp, Homo sapiens
aatgcacaactctgt

SEQ ID NO: 1113031 - DNA, 15 bp, Homo sapiens
gaatgcacaactctg

SEQ ID NO: 1113032 - DNA, 15 bp, Homo sapiens
tgaatgcacaactct

SEQ ID NO: 1113033 - DNA, 15 bp, Homo sapiens
gtgaatgcacaactc

SEQ ID NO: 1113034 - DNA, 15 bp, Homo sapiens
agtgaatgcacaact

SEQ ID NO: 1113035 - DNA, 15 bp, Homo sapiens
cagtgaatgcacaac

SEQ ID NO: 1113036 - DNA, 15 bp, Homo sapiens
gcagtgaatgcacaa

SEQ ID NO: 1113037 - DNA, 15 bp, Homo sapiens
ggcagtgaatgcaca

SEQ ID NO: 1113038 - DNA, 15 bp, Homo sapiens
tggcagtgaatgcac

SEQ ID NO: 1113039 - DNA, 15 bp, Homo sapiens
gtggcagtgaatgca

SEQ ID NO: 1113040 - DNA, 15 bp, Homo sapiens
tgtggcagtgaatgc

SEQ ID NO: 1113041 - DNA, 15 bp, Homo sapiens
ctgtggcagtgaatg

SEQ ID NO: 1113042 - DNA, 15 bp, Homo sapiens
actgtggcagtgaat

SEQ ID NO: 1113043 - DNA, 15 bp, Homo sapiens
gactgtggcagtgaa

SEQ ID NO: 1113044 - DNA, 15 bp, Homo sapiens
tgactgtggcagtga

SEQ ID NO: 1113045 - DNA, 15 bp, Homo sapiens
ttgactgtggcagtg

SEQ ID NO: 1113046 - DNA, 15 bp, Homo sapiens
attgactgtggcagt

SEQ ID NO: 1113047 - DNA, 15 bp, Homo sapiens
aattgactgtggcag

SEQ ID NO: 1113048 - DNA, 15 bp, Homo sapiens
aaattgactgtggca

SEQ ID NO: 1113049 - DNA, 15 bp, Homo sapiens
aaaattgactgtggc

SEQ ID NO: 1113050 - DNA, 15 bp, Homo sapiens
taaaattgactgtgg

SEQ ID NO: 1113051 - DNA, 15 bp, Homo sapiens
ctaaaattgactgtg

SEQ ID NO: 1113052 - DNA, 15 bp, Homo sapiens
tctaaaattgactgt

SEQ ID NO: 1113053 - DNA, 15 bp, Homo sapiens
ttctaaaattgactg

SEQ ID NO: 1113054 - DNA, 15 bp, Homo sapiens
gttctaaaattgact

SEQ ID NO: 1113055 - DNA, 15 bp, Homo sapiens
tgttctaaaattgac

SEQ ID NO: 1113056 - DNA, 15 bp, Homo sapiens
atgttctaaaattga

SEQ ID NO: 1113057 - DNA, 15 bp, Homo sapiens
aatgttctaaaattg

SEQ ID NO: 1113058 - DNA, 15 bp, Homo sapiens
aaatgttctaaaatt

SEQ ID NO: 1113059 - DNA, 15 bp, Homo sapiens
aaaatgttctaaaat

SEQ ID NO: 1113060 - DNA, 15 bp, Homo sapiens
gaaaatgttctaaaa

SEQ ID NO: 1113061 - DNA, 15 bp, Homo sapiens
aaagaaaatgttcta

SEQ ID NO: 1113062 - DNA, 15 bp, Homo sapiens
aaaagaaaatgttct

SEQ ID NO: 1113063 - DNA, 15 bp, Homo sapiens
aaaaagaaaatgttc

SEQ ID NO: 1113064 - DNA, 15 bp, Homo sapiens
aaaaaagaaaatgtt

SEQ ID NO: 1113065 - DNA, 15 bp, Homo sapiens
aaaaaaagaaaatgt

SEQ ID NO: 1113066 - DNA, 15 bp, Homo sapiens
aaaaaaaagaaaatg

SEQ ID NO: 1113067 - DNA, 15 bp, Homo sapiens
gaaaaaaaagaaaat

SEQ ID NO: 1113068 - DNA, 15 bp, Homo sapiens
aggaaaaaaaagaaa

SEQ ID NO: 1113069 - DNA, 15 bp, Homo sapiens
aaggaaaaaaaagaa

SEQ ID NO: 1113070 - DNA, 15 bp, Homo sapiens
aaaggaaaaaaaaga

SEQ ID NO: 1113071 - DNA, 15 bp, Homo sapiens
aaaaggaaaaaaaag

SEQ ID NO: 1113072 - DNA, 15 bp, Homo sapiens
aaaaaggaaaaaaaa

SEQ ID NO: 1113073 - DNA, 15 bp, Homo sapiens
aaaaaaaggaaaaaa

SEQ ID NO: 1113074 - DNA, 15 bp, Homo sapiens
aaaaaaaaggaaaaa

SEQ ID NO: 1113075 - DNA, 15 bp, Homo sapiens
taaaaaaaaggaaaa

SEQ ID NO: 1113076 - DNA, 15 bp, Homo sapiens
ttaaaaaaaaggaaa

SEQ ID NO: 1113077 - DNA, 15 bp, Homo sapiens
attaaaaaaaaggaa

SEQ ID NO: 1113078 - DNA, 15 bp, Homo sapiens
aattaaaaaaaagga

SEQ ID NO: 1113079 - DNA, 15 bp, Homo sapiens
taattaaaaaaaagg

SEQ ID NO: 1113080 - DNA, 15 bp, Homo sapiens
ataattaaaaaaaag

SEQ ID NO: 1113081 - DNA, 15 bp, Homo sapiens
tataattaaaaaaaa

SEQ ID NO: 1113082 - DNA, 15 bp, Homo sapiens
gtataattaaaaaaa

SEQ ID NO: 1113083 - DNA, 15 bp, Homo sapiens
agtataattaaaaaa

SEQ ID NO: 1113084 - DNA, 15 bp, Homo sapiens
aagtataattaaaaa

SEQ ID NO: 1113085 - DNA, 15 bp, Homo sapiens
aaagtataattaaaa

SEQ ID NO: 1113086 - DNA, 15 bp, Homo sapiens
taaagtataattaaa

SEQ ID NO: 1113087 - DNA, 15 bp, Homo sapiens
ttaaagtataattaa

SEQ ID NO: 1113088 - DNA, 15 bp, Homo sapiens
cttaaagtataatta

SEQ ID NO: 1113089 - DNA, 15 bp, Homo sapiens
aaacttaaagtataa

SEQ ID NO: 1113090 - DNA, 15 bp, Homo sapiens
aaaacttaaagtata

SEQ ID NO: 1113091 - DNA, 15 bp, Homo sapiens
taaaacttaaagtat

SEQ ID NO: 1113092 - DNA, 15 bp, Homo sapiens
ctaaaacttaaagta

SEQ ID NO: 1113093 - DNA, 15 bp, Homo sapiens
cctaaaacttaaagt

SEQ ID NO: 1113094 - DNA, 15 bp, Homo sapiens
ccctaaaacttaaag

SEQ ID NO: 1113095 - DNA, 15 bp, Homo sapiens
accctaaaacttaaa

SEQ ID NO: 1113096 - DNA, 15 bp, Homo sapiens
taccctaaaacttaa

SEQ ID NO: 1113097 - DNA, 15 bp, Homo sapiens
gtaccctaaaactta

SEQ ID NO: 1113098 - DNA, 15 bp, Homo sapiens
tgtaccctaaaactt

SEQ ID NO: 1113099 - DNA, 15 bp, Homo sapiens
atgtaccctaaaact

SEQ ID NO: 1113100 - DNA, 15 bp, Homo sapiens
tcccaagagaattgg

SEQ ID NO: 1113101 - DNA, 15 bp, Homo sapiens
ttcccaagagaattg

SEQ ID NO: 1113102 - DNA, 15 bp, Homo sapiens
gttcccaagagaatt

SEQ ID NO: 1113103 - DNA, 15 bp, Homo sapiens
agttcccaagagaat

SEQ ID NO: 1113104 - DNA, 15 bp, Homo sapiens
gagttcccaagagaa

SEQ ID NO: 1113105 - DNA, 15 bp, Homo sapiens
agagttcccaagaga

SEQ ID NO: 1113106 - DNA, 15 bp, Homo sapiens
cagagttcccaagag

SEQ ID NO: 1113107 - DNA, 15 bp, Homo sapiens
acagagttcccaaga

SEQ ID NO: 1113108 - DNA, 15 bp, Homo sapiens
cacagagttcccaag

SEQ ID NO: 1113109 - DNA, 15 bp, Homo sapiens
ccacagagttcccaa

SEQ ID NO: 1113110 - DNA, 15 bp, Homo sapiens
gccacagagttccca

SEQ ID NO: 1113111 - DNA, 15 bp, Homo sapiens
ggccacagagttccc

SEQ ID NO: 1113112 - DNA, 15 bp, Homo sapiens
gggccacagagttcc

SEQ ID NO: 1113113 - DNA, 15 bp, Homo sapiens
agggccacagagttc

SEQ ID NO: 1113114 - DNA, 15 bp, Homo sapiens
cagggccacagagtt

SEQ ID NO: 1113115 - DNA, 15 bp, Homo sapiens
gcagggccacagagt

SEQ ID NO: 1113116 - DNA, 15 bp, Homo sapiens
ggcagggccacagag

SEQ ID NO: 1113117 - DNA, 15 bp, Homo sapiens
gggcagggccacaga

SEQ ID NO: 1113118 - DNA, 15 bp, Homo sapiens
tgggcagggccacag

SEQ ID NO: 1113119 - DNA, 15 bp, Homo sapiens
gtgggcagggccaca

SEQ ID NO: 1113120 - DNA, 15 bp, Homo sapiens
agtgggcagggccac

SEQ ID NO: 1113121 - DNA, 15 bp, Homo sapiens
cagtgggcagggcca

SEQ ID NO: 1113122 - DNA, 15 bp, Homo sapiens
gcagtgggcagggcc

SEQ ID NO: 1113123 - DNA, 15 bp, Homo sapiens
agcagtgggcagggc

SEQ ID NO: 1113124 - DNA, 15 bp, Homo sapiens
aagcagtgggcaggg

SEQ ID NO: 1113125 - DNA, 15 bp, Homo sapiens
caagcagtgggcagg

SEQ ID NO: 1113126 - DNA, 15 bp, Homo sapiens
ccaagcagtgggcag

SEQ ID NO: 1113127 - DNA, 15 bp, Homo sapiens
cccaagcagtgggca

SEQ ID NO: 1113128 - DNA, 15 bp, Homo sapiens
tcccaagcagtgggc

SEQ ID NO: 1113129 - DNA, 15 bp, Homo sapiens
ttcccaagcagtggg

SEQ ID NO: 1113130 - DNA, 15 bp, Homo sapiens
tttcccaagcagtgg

SEQ ID NO: 1113131 - DNA, 15 bp, Homo sapiens
gtttcccaagcagtg

SEQ ID NO: 1113132 - DNA, 15 bp, Homo sapiens
ggtttcccaagcagt

SEQ ID NO: 1113133 - DNA, 15 bp, Homo sapiens
aggtttcccaagcag

SEQ ID NO: 1113134 - DNA, 15 bp, Homo sapiens
caggtttcccaagca

SEQ ID NO: 1113135 - DNA, 15 bp, Homo sapiens
tcaggtttcccaagc

SEQ ID NO: 1113136 - DNA, 15 bp, Homo sapiens
ttcaggtttcccaag

SEQ ID NO: 1113137 - DNA, 15 bp, Homo sapiens
attcaggtttcccaa

SEQ ID NO: 1113138 - DNA, 15 bp, Homo sapiens
tattcaggtttccca

SEQ ID NO: 1113139 - DNA, 15 bp, Homo sapiens
ctattcaggtttccc

SEQ ID NO: 1113140 - DNA, 15 bp, Homo sapiens
tctattcaggtttcc

SEQ ID NO: 1113141 - DNA, 15 bp, Homo sapiens
atctattcaggtttc

SEQ ID NO: 1113142 - DNA, 15 bp, Homo sapiens
tatctattcaggttt

SEQ ID NO: 1113143 - DNA, 15 bp, Homo sapiens
ttatctattcaggtt

SEQ ID NO: 1113144 - DNA, 15 bp, Homo sapiens
gttatctattcaggt

SEQ ID NO: 1113145 - DNA, 15 bp, Homo sapiens
ggttatctattcagg

SEQ ID NO: 1113146 - DNA, 15 bp, Homo sapiens
tggttatctattcag

SEQ ID NO: 1113147 - DNA, 15 bp, Homo sapiens
ctggttatctattca

SEQ ID NO: 1113148 - DNA, 15 bp, Homo sapiens
cctggttatctattc

SEQ ID NO: 1113149 - DNA, 15 bp, Homo sapiens
acctggttatctatt

SEQ ID NO: 1113150 - DNA, 15 bp, Homo sapiens
cacctggttatctat

SEQ ID NO: 1113151 - DNA, 15 bp, Homo sapiens
acacctggttatcta

SEQ ID NO: 1113152 - DNA, 15 bp, Homo sapiens
gacacctggttatct

SEQ ID NO: 1113153 - DNA, 15 bp, Homo sapiens
ggacacctggttatc

SEQ ID NO: 1113154 - DNA, 15 bp, Homo sapiens
aggacacctggttat

SEQ ID NO: 1113155 - DNA, 15 bp, Homo sapiens
caggacacctggtta

SEQ ID NO: 1113156 - DNA, 15 bp, Homo sapiens
tcaggacacctggtt

SEQ ID NO: 1113157 - DNA, 15 bp, Homo sapiens
ctcaggacacctggt

SEQ ID NO: 1113158 - DNA, 15 bp, Homo sapiens
cctcaggacacctgg

SEQ ID NO: 1113159 - DNA, 15 bp, Homo sapiens
ccctcaggacacctg

SEQ ID NO: 1113160 - DNA, 15 bp, Homo sapiens
gccctcaggacacct

SEQ ID NO: 1113161 - DNA, 15 bp, Homo sapiens
tgccctcaggacacc

SEQ ID NO: 1113162 - DNA, 15 bp, Homo sapiens
ttgccctcaggacac

SEQ ID NO: 1113163 - DNA, 15 bp, Homo sapiens
gttgccctcaggaca

SEQ ID NO: 1113164 - DNA, 15 bp, Homo sapiens
agttgccctcaggac

SEQ ID NO: 1113165 - DNA, 15 bp, Homo sapiens
aagttgccctcagga

SEQ ID NO: 1113166 - DNA, 15 bp, Homo sapiens
aaagttgccctcagg

SEQ ID NO: 1113167 - DNA, 15 bp, Homo sapiens
caaagttgccctcag

SEQ ID NO: 1113168 - DNA, 15 bp, Homo sapiens
gcaaagttgccctca

SEQ ID NO: 1113169 - DNA, 15 bp, Homo sapiens
tgcaaagttgccctc

SEQ ID NO: 1113170 - DNA, 15 bp, Homo sapiens
atgcaaagttgccct

SEQ ID NO: 1113171 - DNA, 15 bp, Homo sapiens
aatgcaaagttgccc

SEQ ID NO: 1113172 - DNA, 15 bp, Homo sapiens
gaatgcaaagttgcc

SEQ ID NO: 1113173 - DNA, 15 bp, Homo sapiens
agaatgcaaagttgc

SEQ ID NO: 1113174 - DNA, 15 bp, Homo sapiens
gagaatgcaaagttg

SEQ ID NO: 1113175 - DNA, 15 bp, Homo sapiens
ggagaatgcaaagtt

SEQ ID NO: 1113176 - DNA, 15 bp, Homo sapiens
gggagaatgcaaagt

SEQ ID NO: 1113177 - DNA, 15 bp, Homo sapiens
agggagaatgcaaag

SEQ ID NO: 1113178 - DNA, 15 bp, Homo sapiens
tagggagaatgcaaa

SEQ ID NO: 1113179 - DNA, 15 bp, Homo sapiens
atagggagaatgcaa

SEQ ID NO: 1113180 - DNA, 15 bp, Homo sapiens
tatagggagaatgca

SEQ ID NO: 1113181 - DNA, 15 bp, Homo sapiens
ctatagggagaatgc

SEQ ID NO: 1113182 - DNA, 15 bp, Homo sapiens
cctatagggagaatg

SEQ ID NO: 1113183 - DNA, 15 bp, Homo sapiens
tcctatagggagaat

SEQ ID NO: 1113184 - DNA, 15 bp, Homo sapiens
gtcctatagggagaa

SEQ ID NO: 1113185 - DNA, 15 bp, Homo sapiens
ggtcctatagggaga

SEQ ID NO: 1113186 - DNA, 15 bp, Homo sapiens
tggtcctatagggag

SEQ ID NO: 1113187 - DNA, 15 bp, Homo sapiens
atggtcctataggga

SEQ ID NO: 1113188 - DNA, 15 bp, Homo sapiens
tatggtcctataggg

SEQ ID NO: 1113189 - DNA, 15 bp, Homo sapiens
ctatggtcctatagg

SEQ ID NO: 1113190 - DNA, 15 bp, Homo sapiens
gctatggtcctatag

SEQ ID NO: 1113191 - DNA, 15 bp, Homo sapiens
agctatggtcctata

SEQ ID NO: 1113192 - DNA, 15 bp, Homo sapiens
cagctatggtcctat

SEQ ID NO: 1113193 - DNA, 15 bp, Homo sapiens
tcagctatggtccta

SEQ ID NO: 1113194 - DNA, 15 bp, Homo sapiens
atcagctatggtcct

SEQ ID NO: 1113195 - DNA, 15 bp, Homo sapiens
catcagctatggtcc

SEQ ID NO: 1113196 - DNA, 15 bp, Homo sapiens
gcatcagctatggtc

SEQ ID NO: 1113197 - DNA, 15 bp, Homo sapiens
tgcatcagctatggt

SEQ ID NO: 1113198 - DNA, 15 bp, Homo sapiens
gtgcatcagctatgg

SEQ ID NO: 1113199 - DNA, 15 bp, Homo sapiens
agtgcatcagctatg

SEQ ID NO: 1113200 - DNA, 15 bp, Homo sapiens
gagtgcatcagctat

SEQ ID NO: 1113201 - DNA, 15 bp, Homo sapiens
agagtgcatcagcta

SEQ ID NO: 1113202 - DNA, 15 bp, Homo sapiens
aagagtgcatcagct

SEQ ID NO: 1113203 - DNA, 15 bp, Homo sapiens
caagagtgcatcagc

SEQ ID NO: 1113204 - DNA, 15 bp, Homo sapiens
tcaagagtgcatcag

SEQ ID NO: 1113205 - DNA, 15 bp, Homo sapiens
ttcaagagtgcatca

SEQ ID NO: 1113206 - DNA, 15 bp, Homo sapiens
tttcaagagtgcatc

SEQ ID NO: 1113207 - DNA, 15 bp, Homo sapiens
ctttcaagagtgcat

SEQ ID NO: 1113208 - DNA, 15 bp, Homo sapiens
actttcaagagtgca

SEQ ID NO: 1113209 - DNA, 15 bp, Homo sapiens
cactttcaagagtgc

SEQ ID NO: 1113210 - DNA, 15 bp, Homo sapiens
gcactttcaagagtg

SEQ ID NO: 1113211 - DNA, 15 bp, Homo sapiens
ggcactttcaagagt

SEQ ID NO: 1113212 - DNA, 15 bp, Homo sapiens
tggcactttcaagag

SEQ ID NO: 1113213 - DNA, 15 bp, Homo sapiens
gtggcactttcaaga

SEQ ID NO: 1113214 - DNA, 15 bp, Homo sapiens
ggtggcactttcaag

SEQ ID NO: 1113215 - DNA, 15 bp, Homo sapiens
aggtggcactttcaa

SEQ ID NO: 1113216 - DNA, 15 bp, Homo sapiens
gaggtggcactttca

SEQ ID NO: 1113217 - DNA, 15 bp, Homo sapiens
ggaggtggcactttc

SEQ ID NO: 1113218 - DNA, 15 bp, Homo sapiens
aggaggtggcacttt

SEQ ID NO: 1113219 - DNA, 15 bp, Homo sapiens
taggaggtggcactt

SEQ ID NO: 1113220 - DNA, 15 bp, Homo sapiens
ctaggaggtggcact

SEQ ID NO: 1113221 - DNA, 15 bp, Homo sapiens
gctaggaggtggcac

SEQ ID NO: 1113222 - DNA, 15 bp, Homo sapiens
agctaggaggtggca

SEQ ID NO: 1113223 - DNA, 15 bp, Homo sapiens
tagctaggaggtggc

SEQ ID NO: 1113224 - DNA, 15 bp, Homo sapiens
ctagctaggaggtgg

SEQ ID NO: 1113225 - DNA, 15 bp, Homo sapiens
tctagctaggaggtg

SEQ ID NO: 1113226 - DNA, 15 bp, Homo sapiens
ctctagctaggaggt

SEQ ID NO: 1113227 - DNA, 15 bp, Homo sapiens
cctctagctaggagg

SEQ ID NO: 1113228 - DNA, 15 bp, Homo sapiens
gcctctagctaggag

SEQ ID NO: 1113229 - DNA, 15 bp, Homo sapiens
ggcctctagctagga

SEQ ID NO: 1113230 - DNA, 15 bp, Homo sapiens
tggcctctagctagg

SEQ ID NO: 1113231 - DNA, 15 bp, Homo sapiens
ttggcctctagctag

SEQ ID NO: 1113232 - DNA, 15 bp, Homo sapiens
gttggcctctagcta

SEQ ID NO: 1113233 - DNA, 15 bp, Homo sapiens
ggttggcctctagct

SEQ ID NO: 1113234 - DNA, 15 bp, Homo sapiens
tggttggcctctagc

SEQ ID NO: 1113235 - DNA, 15 bp, Homo sapiens
ttggttggcctctag

SEQ ID NO: 1113236 - DNA, 15 bp, Homo sapiens
gttggttggcctcta

SEQ ID NO: 1113237 - DNA, 15 bp, Homo sapiens
tgttggttggcctct

SEQ ID NO: 1113238 - DNA, 15 bp, Homo sapiens
atgttggttggcctc

SEQ ID NO: 1113239 - DNA, 15 bp, Homo sapiens
tatgttggttggcct

SEQ ID NO: 1113240 - DNA, 15 bp, Homo sapiens
ttatgttggttggcc

SEQ ID NO: 1113241 - DNA, 15 bp, Homo sapiens
tttatgttggttggc

SEQ ID NO: 1113242 - DNA, 15 bp, Homo sapiens
ttttatgttggttgg

SEQ ID NO: 1113243 - DNA, 15 bp, Homo sapiens
gttttatgttggttg

SEQ ID NO: 1113244 - DNA, 15 bp, Homo sapiens
ggttttatgttggtt

SEQ ID NO: 1113245 - DNA, 15 bp, Homo sapiens
tggttttatgttggt

SEQ ID NO: 1113246 - DNA, 15 bp, Homo sapiens
ttggttttatgttgg

SEQ ID NO: 1113247 - DNA, 15 bp, Homo sapiens
gttggttttatgttg

SEQ ID NO: 1113248 - DNA, 15 bp, Homo sapiens
tgttggttttatgtt

SEQ ID NO: 1113249 - DNA, 15 bp, Homo sapiens
gtgttggttttatgt

SEQ ID NO: 1113250 - DNA, 15 bp, Homo sapiens
tgtgttggttttatg

SEQ ID NO: 1113251 - DNA, 15 bp, Homo sapiens
gtgtgttggttttat

SEQ ID NO: 1113252 - DNA, 15 bp, Homo sapiens
agtgtgttggtttta

SEQ ID NO: 1113253 - DNA, 15 bp, Homo sapiens
tagtgtgttggtttt

SEQ ID NO: 1113254 - DNA, 15 bp, Homo sapiens
ttagtgtgttggttt

SEQ ID NO: 1113255 - DNA, 15 bp, Homo sapiens
tttagtgtgttggtt

SEQ ID NO: 1113256 - DNA, 15 bp, Homo sapiens
atttagtgtgttggt

SEQ ID NO: 1113257 - DNA, 15 bp, Homo sapiens
tatttagtgtgttgg

SEQ ID NO: 1113258 - DNA, 15 bp, Homo sapiens
ttatttagtgtgttg

SEQ ID NO: 1113259 - DNA, 15 bp, Homo sapiens
tttatttagtgtgtt

SEQ ID NO: 1113260 - DNA, 15 bp, Homo sapiens
ttttatttagtgtgt

SEQ ID NO: 1113261 - DNA, 15 bp, Homo sapiens
tttttatttagtgtg

SEQ ID NO: 1113262 - DNA, 15 bp, Homo sapiens
gtttttatttagtgt

SEQ ID NO: 1113263 - DNA, 15 bp, Homo sapiens
tgtttttatttagtg

SEQ ID NO: 1113264 - DNA, 15 bp, Homo sapiens
gtgtttttatttagt

SEQ ID NO: 1113265 - DNA, 15 bp, Homo sapiens
tgtgtttttatttag

SEQ ID NO: 1113266 - DNA, 15 bp, Homo sapiens
ttgtgtttttattta

SEQ ID NO: 1113267 - DNA, 15 bp, Homo sapiens
gttgtgtttttattt

SEQ ID NO: 1113268 - DNA, 15 bp, Homo sapiens
tgttgtgtttttatt

SEQ ID NO: 1113269 - DNA, 15 bp, Homo sapiens
ctgttgtgtttttat

SEQ ID NO: 1113270 - DNA, 15 bp, Homo sapiens
tctgttgtgttttta

SEQ ID NO: 1113271 - DNA, 15 bp, Homo sapiens
ctctgttgtgttttt

SEQ ID NO: 1113272 - DNA, 15 bp, Homo sapiens
cctctgttgtgtttt

SEQ ID NO: 1113273 - DNA, 15 bp, Homo sapiens
tcctctgttgtgttt

SEQ ID NO: 1113274 - DNA, 15 bp, Homo sapiens
gtcctctgttgtgtt

SEQ ID NO: 1113275 - DNA, 15 bp, Homo sapiens
ggtcctctgttgtgt

SEQ ID NO: 1113276 - DNA, 15 bp, Homo sapiens
aggtcctctgttgtg

SEQ ID NO: 1113277 - DNA, 15 bp, Homo sapiens
aaggtcctctgttgt

SEQ ID NO: 1113278 - DNA, 15 bp, Homo sapiens
gaaggtcctctgttg

SEQ ID NO: 1113279 - DNA, 15 bp, Homo sapiens
tgaaggtcctctgtt

SEQ ID NO: 1113280 - DNA, 15 bp, Homo sapiens
gtgaaggtcctctgt

SEQ ID NO: 1113281 - DNA, 15 bp, Homo sapiens
cgtgaaggtcctctg

SEQ ID NO: 1113282 - DNA, 15 bp, Homo sapiens
ccgtgaaggtcctct

SEQ ID NO: 1113283 - DNA, 15 bp, Homo sapiens
tccgtgaaggtcctc

SEQ ID NO: 1113284 - DNA, 15 bp, Homo sapiens
ctccgtgaaggtcct

SEQ ID NO: 1113285 - DNA, 15 bp, Homo sapiens
gctccgtgaaggtcc

SEQ ID NO: 1113286 - DNA, 15 bp, Homo sapiens
ggctccgtgaaggtc

SEQ ID NO: 1113287 - DNA, 15 bp, Homo sapiens
gggctccgtgaaggt

SEQ ID NO: 1113288 - DNA, 15 bp, Homo sapiens
tgggctccgtgaagg

SEQ ID NO: 1113289 - DNA, 15 bp, Homo sapiens
gtgggctccgtgaag

SEQ ID NO: 1113290 - DNA, 15 bp, Homo sapiens
agtgggctccgtgaa

SEQ ID NO: 1113291 - DNA, 15 bp, Homo sapiens
aagtgggctccgtga

SEQ ID NO: 1113292 - DNA, 15 bp, Homo sapiens
gaagtgggctccgtg

SEQ ID NO: 1113293 - DNA, 15 bp, Homo sapiens
tgaagtgggctccgt

SEQ ID NO: 1113294 - DNA, 15 bp, Homo sapiens
gtgaagtgggctccg

SEQ ID NO: 1113295 - DNA, 15 bp, Homo sapiens
agtgaagtgggctcc

SEQ ID NO: 1113296 - DNA, 15 bp, Homo sapiens
gagtgaagtgggctc

SEQ ID NO: 1113297 - DNA, 15 bp, Homo sapiens
ggagtgaagtgggct

SEQ ID NO: 1113298 - DNA, 15 bp, Homo sapiens
gggagtgaagtgggc

SEQ ID NO: 1113299 - DNA, 15 bp, Homo sapiens
ggggagtgaagtggg

SEQ ID NO: 1113300 - DNA, 15 bp, Homo sapiens
aggggagtgaagtgg

SEQ ID NO: 1113301 - DNA, 15 bp, Homo sapiens
caggggagtgaagtg

SEQ ID NO: 1113302 - DNA, 15 bp, Homo sapiens
gcaggggagtgaagt

SEQ ID NO: 1113303 - DNA, 15 bp, Homo sapiens
agcaggggagtgaag

SEQ ID NO: 1113304 - DNA, 15 bp, Homo sapiens
cagcaggggagtgaa

SEQ ID NO: 1113305 - DNA, 15 bp, Homo sapiens
gcagcaggggagtga

SEQ ID NO: 1113306 - DNA, 15 bp, Homo sapiens
ggcagcaggggagtg

SEQ ID NO: 1113307 - DNA, 15 bp, Homo sapiens
aggcagcaggggagt

SEQ ID NO: 1113308 - DNA, 15 bp, Homo sapiens
gaggcagcaggggag

SEQ ID NO: 1113309 - DNA, 15 bp, Homo sapiens
ggaggcagcagggga

SEQ ID NO: 1113310 - DNA, 15 bp, Homo sapiens
tggaggcagcagggg

SEQ ID NO: 1113311 - DNA, 15 bp, Homo sapiens
gtggaggcagcaggg

SEQ ID NO: 1113312 - DNA, 15 bp, Homo sapiens
ggtggaggcagcagg

SEQ ID NO: 1113313 - DNA, 15 bp, Homo sapiens
tggtggaggcagcag

SEQ ID NO: 1113314 - DNA, 15 bp, Homo sapiens
ctggtggaggcagca

SEQ ID NO: 1113315 - DNA, 15 bp, Homo sapiens
cctggtggaggcagc

SEQ ID NO: 1113316 - DNA, 15 bp, Homo sapiens
acctggtggaggcag

SEQ ID NO: 1113317 - DNA, 15 bp, Homo sapiens
cacctggtggaggca

SEQ ID NO: 1113318 - DNA, 15 bp, Homo sapiens
gcacctggtggaggc

SEQ ID NO: 1113319 - DNA, 15 bp, Homo sapiens
tgcacctggtggagg

SEQ ID NO: 1113320 - DNA, 15 bp, Homo sapiens
ctgcacctggtggag

SEQ ID NO: 1113321 - DNA, 15 bp, Homo sapiens
cctgcacctggtgga

SEQ ID NO: 1113322 - DNA, 15 bp, Homo sapiens
acctgcacctggtgg

SEQ ID NO: 1113323 - DNA, 15 bp, Homo sapiens
cacctgcacctggtg

SEQ ID NO: 1113324 - DNA, 15 bp, Homo sapiens
gcacctgcacctggt

SEQ ID NO: 1113325 - DNA, 15 bp, Homo sapiens
agcacctgcacctgg

SEQ ID NO: 1113326 - DNA, 15 bp, Homo sapiens
cagcacctgcacctg

SEQ ID NO: 1113327 - DNA, 15 bp, Homo sapiens
acagcacctgcacct

SEQ ID NO: 1113328 - DNA, 15 bp, Homo sapiens
aacagcacctgcacc

SEQ ID NO: 1113329 - DNA, 15 bp, Homo sapiens
taacagcacctgcac

SEQ ID NO: 1113330 - DNA, 15 bp, Homo sapiens
ataacagcacctgca

SEQ ID NO: 1113331 - DNA, 15 bp, Homo sapiens
gataacagcacctgc

SEQ ID NO: 1113332 - DNA, 15 bp, Homo sapiens
ggataacagcacctg

SEQ ID NO: 1113333 - DNA, 15 bp, Homo sapiens
tggataacagcacct

SEQ ID NO: 1113334 - DNA, 15 bp, Homo sapiens
gtggataacagcacc

SEQ ID NO: 1113335 - DNA, 15 bp, Homo sapiens
tgtggataacagcac

SEQ ID NO: 1113336 - DNA, 15 bp, Homo sapiens
ctgtggataacagca

SEQ ID NO: 1113337 - DNA, 15 bp, Homo sapiens
gctgtggataacagc

SEQ ID NO: 1113338 - DNA, 15 bp, Homo sapiens
agctgtggataacag

SEQ ID NO: 1113339 - DNA, 15 bp, Homo sapiens
cagctgtggataaca

SEQ ID NO: 1113340 - DNA, 15 bp, Homo sapiens
gcagctgtggataac

SEQ ID NO: 1113341 - DNA, 15 bp, Homo sapiens
tgcagctgtggataa

SEQ ID NO: 1113342 - DNA, 15 bp, Homo sapiens
ttgcagctgtggata

SEQ ID NO: 1113343 - DNA, 15 bp, Homo sapiens
cttgcagctgtggat

SEQ ID NO: 1113344 - DNA, 15 bp, Homo sapiens
tcttgcagctgtgga

SEQ ID NO: 1113345 - DNA, 15 bp, Homo sapiens
ttcttgcagctgtgg

SEQ ID NO: 1113346 - DNA, 15 bp, Homo sapiens
gttcttgcagctgtg

SEQ ID NO: 1113347 - DNA, 15 bp, Homo sapiens
agttcttgcagctgt

SEQ ID NO: 1113348 - DNA, 15 bp, Homo sapiens
cagttcttgcagctg

SEQ ID NO: 1113349 - DNA, 15 bp, Homo sapiens
tcagttcttgcagct

SEQ ID NO: 1113350 - DNA, 15 bp, Homo sapiens
ttcagttcttgcagc

SEQ ID NO: 1113351 - DNA, 15 bp, Homo sapiens
cttcagttcttgcag

SEQ ID NO: 1113352 - DNA, 15 bp, Homo sapiens
tcttcagttcttgca

SEQ ID NO: 1113353 - DNA, 15 bp, Homo sapiens
gtcttcagttcttgc

SEQ ID NO: 1113354 - DNA, 15 bp, Homo sapiens
tgtcttcagttcttg

SEQ ID NO: 1113355 - DNA, 15 bp, Homo sapiens
ctgtcttcagttctt

SEQ ID NO: 1113356 - DNA, 15 bp, Homo sapiens
tctgtcttcagttct

SEQ ID NO: 1113357 - DNA, 15 bp, Homo sapiens
atctgtcttcagttc

SEQ ID NO: 1113358 - DNA, 15 bp, Homo sapiens
gatctgtcttcagtt

SEQ ID NO: 1113359 - DNA, 15 bp, Homo sapiens
tgatctgtcttcagt

SEQ ID NO: 1113360 - DNA, 15 bp, Homo sapiens
gtgatctgtcttcag

SEQ ID NO: 1113361 - DNA, 15 bp, Homo sapiens
tgtgatctgtcttca

SEQ ID NO: 1113362 - DNA, 15 bp, Homo sapiens
atgtgatctgtcttc

SEQ ID NO: 1113363 - DNA, 15 bp, Homo sapiens
gatgtgatctgtctt

SEQ ID NO: 1113364 - DNA, 15 bp, Homo sapiens
tgatgtgatctgtct

SEQ ID NO: 1113365 - DNA, 15 bp, Homo sapiens
gtgatgtgatctgtc

SEQ ID NO: 1113366 - DNA, 15 bp, Homo sapiens
tgtgatgtgatctgt

SEQ ID NO: 1113367 - DNA, 15 bp, Homo sapiens
ctgtgatgtgatctg

SEQ ID NO: 1113368 - DNA, 15 bp, Homo sapiens
cctgtgatgtgatct

SEQ ID NO: 1113369 - DNA, 15 bp, Homo sapiens
tcctgtgatgtgatc

SEQ ID NO: 1113370 - DNA, 15 bp, Homo sapiens
gtcctgtgatgtgat

SEQ ID NO: 1113371 - DNA, 15 bp, Homo sapiens
agtcctgtgatgtga

SEQ ID NO: 1113372 - DNA, 15 bp, Homo sapiens
gagtcctgtgatgtg

SEQ ID NO: 1113373 - DNA, 15 bp, Homo sapiens
agagtcctgtgatgt

SEQ ID NO: 1113374 - DNA, 15 bp, Homo sapiens
aagagtcctgtgatg

SEQ ID NO: 1113375 - DNA, 15 bp, Homo sapiens
aaagagtcctgtgat

SEQ ID NO: 1113376 - DNA, 15 bp, Homo sapiens
caaagagtcctgtga

SEQ ID NO: 1113377 - DNA, 15 bp, Homo sapiens
gcaaagagtcctgtg

SEQ ID NO: 1113378 - DNA, 15 bp, Homo sapiens
tgcaaagagtcctgt

SEQ ID NO: 1113379 - DNA, 15 bp, Homo sapiens
ctgcaaagagtcctg

SEQ ID NO: 1113380 - DNA, 15 bp, Homo sapiens
tctgcaaagagtcct

SEQ ID NO: 1113381 - DNA, 15 bp, Homo sapiens
gtctgcaaagagtcc

SEQ ID NO: 1113382 - DNA, 15 bp, Homo sapiens
agtctgcaaagagtc

SEQ ID NO: 1113383 - DNA, 15 bp, Homo sapiens
gagtctgcaaagagt

SEQ ID NO: 1113384 - DNA, 15 bp, Homo sapiens
agagtctgcaaagag

SEQ ID NO: 1113385 - DNA, 15 bp, Homo sapiens
aagagtctgcaaaga

SEQ ID NO: 1113386 - DNA, 15 bp, Homo sapiens
caagagtctgcaaag

SEQ ID NO: 1113387 - DNA, 15 bp, Homo sapiens
gcaagagtctgcaaa

SEQ ID NO: 1113388 - DNA, 15 bp, Homo sapiens
ggcaagagtctgcaa

SEQ ID NO: 1113389 - DNA, 15 bp, Homo sapiens
tggcaagagtctgca

SEQ ID NO: 1113390 - DNA, 15 bp, Homo sapiens
ctggcaagagtctgc

SEQ ID NO: 1113391 - DNA, 15 bp, Homo sapiens
actggcaagagtctg

SEQ ID NO: 1113392 - DNA, 15 bp, Homo sapiens
tactggcaagagtct

SEQ ID NO: 1113393 - DNA, 15 bp, Homo sapiens
gtactggcaagagtc

SEQ ID NO: 1113394 - DNA, 15 bp, Homo sapiens
ggtactggcaagagt

SEQ ID NO: 1113395 - DNA, 15 bp, Homo sapiens
tggtactggcaagag

SEQ ID NO: 1113396 - DNA, 15 bp, Homo sapiens
ctggtactggcaaga

SEQ ID NO: 1113397 - DNA, 15 bp, Homo sapiens
gctggtactggcaag

SEQ ID NO: 1113398 - DNA, 15 bp, Homo sapiens
ggctggtactggcaa

SEQ ID NO: 1113399 - DNA, 15 bp, Homo sapiens
gggctggtactggca

SEQ ID NO: 1113400 - DNA, 15 bp, Homo sapiens
tgggctggtactggc

SEQ ID NO: 1113401 - DNA, 15 bp, Homo sapiens
ctgggctggtactgg

SEQ ID NO: 1113402 - DNA, 15 bp, Homo sapiens
tctgggctggtactg

SEQ ID NO: 1113403 - DNA, 15 bp, Homo sapiens
ctctgggctggtact

SEQ ID NO: 1113404 - DNA, 15 bp, Homo sapiens
gctctgggctggtac

SEQ ID NO: 1113405 - DNA, 15 bp, Homo sapiens
ggctctgggctggta

SEQ ID NO: 1113406 - DNA, 15 bp, Homo sapiens
aggctctgggctggt

SEQ ID NO: 1113407 - DNA, 15 bp, Homo sapiens
caggctctgggctgg

SEQ ID NO: 1113408 - DNA, 15 bp, Homo sapiens
ccaggctctgggctg

SEQ ID NO: 1113409 - DNA, 15 bp, Homo sapiens
accaggctctgggct

SEQ ID NO: 1113410 - DNA, 15 bp, Homo sapiens
taccaggctctgggc

SEQ ID NO: 1113411 - DNA, 15 bp, Homo sapiens
ttaccaggctctggg

SEQ ID NO: 1113412 - DNA, 15 bp, Homo sapiens
gttaccaggctctgg

SEQ ID NO: 1113413 - DNA, 15 bp, Homo sapiens
agttaccaggctctg

SEQ ID NO: 1113414 - DNA, 15 bp, Homo sapiens
aagttaccaggctct

SEQ ID NO: 1113415 - DNA, 15 bp, Homo sapiens
aaagttaccaggctc

SEQ ID NO: 1113416 - DNA, 15 bp, Homo sapiens
caaagttaccaggct

SEQ ID NO: 1113417 - DNA, 15 bp, Homo sapiens
gcaaagttaccaggc

SEQ ID NO: 1113418 - DNA, 15 bp, Homo sapiens
agcaaagttaccagg

SEQ ID NO: 1113419 - DNA, 15 bp, Homo sapiens
cagcaaagttaccag

SEQ ID NO: 1113420 - DNA, 15 bp, Homo sapiens
ccagcaaagttacca

SEQ ID NO: 1113421 - DNA, 15 bp, Homo sapiens
cccagcaaagttacc

SEQ ID NO: 1113422 - DNA, 15 bp, Homo sapiens
acccagcaaagttac

SEQ ID NO: 1113423 - DNA, 15 bp, Homo sapiens
cacccagcaaagtta

SEQ ID NO: 1113424 - DNA, 15 bp, Homo sapiens
ccacccagcaaagtt

SEQ ID NO: 1113425 - DNA, 15 bp, Homo sapiens
gccacccagcaaagt

SEQ ID NO: 1113426 - DNA, 15 bp, Homo sapiens
agccacccagcaaag

SEQ ID NO: 1113427 - DNA, 15 bp, Homo sapiens
tagccacccagcaaa

SEQ ID NO: 1113428 - DNA, 15 bp, Homo sapiens
ctagccacccagcaa

SEQ ID NO: 1113429 - DNA, 15 bp, Homo sapiens
tctagccacccagca

SEQ ID NO: 1113430 - DNA, 15 bp, Homo sapiens
gtctagccacccagc

SEQ ID NO: 1113431 - DNA, 15 bp, Homo sapiens
ggtctagccacccag

SEQ ID NO: 1113432 - DNA, 15 bp, Homo sapiens
gggtctagccaccca

SEQ ID NO: 1113433 - DNA, 15 bp, Homo sapiens
tgggtctagccaccc

SEQ ID NO: 1113434 - DNA, 15 bp, Homo sapiens
ctgggtctagccacc

SEQ ID NO: 1113435 - DNA, 15 bp, Homo sapiens
tctgggtctagccac

SEQ ID NO: 1113436 - DNA, 15 bp, Homo sapiens
ttctgggtctagcca

SEQ ID NO: 1113437 - DNA, 15 bp, Homo sapiens
cttctgggtctagcc

SEQ ID NO: 1113438 - DNA, 15 bp, Homo sapiens
tcttctgggtctagc

SEQ ID NO: 1113439 - DNA, 15 bp, Homo sapiens
ctcttctgggtctag

SEQ ID NO: 1113440 - DNA, 15 bp, Homo sapiens
gctcttctgggtcta

SEQ ID NO: 1113441 - DNA, 15 bp, Homo sapiens
tgctcttctgggtct

SEQ ID NO: 1113442 - DNA, 15 bp, Homo sapiens
ttgctcttctgggtc

SEQ ID NO: 1113443 - DNA, 15 bp, Homo sapiens
tttgctcttctgggt

SEQ ID NO: 1113444 - DNA, 15 bp, Homo sapiens
ttttgctcttctggg

SEQ ID NO: 1113445 - DNA, 15 bp, Homo sapiens
tttttgctcttctgg

SEQ ID NO: 1113446 - DNA, 15 bp, Homo sapiens
gtttttgctcttctg

SEQ ID NO: 1113447 - DNA, 15 bp, Homo sapiens
tgtttttgctcttct

SEQ ID NO: 1113448 - DNA, 15 bp, Homo sapiens
ttgtttttgctcttc

SEQ ID NO: 1113449 - DNA, 15 bp, Homo sapiens
attgtttttgctctt

SEQ ID NO: 1113450 - DNA, 15 bp, Homo sapiens
gattgtttttgctct

SEQ ID NO: 1113451 - DNA, 15 bp, Homo sapiens
tgattgtttttgctc

SEQ ID NO: 1113452 - DNA, 15 bp, Homo sapiens
gtgattgtttttgct

SEQ ID NO: 1113453 - DNA, 15 bp, Homo sapiens
agtgattgtttttgc

SEQ ID NO: 1113454 - DNA, 15 bp, Homo sapiens
tagtgattgtttttg

SEQ ID NO: 1113455 - DNA, 15 bp, Homo sapiens
gtagtgattgttttt

SEQ ID NO: 1113456 - DNA, 15 bp, Homo sapiens
tgtagtgattgtttt

SEQ ID NO: 1113457 - DNA, 15 bp, Homo sapiens
ctgtagtgattgttt

SEQ ID NO: 1113458 - DNA, 15 bp, Homo sapiens
actgtagtgattgtt

SEQ ID NO: 1113459 - DNA, 15 bp, Homo sapiens
aactgtagtgattgt

SEQ ID NO: 1113460 - DNA, 15 bp, Homo sapiens
aaactgtagtgattg

SEQ ID NO: 1113461 - DNA, 15 bp, Homo sapiens
taaactgtagtgatt

SEQ ID NO: 1113462 - DNA, 15 bp, Homo sapiens
ctaaactgtagtgat

SEQ ID NO: 1113463 - DNA, 15 bp, Homo sapiens
gctaaactgtagtga

SEQ ID NO: 1113464 - DNA, 15 bp, Homo sapiens
agctaaactgtagtg

SEQ ID NO: 1113465 - DNA, 15 bp, Homo sapiens
aagctaaactgtagt

SEQ ID NO: 1113466 - DNA, 15 bp, Homo sapiens
taagctaaactgtag

SEQ ID NO: 1113467 - DNA, 15 bp, Homo sapiens
gtaagctaaactgta

SEQ ID NO: 1113468 - DNA, 15 bp, Homo sapiens
ggtaagctaaactgt

SEQ ID NO: 1113469 - DNA, 15 bp, Homo sapiens
cggtaagctaaactg

SEQ ID NO: 1113470 - DNA, 15 bp, Homo sapiens
ccggtaagctaaact

SEQ ID NO: 1113471 - DNA, 15 bp, Homo sapiens
tccggtaagctaaac

SEQ ID NO: 1113472 - DNA, 15 bp, Homo sapiens
ttccggtaagctaaa

SEQ ID NO: 1113473 - DNA, 15 bp, Homo sapiens
cttccggtaagctaa

SEQ ID NO: 1113474 - DNA, 15 bp, Homo sapiens
gcttccggtaagcta

SEQ ID NO: 1113475 - DNA, 15 bp, Homo sapiens
ggcttccggtaagct

SEQ ID NO: 1113476 - DNA, 15 bp, Homo sapiens
gggcttccggtaagc

SEQ ID NO: 1113477 - DNA, 15 bp, Homo sapiens
ggggcttccggtaag

SEQ ID NO: 1113478 - DNA, 15 bp, Homo sapiens
tggggcttccggtaa

SEQ ID NO: 1113479 - DNA, 15 bp, Homo sapiens
atggggcttccggta

SEQ ID NO: 1113480 - DNA, 15 bp, Homo sapiens
aatggggcttccggt

SEQ ID NO: 1113481 - DNA, 15 bp, Homo sapiens
gaatggggcttccgg

SEQ ID NO: 1113482 - DNA, 15 bp, Homo sapiens
tgaatggggcttccg

SEQ ID NO: 1113483 - DNA, 15 bp, Homo sapiens
atgaatggggcttcc

SEQ ID NO: 1113484 - DNA, 15 bp, Homo sapiens
tatgaatggggcttc

SEQ ID NO: 1113485 - DNA, 15 bp, Homo sapiens
ctatgaatggggctt

SEQ ID NO: 1113486 - DNA, 15 bp, Homo sapiens
cctatgaatggggct

SEQ ID NO: 1113487 - DNA, 15 bp, Homo sapiens
ccctatgaatggggc

SEQ ID NO: 1113488 - DNA, 15 bp, Homo sapiens
cccctatgaatgggg

SEQ ID NO: 1113489 - DNA, 15 bp, Homo sapiens
tcccctatgaatggg

SEQ ID NO: 1113490 - DNA, 15 bp, Homo sapiens
ttcccctatgaatgg

SEQ ID NO: 1113491 - DNA, 15 bp, Homo sapiens
cttcccctatgaatg

SEQ ID NO: 1113492 - DNA, 15 bp, Homo sapiens
ccttcccctatgaat

SEQ ID NO: 1113493 - DNA, 15 bp, Homo sapiens
cccttcccctatgaa

SEQ ID NO: 1113494 - DNA, 15 bp, Homo sapiens
tcccttcccctatga

SEQ ID NO: 1113495 - DNA, 15 bp, Homo sapiens
tctcccttcccctat

SEQ ID NO: 1113496 - DNA, 15 bp, Homo sapiens
ctctcccttccccta

SEQ ID NO: 1113497 - DNA, 15 bp, Homo sapiens
tctctcccttcccct

SEQ ID NO: 1113498 - DNA, 15 bp, Homo sapiens
ttctctcccttcccc

SEQ ID NO: 1113499 - DNA, 15 bp, Homo sapiens
gttctctcccttccc

SEQ ID NO: 1113500 - DNA, 15 bp, Homo sapiens
tgttctctcccttcc

SEQ ID NO: 1113501 - DNA, 15 bp, Homo sapiens
gtgttctctcccttc

SEQ ID NO: 1113502 - DNA, 15 bp, Homo sapiens
ggtgttctctccctt

SEQ ID NO: 1113503 - DNA, 15 bp, Homo sapiens
tggtgttctctccct

SEQ ID NO: 1113504 - DNA, 15 bp, Homo sapiens
gtggtgttctctccc

SEQ ID NO: 1113505 - DNA, 15 bp, Homo sapiens
tgtggtgttctctcc

SEQ ID NO: 1113506 - DNA, 15 bp, Homo sapiens
gtgtggtgttctctc

SEQ ID NO: 1113507 - DNA, 15 bp, Homo sapiens
ggtgtggtgttctct

SEQ ID NO: 1113508 - DNA, 15 bp, Homo sapiens
tggtgtggtgttctc

SEQ ID NO: 1113509 - DNA, 15 bp, Homo sapiens
ttggtgtggtgttct

SEQ ID NO: 1113510 - DNA, 15 bp, Homo sapiens
cttggtgtggtgttc

SEQ ID NO: 1113511 - DNA, 15 bp, Homo sapiens
ccttggtgtggtgtt

SEQ ID NO: 1113512 - DNA, 15 bp, Homo sapiens
tccttggtgtggtgt

SEQ ID NO: 1113513 - DNA, 15 bp, Homo sapiens
ttccttggtgtggtg

SEQ ID NO: 1113514 - DNA, 15 bp, Homo sapiens
cttccttggtgtggt

SEQ ID NO: 1113515 - DNA, 15 bp, Homo sapiens
gcttccttggtgtgg

SEQ ID NO: 1113516 - DNA, 15 bp, Homo sapiens
tgcttccttggtgtg

SEQ ID NO: 1113517 - DNA, 15 bp, Homo sapiens
gtgcttccttggtgt

SEQ ID NO: 1113518 - DNA, 15 bp, Homo sapiens
tgtgcttccttggtg

SEQ ID NO: 1113519 - DNA, 15 bp, Homo sapiens
gtgtgcttccttggt

SEQ ID NO: 1113520 - DNA, 15 bp, Homo sapiens
ggtgtgcttccttgg

SEQ ID NO: 1113521 - DNA, 15 bp, Homo sapiens
tggtgtgcttccttg

SEQ ID NO: 1113522 - DNA, 15 bp, Homo sapiens
atggtgtgcttcctt

SEQ ID NO: 1113523 - DNA, 15 bp, Homo sapiens
catggtgtgcttcct

SEQ ID NO: 1113524 - DNA, 15 bp, Homo sapiens
tcatggtgtgcttcc

SEQ ID NO: 1113525 - DNA, 15 bp, Homo sapiens
ctcatggtgtgcttc

SEQ ID NO: 1113526 - DNA, 15 bp, Homo sapiens
tctcatggtgtgctt

SEQ ID NO: 1113527 - DNA, 15 bp, Homo sapiens
gtctcatggtgtgct

SEQ ID NO: 1113528 - DNA, 15 bp, Homo sapiens
tgtctcatggtgtgc

SEQ ID NO: 1113529 - DNA, 15 bp, Homo sapiens
ttgtctcatggtgtg

SEQ ID NO: 1113530 - DNA, 15 bp, Homo sapiens
tttgtctcatggtgt

SEQ ID NO: 1113531 - DNA, 15 bp, Homo sapiens
ttttgtctcatggtg

SEQ ID NO: 1113532 - DNA, 15 bp, Homo sapiens
cttttgtctcatggt

SEQ ID NO: 1113533 - DNA, 15 bp, Homo sapiens
tcttttgtctcatgg

SEQ ID NO: 1113534 - DNA, 15 bp, Homo sapiens
ttcttttgtctcatg

SEQ ID NO: 1113535 - DNA, 15 bp, Homo sapiens
attcttttgtctcat

SEQ ID NO: 1113536 - DNA, 15 bp, Homo sapiens
gattcttttgtctca

SEQ ID NO: 1113537 - DNA, 15 bp, Homo sapiens
agattcttttgtctc

SEQ ID NO: 1113538 - DNA, 15 bp, Homo sapiens
cagattcttttgtct

SEQ ID NO: 1113539 - DNA, 15 bp, Homo sapiens
tcagattcttttgtc

SEQ ID NO: 1113540 - DNA, 15 bp, Homo sapiens
ttcagattcttttgt

SEQ ID NO: 1113541 - DNA, 15 bp, Homo sapiens
gttcagattcttttg

SEQ ID NO: 1113542 - DNA, 15 bp, Homo sapiens
tgttcagattctttt

SEQ ID NO: 1113543 - DNA, 15 bp, Homo sapiens
ctgttcagattcttt

SEQ ID NO: 1113544 - DNA, 15 bp, Homo sapiens
gctgttcagattctt

SEQ ID NO: 1113545 - DNA, 15 bp, Homo sapiens
tgctgttcagattct

SEQ ID NO: 1113546 - DNA, 15 bp, Homo sapiens
ctgctgttcagattc

SEQ ID NO: 1113547 - DNA, 15 bp, Homo sapiens
gctgctgttcagatt

SEQ ID NO: 1113548 - DNA, 15 bp, Homo sapiens
ggctgctgttcagat

SEQ ID NO: 1113549 - DNA, 15 bp, Homo sapiens
aggctgctgttcaga

SEQ ID NO: 1113550 - DNA, 15 bp, Homo sapiens
taggctgctgttcag

SEQ ID NO: 1113551 - DNA, 15 bp, Homo sapiens
ataggctgctgttca

SEQ ID NO: 1113552 - DNA, 15 bp, Homo sapiens
cataggctgctgttc

SEQ ID NO: 1113553 - DNA, 15 bp, Homo sapiens
tcataggctgctgtt

SEQ ID NO: 1113554 - DNA, 15 bp, Homo sapiens
ttcataggctgctgt

SEQ ID NO: 1113555 - DNA, 15 bp, Homo sapiens
attcataggctgctg

SEQ ID NO: 1113556 - DNA, 15 bp, Homo sapiens
gattcataggctgct

SEQ ID NO: 1113557 - DNA, 15 bp, Homo sapiens
ggattcataggctgc

SEQ ID NO: 1113558 - DNA, 15 bp, Homo sapiens
gggattcataggctg

SEQ ID NO: 1113559 - DNA, 15 bp, Homo sapiens
tgggattcataggct

SEQ ID NO: 1113560 - DNA, 15 bp, Homo sapiens
ctgggattcataggc

SEQ ID NO: 1113561 - DNA, 15 bp, Homo sapiens
tctgggattcatagg

SEQ ID NO: 1113562 - DNA, 15 bp, Homo sapiens
atctgggattcatag

SEQ ID NO: 1113563 - DNA, 15 bp, Homo sapiens
gatctgggattcata

SEQ ID NO: 1113564 - DNA, 15 bp, Homo sapiens
agatctgggattcat

SEQ ID NO: 1113565 - DNA, 15 bp, Homo sapiens
aagatctgggattca

SEQ ID NO: 1113566 - DNA, 15 bp, Homo sapiens
gaagatctgggattc

SEQ ID NO: 1113567 - DNA, 15 bp, Homo sapiens
ggaagatctgggatt

SEQ ID NO: 1113568 - DNA, 15 bp, Homo sapiens
gggaagatctgggat

SEQ ID NO: 1113569 - DNA, 15 bp, Homo sapiens
agggaagatctggga

SEQ ID NO: 1113570 - DNA, 15 bp, Homo sapiens
gagggaagatctggg

SEQ ID NO: 1113571 - DNA, 15 bp, Homo sapiens
agagggaagatctgg

SEQ ID NO: 1113572 - DNA, 15 bp, Homo sapiens
cagagggaagatctg

SEQ ID NO: 1113573 - DNA, 15 bp, Homo sapiens
tcagagggaagatct

SEQ ID NO: 1113574 - DNA, 15 bp, Homo sapiens
gtcagagggaagatc

SEQ ID NO: 1113575 - DNA, 15 bp, Homo sapiens
tgtcagagggaagat

SEQ ID NO: 1113576 - DNA, 15 bp, Homo sapiens
atgtcagagggaaga

SEQ ID NO: 1113577 - DNA, 15 bp, Homo sapiens
tatgtcagagggaag

SEQ ID NO: 1113578 - DNA, 15 bp, Homo sapiens
ctatgtcagagggaa

SEQ ID NO: 1113579 - DNA, 15 bp, Homo sapiens
actatgtcagaggga

SEQ ID NO: 1113580 - DNA, 15 bp, Homo sapiens
gactatgtcagaggg

SEQ ID NO: 1113581 - DNA, 15 bp, Homo sapiens
agactatgtcagagg

SEQ ID NO: 1113582 - DNA, 15 bp, Homo sapiens
tagactatgtcagag

SEQ ID NO: 1113583 - DNA, 15 bp, Homo sapiens
gtagactatgtcaga

SEQ ID NO: 1113584 - DNA, 15 bp, Homo sapiens
ggtagactatgtcag

SEQ ID NO: 1113585 - DNA, 15 bp, Homo sapiens
gggtagactatgtca

SEQ ID NO: 1113586 - DNA, 15 bp, Homo sapiens
tgggtagactatgtc

SEQ ID NO: 1113587 - DNA, 15 bp, Homo sapiens
ttgggtagactatgt

SEQ ID NO: 1113588 - DNA, 15 bp, Homo sapiens
tttgggtagactatg

SEQ ID NO: 1113589 - DNA, 15 bp, Homo sapiens
atttgggtagactat

SEQ ID NO: 1113590 - DNA, 15 bp, Homo sapiens
tatttgggtagacta

SEQ ID NO: 1113591 - DNA, 15 bp, Homo sapiens
ttatttgggtagact

SEQ ID NO: 1113592 - DNA, 15 bp, Homo sapiens
cttatttgggtagac

SEQ ID NO: 1113593 - DNA, 15 bp, Homo sapiens
tcttatttgggtaga

SEQ ID NO: 1113594 - DNA, 15 bp, Homo sapiens
ctcttatttgggtag

SEQ ID NO: 1113595 - DNA, 15 bp, Homo sapiens
tctcttatttgggta

SEQ ID NO: 1113596 - DNA, 15 bp, Homo sapiens
ctctcttatttgggt

SEQ ID NO: 1113597 - DNA, 15 bp, Homo sapiens
tctctcttatttggg

SEQ ID NO: 1113598 - DNA, 15 bp, Homo sapiens
ttctctcttatttgg

SEQ ID NO: 1113599 - DNA, 15 bp, Homo sapiens
gttctctcttatttg

SEQ ID NO: 1113600 - DNA, 15 bp, Homo sapiens
ggttctctcttattt

SEQ ID NO: 1113601 - DNA, 15 bp, Homo sapiens
tggttctctcttatt

SEQ ID NO: 1113602 - DNA, 15 bp, Homo sapiens
ctggttctctcttat

SEQ ID NO: 1113603 - DNA, 15 bp, Homo sapiens
tctggttctctctta

SEQ ID NO: 1113604 - DNA, 15 bp, Homo sapiens
ttctggttctctctt

SEQ ID NO: 1113605 - DNA, 15 bp, Homo sapiens
tttctggttctctct

SEQ ID NO: 1113606 - DNA, 15 bp, Homo sapiens
ttttctggttctctc

SEQ ID NO: 1113607 - DNA, 15 bp, Homo sapiens
cttttctggttctct

SEQ ID NO: 1113608 - DNA, 15 bp, Homo sapiens
gcttttctggttctc

SEQ ID NO: 1113609 - DNA, 15 bp, Homo sapiens
tgcttttctggttct

SEQ ID NO: 1113610 - DNA, 15 bp, Homo sapiens
ttgcttttctggttc

SEQ ID NO: 1113611 - DNA, 15 bp, Homo sapiens
cttgcttttctggtt

SEQ ID NO: 1113612 - DNA, 15 bp, Homo sapiens
ccttgcttttctggt

SEQ ID NO: 1113613 - DNA, 15 bp, Homo sapiens
accttgcttttctgg

SEQ ID NO: 1113614 - DNA, 15 bp, Homo sapiens
aaccttgcttttctg

SEQ ID NO: 1113615 - DNA, 15 bp, Homo sapiens
gaaccttgcttttct

SEQ ID NO: 1113616 - DNA, 15 bp, Homo sapiens
agaaccttgcttttc

SEQ ID NO: 1113617 - DNA, 15 bp, Homo sapiens
aagaaccttgctttt

SEQ ID NO: 1113618 - DNA, 15 bp, Homo sapiens
aaagaaccttgcttt

SEQ ID NO: 1113619 - DNA, 15 bp, Homo sapiens
taaagaaccttgctt

SEQ ID NO: 1113620 - DNA, 15 bp, Homo sapiens
ttaaagaaccttgct

SEQ ID NO: 1113621 - DNA, 15 bp, Homo sapiens
gttaaagaaccttgc

SEQ ID NO: 1113622 - DNA, 15 bp, Homo sapiens
tgttaaagaaccttg

SEQ ID NO: 1113623 - DNA, 15 bp, Homo sapiens
gtgttaaagaacctt

SEQ ID NO: 1113624 - DNA, 15 bp, Homo sapiens
ggtgttaaagaacct

SEQ ID NO: 1113625 - DNA, 15 bp, Homo sapiens
gggtgttaaagaacc

SEQ ID NO: 1113626 - DNA, 15 bp, Homo sapiens
agggtgttaaagaac

SEQ ID NO: 1113627 - DNA, 15 bp, Homo sapiens
cagggtgttaaagaa

SEQ ID NO: 1113628 - DNA, 15 bp, Homo sapiens
tcagggtgttaaaga

SEQ ID NO: 1113629 - DNA, 15 bp, Homo sapiens
ttcagggtgttaaag

SEQ ID NO: 1113630 - DNA, 15 bp, Homo sapiens
tttcagggtgttaaa

SEQ ID NO: 1113631 - DNA, 15 bp, Homo sapiens
ttttcagggtgttaa

SEQ ID NO: 1113632 - DNA, 15 bp, Homo sapiens
cttttcagggtgtta

SEQ ID NO: 1113633 - DNA, 15 bp, Homo sapiens
tcttttcagggtgtt

SEQ ID NO: 1113634 - DNA, 15 bp, Homo sapiens
atcttttcagggtgt

SEQ ID NO: 1113635 - DNA, 15 bp, Homo sapiens
gatcttttcagggtg

SEQ ID NO: 1113636 - DNA, 15 bp, Homo sapiens
tgatcttttcagggt

SEQ ID NO: 1113637 - DNA, 15 bp, Homo sapiens
atgatcttttcaggg

SEQ ID NO: 1113638 - DNA, 15 bp, Homo sapiens
tatgatcttttcagg

SEQ ID NO: 1113639 - DNA, 15 bp, Homo sapiens
gtatgatcttttcag

SEQ ID NO: 1113640 - DNA, 15 bp, Homo sapiens
ggtatgatcttttca

SEQ ID NO: 1113641 - DNA, 15 bp, Homo sapiens
tggtatgatcttttc

SEQ ID NO: 1113642 - DNA, 15 bp, Homo sapiens
ctggtatgatctttt

SEQ ID NO: 1113643 - DNA, 15 bp, Homo sapiens
gctggtatgatcttt

SEQ ID NO: 1113644 - DNA, 15 bp, Homo sapiens
agctggtatgatctt

SEQ ID NO: 1113645 - DNA, 15 bp, Homo sapiens
gagctggtatgatct

SEQ ID NO: 1113646 - DNA, 15 bp, Homo sapiens
tgagctggtatgatc

SEQ ID NO: 1113647 - DNA, 15 bp, Homo sapiens
gtgagctggtatgat

SEQ ID NO: 1113648 - DNA, 15 bp, Homo sapiens
ggtgagctggtatga

SEQ ID NO: 1113649 - DNA, 15 bp, Homo sapiens
tggtgagctggtatg

SEQ ID NO: 1113650 - DNA, 15 bp, Homo sapiens
ctggtgagctggtat

SEQ ID NO: 1113651 - DNA, 15 bp, Homo sapiens
gctggtgagctggta

SEQ ID NO: 1113652 - DNA, 15 bp, Homo sapiens
tgctggtgagctggt

SEQ ID NO: 1113653 - DNA, 15 bp, Homo sapiens
ttgctggtgagctgg

SEQ ID NO: 1113654 - DNA, 15 bp, Homo sapiens
attgctggtgagctg

SEQ ID NO: 1113655 - DNA, 15 bp, Homo sapiens
cattgctggtgagct

SEQ ID NO: 1113656 - DNA, 15 bp, Homo sapiens
ccattgctggtgagc

SEQ ID NO: 1113657 - DNA, 15 bp, Homo sapiens
atccattgctggtga

SEQ ID NO: 1113658 - DNA, 15 bp, Homo sapiens
gatccattgctggtg

SEQ ID NO: 1113659 - DNA, 15 bp, Homo sapiens
agatccattgctggt

SEQ ID NO: 1113660 - DNA, 15 bp, Homo sapiens
tagatccattgctgg

SEQ ID NO: 1113661 - DNA, 15 bp, Homo sapiens
ttagatccattgctg

SEQ ID NO: 1113662 - DNA, 15 bp, Homo sapiens
tttagatccattgct

SEQ ID NO: 1113663 - DNA, 15 bp, Homo sapiens
gtttagatccattgc

SEQ ID NO: 1113664 - DNA, 15 bp, Homo sapiens
ggtttagatccattg

SEQ ID NO: 1113665 - DNA, 15 bp, Homo sapiens
tggtttagatccatt

SEQ ID NO: 1113666 - DNA, 15 bp, Homo sapiens
ttggtttagatccat

SEQ ID NO: 1113667 - DNA, 15 bp, Homo sapiens
cttggtttagatcca

SEQ ID NO: 1113668 - DNA, 15 bp, Homo sapiens
tcttggtttagatcc

SEQ ID NO: 1113669 - DNA, 15 bp, Homo sapiens
atcttggtttagatc

SEQ ID NO: 1113670 - DNA, 15 bp, Homo sapiens
catcttggtttagat

SEQ ID NO: 1113671 - DNA, 15 bp, Homo sapiens
tcatcttggtttaga

SEQ ID NO: 1113672 - DNA, 15 bp, Homo sapiens
ttcatcttggtttag

SEQ ID NO: 1113673 - DNA, 15 bp, Homo sapiens
tttcatcttggttta

SEQ ID NO: 1113674 - DNA, 15 bp, Homo sapiens
atttcatcttggttt

SEQ ID NO: 1113675 - DNA, 15 bp, Homo sapiens
gatttcatcttggtt

SEQ ID NO: 1113676 - DNA, 15 bp, Homo sapiens
agatttcatcttggt

SEQ ID NO: 1113677 - DNA, 15 bp, Homo sapiens
gagatttcatcttgg

SEQ ID NO: 1113678 - DNA, 15 bp, Homo sapiens
agagatttcatcttg

SEQ ID NO: 1113679 - DNA, 15 bp, Homo sapiens
cagagatttcatctt

SEQ ID NO: 1113680 - DNA, 15 bp, Homo sapiens
tcagagatttcatct

SEQ ID NO: 1113681 - DNA, 15 bp, Homo sapiens
ttcagagatttcatc

SEQ ID NO: 1113682 - DNA, 15 bp, Homo sapiens
attcagagatttcat

SEQ ID NO: 1113683 - DNA, 15 bp, Homo sapiens
aattcagagatttca

SEQ ID NO: 1113684 - DNA, 15 bp, Homo sapiens
caattcagagatttc

SEQ ID NO: 1113685 - DNA, 15 bp, Homo sapiens
gcaattcagagattt

SEQ ID NO: 1113686 - DNA, 15 bp, Homo sapiens
ggcaattcagagatt

SEQ ID NO: 1113687 - DNA, 15 bp, Homo sapiens
tggcaattcagagat

SEQ ID NO: 1113688 - DNA, 15 bp, Homo sapiens
ctggcaattcagaga

SEQ ID NO: 1113689 - DNA, 15 bp, Homo sapiens
tctggcaattcagag

SEQ ID NO: 1113690 - DNA, 15 bp, Homo sapiens
ttctggcaattcaga

SEQ ID NO: 1113691 - DNA, 15 bp, Homo sapiens
tttctggcaattcag

SEQ ID NO: 1113692 - DNA, 15 bp, Homo sapiens
ttttctggcaattca

SEQ ID NO: 1113693 - DNA, 15 bp, Homo sapiens
tttttctggcaattc

SEQ ID NO: 1113694 - DNA, 15 bp, Homo sapiens
ctttttctggcaatt

SEQ ID NO: 1113695 - DNA, 15 bp, Homo sapiens
tctttttctggcaat

SEQ ID NO: 1113696 - DNA, 15 bp, Homo sapiens
gtctttttctggcaa

SEQ ID NO: 1113697 - DNA, 15 bp, Homo sapiens
agtctttttctggca

SEQ ID NO: 1113698 - DNA, 15 bp, Homo sapiens
aagtctttttctggc

SEQ ID NO: 1113699 - DNA, 15 bp, Homo sapiens
aaagtctttttctgg

SEQ ID NO: 1113700 - DNA, 15 bp, Homo sapiens
taaagtctttttctg

SEQ ID NO: 1113701 - DNA, 15 bp, Homo sapiens
ctaaagtctttttct

SEQ ID NO: 1113702 - DNA, 15 bp, Homo sapiens
tctaaagtctttttc

SEQ ID NO: 1113703 - DNA, 15 bp, Homo sapiens
ttctaaagtcttttt

SEQ ID NO: 1113704 - DNA, 15 bp, Homo sapiens
cttctaaagtctttt

SEQ ID NO: 1113705 - DNA, 15 bp, Homo sapiens
ccttctaaagtcttt

SEQ ID NO: 1113706 - DNA, 15 bp, Homo sapiens
accttctaaagtctt

SEQ ID NO: 1113707 - DNA, 15 bp, Homo sapiens
aaccttctaaagtct

SEQ ID NO: 1113708 - DNA, 15 bp, Homo sapiens
caaccttctaaagtc

SEQ ID NO: 1113709 - DNA, 15 bp, Homo sapiens
tcaaccttctaaagt

SEQ ID NO: 1113710 - DNA, 15 bp, Homo sapiens
atcaaccttctaaag

SEQ ID NO: 1113711 - DNA, 15 bp, Homo sapiens
aatcaaccttctaaa

SEQ ID NO: 1113712 - DNA, 15 bp, Homo sapiens
taatcaaccttctaa

SEQ ID NO: 1113713 - DNA, 15 bp, Homo sapiens
ataatcaaccttcta

SEQ ID NO: 1113714 - DNA, 15 bp, Homo sapiens
aataatcaaccttct

SEQ ID NO: 1113715 - DNA, 15 bp, Homo sapiens
taataatcaaccttc

SEQ ID NO: 1113716 - DNA, 15 bp, Homo sapiens
ttaataatcaacctt

SEQ ID NO: 1113717 - DNA, 15 bp, Homo sapiens
cttaataatcaacct

SEQ ID NO: 1113718 - DNA, 15 bp, Homo sapiens
gcttaataatcaacc

SEQ ID NO: 1113719 - DNA, 15 bp, Homo sapiens
agcttaataatcaac

SEQ ID NO: 1113720 - DNA, 15 bp, Homo sapiens
tagcttaataatcaa

SEQ ID NO: 1113721 - DNA, 15 bp, Homo sapiens
ttagcttaataatca

SEQ ID NO: 1113722 - DNA, 15 bp, Homo sapiens
attagcttaataatc

SEQ ID NO: 1113723 - DNA, 15 bp, Homo sapiens
gattagcttaataat

SEQ ID NO: 1113724 - DNA, 15 bp, Homo sapiens
tgattagcttaataa

SEQ ID NO: 1113725 - DNA, 15 bp, Homo sapiens
ttgattagcttaata

SEQ ID NO: 1113726 - DNA, 15 bp, Homo sapiens
cttgattagcttaat

SEQ ID NO: 1113727 - DNA, 15 bp, Homo sapiens
ccttgattagcttaa

SEQ ID NO: 1113728 - DNA, 15 bp, Homo sapiens
tccttgattagctta

SEQ ID NO: 1113729 - DNA, 15 bp, Homo sapiens
ctccttgattagctt

SEQ ID NO: 1113730 - DNA, 15 bp, Homo sapiens
cctccttgattagct

SEQ ID NO: 1113731 - DNA, 15 bp, Homo sapiens
gcctccttgattagc

SEQ ID NO: 1113732 - DNA, 15 bp, Homo sapiens
tgcctccttgattag

SEQ ID NO: 1113733 - DNA, 15 bp, Homo sapiens
gtgcctccttgatta

SEQ ID NO: 1113734 - DNA, 15 bp, Homo sapiens
ggtgcctccttgatt

SEQ ID NO: 1113735 - DNA, 15 bp, Homo sapiens
tggtgcctccttgat

SEQ ID NO: 1113736 - DNA, 15 bp, Homo sapiens
ctggtgcctccttga

SEQ ID NO: 1113737 - DNA, 15 bp, Homo sapiens
tctggtgcctccttg

SEQ ID NO: 1113738 - DNA, 15 bp, Homo sapiens
ctctggtgcctcctt

SEQ ID NO: 1113739 - DNA, 15 bp, Homo sapiens
tctctggtgcctcct

SEQ ID NO: 1113740 - DNA, 15 bp, Homo sapiens
ttctctggtgcctcc

SEQ ID NO: 1113741 - DNA, 15 bp, Homo sapiens
tttctctggtgcctc

SEQ ID NO: 1113742 - DNA, 15 bp, Homo sapiens
ctttctctggtgcct

SEQ ID NO: 1113743 - DNA, 15 bp, Homo sapiens
cctttctctggtgcc

SEQ ID NO: 1113744 - DNA, 15 bp, Homo sapiens
acctttctctggtgc

SEQ ID NO: 1113745 - DNA, 15 bp, Homo sapiens
aacctttctctggtg

SEQ ID NO: 1113746 - DNA, 15 bp, Homo sapiens
taacctttctctggt

SEQ ID NO: 1113747 - DNA, 15 bp, Homo sapiens
ttaacctttctctgg

SEQ ID NO: 1113748 - DNA, 15 bp, Homo sapiens
cttaacctttctctg

SEQ ID NO: 1113749 - DNA, 15 bp, Homo sapiens
acttaacctttctct

SEQ ID NO: 1113750 - DNA, 15 bp, Homo sapiens
gacttaacctttctc

SEQ ID NO: 1113751 - DNA, 15 bp, Homo sapiens
ggacttaacctttct

SEQ ID NO: 1113752 - DNA, 15 bp, Homo sapiens
tggacttaacctttc

SEQ ID NO: 1113753 - DNA, 15 bp, Homo sapiens
ttggacttaaccttt

SEQ ID NO: 1113754 - DNA, 15 bp, Homo sapiens
gttggacttaacctt

SEQ ID NO: 1113755 - DNA, 15 bp, Homo sapiens
agttggacttaacct

SEQ ID NO: 1113756 - DNA, 15 bp, Homo sapiens
cagttggacttaacc

SEQ ID NO: 1113757 - DNA, 15 bp, Homo sapiens
tcagttggacttaac

SEQ ID NO: 1113758 - DNA, 15 bp, Homo sapiens
ttcagttggacttaa

SEQ ID NO: 1113759 - DNA, 15 bp, Homo sapiens
cttcagttggactta

SEQ ID NO: 1113760 - DNA, 15 bp, Homo sapiens
ccttcagttggactt

SEQ ID NO: 1113761 - DNA, 15 bp, Homo sapiens
tccttcagttggact

SEQ ID NO: 1113762 - DNA, 15 bp, Homo sapiens
ttccttcagttggac

SEQ ID NO: 1113763 - DNA, 15 bp, Homo sapiens
tttccttcagttgga

SEQ ID NO: 1113764 - DNA, 15 bp, Homo sapiens
atttccttcagttgg

SEQ ID NO: 1113765 - DNA, 15 bp, Homo sapiens
tatttccttcagttg

SEQ ID NO: 1113766 - DNA, 15 bp, Homo sapiens
ttatttccttcagtt

SEQ ID NO: 1113767 - DNA, 15 bp, Homo sapiens
tttatttccttcagt

SEQ ID NO: 1113768 - DNA, 15 bp, Homo sapiens
ttttatttccttcag

SEQ ID NO: 1113769 - DNA, 15 bp, Homo sapiens
tttttatttccttca

SEQ ID NO: 1113770 - DNA, 15 bp, Homo sapiens
ttttttatttccttc

SEQ ID NO: 1113771 - DNA, 15 bp, Homo sapiens
gttttttatttcctt

SEQ ID NO: 1113772 - DNA, 15 bp, Homo sapiens
tgttttttatttcct

SEQ ID NO: 1113773 - DNA, 15 bp, Homo sapiens
atgttttttatttcc

SEQ ID NO: 1113774 - DNA, 15 bp, Homo sapiens
catgttttttatttc

SEQ ID NO: 1113775 - DNA, 15 bp, Homo sapiens
tcatgttttttattt

SEQ ID NO: 1113776 - DNA, 15 bp, Homo sapiens
atcatgttttttatt

SEQ ID NO: 1113777 - DNA, 15 bp, Homo sapiens
tatcatgttttttat

SEQ ID NO: 1113778 - DNA, 15 bp, Homo sapiens
gtatcatgtttttta

SEQ ID NO: 1113779 - DNA, 15 bp, Homo sapiens
tgtatcatgtttttt

SEQ ID NO: 1113780 - DNA, 15 bp, Homo sapiens
ctgtatcatgttttt

SEQ ID NO: 1113781 - DNA, 15 bp, Homo sapiens
cctgtatcatgtttt

SEQ ID NO: 1113782 - DNA, 15 bp, Homo sapiens
tcctgtatcatgttt

SEQ ID NO: 1113783 - DNA, 15 bp, Homo sapiens
atcctgtatcatgtt

SEQ ID NO: 1113784 - DNA, 15 bp, Homo sapiens
tatcctgtatcatgt

SEQ ID NO: 1113785 - DNA, 15 bp, Homo sapiens
atatcctgtatcatg

SEQ ID NO: 1113786 - DNA, 15 bp, Homo sapiens
catatcctgtatcat

SEQ ID NO: 1113787 - DNA, 15 bp, Homo sapiens
tcatatcctgtatca

SEQ ID NO: 1113788 - DNA, 15 bp, Homo sapiens
ttcatatcctgtatc

SEQ ID NO: 1113789 - DNA, 15 bp, Homo sapiens
tttcatatcctgtat

SEQ ID NO: 1113790 - DNA, 15 bp, Homo sapiens
ctttcatatcctgta

SEQ ID NO: 1113791 - DNA, 15 bp, Homo sapiens
cctttcatatcctgt

SEQ ID NO: 1113792 - DNA, 15 bp, Homo sapiens
tcctttcatatcctg

SEQ ID NO: 1113793 - DNA, 15 bp, Homo sapiens
ttcctttcatatcct

SEQ ID NO: 1113794 - DNA, 15 bp, Homo sapiens
tttcctttcatatcc

SEQ ID NO: 1113795 - DNA, 15 bp, Homo sapiens
ttttcctttcatatc

SEQ ID NO: 1113796 - DNA, 15 bp, Homo sapiens
attttcctttcatat

SEQ ID NO: 1113797 - DNA, 15 bp, Homo sapiens
aattttcctttcata

SEQ ID NO: 1113798 - DNA, 15 bp, Homo sapiens
gaattttcctttcat

SEQ ID NO: 1113799 - DNA, 15 bp, Homo sapiens
agaattttcctttca

SEQ ID NO: 1113800 - DNA, 15 bp, Homo sapiens
aagaattttcctttc

SEQ ID NO: 1113801 - DNA, 15 bp, Homo sapiens
gaagaattttccttt

SEQ ID NO: 1113802 - DNA, 15 bp, Homo sapiens
tgaagaattttcctt

SEQ ID NO: 1113803 - DNA, 15 bp, Homo sapiens
ctgaagaattttcct

SEQ ID NO: 1113804 - DNA, 15 bp, Homo sapiens
actgaagaattttcc

SEQ ID NO: 1113805 - DNA, 15 bp, Homo sapiens
aactgaagaattttc

SEQ ID NO: 1113806 - DNA, 15 bp, Homo sapiens
taactgaagaatttt

SEQ ID NO: 1113807 - DNA, 15 bp, Homo sapiens
ttaactgaagaattt

SEQ ID NO: 1113808 - DNA, 15 bp, Homo sapiens
tttaactgaagaatt

SEQ ID NO: 1113809 - DNA, 15 bp, Homo sapiens
atttaactgaagaat

SEQ ID NO: 1113810 - DNA, 15 bp, Homo sapiens
tatttaactgaagaa

SEQ ID NO: 1113811 - DNA, 15 bp, Homo sapiens
ctatttaactgaaga

SEQ ID NO: 1113812 - DNA, 15 bp, Homo sapiens
tctatttaactgaag

SEQ ID NO: 1113813 - DNA, 15 bp, Homo sapiens
atctatttaactgaa

SEQ ID NO: 1113814 - DNA, 15 bp, Homo sapiens
tatctatttaactga

SEQ ID NO: 1113815 - DNA, 15 bp, Homo sapiens
ctatctatttaactg

SEQ ID NO: 1113816 - DNA, 15 bp, Homo sapiens
gctatctatttaact

SEQ ID NO: 1113817 - DNA, 15 bp, Homo sapiens
tgctatctatttaac

SEQ ID NO: 1113818 - DNA, 15 bp, Homo sapiens
atgctatctatttaa

SEQ ID NO: 1113819 - DNA, 15 bp, Homo sapiens
tatgctatctattta

SEQ ID NO: 1113820 - DNA, 15 bp, Homo sapiens
ttatgctatctattt

SEQ ID NO: 1113821 - DNA, 15 bp, Homo sapiens
tttatgctatctatt

SEQ ID NO: 1113822 - DNA, 15 bp, Homo sapiens
atttatgctatctat

SEQ ID NO: 1113823 - DNA, 15 bp, Homo sapiens
tatttatgctatcta

SEQ ID NO: 1113824 - DNA, 15 bp, Homo sapiens
ttatttatgctatct

SEQ ID NO: 1113825 - DNA, 15 bp, Homo sapiens
tttatttatgctatc

SEQ ID NO: 1113826 - DNA, 15 bp, Homo sapiens
ttttatttatgctat

SEQ ID NO: 1113827 - DNA, 15 bp, Homo sapiens
tttttatttatgcta

SEQ ID NO: 1113828 - DNA, 15 bp, Homo sapiens
ttttttatttatgct

SEQ ID NO: 1113829 - DNA, 15 bp, Homo sapiens
tttttttatttatgc

SEQ ID NO: 1113830 - DNA, 15 bp, Homo sapiens
gtttttttatttatg

SEQ ID NO: 1113831 - DNA, 15 bp, Homo sapiens
tgtttttttatttat

SEQ ID NO: 1113832 - DNA, 15 bp, Homo sapiens
ttgtttttttattta

SEQ ID NO: 1113833 - DNA, 15 bp, Homo sapiens
gttgtttttttattt

SEQ ID NO: 1113834 - DNA, 15 bp, Homo sapiens
ggttgtttttttatt

SEQ ID NO: 1113835 - DNA, 15 bp, Homo sapiens
tggttgtttttttat

SEQ ID NO: 1113836 - DNA, 15 bp, Homo sapiens
gtggttgttttttta

SEQ ID NO: 1113837 - DNA, 15 bp, Homo sapiens
tgtggttgttttttt

SEQ ID NO: 1113838 - DNA, 15 bp, Homo sapiens
ttgtggttgtttttt

SEQ ID NO: 1113839 - DNA, 15 bp, Homo sapiens
gttgtggttgttttt

SEQ ID NO: 1113840 - DNA, 15 bp, Homo sapiens
agttgtggttgtttt

SEQ ID NO: 1113841 - DNA, 15 bp, Homo sapiens
aagttgtggttgttt

SEQ ID NO: 1113842 - DNA, 15 bp, Homo sapiens
gaagttgtggttgtt

SEQ ID NO: 1113843 - DNA, 15 bp, Homo sapiens
agaagttgtggttgt

SEQ ID NO: 1113844 - DNA, 15 bp, Homo sapiens
cagaagttgtggttg

SEQ ID NO: 1113845 - DNA, 15 bp, Homo sapiens
ccagaagttgtggtt

SEQ ID NO: 1113846 - DNA, 15 bp, Homo sapiens
tccagaagttgtggt

SEQ ID NO: 1113847 - DNA, 15 bp, Homo sapiens
ttccagaagttgtgg

SEQ ID NO: 1113848 - DNA, 15 bp, Homo sapiens
tttccagaagttgtg

SEQ ID NO: 1113849 - DNA, 15 bp, Homo sapiens
atttccagaagttgt

SEQ ID NO: 1113850 - DNA, 15 bp, Homo sapiens
gatttccagaagttg

SEQ ID NO: 1113851 - DNA, 15 bp, Homo sapiens
tgatttccagaagtt

SEQ ID NO: 1113852 - DNA, 15 bp, Homo sapiens
ttgatttccagaagt

SEQ ID NO: 1113853 - DNA, 15 bp, Homo sapiens
cttgatttccagaag

SEQ ID NO: 1113854 - DNA, 15 bp, Homo sapiens
ccttgatttccagaa

SEQ ID NO: 1113855 - DNA, 15 bp, Homo sapiens
tccttgatttccaga

SEQ ID NO: 1113856 - DNA, 15 bp, Homo sapiens
gtccttgatttccag

SEQ ID NO: 1113857 - DNA, 15 bp, Homo sapiens
tgtccttgatttcca

SEQ ID NO: 1113858 - DNA, 15 bp, Homo sapiens
gtgtccttgatttcc

SEQ ID NO: 1113859 - DNA, 15 bp, Homo sapiens
tgtgtccttgatttc

SEQ ID NO: 1113860 - DNA, 15 bp, Homo sapiens
gtgtgtccttgattt

SEQ ID NO: 1113861 - DNA, 15 bp, Homo sapiens
agtgtgtccttgatt

SEQ ID NO: 1113862 - DNA, 15 bp, Homo sapiens
aagtgtgtccttgat

SEQ ID NO: 1113863 - DNA, 15 bp, Homo sapiens
taagtgtgtccttga

SEQ ID NO: 1113864 - DNA, 15 bp, Homo sapiens
ctaagtgtgtccttg

SEQ ID NO: 1113865 - DNA, 15 bp, Homo sapiens
tctaagtgtgtcctt

SEQ ID NO: 1113866 - DNA, 15 bp, Homo sapiens
ctctaagtgtgtcct

SEQ ID NO: 1113867 - DNA, 15 bp, Homo sapiens
tctctaagtgtgtcc

SEQ ID NO: 1113868 - DNA, 15 bp, Homo sapiens
ttctctaagtgtgtc

SEQ ID NO: 1113869 - DNA, 15 bp, Homo sapiens
tttctctaagtgtgt

SEQ ID NO: 1113870 - DNA, 15 bp, Homo sapiens
atttctctaagtgtg

SEQ ID NO: 1113871 - DNA, 15 bp, Homo sapiens
catttctctaagtgt

SEQ ID NO: 1113872 - DNA, 15 bp, Homo sapiens
gcatttctctaagtg

SEQ ID NO: 1113873 - DNA, 15 bp, Homo sapiens
tgcatttctctaagt

SEQ ID NO: 1113874 - DNA, 15 bp, Homo sapiens
atgcatttctctaag

SEQ ID NO: 1113875 - DNA, 15 bp, Homo sapiens
tatgcatttctctaa

SEQ ID NO: 1113876 - DNA, 15 bp, Homo sapiens
ttatgcatttctcta

SEQ ID NO: 1113877 - DNA, 15 bp, Homo sapiens
attatgcatttctct

SEQ ID NO: 1113878 - DNA, 15 bp, Homo sapiens
cattatgcatttctc

SEQ ID NO: 1113879 - DNA, 15 bp, Homo sapiens
acattatgcatttct

SEQ ID NO: 1113880 - DNA, 15 bp, Homo sapiens
tacattatgcatttc

SEQ ID NO: 1113881 - DNA, 15 bp, Homo sapiens
gtacattatgcattt

SEQ ID NO: 1113882 - DNA, 15 bp, Homo sapiens
agtacattatgcatt

SEQ ID NO: 1113883 - DNA, 15 bp, Homo sapiens
cagtacattatgcat

SEQ ID NO: 1113884 - DNA, 15 bp, Homo sapiens
ccagtacattatgca

SEQ ID NO: 1113885 - DNA, 15 bp, Homo sapiens
tccagtacattatgc

SEQ ID NO: 1113886 - DNA, 15 bp, Homo sapiens
ttccagtacattatg

SEQ ID NO: 1113887 - DNA, 15 bp, Homo sapiens
gttccagtacattat

SEQ ID NO: 1113888 - DNA, 15 bp, Homo sapiens
cgttccagtacatta

SEQ ID NO: 1113889 - DNA, 15 bp, Homo sapiens
acgttccagtacatt

SEQ ID NO: 1113890 - DNA, 15 bp, Homo sapiens
gacgttccagtacat

SEQ ID NO: 1113891 - DNA, 15 bp, Homo sapiens
agacgttccagtaca

SEQ ID NO: 1113892 - DNA, 15 bp, Homo sapiens
gagacgttccagtac

SEQ ID NO: 1113893 - DNA, 15 bp, Homo sapiens
tgagacgttccagta

SEQ ID NO: 1113894 - DNA, 15 bp, Homo sapiens
ctgagacgttccagt

SEQ ID NO: 1113895 - DNA, 15 bp, Homo sapiens
gctgagacgttccag

SEQ ID NO: 1113896 - DNA, 15 bp, Homo sapiens
tgctgagacgttcca

SEQ ID NO: 1113897 - DNA, 15 bp, Homo sapiens
ttgctgagacgttcc

SEQ ID NO: 1113898 - DNA, 15 bp, Homo sapiens
attgctgagacgttc

SEQ ID NO: 1113899 - DNA, 15 bp, Homo sapiens
tattgctgagacgtt

SEQ ID NO: 1113900 - DNA, 15 bp, Homo sapiens
ctattgctgagacgt

SEQ ID NO: 1113901 - DNA, 15 bp, Homo sapiens
tctattgctgagacg

SEQ ID NO: 1113902 - DNA, 15 bp, Homo sapiens
ttctattgctgagac

SEQ ID NO: 1113903 - DNA, 15 bp, Homo sapiens
attctattgctgaga

SEQ ID NO: 1113904 - DNA, 15 bp, Homo sapiens
gattctattgctgag

SEQ ID NO: 1113905 - DNA, 15 bp, Homo sapiens
tgattctattgctga

SEQ ID NO: 1113906 - DNA, 15 bp, Homo sapiens
ttgattctattgctg

SEQ ID NO: 1113907 - DNA, 15 bp, Homo sapiens
tttgattctattgct

SEQ ID NO: 1113908 - DNA, 15 bp, Homo sapiens
atttgattctattgc

SEQ ID NO: 1113909 - DNA, 15 bp, Homo sapiens
tatttgattctattg

SEQ ID NO: 1113910 - DNA, 15 bp, Homo sapiens
ttatttgattctatt

SEQ ID NO: 1113911 - DNA, 15 bp, Homo sapiens
tttatttgattctat

SEQ ID NO: 1113912 - DNA, 15 bp, Homo sapiens
gtttatttgattcta

SEQ ID NO: 1113913 - DNA, 15 bp, Homo sapiens
tgtttatttgattct

SEQ ID NO: 1113914 - DNA, 15 bp, Homo sapiens
ctgtttatttgattc

SEQ ID NO: 1113915 - DNA, 15 bp, Homo sapiens
tctgtttatttgatt

SEQ ID NO: 1113916 - DNA, 15 bp, Homo sapiens
ttctgtttatttgat

SEQ ID NO: 1113917 - DNA, 15 bp, Homo sapiens
cttctgtttatttga

SEQ ID NO: 1113918 - DNA, 15 bp, Homo sapiens
tcttctgtttatttg

SEQ ID NO: 1113919 - DNA, 15 bp, Homo sapiens
ttcttctgtttattt

SEQ ID NO: 1113920 - DNA, 15 bp, Homo sapiens
tttcttctgtttatt

SEQ ID NO: 1113921 - DNA, 15 bp, Homo sapiens
ctttcttctgtttat

SEQ ID NO: 1113922 - DNA, 15 bp, Homo sapiens
tctttcttctgttta

SEQ ID NO: 1113923 - DNA, 15 bp, Homo sapiens
ttctttcttctgttt

SEQ ID NO: 1113924 - DNA, 15 bp, Homo sapiens
tttctttcttctgtt

SEQ ID NO: 1113925 - DNA, 15 bp, Homo sapiens
gtttctttcttctgt

SEQ ID NO: 1113926 - DNA, 15 bp, Homo sapiens
agtttctttcttctg

SEQ ID NO: 1113927 - DNA, 15 bp, Homo sapiens
aagtttctttcttct

SEQ ID NO: 1113928 - DNA, 15 bp, Homo sapiens
gaagtttctttcttc

SEQ ID NO: 1113929 - DNA, 15 bp, Homo sapiens
tgaagtttctttctt

SEQ ID NO: 1113930 - DNA, 15 bp, Homo sapiens
ctgaagtttctttct

SEQ ID NO: 1113931 - DNA, 15 bp, Homo sapiens
tctgaagtttctttc

SEQ ID NO: 1113932 - DNA, 15 bp, Homo sapiens
ctctgaagtttcttt

SEQ ID NO: 1113933 - DNA, 15 bp, Homo sapiens
actctgaagtttctt

SEQ ID NO: 1113934 - DNA, 15 bp, Homo sapiens
aactctgaagtttct

SEQ ID NO: 1113935 - DNA, 15 bp, Homo sapiens
aaactctgaagtttc

SEQ ID NO: 1113936 - DNA, 15 bp, Homo sapiens
caaactctgaagttt

SEQ ID NO: 1113937 - DNA, 15 bp, Homo sapiens
tcaaactctgaagtt

SEQ ID NO: 1113938 - DNA, 15 bp, Homo sapiens
ttcaaactctgaagt

SEQ ID NO: 1113939 - DNA, 15 bp, Homo sapiens
cttcaaactctgaag

SEQ ID NO: 1113940 - DNA, 15 bp, Homo sapiens
tcttcaaactctgaa

SEQ ID NO: 1113941 - DNA, 15 bp, Homo sapiens
gtcttcaaactctga

SEQ ID NO: 1113942 - DNA, 15 bp, Homo sapiens
tgtcttcaaactctg

SEQ ID NO: 1113943 - DNA, 15 bp, Homo sapiens
atgtcttcaaactct

SEQ ID NO: 1113944 - DNA, 15 bp, Homo sapiens
catgtcttcaaactc

SEQ ID NO: 1113945 - DNA, 15 bp, Homo sapiens
ccatgtcttcaaact

SEQ ID NO: 1113946 - DNA, 15 bp, Homo sapiens
cccatgtcttcaaac

SEQ ID NO: 1113947 - DNA, 15 bp, Homo sapiens
acccatgtcttcaaa

SEQ ID NO: 1113948 - DNA, 15 bp, Homo sapiens
aacccatgtcttcaa

SEQ ID NO: 1113949 - DNA, 15 bp, Homo sapiens
aaacccatgtcttca

SEQ ID NO: 1113950 - DNA, 15 bp, Homo sapiens
gaaacccatgtcttc

SEQ ID NO: 1113951 - DNA, 15 bp, Homo sapiens
tgaaacccatgtctt

SEQ ID NO: 1113952 - DNA, 15 bp, Homo sapiens
ttgaaacccatgtct

SEQ ID NO: 1113953 - DNA, 15 bp, Homo sapiens
tttgaaacccatgtc

SEQ ID NO: 1113954 - DNA, 15 bp, Homo sapiens
atttgaaacccatgt

SEQ ID NO: 1113955 - DNA, 15 bp, Homo sapiens
aatttgaaacccatg

SEQ ID NO: 1113956 - DNA, 15 bp, Homo sapiens
taatttgaaacccat

SEQ ID NO: 1113957 - DNA, 15 bp, Homo sapiens
ttaatttgaaaccca

SEQ ID NO: 1113958 - DNA, 15 bp, Homo sapiens
attaatttgaaaccc

SEQ ID NO: 1113959 - DNA, 15 bp, Homo sapiens
gattaatttgaaacc

SEQ ID NO: 1113960 - DNA, 15 bp, Homo sapiens
ggattaatttgaaac

SEQ ID NO: 1113961 - DNA, 15 bp, Homo sapiens
tggattaatttgaaa

SEQ ID NO: 1113962 - DNA, 15 bp, Homo sapiens
atggattaatttgaa

SEQ ID NO: 1113963 - DNA, 15 bp, Homo sapiens
gatggattaatttga

SEQ ID NO: 1113964 - DNA, 15 bp, Homo sapiens
tgatggattaatttg

SEQ ID NO: 1113965 - DNA, 15 bp, Homo sapiens
ttgatggattaattt

SEQ ID NO: 1113966 - DNA, 15 bp, Homo sapiens
tttgatggattaatt

SEQ ID NO: 1113967 - DNA, 15 bp, Homo sapiens
ctttgatggattaat

SEQ ID NO: 1113968 - DNA, 15 bp, Homo sapiens
tctttgatggattaa

SEQ ID NO: 1113969 - DNA, 15 bp, Homo sapiens
gtctttgatggatta

SEQ ID NO: 1113970 - DNA, 15 bp, Homo sapiens
ttgtctttgatggat

SEQ ID NO: 1113971 - DNA, 15 bp, Homo sapiens
tttgtctttgatgga

SEQ ID NO: 1113972 - DNA, 15 bp, Homo sapiens
ctttgtctttgatgg

SEQ ID NO: 1113973 - DNA, 15 bp, Homo sapiens
tctttgtctttgatg

SEQ ID NO: 1113974 - DNA, 15 bp, Homo sapiens
ttctttgtctttgat

SEQ ID NO: 1113975 - DNA, 15 bp, Homo sapiens
tttctttgtctttga

SEQ ID NO: 1113976 - DNA, 15 bp, Homo sapiens
ttttctttgtctttg

SEQ ID NO: 1113977 - DNA, 15 bp, Homo sapiens
tttttctttgtcttt

SEQ ID NO: 1113978 - DNA, 15 bp, Homo sapiens
ttttttctttgtctt

SEQ ID NO: 1113979 - DNA, 15 bp, Homo sapiens
cttttttctttgtct

SEQ ID NO: 1113980 - DNA, 15 bp, Homo sapiens
tcttttttctttgtc

SEQ ID NO: 1113981 - DNA, 15 bp, Homo sapiens
ttcttttttctttgt

SEQ ID NO: 1113982 - DNA, 15 bp, Homo sapiens
attcttttttctttg

SEQ ID NO: 1113983 - DNA, 15 bp, Homo sapiens
aattcttttttcttt

SEQ ID NO: 1113984 - DNA, 15 bp, Homo sapiens
aaattcttttttctt

SEQ ID NO: 1113985 - DNA, 15 bp, Homo sapiens
taaattcttttttct

SEQ ID NO: 1113986 - DNA, 15 bp, Homo sapiens
ttaaattcttttttc

SEQ ID NO: 1113987 - DNA, 15 bp, Homo sapiens
tttaaattctttttt

SEQ ID NO: 1113988 - DNA, 15 bp, Homo sapiens
ttttaaattcttttt

SEQ ID NO: 1113989 - DNA, 15 bp, Homo sapiens
tttttaaattctttt

SEQ ID NO: 1113990 - DNA, 15 bp, Homo sapiens
ttttttaaattcttt

SEQ ID NO: 1113991 - DNA, 15 bp, Homo sapiens
attttttaaattctt

SEQ ID NO: 1113992 - DNA, 15 bp, Homo sapiens
cattttttaaattct

SEQ ID NO: 1113993 - DNA, 15 bp, Homo sapiens
tcattttttaaattc

SEQ ID NO: 1113994 - DNA, 15 bp, Homo sapiens
ttcattttttaaatt

SEQ ID NO: 1113995 - DNA, 15 bp, Homo sapiens
gttcattttttaaat

SEQ ID NO: 1113996 - DNA, 15 bp, Homo sapiens
tgttcattttttaaa

SEQ ID NO: 1113997 - DNA, 15 bp, Homo sapiens
ttgttcattttttaa

SEQ ID NO: 1113998 - DNA, 15 bp, Homo sapiens
tttgttcatttttta

SEQ ID NO: 1113999 - DNA, 15 bp, Homo sapiens
ctttgttcatttttt

SEQ ID NO: 1114000 - DNA, 15 bp, Homo sapiens
gctttgttcattttt

SEQ ID NO: 1114001 - DNA, 15 bp, Homo sapiens
agctttgttcatttt

SEQ ID NO: 1114002 - DNA, 15 bp, Homo sapiens
aagctttgttcattt

SEQ ID NO: 1114003 - DNA, 15 bp, Homo sapiens
gaagctttgttcatt

SEQ ID NO: 1114004 - DNA, 15 bp, Homo sapiens
ggaagctttgttcat

SEQ ID NO: 1114005 - DNA, 15 bp, Homo sapiens
tggaagctttgttca

SEQ ID NO: 1114006 - DNA, 15 bp, Homo sapiens
ttggaagctttgttc

SEQ ID NO: 1114007 - DNA, 15 bp, Homo sapiens
cttggaagctttgtt

SEQ ID NO: 1114008 - DNA, 15 bp, Homo sapiens
tcttggaagctttgt

SEQ ID NO: 1114009 - DNA, 15 bp, Homo sapiens
ttcttggaagctttg

SEQ ID NO: 1114010 - DNA, 15 bp, Homo sapiens
cttcttggaagcttt

SEQ ID NO: 1114011 - DNA, 15 bp, Homo sapiens
acttcttggaagctt

SEQ ID NO: 1114012 - DNA, 15 bp, Homo sapiens
gacttcttggaagct

SEQ ID NO: 1114013 - DNA, 15 bp, Homo sapiens
agacttcttggaagc

SEQ ID NO: 1114014 - DNA, 15 bp, Homo sapiens
cagacttcttggaag

SEQ ID NO: 1114015 - DNA, 15 bp, Homo sapiens
ccagacttcttggaa

SEQ ID NO: 1114016 - DNA, 15 bp, Homo sapiens
cccagacttcttgga

SEQ ID NO: 1114017 - DNA, 15 bp, Homo sapiens
tcccagacttcttgg

SEQ ID NO: 1114018 - DNA, 15 bp, Homo sapiens
gtcccagacttcttg

SEQ ID NO: 1114019 - DNA, 15 bp, Homo sapiens
agtcccagacttctt

SEQ ID NO: 1114020 - DNA, 15 bp, Homo sapiens
tagtcccagacttct

SEQ ID NO: 1114021 - DNA, 15 bp, Homo sapiens
atagtcccagacttc

SEQ ID NO: 1114022 - DNA, 15 bp, Homo sapiens
catagtcccagactt

SEQ ID NO: 1114023 - DNA, 15 bp, Homo sapiens
acatagtcccagact

SEQ ID NO: 1114024 - DNA, 15 bp, Homo sapiens
aacatagtcccagac

SEQ ID NO: 1114025 - DNA, 15 bp, Homo sapiens
taacatagtcccaga

SEQ ID NO: 1114026 - DNA, 15 bp, Homo sapiens
ttaacatagtcccag

SEQ ID NO: 1114027 - DNA, 15 bp, Homo sapiens
tttaacatagtccca

SEQ ID NO: 1114028 - DNA, 15 bp, Homo sapiens
atttaacatagtccc

SEQ ID NO: 1114029 - DNA, 15 bp, Homo sapiens
catttaacatagtcc

SEQ ID NO: 1114030 - DNA, 15 bp, Homo sapiens
tcatttaacatagtc

SEQ ID NO: 1114031 - DNA, 15 bp, Homo sapiens
gtcatttaacatagt

SEQ ID NO: 1114032 - DNA, 15 bp, Homo sapiens
ggtcatttaacatag

SEQ ID NO: 1114033 - DNA, 15 bp, Homo sapiens
tggtcatttaacata

SEQ ID NO: 1114034 - DNA, 15 bp, Homo sapiens
ttggtcatttaacat

SEQ ID NO: 1114035 - DNA, 15 bp, Homo sapiens
tttggtcatttaaca

SEQ ID NO: 1114036 - DNA, 15 bp, Homo sapiens
gtttggtcatttaac

SEQ ID NO: 1114037 - DNA, 15 bp, Homo sapiens
ggtttggtcatttaa

SEQ ID NO: 1114038 - DNA, 15 bp, Homo sapiens
aggtttggtcattta

SEQ ID NO: 1114039 - DNA, 15 bp, Homo sapiens
taggtttggtcattt

SEQ ID NO: 1114040 - DNA, 15 bp, Homo sapiens
ttaggtttggtcatt

SEQ ID NO: 1114041 - DNA, 15 bp, Homo sapiens
cttaggtttggtcat

SEQ ID NO: 1114042 - DNA, 15 bp, Homo sapiens
tcttaggtttggtca

SEQ ID NO: 1114043 - DNA, 15 bp, Homo sapiens
ttcttaggtttggtc

SEQ ID NO: 1114044 - DNA, 15 bp, Homo sapiens
attcttaggtttggt

SEQ ID NO: 1114045 - DNA, 15 bp, Homo sapiens
tattcttaggtttgg

SEQ ID NO: 1114046 - DNA, 15 bp, Homo sapiens
ttattcttaggtttg

SEQ ID NO: 1114047 - DNA, 15 bp, Homo sapiens
attattcttaggttt

SEQ ID NO: 1114048 - DNA, 15 bp, Homo sapiens
aattattcttaggtt

SEQ ID NO: 1114049 - DNA, 15 bp, Homo sapiens
caattattcttaggt

SEQ ID NO: 1114050 - DNA, 15 bp, Homo sapiens
ccaattattcttagg

SEQ ID NO: 1114051 - DNA, 15 bp, Homo sapiens
accaattattcttag

SEQ ID NO: 1114052 - DNA, 15 bp, Homo sapiens
caccaattattctta

SEQ ID NO: 1114053 - DNA, 15 bp, Homo sapiens
acaccaattattctt

SEQ ID NO: 1114054 - DNA, 15 bp, Homo sapiens
aacaccaattattct

SEQ ID NO: 1114055 - DNA, 15 bp, Homo sapiens
gaacaccaattattc

SEQ ID NO: 1114056 - DNA, 15 bp, Homo sapiens
agaacaccaattatt

SEQ ID NO: 1114057 - DNA, 15 bp, Homo sapiens
gagaacaccaattat

SEQ ID NO: 1114058 - DNA, 15 bp, Homo sapiens
cgagaacaccaatta

SEQ ID NO: 1114059 - DNA, 15 bp, Homo sapiens
tcgagaacaccaatt

SEQ ID NO: 1114060 - DNA, 15 bp, Homo sapiens
ctcgagaacaccaat

SEQ ID NO: 1114061 - DNA, 15 bp, Homo sapiens
cctcgagaacaccaa

SEQ ID NO: 1114062 - DNA, 15 bp, Homo sapiens
tcctcgagaacacca

SEQ ID NO: 1114063 - DNA, 15 bp, Homo sapiens
ttcctcgagaacacc

SEQ ID NO: 1114064 - DNA, 15 bp, Homo sapiens
cttcctcgagaacac

SEQ ID NO: 1114065 - DNA, 15 bp, Homo sapiens
tcttcctcgagaaca

SEQ ID NO: 1114066 - DNA, 15 bp, Homo sapiens
ttcttcctcgagaac

SEQ ID NO: 1114067 - DNA, 15 bp, Homo sapiens
cttcttcctcgagaa

SEQ ID NO: 1114068 - DNA, 15 bp, Homo sapiens
tcttcttcctcgaga

SEQ ID NO: 1114069 - DNA, 15 bp, Homo sapiens
ctcttcttcctcgag

SEQ ID NO: 1114070 - DNA, 15 bp, Homo sapiens
tctcttcttcctcga

SEQ ID NO: 1114071 - DNA, 15 bp, Homo sapiens
ttctcttcttcctcg

SEQ ID NO: 1114072 - DNA, 15 bp, Homo sapiens
tttctcttcttcctc

SEQ ID NO: 1114073 - DNA, 15 bp, Homo sapiens
atttctcttcttcct

SEQ ID NO: 1114074 - DNA, 15 bp, Homo sapiens
gatttctcttcttcc

SEQ ID NO: 1114075 - DNA, 15 bp, Homo sapiens
agatttctcttcttc

SEQ ID NO: 1114076 - DNA, 15 bp, Homo sapiens
tagatttctcttctt

SEQ ID NO: 1114077 - DNA, 15 bp, Homo sapiens
ttagatttctcttct

SEQ ID NO: 1114078 - DNA, 15 bp, Homo sapiens
tttagatttctcttc

SEQ ID NO: 1114079 - DNA, 15 bp, Homo sapiens
ttttagatttctctt

SEQ ID NO: 1114080 - DNA, 15 bp, Homo sapiens
cttttagatttctct

SEQ ID NO: 1114081 - DNA, 15 bp, Homo sapiens
acttttagatttctc

SEQ ID NO: 1114082 - DNA, 15 bp, Homo sapiens
aacttttagatttct

SEQ ID NO: 1114083 - DNA, 15 bp, Homo sapiens
aaacttttagatttc

SEQ ID NO: 1114084 - DNA, 15 bp, Homo sapiens
caaacttttagattt

SEQ ID NO: 1114085 - DNA, 15 bp, Homo sapiens
ccaaacttttagatt

SEQ ID NO: 1114086 - DNA, 15 bp, Homo sapiens
tccaaacttttagat

SEQ ID NO: 1114087 - DNA, 15 bp, Homo sapiens
ttccaaacttttaga

SEQ ID NO: 1114088 - DNA, 15 bp, Homo sapiens
tttccaaacttttag

SEQ ID NO: 1114089 - DNA, 15 bp, Homo sapiens
ttttccaaactttta

SEQ ID NO: 1114090 - DNA, 15 bp, Homo sapiens
attttccaaactttt

SEQ ID NO: 1114091 - DNA, 15 bp, Homo sapiens
tattttccaaacttt

SEQ ID NO: 1114092 - DNA, 15 bp, Homo sapiens
atattttccaaactt

SEQ ID NO: 1114093 - DNA, 15 bp, Homo sapiens
tatattttccaaact

SEQ ID NO: 1114094 - DNA, 15 bp, Homo sapiens
atatattttccaaac

SEQ ID NO: 1114095 - DNA, 15 bp, Homo sapiens
gatatattttccaaa

SEQ ID NO: 1114096 - DNA, 15 bp, Homo sapiens
agatatattttccaa

SEQ ID NO: 1114097 - DNA, 15 bp, Homo sapiens
cagatatattttcca

SEQ ID NO: 1114098 - DNA, 15 bp, Homo sapiens
tcagatatattttcc

SEQ ID NO: 1114099 - DNA, 15 bp, Homo sapiens
ttcagatatattttc

SEQ ID NO: 1114100 - DNA, 15 bp, Homo sapiens
cttcagatatatttt

SEQ ID NO: 1114101 - DNA, 15 bp, Homo sapiens
ccttcagatatattt

SEQ ID NO: 1114102 - DNA, 15 bp, Homo sapiens
tccttcagatatatt

SEQ ID NO: 1114103 - DNA, 15 bp, Homo sapiens
ttccttcagatatat

SEQ ID NO: 1114104 - DNA, 15 bp, Homo sapiens
attccttcagatata

SEQ ID NO: 1114105 - DNA, 15 bp, Homo sapiens
tattccttcagatat

SEQ ID NO: 1114106 - DNA, 15 bp, Homo sapiens
ttattccttcagata

SEQ ID NO: 1114107 - DNA, 15 bp, Homo sapiens
attattccttcagat

SEQ ID NO: 1114108 - DNA, 15 bp, Homo sapiens
aattattccttcaga

SEQ ID NO: 1114109 - DNA, 15 bp, Homo sapiens
caattattccttcag

SEQ ID NO: 1114110 - DNA, 15 bp, Homo sapiens
tcaattattccttca

SEQ ID NO: 1114111 - DNA, 15 bp, Homo sapiens
ctcaattattccttc

SEQ ID NO: 1114112 - DNA, 15 bp, Homo sapiens
cctcaattattcctt

SEQ ID NO: 1114113 - DNA, 15 bp, Homo sapiens
tcctcaattattcct

SEQ ID NO: 1114114 - DNA, 15 bp, Homo sapiens
ttcctcaattattcc

SEQ ID NO: 1114115 - DNA, 15 bp, Homo sapiens
tttcctcaattattc

SEQ ID NO: 1114116 - DNA, 15 bp, Homo sapiens
ttttcctcaattatt

SEQ ID NO: 1114117 - DNA, 15 bp, Homo sapiens
gttttcctcaattat

SEQ ID NO: 1114118 - DNA, 15 bp, Homo sapiens
agttttcctcaatta

SEQ ID NO: 1114119 - DNA, 15 bp, Homo sapiens
aagttttcctcaatt

SEQ ID NO: 1114120 - DNA, 15 bp, Homo sapiens
gaagttttcctcaat

SEQ ID NO: 1114121 - DNA, 15 bp, Homo sapiens
ggaagttttcctcaa

SEQ ID NO: 1114122 - DNA, 15 bp, Homo sapiens
gggaagttttcctca

SEQ ID NO: 1114123 - DNA, 15 bp, Homo sapiens
agggaagttttcctc

SEQ ID NO: 1114124 - DNA, 15 bp, Homo sapiens
cagggaagttttcct

SEQ ID NO: 1114125 - DNA, 15 bp, Homo sapiens
ccagggaagttttcc

SEQ ID NO: 1114126 - DNA, 15 bp, Homo sapiens
gccagggaagttttc

SEQ ID NO: 1114127 - DNA, 15 bp, Homo sapiens
ggccagggaagtttt

SEQ ID NO: 1114128 - DNA, 15 bp, Homo sapiens
aggccagggaagttt

SEQ ID NO: 1114129 - DNA, 15 bp, Homo sapiens
aaggccagggaagtt

SEQ ID NO: 1114130 - DNA, 15 bp, Homo sapiens
caaggccagggaagt

SEQ ID NO: 1114131 - DNA, 15 bp, Homo sapiens
gcaaggccagggaag

SEQ ID NO: 1114132 - DNA, 15 bp, Homo sapiens
agcaaggccagggaa

SEQ ID NO: 1114133 - DNA, 15 bp, Homo sapiens
cagcaaggccaggga

SEQ ID NO: 1114134 - DNA, 15 bp, Homo sapiens
tcagcaaggccaggg

SEQ ID NO: 1114135 - DNA, 15 bp, Homo sapiens
ttcagcaaggccagg

SEQ ID NO: 1114136 - DNA, 15 bp, Homo sapiens
cttcagcaaggccag

SEQ ID NO: 1114137 - DNA, 15 bp, Homo sapiens
ccttcagcaaggcca

SEQ ID NO: 1114138 - DNA, 15 bp, Homo sapiens
tccttcagcaaggcc

SEQ ID NO: 1114139 - DNA, 15 bp, Homo sapiens
ttccttcagcaaggc

SEQ ID NO: 1114140 - DNA, 15 bp, Homo sapiens
cttccttcagcaagg

SEQ ID NO: 1114141 - DNA, 15 bp, Homo sapiens
tcttccttcagcaag

SEQ ID NO: 1114142 - DNA, 15 bp, Homo sapiens
atcttccttcagcaa

SEQ ID NO: 1114143 - DNA, 15 bp, Homo sapiens
gatcttccttcagca

SEQ ID NO: 1114144 - DNA, 15 bp, Homo sapiens
agatcttccttcagc

SEQ ID NO: 1114145 - DNA, 15 bp, Homo sapiens
aagatcttccttcag

SEQ ID NO: 1114146 - DNA, 15 bp, Homo sapiens
aaagatcttccttca

SEQ ID NO: 1114147 - DNA, 15 bp, Homo sapiens
aaaagatcttccttc

SEQ ID NO: 1114148 - DNA, 15 bp, Homo sapiens
caaaagatcttcctt

SEQ ID NO: 1114149 - DNA, 15 bp, Homo sapiens
acaaaagatcttcct

SEQ ID NO: 1114150 - DNA, 15 bp, Homo sapiens
gacaaaagatcttcc

SEQ ID NO: 1114151 - DNA, 15 bp, Homo sapiens
agacaaaagatcttc

SEQ ID NO: 1114152 - DNA, 15 bp, Homo sapiens
tagacaaaagatctt

SEQ ID NO: 1114153 - DNA, 15 bp, Homo sapiens
ctagacaaaagatct

SEQ ID NO: 1114154 - DNA, 15 bp, Homo sapiens
cctagacaaaagatc

SEQ ID NO: 1114155 - DNA, 15 bp, Homo sapiens
ccctagacaaaagat

SEQ ID NO: 1114156 - DNA, 15 bp, Homo sapiens
tccctagacaaaaga

SEQ ID NO: 1114157 - DNA, 15 bp, Homo sapiens
atccctagacaaaag

SEQ ID NO: 1114158 - DNA, 15 bp, Homo sapiens
catccctagacaaaa

SEQ ID NO: 1114159 - DNA, 15 bp, Homo sapiens
acatccctagacaaa

SEQ ID NO: 1114160 - DNA, 15 bp, Homo sapiens
tacatccctagacaa

SEQ ID NO: 1114161 - DNA, 15 bp, Homo sapiens
ctacatccctagaca

SEQ ID NO: 1114162 - DNA, 15 bp, Homo sapiens
tctacatccctagac

SEQ ID NO: 1114163 - DNA, 15 bp, Homo sapiens
gtctacatccctaga

SEQ ID NO: 1114164 - DNA, 15 bp, Homo sapiens
tgtctacatccctag

SEQ ID NO: 1114165 - DNA, 15 bp, Homo sapiens
atgtctacatcccta

SEQ ID NO: 1114166 - DNA, 15 bp, Homo sapiens
gatgtctacatccct

SEQ ID NO: 1114167 - DNA, 15 bp, Homo sapiens
ggatgtctacatccc

SEQ ID NO: 1114168 - DNA, 15 bp, Homo sapiens
tggatgtctacatcc

SEQ ID NO: 1114169 - DNA, 15 bp, Homo sapiens
ttggatgtctacatc

SEQ ID NO: 1114170 - DNA, 15 bp, Homo sapiens
tttggatgtctacat

SEQ ID NO: 1114171 - DNA, 15 bp, Homo sapiens
atttggatgtctaca

SEQ ID NO: 1114172 - DNA, 15 bp, Homo sapiens
tatttggatgtctac

SEQ ID NO: 1114173 - DNA, 15 bp, Homo sapiens
gtatttggatgtcta

SEQ ID NO: 1114174 - DNA, 15 bp, Homo sapiens
cgtatttggatgtct

SEQ ID NO: 1114175 - DNA, 15 bp, Homo sapiens
tcgtatttggatgtc

SEQ ID NO: 1114176 - DNA, 15 bp, Homo sapiens
ctcgtatttggatgt

SEQ ID NO: 1114177 - DNA, 15 bp, Homo sapiens
tctcgtatttggatg

SEQ ID NO: 1114178 - DNA, 15 bp, Homo sapiens
ttctcgtatttggat

SEQ ID NO: 1114179 - DNA, 15 bp, Homo sapiens
cttctcgtatttgga

SEQ ID NO: 1114180 - DNA, 15 bp, Homo sapiens
tcttctcgtatttgg

SEQ ID NO: 1114181 - DNA, 15 bp, Homo sapiens
atcttctcgtatttg

SEQ ID NO: 1114182 - DNA, 15 bp, Homo sapiens
gatcttctcgtattt

SEQ ID NO: 1114183 - DNA, 15 bp, Homo sapiens
tgatcttctcgtatt

SEQ ID NO: 1114184 - DNA, 15 bp, Homo sapiens
ttgatcttctcgtat

SEQ ID NO: 1114185 - DNA, 15 bp, Homo sapiens
tttgatcttctcgta

SEQ ID NO: 1114186 - DNA, 15 bp, Homo sapiens
ctttgatcttctcgt

SEQ ID NO: 1114187 - DNA, 15 bp, Homo sapiens
tctttgatcttctcg

SEQ ID NO: 1114188 - DNA, 15 bp, Homo sapiens
ttctttgatcttctc

SEQ ID NO: 1114189 - DNA, 15 bp, Homo sapiens
gttctttgatcttct

SEQ ID NO: 1114190 - DNA, 15 bp, Homo sapiens
tgttctttgatcttc

SEQ ID NO: 1114191 - DNA, 15 bp, Homo sapiens
gtgttctttgatctt

SEQ ID NO: 1114192 - DNA, 15 bp, Homo sapiens
ggtgttctttgatct

SEQ ID NO: 1114193 - DNA, 15 bp, Homo sapiens
aggtgttctttgatc

SEQ ID NO: 1114194 - DNA, 15 bp, Homo sapiens
caggtgttctttgat

SEQ ID NO: 1114195 - DNA, 15 bp, Homo sapiens
ccaggtgttctttga

SEQ ID NO: 1114196 - DNA, 15 bp, Homo sapiens
cccaggtgttctttg

SEQ ID NO: 1114197 - DNA, 15 bp, Homo sapiens
tcccaggtgttcttt

SEQ ID NO: 1114198 - DNA, 15 bp, Homo sapiens
ttcccaggtgttctt

SEQ ID NO: 1114199 - DNA, 15 bp, Homo sapiens
tttcccaggtgttct

SEQ ID NO: 1114200 - DNA, 15 bp, Homo sapiens
atttcccaggtgttc

SEQ ID NO: 1114201 - DNA, 15 bp, Homo sapiens
aatttcccaggtgtt

SEQ ID NO: 1114202 - DNA, 15 bp, Homo sapiens
gaatttcccaggtgt

SEQ ID NO: 1114203 - DNA, 15 bp, Homo sapiens
tgaatttcccaggtg

SEQ ID NO: 1114204 - DNA, 15 bp, Homo sapiens
atgaatttcccaggt

SEQ ID NO: 1114205 - DNA, 15 bp, Homo sapiens
aatgaatttcccagg

SEQ ID NO: 1114206 - DNA, 15 bp, Homo sapiens
caatgaatttcccag

SEQ ID NO: 1114207 - DNA, 15 bp, Homo sapiens
gcaatgaatttccca

SEQ ID NO: 1114208 - DNA, 15 bp, Homo sapiens
tgcaatgaatttccc

SEQ ID NO: 1114209 - DNA, 15 bp, Homo sapiens
ttgcaatgaatttcc

SEQ ID NO: 1114210 - DNA, 15 bp, Homo sapiens
tttgcaatgaatttc

SEQ ID NO: 1114211 - DNA, 15 bp, Homo sapiens
ttttgcaatgaattt

SEQ ID NO: 1114212 - DNA, 15 bp, Homo sapiens
tttttgcaatgaatt

SEQ ID NO: 1114213 - DNA, 15 bp, Homo sapiens
ctttttgcaatgaat

SEQ ID NO: 1114214 - DNA, 15 bp, Homo sapiens
tctttttgcaatgaa

SEQ ID NO: 1114215 - DNA, 15 bp, Homo sapiens
atctttttgcaatga

SEQ ID NO: 1114216 - DNA, 15 bp, Homo sapiens
gatctttttgcaatg

SEQ ID NO: 1114217 - DNA, 15 bp, Homo sapiens
tgatctttttgcaat

SEQ ID NO: 1114218 - DNA, 15 bp, Homo sapiens
atgatctttttgcaa

SEQ ID NO: 1114219 - DNA, 15 bp, Homo sapiens
gatgatctttttgca

SEQ ID NO: 1114220 - DNA, 15 bp, Homo sapiens
tgatgatctttttgc

SEQ ID NO: 1114221 - DNA, 15 bp, Homo sapiens
gtgatgatctttttg

SEQ ID NO: 1114222 - DNA, 15 bp, Homo sapiens
ggtgatgatcttttt

SEQ ID NO: 1114223 - DNA, 15 bp, Homo sapiens
aggtgatgatctttt

SEQ ID NO: 1114224 - DNA, 15 bp, Homo sapiens
taggtgatgatcttt

SEQ ID NO: 1114225 - DNA, 15 bp, Homo sapiens
ctaggtgatgatctt

SEQ ID NO: 1114226 - DNA, 15 bp, Homo sapiens
cctaggtgatgatct

SEQ ID NO: 1114227 - DNA, 15 bp, Homo sapiens
gcctaggtgatgatc

SEQ ID NO: 1114228 - DNA, 15 bp, Homo sapiens
tgcctaggtgatgat

SEQ ID NO: 1114229 - DNA, 15 bp, Homo sapiens
gtgcctaggtgatga

SEQ ID NO: 1114230 - DNA, 15 bp, Homo sapiens
tgtgcctaggtgatg

SEQ ID NO: 1114231 - DNA, 15 bp, Homo sapiens
atgtgcctaggtgat

SEQ ID NO: 1114232 - DNA, 15 bp, Homo sapiens
tatgtgcctaggtga

SEQ ID NO: 1114233 - DNA, 15 bp, Homo sapiens
ctatgtgcctaggtg

SEQ ID NO: 1114234 - DNA, 15 bp, Homo sapiens
actatgtgcctaggt

SEQ ID NO: 1114235 - DNA, 15 bp, Homo sapiens
gactatgtgcctagg

SEQ ID NO: 1114236 - DNA, 15 bp, Homo sapiens
tgactatgtgcctag

SEQ ID NO: 1114237 - DNA, 15 bp, Homo sapiens
atgactatgtgccta

SEQ ID NO: 1114238 - DNA, 15 bp, Homo sapiens
gatgactatgtgcct

SEQ ID NO: 1114239 - DNA, 15 bp, Homo sapiens
tgatgactatgtgcc

SEQ ID NO: 1114240 - DNA, 15 bp, Homo sapiens
ctgatgactatgtgc

SEQ ID NO: 1114241 - DNA, 15 bp, Homo sapiens
tctgatgactatgtg

SEQ ID NO: 1114242 - DNA, 15 bp, Homo sapiens
atctgatgactatgt

SEQ ID NO: 1114243 - DNA, 15 bp, Homo sapiens
aatctgatgactatg

SEQ ID NO: 1114244 - DNA, 15 bp, Homo sapiens
taatctgatgactat

SEQ ID NO: 1114245 - DNA, 15 bp, Homo sapiens
ataatctgatgacta

SEQ ID NO: 1114246 - DNA, 15 bp, Homo sapiens
gataatctgatgact

SEQ ID NO: 1114247 - DNA, 15 bp, Homo sapiens
agataatctgatgac

SEQ ID NO: 1114248 - DNA, 15 bp, Homo sapiens
tagataatctgatga

SEQ ID NO: 1114249 - DNA, 15 bp, Homo sapiens
ttagataatctgatg

SEQ ID NO: 1114250 - DNA, 15 bp, Homo sapiens
tttagataatctgat

SEQ ID NO: 1114251 - DNA, 15 bp, Homo sapiens
ctttagataatctga

SEQ ID NO: 1114252 - DNA, 15 bp, Homo sapiens
actttagataatctg

SEQ ID NO: 1114253 - DNA, 15 bp, Homo sapiens
gactttagataatct

SEQ ID NO: 1114254 - DNA, 15 bp, Homo sapiens
tgactttagataatc

SEQ ID NO: 1114255 - DNA, 15 bp, Homo sapiens
ttgactttagataat

SEQ ID NO: 1114256 - DNA, 15 bp, Homo sapiens
cttgactttagataa

SEQ ID NO: 1114257 - DNA, 15 bp, Homo sapiens
tcttgactttagata

SEQ ID NO: 1114258 - DNA, 15 bp, Homo sapiens
atcttgactttagat

SEQ ID NO: 1114259 - DNA, 15 bp, Homo sapiens
catcttgactttaga

SEQ ID NO: 1114260 - DNA, 15 bp, Homo sapiens
tcatcttgactttag

SEQ ID NO: 1114261 - DNA, 15 bp, Homo sapiens
ttcatcttgacttta

SEQ ID NO: 1114262 - DNA, 15 bp, Homo sapiens
cttcatcttgacttt

SEQ ID NO: 1114263 - DNA, 15 bp, Homo sapiens
ccttcatcttgactt

SEQ ID NO: 1114264 - DNA, 15 bp, Homo sapiens
tccttcatcttgact

SEQ ID NO: 1114265 - DNA, 15 bp, Homo sapiens
ttccttcatcttgac

SEQ ID NO: 1114266 - DNA, 15 bp, Homo sapiens
tttccttcatcttga

SEQ ID NO: 1114267 - DNA, 15 bp, Homo sapiens
ctttccttcatcttg

SEQ ID NO: 1114268 - DNA, 15 bp, Homo sapiens
tctttccttcatctt

SEQ ID NO: 1114269 - DNA, 15 bp, Homo sapiens
ttctttccttcatct

SEQ ID NO: 1114270 - DNA, 15 bp, Homo sapiens
attctttccttcatc

SEQ ID NO: 1114271 - DNA, 15 bp, Homo sapiens
gattctttccttcat

SEQ ID NO: 1114272 - DNA, 15 bp, Homo sapiens
agattctttccttca

SEQ ID NO: 1114273 - DNA, 15 bp, Homo sapiens
aagattctttccttc

SEQ ID NO: 1114274 - DNA, 15 bp, Homo sapiens
taagattctttcctt

SEQ ID NO: 1114275 - DNA, 15 bp, Homo sapiens
ttaagattctttcct

SEQ ID NO: 1114276 - DNA, 15 bp, Homo sapiens
cttaagattctttcc

SEQ ID NO: 1114277 - DNA, 15 bp, Homo sapiens
tcttaagattctttc

SEQ ID NO: 1114278 - DNA, 15 bp, Homo sapiens
ctcttaagattcttt

SEQ ID NO: 1114279 - DNA, 15 bp, Homo sapiens
gctcttaagattctt

SEQ ID NO: 1114280 - DNA, 15 bp, Homo sapiens
agctcttaagattct

SEQ ID NO: 1114281 - DNA, 15 bp, Homo sapiens
cagctcttaagattc

SEQ ID NO: 1114282 - DNA, 15 bp, Homo sapiens
acagctcttaagatt

SEQ ID NO: 1114283 - DNA, 15 bp, Homo sapiens
cacagctcttaagat

SEQ ID NO: 1114284 - DNA, 15 bp, Homo sapiens
tcacagctcttaaga

SEQ ID NO: 1114285 - DNA, 15 bp, Homo sapiens
ctcacagctcttaag

SEQ ID NO: 1114286 - DNA, 15 bp, Homo sapiens
cctcacagctcttaa

SEQ ID NO: 1114287 - DNA, 15 bp, Homo sapiens
gcctcacagctctta

SEQ ID NO: 1114288 - DNA, 15 bp, Homo sapiens
tgcctcacagctctt

SEQ ID NO: 1114289 - DNA, 15 bp, Homo sapiens
ttgcctcacagctct

SEQ ID NO: 1114290 - DNA, 15 bp, Homo sapiens
tttgcctcacagctc

SEQ ID NO: 1114291 - DNA, 15 bp, Homo sapiens
ttttgcctcacagct

SEQ ID NO: 1114292 - DNA, 15 bp, Homo sapiens
cttttgcctcacagc

SEQ ID NO: 1114293 - DNA, 15 bp, Homo sapiens
gcttttgcctcacag

SEQ ID NO: 1114294 - DNA, 15 bp, Homo sapiens
tgcttttgcctcaca

SEQ ID NO: 1114295 - DNA, 15 bp, Homo sapiens
gtgcttttgcctcac

SEQ ID NO: 1114296 - DNA, 15 bp, Homo sapiens
ggtgcttttgcctca

SEQ ID NO: 1114297 - DNA, 15 bp, Homo sapiens
tggtgcttttgcctc

SEQ ID NO: 1114298 - DNA, 15 bp, Homo sapiens
ctggtgcttttgcct

SEQ ID NO: 1114299 - DNA, 15 bp, Homo sapiens
cctggtgcttttgcc

SEQ ID NO: 1114300 - DNA, 15 bp, Homo sapiens
acctggtgcttttgc

SEQ ID NO: 1114301 - DNA, 15 bp, Homo sapiens
tacctggtgcttttg

SEQ ID NO: 1114302 - DNA, 15 bp, Homo sapiens
ttacctggtgctttt

SEQ ID NO: 1114303 - DNA, 15 bp, Homo sapiens
gttacctggtgcttt

SEQ ID NO: 1114304 - DNA, 15 bp, Homo sapiens
ggttacctggtgctt

SEQ ID NO: 1114305 - DNA, 15 bp, Homo sapiens
aggttacctggtgct

SEQ ID NO: 1114306 - DNA, 15 bp, Homo sapiens
taggttacctggtgc

SEQ ID NO: 1114307 - DNA, 15 bp, Homo sapiens
ataggttacctggtg

SEQ ID NO: 1114308 - DNA, 15 bp, Homo sapiens
tataggttacctggt

SEQ ID NO: 1114309 - DNA, 15 bp, Homo sapiens
ttataggttacctgg

SEQ ID NO: 1114310 - DNA, 15 bp, Homo sapiens
tttataggttacctg

SEQ ID NO: 1114311 - DNA, 15 bp, Homo sapiens
ctttataggttacct

SEQ ID NO: 1114312 - DNA, 15 bp, Homo sapiens
cctttataggttacc

SEQ ID NO: 1114313 - DNA, 15 bp, Homo sapiens
tcctttataggttac

SEQ ID NO: 1114314 - DNA, 15 bp, Homo sapiens
ttcctttataggtta

SEQ ID NO: 1114315 - DNA, 15 bp, Homo sapiens
tttcctttataggtt

SEQ ID NO: 1114316 - DNA, 15 bp, Homo sapiens
ttttcctttataggt

SEQ ID NO: 1114317 - DNA, 15 bp, Homo sapiens
gttttcctttatagg

SEQ ID NO: 1114318 - DNA, 15 bp, Homo sapiens
ggttttcctttatag

SEQ ID NO: 1114319 - DNA, 15 bp, Homo sapiens
aggttttcctttata

SEQ ID NO: 1114320 - DNA, 15 bp, Homo sapiens
taggttttcctttat

SEQ ID NO: 1114321 - DNA, 15 bp, Homo sapiens
ataggttttccttta

SEQ ID NO: 1114322 - DNA, 15 bp, Homo sapiens
gataggttttccttt

SEQ ID NO: 1114323 - DNA, 15 bp, Homo sapiens
tgataggttttcctt

SEQ ID NO: 1114324 - DNA, 15 bp, Homo sapiens
ctgataggttttcct

SEQ ID NO: 1114325 - DNA, 15 bp, Homo sapiens
tctgataggttttcc

SEQ ID NO: 1114326 - DNA, 15 bp, Homo sapiens
ttctgataggttttc

SEQ ID NO: 1114327 - DNA, 15 bp, Homo sapiens
attctgataggtttt

SEQ ID NO: 1114328 - DNA, 15 bp, Homo sapiens
tattctgataggttt

SEQ ID NO: 1114329 - DNA, 15 bp, Homo sapiens
ttattctgataggtt

SEQ ID NO: 1114330 - DNA, 15 bp, Homo sapiens
tttattctgataggt

SEQ ID NO: 1114331 - DNA, 15 bp, Homo sapiens
ttttattctgatagg

SEQ ID NO: 1114332 - DNA, 15 bp, Homo sapiens
tttttattctgatag

SEQ ID NO: 1114333 - DNA, 15 bp, Homo sapiens
gtttttattctgata

SEQ ID NO: 1114334 - DNA, 15 bp, Homo sapiens
tgtttttattctgat

SEQ ID NO: 1114335 - DNA, 15 bp, Homo sapiens
ctgtttttattctga

SEQ ID NO: 1114336 - DNA, 15 bp, Homo sapiens
tctgtttttattctg

SEQ ID NO: 1114337 - DNA, 15 bp, Homo sapiens
gtctgtttttattct

SEQ ID NO: 1114338 - DNA, 15 bp, Homo sapiens
agtctgtttttattc

SEQ ID NO: 1114339 - DNA, 15 bp, Homo sapiens
aagtctgtttttatt

SEQ ID NO: 1114340 - DNA, 15 bp, Homo sapiens
gaagtctgtttttat

SEQ ID NO: 1114341 - DNA, 15 bp, Homo sapiens
agaagtctgttttta

SEQ ID NO: 1114342 - DNA, 15 bp, Homo sapiens
gagaagtctgttttt

SEQ ID NO: 1114343 - DNA, 15 bp, Homo sapiens
tgagaagtctgtttt

SEQ ID NO: 1114344 - DNA, 15 bp, Homo sapiens
ctgagaagtctgttt

SEQ ID NO: 1114345 - DNA, 15 bp, Homo sapiens
gctgagaagtctgtt

SEQ ID NO: 1114346 - DNA, 15 bp, Homo sapiens
tgctgagaagtctgt

SEQ ID NO: 1114347 - DNA, 15 bp, Homo sapiens
ctgctgagaagtctg

SEQ ID NO: 1114348 - DNA, 15 bp, Homo sapiens
tctgctgagaagtct

SEQ ID NO: 1114349 - DNA, 15 bp, Homo sapiens
ttctgctgagaagtc

SEQ ID NO: 1114350 - DNA, 15 bp, Homo sapiens
tttctgctgagaagt

SEQ ID NO: 1114351 - DNA, 15 bp, Homo sapiens
gtttctgctgagaag

SEQ ID NO: 1114352 - DNA, 15 bp, Homo sapiens
ggtttctgctgagaa

SEQ ID NO: 1114353 - DNA, 15 bp, Homo sapiens
gggtttctgctgaga

SEQ ID NO: 1114354 - DNA, 15 bp, Homo sapiens
agggtttctgctgag

SEQ ID NO: 1114355 - DNA, 15 bp, Homo sapiens
tagggtttctgctga

SEQ ID NO: 1114356 - DNA, 15 bp, Homo sapiens
gtagggtttctgctg

SEQ ID NO: 1114357 - DNA, 15 bp, Homo sapiens
tgtagggtttctgct

SEQ ID NO: 1114358 - DNA, 15 bp, Homo sapiens
ttgtagggtttctgc

SEQ ID NO: 1114359 - DNA, 15 bp, Homo sapiens
cttgtagggtttctg

SEQ ID NO: 1114360 - DNA, 15 bp, Homo sapiens
gcttgtagggtttct

SEQ ID NO: 1114361 - DNA, 15 bp, Homo sapiens
agcttgtagggtttc

SEQ ID NO: 1114362 - DNA, 15 bp, Homo sapiens
tagcttgtagggttt

SEQ ID NO: 1114363 - DNA, 15 bp, Homo sapiens
ctagcttgtagggtt

SEQ ID NO: 1114364 - DNA, 15 bp, Homo sapiens
tctagcttgtagggt

SEQ ID NO: 1114365 - DNA, 15 bp, Homo sapiens
ttctagcttgtaggg

SEQ ID NO: 1114366 - DNA, 15 bp, Homo sapiens
cttctagcttgtagg

SEQ ID NO: 1114367 - DNA, 15 bp, Homo sapiens
ccttctagcttgtag

SEQ ID NO: 1114368 - DNA, 15 bp, Homo sapiens
cccttctagcttgta

SEQ ID NO: 1114369 - DNA, 15 bp, Homo sapiens
tcccttctagcttgt

SEQ ID NO: 1114370 - DNA, 15 bp, Homo sapiens
atcccttctagcttg

SEQ ID NO: 1114371 - DNA, 15 bp, Homo sapiens
aatcccttctagctt

SEQ ID NO: 1114372 - DNA, 15 bp, Homo sapiens
caatcccttctagct

SEQ ID NO: 1114373 - DNA, 15 bp, Homo sapiens
ccaatcccttctagc

SEQ ID NO: 1114374 - DNA, 15 bp, Homo sapiens
cccaatcccttctag

SEQ ID NO: 1114375 - DNA, 15 bp, Homo sapiens
ccccaatcccttcta

SEQ ID NO: 1114376 - DNA, 15 bp, Homo sapiens
accccaatcccttct

SEQ ID NO: 1114377 - DNA, 15 bp, Homo sapiens
gaccccaatcccttc

SEQ ID NO: 1114378 - DNA, 15 bp, Homo sapiens
ggaccccaatccctt

SEQ ID NO: 1114379 - DNA, 15 bp, Homo sapiens
aggaccccaatccct

SEQ ID NO: 1114380 - DNA, 15 bp, Homo sapiens
taggaccccaatccc

SEQ ID NO: 1114381 - DNA, 15 bp, Homo sapiens
ataggaccccaatcc

SEQ ID NO: 1114382 - DNA, 15 bp, Homo sapiens
aataggaccccaatc

SEQ ID NO: 1114383 - DNA, 15 bp, Homo sapiens
aaataggaccccaat

SEQ ID NO: 1114384 - DNA, 15 bp, Homo sapiens
aaaataggaccccaa

SEQ ID NO: 1114385 - DNA, 15 bp, Homo sapiens
aaaaataggacccca

SEQ ID NO: 1114386 - DNA, 15 bp, Homo sapiens
taaaaataggacccc

SEQ ID NO: 1114387 - DNA, 15 bp, Homo sapiens
ctaaaaataggaccc

SEQ ID NO: 1114388 - DNA, 15 bp, Homo sapiens
gctaaaaataggacc

SEQ ID NO: 1114389 - DNA, 15 bp, Homo sapiens
ggctaaaaataggac

SEQ ID NO: 1114390 - DNA, 15 bp, Homo sapiens
aggctaaaaatagga

SEQ ID NO: 1114391 - DNA, 15 bp, Homo sapiens
gaggctaaaaatagg

SEQ ID NO: 1114392 - DNA, 15 bp, Homo sapiens
tgaggctaaaaatag

SEQ ID NO: 1114393 - DNA, 15 bp, Homo sapiens
atgaggctaaaaata

SEQ ID NO: 1114394 - DNA, 15 bp, Homo sapiens
aatgaggctaaaaat

SEQ ID NO: 1114395 - DNA, 15 bp, Homo sapiens
taatgaggctaaaaa

SEQ ID NO: 1114396 - DNA, 15 bp, Homo sapiens
ttaatgaggctaaaa

SEQ ID NO: 1114397 - DNA, 15 bp, Homo sapiens
gttaatgaggctaaa

SEQ ID NO: 1114398 - DNA, 15 bp, Homo sapiens
ggttaatgaggctaa

SEQ ID NO: 1114399 - DNA, 15 bp, Homo sapiens
tggttaatgaggcta

SEQ ID NO: 1114400 - DNA, 15 bp, Homo sapiens
ttggttaatgaggct

SEQ ID NO: 1114401 - DNA, 15 bp, Homo sapiens
tttggttaatgaggc

SEQ ID NO: 1114402 - DNA, 15 bp, Homo sapiens
ttttggttaatgagg

SEQ ID NO: 1114403 - DNA, 15 bp, Homo sapiens
gttttggttaatgag

SEQ ID NO: 1114404 - DNA, 15 bp, Homo sapiens
tgttttggttaatga

SEQ ID NO: 1114405 - DNA, 15 bp, Homo sapiens
ttgttttggttaatg

SEQ ID NO: 1114406 - DNA, 15 bp, Homo sapiens
attgttttggttaat

SEQ ID NO: 1114407 - DNA, 15 bp, Homo sapiens
aattgttttggttaa

SEQ ID NO: 1114408 - DNA, 15 bp, Homo sapiens
taattgttttggtta

SEQ ID NO: 1114409 - DNA, 15 bp, Homo sapiens
ataattgttttggtt

SEQ ID NO: 1114410 - DNA, 15 bp, Homo sapiens
gataattgttttggt

SEQ ID NO: 1114411 - DNA, 15 bp, Homo sapiens
tgataattgttttgg

SEQ ID NO: 1114412 - DNA, 15 bp, Homo sapiens
ctgataattgttttg

SEQ ID NO: 1114413 - DNA, 15 bp, Homo sapiens
gctgataattgtttt

SEQ ID NO: 1114414 - DNA, 15 bp, Homo sapiens
ggctgataattgttt

SEQ ID NO: 1114415 - DNA, 15 bp, Homo sapiens
tggctgataattgtt

SEQ ID NO: 1114416 - DNA, 15 bp, Homo sapiens
ttggctgataattgt

SEQ ID NO: 1114417 - DNA, 15 bp, Homo sapiens
cttggctgataattg

SEQ ID NO: 1114418 - DNA, 15 bp, Homo sapiens
tcttggctgataatt

SEQ ID NO: 1114419 - DNA, 15 bp, Homo sapiens
ttcttggctgataat

SEQ ID NO: 1114420 - DNA, 15 bp, Homo sapiens
attcttggctgataa

SEQ ID NO: 1114421 - DNA, 15 bp, Homo sapiens
aattcttggctgata

SEQ ID NO: 1114422 - DNA, 15 bp, Homo sapiens
aaattcttggctgat

SEQ ID NO: 1114423 - DNA, 15 bp, Homo sapiens
aaaattcttggctga

SEQ ID NO: 1114424 - DNA, 15 bp, Homo sapiens
caaaattcttggctg

SEQ ID NO: 1114425 - DNA, 15 bp, Homo sapiens
acaaaattcttggct

SEQ ID NO: 1114426 - DNA, 15 bp, Homo sapiens
tacaaaattcttggc

SEQ ID NO: 1114427 - DNA, 15 bp, Homo sapiens
atacaaaattcttgg

SEQ ID NO: 1114428 - DNA, 15 bp, Homo sapiens
gatacaaaattcttg

SEQ ID NO: 1114429 - DNA, 15 bp, Homo sapiens
ggatacaaaattctt

SEQ ID NO: 1114430 - DNA, 15 bp, Homo sapiens
tggatacaaaattct

SEQ ID NO: 1114431 - DNA, 15 bp, Homo sapiens
ttggatacaaaattc

SEQ ID NO: 1114432 - DNA, 15 bp, Homo sapiens
attggatacaaaatt

SEQ ID NO: 1114433 - DNA, 15 bp, Homo sapiens
cattggatacaaaat

SEQ ID NO: 1114434 - DNA, 15 bp, Homo sapiens
ccattggatacaaaa

SEQ ID NO: 1114435 - DNA, 15 bp, Homo sapiens
gccattggatacaaa

SEQ ID NO: 1114436 - DNA, 15 bp, Homo sapiens
tgccattggatacaa

SEQ ID NO: 1114437 - DNA, 15 bp, Homo sapiens
gtgccattggataca

SEQ ID NO: 1114438 - DNA, 15 bp, Homo sapiens
agtgccattggatac

SEQ ID NO: 1114439 - DNA, 15 bp, Homo sapiens
aagtgccattggata

SEQ ID NO: 1114440 - DNA, 15 bp, Homo sapiens
taagtgccattggat

SEQ ID NO: 1114441 - DNA, 15 bp, Homo sapiens
ttaagtgccattgga

SEQ ID NO: 1114442 - DNA, 15 bp, Homo sapiens
gttaagtgccattgg

SEQ ID NO: 1114443 - DNA, 15 bp, Homo sapiens
agttaagtgccattg

SEQ ID NO: 1114444 - DNA, 15 bp, Homo sapiens
aagttaagtgccatt

SEQ ID NO: 1114445 - DNA, 15 bp, Homo sapiens
gaagttaagtgccat

SEQ ID NO: 1114446 - DNA, 15 bp, Homo sapiens
tgaagttaagtgcca

SEQ ID NO: 1114447 - DNA, 15 bp, Homo sapiens
atgaagttaagtgcc

SEQ ID NO: 1114448 - DNA, 15 bp, Homo sapiens
tatgaagttaagtgc

SEQ ID NO: 1114449 - DNA, 15 bp, Homo sapiens
ttatgaagttaagtg

SEQ ID NO: 1114450 - DNA, 15 bp, Homo sapiens
tttatgaagttaagt

SEQ ID NO: 1114451 - DNA, 15 bp, Homo sapiens
atttatgaagttaag

SEQ ID NO: 1114452 - DNA, 15 bp, Homo sapiens
catttatgaagttaa

SEQ ID NO: 1114453 - DNA, 15 bp, Homo sapiens
tcatttatgaagtta

SEQ ID NO: 1114454 - DNA, 15 bp, Homo sapiens
ttcatttatgaagtt

SEQ ID NO: 1114455 - DNA, 15 bp, Homo sapiens
cttcatttatgaagt

SEQ ID NO: 1114456 - DNA, 15 bp, Homo sapiens
ccttcatttatgaag

SEQ ID NO: 1114457 - DNA, 15 bp, Homo sapiens
tccttcatttatgaa

SEQ ID NO: 1114458 - DNA, 15 bp, Homo sapiens
ttccttcatttatga

SEQ ID NO: 1114459 - DNA, 15 bp, Homo sapiens
tttccttcatttatg

SEQ ID NO: 1114460 - DNA, 15 bp, Homo sapiens
ctttccttcatttat

SEQ ID NO: 1114461 - DNA, 15 bp, Homo sapiens
tctttccttcattta

SEQ ID NO: 1114462 - DNA, 15 bp, Homo sapiens
atctttccttcattt

SEQ ID NO: 1114463 - DNA, 15 bp, Homo sapiens
tatctttccttcatt

SEQ ID NO: 1114464 - DNA, 15 bp, Homo sapiens
atatctttccttcat

SEQ ID NO: 1114465 - DNA, 15 bp, Homo sapiens
tatatctttccttca

SEQ ID NO: 1114466 - DNA, 15 bp, Homo sapiens
ctatatctttccttc

SEQ ID NO: 1114467 - DNA, 15 bp, Homo sapiens
actatatctttcctt

SEQ ID NO: 1114468 - DNA, 15 bp, Homo sapiens
gactatatctttcct

SEQ ID NO: 1114469 - DNA, 15 bp, Homo sapiens
agactatatctttcc

SEQ ID NO: 1114470 - DNA, 15 bp, Homo sapiens
aagactatatctttc

SEQ ID NO: 1114471 - DNA, 15 bp, Homo sapiens
aaagactatatcttt

SEQ ID NO: 1114472 - DNA, 15 bp, Homo sapiens
aaaagactatatctt

SEQ ID NO: 1114473 - DNA, 15 bp, Homo sapiens
gaaaagactatatct

SEQ ID NO: 1114474 - DNA, 15 bp, Homo sapiens
ggaaaagactatatc

SEQ ID NO: 1114475 - DNA, 15 bp, Homo sapiens
tggaaaagactatat

SEQ ID NO: 1114476 - DNA, 15 bp, Homo sapiens
ctggaaaagactata

SEQ ID NO: 1114477 - DNA, 15 bp, Homo sapiens
tctggaaaagactat

SEQ ID NO: 1114478 - DNA, 15 bp, Homo sapiens
gtctggaaaagacta

SEQ ID NO: 1114479 - DNA, 15 bp, Homo sapiens
tgtctggaaaagact

SEQ ID NO: 1114480 - DNA, 15 bp, Homo sapiens
ttgtctggaaaagac

SEQ ID NO: 1114481 - DNA, 15 bp, Homo sapiens
tttgtctggaaaaga

SEQ ID NO: 1114482 - DNA, 15 bp, Homo sapiens
gtttgtctggaaaag

SEQ ID NO: 1114483 - DNA, 15 bp, Homo sapiens
tgtttgtctggaaaa

SEQ ID NO: 1114484 - DNA, 15 bp, Homo sapiens
ttgtttgtctggaaa

SEQ ID NO: 1114485 - DNA, 15 bp, Homo sapiens
tttgtttgtctggaa

SEQ ID NO: 1114486 - DNA, 15 bp, Homo sapiens
atttgtttgtctgga

SEQ ID NO: 1114487 - DNA, 15 bp, Homo sapiens
catttgtttgtctgg

SEQ ID NO: 1114488 - DNA, 15 bp, Homo sapiens
gcatttgtttgtctg

SEQ ID NO: 1114489 - DNA, 15 bp, Homo sapiens
agcatttgtttgtct

SEQ ID NO: 1114490 - DNA, 15 bp, Homo sapiens
cagcatttgtttgtc

SEQ ID NO: 1114491 - DNA, 15 bp, Homo sapiens
tcagcatttgtttgt

SEQ ID NO: 1114492 - DNA, 15 bp, Homo sapiens
ctcagcatttgtttg

SEQ ID NO: 1114493 - DNA, 15 bp, Homo sapiens
cctcagcatttgttt

SEQ ID NO: 1114494 - DNA, 15 bp, Homo sapiens
ccctcagcatttgtt

SEQ ID NO: 1114495 - DNA, 15 bp, Homo sapiens
tccctcagcatttgt

SEQ ID NO: 1114496 - DNA, 15 bp, Homo sapiens
ttccctcagcatttg

SEQ ID NO: 1114497 - DNA, 15 bp, Homo sapiens
gttccctcagcattt

SEQ ID NO: 1114498 - DNA, 15 bp, Homo sapiens
agttccctcagcatt

SEQ ID NO: 1114499 - DNA, 15 bp, Homo sapiens
aagttccctcagcat

SEQ ID NO: 1114500 - DNA, 15 bp, Homo sapiens
caagttccctcagca

SEQ ID NO: 1114501 - DNA, 15 bp, Homo sapiens
gcaagttccctcagc

SEQ ID NO: 1114502 - DNA, 15 bp, Homo sapiens
ggcaagttccctcag

SEQ ID NO: 1114503 - DNA, 15 bp, Homo sapiens
tggcaagttccctca

SEQ ID NO: 1114504 - DNA, 15 bp, Homo sapiens
gtggcaagttccctc

SEQ ID NO: 1114505 - DNA, 15 bp, Homo sapiens
agtggcaagttccct

SEQ ID NO: 1114506 - DNA, 15 bp, Homo sapiens
tagtggcaagttccc

SEQ ID NO: 1114507 - DNA, 15 bp, Homo sapiens
gtagtggcaagttcc

SEQ ID NO: 1114508 - DNA, 15 bp, Homo sapiens
ggtagtggcaagttc

SEQ ID NO: 1114509 - DNA, 15 bp, Homo sapiens
tggtagtggcaagtt

SEQ ID NO: 1114510 - DNA, 15 bp, Homo sapiens
ttggtagtggcaagt

SEQ ID NO: 1114511 - DNA, 15 bp, Homo sapiens
cttggtagtggcaag

SEQ ID NO: 1114512 - DNA, 15 bp, Homo sapiens
gcttggtagtggcaa

SEQ ID NO: 1114513 - DNA, 15 bp, Homo sapiens
tgcttggtagtggca

SEQ ID NO: 1114514 - DNA, 15 bp, Homo sapiens
ttgcttggtagtggc

SEQ ID NO: 1114515 - DNA, 15 bp, Homo sapiens
tttgcttggtagtgg

SEQ ID NO: 1114516 - DNA, 15 bp, Homo sapiens
atttgcttggtagtg

SEQ ID NO: 1114517 - DNA, 15 bp, Homo sapiens
gatttgcttggtagt

SEQ ID NO: 1114518 - DNA, 15 bp, Homo sapiens
tgatttgcttggtag

SEQ ID NO: 1114519 - DNA, 15 bp, Homo sapiens
ctgatttgcttggta

SEQ ID NO: 1114520 - DNA, 15 bp, Homo sapiens
cctgatttgcttggt

SEQ ID NO: 1114521 - DNA, 15 bp, Homo sapiens
ccctgatttgcttgg

SEQ ID NO: 1114522 - DNA, 15 bp, Homo sapiens
tccctgatttgcttg

SEQ ID NO: 1114523 - DNA, 15 bp, Homo sapiens
ttccctgatttgctt

SEQ ID NO: 1114524 - DNA, 15 bp, Homo sapiens
tttccctgatttgct

SEQ ID NO: 1114525 - DNA, 15 bp, Homo sapiens
atttccctgatttgc

SEQ ID NO: 1114526 - DNA, 15 bp, Homo sapiens
catttccctgatttg

SEQ ID NO: 1114527 - DNA, 15 bp, Homo sapiens
gcatttccctgattt

SEQ ID NO: 1114528 - DNA, 15 bp, Homo sapiens
tgcatttccctgatt

SEQ ID NO: 1114529 - DNA, 15 bp, Homo sapiens
ttgcatttccctgat

SEQ ID NO: 1114530 - DNA, 15 bp, Homo sapiens
tttgcatttccctga

SEQ ID NO: 1114531 - DNA, 15 bp, Homo sapiens
atttgcatttccctg

SEQ ID NO: 1114532 - DNA, 15 bp, Homo sapiens
gatttgcatttccct

SEQ ID NO: 1114533 - DNA, 15 bp, Homo sapiens
tgatttgcatttccc

SEQ ID NO: 1114534 - DNA, 15 bp, Homo sapiens
ttgatttgcatttcc

SEQ ID NO: 1114535 - DNA, 15 bp, Homo sapiens
gtggttttgatttgc

SEQ ID NO: 1114536 - DNA, 15 bp, Homo sapiens
tgtggttttgatttg

SEQ ID NO: 1114537 - DNA, 15 bp, Homo sapiens
ctgtggttttgattt

SEQ ID NO: 1114538 - DNA, 15 bp, Homo sapiens
actgtggttttgatt

SEQ ID NO: 1114539 - DNA, 15 bp, Homo sapiens
cactgtggttttgat

SEQ ID NO: 1114540 - DNA, 15 bp, Homo sapiens
acactgtggttttga

SEQ ID NO: 1114541 - DNA, 15 bp, Homo sapiens
cacactgtggttttg

SEQ ID NO: 1114542 - DNA, 15 bp, Homo sapiens
acacactgtggtttt

SEQ ID NO: 1114543 - DNA, 15 bp, Homo sapiens
aacacactgtggttt

SEQ ID NO: 1114544 - DNA, 15 bp, Homo sapiens
taacacactgtggtt

SEQ ID NO: 1114545 - DNA, 15 bp, Homo sapiens
ataacacactgtggt

SEQ ID NO: 1114546 - DNA, 15 bp, Homo sapiens
gataacacactgtgg

SEQ ID NO: 1114547 - DNA, 15 bp, Homo sapiens
tgataacacactgtg

SEQ ID NO: 1114548 - DNA, 15 bp, Homo sapiens
atgataacacactgt

SEQ ID NO: 1114549 - DNA, 15 bp, Homo sapiens
gatgataacacactg

SEQ ID NO: 1114550 - DNA, 15 bp, Homo sapiens
agatgataacacact

SEQ ID NO: 1114551 - DNA, 15 bp, Homo sapiens
gagatgataacacac

SEQ ID NO: 1114552 - DNA, 15 bp, Homo sapiens
tgagatgataacaca

SEQ ID NO: 1114553 - DNA, 15 bp, Homo sapiens
gtgagatgataacac

SEQ ID NO: 1114554 - DNA, 15 bp, Homo sapiens
agtgagatgataaca

SEQ ID NO: 1114555 - DNA, 15 bp, Homo sapiens
gagtgagatgataac

SEQ ID NO: 1114556 - DNA, 15 bp, Homo sapiens
ggagtgagatgataa

SEQ ID NO: 1114557 - DNA, 15 bp, Homo sapiens
aggagtgagatgata

SEQ ID NO: 1114558 - DNA, 15 bp, Homo sapiens
caggagtgagatgat

SEQ ID NO: 1114559 - DNA, 15 bp, Homo sapiens
gcaggagtgagatga

SEQ ID NO: 1114560 - DNA, 15 bp, Homo sapiens
tgcaggagtgagatg

SEQ ID NO: 1114561 - DNA, 15 bp, Homo sapiens
ttgcaggagtgagat

SEQ ID NO: 1114562 - DNA, 15 bp, Homo sapiens
cttgcaggagtgaga

SEQ ID NO: 1114563 - DNA, 15 bp, Homo sapiens
tcttgcaggagtgag

SEQ ID NO: 1114564 - DNA, 15 bp, Homo sapiens
ttcttgcaggagtga

SEQ ID NO: 1114565 - DNA, 15 bp, Homo sapiens
attcttgcaggagtg

SEQ ID NO: 1114566 - DNA, 15 bp, Homo sapiens
cattcttgcaggagt

SEQ ID NO: 1114567 - DNA, 15 bp, Homo sapiens
ccattcttgcaggag

SEQ ID NO: 1114568 - DNA, 15 bp, Homo sapiens
gccattcttgcagga

SEQ ID NO: 1114569 - DNA, 15 bp, Homo sapiens
agccattcttgcagg

SEQ ID NO: 1114570 - DNA, 15 bp, Homo sapiens
tagccattcttgcag

SEQ ID NO: 1114571 - DNA, 15 bp, Homo sapiens
gattatagccattct

SEQ ID NO: 1114572 - DNA, 15 bp, Homo sapiens
tgattatagccattc

SEQ ID NO: 1114573 - DNA, 15 bp, Homo sapiens
ttgattatagccatt

SEQ ID NO: 1114574 - DNA, 15 bp, Homo sapiens
tttgattatagccat

SEQ ID NO: 1114575 - DNA, 15 bp, Homo sapiens
ttttgattatagcca

SEQ ID NO: 1114576 - DNA, 15 bp, Homo sapiens
tttttgattatagcc

SEQ ID NO: 1114577 - DNA, 15 bp, Homo sapiens
ttttttgattatagc

SEQ ID NO: 1114578 - DNA, 15 bp, Homo sapiens
attttttgattatag

SEQ ID NO: 1114579 - DNA, 15 bp, Homo sapiens
gattttttgattata

SEQ ID NO: 1114580 - DNA, 15 bp, Homo sapiens
tgattttttgattat

SEQ ID NO: 1114581 - DNA, 15 bp, Homo sapiens
ttgattttttgatta

SEQ ID NO: 1114582 - DNA, 15 bp, Homo sapiens
tttgattttttgatt

SEQ ID NO: 1114583 - DNA, 15 bp, Homo sapiens
ttttgattttttgat

SEQ ID NO: 1114584 - DNA, 15 bp, Homo sapiens
tttttgattttttga

SEQ ID NO: 1114585 - DNA, 15 bp, Homo sapiens
ttttttgattttttg

SEQ ID NO: 1114586 - DNA, 15 bp, Homo sapiens
cttttttgatttttt

SEQ ID NO: 1114587 - DNA, 15 bp, Homo sapiens
tcttttttgattttt

SEQ ID NO: 1114588 - DNA, 15 bp, Homo sapiens
ttcttttttgatttt

SEQ ID NO: 1114589 - DNA, 15 bp, Homo sapiens
attcttttttgattt

SEQ ID NO: 1114590 - DNA, 15 bp, Homo sapiens
tattcttttttgatt

SEQ ID NO: 1114591 - DNA, 15 bp, Homo sapiens
ctattcttttttgat

SEQ ID NO: 1114592 - DNA, 15 bp, Homo sapiens
tctattcttttttga

SEQ ID NO: 1114593 - DNA, 15 bp, Homo sapiens
atctattcttttttg

SEQ ID NO: 1114594 - DNA, 15 bp, Homo sapiens
acatctattcttttt

SEQ ID NO: 1114595 - DNA, 15 bp, Homo sapiens
aacatctattctttt

SEQ ID NO: 1114596 - DNA, 15 bp, Homo sapiens
caacatctattcttt

SEQ ID NO: 1114597 - DNA, 15 bp, Homo sapiens
ccaacatctattctt

SEQ ID NO: 1114598 - DNA, 15 bp, Homo sapiens
gccaacatctattct

SEQ ID NO: 1114599 - DNA, 15 bp, Homo sapiens
tgccaacatctattc

SEQ ID NO: 1114600 - DNA, 15 bp, Homo sapiens
tcatgccaacatcta

SEQ ID NO: 1114601 - DNA, 15 bp, Homo sapiens
ttcatgccaacatct

SEQ ID NO: 1114602 - DNA, 15 bp, Homo sapiens
attcatgccaacatc

SEQ ID NO: 1114603 - DNA, 15 bp, Homo sapiens
cattcatgccaacat

SEQ ID NO: 1114604 - DNA, 15 bp, Homo sapiens
acattcatgccaaca

SEQ ID NO: 1114605 - DNA, 15 bp, Homo sapiens
cacattcatgccaac

SEQ ID NO: 1114606 - DNA, 15 bp, Homo sapiens
ccacattcatgccaa

SEQ ID NO: 1114607 - DNA, 15 bp, Homo sapiens
accacattcatgcca

SEQ ID NO: 1114608 - DNA, 15 bp, Homo sapiens
caccacattcatgcc

SEQ ID NO: 1114609 - DNA, 15 bp, Homo sapiens
tcaccacattcatgc

SEQ ID NO: 1114610 - DNA, 15 bp, Homo sapiens
ttcaccacattcatg

SEQ ID NO: 1114611 - DNA, 15 bp, Homo sapiens
tttcaccacattcat

SEQ ID NO: 1114612 - DNA, 15 bp, Homo sapiens
ttttcaccacattca

SEQ ID NO: 1114613 - DNA, 15 bp, Homo sapiens
cttttcaccacattc

SEQ ID NO: 1114614 - DNA, 15 bp, Homo sapiens
ccttttcaccacatt

SEQ ID NO: 1114615 - DNA, 15 bp, Homo sapiens
cccttttcaccacat

SEQ ID NO: 1114616 - DNA, 15 bp, Homo sapiens
tcccttttcaccaca

SEQ ID NO: 1114617 - DNA, 15 bp, Homo sapiens
ttcccttttcaccac

SEQ ID NO: 1114618 - DNA, 15 bp, Homo sapiens
gttcccttttcacca

SEQ ID NO: 1114619 - DNA, 15 bp, Homo sapiens
tgttcccttttcacc

SEQ ID NO: 1114620 - DNA, 15 bp, Homo sapiens
gtgttcccttttcac

SEQ ID NO: 1114621 - DNA, 15 bp, Homo sapiens
agtgttcccttttca

SEQ ID NO: 1114622 - DNA, 15 bp, Homo sapiens
aagtgttcccttttc

SEQ ID NO: 1114623 - DNA, 15 bp, Homo sapiens
aaagtgttccctttt

SEQ ID NO: 1114624 - DNA, 15 bp, Homo sapiens
aaaagtgttcccttt

SEQ ID NO: 1114625 - DNA, 15 bp, Homo sapiens
taaaagtgttccctt

SEQ ID NO: 1114626 - DNA, 15 bp, Homo sapiens
gtaaaagtgttccct

SEQ ID NO: 1114627 - DNA, 15 bp, Homo sapiens
tgtaaaagtgttccc

SEQ ID NO: 1114628 - DNA, 15 bp, Homo sapiens
gtgtaaaagtgttcc

SEQ ID NO: 1114629 - DNA, 15 bp, Homo sapiens
ggtgtaaaagtgttc

SEQ ID NO: 1114630 - DNA, 15 bp, Homo sapiens
tggtgtaaaagtgtt

SEQ ID NO: 1114631 - DNA, 15 bp, Homo sapiens
atggtgtaaaagtgt

SEQ ID NO: 1114632 - DNA, 15 bp, Homo sapiens
aatggtgtaaaagtg

SEQ ID NO: 1114633 - DNA, 15 bp, Homo sapiens
caatggtgtaaaagt

SEQ ID NO: 1114634 - DNA, 15 bp, Homo sapiens
ccaatggtgtaaaag

SEQ ID NO: 1114635 - DNA, 15 bp, Homo sapiens
accaatggtgtaaaa

SEQ ID NO: 1114636 - DNA, 15 bp, Homo sapiens
caccaatggtgtaaa

SEQ ID NO: 1114637 - DNA, 15 bp, Homo sapiens
ccaccaatggtgtaa

SEQ ID NO: 1114638 - DNA, 15 bp, Homo sapiens
cccaccaatggtgta

SEQ ID NO: 1114639 - DNA, 15 bp, Homo sapiens
tcccaccaatggtgt

SEQ ID NO: 1114640 - DNA, 15 bp, Homo sapiens
ttcccaccaatggtg

SEQ ID NO: 1114641 - DNA, 15 bp, Homo sapiens
attcccaccaatggt

SEQ ID NO: 1114642 - DNA, 15 bp, Homo sapiens
cattcccaccaatgg

SEQ ID NO: 1114643 - DNA, 15 bp, Homo sapiens
acattcccaccaatg

SEQ ID NO: 1114644 - DNA, 15 bp, Homo sapiens
tacattcccaccaat

SEQ ID NO: 1114645 - DNA, 15 bp, Homo sapiens
ggttgtactagttta

SEQ ID NO: 1114646 - DNA, 15 bp, Homo sapiens
tggttgtactagttt

SEQ ID NO: 1114647 - DNA, 15 bp, Homo sapiens
gtggttgtactagtt

SEQ ID NO: 1114648 - DNA, 15 bp, Homo sapiens
agtggttgtactagt

SEQ ID NO: 1114649 - DNA, 15 bp, Homo sapiens
tagtggttgtactag

SEQ ID NO: 1114650 - DNA, 15 bp, Homo sapiens
atagtggttgtacta

SEQ ID NO: 1114651 - DNA, 15 bp, Homo sapiens
catagtggttgtact

SEQ ID NO: 1114652 - DNA, 15 bp, Homo sapiens
ccatagtggttgtac

SEQ ID NO: 1114653 - DNA, 15 bp, Homo sapiens
tccatagtggttgta

SEQ ID NO: 1114654 - DNA, 15 bp, Homo sapiens
ttccatagtggttgt

SEQ ID NO: 1114655 - DNA, 15 bp, Homo sapiens
tttccatagtggttg

SEQ ID NO: 1114656 - DNA, 15 bp, Homo sapiens
ttttccatagtggtt

SEQ ID NO: 1114657 - DNA, 15 bp, Homo sapiens
gttttccatagtggt

SEQ ID NO: 1114658 - DNA, 15 bp, Homo sapiens
tgttttccatagtgg

SEQ ID NO: 1114659 - DNA, 15 bp, Homo sapiens
ctgttttccatagtg

SEQ ID NO: 1114660 - DNA, 15 bp, Homo sapiens
cactgttttccatag

SEQ ID NO: 1114661 - DNA, 15 bp, Homo sapiens
acactgttttccata

SEQ ID NO: 1114662 - DNA, 15 bp, Homo sapiens
cacactgttttccat

SEQ ID NO: 1114663 - DNA, 15 bp, Homo sapiens
acacactgttttcca

SEQ ID NO: 1114664 - DNA, 15 bp, Homo sapiens
cacacactgttttcc

SEQ ID NO: 1114665 - DNA, 15 bp, Homo sapiens
tcacacactgttttc

SEQ ID NO: 1114666 - DNA, 15 bp, Homo sapiens
atcacacactgtttt

SEQ ID NO: 1114667 - DNA, 15 bp, Homo sapiens
aatcacacactgttt

SEQ ID NO: 1114668 - DNA, 15 bp, Homo sapiens
gaatcacacactgtt

SEQ ID NO: 1114669 - DNA, 15 bp, Homo sapiens
ggaatcacacactgt

SEQ ID NO: 1114670 - DNA, 15 bp, Homo sapiens
aggaatcacacactg

SEQ ID NO: 1114671 - DNA, 15 bp, Homo sapiens
aaggaatcacacact

SEQ ID NO: 1114672 - DNA, 15 bp, Homo sapiens
taaggaatcacacac

SEQ ID NO: 1114673 - DNA, 15 bp, Homo sapiens
ttaaggaatcacaca

SEQ ID NO: 1114674 - DNA, 15 bp, Homo sapiens
tttaaggaatcacac

SEQ ID NO: 1114675 - DNA, 15 bp, Homo sapiens
ctttaaggaatcaca

SEQ ID NO: 1114676 - DNA, 15 bp, Homo sapiens
tctttaaggaatcac

SEQ ID NO: 1114677 - DNA, 15 bp, Homo sapiens
ttctttaaggaatca

SEQ ID NO: 1114678 - DNA, 15 bp, Homo sapiens
cttctttaaggaatc

SEQ ID NO: 1114679 - DNA, 15 bp, Homo sapiens
acttctttaaggaat

SEQ ID NO: 1114680 - DNA, 15 bp, Homo sapiens
tacttctttaaggaa

SEQ ID NO: 1114681 - DNA, 15 bp, Homo sapiens
ttacttctttaagga

SEQ ID NO: 1114682 - DNA, 15 bp, Homo sapiens
tttacttctttaagg

SEQ ID NO: 1114683 - DNA, 15 bp, Homo sapiens
gtttacttctttaag

SEQ ID NO: 1114684 - DNA, 15 bp, Homo sapiens
cgtttacttctttaa

SEQ ID NO: 1114685 - DNA, 15 bp, Homo sapiens
acgtttacttcttta

SEQ ID NO: 1114686 - DNA, 15 bp, Homo sapiens
tacgtttacttcttt

SEQ ID NO: 1114687 - DNA, 15 bp, Homo sapiens
ctacgtttacttctt

SEQ ID NO: 1114688 - DNA, 15 bp, Homo sapiens
tctacgtttacttct

SEQ ID NO: 1114689 - DNA, 15 bp, Homo sapiens
atctacgtttacttc

SEQ ID NO: 1114690 - DNA, 15 bp, Homo sapiens
gatctacgtttactt

SEQ ID NO: 1114691 - DNA, 15 bp, Homo sapiens
agatctacgtttact

SEQ ID NO: 1114692 - DNA, 15 bp, Homo sapiens
tagatctacgtttac

SEQ ID NO: 1114693 - DNA, 15 bp, Homo sapiens
gtagatctacgttta

SEQ ID NO: 1114694 - DNA, 15 bp, Homo sapiens
ggtagatctacgttt

SEQ ID NO: 1114695 - DNA, 15 bp, Homo sapiens
cggtagatctacgtt

SEQ ID NO: 1114696 - DNA, 15 bp, Homo sapiens
acggtagatctacgt

SEQ ID NO: 1114697 - DNA, 15 bp, Homo sapiens
aacggtagatctacg

SEQ ID NO: 1114698 - DNA, 15 bp, Homo sapiens
aaacggtagatctac

SEQ ID NO: 1114699 - DNA, 15 bp, Homo sapiens
caaacggtagatcta

SEQ ID NO: 1114700 - DNA, 15 bp, Homo sapiens
tcaaacggtagatct

SEQ ID NO: 1114701 - DNA, 15 bp, Homo sapiens
atcaaacggtagatc

SEQ ID NO: 1114702 - DNA, 15 bp, Homo sapiens
gatcaaacggtagat

SEQ ID NO: 1114703 - DNA, 15 bp, Homo sapiens
ggatcaaacggtaga

SEQ ID NO: 1114704 - DNA, 15 bp, Homo sapiens
tggatcaaacggtag

SEQ ID NO: 1114705 - DNA, 15 bp, Homo sapiens
ctggatcaaacggta

SEQ ID NO: 1114706 - DNA, 15 bp, Homo sapiens
actggatcaaacggt

SEQ ID NO: 1114707 - DNA, 15 bp, Homo sapiens
tactggatcaaacgg

SEQ ID NO: 1114708 - DNA, 15 bp, Homo sapiens
ttactggatcaaacg

SEQ ID NO: 1114709 - DNA, 15 bp, Homo sapiens
attactggatcaaac

SEQ ID NO: 1114710 - DNA, 15 bp, Homo sapiens
gattactggatcaaa

SEQ ID NO: 1114711 - DNA, 15 bp, Homo sapiens
ggattactggatcaa

SEQ ID NO: 1114712 - DNA, 15 bp, Homo sapiens
gggattactggatca

SEQ ID NO: 1114713 - DNA, 15 bp, Homo sapiens
tgggattactggatc

SEQ ID NO: 1114714 - DNA, 15 bp, Homo sapiens
gtgggattactggat

SEQ ID NO: 1114715 - DNA, 15 bp, Homo sapiens
agtgggattactgga

SEQ ID NO: 1114716 - DNA, 15 bp, Homo sapiens
tagtgggattactgg

SEQ ID NO: 1114717 - DNA, 15 bp, Homo sapiens
gtagtgggattactg

SEQ ID NO: 1114718 - DNA, 15 bp, Homo sapiens
agtagtgggattact

SEQ ID NO: 1114719 - DNA, 15 bp, Homo sapiens
tagtagtgggattac

SEQ ID NO: 1114720 - DNA, 15 bp, Homo sapiens
atagtagtgggatta

SEQ ID NO: 1114721 - DNA, 15 bp, Homo sapiens
aatagtagtgggatt

SEQ ID NO: 1114722 - DNA, 15 bp, Homo sapiens
taatagtagtgggat

SEQ ID NO: 1114723 - DNA, 15 bp, Homo sapiens
ttaatagtagtggga

SEQ ID NO: 1114724 - DNA, 15 bp, Homo sapiens
attaatagtagtggg

SEQ ID NO: 1114725 - DNA, 15 bp, Homo sapiens
tattaatagtagtgg

SEQ ID NO: 1114726 - DNA, 15 bp, Homo sapiens
ctattaatagtagtg

SEQ ID NO: 1114727 - DNA, 15 bp, Homo sapiens
cctattaatagtagt

SEQ ID NO: 1114728 - DNA, 15 bp, Homo sapiens
gcctattaatagtag

SEQ ID NO: 1114729 - DNA, 15 bp, Homo sapiens
tgcctattaatagta

SEQ ID NO: 1114730 - DNA, 15 bp, Homo sapiens
atgcctattaatagt

SEQ ID NO: 1114731 - DNA, 15 bp, Homo sapiens
catgcctattaatag

SEQ ID NO: 1114732 - DNA, 15 bp, Homo sapiens
acatgcctattaata

SEQ ID NO: 1114733 - DNA, 15 bp, Homo sapiens
tacatgcctattaat

SEQ ID NO: 1114734 - DNA, 15 bp, Homo sapiens
gtacatgcctattaa

SEQ ID NO: 1114735 - DNA, 15 bp, Homo sapiens
ggtacatgcctatta

SEQ ID NO: 1114736 - DNA, 15 bp, Homo sapiens
gggtacatgcctatt

SEQ ID NO: 1114737 - DNA, 15 bp, Homo sapiens
tgggtacatgcctat

SEQ ID NO: 1114738 - DNA, 15 bp, Homo sapiens
ctgggtacatgccta

SEQ ID NO: 1114739 - DNA, 15 bp, Homo sapiens
tctgggtacatgcct

SEQ ID NO: 1114740 - DNA, 15 bp, Homo sapiens
ctctgggtacatgcc

SEQ ID NO: 1114741 - DNA, 15 bp, Homo sapiens
cctctgggtacatgc

SEQ ID NO: 1114742 - DNA, 15 bp, Homo sapiens
tcctctgggtacatg

SEQ ID NO: 1114743 - DNA, 15 bp, Homo sapiens
ttcctctgggtacat

SEQ ID NO: 1114744 - DNA, 15 bp, Homo sapiens
tttcctctgggtaca

SEQ ID NO: 1114745 - DNA, 15 bp, Homo sapiens
ttttcctctgggtac

SEQ ID NO: 1114746 - DNA, 15 bp, Homo sapiens
attttcctctgggta

SEQ ID NO: 1114747 - DNA, 15 bp, Homo sapiens
tattttcctctgggt

SEQ ID NO: 1114748 - DNA, 15 bp, Homo sapiens
ttattttcctctggg

SEQ ID NO: 1114749 - DNA, 15 bp, Homo sapiens
cttattttcctctgg

SEQ ID NO: 1114750 - DNA, 15 bp, Homo sapiens
acttattttcctctg

SEQ ID NO: 1114751 - DNA, 15 bp, Homo sapiens
gacttattttcctct

SEQ ID NO: 1114752 - DNA, 15 bp, Homo sapiens
tgacttattttcctc

SEQ ID NO: 1114753 - DNA, 15 bp, Homo sapiens
atgacttattttcct

SEQ ID NO: 1114754 - DNA, 15 bp, Homo sapiens
aatgacttattttcc

SEQ ID NO: 1114755 - DNA, 15 bp, Homo sapiens
taatgacttattttc

SEQ ID NO: 1114756 - DNA, 15 bp, Homo sapiens
ataatgacttatttt

SEQ ID NO: 1114757 - DNA, 15 bp, Homo sapiens
tataatgacttattt

SEQ ID NO: 1114758 - DNA, 15 bp, Homo sapiens
gtataatgacttatt

SEQ ID NO: 1114759 - DNA, 15 bp, Homo sapiens
tgtataatgacttat

SEQ ID NO: 1114760 - DNA, 15 bp, Homo sapiens
ttgtataatgactta

SEQ ID NO: 1114761 - DNA, 15 bp, Homo sapiens
tttgtataatgactt

SEQ ID NO: 1114762 - DNA, 15 bp, Homo sapiens
ttttgtataatgact

SEQ ID NO: 1114763 - DNA, 15 bp, Homo sapiens
tttttgtataatgac

SEQ ID NO: 1114764 - DNA, 15 bp, Homo sapiens
ttttttgtataatga

SEQ ID NO: 1114765 - DNA, 15 bp, Homo sapiens
cttttttgtataatg

SEQ ID NO: 1114766 - DNA, 15 bp, Homo sapiens
tcttttttgtataat

SEQ ID NO: 1114767 - DNA, 15 bp, Homo sapiens
atcttttttgtataa

SEQ ID NO: 1114768 - DNA, 15 bp, Homo sapiens
tatcttttttgtata

SEQ ID NO: 1114769 - DNA, 15 bp, Homo sapiens
gtatcttttttgtat

SEQ ID NO: 1114770 - DNA, 15 bp, Homo sapiens
agtatcttttttgta

SEQ ID NO: 1114771 - DNA, 15 bp, Homo sapiens
aagtatcttttttgt

SEQ ID NO: 1114772 - DNA, 15 bp, Homo sapiens
caagtatcttttttg

SEQ ID NO: 1114773 - DNA, 15 bp, Homo sapiens
tacaagtatcttttt

SEQ ID NO: 1114774 - DNA, 15 bp, Homo sapiens
atacaagtatctttt

SEQ ID NO: 1114775 - DNA, 15 bp, Homo sapiens
tatacaagtatcttt

SEQ ID NO: 1114776 - DNA, 15 bp, Homo sapiens
atatacaagtatctt

SEQ ID NO: 1114777 - DNA, 15 bp, Homo sapiens
catatacaagtatct

SEQ ID NO: 1114778 - DNA, 15 bp, Homo sapiens
acatatacaagtatc

SEQ ID NO: 1114779 - DNA, 15 bp, Homo sapiens
tacatatacaagtat

SEQ ID NO: 1114780 - DNA, 15 bp, Homo sapiens
atacatatacaagta

SEQ ID NO: 1114781 - DNA, 15 bp, Homo sapiens
catacatatacaagt

SEQ ID NO: 1114782 - DNA, 15 bp, Homo sapiens
acatacatatacaag

SEQ ID NO: 1114783 - DNA, 15 bp, Homo sapiens
cacatacatatacaa

SEQ ID NO: 1114784 - DNA, 15 bp, Homo sapiens
acacatacatataca

SEQ ID NO: 1114785 - DNA, 15 bp, Homo sapiens
tacacatacatatac

SEQ ID NO: 1114786 - DNA, 15 bp, Homo sapiens
ctatacacatacata

SEQ ID NO: 1114787 - DNA, 15 bp, Homo sapiens
gctatacacatacat

SEQ ID NO: 1114788 - DNA, 15 bp, Homo sapiens
tgctatacacataca

SEQ ID NO: 1114789 - DNA, 15 bp, Homo sapiens
ctgctatacacatac

SEQ ID NO: 1114790 - DNA, 15 bp, Homo sapiens
gctgctatacacata

SEQ ID NO: 1114791 - DNA, 15 bp, Homo sapiens
tgctgctatacacat

SEQ ID NO: 1114792 - DNA, 15 bp, Homo sapiens
ctgctgctatacaca

SEQ ID NO: 1114793 - DNA, 15 bp, Homo sapiens
tctgctgctatacac

SEQ ID NO: 1114794 - DNA, 15 bp, Homo sapiens
ttctgctgctataca

SEQ ID NO: 1114795 - DNA, 15 bp, Homo sapiens
attctgctgctatac

SEQ ID NO: 1114796 - DNA, 15 bp, Homo sapiens
aattctgctgctata

SEQ ID NO: 1114797 - DNA, 15 bp, Homo sapiens
aaattctgctgctat

SEQ ID NO: 1114798 - DNA, 15 bp, Homo sapiens
caaattctgctgcta

SEQ ID NO: 1114799 - DNA, 15 bp, Homo sapiens
gcaaattctgctgct

SEQ ID NO: 1114800 - DNA, 15 bp, Homo sapiens
tgcaaattctgctgc

SEQ ID NO: 1114801 - DNA, 15 bp, Homo sapiens
ttgcaaattctgctg

SEQ ID NO: 1114802 - DNA, 15 bp, Homo sapiens
attgcaaattctgct

SEQ ID NO: 1114803 - DNA, 15 bp, Homo sapiens
aattgcaaattctgc

SEQ ID NO: 1114804 - DNA, 15 bp, Homo sapiens
caattgcaaattctg

SEQ ID NO: 1114805 - DNA, 15 bp, Homo sapiens
gcaattgcaaattct

SEQ ID NO: 1114806 - DNA, 15 bp, Homo sapiens
tgcaattgcaaattc

SEQ ID NO: 1114807 - DNA, 15 bp, Homo sapiens
ttgcaattgcaaatt

SEQ ID NO: 1114808 - DNA, 15 bp, Homo sapiens
tttgcaattgcaaat

SEQ ID NO: 1114809 - DNA, 15 bp, Homo sapiens
ttttgcaattgcaaa

SEQ ID NO: 1114810 - DNA, 15 bp, Homo sapiens
tttttgcaattgcaa

SEQ ID NO: 1114811 - DNA, 15 bp, Homo sapiens
atttttgcaattgca

SEQ ID NO: 1114812 - DNA, 15 bp, Homo sapiens
tatttttgcaattgc

SEQ ID NO: 1114813 - DNA, 15 bp, Homo sapiens
atatttttgcaattg

SEQ ID NO: 1114814 - DNA, 15 bp, Homo sapiens
catatttttgcaatt

SEQ ID NO: 1114815 - DNA, 15 bp, Homo sapiens
ccatatttttgcaat

SEQ ID NO: 1114816 - DNA, 15 bp, Homo sapiens
tccatatttttgcaa

SEQ ID NO: 1114817 - DNA, 15 bp, Homo sapiens
ttccatatttttgca

SEQ ID NO: 1114818 - DNA, 15 bp, Homo sapiens
gttccatatttttgc

SEQ ID NO: 1114819 - DNA, 15 bp, Homo sapiens
ggttccatatttttg

SEQ ID NO: 1114820 - DNA, 15 bp, Homo sapiens
tggttccatattttt

SEQ ID NO: 1114821 - DNA, 15 bp, Homo sapiens
ctggttccatatttt

SEQ ID NO: 1114822 - DNA, 15 bp, Homo sapiens
gctggttccatattt

SEQ ID NO: 1114823 - DNA, 15 bp, Homo sapiens
ggctggttccatatt

SEQ ID NO: 1114824 - DNA, 15 bp, Homo sapiens
gggctggttccatat

SEQ ID NO: 1114825 - DNA, 15 bp, Homo sapiens
tgggctggttccata

SEQ ID NO: 1114826 - DNA, 15 bp, Homo sapiens
ttgggctggttccat

SEQ ID NO: 1114827 - DNA, 15 bp, Homo sapiens
tttgggctggttcca

SEQ ID NO: 1114828 - DNA, 15 bp, Homo sapiens
ctttgggctggttcc

SEQ ID NO: 1114829 - DNA, 15 bp, Homo sapiens
cctttgggctggttc

SEQ ID NO: 1114830 - DNA, 15 bp, Homo sapiens
gcctttgggctggtt

SEQ ID NO: 1114831 - DNA, 15 bp, Homo sapiens
ggcctttgggctggt

SEQ ID NO: 1114832 - DNA, 15 bp, Homo sapiens
gggcctttgggctgg

SEQ ID NO: 1114833 - DNA, 15 bp, Homo sapiens
tgggcctttgggctg

SEQ ID NO: 1114834 - DNA, 15 bp, Homo sapiens
atgggcctttgggct

SEQ ID NO: 1114835 - DNA, 15 bp, Homo sapiens
gatgggcctttgggc

SEQ ID NO: 1114836 - DNA, 15 bp, Homo sapiens
tgatgggcctttggg

SEQ ID NO: 1114837 - DNA, 15 bp, Homo sapiens
ttgatgggcctttgg

SEQ ID NO: 1114838 - DNA, 15 bp, Homo sapiens
attgatgggcctttg

SEQ ID NO: 1114839 - DNA, 15 bp, Homo sapiens
gattgatgggccttt

SEQ ID NO: 1114840 - DNA, 15 bp, Homo sapiens
tgattgatgggcctt

SEQ ID NO: 1114841 - DNA, 15 bp, Homo sapiens
ttgattgatgggcct

SEQ ID NO: 1114842 - DNA, 15 bp, Homo sapiens
gttgattgatgggcc

SEQ ID NO: 1114843 - DNA, 15 bp, Homo sapiens
cgttgattgatgggc

SEQ ID NO: 1114844 - DNA, 15 bp, Homo sapiens
tcgttgattgatggg

SEQ ID NO: 1114845 - DNA, 15 bp, Homo sapiens
ctcgttgattgatgg

SEQ ID NO: 1114846 - DNA, 15 bp, Homo sapiens
actcgttgattgatg

SEQ ID NO: 1114847 - DNA, 15 bp, Homo sapiens
cactcgttgattgat

SEQ ID NO: 1114848 - DNA, 15 bp, Homo sapiens
ccactcgttgattga

SEQ ID NO: 1114849 - DNA, 15 bp, Homo sapiens
tccactcgttgattg

SEQ ID NO: 1114850 - DNA, 15 bp, Homo sapiens
atccactcgttgatt

SEQ ID NO: 1114851 - DNA, 15 bp, Homo sapiens
tatccactcgttgat

SEQ ID NO: 1114852 - DNA, 15 bp, Homo sapiens
ttatccactcgttga

SEQ ID NO: 1114853 - DNA, 15 bp, Homo sapiens
cttatccactcgttg

SEQ ID NO: 1114854 - DNA, 15 bp, Homo sapiens
ccttatccactcgtt

SEQ ID NO: 1114855 - DNA, 15 bp, Homo sapiens
tccttatccactcgt

SEQ ID NO: 1114856 - DNA, 15 bp, Homo sapiens
ttccttatccactcg

SEQ ID NO: 1114857 - DNA, 15 bp, Homo sapiens
tttccttatccactc

SEQ ID NO: 1114858 - DNA, 15 bp, Homo sapiens
ttttccttatccact

SEQ ID NO: 1114859 - DNA, 15 bp, Homo sapiens
attttccttatccac

SEQ ID NO: 1114860 - DNA, 15 bp, Homo sapiens
cattttccttatcca

SEQ ID NO: 1114861 - DNA, 15 bp, Homo sapiens
acattttccttatcc

SEQ ID NO: 1114862 - DNA, 15 bp, Homo sapiens
tacattttccttatc

SEQ ID NO: 1114863 - DNA, 15 bp, Homo sapiens
ttacattttccttat

SEQ ID NO: 1114864 - DNA, 15 bp, Homo sapiens
attacattttcctta

SEQ ID NO: 1114865 - DNA, 15 bp, Homo sapiens
tattacattttcctt

SEQ ID NO: 1114866 - DNA, 15 bp, Homo sapiens
atattacattttcct

SEQ ID NO: 1114867 - DNA, 15 bp, Homo sapiens
tatattacattttcc

SEQ ID NO: 1114868 - DNA, 15 bp, Homo sapiens
atatattacattttc

SEQ ID NO: 1114869 - DNA, 15 bp, Homo sapiens
tatatattacatttt

SEQ ID NO: 1114870 - DNA, 15 bp, Homo sapiens
atatatatattacat

SEQ ID NO: 1114871 - DNA, 15 bp, Homo sapiens
aatatatatattaca

SEQ ID NO: 1114872 - DNA, 15 bp, Homo sapiens
taatatatatattac

SEQ ID NO: 1114873 - DNA, 15 bp, Homo sapiens
gtaatatatatatta

SEQ ID NO: 1114874 - DNA, 15 bp, Homo sapiens
cgtaatatatatatt

SEQ ID NO: 1114875 - DNA, 15 bp, Homo sapiens
acgtaatatatatat

SEQ ID NO: 1114876 - DNA, 15 bp, Homo sapiens
tacgtaatatatata

SEQ ID NO: 1114877 - DNA, 15 bp, Homo sapiens
atacgtaatatatat

SEQ ID NO: 1114878 - DNA, 15 bp, Homo sapiens
catacgtaatatata

SEQ ID NO: 1114879 - DNA, 15 bp, Homo sapiens
tcatacgtaatatat

SEQ ID NO: 1114880 - DNA, 15 bp, Homo sapiens
atcatacgtaatata

SEQ ID NO: 1114881 - DNA, 15 bp, Homo sapiens
tatcatacgtaatat

SEQ ID NO: 1114882 - DNA, 15 bp, Homo sapiens
gtatcatacgtaata

SEQ ID NO: 1114883 - DNA, 15 bp, Homo sapiens
tgtatcatacgtaat

SEQ ID NO: 1114884 - DNA, 15 bp, Homo sapiens
ctgtatcatacgtaa

SEQ ID NO: 1114885 - DNA, 15 bp, Homo sapiens
tctgtatcatacgta

SEQ ID NO: 1114886 - DNA, 15 bp, Homo sapiens
atctgtatcatacgt

SEQ ID NO: 1114887 - DNA, 15 bp, Homo sapiens
tatctgtatcatacg

SEQ ID NO: 1114888 - DNA, 15 bp, Homo sapiens
atatctgtatcatac

SEQ ID NO: 1114889 - DNA, 15 bp, Homo sapiens
catatctgtatcata

SEQ ID NO: 1114890 - DNA, 15 bp, Homo sapiens
tcatatctgtatcat

SEQ ID NO: 1114891 - DNA, 15 bp, Homo sapiens
atcatatctgtatca

SEQ ID NO: 1114892 - DNA, 15 bp, Homo sapiens
tatcatatctgtatc

SEQ ID NO: 1114893 - DNA, 15 bp, Homo sapiens
atatcatatctgtat

SEQ ID NO: 1114894 - DNA, 15 bp, Homo sapiens
tatatcatatctgta

SEQ ID NO: 1114895 - DNA, 15 bp, Homo sapiens
atatatcatatctgt

SEQ ID NO: 1114896 - DNA, 15 bp, Homo sapiens
tatatatcatatctg

SEQ ID NO: 1114897 - DNA, 15 bp, Homo sapiens
atatatatcatatct

SEQ ID NO: 1114898 - DNA, 15 bp, Homo sapiens
catatatatcatatc

SEQ ID NO: 1114899 - DNA, 15 bp, Homo sapiens
acatatatatcatat

SEQ ID NO: 1114900 - DNA, 15 bp, Homo sapiens
tacatatatatcata

SEQ ID NO: 1114901 - DNA, 15 bp, Homo sapiens
ttacatatatatcat

SEQ ID NO: 1114902 - DNA, 15 bp, Homo sapiens
attacatatatatca

SEQ ID NO: 1114903 - DNA, 15 bp, Homo sapiens
tattacatatatatc

SEQ ID NO: 1114904 - DNA, 15 bp, Homo sapiens
atattacatatatat

SEQ ID NO: 1114905 - DNA, 15 bp, Homo sapiens
tatattacatatata

SEQ ID NO: 1114906 - DNA, 15 bp, Homo sapiens
atatattacatatat

SEQ ID NO: 1114907 - DNA, 15 bp, Homo sapiens
tatatattacatata

SEQ ID NO: 1114908 - DNA, 15 bp, Homo sapiens
atatatattacatat

SEQ ID NO: 1114909 - DNA, 15 bp, Homo sapiens
aatatatattacata

SEQ ID NO: 1114910 - DNA, 15 bp, Homo sapiens
taatatatattacat

SEQ ID NO: 1114911 - DNA, 15 bp, Homo sapiens
gtaatatatattaca

SEQ ID NO: 1114912 - DNA, 15 bp, Homo sapiens
tgtaatatatattac

SEQ ID NO: 1114913 - DNA, 15 bp, Homo sapiens
atgtaatatatatta

SEQ ID NO: 1114914 - DNA, 15 bp, Homo sapiens
aatgtaatatatatt

SEQ ID NO: 1114915 - DNA, 15 bp, Homo sapiens
aaatgtaatatatat

SEQ ID NO: 1114916 - DNA, 15 bp, Homo sapiens
aaaatgtaatatata

SEQ ID NO: 1114917 - DNA, 15 bp, Homo sapiens
taaaatgtaatatat

SEQ ID NO: 1114918 - DNA, 15 bp, Homo sapiens
ataaaatgtaatata

SEQ ID NO: 1114919 - DNA, 15 bp, Homo sapiens
tataaaatgtaatat

SEQ ID NO: 1114920 - DNA, 15 bp, Homo sapiens
atataaaatgtaata

SEQ ID NO: 1114921 - DNA, 15 bp, Homo sapiens
aatataaaatgtaat

SEQ ID NO: 1114922 - DNA, 15 bp, Homo sapiens
taatataaaatgtaa

SEQ ID NO: 1114923 - DNA, 15 bp, Homo sapiens
gtaatataaaatgta

SEQ ID NO: 1114924 - DNA, 15 bp, Homo sapiens
agtaatataaaatgt

SEQ ID NO: 1114925 - DNA, 15 bp, Homo sapiens
tagtaatataaaatg

SEQ ID NO: 1114926 - DNA, 15 bp, Homo sapiens
atagtaatataaaat

SEQ ID NO: 1114927 - DNA, 15 bp, Homo sapiens
tatagtaatataaaa

SEQ ID NO: 1114928 - DNA, 15 bp, Homo sapiens
atatagtaatataaa

SEQ ID NO: 1114929 - DNA, 15 bp, Homo sapiens
tatatagtaatataa

SEQ ID NO: 1114930 - DNA, 15 bp, Homo sapiens
atatatagtaatata

SEQ ID NO: 1114931 - DNA, 15 bp, Homo sapiens
aatatatagtaatat

SEQ ID NO: 1114932 - DNA, 15 bp, Homo sapiens
taatatatagtaata

SEQ ID NO: 1114933 - DNA, 15 bp, Homo sapiens
gtaatatatagtaat

SEQ ID NO: 1114934 - DNA, 15 bp, Homo sapiens
tgtaatatatagtaa

SEQ ID NO: 1114935 - DNA, 15 bp, Homo sapiens
atgtaatatatagta

SEQ ID NO: 1114936 - DNA, 15 bp, Homo sapiens
aatgtaatatatagt

SEQ ID NO: 1114937 - DNA, 15 bp, Homo sapiens
aaatgtaatatatag

SEQ ID NO: 1114938 - DNA, 15 bp, Homo sapiens
ttaaaatgtaatata

SEQ ID NO: 1114939 - DNA, 15 bp, Homo sapiens
attaaaatgtaatat

SEQ ID NO: 1114940 - DNA, 15 bp, Homo sapiens
tattaaaatgtaata

SEQ ID NO: 1114941 - DNA, 15 bp, Homo sapiens
atattaaaatgtaat

SEQ ID NO: 1114942 - DNA, 15 bp, Homo sapiens
acatattaaaatgta

SEQ ID NO: 1114943 - DNA, 15 bp, Homo sapiens
aacatattaaaatgt

SEQ ID NO: 1114944 - DNA, 15 bp, Homo sapiens
aaacatattaaaatg

SEQ ID NO: 1114945 - DNA, 15 bp, Homo sapiens
aaaacatattaaaat

SEQ ID NO: 1114946 - DNA, 15 bp, Homo sapiens
aaaaacatattaaaa

SEQ ID NO: 1114947 - DNA, 15 bp, Homo sapiens
caaaaacatattaaa

SEQ ID NO: 1114948 - DNA, 15 bp, Homo sapiens
acaaaaacatattaa

SEQ ID NO: 1114949 - DNA, 15 bp, Homo sapiens
cacaaaaacatatta

SEQ ID NO: 1114950 - DNA, 15 bp, Homo sapiens
acacaaaaacatatt

SEQ ID NO: 1114951 - DNA, 15 bp, Homo sapiens
cacacaaaaacatat

SEQ ID NO: 1114952 - DNA, 15 bp, Homo sapiens
acacacaaaaacata

SEQ ID NO: 1114953 - DNA, 15 bp, Homo sapiens
cacacacaaaaacat

SEQ ID NO: 1114954 - DNA, 15 bp, Homo sapiens
acacacacaaaaaca

SEQ ID NO: 1114955 - DNA, 15 bp, Homo sapiens
cacacacacaaaaac

SEQ ID NO: 1114956 - DNA, 15 bp, Homo sapiens
gcacacacacaaaaa

SEQ ID NO: 1114957 - DNA, 15 bp, Homo sapiens
tgcacacacacaaaa

SEQ ID NO: 1114958 - DNA, 15 bp, Homo sapiens
atgcacacacacaaa

SEQ ID NO: 1114959 - DNA, 15 bp, Homo sapiens
tatgcacacacacaa

SEQ ID NO: 1114960 - DNA, 15 bp, Homo sapiens
atatgcacacacaca

SEQ ID NO: 1114961 - DNA, 15 bp, Homo sapiens
tatatgcacacacac

SEQ ID NO: 1114962 - DNA, 15 bp, Homo sapiens
atatatgcacacaca

SEQ ID NO: 1114963 - DNA, 15 bp, Homo sapiens
tatatatgcacacac

SEQ ID NO: 1114964 - DNA, 15 bp, Homo sapiens
atatatatgcacaca

SEQ ID NO: 1114965 - DNA, 15 bp, Homo sapiens
tatatatatgcacac

SEQ ID NO: 1114966 - DNA, 15 bp, Homo sapiens
atatatatatgcaca

SEQ ID NO: 1114967 - DNA, 15 bp, Homo sapiens
tatatatatatgcac

SEQ ID NO: 1114968 - DNA, 15 bp, Homo sapiens
atatatatatatgca

SEQ ID NO: 1114969 - DNA, 15 bp, Homo sapiens
tatatatatatatgc

SEQ ID NO: 1114970 - DNA, 15 bp, Homo sapiens
atatatatatatatg

SEQ ID NO: 1114971 - DNA, 15 bp, Homo sapiens
catatatatatatat

SEQ ID NO: 1114972 - DNA, 15 bp, Homo sapiens
gcatatatatatata

SEQ ID NO: 1114973 - DNA, 15 bp, Homo sapiens
tgcatatatatatat

SEQ ID NO: 1114974 - DNA, 15 bp, Homo sapiens
gtgcatatatatata

SEQ ID NO: 1114975 - DNA, 15 bp, Homo sapiens
tgtgcatatatatat

SEQ ID NO: 1114976 - DNA, 15 bp, Homo sapiens
gtgtgcatatatata

SEQ ID NO: 1114977 - DNA, 15 bp, Homo sapiens
tgtgtgcatatatat

SEQ ID NO: 1114978 - DNA, 15 bp, Homo sapiens
gtgtgtgcatatata

SEQ ID NO: 1114979 - DNA, 15 bp, Homo sapiens
tgtgtgtgcatatat

SEQ ID NO: 1114980 - DNA, 15 bp, Homo sapiens
gtgtgtgtgcatata

SEQ ID NO: 1114981 - DNA, 15 bp, Homo sapiens
tgtgtgtgtgcatat

SEQ ID NO: 1114982 - DNA, 15 bp, Homo sapiens
gtgtgtgtgtgcata

SEQ ID NO: 1114983 - DNA, 15 bp, Homo sapiens
tgtgtgtgtgtgcat

SEQ ID NO: 1114984 - DNA, 15 bp, Homo sapiens
gcgtgtgtgtgtgtg

SEQ ID NO: 1114985 - DNA, 15 bp, Homo sapiens
tgcgtgtgtgtgtgt

SEQ ID NO: 1114986 - DNA, 15 bp, Homo sapiens
gtgcgtgtgtgtgtg

SEQ ID NO: 1114987 - DNA, 15 bp, Homo sapiens
ggtgcgtgtgtgtgt

SEQ ID NO: 1114988 - DNA, 15 bp, Homo sapiens
tggtgcgtgtgtgtg

SEQ ID NO: 1114989 - DNA, 15 bp, Homo sapiens
atggtgcgtgtgtgt

SEQ ID NO: 1114990 - DNA, 15 bp, Homo sapiens
catggtgcgtgtgtg

SEQ ID NO: 1114991 - DNA, 15 bp, Homo sapiens
ccatggtgcgtgtgt

SEQ ID NO: 1114992 - DNA, 15 bp, Homo sapiens
tccatggtgcgtgtg

SEQ ID NO: 1114993 - DNA, 15 bp, Homo sapiens
ttccatggtgcgtgt

SEQ ID NO: 1114994 - DNA, 15 bp, Homo sapiens
attccatggtgcgtg

SEQ ID NO: 1114995 - DNA, 15 bp, Homo sapiens
tattccatggtgcgt

SEQ ID NO: 1114996 - DNA, 15 bp, Homo sapiens
gtattccatggtgcg

SEQ ID NO: 1114997 - DNA, 15 bp, Homo sapiens
agtattccatggtgc

SEQ ID NO: 1114998 - DNA, 15 bp, Homo sapiens
tagtattccatggtg

SEQ ID NO: 1114999 - DNA, 15 bp, Homo sapiens
gtagtattccatggt

SEQ ID NO: 1115000 - DNA, 15 bp, Homo sapiens
agtagtattccatgg

SEQ ID NO: 1115001 - DNA, 15 bp, Homo sapiens
gagtagtattccatg

SEQ ID NO: 1115002 - DNA, 15 bp, Homo sapiens
tgagtagtattccat

SEQ ID NO: 1115003 - DNA, 15 bp, Homo sapiens
ctgagtagtattcca

SEQ ID NO: 1115004 - DNA, 15 bp, Homo sapiens
gctgagtagtattcc

SEQ ID NO: 1115005 - DNA, 15 bp, Homo sapiens
ggctgagtagtattc

SEQ ID NO: 1115006 - DNA, 15 bp, Homo sapiens
tggctgagtagtatt

SEQ ID NO: 1115007 - DNA, 15 bp, Homo sapiens
atggctgagtagtat

SEQ ID NO: 1115008 - DNA, 15 bp, Homo sapiens
tatggctgagtagta

SEQ ID NO: 1115009 - DNA, 15 bp, Homo sapiens
ttatggctgagtagt

SEQ ID NO: 1115010 - DNA, 15 bp, Homo sapiens
tttatggctgagtag

SEQ ID NO: 1115011 - DNA, 15 bp, Homo sapiens
ttttatggctgagta

SEQ ID NO: 1115012 - DNA, 15 bp, Homo sapiens
tttttatggctgagt

SEQ ID NO: 1115013 - DNA, 15 bp, Homo sapiens
ctttttatggctgag

SEQ ID NO: 1115014 - DNA, 15 bp, Homo sapiens
cctttttatggctga

SEQ ID NO: 1115015 - DNA, 15 bp, Homo sapiens
gcattcctttttatg

SEQ ID NO: 1115016 - DNA, 15 bp, Homo sapiens
tgcattcctttttat

SEQ ID NO: 1115017 - DNA, 15 bp, Homo sapiens
ttgcattccttttta

SEQ ID NO: 1115018 - DNA, 15 bp, Homo sapiens
attgcattccttttt

SEQ ID NO: 1115019 - DNA, 15 bp, Homo sapiens
tattgcattcctttt

SEQ ID NO: 1115020 - DNA, 15 bp, Homo sapiens
ttattgcattccttt

SEQ ID NO: 1115021 - DNA, 15 bp, Homo sapiens
attattgcattcctt

SEQ ID NO: 1115022 - DNA, 15 bp, Homo sapiens
cattattgcattcct

SEQ ID NO: 1115023 - DNA, 15 bp, Homo sapiens
ccattattgcattcc

SEQ ID NO: 1115024 - DNA, 15 bp, Homo sapiens
gccattattgcattc

SEQ ID NO: 1115025 - DNA, 15 bp, Homo sapiens
tgccattattgcatt

SEQ ID NO: 1115026 - DNA, 15 bp, Homo sapiens
atgccattattgcat

SEQ ID NO: 1115027 - DNA, 15 bp, Homo sapiens
aatgccattattgca

SEQ ID NO: 1115028 - DNA, 15 bp, Homo sapiens
aaatgccattattgc

SEQ ID NO: 1115029 - DNA, 15 bp, Homo sapiens
caaatgccattattg

SEQ ID NO: 1115030 - DNA, 15 bp, Homo sapiens
gcaaatgccattatt

SEQ ID NO: 1115031 - DNA, 15 bp, Homo sapiens
tgcaaatgccattat

SEQ ID NO: 1115032 - DNA, 15 bp, Homo sapiens
ctgcaaatgccatta

SEQ ID NO: 1115033 - DNA, 15 bp, Homo sapiens
gctgcaaatgccatt

SEQ ID NO: 1115034 - DNA, 15 bp, Homo sapiens
tgctgcaaatgccat

SEQ ID NO: 1115035 - DNA, 15 bp, Homo sapiens
ttgctgcaaatgcca

SEQ ID NO: 1115036 - DNA, 15 bp, Homo sapiens
gttgctgcaaatgcc

SEQ ID NO: 1115037 - DNA, 15 bp, Homo sapiens
ggttgctgcaaatgc

SEQ ID NO: 1115038 - DNA, 15 bp, Homo sapiens
aggttgctgcaaatg

SEQ ID NO: 1115039 - DNA, 15 bp, Homo sapiens
caggttgctgcaaat

SEQ ID NO: 1115040 - DNA, 15 bp, Homo sapiens
ccaggttgctgcaaa

SEQ ID NO: 1115041 - DNA, 15 bp, Homo sapiens
tccaggttgctgcaa

SEQ ID NO: 1115042 - DNA, 15 bp, Homo sapiens
atccaggttgctgca

SEQ ID NO: 1115043 - DNA, 15 bp, Homo sapiens
catccaggttgctgc

SEQ ID NO: 1115044 - DNA, 15 bp, Homo sapiens
tccatccaggttgct

SEQ ID NO: 1115045 - DNA, 15 bp, Homo sapiens
ttccatccaggttgc

SEQ ID NO: 1115046 - DNA, 15 bp, Homo sapiens
attccatccaggttg

SEQ ID NO: 1115047 - DNA, 15 bp, Homo sapiens
aattccatccaggtt

SEQ ID NO: 1115048 - DNA, 15 bp, Homo sapiens
caattccatccaggt

SEQ ID NO: 1115049 - DNA, 15 bp, Homo sapiens
ccaattccatccagg

SEQ ID NO: 1115050 - DNA, 15 bp, Homo sapiens
tccaattccatccag

SEQ ID NO: 1115051 - DNA, 15 bp, Homo sapiens
ctccaattccatcca

SEQ ID NO: 1115052 - DNA, 15 bp, Homo sapiens
tctccaattccatcc

SEQ ID NO: 1115053 - DNA, 15 bp, Homo sapiens
gtctccaattccatc

SEQ ID NO: 1115054 - DNA, 15 bp, Homo sapiens
agtctccaattccat

SEQ ID NO: 1115055 - DNA, 15 bp, Homo sapiens
tagtctccaattcca

SEQ ID NO: 1115056 - DNA, 15 bp, Homo sapiens
atagtctccaattcc

SEQ ID NO: 1115057 - DNA, 15 bp, Homo sapiens
aatagtctccaattc

SEQ ID NO: 1115058 - DNA, 15 bp, Homo sapiens
taatagtctccaatt

SEQ ID NO: 1115059 - DNA, 15 bp, Homo sapiens
ataatagtctccaat

SEQ ID NO: 1115060 - DNA, 15 bp, Homo sapiens
aataatagtctccaa

SEQ ID NO: 1115061 - DNA, 15 bp, Homo sapiens
gaataatagtctcca

SEQ ID NO: 1115062 - DNA, 15 bp, Homo sapiens
agaataatagtctcc

SEQ ID NO: 1115063 - DNA, 15 bp, Homo sapiens
tagaataatagtctc

SEQ ID NO: 1115064 - DNA, 15 bp, Homo sapiens
ttagaataatagtct

SEQ ID NO: 1115065 - DNA, 15 bp, Homo sapiens
cttagaataatagtc

SEQ ID NO: 1115066 - DNA, 15 bp, Homo sapiens
acttagaataatagt

SEQ ID NO: 1115067 - DNA, 15 bp, Homo sapiens
cacttagaataatag

SEQ ID NO: 1115068 - DNA, 15 bp, Homo sapiens
tcacttagaataata

SEQ ID NO: 1115069 - DNA, 15 bp, Homo sapiens
ttcacttagaataat

SEQ ID NO: 1115070 - DNA, 15 bp, Homo sapiens
cttcacttagaataa

SEQ ID NO: 1115071 - DNA, 15 bp, Homo sapiens
acttcacttagaata

SEQ ID NO: 1115072 - DNA, 15 bp, Homo sapiens
tacttcacttagaat

SEQ ID NO: 1115073 - DNA, 15 bp, Homo sapiens
ttacttcacttagaa

SEQ ID NO: 1115074 - DNA, 15 bp, Homo sapiens
gttacttcacttaga

SEQ ID NO: 1115075 - DNA, 15 bp, Homo sapiens
agttacttcacttag

SEQ ID NO: 1115076 - DNA, 15 bp, Homo sapiens
gagttacttcactta

SEQ ID NO: 1115077 - DNA, 15 bp, Homo sapiens
tgagttacttcactt

SEQ ID NO: 1115078 - DNA, 15 bp, Homo sapiens
ctgagttacttcact

SEQ ID NO: 1115079 - DNA, 15 bp, Homo sapiens
cctgagttacttcac

SEQ ID NO: 1115080 - DNA, 15 bp, Homo sapiens
tcctgagttacttca

SEQ ID NO: 1115081 - DNA, 15 bp, Homo sapiens
ttcctgagttacttc

SEQ ID NO: 1115082 - DNA, 15 bp, Homo sapiens
agttttccattcctg

SEQ ID NO: 1115083 - DNA, 15 bp, Homo sapiens
tagttttccattcct

SEQ ID NO: 1115084 - DNA, 15 bp, Homo sapiens
ttagttttccattcc

SEQ ID NO: 1115085 - DNA, 15 bp, Homo sapiens
tttagttttccattc

SEQ ID NO: 1115086 - DNA, 15 bp, Homo sapiens
gtttagttttccatt

SEQ ID NO: 1115087 - DNA, 15 bp, Homo sapiens
cgtttagttttccat

SEQ ID NO: 1115088 - DNA, 15 bp, Homo sapiens
ccgtttagttttcca

SEQ ID NO: 1115089 - DNA, 15 bp, Homo sapiens
accgtttagttttcc

SEQ ID NO: 1115090 - DNA, 15 bp, Homo sapiens
caccgtttagttttc

SEQ ID NO: 1115091 - DNA, 15 bp, Homo sapiens
acaccgtttagtttt

SEQ ID NO: 1115092 - DNA, 15 bp, Homo sapiens
tacaccgtttagttt

SEQ ID NO: 1115093 - DNA, 15 bp, Homo sapiens
atacaccgtttagtt

SEQ ID NO: 1115094 - DNA, 15 bp, Homo sapiens
catacaccgtttagt

SEQ ID NO: 1115095 - DNA, 15 bp, Homo sapiens
acatacaccgtttag

SEQ ID NO: 1115096 - DNA, 15 bp, Homo sapiens
aacatacaccgttta

SEQ ID NO: 1115097 - DNA, 15 bp, Homo sapiens
gaacatacaccgttt

SEQ ID NO: 1115098 - DNA, 15 bp, Homo sapiens
agaacatacaccgtt

SEQ ID NO: 1115099 - DNA, 15 bp, Homo sapiens
gagaacatacaccgt

SEQ ID NO: 1115100 - DNA, 15 bp, Homo sapiens
tgagaacatacaccg

SEQ ID NO: 1115101 - DNA, 15 bp, Homo sapiens
gtgagaacatacacc

SEQ ID NO: 1115102 - DNA, 15 bp, Homo sapiens
agtgagaacatacac

SEQ ID NO: 1115103 - DNA, 15 bp, Homo sapiens
gagtgagaacataca

SEQ ID NO: 1115104 - DNA, 15 bp, Homo sapiens
tgagtgagaacatac

SEQ ID NO: 1115105 - DNA, 15 bp, Homo sapiens
atgagtgagaacata

SEQ ID NO: 1115106 - DNA, 15 bp, Homo sapiens
atatgagtgagaaca

SEQ ID NO: 1115107 - DNA, 15 bp, Homo sapiens
catatgagtgagaac

SEQ ID NO: 1115108 - DNA, 15 bp, Homo sapiens
acatatgagtgagaa

SEQ ID NO: 1115109 - DNA, 15 bp, Homo sapiens
tacatatgagtgaga

SEQ ID NO: 1115110 - DNA, 15 bp, Homo sapiens
gtacatatgagtgag

SEQ ID NO: 1115111 - DNA, 15 bp, Homo sapiens
cgtacatatgagtga

SEQ ID NO: 1115112 - DNA, 15 bp, Homo sapiens
tcgtacatatgagtg

SEQ ID NO: 1115113 - DNA, 15 bp, Homo sapiens
ctcgtacatatgagt

SEQ ID NO: 1115114 - DNA, 15 bp, Homo sapiens
gctcgtacatatgag

SEQ ID NO: 1115115 - DNA, 15 bp, Homo sapiens
agctcgtacatatga

SEQ ID NO: 1115116 - DNA, 15 bp, Homo sapiens
tagctcgtacatatg

SEQ ID NO: 1115117 - DNA, 15 bp, Homo sapiens
ttagctcgtacatat

SEQ ID NO: 1115118 - DNA, 15 bp, Homo sapiens
cttagctcgtacata

SEQ ID NO: 1115119 - DNA, 15 bp, Homo sapiens
gcttagctcgtacat

SEQ ID NO: 1115120 - DNA, 15 bp, Homo sapiens
agcttagctcgtaca

SEQ ID NO: 1115121 - DNA, 15 bp, Homo sapiens
tagcttagctcgtac

SEQ ID NO: 1115122 - DNA, 15 bp, Homo sapiens
atagcttagctcgta

SEQ ID NO: 1115123 - DNA, 15 bp, Homo sapiens
catagcttagctcgt

SEQ ID NO: 1115124 - DNA, 15 bp, Homo sapiens
tcatagcttagctcg

SEQ ID NO: 1115125 - DNA, 15 bp, Homo sapiens
gtcctcatagcttag

SEQ ID NO: 1115126 - DNA, 15 bp, Homo sapiens
tgtcctcatagctta

SEQ ID NO: 1115127 - DNA, 15 bp, Homo sapiens
gtgtcctcatagctt

SEQ ID NO: 1115128 - DNA, 15 bp, Homo sapiens
tgtgtcctcatagct

SEQ ID NO: 1115129 - DNA, 15 bp, Homo sapiens
ttgtgtcctcatagc

SEQ ID NO: 1115130 - DNA, 15 bp, Homo sapiens
tttgtgtcctcatag

SEQ ID NO: 1115131 - DNA, 15 bp, Homo sapiens
ctttgtgtcctcata

SEQ ID NO: 1115132 - DNA, 15 bp, Homo sapiens
cctttgtgtcctcat

SEQ ID NO: 1115133 - DNA, 15 bp, Homo sapiens
gcctttgtgtcctca

SEQ ID NO: 1115134 - DNA, 15 bp, Homo sapiens
tgcctttgtgtcctc

SEQ ID NO: 1115135 - DNA, 15 bp, Homo sapiens
atgcctttgtgtcct

SEQ ID NO: 1115136 - DNA, 15 bp, Homo sapiens
catgcctttgtgtcc

SEQ ID NO: 1115137 - DNA, 15 bp, Homo sapiens
tcatgcctttgtgtc

SEQ ID NO: 1115138 - DNA, 15 bp, Homo sapiens
ctcatgcctttgtgt

SEQ ID NO: 1115139 - DNA, 15 bp, Homo sapiens
tctcatgcctttgtg

SEQ ID NO: 1115140 - DNA, 15 bp, Homo sapiens
ttctcatgcctttgt

SEQ ID NO: 1115141 - DNA, 15 bp, Homo sapiens
attctcatgcctttg

SEQ ID NO: 1115142 - DNA, 15 bp, Homo sapiens
cattctcatgccttt

SEQ ID NO: 1115143 - DNA, 15 bp, Homo sapiens
tcattctcatgcctt

SEQ ID NO: 1115144 - DNA, 15 bp, Homo sapiens
atcattctcatgcct

SEQ ID NO: 1115145 - DNA, 15 bp, Homo sapiens
tatcattctcatgcc

SEQ ID NO: 1115146 - DNA, 15 bp, Homo sapiens
gtatcattctcatgc

SEQ ID NO: 1115147 - DNA, 15 bp, Homo sapiens
tgtatcattctcatg

SEQ ID NO: 1115148 - DNA, 15 bp, Homo sapiens
atgtatcattctcat

SEQ ID NO: 1115149 - DNA, 15 bp, Homo sapiens
aatgtatcattctca

SEQ ID NO: 1115150 - DNA, 15 bp, Homo sapiens
caatgtatcattctc

SEQ ID NO: 1115151 - DNA, 15 bp, Homo sapiens
ccaatgtatcattct

SEQ ID NO: 1115152 - DNA, 15 bp, Homo sapiens
tccaatgtatcattc

SEQ ID NO: 1115153 - DNA, 15 bp, Homo sapiens
gtccaatgtatcatt

SEQ ID NO: 1115154 - DNA, 15 bp, Homo sapiens
agtccaatgtatcat

SEQ ID NO: 1115155 - DNA, 15 bp, Homo sapiens
aagtccaatgtatca

SEQ ID NO: 1115156 - DNA, 15 bp, Homo sapiens
aaagtccaatgtatc

SEQ ID NO: 1115157 - DNA, 15 bp, Homo sapiens
caaagtccaatgtat

SEQ ID NO: 1115158 - DNA, 15 bp, Homo sapiens
ccaaagtccaatgta

SEQ ID NO: 1115159 - DNA, 15 bp, Homo sapiens
cccaaagtccaatgt

SEQ ID NO: 1115160 - DNA, 15 bp, Homo sapiens
ccccaaagtccaatg

SEQ ID NO: 1115161 - DNA, 15 bp, Homo sapiens
tccccaaagtccaat

SEQ ID NO: 1115162 - DNA, 15 bp, Homo sapiens
gtccccaaagtccaa

SEQ ID NO: 1115163 - DNA, 15 bp, Homo sapiens
aagtccccaaagtcc

SEQ ID NO: 1115164 - DNA, 15 bp, Homo sapiens
caagtccccaaagtc

SEQ ID NO: 1115165 - DNA, 15 bp, Homo sapiens
ccaagtccccaaagt

SEQ ID NO: 1115166 - DNA, 15 bp, Homo sapiens
tccaagtccccaaag

SEQ ID NO: 1115167 - DNA, 15 bp, Homo sapiens
ctccaagtccccaaa

SEQ ID NO: 1115168 - DNA, 15 bp, Homo sapiens
cctccaagtccccaa

SEQ ID NO: 1115169 - DNA, 15 bp, Homo sapiens
tcctccaagtcccca

SEQ ID NO: 1115170 - DNA, 15 bp, Homo sapiens
ttcctccaagtcccc

SEQ ID NO: 1115171 - DNA, 15 bp, Homo sapiens
tttcctccaagtccc

SEQ ID NO: 1115172 - DNA, 15 bp, Homo sapiens
ctttcctccaagtcc

SEQ ID NO: 1115173 - DNA, 15 bp, Homo sapiens
cctttcctccaagtc

SEQ ID NO: 1115174 - DNA, 15 bp, Homo sapiens
ccctttcctccaagt

SEQ ID NO: 1115175 - DNA, 15 bp, Homo sapiens
accctttcctccaag

SEQ ID NO: 1115176 - DNA, 15 bp, Homo sapiens
caccctttcctccaa

SEQ ID NO: 1115177 - DNA, 15 bp, Homo sapiens
ccaccctttcctcca

SEQ ID NO: 1115178 - DNA, 15 bp, Homo sapiens
cccaccctttcctcc

SEQ ID NO: 1115179 - DNA, 15 bp, Homo sapiens
acccaccctttcctc

SEQ ID NO: 1115180 - DNA, 15 bp, Homo sapiens
cacccaccctttcct

SEQ ID NO: 1115181 - DNA, 15 bp, Homo sapiens
ccacccaccctttcc

SEQ ID NO: 1115182 - DNA, 15 bp, Homo sapiens
accacccaccctttc

SEQ ID NO: 1115183 - DNA, 15 bp, Homo sapiens
caccacccacccttt

SEQ ID NO: 1115184 - DNA, 15 bp, Homo sapiens
tcaccacccaccctt

SEQ ID NO: 1115185 - DNA, 15 bp, Homo sapiens
ctcaccacccaccct

SEQ ID NO: 1115186 - DNA, 15 bp, Homo sapiens
cctcaccacccaccc

SEQ ID NO: 1115187 - DNA, 15 bp, Homo sapiens
tcctcaccacccacc

SEQ ID NO: 1115188 - DNA, 15 bp, Homo sapiens
ttcctcaccacccac

SEQ ID NO: 1115189 - DNA, 15 bp, Homo sapiens
attcctcaccaccca

SEQ ID NO: 1115190 - DNA, 15 bp, Homo sapiens
tattcctcaccaccc

SEQ ID NO: 1115191 - DNA, 15 bp, Homo sapiens
ttattcctcaccacc

SEQ ID NO: 1115192 - DNA, 15 bp, Homo sapiens
tttattcctcaccac

SEQ ID NO: 1115193 - DNA, 15 bp, Homo sapiens
ttttattcctcacca

SEQ ID NO: 1115194 - DNA, 15 bp, Homo sapiens
cttttattcctcacc

SEQ ID NO: 1115195 - DNA, 15 bp, Homo sapiens
tcttttattcctcac

SEQ ID NO: 1115196 - DNA, 15 bp, Homo sapiens
gtcttttattcctca

SEQ ID NO: 1115197 - DNA, 15 bp, Homo sapiens
agtcttttattcctc

SEQ ID NO: 1115198 - DNA, 15 bp, Homo sapiens
tagtcttttattcct

SEQ ID NO: 1115199 - DNA, 15 bp, Homo sapiens
gtagtcttttattcc

SEQ ID NO: 1115200 - DNA, 15 bp, Homo sapiens
tgtagtcttttattc

SEQ ID NO: 1115201 - DNA, 15 bp, Homo sapiens
gtgtagtcttttatt

SEQ ID NO: 1115202 - DNA, 15 bp, Homo sapiens
tgtgtagtcttttat

SEQ ID NO: 1115203 - DNA, 15 bp, Homo sapiens
gtgtgtagtctttta

SEQ ID NO: 1115204 - DNA, 15 bp, Homo sapiens
agtgtgtagtctttt

SEQ ID NO: 1115205 - DNA, 15 bp, Homo sapiens
cagtgtgtagtcttt

SEQ ID NO: 1115206 - DNA, 15 bp, Homo sapiens
ccagtgtgtagtctt

SEQ ID NO: 1115207 - DNA, 15 bp, Homo sapiens
tccagtgtgtagtct

SEQ ID NO: 1115208 - DNA, 15 bp, Homo sapiens
atccagtgtgtagtc

SEQ ID NO: 1115209 - DNA, 15 bp, Homo sapiens
catccagtgtgtagt

SEQ ID NO: 1115210 - DNA, 15 bp, Homo sapiens
gcatccagtgtgtag

SEQ ID NO: 1115211 - DNA, 15 bp, Homo sapiens
tgcatccagtgtgta

SEQ ID NO: 1115212 - DNA, 15 bp, Homo sapiens
ctgcatccagtgtgt

SEQ ID NO: 1115213 - DNA, 15 bp, Homo sapiens
actgcatccagtgtg

SEQ ID NO: 1115214 - DNA, 15 bp, Homo sapiens
cactgcatccagtgt

SEQ ID NO: 1115215 - DNA, 15 bp, Homo sapiens
acactgcatccagtg

SEQ ID NO: 1115216 - DNA, 15 bp, Homo sapiens
tacactgcatccagt

SEQ ID NO: 1115217 - DNA, 15 bp, Homo sapiens
gtacactgcatccag

SEQ ID NO: 1115218 - DNA, 15 bp, Homo sapiens
tgtacactgcatcca

SEQ ID NO: 1115219 - DNA, 15 bp, Homo sapiens
gtgtacactgcatcc

SEQ ID NO: 1115220 - DNA, 15 bp, Homo sapiens
agtgtacactgcatc

SEQ ID NO: 1115221 - DNA, 15 bp, Homo sapiens
cagtgtacactgcat

SEQ ID NO: 1115222 - DNA, 15 bp, Homo sapiens
gcagtgtacactgca

SEQ ID NO: 1115223 - DNA, 15 bp, Homo sapiens
agcagtgtacactgc

SEQ ID NO: 1115224 - DNA, 15 bp, Homo sapiens
aagcagtgtacactg

SEQ ID NO: 1115225 - DNA, 15 bp, Homo sapiens
caagcagtgtacact

SEQ ID NO: 1115226 - DNA, 15 bp, Homo sapiens
ccaagcagtgtacac

SEQ ID NO: 1115227 - DNA, 15 bp, Homo sapiens
tccaagcagtgtaca

SEQ ID NO: 1115228 - DNA, 15 bp, Homo sapiens
atccaagcagtgtac

SEQ ID NO: 1115229 - DNA, 15 bp, Homo sapiens
catccaagcagtgta

SEQ ID NO: 1115230 - DNA, 15 bp, Homo sapiens
tcatccaagcagtgt

SEQ ID NO: 1115231 - DNA, 15 bp, Homo sapiens
atcatccaagcagtg

SEQ ID NO: 1115232 - DNA, 15 bp, Homo sapiens
catcatccaagcagt

SEQ ID NO: 1115233 - DNA, 15 bp, Homo sapiens
ccatcatccaagcag

SEQ ID NO: 1115234 - DNA, 15 bp, Homo sapiens
cccatcatccaagca

SEQ ID NO: 1115235 - DNA, 15 bp, Homo sapiens
acccatcatccaagc

SEQ ID NO: 1115236 - DNA, 15 bp, Homo sapiens
cacccatcatccaag

SEQ ID NO: 1115237 - DNA, 15 bp, Homo sapiens
gcacccatcatccaa

SEQ ID NO: 1115238 - DNA, 15 bp, Homo sapiens
tgcacccatcatcca

SEQ ID NO: 1115239 - DNA, 15 bp, Homo sapiens
gtgcacccatcatcc

SEQ ID NO: 1115240 - DNA, 15 bp, Homo sapiens
ggtgcacccatcatc

SEQ ID NO: 1115241 - DNA, 15 bp, Homo sapiens
tggtgcacccatcat

SEQ ID NO: 1115242 - DNA, 15 bp, Homo sapiens
atggtgcacccatca

SEQ ID NO: 1115243 - DNA, 15 bp, Homo sapiens
aatggtgcacccatc

SEQ ID NO: 1115244 - DNA, 15 bp, Homo sapiens
gaatggtgcacccat

SEQ ID NO: 1115245 - DNA, 15 bp, Homo sapiens
agaatggtgcaccca

SEQ ID NO: 1115246 - DNA, 15 bp, Homo sapiens
tagaatggtgcaccc

SEQ ID NO: 1115247 - DNA, 15 bp, Homo sapiens
ttagaatggtgcacc

SEQ ID NO: 1115248 - DNA, 15 bp, Homo sapiens
tttagaatggtgcac

SEQ ID NO: 1115249 - DNA, 15 bp, Homo sapiens
ttttagaatggtgca

SEQ ID NO: 1115250 - DNA, 15 bp, Homo sapiens
attttagaatggtgc

SEQ ID NO: 1115251 - DNA, 15 bp, Homo sapiens
gattttagaatggtg

SEQ ID NO: 1115252 - DNA, 15 bp, Homo sapiens
agattttagaatggt

SEQ ID NO: 1115253 - DNA, 15 bp, Homo sapiens
gagattttagaatgg

SEQ ID NO: 1115254 - DNA, 15 bp, Homo sapiens
tgagattttagaatg

SEQ ID NO: 1115255 - DNA, 15 bp, Homo sapiens
ctgagattttagaat

SEQ ID NO: 1115256 - DNA, 15 bp, Homo sapiens
tctgagattttagaa

SEQ ID NO: 1115257 - DNA, 15 bp, Homo sapiens
ttctgagattttaga

SEQ ID NO: 1115258 - DNA, 15 bp, Homo sapiens
tttctgagattttag

SEQ ID NO: 1115259 - DNA, 15 bp, Homo sapiens
atttctgagatttta

SEQ ID NO: 1115260 - DNA, 15 bp, Homo sapiens
gatttctgagatttt

SEQ ID NO: 1115261 - DNA, 15 bp, Homo sapiens
tgatttctgagattt

SEQ ID NO: 1115262 - DNA, 15 bp, Homo sapiens
gtgatttctgagatt

SEQ ID NO: 1115263 - DNA, 15 bp, Homo sapiens
ggtgatttctgagat

SEQ ID NO: 1115264 - DNA, 15 bp, Homo sapiens
tggtgatttctgaga

SEQ ID NO: 1115265 - DNA, 15 bp, Homo sapiens
atggtgatttctgag

SEQ ID NO: 1115266 - DNA, 15 bp, Homo sapiens
gatggtgatttctga

SEQ ID NO: 1115267 - DNA, 15 bp, Homo sapiens
tgatggtgatttctg

SEQ ID NO: 1115268 - DNA, 15 bp, Homo sapiens
ttgatggtgatttct

SEQ ID NO: 1115269 - DNA, 15 bp, Homo sapiens
tttgatggtgatttc

SEQ ID NO: 1115270 - DNA, 15 bp, Homo sapiens
ctttgatggtgattt

SEQ ID NO: 1115271 - DNA, 15 bp, Homo sapiens
tctttgatggtgatt

SEQ ID NO: 1115272 - DNA, 15 bp, Homo sapiens
ttctttgatggtgat

SEQ ID NO: 1115273 - DNA, 15 bp, Homo sapiens
gttctttgatggtga

SEQ ID NO: 1115274 - DNA, 15 bp, Homo sapiens
agttctttgatggtg

SEQ ID NO: 1115275 - DNA, 15 bp, Homo sapiens
aagttctttgatggt

SEQ ID NO: 1115276 - DNA, 15 bp, Homo sapiens
taagttctttgatgg

SEQ ID NO: 1115277 - DNA, 15 bp, Homo sapiens
ataagttctttgatg

SEQ ID NO: 1115278 - DNA, 15 bp, Homo sapiens
aataagttctttgat

SEQ ID NO: 1115279 - DNA, 15 bp, Homo sapiens
gaataagttctttga

SEQ ID NO: 1115280 - DNA, 15 bp, Homo sapiens
tgaataagttctttg

SEQ ID NO: 1115281 - DNA, 15 bp, Homo sapiens
atgaataagttcttt

SEQ ID NO: 1115282 - DNA, 15 bp, Homo sapiens
catgaataagttctt

SEQ ID NO: 1115283 - DNA, 15 bp, Homo sapiens
acatgaataagttct

SEQ ID NO: 1115284 - DNA, 15 bp, Homo sapiens
tacatgaataagttc

SEQ ID NO: 1115285 - DNA, 15 bp, Homo sapiens
ttacatgaataagtt

SEQ ID NO: 1115286 - DNA, 15 bp, Homo sapiens
gttacatgaataagt

SEQ ID NO: 1115287 - DNA, 15 bp, Homo sapiens
ggttacatgaataag

SEQ ID NO: 1115288 - DNA, 15 bp, Homo sapiens
gggttacatgaataa

SEQ ID NO: 1115289 - DNA, 15 bp, Homo sapiens
tgggttacatgaata

SEQ ID NO: 1115290 - DNA, 15 bp, Homo sapiens
ttgggttacatgaat

SEQ ID NO: 1115291 - DNA, 15 bp, Homo sapiens
gttgggttacatgaa

SEQ ID NO: 1115292 - DNA, 15 bp, Homo sapiens
tgttgggttacatga

SEQ ID NO: 1115293 - DNA, 15 bp, Homo sapiens
gtgttgggttacatg

SEQ ID NO: 1115294 - DNA, 15 bp, Homo sapiens
ggtgttgggttacat

SEQ ID NO: 1115295 - DNA, 15 bp, Homo sapiens
tggtgttgggttaca

SEQ ID NO: 1115296 - DNA, 15 bp, Homo sapiens
gtggtgttgggttac

SEQ ID NO: 1115297 - DNA, 15 bp, Homo sapiens
ggtggtgttgggtta

SEQ ID NO: 1115298 - DNA, 15 bp, Homo sapiens
aggtggtgttgggtt

SEQ ID NO: 1115299 - DNA, 15 bp, Homo sapiens
caggtggtgttgggt

SEQ ID NO: 1115300 - DNA, 15 bp, Homo sapiens
acaggtggtgttggg

SEQ ID NO: 1115301 - DNA, 15 bp, Homo sapiens
aacaggtggtgttgg

SEQ ID NO: 1115302 - DNA, 15 bp, Homo sapiens
gaacaggtggtgttg

SEQ ID NO: 1115303 - DNA, 15 bp, Homo sapiens
ggaacaggtggtgtt

SEQ ID NO: 1115304 - DNA, 15 bp, Homo sapiens
gggaacaggtggtgt

SEQ ID NO: 1115305 - DNA, 15 bp, Homo sapiens
ggggaacaggtggtg

SEQ ID NO: 1115306 - DNA, 15 bp, Homo sapiens
tggggaacaggtggt

SEQ ID NO: 1115307 - DNA, 15 bp, Homo sapiens
ttggggaacaggtgg

SEQ ID NO: 1115308 - DNA, 15 bp, Homo sapiens
tttggggaacaggtg

SEQ ID NO: 1115309 - DNA, 15 bp, Homo sapiens
ttttggggaacaggt

SEQ ID NO: 1115310 - DNA, 15 bp, Homo sapiens
tttttggggaacagg

SEQ ID NO: 1115311 - DNA, 15 bp, Homo sapiens
gtttttggggaacag

SEQ ID NO: 1115312 - DNA, 15 bp, Homo sapiens
ggtttttggggaaca

SEQ ID NO: 1115313 - DNA, 15 bp, Homo sapiens
aggtttttggggaac

SEQ ID NO: 1115314 - DNA, 15 bp, Homo sapiens
taggtttttggggaa

SEQ ID NO: 1115315 - DNA, 15 bp, Homo sapiens
ataggtttttgggga

SEQ ID NO: 1115316 - DNA, 15 bp, Homo sapiens
aataggtttttgggg

SEQ ID NO: 1115317 - DNA, 15 bp, Homo sapiens
caataggtttttggg

SEQ ID NO: 1115318 - DNA, 15 bp, Homo sapiens
tcaataggtttttgg

SEQ ID NO: 1115319 - DNA, 15 bp, Homo sapiens
ttcaataggtttttg

SEQ ID NO: 1115320 - DNA, 15 bp, Homo sapiens
tttcaataggttttt

SEQ ID NO: 1115321 - DNA, 15 bp, Homo sapiens
atttcaataggtttt

SEQ ID NO: 1115322 - DNA, 15 bp, Homo sapiens
tatttcaataggttt

SEQ ID NO: 1115323 - DNA, 15 bp, Homo sapiens
ttatttcaataggtt

SEQ ID NO: 1115324 - DNA, 15 bp, Homo sapiens
tttatttcaataggt

SEQ ID NO: 1115325 - DNA, 15 bp, Homo sapiens
ttttatttcaatagg

SEQ ID NO: 1115326 - DNA, 15 bp, Homo sapiens
tttttatttcaatag

SEQ ID NO: 1115327 - DNA, 15 bp, Homo sapiens
atttttatttcaata

SEQ ID NO: 1115328 - DNA, 15 bp, Homo sapiens
aatttttatttcaat

SEQ ID NO: 1115329 - DNA, 15 bp, Homo sapiens
taatttttatttcaa

SEQ ID NO: 1115330 - DNA, 15 bp, Homo sapiens
ttaatttttatttca

SEQ ID NO: 1115331 - DNA, 15 bp, Homo sapiens
tttaatttttatttc

SEQ ID NO: 1115332 - DNA, 15 bp, Homo sapiens
ttttaatttttattt

SEQ ID NO: 1115333 - DNA, 15 bp, Homo sapiens
attttaatttttatt

SEQ ID NO: 1115334 - DNA, 15 bp, Homo sapiens
aattttaatttttat

SEQ ID NO: 1115335 - DNA, 15 bp, Homo sapiens
aaattttaattttta

SEQ ID NO: 1115336 - DNA, 15 bp, Homo sapiens
aaaattttaattttt

SEQ ID NO: 1115337 - DNA, 15 bp, Homo sapiens
aaaaattttaatttt

SEQ ID NO: 1115338 - DNA, 15 bp, Homo sapiens
aaaaaattttaattt

SEQ ID NO: 1115339 - DNA, 15 bp, Homo sapiens
taaaaaattttaatt

SEQ ID NO: 1115340 - DNA, 15 bp, Homo sapiens
ttaaaaaattttaat

SEQ ID NO: 1115341 - DNA, 15 bp, Homo sapiens
tttaaaaaattttaa

SEQ ID NO: 1115342 - DNA, 15 bp, Homo sapiens
ttttaaaaaatttta

SEQ ID NO: 1115343 - DNA, 15 bp, Homo sapiens
tttttaaaaaatttt

SEQ ID NO: 1115344 - DNA, 15 bp, Homo sapiens
atttttaaaaaattt

SEQ ID NO: 1115345 - DNA, 15 bp, Homo sapiens
tatttttaaaaaatt

SEQ ID NO: 1115346 - DNA, 15 bp, Homo sapiens
ttatttttaaaaaat

SEQ ID NO: 1115347 - DNA, 15 bp, Homo sapiens
attatttttaaaaaa

SEQ ID NO: 1115348 - DNA, 15 bp, Homo sapiens
tattatttttaaaaa

SEQ ID NO: 1115349 - DNA, 15 bp, Homo sapiens
ttattatttttaaaa

SEQ ID NO: 1115350 - DNA, 15 bp, Homo sapiens
tttattatttttaaa

SEQ ID NO: 1115351 - DNA, 15 bp, Homo sapiens
ttttattatttttaa

SEQ ID NO: 1115352 - DNA, 15 bp, Homo sapiens
attttattattttta

SEQ ID NO: 1115353 - DNA, 15 bp, Homo sapiens
cattttattattttt

SEQ ID NO: 1115354 - DNA, 15 bp, Homo sapiens
acattttattatttt

SEQ ID NO: 1115355 - DNA, 15 bp, Homo sapiens
tacattttattattt

SEQ ID NO: 1115356 - DNA, 15 bp, Homo sapiens
gtacattttattatt

SEQ ID NO: 1115357 - DNA, 15 bp, Homo sapiens
tgtacattttattat

SEQ ID NO: 1115358 - DNA, 15 bp, Homo sapiens
atgtacattttatta

SEQ ID NO: 1115359 - DNA, 15 bp, Homo sapiens
aatgtacattttatt

SEQ ID NO: 1115360 - DNA, 15 bp, Homo sapiens
taatgtacattttat

SEQ ID NO: 1115361 - DNA, 15 bp, Homo sapiens
ataatgtacatttta

SEQ ID NO: 1115362 - DNA, 15 bp, Homo sapiens
tataatgtacatttt

SEQ ID NO: 1115363 - DNA, 15 bp, Homo sapiens
ttataatgtacattt

SEQ ID NO: 1115364 - DNA, 15 bp, Homo sapiens
tttataatgtacatt

SEQ ID NO: 1115365 - DNA, 15 bp, Homo sapiens
ttttataatgtacat

SEQ ID NO: 1115366 - DNA, 15 bp, Homo sapiens
gttttataatgtaca

SEQ ID NO: 1115367 - DNA, 15 bp, Homo sapiens
tgttttataatgtac

SEQ ID NO: 1115368 - DNA, 15 bp, Homo sapiens
ttgttttataatgta

SEQ ID NO: 1115369 - DNA, 15 bp, Homo sapiens
tttgttttataatgt

SEQ ID NO: 1115370 - DNA, 15 bp, Homo sapiens
ttttgttttataatg

SEQ ID NO: 1115371 - DNA, 15 bp, Homo sapiens
tttttgttttataat

SEQ ID NO: 1115372 - DNA, 15 bp, Homo sapiens
ttttttgttttataa

SEQ ID NO: 1115373 - DNA, 15 bp, Homo sapiens
tttttttgttttata

SEQ ID NO: 1115374 - DNA, 15 bp, Homo sapiens
ttttttttgttttat

SEQ ID NO: 1115375 - DNA, 15 bp, Homo sapiens
attttttttgtttta

SEQ ID NO: 1115376 - DNA, 15 bp, Homo sapiens
tattttttttgtttt

SEQ ID NO: 1115377 - DNA, 15 bp, Homo sapiens
ttattttttttgttt

SEQ ID NO: 1115378 - DNA, 15 bp, Homo sapiens
tttattttttttgtt

SEQ ID NO: 1115379 - DNA, 15 bp, Homo sapiens
ttttattttttttgt

SEQ ID NO: 1115380 - DNA, 15 bp, Homo sapiens
tttttattttttttg

SEQ ID NO: 1115381 - DNA, 15 bp, Homo sapiens
gatttttattttttt

SEQ ID NO: 1115382 - DNA, 15 bp, Homo sapiens
agatttttatttttt

SEQ ID NO: 1115383 - DNA, 15 bp, Homo sapiens
tagatttttattttt

SEQ ID NO: 1115384 - DNA, 15 bp, Homo sapiens
gtagatttttatttt

SEQ ID NO: 1115385 - DNA, 15 bp, Homo sapiens
agtagatttttattt

SEQ ID NO: 1115386 - DNA, 15 bp, Homo sapiens
gagtagatttttatt

SEQ ID NO: 1115387 - DNA, 15 bp, Homo sapiens
agagtagatttttat

SEQ ID NO: 1115388 - DNA, 15 bp, Homo sapiens
aaagagtagattttt

SEQ ID NO: 1115389 - DNA, 15 bp, Homo sapiens
gaaagagtagatttt

SEQ ID NO: 1115390 - DNA, 15 bp, Homo sapiens
tgaaagagtagattt

SEQ ID NO: 1115391 - DNA, 15 bp, Homo sapiens
ttgaaagagtagatt

SEQ ID NO: 1115392 - DNA, 15 bp, Homo sapiens
attgaaagagtagat

SEQ ID NO: 1115393 - DNA, 15 bp, Homo sapiens
tattgaaagagtaga

SEQ ID NO: 1115394 - DNA, 15 bp, Homo sapiens
ttattgaaagagtag

SEQ ID NO: 1115395 - DNA, 15 bp, Homo sapiens
attattgaaagagta

SEQ ID NO: 1115396 - DNA, 15 bp, Homo sapiens
aattattgaaagagt

SEQ ID NO: 1115397 - DNA, 15 bp, Homo sapiens
aaattattgaaagag

SEQ ID NO: 1115398 - DNA, 15 bp, Homo sapiens
aaaattattgaaaga

SEQ ID NO: 1115399 - DNA, 15 bp, Homo sapiens
gaaaattattgaaag

SEQ ID NO: 1115400 - DNA, 15 bp, Homo sapiens
tgaaaattattgaaa

SEQ ID NO: 1115401 - DNA, 15 bp, Homo sapiens
ttgaaaattattgaa

SEQ ID NO: 1115402 - DNA, 15 bp, Homo sapiens
cttgaaaattattga

SEQ ID NO: 1115403 - DNA, 15 bp, Homo sapiens
gcttgaaaattattg

SEQ ID NO: 1115404 - DNA, 15 bp, Homo sapiens
tgcttgaaaattatt

SEQ ID NO: 1115405 - DNA, 15 bp, Homo sapiens
atgcttgaaaattat

SEQ ID NO: 1115406 - DNA, 15 bp, Homo sapiens
tatgcttgaaaatta

SEQ ID NO: 1115407 - DNA, 15 bp, Homo sapiens
gtatgcttgaaaatt

SEQ ID NO: 1115408 - DNA, 15 bp, Homo sapiens
tgtatgcttgaaaat

SEQ ID NO: 1115409 - DNA, 15 bp, Homo sapiens
ttgtatgcttgaaaa

SEQ ID NO: 1115410 - DNA, 15 bp, Homo sapiens
tttgtatgcttgaaa

SEQ ID NO: 1115411 - DNA, 15 bp, Homo sapiens
ttttgtatgcttgaa

SEQ ID NO: 1115412 - DNA, 15 bp, Homo sapiens
gttttgtatgcttga

SEQ ID NO: 1115413 - DNA, 15 bp, Homo sapiens
tgttttgtatgcttg

SEQ ID NO: 1115414 - DNA, 15 bp, Homo sapiens
atgttttgtatgctt

SEQ ID NO: 1115415 - DNA, 15 bp, Homo sapiens
aatgttttgtatgct

SEQ ID NO: 1115416 - DNA, 15 bp, Homo sapiens
caatgttttgtatgc

SEQ ID NO: 1115417 - DNA, 15 bp, Homo sapiens
acaatgttttgtatg

SEQ ID NO: 1115418 - DNA, 15 bp, Homo sapiens
aacaatgttttgtat

SEQ ID NO: 1115419 - DNA, 15 bp, Homo sapiens
taacaatgttttgta

SEQ ID NO: 1115420 - DNA, 15 bp, Homo sapiens
gtaacaatgttttgt

SEQ ID NO: 1115421 - DNA, 15 bp, Homo sapiens
agtaacaatgttttg

SEQ ID NO: 1115422 - DNA, 15 bp, Homo sapiens
tagtaacaatgtttt

SEQ ID NO: 1115423 - DNA, 15 bp, Homo sapiens
ttagtaacaatgttt

SEQ ID NO: 1115424 - DNA, 15 bp, Homo sapiens
gttagtaacaatgtt

SEQ ID NO: 1115425 - DNA, 15 bp, Homo sapiens
agttagtaacaatgt

SEQ ID NO: 1115426 - DNA, 15 bp, Homo sapiens
tagttagtaacaatg

SEQ ID NO: 1115427 - DNA, 15 bp, Homo sapiens
atagttagtaacaat

SEQ ID NO: 1115428 - DNA, 15 bp, Homo sapiens
tatagttagtaacaa

SEQ ID NO: 1115429 - DNA, 15 bp, Homo sapiens
ctatagttagtaaca

SEQ ID NO: 1115430 - DNA, 15 bp, Homo sapiens
actatagttagtaac

SEQ ID NO: 1115431 - DNA, 15 bp, Homo sapiens
gactatagttagtaa

SEQ ID NO: 1115432 - DNA, 15 bp, Homo sapiens
tgactatagttagta

SEQ ID NO: 1115433 - DNA, 15 bp, Homo sapiens
ctgactatagttagt

SEQ ID NO: 1115434 - DNA, 15 bp, Homo sapiens
gctgactatagttag

SEQ ID NO: 1115435 - DNA, 15 bp, Homo sapiens
ggctgactatagtta

SEQ ID NO: 1115436 - DNA, 15 bp, Homo sapiens
gggctgactatagtt

SEQ ID NO: 1115437 - DNA, 15 bp, Homo sapiens
tgggctgactatagt

SEQ ID NO: 1115438 - DNA, 15 bp, Homo sapiens
ctgggctgactatag

SEQ ID NO: 1115439 - DNA, 15 bp, Homo sapiens
actgggctgactata

SEQ ID NO: 1115440 - DNA, 15 bp, Homo sapiens
tactgggctgactat

SEQ ID NO: 1115441 - DNA, 15 bp, Homo sapiens
ttactgggctgacta

SEQ ID NO: 1115442 - DNA, 15 bp, Homo sapiens
tttactgggctgact

SEQ ID NO: 1115443 - DNA, 15 bp, Homo sapiens
atttactgggctgac

SEQ ID NO: 1115444 - DNA, 15 bp, Homo sapiens
aatttactgggctga

SEQ ID NO: 1115445 - DNA, 15 bp, Homo sapiens
aaatttactgggctg

SEQ ID NO: 1115446 - DNA, 15 bp, Homo sapiens
gaaatttactgggct

SEQ ID NO: 1115447 - DNA, 15 bp, Homo sapiens
agaaatttactgggc

SEQ ID NO: 1115448 - DNA, 15 bp, Homo sapiens
aagaaatttactggg

SEQ ID NO: 1115449 - DNA, 15 bp, Homo sapiens
caagaaatttactgg

SEQ ID NO: 1115450 - DNA, 15 bp, Homo sapiens
tcaagaaatttactg

SEQ ID NO: 1115451 - DNA, 15 bp, Homo sapiens
ttcaagaaatttact

SEQ ID NO: 1115452 - DNA, 15 bp, Homo sapiens
gttcaagaaatttac

SEQ ID NO: 1115453 - DNA, 15 bp, Homo sapiens
agttcaagaaattta

SEQ ID NO: 1115454 - DNA, 15 bp, Homo sapiens
aagttcaagaaattt

SEQ ID NO: 1115455 - DNA, 15 bp, Homo sapiens
taagttcaagaaatt

SEQ ID NO: 1115456 - DNA, 15 bp, Homo sapiens
ataagttcaagaaat

SEQ ID NO: 1115457 - DNA, 15 bp, Homo sapiens
aataagttcaagaaa

SEQ ID NO: 1115458 - DNA, 15 bp, Homo sapiens
gaataagttcaagaa

SEQ ID NO: 1115459 - DNA, 15 bp, Homo sapiens
ggaataagttcaaga

SEQ ID NO: 1115460 - DNA, 15 bp, Homo sapiens
aggaataagttcaag

SEQ ID NO: 1115461 - DNA, 15 bp, Homo sapiens
gaggaataagttcaa

SEQ ID NO: 1115462 - DNA, 15 bp, Homo sapiens
ggaggaataagttca

SEQ ID NO: 1115463 - DNA, 15 bp, Homo sapiens
aggaggaataagttc

SEQ ID NO: 1115464 - DNA, 15 bp, Homo sapiens
taggaggaataagtt

SEQ ID NO: 1115465 - DNA, 15 bp, Homo sapiens
ttaggaggaataagt

SEQ ID NO: 1115466 - DNA, 15 bp, Homo sapiens
attaggaggaataag

SEQ ID NO: 1115467 - DNA, 15 bp, Homo sapiens
aattaggaggaataa

SEQ ID NO: 1115468 - DNA, 15 bp, Homo sapiens
caattaggaggaata

SEQ ID NO: 1115469 - DNA, 15 bp, Homo sapiens
tcaattaggaggaat

SEQ ID NO: 1115470 - DNA, 15 bp, Homo sapiens
ttcaattaggaggaa

SEQ ID NO: 1115471 - DNA, 15 bp, Homo sapiens
tttcaattaggagga

SEQ ID NO: 1115472 - DNA, 15 bp, Homo sapiens
atttcaattaggagg

SEQ ID NO: 1115473 - DNA, 15 bp, Homo sapiens
aatttcaattaggag

SEQ ID NO: 1115474 - DNA, 15 bp, Homo sapiens
aaatttcaattagga

SEQ ID NO: 1115475 - DNA, 15 bp, Homo sapiens
aaaatttcaattagg

SEQ ID NO: 1115476 - DNA, 15 bp, Homo sapiens
caaaatttcaattag

SEQ ID NO: 1115477 - DNA, 15 bp, Homo sapiens
acaaaatttcaatta

SEQ ID NO: 1115478 - DNA, 15 bp, Homo sapiens
tacaaaatttcaatt

SEQ ID NO: 1115479 - DNA, 15 bp, Homo sapiens
atacaaaatttcaat

SEQ ID NO: 1115480 - DNA, 15 bp, Homo sapiens
aatacaaaatttcaa

SEQ ID NO: 1115481 - DNA, 15 bp, Homo sapiens
aaatacaaaatttca

SEQ ID NO: 1115482 - DNA, 15 bp, Homo sapiens
aaaatacaaaatttc

SEQ ID NO: 1115483 - DNA, 15 bp, Homo sapiens
aaaaaatacaaaatt

SEQ ID NO: 1115484 - DNA, 15 bp, Homo sapiens
taaaaaatacaaaat

SEQ ID NO: 1115485 - DNA, 15 bp, Homo sapiens
ttaaaaaatacaaaa

SEQ ID NO: 1115486 - DNA, 15 bp, Homo sapiens
gttaaaaaatacaaa

SEQ ID NO: 1115487 - DNA, 15 bp, Homo sapiens
ggttaaaaaatacaa

SEQ ID NO: 1115488 - DNA, 15 bp, Homo sapiens
tggttaaaaaataca

SEQ ID NO: 1115489 - DNA, 15 bp, Homo sapiens
atggttaaaaaatac

SEQ ID NO: 1115490 - DNA, 15 bp, Homo sapiens
gatggttaaaaaata

SEQ ID NO: 1115491 - DNA, 15 bp, Homo sapiens
agatggttaaaaaat

SEQ ID NO: 1115492 - DNA, 15 bp, Homo sapiens
gagatggttaaaaaa

SEQ ID NO: 1115493 - DNA, 15 bp, Homo sapiens
ggagatggttaaaaa

SEQ ID NO: 1115494 - DNA, 15 bp, Homo sapiens
gggagatggttaaaa

SEQ ID NO: 1115495 - DNA, 15 bp, Homo sapiens
agggagatggttaaa

SEQ ID NO: 1115496 - DNA, 15 bp, Homo sapiens
tagggagatggttaa

SEQ ID NO: 1115497 - DNA, 15 bp, Homo sapiens
ttagggagatggtta

SEQ ID NO: 1115498 - DNA, 15 bp, Homo sapiens
attagggagatggtt

SEQ ID NO: 1115499 - DNA, 15 bp, Homo sapiens
gattagggagatggt

SEQ ID NO: 1115500 - DNA, 15 bp, Homo sapiens
agattagggagatgg

SEQ ID NO: 1115501 - DNA, 15 bp, Homo sapiens
gagattagggagatg

SEQ ID NO: 1115502 - DNA, 15 bp, Homo sapiens
ggagattagggagat

SEQ ID NO: 1115503 - DNA, 15 bp, Homo sapiens
gggagattagggaga

SEQ ID NO: 1115504 - DNA, 15 bp, Homo sapiens
ggggagattagggag

SEQ ID NO: 1115505 - DNA, 15 bp, Homo sapiens
tggggagattaggga

SEQ ID NO: 1115506 - DNA, 15 bp, Homo sapiens
gtggggagattaggg

SEQ ID NO: 1115507 - DNA, 15 bp, Homo sapiens
ggtggggagattagg

SEQ ID NO: 1115508 - DNA, 15 bp, Homo sapiens
aggtggggagattag

SEQ ID NO: 1115509 - DNA, 15 bp, Homo sapiens
gaggtggggagatta

SEQ ID NO: 1115510 - DNA, 15 bp, Homo sapiens
agaggtggggagatt

SEQ ID NO: 1115511 - DNA, 15 bp, Homo sapiens
tagaggtggggagat

SEQ ID NO: 1115512 - DNA, 15 bp, Homo sapiens
ctagaggtggggaga

SEQ ID NO: 1115513 - DNA, 15 bp, Homo sapiens
gctagaggtggggag

SEQ ID NO: 1115514 - DNA, 15 bp, Homo sapiens
ggctagaggtgggga

SEQ ID NO: 1115515 - DNA, 15 bp, Homo sapiens
gggctagaggtgggg

SEQ ID NO: 1115516 - DNA, 15 bp, Homo sapiens
agggctagaggtggg

SEQ ID NO: 1115517 - DNA, 15 bp, Homo sapiens
aagggctagaggtgg

SEQ ID NO: 1115518 - DNA, 15 bp, Homo sapiens
taagggctagaggtg

SEQ ID NO: 1115519 - DNA, 15 bp, Homo sapiens
ctaagggctagaggt

SEQ ID NO: 1115520 - DNA, 15 bp, Homo sapiens
actaagggctagagg

SEQ ID NO: 1115521 - DNA, 15 bp, Homo sapiens
tactaagggctagag

SEQ ID NO: 1115522 - DNA, 15 bp, Homo sapiens
ttactaagggctaga

SEQ ID NO: 1115523 - DNA, 15 bp, Homo sapiens
gttactaagggctag

SEQ ID NO: 1115524 - DNA, 15 bp, Homo sapiens
agttactaagggcta

SEQ ID NO: 1115525 - DNA, 15 bp, Homo sapiens
tagttactaagggct

SEQ ID NO: 1115526 - DNA, 15 bp, Homo sapiens
gtagttactaagggc

SEQ ID NO: 1115527 - DNA, 15 bp, Homo sapiens
ggtagttactaaggg

SEQ ID NO: 1115528 - DNA, 15 bp, Homo sapiens
tggtagttactaagg

SEQ ID NO: 1115529 - DNA, 15 bp, Homo sapiens
atggtagttactaag

SEQ ID NO: 1115530 - DNA, 15 bp, Homo sapiens
aatggtagttactaa

SEQ ID NO: 1115531 - DNA, 15 bp, Homo sapiens
aaatggtagttacta

SEQ ID NO: 1115532 - DNA, 15 bp, Homo sapiens
aaaatggtagttact

SEQ ID NO: 1115533 - DNA, 15 bp, Homo sapiens
taaaatggtagttac

SEQ ID NO: 1115534 - DNA, 15 bp, Homo sapiens
gtaaaatggtagtta

SEQ ID NO: 1115535 - DNA, 15 bp, Homo sapiens
agtaaaatggtagtt

SEQ ID NO: 1115536 - DNA, 15 bp, Homo sapiens
gagtaaaatggtagt

SEQ ID NO: 1115537 - DNA, 15 bp, Homo sapiens
agagtaaaatggtag

SEQ ID NO: 1115538 - DNA, 15 bp, Homo sapiens
gagagtaaaatggta

SEQ ID NO: 1115539 - DNA, 15 bp, Homo sapiens
agagagtaaaatggt

SEQ ID NO: 1115540 - DNA, 15 bp, Homo sapiens
cagagagtaaaatgg

SEQ ID NO: 1115541 - DNA, 15 bp, Homo sapiens
gcagagagtaaaatg

SEQ ID NO: 1115542 - DNA, 15 bp, Homo sapiens
agcagagagtaaaat

SEQ ID NO: 1115543 - DNA, 15 bp, Homo sapiens
aagcagagagtaaaa

SEQ ID NO: 1115544 - DNA, 15 bp, Homo sapiens
gaagcagagagtaaa

SEQ ID NO: 1115545 - DNA, 15 bp, Homo sapiens
agaagcagagagtaa

SEQ ID NO: 1115546 - DNA, 15 bp, Homo sapiens
tagaagcagagagta

SEQ ID NO: 1115547 - DNA, 15 bp, Homo sapiens
atagaagcagagagt

SEQ ID NO: 1115548 - DNA, 15 bp, Homo sapiens
catagaagcagagag

SEQ ID NO: 1115549 - DNA, 15 bp, Homo sapiens
tcatagaagcagaga

SEQ ID NO: 1115550 - DNA, 15 bp, Homo sapiens
ttcatagaagcagag

SEQ ID NO: 1115551 - DNA, 15 bp, Homo sapiens
attcatagaagcaga

SEQ ID NO: 1115552 - DNA, 15 bp, Homo sapiens
aattcatagaagcag

SEQ ID NO: 1115553 - DNA, 15 bp, Homo sapiens
gaattcatagaagca

SEQ ID NO: 1115554 - DNA, 15 bp, Homo sapiens
tgaattcatagaagc

SEQ ID NO: 1115555 - DNA, 15 bp, Homo sapiens
ttgaattcatagaag

SEQ ID NO: 1115556 - DNA, 15 bp, Homo sapiens
tttgaattcatagaa

SEQ ID NO: 1115557 - DNA, 15 bp, Homo sapiens
atttgaattcataga

SEQ ID NO: 1115558 - DNA, 15 bp, Homo sapiens
aatttgaattcatag

SEQ ID NO: 1115559 - DNA, 15 bp, Homo sapiens
aaatttgaattcata

SEQ ID NO: 1115560 - DNA, 15 bp, Homo sapiens
aaaatttgaattcat

SEQ ID NO: 1115561 - DNA, 15 bp, Homo sapiens
aaaaatttgaattca

SEQ ID NO: 1115562 - DNA, 15 bp, Homo sapiens
aaaaaatttgaattc

SEQ ID NO: 1115563 - DNA, 15 bp, Homo sapiens
taaaaaatttgaatt

SEQ ID NO: 1115564 - DNA, 15 bp, Homo sapiens
ctaaaaaatttgaat

SEQ ID NO: 1115565 - DNA, 15 bp, Homo sapiens
tctaaaaaatttgaa

SEQ ID NO: 1115566 - DNA, 15 bp, Homo sapiens
atctaaaaaatttga

SEQ ID NO: 1115567 - DNA, 15 bp, Homo sapiens
catctaaaaaatttg

SEQ ID NO: 1115568 - DNA, 15 bp, Homo sapiens
acatctaaaaaattt

SEQ ID NO: 1115569 - DNA, 15 bp, Homo sapiens
gacatctaaaaaatt

SEQ ID NO: 1115570 - DNA, 15 bp, Homo sapiens
tgacatctaaaaaat

SEQ ID NO: 1115571 - DNA, 15 bp, Homo sapiens
gtgacatctaaaaaa

SEQ ID NO: 1115572 - DNA, 15 bp, Homo sapiens
tgtgacatctaaaaa

SEQ ID NO: 1115573 - DNA, 15 bp, Homo sapiens
atgtgacatctaaaa

SEQ ID NO: 1115574 - DNA, 15 bp, Homo sapiens
aatgtgacatctaaa

SEQ ID NO: 1115575 - DNA, 15 bp, Homo sapiens
aaatgtgacatctaa

SEQ ID NO: 1115576 - DNA, 15 bp, Homo sapiens
taaatgtgacatcta

SEQ ID NO: 1115577 - DNA, 15 bp, Homo sapiens
ttaaatgtgacatct

SEQ ID NO: 1115578 - DNA, 15 bp, Homo sapiens
cttaaatgtgacatc

SEQ ID NO: 1115579 - DNA, 15 bp, Homo sapiens
acttaaatgtgacat

SEQ ID NO: 1115580 - DNA, 15 bp, Homo sapiens
cacttaaatgtgaca

SEQ ID NO: 1115581 - DNA, 15 bp, Homo sapiens
tcacttaaatgtgac

SEQ ID NO: 1115582 - DNA, 15 bp, Homo sapiens
ctcacttaaatgtga

SEQ ID NO: 1115583 - DNA, 15 bp, Homo sapiens
tctcacttaaatgtg

SEQ ID NO: 1115584 - DNA, 15 bp, Homo sapiens
atctcacttaaatgt

SEQ ID NO: 1115585 - DNA, 15 bp, Homo sapiens
aatctcacttaaatg

SEQ ID NO: 1115586 - DNA, 15 bp, Homo sapiens
taatctcacttaaat

SEQ ID NO: 1115587 - DNA, 15 bp, Homo sapiens
gtaatctcacttaaa

SEQ ID NO: 1115588 - DNA, 15 bp, Homo sapiens
tgtaatctcacttaa

SEQ ID NO: 1115589 - DNA, 15 bp, Homo sapiens
gtgtaatctcactta

SEQ ID NO: 1115590 - DNA, 15 bp, Homo sapiens
agtgtaatctcactt

SEQ ID NO: 1115591 - DNA, 15 bp, Homo sapiens
cagtgtaatctcact

SEQ ID NO: 1115592 - DNA, 15 bp, Homo sapiens
acagtgtaatctcac

SEQ ID NO: 1115593 - DNA, 15 bp, Homo sapiens
tacagtgtaatctca

SEQ ID NO: 1115594 - DNA, 15 bp, Homo sapiens
atacagtgtaatctc

SEQ ID NO: 1115595 - DNA, 15 bp, Homo sapiens
aatacagtgtaatct

SEQ ID NO: 1115596 - DNA, 15 bp, Homo sapiens
aaatacagtgtaatc

SEQ ID NO: 1115597 - DNA, 15 bp, Homo sapiens
caaatacagtgtaat

SEQ ID NO: 1115598 - DNA, 15 bp, Homo sapiens
acaaatacagtgtaa

SEQ ID NO: 1115599 - DNA, 15 bp, Homo sapiens
gacaaatacagtgta

SEQ ID NO: 1115600 - DNA, 15 bp, Homo sapiens
agacaaatacagtgt

SEQ ID NO: 1115601 - DNA, 15 bp, Homo sapiens
aagacaaatacagtg

SEQ ID NO: 1115602 - DNA, 15 bp, Homo sapiens
aaagacaaatacagt

SEQ ID NO: 1115603 - DNA, 15 bp, Homo sapiens
gaaagacaaatacag

SEQ ID NO: 1115604 - DNA, 15 bp, Homo sapiens
agaaagacaaataca

SEQ ID NO: 1115605 - DNA, 15 bp, Homo sapiens
cagaaagacaaatac

SEQ ID NO: 1115606 - DNA, 15 bp, Homo sapiens
acagaaagacaaata

SEQ ID NO: 1115607 - DNA, 15 bp, Homo sapiens
cacagaaagacaaat

SEQ ID NO: 1115608 - DNA, 15 bp, Homo sapiens
caggcacagaaagac

SEQ ID NO: 1115609 - DNA, 15 bp, Homo sapiens
ccaggcacagaaaga

SEQ ID NO: 1115610 - DNA, 15 bp, Homo sapiens
gccaggcacagaaag

SEQ ID NO: 1115611 - DNA, 15 bp, Homo sapiens
agccaggcacagaaa

SEQ ID NO: 1115612 - DNA, 15 bp, Homo sapiens
aagccaggcacagaa

SEQ ID NO: 1115613 - DNA, 15 bp, Homo sapiens
taagccaggcacaga

SEQ ID NO: 1115614 - DNA, 15 bp, Homo sapiens
ataagccaggcacag

SEQ ID NO: 1115615 - DNA, 15 bp, Homo sapiens
aataagccaggcaca

SEQ ID NO: 1115616 - DNA, 15 bp, Homo sapiens
aaataagccaggcac

SEQ ID NO: 1115617 - DNA, 15 bp, Homo sapiens
gaaataagccaggca

SEQ ID NO: 1115618 - DNA, 15 bp, Homo sapiens
tgaaataagccaggc

SEQ ID NO: 1115619 - DNA, 15 bp, Homo sapiens
gtgaaataagccagg

SEQ ID NO: 1115620 - DNA, 15 bp, Homo sapiens
agtgaaataagccag

SEQ ID NO: 1115621 - DNA, 15 bp, Homo sapiens
aagtgaaataagcca

SEQ ID NO: 1115622 - DNA, 15 bp, Homo sapiens
taagtgaaataagcc

SEQ ID NO: 1115623 - DNA, 15 bp, Homo sapiens
ttaagtgaaataagc

SEQ ID NO: 1115624 - DNA, 15 bp, Homo sapiens
gttaagtgaaataag

SEQ ID NO: 1115625 - DNA, 15 bp, Homo sapiens
tgttaagtgaaataa

SEQ ID NO: 1115626 - DNA, 15 bp, Homo sapiens
atgttaagtgaaata

SEQ ID NO: 1115627 - DNA, 15 bp, Homo sapiens
catgttaagtgaaat

SEQ ID NO: 1115628 - DNA, 15 bp, Homo sapiens
tcatgttaagtgaaa

SEQ ID NO: 1115629 - DNA, 15 bp, Homo sapiens
atcatgttaagtgaa

SEQ ID NO: 1115630 - DNA, 15 bp, Homo sapiens
tatcatgttaagtga

SEQ ID NO: 1115631 - DNA, 15 bp, Homo sapiens
atatcatgttaagtg

SEQ ID NO: 1115632 - DNA, 15 bp, Homo sapiens
tatatcatgttaagt

SEQ ID NO: 1115633 - DNA, 15 bp, Homo sapiens
gtatatcatgttaag

SEQ ID NO: 1115634 - DNA, 15 bp, Homo sapiens
agtatatcatgttaa

SEQ ID NO: 1115635 - DNA, 15 bp, Homo sapiens
gagtatatcatgtta

SEQ ID NO: 1115636 - DNA, 15 bp, Homo sapiens
cgagtatatcatgtt

SEQ ID NO: 1115637 - DNA, 15 bp, Homo sapiens
tcgagtatatcatgt

SEQ ID NO: 1115638 - DNA, 15 bp, Homo sapiens
ctcgagtatatcatg

SEQ ID NO: 1115639 - DNA, 15 bp, Homo sapiens
cctcgagtatatcat

SEQ ID NO: 1115640 - DNA, 15 bp, Homo sapiens
acctcgagtatatca

SEQ ID NO: 1115641 - DNA, 15 bp, Homo sapiens
cacctcgagtatatc

SEQ ID NO: 1115642 - DNA, 15 bp, Homo sapiens
gcacctcgagtatat

SEQ ID NO: 1115643 - DNA, 15 bp, Homo sapiens
tgcacctcgagtata

SEQ ID NO: 1115644 - DNA, 15 bp, Homo sapiens
atgcacctcgagtat

SEQ ID NO: 1115645 - DNA, 15 bp, Homo sapiens
gatgcacctcgagta

SEQ ID NO: 1115646 - DNA, 15 bp, Homo sapiens
agatgcacctcgagt

SEQ ID NO: 1115647 - DNA, 15 bp, Homo sapiens
cagatgcacctcgag

SEQ ID NO: 1115648 - DNA, 15 bp, Homo sapiens
acagatgcacctcga

SEQ ID NO: 1115649 - DNA, 15 bp, Homo sapiens
cacagatgcacctcg

SEQ ID NO: 1115650 - DNA, 15 bp, Homo sapiens
acacagatgcacctc

SEQ ID NO: 1115651 - DNA, 15 bp, Homo sapiens
aacacagatgcacct

SEQ ID NO: 1115652 - DNA, 15 bp, Homo sapiens
caacacagatgcacc

SEQ ID NO: 1115653 - DNA, 15 bp, Homo sapiens
acaacacagatgcac

SEQ ID NO: 1115654 - DNA, 15 bp, Homo sapiens
caacaacacagatgc

SEQ ID NO: 1115655 - DNA, 15 bp, Homo sapiens
gcaacaacacagatg

SEQ ID NO: 1115656 - DNA, 15 bp, Homo sapiens
tgcaacaacacagat

SEQ ID NO: 1115657 - DNA, 15 bp, Homo sapiens
ttgcaacaacacaga

SEQ ID NO: 1115658 - DNA, 15 bp, Homo sapiens
tttgcaacaacacag

SEQ ID NO: 1115659 - DNA, 15 bp, Homo sapiens
ctttgcaacaacaca

SEQ ID NO: 1115660 - DNA, 15 bp, Homo sapiens
cctttgcaacaacac

SEQ ID NO: 1115661 - DNA, 15 bp, Homo sapiens
tcctttgcaacaaca

SEQ ID NO: 1115662 - DNA, 15 bp, Homo sapiens
gtcctttgcaacaac

SEQ ID NO: 1115663 - DNA, 15 bp, Homo sapiens
tgtcctttgcaacaa

SEQ ID NO: 1115664 - DNA, 15 bp, Homo sapiens
ctgtcctttgcaaca

SEQ ID NO: 1115665 - DNA, 15 bp, Homo sapiens
cctgtcctttgcaac

SEQ ID NO: 1115666 - DNA, 15 bp, Homo sapiens
tcctgtcctttgcaa

SEQ ID NO: 1115667 - DNA, 15 bp, Homo sapiens
atcctgtcctttgca

SEQ ID NO: 1115668 - DNA, 15 bp, Homo sapiens
aatcctgtcctttgc

SEQ ID NO: 1115669 - DNA, 15 bp, Homo sapiens
aaatcctgtcctttg

SEQ ID NO: 1115670 - DNA, 15 bp, Homo sapiens
aaaatcctgtccttt

SEQ ID NO: 1115671 - DNA, 15 bp, Homo sapiens
aaaaatcctgtcctt

SEQ ID NO: 1115672 - DNA, 15 bp, Homo sapiens
aaaaaatcctgtcct

SEQ ID NO: 1115673 - DNA, 15 bp, Homo sapiens
aaaaaaatcctgtcc

SEQ ID NO: 1115674 - DNA, 15 bp, Homo sapiens
taaaaaaatcctgtc

SEQ ID NO: 1115675 - DNA, 15 bp, Homo sapiens
ttaaaaaaatcctgt

SEQ ID NO: 1115676 - DNA, 15 bp, Homo sapiens
tttaaaaaaatcctg

SEQ ID NO: 1115677 - DNA, 15 bp, Homo sapiens
ttttaaaaaaatcct

SEQ ID NO: 1115678 - DNA, 15 bp, Homo sapiens
cttttaaaaaaatcc

SEQ ID NO: 1115679 - DNA, 15 bp, Homo sapiens
ccttttaaaaaaatc

SEQ ID NO: 1115680 - DNA, 15 bp, Homo sapiens
gccttttaaaaaaat

SEQ ID NO: 1115681 - DNA, 15 bp, Homo sapiens
agccttttaaaaaaa

SEQ ID NO: 1115682 - DNA, 15 bp, Homo sapiens
cagccttttaaaaaa

SEQ ID NO: 1115683 - DNA, 15 bp, Homo sapiens
tcagccttttaaaaa

SEQ ID NO: 1115684 - DNA, 15 bp, Homo sapiens
ttcagccttttaaaa

SEQ ID NO: 1115685 - DNA, 15 bp, Homo sapiens
attcagccttttaaa

SEQ ID NO: 1115686 - DNA, 15 bp, Homo sapiens
tattcagccttttaa

SEQ ID NO: 1115687 - DNA, 15 bp, Homo sapiens
ttattcagcctttta

SEQ ID NO: 1115688 - DNA, 15 bp, Homo sapiens
attattcagcctttt

SEQ ID NO: 1115689 - DNA, 15 bp, Homo sapiens
tattattcagccttt

SEQ ID NO: 1115690 - DNA, 15 bp, Homo sapiens
aatattattcagcct

SEQ ID NO: 1115691 - DNA, 15 bp, Homo sapiens
gaatattattcagcc

SEQ ID NO: 1115692 - DNA, 15 bp, Homo sapiens
ggaatattattcagc

SEQ ID NO: 1115693 - DNA, 15 bp, Homo sapiens
tggaatattattcag

SEQ ID NO: 1115694 - DNA, 15 bp, Homo sapiens
atggaatattattca

SEQ ID NO: 1115695 - DNA, 15 bp, Homo sapiens
aatggaatattattc

SEQ ID NO: 1115696 - DNA, 15 bp, Homo sapiens
taatggaatattatt

SEQ ID NO: 1115697 - DNA, 15 bp, Homo sapiens
ataatggaatattat

SEQ ID NO: 1115698 - DNA, 15 bp, Homo sapiens
gataatggaatatta

SEQ ID NO: 1115699 - DNA, 15 bp, Homo sapiens
agataatggaatatt

SEQ ID NO: 1115700 - DNA, 15 bp, Homo sapiens
tagataatggaatat

SEQ ID NO: 1115701 - DNA, 15 bp, Homo sapiens
atagataatggaata

SEQ ID NO: 1115702 - DNA, 15 bp, Homo sapiens
tatagataatggaat

SEQ ID NO: 1115703 - DNA, 15 bp, Homo sapiens
atatagataatggaa

SEQ ID NO: 1115704 - DNA, 15 bp, Homo sapiens
catatagataatgga

SEQ ID NO: 1115705 - DNA, 15 bp, Homo sapiens
acatatagataatgg

SEQ ID NO: 1115706 - DNA, 15 bp, Homo sapiens
tacatatagataatg

SEQ ID NO: 1115707 - DNA, 15 bp, Homo sapiens
gtacatatagataat

SEQ ID NO: 1115708 - DNA, 15 bp, Homo sapiens
ggtacatatagataa

SEQ ID NO: 1115709 - DNA, 15 bp, Homo sapiens
tggtacatatagata

SEQ ID NO: 1115710 - DNA, 15 bp, Homo sapiens
gtggtacatatagat

SEQ ID NO: 1115711 - DNA, 15 bp, Homo sapiens
tgtggtacatataga

SEQ ID NO: 1115712 - DNA, 15 bp, Homo sapiens
atgtggtacatatag

SEQ ID NO: 1115713 - DNA, 15 bp, Homo sapiens
aatgtggtacatata

SEQ ID NO: 1115714 - DNA, 15 bp, Homo sapiens
aaatgtggtacatat

SEQ ID NO: 1115715 - DNA, 15 bp, Homo sapiens
aaaatgtggtacata

SEQ ID NO: 1115716 - DNA, 15 bp, Homo sapiens
gaaaatgtggtacat

SEQ ID NO: 1115717 - DNA, 15 bp, Homo sapiens
agaaaatgtggtaca

SEQ ID NO: 1115718 - DNA, 15 bp, Homo sapiens
ataaagaaaatgtgg

SEQ ID NO: 1115719 - DNA, 15 bp, Homo sapiens
gataaagaaaatgtg

SEQ ID NO: 1115720 - DNA, 15 bp, Homo sapiens
atggataaagaaaat

SEQ ID NO: 1115721 - DNA, 15 bp, Homo sapiens
aatggataaagaaaa

SEQ ID NO: 1115722 - DNA, 15 bp, Homo sapiens
gaatggataaagaaa

SEQ ID NO: 1115723 - DNA, 15 bp, Homo sapiens
tgaatggataaagaa

SEQ ID NO: 1115724 - DNA, 15 bp, Homo sapiens
atgaatggataaaga

SEQ ID NO: 1115725 - DNA, 15 bp, Homo sapiens
aatgaatggataaag

SEQ ID NO: 1115726 - DNA, 15 bp, Homo sapiens
aaatgaatggataaa

SEQ ID NO: 1115727 - DNA, 15 bp, Homo sapiens
caaatgaatggataa

SEQ ID NO: 1115728 - DNA, 15 bp, Homo sapiens
acaaatgaatggata

SEQ ID NO: 1115729 - DNA, 15 bp, Homo sapiens
aacaaatgaatggat

SEQ ID NO: 1115730 - DNA, 15 bp, Homo sapiens
caacaaatgaatgga

SEQ ID NO: 1115731 - DNA, 15 bp, Homo sapiens
tcaacaaatgaatgg

SEQ ID NO: 1115732 - DNA, 15 bp, Homo sapiens
atcaacaaatgaatg

SEQ ID NO: 1115733 - DNA, 15 bp, Homo sapiens
catcaacaaatgaat

SEQ ID NO: 1115734 - DNA, 15 bp, Homo sapiens
ccatcaacaaatgaa

SEQ ID NO: 1115735 - DNA, 15 bp, Homo sapiens
tccatcaacaaatga

SEQ ID NO: 1115736 - DNA, 15 bp, Homo sapiens
gtccatcaacaaatg

SEQ ID NO: 1115737 - DNA, 15 bp, Homo sapiens
tgtccatcaacaaat

SEQ ID NO: 1115738 - DNA, 15 bp, Homo sapiens
gtgtccatcaacaaa

SEQ ID NO: 1115739 - DNA, 15 bp, Homo sapiens
tgtgtccatcaacaa

SEQ ID NO: 1115740 - DNA, 15 bp, Homo sapiens
atgtgtccatcaaca

SEQ ID NO: 1115741 - DNA, 15 bp, Homo sapiens
tatgtgtccatcaac

SEQ ID NO: 1115742 - DNA, 15 bp, Homo sapiens
ctatgtgtccatcaa

SEQ ID NO: 1115743 - DNA, 15 bp, Homo sapiens
cctatgtgtccatca

SEQ ID NO: 1115744 - DNA, 15 bp, Homo sapiens
acctatgtgtccatc

SEQ ID NO: 1115745 - DNA, 15 bp, Homo sapiens
cacctatgtgtccat

SEQ ID NO: 1115746 - DNA, 15 bp, Homo sapiens
ccacctatgtgtcca

SEQ ID NO: 1115747 - DNA, 15 bp, Homo sapiens
gccacctatgtgtcc

SEQ ID NO: 1115748 - DNA, 15 bp, Homo sapiens
agccacctatgtgtc

SEQ ID NO: 1115749 - DNA, 15 bp, Homo sapiens
tagccacctatgtgt

SEQ ID NO: 1115750 - DNA, 15 bp, Homo sapiens
atagccacctatgtg

SEQ ID NO: 1115751 - DNA, 15 bp, Homo sapiens
aatagccacctatgt

SEQ ID NO: 1115752 - DNA, 15 bp, Homo sapiens
caatagccacctatg

SEQ ID NO: 1115753 - DNA, 15 bp, Homo sapiens
acaatagccacctat

SEQ ID NO: 1115754 - DNA, 15 bp, Homo sapiens
cacaatagccaccta

SEQ ID NO: 1115755 - DNA, 15 bp, Homo sapiens
tcacaatagccacct

SEQ ID NO: 1115756 - DNA, 15 bp, Homo sapiens
ctcacaatagccacc

SEQ ID NO: 1115757 - DNA, 15 bp, Homo sapiens
actcacaatagccac

SEQ ID NO: 1115758 - DNA, 15 bp, Homo sapiens
tactcacaatagcca

SEQ ID NO: 1115759 - DNA, 15 bp, Homo sapiens
ttactcacaatagcc

SEQ ID NO: 1115760 - DNA, 15 bp, Homo sapiens
attactcacaatagc

SEQ ID NO: 1115761 - DNA, 15 bp, Homo sapiens
cattactcacaatag

SEQ ID NO: 1115762 - DNA, 15 bp, Homo sapiens
gcattactcacaata

SEQ ID NO: 1115763 - DNA, 15 bp, Homo sapiens
agcattactcacaat

SEQ ID NO: 1115764 - DNA, 15 bp, Homo sapiens
cagcattactcacaa

SEQ ID NO: 1115765 - DNA, 15 bp, Homo sapiens
gcagcattactcaca

SEQ ID NO: 1115766 - DNA, 15 bp, Homo sapiens
tgcagcattactcac

SEQ ID NO: 1115767 - DNA, 15 bp, Homo sapiens
ctgcagcattactca

SEQ ID NO: 1115768 - DNA, 15 bp, Homo sapiens
actgcagcattactc

SEQ ID NO: 1115769 - DNA, 15 bp, Homo sapiens
cactgcagcattact

SEQ ID NO: 1115770 - DNA, 15 bp, Homo sapiens
acactgcagcattac

SEQ ID NO: 1115771 - DNA, 15 bp, Homo sapiens
cacactgcagcatta

SEQ ID NO: 1115772 - DNA, 15 bp, Homo sapiens
gcacactgcagcatt

SEQ ID NO: 1115773 - DNA, 15 bp, Homo sapiens
tgcacactgcagcat

SEQ ID NO: 1115774 - DNA, 15 bp, Homo sapiens
atgcacactgcagca

SEQ ID NO: 1115775 - DNA, 15 bp, Homo sapiens
catgcacactgcagc

SEQ ID NO: 1115776 - DNA, 15 bp, Homo sapiens
ccatgcacactgcag

SEQ ID NO: 1115777 - DNA, 15 bp, Homo sapiens
cccatgcacactgca

SEQ ID NO: 1115778 - DNA, 15 bp, Homo sapiens
tcccatgcacactgc

SEQ ID NO: 1115779 - DNA, 15 bp, Homo sapiens
ctcccatgcacactg

SEQ ID NO: 1115780 - DNA, 15 bp, Homo sapiens
gctcccatgcacact

SEQ ID NO: 1115781 - DNA, 15 bp, Homo sapiens
cgctcccatgcacac

SEQ ID NO: 1115782 - DNA, 15 bp, Homo sapiens
acgctcccatgcaca

SEQ ID NO: 1115783 - DNA, 15 bp, Homo sapiens
tacgctcccatgcac

SEQ ID NO: 1115784 - DNA, 15 bp, Homo sapiens
ctacgctcccatgca

SEQ ID NO: 1115785 - DNA, 15 bp, Homo sapiens
tctacgctcccatgc

SEQ ID NO: 1115786 - DNA, 15 bp, Homo sapiens
atctacgctcccatg

SEQ ID NO: 1115787 - DNA, 15 bp, Homo sapiens
tatctacgctcccat

SEQ ID NO: 1115788 - DNA, 15 bp, Homo sapiens
atatctacgctccca

SEQ ID NO: 1115789 - DNA, 15 bp, Homo sapiens
gatatctacgctccc

SEQ ID NO: 1115790 - DNA, 15 bp, Homo sapiens
agatatctacgctcc

SEQ ID NO: 1115791 - DNA, 15 bp, Homo sapiens
aagatatctacgctc

SEQ ID NO: 1115792 - DNA, 15 bp, Homo sapiens
aaagatatctacgct

SEQ ID NO: 1115793 - DNA, 15 bp, Homo sapiens
aaaagatatctacgc

SEQ ID NO: 1115794 - DNA, 15 bp, Homo sapiens
aaaaagatatctacg

SEQ ID NO: 1115795 - DNA, 15 bp, Homo sapiens
caaaaagatatctac

SEQ ID NO: 1115796 - DNA, 15 bp, Homo sapiens
tcaaaaagatatcta

SEQ ID NO: 1115797 - DNA, 15 bp, Homo sapiens
atcaaaaagatatct

SEQ ID NO: 1115798 - DNA, 15 bp, Homo sapiens
tatcaaaaagatatc

SEQ ID NO: 1115799 - DNA, 15 bp, Homo sapiens
atatcaaaaagatat

SEQ ID NO: 1115800 - DNA, 15 bp, Homo sapiens
tatatcaaaaagata

SEQ ID NO: 1115801 - DNA, 15 bp, Homo sapiens
atatatcaaaaagat

SEQ ID NO: 1115802 - DNA, 15 bp, Homo sapiens
aatatatcaaaaaga

SEQ ID NO: 1115803 - DNA, 15 bp, Homo sapiens
caatatatcaaaaag

SEQ ID NO: 1115804 - DNA, 15 bp, Homo sapiens
ccaatatatcaaaaa

SEQ ID NO: 1115805 - DNA, 15 bp, Homo sapiens
accaatatatcaaaa

SEQ ID NO: 1115806 - DNA, 15 bp, Homo sapiens
aaccaatatatcaaa

SEQ ID NO: 1115807 - DNA, 15 bp, Homo sapiens
aaaccaatatatcaa

SEQ ID NO: 1115808 - DNA, 15 bp, Homo sapiens
gaaaccaatatatca

SEQ ID NO: 1115809 - DNA, 15 bp, Homo sapiens
tgaaaccaatatatc

SEQ ID NO: 1115810 - DNA, 15 bp, Homo sapiens
atgaaaccaatatat

SEQ ID NO: 1115811 - DNA, 15 bp, Homo sapiens
aatgaaaccaatata

SEQ ID NO: 1115812 - DNA, 15 bp, Homo sapiens
aaatgaaaccaatat

SEQ ID NO: 1115813 - DNA, 15 bp, Homo sapiens
aaaatgaaaccaata

SEQ ID NO: 1115814 - DNA, 15 bp, Homo sapiens
gaaaatgaaaccaat

SEQ ID NO: 1115815 - DNA, 15 bp, Homo sapiens
ggaaaatgaaaccaa

SEQ ID NO: 1115816 - DNA, 15 bp, Homo sapiens
aggaaaatgaaacca

SEQ ID NO: 1115817 - DNA, 15 bp, Homo sapiens
aaggaaaatgaaacc

SEQ ID NO: 1115818 - DNA, 15 bp, Homo sapiens
caaggaaaatgaaac

SEQ ID NO: 1115819 - DNA, 15 bp, Homo sapiens
ccaaggaaaatgaaa

SEQ ID NO: 1115820 - DNA, 15 bp, Homo sapiens
tccaaggaaaatgaa

SEQ ID NO: 1115821 - DNA, 15 bp, Homo sapiens
atccaaggaaaatga

SEQ ID NO: 1115822 - DNA, 15 bp, Homo sapiens
tatccaaggaaaatg

SEQ ID NO: 1115823 - DNA, 15 bp, Homo sapiens
atatccaaggaaaat

SEQ ID NO: 1115824 - DNA, 15 bp, Homo sapiens
tatatccaaggaaaa

SEQ ID NO: 1115825 - DNA, 15 bp, Homo sapiens
atatatccaaggaaa

SEQ ID NO: 1115826 - DNA, 15 bp, Homo sapiens
tatatatccaaggaa

SEQ ID NO: 1115827 - DNA, 15 bp, Homo sapiens
gtatatatccaagga

SEQ ID NO: 1115828 - DNA, 15 bp, Homo sapiens
ggtatatatccaagg

SEQ ID NO: 1115829 - DNA, 15 bp, Homo sapiens
gggtatatatccaag

SEQ ID NO: 1115830 - DNA, 15 bp, Homo sapiens
tgggtatatatccaa

SEQ ID NO: 1115831 - DNA, 15 bp, Homo sapiens
ctgggtatatatcca

SEQ ID NO: 1115832 - DNA, 15 bp, Homo sapiens
actgggtatatatcc

SEQ ID NO: 1115833 - DNA, 15 bp, Homo sapiens
tactgggtatatatc

SEQ ID NO: 1115834 - DNA, 15 bp, Homo sapiens
atactgggtatatat

SEQ ID NO: 1115835 - DNA, 15 bp, Homo sapiens
tatactgggtatata

SEQ ID NO: 1115836 - DNA, 15 bp, Homo sapiens
ctatactgggtatat

SEQ ID NO: 1115837 - DNA, 15 bp, Homo sapiens
cctatactgggtata

SEQ ID NO: 1115838 - DNA, 15 bp, Homo sapiens
tcctatactgggtat

SEQ ID NO: 1115839 - DNA, 15 bp, Homo sapiens
atcctatactgggta

SEQ ID NO: 1115840 - DNA, 15 bp, Homo sapiens
aatcctatactgggt

SEQ ID NO: 1115841 - DNA, 15 bp, Homo sapiens
caatcctatactggg

SEQ ID NO: 1115842 - DNA, 15 bp, Homo sapiens
gcaatcctatactgg

SEQ ID NO: 1115843 - DNA, 15 bp, Homo sapiens
agcaatcctatactg

SEQ ID NO: 1115844 - DNA, 15 bp, Homo sapiens
tagcaatcctatact

SEQ ID NO: 1115845 - DNA, 15 bp, Homo sapiens
ctagcaatcctatac

SEQ ID NO: 1115846 - DNA, 15 bp, Homo sapiens
cctagcaatcctata

SEQ ID NO: 1115847 - DNA, 15 bp, Homo sapiens
acctagcaatcctat

SEQ ID NO: 1115848 - DNA, 15 bp, Homo sapiens
aacctagcaatccta

SEQ ID NO: 1115849 - DNA, 15 bp, Homo sapiens
taacctagcaatcct

SEQ ID NO: 1115850 - DNA, 15 bp, Homo sapiens
ataacctagcaatcc

SEQ ID NO: 1115851 - DNA, 15 bp, Homo sapiens
tataacctagcaatc

SEQ ID NO: 1115852 - DNA, 15 bp, Homo sapiens
atataacctagcaat

SEQ ID NO: 1115853 - DNA, 15 bp, Homo sapiens
tatataacctagcaa

SEQ ID NO: 1115854 - DNA, 15 bp, Homo sapiens
ctatataacctagca

SEQ ID NO: 1115855 - DNA, 15 bp, Homo sapiens
gctatataacctagc

SEQ ID NO: 1115856 - DNA, 15 bp, Homo sapiens
tgctatataacctag

SEQ ID NO: 1115857 - DNA, 15 bp, Homo sapiens
ctgctatataaccta

SEQ ID NO: 1115858 - DNA, 15 bp, Homo sapiens
actgctatataacct

SEQ ID NO: 1115859 - DNA, 15 bp, Homo sapiens
aactgctatataacc

SEQ ID NO: 1115860 - DNA, 15 bp, Homo sapiens
gaactgctatataac

SEQ ID NO: 1115861 - DNA, 15 bp, Homo sapiens
agaactgctatataa

SEQ ID NO: 1115862 - DNA, 15 bp, Homo sapiens
tagaactgctatata

SEQ ID NO: 1115863 - DNA, 15 bp, Homo sapiens
atagaactgctatat

SEQ ID NO: 1115864 - DNA, 15 bp, Homo sapiens
aatagaactgctata

SEQ ID NO: 1115865 - DNA, 15 bp, Homo sapiens
aaatagaactgctat

SEQ ID NO: 1115866 - DNA, 15 bp, Homo sapiens
gaaatagaactgcta

SEQ ID NO: 1115867 - DNA, 15 bp, Homo sapiens
agaaatagaactgct

SEQ ID NO: 1115868 - DNA, 15 bp, Homo sapiens
tagaaatagaactgc

SEQ ID NO: 1115869 - DNA, 15 bp, Homo sapiens
ttagaaatagaactg

SEQ ID NO: 1115870 - DNA, 15 bp, Homo sapiens
gttagaaatagaact

SEQ ID NO: 1115871 - DNA, 15 bp, Homo sapiens
agttagaaatagaac

SEQ ID NO: 1115872 - DNA, 15 bp, Homo sapiens
aagttagaaatagaa

SEQ ID NO: 1115873 - DNA, 15 bp, Homo sapiens
aaagttagaaataga

SEQ ID NO: 1115874 - DNA, 15 bp, Homo sapiens
aaaagttagaaatag

SEQ ID NO: 1115875 - DNA, 15 bp, Homo sapiens
aaaaagttagaaata

SEQ ID NO: 1115876 - DNA, 15 bp, Homo sapiens
caaaaagttagaaat

SEQ ID NO: 1115877 - DNA, 15 bp, Homo sapiens
tcaaaaagttagaaa

SEQ ID NO: 1115878 - DNA, 15 bp, Homo sapiens
ctcaaaaagttagaa

SEQ ID NO: 1115879 - DNA, 15 bp, Homo sapiens
cctcaaaaagttaga

SEQ ID NO: 1115880 - DNA, 15 bp, Homo sapiens
tcctcaaaaagttag

SEQ ID NO: 1115881 - DNA, 15 bp, Homo sapiens
ttcctcaaaaagtta

SEQ ID NO: 1115882 - DNA, 15 bp, Homo sapiens
gttcctcaaaaagtt

SEQ ID NO: 1115883 - DNA, 15 bp, Homo sapiens
ggttcctcaaaaagt

SEQ ID NO: 1115884 - DNA, 15 bp, Homo sapiens
aggttcctcaaaaag

SEQ ID NO: 1115885 - DNA, 15 bp, Homo sapiens
taggttcctcaaaaa

SEQ ID NO: 1115886 - DNA, 15 bp, Homo sapiens
gtaggttcctcaaaa

SEQ ID NO: 1115887 - DNA, 15 bp, Homo sapiens
tgtaggttcctcaaa

SEQ ID NO: 1115888 - DNA, 15 bp, Homo sapiens
atgtaggttcctcaa

SEQ ID NO: 1115889 - DNA, 15 bp, Homo sapiens
tatgtaggttcctca

SEQ ID NO: 1115890 - DNA, 15 bp, Homo sapiens
gtatgtaggttcctc

SEQ ID NO: 1115891 - DNA, 15 bp, Homo sapiens
tgtatgtaggttcct

SEQ ID NO: 1115892 - DNA, 15 bp, Homo sapiens
atgtatgtaggttcc

SEQ ID NO: 1115893 - DNA, 15 bp, Homo sapiens
tatgtatgtaggttc

SEQ ID NO: 1115894 - DNA, 15 bp, Homo sapiens
atatgtatgtaggtt

SEQ ID NO: 1115895 - DNA, 15 bp, Homo sapiens
aatatgtatgtaggt

SEQ ID NO: 1115896 - DNA, 15 bp, Homo sapiens
aaatatgtatgtagg

SEQ ID NO: 1115897 - DNA, 15 bp, Homo sapiens
gaaatatgtatgtag

SEQ ID NO: 1115898 - DNA, 15 bp, Homo sapiens
ggaaatatgtatgta

SEQ ID NO: 1115899 - DNA, 15 bp, Homo sapiens
ttatggaaatatgta

SEQ ID NO: 1115900 - DNA, 15 bp, Homo sapiens
attatggaaatatgt

SEQ ID NO: 1115901 - DNA, 15 bp, Homo sapiens
cattatggaaatatg

SEQ ID NO: 1115902 - DNA, 15 bp, Homo sapiens
gtcattatggaaata

SEQ ID NO: 1115903 - DNA, 15 bp, Homo sapiens
agtcattatggaaat

SEQ ID NO: 1115904 - DNA, 15 bp, Homo sapiens
cagtcattatggaaa

SEQ ID NO: 1115905 - DNA, 15 bp, Homo sapiens
acagtcattatggaa

SEQ ID NO: 1115906 - DNA, 15 bp, Homo sapiens
tacagtcattatgga

SEQ ID NO: 1115907 - DNA, 15 bp, Homo sapiens
gtacagtcattatgg

SEQ ID NO: 1115908 - DNA, 15 bp, Homo sapiens
agtacagtcattatg

SEQ ID NO: 1115909 - DNA, 15 bp, Homo sapiens
tagtacagtcattat

SEQ ID NO: 1115910 - DNA, 15 bp, Homo sapiens
ttagtacagtcatta

SEQ ID NO: 1115911 - DNA, 15 bp, Homo sapiens
attagtacagtcatt

SEQ ID NO: 1115912 - DNA, 15 bp, Homo sapiens
aattagtacagtcat

SEQ ID NO: 1115913 - DNA, 15 bp, Homo sapiens
aaattagtacagtca

SEQ ID NO: 1115914 - DNA, 15 bp, Homo sapiens
taaattagtacagtc

SEQ ID NO: 1115915 - DNA, 15 bp, Homo sapiens
gtaaattagtacagt

SEQ ID NO: 1115916 - DNA, 15 bp, Homo sapiens
ttggtgggaatgtaa

SEQ ID NO: 1115917 - DNA, 15 bp, Homo sapiens
gttggtgggaatgta

SEQ ID NO: 1115918 - DNA, 15 bp, Homo sapiens
tgttggtgggaatgt

SEQ ID NO: 1115919 - DNA, 15 bp, Homo sapiens
ctgttggtgggaatg

SEQ ID NO: 1115920 - DNA, 15 bp, Homo sapiens
actgttggtgggaat

SEQ ID NO: 1115921 - DNA, 15 bp, Homo sapiens
cactgttggtgggaa

SEQ ID NO: 1115922 - DNA, 15 bp, Homo sapiens
gtacactgttggtgg

SEQ ID NO: 1115923 - DNA, 15 bp, Homo sapiens
tgtacactgttggtg

SEQ ID NO: 1115924 - DNA, 15 bp, Homo sapiens
ttgtacactgttggt

SEQ ID NO: 1115925 - DNA, 15 bp, Homo sapiens
cttgtacactgttgg

SEQ ID NO: 1115926 - DNA, 15 bp, Homo sapiens
acttgtacactgttg

SEQ ID NO: 1115927 - DNA, 15 bp, Homo sapiens
cacttgtacactgtt

SEQ ID NO: 1115928 - DNA, 15 bp, Homo sapiens
acacttgtacactgt

SEQ ID NO: 1115929 - DNA, 15 bp, Homo sapiens
aacacttgtacactg

SEQ ID NO: 1115930 - DNA, 15 bp, Homo sapiens
gaacacttgtacact

SEQ ID NO: 1115931 - DNA, 15 bp, Homo sapiens
ggaacacttgtacac

SEQ ID NO: 1115932 - DNA, 15 bp, Homo sapiens
gggaacacttgtaca

SEQ ID NO: 1115933 - DNA, 15 bp, Homo sapiens
agggaacacttgtac

SEQ ID NO: 1115934 - DNA, 15 bp, Homo sapiens
aagggaacacttgta

SEQ ID NO: 1115935 - DNA, 15 bp, Homo sapiens
aaagggaacacttgt

SEQ ID NO: 1115936 - DNA, 15 bp, Homo sapiens
aaaagggaacacttg

SEQ ID NO: 1115937 - DNA, 15 bp, Homo sapiens
aaaaagggaacactt

SEQ ID NO: 1115938 - DNA, 15 bp, Homo sapiens
aaaaaagggaacact

SEQ ID NO: 1115939 - DNA, 15 bp, Homo sapiens
gaaaaaagggaacac

SEQ ID NO: 1115940 - DNA, 15 bp, Homo sapiens
ggaaaaaagggaaca

SEQ ID NO: 1115941 - DNA, 15 bp, Homo sapiens
tggaaaaaagggaac

SEQ ID NO: 1115942 - DNA, 15 bp, Homo sapiens
gtggaaaaaagggaa

SEQ ID NO: 1115943 - DNA, 15 bp, Homo sapiens
tgtggaaaaaaggga

SEQ ID NO: 1115944 - DNA, 15 bp, Homo sapiens
atgtggaaaaaaggg

SEQ ID NO: 1115945 - DNA, 15 bp, Homo sapiens
aatgtggaaaaaagg

SEQ ID NO: 1115946 - DNA, 15 bp, Homo sapiens
gaatgtggaaaaaag

SEQ ID NO: 1115947 - DNA, 15 bp, Homo sapiens
agaatgtggaaaaaa

SEQ ID NO: 1115948 - DNA, 15 bp, Homo sapiens
caagaatgtggaaaa

SEQ ID NO: 1115949 - DNA, 15 bp, Homo sapiens
gcaagaatgtggaaa

SEQ ID NO: 1115950 - DNA, 15 bp, Homo sapiens
ggcaagaatgtggaa

SEQ ID NO: 1115951 - DNA, 15 bp, Homo sapiens
tggcaagaatgtgga

SEQ ID NO: 1115952 - DNA, 15 bp, Homo sapiens
atggcaagaatgtgg

SEQ ID NO: 1115953 - DNA, 15 bp, Homo sapiens
gatggcaagaatgtg

SEQ ID NO: 1115954 - DNA, 15 bp, Homo sapiens
tgatggcaagaatgt

SEQ ID NO: 1115955 - DNA, 15 bp, Homo sapiens
gtgatggcaagaatg

SEQ ID NO: 1115956 - DNA, 15 bp, Homo sapiens
agtgatggcaagaat

SEQ ID NO: 1115957 - DNA, 15 bp, Homo sapiens
aagtgatggcaagaa

SEQ ID NO: 1115958 - DNA, 15 bp, Homo sapiens
caagtgatggcaaga

SEQ ID NO: 1115959 - DNA, 15 bp, Homo sapiens
tcaagtgatggcaag

SEQ ID NO: 1115960 - DNA, 15 bp, Homo sapiens
atcaagtgatggcaa

SEQ ID NO: 1115961 - DNA, 15 bp, Homo sapiens
catcaagtgatggca

SEQ ID NO: 1115962 - DNA, 15 bp, Homo sapiens
acatcaagtgatggc

SEQ ID NO: 1115963 - DNA, 15 bp, Homo sapiens
gacatcaagtgatgg

SEQ ID NO: 1115964 - DNA, 15 bp, Homo sapiens
tgacatcaagtgatg

SEQ ID NO: 1115965 - DNA, 15 bp, Homo sapiens
atgacatcaagtgat

SEQ ID NO: 1115966 - DNA, 15 bp, Homo sapiens
gatgacatcaagtga

SEQ ID NO: 1115967 - DNA, 15 bp, Homo sapiens
ggatgacatcaagtg

SEQ ID NO: 1115968 - DNA, 15 bp, Homo sapiens
aggatgacatcaagt

SEQ ID NO: 1115969 - DNA, 15 bp, Homo sapiens
aaggatgacatcaag

SEQ ID NO: 1115970 - DNA, 15 bp, Homo sapiens
gaaggatgacatcaa

SEQ ID NO: 1115971 - DNA, 15 bp, Homo sapiens
agaaggatgacatca

SEQ ID NO: 1115972 - DNA, 15 bp, Homo sapiens
aagaaggatgacatc

SEQ ID NO: 1115973 - DNA, 15 bp, Homo sapiens
aaagaaggatgacat

SEQ ID NO: 1115974 - DNA, 15 bp, Homo sapiens
aaaagaaggatgaca

SEQ ID NO: 1115975 - DNA, 15 bp, Homo sapiens
aaaaagaaggatgac

SEQ ID NO: 1115976 - DNA, 15 bp, Homo sapiens
aaaaaagaaggatga

SEQ ID NO: 1115977 - DNA, 15 bp, Homo sapiens
taaaaaagaaggatg

SEQ ID NO: 1115978 - DNA, 15 bp, Homo sapiens
ataaaaaagaaggat

SEQ ID NO: 1115979 - DNA, 15 bp, Homo sapiens
tataaaaaagaagga

SEQ ID NO: 1115980 - DNA, 15 bp, Homo sapiens
ttataaaaaagaagg

SEQ ID NO: 1115981 - DNA, 15 bp, Homo sapiens
attataaaaaagaag

SEQ ID NO: 1115982 - DNA, 15 bp, Homo sapiens
tattataaaaaagaa

SEQ ID NO: 1115983 - DNA, 15 bp, Homo sapiens
ttattataaaaaaga

SEQ ID NO: 1115984 - DNA, 15 bp, Homo sapiens
gttattataaaaaag

SEQ ID NO: 1115985 - DNA, 15 bp, Homo sapiens
ggttattataaaaaa

SEQ ID NO: 1115986 - DNA, 15 bp, Homo sapiens
tggttattataaaaa

SEQ ID NO: 1115987 - DNA, 15 bp, Homo sapiens
ctggttattataaaa

SEQ ID NO: 1115988 - DNA, 15 bp, Homo sapiens
tctggttattataaa

SEQ ID NO: 1115989 - DNA, 15 bp, Homo sapiens
gtctggttattataa

SEQ ID NO: 1115990 - DNA, 15 bp, Homo sapiens
agtctggttattata

SEQ ID NO: 1115991 - DNA, 15 bp, Homo sapiens
aagtctggttattat

SEQ ID NO: 1115992 - DNA, 15 bp, Homo sapiens
aaagtctggttatta

SEQ ID NO: 1115993 - DNA, 15 bp, Homo sapiens
caaagtctggttatt

SEQ ID NO: 1115994 - DNA, 15 bp, Homo sapiens
gcaaagtctggttat

SEQ ID NO: 1115995 - DNA, 15 bp, Homo sapiens
agcaaagtctggtta

SEQ ID NO: 1115996 - DNA, 15 bp, Homo sapiens
aagcaaagtctggtt

SEQ ID NO: 1115997 - DNA, 15 bp, Homo sapiens
gaagcaaagtctggt

SEQ ID NO: 1115998 - DNA, 15 bp, Homo sapiens
tgaagcaaagtctgg

SEQ ID NO: 1115999 - DNA, 15 bp, Homo sapiens
atgaagcaaagtctg

SEQ ID NO: 1116000 - DNA, 15 bp, Homo sapiens
catgaagcaaagtct

SEQ ID NO: 1116001 - DNA, 15 bp, Homo sapiens
acatgaagcaaagtc

SEQ ID NO: 1116002 - DNA, 15 bp, Homo sapiens
cacatgaagcaaagt

SEQ ID NO: 1116003 - DNA, 15 bp, Homo sapiens
acacatgaagcaaag

SEQ ID NO: 1116004 - DNA, 15 bp, Homo sapiens
aacacatgaagcaaa

SEQ ID NO: 1116005 - DNA, 15 bp, Homo sapiens
aaacacatgaagcaa

SEQ ID NO: 1116006 - DNA, 15 bp, Homo sapiens
aaaacacatgaagca

SEQ ID NO: 1116007 - DNA, 15 bp, Homo sapiens
caaaacacatgaagc

SEQ ID NO: 1116008 - DNA, 15 bp, Homo sapiens
ccaaaacacatgaag

SEQ ID NO: 1116009 - DNA, 15 bp, Homo sapiens
tccaaaacacatgaa

SEQ ID NO: 1116010 - DNA, 15 bp, Homo sapiens
ctccaaaacacatga

SEQ ID NO: 1116011 - DNA, 15 bp, Homo sapiens
cctccaaaacacatg

SEQ ID NO: 1116012 - DNA, 15 bp, Homo sapiens
gcctccaaaacacat

SEQ ID NO: 1116013 - DNA, 15 bp, Homo sapiens
agcctccaaaacaca

SEQ ID NO: 1116014 - DNA, 15 bp, Homo sapiens
gagcctccaaaacac

SEQ ID NO: 1116015 - DNA, 15 bp, Homo sapiens
agagcctccaaaaca

SEQ ID NO: 1116016 - DNA, 15 bp, Homo sapiens
aagagcctccaaaac

SEQ ID NO: 1116017 - DNA, 15 bp, Homo sapiens
aaagagcctccaaaa

SEQ ID NO: 1116018 - DNA, 15 bp, Homo sapiens
aaaagagcctccaaa

SEQ ID NO: 1116019 - DNA, 15 bp, Homo sapiens
aaaaagagcctccaa

SEQ ID NO: 1116020 - DNA, 15 bp, Homo sapiens
aaaaaagagcctcca

SEQ ID NO: 1116021 - DNA, 15 bp, Homo sapiens
aaaaaaagagcctcc

SEQ ID NO: 1116022 - DNA, 15 bp, Homo sapiens
taaaaaaagagcctc

SEQ ID NO: 1116023 - DNA, 15 bp, Homo sapiens
ctaaaaaaagagcct

SEQ ID NO: 1116024 - DNA, 15 bp, Homo sapiens
cctaaaaaaagagcc

SEQ ID NO: 1116025 - DNA, 15 bp, Homo sapiens
acctaaaaaaagagc

SEQ ID NO: 1116026 - DNA, 15 bp, Homo sapiens
cacctaaaaaaagag

SEQ ID NO: 1116027 - DNA, 15 bp, Homo sapiens
gcacctaaaaaaaga

SEQ ID NO: 1116028 - DNA, 15 bp, Homo sapiens
tgcacctaaaaaaag

SEQ ID NO: 1116029 - DNA, 15 bp, Homo sapiens
atgcacctaaaaaaa

SEQ ID NO: 1116030 - DNA, 15 bp, Homo sapiens
tatgcacctaaaaaa

SEQ ID NO: 1116031 - DNA, 15 bp, Homo sapiens
atatgcacctaaaaa

SEQ ID NO: 1116032 - DNA, 15 bp, Homo sapiens
tatatgcacctaaaa

SEQ ID NO: 1116033 - DNA, 15 bp, Homo sapiens
atatatgcacctaaa

SEQ ID NO: 1116034 - DNA, 15 bp, Homo sapiens
gatatatgcacctaa

SEQ ID NO: 1116035 - DNA, 15 bp, Homo sapiens
agatatatgcaccta

SEQ ID NO: 1116036 - DNA, 15 bp, Homo sapiens
gagatatatgcacct

SEQ ID NO: 1116037 - DNA, 15 bp, Homo sapiens
ggagatatatgcacc

SEQ ID NO: 1116038 - DNA, 15 bp, Homo sapiens
tggagatatatgcac

SEQ ID NO: 1116039 - DNA, 15 bp, Homo sapiens
atggagatatatgca

SEQ ID NO: 1116040 - DNA, 15 bp, Homo sapiens
tatggagatatatgc

SEQ ID NO: 1116041 - DNA, 15 bp, Homo sapiens
ttatggagatatatg

SEQ ID NO: 1116042 - DNA, 15 bp, Homo sapiens
tttatggagatatat

SEQ ID NO: 1116043 - DNA, 15 bp, Homo sapiens
atttatggagatata

SEQ ID NO: 1116044 - DNA, 15 bp, Homo sapiens
catttatggagatat

SEQ ID NO: 1116045 - DNA, 15 bp, Homo sapiens
acatttatggagata

SEQ ID NO: 1116046 - DNA, 15 bp, Homo sapiens
aacatttatggagat

SEQ ID NO: 1116047 - DNA, 15 bp, Homo sapiens
taacatttatggaga

SEQ ID NO: 1116048 - DNA, 15 bp, Homo sapiens
ataacatttatggag

SEQ ID NO: 1116049 - DNA, 15 bp, Homo sapiens
gataacatttatgga

SEQ ID NO: 1116050 - DNA, 15 bp, Homo sapiens
tgataacatttatgg

SEQ ID NO: 1116051 - DNA, 15 bp, Homo sapiens
gtgataacatttatg

SEQ ID NO: 1116052 - DNA, 15 bp, Homo sapiens
agtgataacatttat

SEQ ID NO: 1116053 - DNA, 15 bp, Homo sapiens
aagtgataacattta

SEQ ID NO: 1116054 - DNA, 15 bp, Homo sapiens
gaagtgataacattt

SEQ ID NO: 1116055 - DNA, 15 bp, Homo sapiens
tgaagtgataacatt

SEQ ID NO: 1116056 - DNA, 15 bp, Homo sapiens
gtgaagtgataacat

SEQ ID NO: 1116057 - DNA, 15 bp, Homo sapiens
cgtgaagtgataaca

SEQ ID NO: 1116058 - DNA, 15 bp, Homo sapiens
tcgtgaagtgataac

SEQ ID NO: 1116059 - DNA, 15 bp, Homo sapiens
atcgtgaagtgataa

SEQ ID NO: 1116060 - DNA, 15 bp, Homo sapiens
catcgtgaagtgata

SEQ ID NO: 1116061 - DNA, 15 bp, Homo sapiens
ccatcgtgaagtgat

SEQ ID NO: 1116062 - DNA, 15 bp, Homo sapiens
tccatcgtgaagtga

SEQ ID NO: 1116063 - DNA, 15 bp, Homo sapiens
atccatcgtgaagtg

SEQ ID NO: 1116064 - DNA, 15 bp, Homo sapiens
aatccatcgtgaagt

SEQ ID NO: 1116065 - DNA, 15 bp, Homo sapiens
caatccatcgtgaag

SEQ ID NO: 1116066 - DNA, 15 bp, Homo sapiens
tcaatccatcgtgaa

SEQ ID NO: 1116067 - DNA, 15 bp, Homo sapiens
gtcaatccatcgtga

SEQ ID NO: 1116068 - DNA, 15 bp, Homo sapiens
ggtcaatccatcgtg

SEQ ID NO: 1116069 - DNA, 15 bp, Homo sapiens
gggtcaatccatcgt

SEQ ID NO: 1116070 - DNA, 15 bp, Homo sapiens
agggtcaatccatcg

SEQ ID NO: 1116071 - DNA, 15 bp, Homo sapiens
aagggtcaatccatc

SEQ ID NO: 1116072 - DNA, 15 bp, Homo sapiens
aaagggtcaatccat

SEQ ID NO: 1116073 - DNA, 15 bp, Homo sapiens
aaaagggtcaatcca

SEQ ID NO: 1116074 - DNA, 15 bp, Homo sapiens
taaaagggtcaatcc

SEQ ID NO: 1116075 - DNA, 15 bp, Homo sapiens
ataaaagggtcaatc

SEQ ID NO: 1116076 - DNA, 15 bp, Homo sapiens
gataaaagggtcaat

SEQ ID NO: 1116077 - DNA, 15 bp, Homo sapiens
agataaaagggtcaa

SEQ ID NO: 1116078 - DNA, 15 bp, Homo sapiens
aagataaaagggtca

SEQ ID NO: 1116079 - DNA, 15 bp, Homo sapiens
aaagataaaagggtc

SEQ ID NO: 1116080 - DNA, 15 bp, Homo sapiens
taaagataaaagggt

SEQ ID NO: 1116081 - DNA, 15 bp, Homo sapiens
gtaaagataaaaggg

SEQ ID NO: 1116082 - DNA, 15 bp, Homo sapiens
tgtaaagataaaagg

SEQ ID NO: 1116083 - DNA, 15 bp, Homo sapiens
ttgtaaagataaaag

SEQ ID NO: 1116084 - DNA, 15 bp, Homo sapiens
tttgtaaagataaaa

SEQ ID NO: 1116085 - DNA, 15 bp, Homo sapiens
ttttgtaaagataaa

SEQ ID NO: 1116086 - DNA, 15 bp, Homo sapiens
attttgtaaagataa

SEQ ID NO: 1116087 - DNA, 15 bp, Homo sapiens
cattttgtaaagata

SEQ ID NO: 1116088 - DNA, 15 bp, Homo sapiens
tcattttgtaaagat

SEQ ID NO: 1116089 - DNA, 15 bp, Homo sapiens
atcattttgtaaaga

SEQ ID NO: 1116090 - DNA, 15 bp, Homo sapiens
aatcattttgtaaag

SEQ ID NO: 1116091 - DNA, 15 bp, Homo sapiens
aaatcattttgtaaa

SEQ ID NO: 1116092 - DNA, 15 bp, Homo sapiens
aaaatcattttgtaa

SEQ ID NO: 1116093 - DNA, 15 bp, Homo sapiens
aaaaatcattttgta

SEQ ID NO: 1116094 - DNA, 15 bp, Homo sapiens
taaaaatcattttgt

SEQ ID NO: 1116095 - DNA, 15 bp, Homo sapiens
ataaaaatcattttg

SEQ ID NO: 1116096 - DNA, 15 bp, Homo sapiens
gataaaaatcatttt

SEQ ID NO: 1116097 - DNA, 15 bp, Homo sapiens
agataaaaatcattt

SEQ ID NO: 1116098 - DNA, 15 bp, Homo sapiens
gagataaaaatcatt

SEQ ID NO: 1116099 - DNA, 15 bp, Homo sapiens
agagataaaaatcat

SEQ ID NO: 1116100 - DNA, 15 bp, Homo sapiens
tagagataaaaatca

SEQ ID NO: 1116101 - DNA, 15 bp, Homo sapiens
ctagagataaaaatc

SEQ ID NO: 1116102 - DNA, 15 bp, Homo sapiens
actagagataaaaat

SEQ ID NO: 1116103 - DNA, 15 bp, Homo sapiens
tactagagataaaaa

SEQ ID NO: 1116104 - DNA, 15 bp, Homo sapiens
ttactagagataaaa

SEQ ID NO: 1116105 - DNA, 15 bp, Homo sapiens
gttactagagataaa

SEQ ID NO: 1116106 - DNA, 15 bp, Homo sapiens
tgttactagagataa

SEQ ID NO: 1116107 - DNA, 15 bp, Homo sapiens
ttgttactagagata

SEQ ID NO: 1116108 - DNA, 15 bp, Homo sapiens
cttgttactagagat

SEQ ID NO: 1116109 - DNA, 15 bp, Homo sapiens
acttgttactagaga

SEQ ID NO: 1116110 - DNA, 15 bp, Homo sapiens
aacttgttactagag

SEQ ID NO: 1116111 - DNA, 15 bp, Homo sapiens
aaacttgttactaga

SEQ ID NO: 1116112 - DNA, 15 bp, Homo sapiens
aaaacttgttactag

SEQ ID NO: 1116113 - DNA, 15 bp, Homo sapiens
aaaaacttgttacta

SEQ ID NO: 1116114 - DNA, 15 bp, Homo sapiens
taaaaacttgttact

SEQ ID NO: 1116115 - DNA, 15 bp, Homo sapiens
ttaaaaacttgttac

SEQ ID NO: 1116116 - DNA, 15 bp, Homo sapiens
tttaaaaacttgtta

SEQ ID NO: 1116117 - DNA, 15 bp, Homo sapiens
ctttaaaaacttgtt

SEQ ID NO: 1116118 - DNA, 15 bp, Homo sapiens
actttaaaaacttgt

SEQ ID NO: 1116119 - DNA, 15 bp, Homo sapiens
gactttaaaaacttg

SEQ ID NO: 1116120 - DNA, 15 bp, Homo sapiens
ggactttaaaaactt

SEQ ID NO: 1116121 - DNA, 15 bp, Homo sapiens
tggactttaaaaact

SEQ ID NO: 1116122 - DNA, 15 bp, Homo sapiens
atggactttaaaaac

SEQ ID NO: 1116123 - DNA, 15 bp, Homo sapiens
aatggactttaaaaa

SEQ ID NO: 1116124 - DNA, 15 bp, Homo sapiens
aaatggactttaaaa

SEQ ID NO: 1116125 - DNA, 15 bp, Homo sapiens
aaaatggactttaaa

SEQ ID NO: 1116126 - DNA, 15 bp, Homo sapiens
caaaatggactttaa

SEQ ID NO: 1116127 - DNA, 15 bp, Homo sapiens
acaaaatggacttta

SEQ ID NO: 1116128 - DNA, 15 bp, Homo sapiens
gacaaaatggacttt

SEQ ID NO: 1116129 - DNA, 15 bp, Homo sapiens
agacaaaatggactt

SEQ ID NO: 1116130 - DNA, 15 bp, Homo sapiens
cagacaaaatggact

SEQ ID NO: 1116131 - DNA, 15 bp, Homo sapiens
tcagacaaaatggac

SEQ ID NO: 1116132 - DNA, 15 bp, Homo sapiens
atcagacaaaatgga

SEQ ID NO: 1116133 - DNA, 15 bp, Homo sapiens
tatcagacaaaatgg

SEQ ID NO: 1116134 - DNA, 15 bp, Homo sapiens
atatcagacaaaatg

SEQ ID NO: 1116135 - DNA, 15 bp, Homo sapiens
aatatcagacaaaat

SEQ ID NO: 1116136 - DNA, 15 bp, Homo sapiens
taatatcagacaaaa

SEQ ID NO: 1116137 - DNA, 15 bp, Homo sapiens
ctaatatcagacaaa

SEQ ID NO: 1116138 - DNA, 15 bp, Homo sapiens
actaatatcagacaa

SEQ ID NO: 1116139 - DNA, 15 bp, Homo sapiens
tactaatatcagaca

SEQ ID NO: 1116140 - DNA, 15 bp, Homo sapiens
atactaatatcagac

SEQ ID NO: 1116141 - DNA, 15 bp, Homo sapiens
tatactaatatcaga

SEQ ID NO: 1116142 - DNA, 15 bp, Homo sapiens
ctatactaatatcag

SEQ ID NO: 1116143 - DNA, 15 bp, Homo sapiens
gctatactaatatca

SEQ ID NO: 1116144 - DNA, 15 bp, Homo sapiens
ggctatactaatatc

SEQ ID NO: 1116145 - DNA, 15 bp, Homo sapiens
tggctatactaatat

SEQ ID NO: 1116146 - DNA, 15 bp, Homo sapiens
gtggctatactaata

SEQ ID NO: 1116147 - DNA, 15 bp, Homo sapiens
agtggctatactaat

SEQ ID NO: 1116148 - DNA, 15 bp, Homo sapiens
gagtggctatactaa

SEQ ID NO: 1116149 - DNA, 15 bp, Homo sapiens
ggagtggctatacta

SEQ ID NO: 1116150 - DNA, 15 bp, Homo sapiens
aggagtggctatact

SEQ ID NO: 1116151 - DNA, 15 bp, Homo sapiens
caggagtggctatac

SEQ ID NO: 1116152 - DNA, 15 bp, Homo sapiens
ccaggagtggctata

SEQ ID NO: 1116153 - DNA, 15 bp, Homo sapiens
cccaggagtggctat

SEQ ID NO: 1116154 - DNA, 15 bp, Homo sapiens
acccaggagtggcta

SEQ ID NO: 1116155 - DNA, 15 bp, Homo sapiens
aacccaggagtggct

SEQ ID NO: 1116156 - DNA, 15 bp, Homo sapiens
gaacccaggagtggc

SEQ ID NO: 1116157 - DNA, 15 bp, Homo sapiens
agaacccaggagtgg

SEQ ID NO: 1116158 - DNA, 15 bp, Homo sapiens
aagaacccaggagtg

SEQ ID NO: 1116159 - DNA, 15 bp, Homo sapiens
taagaacccaggagt

SEQ ID NO: 1116160 - DNA, 15 bp, Homo sapiens
gtaagaacccaggag

SEQ ID NO: 1116161 - DNA, 15 bp, Homo sapiens
cgtaagaacccagga

SEQ ID NO: 1116162 - DNA, 15 bp, Homo sapiens
ccgtaagaacccagg

SEQ ID NO: 1116163 - DNA, 15 bp, Homo sapiens
accgtaagaacccag

SEQ ID NO: 1116164 - DNA, 15 bp, Homo sapiens
aaccgtaagaaccca

SEQ ID NO: 1116165 - DNA, 15 bp, Homo sapiens
caaccgtaagaaccc

SEQ ID NO: 1116166 - DNA, 15 bp, Homo sapiens
gcaaccgtaagaacc

SEQ ID NO: 1116167 - DNA, 15 bp, Homo sapiens
agcaaccgtaagaac

SEQ ID NO: 1116168 - DNA, 15 bp, Homo sapiens
aagcaaccgtaagaa

SEQ ID NO: 1116169 - DNA, 15 bp, Homo sapiens
aaagcaaccgtaaga

SEQ ID NO: 1116170 - DNA, 15 bp, Homo sapiens
aaaagcaaccgtaag

SEQ ID NO: 1116171 - DNA, 15 bp, Homo sapiens
aaaaagcaaccgtaa

SEQ ID NO: 1116172 - DNA, 15 bp, Homo sapiens
caaaaagcaaccgta

SEQ ID NO: 1116173 - DNA, 15 bp, Homo sapiens
tcaaaaagcaaccgt

SEQ ID NO: 1116174 - DNA, 15 bp, Homo sapiens
ttcaaaaagcaaccg

SEQ ID NO: 1116175 - DNA, 15 bp, Homo sapiens
tttcaaaaagcaacc

SEQ ID NO: 1116176 - DNA, 15 bp, Homo sapiens
atttcaaaaagcaac

SEQ ID NO: 1116177 - DNA, 15 bp, Homo sapiens
catttcaaaaagcaa

SEQ ID NO: 1116178 - DNA, 15 bp, Homo sapiens
tcatttcaaaaagca

SEQ ID NO: 1116179 - DNA, 15 bp, Homo sapiens
atcatttcaaaaagc

SEQ ID NO: 1116180 - DNA, 15 bp, Homo sapiens
aatcatttcaaaaag

SEQ ID NO: 1116181 - DNA, 15 bp, Homo sapiens
aaatcatttcaaaaa

SEQ ID NO: 1116182 - DNA, 15 bp, Homo sapiens
aaaatcatttcaaaa

SEQ ID NO: 1116183 - DNA, 15 bp, Homo sapiens
caaaatcatttcaaa

SEQ ID NO: 1116184 - DNA, 15 bp, Homo sapiens
acaaaatcatttcaa

SEQ ID NO: 1116185 - DNA, 15 bp, Homo sapiens
aacaaaatcatttca

SEQ ID NO: 1116186 - DNA, 15 bp, Homo sapiens
aaacaaaatcatttc

SEQ ID NO: 1116187 - DNA, 15 bp, Homo sapiens
aaaaacaaaatcatt

SEQ ID NO: 1116188 - DNA, 15 bp, Homo sapiens
gaaaaacaaaatcat

SEQ ID NO: 1116189 - DNA, 15 bp, Homo sapiens
agaaaaacaaaatca

SEQ ID NO: 1116190 - DNA, 15 bp, Homo sapiens
tagaaaaacaaaatc

SEQ ID NO: 1116191 - DNA, 15 bp, Homo sapiens
atagaaaaacaaaat

SEQ ID NO: 1116192 - DNA, 15 bp, Homo sapiens
gatagaaaaacaaaa

SEQ ID NO: 1116193 - DNA, 15 bp, Homo sapiens
agatagaaaaacaaa

SEQ ID NO: 1116194 - DNA, 15 bp, Homo sapiens
aagatagaaaaacaa

SEQ ID NO: 1116195 - DNA, 15 bp, Homo sapiens
aaagatagaaaaaca

SEQ ID NO: 1116196 - DNA, 15 bp, Homo sapiens
aaaagatagaaaaac

SEQ ID NO: 1116197 - DNA, 15 bp, Homo sapiens
aaaaagatagaaaaa

SEQ ID NO: 1116198 - DNA, 15 bp, Homo sapiens
caaaaagatagaaaa

SEQ ID NO: 1116199 - DNA, 15 bp, Homo sapiens
acaaaaagatagaaa

SEQ ID NO: 1116200 - DNA, 15 bp, Homo sapiens
aacaaaaagatagaa

SEQ ID NO: 1116201 - DNA, 15 bp, Homo sapiens
aaacaaaaagataga

SEQ ID NO: 1116202 - DNA, 15 bp, Homo sapiens
gaaacaaaaagatag

SEQ ID NO: 1116203 - DNA, 15 bp, Homo sapiens
tgaaacaaaaagata

SEQ ID NO: 1116204 - DNA, 15 bp, Homo sapiens
ttgaaacaaaaagat

SEQ ID NO: 1116205 - DNA, 15 bp, Homo sapiens
gttgaaacaaaaaga

SEQ ID NO: 1116206 - DNA, 15 bp, Homo sapiens
ggttgaaacaaaaag

SEQ ID NO: 1116207 - DNA, 15 bp, Homo sapiens
aggttgaaacaaaaa

SEQ ID NO: 1116208 - DNA, 15 bp, Homo sapiens
caggttgaaacaaaa

SEQ ID NO: 1116209 - DNA, 15 bp, Homo sapiens
acaggttgaaacaaa

SEQ ID NO: 1116210 - DNA, 15 bp, Homo sapiens
aacaggttgaaacaa

SEQ ID NO: 1116211 - DNA, 15 bp, Homo sapiens
aaacaggttgaaaca

SEQ ID NO: 1116212 - DNA, 15 bp, Homo sapiens
caaacaggttgaaac

SEQ ID NO: 1116213 - DNA, 15 bp, Homo sapiens
acaaacaggttgaaa

SEQ ID NO: 1116214 - DNA, 15 bp, Homo sapiens
tacaaacaggttgaa

SEQ ID NO: 1116215 - DNA, 15 bp, Homo sapiens
atacaaacaggttga

SEQ ID NO: 1116216 - DNA, 15 bp, Homo sapiens
gatacaaacaggttg

SEQ ID NO: 1116217 - DNA, 15 bp, Homo sapiens
agatacaaacaggtt

SEQ ID NO: 1116218 - DNA, 15 bp, Homo sapiens
aagatacaaacaggt

SEQ ID NO: 1116219 - DNA, 15 bp, Homo sapiens
aaagatacaaacagg

SEQ ID NO: 1116220 - DNA, 15 bp, Homo sapiens
caaagatacaaacag

SEQ ID NO: 1116221 - DNA, 15 bp, Homo sapiens
ccaaagatacaaaca

SEQ ID NO: 1116222 - DNA, 15 bp, Homo sapiens
tccaaagatacaaac

SEQ ID NO: 1116223 - DNA, 15 bp, Homo sapiens
atccaaagatacaaa

SEQ ID NO: 1116224 - DNA, 15 bp, Homo sapiens
gatccaaagatacaa

SEQ ID NO: 1116225 - DNA, 15 bp, Homo sapiens
agatccaaagataca

SEQ ID NO: 1116226 - DNA, 15 bp, Homo sapiens
tagatccaaagatac

SEQ ID NO: 1116227 - DNA, 15 bp, Homo sapiens
ttagatccaaagata

SEQ ID NO: 1116228 - DNA, 15 bp, Homo sapiens
tttagatccaaagat

SEQ ID NO: 1116229 - DNA, 15 bp, Homo sapiens
ctttagatccaaaga

SEQ ID NO: 1116230 - DNA, 15 bp, Homo sapiens
actttagatccaaag

SEQ ID NO: 1116231 - DNA, 15 bp, Homo sapiens
cactttagatccaaa

SEQ ID NO: 1116232 - DNA, 15 bp, Homo sapiens
acactttagatccaa

SEQ ID NO: 1116233 - DNA, 15 bp, Homo sapiens
cacactttagatcca

SEQ ID NO: 1116234 - DNA, 15 bp, Homo sapiens
acacactttagatcc

SEQ ID NO: 1116235 - DNA, 15 bp, Homo sapiens
gacacactttagatc

SEQ ID NO: 1116236 - DNA, 15 bp, Homo sapiens
agacacactttagat

SEQ ID NO: 1116237 - DNA, 15 bp, Homo sapiens
gagacacactttaga

SEQ ID NO: 1116238 - DNA, 15 bp, Homo sapiens
ggagacacactttag

SEQ ID NO: 1116239 - DNA, 15 bp, Homo sapiens
aggagacacacttta

SEQ ID NO: 1116240 - DNA, 15 bp, Homo sapiens
caggagacacacttt

SEQ ID NO: 1116241 - DNA, 15 bp, Homo sapiens
tacaggagacacact

SEQ ID NO: 1116242 - DNA, 15 bp, Homo sapiens
ctacaggagacacac

SEQ ID NO: 1116243 - DNA, 15 bp, Homo sapiens
tctacaggagacaca

SEQ ID NO: 1116244 - DNA, 15 bp, Homo sapiens
gtctacaggagacac

SEQ ID NO: 1116245 - DNA, 15 bp, Homo sapiens
tgtctacaggagaca

SEQ ID NO: 1116246 - DNA, 15 bp, Homo sapiens
ctgtctacaggagac

SEQ ID NO: 1116247 - DNA, 15 bp, Homo sapiens
actgtctacaggaga

SEQ ID NO: 1116248 - DNA, 15 bp, Homo sapiens
tactgtctacaggag

SEQ ID NO: 1116249 - DNA, 15 bp, Homo sapiens
gtactgtctacagga

SEQ ID NO: 1116250 - DNA, 15 bp, Homo sapiens
tgtactgtctacagg

SEQ ID NO: 1116251 - DNA, 15 bp, Homo sapiens
atgtactgtctacag

SEQ ID NO: 1116252 - DNA, 15 bp, Homo sapiens
tatgtactgtctaca

SEQ ID NO: 1116253 - DNA, 15 bp, Homo sapiens
ctatgtactgtctac

SEQ ID NO: 1116254 - DNA, 15 bp, Homo sapiens
actatgtactgtcta

SEQ ID NO: 1116255 - DNA, 15 bp, Homo sapiens
aactatgtactgtct

SEQ ID NO: 1116256 - DNA, 15 bp, Homo sapiens
caactatgtactgtc

SEQ ID NO: 1116257 - DNA, 15 bp, Homo sapiens
ccaactatgtactgt

SEQ ID NO: 1116258 - DNA, 15 bp, Homo sapiens
tccaactatgtactg

SEQ ID NO: 1116259 - DNA, 15 bp, Homo sapiens
atccaactatgtact

SEQ ID NO: 1116260 - DNA, 15 bp, Homo sapiens
gatccaactatgtac

SEQ ID NO: 1116261 - DNA, 15 bp, Homo sapiens
agatccaactatgta

SEQ ID NO: 1116262 - DNA, 15 bp, Homo sapiens
aagatccaactatgt

SEQ ID NO: 1116263 - DNA, 15 bp, Homo sapiens
caagatccaactatg

SEQ ID NO: 1116264 - DNA, 15 bp, Homo sapiens
acaagatccaactat

SEQ ID NO: 1116265 - DNA, 15 bp, Homo sapiens
aacaagatccaacta

SEQ ID NO: 1116266 - DNA, 15 bp, Homo sapiens
aaacaagatccaact

SEQ ID NO: 1116267 - DNA, 15 bp, Homo sapiens
aaaacaagatccaac

SEQ ID NO: 1116268 - DNA, 15 bp, Homo sapiens
taaaacaagatccaa

SEQ ID NO: 1116269 - DNA, 15 bp, Homo sapiens
ataaaacaagatcca

SEQ ID NO: 1116270 - DNA, 15 bp, Homo sapiens
aataaaacaagatcc

SEQ ID NO: 1116271 - DNA, 15 bp, Homo sapiens
aaataaaacaagatc

SEQ ID NO: 1116272 - DNA, 15 bp, Homo sapiens
taaataaaacaagat

SEQ ID NO: 1116273 - DNA, 15 bp, Homo sapiens
ttaaataaaacaaga

SEQ ID NO: 1116274 - DNA, 15 bp, Homo sapiens
attaaataaaacaag

SEQ ID NO: 1116275 - DNA, 15 bp, Homo sapiens
gcattaaataaaaca

SEQ ID NO: 1116276 - DNA, 15 bp, Homo sapiens
tgcattaaataaaac

SEQ ID NO: 1116277 - DNA, 15 bp, Homo sapiens
ttgcattaaataaaa

SEQ ID NO: 1116278 - DNA, 15 bp, Homo sapiens
attgcattaaataaa

SEQ ID NO: 1116279 - DNA, 15 bp, Homo sapiens
gattgcattaaataa

SEQ ID NO: 1116280 - DNA, 15 bp, Homo sapiens
agattgcattaaata

SEQ ID NO: 1116281 - DNA, 15 bp, Homo sapiens
cagattgcattaaat

SEQ ID NO: 1116282 - DNA, 15 bp, Homo sapiens
tcagattgcattaaa

SEQ ID NO: 1116283 - DNA, 15 bp, Homo sapiens
gtcagattgcattaa

SEQ ID NO: 1116284 - DNA, 15 bp, Homo sapiens
tgtcagattgcatta

SEQ ID NO: 1116285 - DNA, 15 bp, Homo sapiens
ttgtcagattgcatt

SEQ ID NO: 1116286 - DNA, 15 bp, Homo sapiens
attgtcagattgcat

SEQ ID NO: 1116287 - DNA, 15 bp, Homo sapiens
gattgtcagattgca

SEQ ID NO: 1116288 - DNA, 15 bp, Homo sapiens
agattgtcagattgc

SEQ ID NO: 1116289 - DNA, 15 bp, Homo sapiens
gagattgtcagattg

SEQ ID NO: 1116290 - DNA, 15 bp, Homo sapiens
agagattgtcagatt

SEQ ID NO: 1116291 - DNA, 15 bp, Homo sapiens
cagagattgtcagat

SEQ ID NO: 1116292 - DNA, 15 bp, Homo sapiens
acagagattgtcaga

SEQ ID NO: 1116293 - DNA, 15 bp, Homo sapiens
gacagagattgtcag

SEQ ID NO: 1116294 - DNA, 15 bp, Homo sapiens
agacagagattgtca

SEQ ID NO: 1116295 - DNA, 15 bp, Homo sapiens
aagacagagattgtc

SEQ ID NO: 1116296 - DNA, 15 bp, Homo sapiens
aaagacagagattgt

SEQ ID NO: 1116297 - DNA, 15 bp, Homo sapiens
aaaagacagagattg

SEQ ID NO: 1116298 - DNA, 15 bp, Homo sapiens
caaaagacagagatt

SEQ ID NO: 1116299 - DNA, 15 bp, Homo sapiens
tcaaaagacagagat

SEQ ID NO: 1116300 - DNA, 15 bp, Homo sapiens
atcaaaagacagaga

SEQ ID NO: 1116301 - DNA, 15 bp, Homo sapiens
aatcaaaagacagag

SEQ ID NO: 1116302 - DNA, 15 bp, Homo sapiens
caatcaaaagacaga

SEQ ID NO: 1116303 - DNA, 15 bp, Homo sapiens
acaatcaaaagacag

SEQ ID NO: 1116304 - DNA, 15 bp, Homo sapiens
tacaatcaaaagaca

SEQ ID NO: 1116305 - DNA, 15 bp, Homo sapiens
atacaatcaaaagac

SEQ ID NO: 1116306 - DNA, 15 bp, Homo sapiens
aatacaatcaaaaga

SEQ ID NO: 1116307 - DNA, 15 bp, Homo sapiens
caatacaatcaaaag

SEQ ID NO: 1116308 - DNA, 15 bp, Homo sapiens
acaatacaatcaaaa

SEQ ID NO: 1116309 - DNA, 15 bp, Homo sapiens
aacaatacaatcaaa

SEQ ID NO: 1116310 - DNA, 15 bp, Homo sapiens
aaacaatacaatcaa

SEQ ID NO: 1116311 - DNA, 15 bp, Homo sapiens
taaacaatacaatca

SEQ ID NO: 1116312 - DNA, 15 bp, Homo sapiens
ttaaacaatacaatc

SEQ ID NO: 1116313 - DNA, 15 bp, Homo sapiens
attaaacaatacaat

SEQ ID NO: 1116314 - DNA, 15 bp, Homo sapiens
gattaaacaatacaa

SEQ ID NO: 1116315 - DNA, 15 bp, Homo sapiens
ggattaaacaataca

SEQ ID NO: 1116316 - DNA, 15 bp, Homo sapiens
tggattaaacaatac

SEQ ID NO: 1116317 - DNA, 15 bp, Homo sapiens
atggattaaacaata

SEQ ID NO: 1116318 - DNA, 15 bp, Homo sapiens
aatggattaaacaat

SEQ ID NO: 1116319 - DNA, 15 bp, Homo sapiens
taatggattaaacaa

SEQ ID NO: 1116320 - DNA, 15 bp, Homo sapiens
ataatggattaaaca

SEQ ID NO: 1116321 - DNA, 15 bp, Homo sapiens
tataatggattaaac

SEQ ID NO: 1116322 - DNA, 15 bp, Homo sapiens
atataatggattaaa

SEQ ID NO: 1116323 - DNA, 15 bp, Homo sapiens
catataatggattaa

SEQ ID NO: 1116324 - DNA, 15 bp, Homo sapiens
acatataatggatta

SEQ ID NO: 1116325 - DNA, 15 bp, Homo sapiens
tacatataatggatt

SEQ ID NO: 1116326 - DNA, 15 bp, Homo sapiens
ttacatataatggat

SEQ ID NO: 1116327 - DNA, 15 bp, Homo sapiens
tttacatataatgga

SEQ ID NO: 1116328 - DNA, 15 bp, Homo sapiens
ttttacatataatgg

SEQ ID NO: 1116329 - DNA, 15 bp, Homo sapiens
gttttacatataatg

SEQ ID NO: 1116330 - DNA, 15 bp, Homo sapiens
tgttttacatataat

SEQ ID NO: 1116331 - DNA, 15 bp, Homo sapiens
ttgttttacatataa

SEQ ID NO: 1116332 - DNA, 15 bp, Homo sapiens
tttgttttacatata

SEQ ID NO: 1116333 - DNA, 15 bp, Homo sapiens
gtttgttttacatat

SEQ ID NO: 1116334 - DNA, 15 bp, Homo sapiens
tgtttgttttacata

SEQ ID NO: 1116335 - DNA, 15 bp, Homo sapiens
atgtttgttttacat

SEQ ID NO: 1116336 - DNA, 15 bp, Homo sapiens
tatgtttgttttaca

SEQ ID NO: 1116337 - DNA, 15 bp, Homo sapiens
ttatgtttgttttac

SEQ ID NO: 1116338 - DNA, 15 bp, Homo sapiens
gttatgtttgtttta

SEQ ID NO: 1116339 - DNA, 15 bp, Homo sapiens
tgttatgtttgtttt

SEQ ID NO: 1116340 - DNA, 15 bp, Homo sapiens
atgttatgtttgttt

SEQ ID NO: 1116341 - DNA, 15 bp, Homo sapiens
gatgttatgtttgtt

SEQ ID NO: 1116342 - DNA, 15 bp, Homo sapiens
ggatgttatgtttgt

SEQ ID NO: 1116343 - DNA, 15 bp, Homo sapiens
aggatgttatgtttg

SEQ ID NO: 1116344 - DNA, 15 bp, Homo sapiens
caggatgttatgttt

SEQ ID NO: 1116345 - DNA, 15 bp, Homo sapiens
tcaggatgttatgtt

SEQ ID NO: 1116346 - DNA, 15 bp, Homo sapiens
ttcaggatgttatgt

SEQ ID NO: 1116347 - DNA, 15 bp, Homo sapiens
tttcaggatgttatg

SEQ ID NO: 1116348 - DNA, 15 bp, Homo sapiens
ttttcaggatgttat

SEQ ID NO: 1116349 - DNA, 15 bp, Homo sapiens
cttttcaggatgtta

SEQ ID NO: 1116350 - DNA, 15 bp, Homo sapiens
acttttcaggatgtt

SEQ ID NO: 1116351 - DNA, 15 bp, Homo sapiens
cacttttcaggatgt

SEQ ID NO: 1116352 - DNA, 15 bp, Homo sapiens
ccacttttcaggatg

SEQ ID NO: 1116353 - DNA, 15 bp, Homo sapiens
cccacttttcaggat

SEQ ID NO: 1116354 - DNA, 15 bp, Homo sapiens
ccccacttttcagga

SEQ ID NO: 1116355 - DNA, 15 bp, Homo sapiens
cccccacttttcagg

SEQ ID NO: 1116356 - DNA, 15 bp, Homo sapiens
ccccccacttttcag

SEQ ID NO: 1116357 - DNA, 15 bp, Homo sapiens
tccccccacttttca

SEQ ID NO: 1116358 - DNA, 15 bp, Homo sapiens
ttccccccacttttc

SEQ ID NO: 1116359 - DNA, 15 bp, Homo sapiens
tttccccccactttt

SEQ ID NO: 1116360 - DNA, 15 bp, Homo sapiens
ttttccccccacttt

SEQ ID NO: 1116361 - DNA, 15 bp, Homo sapiens
tttttccccccactt

SEQ ID NO: 1116362 - DNA, 15 bp, Homo sapiens
ctttttccccccact

SEQ ID NO: 1116363 - DNA, 15 bp, Homo sapiens
actttttccccccac

SEQ ID NO: 1116364 - DNA, 15 bp, Homo sapiens
gactttttcccccca

SEQ ID NO: 1116365 - DNA, 15 bp, Homo sapiens
tgactttttcccccc

SEQ ID NO: 1116366 - DNA, 15 bp, Homo sapiens
ttgactttttccccc

SEQ ID NO: 1116367 - DNA, 15 bp, Homo sapiens
gttgactttttcccc

SEQ ID NO: 1116368 - DNA, 15 bp, Homo sapiens
agttgactttttccc

SEQ ID NO: 1116369 - DNA, 15 bp, Homo sapiens
cagttgactttttcc

SEQ ID NO: 1116370 - DNA, 15 bp, Homo sapiens
ccagttgactttttc

SEQ ID NO: 1116371 - DNA, 15 bp, Homo sapiens
gccagttgacttttt

SEQ ID NO: 1116372 - DNA, 15 bp, Homo sapiens
agccagttgactttt

SEQ ID NO: 1116373 - DNA, 15 bp, Homo sapiens
tagccagttgacttt

SEQ ID NO: 1116374 - DNA, 15 bp, Homo sapiens
ctagccagttgactt

SEQ ID NO: 1116375 - DNA, 15 bp, Homo sapiens
tctagccagttgact

SEQ ID NO: 1116376 - DNA, 15 bp, Homo sapiens
ctctagccagttgac

SEQ ID NO: 1116377 - DNA, 15 bp, Homo sapiens
gctctagccagttga

SEQ ID NO: 1116378 - DNA, 15 bp, Homo sapiens
ggctctagccagttg

SEQ ID NO: 1116379 - DNA, 15 bp, Homo sapiens
gggctctagccagtt

SEQ ID NO: 1116380 - DNA, 15 bp, Homo sapiens
agggctctagccagt

SEQ ID NO: 1116381 - DNA, 15 bp, Homo sapiens
gagggctctagccag

SEQ ID NO: 1116382 - DNA, 15 bp, Homo sapiens
tgagggctctagcca

SEQ ID NO: 1116383 - DNA, 15 bp, Homo sapiens
ctgagggctctagcc

SEQ ID NO: 1116384 - DNA, 15 bp, Homo sapiens
cctgagggctctagc

SEQ ID NO: 1116385 - DNA, 15 bp, Homo sapiens
tcctgagggctctag

SEQ ID NO: 1116386 - DNA, 15 bp, Homo sapiens
ctcctgagggctcta

SEQ ID NO: 1116387 - DNA, 15 bp, Homo sapiens
gctcctgagggctct

SEQ ID NO: 1116388 - DNA, 15 bp, Homo sapiens
ggctcctgagggctc

SEQ ID NO: 1116389 - DNA, 15 bp, Homo sapiens
tggctcctgagggct

SEQ ID NO: 1116390 - DNA, 15 bp, Homo sapiens
ttggctcctgagggc

SEQ ID NO: 1116391 - DNA, 15 bp, Homo sapiens
cttggctcctgaggg

SEQ ID NO: 1116392 - DNA, 15 bp, Homo sapiens
acttggctcctgagg

SEQ ID NO: 1116393 - DNA, 15 bp, Homo sapiens
tacttggctcctgag

SEQ ID NO: 1116394 - DNA, 15 bp, Homo sapiens
ttacttggctcctga

SEQ ID NO: 1116395 - DNA, 15 bp, Homo sapiens
attacttggctcctg

SEQ ID NO: 1116396 - DNA, 15 bp, Homo sapiens
tattacttggctcct

SEQ ID NO: 1116397 - DNA, 15 bp, Homo sapiens
ttattacttggctcc

SEQ ID NO: 1116398 - DNA, 15 bp, Homo sapiens
gttattacttggctc

SEQ ID NO: 1116399 - DNA, 15 bp, Homo sapiens
tgttattacttggct

SEQ ID NO: 1116400 - DNA, 15 bp, Homo sapiens
atgttattacttggc

SEQ ID NO: 1116401 - DNA, 15 bp, Homo sapiens
catgttattacttgg

SEQ ID NO: 1116402 - DNA, 15 bp, Homo sapiens
acatgttattacttg

SEQ ID NO: 1116403 - DNA, 15 bp, Homo sapiens
aacatgttattactt

SEQ ID NO: 1116404 - DNA, 15 bp, Homo sapiens
caacatgttattact

SEQ ID NO: 1116405 - DNA, 15 bp, Homo sapiens
tcaacatgttattac

SEQ ID NO: 1116406 - DNA, 15 bp, Homo sapiens
atcaacatgttatta

SEQ ID NO: 1116407 - DNA, 15 bp, Homo sapiens
tatcaacatgttatt

SEQ ID NO: 1116408 - DNA, 15 bp, Homo sapiens
ttatcaacatgttat

SEQ ID NO: 1116409 - DNA, 15 bp, Homo sapiens
cttatcaacatgtta

SEQ ID NO: 1116410 - DNA, 15 bp, Homo sapiens
acttatcaacatgtt

SEQ ID NO: 1116411 - DNA, 15 bp, Homo sapiens
aacttatcaacatgt

SEQ ID NO: 1116412 - DNA, 15 bp, Homo sapiens
gaacttatcaacatg

SEQ ID NO: 1116413 - DNA, 15 bp, Homo sapiens
ggaacttatcaacat

SEQ ID NO: 1116414 - DNA, 15 bp, Homo sapiens
gggaacttatcaaca

SEQ ID NO: 1116415 - DNA, 15 bp, Homo sapiens
agggaacttatcaac

SEQ ID NO: 1116416 - DNA, 15 bp, Homo sapiens
cagggaacttatcaa

SEQ ID NO: 1116417 - DNA, 15 bp, Homo sapiens
ccagggaacttatca

SEQ ID NO: 1116418 - DNA, 15 bp, Homo sapiens
cccagggaacttatc

SEQ ID NO: 1116419 - DNA, 15 bp, Homo sapiens
acccagggaacttat

SEQ ID NO: 1116420 - DNA, 15 bp, Homo sapiens
tacccagggaactta

SEQ ID NO: 1116421 - DNA, 15 bp, Homo sapiens
atacccagggaactt

SEQ ID NO: 1116422 - DNA, 15 bp, Homo sapiens
gatacccagggaact

SEQ ID NO: 1116423 - DNA, 15 bp, Homo sapiens
agatacccagggaac

SEQ ID NO: 1116424 - DNA, 15 bp, Homo sapiens
aagatacccagggaa

SEQ ID NO: 1116425 - DNA, 15 bp, Homo sapiens
taagatacccaggga

SEQ ID NO: 1116426 - DNA, 15 bp, Homo sapiens
ataagatacccaggg

SEQ ID NO: 1116427 - DNA, 15 bp, Homo sapiens
cataagatacccagg

SEQ ID NO: 1116428 - DNA, 15 bp, Homo sapiens
gcataagatacccag

SEQ ID NO: 1116429 - DNA, 15 bp, Homo sapiens
ggcataagataccca

SEQ ID NO: 1116430 - DNA, 15 bp, Homo sapiens
aggcataagataccc

SEQ ID NO: 1116431 - DNA, 15 bp, Homo sapiens
caggcataagatacc

SEQ ID NO: 1116432 - DNA, 15 bp, Homo sapiens
tcaggcataagatac

SEQ ID NO: 1116433 - DNA, 15 bp, Homo sapiens
atcaggcataagata

SEQ ID NO: 1116434 - DNA, 15 bp, Homo sapiens
tatcaggcataagat

SEQ ID NO: 1116435 - DNA, 15 bp, Homo sapiens
atatcaggcataaga

SEQ ID NO: 1116436 - DNA, 15 bp, Homo sapiens
catatcaggcataag

SEQ ID NO: 1116437 - DNA, 15 bp, Homo sapiens
acatatcaggcataa

SEQ ID NO: 1116438 - DNA, 15 bp, Homo sapiens
tacatatcaggcata

SEQ ID NO: 1116439 - DNA, 15 bp, Homo sapiens
gtacatatcaggcat

SEQ ID NO: 1116440 - DNA, 15 bp, Homo sapiens
agtacatatcaggca

SEQ ID NO: 1116441 - DNA, 15 bp, Homo sapiens
tagtacatatcaggc

SEQ ID NO: 1116442 - DNA, 15 bp, Homo sapiens
ctagtacatatcagg

SEQ ID NO: 1116443 - DNA, 15 bp, Homo sapiens
tctagtacatatcag

SEQ ID NO: 1116444 - DNA, 15 bp, Homo sapiens
atctagtacatatca

SEQ ID NO: 1116445 - DNA, 15 bp, Homo sapiens
aatctagtacatatc

SEQ ID NO: 1116446 - DNA, 15 bp, Homo sapiens
taatctagtacatat

SEQ ID NO: 1116447 - DNA, 15 bp, Homo sapiens
ttaatctagtacata

SEQ ID NO: 1116448 - DNA, 15 bp, Homo sapiens
cttaatctagtacat

SEQ ID NO: 1116449 - DNA, 15 bp, Homo sapiens
acttaatctagtaca

SEQ ID NO: 1116450 - DNA, 15 bp, Homo sapiens
cacttaatctagtac

SEQ ID NO: 1116451 - DNA, 15 bp, Homo sapiens
acacttaatctagta

SEQ ID NO: 1116452 - DNA, 15 bp, Homo sapiens
aacacttaatctagt

SEQ ID NO: 1116453 - DNA, 15 bp, Homo sapiens
taacacttaatctag

SEQ ID NO: 1116454 - DNA, 15 bp, Homo sapiens
ctaacacttaatcta

SEQ ID NO: 1116455 - DNA, 15 bp, Homo sapiens
tctaacacttaatct

SEQ ID NO: 1116456 - DNA, 15 bp, Homo sapiens
ttctaacacttaatc

SEQ ID NO: 1116457 - DNA, 15 bp, Homo sapiens
tttctaacacttaat

SEQ ID NO: 1116458 - DNA, 15 bp, Homo sapiens
ttttctaacacttaa

SEQ ID NO: 1116459 - DNA, 15 bp, Homo sapiens
cttttctaacactta

SEQ ID NO: 1116460 - DNA, 15 bp, Homo sapiens
gcttttctaacactt

SEQ ID NO: 1116461 - DNA, 15 bp, Homo sapiens
agcttttctaacact

SEQ ID NO: 1116462 - DNA, 15 bp, Homo sapiens
cagcttttctaacac

SEQ ID NO: 1116463 - DNA, 15 bp, Homo sapiens
ccagcttttctaaca

SEQ ID NO: 1116464 - DNA, 15 bp, Homo sapiens
gccagcttttctaac

SEQ ID NO: 1116465 - DNA, 15 bp, Homo sapiens
tgccagcttttctaa

SEQ ID NO: 1116466 - DNA, 15 bp, Homo sapiens
ttgccagcttttcta

SEQ ID NO: 1116467 - DNA, 15 bp, Homo sapiens
tttgccagcttttct

SEQ ID NO: 1116468 - DNA, 15 bp, Homo sapiens
gtttgccagcttttc

SEQ ID NO: 1116469 - DNA, 15 bp, Homo sapiens
agtttgccagctttt

SEQ ID NO: 1116470 - DNA, 15 bp, Homo sapiens
cagtttgccagcttt

SEQ ID NO: 1116471 - DNA, 15 bp, Homo sapiens
ccagtttgccagctt

SEQ ID NO: 1116472 - DNA, 15 bp, Homo sapiens
tccagtttgccagct

SEQ ID NO: 1116473 - DNA, 15 bp, Homo sapiens
ttccagtttgccagc

SEQ ID NO: 1116474 - DNA, 15 bp, Homo sapiens
tttccagtttgccag

SEQ ID NO: 1116475 - DNA, 15 bp, Homo sapiens
gtttccagtttgcca

SEQ ID NO: 1116476 - DNA, 15 bp, Homo sapiens
ggtttccagtttgcc

SEQ ID NO: 1116477 - DNA, 15 bp, Homo sapiens
gggtttccagtttgc

SEQ ID NO: 1116478 - DNA, 15 bp, Homo sapiens
ggggtttccagtttg

SEQ ID NO: 1116479 - DNA, 15 bp, Homo sapiens
tggggtttccagttt

SEQ ID NO: 1116480 - DNA, 15 bp, Homo sapiens
ttggggtttccagtt

SEQ ID NO: 1116481 - DNA, 15 bp, Homo sapiens
attggggtttccagt

SEQ ID NO: 1116482 - DNA, 15 bp, Homo sapiens
cattggggtttccag

SEQ ID NO: 1116483 - DNA, 15 bp, Homo sapiens
tcattggggtttcca

SEQ ID NO: 1116484 - DNA, 15 bp, Homo sapiens
ctcattggggtttcc

SEQ ID NO: 1116485 - DNA, 15 bp, Homo sapiens
actcattggggtttc

SEQ ID NO: 1116486 - DNA, 15 bp, Homo sapiens
cactcattggggttt

SEQ ID NO: 1116487 - DNA, 15 bp, Homo sapiens
gcactcattggggtt

SEQ ID NO: 1116488 - DNA, 15 bp, Homo sapiens
tgcactcattggggt

SEQ ID NO: 1116489 - DNA, 15 bp, Homo sapiens
ctgcactcattgggg

SEQ ID NO: 1116490 - DNA, 15 bp, Homo sapiens
tctgcactcattggg

SEQ ID NO: 1116491 - DNA, 15 bp, Homo sapiens
gtctgcactcattgg

SEQ ID NO: 1116492 - DNA, 15 bp, Homo sapiens
ggtctgcactcattg

SEQ ID NO: 1116493 - DNA, 15 bp, Homo sapiens
tggtctgcactcatt

SEQ ID NO: 1116494 - DNA, 15 bp, Homo sapiens
ttggtctgcactcat

SEQ ID NO: 1116495 - DNA, 15 bp, Homo sapiens
tttggtctgcactca

SEQ ID NO: 1116496 - DNA, 15 bp, Homo sapiens
ttttggtctgcactc

SEQ ID NO: 1116497 - DNA, 15 bp, Homo sapiens
tttttggtctgcact

SEQ ID NO: 1116498 - DNA, 15 bp, Homo sapiens
ctttttggtctgcac

SEQ ID NO: 1116499 - DNA, 15 bp, Homo sapiens
tctttttggtctgca

SEQ ID NO: 1116500 - DNA, 15 bp, Homo sapiens
gtctttttggtctgc

SEQ ID NO: 1116501 - DNA, 15 bp, Homo sapiens
agtctttttggtctg

SEQ ID NO: 1116502 - DNA, 15 bp, Homo sapiens
gagtctttttggtct

SEQ ID NO: 1116503 - DNA, 15 bp, Homo sapiens
tgagtctttttggtc

SEQ ID NO: 1116504 - DNA, 15 bp, Homo sapiens
ttgagtctttttggt

SEQ ID NO: 1116505 - DNA, 15 bp, Homo sapiens
gttgagtctttttgg

SEQ ID NO: 1116506 - DNA, 15 bp, Homo sapiens
tgttgagtctttttg

SEQ ID NO: 1116507 - DNA, 15 bp, Homo sapiens
ttgttgagtcttttt

SEQ ID NO: 1116508 - DNA, 15 bp, Homo sapiens
tttgttgagtctttt

SEQ ID NO: 1116509 - DNA, 15 bp, Homo sapiens
ttttgttgagtcttt

SEQ ID NO: 1116510 - DNA, 15 bp, Homo sapiens
attttgttgagtctt

SEQ ID NO: 1116511 - DNA, 15 bp, Homo sapiens
gattttgttgagtct

SEQ ID NO: 1116512 - DNA, 15 bp, Homo sapiens
ggattttgttgagtc

SEQ ID NO: 1116513 - DNA, 15 bp, Homo sapiens
aggattttgttgagt

SEQ ID NO: 1116514 - DNA, 15 bp, Homo sapiens
caggattttgttgag

SEQ ID NO: 1116515 - DNA, 15 bp, Homo sapiens
gcaggattttgttga

SEQ ID NO: 1116516 - DNA, 15 bp, Homo sapiens
agcaggattttgttg

SEQ ID NO: 1116517 - DNA, 15 bp, Homo sapiens
aagcaggattttgtt

SEQ ID NO: 1116518 - DNA, 15 bp, Homo sapiens
aaagcaggattttgt

SEQ ID NO: 1116519 - DNA, 15 bp, Homo sapiens
aaaagcaggattttg

SEQ ID NO: 1116520 - DNA, 15 bp, Homo sapiens
aaaaagcaggatttt

SEQ ID NO: 1116521 - DNA, 15 bp, Homo sapiens
gaaaaagcaggattt

SEQ ID NO: 1116522 - DNA, 15 bp, Homo sapiens
agaaaaagcaggatt

SEQ ID NO: 1116523 - DNA, 15 bp, Homo sapiens
tagaaaaagcaggat

SEQ ID NO: 1116524 - DNA, 15 bp, Homo sapiens
ctagaaaaagcagga

SEQ ID NO: 1116525 - DNA, 15 bp, Homo sapiens
tctagaaaaagcagg

SEQ ID NO: 1116526 - DNA, 15 bp, Homo sapiens
atctagaaaaagcag

SEQ ID NO: 1116527 - DNA, 15 bp, Homo sapiens
tatctagaaaaagca

SEQ ID NO: 1116528 - DNA, 15 bp, Homo sapiens
ctatctagaaaaagc

SEQ ID NO: 1116529 - DNA, 15 bp, Homo sapiens
actatctagaaaaag

SEQ ID NO: 1116530 - DNA, 15 bp, Homo sapiens
cactatctagaaaaa

SEQ ID NO: 1116531 - DNA, 15 bp, Homo sapiens
ccactatctagaaaa

SEQ ID NO: 1116532 - DNA, 15 bp, Homo sapiens
cccactatctagaaa

SEQ ID NO: 1116533 - DNA, 15 bp, Homo sapiens
acccactatctagaa

SEQ ID NO: 1116534 - DNA, 15 bp, Homo sapiens
gacccactatctaga

SEQ ID NO: 1116535 - DNA, 15 bp, Homo sapiens
tgacccactatctag

SEQ ID NO: 1116536 - DNA, 15 bp, Homo sapiens
ctgacccactatcta

SEQ ID NO: 1116537 - DNA, 15 bp, Homo sapiens
tctgacccactatct

SEQ ID NO: 1116538 - DNA, 15 bp, Homo sapiens
ttctgacccactatc

SEQ ID NO: 1116539 - DNA, 15 bp, Homo sapiens
tttctgacccactat

SEQ ID NO: 1116540 - DNA, 15 bp, Homo sapiens
ctttctgacccacta

SEQ ID NO: 1116541 - DNA, 15 bp, Homo sapiens
tctttctgacccact

SEQ ID NO: 1116542 - DNA, 15 bp, Homo sapiens
ctctttctgacccac

SEQ ID NO: 1116543 - DNA, 15 bp, Homo sapiens
tctctttctgaccca

SEQ ID NO: 1116544 - DNA, 15 bp, Homo sapiens
ttctctttctgaccc

SEQ ID NO: 1116545 - DNA, 15 bp, Homo sapiens
tttctctttctgacc

SEQ ID NO: 1116546 - DNA, 15 bp, Homo sapiens
ctttctctttctgac

SEQ ID NO: 1116547 - DNA, 15 bp, Homo sapiens
gctttctctttctga

SEQ ID NO: 1116548 - DNA, 15 bp, Homo sapiens
ggctttctctttctg

SEQ ID NO: 1116549 - DNA, 15 bp, Homo sapiens
aggctttctctttct

SEQ ID NO: 1116550 - DNA, 15 bp, Homo sapiens
taggctttctctttc

SEQ ID NO: 1116551 - DNA, 15 bp, Homo sapiens
ctaggctttctcttt

SEQ ID NO: 1116552 - DNA, 15 bp, Homo sapiens
actaggctttctctt

SEQ ID NO: 1116553 - DNA, 15 bp, Homo sapiens
tactaggctttctct

SEQ ID NO: 1116554 - DNA, 15 bp, Homo sapiens
ctactaggctttctc

SEQ ID NO: 1116555 - DNA, 15 bp, Homo sapiens
tctactaggctttct

SEQ ID NO: 1116556 - DNA, 15 bp, Homo sapiens
ttctactaggctttc

SEQ ID NO: 1116557 - DNA, 15 bp, Homo sapiens
tttctactaggcttt

SEQ ID NO: 1116558 - DNA, 15 bp, Homo sapiens
ttttctactaggctt

SEQ ID NO: 1116559 - DNA, 15 bp, Homo sapiens
gttttctactaggct

SEQ ID NO: 1116560 - DNA, 15 bp, Homo sapiens
agttttctactaggc

SEQ ID NO: 1116561 - DNA, 15 bp, Homo sapiens
aagttttctactagg

SEQ ID NO: 1116562 - DNA, 15 bp, Homo sapiens
gaagttttctactag

SEQ ID NO: 1116563 - DNA, 15 bp, Homo sapiens
agaagttttctacta

SEQ ID NO: 1116564 - DNA, 15 bp, Homo sapiens
tagaagttttctact

SEQ ID NO: 1116565 - DNA, 15 bp, Homo sapiens
ttagaagttttctac

SEQ ID NO: 1116566 - DNA, 15 bp, Homo sapiens
cttagaagttttcta

SEQ ID NO: 1116567 - DNA, 15 bp, Homo sapiens
gcttagaagttttct

SEQ ID NO: 1116568 - DNA, 15 bp, Homo sapiens
tgcttagaagttttc

SEQ ID NO: 1116569 - DNA, 15 bp, Homo sapiens
ttgcttagaagtttt

SEQ ID NO: 1116570 - DNA, 15 bp, Homo sapiens
attgcttagaagttt

SEQ ID NO: 1116571 - DNA, 15 bp, Homo sapiens
tattgcttagaagtt

SEQ ID NO: 1116572 - DNA, 15 bp, Homo sapiens
ttattgcttagaagt

SEQ ID NO: 1116573 - DNA, 15 bp, Homo sapiens
attattgcttagaag

SEQ ID NO: 1116574 - DNA, 15 bp, Homo sapiens
aattattgcttagaa

SEQ ID NO: 1116575 - DNA, 15 bp, Homo sapiens
caattattgcttaga

SEQ ID NO: 1116576 - DNA, 15 bp, Homo sapiens
gcaattattgcttag

SEQ ID NO: 1116577 - DNA, 15 bp, Homo sapiens
agcaattattgctta

SEQ ID NO: 1116578 - DNA, 15 bp, Homo sapiens
gagcaattattgctt

SEQ ID NO: 1116579 - DNA, 15 bp, Homo sapiens
agagcaattattgct

SEQ ID NO: 1116580 - DNA, 15 bp, Homo sapiens
tagagcaattattgc

SEQ ID NO: 1116581 - DNA, 15 bp, Homo sapiens
gtagagcaattattg

SEQ ID NO: 1116582 - DNA, 15 bp, Homo sapiens
agtagagcaattatt

SEQ ID NO: 1116583 - DNA, 15 bp, Homo sapiens
gagtagagcaattat

SEQ ID NO: 1116584 - DNA, 15 bp, Homo sapiens
agagtagagcaatta

SEQ ID NO: 1116585 - DNA, 15 bp, Homo sapiens
tagagtagagcaatt

SEQ ID NO: 1116586 - DNA, 15 bp, Homo sapiens
ctagagtagagcaat

SEQ ID NO: 1116587 - DNA, 15 bp, Homo sapiens
gctagagtagagcaa

SEQ ID NO: 1116588 - DNA, 15 bp, Homo sapiens
ggctagagtagagca

SEQ ID NO: 1116589 - DNA, 15 bp, Homo sapiens
tggctagagtagagc

SEQ ID NO: 1116590 - DNA, 15 bp, Homo sapiens
ttggctagagtagag

SEQ ID NO: 1116591 - DNA, 15 bp, Homo sapiens
tttggctagagtaga

SEQ ID NO: 1116592 - DNA, 15 bp, Homo sapiens
gtttggctagagtag

SEQ ID NO: 1116593 - DNA, 15 bp, Homo sapiens
tgtttggctagagta

SEQ ID NO: 1116594 - DNA, 15 bp, Homo sapiens
gtgtttggctagagt

SEQ ID NO: 1116595 - DNA, 15 bp, Homo sapiens
ggtgtttggctagag

SEQ ID NO: 1116596 - DNA, 15 bp, Homo sapiens
tggtgtttggctaga

SEQ ID NO: 1116597 - DNA, 15 bp, Homo sapiens
gtggtgtttggctag

SEQ ID NO: 1116598 - DNA, 15 bp, Homo sapiens
tgtggtgtttggcta

SEQ ID NO: 1116599 - DNA, 15 bp, Homo sapiens
ctgtggtgtttggct

SEQ ID NO: 1116600 - DNA, 15 bp, Homo sapiens
tctgtggtgtttggc

SEQ ID NO: 1116601 - DNA, 15 bp, Homo sapiens
ttctgtggtgtttgg

SEQ ID NO: 1116602 - DNA, 15 bp, Homo sapiens
cttctgtggtgtttg

SEQ ID NO: 1116603 - DNA, 15 bp, Homo sapiens
tcttctgtggtgttt

SEQ ID NO: 1116604 - DNA, 15 bp, Homo sapiens
ttcttctgtggtgtt

SEQ ID NO: 1116605 - DNA, 15 bp, Homo sapiens
tttcttctgtggtgt

SEQ ID NO: 1116606 - DNA, 15 bp, Homo sapiens
ttttcttctgtggtg

SEQ ID NO: 1116607 - DNA, 15 bp, Homo sapiens
gttttcttctgtggt

SEQ ID NO: 1116608 - DNA, 15 bp, Homo sapiens
cgttttcttctgtgg

SEQ ID NO: 1116609 - DNA, 15 bp, Homo sapiens
ccgttttcttctgtg

SEQ ID NO: 1116610 - DNA, 15 bp, Homo sapiens
accgttttcttctgt

SEQ ID NO: 1116611 - DNA, 15 bp, Homo sapiens
caccgttttcttctg

SEQ ID NO: 1116612 - DNA, 15 bp, Homo sapiens
tcaccgttttcttct

SEQ ID NO: 1116613 - DNA, 15 bp, Homo sapiens
gtcaccgttttcttc

SEQ ID NO: 1116614 - DNA, 15 bp, Homo sapiens
ggtcaccgttttctt

SEQ ID NO: 1116615 - DNA, 15 bp, Homo sapiens
aggtcaccgttttct

SEQ ID NO: 1116616 - DNA, 15 bp, Homo sapiens
gaggtcaccgttttc

SEQ ID NO: 1116617 - DNA, 15 bp, Homo sapiens
tgaggtcaccgtttt

SEQ ID NO: 1116618 - DNA, 15 bp, Homo sapiens
gtgaggtcaccgttt

SEQ ID NO: 1116619 - DNA, 15 bp, Homo sapiens
agtgaggtcaccgtt

SEQ ID NO: 1116620 - DNA, 15 bp, Homo sapiens
gagtgaggtcaccgt

SEQ ID NO: 1116621 - DNA, 15 bp, Homo sapiens
agagtgaggtcaccg

SEQ ID NO: 1116622 - DNA, 15 bp, Homo sapiens
gagagtgaggtcacc

SEQ ID NO: 1116623 - DNA, 15 bp, Homo sapiens
tgagagtgaggtcac

SEQ ID NO: 1116624 - DNA, 15 bp, Homo sapiens
gtgagagtgaggtca

SEQ ID NO: 1116625 - DNA, 15 bp, Homo sapiens
ggtgagagtgaggtc

SEQ ID NO: 1116626 - DNA, 15 bp, Homo sapiens
gggtgagagtgaggt

SEQ ID NO: 1116627 - DNA, 15 bp, Homo sapiens
tgggtgagagtgagg

SEQ ID NO: 1116628 - DNA, 15 bp, Homo sapiens
atgggtgagagtgag

SEQ ID NO: 1116629 - DNA, 15 bp, Homo sapiens
catgggtgagagtga

SEQ ID NO: 1116630 - DNA, 15 bp, Homo sapiens
gcatgggtgagagtg

SEQ ID NO: 1116631 - DNA, 15 bp, Homo sapiens
ggcatgggtgagagt

SEQ ID NO: 1116632 - DNA, 15 bp, Homo sapiens
tggcatgggtgagag

SEQ ID NO: 1116633 - DNA, 15 bp, Homo sapiens
ctggcatgggtgaga

SEQ ID NO: 1116634 - DNA, 15 bp, Homo sapiens
gctggcatgggtgag

SEQ ID NO: 1116635 - DNA, 15 bp, Homo sapiens
cgctggcatgggtga

SEQ ID NO: 1116636 - DNA, 15 bp, Homo sapiens
tcgctggcatgggtg

SEQ ID NO: 1116637 - DNA, 15 bp, Homo sapiens
ttcgctggcatgggt

SEQ ID NO: 1116638 - DNA, 15 bp, Homo sapiens
attcgctggcatggg

SEQ ID NO: 1116639 - DNA, 15 bp, Homo sapiens
cattcgctggcatgg

SEQ ID NO: 1116640 - DNA, 15 bp, Homo sapiens
acattcgctggcatg

SEQ ID NO: 1116641 - DNA, 15 bp, Homo sapiens
aacattcgctggcat

SEQ ID NO: 1116642 - DNA, 15 bp, Homo sapiens
caacattcgctggca

SEQ ID NO: 1116643 - DNA, 15 bp, Homo sapiens
tcaacattcgctggc

SEQ ID NO: 1116644 - DNA, 15 bp, Homo sapiens
atcaacattcgctgg

SEQ ID NO: 1116645 - DNA, 15 bp, Homo sapiens
aatcaacattcgctg

SEQ ID NO: 1116646 - DNA, 15 bp, Homo sapiens
aaatcaacattcgct

SEQ ID NO: 1116647 - DNA, 15 bp, Homo sapiens
caaatcaacattcgc

SEQ ID NO: 1116648 - DNA, 15 bp, Homo sapiens
ccaaatcaacattcg

SEQ ID NO: 1116649 - DNA, 15 bp, Homo sapiens
cccaaatcaacattc

SEQ ID NO: 1116650 - DNA, 15 bp, Homo sapiens
tcccaaatcaacatt

SEQ ID NO: 1116651 - DNA, 15 bp, Homo sapiens
ctcccaaatcaacat

SEQ ID NO: 1116652 - DNA, 15 bp, Homo sapiens
gctcccaaatcaaca

SEQ ID NO: 1116653 - DNA, 15 bp, Homo sapiens
tgctcccaaatcaac

SEQ ID NO: 1116654 - DNA, 15 bp, Homo sapiens
atgctcccaaatcaa

SEQ ID NO: 1116655 - DNA, 15 bp, Homo sapiens
tatgctcccaaatca

SEQ ID NO: 1116656 - DNA, 15 bp, Homo sapiens
ctatgctcccaaatc

SEQ ID NO: 1116657 - DNA, 15 bp, Homo sapiens
tctatgctcccaaat

SEQ ID NO: 1116658 - DNA, 15 bp, Homo sapiens
gtctatgctcccaaa

SEQ ID NO: 1116659 - DNA, 15 bp, Homo sapiens
agtctatgctcccaa

SEQ ID NO: 1116660 - DNA, 15 bp, Homo sapiens
gagtctatgctccca

SEQ ID NO: 1116661 - DNA, 15 bp, Homo sapiens
agagtctatgctccc

SEQ ID NO: 1116662 - DNA, 15 bp, Homo sapiens
aagagtctatgctcc

SEQ ID NO: 1116663 - DNA, 15 bp, Homo sapiens
gaagagtctatgctc

SEQ ID NO: 1116664 - DNA, 15 bp, Homo sapiens
ggaagagtctatgct

SEQ ID NO: 1116665 - DNA, 15 bp, Homo sapiens
tggaagagtctatgc

SEQ ID NO: 1116666 - DNA, 15 bp, Homo sapiens
gtggaagagtctatg

SEQ ID NO: 1116667 - DNA, 15 bp, Homo sapiens
tgtggaagagtctat

SEQ ID NO: 1116668 - DNA, 15 bp, Homo sapiens
gtgtggaagagtcta

SEQ ID NO: 1116669 - DNA, 15 bp, Homo sapiens
agtgtggaagagtct

SEQ ID NO: 1116670 - DNA, 15 bp, Homo sapiens
aagtgtggaagagtc

SEQ ID NO: 1116671 - DNA, 15 bp, Homo sapiens
caagtgtggaagagt

SEQ ID NO: 1116672 - DNA, 15 bp, Homo sapiens
gcaagtgtggaagag

SEQ ID NO: 1116673 - DNA, 15 bp, Homo sapiens
agcaagtgtggaaga

SEQ ID NO: 1116674 - DNA, 15 bp, Homo sapiens
tagcaagtgtggaag

SEQ ID NO: 1116675 - DNA, 15 bp, Homo sapiens
ctagcaagtgtggaa

SEQ ID NO: 1116676 - DNA, 15 bp, Homo sapiens
cctagcaagtgtgga

SEQ ID NO: 1116677 - DNA, 15 bp, Homo sapiens
acctagcaagtgtgg

SEQ ID NO: 1116678 - DNA, 15 bp, Homo sapiens
cacctagcaagtgtg

SEQ ID NO: 1116679 - DNA, 15 bp, Homo sapiens
ccacctagcaagtgt

SEQ ID NO: 1116680 - DNA, 15 bp, Homo sapiens
accacctagcaagtg

SEQ ID NO: 1116681 - DNA, 15 bp, Homo sapiens
taccacctagcaagt

SEQ ID NO: 1116682 - DNA, 15 bp, Homo sapiens
ttaccacctagcaag

SEQ ID NO: 1116683 - DNA, 15 bp, Homo sapiens
attaccacctagcaa

SEQ ID NO: 1116684 - DNA, 15 bp, Homo sapiens
tattaccacctagca

SEQ ID NO: 1116685 - DNA, 15 bp, Homo sapiens
ttattaccacctagc

SEQ ID NO: 1116686 - DNA, 15 bp, Homo sapiens
cttattaccacctag

SEQ ID NO: 1116687 - DNA, 15 bp, Homo sapiens
gcttattaccaccta

SEQ ID NO: 1116688 - DNA, 15 bp, Homo sapiens
ggcttattaccacct

SEQ ID NO: 1116689 - DNA, 15 bp, Homo sapiens
gggcttattaccacc

SEQ ID NO: 1116690 - DNA, 15 bp, Homo sapiens
ggggcttattaccac

SEQ ID NO: 1116691 - DNA, 15 bp, Homo sapiens
aggggcttattacca

SEQ ID NO: 1116692 - DNA, 15 bp, Homo sapiens
gaggggcttattacc

SEQ ID NO: 1116693 - DNA, 15 bp, Homo sapiens
agaggggcttattac

SEQ ID NO: 1116694 - DNA, 15 bp, Homo sapiens
aagaggggcttatta

SEQ ID NO: 1116695 - DNA, 15 bp, Homo sapiens
caagaggggcttatt

SEQ ID NO: 1116696 - DNA, 15 bp, Homo sapiens
acaagaggggcttat

SEQ ID NO: 1116697 - DNA, 15 bp, Homo sapiens
cacaagaggggctta

SEQ ID NO: 1116698 - DNA, 15 bp, Homo sapiens
gcacaagaggggctt

SEQ ID NO: 1116699 - DNA, 15 bp, Homo sapiens
ggcacaagaggggct

SEQ ID NO: 1116700 - DNA, 15 bp, Homo sapiens
tggcacaagaggggc

SEQ ID NO: 1116701 - DNA, 15 bp, Homo sapiens
gtggcacaagagggg

SEQ ID NO: 1116702 - DNA, 15 bp, Homo sapiens
ggtggcacaagaggg

SEQ ID NO: 1116703 - DNA, 15 bp, Homo sapiens
gggtggcacaagagg

SEQ ID NO: 1116704 - DNA, 15 bp, Homo sapiens
ggggtggcacaagag

SEQ ID NO: 1116705 - DNA, 15 bp, Homo sapiens
gggggtggcacaaga

SEQ ID NO: 1116706 - DNA, 15 bp, Homo sapiens
agggggtggcacaag

SEQ ID NO: 1116707 - DNA, 15 bp, Homo sapiens
gagggggtggcacaa

SEQ ID NO: 1116708 - DNA, 15 bp, Homo sapiens
tgagggggtggcaca

SEQ ID NO: 1116709 - DNA, 15 bp, Homo sapiens
gtgagggggtggcac

SEQ ID NO: 1116710 - DNA, 15 bp, Homo sapiens
agtgagggggtggca

SEQ ID NO: 1116711 - DNA, 15 bp, Homo sapiens
gagtgagggggtggc

SEQ ID NO: 1116712 - DNA, 15 bp, Homo sapiens
tgagtgagggggtgg

SEQ ID NO: 1116713 - DNA, 15 bp, Homo sapiens
gtgagtgagggggtg

SEQ ID NO: 1116714 - DNA, 15 bp, Homo sapiens
ggtgagtgagggggt

SEQ ID NO: 1116715 - DNA, 15 bp, Homo sapiens
gggtgagtgaggggg

SEQ ID NO: 1116716 - DNA, 15 bp, Homo sapiens
ggggtgagtgagggg

SEQ ID NO: 1116717 - DNA, 15 bp, Homo sapiens
gggggtgagtgaggg

SEQ ID NO: 1116718 - DNA, 15 bp, Homo sapiens
tgggggtgagtgagg

SEQ ID NO: 1116719 - DNA, 15 bp, Homo sapiens
atgggggtgagtgag

SEQ ID NO: 1116720 - DNA, 15 bp, Homo sapiens
catgggggtgagtga

SEQ ID NO: 1116721 - DNA, 15 bp, Homo sapiens
ccatgggggtgagtg

SEQ ID NO: 1116722 - DNA, 15 bp, Homo sapiens
accatgggggtgagt

SEQ ID NO: 1116723 - DNA, 15 bp, Homo sapiens
caccatgggggtgag

SEQ ID NO: 1116724 - DNA, 15 bp, Homo sapiens
acaccatgggggtga

SEQ ID NO: 1116725 - DNA, 15 bp, Homo sapiens
gacaccatgggggtg

SEQ ID NO: 1116726 - DNA, 15 bp, Homo sapiens
tgacaccatgggggt

SEQ ID NO: 1116727 - DNA, 15 bp, Homo sapiens
ttgacaccatggggg

SEQ ID NO: 1116728 - DNA, 15 bp, Homo sapiens
attgacaccatgggg

SEQ ID NO: 1116729 - DNA, 15 bp, Homo sapiens
cattgacaccatggg

SEQ ID NO: 1116730 - DNA, 15 bp, Homo sapiens
ccattgacaccatgg

SEQ ID NO: 1116731 - DNA, 15 bp, Homo sapiens
tccattgacaccatg

SEQ ID NO: 1116732 - DNA, 15 bp, Homo sapiens
ctccattgacaccat

SEQ ID NO: 1116733 - DNA, 15 bp, Homo sapiens
tctccattgacacca

SEQ ID NO: 1116734 - DNA, 15 bp, Homo sapiens
ttctccattgacacc

SEQ ID NO: 1116735 - DNA, 15 bp, Homo sapiens
attctccattgacac

SEQ ID NO: 1116736 - DNA, 15 bp, Homo sapiens
tattctccattgaca

SEQ ID NO: 1116737 - DNA, 15 bp, Homo sapiens
atattctccattgac

SEQ ID NO: 1116738 - DNA, 15 bp, Homo sapiens
catattctccattga

SEQ ID NO: 1116739 - DNA, 15 bp, Homo sapiens
acatattctccattg

SEQ ID NO: 1116740 - DNA, 15 bp, Homo sapiens
cacatattctccatt

SEQ ID NO: 1116741 - DNA, 15 bp, Homo sapiens
ccacatattctccat

SEQ ID NO: 1116742 - DNA, 15 bp, Homo sapiens
cccacatattctcca

SEQ ID NO: 1116743 - DNA, 15 bp, Homo sapiens
tcccacatattctcc

SEQ ID NO: 1116744 - DNA, 15 bp, Homo sapiens
ctcccacatattctc

SEQ ID NO: 1116745 - DNA, 15 bp, Homo sapiens
cctcccacatattct

SEQ ID NO: 1116746 - DNA, 15 bp, Homo sapiens
gcctcccacatattc

SEQ ID NO: 1116747 - DNA, 15 bp, Homo sapiens
ggcctcccacatatt

SEQ ID NO: 1116748 - DNA, 15 bp, Homo sapiens
aggcctcccacatat

SEQ ID NO: 1116749 - DNA, 15 bp, Homo sapiens
caggcctcccacata

SEQ ID NO: 1116750 - DNA, 15 bp, Homo sapiens
tcaggcctcccacat

SEQ ID NO: 1116751 - DNA, 15 bp, Homo sapiens
gtcaggcctcccaca

SEQ ID NO: 1116752 - DNA, 15 bp, Homo sapiens
agtcaggcctcccac

SEQ ID NO: 1116753 - DNA, 15 bp, Homo sapiens
gagtcaggcctccca

SEQ ID NO: 1116754 - DNA, 15 bp, Homo sapiens
tgagtcaggcctccc

SEQ ID NO: 1116755 - DNA, 15 bp, Homo sapiens
atgagtcaggcctcc

SEQ ID NO: 1116756 - DNA, 15 bp, Homo sapiens
gatgagtcaggcctc

SEQ ID NO: 1116757 - DNA, 15 bp, Homo sapiens
ggatgagtcaggcct

SEQ ID NO: 1116758 - DNA, 15 bp, Homo sapiens
gggatgagtcaggcc

SEQ ID NO: 1116759 - DNA, 15 bp, Homo sapiens
ggggatgagtcaggc

SEQ ID NO: 1116760 - DNA, 15 bp, Homo sapiens
tggggatgagtcagg

SEQ ID NO: 1116761 - DNA, 15 bp, Homo sapiens
gtggggatgagtcag

SEQ ID NO: 1116762 - DNA, 15 bp, Homo sapiens
agtggggatgagtca

SEQ ID NO: 1116763 - DNA, 15 bp, Homo sapiens
tagtggggatgagtc

SEQ ID NO: 1116764 - DNA, 15 bp, Homo sapiens
atagtggggatgagt

SEQ ID NO: 1116765 - DNA, 15 bp, Homo sapiens
tatagtggggatgag

SEQ ID NO: 1116766 - DNA, 15 bp, Homo sapiens
ctatagtggggatga

SEQ ID NO: 1116767 - DNA, 15 bp, Homo sapiens
actatagtggggatg

SEQ ID NO: 1116768 - DNA, 15 bp, Homo sapiens
tactatagtggggat

SEQ ID NO: 1116769 - DNA, 15 bp, Homo sapiens
ttactatagtgggga

SEQ ID NO: 1116770 - DNA, 15 bp, Homo sapiens
cttactatagtgggg

SEQ ID NO: 1116771 - DNA, 15 bp, Homo sapiens
ccttactatagtggg

SEQ ID NO: 1116772 - DNA, 15 bp, Homo sapiens
gccttactatagtgg

SEQ ID NO: 1116773 - DNA, 15 bp, Homo sapiens
tgccttactatagtg

SEQ ID NO: 1116774 - DNA, 15 bp, Homo sapiens
gtgccttactatagt

SEQ ID NO: 1116775 - DNA, 15 bp, Homo sapiens
ggtgccttactatag

SEQ ID NO: 1116776 - DNA, 15 bp, Homo sapiens
aggtgccttactata

SEQ ID NO: 1116777 - DNA, 15 bp, Homo sapiens
gaggtgccttactat

SEQ ID NO: 1116778 - DNA, 15 bp, Homo sapiens
agaggtgccttacta

SEQ ID NO: 1116779 - DNA, 15 bp, Homo sapiens
gagaggtgccttact

SEQ ID NO: 1116780 - DNA, 15 bp, Homo sapiens
ggagaggtgccttac

SEQ ID NO: 1116781 - DNA, 15 bp, Homo sapiens
gggagaggtgcctta

SEQ ID NO: 1116782 - DNA, 15 bp, Homo sapiens
ggggagaggtgcctt

SEQ ID NO: 1116783 - DNA, 15 bp, Homo sapiens
aggggagaggtgcct

SEQ ID NO: 1116784 - DNA, 15 bp, Homo sapiens
aaggggagaggtgcc

SEQ ID NO: 1116785 - DNA, 15 bp, Homo sapiens
taaggggagaggtgc

SEQ ID NO: 1116786 - DNA, 15 bp, Homo sapiens
gtaaggggagaggtg

SEQ ID NO: 1116787 - DNA, 15 bp, Homo sapiens
ggtaaggggagaggt

SEQ ID NO: 1116788 - DNA, 15 bp, Homo sapiens
aggtaaggggagagg

SEQ ID NO: 1116789 - DNA, 15 bp, Homo sapiens
caggtaaggggagag

SEQ ID NO: 1116790 - DNA, 15 bp, Homo sapiens
gcaggtaaggggaga

SEQ ID NO: 1116791 - DNA, 15 bp, Homo sapiens
agcaggtaaggggag

SEQ ID NO: 1116792 - DNA, 15 bp, Homo sapiens
cagcaggtaagggga

SEQ ID NO: 1116793 - DNA, 15 bp, Homo sapiens
ccagcaggtaagggg

SEQ ID NO: 1116794 - DNA, 15 bp, Homo sapiens
cccagcaggtaaggg

SEQ ID NO: 1116795 - DNA, 15 bp, Homo sapiens
acccagcaggtaagg

SEQ ID NO: 1116796 - DNA, 15 bp, Homo sapiens
aacccagcaggtaag

SEQ ID NO: 1116797 - DNA, 15 bp, Homo sapiens
caacccagcaggtaa

SEQ ID NO: 1116798 - DNA, 15 bp, Homo sapiens
ccaacccagcaggta

SEQ ID NO: 1116799 - DNA, 15 bp, Homo sapiens
cccaacccagcaggt

SEQ ID NO: 1116800 - DNA, 15 bp, Homo sapiens
ccccaacccagcagg

SEQ ID NO: 1116801 - DNA, 15 bp, Homo sapiens
accccaacccagcag

SEQ ID NO: 1116802 - DNA, 15 bp, Homo sapiens
caccccaacccagca

SEQ ID NO: 1116803 - DNA, 15 bp, Homo sapiens
tcaccccaacccagc

SEQ ID NO: 1116804 - DNA, 15 bp, Homo sapiens
gtcaccccaacccag

SEQ ID NO: 1116805 - DNA, 15 bp, Homo sapiens
tgtcaccccaaccca

SEQ ID NO: 1116806 - DNA, 15 bp, Homo sapiens
ctgtcaccccaaccc

SEQ ID NO: 1116807 - DNA, 15 bp, Homo sapiens
tctgtcaccccaacc

SEQ ID NO: 1116808 - DNA, 15 bp, Homo sapiens
ctctgtcaccccaac

SEQ ID NO: 1116809 - DNA, 15 bp, Homo sapiens
actctgtcaccccaa

SEQ ID NO: 1116810 - DNA, 15 bp, Homo sapiens
gactctgtcacccca

SEQ ID NO: 1116811 - DNA, 15 bp, Homo sapiens
tgactctgtcacccc

SEQ ID NO: 1116812 - DNA, 15 bp, Homo sapiens
ttgactctgtcaccc

SEQ ID NO: 1116813 - DNA, 15 bp, Homo sapiens
tttgactctgtcacc

SEQ ID NO: 1116814 - DNA, 15 bp, Homo sapiens
ttttgactctgtcac

SEQ ID NO: 1116815 - DNA, 15 bp, Homo sapiens
gttttgactctgtca

SEQ ID NO: 1116816 - DNA, 15 bp, Homo sapiens
tgttttgactctgtc

SEQ ID NO: 1116817 - DNA, 15 bp, Homo sapiens
atgttttgactctgt

SEQ ID NO: 1116818 - DNA, 15 bp, Homo sapiens
aatgttttgactctg

SEQ ID NO: 1116819 - DNA, 15 bp, Homo sapiens
taatgttttgactct

SEQ ID NO: 1116820 - DNA, 15 bp, Homo sapiens
gtaatgttttgactc

SEQ ID NO: 1116821 - DNA, 15 bp, Homo sapiens
ggtaatgttttgact

SEQ ID NO: 1116822 - DNA, 15 bp, Homo sapiens
tggtaatgttttgac

SEQ ID NO: 1116823 - DNA, 15 bp, Homo sapiens
gtggtaatgttttga

SEQ ID NO: 1116824 - DNA, 15 bp, Homo sapiens
ggtggtaatgttttg

SEQ ID NO: 1116825 - DNA, 15 bp, Homo sapiens
tggtggtaatgtttt

SEQ ID NO: 1116826 - DNA, 15 bp, Homo sapiens
gtggtggtaatgttt

SEQ ID NO: 1116827 - DNA, 15 bp, Homo sapiens
ggtggtggtaatgtt

SEQ ID NO: 1116828 - DNA, 15 bp, Homo sapiens
cggtggtggtaatgt

SEQ ID NO: 1116829 - DNA, 15 bp, Homo sapiens
gcggtggtggtaatg

SEQ ID NO: 1116830 - DNA, 15 bp, Homo sapiens
ggcggtggtggtaat

SEQ ID NO: 1116831 - DNA, 15 bp, Homo sapiens
tggcggtggtggtaa

SEQ ID NO: 1116832 - DNA, 15 bp, Homo sapiens
atggcggtggtggta

SEQ ID NO: 1116833 - DNA, 15 bp, Homo sapiens
catggcggtggtggt

SEQ ID NO: 1116834 - DNA, 15 bp, Homo sapiens
ccatggcggtggtgg

SEQ ID NO: 1116835 - DNA, 15 bp, Homo sapiens
tccatggcggtggtg

SEQ ID NO: 1116836 - DNA, 15 bp, Homo sapiens
ttccatggcggtggt

SEQ ID NO: 1116837 - DNA, 15 bp, Homo sapiens
cttccatggcggtgg

SEQ ID NO: 1116838 - DNA, 15 bp, Homo sapiens
ccttccatggcggtg

SEQ ID NO: 1116839 - DNA, 15 bp, Homo sapiens
cccttccatggcggt

SEQ ID NO: 1116840 - DNA, 15 bp, Homo sapiens
ccccttccatggcgg

SEQ ID NO: 1116841 - DNA, 15 bp, Homo sapiens
tccccttccatggcg

SEQ ID NO: 1116842 - DNA, 15 bp, Homo sapiens
ttccccttccatggc

SEQ ID NO: 1116843 - DNA, 15 bp, Homo sapiens
tttccccttccatgg

SEQ ID NO: 1116844 - DNA, 15 bp, Homo sapiens
atttccccttccatg

SEQ ID NO: 1116845 - DNA, 15 bp, Homo sapiens
gatttccccttccat

SEQ ID NO: 1116846 - DNA, 15 bp, Homo sapiens
tgatttccccttcca

SEQ ID NO: 1116847 - DNA, 15 bp, Homo sapiens
ttgatttccccttcc

SEQ ID NO: 1116848 - DNA, 15 bp, Homo sapiens
cttgatttccccttc

SEQ ID NO: 1116849 - DNA, 15 bp, Homo sapiens
tcttgatttcccctt

SEQ ID NO: 1116850 - DNA, 15 bp, Homo sapiens
gtcttgatttcccct

SEQ ID NO: 1116851 - DNA, 15 bp, Homo sapiens
tgtcttgatttcccc

SEQ ID NO: 1116852 - DNA, 15 bp, Homo sapiens
atgtcttgatttccc

SEQ ID NO: 1116853 - DNA, 15 bp, Homo sapiens
aatgtcttgatttcc

SEQ ID NO: 1116854 - DNA, 15 bp, Homo sapiens
aaatgtcttgatttc

SEQ ID NO: 1116855 - DNA, 15 bp, Homo sapiens
aaaatgtcttgattt

SEQ ID NO: 1116856 - DNA, 15 bp, Homo sapiens
gaaaatgtcttgatt

SEQ ID NO: 1116857 - DNA, 15 bp, Homo sapiens
tgaaaatgtcttgat

SEQ ID NO: 1116858 - DNA, 15 bp, Homo sapiens
ctgaaaatgtcttga

SEQ ID NO: 1116859 - DNA, 15 bp, Homo sapiens
tctgaaaatgtcttg

SEQ ID NO: 1116860 - DNA, 15 bp, Homo sapiens
atctgaaaatgtctt

SEQ ID NO: 1116861 - DNA, 15 bp, Homo sapiens
catctgaaaatgtct

SEQ ID NO: 1116862 - DNA, 15 bp, Homo sapiens
tcatctgaaaatgtc

SEQ ID NO: 1116863 - DNA, 15 bp, Homo sapiens
ttcatctgaaaatgt

SEQ ID NO: 1116864 - DNA, 15 bp, Homo sapiens
tttcatctgaaaatg

SEQ ID NO: 1116865 - DNA, 15 bp, Homo sapiens
atttcatctgaaaat

SEQ ID NO: 1116866 - DNA, 15 bp, Homo sapiens
tatttcatctgaaaa

SEQ ID NO: 1116867 - DNA, 15 bp, Homo sapiens
ttatttcatctgaaa

SEQ ID NO: 1116868 - DNA, 15 bp, Homo sapiens
tttatttcatctgaa

SEQ ID NO: 1116869 - DNA, 15 bp, Homo sapiens
atttatttcatctga

SEQ ID NO: 1116870 - DNA, 15 bp, Homo sapiens
gatttatttcatctg

SEQ ID NO: 1116871 - DNA, 15 bp, Homo sapiens
tgatttatttcatct

SEQ ID NO: 1116872 - DNA, 15 bp, Homo sapiens
ttgatttatttcatc

SEQ ID NO: 1116873 - DNA, 15 bp, Homo sapiens
cttgatttatttcat

SEQ ID NO: 1116874 - DNA, 15 bp, Homo sapiens
tcttgatttatttca

SEQ ID NO: 1116875 - DNA, 15 bp, Homo sapiens
ctcttgatttatttc

SEQ ID NO: 1116876 - DNA, 15 bp, Homo sapiens
tctcttgatttattt

SEQ ID NO: 1116877 - DNA, 15 bp, Homo sapiens
ttctcttgatttatt

SEQ ID NO: 1116878 - DNA, 15 bp, Homo sapiens
attctcttgatttat

SEQ ID NO: 1116879 - DNA, 15 bp, Homo sapiens
aattctcttgattta

SEQ ID NO: 1116880 - DNA, 15 bp, Homo sapiens
aaattctcttgattt

SEQ ID NO: 1116881 - DNA, 15 bp, Homo sapiens
caaattctcttgatt

SEQ ID NO: 1116882 - DNA, 15 bp, Homo sapiens
acaaattctcttgat

SEQ ID NO: 1116883 - DNA, 15 bp, Homo sapiens
aacaaattctcttga

SEQ ID NO: 1116884 - DNA, 15 bp, Homo sapiens
caacaaattctcttg

SEQ ID NO: 1116885 - DNA, 15 bp, Homo sapiens
gcaacaaattctctt

SEQ ID NO: 1116886 - DNA, 15 bp, Homo sapiens
ggcaacaaattctct

SEQ ID NO: 1116887 - DNA, 15 bp, Homo sapiens
tggcaacaaattctc

SEQ ID NO: 1116888 - DNA, 15 bp, Homo sapiens
ctggcaacaaattct

SEQ ID NO: 1116889 - DNA, 15 bp, Homo sapiens
gctggcaacaaattc

SEQ ID NO: 1116890 - DNA, 15 bp, Homo sapiens
agctggcaacaaatt

SEQ ID NO: 1116891 - DNA, 15 bp, Homo sapiens
cagctggcaacaaat

SEQ ID NO: 1116892 - DNA, 15 bp, Homo sapiens
tcagctggcaacaaa

SEQ ID NO: 1116893 - DNA, 15 bp, Homo sapiens
gtcagctggcaacaa

SEQ ID NO: 1116894 - DNA, 15 bp, Homo sapiens
agtcagctggcaaca

SEQ ID NO: 1116895 - DNA, 15 bp, Homo sapiens
aagtcagctggcaac

SEQ ID NO: 1116896 - DNA, 15 bp, Homo sapiens
taagtcagctggcaa

SEQ ID NO: 1116897 - DNA, 15 bp, Homo sapiens
gtaagtcagctggca

SEQ ID NO: 1116898 - DNA, 15 bp, Homo sapiens
ggtaagtcagctggc

SEQ ID NO: 1116899 - DNA, 15 bp, Homo sapiens
gggtaagtcagctgg

SEQ ID NO: 1116900 - DNA, 15 bp, Homo sapiens
ggggtaagtcagctg

SEQ ID NO: 1116901 - DNA, 15 bp, Homo sapiens
tggggtaagtcagct

SEQ ID NO: 1116902 - DNA, 15 bp, Homo sapiens
ttggggtaagtcagc

SEQ ID NO: 1116903 - DNA, 15 bp, Homo sapiens
tttggggtaagtcag

SEQ ID NO: 1116904 - DNA, 15 bp, Homo sapiens
ttttggggtaagtca

SEQ ID NO: 1116905 - DNA, 15 bp, Homo sapiens
cttttggggtaagtc

SEQ ID NO: 1116906 - DNA, 15 bp, Homo sapiens
tcttttggggtaagt

SEQ ID NO: 1116907 - DNA, 15 bp, Homo sapiens
ttcttttggggtaag

SEQ ID NO: 1116908 - DNA, 15 bp, Homo sapiens
attcttttggggtaa

SEQ ID NO: 1116909 - DNA, 15 bp, Homo sapiens
cattcttttggggta

SEQ ID NO: 1116910 - DNA, 15 bp, Homo sapiens
ccattcttttggggt

SEQ ID NO: 1116911 - DNA, 15 bp, Homo sapiens
gccattcttttgggg

SEQ ID NO: 1116912 - DNA, 15 bp, Homo sapiens
agccattcttttggg

SEQ ID NO: 1116913 - DNA, 15 bp, Homo sapiens
tagccattcttttgg

SEQ ID NO: 1116914 - DNA, 15 bp, Homo sapiens
ttagccattcttttg

SEQ ID NO: 1116915 - DNA, 15 bp, Homo sapiens
cttagccattctttt

SEQ ID NO: 1116916 - DNA, 15 bp, Homo sapiens
ccttagccattcttt

SEQ ID NO: 1116917 - DNA, 15 bp, Homo sapiens
tccttagccattctt

SEQ ID NO: 1116918 - DNA, 15 bp, Homo sapiens
ttccttagccattct

SEQ ID NO: 1116919 - DNA, 15 bp, Homo sapiens
attccttagccattc

SEQ ID NO: 1116920 - DNA, 15 bp, Homo sapiens
cattccttagccatt

SEQ ID NO: 1116921 - DNA, 15 bp, Homo sapiens
acattccttagccat

SEQ ID NO: 1116922 - DNA, 15 bp, Homo sapiens
aacattccttagcca

SEQ ID NO: 1116923 - DNA, 15 bp, Homo sapiens
gaacattccttagcc

SEQ ID NO: 1116924 - DNA, 15 bp, Homo sapiens
agaacattccttagc

SEQ ID NO: 1116925 - DNA, 15 bp, Homo sapiens
aagaacattccttag

SEQ ID NO: 1116926 - DNA, 15 bp, Homo sapiens
aaagaacattcctta

SEQ ID NO: 1116927 - DNA, 15 bp, Homo sapiens
taaagaacattcctt

SEQ ID NO: 1116928 - DNA, 15 bp, Homo sapiens
ttaaagaacattcct

SEQ ID NO: 1116929 - DNA, 15 bp, Homo sapiens
cttaaagaacattcc

SEQ ID NO: 1116930 - DNA, 15 bp, Homo sapiens
gcttaaagaacattc

SEQ ID NO: 1116931 - DNA, 15 bp, Homo sapiens
tgcttaaagaacatt

SEQ ID NO: 1116932 - DNA, 15 bp, Homo sapiens
ctgcttaaagaacat

SEQ ID NO: 1116933 - DNA, 15 bp, Homo sapiens
tctgcttaaagaaca

SEQ ID NO: 1116934 - DNA, 15 bp, Homo sapiens
ttctgcttaaagaac

SEQ ID NO: 1116935 - DNA, 15 bp, Homo sapiens
tttctgcttaaagaa

SEQ ID NO: 1116936 - DNA, 15 bp, Homo sapiens
ctttctgcttaaaga

SEQ ID NO: 1116937 - DNA, 15 bp, Homo sapiens
cctttctgcttaaag

SEQ ID NO: 1116938 - DNA, 15 bp, Homo sapiens
tcctttctgcttaaa

SEQ ID NO: 1116939 - DNA, 15 bp, Homo sapiens
ttcctttctgcttaa

SEQ ID NO: 1116940 - DNA, 15 bp, Homo sapiens
tttcctttctgctta

SEQ ID NO: 1116941 - DNA, 15 bp, Homo sapiens
atttcctttctgctt

SEQ ID NO: 1116942 - DNA, 15 bp, Homo sapiens
tatttcctttctgct

SEQ ID NO: 1116943 - DNA, 15 bp, Homo sapiens
ttatttcctttctgc

SEQ ID NO: 1116944 - DNA, 15 bp, Homo sapiens
attatttcctttctg

SEQ ID NO: 1116945 - DNA, 15 bp, Homo sapiens
tattatttcctttct

SEQ ID NO: 1116946 - DNA, 15 bp, Homo sapiens
ttattatttcctttc

SEQ ID NO: 1116947 - DNA, 15 bp, Homo sapiens
tttattatttccttt

SEQ ID NO: 1116948 - DNA, 15 bp, Homo sapiens
ttttattatttcctt

SEQ ID NO: 1116949 - DNA, 15 bp, Homo sapiens
cttttattatttcct

SEQ ID NO: 1116950 - DNA, 15 bp, Homo sapiens
tcttttattatttcc

SEQ ID NO: 1116951 - DNA, 15 bp, Homo sapiens
ttcttttattatttc

SEQ ID NO: 1116952 - DNA, 15 bp, Homo sapiens
cttcttttattattt

SEQ ID NO: 1116953 - DNA, 15 bp, Homo sapiens
acttcttttattatt

SEQ ID NO: 1116954 - DNA, 15 bp, Homo sapiens
gacttcttttattat

SEQ ID NO: 1116955 - DNA, 15 bp, Homo sapiens
ggacttcttttatta

SEQ ID NO: 1116956 - DNA, 15 bp, Homo sapiens
aggacttcttttatt

SEQ ID NO: 1116957 - DNA, 15 bp, Homo sapiens
taggacttcttttat

SEQ ID NO: 1116958 - DNA, 15 bp, Homo sapiens
tctaggacttctttt

SEQ ID NO: 1116959 - DNA, 15 bp, Homo sapiens
gtctaggacttcttt

SEQ ID NO: 1116960 - DNA, 15 bp, Homo sapiens
tgtctaggacttctt

SEQ ID NO: 1116961 - DNA, 15 bp, Homo sapiens
atgtctaggacttct

SEQ ID NO: 1116962 - DNA, 15 bp, Homo sapiens
gatgtctaggacttc

SEQ ID NO: 1116963 - DNA, 15 bp, Homo sapiens
tgatgtctaggactt

SEQ ID NO: 1116964 - DNA, 15 bp, Homo sapiens
ctgatgtctaggact

SEQ ID NO: 1116965 - DNA, 15 bp, Homo sapiens
cctgatgtctaggac

SEQ ID NO: 1116966 - DNA, 15 bp, Homo sapiens
tcctgatgtctagga

SEQ ID NO: 1116967 - DNA, 15 bp, Homo sapiens
ttcctgatgtctagg

SEQ ID NO: 1116968 - DNA, 15 bp, Homo sapiens
cttcctgatgtctag

SEQ ID NO: 1116969 - DNA, 15 bp, Homo sapiens
ccttcctgatgtcta

SEQ ID NO: 1116970 - DNA, 15 bp, Homo sapiens
cccttcctgatgtct

SEQ ID NO: 1116971 - DNA, 15 bp, Homo sapiens
tcccttcctgatgtc

SEQ ID NO: 1116972 - DNA, 15 bp, Homo sapiens
ctcccttcctgatgt

SEQ ID NO: 1116973 - DNA, 15 bp, Homo sapiens
actcccttcctgatg

SEQ ID NO: 1116974 - DNA, 15 bp, Homo sapiens
cactcccttcctgat

SEQ ID NO: 1116975 - DNA, 15 bp, Homo sapiens
gcactcccttcctga

SEQ ID NO: 1116976 - DNA, 15 bp, Homo sapiens
cgcactcccttcctg

SEQ ID NO: 1116977 - DNA, 15 bp, Homo sapiens
acgcactcccttcct

SEQ ID NO: 1116978 - DNA, 15 bp, Homo sapiens
tacgcactcccttcc

SEQ ID NO: 1116979 - DNA, 15 bp, Homo sapiens
ctacgcactcccttc

SEQ ID NO: 1116980 - DNA, 15 bp, Homo sapiens
actacgcactccctt

SEQ ID NO: 1116981 - DNA, 15 bp, Homo sapiens
tactacgcactccct

SEQ ID NO: 1116982 - DNA, 15 bp, Homo sapiens
ttactacgcactccc

SEQ ID NO: 1116983 - DNA, 15 bp, Homo sapiens
gttactacgcactcc

SEQ ID NO: 1116984 - DNA, 15 bp, Homo sapiens
tgttactacgcactc

SEQ ID NO: 1116985 - DNA, 15 bp, Homo sapiens
ttgttactacgcact

SEQ ID NO: 1116986 - DNA, 15 bp, Homo sapiens
tttgttactacgcac

SEQ ID NO: 1116987 - DNA, 15 bp, Homo sapiens
ttttgttactacgca

SEQ ID NO: 1116988 - DNA, 15 bp, Homo sapiens
gttttgttactacgc

SEQ ID NO: 1116989 - DNA, 15 bp, Homo sapiens
agttttgttactacg

SEQ ID NO: 1116990 - DNA, 15 bp, Homo sapiens
tagttttgttactac

SEQ ID NO: 1116991 - DNA, 15 bp, Homo sapiens
atagttttgttacta

SEQ ID NO: 1116992 - DNA, 15 bp, Homo sapiens
catagttttgttact

SEQ ID NO: 1116993 - DNA, 15 bp, Homo sapiens
tcatagttttgttac

SEQ ID NO: 1116994 - DNA, 15 bp, Homo sapiens
ctcatagttttgtta

SEQ ID NO: 1116995 - DNA, 15 bp, Homo sapiens
actcatagttttgtt

SEQ ID NO: 1116996 - DNA, 15 bp, Homo sapiens
tactcatagttttgt

SEQ ID NO: 1116997 - DNA, 15 bp, Homo sapiens
ttactcatagttttg

SEQ ID NO: 1116998 - DNA, 15 bp, Homo sapiens
tttactcatagtttt

SEQ ID NO: 1116999 - DNA, 15 bp, Homo sapiens
atttactcatagttt

SEQ ID NO: 1117000 - DNA, 15 bp, Homo sapiens
catttactcatagtt

SEQ ID NO: 1117001 - DNA, 15 bp, Homo sapiens
gcatttactcatagt

SEQ ID NO: 1117002 - DNA, 15 bp, Homo sapiens
tgcatttactcatag

SEQ ID NO: 1117003 - DNA, 15 bp, Homo sapiens
ttgcatttactcata

SEQ ID NO: 1117004 - DNA, 15 bp, Homo sapiens
attgcatttactcat

SEQ ID NO: 1117005 - DNA, 15 bp, Homo sapiens
tattgcatttactca

SEQ ID NO: 1117006 - DNA, 15 bp, Homo sapiens
ctattgcatttactc

SEQ ID NO: 1117007 - DNA, 15 bp, Homo sapiens
tctattgcatttact

SEQ ID NO: 1117008 - DNA, 15 bp, Homo sapiens
gtctattgcatttac

SEQ ID NO: 1117009 - DNA, 15 bp, Homo sapiens
ggtctattgcattta

SEQ ID NO: 1117010 - DNA, 15 bp, Homo sapiens
aggtctattgcattt

SEQ ID NO: 1117011 - DNA, 15 bp, Homo sapiens
aaggtctattgcatt

SEQ ID NO: 1117012 - DNA, 15 bp, Homo sapiens
gaaggtctattgcat

SEQ ID NO: 1117013 - DNA, 15 bp, Homo sapiens
ggaaggtctattgca

SEQ ID NO: 1117014 - DNA, 15 bp, Homo sapiens
aggaaggtctattgc

SEQ ID NO: 1117015 - DNA, 15 bp, Homo sapiens
aaggaaggtctattg

SEQ ID NO: 1117016 - DNA, 15 bp, Homo sapiens
gaaggaaggtctatt

SEQ ID NO: 1117017 - DNA, 15 bp, Homo sapiens
agaaggaaggtctat

SEQ ID NO: 1117018 - DNA, 15 bp, Homo sapiens
gagaaggaaggtcta

SEQ ID NO: 1117019 - DNA, 15 bp, Homo sapiens
agagaaggaaggtct

SEQ ID NO: 1117020 - DNA, 15 bp, Homo sapiens
aagagaaggaaggtc

SEQ ID NO: 1117021 - DNA, 15 bp, Homo sapiens
taagagaaggaaggt

SEQ ID NO: 1117022 - DNA, 15 bp, Homo sapiens
ttaagagaaggaagg

SEQ ID NO: 1117023 - DNA, 15 bp, Homo sapiens
cttaagagaaggaag

SEQ ID NO: 1117024 - DNA, 15 bp, Homo sapiens
gcttaagagaaggaa

SEQ ID NO: 1117025 - DNA, 15 bp, Homo sapiens
agcttaagagaagga

SEQ ID NO: 1117026 - DNA, 15 bp, Homo sapiens
aagcttaagagaagg

SEQ ID NO: 1117027 - DNA, 15 bp, Homo sapiens
aaagcttaagagaag

SEQ ID NO: 1117028 - DNA, 15 bp, Homo sapiens
gaaagcttaagagaa

SEQ ID NO: 1117029 - DNA, 15 bp, Homo sapiens
agaaagcttaagaga

SEQ ID NO: 1117030 - DNA, 15 bp, Homo sapiens
cagaaagcttaagag

SEQ ID NO: 1117031 - DNA, 15 bp, Homo sapiens
tcagaaagcttaaga

SEQ ID NO: 1117032 - DNA, 15 bp, Homo sapiens
ttcagaaagcttaag

SEQ ID NO: 1117033 - DNA, 15 bp, Homo sapiens
attcagaaagcttaa

SEQ ID NO: 1117034 - DNA, 15 bp, Homo sapiens
aattcagaaagctta

SEQ ID NO: 1117035 - DNA, 15 bp, Homo sapiens
taattcagaaagctt

SEQ ID NO: 1117036 - DNA, 15 bp, Homo sapiens
ataattcagaaagct

SEQ ID NO: 1117037 - DNA, 15 bp, Homo sapiens
cataattcagaaagc

SEQ ID NO: 1117038 - DNA, 15 bp, Homo sapiens
acataattcagaaag

SEQ ID NO: 1117039 - DNA, 15 bp, Homo sapiens
aacataattcagaaa

SEQ ID NO: 1117040 - DNA, 15 bp, Homo sapiens
aaacataattcagaa

SEQ ID NO: 1117041 - DNA, 15 bp, Homo sapiens
aaaacataattcaga

SEQ ID NO: 1117042 - DNA, 15 bp, Homo sapiens
taaaacataattcag

SEQ ID NO: 1117043 - DNA, 15 bp, Homo sapiens
ataaaacataattca

SEQ ID NO: 1117044 - DNA, 15 bp, Homo sapiens
cataaaacataattc

SEQ ID NO: 1117045 - DNA, 15 bp, Homo sapiens
ccataaaacataatt

SEQ ID NO: 1117046 - DNA, 15 bp, Homo sapiens
accataaaacataat

SEQ ID NO: 1117047 - DNA, 15 bp, Homo sapiens
taccataaaacataa

SEQ ID NO: 1117048 - DNA, 15 bp, Homo sapiens
ctaccataaaacata

SEQ ID NO: 1117049 - DNA, 15 bp, Homo sapiens
tctaccataaaacat

SEQ ID NO: 1117050 - DNA, 15 bp, Homo sapiens
ttctaccataaaaca

SEQ ID NO: 1117051 - DNA, 15 bp, Homo sapiens
tttctaccataaaac

SEQ ID NO: 1117052 - DNA, 15 bp, Homo sapiens
gtttctaccataaaa

SEQ ID NO: 1117053 - DNA, 15 bp, Homo sapiens
agtttctaccataaa

SEQ ID NO: 1117054 - DNA, 15 bp, Homo sapiens
gagtttctaccataa

SEQ ID NO: 1117055 - DNA, 15 bp, Homo sapiens
agagtttctaccata

SEQ ID NO: 1117056 - DNA, 15 bp, Homo sapiens
tagagtttctaccat

SEQ ID NO: 1117057 - DNA, 15 bp, Homo sapiens
ttagagtttctacca

SEQ ID NO: 1117058 - DNA, 15 bp, Homo sapiens
gttagagtttctacc

SEQ ID NO: 1117059 - DNA, 15 bp, Homo sapiens
tgttagagtttctac

SEQ ID NO: 1117060 - DNA, 15 bp, Homo sapiens
gtgttagagtttcta

SEQ ID NO: 1117061 - DNA, 15 bp, Homo sapiens
agtgttagagtttct

SEQ ID NO: 1117062 - DNA, 15 bp, Homo sapiens
cagtgttagagtttc

SEQ ID NO: 1117063 - DNA, 15 bp, Homo sapiens
acagtgttagagttt

SEQ ID NO: 1117064 - DNA, 15 bp, Homo sapiens
cacagtgttagagtt

SEQ ID NO: 1117065 - DNA, 15 bp, Homo sapiens
tcacagtgttagagt

SEQ ID NO: 1117066 - DNA, 15 bp, Homo sapiens
atcacagtgttagag

SEQ ID NO: 1117067 - DNA, 15 bp, Homo sapiens
tatcacagtgttaga

SEQ ID NO: 1117068 - DNA, 15 bp, Homo sapiens
atatcacagtgttag

SEQ ID NO: 1117069 - DNA, 15 bp, Homo sapiens
catatcacagtgtta

SEQ ID NO: 1117070 - DNA, 15 bp, Homo sapiens
tcatatcacagtgtt

SEQ ID NO: 1117071 - DNA, 15 bp, Homo sapiens
atcatatcacagtgt

SEQ ID NO: 1117072 - DNA, 15 bp, Homo sapiens
gatcatatcacagtg

SEQ ID NO: 1117073 - DNA, 15 bp, Homo sapiens
ggatcatatcacagt

SEQ ID NO: 1117074 - DNA, 15 bp, Homo sapiens
aggatcatatcacag

SEQ ID NO: 1117075 - DNA, 15 bp, Homo sapiens
taggatcatatcaca

SEQ ID NO: 1117076 - DNA, 15 bp, Homo sapiens
gtaggatcatatcac

SEQ ID NO: 1117077 - DNA, 15 bp, Homo sapiens
agtaggatcatatca

SEQ ID NO: 1117078 - DNA, 15 bp, Homo sapiens
gagtaggatcatatc

SEQ ID NO: 1117079 - DNA, 15 bp, Homo sapiens
agagtaggatcatat

SEQ ID NO: 1117080 - DNA, 15 bp, Homo sapiens
cagagtaggatcata

SEQ ID NO: 1117081 - DNA, 15 bp, Homo sapiens
tcagagtaggatcat

SEQ ID NO: 1117082 - DNA, 15 bp, Homo sapiens
gtcagagtaggatca

SEQ ID NO: 1117083 - DNA, 15 bp, Homo sapiens
tgtcagagtaggatc

SEQ ID NO: 1117084 - DNA, 15 bp, Homo sapiens
gtgtcagagtaggat

SEQ ID NO: 1117085 - DNA, 15 bp, Homo sapiens
agtgtcagagtagga

SEQ ID NO: 1117086 - DNA, 15 bp, Homo sapiens
cagtgtcagagtagg

SEQ ID NO: 1117087 - DNA, 15 bp, Homo sapiens
acagtgtcagagtag

SEQ ID NO: 1117088 - DNA, 15 bp, Homo sapiens
gacagtgtcagagta

SEQ ID NO: 1117089 - DNA, 15 bp, Homo sapiens
agacagtgtcagagt

SEQ ID NO: 1117090 - DNA, 15 bp, Homo sapiens
cagacagtgtcagag

SEQ ID NO: 1117091 - DNA, 15 bp, Homo sapiens
tcagacagtgtcaga

SEQ ID NO: 1117092 - DNA, 15 bp, Homo sapiens
atcagacagtgtcag

SEQ ID NO: 1117093 - DNA, 15 bp, Homo sapiens
catcagacagtgtca

SEQ ID NO: 1117094 - DNA, 15 bp, Homo sapiens
acatcagacagtgtc

SEQ ID NO: 1117095 - DNA, 15 bp, Homo sapiens
cacatcagacagtgt

SEQ ID NO: 1117096 - DNA, 15 bp, Homo sapiens
acacatcagacagtg

SEQ ID NO: 1117097 - DNA, 15 bp, Homo sapiens
cacacatcagacagt

SEQ ID NO: 1117098 - DNA, 15 bp, Homo sapiens
acacacatcagacag

SEQ ID NO: 1117099 - DNA, 15 bp, Homo sapiens
aacacacatcagaca

SEQ ID NO: 1117100 - DNA, 15 bp, Homo sapiens
aaacacacatcagac

SEQ ID NO: 1117101 - DNA, 15 bp, Homo sapiens
taaacacacatcaga

SEQ ID NO: 1117102 - DNA, 15 bp, Homo sapiens
ttaaacacacatcag

SEQ ID NO: 1117103 - DNA, 15 bp, Homo sapiens
attaaacacacatca

SEQ ID NO: 1117104 - DNA, 15 bp, Homo sapiens
aattaaacacacatc

SEQ ID NO: 1117105 - DNA, 15 bp, Homo sapiens
aaattaaacacacat

SEQ ID NO: 1117106 - DNA, 15 bp, Homo sapiens
caaattaaacacaca

SEQ ID NO: 1117107 - DNA, 15 bp, Homo sapiens
ccaaattaaacacac

SEQ ID NO: 1117108 - DNA, 15 bp, Homo sapiens
tccaaattaaacaca

SEQ ID NO: 1117109 - DNA, 15 bp, Homo sapiens
ttccaaattaaacac

SEQ ID NO: 1117110 - DNA, 15 bp, Homo sapiens
tttccaaattaaaca

SEQ ID NO: 1117111 - DNA, 15 bp, Homo sapiens
atttccaaattaaac

SEQ ID NO: 1117112 - DNA, 15 bp, Homo sapiens
tatttccaaattaaa

SEQ ID NO: 1117113 - DNA, 15 bp, Homo sapiens
ctatttccaaattaa

SEQ ID NO: 1117114 - DNA, 15 bp, Homo sapiens
tctatttccaaatta

SEQ ID NO: 1117115 - DNA, 15 bp, Homo sapiens
atctatttccaaatt

SEQ ID NO: 1117116 - DNA, 15 bp, Homo sapiens
tatctatttccaaat

SEQ ID NO: 1117117 - DNA, 15 bp, Homo sapiens
ttatctatttccaaa

SEQ ID NO: 1117118 - DNA, 15 bp, Homo sapiens
cttatctatttccaa

SEQ ID NO: 1117119 - DNA, 15 bp, Homo sapiens
tcttatctatttcca

SEQ ID NO: 1117120 - DNA, 15 bp, Homo sapiens
gtcttatctatttcc

SEQ ID NO: 1117121 - DNA, 15 bp, Homo sapiens
tgtcttatctatttc

SEQ ID NO: 1117122 - DNA, 15 bp, Homo sapiens
gtgtcttatctattt

SEQ ID NO: 1117123 - DNA, 15 bp, Homo sapiens
agtgtcttatctatt

SEQ ID NO: 1117124 - DNA, 15 bp, Homo sapiens
aagtgtcttatctat

SEQ ID NO: 1117125 - DNA, 15 bp, Homo sapiens
taagtgtcttatcta

SEQ ID NO: 1117126 - DNA, 15 bp, Homo sapiens
ataagtgtcttatct

SEQ ID NO: 1117127 - DNA, 15 bp, Homo sapiens
aataagtgtcttatc

SEQ ID NO: 1117128 - DNA, 15 bp, Homo sapiens
taataagtgtcttat

SEQ ID NO: 1117129 - DNA, 15 bp, Homo sapiens
ttaataagtgtctta

SEQ ID NO: 1117130 - DNA, 15 bp, Homo sapiens
gttaataagtgtctt

SEQ ID NO: 1117131 - DNA, 15 bp, Homo sapiens
cgttaataagtgtct

SEQ ID NO: 1117132 - DNA, 15 bp, Homo sapiens
tcgttaataagtgtc

SEQ ID NO: 1117133 - DNA, 15 bp, Homo sapiens
ttcgttaataagtgt

SEQ ID NO: 1117134 - DNA, 15 bp, Homo sapiens
cttcgttaataagtg

SEQ ID NO: 1117135 - DNA, 15 bp, Homo sapiens
ccttcgttaataagt

SEQ ID NO: 1117136 - DNA, 15 bp, Homo sapiens
tccttcgttaataag

SEQ ID NO: 1117137 - DNA, 15 bp, Homo sapiens
ctccttcgttaataa

SEQ ID NO: 1117138 - DNA, 15 bp, Homo sapiens
tctccttcgttaata

SEQ ID NO: 1117139 - DNA, 15 bp, Homo sapiens
ctctccttcgttaat

SEQ ID NO: 1117140 - DNA, 15 bp, Homo sapiens
actctccttcgttaa

SEQ ID NO: 1117141 - DNA, 15 bp, Homo sapiens
tactctccttcgtta

SEQ ID NO: 1117142 - DNA, 15 bp, Homo sapiens
ctactctccttcgtt

SEQ ID NO: 1117143 - DNA, 15 bp, Homo sapiens
tctactctccttcgt

SEQ ID NO: 1117144 - DNA, 15 bp, Homo sapiens
ctctactctccttcg

SEQ ID NO: 1117145 - DNA, 15 bp, Homo sapiens
cctctactctccttc

SEQ ID NO: 1117146 - DNA, 15 bp, Homo sapiens
acctctactctcctt

SEQ ID NO: 1117147 - DNA, 15 bp, Homo sapiens
tacctctactctcct

SEQ ID NO: 1117148 - DNA, 15 bp, Homo sapiens
atacctctactctcc

SEQ ID NO: 1117149 - DNA, 15 bp, Homo sapiens
catacctctactctc

SEQ ID NO: 1117150 - DNA, 15 bp, Homo sapiens
acatacctctactct

SEQ ID NO: 1117151 - DNA, 15 bp, Homo sapiens
tacatacctctactc

SEQ ID NO: 1117152 - DNA, 15 bp, Homo sapiens
ttacatacctctact

SEQ ID NO: 1117153 - DNA, 15 bp, Homo sapiens
attacatacctctac

SEQ ID NO: 1117154 - DNA, 15 bp, Homo sapiens
cattacatacctcta

SEQ ID NO: 1117155 - DNA, 15 bp, Homo sapiens
ccattacatacctct

SEQ ID NO: 1117156 - DNA, 15 bp, Homo sapiens
cccattacatacctc

SEQ ID NO: 1117157 - DNA, 15 bp, Homo sapiens
tcccattacatacct

SEQ ID NO: 1117158 - DNA, 15 bp, Homo sapiens
ctcccattacatacc

SEQ ID NO: 1117159 - DNA, 15 bp, Homo sapiens
cctcccattacatac

SEQ ID NO: 1117160 - DNA, 15 bp, Homo sapiens
acctcccattacata

SEQ ID NO: 1117161 - DNA, 15 bp, Homo sapiens
tacctcccattacat

SEQ ID NO: 1117162 - DNA, 15 bp, Homo sapiens
ttacctcccattaca

SEQ ID NO: 1117163 - DNA, 15 bp, Homo sapiens
attacctcccattac

SEQ ID NO: 1117164 - DNA, 15 bp, Homo sapiens
gattacctcccatta

SEQ ID NO: 1117165 - DNA, 15 bp, Homo sapiens
agattacctcccatt

SEQ ID NO: 1117166 - DNA, 15 bp, Homo sapiens
aagattacctcccat

SEQ ID NO: 1117167 - DNA, 15 bp, Homo sapiens
aaagattacctccca

SEQ ID NO: 1117168 - DNA, 15 bp, Homo sapiens
taaagattacctccc

SEQ ID NO: 1117169 - DNA, 15 bp, Homo sapiens
ataaagattacctcc

SEQ ID NO: 1117170 - DNA, 15 bp, Homo sapiens
tataaagattacctc

SEQ ID NO: 1117171 - DNA, 15 bp, Homo sapiens
atataaagattacct

SEQ ID NO: 1117172 - DNA, 15 bp, Homo sapiens
tatataaagattacc

SEQ ID NO: 1117173 - DNA, 15 bp, Homo sapiens
atatataaagattac

SEQ ID NO: 1117174 - DNA, 15 bp, Homo sapiens
aatatataaagatta

SEQ ID NO: 1117175 - DNA, 15 bp, Homo sapiens
aaatatataaagatt

SEQ ID NO: 1117176 - DNA, 15 bp, Homo sapiens
gaaatatataaagat

SEQ ID NO: 1117177 - DNA, 15 bp, Homo sapiens
tgaaatatataaaga

SEQ ID NO: 1117178 - DNA, 15 bp, Homo sapiens
gtgaaatatataaag

SEQ ID NO: 1117179 - DNA, 15 bp, Homo sapiens
agtgaaatatataaa

SEQ ID NO: 1117180 - DNA, 15 bp, Homo sapiens
aagtgaaatatataa

SEQ ID NO: 1117181 - DNA, 15 bp, Homo sapiens
caagtgaaatatata

SEQ ID NO: 1117182 - DNA, 15 bp, Homo sapiens
tcaagtgaaatatat

SEQ ID NO: 1117183 - DNA, 15 bp, Homo sapiens
ttcaagtgaaatata

SEQ ID NO: 1117184 - DNA, 15 bp, Homo sapiens
attcaagtgaaatat

SEQ ID NO: 1117185 - DNA, 15 bp, Homo sapiens
aattcaagtgaaata

SEQ ID NO: 1117186 - DNA, 15 bp, Homo sapiens
caattcaagtgaaat

SEQ ID NO: 1117187 - DNA, 15 bp, Homo sapiens
ccaattcaagtgaaa

SEQ ID NO: 1117188 - DNA, 15 bp, Homo sapiens
accaattcaagtgaa

SEQ ID NO: 1117189 - DNA, 15 bp, Homo sapiens
taccaattcaagtga

SEQ ID NO: 1117190 - DNA, 15 bp, Homo sapiens
ttaccaattcaagtg

SEQ ID NO: 1117191 - DNA, 15 bp, Homo sapiens
tttaccaattcaagt

SEQ ID NO: 1117192 - DNA, 15 bp, Homo sapiens
ttttaccaattcaag

SEQ ID NO: 1117193 - DNA, 15 bp, Homo sapiens
attttaccaattcaa

SEQ ID NO: 1117194 - DNA, 15 bp, Homo sapiens
cattttaccaattca

SEQ ID NO: 1117195 - DNA, 15 bp, Homo sapiens
tcattttaccaattc

SEQ ID NO: 1117196 - DNA, 15 bp, Homo sapiens
gtcattttaccaatt

SEQ ID NO: 1117197 - DNA, 15 bp, Homo sapiens
tgtcattttaccaat

SEQ ID NO: 1117198 - DNA, 15 bp, Homo sapiens
ctgtcattttaccaa

SEQ ID NO: 1117199 - DNA, 15 bp, Homo sapiens
gctgtcattttacca

SEQ ID NO: 1117200 - DNA, 15 bp, Homo sapiens
tgctgtcattttacc

SEQ ID NO: 1117201 - DNA, 15 bp, Homo sapiens
gtgctgtcattttac

SEQ ID NO: 1117202 - DNA, 15 bp, Homo sapiens
agtgctgtcatttta

SEQ ID NO: 1117203 - DNA, 15 bp, Homo sapiens
tagtgctgtcatttt

SEQ ID NO: 1117204 - DNA, 15 bp, Homo sapiens
ctagtgctgtcattt

SEQ ID NO: 1117205 - DNA, 15 bp, Homo sapiens
actagtgctgtcatt

SEQ ID NO: 1117206 - DNA, 15 bp, Homo sapiens
tactagtgctgtcat

SEQ ID NO: 1117207 - DNA, 15 bp, Homo sapiens
ctactagtgctgtca

SEQ ID NO: 1117208 - DNA, 15 bp, Homo sapiens
tctactagtgctgtc

SEQ ID NO: 1117209 - DNA, 15 bp, Homo sapiens
gtctactagtgctgt

SEQ ID NO: 1117210 - DNA, 15 bp, Homo sapiens
agtctactagtgctg

SEQ ID NO: 1117211 - DNA, 15 bp, Homo sapiens
cagtctactagtgct

SEQ ID NO: 1117212 - DNA, 15 bp, Homo sapiens
acagtctactagtgc

SEQ ID NO: 1117213 - DNA, 15 bp, Homo sapiens
cacagtctactagtg

SEQ ID NO: 1117214 - DNA, 15 bp, Homo sapiens
tcacagtctactagt

SEQ ID NO: 1117215 - DNA, 15 bp, Homo sapiens
ttcacagtctactag

SEQ ID NO: 1117216 - DNA, 15 bp, Homo sapiens
tttcacagtctacta

SEQ ID NO: 1117217 - DNA, 15 bp, Homo sapiens
ttttcacagtctact

SEQ ID NO: 1117218 - DNA, 15 bp, Homo sapiens
cttttcacagtctac

SEQ ID NO: 1117219 - DNA, 15 bp, Homo sapiens
acttttcacagtcta

SEQ ID NO: 1117220 - DNA, 15 bp, Homo sapiens
cacttttcacagtct

SEQ ID NO: 1117221 - DNA, 15 bp, Homo sapiens
tcacttttcacagtc

SEQ ID NO: 1117222 - DNA, 15 bp, Homo sapiens
atcacttttcacagt

SEQ ID NO: 1117223 - DNA, 15 bp, Homo sapiens
catcacttttcacag

SEQ ID NO: 1117224 - DNA, 15 bp, Homo sapiens
acatcacttttcaca

SEQ ID NO: 1117225 - DNA, 15 bp, Homo sapiens
tacatcacttttcac

SEQ ID NO: 1117226 - DNA, 15 bp, Homo sapiens
atacatcacttttca

SEQ ID NO: 1117227 - DNA, 15 bp, Homo sapiens
gatacatcacttttc

SEQ ID NO: 1117228 - DNA, 15 bp, Homo sapiens
agatacatcactttt

SEQ ID NO: 1117229 - DNA, 15 bp, Homo sapiens
tagatacatcacttt

SEQ ID NO: 1117230 - DNA, 15 bp, Homo sapiens
atagatacatcactt

SEQ ID NO: 1117231 - DNA, 15 bp, Homo sapiens
tatagatacatcact

SEQ ID NO: 1117232 - DNA, 15 bp, Homo sapiens
ttatagatacatcac

SEQ ID NO: 1117233 - DNA, 15 bp, Homo sapiens
attatagatacatca

SEQ ID NO: 1117234 - DNA, 15 bp, Homo sapiens
cattatagatacatc

SEQ ID NO: 1117235 - DNA, 15 bp, Homo sapiens
acattatagatacat

SEQ ID NO: 1117236 - DNA, 15 bp, Homo sapiens
tacattatagataca

SEQ ID NO: 1117237 - DNA, 15 bp, Homo sapiens
atacattatagatac

SEQ ID NO: 1117238 - DNA, 15 bp, Homo sapiens
aatacattatagata

SEQ ID NO: 1117239 - DNA, 15 bp, Homo sapiens
aaatacattatagat

SEQ ID NO: 1117240 - DNA, 15 bp, Homo sapiens
gaaatacattataga

SEQ ID NO: 1117241 - DNA, 15 bp, Homo sapiens
ggaaatacattatag

SEQ ID NO: 1117242 - DNA, 15 bp, Homo sapiens
aggaaatacattata

SEQ ID NO: 1117243 - DNA, 15 bp, Homo sapiens
taggaaatacattat

SEQ ID NO: 1117244 - DNA, 15 bp, Homo sapiens
ctaggaaatacatta

SEQ ID NO: 1117245 - DNA, 15 bp, Homo sapiens
tctaggaaatacatt

SEQ ID NO: 1117246 - DNA, 15 bp, Homo sapiens
ctctaggaaatacat

SEQ ID NO: 1117247 - DNA, 15 bp, Homo sapiens
gctctaggaaataca

SEQ ID NO: 1117248 - DNA, 15 bp, Homo sapiens
tgctctaggaaatac

SEQ ID NO: 1117249 - DNA, 15 bp, Homo sapiens
ttgctctaggaaata

SEQ ID NO: 1117250 - DNA, 15 bp, Homo sapiens
gttgctctaggaaat

SEQ ID NO: 1117251 - DNA, 15 bp, Homo sapiens
ggttgctctaggaaa

SEQ ID NO: 1117252 - DNA, 15 bp, Homo sapiens
tggttgctctaggaa

SEQ ID NO: 1117253 - DNA, 15 bp, Homo sapiens
gtggttgctctagga

SEQ ID NO: 1117254 - DNA, 15 bp, Homo sapiens
agtggttgctctagg

SEQ ID NO: 1117255 - DNA, 15 bp, Homo sapiens
aagtggttgctctag

SEQ ID NO: 1117256 - DNA, 15 bp, Homo sapiens
taagtggttgctcta

SEQ ID NO: 1117257 - DNA, 15 bp, Homo sapiens
ttaagtggttgctct

SEQ ID NO: 1117258 - DNA, 15 bp, Homo sapiens
tttaagtggttgctc

SEQ ID NO: 1117259 - DNA, 15 bp, Homo sapiens
ttttaagtggttgct

SEQ ID NO: 1117260 - DNA, 15 bp, Homo sapiens
tttttaagtggttgc

SEQ ID NO: 1117261 - DNA, 15 bp, Homo sapiens
ctttttaagtggttg

SEQ ID NO: 1117262 - DNA, 15 bp, Homo sapiens
gctttttaagtggtt

SEQ ID NO: 1117263 - DNA, 15 bp, Homo sapiens
agctttttaagtggt

SEQ ID NO: 1117264 - DNA, 15 bp, Homo sapiens
tagctttttaagtgg

SEQ ID NO: 1117265 - DNA, 15 bp, Homo sapiens
atagctttttaagtg

SEQ ID NO: 1117266 - DNA, 15 bp, Homo sapiens
tatagctttttaagt

SEQ ID NO: 1117267 - DNA, 15 bp, Homo sapiens
gtatagctttttaag

SEQ ID NO: 1117268 - DNA, 15 bp, Homo sapiens
tgtatagctttttaa

SEQ ID NO: 1117269 - DNA, 15 bp, Homo sapiens
ttgtatagcttttta

SEQ ID NO: 1117270 - DNA, 15 bp, Homo sapiens
tttgtatagcttttt

SEQ ID NO: 1117271 - DNA, 15 bp, Homo sapiens
ctttgtatagctttt

SEQ ID NO: 1117272 - DNA, 15 bp, Homo sapiens
tctttgtatagcttt

SEQ ID NO: 1117273 - DNA, 15 bp, Homo sapiens
ctctttgtatagctt

SEQ ID NO: 1117274 - DNA, 15 bp, Homo sapiens
tctctttgtatagct

SEQ ID NO: 1117275 - DNA, 15 bp, Homo sapiens
ctctctttgtatagc

SEQ ID NO: 1117276 - DNA, 15 bp, Homo sapiens
tctctctttgtatag

SEQ ID NO: 1117277 - DNA, 15 bp, Homo sapiens
gtctctctttgtata

SEQ ID NO: 1117278 - DNA, 15 bp, Homo sapiens
tgtctctctttgtat

SEQ ID NO: 1117279 - DNA, 15 bp, Homo sapiens
gtgtctctctttgta

SEQ ID NO: 1117280 - DNA, 15 bp, Homo sapiens
agtgtctctctttgt

SEQ ID NO: 1117281 - DNA, 15 bp, Homo sapiens
aagtgtctctctttg

SEQ ID NO: 1117282 - DNA, 15 bp, Homo sapiens
taagtgtctctcttt

SEQ ID NO: 1117283 - DNA, 15 bp, Homo sapiens
ttaagtgtctctctt

SEQ ID NO: 1117284 - DNA, 15 bp, Homo sapiens
tttaagtgtctctct

SEQ ID NO: 1117285 - DNA, 15 bp, Homo sapiens
ttttaagtgtctctc

SEQ ID NO: 1117286 - DNA, 15 bp, Homo sapiens
tttttaagtgtctct

SEQ ID NO: 1117287 - DNA, 15 bp, Homo sapiens
gtttttaagtgtctc

SEQ ID NO: 1117288 - DNA, 15 bp, Homo sapiens
cgtttttaagtgtct

SEQ ID NO: 1117289 - DNA, 15 bp, Homo sapiens
gcgtttttaagtgtc

SEQ ID NO: 1117290 - DNA, 15 bp, Homo sapiens
agcgtttttaagtgt

SEQ ID NO: 1117291 - DNA, 15 bp, Homo sapiens
tagcgtttttaagtg

SEQ ID NO: 1117292 - DNA, 15 bp, Homo sapiens
atagcgtttttaagt

SEQ ID NO: 1117293 - DNA, 15 bp, Homo sapiens
tatagcgtttttaag

SEQ ID NO: 1117294 - DNA, 15 bp, Homo sapiens
ctatagcgtttttaa

SEQ ID NO: 1117295 - DNA, 15 bp, Homo sapiens
tctatagcgttttta

SEQ ID NO: 1117296 - DNA, 15 bp, Homo sapiens
atctatagcgttttt

SEQ ID NO: 1117297 - DNA, 15 bp, Homo sapiens
tatctatagcgtttt

SEQ ID NO: 1117298 - DNA, 15 bp, Homo sapiens
ttatctatagcgttt

SEQ ID NO: 1117299 - DNA, 15 bp, Homo sapiens
tttatctatagcgtt

SEQ ID NO: 1117300 - DNA, 15 bp, Homo sapiens
atttatctatagcgt

SEQ ID NO: 1117301 - DNA, 15 bp, Homo sapiens
gatttatctatagcg

SEQ ID NO: 1117302 - DNA, 15 bp, Homo sapiens
tgatttatctatagc

SEQ ID NO: 1117303 - DNA, 15 bp, Homo sapiens
ttgatttatctatag

SEQ ID NO: 1117304 - DNA, 15 bp, Homo sapiens
tttgatttatctata

SEQ ID NO: 1117305 - DNA, 15 bp, Homo sapiens
ttttgatttatctat

SEQ ID NO: 1117306 - DNA, 15 bp, Homo sapiens
attttgatttatcta

SEQ ID NO: 1117307 - DNA, 15 bp, Homo sapiens
aattttgatttatct

SEQ ID NO: 1117308 - DNA, 15 bp, Homo sapiens
caattttgatttatc

SEQ ID NO: 1117309 - DNA, 15 bp, Homo sapiens
tcaattttgatttat

SEQ ID NO: 1117310 - DNA, 15 bp, Homo sapiens
ttcaattttgattta

SEQ ID NO: 1117311 - DNA, 15 bp, Homo sapiens
attcaattttgattt

SEQ ID NO: 1117312 - DNA, 15 bp, Homo sapiens
aattcaattttgatt

SEQ ID NO: 1117313 - DNA, 15 bp, Homo sapiens
gaattcaattttgat

SEQ ID NO: 1117314 - DNA, 15 bp, Homo sapiens
agaattcaattttga

SEQ ID NO: 1117315 - DNA, 15 bp, Homo sapiens
tagaattcaattttg

SEQ ID NO: 1117316 - DNA, 15 bp, Homo sapiens
ttagaattcaatttt

SEQ ID NO: 1117317 - DNA, 15 bp, Homo sapiens
tttagaattcaattt

SEQ ID NO: 1117318 - DNA, 15 bp, Homo sapiens
ttttagaattcaatt

SEQ ID NO: 1117319 - DNA, 15 bp, Homo sapiens
tttttagaattcaat

SEQ ID NO: 1117320 - DNA, 15 bp, Homo sapiens
ttttttagaattcaa

SEQ ID NO: 1117321 - DNA, 15 bp, Homo sapiens
tttttttagaattca

SEQ ID NO: 1117322 - DNA, 15 bp, Homo sapiens
atttttttagaattc

SEQ ID NO: 1117323 - DNA, 15 bp, Homo sapiens
catttttttagaatt

SEQ ID NO: 1117324 - DNA, 15 bp, Homo sapiens
acatttttttagaat

SEQ ID NO: 1117325 - DNA, 15 bp, Homo sapiens
aacatttttttagaa

SEQ ID NO: 1117326 - DNA, 15 bp, Homo sapiens
gaacatttttttaga

SEQ ID NO: 1117327 - DNA, 15 bp, Homo sapiens
tgaacatttttttag

SEQ ID NO: 1117328 - DNA, 15 bp, Homo sapiens
ttgaacattttttta

SEQ ID NO: 1117329 - DNA, 15 bp, Homo sapiens
cttgaacattttttt

SEQ ID NO: 1117330 - DNA, 15 bp, Homo sapiens
gcttgaacatttttt

SEQ ID NO: 1117331 - DNA, 15 bp, Homo sapiens
tgcttgaacattttt

SEQ ID NO: 1117332 - DNA, 15 bp, Homo sapiens
ctgcttgaacatttt

SEQ ID NO: 1117333 - DNA, 15 bp, Homo sapiens
gctgcttgaacattt

SEQ ID NO: 1117334 - DNA, 15 bp, Homo sapiens
ggctgcttgaacatt

SEQ ID NO: 1117335 - DNA, 15 bp, Homo sapiens
gggctgcttgaacat

SEQ ID NO: 1117336 - DNA, 15 bp, Homo sapiens
tgggctgcttgaaca

SEQ ID NO: 1117337 - DNA, 15 bp, Homo sapiens
atgggctgcttgaac

SEQ ID NO: 1117338 - DNA, 15 bp, Homo sapiens
tatgggctgcttgaa

SEQ ID NO: 1117339 - DNA, 15 bp, Homo sapiens
ctatgggctgcttga

SEQ ID NO: 1117340 - DNA, 15 bp, Homo sapiens
cctatgggctgcttg

SEQ ID NO: 1117341 - DNA, 15 bp, Homo sapiens
tcctatgggctgctt

SEQ ID NO: 1117342 - DNA, 15 bp, Homo sapiens
ttcctatgggctgct

SEQ ID NO: 1117343 - DNA, 15 bp, Homo sapiens
cttcctatgggctgc

SEQ ID NO: 1117344 - DNA, 15 bp, Homo sapiens
ccttcctatgggctg

SEQ ID NO: 1117345 - DNA, 15 bp, Homo sapiens
accttcctatgggct

SEQ ID NO: 1117346 - DNA, 15 bp, Homo sapiens
taccttcctatgggc

SEQ ID NO: 1117347 - DNA, 15 bp, Homo sapiens
ttaccttcctatggg

SEQ ID NO: 1117348 - DNA, 15 bp, Homo sapiens
cttaccttcctatgg

SEQ ID NO: 1117349 - DNA, 15 bp, Homo sapiens
tcttaccttcctatg

SEQ ID NO: 1117350 - DNA, 15 bp, Homo sapiens
ctcttaccttcctat

SEQ ID NO: 1117351 - DNA, 15 bp, Homo sapiens
tctcttaccttccta

SEQ ID NO: 1117352 - DNA, 15 bp, Homo sapiens
ttctcttaccttcct

SEQ ID NO: 1117353 - DNA, 15 bp, Homo sapiens
tttctcttaccttcc

SEQ ID NO: 1117354 - DNA, 15 bp, Homo sapiens
ctttctcttaccttc

SEQ ID NO: 1117355 - DNA, 15 bp, Homo sapiens
gctttctcttacctt

SEQ ID NO: 1117356 - DNA, 15 bp, Homo sapiens
tgctttctcttacct

SEQ ID NO: 1117357 - DNA, 15 bp, Homo sapiens
ttgctttctcttacc

SEQ ID NO: 1117358 - DNA, 15 bp, Homo sapiens
tttgctttctcttac

SEQ ID NO: 1117359 - DNA, 15 bp, Homo sapiens
gtttgctttctctta

SEQ ID NO: 1117360 - DNA, 15 bp, Homo sapiens
tgtttgctttctctt

SEQ ID NO: 1117361 - DNA, 15 bp, Homo sapiens
gtgtttgctttctct

SEQ ID NO: 1117362 - DNA, 15 bp, Homo sapiens
tgtgtttgctttctc

SEQ ID NO: 1117363 - DNA, 15 bp, Homo sapiens
ctgtgtttgctttct

SEQ ID NO: 1117364 - DNA, 15 bp, Homo sapiens
tctgtgtttgctttc

SEQ ID NO: 1117365 - DNA, 15 bp, Homo sapiens
ttctgtgtttgcttt

SEQ ID NO: 1117366 - DNA, 15 bp, Homo sapiens
tttctgtgtttgctt

SEQ ID NO: 1117367 - DNA, 15 bp, Homo sapiens
atttctgtgtttgct

SEQ ID NO: 1117368 - DNA, 15 bp, Homo sapiens
tatttctgtgtttgc

SEQ ID NO: 1117369 - DNA, 15 bp, Homo sapiens
ttatttctgtgtttg

SEQ ID NO: 1117370 - DNA, 15 bp, Homo sapiens
gttatttctgtgttt

SEQ ID NO: 1117371 - DNA, 15 bp, Homo sapiens
tgttatttctgtgtt

SEQ ID NO: 1117372 - DNA, 15 bp, Homo sapiens
ctgttatttctgtgt

SEQ ID NO: 1117373 - DNA, 15 bp, Homo sapiens
tctgttatttctgtg

SEQ ID NO: 1117374 - DNA, 15 bp, Homo sapiens
ctctgttatttctgt

SEQ ID NO: 1117375 - DNA, 15 bp, Homo sapiens
tctctgttatttctg

SEQ ID NO: 1117376 - DNA, 15 bp, Homo sapiens
ctctctgttatttct

SEQ ID NO: 1117377 - DNA, 15 bp, Homo sapiens
tctctctgttatttc

SEQ ID NO: 1117378 - DNA, 15 bp, Homo sapiens
ttctctctgttattt

SEQ ID NO: 1117379 - DNA, 15 bp, Homo sapiens
gttctctctgttatt

SEQ ID NO: 1117380 - DNA, 15 bp, Homo sapiens
tgttctctctgttat

SEQ ID NO: 1117381 - DNA, 15 bp, Homo sapiens
ttgttctctctgtta

SEQ ID NO: 1117382 - DNA, 15 bp, Homo sapiens
tttgttctctctgtt

SEQ ID NO: 1117383 - DNA, 15 bp, Homo sapiens
atttgttctctctgt

SEQ ID NO: 1117384 - DNA, 15 bp, Homo sapiens
tatttgttctctctg

SEQ ID NO: 1117385 - DNA, 15 bp, Homo sapiens
ctatttgttctctct

SEQ ID NO: 1117386 - DNA, 15 bp, Homo sapiens
tctatttgttctctc

SEQ ID NO: 1117387 - DNA, 15 bp, Homo sapiens
ttctatttgttctct

SEQ ID NO: 1117388 - DNA, 15 bp, Homo sapiens
tttctatttgttctc

SEQ ID NO: 1117389 - DNA, 15 bp, Homo sapiens
ttttctatttgttct

SEQ ID NO: 1117390 - DNA, 15 bp, Homo sapiens
gttttctatttgttc

SEQ ID NO: 1117391 - DNA, 15 bp, Homo sapiens
tgttttctatttgtt

SEQ ID NO: 1117392 - DNA, 15 bp, Homo sapiens
ttgttttctatttgt

SEQ ID NO: 1117393 - DNA, 15 bp, Homo sapiens
cttgttttctatttg

SEQ ID NO: 1117394 - DNA, 15 bp, Homo sapiens
tcttgttttctattt

SEQ ID NO: 1117395 - DNA, 15 bp, Homo sapiens
ttcttgttttctatt

SEQ ID NO: 1117396 - DNA, 15 bp, Homo sapiens
tttcttgttttctat

SEQ ID NO: 1117397 - DNA, 15 bp, Homo sapiens
ctttcttgttttcta

SEQ ID NO: 1117398 - DNA, 15 bp, Homo sapiens
tctttcttgttttct

SEQ ID NO: 1117399 - DNA, 15 bp, Homo sapiens
ttctttcttgttttc

SEQ ID NO: 1117400 - DNA, 15 bp, Homo sapiens
tttctttcttgtttt

SEQ ID NO: 1117401 - DNA, 15 bp, Homo sapiens
ttttctttcttgttt

SEQ ID NO: 1117402 - DNA, 15 bp, Homo sapiens
attttctttcttgtt

SEQ ID NO: 1117403 - DNA, 15 bp, Homo sapiens
cattttctttcttgt

SEQ ID NO: 1117404 - DNA, 15 bp, Homo sapiens
tcattttctttcttg

SEQ ID NO: 1117405 - DNA, 15 bp, Homo sapiens
gtcattttctttctt

SEQ ID NO: 1117406 - DNA, 15 bp, Homo sapiens
tgtcattttctttct

SEQ ID NO: 1117407 - DNA, 15 bp, Homo sapiens
atgtcattttctttc

SEQ ID NO: 1117408 - DNA, 15 bp, Homo sapiens
tatgtcattttcttt

SEQ ID NO: 1117409 - DNA, 15 bp, Homo sapiens
atatgtcattttctt

SEQ ID NO: 1117410 - DNA, 15 bp, Homo sapiens
aatatgtcattttct

SEQ ID NO: 1117411 - DNA, 15 bp, Homo sapiens
aaatatgtcattttc

SEQ ID NO: 1117412 - DNA, 15 bp, Homo sapiens
cttaaatatgtcatt

SEQ ID NO: 1117413 - DNA, 15 bp, Homo sapiens
gcttaaatatgtcat

SEQ ID NO: 1117414 - DNA, 15 bp, Homo sapiens
ggcttaaatatgtca

SEQ ID NO: 1117415 - DNA, 15 bp, Homo sapiens
gggcttaaatatgtc

SEQ ID NO: 1117416 - DNA, 15 bp, Homo sapiens
agggcttaaatatgt

SEQ ID NO: 1117417 - DNA, 15 bp, Homo sapiens
tagggcttaaatatg

SEQ ID NO: 1117418 - DNA, 15 bp, Homo sapiens
ttagggcttaaatat

SEQ ID NO: 1117419 - DNA, 15 bp, Homo sapiens
attagggcttaaata

SEQ ID NO: 1117420 - DNA, 15 bp, Homo sapiens
tattagggcttaaat

SEQ ID NO: 1117421 - DNA, 15 bp, Homo sapiens
atattagggcttaaa

SEQ ID NO: 1117422 - DNA, 15 bp, Homo sapiens
tatattagggcttaa

SEQ ID NO: 1117423 - DNA, 15 bp, Homo sapiens
atatattagggctta

SEQ ID NO: 1117424 - DNA, 15 bp, Homo sapiens
gatatattagggctt

SEQ ID NO: 1117425 - DNA, 15 bp, Homo sapiens
tgatatattagggct

SEQ ID NO: 1117426 - DNA, 15 bp, Homo sapiens
ttgatatattagggc

SEQ ID NO: 1117427 - DNA, 15 bp, Homo sapiens
tttgatatattaggg

SEQ ID NO: 1117428 - DNA, 15 bp, Homo sapiens
ttttgatatattagg

SEQ ID NO: 1117429 - DNA, 15 bp, Homo sapiens
attttgatatattag

SEQ ID NO: 1117430 - DNA, 15 bp, Homo sapiens
tattttgatatatta

SEQ ID NO: 1117431 - DNA, 15 bp, Homo sapiens
atattttgatatatt

SEQ ID NO: 1117432 - DNA, 15 bp, Homo sapiens
tatattttgatatat

SEQ ID NO: 1117433 - DNA, 15 bp, Homo sapiens
ttatattttgatata

SEQ ID NO: 1117434 - DNA, 15 bp, Homo sapiens
cttatattttgatat

SEQ ID NO: 1117435 - DNA, 15 bp, Homo sapiens
gcttatattttgata

SEQ ID NO: 1117436 - DNA, 15 bp, Homo sapiens
tgcttatattttgat

SEQ ID NO: 1117437 - DNA, 15 bp, Homo sapiens
ttgcttatattttga

SEQ ID NO: 1117438 - DNA, 15 bp, Homo sapiens
cttgcttatattttg

SEQ ID NO: 1117439 - DNA, 15 bp, Homo sapiens
tcttgcttatatttt

SEQ ID NO: 1117440 - DNA, 15 bp, Homo sapiens
atcttgcttatattt

SEQ ID NO: 1117441 - DNA, 15 bp, Homo sapiens
aatcttgcttatatt

SEQ ID NO: 1117442 - DNA, 15 bp, Homo sapiens
aaatcttgcttatat

SEQ ID NO: 1117443 - DNA, 15 bp, Homo sapiens
aaaatcttgcttata

SEQ ID NO: 1117444 - DNA, 15 bp, Homo sapiens
aaaaatcttgcttat

SEQ ID NO: 1117445 - DNA, 15 bp, Homo sapiens
aaaaaatcttgctta

SEQ ID NO: 1117446 - DNA, 15 bp, Homo sapiens
caaaaaatcttgctt

SEQ ID NO: 1117447 - DNA, 15 bp, Homo sapiens
acaaaaaatcttgct

SEQ ID NO: 1117448 - DNA, 15 bp, Homo sapiens
tacaaaaaatcttgc

SEQ ID NO: 1117449 - DNA, 15 bp, Homo sapiens
ctacaaaaaatcttg

SEQ ID NO: 1117450 - DNA, 15 bp, Homo sapiens
tctacaaaaaatctt

SEQ ID NO: 1117451 - DNA, 15 bp, Homo sapiens
atctacaaaaaatct

SEQ ID NO: 1117452 - DNA, 15 bp, Homo sapiens
tatctacaaaaaatc

SEQ ID NO: 1117453 - DNA, 15 bp, Homo sapiens
atatctacaaaaaat

SEQ ID NO: 1117454 - DNA, 15 bp, Homo sapiens
tatatctacaaaaaa

SEQ ID NO: 1117455 - DNA, 15 bp, Homo sapiens
ctatatctacaaaaa

SEQ ID NO: 1117456 - DNA, 15 bp, Homo sapiens
tctatatctacaaaa

SEQ ID NO: 1117457 - DNA, 15 bp, Homo sapiens
ttctatatctacaaa

SEQ ID NO: 1117458 - DNA, 15 bp, Homo sapiens
tttctatatctacaa

SEQ ID NO: 1117459 - DNA, 15 bp, Homo sapiens
ttttctatatctaca

SEQ ID NO: 1117460 - DNA, 15 bp, Homo sapiens
cttttctatatctac

SEQ ID NO: 1117461 - DNA, 15 bp, Homo sapiens
tcttttctatatcta

SEQ ID NO: 1117462 - DNA, 15 bp, Homo sapiens
atcttttctatatct

SEQ ID NO: 1117463 - DNA, 15 bp, Homo sapiens
aatcttttctatatc

SEQ ID NO: 1117464 - DNA, 15 bp, Homo sapiens
taatcttttctatat

SEQ ID NO: 1117465 - DNA, 15 bp, Homo sapiens
gtaatcttttctata

SEQ ID NO: 1117466 - DNA, 15 bp, Homo sapiens
ggtaatcttttctat

SEQ ID NO: 1117467 - DNA, 15 bp, Homo sapiens
gggtaatcttttcta

SEQ ID NO: 1117468 - DNA, 15 bp, Homo sapiens
agggtaatcttttct

SEQ ID NO: 1117469 - DNA, 15 bp, Homo sapiens
tagggtaatcttttc

SEQ ID NO: 1117470 - DNA, 15 bp, Homo sapiens
ttagggtaatctttt

SEQ ID NO: 1117471 - DNA, 15 bp, Homo sapiens
tttagggtaatcttt

SEQ ID NO: 1117472 - DNA, 15 bp, Homo sapiens
ttttagggtaatctt

SEQ ID NO: 1117473 - DNA, 15 bp, Homo sapiens
attttagggtaatct

SEQ ID NO: 1117474 - DNA, 15 bp, Homo sapiens
cattttagggtaatc

SEQ ID NO: 1117475 - DNA, 15 bp, Homo sapiens
acattttagggtaat

SEQ ID NO: 1117476 - DNA, 15 bp, Homo sapiens
aacattttagggtaa

SEQ ID NO: 1117477 - DNA, 15 bp, Homo sapiens
aaacattttagggta

SEQ ID NO: 1117478 - DNA, 15 bp, Homo sapiens
taaacattttagggt

SEQ ID NO: 1117479 - DNA, 15 bp, Homo sapiens
ataaacattttaggg

SEQ ID NO: 1117480 - DNA, 15 bp, Homo sapiens
cataaacattttagg

SEQ ID NO: 1117481 - DNA, 15 bp, Homo sapiens
tcataaacattttag

SEQ ID NO: 1117482 - DNA, 15 bp, Homo sapiens
ttcataaacatttta

SEQ ID NO: 1117483 - DNA, 15 bp, Homo sapiens
tttcataaacatttt

SEQ ID NO: 1117484 - DNA, 15 bp, Homo sapiens
ttttcataaacattt

SEQ ID NO: 1117485 - DNA, 15 bp, Homo sapiens
attttcataaacatt

SEQ ID NO: 1117486 - DNA, 15 bp, Homo sapiens
cattttcataaacat

SEQ ID NO: 1117487 - DNA, 15 bp, Homo sapiens
acattttcataaaca

SEQ ID NO: 1117488 - DNA, 15 bp, Homo sapiens
tacattttcataaac

SEQ ID NO: 1117489 - DNA, 15 bp, Homo sapiens
ttacattttcataaa

SEQ ID NO: 1117490 - DNA, 15 bp, Homo sapiens
tttacattttcataa

SEQ ID NO: 1117491 - DNA, 15 bp, Homo sapiens
ttttacattttcata

SEQ ID NO: 1117492 - DNA, 15 bp, Homo sapiens
tttttacattttcat

SEQ ID NO: 1117493 - DNA, 15 bp, Homo sapiens
ttttttacattttca

SEQ ID NO: 1117494 - DNA, 15 bp, Homo sapiens
tttttttacattttc

SEQ ID NO: 1117495 - DNA, 15 bp, Homo sapiens
gtttttttacatttt

SEQ ID NO: 1117496 - DNA, 15 bp, Homo sapiens
agtttttttacattt

SEQ ID NO: 1117497 - DNA, 15 bp, Homo sapiens
cagtttttttacatt

SEQ ID NO: 1117498 - DNA, 15 bp, Homo sapiens
ccagtttttttacat

SEQ ID NO: 1117499 - DNA, 15 bp, Homo sapiens
tccagtttttttaca

SEQ ID NO: 1117500 - DNA, 15 bp, Homo sapiens
ttccagtttttttac

SEQ ID NO: 1117501 - DNA, 15 bp, Homo sapiens
attccagttttttta

SEQ ID NO: 1117502 - DNA, 15 bp, Homo sapiens
tattccagttttttt

SEQ ID NO: 1117503 - DNA, 15 bp, Homo sapiens
ctattccagtttttt

SEQ ID NO: 1117504 - DNA, 15 bp, Homo sapiens
gctattccagttttt

SEQ ID NO: 1117505 - DNA, 15 bp, Homo sapiens
agctattccagtttt

SEQ ID NO: 1117506 - DNA, 15 bp, Homo sapiens
tagctattccagttt

SEQ ID NO: 1117507 - DNA, 15 bp, Homo sapiens
ttagctattccagtt

SEQ ID NO: 1117508 - DNA, 15 bp, Homo sapiens
tttagctattccagt

SEQ ID NO: 1117509 - DNA, 15 bp, Homo sapiens
ttttagctattccag

SEQ ID NO: 1117510 - DNA, 15 bp, Homo sapiens
attttagctattcca

SEQ ID NO: 1117511 - DNA, 15 bp, Homo sapiens
tattttagctattcc

SEQ ID NO: 1117512 - DNA, 15 bp, Homo sapiens
ttattttagctattc

SEQ ID NO: 1117513 - DNA, 15 bp, Homo sapiens
attattttagctatt

SEQ ID NO: 1117514 - DNA, 15 bp, Homo sapiens
aattattttagctat

SEQ ID NO: 1117515 - DNA, 15 bp, Homo sapiens
aaattattttagcta

SEQ ID NO: 1117516 - DNA, 15 bp, Homo sapiens
aaaattattttagct

SEQ ID NO: 1117517 - DNA, 15 bp, Homo sapiens
caaaattattttagc

SEQ ID NO: 1117518 - DNA, 15 bp, Homo sapiens
tcaaaattattttag

SEQ ID NO: 1117519 - DNA, 15 bp, Homo sapiens
attctttttcaaaat

SEQ ID NO: 1117520 - DNA, 15 bp, Homo sapiens
tattctttttcaaaa

SEQ ID NO: 1117521 - DNA, 15 bp, Homo sapiens
ttattctttttcaaa

SEQ ID NO: 1117522 - DNA, 15 bp, Homo sapiens
attattctttttcaa

SEQ ID NO: 1117523 - DNA, 15 bp, Homo sapiens
tattattctttttca

SEQ ID NO: 1117524 - DNA, 15 bp, Homo sapiens
ttattattctttttc

SEQ ID NO: 1117525 - DNA, 15 bp, Homo sapiens
tttattattcttttt

SEQ ID NO: 1117526 - DNA, 15 bp, Homo sapiens
ctttattattctttt

SEQ ID NO: 1117527 - DNA, 15 bp, Homo sapiens
actttattattcttt

SEQ ID NO: 1117528 - DNA, 15 bp, Homo sapiens
cactttattattctt

SEQ ID NO: 1117529 - DNA, 15 bp, Homo sapiens
tcactttattattct

SEQ ID NO: 1117530 - DNA, 15 bp, Homo sapiens
ctcactttattattc

SEQ ID NO: 1117531 - DNA, 15 bp, Homo sapiens
tctcactttattatt

SEQ ID NO: 1117532 - DNA, 15 bp, Homo sapiens
ttctcactttattat

SEQ ID NO: 1117533 - DNA, 15 bp, Homo sapiens
cttctcactttatta

SEQ ID NO: 1117534 - DNA, 15 bp, Homo sapiens
tcttctcactttatt

SEQ ID NO: 1117535 - DNA, 15 bp, Homo sapiens
ttcttctcactttat

SEQ ID NO: 1117536 - DNA, 15 bp, Homo sapiens
attcttctcacttta

SEQ ID NO: 1117537 - DNA, 15 bp, Homo sapiens
gattcttctcacttt

SEQ ID NO: 1117538 - DNA, 15 bp, Homo sapiens
tgattcttctcactt

SEQ ID NO: 1117539 - DNA, 15 bp, Homo sapiens
ttgattcttctcact

SEQ ID NO: 1117540 - DNA, 15 bp, Homo sapiens
attgattcttctcac

SEQ ID NO: 1117541 - DNA, 15 bp, Homo sapiens
gattgattcttctca

SEQ ID NO: 1117542 - DNA, 15 bp, Homo sapiens
agattgattcttctc

SEQ ID NO: 1117543 - DNA, 15 bp, Homo sapiens
tagattgattcttct

SEQ ID NO: 1117544 - DNA, 15 bp, Homo sapiens
gtagattgattcttc

SEQ ID NO: 1117545 - DNA, 15 bp, Homo sapiens
ggtagattgattctt

SEQ ID NO: 1117546 - DNA, 15 bp, Homo sapiens
gggtagattgattct

SEQ ID NO: 1117547 - DNA, 15 bp, Homo sapiens
tgggtagattgattc

SEQ ID NO: 1117548 - DNA, 15 bp, Homo sapiens
ttgggtagattgatt

SEQ ID NO: 1117549 - DNA, 15 bp, Homo sapiens
attgggtagattgat

SEQ ID NO: 1117550 - DNA, 15 bp, Homo sapiens
aattgggtagattga

SEQ ID NO: 1117551 - DNA, 15 bp, Homo sapiens
aaattgggtagattg

SEQ ID NO: 1117552 - DNA, 15 bp, Homo sapiens
gaaattgggtagatt

SEQ ID NO: 1117553 - DNA, 15 bp, Homo sapiens
tgaaattgggtagat

SEQ ID NO: 1117554 - DNA, 15 bp, Homo sapiens
ttgaaattgggtaga

SEQ ID NO: 1117555 - DNA, 15 bp, Homo sapiens
cttgaaattgggtag

SEQ ID NO: 1117556 - DNA, 15 bp, Homo sapiens
tcttgaaattgggta

SEQ ID NO: 1117557 - DNA, 15 bp, Homo sapiens
gtcttgaaattgggt

SEQ ID NO: 1117558 - DNA, 15 bp, Homo sapiens
tgtcttgaaattggg

SEQ ID NO: 1117559 - DNA, 15 bp, Homo sapiens
atgtcttgaaattgg

SEQ ID NO: 1117560 - DNA, 15 bp, Homo sapiens
tatgtcttgaaattg

SEQ ID NO: 1117561 - DNA, 15 bp, Homo sapiens
atatgtcttgaaatt

SEQ ID NO: 1117562 - DNA, 15 bp, Homo sapiens
aatatgtcttgaaat

SEQ ID NO: 1117563 - DNA, 15 bp, Homo sapiens
taatatgtcttgaaa

SEQ ID NO: 1117564 - DNA, 15 bp, Homo sapiens
ataatatgtcttgaa

SEQ ID NO: 1117565 - DNA, 15 bp, Homo sapiens
tataatatgtcttga

SEQ ID NO: 1117566 - DNA, 15 bp, Homo sapiens
atataatatgtcttg

SEQ ID NO: 1117567 - DNA, 15 bp, Homo sapiens
tatataatatgtctt

SEQ ID NO: 1117568 - DNA, 15 bp, Homo sapiens
ctatataatatgtct

SEQ ID NO: 1117569 - DNA, 15 bp, Homo sapiens
gctatataatatgtc

SEQ ID NO: 1117570 - DNA, 15 bp, Homo sapiens
agctatataatatgt

SEQ ID NO: 1117571 - DNA, 15 bp, Homo sapiens
tagctatataatatg

SEQ ID NO: 1117572 - DNA, 15 bp, Homo sapiens
ttagctatataatat

SEQ ID NO: 1117573 - DNA, 15 bp, Homo sapiens
attagctatataata

SEQ ID NO: 1117574 - DNA, 15 bp, Homo sapiens
cattagctatataat

SEQ ID NO: 1117575 - DNA, 15 bp, Homo sapiens
gcattagctatataa

SEQ ID NO: 1117576 - DNA, 15 bp, Homo sapiens
tgcattagctatata

SEQ ID NO: 1117577 - DNA, 15 bp, Homo sapiens
ctgcattagctatat

SEQ ID NO: 1117578 - DNA, 15 bp, Homo sapiens
actgcattagctata

SEQ ID NO: 1117579 - DNA, 15 bp, Homo sapiens
gactgcattagctat

SEQ ID NO: 1117580 - DNA, 15 bp, Homo sapiens
tgactgcattagcta

SEQ ID NO: 1117581 - DNA, 15 bp, Homo sapiens
ttgactgcattagct

SEQ ID NO: 1117582 - DNA, 15 bp, Homo sapiens
cttgactgcattagc

SEQ ID NO: 1117583 - DNA, 15 bp, Homo sapiens
ccttgactgcattag

SEQ ID NO: 1117584 - DNA, 15 bp, Homo sapiens
gccttgactgcatta

SEQ ID NO: 1117585 - DNA, 15 bp, Homo sapiens
agccttgactgcatt

SEQ ID NO: 1117586 - DNA, 15 bp, Homo sapiens
cagccttgactgcat

SEQ ID NO: 1117587 - DNA, 15 bp, Homo sapiens
acagccttgactgca

SEQ ID NO: 1117588 - DNA, 15 bp, Homo sapiens
cacagccttgactgc

SEQ ID NO: 1117589 - DNA, 15 bp, Homo sapiens
acacagccttgactg

SEQ ID NO: 1117590 - DNA, 15 bp, Homo sapiens
cacacagccttgact

SEQ ID NO: 1117591 - DNA, 15 bp, Homo sapiens
ccacacagccttgac

SEQ ID NO: 1117592 - DNA, 15 bp, Homo sapiens
gccacacagccttga

SEQ ID NO: 1117593 - DNA, 15 bp, Homo sapiens
tgccacacagccttg

SEQ ID NO: 1117594 - DNA, 15 bp, Homo sapiens
atgccacacagcctt

SEQ ID NO: 1117595 - DNA, 15 bp, Homo sapiens
aatgccacacagcct

SEQ ID NO: 1117596 - DNA, 15 bp, Homo sapiens
caatgccacacagcc

SEQ ID NO: 1117597 - DNA, 15 bp, Homo sapiens
tcaatgccacacagc

SEQ ID NO: 1117598 - DNA, 15 bp, Homo sapiens
gtcaatgccacacag

SEQ ID NO: 1117599 - DNA, 15 bp, Homo sapiens
tgtcaatgccacaca

SEQ ID NO: 1117600 - DNA, 15 bp, Homo sapiens
ctgtcaatgccacac

SEQ ID NO: 1117601 - DNA, 15 bp, Homo sapiens
tctgtcaatgccaca

SEQ ID NO: 1117602 - DNA, 15 bp, Homo sapiens
ctctgtcaatgccac

SEQ ID NO: 1117603 - DNA, 15 bp, Homo sapiens
cctctgtcaatgcca

SEQ ID NO: 1117604 - DNA, 15 bp, Homo sapiens
tcctctgtcaatgcc

SEQ ID NO: 1117605 - DNA, 15 bp, Homo sapiens
gtcctctgtcaatgc

SEQ ID NO: 1117606 - DNA, 15 bp, Homo sapiens
tgtcctctgtcaatg

SEQ ID NO: 1117607 - DNA, 15 bp, Homo sapiens
ctgtcctctgtcaat

SEQ ID NO: 1117608 - DNA, 15 bp, Homo sapiens
tctgtcctctgtcaa

SEQ ID NO: 1117609 - DNA, 15 bp, Homo sapiens
tatctgtcctctgtc

SEQ ID NO: 1117610 - DNA, 15 bp, Homo sapiens
atatctgtcctctgt

SEQ ID NO: 1117611 - DNA, 15 bp, Homo sapiens
tatatctgtcctctg

SEQ ID NO: 1117612 - DNA, 15 bp, Homo sapiens
atatatctgtcctct

SEQ ID NO: 1117613 - DNA, 15 bp, Homo sapiens
tatatatctgtcctc

SEQ ID NO: 1117614 - DNA, 15 bp, Homo sapiens
ctatatatctgtcct

SEQ ID NO: 1117615 - DNA, 15 bp, Homo sapiens
tctatatatctgtcc

SEQ ID NO: 1117616 - DNA, 15 bp, Homo sapiens
gtctatatatctgtc

SEQ ID NO: 1117617 - DNA, 15 bp, Homo sapiens
ggtctatatatctgt

SEQ ID NO: 1117618 - DNA, 15 bp, Homo sapiens
tggtctatatatctg

SEQ ID NO: 1117619 - DNA, 15 bp, Homo sapiens
ttggtctatatatct

SEQ ID NO: 1117620 - DNA, 15 bp, Homo sapiens
attggtctatatatc

SEQ ID NO: 1117621 - DNA, 15 bp, Homo sapiens
cattggtctatatat

SEQ ID NO: 1117622 - DNA, 15 bp, Homo sapiens
ccattggtctatata

SEQ ID NO: 1117623 - DNA, 15 bp, Homo sapiens
tccattggtctatat

SEQ ID NO: 1117624 - DNA, 15 bp, Homo sapiens
ttccattggtctata

SEQ ID NO: 1117625 - DNA, 15 bp, Homo sapiens
attctgttccattgg

SEQ ID NO: 1117626 - DNA, 15 bp, Homo sapiens
cattctgttccattg

SEQ ID NO: 1117627 - DNA, 15 bp, Homo sapiens
ccattctgttccatt

SEQ ID NO: 1117628 - DNA, 15 bp, Homo sapiens
tccattctgttccat

SEQ ID NO: 1117629 - DNA, 15 bp, Homo sapiens
ctccattctgttcca

SEQ ID NO: 1117630 - DNA, 15 bp, Homo sapiens
tctccattctgttcc

SEQ ID NO: 1117631 - DNA, 15 bp, Homo sapiens
ttctccattctgttc

SEQ ID NO: 1117632 - DNA, 15 bp, Homo sapiens
gttctccattctgtt

SEQ ID NO: 1117633 - DNA, 15 bp, Homo sapiens
agttctccattctgt

SEQ ID NO: 1117634 - DNA, 15 bp, Homo sapiens
gagttctccattctg

SEQ ID NO: 1117635 - DNA, 15 bp, Homo sapiens
tgagttctccattct

SEQ ID NO: 1117636 - DNA, 15 bp, Homo sapiens
ctgagttctccattc

SEQ ID NO: 1117637 - DNA, 15 bp, Homo sapiens
ttctgagttctccat

SEQ ID NO: 1117638 - DNA, 15 bp, Homo sapiens
tttctgagttctcca

SEQ ID NO: 1117639 - DNA, 15 bp, Homo sapiens
atttctgagttctcc

SEQ ID NO: 1117640 - DNA, 15 bp, Homo sapiens
tatttctgagttctc

SEQ ID NO: 1117641 - DNA, 15 bp, Homo sapiens
ctatttctgagttct

SEQ ID NO: 1117642 - DNA, 15 bp, Homo sapiens
tctatttctgagttc

SEQ ID NO: 1117643 - DNA, 15 bp, Homo sapiens
gtctatttctgagtt

SEQ ID NO: 1117644 - DNA, 15 bp, Homo sapiens
ggtctatttctgagt

SEQ ID NO: 1117645 - DNA, 15 bp, Homo sapiens
gggtctatttctgag

SEQ ID NO: 1117646 - DNA, 15 bp, Homo sapiens
tgggtctatttctga

SEQ ID NO: 1117647 - DNA, 15 bp, Homo sapiens
gtgggtctatttctg

SEQ ID NO: 1117648 - DNA, 15 bp, Homo sapiens
tgtgggtctatttct

SEQ ID NO: 1117649 - DNA, 15 bp, Homo sapiens
gtgtgggtctatttc

SEQ ID NO: 1117650 - DNA, 15 bp, Homo sapiens
tgtgtgggtctattt

SEQ ID NO: 1117651 - DNA, 15 bp, Homo sapiens
ttgtgtgggtctatt

SEQ ID NO: 1117652 - DNA, 15 bp, Homo sapiens
tttgtgtgggtctat

SEQ ID NO: 1117653 - DNA, 15 bp, Homo sapiens
atttgtgtgggtcta

SEQ ID NO: 1117654 - DNA, 15 bp, Homo sapiens
tatttgtgtgggtct

SEQ ID NO: 1117655 - DNA, 15 bp, Homo sapiens
atatttgtgtgggtc

SEQ ID NO: 1117656 - DNA, 15 bp, Homo sapiens
catatttgtgtgggt

SEQ ID NO: 1117657 - DNA, 15 bp, Homo sapiens
acatatttgtgtggg

SEQ ID NO: 1117658 - DNA, 15 bp, Homo sapiens
gacatatttgtgtgg

SEQ ID NO: 1117659 - DNA, 15 bp, Homo sapiens
ggacatatttgtgtg

SEQ ID NO: 1117660 - DNA, 15 bp, Homo sapiens
tggacatatttgtgt

SEQ ID NO: 1117661 - DNA, 15 bp, Homo sapiens
ttggacatatttgtg

SEQ ID NO: 1117662 - DNA, 15 bp, Homo sapiens
attggacatatttgt

SEQ ID NO: 1117663 - DNA, 15 bp, Homo sapiens
aattggacatatttg

SEQ ID NO: 1117664 - DNA, 15 bp, Homo sapiens
caattggacatattt

SEQ ID NO: 1117665 - DNA, 15 bp, Homo sapiens
tcaattggacatatt

SEQ ID NO: 1117666 - DNA, 15 bp, Homo sapiens
atcaattggacatat

SEQ ID NO: 1117667 - DNA, 15 bp, Homo sapiens
aatcaattggacata

SEQ ID NO: 1117668 - DNA, 15 bp, Homo sapiens
aaatcaattggacat

SEQ ID NO: 1117669 - DNA, 15 bp, Homo sapiens
aaaatcaattggaca

SEQ ID NO: 1117670 - DNA, 15 bp, Homo sapiens
aaaaatcaattggac

SEQ ID NO: 1117671 - DNA, 15 bp, Homo sapiens
caaaaatcaattgga

SEQ ID NO: 1117672 - DNA, 15 bp, Homo sapiens
tcaaaaatcaattgg

SEQ ID NO: 1117673 - DNA, 15 bp, Homo sapiens
gtcaaaaatcaattg

SEQ ID NO: 1117674 - DNA, 15 bp, Homo sapiens
tgtcaaaaatcaatt

SEQ ID NO: 1117675 - DNA, 15 bp, Homo sapiens
ttgtcaaaaatcaat

SEQ ID NO: 1117676 - DNA, 15 bp, Homo sapiens
tttgtcaaaaatcaa

SEQ ID NO: 1117677 - DNA, 15 bp, Homo sapiens
ttttgtcaaaaatca

SEQ ID NO: 1117678 - DNA, 15 bp, Homo sapiens
cttttgtcaaaaatc

SEQ ID NO: 1117679 - DNA, 15 bp, Homo sapiens
acttttgtcaaaaat

SEQ ID NO: 1117680 - DNA, 15 bp, Homo sapiens
cacttttgtcaaaaa

SEQ ID NO: 1117681 - DNA, 15 bp, Homo sapiens
ccacttttgtcaaaa

SEQ ID NO: 1117682 - DNA, 15 bp, Homo sapiens
tccacttttgtcaaa

SEQ ID NO: 1117683 - DNA, 15 bp, Homo sapiens
ttccacttttgtcaa

SEQ ID NO: 1117684 - DNA, 15 bp, Homo sapiens
tttccacttttgtca

SEQ ID NO: 1117685 - DNA, 15 bp, Homo sapiens
ttttccacttttgtc

SEQ ID NO: 1117686 - DNA, 15 bp, Homo sapiens
tttttccacttttgt

SEQ ID NO: 1117687 - DNA, 15 bp, Homo sapiens
gtttttccacttttg

SEQ ID NO: 1117688 - DNA, 15 bp, Homo sapiens
tgtttttccactttt

SEQ ID NO: 1117689 - DNA, 15 bp, Homo sapiens
ttgtttttccacttt

SEQ ID NO: 1117690 - DNA, 15 bp, Homo sapiens
attgtttttccactt

SEQ ID NO: 1117691 - DNA, 15 bp, Homo sapiens
aattgtttttccact

SEQ ID NO: 1117692 - DNA, 15 bp, Homo sapiens
gaattgtttttccac

SEQ ID NO: 1117693 - DNA, 15 bp, Homo sapiens
tgaattgtttttcca

SEQ ID NO: 1117694 - DNA, 15 bp, Homo sapiens
ctgaattgtttttcc

SEQ ID NO: 1117695 - DNA, 15 bp, Homo sapiens
actgaattgtttttc

SEQ ID NO: 1117696 - DNA, 15 bp, Homo sapiens
cactgaattgttttt

SEQ ID NO: 1117697 - DNA, 15 bp, Homo sapiens
ccactgaattgtttt

SEQ ID NO: 1117698 - DNA, 15 bp, Homo sapiens
cccactgaattgttt

SEQ ID NO: 1117699 - DNA, 15 bp, Homo sapiens
ccccactgaattgtt

SEQ ID NO: 1117700 - DNA, 15 bp, Homo sapiens
cccccactgaattgt

SEQ ID NO: 1117701 - DNA, 15 bp, Homo sapiens
tcccccactgaattg

SEQ ID NO: 1117702 - DNA, 15 bp, Homo sapiens
ttcccccactgaatt

SEQ ID NO: 1117703 - DNA, 15 bp, Homo sapiens
tttcccccactgaat

SEQ ID NO: 1117704 - DNA, 15 bp, Homo sapiens
ctttcccccactgaa

SEQ ID NO: 1117705 - DNA, 15 bp, Homo sapiens
tctttcccccactga

SEQ ID NO: 1117706 - DNA, 15 bp, Homo sapiens
atctttcccccactg

SEQ ID NO: 1117707 - DNA, 15 bp, Homo sapiens
tatctttcccccact

SEQ ID NO: 1117708 - DNA, 15 bp, Homo sapiens
ttatctttcccccac

SEQ ID NO: 1117709 - DNA, 15 bp, Homo sapiens
cttatctttccccca

SEQ ID NO: 1117710 - DNA, 15 bp, Homo sapiens
gcttatctttccccc

SEQ ID NO: 1117711 - DNA, 15 bp, Homo sapiens
agcttatctttcccc

SEQ ID NO: 1117712 - DNA, 15 bp, Homo sapiens
aagcttatctttccc

SEQ ID NO: 1117713 - DNA, 15 bp, Homo sapiens
aaagcttatctttcc

SEQ ID NO: 1117714 - DNA, 15 bp, Homo sapiens
aaaagcttatctttc

SEQ ID NO: 1117715 - DNA, 15 bp, Homo sapiens
aaaaagcttatcttt

SEQ ID NO: 1117716 - DNA, 15 bp, Homo sapiens
taaaaagcttatctt

SEQ ID NO: 1117717 - DNA, 15 bp, Homo sapiens
ataaaaagcttatct

SEQ ID NO: 1117718 - DNA, 15 bp, Homo sapiens
gataaaaagcttatc

SEQ ID NO: 1117719 - DNA, 15 bp, Homo sapiens
tgataaaaagcttat

SEQ ID NO: 1117720 - DNA, 15 bp, Homo sapiens
ttgataaaaagctta

SEQ ID NO: 1117721 - DNA, 15 bp, Homo sapiens
tttgataaaaagctt

SEQ ID NO: 1117722 - DNA, 15 bp, Homo sapiens
atttgataaaaagct

SEQ ID NO: 1117723 - DNA, 15 bp, Homo sapiens
catttgataaaaagc

SEQ ID NO: 1117724 - DNA, 15 bp, Homo sapiens
ccatttgataaaaag

SEQ ID NO: 1117725 - DNA, 15 bp, Homo sapiens
gccatttgataaaaa

SEQ ID NO: 1117726 - DNA, 15 bp, Homo sapiens
agccatttgataaaa

SEQ ID NO: 1117727 - DNA, 15 bp, Homo sapiens
cagccatttgataaa

SEQ ID NO: 1117728 - DNA, 15 bp, Homo sapiens
acagccatttgataa

SEQ ID NO: 1117729 - DNA, 15 bp, Homo sapiens
cacagccatttgata

SEQ ID NO: 1117730 - DNA, 15 bp, Homo sapiens
ccacagccatttgat

SEQ ID NO: 1117731 - DNA, 15 bp, Homo sapiens
tccacagccatttga

SEQ ID NO: 1117732 - DNA, 15 bp, Homo sapiens
ctccacagccatttg

SEQ ID NO: 1117733 - DNA, 15 bp, Homo sapiens
gctccacagccattt

SEQ ID NO: 1117734 - DNA, 15 bp, Homo sapiens
tgctccacagccatt

SEQ ID NO: 1117735 - DNA, 15 bp, Homo sapiens
ctgctccacagccat

SEQ ID NO: 1117736 - DNA, 15 bp, Homo sapiens
gctgctccacagcca

SEQ ID NO: 1117737 - DNA, 15 bp, Homo sapiens
agctgctccacagcc

SEQ ID NO: 1117738 - DNA, 15 bp, Homo sapiens
cagctgctccacagc

SEQ ID NO: 1117739 - DNA, 15 bp, Homo sapiens
ccagctgctccacag

SEQ ID NO: 1117740 - DNA, 15 bp, Homo sapiens
tccagctgctccaca

SEQ ID NO: 1117741 - DNA, 15 bp, Homo sapiens
gtccagctgctccac

SEQ ID NO: 1117742 - DNA, 15 bp, Homo sapiens
tgtccagctgctcca

SEQ ID NO: 1117743 - DNA, 15 bp, Homo sapiens
atgtccagctgctcc

SEQ ID NO: 1117744 - DNA, 15 bp, Homo sapiens
gatgtccagctgctc

SEQ ID NO: 1117745 - DNA, 15 bp, Homo sapiens
ggatgtccagctgct

SEQ ID NO: 1117746 - DNA, 15 bp, Homo sapiens
tggatgtccagctgc

SEQ ID NO: 1117747 - DNA, 15 bp, Homo sapiens
atggatgtccagctg

SEQ ID NO: 1117748 - DNA, 15 bp, Homo sapiens
tatggatgtccagct

SEQ ID NO: 1117749 - DNA, 15 bp, Homo sapiens
ctatggatgtccagc

SEQ ID NO: 1117750 - DNA, 15 bp, Homo sapiens
cctatggatgtccag

SEQ ID NO: 1117751 - DNA, 15 bp, Homo sapiens
ccctatggatgtcca

SEQ ID NO: 1117752 - DNA, 15 bp, Homo sapiens
gccctatggatgtcc

SEQ ID NO: 1117753 - DNA, 15 bp, Homo sapiens
tgccctatggatgtc

SEQ ID NO: 1117754 - DNA, 15 bp, Homo sapiens
ttgccctatggatgt

SEQ ID NO: 1117755 - DNA, 15 bp, Homo sapiens
tttgccctatggatg

SEQ ID NO: 1117756 - DNA, 15 bp, Homo sapiens
ttttgccctatggat

SEQ ID NO: 1117757 - DNA, 15 bp, Homo sapiens
tttttgccctatgga

SEQ ID NO: 1117758 - DNA, 15 bp, Homo sapiens
ttttttgccctatgg

SEQ ID NO: 1117759 - DNA, 15 bp, Homo sapiens
tttttttgccctatg

SEQ ID NO: 1117760 - DNA, 15 bp, Homo sapiens
atttttttgccctat

SEQ ID NO: 1117761 - DNA, 15 bp, Homo sapiens
catttttttgcccta

SEQ ID NO: 1117762 - DNA, 15 bp, Homo sapiens
tcatttttttgccct

SEQ ID NO: 1117763 - DNA, 15 bp, Homo sapiens
ttcatttttttgccc

SEQ ID NO: 1117764 - DNA, 15 bp, Homo sapiens
tttcatttttttgcc

SEQ ID NO: 1117765 - DNA, 15 bp, Homo sapiens
atttcatttttttgc

SEQ ID NO: 1117766 - DNA, 15 bp, Homo sapiens
aatttcatttttttg

SEQ ID NO: 1117767 - DNA, 15 bp, Homo sapiens
taatttcattttttt

SEQ ID NO: 1117768 - DNA, 15 bp, Homo sapiens
gtaatttcatttttt

SEQ ID NO: 1117769 - DNA, 15 bp, Homo sapiens
tgtaatttcattttt

SEQ ID NO: 1117770 - DNA, 15 bp, Homo sapiens
gtgtaatttcatttt

SEQ ID NO: 1117771 - DNA, 15 bp, Homo sapiens
tgtgtaatttcattt

SEQ ID NO: 1117772 - DNA, 15 bp, Homo sapiens
ttgtgtaatttcatt

SEQ ID NO: 1117773 - DNA, 15 bp, Homo sapiens
tttgtgtaatttcat

SEQ ID NO: 1117774 - DNA, 15 bp, Homo sapiens
ttttgtgtaatttca

SEQ ID NO: 1117775 - DNA, 15 bp, Homo sapiens
tttttgtgtaatttc

SEQ ID NO: 1117776 - DNA, 15 bp, Homo sapiens
atttttgtgtaattt

SEQ ID NO: 1117777 - DNA, 15 bp, Homo sapiens
aatttttgtgtaatt

SEQ ID NO: 1117778 - DNA, 15 bp, Homo sapiens
aaatttttgtgtaat

SEQ ID NO: 1117779 - DNA, 15 bp, Homo sapiens
aaaatttttgtgtaa

SEQ ID NO: 1117780 - DNA, 15 bp, Homo sapiens
gaaaatttttgtgta

SEQ ID NO: 1117781 - DNA, 15 bp, Homo sapiens
agaaaatttttgtgt

SEQ ID NO: 1117782 - DNA, 15 bp, Homo sapiens
aagaaaatttttgtg

SEQ ID NO: 1117783 - DNA, 15 bp, Homo sapiens
taagaaaatttttgt

SEQ ID NO: 1117784 - DNA, 15 bp, Homo sapiens
ttaagaaaatttttg

SEQ ID NO: 1117785 - DNA, 15 bp, Homo sapiens
tttaagaaaattttt

SEQ ID NO: 1117786 - DNA, 15 bp, Homo sapiens
atttaagaaaatttt

SEQ ID NO: 1117787 - DNA, 15 bp, Homo sapiens
catttaagaaaattt

SEQ ID NO: 1117788 - DNA, 15 bp, Homo sapiens
tcatttaagaaaatt

SEQ ID NO: 1117789 - DNA, 15 bp, Homo sapiens
ttcatttaagaaaat

SEQ ID NO: 1117790 - DNA, 15 bp, Homo sapiens
attcatttaagaaaa

SEQ ID NO: 1117791 - DNA, 15 bp, Homo sapiens
gattcatttaagaaa

SEQ ID NO: 1117792 - DNA, 15 bp, Homo sapiens
tgattcatttaagaa

SEQ ID NO: 1117793 - DNA, 15 bp, Homo sapiens
atgattcatttaaga

SEQ ID NO: 1117794 - DNA, 15 bp, Homo sapiens
catgattcatttaag

SEQ ID NO: 1117795 - DNA, 15 bp, Homo sapiens
ccatgattcatttaa

SEQ ID NO: 1117796 - DNA, 15 bp, Homo sapiens
tccatgattcattta

SEQ ID NO: 1117797 - DNA, 15 bp, Homo sapiens
gtccatgattcattt

SEQ ID NO: 1117798 - DNA, 15 bp, Homo sapiens
agtccatgattcatt

SEQ ID NO: 1117799 - DNA, 15 bp, Homo sapiens
aagtccatgattcat

SEQ ID NO: 1117800 - DNA, 15 bp, Homo sapiens
taagtccatgattca

SEQ ID NO: 1117801 - DNA, 15 bp, Homo sapiens
ataagtccatgattc

SEQ ID NO: 1117802 - DNA, 15 bp, Homo sapiens
tataagtccatgatt

SEQ ID NO: 1117803 - DNA, 15 bp, Homo sapiens
atataagtccatgat

SEQ ID NO: 1117804 - DNA, 15 bp, Homo sapiens
catataagtccatga

SEQ ID NO: 1117805 - DNA, 15 bp, Homo sapiens
acatataagtccatg

SEQ ID NO: 1117806 - DNA, 15 bp, Homo sapiens
tacatataagtccat

SEQ ID NO: 1117807 - DNA, 15 bp, Homo sapiens
ttacatataagtcca

SEQ ID NO: 1117808 - DNA, 15 bp, Homo sapiens
gttacatataagtcc

SEQ ID NO: 1117809 - DNA, 15 bp, Homo sapiens
tgttacatataagtc

SEQ ID NO: 1117810 - DNA, 15 bp, Homo sapiens
ttgttacatataagt

SEQ ID NO: 1117811 - DNA, 15 bp, Homo sapiens
tttgttacatataag

SEQ ID NO: 1117812 - DNA, 15 bp, Homo sapiens
atttgttacatataa

SEQ ID NO: 1117813 - DNA, 15 bp, Homo sapiens
tatttgttacatata

SEQ ID NO: 1117814 - DNA, 15 bp, Homo sapiens
ttatttgttacatat

SEQ ID NO: 1117815 - DNA, 15 bp, Homo sapiens
tttatttgttacata

SEQ ID NO: 1117816 - DNA, 15 bp, Homo sapiens
ttttatttgttacat

SEQ ID NO: 1117817 - DNA, 15 bp, Homo sapiens
gttttatttgttaca

SEQ ID NO: 1117818 - DNA, 15 bp, Homo sapiens
agttttatttgttac

SEQ ID NO: 1117819 - DNA, 15 bp, Homo sapiens
tagttttatttgtta

SEQ ID NO: 1117820 - DNA, 15 bp, Homo sapiens
ttagttttatttgtt

SEQ ID NO: 1117821 - DNA, 15 bp, Homo sapiens
tttagttttatttgt

SEQ ID NO: 1117822 - DNA, 15 bp, Homo sapiens
gtttagttttatttg

SEQ ID NO: 1117823 - DNA, 15 bp, Homo sapiens
agtttagttttattt

SEQ ID NO: 1117824 - DNA, 15 bp, Homo sapiens
aagtttagttttatt

SEQ ID NO: 1117825 - DNA, 15 bp, Homo sapiens
aaagtttagttttat

SEQ ID NO: 1117826 - DNA, 15 bp, Homo sapiens
aaaagtttagtttta

SEQ ID NO: 1117827 - DNA, 15 bp, Homo sapiens
taaaagtttagtttt

SEQ ID NO: 1117828 - DNA, 15 bp, Homo sapiens
ctaaaagtttagttt

SEQ ID NO: 1117829 - DNA, 15 bp, Homo sapiens
tctaaaagtttagtt

SEQ ID NO: 1117830 - DNA, 15 bp, Homo sapiens
ttctaaaagtttagt

SEQ ID NO: 1117831 - DNA, 15 bp, Homo sapiens
tttctaaaagtttag

SEQ ID NO: 1117832 - DNA, 15 bp, Homo sapiens
ttttctaaaagttta

SEQ ID NO: 1117833 - DNA, 15 bp, Homo sapiens
tttttctaaaagttt

SEQ ID NO: 1117834 - DNA, 15 bp, Homo sapiens
atttttctaaaagtt

SEQ ID NO: 1117835 - DNA, 15 bp, Homo sapiens
tatttttctaaaagt

SEQ ID NO: 1117836 - DNA, 15 bp, Homo sapiens
atatttttctaaaag

SEQ ID NO: 1117837 - DNA, 15 bp, Homo sapiens
catatttttctaaaa

SEQ ID NO: 1117838 - DNA, 15 bp, Homo sapiens
ccatatttttctaaa

SEQ ID NO: 1117839 - DNA, 15 bp, Homo sapiens
tccatatttttctaa

SEQ ID NO: 1117840 - DNA, 15 bp, Homo sapiens
ttccatatttttcta

SEQ ID NO: 1117841 - DNA, 15 bp, Homo sapiens
cttccatatttttct

SEQ ID NO: 1117842 - DNA, 15 bp, Homo sapiens
tcttccatatttttc

SEQ ID NO: 1117843 - DNA, 15 bp, Homo sapiens
ctcttccatattttt

SEQ ID NO: 1117844 - DNA, 15 bp, Homo sapiens
tctcttccatatttt

SEQ ID NO: 1117845 - DNA, 15 bp, Homo sapiens
gtctcttccatattt

SEQ ID NO: 1117846 - DNA, 15 bp, Homo sapiens
ggtctcttccatatt

SEQ ID NO: 1117847 - DNA, 15 bp, Homo sapiens
tggtctcttccatat

SEQ ID NO: 1117848 - DNA, 15 bp, Homo sapiens
atggtctcttccata

SEQ ID NO: 1117849 - DNA, 15 bp, Homo sapiens
aatggtctcttccat

SEQ ID NO: 1117850 - DNA, 15 bp, Homo sapiens
aaatggtctcttcca

SEQ ID NO: 1117851 - DNA, 15 bp, Homo sapiens
aaaatggtctcttcc

SEQ ID NO: 1117852 - DNA, 15 bp, Homo sapiens
gaaaatggtctcttc

SEQ ID NO: 1117853 - DNA, 15 bp, Homo sapiens
tgaaaatggtctctt

SEQ ID NO: 1117854 - DNA, 15 bp, Homo sapiens
atgaaaatggtctct

SEQ ID NO: 1117855 - DNA, 15 bp, Homo sapiens
catgaaaatggtctc

SEQ ID NO: 1117856 - DNA, 15 bp, Homo sapiens
acatgaaaatggtct

SEQ ID NO: 1117857 - DNA, 15 bp, Homo sapiens
aacatgaaaatggtc

SEQ ID NO: 1117858 - DNA, 15 bp, Homo sapiens
gaacatgaaaatggt

SEQ ID NO: 1117859 - DNA, 15 bp, Homo sapiens
agaacatgaaaatgg

SEQ ID NO: 1117860 - DNA, 15 bp, Homo sapiens
tagaacatgaaaatg

SEQ ID NO: 1117861 - DNA, 15 bp, Homo sapiens
ctagaacatgaaaat

SEQ ID NO: 1117862 - DNA, 15 bp, Homo sapiens
cctagaacatgaaaa

SEQ ID NO: 1117863 - DNA, 15 bp, Homo sapiens
ccctagaacatgaaa

SEQ ID NO: 1117864 - DNA, 15 bp, Homo sapiens
gccctagaacatgaa

SEQ ID NO: 1117865 - DNA, 15 bp, Homo sapiens
agccctagaacatga

SEQ ID NO: 1117866 - DNA, 15 bp, Homo sapiens
cagccctagaacatg

SEQ ID NO: 1117867 - DNA, 15 bp, Homo sapiens
ccagccctagaacat

SEQ ID NO: 1117868 - DNA, 15 bp, Homo sapiens
tccagccctagaaca

SEQ ID NO: 1117869 - DNA, 15 bp, Homo sapiens
gtccagccctagaac

SEQ ID NO: 1117870 - DNA, 15 bp, Homo sapiens
tgtccagccctagaa

SEQ ID NO: 1117871 - DNA, 15 bp, Homo sapiens
ctgtccagccctaga

SEQ ID NO: 1117872 - DNA, 15 bp, Homo sapiens
tctgtccagccctag

SEQ ID NO: 1117873 - DNA, 15 bp, Homo sapiens
ctctgtccagcccta

SEQ ID NO: 1117874 - DNA, 15 bp, Homo sapiens
gctctgtccagccct

SEQ ID NO: 1117875 - DNA, 15 bp, Homo sapiens
tgctctgtccagccc

SEQ ID NO: 1117876 - DNA, 15 bp, Homo sapiens
atgctctgtccagcc

SEQ ID NO: 1117877 - DNA, 15 bp, Homo sapiens
catgctctgtccagc

SEQ ID NO: 1117878 - DNA, 15 bp, Homo sapiens
acatgctctgtccag

SEQ ID NO: 1117879 - DNA, 15 bp, Homo sapiens
tacatgctctgtcca

SEQ ID NO: 1117880 - DNA, 15 bp, Homo sapiens
ctacatgctctgtcc

SEQ ID NO: 1117881 - DNA, 15 bp, Homo sapiens
tctacatgctctgtc

SEQ ID NO: 1117882 - DNA, 15 bp, Homo sapiens
atctacatgctctgt

SEQ ID NO: 1117883 - DNA, 15 bp, Homo sapiens
catctacatgctctg

SEQ ID NO: 1117884 - DNA, 15 bp, Homo sapiens
tcatctacatgctct

SEQ ID NO: 1117885 - DNA, 15 bp, Homo sapiens
gtcatctacatgctc

SEQ ID NO: 1117886 - DNA, 15 bp, Homo sapiens
tgtcatctacatgct

SEQ ID NO: 1117887 - DNA, 15 bp, Homo sapiens
gtgtcatctacatgc

SEQ ID NO: 1117888 - DNA, 15 bp, Homo sapiens
ggtgtcatctacatg

SEQ ID NO: 1117889 - DNA, 15 bp, Homo sapiens
tggtgtcatctacat

SEQ ID NO: 1117890 - DNA, 15 bp, Homo sapiens
ttggtgtcatctaca

SEQ ID NO: 1117891 - DNA, 15 bp, Homo sapiens
tttggtgtcatctac

SEQ ID NO: 1117892 - DNA, 15 bp, Homo sapiens
ttttggtgtcatcta

SEQ ID NO: 1117893 - DNA, 15 bp, Homo sapiens
cttttggtgtcatct

SEQ ID NO: 1117894 - DNA, 15 bp, Homo sapiens
gcttttggtgtcatc

SEQ ID NO: 1117895 - DNA, 15 bp, Homo sapiens
ttgtgcttttggtgt

SEQ ID NO: 1117896 - DNA, 15 bp, Homo sapiens
attgtgcttttggtg

SEQ ID NO: 1117897 - DNA, 15 bp, Homo sapiens
aattgtgcttttggt

SEQ ID NO: 1117898 - DNA, 15 bp, Homo sapiens
gaattgtgcttttgg

SEQ ID NO: 1117899 - DNA, 15 bp, Homo sapiens
tgaattgtgcttttg

SEQ ID NO: 1117900 - DNA, 15 bp, Homo sapiens
atgaattgtgctttt

SEQ ID NO: 1117901 - DNA, 15 bp, Homo sapiens
tatgaattgtgcttt

SEQ ID NO: 1117902 - DNA, 15 bp, Homo sapiens
ttatgaattgtgctt

SEQ ID NO: 1117903 - DNA, 15 bp, Homo sapiens
tttatgaattgtgct

SEQ ID NO: 1117904 - DNA, 15 bp, Homo sapiens
ctttatgaattgtgc

SEQ ID NO: 1117905 - DNA, 15 bp, Homo sapiens
cctttatgaattgtg

SEQ ID NO: 1117906 - DNA, 15 bp, Homo sapiens
ccctttatgaattgt

SEQ ID NO: 1117907 - DNA, 15 bp, Homo sapiens
tccctttatgaattg

SEQ ID NO: 1117908 - DNA, 15 bp, Homo sapiens
ttccctttatgaatt

SEQ ID NO: 1117909 - DNA, 15 bp, Homo sapiens
tttccctttatgaat

SEQ ID NO: 1117910 - DNA, 15 bp, Homo sapiens
ttttccctttatgaa

SEQ ID NO: 1117911 - DNA, 15 bp, Homo sapiens
attttccctttatga

SEQ ID NO: 1117912 - DNA, 15 bp, Homo sapiens
aattttccctttatg

SEQ ID NO: 1117913 - DNA, 15 bp, Homo sapiens
aaattttccctttat

SEQ ID NO: 1117914 - DNA, 15 bp, Homo sapiens
caaattttcccttta

SEQ ID NO: 1117915 - DNA, 15 bp, Homo sapiens
tcaaattttcccttt

SEQ ID NO: 1117916 - DNA, 15 bp, Homo sapiens
atcaaattttccctt

SEQ ID NO: 1117917 - DNA, 15 bp, Homo sapiens
tatcaaattttccct

SEQ ID NO: 1117918 - DNA, 15 bp, Homo sapiens
ttatcaaattttccc

SEQ ID NO: 1117919 - DNA, 15 bp, Homo sapiens
tttatcaaattttcc

SEQ ID NO: 1117920 - DNA, 15 bp, Homo sapiens
atttatcaaattttc

SEQ ID NO: 1117921 - DNA, 15 bp, Homo sapiens
aatttatcaaatttt

SEQ ID NO: 1117922 - DNA, 15 bp, Homo sapiens
caatttatcaaattt

SEQ ID NO: 1117923 - DNA, 15 bp, Homo sapiens
ccaatttatcaaatt

SEQ ID NO: 1117924 - DNA, 15 bp, Homo sapiens
tccaatttatcaaat

SEQ ID NO: 1117925 - DNA, 15 bp, Homo sapiens
gtccaatttatcaaa

SEQ ID NO: 1117926 - DNA, 15 bp, Homo sapiens
agtccaatttatcaa

SEQ ID NO: 1117927 - DNA, 15 bp, Homo sapiens
aagtccaatttatca

SEQ ID NO: 1117928 - DNA, 15 bp, Homo sapiens
gaagtccaatttatc

SEQ ID NO: 1117929 - DNA, 15 bp, Homo sapiens
tgaagtccaatttat

SEQ ID NO: 1117930 - DNA, 15 bp, Homo sapiens
ttgaagtccaattta

SEQ ID NO: 1117931 - DNA, 15 bp, Homo sapiens
attgaagtccaattt

SEQ ID NO: 1117932 - DNA, 15 bp, Homo sapiens
tattgaagtccaatt

SEQ ID NO: 1117933 - DNA, 15 bp, Homo sapiens
ttattgaagtccaat

SEQ ID NO: 1117934 - DNA, 15 bp, Homo sapiens
tttattgaagtccaa

SEQ ID NO: 1117935 - DNA, 15 bp, Homo sapiens
ttttattgaagtcca

SEQ ID NO: 1117936 - DNA, 15 bp, Homo sapiens
attttattgaagtcc

SEQ ID NO: 1117937 - DNA, 15 bp, Homo sapiens
aattttattgaagtc

SEQ ID NO: 1117938 - DNA, 15 bp, Homo sapiens
taattttattgaagt

SEQ ID NO: 1117939 - DNA, 15 bp, Homo sapiens
ttaattttattgaag

SEQ ID NO: 1117940 - DNA, 15 bp, Homo sapiens
tttaattttattgaa

SEQ ID NO: 1117941 - DNA, 15 bp, Homo sapiens
ttttaattttattga

SEQ ID NO: 1117942 - DNA, 15 bp, Homo sapiens
tttttaattttattg

SEQ ID NO: 1117943 - DNA, 15 bp, Homo sapiens
gtttttaattttatt

SEQ ID NO: 1117944 - DNA, 15 bp, Homo sapiens
agtttttaattttat

SEQ ID NO: 1117945 - DNA, 15 bp, Homo sapiens
aagtttttaatttta

SEQ ID NO: 1117946 - DNA, 15 bp, Homo sapiens
aaagtttttaatttt

SEQ ID NO: 1117947 - DNA, 15 bp, Homo sapiens
caaagtttttaattt

SEQ ID NO: 1117948 - DNA, 15 bp, Homo sapiens
acaaagtttttaatt

SEQ ID NO: 1117949 - DNA, 15 bp, Homo sapiens
tacaaagtttttaat

SEQ ID NO: 1117950 - DNA, 15 bp, Homo sapiens
ttacaaagtttttaa

SEQ ID NO: 1117951 - DNA, 15 bp, Homo sapiens
tttacaaagttttta

SEQ ID NO: 1117952 - DNA, 15 bp, Homo sapiens
ttttacaaagttttt

SEQ ID NO: 1117953 - DNA, 15 bp, Homo sapiens
cttttacaaagtttt

SEQ ID NO: 1117954 - DNA, 15 bp, Homo sapiens
tcttttacaaagttt

SEQ ID NO: 1117955 - DNA, 15 bp, Homo sapiens
atcttttacaaagtt

SEQ ID NO: 1117956 - DNA, 15 bp, Homo sapiens
gatcttttacaaagt

SEQ ID NO: 1117957 - DNA, 15 bp, Homo sapiens
ggatcttttacaaag

SEQ ID NO: 1117958 - DNA, 15 bp, Homo sapiens
aggatcttttacaaa

SEQ ID NO: 1117959 - DNA, 15 bp, Homo sapiens
caggatcttttacaa

SEQ ID NO: 1117960 - DNA, 15 bp, Homo sapiens
acaggatcttttaca

SEQ ID NO: 1117961 - DNA, 15 bp, Homo sapiens
aacaggatcttttac

SEQ ID NO: 1117962 - DNA, 15 bp, Homo sapiens
taacaggatctttta

SEQ ID NO: 1117963 - DNA, 15 bp, Homo sapiens
ttaacaggatctttt

SEQ ID NO: 1117964 - DNA, 15 bp, Homo sapiens
cttaacaggatcttt

SEQ ID NO: 1117965 - DNA, 15 bp, Homo sapiens
tcttaacaggatctt

SEQ ID NO: 1117966 - DNA, 15 bp, Homo sapiens
ctcttaacaggatct

SEQ ID NO: 1117967 - DNA, 15 bp, Homo sapiens
tctcttaacaggatc

SEQ ID NO: 1117968 - DNA, 15 bp, Homo sapiens
ttctcttaacaggat

SEQ ID NO: 1117969 - DNA, 15 bp, Homo sapiens
attctcttaacagga

SEQ ID NO: 1117970 - DNA, 15 bp, Homo sapiens
cattctcttaacagg

SEQ ID NO: 1117971 - DNA, 15 bp, Homo sapiens
tcattctcttaacag

SEQ ID NO: 1117972 - DNA, 15 bp, Homo sapiens
ttcattctcttaaca

SEQ ID NO: 1117973 - DNA, 15 bp, Homo sapiens
tttcattctcttaac

SEQ ID NO: 1117974 - DNA, 15 bp, Homo sapiens
ttttcattctcttaa

SEQ ID NO: 1117975 - DNA, 15 bp, Homo sapiens
cttttcattctctta

SEQ ID NO: 1117976 - DNA, 15 bp, Homo sapiens
tcttttcattctctt

SEQ ID NO: 1117977 - DNA, 15 bp, Homo sapiens
gtcttttcattctct

SEQ ID NO: 1117978 - DNA, 15 bp, Homo sapiens
tgtcttttcattctc

SEQ ID NO: 1117979 - DNA, 15 bp, Homo sapiens
ttgtcttttcattct

SEQ ID NO: 1117980 - DNA, 15 bp, Homo sapiens
cttgtcttttcattc

SEQ ID NO: 1117981 - DNA, 15 bp, Homo sapiens
gcttgtcttttcatt

SEQ ID NO: 1117982 - DNA, 15 bp, Homo sapiens
agcttgtcttttcat

SEQ ID NO: 1117983 - DNA, 15 bp, Homo sapiens
tagcttgtcttttca

SEQ ID NO: 1117984 - DNA, 15 bp, Homo sapiens
gtagcttgtcttttc

SEQ ID NO: 1117985 - DNA, 15 bp, Homo sapiens
agtagcttgtctttt

SEQ ID NO: 1117986 - DNA, 15 bp, Homo sapiens
cagtagcttgtcttt

SEQ ID NO: 1117987 - DNA, 15 bp, Homo sapiens
tcagtagcttgtctt

SEQ ID NO: 1117988 - DNA, 15 bp, Homo sapiens
gtcagtagcttgtct

SEQ ID NO: 1117989 - DNA, 15 bp, Homo sapiens
agtcagtagcttgtc

SEQ ID NO: 1117990 - DNA, 15 bp, Homo sapiens
cagtcagtagcttgt

SEQ ID NO: 1117991 - DNA, 15 bp, Homo sapiens
ccagtcagtagcttg

SEQ ID NO: 1117992 - DNA, 15 bp, Homo sapiens
cccagtcagtagctt

SEQ ID NO: 1117993 - DNA, 15 bp, Homo sapiens
tcccagtcagtagct

SEQ ID NO: 1117994 - DNA, 15 bp, Homo sapiens
ctcccagtcagtagc

SEQ ID NO: 1117995 - DNA, 15 bp, Homo sapiens
tctcccagtcagtag

SEQ ID NO: 1117996 - DNA, 15 bp, Homo sapiens
ttctcccagtcagta

SEQ ID NO: 1117997 - DNA, 15 bp, Homo sapiens
gttctcccagtcagt

SEQ ID NO: 1117998 - DNA, 15 bp, Homo sapiens
tgttctcccagtcag

SEQ ID NO: 1117999 - DNA, 15 bp, Homo sapiens
atgttctcccagtca

SEQ ID NO: 1118000 - DNA, 15 bp, Homo sapiens
tatgttctcccagtc

SEQ ID NO: 1118001 - DNA, 15 bp, Homo sapiens
atatgttctcccagt

SEQ ID NO: 1118002 - DNA, 15 bp, Homo sapiens
aatatgttctcccag

SEQ ID NO: 1118003 - DNA, 15 bp, Homo sapiens
aaatatgttctccca

SEQ ID NO: 1118004 - DNA, 15 bp, Homo sapiens
caaatatgttctccc

SEQ ID NO: 1118005 - DNA, 15 bp, Homo sapiens
gcaaatatgttctcc

SEQ ID NO: 1118006 - DNA, 15 bp, Homo sapiens
tgcaaatatgttctc

SEQ ID NO: 1118007 - DNA, 15 bp, Homo sapiens
ttgcaaatatgttct

SEQ ID NO: 1118008 - DNA, 15 bp, Homo sapiens
gttgcaaatatgttc

SEQ ID NO: 1118009 - DNA, 15 bp, Homo sapiens
agttgcaaatatgtt

SEQ ID NO: 1118010 - DNA, 15 bp, Homo sapiens
aagttgcaaatatgt

SEQ ID NO: 1118011 - DNA, 15 bp, Homo sapiens
caagttgcaaatatg

SEQ ID NO: 1118012 - DNA, 15 bp, Homo sapiens
acaagttgcaaatat

SEQ ID NO: 1118013 - DNA, 15 bp, Homo sapiens
tacaagttgcaaata

SEQ ID NO: 1118014 - DNA, 15 bp, Homo sapiens
atacaagttgcaaat

SEQ ID NO: 1118015 - DNA, 15 bp, Homo sapiens
tatacaagttgcaaa

SEQ ID NO: 1118016 - DNA, 15 bp, Homo sapiens
atatacaagttgcaa

SEQ ID NO: 1118017 - DNA, 15 bp, Homo sapiens
gatatacaagttgca

SEQ ID NO: 1118018 - DNA, 15 bp, Homo sapiens
ggatatacaagttgc

SEQ ID NO: 1118019 - DNA, 15 bp, Homo sapiens
tggatatacaagttg

SEQ ID NO: 1118020 - DNA, 15 bp, Homo sapiens
ttggatatacaagtt

SEQ ID NO: 1118021 - DNA, 15 bp, Homo sapiens
tttggatatacaagt

SEQ ID NO: 1118022 - DNA, 15 bp, Homo sapiens
ttttggatatacaag

SEQ ID NO: 1118023 - DNA, 15 bp, Homo sapiens
tttttggatatacaa

SEQ ID NO: 1118024 - DNA, 15 bp, Homo sapiens
ttttttggatataca

SEQ ID NO: 1118025 - DNA, 15 bp, Homo sapiens
cttttttggatatac

SEQ ID NO: 1118026 - DNA, 15 bp, Homo sapiens
ccttttttggatata

SEQ ID NO: 1118027 - DNA, 15 bp, Homo sapiens
tccttttttggatat

SEQ ID NO: 1118028 - DNA, 15 bp, Homo sapiens
gtccttttttggata

SEQ ID NO: 1118029 - DNA, 15 bp, Homo sapiens
agtccttttttggat

SEQ ID NO: 1118030 - DNA, 15 bp, Homo sapiens
tagtccttttttgga

SEQ ID NO: 1118031 - DNA, 15 bp, Homo sapiens
ctagtccttttttgg

SEQ ID NO: 1118032 - DNA, 15 bp, Homo sapiens
cctagtccttttttg

SEQ ID NO: 1118033 - DNA, 15 bp, Homo sapiens
tcctagtcctttttt

SEQ ID NO: 1118034 - DNA, 15 bp, Homo sapiens
atcctagtccttttt

SEQ ID NO: 1118035 - DNA, 15 bp, Homo sapiens
gatcctagtcctttt

SEQ ID NO: 1118036 - DNA, 15 bp, Homo sapiens
ggatcctagtccttt

SEQ ID NO: 1118037 - DNA, 15 bp, Homo sapiens
gggatcctagtcctt

SEQ ID NO: 1118038 - DNA, 15 bp, Homo sapiens
cgggatcctagtcct

SEQ ID NO: 1118039 - DNA, 15 bp, Homo sapiens
tcgggatcctagtcc

SEQ ID NO: 1118040 - DNA, 15 bp, Homo sapiens
ttcgggatcctagtc

SEQ ID NO: 1118041 - DNA, 15 bp, Homo sapiens
attcgggatcctagt

SEQ ID NO: 1118042 - DNA, 15 bp, Homo sapiens
tattcgggatcctag

SEQ ID NO: 1118043 - DNA, 15 bp, Homo sapiens
atattcgggatccta

SEQ ID NO: 1118044 - DNA, 15 bp, Homo sapiens
tatattcgggatcct

SEQ ID NO: 1118045 - DNA, 15 bp, Homo sapiens
atatattcgggatcc

SEQ ID NO: 1118046 - DNA, 15 bp, Homo sapiens
tatatattcgggatc

SEQ ID NO: 1118047 - DNA, 15 bp, Homo sapiens
ttatatattcgggat

SEQ ID NO: 1118048 - DNA, 15 bp, Homo sapiens
tttatatattcggga

SEQ ID NO: 1118049 - DNA, 15 bp, Homo sapiens
ttttatatattcggg

SEQ ID NO: 1118050 - DNA, 15 bp, Homo sapiens
tttttatatattcgg

SEQ ID NO: 1118051 - DNA, 15 bp, Homo sapiens
ttttttatatattcg

SEQ ID NO: 1118052 - DNA, 15 bp, Homo sapiens
attttttatatattc

SEQ ID NO: 1118053 - DNA, 15 bp, Homo sapiens
gaattttttatatat

SEQ ID NO: 1118054 - DNA, 15 bp, Homo sapiens
agaattttttatata

SEQ ID NO: 1118055 - DNA, 15 bp, Homo sapiens
gagaattttttatat

SEQ ID NO: 1118056 - DNA, 15 bp, Homo sapiens
tgagaattttttata

SEQ ID NO: 1118057 - DNA, 15 bp, Homo sapiens
ttgagaattttttat

SEQ ID NO: 1118058 - DNA, 15 bp, Homo sapiens
tttgagaatttttta

SEQ ID NO: 1118059 - DNA, 15 bp, Homo sapiens
ttttgagaatttttt

SEQ ID NO: 1118060 - DNA, 15 bp, Homo sapiens
gttttgagaattttt

SEQ ID NO: 1118061 - DNA, 15 bp, Homo sapiens
agttttgagaatttt

SEQ ID NO: 1118062 - DNA, 15 bp, Homo sapiens
gagttttgagaattt

SEQ ID NO: 1118063 - DNA, 15 bp, Homo sapiens
tgagttttgagaatt

SEQ ID NO: 1118064 - DNA, 15 bp, Homo sapiens
ctgagttttgagaat

SEQ ID NO: 1118065 - DNA, 15 bp, Homo sapiens
actgagttttgagaa

SEQ ID NO: 1118066 - DNA, 15 bp, Homo sapiens
cactgagttttgaga

SEQ ID NO: 1118067 - DNA, 15 bp, Homo sapiens
acactgagttttgag

SEQ ID NO: 1118068 - DNA, 15 bp, Homo sapiens
aacactgagttttga

SEQ ID NO: 1118069 - DNA, 15 bp, Homo sapiens
taacactgagttttg

SEQ ID NO: 1118070 - DNA, 15 bp, Homo sapiens
ttaacactgagtttt

SEQ ID NO: 1118071 - DNA, 15 bp, Homo sapiens
tttaacactgagttt

SEQ ID NO: 1118072 - DNA, 15 bp, Homo sapiens
ttttaacactgagtt

SEQ ID NO: 1118073 - DNA, 15 bp, Homo sapiens
attttaacactgagt

SEQ ID NO: 1118074 - DNA, 15 bp, Homo sapiens
tattttaacactgag

SEQ ID NO: 1118075 - DNA, 15 bp, Homo sapiens
ttattttaacactga

SEQ ID NO: 1118076 - DNA, 15 bp, Homo sapiens
gttattttaacactg

SEQ ID NO: 1118077 - DNA, 15 bp, Homo sapiens
tgttattttaacact

SEQ ID NO: 1118078 - DNA, 15 bp, Homo sapiens
ttgttattttaacac

SEQ ID NO: 1118079 - DNA, 15 bp, Homo sapiens
attgttattttaaca

SEQ ID NO: 1118080 - DNA, 15 bp, Homo sapiens
tattgttattttaac

SEQ ID NO: 1118081 - DNA, 15 bp, Homo sapiens
ctattgttattttaa

SEQ ID NO: 1118082 - DNA, 15 bp, Homo sapiens
gctattgttatttta

SEQ ID NO: 1118083 - DNA, 15 bp, Homo sapiens
tgctattgttatttt

SEQ ID NO: 1118084 - DNA, 15 bp, Homo sapiens
ttgctattgttattt

SEQ ID NO: 1118085 - DNA, 15 bp, Homo sapiens
tttgctattgttatt

SEQ ID NO: 1118086 - DNA, 15 bp, Homo sapiens
atttgctattgttat

SEQ ID NO: 1118087 - DNA, 15 bp, Homo sapiens
aatttgctattgtta

SEQ ID NO: 1118088 - DNA, 15 bp, Homo sapiens
aaatttgctattgtt

SEQ ID NO: 1118089 - DNA, 15 bp, Homo sapiens
gaaatttgctattgt

SEQ ID NO: 1118090 - DNA, 15 bp, Homo sapiens
tgaaatttgctattg

SEQ ID NO: 1118091 - DNA, 15 bp, Homo sapiens
ctgaaatttgctatt

SEQ ID NO: 1118092 - DNA, 15 bp, Homo sapiens
actgaaatttgctat

SEQ ID NO: 1118093 - DNA, 15 bp, Homo sapiens
aactgaaatttgcta

SEQ ID NO: 1118094 - DNA, 15 bp, Homo sapiens
gaactgaaatttgct

SEQ ID NO: 1118095 - DNA, 15 bp, Homo sapiens
tgaactgaaatttgc

SEQ ID NO: 1118096 - DNA, 15 bp, Homo sapiens
ttgaactgaaatttg

SEQ ID NO: 1118097 - DNA, 15 bp, Homo sapiens
tttgaactgaaattt

SEQ ID NO: 1118098 - DNA, 15 bp, Homo sapiens
ctttgaactgaaatt

SEQ ID NO: 1118099 - DNA, 15 bp, Homo sapiens
tctttgaactgaaat

SEQ ID NO: 1118100 - DNA, 15 bp, Homo sapiens
atctttgaactgaaa

SEQ ID NO: 1118101 - DNA, 15 bp, Homo sapiens
catctttgaactgaa

SEQ ID NO: 1118102 - DNA, 15 bp, Homo sapiens
ccatctttgaactga

SEQ ID NO: 1118103 - DNA, 15 bp, Homo sapiens
cccatctttgaactg

SEQ ID NO: 1118104 - DNA, 15 bp, Homo sapiens
tcccatctttgaact

SEQ ID NO: 1118105 - DNA, 15 bp, Homo sapiens
ttcccatctttgaac

SEQ ID NO: 1118106 - DNA, 15 bp, Homo sapiens
ttttcccatctttga

SEQ ID NO: 1118107 - DNA, 15 bp, Homo sapiens
tttttcccatctttg

SEQ ID NO: 1118108 - DNA, 15 bp, Homo sapiens
ctttttcccatcttt

SEQ ID NO: 1118109 - DNA, 15 bp, Homo sapiens
tctttttcccatctt

SEQ ID NO: 1118110 - DNA, 15 bp, Homo sapiens
gtctttttcccatct

SEQ ID NO: 1118111 - DNA, 15 bp, Homo sapiens
tgtctttttcccatc

SEQ ID NO: 1118112 - DNA, 15 bp, Homo sapiens
atgtctttttcccat

SEQ ID NO: 1118113 - DNA, 15 bp, Homo sapiens
catgtctttttccca

SEQ ID NO: 1118114 - DNA, 15 bp, Homo sapiens
tcatgtctttttccc

SEQ ID NO: 1118115 - DNA, 15 bp, Homo sapiens
ctcatgtctttttcc

SEQ ID NO: 1118116 - DNA, 15 bp, Homo sapiens
actcatgtctttttc

SEQ ID NO: 1118117 - DNA, 15 bp, Homo sapiens
tactcatgtcttttt

SEQ ID NO: 1118118 - DNA, 15 bp, Homo sapiens
ttactcatgtctttt

SEQ ID NO: 1118119 - DNA, 15 bp, Homo sapiens
cttactcatgtcttt

SEQ ID NO: 1118120 - DNA, 15 bp, Homo sapiens
ccttactcatgtctt

SEQ ID NO: 1118121 - DNA, 15 bp, Homo sapiens
tccttactcatgtct

SEQ ID NO: 1118122 - DNA, 15 bp, Homo sapiens
gtccttactcatgtc

SEQ ID NO: 1118123 - DNA, 15 bp, Homo sapiens
tgtccttactcatgt

SEQ ID NO: 1118124 - DNA, 15 bp, Homo sapiens
ttgtccttactcatg

SEQ ID NO: 1118125 - DNA, 15 bp, Homo sapiens
tttgtccttactcat

SEQ ID NO: 1118126 - DNA, 15 bp, Homo sapiens
ttttgtccttactca

SEQ ID NO: 1118127 - DNA, 15 bp, Homo sapiens
cttttgtccttactc

SEQ ID NO: 1118128 - DNA, 15 bp, Homo sapiens
tcttttgtccttact

SEQ ID NO: 1118129 - DNA, 15 bp, Homo sapiens
atcttttgtccttac

SEQ ID NO: 1118130 - DNA, 15 bp, Homo sapiens
catcttttgtcctta

SEQ ID NO: 1118131 - DNA, 15 bp, Homo sapiens
ccatcttttgtcctt

SEQ ID NO: 1118132 - DNA, 15 bp, Homo sapiens
gccatcttttgtcct

SEQ ID NO: 1118133 - DNA, 15 bp, Homo sapiens
tgccatcttttgtcc

SEQ ID NO: 1118134 - DNA, 15 bp, Homo sapiens
ttgccatcttttgtc

SEQ ID NO: 1118135 - DNA, 15 bp, Homo sapiens
tttgccatcttttgt

SEQ ID NO: 1118136 - DNA, 15 bp, Homo sapiens
atttgccatcttttg

SEQ ID NO: 1118137 - DNA, 15 bp, Homo sapiens
catttgccatctttt

SEQ ID NO: 1118138 - DNA, 15 bp, Homo sapiens
tcatttgccatcttt

SEQ ID NO: 1118139 - DNA, 15 bp, Homo sapiens
ctcatttgccatctt

SEQ ID NO: 1118140 - DNA, 15 bp, Homo sapiens
gctcatttgccatct

SEQ ID NO: 1118141 - DNA, 15 bp, Homo sapiens
tgctcatttgccatc

SEQ ID NO: 1118142 - DNA, 15 bp, Homo sapiens
gtgctcatttgccat

SEQ ID NO: 1118143 - DNA, 15 bp, Homo sapiens
tgtgctcatttgcca

SEQ ID NO: 1118144 - DNA, 15 bp, Homo sapiens
atgtgctcatttgcc

SEQ ID NO: 1118145 - DNA, 15 bp, Homo sapiens
catgtgctcatttgc

SEQ ID NO: 1118146 - DNA, 15 bp, Homo sapiens
tcatgtgctcatttg

SEQ ID NO: 1118147 - DNA, 15 bp, Homo sapiens
ttcatgtgctcattt

SEQ ID NO: 1118148 - DNA, 15 bp, Homo sapiens
tttcatgtgctcatt

SEQ ID NO: 1118149 - DNA, 15 bp, Homo sapiens
atttcatgtgctcat

SEQ ID NO: 1118150 - DNA, 15 bp, Homo sapiens
tatttcatgtgctca

SEQ ID NO: 1118151 - DNA, 15 bp, Homo sapiens
atatttcatgtgctc

SEQ ID NO: 1118152 - DNA, 15 bp, Homo sapiens
catatttcatgtgct

SEQ ID NO: 1118153 - DNA, 15 bp, Homo sapiens
acatatttcatgtgc

SEQ ID NO: 1118154 - DNA, 15 bp, Homo sapiens
aacatatttcatgtg

SEQ ID NO: 1118155 - DNA, 15 bp, Homo sapiens
taacatatttcatgt

SEQ ID NO: 1118156 - DNA, 15 bp, Homo sapiens
ttaacatatttcatg

SEQ ID NO: 1118157 - DNA, 15 bp, Homo sapiens
tttaacatatttcat

SEQ ID NO: 1118158 - DNA, 15 bp, Homo sapiens
gtttaacatatttca

SEQ ID NO: 1118159 - DNA, 15 bp, Homo sapiens
tgtttaacatatttc

SEQ ID NO: 1118160 - DNA, 15 bp, Homo sapiens
ttgtttaacatattt

SEQ ID NO: 1118161 - DNA, 15 bp, Homo sapiens
gttgtttaacatatt

SEQ ID NO: 1118162 - DNA, 15 bp, Homo sapiens
tgttgtttaacatat

SEQ ID NO: 1118163 - DNA, 15 bp, Homo sapiens
atgttgtttaacata

SEQ ID NO: 1118164 - DNA, 15 bp, Homo sapiens
gatgttgtttaacat

SEQ ID NO: 1118165 - DNA, 15 bp, Homo sapiens
tgatgttgtttaaca

SEQ ID NO: 1118166 - DNA, 15 bp, Homo sapiens
ttgatgttgtttaac

SEQ ID NO: 1118167 - DNA, 15 bp, Homo sapiens
attgatgttgtttaa

SEQ ID NO: 1118168 - DNA, 15 bp, Homo sapiens
tattgatgttgttta

SEQ ID NO: 1118169 - DNA, 15 bp, Homo sapiens
ctattgatgttgttt

SEQ ID NO: 1118170 - DNA, 15 bp, Homo sapiens
tctattgatgttgtt

SEQ ID NO: 1118171 - DNA, 15 bp, Homo sapiens
ctctattgatgttgt

SEQ ID NO: 1118172 - DNA, 15 bp, Homo sapiens
tctctattgatgttg

SEQ ID NO: 1118173 - DNA, 15 bp, Homo sapiens
ttctctattgatgtt

SEQ ID NO: 1118174 - DNA, 15 bp, Homo sapiens
tttctctattgatgt

SEQ ID NO: 1118175 - DNA, 15 bp, Homo sapiens
atttctctattgatg

SEQ ID NO: 1118176 - DNA, 15 bp, Homo sapiens
catttctctattgat

SEQ ID NO: 1118177 - DNA, 15 bp, Homo sapiens
gcatttctctattga

SEQ ID NO: 1118178 - DNA, 15 bp, Homo sapiens
tgcatttctctattg

SEQ ID NO: 1118179 - DNA, 15 bp, Homo sapiens
ttgcatttctctatt

SEQ ID NO: 1118180 - DNA, 15 bp, Homo sapiens
tttgcatttctctat

SEQ ID NO: 1118181 - DNA, 15 bp, Homo sapiens
atttgcatttctcta

SEQ ID NO: 1118182 - DNA, 15 bp, Homo sapiens
aatttgcatttctct

SEQ ID NO: 1118183 - DNA, 15 bp, Homo sapiens
taatttgcatttctc

SEQ ID NO: 1118184 - DNA, 15 bp, Homo sapiens
ttaatttgcatttct

SEQ ID NO: 1118185 - DNA, 15 bp, Homo sapiens
tttaatttgcatttc

SEQ ID NO: 1118186 - DNA, 15 bp, Homo sapiens
atttaatttgcattt

SEQ ID NO: 1118187 - DNA, 15 bp, Homo sapiens
gatttaatttgcatt

SEQ ID NO: 1118188 - DNA, 15 bp, Homo sapiens
tgatttaatttgcat

SEQ ID NO: 1118189 - DNA, 15 bp, Homo sapiens
ttgatttaatttgca

SEQ ID NO: 1118190 - DNA, 15 bp, Homo sapiens
tttgatttaatttgc

SEQ ID NO: 1118191 - DNA, 15 bp, Homo sapiens
ttttgatttaatttg

SEQ ID NO: 1118192 - DNA, 15 bp, Homo sapiens
attttgatttaattt

SEQ ID NO: 1118193 - DNA, 15 bp, Homo sapiens
cattttgatttaatt

SEQ ID NO: 1118194 - DNA, 15 bp, Homo sapiens
tcattttgatttaat

SEQ ID NO: 1118195 - DNA, 15 bp, Homo sapiens
ctcattttgatttaa

SEQ ID NO: 1118196 - DNA, 15 bp, Homo sapiens
tctcattttgattta

SEQ ID NO: 1118197 - DNA, 15 bp, Homo sapiens
atctcattttgattt

SEQ ID NO: 1118198 - DNA, 15 bp, Homo sapiens
tatctcattttgatt

SEQ ID NO: 1118199 - DNA, 15 bp, Homo sapiens
atatctcattttgat

SEQ ID NO: 1118200 - DNA, 15 bp, Homo sapiens
aatatctcattttga

SEQ ID NO: 1118201 - DNA, 15 bp, Homo sapiens
taatatctcattttg

SEQ ID NO: 1118202 - DNA, 15 bp, Homo sapiens
gtaatatctcatttt

SEQ ID NO: 1118203 - DNA, 15 bp, Homo sapiens
agtaatatctcattt

SEQ ID NO: 1118204 - DNA, 15 bp, Homo sapiens
tagtaatatctcatt

SEQ ID NO: 1118205 - DNA, 15 bp, Homo sapiens
atagtaatatctcat

SEQ ID NO: 1118206 - DNA, 15 bp, Homo sapiens
tatagtaatatctca

SEQ ID NO: 1118207 - DNA, 15 bp, Homo sapiens
ctatagtaatatctc

SEQ ID NO: 1118208 - DNA, 15 bp, Homo sapiens
tctatagtaatatct

SEQ ID NO: 1118209 - DNA, 15 bp, Homo sapiens
gtctatagtaatatc

SEQ ID NO: 1118210 - DNA, 15 bp, Homo sapiens
agtctatagtaatat

SEQ ID NO: 1118211 - DNA, 15 bp, Homo sapiens
aagtctatagtaata

SEQ ID NO: 1118212 - DNA, 15 bp, Homo sapiens
taagtctatagtaat

SEQ ID NO: 1118213 - DNA, 15 bp, Homo sapiens
ataagtctatagtaa

SEQ ID NO: 1118214 - DNA, 15 bp, Homo sapiens
aataagtctatagta

SEQ ID NO: 1118215 - DNA, 15 bp, Homo sapiens
caataagtctatagt

SEQ ID NO: 1118216 - DNA, 15 bp, Homo sapiens
ccaataagtctatag

SEQ ID NO: 1118217 - DNA, 15 bp, Homo sapiens
tccaataagtctata

SEQ ID NO: 1118218 - DNA, 15 bp, Homo sapiens
ttccaataagtctat

SEQ ID NO: 1118219 - DNA, 15 bp, Homo sapiens
attccaataagtcta

SEQ ID NO: 1118220 - DNA, 15 bp, Homo sapiens
cattccaataagtct

SEQ ID NO: 1118221 - DNA, 15 bp, Homo sapiens
ccattccaataagtc

SEQ ID NO: 1118222 - DNA, 15 bp, Homo sapiens
gccattccaataagt

SEQ ID NO: 1118223 - DNA, 15 bp, Homo sapiens
agccattccaataag

SEQ ID NO: 1118224 - DNA, 15 bp, Homo sapiens
tagccattccaataa

SEQ ID NO: 1118225 - DNA, 15 bp, Homo sapiens
ttagccattccaata

SEQ ID NO: 1118226 - DNA, 15 bp, Homo sapiens
tttagccattccaat

SEQ ID NO: 1118227 - DNA, 15 bp, Homo sapiens
ttttagccattccaa

SEQ ID NO: 1118228 - DNA, 15 bp, Homo sapiens
attttagccattcca

SEQ ID NO: 1118229 - DNA, 15 bp, Homo sapiens
aattttagccattcc

SEQ ID NO: 1118230 - DNA, 15 bp, Homo sapiens
taattttagccattc

SEQ ID NO: 1118231 - DNA, 15 bp, Homo sapiens
ttaattttagccatt

SEQ ID NO: 1118232 - DNA, 15 bp, Homo sapiens
tttaattttagccat

SEQ ID NO: 1118233 - DNA, 15 bp, Homo sapiens
ttttaattttagcca

SEQ ID NO: 1118234 - DNA, 15 bp, Homo sapiens
tttttaattttagcc

SEQ ID NO: 1118235 - DNA, 15 bp, Homo sapiens
atttttaattttagc

SEQ ID NO: 1118236 - DNA, 15 bp, Homo sapiens
tatttttaattttag

SEQ ID NO: 1118237 - DNA, 15 bp, Homo sapiens
ctatttttaatttta

SEQ ID NO: 1118238 - DNA, 15 bp, Homo sapiens
actatttttaatttt

SEQ ID NO: 1118239 - DNA, 15 bp, Homo sapiens
cactatttttaattt

SEQ ID NO: 1118240 - DNA, 15 bp, Homo sapiens
tcactatttttaatt

SEQ ID NO: 1118241 - DNA, 15 bp, Homo sapiens
atcactatttttaat

SEQ ID NO: 1118242 - DNA, 15 bp, Homo sapiens
tatcactatttttaa

SEQ ID NO: 1118243 - DNA, 15 bp, Homo sapiens
ttatcactattttta

SEQ ID NO: 1118244 - DNA, 15 bp, Homo sapiens
gttatcactattttt

SEQ ID NO: 1118245 - DNA, 15 bp, Homo sapiens
ggttatcactatttt

SEQ ID NO: 1118246 - DNA, 15 bp, Homo sapiens
gggttatcactattt

SEQ ID NO: 1118247 - DNA, 15 bp, Homo sapiens
agggttatcactatt

SEQ ID NO: 1118248 - DNA, 15 bp, Homo sapiens
tagggttatcactat

SEQ ID NO: 1118249 - DNA, 15 bp, Homo sapiens
ttagggttatcacta

SEQ ID NO: 1118250 - DNA, 15 bp, Homo sapiens
tttagggttatcact

SEQ ID NO: 1118251 - DNA, 15 bp, Homo sapiens
atttagggttatcac

SEQ ID NO: 1118252 - DNA, 15 bp, Homo sapiens
catttagggttatca

SEQ ID NO: 1118253 - DNA, 15 bp, Homo sapiens
acatttagggttatc

SEQ ID NO: 1118254 - DNA, 15 bp, Homo sapiens
aacatttagggttat

SEQ ID NO: 1118255 - DNA, 15 bp, Homo sapiens
caacatttagggtta

SEQ ID NO: 1118256 - DNA, 15 bp, Homo sapiens
tcaacatttagggtt

SEQ ID NO: 1118257 - DNA, 15 bp, Homo sapiens
atcaacatttagggt

SEQ ID NO: 1118258 - DNA, 15 bp, Homo sapiens
catcaacatttaggg

SEQ ID NO: 1118259 - DNA, 15 bp, Homo sapiens
tcatcaacatttagg

SEQ ID NO: 1118260 - DNA, 15 bp, Homo sapiens
ttcatcaacatttag

SEQ ID NO: 1118261 - DNA, 15 bp, Homo sapiens
cttcatcaacattta

SEQ ID NO: 1118262 - DNA, 15 bp, Homo sapiens
tcttcatcaacattt

SEQ ID NO: 1118263 - DNA, 15 bp, Homo sapiens
atcttcatcaacatt

SEQ ID NO: 1118264 - DNA, 15 bp, Homo sapiens
catcttcatcaacat

SEQ ID NO: 1118265 - DNA, 15 bp, Homo sapiens
acatcttcatcaaca

SEQ ID NO: 1118266 - DNA, 15 bp, Homo sapiens
cacatcttcatcaac

SEQ ID NO: 1118267 - DNA, 15 bp, Homo sapiens
ccacatcttcatcaa

SEQ ID NO: 1118268 - DNA, 15 bp, Homo sapiens
tccacatcttcatca

SEQ ID NO: 1118269 - DNA, 15 bp, Homo sapiens
ttccacatcttcatc

SEQ ID NO: 1118270 - DNA, 15 bp, Homo sapiens
cttccacatcttcat

SEQ ID NO: 1118271 - DNA, 15 bp, Homo sapiens
tcttccacatcttca

SEQ ID NO: 1118272 - DNA, 15 bp, Homo sapiens
ttcttccacatcttc

SEQ ID NO: 1118273 - DNA, 15 bp, Homo sapiens
attcttccacatctt

SEQ ID NO: 1118274 - DNA, 15 bp, Homo sapiens
aattcttccacatct

SEQ ID NO: 1118275 - DNA, 15 bp, Homo sapiens
caattcttccacatc

SEQ ID NO: 1118276 - DNA, 15 bp, Homo sapiens
ccaattcttccacat

SEQ ID NO: 1118277 - DNA, 15 bp, Homo sapiens
tccaattcttccaca

SEQ ID NO: 1118278 - DNA, 15 bp, Homo sapiens
atccaattcttccac

SEQ ID NO: 1118279 - DNA, 15 bp, Homo sapiens
gatccaattcttcca

SEQ ID NO: 1118280 - DNA, 15 bp, Homo sapiens
tgatccaattcttcc

SEQ ID NO: 1118281 - DNA, 15 bp, Homo sapiens
gtgatccaattcttc

SEQ ID NO: 1118282 - DNA, 15 bp, Homo sapiens
agtgatccaattctt

SEQ ID NO: 1118283 - DNA, 15 bp, Homo sapiens
gagtgatccaattct

SEQ ID NO: 1118284 - DNA, 15 bp, Homo sapiens
agagtgatccaattc

SEQ ID NO: 1118285 - DNA, 15 bp, Homo sapiens
tagagtgatccaatt

SEQ ID NO: 1118286 - DNA, 15 bp, Homo sapiens
gtagagtgatccaat

SEQ ID NO: 1118287 - DNA, 15 bp, Homo sapiens
ggtagagtgatccaa

SEQ ID NO: 1118288 - DNA, 15 bp, Homo sapiens
tggtagagtgatcca

SEQ ID NO: 1118289 - DNA, 15 bp, Homo sapiens
atggtagagtgatcc

SEQ ID NO: 1118290 - DNA, 15 bp, Homo sapiens
gatggtagagtgatc

SEQ ID NO: 1118291 - DNA, 15 bp, Homo sapiens
tgatggtagagtgat

SEQ ID NO: 1118292 - DNA, 15 bp, Homo sapiens
gtgatggtagagtga

SEQ ID NO: 1118293 - DNA, 15 bp, Homo sapiens
agtgatggtagagtg

SEQ ID NO: 1118294 - DNA, 15 bp, Homo sapiens
gagtgatggtagagt

SEQ ID NO: 1118295 - DNA, 15 bp, Homo sapiens
tgagtgatggtagag

SEQ ID NO: 1118296 - DNA, 15 bp, Homo sapiens
atgagtgatggtaga

SEQ ID NO: 1118297 - DNA, 15 bp, Homo sapiens
catgagtgatggtag

SEQ ID NO: 1118298 - DNA, 15 bp, Homo sapiens
gcatgagtgatggta

SEQ ID NO: 1118299 - DNA, 15 bp, Homo sapiens
ggcatgagtgatggt

SEQ ID NO: 1118300 - DNA, 15 bp, Homo sapiens
tggcatgagtgatgg

SEQ ID NO: 1118301 - DNA, 15 bp, Homo sapiens
atggcatgagtgatg

SEQ ID NO: 1118302 - DNA, 15 bp, Homo sapiens
aatggcatgagtgat

SEQ ID NO: 1118303 - DNA, 15 bp, Homo sapiens
gaatggcatgagtga

SEQ ID NO: 1118304 - DNA, 15 bp, Homo sapiens
tgaatggcatgagtg

SEQ ID NO: 1118305 - DNA, 15 bp, Homo sapiens
ttgaatggcatgagt

SEQ ID NO: 1118306 - DNA, 15 bp, Homo sapiens
tttgaatggcatgag

SEQ ID NO: 1118307 - DNA, 15 bp, Homo sapiens
gtttgaatggcatga

SEQ ID NO: 1118308 - DNA, 15 bp, Homo sapiens
ggtttgaatggcatg

SEQ ID NO: 1118309 - DNA, 15 bp, Homo sapiens
tggtttgaatggcat

SEQ ID NO: 1118310 - DNA, 15 bp, Homo sapiens
atggtttgaatggca

SEQ ID NO: 1118311 - DNA, 15 bp, Homo sapiens
catggtttgaatggc

SEQ ID NO: 1118312 - DNA, 15 bp, Homo sapiens
acatggtttgaatgg

SEQ ID NO: 1118313 - DNA, 15 bp, Homo sapiens
gacatggtttgaatg

SEQ ID NO: 1118314 - DNA, 15 bp, Homo sapiens
tgacatggtttgaat

SEQ ID NO: 1118315 - DNA, 15 bp, Homo sapiens
atgacatggtttgaa

SEQ ID NO: 1118316 - DNA, 15 bp, Homo sapiens
tatgacatggtttga

SEQ ID NO: 1118317 - DNA, 15 bp, Homo sapiens
ctatgacatggtttg

SEQ ID NO: 1118318 - DNA, 15 bp, Homo sapiens
gctatgacatggttt

SEQ ID NO: 1118319 - DNA, 15 bp, Homo sapiens
agctatgacatggtt

SEQ ID NO: 1118320 - DNA, 15 bp, Homo sapiens
tagctatgacatggt

SEQ ID NO: 1118321 - DNA, 15 bp, Homo sapiens
atagctatgacatgg

SEQ ID NO: 1118322 - DNA, 15 bp, Homo sapiens
gatagctatgacatg

SEQ ID NO: 1118323 - DNA, 15 bp, Homo sapiens
ggatagctatgacat

SEQ ID NO: 1118324 - DNA, 15 bp, Homo sapiens
aggatagctatgaca

SEQ ID NO: 1118325 - DNA, 15 bp, Homo sapiens
caggatagctatgac

SEQ ID NO: 1118326 - DNA, 15 bp, Homo sapiens
ccaggatagctatga

SEQ ID NO: 1118327 - DNA, 15 bp, Homo sapiens
tccaggatagctatg

SEQ ID NO: 1118328 - DNA, 15 bp, Homo sapiens
ttccaggatagctat

SEQ ID NO: 1118329 - DNA, 15 bp, Homo sapiens
tttccaggatagcta

SEQ ID NO: 1118330 - DNA, 15 bp, Homo sapiens
ttttccaggatagct

SEQ ID NO: 1118331 - DNA, 15 bp, Homo sapiens
gttttccaggatagc

SEQ ID NO: 1118332 - DNA, 15 bp, Homo sapiens
tgttttccaggatag

SEQ ID NO: 1118333 - DNA, 15 bp, Homo sapiens
ctgttttccaggata

SEQ ID NO: 1118334 - DNA, 15 bp, Homo sapiens
actgttttccaggat

SEQ ID NO: 1118335 - DNA, 15 bp, Homo sapiens
aactgttttccagga

SEQ ID NO: 1118336 - DNA, 15 bp, Homo sapiens
aaactgttttccagg

SEQ ID NO: 1118337 - DNA, 15 bp, Homo sapiens
taaactgttttccag

SEQ ID NO: 1118338 - DNA, 15 bp, Homo sapiens
ctaaactgttttcca

SEQ ID NO: 1118339 - DNA, 15 bp, Homo sapiens
actaaactgttttcc

SEQ ID NO: 1118340 - DNA, 15 bp, Homo sapiens
tactaaactgttttc

SEQ ID NO: 1118341 - DNA, 15 bp, Homo sapiens
ttactaaactgtttt

SEQ ID NO: 1118342 - DNA, 15 bp, Homo sapiens
attactaaactgttt

SEQ ID NO: 1118343 - DNA, 15 bp, Homo sapiens
aattactaaactgtt

SEQ ID NO: 1118344 - DNA, 15 bp, Homo sapiens
taattactaaactgt

SEQ ID NO: 1118345 - DNA, 15 bp, Homo sapiens
ttaattactaaactg

SEQ ID NO: 1118346 - DNA, 15 bp, Homo sapiens
tttaattactaaact

SEQ ID NO: 1118347 - DNA, 15 bp, Homo sapiens
ttttaattactaaac

SEQ ID NO: 1118348 - DNA, 15 bp, Homo sapiens
tttttaattactaaa

SEQ ID NO: 1118349 - DNA, 15 bp, Homo sapiens
ttttttaattactaa

SEQ ID NO: 1118350 - DNA, 15 bp, Homo sapiens
tttttttaattacta

SEQ ID NO: 1118351 - DNA, 15 bp, Homo sapiens
atttttttaattact

SEQ ID NO: 1118352 - DNA, 15 bp, Homo sapiens
aatttttttaattac

SEQ ID NO: 1118353 - DNA, 15 bp, Homo sapiens
gaatttttttaatta

SEQ ID NO: 1118354 - DNA, 15 bp, Homo sapiens
agaatttttttaatt

SEQ ID NO: 1118355 - DNA, 15 bp, Homo sapiens
tagaatttttttaat

SEQ ID NO: 1118356 - DNA, 15 bp, Homo sapiens
ttagaatttttttaa

SEQ ID NO: 1118357 - DNA, 15 bp, Homo sapiens
tttagaattttttta

SEQ ID NO: 1118358 - DNA, 15 bp, Homo sapiens
gtttagaattttttt

SEQ ID NO: 1118359 - DNA, 15 bp, Homo sapiens
tgtttagaatttttt

SEQ ID NO: 1118360 - DNA, 15 bp, Homo sapiens
gtgtttagaattttt

SEQ ID NO: 1118361 - DNA, 15 bp, Homo sapiens
agtgtttagaatttt

SEQ ID NO: 1118362 - DNA, 15 bp, Homo sapiens
gagtgtttagaattt

SEQ ID NO: 1118363 - DNA, 15 bp, Homo sapiens
tgagtgtttagaatt

SEQ ID NO: 1118364 - DNA, 15 bp, Homo sapiens
ttgagtgtttagaat

SEQ ID NO: 1118365 - DNA, 15 bp, Homo sapiens
gttgagtgtttagaa

SEQ ID NO: 1118366 - DNA, 15 bp, Homo sapiens
agttgagtgtttaga

SEQ ID NO: 1118367 - DNA, 15 bp, Homo sapiens
tagttgagtgtttag

SEQ ID NO: 1118368 - DNA, 15 bp, Homo sapiens
gtagttgagtgttta

SEQ ID NO: 1118369 - DNA, 15 bp, Homo sapiens
ggtagttgagtgttt

SEQ ID NO: 1118370 - DNA, 15 bp, Homo sapiens
tggtagttgagtgtt

SEQ ID NO: 1118371 - DNA, 15 bp, Homo sapiens
atggtagttgagtgt

SEQ ID NO: 1118372 - DNA, 15 bp, Homo sapiens
tatggtagttgagtg

SEQ ID NO: 1118373 - DNA, 15 bp, Homo sapiens
atatggtagttgagt

SEQ ID NO: 1118374 - DNA, 15 bp, Homo sapiens
catatggtagttgag

SEQ ID NO: 1118375 - DNA, 15 bp, Homo sapiens
tcatatggtagttga

SEQ ID NO: 1118376 - DNA, 15 bp, Homo sapiens
agtcatatggtagtt

SEQ ID NO: 1118377 - DNA, 15 bp, Homo sapiens
gagtcatatggtagt

SEQ ID NO: 1118378 - DNA, 15 bp, Homo sapiens
tgagtcatatggtag

SEQ ID NO: 1118379 - DNA, 15 bp, Homo sapiens
ctgagtcatatggta

SEQ ID NO: 1118380 - DNA, 15 bp, Homo sapiens
gctgagtcatatggt

SEQ ID NO: 1118381 - DNA, 15 bp, Homo sapiens
tgctgagtcatatgg

SEQ ID NO: 1118382 - DNA, 15 bp, Homo sapiens
atgctgagtcatatg

SEQ ID NO: 1118383 - DNA, 15 bp, Homo sapiens
aatgctgagtcatat

SEQ ID NO: 1118384 - DNA, 15 bp, Homo sapiens
aaatgctgagtcata

SEQ ID NO: 1118385 - DNA, 15 bp, Homo sapiens
gaaatgctgagtcat

SEQ ID NO: 1118386 - DNA, 15 bp, Homo sapiens
agaaatgctgagtca

SEQ ID NO: 1118387 - DNA, 15 bp, Homo sapiens
tagaaatgctgagtc

SEQ ID NO: 1118388 - DNA, 15 bp, Homo sapiens
gtagaaatgctgagt

SEQ ID NO: 1118389 - DNA, 15 bp, Homo sapiens
agtagaaatgctgag

SEQ ID NO: 1118390 - DNA, 15 bp, Homo sapiens
gagtagaaatgctga

SEQ ID NO: 1118391 - DNA, 15 bp, Homo sapiens
agagtagaaatgctg

SEQ ID NO: 1118392 - DNA, 15 bp, Homo sapiens
aagagtagaaatgct

SEQ ID NO: 1118393 - DNA, 15 bp, Homo sapiens
caagagtagaaatgc

SEQ ID NO: 1118394 - DNA, 15 bp, Homo sapiens
ccaagagtagaaatg

SEQ ID NO: 1118395 - DNA, 15 bp, Homo sapiens
cccaagagtagaaat

SEQ ID NO: 1118396 - DNA, 15 bp, Homo sapiens
ccccaagagtagaaa

SEQ ID NO: 1118397 - DNA, 15 bp, Homo sapiens
tccccaagagtagaa

SEQ ID NO: 1118398 - DNA, 15 bp, Homo sapiens
atccccaagagtaga

SEQ ID NO: 1118399 - DNA, 15 bp, Homo sapiens
aatccccaagagtag

SEQ ID NO: 1118400 - DNA, 15 bp, Homo sapiens
aaatccccaagagta

SEQ ID NO: 1118401 - DNA, 15 bp, Homo sapiens
taaatccccaagagt

SEQ ID NO: 1118402 - DNA, 15 bp, Homo sapiens
ataaatccccaagag

SEQ ID NO: 1118403 - DNA, 15 bp, Homo sapiens
aataaatccccaaga

SEQ ID NO: 1118404 - DNA, 15 bp, Homo sapiens
gaataaatccccaag

SEQ ID NO: 1118405 - DNA, 15 bp, Homo sapiens
ggaataaatccccaa

SEQ ID NO: 1118406 - DNA, 15 bp, Homo sapiens
tggaataaatcccca

SEQ ID NO: 1118407 - DNA, 15 bp, Homo sapiens
ctggaataaatcccc

SEQ ID NO: 1118408 - DNA, 15 bp, Homo sapiens
tctggaataaatccc

SEQ ID NO: 1118409 - DNA, 15 bp, Homo sapiens
ctctggaataaatcc

SEQ ID NO: 1118410 - DNA, 15 bp, Homo sapiens
tctctggaataaatc

SEQ ID NO: 1118411 - DNA, 15 bp, Homo sapiens
ttctctggaataaat

SEQ ID NO: 1118412 - DNA, 15 bp, Homo sapiens
tttctctggaataaa

SEQ ID NO: 1118413 - DNA, 15 bp, Homo sapiens
atttctctggaataa

SEQ ID NO: 1118414 - DNA, 15 bp, Homo sapiens
catttctctggaata

SEQ ID NO: 1118415 - DNA, 15 bp, Homo sapiens
tcatttctctggaat

SEQ ID NO: 1118416 - DNA, 15 bp, Homo sapiens
ttcatttctctggaa

SEQ ID NO: 1118417 - DNA, 15 bp, Homo sapiens
tttcatttctctgga

SEQ ID NO: 1118418 - DNA, 15 bp, Homo sapiens
ttttcatttctctgg

SEQ ID NO: 1118419 - DNA, 15 bp, Homo sapiens
gttttcatttctctg

SEQ ID NO: 1118420 - DNA, 15 bp, Homo sapiens
agttttcatttctct

SEQ ID NO: 1118421 - DNA, 15 bp, Homo sapiens
aagttttcatttctc

SEQ ID NO: 1118422 - DNA, 15 bp, Homo sapiens
taagttttcatttct

SEQ ID NO: 1118423 - DNA, 15 bp, Homo sapiens
ataagttttcatttc

SEQ ID NO: 1118424 - DNA, 15 bp, Homo sapiens
cataagttttcattt

SEQ ID NO: 1118425 - DNA, 15 bp, Homo sapiens
gcataagttttcatt

SEQ ID NO: 1118426 - DNA, 15 bp, Homo sapiens
agcataagttttcat

SEQ ID NO: 1118427 - DNA, 15 bp, Homo sapiens
gagcataagttttca

SEQ ID NO: 1118428 - DNA, 15 bp, Homo sapiens
tgagcataagttttc

SEQ ID NO: 1118429 - DNA, 15 bp, Homo sapiens
gtgagcataagtttt

SEQ ID NO: 1118430 - DNA, 15 bp, Homo sapiens
tgtgagcataagttt

SEQ ID NO: 1118431 - DNA, 15 bp, Homo sapiens
atgtgagcataagtt

SEQ ID NO: 1118432 - DNA, 15 bp, Homo sapiens
tatgtgagcataagt

SEQ ID NO: 1118433 - DNA, 15 bp, Homo sapiens
ttatgtgagcataag

SEQ ID NO: 1118434 - DNA, 15 bp, Homo sapiens
tttatgtgagcataa

SEQ ID NO: 1118435 - DNA, 15 bp, Homo sapiens
ttttatgtgagcata

SEQ ID NO: 1118436 - DNA, 15 bp, Homo sapiens
tttttatgtgagcat

SEQ ID NO: 1118437 - DNA, 15 bp, Homo sapiens
gtttttatgtgagca

SEQ ID NO: 1118438 - DNA, 15 bp, Homo sapiens
ggtttttatgtgagc

SEQ ID NO: 1118439 - DNA, 15 bp, Homo sapiens
aggtttttatgtgag

SEQ ID NO: 1118440 - DNA, 15 bp, Homo sapiens
taggtttttatgtga

SEQ ID NO: 1118441 - DNA, 15 bp, Homo sapiens
ataggtttttatgtg

SEQ ID NO: 1118442 - DNA, 15 bp, Homo sapiens
tataggtttttatgt

SEQ ID NO: 1118443 - DNA, 15 bp, Homo sapiens
gtataggtttttatg

SEQ ID NO: 1118444 - DNA, 15 bp, Homo sapiens
tgtataggtttttat

SEQ ID NO: 1118445 - DNA, 15 bp, Homo sapiens
gtgtataggttttta

SEQ ID NO: 1118446 - DNA, 15 bp, Homo sapiens
tgtgtataggttttt

SEQ ID NO: 1118447 - DNA, 15 bp, Homo sapiens
ttgtgtataggtttt

SEQ ID NO: 1118448 - DNA, 15 bp, Homo sapiens
tttgtgtataggttt

SEQ ID NO: 1118449 - DNA, 15 bp, Homo sapiens
atttgtgtataggtt

SEQ ID NO: 1118450 - DNA, 15 bp, Homo sapiens
catttgtgtataggt

SEQ ID NO: 1118451 - DNA, 15 bp, Homo sapiens
acatttgtgtatagg

SEQ ID NO: 1118452 - DNA, 15 bp, Homo sapiens
aacatttgtgtatag

SEQ ID NO: 1118453 - DNA, 15 bp, Homo sapiens
caacatttgtgtata

SEQ ID NO: 1118454 - DNA, 15 bp, Homo sapiens
tcaacatttgtgtat

SEQ ID NO: 1118455 - DNA, 15 bp, Homo sapiens
atcaacatttgtgta

SEQ ID NO: 1118456 - DNA, 15 bp, Homo sapiens
tatcaacatttgtgt

SEQ ID NO: 1118457 - DNA, 15 bp, Homo sapiens
ctatcaacatttgtg

SEQ ID NO: 1118458 - DNA, 15 bp, Homo sapiens
gctatcaacatttgt

SEQ ID NO: 1118459 - DNA, 15 bp, Homo sapiens
agctatcaacatttg

SEQ ID NO: 1118460 - DNA, 15 bp, Homo sapiens
cagctatcaacattt

SEQ ID NO: 1118461 - DNA, 15 bp, Homo sapiens
gcagctatcaacatt

SEQ ID NO: 1118462 - DNA, 15 bp, Homo sapiens
agcagctatcaacat

SEQ ID NO: 1118463 - DNA, 15 bp, Homo sapiens
aagcagctatcaaca

SEQ ID NO: 1118464 - DNA, 15 bp, Homo sapiens
taagcagctatcaac

SEQ ID NO: 1118465 - DNA, 15 bp, Homo sapiens
ttaagcagctatcaa

SEQ ID NO: 1118466 - DNA, 15 bp, Homo sapiens
attaagcagctatca

SEQ ID NO: 1118467 - DNA, 15 bp, Homo sapiens
aattaagcagctatc

SEQ ID NO: 1118468 - DNA, 15 bp, Homo sapiens
aaattaagcagctat

SEQ ID NO: 1118469 - DNA, 15 bp, Homo sapiens
caaattaagcagcta

SEQ ID NO: 1118470 - DNA, 15 bp, Homo sapiens
acaaattaagcagct

SEQ ID NO: 1118471 - DNA, 15 bp, Homo sapiens
tacaaattaagcagc

SEQ ID NO: 1118472 - DNA, 15 bp, Homo sapiens
ttacaaattaagcag

SEQ ID NO: 1118473 - DNA, 15 bp, Homo sapiens
attacaaattaagca

SEQ ID NO: 1118474 - DNA, 15 bp, Homo sapiens
tattacaaattaagc

SEQ ID NO: 1118475 - DNA, 15 bp, Homo sapiens
ctattacaaattaag

SEQ ID NO: 1118476 - DNA, 15 bp, Homo sapiens
tctattacaaattaa

SEQ ID NO: 1118477 - DNA, 15 bp, Homo sapiens
atctattacaaatta

SEQ ID NO: 1118478 - DNA, 15 bp, Homo sapiens
tatctattacaaatt

SEQ ID NO: 1118479 - DNA, 15 bp, Homo sapiens
ttatctattacaaat

SEQ ID NO: 1118480 - DNA, 15 bp, Homo sapiens
tttatctattacaaa

SEQ ID NO: 1118481 - DNA, 15 bp, Homo sapiens
ttttatctattacaa

SEQ ID NO: 1118482 - DNA, 15 bp, Homo sapiens
tttttatctattaca

SEQ ID NO: 1118483 - DNA, 15 bp, Homo sapiens
atttttatctattac

SEQ ID NO: 1118484 - DNA, 15 bp, Homo sapiens
aatttttatctatta

SEQ ID NO: 1118485 - DNA, 15 bp, Homo sapiens
caatttttatctatt

SEQ ID NO: 1118486 - DNA, 15 bp, Homo sapiens
ccaatttttatctat

SEQ ID NO: 1118487 - DNA, 15 bp, Homo sapiens
tccaatttttatcta

SEQ ID NO: 1118488 - DNA, 15 bp, Homo sapiens
ttccaatttttatct

SEQ ID NO: 1118489 - DNA, 15 bp, Homo sapiens
tttccaatttttatc

SEQ ID NO: 1118490 - DNA, 15 bp, Homo sapiens
gtttccaatttttat

SEQ ID NO: 1118491 - DNA, 15 bp, Homo sapiens
tgtttccaattttta

SEQ ID NO: 1118492 - DNA, 15 bp, Homo sapiens
ctgtttccaattttt

SEQ ID NO: 1118493 - DNA, 15 bp, Homo sapiens
gctgtttccaatttt

SEQ ID NO: 1118494 - DNA, 15 bp, Homo sapiens
ggctgtttccaattt

SEQ ID NO: 1118495 - DNA, 15 bp, Homo sapiens
gggctgtttccaatt

SEQ ID NO: 1118496 - DNA, 15 bp, Homo sapiens
tgggctgtttccaat

SEQ ID NO: 1118497 - DNA, 15 bp, Homo sapiens
ctgggctgtttccaa

SEQ ID NO: 1118498 - DNA, 15 bp, Homo sapiens
tctgggctgtttcca

SEQ ID NO: 1118499 - DNA, 15 bp, Homo sapiens
atctgggctgtttcc

SEQ ID NO: 1118500 - DNA, 15 bp, Homo sapiens
tatctgggctgtttc

SEQ ID NO: 1118501 - DNA, 15 bp, Homo sapiens
atatctgggctgttt

SEQ ID NO: 1118502 - DNA, 15 bp, Homo sapiens
gatatctgggctgtt

SEQ ID NO: 1118503 - DNA, 15 bp, Homo sapiens
ggatatctgggctgt

SEQ ID NO: 1118504 - DNA, 15 bp, Homo sapiens
aggatatctgggctg

SEQ ID NO: 1118505 - DNA, 15 bp, Homo sapiens
gaggatatctgggct

SEQ ID NO: 1118506 - DNA, 15 bp, Homo sapiens
ggaggatatctgggc

SEQ ID NO: 1118507 - DNA, 15 bp, Homo sapiens
tggaggatatctggg

SEQ ID NO: 1118508 - DNA, 15 bp, Homo sapiens
ttggaggatatctgg

SEQ ID NO: 1118509 - DNA, 15 bp, Homo sapiens
tttggaggatatctg

SEQ ID NO: 1118510 - DNA, 15 bp, Homo sapiens
ctttggaggatatct

SEQ ID NO: 1118511 - DNA, 15 bp, Homo sapiens
cctttggaggatatc

SEQ ID NO: 1118512 - DNA, 15 bp, Homo sapiens
tcctttggaggatat

SEQ ID NO: 1118513 - DNA, 15 bp, Homo sapiens
atcctttggaggata

SEQ ID NO: 1118514 - DNA, 15 bp, Homo sapiens
catcctttggaggat

SEQ ID NO: 1118515 - DNA, 15 bp, Homo sapiens
tcatcctttggagga

SEQ ID NO: 1118516 - DNA, 15 bp, Homo sapiens
ctcatcctttggagg

SEQ ID NO: 1118517 - DNA, 15 bp, Homo sapiens
actcatcctttggag

SEQ ID NO: 1118518 - DNA, 15 bp, Homo sapiens
cactcatcctttgga

SEQ ID NO: 1118519 - DNA, 15 bp, Homo sapiens
ccactcatcctttgg

SEQ ID NO: 1118520 - DNA, 15 bp, Homo sapiens
accactcatcctttg

SEQ ID NO: 1118521 - DNA, 15 bp, Homo sapiens
aaccactcatccttt

SEQ ID NO: 1118522 - DNA, 15 bp, Homo sapiens
taaccactcatcctt

SEQ ID NO: 1118523 - DNA, 15 bp, Homo sapiens
ttaaccactcatcct

SEQ ID NO: 1118524 - DNA, 15 bp, Homo sapiens
tttaaccactcatcc

SEQ ID NO: 1118525 - DNA, 15 bp, Homo sapiens
gtttaaccactcatc

SEQ ID NO: 1118526 - DNA, 15 bp, Homo sapiens
tgtttaaccactcat

SEQ ID NO: 1118527 - DNA, 15 bp, Homo sapiens
ttgtttaaccactca

SEQ ID NO: 1118528 - DNA, 15 bp, Homo sapiens
tttgtttaaccactc

SEQ ID NO: 1118529 - DNA, 15 bp, Homo sapiens
gtttgtttaaccact

SEQ ID NO: 1118530 - DNA, 15 bp, Homo sapiens
agtttgtttaaccac

SEQ ID NO: 1118531 - DNA, 15 bp, Homo sapiens
cagtttgtttaacca

SEQ ID NO: 1118532 - DNA, 15 bp, Homo sapiens
acagtttgtttaacc

SEQ ID NO: 1118533 - DNA, 15 bp, Homo sapiens
cacagtttgtttaac

SEQ ID NO: 1118534 - DNA, 15 bp, Homo sapiens
tcacagtttgtttaa

SEQ ID NO: 1118535 - DNA, 15 bp, Homo sapiens
atcacagtttgttta

SEQ ID NO: 1118536 - DNA, 15 bp, Homo sapiens
gatcacagtttgttt

SEQ ID NO: 1118537 - DNA, 15 bp, Homo sapiens
ggatcacagtttgtt

SEQ ID NO: 1118538 - DNA, 15 bp, Homo sapiens
tggatcacagtttgt

SEQ ID NO: 1118539 - DNA, 15 bp, Homo sapiens
atggatcacagtttg

SEQ ID NO: 1118540 - DNA, 15 bp, Homo sapiens
gatggatcacagttt

SEQ ID NO: 1118541 - DNA, 15 bp, Homo sapiens
agatggatcacagtt

SEQ ID NO: 1118542 - DNA, 15 bp, Homo sapiens
tagatggatcacagt

SEQ ID NO: 1118543 - DNA, 15 bp, Homo sapiens
atagatggatcacag

SEQ ID NO: 1118544 - DNA, 15 bp, Homo sapiens
gatagatggatcaca

SEQ ID NO: 1118545 - DNA, 15 bp, Homo sapiens
agatagatggatcac

SEQ ID NO: 1118546 - DNA, 15 bp, Homo sapiens
tagatagatggatca

SEQ ID NO: 1118547 - DNA, 15 bp, Homo sapiens
atagatagatggatc

SEQ ID NO: 1118548 - DNA, 15 bp, Homo sapiens
tatagatagatggat

SEQ ID NO: 1118549 - DNA, 15 bp, Homo sapiens
atatagatagatgga

SEQ ID NO: 1118550 - DNA, 15 bp, Homo sapiens
aatatagatagatgg

SEQ ID NO: 1118551 - DNA, 15 bp, Homo sapiens
taatatagatagatg

SEQ ID NO: 1118552 - DNA, 15 bp, Homo sapiens
ataatatagatagat

SEQ ID NO: 1118553 - DNA, 15 bp, Homo sapiens
tataatatagataga

SEQ ID NO: 1118554 - DNA, 15 bp, Homo sapiens
atataatatagatag

SEQ ID NO: 1118555 - DNA, 15 bp, Homo sapiens
catataatatagata

SEQ ID NO: 1118556 - DNA, 15 bp, Homo sapiens
ccatataatatagat

SEQ ID NO: 1118557 - DNA, 15 bp, Homo sapiens
tccatataatataga

SEQ ID NO: 1118558 - DNA, 15 bp, Homo sapiens
ttccatataatatag

SEQ ID NO: 1118559 - DNA, 15 bp, Homo sapiens
attccatataatata

SEQ ID NO: 1118560 - DNA, 15 bp, Homo sapiens
gattccatataatat

SEQ ID NO: 1118561 - DNA, 15 bp, Homo sapiens
ggattccatataata

SEQ ID NO: 1118562 - DNA, 15 bp, Homo sapiens
aggattccatataat

SEQ ID NO: 1118563 - DNA, 15 bp, Homo sapiens
gaggattccatataa

SEQ ID NO: 1118564 - DNA, 15 bp, Homo sapiens
ggaggattccatata

SEQ ID NO: 1118565 - DNA, 15 bp, Homo sapiens
aggaggattccatat

SEQ ID NO: 1118566 - DNA, 15 bp, Homo sapiens
aaggaggattccata

SEQ ID NO: 1118567 - DNA, 15 bp, Homo sapiens
taaggaggattccat

SEQ ID NO: 1118568 - DNA, 15 bp, Homo sapiens
ttaaggaggattcca

SEQ ID NO: 1118569 - DNA, 15 bp, Homo sapiens
attaaggaggattcc

SEQ ID NO: 1118570 - DNA, 15 bp, Homo sapiens
tattaaggaggattc

SEQ ID NO: 1118571 - DNA, 15 bp, Homo sapiens
ttattaaggaggatt

SEQ ID NO: 1118572 - DNA, 15 bp, Homo sapiens
tttattaaggaggat

SEQ ID NO: 1118573 - DNA, 15 bp, Homo sapiens
atttattaaggagga

SEQ ID NO: 1118574 - DNA, 15 bp, Homo sapiens
tatttattaaggagg

SEQ ID NO: 1118575 - DNA, 15 bp, Homo sapiens
ctatttattaaggag

SEQ ID NO: 1118576 - DNA, 15 bp, Homo sapiens
cctatttattaagga

SEQ ID NO: 1118577 - DNA, 15 bp, Homo sapiens
tcctatttattaagg

SEQ ID NO: 1118578 - DNA, 15 bp, Homo sapiens
ttcctatttattaag

SEQ ID NO: 1118579 - DNA, 15 bp, Homo sapiens
attcctatttattaa

SEQ ID NO: 1118580 - DNA, 15 bp, Homo sapiens
cattcctatttatta

SEQ ID NO: 1118581 - DNA, 15 bp, Homo sapiens
tcattcctatttatt

SEQ ID NO: 1118582 - DNA, 15 bp, Homo sapiens
ttcattcctatttat

SEQ ID NO: 1118583 - DNA, 15 bp, Homo sapiens
gttcattcctattta

SEQ ID NO: 1118584 - DNA, 15 bp, Homo sapiens
agttcattcctattt

SEQ ID NO: 1118585 - DNA, 15 bp, Homo sapiens
cagttcattcctatt

SEQ ID NO: 1118586 - DNA, 15 bp, Homo sapiens
acagttcattcctat

SEQ ID NO: 1118587 - DNA, 15 bp, Homo sapiens
aacagttcattccta

SEQ ID NO: 1118588 - DNA, 15 bp, Homo sapiens
taacagttcattcct

SEQ ID NO: 1118589 - DNA, 15 bp, Homo sapiens
ttaacagttcattcc

SEQ ID NO: 1118590 - DNA, 15 bp, Homo sapiens
attaacagttcattc

SEQ ID NO: 1118591 - DNA, 15 bp, Homo sapiens
cattaacagttcatt

SEQ ID NO: 1118592 - DNA, 15 bp, Homo sapiens
tcattaacagttcat

SEQ ID NO: 1118593 - DNA, 15 bp, Homo sapiens
atcattaacagttca

SEQ ID NO: 1118594 - DNA, 15 bp, Homo sapiens
catcattaacagttc

SEQ ID NO: 1118595 - DNA, 15 bp, Homo sapiens
tcatcattaacagtt

SEQ ID NO: 1118596 - DNA, 15 bp, Homo sapiens
ttcatcattaacagt

SEQ ID NO: 1118597 - DNA, 15 bp, Homo sapiens
tttcatcattaacag

SEQ ID NO: 1118598 - DNA, 15 bp, Homo sapiens
gtttcatcattaaca

SEQ ID NO: 1118599 - DNA, 15 bp, Homo sapiens
agtttcatcattaac

SEQ ID NO: 1118600 - DNA, 15 bp, Homo sapiens
aagtttcatcattaa

SEQ ID NO: 1118601 - DNA, 15 bp, Homo sapiens
caagtttcatcatta

SEQ ID NO: 1118602 - DNA, 15 bp, Homo sapiens
tcaagtttcatcatt

SEQ ID NO: 1118603 - DNA, 15 bp, Homo sapiens
ttcaagtttcatcat

SEQ ID NO: 1118604 - DNA, 15 bp, Homo sapiens
tttcaagtttcatca

SEQ ID NO: 1118605 - DNA, 15 bp, Homo sapiens
ctttcaagtttcatc

SEQ ID NO: 1118606 - DNA, 15 bp, Homo sapiens
tctttcaagtttcat

SEQ ID NO: 1118607 - DNA, 15 bp, Homo sapiens
ttctttcaagtttca

SEQ ID NO: 1118608 - DNA, 15 bp, Homo sapiens
attctttcaagtttc

SEQ ID NO: 1118609 - DNA, 15 bp, Homo sapiens
aattctttcaagttt

SEQ ID NO: 1118610 - DNA, 15 bp, Homo sapiens
taattctttcaagtt

SEQ ID NO: 1118611 - DNA, 15 bp, Homo sapiens
ataattctttcaagt

SEQ ID NO: 1118612 - DNA, 15 bp, Homo sapiens
cataattctttcaag

SEQ ID NO: 1118613 - DNA, 15 bp, Homo sapiens
gcataattctttcaa

SEQ ID NO: 1118614 - DNA, 15 bp, Homo sapiens
agcataattctttca

SEQ ID NO: 1118615 - DNA, 15 bp, Homo sapiens
tagcataattctttc

SEQ ID NO: 1118616 - DNA, 15 bp, Homo sapiens
ttagcataattcttt

SEQ ID NO: 1118617 - DNA, 15 bp, Homo sapiens
cttagcataattctt

SEQ ID NO: 1118618 - DNA, 15 bp, Homo sapiens
acttagcataattct

SEQ ID NO: 1118619 - DNA, 15 bp, Homo sapiens
cacttagcataattc

SEQ ID NO: 1118620 - DNA, 15 bp, Homo sapiens
ccacttagcataatt

SEQ ID NO: 1118621 - DNA, 15 bp, Homo sapiens
tccacttagcataat

SEQ ID NO: 1118622 - DNA, 15 bp, Homo sapiens
ttccacttagcataa

SEQ ID NO: 1118623 - DNA, 15 bp, Homo sapiens
tttccacttagcata

SEQ ID NO: 1118624 - DNA, 15 bp, Homo sapiens
ttttccacttagcat

SEQ ID NO: 1118625 - DNA, 15 bp, Homo sapiens
tttttccacttagca

SEQ ID NO: 1118626 - DNA, 15 bp, Homo sapiens
ttttttccacttagc

SEQ ID NO: 1118627 - DNA, 15 bp, Homo sapiens
cttttttccacttag

SEQ ID NO: 1118628 - DNA, 15 bp, Homo sapiens
gcttttttccactta

SEQ ID NO: 1118629 - DNA, 15 bp, Homo sapiens
ggcttttttccactt

SEQ ID NO: 1118630 - DNA, 15 bp, Homo sapiens
tggcttttttccact

SEQ ID NO: 1118631 - DNA, 15 bp, Homo sapiens
ttggcttttttccac

SEQ ID NO: 1118632 - DNA, 15 bp, Homo sapiens
gttggcttttttcca

SEQ ID NO: 1118633 - DNA, 15 bp, Homo sapiens
ggttggcttttttcc

SEQ ID NO: 1118634 - DNA, 15 bp, Homo sapiens
gggttggcttttttc

SEQ ID NO: 1118635 - DNA, 15 bp, Homo sapiens
ggggttggctttttt

SEQ ID NO: 1118636 - DNA, 15 bp, Homo sapiens
tggggttggcttttt

SEQ ID NO: 1118637 - DNA, 15 bp, Homo sapiens
ttggggttggctttt

SEQ ID NO: 1118638 - DNA, 15 bp, Homo sapiens
tttggggttggcttt

SEQ ID NO: 1118639 - DNA, 15 bp, Homo sapiens
ttttggggttggctt

SEQ ID NO: 1118640 - DNA, 15 bp, Homo sapiens
cttttggggttggct

SEQ ID NO: 1118641 - DNA, 15 bp, Homo sapiens
ccttttggggttggc

SEQ ID NO: 1118642 - DNA, 15 bp, Homo sapiens
accttttggggttgg

SEQ ID NO: 1118643 - DNA, 15 bp, Homo sapiens
aaccttttggggttg

SEQ ID NO: 1118644 - DNA, 15 bp, Homo sapiens
gaaccttttggggtt

SEQ ID NO: 1118645 - DNA, 15 bp, Homo sapiens
agaaccttttggggt

SEQ ID NO: 1118646 - DNA, 15 bp, Homo sapiens
tagaaccttttgggg

SEQ ID NO: 1118647 - DNA, 15 bp, Homo sapiens
gtagaaccttttggg

SEQ ID NO: 1118648 - DNA, 15 bp, Homo sapiens
tgtagaaccttttgg

SEQ ID NO: 1118649 - DNA, 15 bp, Homo sapiens
gtgtagaaccttttg

SEQ ID NO: 1118650 - DNA, 15 bp, Homo sapiens
agtgtagaacctttt

SEQ ID NO: 1118651 - DNA, 15 bp, Homo sapiens
cagtgtagaaccttt

SEQ ID NO: 1118652 - DNA, 15 bp, Homo sapiens
acagtgtagaacctt

SEQ ID NO: 1118653 - DNA, 15 bp, Homo sapiens
cacagtgtagaacct

SEQ ID NO: 1118654 - DNA, 15 bp, Homo sapiens
tcacagtgtagaacc

SEQ ID NO: 1118655 - DNA, 15 bp, Homo sapiens
ctcacagtgtagaac

SEQ ID NO: 1118656 - DNA, 15 bp, Homo sapiens
tctcacagtgtagaa

SEQ ID NO: 1118657 - DNA, 15 bp, Homo sapiens
atctcacagtgtaga

SEQ ID NO: 1118658 - DNA, 15 bp, Homo sapiens
gatctcacagtgtag

SEQ ID NO: 1118659 - DNA, 15 bp, Homo sapiens
ggatctcacagtgta

SEQ ID NO: 1118660 - DNA, 15 bp, Homo sapiens
tggatctcacagtgt

SEQ ID NO: 1118661 - DNA, 15 bp, Homo sapiens
atggatctcacagtg

SEQ ID NO: 1118662 - DNA, 15 bp, Homo sapiens
aatggatctcacagt

SEQ ID NO: 1118663 - DNA, 15 bp, Homo sapiens
aaatggatctcacag

SEQ ID NO: 1118664 - DNA, 15 bp, Homo sapiens
taaatggatctcaca

SEQ ID NO: 1118665 - DNA, 15 bp, Homo sapiens
ataaatggatctcac

SEQ ID NO: 1118666 - DNA, 15 bp, Homo sapiens
tataaatggatctca

SEQ ID NO: 1118667 - DNA, 15 bp, Homo sapiens
atataaatggatctc

SEQ ID NO: 1118668 - DNA, 15 bp, Homo sapiens
catataaatggatct

SEQ ID NO: 1118669 - DNA, 15 bp, Homo sapiens
tcatataaatggatc

SEQ ID NO: 1118670 - DNA, 15 bp, Homo sapiens
gtcatataaatggat

SEQ ID NO: 1118671 - DNA, 15 bp, Homo sapiens
tgtcatataaatgga

SEQ ID NO: 1118672 - DNA, 15 bp, Homo sapiens
atgtcatataaatgg

SEQ ID NO: 1118673 - DNA, 15 bp, Homo sapiens
aatgtcatataaatg

SEQ ID NO: 1118674 - DNA, 15 bp, Homo sapiens
gaatgtcatataaat

SEQ ID NO: 1118675 - DNA, 15 bp, Homo sapiens
agaatgtcatataaa

SEQ ID NO: 1118676 - DNA, 15 bp, Homo sapiens
aagaatgtcatataa

SEQ ID NO: 1118677 - DNA, 15 bp, Homo sapiens
caagaatgtcatata

SEQ ID NO: 1118678 - DNA, 15 bp, Homo sapiens
tcaagaatgtcatat

SEQ ID NO: 1118679 - DNA, 15 bp, Homo sapiens
ttcaagaatgtcata

SEQ ID NO: 1118680 - DNA, 15 bp, Homo sapiens
tttcaagaatgtcat

SEQ ID NO: 1118681 - DNA, 15 bp, Homo sapiens
atttcaagaatgtca

SEQ ID NO: 1118682 - DNA, 15 bp, Homo sapiens
catttcaagaatgtc

SEQ ID NO: 1118683 - DNA, 15 bp, Homo sapiens
tcatttcaagaatgt

SEQ ID NO: 1118684 - DNA, 15 bp, Homo sapiens
gtcatttcaagaatg

SEQ ID NO: 1118685 - DNA, 15 bp, Homo sapiens
tgtcatttcaagaat

SEQ ID NO: 1118686 - DNA, 15 bp, Homo sapiens
ttgtcatttcaagaa

SEQ ID NO: 1118687 - DNA, 15 bp, Homo sapiens
tttgtcatttcaaga

SEQ ID NO: 1118688 - DNA, 15 bp, Homo sapiens
ttttgtcatttcaag

SEQ ID NO: 1118689 - DNA, 15 bp, Homo sapiens
attttgtcatttcaa

SEQ ID NO: 1118690 - DNA, 15 bp, Homo sapiens
aattttgtcatttca

SEQ ID NO: 1118691 - DNA, 15 bp, Homo sapiens
taattttgtcatttc

SEQ ID NO: 1118692 - DNA, 15 bp, Homo sapiens
gtaattttgtcattt

SEQ ID NO: 1118693 - DNA, 15 bp, Homo sapiens
tgtaattttgtcatt

SEQ ID NO: 1118694 - DNA, 15 bp, Homo sapiens
ctgtaattttgtcat

SEQ ID NO: 1118695 - DNA, 15 bp, Homo sapiens
gctgtaattttgtca

SEQ ID NO: 1118696 - DNA, 15 bp, Homo sapiens
tgctgtaattttgtc

SEQ ID NO: 1118697 - DNA, 15 bp, Homo sapiens
ttgctgtaattttgt

SEQ ID NO: 1118698 - DNA, 15 bp, Homo sapiens
tttgctgtaattttg

SEQ ID NO: 1118699 - DNA, 15 bp, Homo sapiens
ttttgctgtaatttt

SEQ ID NO: 1118700 - DNA, 15 bp, Homo sapiens
cttttgctgtaattt

SEQ ID NO: 1118701 - DNA, 15 bp, Homo sapiens
tcttttgctgtaatt

SEQ ID NO: 1118702 - DNA, 15 bp, Homo sapiens
ttcttttgctgtaat

SEQ ID NO: 1118703 - DNA, 15 bp, Homo sapiens
tttcttttgctgtaa

SEQ ID NO: 1118704 - DNA, 15 bp, Homo sapiens
ttttcttttgctgta

SEQ ID NO: 1118705 - DNA, 15 bp, Homo sapiens
gttttcttttgctgt

SEQ ID NO: 1118706 - DNA, 15 bp, Homo sapiens
tgttttcttttgctg

SEQ ID NO: 1118707 - DNA, 15 bp, Homo sapiens
ctgttttcttttgct

SEQ ID NO: 1118708 - DNA, 15 bp, Homo sapiens
tctgttttcttttgc

SEQ ID NO: 1118709 - DNA, 15 bp, Homo sapiens
gtctgttttcttttg

SEQ ID NO: 1118710 - DNA, 15 bp, Homo sapiens
agtctgttttctttt

SEQ ID NO: 1118711 - DNA, 15 bp, Homo sapiens
cagtctgttttcttt

SEQ ID NO: 1118712 - DNA, 15 bp, Homo sapiens
ccagtctgttttctt

SEQ ID NO: 1118713 - DNA, 15 bp, Homo sapiens
accagtctgttttct

SEQ ID NO: 1118714 - DNA, 15 bp, Homo sapiens
aaccagtctgttttc

SEQ ID NO: 1118715 - DNA, 15 bp, Homo sapiens
caaccagtctgtttt

SEQ ID NO: 1118716 - DNA, 15 bp, Homo sapiens
acaaccagtctgttt

SEQ ID NO: 1118717 - DNA, 15 bp, Homo sapiens
tacaaccagtctgtt

SEQ ID NO: 1118718 - DNA, 15 bp, Homo sapiens
ctacaaccagtctgt

SEQ ID NO: 1118719 - DNA, 15 bp, Homo sapiens
gctacaaccagtctg

SEQ ID NO: 1118720 - DNA, 15 bp, Homo sapiens
agctacaaccagtct

SEQ ID NO: 1118721 - DNA, 15 bp, Homo sapiens
cagctacaaccagtc

SEQ ID NO: 1118722 - DNA, 15 bp, Homo sapiens
ccagctacaaccagt

SEQ ID NO: 1118723 - DNA, 15 bp, Homo sapiens
cccagctacaaccag

SEQ ID NO: 1118724 - DNA, 15 bp, Homo sapiens
ccccagctacaacca

SEQ ID NO: 1118725 - DNA, 15 bp, Homo sapiens
gccccagctacaacc

SEQ ID NO: 1118726 - DNA, 15 bp, Homo sapiens
agccccagctacaac

SEQ ID NO: 1118727 - DNA, 15 bp, Homo sapiens
tagccccagctacaa

SEQ ID NO: 1118728 - DNA, 15 bp, Homo sapiens
ttagccccagctaca

SEQ ID NO: 1118729 - DNA, 15 bp, Homo sapiens
cttagccccagctac

SEQ ID NO: 1118730 - DNA, 15 bp, Homo sapiens
ccttagccccagcta

SEQ ID NO: 1118731 - DNA, 15 bp, Homo sapiens
tccttagccccagct

SEQ ID NO: 1118732 - DNA, 15 bp, Homo sapiens
ctccttagccccagc

SEQ ID NO: 1118733 - DNA, 15 bp, Homo sapiens
cctccttagccccag

SEQ ID NO: 1118734 - DNA, 15 bp, Homo sapiens
tcctccttagcccca

SEQ ID NO: 1118735 - DNA, 15 bp, Homo sapiens
atcctccttagcccc

SEQ ID NO: 1118736 - DNA, 15 bp, Homo sapiens
tatcctccttagccc

SEQ ID NO: 1118737 - DNA, 15 bp, Homo sapiens
atatcctccttagcc

SEQ ID NO: 1118738 - DNA, 15 bp, Homo sapiens
catatcctccttagc

SEQ ID NO: 1118739 - DNA, 15 bp, Homo sapiens
ccatatcctccttag

SEQ ID NO: 1118740 - DNA, 15 bp, Homo sapiens
cccatatcctcctta

SEQ ID NO: 1118741 - DNA, 15 bp, Homo sapiens
ccccatatcctcctt

SEQ ID NO: 1118742 - DNA, 15 bp, Homo sapiens
tccccatatcctcct

SEQ ID NO: 1118743 - DNA, 15 bp, Homo sapiens
atccccatatcctcc

SEQ ID NO: 1118744 - DNA, 15 bp, Homo sapiens
aatccccatatcctc

SEQ ID NO: 1118745 - DNA, 15 bp, Homo sapiens
caatccccatatcct

SEQ ID NO: 1118746 - DNA, 15 bp, Homo sapiens
ccaatccccatatcc

SEQ ID NO: 1118747 - DNA, 15 bp, Homo sapiens
tccaatccccatatc

SEQ ID NO: 1118748 - DNA, 15 bp, Homo sapiens
atccaatccccatat

SEQ ID NO: 1118749 - DNA, 15 bp, Homo sapiens
tatccaatccccata

SEQ ID NO: 1118750 - DNA, 15 bp, Homo sapiens
ctatccaatccccat

SEQ ID NO: 1118751 - DNA, 15 bp, Homo sapiens
tctatccaatcccca

SEQ ID NO: 1118752 - DNA, 15 bp, Homo sapiens
ttctatccaatcccc

SEQ ID NO: 1118753 - DNA, 15 bp, Homo sapiens
cttctatccaatccc

SEQ ID NO: 1118754 - DNA, 15 bp, Homo sapiens
gcttctatccaatcc

SEQ ID NO: 1118755 - DNA, 15 bp, Homo sapiens
tgcttctatccaatc

SEQ ID NO: 1118756 - DNA, 15 bp, Homo sapiens
atgcttctatccaat

SEQ ID NO: 1118757 - DNA, 15 bp, Homo sapiens
catgcttctatccaa

SEQ ID NO: 1118758 - DNA, 15 bp, Homo sapiens
acatgcttctatcca

SEQ ID NO: 1118759 - DNA, 15 bp, Homo sapiens
cacatgcttctatcc

SEQ ID NO: 1118760 - DNA, 15 bp, Homo sapiens
ccacatgcttctatc

SEQ ID NO: 1118761 - DNA, 15 bp, Homo sapiens
tccacatgcttctat

SEQ ID NO: 1118762 - DNA, 15 bp, Homo sapiens
ctccacatgcttcta

SEQ ID NO: 1118763 - DNA, 15 bp, Homo sapiens
tctccacatgcttct

SEQ ID NO: 1118764 - DNA, 15 bp, Homo sapiens
atctccacatgcttc

SEQ ID NO: 1118765 - DNA, 15 bp, Homo sapiens
tatctccacatgctt

SEQ ID NO: 1118766 - DNA, 15 bp, Homo sapiens
atatctccacatgct

SEQ ID NO: 1118767 - DNA, 15 bp, Homo sapiens
tatatctccacatgc

SEQ ID NO: 1118768 - DNA, 15 bp, Homo sapiens
ttatatctccacatg

SEQ ID NO: 1118769 - DNA, 15 bp, Homo sapiens
tttatatctccacat

SEQ ID NO: 1118770 - DNA, 15 bp, Homo sapiens
ttttatatctccaca

SEQ ID NO: 1118771 - DNA, 15 bp, Homo sapiens
cttttatatctccac

SEQ ID NO: 1118772 - DNA, 15 bp, Homo sapiens
ccttttatatctcca

SEQ ID NO: 1118773 - DNA, 15 bp, Homo sapiens
tccttttatatctcc

SEQ ID NO: 1118774 - DNA, 15 bp, Homo sapiens
gtccttttatatctc

SEQ ID NO: 1118775 - DNA, 15 bp, Homo sapiens
tgtccttttatatct

SEQ ID NO: 1118776 - DNA, 15 bp, Homo sapiens
ttgtccttttatatc

SEQ ID NO: 1118777 - DNA, 15 bp, Homo sapiens
attgtccttttatat

SEQ ID NO: 1118778 - DNA, 15 bp, Homo sapiens
tattgtccttttata

SEQ ID NO: 1118779 - DNA, 15 bp, Homo sapiens
atattgtccttttat

SEQ ID NO: 1118780 - DNA, 15 bp, Homo sapiens
tgtgcagtcccagac

SEQ ID NO: 1118781 - DNA, 15 bp, Homo sapiens
ctgtgcagtcccaga

SEQ ID NO: 1118782 - DNA, 15 bp, Homo sapiens
gctgtgcagtcccag

SEQ ID NO: 1118783 - DNA, 15 bp, Homo sapiens
agctgtgcagtccca

SEQ ID NO: 1118784 - DNA, 15 bp, Homo sapiens
cagctgtgcagtccc

SEQ ID NO: 1118785 - DNA, 15 bp, Homo sapiens
ccagctgtgcagtcc

SEQ ID NO: 1118786 - DNA, 15 bp, Homo sapiens
gccagctgtgcagtc

SEQ ID NO: 1118787 - DNA, 15 bp, Homo sapiens
tgccagctgtgcagt

SEQ ID NO: 1118788 - DNA, 15 bp, Homo sapiens
ctgccagctgtgcag

SEQ ID NO: 1118789 - DNA, 15 bp, Homo sapiens
tctgccagctgtgca

SEQ ID NO: 1118790 - DNA, 15 bp, Homo sapiens
ctctgccagctgtgc

SEQ ID NO: 1118791 - DNA, 15 bp, Homo sapiens
actctgccagctgtg

SEQ ID NO: 1118792 - DNA, 15 bp, Homo sapiens
tactctgccagctgt

SEQ ID NO: 1118793 - DNA, 15 bp, Homo sapiens
ctactctgccagctg

SEQ ID NO: 1118794 - DNA, 15 bp, Homo sapiens
cctactctgccagct

SEQ ID NO: 1118795 - DNA, 15 bp, Homo sapiens
tcctactctgccagc

SEQ ID NO: 1118796 - DNA, 15 bp, Homo sapiens
atcctactctgccag

SEQ ID NO: 1118797 - DNA, 15 bp, Homo sapiens
aatcctactctgcca

SEQ ID NO: 1118798 - DNA, 15 bp, Homo sapiens
gaatcctactctgcc

SEQ ID NO: 1118799 - DNA, 15 bp, Homo sapiens
tgaatcctactctgc

SEQ ID NO: 1118800 - DNA, 15 bp, Homo sapiens
ttgaatcctactctg

SEQ ID NO: 1118801 - DNA, 15 bp, Homo sapiens
cttgaatcctactct

SEQ ID NO: 1118802 - DNA, 15 bp, Homo sapiens
acttgaatcctactc

SEQ ID NO: 1118803 - DNA, 15 bp, Homo sapiens
gacttgaatcctact

SEQ ID NO: 1118804 - DNA, 15 bp, Homo sapiens
agacttgaatcctac

SEQ ID NO: 1118805 - DNA, 15 bp, Homo sapiens
tagacttgaatccta

SEQ ID NO: 1118806 - DNA, 15 bp, Homo sapiens
ttagacttgaatcct

SEQ ID NO: 1118807 - DNA, 15 bp, Homo sapiens
cttagacttgaatcc

SEQ ID NO: 1118808 - DNA, 15 bp, Homo sapiens
ccttagacttgaatc

SEQ ID NO: 1118809 - DNA, 15 bp, Homo sapiens
cccttagacttgaat

SEQ ID NO: 1118810 - DNA, 15 bp, Homo sapiens
ccccttagacttgaa

SEQ ID NO: 1118811 - DNA, 15 bp, Homo sapiens
gccccttagacttga

SEQ ID NO: 1118812 - DNA, 15 bp, Homo sapiens
agccccttagacttg

SEQ ID NO: 1118813 - DNA, 15 bp, Homo sapiens
gagccccttagactt

SEQ ID NO: 1118814 - DNA, 15 bp, Homo sapiens
agagccccttagact

SEQ ID NO: 1118815 - DNA, 15 bp, Homo sapiens
cagagccccttagac

SEQ ID NO: 1118816 - DNA, 15 bp, Homo sapiens
tcagagccccttaga

SEQ ID NO: 1118817 - DNA, 15 bp, Homo sapiens
gtcagagccccttag

SEQ ID NO: 1118818 - DNA, 15 bp, Homo sapiens
agtcagagcccctta

SEQ ID NO: 1118819 - DNA, 15 bp, Homo sapiens
gagtcagagcccctt

SEQ ID NO: 1118820 - DNA, 15 bp, Homo sapiens
ggagtcagagcccct

SEQ ID NO: 1118821 - DNA, 15 bp, Homo sapiens
tggagtcagagcccc

SEQ ID NO: 1118822 - DNA, 15 bp, Homo sapiens
ttggagtcagagccc

SEQ ID NO: 1118823 - DNA, 15 bp, Homo sapiens
tttggagtcagagcc

SEQ ID NO: 1118824 - DNA, 15 bp, Homo sapiens
gtttggagtcagagc

SEQ ID NO: 1118825 - DNA, 15 bp, Homo sapiens
ggtttggagtcagag

SEQ ID NO: 1118826 - DNA, 15 bp, Homo sapiens
gggtttggagtcaga

SEQ ID NO: 1118827 - DNA, 15 bp, Homo sapiens
ggggtttggagtcag

SEQ ID NO: 1118828 - DNA, 15 bp, Homo sapiens
tggggtttggagtca

SEQ ID NO: 1118829 - DNA, 15 bp, Homo sapiens
gtggggtttggagtc

SEQ ID NO: 1118830 - DNA, 15 bp, Homo sapiens
agtggggtttggagt

SEQ ID NO: 1118831 - DNA, 15 bp, Homo sapiens
gagtggggtttggag

SEQ ID NO: 1118832 - DNA, 15 bp, Homo sapiens
tgagtggggtttgga

SEQ ID NO: 1118833 - DNA, 15 bp, Homo sapiens
gtgagtggggtttgg

SEQ ID NO: 1118834 - DNA, 15 bp, Homo sapiens
agtgagtggggtttg

SEQ ID NO: 1118835 - DNA, 15 bp, Homo sapiens
gagtgagtggggttt

SEQ ID NO: 1118836 - DNA, 15 bp, Homo sapiens
agagtgagtggggtt

SEQ ID NO: 1118837 - DNA, 15 bp, Homo sapiens
gagagtgagtggggt

SEQ ID NO: 1118838 - DNA, 15 bp, Homo sapiens
ggagagtgagtgggg

SEQ ID NO: 1118839 - DNA, 15 bp, Homo sapiens
tggagagtgagtggg

SEQ ID NO: 1118840 - DNA, 15 bp, Homo sapiens
ttggagagtgagtgg

SEQ ID NO: 1118841 - DNA, 15 bp, Homo sapiens
attggagagtgagtg

SEQ ID NO: 1118842 - DNA, 15 bp, Homo sapiens
tattggagagtgagt

SEQ ID NO: 1118843 - DNA, 15 bp, Homo sapiens
atattggagagtgag

SEQ ID NO: 1118844 - DNA, 15 bp, Homo sapiens
catattggagagtga

SEQ ID NO: 1118845 - DNA, 15 bp, Homo sapiens
gcatattggagagtg

SEQ ID NO: 1118846 - DNA, 15 bp, Homo sapiens
ggcatattggagagt

SEQ ID NO: 1118847 - DNA, 15 bp, Homo sapiens
aggcatattggagag

SEQ ID NO: 1118848 - DNA, 15 bp, Homo sapiens
taggcatattggaga

SEQ ID NO: 1118849 - DNA, 15 bp, Homo sapiens
ataggcatattggag

SEQ ID NO: 1118850 - DNA, 15 bp, Homo sapiens
aataggcatattgga

SEQ ID NO: 1118851 - DNA, 15 bp, Homo sapiens
caataggcatattgg

SEQ ID NO: 1118852 - DNA, 15 bp, Homo sapiens
acaataggcatattg

SEQ ID NO: 1118853 - DNA, 15 bp, Homo sapiens
aacaataggcatatt

SEQ ID NO: 1118854 - DNA, 15 bp, Homo sapiens
gaacaataggcatat

SEQ ID NO: 1118855 - DNA, 15 bp, Homo sapiens
agaacaataggcata

SEQ ID NO: 1118856 - DNA, 15 bp, Homo sapiens
gagaacaataggcat

SEQ ID NO: 1118857 - DNA, 15 bp, Homo sapiens
ggagaacaataggca

SEQ ID NO: 1118858 - DNA, 15 bp, Homo sapiens
tggagaacaataggc

SEQ ID NO: 1118859 - DNA, 15 bp, Homo sapiens
atggagaacaatagg

SEQ ID NO: 1118860 - DNA, 15 bp, Homo sapiens
catggagaacaatag

SEQ ID NO: 1118861 - DNA, 15 bp, Homo sapiens
acatggagaacaata

SEQ ID NO: 1118862 - DNA, 15 bp, Homo sapiens
gacatggagaacaat

SEQ ID NO: 1118863 - DNA, 15 bp, Homo sapiens
ggacatggagaacaa

SEQ ID NO: 1118864 - DNA, 15 bp, Homo sapiens
aggacatggagaaca

SEQ ID NO: 1118865 - DNA, 15 bp, Homo sapiens
gaggacatggagaac

SEQ ID NO: 1118866 - DNA, 15 bp, Homo sapiens
ggaggacatggagaa

SEQ ID NO: 1118867 - DNA, 15 bp, Homo sapiens
gggaggacatggaga

SEQ ID NO: 1118868 - DNA, 15 bp, Homo sapiens
tgggaggacatggag

SEQ ID NO: 1118869 - DNA, 15 bp, Homo sapiens
ttgggaggacatgga

SEQ ID NO: 1118870 - DNA, 15 bp, Homo sapiens
cttgggaggacatgg

SEQ ID NO: 1118871 - DNA, 15 bp, Homo sapiens
gcttgggaggacatg

SEQ ID NO: 1118872 - DNA, 15 bp, Homo sapiens
agcttgggaggacat

SEQ ID NO: 1118873 - DNA, 15 bp, Homo sapiens
aagcttgggaggaca

SEQ ID NO: 1118874 - DNA, 15 bp, Homo sapiens
caagcttgggaggac

SEQ ID NO: 1118875 - DNA, 15 bp, Homo sapiens
ccaagcttgggagga

SEQ ID NO: 1118876 - DNA, 15 bp, Homo sapiens
cccaagcttgggagg

SEQ ID NO: 1118877 - DNA, 15 bp, Homo sapiens
gcccaagcttgggag

SEQ ID NO: 1118878 - DNA, 15 bp, Homo sapiens
tgcccaagcttggga

SEQ ID NO: 1118879 - DNA, 15 bp, Homo sapiens
gtgcccaagcttggg

SEQ ID NO: 1118880 - DNA, 15 bp, Homo sapiens
agtgcccaagcttgg

SEQ ID NO: 1118881 - DNA, 15 bp, Homo sapiens
aagtgcccaagcttg

SEQ ID NO: 1118882 - DNA, 15 bp, Homo sapiens
gaagtgcccaagctt

SEQ ID NO: 1118883 - DNA, 15 bp, Homo sapiens
ggaagtgcccaagct

SEQ ID NO: 1118884 - DNA, 15 bp, Homo sapiens
gggaagtgcccaagc

SEQ ID NO: 1118885 - DNA, 15 bp, Homo sapiens
agggaagtgcccaag

SEQ ID NO: 1118886 - DNA, 15 bp, Homo sapiens
cagggaagtgcccaa

SEQ ID NO: 1118887 - DNA, 15 bp, Homo sapiens
tcagggaagtgccca

SEQ ID NO: 1118888 - DNA, 15 bp, Homo sapiens
ttcagggaagtgccc

SEQ ID NO: 1118889 - DNA, 15 bp, Homo sapiens
tttcagggaagtgcc

SEQ ID NO: 1118890 - DNA, 15 bp, Homo sapiens
ttttcagggaagtgc

SEQ ID NO: 1118891 - DNA, 15 bp, Homo sapiens
cttttcagggaagtg

SEQ ID NO: 1118892 - DNA, 15 bp, Homo sapiens
ccttttcagggaagt

SEQ ID NO: 1118893 - DNA, 15 bp, Homo sapiens
gccttttcagggaag

SEQ ID NO: 1118894 - DNA, 15 bp, Homo sapiens
tgccttttcagggaa

SEQ ID NO: 1118895 - DNA, 15 bp, Homo sapiens
gtgccttttcaggga

SEQ ID NO: 1118896 - DNA, 15 bp, Homo sapiens
tgtgccttttcaggg

SEQ ID NO: 1118897 - DNA, 15 bp, Homo sapiens
ttgtgccttttcagg

SEQ ID NO: 1118898 - DNA, 15 bp, Homo sapiens
gttgtgccttttcag

SEQ ID NO: 1118899 - DNA, 15 bp, Homo sapiens
tgttgtgccttttca

SEQ ID NO: 1118900 - DNA, 15 bp, Homo sapiens
ctgttgtgccttttc

SEQ ID NO: 1118901 - DNA, 15 bp, Homo sapiens
tctgttgtgcctttt

SEQ ID NO: 1118902 - DNA, 15 bp, Homo sapiens
gtctgttgtgccttt

SEQ ID NO: 1118903 - DNA, 15 bp, Homo sapiens
tgtctgttgtgcctt

SEQ ID NO: 1118904 - DNA, 15 bp, Homo sapiens
ttgtctgttgtgcct

SEQ ID NO: 1118905 - DNA, 15 bp, Homo sapiens
tttgtctgttgtgcc

SEQ ID NO: 1118906 - DNA, 15 bp, Homo sapiens
ctttgtctgttgtgc

SEQ ID NO: 1118907 - DNA, 15 bp, Homo sapiens
tctttgtctgttgtg

SEQ ID NO: 1118908 - DNA, 15 bp, Homo sapiens
ctctttgtctgttgt

SEQ ID NO: 1118909 - DNA, 15 bp, Homo sapiens
gctctttgtctgttg

SEQ ID NO: 1118910 - DNA, 15 bp, Homo sapiens
tgctctttgtctgtt

SEQ ID NO: 1118911 - DNA, 15 bp, Homo sapiens
atgctctttgtctgt

SEQ ID NO: 1118912 - DNA, 15 bp, Homo sapiens
aatgctctttgtctg

SEQ ID NO: 1118913 - DNA, 15 bp, Homo sapiens
taatgctctttgtct

SEQ ID NO: 1118914 - DNA, 15 bp, Homo sapiens
ttaatgctctttgtc

SEQ ID NO: 1118915 - DNA, 15 bp, Homo sapiens
gttaatgctctttgt

SEQ ID NO: 1118916 - DNA, 15 bp, Homo sapiens
tgttaatgctctttg

SEQ ID NO: 1118917 - DNA, 15 bp, Homo sapiens
ttgttaatgctcttt

SEQ ID NO: 1118918 - DNA, 15 bp, Homo sapiens
cttgttaatgctctt

SEQ ID NO: 1118919 - DNA, 15 bp, Homo sapiens
gcttgttaatgctct

SEQ ID NO: 1118920 - DNA, 15 bp, Homo sapiens
tgcttgttaatgctc

SEQ ID NO: 1118921 - DNA, 15 bp, Homo sapiens
gtgcttgttaatgct

SEQ ID NO: 1118922 - DNA, 15 bp, Homo sapiens
tgtgcttgttaatgc

SEQ ID NO: 1118923 - DNA, 15 bp, Homo sapiens
gtgtgcttgttaatg

SEQ ID NO: 1118924 - DNA, 15 bp, Homo sapiens
tgtgtgcttgttaat

SEQ ID NO: 1118925 - DNA, 15 bp, Homo sapiens
ttgtgtgcttgttaa

SEQ ID NO: 1118926 - DNA, 15 bp, Homo sapiens
cttgtgtgcttgtta

SEQ ID NO: 1118927 - DNA, 15 bp, Homo sapiens
tcttgtgtgcttgtt

SEQ ID NO: 1118928 - DNA, 15 bp, Homo sapiens
ttcttgtgtgcttgt

SEQ ID NO: 1118929 - DNA, 15 bp, Homo sapiens
cttcttgtgtgcttg

SEQ ID NO: 1118930 - DNA, 15 bp, Homo sapiens
ccttcttgtgtgctt

SEQ ID NO: 1118931 - DNA, 15 bp, Homo sapiens
tccttcttgtgtgct

SEQ ID NO: 1118932 - DNA, 15 bp, Homo sapiens
atccttcttgtgtgc

SEQ ID NO: 1118933 - DNA, 15 bp, Homo sapiens
aatccttcttgtgtg

SEQ ID NO: 1118934 - DNA, 15 bp, Homo sapiens
aaatccttcttgtgt

SEQ ID NO: 1118935 - DNA, 15 bp, Homo sapiens
gaaatccttcttgtg

SEQ ID NO: 1118936 - DNA, 15 bp, Homo sapiens
agaaatccttcttgt

SEQ ID NO: 1118937 - DNA, 15 bp, Homo sapiens
cagaaatccttcttg

SEQ ID NO: 1118938 - DNA, 15 bp, Homo sapiens
gcagaaatccttctt

SEQ ID NO: 1118939 - DNA, 15 bp, Homo sapiens
tgcagaaatccttct

SEQ ID NO: 1118940 - DNA, 15 bp, Homo sapiens
ttgcagaaatccttc

SEQ ID NO: 1118941 - DNA, 15 bp, Homo sapiens
attgcagaaatcctt

SEQ ID NO: 1118942 - DNA, 15 bp, Homo sapiens
gattgcagaaatcct

SEQ ID NO: 1118943 - DNA, 15 bp, Homo sapiens
tgattgcagaaatcc

SEQ ID NO: 1118944 - DNA, 15 bp, Homo sapiens
gtgattgcagaaatc

SEQ ID NO: 1118945 - DNA, 15 bp, Homo sapiens
tgtgattgcagaaat

SEQ ID NO: 1118946 - DNA, 15 bp, Homo sapiens
ttgtgattgcagaaa

SEQ ID NO: 1118947 - DNA, 15 bp, Homo sapiens
gttgtgattgcagaa

SEQ ID NO: 1118948 - DNA, 15 bp, Homo sapiens
agttgtgattgcaga

SEQ ID NO: 1118949 - DNA, 15 bp, Homo sapiens
cagttgtgattgcag

SEQ ID NO: 1118950 - DNA, 15 bp, Homo sapiens
acagttgtgattgca

SEQ ID NO: 1118951 - DNA, 15 bp, Homo sapiens
cacagttgtgattgc

SEQ ID NO: 1118952 - DNA, 15 bp, Homo sapiens
acacagttgtgattg

SEQ ID NO: 1118953 - DNA, 15 bp, Homo sapiens
aacacagttgtgatt

SEQ ID NO: 1118954 - DNA, 15 bp, Homo sapiens
gaacacagttgtgat

SEQ ID NO: 1118955 - DNA, 15 bp, Homo sapiens
agaacacagttgtga

SEQ ID NO: 1118956 - DNA, 15 bp, Homo sapiens
gagaacacagttgtg

SEQ ID NO: 1118957 - DNA, 15 bp, Homo sapiens
ggagaacacagttgt

SEQ ID NO: 1118958 - DNA, 15 bp, Homo sapiens
tggagaacacagttg

SEQ ID NO: 1118959 - DNA, 15 bp, Homo sapiens
atggagaacacagtt

SEQ ID NO: 1118960 - DNA, 15 bp, Homo sapiens
aatggagaacacagt

SEQ ID NO: 1118961 - DNA, 15 bp, Homo sapiens
aaatggagaacacag

SEQ ID NO: 1118962 - DNA, 15 bp, Homo sapiens
gaaatggagaacaca

SEQ ID NO: 1118963 - DNA, 15 bp, Homo sapiens
tgaaatggagaacac

SEQ ID NO: 1118964 - DNA, 15 bp, Homo sapiens
atgaaatggagaaca

SEQ ID NO: 1118965 - DNA, 15 bp, Homo sapiens
gatgaaatggagaac

SEQ ID NO: 1118966 - DNA, 15 bp, Homo sapiens
agatgaaatggagaa

SEQ ID NO: 1118967 - DNA, 15 bp, Homo sapiens
aagatgaaatggaga

SEQ ID NO: 1118968 - DNA, 15 bp, Homo sapiens
taagatgaaatggag

SEQ ID NO: 1118969 - DNA, 15 bp, Homo sapiens
ataagatgaaatgga

SEQ ID NO: 1118970 - DNA, 15 bp, Homo sapiens
gataagatgaaatgg

SEQ ID NO: 1118971 - DNA, 15 bp, Homo sapiens
agataagatgaaatg

SEQ ID NO: 1118972 - DNA, 15 bp, Homo sapiens
aagataagatgaaat

SEQ ID NO: 1118973 - DNA, 15 bp, Homo sapiens
aaagataagatgaaa

SEQ ID NO: 1118974 - DNA, 15 bp, Homo sapiens
gaaagataagatgaa

SEQ ID NO: 1118975 - DNA, 15 bp, Homo sapiens
tgaaagataagatga

SEQ ID NO: 1118976 - DNA, 15 bp, Homo sapiens
ctgaaagataagatg

SEQ ID NO: 1118977 - DNA, 15 bp, Homo sapiens
tctgaaagataagat

SEQ ID NO: 1118978 - DNA, 15 bp, Homo sapiens
atctgaaagataaga

SEQ ID NO: 1118979 - DNA, 15 bp, Homo sapiens
tatctgaaagataag

SEQ ID NO: 1118980 - DNA, 15 bp, Homo sapiens
ttatctgaaagataa

SEQ ID NO: 1118981 - DNA, 15 bp, Homo sapiens
gttatctgaaagata

SEQ ID NO: 1118982 - DNA, 15 bp, Homo sapiens
ggttatctgaaagat

SEQ ID NO: 1118983 - DNA, 15 bp, Homo sapiens
aggttatctgaaaga

SEQ ID NO: 1118984 - DNA, 15 bp, Homo sapiens
gaggttatctgaaag

SEQ ID NO: 1118985 - DNA, 15 bp, Homo sapiens
agaggttatctgaaa

SEQ ID NO: 1118986 - DNA, 15 bp, Homo sapiens
aagaggttatctgaa

SEQ ID NO: 1118987 - DNA, 15 bp, Homo sapiens
aaagaggttatctga

SEQ ID NO: 1118988 - DNA, 15 bp, Homo sapiens
gaaagaggttatctg

SEQ ID NO: 1118989 - DNA, 15 bp, Homo sapiens
tgaaagaggttatct

SEQ ID NO: 1118990 - DNA, 15 bp, Homo sapiens
ctgaaagaggttatc

SEQ ID NO: 1118991 - DNA, 15 bp, Homo sapiens
tctgaaagaggttat

SEQ ID NO: 1118992 - DNA, 15 bp, Homo sapiens
ctctgaaagaggtta

SEQ ID NO: 1118993 - DNA, 15 bp, Homo sapiens
tctctgaaagaggtt

SEQ ID NO: 1118994 - DNA, 15 bp, Homo sapiens
ctctctgaaagaggt

SEQ ID NO: 1118995 - DNA, 15 bp, Homo sapiens
tctctctgaaagagg

SEQ ID NO: 1118996 - DNA, 15 bp, Homo sapiens
ctctctctgaaagag

SEQ ID NO: 1118997 - DNA, 15 bp, Homo sapiens
cctctctctgaaaga

SEQ ID NO: 1118998 - DNA, 15 bp, Homo sapiens
acctctctctgaaag

SEQ ID NO: 1118999 - DNA, 15 bp, Homo sapiens
cacctctctctgaaa

SEQ ID NO: 1119000 - DNA, 15 bp, Homo sapiens
tcacctctctctgaa

SEQ ID NO: 1119001 - DNA, 15 bp, Homo sapiens
atcacctctctctga

SEQ ID NO: 1119002 - DNA, 15 bp, Homo sapiens
gatcacctctctctg

SEQ ID NO: 1119003 - DNA, 15 bp, Homo sapiens
agatcacctctctct

SEQ ID NO: 1119004 - DNA, 15 bp, Homo sapiens
cagatcacctctctc

SEQ ID NO: 1119005 - DNA, 15 bp, Homo sapiens
tcagatcacctctct

SEQ ID NO: 1119006 - DNA, 15 bp, Homo sapiens
gtcagatcacctctc

SEQ ID NO: 1119007 - DNA, 15 bp, Homo sapiens
ggtcagatcacctct

SEQ ID NO: 1119008 - DNA, 15 bp, Homo sapiens
gggtcagatcacctc

SEQ ID NO: 1119009 - DNA, 15 bp, Homo sapiens
tgggtcagatcacct

SEQ ID NO: 1119010 - DNA, 15 bp, Homo sapiens
atgggtcagatcacc

SEQ ID NO: 1119011 - DNA, 15 bp, Homo sapiens
aatgggtcagatcac

SEQ ID NO: 1119012 - DNA, 15 bp, Homo sapiens
gaatgggtcagatca

SEQ ID NO: 1119013 - DNA, 15 bp, Homo sapiens
ggaatgggtcagatc

SEQ ID NO: 1119014 - DNA, 15 bp, Homo sapiens
tggaatgggtcagat

SEQ ID NO: 1119015 - DNA, 15 bp, Homo sapiens
ttggaatgggtcaga

SEQ ID NO: 1119016 - DNA, 15 bp, Homo sapiens
cttggaatgggtcag

SEQ ID NO: 1119017 - DNA, 15 bp, Homo sapiens
tcttggaatgggtca

SEQ ID NO: 1119018 - DNA, 15 bp, Homo sapiens
ctcttggaatgggtc

SEQ ID NO: 1119019 - DNA, 15 bp, Homo sapiens
actcttggaatgggt

SEQ ID NO: 1119020 - DNA, 15 bp, Homo sapiens
aactcttggaatggg

SEQ ID NO: 1119021 - DNA, 15 bp, Homo sapiens
taactcttggaatgg

SEQ ID NO: 1119022 - DNA, 15 bp, Homo sapiens
ataactcttggaatg

SEQ ID NO: 1119023 - DNA, 15 bp, Homo sapiens
gataactcttggaat

SEQ ID NO: 1119024 - DNA, 15 bp, Homo sapiens
ggataactcttggaa

SEQ ID NO: 1119025 - DNA, 15 bp, Homo sapiens
gggataactcttgga

SEQ ID NO: 1119026 - DNA, 15 bp, Homo sapiens
tgggataactcttgg

SEQ ID NO: 1119027 - DNA, 15 bp, Homo sapiens
ctgggataactcttg

SEQ ID NO: 1119028 - DNA, 15 bp, Homo sapiens
actgggataactctt

SEQ ID NO: 1119029 - DNA, 15 bp, Homo sapiens
gactgggataactct

SEQ ID NO: 1119030 - DNA, 15 bp, Homo sapiens
tgactgggataactc

SEQ ID NO: 1119031 - DNA, 15 bp, Homo sapiens
gtgactgggataact

SEQ ID NO: 1119032 - DNA, 15 bp, Homo sapiens
agtgactgggataac

SEQ ID NO: 1119033 - DNA, 15 bp, Homo sapiens
cagtgactgggataa

SEQ ID NO: 1119034 - DNA, 15 bp, Homo sapiens
acagtgactgggata

SEQ ID NO: 1119035 - DNA, 15 bp, Homo sapiens
gacagtgactgggat

SEQ ID NO: 1119036 - DNA, 15 bp, Homo sapiens
agacagtgactggga

SEQ ID NO: 1119037 - DNA, 15 bp, Homo sapiens
gagacagtgactggg

SEQ ID NO: 1119038 - DNA, 15 bp, Homo sapiens
cgagacagtgactgg

SEQ ID NO: 1119039 - DNA, 15 bp, Homo sapiens
ccgagacagtgactg

SEQ ID NO: 1119040 - DNA, 15 bp, Homo sapiens
accgagacagtgact

SEQ ID NO: 1119041 - DNA, 15 bp, Homo sapiens
aaccgagacagtgac

SEQ ID NO: 1119042 - DNA, 15 bp, Homo sapiens
gaaccgagacagtga

SEQ ID NO: 1119043 - DNA, 15 bp, Homo sapiens
ggaaccgagacagtg

SEQ ID NO: 1119044 - DNA, 15 bp, Homo sapiens
gggaaccgagacagt

SEQ ID NO: 1119045 - DNA, 15 bp, Homo sapiens
ggggaaccgagacag

SEQ ID NO: 1119046 - DNA, 15 bp, Homo sapiens
tggggaaccgagaca

SEQ ID NO: 1119047 - DNA, 15 bp, Homo sapiens
ctggggaaccgagac

SEQ ID NO: 1119048 - DNA, 15 bp, Homo sapiens
cctggggaaccgaga

SEQ ID NO: 1119049 - DNA, 15 bp, Homo sapiens
tcctggggaaccgag

SEQ ID NO: 1119050 - DNA, 15 bp, Homo sapiens
ttcctggggaaccga

SEQ ID NO: 1119051 - DNA, 15 bp, Homo sapiens
attcctggggaaccg

SEQ ID NO: 1119052 - DNA, 15 bp, Homo sapiens
aattcctggggaacc

SEQ ID NO: 1119053 - DNA, 15 bp, Homo sapiens
caattcctggggaac

SEQ ID NO: 1119054 - DNA, 15 bp, Homo sapiens
tcaattcctggggaa

SEQ ID NO: 1119055 - DNA, 15 bp, Homo sapiens
ctcaattcctgggga

SEQ ID NO: 1119056 - DNA, 15 bp, Homo sapiens
cctcaattcctgggg

SEQ ID NO: 1119057 - DNA, 15 bp, Homo sapiens
gcctcaattcctggg

SEQ ID NO: 1119058 - DNA, 15 bp, Homo sapiens
ggcctcaattcctgg

SEQ ID NO: 1119059 - DNA, 15 bp, Homo sapiens
aggcctcaattcctg

SEQ ID NO: 1119060 - DNA, 15 bp, Homo sapiens
caggcctcaattcct

SEQ ID NO: 1119061 - DNA, 15 bp, Homo sapiens
ccaggcctcaattcc

SEQ ID NO: 1119062 - DNA, 15 bp, Homo sapiens
tccaggcctcaattc

SEQ ID NO: 1119063 - DNA, 15 bp, Homo sapiens
gtccaggcctcaatt

SEQ ID NO: 1119064 - DNA, 15 bp, Homo sapiens
tgtccaggcctcaat

SEQ ID NO: 1119065 - DNA, 15 bp, Homo sapiens
ttgtccaggcctcaa

SEQ ID NO: 1119066 - DNA, 15 bp, Homo sapiens
gttgtccaggcctca

SEQ ID NO: 1119067 - DNA, 15 bp, Homo sapiens
tgttgtccaggcctc

SEQ ID NO: 1119068 - DNA, 15 bp, Homo sapiens
atgttgtccaggcct

SEQ ID NO: 1119069 - DNA, 15 bp, Homo sapiens
tatgttgtccaggcc

SEQ ID NO: 1119070 - DNA, 15 bp, Homo sapiens
atatgttgtccaggc

SEQ ID NO: 1119071 - DNA, 15 bp, Homo sapiens
tatatgttgtccagg

SEQ ID NO: 1119072 - DNA, 15 bp, Homo sapiens
ctatatgttgtccag

SEQ ID NO: 1119073 - DNA, 15 bp, Homo sapiens
cctatatgttgtcca

SEQ ID NO: 1119074 - DNA, 15 bp, Homo sapiens
tcctatatgttgtcc

SEQ ID NO: 1119075 - DNA, 15 bp, Homo sapiens
ttcctatatgttgtc

SEQ ID NO: 1119076 - DNA, 15 bp, Homo sapiens
attcctatatgttgt

SEQ ID NO: 1119077 - DNA, 15 bp, Homo sapiens
tattcctatatgttg

SEQ ID NO: 1119078 - DNA, 15 bp, Homo sapiens
ctattcctatatgtt

SEQ ID NO: 1119079 - DNA, 15 bp, Homo sapiens
cctattcctatatgt

SEQ ID NO: 1119080 - DNA, 15 bp, Homo sapiens
tcctattcctatatg

SEQ ID NO: 1119081 - DNA, 15 bp, Homo sapiens
ttcctattcctatat

SEQ ID NO: 1119082 - DNA, 15 bp, Homo sapiens
attcctattcctata

SEQ ID NO: 1119083 - DNA, 15 bp, Homo sapiens
aattcctattcctat

SEQ ID NO: 1119084 - DNA, 15 bp, Homo sapiens
aaattcctattccta

SEQ ID NO: 1119085 - DNA, 15 bp, Homo sapiens
gaaattcctattcct

SEQ ID NO: 1119086 - DNA, 15 bp, Homo sapiens
cgaaattcctattcc

SEQ ID NO: 1119087 - DNA, 15 bp, Homo sapiens
ccgaaattcctattc

SEQ ID NO: 1119088 - DNA, 15 bp, Homo sapiens
cccgaaattcctatt

SEQ ID NO: 1119089 - DNA, 15 bp, Homo sapiens
acccgaaattcctat

SEQ ID NO: 1119090 - DNA, 15 bp, Homo sapiens
gacccgaaattccta

SEQ ID NO: 1119091 - DNA, 15 bp, Homo sapiens
tgacccgaaattcct

SEQ ID NO: 1119092 - DNA, 15 bp, Homo sapiens
gtgacccgaaattcc

SEQ ID NO: 1119093 - DNA, 15 bp, Homo sapiens
tgtgacccgaaattc

SEQ ID NO: 1119094 - DNA, 15 bp, Homo sapiens
atgtgacccgaaatt

SEQ ID NO: 1119095 - DNA, 15 bp, Homo sapiens
gatgtgacccgaaat

SEQ ID NO: 1119096 - DNA, 15 bp, Homo sapiens
tgatgtgacccgaaa

SEQ ID NO: 1119097 - DNA, 15 bp, Homo sapiens
ctgatgtgacccgaa

SEQ ID NO: 1119098 - DNA, 15 bp, Homo sapiens
gctgatgtgacccga

SEQ ID NO: 1119099 - DNA, 15 bp, Homo sapiens
agctgatgtgacccg

SEQ ID NO: 1119100 - DNA, 15 bp, Homo sapiens
tagctgatgtgaccc

SEQ ID NO: 1119101 - DNA, 15 bp, Homo sapiens
ttagctgatgtgacc

SEQ ID NO: 1119102 - DNA, 15 bp, Homo sapiens
tttagctgatgtgac

SEQ ID NO: 1119103 - DNA, 15 bp, Homo sapiens
ttttagctgatgtga

SEQ ID NO: 1119104 - DNA, 15 bp, Homo sapiens
tttttagctgatgtg

SEQ ID NO: 1119105 - DNA, 15 bp, Homo sapiens
gtttttagctgatgt

SEQ ID NO: 1119106 - DNA, 15 bp, Homo sapiens
tgtttttagctgatg

SEQ ID NO: 1119107 - DNA, 15 bp, Homo sapiens
gtgtttttagctgat

SEQ ID NO: 1119108 - DNA, 15 bp, Homo sapiens
agtgtttttagctga

SEQ ID NO: 1119109 - DNA, 15 bp, Homo sapiens
gagtgtttttagctg

SEQ ID NO: 1119110 - DNA, 15 bp, Homo sapiens
ggagtgtttttagct

SEQ ID NO: 1119111 - DNA, 15 bp, Homo sapiens
gggagtgtttttagc

SEQ ID NO: 1119112 - DNA, 15 bp, Homo sapiens
tgggagtgtttttag

SEQ ID NO: 1119113 - DNA, 15 bp, Homo sapiens
ttgggagtgttttta

SEQ ID NO: 1119114 - DNA, 15 bp, Homo sapiens
cttgggagtgttttt

SEQ ID NO: 1119115 - DNA, 15 bp, Homo sapiens
ccttgggagtgtttt

SEQ ID NO: 1119116 - DNA, 15 bp, Homo sapiens
tccttgggagtgttt

SEQ ID NO: 1119117 - DNA, 15 bp, Homo sapiens
gtccttgggagtgtt

SEQ ID NO: 1119118 - DNA, 15 bp, Homo sapiens
agtccttgggagtgt

SEQ ID NO: 1119119 - DNA, 15 bp, Homo sapiens
cagtccttgggagtg

SEQ ID NO: 1119120 - DNA, 15 bp, Homo sapiens
tcagtccttgggagt

SEQ ID NO: 1119121 - DNA, 15 bp, Homo sapiens
ctcagtccttgggag

SEQ ID NO: 1119122 - DNA, 15 bp, Homo sapiens
tctcagtccttggga

SEQ ID NO: 1119123 - DNA, 15 bp, Homo sapiens
ttctcagtccttggg

SEQ ID NO: 1119124 - DNA, 15 bp, Homo sapiens
tttctcagtccttgg

SEQ ID NO: 1119125 - DNA, 15 bp, Homo sapiens
atttctcagtccttg

SEQ ID NO: 1119126 - DNA, 15 bp, Homo sapiens
aatttctcagtcctt

SEQ ID NO: 1119127 - DNA, 15 bp, Homo sapiens
taatttctcagtcct

SEQ ID NO: 1119128 - DNA, 15 bp, Homo sapiens
ataatttctcagtcc

SEQ ID NO: 1119129 - DNA, 15 bp, Homo sapiens
aataatttctcagtc

SEQ ID NO: 1119130 - DNA, 15 bp, Homo sapiens
taataatttctcagt

SEQ ID NO: 1119131 - DNA, 15 bp, Homo sapiens
ataataatttctcag

SEQ ID NO: 1119132 - DNA, 15 bp, Homo sapiens
aataataatttctca

SEQ ID NO: 1119133 - DNA, 15 bp, Homo sapiens
taataataatttctc

SEQ ID NO: 1119134 - DNA, 15 bp, Homo sapiens
ctaataataatttct

SEQ ID NO: 1119135 - DNA, 15 bp, Homo sapiens
tctaataataatttc

SEQ ID NO: 1119136 - DNA, 15 bp, Homo sapiens
ctctaataataattt

SEQ ID NO: 1119137 - DNA, 15 bp, Homo sapiens
gctctaataataatt

SEQ ID NO: 1119138 - DNA, 15 bp, Homo sapiens
tgctctaataataat

SEQ ID NO: 1119139 - DNA, 15 bp, Homo sapiens
ctgctctaataataa

SEQ ID NO: 1119140 - DNA, 15 bp, Homo sapiens
gctgctctaataata

SEQ ID NO: 1119141 - DNA, 15 bp, Homo sapiens
ggctgctctaataat

SEQ ID NO: 1119142 - DNA, 15 bp, Homo sapiens
tggctgctctaataa

SEQ ID NO: 1119143 - DNA, 15 bp, Homo sapiens
gtggctgctctaata

SEQ ID NO: 1119144 - DNA, 15 bp, Homo sapiens
tgtggctgctctaat

SEQ ID NO: 1119145 - DNA, 15 bp, Homo sapiens
atgtggctgctctaa

SEQ ID NO: 1119146 - DNA, 15 bp, Homo sapiens
aatgtggctgctcta

SEQ ID NO: 1119147 - DNA, 15 bp, Homo sapiens
taatgtggctgctct

SEQ ID NO: 1119148 - DNA, 15 bp, Homo sapiens
ctaatgtggctgctc

SEQ ID NO: 1119149 - DNA, 15 bp, Homo sapiens
tctaatgtggctgct

SEQ ID NO: 1119150 - DNA, 15 bp, Homo sapiens
atctaatgtggctgc

SEQ ID NO: 1119151 - DNA, 15 bp, Homo sapiens
tatctaatgtggctg

SEQ ID NO: 1119152 - DNA, 15 bp, Homo sapiens
ctatctaatgtggct

SEQ ID NO: 1119153 - DNA, 15 bp, Homo sapiens
gctatctaatgtggc

SEQ ID NO: 1119154 - DNA, 15 bp, Homo sapiens
tgctatctaatgtgg

SEQ ID NO: 1119155 - DNA, 15 bp, Homo sapiens
gtgctatctaatgtg

SEQ ID NO: 1119156 - DNA, 15 bp, Homo sapiens
cgtgctatctaatgt

SEQ ID NO: 1119157 - DNA, 15 bp, Homo sapiens
acgtgctatctaatg

SEQ ID NO: 1119158 - DNA, 15 bp, Homo sapiens
aacgtgctatctaat

SEQ ID NO: 1119159 - DNA, 15 bp, Homo sapiens
taacgtgctatctaa

SEQ ID NO: 1119160 - DNA, 15 bp, Homo sapiens
ataacgtgctatcta

SEQ ID NO: 1119161 - DNA, 15 bp, Homo sapiens
cataacgtgctatct

SEQ ID NO: 1119162 - DNA, 15 bp, Homo sapiens
ccataacgtgctatc

SEQ ID NO: 1119163 - DNA, 15 bp, Homo sapiens
tccataacgtgctat

SEQ ID NO: 1119164 - DNA, 15 bp, Homo sapiens
ttccataacgtgcta

SEQ ID NO: 1119165 - DNA, 15 bp, Homo sapiens
attccataacgtgct

SEQ ID NO: 1119166 - DNA, 15 bp, Homo sapiens
gattccataacgtgc

SEQ ID NO: 1119167 - DNA, 15 bp, Homo sapiens
tgattccataacgtg

SEQ ID NO: 1119168 - DNA, 15 bp, Homo sapiens
ctgattccataacgt

SEQ ID NO: 1119169 - DNA, 15 bp, Homo sapiens
cctgattccataacg

SEQ ID NO: 1119170 - DNA, 15 bp, Homo sapiens
gcctgattccataac

SEQ ID NO: 1119171 - DNA, 15 bp, Homo sapiens
tgcctgattccataa

SEQ ID NO: 1119172 - DNA, 15 bp, Homo sapiens
atgcctgattccata

SEQ ID NO: 1119173 - DNA, 15 bp, Homo sapiens
tatgcctgattccat

SEQ ID NO: 1119174 - DNA, 15 bp, Homo sapiens
gtatgcctgattcca

SEQ ID NO: 1119175 - DNA, 15 bp, Homo sapiens
agtatgcctgattcc

SEQ ID NO: 1119176 - DNA, 15 bp, Homo sapiens
tagtatgcctgattc

SEQ ID NO: 1119177 - DNA, 15 bp, Homo sapiens
ttagtatgcctgatt

SEQ ID NO: 1119178 - DNA, 15 bp, Homo sapiens
tttagtatgcctgat

SEQ ID NO: 1119179 - DNA, 15 bp, Homo sapiens
ttttagtatgcctga

SEQ ID NO: 1119180 - DNA, 15 bp, Homo sapiens
gttttagtatgcctg

SEQ ID NO: 1119181 - DNA, 15 bp, Homo sapiens
agttttagtatgcct

SEQ ID NO: 1119182 - DNA, 15 bp, Homo sapiens
cagttttagtatgcc

SEQ ID NO: 1119183 - DNA, 15 bp, Homo sapiens
acagttttagtatgc

SEQ ID NO: 1119184 - DNA, 15 bp, Homo sapiens
cacagttttagtatg

SEQ ID NO: 1119185 - DNA, 15 bp, Homo sapiens
gcacagttttagtat

SEQ ID NO: 1119186 - DNA, 15 bp, Homo sapiens
agcacagttttagta

SEQ ID NO: 1119187 - DNA, 15 bp, Homo sapiens
tagcacagttttagt

SEQ ID NO: 1119188 - DNA, 15 bp, Homo sapiens
ttatagcacagtttt

SEQ ID NO: 1119189 - DNA, 15 bp, Homo sapiens
tttatagcacagttt

SEQ ID NO: 1119190 - DNA, 15 bp, Homo sapiens
atttatagcacagtt

SEQ ID NO: 1119191 - DNA, 15 bp, Homo sapiens
catttatagcacagt

SEQ ID NO: 1119192 - DNA, 15 bp, Homo sapiens
tcatttatagcacag

SEQ ID NO: 1119193 - DNA, 15 bp, Homo sapiens
ctcatttatagcaca

SEQ ID NO: 1119194 - DNA, 15 bp, Homo sapiens
tctcatttatagcac

SEQ ID NO: 1119195 - DNA, 15 bp, Homo sapiens
ttctcatttatagca

SEQ ID NO: 1119196 - DNA, 15 bp, Homo sapiens
attctcatttatagc

SEQ ID NO: 1119197 - DNA, 15 bp, Homo sapiens
tattctcatttatag

SEQ ID NO: 1119198 - DNA, 15 bp, Homo sapiens
ctattctcatttata

SEQ ID NO: 1119199 - DNA, 15 bp, Homo sapiens
tctattctcatttat

SEQ ID NO: 1119200 - DNA, 15 bp, Homo sapiens
ttctattctcattta

SEQ ID NO: 1119201 - DNA, 15 bp, Homo sapiens
attctattctcattt

SEQ ID NO: 1119202 - DNA, 15 bp, Homo sapiens
aattctattctcatt

SEQ ID NO: 1119203 - DNA, 15 bp, Homo sapiens
aaattctattctcat

SEQ ID NO: 1119204 - DNA, 15 bp, Homo sapiens
taaattctattctca

SEQ ID NO: 1119205 - DNA, 15 bp, Homo sapiens
ttaaattctattctc

SEQ ID NO: 1119206 - DNA, 15 bp, Homo sapiens
gttaaattctattct

SEQ ID NO: 1119207 - DNA, 15 bp, Homo sapiens
agttaaattctattc

SEQ ID NO: 1119208 - DNA, 15 bp, Homo sapiens
cagttaaattctatt

SEQ ID NO: 1119209 - DNA, 15 bp, Homo sapiens
tcagttaaattctat

SEQ ID NO: 1119210 - DNA, 15 bp, Homo sapiens
ttcagttaaattcta

SEQ ID NO: 1119211 - DNA, 15 bp, Homo sapiens
tttcagttaaattct

SEQ ID NO: 1119212 - DNA, 15 bp, Homo sapiens
ttttcagttaaattc

SEQ ID NO: 1119213 - DNA, 15 bp, Homo sapiens
tttttcagttaaatt

SEQ ID NO: 1119214 - DNA, 15 bp, Homo sapiens
gtttttcagttaaat

SEQ ID NO: 1119215 - DNA, 15 bp, Homo sapiens
agtttttcagttaaa

SEQ ID NO: 1119216 - DNA, 15 bp, Homo sapiens
cagtttttcagttaa

SEQ ID NO: 1119217 - DNA, 15 bp, Homo sapiens
gcagtttttcagtta

SEQ ID NO: 1119218 - DNA, 15 bp, Homo sapiens
tgcagtttttcagtt

SEQ ID NO: 1119219 - DNA, 15 bp, Homo sapiens
atgcagtttttcagt

SEQ ID NO: 1119220 - DNA, 15 bp, Homo sapiens
tatgcagtttttcag

SEQ ID NO: 1119221 - DNA, 15 bp, Homo sapiens
gtatgcagtttttca

SEQ ID NO: 1119222 - DNA, 15 bp, Homo sapiens
tgtatgcagtttttc

SEQ ID NO: 1119223 - DNA, 15 bp, Homo sapiens
gtgtatgcagttttt

SEQ ID NO: 1119224 - DNA, 15 bp, Homo sapiens
ggtgtatgcagtttt

SEQ ID NO: 1119225 - DNA, 15 bp, Homo sapiens
gggtgtatgcagttt

SEQ ID NO: 1119226 - DNA, 15 bp, Homo sapiens
agggtgtatgcagtt

SEQ ID NO: 1119227 - DNA, 15 bp, Homo sapiens
gagggtgtatgcagt

SEQ ID NO: 1119228 - DNA, 15 bp, Homo sapiens
tgagggtgtatgcag

SEQ ID NO: 1119229 - DNA, 15 bp, Homo sapiens
gtgagggtgtatgca

SEQ ID NO: 1119230 - DNA, 15 bp, Homo sapiens
tgtgagggtgtatgc

SEQ ID NO: 1119231 - DNA, 15 bp, Homo sapiens
gtgtgagggtgtatg

SEQ ID NO: 1119232 - DNA, 15 bp, Homo sapiens
tgtgtgagggtgtat

SEQ ID NO: 1119233 - DNA, 15 bp, Homo sapiens
atgtgtgagggtgta

SEQ ID NO: 1119234 - DNA, 15 bp, Homo sapiens
gatgtgtgagggtgt

SEQ ID NO: 1119235 - DNA, 15 bp, Homo sapiens
cgatgtgtgagggtg

SEQ ID NO: 1119236 - DNA, 15 bp, Homo sapiens
acgatgtgtgagggt

SEQ ID NO: 1119237 - DNA, 15 bp, Homo sapiens
aacgatgtgtgaggg

SEQ ID NO: 1119238 - DNA, 15 bp, Homo sapiens
caacgatgtgtgagg

SEQ ID NO: 1119239 - DNA, 15 bp, Homo sapiens
tcaacgatgtgtgag

SEQ ID NO: 1119240 - DNA, 15 bp, Homo sapiens
ctcaacgatgtgtga

SEQ ID NO: 1119241 - DNA, 15 bp, Homo sapiens
gctcaacgatgtgtg

SEQ ID NO: 1119242 - DNA, 15 bp, Homo sapiens
tgctcaacgatgtgt

SEQ ID NO: 1119243 - DNA, 15 bp, Homo sapiens
ttgctcaacgatgtg

SEQ ID NO: 1119244 - DNA, 15 bp, Homo sapiens
attgctcaacgatgt

SEQ ID NO: 1119245 - DNA, 15 bp, Homo sapiens
tattgctcaacgatg

SEQ ID NO: 1119246 - DNA, 15 bp, Homo sapiens
ctattgctcaacgat

SEQ ID NO: 1119247 - DNA, 15 bp, Homo sapiens
cctattgctcaacga

SEQ ID NO: 1119248 - DNA, 15 bp, Homo sapiens
acctattgctcaacg

SEQ ID NO: 1119249 - DNA, 15 bp, Homo sapiens
tacctattgctcaac

SEQ ID NO: 1119250 - DNA, 15 bp, Homo sapiens
gtacctattgctcaa

SEQ ID NO: 1119251 - DNA, 15 bp, Homo sapiens
ggtacctattgctca

SEQ ID NO: 1119252 - DNA, 15 bp, Homo sapiens
tggtacctattgctc

SEQ ID NO: 1119253 - DNA, 15 bp, Homo sapiens
ttggtacctattgct

SEQ ID NO: 1119254 - DNA, 15 bp, Homo sapiens
gttggtacctattgc

SEQ ID NO: 1119255 - DNA, 15 bp, Homo sapiens
agttggtacctattg

SEQ ID NO: 1119256 - DNA, 15 bp, Homo sapiens
aagttggtacctatt

SEQ ID NO: 1119257 - DNA, 15 bp, Homo sapiens
gaagttggtacctat

SEQ ID NO: 1119258 - DNA, 15 bp, Homo sapiens
ggaagttggtaccta

SEQ ID NO: 1119259 - DNA, 15 bp, Homo sapiens
aggaagttggtacct

SEQ ID NO: 1119260 - DNA, 15 bp, Homo sapiens
taggaagttggtacc

SEQ ID NO: 1119261 - DNA, 15 bp, Homo sapiens
ataggaagttggtac

SEQ ID NO: 1119262 - DNA, 15 bp, Homo sapiens
aataggaagttggta

SEQ ID NO: 1119263 - DNA, 15 bp, Homo sapiens
caataggaagttggt

SEQ ID NO: 1119264 - DNA, 15 bp, Homo sapiens
gcaataggaagttgg

SEQ ID NO: 1119265 - DNA, 15 bp, Homo sapiens
agcaataggaagttg

SEQ ID NO: 1119266 - DNA, 15 bp, Homo sapiens
gagcaataggaagtt

SEQ ID NO: 1119267 - DNA, 15 bp, Homo sapiens
tgagcaataggaagt

SEQ ID NO: 1119268 - DNA, 15 bp, Homo sapiens
ttgagcaataggaag

SEQ ID NO: 1119269 - DNA, 15 bp, Homo sapiens
attgagcaataggaa

SEQ ID NO: 1119270 - DNA, 15 bp, Homo sapiens
tattgagcaatagga

SEQ ID NO: 1119271 - DNA, 15 bp, Homo sapiens
ctattgagcaatagg

SEQ ID NO: 1119272 - DNA, 15 bp, Homo sapiens
gctattgagcaatag

SEQ ID NO: 1119273 - DNA, 15 bp, Homo sapiens
tgctattgagcaata

SEQ ID NO: 1119274 - DNA, 15 bp, Homo sapiens
ttgctattgagcaat

SEQ ID NO: 1119275 - DNA, 15 bp, Homo sapiens
tttgctattgagcaa

SEQ ID NO: 1119276 - DNA, 15 bp, Homo sapiens
ttttgctattgagca

SEQ ID NO: 1119277 - DNA, 15 bp, Homo sapiens
attttgctattgagc

SEQ ID NO: 1119278 - DNA, 15 bp, Homo sapiens
tattttgctattgag

SEQ ID NO: 1119279 - DNA, 15 bp, Homo sapiens
atattttgctattga

SEQ ID NO: 1119280 - DNA, 15 bp, Homo sapiens
aatattttgctattg

SEQ ID NO: 1119281 - DNA, 15 bp, Homo sapiens
gaatattttgctatt

SEQ ID NO: 1119282 - DNA, 15 bp, Homo sapiens
agaatattttgctat

SEQ ID NO: 1119283 - DNA, 15 bp, Homo sapiens
gagaatattttgcta

SEQ ID NO: 1119284 - DNA, 15 bp, Homo sapiens
tgagaatattttgct

SEQ ID NO: 1119285 - DNA, 15 bp, Homo sapiens
gtgagaatattttgc

SEQ ID NO: 1119286 - DNA, 15 bp, Homo sapiens
tgtgagaatattttg

SEQ ID NO: 1119287 - DNA, 15 bp, Homo sapiens
ctgtgagaatatttt

SEQ ID NO: 1119288 - DNA, 15 bp, Homo sapiens
actgtgagaatattt

SEQ ID NO: 1119289 - DNA, 15 bp, Homo sapiens
cactgtgagaatatt

SEQ ID NO: 1119290 - DNA, 15 bp, Homo sapiens
acactgtgagaatat

SEQ ID NO: 1119291 - DNA, 15 bp, Homo sapiens
gacactgtgagaata

SEQ ID NO: 1119292 - DNA, 15 bp, Homo sapiens
agacactgtgagaat

SEQ ID NO: 1119293 - DNA, 15 bp, Homo sapiens
tagacactgtgagaa

SEQ ID NO: 1119294 - DNA, 15 bp, Homo sapiens
gtagacactgtgaga

SEQ ID NO: 1119295 - DNA, 15 bp, Homo sapiens
tgtagacactgtgag

SEQ ID NO: 1119296 - DNA, 15 bp, Homo sapiens
atgtagacactgtga

SEQ ID NO: 1119297 - DNA, 15 bp, Homo sapiens
aatgtagacactgtg

SEQ ID NO: 1119298 - DNA, 15 bp, Homo sapiens
taatgtagacactgt

SEQ ID NO: 1119299 - DNA, 15 bp, Homo sapiens
ataatgtagacactg

SEQ ID NO: 1119300 - DNA, 15 bp, Homo sapiens
aataatgtagacact

SEQ ID NO: 1119301 - DNA, 15 bp, Homo sapiens
gaataatgtagacac

SEQ ID NO: 1119302 - DNA, 15 bp, Homo sapiens
tgaataatgtagaca

SEQ ID NO: 1119303 - DNA, 15 bp, Homo sapiens
ttgaataatgtagac

SEQ ID NO: 1119304 - DNA, 15 bp, Homo sapiens
tttgaataatgtaga

SEQ ID NO: 1119305 - DNA, 15 bp, Homo sapiens
gtttgaataatgtag

SEQ ID NO: 1119306 - DNA, 15 bp, Homo sapiens
tgtttgaataatgta

SEQ ID NO: 1119307 - DNA, 15 bp, Homo sapiens
atgtttgaataatgt

SEQ ID NO: 1119308 - DNA, 15 bp, Homo sapiens
aatgtttgaataatg

SEQ ID NO: 1119309 - DNA, 15 bp, Homo sapiens
aaatgtttgaataat

SEQ ID NO: 1119310 - DNA, 15 bp, Homo sapiens
gaaatgtttgaataa

SEQ ID NO: 1119311 - DNA, 15 bp, Homo sapiens
ggaaatgtttgaata

SEQ ID NO: 1119312 - DNA, 15 bp, Homo sapiens
gggaaatgtttgaat

SEQ ID NO: 1119313 - DNA, 15 bp, Homo sapiens
tgggaaatgtttgaa

SEQ ID NO: 1119314 - DNA, 15 bp, Homo sapiens
ctgggaaatgtttga

SEQ ID NO: 1119315 - DNA, 15 bp, Homo sapiens
tctgggaaatgtttg

SEQ ID NO: 1119316 - DNA, 15 bp, Homo sapiens
atctgggaaatgttt

SEQ ID NO: 1119317 - DNA, 15 bp, Homo sapiens
tatctgggaaatgtt

SEQ ID NO: 1119318 - DNA, 15 bp, Homo sapiens
ttatctgggaaatgt

SEQ ID NO: 1119319 - DNA, 15 bp, Homo sapiens
tttatctgggaaatg

SEQ ID NO: 1119320 - DNA, 15 bp, Homo sapiens
ttttatctgggaaat

SEQ ID NO: 1119321 - DNA, 15 bp, Homo sapiens
attttatctgggaaa

SEQ ID NO: 1119322 - DNA, 15 bp, Homo sapiens
tattttatctgggaa

SEQ ID NO: 1119323 - DNA, 15 bp, Homo sapiens
taatccattttgagt

SEQ ID NO: 1119324 - DNA, 15 bp, Homo sapiens
ttaatccattttgag

SEQ ID NO: 1119325 - DNA, 15 bp, Homo sapiens
ctttaatccattttg

SEQ ID NO: 1119326 - DNA, 15 bp, Homo sapiens
actttaatccatttt

SEQ ID NO: 1119327 - DNA, 15 bp, Homo sapiens
aactttaatccattt

SEQ ID NO: 1119328 - DNA, 15 bp, Homo sapiens
aaactttaatccatt

SEQ ID NO: 1119329 - DNA, 15 bp, Homo sapiens
aaaactttaatccat

SEQ ID NO: 1119330 - DNA, 15 bp, Homo sapiens
taaaactttaatcca

SEQ ID NO: 1119331 - DNA, 15 bp, Homo sapiens
ttaaaactttaatcc

SEQ ID NO: 1119332 - DNA, 15 bp, Homo sapiens
tttaaaactttaatc

SEQ ID NO: 1119333 - DNA, 15 bp, Homo sapiens
atttaaaactttaat

SEQ ID NO: 1119334 - DNA, 15 bp, Homo sapiens
catttaaaactttaa

SEQ ID NO: 1119335 - DNA, 15 bp, Homo sapiens
acatttaaaacttta

SEQ ID NO: 1119336 - DNA, 15 bp, Homo sapiens
tacatttaaaacttt

SEQ ID NO: 1119337 - DNA, 15 bp, Homo sapiens
ctacatttaaaactt

SEQ ID NO: 1119338 - DNA, 15 bp, Homo sapiens
cctacatttaaaact

SEQ ID NO: 1119339 - DNA, 15 bp, Homo sapiens
tcctacatttaaaac

SEQ ID NO: 1119340 - DNA, 15 bp, Homo sapiens
atcctacatttaaaa

SEQ ID NO: 1119341 - DNA, 15 bp, Homo sapiens
tatcctacatttaaa

SEQ ID NO: 1119342 - DNA, 15 bp, Homo sapiens
atatcctacatttaa

SEQ ID NO: 1119343 - DNA, 15 bp, Homo sapiens
tatatcctacattta

SEQ ID NO: 1119344 - DNA, 15 bp, Homo sapiens
ttatatcctacattt

SEQ ID NO: 1119345 - DNA, 15 bp, Homo sapiens
tttatatcctacatt

SEQ ID NO: 1119346 - DNA, 15 bp, Homo sapiens
ttttatatcctacat

SEQ ID NO: 1119347 - DNA, 15 bp, Homo sapiens
gttttatatcctaca

SEQ ID NO: 1119348 - DNA, 15 bp, Homo sapiens
agttttatatcctac

SEQ ID NO: 1119349 - DNA, 15 bp, Homo sapiens
cagttttatatccta

SEQ ID NO: 1119350 - DNA, 15 bp, Homo sapiens
tcagttttatatcct

SEQ ID NO: 1119351 - DNA, 15 bp, Homo sapiens
ttcagttttatatcc

SEQ ID NO: 1119352 - DNA, 15 bp, Homo sapiens
tttcagttttatatc

SEQ ID NO: 1119353 - DNA, 15 bp, Homo sapiens
ttttcagttttatat

SEQ ID NO: 1119354 - DNA, 15 bp, Homo sapiens
tttttcagttttata

SEQ ID NO: 1119355 - DNA, 15 bp, Homo sapiens
gtttttcagttttat

SEQ ID NO: 1119356 - DNA, 15 bp, Homo sapiens
agtttttcagtttta

SEQ ID NO: 1119357 - DNA, 15 bp, Homo sapiens
tagtttttcagtttt

SEQ ID NO: 1119358 - DNA, 15 bp, Homo sapiens
gtagtttttcagttt

SEQ ID NO: 1119359 - DNA, 15 bp, Homo sapiens
agtagtttttcagtt

SEQ ID NO: 1119360 - DNA, 15 bp, Homo sapiens
tagtagtttttcagt

SEQ ID NO: 1119361 - DNA, 15 bp, Homo sapiens
ctagtagtttttcag

SEQ ID NO: 1119362 - DNA, 15 bp, Homo sapiens
tctagtagtttttca

SEQ ID NO: 1119363 - DNA, 15 bp, Homo sapiens
ttctagtagtttttc

SEQ ID NO: 1119364 - DNA, 15 bp, Homo sapiens
cttctagtagttttt

SEQ ID NO: 1119365 - DNA, 15 bp, Homo sapiens
tcttctagtagtttt

SEQ ID NO: 1119366 - DNA, 15 bp, Homo sapiens
ttcttctagtagttt

SEQ ID NO: 1119367 - DNA, 15 bp, Homo sapiens
tttcttctagtagtt

SEQ ID NO: 1119368 - DNA, 15 bp, Homo sapiens
ctttcttctagtagt

SEQ ID NO: 1119369 - DNA, 15 bp, Homo sapiens
gctttcttctagtag

SEQ ID NO: 1119370 - DNA, 15 bp, Homo sapiens
tgctttcttctagta

SEQ ID NO: 1119371 - DNA, 15 bp, Homo sapiens
atgctttcttctagt

SEQ ID NO: 1119372 - DNA, 15 bp, Homo sapiens
tatgctttcttctag

SEQ ID NO: 1119373 - DNA, 15 bp, Homo sapiens
ctatgctttcttcta

SEQ ID NO: 1119374 - DNA, 15 bp, Homo sapiens
cctatgctttcttct

SEQ ID NO: 1119375 - DNA, 15 bp, Homo sapiens
ccctatgctttcttc

SEQ ID NO: 1119376 - DNA, 15 bp, Homo sapiens
tccctatgctttctt

SEQ ID NO: 1119377 - DNA, 15 bp, Homo sapiens
ttccctatgctttct

SEQ ID NO: 1119378 - DNA, 15 bp, Homo sapiens
cttccctatgctttc

SEQ ID NO: 1119379 - DNA, 15 bp, Homo sapiens
tcttccctatgcttt

SEQ ID NO: 1119380 - DNA, 15 bp, Homo sapiens
ttcttccctatgctt

SEQ ID NO: 1119381 - DNA, 15 bp, Homo sapiens
cttcttccctatgct

SEQ ID NO: 1119382 - DNA, 15 bp, Homo sapiens
gcttcttccctatgc

SEQ ID NO: 1119383 - DNA, 15 bp, Homo sapiens
agcttcttccctatg

SEQ ID NO: 1119384 - DNA, 15 bp, Homo sapiens
gagcttcttccctat

SEQ ID NO: 1119385 - DNA, 15 bp, Homo sapiens
agagcttcttcccta

SEQ ID NO: 1119386 - DNA, 15 bp, Homo sapiens
tagagcttcttccct

SEQ ID NO: 1119387 - DNA, 15 bp, Homo sapiens
atagagcttcttccc

SEQ ID NO: 1119388 - DNA, 15 bp, Homo sapiens
catagagcttcttcc

SEQ ID NO: 1119389 - DNA, 15 bp, Homo sapiens
tcatagagcttcttc

SEQ ID NO: 1119390 - DNA, 15 bp, Homo sapiens
gtcatagagcttctt

SEQ ID NO: 1119391 - DNA, 15 bp, Homo sapiens
tgtcatagagcttct

SEQ ID NO: 1119392 - DNA, 15 bp, Homo sapiens
atgtcatagagcttc

SEQ ID NO: 1119393 - DNA, 15 bp, Homo sapiens
aatgtcatagagctt

SEQ ID NO: 1119394 - DNA, 15 bp, Homo sapiens
caatgtcatagagct

SEQ ID NO: 1119395 - DNA, 15 bp, Homo sapiens
ccaatgtcatagagc

SEQ ID NO: 1119396 - DNA, 15 bp, Homo sapiens
accaatgtcatagag

SEQ ID NO: 1119397 - DNA, 15 bp, Homo sapiens
gaccaatgtcataga

SEQ ID NO: 1119398 - DNA, 15 bp, Homo sapiens
agaccaatgtcatag

SEQ ID NO: 1119399 - DNA, 15 bp, Homo sapiens
tagaccaatgtcata

SEQ ID NO: 1119400 - DNA, 15 bp, Homo sapiens
ctagaccaatgtcat

SEQ ID NO: 1119401 - DNA, 15 bp, Homo sapiens
cctagaccaatgtca

SEQ ID NO: 1119402 - DNA, 15 bp, Homo sapiens
attgcctagaccaat

SEQ ID NO: 1119403 - DNA, 15 bp, Homo sapiens
cattgcctagaccaa

SEQ ID NO: 1119404 - DNA, 15 bp, Homo sapiens
tcattgcctagacca

SEQ ID NO: 1119405 - DNA, 15 bp, Homo sapiens
atcattgcctagacc

SEQ ID NO: 1119406 - DNA, 15 bp, Homo sapiens
aatcattgcctagac

SEQ ID NO: 1119407 - DNA, 15 bp, Homo sapiens
aaatcattgcctaga

SEQ ID NO: 1119408 - DNA, 15 bp, Homo sapiens
aaaatcattgcctag

SEQ ID NO: 1119409 - DNA, 15 bp, Homo sapiens
aaaaatcattgccta

SEQ ID NO: 1119410 - DNA, 15 bp, Homo sapiens
aaaaaatcattgcct

SEQ ID NO: 1119411 - DNA, 15 bp, Homo sapiens
aaaaaaatcattgcc

SEQ ID NO: 1119412 - DNA, 15 bp, Homo sapiens
caaaaaaatcattgc

SEQ ID NO: 1119413 - DNA, 15 bp, Homo sapiens
tcaaaaaaatcattg

SEQ ID NO: 1119414 - DNA, 15 bp, Homo sapiens
gtcaaaaaaatcatt

SEQ ID NO: 1119415 - DNA, 15 bp, Homo sapiens
tgtcaaaaaaatcat

SEQ ID NO: 1119416 - DNA, 15 bp, Homo sapiens
gtgtcaaaaaaatca

SEQ ID NO: 1119417 - DNA, 15 bp, Homo sapiens
tgtgtcaaaaaaatc

SEQ ID NO: 1119418 - DNA, 15 bp, Homo sapiens
ttgtgtcaaaaaaat

SEQ ID NO: 1119419 - DNA, 15 bp, Homo sapiens
gttgtgtcaaaaaaa

SEQ ID NO: 1119420 - DNA, 15 bp, Homo sapiens
ggttgtgtcaaaaaa

SEQ ID NO: 1119421 - DNA, 15 bp, Homo sapiens
gggttgtgtcaaaaa

SEQ ID NO: 1119422 - DNA, 15 bp, Homo sapiens
ggggttgtgtcaaaa

SEQ ID NO: 1119423 - DNA, 15 bp, Homo sapiens
tggggttgtgtcaaa

SEQ ID NO: 1119424 - DNA, 15 bp, Homo sapiens
ttggggttgtgtcaa

SEQ ID NO: 1119425 - DNA, 15 bp, Homo sapiens
tttggggttgtgtca

SEQ ID NO: 1119426 - DNA, 15 bp, Homo sapiens
ttttggggttgtgtc

SEQ ID NO: 1119427 - DNA, 15 bp, Homo sapiens
cttttggggttgtgt

SEQ ID NO: 1119428 - DNA, 15 bp, Homo sapiens
ccttttggggttgtg

SEQ ID NO: 1119429 - DNA, 15 bp, Homo sapiens
tccttttggggttgt

SEQ ID NO: 1119430 - DNA, 15 bp, Homo sapiens
gtccttttggggttg

SEQ ID NO: 1119431 - DNA, 15 bp, Homo sapiens
tgtccttttggggtt

SEQ ID NO: 1119432 - DNA, 15 bp, Homo sapiens
ctgtccttttggggt

SEQ ID NO: 1119433 - DNA, 15 bp, Homo sapiens
cctgtccttttgggg

SEQ ID NO: 1119434 - DNA, 15 bp, Homo sapiens
acctgtccttttggg

SEQ ID NO: 1119435 - DNA, 15 bp, Homo sapiens
tacctgtccttttgg

SEQ ID NO: 1119436 - DNA, 15 bp, Homo sapiens
ttacctgtccttttg

SEQ ID NO: 1119437 - DNA, 15 bp, Homo sapiens
gttacctgtcctttt

SEQ ID NO: 1119438 - DNA, 15 bp, Homo sapiens
tgttacctgtccttt

SEQ ID NO: 1119439 - DNA, 15 bp, Homo sapiens
ttgttacctgtcctt

SEQ ID NO: 1119440 - DNA, 15 bp, Homo sapiens
tttgttacctgtcct

SEQ ID NO: 1119441 - DNA, 15 bp, Homo sapiens
ttttgttacctgtcc

SEQ ID NO: 1119442 - DNA, 15 bp, Homo sapiens
cttttgttacctgtc

SEQ ID NO: 1119443 - DNA, 15 bp, Homo sapiens
gcttttgttacctgt

SEQ ID NO: 1119444 - DNA, 15 bp, Homo sapiens
tgcttttgttacctg

SEQ ID NO: 1119445 - DNA, 15 bp, Homo sapiens
ttgcttttgttacct

SEQ ID NO: 1119446 - DNA, 15 bp, Homo sapiens
tttgcttttgttacc

SEQ ID NO: 1119447 - DNA, 15 bp, Homo sapiens
ttttgcttttgttac

SEQ ID NO: 1119448 - DNA, 15 bp, Homo sapiens
tttttgcttttgtta

SEQ ID NO: 1119449 - DNA, 15 bp, Homo sapiens
tatttttgcttttgt

SEQ ID NO: 1119450 - DNA, 15 bp, Homo sapiens
ctatttttgcttttg

SEQ ID NO: 1119451 - DNA, 15 bp, Homo sapiens
tctatttttgctttt

SEQ ID NO: 1119452 - DNA, 15 bp, Homo sapiens
gtctatttttgcttt

SEQ ID NO: 1119453 - DNA, 15 bp, Homo sapiens
tgtctatttttgctt

SEQ ID NO: 1119454 - DNA, 15 bp, Homo sapiens
ctgtctatttttgct

SEQ ID NO: 1119455 - DNA, 15 bp, Homo sapiens
tctgtctatttttgc

SEQ ID NO: 1119456 - DNA, 15 bp, Homo sapiens
atctgtctatttttg

SEQ ID NO: 1119457 - DNA, 15 bp, Homo sapiens
catctgtctattttt

SEQ ID NO: 1119458 - DNA, 15 bp, Homo sapiens
ccatctgtctatttt

SEQ ID NO: 1119459 - DNA, 15 bp, Homo sapiens
cccatctgtctattt

SEQ ID NO: 1119460 - DNA, 15 bp, Homo sapiens
tcccatctgtctatt

SEQ ID NO: 1119461 - DNA, 15 bp, Homo sapiens
atcccatctgtctat

SEQ ID NO: 1119462 - DNA, 15 bp, Homo sapiens
aatcccatctgtcta

SEQ ID NO: 1119463 - DNA, 15 bp, Homo sapiens
taatcccatctgtct

SEQ ID NO: 1119464 - DNA, 15 bp, Homo sapiens
gtaatcccatctgtc

SEQ ID NO: 1119465 - DNA, 15 bp, Homo sapiens
tgtaatcccatctgt

SEQ ID NO: 1119466 - DNA, 15 bp, Homo sapiens
atgtaatcccatctg

SEQ ID NO: 1119467 - DNA, 15 bp, Homo sapiens
gatgtaatcccatct

SEQ ID NO: 1119468 - DNA, 15 bp, Homo sapiens
tgatgtaatcccatc

SEQ ID NO: 1119469 - DNA, 15 bp, Homo sapiens
ttgatgtaatcccat

SEQ ID NO: 1119470 - DNA, 15 bp, Homo sapiens
tttgatgtaatccca

SEQ ID NO: 1119471 - DNA, 15 bp, Homo sapiens
gtttgatgtaatccc

SEQ ID NO: 1119472 - DNA, 15 bp, Homo sapiens
agtttgatgtaatcc

SEQ ID NO: 1119473 - DNA, 15 bp, Homo sapiens
tagtttgatgtaatc

SEQ ID NO: 1119474 - DNA, 15 bp, Homo sapiens
ttagtttgatgtaat

SEQ ID NO: 1119475 - DNA, 15 bp, Homo sapiens
tttagtttgatgtaa

SEQ ID NO: 1119476 - DNA, 15 bp, Homo sapiens
ttttagtttgatgta

SEQ ID NO: 1119477 - DNA, 15 bp, Homo sapiens
tttttagtttgatgt

SEQ ID NO: 1119478 - DNA, 15 bp, Homo sapiens
ctttttagtttgatg

SEQ ID NO: 1119479 - DNA, 15 bp, Homo sapiens
gctttttagtttgat

SEQ ID NO: 1119480 - DNA, 15 bp, Homo sapiens
agctttttagtttga

SEQ ID NO: 1119481 - DNA, 15 bp, Homo sapiens
aagctttttagtttg

SEQ ID NO: 1119482 - DNA, 15 bp, Homo sapiens
gaagctttttagttt

SEQ ID NO: 1119483 - DNA, 15 bp, Homo sapiens
tgaagctttttagtt

SEQ ID NO: 1119484 - DNA, 15 bp, Homo sapiens
ttgaagctttttagt

SEQ ID NO: 1119485 - DNA, 15 bp, Homo sapiens
tttgaagctttttag

SEQ ID NO: 1119486 - DNA, 15 bp, Homo sapiens
ttttgaagcttttta

SEQ ID NO: 1119487 - DNA, 15 bp, Homo sapiens
tttttgaagcttttt

SEQ ID NO: 1119488 - DNA, 15 bp, Homo sapiens
ctttttgaagctttt

SEQ ID NO: 1119489 - DNA, 15 bp, Homo sapiens
cctttttgaagcttt

SEQ ID NO: 1119490 - DNA, 15 bp, Homo sapiens
tcctttttgaagctt

SEQ ID NO: 1119491 - DNA, 15 bp, Homo sapiens
ttcctttttgaagct

SEQ ID NO: 1119492 - DNA, 15 bp, Homo sapiens
cttcctttttgaagc

SEQ ID NO: 1119493 - DNA, 15 bp, Homo sapiens
gcttcctttttgaag

SEQ ID NO: 1119494 - DNA, 15 bp, Homo sapiens
tgcttcctttttgaa

SEQ ID NO: 1119495 - DNA, 15 bp, Homo sapiens
ttgcttcctttttga

SEQ ID NO: 1119496 - DNA, 15 bp, Homo sapiens
attgcttcctttttg

SEQ ID NO: 1119497 - DNA, 15 bp, Homo sapiens
gattgcttccttttt

SEQ ID NO: 1119498 - DNA, 15 bp, Homo sapiens
tgattgcttcctttt

SEQ ID NO: 1119499 - DNA, 15 bp, Homo sapiens
ttgattgcttccttt

SEQ ID NO: 1119500 - DNA, 15 bp, Homo sapiens
gttgattgcttcctt

SEQ ID NO: 1119501 - DNA, 15 bp, Homo sapiens
tgttgattgcttcct

SEQ ID NO: 1119502 - DNA, 15 bp, Homo sapiens
ctgttgattgcttcc

SEQ ID NO: 1119503 - DNA, 15 bp, Homo sapiens
tctgttgattgcttc

SEQ ID NO: 1119504 - DNA, 15 bp, Homo sapiens
ctctgttgattgctt

SEQ ID NO: 1119505 - DNA, 15 bp, Homo sapiens
actctgttgattgct

SEQ ID NO: 1119506 - DNA, 15 bp, Homo sapiens
cactctgttgattgc

SEQ ID NO: 1119507 - DNA, 15 bp, Homo sapiens
tcactctgttgattg

SEQ ID NO: 1119508 - DNA, 15 bp, Homo sapiens
ttcactctgttgatt

SEQ ID NO: 1119509 - DNA, 15 bp, Homo sapiens
cttcactctgttgat

SEQ ID NO: 1119510 - DNA, 15 bp, Homo sapiens
tcttcactctgttga

SEQ ID NO: 1119511 - DNA, 15 bp, Homo sapiens
ctcttcactctgttg

SEQ ID NO: 1119512 - DNA, 15 bp, Homo sapiens
cctcttcactctgtt

SEQ ID NO: 1119513 - DNA, 15 bp, Homo sapiens
gcctcttcactctgt

SEQ ID NO: 1119514 - DNA, 15 bp, Homo sapiens
tgcctcttcactctg

SEQ ID NO: 1119515 - DNA, 15 bp, Homo sapiens
ttgcctcttcactct

SEQ ID NO: 1119516 - DNA, 15 bp, Homo sapiens
attgcctcttcactc

SEQ ID NO: 1119517 - DNA, 15 bp, Homo sapiens
aattgcctcttcact

SEQ ID NO: 1119518 - DNA, 15 bp, Homo sapiens
aaattgcctcttcac

SEQ ID NO: 1119519 - DNA, 15 bp, Homo sapiens
taaattgcctcttca

SEQ ID NO: 1119520 - DNA, 15 bp, Homo sapiens
ataaattgcctcttc

SEQ ID NO: 1119521 - DNA, 15 bp, Homo sapiens
tataaattgcctctt

SEQ ID NO: 1119522 - DNA, 15 bp, Homo sapiens
ctataaattgcctct

SEQ ID NO: 1119523 - DNA, 15 bp, Homo sapiens
tctataaattgcctc

SEQ ID NO: 1119524 - DNA, 15 bp, Homo sapiens
ttctataaattgcct

SEQ ID NO: 1119525 - DNA, 15 bp, Homo sapiens
attctataaattgcc

SEQ ID NO: 1119526 - DNA, 15 bp, Homo sapiens
cattctataaattgc

SEQ ID NO: 1119527 - DNA, 15 bp, Homo sapiens
tcattctataaattg

SEQ ID NO: 1119528 - DNA, 15 bp, Homo sapiens
ctcattctataaatt

SEQ ID NO: 1119529 - DNA, 15 bp, Homo sapiens
tctcattctataaat

SEQ ID NO: 1119530 - DNA, 15 bp, Homo sapiens
ctctcattctataaa

SEQ ID NO: 1119531 - DNA, 15 bp, Homo sapiens
tctctcattctataa

SEQ ID NO: 1119532 - DNA, 15 bp, Homo sapiens
ttctctcattctata

SEQ ID NO: 1119533 - DNA, 15 bp, Homo sapiens
tttctctcattctat

SEQ ID NO: 1119534 - DNA, 15 bp, Homo sapiens
ttttctctcattcta

SEQ ID NO: 1119535 - DNA, 15 bp, Homo sapiens
tattttctctcattc

SEQ ID NO: 1119536 - DNA, 15 bp, Homo sapiens
atattttctctcatt

SEQ ID NO: 1119537 - DNA, 15 bp, Homo sapiens
aatattttctctcat

SEQ ID NO: 1119538 - DNA, 15 bp, Homo sapiens
aaatattttctctca

SEQ ID NO: 1119539 - DNA, 15 bp, Homo sapiens
caaatattttctctc

SEQ ID NO: 1119540 - DNA, 15 bp, Homo sapiens
acaaatattttctct

SEQ ID NO: 1119541 - DNA, 15 bp, Homo sapiens
tacaaatattttctc

SEQ ID NO: 1119542 - DNA, 15 bp, Homo sapiens
ttacaaatattttct

SEQ ID NO: 1119543 - DNA, 15 bp, Homo sapiens
gttacaaatattttc

SEQ ID NO: 1119544 - DNA, 15 bp, Homo sapiens
ggttacaaatatttt

SEQ ID NO: 1119545 - DNA, 15 bp, Homo sapiens
gggttacaaatattt

SEQ ID NO: 1119546 - DNA, 15 bp, Homo sapiens
tgggttacaaatatt

SEQ ID NO: 1119547 - DNA, 15 bp, Homo sapiens
atgggttacaaatat

SEQ ID NO: 1119548 - DNA, 15 bp, Homo sapiens
tatgggttacaaata

SEQ ID NO: 1119549 - DNA, 15 bp, Homo sapiens
gtatgggttacaaat

SEQ ID NO: 1119550 - DNA, 15 bp, Homo sapiens
tgtatgggttacaaa

SEQ ID NO: 1119551 - DNA, 15 bp, Homo sapiens
atgtatgggttacaa

SEQ ID NO: 1119552 - DNA, 15 bp, Homo sapiens
gatgtatgggttaca

SEQ ID NO: 1119553 - DNA, 15 bp, Homo sapiens
agatgtatgggttac

SEQ ID NO: 1119554 - DNA, 15 bp, Homo sapiens
cagatgtatgggtta

SEQ ID NO: 1119555 - DNA, 15 bp, Homo sapiens
tcagatgtatgggtt

SEQ ID NO: 1119556 - DNA, 15 bp, Homo sapiens
atcagatgtatgggt

SEQ ID NO: 1119557 - DNA, 15 bp, Homo sapiens
tatcagatgtatggg

SEQ ID NO: 1119558 - DNA, 15 bp, Homo sapiens
ttatcagatgtatgg

SEQ ID NO: 1119559 - DNA, 15 bp, Homo sapiens
cttatcagatgtatg

SEQ ID NO: 1119560 - DNA, 15 bp, Homo sapiens
ccttatcagatgtat

SEQ ID NO: 1119561 - DNA, 15 bp, Homo sapiens
cccttatcagatgta

SEQ ID NO: 1119562 - DNA, 15 bp, Homo sapiens
ccccttatcagatgt

SEQ ID NO: 1119563 - DNA, 15 bp, Homo sapiens
accccttatcagatg

SEQ ID NO: 1119564 - DNA, 15 bp, Homo sapiens
aaccccttatcagat

SEQ ID NO: 1119565 - DNA, 15 bp, Homo sapiens
taaccccttatcaga

SEQ ID NO: 1119566 - DNA, 15 bp, Homo sapiens
ttaaccccttatcag

SEQ ID NO: 1119567 - DNA, 15 bp, Homo sapiens
attaaccccttatca

SEQ ID NO: 1119568 - DNA, 15 bp, Homo sapiens
tattaaccccttatc

SEQ ID NO: 1119569 - DNA, 15 bp, Homo sapiens
atattaaccccttat

SEQ ID NO: 1119570 - DNA, 15 bp, Homo sapiens
gatattaacccctta

SEQ ID NO: 1119571 - DNA, 15 bp, Homo sapiens
ggatattaacccctt

SEQ ID NO: 1119572 - DNA, 15 bp, Homo sapiens
tggatattaacccct

SEQ ID NO: 1119573 - DNA, 15 bp, Homo sapiens
ttggatattaacccc

SEQ ID NO: 1119574 - DNA, 15 bp, Homo sapiens
attggatattaaccc

SEQ ID NO: 1119575 - DNA, 15 bp, Homo sapiens
tattggatattaacc

SEQ ID NO: 1119576 - DNA, 15 bp, Homo sapiens
gtattggatattaac

SEQ ID NO: 1119577 - DNA, 15 bp, Homo sapiens
tgtattggatattaa

SEQ ID NO: 1119578 - DNA, 15 bp, Homo sapiens
atgtattggatatta

SEQ ID NO: 1119579 - DNA, 15 bp, Homo sapiens
tatgtattggatatt

SEQ ID NO: 1119580 - DNA, 15 bp, Homo sapiens
atatgtattggatat

SEQ ID NO: 1119581 - DNA, 15 bp, Homo sapiens
tatatgtattggata

SEQ ID NO: 1119582 - DNA, 15 bp, Homo sapiens
ttatatgtattggat

SEQ ID NO: 1119583 - DNA, 15 bp, Homo sapiens
cttatatgtattgga

SEQ ID NO: 1119584 - DNA, 15 bp, Homo sapiens
tcttatatgtattgg

SEQ ID NO: 1119585 - DNA, 15 bp, Homo sapiens
ttcttatatgtattg

SEQ ID NO: 1119586 - DNA, 15 bp, Homo sapiens
tttcttatatgtatt

SEQ ID NO: 1119587 - DNA, 15 bp, Homo sapiens
gtttcttatatgtat

SEQ ID NO: 1119588 - DNA, 15 bp, Homo sapiens
tgtttcttatatgta

SEQ ID NO: 1119589 - DNA, 15 bp, Homo sapiens
gtgtttcttatatgt

SEQ ID NO: 1119590 - DNA, 15 bp, Homo sapiens
tgtgtttcttatatg

SEQ ID NO: 1119591 - DNA, 15 bp, Homo sapiens
ttgtgtttcttatat

SEQ ID NO: 1119592 - DNA, 15 bp, Homo sapiens
tttgtgtttcttata

SEQ ID NO: 1119593 - DNA, 15 bp, Homo sapiens
gtttgtgtttcttat

SEQ ID NO: 1119594 - DNA, 15 bp, Homo sapiens
tgtttgtgtttctta

SEQ ID NO: 1119595 - DNA, 15 bp, Homo sapiens
ttgtttgtgtttctt

SEQ ID NO: 1119596 - DNA, 15 bp, Homo sapiens
gttgtttgtgtttct

SEQ ID NO: 1119597 - DNA, 15 bp, Homo sapiens
agttgtttgtgtttc

SEQ ID NO: 1119598 - DNA, 15 bp, Homo sapiens
gagttgtttgtgttt

SEQ ID NO: 1119599 - DNA, 15 bp, Homo sapiens
tgagttgtttgtgtt

SEQ ID NO: 1119600 - DNA, 15 bp, Homo sapiens
ttgagttgtttgtgt

SEQ ID NO: 1119601 - DNA, 15 bp, Homo sapiens
attgagttgtttgtg

SEQ ID NO: 1119602 - DNA, 15 bp, Homo sapiens
cattgagttgtttgt

SEQ ID NO: 1119603 - DNA, 15 bp, Homo sapiens
tcattgagttgtttg

SEQ ID NO: 1119604 - DNA, 15 bp, Homo sapiens
gtcattgagttgttt

SEQ ID NO: 1119605 - DNA, 15 bp, Homo sapiens
tgtcattgagttgtt

SEQ ID NO: 1119606 - DNA, 15 bp, Homo sapiens
ttgtcattgagttgt

SEQ ID NO: 1119607 - DNA, 15 bp, Homo sapiens
cttgtcattgagttg

SEQ ID NO: 1119608 - DNA, 15 bp, Homo sapiens
tcttgtcattgagtt

SEQ ID NO: 1119609 - DNA, 15 bp, Homo sapiens
ttcttgtcattgagt

SEQ ID NO: 1119610 - DNA, 15 bp, Homo sapiens
tttcttgtcattgag

SEQ ID NO: 1119611 - DNA, 15 bp, Homo sapiens
ttttcttgtcattga

SEQ ID NO: 1119612 - DNA, 15 bp, Homo sapiens
gttttcttgtcattg

SEQ ID NO: 1119613 - DNA, 15 bp, Homo sapiens
tgttttcttgtcatt

SEQ ID NO: 1119614 - DNA, 15 bp, Homo sapiens
ttgttttcttgtcat

SEQ ID NO: 1119615 - DNA, 15 bp, Homo sapiens
gttgttttcttgtca

SEQ ID NO: 1119616 - DNA, 15 bp, Homo sapiens
ggttgttttcttgtc

SEQ ID NO: 1119617 - DNA, 15 bp, Homo sapiens
aggttgttttcttgt

SEQ ID NO: 1119618 - DNA, 15 bp, Homo sapiens
caggttgttttcttg

SEQ ID NO: 1119619 - DNA, 15 bp, Homo sapiens
tcaggttgttttctt

SEQ ID NO: 1119620 - DNA, 15 bp, Homo sapiens
atcaggttgttttct

SEQ ID NO: 1119621 - DNA, 15 bp, Homo sapiens
aatcaggttgttttc

SEQ ID NO: 1119622 - DNA, 15 bp, Homo sapiens
taatcaggttgtttt

SEQ ID NO: 1119623 - DNA, 15 bp, Homo sapiens
ttaatcaggttgttt

SEQ ID NO: 1119624 - DNA, 15 bp, Homo sapiens
tttaatcaggttgtt

SEQ ID NO: 1119625 - DNA, 15 bp, Homo sapiens
ttttaatcaggttgt

SEQ ID NO: 1119626 - DNA, 15 bp, Homo sapiens
tttttaatcaggttg

SEQ ID NO: 1119627 - DNA, 15 bp, Homo sapiens
ctttttaatcaggtt

SEQ ID NO: 1119628 - DNA, 15 bp, Homo sapiens
actttttaatcaggt

SEQ ID NO: 1119629 - DNA, 15 bp, Homo sapiens
cactttttaatcagg

SEQ ID NO: 1119630 - DNA, 15 bp, Homo sapiens
ccactttttaatcag

SEQ ID NO: 1119631 - DNA, 15 bp, Homo sapiens
accactttttaatca

SEQ ID NO: 1119632 - DNA, 15 bp, Homo sapiens
gaccactttttaatc

SEQ ID NO: 1119633 - DNA, 15 bp, Homo sapiens
tgaccactttttaat

SEQ ID NO: 1119634 - DNA, 15 bp, Homo sapiens
ttgaccactttttaa

SEQ ID NO: 1119635 - DNA, 15 bp, Homo sapiens
tttgaccacttttta

SEQ ID NO: 1119636 - DNA, 15 bp, Homo sapiens
ttttgaccacttttt

SEQ ID NO: 1119637 - DNA, 15 bp, Homo sapiens
cttttgaccactttt

SEQ ID NO: 1119638 - DNA, 15 bp, Homo sapiens
gtcttttgaccactt

SEQ ID NO: 1119639 - DNA, 15 bp, Homo sapiens
ggtcttttgaccact

SEQ ID NO: 1119640 - DNA, 15 bp, Homo sapiens
aggtcttttgaccac

SEQ ID NO: 1119641 - DNA, 15 bp, Homo sapiens
caggtcttttgacca

SEQ ID NO: 1119642 - DNA, 15 bp, Homo sapiens
tcaggtcttttgacc

SEQ ID NO: 1119643 - DNA, 15 bp, Homo sapiens
ttcaggtcttttgac

SEQ ID NO: 1119644 - DNA, 15 bp, Homo sapiens
attcaggtcttttga

SEQ ID NO: 1119645 - DNA, 15 bp, Homo sapiens
tattcaggtcttttg

SEQ ID NO: 1119646 - DNA, 15 bp, Homo sapiens
ctattcaggtctttt

SEQ ID NO: 1119647 - DNA, 15 bp, Homo sapiens
tctattcaggtcttt

SEQ ID NO: 1119648 - DNA, 15 bp, Homo sapiens
gtctattcaggtctt

SEQ ID NO: 1119649 - DNA, 15 bp, Homo sapiens
tgtctattcaggtct

SEQ ID NO: 1119650 - DNA, 15 bp, Homo sapiens
atgtctattcaggtc

SEQ ID NO: 1119651 - DNA, 15 bp, Homo sapiens
aatgtctattcaggt

SEQ ID NO: 1119652 - DNA, 15 bp, Homo sapiens
aaatgtctattcagg

SEQ ID NO: 1119653 - DNA, 15 bp, Homo sapiens
ctgagaaatgtctat

SEQ ID NO: 1119654 - DNA, 15 bp, Homo sapiens
tctgagaaatgtcta

SEQ ID NO: 1119655 - DNA, 15 bp, Homo sapiens
ttctgagaaatgtct

SEQ ID NO: 1119656 - DNA, 15 bp, Homo sapiens
cttctgagaaatgtc

SEQ ID NO: 1119657 - DNA, 15 bp, Homo sapiens
tcttctgagaaatgt

SEQ ID NO: 1119658 - DNA, 15 bp, Homo sapiens
ttcttctgagaaatg

SEQ ID NO: 1119659 - DNA, 15 bp, Homo sapiens
tttcttctgagaaat

SEQ ID NO: 1119660 - DNA, 15 bp, Homo sapiens
ttttcttctgagaaa

SEQ ID NO: 1119661 - DNA, 15 bp, Homo sapiens
gttttcttctgagaa

SEQ ID NO: 1119662 - DNA, 15 bp, Homo sapiens
tgttttcttctgaga

SEQ ID NO: 1119663 - DNA, 15 bp, Homo sapiens
atgttttcttctgag

SEQ ID NO: 1119664 - DNA, 15 bp, Homo sapiens
tatgttttcttctga

SEQ ID NO: 1119665 - DNA, 15 bp, Homo sapiens
gtatgttttcttctg

SEQ ID NO: 1119666 - DNA, 15 bp, Homo sapiens
tgtatgttttcttct

SEQ ID NO: 1119667 - DNA, 15 bp, Homo sapiens
ttgtatgttttcttc

SEQ ID NO: 1119668 - DNA, 15 bp, Homo sapiens
tttgtatgttttctt

SEQ ID NO: 1119669 - DNA, 15 bp, Homo sapiens
atttgtatgttttct

SEQ ID NO: 1119670 - DNA, 15 bp, Homo sapiens
tatttgtatgttttc

SEQ ID NO: 1119671 - DNA, 15 bp, Homo sapiens
ctatttgtatgtttt

SEQ ID NO: 1119672 - DNA, 15 bp, Homo sapiens
tctatttgtatgttt

SEQ ID NO: 1119673 - DNA, 15 bp, Homo sapiens
ttctatttgtatgtt

SEQ ID NO: 1119674 - DNA, 15 bp, Homo sapiens
tttctatttgtatgt

SEQ ID NO: 1119675 - DNA, 15 bp, Homo sapiens
gtttctatttgtatg

SEQ ID NO: 1119676 - DNA, 15 bp, Homo sapiens
cgtttctatttgtat

SEQ ID NO: 1119677 - DNA, 15 bp, Homo sapiens
acgtttctatttgta

SEQ ID NO: 1119678 - DNA, 15 bp, Homo sapiens
tacgtttctatttgt

SEQ ID NO: 1119679 - DNA, 15 bp, Homo sapiens
gtacgtttctatttg

SEQ ID NO: 1119680 - DNA, 15 bp, Homo sapiens
tgtacgtttctattt

SEQ ID NO: 1119681 - DNA, 15 bp, Homo sapiens
ttgtacgtttctatt

SEQ ID NO: 1119682 - DNA, 15 bp, Homo sapiens
tttgtacgtttctat

SEQ ID NO: 1119683 - DNA, 15 bp, Homo sapiens
ttttgtacgtttcta

SEQ ID NO: 1119684 - DNA, 15 bp, Homo sapiens
tttttgtacgtttct

SEQ ID NO: 1119685 - DNA, 15 bp, Homo sapiens
ctttttgtacgtttc

SEQ ID NO: 1119686 - DNA, 15 bp, Homo sapiens
tctttttgtacgttt

SEQ ID NO: 1119687 - DNA, 15 bp, Homo sapiens
ttctttttgtacgtt

SEQ ID NO: 1119688 - DNA, 15 bp, Homo sapiens
tttctttttgtacgt

SEQ ID NO: 1119689 - DNA, 15 bp, Homo sapiens
gtttctttttgtacg

SEQ ID NO: 1119690 - DNA, 15 bp, Homo sapiens
tgtttctttttgtac

SEQ ID NO: 1119691 - DNA, 15 bp, Homo sapiens
atgtttctttttgta

SEQ ID NO: 1119692 - DNA, 15 bp, Homo sapiens
tatgtttctttttgt

SEQ ID NO: 1119693 - DNA, 15 bp, Homo sapiens
gtatgtttctttttg

SEQ ID NO: 1119694 - DNA, 15 bp, Homo sapiens
tgtatgtttcttttt

SEQ ID NO: 1119695 - DNA, 15 bp, Homo sapiens
ttgtatgtttctttt

SEQ ID NO: 1119696 - DNA, 15 bp, Homo sapiens
gttgtatgtttcttt

SEQ ID NO: 1119697 - DNA, 15 bp, Homo sapiens
tgttgtatgtttctt

SEQ ID NO: 1119698 - DNA, 15 bp, Homo sapiens
ctgttgtatgtttct

SEQ ID NO: 1119699 - DNA, 15 bp, Homo sapiens
cctgttgtatgtttc

SEQ ID NO: 1119700 - DNA, 15 bp, Homo sapiens
gcctgttgtatgttt

SEQ ID NO: 1119701 - DNA, 15 bp, Homo sapiens
tgcctgttgtatgtt

SEQ ID NO: 1119702 - DNA, 15 bp, Homo sapiens
atgcctgttgtatgt

SEQ ID NO: 1119703 - DNA, 15 bp, Homo sapiens
catgcctgttgtatg

SEQ ID NO: 1119704 - DNA, 15 bp, Homo sapiens
acatgcctgttgtat

SEQ ID NO: 1119705 - DNA, 15 bp, Homo sapiens
cacatgcctgttgta

SEQ ID NO: 1119706 - DNA, 15 bp, Homo sapiens
tcacatgcctgttgt

SEQ ID NO: 1119707 - DNA, 15 bp, Homo sapiens
ttcacatgcctgttg

SEQ ID NO: 1119708 - DNA, 15 bp, Homo sapiens
tttcacatgcctgtt

SEQ ID NO: 1119709 - DNA, 15 bp, Homo sapiens
ttttcacatgcctgt

SEQ ID NO: 1119710 - DNA, 15 bp, Homo sapiens
cttttcacatgcctg

SEQ ID NO: 1119711 - DNA, 15 bp, Homo sapiens
tcttttcacatgcct

SEQ ID NO: 1119712 - DNA, 15 bp, Homo sapiens
atcttttcacatgcc

SEQ ID NO: 1119713 - DNA, 15 bp, Homo sapiens
catcttttcacatgc

SEQ ID NO: 1119714 - DNA, 15 bp, Homo sapiens
acatcttttcacatg

SEQ ID NO: 1119715 - DNA, 15 bp, Homo sapiens
gacatcttttcacat

SEQ ID NO: 1119716 - DNA, 15 bp, Homo sapiens
tgacatcttttcaca

SEQ ID NO: 1119717 - DNA, 15 bp, Homo sapiens
gtgacatcttttcac

SEQ ID NO: 1119718 - DNA, 15 bp, Homo sapiens
tgtgacatcttttca

SEQ ID NO: 1119719 - DNA, 15 bp, Homo sapiens
gtgtgacatcttttc

SEQ ID NO: 1119720 - DNA, 15 bp, Homo sapiens
tgtgtgacatctttt

SEQ ID NO: 1119721 - DNA, 15 bp, Homo sapiens
atgtgtgacatcttt

SEQ ID NO: 1119722 - DNA, 15 bp, Homo sapiens
gatgtgtgacatctt

SEQ ID NO: 1119723 - DNA, 15 bp, Homo sapiens
tgatgtgtgacatct

SEQ ID NO: 1119724 - DNA, 15 bp, Homo sapiens
gtgatgtgtgacatc

SEQ ID NO: 1119725 - DNA, 15 bp, Homo sapiens
agtgatgtgtgacat

SEQ ID NO: 1119726 - DNA, 15 bp, Homo sapiens
tagtgatgtgtgaca

SEQ ID NO: 1119727 - DNA, 15 bp, Homo sapiens
ttagtgatgtgtgac

SEQ ID NO: 1119728 - DNA, 15 bp, Homo sapiens
attagtgatgtgtga

SEQ ID NO: 1119729 - DNA, 15 bp, Homo sapiens
gattagtgatgtgtg

SEQ ID NO: 1119730 - DNA, 15 bp, Homo sapiens
tgattagtgatgtgt

SEQ ID NO: 1119731 - DNA, 15 bp, Homo sapiens
atgattagtgatgtg

SEQ ID NO: 1119732 - DNA, 15 bp, Homo sapiens
gatgattagtgatgt

SEQ ID NO: 1119733 - DNA, 15 bp, Homo sapiens
tgatgattagtgatg

SEQ ID NO: 1119734 - DNA, 15 bp, Homo sapiens
ttgatgattagtgat

SEQ ID NO: 1119735 - DNA, 15 bp, Homo sapiens
cttgatgattagtga

SEQ ID NO: 1119736 - DNA, 15 bp, Homo sapiens
ccttgatgattagtg

SEQ ID NO: 1119737 - DNA, 15 bp, Homo sapiens
tccttgatgattagt

SEQ ID NO: 1119738 - DNA, 15 bp, Homo sapiens
ttccttgatgattag

SEQ ID NO: 1119739 - DNA, 15 bp, Homo sapiens
tttccttgatgatta

SEQ ID NO: 1119740 - DNA, 15 bp, Homo sapiens
gtttccttgatgatt

SEQ ID NO: 1119741 - DNA, 15 bp, Homo sapiens
tgtttccttgatgat

SEQ ID NO: 1119742 - DNA, 15 bp, Homo sapiens
gtgtttccttgatga

SEQ ID NO: 1119743 - DNA, 15 bp, Homo sapiens
tgtgtttccttgatg

SEQ ID NO: 1119744 - DNA, 15 bp, Homo sapiens
ttgtgtttccttgat

SEQ ID NO: 1119745 - DNA, 15 bp, Homo sapiens
cttgtgtttccttga

SEQ ID NO: 1119746 - DNA, 15 bp, Homo sapiens
acttgtgtttccttg

SEQ ID NO: 1119747 - DNA, 15 bp, Homo sapiens
gacttgtgtttcctt

SEQ ID NO: 1119748 - DNA, 15 bp, Homo sapiens
tgacttgtgtttcct

SEQ ID NO: 1119749 - DNA, 15 bp, Homo sapiens
ttgacttgtgtttcc

SEQ ID NO: 1119750 - DNA, 15 bp, Homo sapiens
tttgacttgtgtttc

SEQ ID NO: 1119751 - DNA, 15 bp, Homo sapiens
ttttgacttgtgttt

SEQ ID NO: 1119752 - DNA, 15 bp, Homo sapiens
gttttgacttgtgtt

SEQ ID NO: 1119753 - DNA, 15 bp, Homo sapiens
ggttttgacttgtgt

SEQ ID NO: 1119754 - DNA, 15 bp, Homo sapiens
tggttttgacttgtg

SEQ ID NO: 1119755 - DNA, 15 bp, Homo sapiens
gtggttttgacttgt

SEQ ID NO: 1119756 - DNA, 15 bp, Homo sapiens
tgtggttttgacttg

SEQ ID NO: 1119757 - DNA, 15 bp, Homo sapiens
ttgtggttttgactt

SEQ ID NO: 1119758 - DNA, 15 bp, Homo sapiens
attgtggttttgact

SEQ ID NO: 1119759 - DNA, 15 bp, Homo sapiens
cattgtggttttgac

SEQ ID NO: 1119760 - DNA, 15 bp, Homo sapiens
tcattgtggttttga

SEQ ID NO: 1119761 - DNA, 15 bp, Homo sapiens
ctcattgtggttttg

SEQ ID NO: 1119762 - DNA, 15 bp, Homo sapiens
tctcattgtggtttt

SEQ ID NO: 1119763 - DNA, 15 bp, Homo sapiens
atctcattgtggttt

SEQ ID NO: 1119764 - DNA, 15 bp, Homo sapiens
tatctcattgtggtt

SEQ ID NO: 1119765 - DNA, 15 bp, Homo sapiens
atatctcattgtggt

SEQ ID NO: 1119766 - DNA, 15 bp, Homo sapiens
gatatctcattgtgg

SEQ ID NO: 1119767 - DNA, 15 bp, Homo sapiens
tgatatctcattgtg

SEQ ID NO: 1119768 - DNA, 15 bp, Homo sapiens
atgatatctcattgt

SEQ ID NO: 1119769 - DNA, 15 bp, Homo sapiens
gatgatatctcattg

SEQ ID NO: 1119770 - DNA, 15 bp, Homo sapiens
agatgatatctcatt

SEQ ID NO: 1119771 - DNA, 15 bp, Homo sapiens
aagatgatatctcat

SEQ ID NO: 1119772 - DNA, 15 bp, Homo sapiens
taagatgatatctca

SEQ ID NO: 1119773 - DNA, 15 bp, Homo sapiens
ataagatgatatctc

SEQ ID NO: 1119774 - DNA, 15 bp, Homo sapiens
tataagatgatatct

SEQ ID NO: 1119775 - DNA, 15 bp, Homo sapiens
gtataagatgatatc

SEQ ID NO: 1119776 - DNA, 15 bp, Homo sapiens
ggtataagatgatat

SEQ ID NO: 1119777 - DNA, 15 bp, Homo sapiens
aggtataagatgata

SEQ ID NO: 1119778 - DNA, 15 bp, Homo sapiens
caggtataagatgat

SEQ ID NO: 1119779 - DNA, 15 bp, Homo sapiens
acaggtataagatga

SEQ ID NO: 1119780 - DNA, 15 bp, Homo sapiens
tacaggtataagatg

SEQ ID NO: 1119781 - DNA, 15 bp, Homo sapiens
ttacaggtataagat

SEQ ID NO: 1119782 - DNA, 15 bp, Homo sapiens
cttacaggtataaga

SEQ ID NO: 1119783 - DNA, 15 bp, Homo sapiens
tcttacaggtataag

SEQ ID NO: 1119784 - DNA, 15 bp, Homo sapiens
ttcttacaggtataa

SEQ ID NO: 1119785 - DNA, 15 bp, Homo sapiens
attcttacaggtata

SEQ ID NO: 1119786 - DNA, 15 bp, Homo sapiens
cattcttacaggtat

SEQ ID NO: 1119787 - DNA, 15 bp, Homo sapiens
ccattcttacaggta

SEQ ID NO: 1119788 - DNA, 15 bp, Homo sapiens
gccattcttacaggt

SEQ ID NO: 1119789 - DNA, 15 bp, Homo sapiens
ggccattcttacagg

SEQ ID NO: 1119790 - DNA, 15 bp, Homo sapiens
tggccattcttacag

SEQ ID NO: 1119791 - DNA, 15 bp, Homo sapiens
atggccattcttaca

SEQ ID NO: 1119792 - DNA, 15 bp, Homo sapiens
aatggccattcttac

SEQ ID NO: 1119793 - DNA, 15 bp, Homo sapiens
taatggccattctta

SEQ ID NO: 1119794 - DNA, 15 bp, Homo sapiens
ataatggccattctt

SEQ ID NO: 1119795 - DNA, 15 bp, Homo sapiens
tataatggccattct

SEQ ID NO: 1119796 - DNA, 15 bp, Homo sapiens
ttataatggccattc

SEQ ID NO: 1119797 - DNA, 15 bp, Homo sapiens
tttataatggccatt

SEQ ID NO: 1119798 - DNA, 15 bp, Homo sapiens
ttttataatggccat

SEQ ID NO: 1119799 - DNA, 15 bp, Homo sapiens
tttttataatggcca

SEQ ID NO: 1119800 - DNA, 15 bp, Homo sapiens
ctttttataatggcc

SEQ ID NO: 1119801 - DNA, 15 bp, Homo sapiens
tctttttataatggc

SEQ ID NO: 1119802 - DNA, 15 bp, Homo sapiens
ttctttttataatgg

SEQ ID NO: 1119803 - DNA, 15 bp, Homo sapiens
cttctttttataatg

SEQ ID NO: 1119804 - DNA, 15 bp, Homo sapiens
tcttctttttataat

SEQ ID NO: 1119805 - DNA, 15 bp, Homo sapiens
ttcttctttttataa

SEQ ID NO: 1119806 - DNA, 15 bp, Homo sapiens
tttcttctttttata

SEQ ID NO: 1119807 - DNA, 15 bp, Homo sapiens
ctttcttctttttat

SEQ ID NO: 1119808 - DNA, 15 bp, Homo sapiens
tctttcttcttttta

SEQ ID NO: 1119809 - DNA, 15 bp, Homo sapiens
atctttcttcttttt

SEQ ID NO: 1119810 - DNA, 15 bp, Homo sapiens
tatctttcttctttt

SEQ ID NO: 1119811 - DNA, 15 bp, Homo sapiens
atatctttcttcttt

SEQ ID NO: 1119812 - DNA, 15 bp, Homo sapiens
gatatctttcttctt

SEQ ID NO: 1119813 - DNA, 15 bp, Homo sapiens
tgatatctttcttct

SEQ ID NO: 1119814 - DNA, 15 bp, Homo sapiens
ttgatatctttcttc

SEQ ID NO: 1119815 - DNA, 15 bp, Homo sapiens
cttgatatctttctt

SEQ ID NO: 1119816 - DNA, 15 bp, Homo sapiens
acttgatatctttct

SEQ ID NO: 1119817 - DNA, 15 bp, Homo sapiens
cacttgatatctttc

SEQ ID NO: 1119818 - DNA, 15 bp, Homo sapiens
acacttgatatcttt

SEQ ID NO: 1119819 - DNA, 15 bp, Homo sapiens
aacacttgatatctt

SEQ ID NO: 1119820 - DNA, 15 bp, Homo sapiens
caacacttgatatct

SEQ ID NO: 1119821 - DNA, 15 bp, Homo sapiens
ccaacacttgatatc

SEQ ID NO: 1119822 - DNA, 15 bp, Homo sapiens
gccaacacttgatat

SEQ ID NO: 1119823 - DNA, 15 bp, Homo sapiens
tgccaacacttgata

SEQ ID NO: 1119824 - DNA, 15 bp, Homo sapiens
ttgccaacacttgat

SEQ ID NO: 1119825 - DNA, 15 bp, Homo sapiens
cttgccaacacttga

SEQ ID NO: 1119826 - DNA, 15 bp, Homo sapiens
gcttgccaacacttg

SEQ ID NO: 1119827 - DNA, 15 bp, Homo sapiens
tgcttgccaacactt

SEQ ID NO: 1119828 - DNA, 15 bp, Homo sapiens
atgcttgccaacact

SEQ ID NO: 1119829 - DNA, 15 bp, Homo sapiens
tatgcttgccaacac

SEQ ID NO: 1119830 - DNA, 15 bp, Homo sapiens
atatgcttgccaaca

SEQ ID NO: 1119831 - DNA, 15 bp, Homo sapiens
catatgcttgccaac

SEQ ID NO: 1119832 - DNA, 15 bp, Homo sapiens
ccatatgcttgccaa

SEQ ID NO: 1119833 - DNA, 15 bp, Homo sapiens
cccatatgcttgcca

SEQ ID NO: 1119834 - DNA, 15 bp, Homo sapiens
ccccatatgcttgcc

SEQ ID NO: 1119835 - DNA, 15 bp, Homo sapiens
tccccatatgcttgc

SEQ ID NO: 1119836 - DNA, 15 bp, Homo sapiens
ttccccatatgcttg

SEQ ID NO: 1119837 - DNA, 15 bp, Homo sapiens
tttccccatatgctt

SEQ ID NO: 1119838 - DNA, 15 bp, Homo sapiens
ttttccccatatgct

SEQ ID NO: 1119839 - DNA, 15 bp, Homo sapiens
attttccccatatgc

SEQ ID NO: 1119840 - DNA, 15 bp, Homo sapiens
cattttccccatatg

SEQ ID NO: 1119841 - DNA, 15 bp, Homo sapiens
tcattttccccatat

SEQ ID NO: 1119842 - DNA, 15 bp, Homo sapiens
ttcattttccccata

SEQ ID NO: 1119843 - DNA, 15 bp, Homo sapiens
tttcattttccccat

SEQ ID NO: 1119844 - DNA, 15 bp, Homo sapiens
gtttcattttcccca

SEQ ID NO: 1119845 - DNA, 15 bp, Homo sapiens
tgtttcattttcccc

SEQ ID NO: 1119846 - DNA, 15 bp, Homo sapiens
gtgtttcattttccc

SEQ ID NO: 1119847 - DNA, 15 bp, Homo sapiens
agtgtttcattttcc

SEQ ID NO: 1119848 - DNA, 15 bp, Homo sapiens
cagtgtttcattttc

SEQ ID NO: 1119849 - DNA, 15 bp, Homo sapiens
acagtgtttcatttt

SEQ ID NO: 1119850 - DNA, 15 bp, Homo sapiens
aacagtgtttcattt

SEQ ID NO: 1119851 - DNA, 15 bp, Homo sapiens
taacagtgtttcatt

SEQ ID NO: 1119852 - DNA, 15 bp, Homo sapiens
gtaacagtgtttcat

SEQ ID NO: 1119853 - DNA, 15 bp, Homo sapiens
tgtaacagtgtttca

SEQ ID NO: 1119854 - DNA, 15 bp, Homo sapiens
gtgtaacagtgtttc

SEQ ID NO: 1119855 - DNA, 15 bp, Homo sapiens
cgtgtaacagtgttt

SEQ ID NO: 1119856 - DNA, 15 bp, Homo sapiens
ccgtgtaacagtgtt

SEQ ID NO: 1119857 - DNA, 15 bp, Homo sapiens
tccgtgtaacagtgt

SEQ ID NO: 1119858 - DNA, 15 bp, Homo sapiens
atccgtgtaacagtg

SEQ ID NO: 1119859 - DNA, 15 bp, Homo sapiens
gatccgtgtaacagt

SEQ ID NO: 1119860 - DNA, 15 bp, Homo sapiens
cgatccgtgtaacag

SEQ ID NO: 1119861 - DNA, 15 bp, Homo sapiens
gcgatccgtgtaaca

SEQ ID NO: 1119862 - DNA, 15 bp, Homo sapiens
agcgatccgtgtaac

SEQ ID NO: 1119863 - DNA, 15 bp, Homo sapiens
aagcgatccgtgtaa

SEQ ID NO: 1119864 - DNA, 15 bp, Homo sapiens
aaagcgatccgtgta

SEQ ID NO: 1119865 - DNA, 15 bp, Homo sapiens
aaaagcgatccgtgt

SEQ ID NO: 1119866 - DNA, 15 bp, Homo sapiens
caaaagcgatccgtg

SEQ ID NO: 1119867 - DNA, 15 bp, Homo sapiens
ccaaaagcgatccgt

SEQ ID NO: 1119868 - DNA, 15 bp, Homo sapiens
accaaaagcgatccg

SEQ ID NO: 1119869 - DNA, 15 bp, Homo sapiens
caccaaaagcgatcc

SEQ ID NO: 1119870 - DNA, 15 bp, Homo sapiens
ccaccaaaagcgatc

SEQ ID NO: 1119871 - DNA, 15 bp, Homo sapiens
cccaccaaaagcgat

SEQ ID NO: 1119872 - DNA, 15 bp, Homo sapiens
tcccaccaaaagcga

SEQ ID NO: 1119873 - DNA, 15 bp, Homo sapiens
ttcccaccaaaagcg

SEQ ID NO: 1119874 - DNA, 15 bp, Homo sapiens
tttcccaccaaaagc

SEQ ID NO: 1119875 - DNA, 15 bp, Homo sapiens
ctttcccaccaaaag

SEQ ID NO: 1119876 - DNA, 15 bp, Homo sapiens
actttcccaccaaaa

SEQ ID NO: 1119877 - DNA, 15 bp, Homo sapiens
tactttcccaccaaa

SEQ ID NO: 1119878 - DNA, 15 bp, Homo sapiens
ttactttcccaccaa

SEQ ID NO: 1119879 - DNA, 15 bp, Homo sapiens
tttactttcccacca

SEQ ID NO: 1119880 - DNA, 15 bp, Homo sapiens
atttactttcccacc

SEQ ID NO: 1119881 - DNA, 15 bp, Homo sapiens
gatttactttcccac

SEQ ID NO: 1119882 - DNA, 15 bp, Homo sapiens
tgatttactttccca

SEQ ID NO: 1119883 - DNA, 15 bp, Homo sapiens
ctgatttactttccc

SEQ ID NO: 1119884 - DNA, 15 bp, Homo sapiens
actgatttactttcc

SEQ ID NO: 1119885 - DNA, 15 bp, Homo sapiens
tactgatttactttc

SEQ ID NO: 1119886 - DNA, 15 bp, Homo sapiens
gtactgatttacttt

SEQ ID NO: 1119887 - DNA, 15 bp, Homo sapiens
tgtactgatttactt

SEQ ID NO: 1119888 - DNA, 15 bp, Homo sapiens
ctgtactgatttact

SEQ ID NO: 1119889 - DNA, 15 bp, Homo sapiens
gctgtactgatttac

SEQ ID NO: 1119890 - DNA, 15 bp, Homo sapiens
ggctgtactgattta

SEQ ID NO: 1119891 - DNA, 15 bp, Homo sapiens
tggctgtactgattt

SEQ ID NO: 1119892 - DNA, 15 bp, Homo sapiens
ttggctgtactgatt

SEQ ID NO: 1119893 - DNA, 15 bp, Homo sapiens
tttggctgtactgat

SEQ ID NO: 1119894 - DNA, 15 bp, Homo sapiens
ctttggctgtactga

SEQ ID NO: 1119895 - DNA, 15 bp, Homo sapiens
tctttggctgtactg

SEQ ID NO: 1119896 - DNA, 15 bp, Homo sapiens
ctctttggctgtact

SEQ ID NO: 1119897 - DNA, 15 bp, Homo sapiens
actctttggctgtac

SEQ ID NO: 1119898 - DNA, 15 bp, Homo sapiens
tactctttggctgta

SEQ ID NO: 1119899 - DNA, 15 bp, Homo sapiens
atactctttggctgt

SEQ ID NO: 1119900 - DNA, 15 bp, Homo sapiens
catactctttggctg

SEQ ID NO: 1119901 - DNA, 15 bp, Homo sapiens
ccatactctttggct

SEQ ID NO: 1119902 - DNA, 15 bp, Homo sapiens
tccatactctttggc

SEQ ID NO: 1119903 - DNA, 15 bp, Homo sapiens
ctccatactctttgg

SEQ ID NO: 1119904 - DNA, 15 bp, Homo sapiens
tctccatactctttg

SEQ ID NO: 1119905 - DNA, 15 bp, Homo sapiens
atctccatactcttt

SEQ ID NO: 1119906 - DNA, 15 bp, Homo sapiens
aatctccatactctt

SEQ ID NO: 1119907 - DNA, 15 bp, Homo sapiens
gaatctccatactct

SEQ ID NO: 1119908 - DNA, 15 bp, Homo sapiens
tgaatctccatactc

SEQ ID NO: 1119909 - DNA, 15 bp, Homo sapiens
atgaatctccatact

SEQ ID NO: 1119910 - DNA, 15 bp, Homo sapiens
gatgaatctccatac

SEQ ID NO: 1119911 - DNA, 15 bp, Homo sapiens
tgatgaatctccata

SEQ ID NO: 1119912 - DNA, 15 bp, Homo sapiens
ttgatgaatctccat

SEQ ID NO: 1119913 - DNA, 15 bp, Homo sapiens
tttgatgaatctcca

SEQ ID NO: 1119914 - DNA, 15 bp, Homo sapiens
ttttgatgaatctcc

SEQ ID NO: 1119915 - DNA, 15 bp, Homo sapiens
tttttgatgaatctc

SEQ ID NO: 1119916 - DNA, 15 bp, Homo sapiens
ttttttgatgaatct

SEQ ID NO: 1119917 - DNA, 15 bp, Homo sapiens
attttttgatgaatc

SEQ ID NO: 1119918 - DNA, 15 bp, Homo sapiens
cattttttgatgaat

SEQ ID NO: 1119919 - DNA, 15 bp, Homo sapiens
ccattttttgatgaa

SEQ ID NO: 1119920 - DNA, 15 bp, Homo sapiens
tccattttttgatga

SEQ ID NO: 1119921 - DNA, 15 bp, Homo sapiens
ttccattttttgatg

SEQ ID NO: 1119922 - DNA, 15 bp, Homo sapiens
tttccattttttgat

SEQ ID NO: 1119923 - DNA, 15 bp, Homo sapiens
ttttccattttttga

SEQ ID NO: 1119924 - DNA, 15 bp, Homo sapiens
gttttccattttttg

SEQ ID NO: 1119925 - DNA, 15 bp, Homo sapiens
tgttttccatttttt

SEQ ID NO: 1119926 - DNA, 15 bp, Homo sapiens
ctgttttccattttt

SEQ ID NO: 1119927 - DNA, 15 bp, Homo sapiens
tctgttttccatttt

SEQ ID NO: 1119928 - DNA, 15 bp, Homo sapiens
ttctgttttccattt

SEQ ID NO: 1119929 - DNA, 15 bp, Homo sapiens
gttctgttttccatt

SEQ ID NO: 1119930 - DNA, 15 bp, Homo sapiens
agttctgttttccat

SEQ ID NO: 1119931 - DNA, 15 bp, Homo sapiens
tagttctgttttcca

SEQ ID NO: 1119932 - DNA, 15 bp, Homo sapiens
gtagttctgttttcc

SEQ ID NO: 1119933 - DNA, 15 bp, Homo sapiens
ggtagttctgttttc

SEQ ID NO: 1119934 - DNA, 15 bp, Homo sapiens
tggtagttctgtttt

SEQ ID NO: 1119935 - DNA, 15 bp, Homo sapiens
atggtagttctgttt

SEQ ID NO: 1119936 - DNA, 15 bp, Homo sapiens
tatggtagttctgtt

SEQ ID NO: 1119937 - DNA, 15 bp, Homo sapiens
atatggtagttctgt

SEQ ID NO: 1119938 - DNA, 15 bp, Homo sapiens
catatggtagttctg

SEQ ID NO: 1119939 - DNA, 15 bp, Homo sapiens
tcatatggtagttct

SEQ ID NO: 1119940 - DNA, 15 bp, Homo sapiens
atcatatggtagttc

SEQ ID NO: 1119941 - DNA, 15 bp, Homo sapiens
gatcatatggtagtt

SEQ ID NO: 1119942 - DNA, 15 bp, Homo sapiens
ggatcatatggtagt

SEQ ID NO: 1119943 - DNA, 15 bp, Homo sapiens
tggatcatatggtag

SEQ ID NO: 1119944 - DNA, 15 bp, Homo sapiens
ctggatcatatggta

SEQ ID NO: 1119945 - DNA, 15 bp, Homo sapiens
gctggatcatatggt

SEQ ID NO: 1119946 - DNA, 15 bp, Homo sapiens
tgctggatcatatgg

SEQ ID NO: 1119947 - DNA, 15 bp, Homo sapiens
atgctggatcatatg

SEQ ID NO: 1119948 - DNA, 15 bp, Homo sapiens
gatgctggatcatat

SEQ ID NO: 1119949 - DNA, 15 bp, Homo sapiens
ggatgctggatcata

SEQ ID NO: 1119950 - DNA, 15 bp, Homo sapiens
gggatgctggatcat

SEQ ID NO: 1119951 - DNA, 15 bp, Homo sapiens
ggggatgctggatca

SEQ ID NO: 1119952 - DNA, 15 bp, Homo sapiens
tggggatgctggatc

SEQ ID NO: 1119953 - DNA, 15 bp, Homo sapiens
gtggggatgctggat

SEQ ID NO: 1119954 - DNA, 15 bp, Homo sapiens
agtggggatgctgga

SEQ ID NO: 1119955 - DNA, 15 bp, Homo sapiens
tagtggggatgctgg

SEQ ID NO: 1119956 - DNA, 15 bp, Homo sapiens
gtagtggggatgctg

SEQ ID NO: 1119957 - DNA, 15 bp, Homo sapiens
agtagtggggatgct

SEQ ID NO: 1119958 - DNA, 15 bp, Homo sapiens
cagtagtggggatgc

SEQ ID NO: 1119959 - DNA, 15 bp, Homo sapiens
ccagtagtggggatg

SEQ ID NO: 1119960 - DNA, 15 bp, Homo sapiens
cccagtagtggggat

SEQ ID NO: 1119961 - DNA, 15 bp, Homo sapiens
acccagtagtgggga

SEQ ID NO: 1119962 - DNA, 15 bp, Homo sapiens
tacccagtagtgggg

SEQ ID NO: 1119963 - DNA, 15 bp, Homo sapiens
tatacccagtagtgg

SEQ ID NO: 1119964 - DNA, 15 bp, Homo sapiens
atatacccagtagtg

SEQ ID NO: 1119965 - DNA, 15 bp, Homo sapiens
tatatacccagtagt

SEQ ID NO: 1119966 - DNA, 15 bp, Homo sapiens
atatatacccagtag

SEQ ID NO: 1119967 - DNA, 15 bp, Homo sapiens
gatatatacccagta

SEQ ID NO: 1119968 - DNA, 15 bp, Homo sapiens
ggatatatacccagt

SEQ ID NO: 1119969 - DNA, 15 bp, Homo sapiens
tttggatatataccc

SEQ ID NO: 1119970 - DNA, 15 bp, Homo sapiens
ctttggatatatacc

SEQ ID NO: 1119971 - DNA, 15 bp, Homo sapiens
cctttggatatatac

SEQ ID NO: 1119972 - DNA, 15 bp, Homo sapiens
tcctttggatatata

SEQ ID NO: 1119973 - DNA, 15 bp, Homo sapiens
ttcctttggatatat

SEQ ID NO: 1119974 - DNA, 15 bp, Homo sapiens
tttcctttggatata

SEQ ID NO: 1119975 - DNA, 15 bp, Homo sapiens
atttcctttggatat

SEQ ID NO: 1119976 - DNA, 15 bp, Homo sapiens
catttcctttggata

SEQ ID NO: 1119977 - DNA, 15 bp, Homo sapiens
tcatttcctttggat

SEQ ID NO: 1119978 - DNA, 15 bp, Homo sapiens
ttcatttcctttgga

SEQ ID NO: 1119979 - DNA, 15 bp, Homo sapiens
tttcatttcctttgg

SEQ ID NO: 1119980 - DNA, 15 bp, Homo sapiens
atttcatttcctttg

SEQ ID NO: 1119981 - DNA, 15 bp, Homo sapiens
gatttcatttccttt

SEQ ID NO: 1119982 - DNA, 15 bp, Homo sapiens
tgatttcatttcctt

SEQ ID NO: 1119983 - DNA, 15 bp, Homo sapiens
gtgatttcatttcct

SEQ ID NO: 1119984 - DNA, 15 bp, Homo sapiens
agtgatttcatttcc

SEQ ID NO: 1119985 - DNA, 15 bp, Homo sapiens
tagtgatttcatttc

SEQ ID NO: 1119986 - DNA, 15 bp, Homo sapiens
atagtgatttcattt

SEQ ID NO: 1119987 - DNA, 15 bp, Homo sapiens
catagtgatttcatt

SEQ ID NO: 1119988 - DNA, 15 bp, Homo sapiens
acatagtgatttcat

SEQ ID NO: 1119989 - DNA, 15 bp, Homo sapiens
gacatagtgatttca

SEQ ID NO: 1119990 - DNA, 15 bp, Homo sapiens
tgacatagtgatttc

SEQ ID NO: 1119991 - DNA, 15 bp, Homo sapiens
ttgacatagtgattt

SEQ ID NO: 1119992 - DNA, 15 bp, Homo sapiens
cttgacatagtgatt

SEQ ID NO: 1119993 - DNA, 15 bp, Homo sapiens
tcttgacatagtgat

SEQ ID NO: 1119994 - DNA, 15 bp, Homo sapiens
ctcttgacatagtga

SEQ ID NO: 1119995 - DNA, 15 bp, Homo sapiens
tctcttgacatagtg

SEQ ID NO: 1119996 - DNA, 15 bp, Homo sapiens
ttctcttgacatagt

SEQ ID NO: 1119997 - DNA, 15 bp, Homo sapiens
tttctcttgacatag

SEQ ID NO: 1119998 - DNA, 15 bp, Homo sapiens
ttttctcttgacata

SEQ ID NO: 1119999 - DNA, 15 bp, Homo sapiens
gttttctcttgacat

SEQ ID NO: 1120000 - DNA, 15 bp, Homo sapiens
agttttctcttgaca

SEQ ID NO: 1120001 - DNA, 15 bp, Homo sapiens
cagttttctcttgac

SEQ ID NO: 1120002 - DNA, 15 bp, Homo sapiens
acagttttctcttga

SEQ ID NO: 1120003 - DNA, 15 bp, Homo sapiens
tacagttttctcttg

SEQ ID NO: 1120004 - DNA, 15 bp, Homo sapiens
gtacagttttctctt

SEQ ID NO: 1120005 - DNA, 15 bp, Homo sapiens
agtacagttttctct

SEQ ID NO: 1120006 - DNA, 15 bp, Homo sapiens
gagtacagttttctc

SEQ ID NO: 1120007 - DNA, 15 bp, Homo sapiens
agagtacagttttct

SEQ ID NO: 1120008 - DNA, 15 bp, Homo sapiens
aagagtacagttttc

SEQ ID NO: 1120009 - DNA, 15 bp, Homo sapiens
taagagtacagtttt

SEQ ID NO: 1120010 - DNA, 15 bp, Homo sapiens
gtaagagtacagttt

SEQ ID NO: 1120011 - DNA, 15 bp, Homo sapiens
tgtaagagtacagtt

SEQ ID NO: 1120012 - DNA, 15 bp, Homo sapiens
atgtaagagtacagt

SEQ ID NO: 1120013 - DNA, 15 bp, Homo sapiens
aatgtaagagtacag

SEQ ID NO: 1120014 - DNA, 15 bp, Homo sapiens
gaatgtaagagtaca

SEQ ID NO: 1120015 - DNA, 15 bp, Homo sapiens
tgaatgtaagagtac

SEQ ID NO: 1120016 - DNA, 15 bp, Homo sapiens
gtgaatgtaagagta

SEQ ID NO: 1120017 - DNA, 15 bp, Homo sapiens
agtgaatgtaagagt

SEQ ID NO: 1120018 - DNA, 15 bp, Homo sapiens
cagtgaatgtaagag

SEQ ID NO: 1120019 - DNA, 15 bp, Homo sapiens
gcagtgaatgtaaga

SEQ ID NO: 1120020 - DNA, 15 bp, Homo sapiens
tgcagtgaatgtaag

SEQ ID NO: 1120021 - DNA, 15 bp, Homo sapiens
ttgcagtgaatgtaa

SEQ ID NO: 1120022 - DNA, 15 bp, Homo sapiens
gttgcagtgaatgta

SEQ ID NO: 1120023 - DNA, 15 bp, Homo sapiens
tgttgcagtgaatgt

SEQ ID NO: 1120024 - DNA, 15 bp, Homo sapiens
atgttgcagtgaatg

SEQ ID NO: 1120025 - DNA, 15 bp, Homo sapiens
aatgttgcagtgaat

SEQ ID NO: 1120026 - DNA, 15 bp, Homo sapiens
taatgttgcagtgaa

SEQ ID NO: 1120027 - DNA, 15 bp, Homo sapiens
ataatgttgcagtga

SEQ ID NO: 1120028 - DNA, 15 bp, Homo sapiens
aataatgttgcagtg

SEQ ID NO: 1120029 - DNA, 15 bp, Homo sapiens
gaataatgttgcagt

SEQ ID NO: 1120030 - DNA, 15 bp, Homo sapiens
tgaataatgttgcag

SEQ ID NO: 1120031 - DNA, 15 bp, Homo sapiens
gtgaataatgttgca

SEQ ID NO: 1120032 - DNA, 15 bp, Homo sapiens
tgtgaataatgttgc

SEQ ID NO: 1120033 - DNA, 15 bp, Homo sapiens
ttgtgaataatgttg

SEQ ID NO: 1120034 - DNA, 15 bp, Homo sapiens
attgtgaataatgtt

SEQ ID NO: 1120035 - DNA, 15 bp, Homo sapiens
tattgtgaataatgt

SEQ ID NO: 1120036 - DNA, 15 bp, Homo sapiens
ctattgtgaataatg

SEQ ID NO: 1120037 - DNA, 15 bp, Homo sapiens
gctattgtgaataat

SEQ ID NO: 1120038 - DNA, 15 bp, Homo sapiens
ggctattgtgaataa

SEQ ID NO: 1120039 - DNA, 15 bp, Homo sapiens
ccttggctattgtga

SEQ ID NO: 1120040 - DNA, 15 bp, Homo sapiens
accttggctattgtg

SEQ ID NO: 1120041 - DNA, 15 bp, Homo sapiens
taccttggctattgt

SEQ ID NO: 1120042 - DNA, 15 bp, Homo sapiens
ataccttggctattg

SEQ ID NO: 1120043 - DNA, 15 bp, Homo sapiens
cataccttggctatt

SEQ ID NO: 1120044 - DNA, 15 bp, Homo sapiens
ccataccttggctat

SEQ ID NO: 1120045 - DNA, 15 bp, Homo sapiens
tccataccttggcta

SEQ ID NO: 1120046 - DNA, 15 bp, Homo sapiens
ttccataccttggct

SEQ ID NO: 1120047 - DNA, 15 bp, Homo sapiens
attccataccttggc

SEQ ID NO: 1120048 - DNA, 15 bp, Homo sapiens
gattccataccttgg

SEQ ID NO: 1120049 - DNA, 15 bp, Homo sapiens
tgattccataccttg

SEQ ID NO: 1120050 - DNA, 15 bp, Homo sapiens
ttgattccatacctt

SEQ ID NO: 1120051 - DNA, 15 bp, Homo sapiens
gttgattccatacct

SEQ ID NO: 1120052 - DNA, 15 bp, Homo sapiens
ggttgattccatacc

SEQ ID NO: 1120053 - DNA, 15 bp, Homo sapiens
aggttgattccatac

SEQ ID NO: 1120054 - DNA, 15 bp, Homo sapiens
taggttgattccata

SEQ ID NO: 1120055 - DNA, 15 bp, Homo sapiens
ttaggttgattccat

SEQ ID NO: 1120056 - DNA, 15 bp, Homo sapiens
cttaggttgattcca

SEQ ID NO: 1120057 - DNA, 15 bp, Homo sapiens
gcttaggttgattcc

SEQ ID NO: 1120058 - DNA, 15 bp, Homo sapiens
tgcttaggttgattc

SEQ ID NO: 1120059 - DNA, 15 bp, Homo sapiens
gtgcttaggttgatt

SEQ ID NO: 1120060 - DNA, 15 bp, Homo sapiens
ggtgcttaggttgat

SEQ ID NO: 1120061 - DNA, 15 bp, Homo sapiens
gggtgcttaggttga

SEQ ID NO: 1120062 - DNA, 15 bp, Homo sapiens
tgggtgcttaggttg

SEQ ID NO: 1120063 - DNA, 15 bp, Homo sapiens
atgggtgcttaggtt

SEQ ID NO: 1120064 - DNA, 15 bp, Homo sapiens
aatgggtgcttaggt

SEQ ID NO: 1120065 - DNA, 15 bp, Homo sapiens
taatgggtgcttagg

SEQ ID NO: 1120066 - DNA, 15 bp, Homo sapiens
ttaatgggtgcttag

SEQ ID NO: 1120067 - DNA, 15 bp, Homo sapiens
gttaatgggtgctta

SEQ ID NO: 1120068 - DNA, 15 bp, Homo sapiens
tgttaatgggtgctt

SEQ ID NO: 1120069 - DNA, 15 bp, Homo sapiens
ctgttaatgggtgct

SEQ ID NO: 1120070 - DNA, 15 bp, Homo sapiens
tctgttaatgggtgc

SEQ ID NO: 1120071 - DNA, 15 bp, Homo sapiens
gtctgttaatgggtg

SEQ ID NO: 1120072 - DNA, 15 bp, Homo sapiens
tgtctgttaatgggt

SEQ ID NO: 1120073 - DNA, 15 bp, Homo sapiens
ttgtctgttaatggg

SEQ ID NO: 1120074 - DNA, 15 bp, Homo sapiens
cttgtctgttaatgg

SEQ ID NO: 1120075 - DNA, 15 bp, Homo sapiens
acttgtctgttaatg

SEQ ID NO: 1120076 - DNA, 15 bp, Homo sapiens
cacttgtctgttaat

SEQ ID NO: 1120077 - DNA, 15 bp, Homo sapiens
tcacttgtctgttaa

SEQ ID NO: 1120078 - DNA, 15 bp, Homo sapiens
ttcacttgtctgtta

SEQ ID NO: 1120079 - DNA, 15 bp, Homo sapiens
attcacttgtctgtt

SEQ ID NO: 1120080 - DNA, 15 bp, Homo sapiens
cattcacttgtctgt

SEQ ID NO: 1120081 - DNA, 15 bp, Homo sapiens
tcattcacttgtctg

SEQ ID NO: 1120082 - DNA, 15 bp, Homo sapiens
ttcattcacttgtct

SEQ ID NO: 1120083 - DNA, 15 bp, Homo sapiens
cttcattcacttgtc

SEQ ID NO: 1120084 - DNA, 15 bp, Homo sapiens
tcttcattcacttgt

SEQ ID NO: 1120085 - DNA, 15 bp, Homo sapiens
ttcttcattcacttg

SEQ ID NO: 1120086 - DNA, 15 bp, Homo sapiens
tttcttcattcactt

SEQ ID NO: 1120087 - DNA, 15 bp, Homo sapiens
ttttcttcattcact

SEQ ID NO: 1120088 - DNA, 15 bp, Homo sapiens
attttcttcattcac

SEQ ID NO: 1120089 - DNA, 15 bp, Homo sapiens
cattttcttcattca

SEQ ID NO: 1120090 - DNA, 15 bp, Homo sapiens
acattttcttcattc

SEQ ID NO: 1120091 - DNA, 15 bp, Homo sapiens
cacattttcttcatt

SEQ ID NO: 1120092 - DNA, 15 bp, Homo sapiens
acacattttcttcat

SEQ ID NO: 1120093 - DNA, 15 bp, Homo sapiens
cacacattttcttca

SEQ ID NO: 1120094 - DNA, 15 bp, Homo sapiens
acacacattttcttc

SEQ ID NO: 1120095 - DNA, 15 bp, Homo sapiens
cacacacattttctt

SEQ ID NO: 1120096 - DNA, 15 bp, Homo sapiens
acacacacattttct

SEQ ID NO: 1120097 - DNA, 15 bp, Homo sapiens
tacacacacattttc

SEQ ID NO: 1120098 - DNA, 15 bp, Homo sapiens
ttacacacacatttt

SEQ ID NO: 1120099 - DNA, 15 bp, Homo sapiens
tttacacacacattt

SEQ ID NO: 1120100 - DNA, 15 bp, Homo sapiens
atttacacacacatt

SEQ ID NO: 1120101 - DNA, 15 bp, Homo sapiens
aatttacacacacat

SEQ ID NO: 1120102 - DNA, 15 bp, Homo sapiens
aaatttacacacaca

SEQ ID NO: 1120103 - DNA, 15 bp, Homo sapiens
taaatttacacacac

SEQ ID NO: 1120104 - DNA, 15 bp, Homo sapiens
gtaaatttacacaca

SEQ ID NO: 1120105 - DNA, 15 bp, Homo sapiens
tgtaaatttacacac

SEQ ID NO: 1120106 - DNA, 15 bp, Homo sapiens
atgtaaatttacaca

SEQ ID NO: 1120107 - DNA, 15 bp, Homo sapiens
catgtaaatttacac

SEQ ID NO: 1120108 - DNA, 15 bp, Homo sapiens
gcatgtaaatttaca

SEQ ID NO: 1120109 - DNA, 15 bp, Homo sapiens
ggcatgtaaatttac

SEQ ID NO: 1120110 - DNA, 15 bp, Homo sapiens
tggcatgtaaattta

SEQ ID NO: 1120111 - DNA, 15 bp, Homo sapiens
atggcatgtaaattt

SEQ ID NO: 1120112 - DNA, 15 bp, Homo sapiens
tatggcatgtaaatt

SEQ ID NO: 1120113 - DNA, 15 bp, Homo sapiens
atatggcatgtaaat

SEQ ID NO: 1120114 - DNA, 15 bp, Homo sapiens
aatatggcatgtaaa

SEQ ID NO: 1120115 - DNA, 15 bp, Homo sapiens
gaatatggcatgtaa

SEQ ID NO: 1120116 - DNA, 15 bp, Homo sapiens
tgaatatggcatgta

SEQ ID NO: 1120117 - DNA, 15 bp, Homo sapiens
ttgaatatggcatgt

SEQ ID NO: 1120118 - DNA, 15 bp, Homo sapiens
attgaatatggcatg

SEQ ID NO: 1120119 - DNA, 15 bp, Homo sapiens
tattgaatatggcat

SEQ ID NO: 1120120 - DNA, 15 bp, Homo sapiens
ctattgaatatggca

SEQ ID NO: 1120121 - DNA, 15 bp, Homo sapiens
tctattgaatatggc

SEQ ID NO: 1120122 - DNA, 15 bp, Homo sapiens
ttctattgaatatgg

SEQ ID NO: 1120123 - DNA, 15 bp, Homo sapiens
attctattgaatatg

SEQ ID NO: 1120124 - DNA, 15 bp, Homo sapiens
tattctattgaatat

SEQ ID NO: 1120125 - DNA, 15 bp, Homo sapiens
gtattctattgaata

SEQ ID NO: 1120126 - DNA, 15 bp, Homo sapiens
agtattctattgaat

SEQ ID NO: 1120127 - DNA, 15 bp, Homo sapiens
tagtattctattgaa

SEQ ID NO: 1120128 - DNA, 15 bp, Homo sapiens
atagtattctattga

SEQ ID NO: 1120129 - DNA, 15 bp, Homo sapiens
aatagtattctattg

SEQ ID NO: 1120130 - DNA, 15 bp, Homo sapiens
gaatagtattctatt

SEQ ID NO: 1120131 - DNA, 15 bp, Homo sapiens
tgaatagtattctat

SEQ ID NO: 1120132 - DNA, 15 bp, Homo sapiens
ctgaatagtattcta

SEQ ID NO: 1120133 - DNA, 15 bp, Homo sapiens
gctgaatagtattct

SEQ ID NO: 1120134 - DNA, 15 bp, Homo sapiens
ggctgaatagtattc

SEQ ID NO: 1120135 - DNA, 15 bp, Homo sapiens
aggctgaatagtatt

SEQ ID NO: 1120136 - DNA, 15 bp, Homo sapiens
aaggctgaatagtat

SEQ ID NO: 1120137 - DNA, 15 bp, Homo sapiens
aaaggctgaatagta

SEQ ID NO: 1120138 - DNA, 15 bp, Homo sapiens
taaaggctgaatagt

SEQ ID NO: 1120139 - DNA, 15 bp, Homo sapiens
ttaaaggctgaatag

SEQ ID NO: 1120140 - DNA, 15 bp, Homo sapiens
tttaaaggctgaata

SEQ ID NO: 1120141 - DNA, 15 bp, Homo sapiens
ttttaaaggctgaat

SEQ ID NO: 1120142 - DNA, 15 bp, Homo sapiens
tttttaaaggctgaa

SEQ ID NO: 1120143 - DNA, 15 bp, Homo sapiens
ctttttaaaggctga

SEQ ID NO: 1120144 - DNA, 15 bp, Homo sapiens
tctttttaaaggctg

SEQ ID NO: 1120145 - DNA, 15 bp, Homo sapiens
ttctttttaaaggct

SEQ ID NO: 1120146 - DNA, 15 bp, Homo sapiens
cttctttttaaaggc

SEQ ID NO: 1120147 - DNA, 15 bp, Homo sapiens
tcttctttttaaagg

SEQ ID NO: 1120148 - DNA, 15 bp, Homo sapiens
ttcttctttttaaag

SEQ ID NO: 1120149 - DNA, 15 bp, Homo sapiens
tttcttctttttaaa

SEQ ID NO: 1120150 - DNA, 15 bp, Homo sapiens
ttttcttctttttaa

SEQ ID NO: 1120151 - DNA, 15 bp, Homo sapiens
attttcttcttttta

SEQ ID NO: 1120152 - DNA, 15 bp, Homo sapiens
tattttcttcttttt

SEQ ID NO: 1120153 - DNA, 15 bp, Homo sapiens
gtattttcttctttt

SEQ ID NO: 1120154 - DNA, 15 bp, Homo sapiens
agtattttcttcttt

SEQ ID NO: 1120155 - DNA, 15 bp, Homo sapiens
cagtattttcttctt

SEQ ID NO: 1120156 - DNA, 15 bp, Homo sapiens
acagtattttcttct

SEQ ID NO: 1120157 - DNA, 15 bp, Homo sapiens
aacagtattttcttc

SEQ ID NO: 1120158 - DNA, 15 bp, Homo sapiens
taacagtattttctt

SEQ ID NO: 1120159 - DNA, 15 bp, Homo sapiens
ataacagtattttct

SEQ ID NO: 1120160 - DNA, 15 bp, Homo sapiens
aataacagtattttc

SEQ ID NO: 1120161 - DNA, 15 bp, Homo sapiens
aaataacagtatttt

SEQ ID NO: 1120162 - DNA, 15 bp, Homo sapiens
caaataacagtattt

SEQ ID NO: 1120163 - DNA, 15 bp, Homo sapiens
gcaaataacagtatt

SEQ ID NO: 1120164 - DNA, 15 bp, Homo sapiens
tgcaaataacagtat

SEQ ID NO: 1120165 - DNA, 15 bp, Homo sapiens
ctgcaaataacagta

SEQ ID NO: 1120166 - DNA, 15 bp, Homo sapiens
gctgcaaataacagt

SEQ ID NO: 1120167 - DNA, 15 bp, Homo sapiens
tgctgcaaataacag

SEQ ID NO: 1120168 - DNA, 15 bp, Homo sapiens
ttgctgcaaataaca

SEQ ID NO: 1120169 - DNA, 15 bp, Homo sapiens
gttgctgcaaataac

SEQ ID NO: 1120170 - DNA, 15 bp, Homo sapiens
tgttgctgcaaataa

SEQ ID NO: 1120171 - DNA, 15 bp, Homo sapiens
gtgttgctgcaaata

SEQ ID NO: 1120172 - DNA, 15 bp, Homo sapiens
cgtgttgctgcaaat

SEQ ID NO: 1120173 - DNA, 15 bp, Homo sapiens
tcgtgttgctgcaaa

SEQ ID NO: 1120174 - DNA, 15 bp, Homo sapiens
atcgtgttgctgcaa

SEQ ID NO: 1120175 - DNA, 15 bp, Homo sapiens
catcgtgttgctgca

SEQ ID NO: 1120176 - DNA, 15 bp, Homo sapiens
tcatcgtgttgctgc

SEQ ID NO: 1120177 - DNA, 15 bp, Homo sapiens
ttcatcgtgttgctg

SEQ ID NO: 1120178 - DNA, 15 bp, Homo sapiens
gttcatcgtgttgct

SEQ ID NO: 1120179 - DNA, 15 bp, Homo sapiens
ggttcatcgtgttgc

SEQ ID NO: 1120180 - DNA, 15 bp, Homo sapiens
aggttcatcgtgttg

SEQ ID NO: 1120181 - DNA, 15 bp, Homo sapiens
caggttcatcgtgtt

SEQ ID NO: 1120182 - DNA, 15 bp, Homo sapiens
ccaggttcatcgtgt

SEQ ID NO: 1120183 - DNA, 15 bp, Homo sapiens
tccaggttcatcgtg

SEQ ID NO: 1120184 - DNA, 15 bp, Homo sapiens
ctccaggttcatcgt

SEQ ID NO: 1120185 - DNA, 15 bp, Homo sapiens
cctccaggttcatcg

SEQ ID NO: 1120186 - DNA, 15 bp, Homo sapiens
cataatgtcctccag

SEQ ID NO: 1120187 - DNA, 15 bp, Homo sapiens
acataatgtcctcca

SEQ ID NO: 1120188 - DNA, 15 bp, Homo sapiens
aacataatgtcctcc

SEQ ID NO: 1120189 - DNA, 15 bp, Homo sapiens
taacataatgtcctc

SEQ ID NO: 1120190 - DNA, 15 bp, Homo sapiens
ttaacataatgtcct

SEQ ID NO: 1120191 - DNA, 15 bp, Homo sapiens
cttaacataatgtcc

SEQ ID NO: 1120192 - DNA, 15 bp, Homo sapiens
acttaacataatgtc

SEQ ID NO: 1120193 - DNA, 15 bp, Homo sapiens
cacttaacataatgt

SEQ ID NO: 1120194 - DNA, 15 bp, Homo sapiens
tcacttaacataatg

SEQ ID NO: 1120195 - DNA, 15 bp, Homo sapiens
ttcacttaacataat

SEQ ID NO: 1120196 - DNA, 15 bp, Homo sapiens
tttcacttaacataa

SEQ ID NO: 1120197 - DNA, 15 bp, Homo sapiens
atttcacttaacata

SEQ ID NO: 1120198 - DNA, 15 bp, Homo sapiens
tatttcacttaacat

SEQ ID NO: 1120199 - DNA, 15 bp, Homo sapiens
ttatttcacttaaca

SEQ ID NO: 1120200 - DNA, 15 bp, Homo sapiens
cttatttcacttaac

SEQ ID NO: 1120201 - DNA, 15 bp, Homo sapiens
gcttatttcacttaa

SEQ ID NO: 1120202 - DNA, 15 bp, Homo sapiens
ggcttatttcactta

SEQ ID NO: 1120203 - DNA, 15 bp, Homo sapiens
tggcttatttcactt

SEQ ID NO: 1120204 - DNA, 15 bp, Homo sapiens
ctggcttatttcact

SEQ ID NO: 1120205 - DNA, 15 bp, Homo sapiens
cctggcttatttcac

SEQ ID NO: 1120206 - DNA, 15 bp, Homo sapiens
ttttctgtgcctggc

SEQ ID NO: 1120207 - DNA, 15 bp, Homo sapiens
tttttctgtgcctgg

SEQ ID NO: 1120208 - DNA, 15 bp, Homo sapiens
atttttctgtgcctg

SEQ ID NO: 1120209 - DNA, 15 bp, Homo sapiens
tatttttctgtgcct

SEQ ID NO: 1120210 - DNA, 15 bp, Homo sapiens
gtatttttctgtgcc

SEQ ID NO: 1120211 - DNA, 15 bp, Homo sapiens
ggtatttttctgtgc

SEQ ID NO: 1120212 - DNA, 15 bp, Homo sapiens
gggtatttttctgtg

SEQ ID NO: 1120213 - DNA, 15 bp, Homo sapiens
ggggtatttttctgt

SEQ ID NO: 1120214 - DNA, 15 bp, Homo sapiens
tggggtatttttctg

SEQ ID NO: 1120215 - DNA, 15 bp, Homo sapiens
atggggtatttttct

SEQ ID NO: 1120216 - DNA, 15 bp, Homo sapiens
catggggtatttttc

SEQ ID NO: 1120217 - DNA, 15 bp, Homo sapiens
tcatggggtattttt

SEQ ID NO: 1120218 - DNA, 15 bp, Homo sapiens
atcatggggtatttt

SEQ ID NO: 1120219 - DNA, 15 bp, Homo sapiens
gatcatggggtattt

SEQ ID NO: 1120220 - DNA, 15 bp, Homo sapiens
agatcatggggtatt

SEQ ID NO: 1120221 - DNA, 15 bp, Homo sapiens
gagatcatggggtat

SEQ ID NO: 1120222 - DNA, 15 bp, Homo sapiens
tgagatcatggggta

SEQ ID NO: 1120223 - DNA, 15 bp, Homo sapiens
gtgagatcatggggt

SEQ ID NO: 1120224 - DNA, 15 bp, Homo sapiens
agtgagatcatgggg

SEQ ID NO: 1120225 - DNA, 15 bp, Homo sapiens
cagtgagatcatggg

SEQ ID NO: 1120226 - DNA, 15 bp, Homo sapiens
tcagtgagatcatgg

SEQ ID NO: 1120227 - DNA, 15 bp, Homo sapiens
gtcagtgagatcatg

SEQ ID NO: 1120228 - DNA, 15 bp, Homo sapiens
tgtcagtgagatcat

SEQ ID NO: 1120229 - DNA, 15 bp, Homo sapiens
ctgtcagtgagatca

SEQ ID NO: 1120230 - DNA, 15 bp, Homo sapiens
tctgtcagtgagatc

SEQ ID NO: 1120231 - DNA, 15 bp, Homo sapiens
ctctgtcagtgagat

SEQ ID NO: 1120232 - DNA, 15 bp, Homo sapiens
actctgtcagtgaga

SEQ ID NO: 1120233 - DNA, 15 bp, Homo sapiens
aactctgtcagtgag

SEQ ID NO: 1120234 - DNA, 15 bp, Homo sapiens
caactctgtcagtga

SEQ ID NO: 1120235 - DNA, 15 bp, Homo sapiens
tcaactctgtcagtg

SEQ ID NO: 1120236 - DNA, 15 bp, Homo sapiens
ttcaactctgtcagt

SEQ ID NO: 1120237 - DNA, 15 bp, Homo sapiens
gttcaactctgtcag

SEQ ID NO: 1120238 - DNA, 15 bp, Homo sapiens
agttcaactctgtca

SEQ ID NO: 1120239 - DNA, 15 bp, Homo sapiens
gagttcaactctgtc

SEQ ID NO: 1120240 - DNA, 15 bp, Homo sapiens
tgagttcaactctgt

SEQ ID NO: 1120241 - DNA, 15 bp, Homo sapiens
gtgagttcaactctg

SEQ ID NO: 1120242 - DNA, 15 bp, Homo sapiens
tgtgagttcaactct

SEQ ID NO: 1120243 - DNA, 15 bp, Homo sapiens
ctgtgagttcaactc

SEQ ID NO: 1120244 - DNA, 15 bp, Homo sapiens
tctgtgagttcaact

SEQ ID NO: 1120245 - DNA, 15 bp, Homo sapiens
ttctgtgagttcaac

SEQ ID NO: 1120246 - DNA, 15 bp, Homo sapiens
cttctgtgagttcaa

SEQ ID NO: 1120247 - DNA, 15 bp, Homo sapiens
gcttctgtgagttca

SEQ ID NO: 1120248 - DNA, 15 bp, Homo sapiens
tgcttctgtgagttc

SEQ ID NO: 1120249 - DNA, 15 bp, Homo sapiens
ctgcttctgtgagtt

SEQ ID NO: 1120250 - DNA, 15 bp, Homo sapiens
tctgcttctgtgagt

SEQ ID NO: 1120251 - DNA, 15 bp, Homo sapiens
ctctgcttctgtgag

SEQ ID NO: 1120252 - DNA, 15 bp, Homo sapiens
tctctgcttctgtga

SEQ ID NO: 1120253 - DNA, 15 bp, Homo sapiens
ctctctgcttctgtg

SEQ ID NO: 1120254 - DNA, 15 bp, Homo sapiens
gctctctgcttctgt

SEQ ID NO: 1120255 - DNA, 15 bp, Homo sapiens
tgctctctgcttctg

SEQ ID NO: 1120256 - DNA, 15 bp, Homo sapiens
ctgctctctgcttct

SEQ ID NO: 1120257 - DNA, 15 bp, Homo sapiens
tctgctctctgcttc

SEQ ID NO: 1120258 - DNA, 15 bp, Homo sapiens
ttctgctctctgctt

SEQ ID NO: 1120259 - DNA, 15 bp, Homo sapiens
gttctgctctctgct

SEQ ID NO: 1120260 - DNA, 15 bp, Homo sapiens
tgttctgctctctgc

SEQ ID NO: 1120261 - DNA, 15 bp, Homo sapiens
ctgttctgctctctg

SEQ ID NO: 1120262 - DNA, 15 bp, Homo sapiens
actgttctgctctct

SEQ ID NO: 1120263 - DNA, 15 bp, Homo sapiens
cactgttctgctctc

SEQ ID NO: 1120264 - DNA, 15 bp, Homo sapiens
ccactgttctgctct

SEQ ID NO: 1120265 - DNA, 15 bp, Homo sapiens
accactgttctgctc

SEQ ID NO: 1120266 - DNA, 15 bp, Homo sapiens
aaccactgttctgct

SEQ ID NO: 1120267 - DNA, 15 bp, Homo sapiens
taaccactgttctgc

SEQ ID NO: 1120268 - DNA, 15 bp, Homo sapiens
gtaaccactgttctg

SEQ ID NO: 1120269 - DNA, 15 bp, Homo sapiens
ggtaaccactgttct

SEQ ID NO: 1120270 - DNA, 15 bp, Homo sapiens
tggtaaccactgttc

SEQ ID NO: 1120271 - DNA, 15 bp, Homo sapiens
ctggtaaccactgtt

SEQ ID NO: 1120272 - DNA, 15 bp, Homo sapiens
cctggtaaccactgt

SEQ ID NO: 1120273 - DNA, 15 bp, Homo sapiens
ccctggtaaccactg

SEQ ID NO: 1120274 - DNA, 15 bp, Homo sapiens
tccctggtaaccact

SEQ ID NO: 1120275 - DNA, 15 bp, Homo sapiens
gtccctggtaaccac

SEQ ID NO: 1120276 - DNA, 15 bp, Homo sapiens
agtccctggtaacca

SEQ ID NO: 1120277 - DNA, 15 bp, Homo sapiens
aagtccctggtaacc

SEQ ID NO: 1120278 - DNA, 15 bp, Homo sapiens
aaagtccctggtaac

SEQ ID NO: 1120279 - DNA, 15 bp, Homo sapiens
caaagtccctggtaa

SEQ ID NO: 1120280 - DNA, 15 bp, Homo sapiens
tcaaagtccctggta

SEQ ID NO: 1120281 - DNA, 15 bp, Homo sapiens
ctcaaagtccctggt

SEQ ID NO: 1120282 - DNA, 15 bp, Homo sapiens
cctcaaagtccctgg

SEQ ID NO: 1120283 - DNA, 15 bp, Homo sapiens
acctcaaagtccctg

SEQ ID NO: 1120284 - DNA, 15 bp, Homo sapiens
cacctcaaagtccct

SEQ ID NO: 1120285 - DNA, 15 bp, Homo sapiens
ccacctcaaagtccc

SEQ ID NO: 1120286 - DNA, 15 bp, Homo sapiens
cccacctcaaagtcc

SEQ ID NO: 1120287 - DNA, 15 bp, Homo sapiens
tcccacctcaaagtc

SEQ ID NO: 1120288 - DNA, 15 bp, Homo sapiens
ctcccacctcaaagt

SEQ ID NO: 1120289 - DNA, 15 bp, Homo sapiens
cctcccacctcaaag

SEQ ID NO: 1120290 - DNA, 15 bp, Homo sapiens
ccctcccacctcaaa

SEQ ID NO: 1120291 - DNA, 15 bp, Homo sapiens
cccctcccacctcaa

SEQ ID NO: 1120292 - DNA, 15 bp, Homo sapiens
ccccctcccacctca

SEQ ID NO: 1120293 - DNA, 15 bp, Homo sapiens
cctgccccctcccac

SEQ ID NO: 1120294 - DNA, 15 bp, Homo sapiens
gcctgccccctccca

SEQ ID NO: 1120295 - DNA, 15 bp, Homo sapiens
cgcctgccccctccc

SEQ ID NO: 1120296 - DNA, 15 bp, Homo sapiens
tcgcctgccccctcc

SEQ ID NO: 1120297 - DNA, 15 bp, Homo sapiens
ctcgcctgccccctc

SEQ ID NO: 1120298 - DNA, 15 bp, Homo sapiens
tctcgcctgccccct

SEQ ID NO: 1120299 - DNA, 15 bp, Homo sapiens
ttctcgcctgccccc

SEQ ID NO: 1120300 - DNA, 15 bp, Homo sapiens
gttctcgcctgcccc

SEQ ID NO: 1120301 - DNA, 15 bp, Homo sapiens
agttctcgcctgccc

SEQ ID NO: 1120302 - DNA, 15 bp, Homo sapiens
cagttctcgcctgcc

SEQ ID NO: 1120303 - DNA, 15 bp, Homo sapiens
ccagttctcgcctgc

SEQ ID NO: 1120304 - DNA, 15 bp, Homo sapiens
cccagttctcgcctg

SEQ ID NO: 1120305 - DNA, 15 bp, Homo sapiens
ccccagttctcgcct

SEQ ID NO: 1120306 - DNA, 15 bp, Homo sapiens
tccccagttctcgcc

SEQ ID NO: 1120307 - DNA, 15 bp, Homo sapiens
ctccccagttctcgc

SEQ ID NO: 1120308 - DNA, 15 bp, Homo sapiens
tctccccagttctcg

SEQ ID NO: 1120309 - DNA, 15 bp, Homo sapiens
gtctccccagttctc

SEQ ID NO: 1120310 - DNA, 15 bp, Homo sapiens
cgtctccccagttct

SEQ ID NO: 1120311 - DNA, 15 bp, Homo sapiens
acgtctccccagttc

SEQ ID NO: 1120312 - DNA, 15 bp, Homo sapiens
aacgtctccccagtt

SEQ ID NO: 1120313 - DNA, 15 bp, Homo sapiens
caacgtctccccagt

SEQ ID NO: 1120314 - DNA, 15 bp, Homo sapiens
ccaacgtctccccag

SEQ ID NO: 1120315 - DNA, 15 bp, Homo sapiens
accaacgtctcccca

SEQ ID NO: 1120316 - DNA, 15 bp, Homo sapiens
gaccaacgtctcccc

SEQ ID NO: 1120317 - DNA, 15 bp, Homo sapiens
tgaccaacgtctccc

SEQ ID NO: 1120318 - DNA, 15 bp, Homo sapiens
ttgaccaacgtctcc

SEQ ID NO: 1120319 - DNA, 15 bp, Homo sapiens
tttgaccaacgtctc

SEQ ID NO: 1120320 - DNA, 15 bp, Homo sapiens
ctttgaccaacgtct

SEQ ID NO: 1120321 - DNA, 15 bp, Homo sapiens
cctttgaccaacgtc

SEQ ID NO: 1120322 - DNA, 15 bp, Homo sapiens
tcctttgaccaacgt

SEQ ID NO: 1120323 - DNA, 15 bp, Homo sapiens
atcctttgaccaacg

SEQ ID NO: 1120324 - DNA, 15 bp, Homo sapiens
aatcctttgaccaac

SEQ ID NO: 1120325 - DNA, 15 bp, Homo sapiens
gaatcctttgaccaa

SEQ ID NO: 1120326 - DNA, 15 bp, Homo sapiens
tgaatcctttgacca

SEQ ID NO: 1120327 - DNA, 15 bp, Homo sapiens
ttgaatcctttgacc

SEQ ID NO: 1120328 - DNA, 15 bp, Homo sapiens
tttgaatcctttgac

SEQ ID NO: 1120329 - DNA, 15 bp, Homo sapiens
ttttgaatcctttga

SEQ ID NO: 1120330 - DNA, 15 bp, Homo sapiens
attttgaatcctttg

SEQ ID NO: 1120331 - DNA, 15 bp, Homo sapiens
aattttgaatccttt

SEQ ID NO: 1120332 - DNA, 15 bp, Homo sapiens
aaattttgaatcctt

SEQ ID NO: 1120333 - DNA, 15 bp, Homo sapiens
gaaattttgaatcct

SEQ ID NO: 1120334 - DNA, 15 bp, Homo sapiens
tgaaattttgaatcc

SEQ ID NO: 1120335 - DNA, 15 bp, Homo sapiens
ctgaaattttgaatc

SEQ ID NO: 1120336 - DNA, 15 bp, Homo sapiens
actgaaattttgaat

SEQ ID NO: 1120337 - DNA, 15 bp, Homo sapiens
aactgaaattttgaa

SEQ ID NO: 1120338 - DNA, 15 bp, Homo sapiens
taactgaaattttga

SEQ ID NO: 1120339 - DNA, 15 bp, Homo sapiens
ttaactgaaattttg

SEQ ID NO: 1120340 - DNA, 15 bp, Homo sapiens
tttaactgaaatttt

SEQ ID NO: 1120341 - DNA, 15 bp, Homo sapiens
gtttaactgaaattt

SEQ ID NO: 1120342 - DNA, 15 bp, Homo sapiens
tgtttaactgaaatt

SEQ ID NO: 1120343 - DNA, 15 bp, Homo sapiens
ctgtttaactgaaat

SEQ ID NO: 1120344 - DNA, 15 bp, Homo sapiens
cctgtttaactgaaa

SEQ ID NO: 1120345 - DNA, 15 bp, Homo sapiens
ccctgtttaactgaa

SEQ ID NO: 1120346 - DNA, 15 bp, Homo sapiens
cccctgtttaactga

SEQ ID NO: 1120347 - DNA, 15 bp, Homo sapiens
acccctgtttaactg

SEQ ID NO: 1120348 - DNA, 15 bp, Homo sapiens
tacccctgtttaact

SEQ ID NO: 1120349 - DNA, 15 bp, Homo sapiens
ctacccctgtttaac

SEQ ID NO: 1120350 - DNA, 15 bp, Homo sapiens
actacccctgtttaa

SEQ ID NO: 1120351 - DNA, 15 bp, Homo sapiens
aactacccctgttta

SEQ ID NO: 1120352 - DNA, 15 bp, Homo sapiens
aaactacccctgttt

SEQ ID NO: 1120353 - DNA, 15 bp, Homo sapiens
caaactacccctgtt

SEQ ID NO: 1120354 - DNA, 15 bp, Homo sapiens
tcaaactacccctgt

SEQ ID NO: 1120355 - DNA, 15 bp, Homo sapiens
ctcaaactacccctg

SEQ ID NO: 1120356 - DNA, 15 bp, Homo sapiens
tctcaaactacccct

SEQ ID NO: 1120357 - DNA, 15 bp, Homo sapiens
atctcaaactacccc

SEQ ID NO: 1120358 - DNA, 15 bp, Homo sapiens
tatctcaaactaccc

SEQ ID NO: 1120359 - DNA, 15 bp, Homo sapiens
atatctcaaactacc

SEQ ID NO: 1120360 - DNA, 15 bp, Homo sapiens
aatatctcaaactac

SEQ ID NO: 1120361 - DNA, 15 bp, Homo sapiens
aaatatctcaaacta

SEQ ID NO: 1120362 - DNA, 15 bp, Homo sapiens
aaaatatctcaaact

SEQ ID NO: 1120363 - DNA, 15 bp, Homo sapiens
taaaatatctcaaac

SEQ ID NO: 1120364 - DNA, 15 bp, Homo sapiens
ttaaaatatctcaaa

SEQ ID NO: 1120365 - DNA, 15 bp, Homo sapiens
tttaaaatatctcaa

SEQ ID NO: 1120366 - DNA, 15 bp, Homo sapiens
ttttaaaatatctca

SEQ ID NO: 1120367 - DNA, 15 bp, Homo sapiens
tttttaaaatatctc

SEQ ID NO: 1120368 - DNA, 15 bp, Homo sapiens
atttttaaaatatct

SEQ ID NO: 1120369 - DNA, 15 bp, Homo sapiens
tatttttaaaatatc

SEQ ID NO: 1120370 - DNA, 15 bp, Homo sapiens
ttatttttaaaatat

SEQ ID NO: 1120371 - DNA, 15 bp, Homo sapiens
attatttttaaaata

SEQ ID NO: 1120372 - DNA, 15 bp, Homo sapiens
cattatttttaaaat

SEQ ID NO: 1120373 - DNA, 15 bp, Homo sapiens
tcattatttttaaaa

SEQ ID NO: 1120374 - DNA, 15 bp, Homo sapiens
gtcattatttttaaa

SEQ ID NO: 1120375 - DNA, 15 bp, Homo sapiens
tgtcattatttttaa

SEQ ID NO: 1120376 - DNA, 15 bp, Homo sapiens
atgtcattattttta

SEQ ID NO: 1120377 - DNA, 15 bp, Homo sapiens
aatgtcattattttt

SEQ ID NO: 1120378 - DNA, 15 bp, Homo sapiens
taatgtcattatttt

SEQ ID NO: 1120379 - DNA, 15 bp, Homo sapiens
ttaatgtcattattt

SEQ ID NO: 1120380 - DNA, 15 bp, Homo sapiens
attaatgtcattatt

SEQ ID NO: 1120381 - DNA, 15 bp, Homo sapiens
aattaatgtcattat

SEQ ID NO: 1120382 - DNA, 15 bp, Homo sapiens
taattaatgtcatta

SEQ ID NO: 1120383 - DNA, 15 bp, Homo sapiens
ataattaatgtcatt

SEQ ID NO: 1120384 - DNA, 15 bp, Homo sapiens
gataattaatgtcat

SEQ ID NO: 1120385 - DNA, 15 bp, Homo sapiens
tagataattaatgtc

SEQ ID NO: 1120386 - DNA, 15 bp, Homo sapiens
ttagataattaatgt

SEQ ID NO: 1120387 - DNA, 15 bp, Homo sapiens
attagataattaatg

SEQ ID NO: 1120388 - DNA, 15 bp, Homo sapiens
aattagataattaat

SEQ ID NO: 1120389 - DNA, 15 bp, Homo sapiens
caattagataattaa

SEQ ID NO: 1120390 - DNA, 15 bp, Homo sapiens
acaattagataatta

SEQ ID NO: 1120391 - DNA, 15 bp, Homo sapiens
tacaattagataatt

SEQ ID NO: 1120392 - DNA, 15 bp, Homo sapiens
ctacaattagataat

SEQ ID NO: 1120393 - DNA, 15 bp, Homo sapiens
actacaattagataa

SEQ ID NO: 1120394 - DNA, 15 bp, Homo sapiens
aactacaattagata

SEQ ID NO: 1120395 - DNA, 15 bp, Homo sapiens
caactacaattagat

SEQ ID NO: 1120396 - DNA, 15 bp, Homo sapiens
acaactacaattaga

SEQ ID NO: 1120397 - DNA, 15 bp, Homo sapiens
aacaactacaattag

SEQ ID NO: 1120398 - DNA, 15 bp, Homo sapiens
aaacaactacaatta

SEQ ID NO: 1120399 - DNA, 15 bp, Homo sapiens
aaaacaactacaatt

SEQ ID NO: 1120400 - DNA, 15 bp, Homo sapiens
taaaacaactacaat

SEQ ID NO: 1120401 - DNA, 15 bp, Homo sapiens
ttaaaacaactacaa

SEQ ID NO: 1120402 - DNA, 15 bp, Homo sapiens
attaaaacaactaca

SEQ ID NO: 1120403 - DNA, 15 bp, Homo sapiens
aattaaaacaactac

SEQ ID NO: 1120404 - DNA, 15 bp, Homo sapiens
aaattaaaacaacta

SEQ ID NO: 1120405 - DNA, 15 bp, Homo sapiens
taaattaaaacaact

SEQ ID NO: 1120406 - DNA, 15 bp, Homo sapiens
ctaaattaaaacaac

SEQ ID NO: 1120407 - DNA, 15 bp, Homo sapiens
actaaattaaaacaa

SEQ ID NO: 1120408 - DNA, 15 bp, Homo sapiens
aactaaattaaaaca

SEQ ID NO: 1120409 - DNA, 15 bp, Homo sapiens
gaactaaattaaaac

SEQ ID NO: 1120410 - DNA, 15 bp, Homo sapiens
tgaactaaattaaaa

SEQ ID NO: 1120411 - DNA, 15 bp, Homo sapiens
atgaactaaattaaa

SEQ ID NO: 1120412 - DNA, 15 bp, Homo sapiens
catgaactaaattaa

SEQ ID NO: 1120413 - DNA, 15 bp, Homo sapiens
ccatgaactaaatta

SEQ ID NO: 1120414 - DNA, 15 bp, Homo sapiens
accatgaactaaatt

SEQ ID NO: 1120415 - DNA, 15 bp, Homo sapiens
caccatgaactaaat

SEQ ID NO: 1120416 - DNA, 15 bp, Homo sapiens
tcaccatgaactaaa

SEQ ID NO: 1120417 - DNA, 15 bp, Homo sapiens
atcaccatgaactaa

SEQ ID NO: 1120418 - DNA, 15 bp, Homo sapiens
gatcaccatgaacta

SEQ ID NO: 1120419 - DNA, 15 bp, Homo sapiens
agatcaccatgaact

SEQ ID NO: 1120420 - DNA, 15 bp, Homo sapiens
tagatcaccatgaac

SEQ ID NO: 1120421 - DNA, 15 bp, Homo sapiens
ttagatcaccatgaa

SEQ ID NO: 1120422 - DNA, 15 bp, Homo sapiens
tttagatcaccatga

SEQ ID NO: 1120423 - DNA, 15 bp, Homo sapiens
ttttagatcaccatg

SEQ ID NO: 1120424 - DNA, 15 bp, Homo sapiens
cttttagatcaccat

SEQ ID NO: 1120425 - DNA, 15 bp, Homo sapiens
tcttttagatcacca

SEQ ID NO: 1120426 - DNA, 15 bp, Homo sapiens
ttcttttagatcacc

SEQ ID NO: 1120427 - DNA, 15 bp, Homo sapiens
tttcttttagatcac

SEQ ID NO: 1120428 - DNA, 15 bp, Homo sapiens
gtttcttttagatca

SEQ ID NO: 1120429 - DNA, 15 bp, Homo sapiens
ggtttcttttagatc

SEQ ID NO: 1120430 - DNA, 15 bp, Homo sapiens
gggtttcttttagat

SEQ ID NO: 1120431 - DNA, 15 bp, Homo sapiens
agggtttcttttaga

SEQ ID NO: 1120432 - DNA, 15 bp, Homo sapiens
aagggtttcttttag

SEQ ID NO: 1120433 - DNA, 15 bp, Homo sapiens
gaagggtttctttta

SEQ ID NO: 1120434 - DNA, 15 bp, Homo sapiens
ggaagggtttctttt

SEQ ID NO: 1120435 - DNA, 15 bp, Homo sapiens
aggaagggtttcttt

SEQ ID NO: 1120436 - DNA, 15 bp, Homo sapiens
aaggaagggtttctt

SEQ ID NO: 1120437 - DNA, 15 bp, Homo sapiens
taaggaagggtttct

SEQ ID NO: 1120438 - DNA, 15 bp, Homo sapiens
ataaggaagggtttc

SEQ ID NO: 1120439 - DNA, 15 bp, Homo sapiens
aataaggaagggttt

SEQ ID NO: 1120440 - DNA, 15 bp, Homo sapiens
gaataaggaagggtt

SEQ ID NO: 1120441 - DNA, 15 bp, Homo sapiens
tgaataaggaagggt

SEQ ID NO: 1120442 - DNA, 15 bp, Homo sapiens
gtgaataaggaaggg

SEQ ID NO: 1120443 - DNA, 15 bp, Homo sapiens
tgtgaataaggaagg

SEQ ID NO: 1120444 - DNA, 15 bp, Homo sapiens
atgtgaataaggaag

SEQ ID NO: 1120445 - DNA, 15 bp, Homo sapiens
aatgtgaataaggaa

SEQ ID NO: 1120446 - DNA, 15 bp, Homo sapiens
aaatgtgaataagga

SEQ ID NO: 1120447 - DNA, 15 bp, Homo sapiens
taaatgtgaataagg

SEQ ID NO: 1120448 - DNA, 15 bp, Homo sapiens
ttaaatgtgaataag

SEQ ID NO: 1120449 - DNA, 15 bp, Homo sapiens
cttaaatgtgaataa

SEQ ID NO: 1120450 - DNA, 15 bp, Homo sapiens
tcttaaatgtgaata

SEQ ID NO: 1120451 - DNA, 15 bp, Homo sapiens
ctcttaaatgtgaat

SEQ ID NO: 1120452 - DNA, 15 bp, Homo sapiens
cctcttaaatgtgaa

SEQ ID NO: 1120453 - DNA, 15 bp, Homo sapiens
gcctcttaaatgtga

SEQ ID NO: 1120454 - DNA, 15 bp, Homo sapiens
tgcctcttaaatgtg

SEQ ID NO: 1120455 - DNA, 15 bp, Homo sapiens
ctgcctcttaaatgt

SEQ ID NO: 1120456 - DNA, 15 bp, Homo sapiens
actgcctcttaaatg

SEQ ID NO: 1120457 - DNA, 15 bp, Homo sapiens
aactgcctcttaaat

SEQ ID NO: 1120458 - DNA, 15 bp, Homo sapiens
aaactgcctcttaaa

SEQ ID NO: 1120459 - DNA, 15 bp, Homo sapiens
taaactgcctcttaa

SEQ ID NO: 1120460 - DNA, 15 bp, Homo sapiens
ataaactgcctctta

SEQ ID NO: 1120461 - DNA, 15 bp, Homo sapiens
tataaactgcctctt

SEQ ID NO: 1120462 - DNA, 15 bp, Homo sapiens
ttataaactgcctct

SEQ ID NO: 1120463 - DNA, 15 bp, Homo sapiens
tttataaactgcctc

SEQ ID NO: 1120464 - DNA, 15 bp, Homo sapiens
ctttataaactgcct

SEQ ID NO: 1120465 - DNA, 15 bp, Homo sapiens
actttataaactgcc

SEQ ID NO: 1120466 - DNA, 15 bp, Homo sapiens
gactttataaactgc

SEQ ID NO: 1120467 - DNA, 15 bp, Homo sapiens
tgactttataaactg

SEQ ID NO: 1120468 - DNA, 15 bp, Homo sapiens
ttgactttataaact

SEQ ID NO: 1120469 - DNA, 15 bp, Homo sapiens
cttgactttataaac

SEQ ID NO: 1120470 - DNA, 15 bp, Homo sapiens
tcttgactttataaa

SEQ ID NO: 1120471 - DNA, 15 bp, Homo sapiens
ttcttgactttataa

SEQ ID NO: 1120472 - DNA, 15 bp, Homo sapiens
tttcttgactttata

SEQ ID NO: 1120473 - DNA, 15 bp, Homo sapiens
atttcttgactttat

SEQ ID NO: 1120474 - DNA, 15 bp, Homo sapiens
catttcttgacttta

SEQ ID NO: 1120475 - DNA, 15 bp, Homo sapiens
acatttcttgacttt

SEQ ID NO: 1120476 - DNA, 15 bp, Homo sapiens
cacatttcttgactt

SEQ ID NO: 1120477 - DNA, 15 bp, Homo sapiens
acacatttcttgact

SEQ ID NO: 1120478 - DNA, 15 bp, Homo sapiens
aacacatttcttgac

SEQ ID NO: 1120479 - DNA, 15 bp, Homo sapiens
caacacatttcttga

SEQ ID NO: 1120480 - DNA, 15 bp, Homo sapiens
acaacacatttcttg

SEQ ID NO: 1120481 - DNA, 15 bp, Homo sapiens
aacaacacatttctt

SEQ ID NO: 1120482 - DNA, 15 bp, Homo sapiens
taacaacacatttct

SEQ ID NO: 1120483 - DNA, 15 bp, Homo sapiens
ttaacaacacatttc

SEQ ID NO: 1120484 - DNA, 15 bp, Homo sapiens
gttaacaacacattt

SEQ ID NO: 1120485 - DNA, 15 bp, Homo sapiens
tgttaacaacacatt

SEQ ID NO: 1120486 - DNA, 15 bp, Homo sapiens
atgttaacaacacat

SEQ ID NO: 1120487 - DNA, 15 bp, Homo sapiens
catgttaacaacaca

SEQ ID NO: 1120488 - DNA, 15 bp, Homo sapiens
ccatgttaacaacac

SEQ ID NO: 1120489 - DNA, 15 bp, Homo sapiens
accatgttaacaaca

SEQ ID NO: 1120490 - DNA, 15 bp, Homo sapiens
caccatgttaacaac

SEQ ID NO: 1120491 - DNA, 15 bp, Homo sapiens
tcaccatgttaacaa

SEQ ID NO: 1120492 - DNA, 15 bp, Homo sapiens
gtcaccatgttaaca

SEQ ID NO: 1120493 - DNA, 15 bp, Homo sapiens
agtcaccatgttaac

SEQ ID NO: 1120494 - DNA, 15 bp, Homo sapiens
tagtcaccatgttaa

SEQ ID NO: 1120495 - DNA, 15 bp, Homo sapiens
atagtcaccatgtta

SEQ ID NO: 1120496 - DNA, 15 bp, Homo sapiens
catagtcaccatgtt

SEQ ID NO: 1120497 - DNA, 15 bp, Homo sapiens
ccatagtcaccatgt

SEQ ID NO: 1120498 - DNA, 15 bp, Homo sapiens
accatagtcaccatg

SEQ ID NO: 1120499 - DNA, 15 bp, Homo sapiens
aaccatagtcaccat

SEQ ID NO: 1120500 - DNA, 15 bp, Homo sapiens
taaccatagtcacca

SEQ ID NO: 1120501 - DNA, 15 bp, Homo sapiens
ttaaccatagtcacc

SEQ ID NO: 1120502 - DNA, 15 bp, Homo sapiens
attaaccatagtcac

SEQ ID NO: 1120503 - DNA, 15 bp, Homo sapiens
tattaaccatagtca

SEQ ID NO: 1120504 - DNA, 15 bp, Homo sapiens
ttattaaccatagtc

SEQ ID NO: 1120505 - DNA, 15 bp, Homo sapiens
gttattaaccatagt

SEQ ID NO: 1120506 - DNA, 15 bp, Homo sapiens
tgttattaaccatag

SEQ ID NO: 1120507 - DNA, 15 bp, Homo sapiens
atgttattaaccata

SEQ ID NO: 1120508 - DNA, 15 bp, Homo sapiens
gatgttattaaccat

SEQ ID NO: 1120509 - DNA, 15 bp, Homo sapiens
tgatgttattaacca

SEQ ID NO: 1120510 - DNA, 15 bp, Homo sapiens
gtgatgttattaacc

SEQ ID NO: 1120511 - DNA, 15 bp, Homo sapiens
tgtgatgttattaac

SEQ ID NO: 1120512 - DNA, 15 bp, Homo sapiens
atgtgatgttattaa

SEQ ID NO: 1120513 - DNA, 15 bp, Homo sapiens
aatgtgatgttatta

SEQ ID NO: 1120514 - DNA, 15 bp, Homo sapiens
caatgtgatgttatt

SEQ ID NO: 1120515 - DNA, 15 bp, Homo sapiens
gcaatgtgatgttat

SEQ ID NO: 1120516 - DNA, 15 bp, Homo sapiens
tgcaatgtgatgtta

SEQ ID NO: 1120517 - DNA, 15 bp, Homo sapiens
atgcaatgtgatgtt

SEQ ID NO: 1120518 - DNA, 15 bp, Homo sapiens
tatgcaatgtgatgt

SEQ ID NO: 1120519 - DNA, 15 bp, Homo sapiens
gtatgcaatgtgatg

SEQ ID NO: 1120520 - DNA, 15 bp, Homo sapiens
agtatgcaatgtgat

SEQ ID NO: 1120521 - DNA, 15 bp, Homo sapiens
aagtatgcaatgtga

SEQ ID NO: 1120522 - DNA, 15 bp, Homo sapiens
caagtatgcaatgtg

SEQ ID NO: 1120523 - DNA, 15 bp, Homo sapiens
tcaagtatgcaatgt

SEQ ID NO: 1120524 - DNA, 15 bp, Homo sapiens
ttcaagtatgcaatg

SEQ ID NO: 1120525 - DNA, 15 bp, Homo sapiens
tttcaagtatgcaat

SEQ ID NO: 1120526 - DNA, 15 bp, Homo sapiens
ttttcaagtatgcaa

SEQ ID NO: 1120527 - DNA, 15 bp, Homo sapiens
attttcaagtatgca

SEQ ID NO: 1120528 - DNA, 15 bp, Homo sapiens
aattttcaagtatgc

SEQ ID NO: 1120529 - DNA, 15 bp, Homo sapiens
caattttcaagtatg

SEQ ID NO: 1120530 - DNA, 15 bp, Homo sapiens
gcaattttcaagtat

SEQ ID NO: 1120531 - DNA, 15 bp, Homo sapiens
agcaattttcaagta

SEQ ID NO: 1120532 - DNA, 15 bp, Homo sapiens
tagcaattttcaagt

SEQ ID NO: 1120533 - DNA, 15 bp, Homo sapiens
ttagcaattttcaag

SEQ ID NO: 1120534 - DNA, 15 bp, Homo sapiens
cttagcaattttcaa

SEQ ID NO: 1120535 - DNA, 15 bp, Homo sapiens
tcttagcaattttca

SEQ ID NO: 1120536 - DNA, 15 bp, Homo sapiens
ttcttagcaattttc

SEQ ID NO: 1120537 - DNA, 15 bp, Homo sapiens
attcttagcaatttt

SEQ ID NO: 1120538 - DNA, 15 bp, Homo sapiens
tattcttagcaattt

SEQ ID NO: 1120539 - DNA, 15 bp, Homo sapiens
ctattcttagcaatt

SEQ ID NO: 1120540 - DNA, 15 bp, Homo sapiens
tctattcttagcaat

SEQ ID NO: 1120541 - DNA, 15 bp, Homo sapiens
atctattcttagcaa

SEQ ID NO: 1120542 - DNA, 15 bp, Homo sapiens
aatctattcttagca

SEQ ID NO: 1120543 - DNA, 15 bp, Homo sapiens
aaatctattcttagc

SEQ ID NO: 1120544 - DNA, 15 bp, Homo sapiens
aaaatctattcttag

SEQ ID NO: 1120545 - DNA, 15 bp, Homo sapiens
aaaaatctattctta

SEQ ID NO: 1120546 - DNA, 15 bp, Homo sapiens
taaaaatctattctt

SEQ ID NO: 1120547 - DNA, 15 bp, Homo sapiens
ttaaaaatctattct

SEQ ID NO: 1120548 - DNA, 15 bp, Homo sapiens
cttaaaaatctattc

SEQ ID NO: 1120549 - DNA, 15 bp, Homo sapiens
acttaaaaatctatt

SEQ ID NO: 1120550 - DNA, 15 bp, Homo sapiens
cacttaaaaatctat

SEQ ID NO: 1120551 - DNA, 15 bp, Homo sapiens
acacttaaaaatcta

SEQ ID NO: 1120552 - DNA, 15 bp, Homo sapiens
aacacttaaaaatct

SEQ ID NO: 1120553 - DNA, 15 bp, Homo sapiens
gaacacttaaaaatc

SEQ ID NO: 1120554 - DNA, 15 bp, Homo sapiens
agaacacttaaaaat

SEQ ID NO: 1120555 - DNA, 15 bp, Homo sapiens
gagaacacttaaaaa

SEQ ID NO: 1120556 - DNA, 15 bp, Homo sapiens
tgagaacacttaaaa

SEQ ID NO: 1120557 - DNA, 15 bp, Homo sapiens
atgagaacacttaaa

SEQ ID NO: 1120558 - DNA, 15 bp, Homo sapiens
gatgagaacacttaa

SEQ ID NO: 1120559 - DNA, 15 bp, Homo sapiens
tgatgagaacactta

SEQ ID NO: 1120560 - DNA, 15 bp, Homo sapiens
gtgatgagaacactt

SEQ ID NO: 1120561 - DNA, 15 bp, Homo sapiens
tgtgatgagaacact

SEQ ID NO: 1120562 - DNA, 15 bp, Homo sapiens
gtgtgatgagaacac

SEQ ID NO: 1120563 - DNA, 15 bp, Homo sapiens
tgtgtgatgagaaca

SEQ ID NO: 1120564 - DNA, 15 bp, Homo sapiens
gtgtgtgatgagaac

SEQ ID NO: 1120565 - DNA, 15 bp, Homo sapiens
tgtgtgtgatgagaa

SEQ ID NO: 1120566 - DNA, 15 bp, Homo sapiens
gtgtgtgtgatgaga

SEQ ID NO: 1120567 - DNA, 15 bp, Homo sapiens
tgtgtgtgtgatgag

SEQ ID NO: 1120568 - DNA, 15 bp, Homo sapiens
atattgtgtgtgtgt

SEQ ID NO: 1120569 - DNA, 15 bp, Homo sapiens
tatattgtgtgtgtg

SEQ ID NO: 1120570 - DNA, 15 bp, Homo sapiens
ttatattgtgtgtgt

SEQ ID NO: 1120571 - DNA, 15 bp, Homo sapiens
cttatattgtgtgtg

SEQ ID NO: 1120572 - DNA, 15 bp, Homo sapiens
acttatattgtgtgt

SEQ ID NO: 1120573 - DNA, 15 bp, Homo sapiens
tacttatattgtgtg

SEQ ID NO: 1120574 - DNA, 15 bp, Homo sapiens
atacttatattgtgt

SEQ ID NO: 1120575 - DNA, 15 bp, Homo sapiens
catacttatattgtg

SEQ ID NO: 1120576 - DNA, 15 bp, Homo sapiens
acatacttatattgt

SEQ ID NO: 1120577 - DNA, 15 bp, Homo sapiens
cacatacttatattg

SEQ ID NO: 1120578 - DNA, 15 bp, Homo sapiens
tcacatacttatatt

SEQ ID NO: 1120579 - DNA, 15 bp, Homo sapiens
ctcacatacttatat

SEQ ID NO: 1120580 - DNA, 15 bp, Homo sapiens
cctcacatacttata

SEQ ID NO: 1120581 - DNA, 15 bp, Homo sapiens
acctcacatacttat

SEQ ID NO: 1120582 - DNA, 15 bp, Homo sapiens
tacctcacatactta

SEQ ID NO: 1120583 - DNA, 15 bp, Homo sapiens
ttacctcacatactt

SEQ ID NO: 1120584 - DNA, 15 bp, Homo sapiens
catgcattacctcac

SEQ ID NO: 1120585 - DNA, 15 bp, Homo sapiens
acatgcattacctca

SEQ ID NO: 1120586 - DNA, 15 bp, Homo sapiens
aacatgcattacctc

SEQ ID NO: 1120587 - DNA, 15 bp, Homo sapiens
taacatgcattacct

SEQ ID NO: 1120588 - DNA, 15 bp, Homo sapiens
ttaacatgcattacc

SEQ ID NO: 1120589 - DNA, 15 bp, Homo sapiens
attaacatgcattac

SEQ ID NO: 1120590 - DNA, 15 bp, Homo sapiens
aattaacatgcatta

SEQ ID NO: 1120591 - DNA, 15 bp, Homo sapiens
taattaacatgcatt

SEQ ID NO: 1120592 - DNA, 15 bp, Homo sapiens
ataattaacatgcat

SEQ ID NO: 1120593 - DNA, 15 bp, Homo sapiens
gataattaacatgca

SEQ ID NO: 1120594 - DNA, 15 bp, Homo sapiens
agataattaacatgc

SEQ ID NO: 1120595 - DNA, 15 bp, Homo sapiens
aagataattaacatg

SEQ ID NO: 1120596 - DNA, 15 bp, Homo sapiens
caagataattaacat

SEQ ID NO: 1120597 - DNA, 15 bp, Homo sapiens
tcaagataattaaca

SEQ ID NO: 1120598 - DNA, 15 bp, Homo sapiens
atcaagataattaac

SEQ ID NO: 1120599 - DNA, 15 bp, Homo sapiens
aatcaagataattaa

SEQ ID NO: 1120600 - DNA, 15 bp, Homo sapiens
aaatcaagataatta

SEQ ID NO: 1120601 - DNA, 15 bp, Homo sapiens
taaatcaagataatt

SEQ ID NO: 1120602 - DNA, 15 bp, Homo sapiens
ctaaatcaagataat

SEQ ID NO: 1120603 - DNA, 15 bp, Homo sapiens
gctaaatcaagataa

SEQ ID NO: 1120604 - DNA, 15 bp, Homo sapiens
ggctaaatcaagata

SEQ ID NO: 1120605 - DNA, 15 bp, Homo sapiens
tggctaaatcaagat

SEQ ID NO: 1120606 - DNA, 15 bp, Homo sapiens
atggctaaatcaaga

SEQ ID NO: 1120607 - DNA, 15 bp, Homo sapiens
aatggctaaatcaag

SEQ ID NO: 1120608 - DNA, 15 bp, Homo sapiens
gaatggctaaatcaa

SEQ ID NO: 1120609 - DNA, 15 bp, Homo sapiens
ggaatggctaaatca

SEQ ID NO: 1120610 - DNA, 15 bp, Homo sapiens
tggaatggctaaatc

SEQ ID NO: 1120611 - DNA, 15 bp, Homo sapiens
gtggaatggctaaat

SEQ ID NO: 1120612 - DNA, 15 bp, Homo sapiens
tgtggaatggctaaa

SEQ ID NO: 1120613 - DNA, 15 bp, Homo sapiens
ttgtggaatggctaa

SEQ ID NO: 1120614 - DNA, 15 bp, Homo sapiens
attgtggaatggcta

SEQ ID NO: 1120615 - DNA, 15 bp, Homo sapiens
aattgtggaatggct

SEQ ID NO: 1120616 - DNA, 15 bp, Homo sapiens
aaattgtggaatggc

SEQ ID NO: 1120617 - DNA, 15 bp, Homo sapiens
taaattgtggaatgg

SEQ ID NO: 1120618 - DNA, 15 bp, Homo sapiens
ataaattgtggaatg

SEQ ID NO: 1120619 - DNA, 15 bp, Homo sapiens
tataaattgtggaat

SEQ ID NO: 1120620 - DNA, 15 bp, Homo sapiens
gtataaattgtggaa

SEQ ID NO: 1120621 - DNA, 15 bp, Homo sapiens
tgtataaattgtgga

SEQ ID NO: 1120622 - DNA, 15 bp, Homo sapiens
atgtataaattgtgg

SEQ ID NO: 1120623 - DNA, 15 bp, Homo sapiens
tatgtataaattgtg

SEQ ID NO: 1120624 - DNA, 15 bp, Homo sapiens
gtatgtataaattgt

SEQ ID NO: 1120625 - DNA, 15 bp, Homo sapiens
agtatgtataaattg

SEQ ID NO: 1120626 - DNA, 15 bp, Homo sapiens
aagtatgtataaatt

SEQ ID NO: 1120627 - DNA, 15 bp, Homo sapiens
gaagtatgtataaat

SEQ ID NO: 1120628 - DNA, 15 bp, Homo sapiens
tgaagtatgtataaa

SEQ ID NO: 1120629 - DNA, 15 bp, Homo sapiens
ttgaagtatgtataa

SEQ ID NO: 1120630 - DNA, 15 bp, Homo sapiens
tttgaagtatgtata

SEQ ID NO: 1120631 - DNA, 15 bp, Homo sapiens
gtttgaagtatgtat

SEQ ID NO: 1120632 - DNA, 15 bp, Homo sapiens
ggtttgaagtatgta

SEQ ID NO: 1120633 - DNA, 15 bp, Homo sapiens
tggtttgaagtatgt

SEQ ID NO: 1120634 - DNA, 15 bp, Homo sapiens
atggtttgaagtatg

SEQ ID NO: 1120635 - DNA, 15 bp, Homo sapiens
gatggtttgaagtat

SEQ ID NO: 1120636 - DNA, 15 bp, Homo sapiens
tgatggtttgaagta

SEQ ID NO: 1120637 - DNA, 15 bp, Homo sapiens
atgatggtttgaagt

SEQ ID NO: 1120638 - DNA, 15 bp, Homo sapiens
catgatggtttgaag

SEQ ID NO: 1120639 - DNA, 15 bp, Homo sapiens
acatgatggtttgaa

SEQ ID NO: 1120640 - DNA, 15 bp, Homo sapiens
aacatgatggtttga

SEQ ID NO: 1120641 - DNA, 15 bp, Homo sapiens
caacatgatggtttg

SEQ ID NO: 1120642 - DNA, 15 bp, Homo sapiens
acaacatgatggttt

SEQ ID NO: 1120643 - DNA, 15 bp, Homo sapiens
tacaacatgatggtt

SEQ ID NO: 1120644 - DNA, 15 bp, Homo sapiens
atacaacatgatggt

SEQ ID NO: 1120645 - DNA, 15 bp, Homo sapiens
tatacaacatgatgg

SEQ ID NO: 1120646 - DNA, 15 bp, Homo sapiens
gtatacaacatgatg

SEQ ID NO: 1120647 - DNA, 15 bp, Homo sapiens
ggtatacaacatgat

SEQ ID NO: 1120648 - DNA, 15 bp, Homo sapiens
tggtatacaacatga

SEQ ID NO: 1120649 - DNA, 15 bp, Homo sapiens
atggtatacaacatg

SEQ ID NO: 1120650 - DNA, 15 bp, Homo sapiens
tatggtatacaacat

SEQ ID NO: 1120651 - DNA, 15 bp, Homo sapiens
ttatggtatacaaca

SEQ ID NO: 1120652 - DNA, 15 bp, Homo sapiens
tttatggtatacaac

SEQ ID NO: 1120653 - DNA, 15 bp, Homo sapiens
atttatggtatacaa

SEQ ID NO: 1120654 - DNA, 15 bp, Homo sapiens
tatttatggtataca

SEQ ID NO: 1120655 - DNA, 15 bp, Homo sapiens
atatttatggtatac

SEQ ID NO: 1120656 - DNA, 15 bp, Homo sapiens
tatatttatggtata

SEQ ID NO: 1120657 - DNA, 15 bp, Homo sapiens
atatatttatggtat

SEQ ID NO: 1120658 - DNA, 15 bp, Homo sapiens
catatatttatggta

SEQ ID NO: 1120659 - DNA, 15 bp, Homo sapiens
acatatatttatggt

SEQ ID NO: 1120660 - DNA, 15 bp, Homo sapiens
tacatatatttatgg

SEQ ID NO: 1120661 - DNA, 15 bp, Homo sapiens
ttacatatatttatg

SEQ ID NO: 1120662 - DNA, 15 bp, Homo sapiens
cttacatatatttat

SEQ ID NO: 1120663 - DNA, 15 bp, Homo sapiens
acttacatatattta

SEQ ID NO: 1120664 - DNA, 15 bp, Homo sapiens
aacttacatatattt

SEQ ID NO: 1120665 - DNA, 15 bp, Homo sapiens
aaacttacatatatt

SEQ ID NO: 1120666 - DNA, 15 bp, Homo sapiens
aaaacttacatatat

SEQ ID NO: 1120667 - DNA, 15 bp, Homo sapiens
caaaacttacatata

SEQ ID NO: 1120668 - DNA, 15 bp, Homo sapiens
acaaaacttacatat

SEQ ID NO: 1120669 - DNA, 15 bp, Homo sapiens
gacaaaacttacata

SEQ ID NO: 1120670 - DNA, 15 bp, Homo sapiens
tgacaaaacttacat

SEQ ID NO: 1120671 - DNA, 15 bp, Homo sapiens
ttgacaaaacttaca

SEQ ID NO: 1120672 - DNA, 15 bp, Homo sapiens
attgacaaaacttac

SEQ ID NO: 1120673 - DNA, 15 bp, Homo sapiens
aattgacaaaactta

SEQ ID NO: 1120674 - DNA, 15 bp, Homo sapiens
taattgacaaaactt

SEQ ID NO: 1120675 - DNA, 15 bp, Homo sapiens
ttaattgacaaaact

SEQ ID NO: 1120676 - DNA, 15 bp, Homo sapiens
tttaattgacaaaac

SEQ ID NO: 1120677 - DNA, 15 bp, Homo sapiens
ttttaattgacaaaa

SEQ ID NO: 1120678 - DNA, 15 bp, Homo sapiens
tttttaattgacaaa

SEQ ID NO: 1120679 - DNA, 15 bp, Homo sapiens
ttttttaattgacaa

SEQ ID NO: 1120680 - DNA, 15 bp, Homo sapiens
attttttaattgaca

SEQ ID NO: 1120681 - DNA, 15 bp, Homo sapiens
tattttttaattgac

SEQ ID NO: 1120682 - DNA, 15 bp, Homo sapiens
ttattttttaattga

SEQ ID NO: 1120683 - DNA, 15 bp, Homo sapiens
attattttttaattg

SEQ ID NO: 1120684 - DNA, 15 bp, Homo sapiens
tattattttttaatt

SEQ ID NO: 1120685 - DNA, 15 bp, Homo sapiens
ttattattttttaat

SEQ ID NO: 1120686 - DNA, 15 bp, Homo sapiens
tttattattttttaa

SEQ ID NO: 1120687 - DNA, 15 bp, Homo sapiens
ctttattatttttta

SEQ ID NO: 1120688 - DNA, 15 bp, Homo sapiens
tctttattatttttt

SEQ ID NO: 1120689 - DNA, 15 bp, Homo sapiens
ttctttattattttt

SEQ ID NO: 1120690 - DNA, 15 bp, Homo sapiens
tttctttattatttt

SEQ ID NO: 1120691 - DNA, 15 bp, Homo sapiens
atttctttattattt

SEQ ID NO: 1120692 - DNA, 15 bp, Homo sapiens
catttctttattatt

SEQ ID NO: 1120693 - DNA, 15 bp, Homo sapiens
gcatttctttattat

SEQ ID NO: 1120694 - DNA, 15 bp, Homo sapiens
ggcatttctttatta

SEQ ID NO: 1120695 - DNA, 15 bp, Homo sapiens
tggcatttctttatt

SEQ ID NO: 1120696 - DNA, 15 bp, Homo sapiens
ctggcatttctttat

SEQ ID NO: 1120697 - DNA, 15 bp, Homo sapiens
gctggcatttcttta

SEQ ID NO: 1120698 - DNA, 15 bp, Homo sapiens
tgctggcatttcttt

SEQ ID NO: 1120699 - DNA, 15 bp, Homo sapiens
atgctggcatttctt

SEQ ID NO: 1120700 - DNA, 15 bp, Homo sapiens
tcatgctggcatttc

SEQ ID NO: 1120701 - DNA, 15 bp, Homo sapiens
atcatgctggcattt

SEQ ID NO: 1120702 - DNA, 15 bp, Homo sapiens
aatcatgctggcatt

SEQ ID NO: 1120703 - DNA, 15 bp, Homo sapiens
gaatcatgctggcat

SEQ ID NO: 1120704 - DNA, 15 bp, Homo sapiens
tgaatcatgctggca

SEQ ID NO: 1120705 - DNA, 15 bp, Homo sapiens
ttgaatcatgctggc

SEQ ID NO: 1120706 - DNA, 15 bp, Homo sapiens
tttgaatcatgctgg

SEQ ID NO: 1120707 - DNA, 15 bp, Homo sapiens
ttttgaatcatgctg

SEQ ID NO: 1120708 - DNA, 15 bp, Homo sapiens
attttgaatcatgct

SEQ ID NO: 1120709 - DNA, 15 bp, Homo sapiens
cattttgaatcatgc

SEQ ID NO: 1120710 - DNA, 15 bp, Homo sapiens
gcattttgaatcatg

SEQ ID NO: 1120711 - DNA, 15 bp, Homo sapiens
agcattttgaatcat

SEQ ID NO: 1120712 - DNA, 15 bp, Homo sapiens
tagcattttgaatca

SEQ ID NO: 1120713 - DNA, 15 bp, Homo sapiens
atagcattttgaatc

SEQ ID NO: 1120714 - DNA, 15 bp, Homo sapiens
aatagcattttgaat

SEQ ID NO: 1120715 - DNA, 15 bp, Homo sapiens
aaatagcattttgaa

SEQ ID NO: 1120716 - DNA, 15 bp, Homo sapiens
gaaatagcattttga

SEQ ID NO: 1120717 - DNA, 15 bp, Homo sapiens
tgaaatagcattttg

SEQ ID NO: 1120718 - DNA, 15 bp, Homo sapiens
gtgaaatagcatttt

SEQ ID NO: 1120719 - DNA, 15 bp, Homo sapiens
tgtgaaatagcattt

SEQ ID NO: 1120720 - DNA, 15 bp, Homo sapiens
gtgtgaaatagcatt

SEQ ID NO: 1120721 - DNA, 15 bp, Homo sapiens
tgtgtgaaatagcat

SEQ ID NO: 1120722 - DNA, 15 bp, Homo sapiens
atgtgtgaaatagca

SEQ ID NO: 1120723 - DNA, 15 bp, Homo sapiens
aatgtgtgaaatagc

SEQ ID NO: 1120724 - DNA, 15 bp, Homo sapiens
aaatgtgtgaaatag

SEQ ID NO: 1120725 - DNA, 15 bp, Homo sapiens
aaaatgtgtgaaata

SEQ ID NO: 1120726 - DNA, 15 bp, Homo sapiens
aaaaatgtgtgaaat

SEQ ID NO: 1120727 - DNA, 15 bp, Homo sapiens
taaaaatgtgtgaaa

SEQ ID NO: 1120728 - DNA, 15 bp, Homo sapiens
ataaaaatgtgtgaa

SEQ ID NO: 1120729 - DNA, 15 bp, Homo sapiens
aataaaaatgtgtga

SEQ ID NO: 1120730 - DNA, 15 bp, Homo sapiens
caataaaaatgtgtg

SEQ ID NO: 1120731 - DNA, 15 bp, Homo sapiens
tcaataaaaatgtgt

SEQ ID NO: 1120732 - DNA, 15 bp, Homo sapiens
ttcaataaaaatgtg

SEQ ID NO: 1120733 - DNA, 15 bp, Homo sapiens
gttcaataaaaatgt

SEQ ID NO: 1120734 - DNA, 15 bp, Homo sapiens
tgttcaataaaaatg

SEQ ID NO: 1120735 - DNA, 15 bp, Homo sapiens
gtgttcaataaaaat

SEQ ID NO: 1120736 - DNA, 15 bp, Homo sapiens
ggtgttcaataaaaa

SEQ ID NO: 1120737 - DNA, 15 bp, Homo sapiens
aggtgttcaataaaa

SEQ ID NO: 1120738 - DNA, 15 bp, Homo sapiens
aaggtgttcaataaa

SEQ ID NO: 1120739 - DNA, 15 bp, Homo sapiens
aaaggtgttcaataa

SEQ ID NO: 1120740 - DNA, 15 bp, Homo sapiens
aaaaggtgttcaata

SEQ ID NO: 1120741 - DNA, 15 bp, Homo sapiens
aaaaaggtgttcaat

SEQ ID NO: 1120742 - DNA, 15 bp, Homo sapiens
taaaaaggtgttcaa

SEQ ID NO: 1120743 - DNA, 15 bp, Homo sapiens
ttaaaaaggtgttca

SEQ ID NO: 1120744 - DNA, 15 bp, Homo sapiens
attaaaaaggtgttc

SEQ ID NO: 1120745 - DNA, 15 bp, Homo sapiens
aattaaaaaggtgtt

SEQ ID NO: 1120746 - DNA, 15 bp, Homo sapiens
taattaaaaaggtgt

SEQ ID NO: 1120747 - DNA, 15 bp, Homo sapiens
ttaattaaaaaggtg

SEQ ID NO: 1120748 - DNA, 15 bp, Homo sapiens
tttaattaaaaaggt

SEQ ID NO: 1120749 - DNA, 15 bp, Homo sapiens
gtttaattaaaaagg

SEQ ID NO: 1120750 - DNA, 15 bp, Homo sapiens
tgtttaattaaaaag

SEQ ID NO: 1120751 - DNA, 15 bp, Homo sapiens
gtgtttaattaaaaa

SEQ ID NO: 1120752 - DNA, 15 bp, Homo sapiens
tgtgtttaattaaaa

SEQ ID NO: 1120753 - DNA, 15 bp, Homo sapiens
gtgtgtttaattaaa

SEQ ID NO: 1120754 - DNA, 15 bp, Homo sapiens
agtgtgtttaattaa

SEQ ID NO: 1120755 - DNA, 15 bp, Homo sapiens
aagtgtgtttaatta

SEQ ID NO: 1120756 - DNA, 15 bp, Homo sapiens
aaagtgtgtttaatt

SEQ ID NO: 1120757 - DNA, 15 bp, Homo sapiens
taaagtgtgtttaat

SEQ ID NO: 1120758 - DNA, 15 bp, Homo sapiens
ataaagtgtgtttaa

SEQ ID NO: 1120759 - DNA, 15 bp, Homo sapiens
aataaagtgtgttta

SEQ ID NO: 1120760 - DNA, 15 bp, Homo sapiens
gaataaagtgtgttt

SEQ ID NO: 1120761 - DNA, 15 bp, Homo sapiens
tgaataaagtgtgtt

SEQ ID NO: 1120762 - DNA, 15 bp, Homo sapiens
ctgaataaagtgtgt

SEQ ID NO: 1120763 - DNA, 15 bp, Homo sapiens
cctgaataaagtgtg

SEQ ID NO: 1120764 - DNA, 15 bp, Homo sapiens
acctgaataaagtgt

SEQ ID NO: 1120765 - DNA, 15 bp, Homo sapiens
tacctgaataaagtg

SEQ ID NO: 1120766 - DNA, 15 bp, Homo sapiens
gtacctgaataaagt

SEQ ID NO: 1120767 - DNA, 15 bp, Homo sapiens
agtacctgaataaag

SEQ ID NO: 1120768 - DNA, 15 bp, Homo sapiens
cagtacctgaataaa

SEQ ID NO: 1120769 - DNA, 15 bp, Homo sapiens
acagtacctgaataa

SEQ ID NO: 1120770 - DNA, 15 bp, Homo sapiens
cacagtacctgaata

SEQ ID NO: 1120771 - DNA, 15 bp, Homo sapiens
gcacagtacctgaat

SEQ ID NO: 1120772 - DNA, 15 bp, Homo sapiens
agcacagtacctgaa

SEQ ID NO: 1120773 - DNA, 15 bp, Homo sapiens
tagcacagtacctga

SEQ ID NO: 1120774 - DNA, 15 bp, Homo sapiens
gtagcacagtacctg

SEQ ID NO: 1120775 - DNA, 15 bp, Homo sapiens
tgtagcacagtacct

SEQ ID NO: 1120776 - DNA, 15 bp, Homo sapiens
atgtagcacagtacc

SEQ ID NO: 1120777 - DNA, 15 bp, Homo sapiens
catgtagcacagtac

SEQ ID NO: 1120778 - DNA, 15 bp, Homo sapiens
acatgtagcacagta

SEQ ID NO: 1120779 - DNA, 15 bp, Homo sapiens
aacatgtagcacagt

SEQ ID NO: 1120780 - DNA, 15 bp, Homo sapiens
gaacatgtagcacag

SEQ ID NO: 1120781 - DNA, 15 bp, Homo sapiens
agaacatgtagcaca

SEQ ID NO: 1120782 - DNA, 15 bp, Homo sapiens
aagaacatgtagcac

SEQ ID NO: 1120783 - DNA, 15 bp, Homo sapiens
aaagaacatgtagca

SEQ ID NO: 1120784 - DNA, 15 bp, Homo sapiens
taaagaacatgtagc

SEQ ID NO: 1120785 - DNA, 15 bp, Homo sapiens
ataaagaacatgtag

SEQ ID NO: 1120786 - DNA, 15 bp, Homo sapiens
tataaagaacatgta

SEQ ID NO: 1120787 - DNA, 15 bp, Homo sapiens
ttataaagaacatgt

SEQ ID NO: 1120788 - DNA, 15 bp, Homo sapiens
tttataaagaacatg

SEQ ID NO: 1120789 - DNA, 15 bp, Homo sapiens
ctttataaagaacat

SEQ ID NO: 1120790 - DNA, 15 bp, Homo sapiens
actttataaagaaca

SEQ ID NO: 1120791 - DNA, 15 bp, Homo sapiens
gactttataaagaac

SEQ ID NO: 1120792 - DNA, 15 bp, Homo sapiens
agactttataaagaa

SEQ ID NO: 1120793 - DNA, 15 bp, Homo sapiens
cagactttataaaga

SEQ ID NO: 1120794 - DNA, 15 bp, Homo sapiens
tcagactttataaag

SEQ ID NO: 1120795 - DNA, 15 bp, Homo sapiens
atcagactttataaa

SEQ ID NO: 1120796 - DNA, 15 bp, Homo sapiens
tatcagactttataa

SEQ ID NO: 1120797 - DNA, 15 bp, Homo sapiens
ttatcagactttata

SEQ ID NO: 1120798 - DNA, 15 bp, Homo sapiens
cttatcagactttat

SEQ ID NO: 1120799 - DNA, 15 bp, Homo sapiens
tcttatcagacttta

SEQ ID NO: 1120800 - DNA, 15 bp, Homo sapiens
atcttatcagacttt

SEQ ID NO: 1120801 - DNA, 15 bp, Homo sapiens
aatcttatcagactt

SEQ ID NO: 1120802 - DNA, 15 bp, Homo sapiens
aaatcttatcagact

SEQ ID NO: 1120803 - DNA, 15 bp, Homo sapiens
gaaatcttatcagac

SEQ ID NO: 1120804 - DNA, 15 bp, Homo sapiens
agaaatcttatcaga

SEQ ID NO: 1120805 - DNA, 15 bp, Homo sapiens
tagaaatcttatcag

SEQ ID NO: 1120806 - DNA, 15 bp, Homo sapiens
atagaaatcttatca

SEQ ID NO: 1120807 - DNA, 15 bp, Homo sapiens
aatagaaatcttatc

SEQ ID NO: 1120808 - DNA, 15 bp, Homo sapiens
aaatagaaatcttat

SEQ ID NO: 1120809 - DNA, 15 bp, Homo sapiens
caaatagaaatctta

SEQ ID NO: 1120810 - DNA, 15 bp, Homo sapiens
ccaaatagaaatctt

SEQ ID NO: 1120811 - DNA, 15 bp, Homo sapiens
accaaatagaaatct

SEQ ID NO: 1120812 - DNA, 15 bp, Homo sapiens
gaccaaatagaaatc

SEQ ID NO: 1120813 - DNA, 15 bp, Homo sapiens
tgaccaaatagaaat

SEQ ID NO: 1120814 - DNA, 15 bp, Homo sapiens
ttgaccaaatagaaa

SEQ ID NO: 1120815 - DNA, 15 bp, Homo sapiens
tttgaccaaatagaa

SEQ ID NO: 1120816 - DNA, 15 bp, Homo sapiens
gtttgaccaaataga

SEQ ID NO: 1120817 - DNA, 15 bp, Homo sapiens
tgtttgaccaaatag

SEQ ID NO: 1120818 - DNA, 15 bp, Homo sapiens
ctgtttgaccaaata

SEQ ID NO: 1120819 - DNA, 15 bp, Homo sapiens
cctgtttgaccaaat

SEQ ID NO: 1120820 - DNA, 15 bp, Homo sapiens
gcctgtttgaccaaa

SEQ ID NO: 1120821 - DNA, 15 bp, Homo sapiens
agcctgtttgaccaa

SEQ ID NO: 1120822 - DNA, 15 bp, Homo sapiens
cagcctgtttgacca

SEQ ID NO: 1120823 - DNA, 15 bp, Homo sapiens
ccagcctgtttgacc

SEQ ID NO: 1120824 - DNA, 15 bp, Homo sapiens
cccagcctgtttgac

SEQ ID NO: 1120825 - DNA, 15 bp, Homo sapiens
gcccagcctgtttga

SEQ ID NO: 1120826 - DNA, 15 bp, Homo sapiens
tgcccagcctgtttg

SEQ ID NO: 1120827 - DNA, 15 bp, Homo sapiens
gtgcccagcctgttt

SEQ ID NO: 1120828 - DNA, 15 bp, Homo sapiens
tgtgcccagcctgtt

SEQ ID NO: 1120829 - DNA, 15 bp, Homo sapiens
ctgtgcccagcctgt

SEQ ID NO: 1120830 - DNA, 15 bp, Homo sapiens
actgtgcccagcctg

SEQ ID NO: 1120831 - DNA, 15 bp, Homo sapiens
tgccttggccttcca

SEQ ID NO: 1120832 - DNA, 15 bp, Homo sapiens
ctgccttggccttcc

SEQ ID NO: 1120833 - DNA, 15 bp, Homo sapiens
cctgccttggccttc

SEQ ID NO: 1120834 - DNA, 15 bp, Homo sapiens
acctgccttggcctt

SEQ ID NO: 1120835 - DNA, 15 bp, Homo sapiens
cacctgccttggcct

SEQ ID NO: 1120836 - DNA, 15 bp, Homo sapiens
ccacctgccttggcc

SEQ ID NO: 1120837 - DNA, 15 bp, Homo sapiens
tccacctgccttggc

SEQ ID NO: 1120838 - DNA, 15 bp, Homo sapiens
atccacctgccttgg

SEQ ID NO: 1120839 - DNA, 15 bp, Homo sapiens
aatccacctgccttg

SEQ ID NO: 1120840 - DNA, 15 bp, Homo sapiens
caatccacctgcctt

SEQ ID NO: 1120841 - DNA, 15 bp, Homo sapiens
gcaatccacctgcct

SEQ ID NO: 1120842 - DNA, 15 bp, Homo sapiens
agcaatccacctgcc

SEQ ID NO: 1120843 - DNA, 15 bp, Homo sapiens
aagcaatccacctgc

SEQ ID NO: 1120844 - DNA, 15 bp, Homo sapiens
caagcaatccacctg

SEQ ID NO: 1120845 - DNA, 15 bp, Homo sapiens
tcaagcaatccacct

SEQ ID NO: 1120846 - DNA, 15 bp, Homo sapiens
cctcaagcaatccac

SEQ ID NO: 1120847 - DNA, 15 bp, Homo sapiens
gcctcaagcaatcca

SEQ ID NO: 1120848 - DNA, 15 bp, Homo sapiens
aggttttgccatgtt

SEQ ID NO: 1120849 - DNA, 15 bp, Homo sapiens
gaggttttgccatgt

SEQ ID NO: 1120850 - DNA, 15 bp, Homo sapiens
tgaggttttgccatg

SEQ ID NO: 1120851 - DNA, 15 bp, Homo sapiens
atgaggttttgccat

SEQ ID NO: 1120852 - DNA, 15 bp, Homo sapiens
gatgaggttttgcca

SEQ ID NO: 1120853 - DNA, 15 bp, Homo sapiens
agatgaggttttgcc

SEQ ID NO: 1120854 - DNA, 15 bp, Homo sapiens
gagatgaggttttgc

SEQ ID NO: 1120855 - DNA, 15 bp, Homo sapiens
agagatgaggttttg

SEQ ID NO: 1120856 - DNA, 15 bp, Homo sapiens
tagagatgaggtttt

SEQ ID NO: 1120857 - DNA, 15 bp, Homo sapiens
tgtagagatgaggtt

SEQ ID NO: 1120858 - DNA, 15 bp, Homo sapiens
tttttgtagagatga

SEQ ID NO: 1120859 - DNA, 15 bp, Homo sapiens
atttttttgtagaga

SEQ ID NO: 1120860 - DNA, 15 bp, Homo sapiens
tatttttttgtagag

SEQ ID NO: 1120861 - DNA, 15 bp, Homo sapiens
gtatttttttgtaga

SEQ ID NO: 1120862 - DNA, 15 bp, Homo sapiens
tgtatttttttgtag

SEQ ID NO: 1120863 - DNA, 15 bp, Homo sapiens
ctgtatttttttgta

SEQ ID NO: 1120864 - DNA, 15 bp, Homo sapiens
tctgtatttttttgt

SEQ ID NO: 1120865 - DNA, 15 bp, Homo sapiens
ttctgtatttttttg

SEQ ID NO: 1120866 - DNA, 15 bp, Homo sapiens
tttctgtattttttt

SEQ ID NO: 1120867 - DNA, 15 bp, Homo sapiens
atttctgtatttttt

SEQ ID NO: 1120868 - DNA, 15 bp, Homo sapiens
aatttctgtattttt

SEQ ID NO: 1120869 - DNA, 15 bp, Homo sapiens
taatttctgtatttt

SEQ ID NO: 1120870 - DNA, 15 bp, Homo sapiens
ttaatttctgtattt

SEQ ID NO: 1120871 - DNA, 15 bp, Homo sapiens
gttaatttctgtatt

SEQ ID NO: 1120872 - DNA, 15 bp, Homo sapiens
ggttaatttctgtat

SEQ ID NO: 1120873 - DNA, 15 bp, Homo sapiens
tggttaatttctgta

SEQ ID NO: 1120874 - DNA, 15 bp, Homo sapiens
ctggttaatttctgt

SEQ ID NO: 1120875 - DNA, 15 bp, Homo sapiens
tctggttaatttctg

SEQ ID NO: 1120876 - DNA, 15 bp, Homo sapiens
gtctggttaatttct

SEQ ID NO: 1120877 - DNA, 15 bp, Homo sapiens
tgtctggttaatttc

SEQ ID NO: 1120878 - DNA, 15 bp, Homo sapiens
atgtctggttaattt

SEQ ID NO: 1120879 - DNA, 15 bp, Homo sapiens
catgtctggttaatt

SEQ ID NO: 1120880 - DNA, 15 bp, Homo sapiens
ccatgtctggttaat

SEQ ID NO: 1120881 - DNA, 15 bp, Homo sapiens
accatgtctggttaa

SEQ ID NO: 1120882 - DNA, 15 bp, Homo sapiens
caccatgtctggtta

SEQ ID NO: 1120883 - DNA, 15 bp, Homo sapiens
ccaccatgtctggtt

SEQ ID NO: 1120884 - DNA, 15 bp, Homo sapiens
accaccatgtctggt

SEQ ID NO: 1120885 - DNA, 15 bp, Homo sapiens
caccaccatgtctgg

SEQ ID NO: 1120886 - DNA, 15 bp, Homo sapiens
acaccaccatgtctg

SEQ ID NO: 1120887 - DNA, 15 bp, Homo sapiens
tacaccaccatgtct

SEQ ID NO: 1120888 - DNA, 15 bp, Homo sapiens
gtacaccaccatgtc

SEQ ID NO: 1120889 - DNA, 15 bp, Homo sapiens
tgtacaccaccatgt

SEQ ID NO: 1120890 - DNA, 15 bp, Homo sapiens
gtgtacaccaccatg

SEQ ID NO: 1120891 - DNA, 15 bp, Homo sapiens
ggtgtacaccaccat

SEQ ID NO: 1120892 - DNA, 15 bp, Homo sapiens
aggtgtacaccacca

SEQ ID NO: 1120893 - DNA, 15 bp, Homo sapiens
caggtgtacaccacc

SEQ ID NO: 1120894 - DNA, 15 bp, Homo sapiens
acaggtgtacaccac

SEQ ID NO: 1120895 - DNA, 15 bp, Homo sapiens
tacaggtgtacacca

SEQ ID NO: 1120896 - DNA, 15 bp, Homo sapiens
ctacaggtgtacacc

SEQ ID NO: 1120897 - DNA, 15 bp, Homo sapiens
actacaggtgtacac

SEQ ID NO: 1120898 - DNA, 15 bp, Homo sapiens
gactacaggtgtaca

SEQ ID NO: 1120899 - DNA, 15 bp, Homo sapiens
ggactacaggtgtac

SEQ ID NO: 1120900 - DNA, 15 bp, Homo sapiens
gggactacaggtgta

SEQ ID NO: 1120901 - DNA, 15 bp, Homo sapiens
atcaggtgatcctcc

SEQ ID NO: 1120902 - DNA, 15 bp, Homo sapiens
aatcaggtgatcctc

SEQ ID NO: 1120903 - DNA, 15 bp, Homo sapiens
gaatcaggtgatcct

SEQ ID NO: 1120904 - DNA, 15 bp, Homo sapiens
agaatcaggtgatcc

SEQ ID NO: 1120905 - DNA, 15 bp, Homo sapiens
cagaatcaggtgatc

SEQ ID NO: 1120906 - DNA, 15 bp, Homo sapiens
ccagaatcaggtgat

SEQ ID NO: 1120907 - DNA, 15 bp, Homo sapiens
cccagaatcaggtga

SEQ ID NO: 1120908 - DNA, 15 bp, Homo sapiens
ccccagaatcaggtg

SEQ ID NO: 1120909 - DNA, 15 bp, Homo sapiens
tccccagaatcaggt

SEQ ID NO: 1120910 - DNA, 15 bp, Homo sapiens
ctccccagaatcagg

SEQ ID NO: 1120911 - DNA, 15 bp, Homo sapiens
actccccagaatcag

SEQ ID NO: 1120912 - DNA, 15 bp, Homo sapiens
aactccccagaatca

SEQ ID NO: 1120913 - DNA, 15 bp, Homo sapiens
aaactccccagaatc

SEQ ID NO: 1120914 - DNA, 15 bp, Homo sapiens
caaactccccagaat

SEQ ID NO: 1120915 - DNA, 15 bp, Homo sapiens
tcaaactccccagaa

SEQ ID NO: 1120916 - DNA, 15 bp, Homo sapiens
ctcaaactccccaga

SEQ ID NO: 1120917 - DNA, 15 bp, Homo sapiens
cctcaaactccccag

SEQ ID NO: 1120918 - DNA, 15 bp, Homo sapiens
acctcaaactcccca

SEQ ID NO: 1120919 - DNA, 15 bp, Homo sapiens
aacctcaaactcccc

SEQ ID NO: 1120920 - DNA, 15 bp, Homo sapiens
taacctcaaactccc

SEQ ID NO: 1120921 - DNA, 15 bp, Homo sapiens
gtaacctcaaactcc

SEQ ID NO: 1120922 - DNA, 15 bp, Homo sapiens
tgtaacctcaaactc

SEQ ID NO: 1120923 - DNA, 15 bp, Homo sapiens
ctgtaacctcaaact

SEQ ID NO: 1120924 - DNA, 15 bp, Homo sapiens
gctgtaacctcaaac

SEQ ID NO: 1120925 - DNA, 15 bp, Homo sapiens
cgctgtaacctcaaa

SEQ ID NO: 1120926 - DNA, 15 bp, Homo sapiens
tcgctgtaacctcaa

SEQ ID NO: 1120927 - DNA, 15 bp, Homo sapiens
ctcgctgtaacctca

SEQ ID NO: 1120928 - DNA, 15 bp, Homo sapiens
gctcgctgtaacctc

SEQ ID NO: 1120929 - DNA, 15 bp, Homo sapiens
agctcgctgtaacct

SEQ ID NO: 1120930 - DNA, 15 bp, Homo sapiens
cagctcgctgtaacc

SEQ ID NO: 1120931 - DNA, 15 bp, Homo sapiens
acagctcgctgtaac

SEQ ID NO: 1120932 - DNA, 15 bp, Homo sapiens
cacagctcgctgtaa

SEQ ID NO: 1120933 - DNA, 15 bp, Homo sapiens
tcacagctcgctgta

SEQ ID NO: 1120934 - DNA, 15 bp, Homo sapiens
atcacagctcgctgt

SEQ ID NO: 1120935 - DNA, 15 bp, Homo sapiens
gatcacagctcgctg

SEQ ID NO: 1120936 - DNA, 15 bp, Homo sapiens
tgatcacagctcgct

SEQ ID NO: 1120937 - DNA, 15 bp, Homo sapiens
atgatcacagctcgc

SEQ ID NO: 1120938 - DNA, 15 bp, Homo sapiens
catgatcacagctcg

SEQ ID NO: 1120939 - DNA, 15 bp, Homo sapiens
gcatgatcacagctc

SEQ ID NO: 1120940 - DNA, 15 bp, Homo sapiens
agcatgatcacagct

SEQ ID NO: 1120941 - DNA, 15 bp, Homo sapiens
tagcatgatcacagc

SEQ ID NO: 1120942 - DNA, 15 bp, Homo sapiens
gtagcatgatcacag

SEQ ID NO: 1120943 - DNA, 15 bp, Homo sapiens
agtagcatgatcaca

SEQ ID NO: 1120944 - DNA, 15 bp, Homo sapiens
cagtagcatgatcac

SEQ ID NO: 1120945 - DNA, 15 bp, Homo sapiens
gcagtagcatgatca

SEQ ID NO: 1120946 - DNA, 15 bp, Homo sapiens
tgcagtagcatgatc

SEQ ID NO: 1120947 - DNA, 15 bp, Homo sapiens
gtgcagtagcatgat

SEQ ID NO: 1120948 - DNA, 15 bp, Homo sapiens
agtgcagtagcatga

SEQ ID NO: 1120949 - DNA, 15 bp, Homo sapiens
gagtgcagtagcatg

SEQ ID NO: 1120950 - DNA, 15 bp, Homo sapiens
ggagtgcagtagcat

SEQ ID NO: 1120951 - DNA, 15 bp, Homo sapiens
tggagtgcagtagca

SEQ ID NO: 1120952 - DNA, 15 bp, Homo sapiens
ctggagtgcagtagc

SEQ ID NO: 1120953 - DNA, 15 bp, Homo sapiens
gctggagtgcagtag

SEQ ID NO: 1120954 - DNA, 15 bp, Homo sapiens
ggctggagtgcagta

SEQ ID NO: 1120955 - DNA, 15 bp, Homo sapiens
ttcaggctggagtgc

SEQ ID NO: 1120956 - DNA, 15 bp, Homo sapiens
attcaggctggagtg

SEQ ID NO: 1120957 - DNA, 15 bp, Homo sapiens
cattcaggctggagt

SEQ ID NO: 1120958 - DNA, 15 bp, Homo sapiens
tcattcaggctggag

SEQ ID NO: 1120959 - DNA, 15 bp, Homo sapiens
atcattcaggctgga

SEQ ID NO: 1120960 - DNA, 15 bp, Homo sapiens
catcattcaggctgg

SEQ ID NO: 1120961 - DNA, 15 bp, Homo sapiens
ccatcattcaggctg

SEQ ID NO: 1120962 - DNA, 15 bp, Homo sapiens
tccatcattcaggct

SEQ ID NO: 1120963 - DNA, 15 bp, Homo sapiens
ctccatcattcaggc

SEQ ID NO: 1120964 - DNA, 15 bp, Homo sapiens
actccatcattcagg

SEQ ID NO: 1120965 - DNA, 15 bp, Homo sapiens
cactccatcattcag

SEQ ID NO: 1120966 - DNA, 15 bp, Homo sapiens
tcactccatcattca

SEQ ID NO: 1120967 - DNA, 15 bp, Homo sapiens
ctcactccatcattc

SEQ ID NO: 1120968 - DNA, 15 bp, Homo sapiens
tctcactccatcatt

SEQ ID NO: 1120969 - DNA, 15 bp, Homo sapiens
gtctcactccatcat

SEQ ID NO: 1120970 - DNA, 15 bp, Homo sapiens
gggtctcactccatc

SEQ ID NO: 1120971 - DNA, 15 bp, Homo sapiens
agggtctcactccat

SEQ ID NO: 1120972 - DNA, 15 bp, Homo sapiens
cagggtctcactcca

SEQ ID NO: 1120973 - DNA, 15 bp, Homo sapiens
acagggtctcactcc

SEQ ID NO: 1120974 - DNA, 15 bp, Homo sapiens
tgttttttgagacag

SEQ ID NO: 1120975 - DNA, 15 bp, Homo sapiens
ttgttttttgagaca

SEQ ID NO: 1120976 - DNA, 15 bp, Homo sapiens
tttgttttttgagac

SEQ ID NO: 1120977 - DNA, 15 bp, Homo sapiens
atttgttttttgaga

SEQ ID NO: 1120978 - DNA, 15 bp, Homo sapiens
aatttgttttttgag

SEQ ID NO: 1120979 - DNA, 15 bp, Homo sapiens
taatttgttttttga

SEQ ID NO: 1120980 - DNA, 15 bp, Homo sapiens
ctaatttgttttttg

SEQ ID NO: 1120981 - DNA, 15 bp, Homo sapiens
actaatttgtttttt

SEQ ID NO: 1120982 - DNA, 15 bp, Homo sapiens
cactaatttgttttt

SEQ ID NO: 1120983 - DNA, 15 bp, Homo sapiens
acactaatttgtttt

SEQ ID NO: 1120984 - DNA, 15 bp, Homo sapiens
aacactaatttgttt

SEQ ID NO: 1120985 - DNA, 15 bp, Homo sapiens
caacactaatttgtt

SEQ ID NO: 1120986 - DNA, 15 bp, Homo sapiens
tcaacactaatttgt

SEQ ID NO: 1120987 - DNA, 15 bp, Homo sapiens
ttcaacactaatttg

SEQ ID NO: 1120988 - DNA, 15 bp, Homo sapiens
tttcaacactaattt

SEQ ID NO: 1120989 - DNA, 15 bp, Homo sapiens
ttttcaacactaatt

SEQ ID NO: 1120990 - DNA, 15 bp, Homo sapiens
cttttcaacactaat

SEQ ID NO: 1120991 - DNA, 15 bp, Homo sapiens
acttttcaacactaa

SEQ ID NO: 1120992 - DNA, 15 bp, Homo sapiens
aacttttcaacacta

SEQ ID NO: 1120993 - DNA, 15 bp, Homo sapiens
taacttttcaacact

SEQ ID NO: 1120994 - DNA, 15 bp, Homo sapiens
ataacttttcaacac

SEQ ID NO: 1120995 - DNA, 15 bp, Homo sapiens
tataacttttcaaca

SEQ ID NO: 1120996 - DNA, 15 bp, Homo sapiens
ctataacttttcaac

SEQ ID NO: 1120997 - DNA, 15 bp, Homo sapiens
tctataacttttcaa

SEQ ID NO: 1120998 - DNA, 15 bp, Homo sapiens
ctctataacttttca

SEQ ID NO: 1120999 - DNA, 15 bp, Homo sapiens
gctctataacttttc

SEQ ID NO: 1121000 - DNA, 15 bp, Homo sapiens
tgctctataactttt

SEQ ID NO: 1121001 - DNA, 15 bp, Homo sapiens
atgctctataacttt

SEQ ID NO: 1121002 - DNA, 15 bp, Homo sapiens
aatgctctataactt

SEQ ID NO: 1121003 - DNA, 15 bp, Homo sapiens
taatgctctataact

SEQ ID NO: 1121004 - DNA, 15 bp, Homo sapiens
ataatgctctataac

SEQ ID NO: 1121005 - DNA, 15 bp, Homo sapiens
aataatgctctataa

SEQ ID NO: 1121006 - DNA, 15 bp, Homo sapiens
gaataatgctctata

SEQ ID NO: 1121007 - DNA, 15 bp, Homo sapiens
agaataatgctctat

SEQ ID NO: 1121008 - DNA, 15 bp, Homo sapiens
tagaataatgctcta

SEQ ID NO: 1121009 - DNA, 15 bp, Homo sapiens
ctagaataatgctct

SEQ ID NO: 1121010 - DNA, 15 bp, Homo sapiens
tctagaataatgctc

SEQ ID NO: 1121011 - DNA, 15 bp, Homo sapiens
ctctagaataatgct

SEQ ID NO: 1121012 - DNA, 15 bp, Homo sapiens
tctctagaataatgc

SEQ ID NO: 1121013 - DNA, 15 bp, Homo sapiens
atctctagaataatg

SEQ ID NO: 1121014 - DNA, 15 bp, Homo sapiens
aatctctagaataat

SEQ ID NO: 1121015 - DNA, 15 bp, Homo sapiens
taatctctagaataa

SEQ ID NO: 1121016 - DNA, 15 bp, Homo sapiens
ttaatctctagaata

SEQ ID NO: 1121017 - DNA, 15 bp, Homo sapiens
gttaatctctagaat

SEQ ID NO: 1121018 - DNA, 15 bp, Homo sapiens
agttaatctctagaa

SEQ ID NO: 1121019 - DNA, 15 bp, Homo sapiens
gagttaatctctaga

SEQ ID NO: 1121020 - DNA, 15 bp, Homo sapiens
ggagttaatctctag

SEQ ID NO: 1121021 - DNA, 15 bp, Homo sapiens
gggagttaatctcta

SEQ ID NO: 1121022 - DNA, 15 bp, Homo sapiens
tgggagttaatctct

SEQ ID NO: 1121023 - DNA, 15 bp, Homo sapiens
ctgggagttaatctc

SEQ ID NO: 1121024 - DNA, 15 bp, Homo sapiens
actgggagttaatct

SEQ ID NO: 1121025 - DNA, 15 bp, Homo sapiens
cactgggagttaatc

SEQ ID NO: 1121026 - DNA, 15 bp, Homo sapiens
tcactgggagttaat

SEQ ID NO: 1121027 - DNA, 15 bp, Homo sapiens
ttcactgggagttaa

SEQ ID NO: 1121028 - DNA, 15 bp, Homo sapiens
tttcactgggagtta

SEQ ID NO: 1121029 - DNA, 15 bp, Homo sapiens
ttttcactgggagtt

SEQ ID NO: 1121030 - DNA, 15 bp, Homo sapiens
cttttcactgggagt

SEQ ID NO: 1121031 - DNA, 15 bp, Homo sapiens
tcttttcactgggag

SEQ ID NO: 1121032 - DNA, 15 bp, Homo sapiens
ttcttttcactggga

SEQ ID NO: 1121033 - DNA, 15 bp, Homo sapiens
tttcttttcactggg

SEQ ID NO: 1121034 - DNA, 15 bp, Homo sapiens
ttttcttttcactgg

SEQ ID NO: 1121035 - DNA, 15 bp, Homo sapiens
tttttcttttcactg

SEQ ID NO: 1121036 - DNA, 15 bp, Homo sapiens
gtttttcttttcact

SEQ ID NO: 1121037 - DNA, 15 bp, Homo sapiens
ggtttttcttttcac

SEQ ID NO: 1121038 - DNA, 15 bp, Homo sapiens
gggtttttcttttca

SEQ ID NO: 1121039 - DNA, 15 bp, Homo sapiens
tgggtttttcttttc

SEQ ID NO: 1121040 - DNA, 15 bp, Homo sapiens
ttgggtttttctttt

SEQ ID NO: 1121041 - DNA, 15 bp, Homo sapiens
tttgggtttttcttt

SEQ ID NO: 1121042 - DNA, 15 bp, Homo sapiens
atttgggtttttctt

SEQ ID NO: 1121043 - DNA, 15 bp, Homo sapiens
catttgggtttttct

SEQ ID NO: 1121044 - DNA, 15 bp, Homo sapiens
ccatttgggtttttc

SEQ ID NO: 1121045 - DNA, 15 bp, Homo sapiens
gccatttgggttttt

SEQ ID NO: 1121046 - DNA, 15 bp, Homo sapiens
ggccatttgggtttt

SEQ ID NO: 1121047 - DNA, 15 bp, Homo sapiens
tggccatttgggttt

SEQ ID NO: 1121048 - DNA, 15 bp, Homo sapiens
ttggccatttgggtt

SEQ ID NO: 1121049 - DNA, 15 bp, Homo sapiens
tttggccatttgggt

SEQ ID NO: 1121050 - DNA, 15 bp, Homo sapiens
ttttggccatttggg

SEQ ID NO: 1121051 - DNA, 15 bp, Homo sapiens
attttggccatttgg

SEQ ID NO: 1121052 - DNA, 15 bp, Homo sapiens
tattttggccatttg

SEQ ID NO: 1121053 - DNA, 15 bp, Homo sapiens
ttattttggccattt

SEQ ID NO: 1121054 - DNA, 15 bp, Homo sapiens
attattttggccatt

SEQ ID NO: 1121055 - DNA, 15 bp, Homo sapiens
tattattttggccat

SEQ ID NO: 1121056 - DNA, 15 bp, Homo sapiens
gtattattttggcca

SEQ ID NO: 1121057 - DNA, 15 bp, Homo sapiens
tgtattattttggcc

SEQ ID NO: 1121058 - DNA, 15 bp, Homo sapiens
ctgtattattttggc

SEQ ID NO: 1121059 - DNA, 15 bp, Homo sapiens
actgtattattttgg

SEQ ID NO: 1121060 - DNA, 15 bp, Homo sapiens
aactgtattattttg

SEQ ID NO: 1121061 - DNA, 15 bp, Homo sapiens
caactgtattatttt

SEQ ID NO: 1121062 - DNA, 15 bp, Homo sapiens
acaactgtattattt

SEQ ID NO: 1121063 - DNA, 15 bp, Homo sapiens
gacaactgtattatt

SEQ ID NO: 1121064 - DNA, 15 bp, Homo sapiens
ggacaactgtattat

SEQ ID NO: 1121065 - DNA, 15 bp, Homo sapiens
tggacaactgtatta

SEQ ID NO: 1121066 - DNA, 15 bp, Homo sapiens
ttggacaactgtatt

SEQ ID NO: 1121067 - DNA, 15 bp, Homo sapiens
tttggacaactgtat

SEQ ID NO: 1121068 - DNA, 15 bp, Homo sapiens
ttttggacaactgta

SEQ ID NO: 1121069 - DNA, 15 bp, Homo sapiens
attttggacaactgt

SEQ ID NO: 1121070 - DNA, 15 bp, Homo sapiens
cattttggacaactg

SEQ ID NO: 1121071 - DNA, 15 bp, Homo sapiens
acattttggacaact

SEQ ID NO: 1121072 - DNA, 15 bp, Homo sapiens
tacattttggacaac

SEQ ID NO: 1121073 - DNA, 15 bp, Homo sapiens
ttacattttggacaa

SEQ ID NO: 1121074 - DNA, 15 bp, Homo sapiens
attacattttggaca

SEQ ID NO: 1121075 - DNA, 15 bp, Homo sapiens
aattacattttggac

SEQ ID NO: 1121076 - DNA, 15 bp, Homo sapiens
aaattacattttgga

SEQ ID NO: 1121077 - DNA, 15 bp, Homo sapiens
aaaattacattttgg

SEQ ID NO: 1121078 - DNA, 15 bp, Homo sapiens
caaaattacattttg

SEQ ID NO: 1121079 - DNA, 15 bp, Homo sapiens
acaaaattacatttt

SEQ ID NO: 1121080 - DNA, 15 bp, Homo sapiens
aacaaaattacattt

SEQ ID NO: 1121081 - DNA, 15 bp, Homo sapiens
aaacaaaattacatt

SEQ ID NO: 1121082 - DNA, 15 bp, Homo sapiens
taaacaaaattacat

SEQ ID NO: 1121083 - DNA, 15 bp, Homo sapiens
ataaacaaaattaca

SEQ ID NO: 1121084 - DNA, 15 bp, Homo sapiens
aataaacaaaattac

SEQ ID NO: 1121085 - DNA, 15 bp, Homo sapiens
gaataaacaaaatta

SEQ ID NO: 1121086 - DNA, 15 bp, Homo sapiens
agaataaacaaaatt

SEQ ID NO: 1121087 - DNA, 15 bp, Homo sapiens
aaagaataaacaaaa

SEQ ID NO: 1121088 - DNA, 15 bp, Homo sapiens
taaagaataaacaaa

SEQ ID NO: 1121089 - DNA, 15 bp, Homo sapiens
ttaaagaataaacaa

SEQ ID NO: 1121090 - DNA, 15 bp, Homo sapiens
attaaagaataaaca

SEQ ID NO: 1121091 - DNA, 15 bp, Homo sapiens
aattaaagaataaac

SEQ ID NO: 1121092 - DNA, 15 bp, Homo sapiens
aaattaaagaataaa

SEQ ID NO: 1121093 - DNA, 15 bp, Homo sapiens
taaattaaagaataa

SEQ ID NO: 1121094 - DNA, 15 bp, Homo sapiens
ataaattaaagaata

SEQ ID NO: 1121095 - DNA, 15 bp, Homo sapiens
gataaattaaagaat

SEQ ID NO: 1121096 - DNA, 15 bp, Homo sapiens
agataaattaaagaa

SEQ ID NO: 1121097 - DNA, 15 bp, Homo sapiens
cagataaattaaaga

SEQ ID NO: 1121098 - DNA, 15 bp, Homo sapiens
ccagataaattaaag

SEQ ID NO: 1121099 - DNA, 15 bp, Homo sapiens
accagataaattaaa

SEQ ID NO: 1121100 - DNA, 15 bp, Homo sapiens
taccagataaattaa

SEQ ID NO: 1121101 - DNA, 15 bp, Homo sapiens
ataccagataaatta

SEQ ID NO: 1121102 - DNA, 15 bp, Homo sapiens
aataccagataaatt

SEQ ID NO: 1121103 - DNA, 15 bp, Homo sapiens
aaataccagataaat

SEQ ID NO: 1121104 - DNA, 15 bp, Homo sapiens
taaataccagataaa

SEQ ID NO: 1121105 - DNA, 15 bp, Homo sapiens
ataaataccagataa

SEQ ID NO: 1121106 - DNA, 15 bp, Homo sapiens
aataaataccagata

SEQ ID NO: 1121107 - DNA, 15 bp, Homo sapiens
caataaataccagat

SEQ ID NO: 1121108 - DNA, 15 bp, Homo sapiens
tcaataaataccaga

SEQ ID NO: 1121109 - DNA, 15 bp, Homo sapiens
ctcaataaataccag

SEQ ID NO: 1121110 - DNA, 15 bp, Homo sapiens
actcaataaatacca

SEQ ID NO: 1121111 - DNA, 15 bp, Homo sapiens
tactcaataaatacc

SEQ ID NO: 1121112 - DNA, 15 bp, Homo sapiens
gtactcaataaatac

SEQ ID NO: 1121113 - DNA, 15 bp, Homo sapiens
agtactcaataaata

SEQ ID NO: 1121114 - DNA, 15 bp, Homo sapiens
aagtactcaataaat

SEQ ID NO: 1121115 - DNA, 15 bp, Homo sapiens
taagtactcaataaa

SEQ ID NO: 1121116 - DNA, 15 bp, Homo sapiens
gtaagtactcaataa

SEQ ID NO: 1121117 - DNA, 15 bp, Homo sapiens
agtaagtactcaata

SEQ ID NO: 1121118 - DNA, 15 bp, Homo sapiens
tagtaagtactcaat

SEQ ID NO: 1121119 - DNA, 15 bp, Homo sapiens
gtagtaagtactcaa

SEQ ID NO: 1121120 - DNA, 15 bp, Homo sapiens
cgtagtaagtactca

SEQ ID NO: 1121121 - DNA, 15 bp, Homo sapiens
acgtagtaagtactc

SEQ ID NO: 1121122 - DNA, 15 bp, Homo sapiens
cacgtagtaagtact

SEQ ID NO: 1121123 - DNA, 15 bp, Homo sapiens
gcacgtagtaagtac

SEQ ID NO: 1121124 - DNA, 15 bp, Homo sapiens
ggcacgtagtaagta

SEQ ID NO: 1121125 - DNA, 15 bp, Homo sapiens
tggcacgtagtaagt

SEQ ID NO: 1121126 - DNA, 15 bp, Homo sapiens
atggcacgtagtaag

SEQ ID NO: 1121127 - DNA, 15 bp, Homo sapiens
catggcacgtagtaa

SEQ ID NO: 1121128 - DNA, 15 bp, Homo sapiens
gcatggcacgtagta

SEQ ID NO: 1121129 - DNA, 15 bp, Homo sapiens
agcatggcacgtagt

SEQ ID NO: 1121130 - DNA, 15 bp, Homo sapiens
aagcatggcacgtag

SEQ ID NO: 1121131 - DNA, 15 bp, Homo sapiens
aaagcatggcacgta

SEQ ID NO: 1121132 - DNA, 15 bp, Homo sapiens
caaagcatggcacgt

SEQ ID NO: 1121133 - DNA, 15 bp, Homo sapiens
tcaaagcatggcacg

SEQ ID NO: 1121134 - DNA, 15 bp, Homo sapiens
atcaaagcatggcac

SEQ ID NO: 1121135 - DNA, 15 bp, Homo sapiens
aatcaaagcatggca

SEQ ID NO: 1121136 - DNA, 15 bp, Homo sapiens
aaatcaaagcatggc

SEQ ID NO: 1121137 - DNA, 15 bp, Homo sapiens
aaaatcaaagcatgg

SEQ ID NO: 1121138 - DNA, 15 bp, Homo sapiens
aaaaatcaaagcatg

SEQ ID NO: 1121139 - DNA, 15 bp, Homo sapiens
taaaaatcaaagcat

SEQ ID NO: 1121140 - DNA, 15 bp, Homo sapiens
ataaaaatcaaagca

SEQ ID NO: 1121141 - DNA, 15 bp, Homo sapiens
tataaaaatcaaagc

SEQ ID NO: 1121142 - DNA, 15 bp, Homo sapiens
ttataaaaatcaaag

SEQ ID NO: 1121143 - DNA, 15 bp, Homo sapiens
tttataaaaatcaaa

SEQ ID NO: 1121144 - DNA, 15 bp, Homo sapiens
ttttataaaaatcaa

SEQ ID NO: 1121145 - DNA, 15 bp, Homo sapiens
attttataaaaatca

SEQ ID NO: 1121146 - DNA, 15 bp, Homo sapiens
tattttataaaaatc

SEQ ID NO: 1121147 - DNA, 15 bp, Homo sapiens
ctattttataaaaat

SEQ ID NO: 1121148 - DNA, 15 bp, Homo sapiens
gctattttataaaaa

SEQ ID NO: 1121149 - DNA, 15 bp, Homo sapiens
agctattttataaaa

SEQ ID NO: 1121150 - DNA, 15 bp, Homo sapiens
tagctattttataaa

SEQ ID NO: 1121151 - DNA, 15 bp, Homo sapiens
gtagctattttataa

SEQ ID NO: 1121152 - DNA, 15 bp, Homo sapiens
ggtagctattttata

SEQ ID NO: 1121153 - DNA, 15 bp, Homo sapiens
tggtagctattttat

SEQ ID NO: 1121154 - DNA, 15 bp, Homo sapiens
ttggtagctatttta

SEQ ID NO: 1121155 - DNA, 15 bp, Homo sapiens
gttggtagctatttt

SEQ ID NO: 1121156 - DNA, 15 bp, Homo sapiens
agttggtagctattt

SEQ ID NO: 1121157 - DNA, 15 bp, Homo sapiens
cagttggtagctatt

SEQ ID NO: 1121158 - DNA, 15 bp, Homo sapiens
tcagttggtagctat

SEQ ID NO: 1121159 - DNA, 15 bp, Homo sapiens
ttcagttggtagcta

SEQ ID NO: 1121160 - DNA, 15 bp, Homo sapiens
attcagttggtagct

SEQ ID NO: 1121161 - DNA, 15 bp, Homo sapiens
tattcagttggtagc

SEQ ID NO: 1121162 - DNA, 15 bp, Homo sapiens
ctattcagttggtag

SEQ ID NO: 1121163 - DNA, 15 bp, Homo sapiens
gctattcagttggta

SEQ ID NO: 1121164 - DNA, 15 bp, Homo sapiens
tgctattcagttggt

SEQ ID NO: 1121165 - DNA, 15 bp, Homo sapiens
ttgctattcagttgg

SEQ ID NO: 1121166 - DNA, 15 bp, Homo sapiens
gttgctattcagttg

SEQ ID NO: 1121167 - DNA, 15 bp, Homo sapiens
agttgctattcagtt

SEQ ID NO: 1121168 - DNA, 15 bp, Homo sapiens
gagttgctattcagt

SEQ ID NO: 1121169 - DNA, 15 bp, Homo sapiens
agagttgctattcag

SEQ ID NO: 1121170 - DNA, 15 bp, Homo sapiens
aagagttgctattca

SEQ ID NO: 1121171 - DNA, 15 bp, Homo sapiens
taagagttgctattc

SEQ ID NO: 1121172 - DNA, 15 bp, Homo sapiens
gtaagagttgctatt

SEQ ID NO: 1121173 - DNA, 15 bp, Homo sapiens
agtaagagttgctat

SEQ ID NO: 1121174 - DNA, 15 bp, Homo sapiens
aagtaagagttgcta

SEQ ID NO: 1121175 - DNA, 15 bp, Homo sapiens
aaagtaagagttgct

SEQ ID NO: 1121176 - DNA, 15 bp, Homo sapiens
taaagtaagagttgc

SEQ ID NO: 1121177 - DNA, 15 bp, Homo sapiens
ataaagtaagagttg

SEQ ID NO: 1121178 - DNA, 15 bp, Homo sapiens
cataaagtaagagtt

SEQ ID NO: 1121179 - DNA, 15 bp, Homo sapiens
acataaagtaagagt

SEQ ID NO: 1121180 - DNA, 15 bp, Homo sapiens
cacataaagtaagag

SEQ ID NO: 1121181 - DNA, 15 bp, Homo sapiens
acacataaagtaaga

SEQ ID NO: 1121182 - DNA, 15 bp, Homo sapiens
aacacataaagtaag

SEQ ID NO: 1121183 - DNA, 15 bp, Homo sapiens
caacacataaagtaa

SEQ ID NO: 1121184 - DNA, 15 bp, Homo sapiens
acaacacataaagta

SEQ ID NO: 1121185 - DNA, 15 bp, Homo sapiens
tacaacacataaagt

SEQ ID NO: 1121186 - DNA, 15 bp, Homo sapiens
ctacaacacataaag

SEQ ID NO: 1121187 - DNA, 15 bp, Homo sapiens
tctacaacacataaa

SEQ ID NO: 1121188 - DNA, 15 bp, Homo sapiens
atctacaacacataa

SEQ ID NO: 1121189 - DNA, 15 bp, Homo sapiens
aatctacaacacata

SEQ ID NO: 1121190 - DNA, 15 bp, Homo sapiens
aaatctacaacacat

SEQ ID NO: 1121191 - DNA, 15 bp, Homo sapiens
caaatctacaacaca

SEQ ID NO: 1121192 - DNA, 15 bp, Homo sapiens
ccaaatctacaacac

SEQ ID NO: 1121193 - DNA, 15 bp, Homo sapiens
accaaatctacaaca

SEQ ID NO: 1121194 - DNA, 15 bp, Homo sapiens
taccaaatctacaac

SEQ ID NO: 1121195 - DNA, 15 bp, Homo sapiens
ttaccaaatctacaa

SEQ ID NO: 1121196 - DNA, 15 bp, Homo sapiens
cttaccaaatctaca

SEQ ID NO: 1121197 - DNA, 15 bp, Homo sapiens
tcttaccaaatctac

SEQ ID NO: 1121198 - DNA, 15 bp, Homo sapiens
atcttaccaaatcta

SEQ ID NO: 1121199 - DNA, 15 bp, Homo sapiens
catcttaccaaatct

SEQ ID NO: 1121200 - DNA, 15 bp, Homo sapiens
ccatcttaccaaatc

SEQ ID NO: 1121201 - DNA, 15 bp, Homo sapiens
accatcttaccaaat

SEQ ID NO: 1121202 - DNA, 15 bp, Homo sapiens
caccatcttaccaaa

SEQ ID NO: 1121203 - DNA, 15 bp, Homo sapiens
acaccatcttaccaa

SEQ ID NO: 1121204 - DNA, 15 bp, Homo sapiens
aacaccatcttacca

SEQ ID NO: 1121205 - DNA, 15 bp, Homo sapiens
taacaccatcttacc

SEQ ID NO: 1121206 - DNA, 15 bp, Homo sapiens
aataacaccatctta

SEQ ID NO: 1121207 - DNA, 15 bp, Homo sapiens
gaataacaccatctt

SEQ ID NO: 1121208 - DNA, 15 bp, Homo sapiens
agaataacaccatct

SEQ ID NO: 1121209 - DNA, 15 bp, Homo sapiens
gagaataacaccatc

SEQ ID NO: 1121210 - DNA, 15 bp, Homo sapiens
tgagaataacaccat

SEQ ID NO: 1121211 - DNA, 15 bp, Homo sapiens
ctgagaataacacca

SEQ ID NO: 1121212 - DNA, 15 bp, Homo sapiens
actgagaataacacc

SEQ ID NO: 1121213 - DNA, 15 bp, Homo sapiens
aactgagaataacac

SEQ ID NO: 1121214 - DNA, 15 bp, Homo sapiens
caactgagaataaca

SEQ ID NO: 1121215 - DNA, 15 bp, Homo sapiens
gcaactgagaataac

SEQ ID NO: 1121216 - DNA, 15 bp, Homo sapiens
agcaactgagaataa

SEQ ID NO: 1121217 - DNA, 15 bp, Homo sapiens
tagcaactgagaata

SEQ ID NO: 1121218 - DNA, 15 bp, Homo sapiens
gtagcaactgagaat

SEQ ID NO: 1121219 - DNA, 15 bp, Homo sapiens
ggtagcaactgagaa

SEQ ID NO: 1121220 - DNA, 15 bp, Homo sapiens
tggtagcaactgaga

SEQ ID NO: 1121221 - DNA, 15 bp, Homo sapiens
ttggtagcaactgag

SEQ ID NO: 1121222 - DNA, 15 bp, Homo sapiens
tttggtagcaactga

SEQ ID NO: 1121223 - DNA, 15 bp, Homo sapiens
atttggtagcaactg

SEQ ID NO: 1121224 - DNA, 15 bp, Homo sapiens
gatttggtagcaact

SEQ ID NO: 1121225 - DNA, 15 bp, Homo sapiens
ggatttggtagcaac

SEQ ID NO: 1121226 - DNA, 15 bp, Homo sapiens
tggatttggtagcaa

SEQ ID NO: 1121227 - DNA, 15 bp, Homo sapiens
atggatttggtagca

SEQ ID NO: 1121228 - DNA, 15 bp, Homo sapiens
gatggatttggtagc

SEQ ID NO: 1121229 - DNA, 15 bp, Homo sapiens
tgatggatttggtag

SEQ ID NO: 1121230 - DNA, 15 bp, Homo sapiens
ttgatggatttggta

SEQ ID NO: 1121231 - DNA, 15 bp, Homo sapiens
cttgatggatttggt

SEQ ID NO: 1121232 - DNA, 15 bp, Homo sapiens
acttgatggatttgg

SEQ ID NO: 1121233 - DNA, 15 bp, Homo sapiens
tacttgatggatttg

SEQ ID NO: 1121234 - DNA, 15 bp, Homo sapiens
ttacttgatggattt

SEQ ID NO: 1121235 - DNA, 15 bp, Homo sapiens
tttacttgatggatt

SEQ ID NO: 1121236 - DNA, 15 bp, Homo sapiens
ttttacttgatggat

SEQ ID NO: 1121237 - DNA, 15 bp, Homo sapiens
tttttacttgatgga

SEQ ID NO: 1121238 - DNA, 15 bp, Homo sapiens
ttttttacttgatgg

SEQ ID NO: 1121239 - DNA, 15 bp, Homo sapiens
cttttttacttgatg

SEQ ID NO: 1121240 - DNA, 15 bp, Homo sapiens
tcttttttacttgat

SEQ ID NO: 1121241 - DNA, 15 bp, Homo sapiens
ctcttttttacttga

SEQ ID NO: 1121242 - DNA, 15 bp, Homo sapiens
tctcttttttacttg

SEQ ID NO: 1121243 - DNA, 15 bp, Homo sapiens
ttctcttttttactt

SEQ ID NO: 1121244 - DNA, 15 bp, Homo sapiens
attctcttttttact

SEQ ID NO: 1121245 - DNA, 15 bp, Homo sapiens
tattctcttttttac

SEQ ID NO: 1121246 - DNA, 15 bp, Homo sapiens
ctattctctttttta

SEQ ID NO: 1121247 - DNA, 15 bp, Homo sapiens
cctattctctttttt

SEQ ID NO: 1121248 - DNA, 15 bp, Homo sapiens
tcctattctcttttt

SEQ ID NO: 1121249 - DNA, 15 bp, Homo sapiens
atcctattctctttt

SEQ ID NO: 1121250 - DNA, 15 bp, Homo sapiens
aatcctattctcttt

SEQ ID NO: 1121251 - DNA, 15 bp, Homo sapiens
aaatcctattctctt

SEQ ID NO: 1121252 - DNA, 15 bp, Homo sapiens
taaatcctattctct

SEQ ID NO: 1121253 - DNA, 15 bp, Homo sapiens
gtaaatcctattctc

SEQ ID NO: 1121254 - DNA, 15 bp, Homo sapiens
tgtaaatcctattct

SEQ ID NO: 1121255 - DNA, 15 bp, Homo sapiens
ttgtaaatcctattc

SEQ ID NO: 1121256 - DNA, 15 bp, Homo sapiens
gttgtaaatcctatt

SEQ ID NO: 1121257 - DNA, 15 bp, Homo sapiens
ggttgtaaatcctat

SEQ ID NO: 1121258 - DNA, 15 bp, Homo sapiens
aggttgtaaatccta

SEQ ID NO: 1121259 - DNA, 15 bp, Homo sapiens
gaggttgtaaatcct

SEQ ID NO: 1121260 - DNA, 15 bp, Homo sapiens
agaggttgtaaatcc

SEQ ID NO: 1121261 - DNA, 15 bp, Homo sapiens
aagaggttgtaaatc

SEQ ID NO: 1121262 - DNA, 15 bp, Homo sapiens
taagaggttgtaaat

SEQ ID NO: 1121263 - DNA, 15 bp, Homo sapiens
ataagaggttgtaaa

SEQ ID NO: 1121264 - DNA, 15 bp, Homo sapiens
aataagaggttgtaa

SEQ ID NO: 1121265 - DNA, 15 bp, Homo sapiens
taataagaggttgta

SEQ ID NO: 1121266 - DNA, 15 bp, Homo sapiens
ataataagaggttgt

SEQ ID NO: 1121267 - DNA, 15 bp, Homo sapiens
gataataagaggttg

SEQ ID NO: 1121268 - DNA, 15 bp, Homo sapiens
cgataataagaggtt

SEQ ID NO: 1121269 - DNA, 15 bp, Homo sapiens
acgataataagaggt

SEQ ID NO: 1121270 - DNA, 15 bp, Homo sapiens
gacgataataagagg

SEQ ID NO: 1121271 - DNA, 15 bp, Homo sapiens
agacgataataagag

SEQ ID NO: 1121272 - DNA, 15 bp, Homo sapiens
aagacgataataaga

SEQ ID NO: 1121273 - DNA, 15 bp, Homo sapiens
aaagacgataataag

SEQ ID NO: 1121274 - DNA, 15 bp, Homo sapiens
aaaagacgataataa

SEQ ID NO: 1121275 - DNA, 15 bp, Homo sapiens
gaaaagacgataata

SEQ ID NO: 1121276 - DNA, 15 bp, Homo sapiens
ggaaaagacgataat

SEQ ID NO: 1121277 - DNA, 15 bp, Homo sapiens
gggaaaagacgataa

SEQ ID NO: 1121278 - DNA, 15 bp, Homo sapiens
ggggaaaagacgata

SEQ ID NO: 1121279 - DNA, 15 bp, Homo sapiens
tggggaaaagacgat

SEQ ID NO: 1121280 - DNA, 15 bp, Homo sapiens
gtggggaaaagacga

SEQ ID NO: 1121281 - DNA, 15 bp, Homo sapiens
agtggggaaaagacg

SEQ ID NO: 1121282 - DNA, 15 bp, Homo sapiens
aagtggggaaaagac

SEQ ID NO: 1121283 - DNA, 15 bp, Homo sapiens
gaagtggggaaaaga

SEQ ID NO: 1121284 - DNA, 15 bp, Homo sapiens
agaagtggggaaaag

SEQ ID NO: 1121285 - DNA, 15 bp, Homo sapiens
aagaagtggggaaaa

SEQ ID NO: 1121286 - DNA, 15 bp, Homo sapiens
aaagaagtggggaaa

SEQ ID NO: 1121287 - DNA, 15 bp, Homo sapiens
aaaagaagtggggaa

SEQ ID NO: 1121288 - DNA, 15 bp, Homo sapiens
caaaagaagtgggga

SEQ ID NO: 1121289 - DNA, 15 bp, Homo sapiens
ccaaaagaagtgggg

SEQ ID NO: 1121290 - DNA, 15 bp, Homo sapiens
accaaaagaagtggg

SEQ ID NO: 1121291 - DNA, 15 bp, Homo sapiens
aaccaaaagaagtgg

SEQ ID NO: 1121292 - DNA, 15 bp, Homo sapiens
aaaccaaaagaagtg

SEQ ID NO: 1121293 - DNA, 15 bp, Homo sapiens
caaaccaaaagaagt

SEQ ID NO: 1121294 - DNA, 15 bp, Homo sapiens
acaaaccaaaagaag

SEQ ID NO: 1121295 - DNA, 15 bp, Homo sapiens
cacaaaccaaaagaa

SEQ ID NO: 1121296 - DNA, 15 bp, Homo sapiens
ccacaaaccaaaaga

SEQ ID NO: 1121297 - DNA, 15 bp, Homo sapiens
tccacaaaccaaaag

SEQ ID NO: 1121298 - DNA, 15 bp, Homo sapiens
ctccacaaaccaaaa

SEQ ID NO: 1121299 - DNA, 15 bp, Homo sapiens
actccacaaaccaaa

SEQ ID NO: 1121300 - DNA, 15 bp, Homo sapiens
cactccacaaaccaa

SEQ ID NO: 1121301 - DNA, 15 bp, Homo sapiens
tcactccacaaacca

SEQ ID NO: 1121302 - DNA, 15 bp, Homo sapiens
ctcactccacaaacc

SEQ ID NO: 1121303 - DNA, 15 bp, Homo sapiens
cctcactccacaaac

SEQ ID NO: 1121304 - DNA, 15 bp, Homo sapiens
acctcactccacaaa

SEQ ID NO: 1121305 - DNA, 15 bp, Homo sapiens
aacctcactccacaa

SEQ ID NO: 1121306 - DNA, 15 bp, Homo sapiens
gaacctcactccaca

SEQ ID NO: 1121307 - DNA, 15 bp, Homo sapiens
ggaacctcactccac

SEQ ID NO: 1121308 - DNA, 15 bp, Homo sapiens
aggaacctcactcca

SEQ ID NO: 1121309 - DNA, 15 bp, Homo sapiens
aaggaacctcactcc

SEQ ID NO: 1121310 - DNA, 15 bp, Homo sapiens
taaggaacctcactc

SEQ ID NO: 1121311 - DNA, 15 bp, Homo sapiens
ataaggaacctcact

SEQ ID NO: 1121312 - DNA, 15 bp, Homo sapiens
aataaggaacctcac

SEQ ID NO: 1121313 - DNA, 15 bp, Homo sapiens
aaataaggaacctca

SEQ ID NO: 1121314 - DNA, 15 bp, Homo sapiens
gaaataaggaacctc

SEQ ID NO: 1121315 - DNA, 15 bp, Homo sapiens
gctgccaagataaac

SEQ ID NO: 1121316 - DNA, 15 bp, Homo sapiens
tgctgccaagataaa

SEQ ID NO: 1121317 - DNA, 15 bp, Homo sapiens
atgctgccaagataa

SEQ ID NO: 1121318 - DNA, 15 bp, Homo sapiens
catgctgccaagata

SEQ ID NO: 1121319 - DNA, 15 bp, Homo sapiens
tcatgctgccaagat

SEQ ID NO: 1121320 - DNA, 15 bp, Homo sapiens
ttcatgctgccaaga

SEQ ID NO: 1121321 - DNA, 15 bp, Homo sapiens
gttcatgctgccaag

SEQ ID NO: 1121322 - DNA, 15 bp, Homo sapiens
tgttcatgctgccaa

SEQ ID NO: 1121323 - DNA, 15 bp, Homo sapiens
ctgttcatgctgcca

SEQ ID NO: 1121324 - DNA, 15 bp, Homo sapiens
gctgttcatgctgcc

SEQ ID NO: 1121325 - DNA, 15 bp, Homo sapiens
agctgttcatgctgc

SEQ ID NO: 1121326 - DNA, 15 bp, Homo sapiens
cagctgttcatgctg

SEQ ID NO: 1121327 - DNA, 15 bp, Homo sapiens
tcagctgttcatgct

SEQ ID NO: 1121328 - DNA, 15 bp, Homo sapiens
gtcagctgttcatgc

SEQ ID NO: 1121329 - DNA, 15 bp, Homo sapiens
tgtcagctgttcatg

SEQ ID NO: 1121330 - DNA, 15 bp, Homo sapiens
atgtcagctgttcat

SEQ ID NO: 1121331 - DNA, 15 bp, Homo sapiens
gatgtcagctgttca

SEQ ID NO: 1121332 - DNA, 15 bp, Homo sapiens
agatgtcagctgttc

SEQ ID NO: 1121333 - DNA, 15 bp, Homo sapiens
aagatgtcagctgtt

SEQ ID NO: 1121334 - DNA, 15 bp, Homo sapiens
aaagatgtcagctgt

SEQ ID NO: 1121335 - DNA, 15 bp, Homo sapiens
aaaagatgtcagctg

SEQ ID NO: 1121336 - DNA, 15 bp, Homo sapiens
caaaagatgtcagct

SEQ ID NO: 1121337 - DNA, 15 bp, Homo sapiens
tcaaaagatgtcagc

SEQ ID NO: 1121338 - DNA, 15 bp, Homo sapiens
ttcaaaagatgtcag

SEQ ID NO: 1121339 - DNA, 15 bp, Homo sapiens
gttcaaaagatgtca

SEQ ID NO: 1121340 - DNA, 15 bp, Homo sapiens
agttcaaaagatgtc

SEQ ID NO: 1121341 - DNA, 15 bp, Homo sapiens
aagttcaaaagatgt

SEQ ID NO: 1121342 - DNA, 15 bp, Homo sapiens
aaagttcaaaagatg

SEQ ID NO: 1121343 - DNA, 15 bp, Homo sapiens
caaagttcaaaagat

SEQ ID NO: 1121344 - DNA, 15 bp, Homo sapiens
acaaagttcaaaaga

SEQ ID NO: 1121345 - DNA, 15 bp, Homo sapiens
aacaaagttcaaaag

SEQ ID NO: 1121346 - DNA, 15 bp, Homo sapiens
taacaaagttcaaaa

SEQ ID NO: 1121347 - DNA, 15 bp, Homo sapiens
ttaacaaagttcaaa

SEQ ID NO: 1121348 - DNA, 15 bp, Homo sapiens
tttaacaaagttcaa

SEQ ID NO: 1121349 - DNA, 15 bp, Homo sapiens
ctttaacaaagttca

SEQ ID NO: 1121350 - DNA, 15 bp, Homo sapiens
tctttaacaaagttc

SEQ ID NO: 1121351 - DNA, 15 bp, Homo sapiens
ttctttaacaaagtt

SEQ ID NO: 1121352 - DNA, 15 bp, Homo sapiens
tttctttaacaaagt

SEQ ID NO: 1121353 - DNA, 15 bp, Homo sapiens
ttttctttaacaaag

SEQ ID NO: 1121354 - DNA, 15 bp, Homo sapiens
attttctttaacaaa

SEQ ID NO: 1121355 - DNA, 15 bp, Homo sapiens
tattttctttaacaa

SEQ ID NO: 1121356 - DNA, 15 bp, Homo sapiens
ttattttctttaaca

SEQ ID NO: 1121357 - DNA, 15 bp, Homo sapiens
tttattttctttaac

SEQ ID NO: 1121358 - DNA, 15 bp, Homo sapiens
atttattttctttaa

SEQ ID NO: 1121359 - DNA, 15 bp, Homo sapiens
tatttattttcttta

SEQ ID NO: 1121360 - DNA, 15 bp, Homo sapiens
atatttattttcttt

SEQ ID NO: 1121361 - DNA, 15 bp, Homo sapiens
catatttattttctt

SEQ ID NO: 1121362 - DNA, 15 bp, Homo sapiens
atcatatttattttc

SEQ ID NO: 1121363 - DNA, 15 bp, Homo sapiens
tatcatatttatttt

SEQ ID NO: 1121364 - DNA, 15 bp, Homo sapiens
ttatcatatttattt

SEQ ID NO: 1121365 - DNA, 15 bp, Homo sapiens
attatcatatttatt

SEQ ID NO: 1121366 - DNA, 15 bp, Homo sapiens
tattatcatatttat

SEQ ID NO: 1121367 - DNA, 15 bp, Homo sapiens
gtattatcatattta

SEQ ID NO: 1121368 - DNA, 15 bp, Homo sapiens
tgtattatcatattt

SEQ ID NO: 1121369 - DNA, 15 bp, Homo sapiens
ctgtattatcatatt

SEQ ID NO: 1121370 - DNA, 15 bp, Homo sapiens
cctgtattatcatat

SEQ ID NO: 1121371 - DNA, 15 bp, Homo sapiens
acctgtattatcata

SEQ ID NO: 1121372 - DNA, 15 bp, Homo sapiens
aacctgtattatcat

SEQ ID NO: 1121373 - DNA, 15 bp, Homo sapiens
taacctgtattatca

SEQ ID NO: 1121374 - DNA, 15 bp, Homo sapiens
ttaacctgtattatc

SEQ ID NO: 1121375 - DNA, 15 bp, Homo sapiens
attaacctgtattat

SEQ ID NO: 1121376 - DNA, 15 bp, Homo sapiens
cattaacctgtatta

SEQ ID NO: 1121377 - DNA, 15 bp, Homo sapiens
acattaacctgtatt

SEQ ID NO: 1121378 - DNA, 15 bp, Homo sapiens
cacattaacctgtat

SEQ ID NO: 1121379 - DNA, 15 bp, Homo sapiens
acacattaacctgta

SEQ ID NO: 1121380 - DNA, 15 bp, Homo sapiens
aacacattaacctgt

SEQ ID NO: 1121381 - DNA, 15 bp, Homo sapiens
aaacacattaacctg

SEQ ID NO: 1121382 - DNA, 15 bp, Homo sapiens
aaaacacattaacct

SEQ ID NO: 1121383 - DNA, 15 bp, Homo sapiens
caaaacacattaacc

SEQ ID NO: 1121384 - DNA, 15 bp, Homo sapiens
acaaaacacattaac

SEQ ID NO: 1121385 - DNA, 15 bp, Homo sapiens
tacaaaacacattaa

SEQ ID NO: 1121386 - DNA, 15 bp, Homo sapiens
ttacaaaacacatta

SEQ ID NO: 1121387 - DNA, 15 bp, Homo sapiens
tttacaaaacacatt

SEQ ID NO: 1121388 - DNA, 15 bp, Homo sapiens
gtttacaaaacacat

SEQ ID NO: 1121389 - DNA, 15 bp, Homo sapiens
agtttacaaaacaca

SEQ ID NO: 1121390 - DNA, 15 bp, Homo sapiens
aagtttacaaaacac

SEQ ID NO: 1121391 - DNA, 15 bp, Homo sapiens
aaagtttacaaaaca

SEQ ID NO: 1121392 - DNA, 15 bp, Homo sapiens
taaagtttacaaaac

SEQ ID NO: 1121393 - DNA, 15 bp, Homo sapiens
ttaaagtttacaaaa

SEQ ID NO: 1121394 - DNA, 15 bp, Homo sapiens
tttaaagtttacaaa

SEQ ID NO: 1121395 - DNA, 15 bp, Homo sapiens
ctttaaagtttacaa

SEQ ID NO: 1121396 - DNA, 15 bp, Homo sapiens
tctttaaagtttaca

SEQ ID NO: 1121397 - DNA, 15 bp, Homo sapiens
ctctttaaagtttac

SEQ ID NO: 1121398 - DNA, 15 bp, Homo sapiens
tctctttaaagttta

SEQ ID NO: 1121399 - DNA, 15 bp, Homo sapiens
atctctttaaagttt

SEQ ID NO: 1121400 - DNA, 15 bp, Homo sapiens
tatctctttaaagtt

SEQ ID NO: 1121401 - DNA, 15 bp, Homo sapiens
ctatctctttaaagt

SEQ ID NO: 1121402 - DNA, 15 bp, Homo sapiens
actatctctttaaag

SEQ ID NO: 1121403 - DNA, 15 bp, Homo sapiens
tactatctctttaaa

SEQ ID NO: 1121404 - DNA, 15 bp, Homo sapiens
atactatctctttaa

SEQ ID NO: 1121405 - DNA, 15 bp, Homo sapiens
catactatctcttta

SEQ ID NO: 1121406 - DNA, 15 bp, Homo sapiens
ccatactatctcttt

SEQ ID NO: 1121407 - DNA, 15 bp, Homo sapiens
tccatactatctctt

SEQ ID NO: 1121408 - DNA, 15 bp, Homo sapiens
atccatactatctct

SEQ ID NO: 1121409 - DNA, 15 bp, Homo sapiens
catccatactatctc

SEQ ID NO: 1121410 - DNA, 15 bp, Homo sapiens
ccatccatactatct

SEQ ID NO: 1121411 - DNA, 15 bp, Homo sapiens
cccatccatactatc

SEQ ID NO: 1121412 - DNA, 15 bp, Homo sapiens
tcccatccatactat

SEQ ID NO: 1121413 - DNA, 15 bp, Homo sapiens
ttcccatccatacta

SEQ ID NO: 1121414 - DNA, 15 bp, Homo sapiens
cttcccatccatact

SEQ ID NO: 1121415 - DNA, 15 bp, Homo sapiens
acttcccatccatac

SEQ ID NO: 1121416 - DNA, 15 bp, Homo sapiens
cacttcccatccata

SEQ ID NO: 1121417 - DNA, 15 bp, Homo sapiens
acacttcccatccat

SEQ ID NO: 1121418 - DNA, 15 bp, Homo sapiens
aacacttcccatcca

SEQ ID NO: 1121419 - DNA, 15 bp, Homo sapiens
taacacttcccatcc

SEQ ID NO: 1121420 - DNA, 15 bp, Homo sapiens
gtaacacttcccatc

SEQ ID NO: 1121421 - DNA, 15 bp, Homo sapiens
ggtaacacttcccat

SEQ ID NO: 1121422 - DNA, 15 bp, Homo sapiens
tggtaacacttccca

SEQ ID NO: 1121423 - DNA, 15 bp, Homo sapiens
ttggtaacacttccc

SEQ ID NO: 1121424 - DNA, 15 bp, Homo sapiens
attggtaacacttcc

SEQ ID NO: 1121425 - DNA, 15 bp, Homo sapiens
aattggtaacacttc

SEQ ID NO: 1121426 - DNA, 15 bp, Homo sapiens
aaattggtaacactt

SEQ ID NO: 1121427 - DNA, 15 bp, Homo sapiens
aaaattggtaacact

SEQ ID NO: 1121428 - DNA, 15 bp, Homo sapiens
taaaattggtaacac

SEQ ID NO: 1121429 - DNA, 15 bp, Homo sapiens
ataaaattggtaaca

SEQ ID NO: 1121430 - DNA, 15 bp, Homo sapiens
tataaaattggtaac

SEQ ID NO: 1121431 - DNA, 15 bp, Homo sapiens
ttataaaattggtaa

SEQ ID NO: 1121432 - DNA, 15 bp, Homo sapiens
attataaaattggta

SEQ ID NO: 1121433 - DNA, 15 bp, Homo sapiens
aattataaaattggt

SEQ ID NO: 1121434 - DNA, 15 bp, Homo sapiens
aaattataaaattgg

SEQ ID NO: 1121435 - DNA, 15 bp, Homo sapiens
taaattataaaattg

SEQ ID NO: 1121436 - DNA, 15 bp, Homo sapiens
ttaaattataaaatt

SEQ ID NO: 1121437 - DNA, 15 bp, Homo sapiens
gttaaattataaaat

SEQ ID NO: 1121438 - DNA, 15 bp, Homo sapiens
ggttaaattataaaa

SEQ ID NO: 1121439 - DNA, 15 bp, Homo sapiens
tggttaaattataaa

SEQ ID NO: 1121440 - DNA, 15 bp, Homo sapiens
gtggttaaattataa

SEQ ID NO: 1121441 - DNA, 15 bp, Homo sapiens
agtggttaaattata

SEQ ID NO: 1121442 - DNA, 15 bp, Homo sapiens
aagtggttaaattat

SEQ ID NO: 1121443 - DNA, 15 bp, Homo sapiens
gaagtggttaaatta

SEQ ID NO: 1121444 - DNA, 15 bp, Homo sapiens
agaagtggttaaatt

SEQ ID NO: 1121445 - DNA, 15 bp, Homo sapiens
aagaagtggttaaat

SEQ ID NO: 1121446 - DNA, 15 bp, Homo sapiens
taagaagtggttaaa

SEQ ID NO: 1121447 - DNA, 15 bp, Homo sapiens
ttaagaagtggttaa

SEQ ID NO: 1121448 - DNA, 15 bp, Homo sapiens
gttaagaagtggtta

SEQ ID NO: 1121449 - DNA, 15 bp, Homo sapiens
tgttaagaagtggtt

SEQ ID NO: 1121450 - DNA, 15 bp, Homo sapiens
ttgttaagaagtggt

SEQ ID NO: 1121451 - DNA, 15 bp, Homo sapiens
gttgttaagaagtgg

SEQ ID NO: 1121452 - DNA, 15 bp, Homo sapiens
agttgttaagaagtg

SEQ ID NO: 1121453 - DNA, 15 bp, Homo sapiens
aagttgttaagaagt

SEQ ID NO: 1121454 - DNA, 15 bp, Homo sapiens
taagttgttaagaag

SEQ ID NO: 1121455 - DNA, 15 bp, Homo sapiens
ctaagttgttaagaa

SEQ ID NO: 1121456 - DNA, 15 bp, Homo sapiens
tctaagttgttaaga

SEQ ID NO: 1121457 - DNA, 15 bp, Homo sapiens
atctaagttgttaag

SEQ ID NO: 1121458 - DNA, 15 bp, Homo sapiens
tatctaagttgttaa

SEQ ID NO: 1121459 - DNA, 15 bp, Homo sapiens
gtatctaagttgtta

SEQ ID NO: 1121460 - DNA, 15 bp, Homo sapiens
tgtatctaagttgtt

SEQ ID NO: 1121461 - DNA, 15 bp, Homo sapiens
ctgtatctaagttgt

SEQ ID NO: 1121462 - DNA, 15 bp, Homo sapiens
actgtatctaagttg

SEQ ID NO: 1121463 - DNA, 15 bp, Homo sapiens
aactgtatctaagtt

SEQ ID NO: 1121464 - DNA, 15 bp, Homo sapiens
aaactgtatctaagt

SEQ ID NO: 1121465 - DNA, 15 bp, Homo sapiens
aaaactgtatctaag

SEQ ID NO: 1121466 - DNA, 15 bp, Homo sapiens
aaaaactgtatctaa

SEQ ID NO: 1121467 - DNA, 15 bp, Homo sapiens
taaaaactgtatcta

SEQ ID NO: 1121468 - DNA, 15 bp, Homo sapiens
gtaaaaactgtatct

SEQ ID NO: 1121469 - DNA, 15 bp, Homo sapiens
tgtaaaaactgtatc

SEQ ID NO: 1121470 - DNA, 15 bp, Homo sapiens
ctgtaaaaactgtat

SEQ ID NO: 1121471 - DNA, 15 bp, Homo sapiens
tctgtaaaaactgta

SEQ ID NO: 1121472 - DNA, 15 bp, Homo sapiens
atctgtaaaaactgt

SEQ ID NO: 1121473 - DNA, 15 bp, Homo sapiens
aatctgtaaaaactg

SEQ ID NO: 1121474 - DNA, 15 bp, Homo sapiens
caatctgtaaaaact

SEQ ID NO: 1121475 - DNA, 15 bp, Homo sapiens
ccaatctgtaaaaac

SEQ ID NO: 1121476 - DNA, 15 bp, Homo sapiens
tccaatctgtaaaaa

SEQ ID NO: 1121477 - DNA, 15 bp, Homo sapiens
ttccaatctgtaaaa

SEQ ID NO: 1121478 - DNA, 15 bp, Homo sapiens
tttccaatctgtaaa

SEQ ID NO: 1121479 - DNA, 15 bp, Homo sapiens
ttttccaatctgtaa

SEQ ID NO: 1121480 - DNA, 15 bp, Homo sapiens
cttttccaatctgta

SEQ ID NO: 1121481 - DNA, 15 bp, Homo sapiens
gcttttccaatctgt

SEQ ID NO: 1121482 - DNA, 15 bp, Homo sapiens
ggcttttccaatctg

SEQ ID NO: 1121483 - DNA, 15 bp, Homo sapiens
tggcttttccaatct

SEQ ID NO: 1121484 - DNA, 15 bp, Homo sapiens
gtggcttttccaatc

SEQ ID NO: 1121485 - DNA, 15 bp, Homo sapiens
agtggcttttccaat

SEQ ID NO: 1121486 - DNA, 15 bp, Homo sapiens
cagtggcttttccaa

SEQ ID NO: 1121487 - DNA, 15 bp, Homo sapiens
tcagtggcttttcca

SEQ ID NO: 1121488 - DNA, 15 bp, Homo sapiens
ttcagtggcttttcc

SEQ ID NO: 1121489 - DNA, 15 bp, Homo sapiens
cttcagtggcttttc

SEQ ID NO: 1121490 - DNA, 15 bp, Homo sapiens
acttcagtggctttt

SEQ ID NO: 1121491 - DNA, 15 bp, Homo sapiens
tacttcagtggcttt

SEQ ID NO: 1121492 - DNA, 15 bp, Homo sapiens
atacttcagtggctt

SEQ ID NO: 1121493 - DNA, 15 bp, Homo sapiens
aatacttcagtggct

SEQ ID NO: 1121494 - DNA, 15 bp, Homo sapiens
caatacttcagtggc

SEQ ID NO: 1121495 - DNA, 15 bp, Homo sapiens
gcaatacttcagtgg

SEQ ID NO: 1121496 - DNA, 15 bp, Homo sapiens
tgcaatacttcagtg

SEQ ID NO: 1121497 - DNA, 15 bp, Homo sapiens
ctgcaatacttcagt

SEQ ID NO: 1121498 - DNA, 15 bp, Homo sapiens
cctgcaatacttcag

SEQ ID NO: 1121499 - DNA, 15 bp, Homo sapiens
acctgcaatacttca

SEQ ID NO: 1121500 - DNA, 15 bp, Homo sapiens
gacctgcaatacttc

SEQ ID NO: 1121501 - DNA, 15 bp, Homo sapiens
ggacctgcaatactt

SEQ ID NO: 1121502 - DNA, 15 bp, Homo sapiens
tggacctgcaatact

SEQ ID NO: 1121503 - DNA, 15 bp, Homo sapiens
ctggacctgcaatac

SEQ ID NO: 1121504 - DNA, 15 bp, Homo sapiens
tctggacctgcaata

SEQ ID NO: 1121505 - DNA, 15 bp, Homo sapiens
atctggacctgcaat

SEQ ID NO: 1121506 - DNA, 15 bp, Homo sapiens
aatctggacctgcaa

SEQ ID NO: 1121507 - DNA, 15 bp, Homo sapiens
aaatctggacctgca

SEQ ID NO: 1121508 - DNA, 15 bp, Homo sapiens
aaaatctggacctgc

SEQ ID NO: 1121509 - DNA, 15 bp, Homo sapiens
taaaatctggacctg

SEQ ID NO: 1121510 - DNA, 15 bp, Homo sapiens
ttaaaatctggacct

SEQ ID NO: 1121511 - DNA, 15 bp, Homo sapiens
gttaaaatctggacc

SEQ ID NO: 1121512 - DNA, 15 bp, Homo sapiens
agttaaaatctggac

SEQ ID NO: 1121513 - DNA, 15 bp, Homo sapiens
tagttaaaatctgga

SEQ ID NO: 1121514 - DNA, 15 bp, Homo sapiens
atagttaaaatctgg

SEQ ID NO: 1121515 - DNA, 15 bp, Homo sapiens
tatagttaaaatctg

SEQ ID NO: 1121516 - DNA, 15 bp, Homo sapiens
ctatagttaaaatct

SEQ ID NO: 1121517 - DNA, 15 bp, Homo sapiens
actatagttaaaatc

SEQ ID NO: 1121518 - DNA, 15 bp, Homo sapiens
gactatagttaaaat

SEQ ID NO: 1121519 - DNA, 15 bp, Homo sapiens
ggactatagttaaaa

SEQ ID NO: 1121520 - DNA, 15 bp, Homo sapiens
gggactatagttaaa

SEQ ID NO: 1121521 - DNA, 15 bp, Homo sapiens
agggactatagttaa

SEQ ID NO: 1121522 - DNA, 15 bp, Homo sapiens
aagggactatagtta

SEQ ID NO: 1121523 - DNA, 15 bp, Homo sapiens
caagggactatagtt

SEQ ID NO: 1121524 - DNA, 15 bp, Homo sapiens
acaagggactatagt

SEQ ID NO: 1121525 - DNA, 15 bp, Homo sapiens
gacaagggactatag

SEQ ID NO: 1121526 - DNA, 15 bp, Homo sapiens
agacaagggactata

SEQ ID NO: 1121527 - DNA, 15 bp, Homo sapiens
aagacaagggactat

SEQ ID NO: 1121528 - DNA, 15 bp, Homo sapiens
aaagacaagggacta

SEQ ID NO: 1121529 - DNA, 15 bp, Homo sapiens
taaagacaagggact

SEQ ID NO: 1121530 - DNA, 15 bp, Homo sapiens
ataaagacaagggac

SEQ ID NO: 1121531 - DNA, 15 bp, Homo sapiens
aataaagacaaggga

SEQ ID NO: 1121532 - DNA, 15 bp, Homo sapiens
caataaagacaaggg

SEQ ID NO: 1121533 - DNA, 15 bp, Homo sapiens
tcaataaagacaagg

SEQ ID NO: 1121534 - DNA, 15 bp, Homo sapiens
atcaataaagacaag

SEQ ID NO: 1121535 - DNA, 15 bp, Homo sapiens
gatcaataaagacaa

SEQ ID NO: 1121536 - DNA, 15 bp, Homo sapiens
ggatcaataaagaca

SEQ ID NO: 1121537 - DNA, 15 bp, Homo sapiens
tggatcaataaagac

SEQ ID NO: 1121538 - DNA, 15 bp, Homo sapiens
ttggatcaataaaga

SEQ ID NO: 1121539 - DNA, 15 bp, Homo sapiens
attggatcaataaag

SEQ ID NO: 1121540 - DNA, 15 bp, Homo sapiens
aattggatcaataaa

SEQ ID NO: 1121541 - DNA, 15 bp, Homo sapiens
gaattggatcaataa

SEQ ID NO: 1121542 - DNA, 15 bp, Homo sapiens
ggaattggatcaata

SEQ ID NO: 1121543 - DNA, 15 bp, Homo sapiens
aggaattggatcaat

SEQ ID NO: 1121544 - DNA, 15 bp, Homo sapiens
gaggaattggatcaa

SEQ ID NO: 1121545 - DNA, 15 bp, Homo sapiens
ggaggaattggatca

SEQ ID NO: 1121546 - DNA, 15 bp, Homo sapiens
aggaggaattggatc

SEQ ID NO: 1121547 - DNA, 15 bp, Homo sapiens
taggaggaattggat

SEQ ID NO: 1121548 - DNA, 15 bp, Homo sapiens
ttaggaggaattgga

SEQ ID NO: 1121549 - DNA, 15 bp, Homo sapiens
cttaggaggaattgg

SEQ ID NO: 1121550 - DNA, 15 bp, Homo sapiens
tcttaggaggaattg

SEQ ID NO: 1121551 - DNA, 15 bp, Homo sapiens
ttcttaggaggaatt

SEQ ID NO: 1121552 - DNA, 15 bp, Homo sapiens
gttcttaggaggaat

SEQ ID NO: 1121553 - DNA, 15 bp, Homo sapiens
agttcttaggaggaa

SEQ ID NO: 1121554 - DNA, 15 bp, Homo sapiens
aagttcttaggagga

SEQ ID NO: 1121555 - DNA, 15 bp, Homo sapiens
aaagttcttaggagg

SEQ ID NO: 1121556 - DNA, 15 bp, Homo sapiens
caaagttcttaggag

SEQ ID NO: 1121557 - DNA, 15 bp, Homo sapiens
tcaaagttcttagga

SEQ ID NO: 1121558 - DNA, 15 bp, Homo sapiens
gtcaaagttcttagg

SEQ ID NO: 1121559 - DNA, 15 bp, Homo sapiens
tgtcaaagttcttag

SEQ ID NO: 1121560 - DNA, 15 bp, Homo sapiens
atgtcaaagttctta

SEQ ID NO: 1121561 - DNA, 15 bp, Homo sapiens
aatgtcaaagttctt

SEQ ID NO: 1121562 - DNA, 15 bp, Homo sapiens
aaatgtcaaagttct

SEQ ID NO: 1121563 - DNA, 15 bp, Homo sapiens
taaatgtcaaagttc

SEQ ID NO: 1121564 - DNA, 15 bp, Homo sapiens
gtaaatgtcaaagtt

SEQ ID NO: 1121565 - DNA, 15 bp, Homo sapiens
ggtaaatgtcaaagt

SEQ ID NO: 1121566 - DNA, 15 bp, Homo sapiens
tggtaaatgtcaaag

SEQ ID NO: 1121567 - DNA, 15 bp, Homo sapiens
ttggtaaatgtcaaa

SEQ ID NO: 1121568 - DNA, 15 bp, Homo sapiens
tttggtaaatgtcaa

SEQ ID NO: 1121569 - DNA, 15 bp, Homo sapiens
ttttggtaaatgtca

SEQ ID NO: 1121570 - DNA, 15 bp, Homo sapiens
attttggtaaatgtc

SEQ ID NO: 1121571 - DNA, 15 bp, Homo sapiens
tattttggtaaatgt

SEQ ID NO: 1121572 - DNA, 15 bp, Homo sapiens
ctattttggtaaatg

SEQ ID NO: 1121573 - DNA, 15 bp, Homo sapiens
cctattttggtaaat

SEQ ID NO: 1121574 - DNA, 15 bp, Homo sapiens
ccctattttggtaaa

SEQ ID NO: 1121575 - DNA, 15 bp, Homo sapiens
tccctattttggtaa

SEQ ID NO: 1121576 - DNA, 15 bp, Homo sapiens
atccctattttggta

SEQ ID NO: 1121577 - DNA, 15 bp, Homo sapiens
tatccctattttggt

SEQ ID NO: 1121578 - DNA, 15 bp, Homo sapiens
atatccctattttgg

SEQ ID NO: 1121579 - DNA, 15 bp, Homo sapiens
gatatccctattttg

SEQ ID NO: 1121580 - DNA, 15 bp, Homo sapiens
tgatatccctatttt

SEQ ID NO: 1121581 - DNA, 15 bp, Homo sapiens
ctgatatccctattt

SEQ ID NO: 1121582 - DNA, 15 bp, Homo sapiens
actgatatccctatt

SEQ ID NO: 1121583 - DNA, 15 bp, Homo sapiens
tactgatatccctat

SEQ ID NO: 1121584 - DNA, 15 bp, Homo sapiens
ctactgatatcccta

SEQ ID NO: 1121585 - DNA, 15 bp, Homo sapiens
actactgatatccct

SEQ ID NO: 1121586 - DNA, 15 bp, Homo sapiens
aactactgatatccc

SEQ ID NO: 1121587 - DNA, 15 bp, Homo sapiens
caactactgatatcc

SEQ ID NO: 1121588 - DNA, 15 bp, Homo sapiens
ccaactactgatatc

SEQ ID NO: 1121589 - DNA, 15 bp, Homo sapiens
gccaactactgatat

SEQ ID NO: 1121590 - DNA, 15 bp, Homo sapiens
agccaactactgata

SEQ ID NO: 1121591 - DNA, 15 bp, Homo sapiens
aagccaactactgat

SEQ ID NO: 1121592 - DNA, 15 bp, Homo sapiens
aaagccaactactga

SEQ ID NO: 1121593 - DNA, 15 bp, Homo sapiens
taaagccaactactg

SEQ ID NO: 1121594 - DNA, 15 bp, Homo sapiens
ctaaagccaactact

SEQ ID NO: 1121595 - DNA, 15 bp, Homo sapiens
actaaagccaactac

SEQ ID NO: 1121596 - DNA, 15 bp, Homo sapiens
gactaaagccaacta

SEQ ID NO: 1121597 - DNA, 15 bp, Homo sapiens
ggactaaagccaact

SEQ ID NO: 1121598 - DNA, 15 bp, Homo sapiens
aggactaaagccaac

SEQ ID NO: 1121599 - DNA, 15 bp, Homo sapiens
taggactaaagccaa

SEQ ID NO: 1121600 - DNA, 15 bp, Homo sapiens
ctaggactaaagcca

SEQ ID NO: 1121601 - DNA, 15 bp, Homo sapiens
gctaggactaaagcc

SEQ ID NO: 1121602 - DNA, 15 bp, Homo sapiens
agctaggactaaagc

SEQ ID NO: 1121603 - DNA, 15 bp, Homo sapiens
cagctaggactaaag

SEQ ID NO: 1121604 - DNA, 15 bp, Homo sapiens
gcagctaggactaaa

SEQ ID NO: 1121605 - DNA, 15 bp, Homo sapiens
agcagctaggactaa

SEQ ID NO: 1121606 - DNA, 15 bp, Homo sapiens
aagcagctaggacta

SEQ ID NO: 1121607 - DNA, 15 bp, Homo sapiens
taagcagctaggact

SEQ ID NO: 1121608 - DNA, 15 bp, Homo sapiens
ataagcagctaggac

SEQ ID NO: 1121609 - DNA, 15 bp, Homo sapiens
tataagcagctagga

SEQ ID NO: 1121610 - DNA, 15 bp, Homo sapiens
gtataagcagctagg

SEQ ID NO: 1121611 - DNA, 15 bp, Homo sapiens
tgtataagcagctag

SEQ ID NO: 1121612 - DNA, 15 bp, Homo sapiens
atgtataagcagcta

SEQ ID NO: 1121613 - DNA, 15 bp, Homo sapiens
tatgtataagcagct

SEQ ID NO: 1121614 - DNA, 15 bp, Homo sapiens
gtatgtataagcagc

SEQ ID NO: 1121615 - DNA, 15 bp, Homo sapiens
agtatgtataagcag

SEQ ID NO: 1121616 - DNA, 15 bp, Homo sapiens
aagtatgtataagca

SEQ ID NO: 1121617 - DNA, 15 bp, Homo sapiens
caagtatgtataagc

SEQ ID NO: 1121618 - DNA, 15 bp, Homo sapiens
gcaagtatgtataag

SEQ ID NO: 1121619 - DNA, 15 bp, Homo sapiens
agcaagtatgtataa

SEQ ID NO: 1121620 - DNA, 15 bp, Homo sapiens
tagcaagtatgtata

SEQ ID NO: 1121621 - DNA, 15 bp, Homo sapiens
atagcaagtatgtat

SEQ ID NO: 1121622 - DNA, 15 bp, Homo sapiens
catagcaagtatgta

SEQ ID NO: 1121623 - DNA, 15 bp, Homo sapiens
gcatagcaagtatgt

SEQ ID NO: 1121624 - DNA, 15 bp, Homo sapiens
tgcatagcaagtatg

SEQ ID NO: 1121625 - DNA, 15 bp, Homo sapiens
ttgcatagcaagtat

SEQ ID NO: 1121626 - DNA, 15 bp, Homo sapiens
cttgcatagcaagta

SEQ ID NO: 1121627 - DNA, 15 bp, Homo sapiens
tcttgcatagcaagt

SEQ ID NO: 1121628 - DNA, 15 bp, Homo sapiens
ttcttgcatagcaag

SEQ ID NO: 1121629 - DNA, 15 bp, Homo sapiens
cttcttgcatagcaa

SEQ ID NO: 1121630 - DNA, 15 bp, Homo sapiens
tcttcttgcatagca

SEQ ID NO: 1121631 - DNA, 15 bp, Homo sapiens
gtcttcttgcatagc

SEQ ID NO: 1121632 - DNA, 15 bp, Homo sapiens
tgtcttcttgcatag

SEQ ID NO: 1121633 - DNA, 15 bp, Homo sapiens
ttgtcttcttgcata

SEQ ID NO: 1121634 - DNA, 15 bp, Homo sapiens
cttgtcttcttgcat

SEQ ID NO: 1121635 - DNA, 15 bp, Homo sapiens
gcttgtcttcttgca

SEQ ID NO: 1121636 - DNA, 15 bp, Homo sapiens
tgcttgtcttcttgc

SEQ ID NO: 1121637 - DNA, 15 bp, Homo sapiens
atgcttgtcttcttg

SEQ ID NO: 1121638 - DNA, 15 bp, Homo sapiens
aatgcttgtcttctt

SEQ ID NO: 1121639 - DNA, 15 bp, Homo sapiens
caatgcttgtcttct

SEQ ID NO: 1121640 - DNA, 15 bp, Homo sapiens
tcaatgcttgtcttc

SEQ ID NO: 1121641 - DNA, 15 bp, Homo sapiens
ctcaatgcttgtctt

SEQ ID NO: 1121642 - DNA, 15 bp, Homo sapiens
tctcaatgcttgtct

SEQ ID NO: 1121643 - DNA, 15 bp, Homo sapiens
ttctcaatgcttgtc

SEQ ID NO: 1121644 - DNA, 15 bp, Homo sapiens
tttctcaatgcttgt

SEQ ID NO: 1121645 - DNA, 15 bp, Homo sapiens
ttttctcaatgcttg

SEQ ID NO: 1121646 - DNA, 15 bp, Homo sapiens
gttttctcaatgctt

SEQ ID NO: 1121647 - DNA, 15 bp, Homo sapiens
agttttctcaatgct

SEQ ID NO: 1121648 - DNA, 15 bp, Homo sapiens
aagttttctcaatgc

SEQ ID NO: 1121649 - DNA, 15 bp, Homo sapiens
taagttttctcaatg

SEQ ID NO: 1121650 - DNA, 15 bp, Homo sapiens
ataagttttctcaat

SEQ ID NO: 1121651 - DNA, 15 bp, Homo sapiens
aataagttttctcaa

SEQ ID NO: 1121652 - DNA, 15 bp, Homo sapiens
aaataagttttctca

SEQ ID NO: 1121653 - DNA, 15 bp, Homo sapiens
aaaataagttttctc

SEQ ID NO: 1121654 - DNA, 15 bp, Homo sapiens
aaaaataagttttct

SEQ ID NO: 1121655 - DNA, 15 bp, Homo sapiens
gaaaaataagttttc

SEQ ID NO: 1121656 - DNA, 15 bp, Homo sapiens
ggaaaaataagtttt

SEQ ID NO: 1121657 - DNA, 15 bp, Homo sapiens
aggaaaaataagttt

SEQ ID NO: 1121658 - DNA, 15 bp, Homo sapiens
aaggaaaaataagtt

SEQ ID NO: 1121659 - DNA, 15 bp, Homo sapiens
aaaggaaaaataagt

SEQ ID NO: 1121660 - DNA, 15 bp, Homo sapiens
aaaaggaaaaataag

SEQ ID NO: 1121661 - DNA, 15 bp, Homo sapiens
caaaaggaaaaataa

SEQ ID NO: 1121662 - DNA, 15 bp, Homo sapiens
acaaaaggaaaaata

SEQ ID NO: 1121663 - DNA, 15 bp, Homo sapiens
aacaaaaggaaaaat

SEQ ID NO: 1121664 - DNA, 15 bp, Homo sapiens
gaacaaaaggaaaaa

SEQ ID NO: 1121665 - DNA, 15 bp, Homo sapiens
ggaacaaaaggaaaa

SEQ ID NO: 1121666 - DNA, 15 bp, Homo sapiens
tggaacaaaaggaaa

SEQ ID NO: 1121667 - DNA, 15 bp, Homo sapiens
atggaacaaaaggaa

SEQ ID NO: 1121668 - DNA, 15 bp, Homo sapiens
catggaacaaaagga

SEQ ID NO: 1121669 - DNA, 15 bp, Homo sapiens
gcatggaacaaaagg

SEQ ID NO: 1121670 - DNA, 15 bp, Homo sapiens
ggcatggaacaaaag

SEQ ID NO: 1121671 - DNA, 15 bp, Homo sapiens
aggcatggaacaaaa

SEQ ID NO: 1121672 - DNA, 15 bp, Homo sapiens
taggcatggaacaaa

SEQ ID NO: 1121673 - DNA, 15 bp, Homo sapiens
gtaggcatggaacaa

SEQ ID NO: 1121674 - DNA, 15 bp, Homo sapiens
tgtaggcatggaaca

SEQ ID NO: 1121675 - DNA, 15 bp, Homo sapiens
ttgtaggcatggaac

SEQ ID NO: 1121676 - DNA, 15 bp, Homo sapiens
cttgtaggcatggaa

SEQ ID NO: 1121677 - DNA, 15 bp, Homo sapiens
ccttgtaggcatgga

SEQ ID NO: 1121678 - DNA, 15 bp, Homo sapiens
tccttgtaggcatgg

SEQ ID NO: 1121679 - DNA, 15 bp, Homo sapiens
ctccttgtaggcatg

SEQ ID NO: 1121680 - DNA, 15 bp, Homo sapiens
tctccttgtaggcat

SEQ ID NO: 1121681 - DNA, 15 bp, Homo sapiens
ctctccttgtaggca

SEQ ID NO: 1121682 - DNA, 15 bp, Homo sapiens
cctctccttgtaggc

SEQ ID NO: 1121683 - DNA, 15 bp, Homo sapiens
tcctctccttgtagg

SEQ ID NO: 1121684 - DNA, 15 bp, Homo sapiens
atcctctccttgtag

SEQ ID NO: 1121685 - DNA, 15 bp, Homo sapiens
tatcctctccttgta

SEQ ID NO: 1121686 - DNA, 15 bp, Homo sapiens
ctatcctctccttgt

SEQ ID NO: 1121687 - DNA, 15 bp, Homo sapiens
tctatcctctccttg

SEQ ID NO: 1121688 - DNA, 15 bp, Homo sapiens
ctctatcctctcctt

SEQ ID NO: 1121689 - DNA, 15 bp, Homo sapiens
cctctatcctctcct

SEQ ID NO: 1121690 - DNA, 15 bp, Homo sapiens
acctctatcctctcc

SEQ ID NO: 1121691 - DNA, 15 bp, Homo sapiens
tacctctatcctctc

SEQ ID NO: 1121692 - DNA, 15 bp, Homo sapiens
atacctctatcctct

SEQ ID NO: 1121693 - DNA, 15 bp, Homo sapiens
tatacctctatcctc

SEQ ID NO: 1121694 - DNA, 15 bp, Homo sapiens
gtatacctctatcct

SEQ ID NO: 1121695 - DNA, 15 bp, Homo sapiens
tgtatacctctatcc

SEQ ID NO: 1121696 - DNA, 15 bp, Homo sapiens
ttgtatacctctatc

SEQ ID NO: 1121697 - DNA, 15 bp, Homo sapiens
attgtatacctctat

SEQ ID NO: 1121698 - DNA, 15 bp, Homo sapiens
tattgtatacctcta

SEQ ID NO: 1121699 - DNA, 15 bp, Homo sapiens
ttattgtatacctct

SEQ ID NO: 1121700 - DNA, 15 bp, Homo sapiens
attattgtatacctc

SEQ ID NO: 1121701 - DNA, 15 bp, Homo sapiens
tattattgtatacct

SEQ ID NO: 1121702 - DNA, 15 bp, Homo sapiens
ttattattgtatacc

SEQ ID NO: 1121703 - DNA, 15 bp, Homo sapiens
attattattgtatac

SEQ ID NO: 1121704 - DNA, 15 bp, Homo sapiens
cattattattgtata

SEQ ID NO: 1121705 - DNA, 15 bp, Homo sapiens
ccattattattgtat

SEQ ID NO: 1121706 - DNA, 15 bp, Homo sapiens
accattattattgta

SEQ ID NO: 1121707 - DNA, 15 bp, Homo sapiens
aaccattattattgt

SEQ ID NO: 1121708 - DNA, 15 bp, Homo sapiens
gaaccattattattg

SEQ ID NO: 1121709 - DNA, 15 bp, Homo sapiens
tgaaccattattatt

SEQ ID NO: 1121710 - DNA, 15 bp, Homo sapiens
ctgaaccattattat

SEQ ID NO: 1121711 - DNA, 15 bp, Homo sapiens
tctgaaccattatta

SEQ ID NO: 1121712 - DNA, 15 bp, Homo sapiens
ctctgaaccattatt

SEQ ID NO: 1121713 - DNA, 15 bp, Homo sapiens
cctctgaaccattat

SEQ ID NO: 1121714 - DNA, 15 bp, Homo sapiens
ccctctgaaccatta

SEQ ID NO: 1121715 - DNA, 15 bp, Homo sapiens
tccctctgaaccatt

SEQ ID NO: 1121716 - DNA, 15 bp, Homo sapiens
ttccctctgaaccat

SEQ ID NO: 1121717 - DNA, 15 bp, Homo sapiens
tttccctctgaacca

SEQ ID NO: 1121718 - DNA, 15 bp, Homo sapiens
ttttccctctgaacc

SEQ ID NO: 1121719 - DNA, 15 bp, Homo sapiens
cttttccctctgaac

SEQ ID NO: 1121720 - DNA, 15 bp, Homo sapiens
acttttccctctgaa

SEQ ID NO: 1121721 - DNA, 15 bp, Homo sapiens
cacttttccctctga

SEQ ID NO: 1121722 - DNA, 15 bp, Homo sapiens
tcacttttccctctg

SEQ ID NO: 1121723 - DNA, 15 bp, Homo sapiens
ttcacttttccctct

SEQ ID NO: 1121724 - DNA, 15 bp, Homo sapiens
attcacttttccctc

SEQ ID NO: 1121725 - DNA, 15 bp, Homo sapiens
aattcacttttccct

SEQ ID NO: 1121726 - DNA, 15 bp, Homo sapiens
caattcacttttccc

SEQ ID NO: 1121727 - DNA, 15 bp, Homo sapiens
ccaattcacttttcc

SEQ ID NO: 1121728 - DNA, 15 bp, Homo sapiens
accaattcacttttc

SEQ ID NO: 1121729 - DNA, 15 bp, Homo sapiens
taccaattcactttt

SEQ ID NO: 1121730 - DNA, 15 bp, Homo sapiens
ttaccaattcacttt

SEQ ID NO: 1121731 - DNA, 15 bp, Homo sapiens
tttaccaattcactt

SEQ ID NO: 1121732 - DNA, 15 bp, Homo sapiens
atttaccaattcact

SEQ ID NO: 1121733 - DNA, 15 bp, Homo sapiens
aatttaccaattcac

SEQ ID NO: 1121734 - DNA, 15 bp, Homo sapiens
caatttaccaattca

SEQ ID NO: 1121735 - DNA, 15 bp, Homo sapiens
tcaatttaccaattc

SEQ ID NO: 1121736 - DNA, 15 bp, Homo sapiens
ttcaatttaccaatt

SEQ ID NO: 1121737 - DNA, 15 bp, Homo sapiens
tttcaatttaccaat

SEQ ID NO: 1121738 - DNA, 15 bp, Homo sapiens
ttttcaatttaccaa

SEQ ID NO: 1121739 - DNA, 15 bp, Homo sapiens
attttcaatttacca

SEQ ID NO: 1121740 - DNA, 15 bp, Homo sapiens
gattttcaatttacc

SEQ ID NO: 1121741 - DNA, 15 bp, Homo sapiens
tgattttcaatttac

SEQ ID NO: 1121742 - DNA, 15 bp, Homo sapiens
ttgattttcaattta

SEQ ID NO: 1121743 - DNA, 15 bp, Homo sapiens
tttgattttcaattt

SEQ ID NO: 1121744 - DNA, 15 bp, Homo sapiens
atttgattttcaatt

SEQ ID NO: 1121745 - DNA, 15 bp, Homo sapiens
tatttgattttcaat

SEQ ID NO: 1121746 - DNA, 15 bp, Homo sapiens
ttatttgattttcaa

SEQ ID NO: 1121747 - DNA, 15 bp, Homo sapiens
attatttgattttca

SEQ ID NO: 1121748 - DNA, 15 bp, Homo sapiens
tattatttgattttc

SEQ ID NO: 1121749 - DNA, 15 bp, Homo sapiens
gtattatttgatttt

SEQ ID NO: 1121750 - DNA, 15 bp, Homo sapiens
tgtattatttgattt

SEQ ID NO: 1121751 - DNA, 15 bp, Homo sapiens
gtgtattatttgatt

SEQ ID NO: 1121752 - DNA, 15 bp, Homo sapiens
tgtgtattatttgat

SEQ ID NO: 1121753 - DNA, 15 bp, Homo sapiens
ttgtgtattatttga

SEQ ID NO: 1121754 - DNA, 15 bp, Homo sapiens
attgtgtattatttg

SEQ ID NO: 1121755 - DNA, 15 bp, Homo sapiens
tattgtgtattattt

SEQ ID NO: 1121756 - DNA, 15 bp, Homo sapiens
gtattgtgtattatt

SEQ ID NO: 1121757 - DNA, 15 bp, Homo sapiens
ggtattgtgtattat

SEQ ID NO: 1121758 - DNA, 15 bp, Homo sapiens
tggtattgtgtatta

SEQ ID NO: 1121759 - DNA, 15 bp, Homo sapiens
ttggtattgtgtatt

SEQ ID NO: 1121760 - DNA, 15 bp, Homo sapiens
gttggtattgtgtat

SEQ ID NO: 1121761 - DNA, 15 bp, Homo sapiens
agttggtattgtgta

SEQ ID NO: 1121762 - DNA, 15 bp, Homo sapiens
cagttggtattgtgt

SEQ ID NO: 1121763 - DNA, 15 bp, Homo sapiens
ccagttggtattgtg

SEQ ID NO: 1121764 - DNA, 15 bp, Homo sapiens
tccagttggtattgt

SEQ ID NO: 1121765 - DNA, 15 bp, Homo sapiens
ttccagttggtattg

SEQ ID NO: 1121766 - DNA, 15 bp, Homo sapiens
cttccagttggtatt

SEQ ID NO: 1121767 - DNA, 15 bp, Homo sapiens
gcttccagttggtat

SEQ ID NO: 1121768 - DNA, 15 bp, Homo sapiens
tgcttccagttggta

SEQ ID NO: 1121769 - DNA, 15 bp, Homo sapiens
gtgcttccagttggt

SEQ ID NO: 1121770 - DNA, 15 bp, Homo sapiens
agtgcttccagttgg

SEQ ID NO: 1121771 - DNA, 15 bp, Homo sapiens
aagtgcttccagttg

SEQ ID NO: 1121772 - DNA, 15 bp, Homo sapiens
caagtgcttccagtt

SEQ ID NO: 1121773 - DNA, 15 bp, Homo sapiens
tcaagtgcttccagt

SEQ ID NO: 1121774 - DNA, 15 bp, Homo sapiens
ttcaagtgcttccag

SEQ ID NO: 1121775 - DNA, 15 bp, Homo sapiens
attcaagtgcttcca

SEQ ID NO: 1121776 - DNA, 15 bp, Homo sapiens
tattcaagtgcttcc

SEQ ID NO: 1121777 - DNA, 15 bp, Homo sapiens
ttattcaagtgcttc

SEQ ID NO: 1121778 - DNA, 15 bp, Homo sapiens
tttattcaagtgctt

SEQ ID NO: 1121779 - DNA, 15 bp, Homo sapiens
ttttattcaagtgct

SEQ ID NO: 1121780 - DNA, 15 bp, Homo sapiens
tttttattcaagtgc

SEQ ID NO: 1121781 - DNA, 15 bp, Homo sapiens
atttttattcaagtg

SEQ ID NO: 1121782 - DNA, 15 bp, Homo sapiens
gatttttattcaagt

SEQ ID NO: 1121783 - DNA, 15 bp, Homo sapiens
ggatttttattcaag

SEQ ID NO: 1121784 - DNA, 15 bp, Homo sapiens
gggatttttattcaa

SEQ ID NO: 1121785 - DNA, 15 bp, Homo sapiens
agggatttttattca

SEQ ID NO: 1121786 - DNA, 15 bp, Homo sapiens
aagggatttttattc

SEQ ID NO: 1121787 - DNA, 15 bp, Homo sapiens
aaagggatttttatt

SEQ ID NO: 1121788 - DNA, 15 bp, Homo sapiens
caaagggatttttat

SEQ ID NO: 1121789 - DNA, 15 bp, Homo sapiens
ccaaagggattttta

SEQ ID NO: 1121790 - DNA, 15 bp, Homo sapiens
accaaagggattttt

SEQ ID NO: 1121791 - DNA, 15 bp, Homo sapiens
taccaaagggatttt

SEQ ID NO: 1121792 - DNA, 15 bp, Homo sapiens
ttaccaaagggattt

SEQ ID NO: 1121793 - DNA, 15 bp, Homo sapiens
gttaccaaagggatt

SEQ ID NO: 1121794 - DNA, 15 bp, Homo sapiens
agttaccaaagggat

SEQ ID NO: 1121795 - DNA, 15 bp, Homo sapiens
gagttaccaaaggga

SEQ ID NO: 1121796 - DNA, 15 bp, Homo sapiens
agagttaccaaaggg

SEQ ID NO: 1121797 - DNA, 15 bp, Homo sapiens
gagagttaccaaagg

SEQ ID NO: 1121798 - DNA, 15 bp, Homo sapiens
agagagttaccaaag

SEQ ID NO: 1121799 - DNA, 15 bp, Homo sapiens
cagagagttaccaaa

SEQ ID NO: 1121800 - DNA, 15 bp, Homo sapiens
acagagagttaccaa

SEQ ID NO: 1121801 - DNA, 15 bp, Homo sapiens
tacagagagttacca

SEQ ID NO: 1121802 - DNA, 15 bp, Homo sapiens
ctacagagagttacc

SEQ ID NO: 1121803 - DNA, 15 bp, Homo sapiens
actacagagagttac

SEQ ID NO: 1121804 - DNA, 15 bp, Homo sapiens
tactacagagagtta

SEQ ID NO: 1121805 - DNA, 15 bp, Homo sapiens
ctactacagagagtt

SEQ ID NO: 1121806 - DNA, 15 bp, Homo sapiens
cctactacagagagt

SEQ ID NO: 1121807 - DNA, 15 bp, Homo sapiens
tcctactacagagag

SEQ ID NO: 1121808 - DNA, 15 bp, Homo sapiens
ttcctactacagaga

SEQ ID NO: 1121809 - DNA, 15 bp, Homo sapiens
attcctactacagag

SEQ ID NO: 1121810 - DNA, 15 bp, Homo sapiens
gattcctactacaga

SEQ ID NO: 1121811 - DNA, 15 bp, Homo sapiens
ggattcctactacag

SEQ ID NO: 1121812 - DNA, 15 bp, Homo sapiens
tggattcctactaca

SEQ ID NO: 1121813 - DNA, 15 bp, Homo sapiens
ttggattcctactac

SEQ ID NO: 1121814 - DNA, 15 bp, Homo sapiens
attggattcctacta

SEQ ID NO: 1121815 - DNA, 15 bp, Homo sapiens
aattggattcctact

SEQ ID NO: 1121816 - DNA, 15 bp, Homo sapiens
aaattggattcctac

SEQ ID NO: 1121817 - DNA, 15 bp, Homo sapiens
aaaattggattccta

SEQ ID NO: 1121818 - DNA, 15 bp, Homo sapiens
taaaattggattcct

SEQ ID NO: 1121819 - DNA, 15 bp, Homo sapiens
ataaaattggattcc

SEQ ID NO: 1121820 - DNA, 15 bp, Homo sapiens
cataaaattggattc

SEQ ID NO: 1121821 - DNA, 15 bp, Homo sapiens
acataaaattggatt

SEQ ID NO: 1121822 - DNA, 15 bp, Homo sapiens
gacataaaattggat

SEQ ID NO: 1121823 - DNA, 15 bp, Homo sapiens
agacataaaattgga

SEQ ID NO: 1121824 - DNA, 15 bp, Homo sapiens
gagacataaaattgg

SEQ ID NO: 1121825 - DNA, 15 bp, Homo sapiens
agagacataaaattg

SEQ ID NO: 1121826 - DNA, 15 bp, Homo sapiens
gagagacataaaatt

SEQ ID NO: 1121827 - DNA, 15 bp, Homo sapiens
tgagagacataaaat

SEQ ID NO: 1121828 - DNA, 15 bp, Homo sapiens
atgagagacataaaa

SEQ ID NO: 1121829 - DNA, 15 bp, Homo sapiens
gatgagagacataaa

SEQ ID NO: 1121830 - DNA, 15 bp, Homo sapiens
agatgagagacataa

SEQ ID NO: 1121831 - DNA, 15 bp, Homo sapiens
aagatgagagacata

SEQ ID NO: 1121832 - DNA, 15 bp, Homo sapiens
aaagatgagagacat

SEQ ID NO: 1121833 - DNA, 15 bp, Homo sapiens
taaagatgagagaca

SEQ ID NO: 1121834 - DNA, 15 bp, Homo sapiens
ttaaagatgagagac

SEQ ID NO: 1121835 - DNA, 15 bp, Homo sapiens
tttaaagatgagaga

SEQ ID NO: 1121836 - DNA, 15 bp, Homo sapiens
atttaaagatgagag

SEQ ID NO: 1121837 - DNA, 15 bp, Homo sapiens
aatttaaagatgaga

SEQ ID NO: 1121838 - DNA, 15 bp, Homo sapiens
aaatttaaagatgag

SEQ ID NO: 1121839 - DNA, 15 bp, Homo sapiens
gaaatttaaagatga

SEQ ID NO: 1121840 - DNA, 15 bp, Homo sapiens
ggaaatttaaagatg

SEQ ID NO: 1121841 - DNA, 15 bp, Homo sapiens
aggaaatttaaagat

SEQ ID NO: 1121842 - DNA, 15 bp, Homo sapiens
caggaaatttaaaga

SEQ ID NO: 1121843 - DNA, 15 bp, Homo sapiens
gcaggaaatttaaag

SEQ ID NO: 1121844 - DNA, 15 bp, Homo sapiens
ggcaggaaatttaaa

SEQ ID NO: 1121845 - DNA, 15 bp, Homo sapiens
gggcaggaaatttaa

SEQ ID NO: 1121846 - DNA, 15 bp, Homo sapiens
tgggcaggaaattta

SEQ ID NO: 1121847 - DNA, 15 bp, Homo sapiens
atgggcaggaaattt

SEQ ID NO: 1121848 - DNA, 15 bp, Homo sapiens
aatgggcaggaaatt

SEQ ID NO: 1121849 - DNA, 15 bp, Homo sapiens
caatgggcaggaaat

SEQ ID NO: 1121850 - DNA, 15 bp, Homo sapiens
acaatgggcaggaaa

SEQ ID NO: 1121851 - DNA, 15 bp, Homo sapiens
tacaatgggcaggaa

SEQ ID NO: 1121852 - DNA, 15 bp, Homo sapiens
gtacaatgggcagga

SEQ ID NO: 1121853 - DNA, 15 bp, Homo sapiens
tgtacaatgggcagg

SEQ ID NO: 1121854 - DNA, 15 bp, Homo sapiens
ctgtacaatgggcag

SEQ ID NO: 1121855 - DNA, 15 bp, Homo sapiens
actgtacaatgggca

SEQ ID NO: 1121856 - DNA, 15 bp, Homo sapiens
cactgtacaatgggc

SEQ ID NO: 1121857 - DNA, 15 bp, Homo sapiens
tcactgtacaatggg

SEQ ID NO: 1121858 - DNA, 15 bp, Homo sapiens
ctcactgtacaatgg

SEQ ID NO: 1121859 - DNA, 15 bp, Homo sapiens
gctcactgtacaatg

SEQ ID NO: 1121860 - DNA, 15 bp, Homo sapiens
agctcactgtacaat

SEQ ID NO: 1121861 - DNA, 15 bp, Homo sapiens
tagctcactgtacaa

SEQ ID NO: 1121862 - DNA, 15 bp, Homo sapiens
gtagctcactgtaca

SEQ ID NO: 1121863 - DNA, 15 bp, Homo sapiens
agtagctcactgtac

SEQ ID NO: 1121864 - DNA, 15 bp, Homo sapiens
gagtagctcactgta

SEQ ID NO: 1121865 - DNA, 15 bp, Homo sapiens
agagtagctcactgt

SEQ ID NO: 1121866 - DNA, 15 bp, Homo sapiens
tagagtagctcactg

SEQ ID NO: 1121867 - DNA, 15 bp, Homo sapiens
gtagagtagctcact

SEQ ID NO: 1121868 - DNA, 15 bp, Homo sapiens
agtagagtagctcac

SEQ ID NO: 1121869 - DNA, 15 bp, Homo sapiens
aagtagagtagctca

SEQ ID NO: 1121870 - DNA, 15 bp, Homo sapiens
aaagtagagtagctc

SEQ ID NO: 1121871 - DNA, 15 bp, Homo sapiens
aaaagtagagtagct

SEQ ID NO: 1121872 - DNA, 15 bp, Homo sapiens
caaaagtagagtagc

SEQ ID NO: 1121873 - DNA, 15 bp, Homo sapiens
acaaaagtagagtag

SEQ ID NO: 1121874 - DNA, 15 bp, Homo sapiens
tacaaaagtagagta

SEQ ID NO: 1121875 - DNA, 15 bp, Homo sapiens
ttacaaaagtagagt

SEQ ID NO: 1121876 - DNA, 15 bp, Homo sapiens
tttacaaaagtagag

SEQ ID NO: 1121877 - DNA, 15 bp, Homo sapiens
atttacaaaagtaga

SEQ ID NO: 1121878 - DNA, 15 bp, Homo sapiens
tatttacaaaagtag

SEQ ID NO: 1121879 - DNA, 15 bp, Homo sapiens
ttatttacaaaagta

SEQ ID NO: 1121880 - DNA, 15 bp, Homo sapiens
attatttacaaaagt

SEQ ID NO: 1121881 - DNA, 15 bp, Homo sapiens
aattatttacaaaag

SEQ ID NO: 1121882 - DNA, 15 bp, Homo sapiens
aaattatttacaaaa

SEQ ID NO: 1121883 - DNA, 15 bp, Homo sapiens
taaattatttacaaa

SEQ ID NO: 1121884 - DNA, 15 bp, Homo sapiens
ataaattatttacaa

SEQ ID NO: 1121885 - DNA, 15 bp, Homo sapiens
aataaattatttaca

SEQ ID NO: 1121886 - DNA, 15 bp, Homo sapiens
gaataaattatttac

SEQ ID NO: 1121887 - DNA, 15 bp, Homo sapiens
agaataaattattta

SEQ ID NO: 1121888 - DNA, 15 bp, Homo sapiens
aagaataaattattt

SEQ ID NO: 1121889 - DNA, 15 bp, Homo sapiens
aaagaataaattatt

SEQ ID NO: 1121890 - DNA, 15 bp, Homo sapiens
gaaagaataaattat

SEQ ID NO: 1121891 - DNA, 15 bp, Homo sapiens
tgaaagaataaatta

SEQ ID NO: 1121892 - DNA, 15 bp, Homo sapiens
ttgaaagaataaatt

SEQ ID NO: 1121893 - DNA, 15 bp, Homo sapiens
gttgaaagaataaat

SEQ ID NO: 1121894 - DNA, 15 bp, Homo sapiens
ggttgaaagaataaa

SEQ ID NO: 1121895 - DNA, 15 bp, Homo sapiens
tggttgaaagaataa

SEQ ID NO: 1121896 - DNA, 15 bp, Homo sapiens
ttggttgaaagaata

SEQ ID NO: 1121897 - DNA, 15 bp, Homo sapiens
attggttgaaagaat

SEQ ID NO: 1121898 - DNA, 15 bp, Homo sapiens
tattggttgaaagaa

SEQ ID NO: 1121899 - DNA, 15 bp, Homo sapiens
atattggttgaaaga

SEQ ID NO: 1121900 - DNA, 15 bp, Homo sapiens
aatattggttgaaag

SEQ ID NO: 1121901 - DNA, 15 bp, Homo sapiens
aaatattggttgaaa

SEQ ID NO: 1121902 - DNA, 15 bp, Homo sapiens
gaaatattggttgaa

SEQ ID NO: 1121903 - DNA, 15 bp, Homo sapiens
agaaatattggttga

SEQ ID NO: 1121904 - DNA, 15 bp, Homo sapiens
aagaaatattggttg

SEQ ID NO: 1121905 - DNA, 15 bp, Homo sapiens
caagaaatattggtt

SEQ ID NO: 1121906 - DNA, 15 bp, Homo sapiens
tcaagaaatattggt

SEQ ID NO: 1121907 - DNA, 15 bp, Homo sapiens
ctcaagaaatattgg

SEQ ID NO: 1121908 - DNA, 15 bp, Homo sapiens
actcaagaaatattg

SEQ ID NO: 1121909 - DNA, 15 bp, Homo sapiens
gactcaagaaatatt

SEQ ID NO: 1121910 - DNA, 15 bp, Homo sapiens
ggactcaagaaatat

SEQ ID NO: 1121911 - DNA, 15 bp, Homo sapiens
aggactcaagaaata

SEQ ID NO: 1121912 - DNA, 15 bp, Homo sapiens
aaggactcaagaaat

SEQ ID NO: 1121913 - DNA, 15 bp, Homo sapiens
caaggactcaagaaa

SEQ ID NO: 1121914 - DNA, 15 bp, Homo sapiens
gcaaggactcaagaa

SEQ ID NO: 1121915 - DNA, 15 bp, Homo sapiens
agcaaggactcaaga

SEQ ID NO: 1121916 - DNA, 15 bp, Homo sapiens
tagcaaggactcaag

SEQ ID NO: 1121917 - DNA, 15 bp, Homo sapiens
atagcaaggactcaa

SEQ ID NO: 1121918 - DNA, 15 bp, Homo sapiens
catagcaaggactca

SEQ ID NO: 1121919 - DNA, 15 bp, Homo sapiens
acatagcaaggactc

SEQ ID NO: 1121920 - DNA, 15 bp, Homo sapiens
cacatagcaaggact

SEQ ID NO: 1121921 - DNA, 15 bp, Homo sapiens
gcacatagcaaggac

SEQ ID NO: 1121922 - DNA, 15 bp, Homo sapiens
tgcacatagcaagga

SEQ ID NO: 1121923 - DNA, 15 bp, Homo sapiens
ctgcacatagcaagg

SEQ ID NO: 1121924 - DNA, 15 bp, Homo sapiens
tctgcacatagcaag

SEQ ID NO: 1121925 - DNA, 15 bp, Homo sapiens
gtctgcacatagcaa

SEQ ID NO: 1121926 - DNA, 15 bp, Homo sapiens
tgtctgcacatagca

SEQ ID NO: 1121927 - DNA, 15 bp, Homo sapiens
atgtctgcacatagc

SEQ ID NO: 1121928 - DNA, 15 bp, Homo sapiens
catgtctgcacatag

SEQ ID NO: 1121929 - DNA, 15 bp, Homo sapiens
ccatgtctgcacata

SEQ ID NO: 1121930 - DNA, 15 bp, Homo sapiens
gccatgtctgcacat

SEQ ID NO: 1121931 - DNA, 15 bp, Homo sapiens
tgccatgtctgcaca

SEQ ID NO: 1121932 - DNA, 15 bp, Homo sapiens
atgccatgtctgcac

SEQ ID NO: 1121933 - DNA, 15 bp, Homo sapiens
tatgccatgtctgca

SEQ ID NO: 1121934 - DNA, 15 bp, Homo sapiens
gtatgccatgtctgc

SEQ ID NO: 1121935 - DNA, 15 bp, Homo sapiens
agtatgccatgtctg

SEQ ID NO: 1121936 - DNA, 15 bp, Homo sapiens
tagtatgccatgtct

SEQ ID NO: 1121937 - DNA, 15 bp, Homo sapiens
atagtatgccatgtc

SEQ ID NO: 1121938 - DNA, 15 bp, Homo sapiens
catagtatgccatgt

SEQ ID NO: 1121939 - DNA, 15 bp, Homo sapiens
ccatagtatgccatg

SEQ ID NO: 1121940 - DNA, 15 bp, Homo sapiens
cccatagtatgccat

SEQ ID NO: 1121941 - DNA, 15 bp, Homo sapiens
acccatagtatgcca

SEQ ID NO: 1121942 - DNA, 15 bp, Homo sapiens
gacccatagtatgcc

SEQ ID NO: 1121943 - DNA, 15 bp, Homo sapiens
agacccatagtatgc

SEQ ID NO: 1121944 - DNA, 15 bp, Homo sapiens
gagacccatagtatg

SEQ ID NO: 1121945 - DNA, 15 bp, Homo sapiens
agagacccatagtat

SEQ ID NO: 1121946 - DNA, 15 bp, Homo sapiens
tagagacccatagta

SEQ ID NO: 1121947 - DNA, 15 bp, Homo sapiens
ttagagacccatagt

SEQ ID NO: 1121948 - DNA, 15 bp, Homo sapiens
gttagagacccatag

SEQ ID NO: 1121949 - DNA, 15 bp, Homo sapiens
tgttagagacccata

SEQ ID NO: 1121950 - DNA, 15 bp, Homo sapiens
atgttagagacccat

SEQ ID NO: 1121951 - DNA, 15 bp, Homo sapiens
aatgttagagaccca

SEQ ID NO: 1121952 - DNA, 15 bp, Homo sapiens
aaatgttagagaccc

SEQ ID NO: 1121953 - DNA, 15 bp, Homo sapiens
aaaatgttagagacc

SEQ ID NO: 1121954 - DNA, 15 bp, Homo sapiens
taaaatgttagagac

SEQ ID NO: 1121955 - DNA, 15 bp, Homo sapiens
ttaaaatgttagaga

SEQ ID NO: 1121956 - DNA, 15 bp, Homo sapiens
gattaaaatgttaga

SEQ ID NO: 1121957 - DNA, 15 bp, Homo sapiens
tgattaaaatgttag

SEQ ID NO: 1121958 - DNA, 15 bp, Homo sapiens
ttgattaaaatgtta

SEQ ID NO: 1121959 - DNA, 15 bp, Homo sapiens
gttgattaaaatgtt

SEQ ID NO: 1121960 - DNA, 15 bp, Homo sapiens
agttgattaaaatgt

SEQ ID NO: 1121961 - DNA, 15 bp, Homo sapiens
cagttgattaaaatg

SEQ ID NO: 1121962 - DNA, 15 bp, Homo sapiens
tcagttgattaaaat

SEQ ID NO: 1121963 - DNA, 15 bp, Homo sapiens
atcagttgattaaaa

SEQ ID NO: 1121964 - DNA, 15 bp, Homo sapiens
aatcagttgattaaa

SEQ ID NO: 1121965 - DNA, 15 bp, Homo sapiens
taatcagttgattaa

SEQ ID NO: 1121966 - DNA, 15 bp, Homo sapiens
ataatcagttgatta

SEQ ID NO: 1121967 - DNA, 15 bp, Homo sapiens
aataatcagttgatt

SEQ ID NO: 1121968 - DNA, 15 bp, Homo sapiens
taataatcagttgat

SEQ ID NO: 1121969 - DNA, 15 bp, Homo sapiens
ttaataatcagttga

SEQ ID NO: 1121970 - DNA, 15 bp, Homo sapiens
gttaataatcagttg

SEQ ID NO: 1121971 - DNA, 15 bp, Homo sapiens
ggttaataatcagtt

SEQ ID NO: 1121972 - DNA, 15 bp, Homo sapiens
aggttaataatcagt

SEQ ID NO: 1121973 - DNA, 15 bp, Homo sapiens
caggttaataatcag

SEQ ID NO: 1121974 - DNA, 15 bp, Homo sapiens
acaggttaataatca

SEQ ID NO: 1121975 - DNA, 15 bp, Homo sapiens
aacaggttaataatc

SEQ ID NO: 1121976 - DNA, 15 bp, Homo sapiens
taacaggttaataat

SEQ ID NO: 1121977 - DNA, 15 bp, Homo sapiens
gtaacaggttaataa

SEQ ID NO: 1121978 - DNA, 15 bp, Homo sapiens
agtaacaggttaata

SEQ ID NO: 1121979 - DNA, 15 bp, Homo sapiens
gagtaacaggttaat

SEQ ID NO: 1121980 - DNA, 15 bp, Homo sapiens
ggagtaacaggttaa

SEQ ID NO: 1121981 - DNA, 15 bp, Homo sapiens
gggagtaacaggtta

SEQ ID NO: 1121982 - DNA, 15 bp, Homo sapiens
tgggagtaacaggtt

SEQ ID NO: 1121983 - DNA, 15 bp, Homo sapiens
ttgggagtaacaggt

SEQ ID NO: 1121984 - DNA, 15 bp, Homo sapiens
gttgggagtaacagg

SEQ ID NO: 1121985 - DNA, 15 bp, Homo sapiens
cgttgggagtaacag

SEQ ID NO: 1121986 - DNA, 15 bp, Homo sapiens
acgttgggagtaaca

SEQ ID NO: 1121987 - DNA, 15 bp, Homo sapiens
gacgttgggagtaac

SEQ ID NO: 1121988 - DNA, 15 bp, Homo sapiens
agacgttgggagtaa

SEQ ID NO: 1121989 - DNA, 15 bp, Homo sapiens
aagacgttgggagta

SEQ ID NO: 1121990 - DNA, 15 bp, Homo sapiens
aaagacgttgggagt

SEQ ID NO: 1121991 - DNA, 15 bp, Homo sapiens
gaaagacgttgggag

SEQ ID NO: 1121992 - DNA, 15 bp, Homo sapiens
agaaagacgttggga

SEQ ID NO: 1121993 - DNA, 15 bp, Homo sapiens
cagaaagacgttggg

SEQ ID NO: 1121994 - DNA, 15 bp, Homo sapiens
acagaaagacgttgg

SEQ ID NO: 1121995 - DNA, 15 bp, Homo sapiens
tacagaaagacgttg

SEQ ID NO: 1121996 - DNA, 15 bp, Homo sapiens
ttacagaaagacgtt

SEQ ID NO: 1121997 - DNA, 15 bp, Homo sapiens
cttacagaaagacgt

SEQ ID NO: 1121998 - DNA, 15 bp, Homo sapiens
gcttacagaaagacg

SEQ ID NO: 1121999 - DNA, 15 bp, Homo sapiens
ggcttacagaaagac

SEQ ID NO: 1122000 - DNA, 15 bp, Homo sapiens
aggcttacagaaaga

SEQ ID NO: 1122001 - DNA, 15 bp, Homo sapiens
gaggcttacagaaag

SEQ ID NO: 1122002 - DNA, 15 bp, Homo sapiens
agaggcttacagaaa

SEQ ID NO: 1122003 - DNA, 15 bp, Homo sapiens
cagaggcttacagaa

SEQ ID NO: 1122004 - DNA, 15 bp, Homo sapiens
gcagaggcttacaga

SEQ ID NO: 1122005 - DNA, 15 bp, Homo sapiens
agcagaggcttacag

SEQ ID NO: 1122006 - DNA, 15 bp, Homo sapiens
aagcagaggcttaca

SEQ ID NO: 1122007 - DNA, 15 bp, Homo sapiens
taagcagaggcttac

SEQ ID NO: 1122008 - DNA, 15 bp, Homo sapiens
ataagcagaggctta

SEQ ID NO: 1122009 - DNA, 15 bp, Homo sapiens
tataagcagaggctt

SEQ ID NO: 1122010 - DNA, 15 bp, Homo sapiens
atataagcagaggct

SEQ ID NO: 1122011 - DNA, 15 bp, Homo sapiens
gatataagcagaggc

SEQ ID NO: 1122012 - DNA, 15 bp, Homo sapiens
agatataagcagagg

SEQ ID NO: 1122013 - DNA, 15 bp, Homo sapiens
aagatataagcagag

SEQ ID NO: 1122014 - DNA, 15 bp, Homo sapiens
taagatataagcaga

SEQ ID NO: 1122015 - DNA, 15 bp, Homo sapiens
ttaagatataagcag

SEQ ID NO: 1122016 - DNA, 15 bp, Homo sapiens
cttaagatataagca

SEQ ID NO: 1122017 - DNA, 15 bp, Homo sapiens
tcttaagatataagc

SEQ ID NO: 1122018 - DNA, 15 bp, Homo sapiens
ctcttaagatataag

SEQ ID NO: 1122019 - DNA, 15 bp, Homo sapiens
tctcttaagatataa

SEQ ID NO: 1122020 - DNA, 15 bp, Homo sapiens
ttctcttaagatata

SEQ ID NO: 1122021 - DNA, 15 bp, Homo sapiens
tttctcttaagatat

SEQ ID NO: 1122022 - DNA, 15 bp, Homo sapiens
ttttctcttaagata

SEQ ID NO: 1122023 - DNA, 15 bp, Homo sapiens
attttctcttaagat

SEQ ID NO: 1122024 - DNA, 15 bp, Homo sapiens
aattttctcttaaga

SEQ ID NO: 1122025 - DNA, 15 bp, Homo sapiens
aaattttctcttaag

SEQ ID NO: 1122026 - DNA, 15 bp, Homo sapiens
gaaattttctcttaa

SEQ ID NO: 1122027 - DNA, 15 bp, Homo sapiens
ggaaattttctctta

SEQ ID NO: 1122028 - DNA, 15 bp, Homo sapiens
aggaaattttctctt

SEQ ID NO: 1122029 - DNA, 15 bp, Homo sapiens
aaggaaattttctct

SEQ ID NO: 1122030 - DNA, 15 bp, Homo sapiens
aaaggaaattttctc

SEQ ID NO: 1122031 - DNA, 15 bp, Homo sapiens
caaaggaaattttct

SEQ ID NO: 1122032 - DNA, 15 bp, Homo sapiens
ccaaaggaaattttc

SEQ ID NO: 1122033 - DNA, 15 bp, Homo sapiens
cccaaaggaaatttt

SEQ ID NO: 1122034 - DNA, 15 bp, Homo sapiens
tcccaaaggaaattt

SEQ ID NO: 1122035 - DNA, 15 bp, Homo sapiens
ttcccaaaggaaatt

SEQ ID NO: 1122036 - DNA, 15 bp, Homo sapiens
cttcccaaaggaaat

SEQ ID NO: 1122037 - DNA, 15 bp, Homo sapiens
tcttcccaaaggaaa

SEQ ID NO: 1122038 - DNA, 15 bp, Homo sapiens
atcttcccaaaggaa

SEQ ID NO: 1122039 - DNA, 15 bp, Homo sapiens
catcttcccaaagga

SEQ ID NO: 1122040 - DNA, 15 bp, Homo sapiens
tcatcttcccaaagg

SEQ ID NO: 1122041 - DNA, 15 bp, Homo sapiens
ttcatcttcccaaag

SEQ ID NO: 1122042 - DNA, 15 bp, Homo sapiens
tttcatcttcccaaa

SEQ ID NO: 1122043 - DNA, 15 bp, Homo sapiens
atttcatcttcccaa

SEQ ID NO: 1122044 - DNA, 15 bp, Homo sapiens
catttcatcttccca

SEQ ID NO: 1122045 - DNA, 15 bp, Homo sapiens
gcatttcatcttccc

SEQ ID NO: 1122046 - DNA, 15 bp, Homo sapiens
tgcatttcatcttcc

SEQ ID NO: 1122047 - DNA, 15 bp, Homo sapiens
atgcatttcatcttc

SEQ ID NO: 1122048 - DNA, 15 bp, Homo sapiens
gatgcatttcatctt

SEQ ID NO: 1122049 - DNA, 15 bp, Homo sapiens
ggatgcatttcatct

SEQ ID NO: 1122050 - DNA, 15 bp, Homo sapiens
aggatgcatttcatc

SEQ ID NO: 1122051 - DNA, 15 bp, Homo sapiens
aaggatgcatttcat

SEQ ID NO: 1122052 - DNA, 15 bp, Homo sapiens
aaaggatgcatttca

SEQ ID NO: 1122053 - DNA, 15 bp, Homo sapiens
taaaggatgcatttc

SEQ ID NO: 1122054 - DNA, 15 bp, Homo sapiens
ttaaaggatgcattt

SEQ ID NO: 1122055 - DNA, 15 bp, Homo sapiens
gttaaaggatgcatt

SEQ ID NO: 1122056 - DNA, 15 bp, Homo sapiens
tgttaaaggatgcat

SEQ ID NO: 1122057 - DNA, 15 bp, Homo sapiens
gtgttaaaggatgca

SEQ ID NO: 1122058 - DNA, 15 bp, Homo sapiens
agtgttaaaggatgc

SEQ ID NO: 1122059 - DNA, 15 bp, Homo sapiens
tagtgttaaaggatg

SEQ ID NO: 1122060 - DNA, 15 bp, Homo sapiens
atagtgttaaaggat

SEQ ID NO: 1122061 - DNA, 15 bp, Homo sapiens
tatagtgttaaagga

SEQ ID NO: 1122062 - DNA, 15 bp, Homo sapiens
atatagtgttaaagg

SEQ ID NO: 1122063 - DNA, 15 bp, Homo sapiens
aatatagtgttaaag

SEQ ID NO: 1122064 - DNA, 15 bp, Homo sapiens
gaatatagtgttaaa

SEQ ID NO: 1122065 - DNA, 15 bp, Homo sapiens
ggaatatagtgttaa

SEQ ID NO: 1122066 - DNA, 15 bp, Homo sapiens
aggaatatagtgtta

SEQ ID NO: 1122067 - DNA, 15 bp, Homo sapiens
aaggaatatagtgtt

SEQ ID NO: 1122068 - DNA, 15 bp, Homo sapiens
caaggaatatagtgt

SEQ ID NO: 1122069 - DNA, 15 bp, Homo sapiens
gcaaggaatatagtg

SEQ ID NO: 1122070 - DNA, 15 bp, Homo sapiens
agcaaggaatatagt

SEQ ID NO: 1122071 - DNA, 15 bp, Homo sapiens
gagcaaggaatatag

SEQ ID NO: 1122072 - DNA, 15 bp, Homo sapiens
agagcaaggaatata

SEQ ID NO: 1122073 - DNA, 15 bp, Homo sapiens
gagagcaaggaatat

SEQ ID NO: 1122074 - DNA, 15 bp, Homo sapiens
agagagcaaggaata

SEQ ID NO: 1122075 - DNA, 15 bp, Homo sapiens
gagagagcaaggaat

SEQ ID NO: 1122076 - DNA, 15 bp, Homo sapiens
agagagagcaaggaa

SEQ ID NO: 1122077 - DNA, 15 bp, Homo sapiens
gagagagagcaagga

SEQ ID NO: 1122078 - DNA, 15 bp, Homo sapiens
agagagagagcaagg

SEQ ID NO: 1122079 - DNA, 15 bp, Homo sapiens
gagagagagagcaag

SEQ ID NO: 1122080 - DNA, 15 bp, Homo sapiens
agagagagagagcaa

SEQ ID NO: 1122081 - DNA, 15 bp, Homo sapiens
gagagagagagagca

SEQ ID NO: 1122082 - DNA, 15 bp, Homo sapiens
agagagagagagagc

SEQ ID NO: 1122083 - DNA, 15 bp, Homo sapiens
gaagagagagagaga

SEQ ID NO: 1122084 - DNA, 15 bp, Homo sapiens
agaagagagagagag

SEQ ID NO: 1122085 - DNA, 15 bp, Homo sapiens
gagaagagagagaga

SEQ ID NO: 1122086 - DNA, 15 bp, Homo sapiens
agagaagagagagag

SEQ ID NO: 1122087 - DNA, 15 bp, Homo sapiens
gagagaagagagaga

SEQ ID NO: 1122088 - DNA, 15 bp, Homo sapiens
agagagaagagagag

SEQ ID NO: 1122089 - DNA, 15 bp, Homo sapiens
gagagagaagagaga

SEQ ID NO: 1122090 - DNA, 15 bp, Homo sapiens
agagagagaagagag

SEQ ID NO: 1122091 - DNA, 15 bp, Homo sapiens
gagagagagaagaga

SEQ ID NO: 1122092 - DNA, 15 bp, Homo sapiens
agagagagagaagag

SEQ ID NO: 1122093 - DNA, 15 bp, Homo sapiens
gagagagagagaaga

SEQ ID NO: 1122094 - DNA, 15 bp, Homo sapiens
agagagagagagaag

SEQ ID NO: 1122095 - DNA, 15 bp, Homo sapiens
cgagagagagagaga

SEQ ID NO: 1122096 - DNA, 15 bp, Homo sapiens
gcgagagagagagag

SEQ ID NO: 1122097 - DNA, 15 bp, Homo sapiens
agcgagagagagaga

SEQ ID NO: 1122098 - DNA, 15 bp, Homo sapiens
gagcgagagagagag

SEQ ID NO: 1122099 - DNA, 15 bp, Homo sapiens
cgagcgagagagaga

SEQ ID NO: 1122100 - DNA, 15 bp, Homo sapiens
gcgagcgagagagag

SEQ ID NO: 1122101 - DNA, 15 bp, Homo sapiens
agcgagcgagagaga

SEQ ID NO: 1122102 - DNA, 15 bp, Homo sapiens
gagcgagcgagagag

SEQ ID NO: 1122103 - DNA, 15 bp, Homo sapiens
agagcgagcgagaga

SEQ ID NO: 1122104 - DNA, 15 bp, Homo sapiens
gagagcgagcgagag

SEQ ID NO: 1122105 - DNA, 15 bp, Homo sapiens
agagagcgagcgaga

SEQ ID NO: 1122106 - DNA, 15 bp, Homo sapiens
gagagagcgagcgag

SEQ ID NO: 1122107 - DNA, 15 bp, Homo sapiens
agagagagcgagcga

SEQ ID NO: 1122108 - DNA, 15 bp, Homo sapiens
gagagagagcgagcg

SEQ ID NO: 1122109 - DNA, 15 bp, Homo sapiens
agagagagagcgagc

SEQ ID NO: 1122110 - DNA, 15 bp, Homo sapiens
gagagagagagcgag

SEQ ID NO: 1122111 - DNA, 15 bp, Homo sapiens
tgagagagagagcga

SEQ ID NO: 1122112 - DNA, 15 bp, Homo sapiens
ctgagagagagagcg

SEQ ID NO: 1122113 - DNA, 15 bp, Homo sapiens
cctgagagagagagc

SEQ ID NO: 1122114 - DNA, 15 bp, Homo sapiens
acctgagagagagag

SEQ ID NO: 1122115 - DNA, 15 bp, Homo sapiens
gacctgagagagaga

SEQ ID NO: 1122116 - DNA, 15 bp, Homo sapiens
agacctgagagagag

SEQ ID NO: 1122117 - DNA, 15 bp, Homo sapiens
aagacctgagagaga

SEQ ID NO: 1122118 - DNA, 15 bp, Homo sapiens
caagacctgagagag

SEQ ID NO: 1122119 - DNA, 15 bp, Homo sapiens
ccaagacctgagaga

SEQ ID NO: 1122120 - DNA, 15 bp, Homo sapiens
gccaagacctgagag

SEQ ID NO: 1122121 - DNA, 15 bp, Homo sapiens
ggccaagacctgaga

SEQ ID NO: 1122122 - DNA, 15 bp, Homo sapiens
tggccaagacctgag

SEQ ID NO: 1122123 - DNA, 15 bp, Homo sapiens
gtggccaagacctga

SEQ ID NO: 1122124 - DNA, 15 bp, Homo sapiens
tgtggccaagacctg

SEQ ID NO: 1122125 - DNA, 15 bp, Homo sapiens
gtgtggccaagacct

SEQ ID NO: 1122126 - DNA, 15 bp, Homo sapiens
agtgtggccaagacc

SEQ ID NO: 1122127 - DNA, 15 bp, Homo sapiens
aagtgtggccaagac

SEQ ID NO: 1122128 - DNA, 15 bp, Homo sapiens
gaagtgtggccaaga

SEQ ID NO: 1122129 - DNA, 15 bp, Homo sapiens
agaagtgtggccaag

SEQ ID NO: 1122130 - DNA, 15 bp, Homo sapiens
tcagaagtgtggcca

SEQ ID NO: 1122131 - DNA, 15 bp, Homo sapiens
ctcagaagtgtggcc

SEQ ID NO: 1122132 - DNA, 15 bp, Homo sapiens
gctcagaagtgtggc

SEQ ID NO: 1122133 - DNA, 15 bp, Homo sapiens
tgctcagaagtgtgg

SEQ ID NO: 1122134 - DNA, 15 bp, Homo sapiens
ctgctcagaagtgtg

SEQ ID NO: 1122135 - DNA, 15 bp, Homo sapiens
gctgctcagaagtgt

SEQ ID NO: 1122136 - DNA, 15 bp, Homo sapiens
tgctgctcagaagtg

SEQ ID NO: 1122137 - DNA, 15 bp, Homo sapiens
ttgctgctcagaagt

SEQ ID NO: 1122138 - DNA, 15 bp, Homo sapiens
tttgctgctcagaag

SEQ ID NO: 1122139 - DNA, 15 bp, Homo sapiens
gtttgctgctcagaa

SEQ ID NO: 1122140 - DNA, 15 bp, Homo sapiens
agtttgctgctcaga

SEQ ID NO: 1122141 - DNA, 15 bp, Homo sapiens
tagtttgctgctcag

SEQ ID NO: 1122142 - DNA, 15 bp, Homo sapiens
atagtttgctgctca

SEQ ID NO: 1122143 - DNA, 15 bp, Homo sapiens
catagtttgctgctc

SEQ ID NO: 1122144 - DNA, 15 bp, Homo sapiens
tcatagtttgctgct

SEQ ID NO: 1122145 - DNA, 15 bp, Homo sapiens
ttcatagtttgctgc

SEQ ID NO: 1122146 - DNA, 15 bp, Homo sapiens
cttcatagtttgctg

SEQ ID NO: 1122147 - DNA, 15 bp, Homo sapiens
ccttcatagtttgct

SEQ ID NO: 1122148 - DNA, 15 bp, Homo sapiens
gccttcatagtttgc

SEQ ID NO: 1122149 - DNA, 15 bp, Homo sapiens
agccttcatagtttg

SEQ ID NO: 1122150 - DNA, 15 bp, Homo sapiens
cagccttcatagttt

SEQ ID NO: 1122151 - DNA, 15 bp, Homo sapiens
tcagccttcatagtt

SEQ ID NO: 1122152 - DNA, 15 bp, Homo sapiens
ctcagccttcatagt

SEQ ID NO: 1122153 - DNA, 15 bp, Homo sapiens
actcagccttcatag

SEQ ID NO: 1122154 - DNA, 15 bp, Homo sapiens
cactcagccttcata

SEQ ID NO: 1122155 - DNA, 15 bp, Homo sapiens
acactcagccttcat

SEQ ID NO: 1122156 - DNA, 15 bp, Homo sapiens
cacactcagccttca

SEQ ID NO: 1122157 - DNA, 15 bp, Homo sapiens
gcacactcagccttc

SEQ ID NO: 1122158 - DNA, 15 bp, Homo sapiens
tgcacactcagcctt

SEQ ID NO: 1122159 - DNA, 15 bp, Homo sapiens
atgcacactcagcct

SEQ ID NO: 1122160 - DNA, 15 bp, Homo sapiens
catgcacactcagcc

SEQ ID NO: 1122161 - DNA, 15 bp, Homo sapiens
ccatgcacactcagc

SEQ ID NO: 1122162 - DNA, 15 bp, Homo sapiens
cccatgcacactcag

SEQ ID NO: 1122163 - DNA, 15 bp, Homo sapiens
gcccatgcacactca

SEQ ID NO: 1122164 - DNA, 15 bp, Homo sapiens
agcccatgcacactc

SEQ ID NO: 1122165 - DNA, 15 bp, Homo sapiens
cagcccatgcacact

SEQ ID NO: 1122166 - DNA, 15 bp, Homo sapiens
tcagcccatgcacac

SEQ ID NO: 1122167 - DNA, 15 bp, Homo sapiens
ctcagcccatgcaca

SEQ ID NO: 1122168 - DNA, 15 bp, Homo sapiens
actcagcccatgcac

SEQ ID NO: 1122169 - DNA, 15 bp, Homo sapiens
aactcagcccatgca

SEQ ID NO: 1122170 - DNA, 15 bp, Homo sapiens
caactcagcccatgc

SEQ ID NO: 1122171 - DNA, 15 bp, Homo sapiens
tcaactcagcccatg

SEQ ID NO: 1122172 - DNA, 15 bp, Homo sapiens
ctcaactcagcccat

SEQ ID NO: 1122173 - DNA, 15 bp, Homo sapiens
actcaactcagccca

SEQ ID NO: 1122174 - DNA, 15 bp, Homo sapiens
cactcaactcagccc

SEQ ID NO: 1122175 - DNA, 15 bp, Homo sapiens
acactcaactcagcc

SEQ ID NO: 1122176 - DNA, 15 bp, Homo sapiens
aacactcaactcagc

SEQ ID NO: 1122177 - DNA, 15 bp, Homo sapiens
aaacactcaactcag

SEQ ID NO: 1122178 - DNA, 15 bp, Homo sapiens
aaaacactcaactca

SEQ ID NO: 1122179 - DNA, 15 bp, Homo sapiens
taaaacactcaactc

SEQ ID NO: 1122180 - DNA, 15 bp, Homo sapiens
ttaaaacactcaact

SEQ ID NO: 1122181 - DNA, 15 bp, Homo sapiens
attaaaacactcaac

SEQ ID NO: 1122182 - DNA, 15 bp, Homo sapiens
gattaaaacactcaa

SEQ ID NO: 1122183 - DNA, 15 bp, Homo sapiens
ggattaaaacactca

SEQ ID NO: 1122184 - DNA, 15 bp, Homo sapiens
tggattaaaacactc

SEQ ID NO: 1122185 - DNA, 15 bp, Homo sapiens
gtggattaaaacact

SEQ ID NO: 1122186 - DNA, 15 bp, Homo sapiens
tgtggattaaaacac

SEQ ID NO: 1122187 - DNA, 15 bp, Homo sapiens
ttgtggattaaaaca

SEQ ID NO: 1122188 - DNA, 15 bp, Homo sapiens
tttgtggattaaaac

SEQ ID NO: 1122189 - DNA, 15 bp, Homo sapiens
ttttgtggattaaaa

SEQ ID NO: 1122190 - DNA, 15 bp, Homo sapiens
gttttgtggattaaa

SEQ ID NO: 1122191 - DNA, 15 bp, Homo sapiens
agttttgtggattaa

SEQ ID NO: 1122192 - DNA, 15 bp, Homo sapiens
tagttttgtggatta

SEQ ID NO: 1122193 - DNA, 15 bp, Homo sapiens
ttagttttgtggatt

SEQ ID NO: 1122194 - DNA, 15 bp, Homo sapiens
attagttttgtggat

SEQ ID NO: 1122195 - DNA, 15 bp, Homo sapiens
aattagttttgtgga

SEQ ID NO: 1122196 - DNA, 15 bp, Homo sapiens
taattagttttgtgg

SEQ ID NO: 1122197 - DNA, 15 bp, Homo sapiens
ttaattagttttgtg

SEQ ID NO: 1122198 - DNA, 15 bp, Homo sapiens
gttaattagttttgt

SEQ ID NO: 1122199 - DNA, 15 bp, Homo sapiens
cgttaattagttttg

SEQ ID NO: 1122200 - DNA, 15 bp, Homo sapiens
ccgttaattagtttt

SEQ ID NO: 1122201 - DNA, 15 bp, Homo sapiens
accgttaattagttt

SEQ ID NO: 1122202 - DNA, 15 bp, Homo sapiens
aaccgttaattagtt

SEQ ID NO: 1122203 - DNA, 15 bp, Homo sapiens
aaaccgttaattagt

SEQ ID NO: 1122204 - DNA, 15 bp, Homo sapiens
caaaccgttaattag

SEQ ID NO: 1122205 - DNA, 15 bp, Homo sapiens
ccaaaccgttaatta

SEQ ID NO: 1122206 - DNA, 15 bp, Homo sapiens
accaaaccgttaatt

SEQ ID NO: 1122207 - DNA, 15 bp, Homo sapiens
aaccaaaccgttaat

SEQ ID NO: 1122208 - DNA, 15 bp, Homo sapiens
taaccaaaccgttaa

SEQ ID NO: 1122209 - DNA, 15 bp, Homo sapiens
ttaaccaaaccgtta

SEQ ID NO: 1122210 - DNA, 15 bp, Homo sapiens
attaaccaaaccgtt

SEQ ID NO: 1122211 - DNA, 15 bp, Homo sapiens
gattaaccaaaccgt

SEQ ID NO: 1122212 - DNA, 15 bp, Homo sapiens
ggattaaccaaaccg

SEQ ID NO: 1122213 - DNA, 15 bp, Homo sapiens
tggattaaccaaacc

SEQ ID NO: 1122214 - DNA, 15 bp, Homo sapiens
ctggattaaccaaac

SEQ ID NO: 1122215 - DNA, 15 bp, Homo sapiens
actggattaaccaaa

SEQ ID NO: 1122216 - DNA, 15 bp, Homo sapiens
tactggattaaccaa

SEQ ID NO: 1122217 - DNA, 15 bp, Homo sapiens
gtactggattaacca

SEQ ID NO: 1122218 - DNA, 15 bp, Homo sapiens
cgtactggattaacc

SEQ ID NO: 1122219 - DNA, 15 bp, Homo sapiens
acgtactggattaac

SEQ ID NO: 1122220 - DNA, 15 bp, Homo sapiens
aacgtactggattaa

SEQ ID NO: 1122221 - DNA, 15 bp, Homo sapiens
aaacgtactggatta

SEQ ID NO: 1122222 - DNA, 15 bp, Homo sapiens
aaaacgtactggatt

SEQ ID NO: 1122223 - DNA, 15 bp, Homo sapiens
caaaacgtactggat

SEQ ID NO: 1122224 - DNA, 15 bp, Homo sapiens
acaaaacgtactgga

SEQ ID NO: 1122225 - DNA, 15 bp, Homo sapiens
cacaaaacgtactgg

SEQ ID NO: 1122226 - DNA, 15 bp, Homo sapiens
tcacaaaacgtactg

SEQ ID NO: 1122227 - DNA, 15 bp, Homo sapiens
atcacaaaacgtact

SEQ ID NO: 1122228 - DNA, 15 bp, Homo sapiens
tatcacaaaacgtac

SEQ ID NO: 1122229 - DNA, 15 bp, Homo sapiens
gtatcacaaaacgta

SEQ ID NO: 1122230 - DNA, 15 bp, Homo sapiens
tgtatcacaaaacgt

SEQ ID NO: 1122231 - DNA, 15 bp, Homo sapiens
gtgtatcacaaaacg

SEQ ID NO: 1122232 - DNA, 15 bp, Homo sapiens
tgtgtatcacaaaac

SEQ ID NO: 1122233 - DNA, 15 bp, Homo sapiens
ttgtgtatcacaaaa

SEQ ID NO: 1122234 - DNA, 15 bp, Homo sapiens
tttgtgtatcacaaa

SEQ ID NO: 1122235 - DNA, 15 bp, Homo sapiens
ttttgtgtatcacaa

SEQ ID NO: 1122236 - DNA, 15 bp, Homo sapiens
attttgtgtatcaca

SEQ ID NO: 1122237 - DNA, 15 bp, Homo sapiens
gattttgtgtatcac

SEQ ID NO: 1122238 - DNA, 15 bp, Homo sapiens
cgattttgtgtatca

SEQ ID NO: 1122239 - DNA, 15 bp, Homo sapiens
acgattttgtgtatc

SEQ ID NO: 1122240 - DNA, 15 bp, Homo sapiens
aacgattttgtgtat

SEQ ID NO: 1122241 - DNA, 15 bp, Homo sapiens
taacgattttgtgta

SEQ ID NO: 1122242 - DNA, 15 bp, Homo sapiens
gtaacgattttgtgt

SEQ ID NO: 1122243 - DNA, 15 bp, Homo sapiens
agtaacgattttgtg

SEQ ID NO: 1122244 - DNA, 15 bp, Homo sapiens
cagtaacgattttgt

SEQ ID NO: 1122245 - DNA, 15 bp, Homo sapiens
ccagtaacgattttg

SEQ ID NO: 1122246 - DNA, 15 bp, Homo sapiens
gccagtaacgatttt

SEQ ID NO: 1122247 - DNA, 15 bp, Homo sapiens
agccagtaacgattt

SEQ ID NO: 1122248 - DNA, 15 bp, Homo sapiens
cagccagtaacgatt

SEQ ID NO: 1122249 - DNA, 15 bp, Homo sapiens
gcagccagtaacgat

SEQ ID NO: 1122250 - DNA, 15 bp, Homo sapiens
tgcagccagtaacga

SEQ ID NO: 1122251 - DNA, 15 bp, Homo sapiens
atgcagccagtaacg

SEQ ID NO: 1122252 - DNA, 15 bp, Homo sapiens
catgcagccagtaac

SEQ ID NO: 1122253 - DNA, 15 bp, Homo sapiens
ccatgcagccagtaa

SEQ ID NO: 1122254 - DNA, 15 bp, Homo sapiens
accatgcagccagta

SEQ ID NO: 1122255 - DNA, 15 bp, Homo sapiens
taccatgcagccagt

SEQ ID NO: 1122256 - DNA, 15 bp, Homo sapiens
ttaccatgcagccag

SEQ ID NO: 1122257 - DNA, 15 bp, Homo sapiens
attaccatgcagcca

SEQ ID NO: 1122258 - DNA, 15 bp, Homo sapiens
aattaccatgcagcc

SEQ ID NO: 1122259 - DNA, 15 bp, Homo sapiens
caattaccatgcagc

SEQ ID NO: 1122260 - DNA, 15 bp, Homo sapiens
ccaattaccatgcag

SEQ ID NO: 1122261 - DNA, 15 bp, Homo sapiens
cccaattaccatgca

SEQ ID NO: 1122262 - DNA, 15 bp, Homo sapiens
gcccaattaccatgc

SEQ ID NO: 1122263 - DNA, 15 bp, Homo sapiens
tgcccaattaccatg

SEQ ID NO: 1122264 - DNA, 15 bp, Homo sapiens
atgcccaattaccat

SEQ ID NO: 1122265 - DNA, 15 bp, Homo sapiens
tatgcccaattacca

SEQ ID NO: 1122266 - DNA, 15 bp, Homo sapiens
ttatgcccaattacc

SEQ ID NO: 1122267 - DNA, 15 bp, Homo sapiens
tttatgcccaattac

SEQ ID NO: 1122268 - DNA, 15 bp, Homo sapiens
atttatgcccaatta

SEQ ID NO: 1122269 - DNA, 15 bp, Homo sapiens
catttatgcccaatt

SEQ ID NO: 1122270 - DNA, 15 bp, Homo sapiens
ccatttatgcccaat

SEQ ID NO: 1122271 - DNA, 15 bp, Homo sapiens
accatttatgcccaa

SEQ ID NO: 1122272 - DNA, 15 bp, Homo sapiens
taccatttatgccca

SEQ ID NO: 1122273 - DNA, 15 bp, Homo sapiens
ttaccatttatgccc

SEQ ID NO: 1122274 - DNA, 15 bp, Homo sapiens
cttaccatttatgcc

SEQ ID NO: 1122275 - DNA, 15 bp, Homo sapiens
acttaccatttatgc

SEQ ID NO: 1122276 - DNA, 15 bp, Homo sapiens
tacttaccatttatg

SEQ ID NO: 1122277 - DNA, 15 bp, Homo sapiens
ctacttaccatttat

SEQ ID NO: 1122278 - DNA, 15 bp, Homo sapiens
actacttaccattta

SEQ ID NO: 1122279 - DNA, 15 bp, Homo sapiens
aactacttaccattt

SEQ ID NO: 1122280 - DNA, 15 bp, Homo sapiens
gaactacttaccatt

SEQ ID NO: 1122281 - DNA, 15 bp, Homo sapiens
tgaactacttaccat

SEQ ID NO: 1122282 - DNA, 15 bp, Homo sapiens
gtgaactacttacca

SEQ ID NO: 1122283 - DNA, 15 bp, Homo sapiens
tgtgaactacttacc

SEQ ID NO: 1122284 - DNA, 15 bp, Homo sapiens
atgtgaactacttac

SEQ ID NO: 1122285 - DNA, 15 bp, Homo sapiens
tatgtgaactactta

SEQ ID NO: 1122286 - DNA, 15 bp, Homo sapiens
ttatgtgaactactt

SEQ ID NO: 1122287 - DNA, 15 bp, Homo sapiens
cttatgtgaactact

SEQ ID NO: 1122288 - DNA, 15 bp, Homo sapiens
acttatgtgaactac

SEQ ID NO: 1122289 - DNA, 15 bp, Homo sapiens
cacttatgtgaacta

SEQ ID NO: 1122290 - DNA, 15 bp, Homo sapiens
tcacttatgtgaact

SEQ ID NO: 1122291 - DNA, 15 bp, Homo sapiens
gtcacttatgtgaac

SEQ ID NO: 1122292 - DNA, 15 bp, Homo sapiens
agtcacttatgtgaa

SEQ ID NO: 1122293 - DNA, 15 bp, Homo sapiens
cagtcacttatgtga

SEQ ID NO: 1122294 - DNA, 15 bp, Homo sapiens
acagtcacttatgtg

SEQ ID NO: 1122295 - DNA, 15 bp, Homo sapiens
tacagtcacttatgt

SEQ ID NO: 1122296 - DNA, 15 bp, Homo sapiens
ttacagtcacttatg

SEQ ID NO: 1122297 - DNA, 15 bp, Homo sapiens
attacagtcacttat

SEQ ID NO: 1122298 - DNA, 15 bp, Homo sapiens
aattacagtcactta

SEQ ID NO: 1122299 - DNA, 15 bp, Homo sapiens
taattacagtcactt

SEQ ID NO: 1122300 - DNA, 15 bp, Homo sapiens
ctaattacagtcact

SEQ ID NO: 1122301 - DNA, 15 bp, Homo sapiens
actaattacagtcac

SEQ ID NO: 1122302 - DNA, 15 bp, Homo sapiens
tactaattacagtca

SEQ ID NO: 1122303 - DNA, 15 bp, Homo sapiens
atactaattacagtc

SEQ ID NO: 1122304 - DNA, 15 bp, Homo sapiens
gatactaattacagt

SEQ ID NO: 1122305 - DNA, 15 bp, Homo sapiens
tgatactaattacag

SEQ ID NO: 1122306 - DNA, 15 bp, Homo sapiens
gtgatactaattaca

SEQ ID NO: 1122307 - DNA, 15 bp, Homo sapiens
agtgatactaattac

SEQ ID NO: 1122308 - DNA, 15 bp, Homo sapiens
aagtgatactaatta

SEQ ID NO: 1122309 - DNA, 15 bp, Homo sapiens
caagtgatactaatt

SEQ ID NO: 1122310 - DNA, 15 bp, Homo sapiens
acaagtgatactaat

SEQ ID NO: 1122311 - DNA, 15 bp, Homo sapiens
cacaagtgatactaa

SEQ ID NO: 1122312 - DNA, 15 bp, Homo sapiens
gcacaagtgatacta

SEQ ID NO: 1122313 - DNA, 15 bp, Homo sapiens
tgcacaagtgatact

SEQ ID NO: 1122314 - DNA, 15 bp, Homo sapiens
gtgcacaagtgatac

SEQ ID NO: 1122315 - DNA, 15 bp, Homo sapiens
tgtgcacaagtgata

SEQ ID NO: 1122316 - DNA, 15 bp, Homo sapiens
ctgtgcacaagtgat

SEQ ID NO: 1122317 - DNA, 15 bp, Homo sapiens
tctgtgcacaagtga

SEQ ID NO: 1122318 - DNA, 15 bp, Homo sapiens
ctctgtgcacaagtg

SEQ ID NO: 1122319 - DNA, 15 bp, Homo sapiens
tctctgtgcacaagt

SEQ ID NO: 1122320 - DNA, 15 bp, Homo sapiens
ttctctgtgcacaag

SEQ ID NO: 1122321 - DNA, 15 bp, Homo sapiens
tttctctgtgcacaa

SEQ ID NO: 1122322 - DNA, 15 bp, Homo sapiens
ttttctctgtgcaca

SEQ ID NO: 1122323 - DNA, 15 bp, Homo sapiens
tttttctctgtgcac

SEQ ID NO: 1122324 - DNA, 15 bp, Homo sapiens
ttttttctctgtgca

SEQ ID NO: 1122325 - DNA, 15 bp, Homo sapiens
attttttctctgtgc

SEQ ID NO: 1122326 - DNA, 15 bp, Homo sapiens
cattttttctctgtg

SEQ ID NO: 1122327 - DNA, 15 bp, Homo sapiens
gcattttttctctgt

SEQ ID NO: 1122328 - DNA, 15 bp, Homo sapiens
tgcattttttctctg

SEQ ID NO: 1122329 - DNA, 15 bp, Homo sapiens
gtgcattttttctct

SEQ ID NO: 1122330 - DNA, 15 bp, Homo sapiens
agtgcattttttctc

SEQ ID NO: 1122331 - DNA, 15 bp, Homo sapiens
gagtgcattttttct

SEQ ID NO: 1122332 - DNA, 15 bp, Homo sapiens
agagtgcattttttc

SEQ ID NO: 1122333 - DNA, 15 bp, Homo sapiens
cagagtgcatttttt

SEQ ID NO: 1122334 - DNA, 15 bp, Homo sapiens
acagagtgcattttt

SEQ ID NO: 1122335 - DNA, 15 bp, Homo sapiens
cacagagtgcatttt

SEQ ID NO: 1122336 - DNA, 15 bp, Homo sapiens
ccacagagtgcattt

SEQ ID NO: 1122337 - DNA, 15 bp, Homo sapiens
accacagagtgcatt

SEQ ID NO: 1122338 - DNA, 15 bp, Homo sapiens
gaccacagagtgcat

SEQ ID NO: 1122339 - DNA, 15 bp, Homo sapiens
agaccacagagtgca

SEQ ID NO: 1122340 - DNA, 15 bp, Homo sapiens
cagaccacagagtgc

SEQ ID NO: 1122341 - DNA, 15 bp, Homo sapiens
ccagaccacagagtg

SEQ ID NO: 1122342 - DNA, 15 bp, Homo sapiens
accagaccacagagt

SEQ ID NO: 1122343 - DNA, 15 bp, Homo sapiens
taccagaccacagag

SEQ ID NO: 1122344 - DNA, 15 bp, Homo sapiens
ctaccagaccacaga

SEQ ID NO: 1122345 - DNA, 15 bp, Homo sapiens
cctaccagaccacag

SEQ ID NO: 1122346 - DNA, 15 bp, Homo sapiens
ccctaccagaccaca

SEQ ID NO: 1122347 - DNA, 15 bp, Homo sapiens
tccctaccagaccac

SEQ ID NO: 1122348 - DNA, 15 bp, Homo sapiens
ttccctaccagacca

SEQ ID NO: 1122349 - DNA, 15 bp, Homo sapiens
tttccctaccagacc

SEQ ID NO: 1122350 - DNA, 15 bp, Homo sapiens
ctttccctaccagac

SEQ ID NO: 1122351 - DNA, 15 bp, Homo sapiens
tctttccctaccaga

SEQ ID NO: 1122352 - DNA, 15 bp, Homo sapiens
atctttccctaccag

SEQ ID NO: 1122353 - DNA, 15 bp, Homo sapiens
catctttccctacca

SEQ ID NO: 1122354 - DNA, 15 bp, Homo sapiens
tcatctttccctacc

SEQ ID NO: 1122355 - DNA, 15 bp, Homo sapiens
ttcatctttccctac

SEQ ID NO: 1122356 - DNA, 15 bp, Homo sapiens
cttcatctttcccta

SEQ ID NO: 1122357 - DNA, 15 bp, Homo sapiens
ccttcatctttccct

SEQ ID NO: 1122358 - DNA, 15 bp, Homo sapiens
cccttcatctttccc

SEQ ID NO: 1122359 - DNA, 15 bp, Homo sapiens
ccccttcatctttcc

SEQ ID NO: 1122360 - DNA, 15 bp, Homo sapiens
tccccttcatctttc

SEQ ID NO: 1122361 - DNA, 15 bp, Homo sapiens
gtccccttcatcttt

SEQ ID NO: 1122362 - DNA, 15 bp, Homo sapiens
ggtccccttcatctt

SEQ ID NO: 1122363 - DNA, 15 bp, Homo sapiens
aggtccccttcatct

SEQ ID NO: 1122364 - DNA, 15 bp, Homo sapiens
caggtccccttcatc

SEQ ID NO: 1122365 - DNA, 15 bp, Homo sapiens
tcaggtccccttcat

SEQ ID NO: 1122366 - DNA, 15 bp, Homo sapiens
ttcaggtccccttca

SEQ ID NO: 1122367 - DNA, 15 bp, Homo sapiens
attcaggtccccttc

SEQ ID NO: 1122368 - DNA, 15 bp, Homo sapiens
cattcaggtcccctt

SEQ ID NO: 1122369 - DNA, 15 bp, Homo sapiens
ccattcaggtcccct

SEQ ID NO: 1122370 - DNA, 15 bp, Homo sapiens
accattcaggtcccc

SEQ ID NO: 1122371 - DNA, 15 bp, Homo sapiens
caccattcaggtccc

SEQ ID NO: 1122372 - DNA, 15 bp, Homo sapiens
gcaccattcaggtcc

SEQ ID NO: 1122373 - DNA, 15 bp, Homo sapiens
tgcaccattcaggtc

SEQ ID NO: 1122374 - DNA, 15 bp, Homo sapiens
ctgcaccattcaggt

SEQ ID NO: 1122375 - DNA, 15 bp, Homo sapiens
tctgcaccattcagg

SEQ ID NO: 1122376 - DNA, 15 bp, Homo sapiens
ttctgcaccattcag

SEQ ID NO: 1122377 - DNA, 15 bp, Homo sapiens
cttctgcaccattca

SEQ ID NO: 1122378 - DNA, 15 bp, Homo sapiens
ccttctgcaccattc

SEQ ID NO: 1122379 - DNA, 15 bp, Homo sapiens
accttctgcaccatt

SEQ ID NO: 1122380 - DNA, 15 bp, Homo sapiens
aaccttctgcaccat

SEQ ID NO: 1122381 - DNA, 15 bp, Homo sapiens
caaccttctgcacca

SEQ ID NO: 1122382 - DNA, 15 bp, Homo sapiens
acaaccttctgcacc

SEQ ID NO: 1122383 - DNA, 15 bp, Homo sapiens
aacaaccttctgcac

SEQ ID NO: 1122384 - DNA, 15 bp, Homo sapiens
gaacaaccttctgca

SEQ ID NO: 1122385 - DNA, 15 bp, Homo sapiens
agaacaaccttctgc

SEQ ID NO: 1122386 - DNA, 15 bp, Homo sapiens
aagaacaaccttctg

SEQ ID NO: 1122387 - DNA, 15 bp, Homo sapiens
aaagaacaaccttct

SEQ ID NO: 1122388 - DNA, 15 bp, Homo sapiens
gaaagaacaaccttc

SEQ ID NO: 1122389 - DNA, 15 bp, Homo sapiens
tgaaagaacaacctt

SEQ ID NO: 1122390 - DNA, 15 bp, Homo sapiens
atgaaagaacaacct

SEQ ID NO: 1122391 - DNA, 15 bp, Homo sapiens
catgaaagaacaacc

SEQ ID NO: 1122392 - DNA, 15 bp, Homo sapiens
tcatgaaagaacaac

SEQ ID NO: 1122393 - DNA, 15 bp, Homo sapiens
gtcatgaaagaacaa

SEQ ID NO: 1122394 - DNA, 15 bp, Homo sapiens
ggtcatgaaagaaca

SEQ ID NO: 1122395 - DNA, 15 bp, Homo sapiens
aggtcatgaaagaac

SEQ ID NO: 1122396 - DNA, 15 bp, Homo sapiens
aaggtcatgaaagaa

SEQ ID NO: 1122397 - DNA, 15 bp, Homo sapiens
gaaggtcatgaaaga

SEQ ID NO: 1122398 - DNA, 15 bp, Homo sapiens
ggaaggtcatgaaag

SEQ ID NO: 1122399 - DNA, 15 bp, Homo sapiens
aggaaggtcatgaaa

SEQ ID NO: 1122400 - DNA, 15 bp, Homo sapiens
caggaaggtcatgaa

SEQ ID NO: 1122401 - DNA, 15 bp, Homo sapiens
tcaggaaggtcatga

SEQ ID NO: 1122402 - DNA, 15 bp, Homo sapiens
ctcaggaaggtcatg

SEQ ID NO: 1122403 - DNA, 15 bp, Homo sapiens
actcaggaaggtcat

SEQ ID NO: 1122404 - DNA, 15 bp, Homo sapiens
aactcaggaaggtca

SEQ ID NO: 1122405 - DNA, 15 bp, Homo sapiens
aaactcaggaaggtc

SEQ ID NO: 1122406 - DNA, 15 bp, Homo sapiens
gaaactcaggaaggt

SEQ ID NO: 1122407 - DNA, 15 bp, Homo sapiens
tgaaactcaggaagg

SEQ ID NO: 1122408 - DNA, 15 bp, Homo sapiens
ctgaaactcaggaag

SEQ ID NO: 1122409 - DNA, 15 bp, Homo sapiens
tctgaaactcaggaa

SEQ ID NO: 1122410 - DNA, 15 bp, Homo sapiens
ttctgaaactcagga

SEQ ID NO: 1122411 - DNA, 15 bp, Homo sapiens
attctgaaactcagg

SEQ ID NO: 1122412 - DNA, 15 bp, Homo sapiens
aattctgaaactcag

SEQ ID NO: 1122413 - DNA, 15 bp, Homo sapiens
gaattctgaaactca

SEQ ID NO: 1122414 - DNA, 15 bp, Homo sapiens
tgaattctgaaactc

SEQ ID NO: 1122415 - DNA, 15 bp, Homo sapiens
atgaattctgaaact

SEQ ID NO: 1122416 - DNA, 15 bp, Homo sapiens
aatgaattctgaaac

SEQ ID NO: 1122417 - DNA, 15 bp, Homo sapiens
taatgaattctgaaa

SEQ ID NO: 1122418 - DNA, 15 bp, Homo sapiens
ttaatgaattctgaa

SEQ ID NO: 1122419 - DNA, 15 bp, Homo sapiens
attaatgaattctga

SEQ ID NO: 1122420 - DNA, 15 bp, Homo sapiens
tattaatgaattctg

SEQ ID NO: 1122421 - DNA, 15 bp, Homo sapiens
ttattaatgaattct

SEQ ID NO: 1122422 - DNA, 15 bp, Homo sapiens
tttattaatgaattc

SEQ ID NO: 1122423 - DNA, 15 bp, Homo sapiens
ttttattaatgaatt

SEQ ID NO: 1122424 - DNA, 15 bp, Homo sapiens
tttttattaatgaat

SEQ ID NO: 1122425 - DNA, 15 bp, Homo sapiens
atttttattaatgaa

SEQ ID NO: 1122426 - DNA, 15 bp, Homo sapiens
tatttttattaatga

SEQ ID NO: 1122427 - DNA, 15 bp, Homo sapiens
ttatttttattaatg

SEQ ID NO: 1122428 - DNA, 15 bp, Homo sapiens
gtttatttttattaa

SEQ ID NO: 1122429 - DNA, 15 bp, Homo sapiens
tgtttatttttatta

SEQ ID NO: 1122430 - DNA, 15 bp, Homo sapiens
gtgtttatttttatt

SEQ ID NO: 1122431 - DNA, 15 bp, Homo sapiens
tgtgtttatttttat

SEQ ID NO: 1122432 - DNA, 15 bp, Homo sapiens
atgtgtttattttta

SEQ ID NO: 1122433 - DNA, 15 bp, Homo sapiens
tatgtgtttattttt

SEQ ID NO: 1122434 - DNA, 15 bp, Homo sapiens
ttatgtgtttatttt

SEQ ID NO: 1122435 - DNA, 15 bp, Homo sapiens
attatgtgtttattt

SEQ ID NO: 1122436 - DNA, 15 bp, Homo sapiens
cattatgtgtttatt

SEQ ID NO: 1122437 - DNA, 15 bp, Homo sapiens
ccattatgtgtttat

SEQ ID NO: 1122438 - DNA, 15 bp, Homo sapiens
tccattatgtgttta

SEQ ID NO: 1122439 - DNA, 15 bp, Homo sapiens
ctccattatgtgttt

SEQ ID NO: 1122440 - DNA, 15 bp, Homo sapiens
gctccattatgtgtt

SEQ ID NO: 1122441 - DNA, 15 bp, Homo sapiens
cgctccattatgtgt

SEQ ID NO: 1122442 - DNA, 15 bp, Homo sapiens
acgctccattatgtg

SEQ ID NO: 1122443 - DNA, 15 bp, Homo sapiens
cacgctccattatgt

SEQ ID NO: 1122444 - DNA, 15 bp, Homo sapiens
tcacgctccattatg

SEQ ID NO: 1122445 - DNA, 15 bp, Homo sapiens
gtcacgctccattat

SEQ ID NO: 1122446 - DNA, 15 bp, Homo sapiens
tgtcacgctccatta

SEQ ID NO: 1122447 - DNA, 15 bp, Homo sapiens
atgtcacgctccatt

SEQ ID NO: 1122448 - DNA, 15 bp, Homo sapiens
aatgtcacgctccat

SEQ ID NO: 1122449 - DNA, 15 bp, Homo sapiens
gaatgtcacgctcca

SEQ ID NO: 1122450 - DNA, 15 bp, Homo sapiens
tgaatgtcacgctcc

SEQ ID NO: 1122451 - DNA, 15 bp, Homo sapiens
atgaatgtcacgctc

SEQ ID NO: 1122452 - DNA, 15 bp, Homo sapiens
aatgaatgtcacgct

SEQ ID NO: 1122453 - DNA, 15 bp, Homo sapiens
gaatgaatgtcacgc

SEQ ID NO: 1122454 - DNA, 15 bp, Homo sapiens
tgaatgaatgtcacg

SEQ ID NO: 1122455 - DNA, 15 bp, Homo sapiens
ctgaatgaatgtcac

SEQ ID NO: 1122456 - DNA, 15 bp, Homo sapiens
actgaatgaatgtca

SEQ ID NO: 1122457 - DNA, 15 bp, Homo sapiens
tactgaatgaatgtc

SEQ ID NO: 1122458 - DNA, 15 bp, Homo sapiens
atactgaatgaatgt

SEQ ID NO: 1122459 - DNA, 15 bp, Homo sapiens
tatactgaatgaatg

SEQ ID NO: 1122460 - DNA, 15 bp, Homo sapiens
atatactgaatgaat

SEQ ID NO: 1122461 - DNA, 15 bp, Homo sapiens
tatatactgaatgaa

SEQ ID NO: 1122462 - DNA, 15 bp, Homo sapiens
gtatatactgaatga

SEQ ID NO: 1122463 - DNA, 15 bp, Homo sapiens
tgtatatactgaatg

SEQ ID NO: 1122464 - DNA, 15 bp, Homo sapiens
ttgtatatactgaat

SEQ ID NO: 1122465 - DNA, 15 bp, Homo sapiens
tttgtatatactgaa

SEQ ID NO: 1122466 - DNA, 15 bp, Homo sapiens
ctttgtatatactga

SEQ ID NO: 1122467 - DNA, 15 bp, Homo sapiens
actttgtatatactg

SEQ ID NO: 1122468 - DNA, 15 bp, Homo sapiens
cactttgtatatact

SEQ ID NO: 1122469 - DNA, 15 bp, Homo sapiens
acactttgtatatac

SEQ ID NO: 1122470 - DNA, 15 bp, Homo sapiens
gacactttgtatata

SEQ ID NO: 1122471 - DNA, 15 bp, Homo sapiens
tgacactttgtatat

SEQ ID NO: 1122472 - DNA, 15 bp, Homo sapiens
ttgacactttgtata

SEQ ID NO: 1122473 - DNA, 15 bp, Homo sapiens
cttgacactttgtat

SEQ ID NO: 1122474 - DNA, 15 bp, Homo sapiens
gcttgacactttgta

SEQ ID NO: 1122475 - DNA, 15 bp, Homo sapiens
tgcttgacactttgt

SEQ ID NO: 1122476 - DNA, 15 bp, Homo sapiens
gtgcttgacactttg

SEQ ID NO: 1122477 - DNA, 15 bp, Homo sapiens
agtgcttgacacttt

SEQ ID NO: 1122478 - DNA, 15 bp, Homo sapiens
cagtgcttgacactt

SEQ ID NO: 1122479 - DNA, 15 bp, Homo sapiens
tcagtgcttgacact

SEQ ID NO: 1122480 - DNA, 15 bp, Homo sapiens
ctcagtgcttgacac

SEQ ID NO: 1122481 - DNA, 15 bp, Homo sapiens
actcagtgcttgaca

SEQ ID NO: 1122482 - DNA, 15 bp, Homo sapiens
cactcagtgcttgac

SEQ ID NO: 1122483 - DNA, 15 bp, Homo sapiens
tcactcagtgcttga

SEQ ID NO: 1122484 - DNA, 15 bp, Homo sapiens
gtcactcagtgcttg

SEQ ID NO: 1122485 - DNA, 15 bp, Homo sapiens
cgtcactcagtgctt

SEQ ID NO: 1122486 - DNA, 15 bp, Homo sapiens
acgtcactcagtgct

SEQ ID NO: 1122487 - DNA, 15 bp, Homo sapiens
tacgtcactcagtgc

SEQ ID NO: 1122488 - DNA, 15 bp, Homo sapiens
atacgtcactcagtg

SEQ ID NO: 1122489 - DNA, 15 bp, Homo sapiens
aatacgtcactcagt

SEQ ID NO: 1122490 - DNA, 15 bp, Homo sapiens
taatacgtcactcag

SEQ ID NO: 1122491 - DNA, 15 bp, Homo sapiens
ataatacgtcactca

SEQ ID NO: 1122492 - DNA, 15 bp, Homo sapiens
cataatacgtcactc

SEQ ID NO: 1122493 - DNA, 15 bp, Homo sapiens
acataatacgtcact

SEQ ID NO: 1122494 - DNA, 15 bp, Homo sapiens
tacataatacgtcac

SEQ ID NO: 1122495 - DNA, 15 bp, Homo sapiens
ttacataatacgtca

SEQ ID NO: 1122496 - DNA, 15 bp, Homo sapiens
attacataatacgtc

SEQ ID NO: 1122497 - DNA, 15 bp, Homo sapiens
tattacataatacgt

SEQ ID NO: 1122498 - DNA, 15 bp, Homo sapiens
ttattacataatacg

SEQ ID NO: 1122499 - DNA, 15 bp, Homo sapiens
tttattacataatac

SEQ ID NO: 1122500 - DNA, 15 bp, Homo sapiens
ttttattacataata

SEQ ID NO: 1122501 - DNA, 15 bp, Homo sapiens
attttattacataat

SEQ ID NO: 1122502 - DNA, 15 bp, Homo sapiens
aattttattacataa

SEQ ID NO: 1122503 - DNA, 15 bp, Homo sapiens
taattttattacata

SEQ ID NO: 1122504 - DNA, 15 bp, Homo sapiens
gtaattttattacat

SEQ ID NO: 1122505 - DNA, 15 bp, Homo sapiens
agtaattttattaca

SEQ ID NO: 1122506 - DNA, 15 bp, Homo sapiens
cagtaattttattac

SEQ ID NO: 1122507 - DNA, 15 bp, Homo sapiens
gcagtaattttatta

SEQ ID NO: 1122508 - DNA, 15 bp, Homo sapiens
tgcagtaattttatt

SEQ ID NO: 1122509 - DNA, 15 bp, Homo sapiens
atgcagtaattttat

SEQ ID NO: 1122510 - DNA, 15 bp, Homo sapiens
catgcagtaatttta

SEQ ID NO: 1122511 - DNA, 15 bp, Homo sapiens
acatgcagtaatttt

SEQ ID NO: 1122512 - DNA, 15 bp, Homo sapiens
tacatgcagtaattt

SEQ ID NO: 1122513 - DNA, 15 bp, Homo sapiens
ttacatgcagtaatt

SEQ ID NO: 1122514 - DNA, 15 bp, Homo sapiens
attacatgcagtaat

SEQ ID NO: 1122515 - DNA, 15 bp, Homo sapiens
cattacatgcagtaa

SEQ ID NO: 1122516 - DNA, 15 bp, Homo sapiens
gcattacatgcagta

SEQ ID NO: 1122517 - DNA, 15 bp, Homo sapiens
agcattacatgcagt

SEQ ID NO: 1122518 - DNA, 15 bp, Homo sapiens
gagcattacatgcag

SEQ ID NO: 1122519 - DNA, 15 bp, Homo sapiens
agagcattacatgca

SEQ ID NO: 1122520 - DNA, 15 bp, Homo sapiens
gagagcattacatgc

SEQ ID NO: 1122521 - DNA, 15 bp, Homo sapiens
tgagagcattacatg

SEQ ID NO: 1122522 - DNA, 15 bp, Homo sapiens
ttgagagcattacat

SEQ ID NO: 1122523 - DNA, 15 bp, Homo sapiens
attgagagcattaca

SEQ ID NO: 1122524 - DNA, 15 bp, Homo sapiens
gattgagagcattac

SEQ ID NO: 1122525 - DNA, 15 bp, Homo sapiens
agattgagagcatta

SEQ ID NO: 1122526 - DNA, 15 bp, Homo sapiens
gagattgagagcatt

SEQ ID NO: 1122527 - DNA, 15 bp, Homo sapiens
tgagattgagagcat

SEQ ID NO: 1122528 - DNA, 15 bp, Homo sapiens
atgagattgagagca

SEQ ID NO: 1122529 - DNA, 15 bp, Homo sapiens
aatgagattgagagc

SEQ ID NO: 1122530 - DNA, 15 bp, Homo sapiens
gaatgagattgagag

SEQ ID NO: 1122531 - DNA, 15 bp, Homo sapiens
ggaatgagattgaga

SEQ ID NO: 1122532 - DNA, 15 bp, Homo sapiens
cggaatgagattgag

SEQ ID NO: 1122533 - DNA, 15 bp, Homo sapiens
acggaatgagattga

SEQ ID NO: 1122534 - DNA, 15 bp, Homo sapiens
tacggaatgagattg

SEQ ID NO: 1122535 - DNA, 15 bp, Homo sapiens
ttacggaatgagatt

SEQ ID NO: 1122536 - DNA, 15 bp, Homo sapiens
attacggaatgagat

SEQ ID NO: 1122537 - DNA, 15 bp, Homo sapiens
aattacggaatgaga

SEQ ID NO: 1122538 - DNA, 15 bp, Homo sapiens
caattacggaatgag

SEQ ID NO: 1122539 - DNA, 15 bp, Homo sapiens
ccaattacggaatga

SEQ ID NO: 1122540 - DNA, 15 bp, Homo sapiens
accaattacggaatg

SEQ ID NO: 1122541 - DNA, 15 bp, Homo sapiens
caccaattacggaat

SEQ ID NO: 1122542 - DNA, 15 bp, Homo sapiens
acaccaattacggaa

SEQ ID NO: 1122543 - DNA, 15 bp, Homo sapiens
gacaccaattacgga

SEQ ID NO: 1122544 - DNA, 15 bp, Homo sapiens
tgacaccaattacgg

SEQ ID NO: 1122545 - DNA, 15 bp, Homo sapiens
atgacaccaattacg

SEQ ID NO: 1122546 - DNA, 15 bp, Homo sapiens
aatgacaccaattac

SEQ ID NO: 1122547 - DNA, 15 bp, Homo sapiens
taatgacaccaatta

SEQ ID NO: 1122548 - DNA, 15 bp, Homo sapiens
ataatgacaccaatt

SEQ ID NO: 1122549 - DNA, 15 bp, Homo sapiens
tataatgacaccaat

SEQ ID NO: 1122550 - DNA, 15 bp, Homo sapiens
gtataatgacaccaa

SEQ ID NO: 1122551 - DNA, 15 bp, Homo sapiens
agtataatgacacca

SEQ ID NO: 1122552 - DNA, 15 bp, Homo sapiens
tagtataatgacacc

SEQ ID NO: 1122553 - DNA, 15 bp, Homo sapiens
gtagtataatgacac

SEQ ID NO: 1122554 - DNA, 15 bp, Homo sapiens
ggtagtataatgaca

SEQ ID NO: 1122555 - DNA, 15 bp, Homo sapiens
tggtagtataatgac

SEQ ID NO: 1122556 - DNA, 15 bp, Homo sapiens
gtggtagtataatga

SEQ ID NO: 1122557 - DNA, 15 bp, Homo sapiens
agtggtagtataatg

SEQ ID NO: 1122558 - DNA, 15 bp, Homo sapiens
aagtggtagtataat

SEQ ID NO: 1122559 - DNA, 15 bp, Homo sapiens
taagtggtagtataa

SEQ ID NO: 1122560 - DNA, 15 bp, Homo sapiens
ttaagtggtagtata

SEQ ID NO: 1122561 - DNA, 15 bp, Homo sapiens
tttaagtggtagtat

SEQ ID NO: 1122562 - DNA, 15 bp, Homo sapiens
ttttaagtggtagta

SEQ ID NO: 1122563 - DNA, 15 bp, Homo sapiens
tttttaagtggtagt

SEQ ID NO: 1122564 - DNA, 15 bp, Homo sapiens
atttttaagtggtag

SEQ ID NO: 1122565 - DNA, 15 bp, Homo sapiens
catttttaagtggta

SEQ ID NO: 1122566 - DNA, 15 bp, Homo sapiens
tcatttttaagtggt

SEQ ID NO: 1122567 - DNA, 15 bp, Homo sapiens
ttcatttttaagtgg

SEQ ID NO: 1122568 - DNA, 15 bp, Homo sapiens
tttcatttttaagtg

SEQ ID NO: 1122569 - DNA, 15 bp, Homo sapiens
atttcatttttaagt

SEQ ID NO: 1122570 - DNA, 15 bp, Homo sapiens
aatttcatttttaag

SEQ ID NO: 1122571 - DNA, 15 bp, Homo sapiens
caatttcatttttaa

SEQ ID NO: 1122572 - DNA, 15 bp, Homo sapiens
tcaatttcattttta

SEQ ID NO: 1122573 - DNA, 15 bp, Homo sapiens
ttcaatttcattttt

SEQ ID NO: 1122574 - DNA, 15 bp, Homo sapiens
cttcaatttcatttt

SEQ ID NO: 1122575 - DNA, 15 bp, Homo sapiens
gcttcaatttcattt

SEQ ID NO: 1122576 - DNA, 15 bp, Homo sapiens
ggcttcaatttcatt

SEQ ID NO: 1122577 - DNA, 15 bp, Homo sapiens
tggcttcaatttcat

SEQ ID NO: 1122578 - DNA, 15 bp, Homo sapiens
atggcttcaatttca

SEQ ID NO: 1122579 - DNA, 15 bp, Homo sapiens
catggcttcaatttc

SEQ ID NO: 1122580 - DNA, 15 bp, Homo sapiens
tcatggcttcaattt

SEQ ID NO: 1122581 - DNA, 15 bp, Homo sapiens
ttcatggcttcaatt

SEQ ID NO: 1122582 - DNA, 15 bp, Homo sapiens
cttcatggcttcaat

SEQ ID NO: 1122583 - DNA, 15 bp, Homo sapiens
acttcatggcttcaa

SEQ ID NO: 1122584 - DNA, 15 bp, Homo sapiens
gacttcatggcttca

SEQ ID NO: 1122585 - DNA, 15 bp, Homo sapiens
tgacttcatggcttc

SEQ ID NO: 1122586 - DNA, 15 bp, Homo sapiens
ttgacttcatggctt

SEQ ID NO: 1122587 - DNA, 15 bp, Homo sapiens
cttgacttcatggct

SEQ ID NO: 1122588 - DNA, 15 bp, Homo sapiens
tcttgacttcatggc

SEQ ID NO: 1122589 - DNA, 15 bp, Homo sapiens
ttcttgacttcatgg

SEQ ID NO: 1122590 - DNA, 15 bp, Homo sapiens
tttcttgacttcatg

SEQ ID NO: 1122591 - DNA, 15 bp, Homo sapiens
atttcttgacttcat

SEQ ID NO: 1122592 - DNA, 15 bp, Homo sapiens
tatttcttgacttca

SEQ ID NO: 1122593 - DNA, 15 bp, Homo sapiens
atatttcttgacttc

SEQ ID NO: 1122594 - DNA, 15 bp, Homo sapiens
aatatttcttgactt

SEQ ID NO: 1122595 - DNA, 15 bp, Homo sapiens
caatatttcttgact

SEQ ID NO: 1122596 - DNA, 15 bp, Homo sapiens
tcaatatttcttgac

SEQ ID NO: 1122597 - DNA, 15 bp, Homo sapiens
ctcaatatttcttga

SEQ ID NO: 1122598 - DNA, 15 bp, Homo sapiens
tctcaatatttcttg

SEQ ID NO: 1122599 - DNA, 15 bp, Homo sapiens
ctctcaatatttctt

SEQ ID NO: 1122600 - DNA, 15 bp, Homo sapiens
cctctcaatatttct

SEQ ID NO: 1122601 - DNA, 15 bp, Homo sapiens
ccctctcaatatttc

SEQ ID NO: 1122602 - DNA, 15 bp, Homo sapiens
tccctctcaatattt

SEQ ID NO: 1122603 - DNA, 15 bp, Homo sapiens
atccctctcaatatt

SEQ ID NO: 1122604 - DNA, 15 bp, Homo sapiens
aatccctctcaatat

SEQ ID NO: 1122605 - DNA, 15 bp, Homo sapiens
aaatccctctcaata

SEQ ID NO: 1122606 - DNA, 15 bp, Homo sapiens
caaatccctctcaat

SEQ ID NO: 1122607 - DNA, 15 bp, Homo sapiens
tcaaatccctctcaa

SEQ ID NO: 1122608 - DNA, 15 bp, Homo sapiens
ttcaaatccctctca

SEQ ID NO: 1122609 - DNA, 15 bp, Homo sapiens
gttcaaatccctctc

SEQ ID NO: 1122610 - DNA, 15 bp, Homo sapiens
agttcaaatccctct

SEQ ID NO: 1122611 - DNA, 15 bp, Homo sapiens
gagttcaaatccctc

SEQ ID NO: 1122612 - DNA, 15 bp, Homo sapiens
tgagttcaaatccct

SEQ ID NO: 1122613 - DNA, 15 bp, Homo sapiens
ctgagttcaaatccc

SEQ ID NO: 1122614 - DNA, 15 bp, Homo sapiens
cctgagttcaaatcc

SEQ ID NO: 1122615 - DNA, 15 bp, Homo sapiens
acctgagttcaaatc

SEQ ID NO: 1122616 - DNA, 15 bp, Homo sapiens
gacctgagttcaaat

SEQ ID NO: 1122617 - DNA, 15 bp, Homo sapiens
agacctgagttcaaa

SEQ ID NO: 1122618 - DNA, 15 bp, Homo sapiens
gagacctgagttcaa

SEQ ID NO: 1122619 - DNA, 15 bp, Homo sapiens
ggagacctgagttca

SEQ ID NO: 1122620 - DNA, 15 bp, Homo sapiens
gggagacctgagttc

SEQ ID NO: 1122621 - DNA, 15 bp, Homo sapiens
agggagacctgagtt

SEQ ID NO: 1122622 - DNA, 15 bp, Homo sapiens
cagggagacctgagt

SEQ ID NO: 1122623 - DNA, 15 bp, Homo sapiens
tcagggagacctgag

SEQ ID NO: 1122624 - DNA, 15 bp, Homo sapiens
gtcagggagacctga

SEQ ID NO: 1122625 - DNA, 15 bp, Homo sapiens
agtcagggagacctg

SEQ ID NO: 1122626 - DNA, 15 bp, Homo sapiens
aagtcagggagacct

SEQ ID NO: 1122627 - DNA, 15 bp, Homo sapiens
aaagtcagggagacc

SEQ ID NO: 1122628 - DNA, 15 bp, Homo sapiens
caaagtcagggagac

SEQ ID NO: 1122629 - DNA, 15 bp, Homo sapiens
tcaaagtcagggaga

SEQ ID NO: 1122630 - DNA, 15 bp, Homo sapiens
ctcaaagtcagggag

SEQ ID NO: 1122631 - DNA, 15 bp, Homo sapiens
cctcaaagtcaggga

SEQ ID NO: 1122632 - DNA, 15 bp, Homo sapiens
gcctcaaagtcaggg

SEQ ID NO: 1122633 - DNA, 15 bp, Homo sapiens
ggcctcaaagtcagg

SEQ ID NO: 1122634 - DNA, 15 bp, Homo sapiens
aggcctcaaagtcag

SEQ ID NO: 1122635 - DNA, 15 bp, Homo sapiens
taggcctcaaagtca

SEQ ID NO: 1122636 - DNA, 15 bp, Homo sapiens
gtaggcctcaaagtc

SEQ ID NO: 1122637 - DNA, 15 bp, Homo sapiens
ggtaggcctcaaagt

SEQ ID NO: 1122638 - DNA, 15 bp, Homo sapiens
aggtaggcctcaaag

SEQ ID NO: 1122639 - DNA, 15 bp, Homo sapiens
taggtaggcctcaaa

SEQ ID NO: 1122640 - DNA, 15 bp, Homo sapiens
ataggtaggcctcaa

SEQ ID NO: 1122641 - DNA, 15 bp, Homo sapiens
aataggtaggcctca

SEQ ID NO: 1122642 - DNA, 15 bp, Homo sapiens
taataggtaggcctc

SEQ ID NO: 1122643 - DNA, 15 bp, Homo sapiens
ttaataggtaggcct

SEQ ID NO: 1122644 - DNA, 15 bp, Homo sapiens
gttaataggtaggcc

SEQ ID NO: 1122645 - DNA, 15 bp, Homo sapiens
ggttaataggtaggc

SEQ ID NO: 1122646 - DNA, 15 bp, Homo sapiens
tggttaataggtagg

SEQ ID NO: 1122647 - DNA, 15 bp, Homo sapiens
gtggttaataggtag

SEQ ID NO: 1122648 - DNA, 15 bp, Homo sapiens
agtggttaataggta

SEQ ID NO: 1122649 - DNA, 15 bp, Homo sapiens
cagtggttaataggt

SEQ ID NO: 1122650 - DNA, 15 bp, Homo sapiens
acagtggttaatagg

SEQ ID NO: 1122651 - DNA, 15 bp, Homo sapiens
aacagtggttaatag

SEQ ID NO: 1122652 - DNA, 15 bp, Homo sapiens
aaacagtggttaata

SEQ ID NO: 1122653 - DNA, 15 bp, Homo sapiens
aaaacagtggttaat

SEQ ID NO: 1122654 - DNA, 15 bp, Homo sapiens
gaaaacagtggttaa

SEQ ID NO: 1122655 - DNA, 15 bp, Homo sapiens
ggaaaacagtggtta

SEQ ID NO: 1122656 - DNA, 15 bp, Homo sapiens
aggaaaacagtggtt

SEQ ID NO: 1122657 - DNA, 15 bp, Homo sapiens
caggaaaacagtggt

SEQ ID NO: 1122658 - DNA, 15 bp, Homo sapiens
gcaggaaaacagtgg

SEQ ID NO: 1122659 - DNA, 15 bp, Homo sapiens
ggcaggaaaacagtg

SEQ ID NO: 1122660 - DNA, 15 bp, Homo sapiens
aggcaggaaaacagt

SEQ ID NO: 1122661 - DNA, 15 bp, Homo sapiens
gaggcaggaaaacag

SEQ ID NO: 1122662 - DNA, 15 bp, Homo sapiens
agaggcaggaaaaca

SEQ ID NO: 1122663 - DNA, 15 bp, Homo sapiens
cagaggcaggaaaac

SEQ ID NO: 1122664 - DNA, 15 bp, Homo sapiens
tcagaggcaggaaaa

SEQ ID NO: 1122665 - DNA, 15 bp, Homo sapiens
gtcagaggcaggaaa

SEQ ID NO: 1122666 - DNA, 15 bp, Homo sapiens
agtcagaggcaggaa

SEQ ID NO: 1122667 - DNA, 15 bp, Homo sapiens
gagtcagaggcagga

SEQ ID NO: 1122668 - DNA, 15 bp, Homo sapiens
agagtcagaggcagg

SEQ ID NO: 1122669 - DNA, 15 bp, Homo sapiens
cagagtcagaggcag

SEQ ID NO: 1122670 - DNA, 15 bp, Homo sapiens
acagagtcagaggca

SEQ ID NO: 1122671 - DNA, 15 bp, Homo sapiens
gacagagtcagaggc

SEQ ID NO: 1122672 - DNA, 15 bp, Homo sapiens
agacagagtcagagg

SEQ ID NO: 1122673 - DNA, 15 bp, Homo sapiens
aagacagagtcagag

SEQ ID NO: 1122674 - DNA, 15 bp, Homo sapiens
gaagacagagtcaga

SEQ ID NO: 1122675 - DNA, 15 bp, Homo sapiens
ggaagacagagtcag

SEQ ID NO: 1122676 - DNA, 15 bp, Homo sapiens
gggaagacagagtca

SEQ ID NO: 1122677 - DNA, 15 bp, Homo sapiens
tgggaagacagagtc

SEQ ID NO: 1122678 - DNA, 15 bp, Homo sapiens
ctgggaagacagagt

SEQ ID NO: 1122679 - DNA, 15 bp, Homo sapiens
cctgggaagacagag

SEQ ID NO: 1122680 - DNA, 15 bp, Homo sapiens
ccctgggaagacaga

SEQ ID NO: 1122681 - DNA, 15 bp, Homo sapiens
cccctgggaagacag

SEQ ID NO: 1122682 - DNA, 15 bp, Homo sapiens
gcccctgggaagaca

SEQ ID NO: 1122683 - DNA, 15 bp, Homo sapiens
ggcccctgggaagac

SEQ ID NO: 1122684 - DNA, 15 bp, Homo sapiens
tggcccctgggaaga

SEQ ID NO: 1122685 - DNA, 15 bp, Homo sapiens
atggcccctgggaag

SEQ ID NO: 1122686 - DNA, 15 bp, Homo sapiens
catggcccctgggaa

SEQ ID NO: 1122687 - DNA, 15 bp, Homo sapiens
ccatggcccctggga

SEQ ID NO: 1122688 - DNA, 15 bp, Homo sapiens
tccatggcccctggg

SEQ ID NO: 1122689 - DNA, 15 bp, Homo sapiens
gtccatggcccctgg

SEQ ID NO: 1122690 - DNA, 15 bp, Homo sapiens
ggtccatggcccctg

SEQ ID NO: 1122691 - DNA, 15 bp, Homo sapiens
gggtccatggcccct

SEQ ID NO: 1122692 - DNA, 15 bp, Homo sapiens
ggggtccatggcccc

SEQ ID NO: 1122693 - DNA, 15 bp, Homo sapiens
aggggtccatggccc

SEQ ID NO: 1122694 - DNA, 15 bp, Homo sapiens
aaggggtccatggcc

SEQ ID NO: 1122695 - DNA, 15 bp, Homo sapiens
aaaggggtccatggc

SEQ ID NO: 1122696 - DNA, 15 bp, Homo sapiens
aaaaggggtccatgg

SEQ ID NO: 1122697 - DNA, 15 bp, Homo sapiens
aaaaaggggtccatg

SEQ ID NO: 1122698 - DNA, 15 bp, Homo sapiens
gaaaaaggggtccat

SEQ ID NO: 1122699 - DNA, 15 bp, Homo sapiens
agaaaaaggggtcca

SEQ ID NO: 1122700 - DNA, 15 bp, Homo sapiens
gagaaaaaggggtcc

SEQ ID NO: 1122701 - DNA, 15 bp, Homo sapiens
ggagaaaaaggggtc

SEQ ID NO: 1122702 - DNA, 15 bp, Homo sapiens
tggagaaaaaggggt

SEQ ID NO: 1122703 - DNA, 15 bp, Homo sapiens
ctggagaaaaagggg

SEQ ID NO: 1122704 - DNA, 15 bp, Homo sapiens
gctggagaaaaaggg

SEQ ID NO: 1122705 - DNA, 15 bp, Homo sapiens
tgctggagaaaaagg

SEQ ID NO: 1122706 - DNA, 15 bp, Homo sapiens
gtgctggagaaaaag

SEQ ID NO: 1122707 - DNA, 15 bp, Homo sapiens
tgtgctggagaaaaa

SEQ ID NO: 1122708 - DNA, 15 bp, Homo sapiens
gtgtgctggagaaaa

SEQ ID NO: 1122709 - DNA, 15 bp, Homo sapiens
ggtgtgctggagaaa

SEQ ID NO: 1122710 - DNA, 15 bp, Homo sapiens
gggtgtgctggagaa

SEQ ID NO: 1122711 - DNA, 15 bp, Homo sapiens
tgggtgtgctggaga

SEQ ID NO: 1122712 - DNA, 15 bp, Homo sapiens
atgggtgtgctggag

SEQ ID NO: 1122713 - DNA, 15 bp, Homo sapiens
tatgggtgtgctgga

SEQ ID NO: 1122714 - DNA, 15 bp, Homo sapiens
ctatgggtgtgctgg

SEQ ID NO: 1122715 - DNA, 15 bp, Homo sapiens
gctatgggtgtgctg

SEQ ID NO: 1122716 - DNA, 15 bp, Homo sapiens
agctatgggtgtgct

SEQ ID NO: 1122717 - DNA, 15 bp, Homo sapiens
aagctatgggtgtgc

SEQ ID NO: 1122718 - DNA, 15 bp, Homo sapiens
taagctatgggtgtg

SEQ ID NO: 1122719 - DNA, 15 bp, Homo sapiens
ttaagctatgggtgt

SEQ ID NO: 1122720 - DNA, 15 bp, Homo sapiens
attaagctatgggtg

SEQ ID NO: 1122721 - DNA, 15 bp, Homo sapiens
aattaagctatgggt

SEQ ID NO: 1122722 - DNA, 15 bp, Homo sapiens
caattaagctatggg

SEQ ID NO: 1122723 - DNA, 15 bp, Homo sapiens
acaattaagctatgg

SEQ ID NO: 1122724 - DNA, 15 bp, Homo sapiens
aacaattaagctatg

SEQ ID NO: 1122725 - DNA, 15 bp, Homo sapiens
gaacaattaagctat

SEQ ID NO: 1122726 - DNA, 15 bp, Homo sapiens
ggaacaattaagcta

SEQ ID NO: 1122727 - DNA, 15 bp, Homo sapiens
tggaacaattaagct

SEQ ID NO: 1122728 - DNA, 15 bp, Homo sapiens
gtggaacaattaagc

SEQ ID NO: 1122729 - DNA, 15 bp, Homo sapiens
tgtggaacaattaag

SEQ ID NO: 1122730 - DNA, 15 bp, Homo sapiens
ctgtggaacaattaa

SEQ ID NO: 1122731 - DNA, 15 bp, Homo sapiens
gctgtggaacaatta

SEQ ID NO: 1122732 - DNA, 15 bp, Homo sapiens
tgctgtggaacaatt

SEQ ID NO: 1122733 - DNA, 15 bp, Homo sapiens
ctgctgtggaacaat

SEQ ID NO: 1122734 - DNA, 15 bp, Homo sapiens
actgctgtggaacaa

SEQ ID NO: 1122735 - DNA, 15 bp, Homo sapiens
gactgctgtggaaca

SEQ ID NO: 1122736 - DNA, 15 bp, Homo sapiens
agactgctgtggaac

SEQ ID NO: 1122737 - DNA, 15 bp, Homo sapiens
gagactgctgtggaa

SEQ ID NO: 1122738 - DNA, 15 bp, Homo sapiens
ggagactgctgtgga

SEQ ID NO: 1122739 - DNA, 15 bp, Homo sapiens
gggagactgctgtgg

SEQ ID NO: 1122740 - DNA, 15 bp, Homo sapiens
agggagactgctgtg

SEQ ID NO: 1122741 - DNA, 15 bp, Homo sapiens
aagggagactgctgt

SEQ ID NO: 1122742 - DNA, 15 bp, Homo sapiens
gaagggagactgctg

SEQ ID NO: 1122743 - DNA, 15 bp, Homo sapiens
ggaagggagactgct

SEQ ID NO: 1122744 - DNA, 15 bp, Homo sapiens
gggaagggagactgc

SEQ ID NO: 1122745 - DNA, 15 bp, Homo sapiens
tgggaagggagactg

SEQ ID NO: 1122746 - DNA, 15 bp, Homo sapiens
atgggaagggagact

SEQ ID NO: 1122747 - DNA, 15 bp, Homo sapiens
gatgggaagggagac

SEQ ID NO: 1122748 - DNA, 15 bp, Homo sapiens
agatgggaagggaga

SEQ ID NO: 1122749 - DNA, 15 bp, Homo sapiens
gagatgggaagggag

SEQ ID NO: 1122750 - DNA, 15 bp, Homo sapiens
agagatgggaaggga

SEQ ID NO: 1122751 - DNA, 15 bp, Homo sapiens
gagagatgggaaggg

SEQ ID NO: 1122752 - DNA, 15 bp, Homo sapiens
agagagatgggaagg

SEQ ID NO: 1122753 - DNA, 15 bp, Homo sapiens
cagagagatgggaag

SEQ ID NO: 1122754 - DNA, 15 bp, Homo sapiens
acagagagatgggaa

SEQ ID NO: 1122755 - DNA, 15 bp, Homo sapiens
gacagagagatggga

SEQ ID NO: 1122756 - DNA, 15 bp, Homo sapiens
agacagagagatggg

SEQ ID NO: 1122757 - DNA, 15 bp, Homo sapiens
tagacagagagatgg

SEQ ID NO: 1122758 - DNA, 15 bp, Homo sapiens
gtagacagagagatg

SEQ ID NO: 1122759 - DNA, 15 bp, Homo sapiens
tgtagacagagagat

SEQ ID NO: 1122760 - DNA, 15 bp, Homo sapiens
gtgtagacagagaga

SEQ ID NO: 1122761 - DNA, 15 bp, Homo sapiens
agtgtagacagagag

SEQ ID NO: 1122762 - DNA, 15 bp, Homo sapiens
tagtgtagacagaga

SEQ ID NO: 1122763 - DNA, 15 bp, Homo sapiens
gtagtgtagacagag

SEQ ID NO: 1122764 - DNA, 15 bp, Homo sapiens
agtagtgtagacaga

SEQ ID NO: 1122765 - DNA, 15 bp, Homo sapiens
aagtagtgtagacag

SEQ ID NO: 1122766 - DNA, 15 bp, Homo sapiens
gaagtagtgtagaca

SEQ ID NO: 1122767 - DNA, 15 bp, Homo sapiens
agaagtagtgtagac

SEQ ID NO: 1122768 - DNA, 15 bp, Homo sapiens
cagaagtagtgtaga

SEQ ID NO: 1122769 - DNA, 15 bp, Homo sapiens
gcagaagtagtgtag

SEQ ID NO: 1122770 - DNA, 15 bp, Homo sapiens
agcagaagtagtgta

SEQ ID NO: 1122771 - DNA, 15 bp, Homo sapiens
cagcagaagtagtgt

SEQ ID NO: 1122772 - DNA, 15 bp, Homo sapiens
acagcagaagtagtg

SEQ ID NO: 1122773 - DNA, 15 bp, Homo sapiens
aacagcagaagtagt

SEQ ID NO: 1122774 - DNA, 15 bp, Homo sapiens
gaacagcagaagtag

SEQ ID NO: 1122775 - DNA, 15 bp, Homo sapiens
tgaacagcagaagta

SEQ ID NO: 1122776 - DNA, 15 bp, Homo sapiens
gtgaacagcagaagt

SEQ ID NO: 1122777 - DNA, 15 bp, Homo sapiens
tgtgaacagcagaag

SEQ ID NO: 1122778 - DNA, 15 bp, Homo sapiens
ctgtgaacagcagaa

SEQ ID NO: 1122779 - DNA, 15 bp, Homo sapiens
cctgtgaacagcaga

SEQ ID NO: 1122780 - DNA, 15 bp, Homo sapiens
ccctgtgaacagcag

SEQ ID NO: 1122781 - DNA, 15 bp, Homo sapiens
gccctgtgaacagca

SEQ ID NO: 1122782 - DNA, 15 bp, Homo sapiens
agccctgtgaacagc

SEQ ID NO: 1122783 - DNA, 15 bp, Homo sapiens
tagccctgtgaacag

SEQ ID NO: 1122784 - DNA, 15 bp, Homo sapiens
ttagccctgtgaaca

SEQ ID NO: 1122785 - DNA, 15 bp, Homo sapiens
tttagccctgtgaac

SEQ ID NO: 1122786 - DNA, 15 bp, Homo sapiens
ctttagccctgtgaa

SEQ ID NO: 1122787 - DNA, 15 bp, Homo sapiens
tctttagccctgtga

SEQ ID NO: 1122788 - DNA, 15 bp, Homo sapiens
ttctttagccctgtg

SEQ ID NO: 1122789 - DNA, 15 bp, Homo sapiens
attctttagccctgt

SEQ ID NO: 1122790 - DNA, 15 bp, Homo sapiens
tattctttagccctg

SEQ ID NO: 1122791 - DNA, 15 bp, Homo sapiens
atattctttagccct

SEQ ID NO: 1122792 - DNA, 15 bp, Homo sapiens
catattctttagccc

SEQ ID NO: 1122793 - DNA, 15 bp, Homo sapiens
tcatattctttagcc

SEQ ID NO: 1122794 - DNA, 15 bp, Homo sapiens
atcatattctttagc

SEQ ID NO: 1122795 - DNA, 15 bp, Homo sapiens
catcatattctttag

SEQ ID NO: 1122796 - DNA, 15 bp, Homo sapiens
acatcatattcttta

SEQ ID NO: 1122797 - DNA, 15 bp, Homo sapiens
aacatcatattcttt

SEQ ID NO: 1122798 - DNA, 15 bp, Homo sapiens
caacatcatattctt

SEQ ID NO: 1122799 - DNA, 15 bp, Homo sapiens
tcaacatcatattct

SEQ ID NO: 1122800 - DNA, 15 bp, Homo sapiens
ctcaacatcatattc

SEQ ID NO: 1122801 - DNA, 15 bp, Homo sapiens
actcaacatcatatt

SEQ ID NO: 1122802 - DNA, 15 bp, Homo sapiens
cactcaacatcatat

SEQ ID NO: 1122803 - DNA, 15 bp, Homo sapiens
tcactcaacatcata

SEQ ID NO: 1122804 - DNA, 15 bp, Homo sapiens
gtcactcaacatcat

SEQ ID NO: 1122805 - DNA, 15 bp, Homo sapiens
tgtcactcaacatca

SEQ ID NO: 1122806 - DNA, 15 bp, Homo sapiens
ttgtcactcaacatc

SEQ ID NO: 1122807 - DNA, 15 bp, Homo sapiens
tttgtcactcaacat

SEQ ID NO: 1122808 - DNA, 15 bp, Homo sapiens
atttgtcactcaaca

SEQ ID NO: 1122809 - DNA, 15 bp, Homo sapiens
catttgtcactcaac

SEQ ID NO: 1122810 - DNA, 15 bp, Homo sapiens
tcatttgtcactcaa

SEQ ID NO: 1122811 - DNA, 15 bp, Homo sapiens
atcatttgtcactca

SEQ ID NO: 1122812 - DNA, 15 bp, Homo sapiens
catcatttgtcactc

SEQ ID NO: 1122813 - DNA, 15 bp, Homo sapiens
ccatcatttgtcact

SEQ ID NO: 1122814 - DNA, 15 bp, Homo sapiens
gccatcatttgtcac

SEQ ID NO: 1122815 - DNA, 15 bp, Homo sapiens
agccatcatttgtca

SEQ ID NO: 1122816 - DNA, 15 bp, Homo sapiens
aagccatcatttgtc

SEQ ID NO: 1122817 - DNA, 15 bp, Homo sapiens
taagccatcatttgt

SEQ ID NO: 1122818 - DNA, 15 bp, Homo sapiens
ataagccatcatttg

SEQ ID NO: 1122819 - DNA, 15 bp, Homo sapiens
aataagccatcattt

SEQ ID NO: 1122820 - DNA, 15 bp, Homo sapiens
caataagccatcatt

SEQ ID NO: 1122821 - DNA, 15 bp, Homo sapiens
ccaataagccatcat

SEQ ID NO: 1122822 - DNA, 15 bp, Homo sapiens
cccaataagccatca

SEQ ID NO: 1122823 - DNA, 15 bp, Homo sapiens
tcccaataagccatc

SEQ ID NO: 1122824 - DNA, 15 bp, Homo sapiens
atcccaataagccat

SEQ ID NO: 1122825 - DNA, 15 bp, Homo sapiens
catcccaataagcca

SEQ ID NO: 1122826 - DNA, 15 bp, Homo sapiens
acatcccaataagcc

SEQ ID NO: 1122827 - DNA, 15 bp, Homo sapiens
aacatcccaataagc

SEQ ID NO: 1122828 - DNA, 15 bp, Homo sapiens
caacatcccaataag

SEQ ID NO: 1122829 - DNA, 15 bp, Homo sapiens
gcaacatcccaataa

SEQ ID NO: 1122830 - DNA, 15 bp, Homo sapiens
agcaacatcccaata

SEQ ID NO: 1122831 - DNA, 15 bp, Homo sapiens
tagcaacatcccaat

SEQ ID NO: 1122832 - DNA, 15 bp, Homo sapiens
ctagcaacatcccaa

SEQ ID NO: 1122833 - DNA, 15 bp, Homo sapiens
gctagcaacatccca

SEQ ID NO: 1122834 - DNA, 15 bp, Homo sapiens
agctagcaacatccc

SEQ ID NO: 1122835 - DNA, 15 bp, Homo sapiens
tagctagcaacatcc

SEQ ID NO: 1122836 - DNA, 15 bp, Homo sapiens
gtagctagcaacatc

SEQ ID NO: 1122837 - DNA, 15 bp, Homo sapiens
agtagctagcaacat

SEQ ID NO: 1122838 - DNA, 15 bp, Homo sapiens
cagtagctagcaaca

SEQ ID NO: 1122839 - DNA, 15 bp, Homo sapiens
acagtagctagcaac

SEQ ID NO: 1122840 - DNA, 15 bp, Homo sapiens
cacagtagctagcaa

SEQ ID NO: 1122841 - DNA, 15 bp, Homo sapiens
tcacagtagctagca

SEQ ID NO: 1122842 - DNA, 15 bp, Homo sapiens
atcacagtagctagc

SEQ ID NO: 1122843 - DNA, 15 bp, Homo sapiens
catcacagtagctag

SEQ ID NO: 1122844 - DNA, 15 bp, Homo sapiens
tcatcacagtagcta

SEQ ID NO: 1122845 - DNA, 15 bp, Homo sapiens
atcatcacagtagct

SEQ ID NO: 1122846 - DNA, 15 bp, Homo sapiens
aatcatcacagtagc

SEQ ID NO: 1122847 - DNA, 15 bp, Homo sapiens
aaatcatcacagtag

SEQ ID NO: 1122848 - DNA, 15 bp, Homo sapiens
caaatcatcacagta

SEQ ID NO: 1122849 - DNA, 15 bp, Homo sapiens
ccaaatcatcacagt

SEQ ID NO: 1122850 - DNA, 15 bp, Homo sapiens
cccaaatcatcacag

SEQ ID NO: 1122851 - DNA, 15 bp, Homo sapiens
tcccaaatcatcaca

SEQ ID NO: 1122852 - DNA, 15 bp, Homo sapiens
ttcccaaatcatcac

SEQ ID NO: 1122853 - DNA, 15 bp, Homo sapiens
attcccaaatcatca

SEQ ID NO: 1122854 - DNA, 15 bp, Homo sapiens
cattcccaaatcatc

SEQ ID NO: 1122855 - DNA, 15 bp, Homo sapiens
acattcccaaatcat

SEQ ID NO: 1122856 - DNA, 15 bp, Homo sapiens
cacattcccaaatca

SEQ ID NO: 1122857 - DNA, 15 bp, Homo sapiens
gcacattcccaaatc

SEQ ID NO: 1122858 - DNA, 15 bp, Homo sapiens
agcacattcccaaat

SEQ ID NO: 1122859 - DNA, 15 bp, Homo sapiens
aagcacattcccaaa

SEQ ID NO: 1122860 - DNA, 15 bp, Homo sapiens
aaagcacattcccaa

SEQ ID NO: 1122861 - DNA, 15 bp, Homo sapiens
aaaagcacattccca

SEQ ID NO: 1122862 - DNA, 15 bp, Homo sapiens
caaaagcacattccc

SEQ ID NO: 1122863 - DNA, 15 bp, Homo sapiens
acaaaagcacattcc

SEQ ID NO: 1122864 - DNA, 15 bp, Homo sapiens
gacaaaagcacattc

SEQ ID NO: 1122865 - DNA, 15 bp, Homo sapiens
ggacaaaagcacatt

SEQ ID NO: 1122866 - DNA, 15 bp, Homo sapiens
aggacaaaagcacat

SEQ ID NO: 1122867 - DNA, 15 bp, Homo sapiens
caggacaaaagcaca

SEQ ID NO: 1122868 - DNA, 15 bp, Homo sapiens
acaggacaaaagcac

SEQ ID NO: 1122869 - DNA, 15 bp, Homo sapiens
gacaggacaaaagca

SEQ ID NO: 1122870 - DNA, 15 bp, Homo sapiens
agacaggacaaaagc

SEQ ID NO: 1122871 - DNA, 15 bp, Homo sapiens
gagacaggacaaaag

SEQ ID NO: 1122872 - DNA, 15 bp, Homo sapiens
tgagacaggacaaaa

SEQ ID NO: 1122873 - DNA, 15 bp, Homo sapiens
gtgagacaggacaaa

SEQ ID NO: 1122874 - DNA, 15 bp, Homo sapiens
agtgagacaggacaa

SEQ ID NO: 1122875 - DNA, 15 bp, Homo sapiens
gagtgagacaggaca

SEQ ID NO: 1122876 - DNA, 15 bp, Homo sapiens
tgagtgagacaggac

SEQ ID NO: 1122877 - DNA, 15 bp, Homo sapiens
gtgagtgagacagga

SEQ ID NO: 1122878 - DNA, 15 bp, Homo sapiens
agtgagtgagacagg

SEQ ID NO: 1122879 - DNA, 15 bp, Homo sapiens
gagtgagtgagacag

SEQ ID NO: 1122880 - DNA, 15 bp, Homo sapiens
ggagtgagtgagaca

SEQ ID NO: 1122881 - DNA, 15 bp, Homo sapiens
aggagtgagtgagac

SEQ ID NO: 1122882 - DNA, 15 bp, Homo sapiens
gaggagtgagtgaga

SEQ ID NO: 1122883 - DNA, 15 bp, Homo sapiens
ggaggagtgagtgag

SEQ ID NO: 1122884 - DNA, 15 bp, Homo sapiens
gggaggagtgagtga

SEQ ID NO: 1122885 - DNA, 15 bp, Homo sapiens
ggggaggagtgagtg

SEQ ID NO: 1122886 - DNA, 15 bp, Homo sapiens
tggggaggagtgagt

SEQ ID NO: 1122887 - DNA, 15 bp, Homo sapiens
atggggaggagtgag

SEQ ID NO: 1122888 - DNA, 15 bp, Homo sapiens
gatggggaggagtga

SEQ ID NO: 1122889 - DNA, 15 bp, Homo sapiens
ggatggggaggagtg

SEQ ID NO: 1122890 - DNA, 15 bp, Homo sapiens
tggatggggaggagt

SEQ ID NO: 1122891 - DNA, 15 bp, Homo sapiens
ctggatggggaggag

SEQ ID NO: 1122892 - DNA, 15 bp, Homo sapiens
tctggatggggagga

SEQ ID NO: 1122893 - DNA, 15 bp, Homo sapiens
ctctggatggggagg

SEQ ID NO: 1122894 - DNA, 15 bp, Homo sapiens
tctctggatggggag

SEQ ID NO: 1122895 - DNA, 15 bp, Homo sapiens
ctctctggatgggga

SEQ ID NO: 1122896 - DNA, 15 bp, Homo sapiens
gctctctggatgggg

SEQ ID NO: 1122897 - DNA, 15 bp, Homo sapiens
ggctctctggatggg

SEQ ID NO: 1122898 - DNA, 15 bp, Homo sapiens
tggctctctggatgg

SEQ ID NO: 1122899 - DNA, 15 bp, Homo sapiens
atggctctctggatg

SEQ ID NO: 1122900 - DNA, 15 bp, Homo sapiens
aatggctctctggat

SEQ ID NO: 1122901 - DNA, 15 bp, Homo sapiens
gaatggctctctgga

SEQ ID NO: 1122902 - DNA, 15 bp, Homo sapiens
tgaatggctctctgg

SEQ ID NO: 1122903 - DNA, 15 bp, Homo sapiens
ttgaatggctctctg

SEQ ID NO: 1122904 - DNA, 15 bp, Homo sapiens
tttgaatggctctct

SEQ ID NO: 1122905 - DNA, 15 bp, Homo sapiens
ctttgaatggctctc

SEQ ID NO: 1122906 - DNA, 15 bp, Homo sapiens
tctttgaatggctct

SEQ ID NO: 1122907 - DNA, 15 bp, Homo sapiens
ctctttgaatggctc

SEQ ID NO: 1122908 - DNA, 15 bp, Homo sapiens
actctttgaatggct

SEQ ID NO: 1122909 - DNA, 15 bp, Homo sapiens
aactctttgaatggc

SEQ ID NO: 1122910 - DNA, 15 bp, Homo sapiens
caactctttgaatgg

SEQ ID NO: 1122911 - DNA, 15 bp, Homo sapiens
ccaactctttgaatg

SEQ ID NO: 1122912 - DNA, 15 bp, Homo sapiens
tccaactctttgaat

SEQ ID NO: 1122913 - DNA, 15 bp, Homo sapiens
gtccaactctttgaa

SEQ ID NO: 1122914 - DNA, 15 bp, Homo sapiens
ggtccaactctttga

SEQ ID NO: 1122915 - DNA, 15 bp, Homo sapiens
gggtccaactctttg

SEQ ID NO: 1122916 - DNA, 15 bp, Homo sapiens
ggggtccaactcttt

SEQ ID NO: 1122917 - DNA, 15 bp, Homo sapiens
tggggtccaactctt

SEQ ID NO: 1122918 - DNA, 15 bp, Homo sapiens
ttggggtccaactct

SEQ ID NO: 1122919 - DNA, 15 bp, Homo sapiens
tttggggtccaactc

SEQ ID NO: 1122920 - DNA, 15 bp, Homo sapiens
gtttggggtccaact

SEQ ID NO: 1122921 - DNA, 15 bp, Homo sapiens
agtttggggtccaac

SEQ ID NO: 1122922 - DNA, 15 bp, Homo sapiens
aagtttggggtccaa

SEQ ID NO: 1122923 - DNA, 15 bp, Homo sapiens
gaagtttggggtcca

SEQ ID NO: 1122924 - DNA, 15 bp, Homo sapiens
tgaagtttggggtcc

SEQ ID NO: 1122925 - DNA, 15 bp, Homo sapiens
ttgaagtttggggtc

SEQ ID NO: 1122926 - DNA, 15 bp, Homo sapiens
attgaagtttggggt

SEQ ID NO: 1122927 - DNA, 15 bp, Homo sapiens
aattgaagtttgggg

SEQ ID NO: 1122928 - DNA, 15 bp, Homo sapiens
aaattgaagtttggg

SEQ ID NO: 1122929 - DNA, 15 bp, Homo sapiens
taaattgaagtttgg

SEQ ID NO: 1122930 - DNA, 15 bp, Homo sapiens
ctaaattgaagtttg

SEQ ID NO: 1122931 - DNA, 15 bp, Homo sapiens
cctaaattgaagttt

SEQ ID NO: 1122932 - DNA, 15 bp, Homo sapiens
gcctaaattgaagtt

SEQ ID NO: 1122933 - DNA, 15 bp, Homo sapiens
ggcctaaattgaagt

SEQ ID NO: 1122934 - DNA, 15 bp, Homo sapiens
aggcctaaattgaag

SEQ ID NO: 1122935 - DNA, 15 bp, Homo sapiens
gaggcctaaattgaa

SEQ ID NO: 1122936 - DNA, 15 bp, Homo sapiens
ggaggcctaaattga

SEQ ID NO: 1122937 - DNA, 15 bp, Homo sapiens
tggaggcctaaattg

SEQ ID NO: 1122938 - DNA, 15 bp, Homo sapiens
ctggaggcctaaatt

SEQ ID NO: 1122939 - DNA, 15 bp, Homo sapiens
actggaggcctaaat

SEQ ID NO: 1122940 - DNA, 15 bp, Homo sapiens
gactggaggcctaaa

SEQ ID NO: 1122941 - DNA, 15 bp, Homo sapiens
tgactggaggcctaa

SEQ ID NO: 1122942 - DNA, 15 bp, Homo sapiens
ctgactggaggccta

SEQ ID NO: 1122943 - DNA, 15 bp, Homo sapiens
gctgactggaggcct

SEQ ID NO: 1122944 - DNA, 15 bp, Homo sapiens
ggctgactggaggcc

SEQ ID NO: 1122945 - DNA, 15 bp, Homo sapiens
tggctgactggaggc

SEQ ID NO: 1122946 - DNA, 15 bp, Homo sapiens
ctggctgactggagg

SEQ ID NO: 1122947 - DNA, 15 bp, Homo sapiens
cctggctgactggag

SEQ ID NO: 1122948 - DNA, 15 bp, Homo sapiens
tcctggctgactgga

SEQ ID NO: 1122949 - DNA, 15 bp, Homo sapiens
ctcctggctgactgg

SEQ ID NO: 1122950 - DNA, 15 bp, Homo sapiens
actcctggctgactg

SEQ ID NO: 1122951 - DNA, 15 bp, Homo sapiens
gactcctggctgact

SEQ ID NO: 1122952 - DNA, 15 bp, Homo sapiens
tgactcctggctgac

SEQ ID NO: 1122953 - DNA, 15 bp, Homo sapiens
ctgactcctggctga

SEQ ID NO: 1122954 - DNA, 15 bp, Homo sapiens
gctgactcctggctg

SEQ ID NO: 1122955 - DNA, 15 bp, Homo sapiens
tgctgactcctggct

SEQ ID NO: 1122956 - DNA, 15 bp, Homo sapiens
ttgctgactcctggc

SEQ ID NO: 1122957 - DNA, 15 bp, Homo sapiens
tttgctgactcctgg

SEQ ID NO: 1122958 - DNA, 15 bp, Homo sapiens
gtttgctgactcctg

SEQ ID NO: 1122959 - DNA, 15 bp, Homo sapiens
agtttgctgactcct

SEQ ID NO: 1122960 - DNA, 15 bp, Homo sapiens
tagtttgctgactcc

SEQ ID NO: 1122961 - DNA, 15 bp, Homo sapiens
gaccatagtttgctg

SEQ ID NO: 1122962 - DNA, 15 bp, Homo sapiens
cgaccatagtttgct

SEQ ID NO: 1122963 - DNA, 15 bp, Homo sapiens
tcgaccatagtttgc

SEQ ID NO: 1122964 - DNA, 15 bp, Homo sapiens
gtcgaccatagtttg

SEQ ID NO: 1122965 - DNA, 15 bp, Homo sapiens
tgtcgaccatagttt

SEQ ID NO: 1122966 - DNA, 15 bp, Homo sapiens
ctgtcgaccatagtt

SEQ ID NO: 1122967 - DNA, 15 bp, Homo sapiens
cctgtcgaccatagt

SEQ ID NO: 1122968 - DNA, 15 bp, Homo sapiens
gcctgtcgaccatag

SEQ ID NO: 1122969 - DNA, 15 bp, Homo sapiens
ggcctgtcgaccata

SEQ ID NO: 1122970 - DNA, 15 bp, Homo sapiens
tggcctgtcgaccat

SEQ ID NO: 1122971 - DNA, 15 bp, Homo sapiens
ttggcctgtcgacca

SEQ ID NO: 1122972 - DNA, 15 bp, Homo sapiens
tttggcctgtcgacc

SEQ ID NO: 1122973 - DNA, 15 bp, Homo sapiens
atttggcctgtcgac

SEQ ID NO: 1122974 - DNA, 15 bp, Homo sapiens
gatttggcctgtcga

SEQ ID NO: 1122975 - DNA, 15 bp, Homo sapiens
ggatttggcctgtcg

SEQ ID NO: 1122976 - DNA, 15 bp, Homo sapiens
tggatttggcctgtc

SEQ ID NO: 1122977 - DNA, 15 bp, Homo sapiens
ctggatttggcctgt

SEQ ID NO: 1122978 - DNA, 15 bp, Homo sapiens
gctggatttggcctg

SEQ ID NO: 1122979 - DNA, 15 bp, Homo sapiens
agctggatttggcct

SEQ ID NO: 1122980 - DNA, 15 bp, Homo sapiens
gagctggatttggcc

SEQ ID NO: 1122981 - DNA, 15 bp, Homo sapiens
tgagctggatttggc

SEQ ID NO: 1122982 - DNA, 15 bp, Homo sapiens
gtgagctggatttgg

SEQ ID NO: 1122983 - DNA, 15 bp, Homo sapiens
agtgagctggatttg

SEQ ID NO: 1122984 - DNA, 15 bp, Homo sapiens
cagtgagctggattt

SEQ ID NO: 1122985 - DNA, 15 bp, Homo sapiens
gcagtgagctggatt

SEQ ID NO: 1122986 - DNA, 15 bp, Homo sapiens
ggcagtgagctggat

SEQ ID NO: 1122987 - DNA, 15 bp, Homo sapiens
aggcagtgagctgga

SEQ ID NO: 1122988 - DNA, 15 bp, Homo sapiens
caggcagtgagctgg

SEQ ID NO: 1122989 - DNA, 15 bp, Homo sapiens
acaggcagtgagctg

SEQ ID NO: 1122990 - DNA, 15 bp, Homo sapiens
aacaggcagtgagct

SEQ ID NO: 1122991 - DNA, 15 bp, Homo sapiens
aaacaggcagtgagc

SEQ ID NO: 1122992 - DNA, 15 bp, Homo sapiens
aaaacaggcagtgag

SEQ ID NO: 1122993 - DNA, 15 bp, Homo sapiens
aaaaacaggcagtga

SEQ ID NO: 1122994 - DNA, 15 bp, Homo sapiens
taaaaacaggcagtg

SEQ ID NO: 1122995 - DNA, 15 bp, Homo sapiens
ataaaaacaggcagt

SEQ ID NO: 1122996 - DNA, 15 bp, Homo sapiens
tataaaaacaggcag

SEQ ID NO: 1122997 - DNA, 15 bp, Homo sapiens
ttataaaaacaggca

SEQ ID NO: 1122998 - DNA, 15 bp, Homo sapiens
tttataaaaacaggc

SEQ ID NO: 1122999 - DNA, 15 bp, Homo sapiens
atttataaaaacagg

SEQ ID NO: 1123000 - DNA, 15 bp, Homo sapiens
tatttataaaaacag

SEQ ID NO: 1123001 - DNA, 15 bp, Homo sapiens
ttatttataaaaaca

SEQ ID NO: 1123002 - DNA, 15 bp, Homo sapiens
gttatttataaaaac

SEQ ID NO: 1123003 - DNA, 15 bp, Homo sapiens
tgttatttataaaaa

SEQ ID NO: 1123004 - DNA, 15 bp, Homo sapiens
atgttatttataaaa

SEQ ID NO: 1123005 - DNA, 15 bp, Homo sapiens
aatgttatttataaa

SEQ ID NO: 1123006 - DNA, 15 bp, Homo sapiens
aaatgttatttataa

SEQ ID NO: 1123007 - DNA, 15 bp, Homo sapiens
aaaatgttatttata

SEQ ID NO: 1123008 - DNA, 15 bp, Homo sapiens
taaaatgttatttat

SEQ ID NO: 1123009 - DNA, 15 bp, Homo sapiens
gtaaaatgttattta

SEQ ID NO: 1123010 - DNA, 15 bp, Homo sapiens
agtaaaatgttattt

SEQ ID NO: 1123011 - DNA, 15 bp, Homo sapiens
cagtaaaatgttatt

SEQ ID NO: 1123012 - DNA, 15 bp, Homo sapiens
ccagtaaaatgttat

SEQ ID NO: 1123013 - DNA, 15 bp, Homo sapiens
cccagtaaaatgtta

SEQ ID NO: 1123014 - DNA, 15 bp, Homo sapiens
tcccagtaaaatgtt

SEQ ID NO: 1123015 - DNA, 15 bp, Homo sapiens
gtcccagtaaaatgt

SEQ ID NO: 1123016 - DNA, 15 bp, Homo sapiens
tgtcccagtaaaatg

SEQ ID NO: 1123017 - DNA, 15 bp, Homo sapiens
ctgtcccagtaaaat

SEQ ID NO: 1123018 - DNA, 15 bp, Homo sapiens
tctgtcccagtaaaa

SEQ ID NO: 1123019 - DNA, 15 bp, Homo sapiens
ctctgtcccagtaaa

SEQ ID NO: 1123020 - DNA, 15 bp, Homo sapiens
gctctgtcccagtaa

SEQ ID NO: 1123021 - DNA, 15 bp, Homo sapiens
ggctctgtcccagta

SEQ ID NO: 1123022 - DNA, 15 bp, Homo sapiens
tggctctgtcccagt

SEQ ID NO: 1123023 - DNA, 15 bp, Homo sapiens
gtggctctgtcccag

SEQ ID NO: 1123024 - DNA, 15 bp, Homo sapiens
tgtggctctgtccca

SEQ ID NO: 1123025 - DNA, 15 bp, Homo sapiens
ctgtggctctgtccc

SEQ ID NO: 1123026 - DNA, 15 bp, Homo sapiens
actgtggctctgtcc

SEQ ID NO: 1123027 - DNA, 15 bp, Homo sapiens
gactgtggctctgtc

SEQ ID NO: 1123028 - DNA, 15 bp, Homo sapiens
tgactgtggctctgt

SEQ ID NO: 1123029 - DNA, 15 bp, Homo sapiens
gtgactgtggctctg

SEQ ID NO: 1123030 - DNA, 15 bp, Homo sapiens
agtgactgtggctct

SEQ ID NO: 1123031 - DNA, 15 bp, Homo sapiens
aagtgactgtggctc

SEQ ID NO: 1123032 - DNA, 15 bp, Homo sapiens
taagtgactgtggct

SEQ ID NO: 1123033 - DNA, 15 bp, Homo sapiens
ataagtgactgtggc

SEQ ID NO: 1123034 - DNA, 15 bp, Homo sapiens
aataagtgactgtgg

SEQ ID NO: 1123035 - DNA, 15 bp, Homo sapiens
aaataagtgactgtg

SEQ ID NO: 1123036 - DNA, 15 bp, Homo sapiens
taaataagtgactgt

SEQ ID NO: 1123037 - DNA, 15 bp, Homo sapiens
gtaaataagtgactg

SEQ ID NO: 1123038 - DNA, 15 bp, Homo sapiens
tgtaaataagtgact

SEQ ID NO: 1123039 - DNA, 15 bp, Homo sapiens
atgtaaataagtgac

SEQ ID NO: 1123040 - DNA, 15 bp, Homo sapiens
tatgtaaataagtga

SEQ ID NO: 1123041 - DNA, 15 bp, Homo sapiens
atatgtaaataagtg

SEQ ID NO: 1123042 - DNA, 15 bp, Homo sapiens
catatgtaaataagt

SEQ ID NO: 1123043 - DNA, 15 bp, Homo sapiens
acatatgtaaataag

SEQ ID NO: 1123044 - DNA, 15 bp, Homo sapiens
gacatatgtaaataa

SEQ ID NO: 1123045 - DNA, 15 bp, Homo sapiens
agacatatgtaaata

SEQ ID NO: 1123046 - DNA, 15 bp, Homo sapiens
tagacatatgtaaat

SEQ ID NO: 1123047 - DNA, 15 bp, Homo sapiens
atagacatatgtaaa

SEQ ID NO: 1123048 - DNA, 15 bp, Homo sapiens
catagacatatgtaa

SEQ ID NO: 1123049 - DNA, 15 bp, Homo sapiens
ccatagacatatgta

SEQ ID NO: 1123050 - DNA, 15 bp, Homo sapiens
gccatagacatatgt

SEQ ID NO: 1123051 - DNA, 15 bp, Homo sapiens
agccatagacatatg

SEQ ID NO: 1123052 - DNA, 15 bp, Homo sapiens
cagccatagacatat

SEQ ID NO: 1123053 - DNA, 15 bp, Homo sapiens
gcagccatagacata

SEQ ID NO: 1123054 - DNA, 15 bp, Homo sapiens
agcagccatagacat

SEQ ID NO: 1123055 - DNA, 15 bp, Homo sapiens
aagcagccatagaca

SEQ ID NO: 1123056 - DNA, 15 bp, Homo sapiens
aaagcagccatagac

SEQ ID NO: 1123057 - DNA, 15 bp, Homo sapiens
aaaagcagccataga

SEQ ID NO: 1123058 - DNA, 15 bp, Homo sapiens
taaaagcagccatag

SEQ ID NO: 1123059 - DNA, 15 bp, Homo sapiens
ataaaagcagccata

SEQ ID NO: 1123060 - DNA, 15 bp, Homo sapiens
tataaaagcagccat

SEQ ID NO: 1123061 - DNA, 15 bp, Homo sapiens
gtataaaagcagcca

SEQ ID NO: 1123062 - DNA, 15 bp, Homo sapiens
agtataaaagcagcc

SEQ ID NO: 1123063 - DNA, 15 bp, Homo sapiens
tagtataaaagcagc

SEQ ID NO: 1123064 - DNA, 15 bp, Homo sapiens
gtagtataaaagcag

SEQ ID NO: 1123065 - DNA, 15 bp, Homo sapiens
tgtagtataaaagca

SEQ ID NO: 1123066 - DNA, 15 bp, Homo sapiens
atgtagtataaaagc

SEQ ID NO: 1123067 - DNA, 15 bp, Homo sapiens
catgtagtataaaag

SEQ ID NO: 1123068 - DNA, 15 bp, Homo sapiens
ccatgtagtataaaa

SEQ ID NO: 1123069 - DNA, 15 bp, Homo sapiens
gccatgtagtataaa

SEQ ID NO: 1123070 - DNA, 15 bp, Homo sapiens
tgccatgtagtataa

SEQ ID NO: 1123071 - DNA, 15 bp, Homo sapiens
ctgccatgtagtata

SEQ ID NO: 1123072 - DNA, 15 bp, Homo sapiens
tctgccatgtagtat

SEQ ID NO: 1123073 - DNA, 15 bp, Homo sapiens
ttctgccatgtagta

SEQ ID NO: 1123074 - DNA, 15 bp, Homo sapiens
gttctgccatgtagt

SEQ ID NO: 1123075 - DNA, 15 bp, Homo sapiens
agttctgccatgtag

SEQ ID NO: 1123076 - DNA, 15 bp, Homo sapiens
cagttctgccatgta

SEQ ID NO: 1123077 - DNA, 15 bp, Homo sapiens
tcagttctgccatgt

SEQ ID NO: 1123078 - DNA, 15 bp, Homo sapiens
ctcagttctgccatg

SEQ ID NO: 1123079 - DNA, 15 bp, Homo sapiens
actcagttctgccat

SEQ ID NO: 1123080 - DNA, 15 bp, Homo sapiens
tactcagttctgcca

SEQ ID NO: 1123081 - DNA, 15 bp, Homo sapiens
ttactcagttctgcc

SEQ ID NO: 1123082 - DNA, 15 bp, Homo sapiens
attactcagttctgc

SEQ ID NO: 1123083 - DNA, 15 bp, Homo sapiens
aattactcagttctg

SEQ ID NO: 1123084 - DNA, 15 bp, Homo sapiens
taattactcagttct

SEQ ID NO: 1123085 - DNA, 15 bp, Homo sapiens
gtaattactcagttc

SEQ ID NO: 1123086 - DNA, 15 bp, Homo sapiens
agtaattactcagtt

SEQ ID NO: 1123087 - DNA, 15 bp, Homo sapiens
aagtaattactcagt

SEQ ID NO: 1123088 - DNA, 15 bp, Homo sapiens
gaagtaattactcag

SEQ ID NO: 1123089 - DNA, 15 bp, Homo sapiens
tgaagtaattactca

SEQ ID NO: 1123090 - DNA, 15 bp, Homo sapiens
ctgaagtaattactc

SEQ ID NO: 1123091 - DNA, 15 bp, Homo sapiens
tctgaagtaattact

SEQ ID NO: 1123092 - DNA, 15 bp, Homo sapiens
ctctgaagtaattac

SEQ ID NO: 1123093 - DNA, 15 bp, Homo sapiens
gctctgaagtaatta

SEQ ID NO: 1123094 - DNA, 15 bp, Homo sapiens
ggctctgaagtaatt

SEQ ID NO: 1123095 - DNA, 15 bp, Homo sapiens
gggctctgaagtaat

SEQ ID NO: 1123096 - DNA, 15 bp, Homo sapiens
tgggctctgaagtaa

SEQ ID NO: 1123097 - DNA, 15 bp, Homo sapiens
atgggctctgaagta

SEQ ID NO: 1123098 - DNA, 15 bp, Homo sapiens
tatgggctctgaagt

SEQ ID NO: 1123099 - DNA, 15 bp, Homo sapiens
atatgggctctgaag

SEQ ID NO: 1123100 - DNA, 15 bp, Homo sapiens
catatgggctctgaa

SEQ ID NO: 1123101 - DNA, 15 bp, Homo sapiens
ccatatgggctctga

SEQ ID NO: 1123102 - DNA, 15 bp, Homo sapiens
gccatatgggctctg

SEQ ID NO: 1123103 - DNA, 15 bp, Homo sapiens
ggccatatgggctct

SEQ ID NO: 1123104 - DNA, 15 bp, Homo sapiens
aggccatatgggctc

SEQ ID NO: 1123105 - DNA, 15 bp, Homo sapiens
caggccatatgggct

SEQ ID NO: 1123106 - DNA, 15 bp, Homo sapiens
tcaggccatatgggc

SEQ ID NO: 1123107 - DNA, 15 bp, Homo sapiens
ttcaggccatatggg

SEQ ID NO: 1123108 - DNA, 15 bp, Homo sapiens
tttcaggccatatgg

SEQ ID NO: 1123109 - DNA, 15 bp, Homo sapiens
ttttcaggccatatg

SEQ ID NO: 1123110 - DNA, 15 bp, Homo sapiens
cttttcaggccatat

SEQ ID NO: 1123111 - DNA, 15 bp, Homo sapiens
gcttttcaggccata

SEQ ID NO: 1123112 - DNA, 15 bp, Homo sapiens
ggcttttcaggccat

SEQ ID NO: 1123113 - DNA, 15 bp, Homo sapiens
aggcttttcaggcca

SEQ ID NO: 1123114 - DNA, 15 bp, Homo sapiens
taggcttttcaggcc

SEQ ID NO: 1123115 - DNA, 15 bp, Homo sapiens
ttaggcttttcaggc

SEQ ID NO: 1123116 - DNA, 15 bp, Homo sapiens
tttaggcttttcagg

SEQ ID NO: 1123117 - DNA, 15 bp, Homo sapiens
ttttaggcttttcag

SEQ ID NO: 1123118 - DNA, 15 bp, Homo sapiens
attttaggcttttca

SEQ ID NO: 1123119 - DNA, 15 bp, Homo sapiens
tattttaggcttttc

SEQ ID NO: 1123120 - DNA, 15 bp, Homo sapiens
atattttaggctttt

SEQ ID NO: 1123121 - DNA, 15 bp, Homo sapiens
aatattttaggcttt

SEQ ID NO: 1123122 - DNA, 15 bp, Homo sapiens
aaatattttaggctt

SEQ ID NO: 1123123 - DNA, 15 bp, Homo sapiens
ataaatattttaggc

SEQ ID NO: 1123124 - DNA, 15 bp, Homo sapiens
aataaatattttagg

SEQ ID NO: 1123125 - DNA, 15 bp, Homo sapiens
aaataaatattttag

SEQ ID NO: 1123126 - DNA, 15 bp, Homo sapiens
caaataaatatttta

SEQ ID NO: 1123127 - DNA, 15 bp, Homo sapiens
ccaaataaatatttt

SEQ ID NO: 1123128 - DNA, 15 bp, Homo sapiens
gccaaataaatattt

SEQ ID NO: 1123129 - DNA, 15 bp, Homo sapiens
ggccaaataaatatt

SEQ ID NO: 1123130 - DNA, 15 bp, Homo sapiens
gggccaaataaatat

SEQ ID NO: 1123131 - DNA, 15 bp, Homo sapiens
agggccaaataaata

SEQ ID NO: 1123132 - DNA, 15 bp, Homo sapiens
aagggccaaataaat

SEQ ID NO: 1123133 - DNA, 15 bp, Homo sapiens
aaagggccaaataaa

SEQ ID NO: 1123134 - DNA, 15 bp, Homo sapiens
aaaagggccaaataa

SEQ ID NO: 1123135 - DNA, 15 bp, Homo sapiens
aaaaagggccaaata

SEQ ID NO: 1123136 - DNA, 15 bp, Homo sapiens
gaaaaagggccaaat

SEQ ID NO: 1123137 - DNA, 15 bp, Homo sapiens
tgaaaaagggccaaa

SEQ ID NO: 1123138 - DNA, 15 bp, Homo sapiens
ctgaaaaagggccaa

SEQ ID NO: 1123139 - DNA, 15 bp, Homo sapiens
tctgaaaaagggcca

SEQ ID NO: 1123140 - DNA, 15 bp, Homo sapiens
ttctgaaaaagggcc

SEQ ID NO: 1123141 - DNA, 15 bp, Homo sapiens
tttctgaaaaagggc

SEQ ID NO: 1123142 - DNA, 15 bp, Homo sapiens
ttttctgaaaaaggg

SEQ ID NO: 1123143 - DNA, 15 bp, Homo sapiens
attttctgaaaaagg

SEQ ID NO: 1123144 - DNA, 15 bp, Homo sapiens
cattttctgaaaaag

SEQ ID NO: 1123145 - DNA, 15 bp, Homo sapiens
acattttctgaaaaa

SEQ ID NO: 1123146 - DNA, 15 bp, Homo sapiens
aacattttctgaaaa

SEQ ID NO: 1123147 - DNA, 15 bp, Homo sapiens
aaacattttctgaaa

SEQ ID NO: 1123148 - DNA, 15 bp, Homo sapiens
caaacattttctgaa

SEQ ID NO: 1123149 - DNA, 15 bp, Homo sapiens
gcaaacattttctga

SEQ ID NO: 1123150 - DNA, 15 bp, Homo sapiens
agcaaacattttctg

SEQ ID NO: 1123151 - DNA, 15 bp, Homo sapiens
cagcaaacattttct

SEQ ID NO: 1123152 - DNA, 15 bp, Homo sapiens
ccagcaaacattttc

SEQ ID NO: 1123153 - DNA, 15 bp, Homo sapiens
gccagcaaacatttt

SEQ ID NO: 1123154 - DNA, 15 bp, Homo sapiens
ggccagcaaacattt

SEQ ID NO: 1123155 - DNA, 15 bp, Homo sapiens
gggccagcaaacatt

SEQ ID NO: 1123156 - DNA, 15 bp, Homo sapiens
ggggccagcaaacat

SEQ ID NO: 1123157 - DNA, 15 bp, Homo sapiens
cggggccagcaaaca

SEQ ID NO: 1123158 - DNA, 15 bp, Homo sapiens
ccggggccagcaaac

SEQ ID NO: 1123159 - DNA, 15 bp, Homo sapiens
tccggggccagcaaa

SEQ ID NO: 1123160 - DNA, 15 bp, Homo sapiens
atccggggccagcaa

SEQ ID NO: 1123161 - DNA, 15 bp, Homo sapiens
gatccggggccagca

SEQ ID NO: 1123162 - DNA, 15 bp, Homo sapiens
agatccggggccagc

SEQ ID NO: 1123163 - DNA, 15 bp, Homo sapiens
tagatccggggccag

SEQ ID NO: 1123164 - DNA, 15 bp, Homo sapiens
ctagatccggggcca

SEQ ID NO: 1123165 - DNA, 15 bp, Homo sapiens
cctagatccggggcc

SEQ ID NO: 1123166 - DNA, 15 bp, Homo sapiens
ccctagatccggggc

SEQ ID NO: 1123167 - DNA, 15 bp, Homo sapiens
gccctagatccgggg

SEQ ID NO: 1123168 - DNA, 15 bp, Homo sapiens
tgccctagatccggg

SEQ ID NO: 1123169 - DNA, 15 bp, Homo sapiens
ttgccctagatccgg

SEQ ID NO: 1123170 - DNA, 15 bp, Homo sapiens
tttgccctagatccg

SEQ ID NO: 1123171 - DNA, 15 bp, Homo sapiens
atttgccctagatcc

SEQ ID NO: 1123172 - DNA, 15 bp, Homo sapiens
catttgccctagatc

SEQ ID NO: 1123173 - DNA, 15 bp, Homo sapiens
ccatttgccctagat

SEQ ID NO: 1123174 - DNA, 15 bp, Homo sapiens
tccatttgccctaga

SEQ ID NO: 1123175 - DNA, 15 bp, Homo sapiens
ttccatttgccctag

SEQ ID NO: 1123176 - DNA, 15 bp, Homo sapiens
cttccatttgcccta

SEQ ID NO: 1123177 - DNA, 15 bp, Homo sapiens
ccttccatttgccct

SEQ ID NO: 1123178 - DNA, 15 bp, Homo sapiens
accttccatttgccc

SEQ ID NO: 1123179 - DNA, 15 bp, Homo sapiens
aaccttccatttgcc

SEQ ID NO: 1123180 - DNA, 15 bp, Homo sapiens
gaaccttccatttgc

SEQ ID NO: 1123181 - DNA, 15 bp, Homo sapiens
ggaaccttccatttg

SEQ ID NO: 1123182 - DNA, 15 bp, Homo sapiens
aggaaccttccattt

SEQ ID NO: 1123183 - DNA, 15 bp, Homo sapiens
aaggaaccttccatt

SEQ ID NO: 1123184 - DNA, 15 bp, Homo sapiens
aaaggaaccttccat

SEQ ID NO: 1123185 - DNA, 15 bp, Homo sapiens
caaaggaaccttcca

SEQ ID NO: 1123186 - DNA, 15 bp, Homo sapiens
gcaaaggaaccttcc

SEQ ID NO: 1123187 - DNA, 15 bp, Homo sapiens
agcaaaggaaccttc

SEQ ID NO: 1123188 - DNA, 15 bp, Homo sapiens
cagcaaaggaacctt

SEQ ID NO: 1123189 - DNA, 15 bp, Homo sapiens
tcagcaaaggaacct

SEQ ID NO: 1123190 - DNA, 15 bp, Homo sapiens
ctcagcaaaggaacc

SEQ ID NO: 1123191 - DNA, 15 bp, Homo sapiens
cctcagcaaaggaac

SEQ ID NO: 1123192 - DNA, 15 bp, Homo sapiens
acctcagcaaaggaa

SEQ ID NO: 1123193 - DNA, 15 bp, Homo sapiens
tacctcagcaaagga

SEQ ID NO: 1123194 - DNA, 15 bp, Homo sapiens
ctacctcagcaaagg

SEQ ID NO: 1123195 - DNA, 15 bp, Homo sapiens
cctacctcagcaaag

SEQ ID NO: 1123196 - DNA, 15 bp, Homo sapiens
tcctacctcagcaaa

SEQ ID NO: 1123197 - DNA, 15 bp, Homo sapiens
ttcctacctcagcaa

SEQ ID NO: 1123198 - DNA, 15 bp, Homo sapiens
cttcctacctcagca

SEQ ID NO: 1123199 - DNA, 15 bp, Homo sapiens
tcttcctacctcagc

SEQ ID NO: 1123200 - DNA, 15 bp, Homo sapiens
gtcttcctacctcag

SEQ ID NO: 1123201 - DNA, 15 bp, Homo sapiens
ggtcttcctacctca

SEQ ID NO: 1123202 - DNA, 15 bp, Homo sapiens
aggtcttcctacctc

SEQ ID NO: 1123203 - DNA, 15 bp, Homo sapiens
gaggtcttcctacct

SEQ ID NO: 1123204 - DNA, 15 bp, Homo sapiens
agaggtcttcctacc

SEQ ID NO: 1123205 - DNA, 15 bp, Homo sapiens
cagaggtcttcctac

SEQ ID NO: 1123206 - DNA, 15 bp, Homo sapiens
tcagaggtcttccta

SEQ ID NO: 1123207 - DNA, 15 bp, Homo sapiens
gtcagaggtcttcct

SEQ ID NO: 1123208 - DNA, 15 bp, Homo sapiens
cgtcagaggtcttcc

SEQ ID NO: 1123209 - DNA, 15 bp, Homo sapiens
acgtcagaggtcttc

SEQ ID NO: 1123210 - DNA, 15 bp, Homo sapiens
cacgtcagaggtctt

SEQ ID NO: 1123211 - DNA, 15 bp, Homo sapiens
acacgtcagaggtct

SEQ ID NO: 1123212 - DNA, 15 bp, Homo sapiens
cacacgtcagaggtc

SEQ ID NO: 1123213 - DNA, 15 bp, Homo sapiens
acacacgtcagaggt

SEQ ID NO: 1123214 - DNA, 15 bp, Homo sapiens
cacacacgtcagagg

SEQ ID NO: 1123215 - DNA, 15 bp, Homo sapiens
ccacacacgtcagag

SEQ ID NO: 1123216 - DNA, 15 bp, Homo sapiens
accacacacgtcaga

SEQ ID NO: 1123217 - DNA, 15 bp, Homo sapiens
gaccacacacgtcag

SEQ ID NO: 1123218 - DNA, 15 bp, Homo sapiens
agaccacacacgtca

SEQ ID NO: 1123219 - DNA, 15 bp, Homo sapiens
aagaccacacacgtc

SEQ ID NO: 1123220 - DNA, 15 bp, Homo sapiens
taagaccacacacgt

SEQ ID NO: 1123221 - DNA, 15 bp, Homo sapiens
ttaagaccacacacg

SEQ ID NO: 1123222 - DNA, 15 bp, Homo sapiens
tttaagaccacacac

SEQ ID NO: 1123223 - DNA, 15 bp, Homo sapiens
gtttaagaccacaca

SEQ ID NO: 1123224 - DNA, 15 bp, Homo sapiens
agtttaagaccacac

SEQ ID NO: 1123225 - DNA, 15 bp, Homo sapiens
tagtttaagaccaca

SEQ ID NO: 1123226 - DNA, 15 bp, Homo sapiens
ttagtttaagaccac

SEQ ID NO: 1123227 - DNA, 15 bp, Homo sapiens
tttagtttaagacca

SEQ ID NO: 1123228 - DNA, 15 bp, Homo sapiens
atttagtttaagacc

SEQ ID NO: 1123229 - DNA, 15 bp, Homo sapiens
aatttagtttaagac

SEQ ID NO: 1123230 - DNA, 15 bp, Homo sapiens
caatttagtttaaga

SEQ ID NO: 1123231 - DNA, 15 bp, Homo sapiens
ccaatttagtttaag

SEQ ID NO: 1123232 - DNA, 15 bp, Homo sapiens
tccaatttagtttaa

SEQ ID NO: 1123233 - DNA, 15 bp, Homo sapiens
gtccaatttagttta

SEQ ID NO: 1123234 - DNA, 15 bp, Homo sapiens
ggtccaatttagttt

SEQ ID NO: 1123235 - DNA, 15 bp, Homo sapiens
tggtccaatttagtt

SEQ ID NO: 1123236 - DNA, 15 bp, Homo sapiens
atggtccaatttagt

SEQ ID NO: 1123237 - DNA, 15 bp, Homo sapiens
tatggtccaatttag

SEQ ID NO: 1123238 - DNA, 15 bp, Homo sapiens
ttatggtccaattta

SEQ ID NO: 1123239 - DNA, 15 bp, Homo sapiens
cttatggtccaattt

SEQ ID NO: 1123240 - DNA, 15 bp, Homo sapiens
tcttatggtccaatt

SEQ ID NO: 1123241 - DNA, 15 bp, Homo sapiens
ttcttatggtccaat

SEQ ID NO: 1123242 - DNA, 15 bp, Homo sapiens
cttcttatggtccaa

SEQ ID NO: 1123243 - DNA, 15 bp, Homo sapiens
acttcttatggtcca

SEQ ID NO: 1123244 - DNA, 15 bp, Homo sapiens
cacttcttatggtcc

SEQ ID NO: 1123245 - DNA, 15 bp, Homo sapiens
acacttcttatggtc

SEQ ID NO: 1123246 - DNA, 15 bp, Homo sapiens
aacacttcttatggt

SEQ ID NO: 1123247 - DNA, 15 bp, Homo sapiens
gaacacttcttatgg

SEQ ID NO: 1123248 - DNA, 15 bp, Homo sapiens
agaacacttcttatg

SEQ ID NO: 1123249 - DNA, 15 bp, Homo sapiens
tagaacacttcttat

SEQ ID NO: 1123250 - DNA, 15 bp, Homo sapiens
atagaacacttctta

SEQ ID NO: 1123251 - DNA, 15 bp, Homo sapiens
gatagaacacttctt

SEQ ID NO: 1123252 - DNA, 15 bp, Homo sapiens
agatagaacacttct

SEQ ID NO: 1123253 - DNA, 15 bp, Homo sapiens
cagatagaacacttc

SEQ ID NO: 1123254 - DNA, 15 bp, Homo sapiens
gcagatagaacactt

SEQ ID NO: 1123255 - DNA, 15 bp, Homo sapiens
agcagatagaacact

SEQ ID NO: 1123256 - DNA, 15 bp, Homo sapiens
aagcagatagaacac

SEQ ID NO: 1123257 - DNA, 15 bp, Homo sapiens
gaagcagatagaaca

SEQ ID NO: 1123258 - DNA, 15 bp, Homo sapiens
ggaagcagatagaac

SEQ ID NO: 1123259 - DNA, 15 bp, Homo sapiens
aggaagcagatagaa

SEQ ID NO: 1123260 - DNA, 15 bp, Homo sapiens
aaggaagcagataga

SEQ ID NO: 1123261 - DNA, 15 bp, Homo sapiens
aaaggaagcagatag

SEQ ID NO: 1123262 - DNA, 15 bp, Homo sapiens
taaaggaagcagata

SEQ ID NO: 1123263 - DNA, 15 bp, Homo sapiens
gtaaaggaagcagat

SEQ ID NO: 1123264 - DNA, 15 bp, Homo sapiens
ggtaaaggaagcaga

SEQ ID NO: 1123265 - DNA, 15 bp, Homo sapiens
cggtaaaggaagcag

SEQ ID NO: 1123266 - DNA, 15 bp, Homo sapiens
gcggtaaaggaagca

SEQ ID NO: 1123267 - DNA, 15 bp, Homo sapiens
ggcggtaaaggaagc

SEQ ID NO: 1123268 - DNA, 15 bp, Homo sapiens
aggcggtaaaggaag

SEQ ID NO: 1123269 - DNA, 15 bp, Homo sapiens
gaggcggtaaaggaa

SEQ ID NO: 1123270 - DNA, 15 bp, Homo sapiens
ggaggcggtaaagga

SEQ ID NO: 1123271 - DNA, 15 bp, Homo sapiens
aggaggcggtaaagg

SEQ ID NO: 1123272 - DNA, 15 bp, Homo sapiens
taggaggcggtaaag

SEQ ID NO: 1123273 - DNA, 15 bp, Homo sapiens
ttaggaggcggtaaa

SEQ ID NO: 1123274 - DNA, 15 bp, Homo sapiens
cttaggaggcggtaa

SEQ ID NO: 1123275 - DNA, 15 bp, Homo sapiens
acttaggaggcggta

SEQ ID NO: 1123276 - DNA, 15 bp, Homo sapiens
cacttaggaggcggt

SEQ ID NO: 1123277 - DNA, 15 bp, Homo sapiens
acacttaggaggcgg

SEQ ID NO: 1123278 - DNA, 15 bp, Homo sapiens
cacacttaggaggcg

SEQ ID NO: 1123279 - DNA, 15 bp, Homo sapiens
ccacacttaggaggc

SEQ ID NO: 1123280 - DNA, 15 bp, Homo sapiens
cccacacttaggagg

SEQ ID NO: 1123281 - DNA, 15 bp, Homo sapiens
tcccacacttaggag

SEQ ID NO: 1123282 - DNA, 15 bp, Homo sapiens
gtcccacacttagga

SEQ ID NO: 1123283 - DNA, 15 bp, Homo sapiens
ggtcccacacttagg

SEQ ID NO: 1123284 - DNA, 15 bp, Homo sapiens
aggtcccacacttag

SEQ ID NO: 1123285 - DNA, 15 bp, Homo sapiens
gaggtcccacactta

SEQ ID NO: 1123286 - DNA, 15 bp, Homo sapiens
tgaggtcccacactt

SEQ ID NO: 1123287 - DNA, 15 bp, Homo sapiens
ttgaggtcccacact

SEQ ID NO: 1123288 - DNA, 15 bp, Homo sapiens
attgaggtcccacac

SEQ ID NO: 1123289 - DNA, 15 bp, Homo sapiens
tattgaggtcccaca

SEQ ID NO: 1123290 - DNA, 15 bp, Homo sapiens
gtattgaggtcccac

SEQ ID NO: 1123291 - DNA, 15 bp, Homo sapiens
agtattgaggtccca

SEQ ID NO: 1123292 - DNA, 15 bp, Homo sapiens
aagtattgaggtccc

SEQ ID NO: 1123293 - DNA, 15 bp, Homo sapiens
aaagtattgaggtcc

SEQ ID NO: 1123294 - DNA, 15 bp, Homo sapiens
gaaagtattgaggtc

SEQ ID NO: 1123295 - DNA, 15 bp, Homo sapiens
agaaagtattgaggt

SEQ ID NO: 1123296 - DNA, 15 bp, Homo sapiens
aagaaagtattgagg

SEQ ID NO: 1123297 - DNA, 15 bp, Homo sapiens
gaagaaagtattgag

SEQ ID NO: 1123298 - DNA, 15 bp, Homo sapiens
tgaagaaagtattga

SEQ ID NO: 1123299 - DNA, 15 bp, Homo sapiens
gtgaagaaagtattg

SEQ ID NO: 1123300 - DNA, 15 bp, Homo sapiens
agtgaagaaagtatt

SEQ ID NO: 1123301 - DNA, 15 bp, Homo sapiens
cagtgaagaaagtat

SEQ ID NO: 1123302 - DNA, 15 bp, Homo sapiens
acagtgaagaaagta

SEQ ID NO: 1123303 - DNA, 15 bp, Homo sapiens
gacagtgaagaaagt

SEQ ID NO: 1123304 - DNA, 15 bp, Homo sapiens
tgacagtgaagaaag

SEQ ID NO: 1123305 - DNA, 15 bp, Homo sapiens
ctgacagtgaagaaa

SEQ ID NO: 1123306 - DNA, 15 bp, Homo sapiens
gctgacagtgaagaa

SEQ ID NO: 1123307 - DNA, 15 bp, Homo sapiens
tgctgacagtgaaga

SEQ ID NO: 1123308 - DNA, 15 bp, Homo sapiens
atgctgacagtgaag

SEQ ID NO: 1123309 - DNA, 15 bp, Homo sapiens
gatgctgacagtgaa

SEQ ID NO: 1123310 - DNA, 15 bp, Homo sapiens
tgatgctgacagtga

SEQ ID NO: 1123311 - DNA, 15 bp, Homo sapiens
atgatgctgacagtg

SEQ ID NO: 1123312 - DNA, 15 bp, Homo sapiens
gatgatgctgacagt

SEQ ID NO: 1123313 - DNA, 15 bp, Homo sapiens
tgatgatgctgacag

SEQ ID NO: 1123314 - DNA, 15 bp, Homo sapiens
atgatgatgctgaca

SEQ ID NO: 1123315 - DNA, 15 bp, Homo sapiens
gatgatgatgctgac

SEQ ID NO: 1123316 - DNA, 15 bp, Homo sapiens
tgatgatgatgctga

SEQ ID NO: 1123317 - DNA, 15 bp, Homo sapiens
gtgatgatgatgctg

SEQ ID NO: 1123318 - DNA, 15 bp, Homo sapiens
ggtgatgatgatgct

SEQ ID NO: 1123319 - DNA, 15 bp, Homo sapiens
tggtgatgatgatgc

SEQ ID NO: 1123320 - DNA, 15 bp, Homo sapiens
ttggtgatgatgatg

SEQ ID NO: 1123321 - DNA, 15 bp, Homo sapiens
gttggtgatgatgat

SEQ ID NO: 1123322 - DNA, 15 bp, Homo sapiens
tgttggtgatgatga

SEQ ID NO: 1123323 - DNA, 15 bp, Homo sapiens
atgttggtgatgatg

SEQ ID NO: 1123324 - DNA, 15 bp, Homo sapiens
gatgttggtgatgat

SEQ ID NO: 1123325 - DNA, 15 bp, Homo sapiens
tgatgttggtgatga

SEQ ID NO: 1123326 - DNA, 15 bp, Homo sapiens
atgatgttggtgatg

SEQ ID NO: 1123327 - DNA, 15 bp, Homo sapiens
aatgatgttggtgat

SEQ ID NO: 1123328 - DNA, 15 bp, Homo sapiens
taatgatgttggtga

SEQ ID NO: 1123329 - DNA, 15 bp, Homo sapiens
gtaatgatgttggtg

SEQ ID NO: 1123330 - DNA, 15 bp, Homo sapiens
agtaatgatgttggt

SEQ ID NO: 1123331 - DNA, 15 bp, Homo sapiens
tagtaatgatgttgg

SEQ ID NO: 1123332 - DNA, 15 bp, Homo sapiens
gtagtaatgatgttg

SEQ ID NO: 1123333 - DNA, 15 bp, Homo sapiens
ggtagtaatgatgtt

SEQ ID NO: 1123334 - DNA, 15 bp, Homo sapiens
tggtagtaatgatgt

SEQ ID NO: 1123335 - DNA, 15 bp, Homo sapiens
atggtagtaatgatg

SEQ ID NO: 1123336 - DNA, 15 bp, Homo sapiens
aatggtagtaatgat

SEQ ID NO: 1123337 - DNA, 15 bp, Homo sapiens
caatggtagtaatga

SEQ ID NO: 1123338 - DNA, 15 bp, Homo sapiens
tcaatggtagtaatg

SEQ ID NO: 1123339 - DNA, 15 bp, Homo sapiens
ttcaatggtagtaat

SEQ ID NO: 1123340 - DNA, 15 bp, Homo sapiens
cttcaatggtagtaa

SEQ ID NO: 1123341 - DNA, 15 bp, Homo sapiens
tcttcaatggtagta

SEQ ID NO: 1123342 - DNA, 15 bp, Homo sapiens
ctcttcaatggtagt

SEQ ID NO: 1123343 - DNA, 15 bp, Homo sapiens
tctcttcaatggtag

SEQ ID NO: 1123344 - DNA, 15 bp, Homo sapiens
gtctcttcaatggta

SEQ ID NO: 1123345 - DNA, 15 bp, Homo sapiens
agtctcttcaatggt

SEQ ID NO: 1123346 - DNA, 15 bp, Homo sapiens
tagtctcttcaatgg

SEQ ID NO: 1123347 - DNA, 15 bp, Homo sapiens
ctagtctcttcaatg

SEQ ID NO: 1123348 - DNA, 15 bp, Homo sapiens
gctagtctcttcaat

SEQ ID NO: 1123349 - DNA, 15 bp, Homo sapiens
tgctagtctcttcaa

SEQ ID NO: 1123350 - DNA, 15 bp, Homo sapiens
gtgctagtctcttca

SEQ ID NO: 1123351 - DNA, 15 bp, Homo sapiens
agtgctagtctcttc

SEQ ID NO: 1123352 - DNA, 15 bp, Homo sapiens
cagtgctagtctctt

SEQ ID NO: 1123353 - DNA, 15 bp, Homo sapiens
ccagtgctagtctct

SEQ ID NO: 1123354 - DNA, 15 bp, Homo sapiens
tccagtgctagtctc

SEQ ID NO: 1123355 - DNA, 15 bp, Homo sapiens
atccagtgctagtct

SEQ ID NO: 1123356 - DNA, 15 bp, Homo sapiens
aatccagtgctagtc

SEQ ID NO: 1123357 - DNA, 15 bp, Homo sapiens
taatccagtgctagt

SEQ ID NO: 1123358 - DNA, 15 bp, Homo sapiens
ttaatccagtgctag

SEQ ID NO: 1123359 - DNA, 15 bp, Homo sapiens
attaatccagtgcta

SEQ ID NO: 1123360 - DNA, 15 bp, Homo sapiens
gattaatccagtgct

SEQ ID NO: 1123361 - DNA, 15 bp, Homo sapiens
tgattaatccagtgc

SEQ ID NO: 1123362 - DNA, 15 bp, Homo sapiens
atgattaatccagtg

SEQ ID NO: 1123363 - DNA, 15 bp, Homo sapiens
gatgattaatccagt

SEQ ID NO: 1123364 - DNA, 15 bp, Homo sapiens
agatgattaatccag

SEQ ID NO: 1123365 - DNA, 15 bp, Homo sapiens
aagatgattaatcca

SEQ ID NO: 1123366 - DNA, 15 bp, Homo sapiens
aaagatgattaatcc

SEQ ID NO: 1123367 - DNA, 15 bp, Homo sapiens
taaagatgattaatc

SEQ ID NO: 1123368 - DNA, 15 bp, Homo sapiens
gtaaagatgattaat

SEQ ID NO: 1123369 - DNA, 15 bp, Homo sapiens
tgtaaagatgattaa

SEQ ID NO: 1123370 - DNA, 15 bp, Homo sapiens
gtgtaaagatgatta

SEQ ID NO: 1123371 - DNA, 15 bp, Homo sapiens
tgtgtaaagatgatt

SEQ ID NO: 1123372 - DNA, 15 bp, Homo sapiens
gtgtgtaaagatgat

SEQ ID NO: 1123373 - DNA, 15 bp, Homo sapiens
tgtgtgtaaagatga

SEQ ID NO: 1123374 - DNA, 15 bp, Homo sapiens
atgtgtgtaaagatg

SEQ ID NO: 1123375 - DNA, 15 bp, Homo sapiens
aatgtgtgtaaagat

SEQ ID NO: 1123376 - DNA, 15 bp, Homo sapiens
taatgtgtgtaaaga

SEQ ID NO: 1123377 - DNA, 15 bp, Homo sapiens
ataatgtgtgtaaag

SEQ ID NO: 1123378 - DNA, 15 bp, Homo sapiens
gataatgtgtgtaaa

SEQ ID NO: 1123379 - DNA, 15 bp, Homo sapiens
agataatgtgtgtaa

SEQ ID NO: 1123380 - DNA, 15 bp, Homo sapiens
gagataatgtgtgta

SEQ ID NO: 1123381 - DNA, 15 bp, Homo sapiens
tgagataatgtgtgt

SEQ ID NO: 1123382 - DNA, 15 bp, Homo sapiens
atgagataatgtgtg

SEQ ID NO: 1123383 - DNA, 15 bp, Homo sapiens
aatgagataatgtgt

SEQ ID NO: 1123384 - DNA, 15 bp, Homo sapiens
aaatgagataatgtg

SEQ ID NO: 1123385 - DNA, 15 bp, Homo sapiens
caaatgagataatgt

SEQ ID NO: 1123386 - DNA, 15 bp, Homo sapiens
tcaaatgagataatg

SEQ ID NO: 1123387 - DNA, 15 bp, Homo sapiens
atcaaatgagataat

SEQ ID NO: 1123388 - DNA, 15 bp, Homo sapiens
gatcaaatgagataa

SEQ ID NO: 1123389 - DNA, 15 bp, Homo sapiens
ggatcaaatgagata

SEQ ID NO: 1123390 - DNA, 15 bp, Homo sapiens
aggatcaaatgagat

SEQ ID NO: 1123391 - DNA, 15 bp, Homo sapiens
caggatcaaatgaga

SEQ ID NO: 1123392 - DNA, 15 bp, Homo sapiens
acaggatcaaatgag

SEQ ID NO: 1123393 - DNA, 15 bp, Homo sapiens
tacaggatcaaatga

SEQ ID NO: 1123394 - DNA, 15 bp, Homo sapiens
ttacaggatcaaatg

SEQ ID NO: 1123395 - DNA, 15 bp, Homo sapiens
attacaggatcaaat

SEQ ID NO: 1123396 - DNA, 15 bp, Homo sapiens
tattacaggatcaaa

SEQ ID NO: 1123397 - DNA, 15 bp, Homo sapiens
ttattacaggatcaa

SEQ ID NO: 1123398 - DNA, 15 bp, Homo sapiens
attattacaggatca

SEQ ID NO: 1123399 - DNA, 15 bp, Homo sapiens
gattattacaggatc

SEQ ID NO: 1123400 - DNA, 15 bp, Homo sapiens
ggattattacaggat

SEQ ID NO: 1123401 - DNA, 15 bp, Homo sapiens
aggattattacagga

SEQ ID NO: 1123402 - DNA, 15 bp, Homo sapiens
taggattattacagg

SEQ ID NO: 1123403 - DNA, 15 bp, Homo sapiens
ataggattattacag

SEQ ID NO: 1123404 - DNA, 15 bp, Homo sapiens
cataggattattaca

SEQ ID NO: 1123405 - DNA, 15 bp, Homo sapiens
tcataggattattac

SEQ ID NO: 1123406 - DNA, 15 bp, Homo sapiens
ttcataggattatta

SEQ ID NO: 1123407 - DNA, 15 bp, Homo sapiens
tttcataggattatt

SEQ ID NO: 1123408 - DNA, 15 bp, Homo sapiens
atttcataggattat

SEQ ID NO: 1123409 - DNA, 15 bp, Homo sapiens
tatttcataggatta

SEQ ID NO: 1123410 - DNA, 15 bp, Homo sapiens
atatttcataggatt

SEQ ID NO: 1123411 - DNA, 15 bp, Homo sapiens
tatatttcataggat

SEQ ID NO: 1123412 - DNA, 15 bp, Homo sapiens
atatatttcatagga

SEQ ID NO: 1123413 - DNA, 15 bp, Homo sapiens
catatatttcatagg

SEQ ID NO: 1123414 - DNA, 15 bp, Homo sapiens
gcatatatttcatag

SEQ ID NO: 1123415 - DNA, 15 bp, Homo sapiens
agcatatatttcata

SEQ ID NO: 1123416 - DNA, 15 bp, Homo sapiens
tagcatatatttcat

SEQ ID NO: 1123417 - DNA, 15 bp, Homo sapiens
atagcatatatttca

SEQ ID NO: 1123418 - DNA, 15 bp, Homo sapiens
gatagcatatatttc

SEQ ID NO: 1123419 - DNA, 15 bp, Homo sapiens
tgatagcatatattt

SEQ ID NO: 1123420 - DNA, 15 bp, Homo sapiens
atgatagcatatatt

SEQ ID NO: 1123421 - DNA, 15 bp, Homo sapiens
aatgatagcatatat

SEQ ID NO: 1123422 - DNA, 15 bp, Homo sapiens
taatgatagcatata

SEQ ID NO: 1123423 - DNA, 15 bp, Homo sapiens
ataatgatagcatat

SEQ ID NO: 1123424 - DNA, 15 bp, Homo sapiens
gataatgatagcata

SEQ ID NO: 1123425 - DNA, 15 bp, Homo sapiens
ggataatgatagcat

SEQ ID NO: 1123426 - DNA, 15 bp, Homo sapiens
gggataatgatagca

SEQ ID NO: 1123427 - DNA, 15 bp, Homo sapiens
agggataatgatagc

SEQ ID NO: 1123428 - DNA, 15 bp, Homo sapiens
cagggataatgatag

SEQ ID NO: 1123429 - DNA, 15 bp, Homo sapiens
acagggataatgata

SEQ ID NO: 1123430 - DNA, 15 bp, Homo sapiens
cacagggataatgat

SEQ ID NO: 1123431 - DNA, 15 bp, Homo sapiens
acacagggataatga

SEQ ID NO: 1123432 - DNA, 15 bp, Homo sapiens
aacacagggataatg

SEQ ID NO: 1123433 - DNA, 15 bp, Homo sapiens
caacacagggataat

SEQ ID NO: 1123434 - DNA, 15 bp, Homo sapiens
gcaacacagggataa

SEQ ID NO: 1123435 - DNA, 15 bp, Homo sapiens
tgcaacacagggata

SEQ ID NO: 1123436 - DNA, 15 bp, Homo sapiens
ctgcaacacagggat

SEQ ID NO: 1123437 - DNA, 15 bp, Homo sapiens
tctgcaacacaggga

SEQ ID NO: 1123438 - DNA, 15 bp, Homo sapiens
atctgcaacacaggg

SEQ ID NO: 1123439 - DNA, 15 bp, Homo sapiens
catctgcaacacagg

SEQ ID NO: 1123440 - DNA, 15 bp, Homo sapiens
tcatctgcaacacag

SEQ ID NO: 1123441 - DNA, 15 bp, Homo sapiens
ttcatctgcaacaca

SEQ ID NO: 1123442 - DNA, 15 bp, Homo sapiens
cttcatctgcaacac

SEQ ID NO: 1123443 - DNA, 15 bp, Homo sapiens
tcttcatctgcaaca

SEQ ID NO: 1123444 - DNA, 15 bp, Homo sapiens
ttcttcatctgcaac

SEQ ID NO: 1123445 - DNA, 15 bp, Homo sapiens
tttcttcatctgcaa

SEQ ID NO: 1123446 - DNA, 15 bp, Homo sapiens
atttcttcatctgca

SEQ ID NO: 1123447 - DNA, 15 bp, Homo sapiens
catttcttcatctgc

SEQ ID NO: 1123448 - DNA, 15 bp, Homo sapiens
ccatttcttcatctg

SEQ ID NO: 1123449 - DNA, 15 bp, Homo sapiens
cccatttcttcatct

SEQ ID NO: 1123450 - DNA, 15 bp, Homo sapiens
ccccatttcttcatc

SEQ ID NO: 1123451 - DNA, 15 bp, Homo sapiens
cccccatttcttcat

SEQ ID NO: 1123452 - DNA, 15 bp, Homo sapiens
gcccccatttcttca

SEQ ID NO: 1123453 - DNA, 15 bp, Homo sapiens
agcccccatttcttc

SEQ ID NO: 1123454 - DNA, 15 bp, Homo sapiens
aagcccccatttctt

SEQ ID NO: 1123455 - DNA, 15 bp, Homo sapiens
caagcccccatttct

SEQ ID NO: 1123456 - DNA, 15 bp, Homo sapiens
tcaagcccccatttc

SEQ ID NO: 1123457 - DNA, 15 bp, Homo sapiens
ttcaagcccccattt

SEQ ID NO: 1123458 - DNA, 15 bp, Homo sapiens
tttcaagcccccatt

SEQ ID NO: 1123459 - DNA, 15 bp, Homo sapiens
ctttcaagcccccat

SEQ ID NO: 1123460 - DNA, 15 bp, Homo sapiens
tctttcaagccccca

SEQ ID NO: 1123461 - DNA, 15 bp, Homo sapiens
atctttcaagccccc

SEQ ID NO: 1123462 - DNA, 15 bp, Homo sapiens
aatctttcaagcccc

SEQ ID NO: 1123463 - DNA, 15 bp, Homo sapiens
taatctttcaagccc

SEQ ID NO: 1123464 - DNA, 15 bp, Homo sapiens
gtaatctttcaagcc

SEQ ID NO: 1123465 - DNA, 15 bp, Homo sapiens
tgtaatctttcaagc

SEQ ID NO: 1123466 - DNA, 15 bp, Homo sapiens
atgtaatctttcaag

SEQ ID NO: 1123467 - DNA, 15 bp, Homo sapiens
tatgtaatctttcaa

SEQ ID NO: 1123468 - DNA, 15 bp, Homo sapiens
ttatgtaatctttca

SEQ ID NO: 1123469 - DNA, 15 bp, Homo sapiens
attatgtaatctttc

SEQ ID NO: 1123470 - DNA, 15 bp, Homo sapiens
gattatgtaatcttt

SEQ ID NO: 1123471 - DNA, 15 bp, Homo sapiens
agattatgtaatctt

SEQ ID NO: 1123472 - DNA, 15 bp, Homo sapiens
cagattatgtaatct

SEQ ID NO: 1123473 - DNA, 15 bp, Homo sapiens
gcagattatgtaatc

SEQ ID NO: 1123474 - DNA, 15 bp, Homo sapiens
ggcagattatgtaat

SEQ ID NO: 1123475 - DNA, 15 bp, Homo sapiens
aggcagattatgtaa

SEQ ID NO: 1123476 - DNA, 15 bp, Homo sapiens
taggcagattatgta

SEQ ID NO: 1123477 - DNA, 15 bp, Homo sapiens
ataggcagattatgt

SEQ ID NO: 1123478 - DNA, 15 bp, Homo sapiens
cataggcagattatg

SEQ ID NO: 1123479 - DNA, 15 bp, Homo sapiens
ccataggcagattat

SEQ ID NO: 1123480 - DNA, 15 bp, Homo sapiens
cccataggcagatta

SEQ ID NO: 1123481 - DNA, 15 bp, Homo sapiens
tcccataggcagatt

SEQ ID NO: 1123482 - DNA, 15 bp, Homo sapiens
ctcccataggcagat

SEQ ID NO: 1123483 - DNA, 15 bp, Homo sapiens
cctcccataggcaga

SEQ ID NO: 1123484 - DNA, 15 bp, Homo sapiens
tcctcccataggcag

SEQ ID NO: 1123485 - DNA, 15 bp, Homo sapiens
ttcctcccataggca

SEQ ID NO: 1123486 - DNA, 15 bp, Homo sapiens
gttcctcccataggc

SEQ ID NO: 1123487 - DNA, 15 bp, Homo sapiens
ggttcctcccatagg

SEQ ID NO: 1123488 - DNA, 15 bp, Homo sapiens
tggttcctcccatag

SEQ ID NO: 1123489 - DNA, 15 bp, Homo sapiens
gtggttcctcccata

SEQ ID NO: 1123490 - DNA, 15 bp, Homo sapiens
ggtggttcctcccat

SEQ ID NO: 1123491 - DNA, 15 bp, Homo sapiens
aggtggttcctccca

SEQ ID NO: 1123492 - DNA, 15 bp, Homo sapiens
caggtggttcctccc

SEQ ID NO: 1123493 - DNA, 15 bp, Homo sapiens
gcaggtggttcctcc

SEQ ID NO: 1123494 - DNA, 15 bp, Homo sapiens
ggcaggtggttcctc

SEQ ID NO: 1123495 - DNA, 15 bp, Homo sapiens
tggcaggtggttcct

SEQ ID NO: 1123496 - DNA, 15 bp, Homo sapiens
atggcaggtggttcc

SEQ ID NO: 1123497 - DNA, 15 bp, Homo sapiens
tatggcaggtggttc

SEQ ID NO: 1123498 - DNA, 15 bp, Homo sapiens
ttatggcaggtggtt

SEQ ID NO: 1123499 - DNA, 15 bp, Homo sapiens
attatggcaggtggt

SEQ ID NO: 1123500 - DNA, 15 bp, Homo sapiens
aattatggcaggtgg

SEQ ID NO: 1123501 - DNA, 15 bp, Homo sapiens
caattatggcaggtg

SEQ ID NO: 1123502 - DNA, 15 bp, Homo sapiens
tcaattatggcaggt

SEQ ID NO: 1123503 - DNA, 15 bp, Homo sapiens
ctcaattatggcagg

SEQ ID NO: 1123504 - DNA, 15 bp, Homo sapiens
cctcaattatggcag

SEQ ID NO: 1123505 - DNA, 15 bp, Homo sapiens
tcctcaattatggca

SEQ ID NO: 1123506 - DNA, 15 bp, Homo sapiens
gtcctcaattatggc

SEQ ID NO: 1123507 - DNA, 15 bp, Homo sapiens
tgtcctcaattatgg

SEQ ID NO: 1123508 - DNA, 15 bp, Homo sapiens
ttgtcctcaattatg

SEQ ID NO: 1123509 - DNA, 15 bp, Homo sapiens
cttgtcctcaattat

SEQ ID NO: 1123510 - DNA, 15 bp, Homo sapiens
ccttgtcctcaatta

SEQ ID NO: 1123511 - DNA, 15 bp, Homo sapiens
tccttgtcctcaatt

SEQ ID NO: 1123512 - DNA, 15 bp, Homo sapiens
ttccttgtcctcaat

SEQ ID NO: 1123513 - DNA, 15 bp, Homo sapiens
tttccttgtcctcaa

SEQ ID NO: 1123514 - DNA, 15 bp, Homo sapiens
atttccttgtcctca

SEQ ID NO: 1123515 - DNA, 15 bp, Homo sapiens
catttccttgtcctc

SEQ ID NO: 1123516 - DNA, 15 bp, Homo sapiens
tcatttccttgtcct

SEQ ID NO: 1123517 - DNA, 15 bp, Homo sapiens
ttcatttccttgtcc

SEQ ID NO: 1123518 - DNA, 15 bp, Homo sapiens
cttcatttccttgtc

SEQ ID NO: 1123519 - DNA, 15 bp, Homo sapiens
tcttcatttccttgt

SEQ ID NO: 1123520 - DNA, 15 bp, Homo sapiens
ctcttcatttccttg

SEQ ID NO: 1123521 - DNA, 15 bp, Homo sapiens
tctcttcatttcctt

SEQ ID NO: 1123522 - DNA, 15 bp, Homo sapiens
atctcttcatttcct

SEQ ID NO: 1123523 - DNA, 15 bp, Homo sapiens
tatctcttcatttcc

SEQ ID NO: 1123524 - DNA, 15 bp, Homo sapiens
ttatctcttcatttc

SEQ ID NO: 1123525 - DNA, 15 bp, Homo sapiens
attatctcttcattt

SEQ ID NO: 1123526 - DNA, 15 bp, Homo sapiens
aattatctcttcatt

SEQ ID NO: 1123527 - DNA, 15 bp, Homo sapiens
aaattatctcttcat

SEQ ID NO: 1123528 - DNA, 15 bp, Homo sapiens
aaaattatctcttca

SEQ ID NO: 1123529 - DNA, 15 bp, Homo sapiens
aaaaattatctcttc

SEQ ID NO: 1123530 - DNA, 15 bp, Homo sapiens
caaaaattatctctt

SEQ ID NO: 1123531 - DNA, 15 bp, Homo sapiens
acaaaaattatctct

SEQ ID NO: 1123532 - DNA, 15 bp, Homo sapiens
gacaaaaattatctc

SEQ ID NO: 1123533 - DNA, 15 bp, Homo sapiens
ggacaaaaattatct

SEQ ID NO: 1123534 - DNA, 15 bp, Homo sapiens
gggacaaaaattatc

SEQ ID NO: 1123535 - DNA, 15 bp, Homo sapiens
agggacaaaaattat

SEQ ID NO: 1123536 - DNA, 15 bp, Homo sapiens
tagggacaaaaatta

SEQ ID NO: 1123537 - DNA, 15 bp, Homo sapiens
atagggacaaaaatt

SEQ ID NO: 1123538 - DNA, 15 bp, Homo sapiens
catagggacaaaaat

SEQ ID NO: 1123539 - DNA, 15 bp, Homo sapiens
gcatagggacaaaaa

SEQ ID NO: 1123540 - DNA, 15 bp, Homo sapiens
tgcatagggacaaaa

SEQ ID NO: 1123541 - DNA, 15 bp, Homo sapiens
atgcatagggacaaa

SEQ ID NO: 1123542 - DNA, 15 bp, Homo sapiens
tatgcatagggacaa

SEQ ID NO: 1123543 - DNA, 15 bp, Homo sapiens
ctatgcatagggaca

SEQ ID NO: 1123544 - DNA, 15 bp, Homo sapiens
cctatgcatagggac

SEQ ID NO: 1123545 - DNA, 15 bp, Homo sapiens
gcctatgcataggga

SEQ ID NO: 1123546 - DNA, 15 bp, Homo sapiens
agcctatgcataggg

SEQ ID NO: 1123547 - DNA, 15 bp, Homo sapiens
cagcctatgcatagg

SEQ ID NO: 1123548 - DNA, 15 bp, Homo sapiens
ccagcctatgcatag

SEQ ID NO: 1123549 - DNA, 15 bp, Homo sapiens
cccagcctatgcata

SEQ ID NO: 1123550 - DNA, 15 bp, Homo sapiens
tcccagcctatgcat

SEQ ID NO: 1123551 - DNA, 15 bp, Homo sapiens
atcccagcctatgca

SEQ ID NO: 1123552 - DNA, 15 bp, Homo sapiens
aatcccagcctatgc

SEQ ID NO: 1123553 - DNA, 15 bp, Homo sapiens
gaatcccagcctatg

SEQ ID NO: 1123554 - DNA, 15 bp, Homo sapiens
agaatcccagcctat

SEQ ID NO: 1123555 - DNA, 15 bp, Homo sapiens
tagaatcccagccta

SEQ ID NO: 1123556 - DNA, 15 bp, Homo sapiens
ctagaatcccagcct

SEQ ID NO: 1123557 - DNA, 15 bp, Homo sapiens
cctagaatcccagcc

SEQ ID NO: 1123558 - DNA, 15 bp, Homo sapiens
ccctagaatcccagc

SEQ ID NO: 1123559 - DNA, 15 bp, Homo sapiens
tccctagaatcccag

SEQ ID NO: 1123560 - DNA, 15 bp, Homo sapiens
ctccctagaatccca

SEQ ID NO: 1123561 - DNA, 15 bp, Homo sapiens
tctccctagaatccc

SEQ ID NO: 1123562 - DNA, 15 bp, Homo sapiens
ttctccctagaatcc

SEQ ID NO: 1123563 - DNA, 15 bp, Homo sapiens
tttctccctagaatc

SEQ ID NO: 1123564 - DNA, 15 bp, Homo sapiens
ctttctccctagaat

SEQ ID NO: 1123565 - DNA, 15 bp, Homo sapiens
gctttctccctagaa

SEQ ID NO: 1123566 - DNA, 15 bp, Homo sapiens
cgctttctccctaga

SEQ ID NO: 1123567 - DNA, 15 bp, Homo sapiens
acgctttctccctag

SEQ ID NO: 1123568 - DNA, 15 bp, Homo sapiens
cacgctttctcccta

SEQ ID NO: 1123569 - DNA, 15 bp, Homo sapiens
tcacgctttctccct

SEQ ID NO: 1123570 - DNA, 15 bp, Homo sapiens
ctcacgctttctccc

SEQ ID NO: 1123571 - DNA, 15 bp, Homo sapiens
actcacgctttctcc

SEQ ID NO: 1123572 - DNA, 15 bp, Homo sapiens
cactcacgctttctc

SEQ ID NO: 1123573 - DNA, 15 bp, Homo sapiens
ccactcacgctttct

SEQ ID NO: 1123574 - DNA, 15 bp, Homo sapiens
tccactcacgctttc

SEQ ID NO: 1123575 - DNA, 15 bp, Homo sapiens
gtccactcacgcttt

SEQ ID NO: 1123576 - DNA, 15 bp, Homo sapiens
agtccactcacgctt

SEQ ID NO: 1123577 - DNA, 15 bp, Homo sapiens
tagtccactcacgct

SEQ ID NO: 1123578 - DNA, 15 bp, Homo sapiens
ttagtccactcacgc

SEQ ID NO: 1123579 - DNA, 15 bp, Homo sapiens
gttagtccactcacg

SEQ ID NO: 1123580 - DNA, 15 bp, Homo sapiens
ggttagtccactcac

SEQ ID NO: 1123581 - DNA, 15 bp, Homo sapiens
gggttagtccactca

SEQ ID NO: 1123582 - DNA, 15 bp, Homo sapiens
tgggttagtccactc

SEQ ID NO: 1123583 - DNA, 15 bp, Homo sapiens
gtgggttagtccact

SEQ ID NO: 1123584 - DNA, 15 bp, Homo sapiens
ggtgggttagtccac

SEQ ID NO: 1123585 - DNA, 15 bp, Homo sapiens
tggtgggttagtcca

SEQ ID NO: 1123586 - DNA, 15 bp, Homo sapiens
gtggtgggttagtcc

SEQ ID NO: 1123587 - DNA, 15 bp, Homo sapiens
ggtggtgggttagtc

SEQ ID NO: 1123588 - DNA, 15 bp, Homo sapiens
gggtggtgggttagt

SEQ ID NO: 1123589 - DNA, 15 bp, Homo sapiens
tgggtggtgggttag

SEQ ID NO: 1123590 - DNA, 15 bp, Homo sapiens
atgggtggtgggtta

SEQ ID NO: 1123591 - DNA, 15 bp, Homo sapiens
catgggtggtgggtt

SEQ ID NO: 1123592 - DNA, 15 bp, Homo sapiens
acatgggtggtgggt

SEQ ID NO: 1123593 - DNA, 15 bp, Homo sapiens
tacatgggtggtggg

SEQ ID NO: 1123594 - DNA, 15 bp, Homo sapiens
atacatgggtggtgg

SEQ ID NO: 1123595 - DNA, 15 bp, Homo sapiens
catacatgggtggtg

SEQ ID NO: 1123596 - DNA, 15 bp, Homo sapiens
ccatacatgggtggt

SEQ ID NO: 1123597 - DNA, 15 bp, Homo sapiens
gccatacatgggtgg

SEQ ID NO: 1123598 - DNA, 15 bp, Homo sapiens
tgccatacatgggtg

SEQ ID NO: 1123599 - DNA, 15 bp, Homo sapiens
ctgccatacatgggt

SEQ ID NO: 1123600 - DNA, 15 bp, Homo sapiens
gctgccatacatggg

SEQ ID NO: 1123601 - DNA, 15 bp, Homo sapiens
ggctgccatacatgg

SEQ ID NO: 1123602 - DNA, 15 bp, Homo sapiens
gggctgccatacatg

SEQ ID NO: 1123603 - DNA, 15 bp, Homo sapiens
agggctgccatacat

SEQ ID NO: 1123604 - DNA, 15 bp, Homo sapiens
cagggctgccataca

SEQ ID NO: 1123605 - DNA, 15 bp, Homo sapiens
ccagggctgccatac

SEQ ID NO: 1123606 - DNA, 15 bp, Homo sapiens
gccagggctgccata

SEQ ID NO: 1123607 - DNA, 15 bp, Homo sapiens
ggccagggctgccat

SEQ ID NO: 1123608 - DNA, 15 bp, Homo sapiens
gggccagggctgcca

SEQ ID NO: 1123609 - DNA, 15 bp, Homo sapiens
agggccagggctgcc

SEQ ID NO: 1123610 - DNA, 15 bp, Homo sapiens
cagggccagggctgc

SEQ ID NO: 1123611 - DNA, 15 bp, Homo sapiens
acagggccagggctg

SEQ ID NO: 1123612 - DNA, 15 bp, Homo sapiens
aacagggccagggct

SEQ ID NO: 1123613 - DNA, 15 bp, Homo sapiens
taacagggccagggc

SEQ ID NO: 1123614 - DNA, 15 bp, Homo sapiens
ttaacagggccaggg

SEQ ID NO: 1123615 - DNA, 15 bp, Homo sapiens
attaacagggccagg

SEQ ID NO: 1123616 - DNA, 15 bp, Homo sapiens
gattaacagggccag

SEQ ID NO: 1123617 - DNA, 15 bp, Homo sapiens
tgattaacagggcca

SEQ ID NO: 1123618 - DNA, 15 bp, Homo sapiens
atgattaacagggcc

SEQ ID NO: 1123619 - DNA, 15 bp, Homo sapiens
gatgattaacagggc

SEQ ID NO: 1123620 - DNA, 15 bp, Homo sapiens
ggatgattaacaggg

SEQ ID NO: 1123621 - DNA, 15 bp, Homo sapiens
aggatgattaacagg

SEQ ID NO: 1123622 - DNA, 15 bp, Homo sapiens
taggatgattaacag

SEQ ID NO: 1123623 - DNA, 15 bp, Homo sapiens
ttaggatgattaaca

SEQ ID NO: 1123624 - DNA, 15 bp, Homo sapiens
attaggatgattaac

SEQ ID NO: 1123625 - DNA, 15 bp, Homo sapiens
cattaggatgattaa

SEQ ID NO: 1123626 - DNA, 15 bp, Homo sapiens
acattaggatgatta

SEQ ID NO: 1123627 - DNA, 15 bp, Homo sapiens
cacattaggatgatt

SEQ ID NO: 1123628 - DNA, 15 bp, Homo sapiens
acacattaggatgat

SEQ ID NO: 1123629 - DNA, 15 bp, Homo sapiens
cacacattaggatga

SEQ ID NO: 1123630 - DNA, 15 bp, Homo sapiens
ccacacattaggatg

SEQ ID NO: 1123631 - DNA, 15 bp, Homo sapiens
tccacacattaggat

SEQ ID NO: 1123632 - DNA, 15 bp, Homo sapiens
ttccacacattagga

SEQ ID NO: 1123633 - DNA, 15 bp, Homo sapiens
attccacacattagg

SEQ ID NO: 1123634 - DNA, 15 bp, Homo sapiens
cattccacacattag

SEQ ID NO: 1123635 - DNA, 15 bp, Homo sapiens
tcattccacacatta

SEQ ID NO: 1123636 - DNA, 15 bp, Homo sapiens
ttcattccacacatt

SEQ ID NO: 1123637 - DNA, 15 bp, Homo sapiens
cttcattccacacat

SEQ ID NO: 1123638 - DNA, 15 bp, Homo sapiens
tcttcattccacaca

SEQ ID NO: 1123639 - DNA, 15 bp, Homo sapiens
ctcttcattccacac

SEQ ID NO: 1123640 - DNA, 15 bp, Homo sapiens
cctcttcattccaca

SEQ ID NO: 1123641 - DNA, 15 bp, Homo sapiens
acctcttcattccac

SEQ ID NO: 1123642 - DNA, 15 bp, Homo sapiens
aacctcttcattcca

SEQ ID NO: 1123643 - DNA, 15 bp, Homo sapiens
taacctcttcattcc

SEQ ID NO: 1123644 - DNA, 15 bp, Homo sapiens
gtaacctcttcattc

SEQ ID NO: 1123645 - DNA, 15 bp, Homo sapiens
agtaacctcttcatt

SEQ ID NO: 1123646 - DNA, 15 bp, Homo sapiens
cagtaacctcttcat

SEQ ID NO: 1123647 - DNA, 15 bp, Homo sapiens
tcagtaacctcttca

SEQ ID NO: 1123648 - DNA, 15 bp, Homo sapiens
ttcagtaacctcttc

SEQ ID NO: 1123649 - DNA, 15 bp, Homo sapiens
cttcagtaacctctt

SEQ ID NO: 1123650 - DNA, 15 bp, Homo sapiens
tcttcagtaacctct

SEQ ID NO: 1123651 - DNA, 15 bp, Homo sapiens
ctcttcagtaacctc

SEQ ID NO: 1123652 - DNA, 15 bp, Homo sapiens
cctcttcagtaacct

SEQ ID NO: 1123653 - DNA, 15 bp, Homo sapiens
ccctcttcagtaacc

SEQ ID NO: 1123654 - DNA, 15 bp, Homo sapiens
tccctcttcagtaac

SEQ ID NO: 1123655 - DNA, 15 bp, Homo sapiens
ctccctcttcagtaa

SEQ ID NO: 1123656 - DNA, 15 bp, Homo sapiens
tctccctcttcagta

SEQ ID NO: 1123657 - DNA, 15 bp, Homo sapiens
ctctccctcttcagt

SEQ ID NO: 1123658 - DNA, 15 bp, Homo sapiens
tctctccctcttcag

SEQ ID NO: 1123659 - DNA, 15 bp, Homo sapiens
gtctctccctcttca

SEQ ID NO: 1123660 - DNA, 15 bp, Homo sapiens
tgtctctccctcttc

SEQ ID NO: 1123661 - DNA, 15 bp, Homo sapiens
atgtctctccctctt

SEQ ID NO: 1123662 - DNA, 15 bp, Homo sapiens
catgtctctccctct

SEQ ID NO: 1123663 - DNA, 15 bp, Homo sapiens
ccatgtctctccctc

SEQ ID NO: 1123664 - DNA, 15 bp, Homo sapiens
gccatgtctctccct

SEQ ID NO: 1123665 - DNA, 15 bp, Homo sapiens
agccatgtctctccc

SEQ ID NO: 1123666 - DNA, 15 bp, Homo sapiens
cagccatgtctctcc

SEQ ID NO: 1123667 - DNA, 15 bp, Homo sapiens
tcagccatgtctctc

SEQ ID NO: 1123668 - DNA, 15 bp, Homo sapiens
ctcagccatgtctct

SEQ ID NO: 1123669 - DNA, 15 bp, Homo sapiens
tctcagccatgtctc

SEQ ID NO: 1123670 - DNA, 15 bp, Homo sapiens
ctctcagccatgtct

SEQ ID NO: 1123671 - DNA, 15 bp, Homo sapiens
cctctcagccatgtc

SEQ ID NO: 1123672 - DNA, 15 bp, Homo sapiens
gcctctcagccatgt

SEQ ID NO: 1123673 - DNA, 15 bp, Homo sapiens
agagcctctcagcca

SEQ ID NO: 1123674 - DNA, 15 bp, Homo sapiens
cagagcctctcagcc

SEQ ID NO: 1123675 - DNA, 15 bp, Homo sapiens
tcagagcctctcagc

SEQ ID NO: 1123676 - DNA, 15 bp, Homo sapiens
gtcagagcctctcag

SEQ ID NO: 1123677 - DNA, 15 bp, Homo sapiens
tgtcagagcctctca

SEQ ID NO: 1123678 - DNA, 15 bp, Homo sapiens
gtgtcagagcctctc

SEQ ID NO: 1123679 - DNA, 15 bp, Homo sapiens
agtgtcagagcctct

SEQ ID NO: 1123680 - DNA, 15 bp, Homo sapiens
aagtgtcagagcctc

SEQ ID NO: 1123681 - DNA, 15 bp, Homo sapiens
aaagtgtcagagcct

SEQ ID NO: 1123682 - DNA, 15 bp, Homo sapiens
gaaagtgtcagagcc

SEQ ID NO: 1123683 - DNA, 15 bp, Homo sapiens
ggaaagtgtcagagc

SEQ ID NO: 1123684 - DNA, 15 bp, Homo sapiens
tggaaagtgtcagag

SEQ ID NO: 1123685 - DNA, 15 bp, Homo sapiens
atggaaagtgtcaga

SEQ ID NO: 1123686 - DNA, 15 bp, Homo sapiens
catggaaagtgtcag

SEQ ID NO: 1123687 - DNA, 15 bp, Homo sapiens
ccatggaaagtgtca

SEQ ID NO: 1123688 - DNA, 15 bp, Homo sapiens
accatggaaagtgtc

SEQ ID NO: 1123689 - DNA, 15 bp, Homo sapiens
aaccatggaaagtgt

SEQ ID NO: 1123690 - DNA, 15 bp, Homo sapiens
gaaccatggaaagtg

SEQ ID NO: 1123691 - DNA, 15 bp, Homo sapiens
tgaaccatggaaagt

SEQ ID NO: 1123692 - DNA, 15 bp, Homo sapiens
ctgaaccatggaaag

SEQ ID NO: 1123693 - DNA, 15 bp, Homo sapiens
tctgaaccatggaaa

SEQ ID NO: 1123694 - DNA, 15 bp, Homo sapiens
gtctgaaccatggaa

SEQ ID NO: 1123695 - DNA, 15 bp, Homo sapiens
tgtctgaaccatgga

SEQ ID NO: 1123696 - DNA, 15 bp, Homo sapiens
gtgtctgaaccatgg

SEQ ID NO: 1123697 - DNA, 15 bp, Homo sapiens
agtgtctgaaccatg

SEQ ID NO: 1123698 - DNA, 15 bp, Homo sapiens
gagtgtctgaaccat

SEQ ID NO: 1123699 - DNA, 15 bp, Homo sapiens
ggagtgtctgaacca

SEQ ID NO: 1123700 - DNA, 15 bp, Homo sapiens
tggagtgtctgaacc

SEQ ID NO: 1123701 - DNA, 15 bp, Homo sapiens
ctggagtgtctgaac

SEQ ID NO: 1123702 - DNA, 15 bp, Homo sapiens
gctggagtgtctgaa

SEQ ID NO: 1123703 - DNA, 15 bp, Homo sapiens
ggctggagtgtctga

SEQ ID NO: 1123704 - DNA, 15 bp, Homo sapiens
tggctggagtgtctg

SEQ ID NO: 1123705 - DNA, 15 bp, Homo sapiens
gtggctggagtgtct

SEQ ID NO: 1123706 - DNA, 15 bp, Homo sapiens
tgtggctggagtgtc

SEQ ID NO: 1123707 - DNA, 15 bp, Homo sapiens
ttgtggctggagtgt

SEQ ID NO: 1123708 - DNA, 15 bp, Homo sapiens
cttgtggctggagtg

SEQ ID NO: 1123709 - DNA, 15 bp, Homo sapiens
ccttgtggctggagt

SEQ ID NO: 1123710 - DNA, 15 bp, Homo sapiens
tccttgtggctggag

SEQ ID NO: 1123711 - DNA, 15 bp, Homo sapiens
ttccttgtggctgga

SEQ ID NO: 1123712 - DNA, 15 bp, Homo sapiens
cttccttgtggctgg

SEQ ID NO: 1123713 - DNA, 15 bp, Homo sapiens
tcttccttgtggctg

SEQ ID NO: 1123714 - DNA, 15 bp, Homo sapiens
ttcttccttgtggct

SEQ ID NO: 1123715 - DNA, 15 bp, Homo sapiens
tttcttccttgtggc

SEQ ID NO: 1123716 - DNA, 15 bp, Homo sapiens
ctttcttccttgtgg

SEQ ID NO: 1123717 - DNA, 15 bp, Homo sapiens
tctttcttccttgtg

SEQ ID NO: 1123718 - DNA, 15 bp, Homo sapiens
ctctttcttccttgt

SEQ ID NO: 1123719 - DNA, 15 bp, Homo sapiens
tctctttcttccttg

SEQ ID NO: 1123720 - DNA, 15 bp, Homo sapiens
ttctctttcttcctt

SEQ ID NO: 1123721 - DNA, 15 bp, Homo sapiens
cttctctttcttcct

SEQ ID NO: 1123722 - DNA, 15 bp, Homo sapiens
gcttctctttcttcc

SEQ ID NO: 1123723 - DNA, 15 bp, Homo sapiens
tgcttctctttcttc

SEQ ID NO: 1123724 - DNA, 15 bp, Homo sapiens
ctgcttctctttctt

SEQ ID NO: 1123725 - DNA, 15 bp, Homo sapiens
cctgcttctctttct

SEQ ID NO: 1123726 - DNA, 15 bp, Homo sapiens
tcctgcttctctttc

SEQ ID NO: 1123727 - DNA, 15 bp, Homo sapiens
ctcctgcttctcttt

SEQ ID NO: 1123728 - DNA, 15 bp, Homo sapiens
tctcctgcttctctt

SEQ ID NO: 1123729 - DNA, 15 bp, Homo sapiens
ctctcctgcttctct

SEQ ID NO: 1123730 - DNA, 15 bp, Homo sapiens
tctctcctgcttctc

SEQ ID NO: 1123731 - DNA, 15 bp, Homo sapiens
gtctctcctgcttct

SEQ ID NO: 1123732 - DNA, 15 bp, Homo sapiens
agtctctcctgcttc

SEQ ID NO: 1123733 - DNA, 15 bp, Homo sapiens
gagtctctcctgctt

SEQ ID NO: 1123734 - DNA, 15 bp, Homo sapiens
tgagtctctcctgct

SEQ ID NO: 1123735 - DNA, 15 bp, Homo sapiens
ctgagtctctcctgc

SEQ ID NO: 1123736 - DNA, 15 bp, Homo sapiens
cctgagtctctcctg

SEQ ID NO: 1123737 - DNA, 15 bp, Homo sapiens
gcctgagtctctcct

SEQ ID NO: 1123738 - DNA, 15 bp, Homo sapiens
tgcctgagtctctcc

SEQ ID NO: 1123739 - DNA, 15 bp, Homo sapiens
ttgcctgagtctctc

SEQ ID NO: 1123740 - DNA, 15 bp, Homo sapiens
attgcctgagtctct

SEQ ID NO: 1123741 - DNA, 15 bp, Homo sapiens
aattgcctgagtctc

SEQ ID NO: 1123742 - DNA, 15 bp, Homo sapiens
aaattgcctgagtct

SEQ ID NO: 1123743 - DNA, 15 bp, Homo sapiens
caaattgcctgagtc

SEQ ID NO: 1123744 - DNA, 15 bp, Homo sapiens
gcaaattgcctgagt

SEQ ID NO: 1123745 - DNA, 15 bp, Homo sapiens
ggcaaattgcctgag

SEQ ID NO: 1123746 - DNA, 15 bp, Homo sapiens
aggcaaattgcctga

SEQ ID NO: 1123747 - DNA, 15 bp, Homo sapiens
gaggcaaattgcctg

SEQ ID NO: 1123748 - DNA, 15 bp, Homo sapiens
tgaggcaaattgcct

SEQ ID NO: 1123749 - DNA, 15 bp, Homo sapiens
ttgaggcaaattgcc

SEQ ID NO: 1123750 - DNA, 15 bp, Homo sapiens
attgaggcaaattgc

SEQ ID NO: 1123751 - DNA, 15 bp, Homo sapiens
cattgaggcaaattg

SEQ ID NO: 1123752 - DNA, 15 bp, Homo sapiens
acattgaggcaaatt

SEQ ID NO: 1123753 - DNA, 15 bp, Homo sapiens
cacattgaggcaaat

SEQ ID NO: 1123754 - DNA, 15 bp, Homo sapiens
tcacattgaggcaaa

SEQ ID NO: 1123755 - DNA, 15 bp, Homo sapiens
atcacattgaggcaa

SEQ ID NO: 1123756 - DNA, 15 bp, Homo sapiens
tatcacattgaggca

SEQ ID NO: 1123757 - DNA, 15 bp, Homo sapiens
gtatcacattgaggc

SEQ ID NO: 1123758 - DNA, 15 bp, Homo sapiens
tgtatcacattgagg

SEQ ID NO: 1123759 - DNA, 15 bp, Homo sapiens
ttgtatcacattgag

SEQ ID NO: 1123760 - DNA, 15 bp, Homo sapiens
gttgtatcacattga

SEQ ID NO: 1123761 - DNA, 15 bp, Homo sapiens
tgttgtatcacattg

SEQ ID NO: 1123762 - DNA, 15 bp, Homo sapiens
ttgttgtatcacatt

SEQ ID NO: 1123763 - DNA, 15 bp, Homo sapiens
tttgttgtatcacat

SEQ ID NO: 1123764 - DNA, 15 bp, Homo sapiens
atttgttgtatcaca

SEQ ID NO: 1123765 - DNA, 15 bp, Homo sapiens
catttgttgtatcac

SEQ ID NO: 1123766 - DNA, 15 bp, Homo sapiens
ccatttgttgtatca

SEQ ID NO: 1123767 - DNA, 15 bp, Homo sapiens
cccatttgttgtatc

SEQ ID NO: 1123768 - DNA, 15 bp, Homo sapiens
tcccatttgttgtat

SEQ ID NO: 1123769 - DNA, 15 bp, Homo sapiens
ttcccatttgttgta

SEQ ID NO: 1123770 - DNA, 15 bp, Homo sapiens
cttcccatttgttgt

SEQ ID NO: 1123771 - DNA, 15 bp, Homo sapiens
ccttcccatttgttg

SEQ ID NO: 1123772 - DNA, 15 bp, Homo sapiens
cccttcccatttgtt

SEQ ID NO: 1123773 - DNA, 15 bp, Homo sapiens
acccttcccatttgt

SEQ ID NO: 1123774 - DNA, 15 bp, Homo sapiens
gacccttcccatttg

SEQ ID NO: 1123775 - DNA, 15 bp, Homo sapiens
agacccttcccattt

SEQ ID NO: 1123776 - DNA, 15 bp, Homo sapiens
cagacccttcccatt

SEQ ID NO: 1123777 - DNA, 15 bp, Homo sapiens
ccagacccttcccat

SEQ ID NO: 1123778 - DNA, 15 bp, Homo sapiens
gccagacccttccca

SEQ ID NO: 1123779 - DNA, 15 bp, Homo sapiens
ggccagacccttccc

SEQ ID NO: 1123780 - DNA, 15 bp, Homo sapiens
aggccagacccttcc

SEQ ID NO: 1123781 - DNA, 15 bp, Homo sapiens
taggccagacccttc

SEQ ID NO: 1123782 - DNA, 15 bp, Homo sapiens
ataggccagaccctt

SEQ ID NO: 1123783 - DNA, 15 bp, Homo sapiens
tataggccagaccct

SEQ ID NO: 1123784 - DNA, 15 bp, Homo sapiens
ctataggccagaccc

SEQ ID NO: 1123785 - DNA, 15 bp, Homo sapiens
tctataggccagacc

SEQ ID NO: 1123786 - DNA, 15 bp, Homo sapiens
ttctataggccagac

SEQ ID NO: 1123787 - DNA, 15 bp, Homo sapiens
tttctataggccaga

SEQ ID NO: 1123788 - DNA, 15 bp, Homo sapiens
gtttctataggccag

SEQ ID NO: 1123789 - DNA, 15 bp, Homo sapiens
ggtttctataggcca

SEQ ID NO: 1123790 - DNA, 15 bp, Homo sapiens
tggtttctataggcc

SEQ ID NO: 1123791 - DNA, 15 bp, Homo sapiens
atggtttctataggc

SEQ ID NO: 1123792 - DNA, 15 bp, Homo sapiens
gatggtttctatagg

SEQ ID NO: 1123793 - DNA, 15 bp, Homo sapiens
tgatggtttctatag

SEQ ID NO: 1123794 - DNA, 15 bp, Homo sapiens
gtgatggtttctata

SEQ ID NO: 1123795 - DNA, 15 bp, Homo sapiens
tgtgatggtttctat

SEQ ID NO: 1123796 - DNA, 15 bp, Homo sapiens
ctgtgatggtttcta

SEQ ID NO: 1123797 - DNA, 15 bp, Homo sapiens
tctgtgatggtttct

SEQ ID NO: 1123798 - DNA, 15 bp, Homo sapiens
gtctgtgatggtttc

SEQ ID NO: 1123799 - DNA, 15 bp, Homo sapiens
ggtctgtgatggttt

SEQ ID NO: 1123800 - DNA, 15 bp, Homo sapiens
tggtctgtgatggtt

SEQ ID NO: 1123801 - DNA, 15 bp, Homo sapiens
ctggtctgtgatggt

SEQ ID NO: 1123802 - DNA, 15 bp, Homo sapiens
cctggtctgtgatgg

SEQ ID NO: 1123803 - DNA, 15 bp, Homo sapiens
tcctggtctgtgatg

SEQ ID NO: 1123804 - DNA, 15 bp, Homo sapiens
atcctggtctgtgat

SEQ ID NO: 1123805 - DNA, 15 bp, Homo sapiens
gatcctggtctgtga

SEQ ID NO: 1123806 - DNA, 15 bp, Homo sapiens
tgatcctggtctgtg

SEQ ID NO: 1123807 - DNA, 15 bp, Homo sapiens
atgatcctggtctgt

SEQ ID NO: 1123808 - DNA, 15 bp, Homo sapiens
aatgatcctggtctg

SEQ ID NO: 1123809 - DNA, 15 bp, Homo sapiens
aaatgatcctggtct

SEQ ID NO: 1123810 - DNA, 15 bp, Homo sapiens
caaatgatcctggtc

SEQ ID NO: 1123811 - DNA, 15 bp, Homo sapiens
tcaaatgatcctggt

SEQ ID NO: 1123812 - DNA, 15 bp, Homo sapiens
atcaaatgatcctgg

SEQ ID NO: 1123813 - DNA, 15 bp, Homo sapiens
gatcaaatgatcctg

SEQ ID NO: 1123814 - DNA, 15 bp, Homo sapiens
tgatcaaatgatcct

SEQ ID NO: 1123815 - DNA, 15 bp, Homo sapiens
gtgatcaaatgatcc

SEQ ID NO: 1123816 - DNA, 15 bp, Homo sapiens
ggtgatcaaatgatc

SEQ ID NO: 1123817 - DNA, 15 bp, Homo sapiens
aggtgatcaaatgat

SEQ ID NO: 1123818 - DNA, 15 bp, Homo sapiens
caggtgatcaaatga

SEQ ID NO: 1123819 - DNA, 15 bp, Homo sapiens
tcaggtgatcaaatg

SEQ ID NO: 1123820 - DNA, 15 bp, Homo sapiens
ttcaggtgatcaaat

SEQ ID NO: 1123821 - DNA, 15 bp, Homo sapiens
tttcaggtgatcaaa

SEQ ID NO: 1123822 - DNA, 15 bp, Homo sapiens
ttttcaggtgatcaa

SEQ ID NO: 1123823 - DNA, 15 bp, Homo sapiens
tttttcaggtgatca

SEQ ID NO: 1123824 - DNA, 15 bp, Homo sapiens
ctttttcaggtgatc

SEQ ID NO: 1123825 - DNA, 15 bp, Homo sapiens
tctttttcaggtgat

SEQ ID NO: 1123826 - DNA, 15 bp, Homo sapiens
gtctttttcaggtga

SEQ ID NO: 1123827 - DNA, 15 bp, Homo sapiens
agtctttttcaggtg

SEQ ID NO: 1123828 - DNA, 15 bp, Homo sapiens
tagtctttttcaggt

SEQ ID NO: 1123829 - DNA, 15 bp, Homo sapiens
gtagtctttttcagg

SEQ ID NO: 1123830 - DNA, 15 bp, Homo sapiens
tgtagtctttttcag

SEQ ID NO: 1123831 - DNA, 15 bp, Homo sapiens
atgtagtctttttca

SEQ ID NO: 1123832 - DNA, 15 bp, Homo sapiens
aatgtagtctttttc

SEQ ID NO: 1123833 - DNA, 15 bp, Homo sapiens
gaatgtagtcttttt

SEQ ID NO: 1123834 - DNA, 15 bp, Homo sapiens
tgaatgtagtctttt

SEQ ID NO: 1123835 - DNA, 15 bp, Homo sapiens
atgaatgtagtcttt

SEQ ID NO: 1123836 - DNA, 15 bp, Homo sapiens
catgaatgtagtctt

SEQ ID NO: 1123837 - DNA, 15 bp, Homo sapiens
gcatgaatgtagtct

SEQ ID NO: 1123838 - DNA, 15 bp, Homo sapiens
tgcatgaatgtagtc

SEQ ID NO: 1123839 - DNA, 15 bp, Homo sapiens
ctgcatgaatgtagt

SEQ ID NO: 1123840 - DNA, 15 bp, Homo sapiens
cctgcatgaatgtag

SEQ ID NO: 1123841 - DNA, 15 bp, Homo sapiens
ccctgcatgaatgta

SEQ ID NO: 1123842 - DNA, 15 bp, Homo sapiens
gccctgcatgaatgt

SEQ ID NO: 1123843 - DNA, 15 bp, Homo sapiens
ggccctgcatgaatg

SEQ ID NO: 1123844 - DNA, 15 bp, Homo sapiens
tggccctgcatgaat

SEQ ID NO: 1123845 - DNA, 15 bp, Homo sapiens
gtggccctgcatgaa

SEQ ID NO: 1123846 - DNA, 15 bp, Homo sapiens
agtggccctgcatga

SEQ ID NO: 1123847 - DNA, 15 bp, Homo sapiens
gagtggccctgcatg

SEQ ID NO: 1123848 - DNA, 15 bp, Homo sapiens
agagtggccctgcat

SEQ ID NO: 1123849 - DNA, 15 bp, Homo sapiens
aagagtggccctgca

SEQ ID NO: 1123850 - DNA, 15 bp, Homo sapiens
aaagagtggccctgc

SEQ ID NO: 1123851 - DNA, 15 bp, Homo sapiens
caaagagtggccctg

SEQ ID NO: 1123852 - DNA, 15 bp, Homo sapiens
ccaaagagtggccct

SEQ ID NO: 1123853 - DNA, 15 bp, Homo sapiens
gccaaagagtggccc

SEQ ID NO: 1123854 - DNA, 15 bp, Homo sapiens
agccaaagagtggcc

SEQ ID NO: 1123855 - DNA, 15 bp, Homo sapiens
aagccaaagagtggc

SEQ ID NO: 1123856 - DNA, 15 bp, Homo sapiens
caagccaaagagtgg

SEQ ID NO: 1123857 - DNA, 15 bp, Homo sapiens
ccaagccaaagagtg

SEQ ID NO: 1123858 - DNA, 15 bp, Homo sapiens
gccaagccaaagagt

SEQ ID NO: 1123859 - DNA, 15 bp, Homo sapiens
tgccaagccaaagag

SEQ ID NO: 1123860 - DNA, 15 bp, Homo sapiens
ttgccaagccaaaga

SEQ ID NO: 1123861 - DNA, 15 bp, Homo sapiens
attgccaagccaaag

SEQ ID NO: 1123862 - DNA, 15 bp, Homo sapiens
tattgccaagccaaa

SEQ ID NO: 1123863 - DNA, 15 bp, Homo sapiens
ctattgccaagccaa

SEQ ID NO: 1123864 - DNA, 15 bp, Homo sapiens
tctattgccaagcca

SEQ ID NO: 1123865 - DNA, 15 bp, Homo sapiens
gtctattgccaagcc

SEQ ID NO: 1123866 - DNA, 15 bp, Homo sapiens
agtctattgccaagc

SEQ ID NO: 1123867 - DNA, 15 bp, Homo sapiens
cagtctattgccaag

SEQ ID NO: 1123868 - DNA, 15 bp, Homo sapiens
acagtctattgccaa

SEQ ID NO: 1123869 - DNA, 15 bp, Homo sapiens
cacagtctattgcca

SEQ ID NO: 1123870 - DNA, 15 bp, Homo sapiens
ccacagtctattgcc

SEQ ID NO: 1123871 - DNA, 15 bp, Homo sapiens
gccacagtctattgc

SEQ ID NO: 1123872 - DNA, 15 bp, Homo sapiens
ggccacagtctattg

SEQ ID NO: 1123873 - DNA, 15 bp, Homo sapiens
tggccacagtctatt

SEQ ID NO: 1123874 - DNA, 15 bp, Homo sapiens
ttggccacagtctat

SEQ ID NO: 1123875 - DNA, 15 bp, Homo sapiens
attggccacagtcta

SEQ ID NO: 1123876 - DNA, 15 bp, Homo sapiens
cattggccacagtct

SEQ ID NO: 1123877 - DNA, 15 bp, Homo sapiens
tcattggccacagtc

SEQ ID NO: 1123878 - DNA, 15 bp, Homo sapiens
ttcattggccacagt

SEQ ID NO: 1123879 - DNA, 15 bp, Homo sapiens
tttcattggccacag

SEQ ID NO: 1123880 - DNA, 15 bp, Homo sapiens
gtttcattggccaca

SEQ ID NO: 1123881 - DNA, 15 bp, Homo sapiens
tgtttcattggccac

SEQ ID NO: 1123882 - DNA, 15 bp, Homo sapiens
atgtttcattggcca

SEQ ID NO: 1123883 - DNA, 15 bp, Homo sapiens
gatgtttcattggcc

SEQ ID NO: 1123884 - DNA, 15 bp, Homo sapiens
ggatgtttcattggc

SEQ ID NO: 1123885 - DNA, 15 bp, Homo sapiens
aggatgtttcattgg

SEQ ID NO: 1123886 - DNA, 15 bp, Homo sapiens
gaggatgtttcattg

SEQ ID NO: 1123887 - DNA, 15 bp, Homo sapiens
agaggatgtttcatt

SEQ ID NO: 1123888 - DNA, 15 bp, Homo sapiens
tagaggatgtttcat

SEQ ID NO: 1123889 - DNA, 15 bp, Homo sapiens
atagaggatgtttca

SEQ ID NO: 1123890 - DNA, 15 bp, Homo sapiens
catagaggatgtttc

SEQ ID NO: 1123891 - DNA, 15 bp, Homo sapiens
gcatagaggatgttt

SEQ ID NO: 1123892 - DNA, 15 bp, Homo sapiens
cgcatagaggatgtt

SEQ ID NO: 1123893 - DNA, 15 bp, Homo sapiens
tcgcatagaggatgt

SEQ ID NO: 1123894 - DNA, 15 bp, Homo sapiens
ctcgcatagaggatg

SEQ ID NO: 1123895 - DNA, 15 bp, Homo sapiens
actcgcatagaggat

SEQ ID NO: 1123896 - DNA, 15 bp, Homo sapiens
gactcgcatagagga

SEQ ID NO: 1123897 - DNA, 15 bp, Homo sapiens
tgactcgcatagagg

SEQ ID NO: 1123898 - DNA, 15 bp, Homo sapiens
gtgactcgcatagag

SEQ ID NO: 1123899 - DNA, 15 bp, Homo sapiens
tgtgactcgcataga

SEQ ID NO: 1123900 - DNA, 15 bp, Homo sapiens
ttgtgactcgcatag

SEQ ID NO: 1123901 - DNA, 15 bp, Homo sapiens
cttgtgactcgcata

SEQ ID NO: 1123902 - DNA, 15 bp, Homo sapiens
tcttgtgactcgcat

SEQ ID NO: 1123903 - DNA, 15 bp, Homo sapiens
ctcttgtgactcgca

SEQ ID NO: 1123904 - DNA, 15 bp, Homo sapiens
actcttgtgactcgc

SEQ ID NO: 1123905 - DNA, 15 bp, Homo sapiens
tactcttgtgactcg

SEQ ID NO: 1123906 - DNA, 15 bp, Homo sapiens
ctactcttgtgactc

SEQ ID NO: 1123907 - DNA, 15 bp, Homo sapiens
cctactcttgtgact

SEQ ID NO: 1123908 - DNA, 15 bp, Homo sapiens
tcctactcttgtgac

SEQ ID NO: 1123909 - DNA, 15 bp, Homo sapiens
gtcctactcttgtga

SEQ ID NO: 1123910 - DNA, 15 bp, Homo sapiens
ggtcctactcttgtg

SEQ ID NO: 1123911 - DNA, 15 bp, Homo sapiens
tggtcctactcttgt

SEQ ID NO: 1123912 - DNA, 15 bp, Homo sapiens
atggtcctactcttg

SEQ ID NO: 1123913 - DNA, 15 bp, Homo sapiens
aatggtcctactctt

SEQ ID NO: 1123914 - DNA, 15 bp, Homo sapiens
gaatggtcctactct

SEQ ID NO: 1123915 - DNA, 15 bp, Homo sapiens
agaatggtcctactc

SEQ ID NO: 1123916 - DNA, 15 bp, Homo sapiens
aagaatggtcctact

SEQ ID NO: 1123917 - DNA, 15 bp, Homo sapiens
aaagaatggtcctac

SEQ ID NO: 1123918 - DNA, 15 bp, Homo sapiens
caaagaatggtccta

SEQ ID NO: 1123919 - DNA, 15 bp, Homo sapiens
ccaaagaatggtcct

SEQ ID NO: 1123920 - DNA, 15 bp, Homo sapiens
accaaagaatggtcc

SEQ ID NO: 1123921 - DNA, 15 bp, Homo sapiens
aaccaaagaatggtc

SEQ ID NO: 1123922 - DNA, 15 bp, Homo sapiens
caaccaaagaatggt

SEQ ID NO: 1123923 - DNA, 15 bp, Homo sapiens
tcaaccaaagaatgg

SEQ ID NO: 1123924 - DNA, 15 bp, Homo sapiens
gtcaaccaaagaatg

SEQ ID NO: 1123925 - DNA, 15 bp, Homo sapiens
tgtcaaccaaagaat

SEQ ID NO: 1123926 - DNA, 15 bp, Homo sapiens
ctgtcaaccaaagaa

SEQ ID NO: 1123927 - DNA, 15 bp, Homo sapiens
cctgtcaaccaaaga

SEQ ID NO: 1123928 - DNA, 15 bp, Homo sapiens
ccctgtcaaccaaag

SEQ ID NO: 1123929 - DNA, 15 bp, Homo sapiens
accctgtcaaccaaa

SEQ ID NO: 1123930 - DNA, 15 bp, Homo sapiens
taccctgtcaaccaa

SEQ ID NO: 1123931 - DNA, 15 bp, Homo sapiens
ctaccctgtcaacca

SEQ ID NO: 1123932 - DNA, 15 bp, Homo sapiens
tctaccctgtcaacc

SEQ ID NO: 1123933 - DNA, 15 bp, Homo sapiens
ctctaccctgtcaac

SEQ ID NO: 1123934 - DNA, 15 bp, Homo sapiens
tctctaccctgtcaa

SEQ ID NO: 1123935 - DNA, 15 bp, Homo sapiens
ctctctaccctgtca

SEQ ID NO: 1123936 - DNA, 15 bp, Homo sapiens
cctctctaccctgtc

SEQ ID NO: 1123937 - DNA, 15 bp, Homo sapiens
tcctctctaccctgt

SEQ ID NO: 1123938 - DNA, 15 bp, Homo sapiens
ctcctctctaccctg

SEQ ID NO: 1123939 - DNA, 15 bp, Homo sapiens
cctcctctctaccct

SEQ ID NO: 1123940 - DNA, 15 bp, Homo sapiens
tcctcctctctaccc

SEQ ID NO: 1123941 - DNA, 15 bp, Homo sapiens
ctcctcctctctacc

SEQ ID NO: 1123942 - DNA, 15 bp, Homo sapiens
tctcctcctctctac

SEQ ID NO: 1123943 - DNA, 15 bp, Homo sapiens
gtctcctcctctcta

SEQ ID NO: 1123944 - DNA, 15 bp, Homo sapiens
agtctcctcctctct

SEQ ID NO: 1123945 - DNA, 15 bp, Homo sapiens
cagtctcctcctctc

SEQ ID NO: 1123946 - DNA, 15 bp, Homo sapiens
ccagtctcctcctct

SEQ ID NO: 1123947 - DNA, 15 bp, Homo sapiens
accagtctcctcctc

SEQ ID NO: 1123948 - DNA, 15 bp, Homo sapiens
taccagtctcctcct

SEQ ID NO: 1123949 - DNA, 15 bp, Homo sapiens
ataccagtctcctcc

SEQ ID NO: 1123950 - DNA, 15 bp, Homo sapiens
aataccagtctcctc

SEQ ID NO: 1123951 - DNA, 15 bp, Homo sapiens
gaataccagtctcct

SEQ ID NO: 1123952 - DNA, 15 bp, Homo sapiens
ggaataccagtctcc

SEQ ID NO: 1123953 - DNA, 15 bp, Homo sapiens
aggaataccagtctc

SEQ ID NO: 1123954 - DNA, 15 bp, Homo sapiens
aaggaataccagtct

SEQ ID NO: 1123955 - DNA, 15 bp, Homo sapiens
gaaggaataccagtc

SEQ ID NO: 1123956 - DNA, 15 bp, Homo sapiens
agaaggaataccagt

SEQ ID NO: 1123957 - DNA, 15 bp, Homo sapiens
cagaaggaataccag

SEQ ID NO: 1123958 - DNA, 15 bp, Homo sapiens
ccagaaggaatacca

SEQ ID NO: 1123959 - DNA, 15 bp, Homo sapiens
tccagaaggaatacc

SEQ ID NO: 1123960 - DNA, 15 bp, Homo sapiens
ctccagaaggaatac

SEQ ID NO: 1123961 - DNA, 15 bp, Homo sapiens
cctccagaaggaata

SEQ ID NO: 1123962 - DNA, 15 bp, Homo sapiens
gcctccagaaggaat

SEQ ID NO: 1123963 - DNA, 15 bp, Homo sapiens
ggcctccagaaggaa

SEQ ID NO: 1123964 - DNA, 15 bp, Homo sapiens
tggcctccagaagga

SEQ ID NO: 1123965 - DNA, 15 bp, Homo sapiens
ttggcctccagaagg

SEQ ID NO: 1123966 - DNA, 15 bp, Homo sapiens
gttggcctccagaag

SEQ ID NO: 1123967 - DNA, 15 bp, Homo sapiens
agttggcctccagaa

SEQ ID NO: 1123968 - DNA, 15 bp, Homo sapiens
aagttggcctccaga

SEQ ID NO: 1123969 - DNA, 15 bp, Homo sapiens
caagttggcctccag

SEQ ID NO: 1123970 - DNA, 15 bp, Homo sapiens
tcaagttggcctcca

SEQ ID NO: 1123971 - DNA, 15 bp, Homo sapiens
ctcaagttggcctcc

SEQ ID NO: 1123972 - DNA, 15 bp, Homo sapiens
cctcaagttggcctc

SEQ ID NO: 1123973 - DNA, 15 bp, Homo sapiens
tcctcaagttggcct

SEQ ID NO: 1123974 - DNA, 15 bp, Homo sapiens
atcctcaagttggcc

SEQ ID NO: 1123975 - DNA, 15 bp, Homo sapiens
aatcctcaagttggc

SEQ ID NO: 1123976 - DNA, 15 bp, Homo sapiens
aaatcctcaagttgg

SEQ ID NO: 1123977 - DNA, 15 bp, Homo sapiens
caaatcctcaagttg

SEQ ID NO: 1123978 - DNA, 15 bp, Homo sapiens
gcaaatcctcaagtt

SEQ ID NO: 1123979 - DNA, 15 bp, Homo sapiens
ggcaaatcctcaagt

SEQ ID NO: 1123980 - DNA, 15 bp, Homo sapiens
aggcaaatcctcaag

SEQ ID NO: 1123981 - DNA, 15 bp, Homo sapiens
gaggcaaatcctcaa

SEQ ID NO: 1123982 - DNA, 15 bp, Homo sapiens
tgaggcaaatcctca

SEQ ID NO: 1123983 - DNA, 15 bp, Homo sapiens
atgaggcaaatcctc

SEQ ID NO: 1123984 - DNA, 15 bp, Homo sapiens
aatgaggcaaatcct

SEQ ID NO: 1123985 - DNA, 15 bp, Homo sapiens
caatgaggcaaatcc

SEQ ID NO: 1123986 - DNA, 15 bp, Homo sapiens
acaatgaggcaaatc

SEQ ID NO: 1123987 - DNA, 15 bp, Homo sapiens
gacaatgaggcaaat

SEQ ID NO: 1123988 - DNA, 15 bp, Homo sapiens
agacaatgaggcaaa

SEQ ID NO: 1123989 - DNA, 15 bp, Homo sapiens
gagacaatgaggcaa

SEQ ID NO: 1123990 - DNA, 15 bp, Homo sapiens
agagacaatgaggca

SEQ ID NO: 1123991 - DNA, 15 bp, Homo sapiens
aagagacaatgaggc

SEQ ID NO: 1123992 - DNA, 15 bp, Homo sapiens
gaagagacaatgagg

SEQ ID NO: 1123993 - DNA, 15 bp, Homo sapiens
ggaagagacaatgag

SEQ ID NO: 1123994 - DNA, 15 bp, Homo sapiens
aggaagagacaatga

SEQ ID NO: 1123995 - DNA, 15 bp, Homo sapiens
aaggaagagacaatg

SEQ ID NO: 1123996 - DNA, 15 bp, Homo sapiens
taaggaagagacaat

SEQ ID NO: 1123997 - DNA, 15 bp, Homo sapiens
gtaaggaagagacaa

SEQ ID NO: 1123998 - DNA, 15 bp, Homo sapiens
ggtaaggaagagaca

SEQ ID NO: 1123999 - DNA, 15 bp, Homo sapiens
aggtaaggaagagac

SEQ ID NO: 1124000 - DNA, 15 bp, Homo sapiens
aaggtaaggaagaga

SEQ ID NO: 1124001 - DNA, 15 bp, Homo sapiens
aaaggtaaggaagag

SEQ ID NO: 1124002 - DNA, 15 bp, Homo sapiens
taaaggtaaggaaga

SEQ ID NO: 1124003 - DNA, 15 bp, Homo sapiens
ataaaggtaaggaag

SEQ ID NO: 1124004 - DNA, 15 bp, Homo sapiens
tataaaggtaaggaa

SEQ ID NO: 1124005 - DNA, 15 bp, Homo sapiens
ttataaaggtaagga

SEQ ID NO: 1124006 - DNA, 15 bp, Homo sapiens
tttataaaggtaagg

SEQ ID NO: 1124007 - DNA, 15 bp, Homo sapiens
gtttataaaggtaag

SEQ ID NO: 1124008 - DNA, 15 bp, Homo sapiens
tgtttataaaggtaa

SEQ ID NO: 1124009 - DNA, 15 bp, Homo sapiens
ctgtttataaaggta

SEQ ID NO: 1124010 - DNA, 15 bp, Homo sapiens
actgtttataaaggt

SEQ ID NO: 1124011 - DNA, 15 bp, Homo sapiens
cactgtttataaagg

SEQ ID NO: 1124012 - DNA, 15 bp, Homo sapiens
gcactgtttataaag

SEQ ID NO: 1124013 - DNA, 15 bp, Homo sapiens
agcactgtttataaa

SEQ ID NO: 1124014 - DNA, 15 bp, Homo sapiens
cagcactgtttataa

SEQ ID NO: 1124015 - DNA, 15 bp, Homo sapiens
tcagcactgtttata

SEQ ID NO: 1124016 - DNA, 15 bp, Homo sapiens
atcagcactgtttat

SEQ ID NO: 1124017 - DNA, 15 bp, Homo sapiens
tatcagcactgttta

SEQ ID NO: 1124018 - DNA, 15 bp, Homo sapiens
ttatcagcactgttt

SEQ ID NO: 1124019 - DNA, 15 bp, Homo sapiens
attatcagcactgtt

SEQ ID NO: 1124020 - DNA, 15 bp, Homo sapiens
tattatcagcactgt

SEQ ID NO: 1124021 - DNA, 15 bp, Homo sapiens
ttattatcagcactg

SEQ ID NO: 1124022 - DNA, 15 bp, Homo sapiens
tttattatcagcact

SEQ ID NO: 1124023 - DNA, 15 bp, Homo sapiens
ttttattatcagcac

SEQ ID NO: 1124024 - DNA, 15 bp, Homo sapiens
tttttattatcagca

SEQ ID NO: 1124025 - DNA, 15 bp, Homo sapiens
gtttttattatcagc

SEQ ID NO: 1124026 - DNA, 15 bp, Homo sapiens
tgtttttattatcag

SEQ ID NO: 1124027 - DNA, 15 bp, Homo sapiens
ctgtttttattatca

SEQ ID NO: 1124028 - DNA, 15 bp, Homo sapiens
tctgtttttattatc

SEQ ID NO: 1124029 - DNA, 15 bp, Homo sapiens
ctctgtttttattat

SEQ ID NO: 1124030 - DNA, 15 bp, Homo sapiens
actctgtttttatta

SEQ ID NO: 1124031 - DNA, 15 bp, Homo sapiens
cactctgtttttatt

SEQ ID NO: 1124032 - DNA, 15 bp, Homo sapiens
gcactctgtttttat

SEQ ID NO: 1124033 - DNA, 15 bp, Homo sapiens
agcactctgttttta

SEQ ID NO: 1124034 - DNA, 15 bp, Homo sapiens
tagcactctgttttt

SEQ ID NO: 1124035 - DNA, 15 bp, Homo sapiens
atagcactctgtttt

SEQ ID NO: 1124036 - DNA, 15 bp, Homo sapiens
aatagcactctgttt

SEQ ID NO: 1124037 - DNA, 15 bp, Homo sapiens
aaatagcactctgtt

SEQ ID NO: 1124038 - DNA, 15 bp, Homo sapiens
caaatagcactctgt

SEQ ID NO: 1124039 - DNA, 15 bp, Homo sapiens
ccaaatagcactctg

SEQ ID NO: 1124040 - DNA, 15 bp, Homo sapiens
accaaatagcactct

SEQ ID NO: 1124041 - DNA, 15 bp, Homo sapiens
taccaaatagcactc

SEQ ID NO: 1124042 - DNA, 15 bp, Homo sapiens
ctaccaaatagcact

SEQ ID NO: 1124043 - DNA, 15 bp, Homo sapiens
cctaccaaatagcac

SEQ ID NO: 1124044 - DNA, 15 bp, Homo sapiens
tcctaccaaatagca

SEQ ID NO: 1124045 - DNA, 15 bp, Homo sapiens
ttcctaccaaatagc

SEQ ID NO: 1124046 - DNA, 15 bp, Homo sapiens
gttcctaccaaatag

SEQ ID NO: 1124047 - DNA, 15 bp, Homo sapiens
tgttcctaccaaata

SEQ ID NO: 1124048 - DNA, 15 bp, Homo sapiens
atgttcctaccaaat

SEQ ID NO: 1124049 - DNA, 15 bp, Homo sapiens
gatgttcctaccaaa

SEQ ID NO: 1124050 - DNA, 15 bp, Homo sapiens
agatgttcctaccaa

SEQ ID NO: 1124051 - DNA, 15 bp, Homo sapiens
cagatgttcctacca

SEQ ID NO: 1124052 - DNA, 15 bp, Homo sapiens
ccagatgttcctacc

SEQ ID NO: 1124053 - DNA, 15 bp, Homo sapiens
cccagatgttcctac

SEQ ID NO: 1124054 - DNA, 15 bp, Homo sapiens
gcccagatgttccta

SEQ ID NO: 1124055 - DNA, 15 bp, Homo sapiens
tgcccagatgttcct

SEQ ID NO: 1124056 - DNA, 15 bp, Homo sapiens
atgcccagatgttcc

SEQ ID NO: 1124057 - DNA, 15 bp, Homo sapiens
catgcccagatgttc

SEQ ID NO: 1124058 - DNA, 15 bp, Homo sapiens
tcatgcccagatgtt

SEQ ID NO: 1124059 - DNA, 15 bp, Homo sapiens
atcatgcccagatgt

SEQ ID NO: 1124060 - DNA, 15 bp, Homo sapiens
gatcatgcccagatg

SEQ ID NO: 1124061 - DNA, 15 bp, Homo sapiens
tgatcatgcccagat

SEQ ID NO: 1124062 - DNA, 15 bp, Homo sapiens
ctgatcatgcccaga

SEQ ID NO: 1124063 - DNA, 15 bp, Homo sapiens
cctgatcatgcccag

SEQ ID NO: 1124064 - DNA, 15 bp, Homo sapiens
acctgatcatgccca

SEQ ID NO: 1124065 - DNA, 15 bp, Homo sapiens
tacctgatcatgccc

SEQ ID NO: 1124066 - DNA, 15 bp, Homo sapiens
ctacctgatcatgcc

SEQ ID NO: 1124067 - DNA, 15 bp, Homo sapiens
gctacctgatcatgc

SEQ ID NO: 1124068 - DNA, 15 bp, Homo sapiens
ggctacctgatcatg

SEQ ID NO: 1124069 - DNA, 15 bp, Homo sapiens
aggctacctgatcat

SEQ ID NO: 1124070 - DNA, 15 bp, Homo sapiens
aaggctacctgatca

SEQ ID NO: 1124071 - DNA, 15 bp, Homo sapiens
gaaggctacctgatc

SEQ ID NO: 1124072 - DNA, 15 bp, Homo sapiens
ggaaggctacctgat

SEQ ID NO: 1124073 - DNA, 15 bp, Homo sapiens
gggaaggctacctga

SEQ ID NO: 1124074 - DNA, 15 bp, Homo sapiens
ggggaaggctacctg

SEQ ID NO: 1124075 - DNA, 15 bp, Homo sapiens
aggggaaggctacct

SEQ ID NO: 1124076 - DNA, 15 bp, Homo sapiens
taggggaaggctacc

SEQ ID NO: 1124077 - DNA, 15 bp, Homo sapiens
ttaggggaaggctac

SEQ ID NO: 1124078 - DNA, 15 bp, Homo sapiens
cttaggggaaggcta

SEQ ID NO: 1124079 - DNA, 15 bp, Homo sapiens
ccttaggggaaggct

SEQ ID NO: 1124080 - DNA, 15 bp, Homo sapiens
accttaggggaaggc

SEQ ID NO: 1124081 - DNA, 15 bp, Homo sapiens
taccttaggggaagg

SEQ ID NO: 1124082 - DNA, 15 bp, Homo sapiens
ttaccttaggggaag

SEQ ID NO: 1124083 - DNA, 15 bp, Homo sapiens
attaccttaggggaa

SEQ ID NO: 1124084 - DNA, 15 bp, Homo sapiens
cattaccttagggga

SEQ ID NO: 1124085 - DNA, 15 bp, Homo sapiens
tcattaccttagggg

SEQ ID NO: 1124086 - DNA, 15 bp, Homo sapiens
ctcattaccttaggg

SEQ ID NO: 1124087 - DNA, 15 bp, Homo sapiens
tctcattaccttagg

SEQ ID NO: 1124088 - DNA, 15 bp, Homo sapiens
atctcattaccttag

SEQ ID NO: 1124089 - DNA, 15 bp, Homo sapiens
catctcattacctta

SEQ ID NO: 1124090 - DNA, 15 bp, Homo sapiens
tcatctcattacctt

SEQ ID NO: 1124091 - DNA, 15 bp, Homo sapiens
gtcatctcattacct

SEQ ID NO: 1124092 - DNA, 15 bp, Homo sapiens
agtcatctcattacc

SEQ ID NO: 1124093 - DNA, 15 bp, Homo sapiens
cagtcatctcattac

SEQ ID NO: 1124094 - DNA, 15 bp, Homo sapiens
gcagtcatctcatta

SEQ ID NO: 1124095 - DNA, 15 bp, Homo sapiens
tgcagtcatctcatt

SEQ ID NO: 1124096 - DNA, 15 bp, Homo sapiens
atgcagtcatctcat

SEQ ID NO: 1124097 - DNA, 15 bp, Homo sapiens
aatgcagtcatctca

SEQ ID NO: 1124098 - DNA, 15 bp, Homo sapiens
caatgcagtcatctc

SEQ ID NO: 1124099 - DNA, 15 bp, Homo sapiens
ccaatgcagtcatct

SEQ ID NO: 1124100 - DNA, 15 bp, Homo sapiens
accaatgcagtcatc

SEQ ID NO: 1124101 - DNA, 15 bp, Homo sapiens
taccaatgcagtcat

SEQ ID NO: 1124102 - DNA, 15 bp, Homo sapiens
ttaccaatgcagtca

SEQ ID NO: 1124103 - DNA, 15 bp, Homo sapiens
cttaccaatgcagtc

SEQ ID NO: 1124104 - DNA, 15 bp, Homo sapiens
acttaccaatgcagt

SEQ ID NO: 1124105 - DNA, 15 bp, Homo sapiens
gacttaccaatgcag

SEQ ID NO: 1124106 - DNA, 15 bp, Homo sapiens
tgacttaccaatgca

SEQ ID NO: 1124107 - DNA, 15 bp, Homo sapiens
ttgacttaccaatgc

SEQ ID NO: 1124108 - DNA, 15 bp, Homo sapiens
tttgacttaccaatg

SEQ ID NO: 1124109 - DNA, 15 bp, Homo sapiens
ctttgacttaccaat

SEQ ID NO: 1124110 - DNA, 15 bp, Homo sapiens
tctttgacttaccaa

SEQ ID NO: 1124111 - DNA, 15 bp, Homo sapiens
ttctttgacttacca

SEQ ID NO: 1124112 - DNA, 15 bp, Homo sapiens
gttctttgacttacc

SEQ ID NO: 1124113 - DNA, 15 bp, Homo sapiens
tgttctttgacttac

SEQ ID NO: 1124114 - DNA, 15 bp, Homo sapiens
ctgttctttgactta

SEQ ID NO: 1124115 - DNA, 15 bp, Homo sapiens
gctgttctttgactt

SEQ ID NO: 1124116 - DNA, 15 bp, Homo sapiens
agctgttctttgact

SEQ ID NO: 1124117 - DNA, 15 bp, Homo sapiens
cagctgttctttgac

SEQ ID NO: 1124118 - DNA, 15 bp, Homo sapiens
gcagctgttctttga

SEQ ID NO: 1124119 - DNA, 15 bp, Homo sapiens
ggcagctgttctttg

SEQ ID NO: 1124120 - DNA, 15 bp, Homo sapiens
gggcagctgttcttt

SEQ ID NO: 1124121 - DNA, 15 bp, Homo sapiens
ggggcagctgttctt

SEQ ID NO: 1124122 - DNA, 15 bp, Homo sapiens
tggggcagctgttct

SEQ ID NO: 1124123 - DNA, 15 bp, Homo sapiens
ttggggcagctgttc

SEQ ID NO: 1124124 - DNA, 15 bp, Homo sapiens
cttggggcagctgtt

SEQ ID NO: 1124125 - DNA, 15 bp, Homo sapiens
acttggggcagctgt

SEQ ID NO: 1124126 - DNA, 15 bp, Homo sapiens
gacttggggcagctg

SEQ ID NO: 1124127 - DNA, 15 bp, Homo sapiens
agacttggggcagct

SEQ ID NO: 1124128 - DNA, 15 bp, Homo sapiens
cagacttggggcagc

SEQ ID NO: 1124129 - DNA, 15 bp, Homo sapiens
gcagacttggggcag

SEQ ID NO: 1124130 - DNA, 15 bp, Homo sapiens
tgcagacttggggca

SEQ ID NO: 1124131 - DNA, 15 bp, Homo sapiens
gtgcagacttggggc

SEQ ID NO: 1124132 - DNA, 15 bp, Homo sapiens
tgtgcagacttgggg

SEQ ID NO: 1124133 - DNA, 15 bp, Homo sapiens
ctgtgcagacttggg

SEQ ID NO: 1124134 - DNA, 15 bp, Homo sapiens
cctgtgcagacttgg

SEQ ID NO: 1124135 - DNA, 15 bp, Homo sapiens
tcctgtgcagacttg

SEQ ID NO: 1124136 - DNA, 15 bp, Homo sapiens
ttcctgtgcagactt

SEQ ID NO: 1124137 - DNA, 15 bp, Homo sapiens
gttcctgtgcagact

SEQ ID NO: 1124138 - DNA, 15 bp, Homo sapiens
ggttcctgtgcagac

SEQ ID NO: 1124139 - DNA, 15 bp, Homo sapiens
aggttcctgtgcaga

SEQ ID NO: 1124140 - DNA, 15 bp, Homo sapiens
caggttcctgtgcag

SEQ ID NO: 1124141 - DNA, 15 bp, Homo sapiens
tcaggttcctgtgca

SEQ ID NO: 1124142 - DNA, 15 bp, Homo sapiens
gtcaggttcctgtgc

SEQ ID NO: 1124143 - DNA, 15 bp, Homo sapiens
ggtcaggttcctgtg

SEQ ID NO: 1124144 - DNA, 15 bp, Homo sapiens
tggtcaggttcctgt

SEQ ID NO: 1124145 - DNA, 15 bp, Homo sapiens
gtggtcaggttcctg

SEQ ID NO: 1124146 - DNA, 15 bp, Homo sapiens
agtggtcaggttcct

SEQ ID NO: 1124147 - DNA, 15 bp, Homo sapiens
gagtggtcaggttcc

SEQ ID NO: 1124148 - DNA, 15 bp, Homo sapiens
ggagtggtcaggttc

SEQ ID NO: 1124149 - DNA, 15 bp, Homo sapiens
tggagtggtcaggtt

SEQ ID NO: 1124150 - DNA, 15 bp, Homo sapiens
gtggagtggtcaggt

SEQ ID NO: 1124151 - DNA, 15 bp, Homo sapiens
ggtggagtggtcagg

SEQ ID NO: 1124152 - DNA, 15 bp, Homo sapiens
aggtggagtggtcag

SEQ ID NO: 1124153 - DNA, 15 bp, Homo sapiens
caggtggagtggtca

SEQ ID NO: 1124154 - DNA, 15 bp, Homo sapiens
gcaggtggagtggtc

SEQ ID NO: 1124155 - DNA, 15 bp, Homo sapiens
tgcaggtggagtggt

SEQ ID NO: 1124156 - DNA, 15 bp, Homo sapiens
atgcaggtggagtgg

SEQ ID NO: 1124157 - DNA, 15 bp, Homo sapiens
tatgcaggtggagtg

SEQ ID NO: 1124158 - DNA, 15 bp, Homo sapiens
atatgcaggtggagt

SEQ ID NO: 1124159 - DNA, 15 bp, Homo sapiens
tatatgcaggtggag

SEQ ID NO: 1124160 - DNA, 15 bp, Homo sapiens
ctatatgcaggtgga

SEQ ID NO: 1124161 - DNA, 15 bp, Homo sapiens
gctatatgcaggtgg

SEQ ID NO: 1124162 - DNA, 15 bp, Homo sapiens
ggctatatgcaggtg

SEQ ID NO: 1124163 - DNA, 15 bp, Homo sapiens
tggctatatgcaggt

SEQ ID NO: 1124164 - DNA, 15 bp, Homo sapiens
ctggctatatgcagg

SEQ ID NO: 1124165 - DNA, 15 bp, Homo sapiens
gctggctatatgcag

SEQ ID NO: 1124166 - DNA, 15 bp, Homo sapiens
tgctggctatatgca

SEQ ID NO: 1124167 - DNA, 15 bp, Homo sapiens
ttgctggctatatgc

SEQ ID NO: 1124168 - DNA, 15 bp, Homo sapiens
gttgctggctatatg

SEQ ID NO: 1124169 - DNA, 15 bp, Homo sapiens
tgttgctggctatat

SEQ ID NO: 1124170 - DNA, 15 bp, Homo sapiens
ctgttgctggctata

SEQ ID NO: 1124171 - DNA, 15 bp, Homo sapiens
cctgttgctggctat

SEQ ID NO: 1124172 - DNA, 15 bp, Homo sapiens
acctgttgctggcta

SEQ ID NO: 1124173 - DNA, 15 bp, Homo sapiens
cacctgttgctggct

SEQ ID NO: 1124174 - DNA, 15 bp, Homo sapiens
tcacctgttgctggc

SEQ ID NO: 1124175 - DNA, 15 bp, Homo sapiens
ctcacctgttgctgg

SEQ ID NO: 1124176 - DNA, 15 bp, Homo sapiens
actcacctgttgctg

SEQ ID NO: 1124177 - DNA, 15 bp, Homo sapiens
gactcacctgttgct

SEQ ID NO: 1124178 - DNA, 15 bp, Homo sapiens
agactcacctgttgc

SEQ ID NO: 1124179 - DNA, 15 bp, Homo sapiens
cagactcacctgttg

SEQ ID NO: 1124180 - DNA, 15 bp, Homo sapiens
ccagactcacctgtt

SEQ ID NO: 1124181 - DNA, 15 bp, Homo sapiens
cccagactcacctgt

SEQ ID NO: 1124182 - DNA, 15 bp, Homo sapiens
tcccagactcacctg

SEQ ID NO: 1124183 - DNA, 15 bp, Homo sapiens
ctcccagactcacct

SEQ ID NO: 1124184 - DNA, 15 bp, Homo sapiens
gctcccagactcacc

SEQ ID NO: 1124185 - DNA, 15 bp, Homo sapiens
agctcccagactcac

SEQ ID NO: 1124186 - DNA, 15 bp, Homo sapiens
tagctcccagactca

SEQ ID NO: 1124187 - DNA, 15 bp, Homo sapiens
ctagctcccagactc

SEQ ID NO: 1124188 - DNA, 15 bp, Homo sapiens
cctagctcccagact

SEQ ID NO: 1124189 - DNA, 15 bp, Homo sapiens
acctagctcccagac

SEQ ID NO: 1124190 - DNA, 15 bp, Homo sapiens
tacctagctcccaga

SEQ ID NO: 1124191 - DNA, 15 bp, Homo sapiens
ctacctagctcccag

SEQ ID NO: 1124192 - DNA, 15 bp, Homo sapiens
tctacctagctccca

SEQ ID NO: 1124193 - DNA, 15 bp, Homo sapiens
ttctacctagctccc

SEQ ID NO: 1124194 - DNA, 15 bp, Homo sapiens
attctacctagctcc

SEQ ID NO: 1124195 - DNA, 15 bp, Homo sapiens
cattctacctagctc

SEQ ID NO: 1124196 - DNA, 15 bp, Homo sapiens
ccattctacctagct

SEQ ID NO: 1124197 - DNA, 15 bp, Homo sapiens
gccattctacctagc

SEQ ID NO: 1124198 - DNA, 15 bp, Homo sapiens
tgccattctacctag

SEQ ID NO: 1124199 - DNA, 15 bp, Homo sapiens
ctgccattctaccta

SEQ ID NO: 1124200 - DNA, 15 bp, Homo sapiens
actgccattctacct

SEQ ID NO: 1124201 - DNA, 15 bp, Homo sapiens
gactgccattctacc

SEQ ID NO: 1124202 - DNA, 15 bp, Homo sapiens
tgactgccattctac

SEQ ID NO: 1124203 - DNA, 15 bp, Homo sapiens
ttgactgccattcta

SEQ ID NO: 1124204 - DNA, 15 bp, Homo sapiens
tttgactgccattct

SEQ ID NO: 1124205 - DNA, 15 bp, Homo sapiens
ttttgactgccattc

SEQ ID NO: 1124206 - DNA, 15 bp, Homo sapiens
cttttgactgccatt

SEQ ID NO: 1124207 - DNA, 15 bp, Homo sapiens
gcttttgactgccat

SEQ ID NO: 1124208 - DNA, 15 bp, Homo sapiens
ggcttttgactgcca

SEQ ID NO: 1124209 - DNA, 15 bp, Homo sapiens
aggcttttgactgcc

SEQ ID NO: 1124210 - DNA, 15 bp, Homo sapiens
caggcttttgactgc

SEQ ID NO: 1124211 - DNA, 15 bp, Homo sapiens
ccaggcttttgactg

SEQ ID NO: 1124212 - DNA, 15 bp, Homo sapiens
tccaggcttttgact

SEQ ID NO: 1124213 - DNA, 15 bp, Homo sapiens
atccaggcttttgac

SEQ ID NO: 1124214 - DNA, 15 bp, Homo sapiens
aatccaggcttttga

SEQ ID NO: 1124215 - DNA, 15 bp, Homo sapiens
gaatccaggcttttg

SEQ ID NO: 1124216 - DNA, 15 bp, Homo sapiens
tgaatccaggctttt

SEQ ID NO: 1124217 - DNA, 15 bp, Homo sapiens
ttgaatccaggcttt

SEQ ID NO: 1124218 - DNA, 15 bp, Homo sapiens
tttgaatccaggctt

SEQ ID NO: 1124219 - DNA, 15 bp, Homo sapiens
atttgaatccaggct

SEQ ID NO: 1124220 - DNA, 15 bp, Homo sapiens
aatttgaatccaggc

SEQ ID NO: 1124221 - DNA, 15 bp, Homo sapiens
gaatttgaatccagg

SEQ ID NO: 1124222 - DNA, 15 bp, Homo sapiens
agaatttgaatccag

SEQ ID NO: 1124223 - DNA, 15 bp, Homo sapiens
cagaatttgaatcca

SEQ ID NO: 1124224 - DNA, 15 bp, Homo sapiens
gcagaatttgaatcc

SEQ ID NO: 1124225 - DNA, 15 bp, Homo sapiens
agcagaatttgaatc

SEQ ID NO: 1124226 - DNA, 15 bp, Homo sapiens
gagcagaatttgaat

SEQ ID NO: 1124227 - DNA, 15 bp, Homo sapiens
agagcagaatttgaa

SEQ ID NO: 1124228 - DNA, 15 bp, Homo sapiens
tagagcagaatttga

SEQ ID NO: 1124229 - DNA, 15 bp, Homo sapiens
gtagagcagaatttg

SEQ ID NO: 1124230 - DNA, 15 bp, Homo sapiens
agtagagcagaattt

SEQ ID NO: 1124231 - DNA, 15 bp, Homo sapiens
tagtagagcagaatt

SEQ ID NO: 1124232 - DNA, 15 bp, Homo sapiens
gtagtagagcagaat

SEQ ID NO: 1124233 - DNA, 15 bp, Homo sapiens
agtagtagagcagaa

SEQ ID NO: 1124234 - DNA, 15 bp, Homo sapiens
aagtagtagagcaga

SEQ ID NO: 1124235 - DNA, 15 bp, Homo sapiens
taagtagtagagcag

SEQ ID NO: 1124236 - DNA, 15 bp, Homo sapiens
ataagtagtagagca

SEQ ID NO: 1124237 - DNA, 15 bp, Homo sapiens
cataagtagtagagc

SEQ ID NO: 1124238 - DNA, 15 bp, Homo sapiens
tcataagtagtagag

SEQ ID NO: 1124239 - DNA, 15 bp, Homo sapiens
gtcataagtagtaga

SEQ ID NO: 1124240 - DNA, 15 bp, Homo sapiens
tgtcataagtagtag

SEQ ID NO: 1124241 - DNA, 15 bp, Homo sapiens
atgtcataagtagta

SEQ ID NO: 1124242 - DNA, 15 bp, Homo sapiens
catgtcataagtagt

SEQ ID NO: 1124243 - DNA, 15 bp, Homo sapiens
acatgtcataagtag

SEQ ID NO: 1124244 - DNA, 15 bp, Homo sapiens
aacatgtcataagta

SEQ ID NO: 1124245 - DNA, 15 bp, Homo sapiens
caacatgtcataagt

SEQ ID NO: 1124246 - DNA, 15 bp, Homo sapiens
acaacatgtcataag

SEQ ID NO: 1124247 - DNA, 15 bp, Homo sapiens
tacaacatgtcataa

SEQ ID NO: 1124248 - DNA, 15 bp, Homo sapiens
ttacaacatgtcata

SEQ ID NO: 1124249 - DNA, 15 bp, Homo sapiens
gttacaacatgtcat

SEQ ID NO: 1124250 - DNA, 15 bp, Homo sapiens
ggttacaacatgtca

SEQ ID NO: 1124251 - DNA, 15 bp, Homo sapiens
aggttacaacatgtc

SEQ ID NO: 1124252 - DNA, 15 bp, Homo sapiens
taggttacaacatgt

SEQ ID NO: 1124253 - DNA, 15 bp, Homo sapiens
ctaggttacaacatg

SEQ ID NO: 1124254 - DNA, 15 bp, Homo sapiens
actaggttacaacat

SEQ ID NO: 1124255 - DNA, 15 bp, Homo sapiens
cactaggttacaaca

SEQ ID NO: 1124256 - DNA, 15 bp, Homo sapiens
gcactaggttacaac

SEQ ID NO: 1124257 - DNA, 15 bp, Homo sapiens
tgcactaggttacaa

SEQ ID NO: 1124258 - DNA, 15 bp, Homo sapiens
ttgcactaggttaca

SEQ ID NO: 1124259 - DNA, 15 bp, Homo sapiens
tttgcactaggttac

SEQ ID NO: 1124260 - DNA, 15 bp, Homo sapiens
atttgcactaggtta

SEQ ID NO: 1124261 - DNA, 15 bp, Homo sapiens
aatttgcactaggtt

SEQ ID NO: 1124262 - DNA, 15 bp, Homo sapiens
caatttgcactaggt

SEQ ID NO: 1124263 - DNA, 15 bp, Homo sapiens
ccaatttgcactagg

SEQ ID NO: 1124264 - DNA, 15 bp, Homo sapiens
cccaatttgcactag

SEQ ID NO: 1124265 - DNA, 15 bp, Homo sapiens
tcccaatttgcacta

SEQ ID NO: 1124266 - DNA, 15 bp, Homo sapiens
ctcccaatttgcact

SEQ ID NO: 1124267 - DNA, 15 bp, Homo sapiens
gctcccaatttgcac

SEQ ID NO: 1124268 - DNA, 15 bp, Homo sapiens
ggctcccaatttgca

SEQ ID NO: 1124269 - DNA, 15 bp, Homo sapiens
aggctcccaatttgc

SEQ ID NO: 1124270 - DNA, 15 bp, Homo sapiens
gaggctcccaatttg

SEQ ID NO: 1124271 - DNA, 15 bp, Homo sapiens
ggaggctcccaattt

SEQ ID NO: 1124272 - DNA, 15 bp, Homo sapiens
tggaggctcccaatt

SEQ ID NO: 1124273 - DNA, 15 bp, Homo sapiens
atggaggctcccaat

SEQ ID NO: 1124274 - DNA, 15 bp, Homo sapiens
tatggaggctcccaa

SEQ ID NO: 1124275 - DNA, 15 bp, Homo sapiens
gtatggaggctccca

SEQ ID NO: 1124276 - DNA, 15 bp, Homo sapiens
ggtatggaggctccc

SEQ ID NO: 1124277 - DNA, 15 bp, Homo sapiens
aggtatggaggctcc

SEQ ID NO: 1124278 - DNA, 15 bp, Homo sapiens
caggtatggaggctc

SEQ ID NO: 1124279 - DNA, 15 bp, Homo sapiens
acaggtatggaggct

SEQ ID NO: 1124280 - DNA, 15 bp, Homo sapiens
gacaggtatggaggc

SEQ ID NO: 1124281 - DNA, 15 bp, Homo sapiens
agacaggtatggagg

SEQ ID NO: 1124282 - DNA, 15 bp, Homo sapiens
cagacaggtatggag

SEQ ID NO: 1124283 - DNA, 15 bp, Homo sapiens
acagacaggtatgga

SEQ ID NO: 1124284 - DNA, 15 bp, Homo sapiens
aacagacaggtatgg

SEQ ID NO: 1124285 - DNA, 15 bp, Homo sapiens
gaacagacaggtatg

SEQ ID NO: 1124286 - DNA, 15 bp, Homo sapiens
tgaacagacaggtat

SEQ ID NO: 1124287 - DNA, 15 bp, Homo sapiens
gtgaacagacaggta

SEQ ID NO: 1124288 - DNA, 15 bp, Homo sapiens
agtgaacagacaggt

SEQ ID NO: 1124289 - DNA, 15 bp, Homo sapiens
gagtgaacagacagg

SEQ ID NO: 1124290 - DNA, 15 bp, Homo sapiens
agagtgaacagacag

SEQ ID NO: 1124291 - DNA, 15 bp, Homo sapiens
aagagtgaacagaca

SEQ ID NO: 1124292 - DNA, 15 bp, Homo sapiens
gaagagtgaacagac

SEQ ID NO: 1124293 - DNA, 15 bp, Homo sapiens
agaagagtgaacaga

SEQ ID NO: 1124294 - DNA, 15 bp, Homo sapiens
cagaagagtgaacag

SEQ ID NO: 1124295 - DNA, 15 bp, Homo sapiens
acagaagagtgaaca

SEQ ID NO: 1124296 - DNA, 15 bp, Homo sapiens
aacagaagagtgaac

SEQ ID NO: 1124297 - DNA, 15 bp, Homo sapiens
caacagaagagtgaa

SEQ ID NO: 1124298 - DNA, 15 bp, Homo sapiens
acaacagaagagtga

SEQ ID NO: 1124299 - DNA, 15 bp, Homo sapiens
tacaacagaagagtg

SEQ ID NO: 1124300 - DNA, 15 bp, Homo sapiens
ttacaacagaagagt

SEQ ID NO: 1124301 - DNA, 15 bp, Homo sapiens
tttacaacagaagag

SEQ ID NO: 1124302 - DNA, 15 bp, Homo sapiens
ctttacaacagaaga

SEQ ID NO: 1124303 - DNA, 15 bp, Homo sapiens
tctttacaacagaag

SEQ ID NO: 1124304 - DNA, 15 bp, Homo sapiens
atctttacaacagaa

SEQ ID NO: 1124305 - DNA, 15 bp, Homo sapiens
tatctttacaacaga

SEQ ID NO: 1124306 - DNA, 15 bp, Homo sapiens
ttatctttacaacag

SEQ ID NO: 1124307 - DNA, 15 bp, Homo sapiens
tttatctttacaaca

SEQ ID NO: 1124308 - DNA, 15 bp, Homo sapiens
ttttatctttacaac

SEQ ID NO: 1124309 - DNA, 15 bp, Homo sapiens
attttatctttacaa

SEQ ID NO: 1124310 - DNA, 15 bp, Homo sapiens
cattttatctttaca

SEQ ID NO: 1124311 - DNA, 15 bp, Homo sapiens
tcattttatctttac

SEQ ID NO: 1124312 - DNA, 15 bp, Homo sapiens
ttcattttatcttta

SEQ ID NO: 1124313 - DNA, 15 bp, Homo sapiens
tttcattttatcttt

SEQ ID NO: 1124314 - DNA, 15 bp, Homo sapiens
atttcattttatctt

SEQ ID NO: 1124315 - DNA, 15 bp, Homo sapiens
tatttcattttatct

SEQ ID NO: 1124316 - DNA, 15 bp, Homo sapiens
ttatttcattttatc

SEQ ID NO: 1124317 - DNA, 15 bp, Homo sapiens
gtattatttcatttt

SEQ ID NO: 1124318 - DNA, 15 bp, Homo sapiens
tgtattatttcattt

SEQ ID NO: 1124319 - DNA, 15 bp, Homo sapiens
ctgtattatttcatt

SEQ ID NO: 1124320 - DNA, 15 bp, Homo sapiens
tctgtattatttcat

SEQ ID NO: 1124321 - DNA, 15 bp, Homo sapiens
atctgtattatttca

SEQ ID NO: 1124322 - DNA, 15 bp, Homo sapiens
tatctgtattatttc

SEQ ID NO: 1124323 - DNA, 15 bp, Homo sapiens
ttatctgtattattt

SEQ ID NO: 1124324 - DNA, 15 bp, Homo sapiens
tttatctgtattatt

SEQ ID NO: 1124325 - DNA, 15 bp, Homo sapiens
ttttatctgtattat

SEQ ID NO: 1124326 - DNA, 15 bp, Homo sapiens
gttttatctgtatta

SEQ ID NO: 1124327 - DNA, 15 bp, Homo sapiens
tgttttatctgtatt

SEQ ID NO: 1124328 - DNA, 15 bp, Homo sapiens
gtgttttatctgtat

SEQ ID NO: 1124329 - DNA, 15 bp, Homo sapiens
agtgttttatctgta

SEQ ID NO: 1124330 - DNA, 15 bp, Homo sapiens
aagtgttttatctgt

SEQ ID NO: 1124331 - DNA, 15 bp, Homo sapiens
taagtgttttatctg

SEQ ID NO: 1124332 - DNA, 15 bp, Homo sapiens
ctaagtgttttatct

SEQ ID NO: 1124333 - DNA, 15 bp, Homo sapiens
tctaagtgttttatc

SEQ ID NO: 1124334 - DNA, 15 bp, Homo sapiens
ttctaagtgttttat

SEQ ID NO: 1124335 - DNA, 15 bp, Homo sapiens
tttctaagtgtttta

SEQ ID NO: 1124336 - DNA, 15 bp, Homo sapiens
gtttctaagtgtttt

SEQ ID NO: 1124337 - DNA, 15 bp, Homo sapiens
tgtttctaagtgttt

SEQ ID NO: 1124338 - DNA, 15 bp, Homo sapiens
atgtttctaagtgtt

SEQ ID NO: 1124339 - DNA, 15 bp, Homo sapiens
tatgtttctaagtgt

SEQ ID NO: 1124340 - DNA, 15 bp, Homo sapiens
gtatgtttctaagtg

SEQ ID NO: 1124341 - DNA, 15 bp, Homo sapiens
ggtatgtttctaagt

SEQ ID NO: 1124342 - DNA, 15 bp, Homo sapiens
aggtatgtttctaag

SEQ ID NO: 1124343 - DNA, 15 bp, Homo sapiens
caggtatgtttctaa

SEQ ID NO: 1124344 - DNA, 15 bp, Homo sapiens
acaggtatgtttcta

SEQ ID NO: 1124345 - DNA, 15 bp, Homo sapiens
aacaggtatgtttct

SEQ ID NO: 1124346 - DNA, 15 bp, Homo sapiens
taacaggtatgtttc

SEQ ID NO: 1124347 - DNA, 15 bp, Homo sapiens
ataacaggtatgttt

SEQ ID NO: 1124348 - DNA, 15 bp, Homo sapiens
aataacaggtatgtt

SEQ ID NO: 1124349 - DNA, 15 bp, Homo sapiens
taataacaggtatgt

SEQ ID NO: 1124350 - DNA, 15 bp, Homo sapiens
ataataacaggtatg

SEQ ID NO: 1124351 - DNA, 15 bp, Homo sapiens
aataataacaggtat

SEQ ID NO: 1124352 - DNA, 15 bp, Homo sapiens
caataataacaggta

SEQ ID NO: 1124353 - DNA, 15 bp, Homo sapiens
acaataataacaggt

SEQ ID NO: 1124354 - DNA, 15 bp, Homo sapiens
aacaataataacagg

SEQ ID NO: 1124355 - DNA, 15 bp, Homo sapiens
taacaataataacag

SEQ ID NO: 1124356 - DNA, 15 bp, Homo sapiens
gtaataataacaata

SEQ ID NO: 1124357 - DNA, 15 bp, Homo sapiens
agtaataataacaat

SEQ ID NO: 1124358 - DNA, 15 bp, Homo sapiens
cagtaataataacaa

SEQ ID NO: 1124359 - DNA, 15 bp, Homo sapiens
acagtaataataaca

SEQ ID NO: 1124360 - DNA, 15 bp, Homo sapiens
aacagtaataataac

SEQ ID NO: 1124361 - DNA, 15 bp, Homo sapiens
taacagtaataataa

SEQ ID NO: 1124362 - DNA, 15 bp, Homo sapiens
ataacagtaataata

SEQ ID NO: 1124363 - DNA, 15 bp, Homo sapiens
aataacagtaataat

SEQ ID NO: 1124364 - DNA, 15 bp, Homo sapiens
gaataacagtaataa

SEQ ID NO: 1124365 - DNA, 15 bp, Homo sapiens
tgaataacagtaata

SEQ ID NO: 1124366 - DNA, 15 bp, Homo sapiens
atgaataacagtaat

SEQ ID NO: 1124367 - DNA, 15 bp, Homo sapiens
tatgaataacagtaa

SEQ ID NO: 1124368 - DNA, 15 bp, Homo sapiens
ctatgaataacagta

SEQ ID NO: 1124369 - DNA, 15 bp, Homo sapiens
actatgaataacagt

SEQ ID NO: 1124370 - DNA, 15 bp, Homo sapiens
tactatgaataacag

SEQ ID NO: 1124371 - DNA, 15 bp, Homo sapiens
ctactatgaataaca

SEQ ID NO: 1124372 - DNA, 15 bp, Homo sapiens
actactatgaataac

SEQ ID NO: 1124373 - DNA, 15 bp, Homo sapiens
aactactatgaataa

SEQ ID NO: 1124374 - DNA, 15 bp, Homo sapiens
caactactatgaata

SEQ ID NO: 1124375 - DNA, 15 bp, Homo sapiens
gcaactactatgaat

SEQ ID NO: 1124376 - DNA, 15 bp, Homo sapiens
tgcaactactatgaa

SEQ ID NO: 1124377 - DNA, 15 bp, Homo sapiens
ctgcaactactatga

SEQ ID NO: 1124378 - DNA, 15 bp, Homo sapiens
actgcaactactatg

SEQ ID NO: 1124379 - DNA, 15 bp, Homo sapiens
tactgcaactactat

SEQ ID NO: 1124380 - DNA, 15 bp, Homo sapiens
ctactgcaactacta

SEQ ID NO: 1124381 - DNA, 15 bp, Homo sapiens
actactgcaactact

SEQ ID NO: 1124382 - DNA, 15 bp, Homo sapiens
aactactgcaactac

SEQ ID NO: 1124383 - DNA, 15 bp, Homo sapiens
taactactgcaacta

SEQ ID NO: 1124384 - DNA, 15 bp, Homo sapiens
ctaactactgcaact

SEQ ID NO: 1124385 - DNA, 15 bp, Homo sapiens
gctaactactgcaac

SEQ ID NO: 1124386 - DNA, 15 bp, Homo sapiens
ggctaactactgcaa

SEQ ID NO: 1124387 - DNA, 15 bp, Homo sapiens
gggctaactactgca

SEQ ID NO: 1124388 - DNA, 15 bp, Homo sapiens
tgggctaactactgc

SEQ ID NO: 1124389 - DNA, 15 bp, Homo sapiens
ctgggctaactactg

SEQ ID NO: 1124390 - DNA, 15 bp, Homo sapiens
actgggctaactact

SEQ ID NO: 1124391 - DNA, 15 bp, Homo sapiens
cactgggctaactac

SEQ ID NO: 1124392 - DNA, 15 bp, Homo sapiens
tcactgggctaacta

SEQ ID NO: 1124393 - DNA, 15 bp, Homo sapiens
gtcactgggctaact

SEQ ID NO: 1124394 - DNA, 15 bp, Homo sapiens
agtcactgggctaac

SEQ ID NO: 1124395 - DNA, 15 bp, Homo sapiens
tagtcactgggctaa

SEQ ID NO: 1124396 - DNA, 15 bp, Homo sapiens
gtagtcactgggcta

SEQ ID NO: 1124397 - DNA, 15 bp, Homo sapiens
agtagtcactgggct

SEQ ID NO: 1124398 - DNA, 15 bp, Homo sapiens
cagtagtcactgggc

SEQ ID NO: 1124399 - DNA, 15 bp, Homo sapiens
ccagtagtcactggg

SEQ ID NO: 1124400 - DNA, 15 bp, Homo sapiens
tccagtagtcactgg

SEQ ID NO: 1124401 - DNA, 15 bp, Homo sapiens
ttccagtagtcactg

SEQ ID NO: 1124402 - DNA, 15 bp, Homo sapiens
attccagtagtcact

SEQ ID NO: 1124403 - DNA, 15 bp, Homo sapiens
tattccagtagtcac

SEQ ID NO: 1124404 - DNA, 15 bp, Homo sapiens
ctattccagtagtca

SEQ ID NO: 1124405 - DNA, 15 bp, Homo sapiens
actattccagtagtc

SEQ ID NO: 1124406 - DNA, 15 bp, Homo sapiens
tactattccagtagt

SEQ ID NO: 1124407 - DNA, 15 bp, Homo sapiens
ctactattccagtag

SEQ ID NO: 1124408 - DNA, 15 bp, Homo sapiens
gctactattccagta

SEQ ID NO: 1124409 - DNA, 15 bp, Homo sapiens
tgctactattccagt

SEQ ID NO: 1124410 - DNA, 15 bp, Homo sapiens
atgctactattccag

SEQ ID NO: 1124411 - DNA, 15 bp, Homo sapiens
aatgctactattcca

SEQ ID NO: 1124412 - DNA, 15 bp, Homo sapiens
taatgctactattcc

SEQ ID NO: 1124413 - DNA, 15 bp, Homo sapiens
ctaatgctactattc

SEQ ID NO: 1124414 - DNA, 15 bp, Homo sapiens
actaatgctactatt

SEQ ID NO: 1124415 - DNA, 15 bp, Homo sapiens
tactaatgctactat

SEQ ID NO: 1124416 - DNA, 15 bp, Homo sapiens
atactaatgctacta

SEQ ID NO: 1124417 - DNA, 15 bp, Homo sapiens
tatactaatgctact

SEQ ID NO: 1124418 - DNA, 15 bp, Homo sapiens
ctatactaatgctac

SEQ ID NO: 1124419 - DNA, 15 bp, Homo sapiens
gctatactaatgcta

SEQ ID NO: 1124420 - DNA, 15 bp, Homo sapiens
cgctatactaatgct

SEQ ID NO: 1124421 - DNA, 15 bp, Homo sapiens
ccgctatactaatgc

SEQ ID NO: 1124422 - DNA, 15 bp, Homo sapiens
accgctatactaatg

SEQ ID NO: 1124423 - DNA, 15 bp, Homo sapiens
taccgctatactaat

SEQ ID NO: 1124424 - DNA, 15 bp, Homo sapiens
ttaccgctatactaa

SEQ ID NO: 1124425 - DNA, 15 bp, Homo sapiens
gttaccgctatacta

SEQ ID NO: 1124426 - DNA, 15 bp, Homo sapiens
tgttaccgctatact

SEQ ID NO: 1124427 - DNA, 15 bp, Homo sapiens
ttgttaccgctatac

SEQ ID NO: 1124428 - DNA, 15 bp, Homo sapiens
gttgttaccgctata

SEQ ID NO: 1124429 - DNA, 15 bp, Homo sapiens
tgttgttaccgctat

SEQ ID NO: 1124430 - DNA, 15 bp, Homo sapiens
ctgttgttaccgcta

SEQ ID NO: 1124431 - DNA, 15 bp, Homo sapiens
actgttgttaccgct

SEQ ID NO: 1124432 - DNA, 15 bp, Homo sapiens
tactgttgttaccgc

SEQ ID NO: 1124433 - DNA, 15 bp, Homo sapiens
ctactgttgttaccg

SEQ ID NO: 1124434 - DNA, 15 bp, Homo sapiens
gctactgttgttacc

SEQ ID NO: 1124435 - DNA, 15 bp, Homo sapiens
tgctactgttgttac

SEQ ID NO: 1124436 - DNA, 15 bp, Homo sapiens
ctgctactgttgtta

SEQ ID NO: 1124437 - DNA, 15 bp, Homo sapiens
cctgctactgttgtt

SEQ ID NO: 1124438 - DNA, 15 bp, Homo sapiens
acctgctactgttgt

SEQ ID NO: 1124439 - DNA, 15 bp, Homo sapiens
aacctgctactgttg

SEQ ID NO: 1124440 - DNA, 15 bp, Homo sapiens
caacctgctactgtt

SEQ ID NO: 1124441 - DNA, 15 bp, Homo sapiens
ccaacctgctactgt

SEQ ID NO: 1124442 - DNA, 15 bp, Homo sapiens
accaacctgctactg

SEQ ID NO: 1124443 - DNA, 15 bp, Homo sapiens
aaccaacctgctact

SEQ ID NO: 1124444 - DNA, 15 bp, Homo sapiens
aaaccaacctgctac

SEQ ID NO: 1124445 - DNA, 15 bp, Homo sapiens
aaaaccaacctgcta

SEQ ID NO: 1124446 - DNA, 15 bp, Homo sapiens
caaaaccaacctgct

SEQ ID NO: 1124447 - DNA, 15 bp, Homo sapiens
gcaaaaccaacctgc

SEQ ID NO: 1124448 - DNA, 15 bp, Homo sapiens
tgcaaaaccaacctg

SEQ ID NO: 1124449 - DNA, 15 bp, Homo sapiens
atgcaaaaccaacct

SEQ ID NO: 1124450 - DNA, 15 bp, Homo sapiens
catgcaaaaccaacc

SEQ ID NO: 1124451 - DNA, 15 bp, Homo sapiens
acatgcaaaaccaac

SEQ ID NO: 1124452 - DNA, 15 bp, Homo sapiens
tacatgcaaaaccaa

SEQ ID NO: 1124453 - DNA, 15 bp, Homo sapiens
gtacatgcaaaacca

SEQ ID NO: 1124454 - DNA, 15 bp, Homo sapiens
ggtacatgcaaaacc

SEQ ID NO: 1124455 - DNA, 15 bp, Homo sapiens
tggtacatgcaaaac

SEQ ID NO: 1124456 - DNA, 15 bp, Homo sapiens
ctggtacatgcaaaa

SEQ ID NO: 1124457 - DNA, 15 bp, Homo sapiens
gctggtacatgcaaa

SEQ ID NO: 1124458 - DNA, 15 bp, Homo sapiens
ggctggtacatgcaa

SEQ ID NO: 1124459 - DNA, 15 bp, Homo sapiens
aggctggtacatgca

SEQ ID NO: 1124460 - DNA, 15 bp, Homo sapiens
gaggctggtacatgc

SEQ ID NO: 1124461 - DNA, 15 bp, Homo sapiens
agaggctggtacatg

SEQ ID NO: 1124462 - DNA, 15 bp, Homo sapiens
tagaggctggtacat

SEQ ID NO: 1124463 - DNA, 15 bp, Homo sapiens
ctagaggctggtaca

SEQ ID NO: 1124464 - DNA, 15 bp, Homo sapiens
tctagaggctggtac

SEQ ID NO: 1124465 - DNA, 15 bp, Homo sapiens
ttctagaggctggta

SEQ ID NO: 1124466 - DNA, 15 bp, Homo sapiens
attctagaggctggt

SEQ ID NO: 1124467 - DNA, 15 bp, Homo sapiens
tattctagaggctgg

SEQ ID NO: 1124468 - DNA, 15 bp, Homo sapiens
ctattctagaggctg

SEQ ID NO: 1124469 - DNA, 15 bp, Homo sapiens
actattctagaggct

SEQ ID NO: 1124470 - DNA, 15 bp, Homo sapiens
gactattctagaggc

SEQ ID NO: 1124471 - DNA, 15 bp, Homo sapiens
tgactattctagagg

SEQ ID NO: 1124472 - DNA, 15 bp, Homo sapiens
ctgactattctagag

SEQ ID NO: 1124473 - DNA, 15 bp, Homo sapiens
cctgactattctaga

SEQ ID NO: 1124474 - DNA, 15 bp, Homo sapiens
gcctgactattctag

SEQ ID NO: 1124475 - DNA, 15 bp, Homo sapiens
agcctgactattcta

SEQ ID NO: 1124476 - DNA, 15 bp, Homo sapiens
cagcctgactattct

SEQ ID NO: 1124477 - DNA, 15 bp, Homo sapiens
tcagcctgactattc

SEQ ID NO: 1124478 - DNA, 15 bp, Homo sapiens
atcagcctgactatt

SEQ ID NO: 1124479 - DNA, 15 bp, Homo sapiens
gatcagcctgactat

SEQ ID NO: 1124480 - DNA, 15 bp, Homo sapiens
agatcagcctgacta

SEQ ID NO: 1124481 - DNA, 15 bp, Homo sapiens
aagatcagcctgact

SEQ ID NO: 1124482 - DNA, 15 bp, Homo sapiens
taagatcagcctgac

SEQ ID NO: 1124483 - DNA, 15 bp, Homo sapiens
ctaagatcagcctga

SEQ ID NO: 1124484 - DNA, 15 bp, Homo sapiens
actaagatcagcctg

SEQ ID NO: 1124485 - DNA, 15 bp, Homo sapiens
cactaagatcagcct

SEQ ID NO: 1124486 - DNA, 15 bp, Homo sapiens
acactaagatcagcc

SEQ ID NO: 1124487 - DNA, 15 bp, Homo sapiens
gacactaagatcagc

SEQ ID NO: 1124488 - DNA, 15 bp, Homo sapiens
agacactaagatcag

SEQ ID NO: 1124489 - DNA, 15 bp, Homo sapiens
cagacactaagatca

SEQ ID NO: 1124490 - DNA, 15 bp, Homo sapiens
acagacactaagatc

SEQ ID NO: 1124491 - DNA, 15 bp, Homo sapiens
tacagacactaagat

SEQ ID NO: 1124492 - DNA, 15 bp, Homo sapiens
atacagacactaaga

SEQ ID NO: 1124493 - DNA, 15 bp, Homo sapiens
aatacagacactaag

SEQ ID NO: 1124494 - DNA, 15 bp, Homo sapiens
caatacagacactaa

SEQ ID NO: 1124495 - DNA, 15 bp, Homo sapiens
acaatacagacacta

SEQ ID NO: 1124496 - DNA, 15 bp, Homo sapiens
aacaatacagacact

SEQ ID NO: 1124497 - DNA, 15 bp, Homo sapiens
aaacaatacagacac

SEQ ID NO: 1124498 - DNA, 15 bp, Homo sapiens
aaaacaatacagaca

SEQ ID NO: 1124499 - DNA, 15 bp, Homo sapiens
aaaaacaatacagac

SEQ ID NO: 1124500 - DNA, 15 bp, Homo sapiens
caaaaacaatacaga

SEQ ID NO: 1124501 - DNA, 15 bp, Homo sapiens
ccaaaaacaatacag

SEQ ID NO: 1124502 - DNA, 15 bp, Homo sapiens
gccaaaaacaataca

SEQ ID NO: 1124503 - DNA, 15 bp, Homo sapiens
tgccaaaaacaatac

SEQ ID NO: 1124504 - DNA, 15 bp, Homo sapiens
ttgccaaaaacaata

SEQ ID NO: 1124505 - DNA, 15 bp, Homo sapiens
gttgccaaaaacaat

SEQ ID NO: 1124506 - DNA, 15 bp, Homo sapiens
ggttgccaaaaacaa

SEQ ID NO: 1124507 - DNA, 15 bp, Homo sapiens
gggttgccaaaaaca

SEQ ID NO: 1124508 - DNA, 15 bp, Homo sapiens
agggttgccaaaaac

SEQ ID NO: 1124509 - DNA, 15 bp, Homo sapiens
aagggttgccaaaaa

SEQ ID NO: 1124510 - DNA, 15 bp, Homo sapiens
aaagggttgccaaaa

SEQ ID NO: 1124511 - DNA, 15 bp, Homo sapiens
taaagggttgccaaa

SEQ ID NO: 1124512 - DNA, 15 bp, Homo sapiens
ttaaagggttgccaa

SEQ ID NO: 1124513 - DNA, 15 bp, Homo sapiens
gttaaagggttgcca

SEQ ID NO: 1124514 - DNA, 15 bp, Homo sapiens
ggttaaagggttgcc

SEQ ID NO: 1124515 - DNA, 15 bp, Homo sapiens
tggttaaagggttgc

SEQ ID NO: 1124516 - DNA, 15 bp, Homo sapiens
ctggttaaagggttg

SEQ ID NO: 1124517 - DNA, 15 bp, Homo sapiens
tctggttaaagggtt

SEQ ID NO: 1124518 - DNA, 15 bp, Homo sapiens
ttctggttaaagggt

SEQ ID NO: 1124519 - DNA, 15 bp, Homo sapiens
tttctggttaaaggg

SEQ ID NO: 1124520 - DNA, 15 bp, Homo sapiens
ttttctggttaaagg

SEQ ID NO: 1124521 - DNA, 15 bp, Homo sapiens
attttctggttaaag

SEQ ID NO: 1124522 - DNA, 15 bp, Homo sapiens
gattttctggttaaa

SEQ ID NO: 1124523 - DNA, 15 bp, Homo sapiens
tgattttctggttaa

SEQ ID NO: 1124524 - DNA, 15 bp, Homo sapiens
gtgattttctggtta

SEQ ID NO: 1124525 - DNA, 15 bp, Homo sapiens
agtgattttctggtt

SEQ ID NO: 1124526 - DNA, 15 bp, Homo sapiens
tagtgattttctggt

SEQ ID NO: 1124527 - DNA, 15 bp, Homo sapiens
atagtgattttctgg

SEQ ID NO: 1124528 - DNA, 15 bp, Homo sapiens
tatagtgattttctg

SEQ ID NO: 1124529 - DNA, 15 bp, Homo sapiens
ttatagtgattttct

SEQ ID NO: 1124530 - DNA, 15 bp, Homo sapiens
cttatagtgattttc

SEQ ID NO: 1124531 - DNA, 15 bp, Homo sapiens
ccttatagtgatttt

SEQ ID NO: 1124532 - DNA, 15 bp, Homo sapiens
gccttatagtgattt

SEQ ID NO: 1124533 - DNA, 15 bp, Homo sapiens
agccttatagtgatt

SEQ ID NO: 1124534 - DNA, 15 bp, Homo sapiens
cagccttatagtgat

SEQ ID NO: 1124535 - DNA, 15 bp, Homo sapiens
tcagccttatagtga

SEQ ID NO: 1124536 - DNA, 15 bp, Homo sapiens
atcagccttatagtg

SEQ ID NO: 1124537 - DNA, 15 bp, Homo sapiens
aatcagccttatagt

SEQ ID NO: 1124538 - DNA, 15 bp, Homo sapiens
taatcagccttatag

SEQ ID NO: 1124539 - DNA, 15 bp, Homo sapiens
ataatcagccttata

SEQ ID NO: 1124540 - DNA, 15 bp, Homo sapiens
tataatcagccttat

SEQ ID NO: 1124541 - DNA, 15 bp, Homo sapiens
atataatcagcctta

SEQ ID NO: 1124542 - DNA, 15 bp, Homo sapiens
tatataatcagcctt

SEQ ID NO: 1124543 - DNA, 15 bp, Homo sapiens
ttatataatcagcct

SEQ ID NO: 1124544 - DNA, 15 bp, Homo sapiens
attatataatcagcc

SEQ ID NO: 1124545 - DNA, 15 bp, Homo sapiens
cattatataatcagc

SEQ ID NO: 1124546 - DNA, 15 bp, Homo sapiens
tcattatataatcag

SEQ ID NO: 1124547 - DNA, 15 bp, Homo sapiens
ttcattatataatca

SEQ ID NO: 1124548 - DNA, 15 bp, Homo sapiens
attcattatataatc

SEQ ID NO: 1124549 - DNA, 15 bp, Homo sapiens
aattcattatataat

SEQ ID NO: 1124550 - DNA, 15 bp, Homo sapiens
gaattcattatataa

SEQ ID NO: 1124551 - DNA, 15 bp, Homo sapiens
tgaattcattatata

SEQ ID NO: 1124552 - DNA, 15 bp, Homo sapiens
ttgaattcattatat

SEQ ID NO: 1124553 - DNA, 15 bp, Homo sapiens
attgaattcattata

SEQ ID NO: 1124554 - DNA, 15 bp, Homo sapiens
aattgaattcattat

SEQ ID NO: 1124555 - DNA, 15 bp, Homo sapiens
taattgaattcatta

SEQ ID NO: 1124556 - DNA, 15 bp, Homo sapiens
ataattgaattcatt

SEQ ID NO: 1124557 - DNA, 15 bp, Homo sapiens
gataattgaattcat

SEQ ID NO: 1124558 - DNA, 15 bp, Homo sapiens
tgataattgaattca

SEQ ID NO: 1124559 - DNA, 15 bp, Homo sapiens
ttgataattgaattc

SEQ ID NO: 1124560 - DNA, 15 bp, Homo sapiens
tttgataattgaatt

SEQ ID NO: 1124561 - DNA, 15 bp, Homo sapiens
atttgataattgaat

SEQ ID NO: 1124562 - DNA, 15 bp, Homo sapiens
gatttgataattgaa

SEQ ID NO: 1124563 - DNA, 15 bp, Homo sapiens
tgatttgataattga

SEQ ID NO: 1124564 - DNA, 15 bp, Homo sapiens
gtgatttgataattg

SEQ ID NO: 1124565 - DNA, 15 bp, Homo sapiens
agtgatttgataatt

SEQ ID NO: 1124566 - DNA, 15 bp, Homo sapiens
tagtgatttgataat

SEQ ID NO: 1124567 - DNA, 15 bp, Homo sapiens
atagtgatttgataa

SEQ ID NO: 1124568 - DNA, 15 bp, Homo sapiens
aatagtgatttgata

SEQ ID NO: 1124569 - DNA, 15 bp, Homo sapiens
gaatagtgatttgat

SEQ ID NO: 1124570 - DNA, 15 bp, Homo sapiens
tgaatagtgatttga

SEQ ID NO: 1124571 - DNA, 15 bp, Homo sapiens
ttgaatagtgatttg

SEQ ID NO: 1124572 - DNA, 15 bp, Homo sapiens
cttgaatagtgattt

SEQ ID NO: 1124573 - DNA, 15 bp, Homo sapiens
acttgaatagtgatt

SEQ ID NO: 1124574 - DNA, 15 bp, Homo sapiens
gacttgaatagtgat

SEQ ID NO: 1124575 - DNA, 15 bp, Homo sapiens
ggacttgaatagtga

SEQ ID NO: 1124576 - DNA, 15 bp, Homo sapiens
tggacttgaatagtg

SEQ ID NO: 1124577 - DNA, 15 bp, Homo sapiens
gtggacttgaatagt

SEQ ID NO: 1124578 - DNA, 15 bp, Homo sapiens
agtggacttgaatag

SEQ ID NO: 1124579 - DNA, 15 bp, Homo sapiens
aagtggacttgaata

SEQ ID NO: 1124580 - DNA, 15 bp, Homo sapiens
aaagtggacttgaat

SEQ ID NO: 1124581 - DNA, 15 bp, Homo sapiens
caaagtggacttgaa

SEQ ID NO: 1124582 - DNA, 15 bp, Homo sapiens
ccaaagtggacttga

SEQ ID NO: 1124583 - DNA, 15 bp, Homo sapiens
cccaaagtggacttg

SEQ ID NO: 1124584 - DNA, 15 bp, Homo sapiens
acccaaagtggactt

SEQ ID NO: 1124585 - DNA, 15 bp, Homo sapiens
gacccaaagtggact

SEQ ID NO: 1124586 - DNA, 15 bp, Homo sapiens
agacccaaagtggac

SEQ ID NO: 1124587 - DNA, 15 bp, Homo sapiens
tagacccaaagtgga

SEQ ID NO: 1124588 - DNA, 15 bp, Homo sapiens
gtagacccaaagtgg

SEQ ID NO: 1124589 - DNA, 15 bp, Homo sapiens
tgtagacccaaagtg

SEQ ID NO: 1124590 - DNA, 15 bp, Homo sapiens
ctgtagacccaaagt

SEQ ID NO: 1124591 - DNA, 15 bp, Homo sapiens
cctgtagacccaaag

SEQ ID NO: 1124592 - DNA, 15 bp, Homo sapiens
gcctgtagacccaaa

SEQ ID NO: 1124593 - DNA, 15 bp, Homo sapiens
agcctgtagacccaa

SEQ ID NO: 1124594 - DNA, 15 bp, Homo sapiens
tagcctgtagaccca

SEQ ID NO: 1124595 - DNA, 15 bp, Homo sapiens
gtagcctgtagaccc

SEQ ID NO: 1124596 - DNA, 15 bp, Homo sapiens
ggtagcctgtagacc

SEQ ID NO: 1124597 - DNA, 15 bp, Homo sapiens
aggtagcctgtagac

SEQ ID NO: 1124598 - DNA, 15 bp, Homo sapiens
aaggtagcctgtaga

SEQ ID NO: 1124599 - DNA, 15 bp, Homo sapiens
caaggtagcctgtag

SEQ ID NO: 1124600 - DNA, 15 bp, Homo sapiens
gcaaggtagcctgta

SEQ ID NO: 1124601 - DNA, 15 bp, Homo sapiens
agcaaggtagcctgt

SEQ ID NO: 1124602 - DNA, 15 bp, Homo sapiens
aagcaaggtagcctg

SEQ ID NO: 1124603 - DNA, 15 bp, Homo sapiens
taagcaaggtagcct

SEQ ID NO: 1124604 - DNA, 15 bp, Homo sapiens
ctaagcaaggtagcc

SEQ ID NO: 1124605 - DNA, 15 bp, Homo sapiens
tctaagcaaggtagc

SEQ ID NO: 1124606 - DNA, 15 bp, Homo sapiens
gtctaagcaaggtag

SEQ ID NO: 1124607 - DNA, 15 bp, Homo sapiens
agtctaagcaaggta

SEQ ID NO: 1124608 - DNA, 15 bp, Homo sapiens
aagtctaagcaaggt

SEQ ID NO: 1124609 - DNA, 15 bp, Homo sapiens
gaagtctaagcaagg

SEQ ID NO: 1124610 - DNA, 15 bp, Homo sapiens
agaagtctaagcaag

SEQ ID NO: 1124611 - DNA, 15 bp, Homo sapiens
aagaagtctaagcaa

SEQ ID NO: 1124612 - DNA, 15 bp, Homo sapiens
taagaagtctaagca

SEQ ID NO: 1124613 - DNA, 15 bp, Homo sapiens
gtaagaagtctaagc

SEQ ID NO: 1124614 - DNA, 15 bp, Homo sapiens
agtaagaagtctaag

SEQ ID NO: 1124615 - DNA, 15 bp, Homo sapiens
gagtaagaagtctaa

SEQ ID NO: 1124616 - DNA, 15 bp, Homo sapiens
tgagtaagaagtcta

SEQ ID NO: 1124617 - DNA, 15 bp, Homo sapiens
atgagtaagaagtct

SEQ ID NO: 1124618 - DNA, 15 bp, Homo sapiens
aatgagtaagaagtc

SEQ ID NO: 1124619 - DNA, 15 bp, Homo sapiens
aaatgagtaagaagt

SEQ ID NO: 1124620 - DNA, 15 bp, Homo sapiens
gaaatgagtaagaag

SEQ ID NO: 1124621 - DNA, 15 bp, Homo sapiens
tgaaatgagtaagaa

SEQ ID NO: 1124622 - DNA, 15 bp, Homo sapiens
ttgaaatgagtaaga

SEQ ID NO: 1124623 - DNA, 15 bp, Homo sapiens
cttgaaatgagtaag

SEQ ID NO: 1124624 - DNA, 15 bp, Homo sapiens
tcttgaaatgagtaa

SEQ ID NO: 1124625 - DNA, 15 bp, Homo sapiens
gtcttgaaatgagta

SEQ ID NO: 1124626 - DNA, 15 bp, Homo sapiens
tgtcttgaaatgagt

SEQ ID NO: 1124627 - DNA, 15 bp, Homo sapiens
ctgtcttgaaatgag

SEQ ID NO: 1124628 - DNA, 15 bp, Homo sapiens
actgtcttgaaatga

SEQ ID NO: 1124629 - DNA, 15 bp, Homo sapiens
aactgtcttgaaatg

SEQ ID NO: 1124630 - DNA, 15 bp, Homo sapiens
gaactgtcttgaaat

SEQ ID NO: 1124631 - DNA, 15 bp, Homo sapiens
agaactgtcttgaaa

SEQ ID NO: 1124632 - DNA, 15 bp, Homo sapiens
tagaactgtcttgaa

SEQ ID NO: 1124633 - DNA, 15 bp, Homo sapiens
gtagaactgtcttga

SEQ ID NO: 1124634 - DNA, 15 bp, Homo sapiens
agtagaactgtcttg

SEQ ID NO: 1124635 - DNA, 15 bp, Homo sapiens
aagtagaactgtctt

SEQ ID NO: 1124636 - DNA, 15 bp, Homo sapiens
aaagtagaactgtct

SEQ ID NO: 1124637 - DNA, 15 bp, Homo sapiens
caaagtagaactgtc

SEQ ID NO: 1124638 - DNA, 15 bp, Homo sapiens
acaaagtagaactgt

SEQ ID NO: 1124639 - DNA, 15 bp, Homo sapiens
tacaaagtagaactg

SEQ ID NO: 1124640 - DNA, 15 bp, Homo sapiens
ctacaaagtagaact

SEQ ID NO: 1124641 - DNA, 15 bp, Homo sapiens
tctacaaagtagaac

SEQ ID NO: 1124642 - DNA, 15 bp, Homo sapiens
ttctacaaagtagaa

SEQ ID NO: 1124643 - DNA, 15 bp, Homo sapiens
cttctacaaagtaga

SEQ ID NO: 1124644 - DNA, 15 bp, Homo sapiens
tcttctacaaagtag

SEQ ID NO: 1124645 - DNA, 15 bp, Homo sapiens
ctcttctacaaagta

SEQ ID NO: 1124646 - DNA, 15 bp, Homo sapiens
actcttctacaaagt

SEQ ID NO: 1124647 - DNA, 15 bp, Homo sapiens
tactcttctacaaag

SEQ ID NO: 1124648 - DNA, 15 bp, Homo sapiens
ttactcttctacaaa

SEQ ID NO: 1124649 - DNA, 15 bp, Homo sapiens
attactcttctacaa

SEQ ID NO: 1124650 - DNA, 15 bp, Homo sapiens
tattactcttctaca

SEQ ID NO: 1124651 - DNA, 15 bp, Homo sapiens
atattactcttctac

SEQ ID NO: 1124652 - DNA, 15 bp, Homo sapiens
aatattactcttcta

SEQ ID NO: 1124653 - DNA, 15 bp, Homo sapiens
gaatattactcttct

SEQ ID NO: 1124654 - DNA, 15 bp, Homo sapiens
tgaatattactcttc

SEQ ID NO: 1124655 - DNA, 15 bp, Homo sapiens
ctgaatattactctt

SEQ ID NO: 1124656 - DNA, 15 bp, Homo sapiens
actgaatattactct

SEQ ID NO: 1124657 - DNA, 15 bp, Homo sapiens
tactgaatattactc

SEQ ID NO: 1124658 - DNA, 15 bp, Homo sapiens
ttactgaatattact

SEQ ID NO: 1124659 - DNA, 15 bp, Homo sapiens
tttactgaatattac

SEQ ID NO: 1124660 - DNA, 15 bp, Homo sapiens
ttttactgaatatta

SEQ ID NO: 1124661 - DNA, 15 bp, Homo sapiens
tttttactgaatatt

SEQ ID NO: 1124662 - DNA, 15 bp, Homo sapiens
ttttttactgaatat

SEQ ID NO: 1124663 - DNA, 15 bp, Homo sapiens
tttttttactgaata

SEQ ID NO: 1124664 - DNA, 15 bp, Homo sapiens
atttttttactgaat

SEQ ID NO: 1124665 - DNA, 15 bp, Homo sapiens
tatttttttactgaa

SEQ ID NO: 1124666 - DNA, 15 bp, Homo sapiens
ttatttttttactga

SEQ ID NO: 1124667 - DNA, 15 bp, Homo sapiens
tttatttttttactg

SEQ ID NO: 1124668 - DNA, 15 bp, Homo sapiens
ctttatttttttact

SEQ ID NO: 1124669 - DNA, 15 bp, Homo sapiens
actttatttttttac

SEQ ID NO: 1124670 - DNA, 15 bp, Homo sapiens
cactttattttttta

SEQ ID NO: 1124671 - DNA, 15 bp, Homo sapiens
ccactttattttttt

SEQ ID NO: 1124672 - DNA, 15 bp, Homo sapiens
accactttatttttt

SEQ ID NO: 1124673 - DNA, 15 bp, Homo sapiens
taccactttattttt

SEQ ID NO: 1124674 - DNA, 15 bp, Homo sapiens
ataccactttatttt

SEQ ID NO: 1124675 - DNA, 15 bp, Homo sapiens
aataccactttattt

SEQ ID NO: 1124676 - DNA, 15 bp, Homo sapiens
aaataccactttatt

SEQ ID NO: 1124677 - DNA, 15 bp, Homo sapiens
aaaataccactttat

SEQ ID NO: 1124678 - DNA, 15 bp, Homo sapiens
taaaataccacttta

SEQ ID NO: 1124679 - DNA, 15 bp, Homo sapiens
ttaaaataccacttt

SEQ ID NO: 1124680 - DNA, 15 bp, Homo sapiens
tttaaaataccactt

SEQ ID NO: 1124681 - DNA, 15 bp, Homo sapiens
atttaaaataccact

SEQ ID NO: 1124682 - DNA, 15 bp, Homo sapiens
gatttaaaataccac

SEQ ID NO: 1124683 - DNA, 15 bp, Homo sapiens
tgatttaaaatacca

SEQ ID NO: 1124684 - DNA, 15 bp, Homo sapiens
atgatttaaaatacc

SEQ ID NO: 1124685 - DNA, 15 bp, Homo sapiens
tatgatttaaaatac

SEQ ID NO: 1124686 - DNA, 15 bp, Homo sapiens
ttatgatttaaaata

SEQ ID NO: 1124687 - DNA, 15 bp, Homo sapiens
gttatgatttaaaat

SEQ ID NO: 1124688 - DNA, 15 bp, Homo sapiens
tgttatgatttaaaa

SEQ ID NO: 1124689 - DNA, 15 bp, Homo sapiens
ctgttatgatttaaa

SEQ ID NO: 1124690 - DNA, 15 bp, Homo sapiens
actgttatgatttaa

SEQ ID NO: 1124691 - DNA, 15 bp, Homo sapiens
cactgttatgattta

SEQ ID NO: 1124692 - DNA, 15 bp, Homo sapiens
ccactgttatgattt

SEQ ID NO: 1124693 - DNA, 15 bp, Homo sapiens
tccactgttatgatt

SEQ ID NO: 1124694 - DNA, 15 bp, Homo sapiens
ttccactgttatgat

SEQ ID NO: 1124695 - DNA, 15 bp, Homo sapiens
tttccactgttatga

SEQ ID NO: 1124696 - DNA, 15 bp, Homo sapiens
ttttccactgttatg

SEQ ID NO: 1124697 - DNA, 15 bp, Homo sapiens
gttttccactgttat

SEQ ID NO: 1124698 - DNA, 15 bp, Homo sapiens
agttttccactgtta

SEQ ID NO: 1124699 - DNA, 15 bp, Homo sapiens
aagttttccactgtt

SEQ ID NO: 1124700 - DNA, 15 bp, Homo sapiens
caagttttccactgt

SEQ ID NO: 1124701 - DNA, 15 bp, Homo sapiens
ccaagttttccactg

SEQ ID NO: 1124702 - DNA, 15 bp, Homo sapiens
tccaagttttccact

SEQ ID NO: 1124703 - DNA, 15 bp, Homo sapiens
ctccaagttttccac

SEQ ID NO: 1124704 - DNA, 15 bp, Homo sapiens
tctccaagttttcca

SEQ ID NO: 1124705 - DNA, 15 bp, Homo sapiens
atctccaagttttcc

SEQ ID NO: 1124706 - DNA, 15 bp, Homo sapiens
catctccaagttttc

SEQ ID NO: 1124707 - DNA, 15 bp, Homo sapiens
gcatctccaagtttt

SEQ ID NO: 1124708 - DNA, 15 bp, Homo sapiens
agcatctccaagttt

SEQ ID NO: 1124709 - DNA, 15 bp, Homo sapiens
aagcatctccaagtt

SEQ ID NO: 1124710 - DNA, 15 bp, Homo sapiens
aaagcatctccaagt

SEQ ID NO: 1124711 - DNA, 15 bp, Homo sapiens
taaagcatctccaag

SEQ ID NO: 1124712 - DNA, 15 bp, Homo sapiens
gtaaagcatctccaa

SEQ ID NO: 1124713 - DNA, 15 bp, Homo sapiens
tgtaaagcatctcca

SEQ ID NO: 1124714 - DNA, 15 bp, Homo sapiens
ctgtaaagcatctcc

SEQ ID NO: 1124715 - DNA, 15 bp, Homo sapiens
tctgtaaagcatctc

SEQ ID NO: 1124716 - DNA, 15 bp, Homo sapiens
ttctgtaaagcatct

SEQ ID NO: 1124717 - DNA, 15 bp, Homo sapiens
gttctgtaaagcatc

SEQ ID NO: 1124718 - DNA, 15 bp, Homo sapiens
tgttctgtaaagcat

SEQ ID NO: 1124719 - DNA, 15 bp, Homo sapiens
ttgttctgtaaagca

SEQ ID NO: 1124720 - DNA, 15 bp, Homo sapiens
tttgttctgtaaagc

SEQ ID NO: 1124721 - DNA, 15 bp, Homo sapiens
ttttgttctgtaaag

SEQ ID NO: 1124722 - DNA, 15 bp, Homo sapiens
tttttgttctgtaaa

SEQ ID NO: 1124723 - DNA, 15 bp, Homo sapiens
atttttgttctgtaa

SEQ ID NO: 1124724 - DNA, 15 bp, Homo sapiens
aatttttgttctgta

SEQ ID NO: 1124725 - DNA, 15 bp, Homo sapiens
taatttttgttctgt

SEQ ID NO: 1124726 - DNA, 15 bp, Homo sapiens
ataatttttgttctg

SEQ ID NO: 1124727 - DNA, 15 bp, Homo sapiens
aataatttttgttct

SEQ ID NO: 1124728 - DNA, 15 bp, Homo sapiens
aaataatttttgttc

SEQ ID NO: 1124729 - DNA, 15 bp, Homo sapiens
aaaataatttttgtt

SEQ ID NO: 1124730 - DNA, 15 bp, Homo sapiens
caaaataatttttgt

SEQ ID NO: 1124731 - DNA, 15 bp, Homo sapiens
ccaaaataatttttg

SEQ ID NO: 1124732 - DNA, 15 bp, Homo sapiens
cccaaaataattttt

SEQ ID NO: 1124733 - DNA, 15 bp, Homo sapiens
acccaaaataatttt

SEQ ID NO: 1124734 - DNA, 15 bp, Homo sapiens
tacccaaaataattt

SEQ ID NO: 1124735 - DNA, 15 bp, Homo sapiens
atacccaaaataatt

SEQ ID NO: 1124736 - DNA, 15 bp, Homo sapiens
aatacccaaaataat

SEQ ID NO: 1124737 - DNA, 15 bp, Homo sapiens
aaatacccaaaataa

SEQ ID NO: 1124738 - DNA, 15 bp, Homo sapiens
gaaatacccaaaata

SEQ ID NO: 1124739 - DNA, 15 bp, Homo sapiens
ggaaatacccaaaat

SEQ ID NO: 1124740 - DNA, 15 bp, Homo sapiens
tggaaatacccaaaa

SEQ ID NO: 1124741 - DNA, 15 bp, Homo sapiens
ttggaaatacccaaa

SEQ ID NO: 1124742 - DNA, 15 bp, Homo sapiens
tttggaaatacccaa

SEQ ID NO: 1124743 - DNA, 15 bp, Homo sapiens
gtttggaaataccca

SEQ ID NO: 1124744 - DNA, 15 bp, Homo sapiens
tgtttggaaataccc

SEQ ID NO: 1124745 - DNA, 15 bp, Homo sapiens
ctgtttggaaatacc

SEQ ID NO: 1124746 - DNA, 15 bp, Homo sapiens
gctgtttggaaatac

SEQ ID NO: 1124747 - DNA, 15 bp, Homo sapiens
ggctgtttggaaata

SEQ ID NO: 1124748 - DNA, 15 bp, Homo sapiens
tggctgtttggaaat

SEQ ID NO: 1124749 - DNA, 15 bp, Homo sapiens
ttggctgtttggaaa

SEQ ID NO: 1124750 - DNA, 15 bp, Homo sapiens
tttggctgtttggaa

SEQ ID NO: 1124751 - DNA, 15 bp, Homo sapiens
ctttggctgtttgga

SEQ ID NO: 1124752 - DNA, 15 bp, Homo sapiens
tctttggctgtttgg

SEQ ID NO: 1124753 - DNA, 15 bp, Homo sapiens
ctctttggctgtttg

SEQ ID NO: 1124754 - DNA, 15 bp, Homo sapiens
gctctttggctgttt

SEQ ID NO: 1124755 - DNA, 15 bp, Homo sapiens
agctctttggctgtt

SEQ ID NO: 1124756 - DNA, 15 bp, Homo sapiens
tagctctttggctgt

SEQ ID NO: 1124757 - DNA, 15 bp, Homo sapiens
ctagctctttggctg

SEQ ID NO: 1124758 - DNA, 15 bp, Homo sapiens
gctagctctttggct

SEQ ID NO: 1124759 - DNA, 15 bp, Homo sapiens
agctagctctttggc

SEQ ID NO: 1124760 - DNA, 15 bp, Homo sapiens
aagctagctctttgg

SEQ ID NO: 1124761 - DNA, 15 bp, Homo sapiens
aaagctagctctttg

SEQ ID NO: 1124762 - DNA, 15 bp, Homo sapiens
aaaagctagctcttt

SEQ ID NO: 1124763 - DNA, 15 bp, Homo sapiens
caaaagctagctctt

SEQ ID NO: 1124764 - DNA, 15 bp, Homo sapiens
tcaaaagctagctct

SEQ ID NO: 1124765 - DNA, 15 bp, Homo sapiens
ttcaaaagctagctc

SEQ ID NO: 1124766 - DNA, 15 bp, Homo sapiens
gttcaaaagctagct

SEQ ID NO: 1124767 - DNA, 15 bp, Homo sapiens
ggttcaaaagctagc

SEQ ID NO: 1124768 - DNA, 15 bp, Homo sapiens
gggttcaaaagctag

SEQ ID NO: 1124769 - DNA, 15 bp, Homo sapiens
tgggttcaaaagcta

SEQ ID NO: 1124770 - DNA, 15 bp, Homo sapiens
gtgggttcaaaagct

SEQ ID NO: 1124771 - DNA, 15 bp, Homo sapiens
tgtgggttcaaaagc

SEQ ID NO: 1124772 - DNA, 15 bp, Homo sapiens
ctgtgggttcaaaag

SEQ ID NO: 1124773 - DNA, 15 bp, Homo sapiens
tctgtgggttcaaaa

SEQ ID NO: 1124774 - DNA, 15 bp, Homo sapiens
ttctgtgggttcaaa

SEQ ID NO: 1124775 - DNA, 15 bp, Homo sapiens
cttctgtgggttcaa

SEQ ID NO: 1124776 - DNA, 15 bp, Homo sapiens
tcttctgtgggttca

SEQ ID NO: 1124777 - DNA, 15 bp, Homo sapiens
ctcttctgtgggttc

SEQ ID NO: 1124778 - DNA, 15 bp, Homo sapiens
tctcttctgtgggtt

SEQ ID NO: 1124779 - DNA, 15 bp, Homo sapiens
ttctcttctgtgggt

SEQ ID NO: 1124780 - DNA, 15 bp, Homo sapiens
attctcttctgtggg

SEQ ID NO: 1124781 - DNA, 15 bp, Homo sapiens
aattctcttctgtgg

SEQ ID NO: 1124782 - DNA, 15 bp, Homo sapiens
aaattctcttctgtg

SEQ ID NO: 1124783 - DNA, 15 bp, Homo sapiens
gaaattctcttctgt

SEQ ID NO: 1124784 - DNA, 15 bp, Homo sapiens
agaaattctcttctg

SEQ ID NO: 1124785 - DNA, 15 bp, Homo sapiens
cagaaattctcttct

SEQ ID NO: 1124786 - DNA, 15 bp, Homo sapiens
tcagaaattctcttc

SEQ ID NO: 1124787 - DNA, 15 bp, Homo sapiens
atcagaaattctctt

SEQ ID NO: 1124788 - DNA, 15 bp, Homo sapiens
tatcagaaattctct

SEQ ID NO: 1124789 - DNA, 15 bp, Homo sapiens
ttatcagaaattctc

SEQ ID NO: 1124790 - DNA, 15 bp, Homo sapiens
gttatcagaaattct

SEQ ID NO: 1124791 - DNA, 15 bp, Homo sapiens
agttatcagaaattc

SEQ ID NO: 1124792 - DNA, 15 bp, Homo sapiens
gagttatcagaaatt

SEQ ID NO: 1124793 - DNA, 15 bp, Homo sapiens
agagttatcagaaat

SEQ ID NO: 1124794 - DNA, 15 bp, Homo sapiens
gagagttatcagaaa

SEQ ID NO: 1124795 - DNA, 15 bp, Homo sapiens
agagagttatcagaa

SEQ ID NO: 1124796 - DNA, 15 bp, Homo sapiens
cagagagttatcaga

SEQ ID NO: 1124797 - DNA, 15 bp, Homo sapiens
gcagagagttatcag

SEQ ID NO: 1124798 - DNA, 15 bp, Homo sapiens
cgcagagagttatca

SEQ ID NO: 1124799 - DNA, 15 bp, Homo sapiens
acgcagagagttatc

SEQ ID NO: 1124800 - DNA, 15 bp, Homo sapiens
aacgcagagagttat

SEQ ID NO: 1124801 - DNA, 15 bp, Homo sapiens
taacgcagagagtta

SEQ ID NO: 1124802 - DNA, 15 bp, Homo sapiens
ttaacgcagagagtt

SEQ ID NO: 1124803 - DNA, 15 bp, Homo sapiens
gttaacgcagagagt

SEQ ID NO: 1124804 - DNA, 15 bp, Homo sapiens
tgttaacgcagagag

SEQ ID NO: 1124805 - DNA, 15 bp, Homo sapiens
atgttaacgcagaga

SEQ ID NO: 1124806 - DNA, 15 bp, Homo sapiens
catgttaacgcagag

SEQ ID NO: 1124807 - DNA, 15 bp, Homo sapiens
ccatgttaacgcaga

SEQ ID NO: 1124808 - DNA, 15 bp, Homo sapiens
tccatgttaacgcag

SEQ ID NO: 1124809 - DNA, 15 bp, Homo sapiens
ttccatgttaacgca

SEQ ID NO: 1124810 - DNA, 15 bp, Homo sapiens
cttccatgttaacgc

SEQ ID NO: 1124811 - DNA, 15 bp, Homo sapiens
tcttccatgttaacg

SEQ ID NO: 1124812 - DNA, 15 bp, Homo sapiens
gtcttccatgttaac

SEQ ID NO: 1124813 - DNA, 15 bp, Homo sapiens
ggtcttccatgttaa

SEQ ID NO: 1124814 - DNA, 15 bp, Homo sapiens
gggtcttccatgtta

SEQ ID NO: 1124815 - DNA, 15 bp, Homo sapiens
tgggtcttccatgtt

SEQ ID NO: 1124816 - DNA, 15 bp, Homo sapiens
ttgggtcttccatgt

SEQ ID NO: 1124817 - DNA, 15 bp, Homo sapiens
tttgggtcttccatg

SEQ ID NO: 1124818 - DNA, 15 bp, Homo sapiens
atttgggtcttccat

SEQ ID NO: 1124819 - DNA, 15 bp, Homo sapiens
catttgggtcttcca

SEQ ID NO: 1124820 - DNA, 15 bp, Homo sapiens
tcatttgggtcttcc

SEQ ID NO: 1124821 - DNA, 15 bp, Homo sapiens
atcatttgggtcttc

SEQ ID NO: 1124822 - DNA, 15 bp, Homo sapiens
tatcatttgggtctt

SEQ ID NO: 1124823 - DNA, 15 bp, Homo sapiens
ctatcatttgggtct

SEQ ID NO: 1124824 - DNA, 15 bp, Homo sapiens
actatcatttgggtc

SEQ ID NO: 1124825 - DNA, 15 bp, Homo sapiens
tactatcatttgggt

SEQ ID NO: 1124826 - DNA, 15 bp, Homo sapiens
ttactatcatttggg

SEQ ID NO: 1124827 - DNA, 15 bp, Homo sapiens
attactatcatttgg

SEQ ID NO: 1124828 - DNA, 15 bp, Homo sapiens
aattactatcatttg

SEQ ID NO: 1124829 - DNA, 15 bp, Homo sapiens
taattactatcattt

SEQ ID NO: 1124830 - DNA, 15 bp, Homo sapiens
gtaattactatcatt

SEQ ID NO: 1124831 - DNA, 15 bp, Homo sapiens
agtaattactatcat

SEQ ID NO: 1124832 - DNA, 15 bp, Homo sapiens
tagtaattactatca

SEQ ID NO: 1124833 - DNA, 15 bp, Homo sapiens
atagtaattactatc

SEQ ID NO: 1124834 - DNA, 15 bp, Homo sapiens
aatagtaattactat

SEQ ID NO: 1124835 - DNA, 15 bp, Homo sapiens
aaatagtaattacta

SEQ ID NO: 1124836 - DNA, 15 bp, Homo sapiens
taaatagtaattact

SEQ ID NO: 1124837 - DNA, 15 bp, Homo sapiens
gtaaatagtaattac

SEQ ID NO: 1124838 - DNA, 15 bp, Homo sapiens
tgtaaatagtaatta

SEQ ID NO: 1124839 - DNA, 15 bp, Homo sapiens
gtgtaaatagtaatt

SEQ ID NO: 1124840 - DNA, 15 bp, Homo sapiens
tgtgtaaatagtaat

SEQ ID NO: 1124841 - DNA, 15 bp, Homo sapiens
atgtgtaaatagtaa

SEQ ID NO: 1124842 - DNA, 15 bp, Homo sapiens
aatgtgtaaatagta

SEQ ID NO: 1124843 - DNA, 15 bp, Homo sapiens
taatgtgtaaatagt

SEQ ID NO: 1124844 - DNA, 15 bp, Homo sapiens
ttaatgtgtaaatag

SEQ ID NO: 1124845 - DNA, 15 bp, Homo sapiens
gttaatgtgtaaata

SEQ ID NO: 1124846 - DNA, 15 bp, Homo sapiens
tgttaatgtgtaaat

SEQ ID NO: 1124847 - DNA, 15 bp, Homo sapiens
ttgttaatgtgtaaa

SEQ ID NO: 1124848 - DNA, 15 bp, Homo sapiens
tttgttaatgtgtaa

SEQ ID NO: 1124849 - DNA, 15 bp, Homo sapiens
ttttgttaatgtgta

SEQ ID NO: 1124850 - DNA, 15 bp, Homo sapiens
tttttgttaatgtgt

SEQ ID NO: 1124851 - DNA, 15 bp, Homo sapiens
gtttttgttaatgtg

SEQ ID NO: 1124852 - DNA, 15 bp, Homo sapiens
tgtttttgttaatgt

SEQ ID NO: 1124853 - DNA, 15 bp, Homo sapiens
gtgtttttgttaatg

SEQ ID NO: 1124854 - DNA, 15 bp, Homo sapiens
tgtgtttttgttaat

SEQ ID NO: 1124855 - DNA, 15 bp, Homo sapiens
atgtgtttttgttaa

SEQ ID NO: 1124856 - DNA, 15 bp, Homo sapiens
catgtgtttttgtta

SEQ ID NO: 1124857 - DNA, 15 bp, Homo sapiens
tcatgtgtttttgtt

SEQ ID NO: 1124858 - DNA, 15 bp, Homo sapiens
ttcatgtgtttttgt

SEQ ID NO: 1124859 - DNA, 15 bp, Homo sapiens
tttcatgtgtttttg

SEQ ID NO: 1124860 - DNA, 15 bp, Homo sapiens
ttttcatgtgttttt

SEQ ID NO: 1124861 - DNA, 15 bp, Homo sapiens
tttttcatgtgtttt

SEQ ID NO: 1124862 - DNA, 15 bp, Homo sapiens
atttttcatgtgttt

SEQ ID NO: 1124863 - DNA, 15 bp, Homo sapiens
gatttttcatgtgtt

SEQ ID NO: 1124864 - DNA, 15 bp, Homo sapiens
agatttttcatgtgt

SEQ ID NO: 1124865 - DNA, 15 bp, Homo sapiens
gagatttttcatgtg

SEQ ID NO: 1124866 - DNA, 15 bp, Homo sapiens
agagatttttcatgt

SEQ ID NO: 1124867 - DNA, 15 bp, Homo sapiens
gagagatttttcatg

SEQ ID NO: 1124868 - DNA, 15 bp, Homo sapiens
agagagatttttcat

SEQ ID NO: 1124869 - DNA, 15 bp, Homo sapiens
gagagagatttttca

SEQ ID NO: 1124870 - DNA, 15 bp, Homo sapiens
agagagagatttttc

SEQ ID NO: 1124871 - DNA, 15 bp, Homo sapiens
aagagagagattttt

SEQ ID NO: 1124872 - DNA, 15 bp, Homo sapiens
aaagagagagatttt

SEQ ID NO: 1124873 - DNA, 15 bp, Homo sapiens
aaaagagagagattt

SEQ ID NO: 1124874 - DNA, 15 bp, Homo sapiens
gaaaagagagagatt

SEQ ID NO: 1124875 - DNA, 15 bp, Homo sapiens
tgaaaagagagagat

SEQ ID NO: 1124876 - DNA, 15 bp, Homo sapiens
atgaaaagagagaga

SEQ ID NO: 1124877 - DNA, 15 bp, Homo sapiens
aatgaaaagagagag

SEQ ID NO: 1124878 - DNA, 15 bp, Homo sapiens
aaatgaaaagagaga

SEQ ID NO: 1124879 - DNA, 15 bp, Homo sapiens
gaaatgaaaagagag

SEQ ID NO: 1124880 - DNA, 15 bp, Homo sapiens
tgaaatgaaaagaga

SEQ ID NO: 1124881 - DNA, 15 bp, Homo sapiens
ctgaaatgaaaagag

SEQ ID NO: 1124882 - DNA, 15 bp, Homo sapiens
tctgaaatgaaaaga

SEQ ID NO: 1124883 - DNA, 15 bp, Homo sapiens
atctgaaatgaaaag

SEQ ID NO: 1124884 - DNA, 15 bp, Homo sapiens
aatctgaaatgaaaa

SEQ ID NO: 1124885 - DNA, 15 bp, Homo sapiens
aaatctgaaatgaaa

SEQ ID NO: 1124886 - DNA, 15 bp, Homo sapiens
aaaatctgaaatgaa

SEQ ID NO: 1124887 - DNA, 15 bp, Homo sapiens
gaaaatctgaaatga

SEQ ID NO: 1124888 - DNA, 15 bp, Homo sapiens
ggaaaatctgaaatg

SEQ ID NO: 1124889 - DNA, 15 bp, Homo sapiens
aggaaaatctgaaat

SEQ ID NO: 1124890 - DNA, 15 bp, Homo sapiens
gaggaaaatctgaaa

SEQ ID NO: 1124891 - DNA, 15 bp, Homo sapiens
tgaggaaaatctgaa

SEQ ID NO: 1124892 - DNA, 15 bp, Homo sapiens
ctgaggaaaatctga

SEQ ID NO: 1124893 - DNA, 15 bp, Homo sapiens
actgaggaaaatctg

SEQ ID NO: 1124894 - DNA, 15 bp, Homo sapiens
cactgaggaaaatct

SEQ ID NO: 1124895 - DNA, 15 bp, Homo sapiens
acactgaggaaaatc

SEQ ID NO: 1124896 - DNA, 15 bp, Homo sapiens
gacactgaggaaaat

SEQ ID NO: 1124897 - DNA, 15 bp, Homo sapiens
atgacactgaggaaa

SEQ ID NO: 1124898 - DNA, 15 bp, Homo sapiens
tatgacactgaggaa

SEQ ID NO: 1124899 - DNA, 15 bp, Homo sapiens
ctatgacactgagga

SEQ ID NO: 1124900 - DNA, 15 bp, Homo sapiens
actatgacactgagg

SEQ ID NO: 1124901 - DNA, 15 bp, Homo sapiens
tactatgacactgag

SEQ ID NO: 1124902 - DNA, 15 bp, Homo sapiens
ctactatgacactga

SEQ ID NO: 1124903 - DNA, 15 bp, Homo sapiens
cctactatgacactg

SEQ ID NO: 1124904 - DNA, 15 bp, Homo sapiens
tcctactatgacact

SEQ ID NO: 1124905 - DNA, 15 bp, Homo sapiens
ctcctactatgacac

SEQ ID NO: 1124906 - DNA, 15 bp, Homo sapiens
gctcctactatgaca

SEQ ID NO: 1124907 - DNA, 15 bp, Homo sapiens
agctcctactatgac

SEQ ID NO: 1124908 - DNA, 15 bp, Homo sapiens
aagctcctactatga

SEQ ID NO: 1124909 - DNA, 15 bp, Homo sapiens
aaagctcctactatg

SEQ ID NO: 1124910 - DNA, 15 bp, Homo sapiens
taaagctcctactat

SEQ ID NO: 1124911 - DNA, 15 bp, Homo sapiens
ttaaagctcctacta

SEQ ID NO: 1124912 - DNA, 15 bp, Homo sapiens
tttaaagctcctact

SEQ ID NO: 1124913 - DNA, 15 bp, Homo sapiens
atttaaagctcctac

SEQ ID NO: 1124914 - DNA, 15 bp, Homo sapiens
gatttaaagctccta

SEQ ID NO: 1124915 - DNA, 15 bp, Homo sapiens
agatttaaagctcct

SEQ ID NO: 1124916 - DNA, 15 bp, Homo sapiens
aagatttaaagctcc

SEQ ID NO: 1124917 - DNA, 15 bp, Homo sapiens
caagatttaaagctc

SEQ ID NO: 1124918 - DNA, 15 bp, Homo sapiens
ccaagatttaaagct

SEQ ID NO: 1124919 - DNA, 15 bp, Homo sapiens
gccaagatttaaagc

SEQ ID NO: 1124920 - DNA, 15 bp, Homo sapiens
tgccaagatttaaag

SEQ ID NO: 1124921 - DNA, 15 bp, Homo sapiens
ttgccaagatttaaa

SEQ ID NO: 1124922 - DNA, 15 bp, Homo sapiens
attgccaagatttaa

SEQ ID NO: 1124923 - DNA, 15 bp, Homo sapiens
cattgccaagattta

SEQ ID NO: 1124924 - DNA, 15 bp, Homo sapiens
gcattgccaagattt

SEQ ID NO: 1124925 - DNA, 15 bp, Homo sapiens
ggcattgccaagatt

SEQ ID NO: 1124926 - DNA, 15 bp, Homo sapiens
aggcattgccaagat

SEQ ID NO: 1124927 - DNA, 15 bp, Homo sapiens
gaggcattgccaaga

SEQ ID NO: 1124928 - DNA, 15 bp, Homo sapiens
agaggcattgccaag

SEQ ID NO: 1124929 - DNA, 15 bp, Homo sapiens
gagaggcattgccaa

SEQ ID NO: 1124930 - DNA, 15 bp, Homo sapiens
ggagaggcattgcca

SEQ ID NO: 1124931 - DNA, 15 bp, Homo sapiens
aggagaggcattgcc

SEQ ID NO: 1124932 - DNA, 15 bp, Homo sapiens
aaggagaggcattgc

SEQ ID NO: 1124933 - DNA, 15 bp, Homo sapiens
caaggagaggcattg

SEQ ID NO: 1124934 - DNA, 15 bp, Homo sapiens
acaaggagaggcatt

SEQ ID NO: 1124935 - DNA, 15 bp, Homo sapiens
aacaaggagaggcat

SEQ ID NO: 1124936 - DNA, 15 bp, Homo sapiens
aaacaaggagaggca

SEQ ID NO: 1124937 - DNA, 15 bp, Homo sapiens
caaacaaggagaggc

SEQ ID NO: 1124938 - DNA, 15 bp, Homo sapiens
ccaaacaaggagagg

SEQ ID NO: 1124939 - DNA, 15 bp, Homo sapiens
tccaaacaaggagag

SEQ ID NO: 1124940 - DNA, 15 bp, Homo sapiens
ttccaaacaaggaga

SEQ ID NO: 1124941 - DNA, 15 bp, Homo sapiens
cttccaaacaaggag

SEQ ID NO: 1124942 - DNA, 15 bp, Homo sapiens
gcttccaaacaagga

SEQ ID NO: 1124943 - DNA, 15 bp, Homo sapiens
ggcttccaaacaagg

SEQ ID NO: 1124944 - DNA, 15 bp, Homo sapiens
aggcttccaaacaag

SEQ ID NO: 1124945 - DNA, 15 bp, Homo sapiens
aaggcttccaaacaa

SEQ ID NO: 1124946 - DNA, 15 bp, Homo sapiens
aaaggcttccaaaca

SEQ ID NO: 1124947 - DNA, 15 bp, Homo sapiens
caaaggcttccaaac

SEQ ID NO: 1124948 - DNA, 15 bp, Homo sapiens
gcaaaggcttccaaa

SEQ ID NO: 1124949 - DNA, 15 bp, Homo sapiens
tgcaaaggcttccaa

SEQ ID NO: 1124950 - DNA, 15 bp, Homo sapiens
ttgcaaaggcttcca

SEQ ID NO: 1124951 - DNA, 15 bp, Homo sapiens
gttgcaaaggcttcc

SEQ ID NO: 1124952 - DNA, 15 bp, Homo sapiens
agttgcaaaggcttc

SEQ ID NO: 1124953 - DNA, 15 bp, Homo sapiens
cagttgcaaaggctt

SEQ ID NO: 1124954 - DNA, 15 bp, Homo sapiens
ccagttgcaaaggct

SEQ ID NO: 1124955 - DNA, 15 bp, Homo sapiens
tccagttgcaaaggc

SEQ ID NO: 1124956 - DNA, 15 bp, Homo sapiens
gtccagttgcaaagg

SEQ ID NO: 1124957 - DNA, 15 bp, Homo sapiens
cgtccagttgcaaag

SEQ ID NO: 1124958 - DNA, 15 bp, Homo sapiens
acgtccagttgcaaa

SEQ ID NO: 1124959 - DNA, 15 bp, Homo sapiens
cacgtccagttgcaa

SEQ ID NO: 1124960 - DNA, 15 bp, Homo sapiens
gcacgtccagttgca

SEQ ID NO: 1124961 - DNA, 15 bp, Homo sapiens
tgcacgtccagttgc

SEQ ID NO: 1124962 - DNA, 15 bp, Homo sapiens
ctgcacgtccagttg

SEQ ID NO: 1124963 - DNA, 15 bp, Homo sapiens
gctgcacgtccagtt

SEQ ID NO: 1124964 - DNA, 15 bp, Homo sapiens
tgctgcacgtccagt

SEQ ID NO: 1124965 - DNA, 15 bp, Homo sapiens
ctgctgcacgtccag

SEQ ID NO: 1124966 - DNA, 15 bp, Homo sapiens
gctgctgcacgtcca

SEQ ID NO: 1124967 - DNA, 15 bp, Homo sapiens
ggctgctgcacgtcc

SEQ ID NO: 1124968 - DNA, 15 bp, Homo sapiens
tggctgctgcacgtc

SEQ ID NO: 1124969 - DNA, 15 bp, Homo sapiens
gtggctgctgcacgt

SEQ ID NO: 1124970 - DNA, 15 bp, Homo sapiens
ggtggctgctgcacg

SEQ ID NO: 1124971 - DNA, 15 bp, Homo sapiens
tggtggctgctgcac

SEQ ID NO: 1124972 - DNA, 15 bp, Homo sapiens
ctggtggctgctgca

SEQ ID NO: 1124973 - DNA, 15 bp, Homo sapiens
gctggtggctgctgc

SEQ ID NO: 1124974 - DNA, 15 bp, Homo sapiens
tgctggtggctgctg

SEQ ID NO: 1124975 - DNA, 15 bp, Homo sapiens
atgctggtggctgct

SEQ ID NO: 1124976 - DNA, 15 bp, Homo sapiens
aatgctggtggctgc

SEQ ID NO: 1124977 - DNA, 15 bp, Homo sapiens
aaatgctggtggctg

SEQ ID NO: 1124978 - DNA, 15 bp, Homo sapiens
aaaatgctggtggct

SEQ ID NO: 1124979 - DNA, 15 bp, Homo sapiens
aaaaatgctggtggc

SEQ ID NO: 1124980 - DNA, 15 bp, Homo sapiens
caaaaatgctggtgg

SEQ ID NO: 1124981 - DNA, 15 bp, Homo sapiens
tcaaaaatgctggtg

SEQ ID NO: 1124982 - DNA, 15 bp, Homo sapiens
ctcaaaaatgctggt

SEQ ID NO: 1124983 - DNA, 15 bp, Homo sapiens
tctcaaaaatgctgg

SEQ ID NO: 1124984 - DNA, 15 bp, Homo sapiens
gtctcaaaaatgctg

SEQ ID NO: 1124985 - DNA, 15 bp, Homo sapiens
tgtctcaaaaatgct

SEQ ID NO: 1124986 - DNA, 15 bp, Homo sapiens
ttgtctcaaaaatgc

SEQ ID NO: 1124987 - DNA, 15 bp, Homo sapiens
attgtctcaaaaatg

SEQ ID NO: 1124988 - DNA, 15 bp, Homo sapiens
tattgtctcaaaaat

SEQ ID NO: 1124989 - DNA, 15 bp, Homo sapiens
ctattgtctcaaaaa

SEQ ID NO: 1124990 - DNA, 15 bp, Homo sapiens
tctattgtctcaaaa

SEQ ID NO: 1124991 - DNA, 15 bp, Homo sapiens
gtctattgtctcaaa

SEQ ID NO: 1124992 - DNA, 15 bp, Homo sapiens
tgtctattgtctcaa

SEQ ID NO: 1124993 - DNA, 15 bp, Homo sapiens
ctgtctattgtctca

SEQ ID NO: 1124994 - DNA, 15 bp, Homo sapiens
cctgtctattgtctc

SEQ ID NO: 1124995 - DNA, 15 bp, Homo sapiens
ccctgtctattgtct

SEQ ID NO: 1124996 - DNA, 15 bp, Homo sapiens
accctgtctattgtc

SEQ ID NO: 1124997 - DNA, 15 bp, Homo sapiens
taccctgtctattgt

SEQ ID NO: 1124998 - DNA, 15 bp, Homo sapiens
ataccctgtctattg

SEQ ID NO: 1124999 - DNA, 15 bp, Homo sapiens
cataccctgtctatt

SEQ ID NO: 1125000 - DNA, 15 bp, Homo sapiens
acataccctgtctat

SEQ ID NO: 1125001 - DNA, 15 bp, Homo sapiens
tacataccctgtcta

SEQ ID NO: 1125002 - DNA, 15 bp, Homo sapiens
atacataccctgtct

SEQ ID NO: 1125003 - DNA, 15 bp, Homo sapiens
tatacataccctgtc

SEQ ID NO: 1125004 - DNA, 15 bp, Homo sapiens
ttatacataccctgt

SEQ ID NO: 1125005 - DNA, 15 bp, Homo sapiens
cttatacataccctg

SEQ ID NO: 1125006 - DNA, 15 bp, Homo sapiens
gcttatacataccct

SEQ ID NO: 1125007 - DNA, 15 bp, Homo sapiens
ggcttatacataccc

SEQ ID NO: 1125008 - DNA, 15 bp, Homo sapiens
tggcttatacatacc

SEQ ID NO: 1125009 - DNA, 15 bp, Homo sapiens
ttggcttatacatac

SEQ ID NO: 1125010 - DNA, 15 bp, Homo sapiens
tttggcttatacata

SEQ ID NO: 1125011 - DNA, 15 bp, Homo sapiens
ttttggcttatacat

SEQ ID NO: 1125012 - DNA, 15 bp, Homo sapiens
cttttggcttataca

SEQ ID NO: 1125013 - DNA, 15 bp, Homo sapiens
acttttggcttatac

SEQ ID NO: 1125014 - DNA, 15 bp, Homo sapiens
tacttttggcttata

SEQ ID NO: 1125015 - DNA, 15 bp, Homo sapiens
ttacttttggcttat

SEQ ID NO: 1125016 - DNA, 15 bp, Homo sapiens
tttacttttggctta

SEQ ID NO: 1125017 - DNA, 15 bp, Homo sapiens
ctttacttttggctt

SEQ ID NO: 1125018 - DNA, 15 bp, Homo sapiens
cctttacttttggct

SEQ ID NO: 1125019 - DNA, 15 bp, Homo sapiens
gcctttacttttggc

SEQ ID NO: 1125020 - DNA, 15 bp, Homo sapiens
ggcctttacttttgg

SEQ ID NO: 1125021 - DNA, 15 bp, Homo sapiens
tggcctttacttttg

SEQ ID NO: 1125022 - DNA, 15 bp, Homo sapiens
atggcctttactttt

SEQ ID NO: 1125023 - DNA, 15 bp, Homo sapiens
aatggcctttacttt

SEQ ID NO: 1125024 - DNA, 15 bp, Homo sapiens
taatggcctttactt

SEQ ID NO: 1125025 - DNA, 15 bp, Homo sapiens
ttaatggcctttact

SEQ ID NO: 1125026 - DNA, 15 bp, Homo sapiens
gttaatggcctttac

SEQ ID NO: 1125027 - DNA, 15 bp, Homo sapiens
tgttaatggccttta

SEQ ID NO: 1125028 - DNA, 15 bp, Homo sapiens
ctgttaatggccttt

SEQ ID NO: 1125029 - DNA, 15 bp, Homo sapiens
cctgttaatggcctt

SEQ ID NO: 1125030 - DNA, 15 bp, Homo sapiens
acctgttaatggcct

SEQ ID NO: 1125031 - DNA, 15 bp, Homo sapiens
cacctgttaatggcc

SEQ ID NO: 1125032 - DNA, 15 bp, Homo sapiens
ccacctgttaatggc

SEQ ID NO: 1125033 - DNA, 15 bp, Homo sapiens
cccacctgttaatgg

SEQ ID NO: 1125034 - DNA, 15 bp, Homo sapiens
ccccacctgttaatg

SEQ ID NO: 1125035 - DNA, 15 bp, Homo sapiens
cccccacctgttaat

SEQ ID NO: 1125036 - DNA, 15 bp, Homo sapiens
gcccccacctgttaa

SEQ ID NO: 1125037 - DNA, 15 bp, Homo sapiens
agcccccacctgtta

SEQ ID NO: 1125038 - DNA, 15 bp, Homo sapiens
cagcccccacctgtt

SEQ ID NO: 1125039 - DNA, 15 bp, Homo sapiens
ccagcccccacctgt

SEQ ID NO: 1125040 - DNA, 15 bp, Homo sapiens
cccagcccccacctg

SEQ ID NO: 1125041 - DNA, 15 bp, Homo sapiens
ccccagcccccacct

SEQ ID NO: 1125042 - DNA, 15 bp, Homo sapiens
cccccagcccccacc

SEQ ID NO: 1125043 - DNA, 15 bp, Homo sapiens
ccccccagcccccac

SEQ ID NO: 1125044 - DNA, 15 bp, Homo sapiens
accccccagccccca

SEQ ID NO: 1125045 - DNA, 15 bp, Homo sapiens
caccccccagccccc

SEQ ID NO: 1125046 - DNA, 15 bp, Homo sapiens
ccccaccccccagcc

SEQ ID NO: 1125047 - DNA, 15 bp, Homo sapiens
gccccaccccccagc

SEQ ID NO: 1125048 - DNA, 15 bp, Homo sapiens
tgccccaccccccag

SEQ ID NO: 1125049 - DNA, 15 bp, Homo sapiens
gtgccccacccccca

SEQ ID NO: 1125050 - DNA, 15 bp, Homo sapiens
tgtgccccacccccc

SEQ ID NO: 1125051 - DNA, 15 bp, Homo sapiens
ctgtgccccaccccc

SEQ ID NO: 1125052 - DNA, 15 bp, Homo sapiens
tctgtgccccacccc

SEQ ID NO: 1125053 - DNA, 15 bp, Homo sapiens
ttctgtgccccaccc

SEQ ID NO: 1125054 - DNA, 15 bp, Homo sapiens
attctgtgccccacc

SEQ ID NO: 1125055 - DNA, 15 bp, Homo sapiens
cattctgtgccccac

SEQ ID NO: 1125056 - DNA, 15 bp, Homo sapiens
tcattctgtgcccca

SEQ ID NO: 1125057 - DNA, 15 bp, Homo sapiens
ttcattctgtgcccc

SEQ ID NO: 1125058 - DNA, 15 bp, Homo sapiens
gttcattctgtgccc

SEQ ID NO: 1125059 - DNA, 15 bp, Homo sapiens
agttcattctgtgcc

SEQ ID NO: 1125060 - DNA, 15 bp, Homo sapiens
gagttcattctgtgc

SEQ ID NO: 1125061 - DNA, 15 bp, Homo sapiens
ggagttcattctgtg

SEQ ID NO: 1125062 - DNA, 15 bp, Homo sapiens
aggagttcattctgt

SEQ ID NO: 1125063 - DNA, 15 bp, Homo sapiens
caggagttcattctg

SEQ ID NO: 1125064 - DNA, 15 bp, Homo sapiens
tcaggagttcattct

SEQ ID NO: 1125065 - DNA, 15 bp, Homo sapiens
ttcaggagttcattc

SEQ ID NO: 1125066 - DNA, 15 bp, Homo sapiens
cttcaggagttcatt

SEQ ID NO: 1125067 - DNA, 15 bp, Homo sapiens
tcttcaggagttcat

SEQ ID NO: 1125068 - DNA, 15 bp, Homo sapiens
ttcttcaggagttca

SEQ ID NO: 1125069 - DNA, 15 bp, Homo sapiens
attcttcaggagttc

SEQ ID NO: 1125070 - DNA, 15 bp, Homo sapiens
aattcttcaggagtt

SEQ ID NO: 1125071 - DNA, 15 bp, Homo sapiens
aaattcttcaggagt

SEQ ID NO: 1125072 - DNA, 15 bp, Homo sapiens
taaattcttcaggag

SEQ ID NO: 1125073 - DNA, 15 bp, Homo sapiens
gtaaattcttcagga

SEQ ID NO: 1125074 - DNA, 15 bp, Homo sapiens
ggtaaattcttcagg

SEQ ID NO: 1125075 - DNA, 15 bp, Homo sapiens
aggtaaattcttcag

SEQ ID NO: 1125076 - DNA, 15 bp, Homo sapiens
aaggtaaattcttca

SEQ ID NO: 1125077 - DNA, 15 bp, Homo sapiens
taaggtaaattcttc

SEQ ID NO: 1125078 - DNA, 15 bp, Homo sapiens
ttaaggtaaattctt

SEQ ID NO: 1125079 - DNA, 15 bp, Homo sapiens
tttaaggtaaattct

SEQ ID NO: 1125080 - DNA, 15 bp, Homo sapiens
ctttaaggtaaattc

SEQ ID NO: 1125081 - DNA, 15 bp, Homo sapiens
actttaaggtaaatt

SEQ ID NO: 1125082 - DNA, 15 bp, Homo sapiens
aactttaaggtaaat

SEQ ID NO: 1125083 - DNA, 15 bp, Homo sapiens
taactttaaggtaaa

SEQ ID NO: 1125084 - DNA, 15 bp, Homo sapiens
ttaactttaaggtaa

SEQ ID NO: 1125085 - DNA, 15 bp, Homo sapiens
tttaactttaaggta

SEQ ID NO: 1125086 - DNA, 15 bp, Homo sapiens
ttttaactttaaggt

SEQ ID NO: 1125087 - DNA, 15 bp, Homo sapiens
tttttaactttaagg

SEQ ID NO: 1125088 - DNA, 15 bp, Homo sapiens
atttttaactttaag

SEQ ID NO: 1125089 - DNA, 15 bp, Homo sapiens
tatttttaactttaa

SEQ ID NO: 1125090 - DNA, 15 bp, Homo sapiens
atatttttaacttta

SEQ ID NO: 1125091 - DNA, 15 bp, Homo sapiens
tatatttttaacttt

SEQ ID NO: 1125092 - DNA, 15 bp, Homo sapiens
ttatatttttaactt

SEQ ID NO: 1125093 - DNA, 15 bp, Homo sapiens
cttatatttttaact

SEQ ID NO: 1125094 - DNA, 15 bp, Homo sapiens
tcttatatttttaac

SEQ ID NO: 1125095 - DNA, 15 bp, Homo sapiens
ttcttatatttttaa

SEQ ID NO: 1125096 - DNA, 15 bp, Homo sapiens
cttcttatattttta

SEQ ID NO: 1125097 - DNA, 15 bp, Homo sapiens
gcttcttatattttt

SEQ ID NO: 1125098 - DNA, 15 bp, Homo sapiens
agcttcttatatttt

SEQ ID NO: 1125099 - DNA, 15 bp, Homo sapiens
tagcttcttatattt

SEQ ID NO: 1125100 - DNA, 15 bp, Homo sapiens
atagcttcttatatt

SEQ ID NO: 1125101 - DNA, 15 bp, Homo sapiens
gatagcttcttatat

SEQ ID NO: 1125102 - DNA, 15 bp, Homo sapiens
cgatagcttcttata

SEQ ID NO: 1125103 - DNA, 15 bp, Homo sapiens
gcgatagcttcttat

SEQ ID NO: 1125104 - DNA, 15 bp, Homo sapiens
tgcgatagcttctta

SEQ ID NO: 1125105 - DNA, 15 bp, Homo sapiens
ttgcgatagcttctt

SEQ ID NO: 1125106 - DNA, 15 bp, Homo sapiens
cttgcgatagcttct

SEQ ID NO: 1125107 - DNA, 15 bp, Homo sapiens
ccttgcgatagcttc

SEQ ID NO: 1125108 - DNA, 15 bp, Homo sapiens
gccttgcgatagctt

SEQ ID NO: 1125109 - DNA, 15 bp, Homo sapiens
ggccttgcgatagct

SEQ ID NO: 1125110 - DNA, 15 bp, Homo sapiens
gggccttgcgatagc

SEQ ID NO: 1125111 - DNA, 15 bp, Homo sapiens
agggccttgcgatag

SEQ ID NO: 1125112 - DNA, 15 bp, Homo sapiens
aagggccttgcgata

SEQ ID NO: 1125113 - DNA, 15 bp, Homo sapiens
taagggccttgcgat

SEQ ID NO: 1125114 - DNA, 15 bp, Homo sapiens
ttaagggccttgcga

SEQ ID NO: 1125115 - DNA, 15 bp, Homo sapiens
attaagggccttgcg

SEQ ID NO: 1125116 - DNA, 15 bp, Homo sapiens
aattaagggccttgc

SEQ ID NO: 1125117 - DNA, 15 bp, Homo sapiens
gaattaagggccttg

SEQ ID NO: 1125118 - DNA, 15 bp, Homo sapiens
tgaattaagggcctt

SEQ ID NO: 1125119 - DNA, 15 bp, Homo sapiens
ctgaattaagggcct

SEQ ID NO: 1125120 - DNA, 15 bp, Homo sapiens
gctgaattaagggcc

SEQ ID NO: 1125121 - DNA, 15 bp, Homo sapiens
tgctgaattaagggc

SEQ ID NO: 1125122 - DNA, 15 bp, Homo sapiens
ttgctgaattaaggg

SEQ ID NO: 1125123 - DNA, 15 bp, Homo sapiens
gttgctgaattaagg

SEQ ID NO: 1125124 - DNA, 15 bp, Homo sapiens
tgttgctgaattaag

SEQ ID NO: 1125125 - DNA, 15 bp, Homo sapiens
gtgttgctgaattaa

SEQ ID NO: 1125126 - DNA, 15 bp, Homo sapiens
agtgttgctgaatta

SEQ ID NO: 1125127 - DNA, 15 bp, Homo sapiens
aagtgttgctgaatt

SEQ ID NO: 1125128 - DNA, 15 bp, Homo sapiens
taagtgttgctgaat

SEQ ID NO: 1125129 - DNA, 15 bp, Homo sapiens
ataagtgttgctgaa

SEQ ID NO: 1125130 - DNA, 15 bp, Homo sapiens
aataagtgttgctga

SEQ ID NO: 1125131 - DNA, 15 bp, Homo sapiens
taataagtgttgctg

SEQ ID NO: 1125132 - DNA, 15 bp, Homo sapiens
ttaataagtgttgct

SEQ ID NO: 1125133 - DNA, 15 bp, Homo sapiens
tttaataagtgttgc

SEQ ID NO: 1125134 - DNA, 15 bp, Homo sapiens
atttaataagtgttg

SEQ ID NO: 1125135 - DNA, 15 bp, Homo sapiens
catttaataagtgtt

SEQ ID NO: 1125136 - DNA, 15 bp, Homo sapiens
gcatttaataagtgt

SEQ ID NO: 1125137 - DNA, 15 bp, Homo sapiens
agcatttaataagtg

SEQ ID NO: 1125138 - DNA, 15 bp, Homo sapiens
tagcatttaataagt

SEQ ID NO: 1125139 - DNA, 15 bp, Homo sapiens
atagcatttaataag

SEQ ID NO: 1125140 - DNA, 15 bp, Homo sapiens
gatagcatttaataa

SEQ ID NO: 1125141 - DNA, 15 bp, Homo sapiens
tgatagcatttaata

SEQ ID NO: 1125142 - DNA, 15 bp, Homo sapiens
atgatagcatttaat

SEQ ID NO: 1125143 - DNA, 15 bp, Homo sapiens
catgatagcatttaa

SEQ ID NO: 1125144 - DNA, 15 bp, Homo sapiens
acatgatagcattta

SEQ ID NO: 1125145 - DNA, 15 bp, Homo sapiens
cacatgatagcattt

SEQ ID NO: 1125146 - DNA, 15 bp, Homo sapiens
gcacatgatagcatt

SEQ ID NO: 1125147 - DNA, 15 bp, Homo sapiens
agcacatgatagcat

SEQ ID NO: 1125148 - DNA, 15 bp, Homo sapiens
cagcacatgatagca

SEQ ID NO: 1125149 - DNA, 15 bp, Homo sapiens
ccagcacatgatagc

SEQ ID NO: 1125150 - DNA, 15 bp, Homo sapiens
accagcacatgatag

SEQ ID NO: 1125151 - DNA, 15 bp, Homo sapiens
caccagcacatgata

SEQ ID NO: 1125152 - DNA, 15 bp, Homo sapiens
gcaccagcacatgat

SEQ ID NO: 1125153 - DNA, 15 bp, Homo sapiens
ggcaccagcacatga

SEQ ID NO: 1125154 - DNA, 15 bp, Homo sapiens
tggcaccagcacatg

SEQ ID NO: 1125155 - DNA, 15 bp, Homo sapiens
ttggcaccagcacat

SEQ ID NO: 1125156 - DNA, 15 bp, Homo sapiens
attggcaccagcaca

SEQ ID NO: 1125157 - DNA, 15 bp, Homo sapiens
aattggcaccagcac

SEQ ID NO: 1125158 - DNA, 15 bp, Homo sapiens
gaattggcaccagca

SEQ ID NO: 1125159 - DNA, 15 bp, Homo sapiens
agaattggcaccagc

SEQ ID NO: 1125160 - DNA, 15 bp, Homo sapiens
aagaattggcaccag

SEQ ID NO: 1125161 - DNA, 15 bp, Homo sapiens
aaagaattggcacca

SEQ ID NO: 1125162 - DNA, 15 bp, Homo sapiens
aaaagaattggcacc

SEQ ID NO: 1125163 - DNA, 15 bp, Homo sapiens
aaaaagaattggcac

SEQ ID NO: 1125164 - DNA, 15 bp, Homo sapiens
aaaaaagaattggca

SEQ ID NO: 1125165 - DNA, 15 bp, Homo sapiens
aaaaaaagaattggc

SEQ ID NO: 1125166 - DNA, 15 bp, Homo sapiens
aaaaaaaagaattgg

SEQ ID NO: 1125167 - DNA, 15 bp, Homo sapiens
aaaaaaaaagaattg

SEQ ID NO: 1125168 - DNA, 15 bp, Homo sapiens
gggggttgcagtgag

SEQ ID NO: 1125169 - DNA, 15 bp, Homo sapiens
agggggttgcagtga

SEQ ID NO: 1125170 - DNA, 15 bp, Homo sapiens
gagggggttgcagtg

SEQ ID NO: 1125171 - DNA, 15 bp, Homo sapiens
ggagggggttgcagt

SEQ ID NO: 1125172 - DNA, 15 bp, Homo sapiens
aggagggggttgcag

SEQ ID NO: 1125173 - DNA, 15 bp, Homo sapiens
gaggagggggttgca

SEQ ID NO: 1125174 - DNA, 15 bp, Homo sapiens
ggaggagggggttgc

SEQ ID NO: 1125175 - DNA, 15 bp, Homo sapiens
gggaggagggggttg

SEQ ID NO: 1125176 - DNA, 15 bp, Homo sapiens
tgggaggagggggtt

SEQ ID NO: 1125177 - DNA, 15 bp, Homo sapiens
ctgggaggagggggt

SEQ ID NO: 1125178 - DNA, 15 bp, Homo sapiens
cctgggaggaggggg

SEQ ID NO: 1125179 - DNA, 15 bp, Homo sapiens
acctgggaggagggg

SEQ ID NO: 1125180 - DNA, 15 bp, Homo sapiens
aacctgggaggaggg

SEQ ID NO: 1125181 - DNA, 15 bp, Homo sapiens
gaacctgggaggagg

SEQ ID NO: 1125182 - DNA, 15 bp, Homo sapiens
tgaacctgggaggag

SEQ ID NO: 1125183 - DNA, 15 bp, Homo sapiens
ttgaacctgggagga

SEQ ID NO: 1125184 - DNA, 15 bp, Homo sapiens
gcttgaacctgggag

SEQ ID NO: 1125185 - DNA, 15 bp, Homo sapiens
cgcttgaacctggga

SEQ ID NO: 1125186 - DNA, 15 bp, Homo sapiens
tcgcttgaacctggg

SEQ ID NO: 1125187 - DNA, 15 bp, Homo sapiens
atcgcttgaacctgg

SEQ ID NO: 1125188 - DNA, 15 bp, Homo sapiens
aatcgcttgaacctg

SEQ ID NO: 1125189 - DNA, 15 bp, Homo sapiens
gaatcgcttgaacct

SEQ ID NO: 1125190 - DNA, 15 bp, Homo sapiens
tccagctccactggg

SEQ ID NO: 1125191 - DNA, 15 bp, Homo sapiens
ttccagctccactgg

SEQ ID NO: 1125192 - DNA, 15 bp, Homo sapiens
tttccagctccactg

SEQ ID NO: 1125193 - DNA, 15 bp, Homo sapiens
ttttccagctccact

SEQ ID NO: 1125194 - DNA, 15 bp, Homo sapiens
tttttccagctccac

SEQ ID NO: 1125195 - DNA, 15 bp, Homo sapiens
ctttttccagctcca

SEQ ID NO: 1125196 - DNA, 15 bp, Homo sapiens
actttttccagctcc

SEQ ID NO: 1125197 - DNA, 15 bp, Homo sapiens
tactttttccagctc

SEQ ID NO: 1125198 - DNA, 15 bp, Homo sapiens
gtactttttccagct

SEQ ID NO: 1125199 - DNA, 15 bp, Homo sapiens
tgtactttttccagc

SEQ ID NO: 1125200 - DNA, 15 bp, Homo sapiens
ctgtactttttccag

SEQ ID NO: 1125201 - DNA, 15 bp, Homo sapiens
gctgtactttttcca

SEQ ID NO: 1125202 - DNA, 15 bp, Homo sapiens
tgctgtactttttcc

SEQ ID NO: 1125203 - DNA, 15 bp, Homo sapiens
gtgctgtactttttc

SEQ ID NO: 1125204 - DNA, 15 bp, Homo sapiens
agtgctgtacttttt

SEQ ID NO: 1125205 - DNA, 15 bp, Homo sapiens
cagtgctgtactttt

SEQ ID NO: 1125206 - DNA, 15 bp, Homo sapiens
gcagtgctgtacttt

SEQ ID NO: 1125207 - DNA, 15 bp, Homo sapiens
tgcagtgctgtactt

SEQ ID NO: 1125208 - DNA, 15 bp, Homo sapiens
ttgcagtgctgtact

SEQ ID NO: 1125209 - DNA, 15 bp, Homo sapiens
gttgcagtgctgtac

SEQ ID NO: 1125210 - DNA, 15 bp, Homo sapiens
agttgcagtgctgta

SEQ ID NO: 1125211 - DNA, 15 bp, Homo sapiens
gagttgcagtgctgt

SEQ ID NO: 1125212 - DNA, 15 bp, Homo sapiens
tgagttgcagtgctg

SEQ ID NO: 1125213 - DNA, 15 bp, Homo sapiens
atgagttgcagtgct

SEQ ID NO: 1125214 - DNA, 15 bp, Homo sapiens
aatgagttgcagtgc

SEQ ID NO: 1125215 - DNA, 15 bp, Homo sapiens
gaatgagttgcagtg

SEQ ID NO: 1125216 - DNA, 15 bp, Homo sapiens
tgaatgagttgcagt

SEQ ID NO: 1125217 - DNA, 15 bp, Homo sapiens
ctgaatgagttgcag

SEQ ID NO: 1125218 - DNA, 15 bp, Homo sapiens
gctgaatgagttgca

SEQ ID NO: 1125219 - DNA, 15 bp, Homo sapiens
cgctgaatgagttgc

SEQ ID NO: 1125220 - DNA, 15 bp, Homo sapiens
tcgctgaatgagttg

SEQ ID NO: 1125221 - DNA, 15 bp, Homo sapiens
atcgctgaatgagtt

SEQ ID NO: 1125222 - DNA, 15 bp, Homo sapiens
aatcgctgaatgagt

SEQ ID NO: 1125223 - DNA, 15 bp, Homo sapiens
gaatcgctgaatgag

SEQ ID NO: 1125224 - DNA, 15 bp, Homo sapiens
agaatcgctgaatga

SEQ ID NO: 1125225 - DNA, 15 bp, Homo sapiens
tagaatcgctgaatg

SEQ ID NO: 1125226 - DNA, 15 bp, Homo sapiens
atagaatcgctgaat

SEQ ID NO: 1125227 - DNA, 15 bp, Homo sapiens
catagaatcgctgaa

SEQ ID NO: 1125228 - DNA, 15 bp, Homo sapiens
tcatagaatcgctga

SEQ ID NO: 1125229 - DNA, 15 bp, Homo sapiens
gtcatagaatcgctg

SEQ ID NO: 1125230 - DNA, 15 bp, Homo sapiens
ggtcatagaatcgct

SEQ ID NO: 1125231 - DNA, 15 bp, Homo sapiens
gggtcatagaatcgc

SEQ ID NO: 1125232 - DNA, 15 bp, Homo sapiens
ggggtcatagaatcg

SEQ ID NO: 1125233 - DNA, 15 bp, Homo sapiens
aggggtcatagaatc

SEQ ID NO: 1125234 - DNA, 15 bp, Homo sapiens
caggggtcatagaat

SEQ ID NO: 1125235 - DNA, 15 bp, Homo sapiens
acaggggtcatagaa

SEQ ID NO: 1125236 - DNA, 15 bp, Homo sapiens
cacaggggtcataga

SEQ ID NO: 1125237 - DNA, 15 bp, Homo sapiens
tcacaggggtcatag

SEQ ID NO: 1125238 - DNA, 15 bp, Homo sapiens
ttcacaggggtcata

SEQ ID NO: 1125239 - DNA, 15 bp, Homo sapiens
cttcacaggggtcat

SEQ ID NO: 1125240 - DNA, 15 bp, Homo sapiens
ccttcacaggggtca

SEQ ID NO: 1125241 - DNA, 15 bp, Homo sapiens
tccttcacaggggtc

SEQ ID NO: 1125242 - DNA, 15 bp, Homo sapiens
ttccttcacaggggt

SEQ ID NO: 1125243 - DNA, 15 bp, Homo sapiens
attccttcacagggg

SEQ ID NO: 1125244 - DNA, 15 bp, Homo sapiens
ccattccttcacagg

SEQ ID NO: 1125245 - DNA, 15 bp, Homo sapiens
accattccttcacag

SEQ ID NO: 1125246 - DNA, 15 bp, Homo sapiens
caccattccttcaca

SEQ ID NO: 1125247 - DNA, 15 bp, Homo sapiens
ccaccattccttcac

SEQ ID NO: 1125248 - DNA, 15 bp, Homo sapiens
cccaccattccttca

SEQ ID NO: 1125249 - DNA, 15 bp, Homo sapiens
acccaccattccttc

SEQ ID NO: 1125250 - DNA, 15 bp, Homo sapiens
cacccaccattcctt

SEQ ID NO: 1125251 - DNA, 15 bp, Homo sapiens
acacccaccattcct

SEQ ID NO: 1125252 - DNA, 15 bp, Homo sapiens
gacacccaccattcc

SEQ ID NO: 1125253 - DNA, 15 bp, Homo sapiens
agacacccaccattc

SEQ ID NO: 1125254 - DNA, 15 bp, Homo sapiens
aagacacccaccatt

SEQ ID NO: 1125255 - DNA, 15 bp, Homo sapiens
gaagacacccaccat

SEQ ID NO: 1125256 - DNA, 15 bp, Homo sapiens
ggaagacacccacca

SEQ ID NO: 1125257 - DNA, 15 bp, Homo sapiens
tggaagacacccacc

SEQ ID NO: 1125258 - DNA, 15 bp, Homo sapiens
ctggaagacacccac

SEQ ID NO: 1125259 - DNA, 15 bp, Homo sapiens
tctggaagacaccca

SEQ ID NO: 1125260 - DNA, 15 bp, Homo sapiens
ttctggaagacaccc

SEQ ID NO: 1125261 - DNA, 15 bp, Homo sapiens
tttctggaagacacc

SEQ ID NO: 1125262 - DNA, 15 bp, Homo sapiens
gtttctggaagacac

SEQ ID NO: 1125263 - DNA, 15 bp, Homo sapiens
agtttctggaagaca

SEQ ID NO: 1125264 - DNA, 15 bp, Homo sapiens
gagtttctggaagac

SEQ ID NO: 1125265 - DNA, 15 bp, Homo sapiens
ggagtttctggaaga

SEQ ID NO: 1125266 - DNA, 15 bp, Homo sapiens
aggagtttctggaag

SEQ ID NO: 1125267 - DNA, 15 bp, Homo sapiens
gaggagtttctggaa

SEQ ID NO: 1125268 - DNA, 15 bp, Homo sapiens
tgaggagtttctgga

SEQ ID NO: 1125269 - DNA, 15 bp, Homo sapiens
ttgaggagtttctgg

SEQ ID NO: 1125270 - DNA, 15 bp, Homo sapiens
attgaggagtttctg

SEQ ID NO: 1125271 - DNA, 15 bp, Homo sapiens
tattgaggagtttct

SEQ ID NO: 1125272 - DNA, 15 bp, Homo sapiens
gtattgaggagtttc

SEQ ID NO: 1125273 - DNA, 15 bp, Homo sapiens
tgtattgaggagttt

SEQ ID NO: 1125274 - DNA, 15 bp, Homo sapiens
atgtattgaggagtt

SEQ ID NO: 1125275 - DNA, 15 bp, Homo sapiens
catgtattgaggagt

SEQ ID NO: 1125276 - DNA, 15 bp, Homo sapiens
ccatgtattgaggag

SEQ ID NO: 1125277 - DNA, 15 bp, Homo sapiens
cccatgtattgagga

SEQ ID NO: 1125278 - DNA, 15 bp, Homo sapiens
ccccatgtattgagg

SEQ ID NO: 1125279 - DNA, 15 bp, Homo sapiens
tccccatgtattgag

SEQ ID NO: 1125280 - DNA, 15 bp, Homo sapiens
gtccccatgtattga

SEQ ID NO: 1125281 - DNA, 15 bp, Homo sapiens
tgtccccatgtattg

SEQ ID NO: 1125282 - DNA, 15 bp, Homo sapiens
ctgtccccatgtatt

SEQ ID NO: 1125283 - DNA, 15 bp, Homo sapiens
actgtccccatgtat

SEQ ID NO: 1125284 - DNA, 15 bp, Homo sapiens
tactgtccccatgta

SEQ ID NO: 1125285 - DNA, 15 bp, Homo sapiens
ttactgtccccatgt

SEQ ID NO: 1125286 - DNA, 15 bp, Homo sapiens
tttactgtccccatg

SEQ ID NO: 1125287 - DNA, 15 bp, Homo sapiens
ctttactgtccccat

SEQ ID NO: 1125288 - DNA, 15 bp, Homo sapiens
actttactgtcccca

SEQ ID NO: 1125289 - DNA, 15 bp, Homo sapiens
cactttactgtcccc

SEQ ID NO: 1125290 - DNA, 15 bp, Homo sapiens
gcactttactgtccc

SEQ ID NO: 1125291 - DNA, 15 bp, Homo sapiens
tgcactttactgtcc

SEQ ID NO: 1125292 - DNA, 15 bp, Homo sapiens
ttgcactttactgtc

SEQ ID NO: 1125293 - DNA, 15 bp, Homo sapiens
tttgcactttactgt

SEQ ID NO: 1125294 - DNA, 15 bp, Homo sapiens
atttgcactttactg

SEQ ID NO: 1125295 - DNA, 15 bp, Homo sapiens
catttgcactttact

SEQ ID NO: 1125296 - DNA, 15 bp, Homo sapiens
ccatttgcactttac

SEQ ID NO: 1125297 - DNA, 15 bp, Homo sapiens
gccatttgcacttta

SEQ ID NO: 1125298 - DNA, 15 bp, Homo sapiens
tgccatttgcacttt

SEQ ID NO: 1125299 - DNA, 15 bp, Homo sapiens
ctgccatttgcactt

SEQ ID NO: 1125300 - DNA, 15 bp, Homo sapiens
actgccatttgcact

SEQ ID NO: 1125301 - DNA, 15 bp, Homo sapiens
tactgccatttgcac

SEQ ID NO: 1125302 - DNA, 15 bp, Homo sapiens
atactgccatttgca

SEQ ID NO: 1125303 - DNA, 15 bp, Homo sapiens
tatactgccatttgc

SEQ ID NO: 1125304 - DNA, 15 bp, Homo sapiens
atatactgccatttg

SEQ ID NO: 1125305 - DNA, 15 bp, Homo sapiens
aatatactgccattt

SEQ ID NO: 1125306 - DNA, 15 bp, Homo sapiens
caatatactgccatt

SEQ ID NO: 1125307 - DNA, 15 bp, Homo sapiens
tcaatatactgccat

SEQ ID NO: 1125308 - DNA, 15 bp, Homo sapiens
atcaatatactgcca

SEQ ID NO: 1125309 - DNA, 15 bp, Homo sapiens
gatcaatatactgcc

SEQ ID NO: 1125310 - DNA, 15 bp, Homo sapiens
tgatcaatatactgc

SEQ ID NO: 1125311 - DNA, 15 bp, Homo sapiens
ttgatcaatatactg

SEQ ID NO: 1125312 - DNA, 15 bp, Homo sapiens
tttgatcaatatact

SEQ ID NO: 1125313 - DNA, 15 bp, Homo sapiens
gtttgatcaatatac

SEQ ID NO: 1125314 - DNA, 15 bp, Homo sapiens
tgtttgatcaatata

SEQ ID NO: 1125315 - DNA, 15 bp, Homo sapiens
ctgtttgatcaatat

SEQ ID NO: 1125316 - DNA, 15 bp, Homo sapiens
tctgtttgatcaata

SEQ ID NO: 1125317 - DNA, 15 bp, Homo sapiens
ttctgtttgatcaat

SEQ ID NO: 1125318 - DNA, 15 bp, Homo sapiens
tttctgtttgatcaa

SEQ ID NO: 1125319 - DNA, 15 bp, Homo sapiens
ctttctgtttgatca

SEQ ID NO: 1125320 - DNA, 15 bp, Homo sapiens
cctttctgtttgatc

SEQ ID NO: 1125321 - DNA, 15 bp, Homo sapiens
acctttctgtttgat

SEQ ID NO: 1125322 - DNA, 15 bp, Homo sapiens
cacctttctgtttga

SEQ ID NO: 1125323 - DNA, 15 bp, Homo sapiens
acacctttctgtttg

SEQ ID NO: 1125324 - DNA, 15 bp, Homo sapiens
tacacctttctgttt

SEQ ID NO: 1125325 - DNA, 15 bp, Homo sapiens
ctacacctttctgtt

SEQ ID NO: 1125326 - DNA, 15 bp, Homo sapiens
gctacacctttctgt

SEQ ID NO: 1125327 - DNA, 15 bp, Homo sapiens
tgctacacctttctg

SEQ ID NO: 1125328 - DNA, 15 bp, Homo sapiens
atgctacacctttct

SEQ ID NO: 1125329 - DNA, 15 bp, Homo sapiens
tatgctacacctttc

SEQ ID NO: 1125330 - DNA, 15 bp, Homo sapiens
gtatgctacaccttt

SEQ ID NO: 1125331 - DNA, 15 bp, Homo sapiens
tgtatgctacacctt

SEQ ID NO: 1125332 - DNA, 15 bp, Homo sapiens
atgtatgctacacct

SEQ ID NO: 1125333 - DNA, 15 bp, Homo sapiens
aatgtatgctacacc

SEQ ID NO: 1125334 - DNA, 15 bp, Homo sapiens
caatgtatgctacac

SEQ ID NO: 1125335 - DNA, 15 bp, Homo sapiens
tcaatgtatgctaca

SEQ ID NO: 1125336 - DNA, 15 bp, Homo sapiens
ctcaatgtatgctac

SEQ ID NO: 1125337 - DNA, 15 bp, Homo sapiens
tctcaatgtatgcta

SEQ ID NO: 1125338 - DNA, 15 bp, Homo sapiens
gtctcaatgtatgct

SEQ ID NO: 1125339 - DNA, 15 bp, Homo sapiens
agtctcaatgtatgc

SEQ ID NO: 1125340 - DNA, 15 bp, Homo sapiens
cagtctcaatgtatg

SEQ ID NO: 1125341 - DNA, 15 bp, Homo sapiens
acagtctcaatgtat

SEQ ID NO: 1125342 - DNA, 15 bp, Homo sapiens
gacagtctcaatgta

SEQ ID NO: 1125343 - DNA, 15 bp, Homo sapiens
ggacagtctcaatgt

SEQ ID NO: 1125344 - DNA, 15 bp, Homo sapiens
aggacagtctcaatg

SEQ ID NO: 1125345 - DNA, 15 bp, Homo sapiens
caggacagtctcaat

SEQ ID NO: 1125346 - DNA, 15 bp, Homo sapiens
ccaggacagtctcaa

SEQ ID NO: 1125347 - DNA, 15 bp, Homo sapiens
gccaggacagtctca

SEQ ID NO: 1125348 - DNA, 15 bp, Homo sapiens
tgccaggacagtctc

SEQ ID NO: 1125349 - DNA, 15 bp, Homo sapiens
atgccaggacagtct

SEQ ID NO: 1125350 - DNA, 15 bp, Homo sapiens
catgccaggacagtc

SEQ ID NO: 1125351 - DNA, 15 bp, Homo sapiens
gcatgccaggacagt

SEQ ID NO: 1125352 - DNA, 15 bp, Homo sapiens
tgcatgccaggacag

SEQ ID NO: 1125353 - DNA, 15 bp, Homo sapiens
atgcatgccaggaca

SEQ ID NO: 1125354 - DNA, 15 bp, Homo sapiens
tatgcatgccaggac

SEQ ID NO: 1125355 - DNA, 15 bp, Homo sapiens
ctatgcatgccagga

SEQ ID NO: 1125356 - DNA, 15 bp, Homo sapiens
actatgcatgccagg

SEQ ID NO: 1125357 - DNA, 15 bp, Homo sapiens
aactatgcatgccag

SEQ ID NO: 1125358 - DNA, 15 bp, Homo sapiens
taactatgcatgcca

SEQ ID NO: 1125359 - DNA, 15 bp, Homo sapiens
ttaactatgcatgcc

SEQ ID NO: 1125360 - DNA, 15 bp, Homo sapiens
gttaactatgcatgc

SEQ ID NO: 1125361 - DNA, 15 bp, Homo sapiens
agttaactatgcatg

SEQ ID NO: 1125362 - DNA, 15 bp, Homo sapiens
aagttaactatgcat

SEQ ID NO: 1125363 - DNA, 15 bp, Homo sapiens
taagttaactatgca

SEQ ID NO: 1125364 - DNA, 15 bp, Homo sapiens
ttaagttaactatgc

SEQ ID NO: 1125365 - DNA, 15 bp, Homo sapiens
attaagttaactatg

SEQ ID NO: 1125366 - DNA, 15 bp, Homo sapiens
cattaagttaactat

SEQ ID NO: 1125367 - DNA, 15 bp, Homo sapiens
tcattaagttaacta

SEQ ID NO: 1125368 - DNA, 15 bp, Homo sapiens
atcattaagttaact

SEQ ID NO: 1125369 - DNA, 15 bp, Homo sapiens
aatcattaagttaac

SEQ ID NO: 1125370 - DNA, 15 bp, Homo sapiens
aaatcattaagttaa

SEQ ID NO: 1125371 - DNA, 15 bp, Homo sapiens
caaatcattaagtta

SEQ ID NO: 1125372 - DNA, 15 bp, Homo sapiens
acaaatcattaagtt

SEQ ID NO: 1125373 - DNA, 15 bp, Homo sapiens
aacaaatcattaagt

SEQ ID NO: 1125374 - DNA, 15 bp, Homo sapiens
taacaaatcattaag

SEQ ID NO: 1125375 - DNA, 15 bp, Homo sapiens
gtaacaaatcattaa

SEQ ID NO: 1125376 - DNA, 15 bp, Homo sapiens
agtaacaaatcatta

SEQ ID NO: 1125377 - DNA, 15 bp, Homo sapiens
cagtaacaaatcatt

SEQ ID NO: 1125378 - DNA, 15 bp, Homo sapiens
tcagtaacaaatcat

SEQ ID NO: 1125379 - DNA, 15 bp, Homo sapiens
ttcagtaacaaatca

SEQ ID NO: 1125380 - DNA, 15 bp, Homo sapiens
attcagtaacaaatc

SEQ ID NO: 1125381 - DNA, 15 bp, Homo sapiens
aattcagtaacaaat

SEQ ID NO: 1125382 - DNA, 15 bp, Homo sapiens
caattcagtaacaaa

SEQ ID NO: 1125383 - DNA, 15 bp, Homo sapiens
tcaattcagtaacaa

SEQ ID NO: 1125384 - DNA, 15 bp, Homo sapiens
atcaattcagtaaca

SEQ ID NO: 1125385 - DNA, 15 bp, Homo sapiens
catcaattcagtaac

SEQ ID NO: 1125386 - DNA, 15 bp, Homo sapiens
ccatcaattcagtaa

SEQ ID NO: 1125387 - DNA, 15 bp, Homo sapiens
cccatcaattcagta

SEQ ID NO: 1125388 - DNA, 15 bp, Homo sapiens
tcccatcaattcagt

SEQ ID NO: 1125389 - DNA, 15 bp, Homo sapiens
gtcccatcaattcag

SEQ ID NO: 1125390 - DNA, 15 bp, Homo sapiens
tgtcccatcaattca

SEQ ID NO: 1125391 - DNA, 15 bp, Homo sapiens
gtgtcccatcaattc

SEQ ID NO: 1125392 - DNA, 15 bp, Homo sapiens
cgtgtcccatcaatt

SEQ ID NO: 1125393 - DNA, 15 bp, Homo sapiens
gcgtgtcccatcaat

SEQ ID NO: 1125394 - DNA, 15 bp, Homo sapiens
agcgtgtcccatcaa

SEQ ID NO: 1125395 - DNA, 15 bp, Homo sapiens
aagcgtgtcccatca

SEQ ID NO: 1125396 - DNA, 15 bp, Homo sapiens
gaagcgtgtcccatc

SEQ ID NO: 1125397 - DNA, 15 bp, Homo sapiens
ggaagcgtgtcccat

SEQ ID NO: 1125398 - DNA, 15 bp, Homo sapiens
aggaagcgtgtccca

SEQ ID NO: 1125399 - DNA, 15 bp, Homo sapiens
taggaagcgtgtccc

SEQ ID NO: 1125400 - DNA, 15 bp, Homo sapiens
gtaggaagcgtgtcc

SEQ ID NO: 1125401 - DNA, 15 bp, Homo sapiens
tgtaggaagcgtgtc

SEQ ID NO: 1125402 - DNA, 15 bp, Homo sapiens
atgtaggaagcgtgt

SEQ ID NO: 1125403 - DNA, 15 bp, Homo sapiens
catgtaggaagcgtg

SEQ ID NO: 1125404 - DNA, 15 bp, Homo sapiens
ccatgtaggaagcgt

SEQ ID NO: 1125405 - DNA, 15 bp, Homo sapiens
accatgtaggaagcg

SEQ ID NO: 1125406 - DNA, 15 bp, Homo sapiens
taccatgtaggaagc

SEQ ID NO: 1125407 - DNA, 15 bp, Homo sapiens
ttaccatgtaggaag

SEQ ID NO: 1125408 - DNA, 15 bp, Homo sapiens
gttaccatgtaggaa

SEQ ID NO: 1125409 - DNA, 15 bp, Homo sapiens
tgttaccatgtagga

SEQ ID NO: 1125410 - DNA, 15 bp, Homo sapiens
ctgttaccatgtagg

SEQ ID NO: 1125411 - DNA, 15 bp, Homo sapiens
actgttaccatgtag

SEQ ID NO: 1125412 - DNA, 15 bp, Homo sapiens
cactgttaccatgta

SEQ ID NO: 1125413 - DNA, 15 bp, Homo sapiens
acactgttaccatgt

SEQ ID NO: 1125414 - DNA, 15 bp, Homo sapiens
aacactgttaccatg

SEQ ID NO: 1125415 - DNA, 15 bp, Homo sapiens
gaacactgttaccat

SEQ ID NO: 1125416 - DNA, 15 bp, Homo sapiens
tgaacactgttacca

SEQ ID NO: 1125417 - DNA, 15 bp, Homo sapiens
ctgaacactgttacc

SEQ ID NO: 1125418 - DNA, 15 bp, Homo sapiens
actgaacactgttac

SEQ ID NO: 1125419 - DNA, 15 bp, Homo sapiens
cactgaacactgtta

SEQ ID NO: 1125420 - DNA, 15 bp, Homo sapiens
tcactgaacactgtt

SEQ ID NO: 1125421 - DNA, 15 bp, Homo sapiens
ttcactgaacactgt

SEQ ID NO: 1125422 - DNA, 15 bp, Homo sapiens
attcactgaacactg

SEQ ID NO: 1125423 - DNA, 15 bp, Homo sapiens
tattcactgaacact

SEQ ID NO: 1125424 - DNA, 15 bp, Homo sapiens
ttattcactgaacac

SEQ ID NO: 1125425 - DNA, 15 bp, Homo sapiens
gttattcactgaaca

SEQ ID NO: 1125426 - DNA, 15 bp, Homo sapiens
ggttattcactgaac

SEQ ID NO: 1125427 - DNA, 15 bp, Homo sapiens
tggttattcactgaa

SEQ ID NO: 1125428 - DNA, 15 bp, Homo sapiens
ctggttattcactga

SEQ ID NO: 1125429 - DNA, 15 bp, Homo sapiens
actggttattcactg

SEQ ID NO: 1125430 - DNA, 15 bp, Homo sapiens
gactggttattcact

SEQ ID NO: 1125431 - DNA, 15 bp, Homo sapiens
tgactggttattcac

SEQ ID NO: 1125432 - DNA, 15 bp, Homo sapiens
ttgactggttattca

SEQ ID NO: 1125433 - DNA, 15 bp, Homo sapiens
attgactggttattc

SEQ ID NO: 1125434 - DNA, 15 bp, Homo sapiens
aattgactggttatt

SEQ ID NO: 1125435 - DNA, 15 bp, Homo sapiens
gaattgactggttat

SEQ ID NO: 1125436 - DNA, 15 bp, Homo sapiens
ggaattgactggtta

SEQ ID NO: 1125437 - DNA, 15 bp, Homo sapiens
tggaattgactggtt

SEQ ID NO: 1125438 - DNA, 15 bp, Homo sapiens
atggaattgactggt

SEQ ID NO: 1125439 - DNA, 15 bp, Homo sapiens
aatggaattgactgg

SEQ ID NO: 1125440 - DNA, 15 bp, Homo sapiens
gaatggaattgactg

SEQ ID NO: 1125441 - DNA, 15 bp, Homo sapiens
tgaatggaattgact

SEQ ID NO: 1125442 - DNA, 15 bp, Homo sapiens
gtgaatggaattgac

SEQ ID NO: 1125443 - DNA, 15 bp, Homo sapiens
agtgaatggaattga

SEQ ID NO: 1125444 - DNA, 15 bp, Homo sapiens
cagtgaatggaattg

SEQ ID NO: 1125445 - DNA, 15 bp, Homo sapiens
acagtgaatggaatt

SEQ ID NO: 1125446 - DNA, 15 bp, Homo sapiens
tacagtgaatggaat

SEQ ID NO: 1125447 - DNA, 15 bp, Homo sapiens
atacagtgaatggaa

SEQ ID NO: 1125448 - DNA, 15 bp, Homo sapiens
tatacagtgaatgga

SEQ ID NO: 1125449 - DNA, 15 bp, Homo sapiens
ttatacagtgaatgg

SEQ ID NO: 1125450 - DNA, 15 bp, Homo sapiens
attatacagtgaatg

SEQ ID NO: 1125451 - DNA, 15 bp, Homo sapiens
cattatacagtgaat

SEQ ID NO: 1125452 - DNA, 15 bp, Homo sapiens
acattatacagtgaa

SEQ ID NO: 1125453 - DNA, 15 bp, Homo sapiens
tacattatacagtga

SEQ ID NO: 1125454 - DNA, 15 bp, Homo sapiens
ttacattatacagtg

SEQ ID NO: 1125455 - DNA, 15 bp, Homo sapiens
gttacattatacagt

SEQ ID NO: 1125456 - DNA, 15 bp, Homo sapiens
agttacattatacag

SEQ ID NO: 1125457 - DNA, 15 bp, Homo sapiens
cagttacattataca

SEQ ID NO: 1125458 - DNA, 15 bp, Homo sapiens
tcagttacattatac

SEQ ID NO: 1125459 - DNA, 15 bp, Homo sapiens
ttcagttacattata

SEQ ID NO: 1125460 - DNA, 15 bp, Homo sapiens
attcagttacattat

SEQ ID NO: 1125461 - DNA, 15 bp, Homo sapiens
cattcagttacatta

SEQ ID NO: 1125462 - DNA, 15 bp, Homo sapiens
acattcagttacatt

SEQ ID NO: 1125463 - DNA, 15 bp, Homo sapiens
cacattcagttacat

SEQ ID NO: 1125464 - DNA, 15 bp, Homo sapiens
gcacattcagttaca

SEQ ID NO: 1125465 - DNA, 15 bp, Homo sapiens
tgcacattcagttac

SEQ ID NO: 1125466 - DNA, 15 bp, Homo sapiens
ctgcacattcagtta

SEQ ID NO: 1125467 - DNA, 15 bp, Homo sapiens
tctgcacattcagtt

SEQ ID NO: 1125468 - DNA, 15 bp, Homo sapiens
atctgcacattcagt

SEQ ID NO: 1125469 - DNA, 15 bp, Homo sapiens
tatctgcacattcag

SEQ ID NO: 1125470 - DNA, 15 bp, Homo sapiens
gtatctgcacattca

SEQ ID NO: 1125471 - DNA, 15 bp, Homo sapiens
tgtatctgcacattc

SEQ ID NO: 1125472 - DNA, 15 bp, Homo sapiens
ctgtatctgcacatt

SEQ ID NO: 1125473 - DNA, 15 bp, Homo sapiens
actgtatctgcacat

SEQ ID NO: 1125474 - DNA, 15 bp, Homo sapiens
gactgtatctgcaca

SEQ ID NO: 1125475 - DNA, 15 bp, Homo sapiens
tgactgtatctgcac

SEQ ID NO: 1125476 - DNA, 15 bp, Homo sapiens
ctgactgtatctgca

SEQ ID NO: 1125477 - DNA, 15 bp, Homo sapiens
tctgactgtatctgc

SEQ ID NO: 1125478 - DNA, 15 bp, Homo sapiens
atctgactgtatctg

SEQ ID NO: 1125479 - DNA, 15 bp, Homo sapiens
catctgactgtatct

SEQ ID NO: 1125480 - DNA, 15 bp, Homo sapiens
acatctgactgtatc

SEQ ID NO: 1125481 - DNA, 15 bp, Homo sapiens
cacatctgactgtat

SEQ ID NO: 1125482 - DNA, 15 bp, Homo sapiens
ccacatctgactgta

SEQ ID NO: 1125483 - DNA, 15 bp, Homo sapiens
gccacatctgactgt

SEQ ID NO: 1125484 - DNA, 15 bp, Homo sapiens
tgccacatctgactg

SEQ ID NO: 1125485 - DNA, 15 bp, Homo sapiens
atgccacatctgact

SEQ ID NO: 1125486 - DNA, 15 bp, Homo sapiens
tatgccacatctgac

SEQ ID NO: 1125487 - DNA, 15 bp, Homo sapiens
ctatgccacatctga

SEQ ID NO: 1125488 - DNA, 15 bp, Homo sapiens
gctatgccacatctg

SEQ ID NO: 1125489 - DNA, 15 bp, Homo sapiens
tgctatgccacatct

SEQ ID NO: 1125490 - DNA, 15 bp, Homo sapiens
ttgctatgccacatc

SEQ ID NO: 1125491 - DNA, 15 bp, Homo sapiens
gttgctatgccacat

SEQ ID NO: 1125492 - DNA, 15 bp, Homo sapiens
tgttgctatgccaca

SEQ ID NO: 1125493 - DNA, 15 bp, Homo sapiens
atgttgctatgccac

SEQ ID NO: 1125494 - DNA, 15 bp, Homo sapiens
aatgttgctatgcca

SEQ ID NO: 1125495 - DNA, 15 bp, Homo sapiens
aaatgttgctatgcc

SEQ ID NO: 1125496 - DNA, 15 bp, Homo sapiens
gaaatgttgctatgc

SEQ ID NO: 1125497 - DNA, 15 bp, Homo sapiens
tgaaatgttgctatg

SEQ ID NO: 1125498 - DNA, 15 bp, Homo sapiens
ctgaaatgttgctat

SEQ ID NO: 1125499 - DNA, 15 bp, Homo sapiens
actgaaatgttgcta

SEQ ID NO: 1125500 - DNA, 15 bp, Homo sapiens
gactgaaatgttgct

SEQ ID NO: 1125501 - DNA, 15 bp, Homo sapiens
tgactgaaatgttgc

SEQ ID NO: 1125502 - DNA, 15 bp, Homo sapiens
ctgactgaaatgttg

SEQ ID NO: 1125503 - DNA, 15 bp, Homo sapiens
actgactgaaatgtt

SEQ ID NO: 1125504 - DNA, 15 bp, Homo sapiens
cactgactgaaatgt

SEQ ID NO: 1125505 - DNA, 15 bp, Homo sapiens
tcactgactgaaatg

SEQ ID NO: 1125506 - DNA, 15 bp, Homo sapiens
atcactgactgaaat

SEQ ID NO: 1125507 - DNA, 15 bp, Homo sapiens
aatcactgactgaaa

SEQ ID NO: 1125508 - DNA, 15 bp, Homo sapiens
caatcactgactgaa

SEQ ID NO: 1125509 - DNA, 15 bp, Homo sapiens
tcaatcactgactga

SEQ ID NO: 1125510 - DNA, 15 bp, Homo sapiens
atcaatcactgactg

SEQ ID NO: 1125511 - DNA, 15 bp, Homo sapiens
aatcaatcactgact

SEQ ID NO: 1125512 - DNA, 15 bp, Homo sapiens
aaatcaatcactgac

SEQ ID NO: 1125513 - DNA, 15 bp, Homo sapiens
gaaatcaatcactga

SEQ ID NO: 1125514 - DNA, 15 bp, Homo sapiens
tgaaatcaatcactg

SEQ ID NO: 1125515 - DNA, 15 bp, Homo sapiens
atgaaatcaatcact

SEQ ID NO: 1125516 - DNA, 15 bp, Homo sapiens
tatgaaatcaatcac

SEQ ID NO: 1125517 - DNA, 15 bp, Homo sapiens
atatgaaatcaatca

SEQ ID NO: 1125518 - DNA, 15 bp, Homo sapiens
tatatgaaatcaatc

SEQ ID NO: 1125519 - DNA, 15 bp, Homo sapiens
atatatgaaatcaat

SEQ ID NO: 1125520 - DNA, 15 bp, Homo sapiens
catatatgaaatcaa

SEQ ID NO: 1125521 - DNA, 15 bp, Homo sapiens
tcatatatgaaatca

SEQ ID NO: 1125522 - DNA, 15 bp, Homo sapiens
atcatatatgaaatc

SEQ ID NO: 1125523 - DNA, 15 bp, Homo sapiens
catcatatatgaaat

SEQ ID NO: 1125524 - DNA, 15 bp, Homo sapiens
ccatcatatatgaaa

SEQ ID NO: 1125525 - DNA, 15 bp, Homo sapiens
accatcatatatgaa

SEQ ID NO: 1125526 - DNA, 15 bp, Homo sapiens
caccatcatatatga

SEQ ID NO: 1125527 - DNA, 15 bp, Homo sapiens
ccaccatcatatatg

SEQ ID NO: 1125528 - DNA, 15 bp, Homo sapiens
accaccatcatatat

SEQ ID NO: 1125529 - DNA, 15 bp, Homo sapiens
aaccaccatcatata

SEQ ID NO: 1125530 - DNA, 15 bp, Homo sapiens
gaaccaccatcatat

SEQ ID NO: 1125531 - DNA, 15 bp, Homo sapiens
ggaaccaccatcata

SEQ ID NO: 1125532 - DNA, 15 bp, Homo sapiens
tggaaccaccatcat

SEQ ID NO: 1125533 - DNA, 15 bp, Homo sapiens
atggaaccaccatca

SEQ ID NO: 1125534 - DNA, 15 bp, Homo sapiens
tatggaaccaccatc

SEQ ID NO: 1125535 - DNA, 15 bp, Homo sapiens
ttatggaaccaccat

SEQ ID NO: 1125536 - DNA, 15 bp, Homo sapiens
cttatggaaccacca

SEQ ID NO: 1125537 - DNA, 15 bp, Homo sapiens
tcttatggaaccacc

SEQ ID NO: 1125538 - DNA, 15 bp, Homo sapiens
atcttatggaaccac

SEQ ID NO: 1125539 - DNA, 15 bp, Homo sapiens
aatcttatggaacca

SEQ ID NO: 1125540 - DNA, 15 bp, Homo sapiens
taatcttatggaacc

SEQ ID NO: 1125541 - DNA, 15 bp, Homo sapiens
ataatcttatggaac

SEQ ID NO: 1125542 - DNA, 15 bp, Homo sapiens
tataatcttatggaa

SEQ ID NO: 1125543 - DNA, 15 bp, Homo sapiens
ttataatcttatgga

SEQ ID NO: 1125544 - DNA, 15 bp, Homo sapiens
attataatcttatgg

SEQ ID NO: 1125545 - DNA, 15 bp, Homo sapiens
cattataatcttatg

SEQ ID NO: 1125546 - DNA, 15 bp, Homo sapiens
ccattataatcttat

SEQ ID NO: 1125547 - DNA, 15 bp, Homo sapiens
tccattataatctta

SEQ ID NO: 1125548 - DNA, 15 bp, Homo sapiens
ttccattataatctt

SEQ ID NO: 1125549 - DNA, 15 bp, Homo sapiens
gttccattataatct

SEQ ID NO: 1125550 - DNA, 15 bp, Homo sapiens
tgttccattataatc

SEQ ID NO: 1125551 - DNA, 15 bp, Homo sapiens
atgttccattataat

SEQ ID NO: 1125552 - DNA, 15 bp, Homo sapiens
catgttccattataa

SEQ ID NO: 1125553 - DNA, 15 bp, Homo sapiens
acatgttccattata

SEQ ID NO: 1125554 - DNA, 15 bp, Homo sapiens
tacatgttccattat

SEQ ID NO: 1125555 - DNA, 15 bp, Homo sapiens
atacatgttccatta

SEQ ID NO: 1125556 - DNA, 15 bp, Homo sapiens
tatacatgttccatt

SEQ ID NO: 1125557 - DNA, 15 bp, Homo sapiens
ctatacatgttccat

SEQ ID NO: 1125558 - DNA, 15 bp, Homo sapiens
tctatacatgttcca

SEQ ID NO: 1125559 - DNA, 15 bp, Homo sapiens
ttctatacatgttcc

SEQ ID NO: 1125560 - DNA, 15 bp, Homo sapiens
tttctatacatgttc

SEQ ID NO: 1125561 - DNA, 15 bp, Homo sapiens
atttctatacatgtt

SEQ ID NO: 1125562 - DNA, 15 bp, Homo sapiens
gatttctatacatgt

SEQ ID NO: 1125563 - DNA, 15 bp, Homo sapiens
agatttctatacatg

SEQ ID NO: 1125564 - DNA, 15 bp, Homo sapiens
cagatttctatacat

SEQ ID NO: 1125565 - DNA, 15 bp, Homo sapiens
tcagatttctataca

SEQ ID NO: 1125566 - DNA, 15 bp, Homo sapiens
atcagatttctatac

SEQ ID NO: 1125567 - DNA, 15 bp, Homo sapiens
tatcagatttctata

SEQ ID NO: 1125568 - DNA, 15 bp, Homo sapiens
atatcagatttctat

SEQ ID NO: 1125569 - DNA, 15 bp, Homo sapiens
tatatcagatttcta

SEQ ID NO: 1125570 - DNA, 15 bp, Homo sapiens
atatatcagatttct

SEQ ID NO: 1125571 - DNA, 15 bp, Homo sapiens
catatatcagatttc

SEQ ID NO: 1125572 - DNA, 15 bp, Homo sapiens
acatatatcagattt

SEQ ID NO: 1125573 - DNA, 15 bp, Homo sapiens
gacatatatcagatt

SEQ ID NO: 1125574 - DNA, 15 bp, Homo sapiens
tgacatatatcagat

SEQ ID NO: 1125575 - DNA, 15 bp, Homo sapiens
gtgacatatatcaga

SEQ ID NO: 1125576 - DNA, 15 bp, Homo sapiens
agtgacatatatcag

SEQ ID NO: 1125577 - DNA, 15 bp, Homo sapiens
aagtgacatatatca

SEQ ID NO: 1125578 - DNA, 15 bp, Homo sapiens
caagtgacatatatc

SEQ ID NO: 1125579 - DNA, 15 bp, Homo sapiens
tcaagtgacatatat

SEQ ID NO: 1125580 - DNA, 15 bp, Homo sapiens
atcaagtgacatata

SEQ ID NO: 1125581 - DNA, 15 bp, Homo sapiens
catcaagtgacatat

SEQ ID NO: 1125582 - DNA, 15 bp, Homo sapiens
acatcaagtgacata

SEQ ID NO: 1125583 - DNA, 15 bp, Homo sapiens
aacatcaagtgacat

SEQ ID NO: 1125584 - DNA, 15 bp, Homo sapiens
caacatcaagtgaca

SEQ ID NO: 1125585 - DNA, 15 bp, Homo sapiens
ccaacatcaagtgac

SEQ ID NO: 1125586 - DNA, 15 bp, Homo sapiens
gccaacatcaagtga

SEQ ID NO: 1125587 - DNA, 15 bp, Homo sapiens
tgccaacatcaagtg

SEQ ID NO: 1125588 - DNA, 15 bp, Homo sapiens
atgccaacatcaagt

SEQ ID NO: 1125589 - DNA, 15 bp, Homo sapiens
aatgccaacatcaag

SEQ ID NO: 1125590 - DNA, 15 bp, Homo sapiens
caatgccaacatcaa

SEQ ID NO: 1125591 - DNA, 15 bp, Homo sapiens
gcaatgccaacatca

SEQ ID NO: 1125592 - DNA, 15 bp, Homo sapiens
tgcaatgccaacatc

SEQ ID NO: 1125593 - DNA, 15 bp, Homo sapiens
ctgcaatgccaacat

SEQ ID NO: 1125594 - DNA, 15 bp, Homo sapiens
tctgcaatgccaaca

SEQ ID NO: 1125595 - DNA, 15 bp, Homo sapiens
atctgcaatgccaac

SEQ ID NO: 1125596 - DNA, 15 bp, Homo sapiens
gatctgcaatgccaa

SEQ ID NO: 1125597 - DNA, 15 bp, Homo sapiens
tgatctgcaatgcca

SEQ ID NO: 1125598 - DNA, 15 bp, Homo sapiens
ttgatctgcaatgcc

SEQ ID NO: 1125599 - DNA, 15 bp, Homo sapiens
cttgatctgcaatgc

SEQ ID NO: 1125600 - DNA, 15 bp, Homo sapiens
acttgatctgcaatg

SEQ ID NO: 1125601 - DNA, 15 bp, Homo sapiens
aacttgatctgcaat

SEQ ID NO: 1125602 - DNA, 15 bp, Homo sapiens
taacttgatctgcaa

SEQ ID NO: 1125603 - DNA, 15 bp, Homo sapiens
ttaacttgatctgca

SEQ ID NO: 1125604 - DNA, 15 bp, Homo sapiens
cttaacttgatctgc

SEQ ID NO: 1125605 - DNA, 15 bp, Homo sapiens
tcttaacttgatctg

SEQ ID NO: 1125606 - DNA, 15 bp, Homo sapiens
ctcttaacttgatct

SEQ ID NO: 1125607 - DNA, 15 bp, Homo sapiens
tctcttaacttgatc

SEQ ID NO: 1125608 - DNA, 15 bp, Homo sapiens
ttctcttaacttgat

SEQ ID NO: 1125609 - DNA, 15 bp, Homo sapiens
tttctcttaacttga

SEQ ID NO: 1125610 - DNA, 15 bp, Homo sapiens
atttctcttaacttg

SEQ ID NO: 1125611 - DNA, 15 bp, Homo sapiens
catttctcttaactt

SEQ ID NO: 1125612 - DNA, 15 bp, Homo sapiens
tcatttctcttaact

SEQ ID NO: 1125613 - DNA, 15 bp, Homo sapiens
atcatttctcttaac

SEQ ID NO: 1125614 - DNA, 15 bp, Homo sapiens
aatcatttctcttaa

SEQ ID NO: 1125615 - DNA, 15 bp, Homo sapiens
caatcatttctctta

SEQ ID NO: 1125616 - DNA, 15 bp, Homo sapiens
tcaatcatttctctt

SEQ ID NO: 1125617 - DNA, 15 bp, Homo sapiens
atcaatcatttctct

SEQ ID NO: 1125618 - DNA, 15 bp, Homo sapiens
tatcaatcatttctc

SEQ ID NO: 1125619 - DNA, 15 bp, Homo sapiens
atatcaatcatttct

SEQ ID NO: 1125620 - DNA, 15 bp, Homo sapiens
aatatcaatcatttc

SEQ ID NO: 1125621 - DNA, 15 bp, Homo sapiens
aaatatcaatcattt

SEQ ID NO: 1125622 - DNA, 15 bp, Homo sapiens
taaatatcaatcatt

SEQ ID NO: 1125623 - DNA, 15 bp, Homo sapiens
ctaaatatcaatcat

SEQ ID NO: 1125624 - DNA, 15 bp, Homo sapiens
actaaatatcaatca

SEQ ID NO: 1125625 - DNA, 15 bp, Homo sapiens
tactaaatatcaatc

SEQ ID NO: 1125626 - DNA, 15 bp, Homo sapiens
ttactaaatatcaat

SEQ ID NO: 1125627 - DNA, 15 bp, Homo sapiens
attactaaatatcaa

SEQ ID NO: 1125628 - DNA, 15 bp, Homo sapiens
cattactaaatatca

SEQ ID NO: 1125629 - DNA, 15 bp, Homo sapiens
ccattactaaatatc

SEQ ID NO: 1125630 - DNA, 15 bp, Homo sapiens
accattactaaatat

SEQ ID NO: 1125631 - DNA, 15 bp, Homo sapiens
caccattactaaata

SEQ ID NO: 1125632 - DNA, 15 bp, Homo sapiens
gcaccattactaaat

SEQ ID NO: 1125633 - DNA, 15 bp, Homo sapiens
agcaccattactaaa

SEQ ID NO: 1125634 - DNA, 15 bp, Homo sapiens
tagcaccattactaa

SEQ ID NO: 1125635 - DNA, 15 bp, Homo sapiens
ctagcaccattacta

SEQ ID NO: 1125636 - DNA, 15 bp, Homo sapiens
cctagcaccattact

SEQ ID NO: 1125637 - DNA, 15 bp, Homo sapiens
tcctagcaccattac

SEQ ID NO: 1125638 - DNA, 15 bp, Homo sapiens
gtcctagcaccatta

SEQ ID NO: 1125639 - DNA, 15 bp, Homo sapiens
tgtcctagcaccatt

SEQ ID NO: 1125640 - DNA, 15 bp, Homo sapiens
atgtcctagcaccat

SEQ ID NO: 1125641 - DNA, 15 bp, Homo sapiens
aatgtcctagcacca

SEQ ID NO: 1125642 - DNA, 15 bp, Homo sapiens
aaatgtcctagcacc

SEQ ID NO: 1125643 - DNA, 15 bp, Homo sapiens
caaatgtcctagcac

SEQ ID NO: 1125644 - DNA, 15 bp, Homo sapiens
ccaaatgtcctagca

SEQ ID NO: 1125645 - DNA, 15 bp, Homo sapiens
tccaaatgtcctagc

SEQ ID NO: 1125646 - DNA, 15 bp, Homo sapiens
ttccaaatgtcctag

SEQ ID NO: 1125647 - DNA, 15 bp, Homo sapiens
tttccaaatgtccta

SEQ ID NO: 1125648 - DNA, 15 bp, Homo sapiens
atttccaaatgtcct

SEQ ID NO: 1125649 - DNA, 15 bp, Homo sapiens
tatttccaaatgtcc

SEQ ID NO: 1125650 - DNA, 15 bp, Homo sapiens
atatttccaaatgtc

SEQ ID NO: 1125651 - DNA, 15 bp, Homo sapiens
tatatttccaaatgt

SEQ ID NO: 1125652 - DNA, 15 bp, Homo sapiens
atatatttccaaatg

SEQ ID NO: 1125653 - DNA, 15 bp, Homo sapiens
tatatatttccaaat

SEQ ID NO: 1125654 - DNA, 15 bp, Homo sapiens
atatatatttccaaa

SEQ ID NO: 1125655 - DNA, 15 bp, Homo sapiens
tatatatatttccaa

SEQ ID NO: 1125656 - DNA, 15 bp, Homo sapiens
atatatatatttcca

SEQ ID NO: 1125657 - DNA, 15 bp, Homo sapiens
tatatatatatttcc

SEQ ID NO: 1125658 - DNA, 15 bp, Homo sapiens
gtatatatatatttc

SEQ ID NO: 1125659 - DNA, 15 bp, Homo sapiens
ggtatatatatattt

SEQ ID NO: 1125660 - DNA, 15 bp, Homo sapiens
tggtatatatatatt

SEQ ID NO: 1125661 - DNA, 15 bp, Homo sapiens
atggtatatatatat

SEQ ID NO: 1125662 - DNA, 15 bp, Homo sapiens
gatggtatatatata

SEQ ID NO: 1125663 - DNA, 15 bp, Homo sapiens
agatggtatatatat

SEQ ID NO: 1125664 - DNA, 15 bp, Homo sapiens
tagatggtatatata

SEQ ID NO: 1125665 - DNA, 15 bp, Homo sapiens
ttagatggtatatat

SEQ ID NO: 1125666 - DNA, 15 bp, Homo sapiens
tttagatggtatata

SEQ ID NO: 1125667 - DNA, 15 bp, Homo sapiens
atttagatggtatat

SEQ ID NO: 1125668 - DNA, 15 bp, Homo sapiens
aatttagatggtata

SEQ ID NO: 1125669 - DNA, 15 bp, Homo sapiens
aaatttagatggtat

SEQ ID NO: 1125670 - DNA, 15 bp, Homo sapiens
caaatttagatggta

SEQ ID NO: 1125671 - DNA, 15 bp, Homo sapiens
acaaatttagatggt

SEQ ID NO: 1125672 - DNA, 15 bp, Homo sapiens
cacaaatttagatgg

SEQ ID NO: 1125673 - DNA, 15 bp, Homo sapiens
acacaaatttagatg

SEQ ID NO: 1125674 - DNA, 15 bp, Homo sapiens
tacacaaatttagat

SEQ ID NO: 1125675 - DNA, 15 bp, Homo sapiens
ttacacaaatttaga

SEQ ID NO: 1125676 - DNA, 15 bp, Homo sapiens
gttacacaaatttag

SEQ ID NO: 1125677 - DNA, 15 bp, Homo sapiens
agttacacaaattta

SEQ ID NO: 1125678 - DNA, 15 bp, Homo sapiens
tagttacacaaattt

SEQ ID NO: 1125679 - DNA, 15 bp, Homo sapiens
gtagttacacaaatt

SEQ ID NO: 1125680 - DNA, 15 bp, Homo sapiens
tgtagttacacaaat

SEQ ID NO: 1125681 - DNA, 15 bp, Homo sapiens
gtgtagttacacaaa

SEQ ID NO: 1125682 - DNA, 15 bp, Homo sapiens
agtgtagttacacaa

SEQ ID NO: 1125683 - DNA, 15 bp, Homo sapiens
cagtgtagttacaca

SEQ ID NO: 1125684 - DNA, 15 bp, Homo sapiens
acagtgtagttacac

SEQ ID NO: 1125685 - DNA, 15 bp, Homo sapiens
cacagtgtagttaca

SEQ ID NO: 1125686 - DNA, 15 bp, Homo sapiens
tcacagtgtagttac

SEQ ID NO: 1125687 - DNA, 15 bp, Homo sapiens
atcacagtgtagtta

SEQ ID NO: 1125688 - DNA, 15 bp, Homo sapiens
catcacagtgtagtt

SEQ ID NO: 1125689 - DNA, 15 bp, Homo sapiens
acatcacagtgtagt

SEQ ID NO: 1125690 - DNA, 15 bp, Homo sapiens
aacatcacagtgtag

SEQ ID NO: 1125691 - DNA, 15 bp, Homo sapiens
aaacatcacagtgta

SEQ ID NO: 1125692 - DNA, 15 bp, Homo sapiens
caaacatcacagtgt

SEQ ID NO: 1125693 - DNA, 15 bp, Homo sapiens
gcaaacatcacagtg

SEQ ID NO: 1125694 - DNA, 15 bp, Homo sapiens
ggcaaacatcacagt

SEQ ID NO: 1125695 - DNA, 15 bp, Homo sapiens
tggcaaacatcacag

SEQ ID NO: 1125696 - DNA, 15 bp, Homo sapiens
ctggcaaacatcaca

SEQ ID NO: 1125697 - DNA, 15 bp, Homo sapiens
actggcaaacatcac

SEQ ID NO: 1125698 - DNA, 15 bp, Homo sapiens
cactggcaaacatca

SEQ ID NO: 1125699 - DNA, 15 bp, Homo sapiens
tcactggcaaacatc

SEQ ID NO: 1125700 - DNA, 15 bp, Homo sapiens
atcactggcaaacat

SEQ ID NO: 1125701 - DNA, 15 bp, Homo sapiens
catcactggcaaaca

SEQ ID NO: 1125702 - DNA, 15 bp, Homo sapiens
tcatcactggcaaac

SEQ ID NO: 1125703 - DNA, 15 bp, Homo sapiens
ttcatcactggcaaa

SEQ ID NO: 1125704 - DNA, 15 bp, Homo sapiens
tttcatcactggcaa

SEQ ID NO: 1125705 - DNA, 15 bp, Homo sapiens
gtttcatcactggca

SEQ ID NO: 1125706 - DNA, 15 bp, Homo sapiens
ggtttcatcactggc

SEQ ID NO: 1125707 - DNA, 15 bp, Homo sapiens
tggtttcatcactgg

SEQ ID NO: 1125708 - DNA, 15 bp, Homo sapiens
gtggtttcatcactg

SEQ ID NO: 1125709 - DNA, 15 bp, Homo sapiens
ggtggtttcatcact

SEQ ID NO: 1125710 - DNA, 15 bp, Homo sapiens
aggtggtttcatcac

SEQ ID NO: 1125711 - DNA, 15 bp, Homo sapiens
taggtggtttcatca

SEQ ID NO: 1125712 - DNA, 15 bp, Homo sapiens
ttaggtggtttcatc

SEQ ID NO: 1125713 - DNA, 15 bp, Homo sapiens
cttaggtggtttcat

SEQ ID NO: 1125714 - DNA, 15 bp, Homo sapiens
ccttaggtggtttca

SEQ ID NO: 1125715 - DNA, 15 bp, Homo sapiens
tccttaggtggtttc

SEQ ID NO: 1125716 - DNA, 15 bp, Homo sapiens
gtccttaggtggttt

SEQ ID NO: 1125717 - DNA, 15 bp, Homo sapiens
tgtccttaggtggtt

SEQ ID NO: 1125718 - DNA, 15 bp, Homo sapiens
gtgtccttaggtggt

SEQ ID NO: 1125719 - DNA, 15 bp, Homo sapiens
tgtgtccttaggtgg

SEQ ID NO: 1125720 - DNA, 15 bp, Homo sapiens
atgtgtccttaggtg

SEQ ID NO: 1125721 - DNA, 15 bp, Homo sapiens
aatgtgtccttaggt

SEQ ID NO: 1125722 - DNA, 15 bp, Homo sapiens
aaatgtgtccttagg

SEQ ID NO: 1125723 - DNA, 15 bp, Homo sapiens
gaaatgtgtccttag

SEQ ID NO: 1125724 - DNA, 15 bp, Homo sapiens
agaaatgtgtcctta

SEQ ID NO: 1125725 - DNA, 15 bp, Homo sapiens
gagaaatgtgtcctt

SEQ ID NO: 1125726 - DNA, 15 bp, Homo sapiens
tgagaaatgtgtcct

SEQ ID NO: 1125727 - DNA, 15 bp, Homo sapiens
ctgagaaatgtgtcc

SEQ ID NO: 1125728 - DNA, 15 bp, Homo sapiens
tctgagaaatgtgtc

SEQ ID NO: 1125729 - DNA, 15 bp, Homo sapiens
gttctgagaaatgtg

SEQ ID NO: 1125730 - DNA, 15 bp, Homo sapiens
cgttctgagaaatgt

SEQ ID NO: 1125731 - DNA, 15 bp, Homo sapiens
acgttctgagaaatg

SEQ ID NO: 1125732 - DNA, 15 bp, Homo sapiens
tacgttctgagaaat

SEQ ID NO: 1125733 - DNA, 15 bp, Homo sapiens
atacgttctgagaaa

SEQ ID NO: 1125734 - DNA, 15 bp, Homo sapiens
gatacgttctgagaa

SEQ ID NO: 1125735 - DNA, 15 bp, Homo sapiens
ggatacgttctgaga

SEQ ID NO: 1125736 - DNA, 15 bp, Homo sapiens
gggatacgttctgag

SEQ ID NO: 1125737 - DNA, 15 bp, Homo sapiens
ggggatacgttctga

SEQ ID NO: 1125738 - DNA, 15 bp, Homo sapiens
cggggatacgttctg

SEQ ID NO: 1125739 - DNA, 15 bp, Homo sapiens
acggggatacgttct

SEQ ID NO: 1125740 - DNA, 15 bp, Homo sapiens
gacggggatacgttc

SEQ ID NO: 1125741 - DNA, 15 bp, Homo sapiens
cgacggggatacgtt

SEQ ID NO: 1125742 - DNA, 15 bp, Homo sapiens
gcgacggggatacgt

SEQ ID NO: 1125743 - DNA, 15 bp, Homo sapiens
agcgacggggatacg

SEQ ID NO: 1125744 - DNA, 15 bp, Homo sapiens
aagcgacggggatac

SEQ ID NO: 1125745 - DNA, 15 bp, Homo sapiens
taagcgacggggata

SEQ ID NO: 1125746 - DNA, 15 bp, Homo sapiens
ctaagcgacggggat

SEQ ID NO: 1125747 - DNA, 15 bp, Homo sapiens
gctaagcgacgggga

SEQ ID NO: 1125748 - DNA, 15 bp, Homo sapiens
agctaagcgacgggg

SEQ ID NO: 1125749 - DNA, 15 bp, Homo sapiens
tagctaagcgacggg

SEQ ID NO: 1125750 - DNA, 15 bp, Homo sapiens
atagctaagcgacgg

SEQ ID NO: 1125751 - DNA, 15 bp, Homo sapiens
catagctaagcgacg

SEQ ID NO: 1125752 - DNA, 15 bp, Homo sapiens
gcatagctaagcgac

SEQ ID NO: 1125753 - DNA, 15 bp, Homo sapiens
tgcatagctaagcga

SEQ ID NO: 1125754 - DNA, 15 bp, Homo sapiens
atgcatagctaagcg

SEQ ID NO: 1125755 - DNA, 15 bp, Homo sapiens
tatgcatagctaagc

SEQ ID NO: 1125756 - DNA, 15 bp, Homo sapiens
ttatgcatagctaag

SEQ ID NO: 1125757 - DNA, 15 bp, Homo sapiens
gttatgcatagctaa

SEQ ID NO: 1125758 - DNA, 15 bp, Homo sapiens
agttatgcatagcta

SEQ ID NO: 1125759 - DNA, 15 bp, Homo sapiens
cagttatgcatagct

SEQ ID NO: 1125760 - DNA, 15 bp, Homo sapiens
acagttatgcatagc

SEQ ID NO: 1125761 - DNA, 15 bp, Homo sapiens
tacagttatgcatag

SEQ ID NO: 1125762 - DNA, 15 bp, Homo sapiens
gtacagttatgcata

SEQ ID NO: 1125763 - DNA, 15 bp, Homo sapiens
tgtacagttatgcat

SEQ ID NO: 1125764 - DNA, 15 bp, Homo sapiens
atgtacagttatgca

SEQ ID NO: 1125765 - DNA, 15 bp, Homo sapiens
aatgtacagttatgc

SEQ ID NO: 1125766 - DNA, 15 bp, Homo sapiens
aaatgtacagttatg

SEQ ID NO: 1125767 - DNA, 15 bp, Homo sapiens
taaatgtacagttat

SEQ ID NO: 1125768 - DNA, 15 bp, Homo sapiens
ttaaatgtacagtta

SEQ ID NO: 1125769 - DNA, 15 bp, Homo sapiens
tttaaatgtacagtt

SEQ ID NO: 1125770 - DNA, 15 bp, Homo sapiens
ttttaaatgtacagt

SEQ ID NO: 1125771 - DNA, 15 bp, Homo sapiens
attttaaatgtacag

SEQ ID NO: 1125772 - DNA, 15 bp, Homo sapiens
cattttaaatgtaca

SEQ ID NO: 1125773 - DNA, 15 bp, Homo sapiens
gcattttaaatgtac

SEQ ID NO: 1125774 - DNA, 15 bp, Homo sapiens
agcattttaaatgta

SEQ ID NO: 1125775 - DNA, 15 bp, Homo sapiens
tagcattttaaatgt

SEQ ID NO: 1125776 - DNA, 15 bp, Homo sapiens
atagcattttaaatg

SEQ ID NO: 1125777 - DNA, 15 bp, Homo sapiens
aatagcattttaaat

SEQ ID NO: 1125778 - DNA, 15 bp, Homo sapiens
caatagcattttaaa

SEQ ID NO: 1125779 - DNA, 15 bp, Homo sapiens
gcaatagcattttaa

SEQ ID NO: 1125780 - DNA, 15 bp, Homo sapiens
agcaatagcatttta

SEQ ID NO: 1125781 - DNA, 15 bp, Homo sapiens
cagcaatagcatttt

SEQ ID NO: 1125782 - DNA, 15 bp, Homo sapiens
gcagcaatagcattt

SEQ ID NO: 1125783 - DNA, 15 bp, Homo sapiens
ggcagcaatagcatt

SEQ ID NO: 1125784 - DNA, 15 bp, Homo sapiens
aggcagcaatagcat

SEQ ID NO: 1125785 - DNA, 15 bp, Homo sapiens
gaggcagcaatagca

SEQ ID NO: 1125786 - DNA, 15 bp, Homo sapiens
agaggcagcaatagc

SEQ ID NO: 1125787 - DNA, 15 bp, Homo sapiens
aagaggcagcaatag

SEQ ID NO: 1125788 - DNA, 15 bp, Homo sapiens
gaagaggcagcaata

SEQ ID NO: 1125789 - DNA, 15 bp, Homo sapiens
tgaagaggcagcaat

SEQ ID NO: 1125790 - DNA, 15 bp, Homo sapiens
ctgaagaggcagcaa

SEQ ID NO: 1125791 - DNA, 15 bp, Homo sapiens
actgaagaggcagca

SEQ ID NO: 1125792 - DNA, 15 bp, Homo sapiens
cactgaagaggcagc

SEQ ID NO: 1125793 - DNA, 15 bp, Homo sapiens
tcactgaagaggcag

SEQ ID NO: 1125794 - DNA, 15 bp, Homo sapiens
ttcactgaagaggca

SEQ ID NO: 1125795 - DNA, 15 bp, Homo sapiens
gttcactgaagaggc

SEQ ID NO: 1125796 - DNA, 15 bp, Homo sapiens
agttcactgaagagg

SEQ ID NO: 1125797 - DNA, 15 bp, Homo sapiens
cagttcactgaagag

SEQ ID NO: 1125798 - DNA, 15 bp, Homo sapiens
acagttcactgaaga

SEQ ID NO: 1125799 - DNA, 15 bp, Homo sapiens
gacagttcactgaag

SEQ ID NO: 1125800 - DNA, 15 bp, Homo sapiens
agacagttcactgaa

SEQ ID NO: 1125801 - DNA, 15 bp, Homo sapiens
tagacagttcactga

SEQ ID NO: 1125802 - DNA, 15 bp, Homo sapiens
atagacagttcactg

SEQ ID NO: 1125803 - DNA, 15 bp, Homo sapiens
aatagacagttcact

SEQ ID NO: 1125804 - DNA, 15 bp, Homo sapiens
gaatagacagttcac

SEQ ID NO: 1125805 - DNA, 15 bp, Homo sapiens
ggaatagacagttca

SEQ ID NO: 1125806 - DNA, 15 bp, Homo sapiens
tggaatagacagttc

SEQ ID NO: 1125807 - DNA, 15 bp, Homo sapiens
gtggaatagacagtt

SEQ ID NO: 1125808 - DNA, 15 bp, Homo sapiens
agtggaatagacagt

SEQ ID NO: 1125809 - DNA, 15 bp, Homo sapiens
aagtggaatagacag

SEQ ID NO: 1125810 - DNA, 15 bp, Homo sapiens
aaagtggaatagaca

SEQ ID NO: 1125811 - DNA, 15 bp, Homo sapiens
aaaagtggaatagac

SEQ ID NO: 1125812 - DNA, 15 bp, Homo sapiens
aaaaagtggaataga

SEQ ID NO: 1125813 - DNA, 15 bp, Homo sapiens
aaaaaagtggaatag

SEQ ID NO: 1125814 - DNA, 15 bp, Homo sapiens
gaaaaaagtggaata

SEQ ID NO: 1125815 - DNA, 15 bp, Homo sapiens
agaaaaaagtggaat

SEQ ID NO: 1125816 - DNA, 15 bp, Homo sapiens
aagaaaaaagtggaa

SEQ ID NO: 1125817 - DNA, 15 bp, Homo sapiens
aaagaaaaaagtgga

SEQ ID NO: 1125818 - DNA, 15 bp, Homo sapiens
caaagaaaaaagtgg

SEQ ID NO: 1125819 - DNA, 15 bp, Homo sapiens
acaaagaaaaaagtg

SEQ ID NO: 1125820 - DNA, 15 bp, Homo sapiens
tacaaagaaaaaagt

SEQ ID NO: 1125821 - DNA, 15 bp, Homo sapiens
atacaaagaaaaaag

SEQ ID NO: 1125822 - DNA, 15 bp, Homo sapiens
aatacaaagaaaaaa

SEQ ID NO: 1125823 - DNA, 15 bp, Homo sapiens
taatacaaagaaaaa

SEQ ID NO: 1125824 - DNA, 15 bp, Homo sapiens
ataatacaaagaaaa

SEQ ID NO: 1125825 - DNA, 15 bp, Homo sapiens
tataatacaaagaaa

SEQ ID NO: 1125826 - DNA, 15 bp, Homo sapiens
ttataatacaaagaa

SEQ ID NO: 1125827 - DNA, 15 bp, Homo sapiens
gttataatacaaaga

SEQ ID NO: 1125828 - DNA, 15 bp, Homo sapiens
cgttataatacaaag

SEQ ID NO: 1125829 - DNA, 15 bp, Homo sapiens
tcgttataatacaaa

SEQ ID NO: 1125830 - DNA, 15 bp, Homo sapiens
ttcgttataatacaa

SEQ ID NO: 1125831 - DNA, 15 bp, Homo sapiens
tttcgttataataca

SEQ ID NO: 1125832 - DNA, 15 bp, Homo sapiens
ttttcgttataatac

SEQ ID NO: 1125833 - DNA, 15 bp, Homo sapiens
attttcgttataata

SEQ ID NO: 1125834 - DNA, 15 bp, Homo sapiens
tattttcgttataat

SEQ ID NO: 1125835 - DNA, 15 bp, Homo sapiens
atattttcgttataa

SEQ ID NO: 1125836 - DNA, 15 bp, Homo sapiens
aatattttcgttata

SEQ ID NO: 1125837 - DNA, 15 bp, Homo sapiens
taatattttcgttat

SEQ ID NO: 1125838 - DNA, 15 bp, Homo sapiens
ataatattttcgtta

SEQ ID NO: 1125839 - DNA, 15 bp, Homo sapiens
aataatattttcgtt

SEQ ID NO: 1125840 - DNA, 15 bp, Homo sapiens
caataatattttcgt

SEQ ID NO: 1125841 - DNA, 15 bp, Homo sapiens
acaataatattttcg

SEQ ID NO: 1125842 - DNA, 15 bp, Homo sapiens
cacaataatattttc

SEQ ID NO: 1125843 - DNA, 15 bp, Homo sapiens
acacaataatatttt

SEQ ID NO: 1125844 - DNA, 15 bp, Homo sapiens
gacacaataatattt

SEQ ID NO: 1125845 - DNA, 15 bp, Homo sapiens
ggacacaataatatt

SEQ ID NO: 1125846 - DNA, 15 bp, Homo sapiens
aggacacaataatat

SEQ ID NO: 1125847 - DNA, 15 bp, Homo sapiens
aaggacacaataata

SEQ ID NO: 1125848 - DNA, 15 bp, Homo sapiens
taaggacacaataat

SEQ ID NO: 1125849 - DNA, 15 bp, Homo sapiens
ttaaggacacaataa

SEQ ID NO: 1125850 - DNA, 15 bp, Homo sapiens
cttaaggacacaata

SEQ ID NO: 1125851 - DNA, 15 bp, Homo sapiens
acttaaggacacaat

SEQ ID NO: 1125852 - DNA, 15 bp, Homo sapiens
aacttaaggacacaa

SEQ ID NO: 1125853 - DNA, 15 bp, Homo sapiens
gaacttaaggacaca

SEQ ID NO: 1125854 - DNA, 15 bp, Homo sapiens
agaacttaaggacac

SEQ ID NO: 1125855 - DNA, 15 bp, Homo sapiens
gagaacttaaggaca

SEQ ID NO: 1125856 - DNA, 15 bp, Homo sapiens
ggagaacttaaggac

SEQ ID NO: 1125857 - DNA, 15 bp, Homo sapiens
tggagaacttaagga

SEQ ID NO: 1125858 - DNA, 15 bp, Homo sapiens
ctggagaacttaagg

SEQ ID NO: 1125859 - DNA, 15 bp, Homo sapiens
tctggagaacttaag

SEQ ID NO: 1125860 - DNA, 15 bp, Homo sapiens
gtctggagaacttaa

SEQ ID NO: 1125861 - DNA, 15 bp, Homo sapiens
tgtctggagaactta

SEQ ID NO: 1125862 - DNA, 15 bp, Homo sapiens
gtgtctggagaactt

SEQ ID NO: 1125863 - DNA, 15 bp, Homo sapiens
agtgtctggagaact

SEQ ID NO: 1125864 - DNA, 15 bp, Homo sapiens
tagtgtctggagaac

SEQ ID NO: 1125865 - DNA, 15 bp, Homo sapiens
ttagtgtctggagaa

SEQ ID NO: 1125866 - DNA, 15 bp, Homo sapiens
tttagtgtctggaga

SEQ ID NO: 1125867 - DNA, 15 bp, Homo sapiens
atttagtgtctggag

SEQ ID NO: 1125868 - DNA, 15 bp, Homo sapiens
tatttagtgtctgga

SEQ ID NO: 1125869 - DNA, 15 bp, Homo sapiens
atatttagtgtctgg

SEQ ID NO: 1125870 - DNA, 15 bp, Homo sapiens
tatatttagtgtctg

SEQ ID NO: 1125871 - DNA, 15 bp, Homo sapiens
ctatatttagtgtct

SEQ ID NO: 1125872 - DNA, 15 bp, Homo sapiens
cctatatttagtgtc

SEQ ID NO: 1125873 - DNA, 15 bp, Homo sapiens
tcctatatttagtgt

SEQ ID NO: 1125874 - DNA, 15 bp, Homo sapiens
ttcctatatttagtg

SEQ ID NO: 1125875 - DNA, 15 bp, Homo sapiens
attcctatatttagt

SEQ ID NO: 1125876 - DNA, 15 bp, Homo sapiens
tattcctatatttag

SEQ ID NO: 1125877 - DNA, 15 bp, Homo sapiens
ttattcctatattta

SEQ ID NO: 1125878 - DNA, 15 bp, Homo sapiens
attattcctatattt

SEQ ID NO: 1125879 - DNA, 15 bp, Homo sapiens
tattattcctatatt

SEQ ID NO: 1125880 - DNA, 15 bp, Homo sapiens
ttattattcctatat

SEQ ID NO: 1125881 - DNA, 15 bp, Homo sapiens
gttattattcctata

SEQ ID NO: 1125882 - DNA, 15 bp, Homo sapiens
tgttattattcctat

SEQ ID NO: 1125883 - DNA, 15 bp, Homo sapiens
ctgttattattccta

SEQ ID NO: 1125884 - DNA, 15 bp, Homo sapiens
cctgttattattcct

SEQ ID NO: 1125885 - DNA, 15 bp, Homo sapiens
ccctgttattattcc

SEQ ID NO: 1125886 - DNA, 15 bp, Homo sapiens
gccctgttattattc

SEQ ID NO: 1125887 - DNA, 15 bp, Homo sapiens
agccctgttattatt

SEQ ID NO: 1125888 - DNA, 15 bp, Homo sapiens
aagccctgttattat

SEQ ID NO: 1125889 - DNA, 15 bp, Homo sapiens
caagccctgttatta

SEQ ID NO: 1125890 - DNA, 15 bp, Homo sapiens
tcaagccctgttatt

SEQ ID NO: 1125891 - DNA, 15 bp, Homo sapiens
ttcaagccctgttat

SEQ ID NO: 1125892 - DNA, 15 bp, Homo sapiens
tttcaagccctgtta

SEQ ID NO: 1125893 - DNA, 15 bp, Homo sapiens
atttcaagccctgtt

SEQ ID NO: 1125894 - DNA, 15 bp, Homo sapiens
aatttcaagccctgt

SEQ ID NO: 1125895 - DNA, 15 bp, Homo sapiens
taatttcaagccctg

SEQ ID NO: 1125896 - DNA, 15 bp, Homo sapiens
ttaatttcaagccct

SEQ ID NO: 1125897 - DNA, 15 bp, Homo sapiens
cttaatttcaagccc

SEQ ID NO: 1125898 - DNA, 15 bp, Homo sapiens
tcttaatttcaagcc

SEQ ID NO: 1125899 - DNA, 15 bp, Homo sapiens
ctcttaatttcaagc

SEQ ID NO: 1125900 - DNA, 15 bp, Homo sapiens
tctcttaatttcaag

SEQ ID NO: 1125901 - DNA, 15 bp, Homo sapiens
ctctcttaatttcaa

SEQ ID NO: 1125902 - DNA, 15 bp, Homo sapiens
tctctcttaatttca

SEQ ID NO: 1125903 - DNA, 15 bp, Homo sapiens
ctctctcttaatttc

SEQ ID NO: 1125904 - DNA, 15 bp, Homo sapiens
gctctctcttaattt

SEQ ID NO: 1125905 - DNA, 15 bp, Homo sapiens
tgctctctcttaatt

SEQ ID NO: 1125906 - DNA, 15 bp, Homo sapiens
ctgctctctcttaat

SEQ ID NO: 1125907 - DNA, 15 bp, Homo sapiens
actgctctctcttaa

SEQ ID NO: 1125908 - DNA, 15 bp, Homo sapiens
gactgctctctctta

SEQ ID NO: 1125909 - DNA, 15 bp, Homo sapiens
ggactgctctctctt

SEQ ID NO: 1125910 - DNA, 15 bp, Homo sapiens
aggactgctctctct

SEQ ID NO: 1125911 - DNA, 15 bp, Homo sapiens
taggactgctctctc

SEQ ID NO: 1125912 - DNA, 15 bp, Homo sapiens
ttaggactgctctct

SEQ ID NO: 1125913 - DNA, 15 bp, Homo sapiens
cttaggactgctctc

SEQ ID NO: 1125914 - DNA, 15 bp, Homo sapiens
tcttaggactgctct

SEQ ID NO: 1125915 - DNA, 15 bp, Homo sapiens
ttcttaggactgctc

SEQ ID NO: 1125916 - DNA, 15 bp, Homo sapiens
tttcttaggactgct

SEQ ID NO: 1125917 - DNA, 15 bp, Homo sapiens
gtttcttaggactgc

SEQ ID NO: 1125918 - DNA, 15 bp, Homo sapiens
agtttcttaggactg

SEQ ID NO: 1125919 - DNA, 15 bp, Homo sapiens
tagtttcttaggact

SEQ ID NO: 1125920 - DNA, 15 bp, Homo sapiens
ttagtttcttaggac

SEQ ID NO: 1125921 - DNA, 15 bp, Homo sapiens
cttagtttcttagga

SEQ ID NO: 1125922 - DNA, 15 bp, Homo sapiens
tcttagtttcttagg

SEQ ID NO: 1125923 - DNA, 15 bp, Homo sapiens
ttcttagtttcttag

SEQ ID NO: 1125924 - DNA, 15 bp, Homo sapiens
tttcttagtttctta

SEQ ID NO: 1125925 - DNA, 15 bp, Homo sapiens
ttttcttagtttctt

SEQ ID NO: 1125926 - DNA, 15 bp, Homo sapiens
tttttcttagtttct

SEQ ID NO: 1125927 - DNA, 15 bp, Homo sapiens
atttttcttagtttc

SEQ ID NO: 1125928 - DNA, 15 bp, Homo sapiens
catttttcttagttt

SEQ ID NO: 1125929 - DNA, 15 bp, Homo sapiens
tcatttttcttagtt

SEQ ID NO: 1125930 - DNA, 15 bp, Homo sapiens
ctcatttttcttagt

SEQ ID NO: 1125931 - DNA, 15 bp, Homo sapiens
actcatttttcttag

SEQ ID NO: 1125932 - DNA, 15 bp, Homo sapiens
tactcatttttctta

SEQ ID NO: 1125933 - DNA, 15 bp, Homo sapiens
atactcatttttctt

SEQ ID NO: 1125934 - DNA, 15 bp, Homo sapiens
aatactcatttttct

SEQ ID NO: 1125935 - DNA, 15 bp, Homo sapiens
taatactcatttttc

SEQ ID NO: 1125936 - DNA, 15 bp, Homo sapiens
ctaatactcattttt

SEQ ID NO: 1125937 - DNA, 15 bp, Homo sapiens
actaatactcatttt

SEQ ID NO: 1125938 - DNA, 15 bp, Homo sapiens
tactaatactcattt

SEQ ID NO: 1125939 - DNA, 15 bp, Homo sapiens
ttactaatactcatt

SEQ ID NO: 1125940 - DNA, 15 bp, Homo sapiens
attactaatactcat

SEQ ID NO: 1125941 - DNA, 15 bp, Homo sapiens
aattactaatactca

SEQ ID NO: 1125942 - DNA, 15 bp, Homo sapiens
caattactaatactc

SEQ ID NO: 1125943 - DNA, 15 bp, Homo sapiens
gcaattactaatact

SEQ ID NO: 1125944 - DNA, 15 bp, Homo sapiens
ggcaattactaatac

SEQ ID NO: 1125945 - DNA, 15 bp, Homo sapiens
tggcaattactaata

SEQ ID NO: 1125946 - DNA, 15 bp, Homo sapiens
atggcaattactaat

SEQ ID NO: 1125947 - DNA, 15 bp, Homo sapiens
aatggcaattactaa

SEQ ID NO: 1125948 - DNA, 15 bp, Homo sapiens
aaatggcaattacta

SEQ ID NO: 1125949 - DNA, 15 bp, Homo sapiens
taaatggcaattact

SEQ ID NO: 1125950 - DNA, 15 bp, Homo sapiens
ataaatggcaattac

SEQ ID NO: 1125951 - DNA, 15 bp, Homo sapiens
aataaatggcaatta

SEQ ID NO: 1125952 - DNA, 15 bp, Homo sapiens
aaataaatggcaatt

SEQ ID NO: 1125953 - DNA, 15 bp, Homo sapiens
taaataaatggcaat

SEQ ID NO: 1125954 - DNA, 15 bp, Homo sapiens
ataaataaatggcaa

SEQ ID NO: 1125955 - DNA, 15 bp, Homo sapiens
gataaataaatggca

SEQ ID NO: 1125956 - DNA, 15 bp, Homo sapiens
tgataaataaatggc

SEQ ID NO: 1125957 - DNA, 15 bp, Homo sapiens
gtgataaataaatgg

SEQ ID NO: 1125958 - DNA, 15 bp, Homo sapiens
tgtgataaataaatg

SEQ ID NO: 1125959 - DNA, 15 bp, Homo sapiens
atgtgataaataaat

SEQ ID NO: 1125960 - DNA, 15 bp, Homo sapiens
tatgtgataaataaa

SEQ ID NO: 1125961 - DNA, 15 bp, Homo sapiens
atatgtgataaataa

SEQ ID NO: 1125962 - DNA, 15 bp, Homo sapiens
aatatgtgataaata

SEQ ID NO: 1125963 - DNA, 15 bp, Homo sapiens
taatatgtgataaat

SEQ ID NO: 1125964 - DNA, 15 bp, Homo sapiens
ataatatgtgataaa

SEQ ID NO: 1125965 - DNA, 15 bp, Homo sapiens
cataatatgtgataa

SEQ ID NO: 1125966 - DNA, 15 bp, Homo sapiens
acataatatgtgata

SEQ ID NO: 1125967 - DNA, 15 bp, Homo sapiens
cacataatatgtgat

SEQ ID NO: 1125968 - DNA, 15 bp, Homo sapiens
acacataatatgtga

SEQ ID NO: 1125969 - DNA, 15 bp, Homo sapiens
gacacataatatgtg

SEQ ID NO: 1125970 - DNA, 15 bp, Homo sapiens
tgacacataatatgt

SEQ ID NO: 1125971 - DNA, 15 bp, Homo sapiens
ctgacacataatatg

SEQ ID NO: 1125972 - DNA, 15 bp, Homo sapiens
tctgacacataatat

SEQ ID NO: 1125973 - DNA, 15 bp, Homo sapiens
atctgacacataata

SEQ ID NO: 1125974 - DNA, 15 bp, Homo sapiens
tatctgacacataat

SEQ ID NO: 1125975 - DNA, 15 bp, Homo sapiens
gtatctgacacataa

SEQ ID NO: 1125976 - DNA, 15 bp, Homo sapiens
agtatctgacacata

SEQ ID NO: 1125977 - DNA, 15 bp, Homo sapiens
aagtatctgacacat

SEQ ID NO: 1125978 - DNA, 15 bp, Homo sapiens
aaagtatctgacaca

SEQ ID NO: 1125979 - DNA, 15 bp, Homo sapiens
taaagtatctgacac

SEQ ID NO: 1125980 - DNA, 15 bp, Homo sapiens
ataaagtatctgaca

SEQ ID NO: 1125981 - DNA, 15 bp, Homo sapiens
aataaagtatctgac

SEQ ID NO: 1125982 - DNA, 15 bp, Homo sapiens
taataaagtatctga

SEQ ID NO: 1125983 - DNA, 15 bp, Homo sapiens
ttaataaagtatctg

SEQ ID NO: 1125984 - DNA, 15 bp, Homo sapiens
tttaataaagtatct

SEQ ID NO: 1125985 - DNA, 15 bp, Homo sapiens
ttttaataaagtatc

SEQ ID NO: 1125986 - DNA, 15 bp, Homo sapiens
attttaataaagtat

SEQ ID NO: 1125987 - DNA, 15 bp, Homo sapiens
cattttaataaagta

SEQ ID NO: 1125988 - DNA, 15 bp, Homo sapiens
tcattttaataaagt

SEQ ID NO: 1125989 - DNA, 15 bp, Homo sapiens
atcattttaataaag

SEQ ID NO: 1125990 - DNA, 15 bp, Homo sapiens
aatcattttaataaa

SEQ ID NO: 1125991 - DNA, 15 bp, Homo sapiens
taatcattttaataa

SEQ ID NO: 1125992 - DNA, 15 bp, Homo sapiens
gtaatcattttaata

SEQ ID NO: 1125993 - DNA, 15 bp, Homo sapiens
agtaatcattttaat

SEQ ID NO: 1125994 - DNA, 15 bp, Homo sapiens
aagtaatcattttaa

SEQ ID NO: 1125995 - DNA, 15 bp, Homo sapiens
taagtaatcatttta

SEQ ID NO: 1125996 - DNA, 15 bp, Homo sapiens
ataagtaatcatttt

SEQ ID NO: 1125997 - DNA, 15 bp, Homo sapiens
aataagtaatcattt

SEQ ID NO: 1125998 - DNA, 15 bp, Homo sapiens
caataagtaatcatt

SEQ ID NO: 1125999 - DNA, 15 bp, Homo sapiens
acaataagtaatcat

SEQ ID NO: 1126000 - DNA, 15 bp, Homo sapiens
gacaataagtaatca

SEQ ID NO: 1126001 - DNA, 15 bp, Homo sapiens
tgacaataagtaatc

SEQ ID NO: 1126002 - DNA, 15 bp, Homo sapiens
gtgacaataagtaat

SEQ ID NO: 1126003 - DNA, 15 bp, Homo sapiens
tgtgacaataagtaa

SEQ ID NO: 1126004 - DNA, 15 bp, Homo sapiens
ttgtgacaataagta

SEQ ID NO: 1126005 - DNA, 15 bp, Homo sapiens
attgtgacaataagt

SEQ ID NO: 1126006 - DNA, 15 bp, Homo sapiens
cattgtgacaataag

SEQ ID NO: 1126007 - DNA, 15 bp, Homo sapiens
tcattgtgacaataa

SEQ ID NO: 1126008 - DNA, 15 bp, Homo sapiens
gtcattgtgacaata

SEQ ID NO: 1126009 - DNA, 15 bp, Homo sapiens
ggtcattgtgacaat

SEQ ID NO: 1126010 - DNA, 15 bp, Homo sapiens
gggtcattgtgacaa

SEQ ID NO: 1126011 - DNA, 15 bp, Homo sapiens
ggggtcattgtgaca

SEQ ID NO: 1126012 - DNA, 15 bp, Homo sapiens
gggggtcattgtgac

SEQ ID NO: 1126013 - DNA, 15 bp, Homo sapiens
tgggggtcattgtga

SEQ ID NO: 1126014 - DNA, 15 bp, Homo sapiens
ttgggggtcattgtg

SEQ ID NO: 1126015 - DNA, 15 bp, Homo sapiens
tttgggggtcattgt

SEQ ID NO: 1126016 - DNA, 15 bp, Homo sapiens
ctttgggggtcattg

SEQ ID NO: 1126017 - DNA, 15 bp, Homo sapiens
cctttgggggtcatt

SEQ ID NO: 1126018 - DNA, 15 bp, Homo sapiens
acctttgggggtcat

SEQ ID NO: 1126019 - DNA, 15 bp, Homo sapiens
tacctttgggggtca

SEQ ID NO: 1126020 - DNA, 15 bp, Homo sapiens
gtacctttgggggtc

SEQ ID NO: 1126021 - DNA, 15 bp, Homo sapiens
tgtacctttgggggt

SEQ ID NO: 1126022 - DNA, 15 bp, Homo sapiens
atgtacctttggggg

SEQ ID NO: 1126023 - DNA, 15 bp, Homo sapiens
tatgtacctttgggg

SEQ ID NO: 1126024 - DNA, 15 bp, Homo sapiens
ctatgtacctttggg

SEQ ID NO: 1126025 - DNA, 15 bp, Homo sapiens
cctatgtacctttgg

SEQ ID NO: 1126026 - DNA, 15 bp, Homo sapiens
gcctatgtacctttg

SEQ ID NO: 1126027 - DNA, 15 bp, Homo sapiens
ggcctatgtaccttt

SEQ ID NO: 1126028 - DNA, 15 bp, Homo sapiens
gggcctatgtacctt

SEQ ID NO: 1126029 - DNA, 15 bp, Homo sapiens
tgggcctatgtacct

SEQ ID NO: 1126030 - DNA, 15 bp, Homo sapiens
atgggcctatgtacc

SEQ ID NO: 1126031 - DNA, 15 bp, Homo sapiens
aatgggcctatgtac

SEQ ID NO: 1126032 - DNA, 15 bp, Homo sapiens
aaatgggcctatgta

SEQ ID NO: 1126033 - DNA, 15 bp, Homo sapiens
caaatgggcctatgt

SEQ ID NO: 1126034 - DNA, 15 bp, Homo sapiens
tcaaatgggcctatg

SEQ ID NO: 1126035 - DNA, 15 bp, Homo sapiens
gtcaaatgggcctat

SEQ ID NO: 1126036 - DNA, 15 bp, Homo sapiens
tgtcaaatgggccta

SEQ ID NO: 1126037 - DNA, 15 bp, Homo sapiens
ttgtcaaatgggcct

SEQ ID NO: 1126038 - DNA, 15 bp, Homo sapiens
tttgtcaaatgggcc

SEQ ID NO: 1126039 - DNA, 15 bp, Homo sapiens
gtttgtcaaatgggc

SEQ ID NO: 1126040 - DNA, 15 bp, Homo sapiens
tgtttgtcaaatggg

SEQ ID NO: 1126041 - DNA, 15 bp, Homo sapiens
ttgtttgtcaaatgg

SEQ ID NO: 1126042 - DNA, 15 bp, Homo sapiens
cttgtttgtcaaatg

SEQ ID NO: 1126043 - DNA, 15 bp, Homo sapiens
ccttgtttgtcaaat

SEQ ID NO: 1126044 - DNA, 15 bp, Homo sapiens
tccttgtttgtcaaa

SEQ ID NO: 1126045 - DNA, 15 bp, Homo sapiens
ttccttgtttgtcaa

SEQ ID NO: 1126046 - DNA, 15 bp, Homo sapiens
cttccttgtttgtca

SEQ ID NO: 1126047 - DNA, 15 bp, Homo sapiens
gcttccttgtttgtc

SEQ ID NO: 1126048 - DNA, 15 bp, Homo sapiens
tgcttccttgtttgt

SEQ ID NO: 1126049 - DNA, 15 bp, Homo sapiens
ctgcttccttgtttg

SEQ ID NO: 1126050 - DNA, 15 bp, Homo sapiens
tctgcttccttgttt

SEQ ID NO: 1126051 - DNA, 15 bp, Homo sapiens
ctctgcttccttgtt

SEQ ID NO: 1126052 - DNA, 15 bp, Homo sapiens
tctctgcttccttgt

SEQ ID NO: 1126053 - DNA, 15 bp, Homo sapiens
ctctctgcttccttg

SEQ ID NO: 1126054 - DNA, 15 bp, Homo sapiens
actctctgcttcctt

SEQ ID NO: 1126055 - DNA, 15 bp, Homo sapiens
gactctctgcttcct

SEQ ID NO: 1126056 - DNA, 15 bp, Homo sapiens
tgactctctgcttcc

SEQ ID NO: 1126057 - DNA, 15 bp, Homo sapiens
ctgactctctgcttc

SEQ ID NO: 1126058 - DNA, 15 bp, Homo sapiens
tctgactctctgctt

SEQ ID NO: 1126059 - DNA, 15 bp, Homo sapiens
ctctgactctctgct

SEQ ID NO: 1126060 - DNA, 15 bp, Homo sapiens
tctctgactctctgc

SEQ ID NO: 1126061 - DNA, 15 bp, Homo sapiens
ctctctgactctctg

SEQ ID NO: 1126062 - DNA, 15 bp, Homo sapiens
tctctctgactctct

SEQ ID NO: 1126063 - DNA, 15 bp, Homo sapiens
atctctctgactctc

SEQ ID NO: 1126064 - DNA, 15 bp, Homo sapiens
catctctctgactct

SEQ ID NO: 1126065 - DNA, 15 bp, Homo sapiens
ccatctctctgactc

SEQ ID NO: 1126066 - DNA, 15 bp, Homo sapiens
tccatctctctgact

SEQ ID NO: 1126067 - DNA, 15 bp, Homo sapiens
ttccatctctctgac

SEQ ID NO: 1126068 - DNA, 15 bp, Homo sapiens
tttccatctctctga

SEQ ID NO: 1126069 - DNA, 15 bp, Homo sapiens
gtttccatctctctg

SEQ ID NO: 1126070 - DNA, 15 bp, Homo sapiens
agtttccatctctct

SEQ ID NO: 1126071 - DNA, 15 bp, Homo sapiens
aagtttccatctctc

SEQ ID NO: 1126072 - DNA, 15 bp, Homo sapiens
caagtttccatctct

SEQ ID NO: 1126073 - DNA, 15 bp, Homo sapiens
acaagtttccatctc

SEQ ID NO: 1126074 - DNA, 15 bp, Homo sapiens
gacaagtttccatct

SEQ ID NO: 1126075 - DNA, 15 bp, Homo sapiens
agacaagtttccatc

SEQ ID NO: 1126076 - DNA, 15 bp, Homo sapiens
tagacaagtttccat

SEQ ID NO: 1126077 - DNA, 15 bp, Homo sapiens
ctagacaagtttcca

SEQ ID NO: 1126078 - DNA, 15 bp, Homo sapiens
cctagacaagtttcc

SEQ ID NO: 1126079 - DNA, 15 bp, Homo sapiens
ccctagacaagtttc

SEQ ID NO: 1126080 - DNA, 15 bp, Homo sapiens
accctagacaagttt

SEQ ID NO: 1126081 - DNA, 15 bp, Homo sapiens
gaccctagacaagtt

SEQ ID NO: 1126082 - DNA, 15 bp, Homo sapiens
tgaccctagacaagt

SEQ ID NO: 1126083 - DNA, 15 bp, Homo sapiens
atgaccctagacaag

SEQ ID NO: 1126084 - DNA, 15 bp, Homo sapiens
aatgaccctagacaa

SEQ ID NO: 1126085 - DNA, 15 bp, Homo sapiens
gaatgaccctagaca

SEQ ID NO: 1126086 - DNA, 15 bp, Homo sapiens
tgaatgaccctagac

SEQ ID NO: 1126087 - DNA, 15 bp, Homo sapiens
atgaatgaccctaga

SEQ ID NO: 1126088 - DNA, 15 bp, Homo sapiens
gatgaatgaccctag

SEQ ID NO: 1126089 - DNA, 15 bp, Homo sapiens
tgatgaatgacccta

SEQ ID NO: 1126090 - DNA, 15 bp, Homo sapiens
ctgatgaatgaccct

SEQ ID NO: 1126091 - DNA, 15 bp, Homo sapiens
cctgatgaatgaccc

SEQ ID NO: 1126092 - DNA, 15 bp, Homo sapiens
acctgatgaatgacc

SEQ ID NO: 1126093 - DNA, 15 bp, Homo sapiens
tacctgatgaatgac

SEQ ID NO: 1126094 - DNA, 15 bp, Homo sapiens
ttacctgatgaatga

SEQ ID NO: 1126095 - DNA, 15 bp, Homo sapiens
tttacctgatgaatg

SEQ ID NO: 1126096 - DNA, 15 bp, Homo sapiens
atttacctgatgaat

SEQ ID NO: 1126097 - DNA, 15 bp, Homo sapiens
catttacctgatgaa

SEQ ID NO: 1126098 - DNA, 15 bp, Homo sapiens
tcatttacctgatga

SEQ ID NO: 1126099 - DNA, 15 bp, Homo sapiens
gtcatttacctgatg

SEQ ID NO: 1126100 - DNA, 15 bp, Homo sapiens
ggtcatttacctgat

SEQ ID NO: 1126101 - DNA, 15 bp, Homo sapiens
tggtcatttacctga

SEQ ID NO: 1126102 - DNA, 15 bp, Homo sapiens
ttggtcatttacctg

SEQ ID NO: 1126103 - DNA, 15 bp, Homo sapiens
cttggtcatttacct

SEQ ID NO: 1126104 - DNA, 15 bp, Homo sapiens
acttggtcatttacc

SEQ ID NO: 1126105 - DNA, 15 bp, Homo sapiens
gacttggtcatttac

SEQ ID NO: 1126106 - DNA, 15 bp, Homo sapiens
tgacttggtcattta

SEQ ID NO: 1126107 - DNA, 15 bp, Homo sapiens
ctgacttggtcattt

SEQ ID NO: 1126108 - DNA, 15 bp, Homo sapiens
cctgacttggtcatt

SEQ ID NO: 1126109 - DNA, 15 bp, Homo sapiens
tcctgacttggtcat

SEQ ID NO: 1126110 - DNA, 15 bp, Homo sapiens
atcctgacttggtca

SEQ ID NO: 1126111 - DNA, 15 bp, Homo sapiens
aatcctgacttggtc

SEQ ID NO: 1126112 - DNA, 15 bp, Homo sapiens
caatcctgacttggt

SEQ ID NO: 1126113 - DNA, 15 bp, Homo sapiens
tcaatcctgacttgg

SEQ ID NO: 1126114 - DNA, 15 bp, Homo sapiens
ttcaatcctgacttg

SEQ ID NO: 1126115 - DNA, 15 bp, Homo sapiens
attcaatcctgactt

SEQ ID NO: 1126116 - DNA, 15 bp, Homo sapiens
gattcaatcctgact

SEQ ID NO: 1126117 - DNA, 15 bp, Homo sapiens
ggattcaatcctgac

SEQ ID NO: 1126118 - DNA, 15 bp, Homo sapiens
tggattcaatcctga

SEQ ID NO: 1126119 - DNA, 15 bp, Homo sapiens
ctggattcaatcctg

SEQ ID NO: 1126120 - DNA, 15 bp, Homo sapiens
cctggattcaatcct

SEQ ID NO: 1126121 - DNA, 15 bp, Homo sapiens
acctggattcaatcc

SEQ ID NO: 1126122 - DNA, 15 bp, Homo sapiens
cacctggattcaatc

SEQ ID NO: 1126123 - DNA, 15 bp, Homo sapiens
acacctggattcaat

SEQ ID NO: 1126124 - DNA, 15 bp, Homo sapiens
cacacctggattcaa

SEQ ID NO: 1126125 - DNA, 15 bp, Homo sapiens
acacacctggattca

SEQ ID NO: 1126126 - DNA, 15 bp, Homo sapiens
aacacacctggattc

SEQ ID NO: 1126127 - DNA, 15 bp, Homo sapiens
caacacacctggatt

SEQ ID NO: 1126128 - DNA, 15 bp, Homo sapiens
ccaacacacctggat

SEQ ID NO: 1126129 - DNA, 15 bp, Homo sapiens
cccaacacacctgga

SEQ ID NO: 1126130 - DNA, 15 bp, Homo sapiens
acccaacacacctgg

SEQ ID NO: 1126131 - DNA, 15 bp, Homo sapiens
aacccaacacacctg

SEQ ID NO: 1126132 - DNA, 15 bp, Homo sapiens
gaacccaacacacct

SEQ ID NO: 1126133 - DNA, 15 bp, Homo sapiens
ggaacccaacacacc

SEQ ID NO: 1126134 - DNA, 15 bp, Homo sapiens
tggaacccaacacac

SEQ ID NO: 1126135 - DNA, 15 bp, Homo sapiens
ttggaacccaacaca

SEQ ID NO: 1126136 - DNA, 15 bp, Homo sapiens
tttggaacccaacac

SEQ ID NO: 1126137 - DNA, 15 bp, Homo sapiens
ctttggaacccaaca

SEQ ID NO: 1126138 - DNA, 15 bp, Homo sapiens
gctttggaacccaac

SEQ ID NO: 1126139 - DNA, 15 bp, Homo sapiens
ggctttggaacccaa

SEQ ID NO: 1126140 - DNA, 15 bp, Homo sapiens
gggctttggaaccca

SEQ ID NO: 1126141 - DNA, 15 bp, Homo sapiens
tgggctttggaaccc

SEQ ID NO: 1126142 - DNA, 15 bp, Homo sapiens
atgggctttggaacc

SEQ ID NO: 1126143 - DNA, 15 bp, Homo sapiens
catgggctttggaac

SEQ ID NO: 1126144 - DNA, 15 bp, Homo sapiens
gcatgggctttggaa

SEQ ID NO: 1126145 - DNA, 15 bp, Homo sapiens
agcatgggctttgga

SEQ ID NO: 1126146 - DNA, 15 bp, Homo sapiens
gagcatgggctttgg

SEQ ID NO: 1126147 - DNA, 15 bp, Homo sapiens
agagcatgggctttg

SEQ ID NO: 1126148 - DNA, 15 bp, Homo sapiens
aagagcatgggcttt

SEQ ID NO: 1126149 - DNA, 15 bp, Homo sapiens
aaagagcatgggctt

SEQ ID NO: 1126150 - DNA, 15 bp, Homo sapiens
aaaagagcatgggct

SEQ ID NO: 1126151 - DNA, 15 bp, Homo sapiens
gaaaagagcatgggc

SEQ ID NO: 1126152 - DNA, 15 bp, Homo sapiens
tgaaaagagcatggg

SEQ ID NO: 1126153 - DNA, 15 bp, Homo sapiens
gtgaaaagagcatgg

SEQ ID NO: 1126154 - DNA, 15 bp, Homo sapiens
agtgaaaagagcatg

SEQ ID NO: 1126155 - DNA, 15 bp, Homo sapiens
gagtgaaaagagcat

SEQ ID NO: 1126156 - DNA, 15 bp, Homo sapiens
agagtgaaaagagca

SEQ ID NO: 1126157 - DNA, 15 bp, Homo sapiens
cagagtgaaaagagc

SEQ ID NO: 1126158 - DNA, 15 bp, Homo sapiens
acagagtgaaaagag

SEQ ID NO: 1126159 - DNA, 15 bp, Homo sapiens
gacagagtgaaaaga

SEQ ID NO: 1126160 - DNA, 15 bp, Homo sapiens
agacagagtgaaaag

SEQ ID NO: 1126161 - DNA, 15 bp, Homo sapiens
gagacagagtgaaaa

SEQ ID NO: 1126162 - DNA, 15 bp, Homo sapiens
tgagacagagtgaaa

SEQ ID NO: 1126163 - DNA, 15 bp, Homo sapiens
ttgagacagagtgaa

SEQ ID NO: 1126164 - DNA, 15 bp, Homo sapiens
tttgagacagagtga

SEQ ID NO: 1126165 - DNA, 15 bp, Homo sapiens
ttttgagacagagtg

SEQ ID NO: 1126166 - DNA, 15 bp, Homo sapiens
attttgagacagagt

SEQ ID NO: 1126167 - DNA, 15 bp, Homo sapiens
aattttgagacagag

SEQ ID NO: 1126168 - DNA, 15 bp, Homo sapiens
taattttgagacaga

SEQ ID NO: 1126169 - DNA, 15 bp, Homo sapiens
ataattttgagacag

SEQ ID NO: 1126170 - DNA, 15 bp, Homo sapiens
aataattttgagaca

SEQ ID NO: 1126171 - DNA, 15 bp, Homo sapiens
gaataattttgagac

SEQ ID NO: 1126172 - DNA, 15 bp, Homo sapiens
agaataattttgaga

SEQ ID NO: 1126173 - DNA, 15 bp, Homo sapiens
aagaataattttgag

SEQ ID NO: 1126174 - DNA, 15 bp, Homo sapiens
caagaataattttga

SEQ ID NO: 1126175 - DNA, 15 bp, Homo sapiens
acaagaataattttg

SEQ ID NO: 1126176 - DNA, 15 bp, Homo sapiens
gacaagaataatttt

SEQ ID NO: 1126177 - DNA, 15 bp, Homo sapiens
tgacaagaataattt

SEQ ID NO: 1126178 - DNA, 15 bp, Homo sapiens
ctgacaagaataatt

SEQ ID NO: 1126179 - DNA, 15 bp, Homo sapiens
gctgacaagaataat

SEQ ID NO: 1126180 - DNA, 15 bp, Homo sapiens
tgctgacaagaataa

SEQ ID NO: 1126181 - DNA, 15 bp, Homo sapiens
atgctgacaagaata

SEQ ID NO: 1126182 - DNA, 15 bp, Homo sapiens
gatgctgacaagaat

SEQ ID NO: 1126183 - DNA, 15 bp, Homo sapiens
agatgctgacaagaa

SEQ ID NO: 1126184 - DNA, 15 bp, Homo sapiens
gagatgctgacaaga

SEQ ID NO: 1126185 - DNA, 15 bp, Homo sapiens
ggagatgctgacaag

SEQ ID NO: 1126186 - DNA, 15 bp, Homo sapiens
aggagatgctgacaa

SEQ ID NO: 1126187 - DNA, 15 bp, Homo sapiens
aaggagatgctgaca

SEQ ID NO: 1126188 - DNA, 15 bp, Homo sapiens
caaggagatgctgac

SEQ ID NO: 1126189 - DNA, 15 bp, Homo sapiens
tcaaggagatgctga

SEQ ID NO: 1126190 - DNA, 15 bp, Homo sapiens
atcaaggagatgctg

SEQ ID NO: 1126191 - DNA, 15 bp, Homo sapiens
catcaaggagatgct

SEQ ID NO: 1126192 - DNA, 15 bp, Homo sapiens
gcatcaaggagatgc

SEQ ID NO: 1126193 - DNA, 15 bp, Homo sapiens
ggcatcaaggagatg

SEQ ID NO: 1126194 - DNA, 15 bp, Homo sapiens
aggcatcaaggagat

SEQ ID NO: 1126195 - DNA, 15 bp, Homo sapiens
aaggcatcaaggaga

SEQ ID NO: 1126196 - DNA, 15 bp, Homo sapiens
caaggcatcaaggag

SEQ ID NO: 1126197 - DNA, 15 bp, Homo sapiens
tcaaggcatcaagga

SEQ ID NO: 1126198 - DNA, 15 bp, Homo sapiens
ctcaaggcatcaagg

SEQ ID NO: 1126199 - DNA, 15 bp, Homo sapiens
tctcaaggcatcaag

SEQ ID NO: 1126200 - DNA, 15 bp, Homo sapiens
atctcaaggcatcaa

SEQ ID NO: 1126201 - DNA, 15 bp, Homo sapiens
catctcaaggcatca

SEQ ID NO: 1126202 - DNA, 15 bp, Homo sapiens
ccatctcaaggcatc

SEQ ID NO: 1126203 - DNA, 15 bp, Homo sapiens
tccatctcaaggcat

SEQ ID NO: 1126204 - DNA, 15 bp, Homo sapiens
ttccatctcaaggca

SEQ ID NO: 1126205 - DNA, 15 bp, Homo sapiens
attccatctcaaggc

SEQ ID NO: 1126206 - DNA, 15 bp, Homo sapiens
gattccatctcaagg

SEQ ID NO: 1126207 - DNA, 15 bp, Homo sapiens
cgattccatctcaag

SEQ ID NO: 1126208 - DNA, 15 bp, Homo sapiens
acgattccatctcaa

SEQ ID NO: 1126209 - DNA, 15 bp, Homo sapiens
aacgattccatctca

SEQ ID NO: 1126210 - DNA, 15 bp, Homo sapiens
aaacgattccatctc

SEQ ID NO: 1126211 - DNA, 15 bp, Homo sapiens
taaacgattccatct

SEQ ID NO: 1126212 - DNA, 15 bp, Homo sapiens
ttaaacgattccatc

SEQ ID NO: 1126213 - DNA, 15 bp, Homo sapiens
gttaaacgattccat

SEQ ID NO: 1126214 - DNA, 15 bp, Homo sapiens
agttaaacgattcca

SEQ ID NO: 1126215 - DNA, 15 bp, Homo sapiens
tagttaaacgattcc

SEQ ID NO: 1126216 - DNA, 15 bp, Homo sapiens
atagttaaacgattc

SEQ ID NO: 1126217 - DNA, 15 bp, Homo sapiens
aatagttaaacgatt

SEQ ID NO: 1126218 - DNA, 15 bp, Homo sapiens
aaatagttaaacgat

SEQ ID NO: 1126219 - DNA, 15 bp, Homo sapiens
taaatagttaaacga

SEQ ID NO: 1126220 - DNA, 15 bp, Homo sapiens
ttaaatagttaaacg

SEQ ID NO: 1126221 - DNA, 15 bp, Homo sapiens
attaaatagttaaac

SEQ ID NO: 1126222 - DNA, 15 bp, Homo sapiens
cattaaatagttaaa

SEQ ID NO: 1126223 - DNA, 15 bp, Homo sapiens
ccattaaatagttaa

SEQ ID NO: 1126224 - DNA, 15 bp, Homo sapiens
gccattaaatagtta

SEQ ID NO: 1126225 - DNA, 15 bp, Homo sapiens
agccattaaatagtt

SEQ ID NO: 1126226 - DNA, 15 bp, Homo sapiens
aagccattaaatagt

SEQ ID NO: 1126227 - DNA, 15 bp, Homo sapiens
gaagccattaaatag

SEQ ID NO: 1126228 - DNA, 15 bp, Homo sapiens
tgaagccattaaata

SEQ ID NO: 1126229 - DNA, 15 bp, Homo sapiens
ttgaagccattaaat

SEQ ID NO: 1126230 - DNA, 15 bp, Homo sapiens
gttgaagccattaaa

SEQ ID NO: 1126231 - DNA, 15 bp, Homo sapiens
tgttgaagccattaa

SEQ ID NO: 1126232 - DNA, 15 bp, Homo sapiens
ttgttgaagccatta

SEQ ID NO: 1126233 - DNA, 15 bp, Homo sapiens
tttgttgaagccatt

SEQ ID NO: 1126234 - DNA, 15 bp, Homo sapiens
ttttgttgaagccat

SEQ ID NO: 1126235 - DNA, 15 bp, Homo sapiens
attttgttgaagcca

SEQ ID NO: 1126236 - DNA, 15 bp, Homo sapiens
cattttgttgaagcc

SEQ ID NO: 1126237 - DNA, 15 bp, Homo sapiens
tcattttgttgaagc

SEQ ID NO: 1126238 - DNA, 15 bp, Homo sapiens
ctcattttgttgaag

SEQ ID NO: 1126239 - DNA, 15 bp, Homo sapiens
actcattttgttgaa

SEQ ID NO: 1126240 - DNA, 15 bp, Homo sapiens
aactcattttgttga

SEQ ID NO: 1126241 - DNA, 15 bp, Homo sapiens
gaactcattttgttg

SEQ ID NO: 1126242 - DNA, 15 bp, Homo sapiens
agaactcattttgtt

SEQ ID NO: 1126243 - DNA, 15 bp, Homo sapiens
gagaactcattttgt

SEQ ID NO: 1126244 - DNA, 15 bp, Homo sapiens
agagaactcattttg

SEQ ID NO: 1126245 - DNA, 15 bp, Homo sapiens
tagagaactcatttt

SEQ ID NO: 1126246 - DNA, 15 bp, Homo sapiens
atagagaactcattt

SEQ ID NO: 1126247 - DNA, 15 bp, Homo sapiens
gatagagaactcatt

SEQ ID NO: 1126248 - DNA, 15 bp, Homo sapiens
tgatagagaactcat

SEQ ID NO: 1126249 - DNA, 15 bp, Homo sapiens
atgatagagaactca

SEQ ID NO: 1126250 - DNA, 15 bp, Homo sapiens
catgatagagaactc

SEQ ID NO: 1126251 - DNA, 15 bp, Homo sapiens
gcatgatagagaact

SEQ ID NO: 1126252 - DNA, 15 bp, Homo sapiens
tgcatgatagagaac

SEQ ID NO: 1126253 - DNA, 15 bp, Homo sapiens
atgcatgatagagaa

SEQ ID NO: 1126254 - DNA, 15 bp, Homo sapiens
tatgcatgatagaga

SEQ ID NO: 1126255 - DNA, 15 bp, Homo sapiens
atatgcatgatagag

SEQ ID NO: 1126256 - DNA, 15 bp, Homo sapiens
tatatgcatgataga

SEQ ID NO: 1126257 - DNA, 15 bp, Homo sapiens
ctatatgcatgatag

SEQ ID NO: 1126258 - DNA, 15 bp, Homo sapiens
actatatgcatgata

SEQ ID NO: 1126259 - DNA, 15 bp, Homo sapiens
tactatatgcatgat

SEQ ID NO: 1126260 - DNA, 15 bp, Homo sapiens
atactatatgcatga

SEQ ID NO: 1126261 - DNA, 15 bp, Homo sapiens
aatactatatgcatg

SEQ ID NO: 1126262 - DNA, 15 bp, Homo sapiens
taatactatatgcat

SEQ ID NO: 1126263 - DNA, 15 bp, Homo sapiens
gtaatactatatgca

SEQ ID NO: 1126264 - DNA, 15 bp, Homo sapiens
tgtaatactatatgc

SEQ ID NO: 1126265 - DNA, 15 bp, Homo sapiens
gtgtaatactatatg

SEQ ID NO: 1126266 - DNA, 15 bp, Homo sapiens
tgtgtaatactatat

SEQ ID NO: 1126267 - DNA, 15 bp, Homo sapiens
ctgtgtaatactata

SEQ ID NO: 1126268 - DNA, 15 bp, Homo sapiens
cctgtgtaatactat

SEQ ID NO: 1126269 - DNA, 15 bp, Homo sapiens
gcctgtgtaatacta

SEQ ID NO: 1126270 - DNA, 15 bp, Homo sapiens
tgcctgtgtaatact

SEQ ID NO: 1126271 - DNA, 15 bp, Homo sapiens
atgcctgtgtaatac

SEQ ID NO: 1126272 - DNA, 15 bp, Homo sapiens
catgcctgtgtaata

SEQ ID NO: 1126273 - DNA, 15 bp, Homo sapiens
ccatgcctgtgtaat

SEQ ID NO: 1126274 - DNA, 15 bp, Homo sapiens
gccatgcctgtgtaa

SEQ ID NO: 1126275 - DNA, 15 bp, Homo sapiens
tgccatgcctgtgta

SEQ ID NO: 1126276 - DNA, 15 bp, Homo sapiens
ttgccatgcctgtgt

SEQ ID NO: 1126277 - DNA, 15 bp, Homo sapiens
tttgccatgcctgtg

SEQ ID NO: 1126278 - DNA, 15 bp, Homo sapiens
gtttgccatgcctgt

SEQ ID NO: 1126279 - DNA, 15 bp, Homo sapiens
tgtttgccatgcctg

SEQ ID NO: 1126280 - DNA, 15 bp, Homo sapiens
atgtttgccatgcct

SEQ ID NO: 1126281 - DNA, 15 bp, Homo sapiens
tatgtttgccatgcc

SEQ ID NO: 1126282 - DNA, 15 bp, Homo sapiens
ttatgtttgccatgc

SEQ ID NO: 1126283 - DNA, 15 bp, Homo sapiens
gttatgtttgccatg

SEQ ID NO: 1126284 - DNA, 15 bp, Homo sapiens
tgttatgtttgccat

SEQ ID NO: 1126285 - DNA, 15 bp, Homo sapiens
ctgttatgtttgcca

SEQ ID NO: 1126286 - DNA, 15 bp, Homo sapiens
tctgttatgtttgcc

SEQ ID NO: 1126287 - DNA, 15 bp, Homo sapiens
ctctgttatgtttgc

SEQ ID NO: 1126288 - DNA, 15 bp, Homo sapiens
actctgttatgtttg

SEQ ID NO: 1126289 - DNA, 15 bp, Homo sapiens
aactctgttatgttt

SEQ ID NO: 1126290 - DNA, 15 bp, Homo sapiens
aaactctgttatgtt

SEQ ID NO: 1126291 - DNA, 15 bp, Homo sapiens
aaaactctgttatgt

SEQ ID NO: 1126292 - DNA, 15 bp, Homo sapiens
gaaaactctgttatg

SEQ ID NO: 1126293 - DNA, 15 bp, Homo sapiens
ggaaaactctgttat

SEQ ID NO: 1126294 - DNA, 15 bp, Homo sapiens
aggaaaactctgtta

SEQ ID NO: 1126295 - DNA, 15 bp, Homo sapiens
aaggaaaactctgtt

SEQ ID NO: 1126296 - DNA, 15 bp, Homo sapiens
aaaggaaaactctgt

SEQ ID NO: 1126297 - DNA, 15 bp, Homo sapiens
aaaaggaaaactctg

SEQ ID NO: 1126298 - DNA, 15 bp, Homo sapiens
aaaaaggaaaactct

SEQ ID NO: 1126299 - DNA, 15 bp, Homo sapiens
gaaaaaggaaaactc

SEQ ID NO: 1126300 - DNA, 15 bp, Homo sapiens
tgaaaaaggaaaact

SEQ ID NO: 1126301 - DNA, 15 bp, Homo sapiens
gtgaaaaaggaaaac

SEQ ID NO: 1126302 - DNA, 15 bp, Homo sapiens
tgtgaaaaaggaaaa

SEQ ID NO: 1126303 - DNA, 15 bp, Homo sapiens
ctgtgaaaaaggaaa

SEQ ID NO: 1126304 - DNA, 15 bp, Homo sapiens
tctgtgaaaaaggaa

SEQ ID NO: 1126305 - DNA, 15 bp, Homo sapiens
gtctgtgaaaaagga

SEQ ID NO: 1126306 - DNA, 15 bp, Homo sapiens
tgtctgtgaaaaagg

SEQ ID NO: 1126307 - DNA, 15 bp, Homo sapiens
atgtctgtgaaaaag

SEQ ID NO: 1126308 - DNA, 15 bp, Homo sapiens
gatgtctgtgaaaaa

SEQ ID NO: 1126309 - DNA, 15 bp, Homo sapiens
agatgtctgtgaaaa

SEQ ID NO: 1126310 - DNA, 15 bp, Homo sapiens
gagatgtctgtgaaa

SEQ ID NO: 1126311 - DNA, 15 bp, Homo sapiens
tgagatgtctgtgaa

SEQ ID NO: 1126312 - DNA, 15 bp, Homo sapiens
atgagatgtctgtga

SEQ ID NO: 1126313 - DNA, 15 bp, Homo sapiens
gatgagatgtctgtg

SEQ ID NO: 1126314 - DNA, 15 bp, Homo sapiens
agatgagatgtctgt

SEQ ID NO: 1126315 - DNA, 15 bp, Homo sapiens
gagatgagatgtctg

SEQ ID NO: 1126316 - DNA, 15 bp, Homo sapiens
agagatgagatgtct

SEQ ID NO: 1126317 - DNA, 15 bp, Homo sapiens
cagagatgagatgtc

SEQ ID NO: 1126318 - DNA, 15 bp, Homo sapiens
tcagagatgagatgt

SEQ ID NO: 1126319 - DNA, 15 bp, Homo sapiens
atcagagatgagatg

SEQ ID NO: 1126320 - DNA, 15 bp, Homo sapiens
aatcagagatgagat

SEQ ID NO: 1126321 - DNA, 15 bp, Homo sapiens
caatcagagatgaga

SEQ ID NO: 1126322 - DNA, 15 bp, Homo sapiens
ccaatcagagatgag

SEQ ID NO: 1126323 - DNA, 15 bp, Homo sapiens
cccaatcagagatga

SEQ ID NO: 1126324 - DNA, 15 bp, Homo sapiens
acccaatcagagatg

SEQ ID NO: 1126325 - DNA, 15 bp, Homo sapiens
tacccaatcagagat

SEQ ID NO: 1126326 - DNA, 15 bp, Homo sapiens
atacccaatcagaga

SEQ ID NO: 1126327 - DNA, 15 bp, Homo sapiens
aatacccaatcagag

SEQ ID NO: 1126328 - DNA, 15 bp, Homo sapiens
gaatacccaatcaga

SEQ ID NO: 1126329 - DNA, 15 bp, Homo sapiens
agaatacccaatcag

SEQ ID NO: 1126330 - DNA, 15 bp, Homo sapiens
aagaatacccaatca

SEQ ID NO: 1126331 - DNA, 15 bp, Homo sapiens
aaagaatacccaatc

SEQ ID NO: 1126332 - DNA, 15 bp, Homo sapiens
taaagaatacccaat

SEQ ID NO: 1126333 - DNA, 15 bp, Homo sapiens
gtaaagaatacccaa

SEQ ID NO: 1126334 - DNA, 15 bp, Homo sapiens
agtaaagaataccca

SEQ ID NO: 1126335 - DNA, 15 bp, Homo sapiens
tagtaaagaataccc

SEQ ID NO: 1126336 - DNA, 15 bp, Homo sapiens
gtagtaaagaatacc

SEQ ID NO: 1126337 - DNA, 15 bp, Homo sapiens
ggtagtaaagaatac

SEQ ID NO: 1126338 - DNA, 15 bp, Homo sapiens
aggtagtaaagaata

SEQ ID NO: 1126339 - DNA, 15 bp, Homo sapiens
taggtagtaaagaat

SEQ ID NO: 1126340 - DNA, 15 bp, Homo sapiens
gtaggtagtaaagaa

SEQ ID NO: 1126341 - DNA, 15 bp, Homo sapiens
ggtaggtagtaaaga

SEQ ID NO: 1126342 - DNA, 15 bp, Homo sapiens
tggtaggtagtaaag

SEQ ID NO: 1126343 - DNA, 15 bp, Homo sapiens
gtggtaggtagtaaa

SEQ ID NO: 1126344 - DNA, 15 bp, Homo sapiens
ggtggtaggtagtaa

SEQ ID NO: 1126345 - DNA, 15 bp, Homo sapiens
tggtggtaggtagta

SEQ ID NO: 1126346 - DNA, 15 bp, Homo sapiens
atggtggtaggtagt

SEQ ID NO: 1126347 - DNA, 15 bp, Homo sapiens
tatggtggtaggtag

SEQ ID NO: 1126348 - DNA, 15 bp, Homo sapiens
ttatggtggtaggta

SEQ ID NO: 1126349 - DNA, 15 bp, Homo sapiens
gttatggtggtaggt

SEQ ID NO: 1126350 - DNA, 15 bp, Homo sapiens
agttatggtggtagg

SEQ ID NO: 1126351 - DNA, 15 bp, Homo sapiens
cagttatggtggtag

SEQ ID NO: 1126352 - DNA, 15 bp, Homo sapiens
gcagttatggtggta

SEQ ID NO: 1126353 - DNA, 15 bp, Homo sapiens
tgcagttatggtggt

SEQ ID NO: 1126354 - DNA, 15 bp, Homo sapiens
gtgcagttatggtgg

SEQ ID NO: 1126355 - DNA, 15 bp, Homo sapiens
agtgcagttatggtg

SEQ ID NO: 1126356 - DNA, 15 bp, Homo sapiens
gagtgcagttatggt

SEQ ID NO: 1126357 - DNA, 15 bp, Homo sapiens
agagtgcagttatgg

SEQ ID NO: 1126358 - DNA, 15 bp, Homo sapiens
cagagtgcagttatg

SEQ ID NO: 1126359 - DNA, 15 bp, Homo sapiens
tcagagtgcagttat

SEQ ID NO: 1126360 - DNA, 15 bp, Homo sapiens
ttcagagtgcagtta

SEQ ID NO: 1126361 - DNA, 15 bp, Homo sapiens
attcagagtgcagtt

SEQ ID NO: 1126362 - DNA, 15 bp, Homo sapiens
tattcagagtgcagt

SEQ ID NO: 1126363 - DNA, 15 bp, Homo sapiens
atattcagagtgcag

SEQ ID NO: 1126364 - DNA, 15 bp, Homo sapiens
tatattcagagtgca

SEQ ID NO: 1126365 - DNA, 15 bp, Homo sapiens
atatattcagagtgc

SEQ ID NO: 1126366 - DNA, 15 bp, Homo sapiens
tatatattcagagtg

SEQ ID NO: 1126367 - DNA, 15 bp, Homo sapiens
ctatatattcagagt

SEQ ID NO: 1126368 - DNA, 15 bp, Homo sapiens
tctatatattcagag

SEQ ID NO: 1126369 - DNA, 15 bp, Homo sapiens
ttctatatattcaga

SEQ ID NO: 1126370 - DNA, 15 bp, Homo sapiens
tttctatatattcag

SEQ ID NO: 1126371 - DNA, 15 bp, Homo sapiens
atttctatatattca

SEQ ID NO: 1126372 - DNA, 15 bp, Homo sapiens
gatttctatatattc

SEQ ID NO: 1126373 - DNA, 15 bp, Homo sapiens
tgatttctatatatt

SEQ ID NO: 1126374 - DNA, 15 bp, Homo sapiens
atgatttctatatat

SEQ ID NO: 1126375 - DNA, 15 bp, Homo sapiens
tatgatttctatata

SEQ ID NO: 1126376 - DNA, 15 bp, Homo sapiens
ctatgatttctatat

SEQ ID NO: 1126377 - DNA, 15 bp, Homo sapiens
actatgatttctata

SEQ ID NO: 1126378 - DNA, 15 bp, Homo sapiens
aactatgatttctat

SEQ ID NO: 1126379 - DNA, 15 bp, Homo sapiens
aaactatgatttcta

SEQ ID NO: 1126380 - DNA, 15 bp, Homo sapiens
gaaactatgatttct

SEQ ID NO: 1126381 - DNA, 15 bp, Homo sapiens
agaaactatgatttc

SEQ ID NO: 1126382 - DNA, 15 bp, Homo sapiens
aagaaactatgattt

SEQ ID NO: 1126383 - DNA, 15 bp, Homo sapiens
caagaaactatgatt

SEQ ID NO: 1126384 - DNA, 15 bp, Homo sapiens
tcaagaaactatgat

SEQ ID NO: 1126385 - DNA, 15 bp, Homo sapiens
atcaagaaactatga

SEQ ID NO: 1126386 - DNA, 15 bp, Homo sapiens
catcaagaaactatg

SEQ ID NO: 1126387 - DNA, 15 bp, Homo sapiens
acatcaagaaactat

SEQ ID NO: 1126388 - DNA, 15 bp, Homo sapiens
tacatcaagaaacta

SEQ ID NO: 1126389 - DNA, 15 bp, Homo sapiens
ttacatcaagaaact

SEQ ID NO: 1126390 - DNA, 15 bp, Homo sapiens
cttacatcaagaaac

SEQ ID NO: 1126391 - DNA, 15 bp, Homo sapiens
tcttacatcaagaaa

SEQ ID NO: 1126392 - DNA, 15 bp, Homo sapiens
atcttacatcaagaa

SEQ ID NO: 1126393 - DNA, 15 bp, Homo sapiens
aatcttacatcaaga

SEQ ID NO: 1126394 - DNA, 15 bp, Homo sapiens
aaatcttacatcaag

SEQ ID NO: 1126395 - DNA, 15 bp, Homo sapiens
aaaatcttacatcaa

SEQ ID NO: 1126396 - DNA, 15 bp, Homo sapiens
aaaaatcttacatca

SEQ ID NO: 1126397 - DNA, 15 bp, Homo sapiens
taaaaatcttacatc

SEQ ID NO: 1126398 - DNA, 15 bp, Homo sapiens
gtaaaaatcttacat

SEQ ID NO: 1126399 - DNA, 15 bp, Homo sapiens
tgtaaaaatcttaca

SEQ ID NO: 1126400 - DNA, 15 bp, Homo sapiens
atgtaaaaatcttac

SEQ ID NO: 1126401 - DNA, 15 bp, Homo sapiens
aatgtaaaaatctta

SEQ ID NO: 1126402 - DNA, 15 bp, Homo sapiens
aaatgtaaaaatctt

SEQ ID NO: 1126403 - DNA, 15 bp, Homo sapiens
aaaatgtaaaaatct

SEQ ID NO: 1126404 - DNA, 15 bp, Homo sapiens
aaaaatgtaaaaatc

SEQ ID NO: 1126405 - DNA, 15 bp, Homo sapiens
taaaaatgtaaaaat

SEQ ID NO: 1126406 - DNA, 15 bp, Homo sapiens
gtaaaaatgtaaaaa

SEQ ID NO: 1126407 - DNA, 15 bp, Homo sapiens
agtaaaaatgtaaaa

SEQ ID NO: 1126408 - DNA, 15 bp, Homo sapiens
tagtaaaaatgtaaa

SEQ ID NO: 1126409 - DNA, 15 bp, Homo sapiens
ttagtaaaaatgtaa

SEQ ID NO: 1126410 - DNA, 15 bp, Homo sapiens
attagtaaaaatgta

SEQ ID NO: 1126411 - DNA, 15 bp, Homo sapiens
tattagtaaaaatgt

SEQ ID NO: 1126412 - DNA, 15 bp, Homo sapiens
ctattagtaaaaatg

SEQ ID NO: 1126413 - DNA, 15 bp, Homo sapiens
actattagtaaaaat

SEQ ID NO: 1126414 - DNA, 15 bp, Homo sapiens
cactattagtaaaaa

SEQ ID NO: 1126415 - DNA, 15 bp, Homo sapiens
tcactattagtaaaa

SEQ ID NO: 1126416 - DNA, 15 bp, Homo sapiens
atcactattagtaaa

SEQ ID NO: 1126417 - DNA, 15 bp, Homo sapiens
aatcactattagtaa

SEQ ID NO: 1126418 - DNA, 15 bp, Homo sapiens
aaatcactattagta

SEQ ID NO: 1126419 - DNA, 15 bp, Homo sapiens
aaaatcactattagt

SEQ ID NO: 1126420 - DNA, 15 bp, Homo sapiens
aaaaatcactattag

SEQ ID NO: 1126421 - DNA, 15 bp, Homo sapiens
taaaaatcactatta

SEQ ID NO: 1126422 - DNA, 15 bp, Homo sapiens
ataaaaatcactatt

SEQ ID NO: 1126423 - DNA, 15 bp, Homo sapiens
aataaaaatcactat

SEQ ID NO: 1126424 - DNA, 15 bp, Homo sapiens
aaataaaaatcacta

SEQ ID NO: 1126425 - DNA, 15 bp, Homo sapiens
caaataaaaatcact

SEQ ID NO: 1126426 - DNA, 15 bp, Homo sapiens
gcaaataaaaatcac

SEQ ID NO: 1126427 - DNA, 15 bp, Homo sapiens
agcaaataaaaatca

SEQ ID NO: 1126428 - DNA, 15 bp, Homo sapiens
gagcaaataaaaatc

SEQ ID NO: 1126429 - DNA, 15 bp, Homo sapiens
ggagcaaataaaaat

SEQ ID NO: 1126430 - DNA, 15 bp, Homo sapiens
gggagcaaataaaaa

SEQ ID NO: 1126431 - DNA, 15 bp, Homo sapiens
tgggagcaaataaaa

SEQ ID NO: 1126432 - DNA, 15 bp, Homo sapiens
gtgggagcaaataaa

SEQ ID NO: 1126433 - DNA, 15 bp, Homo sapiens
agtgggagcaaataa

SEQ ID NO: 1126434 - DNA, 15 bp, Homo sapiens
cagtgggagcaaata

SEQ ID NO: 1126435 - DNA, 15 bp, Homo sapiens
tcagtgggagcaaat

SEQ ID NO: 1126436 - DNA, 15 bp, Homo sapiens
atcagtgggagcaaa

SEQ ID NO: 1126437 - DNA, 15 bp, Homo sapiens
tatcagtgggagcaa

SEQ ID NO: 1126438 - DNA, 15 bp, Homo sapiens
ctatcagtgggagca

SEQ ID NO: 1126439 - DNA, 15 bp, Homo sapiens
actatcagtgggagc

SEQ ID NO: 1126440 - DNA, 15 bp, Homo sapiens
aactatcagtgggag

SEQ ID NO: 1126441 - DNA, 15 bp, Homo sapiens
aaactatcagtggga

SEQ ID NO: 1126442 - DNA, 15 bp, Homo sapiens
gaaactatcagtggg

SEQ ID NO: 1126443 - DNA, 15 bp, Homo sapiens
tgaaactatcagtgg

SEQ ID NO: 1126444 - DNA, 15 bp, Homo sapiens
gtgaaactatcagtg

SEQ ID NO: 1126445 - DNA, 15 bp, Homo sapiens
agtgaaactatcagt

SEQ ID NO: 1126446 - DNA, 15 bp, Homo sapiens
aagtgaaactatcag

SEQ ID NO: 1126447 - DNA, 15 bp, Homo sapiens
caagtgaaactatca

SEQ ID NO: 1126448 - DNA, 15 bp, Homo sapiens
gcaagtgaaactatc

SEQ ID NO: 1126449 - DNA, 15 bp, Homo sapiens
agcaagtgaaactat

SEQ ID NO: 1126450 - DNA, 15 bp, Homo sapiens
aagcaagtgaaacta

SEQ ID NO: 1126451 - DNA, 15 bp, Homo sapiens
aaagcaagtgaaact

SEQ ID NO: 1126452 - DNA, 15 bp, Homo sapiens
aaaagcaagtgaaac

SEQ ID NO: 1126453 - DNA, 15 bp, Homo sapiens
aaaaagcaagtgaaa

SEQ ID NO: 1126454 - DNA, 15 bp, Homo sapiens
taaaaagcaagtgaa

SEQ ID NO: 1126455 - DNA, 15 bp, Homo sapiens
ttaaaaagcaagtga

SEQ ID NO: 1126456 - DNA, 15 bp, Homo sapiens
gttaaaaagcaagtg

SEQ ID NO: 1126457 - DNA, 15 bp, Homo sapiens
tgttaaaaagcaagt

SEQ ID NO: 1126458 - DNA, 15 bp, Homo sapiens
ctgttaaaaagcaag

SEQ ID NO: 1126459 - DNA, 15 bp, Homo sapiens
gctgttaaaaagcaa

SEQ ID NO: 1126460 - DNA, 15 bp, Homo sapiens
tgctgttaaaaagca

SEQ ID NO: 1126461 - DNA, 15 bp, Homo sapiens
ttgctgttaaaaagc

SEQ ID NO: 1126462 - DNA, 15 bp, Homo sapiens
tttgctgttaaaaag

SEQ ID NO: 1126463 - DNA, 15 bp, Homo sapiens
ctttgctgttaaaaa

SEQ ID NO: 1126464 - DNA, 15 bp, Homo sapiens
actttgctgttaaaa

SEQ ID NO: 1126465 - DNA, 15 bp, Homo sapiens
cactttgctgttaaa

SEQ ID NO: 1126466 - DNA, 15 bp, Homo sapiens
acactttgctgttaa

SEQ ID NO: 1126467 - DNA, 15 bp, Homo sapiens
aacactttgctgtta

SEQ ID NO: 1126468 - DNA, 15 bp, Homo sapiens
taacactttgctgtt

SEQ ID NO: 1126469 - DNA, 15 bp, Homo sapiens
ataacactttgctgt

SEQ ID NO: 1126470 - DNA, 15 bp, Homo sapiens
aataacactttgctg

SEQ ID NO: 1126471 - DNA, 15 bp, Homo sapiens
aaataacactttgct

SEQ ID NO: 1126472 - DNA, 15 bp, Homo sapiens
caaataacactttgc

SEQ ID NO: 1126473 - DNA, 15 bp, Homo sapiens
tcaaataacactttg

SEQ ID NO: 1126474 - DNA, 15 bp, Homo sapiens
atcaaataacacttt

SEQ ID NO: 1126475 - DNA, 15 bp, Homo sapiens
catcaaataacactt

SEQ ID NO: 1126476 - DNA, 15 bp, Homo sapiens
tcatcaaataacact

SEQ ID NO: 1126477 - DNA, 15 bp, Homo sapiens
ttcatcaaataacac

SEQ ID NO: 1126478 - DNA, 15 bp, Homo sapiens
attcatcaaataaca

SEQ ID NO: 1126479 - DNA, 15 bp, Homo sapiens
gattcatcaaataac

SEQ ID NO: 1126480 - DNA, 15 bp, Homo sapiens
agattcatcaaataa

SEQ ID NO: 1126481 - DNA, 15 bp, Homo sapiens
cagattcatcaaata

SEQ ID NO: 1126482 - DNA, 15 bp, Homo sapiens
ccagattcatcaaat

SEQ ID NO: 1126483 - DNA, 15 bp, Homo sapiens
gccagattcatcaaa

SEQ ID NO: 1126484 - DNA, 15 bp, Homo sapiens
ggccagattcatcaa

SEQ ID NO: 1126485 - DNA, 15 bp, Homo sapiens
tggccagattcatca

SEQ ID NO: 1126486 - DNA, 15 bp, Homo sapiens
ctggccagattcatc

SEQ ID NO: 1126487 - DNA, 15 bp, Homo sapiens
tctggccagattcat

SEQ ID NO: 1126488 - DNA, 15 bp, Homo sapiens
ttctggccagattca

SEQ ID NO: 1126489 - DNA, 15 bp, Homo sapiens
tttctggccagattc

SEQ ID NO: 1126490 - DNA, 15 bp, Homo sapiens
ctttctggccagatt

SEQ ID NO: 1126491 - DNA, 15 bp, Homo sapiens
actttctggccagat

SEQ ID NO: 1126492 - DNA, 15 bp, Homo sapiens
tactttctggccaga

SEQ ID NO: 1126493 - DNA, 15 bp, Homo sapiens
ttactttctggccag

SEQ ID NO: 1126494 - DNA, 15 bp, Homo sapiens
cttactttctggcca

SEQ ID NO: 1126495 - DNA, 15 bp, Homo sapiens
tcttactttctggcc

SEQ ID NO: 1126496 - DNA, 15 bp, Homo sapiens
gtcttactttctggc

SEQ ID NO: 1126497 - DNA, 15 bp, Homo sapiens
agtcttactttctgg

SEQ ID NO: 1126498 - DNA, 15 bp, Homo sapiens
aagtcttactttctg

SEQ ID NO: 1126499 - DNA, 15 bp, Homo sapiens
taagtcttactttct

SEQ ID NO: 1126500 - DNA, 15 bp, Homo sapiens
gtaagtcttactttc

SEQ ID NO: 1126501 - DNA, 15 bp, Homo sapiens
agtaagtcttacttt

SEQ ID NO: 1126502 - DNA, 15 bp, Homo sapiens
tagtaagtcttactt

SEQ ID NO: 1126503 - DNA, 15 bp, Homo sapiens
atagtaagtcttact

SEQ ID NO: 1126504 - DNA, 15 bp, Homo sapiens
tatagtaagtcttac

SEQ ID NO: 1126505 - DNA, 15 bp, Homo sapiens
ttatagtaagtctta

SEQ ID NO: 1126506 - DNA, 15 bp, Homo sapiens
tttatagtaagtctt

SEQ ID NO: 1126507 - DNA, 15 bp, Homo sapiens
atttatagtaagtct

SEQ ID NO: 1126508 - DNA, 15 bp, Homo sapiens
gatttatagtaagtc

SEQ ID NO: 1126509 - DNA, 15 bp, Homo sapiens
tgatttatagtaagt

SEQ ID NO: 1126510 - DNA, 15 bp, Homo sapiens
atgatttatagtaag

SEQ ID NO: 1126511 - DNA, 15 bp, Homo sapiens
tatgatttatagtaa

SEQ ID NO: 1126512 - DNA, 15 bp, Homo sapiens
atatgatttatagta

SEQ ID NO: 1126513 - DNA, 15 bp, Homo sapiens
tatatgatttatagt

SEQ ID NO: 1126514 - DNA, 15 bp, Homo sapiens
atatatgatttatag

SEQ ID NO: 1126515 - DNA, 15 bp, Homo sapiens
tatatatgatttata

SEQ ID NO: 1126516 - DNA, 15 bp, Homo sapiens
gtatatatgatttat

SEQ ID NO: 1126517 - DNA, 15 bp, Homo sapiens
tgtatatatgattta

SEQ ID NO: 1126518 - DNA, 15 bp, Homo sapiens
ttgtatatatgattt

SEQ ID NO: 1126519 - DNA, 15 bp, Homo sapiens
cttgtatatatgatt

SEQ ID NO: 1126520 - DNA, 15 bp, Homo sapiens
tcttgtatatatgat

SEQ ID NO: 1126521 - DNA, 15 bp, Homo sapiens
atcttgtatatatga

SEQ ID NO: 1126522 - DNA, 15 bp, Homo sapiens
tatcttgtatatatg

SEQ ID NO: 1126523 - DNA, 15 bp, Homo sapiens
ctatcttgtatatat

SEQ ID NO: 1126524 - DNA, 15 bp, Homo sapiens
cctatcttgtatata

SEQ ID NO: 1126525 - DNA, 15 bp, Homo sapiens
ccctatcttgtatat

SEQ ID NO: 1126526 - DNA, 15 bp, Homo sapiens
tccctatcttgtata

SEQ ID NO: 1126527 - DNA, 15 bp, Homo sapiens
atccctatcttgtat

SEQ ID NO: 1126528 - DNA, 15 bp, Homo sapiens
gatccctatcttgta

SEQ ID NO: 1126529 - DNA, 15 bp, Homo sapiens
tgatccctatcttgt

SEQ ID NO: 1126530 - DNA, 15 bp, Homo sapiens
atgatccctatcttg

SEQ ID NO: 1126531 - DNA, 15 bp, Homo sapiens
aatgatccctatctt

SEQ ID NO: 1126532 - DNA, 15 bp, Homo sapiens
caatgatccctatct

SEQ ID NO: 1126533 - DNA, 15 bp, Homo sapiens
acaatgatccctatc

SEQ ID NO: 1126534 - DNA, 15 bp, Homo sapiens
aacaatgatccctat

SEQ ID NO: 1126535 - DNA, 15 bp, Homo sapiens
aaacaatgatcccta

SEQ ID NO: 1126536 - DNA, 15 bp, Homo sapiens
taaacaatgatccct

SEQ ID NO: 1126537 - DNA, 15 bp, Homo sapiens
ataaacaatgatccc

SEQ ID NO: 1126538 - DNA, 15 bp, Homo sapiens
aataaacaatgatcc

SEQ ID NO: 1126539 - DNA, 15 bp, Homo sapiens
aaataaacaatgatc

SEQ ID NO: 1126540 - DNA, 15 bp, Homo sapiens
aaaataaacaatgat

SEQ ID NO: 1126541 - DNA, 15 bp, Homo sapiens
aaaaataaacaatga

SEQ ID NO: 1126542 - DNA, 15 bp, Homo sapiens
taaaaataaacaatg

SEQ ID NO: 1126543 - DNA, 15 bp, Homo sapiens
ataaaaataaacaat

SEQ ID NO: 1126544 - DNA, 15 bp, Homo sapiens
taataaaaataaaca

SEQ ID NO: 1126545 - DNA, 15 bp, Homo sapiens
ataataaaaataaac

SEQ ID NO: 1126546 - DNA, 15 bp, Homo sapiens
tataataaaaataaa

SEQ ID NO: 1126547 - DNA, 15 bp, Homo sapiens
atataataaaaataa

SEQ ID NO: 1126548 - DNA, 15 bp, Homo sapiens
gatataataaaaata

SEQ ID NO: 1126549 - DNA, 15 bp, Homo sapiens
agatataataaaaat

SEQ ID NO: 1126550 - DNA, 15 bp, Homo sapiens
aagatataataaaaa

SEQ ID NO: 1126551 - DNA, 15 bp, Homo sapiens
aaagatataataaaa

SEQ ID NO: 1126552 - DNA, 15 bp, Homo sapiens
aaaagatataataaa

SEQ ID NO: 1126553 - DNA, 15 bp, Homo sapiens
caaaagatataataa

SEQ ID NO: 1126554 - DNA, 15 bp, Homo sapiens
tcaaaagatataata

SEQ ID NO: 1126555 - DNA, 15 bp, Homo sapiens
ctcaaaagatataat

SEQ ID NO: 1126556 - DNA, 15 bp, Homo sapiens
actcaaaagatataa

SEQ ID NO: 1126557 - DNA, 15 bp, Homo sapiens
gactcaaaagatata

SEQ ID NO: 1126558 - DNA, 15 bp, Homo sapiens
ggactcaaaagatat

SEQ ID NO: 1126559 - DNA, 15 bp, Homo sapiens
tggactcaaaagata

SEQ ID NO: 1126560 - DNA, 15 bp, Homo sapiens
atggactcaaaagat

SEQ ID NO: 1126561 - DNA, 15 bp, Homo sapiens
aatggactcaaaaga

SEQ ID NO: 1126562 - DNA, 15 bp, Homo sapiens
aaatggactcaaaag

SEQ ID NO: 1126563 - DNA, 15 bp, Homo sapiens
aaaatggactcaaaa

SEQ ID NO: 1126564 - DNA, 15 bp, Homo sapiens
aaaaatggactcaaa

SEQ ID NO: 1126565 - DNA, 15 bp, Homo sapiens
caaaaatggactcaa

SEQ ID NO: 1126566 - DNA, 15 bp, Homo sapiens
acaaaaatggactca

SEQ ID NO: 1126567 - DNA, 15 bp, Homo sapiens
gacaaaaatggactc

SEQ ID NO: 1126568 - DNA, 15 bp, Homo sapiens
tgacaaaaatggact

SEQ ID NO: 1126569 - DNA, 15 bp, Homo sapiens
ttgacaaaaatggac

SEQ ID NO: 1126570 - DNA, 15 bp, Homo sapiens
tttgacaaaaatgga

SEQ ID NO: 1126571 - DNA, 15 bp, Homo sapiens
ttttgacaaaaatgg

SEQ ID NO: 1126572 - DNA, 15 bp, Homo sapiens
cttttgacaaaaatg

SEQ ID NO: 1126573 - DNA, 15 bp, Homo sapiens
acttttgacaaaaat

SEQ ID NO: 1126574 - DNA, 15 bp, Homo sapiens
gacttttgacaaaaa

SEQ ID NO: 1126575 - DNA, 15 bp, Homo sapiens
tgacttttgacaaaa

SEQ ID NO: 1126576 - DNA, 15 bp, Homo sapiens
ttgacttttgacaaa

SEQ ID NO: 1126577 - DNA, 15 bp, Homo sapiens
tttgacttttgacaa

SEQ ID NO: 1126578 - DNA, 15 bp, Homo sapiens
ttttgacttttgaca

SEQ ID NO: 1126579 - DNA, 15 bp, Homo sapiens
cttttgacttttgac

SEQ ID NO: 1126580 - DNA, 15 bp, Homo sapiens
tcttttgacttttga

SEQ ID NO: 1126581 - DNA, 15 bp, Homo sapiens
atcttttgacttttg

SEQ ID NO: 1126582 - DNA, 15 bp, Homo sapiens
tatcttttgactttt

SEQ ID NO: 1126583 - DNA, 15 bp, Homo sapiens
atatcttttgacttt

SEQ ID NO: 1126584 - DNA, 15 bp, Homo sapiens
tatatcttttgactt

SEQ ID NO: 1126585 - DNA, 15 bp, Homo sapiens
ttatatcttttgact

SEQ ID NO: 1126586 - DNA, 15 bp, Homo sapiens
tttatatcttttgac

SEQ ID NO: 1126587 - DNA, 15 bp, Homo sapiens
ttttatatcttttga

SEQ ID NO: 1126588 - DNA, 15 bp, Homo sapiens
tttttatatcttttg

SEQ ID NO: 1126589 - DNA, 15 bp, Homo sapiens
atttttatatctttt

SEQ ID NO: 1126590 - DNA, 15 bp, Homo sapiens
tatttttatatcttt

SEQ ID NO: 1126591 - DNA, 15 bp, Homo sapiens
atatttttatatctt

SEQ ID NO: 1126592 - DNA, 15 bp, Homo sapiens
aatatttttatatct

SEQ ID NO: 1126593 - DNA, 15 bp, Homo sapiens
aaatatttttatatc

SEQ ID NO: 1126594 - DNA, 15 bp, Homo sapiens
ttttaaatattttta

SEQ ID NO: 1126595 - DNA, 15 bp, Homo sapiens
gttttaaatattttt

SEQ ID NO: 1126596 - DNA, 15 bp, Homo sapiens
cgttttaaatatttt

SEQ ID NO: 1126597 - DNA, 15 bp, Homo sapiens
acgttttaaatattt

SEQ ID NO: 1126598 - DNA, 15 bp, Homo sapiens
tacgttttaaatatt

SEQ ID NO: 1126599 - DNA, 15 bp, Homo sapiens
ctacgttttaaatat

SEQ ID NO: 1126600 - DNA, 15 bp, Homo sapiens
actacgttttaaata

SEQ ID NO: 1126601 - DNA, 15 bp, Homo sapiens
cactacgttttaaat

SEQ ID NO: 1126602 - DNA, 15 bp, Homo sapiens
tcactacgttttaaa

SEQ ID NO: 1126603 - DNA, 15 bp, Homo sapiens
ttcactacgttttaa

SEQ ID NO: 1126604 - DNA, 15 bp, Homo sapiens
attcactacgtttta

SEQ ID NO: 1126605 - DNA, 15 bp, Homo sapiens
tattcactacgtttt

SEQ ID NO: 1126606 - DNA, 15 bp, Homo sapiens
ttattcactacgttt

SEQ ID NO: 1126607 - DNA, 15 bp, Homo sapiens
gttattcactacgtt

SEQ ID NO: 1126608 - DNA, 15 bp, Homo sapiens
agttattcactacgt

SEQ ID NO: 1126609 - DNA, 15 bp, Homo sapiens
cagttattcactacg

SEQ ID NO: 1126610 - DNA, 15 bp, Homo sapiens
acagttattcactac

SEQ ID NO: 1126611 - DNA, 15 bp, Homo sapiens
gacagttattcacta

SEQ ID NO: 1126612 - DNA, 15 bp, Homo sapiens
agacagttattcact

SEQ ID NO: 1126613 - DNA, 15 bp, Homo sapiens
gagacagttattcac

SEQ ID NO: 1126614 - DNA, 15 bp, Homo sapiens
agagacagttattca

SEQ ID NO: 1126615 - DNA, 15 bp, Homo sapiens
tagagacagttattc

SEQ ID NO: 1126616 - DNA, 15 bp, Homo sapiens
gtagagacagttatt

SEQ ID NO: 1126617 - DNA, 15 bp, Homo sapiens
agtagagacagttat

SEQ ID NO: 1126618 - DNA, 15 bp, Homo sapiens
gagtagagacagtta

SEQ ID NO: 1126619 - DNA, 15 bp, Homo sapiens
agagtagagacagtt

SEQ ID NO: 1126620 - DNA, 15 bp, Homo sapiens
aagagtagagacagt

SEQ ID NO: 1126621 - DNA, 15 bp, Homo sapiens
aaagagtagagacag

SEQ ID NO: 1126622 - DNA, 15 bp, Homo sapiens
taaagagtagagaca

SEQ ID NO: 1126623 - DNA, 15 bp, Homo sapiens
gtaaagagtagagac

SEQ ID NO: 1126624 - DNA, 15 bp, Homo sapiens
agtaaagagtagaga

SEQ ID NO: 1126625 - DNA, 15 bp, Homo sapiens
cagtaaagagtagag

SEQ ID NO: 1126626 - DNA, 15 bp, Homo sapiens
ccagtaaagagtaga

SEQ ID NO: 1126627 - DNA, 15 bp, Homo sapiens
tccagtaaagagtag

SEQ ID NO: 1126628 - DNA, 15 bp, Homo sapiens
ttccagtaaagagta

SEQ ID NO: 1126629 - DNA, 15 bp, Homo sapiens
attccagtaaagagt

SEQ ID NO: 1126630 - DNA, 15 bp, Homo sapiens
gattccagtaaagag

SEQ ID NO: 1126631 - DNA, 15 bp, Homo sapiens
tgattccagtaaaga

SEQ ID NO: 1126632 - DNA, 15 bp, Homo sapiens
ttgattccagtaaag

SEQ ID NO: 1126633 - DNA, 15 bp, Homo sapiens
tttgattccagtaaa

SEQ ID NO: 1126634 - DNA, 15 bp, Homo sapiens
ttttgattccagtaa

SEQ ID NO: 1126635 - DNA, 15 bp, Homo sapiens
tttttgattccagta

SEQ ID NO: 1126636 - DNA, 15 bp, Homo sapiens
atttttgattccagt

SEQ ID NO: 1126637 - DNA, 15 bp, Homo sapiens
aatttttgattccag

SEQ ID NO: 1126638 - DNA, 15 bp, Homo sapiens
aaatttttgattcca

SEQ ID NO: 1126639 - DNA, 15 bp, Homo sapiens
caaatttttgattcc

SEQ ID NO: 1126640 - DNA, 15 bp, Homo sapiens
acaaatttttgattc

SEQ ID NO: 1126641 - DNA, 15 bp, Homo sapiens
gacaaatttttgatt

SEQ ID NO: 1126642 - DNA, 15 bp, Homo sapiens
ggacaaatttttgat

SEQ ID NO: 1126643 - DNA, 15 bp, Homo sapiens
tggacaaatttttga

SEQ ID NO: 1126644 - DNA, 15 bp, Homo sapiens
atggacaaatttttg

SEQ ID NO: 1126645 - DNA, 15 bp, Homo sapiens
aatggacaaattttt

SEQ ID NO: 1126646 - DNA, 15 bp, Homo sapiens
gaatggacaaatttt

SEQ ID NO: 1126647 - DNA, 15 bp, Homo sapiens
ggaatggacaaattt

SEQ ID NO: 1126648 - DNA, 15 bp, Homo sapiens
aggaatggacaaatt

SEQ ID NO: 1126649 - DNA, 15 bp, Homo sapiens
caggaatggacaaat

SEQ ID NO: 1126650 - DNA, 15 bp, Homo sapiens
ccaggaatggacaaa

SEQ ID NO: 1126651 - DNA, 15 bp, Homo sapiens
cccaggaatggacaa

SEQ ID NO: 1126652 - DNA, 15 bp, Homo sapiens
gcccaggaatggaca

SEQ ID NO: 1126653 - DNA, 15 bp, Homo sapiens
ggcccaggaatggac

SEQ ID NO: 1126654 - DNA, 15 bp, Homo sapiens
tggcccaggaatgga

SEQ ID NO: 1126655 - DNA, 15 bp, Homo sapiens
ttggcccaggaatgg

SEQ ID NO: 1126656 - DNA, 15 bp, Homo sapiens
attggcccaggaatg

SEQ ID NO: 1126657 - DNA, 15 bp, Homo sapiens
cattggcccaggaat

SEQ ID NO: 1126658 - DNA, 15 bp, Homo sapiens
ccattggcccaggaa

SEQ ID NO: 1126659 - DNA, 15 bp, Homo sapiens
accattggcccagga

SEQ ID NO: 1126660 - DNA, 15 bp, Homo sapiens
caccattggcccagg

SEQ ID NO: 1126661 - DNA, 15 bp, Homo sapiens
acaccattggcccag

SEQ ID NO: 1126662 - DNA, 15 bp, Homo sapiens
aacaccattggccca

SEQ ID NO: 1126663 - DNA, 15 bp, Homo sapiens
taacaccattggccc

SEQ ID NO: 1126664 - DNA, 15 bp, Homo sapiens
ttaacaccattggcc

SEQ ID NO: 1126665 - DNA, 15 bp, Homo sapiens
tttaacaccattggc

SEQ ID NO: 1126666 - DNA, 15 bp, Homo sapiens
atttaacaccattgg

SEQ ID NO: 1126667 - DNA, 15 bp, Homo sapiens
aatttaacaccattg

SEQ ID NO: 1126668 - DNA, 15 bp, Homo sapiens
taatttaacaccatt

SEQ ID NO: 1126669 - DNA, 15 bp, Homo sapiens
ttaatttaacaccat

SEQ ID NO: 1126670 - DNA, 15 bp, Homo sapiens
cttaatttaacacca

SEQ ID NO: 1126671 - DNA, 15 bp, Homo sapiens
acttaatttaacacc

SEQ ID NO: 1126672 - DNA, 15 bp, Homo sapiens
cacttaatttaacac

SEQ ID NO: 1126673 - DNA, 15 bp, Homo sapiens
tcacttaatttaaca

SEQ ID NO: 1126674 - DNA, 15 bp, Homo sapiens
ttcacttaatttaac

SEQ ID NO: 1126675 - DNA, 15 bp, Homo sapiens
gttcacttaatttaa

SEQ ID NO: 1126676 - DNA, 15 bp, Homo sapiens
agttcacttaattta

SEQ ID NO: 1126677 - DNA, 15 bp, Homo sapiens
aagttcacttaattt

SEQ ID NO: 1126678 - DNA, 15 bp, Homo sapiens
aaagttcacttaatt

SEQ ID NO: 1126679 - DNA, 15 bp, Homo sapiens
taaagttcacttaat

SEQ ID NO: 1126680 - DNA, 15 bp, Homo sapiens
ataaagttcacttaa

SEQ ID NO: 1126681 - DNA, 15 bp, Homo sapiens
aataaagttcactta

SEQ ID NO: 1126682 - DNA, 15 bp, Homo sapiens
aaataaagttcactt

SEQ ID NO: 1126683 - DNA, 15 bp, Homo sapiens
taaataaagttcact

SEQ ID NO: 1126684 - DNA, 15 bp, Homo sapiens
gtaaataaagttcac

SEQ ID NO: 1126685 - DNA, 15 bp, Homo sapiens
tgtaaataaagttca

SEQ ID NO: 1126686 - DNA, 15 bp, Homo sapiens
atgtaaataaagttc

SEQ ID NO: 1126687 - DNA, 15 bp, Homo sapiens
gatgtaaataaagtt

SEQ ID NO: 1126688 - DNA, 15 bp, Homo sapiens
tgatgtaaataaagt

SEQ ID NO: 1126689 - DNA, 15 bp, Homo sapiens
atgatgtaaataaag

SEQ ID NO: 1126690 - DNA, 15 bp, Homo sapiens
aatgatgtaaataaa

SEQ ID NO: 1126691 - DNA, 15 bp, Homo sapiens
aaatgatgtaaataa

SEQ ID NO: 1126692 - DNA, 15 bp, Homo sapiens
taaatgatgtaaata

SEQ ID NO: 1126693 - DNA, 15 bp, Homo sapiens
ataaatgatgtaaat

SEQ ID NO: 1126694 - DNA, 15 bp, Homo sapiens
cataaatgatgtaaa

SEQ ID NO: 1126695 - DNA, 15 bp, Homo sapiens
acataaatgatgtaa

SEQ ID NO: 1126696 - DNA, 15 bp, Homo sapiens
aacataaatgatgta

SEQ ID NO: 1126697 - DNA, 15 bp, Homo sapiens
aaacataaatgatgt

SEQ ID NO: 1126698 - DNA, 15 bp, Homo sapiens
gaaacataaatgatg

SEQ ID NO: 1126699 - DNA, 15 bp, Homo sapiens
ggaaacataaatgat

SEQ ID NO: 1126700 - DNA, 15 bp, Homo sapiens
tggaaacataaatga

SEQ ID NO: 1126701 - DNA, 15 bp, Homo sapiens
gtggaaacataaatg

SEQ ID NO: 1126702 - DNA, 15 bp, Homo sapiens
tgtggaaacataaat

SEQ ID NO: 1126703 - DNA, 15 bp, Homo sapiens
ttgtggaaacataaa

SEQ ID NO: 1126704 - DNA, 15 bp, Homo sapiens
attgtggaaacataa

SEQ ID NO: 1126705 - DNA, 15 bp, Homo sapiens
cattgtggaaacata

SEQ ID NO: 1126706 - DNA, 15 bp, Homo sapiens
tcattgtggaaacat

SEQ ID NO: 1126707 - DNA, 15 bp, Homo sapiens
ttcattgtggaaaca

SEQ ID NO: 1126708 - DNA, 15 bp, Homo sapiens
attcattgtggaaac

SEQ ID NO: 1126709 - DNA, 15 bp, Homo sapiens
aattcattgtggaaa

SEQ ID NO: 1126710 - DNA, 15 bp, Homo sapiens
caattcattgtggaa

SEQ ID NO: 1126711 - DNA, 15 bp, Homo sapiens
acaattcattgtgga

SEQ ID NO: 1126712 - DNA, 15 bp, Homo sapiens
aacaattcattgtgg

SEQ ID NO: 1126713 - DNA, 15 bp, Homo sapiens
gaacaattcattgtg

SEQ ID NO: 1126714 - DNA, 15 bp, Homo sapiens
agaacaattcattgt

SEQ ID NO: 1126715 - DNA, 15 bp, Homo sapiens
cagaacaattcattg

SEQ ID NO: 1126716 - DNA, 15 bp, Homo sapiens
gcagaacaattcatt

SEQ ID NO: 1126717 - DNA, 15 bp, Homo sapiens
tgcagaacaattcat

SEQ ID NO: 1126718 - DNA, 15 bp, Homo sapiens
ctgcagaacaattca

SEQ ID NO: 1126719 - DNA, 15 bp, Homo sapiens
gctgcagaacaattc

SEQ ID NO: 1126720 - DNA, 15 bp, Homo sapiens
agctgcagaacaatt

SEQ ID NO: 1126721 - DNA, 15 bp, Homo sapiens
tagctgcagaacaat

SEQ ID NO: 1126722 - DNA, 15 bp, Homo sapiens
atagctgcagaacaa

SEQ ID NO: 1126723 - DNA, 15 bp, Homo sapiens
tatagctgcagaaca

SEQ ID NO: 1126724 - DNA, 15 bp, Homo sapiens
gtatagctgcagaac

SEQ ID NO: 1126725 - DNA, 15 bp, Homo sapiens
agtatagctgcagaa

SEQ ID NO: 1126726 - DNA, 15 bp, Homo sapiens
aagtatagctgcaga

SEQ ID NO: 1126727 - DNA, 15 bp, Homo sapiens
caagtatagctgcag

SEQ ID NO: 1126728 - DNA, 15 bp, Homo sapiens
tcaagtatagctgca

SEQ ID NO: 1126729 - DNA, 15 bp, Homo sapiens
atcaagtatagctgc

SEQ ID NO: 1126730 - DNA, 15 bp, Homo sapiens
aatcaagtatagctg

SEQ ID NO: 1126731 - DNA, 15 bp, Homo sapiens
aaatcaagtatagct

SEQ ID NO: 1126732 - DNA, 15 bp, Homo sapiens
gaaatcaagtatagc

SEQ ID NO: 1126733 - DNA, 15 bp, Homo sapiens
tgaaatcaagtatag

SEQ ID NO: 1126734 - DNA, 15 bp, Homo sapiens
ttgaaatcaagtata

SEQ ID NO: 1126735 - DNA, 15 bp, Homo sapiens
attgaaatcaagtat

SEQ ID NO: 1126736 - DNA, 15 bp, Homo sapiens
aattgaaatcaagta

SEQ ID NO: 1126737 - DNA, 15 bp, Homo sapiens
taattgaaatcaagt

SEQ ID NO: 1126738 - DNA, 15 bp, Homo sapiens
gtaattgaaatcaag

SEQ ID NO: 1126739 - DNA, 15 bp, Homo sapiens
tgtaattgaaatcaa

SEQ ID NO: 1126740 - DNA, 15 bp, Homo sapiens
atgtaattgaaatca

SEQ ID NO: 1126741 - DNA, 15 bp, Homo sapiens
catgtaattgaaatc

SEQ ID NO: 1126742 - DNA, 15 bp, Homo sapiens
acatgtaattgaaat

SEQ ID NO: 1126743 - DNA, 15 bp, Homo sapiens
aacatgtaattgaaa

SEQ ID NO: 1126744 - DNA, 15 bp, Homo sapiens
taacatgtaattgaa

SEQ ID NO: 1126745 - DNA, 15 bp, Homo sapiens
ataacatgtaattga

SEQ ID NO: 1126746 - DNA, 15 bp, Homo sapiens
gataacatgtaattg

SEQ ID NO: 1126747 - DNA, 15 bp, Homo sapiens
tgataacatgtaatt

SEQ ID NO: 1126748 - DNA, 15 bp, Homo sapiens
atgataacatgtaat

SEQ ID NO: 1126749 - DNA, 15 bp, Homo sapiens
gatgataacatgtaa

SEQ ID NO: 1126750 - DNA, 15 bp, Homo sapiens
ggatgataacatgta

SEQ ID NO: 1126751 - DNA, 15 bp, Homo sapiens
aggatgataacatgt

SEQ ID NO: 1126752 - DNA, 15 bp, Homo sapiens
aaggatgataacatg

SEQ ID NO: 1126753 - DNA, 15 bp, Homo sapiens
taaggatgataacat

SEQ ID NO: 1126754 - DNA, 15 bp, Homo sapiens
ataaggatgataaca

SEQ ID NO: 1126755 - DNA, 15 bp, Homo sapiens
tataaggatgataac

SEQ ID NO: 1126756 - DNA, 15 bp, Homo sapiens
atataaggatgataa

SEQ ID NO: 1126757 - DNA, 15 bp, Homo sapiens
tatataaggatgata

SEQ ID NO: 1126758 - DNA, 15 bp, Homo sapiens
ttatataaggatgat

SEQ ID NO: 1126759 - DNA, 15 bp, Homo sapiens
tttatataaggatga

SEQ ID NO: 1126760 - DNA, 15 bp, Homo sapiens
ctttatataaggatg

SEQ ID NO: 1126761 - DNA, 15 bp, Homo sapiens
tctttatataaggat

SEQ ID NO: 1126762 - DNA, 15 bp, Homo sapiens
ttctttatataagga

SEQ ID NO: 1126763 - DNA, 15 bp, Homo sapiens
gttctttatataagg

SEQ ID NO: 1126764 - DNA, 15 bp, Homo sapiens
ggttctttatataag

SEQ ID NO: 1126765 - DNA, 15 bp, Homo sapiens
tggttctttatataa

SEQ ID NO: 1126766 - DNA, 15 bp, Homo sapiens
gtggttctttatata

SEQ ID NO: 1126767 - DNA, 15 bp, Homo sapiens
tgtggttctttatat

SEQ ID NO: 1126768 - DNA, 15 bp, Homo sapiens
atgtggttctttata

SEQ ID NO: 1126769 - DNA, 15 bp, Homo sapiens
aatgtggttctttat

SEQ ID NO: 1126770 - DNA, 15 bp, Homo sapiens
aaatgtggttcttta

SEQ ID NO: 1126771 - DNA, 15 bp, Homo sapiens
gaaatgtggttcttt

SEQ ID NO: 1126772 - DNA, 15 bp, Homo sapiens
tgaaatgtggttctt

SEQ ID NO: 1126773 - DNA, 15 bp, Homo sapiens
ttgaaatgtggttct

SEQ ID NO: 1126774 - DNA, 15 bp, Homo sapiens
cttgaaatgtggttc

SEQ ID NO: 1126775 - DNA, 15 bp, Homo sapiens
tcttgaaatgtggtt

SEQ ID NO: 1126776 - DNA, 15 bp, Homo sapiens
ctcttgaaatgtggt

SEQ ID NO: 1126777 - DNA, 15 bp, Homo sapiens
cctcttgaaatgtgg

SEQ ID NO: 1126778 - DNA, 15 bp, Homo sapiens
tcctcttgaaatgtg

SEQ ID NO: 1126779 - DNA, 15 bp, Homo sapiens
ttcctcttgaaatgt

SEQ ID NO: 1126780 - DNA, 15 bp, Homo sapiens
attcctcttgaaatg

SEQ ID NO: 1126781 - DNA, 15 bp, Homo sapiens
aattcctcttgaaat

SEQ ID NO: 1126782 - DNA, 15 bp, Homo sapiens
caattcctcttgaaa

SEQ ID NO: 1126783 - DNA, 15 bp, Homo sapiens
acaattcctcttgaa

SEQ ID NO: 1126784 - DNA, 15 bp, Homo sapiens
aacaattcctcttga

SEQ ID NO: 1126785 - DNA, 15 bp, Homo sapiens
aaacaattcctcttg

SEQ ID NO: 1126786 - DNA, 15 bp, Homo sapiens
gaaacaattcctctt

SEQ ID NO: 1126787 - DNA, 15 bp, Homo sapiens
ggaaacaattcctct

SEQ ID NO: 1126788 - DNA, 15 bp, Homo sapiens
tggaaacaattcctc

SEQ ID NO: 1126789 - DNA, 15 bp, Homo sapiens
atggaaacaattcct

SEQ ID NO: 1126790 - DNA, 15 bp, Homo sapiens
aatggaaacaattcc

SEQ ID NO: 1126791 - DNA, 15 bp, Homo sapiens
taatggaaacaattc

SEQ ID NO: 1126792 - DNA, 15 bp, Homo sapiens
ctaatggaaacaatt

SEQ ID NO: 1126793 - DNA, 15 bp, Homo sapiens
tctaatggaaacaat

SEQ ID NO: 1126794 - DNA, 15 bp, Homo sapiens
ttctaatggaaacaa

SEQ ID NO: 1126795 - DNA, 15 bp, Homo sapiens
attctaatggaaaca

SEQ ID NO: 1126796 - DNA, 15 bp, Homo sapiens
gattctaatggaaac

SEQ ID NO: 1126797 - DNA, 15 bp, Homo sapiens
agattctaatggaaa

SEQ ID NO: 1126798 - DNA, 15 bp, Homo sapiens
aagattctaatggaa

SEQ ID NO: 1126799 - DNA, 15 bp, Homo sapiens
taagattctaatgga

SEQ ID NO: 1126800 - DNA, 15 bp, Homo sapiens
ataagattctaatgg

SEQ ID NO: 1126801 - DNA, 15 bp, Homo sapiens
aataagattctaatg

SEQ ID NO: 1126802 - DNA, 15 bp, Homo sapiens
caataagattctaat

SEQ ID NO: 1126803 - DNA, 15 bp, Homo sapiens
ccaataagattctaa

SEQ ID NO: 1126804 - DNA, 15 bp, Homo sapiens
gccaataagattcta

SEQ ID NO: 1126805 - DNA, 15 bp, Homo sapiens
ggccaataagattct

SEQ ID NO: 1126806 - DNA, 15 bp, Homo sapiens
aggccaataagattc

SEQ ID NO: 1126807 - DNA, 15 bp, Homo sapiens
gaggccaataagatt

SEQ ID NO: 1126808 - DNA, 15 bp, Homo sapiens
agaggccaataagat

SEQ ID NO: 1126809 - DNA, 15 bp, Homo sapiens
tagaggccaataaga

SEQ ID NO: 1126810 - DNA, 15 bp, Homo sapiens
atagaggccaataag

SEQ ID NO: 1126811 - DNA, 15 bp, Homo sapiens
aatagaggccaataa

SEQ ID NO: 1126812 - DNA, 15 bp, Homo sapiens
aaatagaggccaata

SEQ ID NO: 1126813 - DNA, 15 bp, Homo sapiens
aaaatagaggccaat

SEQ ID NO: 1126814 - DNA, 15 bp, Homo sapiens
aaaaatagaggccaa

SEQ ID NO: 1126815 - DNA, 15 bp, Homo sapiens
aaaaaatagaggcca

SEQ ID NO: 1126816 - DNA, 15 bp, Homo sapiens
gaaaaaatagaggcc

SEQ ID NO: 1126817 - DNA, 15 bp, Homo sapiens
agaaaaaatagaggc

SEQ ID NO: 1126818 - DNA, 15 bp, Homo sapiens
cagaaaaaatagagg

SEQ ID NO: 1126819 - DNA, 15 bp, Homo sapiens
gcagaaaaaatagag

SEQ ID NO: 1126820 - DNA, 15 bp, Homo sapiens
ggcagaaaaaataga

SEQ ID NO: 1126821 - DNA, 15 bp, Homo sapiens
gggcagaaaaaatag

SEQ ID NO: 1126822 - DNA, 15 bp, Homo sapiens
tgggcagaaaaaata

SEQ ID NO: 1126823 - DNA, 15 bp, Homo sapiens
atgggcagaaaaaat

SEQ ID NO: 1126824 - DNA, 15 bp, Homo sapiens
aatgggcagaaaaaa

SEQ ID NO: 1126825 - DNA, 15 bp, Homo sapiens
caatgggcagaaaaa

SEQ ID NO: 1126826 - DNA, 15 bp, Homo sapiens
ccaatgggcagaaaa

SEQ ID NO: 1126827 - DNA, 15 bp, Homo sapiens
accaatgggcagaaa

SEQ ID NO: 1126828 - DNA, 15 bp, Homo sapiens
gaccaatgggcagaa

SEQ ID NO: 1126829 - DNA, 15 bp, Homo sapiens
tgaccaatgggcaga

SEQ ID NO: 1126830 - DNA, 15 bp, Homo sapiens
cttgaccaatgggca

SEQ ID NO: 1126831 - DNA, 15 bp, Homo sapiens
acttgaccaatgggc

SEQ ID NO: 1126832 - DNA, 15 bp, Homo sapiens
tacttgaccaatggg

SEQ ID NO: 1126833 - DNA, 15 bp, Homo sapiens
atacttgaccaatgg

SEQ ID NO: 1126834 - DNA, 15 bp, Homo sapiens
catacttgaccaatg

SEQ ID NO: 1126835 - DNA, 15 bp, Homo sapiens
tcatacttgaccaat

SEQ ID NO: 1126836 - DNA, 15 bp, Homo sapiens
gtcatacttgaccaa

SEQ ID NO: 1126837 - DNA, 15 bp, Homo sapiens
tgtcatacttgacca

SEQ ID NO: 1126838 - DNA, 15 bp, Homo sapiens
atgtcatacttgacc

SEQ ID NO: 1126839 - DNA, 15 bp, Homo sapiens
tatgtcatacttgac

SEQ ID NO: 1126840 - DNA, 15 bp, Homo sapiens
ttatgtcatacttga

SEQ ID NO: 1126841 - DNA, 15 bp, Homo sapiens
attatgtcatacttg

SEQ ID NO: 1126842 - DNA, 15 bp, Homo sapiens
tattatgtcatactt

SEQ ID NO: 1126843 - DNA, 15 bp, Homo sapiens
atattatgtcatact

SEQ ID NO: 1126844 - DNA, 15 bp, Homo sapiens
aatattatgtcatac

SEQ ID NO: 1126845 - DNA, 15 bp, Homo sapiens
taatattatgtcata

SEQ ID NO: 1126846 - DNA, 15 bp, Homo sapiens
ataatattatgtcat

SEQ ID NO: 1126847 - DNA, 15 bp, Homo sapiens
cataatattatgtca

SEQ ID NO: 1126848 - DNA, 15 bp, Homo sapiens
tcataatattatgtc

SEQ ID NO: 1126849 - DNA, 15 bp, Homo sapiens
atcataatattatgt

SEQ ID NO: 1126850 - DNA, 15 bp, Homo sapiens
aatcataatattatg

SEQ ID NO: 1126851 - DNA, 15 bp, Homo sapiens
gaatcataatattat

SEQ ID NO: 1126852 - DNA, 15 bp, Homo sapiens
tgaatcataatatta

SEQ ID NO: 1126853 - DNA, 15 bp, Homo sapiens
ctgaatcataatatt

SEQ ID NO: 1126854 - DNA, 15 bp, Homo sapiens
tctgaatcataatat

SEQ ID NO: 1126855 - DNA, 15 bp, Homo sapiens
ttctgaatcataata

SEQ ID NO: 1126856 - DNA, 15 bp, Homo sapiens
gttctgaatcataat

SEQ ID NO: 1126857 - DNA, 15 bp, Homo sapiens
ggttctgaatcataa

SEQ ID NO: 1126858 - DNA, 15 bp, Homo sapiens
gggttctgaatcata

SEQ ID NO: 1126859 - DNA, 15 bp, Homo sapiens
agggttctgaatcat

SEQ ID NO: 1126860 - DNA, 15 bp, Homo sapiens
cagggttctgaatca

SEQ ID NO: 1126861 - DNA, 15 bp, Homo sapiens
tcagggttctgaatc

SEQ ID NO: 1126862 - DNA, 15 bp, Homo sapiens
ttcagggttctgaat

SEQ ID NO: 1126863 - DNA, 15 bp, Homo sapiens
tttcagggttctgaa

SEQ ID NO: 1126864 - DNA, 15 bp, Homo sapiens
ctttcagggttctga

SEQ ID NO: 1126865 - DNA, 15 bp, Homo sapiens
tctttcagggttctg

SEQ ID NO: 1126866 - DNA, 15 bp, Homo sapiens
atctttcagggttct

SEQ ID NO: 1126867 - DNA, 15 bp, Homo sapiens
aatctttcagggttc

SEQ ID NO: 1126868 - DNA, 15 bp, Homo sapiens
gaatctttcagggtt

SEQ ID NO: 1126869 - DNA, 15 bp, Homo sapiens
ggaatctttcagggt

SEQ ID NO: 1126870 - DNA, 15 bp, Homo sapiens
tggaatctttcaggg

SEQ ID NO: 1126871 - DNA, 15 bp, Homo sapiens
ttggaatctttcagg

SEQ ID NO: 1126872 - DNA, 15 bp, Homo sapiens
tttggaatctttcag

SEQ ID NO: 1126873 - DNA, 15 bp, Homo sapiens
ttttggaatctttca

SEQ ID NO: 1126874 - DNA, 15 bp, Homo sapiens
cttttggaatctttc

SEQ ID NO: 1126875 - DNA, 15 bp, Homo sapiens
acttttggaatcttt

SEQ ID NO: 1126876 - DNA, 15 bp, Homo sapiens
aacttttggaatctt

SEQ ID NO: 1126877 - DNA, 15 bp, Homo sapiens
caacttttggaatct

SEQ ID NO: 1126878 - DNA, 15 bp, Homo sapiens
acaacttttggaatc

SEQ ID NO: 1126879 - DNA, 15 bp, Homo sapiens
cacaacttttggaat

SEQ ID NO: 1126880 - DNA, 15 bp, Homo sapiens
tcacaacttttggaa

SEQ ID NO: 1126881 - DNA, 15 bp, Homo sapiens
atcacaacttttgga

SEQ ID NO: 1126882 - DNA, 15 bp, Homo sapiens
catcacaacttttgg

SEQ ID NO: 1126883 - DNA, 15 bp, Homo sapiens
acatcacaacttttg

SEQ ID NO: 1126884 - DNA, 15 bp, Homo sapiens
aacatcacaactttt

SEQ ID NO: 1126885 - DNA, 15 bp, Homo sapiens
caacatcacaacttt

SEQ ID NO: 1126886 - DNA, 15 bp, Homo sapiens
acaacatcacaactt

SEQ ID NO: 1126887 - DNA, 15 bp, Homo sapiens
cacaacatcacaact

SEQ ID NO: 1126888 - DNA, 15 bp, Homo sapiens
gcacaacatcacaac

SEQ ID NO: 1126889 - DNA, 15 bp, Homo sapiens
ggcacaacatcacaa

SEQ ID NO: 1126890 - DNA, 15 bp, Homo sapiens
gggcacaacatcaca

SEQ ID NO: 1126891 - DNA, 15 bp, Homo sapiens
tgggcacaacatcac

SEQ ID NO: 1126892 - DNA, 15 bp, Homo sapiens
atgggcacaacatca

SEQ ID NO: 1126893 - DNA, 15 bp, Homo sapiens
catgggcacaacatc

SEQ ID NO: 1126894 - DNA, 15 bp, Homo sapiens
gcatgggcacaacat

SEQ ID NO: 1126895 - DNA, 15 bp, Homo sapiens
agcatgggcacaaca

SEQ ID NO: 1126896 - DNA, 15 bp, Homo sapiens
gagcatgggcacaac

SEQ ID NO: 1126897 - DNA, 15 bp, Homo sapiens
agagcatgggcacaa

SEQ ID NO: 1126898 - DNA, 15 bp, Homo sapiens
gagagcatgggcaca

SEQ ID NO: 1126899 - DNA, 15 bp, Homo sapiens
agagagcatgggcac

SEQ ID NO: 1126900 - DNA, 15 bp, Homo sapiens
tagagagcatgggca

SEQ ID NO: 1126901 - DNA, 15 bp, Homo sapiens
ctagagagcatgggc

SEQ ID NO: 1126902 - DNA, 15 bp, Homo sapiens
cctagagagcatggg

SEQ ID NO: 1126903 - DNA, 15 bp, Homo sapiens
acctagagagcatgg

SEQ ID NO: 1126904 - DNA, 15 bp, Homo sapiens
cacctagagagcatg

SEQ ID NO: 1126905 - DNA, 15 bp, Homo sapiens
tcacctagagagcat

SEQ ID NO: 1126906 - DNA, 15 bp, Homo sapiens
gtcacctagagagca

SEQ ID NO: 1126907 - DNA, 15 bp, Homo sapiens
ggtcacctagagagc

SEQ ID NO: 1126908 - DNA, 15 bp, Homo sapiens
cggtcacctagagag

SEQ ID NO: 1126909 - DNA, 15 bp, Homo sapiens
acggtcacctagaga

SEQ ID NO: 1126910 - DNA, 15 bp, Homo sapiens
cacggtcacctagag

SEQ ID NO: 1126911 - DNA, 15 bp, Homo sapiens
ccacggtcacctaga

SEQ ID NO: 1126912 - DNA, 15 bp, Homo sapiens
tccacggtcacctag

SEQ ID NO: 1126913 - DNA, 15 bp, Homo sapiens
atccacggtcaccta

SEQ ID NO: 1126914 - DNA, 15 bp, Homo sapiens
catccacggtcacct

SEQ ID NO: 1126915 - DNA, 15 bp, Homo sapiens
ccatccacggtcacc

SEQ ID NO: 1126916 - DNA, 15 bp, Homo sapiens
gccatccacggtcac

SEQ ID NO: 1126917 - DNA, 15 bp, Homo sapiens
ggccatccacggtca

SEQ ID NO: 1126918 - DNA, 15 bp, Homo sapiens
tggccatccacggtc

SEQ ID NO: 1126919 - DNA, 15 bp, Homo sapiens
atggccatccacggt

SEQ ID NO: 1126920 - DNA, 15 bp, Homo sapiens
catggccatccacgg

SEQ ID NO: 1126921 - DNA, 15 bp, Homo sapiens
tcatggccatccacg

SEQ ID NO: 1126922 - DNA, 15 bp, Homo sapiens
gtcatggccatccac

SEQ ID NO: 1126923 - DNA, 15 bp, Homo sapiens
tgtcatggccatcca

SEQ ID NO: 1126924 - DNA, 15 bp, Homo sapiens
atgtcatggccatcc

SEQ ID NO: 1126925 - DNA, 15 bp, Homo sapiens
aatgtcatggccatc

SEQ ID NO: 1126926 - DNA, 15 bp, Homo sapiens
gaatgtcatggccat

SEQ ID NO: 1126927 - DNA, 15 bp, Homo sapiens
cgaatgtcatggcca

SEQ ID NO: 1126928 - DNA, 15 bp, Homo sapiens
gcgaatgtcatggcc

SEQ ID NO: 1126929 - DNA, 15 bp, Homo sapiens
agcgaatgtcatggc

SEQ ID NO: 1126930 - DNA, 15 bp, Homo sapiens
gagcgaatgtcatgg

SEQ ID NO: 1126931 - DNA, 15 bp, Homo sapiens
agagcgaatgtcatg

SEQ ID NO: 1126932 - DNA, 15 bp, Homo sapiens
gagagcgaatgtcat

SEQ ID NO: 1126933 - DNA, 15 bp, Homo sapiens
agagagcgaatgtca

SEQ ID NO: 1126934 - DNA, 15 bp, Homo sapiens
aagagagcgaatgtc

SEQ ID NO: 1126935 - DNA, 15 bp, Homo sapiens
taagagagcgaatgt

SEQ ID NO: 1126936 - DNA, 15 bp, Homo sapiens
ttaagagagcgaatg

SEQ ID NO: 1126937 - DNA, 15 bp, Homo sapiens
gttaagagagcgaat

SEQ ID NO: 1126938 - DNA, 15 bp, Homo sapiens
tgttaagagagcgaa

SEQ ID NO: 1126939 - DNA, 15 bp, Homo sapiens
atgttaagagagcga

SEQ ID NO: 1126940 - DNA, 15 bp, Homo sapiens
aatgttaagagagcg

SEQ ID NO: 1126941 - DNA, 15 bp, Homo sapiens
gaatgttaagagagc

SEQ ID NO: 1126942 - DNA, 15 bp, Homo sapiens
tgaatgttaagagag

SEQ ID NO: 1126943 - DNA, 15 bp, Homo sapiens
ctgaatgttaagaga

SEQ ID NO: 1126944 - DNA, 15 bp, Homo sapiens
actgaatgttaagag

SEQ ID NO: 1126945 - DNA, 15 bp, Homo sapiens
cactgaatgttaaga

SEQ ID NO: 1126946 - DNA, 15 bp, Homo sapiens
ccactgaatgttaag

SEQ ID NO: 1126947 - DNA, 15 bp, Homo sapiens
gccactgaatgttaa

SEQ ID NO: 1126948 - DNA, 15 bp, Homo sapiens
agccactgaatgtta

SEQ ID NO: 1126949 - DNA, 15 bp, Homo sapiens
aagccactgaatgtt

SEQ ID NO: 1126950 - DNA, 15 bp, Homo sapiens
taagccactgaatgt

SEQ ID NO: 1126951 - DNA, 15 bp, Homo sapiens
ctaagccactgaatg

SEQ ID NO: 1126952 - DNA, 15 bp, Homo sapiens
tctaagccactgaat

SEQ ID NO: 1126953 - DNA, 15 bp, Homo sapiens
ctctaagccactgaa

SEQ ID NO: 1126954 - DNA, 15 bp, Homo sapiens
tctctaagccactga

SEQ ID NO: 1126955 - DNA, 15 bp, Homo sapiens
atctctaagccactg

SEQ ID NO: 1126956 - DNA, 15 bp, Homo sapiens
gatctctaagccact

SEQ ID NO: 1126957 - DNA, 15 bp, Homo sapiens
tgatctctaagccac

SEQ ID NO: 1126958 - DNA, 15 bp, Homo sapiens
ctgatctctaagcca

SEQ ID NO: 1126959 - DNA, 15 bp, Homo sapiens
tctgatctctaagcc

SEQ ID NO: 1126960 - DNA, 15 bp, Homo sapiens
atctgatctctaagc

SEQ ID NO: 1126961 - DNA, 15 bp, Homo sapiens
aatctgatctctaag

SEQ ID NO: 1126962 - DNA, 15 bp, Homo sapiens
caatctgatctctaa

SEQ ID NO: 1126963 - DNA, 15 bp, Homo sapiens
ccaatctgatctcta

SEQ ID NO: 1126964 - DNA, 15 bp, Homo sapiens
cccaatctgatctct

SEQ ID NO: 1126965 - DNA, 15 bp, Homo sapiens
tcccaatctgatctc

SEQ ID NO: 1126966 - DNA, 15 bp, Homo sapiens
atcccaatctgatct

SEQ ID NO: 1126967 - DNA, 15 bp, Homo sapiens
tatcccaatctgatc

SEQ ID NO: 1126968 - DNA, 15 bp, Homo sapiens
ctatcccaatctgat

SEQ ID NO: 1126969 - DNA, 15 bp, Homo sapiens
actatcccaatctga

SEQ ID NO: 1126970 - DNA, 15 bp, Homo sapiens
cactatcccaatctg

SEQ ID NO: 1126971 - DNA, 15 bp, Homo sapiens
ccactatcccaatct

SEQ ID NO: 1126972 - DNA, 15 bp, Homo sapiens
tccactatcccaatc

SEQ ID NO: 1126973 - DNA, 15 bp, Homo sapiens
ctccactatcccaat

SEQ ID NO: 1126974 - DNA, 15 bp, Homo sapiens
gctccactatcccaa

SEQ ID NO: 1126975 - DNA, 15 bp, Homo sapiens
tgctccactatccca

SEQ ID NO: 1126976 - DNA, 15 bp, Homo sapiens
ttgctccactatccc

SEQ ID NO: 1126977 - DNA, 15 bp, Homo sapiens
cttgctccactatcc

SEQ ID NO: 1126978 - DNA, 15 bp, Homo sapiens
tcttgctccactatc

SEQ ID NO: 1126979 - DNA, 15 bp, Homo sapiens
ctcttgctccactat

SEQ ID NO: 1126980 - DNA, 15 bp, Homo sapiens
gctcttgctccacta

SEQ ID NO: 1126981 - DNA, 15 bp, Homo sapiens
ggctcttgctccact

SEQ ID NO: 1126982 - DNA, 15 bp, Homo sapiens
tggctcttgctccac

SEQ ID NO: 1126983 - DNA, 15 bp, Homo sapiens
ctggctcttgctcca

SEQ ID NO: 1126984 - DNA, 15 bp, Homo sapiens
actggctcttgctcc

SEQ ID NO: 1126985 - DNA, 15 bp, Homo sapiens
aactggctcttgctc

SEQ ID NO: 1126986 - DNA, 15 bp, Homo sapiens
gaactggctcttgct

SEQ ID NO: 1126987 - DNA, 15 bp, Homo sapiens
agaactggctcttgc

SEQ ID NO: 1126988 - DNA, 15 bp, Homo sapiens
cagaactggctcttg

SEQ ID NO: 1126989 - DNA, 15 bp, Homo sapiens
acagaactggctctt

SEQ ID NO: 1126990 - DNA, 15 bp, Homo sapiens
aacagaactggctct

SEQ ID NO: 1126991 - DNA, 15 bp, Homo sapiens
gaacagaactggctc

SEQ ID NO: 1126992 - DNA, 15 bp, Homo sapiens
agaacagaactggct

SEQ ID NO: 1126993 - DNA, 15 bp, Homo sapiens
gagaacagaactggc

SEQ ID NO: 1126994 - DNA, 15 bp, Homo sapiens
agagaacagaactgg

SEQ ID NO: 1126995 - DNA, 15 bp, Homo sapiens
tagagaacagaactg

SEQ ID NO: 1126996 - DNA, 15 bp, Homo sapiens
gtagagaacagaact

SEQ ID NO: 1126997 - DNA, 15 bp, Homo sapiens
ggtagagaacagaac

SEQ ID NO: 1126998 - DNA, 15 bp, Homo sapiens
tggtagagaacagaa

SEQ ID NO: 1126999 - DNA, 15 bp, Homo sapiens
gtggtagagaacaga

SEQ ID NO: 1127000 - DNA, 15 bp, Homo sapiens
ggtggtagagaacag

SEQ ID NO: 1127001 - DNA, 15 bp, Homo sapiens
tggtggtagagaaca

SEQ ID NO: 1127002 - DNA, 15 bp, Homo sapiens
atggtggtagagaac

SEQ ID NO: 1127003 - DNA, 15 bp, Homo sapiens
aatggtggtagagaa

SEQ ID NO: 1127004 - DNA, 15 bp, Homo sapiens
caatggtggtagaga

SEQ ID NO: 1127005 - DNA, 15 bp, Homo sapiens
gcaatggtggtagag

SEQ ID NO: 1127006 - DNA, 15 bp, Homo sapiens
tgcaatggtggtaga

SEQ ID NO: 1127007 - DNA, 15 bp, Homo sapiens
ctgcaatggtggtag

SEQ ID NO: 1127008 - DNA, 15 bp, Homo sapiens
tctgcaatggtggta

SEQ ID NO: 1127009 - DNA, 15 bp, Homo sapiens
ttctgcaatggtggt

SEQ ID NO: 1127010 - DNA, 15 bp, Homo sapiens
tttctgcaatggtgg

SEQ ID NO: 1127011 - DNA, 15 bp, Homo sapiens
ttttctgcaatggtg

SEQ ID NO: 1127012 - DNA, 15 bp, Homo sapiens
attttctgcaatggt

SEQ ID NO: 1127013 - DNA, 15 bp, Homo sapiens
tattttctgcaatgg

SEQ ID NO: 1127014 - DNA, 15 bp, Homo sapiens
atattttctgcaatg

SEQ ID NO: 1127015 - DNA, 15 bp, Homo sapiens
aatattttctgcaat

SEQ ID NO: 1127016 - DNA, 15 bp, Homo sapiens
gaatattttctgcaa

SEQ ID NO: 1127017 - DNA, 15 bp, Homo sapiens
cgaatattttctgca

SEQ ID NO: 1127018 - DNA, 15 bp, Homo sapiens
gcgaatattttctgc

SEQ ID NO: 1127019 - DNA, 15 bp, Homo sapiens
agcgaatattttctg

SEQ ID NO: 1127020 - DNA, 15 bp, Homo sapiens
tagcgaatattttct

SEQ ID NO: 1127021 - DNA, 15 bp, Homo sapiens
atagcgaatattttc

SEQ ID NO: 1127022 - DNA, 15 bp, Homo sapiens
catagcgaatatttt

SEQ ID NO: 1127023 - DNA, 15 bp, Homo sapiens
ccatagcgaatattt

SEQ ID NO: 1127024 - DNA, 15 bp, Homo sapiens
gccatagcgaatatt

SEQ ID NO: 1127025 - DNA, 15 bp, Homo sapiens
tgccatagcgaatat

SEQ ID NO: 1127026 - DNA, 15 bp, Homo sapiens
ctgccatagcgaata

SEQ ID NO: 1127027 - DNA, 15 bp, Homo sapiens
tctgccatagcgaat

SEQ ID NO: 1127028 - DNA, 15 bp, Homo sapiens
ctctgccatagcgaa

SEQ ID NO: 1127029 - DNA, 15 bp, Homo sapiens
tctctgccatagcga

SEQ ID NO: 1127030 - DNA, 15 bp, Homo sapiens
ttctctgccatagcg

SEQ ID NO: 1127031 - DNA, 15 bp, Homo sapiens
cttctctgccatagc

SEQ ID NO: 1127032 - DNA, 15 bp, Homo sapiens
tcttctctgccatag

SEQ ID NO: 1127033 - DNA, 15 bp, Homo sapiens
atcttctctgccata

SEQ ID NO: 1127034 - DNA, 15 bp, Homo sapiens
catcttctctgccat

SEQ ID NO: 1127035 - DNA, 15 bp, Homo sapiens
gcatcttctctgcca

SEQ ID NO: 1127036 - DNA, 15 bp, Homo sapiens
tgcatcttctctgcc

SEQ ID NO: 1127037 - DNA, 15 bp, Homo sapiens
ttgcatcttctctgc

SEQ ID NO: 1127038 - DNA, 15 bp, Homo sapiens
gttgcatcttctctg

SEQ ID NO: 1127039 - DNA, 15 bp, Homo sapiens
tgttgcatcttctct

SEQ ID NO: 1127040 - DNA, 15 bp, Homo sapiens
ttgttgcatcttctc

SEQ ID NO: 1127041 - DNA, 15 bp, Homo sapiens
attgttgcatcttct

SEQ ID NO: 1127042 - DNA, 15 bp, Homo sapiens
cattgttgcatcttc

SEQ ID NO: 1127043 - DNA, 15 bp, Homo sapiens
ccattgttgcatctt

SEQ ID NO: 1127044 - DNA, 15 bp, Homo sapiens
tccattgttgcatct

SEQ ID NO: 1127045 - DNA, 15 bp, Homo sapiens
ttccattgttgcatc

SEQ ID NO: 1127046 - DNA, 15 bp, Homo sapiens
cttccattgttgcat

SEQ ID NO: 1127047 - DNA, 15 bp, Homo sapiens
tcttccattgttgca

SEQ ID NO: 1127048 - DNA, 15 bp, Homo sapiens
gtcttccattgttgc

SEQ ID NO: 1127049 - DNA, 15 bp, Homo sapiens
tgtcttccattgttg

SEQ ID NO: 1127050 - DNA, 15 bp, Homo sapiens
atgtcttccattgtt

SEQ ID NO: 1127051 - DNA, 15 bp, Homo sapiens
tatgtcttccattgt

SEQ ID NO: 1127052 - DNA, 15 bp, Homo sapiens
ctatgtcttccattg

SEQ ID NO: 1127053 - DNA, 15 bp, Homo sapiens
actatgtcttccatt

SEQ ID NO: 1127054 - DNA, 15 bp, Homo sapiens
gactatgtcttccat

SEQ ID NO: 1127055 - DNA, 15 bp, Homo sapiens
ggactatgtcttcca

SEQ ID NO: 1127056 - DNA, 15 bp, Homo sapiens
tggactatgtcttcc

SEQ ID NO: 1127057 - DNA, 15 bp, Homo sapiens
ttggactatgtcttc

SEQ ID NO: 1127058 - DNA, 15 bp, Homo sapiens
cttggactatgtctt

SEQ ID NO: 1127059 - DNA, 15 bp, Homo sapiens
gcttggactatgtct

SEQ ID NO: 1127060 - DNA, 15 bp, Homo sapiens
agcttggactatgtc

SEQ ID NO: 1127061 - DNA, 15 bp, Homo sapiens
cagcttggactatgt

SEQ ID NO: 1127062 - DNA, 15 bp, Homo sapiens
gcagcttggactatg

SEQ ID NO: 1127063 - DNA, 15 bp, Homo sapiens
ggcagcttggactat

SEQ ID NO: 1127064 - DNA, 15 bp, Homo sapiens
tggcagcttggacta

SEQ ID NO: 1127065 - DNA, 15 bp, Homo sapiens
ttggcagcttggact

SEQ ID NO: 1127066 - DNA, 15 bp, Homo sapiens
cttggcagcttggac

SEQ ID NO: 1127067 - DNA, 15 bp, Homo sapiens
ccttggcagcttgga

SEQ ID NO: 1127068 - DNA, 15 bp, Homo sapiens
tccttggcagcttgg

SEQ ID NO: 1127069 - DNA, 15 bp, Homo sapiens
ctccttggcagcttg

SEQ ID NO: 1127070 - DNA, 15 bp, Homo sapiens
cctccttggcagctt

SEQ ID NO: 1127071 - DNA, 15 bp, Homo sapiens
gcctccttggcagct

SEQ ID NO: 1127072 - DNA, 15 bp, Homo sapiens
ggcctccttggcagc

SEQ ID NO: 1127073 - DNA, 15 bp, Homo sapiens
tggcctccttggcag

SEQ ID NO: 1127074 - DNA, 15 bp, Homo sapiens
ttggcctccttggca

SEQ ID NO: 1127075 - DNA, 15 bp, Homo sapiens
attggcctccttggc

SEQ ID NO: 1127076 - DNA, 15 bp, Homo sapiens
cattggcctccttgg

SEQ ID NO: 1127077 - DNA, 15 bp, Homo sapiens
gcattggcctccttg

SEQ ID NO: 1127078 - DNA, 15 bp, Homo sapiens
ggcattggcctcctt

SEQ ID NO: 1127079 - DNA, 15 bp, Homo sapiens
aggcattggcctcct

SEQ ID NO: 1127080 - DNA, 15 bp, Homo sapiens
taggcattggcctcc

SEQ ID NO: 1127081 - DNA, 15 bp, Homo sapiens
gtaggcattggcctc

SEQ ID NO: 1127082 - DNA, 15 bp, Homo sapiens
tgtaggcattggcct

SEQ ID NO: 1127083 - DNA, 15 bp, Homo sapiens
ttgtaggcattggcc

SEQ ID NO: 1127084 - DNA, 15 bp, Homo sapiens
gttgtaggcattggc

SEQ ID NO: 1127085 - DNA, 15 bp, Homo sapiens
agttgtaggcattgg

SEQ ID NO: 1127086 - DNA, 15 bp, Homo sapiens
aagttgtaggcattg

SEQ ID NO: 1127087 - DNA, 15 bp, Homo sapiens
gaagttgtaggcatt

SEQ ID NO: 1127088 - DNA, 15 bp, Homo sapiens
tgaagttgtaggcat

SEQ ID NO: 1127089 - DNA, 15 bp, Homo sapiens
atgaagttgtaggca

SEQ ID NO: 1127090 - DNA, 15 bp, Homo sapiens
gatgaagttgtaggc

SEQ ID NO: 1127091 - DNA, 15 bp, Homo sapiens
tgatgaagttgtagg

SEQ ID NO: 1127092 - DNA, 15 bp, Homo sapiens
atgatgaagttgtag

SEQ ID NO: 1127093 - DNA, 15 bp, Homo sapiens
catgatgaagttgta

SEQ ID NO: 1127094 - DNA, 15 bp, Homo sapiens
ccatgatgaagttgt

SEQ ID NO: 1127095 - DNA, 15 bp, Homo sapiens
tccatgatgaagttg

SEQ ID NO: 1127096 - DNA, 15 bp, Homo sapiens
gtccatgatgaagtt

SEQ ID NO: 1127097 - DNA, 15 bp, Homo sapiens
ggtccatgatgaagt

SEQ ID NO: 1127098 - DNA, 15 bp, Homo sapiens
aggtccatgatgaag

SEQ ID NO: 1127099 - DNA, 15 bp, Homo sapiens
caggtccatgatgaa

SEQ ID NO: 1127100 - DNA, 15 bp, Homo sapiens
gcaggtccatgatga

SEQ ID NO: 1127101 - DNA, 15 bp, Homo sapiens
ggcaggtccatgatg

SEQ ID NO: 1127102 - DNA, 15 bp, Homo sapiens
tggcaggtccatgat

SEQ ID NO: 1127103 - DNA, 15 bp, Homo sapiens
gtggcaggtccatga

SEQ ID NO: 1127104 - DNA, 15 bp, Homo sapiens
tgtggcaggtccatg

SEQ ID NO: 1127105 - DNA, 15 bp, Homo sapiens
ctgtggcaggtccat

SEQ ID NO: 1127106 - DNA, 15 bp, Homo sapiens
cctgtggcaggtcca

SEQ ID NO: 1127107 - DNA, 15 bp, Homo sapiens
acctgtggcaggtcc

SEQ ID NO: 1127108 - DNA, 15 bp, Homo sapiens
tacctgtggcaggtc

SEQ ID NO: 1127109 - DNA, 15 bp, Homo sapiens
gtacctgtggcaggt

SEQ ID NO: 1127110 - DNA, 15 bp, Homo sapiens
ggtacctgtggcagg

SEQ ID NO: 1127111 - DNA, 15 bp, Homo sapiens
gggtacctgtggcag

SEQ ID NO: 1127112 - DNA, 15 bp, Homo sapiens
ggggtacctgtggca

SEQ ID NO: 1127113 - DNA, 15 bp, Homo sapiens
aggggtacctgtggc

SEQ ID NO: 1127114 - DNA, 15 bp, Homo sapiens
taggggtacctgtgg

SEQ ID NO: 1127115 - DNA, 15 bp, Homo sapiens
ctaggggtacctgtg

SEQ ID NO: 1127116 - DNA, 15 bp, Homo sapiens
gctaggggtacctgt

SEQ ID NO: 1127117 - DNA, 15 bp, Homo sapiens
ggctaggggtacctg

SEQ ID NO: 1127118 - DNA, 15 bp, Homo sapiens
tggctaggggtacct

SEQ ID NO: 1127119 - DNA, 15 bp, Homo sapiens
atggctaggggtacc

SEQ ID NO: 1127120 - DNA, 15 bp, Homo sapiens
tatggctaggggtac

SEQ ID NO: 1127121 - DNA, 15 bp, Homo sapiens
gtatggctaggggta

SEQ ID NO: 1127122 - DNA, 15 bp, Homo sapiens
tgtatggctaggggt

SEQ ID NO: 1127123 - DNA, 15 bp, Homo sapiens
atgtatggctagggg

SEQ ID NO: 1127124 - DNA, 15 bp, Homo sapiens
aatgtatggctaggg

SEQ ID NO: 1127125 - DNA, 15 bp, Homo sapiens
gaatgtatggctagg

SEQ ID NO: 1127126 - DNA, 15 bp, Homo sapiens
ggaatgtatggctag

SEQ ID NO: 1127127 - DNA, 15 bp, Homo sapiens
aggaatgtatggcta

SEQ ID NO: 1127128 - DNA, 15 bp, Homo sapiens
caggaatgtatggct

SEQ ID NO: 1127129 - DNA, 15 bp, Homo sapiens
ccaggaatgtatggc

SEQ ID NO: 1127130 - DNA, 15 bp, Homo sapiens
cccaggaatgtatgg

SEQ ID NO: 1127131 - DNA, 15 bp, Homo sapiens
tcccaggaatgtatg

SEQ ID NO: 1127132 - DNA, 15 bp, Homo sapiens
ctcccaggaatgtat

SEQ ID NO: 1127133 - DNA, 15 bp, Homo sapiens
tctcccaggaatgta

SEQ ID NO: 1127134 - DNA, 15 bp, Homo sapiens
ttctcccaggaatgt

SEQ ID NO: 1127135 - DNA, 15 bp, Homo sapiens
tttctcccaggaatg

SEQ ID NO: 1127136 - DNA, 15 bp, Homo sapiens
gtttctcccaggaat

SEQ ID NO: 1127137 - DNA, 15 bp, Homo sapiens
agtttctcccaggaa

SEQ ID NO: 1127138 - DNA, 15 bp, Homo sapiens
tagtttctcccagga

SEQ ID NO: 1127139 - DNA, 15 bp, Homo sapiens
ttagtttctcccagg

SEQ ID NO: 1127140 - DNA, 15 bp, Homo sapiens
cttagtttctcccag

SEQ ID NO: 1127141 - DNA, 15 bp, Homo sapiens
tcttagtttctccca

SEQ ID NO: 1127142 - DNA, 15 bp, Homo sapiens
ctcttagtttctccc

SEQ ID NO: 1127143 - DNA, 15 bp, Homo sapiens
cctcttagtttctcc

SEQ ID NO: 1127144 - DNA, 15 bp, Homo sapiens
acctcttagtttctc

SEQ ID NO: 1127145 - DNA, 15 bp, Homo sapiens
gacctcttagtttct

SEQ ID NO: 1127146 - DNA, 15 bp, Homo sapiens
tgacctcttagtttc

SEQ ID NO: 1127147 - DNA, 15 bp, Homo sapiens
atgacctcttagttt

SEQ ID NO: 1127148 - DNA, 15 bp, Homo sapiens
tatgacctcttagtt

SEQ ID NO: 1127149 - DNA, 15 bp, Homo sapiens
ctatgacctcttagt

SEQ ID NO: 1127150 - DNA, 15 bp, Homo sapiens
tctatgacctcttag

SEQ ID NO: 1127151 - DNA, 15 bp, Homo sapiens
ttctatgacctctta

SEQ ID NO: 1127152 - DNA, 15 bp, Homo sapiens
cttctatgacctctt

SEQ ID NO: 1127153 - DNA, 15 bp, Homo sapiens
ccttctatgacctct

SEQ ID NO: 1127154 - DNA, 15 bp, Homo sapiens
tccttctatgacctc

SEQ ID NO: 1127155 - DNA, 15 bp, Homo sapiens
ttccttctatgacct

SEQ ID NO: 1127156 - DNA, 15 bp, Homo sapiens
tttccttctatgacc

SEQ ID NO: 1127157 - DNA, 15 bp, Homo sapiens
ttttccttctatgac

SEQ ID NO: 1127158 - DNA, 15 bp, Homo sapiens
tttttccttctatga

SEQ ID NO: 1127159 - DNA, 15 bp, Homo sapiens
ttttttccttctatg

SEQ ID NO: 1127160 - DNA, 15 bp, Homo sapiens
tttttttccttctat

SEQ ID NO: 1127161 - DNA, 15 bp, Homo sapiens
ctttttttccttcta

SEQ ID NO: 1127162 - DNA, 15 bp, Homo sapiens
actttttttccttct

SEQ ID NO: 1127163 - DNA, 15 bp, Homo sapiens
aactttttttccttc

SEQ ID NO: 1127164 - DNA, 15 bp, Homo sapiens
caactttttttcctt

SEQ ID NO: 1127165 - DNA, 15 bp, Homo sapiens
gcaactttttttcct

SEQ ID NO: 1127166 - DNA, 15 bp, Homo sapiens
tgcaactttttttcc

SEQ ID NO: 1127167 - DNA, 15 bp, Homo sapiens
gtgcaactttttttc

SEQ ID NO: 1127168 - DNA, 15 bp, Homo sapiens
tgtgcaacttttttt

SEQ ID NO: 1127169 - DNA, 15 bp, Homo sapiens
ttgtgcaactttttt

SEQ ID NO: 1127170 - DNA, 15 bp, Homo sapiens
attgtgcaacttttt

SEQ ID NO: 1127171 - DNA, 15 bp, Homo sapiens
aattgtgcaactttt

SEQ ID NO: 1127172 - DNA, 15 bp, Homo sapiens
taattgtgcaacttt

SEQ ID NO: 1127173 - DNA, 15 bp, Homo sapiens
ataattgtgcaactt

SEQ ID NO: 1127174 - DNA, 15 bp, Homo sapiens
tataattgtgcaact

SEQ ID NO: 1127175 - DNA, 15 bp, Homo sapiens
gtataattgtgcaac

SEQ ID NO: 1127176 - DNA, 15 bp, Homo sapiens
tgtataattgtgcaa

SEQ ID NO: 1127177 - DNA, 15 bp, Homo sapiens
gtgtataattgtgca

SEQ ID NO: 1127178 - DNA, 15 bp, Homo sapiens
tgtgtataattgtgc

SEQ ID NO: 1127179 - DNA, 15 bp, Homo sapiens
atgtgtataattgtg

SEQ ID NO: 1127180 - DNA, 15 bp, Homo sapiens
aatgtgtataattgt

SEQ ID NO: 1127181 - DNA, 15 bp, Homo sapiens
aaatgtgtataattg

SEQ ID NO: 1127182 - DNA, 15 bp, Homo sapiens
gaaatgtgtataatt

SEQ ID NO: 1127183 - DNA, 15 bp, Homo sapiens
agaaatgtgtataat

SEQ ID NO: 1127184 - DNA, 15 bp, Homo sapiens
aagaaatgtgtataa

SEQ ID NO: 1127185 - DNA, 15 bp, Homo sapiens
gaagaaatgtgtata

SEQ ID NO: 1127186 - DNA, 15 bp, Homo sapiens
agaagaaatgtgtat

SEQ ID NO: 1127187 - DNA, 15 bp, Homo sapiens
gagaagaaatgtgta

SEQ ID NO: 1127188 - DNA, 15 bp, Homo sapiens
cgagaagaaatgtgt

SEQ ID NO: 1127189 - DNA, 15 bp, Homo sapiens
acgagaagaaatgtg

SEQ ID NO: 1127190 - DNA, 15 bp, Homo sapiens
tacgagaagaaatgt

SEQ ID NO: 1127191 - DNA, 15 bp, Homo sapiens
atacgagaagaaatg

SEQ ID NO: 1127192 - DNA, 15 bp, Homo sapiens
catacgagaagaaat

SEQ ID NO: 1127193 - DNA, 15 bp, Homo sapiens
tcatacgagaagaaa

SEQ ID NO: 1127194 - DNA, 15 bp, Homo sapiens
atcatacgagaagaa

SEQ ID NO: 1127195 - DNA, 15 bp, Homo sapiens
aatcatacgagaaga

SEQ ID NO: 1127196 - DNA, 15 bp, Homo sapiens
gaatcatacgagaag

SEQ ID NO: 1127197 - DNA, 15 bp, Homo sapiens
ggaatcatacgagaa

SEQ ID NO: 1127198 - DNA, 15 bp, Homo sapiens
gggaatcatacgaga

SEQ ID NO: 1127199 - DNA, 15 bp, Homo sapiens
tgggaatcatacgag

SEQ ID NO: 1127200 - DNA, 15 bp, Homo sapiens
ttgggaatcatacga

SEQ ID NO: 1127201 - DNA, 15 bp, Homo sapiens
cttgggaatcatacg

SEQ ID NO: 1127202 - DNA, 15 bp, Homo sapiens
acttgggaatcatac

SEQ ID NO: 1127203 - DNA, 15 bp, Homo sapiens
gacttgggaatcata

SEQ ID NO: 1127204 - DNA, 15 bp, Homo sapiens
tgacttgggaatcat

SEQ ID NO: 1127205 - DNA, 15 bp, Homo sapiens
atgacttgggaatca

SEQ ID NO: 1127206 - DNA, 15 bp, Homo sapiens
aatgacttgggaatc

SEQ ID NO: 1127207 - DNA, 15 bp, Homo sapiens
taatgacttgggaat

SEQ ID NO: 1127208 - DNA, 15 bp, Homo sapiens
ttaatgacttgggaa

SEQ ID NO: 1127209 - DNA, 15 bp, Homo sapiens
tttaatgacttggga

SEQ ID NO: 1127210 - DNA, 15 bp, Homo sapiens
atttaatgacttggg

SEQ ID NO: 1127211 - DNA, 15 bp, Homo sapiens
aatttaatgacttgg

SEQ ID NO: 1127212 - DNA, 15 bp, Homo sapiens
gaatttaatgacttg

SEQ ID NO: 1127213 - DNA, 15 bp, Homo sapiens
agaatttaatgactt

SEQ ID NO: 1127214 - DNA, 15 bp, Homo sapiens
aagaatttaatgact

SEQ ID NO: 1127215 - DNA, 15 bp, Homo sapiens
taagaatttaatgac

SEQ ID NO: 1127216 - DNA, 15 bp, Homo sapiens
ttaagaatttaatga

SEQ ID NO: 1127217 - DNA, 15 bp, Homo sapiens
cttaagaatttaatg

SEQ ID NO: 1127218 - DNA, 15 bp, Homo sapiens
gcttaagaatttaat

SEQ ID NO: 1127219 - DNA, 15 bp, Homo sapiens
ggcttaagaatttaa

SEQ ID NO: 1127220 - DNA, 15 bp, Homo sapiens
tggcttaagaattta

SEQ ID NO: 1127221 - DNA, 15 bp, Homo sapiens
atggcttaagaattt

SEQ ID NO: 1127222 - DNA, 15 bp, Homo sapiens
catggcttaagaatt

SEQ ID NO: 1127223 - DNA, 15 bp, Homo sapiens
acatggcttaagaat

SEQ ID NO: 1127224 - DNA, 15 bp, Homo sapiens
aacatggcttaagaa

SEQ ID NO: 1127225 - DNA, 15 bp, Homo sapiens
aaacatggcttaaga

SEQ ID NO: 1127226 - DNA, 15 bp, Homo sapiens
aaaacatggcttaag

SEQ ID NO: 1127227 - DNA, 15 bp, Homo sapiens
taaaacatggcttaa

SEQ ID NO: 1127228 - DNA, 15 bp, Homo sapiens
ctaaaacatggctta

SEQ ID NO: 1127229 - DNA, 15 bp, Homo sapiens
actaaaacatggctt

SEQ ID NO: 1127230 - DNA, 15 bp, Homo sapiens
aactaaaacatggct

SEQ ID NO: 1127231 - DNA, 15 bp, Homo sapiens
aaactaaaacatggc

SEQ ID NO: 1127232 - DNA, 15 bp, Homo sapiens
gaaactaaaacatgg

SEQ ID NO: 1127233 - DNA, 15 bp, Homo sapiens
tgaaactaaaacatg

SEQ ID NO: 1127234 - DNA, 15 bp, Homo sapiens
atgaaactaaaacat

SEQ ID NO: 1127235 - DNA, 15 bp, Homo sapiens
catgaaactaaaaca

SEQ ID NO: 1127236 - DNA, 15 bp, Homo sapiens
gcatgaaactaaaac

SEQ ID NO: 1127237 - DNA, 15 bp, Homo sapiens
ggcatgaaactaaaa

SEQ ID NO: 1127238 - DNA, 15 bp, Homo sapiens
aggcatgaaactaaa

SEQ ID NO: 1127239 - DNA, 15 bp, Homo sapiens
caggcatgaaactaa

SEQ ID NO: 1127240 - DNA, 15 bp, Homo sapiens
tcaggcatgaaacta

SEQ ID NO: 1127241 - DNA, 15 bp, Homo sapiens
ttcaggcatgaaact

SEQ ID NO: 1127242 - DNA, 15 bp, Homo sapiens
tttcaggcatgaaac

SEQ ID NO: 1127243 - DNA, 15 bp, Homo sapiens
ttttcaggcatgaaa

SEQ ID NO: 1127244 - DNA, 15 bp, Homo sapiens
tttttcaggcatgaa

SEQ ID NO: 1127245 - DNA, 15 bp, Homo sapiens
ctttttcaggcatga

SEQ ID NO: 1127246 - DNA, 15 bp, Homo sapiens
actttttcaggcatg

SEQ ID NO: 1127247 - DNA, 15 bp, Homo sapiens
tactttttcaggcat

SEQ ID NO: 1127248 - DNA, 15 bp, Homo sapiens
gtactttttcaggca

SEQ ID NO: 1127249 - DNA, 15 bp, Homo sapiens
ggtactttttcaggc

SEQ ID NO: 1127250 - DNA, 15 bp, Homo sapiens
tggtactttttcagg

SEQ ID NO: 1127251 - DNA, 15 bp, Homo sapiens
atggtactttttcag

SEQ ID NO: 1127252 - DNA, 15 bp, Homo sapiens
catggtactttttca

SEQ ID NO: 1127253 - DNA, 15 bp, Homo sapiens
tcatggtactttttc

SEQ ID NO: 1127254 - DNA, 15 bp, Homo sapiens
ctcatggtacttttt

SEQ ID NO: 1127255 - DNA, 15 bp, Homo sapiens
actcatggtactttt

SEQ ID NO: 1127256 - DNA, 15 bp, Homo sapiens
cactcatggtacttt

SEQ ID NO: 1127257 - DNA, 15 bp, Homo sapiens
acactcatggtactt

SEQ ID NO: 1127258 - DNA, 15 bp, Homo sapiens
aacactcatggtact

SEQ ID NO: 1127259 - DNA, 15 bp, Homo sapiens
aaacactcatggtac

SEQ ID NO: 1127260 - DNA, 15 bp, Homo sapiens
gaaacactcatggta

SEQ ID NO: 1127261 - DNA, 15 bp, Homo sapiens
ggaaacactcatggt

SEQ ID NO: 1127262 - DNA, 15 bp, Homo sapiens
aggaaacactcatgg

SEQ ID NO: 1127263 - DNA, 15 bp, Homo sapiens
aaggaaacactcatg

SEQ ID NO: 1127264 - DNA, 15 bp, Homo sapiens
aaaggaaacactcat

SEQ ID NO: 1127265 - DNA, 15 bp, Homo sapiens
gaaaggaaacactca

SEQ ID NO: 1127266 - DNA, 15 bp, Homo sapiens
tgaaaggaaacactc

SEQ ID NO: 1127267 - DNA, 15 bp, Homo sapiens
atgaaaggaaacact

SEQ ID NO: 1127268 - DNA, 15 bp, Homo sapiens
gatgaaaggaaacac

SEQ ID NO: 1127269 - DNA, 15 bp, Homo sapiens
agatgaaaggaaaca

SEQ ID NO: 1127270 - DNA, 15 bp, Homo sapiens
cagatgaaaggaaac

SEQ ID NO: 1127271 - DNA, 15 bp, Homo sapiens
tcagatgaaaggaaa

SEQ ID NO: 1127272 - DNA, 15 bp, Homo sapiens
ttcagatgaaaggaa

SEQ ID NO: 1127273 - DNA, 15 bp, Homo sapiens
tttcagatgaaagga

SEQ ID NO: 1127274 - DNA, 15 bp, Homo sapiens
ttttcagatgaaagg

SEQ ID NO: 1127275 - DNA, 15 bp, Homo sapiens
gttttcagatgaaag

SEQ ID NO: 1127276 - DNA, 15 bp, Homo sapiens
tgttttcagatgaaa

SEQ ID NO: 1127277 - DNA, 15 bp, Homo sapiens
tgtgttttcagatga

SEQ ID NO: 1127278 - DNA, 15 bp, Homo sapiens
atgtgttttcagatg

SEQ ID NO: 1127279 - DNA, 15 bp, Homo sapiens
aatgtgttttcagat

SEQ ID NO: 1127280 - DNA, 15 bp, Homo sapiens
caatgtgttttcaga

SEQ ID NO: 1127281 - DNA, 15 bp, Homo sapiens
acaatgtgttttcag

SEQ ID NO: 1127282 - DNA, 15 bp, Homo sapiens
aacaatgtgttttca

SEQ ID NO: 1127283 - DNA, 15 bp, Homo sapiens
aaacaatgtgttttc

SEQ ID NO: 1127284 - DNA, 15 bp, Homo sapiens
taaacaatgtgtttt

SEQ ID NO: 1127285 - DNA, 15 bp, Homo sapiens
ataaacaatgtgttt

SEQ ID NO: 1127286 - DNA, 15 bp, Homo sapiens
cataaacaatgtgtt

SEQ ID NO: 1127287 - DNA, 15 bp, Homo sapiens
acataaacaatgtgt

SEQ ID NO: 1127288 - DNA, 15 bp, Homo sapiens
cacataaacaatgtg

SEQ ID NO: 1127289 - DNA, 15 bp, Homo sapiens
acacataaacaatgt

SEQ ID NO: 1127290 - DNA, 15 bp, Homo sapiens
aacacataaacaatg

SEQ ID NO: 1127291 - DNA, 15 bp, Homo sapiens
gaacacataaacaat

SEQ ID NO: 1127292 - DNA, 15 bp, Homo sapiens
tgaacacataaacaa

SEQ ID NO: 1127293 - DNA, 15 bp, Homo sapiens
ttgaacacataaaca

SEQ ID NO: 1127294 - DNA, 15 bp, Homo sapiens
tttgaacacataaac

SEQ ID NO: 1127295 - DNA, 15 bp, Homo sapiens
atttgaacacataaa

SEQ ID NO: 1127296 - DNA, 15 bp, Homo sapiens
gatttgaacacataa

SEQ ID NO: 1127297 - DNA, 15 bp, Homo sapiens
agatttgaacacata

SEQ ID NO: 1127298 - DNA, 15 bp, Homo sapiens
tagatttgaacacat

SEQ ID NO: 1127299 - DNA, 15 bp, Homo sapiens
atagatttgaacaca

SEQ ID NO: 1127300 - DNA, 15 bp, Homo sapiens
gatagatttgaacac

SEQ ID NO: 1127301 - DNA, 15 bp, Homo sapiens
tgatagatttgaaca

SEQ ID NO: 1127302 - DNA, 15 bp, Homo sapiens
ttgatagatttgaac

SEQ ID NO: 1127303 - DNA, 15 bp, Homo sapiens
tttgatagatttgaa

SEQ ID NO: 1127304 - DNA, 15 bp, Homo sapiens
ttttgatagatttga

SEQ ID NO: 1127305 - DNA, 15 bp, Homo sapiens
tttttgatagatttg

SEQ ID NO: 1127306 - DNA, 15 bp, Homo sapiens
ttttttgatagattt

SEQ ID NO: 1127307 - DNA, 15 bp, Homo sapiens
cttttttgatagatt

SEQ ID NO: 1127308 - DNA, 15 bp, Homo sapiens
ccttttttgatagat

SEQ ID NO: 1127309 - DNA, 15 bp, Homo sapiens
tccttttttgataga

SEQ ID NO: 1127310 - DNA, 15 bp, Homo sapiens
ctccttttttgatag

SEQ ID NO: 1127311 - DNA, 15 bp, Homo sapiens
cctccttttttgata

SEQ ID NO: 1127312 - DNA, 15 bp, Homo sapiens
acctccttttttgat

SEQ ID NO: 1127313 - DNA, 15 bp, Homo sapiens
aacctccttttttga

SEQ ID NO: 1127314 - DNA, 15 bp, Homo sapiens
aaacctccttttttg

SEQ ID NO: 1127315 - DNA, 15 bp, Homo sapiens
aaaacctcctttttt

SEQ ID NO: 1127316 - DNA, 15 bp, Homo sapiens
gaaaacctccttttt

SEQ ID NO: 1127317 - DNA, 15 bp, Homo sapiens
agaaaacctcctttt

SEQ ID NO: 1127318 - DNA, 15 bp, Homo sapiens
aagaaaacctccttt

SEQ ID NO: 1127319 - DNA, 15 bp, Homo sapiens
aaagaaaacctcctt

SEQ ID NO: 1127320 - DNA, 15 bp, Homo sapiens
aaaagaaaacctcct

SEQ ID NO: 1127321 - DNA, 15 bp, Homo sapiens
caaaagaaaacctcc

SEQ ID NO: 1127322 - DNA, 15 bp, Homo sapiens
tcaaaagaaaacctc

SEQ ID NO: 1127323 - DNA, 15 bp, Homo sapiens
ttcaaaagaaaacct

SEQ ID NO: 1127324 - DNA, 15 bp, Homo sapiens
tttcaaaagaaaacc

SEQ ID NO: 1127325 - DNA, 15 bp, Homo sapiens
ttttcaaaagaaaac

SEQ ID NO: 1127326 - DNA, 15 bp, Homo sapiens
cttttcaaaagaaaa

SEQ ID NO: 1127327 - DNA, 15 bp, Homo sapiens
gcttttcaaaagaaa

SEQ ID NO: 1127328 - DNA, 15 bp, Homo sapiens
agcttttcaaaagaa

SEQ ID NO: 1127329 - DNA, 15 bp, Homo sapiens
gagcttttcaaaaga

SEQ ID NO: 1127330 - DNA, 15 bp, Homo sapiens
tgagcttttcaaaag

SEQ ID NO: 1127331 - DNA, 15 bp, Homo sapiens
gtgagcttttcaaaa

SEQ ID NO: 1127332 - DNA, 15 bp, Homo sapiens
agtgagcttttcaaa

SEQ ID NO: 1127333 - DNA, 15 bp, Homo sapiens
aagtgagcttttcaa

SEQ ID NO: 1127334 - DNA, 15 bp, Homo sapiens
aaagtgagcttttca

SEQ ID NO: 1127335 - DNA, 15 bp, Homo sapiens
caaagtgagcttttc

SEQ ID NO: 1127336 - DNA, 15 bp, Homo sapiens
acaaagtgagctttt

SEQ ID NO: 1127337 - DNA, 15 bp, Homo sapiens
aacaaagtgagcttt

SEQ ID NO: 1127338 - DNA, 15 bp, Homo sapiens
caacaaagtgagctt

SEQ ID NO: 1127339 - DNA, 15 bp, Homo sapiens
ccaacaaagtgagct

SEQ ID NO: 1127340 - DNA, 15 bp, Homo sapiens
accaacaaagtgagc

SEQ ID NO: 1127341 - DNA, 15 bp, Homo sapiens
taccaacaaagtgag

SEQ ID NO: 1127342 - DNA, 15 bp, Homo sapiens
ttaccaacaaagtga

SEQ ID NO: 1127343 - DNA, 15 bp, Homo sapiens
attaccaacaaagtg

SEQ ID NO: 1127344 - DNA, 15 bp, Homo sapiens
tattaccaacaaagt

SEQ ID NO: 1127345 - DNA, 15 bp, Homo sapiens
atattaccaacaaag

SEQ ID NO: 1127346 - DNA, 15 bp, Homo sapiens
tatattaccaacaaa

SEQ ID NO: 1127347 - DNA, 15 bp, Homo sapiens
atatattaccaacaa

SEQ ID NO: 1127348 - DNA, 15 bp, Homo sapiens
aatatattaccaaca

SEQ ID NO: 1127349 - DNA, 15 bp, Homo sapiens
taatatattaccaac

SEQ ID NO: 1127350 - DNA, 15 bp, Homo sapiens
ttaatatattaccaa

SEQ ID NO: 1127351 - DNA, 15 bp, Homo sapiens
tttaatatattacca

SEQ ID NO: 1127352 - DNA, 15 bp, Homo sapiens
gtttaatatattacc

SEQ ID NO: 1127353 - DNA, 15 bp, Homo sapiens
tgtttaatatattac

SEQ ID NO: 1127354 - DNA, 15 bp, Homo sapiens
atgtttaatatatta

SEQ ID NO: 1127355 - DNA, 15 bp, Homo sapiens
gatgtttaatatatt

SEQ ID NO: 1127356 - DNA, 15 bp, Homo sapiens
agatgtttaatatat

SEQ ID NO: 1127357 - DNA, 15 bp, Homo sapiens
tagatgtttaatata

SEQ ID NO: 1127358 - DNA, 15 bp, Homo sapiens
gtagatgtttaatat

SEQ ID NO: 1127359 - DNA, 15 bp, Homo sapiens
ggtagatgtttaata

SEQ ID NO: 1127360 - DNA, 15 bp, Homo sapiens
tggtagatgtttaat

SEQ ID NO: 1127361 - DNA, 15 bp, Homo sapiens
ttggtagatgtttaa

SEQ ID NO: 1127362 - DNA, 15 bp, Homo sapiens
tttggtagatgttta

SEQ ID NO: 1127363 - DNA, 15 bp, Homo sapiens
gtttggtagatgttt

SEQ ID NO: 1127364 - DNA, 15 bp, Homo sapiens
agtttggtagatgtt

SEQ ID NO: 1127365 - DNA, 15 bp, Homo sapiens
cagtttggtagatgt

SEQ ID NO: 1127366 - DNA, 15 bp, Homo sapiens
ccagtttggtagatg

SEQ ID NO: 1127367 - DNA, 15 bp, Homo sapiens
cccagtttggtagat

SEQ ID NO: 1127368 - DNA, 15 bp, Homo sapiens
ccccagtttggtaga

SEQ ID NO: 1127369 - DNA, 15 bp, Homo sapiens
tccccagtttggtag

SEQ ID NO: 1127370 - DNA, 15 bp, Homo sapiens
ttccccagtttggta

SEQ ID NO: 1127371 - DNA, 15 bp, Homo sapiens
gttccccagtttggt

SEQ ID NO: 1127372 - DNA, 15 bp, Homo sapiens
agttccccagtttgg

SEQ ID NO: 1127373 - DNA, 15 bp, Homo sapiens
tagttccccagtttg

SEQ ID NO: 1127374 - DNA, 15 bp, Homo sapiens
atagttccccagttt

SEQ ID NO: 1127375 - DNA, 15 bp, Homo sapiens
gatagttccccagtt

SEQ ID NO: 1127376 - DNA, 15 bp, Homo sapiens
agatagttccccagt

SEQ ID NO: 1127377 - DNA, 15 bp, Homo sapiens
aagatagttccccag

SEQ ID NO: 1127378 - DNA, 15 bp, Homo sapiens
aaagatagttcccca

SEQ ID NO: 1127379 - DNA, 15 bp, Homo sapiens
aaaagatagttcccc

SEQ ID NO: 1127380 - DNA, 15 bp, Homo sapiens
aaaaagatagttccc

SEQ ID NO: 1127381 - DNA, 15 bp, Homo sapiens
aaaaaagatagttcc

SEQ ID NO: 1127382 - DNA, 15 bp, Homo sapiens
taaaaaagatagttc

SEQ ID NO: 1127383 - DNA, 15 bp, Homo sapiens
ttaaaaaagatagtt

SEQ ID NO: 1127384 - DNA, 15 bp, Homo sapiens
tttaaaaaagatagt

SEQ ID NO: 1127385 - DNA, 15 bp, Homo sapiens
ttttaaaaaagatag

SEQ ID NO: 1127386 - DNA, 15 bp, Homo sapiens
gttttaaaaaagata

SEQ ID NO: 1127387 - DNA, 15 bp, Homo sapiens
agttttaaaaaagat

SEQ ID NO: 1127388 - DNA, 15 bp, Homo sapiens
gagttttaaaaaaga

SEQ ID NO: 1127389 - DNA, 15 bp, Homo sapiens
ggagttttaaaaaag

SEQ ID NO: 1127390 - DNA, 15 bp, Homo sapiens
aggagttttaaaaaa

SEQ ID NO: 1127391 - DNA, 15 bp, Homo sapiens
aaggagttttaaaaa

SEQ ID NO: 1127392 - DNA, 15 bp, Homo sapiens
aaaggagttttaaaa

SEQ ID NO: 1127393 - DNA, 15 bp, Homo sapiens
caaaggagttttaaa

SEQ ID NO: 1127394 - DNA, 15 bp, Homo sapiens
tcaaaggagttttaa

SEQ ID NO: 1127395 - DNA, 15 bp, Homo sapiens
gtcaaaggagtttta

SEQ ID NO: 1127396 - DNA, 15 bp, Homo sapiens
tgtcaaaggagtttt

SEQ ID NO: 1127397 - DNA, 15 bp, Homo sapiens
atgtcaaaggagttt

SEQ ID NO: 1127398 - DNA, 15 bp, Homo sapiens
tatgtcaaaggagtt

SEQ ID NO: 1127399 - DNA, 15 bp, Homo sapiens
ctatgtcaaaggagt

SEQ ID NO: 1127400 - DNA, 15 bp, Homo sapiens
tctatgtcaaaggag

SEQ ID NO: 1127401 - DNA, 15 bp, Homo sapiens
atctatgtcaaagga

SEQ ID NO: 1127402 - DNA, 15 bp, Homo sapiens
gatctatgtcaaagg

SEQ ID NO: 1127403 - DNA, 15 bp, Homo sapiens
ggatctatgtcaaag

SEQ ID NO: 1127404 - DNA, 15 bp, Homo sapiens
tggatctatgtcaaa

SEQ ID NO: 1127405 - DNA, 15 bp, Homo sapiens
ttggatctatgtcaa

SEQ ID NO: 1127406 - DNA, 15 bp, Homo sapiens
attggatctatgtca

SEQ ID NO: 1127407 - DNA, 15 bp, Homo sapiens
cattggatctatgtc

SEQ ID NO: 1127408 - DNA, 15 bp, Homo sapiens
acattggatctatgt

SEQ ID NO: 1127409 - DNA, 15 bp, Homo sapiens
gacattggatctatg

SEQ ID NO: 1127410 - DNA, 15 bp, Homo sapiens
ggacattggatctat

SEQ ID NO: 1127411 - DNA, 15 bp, Homo sapiens
aggacattggatcta

SEQ ID NO: 1127412 - DNA, 15 bp, Homo sapiens
aaggacattggatct

SEQ ID NO: 1127413 - DNA, 15 bp, Homo sapiens
taaggacattggatc

SEQ ID NO: 1127414 - DNA, 15 bp, Homo sapiens
ataaggacattggat

SEQ ID NO: 1127415 - DNA, 15 bp, Homo sapiens
aataaggacattgga

SEQ ID NO: 1127416 - DNA, 15 bp, Homo sapiens
gaataaggacattgg

SEQ ID NO: 1127417 - DNA, 15 bp, Homo sapiens
ggaataaggacattg

SEQ ID NO: 1127418 - DNA, 15 bp, Homo sapiens
aggaataaggacatt

SEQ ID NO: 1127419 - DNA, 15 bp, Homo sapiens
aaggaataaggacat

SEQ ID NO: 1127420 - DNA, 15 bp, Homo sapiens
aaaggaataaggaca

SEQ ID NO: 1127421 - DNA, 15 bp, Homo sapiens
aaaaggaataaggac

SEQ ID NO: 1127422 - DNA, 15 bp, Homo sapiens
taaaaggaataagga

SEQ ID NO: 1127423 - DNA, 15 bp, Homo sapiens
ataaaaggaataagg

SEQ ID NO: 1127424 - DNA, 15 bp, Homo sapiens
aataaaaggaataag

SEQ ID NO: 1127425 - DNA, 15 bp, Homo sapiens
taataaaaggaataa

SEQ ID NO: 1127426 - DNA, 15 bp, Homo sapiens
ttaataaaaggaata

SEQ ID NO: 1127427 - DNA, 15 bp, Homo sapiens
cttaataaaaggaat

SEQ ID NO: 1127428 - DNA, 15 bp, Homo sapiens
gcttaataaaaggaa

SEQ ID NO: 1127429 - DNA, 15 bp, Homo sapiens
tgcttaataaaagga

SEQ ID NO: 1127430 - DNA, 15 bp, Homo sapiens
atgcttaataaaagg

SEQ ID NO: 1127431 - DNA, 15 bp, Homo sapiens
aatgcttaataaaag

SEQ ID NO: 1127432 - DNA, 15 bp, Homo sapiens
aaatgcttaataaaa

SEQ ID NO: 1127433 - DNA, 15 bp, Homo sapiens
caaatgcttaataaa

SEQ ID NO: 1127434 - DNA, 15 bp, Homo sapiens
acaaatgcttaataa

SEQ ID NO: 1127435 - DNA, 15 bp, Homo sapiens
gacaaatgcttaata

SEQ ID NO: 1127436 - DNA, 15 bp, Homo sapiens
agacaaatgcttaat

SEQ ID NO: 1127437 - DNA, 15 bp, Homo sapiens
tagacaaatgcttaa

SEQ ID NO: 1127438 - DNA, 15 bp, Homo sapiens
ttagacaaatgctta

SEQ ID NO: 1127439 - DNA, 15 bp, Homo sapiens
cttagacaaatgctt

SEQ ID NO: 1127440 - DNA, 15 bp, Homo sapiens
gcttagacaaatgct

SEQ ID NO: 1127441 - DNA, 15 bp, Homo sapiens
tgcttagacaaatgc

SEQ ID NO: 1127442 - DNA, 15 bp, Homo sapiens
ctgcttagacaaatg

SEQ ID NO: 1127443 - DNA, 15 bp, Homo sapiens
tctgcttagacaaat

SEQ ID NO: 1127444 - DNA, 15 bp, Homo sapiens
atctgcttagacaaa

SEQ ID NO: 1127445 - DNA, 15 bp, Homo sapiens
catctgcttagacaa

SEQ ID NO: 1127446 - DNA, 15 bp, Homo sapiens
gcatctgcttagaca

SEQ ID NO: 1127447 - DNA, 15 bp, Homo sapiens
agcatctgcttagac

SEQ ID NO: 1127448 - DNA, 15 bp, Homo sapiens
tagcatctgcttaga

SEQ ID NO: 1127449 - DNA, 15 bp, Homo sapiens
ttagcatctgcttag

SEQ ID NO: 1127450 - DNA, 15 bp, Homo sapiens
tttagcatctgctta

SEQ ID NO: 1127451 - DNA, 15 bp, Homo sapiens
atttagcatctgctt

SEQ ID NO: 1127452 - DNA, 15 bp, Homo sapiens
catttagcatctgct

SEQ ID NO: 1127453 - DNA, 15 bp, Homo sapiens
acatttagcatctgc

SEQ ID NO: 1127454 - DNA, 15 bp, Homo sapiens
gacatttagcatctg

SEQ ID NO: 1127455 - DNA, 15 bp, Homo sapiens
tgacatttagcatct

SEQ ID NO: 1127456 - DNA, 15 bp, Homo sapiens
atgacatttagcatc

SEQ ID NO: 1127457 - DNA, 15 bp, Homo sapiens
catgacatttagcat

SEQ ID NO: 1127458 - DNA, 15 bp, Homo sapiens
acatgacatttagca

SEQ ID NO: 1127459 - DNA, 15 bp, Homo sapiens
cacatgacatttagc

SEQ ID NO: 1127460 - DNA, 15 bp, Homo sapiens
ccacatgacatttag

SEQ ID NO: 1127461 - DNA, 15 bp, Homo sapiens
gccacatgacattta

SEQ ID NO: 1127462 - DNA, 15 bp, Homo sapiens
tgccacatgacattt

SEQ ID NO: 1127463 - DNA, 15 bp, Homo sapiens
ttgccacatgacatt

SEQ ID NO: 1127464 - DNA, 15 bp, Homo sapiens
attgccacatgacat

SEQ ID NO: 1127465 - DNA, 15 bp, Homo sapiens
tattgccacatgaca

SEQ ID NO: 1127466 - DNA, 15 bp, Homo sapiens
ttattgccacatgac

SEQ ID NO: 1127467 - DNA, 15 bp, Homo sapiens
gttattgccacatga

SEQ ID NO: 1127468 - DNA, 15 bp, Homo sapiens
agttattgccacatg

SEQ ID NO: 1127469 - DNA, 15 bp, Homo sapiens
aagttattgccacat

SEQ ID NO: 1127470 - DNA, 15 bp, Homo sapiens
caagttattgccaca

SEQ ID NO: 1127471 - DNA, 15 bp, Homo sapiens
gcaagttattgccac

SEQ ID NO: 1127472 - DNA, 15 bp, Homo sapiens
tgcaagttattgcca

SEQ ID NO: 1127473 - DNA, 15 bp, Homo sapiens
gtgcaagttattgcc

SEQ ID NO: 1127474 - DNA, 15 bp, Homo sapiens
tgtgcaagttattgc

SEQ ID NO: 1127475 - DNA, 15 bp, Homo sapiens
ttgtgcaagttattg

SEQ ID NO: 1127476 - DNA, 15 bp, Homo sapiens
attgtgcaagttatt

SEQ ID NO: 1127477 - DNA, 15 bp, Homo sapiens
tattgtgcaagttat

SEQ ID NO: 1127478 - DNA, 15 bp, Homo sapiens
ttattgtgcaagtta

SEQ ID NO: 1127479 - DNA, 15 bp, Homo sapiens
attattgtgcaagtt

SEQ ID NO: 1127480 - DNA, 15 bp, Homo sapiens
gattattgtgcaagt

SEQ ID NO: 1127481 - DNA, 15 bp, Homo sapiens
agattattgtgcaag

SEQ ID NO: 1127482 - DNA, 15 bp, Homo sapiens
gagattattgtgcaa

SEQ ID NO: 1127483 - DNA, 15 bp, Homo sapiens
tgagattattgtgca

SEQ ID NO: 1127484 - DNA, 15 bp, Homo sapiens
atgagattattgtgc

SEQ ID NO: 1127485 - DNA, 15 bp, Homo sapiens
catgagattattgtg

SEQ ID NO: 1127486 - DNA, 15 bp, Homo sapiens
tcatgagattattgt

SEQ ID NO: 1127487 - DNA, 15 bp, Homo sapiens
gtcatgagattattg

SEQ ID NO: 1127488 - DNA, 15 bp, Homo sapiens
tgtcatgagattatt

SEQ ID NO: 1127489 - DNA, 15 bp, Homo sapiens
ctgtcatgagattat

SEQ ID NO: 1127490 - DNA, 15 bp, Homo sapiens
gctgtcatgagatta

SEQ ID NO: 1127491 - DNA, 15 bp, Homo sapiens
agctgtcatgagatt

SEQ ID NO: 1127492 - DNA, 15 bp, Homo sapiens
tagctgtcatgagat

SEQ ID NO: 1127493 - DNA, 15 bp, Homo sapiens
gtagctgtcatgaga

SEQ ID NO: 1127494 - DNA, 15 bp, Homo sapiens
agtagctgtcatgag

SEQ ID NO: 1127495 - DNA, 15 bp, Homo sapiens
gagtagctgtcatga

SEQ ID NO: 1127496 - DNA, 15 bp, Homo sapiens
tgagtagctgtcatg

SEQ ID NO: 1127497 - DNA, 15 bp, Homo sapiens
atgagtagctgtcat

SEQ ID NO: 1127498 - DNA, 15 bp, Homo sapiens
tatgagtagctgtca

SEQ ID NO: 1127499 - DNA, 15 bp, Homo sapiens
ttatgagtagctgtc

SEQ ID NO: 1127500 - DNA, 15 bp, Homo sapiens
attatgagtagctgt

SEQ ID NO: 1127501 - DNA, 15 bp, Homo sapiens
aattatgagtagctg

SEQ ID NO: 1127502 - DNA, 15 bp, Homo sapiens
aaattatgagtagct

SEQ ID NO: 1127503 - DNA, 15 bp, Homo sapiens
aaaattatgagtagc

SEQ ID NO: 1127504 - DNA, 15 bp, Homo sapiens
gaaaattatgagtag

SEQ ID NO: 1127505 - DNA, 15 bp, Homo sapiens
agaaaattatgagta

SEQ ID NO: 1127506 - DNA, 15 bp, Homo sapiens
aagaaaattatgagt

SEQ ID NO: 1127507 - DNA, 15 bp, Homo sapiens
caagaaaattatgag

SEQ ID NO: 1127508 - DNA, 15 bp, Homo sapiens
acaagaaaattatga

SEQ ID NO: 1127509 - DNA, 15 bp, Homo sapiens
cacaagaaaattatg

SEQ ID NO: 1127510 - DNA, 15 bp, Homo sapiens
gcacaagaaaattat

SEQ ID NO: 1127511 - DNA, 15 bp, Homo sapiens
agcacaagaaaatta

SEQ ID NO: 1127512 - DNA, 15 bp, Homo sapiens
aagcacaagaaaatt

SEQ ID NO: 1127513 - DNA, 15 bp, Homo sapiens
taagcacaagaaaat

SEQ ID NO: 1127514 - DNA, 15 bp, Homo sapiens
ctaagcacaagaaaa

SEQ ID NO: 1127515 - DNA, 15 bp, Homo sapiens
cctaagcacaagaaa

SEQ ID NO: 1127516 - DNA, 15 bp, Homo sapiens
gcctaagcacaagaa

SEQ ID NO: 1127517 - DNA, 15 bp, Homo sapiens
tgcctaagcacaaga

SEQ ID NO: 1127518 - DNA, 15 bp, Homo sapiens
ctgcctaagcacaag

SEQ ID NO: 1127519 - DNA, 15 bp, Homo sapiens
gctgcctaagcacaa

SEQ ID NO: 1127520 - DNA, 15 bp, Homo sapiens
agctgcctaagcaca

SEQ ID NO: 1127521 - DNA, 15 bp, Homo sapiens
tagctgcctaagcac

SEQ ID NO: 1127522 - DNA, 15 bp, Homo sapiens
ttagctgcctaagca

SEQ ID NO: 1127523 - DNA, 15 bp, Homo sapiens
attagctgcctaagc

SEQ ID NO: 1127524 - DNA, 15 bp, Homo sapiens
tattagctgcctaag

SEQ ID NO: 1127525 - DNA, 15 bp, Homo sapiens
atattagctgcctaa

SEQ ID NO: 1127526 - DNA, 15 bp, Homo sapiens
aatattagctgccta

SEQ ID NO: 1127527 - DNA, 15 bp, Homo sapiens
caatattagctgcct

SEQ ID NO: 1127528 - DNA, 15 bp, Homo sapiens
acaatattagctgcc

SEQ ID NO: 1127529 - DNA, 15 bp, Homo sapiens
cacaatattagctgc

SEQ ID NO: 1127530 - DNA, 15 bp, Homo sapiens
acacaatattagctg

SEQ ID NO: 1127531 - DNA, 15 bp, Homo sapiens
gacacaatattagct

SEQ ID NO: 1127532 - DNA, 15 bp, Homo sapiens
tgacacaatattagc

SEQ ID NO: 1127533 - DNA, 15 bp, Homo sapiens
ttgacacaatattag

SEQ ID NO: 1127534 - DNA, 15 bp, Homo sapiens
ttttgacacaatatt

SEQ ID NO: 1127535 - DNA, 15 bp, Homo sapiens
tttttgacacaatat

SEQ ID NO: 1127536 - DNA, 15 bp, Homo sapiens
gtttttgacacaata

SEQ ID NO: 1127537 - DNA, 15 bp, Homo sapiens
tgtttttgacacaat

SEQ ID NO: 1127538 - DNA, 15 bp, Homo sapiens
ttgtttttgacacaa

SEQ ID NO: 1127539 - DNA, 15 bp, Homo sapiens
attgtttttgacaca

SEQ ID NO: 1127540 - DNA, 15 bp, Homo sapiens
aattgtttttgacac

SEQ ID NO: 1127541 - DNA, 15 bp, Homo sapiens
gaattgtttttgaca

SEQ ID NO: 1127542 - DNA, 15 bp, Homo sapiens
tgaattgtttttgac

SEQ ID NO: 1127543 - DNA, 15 bp, Homo sapiens
atgaattgtttttga

SEQ ID NO: 1127544 - DNA, 15 bp, Homo sapiens
aatgaattgtttttg

SEQ ID NO: 1127545 - DNA, 15 bp, Homo sapiens
caatgaattgttttt

SEQ ID NO: 1127546 - DNA, 15 bp, Homo sapiens
acaatgaattgtttt

SEQ ID NO: 1127547 - DNA, 15 bp, Homo sapiens
tacaatgaattgttt

SEQ ID NO: 1127548 - DNA, 15 bp, Homo sapiens
atacaatgaattgtt

SEQ ID NO: 1127549 - DNA, 15 bp, Homo sapiens
tatacaatgaattgt

SEQ ID NO: 1127550 - DNA, 15 bp, Homo sapiens
atatacaatgaattg

SEQ ID NO: 1127551 - DNA, 15 bp, Homo sapiens
gatatacaatgaatt

SEQ ID NO: 1127552 - DNA, 15 bp, Homo sapiens
agatatacaatgaat

SEQ ID NO: 1127553 - DNA, 15 bp, Homo sapiens
gagatatacaatgaa

SEQ ID NO: 1127554 - DNA, 15 bp, Homo sapiens
ggagatatacaatga

SEQ ID NO: 1127555 - DNA, 15 bp, Homo sapiens
tggagatatacaatg

SEQ ID NO: 1127556 - DNA, 15 bp, Homo sapiens
atggagatatacaat

SEQ ID NO: 1127557 - DNA, 15 bp, Homo sapiens
aatggagatatacaa

SEQ ID NO: 1127558 - DNA, 15 bp, Homo sapiens
gaatggagatataca

SEQ ID NO: 1127559 - DNA, 15 bp, Homo sapiens
agaatggagatatac

SEQ ID NO: 1127560 - DNA, 15 bp, Homo sapiens
tagaatggagatata

SEQ ID NO: 1127561 - DNA, 15 bp, Homo sapiens
ttagaatggagatat

SEQ ID NO: 1127562 - DNA, 15 bp, Homo sapiens
cttagaatggagata

SEQ ID NO: 1127563 - DNA, 15 bp, Homo sapiens
gcttagaatggagat

SEQ ID NO: 1127564 - DNA, 15 bp, Homo sapiens
tgcttagaatggaga

SEQ ID NO: 1127565 - DNA, 15 bp, Homo sapiens
ttgcttagaatggag

SEQ ID NO: 1127566 - DNA, 15 bp, Homo sapiens
gttgcttagaatgga

SEQ ID NO: 1127567 - DNA, 15 bp, Homo sapiens
tgttgcttagaatgg

SEQ ID NO: 1127568 - DNA, 15 bp, Homo sapiens
ttgttgcttagaatg

SEQ ID NO: 1127569 - DNA, 15 bp, Homo sapiens
gttgttgcttagaat

SEQ ID NO: 1127570 - DNA, 15 bp, Homo sapiens
tgttgttgcttagaa

SEQ ID NO: 1127571 - DNA, 15 bp, Homo sapiens
ttgttgttgcttaga

SEQ ID NO: 1127572 - DNA, 15 bp, Homo sapiens
gttgttgttgcttag

SEQ ID NO: 1127573 - DNA, 15 bp, Homo sapiens
agttgttgttgctta

SEQ ID NO: 1127574 - DNA, 15 bp, Homo sapiens
tagttgttgttgctt

SEQ ID NO: 1127575 - DNA, 15 bp, Homo sapiens
gtagttgttgttgct

SEQ ID NO: 1127576 - DNA, 15 bp, Homo sapiens
tgtagttgttgttgc

SEQ ID NO: 1127577 - DNA, 15 bp, Homo sapiens
ttgtagttgttgttg

SEQ ID NO: 1127578 - DNA, 15 bp, Homo sapiens
tttgtagttgttgtt

SEQ ID NO: 1127579 - DNA, 15 bp, Homo sapiens
ttttgtagttgttgt

SEQ ID NO: 1127580 - DNA, 15 bp, Homo sapiens
tttttgtagttgttg

SEQ ID NO: 1127581 - DNA, 15 bp, Homo sapiens
gtttttgtagttgtt

SEQ ID NO: 1127582 - DNA, 15 bp, Homo sapiens
ggtttttgtagttgt

SEQ ID NO: 1127583 - DNA, 15 bp, Homo sapiens
tggtttttgtagttg

SEQ ID NO: 1127584 - DNA, 15 bp, Homo sapiens
ttggtttttgtagtt

SEQ ID NO: 1127585 - DNA, 15 bp, Homo sapiens
gttggtttttgtagt

SEQ ID NO: 1127586 - DNA, 15 bp, Homo sapiens
agttggtttttgtag

SEQ ID NO: 1127587 - DNA, 15 bp, Homo sapiens
gagttggtttttgta

SEQ ID NO: 1127588 - DNA, 15 bp, Homo sapiens
ggagttggtttttgt

SEQ ID NO: 1127589 - DNA, 15 bp, Homo sapiens
aggagttggtttttg

SEQ ID NO: 1127590 - DNA, 15 bp, Homo sapiens
gaggagttggttttt

SEQ ID NO: 1127591 - DNA, 15 bp, Homo sapiens
tgaggagttggtttt

SEQ ID NO: 1127592 - DNA, 15 bp, Homo sapiens
ctgaggagttggttt

SEQ ID NO: 1127593 - DNA, 15 bp, Homo sapiens
gctgaggagttggtt

SEQ ID NO: 1127594 - DNA, 15 bp, Homo sapiens
tgctgaggagttggt

SEQ ID NO: 1127595 - DNA, 15 bp, Homo sapiens
atgctgaggagttgg

SEQ ID NO: 1127596 - DNA, 15 bp, Homo sapiens
aatgctgaggagttg

SEQ ID NO: 1127597 - DNA, 15 bp, Homo sapiens
taatgctgaggagtt

SEQ ID NO: 1127598 - DNA, 15 bp, Homo sapiens
ataatgctgaggagt

SEQ ID NO: 1127599 - DNA, 15 bp, Homo sapiens
tataatgctgaggag

SEQ ID NO: 1127600 - DNA, 15 bp, Homo sapiens
gtataatgctgagga

SEQ ID NO: 1127601 - DNA, 15 bp, Homo sapiens
agtataatgctgagg

SEQ ID NO: 1127602 - DNA, 15 bp, Homo sapiens
aagtataatgctgag

SEQ ID NO: 1127603 - DNA, 15 bp, Homo sapiens
gaagtataatgctga

SEQ ID NO: 1127604 - DNA, 15 bp, Homo sapiens
tgaagtataatgctg

SEQ ID NO: 1127605 - DNA, 15 bp, Homo sapiens
ttgaagtataatgct

SEQ ID NO: 1127606 - DNA, 15 bp, Homo sapiens
attgaagtataatgc

SEQ ID NO: 1127607 - DNA, 15 bp, Homo sapiens
cattgaagtataatg

SEQ ID NO: 1127608 - DNA, 15 bp, Homo sapiens
ccattgaagtataat

SEQ ID NO: 1127609 - DNA, 15 bp, Homo sapiens
tccattgaagtataa

SEQ ID NO: 1127610 - DNA, 15 bp, Homo sapiens
atccattgaagtata

SEQ ID NO: 1127611 - DNA, 15 bp, Homo sapiens
aatccattgaagtat

SEQ ID NO: 1127612 - DNA, 15 bp, Homo sapiens
aaatccattgaagta

SEQ ID NO: 1127613 - DNA, 15 bp, Homo sapiens
aaaatccattgaagt

SEQ ID NO: 1127614 - DNA, 15 bp, Homo sapiens
caaaatccattgaag

SEQ ID NO: 1127615 - DNA, 15 bp, Homo sapiens
gcaaaatccattgaa

SEQ ID NO: 1127616 - DNA, 15 bp, Homo sapiens
ggcaaaatccattga

SEQ ID NO: 1127617 - DNA, 15 bp, Homo sapiens
tggcaaaatccattg

SEQ ID NO: 1127618 - DNA, 15 bp, Homo sapiens
gtggcaaaatccatt

SEQ ID NO: 1127619 - DNA, 15 bp, Homo sapiens
ggtggcaaaatccat

SEQ ID NO: 1127620 - DNA, 15 bp, Homo sapiens
cggtggcaaaatcca

SEQ ID NO: 1127621 - DNA, 15 bp, Homo sapiens
tcggtggcaaaatcc

SEQ ID NO: 1127622 - DNA, 15 bp, Homo sapiens
atcggtggcaaaatc

SEQ ID NO: 1127623 - DNA, 15 bp, Homo sapiens
catcggtggcaaaat

SEQ ID NO: 1127624 - DNA, 15 bp, Homo sapiens
ccatcggtggcaaaa

SEQ ID NO: 1127625 - DNA, 15 bp, Homo sapiens
gccatcggtggcaaa

SEQ ID NO: 1127626 - DNA, 15 bp, Homo sapiens
ggccatcggtggcaa

SEQ ID NO: 1127627 - DNA, 15 bp, Homo sapiens
aggccatcggtggca

SEQ ID NO: 1127628 - DNA, 15 bp, Homo sapiens
caggccatcggtggc

SEQ ID NO: 1127629 - DNA, 15 bp, Homo sapiens
gcaggccatcggtgg

SEQ ID NO: 1127630 - DNA, 15 bp, Homo sapiens
agcaggccatcggtg

SEQ ID NO: 1127631 - DNA, 15 bp, Homo sapiens
tagcaggccatcggt

SEQ ID NO: 1127632 - DNA, 15 bp, Homo sapiens
ttagcaggccatcgg

SEQ ID NO: 1127633 - DNA, 15 bp, Homo sapiens
cttagcaggccatcg

SEQ ID NO: 1127634 - DNA, 15 bp, Homo sapiens
acttagcaggccatc

SEQ ID NO: 1127635 - DNA, 15 bp, Homo sapiens
gacttagcaggccat

SEQ ID NO: 1127636 - DNA, 15 bp, Homo sapiens
tgacttagcaggcca

SEQ ID NO: 1127637 - DNA, 15 bp, Homo sapiens
ttgacttagcaggcc

SEQ ID NO: 1127638 - DNA, 15 bp, Homo sapiens
tttgacttagcaggc

SEQ ID NO: 1127639 - DNA, 15 bp, Homo sapiens
ctttgacttagcagg

SEQ ID NO: 1127640 - DNA, 15 bp, Homo sapiens
tctttgacttagcag

SEQ ID NO: 1127641 - DNA, 15 bp, Homo sapiens
ttctttgacttagca

SEQ ID NO: 1127642 - DNA, 15 bp, Homo sapiens
cttctttgacttagc

SEQ ID NO: 1127643 - DNA, 15 bp, Homo sapiens
tcttctttgacttag

SEQ ID NO: 1127644 - DNA, 15 bp, Homo sapiens
ctcttctttgactta

SEQ ID NO: 1127645 - DNA, 15 bp, Homo sapiens
actcttctttgactt

SEQ ID NO: 1127646 - DNA, 15 bp, Homo sapiens
aactcttctttgact

SEQ ID NO: 1127647 - DNA, 15 bp, Homo sapiens
taactcttctttgac

SEQ ID NO: 1127648 - DNA, 15 bp, Homo sapiens
ataactcttctttga

SEQ ID NO: 1127649 - DNA, 15 bp, Homo sapiens
aataactcttctttg

SEQ ID NO: 1127650 - DNA, 15 bp, Homo sapiens
taataactcttcttt

SEQ ID NO: 1127651 - DNA, 15 bp, Homo sapiens
ataataactcttctt

SEQ ID NO: 1127652 - DNA, 15 bp, Homo sapiens
tataataactcttct

SEQ ID NO: 1127653 - DNA, 15 bp, Homo sapiens
ttataataactcttc

SEQ ID NO: 1127654 - DNA, 15 bp, Homo sapiens
tttataataactctt

SEQ ID NO: 1127655 - DNA, 15 bp, Homo sapiens
ctttataataactct

SEQ ID NO: 1127656 - DNA, 15 bp, Homo sapiens
cctttataataactc

SEQ ID NO: 1127657 - DNA, 15 bp, Homo sapiens
ccctttataataact

SEQ ID NO: 1127658 - DNA, 15 bp, Homo sapiens
accctttataataac

SEQ ID NO: 1127659 - DNA, 15 bp, Homo sapiens
aaccctttataataa

SEQ ID NO: 1127660 - DNA, 15 bp, Homo sapiens
taaccctttataata

SEQ ID NO: 1127661 - DNA, 15 bp, Homo sapiens
ttaaccctttataat

SEQ ID NO: 1127662 - DNA, 15 bp, Homo sapiens
gttaaccctttataa

SEQ ID NO: 1127663 - DNA, 15 bp, Homo sapiens
tgttaaccctttata

SEQ ID NO: 1127664 - DNA, 15 bp, Homo sapiens
gtgttaaccctttat

SEQ ID NO: 1127665 - DNA, 15 bp, Homo sapiens
cgtgttaacccttta

SEQ ID NO: 1127666 - DNA, 15 bp, Homo sapiens
acgtgttaacccttt

SEQ ID NO: 1127667 - DNA, 15 bp, Homo sapiens
tacgtgttaaccctt

SEQ ID NO: 1127668 - DNA, 15 bp, Homo sapiens
atacgtgttaaccct

SEQ ID NO: 1127669 - DNA, 15 bp, Homo sapiens
tatacgtgttaaccc

SEQ ID NO: 1127670 - DNA, 15 bp, Homo sapiens
gtatacgtgttaacc

SEQ ID NO: 1127671 - DNA, 15 bp, Homo sapiens
cgtatacgtgttaac

SEQ ID NO: 1127672 - DNA, 15 bp, Homo sapiens
ccgtatacgtgttaa

SEQ ID NO: 1127673 - DNA, 15 bp, Homo sapiens
accgtatacgtgtta

SEQ ID NO: 1127674 - DNA, 15 bp, Homo sapiens
aaccgtatacgtgtt

SEQ ID NO: 1127675 - DNA, 15 bp, Homo sapiens
gaaccgtatacgtgt

SEQ ID NO: 1127676 - DNA, 15 bp, Homo sapiens
agaaccgtatacgtg

SEQ ID NO: 1127677 - DNA, 15 bp, Homo sapiens
aagaaccgtatacgt

SEQ ID NO: 1127678 - DNA, 15 bp, Homo sapiens
taagaaccgtatacg

SEQ ID NO: 1127679 - DNA, 15 bp, Homo sapiens
gtaagaaccgtatac

SEQ ID NO: 1127680 - DNA, 15 bp, Homo sapiens
agtaagaaccgtata

SEQ ID NO: 1127681 - DNA, 15 bp, Homo sapiens
tagtaagaaccgtat

SEQ ID NO: 1127682 - DNA, 15 bp, Homo sapiens
gtagtaagaaccgta

SEQ ID NO: 1127683 - DNA, 15 bp, Homo sapiens
tgtagtaagaaccgt

SEQ ID NO: 1127684 - DNA, 15 bp, Homo sapiens
atgtagtaagaaccg

SEQ ID NO: 1127685 - DNA, 15 bp, Homo sapiens
tatgtagtaagaacc

SEQ ID NO: 1127686 - DNA, 15 bp, Homo sapiens
gtatgtagtaagaac

SEQ ID NO: 1127687 - DNA, 15 bp, Homo sapiens
ggtatgtagtaagaa

SEQ ID NO: 1127688 - DNA, 15 bp, Homo sapiens
tggtatgtagtaaga

SEQ ID NO: 1127689 - DNA, 15 bp, Homo sapiens
ctggtatgtagtaag

SEQ ID NO: 1127690 - DNA, 15 bp, Homo sapiens
cctggtatgtagtaa

SEQ ID NO: 1127691 - DNA, 15 bp, Homo sapiens
gcctggtatgtagta

SEQ ID NO: 1127692 - DNA, 15 bp, Homo sapiens
tgcctggtatgtagt

SEQ ID NO: 1127693 - DNA, 15 bp, Homo sapiens
gtgcctggtatgtag

SEQ ID NO: 1127694 - DNA, 15 bp, Homo sapiens
agtgcctggtatgta

SEQ ID NO: 1127695 - DNA, 15 bp, Homo sapiens
cagtgcctggtatgt

SEQ ID NO: 1127696 - DNA, 15 bp, Homo sapiens
acagtgcctggtatg

SEQ ID NO: 1127697 - DNA, 15 bp, Homo sapiens
aacagtgcctggtat

SEQ ID NO: 1127698 - DNA, 15 bp, Homo sapiens
gaacagtgcctggta

SEQ ID NO: 1127699 - DNA, 15 bp, Homo sapiens
agaacagtgcctggt

SEQ ID NO: 1127700 - DNA, 15 bp, Homo sapiens
ttagaacagtgcctg

SEQ ID NO: 1127701 - DNA, 15 bp, Homo sapiens
cttagaacagtgcct

SEQ ID NO: 1127702 - DNA, 15 bp, Homo sapiens
gcttagaacagtgcc

SEQ ID NO: 1127703 - DNA, 15 bp, Homo sapiens
tgcttagaacagtgc

SEQ ID NO: 1127704 - DNA, 15 bp, Homo sapiens
gtgcttagaacagtg

SEQ ID NO: 1127705 - DNA, 15 bp, Homo sapiens
agtgcttagaacagt

SEQ ID NO: 1127706 - DNA, 15 bp, Homo sapiens
aagtgcttagaacag

SEQ ID NO: 1127707 - DNA, 15 bp, Homo sapiens
gaagtgcttagaaca

SEQ ID NO: 1127708 - DNA, 15 bp, Homo sapiens
tgaagtgcttagaac

SEQ ID NO: 1127709 - DNA, 15 bp, Homo sapiens
gtgaagtgcttagaa

SEQ ID NO: 1127710 - DNA, 15 bp, Homo sapiens
tgtgaagtgcttaga

SEQ ID NO: 1127711 - DNA, 15 bp, Homo sapiens
gtgtgaagtgcttag

SEQ ID NO: 1127712 - DNA, 15 bp, Homo sapiens
ggtgtgaagtgctta

SEQ ID NO: 1127713 - DNA, 15 bp, Homo sapiens
aggtgtgaagtgctt

SEQ ID NO: 1127714 - DNA, 15 bp, Homo sapiens
taggtgtgaagtgct

SEQ ID NO: 1127715 - DNA, 15 bp, Homo sapiens
ataggtgtgaagtgc

SEQ ID NO: 1127716 - DNA, 15 bp, Homo sapiens
aataggtgtgaagtg

SEQ ID NO: 1127717 - DNA, 15 bp, Homo sapiens
taataggtgtgaagt

SEQ ID NO: 1127718 - DNA, 15 bp, Homo sapiens
ttaataggtgtgaag

SEQ ID NO: 1127719 - DNA, 15 bp, Homo sapiens
gttaataggtgtgaa

SEQ ID NO: 1127720 - DNA, 15 bp, Homo sapiens
agttaataggtgtga

SEQ ID NO: 1127721 - DNA, 15 bp, Homo sapiens
gagttaataggtgtg

SEQ ID NO: 1127722 - DNA, 15 bp, Homo sapiens
tgagttaataggtgt

SEQ ID NO: 1127723 - DNA, 15 bp, Homo sapiens
atgagttaataggtg

SEQ ID NO: 1127724 - DNA, 15 bp, Homo sapiens
aatgagttaataggt

SEQ ID NO: 1127725 - DNA, 15 bp, Homo sapiens
taatgagttaatagg

SEQ ID NO: 1127726 - DNA, 15 bp, Homo sapiens
ttaatgagttaatag

SEQ ID NO: 1127727 - DNA, 15 bp, Homo sapiens
tttaatgagttaata

SEQ ID NO: 1127728 - DNA, 15 bp, Homo sapiens
gtttaatgagttaat

SEQ ID NO: 1127729 - DNA, 15 bp, Homo sapiens
ggtttaatgagttaa

SEQ ID NO: 1127730 - DNA, 15 bp, Homo sapiens
gggtttaatgagtta

SEQ ID NO: 1127731 - DNA, 15 bp, Homo sapiens
agggtttaatgagtt

SEQ ID NO: 1127732 - DNA, 15 bp, Homo sapiens
gagggtttaatgagt

SEQ ID NO: 1127733 - DNA, 15 bp, Homo sapiens
tgagggtttaatgag

SEQ ID NO: 1127734 - DNA, 15 bp, Homo sapiens
gtgagggtttaatga

SEQ ID NO: 1127735 - DNA, 15 bp, Homo sapiens
tgtgagggtttaatg

SEQ ID NO: 1127736 - DNA, 15 bp, Homo sapiens
ttgtgagggtttaat

SEQ ID NO: 1127737 - DNA, 15 bp, Homo sapiens
gttgtgagggtttaa

SEQ ID NO: 1127738 - DNA, 15 bp, Homo sapiens
tgttgtgagggttta

SEQ ID NO: 1127739 - DNA, 15 bp, Homo sapiens
ttgttgtgagggttt

SEQ ID NO: 1127740 - DNA, 15 bp, Homo sapiens
gttgttgtgagggtt

SEQ ID NO: 1127741 - DNA, 15 bp, Homo sapiens
ggttgttgtgagggt

SEQ ID NO: 1127742 - DNA, 15 bp, Homo sapiens
gggttgttgtgaggg

SEQ ID NO: 1127743 - DNA, 15 bp, Homo sapiens
agggttgttgtgagg

SEQ ID NO: 1127744 - DNA, 15 bp, Homo sapiens
cagggttgttgtgag

SEQ ID NO: 1127745 - DNA, 15 bp, Homo sapiens
acagggttgttgtga

SEQ ID NO: 1127746 - DNA, 15 bp, Homo sapiens
aacagggttgttgtg

SEQ ID NO: 1127747 - DNA, 15 bp, Homo sapiens
caacagggttgttgt

SEQ ID NO: 1127748 - DNA, 15 bp, Homo sapiens
tcaacagggttgttg

SEQ ID NO: 1127749 - DNA, 15 bp, Homo sapiens
ctcaacagggttgtt

SEQ ID NO: 1127750 - DNA, 15 bp, Homo sapiens
gctcaacagggttgt

SEQ ID NO: 1127751 - DNA, 15 bp, Homo sapiens
tgctcaacagggttg

SEQ ID NO: 1127752 - DNA, 15 bp, Homo sapiens
ttgctcaacagggtt

SEQ ID NO: 1127753 - DNA, 15 bp, Homo sapiens
gttgctcaacagggt

SEQ ID NO: 1127754 - DNA, 15 bp, Homo sapiens
agttgctcaacaggg

SEQ ID NO: 1127755 - DNA, 15 bp, Homo sapiens
tagttgctcaacagg

SEQ ID NO: 1127756 - DNA, 15 bp, Homo sapiens
ttagttgctcaacag

SEQ ID NO: 1127757 - DNA, 15 bp, Homo sapiens
attagttgctcaaca

SEQ ID NO: 1127758 - DNA, 15 bp, Homo sapiens
tattagttgctcaac

SEQ ID NO: 1127759 - DNA, 15 bp, Homo sapiens
atattagttgctcaa

SEQ ID NO: 1127760 - DNA, 15 bp, Homo sapiens
aatattagttgctca

SEQ ID NO: 1127761 - DNA, 15 bp, Homo sapiens
taatattagttgctc

SEQ ID NO: 1127762 - DNA, 15 bp, Homo sapiens
ataatattagttgct

SEQ ID NO: 1127763 - DNA, 15 bp, Homo sapiens
aataatattagttgc

SEQ ID NO: 1127764 - DNA, 15 bp, Homo sapiens
taataatattagttg

SEQ ID NO: 1127765 - DNA, 15 bp, Homo sapiens
ctaataatattagtt

SEQ ID NO: 1127766 - DNA, 15 bp, Homo sapiens
gctaataatattagt

SEQ ID NO: 1127767 - DNA, 15 bp, Homo sapiens
agctaataatattag

SEQ ID NO: 1127768 - DNA, 15 bp, Homo sapiens
gagctaataatatta

SEQ ID NO: 1127769 - DNA, 15 bp, Homo sapiens
ggagctaataatatt

SEQ ID NO: 1127770 - DNA, 15 bp, Homo sapiens
tggagctaataatat

SEQ ID NO: 1127771 - DNA, 15 bp, Homo sapiens
atggagctaataata

SEQ ID NO: 1127772 - DNA, 15 bp, Homo sapiens
gatggagctaataat

SEQ ID NO: 1127773 - DNA, 15 bp, Homo sapiens
agatggagctaataa

SEQ ID NO: 1127774 - DNA, 15 bp, Homo sapiens
tagatggagctaata

SEQ ID NO: 1127775 - DNA, 15 bp, Homo sapiens
ttagatggagctaat

SEQ ID NO: 1127776 - DNA, 15 bp, Homo sapiens
tttagatggagctaa

SEQ ID NO: 1127777 - DNA, 15 bp, Homo sapiens
ctttagatggagcta

SEQ ID NO: 1127778 - DNA, 15 bp, Homo sapiens
tctttagatggagct

SEQ ID NO: 1127779 - DNA, 15 bp, Homo sapiens
atctttagatggagc

SEQ ID NO: 1127780 - DNA, 15 bp, Homo sapiens
tatctttagatggag

SEQ ID NO: 1127781 - DNA, 15 bp, Homo sapiens
ctatctttagatgga

SEQ ID NO: 1127782 - DNA, 15 bp, Homo sapiens
tctatctttagatgg

SEQ ID NO: 1127783 - DNA, 15 bp, Homo sapiens
ttctatctttagatg

SEQ ID NO: 1127784 - DNA, 15 bp, Homo sapiens
tttctatctttagat

SEQ ID NO: 1127785 - DNA, 15 bp, Homo sapiens
ttttctatctttaga

SEQ ID NO: 1127786 - DNA, 15 bp, Homo sapiens
gttttctatctttag

SEQ ID NO: 1127787 - DNA, 15 bp, Homo sapiens
agttttctatcttta

SEQ ID NO: 1127788 - DNA, 15 bp, Homo sapiens
cagttttctatcttt

SEQ ID NO: 1127789 - DNA, 15 bp, Homo sapiens
tcagttttctatctt

SEQ ID NO: 1127790 - DNA, 15 bp, Homo sapiens
ctcagttttctatct

SEQ ID NO: 1127791 - DNA, 15 bp, Homo sapiens
cctcagttttctatc

SEQ ID NO: 1127792 - DNA, 15 bp, Homo sapiens
acctcagttttctat

SEQ ID NO: 1127793 - DNA, 15 bp, Homo sapiens
aacctcagttttcta

SEQ ID NO: 1127794 - DNA, 15 bp, Homo sapiens
gaacctcagttttct

SEQ ID NO: 1127795 - DNA, 15 bp, Homo sapiens
agaacctcagttttc

SEQ ID NO: 1127796 - DNA, 15 bp, Homo sapiens
cagaacctcagtttt

SEQ ID NO: 1127797 - DNA, 15 bp, Homo sapiens
tcagaacctcagttt

SEQ ID NO: 1127798 - DNA, 15 bp, Homo sapiens
ctcagaacctcagtt

SEQ ID NO: 1127799 - DNA, 15 bp, Homo sapiens
tctcagaacctcagt

SEQ ID NO: 1127800 - DNA, 15 bp, Homo sapiens
ctctcagaacctcag

SEQ ID NO: 1127801 - DNA, 15 bp, Homo sapiens
cctctcagaacctca

SEQ ID NO: 1127802 - DNA, 15 bp, Homo sapiens
acctctcagaacctc

SEQ ID NO: 1127803 - DNA, 15 bp, Homo sapiens
gacctctcagaacct

SEQ ID NO: 1127804 - DNA, 15 bp, Homo sapiens
tgacctctcagaacc

SEQ ID NO: 1127805 - DNA, 15 bp, Homo sapiens
ttgacctctcagaac

SEQ ID NO: 1127806 - DNA, 15 bp, Homo sapiens
tttgacctctcagaa

SEQ ID NO: 1127807 - DNA, 15 bp, Homo sapiens
atttgacctctcaga

SEQ ID NO: 1127808 - DNA, 15 bp, Homo sapiens
tatttgacctctcag

SEQ ID NO: 1127809 - DNA, 15 bp, Homo sapiens
ctatttgacctctca

SEQ ID NO: 1127810 - DNA, 15 bp, Homo sapiens
gctatttgacctctc

SEQ ID NO: 1127811 - DNA, 15 bp, Homo sapiens
agctatttgacctct

SEQ ID NO: 1127812 - DNA, 15 bp, Homo sapiens
aagctatttgacctc

SEQ ID NO: 1127813 - DNA, 15 bp, Homo sapiens
caagctatttgacct

SEQ ID NO: 1127814 - DNA, 15 bp, Homo sapiens
gcaagctatttgacc

SEQ ID NO: 1127815 - DNA, 15 bp, Homo sapiens
agcaagctatttgac

SEQ ID NO: 1127816 - DNA, 15 bp, Homo sapiens
gagcaagctatttga

SEQ ID NO: 1127817 - DNA, 15 bp, Homo sapiens
tgagcaagctatttg

SEQ ID NO: 1127818 - DNA, 15 bp, Homo sapiens
ttgagcaagctattt

SEQ ID NO: 1127819 - DNA, 15 bp, Homo sapiens
cttgagcaagctatt

SEQ ID NO: 1127820 - DNA, 15 bp, Homo sapiens
tcttgagcaagctat

SEQ ID NO: 1127821 - DNA, 15 bp, Homo sapiens
atcttgagcaagcta

SEQ ID NO: 1127822 - DNA, 15 bp, Homo sapiens
aatcttgagcaagct

SEQ ID NO: 1127823 - DNA, 15 bp, Homo sapiens
taatcttgagcaagc

SEQ ID NO: 1127824 - DNA, 15 bp, Homo sapiens
ataatcttgagcaag

SEQ ID NO: 1127825 - DNA, 15 bp, Homo sapiens
tataatcttgagcaa

SEQ ID NO: 1127826 - DNA, 15 bp, Homo sapiens
gtataatcttgagca

SEQ ID NO: 1127827 - DNA, 15 bp, Homo sapiens
tgtataatcttgagc

SEQ ID NO: 1127828 - DNA, 15 bp, Homo sapiens
ttgtataatcttgag

SEQ ID NO: 1127829 - DNA, 15 bp, Homo sapiens
gttgtataatcttga

SEQ ID NO: 1127830 - DNA, 15 bp, Homo sapiens
tgttgtataatcttg

SEQ ID NO: 1127831 - DNA, 15 bp, Homo sapiens
ttgttgtataatctt

SEQ ID NO: 1127832 - DNA, 15 bp, Homo sapiens
cttgttgtataatct

SEQ ID NO: 1127833 - DNA, 15 bp, Homo sapiens
acttgttgtataatc

SEQ ID NO: 1127834 - DNA, 15 bp, Homo sapiens
tacttgttgtataat

SEQ ID NO: 1127835 - DNA, 15 bp, Homo sapiens
ttacttgttgtataa

SEQ ID NO: 1127836 - DNA, 15 bp, Homo sapiens
tttacttgttgtata

SEQ ID NO: 1127837 - DNA, 15 bp, Homo sapiens
atttacttgttgtat

SEQ ID NO: 1127838 - DNA, 15 bp, Homo sapiens
catttacttgttgta

SEQ ID NO: 1127839 - DNA, 15 bp, Homo sapiens
ccatttacttgttgt

SEQ ID NO: 1127840 - DNA, 15 bp, Homo sapiens
accatttacttgttg

SEQ ID NO: 1127841 - DNA, 15 bp, Homo sapiens
taccatttacttgtt

SEQ ID NO: 1127842 - DNA, 15 bp, Homo sapiens
ttaccatttacttgt

SEQ ID NO: 1127843 - DNA, 15 bp, Homo sapiens
tttaccatttacttg

SEQ ID NO: 1127844 - DNA, 15 bp, Homo sapiens
ctttaccatttactt

SEQ ID NO: 1127845 - DNA, 15 bp, Homo sapiens
tctttaccatttact

SEQ ID NO: 1127846 - DNA, 15 bp, Homo sapiens
gtctttaccatttac

SEQ ID NO: 1127847 - DNA, 15 bp, Homo sapiens
tgtctttaccattta

SEQ ID NO: 1127848 - DNA, 15 bp, Homo sapiens
ttgtctttaccattt

SEQ ID NO: 1127849 - DNA, 15 bp, Homo sapiens
cttgtctttaccatt

SEQ ID NO: 1127850 - DNA, 15 bp, Homo sapiens
ccttgtctttaccat

SEQ ID NO: 1127851 - DNA, 15 bp, Homo sapiens
accttgtctttacca

SEQ ID NO: 1127852 - DNA, 15 bp, Homo sapiens
aaccttgtctttacc

SEQ ID NO: 1127853 - DNA, 15 bp, Homo sapiens
gaaccttgtctttac

SEQ ID NO: 1127854 - DNA, 15 bp, Homo sapiens
tgaaccttgtcttta

SEQ ID NO: 1127855 - DNA, 15 bp, Homo sapiens
atgaaccttgtcttt

SEQ ID NO: 1127856 - DNA, 15 bp, Homo sapiens
tatgaaccttgtctt

SEQ ID NO: 1127857 - DNA, 15 bp, Homo sapiens
gtatgaaccttgtct

SEQ ID NO: 1127858 - DNA, 15 bp, Homo sapiens
agtatgaaccttgtc

SEQ ID NO: 1127859 - DNA, 15 bp, Homo sapiens
cagtatgaaccttgt

SEQ ID NO: 1127860 - DNA, 15 bp, Homo sapiens
tcagtatgaaccttg

SEQ ID NO: 1127861 - DNA, 15 bp, Homo sapiens
ctcagtatgaacctt

SEQ ID NO: 1127862 - DNA, 15 bp, Homo sapiens
cctcagtatgaacct

SEQ ID NO: 1127863 - DNA, 15 bp, Homo sapiens
acctcagtatgaacc

SEQ ID NO: 1127864 - DNA, 15 bp, Homo sapiens
cacctcagtatgaac

SEQ ID NO: 1127865 - DNA, 15 bp, Homo sapiens
tcacctcagtatgaa

SEQ ID NO: 1127866 - DNA, 15 bp, Homo sapiens
atcacctcagtatga

SEQ ID NO: 1127867 - DNA, 15 bp, Homo sapiens
gatcacctcagtatg

SEQ ID NO: 1127868 - DNA, 15 bp, Homo sapiens
agatcacctcagtat

SEQ ID NO: 1127869 - DNA, 15 bp, Homo sapiens
cagatcacctcagta

SEQ ID NO: 1127870 - DNA, 15 bp, Homo sapiens
gcagatcacctcagt

SEQ ID NO: 1127871 - DNA, 15 bp, Homo sapiens
ggcagatcacctcag

SEQ ID NO: 1127872 - DNA, 15 bp, Homo sapiens
aggcagatcacctca

SEQ ID NO: 1127873 - DNA, 15 bp, Homo sapiens
aaggcagatcacctc

SEQ ID NO: 1127874 - DNA, 15 bp, Homo sapiens
gaaggcagatcacct

SEQ ID NO: 1127875 - DNA, 15 bp, Homo sapiens
tgaaggcagatcacc

SEQ ID NO: 1127876 - DNA, 15 bp, Homo sapiens
ctgaaggcagatcac

SEQ ID NO: 1127877 - DNA, 15 bp, Homo sapiens
tctgaaggcagatca

SEQ ID NO: 1127878 - DNA, 15 bp, Homo sapiens
ttctgaaggcagatc

SEQ ID NO: 1127879 - DNA, 15 bp, Homo sapiens
cttctgaaggcagat

SEQ ID NO: 1127880 - DNA, 15 bp, Homo sapiens
tcttctgaaggcaga

SEQ ID NO: 1127881 - DNA, 15 bp, Homo sapiens
ctcttctgaaggcag

SEQ ID NO: 1127882 - DNA, 15 bp, Homo sapiens
actcttctgaaggca

SEQ ID NO: 1127883 - DNA, 15 bp, Homo sapiens
gactcttctgaaggc

SEQ ID NO: 1127884 - DNA, 15 bp, Homo sapiens
tgactcttctgaagg

SEQ ID NO: 1127885 - DNA, 15 bp, Homo sapiens
ctgactcttctgaag

SEQ ID NO: 1127886 - DNA, 15 bp, Homo sapiens
actgactcttctgaa

SEQ ID NO: 1127887 - DNA, 15 bp, Homo sapiens
cactgactcttctga

SEQ ID NO: 1127888 - DNA, 15 bp, Homo sapiens
tcactgactcttctg

SEQ ID NO: 1127889 - DNA, 15 bp, Homo sapiens
atcactgactcttct

SEQ ID NO: 1127890 - DNA, 15 bp, Homo sapiens
gatcactgactcttc

SEQ ID NO: 1127891 - DNA, 15 bp, Homo sapiens
agatcactgactctt

SEQ ID NO: 1127892 - DNA, 15 bp, Homo sapiens
aagatcactgactct

SEQ ID NO: 1127893 - DNA, 15 bp, Homo sapiens
caagatcactgactc

SEQ ID NO: 1127894 - DNA, 15 bp, Homo sapiens
tcaagatcactgact

SEQ ID NO: 1127895 - DNA, 15 bp, Homo sapiens
ttcaagatcactgac

SEQ ID NO: 1127896 - DNA, 15 bp, Homo sapiens
gttcaagatcactga

SEQ ID NO: 1127897 - DNA, 15 bp, Homo sapiens
tgttcaagatcactg

SEQ ID NO: 1127898 - DNA, 15 bp, Homo sapiens
gtgttcaagatcact

SEQ ID NO: 1127899 - DNA, 15 bp, Homo sapiens
agtgttcaagatcac

SEQ ID NO: 1127900 - DNA, 15 bp, Homo sapiens
aagtgttcaagatca

SEQ ID NO: 1127901 - DNA, 15 bp, Homo sapiens
gaagtgttcaagatc

SEQ ID NO: 1127902 - DNA, 15 bp, Homo sapiens
ggaagtgttcaagat

SEQ ID NO: 1127903 - DNA, 15 bp, Homo sapiens
gggaagtgttcaaga

SEQ ID NO: 1127904 - DNA, 15 bp, Homo sapiens
agggaagtgttcaag

SEQ ID NO: 1127905 - DNA, 15 bp, Homo sapiens
aagggaagtgttcaa

SEQ ID NO: 1127906 - DNA, 15 bp, Homo sapiens
aaagggaagtgttca

SEQ ID NO: 1127907 - DNA, 15 bp, Homo sapiens
gaaagggaagtgttc

SEQ ID NO: 1127908 - DNA, 15 bp, Homo sapiens
tgaaagggaagtgtt

SEQ ID NO: 1127909 - DNA, 15 bp, Homo sapiens
ctgaaagggaagtgt

SEQ ID NO: 1127910 - DNA, 15 bp, Homo sapiens
gctgaaagggaagtg

SEQ ID NO: 1127911 - DNA, 15 bp, Homo sapiens
ggctgaaagggaagt

SEQ ID NO: 1127912 - DNA, 15 bp, Homo sapiens
aggctgaaagggaag

SEQ ID NO: 1127913 - DNA, 15 bp, Homo sapiens
aaggctgaaagggaa

SEQ ID NO: 1127914 - DNA, 15 bp, Homo sapiens
gaaggctgaaaggga

SEQ ID NO: 1127915 - DNA, 15 bp, Homo sapiens
agaaggctgaaaggg

SEQ ID NO: 1127916 - DNA, 15 bp, Homo sapiens
tagaaggctgaaagg

SEQ ID NO: 1127917 - DNA, 15 bp, Homo sapiens
ttagaaggctgaaag

SEQ ID NO: 1127918 - DNA, 15 bp, Homo sapiens
tttagaaggctgaaa

SEQ ID NO: 1127919 - DNA, 15 bp, Homo sapiens
atttagaaggctgaa

SEQ ID NO: 1127920 - DNA, 15 bp, Homo sapiens
aatttagaaggctga

SEQ ID NO: 1127921 - DNA, 15 bp, Homo sapiens
gaatttagaaggctg

SEQ ID NO: 1127922 - DNA, 15 bp, Homo sapiens
agaatttagaaggct

SEQ ID NO: 1127923 - DNA, 15 bp, Homo sapiens
gagaatttagaaggc

SEQ ID NO: 1127924 - DNA, 15 bp, Homo sapiens
agagaatttagaagg

SEQ ID NO: 1127925 - DNA, 15 bp, Homo sapiens
aagagaatttagaag

SEQ ID NO: 1127926 - DNA, 15 bp, Homo sapiens
aaagagaatttagaa

SEQ ID NO: 1127927 - DNA, 15 bp, Homo sapiens
taaagagaatttaga

SEQ ID NO: 1127928 - DNA, 15 bp, Homo sapiens
ataaagagaatttag

SEQ ID NO: 1127929 - DNA, 15 bp, Homo sapiens
cataaagagaattta

SEQ ID NO: 1127930 - DNA, 15 bp, Homo sapiens
tcataaagagaattt

SEQ ID NO: 1127931 - DNA, 15 bp, Homo sapiens
ttcataaagagaatt

SEQ ID NO: 1127932 - DNA, 15 bp, Homo sapiens
attcataaagagaat

SEQ ID NO: 1127933 - DNA, 15 bp, Homo sapiens
tattcataaagagaa

SEQ ID NO: 1127934 - DNA, 15 bp, Homo sapiens
ctattcataaagaga

SEQ ID NO: 1127935 - DNA, 15 bp, Homo sapiens
cctattcataaagag

SEQ ID NO: 1127936 - DNA, 15 bp, Homo sapiens
tcctattcataaaga

SEQ ID NO: 1127937 - DNA, 15 bp, Homo sapiens
atcctattcataaag

SEQ ID NO: 1127938 - DNA, 15 bp, Homo sapiens
aatcctattcataaa

SEQ ID NO: 1127939 - DNA, 15 bp, Homo sapiens
caatcctattcataa

SEQ ID NO: 1127940 - DNA, 15 bp, Homo sapiens
gcaatcctattcata

SEQ ID NO: 1127941 - DNA, 15 bp, Homo sapiens
tgcaatcctattcat

SEQ ID NO: 1127942 - DNA, 15 bp, Homo sapiens
ctgcaatcctattca

SEQ ID NO: 1127943 - DNA, 15 bp, Homo sapiens
gctgcaatcctattc

SEQ ID NO: 1127944 - DNA, 15 bp, Homo sapiens
agctgcaatcctatt

SEQ ID NO: 1127945 - DNA, 15 bp, Homo sapiens
cagctgcaatcctat

SEQ ID NO: 1127946 - DNA, 15 bp, Homo sapiens
acagctgcaatccta

SEQ ID NO: 1127947 - DNA, 15 bp, Homo sapiens
cacagctgcaatcct

SEQ ID NO: 1127948 - DNA, 15 bp, Homo sapiens
ccacagctgcaatcc

SEQ ID NO: 1127949 - DNA, 15 bp, Homo sapiens
gccacagctgcaatc

SEQ ID NO: 1127950 - DNA, 15 bp, Homo sapiens
agccacagctgcaat

SEQ ID NO: 1127951 - DNA, 15 bp, Homo sapiens
tagccacagctgcaa

SEQ ID NO: 1127952 - DNA, 15 bp, Homo sapiens
atagccacagctgca

SEQ ID NO: 1127953 - DNA, 15 bp, Homo sapiens
catagccacagctgc

SEQ ID NO: 1127954 - DNA, 15 bp, Homo sapiens
tcatagccacagctg

SEQ ID NO: 1127955 - DNA, 15 bp, Homo sapiens
atcatagccacagct

SEQ ID NO: 1127956 - DNA, 15 bp, Homo sapiens
tatcatagccacagc

SEQ ID NO: 1127957 - DNA, 15 bp, Homo sapiens
atatcatagccacag

SEQ ID NO: 1127958 - DNA, 15 bp, Homo sapiens
tatatcatagccaca

SEQ ID NO: 1127959 - DNA, 15 bp, Homo sapiens
ctatatcatagccac

SEQ ID NO: 1127960 - DNA, 15 bp, Homo sapiens
gctatatcatagcca

SEQ ID NO: 1127961 - DNA, 15 bp, Homo sapiens
ggctatatcatagcc

SEQ ID NO: 1127962 - DNA, 15 bp, Homo sapiens
aggctatatcatagc

SEQ ID NO: 1127963 - DNA, 15 bp, Homo sapiens
taggctatatcatag

SEQ ID NO: 1127964 - DNA, 15 bp, Homo sapiens
ctaggctatatcata

SEQ ID NO: 1127965 - DNA, 15 bp, Homo sapiens
actaggctatatcat

SEQ ID NO: 1127966 - DNA, 15 bp, Homo sapiens
tactaggctatatca

SEQ ID NO: 1127967 - DNA, 15 bp, Homo sapiens
ctactaggctatatc

SEQ ID NO: 1127968 - DNA, 15 bp, Homo sapiens
actactaggctatat

SEQ ID NO: 1127969 - DNA, 15 bp, Homo sapiens
aactactaggctata

SEQ ID NO: 1127970 - DNA, 15 bp, Homo sapiens
taactactaggctat

SEQ ID NO: 1127971 - DNA, 15 bp, Homo sapiens
ttaactactaggcta

SEQ ID NO: 1127972 - DNA, 15 bp, Homo sapiens
tttaactactaggct

SEQ ID NO: 1127973 - DNA, 15 bp, Homo sapiens
ctttaactactaggc

SEQ ID NO: 1127974 - DNA, 15 bp, Homo sapiens
tctttaactactagg

SEQ ID NO: 1127975 - DNA, 15 bp, Homo sapiens
ctctttaactactag

SEQ ID NO: 1127976 - DNA, 15 bp, Homo sapiens
actctttaactacta

SEQ ID NO: 1127977 - DNA, 15 bp, Homo sapiens
tactctttaactact

SEQ ID NO: 1127978 - DNA, 15 bp, Homo sapiens
atactctttaactac

SEQ ID NO: 1127979 - DNA, 15 bp, Homo sapiens
tatactctttaacta

SEQ ID NO: 1127980 - DNA, 15 bp, Homo sapiens
ttatactctttaact

SEQ ID NO: 1127981 - DNA, 15 bp, Homo sapiens
tttatactctttaac

SEQ ID NO: 1127982 - DNA, 15 bp, Homo sapiens
ctttatactctttaa

SEQ ID NO: 1127983 - DNA, 15 bp, Homo sapiens
gctttatactcttta

SEQ ID NO: 1127984 - DNA, 15 bp, Homo sapiens
agctttatactcttt

SEQ ID NO: 1127985 - DNA, 15 bp, Homo sapiens
aagctttatactctt

SEQ ID NO: 1127986 - DNA, 15 bp, Homo sapiens
aaagctttatactct

SEQ ID NO: 1127987 - DNA, 15 bp, Homo sapiens
taaagctttatactc

SEQ ID NO: 1127988 - DNA, 15 bp, Homo sapiens
ctaaagctttatact

SEQ ID NO: 1127989 - DNA, 15 bp, Homo sapiens
tctaaagctttatac

SEQ ID NO: 1127990 - DNA, 15 bp, Homo sapiens
ttctaaagctttata

SEQ ID NO: 1127991 - DNA, 15 bp, Homo sapiens
attctaaagctttat

SEQ ID NO: 1127992 - DNA, 15 bp, Homo sapiens
gattctaaagcttta

SEQ ID NO: 1127993 - DNA, 15 bp, Homo sapiens
tgattctaaagcttt

SEQ ID NO: 1127994 - DNA, 15 bp, Homo sapiens
ctgattctaaagctt

SEQ ID NO: 1127995 - DNA, 15 bp, Homo sapiens
tctgattctaaagct

SEQ ID NO: 1127996 - DNA, 15 bp, Homo sapiens
atctgattctaaagc

SEQ ID NO: 1127997 - DNA, 15 bp, Homo sapiens
aatctgattctaaag

SEQ ID NO: 1127998 - DNA, 15 bp, Homo sapiens
caatctgattctaaa

SEQ ID NO: 1127999 - DNA, 15 bp, Homo sapiens
gcaatctgattctaa

SEQ ID NO: 1128000 - DNA, 15 bp, Homo sapiens
ggcaatctgattcta

SEQ ID NO: 1128001 - DNA, 15 bp, Homo sapiens
aggcaatctgattct

SEQ ID NO: 1128002 - DNA, 15 bp, Homo sapiens
aaggcaatctgattc

SEQ ID NO: 1128003 - DNA, 15 bp, Homo sapiens
caaggcaatctgatt

SEQ ID NO: 1128004 - DNA, 15 bp, Homo sapiens
tcaaggcaatctgat

SEQ ID NO: 1128005 - DNA, 15 bp, Homo sapiens
atcaaggcaatctga

SEQ ID NO: 1128006 - DNA, 15 bp, Homo sapiens
tatcaaggcaatctg

SEQ ID NO: 1128007 - DNA, 15 bp, Homo sapiens
gtatcaaggcaatct

SEQ ID NO: 1128008 - DNA, 15 bp, Homo sapiens
tgtatcaaggcaatc

SEQ ID NO: 1128009 - DNA, 15 bp, Homo sapiens
ttgtatcaaggcaat

SEQ ID NO: 1128010 - DNA, 15 bp, Homo sapiens
tttgtatcaaggcaa

SEQ ID NO: 1128011 - DNA, 15 bp, Homo sapiens
atttgtatcaaggca

SEQ ID NO: 1128012 - DNA, 15 bp, Homo sapiens
gatttgtatcaaggc

SEQ ID NO: 1128013 - DNA, 15 bp, Homo sapiens
ggatttgtatcaagg

SEQ ID NO: 1128014 - DNA, 15 bp, Homo sapiens
gggatttgtatcaag

SEQ ID NO: 1128015 - DNA, 15 bp, Homo sapiens
tgggatttgtatcaa

SEQ ID NO: 1128016 - DNA, 15 bp, Homo sapiens
ctgggatttgtatca

SEQ ID NO: 1128017 - DNA, 15 bp, Homo sapiens
gctgggatttgtatc

SEQ ID NO: 1128018 - DNA, 15 bp, Homo sapiens
agctgggatttgtat

SEQ ID NO: 1128019 - DNA, 15 bp, Homo sapiens
aagctgggatttgta

SEQ ID NO: 1128020 - DNA, 15 bp, Homo sapiens
gaagctgggatttgt

SEQ ID NO: 1128021 - DNA, 15 bp, Homo sapiens
agaagctgggatttg

SEQ ID NO: 1128022 - DNA, 15 bp, Homo sapiens
gagaagctgggattt

SEQ ID NO: 1128023 - DNA, 15 bp, Homo sapiens
agagaagctgggatt

SEQ ID NO: 1128024 - DNA, 15 bp, Homo sapiens
tagagaagctgggat

SEQ ID NO: 1128025 - DNA, 15 bp, Homo sapiens
atagagaagctggga

SEQ ID NO: 1128026 - DNA, 15 bp, Homo sapiens
aatagagaagctggg

SEQ ID NO: 1128027 - DNA, 15 bp, Homo sapiens
aaatagagaagctgg

SEQ ID NO: 1128028 - DNA, 15 bp, Homo sapiens
taaatagagaagctg

SEQ ID NO: 1128029 - DNA, 15 bp, Homo sapiens
gtaaatagagaagct

SEQ ID NO: 1128030 - DNA, 15 bp, Homo sapiens
tgtaaatagagaagc

SEQ ID NO: 1128031 - DNA, 15 bp, Homo sapiens
ttgtaaatagagaag

SEQ ID NO: 1128032 - DNA, 15 bp, Homo sapiens
cttgtaaatagagaa

SEQ ID NO: 1128033 - DNA, 15 bp, Homo sapiens
gcttgtaaatagaga

SEQ ID NO: 1128034 - DNA, 15 bp, Homo sapiens
agcttgtaaatagag

SEQ ID NO: 1128035 - DNA, 15 bp, Homo sapiens
aagcttgtaaataga

SEQ ID NO: 1128036 - DNA, 15 bp, Homo sapiens
aaagcttgtaaatag

SEQ ID NO: 1128037 - DNA, 15 bp, Homo sapiens
taaagcttgtaaata

SEQ ID NO: 1128038 - DNA, 15 bp, Homo sapiens
gtaaagcttgtaaat

SEQ ID NO: 1128039 - DNA, 15 bp, Homo sapiens
tgtaaagcttgtaaa

SEQ ID NO: 1128040 - DNA, 15 bp, Homo sapiens
ttgtaaagcttgtaa

SEQ ID NO: 1128041 - DNA, 15 bp, Homo sapiens
tttgtaaagcttgta

SEQ ID NO: 1128042 - DNA, 15 bp, Homo sapiens
gtttgtaaagcttgt

SEQ ID NO: 1128043 - DNA, 15 bp, Homo sapiens
agtttgtaaagcttg

SEQ ID NO: 1128044 - DNA, 15 bp, Homo sapiens
aagtttgtaaagctt

SEQ ID NO: 1128045 - DNA, 15 bp, Homo sapiens
aaagtttgtaaagct

SEQ ID NO: 1128046 - DNA, 15 bp, Homo sapiens
gaaagtttgtaaagc

SEQ ID NO: 1128047 - DNA, 15 bp, Homo sapiens
agaaagtttgtaaag

SEQ ID NO: 1128048 - DNA, 15 bp, Homo sapiens
gagaaagtttgtaaa

SEQ ID NO: 1128049 - DNA, 15 bp, Homo sapiens
tgagaaagtttgtaa

SEQ ID NO: 1128050 - DNA, 15 bp, Homo sapiens
ttgagaaagtttgta

SEQ ID NO: 1128051 - DNA, 15 bp, Homo sapiens
cttgagaaagtttgt

SEQ ID NO: 1128052 - DNA, 15 bp, Homo sapiens
acttgagaaagtttg

SEQ ID NO: 1128053 - DNA, 15 bp, Homo sapiens
aacttgagaaagttt

SEQ ID NO: 1128054 - DNA, 15 bp, Homo sapiens
taacttgagaaagtt

SEQ ID NO: 1128055 - DNA, 15 bp, Homo sapiens
gtaacttgagaaagt

SEQ ID NO: 1128056 - DNA, 15 bp, Homo sapiens
agtaacttgagaaag

SEQ ID NO: 1128057 - DNA, 15 bp, Homo sapiens
aagtaacttgagaaa

SEQ ID NO: 1128058 - DNA, 15 bp, Homo sapiens
aaagtaacttgagaa

SEQ ID NO: 1128059 - DNA, 15 bp, Homo sapiens
caaagtaacttgaga

SEQ ID NO: 1128060 - DNA, 15 bp, Homo sapiens
ccaaagtaacttgag

SEQ ID NO: 1128061 - DNA, 15 bp, Homo sapiens
cccaaagtaacttga

SEQ ID NO: 1128062 - DNA, 15 bp, Homo sapiens
gcccaaagtaacttg

SEQ ID NO: 1128063 - DNA, 15 bp, Homo sapiens
ggcccaaagtaactt

SEQ ID NO: 1128064 - DNA, 15 bp, Homo sapiens
gggcccaaagtaact

SEQ ID NO: 1128065 - DNA, 15 bp, Homo sapiens
tgggcccaaagtaac

SEQ ID NO: 1128066 - DNA, 15 bp, Homo sapiens
ctgggcccaaagtaa

SEQ ID NO: 1128067 - DNA, 15 bp, Homo sapiens
actgggcccaaagta

SEQ ID NO: 1128068 - DNA, 15 bp, Homo sapiens
cactgggcccaaagt

SEQ ID NO: 1128069 - DNA, 15 bp, Homo sapiens
acactgggcccaaag

SEQ ID NO: 1128070 - DNA, 15 bp, Homo sapiens
aacactgggcccaaa

SEQ ID NO: 1128071 - DNA, 15 bp, Homo sapiens
aaacactgggcccaa

SEQ ID NO: 1128072 - DNA, 15 bp, Homo sapiens
gaaacactgggccca

SEQ ID NO: 1128073 - DNA, 15 bp, Homo sapiens
ggaaacactgggccc

SEQ ID NO: 1128074 - DNA, 15 bp, Homo sapiens
aggaaacactgggcc

SEQ ID NO: 1128075 - DNA, 15 bp, Homo sapiens
aaggaaacactgggc

SEQ ID NO: 1128076 - DNA, 15 bp, Homo sapiens
taaggaaacactggg

SEQ ID NO: 1128077 - DNA, 15 bp, Homo sapiens
ataaggaaacactgg

SEQ ID NO: 1128078 - DNA, 15 bp, Homo sapiens
aataaggaaacactg

SEQ ID NO: 1128079 - DNA, 15 bp, Homo sapiens
gaataaggaaacact

SEQ ID NO: 1128080 - DNA, 15 bp, Homo sapiens
tgaataaggaaacac

SEQ ID NO: 1128081 - DNA, 15 bp, Homo sapiens
atgaataaggaaaca

SEQ ID NO: 1128082 - DNA, 15 bp, Homo sapiens
gatgaataaggaaac

SEQ ID NO: 1128083 - DNA, 15 bp, Homo sapiens
tgatgaataaggaaa

SEQ ID NO: 1128084 - DNA, 15 bp, Homo sapiens
ctgatgaataaggaa

SEQ ID NO: 1128085 - DNA, 15 bp, Homo sapiens
actgatgaataagga

SEQ ID NO: 1128086 - DNA, 15 bp, Homo sapiens
aactgatgaataagg

SEQ ID NO: 1128087 - DNA, 15 bp, Homo sapiens
caactgatgaataag

SEQ ID NO: 1128088 - DNA, 15 bp, Homo sapiens
gcaactgatgaataa

SEQ ID NO: 1128089 - DNA, 15 bp, Homo sapiens
tgcaactgatgaata

SEQ ID NO: 1128090 - DNA, 15 bp, Homo sapiens
ttgcaactgatgaat

SEQ ID NO: 1128091 - DNA, 15 bp, Homo sapiens
tttgcaactgatgaa

SEQ ID NO: 1128092 - DNA, 15 bp, Homo sapiens
atttgcaactgatga

SEQ ID NO: 1128093 - DNA, 15 bp, Homo sapiens
tatttgcaactgatg

SEQ ID NO: 1128094 - DNA, 15 bp, Homo sapiens
ctatttgcaactgat

SEQ ID NO: 1128095 - DNA, 15 bp, Homo sapiens
gctatttgcaactga

SEQ ID NO: 1128096 - DNA, 15 bp, Homo sapiens
tgctatttgcaactg

SEQ ID NO: 1128097 - DNA, 15 bp, Homo sapiens
ctgctatttgcaact

SEQ ID NO: 1128098 - DNA, 15 bp, Homo sapiens
gctgctatttgcaac

SEQ ID NO: 1128099 - DNA, 15 bp, Homo sapiens
tgctgctatttgcaa

SEQ ID NO: 1128100 - DNA, 15 bp, Homo sapiens
gtgctgctatttgca

SEQ ID NO: 1128101 - DNA, 15 bp, Homo sapiens
agtgctgctatttgc

SEQ ID NO: 1128102 - DNA, 15 bp, Homo sapiens
aagtgctgctatttg

SEQ ID NO: 1128103 - DNA, 15 bp, Homo sapiens
caagtgctgctattt

SEQ ID NO: 1128104 - DNA, 15 bp, Homo sapiens
gcaagtgctgctatt

SEQ ID NO: 1128105 - DNA, 15 bp, Homo sapiens
ggcaagtgctgctat

SEQ ID NO: 1128106 - DNA, 15 bp, Homo sapiens
aggcaagtgctgcta

SEQ ID NO: 1128107 - DNA, 15 bp, Homo sapiens
gaggcaagtgctgct

SEQ ID NO: 1128108 - DNA, 15 bp, Homo sapiens
tgaggcaagtgctgc

SEQ ID NO: 1128109 - DNA, 15 bp, Homo sapiens
atgaggcaagtgctg

SEQ ID NO: 1128110 - DNA, 15 bp, Homo sapiens
ttatgaggcaagtgc

SEQ ID NO: 1128111 - DNA, 15 bp, Homo sapiens
cttatgaggcaagtg

SEQ ID NO: 1128112 - DNA, 15 bp, Homo sapiens
ccttatgaggcaagt

SEQ ID NO: 1128113 - DNA, 15 bp, Homo sapiens
accttatgaggcaag

SEQ ID NO: 1128114 - DNA, 15 bp, Homo sapiens
taccttatgaggcaa

SEQ ID NO: 1128115 - DNA, 15 bp, Homo sapiens
ataccttatgaggca

SEQ ID NO: 1128116 - DNA, 15 bp, Homo sapiens
gataccttatgaggc

SEQ ID NO: 1128117 - DNA, 15 bp, Homo sapiens
agataccttatgagg

SEQ ID NO: 1128118 - DNA, 15 bp, Homo sapiens
tagataccttatgag

SEQ ID NO: 1128119 - DNA, 15 bp, Homo sapiens
atagataccttatga

SEQ ID NO: 1128120 - DNA, 15 bp, Homo sapiens
catagataccttatg

SEQ ID NO: 1128121 - DNA, 15 bp, Homo sapiens
tcatagataccttat

SEQ ID NO: 1128122 - DNA, 15 bp, Homo sapiens
ctcatagatacctta

SEQ ID NO: 1128123 - DNA, 15 bp, Homo sapiens
tctcatagatacctt

SEQ ID NO: 1128124 - DNA, 15 bp, Homo sapiens
ttctcatagatacct

SEQ ID NO: 1128125 - DNA, 15 bp, Homo sapiens
gttctcatagatacc

SEQ ID NO: 1128126 - DNA, 15 bp, Homo sapiens
agttctcatagatac

SEQ ID NO: 1128127 - DNA, 15 bp, Homo sapiens
tagttctcatagata

SEQ ID NO: 1128128 - DNA, 15 bp, Homo sapiens
ttagttctcatagat

SEQ ID NO: 1128129 - DNA, 15 bp, Homo sapiens
tttagttctcataga

SEQ ID NO: 1128130 - DNA, 15 bp, Homo sapiens
ttttagttctcatag

SEQ ID NO: 1128131 - DNA, 15 bp, Homo sapiens
cttttagttctcata

SEQ ID NO: 1128132 - DNA, 15 bp, Homo sapiens
tcttttagttctcat

SEQ ID NO: 1128133 - DNA, 15 bp, Homo sapiens
ctcttttagttctca

SEQ ID NO: 1128134 - DNA, 15 bp, Homo sapiens
tctcttttagttctc

SEQ ID NO: 1128135 - DNA, 15 bp, Homo sapiens
atctcttttagttct

SEQ ID NO: 1128136 - DNA, 15 bp, Homo sapiens
catctcttttagttc

SEQ ID NO: 1128137 - DNA, 15 bp, Homo sapiens
acatctcttttagtt

SEQ ID NO: 1128138 - DNA, 15 bp, Homo sapiens
aacatctcttttagt

SEQ ID NO: 1128139 - DNA, 15 bp, Homo sapiens
taacatctcttttag

SEQ ID NO: 1128140 - DNA, 15 bp, Homo sapiens
ataacatctctttta

SEQ ID NO: 1128141 - DNA, 15 bp, Homo sapiens
cataacatctctttt

SEQ ID NO: 1128142 - DNA, 15 bp, Homo sapiens
acataacatctcttt

SEQ ID NO: 1128143 - DNA, 15 bp, Homo sapiens
cacataacatctctt

SEQ ID NO: 1128144 - DNA, 15 bp, Homo sapiens
acacataacatctct

SEQ ID NO: 1128145 - DNA, 15 bp, Homo sapiens
tacacataacatctc

SEQ ID NO: 1128146 - DNA, 15 bp, Homo sapiens
ttacacataacatct

SEQ ID NO: 1128147 - DNA, 15 bp, Homo sapiens
tttacacataacatc

SEQ ID NO: 1128148 - DNA, 15 bp, Homo sapiens
ttttacacataacat

SEQ ID NO: 1128149 - DNA, 15 bp, Homo sapiens
tttttacacataaca

SEQ ID NO: 1128150 - DNA, 15 bp, Homo sapiens
ctttttacacataac

SEQ ID NO: 1128151 - DNA, 15 bp, Homo sapiens
gctttttacacataa

SEQ ID NO: 1128152 - DNA, 15 bp, Homo sapiens
agctttttacacata

SEQ ID NO: 1128153 - DNA, 15 bp, Homo sapiens
gagctttttacacat

SEQ ID NO: 1128154 - DNA, 15 bp, Homo sapiens
tgagctttttacaca

SEQ ID NO: 1128155 - DNA, 15 bp, Homo sapiens
ctgagctttttacac

SEQ ID NO: 1128156 - DNA, 15 bp, Homo sapiens
tctgagctttttaca

SEQ ID NO: 1128157 - DNA, 15 bp, Homo sapiens
ttctgagctttttac

SEQ ID NO: 1128158 - DNA, 15 bp, Homo sapiens
gttctgagcttttta

SEQ ID NO: 1128159 - DNA, 15 bp, Homo sapiens
ggttctgagcttttt

SEQ ID NO: 1128160 - DNA, 15 bp, Homo sapiens
tggttctgagctttt

SEQ ID NO: 1128161 - DNA, 15 bp, Homo sapiens
atggttctgagcttt

SEQ ID NO: 1128162 - DNA, 15 bp, Homo sapiens
catggttctgagctt

SEQ ID NO: 1128163 - DNA, 15 bp, Homo sapiens
gcatggttctgagct

SEQ ID NO: 1128164 - DNA, 15 bp, Homo sapiens
agcatggttctgagc

SEQ ID NO: 1128165 - DNA, 15 bp, Homo sapiens
ataaagcatggttct

SEQ ID NO: 1128166 - DNA, 15 bp, Homo sapiens
aataaagcatggttc

SEQ ID NO: 1128167 - DNA, 15 bp, Homo sapiens
gaataaagcatggtt

SEQ ID NO: 1128168 - DNA, 15 bp, Homo sapiens
tgaataaagcatggt

SEQ ID NO: 1128169 - DNA, 15 bp, Homo sapiens
atgaataaagcatgg

SEQ ID NO: 1128170 - DNA, 15 bp, Homo sapiens
tatgaataaagcatg

SEQ ID NO: 1128171 - DNA, 15 bp, Homo sapiens
ctatgaataaagcat

SEQ ID NO: 1128172 - DNA, 15 bp, Homo sapiens
actatgaataaagca

SEQ ID NO: 1128173 - DNA, 15 bp, Homo sapiens
tactatgaataaagc

SEQ ID NO: 1128174 - DNA, 15 bp, Homo sapiens
ctactatgaataaag

SEQ ID NO: 1128175 - DNA, 15 bp, Homo sapiens
cctactatgaataaa

SEQ ID NO: 1128176 - DNA, 15 bp, Homo sapiens
ccctactatgaataa

SEQ ID NO: 1128177 - DNA, 15 bp, Homo sapiens
cccctactatgaata

SEQ ID NO: 1128178 - DNA, 15 bp, Homo sapiens
agcccctactatgaa

SEQ ID NO: 1128179 - DNA, 15 bp, Homo sapiens
gagcccctactatga

SEQ ID NO: 1128180 - DNA, 15 bp, Homo sapiens
tgagcccctactatg

SEQ ID NO: 1128181 - DNA, 15 bp, Homo sapiens
ttgagcccctactat

SEQ ID NO: 1128182 - DNA, 15 bp, Homo sapiens
attgagcccctacta

SEQ ID NO: 1128183 - DNA, 15 bp, Homo sapiens
aattgagcccctact

SEQ ID NO: 1128184 - DNA, 15 bp, Homo sapiens
gaattgagcccctac

SEQ ID NO: 1128185 - DNA, 15 bp, Homo sapiens
tgaattgagccccta

SEQ ID NO: 1128186 - DNA, 15 bp, Homo sapiens
atgaattgagcccct

SEQ ID NO: 1128187 - DNA, 15 bp, Homo sapiens
catgaattgagcccc

SEQ ID NO: 1128188 - DNA, 15 bp, Homo sapiens
acatgaattgagccc

SEQ ID NO: 1128189 - DNA, 15 bp, Homo sapiens
aacatgaattgagcc

SEQ ID NO: 1128190 - DNA, 15 bp, Homo sapiens
caacatgaattgagc

SEQ ID NO: 1128191 - DNA, 15 bp, Homo sapiens
ccaacatgaattgag

SEQ ID NO: 1128192 - DNA, 15 bp, Homo sapiens
accaacatgaattga

SEQ ID NO: 1128193 - DNA, 15 bp, Homo sapiens
aaccaacatgaattg

SEQ ID NO: 1128194 - DNA, 15 bp, Homo sapiens
taaccaacatgaatt

SEQ ID NO: 1128195 - DNA, 15 bp, Homo sapiens
ctaaccaacatgaat

SEQ ID NO: 1128196 - DNA, 15 bp, Homo sapiens
actaaccaacatgaa

SEQ ID NO: 1128197 - DNA, 15 bp, Homo sapiens
tactaaccaacatga

SEQ ID NO: 1128198 - DNA, 15 bp, Homo sapiens
ttactaaccaacatg

SEQ ID NO: 1128199 - DNA, 15 bp, Homo sapiens
attactaaccaacat

SEQ ID NO: 1128200 - DNA, 15 bp, Homo sapiens
tattactaaccaaca

SEQ ID NO: 1128201 - DNA, 15 bp, Homo sapiens
ttattactaaccaac

SEQ ID NO: 1128202 - DNA, 15 bp, Homo sapiens
cttattactaaccaa

SEQ ID NO: 1128203 - DNA, 15 bp, Homo sapiens
gcttattactaacca

SEQ ID NO: 1128204 - DNA, 15 bp, Homo sapiens
tgcttattactaacc

SEQ ID NO: 1128205 - DNA, 15 bp, Homo sapiens
ttgcttattactaac

SEQ ID NO: 1128206 - DNA, 15 bp, Homo sapiens
cttgcttattactaa

SEQ ID NO: 1128207 - DNA, 15 bp, Homo sapiens
tcttgcttattacta

SEQ ID NO: 1128208 - DNA, 15 bp, Homo sapiens
atcttgcttattact

SEQ ID NO: 1128209 - DNA, 15 bp, Homo sapiens
tatcttgcttattac

SEQ ID NO: 1128210 - DNA, 15 bp, Homo sapiens
ttatcttgcttatta

SEQ ID NO: 1128211 - DNA, 15 bp, Homo sapiens
cttatcttgcttatt

SEQ ID NO: 1128212 - DNA, 15 bp, Homo sapiens
acttatcttgcttat

SEQ ID NO: 1128213 - DNA, 15 bp, Homo sapiens
cacttatcttgctta

SEQ ID NO: 1128214 - DNA, 15 bp, Homo sapiens
acacttatcttgctt

SEQ ID NO: 1128215 - DNA, 15 bp, Homo sapiens
gacacttatcttgct

SEQ ID NO: 1128216 - DNA, 15 bp, Homo sapiens
agacacttatcttgc

SEQ ID NO: 1128217 - DNA, 15 bp, Homo sapiens
cagacacttatcttg

SEQ ID NO: 1128218 - DNA, 15 bp, Homo sapiens
tcagacacttatctt

SEQ ID NO: 1128219 - DNA, 15 bp, Homo sapiens
gtcagacacttatct

SEQ ID NO: 1128220 - DNA, 15 bp, Homo sapiens
ggtcagacacttatc

SEQ ID NO: 1128221 - DNA, 15 bp, Homo sapiens
tggtcagacacttat

SEQ ID NO: 1128222 - DNA, 15 bp, Homo sapiens
gtggtcagacactta

SEQ ID NO: 1128223 - DNA, 15 bp, Homo sapiens
agtggtcagacactt

SEQ ID NO: 1128224 - DNA, 15 bp, Homo sapiens
tagtggtcagacact

SEQ ID NO: 1128225 - DNA, 15 bp, Homo sapiens
ttagtggtcagacac

SEQ ID NO: 1128226 - DNA, 15 bp, Homo sapiens
gttagtggtcagaca

SEQ ID NO: 1128227 - DNA, 15 bp, Homo sapiens
tgttagtggtcagac

SEQ ID NO: 1128228 - DNA, 15 bp, Homo sapiens
gtgttagtggtcaga

SEQ ID NO: 1128229 - DNA, 15 bp, Homo sapiens
ggtgttagtggtcag

SEQ ID NO: 1128230 - DNA, 15 bp, Homo sapiens
aggtgttagtggtca

SEQ ID NO: 1128231 - DNA, 15 bp, Homo sapiens
taggtgttagtggtc

SEQ ID NO: 1128232 - DNA, 15 bp, Homo sapiens
ttaggtgttagtggt

SEQ ID NO: 1128233 - DNA, 15 bp, Homo sapiens
attaggtgttagtgg

SEQ ID NO: 1128234 - DNA, 15 bp, Homo sapiens
aattaggtgttagtg

SEQ ID NO: 1128235 - DNA, 15 bp, Homo sapiens
taattaggtgttagt

SEQ ID NO: 1128236 - DNA, 15 bp, Homo sapiens
ataattaggtgttag

SEQ ID NO: 1128237 - DNA, 15 bp, Homo sapiens
aataattaggtgtta

SEQ ID NO: 1128238 - DNA, 15 bp, Homo sapiens
taataattaggtgtt

SEQ ID NO: 1128239 - DNA, 15 bp, Homo sapiens
ctaataattaggtgt

SEQ ID NO: 1128240 - DNA, 15 bp, Homo sapiens
tctaataattaggtg

SEQ ID NO: 1128241 - DNA, 15 bp, Homo sapiens
atctaataattaggt

SEQ ID NO: 1128242 - DNA, 15 bp, Homo sapiens
aatctaataattagg

SEQ ID NO: 1128243 - DNA, 15 bp, Homo sapiens
gaatctaataattag

SEQ ID NO: 1128244 - DNA, 15 bp, Homo sapiens
ggaatctaataatta

SEQ ID NO: 1128245 - DNA, 15 bp, Homo sapiens
tggaatctaataatt

SEQ ID NO: 1128246 - DNA, 15 bp, Homo sapiens
ttggaatctaataat

SEQ ID NO: 1128247 - DNA, 15 bp, Homo sapiens
attggaatctaataa

SEQ ID NO: 1128248 - DNA, 15 bp, Homo sapiens
cattggaatctaata

SEQ ID NO: 1128249 - DNA, 15 bp, Homo sapiens
acattggaatctaat

SEQ ID NO: 1128250 - DNA, 15 bp, Homo sapiens
aacattggaatctaa

SEQ ID NO: 1128251 - DNA, 15 bp, Homo sapiens
caacattggaatcta

SEQ ID NO: 1128252 - DNA, 15 bp, Homo sapiens
acaacattggaatct

SEQ ID NO: 1128253 - DNA, 15 bp, Homo sapiens
cacaacattggaatc

SEQ ID NO: 1128254 - DNA, 15 bp, Homo sapiens
gcacaacattggaat

SEQ ID NO: 1128255 - DNA, 15 bp, Homo sapiens
agcacaacattggaa

SEQ ID NO: 1128256 - DNA, 15 bp, Homo sapiens
tagcacaacattgga

SEQ ID NO: 1128257 - DNA, 15 bp, Homo sapiens
ctagcacaacattgg

SEQ ID NO: 1128258 - DNA, 15 bp, Homo sapiens
cctagcacaacattg

SEQ ID NO: 1128259 - DNA, 15 bp, Homo sapiens
gcctagcacaacatt

SEQ ID NO: 1128260 - DNA, 15 bp, Homo sapiens
ggcctagcacaacat

SEQ ID NO: 1128261 - DNA, 15 bp, Homo sapiens
aggcctagcacaaca

SEQ ID NO: 1128262 - DNA, 15 bp, Homo sapiens
caggcctagcacaac

SEQ ID NO: 1128263 - DNA, 15 bp, Homo sapiens
acaggcctagcacaa

SEQ ID NO: 1128264 - DNA, 15 bp, Homo sapiens
cacaggcctagcaca

SEQ ID NO: 1128265 - DNA, 15 bp, Homo sapiens
tcacaggcctagcac

SEQ ID NO: 1128266 - DNA, 15 bp, Homo sapiens
ctcacaggcctagca

SEQ ID NO: 1128267 - DNA, 15 bp, Homo sapiens
tctcacaggcctagc

SEQ ID NO: 1128268 - DNA, 15 bp, Homo sapiens
atctcacaggcctag

SEQ ID NO: 1128269 - DNA, 15 bp, Homo sapiens
tatctcacaggccta

SEQ ID NO: 1128270 - DNA, 15 bp, Homo sapiens
ttatctcacaggcct

SEQ ID NO: 1128271 - DNA, 15 bp, Homo sapiens
attatctcacaggcc

SEQ ID NO: 1128272 - DNA, 15 bp, Homo sapiens
gattatctcacaggc

SEQ ID NO: 1128273 - DNA, 15 bp, Homo sapiens
tgattatctcacagg

SEQ ID NO: 1128274 - DNA, 15 bp, Homo sapiens
ctgattatctcacag

SEQ ID NO: 1128275 - DNA, 15 bp, Homo sapiens
actgattatctcaca

SEQ ID NO: 1128276 - DNA, 15 bp, Homo sapiens
tactgattatctcac

SEQ ID NO: 1128277 - DNA, 15 bp, Homo sapiens
ttactgattatctca

SEQ ID NO: 1128278 - DNA, 15 bp, Homo sapiens
gttactgattatctc

SEQ ID NO: 1128279 - DNA, 15 bp, Homo sapiens
ggttactgattatct

SEQ ID NO: 1128280 - DNA, 15 bp, Homo sapiens
tggttactgattatc

SEQ ID NO: 1128281 - DNA, 15 bp, Homo sapiens
atggttactgattat

SEQ ID NO: 1128282 - DNA, 15 bp, Homo sapiens
gatggttactgatta

SEQ ID NO: 1128283 - DNA, 15 bp, Homo sapiens
agatggttactgatt

SEQ ID NO: 1128284 - DNA, 15 bp, Homo sapiens
aagatggttactgat

SEQ ID NO: 1128285 - DNA, 15 bp, Homo sapiens
aaagatggttactga

SEQ ID NO: 1128286 - DNA, 15 bp, Homo sapiens
aaaagatggttactg

SEQ ID NO: 1128287 - DNA, 15 bp, Homo sapiens
caaaagatggttact

SEQ ID NO: 1128288 - DNA, 15 bp, Homo sapiens
acaaaagatggttac

SEQ ID NO: 1128289 - DNA, 15 bp, Homo sapiens
gacaaaagatggtta

SEQ ID NO: 1128290 - DNA, 15 bp, Homo sapiens
tgacaaaagatggtt

SEQ ID NO: 1128291 - DNA, 15 bp, Homo sapiens
ttgacaaaagatggt

SEQ ID NO: 1128292 - DNA, 15 bp, Homo sapiens
attgacaaaagatgg

SEQ ID NO: 1128293 - DNA, 15 bp, Homo sapiens
cattgacaaaagatg

SEQ ID NO: 1128294 - DNA, 15 bp, Homo sapiens
tcattgacaaaagat

SEQ ID NO: 1128295 - DNA, 15 bp, Homo sapiens
atcattgacaaaaga

SEQ ID NO: 1128296 - DNA, 15 bp, Homo sapiens
tatcattgacaaaag

SEQ ID NO: 1128297 - DNA, 15 bp, Homo sapiens
ttatcattgacaaaa

SEQ ID NO: 1128298 - DNA, 15 bp, Homo sapiens
attatcattgacaaa

SEQ ID NO: 1128299 - DNA, 15 bp, Homo sapiens
gattatcattgacaa

SEQ ID NO: 1128300 - DNA, 15 bp, Homo sapiens
ggattatcattgaca

SEQ ID NO: 1128301 - DNA, 15 bp, Homo sapiens
aggattatcattgac

SEQ ID NO: 1128302 - DNA, 15 bp, Homo sapiens
aaggattatcattga

SEQ ID NO: 1128303 - DNA, 15 bp, Homo sapiens
taaggattatcattg

SEQ ID NO: 1128304 - DNA, 15 bp, Homo sapiens
ataaggattatcatt

SEQ ID NO: 1128305 - DNA, 15 bp, Homo sapiens
tataaggattatcat

SEQ ID NO: 1128306 - DNA, 15 bp, Homo sapiens
ttataaggattatca

SEQ ID NO: 1128307 - DNA, 15 bp, Homo sapiens
tttataaggattatc

SEQ ID NO: 1128308 - DNA, 15 bp, Homo sapiens
ctttataaggattat

SEQ ID NO: 1128309 - DNA, 15 bp, Homo sapiens
gctttataaggatta

SEQ ID NO: 1128310 - DNA, 15 bp, Homo sapiens
agctttataaggatt

SEQ ID NO: 1128311 - DNA, 15 bp, Homo sapiens
tagctttataaggat

SEQ ID NO: 1128312 - DNA, 15 bp, Homo sapiens
ctagctttataagga

SEQ ID NO: 1128313 - DNA, 15 bp, Homo sapiens
actagctttataagg

SEQ ID NO: 1128314 - DNA, 15 bp, Homo sapiens
aactagctttataag

SEQ ID NO: 1128315 - DNA, 15 bp, Homo sapiens
aaactagctttataa

SEQ ID NO: 1128316 - DNA, 15 bp, Homo sapiens
caaactagctttata

SEQ ID NO: 1128317 - DNA, 15 bp, Homo sapiens
tcaaactagctttat

SEQ ID NO: 1128318 - DNA, 15 bp, Homo sapiens
gtcaaactagcttta

SEQ ID NO: 1128319 - DNA, 15 bp, Homo sapiens
ggtcaaactagcttt

SEQ ID NO: 1128320 - DNA, 15 bp, Homo sapiens
aggtcaaactagctt

SEQ ID NO: 1128321 - DNA, 15 bp, Homo sapiens
aaggtcaaactagct

SEQ ID NO: 1128322 - DNA, 15 bp, Homo sapiens
aaaggtcaaactagc

SEQ ID NO: 1128323 - DNA, 15 bp, Homo sapiens
aaaaggtcaaactag

SEQ ID NO: 1128324 - DNA, 15 bp, Homo sapiens
taaaaggtcaaacta

SEQ ID NO: 1128325 - DNA, 15 bp, Homo sapiens
ataaaaggtcaaact

SEQ ID NO: 1128326 - DNA, 15 bp, Homo sapiens
aataaaaggtcaaac

SEQ ID NO: 1128327 - DNA, 15 bp, Homo sapiens
gaataaaaggtcaaa

SEQ ID NO: 1128328 - DNA, 15 bp, Homo sapiens
tgaataaaaggtcaa

SEQ ID NO: 1128329 - DNA, 15 bp, Homo sapiens
atgaataaaaggtca

SEQ ID NO: 1128330 - DNA, 15 bp, Homo sapiens
tatgaataaaaggtc

SEQ ID NO: 1128331 - DNA, 15 bp, Homo sapiens
ttatgaataaaaggt

SEQ ID NO: 1128332 - DNA, 15 bp, Homo sapiens
attatgaataaaagg

SEQ ID NO: 1128333 - DNA, 15 bp, Homo sapiens
cattatgaataaaag

SEQ ID NO: 1128334 - DNA, 15 bp, Homo sapiens
acattatgaataaaa

SEQ ID NO: 1128335 - DNA, 15 bp, Homo sapiens
tacattatgaataaa

SEQ ID NO: 1128336 - DNA, 15 bp, Homo sapiens
ttacattatgaataa

SEQ ID NO: 1128337 - DNA, 15 bp, Homo sapiens
tttacattatgaata

SEQ ID NO: 1128338 - DNA, 15 bp, Homo sapiens
ttttacattatgaat

SEQ ID NO: 1128339 - DNA, 15 bp, Homo sapiens
tttttacattatgaa

SEQ ID NO: 1128340 - DNA, 15 bp, Homo sapiens
gtttttacattatga

SEQ ID NO: 1128341 - DNA, 15 bp, Homo sapiens
tgtttttacattatg

SEQ ID NO: 1128342 - DNA, 15 bp, Homo sapiens
ctgtttttacattat

SEQ ID NO: 1128343 - DNA, 15 bp, Homo sapiens
gctgtttttacatta

SEQ ID NO: 1128344 - DNA, 15 bp, Homo sapiens
ggctgtttttacatt

SEQ ID NO: 1128345 - DNA, 15 bp, Homo sapiens
aggctgtttttacat

SEQ ID NO: 1128346 - DNA, 15 bp, Homo sapiens
aaggctgtttttaca

SEQ ID NO: 1128347 - DNA, 15 bp, Homo sapiens
aaaggctgtttttac

SEQ ID NO: 1128348 - DNA, 15 bp, Homo sapiens
caaaggctgttttta

SEQ ID NO: 1128349 - DNA, 15 bp, Homo sapiens
gcaaaggctgttttt

SEQ ID NO: 1128350 - DNA, 15 bp, Homo sapiens
tgcaaaggctgtttt

SEQ ID NO: 1128351 - DNA, 15 bp, Homo sapiens
atgcaaaggctgttt

SEQ ID NO: 1128352 - DNA, 15 bp, Homo sapiens
aatgcaaaggctgtt

SEQ ID NO: 1128353 - DNA, 15 bp, Homo sapiens
taatgcaaaggctgt

SEQ ID NO: 1128354 - DNA, 15 bp, Homo sapiens
ataatgcaaaggctg

SEQ ID NO: 1128355 - DNA, 15 bp, Homo sapiens
tataatgcaaaggct

SEQ ID NO: 1128356 - DNA, 15 bp, Homo sapiens
atataatgcaaaggc

SEQ ID NO: 1128357 - DNA, 15 bp, Homo sapiens
aatataatgcaaagg

SEQ ID NO: 1128358 - DNA, 15 bp, Homo sapiens
aaatataatgcaaag

SEQ ID NO: 1128359 - DNA, 15 bp, Homo sapiens
aaaatataatgcaaa

SEQ ID NO: 1128360 - DNA, 15 bp, Homo sapiens
caaaatataatgcaa

SEQ ID NO: 1128361 - DNA, 15 bp, Homo sapiens
gcaaaatataatgca

SEQ ID NO: 1128362 - DNA, 15 bp, Homo sapiens
agcaaaatataatgc

SEQ ID NO: 1128363 - DNA, 15 bp, Homo sapiens
cagcaaaatataatg

SEQ ID NO: 1128364 - DNA, 15 bp, Homo sapiens
acagcaaaatataat

SEQ ID NO: 1128365 - DNA, 15 bp, Homo sapiens
cacagcaaaatataa

SEQ ID NO: 1128366 - DNA, 15 bp, Homo sapiens
acacagcaaaatata

SEQ ID NO: 1128367 - DNA, 15 bp, Homo sapiens
aacacagcaaaatat

SEQ ID NO: 1128368 - DNA, 15 bp, Homo sapiens
caacacagcaaaata

SEQ ID NO: 1128369 - DNA, 15 bp, Homo sapiens
acaacacagcaaaat

SEQ ID NO: 1128370 - DNA, 15 bp, Homo sapiens
gacaacacagcaaaa

SEQ ID NO: 1128371 - DNA, 15 bp, Homo sapiens
agacaacacagcaaa

SEQ ID NO: 1128372 - DNA, 15 bp, Homo sapiens
tagacaacacagcaa

SEQ ID NO: 1128373 - DNA, 15 bp, Homo sapiens
ttagacaacacagca

SEQ ID NO: 1128374 - DNA, 15 bp, Homo sapiens
gttagacaacacagc

SEQ ID NO: 1128375 - DNA, 15 bp, Homo sapiens
tgttagacaacacag

SEQ ID NO: 1128376 - DNA, 15 bp, Homo sapiens
ctgttagacaacaca

SEQ ID NO: 1128377 - DNA, 15 bp, Homo sapiens
cctgttagacaacac

SEQ ID NO: 1128378 - DNA, 15 bp, Homo sapiens
tcctgttagacaaca

SEQ ID NO: 1128379 - DNA, 15 bp, Homo sapiens
ctcctgttagacaac

SEQ ID NO: 1128380 - DNA, 15 bp, Homo sapiens
gctcctgttagacaa

SEQ ID NO: 1128381 - DNA, 15 bp, Homo sapiens
tgctcctgttagaca

SEQ ID NO: 1128382 - DNA, 15 bp, Homo sapiens
ttgctcctgttagac

SEQ ID NO: 1128383 - DNA, 15 bp, Homo sapiens
tttgctcctgttaga

SEQ ID NO: 1128384 - DNA, 15 bp, Homo sapiens
ctttgctcctgttag

SEQ ID NO: 1128385 - DNA, 15 bp, Homo sapiens
tctttgctcctgtta

SEQ ID NO: 1128386 - DNA, 15 bp, Homo sapiens
ctctttgctcctgtt

SEQ ID NO: 1128387 - DNA, 15 bp, Homo sapiens
tctctttgctcctgt

SEQ ID NO: 1128388 - DNA, 15 bp, Homo sapiens
gtctctttgctcctg

SEQ ID NO: 1128389 - DNA, 15 bp, Homo sapiens
tgtctctttgctcct

SEQ ID NO: 1128390 - DNA, 15 bp, Homo sapiens
gtgtctctttgctcc

SEQ ID NO: 1128391 - DNA, 15 bp, Homo sapiens
cgtgtctctttgctc

SEQ ID NO: 1128392 - DNA, 15 bp, Homo sapiens
ccgtgtctctttgct

SEQ ID NO: 1128393 - DNA, 15 bp, Homo sapiens
tccgtgtctctttgc

SEQ ID NO: 1128394 - DNA, 15 bp, Homo sapiens
aatccgtgtctcttt

SEQ ID NO: 1128395 - DNA, 15 bp, Homo sapiens
aaatccgtgtctctt

SEQ ID NO: 1128396 - DNA, 15 bp, Homo sapiens
caaatccgtgtctct

SEQ ID NO: 1128397 - DNA, 15 bp, Homo sapiens
gcaaatccgtgtctc

SEQ ID NO: 1128398 - DNA, 15 bp, Homo sapiens
agcaaatccgtgtct

SEQ ID NO: 1128399 - DNA, 15 bp, Homo sapiens
gagcaaatccgtgtc

SEQ ID NO: 1128400 - DNA, 15 bp, Homo sapiens
agagcaaatccgtgt

SEQ ID NO: 1128401 - DNA, 15 bp, Homo sapiens
cagagcaaatccgtg

SEQ ID NO: 1128402 - DNA, 15 bp, Homo sapiens
acagagcaaatccgt

SEQ ID NO: 1128403 - DNA, 15 bp, Homo sapiens
cacagagcaaatccg

SEQ ID NO: 1128404 - DNA, 15 bp, Homo sapiens
gcacagagcaaatcc

SEQ ID NO: 1128405 - DNA, 15 bp, Homo sapiens
agcacagagcaaatc

SEQ ID NO: 1128406 - DNA, 15 bp, Homo sapiens
aagcacagagcaaat

SEQ ID NO: 1128407 - DNA, 15 bp, Homo sapiens
aaagcacagagcaaa

SEQ ID NO: 1128408 - DNA, 15 bp, Homo sapiens
taaagcacagagcaa

SEQ ID NO: 1128409 - DNA, 15 bp, Homo sapiens
ttaaagcacagagca

SEQ ID NO: 1128410 - DNA, 15 bp, Homo sapiens
attaaagcacagagc

SEQ ID NO: 1128411 - DNA, 15 bp, Homo sapiens
gattaaagcacagag

SEQ ID NO: 1128412 - DNA, 15 bp, Homo sapiens
ggattaaagcacaga

SEQ ID NO: 1128413 - DNA, 15 bp, Homo sapiens
aggattaaagcacag

SEQ ID NO: 1128414 - DNA, 15 bp, Homo sapiens
gaggattaaagcaca

SEQ ID NO: 1128415 - DNA, 15 bp, Homo sapiens
agaggattaaagcac

SEQ ID NO: 1128416 - DNA, 15 bp, Homo sapiens
cagaggattaaagca

SEQ ID NO: 1128417 - DNA, 15 bp, Homo sapiens
tcagaggattaaagc

SEQ ID NO: 1128418 - DNA, 15 bp, Homo sapiens
ctcagaggattaaag

SEQ ID NO: 1128419 - DNA, 15 bp, Homo sapiens
tctcagaggattaaa

SEQ ID NO: 1128420 - DNA, 15 bp, Homo sapiens
atctcagaggattaa

SEQ ID NO: 1128421 - DNA, 15 bp, Homo sapiens
tatctcagaggatta

SEQ ID NO: 1128422 - DNA, 15 bp, Homo sapiens
ctatctcagaggatt

SEQ ID NO: 1128423 - DNA, 15 bp, Homo sapiens
tctatctcagaggat

SEQ ID NO: 1128424 - DNA, 15 bp, Homo sapiens
atctatctcagagga

SEQ ID NO: 1128425 - DNA, 15 bp, Homo sapiens
tatctatctcagagg

SEQ ID NO: 1128426 - DNA, 15 bp, Homo sapiens
atatctatctcagag

SEQ ID NO: 1128427 - DNA, 15 bp, Homo sapiens
aatatctatctcaga

SEQ ID NO: 1128428 - DNA, 15 bp, Homo sapiens
aaatatctatctcag

SEQ ID NO: 1128429 - DNA, 15 bp, Homo sapiens
taaatatctatctca

SEQ ID NO: 1128430 - DNA, 15 bp, Homo sapiens
ctaaatatctatctc

SEQ ID NO: 1128431 - DNA, 15 bp, Homo sapiens
cctaaatatctatct

SEQ ID NO: 1128432 - DNA, 15 bp, Homo sapiens
tcctaaatatctatc

SEQ ID NO: 1128433 - DNA, 15 bp, Homo sapiens
gtcctaaatatctat

SEQ ID NO: 1128434 - DNA, 15 bp, Homo sapiens
ggtcctaaatatcta

SEQ ID NO: 1128435 - DNA, 15 bp, Homo sapiens
cggtcctaaatatct

SEQ ID NO: 1128436 - DNA, 15 bp, Homo sapiens
acggtcctaaatatc

SEQ ID NO: 1128437 - DNA, 15 bp, Homo sapiens
cacggtcctaaatat

SEQ ID NO: 1128438 - DNA, 15 bp, Homo sapiens
tcacggtcctaaata

SEQ ID NO: 1128439 - DNA, 15 bp, Homo sapiens
gtcacggtcctaaat

SEQ ID NO: 1128440 - DNA, 15 bp, Homo sapiens
ggtcacggtcctaaa

SEQ ID NO: 1128441 - DNA, 15 bp, Homo sapiens
tggtcacggtcctaa

SEQ ID NO: 1128442 - DNA, 15 bp, Homo sapiens
ttggtcacggtccta

SEQ ID NO: 1128443 - DNA, 15 bp, Homo sapiens
attggtcacggtcct

SEQ ID NO: 1128444 - DNA, 15 bp, Homo sapiens
aattggtcacggtcc

SEQ ID NO: 1128445 - DNA, 15 bp, Homo sapiens
aaattggtcacggtc

SEQ ID NO: 1128446 - DNA, 15 bp, Homo sapiens
aaaattggtcacggt

SEQ ID NO: 1128447 - DNA, 15 bp, Homo sapiens
aaaaattggtcacgg

SEQ ID NO: 1128448 - DNA, 15 bp, Homo sapiens
taaaaattggtcacg

SEQ ID NO: 1128449 - DNA, 15 bp, Homo sapiens
ataaaaattggtcac

SEQ ID NO: 1128450 - DNA, 15 bp, Homo sapiens
aataaaaattggtca

SEQ ID NO: 1128451 - DNA, 15 bp, Homo sapiens
aaataaaaattggtc

SEQ ID NO: 1128452 - DNA, 15 bp, Homo sapiens
aaaataaaaattggt

SEQ ID NO: 1128453 - DNA, 15 bp, Homo sapiens
caaaataaaaattgg

SEQ ID NO: 1128454 - DNA, 15 bp, Homo sapiens
ccaaaataaaaattg

SEQ ID NO: 1128455 - DNA, 15 bp, Homo sapiens
accaaaataaaaatt

SEQ ID NO: 1128456 - DNA, 15 bp, Homo sapiens
aaccaaaataaaaat

SEQ ID NO: 1128457 - DNA, 15 bp, Homo sapiens
caaccaaaataaaaa

SEQ ID NO: 1128458 - DNA, 15 bp, Homo sapiens
tcaaccaaaataaaa

SEQ ID NO: 1128459 - DNA, 15 bp, Homo sapiens
ttcaaccaaaataaa

SEQ ID NO: 1128460 - DNA, 15 bp, Homo sapiens
tttcaaccaaaataa

SEQ ID NO: 1128461 - DNA, 15 bp, Homo sapiens
ttttcaaccaaaata

SEQ ID NO: 1128462 - DNA, 15 bp, Homo sapiens
tttttcaaccaaaat

SEQ ID NO: 1128463 - DNA, 15 bp, Homo sapiens
atttttcaaccaaaa

SEQ ID NO: 1128464 - DNA, 15 bp, Homo sapiens
gatttttcaaccaaa

SEQ ID NO: 1128465 - DNA, 15 bp, Homo sapiens
agatttttcaaccaa

SEQ ID NO: 1128466 - DNA, 15 bp, Homo sapiens
aagatttttcaacca

SEQ ID NO: 1128467 - DNA, 15 bp, Homo sapiens
taagatttttcaacc

SEQ ID NO: 1128468 - DNA, 15 bp, Homo sapiens
ataagatttttcaac

SEQ ID NO: 1128469 - DNA, 15 bp, Homo sapiens
aataagatttttcaa

SEQ ID NO: 1128470 - DNA, 15 bp, Homo sapiens
aaataagatttttca

SEQ ID NO: 1128471 - DNA, 15 bp, Homo sapiens
caaataagatttttc

SEQ ID NO: 1128472 - DNA, 15 bp, Homo sapiens
tcaaataagattttt

SEQ ID NO: 1128473 - DNA, 15 bp, Homo sapiens
ttcaaataagatttt

SEQ ID NO: 1128474 - DNA, 15 bp, Homo sapiens
cttcaaataagattt

SEQ ID NO: 1128475 - DNA, 15 bp, Homo sapiens
acttcaaataagatt

SEQ ID NO: 1128476 - DNA, 15 bp, Homo sapiens
aacttcaaataagat

SEQ ID NO: 1128477 - DNA, 15 bp, Homo sapiens
caacttcaaataaga

SEQ ID NO: 1128478 - DNA, 15 bp, Homo sapiens
tcaacttcaaataag

SEQ ID NO: 1128479 - DNA, 15 bp, Homo sapiens
ctcaacttcaaataa

SEQ ID NO: 1128480 - DNA, 15 bp, Homo sapiens
gctcaacttcaaata

SEQ ID NO: 1128481 - DNA, 15 bp, Homo sapiens
agctcaacttcaaat

SEQ ID NO: 1128482 - DNA, 15 bp, Homo sapiens
tagctcaacttcaaa

SEQ ID NO: 1128483 - DNA, 15 bp, Homo sapiens
ttagctcaacttcaa

SEQ ID NO: 1128484 - DNA, 15 bp, Homo sapiens
tttagctcaacttca

SEQ ID NO: 1128485 - DNA, 15 bp, Homo sapiens
ctttagctcaacttc

SEQ ID NO: 1128486 - DNA, 15 bp, Homo sapiens
tctttagctcaactt

SEQ ID NO: 1128487 - DNA, 15 bp, Homo sapiens
ctctttagctcaact

SEQ ID NO: 1128488 - DNA, 15 bp, Homo sapiens
cctctttagctcaac

SEQ ID NO: 1128489 - DNA, 15 bp, Homo sapiens
tcctctttagctcaa

SEQ ID NO: 1128490 - DNA, 15 bp, Homo sapiens
ttcctctttagctca

SEQ ID NO: 1128491 - DNA, 15 bp, Homo sapiens
attcctctttagctc

SEQ ID NO: 1128492 - DNA, 15 bp, Homo sapiens
tattcctctttagct

SEQ ID NO: 1128493 - DNA, 15 bp, Homo sapiens
atattcctctttagc

SEQ ID NO: 1128494 - DNA, 15 bp, Homo sapiens
aatattcctctttag

SEQ ID NO: 1128495 - DNA, 15 bp, Homo sapiens
aaatattcctcttta

SEQ ID NO: 1128496 - DNA, 15 bp, Homo sapiens
taaatattcctcttt

SEQ ID NO: 1128497 - DNA, 15 bp, Homo sapiens
gtaaatattcctctt

SEQ ID NO: 1128498 - DNA, 15 bp, Homo sapiens
tgtaaatattcctct

SEQ ID NO: 1128499 - DNA, 15 bp, Homo sapiens
gtgtaaatattcctc

SEQ ID NO: 1128500 - DNA, 15 bp, Homo sapiens
tgtgtaaatattcct

SEQ ID NO: 1128501 - DNA, 15 bp, Homo sapiens
ctgtgtaaatattcc

SEQ ID NO: 1128502 - DNA, 15 bp, Homo sapiens
gctgtgtaaatattc

SEQ ID NO: 1128503 - DNA, 15 bp, Homo sapiens
ggctgtgtaaatatt

SEQ ID NO: 1128504 - DNA, 15 bp, Homo sapiens
gggctgtgtaaatat

SEQ ID NO: 1128505 - DNA, 15 bp, Homo sapiens
tgggctgtgtaaata

SEQ ID NO: 1128506 - DNA, 15 bp, Homo sapiens
ctgggctgtgtaaat

SEQ ID NO: 1128507 - DNA, 15 bp, Homo sapiens
actgggctgtgtaaa

SEQ ID NO: 1128508 - DNA, 15 bp, Homo sapiens
tactgggctgtgtaa

SEQ ID NO: 1128509 - DNA, 15 bp, Homo sapiens
ttactgggctgtgta

SEQ ID NO: 1128510 - DNA, 15 bp, Homo sapiens
tttactgggctgtgt

SEQ ID NO: 1128511 - DNA, 15 bp, Homo sapiens
gtttactgggctgtg

SEQ ID NO: 1128512 - DNA, 15 bp, Homo sapiens
ggtttactgggctgt

SEQ ID NO: 1128513 - DNA, 15 bp, Homo sapiens
gggtttactgggctg

SEQ ID NO: 1128514 - DNA, 15 bp, Homo sapiens
agggtttactgggct

SEQ ID NO: 1128515 - DNA, 15 bp, Homo sapiens
cagggtttactgggc

SEQ ID NO: 1128516 - DNA, 15 bp, Homo sapiens
ccagggtttactggg

SEQ ID NO: 1128517 - DNA, 15 bp, Homo sapiens
tccagggtttactgg

SEQ ID NO: 1128518 - DNA, 15 bp, Homo sapiens
ttccagggtttactg

SEQ ID NO: 1128519 - DNA, 15 bp, Homo sapiens
attccagggtttact

SEQ ID NO: 1128520 - DNA, 15 bp, Homo sapiens
tattccagggtttac

SEQ ID NO: 1128521 - DNA, 15 bp, Homo sapiens
ttattccagggttta

SEQ ID NO: 1128522 - DNA, 15 bp, Homo sapiens
tttattccagggttt

SEQ ID NO: 1128523 - DNA, 15 bp, Homo sapiens
ttttattccagggtt

SEQ ID NO: 1128524 - DNA, 15 bp, Homo sapiens
cttttattccagggt

SEQ ID NO: 1128525 - DNA, 15 bp, Homo sapiens
gcttttattccaggg

SEQ ID NO: 1128526 - DNA, 15 bp, Homo sapiens
tgcttttattccagg

SEQ ID NO: 1128527 - DNA, 15 bp, Homo sapiens
atgcttttattccag

SEQ ID NO: 1128528 - DNA, 15 bp, Homo sapiens
tatgcttttattcca

SEQ ID NO: 1128529 - DNA, 15 bp, Homo sapiens
ttatgcttttattcc

SEQ ID NO: 1128530 - DNA, 15 bp, Homo sapiens
tttatgcttttattc

SEQ ID NO: 1128531 - DNA, 15 bp, Homo sapiens
atttatgcttttatt

SEQ ID NO: 1128532 - DNA, 15 bp, Homo sapiens
gatttatgcttttat

SEQ ID NO: 1128533 - DNA, 15 bp, Homo sapiens
tgatttatgctttta

SEQ ID NO: 1128534 - DNA, 15 bp, Homo sapiens
ttgatttatgctttt

SEQ ID NO: 1128535 - DNA, 15 bp, Homo sapiens
attgatttatgcttt

SEQ ID NO: 1128536 - DNA, 15 bp, Homo sapiens
aattgatttatgctt

SEQ ID NO: 1128537 - DNA, 15 bp, Homo sapiens
gaattgatttatgct

SEQ ID NO: 1128538 - DNA, 15 bp, Homo sapiens
ggaattgatttatgc

SEQ ID NO: 1128539 - DNA, 15 bp, Homo sapiens
aggaattgatttatg

SEQ ID NO: 1128540 - DNA, 15 bp, Homo sapiens
aaggaattgatttat

SEQ ID NO: 1128541 - DNA, 15 bp, Homo sapiens
aaaggaattgattta

SEQ ID NO: 1128542 - DNA, 15 bp, Homo sapiens
taaaggaattgattt

SEQ ID NO: 1128543 - DNA, 15 bp, Homo sapiens
ataaaggaattgatt

SEQ ID NO: 1128544 - DNA, 15 bp, Homo sapiens
aataaaggaattgat

SEQ ID NO: 1128545 - DNA, 15 bp, Homo sapiens
aaataaaggaattga

SEQ ID NO: 1128546 - DNA, 15 bp, Homo sapiens
gaaataaaggaattg

SEQ ID NO: 1128547 - DNA, 15 bp, Homo sapiens
tgaaataaaggaatt

SEQ ID NO: 1128548 - DNA, 15 bp, Homo sapiens
gtgaaataaaggaat

SEQ ID NO: 1128549 - DNA, 15 bp, Homo sapiens
tgtgaaataaaggaa

SEQ ID NO: 1128550 - DNA, 15 bp, Homo sapiens
gtgtgaaataaagga

SEQ ID NO: 1128551 - DNA, 15 bp, Homo sapiens
tgtgtgaaataaagg

SEQ ID NO: 1128552 - DNA, 15 bp, Homo sapiens
atgtgtgaaataaag

SEQ ID NO: 1128553 - DNA, 15 bp, Homo sapiens
tatgtgtgaaataaa

SEQ ID NO: 1128554 - DNA, 15 bp, Homo sapiens
ttatgtgtgaaataa

SEQ ID NO: 1128555 - DNA, 15 bp, Homo sapiens
tttatgtgtgaaata

SEQ ID NO: 1128556 - DNA, 15 bp, Homo sapiens
atttatgtgtgaaat

SEQ ID NO: 1128557 - DNA, 15 bp, Homo sapiens
tatttatgtgtgaaa

SEQ ID NO: 1128558 - DNA, 15 bp, Homo sapiens
atatttatgtgtgaa

SEQ ID NO: 1128559 - DNA, 15 bp, Homo sapiens
aatatttatgtgtga

SEQ ID NO: 1128560 - DNA, 15 bp, Homo sapiens
caatatttatgtgtg

SEQ ID NO: 1128561 - DNA, 15 bp, Homo sapiens
tcaatatttatgtgt

SEQ ID NO: 1128562 - DNA, 15 bp, Homo sapiens
atcaatatttatgtg

SEQ ID NO: 1128563 - DNA, 15 bp, Homo sapiens
aatcaatatttatgt

SEQ ID NO: 1128564 - DNA, 15 bp, Homo sapiens
taatcaatatttatg

SEQ ID NO: 1128565 - DNA, 15 bp, Homo sapiens
ctaatcaatatttat

SEQ ID NO: 1128566 - DNA, 15 bp, Homo sapiens
tctaatcaatattta

SEQ ID NO: 1128567 - DNA, 15 bp, Homo sapiens
gtctaatcaatattt

SEQ ID NO: 1128568 - DNA, 15 bp, Homo sapiens
tgtctaatcaatatt

SEQ ID NO: 1128569 - DNA, 15 bp, Homo sapiens
ttgtctaatcaatat

SEQ ID NO: 1128570 - DNA, 15 bp, Homo sapiens
attgtctaatcaata

SEQ ID NO: 1128571 - DNA, 15 bp, Homo sapiens
tattgtctaatcaat

SEQ ID NO: 1128572 - DNA, 15 bp, Homo sapiens
ttattgtctaatcaa

SEQ ID NO: 1128573 - DNA, 15 bp, Homo sapiens
gttattgtctaatca

SEQ ID NO: 1128574 - DNA, 15 bp, Homo sapiens
ggttattgtctaatc

SEQ ID NO: 1128575 - DNA, 15 bp, Homo sapiens
gggttattgtctaat

SEQ ID NO: 1128576 - DNA, 15 bp, Homo sapiens
cgggttattgtctaa

SEQ ID NO: 1128577 - DNA, 15 bp, Homo sapiens
acgggttattgtcta

SEQ ID NO: 1128578 - DNA, 15 bp, Homo sapiens
gacgggttattgtct

SEQ ID NO: 1128579 - DNA, 15 bp, Homo sapiens
agacgggttattgtc

SEQ ID NO: 1128580 - DNA, 15 bp, Homo sapiens
cagacgggttattgt

SEQ ID NO: 1128581 - DNA, 15 bp, Homo sapiens
ccagacgggttattg

SEQ ID NO: 1128582 - DNA, 15 bp, Homo sapiens
cccagacgggttatt

SEQ ID NO: 1128583 - DNA, 15 bp, Homo sapiens
ccccagacgggttat

SEQ ID NO: 1128584 - DNA, 15 bp, Homo sapiens
tccccagacgggtta

SEQ ID NO: 1128585 - DNA, 15 bp, Homo sapiens
ttccccagacgggtt

SEQ ID NO: 1128586 - DNA, 15 bp, Homo sapiens
cttccccagacgggt

SEQ ID NO: 1128587 - DNA, 15 bp, Homo sapiens
ccttccccagacggg

SEQ ID NO: 1128588 - DNA, 15 bp, Homo sapiens
cccttccccagacgg

SEQ ID NO: 1128589 - DNA, 15 bp, Homo sapiens
tcccttccccagacg

SEQ ID NO: 1128590 - DNA, 15 bp, Homo sapiens
atcccttccccagac

SEQ ID NO: 1128591 - DNA, 15 bp, Homo sapiens
tatcccttccccaga

SEQ ID NO: 1128592 - DNA, 15 bp, Homo sapiens
atatcccttccccag

SEQ ID NO: 1128593 - DNA, 15 bp, Homo sapiens
aatatcccttcccca

SEQ ID NO: 1128594 - DNA, 15 bp, Homo sapiens
aaatatcccttcccc

SEQ ID NO: 1128595 - DNA, 15 bp, Homo sapiens
gaaatatcccttccc

SEQ ID NO: 1128596 - DNA, 15 bp, Homo sapiens
agaaatatcccttcc

SEQ ID NO: 1128597 - DNA, 15 bp, Homo sapiens
aagaaatatcccttc

SEQ ID NO: 1128598 - DNA, 15 bp, Homo sapiens
aaagaaatatccctt

SEQ ID NO: 1128599 - DNA, 15 bp, Homo sapiens
gaaagaaatatccct

SEQ ID NO: 1128600 - DNA, 15 bp, Homo sapiens
tgaaagaaatatccc

SEQ ID NO: 1128601 - DNA, 15 bp, Homo sapiens
ctgaaagaaatatcc

SEQ ID NO: 1128602 - DNA, 15 bp, Homo sapiens
actgaaagaaatatc

SEQ ID NO: 1128603 - DNA, 15 bp, Homo sapiens
cactgaaagaaatat

SEQ ID NO: 1128604 - DNA, 15 bp, Homo sapiens
ccactgaaagaaata

SEQ ID NO: 1128605 - DNA, 15 bp, Homo sapiens
tccactgaaagaaat

SEQ ID NO: 1128606 - DNA, 15 bp, Homo sapiens
ttccactgaaagaaa

SEQ ID NO: 1128607 - DNA, 15 bp, Homo sapiens
cttccactgaaagaa

SEQ ID NO: 1128608 - DNA, 15 bp, Homo sapiens
acttccactgaaaga

SEQ ID NO: 1128609 - DNA, 15 bp, Homo sapiens
gacttccactgaaag

SEQ ID NO: 1128610 - DNA, 15 bp, Homo sapiens
cgacttccactgaaa

SEQ ID NO: 1128611 - DNA, 15 bp, Homo sapiens
ccgacttccactgaa

SEQ ID NO: 1128612 - DNA, 15 bp, Homo sapiens
tccgacttccactga

SEQ ID NO: 1128613 - DNA, 15 bp, Homo sapiens
ctccgacttccactg

SEQ ID NO: 1128614 - DNA, 15 bp, Homo sapiens
gctccgacttccact

SEQ ID NO: 1128615 - DNA, 15 bp, Homo sapiens
tgctccgacttccac

SEQ ID NO: 1128616 - DNA, 15 bp, Homo sapiens
ctgctccgacttcca

SEQ ID NO: 1128617 - DNA, 15 bp, Homo sapiens
actgctccgacttcc

SEQ ID NO: 1128618 - DNA, 15 bp, Homo sapiens
cactgctccgacttc

SEQ ID NO: 1128619 - DNA, 15 bp, Homo sapiens
tcactgctccgactt

SEQ ID NO: 1128620 - DNA, 15 bp, Homo sapiens
ttcactgctccgact

SEQ ID NO: 1128621 - DNA, 15 bp, Homo sapiens
tttcactgctccgac

SEQ ID NO: 1128622 - DNA, 15 bp, Homo sapiens
ttttcactgctccga

SEQ ID NO: 1128623 - DNA, 15 bp, Homo sapiens
attttcactgctccg

SEQ ID NO: 1128624 - DNA, 15 bp, Homo sapiens
aattttcactgctcc

SEQ ID NO: 1128625 - DNA, 15 bp, Homo sapiens
gaattttcactgctc

SEQ ID NO: 1128626 - DNA, 15 bp, Homo sapiens
cgaattttcactgct

SEQ ID NO: 1128627 - DNA, 15 bp, Homo sapiens
acgaattttcactgc

SEQ ID NO: 1128628 - DNA, 15 bp, Homo sapiens
cacgaattttcactg

SEQ ID NO: 1128629 - DNA, 15 bp, Homo sapiens
gcacgaattttcact

SEQ ID NO: 1128630 - DNA, 15 bp, Homo sapiens
agcacgaattttcac

SEQ ID NO: 1128631 - DNA, 15 bp, Homo sapiens
aagcacgaattttca

SEQ ID NO: 1128632 - DNA, 15 bp, Homo sapiens
caagcacgaattttc

SEQ ID NO: 1128633 - DNA, 15 bp, Homo sapiens
tcaagcacgaatttt

SEQ ID NO: 1128634 - DNA, 15 bp, Homo sapiens
ctcaagcacgaattt

SEQ ID NO: 1128635 - DNA, 15 bp, Homo sapiens
tctcaagcacgaatt

SEQ ID NO: 1128636 - DNA, 15 bp, Homo sapiens
ttctcaagcacgaat

SEQ ID NO: 1128637 - DNA, 15 bp, Homo sapiens
cttctcaagcacgaa

SEQ ID NO: 1128638 - DNA, 15 bp, Homo sapiens
tcttctcaagcacga

SEQ ID NO: 1128639 - DNA, 15 bp, Homo sapiens
ttcttctcaagcacg

SEQ ID NO: 1128640 - DNA, 15 bp, Homo sapiens
tttcttctcaagcac

SEQ ID NO: 1128641 - DNA, 15 bp, Homo sapiens
ttttcttctcaagca

SEQ ID NO: 1128642 - DNA, 15 bp, Homo sapiens
gttttcttctcaagc

SEQ ID NO: 1128643 - DNA, 15 bp, Homo sapiens
agttttcttctcaag

SEQ ID NO: 1128644 - DNA, 15 bp, Homo sapiens
tagttttcttctcaa

SEQ ID NO: 1128645 - DNA, 15 bp, Homo sapiens
atagttttcttctca

SEQ ID NO: 1128646 - DNA, 15 bp, Homo sapiens
catagttttcttctc

SEQ ID NO: 1128647 - DNA, 15 bp, Homo sapiens
tcatagttttcttct

SEQ ID NO: 1128648 - DNA, 15 bp, Homo sapiens
gtcatagttttcttc

SEQ ID NO: 1128649 - DNA, 15 bp, Homo sapiens
tgtcatagttttctt

SEQ ID NO: 1128650 - DNA, 15 bp, Homo sapiens
ctgtcatagttttct

SEQ ID NO: 1128651 - DNA, 15 bp, Homo sapiens
tctgtcatagttttc

SEQ ID NO: 1128652 - DNA, 15 bp, Homo sapiens
ttctgtcatagtttt

SEQ ID NO: 1128653 - DNA, 15 bp, Homo sapiens
tttctgtcatagttt

SEQ ID NO: 1128654 - DNA, 15 bp, Homo sapiens
ctttctgtcatagtt

SEQ ID NO: 1128655 - DNA, 15 bp, Homo sapiens
cctttctgtcatagt

SEQ ID NO: 1128656 - DNA, 15 bp, Homo sapiens
tcctttctgtcatag

SEQ ID NO: 1128657 - DNA, 15 bp, Homo sapiens
gtcctttctgtcata

SEQ ID NO: 1128658 - DNA, 15 bp, Homo sapiens
tgtcctttctgtcat

SEQ ID NO: 1128659 - DNA, 15 bp, Homo sapiens
atgtcctttctgtca

SEQ ID NO: 1128660 - DNA, 15 bp, Homo sapiens
aatgtcctttctgtc

SEQ ID NO: 1128661 - DNA, 15 bp, Homo sapiens
taatgtcctttctgt

SEQ ID NO: 1128662 - DNA, 15 bp, Homo sapiens
ataatgtcctttctg

SEQ ID NO: 1128663 - DNA, 15 bp, Homo sapiens
tataatgtcctttct

SEQ ID NO: 1128664 - DNA, 15 bp, Homo sapiens
ctataatgtcctttc

SEQ ID NO: 1128665 - DNA, 15 bp, Homo sapiens
actataatgtccttt

SEQ ID NO: 1128666 - DNA, 15 bp, Homo sapiens
cactataatgtcctt

SEQ ID NO: 1128667 - DNA, 15 bp, Homo sapiens
ccactataatgtcct

SEQ ID NO: 1128668 - DNA, 15 bp, Homo sapiens
tccactataatgtcc

SEQ ID NO: 1128669 - DNA, 15 bp, Homo sapiens
atccactataatgtc

SEQ ID NO: 1128670 - DNA, 15 bp, Homo sapiens
gatccactataatgt

SEQ ID NO: 1128671 - DNA, 15 bp, Homo sapiens
tgatccactataatg

SEQ ID NO: 1128672 - DNA, 15 bp, Homo sapiens
gtgatccactataat

SEQ ID NO: 1128673 - DNA, 15 bp, Homo sapiens
agtgatccactataa

SEQ ID NO: 1128674 - DNA, 15 bp, Homo sapiens
cagtgatccactata

SEQ ID NO: 1128675 - DNA, 15 bp, Homo sapiens
acagtgatccactat

SEQ ID NO: 1128676 - DNA, 15 bp, Homo sapiens
gacagtgatccacta

SEQ ID NO: 1128677 - DNA, 15 bp, Homo sapiens
tgacagtgatccact

SEQ ID NO: 1128678 - DNA, 15 bp, Homo sapiens
ctgacagtgatccac

SEQ ID NO: 1128679 - DNA, 15 bp, Homo sapiens
tctgacagtgatcca

SEQ ID NO: 1128680 - DNA, 15 bp, Homo sapiens
ttctgacagtgatcc

SEQ ID NO: 1128681 - DNA, 15 bp, Homo sapiens
cttctgacagtgatc

SEQ ID NO: 1128682 - DNA, 15 bp, Homo sapiens
gcttctgacagtgat

SEQ ID NO: 1128683 - DNA, 15 bp, Homo sapiens
ggcttctgacagtga

SEQ ID NO: 1128684 - DNA, 15 bp, Homo sapiens
tggcttctgacagtg

SEQ ID NO: 1128685 - DNA, 15 bp, Homo sapiens
atggcttctgacagt

SEQ ID NO: 1128686 - DNA, 15 bp, Homo sapiens
gatggcttctgacag

SEQ ID NO: 1128687 - DNA, 15 bp, Homo sapiens
tgatggcttctgaca

SEQ ID NO: 1128688 - DNA, 15 bp, Homo sapiens
ttgatggcttctgac

SEQ ID NO: 1128689 - DNA, 15 bp, Homo sapiens
tttgatggcttctga

SEQ ID NO: 1128690 - DNA, 15 bp, Homo sapiens
atttgatggcttctg

SEQ ID NO: 1128691 - DNA, 15 bp, Homo sapiens
aatttgatggcttct

SEQ ID NO: 1128692 - DNA, 15 bp, Homo sapiens
gaatttgatggcttc

SEQ ID NO: 1128693 - DNA, 15 bp, Homo sapiens
agaatttgatggctt

SEQ ID NO: 1128694 - DNA, 15 bp, Homo sapiens
aagaatttgatggct

SEQ ID NO: 1128695 - DNA, 15 bp, Homo sapiens
aaagaatttgatggc

SEQ ID NO: 1128696 - DNA, 15 bp, Homo sapiens
aaaagaatttgatgg

SEQ ID NO: 1128697 - DNA, 15 bp, Homo sapiens
gaaaagaatttgatg

SEQ ID NO: 1128698 - DNA, 15 bp, Homo sapiens
ggaaaagaatttgat

SEQ ID NO: 1128699 - DNA, 15 bp, Homo sapiens
gggaaaagaatttga

SEQ ID NO: 1128700 - DNA, 15 bp, Homo sapiens
agggaaaagaatttg

SEQ ID NO: 1128701 - DNA, 15 bp, Homo sapiens
aagggaaaagaattt

SEQ ID NO: 1128702 - DNA, 15 bp, Homo sapiens
gaagggaaaagaatt

SEQ ID NO: 1128703 - DNA, 15 bp, Homo sapiens
tgaagggaaaagaat

SEQ ID NO: 1128704 - DNA, 15 bp, Homo sapiens
atgaagggaaaagaa

SEQ ID NO: 1128705 - DNA, 15 bp, Homo sapiens
catgaagggaaaaga

SEQ ID NO: 1128706 - DNA, 15 bp, Homo sapiens
tcatgaagggaaaag

SEQ ID NO: 1128707 - DNA, 15 bp, Homo sapiens
gtcatgaagggaaaa

SEQ ID NO: 1128708 - DNA, 15 bp, Homo sapiens
agtcatgaagggaaa

SEQ ID NO: 1128709 - DNA, 15 bp, Homo sapiens
cagtcatgaagggaa

SEQ ID NO: 1128710 - DNA, 15 bp, Homo sapiens
ccagtcatgaaggga

SEQ ID NO: 1128711 - DNA, 15 bp, Homo sapiens
accagtcatgaaggg

SEQ ID NO: 1128712 - DNA, 15 bp, Homo sapiens
caccagtcatgaagg

SEQ ID NO: 1128713 - DNA, 15 bp, Homo sapiens
acaccagtcatgaag

SEQ ID NO: 1128714 - DNA, 15 bp, Homo sapiens
gacaccagtcatgaa

SEQ ID NO: 1128715 - DNA, 15 bp, Homo sapiens
tgacaccagtcatga

SEQ ID NO: 1128716 - DNA, 15 bp, Homo sapiens
gtgacaccagtcatg

SEQ ID NO: 1128717 - DNA, 15 bp, Homo sapiens
ggtgacaccagtcat

SEQ ID NO: 1128718 - DNA, 15 bp, Homo sapiens
aggtgacaccagtca

SEQ ID NO: 1128719 - DNA, 15 bp, Homo sapiens
aaggtgacaccagtc

SEQ ID NO: 1128720 - DNA, 15 bp, Homo sapiens
gaaggtgacaccagt

SEQ ID NO: 1128721 - DNA, 15 bp, Homo sapiens
ggaaggtgacaccag

SEQ ID NO: 1128722 - DNA, 15 bp, Homo sapiens
tggaaggtgacacca

SEQ ID NO: 1128723 - DNA, 15 bp, Homo sapiens
atggaaggtgacacc

SEQ ID NO: 1128724 - DNA, 15 bp, Homo sapiens
gatggaaggtgacac

SEQ ID NO: 1128725 - DNA, 15 bp, Homo sapiens
agatggaaggtgaca

SEQ ID NO: 1128726 - DNA, 15 bp, Homo sapiens
tagatggaaggtgac

SEQ ID NO: 1128727 - DNA, 15 bp, Homo sapiens
ctagatggaaggtga

SEQ ID NO: 1128728 - DNA, 15 bp, Homo sapiens
gctagatggaaggtg

SEQ ID NO: 1128729 - DNA, 15 bp, Homo sapiens
tgctagatggaaggt

SEQ ID NO: 1128730 - DNA, 15 bp, Homo sapiens
ttgctagatggaagg

SEQ ID NO: 1128731 - DNA, 15 bp, Homo sapiens
attgctagatggaag

SEQ ID NO: 1128732 - DNA, 15 bp, Homo sapiens
aattgctagatggaa

SEQ ID NO: 1128733 - DNA, 15 bp, Homo sapiens
aaattgctagatgga

SEQ ID NO: 1128734 - DNA, 15 bp, Homo sapiens
caaattgctagatgg

SEQ ID NO: 1128735 - DNA, 15 bp, Homo sapiens
tcaaattgctagatg

SEQ ID NO: 1128736 - DNA, 15 bp, Homo sapiens
gtcaaattgctagat

SEQ ID NO: 1128737 - DNA, 15 bp, Homo sapiens
tgtcaaattgctaga

SEQ ID NO: 1128738 - DNA, 15 bp, Homo sapiens
gtgtcaaattgctag

SEQ ID NO: 1128739 - DNA, 15 bp, Homo sapiens
ggtgtcaaattgcta

SEQ ID NO: 1128740 - DNA, 15 bp, Homo sapiens
gggtgtcaaattgct

SEQ ID NO: 1128741 - DNA, 15 bp, Homo sapiens
agggtgtcaaattgc

SEQ ID NO: 1128742 - DNA, 15 bp, Homo sapiens
aagggtgtcaaattg

SEQ ID NO: 1128743 - DNA, 15 bp, Homo sapiens
caagggtgtcaaatt

SEQ ID NO: 1128744 - DNA, 15 bp, Homo sapiens
acaagggtgtcaaat

SEQ ID NO: 1128745 - DNA, 15 bp, Homo sapiens
aacaagggtgtcaaa

SEQ ID NO: 1128746 - DNA, 15 bp, Homo sapiens
caacaagggtgtcaa

SEQ ID NO: 1128747 - DNA, 15 bp, Homo sapiens
ccaacaagggtgtca

SEQ ID NO: 1128748 - DNA, 15 bp, Homo sapiens
tccaacaagggtgtc

SEQ ID NO: 1128749 - DNA, 15 bp, Homo sapiens
ctccaacaagggtgt

SEQ ID NO: 1128750 - DNA, 15 bp, Homo sapiens
tctccaacaagggtg

SEQ ID NO: 1128751 - DNA, 15 bp, Homo sapiens
ttctccaacaagggt

SEQ ID NO: 1128752 - DNA, 15 bp, Homo sapiens
cttctccaacaaggg

SEQ ID NO: 1128753 - DNA, 15 bp, Homo sapiens
ccttctccaacaagg

SEQ ID NO: 1128754 - DNA, 15 bp, Homo sapiens
tccttctccaacaag

SEQ ID NO: 1128755 - DNA, 15 bp, Homo sapiens
ctccttctccaacaa

SEQ ID NO: 1128756 - DNA, 15 bp, Homo sapiens
cctccttctccaaca

SEQ ID NO: 1128757 - DNA, 15 bp, Homo sapiens
tcctccttctccaac

SEQ ID NO: 1128758 - DNA, 15 bp, Homo sapiens
ctcctccttctccaa

SEQ ID NO: 1128759 - DNA, 15 bp, Homo sapiens
cctcctccttctcca

SEQ ID NO: 1128760 - DNA, 15 bp, Homo sapiens
gcctcctccttctcc

SEQ ID NO: 1128761 - DNA, 15 bp, Homo sapiens
ggcctcctccttctc

SEQ ID NO: 1128762 - DNA, 15 bp, Homo sapiens
tggcctcctccttct

SEQ ID NO: 1128763 - DNA, 15 bp, Homo sapiens
ctggcctcctccttc

SEQ ID NO: 1128764 - DNA, 15 bp, Homo sapiens
tctggcctcctcctt

SEQ ID NO: 1128765 - DNA, 15 bp, Homo sapiens
atctggcctcctcct

SEQ ID NO: 1128766 - DNA, 15 bp, Homo sapiens
catctggcctcctcc

SEQ ID NO: 1128767 - DNA, 15 bp, Homo sapiens
tcatctggcctcctc

SEQ ID NO: 1128768 - DNA, 15 bp, Homo sapiens
ctcatctggcctcct

SEQ ID NO: 1128769 - DNA, 15 bp, Homo sapiens
actcatctggcctcc

SEQ ID NO: 1128770 - DNA, 15 bp, Homo sapiens
cactcatctggcctc

SEQ ID NO: 1128771 - DNA, 15 bp, Homo sapiens
ccactcatctggcct

SEQ ID NO: 1128772 - DNA, 15 bp, Homo sapiens
accactcatctggcc

SEQ ID NO: 1128773 - DNA, 15 bp, Homo sapiens
caccactcatctggc

SEQ ID NO: 1128774 - DNA, 15 bp, Homo sapiens
ccaccactcatctgg

SEQ ID NO: 1128775 - DNA, 15 bp, Homo sapiens
gccaccactcatctg

SEQ ID NO: 1128776 - DNA, 15 bp, Homo sapiens
ggccaccactcatct

SEQ ID NO: 1128777 - DNA, 15 bp, Homo sapiens
tggccaccactcatc

SEQ ID NO: 1128778 - DNA, 15 bp, Homo sapiens
ctggccaccactcat

SEQ ID NO: 1128779 - DNA, 15 bp, Homo sapiens
tctggccaccactca

SEQ ID NO: 1128780 - DNA, 15 bp, Homo sapiens
ttctggccaccactc

SEQ ID NO: 1128781 - DNA, 15 bp, Homo sapiens
tttctggccaccact

SEQ ID NO: 1128782 - DNA, 15 bp, Homo sapiens
gtttctggccaccac

SEQ ID NO: 1128783 - DNA, 15 bp, Homo sapiens
tgtttctggccacca

SEQ ID NO: 1128784 - DNA, 15 bp, Homo sapiens
ttgtttctggccacc

SEQ ID NO: 1128785 - DNA, 15 bp, Homo sapiens
tttgtttctggccac

SEQ ID NO: 1128786 - DNA, 15 bp, Homo sapiens
ctttgtttctggcca

SEQ ID NO: 1128787 - DNA, 15 bp, Homo sapiens
cctttgtttctggcc

SEQ ID NO: 1128788 - DNA, 15 bp, Homo sapiens
ccctttgtttctggc

SEQ ID NO: 1128789 - DNA, 15 bp, Homo sapiens
accctttgtttctgg

SEQ ID NO: 1128790 - DNA, 15 bp, Homo sapiens
taccctttgtttctg

SEQ ID NO: 1128791 - DNA, 15 bp, Homo sapiens
ctaccctttgtttct

SEQ ID NO: 1128792 - DNA, 15 bp, Homo sapiens
gctaccctttgtttc

SEQ ID NO: 1128793 - DNA, 15 bp, Homo sapiens
agctaccctttgttt

SEQ ID NO: 1128794 - DNA, 15 bp, Homo sapiens
tagctaccctttgtt

SEQ ID NO: 1128795 - DNA, 15 bp, Homo sapiens
atagctaccctttgt

SEQ ID NO: 1128796 - DNA, 15 bp, Homo sapiens
gatagctaccctttg

SEQ ID NO: 1128797 - DNA, 15 bp, Homo sapiens
cgatagctacccttt

SEQ ID NO: 1128798 - DNA, 15 bp, Homo sapiens
gcgatagctaccctt

SEQ ID NO: 1128799 - DNA, 15 bp, Homo sapiens
ggcgatagctaccct

SEQ ID NO: 1128800 - DNA, 15 bp, Homo sapiens
tggcgatagctaccc

SEQ ID NO: 1128801 - DNA, 15 bp, Homo sapiens
ctggcgatagctacc

SEQ ID NO: 1128802 - DNA, 15 bp, Homo sapiens
tctggcgatagctac

SEQ ID NO: 1128803 - DNA, 15 bp, Homo sapiens
ctctggcgatagcta

SEQ ID NO: 1128804 - DNA, 15 bp, Homo sapiens
gctctggcgatagct

SEQ ID NO: 1128805 - DNA, 15 bp, Homo sapiens
ggctctggcgatagc

SEQ ID NO: 1128806 - DNA, 15 bp, Homo sapiens
gggctctggcgatag

SEQ ID NO: 1128807 - DNA, 15 bp, Homo sapiens
agggctctggcgata

SEQ ID NO: 1128808 - DNA, 15 bp, Homo sapiens
gagggctctggcgat

SEQ ID NO: 1128809 - DNA, 15 bp, Homo sapiens
tgagggctctggcga

SEQ ID NO: 1128810 - DNA, 15 bp, Homo sapiens
atgagggctctggcg

SEQ ID NO: 1128811 - DNA, 15 bp, Homo sapiens
gatgagggctctggc

SEQ ID NO: 1128812 - DNA, 15 bp, Homo sapiens
ggatgagggctctgg

SEQ ID NO: 1128813 - DNA, 15 bp, Homo sapiens
cggatgagggctctg

SEQ ID NO: 1128814 - DNA, 15 bp, Homo sapiens
tcggatgagggctct

SEQ ID NO: 1128815 - DNA, 15 bp, Homo sapiens
ttcggatgagggctc

SEQ ID NO: 1128816 - DNA, 15 bp, Homo sapiens
tttcggatgagggct

SEQ ID NO: 1128817 - DNA, 15 bp, Homo sapiens
atttcggatgagggc

SEQ ID NO: 1128818 - DNA, 15 bp, Homo sapiens
gatttcggatgaggg

SEQ ID NO: 1128819 - DNA, 15 bp, Homo sapiens
ggatttcggatgagg

SEQ ID NO: 1128820 - DNA, 15 bp, Homo sapiens
gggatttcggatgag

SEQ ID NO: 1128821 - DNA, 15 bp, Homo sapiens
tgggatttcggatga

SEQ ID NO: 1128822 - DNA, 15 bp, Homo sapiens
ttgggatttcggatg

SEQ ID NO: 1128823 - DNA, 15 bp, Homo sapiens
cttgggatttcggat

SEQ ID NO: 1128824 - DNA, 15 bp, Homo sapiens
tcttgggatttcgga

SEQ ID NO: 1128825 - DNA, 15 bp, Homo sapiens
atcttgggatttcgg

SEQ ID NO: 1128826 - DNA, 15 bp, Homo sapiens
aatcttgggatttcg

SEQ ID NO: 1128827 - DNA, 15 bp, Homo sapiens
gaatcttgggatttc

SEQ ID NO: 1128828 - DNA, 15 bp, Homo sapiens
agaatcttgggattt

SEQ ID NO: 1128829 - DNA, 15 bp, Homo sapiens
cagaatcttgggatt

SEQ ID NO: 1128830 - DNA, 15 bp, Homo sapiens
gcagaatcttgggat

SEQ ID NO: 1128831 - DNA, 15 bp, Homo sapiens
agcagaatcttggga

SEQ ID NO: 1128832 - DNA, 15 bp, Homo sapiens
aagcagaatcttggg

SEQ ID NO: 1128833 - DNA, 15 bp, Homo sapiens
aaagcagaatcttgg

SEQ ID NO: 1128834 - DNA, 15 bp, Homo sapiens
aaaagcagaatcttg

SEQ ID NO: 1128835 - DNA, 15 bp, Homo sapiens
caaaagcagaatctt

SEQ ID NO: 1128836 - DNA, 15 bp, Homo sapiens
ccaaaagcagaatct

SEQ ID NO: 1128837 - DNA, 15 bp, Homo sapiens
tccaaaagcagaatc

SEQ ID NO: 1128838 - DNA, 15 bp, Homo sapiens
gtccaaaagcagaat

SEQ ID NO: 1128839 - DNA, 15 bp, Homo sapiens
tgtccaaaagcagaa

SEQ ID NO: 1128840 - DNA, 15 bp, Homo sapiens
atgtccaaaagcaga

SEQ ID NO: 1128841 - DNA, 15 bp, Homo sapiens
catgtccaaaagcag

SEQ ID NO: 1128842 - DNA, 15 bp, Homo sapiens
ccatgtccaaaagca

SEQ ID NO: 1128843 - DNA, 15 bp, Homo sapiens
gccatgtccaaaagc

SEQ ID NO: 1128844 - DNA, 15 bp, Homo sapiens
ggccatgtccaaaag

SEQ ID NO: 1128845 - DNA, 15 bp, Homo sapiens
tggccatgtccaaaa

SEQ ID NO: 1128846 - DNA, 15 bp, Homo sapiens
gtggccatgtccaaa

SEQ ID NO: 1128847 - DNA, 15 bp, Homo sapiens
ggtggccatgtccaa

SEQ ID NO: 1128848 - DNA, 15 bp, Homo sapiens
aggtggccatgtcca

SEQ ID NO: 1128849 - DNA, 15 bp, Homo sapiens
gaggtggccatgtcc

SEQ ID NO: 1128850 - DNA, 15 bp, Homo sapiens
tgaggtggccatgtc

SEQ ID NO: 1128851 - DNA, 15 bp, Homo sapiens
ctgaggtggccatgt

SEQ ID NO: 1128852 - DNA, 15 bp, Homo sapiens
gctgaggtggccatg

SEQ ID NO: 1128853 - DNA, 15 bp, Homo sapiens
agctgaggtggccat

SEQ ID NO: 1128854 - DNA, 15 bp, Homo sapiens
gagctgaggtggcca

SEQ ID NO: 1128855 - DNA, 15 bp, Homo sapiens
agagctgaggtggcc

SEQ ID NO: 1128856 - DNA, 15 bp, Homo sapiens
cagagctgaggtggc

SEQ ID NO: 1128857 - DNA, 15 bp, Homo sapiens
ccagagctgaggtgg

SEQ ID NO: 1128858 - DNA, 15 bp, Homo sapiens
tccagagctgaggtg

SEQ ID NO: 1128859 - DNA, 15 bp, Homo sapiens
gtccagagctgaggt

SEQ ID NO: 1128860 - DNA, 15 bp, Homo sapiens
tgtccagagctgagg

SEQ ID NO: 1128861 - DNA, 15 bp, Homo sapiens
ttgtccagagctgag

SEQ ID NO: 1128862 - DNA, 15 bp, Homo sapiens
attgtccagagctga

SEQ ID NO: 1128863 - DNA, 15 bp, Homo sapiens
cattgtccagagctg

SEQ ID NO: 1128864 - DNA, 15 bp, Homo sapiens
tcattgtccagagct

SEQ ID NO: 1128865 - DNA, 15 bp, Homo sapiens
ctcattgtccagagc

SEQ ID NO: 1128866 - DNA, 15 bp, Homo sapiens
tctcattgtccagag

SEQ ID NO: 1128867 - DNA, 15 bp, Homo sapiens
ctctcattgtccaga

SEQ ID NO: 1128868 - DNA, 15 bp, Homo sapiens
actctcattgtccag

SEQ ID NO: 1128869 - DNA, 15 bp, Homo sapiens
cactctcattgtcca

SEQ ID NO: 1128870 - DNA, 15 bp, Homo sapiens
tcactctcattgtcc

SEQ ID NO: 1128871 - DNA, 15 bp, Homo sapiens
ttcactctcattgtc

SEQ ID NO: 1128872 - DNA, 15 bp, Homo sapiens
cttcactctcattgt

SEQ ID NO: 1128873 - DNA, 15 bp, Homo sapiens
gcttcactctcattg

SEQ ID NO: 1128874 - DNA, 15 bp, Homo sapiens
ggcttcactctcatt

SEQ ID NO: 1128875 - DNA, 15 bp, Homo sapiens
tggcttcactctcat

SEQ ID NO: 1128876 - DNA, 15 bp, Homo sapiens
atggcttcactctca

SEQ ID NO: 1128877 - DNA, 15 bp, Homo sapiens
catggcttcactctc

SEQ ID NO: 1128878 - DNA, 15 bp, Homo sapiens
ccatggcttcactct

SEQ ID NO: 1128879 - DNA, 15 bp, Homo sapiens
accatggcttcactc

SEQ ID NO: 1128880 - DNA, 15 bp, Homo sapiens
caccatggcttcact

SEQ ID NO: 1128881 - DNA, 15 bp, Homo sapiens
gcaccatggcttcac

SEQ ID NO: 1128882 - DNA, 15 bp, Homo sapiens
tgcaccatggcttca

SEQ ID NO: 1128883 - DNA, 15 bp, Homo sapiens
ttgcaccatggcttc

SEQ ID NO: 1128884 - DNA, 15 bp, Homo sapiens
cttgcaccatggctt

SEQ ID NO: 1128885 - DNA, 15 bp, Homo sapiens
tcttgcaccatggct

SEQ ID NO: 1128886 - DNA, 15 bp, Homo sapiens
ttcttgcaccatggc

SEQ ID NO: 1128887 - DNA, 15 bp, Homo sapiens
cttcttgcaccatgg

SEQ ID NO: 1128888 - DNA, 15 bp, Homo sapiens
acttcttgcaccatg

SEQ ID NO: 1128889 - DNA, 15 bp, Homo sapiens
cacttcttgcaccat

SEQ ID NO: 1128890 - DNA, 15 bp, Homo sapiens
gcacttcttgcacca

SEQ ID NO: 1128891 - DNA, 15 bp, Homo sapiens
agcacttcttgcacc

SEQ ID NO: 1128892 - DNA, 15 bp, Homo sapiens
cagcacttcttgcac

SEQ ID NO: 1128893 - DNA, 15 bp, Homo sapiens
tcagcacttcttgca

SEQ ID NO: 1128894 - DNA, 15 bp, Homo sapiens
ctcagcacttcttgc

SEQ ID NO: 1128895 - DNA, 15 bp, Homo sapiens
actcagcacttcttg

SEQ ID NO: 1128896 - DNA, 15 bp, Homo sapiens
tactcagcacttctt

SEQ ID NO: 1128897 - DNA, 15 bp, Homo sapiens
ttactcagcacttct

SEQ ID NO: 1128898 - DNA, 15 bp, Homo sapiens
cttactcagcacttc

SEQ ID NO: 1128899 - DNA, 15 bp, Homo sapiens
ccttactcagcactt

SEQ ID NO: 1128900 - DNA, 15 bp, Homo sapiens
accttactcagcact

SEQ ID NO: 1128901 - DNA, 15 bp, Homo sapiens
aaccttactcagcac

SEQ ID NO: 1128902 - DNA, 15 bp, Homo sapiens
aaaccttactcagca

SEQ ID NO: 1128903 - DNA, 15 bp, Homo sapiens
caaaccttactcagc

SEQ ID NO: 1128904 - DNA, 15 bp, Homo sapiens
acaaaccttactcag

SEQ ID NO: 1128905 - DNA, 15 bp, Homo sapiens
cacaaaccttactca

SEQ ID NO: 1128906 - DNA, 15 bp, Homo sapiens
ccacaaaccttactc

SEQ ID NO: 1128907 - DNA, 15 bp, Homo sapiens
tccacaaaccttact

SEQ ID NO: 1128908 - DNA, 15 bp, Homo sapiens
ttccacaaaccttac

SEQ ID NO: 1128909 - DNA, 15 bp, Homo sapiens
cttccacaaacctta

SEQ ID NO: 1128910 - DNA, 15 bp, Homo sapiens
acttccacaaacctt

SEQ ID NO: 1128911 - DNA, 15 bp, Homo sapiens
gacttccacaaacct

SEQ ID NO: 1128912 - DNA, 15 bp, Homo sapiens
agacttccacaaacc

SEQ ID NO: 1128913 - DNA, 15 bp, Homo sapiens
aagacttccacaaac

SEQ ID NO: 1128914 - DNA, 15 bp, Homo sapiens
taagacttccacaaa

SEQ ID NO: 1128915 - DNA, 15 bp, Homo sapiens
ctaagacttccacaa

SEQ ID NO: 1128916 - DNA, 15 bp, Homo sapiens
actaagacttccaca

SEQ ID NO: 1128917 - DNA, 15 bp, Homo sapiens
gactaagacttccac

SEQ ID NO: 1128918 - DNA, 15 bp, Homo sapiens
ggactaagacttcca

SEQ ID NO: 1128919 - DNA, 15 bp, Homo sapiens
tggactaagacttcc

SEQ ID NO: 1128920 - DNA, 15 bp, Homo sapiens
atggactaagacttc

SEQ ID NO: 1128921 - DNA, 15 bp, Homo sapiens
aatggactaagactt

SEQ ID NO: 1128922 - DNA, 15 bp, Homo sapiens
aaatggactaagact

SEQ ID NO: 1128923 - DNA, 15 bp, Homo sapiens
aaaatggactaagac

SEQ ID NO: 1128924 - DNA, 15 bp, Homo sapiens
taaaatggactaaga

SEQ ID NO: 1128925 - DNA, 15 bp, Homo sapiens
gtaaaatggactaag

SEQ ID NO: 1128926 - DNA, 15 bp, Homo sapiens
tgtaaaatggactaa

SEQ ID NO: 1128927 - DNA, 15 bp, Homo sapiens
ctgtaaaatggacta

SEQ ID NO: 1128928 - DNA, 15 bp, Homo sapiens
cctgtaaaatggact

SEQ ID NO: 1128929 - DNA, 15 bp, Homo sapiens
acctgtaaaatggac

SEQ ID NO: 1128930 - DNA, 15 bp, Homo sapiens
gacctgtaaaatgga

SEQ ID NO: 1128931 - DNA, 15 bp, Homo sapiens
ggacctgtaaaatgg

SEQ ID NO: 1128932 - DNA, 15 bp, Homo sapiens
tggacctgtaaaatg

SEQ ID NO: 1128933 - DNA, 15 bp, Homo sapiens
atggacctgtaaaat

SEQ ID NO: 1128934 - DNA, 15 bp, Homo sapiens
catggacctgtaaaa

SEQ ID NO: 1128935 - DNA, 15 bp, Homo sapiens
acatggacctgtaaa

SEQ ID NO: 1128936 - DNA, 15 bp, Homo sapiens
cacatggacctgtaa

SEQ ID NO: 1128937 - DNA, 15 bp, Homo sapiens
ccacatggacctgta

SEQ ID NO: 1128938 - DNA, 15 bp, Homo sapiens
tccacatggacctgt

SEQ ID NO: 1128939 - DNA, 15 bp, Homo sapiens
ttccacatggacctg

SEQ ID NO: 1128940 - DNA, 15 bp, Homo sapiens
tttccacatggacct

SEQ ID NO: 1128941 - DNA, 15 bp, Homo sapiens
atttccacatggacc

SEQ ID NO: 1128942 - DNA, 15 bp, Homo sapiens
catttccacatggac

SEQ ID NO: 1128943 - DNA, 15 bp, Homo sapiens
gcatttccacatgga

SEQ ID NO: 1128944 - DNA, 15 bp, Homo sapiens
agcatttccacatgg

SEQ ID NO: 1128945 - DNA, 15 bp, Homo sapiens
aagcatttccacatg

SEQ ID NO: 1128946 - DNA, 15 bp, Homo sapiens
caagcatttccacat

SEQ ID NO: 1128947 - DNA, 15 bp, Homo sapiens
acaagcatttccaca

SEQ ID NO: 1128948 - DNA, 15 bp, Homo sapiens
cacaagcatttccac

SEQ ID NO: 1128949 - DNA, 15 bp, Homo sapiens
gcacaagcatttcca

SEQ ID NO: 1128950 - DNA, 15 bp, Homo sapiens
agcacaagcatttcc

SEQ ID NO: 1128951 - DNA, 15 bp, Homo sapiens
cagcacaagcatttc

SEQ ID NO: 1128952 - DNA, 15 bp, Homo sapiens
gcagcacaagcattt

SEQ ID NO: 1128953 - DNA, 15 bp, Homo sapiens
agcagcacaagcatt

SEQ ID NO: 1128954 - DNA, 15 bp, Homo sapiens
cagcagcacaagcat

SEQ ID NO: 1128955 - DNA, 15 bp, Homo sapiens
gcagcagcacaagca

SEQ ID NO: 1128956 - DNA, 15 bp, Homo sapiens
tgcagcagcacaagc

SEQ ID NO: 1128957 - DNA, 15 bp, Homo sapiens
ctgcagcagcacaag

SEQ ID NO: 1128958 - DNA, 15 bp, Homo sapiens
cctgcagcagcacaa

SEQ ID NO: 1128959 - DNA, 15 bp, Homo sapiens
tcctgcagcagcaca

SEQ ID NO: 1128960 - DNA, 15 bp, Homo sapiens
ttcctgcagcagcac

SEQ ID NO: 1128961 - DNA, 15 bp, Homo sapiens
tttcctgcagcagca

SEQ ID NO: 1128962 - DNA, 15 bp, Homo sapiens
ctttcctgcagcagc

SEQ ID NO: 1128963 - DNA, 15 bp, Homo sapiens
cctttcctgcagcag

SEQ ID NO: 1128964 - DNA, 15 bp, Homo sapiens
gcctttcctgcagca

SEQ ID NO: 1128965 - DNA, 15 bp, Homo sapiens
tgcctttcctgcagc

SEQ ID NO: 1128966 - DNA, 15 bp, Homo sapiens
ctgcctttcctgcag

SEQ ID NO: 1128967 - DNA, 15 bp, Homo sapiens
gctgcctttcctgca

SEQ ID NO: 1128968 - DNA, 15 bp, Homo sapiens
agctgcctttcctgc

SEQ ID NO: 1128969 - DNA, 15 bp, Homo sapiens
gagctgcctttcctg

SEQ ID NO: 1128970 - DNA, 15 bp, Homo sapiens
ggagctgcctttcct

SEQ ID NO: 1128971 - DNA, 15 bp, Homo sapiens
aggagctgcctttcc

SEQ ID NO: 1128972 - DNA, 15 bp, Homo sapiens
aaggagctgcctttc

SEQ ID NO: 1128973 - DNA, 15 bp, Homo sapiens
caaggagctgccttt

SEQ ID NO: 1128974 - DNA, 15 bp, Homo sapiens
acaaggagctgcctt

SEQ ID NO: 1128975 - DNA, 15 bp, Homo sapiens
cacaaggagctgcct

SEQ ID NO: 1128976 - DNA, 15 bp, Homo sapiens
ccacaaggagctgcc

SEQ ID NO: 1128977 - DNA, 15 bp, Homo sapiens
cccacaaggagctgc

SEQ ID NO: 1128978 - DNA, 15 bp, Homo sapiens
ccccacaaggagctg

SEQ ID NO: 1128979 - DNA, 15 bp, Homo sapiens
accccacaaggagct

SEQ ID NO: 1128980 - DNA, 15 bp, Homo sapiens
caccccacaaggagc

SEQ ID NO: 1128981 - DNA, 15 bp, Homo sapiens
ccaccccacaaggag

SEQ ID NO: 1128982 - DNA, 15 bp, Homo sapiens
cccaccccacaagga

SEQ ID NO: 1128983 - DNA, 15 bp, Homo sapiens
tcccaccccacaagg

SEQ ID NO: 1128984 - DNA, 15 bp, Homo sapiens
ctcccaccccacaag

SEQ ID NO: 1128985 - DNA, 15 bp, Homo sapiens
cctcccaccccacaa

SEQ ID NO: 1128986 - DNA, 15 bp, Homo sapiens
ccctcccaccccaca

SEQ ID NO: 1128987 - DNA, 15 bp, Homo sapiens
tccctcccaccccac

SEQ ID NO: 1128988 - DNA, 15 bp, Homo sapiens
atccctcccacccca

SEQ ID NO: 1128989 - DNA, 15 bp, Homo sapiens
catccctcccacccc

SEQ ID NO: 1128990 - DNA, 15 bp, Homo sapiens
ccatccctcccaccc

SEQ ID NO: 1128991 - DNA, 15 bp, Homo sapiens
cccatccctcccacc

SEQ ID NO: 1128992 - DNA, 15 bp, Homo sapiens
tcccatccctcccac

SEQ ID NO: 1128993 - DNA, 15 bp, Homo sapiens
ctcccatccctccca

SEQ ID NO: 1128994 - DNA, 15 bp, Homo sapiens
actcccatccctccc

SEQ ID NO: 1128995 - DNA, 15 bp, Homo sapiens
tactcccatccctcc

SEQ ID NO: 1128996 - DNA, 15 bp, Homo sapiens
ctactcccatccctc

SEQ ID NO: 1128997 - DNA, 15 bp, Homo sapiens
actactcccatccct

SEQ ID NO: 1128998 - DNA, 15 bp, Homo sapiens
aactactcccatccc

SEQ ID NO: 1128999 - DNA, 15 bp, Homo sapiens
caactactcccatcc

SEQ ID NO: 1129000 - DNA, 15 bp, Homo sapiens
tcaactactcccatc

SEQ ID NO: 1129001 - DNA, 15 bp, Homo sapiens
atcaactactcccat

SEQ ID NO: 1129002 - DNA, 15 bp, Homo sapiens
tatcaactactccca

SEQ ID NO: 1129003 - DNA, 15 bp, Homo sapiens
gtatcaactactccc

SEQ ID NO: 1129004 - DNA, 15 bp, Homo sapiens
agtatcaactactcc

SEQ ID NO: 1129005 - DNA, 15 bp, Homo sapiens
tagtatcaactactc

SEQ ID NO: 1129006 - DNA, 15 bp, Homo sapiens
gtagtatcaactact

SEQ ID NO: 1129007 - DNA, 15 bp, Homo sapiens
tgtagtatcaactac

SEQ ID NO: 1129008 - DNA, 15 bp, Homo sapiens
atgtagtatcaacta

SEQ ID NO: 1129009 - DNA, 15 bp, Homo sapiens
catgtagtatcaact

SEQ ID NO: 1129010 - DNA, 15 bp, Homo sapiens
ccatgtagtatcaac

SEQ ID NO: 1129011 - DNA, 15 bp, Homo sapiens
cccatgtagtatcaa

SEQ ID NO: 1129012 - DNA, 15 bp, Homo sapiens
acccatgtagtatca

SEQ ID NO: 1129013 - DNA, 15 bp, Homo sapiens
aacccatgtagtatc

SEQ ID NO: 1129014 - DNA, 15 bp, Homo sapiens
gaacccatgtagtat

SEQ ID NO: 1129015 - DNA, 15 bp, Homo sapiens
tgaacccatgtagta

SEQ ID NO: 1129016 - DNA, 15 bp, Homo sapiens
atgaacccatgtagt

SEQ ID NO: 1129017 - DNA, 15 bp, Homo sapiens
catgaacccatgtag

SEQ ID NO: 1129018 - DNA, 15 bp, Homo sapiens
gcatgaacccatgta

SEQ ID NO: 1129019 - DNA, 15 bp, Homo sapiens
tgcatgaacccatgt

SEQ ID NO: 1129020 - DNA, 15 bp, Homo sapiens
atgcatgaacccatg

SEQ ID NO: 1129021 - DNA, 15 bp, Homo sapiens
gatgcatgaacccat

SEQ ID NO: 1129022 - DNA, 15 bp, Homo sapiens
agatgcatgaaccca

SEQ ID NO: 1129023 - DNA, 15 bp, Homo sapiens
tagatgcatgaaccc

SEQ ID NO: 1129024 - DNA, 15 bp, Homo sapiens
ctagatgcatgaacc

SEQ ID NO: 1129025 - DNA, 15 bp, Homo sapiens
actagatgcatgaac

SEQ ID NO: 1129026 - DNA, 15 bp, Homo sapiens
gactagatgcatgaa

SEQ ID NO: 1129027 - DNA, 15 bp, Homo sapiens
agactagatgcatga

SEQ ID NO: 1129028 - DNA, 15 bp, Homo sapiens
cagactagatgcatg

SEQ ID NO: 1129029 - DNA, 15 bp, Homo sapiens
tcagactagatgcat

SEQ ID NO: 1129030 - DNA, 15 bp, Homo sapiens
atcagactagatgca

SEQ ID NO: 1129031 - DNA, 15 bp, Homo sapiens
aatcagactagatgc

SEQ ID NO: 1129032 - DNA, 15 bp, Homo sapiens
caatcagactagatg

SEQ ID NO: 1129033 - DNA, 15 bp, Homo sapiens
acaatcagactagat

SEQ ID NO: 1129034 - DNA, 15 bp, Homo sapiens
aacaatcagactaga

SEQ ID NO: 1129035 - DNA, 15 bp, Homo sapiens
aaacaatcagactag

SEQ ID NO: 1129036 - DNA, 15 bp, Homo sapiens
taaacaatcagacta

SEQ ID NO: 1129037 - DNA, 15 bp, Homo sapiens
ctaaacaatcagact

SEQ ID NO: 1129038 - DNA, 15 bp, Homo sapiens
tctaaacaatcagac

SEQ ID NO: 1129039 - DNA, 15 bp, Homo sapiens
ttctaaacaatcaga

SEQ ID NO: 1129040 - DNA, 15 bp, Homo sapiens
tttctaaacaatcag

SEQ ID NO: 1129041 - DNA, 15 bp, Homo sapiens
ttttctaaacaatca

SEQ ID NO: 1129042 - DNA, 15 bp, Homo sapiens
attttctaaacaatc

SEQ ID NO: 1129043 - DNA, 15 bp, Homo sapiens
tattttctaaacaat

SEQ ID NO: 1129044 - DNA, 15 bp, Homo sapiens
atattttctaaacaa

SEQ ID NO: 1129045 - DNA, 15 bp, Homo sapiens
aatattttctaaaca

SEQ ID NO: 1129046 - DNA, 15 bp, Homo sapiens
ctaatattttctaaa

SEQ ID NO: 1129047 - DNA, 15 bp, Homo sapiens
gctaatattttctaa

SEQ ID NO: 1129048 - DNA, 15 bp, Homo sapiens
agctaatattttcta

SEQ ID NO: 1129049 - DNA, 15 bp, Homo sapiens
cagctaatattttct

SEQ ID NO: 1129050 - DNA, 15 bp, Homo sapiens
tcagctaatattttc

SEQ ID NO: 1129051 - DNA, 15 bp, Homo sapiens
gtcagctaatatttt

SEQ ID NO: 1129052 - DNA, 15 bp, Homo sapiens
agtcagctaatattt

SEQ ID NO: 1129053 - DNA, 15 bp, Homo sapiens
tagtcagctaatatt

SEQ ID NO: 1129054 - DNA, 15 bp, Homo sapiens
gtagtcagctaatat

SEQ ID NO: 1129055 - DNA, 15 bp, Homo sapiens
tgtagtcagctaata

SEQ ID NO: 1129056 - DNA, 15 bp, Homo sapiens
ttgtagtcagctaat

SEQ ID NO: 1129057 - DNA, 15 bp, Homo sapiens
attgtagtcagctaa

SEQ ID NO: 1129058 - DNA, 15 bp, Homo sapiens
gattgtagtcagcta

SEQ ID NO: 1129059 - DNA, 15 bp, Homo sapiens
agattgtagtcagct

SEQ ID NO: 1129060 - DNA, 15 bp, Homo sapiens
aagattgtagtcagc

SEQ ID NO: 1129061 - DNA, 15 bp, Homo sapiens
gaagattgtagtcag

SEQ ID NO: 1129062 - DNA, 15 bp, Homo sapiens
ggaagattgtagtca

SEQ ID NO: 1129063 - DNA, 15 bp, Homo sapiens
aggaagattgtagtc

SEQ ID NO: 1129064 - DNA, 15 bp, Homo sapiens
gaggaagattgtagt

SEQ ID NO: 1129065 - DNA, 15 bp, Homo sapiens
tgaggaagattgtag

SEQ ID NO: 1129066 - DNA, 15 bp, Homo sapiens
gtgaggaagattgta

SEQ ID NO: 1129067 - DNA, 15 bp, Homo sapiens
tgtgaggaagattgt

SEQ ID NO: 1129068 - DNA, 15 bp, Homo sapiens
ctgtgaggaagattg

SEQ ID NO: 1129069 - DNA, 15 bp, Homo sapiens
actgtgaggaagatt

SEQ ID NO: 1129070 - DNA, 15 bp, Homo sapiens
aactgtgaggaagat

SEQ ID NO: 1129071 - DNA, 15 bp, Homo sapiens
caactgtgaggaaga

SEQ ID NO: 1129072 - DNA, 15 bp, Homo sapiens
tcaactgtgaggaag

SEQ ID NO: 1129073 - DNA, 15 bp, Homo sapiens
ttcaactgtgaggaa

SEQ ID NO: 1129074 - DNA, 15 bp, Homo sapiens
gttcaactgtgagga

SEQ ID NO: 1129075 - DNA, 15 bp, Homo sapiens
tgttcaactgtgagg

SEQ ID NO: 1129076 - DNA, 15 bp, Homo sapiens
ctgttcaactgtgag

SEQ ID NO: 1129077 - DNA, 15 bp, Homo sapiens
tctgttcaactgtga

SEQ ID NO: 1129078 - DNA, 15 bp, Homo sapiens
ttctgttcaactgtg

SEQ ID NO: 1129079 - DNA, 15 bp, Homo sapiens
cttctgttcaactgt

SEQ ID NO: 1129080 - DNA, 15 bp, Homo sapiens
tcttctgttcaactg

SEQ ID NO: 1129081 - DNA, 15 bp, Homo sapiens
ttcttctgttcaact

SEQ ID NO: 1129082 - DNA, 15 bp, Homo sapiens
tttcttctgttcaac

SEQ ID NO: 1129083 - DNA, 15 bp, Homo sapiens
ctttcttctgttcaa

SEQ ID NO: 1129084 - DNA, 15 bp, Homo sapiens
actttcttctgttca

SEQ ID NO: 1129085 - DNA, 15 bp, Homo sapiens
aactttcttctgttc

SEQ ID NO: 1129086 - DNA, 15 bp, Homo sapiens
caactttcttctgtt

SEQ ID NO: 1129087 - DNA, 15 bp, Homo sapiens
acaactttcttctgt

SEQ ID NO: 1129088 - DNA, 15 bp, Homo sapiens
tacaactttcttctg

SEQ ID NO: 1129089 - DNA, 15 bp, Homo sapiens
ttacaactttcttct

SEQ ID NO: 1129090 - DNA, 15 bp, Homo sapiens
attacaactttcttc

SEQ ID NO: 1129091 - DNA, 15 bp, Homo sapiens
aattacaactttctt

SEQ ID NO: 1129092 - DNA, 15 bp, Homo sapiens
aaattacaactttct

SEQ ID NO: 1129093 - DNA, 15 bp, Homo sapiens
caaattacaactttc

SEQ ID NO: 1129094 - DNA, 15 bp, Homo sapiens
acaaattacaacttt

SEQ ID NO: 1129095 - DNA, 15 bp, Homo sapiens
aacaaattacaactt

SEQ ID NO: 1129096 - DNA, 15 bp, Homo sapiens
aaacaaattacaact

SEQ ID NO: 1129097 - DNA, 15 bp, Homo sapiens
gaaacaaattacaac

SEQ ID NO: 1129098 - DNA, 15 bp, Homo sapiens
ggaaacaaattacaa

SEQ ID NO: 1129099 - DNA, 15 bp, Homo sapiens
tggaaacaaattaca

SEQ ID NO: 1129100 - DNA, 15 bp, Homo sapiens
ttggaaacaaattac

SEQ ID NO: 1129101 - DNA, 15 bp, Homo sapiens
tttggaaacaaatta

SEQ ID NO: 1129102 - DNA, 15 bp, Homo sapiens
ttttggaaacaaatt

SEQ ID NO: 1129103 - DNA, 15 bp, Homo sapiens
cttttggaaacaaat

SEQ ID NO: 1129104 - DNA, 15 bp, Homo sapiens
gcttttggaaacaaa

SEQ ID NO: 1129105 - DNA, 15 bp, Homo sapiens
agcttttggaaacaa

SEQ ID NO: 1129106 - DNA, 15 bp, Homo sapiens
tagcttttggaaaca

SEQ ID NO: 1129107 - DNA, 15 bp, Homo sapiens
gtagcttttggaaac

SEQ ID NO: 1129108 - DNA, 15 bp, Homo sapiens
tgtagcttttggaaa

SEQ ID NO: 1129109 - DNA, 15 bp, Homo sapiens
gtgtagcttttggaa

SEQ ID NO: 1129110 - DNA, 15 bp, Homo sapiens
tgtgtagcttttgga

SEQ ID NO: 1129111 - DNA, 15 bp, Homo sapiens
atgtgtagcttttgg

SEQ ID NO: 1129112 - DNA, 15 bp, Homo sapiens
catgtgtagcttttg

SEQ ID NO: 1129113 - DNA, 15 bp, Homo sapiens
acatgtgtagctttt

SEQ ID NO: 1129114 - DNA, 15 bp, Homo sapiens
tacatgtgtagcttt

SEQ ID NO: 1129115 - DNA, 15 bp, Homo sapiens
ttacatgtgtagctt

SEQ ID NO: 1129116 - DNA, 15 bp, Homo sapiens
tttacatgtgtagct

SEQ ID NO: 1129117 - DNA, 15 bp, Homo sapiens
ttttacatgtgtagc

SEQ ID NO: 1129118 - DNA, 15 bp, Homo sapiens
cttttacatgtgtag

SEQ ID NO: 1129119 - DNA, 15 bp, Homo sapiens
acttttacatgtgta

SEQ ID NO: 1129120 - DNA, 15 bp, Homo sapiens
aacttttacatgtgt

SEQ ID NO: 1129121 - DNA, 15 bp, Homo sapiens
aaacttttacatgtg

SEQ ID NO: 1129122 - DNA, 15 bp, Homo sapiens
taaacttttacatgt

SEQ ID NO: 1129123 - DNA, 15 bp, Homo sapiens
ttaaacttttacatg

SEQ ID NO: 1129124 - DNA, 15 bp, Homo sapiens
tttaaacttttacat

SEQ ID NO: 1129125 - DNA, 15 bp, Homo sapiens
atttaaacttttaca

SEQ ID NO: 1129126 - DNA, 15 bp, Homo sapiens
gatttaaacttttac

SEQ ID NO: 1129127 - DNA, 15 bp, Homo sapiens
agatttaaactttta

SEQ ID NO: 1129128 - DNA, 15 bp, Homo sapiens
aagatttaaactttt

SEQ ID NO: 1129129 - DNA, 15 bp, Homo sapiens
caagatttaaacttt

SEQ ID NO: 1129130 - DNA, 15 bp, Homo sapiens
acaagatttaaactt

SEQ ID NO: 1129131 - DNA, 15 bp, Homo sapiens
aacaagatttaaact

SEQ ID NO: 1129132 - DNA, 15 bp, Homo sapiens
taacaagatttaaac

SEQ ID NO: 1129133 - DNA, 15 bp, Homo sapiens
ttaacaagatttaaa

SEQ ID NO: 1129134 - DNA, 15 bp, Homo sapiens
cttaacaagatttaa

SEQ ID NO: 1129135 - DNA, 15 bp, Homo sapiens
tcttaacaagattta

SEQ ID NO: 1129136 - DNA, 15 bp, Homo sapiens
gtcttaacaagattt

SEQ ID NO: 1129137 - DNA, 15 bp, Homo sapiens
agtcttaacaagatt

SEQ ID NO: 1129138 - DNA, 15 bp, Homo sapiens
tagtcttaacaagat

SEQ ID NO: 1129139 - DNA, 15 bp, Homo sapiens
ctagtcttaacaaga

SEQ ID NO: 1129140 - DNA, 15 bp, Homo sapiens
gctagtcttaacaag

SEQ ID NO: 1129141 - DNA, 15 bp, Homo sapiens
agctagtcttaacaa

SEQ ID NO: 1129142 - DNA, 15 bp, Homo sapiens
aagctagtcttaaca

SEQ ID NO: 1129143 - DNA, 15 bp, Homo sapiens
taagctagtcttaac

SEQ ID NO: 1129144 - DNA, 15 bp, Homo sapiens
ataagctagtcttaa

SEQ ID NO: 1129145 - DNA, 15 bp, Homo sapiens
cataagctagtctta

SEQ ID NO: 1129146 - DNA, 15 bp, Homo sapiens
tcataagctagtctt

SEQ ID NO: 1129147 - DNA, 15 bp, Homo sapiens
atcataagctagtct

SEQ ID NO: 1129148 - DNA, 15 bp, Homo sapiens
tatcataagctagtc

SEQ ID NO: 1129149 - DNA, 15 bp, Homo sapiens
atatcataagctagt

SEQ ID NO: 1129150 - DNA, 15 bp, Homo sapiens
aatatcataagctag

SEQ ID NO: 1129151 - DNA, 15 bp, Homo sapiens
aaatatcataagcta

SEQ ID NO: 1129152 - DNA, 15 bp, Homo sapiens
aaaatatcataagct

SEQ ID NO: 1129153 - DNA, 15 bp, Homo sapiens
aaaaatatcataagc

SEQ ID NO: 1129154 - DNA, 15 bp, Homo sapiens
aaaaaatatcataag

SEQ ID NO: 1129155 - DNA, 15 bp, Homo sapiens
taaaaaatatcataa

SEQ ID NO: 1129156 - DNA, 15 bp, Homo sapiens
ttaaaaaatatcata

SEQ ID NO: 1129157 - DNA, 15 bp, Homo sapiens
cttaaaaaatatcat

SEQ ID NO: 1129158 - DNA, 15 bp, Homo sapiens
acttaaaaaatatca

SEQ ID NO: 1129159 - DNA, 15 bp, Homo sapiens
aacttaaaaaatatc

SEQ ID NO: 1129160 - DNA, 15 bp, Homo sapiens
taacttaaaaaatat

SEQ ID NO: 1129161 - DNA, 15 bp, Homo sapiens
gtaacttaaaaaata

SEQ ID NO: 1129162 - DNA, 15 bp, Homo sapiens
ggtaacttaaaaaat

SEQ ID NO: 1129163 - DNA, 15 bp, Homo sapiens
aggtaacttaaaaaa

SEQ ID NO: 1129164 - DNA, 15 bp, Homo sapiens
taggtaacttaaaaa

SEQ ID NO: 1129165 - DNA, 15 bp, Homo sapiens
ttaggtaacttaaaa

SEQ ID NO: 1129166 - DNA, 15 bp, Homo sapiens
tttaggtaacttaaa

SEQ ID NO: 1129167 - DNA, 15 bp, Homo sapiens
ttttaggtaacttaa

SEQ ID NO: 1129168 - DNA, 15 bp, Homo sapiens
tttttaggtaactta

SEQ ID NO: 1129169 - DNA, 15 bp, Homo sapiens
ttttttaggtaactt

SEQ ID NO: 1129170 - DNA, 15 bp, Homo sapiens
attttttaggtaact

SEQ ID NO: 1129171 - DNA, 15 bp, Homo sapiens
aattttttaggtaac

SEQ ID NO: 1129172 - DNA, 15 bp, Homo sapiens
caattttttaggtaa

SEQ ID NO: 1129173 - DNA, 15 bp, Homo sapiens
acaattttttaggta

SEQ ID NO: 1129174 - DNA, 15 bp, Homo sapiens
aacaattttttaggt

SEQ ID NO: 1129175 - DNA, 15 bp, Homo sapiens
aaacaattttttagg

SEQ ID NO: 1129176 - DNA, 15 bp, Homo sapiens
aaaacaattttttag

SEQ ID NO: 1129177 - DNA, 15 bp, Homo sapiens
aaaaacaatttttta

SEQ ID NO: 1129178 - DNA, 15 bp, Homo sapiens
taaaaacaatttttt

SEQ ID NO: 1129179 - DNA, 15 bp, Homo sapiens
ctaaaaacaattttt

SEQ ID NO: 1129180 - DNA, 15 bp, Homo sapiens
gctaaaaacaatttt

SEQ ID NO: 1129181 - DNA, 15 bp, Homo sapiens
agctaaaaacaattt

SEQ ID NO: 1129182 - DNA, 15 bp, Homo sapiens
cagctaaaaacaatt

SEQ ID NO: 1129183 - DNA, 15 bp, Homo sapiens
acagctaaaaacaat

SEQ ID NO: 1129184 - DNA, 15 bp, Homo sapiens
aacagctaaaaacaa

SEQ ID NO: 1129185 - DNA, 15 bp, Homo sapiens
caacagctaaaaaca

SEQ ID NO: 1129186 - DNA, 15 bp, Homo sapiens
tcaacagctaaaaac

SEQ ID NO: 1129187 - DNA, 15 bp, Homo sapiens
atcaacagctaaaaa

SEQ ID NO: 1129188 - DNA, 15 bp, Homo sapiens
aatcaacagctaaaa

SEQ ID NO: 1129189 - DNA, 15 bp, Homo sapiens
taatcaacagctaaa

SEQ ID NO: 1129190 - DNA, 15 bp, Homo sapiens
ttaatcaacagctaa

SEQ ID NO: 1129191 - DNA, 15 bp, Homo sapiens
attaatcaacagcta

SEQ ID NO: 1129192 - DNA, 15 bp, Homo sapiens
cattaatcaacagct

SEQ ID NO: 1129193 - DNA, 15 bp, Homo sapiens
ccattaatcaacagc

SEQ ID NO: 1129194 - DNA, 15 bp, Homo sapiens
gccattaatcaacag

SEQ ID NO: 1129195 - DNA, 15 bp, Homo sapiens
tgccattaatcaaca

SEQ ID NO: 1129196 - DNA, 15 bp, Homo sapiens
ctgccattaatcaac

SEQ ID NO: 1129197 - DNA, 15 bp, Homo sapiens
gctgccattaatcaa

SEQ ID NO: 1129198 - DNA, 15 bp, Homo sapiens
tgctgccattaatca

SEQ ID NO: 1129199 - DNA, 15 bp, Homo sapiens
ttgctgccattaatc

SEQ ID NO: 1129200 - DNA, 15 bp, Homo sapiens
gttgctgccattaat

SEQ ID NO: 1129201 - DNA, 15 bp, Homo sapiens
tgttgctgccattaa

SEQ ID NO: 1129202 - DNA, 15 bp, Homo sapiens
ctgttgctgccatta

SEQ ID NO: 1129203 - DNA, 15 bp, Homo sapiens
cctgttgctgccatt

SEQ ID NO: 1129204 - DNA, 15 bp, Homo sapiens
ccctgttgctgccat

SEQ ID NO: 1129205 - DNA, 15 bp, Homo sapiens
gccctgttgctgcca

SEQ ID NO: 1129206 - DNA, 15 bp, Homo sapiens
ggccctgttgctgcc

SEQ ID NO: 1129207 - DNA, 15 bp, Homo sapiens
tggccctgttgctgc

SEQ ID NO: 1129208 - DNA, 15 bp, Homo sapiens
ctggccctgttgctg

SEQ ID NO: 1129209 - DNA, 15 bp, Homo sapiens
actggccctgttgct

SEQ ID NO: 1129210 - DNA, 15 bp, Homo sapiens
cactggccctgttgc

SEQ ID NO: 1129211 - DNA, 15 bp, Homo sapiens
acactggccctgttg

SEQ ID NO: 1129212 - DNA, 15 bp, Homo sapiens
cacactggccctgtt

SEQ ID NO: 1129213 - DNA, 15 bp, Homo sapiens
acacactggccctgt

SEQ ID NO: 1129214 - DNA, 15 bp, Homo sapiens
cacacactggccctg

SEQ ID NO: 1129215 - DNA, 15 bp, Homo sapiens
acacacactggccct

SEQ ID NO: 1129216 - DNA, 15 bp, Homo sapiens
aacacacactggccc

SEQ ID NO: 1129217 - DNA, 15 bp, Homo sapiens
caacacacactggcc

SEQ ID NO: 1129218 - DNA, 15 bp, Homo sapiens
ccaacacacactggc

SEQ ID NO: 1129219 - DNA, 15 bp, Homo sapiens
cccaacacacactgg

SEQ ID NO: 1129220 - DNA, 15 bp, Homo sapiens
ccccaacacacactg

SEQ ID NO: 1129221 - DNA, 15 bp, Homo sapiens
accccaacacacact

SEQ ID NO: 1129222 - DNA, 15 bp, Homo sapiens
aaccccaacacacac

SEQ ID NO: 1129223 - DNA, 15 bp, Homo sapiens
aaaccccaacacaca

SEQ ID NO: 1129224 - DNA, 15 bp, Homo sapiens
taaaccccaacacac

SEQ ID NO: 1129225 - DNA, 15 bp, Homo sapiens
ataaaccccaacaca

SEQ ID NO: 1129226 - DNA, 15 bp, Homo sapiens
cataaaccccaacac

SEQ ID NO: 1129227 - DNA, 15 bp, Homo sapiens
ccataaaccccaaca

SEQ ID NO: 1129228 - DNA, 15 bp, Homo sapiens
gccataaaccccaac

SEQ ID NO: 1129229 - DNA, 15 bp, Homo sapiens
agccataaaccccaa

SEQ ID NO: 1129230 - DNA, 15 bp, Homo sapiens
cagccataaacccca

SEQ ID NO: 1129231 - DNA, 15 bp, Homo sapiens
gcagccataaacccc

SEQ ID NO: 1129232 - DNA, 15 bp, Homo sapiens
tgcagccataaaccc

SEQ ID NO: 1129233 - DNA, 15 bp, Homo sapiens
gctggaaaattttct

SEQ ID NO: 1129234 - DNA, 15 bp, Homo sapiens
ggctggaaaattttc

SEQ ID NO: 1129235 - DNA, 15 bp, Homo sapiens
cggctggaaaatttt

SEQ ID NO: 1129236 - DNA, 15 bp, Homo sapiens
acggctggaaaattt

SEQ ID NO: 1129237 - DNA, 15 bp, Homo sapiens
tacggctggaaaatt

SEQ ID NO: 1129238 - DNA, 15 bp, Homo sapiens
atacggctggaaaat

SEQ ID NO: 1129239 - DNA, 15 bp, Homo sapiens
aatacggctggaaaa

SEQ ID NO: 1129240 - DNA, 15 bp, Homo sapiens
taatacggctggaaa

SEQ ID NO: 1129241 - DNA, 15 bp, Homo sapiens
gtaatacggctggaa

SEQ ID NO: 1129242 - DNA, 15 bp, Homo sapiens
ggtaatacggctgga

SEQ ID NO: 1129243 - DNA, 15 bp, Homo sapiens
gggtaatacggctgg

SEQ ID NO: 1129244 - DNA, 15 bp, Homo sapiens
agggtaatacggctg

SEQ ID NO: 1129245 - DNA, 15 bp, Homo sapiens
aagggtaatacggct

SEQ ID NO: 1129246 - DNA, 15 bp, Homo sapiens
gaagggtaatacggc

SEQ ID NO: 1129247 - DNA, 15 bp, Homo sapiens
agaagggtaatacgg

SEQ ID NO: 1129248 - DNA, 15 bp, Homo sapiens
tagaagggtaatacg

SEQ ID NO: 1129249 - DNA, 15 bp, Homo sapiens
atagaagggtaatac

SEQ ID NO: 1129250 - DNA, 15 bp, Homo sapiens
catagaagggtaata

SEQ ID NO: 1129251 - DNA, 15 bp, Homo sapiens
tcatagaagggtaat

SEQ ID NO: 1129252 - DNA, 15 bp, Homo sapiens
ttcatagaagggtaa

SEQ ID NO: 1129253 - DNA, 15 bp, Homo sapiens
cttcatagaagggta

SEQ ID NO: 1129254 - DNA, 15 bp, Homo sapiens
gcttcatagaagggt

SEQ ID NO: 1129255 - DNA, 15 bp, Homo sapiens
ggcttcatagaaggg

SEQ ID NO: 1129256 - DNA, 15 bp, Homo sapiens
gggcttcatagaagg

SEQ ID NO: 1129257 - DNA, 15 bp, Homo sapiens
tgggcttcatagaag

SEQ ID NO: 1129258 - DNA, 15 bp, Homo sapiens
gtgggcttcatagaa

SEQ ID NO: 1129259 - DNA, 15 bp, Homo sapiens
ggtgggcttcataga

SEQ ID NO: 1129260 - DNA, 15 bp, Homo sapiens
aggtgggcttcatag

SEQ ID NO: 1129261 - DNA, 15 bp, Homo sapiens
caggtgggcttcata

SEQ ID NO: 1129262 - DNA, 15 bp, Homo sapiens
acaggtgggcttcat

SEQ ID NO: 1129263 - DNA, 15 bp, Homo sapiens
gacaggtgggcttca

SEQ ID NO: 1129264 - DNA, 15 bp, Homo sapiens
tgacaggtgggcttc

SEQ ID NO: 1129265 - DNA, 15 bp, Homo sapiens
ttgacaggtgggctt

SEQ ID NO: 1129266 - DNA, 15 bp, Homo sapiens
gttgacaggtgggct

SEQ ID NO: 1129267 - DNA, 15 bp, Homo sapiens
ggttgacaggtgggc

SEQ ID NO: 1129268 - DNA, 15 bp, Homo sapiens
tggttgacaggtggg

SEQ ID NO: 1129269 - DNA, 15 bp, Homo sapiens
ttggttgacaggtgg

SEQ ID NO: 1129270 - DNA, 15 bp, Homo sapiens
gttggttgacaggtg

SEQ ID NO: 1129271 - DNA, 15 bp, Homo sapiens
tgttggttgacaggt

SEQ ID NO: 1129272 - DNA, 15 bp, Homo sapiens
ttgttggttgacagg

SEQ ID NO: 1129273 - DNA, 15 bp, Homo sapiens
cttgttggttgacag

SEQ ID NO: 1129274 - DNA, 15 bp, Homo sapiens
gcttgttggttgaca

SEQ ID NO: 1129275 - DNA, 15 bp, Homo sapiens
tgcttgttggttgac

SEQ ID NO: 1129276 - DNA, 15 bp, Homo sapiens
gtgcttgttggttga

SEQ ID NO: 1129277 - DNA, 15 bp, Homo sapiens
ggtgcttgttggttg

SEQ ID NO: 1129278 - DNA, 15 bp, Homo sapiens
gggtgcttgttggtt

SEQ ID NO: 1129279 - DNA, 15 bp, Homo sapiens
tgggtgcttgttggt

SEQ ID NO: 1129280 - DNA, 15 bp, Homo sapiens
gtgggtgcttgttgg

SEQ ID NO: 1129281 - DNA, 15 bp, Homo sapiens
agtgggtgcttgttg

SEQ ID NO: 1129282 - DNA, 15 bp, Homo sapiens
gagtgggtgcttgtt

SEQ ID NO: 1129283 - DNA, 15 bp, Homo sapiens
cgagtgggtgcttgt

SEQ ID NO: 1129284 - DNA, 15 bp, Homo sapiens
tcgagtgggtgcttg

SEQ ID NO: 1129285 - DNA, 15 bp, Homo sapiens
atcgagtgggtgctt

SEQ ID NO: 1129286 - DNA, 15 bp, Homo sapiens
gatcgagtgggtgct

SEQ ID NO: 1129287 - DNA, 15 bp, Homo sapiens
tgatcgagtgggtgc

SEQ ID NO: 1129288 - DNA, 15 bp, Homo sapiens
ctgatcgagtgggtg

SEQ ID NO: 1129289 - DNA, 15 bp, Homo sapiens
tctgatcgagtgggt

SEQ ID NO: 1129290 - DNA, 15 bp, Homo sapiens
ctctgatcgagtggg

SEQ ID NO: 1129291 - DNA, 15 bp, Homo sapiens
gctctgatcgagtgg

SEQ ID NO: 1129292 - DNA, 15 bp, Homo sapiens
agctctgatcgagtg

SEQ ID NO: 1129293 - DNA, 15 bp, Homo sapiens
aagctctgatcgagt

SEQ ID NO: 1129294 - DNA, 15 bp, Homo sapiens
gaagctctgatcgag

SEQ ID NO: 1129295 - DNA, 15 bp, Homo sapiens
ggaagctctgatcga

SEQ ID NO: 1129296 - DNA, 15 bp, Homo sapiens
gggaagctctgatcg

SEQ ID NO: 1129297 - DNA, 15 bp, Homo sapiens
ggggaagctctgatc

SEQ ID NO: 1129298 - DNA, 15 bp, Homo sapiens
tggggaagctctgat

SEQ ID NO: 1129299 - DNA, 15 bp, Homo sapiens
ctggggaagctctga

SEQ ID NO: 1129300 - DNA, 15 bp, Homo sapiens
cctggggaagctctg

SEQ ID NO: 1129301 - DNA, 15 bp, Homo sapiens
gcctggggaagctct

SEQ ID NO: 1129302 - DNA, 15 bp, Homo sapiens
agcctggggaagctc

SEQ ID NO: 1129303 - DNA, 15 bp, Homo sapiens
aagcctggggaagct

SEQ ID NO: 1129304 - DNA, 15 bp, Homo sapiens
aaagcctggggaagc

SEQ ID NO: 1129305 - DNA, 15 bp, Homo sapiens
aaaagcctggggaag

SEQ ID NO: 1129306 - DNA, 15 bp, Homo sapiens
aaaaagcctggggaa

SEQ ID NO: 1129307 - DNA, 15 bp, Homo sapiens
caaaaagcctgggga

SEQ ID NO: 1129308 - DNA, 15 bp, Homo sapiens
ccaaaaagcctgggg

SEQ ID NO: 1129309 - DNA, 15 bp, Homo sapiens
accaaaaagcctggg

SEQ ID NO: 1129310 - DNA, 15 bp, Homo sapiens
caccaaaaagcctgg

SEQ ID NO: 1129311 - DNA, 15 bp, Homo sapiens
acaccaaaaagcctg

SEQ ID NO: 1129312 - DNA, 15 bp, Homo sapiens
gacaccaaaaagcct

SEQ ID NO: 1129313 - DNA, 15 bp, Homo sapiens
agacaccaaaaagcc

SEQ ID NO: 1129314 - DNA, 15 bp, Homo sapiens
gagacaccaaaaagc

SEQ ID NO: 1129315 - DNA, 15 bp, Homo sapiens
ggagacaccaaaaag

SEQ ID NO: 1129316 - DNA, 15 bp, Homo sapiens
aggagacaccaaaaa

SEQ ID NO: 1129317 - DNA, 15 bp, Homo sapiens
gaggagacaccaaaa

SEQ ID NO: 1129318 - DNA, 15 bp, Homo sapiens
ggaggagacaccaaa

SEQ ID NO: 1129319 - DNA, 15 bp, Homo sapiens
aggaggagacaccaa

SEQ ID NO: 1129320 - DNA, 15 bp, Homo sapiens
aaggaggagacacca

SEQ ID NO: 1129321 - DNA, 15 bp, Homo sapiens
caaggaggagacacc

SEQ ID NO: 1129322 - DNA, 15 bp, Homo sapiens
gcaaggaggagacac

SEQ ID NO: 1129323 - DNA, 15 bp, Homo sapiens
tgcaaggaggagaca

SEQ ID NO: 1129324 - DNA, 15 bp, Homo sapiens
atgcaaggaggagac

SEQ ID NO: 1129325 - DNA, 15 bp, Homo sapiens
catgcaaggaggaga

SEQ ID NO: 1129326 - DNA, 15 bp, Homo sapiens
ccatgcaaggaggag

SEQ ID NO: 1129327 - DNA, 15 bp, Homo sapiens
cccatgcaaggagga

SEQ ID NO: 1129328 - DNA, 15 bp, Homo sapiens
tcccatgcaaggagg

SEQ ID NO: 1129329 - DNA, 15 bp, Homo sapiens
ttcccatgcaaggag

SEQ ID NO: 1129330 - DNA, 15 bp, Homo sapiens
attcccatgcaagga

SEQ ID NO: 1129331 - DNA, 15 bp, Homo sapiens
aattcccatgcaagg

SEQ ID NO: 1129332 - DNA, 15 bp, Homo sapiens
caattcccatgcaag

SEQ ID NO: 1129333 - DNA, 15 bp, Homo sapiens
tcaattcccatgcaa

SEQ ID NO: 1129334 - DNA, 15 bp, Homo sapiens
gtcaattcccatgca

SEQ ID NO: 1129335 - DNA, 15 bp, Homo sapiens
agtcaattcccatgc

SEQ ID NO: 1129336 - DNA, 15 bp, Homo sapiens
aagtcaattcccatg

SEQ ID NO: 1129337 - DNA, 15 bp, Homo sapiens
gaagtcaattcccat

SEQ ID NO: 1129338 - DNA, 15 bp, Homo sapiens
ggaagtcaattccca

SEQ ID NO: 1129339 - DNA, 15 bp, Homo sapiens
tggaagtcaattccc

SEQ ID NO: 1129340 - DNA, 15 bp, Homo sapiens
ttggaagtcaattcc

SEQ ID NO: 1129341 - DNA, 15 bp, Homo sapiens
cttggaagtcaattc

SEQ ID NO: 1129342 - DNA, 15 bp, Homo sapiens
ccttggaagtcaatt

SEQ ID NO: 1129343 - DNA, 15 bp, Homo sapiens
tccttggaagtcaat

SEQ ID NO: 1129344 - DNA, 15 bp, Homo sapiens
gtccttggaagtcaa

SEQ ID NO: 1129345 - DNA, 15 bp, Homo sapiens
ggtccttggaagtca

SEQ ID NO: 1129346 - DNA, 15 bp, Homo sapiens
tggtccttggaagtc

SEQ ID NO: 1129347 - DNA, 15 bp, Homo sapiens
gtggtccttggaagt

SEQ ID NO: 1129348 - DNA, 15 bp, Homo sapiens
ggtggtccttggaag

SEQ ID NO: 1129349 - DNA, 15 bp, Homo sapiens
tggtggtccttggaa

SEQ ID NO: 1129350 - DNA, 15 bp, Homo sapiens
ctggtggtccttgga

SEQ ID NO: 1129351 - DNA, 15 bp, Homo sapiens
tctggtggtccttgg

SEQ ID NO: 1129352 - DNA, 15 bp, Homo sapiens
gtctggtggtccttg

SEQ ID NO: 1129353 - DNA, 15 bp, Homo sapiens
tgtctggtggtcctt

SEQ ID NO: 1129354 - DNA, 15 bp, Homo sapiens
gtgtctggtggtcct

SEQ ID NO: 1129355 - DNA, 15 bp, Homo sapiens
agtgtctggtggtcc

SEQ ID NO: 1129356 - DNA, 15 bp, Homo sapiens
cagtgtctggtggtc

SEQ ID NO: 1129357 - DNA, 15 bp, Homo sapiens
tcagtgtctggtggt

SEQ ID NO: 1129358 - DNA, 15 bp, Homo sapiens
ctcagtgtctggtgg

SEQ ID NO: 1129359 - DNA, 15 bp, Homo sapiens
cctcagtgtctggtg

SEQ ID NO: 1129360 - DNA, 15 bp, Homo sapiens
tcctcagtgtctggt

SEQ ID NO: 1129361 - DNA, 15 bp, Homo sapiens
ttcctcagtgtctgg

SEQ ID NO: 1129362 - DNA, 15 bp, Homo sapiens
cttcctcagtgtctg

SEQ ID NO: 1129363 - DNA, 15 bp, Homo sapiens
acttcctcagtgtct

SEQ ID NO: 1129364 - DNA, 15 bp, Homo sapiens
tacttcctcagtgtc

SEQ ID NO: 1129365 - DNA, 15 bp, Homo sapiens
atacttcctcagtgt

SEQ ID NO: 1129366 - DNA, 15 bp, Homo sapiens
aatacttcctcagtg

SEQ ID NO: 1129367 - DNA, 15 bp, Homo sapiens
aaatacttcctcagt

SEQ ID NO: 1129368 - DNA, 15 bp, Homo sapiens
aaaatacttcctcag

SEQ ID NO: 1129369 - DNA, 15 bp, Homo sapiens
taaaatacttcctca

SEQ ID NO: 1129370 - DNA, 15 bp, Homo sapiens
ttaaaatacttcctc

SEQ ID NO: 1129371 - DNA, 15 bp, Homo sapiens
gttaaaatacttcct

SEQ ID NO: 1129372 - DNA, 15 bp, Homo sapiens
tgttaaaatacttcc

SEQ ID NO: 1129373 - DNA, 15 bp, Homo sapiens
atgttaaaatacttc

SEQ ID NO: 1129374 - DNA, 15 bp, Homo sapiens
tatgttaaaatactt

SEQ ID NO: 1129375 - DNA, 15 bp, Homo sapiens
atatgttaaaatact

SEQ ID NO: 1129376 - DNA, 15 bp, Homo sapiens
tatatgttaaaatac

SEQ ID NO: 1129377 - DNA, 15 bp, Homo sapiens
ttatatgttaaaata

SEQ ID NO: 1129378 - DNA, 15 bp, Homo sapiens
tttatatgttaaaat

SEQ ID NO: 1129379 - DNA, 15 bp, Homo sapiens
ctttatatgttaaaa

SEQ ID NO: 1129380 - DNA, 15 bp, Homo sapiens
gctttatatgttaaa

SEQ ID NO: 1129381 - DNA, 15 bp, Homo sapiens
tgctttatatgttaa

SEQ ID NO: 1129382 - DNA, 15 bp, Homo sapiens
ttgctttatatgtta

SEQ ID NO: 1129383 - DNA, 15 bp, Homo sapiens
tttgctttatatgtt

SEQ ID NO: 1129384 - DNA, 15 bp, Homo sapiens
ttttgctttatatgt

SEQ ID NO: 1129385 - DNA, 15 bp, Homo sapiens
cttttgctttatatg

SEQ ID NO: 1129386 - DNA, 15 bp, Homo sapiens
gcttttgctttatat

SEQ ID NO: 1129387 - DNA, 15 bp, Homo sapiens
tgcttttgctttata

SEQ ID NO: 1129388 - DNA, 15 bp, Homo sapiens
ttgcttttgctttat

SEQ ID NO: 1129389 - DNA, 15 bp, Homo sapiens
gttgcttttgcttta

SEQ ID NO: 1129390 - DNA, 15 bp, Homo sapiens
tgttgcttttgcttt

SEQ ID NO: 1129391 - DNA, 15 bp, Homo sapiens
ttgttgcttttgctt

SEQ ID NO: 1129392 - DNA, 15 bp, Homo sapiens
attgttgcttttgct

SEQ ID NO: 1129393 - DNA, 15 bp, Homo sapiens
tattgttgcttttgc

SEQ ID NO: 1129394 - DNA, 15 bp, Homo sapiens
ctattgttgcttttg

SEQ ID NO: 1129395 - DNA, 15 bp, Homo sapiens
cctattgttgctttt

SEQ ID NO: 1129396 - DNA, 15 bp, Homo sapiens
ccctattgttgcttt

SEQ ID NO: 1129397 - DNA, 15 bp, Homo sapiens
gccctattgttgctt

SEQ ID NO: 1129398 - DNA, 15 bp, Homo sapiens
tgccctattgttgct

SEQ ID NO: 1129399 - DNA, 15 bp, Homo sapiens
ctgccctattgttgc

SEQ ID NO: 1129400 - DNA, 15 bp, Homo sapiens
gctgccctattgttg

SEQ ID NO: 1129401 - DNA, 15 bp, Homo sapiens
agctgccctattgtt

SEQ ID NO: 1129402 - DNA, 15 bp, Homo sapiens
cagctgccctattgt

SEQ ID NO: 1129403 - DNA, 15 bp, Homo sapiens
ccagctgccctattg

SEQ ID NO: 1129404 - DNA, 15 bp, Homo sapiens
tccagctgccctatt

SEQ ID NO: 1129405 - DNA, 15 bp, Homo sapiens
ctccagctgccctat

SEQ ID NO: 1129406 - DNA, 15 bp, Homo sapiens
tctccagctgcccta

SEQ ID NO: 1129407 - DNA, 15 bp, Homo sapiens
ttctccagctgccct

SEQ ID NO: 1129408 - DNA, 15 bp, Homo sapiens
tttctccagctgccc

SEQ ID NO: 1129409 - DNA, 15 bp, Homo sapiens
ctttctccagctgcc

SEQ ID NO: 1129410 - DNA, 15 bp, Homo sapiens
cctttctccagctgc

SEQ ID NO: 1129411 - DNA, 15 bp, Homo sapiens
tcctttctccagctg

SEQ ID NO: 1129412 - DNA, 15 bp, Homo sapiens
ttcctttctccagct

SEQ ID NO: 1129413 - DNA, 15 bp, Homo sapiens
tttcctttctccagc

SEQ ID NO: 1129414 - DNA, 15 bp, Homo sapiens
atttcctttctccag

SEQ ID NO: 1129415 - DNA, 15 bp, Homo sapiens
aatttcctttctcca

SEQ ID NO: 1129416 - DNA, 15 bp, Homo sapiens
taatttcctttctcc

SEQ ID NO: 1129417 - DNA, 15 bp, Homo sapiens
ctaatttcctttctc

SEQ ID NO: 1129418 - DNA, 15 bp, Homo sapiens
tctaatttcctttct

SEQ ID NO: 1129419 - DNA, 15 bp, Homo sapiens
ttctaatttcctttc

SEQ ID NO: 1129420 - DNA, 15 bp, Homo sapiens
cttctaatttccttt

SEQ ID NO: 1129421 - DNA, 15 bp, Homo sapiens
acttctaatttcctt

SEQ ID NO: 1129422 - DNA, 15 bp, Homo sapiens
tacttctaatttcct

SEQ ID NO: 1129423 - DNA, 15 bp, Homo sapiens
ttacttctaatttcc

SEQ ID NO: 1129424 - DNA, 15 bp, Homo sapiens
gttacttctaatttc

SEQ ID NO: 1129425 - DNA, 15 bp, Homo sapiens
tgttacttctaattt

SEQ ID NO: 1129426 - DNA, 15 bp, Homo sapiens
ctgttacttctaatt

SEQ ID NO: 1129427 - DNA, 15 bp, Homo sapiens
tctgttacttctaat

SEQ ID NO: 1129428 - DNA, 15 bp, Homo sapiens
ctctgttacttctaa

SEQ ID NO: 1129429 - DNA, 15 bp, Homo sapiens
gctctgttacttcta

SEQ ID NO: 1129430 - DNA, 15 bp, Homo sapiens
ggctctgttacttct

SEQ ID NO: 1129431 - DNA, 15 bp, Homo sapiens
tggctctgttacttc

SEQ ID NO: 1129432 - DNA, 15 bp, Homo sapiens
ttggctctgttactt

SEQ ID NO: 1129433 - DNA, 15 bp, Homo sapiens
attggctctgttact

SEQ ID NO: 1129434 - DNA, 15 bp, Homo sapiens
cattggctctgttac

SEQ ID NO: 1129435 - DNA, 15 bp, Homo sapiens
gcattggctctgtta

SEQ ID NO: 1129436 - DNA, 15 bp, Homo sapiens
tgcattggctctgtt

SEQ ID NO: 1129437 - DNA, 15 bp, Homo sapiens
ctgcattggctctgt

SEQ ID NO: 1129438 - DNA, 15 bp, Homo sapiens
actgcattggctctg

SEQ ID NO: 1129439 - DNA, 15 bp, Homo sapiens
cactgcattggctct

SEQ ID NO: 1129440 - DNA, 15 bp, Homo sapiens
tcactgcattggctc

SEQ ID NO: 1129441 - DNA, 15 bp, Homo sapiens
atcactgcattggct

SEQ ID NO: 1129442 - DNA, 15 bp, Homo sapiens
aatcactgcattggc

SEQ ID NO: 1129443 - DNA, 15 bp, Homo sapiens
taatcactgcattgg

SEQ ID NO: 1129444 - DNA, 15 bp, Homo sapiens
ctaatcactgcattg

SEQ ID NO: 1129445 - DNA, 15 bp, Homo sapiens
tctaatcactgcatt

SEQ ID NO: 1129446 - DNA, 15 bp, Homo sapiens
ttctaatcactgcat

SEQ ID NO: 1129447 - DNA, 15 bp, Homo sapiens
tttctaatcactgca

SEQ ID NO: 1129448 - DNA, 15 bp, Homo sapiens
ttttctaatcactgc

SEQ ID NO: 1129449 - DNA, 15 bp, Homo sapiens
tttttctaatcactg

SEQ ID NO: 1129450 - DNA, 15 bp, Homo sapiens
gtttttctaatcact

SEQ ID NO: 1129451 - DNA, 15 bp, Homo sapiens
tgtttttctaatcac

SEQ ID NO: 1129452 - DNA, 15 bp, Homo sapiens
gtgtttttctaatca

SEQ ID NO: 1129453 - DNA, 15 bp, Homo sapiens
agtgtttttctaatc

SEQ ID NO: 1129454 - DNA, 15 bp, Homo sapiens
gagtgtttttctaat

SEQ ID NO: 1129455 - DNA, 15 bp, Homo sapiens
tgagtgtttttctaa

SEQ ID NO: 1129456 - DNA, 15 bp, Homo sapiens
ttgagtgtttttcta

SEQ ID NO: 1129457 - DNA, 15 bp, Homo sapiens
tttgagtgtttttct

SEQ ID NO: 1129458 - DNA, 15 bp, Homo sapiens
ttttgagtgtttttc

SEQ ID NO: 1129459 - DNA, 15 bp, Homo sapiens
tttttgagtgttttt

SEQ ID NO: 1129460 - DNA, 15 bp, Homo sapiens
ttttttgagtgtttt

SEQ ID NO: 1129461 - DNA, 15 bp, Homo sapiens
attttttgagtgttt

SEQ ID NO: 1129462 - DNA, 15 bp, Homo sapiens
cattttttgagtgtt

SEQ ID NO: 1129463 - DNA, 15 bp, Homo sapiens
ccattttttgagtgt

SEQ ID NO: 1129464 - DNA, 15 bp, Homo sapiens
accattttttgagtg

SEQ ID NO: 1129465 - DNA, 15 bp, Homo sapiens
taccattttttgagt

SEQ ID NO: 1129466 - DNA, 15 bp, Homo sapiens
ttaccattttttgag

SEQ ID NO: 1129467 - DNA, 15 bp, Homo sapiens
attaccattttttga

SEQ ID NO: 1129468 - DNA, 15 bp, Homo sapiens
tattaccattttttg

SEQ ID NO: 1129469 - DNA, 15 bp, Homo sapiens
ttattaccatttttt

SEQ ID NO: 1129470 - DNA, 15 bp, Homo sapiens
tttattaccattttt

SEQ ID NO: 1129471 - DNA, 15 bp, Homo sapiens
atttattaccatttt

SEQ ID NO: 1129472 - DNA, 15 bp, Homo sapiens
catttattaccattt

SEQ ID NO: 1129473 - DNA, 15 bp, Homo sapiens
acatttattaccatt

SEQ ID NO: 1129474 - DNA, 15 bp, Homo sapiens
cacatttattaccat

SEQ ID NO: 1129475 - DNA, 15 bp, Homo sapiens
acacatttattacca

SEQ ID NO: 1129476 - DNA, 15 bp, Homo sapiens
aacacatttattacc

SEQ ID NO: 1129477 - DNA, 15 bp, Homo sapiens
gaacacatttattac

SEQ ID NO: 1129478 - DNA, 15 bp, Homo sapiens
tgaacacatttatta

SEQ ID NO: 1129479 - DNA, 15 bp, Homo sapiens
ttgaacacatttatt

SEQ ID NO: 1129480 - DNA, 15 bp, Homo sapiens
attgaacacatttat

SEQ ID NO: 1129481 - DNA, 15 bp, Homo sapiens
cattgaacacattta

SEQ ID NO: 1129482 - DNA, 15 bp, Homo sapiens
ccattgaacacattt

SEQ ID NO: 1129483 - DNA, 15 bp, Homo sapiens
cccattgaacacatt

SEQ ID NO: 1129484 - DNA, 15 bp, Homo sapiens
acccattgaacacat

SEQ ID NO: 1129485 - DNA, 15 bp, Homo sapiens
gacccattgaacaca

SEQ ID NO: 1129486 - DNA, 15 bp, Homo sapiens
tgacccattgaacac

SEQ ID NO: 1129487 - DNA, 15 bp, Homo sapiens
ttgacccattgaaca

SEQ ID NO: 1129488 - DNA, 15 bp, Homo sapiens
cttgacccattgaac

SEQ ID NO: 1129489 - DNA, 15 bp, Homo sapiens
tcttgacccattgaa

SEQ ID NO: 1129490 - DNA, 15 bp, Homo sapiens
ctcttgacccattga

SEQ ID NO: 1129491 - DNA, 15 bp, Homo sapiens
tctcttgacccattg

SEQ ID NO: 1129492 - DNA, 15 bp, Homo sapiens
ttctcttgacccatt

SEQ ID NO: 1129493 - DNA, 15 bp, Homo sapiens
gttctcttgacccat

SEQ ID NO: 1129494 - DNA, 15 bp, Homo sapiens
tgttctcttgaccca

SEQ ID NO: 1129495 - DNA, 15 bp, Homo sapiens
atgttctcttgaccc

SEQ ID NO: 1129496 - DNA, 15 bp, Homo sapiens
tatgttctcttgacc

SEQ ID NO: 1129497 - DNA, 15 bp, Homo sapiens
atatgttctcttgac

SEQ ID NO: 1129498 - DNA, 15 bp, Homo sapiens
aatatgttctcttga

SEQ ID NO: 1129499 - DNA, 15 bp, Homo sapiens
aaatatgttctcttg

SEQ ID NO: 1129500 - DNA, 15 bp, Homo sapiens
gaaatatgttctctt

SEQ ID NO: 1129501 - DNA, 15 bp, Homo sapiens
ggaaatatgttctct

SEQ ID NO: 1129502 - DNA, 15 bp, Homo sapiens
tggaaatatgttctc

SEQ ID NO: 1129503 - DNA, 15 bp, Homo sapiens
atggaaatatgttct

SEQ ID NO: 1129504 - DNA, 15 bp, Homo sapiens
gatggaaatatgttc

SEQ ID NO: 1129505 - DNA, 15 bp, Homo sapiens
agatggaaatatgtt

SEQ ID NO: 1129506 - DNA, 15 bp, Homo sapiens
tagatggaaatatgt

SEQ ID NO: 1129507 - DNA, 15 bp, Homo sapiens
atagatggaaatatg

SEQ ID NO: 1129508 - DNA, 15 bp, Homo sapiens
aatagatggaaatat

SEQ ID NO: 1129509 - DNA, 15 bp, Homo sapiens
aaatagatggaaata

SEQ ID NO: 1129510 - DNA, 15 bp, Homo sapiens
taaatagatggaaat

SEQ ID NO: 1129511 - DNA, 15 bp, Homo sapiens
ttaaatagatggaaa

SEQ ID NO: 1129512 - DNA, 15 bp, Homo sapiens
tttaaatagatggaa

SEQ ID NO: 1129513 - DNA, 15 bp, Homo sapiens
atttaaatagatgga

SEQ ID NO: 1129514 - DNA, 15 bp, Homo sapiens
tatttaaatagatgg

SEQ ID NO: 1129515 - DNA, 15 bp, Homo sapiens
tttatttaaatagat

SEQ ID NO: 1129516 - DNA, 15 bp, Homo sapiens
ttttatttaaataga

SEQ ID NO: 1129517 - DNA, 15 bp, Homo sapiens
tttttatttaaatag

SEQ ID NO: 1129518 - DNA, 15 bp, Homo sapiens
gtttttatttaaata

SEQ ID NO: 1129519 - DNA, 15 bp, Homo sapiens
tgtttttatttaaat

SEQ ID NO: 1129520 - DNA, 15 bp, Homo sapiens
ctgtttttatttaaa

SEQ ID NO: 1129521 - DNA, 15 bp, Homo sapiens
cctgtttttatttaa

SEQ ID NO: 1129522 - DNA, 15 bp, Homo sapiens
tcctgtttttattta

SEQ ID NO: 1129523 - DNA, 15 bp, Homo sapiens
ttcctgtttttattt

SEQ ID NO: 1129524 - DNA, 15 bp, Homo sapiens
attcctgtttttatt

SEQ ID NO: 1129525 - DNA, 15 bp, Homo sapiens
gattcctgtttttat

SEQ ID NO: 1129526 - DNA, 15 bp, Homo sapiens
tgattcctgttttta

SEQ ID NO: 1129527 - DNA, 15 bp, Homo sapiens
ttgattcctgttttt

SEQ ID NO: 1129528 - DNA, 15 bp, Homo sapiens
attgattcctgtttt

SEQ ID NO: 1129529 - DNA, 15 bp, Homo sapiens
tattgattcctgttt

SEQ ID NO: 1129530 - DNA, 15 bp, Homo sapiens
ttattgattcctgtt

SEQ ID NO: 1129531 - DNA, 15 bp, Homo sapiens
tttattgattcctgt

SEQ ID NO: 1129532 - DNA, 15 bp, Homo sapiens
ttttattgattcctg

SEQ ID NO: 1129533 - DNA, 15 bp, Homo sapiens
cttttattgattcct

SEQ ID NO: 1129534 - DNA, 15 bp, Homo sapiens
acttttattgattcc

SEQ ID NO: 1129535 - DNA, 15 bp, Homo sapiens
cacttttattgattc

SEQ ID NO: 1129536 - DNA, 15 bp, Homo sapiens
tcacttttattgatt

SEQ ID NO: 1129537 - DNA, 15 bp, Homo sapiens
ttcacttttattgat

SEQ ID NO: 1129538 - DNA, 15 bp, Homo sapiens
gttcacttttattga

SEQ ID NO: 1129539 - DNA, 15 bp, Homo sapiens
tgttcacttttattg

SEQ ID NO: 1129540 - DNA, 15 bp, Homo sapiens
atgttcacttttatt

SEQ ID NO: 1129541 - DNA, 15 bp, Homo sapiens
tatgttcacttttat

SEQ ID NO: 1129542 - DNA, 15 bp, Homo sapiens
gtatgttcactttta

SEQ ID NO: 1129543 - DNA, 15 bp, Homo sapiens
tgtatgttcactttt

SEQ ID NO: 1129544 - DNA, 15 bp, Homo sapiens
ttgtatgttcacttt

SEQ ID NO: 1129545 - DNA, 15 bp, Homo sapiens
tttgtatgttcactt

SEQ ID NO: 1129546 - DNA, 15 bp, Homo sapiens
ttttgtatgttcact

SEQ ID NO: 1129547 - DNA, 15 bp, Homo sapiens
tttttgtatgttcac

SEQ ID NO: 1129548 - DNA, 15 bp, Homo sapiens
ttttttgtatgttca

SEQ ID NO: 1129549 - DNA, 15 bp, Homo sapiens
cttttttgtatgttc

SEQ ID NO: 1129550 - DNA, 15 bp, Homo sapiens
tcttttttgtatgtt

SEQ ID NO: 1129551 - DNA, 15 bp, Homo sapiens
ctcttttttgtatgt

SEQ ID NO: 1129552 - DNA, 15 bp, Homo sapiens
gctcttttttgtatg

SEQ ID NO: 1129553 - DNA, 15 bp, Homo sapiens
agctcttttttgtat

SEQ ID NO: 1129554 - DNA, 15 bp, Homo sapiens
gagctcttttttgta

SEQ ID NO: 1129555 - DNA, 15 bp, Homo sapiens
agagctcttttttgt

SEQ ID NO: 1129556 - DNA, 15 bp, Homo sapiens
aagagctcttttttg

SEQ ID NO: 1129557 - DNA, 15 bp, Homo sapiens
caagagctctttttt

SEQ ID NO: 1129558 - DNA, 15 bp, Homo sapiens
acaagagctcttttt

SEQ ID NO: 1129559 - DNA, 15 bp, Homo sapiens
gacaagagctctttt

SEQ ID NO: 1129560 - DNA, 15 bp, Homo sapiens
tgacaagagctcttt

SEQ ID NO: 1129561 - DNA, 15 bp, Homo sapiens
gtgacaagagctctt

SEQ ID NO: 1129562 - DNA, 15 bp, Homo sapiens
tgtgacaagagctct

SEQ ID NO: 1129563 - DNA, 15 bp, Homo sapiens
ctgtgacaagagctc

SEQ ID NO: 1129564 - DNA, 15 bp, Homo sapiens
tctgtgacaagagct

SEQ ID NO: 1129565 - DNA, 15 bp, Homo sapiens
ttctgtgacaagagc

SEQ ID NO: 1129566 - DNA, 15 bp, Homo sapiens
tttctgtgacaagag

SEQ ID NO: 1129567 - DNA, 15 bp, Homo sapiens
atttctgtgacaaga

SEQ ID NO: 1129568 - DNA, 15 bp, Homo sapiens
catttctgtgacaag

SEQ ID NO: 1129569 - DNA, 15 bp, Homo sapiens
tcatttctgtgacaa

SEQ ID NO: 1129570 - DNA, 15 bp, Homo sapiens
ttcatttctgtgaca

SEQ ID NO: 1129571 - DNA, 15 bp, Homo sapiens
tttcatttctgtgac

SEQ ID NO: 1129572 - DNA, 15 bp, Homo sapiens
ttttcatttctgtga

SEQ ID NO: 1129573 - DNA, 15 bp, Homo sapiens
gttttcatttctgtg

SEQ ID NO: 1129574 - DNA, 15 bp, Homo sapiens
ggttttcatttctgt

SEQ ID NO: 1129575 - DNA, 15 bp, Homo sapiens
aggttttcatttctg

SEQ ID NO: 1129576 - DNA, 15 bp, Homo sapiens
aaggttttcatttct

SEQ ID NO: 1129577 - DNA, 15 bp, Homo sapiens
caaggttttcatttc

SEQ ID NO: 1129578 - DNA, 15 bp, Homo sapiens
ccaaggttttcattt

SEQ ID NO: 1129579 - DNA, 15 bp, Homo sapiens
cccaaggttttcatt

SEQ ID NO: 1129580 - DNA, 15 bp, Homo sapiens
tcccaaggttttcat

SEQ ID NO: 1129581 - DNA, 15 bp, Homo sapiens
ctcccaaggttttca

SEQ ID NO: 1129582 - DNA, 15 bp, Homo sapiens
gctcccaaggttttc

SEQ ID NO: 1129583 - DNA, 15 bp, Homo sapiens
tgctcccaaggtttt

SEQ ID NO: 1129584 - DNA, 15 bp, Homo sapiens
ctgctcccaaggttt

SEQ ID NO: 1129585 - DNA, 15 bp, Homo sapiens
cctgctcccaaggtt

SEQ ID NO: 1129586 - DNA, 15 bp, Homo sapiens
tcctgctcccaaggt

SEQ ID NO: 1129587 - DNA, 15 bp, Homo sapiens
gtcctgctcccaagg

SEQ ID NO: 1129588 - DNA, 15 bp, Homo sapiens
agtcctgctcccaag

SEQ ID NO: 1129589 - DNA, 15 bp, Homo sapiens
cagtcctgctcccaa

SEQ ID NO: 1129590 - DNA, 15 bp, Homo sapiens
gcagtcctgctccca

SEQ ID NO: 1129591 - DNA, 15 bp, Homo sapiens
tgcagtcctgctccc

SEQ ID NO: 1129592 - DNA, 15 bp, Homo sapiens
gtgcagtcctgctcc

SEQ ID NO: 1129593 - DNA, 15 bp, Homo sapiens
ggtgcagtcctgctc

SEQ ID NO: 1129594 - DNA, 15 bp, Homo sapiens
gggtgcagtcctgct

SEQ ID NO: 1129595 - DNA, 15 bp, Homo sapiens
tgggtgcagtcctgc

SEQ ID NO: 1129596 - DNA, 15 bp, Homo sapiens
gtgggtgcagtcctg

SEQ ID NO: 1129597 - DNA, 15 bp, Homo sapiens
cgtgggtgcagtcct

SEQ ID NO: 1129598 - DNA, 15 bp, Homo sapiens
ccgtgggtgcagtcc

SEQ ID NO: 1129599 - DNA, 15 bp, Homo sapiens
accgtgggtgcagtc

SEQ ID NO: 1129600 - DNA, 15 bp, Homo sapiens
aaccgtgggtgcagt

SEQ ID NO: 1129601 - DNA, 15 bp, Homo sapiens
gaaccgtgggtgcag

SEQ ID NO: 1129602 - DNA, 15 bp, Homo sapiens
ggaaccgtgggtgca

SEQ ID NO: 1129603 - DNA, 15 bp, Homo sapiens
gggaaccgtgggtgc

SEQ ID NO: 1129604 - DNA, 15 bp, Homo sapiens
tgggaaccgtgggtg

SEQ ID NO: 1129605 - DNA, 15 bp, Homo sapiens
gtgggaaccgtgggt

SEQ ID NO: 1129606 - DNA, 15 bp, Homo sapiens
ggtgggaaccgtggg

SEQ ID NO: 1129607 - DNA, 15 bp, Homo sapiens
tggtgggaaccgtgg

SEQ ID NO: 1129608 - DNA, 15 bp, Homo sapiens
ttggtgggaaccgtg

SEQ ID NO: 1129609 - DNA, 15 bp, Homo sapiens
gttggtgggaaccgt

SEQ ID NO: 1129610 - DNA, 15 bp, Homo sapiens
ggttggtgggaaccg

SEQ ID NO: 1129611 - DNA, 15 bp, Homo sapiens
aggttggtgggaacc

SEQ ID NO: 1129612 - DNA, 15 bp, Homo sapiens
taggttggtgggaac

SEQ ID NO: 1129613 - DNA, 15 bp, Homo sapiens
ataggttggtgggaa

SEQ ID NO: 1129614 - DNA, 15 bp, Homo sapiens
gataggttggtggga

SEQ ID NO: 1129615 - DNA, 15 bp, Homo sapiens
ggataggttggtggg

SEQ ID NO: 1129616 - DNA, 15 bp, Homo sapiens
aggataggttggtgg

SEQ ID NO: 1129617 - DNA, 15 bp, Homo sapiens
caggataggttggtg

SEQ ID NO: 1129618 - DNA, 15 bp, Homo sapiens
gcaggataggttggt

SEQ ID NO: 1129619 - DNA, 15 bp, Homo sapiens
ggcaggataggttgg

SEQ ID NO: 1129620 - DNA, 15 bp, Homo sapiens
tggcaggataggttg

SEQ ID NO: 1129621 - DNA, 15 bp, Homo sapiens
atggcaggataggtt

SEQ ID NO: 1129622 - DNA, 15 bp, Homo sapiens
gatggcaggataggt

SEQ ID NO: 1129623 - DNA, 15 bp, Homo sapiens
tgatggcaggatagg

SEQ ID NO: 1129624 - DNA, 15 bp, Homo sapiens
atgatggcaggatag

SEQ ID NO: 1129625 - DNA, 15 bp, Homo sapiens
catgatggcaggata

SEQ ID NO: 1129626 - DNA, 15 bp, Homo sapiens
acatgatggcaggat

SEQ ID NO: 1129627 - DNA, 15 bp, Homo sapiens
aacatgatggcagga

SEQ ID NO: 1129628 - DNA, 15 bp, Homo sapiens
aaacatgatggcagg

SEQ ID NO: 1129629 - DNA, 15 bp, Homo sapiens
aaaacatgatggcag

SEQ ID NO: 1129630 - DNA, 15 bp, Homo sapiens
gaaaacatgatggca

SEQ ID NO: 1129631 - DNA, 15 bp, Homo sapiens
agaaaacatgatggc

SEQ ID NO: 1129632 - DNA, 15 bp, Homo sapiens
gagaaaacatgatgg

SEQ ID NO: 1129633 - DNA, 15 bp, Homo sapiens
ggagaaaacatgatg

SEQ ID NO: 1129634 - DNA, 15 bp, Homo sapiens
gggagaaaacatgat

SEQ ID NO: 1129635 - DNA, 15 bp, Homo sapiens
agggagaaaacatga

SEQ ID NO: 1129636 - DNA, 15 bp, Homo sapiens
tagggagaaaacatg

SEQ ID NO: 1129637 - DNA, 15 bp, Homo sapiens
gtagggagaaaacat

SEQ ID NO: 1129638 - DNA, 15 bp, Homo sapiens
agtagggagaaaaca

SEQ ID NO: 1129639 - DNA, 15 bp, Homo sapiens
gagtagggagaaaac

SEQ ID NO: 1129640 - DNA, 15 bp, Homo sapiens
ggagtagggagaaaa

SEQ ID NO: 1129641 - DNA, 15 bp, Homo sapiens
tggagtagggagaaa

SEQ ID NO: 1129642 - DNA, 15 bp, Homo sapiens
ctggagtagggagaa

SEQ ID NO: 1129643 - DNA, 15 bp, Homo sapiens
gctggagtagggaga

SEQ ID NO: 1129644 - DNA, 15 bp, Homo sapiens
agctggagtagggag

SEQ ID NO: 1129645 - DNA, 15 bp, Homo sapiens
aagctggagtaggga

SEQ ID NO: 1129646 - DNA, 15 bp, Homo sapiens
gaagctggagtaggg

SEQ ID NO: 1129647 - DNA, 15 bp, Homo sapiens
ggaagctggagtagg

SEQ ID NO: 1129648 - DNA, 15 bp, Homo sapiens
aggaagctggagtag

SEQ ID NO: 1129649 - DNA, 15 bp, Homo sapiens
gaggaagctggagta

SEQ ID NO: 1129650 - DNA, 15 bp, Homo sapiens
ggaggaagctggagt

SEQ ID NO: 1129651 - DNA, 15 bp, Homo sapiens
gggaggaagctggag

SEQ ID NO: 1129652 - DNA, 15 bp, Homo sapiens
tgggaggaagctgga

SEQ ID NO: 1129653 - DNA, 15 bp, Homo sapiens
ttgggaggaagctgg

SEQ ID NO: 1129654 - DNA, 15 bp, Homo sapiens
cttgggaggaagctg

SEQ ID NO: 1129655 - DNA, 15 bp, Homo sapiens
gcttgggaggaagct

SEQ ID NO: 1129656 - DNA, 15 bp, Homo sapiens
agcttgggaggaagc

SEQ ID NO: 1129657 - DNA, 15 bp, Homo sapiens
gagcttgggaggaag

SEQ ID NO: 1129658 - DNA, 15 bp, Homo sapiens
tgagcttgggaggaa

SEQ ID NO: 1129659 - DNA, 15 bp, Homo sapiens
gtgagcttgggagga

SEQ ID NO: 1129660 - DNA, 15 bp, Homo sapiens
agtgagcttgggagg

SEQ ID NO: 1129661 - DNA, 15 bp, Homo sapiens
gagtgagcttgggag

SEQ ID NO: 1129662 - DNA, 15 bp, Homo sapiens
agagtgagcttggga

SEQ ID NO: 1129663 - DNA, 15 bp, Homo sapiens
tagagtgagcttggg

SEQ ID NO: 1129664 - DNA, 15 bp, Homo sapiens
gtagagtgagcttgg

SEQ ID NO: 1129665 - DNA, 15 bp, Homo sapiens
cgtagagtgagcttg

SEQ ID NO: 1129666 - DNA, 15 bp, Homo sapiens
acgtagagtgagctt

SEQ ID NO: 1129667 - DNA, 15 bp, Homo sapiens
tacgtagagtgagct

SEQ ID NO: 1129668 - DNA, 15 bp, Homo sapiens
ctacgtagagtgagc

SEQ ID NO: 1129669 - DNA, 15 bp, Homo sapiens
tctacgtagagtgag

SEQ ID NO: 1129670 - DNA, 15 bp, Homo sapiens
atctacgtagagtga

SEQ ID NO: 1129671 - DNA, 15 bp, Homo sapiens
catctacgtagagtg

SEQ ID NO: 1129672 - DNA, 15 bp, Homo sapiens
ccatctacgtagagt

SEQ ID NO: 1129673 - DNA, 15 bp, Homo sapiens
accatctacgtagag

SEQ ID NO: 1129674 - DNA, 15 bp, Homo sapiens
aaccatctacgtaga

SEQ ID NO: 1129675 - DNA, 15 bp, Homo sapiens
aaaccatctacgtag

SEQ ID NO: 1129676 - DNA, 15 bp, Homo sapiens
aaaaccatctacgta

SEQ ID NO: 1129677 - DNA, 15 bp, Homo sapiens
aaaaaccatctacgt

SEQ ID NO: 1129678 - DNA, 15 bp, Homo sapiens
gaaaaaccatctacg

SEQ ID NO: 1129679 - DNA, 15 bp, Homo sapiens
agaaaaaccatctac

SEQ ID NO: 1129680 - DNA, 15 bp, Homo sapiens
aagaaaaaccatcta

SEQ ID NO: 1129681 - DNA, 15 bp, Homo sapiens
gaagaaaaaccatct

SEQ ID NO: 1129682 - DNA, 15 bp, Homo sapiens
ggaagaaaaaccatc

SEQ ID NO: 1129683 - DNA, 15 bp, Homo sapiens
gggaagaaaaaccat

SEQ ID NO: 1129684 - DNA, 15 bp, Homo sapiens
agggaagaaaaacca

SEQ ID NO: 1129685 - DNA, 15 bp, Homo sapiens
aagggaagaaaaacc

SEQ ID NO: 1129686 - DNA, 15 bp, Homo sapiens
taagggaagaaaaac

SEQ ID NO: 1129687 - DNA, 15 bp, Homo sapiens
ctaagggaagaaaaa

SEQ ID NO: 1129688 - DNA, 15 bp, Homo sapiens
gctaagggaagaaaa

SEQ ID NO: 1129689 - DNA, 15 bp, Homo sapiens
ggctaagggaagaaa

SEQ ID NO: 1129690 - DNA, 15 bp, Homo sapiens
tggctaagggaagaa

SEQ ID NO: 1129691 - DNA, 15 bp, Homo sapiens
ttggctaagggaaga

SEQ ID NO: 1129692 - DNA, 15 bp, Homo sapiens
gttggctaagggaag

SEQ ID NO: 1129693 - DNA, 15 bp, Homo sapiens
tgttggctaagggaa

SEQ ID NO: 1129694 - DNA, 15 bp, Homo sapiens
ttgttggctaaggga

SEQ ID NO: 1129695 - DNA, 15 bp, Homo sapiens
tttgttggctaaggg

SEQ ID NO: 1129696 - DNA, 15 bp, Homo sapiens
gtttgttggctaagg

SEQ ID NO: 1129697 - DNA, 15 bp, Homo sapiens
cgtttgttggctaag

SEQ ID NO: 1129698 - DNA, 15 bp, Homo sapiens
tcgtttgttggctaa

SEQ ID NO: 1129699 - DNA, 15 bp, Homo sapiens
ttcgtttgttggcta

SEQ ID NO: 1129700 - DNA, 15 bp, Homo sapiens
tttcgtttgttggct

SEQ ID NO: 1129701 - DNA, 15 bp, Homo sapiens
atttcgtttgttggc

SEQ ID NO: 1129702 - DNA, 15 bp, Homo sapiens
aatttcgtttgttgg

SEQ ID NO: 1129703 - DNA, 15 bp, Homo sapiens
gaatttcgtttgttg

SEQ ID NO: 1129704 - DNA, 15 bp, Homo sapiens
agaatttcgtttgtt

SEQ ID NO: 1129705 - DNA, 15 bp, Homo sapiens
cagaatttcgtttgt

SEQ ID NO: 1129706 - DNA, 15 bp, Homo sapiens
gcagaatttcgtttg

SEQ ID NO: 1129707 - DNA, 15 bp, Homo sapiens
ggcagaatttcgttt

SEQ ID NO: 1129708 - DNA, 15 bp, Homo sapiens
aggcagaatttcgtt

SEQ ID NO: 1129709 - DNA, 15 bp, Homo sapiens
taggcagaatttcgt

SEQ ID NO: 1129710 - DNA, 15 bp, Homo sapiens
ataggcagaatttcg

SEQ ID NO: 1129711 - DNA, 15 bp, Homo sapiens
tataggcagaatttc

SEQ ID NO: 1129712 - DNA, 15 bp, Homo sapiens
ttataggcagaattt

SEQ ID NO: 1129713 - DNA, 15 bp, Homo sapiens
tttataggcagaatt

SEQ ID NO: 1129714 - DNA, 15 bp, Homo sapiens
atttataggcagaat

SEQ ID NO: 1129715 - DNA, 15 bp, Homo sapiens
aatttataggcagaa

SEQ ID NO: 1129716 - DNA, 15 bp, Homo sapiens
taatttataggcaga

SEQ ID NO: 1129717 - DNA, 15 bp, Homo sapiens
ttaatttataggcag

SEQ ID NO: 1129718 - DNA, 15 bp, Homo sapiens
cttaatttataggca

SEQ ID NO: 1129719 - DNA, 15 bp, Homo sapiens
gcttaatttataggc

SEQ ID NO: 1129720 - DNA, 15 bp, Homo sapiens
ggcttaatttatagg

SEQ ID NO: 1129721 - DNA, 15 bp, Homo sapiens
tggcttaatttatag

SEQ ID NO: 1129722 - DNA, 15 bp, Homo sapiens
ctggcttaatttata

SEQ ID NO: 1129723 - DNA, 15 bp, Homo sapiens
cctggcttaatttat

SEQ ID NO: 1129724 - DNA, 15 bp, Homo sapiens
tcctggcttaattta

SEQ ID NO: 1129725 - DNA, 15 bp, Homo sapiens
gtcctggcttaattt

SEQ ID NO: 1129726 - DNA, 15 bp, Homo sapiens
tgtcctggcttaatt

SEQ ID NO: 1129727 - DNA, 15 bp, Homo sapiens
gtgtcctggcttaat

SEQ ID NO: 1129728 - DNA, 15 bp, Homo sapiens
agtgtcctggcttaa

SEQ ID NO: 1129729 - DNA, 15 bp, Homo sapiens
tagtgtcctggctta

SEQ ID NO: 1129730 - DNA, 15 bp, Homo sapiens
ctagtgtcctggctt

SEQ ID NO: 1129731 - DNA, 15 bp, Homo sapiens
cctagtgtcctggct

SEQ ID NO: 1129732 - DNA, 15 bp, Homo sapiens
tcctagtgtcctggc

SEQ ID NO: 1129733 - DNA, 15 bp, Homo sapiens
atcctagtgtcctgg

SEQ ID NO: 1129734 - DNA, 15 bp, Homo sapiens
tatcctagtgtcctg

SEQ ID NO: 1129735 - DNA, 15 bp, Homo sapiens
atatcctagtgtcct

SEQ ID NO: 1129736 - DNA, 15 bp, Homo sapiens
catatcctagtgtcc

SEQ ID NO: 1129737 - DNA, 15 bp, Homo sapiens
ccatatcctagtgtc

SEQ ID NO: 1129738 - DNA, 15 bp, Homo sapiens
tccatatcctagtgt

SEQ ID NO: 1129739 - DNA, 15 bp, Homo sapiens
ctccatatcctagtg

SEQ ID NO: 1129740 - DNA, 15 bp, Homo sapiens
cctccatatcctagt

SEQ ID NO: 1129741 - DNA, 15 bp, Homo sapiens
acctccatatcctag

SEQ ID NO: 1129742 - DNA, 15 bp, Homo sapiens
tacctccatatccta

SEQ ID NO: 1129743 - DNA, 15 bp, Homo sapiens
atacctccatatcct

SEQ ID NO: 1129744 - DNA, 15 bp, Homo sapiens
tatacctccatatcc

SEQ ID NO: 1129745 - DNA, 15 bp, Homo sapiens
atatacctccatatc

SEQ ID NO: 1129746 - DNA, 15 bp, Homo sapiens
aatatacctccatat

SEQ ID NO: 1129747 - DNA, 15 bp, Homo sapiens
taatatacctccata

SEQ ID NO: 1129748 - DNA, 15 bp, Homo sapiens
ataatatacctccat

SEQ ID NO: 1129749 - DNA, 15 bp, Homo sapiens
aataatatacctcca

SEQ ID NO: 1129750 - DNA, 15 bp, Homo sapiens
aaataatatacctcc

SEQ ID NO: 1129751 - DNA, 15 bp, Homo sapiens
taaataatatacctc

SEQ ID NO: 1129752 - DNA, 15 bp, Homo sapiens
ataaataatatacct

SEQ ID NO: 1129753 - DNA, 15 bp, Homo sapiens
cataaataatatacc

SEQ ID NO: 1129754 - DNA, 15 bp, Homo sapiens
acataaataatatac

SEQ ID NO: 1129755 - DNA, 15 bp, Homo sapiens
gacataaataatata

SEQ ID NO: 1129756 - DNA, 15 bp, Homo sapiens
agacataaataatat

SEQ ID NO: 1129757 - DNA, 15 bp, Homo sapiens
gagacataaataata

SEQ ID NO: 1129758 - DNA, 15 bp, Homo sapiens
agagacataaataat

SEQ ID NO: 1129759 - DNA, 15 bp, Homo sapiens
aagagacataaataa

SEQ ID NO: 1129760 - DNA, 15 bp, Homo sapiens
aaagagacataaata

SEQ ID NO: 1129761 - DNA, 15 bp, Homo sapiens
gaaaagagacataaa

SEQ ID NO: 1129762 - DNA, 15 bp, Homo sapiens
ggaaaagagacataa

SEQ ID NO: 1129763 - DNA, 15 bp, Homo sapiens
tggaaaagagacata

SEQ ID NO: 1129764 - DNA, 15 bp, Homo sapiens
ctggaaaagagacat

SEQ ID NO: 1129765 - DNA, 15 bp, Homo sapiens
actggaaaagagaca

SEQ ID NO: 1129766 - DNA, 15 bp, Homo sapiens
cactggaaaagagac

SEQ ID NO: 1129767 - DNA, 15 bp, Homo sapiens
acactggaaaagaga

SEQ ID NO: 1129768 - DNA, 15 bp, Homo sapiens
aacactggaaaagag

SEQ ID NO: 1129769 - DNA, 15 bp, Homo sapiens
aaacactggaaaaga

SEQ ID NO: 1129770 - DNA, 15 bp, Homo sapiens
gaaacactggaaaag

SEQ ID NO: 1129771 - DNA, 15 bp, Homo sapiens
ggaaacactggaaaa

SEQ ID NO: 1129772 - DNA, 15 bp, Homo sapiens
aggaaacactggaaa

SEQ ID NO: 1129773 - DNA, 15 bp, Homo sapiens
caggaaacactggaa

SEQ ID NO: 1129774 - DNA, 15 bp, Homo sapiens
ccaggaaacactgga

SEQ ID NO: 1129775 - DNA, 15 bp, Homo sapiens
accaggaaacactgg

SEQ ID NO: 1129776 - DNA, 15 bp, Homo sapiens
taccaggaaacactg

SEQ ID NO: 1129777 - DNA, 15 bp, Homo sapiens
ataccaggaaacact

SEQ ID NO: 1129778 - DNA, 15 bp, Homo sapiens
tataccaggaaacac

SEQ ID NO: 1129779 - DNA, 15 bp, Homo sapiens
atataccaggaaaca

SEQ ID NO: 1129780 - DNA, 15 bp, Homo sapiens
tatataccaggaaac

SEQ ID NO: 1129781 - DNA, 15 bp, Homo sapiens
ttatataccaggaaa

SEQ ID NO: 1129782 - DNA, 15 bp, Homo sapiens
gttatataccaggaa

SEQ ID NO: 1129783 - DNA, 15 bp, Homo sapiens
tgttatataccagga

SEQ ID NO: 1129784 - DNA, 15 bp, Homo sapiens
ctgttatataccagg

SEQ ID NO: 1129785 - DNA, 15 bp, Homo sapiens
gctgttatataccag

SEQ ID NO: 1129786 - DNA, 15 bp, Homo sapiens
tgctgttatatacca

SEQ ID NO: 1129787 - DNA, 15 bp, Homo sapiens
ttgctgttatatacc

SEQ ID NO: 1129788 - DNA, 15 bp, Homo sapiens
tttgctgttatatac

SEQ ID NO: 1129789 - DNA, 15 bp, Homo sapiens
ctttgctgttatata

SEQ ID NO: 1129790 - DNA, 15 bp, Homo sapiens
tctttgctgttatat

SEQ ID NO: 1129791 - DNA, 15 bp, Homo sapiens
atctttgctgttata

SEQ ID NO: 1129792 - DNA, 15 bp, Homo sapiens
catctttgctgttat

SEQ ID NO: 1129793 - DNA, 15 bp, Homo sapiens
ccatctttgctgtta

SEQ ID NO: 1129794 - DNA, 15 bp, Homo sapiens
accatctttgctgtt

SEQ ID NO: 1129795 - DNA, 15 bp, Homo sapiens
aaccatctttgctgt

SEQ ID NO: 1129796 - DNA, 15 bp, Homo sapiens
aaaccatctttgctg

SEQ ID NO: 1129797 - DNA, 15 bp, Homo sapiens
taaaccatctttgct

SEQ ID NO: 1129798 - DNA, 15 bp, Homo sapiens
ctaaaccatctttgc

SEQ ID NO: 1129799 - DNA, 15 bp, Homo sapiens
gctaaaccatctttg

SEQ ID NO: 1129800 - DNA, 15 bp, Homo sapiens
tgctaaaccatcttt

SEQ ID NO: 1129801 - DNA, 15 bp, Homo sapiens
ttgctaaaccatctt

SEQ ID NO: 1129802 - DNA, 15 bp, Homo sapiens
cttgctaaaccatct

SEQ ID NO: 1129803 - DNA, 15 bp, Homo sapiens
acttgctaaaccatc

SEQ ID NO: 1129804 - DNA, 15 bp, Homo sapiens
aacttgctaaaccat

SEQ ID NO: 1129805 - DNA, 15 bp, Homo sapiens
taacttgctaaacca

SEQ ID NO: 1129806 - DNA, 15 bp, Homo sapiens
ttaacttgctaaacc

SEQ ID NO: 1129807 - DNA, 15 bp, Homo sapiens
gttaacttgctaaac

SEQ ID NO: 1129808 - DNA, 15 bp, Homo sapiens
agttaacttgctaaa

SEQ ID NO: 1129809 - DNA, 15 bp, Homo sapiens
cagttaacttgctaa

SEQ ID NO: 1129810 - DNA, 15 bp, Homo sapiens
ccagttaacttgcta

SEQ ID NO: 1129811 - DNA, 15 bp, Homo sapiens
accagttaacttgct

SEQ ID NO: 1129812 - DNA, 15 bp, Homo sapiens
gaccagttaacttgc

SEQ ID NO: 1129813 - DNA, 15 bp, Homo sapiens
tgaccagttaacttg

SEQ ID NO: 1129814 - DNA, 15 bp, Homo sapiens
ctgaccagttaactt

SEQ ID NO: 1129815 - DNA, 15 bp, Homo sapiens
cctgaccagttaact

SEQ ID NO: 1129816 - DNA, 15 bp, Homo sapiens
gcctgaccagttaac

SEQ ID NO: 1129817 - DNA, 15 bp, Homo sapiens
ggcctgaccagttaa

SEQ ID NO: 1129818 - DNA, 15 bp, Homo sapiens
tggcctgaccagtta

SEQ ID NO: 1129819 - DNA, 15 bp, Homo sapiens
ctggcctgaccagtt

SEQ ID NO: 1129820 - DNA, 15 bp, Homo sapiens
tctggcctgaccagt

SEQ ID NO: 1129821 - DNA, 15 bp, Homo sapiens
ttctggcctgaccag

SEQ ID NO: 1129822 - DNA, 15 bp, Homo sapiens
attctggcctgacca

SEQ ID NO: 1129823 - DNA, 15 bp, Homo sapiens
aattctggcctgacc

SEQ ID NO: 1129824 - DNA, 15 bp, Homo sapiens
gaattctggcctgac

SEQ ID NO: 1129825 - DNA, 15 bp, Homo sapiens
agaattctggcctga

SEQ ID NO: 1129826 - DNA, 15 bp, Homo sapiens
aagaattctggcctg

SEQ ID NO: 1129827 - DNA, 15 bp, Homo sapiens
caagaattctggcct

SEQ ID NO: 1129828 - DNA, 15 bp, Homo sapiens
tcaagaattctggcc

SEQ ID NO: 1129829 - DNA, 15 bp, Homo sapiens
atcaagaattctggc

SEQ ID NO: 1129830 - DNA, 15 bp, Homo sapiens
catcaagaattctgg

SEQ ID NO: 1129831 - DNA, 15 bp, Homo sapiens
ccatcaagaattctg

SEQ ID NO: 1129832 - DNA, 15 bp, Homo sapiens
accatcaagaattct

SEQ ID NO: 1129833 - DNA, 15 bp, Homo sapiens
aaccatcaagaattc

SEQ ID NO: 1129834 - DNA, 15 bp, Homo sapiens
caaccatcaagaatt

SEQ ID NO: 1129835 - DNA, 15 bp, Homo sapiens
gcaaccatcaagaat

SEQ ID NO: 1129836 - DNA, 15 bp, Homo sapiens
ggcaaccatcaagaa

SEQ ID NO: 1129837 - DNA, 15 bp, Homo sapiens
tggcaaccatcaaga

SEQ ID NO: 1129838 - DNA, 15 bp, Homo sapiens
ttggcaaccatcaag

SEQ ID NO: 1129839 - DNA, 15 bp, Homo sapiens
cttggcaaccatcaa

SEQ ID NO: 1129840 - DNA, 15 bp, Homo sapiens
acttggcaaccatca

SEQ ID NO: 1129841 - DNA, 15 bp, Homo sapiens
gacttggcaaccatc

SEQ ID NO: 1129842 - DNA, 15 bp, Homo sapiens
tgacttggcaaccat

SEQ ID NO: 1129843 - DNA, 15 bp, Homo sapiens
ctgacttggcaacca

SEQ ID NO: 1129844 - DNA, 15 bp, Homo sapiens
cctgacttggcaacc

SEQ ID NO: 1129845 - DNA, 15 bp, Homo sapiens
tcctgacttggcaac

SEQ ID NO: 1129846 - DNA, 15 bp, Homo sapiens
ctcctgacttggcaa

SEQ ID NO: 1129847 - DNA, 15 bp, Homo sapiens
cctcctgacttggca

SEQ ID NO: 1129848 - DNA, 15 bp, Homo sapiens
gcctcctgacttggc

SEQ ID NO: 1129849 - DNA, 15 bp, Homo sapiens
tgcctcctgacttgg

SEQ ID NO: 1129850 - DNA, 15 bp, Homo sapiens
ctgcctcctgacttg

SEQ ID NO: 1129851 - DNA, 15 bp, Homo sapiens
tctgcctcctgactt

SEQ ID NO: 1129852 - DNA, 15 bp, Homo sapiens
gtctgcctcctgact

SEQ ID NO: 1129853 - DNA, 15 bp, Homo sapiens
cgtctgcctcctgac

SEQ ID NO: 1129854 - DNA, 15 bp, Homo sapiens
ccgtctgcctcctga

SEQ ID NO: 1129855 - DNA, 15 bp, Homo sapiens
accgtctgcctcctg

SEQ ID NO: 1129856 - DNA, 15 bp, Homo sapiens
caccgtctgcctcct

SEQ ID NO: 1129857 - DNA, 15 bp, Homo sapiens
tcaccgtctgcctcc

SEQ ID NO: 1129858 - DNA, 15 bp, Homo sapiens
ttcaccgtctgcctc

SEQ ID NO: 1129859 - DNA, 15 bp, Homo sapiens
cttcaccgtctgcct

SEQ ID NO: 1129860 - DNA, 15 bp, Homo sapiens
ccttcaccgtctgcc

SEQ ID NO: 1129861 - DNA, 15 bp, Homo sapiens
tccttcaccgtctgc

SEQ ID NO: 1129862 - DNA, 15 bp, Homo sapiens
ttccttcaccgtctg

SEQ ID NO: 1129863 - DNA, 15 bp, Homo sapiens
attccttcaccgtct

SEQ ID NO: 1129864 - DNA, 15 bp, Homo sapiens
cattccttcaccgtc

SEQ ID NO: 1129865 - DNA, 15 bp, Homo sapiens
gcattccttcaccgt

SEQ ID NO: 1129866 - DNA, 15 bp, Homo sapiens
tgcattccttcaccg

SEQ ID NO: 1129867 - DNA, 15 bp, Homo sapiens
atgcattccttcacc

SEQ ID NO: 1129868 - DNA, 15 bp, Homo sapiens
aatgcattccttcac

SEQ ID NO: 1129869 - DNA, 15 bp, Homo sapiens
gaatgcattccttca

SEQ ID NO: 1129870 - DNA, 15 bp, Homo sapiens
agaatgcattccttc

SEQ ID NO: 1129871 - DNA, 15 bp, Homo sapiens
cagaatgcattcctt

SEQ ID NO: 1129872 - DNA, 15 bp, Homo sapiens
ccagaatgcattcct

SEQ ID NO: 1129873 - DNA, 15 bp, Homo sapiens
accagaatgcattcc

SEQ ID NO: 1129874 - DNA, 15 bp, Homo sapiens
aaccagaatgcattc

SEQ ID NO: 1129875 - DNA, 15 bp, Homo sapiens
taaccagaatgcatt

SEQ ID NO: 1129876 - DNA, 15 bp, Homo sapiens
ataaccagaatgcat

SEQ ID NO: 1129877 - DNA, 15 bp, Homo sapiens
cataaccagaatgca

SEQ ID NO: 1129878 - DNA, 15 bp, Homo sapiens
tcataaccagaatgc

SEQ ID NO: 1129879 - DNA, 15 bp, Homo sapiens
ttcataaccagaatg

SEQ ID NO: 1129880 - DNA, 15 bp, Homo sapiens
tttcataaccagaat

SEQ ID NO: 1129881 - DNA, 15 bp, Homo sapiens
ttttcataaccagaa

SEQ ID NO: 1129882 - DNA, 15 bp, Homo sapiens
tttttcataaccaga

SEQ ID NO: 1129883 - DNA, 15 bp, Homo sapiens
atttttcataaccag

SEQ ID NO: 1129884 - DNA, 15 bp, Homo sapiens
catttttcataacca

SEQ ID NO: 1129885 - DNA, 15 bp, Homo sapiens
ccatttttcataacc

SEQ ID NO: 1129886 - DNA, 15 bp, Homo sapiens
gccatttttcataac

SEQ ID NO: 1129887 - DNA, 15 bp, Homo sapiens
tgccatttttcataa

SEQ ID NO: 1129888 - DNA, 15 bp, Homo sapiens
ttgccatttttcata

SEQ ID NO: 1129889 - DNA, 15 bp, Homo sapiens
attgccatttttcat

SEQ ID NO: 1129890 - DNA, 15 bp, Homo sapiens
cattgccatttttca

SEQ ID NO: 1129891 - DNA, 15 bp, Homo sapiens
tcattgccatttttc

SEQ ID NO: 1129892 - DNA, 15 bp, Homo sapiens
gtcattgccattttt

SEQ ID NO: 1129893 - DNA, 15 bp, Homo sapiens
cgtcattgccatttt

SEQ ID NO: 1129894 - DNA, 15 bp, Homo sapiens
tcgtcattgccattt

SEQ ID NO: 1129895 - DNA, 15 bp, Homo sapiens
ctcgtcattgccatt

SEQ ID NO: 1129896 - DNA, 15 bp, Homo sapiens
actcgtcattgccat

SEQ ID NO: 1129897 - DNA, 15 bp, Homo sapiens
tactcgtcattgcca

SEQ ID NO: 1129898 - DNA, 15 bp, Homo sapiens
ttactcgtcattgcc

SEQ ID NO: 1129899 - DNA, 15 bp, Homo sapiens
cttactcgtcattgc

SEQ ID NO: 1129900 - DNA, 15 bp, Homo sapiens
acttactcgtcattg

SEQ ID NO: 1129901 - DNA, 15 bp, Homo sapiens
aacttactcgtcatt

SEQ ID NO: 1129902 - DNA, 15 bp, Homo sapiens
caacttactcgtcat

SEQ ID NO: 1129903 - DNA, 15 bp, Homo sapiens
gcaacttactcgtca

SEQ ID NO: 1129904 - DNA, 15 bp, Homo sapiens
tgcaacttactcgtc

SEQ ID NO: 1129905 - DNA, 15 bp, Homo sapiens
ctgcaacttactcgt

SEQ ID NO: 1129906 - DNA, 15 bp, Homo sapiens
tctgcaacttactcg

SEQ ID NO: 1129907 - DNA, 15 bp, Homo sapiens
ctctgcaacttactc

SEQ ID NO: 1129908 - DNA, 15 bp, Homo sapiens
actctgcaacttact

SEQ ID NO: 1129909 - DNA, 15 bp, Homo sapiens
tactctgcaacttac

SEQ ID NO: 1129910 - DNA, 15 bp, Homo sapiens
ttactctgcaactta

SEQ ID NO: 1129911 - DNA, 15 bp, Homo sapiens
tttactctgcaactt

SEQ ID NO: 1129912 - DNA, 15 bp, Homo sapiens
ctttactctgcaact

SEQ ID NO: 1129913 - DNA, 15 bp, Homo sapiens
tctttactctgcaac

SEQ ID NO: 1129914 - DNA, 15 bp, Homo sapiens
atctttactctgcaa

SEQ ID NO: 1129915 - DNA, 15 bp, Homo sapiens
catctttactctgca

SEQ ID NO: 1129916 - DNA, 15 bp, Homo sapiens
gcatctttactctgc

SEQ ID NO: 1129917 - DNA, 15 bp, Homo sapiens
ggcatctttactctg

SEQ ID NO: 1129918 - DNA, 15 bp, Homo sapiens
aggcatctttactct

SEQ ID NO: 1129919 - DNA, 15 bp, Homo sapiens
aaggcatctttactc

SEQ ID NO: 1129920 - DNA, 15 bp, Homo sapiens
aaaggcatctttact

SEQ ID NO: 1129921 - DNA, 15 bp, Homo sapiens
aaaaggcatctttac

SEQ ID NO: 1129922 - DNA, 15 bp, Homo sapiens
taaaaggcatcttta

SEQ ID NO: 1129923 - DNA, 15 bp, Homo sapiens
ctaaaaggcatcttt

SEQ ID NO: 1129924 - DNA, 15 bp, Homo sapiens
tctaaaaggcatctt

SEQ ID NO: 1129925 - DNA, 15 bp, Homo sapiens
ctctaaaaggcatct

SEQ ID NO: 1129926 - DNA, 15 bp, Homo sapiens
cctctaaaaggcatc

SEQ ID NO: 1129927 - DNA, 15 bp, Homo sapiens
tcctctaaaaggcat

SEQ ID NO: 1129928 - DNA, 15 bp, Homo sapiens
ttcctctaaaaggca

SEQ ID NO: 1129929 - DNA, 15 bp, Homo sapiens
tttcctctaaaaggc

SEQ ID NO: 1129930 - DNA, 15 bp, Homo sapiens
atttcctctaaaagg

SEQ ID NO: 1129931 - DNA, 15 bp, Homo sapiens
aatttcctctaaaag

SEQ ID NO: 1129932 - DNA, 15 bp, Homo sapiens
taatttcctctaaaa

SEQ ID NO: 1129933 - DNA, 15 bp, Homo sapiens
ttaatttcctctaaa

SEQ ID NO: 1129934 - DNA, 15 bp, Homo sapiens
cttaatttcctctaa

SEQ ID NO: 1129935 - DNA, 15 bp, Homo sapiens
ccttaatttcctcta

SEQ ID NO: 1129936 - DNA, 15 bp, Homo sapiens
accttaatttcctct

SEQ ID NO: 1129937 - DNA, 15 bp, Homo sapiens
aaccttaatttcctc

SEQ ID NO: 1129938 - DNA, 15 bp, Homo sapiens
aaaccttaatttcct

SEQ ID NO: 1129939 - DNA, 15 bp, Homo sapiens
caaaccttaatttcc

SEQ ID NO: 1129940 - DNA, 15 bp, Homo sapiens
gcaaaccttaatttc

SEQ ID NO: 1129941 - DNA, 15 bp, Homo sapiens
tgcaaaccttaattt

SEQ ID NO: 1129942 - DNA, 15 bp, Homo sapiens
ttgcaaaccttaatt

SEQ ID NO: 1129943 - DNA, 15 bp, Homo sapiens
attgcaaaccttaat

SEQ ID NO: 1129944 - DNA, 15 bp, Homo sapiens
tattgcaaaccttaa

SEQ ID NO: 1129945 - DNA, 15 bp, Homo sapiens
ttattgcaaacctta

SEQ ID NO: 1129946 - DNA, 15 bp, Homo sapiens
tttattgcaaacctt

SEQ ID NO: 1129947 - DNA, 15 bp, Homo sapiens
atttattgcaaacct

SEQ ID NO: 1129948 - DNA, 15 bp, Homo sapiens
catttattgcaaacc

SEQ ID NO: 1129949 - DNA, 15 bp, Homo sapiens
gcatttattgcaaac

SEQ ID NO: 1129950 - DNA, 15 bp, Homo sapiens
tgcatttattgcaaa

SEQ ID NO: 1129951 - DNA, 15 bp, Homo sapiens
atgcatttattgcaa

SEQ ID NO: 1129952 - DNA, 15 bp, Homo sapiens
catgcatttattgca

SEQ ID NO: 1129953 - DNA, 15 bp, Homo sapiens
gcatgcatttattgc

SEQ ID NO: 1129954 - DNA, 15 bp, Homo sapiens
agcatgcatttattg

SEQ ID NO: 1129955 - DNA, 15 bp, Homo sapiens
tagcatgcatttatt

SEQ ID NO: 1129956 - DNA, 15 bp, Homo sapiens
ttagcatgcatttat

SEQ ID NO: 1129957 - DNA, 15 bp, Homo sapiens
attagcatgcattta

SEQ ID NO: 1129958 - DNA, 15 bp, Homo sapiens
gattagcatgcattt

SEQ ID NO: 1129959 - DNA, 15 bp, Homo sapiens
ggattagcatgcatt

SEQ ID NO: 1129960 - DNA, 15 bp, Homo sapiens
aggattagcatgcat

SEQ ID NO: 1129961 - DNA, 15 bp, Homo sapiens
gaggattagcatgca

SEQ ID NO: 1129962 - DNA, 15 bp, Homo sapiens
agaggattagcatgc

SEQ ID NO: 1129963 - DNA, 15 bp, Homo sapiens
tagaggattagcatg

SEQ ID NO: 1129964 - DNA, 15 bp, Homo sapiens
ttagaggattagcat

SEQ ID NO: 1129965 - DNA, 15 bp, Homo sapiens
attagaggattagca

SEQ ID NO: 1129966 - DNA, 15 bp, Homo sapiens
aattagaggattagc

SEQ ID NO: 1129967 - DNA, 15 bp, Homo sapiens
aaattagaggattag

SEQ ID NO: 1129968 - DNA, 15 bp, Homo sapiens
aaaattagaggatta

SEQ ID NO: 1129969 - DNA, 15 bp, Homo sapiens
caaaattagaggatt

SEQ ID NO: 1129970 - DNA, 15 bp, Homo sapiens
tcaaaattagaggat

SEQ ID NO: 1129971 - DNA, 15 bp, Homo sapiens
atcaaaattagagga

SEQ ID NO: 1129972 - DNA, 15 bp, Homo sapiens
catcaaaattagagg

SEQ ID NO: 1129973 - DNA, 15 bp, Homo sapiens
tcatcaaaattagag

SEQ ID NO: 1129974 - DNA, 15 bp, Homo sapiens
ttcatcaaaattaga

SEQ ID NO: 1129975 - DNA, 15 bp, Homo sapiens
tttcatcaaaattag

SEQ ID NO: 1129976 - DNA, 15 bp, Homo sapiens
ctttcatcaaaatta

SEQ ID NO: 1129977 - DNA, 15 bp, Homo sapiens
tctttcatcaaaatt

SEQ ID NO: 1129978 - DNA, 15 bp, Homo sapiens
gtctttcatcaaaat

SEQ ID NO: 1129979 - DNA, 15 bp, Homo sapiens
agtctttcatcaaaa

SEQ ID NO: 1129980 - DNA, 15 bp, Homo sapiens
tagtctttcatcaaa

SEQ ID NO: 1129981 - DNA, 15 bp, Homo sapiens
ttagtctttcatcaa

SEQ ID NO: 1129982 - DNA, 15 bp, Homo sapiens
tttagtctttcatca

SEQ ID NO: 1129983 - DNA, 15 bp, Homo sapiens
ctttagtctttcatc

SEQ ID NO: 1129984 - DNA, 15 bp, Homo sapiens
gctttagtctttcat

SEQ ID NO: 1129985 - DNA, 15 bp, Homo sapiens
agctttagtctttca

SEQ ID NO: 1129986 - DNA, 15 bp, Homo sapiens
gagctttagtctttc

SEQ ID NO: 1129987 - DNA, 15 bp, Homo sapiens
agagctttagtcttt

SEQ ID NO: 1129988 - DNA, 15 bp, Homo sapiens
aagagctttagtctt

SEQ ID NO: 1129989 - DNA, 15 bp, Homo sapiens
caagagctttagtct

SEQ ID NO: 1129990 - DNA, 15 bp, Homo sapiens
acaagagctttagtc

SEQ ID NO: 1129991 - DNA, 15 bp, Homo sapiens
aacaagagctttagt

SEQ ID NO: 1129992 - DNA, 15 bp, Homo sapiens
aaacaagagctttag

SEQ ID NO: 1129993 - DNA, 15 bp, Homo sapiens
aaaacaagagcttta

SEQ ID NO: 1129994 - DNA, 15 bp, Homo sapiens
caaaacaagagcttt

SEQ ID NO: 1129995 - DNA, 15 bp, Homo sapiens
ccaaaacaagagctt

SEQ ID NO: 1129996 - DNA, 15 bp, Homo sapiens
accaaaacaagagct

SEQ ID NO: 1129997 - DNA, 15 bp, Homo sapiens
aaccaaaacaagagc

SEQ ID NO: 1129998 - DNA, 15 bp, Homo sapiens
aaaccaaaacaagag

SEQ ID NO: 1129999 - DNA, 15 bp, Homo sapiens
caaaccaaaacaaga

SEQ ID NO: 1130000 - DNA, 15 bp, Homo sapiens
gcaaaccaaaacaag

SEQ ID NO: 1130001 - DNA, 15 bp, Homo sapiens
tgcaaaccaaaacaa

SEQ ID NO: 1130002 - DNA, 15 bp, Homo sapiens
atgcaaaccaaaaca

SEQ ID NO: 1130003 - DNA, 15 bp, Homo sapiens
aatgcaaaccaaaac

SEQ ID NO: 1130004 - DNA, 15 bp, Homo sapiens
aaatgcaaaccaaaa

SEQ ID NO: 1130005 - DNA, 15 bp, Homo sapiens
gaaatgcaaaccaaa

SEQ ID NO: 1130006 - DNA, 15 bp, Homo sapiens
tgaaatgcaaaccaa

SEQ ID NO: 1130007 - DNA, 15 bp, Homo sapiens
ttgaaatgcaaacca

SEQ ID NO: 1130008 - DNA, 15 bp, Homo sapiens
tttgaaatgcaaacc

SEQ ID NO: 1130009 - DNA, 15 bp, Homo sapiens
ctttgaaatgcaaac

SEQ ID NO: 1130010 - DNA, 15 bp, Homo sapiens
tctttgaaatgcaaa

SEQ ID NO: 1130011 - DNA, 15 bp, Homo sapiens
ctctttgaaatgcaa

SEQ ID NO: 1130012 - DNA, 15 bp, Homo sapiens
gctctttgaaatgca

SEQ ID NO: 1130013 - DNA, 15 bp, Homo sapiens
tgctctttgaaatgc

SEQ ID NO: 1130014 - DNA, 15 bp, Homo sapiens
ttgctctttgaaatg

SEQ ID NO: 1130015 - DNA, 15 bp, Homo sapiens
cttgctctttgaaat

SEQ ID NO: 1130016 - DNA, 15 bp, Homo sapiens
tcttgctctttgaaa

SEQ ID NO: 1130017 - DNA, 15 bp, Homo sapiens
ctcttgctctttgaa

SEQ ID NO: 1130018 - DNA, 15 bp, Homo sapiens
gctcttgctctttga

SEQ ID NO: 1130019 - DNA, 15 bp, Homo sapiens
tgctcttgctctttg

SEQ ID NO: 1130020 - DNA, 15 bp, Homo sapiens
atgctcttgctcttt

SEQ ID NO: 1130021 - DNA, 15 bp, Homo sapiens
tatgctcttgctctt

SEQ ID NO: 1130022 - DNA, 15 bp, Homo sapiens
ctatgctcttgctct

SEQ ID NO: 1130023 - DNA, 15 bp, Homo sapiens
cctatgctcttgctc

SEQ ID NO: 1130024 - DNA, 15 bp, Homo sapiens
gcctatgctcttgct

SEQ ID NO: 1130025 - DNA, 15 bp, Homo sapiens
agcctatgctcttgc

SEQ ID NO: 1130026 - DNA, 15 bp, Homo sapiens
gagcctatgctcttg

SEQ ID NO: 1130027 - DNA, 15 bp, Homo sapiens
agagcctatgctctt

SEQ ID NO: 1130028 - DNA, 15 bp, Homo sapiens
aagagcctatgctct

SEQ ID NO: 1130029 - DNA, 15 bp, Homo sapiens
caagagcctatgctc

SEQ ID NO: 1130030 - DNA, 15 bp, Homo sapiens
acaagagcctatgct

SEQ ID NO: 1130031 - DNA, 15 bp, Homo sapiens
cacaagagcctatgc

SEQ ID NO: 1130032 - DNA, 15 bp, Homo sapiens
gcacaagagcctatg

SEQ ID NO: 1130033 - DNA, 15 bp, Homo sapiens
agcacaagagcctat

SEQ ID NO: 1130034 - DNA, 15 bp, Homo sapiens
cagcacaagagccta

SEQ ID NO: 1130035 - DNA, 15 bp, Homo sapiens
ccagcacaagagcct

SEQ ID NO: 1130036 - DNA, 15 bp, Homo sapiens
cccagcacaagagcc

SEQ ID NO: 1130037 - DNA, 15 bp, Homo sapiens
tcccagcacaagagc

SEQ ID NO: 1130038 - DNA, 15 bp, Homo sapiens
ctcccagcacaagag

SEQ ID NO: 1130039 - DNA, 15 bp, Homo sapiens
cctcccagcacaaga

SEQ ID NO: 1130040 - DNA, 15 bp, Homo sapiens
acctcccagcacaag

SEQ ID NO: 1130041 - DNA, 15 bp, Homo sapiens
cacctcccagcacaa

SEQ ID NO: 1130042 - DNA, 15 bp, Homo sapiens
ccacctcccagcaca

SEQ ID NO: 1130043 - DNA, 15 bp, Homo sapiens
gccacctcccagcac

SEQ ID NO: 1130044 - DNA, 15 bp, Homo sapiens
ggccacctcccagca

SEQ ID NO: 1130045 - DNA, 15 bp, Homo sapiens
tggccacctcccagc

SEQ ID NO: 1130046 - DNA, 15 bp, Homo sapiens
ctggccacctcccag

SEQ ID NO: 1130047 - DNA, 15 bp, Homo sapiens
actggccacctccca

SEQ ID NO: 1130048 - DNA, 15 bp, Homo sapiens
aactggccacctccc

SEQ ID NO: 1130049 - DNA, 15 bp, Homo sapiens
aaactggccacctcc

SEQ ID NO: 1130050 - DNA, 15 bp, Homo sapiens
gaaactggccacctc

SEQ ID NO: 1130051 - DNA, 15 bp, Homo sapiens
ggaaactggccacct

SEQ ID NO: 1130052 - DNA, 15 bp, Homo sapiens
aggaaactggccacc

SEQ ID NO: 1130053 - DNA, 15 bp, Homo sapiens
caggaaactggccac

SEQ ID NO: 1130054 - DNA, 15 bp, Homo sapiens
ccaggaaactggcca

SEQ ID NO: 1130055 - DNA, 15 bp, Homo sapiens
tccaggaaactggcc

SEQ ID NO: 1130056 - DNA, 15 bp, Homo sapiens
ttccaggaaactggc

SEQ ID NO: 1130057 - DNA, 15 bp, Homo sapiens
tttccaggaaactgg

SEQ ID NO: 1130058 - DNA, 15 bp, Homo sapiens
ctttccaggaaactg

SEQ ID NO: 1130059 - DNA, 15 bp, Homo sapiens
cctttccaggaaact

SEQ ID NO: 1130060 - DNA, 15 bp, Homo sapiens
tcctttccaggaaac

SEQ ID NO: 1130061 - DNA, 15 bp, Homo sapiens
ttcctttccaggaaa

SEQ ID NO: 1130062 - DNA, 15 bp, Homo sapiens
attcctttccaggaa

SEQ ID NO: 1130063 - DNA, 15 bp, Homo sapiens
aattcctttccagga

SEQ ID NO: 1130064 - DNA, 15 bp, Homo sapiens
aaattcctttccagg

SEQ ID NO: 1130065 - DNA, 15 bp, Homo sapiens
taaattcctttccag

SEQ ID NO: 1130066 - DNA, 15 bp, Homo sapiens
ataaattcctttcca

SEQ ID NO: 1130067 - DNA, 15 bp, Homo sapiens
cataaattcctttcc

SEQ ID NO: 1130068 - DNA, 15 bp, Homo sapiens
ccataaattcctttc

SEQ ID NO: 1130069 - DNA, 15 bp, Homo sapiens
tccataaattccttt

SEQ ID NO: 1130070 - DNA, 15 bp, Homo sapiens
ctccataaattcctt

SEQ ID NO: 1130071 - DNA, 15 bp, Homo sapiens
actccataaattcct

SEQ ID NO: 1130072 - DNA, 15 bp, Homo sapiens
gactccataaattcc

SEQ ID NO: 1130073 - DNA, 15 bp, Homo sapiens
agactccataaattc

SEQ ID NO: 1130074 - DNA, 15 bp, Homo sapiens
cagactccataaatt

SEQ ID NO: 1130075 - DNA, 15 bp, Homo sapiens
tcagactccataaat

SEQ ID NO: 1130076 - DNA, 15 bp, Homo sapiens
ttcagactccataaa

SEQ ID NO: 1130077 - DNA, 15 bp, Homo sapiens
tttcagactccataa

SEQ ID NO: 1130078 - DNA, 15 bp, Homo sapiens
ctttcagactccata

SEQ ID NO: 1130079 - DNA, 15 bp, Homo sapiens
tctttcagactccat

SEQ ID NO: 1130080 - DNA, 15 bp, Homo sapiens
ctctttcagactcca

SEQ ID NO: 1130081 - DNA, 15 bp, Homo sapiens
cctctttcagactcc

SEQ ID NO: 1130082 - DNA, 15 bp, Homo sapiens
tcctctttcagactc

SEQ ID NO: 1130083 - DNA, 15 bp, Homo sapiens
ttcctctttcagact

SEQ ID NO: 1130084 - DNA, 15 bp, Homo sapiens
attcctctttcagac

SEQ ID NO: 1130085 - DNA, 15 bp, Homo sapiens
aattcctctttcaga

SEQ ID NO: 1130086 - DNA, 15 bp, Homo sapiens
taattcctctttcag

SEQ ID NO: 1130087 - DNA, 15 bp, Homo sapiens
ctaattcctctttca

SEQ ID NO: 1130088 - DNA, 15 bp, Homo sapiens
actaattcctctttc

SEQ ID NO: 1130089 - DNA, 15 bp, Homo sapiens
tactaattcctcttt

SEQ ID NO: 1130090 - DNA, 15 bp, Homo sapiens
gtactaattcctctt

SEQ ID NO: 1130091 - DNA, 15 bp, Homo sapiens
tgtactaattcctct

SEQ ID NO: 1130092 - DNA, 15 bp, Homo sapiens
ttgtactaattcctc

SEQ ID NO: 1130093 - DNA, 15 bp, Homo sapiens
tttgtactaattcct

SEQ ID NO: 1130094 - DNA, 15 bp, Homo sapiens
atttgtactaattcc

SEQ ID NO: 1130095 - DNA, 15 bp, Homo sapiens
aatttgtactaattc

SEQ ID NO: 1130096 - DNA, 15 bp, Homo sapiens
taatttgtactaatt

SEQ ID NO: 1130097 - DNA, 15 bp, Homo sapiens
ataatttgtactaat

SEQ ID NO: 1130098 - DNA, 15 bp, Homo sapiens
tataatttgtactaa

SEQ ID NO: 1130099 - DNA, 15 bp, Homo sapiens
atataatttgtacta

SEQ ID NO: 1130100 - DNA, 15 bp, Homo sapiens
aatataatttgtact

SEQ ID NO: 1130101 - DNA, 15 bp, Homo sapiens
aaatataatttgtac

SEQ ID NO: 1130102 - DNA, 15 bp, Homo sapiens
aaaatataatttgta

SEQ ID NO: 1130103 - DNA, 15 bp, Homo sapiens
gaaaatataatttgt

SEQ ID NO: 1130104 - DNA, 15 bp, Homo sapiens
tgaaaatataatttg

SEQ ID NO: 1130105 - DNA, 15 bp, Homo sapiens
ttgaaaatataattt

SEQ ID NO: 1130106 - DNA, 15 bp, Homo sapiens
tttgaaaatataatt

SEQ ID NO: 1130107 - DNA, 15 bp, Homo sapiens
ttatttgaaaatata

SEQ ID NO: 1130108 - DNA, 15 bp, Homo sapiens
cttatttgaaaatat

SEQ ID NO: 1130109 - DNA, 15 bp, Homo sapiens
tcttatttgaaaata

SEQ ID NO: 1130110 - DNA, 15 bp, Homo sapiens
atcttatttgaaaat

SEQ ID NO: 1130111 - DNA, 15 bp, Homo sapiens
tatcttatttgaaaa

SEQ ID NO: 1130112 - DNA, 15 bp, Homo sapiens
gtatcttatttgaaa

SEQ ID NO: 1130113 - DNA, 15 bp, Homo sapiens
agtatcttatttgaa

SEQ ID NO: 1130114 - DNA, 15 bp, Homo sapiens
aagtatcttatttga

SEQ ID NO: 1130115 - DNA, 15 bp, Homo sapiens
caagtatcttatttg

SEQ ID NO: 1130116 - DNA, 15 bp, Homo sapiens
tcaagtatcttattt

SEQ ID NO: 1130117 - DNA, 15 bp, Homo sapiens
ttcaagtatcttatt

SEQ ID NO: 1130118 - DNA, 15 bp, Homo sapiens
tttcaagtatcttat

SEQ ID NO: 1130119 - DNA, 15 bp, Homo sapiens
ctttcaagtatctta

SEQ ID NO: 1130120 - DNA, 15 bp, Homo sapiens
actttcaagtatctt

SEQ ID NO: 1130121 - DNA, 15 bp, Homo sapiens
aactttcaagtatct

SEQ ID NO: 1130122 - DNA, 15 bp, Homo sapiens
taactttcaagtatc

SEQ ID NO: 1130123 - DNA, 15 bp, Homo sapiens
ataactttcaagtat

SEQ ID NO: 1130124 - DNA, 15 bp, Homo sapiens
aataactttcaagta

SEQ ID NO: 1130125 - DNA, 15 bp, Homo sapiens
caataactttcaagt

SEQ ID NO: 1130126 - DNA, 15 bp, Homo sapiens
tcaataactttcaag

SEQ ID NO: 1130127 - DNA, 15 bp, Homo sapiens
atcaataactttcaa

SEQ ID NO: 1130128 - DNA, 15 bp, Homo sapiens
catcaataactttca

SEQ ID NO: 1130129 - DNA, 15 bp, Homo sapiens
tcatcaataactttc

SEQ ID NO: 1130130 - DNA, 15 bp, Homo sapiens
gtcatcaataacttt

SEQ ID NO: 1130131 - DNA, 15 bp, Homo sapiens
tgtcatcaataactt

SEQ ID NO: 1130132 - DNA, 15 bp, Homo sapiens
ctgtcatcaataact

SEQ ID NO: 1130133 - DNA, 15 bp, Homo sapiens
cctgtcatcaataac

SEQ ID NO: 1130134 - DNA, 15 bp, Homo sapiens
ccctgtcatcaataa

SEQ ID NO: 1130135 - DNA, 15 bp, Homo sapiens
tccctgtcatcaata

SEQ ID NO: 1130136 - DNA, 15 bp, Homo sapiens
ttccctgtcatcaat

SEQ ID NO: 1130137 - DNA, 15 bp, Homo sapiens
tttccctgtcatcaa

SEQ ID NO: 1130138 - DNA, 15 bp, Homo sapiens
ttttccctgtcatca

SEQ ID NO: 1130139 - DNA, 15 bp, Homo sapiens
cttttccctgtcatc

SEQ ID NO: 1130140 - DNA, 15 bp, Homo sapiens
tcttttccctgtcat

SEQ ID NO: 1130141 - DNA, 15 bp, Homo sapiens
atcttttccctgtca

SEQ ID NO: 1130142 - DNA, 15 bp, Homo sapiens
aatcttttccctgtc

SEQ ID NO: 1130143 - DNA, 15 bp, Homo sapiens
caatcttttccctgt

SEQ ID NO: 1130144 - DNA, 15 bp, Homo sapiens
acaatcttttccctg

SEQ ID NO: 1130145 - DNA, 15 bp, Homo sapiens
gacaatcttttccct

SEQ ID NO: 1130146 - DNA, 15 bp, Homo sapiens
agacaatcttttccc

SEQ ID NO: 1130147 - DNA, 15 bp, Homo sapiens
tagacaatcttttcc

SEQ ID NO: 1130148 - DNA, 15 bp, Homo sapiens
ttagacaatcttttc

SEQ ID NO: 1130149 - DNA, 15 bp, Homo sapiens
tttagacaatctttt

SEQ ID NO: 1130150 - DNA, 15 bp, Homo sapiens
ctttagacaatcttt

SEQ ID NO: 1130151 - DNA, 15 bp, Homo sapiens
tctttagacaatctt

SEQ ID NO: 1130152 - DNA, 15 bp, Homo sapiens
ctctttagacaatct

SEQ ID NO: 1130153 - DNA, 15 bp, Homo sapiens
cctctttagacaatc

SEQ ID NO: 1130154 - DNA, 15 bp, Homo sapiens
ccctctttagacaat

SEQ ID NO: 1130155 - DNA, 15 bp, Homo sapiens
gccctctttagacaa

SEQ ID NO: 1130156 - DNA, 15 bp, Homo sapiens
agccctctttagaca

SEQ ID NO: 1130157 - DNA, 15 bp, Homo sapiens
aagccctctttagac

SEQ ID NO: 1130158 - DNA, 15 bp, Homo sapiens
caagccctctttaga

SEQ ID NO: 1130159 - DNA, 15 bp, Homo sapiens
tcaagccctctttag

SEQ ID NO: 1130160 - DNA, 15 bp, Homo sapiens
ttcaagccctcttta

SEQ ID NO: 1130161 - DNA, 15 bp, Homo sapiens
tttcaagccctcttt

SEQ ID NO: 1130162 - DNA, 15 bp, Homo sapiens
atttcaagccctctt

SEQ ID NO: 1130163 - DNA, 15 bp, Homo sapiens
aatttcaagccctct

SEQ ID NO: 1130164 - DNA, 15 bp, Homo sapiens
caatttcaagccctc

SEQ ID NO: 1130165 - DNA, 15 bp, Homo sapiens
ccaatttcaagccct

SEQ ID NO: 1130166 - DNA, 15 bp, Homo sapiens
cccaatttcaagccc

SEQ ID NO: 1130167 - DNA, 15 bp, Homo sapiens
ccccaatttcaagcc

SEQ ID NO: 1130168 - DNA, 15 bp, Homo sapiens
tccccaatttcaagc

SEQ ID NO: 1130169 - DNA, 15 bp, Homo sapiens
ttccccaatttcaag

SEQ ID NO: 1130170 - DNA, 15 bp, Homo sapiens
tttccccaatttcaa

SEQ ID NO: 1130171 - DNA, 15 bp, Homo sapiens
atttccccaatttca

SEQ ID NO: 1130172 - DNA, 15 bp, Homo sapiens
tatttccccaatttc

SEQ ID NO: 1130173 - DNA, 15 bp, Homo sapiens
ttatttccccaattt

SEQ ID NO: 1130174 - DNA, 15 bp, Homo sapiens
attatttccccaatt

SEQ ID NO: 1130175 - DNA, 15 bp, Homo sapiens
aattatttccccaat

SEQ ID NO: 1130176 - DNA, 15 bp, Homo sapiens
caattatttccccaa

SEQ ID NO: 1130177 - DNA, 15 bp, Homo sapiens
tcaattatttcccca

SEQ ID NO: 1130178 - DNA, 15 bp, Homo sapiens
ctcaattatttcccc

SEQ ID NO: 1130179 - DNA, 15 bp, Homo sapiens
cctcaattatttccc

SEQ ID NO: 1130180 - DNA, 15 bp, Homo sapiens
gcctcaattatttcc

SEQ ID NO: 1130181 - DNA, 15 bp, Homo sapiens
agcctcaattatttc

SEQ ID NO: 1130182 - DNA, 15 bp, Homo sapiens
gagcctcaattattt

SEQ ID NO: 1130183 - DNA, 15 bp, Homo sapiens
tgagcctcaattatt

SEQ ID NO: 1130184 - DNA, 15 bp, Homo sapiens
ctgagcctcaattat

SEQ ID NO: 1130185 - DNA, 15 bp, Homo sapiens
actgagcctcaatta

SEQ ID NO: 1130186 - DNA, 15 bp, Homo sapiens
cactgagcctcaatt

SEQ ID NO: 1130187 - DNA, 15 bp, Homo sapiens
tcactgagcctcaat

SEQ ID NO: 1130188 - DNA, 15 bp, Homo sapiens
gtcactgagcctcaa

SEQ ID NO: 1130189 - DNA, 15 bp, Homo sapiens
tgtcactgagcctca

SEQ ID NO: 1130190 - DNA, 15 bp, Homo sapiens
ttgtcactgagcctc

SEQ ID NO: 1130191 - DNA, 15 bp, Homo sapiens
ctttgtcactgagcc

SEQ ID NO: 1130192 - DNA, 15 bp, Homo sapiens
cctttgtcactgagc

SEQ ID NO: 1130193 - DNA, 15 bp, Homo sapiens
tcctttgtcactgag

SEQ ID NO: 1130194 - DNA, 15 bp, Homo sapiens
ctcctttgtcactga

SEQ ID NO: 1130195 - DNA, 15 bp, Homo sapiens
tctcctttgtcactg

SEQ ID NO: 1130196 - DNA, 15 bp, Homo sapiens
ttctcctttgtcact

SEQ ID NO: 1130197 - DNA, 15 bp, Homo sapiens
cttctcctttgtcac

SEQ ID NO: 1130198 - DNA, 15 bp, Homo sapiens
tcttctcctttgtca

SEQ ID NO: 1130199 - DNA, 15 bp, Homo sapiens
atcttctcctttgtc

SEQ ID NO: 1130200 - DNA, 15 bp, Homo sapiens
aatcttctcctttgt

SEQ ID NO: 1130201 - DNA, 15 bp, Homo sapiens
taatcttctcctttg

SEQ ID NO: 1130202 - DNA, 15 bp, Homo sapiens
gtaatcttctccttt

SEQ ID NO: 1130203 - DNA, 15 bp, Homo sapiens
tgtaatcttctcctt

SEQ ID NO: 1130204 - DNA, 15 bp, Homo sapiens
ttgtaatcttctcct

SEQ ID NO: 1130205 - DNA, 15 bp, Homo sapiens
gttgtaatcttctcc

SEQ ID NO: 1130206 - DNA, 15 bp, Homo sapiens
agttgtaatcttctc

SEQ ID NO: 1130207 - DNA, 15 bp, Homo sapiens
aagttgtaatcttct

SEQ ID NO: 1130208 - DNA, 15 bp, Homo sapiens
gaagttgtaatcttc

SEQ ID NO: 1130209 - DNA, 15 bp, Homo sapiens
tgaagttgtaatctt

SEQ ID NO: 1130210 - DNA, 15 bp, Homo sapiens
ttgaagttgtaatct

SEQ ID NO: 1130211 - DNA, 15 bp, Homo sapiens
tttgaagttgtaatc

SEQ ID NO: 1130212 - DNA, 15 bp, Homo sapiens
ttttgaagttgtaat

SEQ ID NO: 1130213 - DNA, 15 bp, Homo sapiens
tttttgaagttgtaa

SEQ ID NO: 1130214 - DNA, 15 bp, Homo sapiens
atttttgaagttgta

SEQ ID NO: 1130215 - DNA, 15 bp, Homo sapiens
catttttgaagttgt

SEQ ID NO: 1130216 - DNA, 15 bp, Homo sapiens
tcatttttgaagttg

SEQ ID NO: 1130217 - DNA, 15 bp, Homo sapiens
ttcatttttgaagtt

SEQ ID NO: 1130218 - DNA, 15 bp, Homo sapiens
attcatttttgaagt

SEQ ID NO: 1130219 - DNA, 15 bp, Homo sapiens
tattcatttttgaag

SEQ ID NO: 1130220 - DNA, 15 bp, Homo sapiens
ttattcatttttgaa

SEQ ID NO: 1130221 - DNA, 15 bp, Homo sapiens
tttattcatttttga

SEQ ID NO: 1130222 - DNA, 15 bp, Homo sapiens
atttattcatttttg

SEQ ID NO: 1130223 - DNA, 15 bp, Homo sapiens
tatttattcattttt

SEQ ID NO: 1130224 - DNA, 15 bp, Homo sapiens
ttatttattcatttt

SEQ ID NO: 1130225 - DNA, 15 bp, Homo sapiens
tttatttattcattt

SEQ ID NO: 1130226 - DNA, 15 bp, Homo sapiens
tatttatttattcat

SEQ ID NO: 1130227 - DNA, 15 bp, Homo sapiens
gttatttatttattc

SEQ ID NO: 1130228 - DNA, 15 bp, Homo sapiens
tgttatttatttatt

SEQ ID NO: 1130229 - DNA, 15 bp, Homo sapiens
atgttatttatttat

SEQ ID NO: 1130230 - DNA, 15 bp, Homo sapiens
aatgttatttattta

SEQ ID NO: 1130231 - DNA, 15 bp, Homo sapiens
caatgttatttattt

SEQ ID NO: 1130232 - DNA, 15 bp, Homo sapiens
gcaatgttatttatt

SEQ ID NO: 1130233 - DNA, 15 bp, Homo sapiens
tgcaatgttatttat

SEQ ID NO: 1130234 - DNA, 15 bp, Homo sapiens
atgcaatgttattta

SEQ ID NO: 1130235 - DNA, 15 bp, Homo sapiens
catgcaatgttattt

SEQ ID NO: 1130236 - DNA, 15 bp, Homo sapiens
acatgcaatgttatt

SEQ ID NO: 1130237 - DNA, 15 bp, Homo sapiens
aacatgcaatgttat

SEQ ID NO: 1130238 - DNA, 15 bp, Homo sapiens
aaacatgcaatgtta

SEQ ID NO: 1130239 - DNA, 15 bp, Homo sapiens
taaacatgcaatgtt

SEQ ID NO: 1130240 - DNA, 15 bp, Homo sapiens
ataaacatgcaatgt

SEQ ID NO: 1130241 - DNA, 15 bp, Homo sapiens
aataaacatgcaatg

SEQ ID NO: 1130242 - DNA, 15 bp, Homo sapiens
aaataaacatgcaat

SEQ ID NO: 1130243 - DNA, 15 bp, Homo sapiens
aaaataaacatgcaa

SEQ ID NO: 1130244 - DNA, 15 bp, Homo sapiens
taaaataaacatgca

SEQ ID NO: 1130245 - DNA, 15 bp, Homo sapiens
gtaaaataaacatgc

SEQ ID NO: 1130246 - DNA, 15 bp, Homo sapiens
tgtaaaataaacatg

SEQ ID NO: 1130247 - DNA, 15 bp, Homo sapiens
ttgtaaaataaacat

SEQ ID NO: 1130248 - DNA, 15 bp, Homo sapiens
gttgtaaaataaaca

SEQ ID NO: 1130249 - DNA, 15 bp, Homo sapiens
tgttgtaaaataaac

SEQ ID NO: 1130250 - DNA, 15 bp, Homo sapiens
gtgttgtaaaataaa

SEQ ID NO: 1130251 - DNA, 15 bp, Homo sapiens
ggtgttgtaaaataa

SEQ ID NO: 1130252 - DNA, 15 bp, Homo sapiens
tggtgttgtaaaata

SEQ ID NO: 1130253 - DNA, 15 bp, Homo sapiens
ctggtgttgtaaaat

SEQ ID NO: 1130254 - DNA, 15 bp, Homo sapiens
cctggtgttgtaaaa

SEQ ID NO: 1130255 - DNA, 15 bp, Homo sapiens
ccctggtgttgtaaa

SEQ ID NO: 1130256 - DNA, 15 bp, Homo sapiens
cccctggtgttgtaa

SEQ ID NO: 1130257 - DNA, 15 bp, Homo sapiens
ccccctggtgttgta

SEQ ID NO: 1130258 - DNA, 15 bp, Homo sapiens
gccccctggtgttgt

SEQ ID NO: 1130259 - DNA, 15 bp, Homo sapiens
cgccccctggtgttg

SEQ ID NO: 1130260 - DNA, 15 bp, Homo sapiens
tcgccccctggtgtt

SEQ ID NO: 1130261 - DNA, 15 bp, Homo sapiens
atcgccccctggtgt

SEQ ID NO: 1130262 - DNA, 15 bp, Homo sapiens
catcgccccctggtg

SEQ ID NO: 1130263 - DNA, 15 bp, Homo sapiens
tcatcgccccctggt

SEQ ID NO: 1130264 - DNA, 15 bp, Homo sapiens
atcatcgccccctgg

SEQ ID NO: 1130265 - DNA, 15 bp, Homo sapiens
catcatcgccccctg

SEQ ID NO: 1130266 - DNA, 15 bp, Homo sapiens
acatcatcgccccct

SEQ ID NO: 1130267 - DNA, 15 bp, Homo sapiens
gacatcatcgccccc

SEQ ID NO: 1130268 - DNA, 15 bp, Homo sapiens
agacatcatcgcccc

SEQ ID NO: 1130269 - DNA, 15 bp, Homo sapiens
tagacatcatcgccc

SEQ ID NO: 1130270 - DNA, 15 bp, Homo sapiens
gtagacatcatcgcc

SEQ ID NO: 1130271 - DNA, 15 bp, Homo sapiens
cgtagacatcatcgc

SEQ ID NO: 1130272 - DNA, 15 bp, Homo sapiens
acgtagacatcatcg

SEQ ID NO: 1130273 - DNA, 15 bp, Homo sapiens
aacgtagacatcatc

SEQ ID NO: 1130274 - DNA, 15 bp, Homo sapiens
aaacgtagacatcat

SEQ ID NO: 1130275 - DNA, 15 bp, Homo sapiens
aaaacgtagacatca

SEQ ID NO: 1130276 - DNA, 15 bp, Homo sapiens
aaaaacgtagacatc

SEQ ID NO: 1130277 - DNA, 15 bp, Homo sapiens
taaaaacgtagacat

SEQ ID NO: 1130278 - DNA, 15 bp, Homo sapiens
ataaaaacgtagaca

SEQ ID NO: 1130279 - DNA, 15 bp, Homo sapiens
aataaaaacgtagac

SEQ ID NO: 1130280 - DNA, 15 bp, Homo sapiens
gaataaaaacgtaga

SEQ ID NO: 1130281 - DNA, 15 bp, Homo sapiens
agaataaaaacgtag

SEQ ID NO: 1130282 - DNA, 15 bp, Homo sapiens
cagaataaaaacgta

SEQ ID NO: 1130283 - DNA, 15 bp, Homo sapiens
acagaataaaaacgt

SEQ ID NO: 1130284 - DNA, 15 bp, Homo sapiens
tacagaataaaaacg

SEQ ID NO: 1130285 - DNA, 15 bp, Homo sapiens
atacagaataaaaac

SEQ ID NO: 1130286 - DNA, 15 bp, Homo sapiens
gatacagaataaaaa

SEQ ID NO: 1130287 - DNA, 15 bp, Homo sapiens
ggatacagaataaaa

SEQ ID NO: 1130288 - DNA, 15 bp, Homo sapiens
aggatacagaataaa

SEQ ID NO: 1130289 - DNA, 15 bp, Homo sapiens
aaggatacagaataa

SEQ ID NO: 1130290 - DNA, 15 bp, Homo sapiens
aaaggatacagaata

SEQ ID NO: 1130291 - DNA, 15 bp, Homo sapiens
taaaggatacagaat

SEQ ID NO: 1130292 - DNA, 15 bp, Homo sapiens
ataaaggatacagaa

SEQ ID NO: 1130293 - DNA, 15 bp, Homo sapiens
gataaaggatacaga

SEQ ID NO: 1130294 - DNA, 15 bp, Homo sapiens
cgataaaggatacag

SEQ ID NO: 1130295 - DNA, 15 bp, Homo sapiens
gcgataaaggataca

SEQ ID NO: 1130296 - DNA, 15 bp, Homo sapiens
agcgataaaggatac

SEQ ID NO: 1130297 - DNA, 15 bp, Homo sapiens
cagcgataaaggata

SEQ ID NO: 1130298 - DNA, 15 bp, Homo sapiens
tcagcgataaaggat

SEQ ID NO: 1130299 - DNA, 15 bp, Homo sapiens
gtcagcgataaagga

SEQ ID NO: 1130300 - DNA, 15 bp, Homo sapiens
tgtcagcgataaagg

SEQ ID NO: 1130301 - DNA, 15 bp, Homo sapiens
ttgtcagcgataaag

SEQ ID NO: 1130302 - DNA, 15 bp, Homo sapiens
tttgtcagcgataaa

SEQ ID NO: 1130303 - DNA, 15 bp, Homo sapiens
ctttgtcagcgataa

SEQ ID NO: 1130304 - DNA, 15 bp, Homo sapiens
tctttgtcagcgata

SEQ ID NO: 1130305 - DNA, 15 bp, Homo sapiens
atctttgtcagcgat

SEQ ID NO: 1130306 - DNA, 15 bp, Homo sapiens
aatctttgtcagcga

SEQ ID NO: 1130307 - DNA, 15 bp, Homo sapiens
aaatctttgtcagcg

SEQ ID NO: 1130308 - DNA, 15 bp, Homo sapiens
caaatctttgtcagc

SEQ ID NO: 1130309 - DNA, 15 bp, Homo sapiens
ccaaatctttgtcag

SEQ ID NO: 1130310 - DNA, 15 bp, Homo sapiens
accaaatctttgtca

SEQ ID NO: 1130311 - DNA, 15 bp, Homo sapiens
gaccaaatctttgtc

SEQ ID NO: 1130312 - DNA, 15 bp, Homo sapiens
agaccaaatctttgt

SEQ ID NO: 1130313 - DNA, 15 bp, Homo sapiens
gagaccaaatctttg

SEQ ID NO: 1130314 - DNA, 15 bp, Homo sapiens
agagaccaaatcttt

SEQ ID NO: 1130315 - DNA, 15 bp, Homo sapiens
cagagaccaaatctt

SEQ ID NO: 1130316 - DNA, 15 bp, Homo sapiens
gcagagaccaaatct

SEQ ID NO: 1130317 - DNA, 15 bp, Homo sapiens
tgcagagaccaaatc

SEQ ID NO: 1130318 - DNA, 15 bp, Homo sapiens
ttgcagagaccaaat

SEQ ID NO: 1130319 - DNA, 15 bp, Homo sapiens
attgcagagaccaaa

SEQ ID NO: 1130320 - DNA, 15 bp, Homo sapiens
aattgcagagaccaa

SEQ ID NO: 1130321 - DNA, 15 bp, Homo sapiens
aaattgcagagacca

SEQ ID NO: 1130322 - DNA, 15 bp, Homo sapiens
aaaattgcagagacc

SEQ ID NO: 1130323 - DNA, 15 bp, Homo sapiens
taaaattgcagagac

SEQ ID NO: 1130324 - DNA, 15 bp, Homo sapiens
gtaaaattgcagaga

SEQ ID NO: 1130325 - DNA, 15 bp, Homo sapiens
ggtaaaattgcagag

SEQ ID NO: 1130326 - DNA, 15 bp, Homo sapiens
aggtaaaattgcaga

SEQ ID NO: 1130327 - DNA, 15 bp, Homo sapiens
aaggtaaaattgcag

SEQ ID NO: 1130328 - DNA, 15 bp, Homo sapiens
taaggtaaaattgca

SEQ ID NO: 1130329 - DNA, 15 bp, Homo sapiens
ataaggtaaaattgc

SEQ ID NO: 1130330 - DNA, 15 bp, Homo sapiens
aataaggtaaaattg

SEQ ID NO: 1130331 - DNA, 15 bp, Homo sapiens
caataaggtaaaatt

SEQ ID NO: 1130332 - DNA, 15 bp, Homo sapiens
acaataaggtaaaat

SEQ ID NO: 1130333 - DNA, 15 bp, Homo sapiens
aacaataaggtaaaa

SEQ ID NO: 1130334 - DNA, 15 bp, Homo sapiens
aaacaataaggtaaa

SEQ ID NO: 1130335 - DNA, 15 bp, Homo sapiens
gaaacaataaggtaa

SEQ ID NO: 1130336 - DNA, 15 bp, Homo sapiens
agaaacaataaggta

SEQ ID NO: 1130337 - DNA, 15 bp, Homo sapiens
gagaaacaataaggt

SEQ ID NO: 1130338 - DNA, 15 bp, Homo sapiens
tgagaaacaataagg

SEQ ID NO: 1130339 - DNA, 15 bp, Homo sapiens
ctgagaaacaataag

SEQ ID NO: 1130340 - DNA, 15 bp, Homo sapiens
tctgagaaacaataa

SEQ ID NO: 1130341 - DNA, 15 bp, Homo sapiens
atctgagaaacaata

SEQ ID NO: 1130342 - DNA, 15 bp, Homo sapiens
catctgagaaacaat

SEQ ID NO: 1130343 - DNA, 15 bp, Homo sapiens
tcatctgagaaacaa

SEQ ID NO: 1130344 - DNA, 15 bp, Homo sapiens
gtcatctgagaaaca

SEQ ID NO: 1130345 - DNA, 15 bp, Homo sapiens
ggtcatctgagaaac

SEQ ID NO: 1130346 - DNA, 15 bp, Homo sapiens
tggtcatctgagaaa

SEQ ID NO: 1130347 - DNA, 15 bp, Homo sapiens
ttggtcatctgagaa

SEQ ID NO: 1130348 - DNA, 15 bp, Homo sapiens
cttggtcatctgaga

SEQ ID NO: 1130349 - DNA, 15 bp, Homo sapiens
ccttggtcatctgag

SEQ ID NO: 1130350 - DNA, 15 bp, Homo sapiens
cccttggtcatctga

SEQ ID NO: 1130351 - DNA, 15 bp, Homo sapiens
ccccttggtcatctg

SEQ ID NO: 1130352 - DNA, 15 bp, Homo sapiens
accccttggtcatct

SEQ ID NO: 1130353 - DNA, 15 bp, Homo sapiens
aaccccttggtcatc

SEQ ID NO: 1130354 - DNA, 15 bp, Homo sapiens
caaccccttggtcat

SEQ ID NO: 1130355 - DNA, 15 bp, Homo sapiens
ccaaccccttggtca

SEQ ID NO: 1130356 - DNA, 15 bp, Homo sapiens
gccaaccccttggtc

SEQ ID NO: 1130357 - DNA, 15 bp, Homo sapiens
agccaaccccttggt

SEQ ID NO: 1130358 - DNA, 15 bp, Homo sapiens
aagccaaccccttgg

SEQ ID NO: 1130359 - DNA, 15 bp, Homo sapiens
taagccaaccccttg

SEQ ID NO: 1130360 - DNA, 15 bp, Homo sapiens
ttaagccaacccctt

SEQ ID NO: 1130361 - DNA, 15 bp, Homo sapiens
attaagccaacccct

SEQ ID NO: 1130362 - DNA, 15 bp, Homo sapiens
aattaagccaacccc

SEQ ID NO: 1130363 - DNA, 15 bp, Homo sapiens
aaattaagccaaccc

SEQ ID NO: 1130364 - DNA, 15 bp, Homo sapiens
caaattaagccaacc

SEQ ID NO: 1130365 - DNA, 15 bp, Homo sapiens
acaaattaagccaac

SEQ ID NO: 1130366 - DNA, 15 bp, Homo sapiens
aacaaattaagccaa

SEQ ID NO: 1130367 - DNA, 15 bp, Homo sapiens
gaacaaattaagcca

SEQ ID NO: 1130368 - DNA, 15 bp, Homo sapiens
agaacaaattaagcc

SEQ ID NO: 1130369 - DNA, 15 bp, Homo sapiens
cagaacaaattaagc

SEQ ID NO: 1130370 - DNA, 15 bp, Homo sapiens
acagaacaaattaag

SEQ ID NO: 1130371 - DNA, 15 bp, Homo sapiens
aacagaacaaattaa

SEQ ID NO: 1130372 - DNA, 15 bp, Homo sapiens
aaacagaacaaatta

SEQ ID NO: 1130373 - DNA, 15 bp, Homo sapiens
taaacagaacaaatt

SEQ ID NO: 1130374 - DNA, 15 bp, Homo sapiens
ttaaacagaacaaat

SEQ ID NO: 1130375 - DNA, 15 bp, Homo sapiens
tttaaacagaacaaa

SEQ ID NO: 1130376 - DNA, 15 bp, Homo sapiens
gtttaaacagaacaa

SEQ ID NO: 1130377 - DNA, 15 bp, Homo sapiens
agtttaaacagaaca

SEQ ID NO: 1130378 - DNA, 15 bp, Homo sapiens
aagtttaaacagaac

SEQ ID NO: 1130379 - DNA, 15 bp, Homo sapiens
taagtttaaacagaa

SEQ ID NO: 1130380 - DNA, 15 bp, Homo sapiens
ataagtttaaacaga

SEQ ID NO: 1130381 - DNA, 15 bp, Homo sapiens
aataagtttaaacag

SEQ ID NO: 1130382 - DNA, 15 bp, Homo sapiens
caataagtttaaaca

SEQ ID NO: 1130383 - DNA, 15 bp, Homo sapiens
gcaataagtttaaac

SEQ ID NO: 1130384 - DNA, 15 bp, Homo sapiens
tgcaataagtttaaa

SEQ ID NO: 1130385 - DNA, 15 bp, Homo sapiens
ttgcaataagtttaa

SEQ ID NO: 1130386 - DNA, 15 bp, Homo sapiens
cttgcaataagttta

SEQ ID NO: 1130387 - DNA, 15 bp, Homo sapiens
acttgcaataagttt

SEQ ID NO: 1130388 - DNA, 15 bp, Homo sapiens
gacttgcaataagtt

SEQ ID NO: 1130389 - DNA, 15 bp, Homo sapiens
ggacttgcaataagt

SEQ ID NO: 1130390 - DNA, 15 bp, Homo sapiens
aggacttgcaataag

SEQ ID NO: 1130391 - DNA, 15 bp, Homo sapiens
aaggacttgcaataa

SEQ ID NO: 1130392 - DNA, 15 bp, Homo sapiens
gaaggacttgcaata

SEQ ID NO: 1130393 - DNA, 15 bp, Homo sapiens
agaaggacttgcaat

SEQ ID NO: 1130394 - DNA, 15 bp, Homo sapiens
cagaaggacttgcaa

SEQ ID NO: 1130395 - DNA, 15 bp, Homo sapiens
acagaaggacttgca

SEQ ID NO: 1130396 - DNA, 15 bp, Homo sapiens
tacagaaggacttgc

SEQ ID NO: 1130397 - DNA, 15 bp, Homo sapiens
ttacagaaggacttg

SEQ ID NO: 1130398 - DNA, 15 bp, Homo sapiens
attacagaaggactt

SEQ ID NO: 1130399 - DNA, 15 bp, Homo sapiens
aattacagaaggact

SEQ ID NO: 1130400 - DNA, 15 bp, Homo sapiens
aaattacagaaggac

SEQ ID NO: 1130401 - DNA, 15 bp, Homo sapiens
gaaattacagaagga

SEQ ID NO: 1130402 - DNA, 15 bp, Homo sapiens
ggaaattacagaagg

SEQ ID NO: 1130403 - DNA, 15 bp, Homo sapiens
aggaaattacagaag

SEQ ID NO: 1130404 - DNA, 15 bp, Homo sapiens
taggaaattacagaa

SEQ ID NO: 1130405 - DNA, 15 bp, Homo sapiens
ttaggaaattacaga

SEQ ID NO: 1130406 - DNA, 15 bp, Homo sapiens
attaggaaattacag

SEQ ID NO: 1130407 - DNA, 15 bp, Homo sapiens
cattaggaaattaca

SEQ ID NO: 1130408 - DNA, 15 bp, Homo sapiens
acattaggaaattac

SEQ ID NO: 1130409 - DNA, 15 bp, Homo sapiens
aacattaggaaatta

SEQ ID NO: 1130410 - DNA, 15 bp, Homo sapiens
aaacattaggaaatt

SEQ ID NO: 1130411 - DNA, 15 bp, Homo sapiens
aaaacattaggaaat

SEQ ID NO: 1130412 - DNA, 15 bp, Homo sapiens
gaaaacattaggaaa

SEQ ID NO: 1130413 - DNA, 15 bp, Homo sapiens
tgaaaacattaggaa

SEQ ID NO: 1130414 - DNA, 15 bp, Homo sapiens
atgaaaacattagga

SEQ ID NO: 1130415 - DNA, 15 bp, Homo sapiens
tatgaaaacattagg

SEQ ID NO: 1130416 - DNA, 15 bp, Homo sapiens
ttatgaaaacattag

SEQ ID NO: 1130417 - DNA, 15 bp, Homo sapiens
attatgaaaacatta

SEQ ID NO: 1130418 - DNA, 15 bp, Homo sapiens
cattatgaaaacatt

SEQ ID NO: 1130419 - DNA, 15 bp, Homo sapiens
acattatgaaaacat

SEQ ID NO: 1130420 - DNA, 15 bp, Homo sapiens
cacattatgaaaaca

SEQ ID NO: 1130421 - DNA, 15 bp, Homo sapiens
acacattatgaaaac

SEQ ID NO: 1130422 - DNA, 15 bp, Homo sapiens
cacacattatgaaaa

SEQ ID NO: 1130423 - DNA, 15 bp, Homo sapiens
acacacattatgaaa

SEQ ID NO: 1130424 - DNA, 15 bp, Homo sapiens
aacacacattatgaa

SEQ ID NO: 1130425 - DNA, 15 bp, Homo sapiens
caacacacattatga

SEQ ID NO: 1130426 - DNA, 15 bp, Homo sapiens
acaacacacattatg

SEQ ID NO: 1130427 - DNA, 15 bp, Homo sapiens
cacaacacacattat

SEQ ID NO: 1130428 - DNA, 15 bp, Homo sapiens
tcacaacacacatta

SEQ ID NO: 1130429 - DNA, 15 bp, Homo sapiens
gtcacaacacacatt

SEQ ID NO: 1130430 - DNA, 15 bp, Homo sapiens
ggtcacaacacacat

SEQ ID NO: 1130431 - DNA, 15 bp, Homo sapiens
tggtcacaacacaca

SEQ ID NO: 1130432 - DNA, 15 bp, Homo sapiens
ctggtcacaacacac

SEQ ID NO: 1130433 - DNA, 15 bp, Homo sapiens
tctggtcacaacaca

SEQ ID NO: 1130434 - DNA, 15 bp, Homo sapiens
gtctggtcacaacac

SEQ ID NO: 1130435 - DNA, 15 bp, Homo sapiens
agtctggtcacaaca

SEQ ID NO: 1130436 - DNA, 15 bp, Homo sapiens
gagtctggtcacaac

SEQ ID NO: 1130437 - DNA, 15 bp, Homo sapiens
agagtctggtcacaa

SEQ ID NO: 1130438 - DNA, 15 bp, Homo sapiens
gagagtctggtcaca

SEQ ID NO: 1130439 - DNA, 15 bp, Homo sapiens
ggagagtctggtcac

SEQ ID NO: 1130440 - DNA, 15 bp, Homo sapiens
aggagagtctggtca

SEQ ID NO: 1130441 - DNA, 15 bp, Homo sapiens
aaggagagtctggtc

SEQ ID NO: 1130442 - DNA, 15 bp, Homo sapiens
taaggagagtctggt

SEQ ID NO: 1130443 - DNA, 15 bp, Homo sapiens
ataaggagagtctgg

SEQ ID NO: 1130444 - DNA, 15 bp, Homo sapiens
tataaggagagtctg

SEQ ID NO: 1130445 - DNA, 15 bp, Homo sapiens
ttataaggagagtct

SEQ ID NO: 1130446 - DNA, 15 bp, Homo sapiens
gttataaggagagtc

SEQ ID NO: 1130447 - DNA, 15 bp, Homo sapiens
ggttataaggagagt

SEQ ID NO: 1130448 - DNA, 15 bp, Homo sapiens
gggttataaggagag

SEQ ID NO: 1130449 - DNA, 15 bp, Homo sapiens
ggggttataaggaga

SEQ ID NO: 1130450 - DNA, 15 bp, Homo sapiens
tggggttataaggag

SEQ ID NO: 1130451 - DNA, 15 bp, Homo sapiens
ctggggttataagga

SEQ ID NO: 1130452 - DNA, 15 bp, Homo sapiens
actggggttataagg

SEQ ID NO: 1130453 - DNA, 15 bp, Homo sapiens
aactggggttataag

SEQ ID NO: 1130454 - DNA, 15 bp, Homo sapiens
taactggggttataa

SEQ ID NO: 1130455 - DNA, 15 bp, Homo sapiens
ttaactggggttata

SEQ ID NO: 1130456 - DNA, 15 bp, Homo sapiens
attaactggggttat

SEQ ID NO: 1130457 - DNA, 15 bp, Homo sapiens
tattaactggggtta

SEQ ID NO: 1130458 - DNA, 15 bp, Homo sapiens
ttattaactggggtt

SEQ ID NO: 1130459 - DNA, 15 bp, Homo sapiens
tttattaactggggt

SEQ ID NO: 1130460 - DNA, 15 bp, Homo sapiens
ttttattaactgggg

SEQ ID NO: 1130461 - DNA, 15 bp, Homo sapiens
cttttattaactggg

SEQ ID NO: 1130462 - DNA, 15 bp, Homo sapiens
acttttattaactgg

SEQ ID NO: 1130463 - DNA, 15 bp, Homo sapiens
aacttttattaactg

SEQ ID NO: 1130464 - DNA, 15 bp, Homo sapiens
taacttttattaact

SEQ ID NO: 1130465 - DNA, 15 bp, Homo sapiens
ttaacttttattaac

SEQ ID NO: 1130466 - DNA, 15 bp, Homo sapiens
gttaacttttattaa

SEQ ID NO: 1130467 - DNA, 15 bp, Homo sapiens
tgttaacttttatta

SEQ ID NO: 1130468 - DNA, 15 bp, Homo sapiens
ctgttaacttttatt

SEQ ID NO: 1130469 - DNA, 15 bp, Homo sapiens
cctgttaacttttat

SEQ ID NO: 1130470 - DNA, 15 bp, Homo sapiens
tcctgttaactttta

SEQ ID NO: 1130471 - DNA, 15 bp, Homo sapiens
ttcctgttaactttt

SEQ ID NO: 1130472 - DNA, 15 bp, Homo sapiens
tttcctgttaacttt

SEQ ID NO: 1130473 - DNA, 15 bp, Homo sapiens
ttttcctgttaactt

SEQ ID NO: 1130474 - DNA, 15 bp, Homo sapiens
tttttcctgttaact

SEQ ID NO: 1130475 - DNA, 15 bp, Homo sapiens
ttttttcctgttaac

SEQ ID NO: 1130476 - DNA, 15 bp, Homo sapiens
tttttttcctgttaa

SEQ ID NO: 1130477 - DNA, 15 bp, Homo sapiens
cttctattttttttt

SEQ ID NO: 1130478 - DNA, 15 bp, Homo sapiens
ccttctatttttttt

SEQ ID NO: 1130479 - DNA, 15 bp, Homo sapiens
tccttctattttttt

SEQ ID NO: 1130480 - DNA, 15 bp, Homo sapiens
atccttctatttttt

SEQ ID NO: 1130481 - DNA, 15 bp, Homo sapiens
aatccttctattttt

SEQ ID NO: 1130482 - DNA, 15 bp, Homo sapiens
caatccttctatttt

SEQ ID NO: 1130483 - DNA, 15 bp, Homo sapiens
ccaatccttctattt

SEQ ID NO: 1130484 - DNA, 15 bp, Homo sapiens
tccaatccttctatt

SEQ ID NO: 1130485 - DNA, 15 bp, Homo sapiens
ttccaatccttctat

SEQ ID NO: 1130486 - DNA, 15 bp, Homo sapiens
cttccaatccttcta

SEQ ID NO: 1130487 - DNA, 15 bp, Homo sapiens
tcttccaatccttct

SEQ ID NO: 1130488 - DNA, 15 bp, Homo sapiens
atcttccaatccttc

SEQ ID NO: 1130489 - DNA, 15 bp, Homo sapiens
tatcttccaatcctt

SEQ ID NO: 1130490 - DNA, 15 bp, Homo sapiens
ttatcttccaatcct

SEQ ID NO: 1130491 - DNA, 15 bp, Homo sapiens
tttatcttccaatcc

SEQ ID NO: 1130492 - DNA, 15 bp, Homo sapiens
ctttatcttccaatc

SEQ ID NO: 1130493 - DNA, 15 bp, Homo sapiens
actttatcttccaat

SEQ ID NO: 1130494 - DNA, 15 bp, Homo sapiens
aactttatcttccaa

SEQ ID NO: 1130495 - DNA, 15 bp, Homo sapiens
caactttatcttcca

SEQ ID NO: 1130496 - DNA, 15 bp, Homo sapiens
ccaactttatcttcc

SEQ ID NO: 1130497 - DNA, 15 bp, Homo sapiens
cccaactttatcttc

SEQ ID NO: 1130498 - DNA, 15 bp, Homo sapiens
ccccaactttatctt

SEQ ID NO: 1130499 - DNA, 15 bp, Homo sapiens
tccccaactttatct

SEQ ID NO: 1130500 - DNA, 15 bp, Homo sapiens
ttccccaactttatc

SEQ ID NO: 1130501 - DNA, 15 bp, Homo sapiens
tttccccaactttat

SEQ ID NO: 1130502 - DNA, 15 bp, Homo sapiens
atttccccaacttta

SEQ ID NO: 1130503 - DNA, 15 bp, Homo sapiens
aatttccccaacttt

SEQ ID NO: 1130504 - DNA, 15 bp, Homo sapiens
aaatttccccaactt

SEQ ID NO: 1130505 - DNA, 15 bp, Homo sapiens
gaaatttccccaact

SEQ ID NO: 1130506 - DNA, 15 bp, Homo sapiens
agaaatttccccaac

SEQ ID NO: 1130507 - DNA, 15 bp, Homo sapiens
gagaaatttccccaa

SEQ ID NO: 1130508 - DNA, 15 bp, Homo sapiens
agagaaatttcccca

SEQ ID NO: 1130509 - DNA, 15 bp, Homo sapiens
cagagaaatttcccc

SEQ ID NO: 1130510 - DNA, 15 bp, Homo sapiens
tcagagaaatttccc

SEQ ID NO: 1130511 - DNA, 15 bp, Homo sapiens
ttcagagaaatttcc

SEQ ID NO: 1130512 - DNA, 15 bp, Homo sapiens
tttcagagaaatttc

SEQ ID NO: 1130513 - DNA, 15 bp, Homo sapiens
ctttcagagaaattt

SEQ ID NO: 1130514 - DNA, 15 bp, Homo sapiens
actttcagagaaatt

SEQ ID NO: 1130515 - DNA, 15 bp, Homo sapiens
tactttcagagaaat

SEQ ID NO: 1130516 - DNA, 15 bp, Homo sapiens
ttactttcagagaaa

SEQ ID NO: 1130517 - DNA, 15 bp, Homo sapiens
tttactttcagagaa

SEQ ID NO: 1130518 - DNA, 15 bp, Homo sapiens
ttttactttcagaga

SEQ ID NO: 1130519 - DNA, 15 bp, Homo sapiens
gttttactttcagag

SEQ ID NO: 1130520 - DNA, 15 bp, Homo sapiens
tgttttactttcaga

SEQ ID NO: 1130521 - DNA, 15 bp, Homo sapiens
ttgttttactttcag

SEQ ID NO: 1130522 - DNA, 15 bp, Homo sapiens
tttgttttactttca

SEQ ID NO: 1130523 - DNA, 15 bp, Homo sapiens
ttttgttttactttc

SEQ ID NO: 1130524 - DNA, 15 bp, Homo sapiens
tttttgttttacttt

SEQ ID NO: 1130525 - DNA, 15 bp, Homo sapiens
ctttttgttttactt

SEQ ID NO: 1130526 - DNA, 15 bp, Homo sapiens
tctttttgttttact

SEQ ID NO: 1130527 - DNA, 15 bp, Homo sapiens
atctttttgttttac

SEQ ID NO: 1130528 - DNA, 15 bp, Homo sapiens
tatctttttgtttta

SEQ ID NO: 1130529 - DNA, 15 bp, Homo sapiens
ctatctttttgtttt

SEQ ID NO: 1130530 - DNA, 15 bp, Homo sapiens
tctatctttttgttt

SEQ ID NO: 1130531 - DNA, 15 bp, Homo sapiens
ctctatctttttgtt

SEQ ID NO: 1130532 - DNA, 15 bp, Homo sapiens
tctctatctttttgt

SEQ ID NO: 1130533 - DNA, 15 bp, Homo sapiens
atctctatctttttg

SEQ ID NO: 1130534 - DNA, 15 bp, Homo sapiens
catctctatcttttt

SEQ ID NO: 1130535 - DNA, 15 bp, Homo sapiens
tcatctctatctttt

SEQ ID NO: 1130536 - DNA, 15 bp, Homo sapiens
ttcatctctatcttt

SEQ ID NO: 1130537 - DNA, 15 bp, Homo sapiens
tttcatctctatctt

SEQ ID NO: 1130538 - DNA, 15 bp, Homo sapiens
ttttcatctctatct

SEQ ID NO: 1130539 - DNA, 15 bp, Homo sapiens
cttttcatctctatc

SEQ ID NO: 1130540 - DNA, 15 bp, Homo sapiens
acttttcatctctat

SEQ ID NO: 1130541 - DNA, 15 bp, Homo sapiens
tacttttcatctcta

SEQ ID NO: 1130542 - DNA, 15 bp, Homo sapiens
ctacttttcatctct

SEQ ID NO: 1130543 - DNA, 15 bp, Homo sapiens
cctacttttcatctc

SEQ ID NO: 1130544 - DNA, 15 bp, Homo sapiens
tcctacttttcatct

SEQ ID NO: 1130545 - DNA, 15 bp, Homo sapiens
ttcctacttttcatc

SEQ ID NO: 1130546 - DNA, 15 bp, Homo sapiens
tttcctacttttcat

SEQ ID NO: 1130547 - DNA, 15 bp, Homo sapiens
ttttcctacttttca

SEQ ID NO: 1130548 - DNA, 15 bp, Homo sapiens
tttttcctacttttc

SEQ ID NO: 1130549 - DNA, 15 bp, Homo sapiens
ttttttcctactttt

SEQ ID NO: 1130550 - DNA, 15 bp, Homo sapiens
attttttcctacttt

SEQ ID NO: 1130551 - DNA, 15 bp, Homo sapiens
tattttttcctactt

SEQ ID NO: 1130552 - DNA, 15 bp, Homo sapiens
ttattttttcctact

SEQ ID NO: 1130553 - DNA, 15 bp, Homo sapiens
cttattttttcctac

SEQ ID NO: 1130554 - DNA, 15 bp, Homo sapiens
tcttattttttccta

SEQ ID NO: 1130555 - DNA, 15 bp, Homo sapiens
ttcttattttttcct

SEQ ID NO: 1130556 - DNA, 15 bp, Homo sapiens
tttcttattttttcc

SEQ ID NO: 1130557 - DNA, 15 bp, Homo sapiens
ttttcttattttttc

SEQ ID NO: 1130558 - DNA, 15 bp, Homo sapiens
cttttcttatttttt

SEQ ID NO: 1130559 - DNA, 15 bp, Homo sapiens
tcttttcttattttt

SEQ ID NO: 1130560 - DNA, 15 bp, Homo sapiens
ttcttttcttatttt

SEQ ID NO: 1130561 - DNA, 15 bp, Homo sapiens
tttcttttcttattt

SEQ ID NO: 1130562 - DNA, 15 bp, Homo sapiens
ttttcttttcttatt

SEQ ID NO: 1130563 - DNA, 15 bp, Homo sapiens
tttttcttttcttat

SEQ ID NO: 1130564 - DNA, 15 bp, Homo sapiens
ttttttcttttctta

SEQ ID NO: 1130565 - DNA, 15 bp, Homo sapiens
attttttcttttctt

SEQ ID NO: 1130566 - DNA, 15 bp, Homo sapiens
aattttttcttttct

SEQ ID NO: 1130567 - DNA, 15 bp, Homo sapiens
caattttttcttttc

SEQ ID NO: 1130568 - DNA, 15 bp, Homo sapiens
tcaattttttctttt

SEQ ID NO: 1130569 - DNA, 15 bp, Homo sapiens
ctcaattttttcttt

SEQ ID NO: 1130570 - DNA, 15 bp, Homo sapiens
cctcaattttttctt

SEQ ID NO: 1130571 - DNA, 15 bp, Homo sapiens
ccctcaattttttct

SEQ ID NO: 1130572 - DNA, 15 bp, Homo sapiens
accctcaattttttc

SEQ ID NO: 1130573 - DNA, 15 bp, Homo sapiens
taccctcaatttttt

SEQ ID NO: 1130574 - DNA, 15 bp, Homo sapiens
ttaccctcaattttt

SEQ ID NO: 1130575 - DNA, 15 bp, Homo sapiens
gttaccctcaatttt

SEQ ID NO: 1130576 - DNA, 15 bp, Homo sapiens
tgttaccctcaattt

SEQ ID NO: 1130577 - DNA, 15 bp, Homo sapiens
ttgttaccctcaatt

SEQ ID NO: 1130578 - DNA, 15 bp, Homo sapiens
attgttaccctcaat

SEQ ID NO: 1130579 - DNA, 15 bp, Homo sapiens
aattgttaccctcaa

SEQ ID NO: 1130580 - DNA, 15 bp, Homo sapiens
gaattgttaccctca

SEQ ID NO: 1130581 - DNA, 15 bp, Homo sapiens
tgaattgttaccctc

SEQ ID NO: 1130582 - DNA, 15 bp, Homo sapiens
ctgaattgttaccct

SEQ ID NO: 1130583 - DNA, 15 bp, Homo sapiens
cctgaattgttaccc

SEQ ID NO: 1130584 - DNA, 15 bp, Homo sapiens
acctgaattgttacc

SEQ ID NO: 1130585 - DNA, 15 bp, Homo sapiens
cacctgaattgttac

SEQ ID NO: 1130586 - DNA, 15 bp, Homo sapiens
ccacctgaattgtta

SEQ ID NO: 1130587 - DNA, 15 bp, Homo sapiens
accacctgaattgtt

SEQ ID NO: 1130588 - DNA, 15 bp, Homo sapiens
caccacctgaattgt

SEQ ID NO: 1130589 - DNA, 15 bp, Homo sapiens
gcaccacctgaattg

SEQ ID NO: 1130590 - DNA, 15 bp, Homo sapiens
tgcaccacctgaatt

SEQ ID NO: 1130591 - DNA, 15 bp, Homo sapiens
ttgcaccacctgaat

SEQ ID NO: 1130592 - DNA, 15 bp, Homo sapiens
attgcaccacctgaa

SEQ ID NO: 1130593 - DNA, 15 bp, Homo sapiens
tattgcaccacctga

SEQ ID NO: 1130594 - DNA, 15 bp, Homo sapiens
ttattgcaccacctg

SEQ ID NO: 1130595 - DNA, 15 bp, Homo sapiens
attattgcaccacct

SEQ ID NO: 1130596 - DNA, 15 bp, Homo sapiens
aattattgcaccacc

SEQ ID NO: 1130597 - DNA, 15 bp, Homo sapiens
taattattgcaccac

SEQ ID NO: 1130598 - DNA, 15 bp, Homo sapiens
ctaattattgcacca

SEQ ID NO: 1130599 - DNA, 15 bp, Homo sapiens
actaattattgcacc

SEQ ID NO: 1130600 - DNA, 15 bp, Homo sapiens
gactaattattgcac

SEQ ID NO: 1130601 - DNA, 15 bp, Homo sapiens
tgactaattattgca

SEQ ID NO: 1130602 - DNA, 15 bp, Homo sapiens
ttgactaattattgc

SEQ ID NO: 1130603 - DNA, 15 bp, Homo sapiens
attgactaattattg

SEQ ID NO: 1130604 - DNA, 15 bp, Homo sapiens
tattgactaattatt

SEQ ID NO: 1130605 - DNA, 15 bp, Homo sapiens
ctattgactaattat

SEQ ID NO: 1130606 - DNA, 15 bp, Homo sapiens
actattgactaatta

SEQ ID NO: 1130607 - DNA, 15 bp, Homo sapiens
gactattgactaatt

SEQ ID NO: 1130608 - DNA, 15 bp, Homo sapiens
agactattgactaat

SEQ ID NO: 1130609 - DNA, 15 bp, Homo sapiens
tagactattgactaa

SEQ ID NO: 1130610 - DNA, 15 bp, Homo sapiens
ctagactattgacta

SEQ ID NO: 1130611 - DNA, 15 bp, Homo sapiens
actagactattgact

SEQ ID NO: 1130612 - DNA, 15 bp, Homo sapiens
aactagactattgac

SEQ ID NO: 1130613 - DNA, 15 bp, Homo sapiens
gaactagactattga

SEQ ID NO: 1130614 - DNA, 15 bp, Homo sapiens
tgaactagactattg

SEQ ID NO: 1130615 - DNA, 15 bp, Homo sapiens
ttgaactagactatt

SEQ ID NO: 1130616 - DNA, 15 bp, Homo sapiens
cttgaactagactat

SEQ ID NO: 1130617 - DNA, 15 bp, Homo sapiens
tcttgaactagacta

SEQ ID NO: 1130618 - DNA, 15 bp, Homo sapiens
ctcttgaactagact

SEQ ID NO: 1130619 - DNA, 15 bp, Homo sapiens
tctcttgaactagac

SEQ ID NO: 1130620 - DNA, 15 bp, Homo sapiens
ctctcttgaactaga

SEQ ID NO: 1130621 - DNA, 15 bp, Homo sapiens
actctcttgaactag

SEQ ID NO: 1130622 - DNA, 15 bp, Homo sapiens
aactctcttgaacta

SEQ ID NO: 1130623 - DNA, 15 bp, Homo sapiens
aaactctcttgaact

SEQ ID NO: 1130624 - DNA, 15 bp, Homo sapiens
taaactctcttgaac

SEQ ID NO: 1130625 - DNA, 15 bp, Homo sapiens
ataaactctcttgaa

SEQ ID NO: 1130626 - DNA, 15 bp, Homo sapiens
aataaactctcttga

SEQ ID NO: 1130627 - DNA, 15 bp, Homo sapiens
aaataaactctcttg

SEQ ID NO: 1130628 - DNA, 15 bp, Homo sapiens
taaataaactctctt

SEQ ID NO: 1130629 - DNA, 15 bp, Homo sapiens
ttaaataaactctct

SEQ ID NO: 1130630 - DNA, 15 bp, Homo sapiens
tttaaataaactctc

SEQ ID NO: 1130631 - DNA, 15 bp, Homo sapiens
ttttaaataaactct

SEQ ID NO: 1130632 - DNA, 15 bp, Homo sapiens
tttttaaataaactc

SEQ ID NO: 1130633 - DNA, 15 bp, Homo sapiens
ttttttaaataaact

SEQ ID NO: 1130634 - DNA, 15 bp, Homo sapiens
tttttttaaataaac

SEQ ID NO: 1130635 - DNA, 15 bp, Homo sapiens
atttttttaaataaa

SEQ ID NO: 1130636 - DNA, 15 bp, Homo sapiens
tatttttttaaataa

SEQ ID NO: 1130637 - DNA, 15 bp, Homo sapiens
ttatttttttaaata

SEQ ID NO: 1130638 - DNA, 15 bp, Homo sapiens
tttatttttttaaat

SEQ ID NO: 1130639 - DNA, 15 bp, Homo sapiens
atttatttttttaaa

SEQ ID NO: 1130640 - DNA, 15 bp, Homo sapiens
aatttatttttttaa

SEQ ID NO: 1130641 - DNA, 15 bp, Homo sapiens
aaatttattttttta

SEQ ID NO: 1130642 - DNA, 15 bp, Homo sapiens
taaatttattttttt

SEQ ID NO: 1130643 - DNA, 15 bp, Homo sapiens
ctaaatttatttttt

SEQ ID NO: 1130644 - DNA, 15 bp, Homo sapiens
tctaaatttattttt

SEQ ID NO: 1130645 - DNA, 15 bp, Homo sapiens
gtctaaatttatttt

SEQ ID NO: 1130646 - DNA, 15 bp, Homo sapiens
agtctaaatttattt

SEQ ID NO: 1130647 - DNA, 15 bp, Homo sapiens
tagtctaaatttatt

SEQ ID NO: 1130648 - DNA, 15 bp, Homo sapiens
atagtctaaatttat

SEQ ID NO: 1130649 - DNA, 15 bp, Homo sapiens
aatagtctaaattta

SEQ ID NO: 1130650 - DNA, 15 bp, Homo sapiens
aaatagtctaaattt

SEQ ID NO: 1130651 - DNA, 15 bp, Homo sapiens
aaaatagtctaaatt

SEQ ID NO: 1130652 - DNA, 15 bp, Homo sapiens
taaaatagtctaaat

SEQ ID NO: 1130653 - DNA, 15 bp, Homo sapiens
ttaaaatagtctaaa

SEQ ID NO: 1130654 - DNA, 15 bp, Homo sapiens
tttaaaatagtctaa

SEQ ID NO: 1130655 - DNA, 15 bp, Homo sapiens
ttttaaaatagtcta

SEQ ID NO: 1130656 - DNA, 15 bp, Homo sapiens
tttttaaaatagtct

SEQ ID NO: 1130657 - DNA, 15 bp, Homo sapiens
ttttttaaaatagtc

SEQ ID NO: 1130658 - DNA, 15 bp, Homo sapiens
attttttaaaatagt

SEQ ID NO: 1130659 - DNA, 15 bp, Homo sapiens
tattttttaaaatag

SEQ ID NO: 1130660 - DNA, 15 bp, Homo sapiens
ctattttttaaaata

SEQ ID NO: 1130661 - DNA, 15 bp, Homo sapiens
actattttttaaaat

SEQ ID NO: 1130662 - DNA, 15 bp, Homo sapiens
gactattttttaaaa

SEQ ID NO: 1130663 - DNA, 15 bp, Homo sapiens
agactattttttaaa

SEQ ID NO: 1130664 - DNA, 15 bp, Homo sapiens
tagactattttttaa

SEQ ID NO: 1130665 - DNA, 15 bp, Homo sapiens
ttagactatttttta

SEQ ID NO: 1130666 - DNA, 15 bp, Homo sapiens
cttagactatttttt

SEQ ID NO: 1130667 - DNA, 15 bp, Homo sapiens
tcttagactattttt

SEQ ID NO: 1130668 - DNA, 15 bp, Homo sapiens
atcttagactatttt

SEQ ID NO: 1130669 - DNA, 15 bp, Homo sapiens
gatcttagactattt

SEQ ID NO: 1130670 - DNA, 15 bp, Homo sapiens
tgatcttagactatt

SEQ ID NO: 1130671 - DNA, 15 bp, Homo sapiens
atgatcttagactat

SEQ ID NO: 1130672 - DNA, 15 bp, Homo sapiens
aatgatcttagacta

SEQ ID NO: 1130673 - DNA, 15 bp, Homo sapiens
aaatgatcttagact

SEQ ID NO: 1130674 - DNA, 15 bp, Homo sapiens
gaaatgatcttagac

SEQ ID NO: 1130675 - DNA, 15 bp, Homo sapiens
ggaaatgatcttaga

SEQ ID NO: 1130676 - DNA, 15 bp, Homo sapiens
aggaaatgatcttag

SEQ ID NO: 1130677 - DNA, 15 bp, Homo sapiens
taggaaatgatctta

SEQ ID NO: 1130678 - DNA, 15 bp, Homo sapiens
gtaggaaatgatctt

SEQ ID NO: 1130679 - DNA, 15 bp, Homo sapiens
tgtaggaaatgatct

SEQ ID NO: 1130680 - DNA, 15 bp, Homo sapiens
ttgtaggaaatgatc

SEQ ID NO: 1130681 - DNA, 15 bp, Homo sapiens
attgtaggaaatgat

SEQ ID NO: 1130682 - DNA, 15 bp, Homo sapiens
aattgtaggaaatga

SEQ ID NO: 1130683 - DNA, 15 bp, Homo sapiens
caattgtaggaaatg

SEQ ID NO: 1130684 - DNA, 15 bp, Homo sapiens
tcaattgtaggaaat

SEQ ID NO: 1130685 - DNA, 15 bp, Homo sapiens
ttcaattgtaggaaa

SEQ ID NO: 1130686 - DNA, 15 bp, Homo sapiens
cttcaattgtaggaa

SEQ ID NO: 1130687 - DNA, 15 bp, Homo sapiens
tcttcaattgtagga

SEQ ID NO: 1130688 - DNA, 15 bp, Homo sapiens
ttcttcaattgtagg

SEQ ID NO: 1130689 - DNA, 15 bp, Homo sapiens
attcttcaattgtag

SEQ ID NO: 1130690 - DNA, 15 bp, Homo sapiens
tattcttcaattgta

SEQ ID NO: 1130691 - DNA, 15 bp, Homo sapiens
atattcttcaattgt

SEQ ID NO: 1130692 - DNA, 15 bp, Homo sapiens
catattcttcaattg

SEQ ID NO: 1130693 - DNA, 15 bp, Homo sapiens
tcatattcttcaatt

SEQ ID NO: 1130694 - DNA, 15 bp, Homo sapiens
ttcatattcttcaat

SEQ ID NO: 1130695 - DNA, 15 bp, Homo sapiens
attcatattcttcaa

SEQ ID NO: 1130696 - DNA, 15 bp, Homo sapiens
aattcatattcttca

SEQ ID NO: 1130697 - DNA, 15 bp, Homo sapiens
aaattcatattcttc

SEQ ID NO: 1130698 - DNA, 15 bp, Homo sapiens
gaaattcatattctt

SEQ ID NO: 1130699 - DNA, 15 bp, Homo sapiens
ggaaattcatattct

SEQ ID NO: 1130700 - DNA, 15 bp, Homo sapiens
tggaaattcatattc

SEQ ID NO: 1130701 - DNA, 15 bp, Homo sapiens
ttggaaattcatatt

SEQ ID NO: 1130702 - DNA, 15 bp, Homo sapiens
cttggaaattcatat

SEQ ID NO: 1130703 - DNA, 15 bp, Homo sapiens
gcttggaaattcata

SEQ ID NO: 1130704 - DNA, 15 bp, Homo sapiens
agcttggaaattcat

SEQ ID NO: 1130705 - DNA, 15 bp, Homo sapiens
cagcttggaaattca

SEQ ID NO: 1130706 - DNA, 15 bp, Homo sapiens
tcagcttggaaattc

SEQ ID NO: 1130707 - DNA, 15 bp, Homo sapiens
ttcagcttggaaatt

SEQ ID NO: 1130708 - DNA, 15 bp, Homo sapiens
tttcagcttggaaat

SEQ ID NO: 1130709 - DNA, 15 bp, Homo sapiens
ctttcagcttggaaa

SEQ ID NO: 1130710 - DNA, 15 bp, Homo sapiens
tctttcagcttggaa

SEQ ID NO: 1130711 - DNA, 15 bp, Homo sapiens
ctctttcagcttgga

SEQ ID NO: 1130712 - DNA, 15 bp, Homo sapiens
actctttcagcttgg

SEQ ID NO: 1130713 - DNA, 15 bp, Homo sapiens
aactctttcagcttg

SEQ ID NO: 1130714 - DNA, 15 bp, Homo sapiens
gaactctttcagctt

SEQ ID NO: 1130715 - DNA, 15 bp, Homo sapiens
tgaactctttcagct

SEQ ID NO: 1130716 - DNA, 15 bp, Homo sapiens
gtgaactctttcagc

SEQ ID NO: 1130717 - DNA, 15 bp, Homo sapiens
ggtgaactctttcag

SEQ ID NO: 1130718 - DNA, 15 bp, Homo sapiens
gggtgaactctttca

SEQ ID NO: 1130719 - DNA, 15 bp, Homo sapiens
tgggtgaactctttc

SEQ ID NO: 1130720 - DNA, 15 bp, Homo sapiens
ttgggtgaactcttt

SEQ ID NO: 1130721 - DNA, 15 bp, Homo sapiens
attgggtgaactctt

SEQ ID NO: 1130722 - DNA, 15 bp, Homo sapiens
tattgggtgaactct

SEQ ID NO: 1130723 - DNA, 15 bp, Homo sapiens
gtattgggtgaactc

SEQ ID NO: 1130724 - DNA, 15 bp, Homo sapiens
agtattgggtgaact

SEQ ID NO: 1130725 - DNA, 15 bp, Homo sapiens
cagtattgggtgaac

SEQ ID NO: 1130726 - DNA, 15 bp, Homo sapiens
tcagtattgggtgaa

SEQ ID NO: 1130727 - DNA, 15 bp, Homo sapiens
ttcagtattgggtga

SEQ ID NO: 1130728 - DNA, 15 bp, Homo sapiens
attcagtattgggtg

SEQ ID NO: 1130729 - DNA, 15 bp, Homo sapiens
tattcagtattgggt

SEQ ID NO: 1130730 - DNA, 15 bp, Homo sapiens
atattcagtattggg

SEQ ID NO: 1130731 - DNA, 15 bp, Homo sapiens
tatattcagtattgg

SEQ ID NO: 1130732 - DNA, 15 bp, Homo sapiens
ttatattcagtattg

SEQ ID NO: 1130733 - DNA, 15 bp, Homo sapiens
attatattcagtatt

SEQ ID NO: 1130734 - DNA, 15 bp, Homo sapiens
tattatattcagtat

SEQ ID NO: 1130735 - DNA, 15 bp, Homo sapiens
ttattatattcagta

SEQ ID NO: 1130736 - DNA, 15 bp, Homo sapiens
tttattatattcagt

SEQ ID NO: 1130737 - DNA, 15 bp, Homo sapiens
atttattatattcag

SEQ ID NO: 1130738 - DNA, 15 bp, Homo sapiens
tatttattatattca

SEQ ID NO: 1130739 - DNA, 15 bp, Homo sapiens
ttatttattatattc

SEQ ID NO: 1130740 - DNA, 15 bp, Homo sapiens
tttatttattatatt

SEQ ID NO: 1130741 - DNA, 15 bp, Homo sapiens
ttttatttattatat

SEQ ID NO: 1130742 - DNA, 15 bp, Homo sapiens
tttttatttattata

SEQ ID NO: 1130743 - DNA, 15 bp, Homo sapiens
atttttatttattat

SEQ ID NO: 1130744 - DNA, 15 bp, Homo sapiens
gatttttatttatta

SEQ ID NO: 1130745 - DNA, 15 bp, Homo sapiens
ggatttttatttatt

SEQ ID NO: 1130746 - DNA, 15 bp, Homo sapiens
aggatttttatttat

SEQ ID NO: 1130747 - DNA, 15 bp, Homo sapiens
taggatttttattta

SEQ ID NO: 1130748 - DNA, 15 bp, Homo sapiens
ataggatttttattt

SEQ ID NO: 1130749 - DNA, 15 bp, Homo sapiens
aataggatttttatt

SEQ ID NO: 1130750 - DNA, 15 bp, Homo sapiens
aaataggatttttat

SEQ ID NO: 1130751 - DNA, 15 bp, Homo sapiens
caaataggattttta

SEQ ID NO: 1130752 - DNA, 15 bp, Homo sapiens
ccaaataggattttt

SEQ ID NO: 1130753 - DNA, 15 bp, Homo sapiens
cccaaataggatttt

SEQ ID NO: 1130754 - DNA, 15 bp, Homo sapiens
gcccaaataggattt

SEQ ID NO: 1130755 - DNA, 15 bp, Homo sapiens
tgcccaaataggatt

SEQ ID NO: 1130756 - DNA, 15 bp, Homo sapiens
gtgcccaaataggat

SEQ ID NO: 1130757 - DNA, 15 bp, Homo sapiens
tgtgcccaaatagga

SEQ ID NO: 1130758 - DNA, 15 bp, Homo sapiens
ctgtgcccaaatagg

SEQ ID NO: 1130759 - DNA, 15 bp, Homo sapiens
actgtgcccaaatag

SEQ ID NO: 1130760 - DNA, 15 bp, Homo sapiens
tactgtgcccaaata

SEQ ID NO: 1130761 - DNA, 15 bp, Homo sapiens
atactgtgcccaaat

SEQ ID NO: 1130762 - DNA, 15 bp, Homo sapiens
catactgtgcccaaa

SEQ ID NO: 1130763 - DNA, 15 bp, Homo sapiens
tcatactgtgcccaa

SEQ ID NO: 1130764 - DNA, 15 bp, Homo sapiens
ttcatactgtgccca

SEQ ID NO: 1130765 - DNA, 15 bp, Homo sapiens
tttcatactgtgccc

SEQ ID NO: 1130766 - DNA, 15 bp, Homo sapiens
atttcatactgtgcc

SEQ ID NO: 1130767 - DNA, 15 bp, Homo sapiens
aatttcatactgtgc

SEQ ID NO: 1130768 - DNA, 15 bp, Homo sapiens
aaatttcatactgtg

SEQ ID NO: 1130769 - DNA, 15 bp, Homo sapiens
aaaatttcatactgt

SEQ ID NO: 1130770 - DNA, 15 bp, Homo sapiens
taaaatttcatactg

SEQ ID NO: 1130771 - DNA, 15 bp, Homo sapiens
ctaaaatttcatact

SEQ ID NO: 1130772 - DNA, 15 bp, Homo sapiens
tctaaaatttcatac

SEQ ID NO: 1130773 - DNA, 15 bp, Homo sapiens
ttctaaaatttcata

SEQ ID NO: 1130774 - DNA, 15 bp, Homo sapiens
tttctaaaatttcat

SEQ ID NO: 1130775 - DNA, 15 bp, Homo sapiens
ttttctaaaatttca

SEQ ID NO: 1130776 - DNA, 15 bp, Homo sapiens
attttctaaaatttc

SEQ ID NO: 1130777 - DNA, 15 bp, Homo sapiens
cattttctaaaattt

SEQ ID NO: 1130778 - DNA, 15 bp, Homo sapiens
tcattttctaaaatt

SEQ ID NO: 1130779 - DNA, 15 bp, Homo sapiens
ctcattttctaaaat

SEQ ID NO: 1130780 - DNA, 15 bp, Homo sapiens
cctcattttctaaaa

SEQ ID NO: 1130781 - DNA, 15 bp, Homo sapiens
ccctcattttctaaa

SEQ ID NO: 1130782 - DNA, 15 bp, Homo sapiens
tccctcattttctaa

SEQ ID NO: 1130783 - DNA, 15 bp, Homo sapiens
ttccctcattttcta

SEQ ID NO: 1130784 - DNA, 15 bp, Homo sapiens
tttccctcattttct

SEQ ID NO: 1130785 - DNA, 15 bp, Homo sapiens
ttttccctcattttc

SEQ ID NO: 1130786 - DNA, 15 bp, Homo sapiens
cttttccctcatttt

SEQ ID NO: 1130787 - DNA, 15 bp, Homo sapiens
ccttttccctcattt

SEQ ID NO: 1130788 - DNA, 15 bp, Homo sapiens
tccttttccctcatt

SEQ ID NO: 1130789 - DNA, 15 bp, Homo sapiens
ctccttttccctcat

SEQ ID NO: 1130790 - DNA, 15 bp, Homo sapiens
tctccttttccctca

SEQ ID NO: 1130791 - DNA, 15 bp, Homo sapiens
ttctccttttccctc

SEQ ID NO: 1130792 - DNA, 15 bp, Homo sapiens
attctccttttccct

SEQ ID NO: 1130793 - DNA, 15 bp, Homo sapiens
tattctccttttccc

SEQ ID NO: 1130794 - DNA, 15 bp, Homo sapiens
atattctccttttcc

SEQ ID NO: 1130795 - DNA, 15 bp, Homo sapiens
aatattctccttttc

SEQ ID NO: 1130796 - DNA, 15 bp, Homo sapiens
aaatattctcctttt

SEQ ID NO: 1130797 - DNA, 15 bp, Homo sapiens
aaaatattctccttt

SEQ ID NO: 1130798 - DNA, 15 bp, Homo sapiens
gaaaatattctcctt

SEQ ID NO: 1130799 - DNA, 15 bp, Homo sapiens
ggaaaatattctcct

SEQ ID NO: 1130800 - DNA, 15 bp, Homo sapiens
tggaaaatattctcc

SEQ ID NO: 1130801 - DNA, 15 bp, Homo sapiens
ctggaaaatattctc

SEQ ID NO: 1130802 - DNA, 15 bp, Homo sapiens
cctggaaaatattct

SEQ ID NO: 1130803 - DNA, 15 bp, Homo sapiens
tcctggaaaatattc

SEQ ID NO: 1130804 - DNA, 15 bp, Homo sapiens
ctcctggaaaatatt

SEQ ID NO: 1130805 - DNA, 15 bp, Homo sapiens
tctcctggaaaatat

SEQ ID NO: 1130806 - DNA, 15 bp, Homo sapiens
ctctcctggaaaata

SEQ ID NO: 1130807 - DNA, 15 bp, Homo sapiens
tctctcctggaaaat

SEQ ID NO: 1130808 - DNA, 15 bp, Homo sapiens
ttctctcctggaaaa

SEQ ID NO: 1130809 - DNA, 15 bp, Homo sapiens
cttctctcctggaaa

SEQ ID NO: 1130810 - DNA, 15 bp, Homo sapiens
ccttctctcctggaa

SEQ ID NO: 1130811 - DNA, 15 bp, Homo sapiens
tccttctctcctgga

SEQ ID NO: 1130812 - DNA, 15 bp, Homo sapiens
ctccttctctcctgg

SEQ ID NO: 1130813 - DNA, 15 bp, Homo sapiens
cctccttctctcctg

SEQ ID NO: 1130814 - DNA, 15 bp, Homo sapiens
tcctccttctctcct

SEQ ID NO: 1130815 - DNA, 15 bp, Homo sapiens
ttcctccttctctcc

SEQ ID NO: 1130816 - DNA, 15 bp, Homo sapiens
attcctccttctctc

SEQ ID NO: 1130817 - DNA, 15 bp, Homo sapiens
cattcctccttctct

SEQ ID NO: 1130818 - DNA, 15 bp, Homo sapiens
acattcctccttctc

SEQ ID NO: 1130819 - DNA, 15 bp, Homo sapiens
cacattcctccttct

SEQ ID NO: 1130820 - DNA, 15 bp, Homo sapiens
acacattcctccttc

SEQ ID NO: 1130821 - DNA, 15 bp, Homo sapiens
cacacattcctcctt

SEQ ID NO: 1130822 - DNA, 15 bp, Homo sapiens
tcacacattcctcct

SEQ ID NO: 1130823 - DNA, 15 bp, Homo sapiens
gtcacacattcctcc

SEQ ID NO: 1130824 - DNA, 15 bp, Homo sapiens
tgtcacacattcctc

SEQ ID NO: 1130825 - DNA, 15 bp, Homo sapiens
atgtcacacattcct

SEQ ID NO: 1130826 - DNA, 15 bp, Homo sapiens
tatgtcacacattcc

SEQ ID NO: 1130827 - DNA, 15 bp, Homo sapiens
atatgtcacacattc

SEQ ID NO: 1130828 - DNA, 15 bp, Homo sapiens
tatatgtcacacatt

SEQ ID NO: 1130829 - DNA, 15 bp, Homo sapiens
ttatatgtcacacat

SEQ ID NO: 1130830 - DNA, 15 bp, Homo sapiens
attatatgtcacaca

SEQ ID NO: 1130831 - DNA, 15 bp, Homo sapiens
gattatatgtcacac

SEQ ID NO: 1130832 - DNA, 15 bp, Homo sapiens
cgattatatgtcaca

SEQ ID NO: 1130833 - DNA, 15 bp, Homo sapiens
tcgattatatgtcac

SEQ ID NO: 1130834 - DNA, 15 bp, Homo sapiens
atcgattatatgtca

SEQ ID NO: 1130835 - DNA, 15 bp, Homo sapiens
tatcgattatatgtc

SEQ ID NO: 1130836 - DNA, 15 bp, Homo sapiens
ttatcgattatatgt

SEQ ID NO: 1130837 - DNA, 15 bp, Homo sapiens
tttatcgattatatg

SEQ ID NO: 1130838 - DNA, 15 bp, Homo sapiens
ctttatcgattatat

SEQ ID NO: 1130839 - DNA, 15 bp, Homo sapiens
tctttatcgattata

SEQ ID NO: 1130840 - DNA, 15 bp, Homo sapiens
ttctttatcgattat

SEQ ID NO: 1130841 - DNA, 15 bp, Homo sapiens
attctttatcgatta

SEQ ID NO: 1130842 - DNA, 15 bp, Homo sapiens
aattctttatcgatt

SEQ ID NO: 1130843 - DNA, 15 bp, Homo sapiens
taattctttatcgat

SEQ ID NO: 1130844 - DNA, 15 bp, Homo sapiens
ataattctttatcga

SEQ ID NO: 1130845 - DNA, 15 bp, Homo sapiens
tataattctttatcg

SEQ ID NO: 1130846 - DNA, 15 bp, Homo sapiens
ttataattctttatc

SEQ ID NO: 1130847 - DNA, 15 bp, Homo sapiens
attataattctttat

SEQ ID NO: 1130848 - DNA, 15 bp, Homo sapiens
gattataattcttta

SEQ ID NO: 1130849 - DNA, 15 bp, Homo sapiens
tgattataattcttt

SEQ ID NO: 1130850 - DNA, 15 bp, Homo sapiens
atgattataattctt

SEQ ID NO: 1130851 - DNA, 15 bp, Homo sapiens
catgattataattct

SEQ ID NO: 1130852 - DNA, 15 bp, Homo sapiens
acatgattataattc

SEQ ID NO: 1130853 - DNA, 15 bp, Homo sapiens
cacatgattataatt

SEQ ID NO: 1130854 - DNA, 15 bp, Homo sapiens
tcacatgattataat

SEQ ID NO: 1130855 - DNA, 15 bp, Homo sapiens
gtcacatgattataa

SEQ ID NO: 1130856 - DNA, 15 bp, Homo sapiens
agtcacatgattata

SEQ ID NO: 1130857 - DNA, 15 bp, Homo sapiens
cagtcacatgattat

SEQ ID NO: 1130858 - DNA, 15 bp, Homo sapiens
ccagtcacatgatta

SEQ ID NO: 1130859 - DNA, 15 bp, Homo sapiens
cccagtcacatgatt

SEQ ID NO: 1130860 - DNA, 15 bp, Homo sapiens
gcccagtcacatgat

SEQ ID NO: 1130861 - DNA, 15 bp, Homo sapiens
tgcccagtcacatga

SEQ ID NO: 1130862 - DNA, 15 bp, Homo sapiens
gtgcccagtcacatg

SEQ ID NO: 1130863 - DNA, 15 bp, Homo sapiens
tgtgcccagtcacat

SEQ ID NO: 1130864 - DNA, 15 bp, Homo sapiens
ctgtgcccagtcaca

SEQ ID NO: 1130865 - DNA, 15 bp, Homo sapiens
actgtgcccagtcac

SEQ ID NO: 1130866 - DNA, 15 bp, Homo sapiens
cactgtgcccagtca

SEQ ID NO: 1130867 - DNA, 15 bp, Homo sapiens
ccactgtgcccagtc

SEQ ID NO: 1130868 - DNA, 15 bp, Homo sapiens
gccactgtgcccagt

SEQ ID NO: 1130869 - DNA, 15 bp, Homo sapiens
tgcctcggcctccta

SEQ ID NO: 1130870 - DNA, 15 bp, Homo sapiens
ttgcctcggcctcct

SEQ ID NO: 1130871 - DNA, 15 bp, Homo sapiens
cttgcctcggcctcc

SEQ ID NO: 1130872 - DNA, 15 bp, Homo sapiens
tcttgcctcggcctc

SEQ ID NO: 1130873 - DNA, 15 bp, Homo sapiens
ctcttgcctcggcct

SEQ ID NO: 1130874 - DNA, 15 bp, Homo sapiens
cctcttgcctcggcc

SEQ ID NO: 1130875 - DNA, 15 bp, Homo sapiens
tcctcttgcctcggc

SEQ ID NO: 1130876 - DNA, 15 bp, Homo sapiens
atcctcttgcctcgg

SEQ ID NO: 1130877 - DNA, 15 bp, Homo sapiens
aatcctcttgcctcg

SEQ ID NO: 1130878 - DNA, 15 bp, Homo sapiens
caagcaatcctcttg

SEQ ID NO: 1130879 - DNA, 15 bp, Homo sapiens
tcaagcaatcctctt

SEQ ID NO: 1130880 - DNA, 15 bp, Homo sapiens
tactcctgggctcaa

SEQ ID NO: 1130881 - DNA, 15 bp, Homo sapiens
gtactcctgggctca

SEQ ID NO: 1130882 - DNA, 15 bp, Homo sapiens
tgtactcctgggctc

SEQ ID NO: 1130883 - DNA, 15 bp, Homo sapiens
ttgtactcctgggct

SEQ ID NO: 1130884 - DNA, 15 bp, Homo sapiens
cttgtactcctgggc

SEQ ID NO: 1130885 - DNA, 15 bp, Homo sapiens
tcttgtactcctggg

SEQ ID NO: 1130886 - DNA, 15 bp, Homo sapiens
gtcttgtactcctgg

SEQ ID NO: 1130887 - DNA, 15 bp, Homo sapiens
ggtcttgtactcctg

SEQ ID NO: 1130888 - DNA, 15 bp, Homo sapiens
tggtcttgtactcct

SEQ ID NO: 1130889 - DNA, 15 bp, Homo sapiens
ctggtcttgtactcc

SEQ ID NO: 1130890 - DNA, 15 bp, Homo sapiens
gctggtcttgtactc

SEQ ID NO: 1130891 - DNA, 15 bp, Homo sapiens
ggctggtcttgtact

SEQ ID NO: 1130892 - DNA, 15 bp, Homo sapiens
aggctggtcttgtac

SEQ ID NO: 1130893 - DNA, 15 bp, Homo sapiens
caggctggtcttgta

SEQ ID NO: 1130894 - DNA, 15 bp, Homo sapiens
ccaggctggtcttgt

SEQ ID NO: 1130895 - DNA, 15 bp, Homo sapiens
aggttgcccaggctg

SEQ ID NO: 1130896 - DNA, 15 bp, Homo sapiens
caggttgcccaggct

SEQ ID NO: 1130897 - DNA, 15 bp, Homo sapiens
ccaggttgcccaggc

SEQ ID NO: 1130898 - DNA, 15 bp, Homo sapiens
gccaggttgcccagg

SEQ ID NO: 1130899 - DNA, 15 bp, Homo sapiens
cgccaggttgcccag

SEQ ID NO: 1130900 - DNA, 15 bp, Homo sapiens
tcgccaggttgccca

SEQ ID NO: 1130901 - DNA, 15 bp, Homo sapiens
ttcgccaggttgccc

SEQ ID NO: 1130902 - DNA, 15 bp, Homo sapiens
tttcgccaggttgcc

SEQ ID NO: 1130903 - DNA, 15 bp, Homo sapiens
gtttcgccaggttgc

SEQ ID NO: 1130904 - DNA, 15 bp, Homo sapiens
ggtttcgccaggttg

SEQ ID NO: 1130905 - DNA, 15 bp, Homo sapiens
gggtttcgccaggtt

SEQ ID NO: 1130906 - DNA, 15 bp, Homo sapiens
ggggtttcgccaggt

SEQ ID NO: 1130907 - DNA, 15 bp, Homo sapiens
tggggtttcgccagg

SEQ ID NO: 1130908 - DNA, 15 bp, Homo sapiens
atggggtttcgccag

SEQ ID NO: 1130909 - DNA, 15 bp, Homo sapiens
aatggggtttcgcca

SEQ ID NO: 1130910 - DNA, 15 bp, Homo sapiens
aaatggggtttcgcc

SEQ ID NO: 1130911 - DNA, 15 bp, Homo sapiens
gaaatggggtttcgc

SEQ ID NO: 1130912 - DNA, 15 bp, Homo sapiens
agaaatggggtttcg

SEQ ID NO: 1130913 - DNA, 15 bp, Homo sapiens
ttagaaatggggttt

SEQ ID NO: 1130914 - DNA, 15 bp, Homo sapiens
gttagaaatggggtt

SEQ ID NO: 1130915 - DNA, 15 bp, Homo sapiens
tgttagaaatggggt

SEQ ID NO: 1130916 - DNA, 15 bp, Homo sapiens
ttgttagaaatgggg

SEQ ID NO: 1130917 - DNA, 15 bp, Homo sapiens
tttgttagaaatggg

SEQ ID NO: 1130918 - DNA, 15 bp, Homo sapiens
ttttgttagaaatgg

SEQ ID NO: 1130919 - DNA, 15 bp, Homo sapiens
tttttgttagaaatg

SEQ ID NO: 1130920 - DNA, 15 bp, Homo sapiens
ttttttgttagaaat

SEQ ID NO: 1130921 - DNA, 15 bp, Homo sapiens
tttttttgttagaaa

SEQ ID NO: 1130922 - DNA, 15 bp, Homo sapiens
ctttttttgttagaa

SEQ ID NO: 1130923 - DNA, 15 bp, Homo sapiens
tctttttttgttaga

SEQ ID NO: 1130924 - DNA, 15 bp, Homo sapiens
ttctttttttgttag

SEQ ID NO: 1130925 - DNA, 15 bp, Homo sapiens
tttctttttttgtta

SEQ ID NO: 1130926 - DNA, 15 bp, Homo sapiens
gcttttctttttttg

SEQ ID NO: 1130927 - DNA, 15 bp, Homo sapiens
tgcttttcttttttt

SEQ ID NO: 1130928 - DNA, 15 bp, Homo sapiens
ttgcttttctttttt

SEQ ID NO: 1130929 - DNA, 15 bp, Homo sapiens
tttgcttttcttttt

SEQ ID NO: 1130930 - DNA, 15 bp, Homo sapiens
ttttgcttttctttt

SEQ ID NO: 1130931 - DNA, 15 bp, Homo sapiens
tttttgcttttcttt

SEQ ID NO: 1130932 - DNA, 15 bp, Homo sapiens
atttttgcttttctt

SEQ ID NO: 1130933 - DNA, 15 bp, Homo sapiens
aatttttgcttttct

SEQ ID NO: 1130934 - DNA, 15 bp, Homo sapiens
taatttttgcttttc

SEQ ID NO: 1130935 - DNA, 15 bp, Homo sapiens
ctaatttttgctttt

SEQ ID NO: 1130936 - DNA, 15 bp, Homo sapiens
gctaatttttgcttt

SEQ ID NO: 1130937 - DNA, 15 bp, Homo sapiens
ggctaatttttgctt

SEQ ID NO: 1130938 - DNA, 15 bp, Homo sapiens
tggctaatttttgct

SEQ ID NO: 1130939 - DNA, 15 bp, Homo sapiens
tcatgccaccatgcc

SEQ ID NO: 1130940 - DNA, 15 bp, Homo sapiens
ctcatgccaccatgc

SEQ ID NO: 1130941 - DNA, 15 bp, Homo sapiens
gctcatgccaccatg

SEQ ID NO: 1130942 - DNA, 15 bp, Homo sapiens
ggctcatgccaccat

SEQ ID NO: 1130943 - DNA, 15 bp, Homo sapiens
tggctcatgccacca

SEQ ID NO: 1130944 - DNA, 15 bp, Homo sapiens
gtggctcatgccacc

SEQ ID NO: 1130945 - DNA, 15 bp, Homo sapiens
agtggctcatgccac

SEQ ID NO: 1130946 - DNA, 15 bp, Homo sapiens
gagtggctcatgcca

SEQ ID NO: 1130947 - DNA, 15 bp, Homo sapiens
cgagtggctcatgcc

SEQ ID NO: 1130948 - DNA, 15 bp, Homo sapiens
ccgagtggctcatgc

SEQ ID NO: 1130949 - DNA, 15 bp, Homo sapiens
cccgagtggctcatg

SEQ ID NO: 1130950 - DNA, 15 bp, Homo sapiens
tcccgagtggctcat

SEQ ID NO: 1130951 - DNA, 15 bp, Homo sapiens
ttcccgagtggctca

SEQ ID NO: 1130952 - DNA, 15 bp, Homo sapiens
cttcccgagtggctc

SEQ ID NO: 1130953 - DNA, 15 bp, Homo sapiens
gcttcccgagtggct

SEQ ID NO: 1130954 - DNA, 15 bp, Homo sapiens
agcttcccgagtggc

SEQ ID NO: 1130955 - DNA, 15 bp, Homo sapiens
cagcttcccgagtgg

SEQ ID NO: 1130956 - DNA, 15 bp, Homo sapiens
tcagcttcccgagtg

SEQ ID NO: 1130957 - DNA, 15 bp, Homo sapiens
ttcagcttcccgagt

SEQ ID NO: 1130958 - DNA, 15 bp, Homo sapiens
cttcagcttcccgag

SEQ ID NO: 1130959 - DNA, 15 bp, Homo sapiens
acttcagcttcccga

SEQ ID NO: 1130960 - DNA, 15 bp, Homo sapiens
cacttcagcttcccg

SEQ ID NO: 1130961 - DNA, 15 bp, Homo sapiens
ccacttcagcttccc

SEQ ID NO: 1130962 - DNA, 15 bp, Homo sapiens
cccacttcagcttcc

SEQ ID NO: 1130963 - DNA, 15 bp, Homo sapiens
ccccacttcagcttc

SEQ ID NO: 1130964 - DNA, 15 bp, Homo sapiens
accccacttcagctt

SEQ ID NO: 1130965 - DNA, 15 bp, Homo sapiens
caccccacttcagct

SEQ ID NO: 1130966 - DNA, 15 bp, Homo sapiens
tcaccccacttcagc

SEQ ID NO: 1130967 - DNA, 15 bp, Homo sapiens
atcaccccacttcag

SEQ ID NO: 1130968 - DNA, 15 bp, Homo sapiens
aatcaccccacttca

SEQ ID NO: 1130969 - DNA, 15 bp, Homo sapiens
caatcaccccacttc

SEQ ID NO: 1130970 - DNA, 15 bp, Homo sapiens
gcaatcaccccactt

SEQ ID NO: 1130971 - DNA, 15 bp, Homo sapiens
agcaatcaccccact

SEQ ID NO: 1130972 - DNA, 15 bp, Homo sapiens
aagcaatcaccccac

SEQ ID NO: 1130973 - DNA, 15 bp, Homo sapiens
caagcaatcacccca

SEQ ID NO: 1130974 - DNA, 15 bp, Homo sapiens
tcaagcaatcacccc

SEQ ID NO: 1130975 - DNA, 15 bp, Homo sapiens
ctcaagcaatcaccc

SEQ ID NO: 1130976 - DNA, 15 bp, Homo sapiens
actcaagcaatcacc

SEQ ID NO: 1130977 - DNA, 15 bp, Homo sapiens
aactcaagcaatcac

SEQ ID NO: 1130978 - DNA, 15 bp, Homo sapiens
gaactcaagcaatca

SEQ ID NO: 1130979 - DNA, 15 bp, Homo sapiens
tgaactcaagcaatc

SEQ ID NO: 1130980 - DNA, 15 bp, Homo sapiens
ctgaactcaagcaat

SEQ ID NO: 1130981 - DNA, 15 bp, Homo sapiens
cctgaactcaagcaa

SEQ ID NO: 1130982 - DNA, 15 bp, Homo sapiens
acctgaactcaagca

SEQ ID NO: 1130983 - DNA, 15 bp, Homo sapiens
cacctgaactcaagc

SEQ ID NO: 1130984 - DNA, 15 bp, Homo sapiens
ccacctgaactcaag

SEQ ID NO: 1130985 - DNA, 15 bp, Homo sapiens
accacctgaactcaa

SEQ ID NO: 1130986 - DNA, 15 bp, Homo sapiens
aaccacctgaactca

SEQ ID NO: 1130987 - DNA, 15 bp, Homo sapiens
caaccacctgaactc

SEQ ID NO: 1130988 - DNA, 15 bp, Homo sapiens
tcaaccacctgaact

SEQ ID NO: 1130989 - DNA, 15 bp, Homo sapiens
ctcaaccacctgaac

SEQ ID NO: 1130990 - DNA, 15 bp, Homo sapiens
cctcaaccacctgaa

SEQ ID NO: 1130991 - DNA, 15 bp, Homo sapiens
gcctcaaccacctga

SEQ ID NO: 1130992 - DNA, 15 bp, Homo sapiens
agcctcaaccacctg

SEQ ID NO: 1130993 - DNA, 15 bp, Homo sapiens
cagcctcaaccacct

SEQ ID NO: 1130994 - DNA, 15 bp, Homo sapiens
gcagcctcaaccacc

SEQ ID NO: 1130995 - DNA, 15 bp, Homo sapiens
tgcagcctcaaccac

SEQ ID NO: 1130996 - DNA, 15 bp, Homo sapiens
ctgcagcctcaacca

SEQ ID NO: 1130997 - DNA, 15 bp, Homo sapiens
ttgggtcactgcagc

SEQ ID NO: 1130998 - DNA, 15 bp, Homo sapiens
gttgggtcactgcag

SEQ ID NO: 1130999 - DNA, 15 bp, Homo sapiens
tgttgggtcactgca

SEQ ID NO: 1131000 - DNA, 15 bp, Homo sapiens
atgttgggtcactgc

SEQ ID NO: 1131001 - DNA, 15 bp, Homo sapiens
gatgttgggtcactg

SEQ ID NO: 1131002 - DNA, 15 bp, Homo sapiens
cgatgttgggtcact

SEQ ID NO: 1131003 - DNA, 15 bp, Homo sapiens
gcgatgttgggtcac

SEQ ID NO: 1131004 - DNA, 15 bp, Homo sapiens
cgcgatgttgggtca

SEQ ID NO: 1131005 - DNA, 15 bp, Homo sapiens
gcgcgatgttgggtc

SEQ ID NO: 1131006 - DNA, 15 bp, Homo sapiens
ggcgcgatgttgggt

SEQ ID NO: 1131007 - DNA, 15 bp, Homo sapiens
tggcgcgatgttggg

SEQ ID NO: 1131008 - DNA, 15 bp, Homo sapiens
gtggcgcgatgttgg

SEQ ID NO: 1131009 - DNA, 15 bp, Homo sapiens
agtggcgcgatgttg

SEQ ID NO: 1131010 - DNA, 15 bp, Homo sapiens
cagtggcgcgatgtt

SEQ ID NO: 1131011 - DNA, 15 bp, Homo sapiens
gcagtggcgcgatgt

SEQ ID NO: 1131012 - DNA, 15 bp, Homo sapiens
ggcagtggcgcgatg

SEQ ID NO: 1131013 - DNA, 15 bp, Homo sapiens
gggcagtggcgcgat

SEQ ID NO: 1131014 - DNA, 15 bp, Homo sapiens
agggcagtggcgcga

SEQ ID NO: 1131015 - DNA, 15 bp, Homo sapiens
gagggcagtggcgcg

SEQ ID NO: 1131016 - DNA, 15 bp, Homo sapiens
gcccaggctggaggg

SEQ ID NO: 1131017 - DNA, 15 bp, Homo sapiens
tgcccaggctggagg

SEQ ID NO: 1131018 - DNA, 15 bp, Homo sapiens
ggtcttgctctgttg

SEQ ID NO: 1131019 - DNA, 15 bp, Homo sapiens
aggtcttgctctgtt

SEQ ID NO: 1131020 - DNA, 15 bp, Homo sapiens
aaggtcttgctctgt

SEQ ID NO: 1131021 - DNA, 15 bp, Homo sapiens
caaggtcttgctctg

SEQ ID NO: 1131022 - DNA, 15 bp, Homo sapiens
acaaggtcttgctct

SEQ ID NO: 1131023 - DNA, 15 bp, Homo sapiens
gacaaggtcttgctc

SEQ ID NO: 1131024 - DNA, 15 bp, Homo sapiens
agacaaggtcttgct

SEQ ID NO: 1131025 - DNA, 15 bp, Homo sapiens
tgagacaaggtcttg

SEQ ID NO: 1131026 - DNA, 15 bp, Homo sapiens
ttgagacaaggtctt

SEQ ID NO: 1131027 - DNA, 15 bp, Homo sapiens
tttttgagacaaggt

SEQ ID NO: 1131028 - DNA, 15 bp, Homo sapiens
gtttttttttgagac

SEQ ID NO: 1131029 - DNA, 15 bp, Homo sapiens
tgtttttttttgaga

SEQ ID NO: 1131030 - DNA, 15 bp, Homo sapiens
ttgtttttttttgag

SEQ ID NO: 1131031 - DNA, 15 bp, Homo sapiens
tttgtttttttttga

SEQ ID NO: 1131032 - DNA, 15 bp, Homo sapiens
ggttttgtttttttt

SEQ ID NO: 1131033 - DNA, 15 bp, Homo sapiens
tggttttgttttttt

SEQ ID NO: 1131034 - DNA, 15 bp, Homo sapiens
ttttggttttgtttt

SEQ ID NO: 1131035 - DNA, 15 bp, Homo sapiens
tttttggttttgttt

SEQ ID NO: 1131036 - DNA, 15 bp, Homo sapiens
ttttttggttttgtt

SEQ ID NO: 1131037 - DNA, 15 bp, Homo sapiens
gttttttggttttgt

SEQ ID NO: 1131038 - DNA, 15 bp, Homo sapiens
ggttttttggttttg

SEQ ID NO: 1131039 - DNA, 15 bp, Homo sapiens
tggttttttggtttt

SEQ ID NO: 1131040 - DNA, 15 bp, Homo sapiens
ttggttttttggttt

SEQ ID NO: 1131041 - DNA, 15 bp, Homo sapiens
tttggttttttggtt

SEQ ID NO: 1131042 - DNA, 15 bp, Homo sapiens
ttttggttttttggt

SEQ ID NO: 1131043 - DNA, 15 bp, Homo sapiens
tttttggttttttgg

SEQ ID NO: 1131044 - DNA, 15 bp, Homo sapiens
ttttttggttttttg

SEQ ID NO: 1131045 - DNA, 15 bp, Homo sapiens
gttttttggtttttt

SEQ ID NO: 1131046 - DNA, 15 bp, Homo sapiens
tgttttttggttttt

SEQ ID NO: 1131047 - DNA, 15 bp, Homo sapiens
ttgttttttggtttt

SEQ ID NO: 1131048 - DNA, 15 bp, Homo sapiens
tttgttttttggttt

SEQ ID NO: 1131049 - DNA, 15 bp, Homo sapiens
ttttgttttttggtt

SEQ ID NO: 1131050 - DNA, 15 bp, Homo sapiens
gttttgttttttggt

SEQ ID NO: 1131051 - DNA, 15 bp, Homo sapiens
gtgttttgttttgtt

SEQ ID NO: 1131052 - DNA, 15 bp, Homo sapiens
tgtgttttgttttgt

SEQ ID NO: 1131053 - DNA, 15 bp, Homo sapiens
gtgtgttttgttttg

SEQ ID NO: 1131054 - DNA, 15 bp, Homo sapiens
gtgtgtgttttgttt

SEQ ID NO: 1131055 - DNA, 15 bp, Homo sapiens
tgtgtgtgttttgtt

SEQ ID NO: 1131056 - DNA, 15 bp, Homo sapiens
gtgtgtgtgttttgt

SEQ ID NO: 1131057 - DNA, 15 bp, Homo sapiens
tgtgtgtgtgttttg

SEQ ID NO: 1131058 - DNA, 15 bp, Homo sapiens
gtgtgtgtgtgtttt

SEQ ID NO: 1131059 - DNA, 15 bp, Homo sapiens
ttttgtgtgtgtgtg

SEQ ID NO: 1131060 - DNA, 15 bp, Homo sapiens
cttttgtgtgtgtgt

SEQ ID NO: 1131061 - DNA, 15 bp, Homo sapiens
tcttttgtgtgtgtg

SEQ ID NO: 1131062 - DNA, 15 bp, Homo sapiens
ttcttttgtgtgtgt

SEQ ID NO: 1131063 - DNA, 15 bp, Homo sapiens
gttcttttgtgtgtg

SEQ ID NO: 1131064 - DNA, 15 bp, Homo sapiens
agttcttttgtgtgt

SEQ ID NO: 1131065 - DNA, 15 bp, Homo sapiens
tagttcttttgtgtg

SEQ ID NO: 1131066 - DNA, 15 bp, Homo sapiens
atagttcttttgtgt

SEQ ID NO: 1131067 - DNA, 15 bp, Homo sapiens
tatagttcttttgtg

SEQ ID NO: 1131068 - DNA, 15 bp, Homo sapiens
ttatagttcttttgt

SEQ ID NO: 1131069 - DNA, 15 bp, Homo sapiens
attatagttcttttg

SEQ ID NO: 1131070 - DNA, 15 bp, Homo sapiens
cattatagttctttt

SEQ ID NO: 1131071 - DNA, 15 bp, Homo sapiens
tcattatagttcttt

SEQ ID NO: 1131072 - DNA, 15 bp, Homo sapiens
gtcattatagttctt

SEQ ID NO: 1131073 - DNA, 15 bp, Homo sapiens
tgtcattatagttct

SEQ ID NO: 1131074 - DNA, 15 bp, Homo sapiens
atgtcattatagttc

SEQ ID NO: 1131075 - DNA, 15 bp, Homo sapiens
tatgtcattatagtt

SEQ ID NO: 1131076 - DNA, 15 bp, Homo sapiens
ctatgtcattatagt

SEQ ID NO: 1131077 - DNA, 15 bp, Homo sapiens
cctatgtcattatag

SEQ ID NO: 1131078 - DNA, 15 bp, Homo sapiens
tcctatgtcattata

SEQ ID NO: 1131079 - DNA, 15 bp, Homo sapiens
gtcctatgtcattat

SEQ ID NO: 1131080 - DNA, 15 bp, Homo sapiens
ggtcctatgtcatta

SEQ ID NO: 1131081 - DNA, 15 bp, Homo sapiens
aggtcctatgtcatt

SEQ ID NO: 1131082 - DNA, 15 bp, Homo sapiens
gaggtcctatgtcat

SEQ ID NO: 1131083 - DNA, 15 bp, Homo sapiens
agaggtcctatgtca

SEQ ID NO: 1131084 - DNA, 15 bp, Homo sapiens
aagaggtcctatgtc

SEQ ID NO: 1131085 - DNA, 15 bp, Homo sapiens
caagaggtcctatgt

SEQ ID NO: 1131086 - DNA, 15 bp, Homo sapiens
tcaagaggtcctatg

SEQ ID NO: 1131087 - DNA, 15 bp, Homo sapiens
gtcaagaggtcctat

SEQ ID NO: 1131088 - DNA, 15 bp, Homo sapiens
tgtcaagaggtccta

SEQ ID NO: 1131089 - DNA, 15 bp, Homo sapiens
ttgtcaagaggtcct

SEQ ID NO: 1131090 - DNA, 15 bp, Homo sapiens
attgtcaagaggtcc

SEQ ID NO: 1131091 - DNA, 15 bp, Homo sapiens
cattgtcaagaggtc

SEQ ID NO: 1131092 - DNA, 15 bp, Homo sapiens
tcattgtcaagaggt

SEQ ID NO: 1131093 - DNA, 15 bp, Homo sapiens
ttcattgtcaagagg

SEQ ID NO: 1131094 - DNA, 15 bp, Homo sapiens
tttcattgtcaagag

SEQ ID NO: 1131095 - DNA, 15 bp, Homo sapiens
gtttcattgtcaaga

SEQ ID NO: 1131096 - DNA, 15 bp, Homo sapiens
agtttcattgtcaag

SEQ ID NO: 1131097 - DNA, 15 bp, Homo sapiens
tagtttcattgtcaa

SEQ ID NO: 1131098 - DNA, 15 bp, Homo sapiens
ttagtttcattgtca

SEQ ID NO: 1131099 - DNA, 15 bp, Homo sapiens
tttagtttcattgtc

SEQ ID NO: 1131100 - DNA, 15 bp, Homo sapiens
ttttagtttcattgt

SEQ ID NO: 1131101 - DNA, 15 bp, Homo sapiens
attttagtttcattg

SEQ ID NO: 1131102 - DNA, 15 bp, Homo sapiens
aattttagtttcatt

SEQ ID NO: 1131103 - DNA, 15 bp, Homo sapiens
gaattttagtttcat

SEQ ID NO: 1131104 - DNA, 15 bp, Homo sapiens
tgaattttagtttca

SEQ ID NO: 1131105 - DNA, 15 bp, Homo sapiens
atgaattttagtttc

SEQ ID NO: 1131106 - DNA, 15 bp, Homo sapiens
tatgaattttagttt

SEQ ID NO: 1131107 - DNA, 15 bp, Homo sapiens
ttatgaattttagtt

SEQ ID NO: 1131108 - DNA, 15 bp, Homo sapiens
tttatgaattttagt

SEQ ID NO: 1131109 - DNA, 15 bp, Homo sapiens
ctttatgaattttag

SEQ ID NO: 1131110 - DNA, 15 bp, Homo sapiens
tctttatgaatttta

SEQ ID NO: 1131111 - DNA, 15 bp, Homo sapiens
atctttatgaatttt

SEQ ID NO: 1131112 - DNA, 15 bp, Homo sapiens
aatctttatgaattt

SEQ ID NO: 1131113 - DNA, 15 bp, Homo sapiens
aaatctttatgaatt

SEQ ID NO: 1131114 - DNA, 15 bp, Homo sapiens
caaatctttatgaat

SEQ ID NO: 1131115 - DNA, 15 bp, Homo sapiens
gcaaatctttatgaa

SEQ ID NO: 1131116 - DNA, 15 bp, Homo sapiens
ggcaaatctttatga

SEQ ID NO: 1131117 - DNA, 15 bp, Homo sapiens
aggcaaatctttatg

SEQ ID NO: 1131118 - DNA, 15 bp, Homo sapiens
aaggcaaatctttat

SEQ ID NO: 1131119 - DNA, 15 bp, Homo sapiens
gaaggcaaatcttta

SEQ ID NO: 1131120 - DNA, 15 bp, Homo sapiens
tgaaggcaaatcttt

SEQ ID NO: 1131121 - DNA, 15 bp, Homo sapiens
ttgaaggcaaatctt

SEQ ID NO: 1131122 - DNA, 15 bp, Homo sapiens
tttgaaggcaaatct

SEQ ID NO: 1131123 - DNA, 15 bp, Homo sapiens
ttttgaaggcaaatc

SEQ ID NO: 1131124 - DNA, 15 bp, Homo sapiens
attttgaaggcaaat

SEQ ID NO: 1131125 - DNA, 15 bp, Homo sapiens
aattttgaaggcaaa

SEQ ID NO: 1131126 - DNA, 15 bp, Homo sapiens
gaattttgaaggcaa

SEQ ID NO: 1131127 - DNA, 15 bp, Homo sapiens
agaattttgaaggca

SEQ ID NO: 1131128 - DNA, 15 bp, Homo sapiens
tagaattttgaaggc

SEQ ID NO: 1131129 - DNA, 15 bp, Homo sapiens
ttagaattttgaagg

SEQ ID NO: 1131130 - DNA, 15 bp, Homo sapiens
cttagaattttgaag

SEQ ID NO: 1131131 - DNA, 15 bp, Homo sapiens
ccttagaattttgaa

SEQ ID NO: 1131132 - DNA, 15 bp, Homo sapiens
cccttagaattttga

SEQ ID NO: 1131133 - DNA, 15 bp, Homo sapiens
ccccttagaattttg

SEQ ID NO: 1131134 - DNA, 15 bp, Homo sapiens
tccccttagaatttt

SEQ ID NO: 1131135 - DNA, 15 bp, Homo sapiens
ttccccttagaattt

SEQ ID NO: 1131136 - DNA, 15 bp, Homo sapiens
attccccttagaatt

SEQ ID NO: 1131137 - DNA, 15 bp, Homo sapiens
gattccccttagaat

SEQ ID NO: 1131138 - DNA, 15 bp, Homo sapiens
tgattccccttagaa

SEQ ID NO: 1131139 - DNA, 15 bp, Homo sapiens
atgattccccttaga

SEQ ID NO: 1131140 - DNA, 15 bp, Homo sapiens
aatgattccccttag

SEQ ID NO: 1131141 - DNA, 15 bp, Homo sapiens
gaatgattcccctta

SEQ ID NO: 1131142 - DNA, 15 bp, Homo sapiens
agaatgattcccctt

SEQ ID NO: 1131143 - DNA, 15 bp, Homo sapiens
tagaatgattcccct

SEQ ID NO: 1131144 - DNA, 15 bp, Homo sapiens
atagaatgattcccc

SEQ ID NO: 1131145 - DNA, 15 bp, Homo sapiens
tatagaatgattccc

SEQ ID NO: 1131146 - DNA, 15 bp, Homo sapiens
atatagaatgattcc

SEQ ID NO: 1131147 - DNA, 15 bp, Homo sapiens
catatagaatgattc

SEQ ID NO: 1131148 - DNA, 15 bp, Homo sapiens
acatatagaatgatt

SEQ ID NO: 1131149 - DNA, 15 bp, Homo sapiens
tacatatagaatgat

SEQ ID NO: 1131150 - DNA, 15 bp, Homo sapiens
ctacatatagaatga

SEQ ID NO: 1131151 - DNA, 15 bp, Homo sapiens
gctacatatagaatg

SEQ ID NO: 1131152 - DNA, 15 bp, Homo sapiens
tgctacatatagaat

SEQ ID NO: 1131153 - DNA, 15 bp, Homo sapiens
ttgctacatatagaa

SEQ ID NO: 1131154 - DNA, 15 bp, Homo sapiens
tttgctacatataga

SEQ ID NO: 1131155 - DNA, 15 bp, Homo sapiens
ctttgctacatatag

SEQ ID NO: 1131156 - DNA, 15 bp, Homo sapiens
gctttgctacatata

SEQ ID NO: 1131157 - DNA, 15 bp, Homo sapiens
agctttgctacatat

SEQ ID NO: 1131158 - DNA, 15 bp, Homo sapiens
tagctttgctacata

SEQ ID NO: 1131159 - DNA, 15 bp, Homo sapiens
atagctttgctacat

SEQ ID NO: 1131160 - DNA, 15 bp, Homo sapiens
aatagctttgctaca

SEQ ID NO: 1131161 - DNA, 15 bp, Homo sapiens
gaatagctttgctac

SEQ ID NO: 1131162 - DNA, 15 bp, Homo sapiens
agaatagctttgcta

SEQ ID NO: 1131163 - DNA, 15 bp, Homo sapiens
gagaatagctttgct

SEQ ID NO: 1131164 - DNA, 15 bp, Homo sapiens
tgagaatagctttgc

SEQ ID NO: 1131165 - DNA, 15 bp, Homo sapiens
ttgagaatagctttg

SEQ ID NO: 1131166 - DNA, 15 bp, Homo sapiens
cttgagaatagcttt

SEQ ID NO: 1131167 - DNA, 15 bp, Homo sapiens
tcttgagaatagctt

SEQ ID NO: 1131168 - DNA, 15 bp, Homo sapiens
ttcttgagaatagct

SEQ ID NO: 1131169 - DNA, 15 bp, Homo sapiens
attcttgagaatagc

SEQ ID NO: 1131170 - DNA, 15 bp, Homo sapiens
cattcttgagaatag

SEQ ID NO: 1131171 - DNA, 15 bp, Homo sapiens
tcattcttgagaata

SEQ ID NO: 1131172 - DNA, 15 bp, Homo sapiens
ctcattcttgagaat

SEQ ID NO: 1131173 - DNA, 15 bp, Homo sapiens
tctcattcttgagaa

SEQ ID NO: 1131174 - DNA, 15 bp, Homo sapiens
ctctcattcttgaga

SEQ ID NO: 1131175 - DNA, 15 bp, Homo sapiens
tctctcattcttgag

SEQ ID NO: 1131176 - DNA, 15 bp, Homo sapiens
ctctctcattcttga

SEQ ID NO: 1131177 - DNA, 15 bp, Homo sapiens
cctctctcattcttg

SEQ ID NO: 1131178 - DNA, 15 bp, Homo sapiens
acctctctcattctt

SEQ ID NO: 1131179 - DNA, 15 bp, Homo sapiens
gacctctctcattct

SEQ ID NO: 1131180 - DNA, 15 bp, Homo sapiens
agacctctctcattc

SEQ ID NO: 1131181 - DNA, 15 bp, Homo sapiens
tagacctctctcatt

SEQ ID NO: 1131182 - DNA, 15 bp, Homo sapiens
ttagacctctctcat

SEQ ID NO: 1131183 - DNA, 15 bp, Homo sapiens
tttagacctctctca

SEQ ID NO: 1131184 - DNA, 15 bp, Homo sapiens
ctttagacctctctc

SEQ ID NO: 1131185 - DNA, 15 bp, Homo sapiens
tctttagacctctct

SEQ ID NO: 1131186 - DNA, 15 bp, Homo sapiens
gtctttagacctctc

SEQ ID NO: 1131187 - DNA, 15 bp, Homo sapiens
tgtctttagacctct

SEQ ID NO: 1131188 - DNA, 15 bp, Homo sapiens
atgtctttagacctc

SEQ ID NO: 1131189 - DNA, 15 bp, Homo sapiens
aatgtctttagacct

SEQ ID NO: 1131190 - DNA, 15 bp, Homo sapiens
gaatgtctttagacc

SEQ ID NO: 1131191 - DNA, 15 bp, Homo sapiens
agaatgtctttagac

SEQ ID NO: 1131192 - DNA, 15 bp, Homo sapiens
gagaatgtctttaga

SEQ ID NO: 1131193 - DNA, 15 bp, Homo sapiens
tgagaatgtctttag

SEQ ID NO: 1131194 - DNA, 15 bp, Homo sapiens
ctgagaatgtcttta

SEQ ID NO: 1131195 - DNA, 15 bp, Homo sapiens
actgagaatgtcttt

SEQ ID NO: 1131196 - DNA, 15 bp, Homo sapiens
gactgagaatgtctt

SEQ ID NO: 1131197 - DNA, 15 bp, Homo sapiens
tgactgagaatgtct

SEQ ID NO: 1131198 - DNA, 15 bp, Homo sapiens
atgactgagaatgtc

SEQ ID NO: 1131199 - DNA, 15 bp, Homo sapiens
catgactgagaatgt

SEQ ID NO: 1131200 - DNA, 15 bp, Homo sapiens
gcatgactgagaatg

SEQ ID NO: 1131201 - DNA, 15 bp, Homo sapiens
tgcatgactgagaat

SEQ ID NO: 1131202 - DNA, 15 bp, Homo sapiens
ctgcatgactgagaa

SEQ ID NO: 1131203 - DNA, 15 bp, Homo sapiens
cctgcatgactgaga

SEQ ID NO: 1131204 - DNA, 15 bp, Homo sapiens
acctgcatgactgag

SEQ ID NO: 1131205 - DNA, 15 bp, Homo sapiens
gacctgcatgactga

SEQ ID NO: 1131206 - DNA, 15 bp, Homo sapiens
agacctgcatgactg

SEQ ID NO: 1131207 - DNA, 15 bp, Homo sapiens
gagacctgcatgact

SEQ ID NO: 1131208 - DNA, 15 bp, Homo sapiens
tgagacctgcatgac

SEQ ID NO: 1131209 - DNA, 15 bp, Homo sapiens
ttgagacctgcatga

SEQ ID NO: 1131210 - DNA, 15 bp, Homo sapiens
gttgagacctgcatg

SEQ ID NO: 1131211 - DNA, 15 bp, Homo sapiens
tgttgagacctgcat

SEQ ID NO: 1131212 - DNA, 15 bp, Homo sapiens
gtgttgagacctgca

SEQ ID NO: 1131213 - DNA, 15 bp, Homo sapiens
ggtgttgagacctgc

SEQ ID NO: 1131214 - DNA, 15 bp, Homo sapiens
aggtgttgagacctg

SEQ ID NO: 1131215 - DNA, 15 bp, Homo sapiens
gaggtgttgagacct

SEQ ID NO: 1131216 - DNA, 15 bp, Homo sapiens
agaggtgttgagacc

SEQ ID NO: 1131217 - DNA, 15 bp, Homo sapiens
tagaggtgttgagac

SEQ ID NO: 1131218 - DNA, 15 bp, Homo sapiens
gtagaggtgttgaga

SEQ ID NO: 1131219 - DNA, 15 bp, Homo sapiens
agtagaggtgttgag

SEQ ID NO: 1131220 - DNA, 15 bp, Homo sapiens
gagtagaggtgttga

SEQ ID NO: 1131221 - DNA, 15 bp, Homo sapiens
ggagtagaggtgttg

SEQ ID NO: 1131222 - DNA, 15 bp, Homo sapiens
gggagtagaggtgtt

SEQ ID NO: 1131223 - DNA, 15 bp, Homo sapiens
ggggagtagaggtgt

SEQ ID NO: 1131224 - DNA, 15 bp, Homo sapiens
tggggagtagaggtg

SEQ ID NO: 1131225 - DNA, 15 bp, Homo sapiens
atggggagtagaggt

SEQ ID NO: 1131226 - DNA, 15 bp, Homo sapiens
gatggggagtagagg

SEQ ID NO: 1131227 - DNA, 15 bp, Homo sapiens
agatggggagtagag

SEQ ID NO: 1131228 - DNA, 15 bp, Homo sapiens
aagatggggagtaga

SEQ ID NO: 1131229 - DNA, 15 bp, Homo sapiens
aaagatggggagtag

SEQ ID NO: 1131230 - DNA, 15 bp, Homo sapiens
aaaagatggggagta

SEQ ID NO: 1131231 - DNA, 15 bp, Homo sapiens
gaaaagatggggagt

SEQ ID NO: 1131232 - DNA, 15 bp, Homo sapiens
agaaaagatggggag

SEQ ID NO: 1131233 - DNA, 15 bp, Homo sapiens
gagaaaagatgggga

SEQ ID NO: 1131234 - DNA, 15 bp, Homo sapiens
tgagaaaagatgggg

SEQ ID NO: 1131235 - DNA, 15 bp, Homo sapiens
ctgagaaaagatggg

SEQ ID NO: 1131236 - DNA, 15 bp, Homo sapiens
tctgagaaaagatgg

SEQ ID NO: 1131237 - DNA, 15 bp, Homo sapiens
ttctgagaaaagatg

SEQ ID NO: 1131238 - DNA, 15 bp, Homo sapiens
tttctgagaaaagat

SEQ ID NO: 1131239 - DNA, 15 bp, Homo sapiens
ctttctgagaaaaga

SEQ ID NO: 1131240 - DNA, 15 bp, Homo sapiens
gctttctgagaaaag

SEQ ID NO: 1131241 - DNA, 15 bp, Homo sapiens
ggctttctgagaaaa

SEQ ID NO: 1131242 - DNA, 15 bp, Homo sapiens
tggctttctgagaaa

SEQ ID NO: 1131243 - DNA, 15 bp, Homo sapiens
gtggctttctgagaa

SEQ ID NO: 1131244 - DNA, 15 bp, Homo sapiens
tgtggctttctgaga

SEQ ID NO: 1131245 - DNA, 15 bp, Homo sapiens
ttgtggctttctgag

SEQ ID NO: 1131246 - DNA, 15 bp, Homo sapiens
tttgtggctttctga

SEQ ID NO: 1131247 - DNA, 15 bp, Homo sapiens
ttttgtggctttctg

SEQ ID NO: 1131248 - DNA, 15 bp, Homo sapiens
cttttgtggctttct

SEQ ID NO: 1131249 - DNA, 15 bp, Homo sapiens
ccttttgtggctttc

SEQ ID NO: 1131250 - DNA, 15 bp, Homo sapiens
cccttttgtggcttt

SEQ ID NO: 1131251 - DNA, 15 bp, Homo sapiens
ccccttttgtggctt

SEQ ID NO: 1131252 - DNA, 15 bp, Homo sapiens
cccccttttgtggct

SEQ ID NO: 1131253 - DNA, 15 bp, Homo sapiens
gcccccttttgtggc

SEQ ID NO: 1131254 - DNA, 15 bp, Homo sapiens
agcccccttttgtgg

SEQ ID NO: 1131255 - DNA, 15 bp, Homo sapiens
aagcccccttttgtg

SEQ ID NO: 1131256 - DNA, 15 bp, Homo sapiens
aaagcccccttttgt

SEQ ID NO: 1131257 - DNA, 15 bp, Homo sapiens
aaaagcccccttttg

SEQ ID NO: 1131258 - DNA, 15 bp, Homo sapiens
aaaaagccccctttt

SEQ ID NO: 1131259 - DNA, 15 bp, Homo sapiens
aaaaaagcccccttt

SEQ ID NO: 1131260 - DNA, 15 bp, Homo sapiens
aaaaaaagccccctt

SEQ ID NO: 1131261 - DNA, 15 bp, Homo sapiens
aaaaaaaagccccct

SEQ ID NO: 1131262 - DNA, 15 bp, Homo sapiens
taaaaaaaaagcccc

SEQ ID NO: 1131263 - DNA, 15 bp, Homo sapiens
ttaaaaaaaaagccc

SEQ ID NO: 1131264 - DNA, 15 bp, Homo sapiens
tttaaaaaaaaagcc

SEQ ID NO: 1131265 - DNA, 15 bp, Homo sapiens
ttttaaaaaaaaagc

SEQ ID NO: 1131266 - DNA, 15 bp, Homo sapiens
tttttaaaaaaaaag

SEQ ID NO: 1131267 - DNA, 15 bp, Homo sapiens
attttttaaaaaaaa

SEQ ID NO: 1131268 - DNA, 15 bp, Homo sapiens
ccttattttttaaaa

SEQ ID NO: 1131269 - DNA, 15 bp, Homo sapiens
accttattttttaaa

SEQ ID NO: 1131270 - DNA, 15 bp, Homo sapiens
gaccttattttttaa

SEQ ID NO: 1131271 - DNA, 15 bp, Homo sapiens
tgaccttatttttta

SEQ ID NO: 1131272 - DNA, 15 bp, Homo sapiens
gtgaccttatttttt

SEQ ID NO: 1131273 - DNA, 15 bp, Homo sapiens
tgtgaccttattttt

SEQ ID NO: 1131274 - DNA, 15 bp, Homo sapiens
ctgtgaccttatttt

SEQ ID NO: 1131275 - DNA, 15 bp, Homo sapiens
tctgtgaccttattt

SEQ ID NO: 1131276 - DNA, 15 bp, Homo sapiens
atctgtgaccttatt

SEQ ID NO: 1131277 - DNA, 15 bp, Homo sapiens
tatctgtgaccttat

SEQ ID NO: 1131278 - DNA, 15 bp, Homo sapiens
ttatctgtgacctta

SEQ ID NO: 1131279 - DNA, 15 bp, Homo sapiens
tttatctgtgacctt

SEQ ID NO: 1131280 - DNA, 15 bp, Homo sapiens
ttttatctgtgacct

SEQ ID NO: 1131281 - DNA, 15 bp, Homo sapiens
tttttatctgtgacc

SEQ ID NO: 1131282 - DNA, 15 bp, Homo sapiens
ttttttatctgtgac

SEQ ID NO: 1131283 - DNA, 15 bp, Homo sapiens
tttttttatctgtga

SEQ ID NO: 1131284 - DNA, 15 bp, Homo sapiens
ttttttttatctgtg

SEQ ID NO: 1131285 - DNA, 15 bp, Homo sapiens
attttttttatctgt

SEQ ID NO: 1131286 - DNA, 15 bp, Homo sapiens
tattttttttatctg

SEQ ID NO: 1131287 - DNA, 15 bp, Homo sapiens
ctattttttttatct

SEQ ID NO: 1131288 - DNA, 15 bp, Homo sapiens
cctattttttttatc

SEQ ID NO: 1131289 - DNA, 15 bp, Homo sapiens
tcctattttttttat

SEQ ID NO: 1131290 - DNA, 15 bp, Homo sapiens
ttcctatttttttta

SEQ ID NO: 1131291 - DNA, 15 bp, Homo sapiens
cttcctatttttttt

SEQ ID NO: 1131292 - DNA, 15 bp, Homo sapiens
tcttcctattttttt

SEQ ID NO: 1131293 - DNA, 15 bp, Homo sapiens
atcttcctatttttt

SEQ ID NO: 1131294 - DNA, 15 bp, Homo sapiens
tatcttcctattttt

SEQ ID NO: 1131295 - DNA, 15 bp, Homo sapiens
atatcttcctatttt

SEQ ID NO: 1131296 - DNA, 15 bp, Homo sapiens
catatcttcctattt

SEQ ID NO: 1131297 - DNA, 15 bp, Homo sapiens
ccatatcttcctatt

SEQ ID NO: 1131298 - DNA, 15 bp, Homo sapiens
cccatatcttcctat

SEQ ID NO: 1131299 - DNA, 15 bp, Homo sapiens
tcccatatcttccta

SEQ ID NO: 1131300 - DNA, 15 bp, Homo sapiens
atcccatatcttcct

SEQ ID NO: 1131301 - DNA, 15 bp, Homo sapiens
catcccatatcttcc

SEQ ID NO: 1131302 - DNA, 15 bp, Homo sapiens
acatcccatatcttc

SEQ ID NO: 1131303 - DNA, 15 bp, Homo sapiens
tacatcccatatctt

SEQ ID NO: 1131304 - DNA, 15 bp, Homo sapiens
ttacatcccatatct

SEQ ID NO: 1131305 - DNA, 15 bp, Homo sapiens
cttacatcccatatc

SEQ ID NO: 1131306 - DNA, 15 bp, Homo sapiens
tcttacatcccatat

SEQ ID NO: 1131307 - DNA, 15 bp, Homo sapiens
ttcttacatcccata

SEQ ID NO: 1131308 - DNA, 15 bp, Homo sapiens
gttcttacatcccat

SEQ ID NO: 1131309 - DNA, 15 bp, Homo sapiens
tgttcttacatccca

SEQ ID NO: 1131310 - DNA, 15 bp, Homo sapiens
ctgttcttacatccc

SEQ ID NO: 1131311 - DNA, 15 bp, Homo sapiens
tctgttcttacatcc

SEQ ID NO: 1131312 - DNA, 15 bp, Homo sapiens
atctgttcttacatc

SEQ ID NO: 1131313 - DNA, 15 bp, Homo sapiens
catctgttcttacat

SEQ ID NO: 1131314 - DNA, 15 bp, Homo sapiens
tcatctgttcttaca

SEQ ID NO: 1131315 - DNA, 15 bp, Homo sapiens
gtcatctgttcttac

SEQ ID NO: 1131316 - DNA, 15 bp, Homo sapiens
ggtcatctgttctta

SEQ ID NO: 1131317 - DNA, 15 bp, Homo sapiens
aggtcatctgttctt

SEQ ID NO: 1131318 - DNA, 15 bp, Homo sapiens
taggtcatctgttct

SEQ ID NO: 1131319 - DNA, 15 bp, Homo sapiens
ttaggtcatctgttc

SEQ ID NO: 1131320 - DNA, 15 bp, Homo sapiens
gttaggtcatctgtt

SEQ ID NO: 1131321 - DNA, 15 bp, Homo sapiens
agttaggtcatctgt

SEQ ID NO: 1131322 - DNA, 15 bp, Homo sapiens
gagttaggtcatctg

SEQ ID NO: 1131323 - DNA, 15 bp, Homo sapiens
tgagttaggtcatct

SEQ ID NO: 1131324 - DNA, 15 bp, Homo sapiens
ttgagttaggtcatc

SEQ ID NO: 1131325 - DNA, 15 bp, Homo sapiens
cttgagttaggtcat

SEQ ID NO: 1131326 - DNA, 15 bp, Homo sapiens
tcttgagttaggtca

SEQ ID NO: 1131327 - DNA, 15 bp, Homo sapiens
ttcttgagttaggtc

SEQ ID NO: 1131328 - DNA, 15 bp, Homo sapiens
attcttgagttaggt

SEQ ID NO: 1131329 - DNA, 15 bp, Homo sapiens
cattcttgagttagg

SEQ ID NO: 1131330 - DNA, 15 bp, Homo sapiens
tcattcttgagttag

SEQ ID NO: 1131331 - DNA, 15 bp, Homo sapiens
ctcattcttgagtta

SEQ ID NO: 1131332 - DNA, 15 bp, Homo sapiens
cctcattcttgagtt

SEQ ID NO: 1131333 - DNA, 15 bp, Homo sapiens
acctcattcttgagt

SEQ ID NO: 1131334 - DNA, 15 bp, Homo sapiens
cacctcattcttgag

SEQ ID NO: 1131335 - DNA, 15 bp, Homo sapiens
gcacctcattcttga

SEQ ID NO: 1131336 - DNA, 15 bp, Homo sapiens
agcacctcattcttg

SEQ ID NO: 1131337 - DNA, 15 bp, Homo sapiens
cagcacctcattctt

SEQ ID NO: 1131338 - DNA, 15 bp, Homo sapiens
ccagcacctcattct

SEQ ID NO: 1131339 - DNA, 15 bp, Homo sapiens
cccagcacctcattc

SEQ ID NO: 1131340 - DNA, 15 bp, Homo sapiens
tcccagcacctcatt

SEQ ID NO: 1131341 - DNA, 15 bp, Homo sapiens
ttcccagcacctcat

SEQ ID NO: 1131342 - DNA, 15 bp, Homo sapiens
attcccagcacctca

SEQ ID NO: 1131343 - DNA, 15 bp, Homo sapiens
gattcccagcacctc

SEQ ID NO: 1131344 - DNA, 15 bp, Homo sapiens
agattcccagcacct

SEQ ID NO: 1131345 - DNA, 15 bp, Homo sapiens
gagattcccagcacc

SEQ ID NO: 1131346 - DNA, 15 bp, Homo sapiens
ggagattcccagcac

SEQ ID NO: 1131347 - DNA, 15 bp, Homo sapiens
tggagattcccagca

SEQ ID NO: 1131348 - DNA, 15 bp, Homo sapiens
ctggagattcccagc

SEQ ID NO: 1131349 - DNA, 15 bp, Homo sapiens
cctggagattcccag

SEQ ID NO: 1131350 - DNA, 15 bp, Homo sapiens
tcctggagattccca

SEQ ID NO: 1131351 - DNA, 15 bp, Homo sapiens
atcctggagattccc

SEQ ID NO: 1131352 - DNA, 15 bp, Homo sapiens
catcctggagattcc

SEQ ID NO: 1131353 - DNA, 15 bp, Homo sapiens
tcatcctggagattc

SEQ ID NO: 1131354 - DNA, 15 bp, Homo sapiens
atcatcctggagatt

SEQ ID NO: 1131355 - DNA, 15 bp, Homo sapiens
aatcatcctggagat

SEQ ID NO: 1131356 - DNA, 15 bp, Homo sapiens
taatcatcctggaga

SEQ ID NO: 1131357 - DNA, 15 bp, Homo sapiens
ctaatcatcctggag

SEQ ID NO: 1131358 - DNA, 15 bp, Homo sapiens
cctaatcatcctgga

SEQ ID NO: 1131359 - DNA, 15 bp, Homo sapiens
tcctaatcatcctgg

SEQ ID NO: 1131360 - DNA, 15 bp, Homo sapiens
ttcctaatcatcctg

SEQ ID NO: 1131361 - DNA, 15 bp, Homo sapiens
cttcctaatcatcct

SEQ ID NO: 1131362 - DNA, 15 bp, Homo sapiens
ccttcctaatcatcc

SEQ ID NO: 1131363 - DNA, 15 bp, Homo sapiens
tccttcctaatcatc

SEQ ID NO: 1131364 - DNA, 15 bp, Homo sapiens
ctccttcctaatcat

SEQ ID NO: 1131365 - DNA, 15 bp, Homo sapiens
tctccttcctaatca

SEQ ID NO: 1131366 - DNA, 15 bp, Homo sapiens
atctccttcctaatc

SEQ ID NO: 1131367 - DNA, 15 bp, Homo sapiens
gatctccttcctaat

SEQ ID NO: 1131368 - DNA, 15 bp, Homo sapiens
ggatctccttcctaa

SEQ ID NO: 1131369 - DNA, 15 bp, Homo sapiens
gggatctccttccta

SEQ ID NO: 1131370 - DNA, 15 bp, Homo sapiens
tgggatctccttcct

SEQ ID NO: 1131371 - DNA, 15 bp, Homo sapiens
ctgggatctccttcc

SEQ ID NO: 1131372 - DNA, 15 bp, Homo sapiens
cctgggatctccttc

SEQ ID NO: 1131373 - DNA, 15 bp, Homo sapiens
tcctgggatctcctt

SEQ ID NO: 1131374 - DNA, 15 bp, Homo sapiens
atcctgggatctcct

SEQ ID NO: 1131375 - DNA, 15 bp, Homo sapiens
aatcctgggatctcc

SEQ ID NO: 1131376 - DNA, 15 bp, Homo sapiens
taatcctgggatctc

SEQ ID NO: 1131377 - DNA, 15 bp, Homo sapiens
gtaatcctgggatct

SEQ ID NO: 1131378 - DNA, 15 bp, Homo sapiens
tgtaatcctgggatc

SEQ ID NO: 1131379 - DNA, 15 bp, Homo sapiens
ctgtaatcctgggat

SEQ ID NO: 1131380 - DNA, 15 bp, Homo sapiens
cctgtaatcctggga

SEQ ID NO: 1131381 - DNA, 15 bp, Homo sapiens
acctgtaatcctggg

SEQ ID NO: 1131382 - DNA, 15 bp, Homo sapiens
cacctgtaatcctgg

SEQ ID NO: 1131383 - DNA, 15 bp, Homo sapiens
acacctgtaatcctg

SEQ ID NO: 1131384 - DNA, 15 bp, Homo sapiens
agcacacctgtaatc

SEQ ID NO: 1131385 - DNA, 15 bp, Homo sapiens
cagcacacctgtaat

SEQ ID NO: 1131386 - DNA, 15 bp, Homo sapiens
acagcacacctgtaa

SEQ ID NO: 1131387 - DNA, 15 bp, Homo sapiens
tacagcacacctgta

SEQ ID NO: 1131388 - DNA, 15 bp, Homo sapiens
gtacagcacacctgt

SEQ ID NO: 1131389 - DNA, 15 bp, Homo sapiens
ggtacagcacacctg

SEQ ID NO: 1131390 - DNA, 15 bp, Homo sapiens
gggtacagcacacct

SEQ ID NO: 1131391 - DNA, 15 bp, Homo sapiens
tgggtacagcacacc

SEQ ID NO: 1131392 - DNA, 15 bp, Homo sapiens
ctgggtacagcacac

SEQ ID NO: 1131393 - DNA, 15 bp, Homo sapiens
tctgggtacagcaca

SEQ ID NO: 1131394 - DNA, 15 bp, Homo sapiens
ctctgggtacagcac

SEQ ID NO: 1131395 - DNA, 15 bp, Homo sapiens
cctctgggtacagca

SEQ ID NO: 1131396 - DNA, 15 bp, Homo sapiens
tcctctgggtacagc

SEQ ID NO: 1131397 - DNA, 15 bp, Homo sapiens
ttcctctgggtacag

SEQ ID NO: 1131398 - DNA, 15 bp, Homo sapiens
cttcctctgggtaca

SEQ ID NO: 1131399 - DNA, 15 bp, Homo sapiens
acttcctctgggtac

SEQ ID NO: 1131400 - DNA, 15 bp, Homo sapiens
tacttcctctgggta

SEQ ID NO: 1131401 - DNA, 15 bp, Homo sapiens
ctacttcctctgggt

SEQ ID NO: 1131402 - DNA, 15 bp, Homo sapiens
actacttcctctggg

SEQ ID NO: 1131403 - DNA, 15 bp, Homo sapiens
gactacttcctctgg

SEQ ID NO: 1131404 - DNA, 15 bp, Homo sapiens
tgactacttcctctg

SEQ ID NO: 1131405 - DNA, 15 bp, Homo sapiens
ctgactacttcctct

SEQ ID NO: 1131406 - DNA, 15 bp, Homo sapiens
gctgactacttcctc

SEQ ID NO: 1131407 - DNA, 15 bp, Homo sapiens
agctgactacttcct

SEQ ID NO: 1131408 - DNA, 15 bp, Homo sapiens
tagctgactacttcc

SEQ ID NO: 1131409 - DNA, 15 bp, Homo sapiens
ctagctgactacttc

SEQ ID NO: 1131410 - DNA, 15 bp, Homo sapiens
tctagctgactactt

SEQ ID NO: 1131411 - DNA, 15 bp, Homo sapiens
atctagctgactact

SEQ ID NO: 1131412 - DNA, 15 bp, Homo sapiens
aatctagctgactac

SEQ ID NO: 1131413 - DNA, 15 bp, Homo sapiens
caatctagctgacta

SEQ ID NO: 1131414 - DNA, 15 bp, Homo sapiens
tcaatctagctgact

SEQ ID NO: 1131415 - DNA, 15 bp, Homo sapiens
ctcaatctagctgac

SEQ ID NO: 1131416 - DNA, 15 bp, Homo sapiens
cctcaatctagctga

SEQ ID NO: 1131417 - DNA, 15 bp, Homo sapiens
gcctcaatctagctg

SEQ ID NO: 1131418 - DNA, 15 bp, Homo sapiens
tgcctcaatctagct

SEQ ID NO: 1131419 - DNA, 15 bp, Homo sapiens
ctgcctcaatctagc

SEQ ID NO: 1131420 - DNA, 15 bp, Homo sapiens
cctgcctcaatctag

SEQ ID NO: 1131421 - DNA, 15 bp, Homo sapiens
ccctgcctcaatcta

SEQ ID NO: 1131422 - DNA, 15 bp, Homo sapiens
tccctgcctcaatct

SEQ ID NO: 1131423 - DNA, 15 bp, Homo sapiens
ttccctgcctcaatc

SEQ ID NO: 1131424 - DNA, 15 bp, Homo sapiens
tttccctgcctcaat

SEQ ID NO: 1131425 - DNA, 15 bp, Homo sapiens
atttccctgcctcaa

SEQ ID NO: 1131426 - DNA, 15 bp, Homo sapiens
catttccctgcctca

SEQ ID NO: 1131427 - DNA, 15 bp, Homo sapiens
ccatttccctgcctc

SEQ ID NO: 1131428 - DNA, 15 bp, Homo sapiens
cccatttccctgcct

SEQ ID NO: 1131429 - DNA, 15 bp, Homo sapiens
acccatttccctgcc

SEQ ID NO: 1131430 - DNA, 15 bp, Homo sapiens
aacccatttccctgc

SEQ ID NO: 1131431 - DNA, 15 bp, Homo sapiens
gaacccatttccctg

SEQ ID NO: 1131432 - DNA, 15 bp, Homo sapiens
agaacccatttccct

SEQ ID NO: 1131433 - DNA, 15 bp, Homo sapiens
cagaacccatttccc

SEQ ID NO: 1131434 - DNA, 15 bp, Homo sapiens
tcagaacccatttcc

SEQ ID NO: 1131435 - DNA, 15 bp, Homo sapiens
ctcagaacccatttc

SEQ ID NO: 1131436 - DNA, 15 bp, Homo sapiens
tctcagaacccattt

SEQ ID NO: 1131437 - DNA, 15 bp, Homo sapiens
ctctcagaacccatt

SEQ ID NO: 1131438 - DNA, 15 bp, Homo sapiens
cctctcagaacccat

SEQ ID NO: 1131439 - DNA, 15 bp, Homo sapiens
tcctctcagaaccca

SEQ ID NO: 1131440 - DNA, 15 bp, Homo sapiens
ttcctctcagaaccc

SEQ ID NO: 1131441 - DNA, 15 bp, Homo sapiens
attcctctcagaacc

SEQ ID NO: 1131442 - DNA, 15 bp, Homo sapiens
cattcctctcagaac

SEQ ID NO: 1131443 - DNA, 15 bp, Homo sapiens
acattcctctcagaa

SEQ ID NO: 1131444 - DNA, 15 bp, Homo sapiens
gacattcctctcaga

SEQ ID NO: 1131445 - DNA, 15 bp, Homo sapiens
ggacattcctctcag

SEQ ID NO: 1131446 - DNA, 15 bp, Homo sapiens
gggacattcctctca

SEQ ID NO: 1131447 - DNA, 15 bp, Homo sapiens
ggggacattcctctc

SEQ ID NO: 1131448 - DNA, 15 bp, Homo sapiens
gggggacattcctct

SEQ ID NO: 1131449 - DNA, 15 bp, Homo sapiens
tgggggacattcctc

SEQ ID NO: 1131450 - DNA, 15 bp, Homo sapiens
ctgggggacattcct

SEQ ID NO: 1131451 - DNA, 15 bp, Homo sapiens
tctgggggacattcc

SEQ ID NO: 1131452 - DNA, 15 bp, Homo sapiens
ttctgggggacattc

SEQ ID NO: 1131453 - DNA, 15 bp, Homo sapiens
tttctgggggacatt

SEQ ID NO: 1131454 - DNA, 15 bp, Homo sapiens
ttttctgggggacat

SEQ ID NO: 1131455 - DNA, 15 bp, Homo sapiens
tttttctgggggaca

SEQ ID NO: 1131456 - DNA, 15 bp, Homo sapiens
gtttttctgggggac

SEQ ID NO: 1131457 - DNA, 15 bp, Homo sapiens
tgtttttctggggga

SEQ ID NO: 1131458 - DNA, 15 bp, Homo sapiens
atgtttttctggggg

SEQ ID NO: 1131459 - DNA, 15 bp, Homo sapiens
catgtttttctgggg

SEQ ID NO: 1131460 - DNA, 15 bp, Homo sapiens
ccatgtttttctggg

SEQ ID NO: 1131461 - DNA, 15 bp, Homo sapiens
accatgtttttctgg

SEQ ID NO: 1131462 - DNA, 15 bp, Homo sapiens
caccatgtttttctg

SEQ ID NO: 1131463 - DNA, 15 bp, Homo sapiens
gcaccatgtttttct

SEQ ID NO: 1131464 - DNA, 15 bp, Homo sapiens
agcaccatgtttttc

SEQ ID NO: 1131465 - DNA, 15 bp, Homo sapiens
cagcaccatgttttt

SEQ ID NO: 1131466 - DNA, 15 bp, Homo sapiens
gcagcaccatgtttt

SEQ ID NO: 1131467 - DNA, 15 bp, Homo sapiens
agcagcaccatgttt

SEQ ID NO: 1131468 - DNA, 15 bp, Homo sapiens
tagcagcaccatgtt

SEQ ID NO: 1131469 - DNA, 15 bp, Homo sapiens
ctagcagcaccatgt

SEQ ID NO: 1131470 - DNA, 15 bp, Homo sapiens
tctagcagcaccatg

SEQ ID NO: 1131471 - DNA, 15 bp, Homo sapiens
ttctagcagcaccat

SEQ ID NO: 1131472 - DNA, 15 bp, Homo sapiens
attctagcagcacca

SEQ ID NO: 1131473 - DNA, 15 bp, Homo sapiens
cattctagcagcacc

SEQ ID NO: 1131474 - DNA, 15 bp, Homo sapiens
gcattctagcagcac

SEQ ID NO: 1131475 - DNA, 15 bp, Homo sapiens
ggcattctagcagca

SEQ ID NO: 1131476 - DNA, 15 bp, Homo sapiens
aggcattctagcagc

SEQ ID NO: 1131477 - DNA, 15 bp, Homo sapiens
caggcattctagcag

SEQ ID NO: 1131478 - DNA, 15 bp, Homo sapiens
ccaggcattctagca

SEQ ID NO: 1131479 - DNA, 15 bp, Homo sapiens
accaggcattctagc

SEQ ID NO: 1131480 - DNA, 15 bp, Homo sapiens
caccaggcattctag

SEQ ID NO: 1131481 - DNA, 15 bp, Homo sapiens
ccaccaggcattcta

SEQ ID NO: 1131482 - DNA, 15 bp, Homo sapiens
cccaccaggcattct

SEQ ID NO: 1131483 - DNA, 15 bp, Homo sapiens
acccaccaggcattc

SEQ ID NO: 1131484 - DNA, 15 bp, Homo sapiens
aacccaccaggcatt

SEQ ID NO: 1131485 - DNA, 15 bp, Homo sapiens
aaacccaccaggcat

SEQ ID NO: 1131486 - DNA, 15 bp, Homo sapiens
caaacccaccaggca

SEQ ID NO: 1131487 - DNA, 15 bp, Homo sapiens
tcaaacccaccaggc

SEQ ID NO: 1131488 - DNA, 15 bp, Homo sapiens
ttcaaacccaccagg

SEQ ID NO: 1131489 - DNA, 15 bp, Homo sapiens
attcaaacccaccag

SEQ ID NO: 1131490 - DNA, 15 bp, Homo sapiens
cattcaaacccacca

SEQ ID NO: 1131491 - DNA, 15 bp, Homo sapiens
gcattcaaacccacc

SEQ ID NO: 1131492 - DNA, 15 bp, Homo sapiens
agcattcaaacccac

SEQ ID NO: 1131493 - DNA, 15 bp, Homo sapiens
cagcattcaaaccca

SEQ ID NO: 1131494 - DNA, 15 bp, Homo sapiens
tcagcattcaaaccc

SEQ ID NO: 1131495 - DNA, 15 bp, Homo sapiens
ctcagcattcaaacc

SEQ ID NO: 1131496 - DNA, 15 bp, Homo sapiens
tctcagcattcaaac

SEQ ID NO: 1131497 - DNA, 15 bp, Homo sapiens
ctctcagcattcaaa

SEQ ID NO: 1131498 - DNA, 15 bp, Homo sapiens
tctctcagcattcaa

SEQ ID NO: 1131499 - DNA, 15 bp, Homo sapiens
ttctctcagcattca

SEQ ID NO: 1131500 - DNA, 15 bp, Homo sapiens
cttctctcagcattc

SEQ ID NO: 1131501 - DNA, 15 bp, Homo sapiens
tcttctctcagcatt

SEQ ID NO: 1131502 - DNA, 15 bp, Homo sapiens
gtcttctctcagcat

SEQ ID NO: 1131503 - DNA, 15 bp, Homo sapiens
tgtcttctctcagca

SEQ ID NO: 1131504 - DNA, 15 bp, Homo sapiens
ctgtcttctctcagc

SEQ ID NO: 1131505 - DNA, 15 bp, Homo sapiens
tctgtcttctctcag

SEQ ID NO: 1131506 - DNA, 15 bp, Homo sapiens
ttctgtcttctctca

SEQ ID NO: 1131507 - DNA, 15 bp, Homo sapiens
gttctgtcttctctc

SEQ ID NO: 1131508 - DNA, 15 bp, Homo sapiens
ggttctgtcttctct

SEQ ID NO: 1131509 - DNA, 15 bp, Homo sapiens
gggttctgtcttctc

SEQ ID NO: 1131510 - DNA, 15 bp, Homo sapiens
ggggttctgtcttct

SEQ ID NO: 1131511 - DNA, 15 bp, Homo sapiens
gggggttctgtcttc

SEQ ID NO: 1131512 - DNA, 15 bp, Homo sapiens
agggggttctgtctt

SEQ ID NO: 1131513 - DNA, 15 bp, Homo sapiens
cagggggttctgtct

SEQ ID NO: 1131514 - DNA, 15 bp, Homo sapiens
gcagggggttctgtc

SEQ ID NO: 1131515 - DNA, 15 bp, Homo sapiens
agcagggggttctgt

SEQ ID NO: 1131516 - DNA, 15 bp, Homo sapiens
tagcagggggttctg

SEQ ID NO: 1131517 - DNA, 15 bp, Homo sapiens
ctagcagggggttct

SEQ ID NO: 1131518 - DNA, 15 bp, Homo sapiens
tctagcagggggttc

SEQ ID NO: 1131519 - DNA, 15 bp, Homo sapiens
ctctagcagggggtt

SEQ ID NO: 1131520 - DNA, 15 bp, Homo sapiens
actctagcagggggt

SEQ ID NO: 1131521 - DNA, 15 bp, Homo sapiens
aactctagcaggggg

SEQ ID NO: 1131522 - DNA, 15 bp, Homo sapiens
aaactctagcagggg

SEQ ID NO: 1131523 - DNA, 15 bp, Homo sapiens
caaactctagcaggg

SEQ ID NO: 1131524 - DNA, 15 bp, Homo sapiens
tcaaactctagcagg

SEQ ID NO: 1131525 - DNA, 15 bp, Homo sapiens
ctcaaactctagcag

SEQ ID NO: 1131526 - DNA, 15 bp, Homo sapiens
cctcaaactctagca

SEQ ID NO: 1131527 - DNA, 15 bp, Homo sapiens
ccctcaaactctagc

SEQ ID NO: 1131528 - DNA, 15 bp, Homo sapiens
accctcaaactctag

SEQ ID NO: 1131529 - DNA, 15 bp, Homo sapiens
taccctcaaactcta

SEQ ID NO: 1131530 - DNA, 15 bp, Homo sapiens
ttaccctcaaactct

SEQ ID NO: 1131531 - DNA, 15 bp, Homo sapiens
cttaccctcaaactc

SEQ ID NO: 1131532 - DNA, 15 bp, Homo sapiens
acttaccctcaaact

SEQ ID NO: 1131533 - DNA, 15 bp, Homo sapiens
aacttaccctcaaac

SEQ ID NO: 1131534 - DNA, 15 bp, Homo sapiens
taacttaccctcaaa

SEQ ID NO: 1131535 - DNA, 15 bp, Homo sapiens
ctaacttaccctcaa

SEQ ID NO: 1131536 - DNA, 15 bp, Homo sapiens
gctaacttaccctca

SEQ ID NO: 1131537 - DNA, 15 bp, Homo sapiens
tgctaacttaccctc

SEQ ID NO: 1131538 - DNA, 15 bp, Homo sapiens
ttgctaacttaccct

SEQ ID NO: 1131539 - DNA, 15 bp, Homo sapiens
attgctaacttaccc

SEQ ID NO: 1131540 - DNA, 15 bp, Homo sapiens
cattgctaacttacc

SEQ ID NO: 1131541 - DNA, 15 bp, Homo sapiens
gcattgctaacttac

SEQ ID NO: 1131542 - DNA, 15 bp, Homo sapiens
cgcattgctaactta

SEQ ID NO: 1131543 - DNA, 15 bp, Homo sapiens
acgcattgctaactt

SEQ ID NO: 1131544 - DNA, 15 bp, Homo sapiens
tacgcattgctaact

SEQ ID NO: 1131545 - DNA, 15 bp, Homo sapiens
ttacgcattgctaac

SEQ ID NO: 1131546 - DNA, 15 bp, Homo sapiens
attacgcattgctaa

SEQ ID NO: 1131547 - DNA, 15 bp, Homo sapiens
tattacgcattgcta

SEQ ID NO: 1131548 - DNA, 15 bp, Homo sapiens
ctattacgcattgct

SEQ ID NO: 1131549 - DNA, 15 bp, Homo sapiens
tctattacgcattgc

SEQ ID NO: 1131550 - DNA, 15 bp, Homo sapiens
ttctattacgcattg

SEQ ID NO: 1131551 - DNA, 15 bp, Homo sapiens
cttctattacgcatt

SEQ ID NO: 1131552 - DNA, 15 bp, Homo sapiens
tcttctattacgcat

SEQ ID NO: 1131553 - DNA, 15 bp, Homo sapiens
gtcttctattacgca

SEQ ID NO: 1131554 - DNA, 15 bp, Homo sapiens
tgtcttctattacgc

SEQ ID NO: 1131555 - DNA, 15 bp, Homo sapiens
ttgtcttctattacg

SEQ ID NO: 1131556 - DNA, 15 bp, Homo sapiens
tttgtcttctattac

SEQ ID NO: 1131557 - DNA, 15 bp, Homo sapiens
ctttgtcttctatta

SEQ ID NO: 1131558 - DNA, 15 bp, Homo sapiens
tctttgtcttctatt

SEQ ID NO: 1131559 - DNA, 15 bp, Homo sapiens
ctctttgtcttctat

SEQ ID NO: 1131560 - DNA, 15 bp, Homo sapiens
tctctttgtcttcta

SEQ ID NO: 1131561 - DNA, 15 bp, Homo sapiens
ctctctttgtcttct

SEQ ID NO: 1131562 - DNA, 15 bp, Homo sapiens
actctctttgtcttc

SEQ ID NO: 1131563 - DNA, 15 bp, Homo sapiens
cactctctttgtctt

SEQ ID NO: 1131564 - DNA, 15 bp, Homo sapiens
tcactctctttgtct

SEQ ID NO: 1131565 - DNA, 15 bp, Homo sapiens
ctcactctctttgtc

SEQ ID NO: 1131566 - DNA, 15 bp, Homo sapiens
tctcactctctttgt

SEQ ID NO: 1131567 - DNA, 15 bp, Homo sapiens
atctcactctctttg

SEQ ID NO: 1131568 - DNA, 15 bp, Homo sapiens
aatctcactctcttt

SEQ ID NO: 1131569 - DNA, 15 bp, Homo sapiens
caatctcactctctt

SEQ ID NO: 1131570 - DNA, 15 bp, Homo sapiens
ccaatctcactctct

SEQ ID NO: 1131571 - DNA, 15 bp, Homo sapiens
tccaatctcactctc

SEQ ID NO: 1131572 - DNA, 15 bp, Homo sapiens
ctccaatctcactct

SEQ ID NO: 1131573 - DNA, 15 bp, Homo sapiens
tctccaatctcactc

SEQ ID NO: 1131574 - DNA, 15 bp, Homo sapiens
atctccaatctcact

SEQ ID NO: 1131575 - DNA, 15 bp, Homo sapiens
aatctccaatctcac

SEQ ID NO: 1131576 - DNA, 15 bp, Homo sapiens
aaatctccaatctca

SEQ ID NO: 1131577 - DNA, 15 bp, Homo sapiens
aaaatctccaatctc

SEQ ID NO: 1131578 - DNA, 15 bp, Homo sapiens
aaaaatctccaatct

SEQ ID NO: 1131579 - DNA, 15 bp, Homo sapiens
taaaaatctccaatc

SEQ ID NO: 1131580 - DNA, 15 bp, Homo sapiens
ctaaaaatctccaat

SEQ ID NO: 1131581 - DNA, 15 bp, Homo sapiens
gctaaaaatctccaa

SEQ ID NO: 1131582 - DNA, 15 bp, Homo sapiens
agctaaaaatctcca

SEQ ID NO: 1131583 - DNA, 15 bp, Homo sapiens
tagctaaaaatctcc

SEQ ID NO: 1131584 - DNA, 15 bp, Homo sapiens
atagctaaaaatctc

SEQ ID NO: 1131585 - DNA, 15 bp, Homo sapiens
aatagctaaaaatct

SEQ ID NO: 1131586 - DNA, 15 bp, Homo sapiens
taatagctaaaaatc

SEQ ID NO: 1131587 - DNA, 15 bp, Homo sapiens
ctaatagctaaaaat

SEQ ID NO: 1131588 - DNA, 15 bp, Homo sapiens
gctaatagctaaaaa

SEQ ID NO: 1131589 - DNA, 15 bp, Homo sapiens
agctaatagctaaaa

SEQ ID NO: 1131590 - DNA, 15 bp, Homo sapiens
gagctaatagctaaa

SEQ ID NO: 1131591 - DNA, 15 bp, Homo sapiens
agagctaatagctaa

SEQ ID NO: 1131592 - DNA, 15 bp, Homo sapiens
tagagctaatagcta

SEQ ID NO: 1131593 - DNA, 15 bp, Homo sapiens
ctagagctaatagct

SEQ ID NO: 1131594 - DNA, 15 bp, Homo sapiens
cctagagctaatagc

SEQ ID NO: 1131595 - DNA, 15 bp, Homo sapiens
acctagagctaatag

SEQ ID NO: 1131596 - DNA, 15 bp, Homo sapiens
cacctagagctaata

SEQ ID NO: 1131597 - DNA, 15 bp, Homo sapiens
ccacctagagctaat

SEQ ID NO: 1131598 - DNA, 15 bp, Homo sapiens
tccacctagagctaa

SEQ ID NO: 1131599 - DNA, 15 bp, Homo sapiens
ttccacctagagcta

SEQ ID NO: 1131600 - DNA, 15 bp, Homo sapiens
tttccacctagagct

SEQ ID NO: 1131601 - DNA, 15 bp, Homo sapiens
ctttccacctagagc

SEQ ID NO: 1131602 - DNA, 15 bp, Homo sapiens
tctttccacctagag

SEQ ID NO: 1131603 - DNA, 15 bp, Homo sapiens
ttctttccacctaga

SEQ ID NO: 1131604 - DNA, 15 bp, Homo sapiens
tttctttccacctag

SEQ ID NO: 1131605 - DNA, 15 bp, Homo sapiens
ttttctttccaccta

SEQ ID NO: 1131606 - DNA, 15 bp, Homo sapiens
cttttctttccacct

SEQ ID NO: 1131607 - DNA, 15 bp, Homo sapiens
acttttctttccacc

SEQ ID NO: 1131608 - DNA, 15 bp, Homo sapiens
aacttttctttccac

SEQ ID NO: 1131609 - DNA, 15 bp, Homo sapiens
taacttttctttcca

SEQ ID NO: 1131610 - DNA, 15 bp, Homo sapiens
gtaacttttctttcc

SEQ ID NO: 1131611 - DNA, 15 bp, Homo sapiens
tgtaacttttctttc

SEQ ID NO: 1131612 - DNA, 15 bp, Homo sapiens
gtgtaacttttcttt

SEQ ID NO: 1131613 - DNA, 15 bp, Homo sapiens
tgtgtaacttttctt

SEQ ID NO: 1131614 - DNA, 15 bp, Homo sapiens
ttgtgtaacttttct

SEQ ID NO: 1131615 - DNA, 15 bp, Homo sapiens
tttgtgtaacttttc

SEQ ID NO: 1131616 - DNA, 15 bp, Homo sapiens
ttttgtgtaactttt

SEQ ID NO: 1131617 - DNA, 15 bp, Homo sapiens
tttttgtgtaacttt

SEQ ID NO: 1131618 - DNA, 15 bp, Homo sapiens
ctttttgtgtaactt

SEQ ID NO: 1131619 - DNA, 15 bp, Homo sapiens
ttctttttgtgtaac

SEQ ID NO: 1131620 - DNA, 15 bp, Homo sapiens
tttctttttgtgtaa

SEQ ID NO: 1131621 - DNA, 15 bp, Homo sapiens
ttttctttttgtgta

SEQ ID NO: 1131622 - DNA, 15 bp, Homo sapiens
attttctttttgtgt

SEQ ID NO: 1131623 - DNA, 15 bp, Homo sapiens
tattttctttttgtg

SEQ ID NO: 1131624 - DNA, 15 bp, Homo sapiens
atattttctttttgt

SEQ ID NO: 1131625 - DNA, 15 bp, Homo sapiens
tatattttctttttg

SEQ ID NO: 1131626 - DNA, 15 bp, Homo sapiens
aatatattttctttt

SEQ ID NO: 1131627 - DNA, 15 bp, Homo sapiens
aaatatattttcttt

SEQ ID NO: 1131628 - DNA, 15 bp, Homo sapiens
aaaatatattttctt

SEQ ID NO: 1131629 - DNA, 15 bp, Homo sapiens
aaaaatatattttct

SEQ ID NO: 1131630 - DNA, 15 bp, Homo sapiens
taaaaatatattttc

SEQ ID NO: 1131631 - DNA, 15 bp, Homo sapiens
ataaaaatatatttt

SEQ ID NO: 1131632 - DNA, 15 bp, Homo sapiens
aataaaaatatattt

SEQ ID NO: 1131633 - DNA, 15 bp, Homo sapiens
aaataaaaatatatt

SEQ ID NO: 1131634 - DNA, 15 bp, Homo sapiens
aaaataaaaatatat

SEQ ID NO: 1131635 - DNA, 15 bp, Homo sapiens
taaaataaaaatata

SEQ ID NO: 1131636 - DNA, 15 bp, Homo sapiens
gtaaaataaaaatat

SEQ ID NO: 1131637 - DNA, 15 bp, Homo sapiens
ggtaaaataaaaata

SEQ ID NO: 1131638 - DNA, 15 bp, Homo sapiens
aggtaaaataaaaat

SEQ ID NO: 1131639 - DNA, 15 bp, Homo sapiens
aaggtaaaataaaaa

SEQ ID NO: 1131640 - DNA, 15 bp, Homo sapiens
taaggtaaaataaaa

SEQ ID NO: 1131641 - DNA, 15 bp, Homo sapiens
ataaggtaaaataaa

SEQ ID NO: 1131642 - DNA, 15 bp, Homo sapiens
cataaggtaaaataa

SEQ ID NO: 1131643 - DNA, 15 bp, Homo sapiens
tcataaggtaaaata

SEQ ID NO: 1131644 - DNA, 15 bp, Homo sapiens
gtcataaggtaaaat

SEQ ID NO: 1131645 - DNA, 15 bp, Homo sapiens
agtcataaggtaaaa

SEQ ID NO: 1131646 - DNA, 15 bp, Homo sapiens
gagtcataaggtaaa

SEQ ID NO: 1131647 - DNA, 15 bp, Homo sapiens
tgagtcataaggtaa

SEQ ID NO: 1131648 - DNA, 15 bp, Homo sapiens
atgagtcataaggta

SEQ ID NO: 1131649 - DNA, 15 bp, Homo sapiens
gatgagtcataaggt

SEQ ID NO: 1131650 - DNA, 15 bp, Homo sapiens
agatgagtcataagg

SEQ ID NO: 1131651 - DNA, 15 bp, Homo sapiens
cagatgagtcataag

SEQ ID NO: 1131652 - DNA, 15 bp, Homo sapiens
tcagatgagtcataa

SEQ ID NO: 1131653 - DNA, 15 bp, Homo sapiens
ctcagatgagtcata

SEQ ID NO: 1131654 - DNA, 15 bp, Homo sapiens
tctcagatgagtcat

SEQ ID NO: 1131655 - DNA, 15 bp, Homo sapiens
ttctcagatgagtca

SEQ ID NO: 1131656 - DNA, 15 bp, Homo sapiens
attctcagatgagtc

SEQ ID NO: 1131657 - DNA, 15 bp, Homo sapiens
cattctcagatgagt

SEQ ID NO: 1131658 - DNA, 15 bp, Homo sapiens
acattctcagatgag

SEQ ID NO: 1131659 - DNA, 15 bp, Homo sapiens
aacattctcagatga

SEQ ID NO: 1131660 - DNA, 15 bp, Homo sapiens
taacattctcagatg

SEQ ID NO: 1131661 - DNA, 15 bp, Homo sapiens
ataacattctcagat

SEQ ID NO: 1131662 - DNA, 15 bp, Homo sapiens
aataacattctcaga

SEQ ID NO: 1131663 - DNA, 15 bp, Homo sapiens
aaataacattctcag

SEQ ID NO: 1131664 - DNA, 15 bp, Homo sapiens
taaataacattctca

SEQ ID NO: 1131665 - DNA, 15 bp, Homo sapiens
gtaaataacattctc

SEQ ID NO: 1131666 - DNA, 15 bp, Homo sapiens
tgtaaataacattct

SEQ ID NO: 1131667 - DNA, 15 bp, Homo sapiens
ttgtaaataacattc

SEQ ID NO: 1131668 - DNA, 15 bp, Homo sapiens
tttgtaaataacatt

SEQ ID NO: 1131669 - DNA, 15 bp, Homo sapiens
ctttgtaaataacat

SEQ ID NO: 1131670 - DNA, 15 bp, Homo sapiens
actttgtaaataaca

SEQ ID NO: 1131671 - DNA, 15 bp, Homo sapiens
gactttgtaaataac

SEQ ID NO: 1131672 - DNA, 15 bp, Homo sapiens
tgactttgtaaataa

SEQ ID NO: 1131673 - DNA, 15 bp, Homo sapiens
gtgactttgtaaata

SEQ ID NO: 1131674 - DNA, 15 bp, Homo sapiens
tgtgactttgtaaat

SEQ ID NO: 1131675 - DNA, 15 bp, Homo sapiens
atgtgactttgtaaa

SEQ ID NO: 1131676 - DNA, 15 bp, Homo sapiens
gatgtgactttgtaa

SEQ ID NO: 1131677 - DNA, 15 bp, Homo sapiens
tgatgtgactttgta

SEQ ID NO: 1131678 - DNA, 15 bp, Homo sapiens
ttgatgtgactttgt

SEQ ID NO: 1131679 - DNA, 15 bp, Homo sapiens
attgatgtgactttg

SEQ ID NO: 1131680 - DNA, 15 bp, Homo sapiens
cattgatgtgacttt

SEQ ID NO: 1131681 - DNA, 15 bp, Homo sapiens
acattgatgtgactt

SEQ ID NO: 1131682 - DNA, 15 bp, Homo sapiens
tacattgatgtgact

SEQ ID NO: 1131683 - DNA, 15 bp, Homo sapiens
ttacattgatgtgac

SEQ ID NO: 1131684 - DNA, 15 bp, Homo sapiens
tttacattgatgtga

SEQ ID NO: 1131685 - DNA, 15 bp, Homo sapiens
ttttacattgatgtg

SEQ ID NO: 1131686 - DNA, 15 bp, Homo sapiens
cttttacattgatgt

SEQ ID NO: 1131687 - DNA, 15 bp, Homo sapiens
gcttttacattgatg

SEQ ID NO: 1131688 - DNA, 15 bp, Homo sapiens
agcttttacattgat

SEQ ID NO: 1131689 - DNA, 15 bp, Homo sapiens
aagcttttacattga

SEQ ID NO: 1131690 - DNA, 15 bp, Homo sapiens
taagcttttacattg

SEQ ID NO: 1131691 - DNA, 15 bp, Homo sapiens
ttaagcttttacatt

SEQ ID NO: 1131692 - DNA, 15 bp, Homo sapiens
attaagcttttacat

SEQ ID NO: 1131693 - DNA, 15 bp, Homo sapiens
tattaagcttttaca

SEQ ID NO: 1131694 - DNA, 15 bp, Homo sapiens
gtattaagcttttac

SEQ ID NO: 1131695 - DNA, 15 bp, Homo sapiens
agtattaagctttta

SEQ ID NO: 1131696 - DNA, 15 bp, Homo sapiens
cagtattaagctttt

SEQ ID NO: 1131697 - DNA, 15 bp, Homo sapiens
tcagtattaagcttt

SEQ ID NO: 1131698 - DNA, 15 bp, Homo sapiens
atcagtattaagctt

SEQ ID NO: 1131699 - DNA, 15 bp, Homo sapiens
gatcagtattaagct

SEQ ID NO: 1131700 - DNA, 15 bp, Homo sapiens
agatcagtattaagc

SEQ ID NO: 1131701 - DNA, 15 bp, Homo sapiens
tagatcagtattaag

SEQ ID NO: 1131702 - DNA, 15 bp, Homo sapiens
ttagatcagtattaa

SEQ ID NO: 1131703 - DNA, 15 bp, Homo sapiens
tttagatcagtatta

SEQ ID NO: 1131704 - DNA, 15 bp, Homo sapiens
ctttagatcagtatt

SEQ ID NO: 1131705 - DNA, 15 bp, Homo sapiens
gctttagatcagtat

SEQ ID NO: 1131706 - DNA, 15 bp, Homo sapiens
tgctttagatcagta

SEQ ID NO: 1131707 - DNA, 15 bp, Homo sapiens
ctgctttagatcagt

SEQ ID NO: 1131708 - DNA, 15 bp, Homo sapiens
tctgctttagatcag

SEQ ID NO: 1131709 - DNA, 15 bp, Homo sapiens
ttctgctttagatca

SEQ ID NO: 1131710 - DNA, 15 bp, Homo sapiens
attctgctttagatc

SEQ ID NO: 1131711 - DNA, 15 bp, Homo sapiens
aattctgctttagat

SEQ ID NO: 1131712 - DNA, 15 bp, Homo sapiens
taattctgctttaga

SEQ ID NO: 1131713 - DNA, 15 bp, Homo sapiens
ataattctgctttag

SEQ ID NO: 1131714 - DNA, 15 bp, Homo sapiens
tataattctgcttta

SEQ ID NO: 1131715 - DNA, 15 bp, Homo sapiens
ctataattctgcttt

SEQ ID NO: 1131716 - DNA, 15 bp, Homo sapiens
tctataattctgctt

SEQ ID NO: 1131717 - DNA, 15 bp, Homo sapiens
atctataattctgct

SEQ ID NO: 1131718 - DNA, 15 bp, Homo sapiens
tatctataattctgc

SEQ ID NO: 1131719 - DNA, 15 bp, Homo sapiens
ctatctataattctg

SEQ ID NO: 1131720 - DNA, 15 bp, Homo sapiens
tctatctataattct

SEQ ID NO: 1131721 - DNA, 15 bp, Homo sapiens
atctatctataattc

SEQ ID NO: 1131722 - DNA, 15 bp, Homo sapiens
aatctatctataatt

SEQ ID NO: 1131723 - DNA, 15 bp, Homo sapiens
taatctatctataat

SEQ ID NO: 1131724 - DNA, 15 bp, Homo sapiens
ataatctatctataa

SEQ ID NO: 1131725 - DNA, 15 bp, Homo sapiens
cataatctatctata

SEQ ID NO: 1131726 - DNA, 15 bp, Homo sapiens
tcataatctatctat

SEQ ID NO: 1131727 - DNA, 15 bp, Homo sapiens
ttcataatctatcta

SEQ ID NO: 1131728 - DNA, 15 bp, Homo sapiens
tttcataatctatct

SEQ ID NO: 1131729 - DNA, 15 bp, Homo sapiens
ctttcataatctatc

SEQ ID NO: 1131730 - DNA, 15 bp, Homo sapiens
cctttcataatctat

SEQ ID NO: 1131731 - DNA, 15 bp, Homo sapiens
ttcctttcataatct

SEQ ID NO: 1131732 - DNA, 15 bp, Homo sapiens
gttcctttcataatc

SEQ ID NO: 1131733 - DNA, 15 bp, Homo sapiens
tgttcctttcataat

SEQ ID NO: 1131734 - DNA, 15 bp, Homo sapiens
ttgttcctttcataa

SEQ ID NO: 1131735 - DNA, 15 bp, Homo sapiens
cttgttcctttcata

SEQ ID NO: 1131736 - DNA, 15 bp, Homo sapiens
tcttgttcctttcat

SEQ ID NO: 1131737 - DNA, 15 bp, Homo sapiens
ttcttgttcctttca

SEQ ID NO: 1131738 - DNA, 15 bp, Homo sapiens
tttcttgttcctttc

SEQ ID NO: 1131739 - DNA, 15 bp, Homo sapiens
ttttcttgttccttt

SEQ ID NO: 1131740 - DNA, 15 bp, Homo sapiens
attttcttgttcctt

SEQ ID NO: 1131741 - DNA, 15 bp, Homo sapiens
tattttcttgttcct

SEQ ID NO: 1131742 - DNA, 15 bp, Homo sapiens
atattttcttgttcc

SEQ ID NO: 1131743 - DNA, 15 bp, Homo sapiens
catattttcttgttc

SEQ ID NO: 1131744 - DNA, 15 bp, Homo sapiens
acatattttcttgtt

SEQ ID NO: 1131745 - DNA, 15 bp, Homo sapiens
cacatattttcttgt

SEQ ID NO: 1131746 - DNA, 15 bp, Homo sapiens
ccacatattttcttg

SEQ ID NO: 1131747 - DNA, 15 bp, Homo sapiens
cccacatattttctt

SEQ ID NO: 1131748 - DNA, 15 bp, Homo sapiens
ccccacatattttct

SEQ ID NO: 1131749 - DNA, 15 bp, Homo sapiens
accccacatattttc

SEQ ID NO: 1131750 - DNA, 15 bp, Homo sapiens
taccccacatatttt

SEQ ID NO: 1131751 - DNA, 15 bp, Homo sapiens
ctaccccacatattt

SEQ ID NO: 1131752 - DNA, 15 bp, Homo sapiens
cctaccccacatatt

SEQ ID NO: 1131753 - DNA, 15 bp, Homo sapiens
acctaccccacatat

SEQ ID NO: 1131754 - DNA, 15 bp, Homo sapiens
aacctaccccacata

SEQ ID NO: 1131755 - DNA, 15 bp, Homo sapiens
caacctaccccacat

SEQ ID NO: 1131756 - DNA, 15 bp, Homo sapiens
ccaacctaccccaca

SEQ ID NO: 1131757 - DNA, 15 bp, Homo sapiens
cccaacctaccccac

SEQ ID NO: 1131758 - DNA, 15 bp, Homo sapiens
tcccaacctacccca

SEQ ID NO: 1131759 - DNA, 15 bp, Homo sapiens
atcccaacctacccc

SEQ ID NO: 1131760 - DNA, 15 bp, Homo sapiens
catcccaacctaccc

SEQ ID NO: 1131761 - DNA, 15 bp, Homo sapiens
ccatcccaacctacc

SEQ ID NO: 1131762 - DNA, 15 bp, Homo sapiens
cccatcccaacctac

SEQ ID NO: 1131763 - DNA, 15 bp, Homo sapiens
tcccatcccaaccta

SEQ ID NO: 1131764 - DNA, 15 bp, Homo sapiens
atcccatcccaacct

SEQ ID NO: 1131765 - DNA, 15 bp, Homo sapiens
tatcccatcccaacc

SEQ ID NO: 1131766 - DNA, 15 bp, Homo sapiens
ctatcccatcccaac

SEQ ID NO: 1131767 - DNA, 15 bp, Homo sapiens
cctatcccatcccaa

SEQ ID NO: 1131768 - DNA, 15 bp, Homo sapiens
tcctatcccatccca

SEQ ID NO: 1131769 - DNA, 15 bp, Homo sapiens
gtcctatcccatccc

SEQ ID NO: 1131770 - DNA, 15 bp, Homo sapiens
tgtcctatcccatcc

SEQ ID NO: 1131771 - DNA, 15 bp, Homo sapiens
atgtcctatcccatc

SEQ ID NO: 1131772 - DNA, 15 bp, Homo sapiens
catgtcctatcccat

SEQ ID NO: 1131773 - DNA, 15 bp, Homo sapiens
ccatgtcctatccca

SEQ ID NO: 1131774 - DNA, 15 bp, Homo sapiens
cccatgtcctatccc

SEQ ID NO: 1131775 - DNA, 15 bp, Homo sapiens
acccatgtcctatcc

SEQ ID NO: 1131776 - DNA, 15 bp, Homo sapiens
tacccatgtcctatc

SEQ ID NO: 1131777 - DNA, 15 bp, Homo sapiens
ttacccatgtcctat

SEQ ID NO: 1131778 - DNA, 15 bp, Homo sapiens
tttacccatgtccta

SEQ ID NO: 1131779 - DNA, 15 bp, Homo sapiens
ttttacccatgtcct

SEQ ID NO: 1131780 - DNA, 15 bp, Homo sapiens
tttttacccatgtcc

SEQ ID NO: 1131781 - DNA, 15 bp, Homo sapiens
ttttttacccatgtc

SEQ ID NO: 1131782 - DNA, 15 bp, Homo sapiens
tttttttacccatgt

SEQ ID NO: 1131783 - DNA, 15 bp, Homo sapiens
ctttttttacccatg

SEQ ID NO: 1131784 - DNA, 15 bp, Homo sapiens
tctttttttacccat

SEQ ID NO: 1131785 - DNA, 15 bp, Homo sapiens
ttctttttttaccca

SEQ ID NO: 1131786 - DNA, 15 bp, Homo sapiens
gttctttttttaccc

SEQ ID NO: 1131787 - DNA, 15 bp, Homo sapiens
agttctttttttacc

SEQ ID NO: 1131788 - DNA, 15 bp, Homo sapiens
cagttctttttttac

SEQ ID NO: 1131789 - DNA, 15 bp, Homo sapiens
ccagttcttttttta

SEQ ID NO: 1131790 - DNA, 15 bp, Homo sapiens
tccagttcttttttt

SEQ ID NO: 1131791 - DNA, 15 bp, Homo sapiens
atccagttctttttt

SEQ ID NO: 1131792 - DNA, 15 bp, Homo sapiens
gatccagttcttttt

SEQ ID NO: 1131793 - DNA, 15 bp, Homo sapiens
ggatccagttctttt

SEQ ID NO: 1131794 - DNA, 15 bp, Homo sapiens
aggatccagttcttt

SEQ ID NO: 1131795 - DNA, 15 bp, Homo sapiens
aaggatccagttctt

SEQ ID NO: 1131796 - DNA, 15 bp, Homo sapiens
caaggatccagttct

SEQ ID NO: 1131797 - DNA, 15 bp, Homo sapiens
acaaggatccagttc

SEQ ID NO: 1131798 - DNA, 15 bp, Homo sapiens
cacaaggatccagtt

SEQ ID NO: 1131799 - DNA, 15 bp, Homo sapiens
ccacaaggatccagt

SEQ ID NO: 1131800 - DNA, 15 bp, Homo sapiens
accacaaggatccag

SEQ ID NO: 1131801 - DNA, 15 bp, Homo sapiens
gaccacaaggatcca

SEQ ID NO: 1131802 - DNA, 15 bp, Homo sapiens
ggaccacaaggatcc

SEQ ID NO: 1131803 - DNA, 15 bp, Homo sapiens
aggaccacaaggatc

SEQ ID NO: 1131804 - DNA, 15 bp, Homo sapiens
gaggaccacaaggat

SEQ ID NO: 1131805 - DNA, 15 bp, Homo sapiens
tgaggaccacaagga

SEQ ID NO: 1131806 - DNA, 15 bp, Homo sapiens
atgaggaccacaagg

SEQ ID NO: 1131807 - DNA, 15 bp, Homo sapiens
tatgaggaccacaag

SEQ ID NO: 1131808 - DNA, 15 bp, Homo sapiens
atatgaggaccacaa

SEQ ID NO: 1131809 - DNA, 15 bp, Homo sapiens
aatatgaggaccaca

SEQ ID NO: 1131810 - DNA, 15 bp, Homo sapiens
aaatatgaggaccac

SEQ ID NO: 1131811 - DNA, 15 bp, Homo sapiens
gaaatatgaggacca

SEQ ID NO: 1131812 - DNA, 15 bp, Homo sapiens
tgaaatatgaggacc

SEQ ID NO: 1131813 - DNA, 15 bp, Homo sapiens
atgaaatatgaggac

SEQ ID NO: 1131814 - DNA, 15 bp, Homo sapiens
tatgaaatatgagga

SEQ ID NO: 1131815 - DNA, 15 bp, Homo sapiens
ttatgaaatatgagg

SEQ ID NO: 1131816 - DNA, 15 bp, Homo sapiens
attatgaaatatgag

SEQ ID NO: 1131817 - DNA, 15 bp, Homo sapiens
cattatgaaatatga

SEQ ID NO: 1131818 - DNA, 15 bp, Homo sapiens
ccattatgaaatatg

SEQ ID NO: 1131819 - DNA, 15 bp, Homo sapiens
tccattatgaaatat

SEQ ID NO: 1131820 - DNA, 15 bp, Homo sapiens
ttccattatgaaata

SEQ ID NO: 1131821 - DNA, 15 bp, Homo sapiens
tttccattatgaaat

SEQ ID NO: 1131822 - DNA, 15 bp, Homo sapiens
gtttccattatgaaa

SEQ ID NO: 1131823 - DNA, 15 bp, Homo sapiens
agtttccattatgaa

SEQ ID NO: 1131824 - DNA, 15 bp, Homo sapiens
tagtttccattatga

SEQ ID NO: 1131825 - DNA, 15 bp, Homo sapiens
ttagtttccattatg

SEQ ID NO: 1131826 - DNA, 15 bp, Homo sapiens
tttagtttccattat

SEQ ID NO: 1131827 - DNA, 15 bp, Homo sapiens
gtttagtttccatta

SEQ ID NO: 1131828 - DNA, 15 bp, Homo sapiens
tgtttagtttccatt

SEQ ID NO: 1131829 - DNA, 15 bp, Homo sapiens
ctgtttagtttccat

SEQ ID NO: 1131830 - DNA, 15 bp, Homo sapiens
actgtttagtttcca

SEQ ID NO: 1131831 - DNA, 15 bp, Homo sapiens
aactgtttagtttcc

SEQ ID NO: 1131832 - DNA, 15 bp, Homo sapiens
taactgtttagtttc

SEQ ID NO: 1131833 - DNA, 15 bp, Homo sapiens
ttaactgtttagttt

SEQ ID NO: 1131834 - DNA, 15 bp, Homo sapiens
tttaactgtttagtt

SEQ ID NO: 1131835 - DNA, 15 bp, Homo sapiens
gtttaactgtttagt

SEQ ID NO: 1131836 - DNA, 15 bp, Homo sapiens
tgtttaactgtttag

SEQ ID NO: 1131837 - DNA, 15 bp, Homo sapiens
atgtttaactgttta

SEQ ID NO: 1131838 - DNA, 15 bp, Homo sapiens
aatgtttaactgttt

SEQ ID NO: 1131839 - DNA, 15 bp, Homo sapiens
aaatgtttaactgtt

SEQ ID NO: 1131840 - DNA, 15 bp, Homo sapiens
taaatgtttaactgt

SEQ ID NO: 1131841 - DNA, 15 bp, Homo sapiens
ttaaatgtttaactg

SEQ ID NO: 1131842 - DNA, 15 bp, Homo sapiens
tttaaatgtttaact

SEQ ID NO: 1131843 - DNA, 15 bp, Homo sapiens
gtttaaatgtttaac

SEQ ID NO: 1131844 - DNA, 15 bp, Homo sapiens
tgtttaaatgtttaa

SEQ ID NO: 1131845 - DNA, 15 bp, Homo sapiens
ttgtttaaatgttta

SEQ ID NO: 1131846 - DNA, 15 bp, Homo sapiens
tttgtttaaatgttt

SEQ ID NO: 1131847 - DNA, 15 bp, Homo sapiens
atttgtttaaatgtt

SEQ ID NO: 1131848 - DNA, 15 bp, Homo sapiens
tatttgtttaaatgt

SEQ ID NO: 1131849 - DNA, 15 bp, Homo sapiens
ttatttgtttaaatg

SEQ ID NO: 1131850 - DNA, 15 bp, Homo sapiens
cttatttgtttaaat

SEQ ID NO: 1131851 - DNA, 15 bp, Homo sapiens
tcttatttgtttaaa

SEQ ID NO: 1131852 - DNA, 15 bp, Homo sapiens
atcttatttgtttaa

SEQ ID NO: 1131853 - DNA, 15 bp, Homo sapiens
catcttatttgttta

SEQ ID NO: 1131854 - DNA, 15 bp, Homo sapiens
acatcttatttgttt

SEQ ID NO: 1131855 - DNA, 15 bp, Homo sapiens
aacatcttatttgtt

SEQ ID NO: 1131856 - DNA, 15 bp, Homo sapiens
aaacatcttatttgt

SEQ ID NO: 1131857 - DNA, 15 bp, Homo sapiens
aaaacatcttatttg

SEQ ID NO: 1131858 - DNA, 15 bp, Homo sapiens
taaaacatcttattt

SEQ ID NO: 1131859 - DNA, 15 bp, Homo sapiens
gtaaaacatcttatt

SEQ ID NO: 1131860 - DNA, 15 bp, Homo sapiens
ttgtaaaacatctta

SEQ ID NO: 1131861 - DNA, 15 bp, Homo sapiens
attgtaaaacatctt

SEQ ID NO: 1131862 - DNA, 15 bp, Homo sapiens
tattgtaaaacatct

SEQ ID NO: 1131863 - DNA, 15 bp, Homo sapiens
ttattgtaaaacatc

SEQ ID NO: 1131864 - DNA, 15 bp, Homo sapiens
tttattgtaaaacat

SEQ ID NO: 1131865 - DNA, 15 bp, Homo sapiens
ttttattgtaaaaca

SEQ ID NO: 1131866 - DNA, 15 bp, Homo sapiens
tttttattgtaaaac

SEQ ID NO: 1131867 - DNA, 15 bp, Homo sapiens
gtttttattgtaaaa

SEQ ID NO: 1131868 - DNA, 15 bp, Homo sapiens
tgtttttattgtaaa

SEQ ID NO: 1131869 - DNA, 15 bp, Homo sapiens
atgtttttattgtaa

SEQ ID NO: 1131870 - DNA, 15 bp, Homo sapiens
gatgtttttattgta

SEQ ID NO: 1131871 - DNA, 15 bp, Homo sapiens
agatgtttttattgt

SEQ ID NO: 1131872 - DNA, 15 bp, Homo sapiens
aagatgtttttattg

SEQ ID NO: 1131873 - DNA, 15 bp, Homo sapiens
taagatgtttttatt

SEQ ID NO: 1131874 - DNA, 15 bp, Homo sapiens
ataagatgtttttat

SEQ ID NO: 1131875 - DNA, 15 bp, Homo sapiens
aataagatgttttta

SEQ ID NO: 1131876 - DNA, 15 bp, Homo sapiens
caataagatgttttt

SEQ ID NO: 1131877 - DNA, 15 bp, Homo sapiens
acaataagatgtttt

SEQ ID NO: 1131878 - DNA, 15 bp, Homo sapiens
tacaataagatgttt

SEQ ID NO: 1131879 - DNA, 15 bp, Homo sapiens
ttacaataagatgtt

SEQ ID NO: 1131880 - DNA, 15 bp, Homo sapiens
tttacaataagatgt

SEQ ID NO: 1131881 - DNA, 15 bp, Homo sapiens
ttttacaataagatg

SEQ ID NO: 1131882 - DNA, 15 bp, Homo sapiens
cttttacaataagat

SEQ ID NO: 1131883 - DNA, 15 bp, Homo sapiens
tcttttacaataaga

SEQ ID NO: 1131884 - DNA, 15 bp, Homo sapiens
atcttttacaataag

SEQ ID NO: 1131885 - DNA, 15 bp, Homo sapiens
catcttttacaataa

SEQ ID NO: 1131886 - DNA, 15 bp, Homo sapiens
tcatcttttacaata

SEQ ID NO: 1131887 - DNA, 15 bp, Homo sapiens
ttcatcttttacaat

SEQ ID NO: 1131888 - DNA, 15 bp, Homo sapiens
cttcatcttttacaa

SEQ ID NO: 1131889 - DNA, 15 bp, Homo sapiens
ccttcatcttttaca

SEQ ID NO: 1131890 - DNA, 15 bp, Homo sapiens
accttcatcttttac

SEQ ID NO: 1131891 - DNA, 15 bp, Homo sapiens
caccttcatctttta

SEQ ID NO: 1131892 - DNA, 15 bp, Homo sapiens
tcaccttcatctttt

SEQ ID NO: 1131893 - DNA, 15 bp, Homo sapiens
ttcaccttcatcttt

SEQ ID NO: 1131894 - DNA, 15 bp, Homo sapiens
attcaccttcatctt

SEQ ID NO: 1131895 - DNA, 15 bp, Homo sapiens
tattcaccttcatct

SEQ ID NO: 1131896 - DNA, 15 bp, Homo sapiens
gtattcaccttcatc

SEQ ID NO: 1131897 - DNA, 15 bp, Homo sapiens
agtattcaccttcat

SEQ ID NO: 1131898 - DNA, 15 bp, Homo sapiens
cagtattcaccttca

SEQ ID NO: 1131899 - DNA, 15 bp, Homo sapiens
tcagtattcaccttc

SEQ ID NO: 1131900 - DNA, 15 bp, Homo sapiens
ttcagtattcacctt

SEQ ID NO: 1131901 - DNA, 15 bp, Homo sapiens
tttcagtattcacct

SEQ ID NO: 1131902 - DNA, 15 bp, Homo sapiens
ctttcagtattcacc

SEQ ID NO: 1131903 - DNA, 15 bp, Homo sapiens
tctttcagtattcac

SEQ ID NO: 1131904 - DNA, 15 bp, Homo sapiens
ttctttcagtattca

SEQ ID NO: 1131905 - DNA, 15 bp, Homo sapiens
tttctttcagtattc

SEQ ID NO: 1131906 - DNA, 15 bp, Homo sapiens
gtttctttcagtatt

SEQ ID NO: 1131907 - DNA, 15 bp, Homo sapiens
agtttctttcagtat

SEQ ID NO: 1131908 - DNA, 15 bp, Homo sapiens
cagtttctttcagta

SEQ ID NO: 1131909 - DNA, 15 bp, Homo sapiens
gcagtttctttcagt

SEQ ID NO: 1131910 - DNA, 15 bp, Homo sapiens
agcagtttctttcag

SEQ ID NO: 1131911 - DNA, 15 bp, Homo sapiens
tagcagtttctttca

SEQ ID NO: 1131912 - DNA, 15 bp, Homo sapiens
ttagcagtttctttc

SEQ ID NO: 1131913 - DNA, 15 bp, Homo sapiens
tttagcagtttcttt

SEQ ID NO: 1131914 - DNA, 15 bp, Homo sapiens
ttttagcagtttctt

SEQ ID NO: 1131915 - DNA, 15 bp, Homo sapiens
cttttagcagtttct

SEQ ID NO: 1131916 - DNA, 15 bp, Homo sapiens
tcttttagcagtttc

SEQ ID NO: 1131917 - DNA, 15 bp, Homo sapiens
atcttttagcagttt

SEQ ID NO: 1131918 - DNA, 15 bp, Homo sapiens
aatcttttagcagtt

SEQ ID NO: 1131919 - DNA, 15 bp, Homo sapiens
aaatcttttagcagt

SEQ ID NO: 1131920 - DNA, 15 bp, Homo sapiens
taaatcttttagcag

SEQ ID NO: 1131921 - DNA, 15 bp, Homo sapiens
ataaatcttttagca

SEQ ID NO: 1131922 - DNA, 15 bp, Homo sapiens
cataaatcttttagc

SEQ ID NO: 1131923 - DNA, 15 bp, Homo sapiens
acataaatcttttag

SEQ ID NO: 1131924 - DNA, 15 bp, Homo sapiens
tacataaatctttta

SEQ ID NO: 1131925 - DNA, 15 bp, Homo sapiens
gtacataaatctttt

SEQ ID NO: 1131926 - DNA, 15 bp, Homo sapiens
tgtacataaatcttt

SEQ ID NO: 1131927 - DNA, 15 bp, Homo sapiens
atgtacataaatctt

SEQ ID NO: 1131928 - DNA, 15 bp, Homo sapiens
tatgtacataaatct

SEQ ID NO: 1131929 - DNA, 15 bp, Homo sapiens
atatgtacataaatc

SEQ ID NO: 1131930 - DNA, 15 bp, Homo sapiens
tatatgtacataaat

SEQ ID NO: 1131931 - DNA, 15 bp, Homo sapiens
atatatgtacataaa

SEQ ID NO: 1131932 - DNA, 15 bp, Homo sapiens
tatatatgtacataa

SEQ ID NO: 1131933 - DNA, 15 bp, Homo sapiens
atatatatgtacata

SEQ ID NO: 1131934 - DNA, 15 bp, Homo sapiens
gatatatatgtacat

SEQ ID NO: 1131935 - DNA, 15 bp, Homo sapiens
agatatatatgtaca

SEQ ID NO: 1131936 - DNA, 15 bp, Homo sapiens
aagatatatatgtac

SEQ ID NO: 1131937 - DNA, 15 bp, Homo sapiens
aaagatatatatgta

SEQ ID NO: 1131938 - DNA, 15 bp, Homo sapiens
gaaagatatatatgt

SEQ ID NO: 1131939 - DNA, 15 bp, Homo sapiens
tgaaagatatatatg

SEQ ID NO: 1131940 - DNA, 15 bp, Homo sapiens
atgaaagatatatat

SEQ ID NO: 1131941 - DNA, 15 bp, Homo sapiens
aatgaaagatatata

SEQ ID NO: 1131942 - DNA, 15 bp, Homo sapiens
caatgaaagatatat

SEQ ID NO: 1131943 - DNA, 15 bp, Homo sapiens
tcaatgaaagatata

SEQ ID NO: 1131944 - DNA, 15 bp, Homo sapiens
ttcaatgaaagatat

SEQ ID NO: 1131945 - DNA, 15 bp, Homo sapiens
tttcaatgaaagata

SEQ ID NO: 1131946 - DNA, 15 bp, Homo sapiens
ttttcaatgaaagat

SEQ ID NO: 1131947 - DNA, 15 bp, Homo sapiens
tttttcaatgaaaga

SEQ ID NO: 1131948 - DNA, 15 bp, Homo sapiens
ttttttcaatgaaag

SEQ ID NO: 1131949 - DNA, 15 bp, Homo sapiens
tttttttcaatgaaa

SEQ ID NO: 1131950 - DNA, 15 bp, Homo sapiens
atttttttcaatgaa

SEQ ID NO: 1131951 - DNA, 15 bp, Homo sapiens
tatttttttcaatga

SEQ ID NO: 1131952 - DNA, 15 bp, Homo sapiens
ttatttttttcaatg

SEQ ID NO: 1131953 - DNA, 15 bp, Homo sapiens
tttatttttttcaat

SEQ ID NO: 1131954 - DNA, 15 bp, Homo sapiens
ctttatttttttcaa

SEQ ID NO: 1131955 - DNA, 15 bp, Homo sapiens
actttatttttttca

SEQ ID NO: 1131956 - DNA, 15 bp, Homo sapiens
aactttatttttttc

SEQ ID NO: 1131957 - DNA, 15 bp, Homo sapiens
aaactttattttttt

SEQ ID NO: 1131958 - DNA, 15 bp, Homo sapiens
taaactttatttttt

SEQ ID NO: 1131959 - DNA, 15 bp, Homo sapiens
ttaaactttattttt

SEQ ID NO: 1131960 - DNA, 15 bp, Homo sapiens
cttaaactttatttt

SEQ ID NO: 1131961 - DNA, 15 bp, Homo sapiens
tcttaaactttattt

SEQ ID NO: 1131962 - DNA, 15 bp, Homo sapiens
atcttaaactttatt

SEQ ID NO: 1131963 - DNA, 15 bp, Homo sapiens
catcttaaactttat

SEQ ID NO: 1131964 - DNA, 15 bp, Homo sapiens
tcatcttaaacttta

SEQ ID NO: 1131965 - DNA, 15 bp, Homo sapiens
ttcatcttaaacttt

SEQ ID NO: 1131966 - DNA, 15 bp, Homo sapiens
tttcatcttaaactt

SEQ ID NO: 1131967 - DNA, 15 bp, Homo sapiens
ttttcatcttaaact

SEQ ID NO: 1131968 - DNA, 15 bp, Homo sapiens
cttttcatcttaaac

SEQ ID NO: 1131969 - DNA, 15 bp, Homo sapiens
ccttttcatcttaaa

SEQ ID NO: 1131970 - DNA, 15 bp, Homo sapiens
cccttttcatcttaa

SEQ ID NO: 1131971 - DNA, 15 bp, Homo sapiens
ccccttttcatctta

SEQ ID NO: 1131972 - DNA, 15 bp, Homo sapiens
tccccttttcatctt

SEQ ID NO: 1131973 - DNA, 15 bp, Homo sapiens
atccccttttcatct

SEQ ID NO: 1131974 - DNA, 15 bp, Homo sapiens
tatccccttttcatc

SEQ ID NO: 1131975 - DNA, 15 bp, Homo sapiens
ctatccccttttcat

SEQ ID NO: 1131976 - DNA, 15 bp, Homo sapiens
tctatccccttttca

SEQ ID NO: 1131977 - DNA, 15 bp, Homo sapiens
ttctatccccttttc

SEQ ID NO: 1131978 - DNA, 15 bp, Homo sapiens
tttctatcccctttt

SEQ ID NO: 1131979 - DNA, 15 bp, Homo sapiens
atttctatccccttt

SEQ ID NO: 1131980 - DNA, 15 bp, Homo sapiens
catttctatcccctt

SEQ ID NO: 1131981 - DNA, 15 bp, Homo sapiens
gcatttctatcccct

SEQ ID NO: 1131982 - DNA, 15 bp, Homo sapiens
tgcatttctatcccc

SEQ ID NO: 1131983 - DNA, 15 bp, Homo sapiens
ctgcatttctatccc

SEQ ID NO: 1131984 - DNA, 15 bp, Homo sapiens
actgcatttctatcc

SEQ ID NO: 1131985 - DNA, 15 bp, Homo sapiens
tactgcatttctatc

SEQ ID NO: 1131986 - DNA, 15 bp, Homo sapiens
gtactgcatttctat

SEQ ID NO: 1131987 - DNA, 15 bp, Homo sapiens
tgtactgcatttcta

SEQ ID NO: 1131988 - DNA, 15 bp, Homo sapiens
ctgtactgcatttct

SEQ ID NO: 1131989 - DNA, 15 bp, Homo sapiens
actgtactgcatttc

SEQ ID NO: 1131990 - DNA, 15 bp, Homo sapiens
aactgtactgcattt

SEQ ID NO: 1131991 - DNA, 15 bp, Homo sapiens
taactgtactgcatt

SEQ ID NO: 1131992 - DNA, 15 bp, Homo sapiens
gtaactgtactgcat

SEQ ID NO: 1131993 - DNA, 15 bp, Homo sapiens
tgtaactgtactgca

SEQ ID NO: 1131994 - DNA, 15 bp, Homo sapiens
ttgtaactgtactgc

SEQ ID NO: 1131995 - DNA, 15 bp, Homo sapiens
tttgtaactgtactg

SEQ ID NO: 1131996 - DNA, 15 bp, Homo sapiens
ttttgtaactgtact

SEQ ID NO: 1131997 - DNA, 15 bp, Homo sapiens
tttttgtaactgtac

SEQ ID NO: 1131998 - DNA, 15 bp, Homo sapiens
atttttgtaactgta

SEQ ID NO: 1131999 - DNA, 15 bp, Homo sapiens
aatttttgtaactgt

SEQ ID NO: 1132000 - DNA, 15 bp, Homo sapiens
taatttttgtaactg

SEQ ID NO: 1132001 - DNA, 15 bp, Homo sapiens
ttaatttttgtaact

SEQ ID NO: 1132002 - DNA, 15 bp, Homo sapiens
tttaatttttgtaac

SEQ ID NO: 1132003 - DNA, 15 bp, Homo sapiens
ttttaatttttgtaa

SEQ ID NO: 1132004 - DNA, 15 bp, Homo sapiens
gttttaatttttgta

SEQ ID NO: 1132005 - DNA, 15 bp, Homo sapiens
tgttttaatttttgt

SEQ ID NO: 1132006 - DNA, 15 bp, Homo sapiens
ttgttttaatttttg

SEQ ID NO: 1132007 - DNA, 15 bp, Homo sapiens
attgttttaattttt

SEQ ID NO: 1132008 - DNA, 15 bp, Homo sapiens
tattgttttaatttt

SEQ ID NO: 1132009 - DNA, 15 bp, Homo sapiens
ctattgttttaattt

SEQ ID NO: 1132010 - DNA, 15 bp, Homo sapiens
tctattgttttaatt

SEQ ID NO: 1132011 - DNA, 15 bp, Homo sapiens
atctattgttttaat

SEQ ID NO: 1132012 - DNA, 15 bp, Homo sapiens
tatctattgttttaa

SEQ ID NO: 1132013 - DNA, 15 bp, Homo sapiens
gtatctattgtttta

SEQ ID NO: 1132014 - DNA, 15 bp, Homo sapiens
agtatctattgtttt

SEQ ID NO: 1132015 - DNA, 15 bp, Homo sapiens
cagtatctattgttt

SEQ ID NO: 1132016 - DNA, 15 bp, Homo sapiens
tcagtatctattgtt

SEQ ID NO: 1132017 - DNA, 15 bp, Homo sapiens
ttcagtatctattgt

SEQ ID NO: 1132018 - DNA, 15 bp, Homo sapiens
tttcagtatctattg

SEQ ID NO: 1132019 - DNA, 15 bp, Homo sapiens
gtttcagtatctatt

SEQ ID NO: 1132020 - DNA, 15 bp, Homo sapiens
agtttcagtatctat

SEQ ID NO: 1132021 - DNA, 15 bp, Homo sapiens
tagtttcagtatcta

SEQ ID NO: 1132022 - DNA, 15 bp, Homo sapiens
atagtttcagtatct

SEQ ID NO: 1132023 - DNA, 15 bp, Homo sapiens
aatagtttcagtatc

SEQ ID NO: 1132024 - DNA, 15 bp, Homo sapiens
taatagtttcagtat

SEQ ID NO: 1132025 - DNA, 15 bp, Homo sapiens
ataatagtttcagta

SEQ ID NO: 1132026 - DNA, 15 bp, Homo sapiens
tataatagtttcagt

SEQ ID NO: 1132027 - DNA, 15 bp, Homo sapiens
ctataatagtttcag

SEQ ID NO: 1132028 - DNA, 15 bp, Homo sapiens
tctataatagtttca

SEQ ID NO: 1132029 - DNA, 15 bp, Homo sapiens
atctataatagtttc

SEQ ID NO: 1132030 - DNA, 15 bp, Homo sapiens
aatctataatagttt

SEQ ID NO: 1132031 - DNA, 15 bp, Homo sapiens
aaatctataatagtt

SEQ ID NO: 1132032 - DNA, 15 bp, Homo sapiens
caaatctataatagt

SEQ ID NO: 1132033 - DNA, 15 bp, Homo sapiens
tcaaatctataatag

SEQ ID NO: 1132034 - DNA, 15 bp, Homo sapiens
ttcaaatctataata

SEQ ID NO: 1132035 - DNA, 15 bp, Homo sapiens
tttcaaatctataat

SEQ ID NO: 1132036 - DNA, 15 bp, Homo sapiens
ctttcaaatctataa

SEQ ID NO: 1132037 - DNA, 15 bp, Homo sapiens
tctttcaaatctata

SEQ ID NO: 1132038 - DNA, 15 bp, Homo sapiens
atctttcaaatctat

SEQ ID NO: 1132039 - DNA, 15 bp, Homo sapiens
tatctttcaaatcta

SEQ ID NO: 1132040 - DNA, 15 bp, Homo sapiens
gtatctttcaaatct

SEQ ID NO: 1132041 - DNA, 15 bp, Homo sapiens
tgtatctttcaaatc

SEQ ID NO: 1132042 - DNA, 15 bp, Homo sapiens
atgtatctttcaaat

SEQ ID NO: 1132043 - DNA, 15 bp, Homo sapiens
gatgtatctttcaaa

SEQ ID NO: 1132044 - DNA, 15 bp, Homo sapiens
tgatgtatctttcaa

SEQ ID NO: 1132045 - DNA, 15 bp, Homo sapiens
gtgatgtatctttca

SEQ ID NO: 1132046 - DNA, 15 bp, Homo sapiens
ggtgatgtatctttc

SEQ ID NO: 1132047 - DNA, 15 bp, Homo sapiens
tggtgatgtatcttt

SEQ ID NO: 1132048 - DNA, 15 bp, Homo sapiens
ctggtgatgtatctt

SEQ ID NO: 1132049 - DNA, 15 bp, Homo sapiens
tctggtgatgtatct

SEQ ID NO: 1132050 - DNA, 15 bp, Homo sapiens
ttctggtgatgtatc

SEQ ID NO: 1132051 - DNA, 15 bp, Homo sapiens
gttctggtgatgtat

SEQ ID NO: 1132052 - DNA, 15 bp, Homo sapiens
tgttctggtgatgta

SEQ ID NO: 1132053 - DNA, 15 bp, Homo sapiens
ctgttctggtgatgt

SEQ ID NO: 1132054 - DNA, 15 bp, Homo sapiens
tctgttctggtgatg

SEQ ID NO: 1132055 - DNA, 15 bp, Homo sapiens
ttctgttctggtgat

SEQ ID NO: 1132056 - DNA, 15 bp, Homo sapiens
cttctgttctggtga

SEQ ID NO: 1132057 - DNA, 15 bp, Homo sapiens
ccttctgttctggtg

SEQ ID NO: 1132058 - DNA, 15 bp, Homo sapiens
cccttctgttctggt

SEQ ID NO: 1132059 - DNA, 15 bp, Homo sapiens
tcccttctgttctgg

SEQ ID NO: 1132060 - DNA, 15 bp, Homo sapiens
ctcccttctgttctg

SEQ ID NO: 1132061 - DNA, 15 bp, Homo sapiens
actcccttctgttct

SEQ ID NO: 1132062 - DNA, 15 bp, Homo sapiens
gactcccttctgttc

SEQ ID NO: 1132063 - DNA, 15 bp, Homo sapiens
ggactcccttctgtt

SEQ ID NO: 1132064 - DNA, 15 bp, Homo sapiens
tggactcccttctgt

SEQ ID NO: 1132065 - DNA, 15 bp, Homo sapiens
ctggactcccttctg

SEQ ID NO: 1132066 - DNA, 15 bp, Homo sapiens
tctggactcccttct

SEQ ID NO: 1132067 - DNA, 15 bp, Homo sapiens
ttctggactcccttc

SEQ ID NO: 1132068 - DNA, 15 bp, Homo sapiens
tttctggactccctt

SEQ ID NO: 1132069 - DNA, 15 bp, Homo sapiens
atttctggactccct

SEQ ID NO: 1132070 - DNA, 15 bp, Homo sapiens
tatttctggactccc

SEQ ID NO: 1132071 - DNA, 15 bp, Homo sapiens
ctatttctggactcc

SEQ ID NO: 1132072 - DNA, 15 bp, Homo sapiens
tctatttctggactc

SEQ ID NO: 1132073 - DNA, 15 bp, Homo sapiens
atctatttctggact

SEQ ID NO: 1132074 - DNA, 15 bp, Homo sapiens
aatctatttctggac

SEQ ID NO: 1132075 - DNA, 15 bp, Homo sapiens
gaatctatttctgga

SEQ ID NO: 1132076 - DNA, 15 bp, Homo sapiens
tgaatctatttctgg

SEQ ID NO: 1132077 - DNA, 15 bp, Homo sapiens
gtgaatctatttctg

SEQ ID NO: 1132078 - DNA, 15 bp, Homo sapiens
ggtgaatctatttct

SEQ ID NO: 1132079 - DNA, 15 bp, Homo sapiens
tggtgaatctatttc

SEQ ID NO: 1132080 - DNA, 15 bp, Homo sapiens
ctggtgaatctattt

SEQ ID NO: 1132081 - DNA, 15 bp, Homo sapiens
tctggtgaatctatt

SEQ ID NO: 1132082 - DNA, 15 bp, Homo sapiens
ctctggtgaatctat

SEQ ID NO: 1132083 - DNA, 15 bp, Homo sapiens
tctctggtgaatcta

SEQ ID NO: 1132084 - DNA, 15 bp, Homo sapiens
atctctggtgaatct

SEQ ID NO: 1132085 - DNA, 15 bp, Homo sapiens
gatctctggtgaatc

SEQ ID NO: 1132086 - DNA, 15 bp, Homo sapiens
ggatctctggtgaat

SEQ ID NO: 1132087 - DNA, 15 bp, Homo sapiens
gggatctctggtgaa

SEQ ID NO: 1132088 - DNA, 15 bp, Homo sapiens
tgggatctctggtga

SEQ ID NO: 1132089 - DNA, 15 bp, Homo sapiens
atgggatctctggtg

SEQ ID NO: 1132090 - DNA, 15 bp, Homo sapiens
aatgggatctctggt

SEQ ID NO: 1132091 - DNA, 15 bp, Homo sapiens
aaatgggatctctgg

SEQ ID NO: 1132092 - DNA, 15 bp, Homo sapiens
taaatgggatctctg

SEQ ID NO: 1132093 - DNA, 15 bp, Homo sapiens
ataaatgggatctct

SEQ ID NO: 1132094 - DNA, 15 bp, Homo sapiens
gataaatgggatctc

SEQ ID NO: 1132095 - DNA, 15 bp, Homo sapiens
tgataaatgggatct

SEQ ID NO: 1132096 - DNA, 15 bp, Homo sapiens
ctgataaatgggatc

SEQ ID NO: 1132097 - DNA, 15 bp, Homo sapiens
tctgataaatgggat

SEQ ID NO: 1132098 - DNA, 15 bp, Homo sapiens
ttctgataaatggga

SEQ ID NO: 1132099 - DNA, 15 bp, Homo sapiens
attctgataaatggg

SEQ ID NO: 1132100 - DNA, 15 bp, Homo sapiens
tattctgataaatgg

SEQ ID NO: 1132101 - DNA, 15 bp, Homo sapiens
atattctgataaatg

SEQ ID NO: 1132102 - DNA, 15 bp, Homo sapiens
tatattctgataaat

SEQ ID NO: 1132103 - DNA, 15 bp, Homo sapiens
atatattctgataaa

SEQ ID NO: 1132104 - DNA, 15 bp, Homo sapiens
aatatattctgataa

SEQ ID NO: 1132105 - DNA, 15 bp, Homo sapiens
aaatatattctgata

SEQ ID NO: 1132106 - DNA, 15 bp, Homo sapiens
aaaatatattctgat

SEQ ID NO: 1132107 - DNA, 15 bp, Homo sapiens
taaaatatattctga

SEQ ID NO: 1132108 - DNA, 15 bp, Homo sapiens
ttaaaatatattctg

SEQ ID NO: 1132109 - DNA, 15 bp, Homo sapiens
tttaaaatatattct

SEQ ID NO: 1132110 - DNA, 15 bp, Homo sapiens
gtttaaaatatattc

SEQ ID NO: 1132111 - DNA, 15 bp, Homo sapiens
agtttaaaatatatt

SEQ ID NO: 1132112 - DNA, 15 bp, Homo sapiens
aagtttaaaatatat

SEQ ID NO: 1132113 - DNA, 15 bp, Homo sapiens
gaagtttaaaatata

SEQ ID NO: 1132114 - DNA, 15 bp, Homo sapiens
agaagtttaaaatat

SEQ ID NO: 1132115 - DNA, 15 bp, Homo sapiens
tagaagtttaaaata

SEQ ID NO: 1132116 - DNA, 15 bp, Homo sapiens
ttagaagtttaaaat

SEQ ID NO: 1132117 - DNA, 15 bp, Homo sapiens
attagaagtttaaaa

SEQ ID NO: 1132118 - DNA, 15 bp, Homo sapiens
gattagaagtttaaa

SEQ ID NO: 1132119 - DNA, 15 bp, Homo sapiens
tgattagaagtttaa

SEQ ID NO: 1132120 - DNA, 15 bp, Homo sapiens
gtgattagaagttta

SEQ ID NO: 1132121 - DNA, 15 bp, Homo sapiens
tgtgattagaagttt

SEQ ID NO: 1132122 - DNA, 15 bp, Homo sapiens
ttgtgattagaagtt

SEQ ID NO: 1132123 - DNA, 15 bp, Homo sapiens
tttgtgattagaagt

SEQ ID NO: 1132124 - DNA, 15 bp, Homo sapiens
ttttgtgattagaag

SEQ ID NO: 1132125 - DNA, 15 bp, Homo sapiens
tttttgtgattagaa

SEQ ID NO: 1132126 - DNA, 15 bp, Homo sapiens
ctttttgtgattaga

SEQ ID NO: 1132127 - DNA, 15 bp, Homo sapiens
actttttgtgattag

SEQ ID NO: 1132128 - DNA, 15 bp, Homo sapiens
cactttttgtgatta

SEQ ID NO: 1132129 - DNA, 15 bp, Homo sapiens
tcactttttgtgatt

SEQ ID NO: 1132130 - DNA, 15 bp, Homo sapiens
ctcactttttgtgat

SEQ ID NO: 1132131 - DNA, 15 bp, Homo sapiens
gctcactttttgtga

SEQ ID NO: 1132132 - DNA, 15 bp, Homo sapiens
tgctcactttttgtg

SEQ ID NO: 1132133 - DNA, 15 bp, Homo sapiens
gtgctcactttttgt

SEQ ID NO: 1132134 - DNA, 15 bp, Homo sapiens
tgtgctcactttttg

SEQ ID NO: 1132135 - DNA, 15 bp, Homo sapiens
gtgtgctcacttttt

SEQ ID NO: 1132136 - DNA, 15 bp, Homo sapiens
agtgtgctcactttt

SEQ ID NO: 1132137 - DNA, 15 bp, Homo sapiens
aagtgtgctcacttt

SEQ ID NO: 1132138 - DNA, 15 bp, Homo sapiens
aaagtgtgctcactt

SEQ ID NO: 1132139 - DNA, 15 bp, Homo sapiens
aaaagtgtgctcact

SEQ ID NO: 1132140 - DNA, 15 bp, Homo sapiens
gaaaagtgtgctcac

SEQ ID NO: 1132141 - DNA, 15 bp, Homo sapiens
agaaaagtgtgctca

SEQ ID NO: 1132142 - DNA, 15 bp, Homo sapiens
gagaaaagtgtgctc

SEQ ID NO: 1132143 - DNA, 15 bp, Homo sapiens
agagaaaagtgtgct

SEQ ID NO: 1132144 - DNA, 15 bp, Homo sapiens
aagagaaaagtgtgc

SEQ ID NO: 1132145 - DNA, 15 bp, Homo sapiens
gaagagaaaagtgtg

SEQ ID NO: 1132146 - DNA, 15 bp, Homo sapiens
ggaagagaaaagtgt

SEQ ID NO: 1132147 - DNA, 15 bp, Homo sapiens
aggaagagaaaagtg

SEQ ID NO: 1132148 - DNA, 15 bp, Homo sapiens
caggaagagaaaagt

SEQ ID NO: 1132149 - DNA, 15 bp, Homo sapiens
gcaggaagagaaaag

SEQ ID NO: 1132150 - DNA, 15 bp, Homo sapiens
tgcaggaagagaaaa

SEQ ID NO: 1132151 - DNA, 15 bp, Homo sapiens
atgcaggaagagaaa

SEQ ID NO: 1132152 - DNA, 15 bp, Homo sapiens
aatgcaggaagagaa

SEQ ID NO: 1132153 - DNA, 15 bp, Homo sapiens
caatgcaggaagaga

SEQ ID NO: 1132154 - DNA, 15 bp, Homo sapiens
acaatgcaggaagag

SEQ ID NO: 1132155 - DNA, 15 bp, Homo sapiens
aacaatgcaggaaga

SEQ ID NO: 1132156 - DNA, 15 bp, Homo sapiens
gaacaatgcaggaag

SEQ ID NO: 1132157 - DNA, 15 bp, Homo sapiens
tgaacaatgcaggaa

SEQ ID NO: 1132158 - DNA, 15 bp, Homo sapiens
gtgaacaatgcagga

SEQ ID NO: 1132159 - DNA, 15 bp, Homo sapiens
tgtgaacaatgcagg

SEQ ID NO: 1132160 - DNA, 15 bp, Homo sapiens
ttgtgaacaatgcag

SEQ ID NO: 1132161 - DNA, 15 bp, Homo sapiens
attgtgaacaatgca

SEQ ID NO: 1132162 - DNA, 15 bp, Homo sapiens
gattgtgaacaatgc

SEQ ID NO: 1132163 - DNA, 15 bp, Homo sapiens
tgattgtgaacaatg

SEQ ID NO: 1132164 - DNA, 15 bp, Homo sapiens
atgattgtgaacaat

SEQ ID NO: 1132165 - DNA, 15 bp, Homo sapiens
aatgattgtgaacaa

SEQ ID NO: 1132166 - DNA, 15 bp, Homo sapiens
aaatgattgtgaaca

SEQ ID NO: 1132167 - DNA, 15 bp, Homo sapiens
caaatgattgtgaac

SEQ ID NO: 1132168 - DNA, 15 bp, Homo sapiens
ccaaatgattgtgaa

SEQ ID NO: 1132169 - DNA, 15 bp, Homo sapiens
tccaaatgattgtga

SEQ ID NO: 1132170 - DNA, 15 bp, Homo sapiens
ttccaaatgattgtg

SEQ ID NO: 1132171 - DNA, 15 bp, Homo sapiens
tttccaaatgattgt

SEQ ID NO: 1132172 - DNA, 15 bp, Homo sapiens
ttttccaaatgattg

SEQ ID NO: 1132173 - DNA, 15 bp, Homo sapiens
tttttccaaatgatt

SEQ ID NO: 1132174 - DNA, 15 bp, Homo sapiens
ttttttccaaatgat

SEQ ID NO: 1132175 - DNA, 15 bp, Homo sapiens
attttttccaaatga

SEQ ID NO: 1132176 - DNA, 15 bp, Homo sapiens
gattttttccaaatg

SEQ ID NO: 1132177 - DNA, 15 bp, Homo sapiens
agattttttccaaat

SEQ ID NO: 1132178 - DNA, 15 bp, Homo sapiens
gagattttttccaaa

SEQ ID NO: 1132179 - DNA, 15 bp, Homo sapiens
tgagattttttccaa

SEQ ID NO: 1132180 - DNA, 15 bp, Homo sapiens
ttgagattttttcca

SEQ ID NO: 1132181 - DNA, 15 bp, Homo sapiens
tttgagattttttcc

SEQ ID NO: 1132182 - DNA, 15 bp, Homo sapiens
atttgagattttttc

SEQ ID NO: 1132183 - DNA, 15 bp, Homo sapiens
gatttgagatttttt

SEQ ID NO: 1132184 - DNA, 15 bp, Homo sapiens
agatttgagattttt

SEQ ID NO: 1132185 - DNA, 15 bp, Homo sapiens
tagatttgagatttt

SEQ ID NO: 1132186 - DNA, 15 bp, Homo sapiens
atagatttgagattt

SEQ ID NO: 1132187 - DNA, 15 bp, Homo sapiens
tatagatttgagatt

SEQ ID NO: 1132188 - DNA, 15 bp, Homo sapiens
ttatagatttgagat

SEQ ID NO: 1132189 - DNA, 15 bp, Homo sapiens
tttatagatttgaga

SEQ ID NO: 1132190 - DNA, 15 bp, Homo sapiens
atttatagatttgag

SEQ ID NO: 1132191 - DNA, 15 bp, Homo sapiens
tatttatagatttga

SEQ ID NO: 1132192 - DNA, 15 bp, Homo sapiens
ttatttatagatttg

SEQ ID NO: 1132193 - DNA, 15 bp, Homo sapiens
cttatttatagattt

SEQ ID NO: 1132194 - DNA, 15 bp, Homo sapiens
tcttatttatagatt

SEQ ID NO: 1132195 - DNA, 15 bp, Homo sapiens
gtcttatttatagat

SEQ ID NO: 1132196 - DNA, 15 bp, Homo sapiens
cgtcttatttataga

SEQ ID NO: 1132197 - DNA, 15 bp, Homo sapiens
tcgtcttatttatag

SEQ ID NO: 1132198 - DNA, 15 bp, Homo sapiens
atcgtcttatttata

SEQ ID NO: 1132199 - DNA, 15 bp, Homo sapiens
catcgtcttatttat

SEQ ID NO: 1132200 - DNA, 15 bp, Homo sapiens
ccatcgtcttattta

SEQ ID NO: 1132201 - DNA, 15 bp, Homo sapiens
cccatcgtcttattt

SEQ ID NO: 1132202 - DNA, 15 bp, Homo sapiens
ccccatcgtcttatt

SEQ ID NO: 1132203 - DNA, 15 bp, Homo sapiens
accccatcgtcttat

SEQ ID NO: 1132204 - DNA, 15 bp, Homo sapiens
taccccatcgtctta

SEQ ID NO: 1132205 - DNA, 15 bp, Homo sapiens
ttaccccatcgtctt

SEQ ID NO: 1132206 - DNA, 15 bp, Homo sapiens
tttaccccatcgtct

SEQ ID NO: 1132207 - DNA, 15 bp, Homo sapiens
ctttaccccatcgtc

SEQ ID NO: 1132208 - DNA, 15 bp, Homo sapiens
cctttaccccatcgt

SEQ ID NO: 1132209 - DNA, 15 bp, Homo sapiens
acctttaccccatcg

SEQ ID NO: 1132210 - DNA, 15 bp, Homo sapiens
gacctttaccccatc

SEQ ID NO: 1132211 - DNA, 15 bp, Homo sapiens
tgacctttaccccat

SEQ ID NO: 1132212 - DNA, 15 bp, Homo sapiens
ttgacctttacccca

SEQ ID NO: 1132213 - DNA, 15 bp, Homo sapiens
tttgacctttacccc

SEQ ID NO: 1132214 - DNA, 15 bp, Homo sapiens
atttgacctttaccc

SEQ ID NO: 1132215 - DNA, 15 bp, Homo sapiens
tatttgacctttacc

SEQ ID NO: 1132216 - DNA, 15 bp, Homo sapiens
ttatttgacctttac

SEQ ID NO: 1132217 - DNA, 15 bp, Homo sapiens
cttatttgaccttta

SEQ ID NO: 1132218 - DNA, 15 bp, Homo sapiens
acttatttgaccttt

SEQ ID NO: 1132219 - DNA, 15 bp, Homo sapiens
aacttatttgacctt

SEQ ID NO: 1132220 - DNA, 15 bp, Homo sapiens
aaacttatttgacct

SEQ ID NO: 1132221 - DNA, 15 bp, Homo sapiens
gaaacttatttgacc

SEQ ID NO: 1132222 - DNA, 15 bp, Homo sapiens
cgaaacttatttgac

SEQ ID NO: 1132223 - DNA, 15 bp, Homo sapiens
ccgaaacttatttga

SEQ ID NO: 1132224 - DNA, 15 bp, Homo sapiens
accgaaacttatttg

SEQ ID NO: 1132225 - DNA, 15 bp, Homo sapiens
taccgaaacttattt

SEQ ID NO: 1132226 - DNA, 15 bp, Homo sapiens
gtaccgaaacttatt

SEQ ID NO: 1132227 - DNA, 15 bp, Homo sapiens
tgtaccgaaacttat

SEQ ID NO: 1132228 - DNA, 15 bp, Homo sapiens
atgtaccgaaactta

SEQ ID NO: 1132229 - DNA, 15 bp, Homo sapiens
tatgtaccgaaactt

SEQ ID NO: 1132230 - DNA, 15 bp, Homo sapiens
atatgtaccgaaact

SEQ ID NO: 1132231 - DNA, 15 bp, Homo sapiens
tatatgtaccgaaac

SEQ ID NO: 1132232 - DNA, 15 bp, Homo sapiens
atatatgtaccgaaa

SEQ ID NO: 1132233 - DNA, 15 bp, Homo sapiens
catatatgtaccgaa

SEQ ID NO: 1132234 - DNA, 15 bp, Homo sapiens
gcatatatgtaccga

SEQ ID NO: 1132235 - DNA, 15 bp, Homo sapiens
tgcatatatgtaccg

SEQ ID NO: 1132236 - DNA, 15 bp, Homo sapiens
ttgcatatatgtacc

SEQ ID NO: 1132237 - DNA, 15 bp, Homo sapiens
attgcatatatgtac

SEQ ID NO: 1132238 - DNA, 15 bp, Homo sapiens
cattgcatatatgta

SEQ ID NO: 1132239 - DNA, 15 bp, Homo sapiens
tcattgcatatatgt

SEQ ID NO: 1132240 - DNA, 15 bp, Homo sapiens
atcattgcatatatg

SEQ ID NO: 1132241 - DNA, 15 bp, Homo sapiens
catcattgcatatat

SEQ ID NO: 1132242 - DNA, 15 bp, Homo sapiens
acatcattgcatata

SEQ ID NO: 1132243 - DNA, 15 bp, Homo sapiens
aacatcattgcatat

SEQ ID NO: 1132244 - DNA, 15 bp, Homo sapiens
aaacatcattgcata

SEQ ID NO: 1132245 - DNA, 15 bp, Homo sapiens
aaaacatcattgcat

SEQ ID NO: 1132246 - DNA, 15 bp, Homo sapiens
aaaaacatcattgca

SEQ ID NO: 1132247 - DNA, 15 bp, Homo sapiens
gaaaaacatcattgc

SEQ ID NO: 1132248 - DNA, 15 bp, Homo sapiens
tgaaaaacatcattg

SEQ ID NO: 1132249 - DNA, 15 bp, Homo sapiens
atgaaaaacatcatt

SEQ ID NO: 1132250 - DNA, 15 bp, Homo sapiens
catgaaaaacatcat

SEQ ID NO: 1132251 - DNA, 15 bp, Homo sapiens
tcatgaaaaacatca

SEQ ID NO: 1132252 - DNA, 15 bp, Homo sapiens
ttcatgaaaaacatc

SEQ ID NO: 1132253 - DNA, 15 bp, Homo sapiens
cttcatgaaaaacat

SEQ ID NO: 1132254 - DNA, 15 bp, Homo sapiens
gcttcatgaaaaaca

SEQ ID NO: 1132255 - DNA, 15 bp, Homo sapiens
ggcttcatgaaaaac

SEQ ID NO: 1132256 - DNA, 15 bp, Homo sapiens
tggcttcatgaaaaa

SEQ ID NO: 1132257 - DNA, 15 bp, Homo sapiens
ttggcttcatgaaaa

SEQ ID NO: 1132258 - DNA, 15 bp, Homo sapiens
tttggcttcatgaaa

SEQ ID NO: 1132259 - DNA, 15 bp, Homo sapiens
ttttggcttcatgaa

SEQ ID NO: 1132260 - DNA, 15 bp, Homo sapiens
attttggcttcatga

SEQ ID NO: 1132261 - DNA, 15 bp, Homo sapiens
tattttggcttcatg

SEQ ID NO: 1132262 - DNA, 15 bp, Homo sapiens
ttattttggcttcat

SEQ ID NO: 1132263 - DNA, 15 bp, Homo sapiens
attattttggcttca

SEQ ID NO: 1132264 - DNA, 15 bp, Homo sapiens
cattattttggcttc

SEQ ID NO: 1132265 - DNA, 15 bp, Homo sapiens
tcattattttggctt

SEQ ID NO: 1132266 - DNA, 15 bp, Homo sapiens
atcattattttggct

SEQ ID NO: 1132267 - DNA, 15 bp, Homo sapiens
catcattattttggc

SEQ ID NO: 1132268 - DNA, 15 bp, Homo sapiens
acatcattattttgg

SEQ ID NO: 1132269 - DNA, 15 bp, Homo sapiens
aacatcattattttg

SEQ ID NO: 1132270 - DNA, 15 bp, Homo sapiens
tcaacatcattattt

SEQ ID NO: 1132271 - DNA, 15 bp, Homo sapiens
gtcaacatcattatt

SEQ ID NO: 1132272 - DNA, 15 bp, Homo sapiens
agtcaacatcattat

SEQ ID NO: 1132273 - DNA, 15 bp, Homo sapiens
aagtcaacatcatta

SEQ ID NO: 1132274 - DNA, 15 bp, Homo sapiens
taagtcaacatcatt

SEQ ID NO: 1132275 - DNA, 15 bp, Homo sapiens
gtaagtcaacatcat

SEQ ID NO: 1132276 - DNA, 15 bp, Homo sapiens
tgtaagtcaacatca

SEQ ID NO: 1132277 - DNA, 15 bp, Homo sapiens
atgtaagtcaacatc

SEQ ID NO: 1132278 - DNA, 15 bp, Homo sapiens
aatgtaagtcaacat

SEQ ID NO: 1132279 - DNA, 15 bp, Homo sapiens
aaatgtaagtcaaca

SEQ ID NO: 1132280 - DNA, 15 bp, Homo sapiens
taaatgtaagtcaac

SEQ ID NO: 1132281 - DNA, 15 bp, Homo sapiens
ataaatgtaagtcaa

SEQ ID NO: 1132282 - DNA, 15 bp, Homo sapiens
aataaatgtaagtca

SEQ ID NO: 1132283 - DNA, 15 bp, Homo sapiens
caataaatgtaagtc

SEQ ID NO: 1132284 - DNA, 15 bp, Homo sapiens
acaataaatgtaagt

SEQ ID NO: 1132285 - DNA, 15 bp, Homo sapiens
aacaataaatgtaag

SEQ ID NO: 1132286 - DNA, 15 bp, Homo sapiens
aaacaataaatgtaa

SEQ ID NO: 1132287 - DNA, 15 bp, Homo sapiens
aaaacaataaatgta

SEQ ID NO: 1132288 - DNA, 15 bp, Homo sapiens
aaaaacaataaatgt

SEQ ID NO: 1132289 - DNA, 15 bp, Homo sapiens
aaaaaacaataaatg

SEQ ID NO: 1132290 - DNA, 15 bp, Homo sapiens
caaaaaacaataaat

SEQ ID NO: 1132291 - DNA, 15 bp, Homo sapiens
acaaaaaacaataaa

SEQ ID NO: 1132292 - DNA, 15 bp, Homo sapiens
cacaaaaaacaataa

SEQ ID NO: 1132293 - DNA, 15 bp, Homo sapiens
ccacaaaaaacaata

SEQ ID NO: 1132294 - DNA, 15 bp, Homo sapiens
tccacaaaaaacaat

SEQ ID NO: 1132295 - DNA, 15 bp, Homo sapiens
gctccacaaaaaaca

SEQ ID NO: 1132296 - DNA, 15 bp, Homo sapiens
tgctccacaaaaaac

SEQ ID NO: 1132297 - DNA, 15 bp, Homo sapiens
ttgctccacaaaaaa

SEQ ID NO: 1132298 - DNA, 15 bp, Homo sapiens
attgctccacaaaaa

SEQ ID NO: 1132299 - DNA, 15 bp, Homo sapiens
cattgctccacaaaa

SEQ ID NO: 1132300 - DNA, 15 bp, Homo sapiens
gcattgctccacaaa

SEQ ID NO: 1132301 - DNA, 15 bp, Homo sapiens
ggcattgctccacaa

SEQ ID NO: 1132302 - DNA, 15 bp, Homo sapiens
gggcattgctccaca

SEQ ID NO: 1132303 - DNA, 15 bp, Homo sapiens
tgggcattgctccac

SEQ ID NO: 1132304 - DNA, 15 bp, Homo sapiens
atgggcattgctcca

SEQ ID NO: 1132305 - DNA, 15 bp, Homo sapiens
catgggcattgctcc

SEQ ID NO: 1132306 - DNA, 15 bp, Homo sapiens
acatgggcattgctc

SEQ ID NO: 1132307 - DNA, 15 bp, Homo sapiens
aacatgggcattgct

SEQ ID NO: 1132308 - DNA, 15 bp, Homo sapiens
taacatgggcattgc

SEQ ID NO: 1132309 - DNA, 15 bp, Homo sapiens
ataacatgggcattg

SEQ ID NO: 1132310 - DNA, 15 bp, Homo sapiens
tataacatgggcatt

SEQ ID NO: 1132311 - DNA, 15 bp, Homo sapiens
atataacatgggcat

SEQ ID NO: 1132312 - DNA, 15 bp, Homo sapiens
aatataacatgggca

SEQ ID NO: 1132313 - DNA, 15 bp, Homo sapiens
caatataacatgggc

SEQ ID NO: 1132314 - DNA, 15 bp, Homo sapiens
acaatataacatggg

SEQ ID NO: 1132315 - DNA, 15 bp, Homo sapiens
cacaatataacatgg

SEQ ID NO: 1132316 - DNA, 15 bp, Homo sapiens
gcacaatataacatg

SEQ ID NO: 1132317 - DNA, 15 bp, Homo sapiens
tgcacaatataacat

SEQ ID NO: 1132318 - DNA, 15 bp, Homo sapiens
ctgcacaatataaca

SEQ ID NO: 1132319 - DNA, 15 bp, Homo sapiens
tctgcacaatataac

SEQ ID NO: 1132320 - DNA, 15 bp, Homo sapiens
ttctgcacaatataa

SEQ ID NO: 1132321 - DNA, 15 bp, Homo sapiens
tttctgcacaatata

SEQ ID NO: 1132322 - DNA, 15 bp, Homo sapiens
ttttctgcacaatat

SEQ ID NO: 1132323 - DNA, 15 bp, Homo sapiens
tttttctgcacaata

SEQ ID NO: 1132324 - DNA, 15 bp, Homo sapiens
ttttttctgcacaat

SEQ ID NO: 1132325 - DNA, 15 bp, Homo sapiens
tttttttctgcacaa

SEQ ID NO: 1132326 - DNA, 15 bp, Homo sapiens
gtttttttctgcaca

SEQ ID NO: 1132327 - DNA, 15 bp, Homo sapiens
ggtttttttctgcac

SEQ ID NO: 1132328 - DNA, 15 bp, Homo sapiens
tggtttttttctgca

SEQ ID NO: 1132329 - DNA, 15 bp, Homo sapiens
atggtttttttctgc

SEQ ID NO: 1132330 - DNA, 15 bp, Homo sapiens
aatggtttttttctg

SEQ ID NO: 1132331 - DNA, 15 bp, Homo sapiens
aaatggtttttttct

SEQ ID NO: 1132332 - DNA, 15 bp, Homo sapiens
gaaatggtttttttc

SEQ ID NO: 1132333 - DNA, 15 bp, Homo sapiens
agaaatggttttttt

SEQ ID NO: 1132334 - DNA, 15 bp, Homo sapiens
cagaaatggtttttt

SEQ ID NO: 1132335 - DNA, 15 bp, Homo sapiens
tcagaaatggttttt

SEQ ID NO: 1132336 - DNA, 15 bp, Homo sapiens
atcagaaatggtttt

SEQ ID NO: 1132337 - DNA, 15 bp, Homo sapiens
gatcagaaatggttt

SEQ ID NO: 1132338 - DNA, 15 bp, Homo sapiens
tgatcagaaatggtt

SEQ ID NO: 1132339 - DNA, 15 bp, Homo sapiens
atgatcagaaatggt

SEQ ID NO: 1132340 - DNA, 15 bp, Homo sapiens
gatgatcagaaatgg

SEQ ID NO: 1132341 - DNA, 15 bp, Homo sapiens
tgatgatcagaaatg

SEQ ID NO: 1132342 - DNA, 15 bp, Homo sapiens
ttgatgatcagaaat

SEQ ID NO: 1132343 - DNA, 15 bp, Homo sapiens
tttgatgatcagaaa

SEQ ID NO: 1132344 - DNA, 15 bp, Homo sapiens
ctttgatgatcagaa

SEQ ID NO: 1132345 - DNA, 15 bp, Homo sapiens
tctttgatgatcaga

SEQ ID NO: 1132346 - DNA, 15 bp, Homo sapiens
atctttgatgatcag

SEQ ID NO: 1132347 - DNA, 15 bp, Homo sapiens
catctttgatgatca

SEQ ID NO: 1132348 - DNA, 15 bp, Homo sapiens
ccatctttgatgatc

SEQ ID NO: 1132349 - DNA, 15 bp, Homo sapiens
accatctttgatgat

SEQ ID NO: 1132350 - DNA, 15 bp, Homo sapiens
taccatctttgatga

SEQ ID NO: 1132351 - DNA, 15 bp, Homo sapiens
ataccatctttgatg

SEQ ID NO: 1132352 - DNA, 15 bp, Homo sapiens
cataccatctttgat

SEQ ID NO: 1132353 - DNA, 15 bp, Homo sapiens
tcataccatctttga

SEQ ID NO: 1132354 - DNA, 15 bp, Homo sapiens
atcataccatctttg

SEQ ID NO: 1132355 - DNA, 15 bp, Homo sapiens
catcataccatcttt

SEQ ID NO: 1132356 - DNA, 15 bp, Homo sapiens
gcatcataccatctt

SEQ ID NO: 1132357 - DNA, 15 bp, Homo sapiens
agcatcataccatct

SEQ ID NO: 1132358 - DNA, 15 bp, Homo sapiens
tagcatcataccatc

SEQ ID NO: 1132359 - DNA, 15 bp, Homo sapiens
atagcatcataccat

SEQ ID NO: 1132360 - DNA, 15 bp, Homo sapiens
gatagcatcatacca

SEQ ID NO: 1132361 - DNA, 15 bp, Homo sapiens
agatagcatcatacc

SEQ ID NO: 1132362 - DNA, 15 bp, Homo sapiens
tagatagcatcatac

SEQ ID NO: 1132363 - DNA, 15 bp, Homo sapiens
atagatagcatcata

SEQ ID NO: 1132364 - DNA, 15 bp, Homo sapiens
gatagatagcatcat

SEQ ID NO: 1132365 - DNA, 15 bp, Homo sapiens
agatagatagcatca

SEQ ID NO: 1132366 - DNA, 15 bp, Homo sapiens
cagatagatagcatc

SEQ ID NO: 1132367 - DNA, 15 bp, Homo sapiens
acagatagatagcat

SEQ ID NO: 1132368 - DNA, 15 bp, Homo sapiens
gacagatagatagca

SEQ ID NO: 1132369 - DNA, 15 bp, Homo sapiens
agacagatagatagc

SEQ ID NO: 1132370 - DNA, 15 bp, Homo sapiens
tagacagatagatag

SEQ ID NO: 1132371 - DNA, 15 bp, Homo sapiens
ttagacagatagata

SEQ ID NO: 1132372 - DNA, 15 bp, Homo sapiens
attagacagatagat

SEQ ID NO: 1132373 - DNA, 15 bp, Homo sapiens
gattagacagataga

SEQ ID NO: 1132374 - DNA, 15 bp, Homo sapiens
tgattagacagatag

SEQ ID NO: 1132375 - DNA, 15 bp, Homo sapiens
atgattagacagata

SEQ ID NO: 1132376 - DNA, 15 bp, Homo sapiens
gatgattagacagat

SEQ ID NO: 1132377 - DNA, 15 bp, Homo sapiens
agatgattagacaga

SEQ ID NO: 1132378 - DNA, 15 bp, Homo sapiens
tagatgattagacag

SEQ ID NO: 1132379 - DNA, 15 bp, Homo sapiens
atagatgattagaca

SEQ ID NO: 1132380 - DNA, 15 bp, Homo sapiens
catagatgattagac

SEQ ID NO: 1132381 - DNA, 15 bp, Homo sapiens
gcatagatgattaga

SEQ ID NO: 1132382 - DNA, 15 bp, Homo sapiens
tgcatagatgattag

SEQ ID NO: 1132383 - DNA, 15 bp, Homo sapiens
gtgcatagatgatta

SEQ ID NO: 1132384 - DNA, 15 bp, Homo sapiens
tgtgcatagatgatt

SEQ ID NO: 1132385 - DNA, 15 bp, Homo sapiens
gtgtgcatagatgat

SEQ ID NO: 1132386 - DNA, 15 bp, Homo sapiens
tgtgtgcatagatga

SEQ ID NO: 1132387 - DNA, 15 bp, Homo sapiens
gtgtgtgcatagatg

SEQ ID NO: 1132388 - DNA, 15 bp, Homo sapiens
gtgtgtgtgcataga

SEQ ID NO: 1132389 - DNA, 15 bp, Homo sapiens
agtgtgtgtgcatag

SEQ ID NO: 1132390 - DNA, 15 bp, Homo sapiens
gagtgtgtgtgcata

SEQ ID NO: 1132391 - DNA, 15 bp, Homo sapiens
atgagtgtgtgtgca

SEQ ID NO: 1132392 - DNA, 15 bp, Homo sapiens
tatgagtgtgtgtgc

SEQ ID NO: 1132393 - DNA, 15 bp, Homo sapiens
gtatgagtgtgtgtg

SEQ ID NO: 1132394 - DNA, 15 bp, Homo sapiens
tgtatgagtgtgtgt

SEQ ID NO: 1132395 - DNA, 15 bp, Homo sapiens
atgtatgagtgtgtg

SEQ ID NO: 1132396 - DNA, 15 bp, Homo sapiens
catgtatgagtgtgt

SEQ ID NO: 1132397 - DNA, 15 bp, Homo sapiens
gcatgtatgagtgtg

SEQ ID NO: 1132398 - DNA, 15 bp, Homo sapiens
tgcatgtatgagtgt

SEQ ID NO: 1132399 - DNA, 15 bp, Homo sapiens
atgcatgtatgagtg

SEQ ID NO: 1132400 - DNA, 15 bp, Homo sapiens
catgcatgtatgagt

SEQ ID NO: 1132401 - DNA, 15 bp, Homo sapiens
gcatgcatgtatgag

SEQ ID NO: 1132402 - DNA, 15 bp, Homo sapiens
tgcatgcatgtatga

SEQ ID NO: 1132403 - DNA, 15 bp, Homo sapiens
atgcatgcatgtatg

SEQ ID NO: 1132404 - DNA, 15 bp, Homo sapiens
gatgcatgcatgtat

SEQ ID NO: 1132405 - DNA, 15 bp, Homo sapiens
agatgcatgcatgta

SEQ ID NO: 1132406 - DNA, 15 bp, Homo sapiens
cagatgcatgcatgt

SEQ ID NO: 1132407 - DNA, 15 bp, Homo sapiens
acagatgcatgcatg

SEQ ID NO: 1132408 - DNA, 15 bp, Homo sapiens
aacagatgcatgcat

SEQ ID NO: 1132409 - DNA, 15 bp, Homo sapiens
taacagatgcatgca

SEQ ID NO: 1132410 - DNA, 15 bp, Homo sapiens
ataacagatgcatgc

SEQ ID NO: 1132411 - DNA, 15 bp, Homo sapiens
cataacagatgcatg

SEQ ID NO: 1132412 - DNA, 15 bp, Homo sapiens
acataacagatgcat

SEQ ID NO: 1132413 - DNA, 15 bp, Homo sapiens
cacataacagatgca

SEQ ID NO: 1132414 - DNA, 15 bp, Homo sapiens
acacataacagatgc

SEQ ID NO: 1132415 - DNA, 15 bp, Homo sapiens
cacacataacagatg

SEQ ID NO: 1132416 - DNA, 15 bp, Homo sapiens
acacacataacagat

SEQ ID NO: 1132417 - DNA, 15 bp, Homo sapiens
tacacacataacaga

SEQ ID NO: 1132418 - DNA, 15 bp, Homo sapiens
atacacacataacag

SEQ ID NO: 1132419 - DNA, 15 bp, Homo sapiens
gatacacacataaca

SEQ ID NO: 1132420 - DNA, 15 bp, Homo sapiens
agatacacacataac

SEQ ID NO: 1132421 - DNA, 15 bp, Homo sapiens
cagatacacacataa

SEQ ID NO: 1132422 - DNA, 15 bp, Homo sapiens
acagatacacacata

SEQ ID NO: 1132423 - DNA, 15 bp, Homo sapiens
cacagatacacacat

SEQ ID NO: 1132424 - DNA, 15 bp, Homo sapiens
acacagatacacaca

SEQ ID NO: 1132425 - DNA, 15 bp, Homo sapiens
aacacagatacacac

SEQ ID NO: 1132426 - DNA, 15 bp, Homo sapiens
aaacacagatacaca

SEQ ID NO: 1132427 - DNA, 15 bp, Homo sapiens
caaacacagatacac

SEQ ID NO: 1132428 - DNA, 15 bp, Homo sapiens
ccaaacacagataca

SEQ ID NO: 1132429 - DNA, 15 bp, Homo sapiens
accaaacacagatac

SEQ ID NO: 1132430 - DNA, 15 bp, Homo sapiens
caccaaacacagata

SEQ ID NO: 1132431 - DNA, 15 bp, Homo sapiens
acaccaaacacagat

SEQ ID NO: 1132432 - DNA, 15 bp, Homo sapiens
cacaccaaacacaga

SEQ ID NO: 1132433 - DNA, 15 bp, Homo sapiens
acacaccaaacacag

SEQ ID NO: 1132434 - DNA, 15 bp, Homo sapiens
cacacaccaaacaca

SEQ ID NO: 1132435 - DNA, 15 bp, Homo sapiens
gcacacaccaaacac

SEQ ID NO: 1132436 - DNA, 15 bp, Homo sapiens
agcacacaccaaaca

SEQ ID NO: 1132437 - DNA, 15 bp, Homo sapiens
aagcacacaccaaac

SEQ ID NO: 1132438 - DNA, 15 bp, Homo sapiens
caagcacacaccaaa

SEQ ID NO: 1132439 - DNA, 15 bp, Homo sapiens
acaagcacacaccaa

SEQ ID NO: 1132440 - DNA, 15 bp, Homo sapiens
tacaagcacacacca

SEQ ID NO: 1132441 - DNA, 15 bp, Homo sapiens
gtacaagcacacacc

SEQ ID NO: 1132442 - DNA, 15 bp, Homo sapiens
tgtacaagcacacac

SEQ ID NO: 1132443 - DNA, 15 bp, Homo sapiens
atgtacaagcacaca

SEQ ID NO: 1132444 - DNA, 15 bp, Homo sapiens
tatgtacaagcacac

SEQ ID NO: 1132445 - DNA, 15 bp, Homo sapiens
gtatgtacaagcaca

SEQ ID NO: 1132446 - DNA, 15 bp, Homo sapiens
agtatgtacaagcac

SEQ ID NO: 1132447 - DNA, 15 bp, Homo sapiens
aagtatgtacaagca

SEQ ID NO: 1132448 - DNA, 15 bp, Homo sapiens
caagtatgtacaagc

SEQ ID NO: 1132449 - DNA, 15 bp, Homo sapiens
acaagtatgtacaag

SEQ ID NO: 1132450 - DNA, 15 bp, Homo sapiens
tacaagtatgtacaa

SEQ ID NO: 1132451 - DNA, 15 bp, Homo sapiens
atacaagtatgtaca

SEQ ID NO: 1132452 - DNA, 15 bp, Homo sapiens
catacaagtatgtac

SEQ ID NO: 1132453 - DNA, 15 bp, Homo sapiens
gcatacaagtatgta

SEQ ID NO: 1132454 - DNA, 15 bp, Homo sapiens
tgcatacaagtatgt

SEQ ID NO: 1132455 - DNA, 15 bp, Homo sapiens
atgcatacaagtatg

SEQ ID NO: 1132456 - DNA, 15 bp, Homo sapiens
tatgcatacaagtat

SEQ ID NO: 1132457 - DNA, 15 bp, Homo sapiens
ttatgcatacaagta

SEQ ID NO: 1132458 - DNA, 15 bp, Homo sapiens
tttatgcatacaagt

SEQ ID NO: 1132459 - DNA, 15 bp, Homo sapiens
ttttatgcatacaag

SEQ ID NO: 1132460 - DNA, 15 bp, Homo sapiens
tttttatgcatacaa

SEQ ID NO: 1132461 - DNA, 15 bp, Homo sapiens
ctttttatgcataca

SEQ ID NO: 1132462 - DNA, 15 bp, Homo sapiens
tctttttatgcatac

SEQ ID NO: 1132463 - DNA, 15 bp, Homo sapiens
atctttttatgcata

SEQ ID NO: 1132464 - DNA, 15 bp, Homo sapiens
tatctttttatgcat

SEQ ID NO: 1132465 - DNA, 15 bp, Homo sapiens
atatctttttatgca

SEQ ID NO: 1132466 - DNA, 15 bp, Homo sapiens
gatatctttttatgc

SEQ ID NO: 1132467 - DNA, 15 bp, Homo sapiens
agatatctttttatg

SEQ ID NO: 1132468 - DNA, 15 bp, Homo sapiens
cagatatctttttat

SEQ ID NO: 1132469 - DNA, 15 bp, Homo sapiens
ccagatatcttttta

SEQ ID NO: 1132470 - DNA, 15 bp, Homo sapiens
tccagatatcttttt

SEQ ID NO: 1132471 - DNA, 15 bp, Homo sapiens
ttccagatatctttt

SEQ ID NO: 1132472 - DNA, 15 bp, Homo sapiens
cttccagatatcttt

SEQ ID NO: 1132473 - DNA, 15 bp, Homo sapiens
tcttccagatatctt

SEQ ID NO: 1132474 - DNA, 15 bp, Homo sapiens
ttcttccagatatct

SEQ ID NO: 1132475 - DNA, 15 bp, Homo sapiens
attcttccagatatc

SEQ ID NO: 1132476 - DNA, 15 bp, Homo sapiens
aattcttccagatat

SEQ ID NO: 1132477 - DNA, 15 bp, Homo sapiens
aaattcttccagata

SEQ ID NO: 1132478 - DNA, 15 bp, Homo sapiens
gaaattcttccagat

SEQ ID NO: 1132479 - DNA, 15 bp, Homo sapiens
agaaattcttccaga

SEQ ID NO: 1132480 - DNA, 15 bp, Homo sapiens
cagaaattcttccag

SEQ ID NO: 1132481 - DNA, 15 bp, Homo sapiens
gcagaaattcttcca

SEQ ID NO: 1132482 - DNA, 15 bp, Homo sapiens
ggcagaaattcttcc

SEQ ID NO: 1132483 - DNA, 15 bp, Homo sapiens
tggcagaaattcttc

SEQ ID NO: 1132484 - DNA, 15 bp, Homo sapiens
ttggcagaaattctt

SEQ ID NO: 1132485 - DNA, 15 bp, Homo sapiens
tttggcagaaattct

SEQ ID NO: 1132486 - DNA, 15 bp, Homo sapiens
atttggcagaaattc

SEQ ID NO: 1132487 - DNA, 15 bp, Homo sapiens
aatttggcagaaatt

SEQ ID NO: 1132488 - DNA, 15 bp, Homo sapiens
aaatttggcagaaat

SEQ ID NO: 1132489 - DNA, 15 bp, Homo sapiens
aaaatttggcagaaa

SEQ ID NO: 1132490 - DNA, 15 bp, Homo sapiens
caaaatttggcagaa

SEQ ID NO: 1132491 - DNA, 15 bp, Homo sapiens
ccaaaatttggcaga

SEQ ID NO: 1132492 - DNA, 15 bp, Homo sapiens
accaaaatttggcag

SEQ ID NO: 1132493 - DNA, 15 bp, Homo sapiens
taccaaaatttggca

SEQ ID NO: 1132494 - DNA, 15 bp, Homo sapiens
ttaccaaaatttggc

SEQ ID NO: 1132495 - DNA, 15 bp, Homo sapiens
gttaccaaaatttgg

SEQ ID NO: 1132496 - DNA, 15 bp, Homo sapiens
agttaccaaaatttg

SEQ ID NO: 1132497 - DNA, 15 bp, Homo sapiens
aagttaccaaaattt

SEQ ID NO: 1132498 - DNA, 15 bp, Homo sapiens
aaagttaccaaaatt

SEQ ID NO: 1132499 - DNA, 15 bp, Homo sapiens
aaaagttaccaaaat

SEQ ID NO: 1132500 - DNA, 15 bp, Homo sapiens
taaaagttaccaaaa

SEQ ID NO: 1132501 - DNA, 15 bp, Homo sapiens
ataaaagttaccaaa

SEQ ID NO: 1132502 - DNA, 15 bp, Homo sapiens
aataaaagttaccaa

SEQ ID NO: 1132503 - DNA, 15 bp, Homo sapiens
aaataaaagttacca

SEQ ID NO: 1132504 - DNA, 15 bp, Homo sapiens
gaaataaaagttacc

SEQ ID NO: 1132505 - DNA, 15 bp, Homo sapiens
ggaaataaaagttac

SEQ ID NO: 1132506 - DNA, 15 bp, Homo sapiens
tggaaataaaagtta

SEQ ID NO: 1132507 - DNA, 15 bp, Homo sapiens
ctggaaataaaagtt

SEQ ID NO: 1132508 - DNA, 15 bp, Homo sapiens
gctggaaataaaagt

SEQ ID NO: 1132509 - DNA, 15 bp, Homo sapiens
ggctggaaataaaag

SEQ ID NO: 1132510 - DNA, 15 bp, Homo sapiens
tggctggaaataaaa

SEQ ID NO: 1132511 - DNA, 15 bp, Homo sapiens
atggctggaaataaa

SEQ ID NO: 1132512 - DNA, 15 bp, Homo sapiens
aatggctggaaataa

SEQ ID NO: 1132513 - DNA, 15 bp, Homo sapiens
aaatggctggaaata

SEQ ID NO: 1132514 - DNA, 15 bp, Homo sapiens
caaatggctggaaat

SEQ ID NO: 1132515 - DNA, 15 bp, Homo sapiens
acaaatggctggaaa

SEQ ID NO: 1132516 - DNA, 15 bp, Homo sapiens
gacaaatggctggaa

SEQ ID NO: 1132517 - DNA, 15 bp, Homo sapiens
ggacaaatggctgga

SEQ ID NO: 1132518 - DNA, 15 bp, Homo sapiens
aggacaaatggctgg

SEQ ID NO: 1132519 - DNA, 15 bp, Homo sapiens
gaggacaaatggctg

SEQ ID NO: 1132520 - DNA, 15 bp, Homo sapiens
agaggacaaatggct

SEQ ID NO: 1132521 - DNA, 15 bp, Homo sapiens
cagaggacaaatggc

SEQ ID NO: 1132522 - DNA, 15 bp, Homo sapiens
acagaggacaaatgg

SEQ ID NO: 1132523 - DNA, 15 bp, Homo sapiens
cacagaggacaaatg

SEQ ID NO: 1132524 - DNA, 15 bp, Homo sapiens
acacagaggacaaat

SEQ ID NO: 1132525 - DNA, 15 bp, Homo sapiens
cacacagaggacaaa

SEQ ID NO: 1132526 - DNA, 15 bp, Homo sapiens
tcacacagaggacaa

SEQ ID NO: 1132527 - DNA, 15 bp, Homo sapiens
gtcacacagaggaca

SEQ ID NO: 1132528 - DNA, 15 bp, Homo sapiens
ggtcacacagaggac

SEQ ID NO: 1132529 - DNA, 15 bp, Homo sapiens
tggtcacacagagga

SEQ ID NO: 1132530 - DNA, 15 bp, Homo sapiens
ctggtcacacagagg

SEQ ID NO: 1132531 - DNA, 15 bp, Homo sapiens
tctggtcacacagag

SEQ ID NO: 1132532 - DNA, 15 bp, Homo sapiens
ttctggtcacacaga

SEQ ID NO: 1132533 - DNA, 15 bp, Homo sapiens
gttctggtcacacag

SEQ ID NO: 1132534 - DNA, 15 bp, Homo sapiens
agttctggtcacaca

SEQ ID NO: 1132535 - DNA, 15 bp, Homo sapiens
gagttctggtcacac

SEQ ID NO: 1132536 - DNA, 15 bp, Homo sapiens
ggagttctggtcaca

SEQ ID NO: 1132537 - DNA, 15 bp, Homo sapiens
gggagttctggtcac

SEQ ID NO: 1132538 - DNA, 15 bp, Homo sapiens
agggagttctggtca

SEQ ID NO: 1132539 - DNA, 15 bp, Homo sapiens
cagggagttctggtc

SEQ ID NO: 1132540 - DNA, 15 bp, Homo sapiens
gcagggagttctggt

SEQ ID NO: 1132541 - DNA, 15 bp, Homo sapiens
tgcagggagttctgg

SEQ ID NO: 1132542 - DNA, 15 bp, Homo sapiens
atgcagggagttctg

SEQ ID NO: 1132543 - DNA, 15 bp, Homo sapiens
tatgcagggagttct

SEQ ID NO: 1132544 - DNA, 15 bp, Homo sapiens
atatgcagggagttc

SEQ ID NO: 1132545 - DNA, 15 bp, Homo sapiens
tatatgcagggagtt

SEQ ID NO: 1132546 - DNA, 15 bp, Homo sapiens
gtatatgcagggagt

SEQ ID NO: 1132547 - DNA, 15 bp, Homo sapiens
agtatatgcagggag

SEQ ID NO: 1132548 - DNA, 15 bp, Homo sapiens
tagtatatgcaggga

SEQ ID NO: 1132549 - DNA, 15 bp, Homo sapiens
ttagtatatgcaggg

SEQ ID NO: 1132550 - DNA, 15 bp, Homo sapiens
tttagtatatgcagg

SEQ ID NO: 1132551 - DNA, 15 bp, Homo sapiens
ttttagtatatgcag

SEQ ID NO: 1132552 - DNA, 15 bp, Homo sapiens
attttagtatatgca

SEQ ID NO: 1132553 - DNA, 15 bp, Homo sapiens
cattttagtatatgc

SEQ ID NO: 1132554 - DNA, 15 bp, Homo sapiens
acattttagtatatg

SEQ ID NO: 1132555 - DNA, 15 bp, Homo sapiens
gacattttagtatat

SEQ ID NO: 1132556 - DNA, 15 bp, Homo sapiens
agacattttagtata

SEQ ID NO: 1132557 - DNA, 15 bp, Homo sapiens
tagacattttagtat

SEQ ID NO: 1132558 - DNA, 15 bp, Homo sapiens
atagacattttagta

SEQ ID NO: 1132559 - DNA, 15 bp, Homo sapiens
aatagacattttagt

SEQ ID NO: 1132560 - DNA, 15 bp, Homo sapiens
caatagacattttag

SEQ ID NO: 1132561 - DNA, 15 bp, Homo sapiens
tcaatagacatttta

SEQ ID NO: 1132562 - DNA, 15 bp, Homo sapiens
atcaatagacatttt

SEQ ID NO: 1132563 - DNA, 15 bp, Homo sapiens
catcaatagacattt

SEQ ID NO: 1132564 - DNA, 15 bp, Homo sapiens
ccatcaatagacatt

SEQ ID NO: 1132565 - DNA, 15 bp, Homo sapiens
accatcaatagacat

SEQ ID NO: 1132566 - DNA, 15 bp, Homo sapiens
gaccatcaatagaca

SEQ ID NO: 1132567 - DNA, 15 bp, Homo sapiens
agaccatcaatagac

SEQ ID NO: 1132568 - DNA, 15 bp, Homo sapiens
aagaccatcaataga

SEQ ID NO: 1132569 - DNA, 15 bp, Homo sapiens
aaagaccatcaatag

SEQ ID NO: 1132570 - DNA, 15 bp, Homo sapiens
caaagaccatcaata

SEQ ID NO: 1132571 - DNA, 15 bp, Homo sapiens
tcaaagaccatcaat

SEQ ID NO: 1132572 - DNA, 15 bp, Homo sapiens
ctcaaagaccatcaa

SEQ ID NO: 1132573 - DNA, 15 bp, Homo sapiens
cctcaaagaccatca

SEQ ID NO: 1132574 - DNA, 15 bp, Homo sapiens
ccctcaaagaccatc

SEQ ID NO: 1132575 - DNA, 15 bp, Homo sapiens
gccctcaaagaccat

SEQ ID NO: 1132576 - DNA, 15 bp, Homo sapiens
tgccctcaaagacca

SEQ ID NO: 1132577 - DNA, 15 bp, Homo sapiens
ctgccctcaaagacc

SEQ ID NO: 1132578 - DNA, 15 bp, Homo sapiens
tctgccctcaaagac

SEQ ID NO: 1132579 - DNA, 15 bp, Homo sapiens
ctctgccctcaaaga

SEQ ID NO: 1132580 - DNA, 15 bp, Homo sapiens
tctctgccctcaaag

SEQ ID NO: 1132581 - DNA, 15 bp, Homo sapiens
gtctctgccctcaaa

SEQ ID NO: 1132582 - DNA, 15 bp, Homo sapiens
agtctctgccctcaa

SEQ ID NO: 1132583 - DNA, 15 bp, Homo sapiens
cagtctctgccctca

SEQ ID NO: 1132584 - DNA, 15 bp, Homo sapiens
gcagtctctgccctc

SEQ ID NO: 1132585 - DNA, 15 bp, Homo sapiens
ggcagtctctgccct

SEQ ID NO: 1132586 - DNA, 15 bp, Homo sapiens
aggcagtctctgccc

SEQ ID NO: 1132587 - DNA, 15 bp, Homo sapiens
taggcagtctctgcc

SEQ ID NO: 1132588 - DNA, 15 bp, Homo sapiens
ctaggcagtctctgc

SEQ ID NO: 1132589 - DNA, 15 bp, Homo sapiens
actaggcagtctctg

SEQ ID NO: 1132590 - DNA, 15 bp, Homo sapiens
aactaggcagtctct

SEQ ID NO: 1132591 - DNA, 15 bp, Homo sapiens
gaactaggcagtctc

SEQ ID NO: 1132592 - DNA, 15 bp, Homo sapiens
tgaactaggcagtct

SEQ ID NO: 1132593 - DNA, 15 bp, Homo sapiens
atgaactaggcagtc

SEQ ID NO: 1132594 - DNA, 15 bp, Homo sapiens
gatgaactaggcagt

SEQ ID NO: 1132595 - DNA, 15 bp, Homo sapiens
agatgaactaggcag

SEQ ID NO: 1132596 - DNA, 15 bp, Homo sapiens
aagatgaactaggca

SEQ ID NO: 1132597 - DNA, 15 bp, Homo sapiens
taagatgaactaggc

SEQ ID NO: 1132598 - DNA, 15 bp, Homo sapiens
ttaagatgaactagg

SEQ ID NO: 1132599 - DNA, 15 bp, Homo sapiens
attaagatgaactag

SEQ ID NO: 1132600 - DNA, 15 bp, Homo sapiens
cattaagatgaacta

SEQ ID NO: 1132601 - DNA, 15 bp, Homo sapiens
acattaagatgaact

SEQ ID NO: 1132602 - DNA, 15 bp, Homo sapiens
gacattaagatgaac

SEQ ID NO: 1132603 - DNA, 15 bp, Homo sapiens
ggacattaagatgaa

SEQ ID NO: 1132604 - DNA, 15 bp, Homo sapiens
gggacattaagatga

SEQ ID NO: 1132605 - DNA, 15 bp, Homo sapiens
ggggacattaagatg

SEQ ID NO: 1132606 - DNA, 15 bp, Homo sapiens
tggggacattaagat

SEQ ID NO: 1132607 - DNA, 15 bp, Homo sapiens
ctggggacattaaga

SEQ ID NO: 1132608 - DNA, 15 bp, Homo sapiens
actggggacattaag

SEQ ID NO: 1132609 - DNA, 15 bp, Homo sapiens
cactggggacattaa

SEQ ID NO: 1132610 - DNA, 15 bp, Homo sapiens
gcactggggacatta

SEQ ID NO: 1132611 - DNA, 15 bp, Homo sapiens
agcactggggacatt

SEQ ID NO: 1132612 - DNA, 15 bp, Homo sapiens
aagcactggggacat

SEQ ID NO: 1132613 - DNA, 15 bp, Homo sapiens
aaagcactggggaca

SEQ ID NO: 1132614 - DNA, 15 bp, Homo sapiens
taaagcactggggac

SEQ ID NO: 1132615 - DNA, 15 bp, Homo sapiens
gtaaagcactgggga

SEQ ID NO: 1132616 - DNA, 15 bp, Homo sapiens
agtaaagcactgggg

SEQ ID NO: 1132617 - DNA, 15 bp, Homo sapiens
gagtaaagcactggg

SEQ ID NO: 1132618 - DNA, 15 bp, Homo sapiens
cgagtaaagcactgg

SEQ ID NO: 1132619 - DNA, 15 bp, Homo sapiens
ccgagtaaagcactg

SEQ ID NO: 1132620 - DNA, 15 bp, Homo sapiens
accgagtaaagcact

SEQ ID NO: 1132621 - DNA, 15 bp, Homo sapiens
taccgagtaaagcac

SEQ ID NO: 1132622 - DNA, 15 bp, Homo sapiens
gtaccgagtaaagca

SEQ ID NO: 1132623 - DNA, 15 bp, Homo sapiens
agtaccgagtaaagc

SEQ ID NO: 1132624 - DNA, 15 bp, Homo sapiens
aagtaccgagtaaag

SEQ ID NO: 1132625 - DNA, 15 bp, Homo sapiens
caagtaccgagtaaa

SEQ ID NO: 1132626 - DNA, 15 bp, Homo sapiens
ccaagtaccgagtaa

SEQ ID NO: 1132627 - DNA, 15 bp, Homo sapiens
gccaagtaccgagta

SEQ ID NO: 1132628 - DNA, 15 bp, Homo sapiens
tgccaagtaccgagt

SEQ ID NO: 1132629 - DNA, 15 bp, Homo sapiens
atgccaagtaccgag

SEQ ID NO: 1132630 - DNA, 15 bp, Homo sapiens
tatgccaagtaccga

SEQ ID NO: 1132631 - DNA, 15 bp, Homo sapiens
ttatgccaagtaccg

SEQ ID NO: 1132632 - DNA, 15 bp, Homo sapiens
tttatgccaagtacc

SEQ ID NO: 1132633 - DNA, 15 bp, Homo sapiens
ctttatgccaagtac

SEQ ID NO: 1132634 - DNA, 15 bp, Homo sapiens
actttatgccaagta

SEQ ID NO: 1132635 - DNA, 15 bp, Homo sapiens
aactttatgccaagt

SEQ ID NO: 1132636 - DNA, 15 bp, Homo sapiens
gaactttatgccaag

SEQ ID NO: 1132637 - DNA, 15 bp, Homo sapiens
agaactttatgccaa

SEQ ID NO: 1132638 - DNA, 15 bp, Homo sapiens
tagaactttatgcca

SEQ ID NO: 1132639 - DNA, 15 bp, Homo sapiens
gtagaactttatgcc

SEQ ID NO: 1132640 - DNA, 15 bp, Homo sapiens
ggtagaactttatgc

SEQ ID NO: 1132641 - DNA, 15 bp, Homo sapiens
aggtagaactttatg

SEQ ID NO: 1132642 - DNA, 15 bp, Homo sapiens
gaggtagaactttat

SEQ ID NO: 1132643 - DNA, 15 bp, Homo sapiens
tgaggtagaacttta

SEQ ID NO: 1132644 - DNA, 15 bp, Homo sapiens
ttgaggtagaacttt

SEQ ID NO: 1132645 - DNA, 15 bp, Homo sapiens
attgaggtagaactt

SEQ ID NO: 1132646 - DNA, 15 bp, Homo sapiens
tattgaggtagaact

SEQ ID NO: 1132647 - DNA, 15 bp, Homo sapiens
gtattgaggtagaac

SEQ ID NO: 1132648 - DNA, 15 bp, Homo sapiens
tgtattgaggtagaa

SEQ ID NO: 1132649 - DNA, 15 bp, Homo sapiens
atgtattgaggtaga

SEQ ID NO: 1132650 - DNA, 15 bp, Homo sapiens
gatgtattgaggtag

SEQ ID NO: 1132651 - DNA, 15 bp, Homo sapiens
agatgtattgaggta

SEQ ID NO: 1132652 - DNA, 15 bp, Homo sapiens
aagatgtattgaggt

SEQ ID NO: 1132653 - DNA, 15 bp, Homo sapiens
caagatgtattgagg

SEQ ID NO: 1132654 - DNA, 15 bp, Homo sapiens
acaagatgtattgag

SEQ ID NO: 1132655 - DNA, 15 bp, Homo sapiens
aacaagatgtattga

SEQ ID NO: 1132656 - DNA, 15 bp, Homo sapiens
caacaagatgtattg

SEQ ID NO: 1132657 - DNA, 15 bp, Homo sapiens
tcaacaagatgtatt

SEQ ID NO: 1132658 - DNA, 15 bp, Homo sapiens
ttcaacaagatgtat

SEQ ID NO: 1132659 - DNA, 15 bp, Homo sapiens
attcaacaagatgta

SEQ ID NO: 1132660 - DNA, 15 bp, Homo sapiens
tattcaacaagatgt

SEQ ID NO: 1132661 - DNA, 15 bp, Homo sapiens
ctattcaacaagatg

SEQ ID NO: 1132662 - DNA, 15 bp, Homo sapiens
actattcaacaagat

SEQ ID NO: 1132663 - DNA, 15 bp, Homo sapiens
gactattcaacaaga

SEQ ID NO: 1132664 - DNA, 15 bp, Homo sapiens
agactattcaacaag

SEQ ID NO: 1132665 - DNA, 15 bp, Homo sapiens
aagactattcaacaa

SEQ ID NO: 1132666 - DNA, 15 bp, Homo sapiens
gaagactattcaaca

SEQ ID NO: 1132667 - DNA, 15 bp, Homo sapiens
agaagactattcaac

SEQ ID NO: 1132668 - DNA, 15 bp, Homo sapiens
gagaagactattcaa

SEQ ID NO: 1132669 - DNA, 15 bp, Homo sapiens
tgagaagactattca

SEQ ID NO: 1132670 - DNA, 15 bp, Homo sapiens
ttgagaagactattc

SEQ ID NO: 1132671 - DNA, 15 bp, Homo sapiens
tttgagaagactatt

SEQ ID NO: 1132672 - DNA, 15 bp, Homo sapiens
ctttgagaagactat

SEQ ID NO: 1132673 - DNA, 15 bp, Homo sapiens
actttgagaagacta

SEQ ID NO: 1132674 - DNA, 15 bp, Homo sapiens
gactttgagaagact

SEQ ID NO: 1132675 - DNA, 15 bp, Homo sapiens
tgactttgagaagac

SEQ ID NO: 1132676 - DNA, 15 bp, Homo sapiens
gtgactttgagaaga

SEQ ID NO: 1132677 - DNA, 15 bp, Homo sapiens
tgtgactttgagaag

SEQ ID NO: 1132678 - DNA, 15 bp, Homo sapiens
gtgtgactttgagaa

SEQ ID NO: 1132679 - DNA, 15 bp, Homo sapiens
tgtgtgactttgaga

SEQ ID NO: 1132680 - DNA, 15 bp, Homo sapiens
ctgtgtgactttgag

SEQ ID NO: 1132681 - DNA, 15 bp, Homo sapiens
cctgtgtgactttga

SEQ ID NO: 1132682 - DNA, 15 bp, Homo sapiens
acctgtgtgactttg

SEQ ID NO: 1132683 - DNA, 15 bp, Homo sapiens
tacctgtgtgacttt

SEQ ID NO: 1132684 - DNA, 15 bp, Homo sapiens
ctacctgtgtgactt

SEQ ID NO: 1132685 - DNA, 15 bp, Homo sapiens
actacctgtgtgact

SEQ ID NO: 1132686 - DNA, 15 bp, Homo sapiens
aactacctgtgtgac

SEQ ID NO: 1132687 - DNA, 15 bp, Homo sapiens
aaactacctgtgtga

SEQ ID NO: 1132688 - DNA, 15 bp, Homo sapiens
taaactacctgtgtg

SEQ ID NO: 1132689 - DNA, 15 bp, Homo sapiens
ataaactacctgtgt

SEQ ID NO: 1132690 - DNA, 15 bp, Homo sapiens
tataaactacctgtg

SEQ ID NO: 1132691 - DNA, 15 bp, Homo sapiens
ttataaactacctgt

SEQ ID NO: 1132692 - DNA, 15 bp, Homo sapiens
gttataaactacctg

SEQ ID NO: 1132693 - DNA, 15 bp, Homo sapiens
agttataaactacct

SEQ ID NO: 1132694 - DNA, 15 bp, Homo sapiens
aagttataaactacc

SEQ ID NO: 1132695 - DNA, 15 bp, Homo sapiens
caagttataaactac

SEQ ID NO: 1132696 - DNA, 15 bp, Homo sapiens
acaagttataaacta

SEQ ID NO: 1132697 - DNA, 15 bp, Homo sapiens
gacaagttataaact

SEQ ID NO: 1132698 - DNA, 15 bp, Homo sapiens
tgacaagttataaac

SEQ ID NO: 1132699 - DNA, 15 bp, Homo sapiens
ctgacaagttataaa

SEQ ID NO: 1132700 - DNA, 15 bp, Homo sapiens
gctgacaagttataa

SEQ ID NO: 1132701 - DNA, 15 bp, Homo sapiens
ggctgacaagttata

SEQ ID NO: 1132702 - DNA, 15 bp, Homo sapiens
gggctgacaagttat

SEQ ID NO: 1132703 - DNA, 15 bp, Homo sapiens
ggggctgacaagtta

SEQ ID NO: 1132704 - DNA, 15 bp, Homo sapiens
gggggctgacaagtt

SEQ ID NO: 1132705 - DNA, 15 bp, Homo sapiens
tgggggctgacaagt

SEQ ID NO: 1132706 - DNA, 15 bp, Homo sapiens
gtgggggctgacaag

SEQ ID NO: 1132707 - DNA, 15 bp, Homo sapiens
cgtgggggctgacaa

SEQ ID NO: 1132708 - DNA, 15 bp, Homo sapiens
acgtgggggctgaca

SEQ ID NO: 1132709 - DNA, 15 bp, Homo sapiens
tacgtgggggctgac

SEQ ID NO: 1132710 - DNA, 15 bp, Homo sapiens
ttacgtgggggctga

SEQ ID NO: 1132711 - DNA, 15 bp, Homo sapiens
cttacgtgggggctg

SEQ ID NO: 1132712 - DNA, 15 bp, Homo sapiens
ccttacgtgggggct

SEQ ID NO: 1132713 - DNA, 15 bp, Homo sapiens
tccttacgtgggggc

SEQ ID NO: 1132714 - DNA, 15 bp, Homo sapiens
ttccttacgtggggg

SEQ ID NO: 1132715 - DNA, 15 bp, Homo sapiens
attccttacgtgggg

SEQ ID NO: 1132716 - DNA, 15 bp, Homo sapiens
tattccttacgtggg

SEQ ID NO: 1132717 - DNA, 15 bp, Homo sapiens
ttattccttacgtgg

SEQ ID NO: 1132718 - DNA, 15 bp, Homo sapiens
tttattccttacgtg

SEQ ID NO: 1132719 - DNA, 15 bp, Homo sapiens
ttttattccttacgt

SEQ ID NO: 1132720 - DNA, 15 bp, Homo sapiens
cttttattccttacg

SEQ ID NO: 1132721 - DNA, 15 bp, Homo sapiens
acttttattccttac

SEQ ID NO: 1132722 - DNA, 15 bp, Homo sapiens
cacttttattcctta

SEQ ID NO: 1132723 - DNA, 15 bp, Homo sapiens
ccacttttattcctt

SEQ ID NO: 1132724 - DNA, 15 bp, Homo sapiens
tccacttttattcct

SEQ ID NO: 1132725 - DNA, 15 bp, Homo sapiens
ttccacttttattcc

SEQ ID NO: 1132726 - DNA, 15 bp, Homo sapiens
tttccacttttattc

SEQ ID NO: 1132727 - DNA, 15 bp, Homo sapiens
ttttccacttttatt

SEQ ID NO: 1132728 - DNA, 15 bp, Homo sapiens
gttttccacttttat

SEQ ID NO: 1132729 - DNA, 15 bp, Homo sapiens
cgttttccactttta

SEQ ID NO: 1132730 - DNA, 15 bp, Homo sapiens
gcgttttccactttt

SEQ ID NO: 1132731 - DNA, 15 bp, Homo sapiens
ggcgttttccacttt

SEQ ID NO: 1132732 - DNA, 15 bp, Homo sapiens
gggcgttttccactt

SEQ ID NO: 1132733 - DNA, 15 bp, Homo sapiens
tgggcgttttccact

SEQ ID NO: 1132734 - DNA, 15 bp, Homo sapiens
atgggcgttttccac

SEQ ID NO: 1132735 - DNA, 15 bp, Homo sapiens
aatgggcgttttcca

SEQ ID NO: 1132736 - DNA, 15 bp, Homo sapiens
gaatgggcgttttcc

SEQ ID NO: 1132737 - DNA, 15 bp, Homo sapiens
agaatgggcgttttc

SEQ ID NO: 1132738 - DNA, 15 bp, Homo sapiens
aagaatgggcgtttt

SEQ ID NO: 1132739 - DNA, 15 bp, Homo sapiens
aaagaatgggcgttt

SEQ ID NO: 1132740 - DNA, 15 bp, Homo sapiens
gaaagaatgggcgtt

SEQ ID NO: 1132741 - DNA, 15 bp, Homo sapiens
ggaaagaatgggcgt

SEQ ID NO: 1132742 - DNA, 15 bp, Homo sapiens
cggaaagaatgggcg

SEQ ID NO: 1132743 - DNA, 15 bp, Homo sapiens
acggaaagaatgggc

SEQ ID NO: 1132744 - DNA, 15 bp, Homo sapiens
cacggaaagaatggg

SEQ ID NO: 1132745 - DNA, 15 bp, Homo sapiens
ccacggaaagaatgg

SEQ ID NO: 1132746 - DNA, 15 bp, Homo sapiens
cccacggaaagaatg

SEQ ID NO: 1132747 - DNA, 15 bp, Homo sapiens
acccacggaaagaat

SEQ ID NO: 1132748 - DNA, 15 bp, Homo sapiens
gacccacggaaagaa

SEQ ID NO: 1132749 - DNA, 15 bp, Homo sapiens
tgacccacggaaaga

SEQ ID NO: 1132750 - DNA, 15 bp, Homo sapiens
ctgacccacggaaag

SEQ ID NO: 1132751 - DNA, 15 bp, Homo sapiens
tctgacccacggaaa

SEQ ID NO: 1132752 - DNA, 15 bp, Homo sapiens
ctctgacccacggaa

SEQ ID NO: 1132753 - DNA, 15 bp, Homo sapiens
gctctgacccacgga

SEQ ID NO: 1132754 - DNA, 15 bp, Homo sapiens
tgctctgacccacgg

SEQ ID NO: 1132755 - DNA, 15 bp, Homo sapiens
ctgctctgacccacg

SEQ ID NO: 1132756 - DNA, 15 bp, Homo sapiens
actgctctgacccac

SEQ ID NO: 1132757 - DNA, 15 bp, Homo sapiens
cactgctctgaccca

SEQ ID NO: 1132758 - DNA, 15 bp, Homo sapiens
gcactgctctgaccc

SEQ ID NO: 1132759 - DNA, 15 bp, Homo sapiens
ggcactgctctgacc

SEQ ID NO: 1132760 - DNA, 15 bp, Homo sapiens
aggcactgctctgac

SEQ ID NO: 1132761 - DNA, 15 bp, Homo sapiens
aaggcactgctctga

SEQ ID NO: 1132762 - DNA, 15 bp, Homo sapiens
aaaggcactgctctg

SEQ ID NO: 1132763 - DNA, 15 bp, Homo sapiens
gaaaggcactgctct

SEQ ID NO: 1132764 - DNA, 15 bp, Homo sapiens
tgaaaggcactgctc

SEQ ID NO: 1132765 - DNA, 15 bp, Homo sapiens
ttgaaaggcactgct

SEQ ID NO: 1132766 - DNA, 15 bp, Homo sapiens
gttgaaaggcactgc

SEQ ID NO: 1132767 - DNA, 15 bp, Homo sapiens
tgttgaaaggcactg

SEQ ID NO: 1132768 - DNA, 15 bp, Homo sapiens
ctgttgaaaggcact

SEQ ID NO: 1132769 - DNA, 15 bp, Homo sapiens
tctgttgaaaggcac

SEQ ID NO: 1132770 - DNA, 15 bp, Homo sapiens
ttctgttgaaaggca

SEQ ID NO: 1132771 - DNA, 15 bp, Homo sapiens
tttctgttgaaaggc

SEQ ID NO: 1132772 - DNA, 15 bp, Homo sapiens
atttctgttgaaagg

SEQ ID NO: 1132773 - DNA, 15 bp, Homo sapiens
tatttctgttgaaag

SEQ ID NO: 1132774 - DNA, 15 bp, Homo sapiens
atatttctgttgaaa

SEQ ID NO: 1132775 - DNA, 15 bp, Homo sapiens
tatatttctgttgaa

SEQ ID NO: 1132776 - DNA, 15 bp, Homo sapiens
ttatatttctgttga

SEQ ID NO: 1132777 - DNA, 15 bp, Homo sapiens
attatatttctgttg

SEQ ID NO: 1132778 - DNA, 15 bp, Homo sapiens
tattatatttctgtt

SEQ ID NO: 1132779 - DNA, 15 bp, Homo sapiens
atattatatttctgt

SEQ ID NO: 1132780 - DNA, 15 bp, Homo sapiens
catattatatttctg

SEQ ID NO: 1132781 - DNA, 15 bp, Homo sapiens
ccatattatatttct

SEQ ID NO: 1132782 - DNA, 15 bp, Homo sapiens
cccatattatatttc

SEQ ID NO: 1132783 - DNA, 15 bp, Homo sapiens
gcccatattatattt

SEQ ID NO: 1132784 - DNA, 15 bp, Homo sapiens
ggcccatattatatt

SEQ ID NO: 1132785 - DNA, 15 bp, Homo sapiens
tggcccatattatat

SEQ ID NO: 1132786 - DNA, 15 bp, Homo sapiens
gtggcccatattata

SEQ ID NO: 1132787 - DNA, 15 bp, Homo sapiens
agtggcccatattat

SEQ ID NO: 1132788 - DNA, 15 bp, Homo sapiens
tagtggcccatatta

SEQ ID NO: 1132789 - DNA, 15 bp, Homo sapiens
ttagtggcccatatt

SEQ ID NO: 1132790 - DNA, 15 bp, Homo sapiens
attagtggcccatat

SEQ ID NO: 1132791 - DNA, 15 bp, Homo sapiens
cattagtggcccata

SEQ ID NO: 1132792 - DNA, 15 bp, Homo sapiens
acattagtggcccat

SEQ ID NO: 1132793 - DNA, 15 bp, Homo sapiens
cacattagtggccca

SEQ ID NO: 1132794 - DNA, 15 bp, Homo sapiens
tcacattagtggccc

SEQ ID NO: 1132795 - DNA, 15 bp, Homo sapiens
ctcacattagtggcc

SEQ ID NO: 1132796 - DNA, 15 bp, Homo sapiens
gctcacattagtggc

SEQ ID NO: 1132797 - DNA, 15 bp, Homo sapiens
ggctcacattagtgg

SEQ ID NO: 1132798 - DNA, 15 bp, Homo sapiens
tggctcacattagtg

SEQ ID NO: 1132799 - DNA, 15 bp, Homo sapiens
gtggctcacattagt

SEQ ID NO: 1132800 - DNA, 15 bp, Homo sapiens
tgtggctcacattag

SEQ ID NO: 1132801 - DNA, 15 bp, Homo sapiens
atgtggctcacatta

SEQ ID NO: 1132802 - DNA, 15 bp, Homo sapiens
tatgtggctcacatt

SEQ ID NO: 1132803 - DNA, 15 bp, Homo sapiens
ctatgtggctcacat

SEQ ID NO: 1132804 - DNA, 15 bp, Homo sapiens
cctatgtggctcaca

SEQ ID NO: 1132805 - DNA, 15 bp, Homo sapiens
acctatgtggctcac

SEQ ID NO: 1132806 - DNA, 15 bp, Homo sapiens
tacctatgtggctca

SEQ ID NO: 1132807 - DNA, 15 bp, Homo sapiens
ttacctatgtggctc

SEQ ID NO: 1132808 - DNA, 15 bp, Homo sapiens
attacctatgtggct

SEQ ID NO: 1132809 - DNA, 15 bp, Homo sapiens
aattacctatgtggc

SEQ ID NO: 1132810 - DNA, 15 bp, Homo sapiens
aaattacctatgtgg

SEQ ID NO: 1132811 - DNA, 15 bp, Homo sapiens
aaaattacctatgtg

SEQ ID NO: 1132812 - DNA, 15 bp, Homo sapiens
taaaattacctatgt

SEQ ID NO: 1132813 - DNA, 15 bp, Homo sapiens
ttaaaattacctatg

SEQ ID NO: 1132814 - DNA, 15 bp, Homo sapiens
tttaaaattacctat

SEQ ID NO: 1132815 - DNA, 15 bp, Homo sapiens
atttaaaattaccta

SEQ ID NO: 1132816 - DNA, 15 bp, Homo sapiens
aatttaaaattacct

SEQ ID NO: 1132817 - DNA, 15 bp, Homo sapiens
aaatttaaaattacc

SEQ ID NO: 1132818 - DNA, 15 bp, Homo sapiens
aaaatttaaaattac

SEQ ID NO: 1132819 - DNA, 15 bp, Homo sapiens
gaaaatttaaaatta

SEQ ID NO: 1132820 - DNA, 15 bp, Homo sapiens
agaaaatttaaaatt

SEQ ID NO: 1132821 - DNA, 15 bp, Homo sapiens
tagaaaatttaaaat

SEQ ID NO: 1132822 - DNA, 15 bp, Homo sapiens
ctagaaaatttaaaa

SEQ ID NO: 1132823 - DNA, 15 bp, Homo sapiens
actagaaaatttaaa

SEQ ID NO: 1132824 - DNA, 15 bp, Homo sapiens
gactagaaaatttaa

SEQ ID NO: 1132825 - DNA, 15 bp, Homo sapiens
tgactagaaaattta

SEQ ID NO: 1132826 - DNA, 15 bp, Homo sapiens
gtgactagaaaattt

SEQ ID NO: 1132827 - DNA, 15 bp, Homo sapiens
tgtgactagaaaatt

SEQ ID NO: 1132828 - DNA, 15 bp, Homo sapiens
atgtgactagaaaat

SEQ ID NO: 1132829 - DNA, 15 bp, Homo sapiens
tatgtgactagaaaa

SEQ ID NO: 1132830 - DNA, 15 bp, Homo sapiens
ttatgtgactagaaa

SEQ ID NO: 1132831 - DNA, 15 bp, Homo sapiens
tttatgtgactagaa

SEQ ID NO: 1132832 - DNA, 15 bp, Homo sapiens
ttttatgtgactaga

SEQ ID NO: 1132833 - DNA, 15 bp, Homo sapiens
tttttatgtgactag

SEQ ID NO: 1132834 - DNA, 15 bp, Homo sapiens
ttttttatgtgacta

SEQ ID NO: 1132835 - DNA, 15 bp, Homo sapiens
cttttttatgtgact

SEQ ID NO: 1132836 - DNA, 15 bp, Homo sapiens
acttttttatgtgac

SEQ ID NO: 1132837 - DNA, 15 bp, Homo sapiens
cacttttttatgtga

SEQ ID NO: 1132838 - DNA, 15 bp, Homo sapiens
ccacttttttatgtg

SEQ ID NO: 1132839 - DNA, 15 bp, Homo sapiens
tccacttttttatgt

SEQ ID NO: 1132840 - DNA, 15 bp, Homo sapiens
ttccacttttttatg

SEQ ID NO: 1132841 - DNA, 15 bp, Homo sapiens
tttccacttttttat

SEQ ID NO: 1132842 - DNA, 15 bp, Homo sapiens
ttttccactttttta

SEQ ID NO: 1132843 - DNA, 15 bp, Homo sapiens
tttttccactttttt

SEQ ID NO: 1132844 - DNA, 15 bp, Homo sapiens
ttttttccacttttt

SEQ ID NO: 1132845 - DNA, 15 bp, Homo sapiens
tttttttccactttt

SEQ ID NO: 1132846 - DNA, 15 bp, Homo sapiens
ttttttttccacttt

SEQ ID NO: 1132847 - DNA, 15 bp, Homo sapiens
gttttttttccactt

SEQ ID NO: 1132848 - DNA, 15 bp, Homo sapiens
tgttttttttccact

SEQ ID NO: 1132849 - DNA, 15 bp, Homo sapiens
ctgttttttttccac

SEQ ID NO: 1132850 - DNA, 15 bp, Homo sapiens
cctgttttttttcca

SEQ ID NO: 1132851 - DNA, 15 bp, Homo sapiens
acctgttttttttcc

SEQ ID NO: 1132852 - DNA, 15 bp, Homo sapiens
cacctgttttttttc

SEQ ID NO: 1132853 - DNA, 15 bp, Homo sapiens
tcacctgtttttttt

SEQ ID NO: 1132854 - DNA, 15 bp, Homo sapiens
ttcacctgttttttt

SEQ ID NO: 1132855 - DNA, 15 bp, Homo sapiens
tttcacctgtttttt

SEQ ID NO: 1132856 - DNA, 15 bp, Homo sapiens
atttcacctgttttt

SEQ ID NO: 1132857 - DNA, 15 bp, Homo sapiens
aatttcacctgtttt

SEQ ID NO: 1132858 - DNA, 15 bp, Homo sapiens
aaatttcacctgttt

SEQ ID NO: 1132859 - DNA, 15 bp, Homo sapiens
taaatttcacctgtt

SEQ ID NO: 1132860 - DNA, 15 bp, Homo sapiens
ataaatttcacctgt

SEQ ID NO: 1132861 - DNA, 15 bp, Homo sapiens
cataaatttcacctg

SEQ ID NO: 1132862 - DNA, 15 bp, Homo sapiens
gcataaatttcacct

SEQ ID NO: 1132863 - DNA, 15 bp, Homo sapiens
agcataaatttcacc

SEQ ID NO: 1132864 - DNA, 15 bp, Homo sapiens
tagcataaatttcac

SEQ ID NO: 1132865 - DNA, 15 bp, Homo sapiens
ttagcataaatttca

SEQ ID NO: 1132866 - DNA, 15 bp, Homo sapiens
attagcataaatttc

SEQ ID NO: 1132867 - DNA, 15 bp, Homo sapiens
aattagcataaattt

SEQ ID NO: 1132868 - DNA, 15 bp, Homo sapiens
caattagcataaatt

SEQ ID NO: 1132869 - DNA, 15 bp, Homo sapiens
acaattagcataaat

SEQ ID NO: 1132870 - DNA, 15 bp, Homo sapiens
tacaattagcataaa

SEQ ID NO: 1132871 - DNA, 15 bp, Homo sapiens
atacaattagcataa

SEQ ID NO: 1132872 - DNA, 15 bp, Homo sapiens
tatacaattagcata

SEQ ID NO: 1132873 - DNA, 15 bp, Homo sapiens
atatacaattagcat

SEQ ID NO: 1132874 - DNA, 15 bp, Homo sapiens
aatatacaattagca

SEQ ID NO: 1132875 - DNA, 15 bp, Homo sapiens
aaatatacaattagc

SEQ ID NO: 1132876 - DNA, 15 bp, Homo sapiens
aaaatatacaattag

SEQ ID NO: 1132877 - DNA, 15 bp, Homo sapiens
taaaatatacaatta

SEQ ID NO: 1132878 - DNA, 15 bp, Homo sapiens
ataaaatatacaatt

SEQ ID NO: 1132879 - DNA, 15 bp, Homo sapiens
aataaaatatacaat

SEQ ID NO: 1132880 - DNA, 15 bp, Homo sapiens
gaataaaatatacaa

SEQ ID NO: 1132881 - DNA, 15 bp, Homo sapiens
tgaataaaatataca

SEQ ID NO: 1132882 - DNA, 15 bp, Homo sapiens
ttgaataaaatatac

SEQ ID NO: 1132883 - DNA, 15 bp, Homo sapiens
gttgaataaaatata

SEQ ID NO: 1132884 - DNA, 15 bp, Homo sapiens
ggttgaataaaatat

SEQ ID NO: 1132885 - DNA, 15 bp, Homo sapiens
gggttgaataaaata

SEQ ID NO: 1132886 - DNA, 15 bp, Homo sapiens
tgggttgaataaaat

SEQ ID NO: 1132887 - DNA, 15 bp, Homo sapiens
ttgggttgaataaaa

SEQ ID NO: 1132888 - DNA, 15 bp, Homo sapiens
gttgggttgaataaa

SEQ ID NO: 1132889 - DNA, 15 bp, Homo sapiens
tgttgggttgaataa

SEQ ID NO: 1132890 - DNA, 15 bp, Homo sapiens
atgttgggttgaata

SEQ ID NO: 1132891 - DNA, 15 bp, Homo sapiens
tatgttgggttgaat

SEQ ID NO: 1132892 - DNA, 15 bp, Homo sapiens
atatgttgggttgaa

SEQ ID NO: 1132893 - DNA, 15 bp, Homo sapiens
gatatgttgggttga

SEQ ID NO: 1132894 - DNA, 15 bp, Homo sapiens
ggatatgttgggttg

SEQ ID NO: 1132895 - DNA, 15 bp, Homo sapiens
tggatatgttgggtt

SEQ ID NO: 1132896 - DNA, 15 bp, Homo sapiens
ttggatatgttgggt

SEQ ID NO: 1132897 - DNA, 15 bp, Homo sapiens
tttggatatgttggg

SEQ ID NO: 1132898 - DNA, 15 bp, Homo sapiens
ttttggatatgttgg

SEQ ID NO: 1132899 - DNA, 15 bp, Homo sapiens
attttggatatgttg

SEQ ID NO: 1132900 - DNA, 15 bp, Homo sapiens
tattttggatatgtt

SEQ ID NO: 1132901 - DNA, 15 bp, Homo sapiens
atattttggatatgt

SEQ ID NO: 1132902 - DNA, 15 bp, Homo sapiens
aatattttggatatg

SEQ ID NO: 1132903 - DNA, 15 bp, Homo sapiens
caatattttggatat

SEQ ID NO: 1132904 - DNA, 15 bp, Homo sapiens
gcaatattttggata

SEQ ID NO: 1132905 - DNA, 15 bp, Homo sapiens
ggcaatattttggat

SEQ ID NO: 1132906 - DNA, 15 bp, Homo sapiens
tggcaatattttgga

SEQ ID NO: 1132907 - DNA, 15 bp, Homo sapiens
atggcaatattttgg

SEQ ID NO: 1132908 - DNA, 15 bp, Homo sapiens
gatggcaatattttg

SEQ ID NO: 1132909 - DNA, 15 bp, Homo sapiens
tgatggcaatatttt

SEQ ID NO: 1132910 - DNA, 15 bp, Homo sapiens
gtgatggcaatattt

SEQ ID NO: 1132911 - DNA, 15 bp, Homo sapiens
tgtgatggcaatatt

SEQ ID NO: 1132912 - DNA, 15 bp, Homo sapiens
ttgtgatggcaatat

SEQ ID NO: 1132913 - DNA, 15 bp, Homo sapiens
gttgtgatggcaata

SEQ ID NO: 1132914 - DNA, 15 bp, Homo sapiens
tgttgtgatggcaat

SEQ ID NO: 1132915 - DNA, 15 bp, Homo sapiens
atgttgtgatggcaa

SEQ ID NO: 1132916 - DNA, 15 bp, Homo sapiens
catgttgtgatggca

SEQ ID NO: 1132917 - DNA, 15 bp, Homo sapiens
acatgttgtgatggc

SEQ ID NO: 1132918 - DNA, 15 bp, Homo sapiens
tacatgttgtgatgg

SEQ ID NO: 1132919 - DNA, 15 bp, Homo sapiens
ttacatgttgtgatg

SEQ ID NO: 1132920 - DNA, 15 bp, Homo sapiens
attacatgttgtgat

SEQ ID NO: 1132921 - DNA, 15 bp, Homo sapiens
gattacatgttgtga

SEQ ID NO: 1132922 - DNA, 15 bp, Homo sapiens
tgattacatgttgtg

SEQ ID NO: 1132923 - DNA, 15 bp, Homo sapiens
ttgattacatgttgt

SEQ ID NO: 1132924 - DNA, 15 bp, Homo sapiens
tttgattacatgttg

SEQ ID NO: 1132925 - DNA, 15 bp, Homo sapiens
ttttgattacatgtt

SEQ ID NO: 1132926 - DNA, 15 bp, Homo sapiens
tttttgattacatgt

SEQ ID NO: 1132927 - DNA, 15 bp, Homo sapiens
atttttgattacatg

SEQ ID NO: 1132928 - DNA, 15 bp, Homo sapiens
tatttttgattacat

SEQ ID NO: 1132929 - DNA, 15 bp, Homo sapiens
atatttttgattaca

SEQ ID NO: 1132930 - DNA, 15 bp, Homo sapiens
gatatttttgattac

SEQ ID NO: 1132931 - DNA, 15 bp, Homo sapiens
ggatatttttgatta

SEQ ID NO: 1132932 - DNA, 15 bp, Homo sapiens
aggatatttttgatt

SEQ ID NO: 1132933 - DNA, 15 bp, Homo sapiens
caggatatttttgat

SEQ ID NO: 1132934 - DNA, 15 bp, Homo sapiens
tcaggatatttttga

SEQ ID NO: 1132935 - DNA, 15 bp, Homo sapiens
ctcaggatatttttg

SEQ ID NO: 1132936 - DNA, 15 bp, Homo sapiens
tctcaggatattttt

SEQ ID NO: 1132937 - DNA, 15 bp, Homo sapiens
atctcaggatatttt

SEQ ID NO: 1132938 - DNA, 15 bp, Homo sapiens
aatctcaggatattt

SEQ ID NO: 1132939 - DNA, 15 bp, Homo sapiens
aaatctcaggatatt

SEQ ID NO: 1132940 - DNA, 15 bp, Homo sapiens
aaaatctcaggatat

SEQ ID NO: 1132941 - DNA, 15 bp, Homo sapiens
aaaaatctcaggata

SEQ ID NO: 1132942 - DNA, 15 bp, Homo sapiens
taaaaatctcaggat

SEQ ID NO: 1132943 - DNA, 15 bp, Homo sapiens
gtaaaaatctcagga

SEQ ID NO: 1132944 - DNA, 15 bp, Homo sapiens
tgtaaaaatctcagg

SEQ ID NO: 1132945 - DNA, 15 bp, Homo sapiens
atgtaaaaatctcag

SEQ ID NO: 1132946 - DNA, 15 bp, Homo sapiens
aatgtaaaaatctca

SEQ ID NO: 1132947 - DNA, 15 bp, Homo sapiens
taatgtaaaaatctc

SEQ ID NO: 1132948 - DNA, 15 bp, Homo sapiens
ataatgtaaaaatct

SEQ ID NO: 1132949 - DNA, 15 bp, Homo sapiens
gataatgtaaaaatc

SEQ ID NO: 1132950 - DNA, 15 bp, Homo sapiens
agataatgtaaaaat

SEQ ID NO: 1132951 - DNA, 15 bp, Homo sapiens
tagataatgtaaaaa

SEQ ID NO: 1132952 - DNA, 15 bp, Homo sapiens
gtagataatgtaaaa

SEQ ID NO: 1132953 - DNA, 15 bp, Homo sapiens
agtagataatgtaaa

SEQ ID NO: 1132954 - DNA, 15 bp, Homo sapiens
tagtagataatgtaa

SEQ ID NO: 1132955 - DNA, 15 bp, Homo sapiens
ttagtagataatgta

SEQ ID NO: 1132956 - DNA, 15 bp, Homo sapiens
tttagtagataatgt

SEQ ID NO: 1132957 - DNA, 15 bp, Homo sapiens
atttagtagataatg

SEQ ID NO: 1132958 - DNA, 15 bp, Homo sapiens
tatttagtagataat

SEQ ID NO: 1132959 - DNA, 15 bp, Homo sapiens
atatttagtagataa

SEQ ID NO: 1132960 - DNA, 15 bp, Homo sapiens
aatatttagtagata

SEQ ID NO: 1132961 - DNA, 15 bp, Homo sapiens
gaatatttagtagat

SEQ ID NO: 1132962 - DNA, 15 bp, Homo sapiens
tgaatatttagtaga

SEQ ID NO: 1132963 - DNA, 15 bp, Homo sapiens
ctgaatatttagtag

SEQ ID NO: 1132964 - DNA, 15 bp, Homo sapiens
tctgaatatttagta

SEQ ID NO: 1132965 - DNA, 15 bp, Homo sapiens
ttctgaatatttagt

SEQ ID NO: 1132966 - DNA, 15 bp, Homo sapiens
attctgaatatttag

SEQ ID NO: 1132967 - DNA, 15 bp, Homo sapiens
gattctgaatattta

SEQ ID NO: 1132968 - DNA, 15 bp, Homo sapiens
agattctgaatattt

SEQ ID NO: 1132969 - DNA, 15 bp, Homo sapiens
cagattctgaatatt

SEQ ID NO: 1132970 - DNA, 15 bp, Homo sapiens
tcagattctgaatat

SEQ ID NO: 1132971 - DNA, 15 bp, Homo sapiens
ctcagattctgaata

SEQ ID NO: 1132972 - DNA, 15 bp, Homo sapiens
cctcagattctgaat

SEQ ID NO: 1132973 - DNA, 15 bp, Homo sapiens
acctcagattctgaa

SEQ ID NO: 1132974 - DNA, 15 bp, Homo sapiens
cacctcagattctga

SEQ ID NO: 1132975 - DNA, 15 bp, Homo sapiens
gcacctcagattctg

SEQ ID NO: 1132976 - DNA, 15 bp, Homo sapiens
tgcacctcagattct

SEQ ID NO: 1132977 - DNA, 15 bp, Homo sapiens
atgcacctcagattc

SEQ ID NO: 1132978 - DNA, 15 bp, Homo sapiens
aatgcacctcagatt

SEQ ID NO: 1132979 - DNA, 15 bp, Homo sapiens
aaatgcacctcagat

SEQ ID NO: 1132980 - DNA, 15 bp, Homo sapiens
taaatgcacctcaga

SEQ ID NO: 1132981 - DNA, 15 bp, Homo sapiens
gtaaatgcacctcag

SEQ ID NO: 1132982 - DNA, 15 bp, Homo sapiens
tgtaaatgcacctca

SEQ ID NO: 1132983 - DNA, 15 bp, Homo sapiens
atgtaaatgcacctc

SEQ ID NO: 1132984 - DNA, 15 bp, Homo sapiens
aatgtaaatgcacct

SEQ ID NO: 1132985 - DNA, 15 bp, Homo sapiens
aaatgtaaatgcacc

SEQ ID NO: 1132986 - DNA, 15 bp, Homo sapiens
taaatgtaaatgcac

SEQ ID NO: 1132987 - DNA, 15 bp, Homo sapiens
gtaaatgtaaatgca

SEQ ID NO: 1132988 - DNA, 15 bp, Homo sapiens
tgtaaatgtaaatgc

SEQ ID NO: 1132989 - DNA, 15 bp, Homo sapiens
ctgtaaatgtaaatg

SEQ ID NO: 1132990 - DNA, 15 bp, Homo sapiens
gctgtaaatgtaaat

SEQ ID NO: 1132991 - DNA, 15 bp, Homo sapiens
tgctgtaaatgtaaa

SEQ ID NO: 1132992 - DNA, 15 bp, Homo sapiens
gtgctgtaaatgtaa

SEQ ID NO: 1132993 - DNA, 15 bp, Homo sapiens
tgtgctgtaaatgta

SEQ ID NO: 1132994 - DNA, 15 bp, Homo sapiens
atgtgctgtaaatgt

SEQ ID NO: 1132995 - DNA, 15 bp, Homo sapiens
catgtgctgtaaatg

SEQ ID NO: 1132996 - DNA, 15 bp, Homo sapiens
acatgtgctgtaaat

SEQ ID NO: 1132997 - DNA, 15 bp, Homo sapiens
aacatgtgctgtaaa

SEQ ID NO: 1132998 - DNA, 15 bp, Homo sapiens
taacatgtgctgtaa

SEQ ID NO: 1132999 - DNA, 15 bp, Homo sapiens
ctaacatgtgctgta

SEQ ID NO: 1133000 - DNA, 15 bp, Homo sapiens
gctaacatgtgctgt

SEQ ID NO: 1133001 - DNA, 15 bp, Homo sapiens
agctaacatgtgctg

SEQ ID NO: 1133002 - DNA, 15 bp, Homo sapiens
gagctaacatgtgct

SEQ ID NO: 1133003 - DNA, 15 bp, Homo sapiens
tgagctaacatgtgc

SEQ ID NO: 1133004 - DNA, 15 bp, Homo sapiens
ttgagctaacatgtg

SEQ ID NO: 1133005 - DNA, 15 bp, Homo sapiens
tttgagctaacatgt

SEQ ID NO: 1133006 - DNA, 15 bp, Homo sapiens
atttgagctaacatg

SEQ ID NO: 1133007 - DNA, 15 bp, Homo sapiens
gatttgagctaacat

SEQ ID NO: 1133008 - DNA, 15 bp, Homo sapiens
tgatttgagctaaca

SEQ ID NO: 1133009 - DNA, 15 bp, Homo sapiens
ctgatttgagctaac

SEQ ID NO: 1133010 - DNA, 15 bp, Homo sapiens
gctgatttgagctaa

SEQ ID NO: 1133011 - DNA, 15 bp, Homo sapiens
ggctgatttgagcta

SEQ ID NO: 1133012 - DNA, 15 bp, Homo sapiens
aggctgatttgagct

SEQ ID NO: 1133013 - DNA, 15 bp, Homo sapiens
aaggctgatttgagc

SEQ ID NO: 1133014 - DNA, 15 bp, Homo sapiens
taaggctgatttgag

SEQ ID NO: 1133015 - DNA, 15 bp, Homo sapiens
ataaggctgatttga

SEQ ID NO: 1133016 - DNA, 15 bp, Homo sapiens
cataaggctgatttg

SEQ ID NO: 1133017 - DNA, 15 bp, Homo sapiens
acataaggctgattt

SEQ ID NO: 1133018 - DNA, 15 bp, Homo sapiens
gacataaggctgatt

SEQ ID NO: 1133019 - DNA, 15 bp, Homo sapiens
tgacataaggctgat

SEQ ID NO: 1133020 - DNA, 15 bp, Homo sapiens
ttgacataaggctga

SEQ ID NO: 1133021 - DNA, 15 bp, Homo sapiens
gttgacataaggctg

SEQ ID NO: 1133022 - DNA, 15 bp, Homo sapiens
cgttgacataaggct

SEQ ID NO: 1133023 - DNA, 15 bp, Homo sapiens
acgttgacataaggc

SEQ ID NO: 1133024 - DNA, 15 bp, Homo sapiens
gacgttgacataagg

SEQ ID NO: 1133025 - DNA, 15 bp, Homo sapiens
agacgttgacataag

SEQ ID NO: 1133026 - DNA, 15 bp, Homo sapiens
cagacgttgacataa

SEQ ID NO: 1133027 - DNA, 15 bp, Homo sapiens
acagacgttgacata

SEQ ID NO: 1133028 - DNA, 15 bp, Homo sapiens
aacagacgttgacat

SEQ ID NO: 1133029 - DNA, 15 bp, Homo sapiens
gaacagacgttgaca

SEQ ID NO: 1133030 - DNA, 15 bp, Homo sapiens
agaacagacgttgac

SEQ ID NO: 1133031 - DNA, 15 bp, Homo sapiens
gagaacagacgttga

SEQ ID NO: 1133032 - DNA, 15 bp, Homo sapiens
tgagaacagacgttg

SEQ ID NO: 1133033 - DNA, 15 bp, Homo sapiens
ttgagaacagacgtt

SEQ ID NO: 1133034 - DNA, 15 bp, Homo sapiens
cttgagaacagacgt

SEQ ID NO: 1133035 - DNA, 15 bp, Homo sapiens
tcttgagaacagacg

SEQ ID NO: 1133036 - DNA, 15 bp, Homo sapiens
ctcttgagaacagac

SEQ ID NO: 1133037 - DNA, 15 bp, Homo sapiens
gctcttgagaacaga

SEQ ID NO: 1133038 - DNA, 15 bp, Homo sapiens
ggctcttgagaacag

SEQ ID NO: 1133039 - DNA, 15 bp, Homo sapiens
tggctcttgagaaca

SEQ ID NO: 1133040 - DNA, 15 bp, Homo sapiens
gtggctcttgagaac

SEQ ID NO: 1133041 - DNA, 15 bp, Homo sapiens
agtggctcttgagaa

SEQ ID NO: 1133042 - DNA, 15 bp, Homo sapiens
tagtggctcttgaga

SEQ ID NO: 1133043 - DNA, 15 bp, Homo sapiens
ctagtggctcttgag

SEQ ID NO: 1133044 - DNA, 15 bp, Homo sapiens
actagtggctcttga

SEQ ID NO: 1133045 - DNA, 15 bp, Homo sapiens
cactagtggctcttg

SEQ ID NO: 1133046 - DNA, 15 bp, Homo sapiens
ccactagtggctctt

SEQ ID NO: 1133047 - DNA, 15 bp, Homo sapiens
gccactagtggctct

SEQ ID NO: 1133048 - DNA, 15 bp, Homo sapiens
agccactagtggctc

SEQ ID NO: 1133049 - DNA, 15 bp, Homo sapiens
tagccactagtggct

SEQ ID NO: 1133050 - DNA, 15 bp, Homo sapiens
gtagccactagtggc

SEQ ID NO: 1133051 - DNA, 15 bp, Homo sapiens
agtagccactagtgg

SEQ ID NO: 1133052 - DNA, 15 bp, Homo sapiens
tagtagccactagtg

SEQ ID NO: 1133053 - DNA, 15 bp, Homo sapiens
atagtagccactagt

SEQ ID NO: 1133054 - DNA, 15 bp, Homo sapiens
catagtagccactag

SEQ ID NO: 1133055 - DNA, 15 bp, Homo sapiens
acatagtagccacta

SEQ ID NO: 1133056 - DNA, 15 bp, Homo sapiens
aacatagtagccact

SEQ ID NO: 1133057 - DNA, 15 bp, Homo sapiens
caacatagtagccac

SEQ ID NO: 1133058 - DNA, 15 bp, Homo sapiens
ccaacatagtagcca

SEQ ID NO: 1133059 - DNA, 15 bp, Homo sapiens
tccaacatagtagcc

SEQ ID NO: 1133060 - DNA, 15 bp, Homo sapiens
gtccaacatagtagc

SEQ ID NO: 1133061 - DNA, 15 bp, Homo sapiens
tgtccaacatagtag

SEQ ID NO: 1133062 - DNA, 15 bp, Homo sapiens
ttgtccaacatagta

SEQ ID NO: 1133063 - DNA, 15 bp, Homo sapiens
gttgtccaacatagt

SEQ ID NO: 1133064 - DNA, 15 bp, Homo sapiens
tgttgtccaacatag

SEQ ID NO: 1133065 - DNA, 15 bp, Homo sapiens
gtgttgtccaacata

SEQ ID NO: 1133066 - DNA, 15 bp, Homo sapiens
tgtgttgtccaacat

SEQ ID NO: 1133067 - DNA, 15 bp, Homo sapiens
ctgtgttgtccaaca

SEQ ID NO: 1133068 - DNA, 15 bp, Homo sapiens
tctgtgttgtccaac

SEQ ID NO: 1133069 - DNA, 15 bp, Homo sapiens
ttctgtgttgtccaa

SEQ ID NO: 1133070 - DNA, 15 bp, Homo sapiens
attctgtgttgtcca

SEQ ID NO: 1133071 - DNA, 15 bp, Homo sapiens
aattctgtgttgtcc

SEQ ID NO: 1133072 - DNA, 15 bp, Homo sapiens
taattctgtgttgtc

SEQ ID NO: 1133073 - DNA, 15 bp, Homo sapiens
ctaattctgtgttgt

SEQ ID NO: 1133074 - DNA, 15 bp, Homo sapiens
tctaattctgtgttg

SEQ ID NO: 1133075 - DNA, 15 bp, Homo sapiens
ttctaattctgtgtt

SEQ ID NO: 1133076 - DNA, 15 bp, Homo sapiens
attctaattctgtgt

SEQ ID NO: 1133077 - DNA, 15 bp, Homo sapiens
tattctaattctgtg

SEQ ID NO: 1133078 - DNA, 15 bp, Homo sapiens
atattctaattctgt

SEQ ID NO: 1133079 - DNA, 15 bp, Homo sapiens
gatattctaattctg

SEQ ID NO: 1133080 - DNA, 15 bp, Homo sapiens
tgatattctaattct

SEQ ID NO: 1133081 - DNA, 15 bp, Homo sapiens
ctgatattctaattc

SEQ ID NO: 1133082 - DNA, 15 bp, Homo sapiens
cctgatattctaatt

SEQ ID NO: 1133083 - DNA, 15 bp, Homo sapiens
acctgatattctaat

SEQ ID NO: 1133084 - DNA, 15 bp, Homo sapiens
aacctgatattctaa

SEQ ID NO: 1133085 - DNA, 15 bp, Homo sapiens
gaacctgatattcta

SEQ ID NO: 1133086 - DNA, 15 bp, Homo sapiens
tgaacctgatattct

SEQ ID NO: 1133087 - DNA, 15 bp, Homo sapiens
atgaacctgatattc

SEQ ID NO: 1133088 - DNA, 15 bp, Homo sapiens
catgaacctgatatt

SEQ ID NO: 1133089 - DNA, 15 bp, Homo sapiens
tcatgaacctgatat

SEQ ID NO: 1133090 - DNA, 15 bp, Homo sapiens
ttcatgaacctgata

SEQ ID NO: 1133091 - DNA, 15 bp, Homo sapiens
attcatgaacctgat

SEQ ID NO: 1133092 - DNA, 15 bp, Homo sapiens
aattcatgaacctga

SEQ ID NO: 1133093 - DNA, 15 bp, Homo sapiens
gaattcatgaacctg

SEQ ID NO: 1133094 - DNA, 15 bp, Homo sapiens
agaattcatgaacct

SEQ ID NO: 1133095 - DNA, 15 bp, Homo sapiens
gagaattcatgaacc

SEQ ID NO: 1133096 - DNA, 15 bp, Homo sapiens
agagaattcatgaac

SEQ ID NO: 1133097 - DNA, 15 bp, Homo sapiens
tagagaattcatgaa

SEQ ID NO: 1133098 - DNA, 15 bp, Homo sapiens
ctagagaattcatga

SEQ ID NO: 1133099 - DNA, 15 bp, Homo sapiens
actagagaattcatg

SEQ ID NO: 1133100 - DNA, 15 bp, Homo sapiens
gactagagaattcat

SEQ ID NO: 1133101 - DNA, 15 bp, Homo sapiens
agactagagaattca

SEQ ID NO: 1133102 - DNA, 15 bp, Homo sapiens
cagactagagaattc

SEQ ID NO: 1133103 - DNA, 15 bp, Homo sapiens
tcagactagagaatt

SEQ ID NO: 1133104 - DNA, 15 bp, Homo sapiens
gattcagactagaga

SEQ ID NO: 1133105 - DNA, 15 bp, Homo sapiens
agattcagactagag

SEQ ID NO: 1133106 - DNA, 15 bp, Homo sapiens
gagattcagactaga

SEQ ID NO: 1133107 - DNA, 15 bp, Homo sapiens
tgagattcagactag

SEQ ID NO: 1133108 - DNA, 15 bp, Homo sapiens
ctgagattcagacta

SEQ ID NO: 1133109 - DNA, 15 bp, Homo sapiens
actgagattcagact

SEQ ID NO: 1133110 - DNA, 15 bp, Homo sapiens
aactgagattcagac

SEQ ID NO: 1133111 - DNA, 15 bp, Homo sapiens
caactgagattcaga

SEQ ID NO: 1133112 - DNA, 15 bp, Homo sapiens
acaactgagattcag

SEQ ID NO: 1133113 - DNA, 15 bp, Homo sapiens
gacaactgagattca

SEQ ID NO: 1133114 - DNA, 15 bp, Homo sapiens
agacaactgagattc

SEQ ID NO: 1133115 - DNA, 15 bp, Homo sapiens
gagacaactgagatt

SEQ ID NO: 1133116 - DNA, 15 bp, Homo sapiens
agagacaactgagat

SEQ ID NO: 1133117 - DNA, 15 bp, Homo sapiens
tagagacaactgaga

SEQ ID NO: 1133118 - DNA, 15 bp, Homo sapiens
gtagagacaactgag

SEQ ID NO: 1133119 - DNA, 15 bp, Homo sapiens
tgtagagacaactga

SEQ ID NO: 1133120 - DNA, 15 bp, Homo sapiens
ttgtagagacaactg

SEQ ID NO: 1133121 - DNA, 15 bp, Homo sapiens
attgtagagacaact

SEQ ID NO: 1133122 - DNA, 15 bp, Homo sapiens
aattgtagagacaac

SEQ ID NO: 1133123 - DNA, 15 bp, Homo sapiens
gaattgtagagacaa

SEQ ID NO: 1133124 - DNA, 15 bp, Homo sapiens
agaattgtagagaca

SEQ ID NO: 1133125 - DNA, 15 bp, Homo sapiens
tagaattgtagagac

SEQ ID NO: 1133126 - DNA, 15 bp, Homo sapiens
ctagaattgtagaga

SEQ ID NO: 1133127 - DNA, 15 bp, Homo sapiens
actagaattgtagag

SEQ ID NO: 1133128 - DNA, 15 bp, Homo sapiens
gactagaattgtaga

SEQ ID NO: 1133129 - DNA, 15 bp, Homo sapiens
agactagaattgtag

SEQ ID NO: 1133130 - DNA, 15 bp, Homo sapiens
aagactagaattgta

SEQ ID NO: 1133131 - DNA, 15 bp, Homo sapiens
taagactagaattgt

SEQ ID NO: 1133132 - DNA, 15 bp, Homo sapiens
ataagactagaattg

SEQ ID NO: 1133133 - DNA, 15 bp, Homo sapiens
ccgcccgcctcagcc

SEQ ID NO: 1133134 - DNA, 15 bp, Homo sapiens
cccgcccgcctcagc

SEQ ID NO: 1133135 - DNA, 15 bp, Homo sapiens
acccgcccgcctcag

SEQ ID NO: 1133136 - DNA, 15 bp, Homo sapiens
gacccgcccgcctca

SEQ ID NO: 1133137 - DNA, 15 bp, Homo sapiens
tgacccgcccgcctc

SEQ ID NO: 1133138 - DNA, 15 bp, Homo sapiens
gtgacccgcccgcct

SEQ ID NO: 1133139 - DNA, 15 bp, Homo sapiens
cgtgacccgcccgcc

SEQ ID NO: 1133140 - DNA, 15 bp, Homo sapiens
tcgtgacccgcccgc

SEQ ID NO: 1133141 - DNA, 15 bp, Homo sapiens
ctcgtgacccgcccg

SEQ ID NO: 1133142 - DNA, 15 bp, Homo sapiens
cctcgtgacccgccc

SEQ ID NO: 1133143 - DNA, 15 bp, Homo sapiens
acctcgtgacccgcc

SEQ ID NO: 1133144 - DNA, 15 bp, Homo sapiens
gacctcgtgacccgc

SEQ ID NO: 1133145 - DNA, 15 bp, Homo sapiens
tgacctcgtgacccg

SEQ ID NO: 1133146 - DNA, 15 bp, Homo sapiens
ctgacctcgtgaccc

SEQ ID NO: 1133147 - DNA, 15 bp, Homo sapiens
cctgacctcgtgacc

SEQ ID NO: 1133148 - DNA, 15 bp, Homo sapiens
tcctgacctcgtgac

SEQ ID NO: 1133149 - DNA, 15 bp, Homo sapiens
tccgtgttagccagg

SEQ ID NO: 1133150 - DNA, 15 bp, Homo sapiens
ctccgtgttagccag

SEQ ID NO: 1133151 - DNA, 15 bp, Homo sapiens
tctccgtgttagcca

SEQ ID NO: 1133152 - DNA, 15 bp, Homo sapiens
ttctccgtgttagcc

SEQ ID NO: 1133153 - DNA, 15 bp, Homo sapiens
tttctccgtgttagc

SEQ ID NO: 1133154 - DNA, 15 bp, Homo sapiens
gtttctccgtgttag

SEQ ID NO: 1133155 - DNA, 15 bp, Homo sapiens
ggtttctccgtgtta

SEQ ID NO: 1133156 - DNA, 15 bp, Homo sapiens
gggtttctccgtgtt

SEQ ID NO: 1133157 - DNA, 15 bp, Homo sapiens
agggtttctccgtgt

SEQ ID NO: 1133158 - DNA, 15 bp, Homo sapiens
cagggtttctccgtg

SEQ ID NO: 1133159 - DNA, 15 bp, Homo sapiens
acagggtttctccgt

SEQ ID NO: 1133160 - DNA, 15 bp, Homo sapiens
gacagggtttctccg

SEQ ID NO: 1133161 - DNA, 15 bp, Homo sapiens
atagagacagggttt

SEQ ID NO: 1133162 - DNA, 15 bp, Homo sapiens
aatagagacagggtt

SEQ ID NO: 1133163 - DNA, 15 bp, Homo sapiens
taatagagacagggt

SEQ ID NO: 1133164 - DNA, 15 bp, Homo sapiens
ttaatagagacaggg

SEQ ID NO: 1133165 - DNA, 15 bp, Homo sapiens
tttaatagagacagg

SEQ ID NO: 1133166 - DNA, 15 bp, Homo sapiens
ttttaatagagacag

SEQ ID NO: 1133167 - DNA, 15 bp, Homo sapiens
tttttaatagagaca

SEQ ID NO: 1133168 - DNA, 15 bp, Homo sapiens
tggctaatttttttg

SEQ ID NO: 1133169 - DNA, 15 bp, Homo sapiens
ctggctaattttttt

SEQ ID NO: 1133170 - DNA, 15 bp, Homo sapiens
ctgccaccacacctg

SEQ ID NO: 1133171 - DNA, 15 bp, Homo sapiens
cctgccaccacacct

SEQ ID NO: 1133172 - DNA, 15 bp, Homo sapiens
acctgccaccacacc

SEQ ID NO: 1133173 - DNA, 15 bp, Homo sapiens
cacctgccaccacac

SEQ ID NO: 1133174 - DNA, 15 bp, Homo sapiens
gcacctgccaccaca

SEQ ID NO: 1133175 - DNA, 15 bp, Homo sapiens
aggcacctgccacca

SEQ ID NO: 1133176 - DNA, 15 bp, Homo sapiens
taggcacctgccacc

SEQ ID NO: 1133177 - DNA, 15 bp, Homo sapiens
ataggcacctgccac

SEQ ID NO: 1133178 - DNA, 15 bp, Homo sapiens
ctataggcacctgcc

SEQ ID NO: 1133179 - DNA, 15 bp, Homo sapiens
actataggcacctgc

SEQ ID NO: 1133180 - DNA, 15 bp, Homo sapiens
gactataggcacctg

SEQ ID NO: 1133181 - DNA, 15 bp, Homo sapiens
ggactataggcacct

SEQ ID NO: 1133182 - DNA, 15 bp, Homo sapiens
gggactataggcacc

SEQ ID NO: 1133183 - DNA, 15 bp, Homo sapiens
tgggactataggcac

SEQ ID NO: 1133184 - DNA, 15 bp, Homo sapiens
gctctgcctcctggg

SEQ ID NO: 1133185 - DNA, 15 bp, Homo sapiens
agctctgcctcctgg

SEQ ID NO: 1133186 - DNA, 15 bp, Homo sapiens
aagctctgcctcctg

SEQ ID NO: 1133187 - DNA, 15 bp, Homo sapiens
caagctctgcctcct

SEQ ID NO: 1133188 - DNA, 15 bp, Homo sapiens
ttcactgcaagctct

SEQ ID NO: 1133189 - DNA, 15 bp, Homo sapiens
gttcactgcaagctc

SEQ ID NO: 1133190 - DNA, 15 bp, Homo sapiens
ggttcactgcaagct

SEQ ID NO: 1133191 - DNA, 15 bp, Homo sapiens
cggttcactgcaagc

SEQ ID NO: 1133192 - DNA, 15 bp, Homo sapiens
tcggttcactgcaag

SEQ ID NO: 1133193 - DNA, 15 bp, Homo sapiens
cgctctgttgcccag

SEQ ID NO: 1133194 - DNA, 15 bp, Homo sapiens
tctcgctctgttgcc

SEQ ID NO: 1133195 - DNA, 15 bp, Homo sapiens
gtctcgctctgttgc

SEQ ID NO: 1133196 - DNA, 15 bp, Homo sapiens
agtctcgctctgttg

SEQ ID NO: 1133197 - DNA, 15 bp, Homo sapiens
gagtctcgctctgtt

SEQ ID NO: 1133198 - DNA, 15 bp, Homo sapiens
gtgcatttttttttt

SEQ ID NO: 1133199 - DNA, 15 bp, Homo sapiens
agtgcattttttttt

SEQ ID NO: 1133200 - DNA, 15 bp, Homo sapiens
aagtgcatttttttt

SEQ ID NO: 1133201 - DNA, 15 bp, Homo sapiens
gaagtgcattttttt

SEQ ID NO: 1133202 - DNA, 15 bp, Homo sapiens
ggaagtgcatttttt

SEQ ID NO: 1133203 - DNA, 15 bp, Homo sapiens
aggaagtgcattttt

SEQ ID NO: 1133204 - DNA, 15 bp, Homo sapiens
gaggaagtgcatttt

SEQ ID NO: 1133205 - DNA, 15 bp, Homo sapiens
tgaggaagtgcattt

SEQ ID NO: 1133206 - DNA, 15 bp, Homo sapiens
ctgaggaagtgcatt

SEQ ID NO: 1133207 - DNA, 15 bp, Homo sapiens
actgaggaagtgcat

SEQ ID NO: 1133208 - DNA, 15 bp, Homo sapiens
aactgaggaagtgca

SEQ ID NO: 1133209 - DNA, 15 bp, Homo sapiens
caactgaggaagtgc

SEQ ID NO: 1133210 - DNA, 15 bp, Homo sapiens
gcaactgaggaagtg

SEQ ID NO: 1133211 - DNA, 15 bp, Homo sapiens
tgcaactgaggaagt

SEQ ID NO: 1133212 - DNA, 15 bp, Homo sapiens
atgcaactgaggaag

SEQ ID NO: 1133213 - DNA, 15 bp, Homo sapiens
gatgcaactgaggaa

SEQ ID NO: 1133214 - DNA, 15 bp, Homo sapiens
tgatgcaactgagga

SEQ ID NO: 1133215 - DNA, 15 bp, Homo sapiens
ctgatgcaactgagg

SEQ ID NO: 1133216 - DNA, 15 bp, Homo sapiens
gctgatgcaactgag

SEQ ID NO: 1133217 - DNA, 15 bp, Homo sapiens
agctgatgcaactga

SEQ ID NO: 1133218 - DNA, 15 bp, Homo sapiens
tagctgatgcaactg

SEQ ID NO: 1133219 - DNA, 15 bp, Homo sapiens
gtagctgatgcaact

SEQ ID NO: 1133220 - DNA, 15 bp, Homo sapiens
tgtagctgatgcaac

SEQ ID NO: 1133221 - DNA, 15 bp, Homo sapiens
atgtagctgatgcaa

SEQ ID NO: 1133222 - DNA, 15 bp, Homo sapiens
aatgtagctgatgca

SEQ ID NO: 1133223 - DNA, 15 bp, Homo sapiens
aaatgtagctgatgc

SEQ ID NO: 1133224 - DNA, 15 bp, Homo sapiens
gaaatgtagctgatg

SEQ ID NO: 1133225 - DNA, 15 bp, Homo sapiens
tgaaatgtagctgat

SEQ ID NO: 1133226 - DNA, 15 bp, Homo sapiens
ttgaaatgtagctga

SEQ ID NO: 1133227 - DNA, 15 bp, Homo sapiens
cttgaaatgtagctg

SEQ ID NO: 1133228 - DNA, 15 bp, Homo sapiens
tcttgaaatgtagct

SEQ ID NO: 1133229 - DNA, 15 bp, Homo sapiens
ctcttgaaatgtagc

SEQ ID NO: 1133230 - DNA, 15 bp, Homo sapiens
gctcttgaaatgtag

SEQ ID NO: 1133231 - DNA, 15 bp, Homo sapiens
agctcttgaaatgta

SEQ ID NO: 1133232 - DNA, 15 bp, Homo sapiens
gagctcttgaaatgt

SEQ ID NO: 1133233 - DNA, 15 bp, Homo sapiens
tgagctcttgaaatg

SEQ ID NO: 1133234 - DNA, 15 bp, Homo sapiens
ttgagctcttgaaat

SEQ ID NO: 1133235 - DNA, 15 bp, Homo sapiens
attgagctcttgaaa

SEQ ID NO: 1133236 - DNA, 15 bp, Homo sapiens
tattgagctcttgaa

SEQ ID NO: 1133237 - DNA, 15 bp, Homo sapiens
ttattgagctcttga

SEQ ID NO: 1133238 - DNA, 15 bp, Homo sapiens
tttattgagctcttg

SEQ ID NO: 1133239 - DNA, 15 bp, Homo sapiens
gtttattgagctctt

SEQ ID NO: 1133240 - DNA, 15 bp, Homo sapiens
tgtttattgagctct

SEQ ID NO: 1133241 - DNA, 15 bp, Homo sapiens
atgtttattgagctc

SEQ ID NO: 1133242 - DNA, 15 bp, Homo sapiens
gatgtttattgagct

SEQ ID NO: 1133243 - DNA, 15 bp, Homo sapiens
agatgtttattgagc

SEQ ID NO: 1133244 - DNA, 15 bp, Homo sapiens
cagatgtttattgag

SEQ ID NO: 1133245 - DNA, 15 bp, Homo sapiens
acagatgtttattga

SEQ ID NO: 1133246 - DNA, 15 bp, Homo sapiens
cacagatgtttattg

SEQ ID NO: 1133247 - DNA, 15 bp, Homo sapiens
ccacagatgtttatt

SEQ ID NO: 1133248 - DNA, 15 bp, Homo sapiens
gccacagatgtttat

SEQ ID NO: 1133249 - DNA, 15 bp, Homo sapiens
ggccacagatgttta

SEQ ID NO: 1133250 - DNA, 15 bp, Homo sapiens
tggccacagatgttt

SEQ ID NO: 1133251 - DNA, 15 bp, Homo sapiens
ctggccacagatgtt

SEQ ID NO: 1133252 - DNA, 15 bp, Homo sapiens
actggccacagatgt

SEQ ID NO: 1133253 - DNA, 15 bp, Homo sapiens
cactggccacagatg

SEQ ID NO: 1133254 - DNA, 15 bp, Homo sapiens
ccactggccacagat

SEQ ID NO: 1133255 - DNA, 15 bp, Homo sapiens
gccactggccacaga

SEQ ID NO: 1133256 - DNA, 15 bp, Homo sapiens
agccactggccacag

SEQ ID NO: 1133257 - DNA, 15 bp, Homo sapiens
tagccactggccaca

SEQ ID NO: 1133258 - DNA, 15 bp, Homo sapiens
gtagccactggccac

SEQ ID NO: 1133259 - DNA, 15 bp, Homo sapiens
agtagccactggcca

SEQ ID NO: 1133260 - DNA, 15 bp, Homo sapiens
tagtagccactggcc

SEQ ID NO: 1133261 - DNA, 15 bp, Homo sapiens
atagtagccactggc

SEQ ID NO: 1133262 - DNA, 15 bp, Homo sapiens
tatagtagccactgg

SEQ ID NO: 1133263 - DNA, 15 bp, Homo sapiens
atatagtagccactg

SEQ ID NO: 1133264 - DNA, 15 bp, Homo sapiens
aatatagtagccact

SEQ ID NO: 1133265 - DNA, 15 bp, Homo sapiens
caatatagtagccac

SEQ ID NO: 1133266 - DNA, 15 bp, Homo sapiens
ccaatatagtagcca

SEQ ID NO: 1133267 - DNA, 15 bp, Homo sapiens
tccaatatagtagcc

SEQ ID NO: 1133268 - DNA, 15 bp, Homo sapiens
gtccaatatagtagc

SEQ ID NO: 1133269 - DNA, 15 bp, Homo sapiens
tgtccaatatagtag

SEQ ID NO: 1133270 - DNA, 15 bp, Homo sapiens
ctgtccaatatagta

SEQ ID NO: 1133271 - DNA, 15 bp, Homo sapiens
gctgtccaatatagt

SEQ ID NO: 1133272 - DNA, 15 bp, Homo sapiens
tgctgtccaatatag

SEQ ID NO: 1133273 - DNA, 15 bp, Homo sapiens
gtgctgtccaatata

SEQ ID NO: 1133274 - DNA, 15 bp, Homo sapiens
tgtgctgtccaatat

SEQ ID NO: 1133275 - DNA, 15 bp, Homo sapiens
ctgtgctgtccaata

SEQ ID NO: 1133276 - DNA, 15 bp, Homo sapiens
tctgtgctgtccaat

SEQ ID NO: 1133277 - DNA, 15 bp, Homo sapiens
atctgtgctgtccaa

SEQ ID NO: 1133278 - DNA, 15 bp, Homo sapiens
tatctgtgctgtcca

SEQ ID NO: 1133279 - DNA, 15 bp, Homo sapiens
ctatctgtgctgtcc

SEQ ID NO: 1133280 - DNA, 15 bp, Homo sapiens
tctatctgtgctgtc

SEQ ID NO: 1133281 - DNA, 15 bp, Homo sapiens
ctctatctgtgctgt

SEQ ID NO: 1133282 - DNA, 15 bp, Homo sapiens
tctctatctgtgctg

SEQ ID NO: 1133283 - DNA, 15 bp, Homo sapiens
ttctctatctgtgct

SEQ ID NO: 1133284 - DNA, 15 bp, Homo sapiens
gttctctatctgtgc

SEQ ID NO: 1133285 - DNA, 15 bp, Homo sapiens
tgttctctatctgtg

SEQ ID NO: 1133286 - DNA, 15 bp, Homo sapiens
atgttctctatctgt

SEQ ID NO: 1133287 - DNA, 15 bp, Homo sapiens
gatgttctctatctg

SEQ ID NO: 1133288 - DNA, 15 bp, Homo sapiens
agatgttctctatct

SEQ ID NO: 1133289 - DNA, 15 bp, Homo sapiens
gagatgttctctatc

SEQ ID NO: 1133290 - DNA, 15 bp, Homo sapiens
ggagatgttctctat

SEQ ID NO: 1133291 - DNA, 15 bp, Homo sapiens
tggagatgttctcta

SEQ ID NO: 1133292 - DNA, 15 bp, Homo sapiens
atggagatgttctct

SEQ ID NO: 1133293 - DNA, 15 bp, Homo sapiens
gatggagatgttctc

SEQ ID NO: 1133294 - DNA, 15 bp, Homo sapiens
tgatggagatgttct

SEQ ID NO: 1133295 - DNA, 15 bp, Homo sapiens
gtgatggagatgttc

SEQ ID NO: 1133296 - DNA, 15 bp, Homo sapiens
agtgatggagatgtt

SEQ ID NO: 1133297 - DNA, 15 bp, Homo sapiens
cagtgatggagatgt

SEQ ID NO: 1133298 - DNA, 15 bp, Homo sapiens
acagtgatggagatg

SEQ ID NO: 1133299 - DNA, 15 bp, Homo sapiens
tacagtgatggagat

SEQ ID NO: 1133300 - DNA, 15 bp, Homo sapiens
ttacagtgatggaga

SEQ ID NO: 1133301 - DNA, 15 bp, Homo sapiens
tttacagtgatggag

SEQ ID NO: 1133302 - DNA, 15 bp, Homo sapiens
ttttacagtgatgga

SEQ ID NO: 1133303 - DNA, 15 bp, Homo sapiens
cttttacagtgatgg

SEQ ID NO: 1133304 - DNA, 15 bp, Homo sapiens
acttttacagtgatg

SEQ ID NO: 1133305 - DNA, 15 bp, Homo sapiens
aacttttacagtgat

SEQ ID NO: 1133306 - DNA, 15 bp, Homo sapiens
gaacttttacagtga

SEQ ID NO: 1133307 - DNA, 15 bp, Homo sapiens
tgaacttttacagtg

SEQ ID NO: 1133308 - DNA, 15 bp, Homo sapiens
ttgaacttttacagt

SEQ ID NO: 1133309 - DNA, 15 bp, Homo sapiens
attgaacttttacag

SEQ ID NO: 1133310 - DNA, 15 bp, Homo sapiens
aattgaacttttaca

SEQ ID NO: 1133311 - DNA, 15 bp, Homo sapiens
caattgaacttttac

SEQ ID NO: 1133312 - DNA, 15 bp, Homo sapiens
tcaattgaactttta

SEQ ID NO: 1133313 - DNA, 15 bp, Homo sapiens
ttcaattgaactttt

SEQ ID NO: 1133314 - DNA, 15 bp, Homo sapiens
cttcaattgaacttt

SEQ ID NO: 1133315 - DNA, 15 bp, Homo sapiens
tcttcaattgaactt

SEQ ID NO: 1133316 - DNA, 15 bp, Homo sapiens
ctcttcaattgaact

SEQ ID NO: 1133317 - DNA, 15 bp, Homo sapiens
actcttcaattgaac

SEQ ID NO: 1133318 - DNA, 15 bp, Homo sapiens
cactcttcaattgaa

SEQ ID NO: 1133319 - DNA, 15 bp, Homo sapiens
gcactcttcaattga

SEQ ID NO: 1133320 - DNA, 15 bp, Homo sapiens
agcactcttcaattg

SEQ ID NO: 1133321 - DNA, 15 bp, Homo sapiens
cagcactcttcaatt

SEQ ID NO: 1133322 - DNA, 15 bp, Homo sapiens
ccagcactcttcaat

SEQ ID NO: 1133323 - DNA, 15 bp, Homo sapiens
tccagcactcttcaa

SEQ ID NO: 1133324 - DNA, 15 bp, Homo sapiens
ttccagcactcttca

SEQ ID NO: 1133325 - DNA, 15 bp, Homo sapiens
attccagcactcttc

SEQ ID NO: 1133326 - DNA, 15 bp, Homo sapiens
tattccagcactctt

SEQ ID NO: 1133327 - DNA, 15 bp, Homo sapiens
atattccagcactct

SEQ ID NO: 1133328 - DNA, 15 bp, Homo sapiens
tatattccagcactc

SEQ ID NO: 1133329 - DNA, 15 bp, Homo sapiens
gtatattccagcact

SEQ ID NO: 1133330 - DNA, 15 bp, Homo sapiens
tgtatattccagcac

SEQ ID NO: 1133331 - DNA, 15 bp, Homo sapiens
ctgtatattccagca

SEQ ID NO: 1133332 - DNA, 15 bp, Homo sapiens
actgtatattccagc

SEQ ID NO: 1133333 - DNA, 15 bp, Homo sapiens
aactgtatattccag

SEQ ID NO: 1133334 - DNA, 15 bp, Homo sapiens
aaactgtatattcca

SEQ ID NO: 1133335 - DNA, 15 bp, Homo sapiens
aaaactgtatattcc

SEQ ID NO: 1133336 - DNA, 15 bp, Homo sapiens
taaaactgtatattc

SEQ ID NO: 1133337 - DNA, 15 bp, Homo sapiens
ttaaaactgtatatt

SEQ ID NO: 1133338 - DNA, 15 bp, Homo sapiens
tttaaaactgtatat

SEQ ID NO: 1133339 - DNA, 15 bp, Homo sapiens
ttttaaaactgtata

SEQ ID NO: 1133340 - DNA, 15 bp, Homo sapiens
attttaaaactgtat

SEQ ID NO: 1133341 - DNA, 15 bp, Homo sapiens
tattttaaaactgta

SEQ ID NO: 1133342 - DNA, 15 bp, Homo sapiens
gtattttaaaactgt

SEQ ID NO: 1133343 - DNA, 15 bp, Homo sapiens
agtattttaaaactg

SEQ ID NO: 1133344 - DNA, 15 bp, Homo sapiens
aagtattttaaaact

SEQ ID NO: 1133345 - DNA, 15 bp, Homo sapiens
taagtattttaaaac

SEQ ID NO: 1133346 - DNA, 15 bp, Homo sapiens
ttaagtattttaaaa

SEQ ID NO: 1133347 - DNA, 15 bp, Homo sapiens
cttaagtattttaaa

SEQ ID NO: 1133348 - DNA, 15 bp, Homo sapiens
tcttaagtattttaa

SEQ ID NO: 1133349 - DNA, 15 bp, Homo sapiens
ttcttaagtatttta

SEQ ID NO: 1133350 - DNA, 15 bp, Homo sapiens
tttcttaagtatttt

SEQ ID NO: 1133351 - DNA, 15 bp, Homo sapiens
ttttcttaagtattt

SEQ ID NO: 1133352 - DNA, 15 bp, Homo sapiens
cttttcttaagtatt

SEQ ID NO: 1133353 - DNA, 15 bp, Homo sapiens
tcttttcttaagtat

SEQ ID NO: 1133354 - DNA, 15 bp, Homo sapiens
ttcttttcttaagta

SEQ ID NO: 1133355 - DNA, 15 bp, Homo sapiens
attcttttcttaagt

SEQ ID NO: 1133356 - DNA, 15 bp, Homo sapiens
gattcttttcttaag

SEQ ID NO: 1133357 - DNA, 15 bp, Homo sapiens
agattcttttcttaa

SEQ ID NO: 1133358 - DNA, 15 bp, Homo sapiens
gagattcttttctta

SEQ ID NO: 1133359 - DNA, 15 bp, Homo sapiens
tgagattcttttctt

SEQ ID NO: 1133360 - DNA, 15 bp, Homo sapiens
atgagattcttttct

SEQ ID NO: 1133361 - DNA, 15 bp, Homo sapiens
aatgagattcttttc

SEQ ID NO: 1133362 - DNA, 15 bp, Homo sapiens
aaatgagattctttt

SEQ ID NO: 1133363 - DNA, 15 bp, Homo sapiens
aaaatgagattcttt

SEQ ID NO: 1133364 - DNA, 15 bp, Homo sapiens
aaaaatgagattctt

SEQ ID NO: 1133365 - DNA, 15 bp, Homo sapiens
taaaaatgagattct

SEQ ID NO: 1133366 - DNA, 15 bp, Homo sapiens
ctaaaaatgagattc

SEQ ID NO: 1133367 - DNA, 15 bp, Homo sapiens
tctaaaaatgagatt

SEQ ID NO: 1133368 - DNA, 15 bp, Homo sapiens
ttctaaaaatgagat

SEQ ID NO: 1133369 - DNA, 15 bp, Homo sapiens
gttctaaaaatgaga

SEQ ID NO: 1133370 - DNA, 15 bp, Homo sapiens
ggttctaaaaatgag

SEQ ID NO: 1133371 - DNA, 15 bp, Homo sapiens
tggttctaaaaatga

SEQ ID NO: 1133372 - DNA, 15 bp, Homo sapiens
ttggttctaaaaatg

SEQ ID NO: 1133373 - DNA, 15 bp, Homo sapiens
cttggttctaaaaat

SEQ ID NO: 1133374 - DNA, 15 bp, Homo sapiens
acttggttctaaaaa

SEQ ID NO: 1133375 - DNA, 15 bp, Homo sapiens
gacttggttctaaaa

SEQ ID NO: 1133376 - DNA, 15 bp, Homo sapiens
tgacttggttctaaa

SEQ ID NO: 1133377 - DNA, 15 bp, Homo sapiens
gtgacttggttctaa

SEQ ID NO: 1133378 - DNA, 15 bp, Homo sapiens
agtgacttggttcta

SEQ ID NO: 1133379 - DNA, 15 bp, Homo sapiens
aagtgacttggttct

SEQ ID NO: 1133380 - DNA, 15 bp, Homo sapiens
caagtgacttggttc

SEQ ID NO: 1133381 - DNA, 15 bp, Homo sapiens
tcaagtgacttggtt

SEQ ID NO: 1133382 - DNA, 15 bp, Homo sapiens
gtcaagtgacttggt

SEQ ID NO: 1133383 - DNA, 15 bp, Homo sapiens
agtcaagtgacttgg

SEQ ID NO: 1133384 - DNA, 15 bp, Homo sapiens
aagtcaagtgacttg

SEQ ID NO: 1133385 - DNA, 15 bp, Homo sapiens
aaagtcaagtgactt

SEQ ID NO: 1133386 - DNA, 15 bp, Homo sapiens
aaaagtcaagtgact

SEQ ID NO: 1133387 - DNA, 15 bp, Homo sapiens
aaaaagtcaagtgac

SEQ ID NO: 1133388 - DNA, 15 bp, Homo sapiens
gaaaaagtcaagtga

SEQ ID NO: 1133389 - DNA, 15 bp, Homo sapiens
agaaaaagtcaagtg

SEQ ID NO: 1133390 - DNA, 15 bp, Homo sapiens
aagaaaaagtcaagt

SEQ ID NO: 1133391 - DNA, 15 bp, Homo sapiens
taagaaaaagtcaag

SEQ ID NO: 1133392 - DNA, 15 bp, Homo sapiens
ttaagaaaaagtcaa

SEQ ID NO: 1133393 - DNA, 15 bp, Homo sapiens
tttaagaaaaagtca

SEQ ID NO: 1133394 - DNA, 15 bp, Homo sapiens
gtttaagaaaaagtc

SEQ ID NO: 1133395 - DNA, 15 bp, Homo sapiens
ggtttaagaaaaagt

SEQ ID NO: 1133396 - DNA, 15 bp, Homo sapiens
tggtttaagaaaaag

SEQ ID NO: 1133397 - DNA, 15 bp, Homo sapiens
ttggtttaagaaaaa

SEQ ID NO: 1133398 - DNA, 15 bp, Homo sapiens
cttggtttaagaaaa

SEQ ID NO: 1133399 - DNA, 15 bp, Homo sapiens
tcttggtttaagaaa

SEQ ID NO: 1133400 - DNA, 15 bp, Homo sapiens
atcttggtttaagaa

SEQ ID NO: 1133401 - DNA, 15 bp, Homo sapiens
aatcttggtttaaga

SEQ ID NO: 1133402 - DNA, 15 bp, Homo sapiens
aaatcttggtttaag

SEQ ID NO: 1133403 - DNA, 15 bp, Homo sapiens
aaaatcttggtttaa

SEQ ID NO: 1133404 - DNA, 15 bp, Homo sapiens
aaaaatcttggttta

SEQ ID NO: 1133405 - DNA, 15 bp, Homo sapiens
caaaaatcttggttt

SEQ ID NO: 1133406 - DNA, 15 bp, Homo sapiens
acaaaaatcttggtt

SEQ ID NO: 1133407 - DNA, 15 bp, Homo sapiens
tacaaaaatcttggt

SEQ ID NO: 1133408 - DNA, 15 bp, Homo sapiens
atacaaaaatcttgg

SEQ ID NO: 1133409 - DNA, 15 bp, Homo sapiens
catacaaaaatcttg

SEQ ID NO: 1133410 - DNA, 15 bp, Homo sapiens
acatacaaaaatctt

SEQ ID NO: 1133411 - DNA, 15 bp, Homo sapiens
tacatacaaaaatct

SEQ ID NO: 1133412 - DNA, 15 bp, Homo sapiens
atacatacaaaaatc

SEQ ID NO: 1133413 - DNA, 15 bp, Homo sapiens
catacatacaaaaat

SEQ ID NO: 1133414 - DNA, 15 bp, Homo sapiens
acatacatacaaaaa

SEQ ID NO: 1133415 - DNA, 15 bp, Homo sapiens
tacatacatacaaaa

SEQ ID NO: 1133416 - DNA, 15 bp, Homo sapiens
gtacatacatacaaa

SEQ ID NO: 1133417 - DNA, 15 bp, Homo sapiens
ggtacatacatacaa

SEQ ID NO: 1133418 - DNA, 15 bp, Homo sapiens
tggtacatacataca

SEQ ID NO: 1133419 - DNA, 15 bp, Homo sapiens
ttggtacatacatac

SEQ ID NO: 1133420 - DNA, 15 bp, Homo sapiens
attggtacatacata

SEQ ID NO: 1133421 - DNA, 15 bp, Homo sapiens
aattggtacatacat

SEQ ID NO: 1133422 - DNA, 15 bp, Homo sapiens
aaattggtacataca

SEQ ID NO: 1133423 - DNA, 15 bp, Homo sapiens
caaattggtacatac

SEQ ID NO: 1133424 - DNA, 15 bp, Homo sapiens
tcaaattggtacata

SEQ ID NO: 1133425 - DNA, 15 bp, Homo sapiens
atcaaattggtacat

SEQ ID NO: 1133426 - DNA, 15 bp, Homo sapiens
gatcaaattggtaca

SEQ ID NO: 1133427 - DNA, 15 bp, Homo sapiens
agatcaaattggtac

SEQ ID NO: 1133428 - DNA, 15 bp, Homo sapiens
aagatcaaattggta

SEQ ID NO: 1133429 - DNA, 15 bp, Homo sapiens
caagatcaaattggt

SEQ ID NO: 1133430 - DNA, 15 bp, Homo sapiens
tcaagatcaaattgg

SEQ ID NO: 1133431 - DNA, 15 bp, Homo sapiens
ttcaagatcaaattg

SEQ ID NO: 1133432 - DNA, 15 bp, Homo sapiens
attcaagatcaaatt

SEQ ID NO: 1133433 - DNA, 15 bp, Homo sapiens
aattcaagatcaaat

SEQ ID NO: 1133434 - DNA, 15 bp, Homo sapiens
aaattcaagatcaaa

SEQ ID NO: 1133435 - DNA, 15 bp, Homo sapiens
taaattcaagatcaa

SEQ ID NO: 1133436 - DNA, 15 bp, Homo sapiens
ataaattcaagatca

SEQ ID NO: 1133437 - DNA, 15 bp, Homo sapiens
aataaattcaagatc

SEQ ID NO: 1133438 - DNA, 15 bp, Homo sapiens
aaataaattcaagat

SEQ ID NO: 1133439 - DNA, 15 bp, Homo sapiens
taaataaattcaaga

SEQ ID NO: 1133440 - DNA, 15 bp, Homo sapiens
ttaaataaattcaag

SEQ ID NO: 1133441 - DNA, 15 bp, Homo sapiens
tttaaataaattcaa

SEQ ID NO: 1133442 - DNA, 15 bp, Homo sapiens
ttttaaataaattca

SEQ ID NO: 1133443 - DNA, 15 bp, Homo sapiens
tttttaaataaattc

SEQ ID NO: 1133444 - DNA, 15 bp, Homo sapiens
atttttaaataaatt

SEQ ID NO: 1133445 - DNA, 15 bp, Homo sapiens
aatttttaaataaat

SEQ ID NO: 1133446 - DNA, 15 bp, Homo sapiens
aaatttttaaataaa

SEQ ID NO: 1133447 - DNA, 15 bp, Homo sapiens
aaaatttttaaataa

SEQ ID NO: 1133448 - DNA, 15 bp, Homo sapiens
caaaatttttaaata

SEQ ID NO: 1133449 - DNA, 15 bp, Homo sapiens
tcaaaatttttaaat

SEQ ID NO: 1133450 - DNA, 15 bp, Homo sapiens
ttcaaaatttttaaa

SEQ ID NO: 1133451 - DNA, 15 bp, Homo sapiens
tttcaaaatttttaa

SEQ ID NO: 1133452 - DNA, 15 bp, Homo sapiens
ttttcaaaattttta

SEQ ID NO: 1133453 - DNA, 15 bp, Homo sapiens
tttttcaaaattttt

SEQ ID NO: 1133454 - DNA, 15 bp, Homo sapiens
ttttttcaaaatttt

SEQ ID NO: 1133455 - DNA, 15 bp, Homo sapiens
attttttcaaaattt

SEQ ID NO: 1133456 - DNA, 15 bp, Homo sapiens
cattttttcaaaatt

SEQ ID NO: 1133457 - DNA, 15 bp, Homo sapiens
acattttttcaaaat

SEQ ID NO: 1133458 - DNA, 15 bp, Homo sapiens
tacattttttcaaaa

SEQ ID NO: 1133459 - DNA, 15 bp, Homo sapiens
ttacattttttcaaa

SEQ ID NO: 1133460 - DNA, 15 bp, Homo sapiens
tttacattttttcaa

SEQ ID NO: 1133461 - DNA, 15 bp, Homo sapiens
ctttacattttttca

SEQ ID NO: 1133462 - DNA, 15 bp, Homo sapiens
gctttacattttttc

SEQ ID NO: 1133463 - DNA, 15 bp, Homo sapiens
tgctttacatttttt

SEQ ID NO: 1133464 - DNA, 15 bp, Homo sapiens
atgctttacattttt

SEQ ID NO: 1133465 - DNA, 15 bp, Homo sapiens
aatgctttacatttt

SEQ ID NO: 1133466 - DNA, 15 bp, Homo sapiens
aaatgctttacattt

SEQ ID NO: 1133467 - DNA, 15 bp, Homo sapiens
gaaatgctttacatt

SEQ ID NO: 1133468 - DNA, 15 bp, Homo sapiens
tgaaatgctttacat

SEQ ID NO: 1133469 - DNA, 15 bp, Homo sapiens
ttgaaatgctttaca

SEQ ID NO: 1133470 - DNA, 15 bp, Homo sapiens
gttgaaatgctttac

SEQ ID NO: 1133471 - DNA, 15 bp, Homo sapiens
tgttgaaatgcttta

SEQ ID NO: 1133472 - DNA, 15 bp, Homo sapiens
atgttgaaatgcttt

SEQ ID NO: 1133473 - DNA, 15 bp, Homo sapiens
aatgttgaaatgctt

SEQ ID NO: 1133474 - DNA, 15 bp, Homo sapiens
aaatgttgaaatgct

SEQ ID NO: 1133475 - DNA, 15 bp, Homo sapiens
caaatgttgaaatgc

SEQ ID NO: 1133476 - DNA, 15 bp, Homo sapiens
tcaaatgttgaaatg

SEQ ID NO: 1133477 - DNA, 15 bp, Homo sapiens
gtcaaatgttgaaat

SEQ ID NO: 1133478 - DNA, 15 bp, Homo sapiens
agtcaaatgttgaaa

SEQ ID NO: 1133479 - DNA, 15 bp, Homo sapiens
aagtcaaatgttgaa

SEQ ID NO: 1133480 - DNA, 15 bp, Homo sapiens
aaagtcaaatgttga

SEQ ID NO: 1133481 - DNA, 15 bp, Homo sapiens
aaaagtcaaatgttg

SEQ ID NO: 1133482 - DNA, 15 bp, Homo sapiens
taaaagtcaaatgtt

SEQ ID NO: 1133483 - DNA, 15 bp, Homo sapiens
ctaaaagtcaaatgt

SEQ ID NO: 1133484 - DNA, 15 bp, Homo sapiens
actaaaagtcaaatg

SEQ ID NO: 1133485 - DNA, 15 bp, Homo sapiens
aactaaaagtcaaat

SEQ ID NO: 1133486 - DNA, 15 bp, Homo sapiens
aaactaaaagtcaaa

SEQ ID NO: 1133487 - DNA, 15 bp, Homo sapiens
gaaactaaaagtcaa

SEQ ID NO: 1133488 - DNA, 15 bp, Homo sapiens
tgaaactaaaagtca

SEQ ID NO: 1133489 - DNA, 15 bp, Homo sapiens
ttgaaactaaaagtc

SEQ ID NO: 1133490 - DNA, 15 bp, Homo sapiens
cttgaaactaaaagt

SEQ ID NO: 1133491 - DNA, 15 bp, Homo sapiens
ccttgaaactaaaag

SEQ ID NO: 1133492 - DNA, 15 bp, Homo sapiens
tccttgaaactaaaa

SEQ ID NO: 1133493 - DNA, 15 bp, Homo sapiens
gtccttgaaactaaa

SEQ ID NO: 1133494 - DNA, 15 bp, Homo sapiens
tgtccttgaaactaa

SEQ ID NO: 1133495 - DNA, 15 bp, Homo sapiens
atgtccttgaaacta

SEQ ID NO: 1133496 - DNA, 15 bp, Homo sapiens
gatgtccttgaaact

SEQ ID NO: 1133497 - DNA, 15 bp, Homo sapiens
agatgtccttgaaac

SEQ ID NO: 1133498 - DNA, 15 bp, Homo sapiens
aagatgtccttgaaa

SEQ ID NO: 1133499 - DNA, 15 bp, Homo sapiens
taagatgtccttgaa

SEQ ID NO: 1133500 - DNA, 15 bp, Homo sapiens
ataagatgtccttga

SEQ ID NO: 1133501 - DNA, 15 bp, Homo sapiens
tataagatgtccttg

SEQ ID NO: 1133502 - DNA, 15 bp, Homo sapiens
ttataagatgtcctt

SEQ ID NO: 1133503 - DNA, 15 bp, Homo sapiens
gttataagatgtcct

SEQ ID NO: 1133504 - DNA, 15 bp, Homo sapiens
tgttataagatgtcc

SEQ ID NO: 1133505 - DNA, 15 bp, Homo sapiens
ttgttataagatgtc

SEQ ID NO: 1133506 - DNA, 15 bp, Homo sapiens
attgttataagatgt

SEQ ID NO: 1133507 - DNA, 15 bp, Homo sapiens
aattgttataagatg

SEQ ID NO: 1133508 - DNA, 15 bp, Homo sapiens
gaattgttataagat

SEQ ID NO: 1133509 - DNA, 15 bp, Homo sapiens
agaattgttataaga

SEQ ID NO: 1133510 - DNA, 15 bp, Homo sapiens
aagaattgttataag

SEQ ID NO: 1133511 - DNA, 15 bp, Homo sapiens
aaagaattgttataa

SEQ ID NO: 1133512 - DNA, 15 bp, Homo sapiens
aaaagaattgttata

SEQ ID NO: 1133513 - DNA, 15 bp, Homo sapiens
taaaagaattgttat

SEQ ID NO: 1133514 - DNA, 15 bp, Homo sapiens
ttaaaagaattgtta

SEQ ID NO: 1133515 - DNA, 15 bp, Homo sapiens
attaaaagaattgtt

SEQ ID NO: 1133516 - DNA, 15 bp, Homo sapiens
gattaaaagaattgt

SEQ ID NO: 1133517 - DNA, 15 bp, Homo sapiens
tgattaaaagaattg

SEQ ID NO: 1133518 - DNA, 15 bp, Homo sapiens
gtgattaaaagaatt

SEQ ID NO: 1133519 - DNA, 15 bp, Homo sapiens
ggtgattaaaagaat

SEQ ID NO: 1133520 - DNA, 15 bp, Homo sapiens
tggtgattaaaagaa

SEQ ID NO: 1133521 - DNA, 15 bp, Homo sapiens
atggtgattaaaaga

SEQ ID NO: 1133522 - DNA, 15 bp, Homo sapiens
gatggtgattaaaag

SEQ ID NO: 1133523 - DNA, 15 bp, Homo sapiens
agatggtgattaaaa

SEQ ID NO: 1133524 - DNA, 15 bp, Homo sapiens
cagatggtgattaaa

SEQ ID NO: 1133525 - DNA, 15 bp, Homo sapiens
acagatggtgattaa

SEQ ID NO: 1133526 - DNA, 15 bp, Homo sapiens
aacagatggtgatta

SEQ ID NO: 1133527 - DNA, 15 bp, Homo sapiens
aaacagatggtgatt

SEQ ID NO: 1133528 - DNA, 15 bp, Homo sapiens
aaaacagatggtgat

SEQ ID NO: 1133529 - DNA, 15 bp, Homo sapiens
taaaacagatggtga

SEQ ID NO: 1133530 - DNA, 15 bp, Homo sapiens
ataaaacagatggtg

SEQ ID NO: 1133531 - DNA, 15 bp, Homo sapiens
tataaaacagatggt

SEQ ID NO: 1133532 - DNA, 15 bp, Homo sapiens
ttataaaacagatgg

SEQ ID NO: 1133533 - DNA, 15 bp, Homo sapiens
attataaaacagatg

SEQ ID NO: 1133534 - DNA, 15 bp, Homo sapiens
cattataaaacagat

SEQ ID NO: 1133535 - DNA, 15 bp, Homo sapiens
tcattataaaacaga

SEQ ID NO: 1133536 - DNA, 15 bp, Homo sapiens
ttcattataaaacag

SEQ ID NO: 1133537 - DNA, 15 bp, Homo sapiens
tttcattataaaaca

SEQ ID NO: 1133538 - DNA, 15 bp, Homo sapiens
atttcattataaaac

SEQ ID NO: 1133539 - DNA, 15 bp, Homo sapiens
tatttcattataaaa

SEQ ID NO: 1133540 - DNA, 15 bp, Homo sapiens
atatttcattataaa

SEQ ID NO: 1133541 - DNA, 15 bp, Homo sapiens
catatttcattataa

SEQ ID NO: 1133542 - DNA, 15 bp, Homo sapiens
acatatttcattata

SEQ ID NO: 1133543 - DNA, 15 bp, Homo sapiens
gacatatttcattat

SEQ ID NO: 1133544 - DNA, 15 bp, Homo sapiens
agacatatttcatta

SEQ ID NO: 1133545 - DNA, 15 bp, Homo sapiens
tagacatatttcatt

SEQ ID NO: 1133546 - DNA, 15 bp, Homo sapiens
ttagacatatttcat

SEQ ID NO: 1133547 - DNA, 15 bp, Homo sapiens
tttagacatatttca

SEQ ID NO: 1133548 - DNA, 15 bp, Homo sapiens
ctttagacatatttc

SEQ ID NO: 1133549 - DNA, 15 bp, Homo sapiens
tctttagacatattt

SEQ ID NO: 1133550 - DNA, 15 bp, Homo sapiens
ttctttagacatatt

SEQ ID NO: 1133551 - DNA, 15 bp, Homo sapiens
cttctttagacatat

SEQ ID NO: 1133552 - DNA, 15 bp, Homo sapiens
ccttctttagacata

SEQ ID NO: 1133553 - DNA, 15 bp, Homo sapiens
gccttctttagacat

SEQ ID NO: 1133554 - DNA, 15 bp, Homo sapiens
tgccttctttagaca

SEQ ID NO: 1133555 - DNA, 15 bp, Homo sapiens
gtgccttctttagac

SEQ ID NO: 1133556 - DNA, 15 bp, Homo sapiens
ggtgccttctttaga

SEQ ID NO: 1133557 - DNA, 15 bp, Homo sapiens
tggtgccttctttag

SEQ ID NO: 1133558 - DNA, 15 bp, Homo sapiens
ttggtgccttcttta

SEQ ID NO: 1133559 - DNA, 15 bp, Homo sapiens
gttggtgccttcttt

SEQ ID NO: 1133560 - DNA, 15 bp, Homo sapiens
agttggtgccttctt

SEQ ID NO: 1133561 - DNA, 15 bp, Homo sapiens
aagttggtgccttct

SEQ ID NO: 1133562 - DNA, 15 bp, Homo sapiens
taagttggtgccttc

SEQ ID NO: 1133563 - DNA, 15 bp, Homo sapiens
ttaagttggtgcctt

SEQ ID NO: 1133564 - DNA, 15 bp, Homo sapiens
gttaagttggtgcct

SEQ ID NO: 1133565 - DNA, 15 bp, Homo sapiens
ggttaagttggtgcc

SEQ ID NO: 1133566 - DNA, 15 bp, Homo sapiens
aggttaagttggtgc

SEQ ID NO: 1133567 - DNA, 15 bp, Homo sapiens
aaggttaagttggtg

SEQ ID NO: 1133568 - DNA, 15 bp, Homo sapiens
gaaggttaagttggt

SEQ ID NO: 1133569 - DNA, 15 bp, Homo sapiens
agaaggttaagttgg

SEQ ID NO: 1133570 - DNA, 15 bp, Homo sapiens
aagaaggttaagttg

SEQ ID NO: 1133571 - DNA, 15 bp, Homo sapiens
taagaaggttaagtt

SEQ ID NO: 1133572 - DNA, 15 bp, Homo sapiens
ctaagaaggttaagt

SEQ ID NO: 1133573 - DNA, 15 bp, Homo sapiens
cctaagaaggttaag

SEQ ID NO: 1133574 - DNA, 15 bp, Homo sapiens
gcctaagaaggttaa

SEQ ID NO: 1133575 - DNA, 15 bp, Homo sapiens
tgcctaagaaggtta

SEQ ID NO: 1133576 - DNA, 15 bp, Homo sapiens
ctgcctaagaaggtt

SEQ ID NO: 1133577 - DNA, 15 bp, Homo sapiens
tctgcctaagaaggt

SEQ ID NO: 1133578 - DNA, 15 bp, Homo sapiens
atctgcctaagaagg

SEQ ID NO: 1133579 - DNA, 15 bp, Homo sapiens
catctgcctaagaag

SEQ ID NO: 1133580 - DNA, 15 bp, Homo sapiens
acatctgcctaagaa

SEQ ID NO: 1133581 - DNA, 15 bp, Homo sapiens
gacatctgcctaaga

SEQ ID NO: 1133582 - DNA, 15 bp, Homo sapiens
ggacatctgcctaag

SEQ ID NO: 1133583 - DNA, 15 bp, Homo sapiens
tggacatctgcctaa

SEQ ID NO: 1133584 - DNA, 15 bp, Homo sapiens
ttggacatctgccta

SEQ ID NO: 1133585 - DNA, 15 bp, Homo sapiens
attggacatctgcct

SEQ ID NO: 1133586 - DNA, 15 bp, Homo sapiens
gattggacatctgcc

SEQ ID NO: 1133587 - DNA, 15 bp, Homo sapiens
tgattggacatctgc

SEQ ID NO: 1133588 - DNA, 15 bp, Homo sapiens
ttgattggacatctg

SEQ ID NO: 1133589 - DNA, 15 bp, Homo sapiens
attgattggacatct

SEQ ID NO: 1133590 - DNA, 15 bp, Homo sapiens
tattgattggacatc

SEQ ID NO: 1133591 - DNA, 15 bp, Homo sapiens
ctattgattggacat

SEQ ID NO: 1133592 - DNA, 15 bp, Homo sapiens
cctattgattggaca

SEQ ID NO: 1133593 - DNA, 15 bp, Homo sapiens
acctattgattggac

SEQ ID NO: 1133594 - DNA, 15 bp, Homo sapiens
aacctattgattgga

SEQ ID NO: 1133595 - DNA, 15 bp, Homo sapiens
caacctattgattgg

SEQ ID NO: 1133596 - DNA, 15 bp, Homo sapiens
acaacctattgattg

SEQ ID NO: 1133597 - DNA, 15 bp, Homo sapiens
gacaacctattgatt

SEQ ID NO: 1133598 - DNA, 15 bp, Homo sapiens
tgacaacctattgat

SEQ ID NO: 1133599 - DNA, 15 bp, Homo sapiens
ttgacaacctattga

SEQ ID NO: 1133600 - DNA, 15 bp, Homo sapiens
tttgacaacctattg

SEQ ID NO: 1133601 - DNA, 15 bp, Homo sapiens
ctttgacaacctatt

SEQ ID NO: 1133602 - DNA, 15 bp, Homo sapiens
cctttgacaacctat

SEQ ID NO: 1133603 - DNA, 15 bp, Homo sapiens
tcctttgacaaccta

SEQ ID NO: 1133604 - DNA, 15 bp, Homo sapiens
ttcctttgacaacct

SEQ ID NO: 1133605 - DNA, 15 bp, Homo sapiens
tttcctttgacaacc

SEQ ID NO: 1133606 - DNA, 15 bp, Homo sapiens
ctttcctttgacaac

SEQ ID NO: 1133607 - DNA, 15 bp, Homo sapiens
cctttcctttgacaa

SEQ ID NO: 1133608 - DNA, 15 bp, Homo sapiens
tcctttcctttgaca

SEQ ID NO: 1133609 - DNA, 15 bp, Homo sapiens
ttcctttcctttgac

SEQ ID NO: 1133610 - DNA, 15 bp, Homo sapiens
gttcctttcctttga

SEQ ID NO: 1133611 - DNA, 15 bp, Homo sapiens
agttcctttcctttg

SEQ ID NO: 1133612 - DNA, 15 bp, Homo sapiens
tagttcctttccttt

SEQ ID NO: 1133613 - DNA, 15 bp, Homo sapiens
ttagttcctttcctt

SEQ ID NO: 1133614 - DNA, 15 bp, Homo sapiens
attagttcctttcct

SEQ ID NO: 1133615 - DNA, 15 bp, Homo sapiens
tattagttcctttcc

SEQ ID NO: 1133616 - DNA, 15 bp, Homo sapiens
atattagttcctttc

SEQ ID NO: 1133617 - DNA, 15 bp, Homo sapiens
aatattagttccttt

SEQ ID NO: 1133618 - DNA, 15 bp, Homo sapiens
gaatattagttcctt

SEQ ID NO: 1133619 - DNA, 15 bp, Homo sapiens
agaatattagttcct

SEQ ID NO: 1133620 - DNA, 15 bp, Homo sapiens
aagaatattagttcc

SEQ ID NO: 1133621 - DNA, 15 bp, Homo sapiens
gaagaatattagttc

SEQ ID NO: 1133622 - DNA, 15 bp, Homo sapiens
ggaagaatattagtt

SEQ ID NO: 1133623 - DNA, 15 bp, Homo sapiens
aggaagaatattagt

SEQ ID NO: 1133624 - DNA, 15 bp, Homo sapiens
caggaagaatattag

SEQ ID NO: 1133625 - DNA, 15 bp, Homo sapiens
tcaggaagaatatta

SEQ ID NO: 1133626 - DNA, 15 bp, Homo sapiens
atcaggaagaatatt

SEQ ID NO: 1133627 - DNA, 15 bp, Homo sapiens
tatcaggaagaatat

SEQ ID NO: 1133628 - DNA, 15 bp, Homo sapiens
ctatcaggaagaata

SEQ ID NO: 1133629 - DNA, 15 bp, Homo sapiens
gctatcaggaagaat

SEQ ID NO: 1133630 - DNA, 15 bp, Homo sapiens
agctatcaggaagaa

SEQ ID NO: 1133631 - DNA, 15 bp, Homo sapiens
tagctatcaggaaga

SEQ ID NO: 1133632 - DNA, 15 bp, Homo sapiens
ctagctatcaggaag

SEQ ID NO: 1133633 - DNA, 15 bp, Homo sapiens
actagctatcaggaa

SEQ ID NO: 1133634 - DNA, 15 bp, Homo sapiens
aactagctatcagga

SEQ ID NO: 1133635 - DNA, 15 bp, Homo sapiens
aaactagctatcagg

SEQ ID NO: 1133636 - DNA, 15 bp, Homo sapiens
gaaactagctatcag

SEQ ID NO: 1133637 - DNA, 15 bp, Homo sapiens
tgaaactagctatca

SEQ ID NO: 1133638 - DNA, 15 bp, Homo sapiens
ctgaaactagctatc

SEQ ID NO: 1133639 - DNA, 15 bp, Homo sapiens
gctgaaactagctat

SEQ ID NO: 1133640 - DNA, 15 bp, Homo sapiens
tgctgaaactagcta

SEQ ID NO: 1133641 - DNA, 15 bp, Homo sapiens
ttgctgaaactagct

SEQ ID NO: 1133642 - DNA, 15 bp, Homo sapiens
attgctgaaactagc

SEQ ID NO: 1133643 - DNA, 15 bp, Homo sapiens
tattgctgaaactag

SEQ ID NO: 1133644 - DNA, 15 bp, Homo sapiens
ttattgctgaaacta

SEQ ID NO: 1133645 - DNA, 15 bp, Homo sapiens
attattgctgaaact

SEQ ID NO: 1133646 - DNA, 15 bp, Homo sapiens
tattattgctgaaac

SEQ ID NO: 1133647 - DNA, 15 bp, Homo sapiens
ttattattgctgaaa

SEQ ID NO: 1133648 - DNA, 15 bp, Homo sapiens
tttattattgctgaa

SEQ ID NO: 1133649 - DNA, 15 bp, Homo sapiens
atttattattgctga

SEQ ID NO: 1133650 - DNA, 15 bp, Homo sapiens
aatttattattgctg

SEQ ID NO: 1133651 - DNA, 15 bp, Homo sapiens
taatttattattgct

SEQ ID NO: 1133652 - DNA, 15 bp, Homo sapiens
ataatttattattgc

SEQ ID NO: 1133653 - DNA, 15 bp, Homo sapiens
aataatttattattg

SEQ ID NO: 1133654 - DNA, 15 bp, Homo sapiens
aaataatttattatt

SEQ ID NO: 1133655 - DNA, 15 bp, Homo sapiens
aaaataatttattat

SEQ ID NO: 1133656 - DNA, 15 bp, Homo sapiens
caaaataatttatta

SEQ ID NO: 1133657 - DNA, 15 bp, Homo sapiens
acaaaataatttatt

SEQ ID NO: 1133658 - DNA, 15 bp, Homo sapiens
tacaaaataatttat

SEQ ID NO: 1133659 - DNA, 15 bp, Homo sapiens
atacaaaataattta

SEQ ID NO: 1133660 - DNA, 15 bp, Homo sapiens
aatacaaaataattt

SEQ ID NO: 1133661 - DNA, 15 bp, Homo sapiens
aaatacaaaataatt

SEQ ID NO: 1133662 - DNA, 15 bp, Homo sapiens
aaaatacaaaataat

SEQ ID NO: 1133663 - DNA, 15 bp, Homo sapiens
aaaaatacaaaataa

SEQ ID NO: 1133664 - DNA, 15 bp, Homo sapiens
aaaaaatacaaaata

SEQ ID NO: 1133665 - DNA, 15 bp, Homo sapiens
aaaaaaatacaaaat

SEQ ID NO: 1133666 - DNA, 15 bp, Homo sapiens
gaaaaaaaatacaaa

SEQ ID NO: 1133667 - DNA, 15 bp, Homo sapiens
ggaaaaaaaatacaa

SEQ ID NO: 1133668 - DNA, 15 bp, Homo sapiens
tggaaaaaaaataca

SEQ ID NO: 1133669 - DNA, 15 bp, Homo sapiens
ttggaaaaaaaatac

SEQ ID NO: 1133670 - DNA, 15 bp, Homo sapiens
tttggaaaaaaaata

SEQ ID NO: 1133671 - DNA, 15 bp, Homo sapiens
atttggaaaaaaaat

SEQ ID NO: 1133672 - DNA, 15 bp, Homo sapiens
catttggaaaaaaaa

SEQ ID NO: 1133673 - DNA, 15 bp, Homo sapiens
agcaagaggatataa

SEQ ID NO: 1133674 - DNA, 15 bp, Homo sapiens
cagcaagaggatata

SEQ ID NO: 1133675 - DNA, 15 bp, Homo sapiens
tcagcaagaggatat

SEQ ID NO: 1133676 - DNA, 15 bp, Homo sapiens
ttcagcaagaggata

SEQ ID NO: 1133677 - DNA, 15 bp, Homo sapiens
attcagcaagaggat

SEQ ID NO: 1133678 - DNA, 15 bp, Homo sapiens
gattcagcaagagga

SEQ ID NO: 1133679 - DNA, 15 bp, Homo sapiens
tgattcagcaagagg

SEQ ID NO: 1133680 - DNA, 15 bp, Homo sapiens
ttgattcagcaagag

SEQ ID NO: 1133681 - DNA, 15 bp, Homo sapiens
gttgattcagcaaga

SEQ ID NO: 1133682 - DNA, 15 bp, Homo sapiens
ggttgattcagcaag

SEQ ID NO: 1133683 - DNA, 15 bp, Homo sapiens
gggttgattcagcaa

SEQ ID NO: 1133684 - DNA, 15 bp, Homo sapiens
ggggttgattcagca

SEQ ID NO: 1133685 - DNA, 15 bp, Homo sapiens
aggggttgattcagc

SEQ ID NO: 1133686 - DNA, 15 bp, Homo sapiens
aaggggttgattcag

SEQ ID NO: 1133687 - DNA, 15 bp, Homo sapiens
aaaggggttgattca

SEQ ID NO: 1133688 - DNA, 15 bp, Homo sapiens
taaaggggttgattc

SEQ ID NO: 1133689 - DNA, 15 bp, Homo sapiens
ataaaggggttgatt

SEQ ID NO: 1133690 - DNA, 15 bp, Homo sapiens
gataaaggggttgat

SEQ ID NO: 1133691 - DNA, 15 bp, Homo sapiens
tgataaaggggttga

SEQ ID NO: 1133692 - DNA, 15 bp, Homo sapiens
atgataaaggggttg

SEQ ID NO: 1133693 - DNA, 15 bp, Homo sapiens
aatgataaaggggtt

SEQ ID NO: 1133694 - DNA, 15 bp, Homo sapiens
taatgataaaggggt

SEQ ID NO: 1133695 - DNA, 15 bp, Homo sapiens
ataatgataaagggg

SEQ ID NO: 1133696 - DNA, 15 bp, Homo sapiens
tataatgataaaggg

SEQ ID NO: 1133697 - DNA, 15 bp, Homo sapiens
atataatgataaagg

SEQ ID NO: 1133698 - DNA, 15 bp, Homo sapiens
tatataatgataaag

SEQ ID NO: 1133699 - DNA, 15 bp, Homo sapiens
ctatataatgataaa

SEQ ID NO: 1133700 - DNA, 15 bp, Homo sapiens
actatataatgataa

SEQ ID NO: 1133701 - DNA, 15 bp, Homo sapiens
tactatataatgata

SEQ ID NO: 1133702 - DNA, 15 bp, Homo sapiens
ttactatataatgat

SEQ ID NO: 1133703 - DNA, 15 bp, Homo sapiens
gttactatataatga

SEQ ID NO: 1133704 - DNA, 15 bp, Homo sapiens
ggttactatataatg

SEQ ID NO: 1133705 - DNA, 15 bp, Homo sapiens
aggttactatataat

SEQ ID NO: 1133706 - DNA, 15 bp, Homo sapiens
aaggttactatataa

SEQ ID NO: 1133707 - DNA, 15 bp, Homo sapiens
caaggttactatata

SEQ ID NO: 1133708 - DNA, 15 bp, Homo sapiens
acaaggttactatat

SEQ ID NO: 1133709 - DNA, 15 bp, Homo sapiens
aacaaggttactata

SEQ ID NO: 1133710 - DNA, 15 bp, Homo sapiens
aaacaaggttactat

SEQ ID NO: 1133711 - DNA, 15 bp, Homo sapiens
gaaacaaggttacta

SEQ ID NO: 1133712 - DNA, 15 bp, Homo sapiens
agaaacaaggttact

SEQ ID NO: 1133713 - DNA, 15 bp, Homo sapiens
aagaaacaaggttac

SEQ ID NO: 1133714 - DNA, 15 bp, Homo sapiens
gaagaaacaaggtta

SEQ ID NO: 1133715 - DNA, 15 bp, Homo sapiens
agaagaaacaaggtt

SEQ ID NO: 1133716 - DNA, 15 bp, Homo sapiens
aagaagaaacaaggt

SEQ ID NO: 1133717 - DNA, 15 bp, Homo sapiens
taagaagaaacaagg

SEQ ID NO: 1133718 - DNA, 15 bp, Homo sapiens
gtaagaagaaacaag

SEQ ID NO: 1133719 - DNA, 15 bp, Homo sapiens
tgtaagaagaaacaa

SEQ ID NO: 1133720 - DNA, 15 bp, Homo sapiens
ctgtaagaagaaaca

SEQ ID NO: 1133721 - DNA, 15 bp, Homo sapiens
actgtaagaagaaac

SEQ ID NO: 1133722 - DNA, 15 bp, Homo sapiens
aactgtaagaagaaa

SEQ ID NO: 1133723 - DNA, 15 bp, Homo sapiens
aaactgtaagaagaa

SEQ ID NO: 1133724 - DNA, 15 bp, Homo sapiens
aaaactgtaagaaga

SEQ ID NO: 1133725 - DNA, 15 bp, Homo sapiens
gaaaactgtaagaag

SEQ ID NO: 1133726 - DNA, 15 bp, Homo sapiens
cgaaaactgtaagaa

SEQ ID NO: 1133727 - DNA, 15 bp, Homo sapiens
acgaaaactgtaaga

SEQ ID NO: 1133728 - DNA, 15 bp, Homo sapiens
gacgaaaactgtaag

SEQ ID NO: 1133729 - DNA, 15 bp, Homo sapiens
agacgaaaactgtaa

SEQ ID NO: 1133730 - DNA, 15 bp, Homo sapiens
aagacgaaaactgta

SEQ ID NO: 1133731 - DNA, 15 bp, Homo sapiens
caagacgaaaactgt

SEQ ID NO: 1133732 - DNA, 15 bp, Homo sapiens
tcaagacgaaaactg

SEQ ID NO: 1133733 - DNA, 15 bp, Homo sapiens
ttcaagacgaaaact

SEQ ID NO: 1133734 - DNA, 15 bp, Homo sapiens
tttcaagacgaaaac

SEQ ID NO: 1133735 - DNA, 15 bp, Homo sapiens
atttcaagacgaaaa

SEQ ID NO: 1133736 - DNA, 15 bp, Homo sapiens
gatttcaagacgaaa

SEQ ID NO: 1133737 - DNA, 15 bp, Homo sapiens
agatttcaagacgaa

SEQ ID NO: 1133738 - DNA, 15 bp, Homo sapiens
tagatttcaagacga

SEQ ID NO: 1133739 - DNA, 15 bp, Homo sapiens
atagatttcaagacg

SEQ ID NO: 1133740 - DNA, 15 bp, Homo sapiens
aatagatttcaagac

SEQ ID NO: 1133741 - DNA, 15 bp, Homo sapiens
aaatagatttcaaga

SEQ ID NO: 1133742 - DNA, 15 bp, Homo sapiens
aaaatagatttcaag

SEQ ID NO: 1133743 - DNA, 15 bp, Homo sapiens
caaaatagatttcaa

SEQ ID NO: 1133744 - DNA, 15 bp, Homo sapiens
acaaaatagatttca

SEQ ID NO: 1133745 - DNA, 15 bp, Homo sapiens
gacaaaatagatttc

SEQ ID NO: 1133746 - DNA, 15 bp, Homo sapiens
agacaaaatagattt

SEQ ID NO: 1133747 - DNA, 15 bp, Homo sapiens
cagacaaaatagatt

SEQ ID NO: 1133748 - DNA, 15 bp, Homo sapiens
tcagacaaaatagat

SEQ ID NO: 1133749 - DNA, 15 bp, Homo sapiens
atcagacaaaataga

SEQ ID NO: 1133750 - DNA, 15 bp, Homo sapiens
tatcagacaaaatag

SEQ ID NO: 1133751 - DNA, 15 bp, Homo sapiens
gtatcagacaaaata

SEQ ID NO: 1133752 - DNA, 15 bp, Homo sapiens
tgtatcagacaaaat

SEQ ID NO: 1133753 - DNA, 15 bp, Homo sapiens
atgtatcagacaaaa

SEQ ID NO: 1133754 - DNA, 15 bp, Homo sapiens
catgtatcagacaaa

SEQ ID NO: 1133755 - DNA, 15 bp, Homo sapiens
acatgtatcagacaa

SEQ ID NO: 1133756 - DNA, 15 bp, Homo sapiens
tacatgtatcagaca

SEQ ID NO: 1133757 - DNA, 15 bp, Homo sapiens
atacatgtatcagac

SEQ ID NO: 1133758 - DNA, 15 bp, Homo sapiens
tatacatgtatcaga

SEQ ID NO: 1133759 - DNA, 15 bp, Homo sapiens
ctatacatgtatcag

SEQ ID NO: 1133760 - DNA, 15 bp, Homo sapiens
gctatacatgtatca

SEQ ID NO: 1133761 - DNA, 15 bp, Homo sapiens
agctatacatgtatc

SEQ ID NO: 1133762 - DNA, 15 bp, Homo sapiens
tagctatacatgtat

SEQ ID NO: 1133763 - DNA, 15 bp, Homo sapiens
gtagctatacatgta

SEQ ID NO: 1133764 - DNA, 15 bp, Homo sapiens
agtagctatacatgt

SEQ ID NO: 1133765 - DNA, 15 bp, Homo sapiens
gagtagctatacatg

SEQ ID NO: 1133766 - DNA, 15 bp, Homo sapiens
ggagtagctatacat

SEQ ID NO: 1133767 - DNA, 15 bp, Homo sapiens
aggagtagctataca

SEQ ID NO: 1133768 - DNA, 15 bp, Homo sapiens
gaggagtagctatac

SEQ ID NO: 1133769 - DNA, 15 bp, Homo sapiens
ggaggagtagctata

SEQ ID NO: 1133770 - DNA, 15 bp, Homo sapiens
aggaggagtagctat

SEQ ID NO: 1133771 - DNA, 15 bp, Homo sapiens
gaggaggagtagcta

SEQ ID NO: 1133772 - DNA, 15 bp, Homo sapiens
agaggaggagtagct

SEQ ID NO: 1133773 - DNA, 15 bp, Homo sapiens
aagaggaggagtagc

SEQ ID NO: 1133774 - DNA, 15 bp, Homo sapiens
aaagaggaggagtag

SEQ ID NO: 1133775 - DNA, 15 bp, Homo sapiens
aaaagaggaggagta

SEQ ID NO: 1133776 - DNA, 15 bp, Homo sapiens
aaaaagaggaggagt

SEQ ID NO: 1133777 - DNA, 15 bp, Homo sapiens
aaaaaagaggaggag

SEQ ID NO: 1133778 - DNA, 15 bp, Homo sapiens
aaaaaaagaggagga

SEQ ID NO: 1133779 - DNA, 15 bp, Homo sapiens
gaaacaaaaaaaaaa

SEQ ID NO: 1133780 - DNA, 15 bp, Homo sapiens
ggaaacaaaaaaaaa

SEQ ID NO: 1133781 - DNA, 15 bp, Homo sapiens
tggaaacaaaaaaaa

SEQ ID NO: 1133782 - DNA, 15 bp, Homo sapiens
atggaaacaaaaaaa

SEQ ID NO: 1133783 - DNA, 15 bp, Homo sapiens
aatggaaacaaaaaa

SEQ ID NO: 1133784 - DNA, 15 bp, Homo sapiens
caatggaaacaaaaa

SEQ ID NO: 1133785 - DNA, 15 bp, Homo sapiens
ccaatggaaacaaaa

SEQ ID NO: 1133786 - DNA, 15 bp, Homo sapiens
gccaatggaaacaaa

SEQ ID NO: 1133787 - DNA, 15 bp, Homo sapiens
tgccaatggaaacaa

SEQ ID NO: 1133788 - DNA, 15 bp, Homo sapiens
atgccaatggaaaca

SEQ ID NO: 1133789 - DNA, 15 bp, Homo sapiens
catgccaatggaaac

SEQ ID NO: 1133790 - DNA, 15 bp, Homo sapiens
ccatgccaatggaaa

SEQ ID NO: 1133791 - DNA, 15 bp, Homo sapiens
tccatgccaatggaa

SEQ ID NO: 1133792 - DNA, 15 bp, Homo sapiens
ttccatgccaatgga

SEQ ID NO: 1133793 - DNA, 15 bp, Homo sapiens
attccatgccaatgg

SEQ ID NO: 1133794 - DNA, 15 bp, Homo sapiens
tattccatgccaatg

SEQ ID NO: 1133795 - DNA, 15 bp, Homo sapiens
atattccatgccaat

SEQ ID NO: 1133796 - DNA, 15 bp, Homo sapiens
gatattccatgccaa

SEQ ID NO: 1133797 - DNA, 15 bp, Homo sapiens
agatattccatgcca

SEQ ID NO: 1133798 - DNA, 15 bp, Homo sapiens
aagatattccatgcc

SEQ ID NO: 1133799 - DNA, 15 bp, Homo sapiens
aaagatattccatgc

SEQ ID NO: 1133800 - DNA, 15 bp, Homo sapiens
aaaagatattccatg

SEQ ID NO: 1133801 - DNA, 15 bp, Homo sapiens
aaaaagatattccat

SEQ ID NO: 1133802 - DNA, 15 bp, Homo sapiens
gaaaaagatattcca

SEQ ID NO: 1133803 - DNA, 15 bp, Homo sapiens
agaaaaagatattcc

SEQ ID NO: 1133804 - DNA, 15 bp, Homo sapiens
tagaaaaagatattc

SEQ ID NO: 1133805 - DNA, 15 bp, Homo sapiens
atagaaaaagatatt

SEQ ID NO: 1133806 - DNA, 15 bp, Homo sapiens
gatagaaaaagatat

SEQ ID NO: 1133807 - DNA, 15 bp, Homo sapiens
ggatagaaaaagata

SEQ ID NO: 1133808 - DNA, 15 bp, Homo sapiens
gggatagaaaaagat

SEQ ID NO: 1133809 - DNA, 15 bp, Homo sapiens
agggatagaaaaaga

SEQ ID NO: 1133810 - DNA, 15 bp, Homo sapiens
aagggatagaaaaag

SEQ ID NO: 1133811 - DNA, 15 bp, Homo sapiens
taagggatagaaaaa

SEQ ID NO: 1133812 - DNA, 15 bp, Homo sapiens
ttaagggatagaaaa

SEQ ID NO: 1133813 - DNA, 15 bp, Homo sapiens
attaagggatagaaa

SEQ ID NO: 1133814 - DNA, 15 bp, Homo sapiens
aattaagggatagaa

SEQ ID NO: 1133815 - DNA, 15 bp, Homo sapiens
aaattaagggataga

SEQ ID NO: 1133816 - DNA, 15 bp, Homo sapiens
aaaattaagggatag

SEQ ID NO: 1133817 - DNA, 15 bp, Homo sapiens
gaaaattaagggata

SEQ ID NO: 1133818 - DNA, 15 bp, Homo sapiens
tgaaaattaagggat

SEQ ID NO: 1133819 - DNA, 15 bp, Homo sapiens
ctgaaaattaaggga

SEQ ID NO: 1133820 - DNA, 15 bp, Homo sapiens
actgaaaattaaggg

SEQ ID NO: 1133821 - DNA, 15 bp, Homo sapiens
gactgaaaattaagg

SEQ ID NO: 1133822 - DNA, 15 bp, Homo sapiens
agactgaaaattaag

SEQ ID NO: 1133823 - DNA, 15 bp, Homo sapiens
tagactgaaaattaa

SEQ ID NO: 1133824 - DNA, 15 bp, Homo sapiens
atagactgaaaatta

SEQ ID NO: 1133825 - DNA, 15 bp, Homo sapiens
catagactgaaaatt

SEQ ID NO: 1133826 - DNA, 15 bp, Homo sapiens
acatagactgaaaat

SEQ ID NO: 1133827 - DNA, 15 bp, Homo sapiens
cacatagactgaaaa

SEQ ID NO: 1133828 - DNA, 15 bp, Homo sapiens
acacatagactgaaa

SEQ ID NO: 1133829 - DNA, 15 bp, Homo sapiens
tacacatagactgaa

SEQ ID NO: 1133830 - DNA, 15 bp, Homo sapiens
atacacatagactga

SEQ ID NO: 1133831 - DNA, 15 bp, Homo sapiens
gatacacatagactg

SEQ ID NO: 1133832 - DNA, 15 bp, Homo sapiens
agatacacatagact

SEQ ID NO: 1133833 - DNA, 15 bp, Homo sapiens
aagatacacatagac

SEQ ID NO: 1133834 - DNA, 15 bp, Homo sapiens
aaagatacacataga

SEQ ID NO: 1133835 - DNA, 15 bp, Homo sapiens
taaagatacacatag

SEQ ID NO: 1133836 - DNA, 15 bp, Homo sapiens
ataaagatacacata

SEQ ID NO: 1133837 - DNA, 15 bp, Homo sapiens
cataaagatacacat

SEQ ID NO: 1133838 - DNA, 15 bp, Homo sapiens
ccataaagatacaca

SEQ ID NO: 1133839 - DNA, 15 bp, Homo sapiens
tccataaagatacac

SEQ ID NO: 1133840 - DNA, 15 bp, Homo sapiens
atccataaagataca

SEQ ID NO: 1133841 - DNA, 15 bp, Homo sapiens
aatccataaagatac

SEQ ID NO: 1133842 - DNA, 15 bp, Homo sapiens
taatccataaagata

SEQ ID NO: 1133843 - DNA, 15 bp, Homo sapiens
ttaatccataaagat

SEQ ID NO: 1133844 - DNA, 15 bp, Homo sapiens
cttaatccataaaga

SEQ ID NO: 1133845 - DNA, 15 bp, Homo sapiens
acttaatccataaag

SEQ ID NO: 1133846 - DNA, 15 bp, Homo sapiens
cacttaatccataaa

SEQ ID NO: 1133847 - DNA, 15 bp, Homo sapiens
acacttaatccataa

SEQ ID NO: 1133848 - DNA, 15 bp, Homo sapiens
cacacttaatccata

SEQ ID NO: 1133849 - DNA, 15 bp, Homo sapiens
acacacttaatccat

SEQ ID NO: 1133850 - DNA, 15 bp, Homo sapiens
aacacacttaatcca

SEQ ID NO: 1133851 - DNA, 15 bp, Homo sapiens
aaacacacttaatcc

SEQ ID NO: 1133852 - DNA, 15 bp, Homo sapiens
gaaacacacttaatc

SEQ ID NO: 1133853 - DNA, 15 bp, Homo sapiens
agaaacacacttaat

SEQ ID NO: 1133854 - DNA, 15 bp, Homo sapiens
aagaaacacacttaa

SEQ ID NO: 1133855 - DNA, 15 bp, Homo sapiens
caagaaacacactta

SEQ ID NO: 1133856 - DNA, 15 bp, Homo sapiens
acaagaaacacactt

SEQ ID NO: 1133857 - DNA, 15 bp, Homo sapiens
cacaagaaacacact

SEQ ID NO: 1133858 - DNA, 15 bp, Homo sapiens
ccacaagaaacacac

SEQ ID NO: 1133859 - DNA, 15 bp, Homo sapiens
cccacaagaaacaca

SEQ ID NO: 1133860 - DNA, 15 bp, Homo sapiens
gcccacaagaaacac

SEQ ID NO: 1133861 - DNA, 15 bp, Homo sapiens
tgcccacaagaaaca

SEQ ID NO: 1133862 - DNA, 15 bp, Homo sapiens
ttgcccacaagaaac

SEQ ID NO: 1133863 - DNA, 15 bp, Homo sapiens
gttgcccacaagaaa

SEQ ID NO: 1133864 - DNA, 15 bp, Homo sapiens
tgttgcccacaagaa

SEQ ID NO: 1133865 - DNA, 15 bp, Homo sapiens
ctgttgcccacaaga

SEQ ID NO: 1133866 - DNA, 15 bp, Homo sapiens
tctgttgcccacaag

SEQ ID NO: 1133867 - DNA, 15 bp, Homo sapiens
atctgttgcccacaa

SEQ ID NO: 1133868 - DNA, 15 bp, Homo sapiens
gatctgttgcccaca

SEQ ID NO: 1133869 - DNA, 15 bp, Homo sapiens
tgatctgttgcccac

SEQ ID NO: 1133870 - DNA, 15 bp, Homo sapiens
atgatctgttgccca

SEQ ID NO: 1133871 - DNA, 15 bp, Homo sapiens
aatgatctgttgccc

SEQ ID NO: 1133872 - DNA, 15 bp, Homo sapiens
gaatgatctgttgcc

SEQ ID NO: 1133873 - DNA, 15 bp, Homo sapiens
cgaatgatctgttgc

SEQ ID NO: 1133874 - DNA, 15 bp, Homo sapiens
ccgaatgatctgttg

SEQ ID NO: 1133875 - DNA, 15 bp, Homo sapiens
accgaatgatctgtt

SEQ ID NO: 1133876 - DNA, 15 bp, Homo sapiens
gaccgaatgatctgt

SEQ ID NO: 1133877 - DNA, 15 bp, Homo sapiens
agaccgaatgatctg

SEQ ID NO: 1133878 - DNA, 15 bp, Homo sapiens
aagaccgaatgatct

SEQ ID NO: 1133879 - DNA, 15 bp, Homo sapiens
caagaccgaatgatc

SEQ ID NO: 1133880 - DNA, 15 bp, Homo sapiens
acaagaccgaatgat

SEQ ID NO: 1133881 - DNA, 15 bp, Homo sapiens
aacaagaccgaatga

SEQ ID NO: 1133882 - DNA, 15 bp, Homo sapiens
aaacaagaccgaatg

SEQ ID NO: 1133883 - DNA, 15 bp, Homo sapiens
aaaacaagaccgaat

SEQ ID NO: 1133884 - DNA, 15 bp, Homo sapiens
caaaacaagaccgaa

SEQ ID NO: 1133885 - DNA, 15 bp, Homo sapiens
acaaaacaagaccga

SEQ ID NO: 1133886 - DNA, 15 bp, Homo sapiens
cacaaaacaagaccg

SEQ ID NO: 1133887 - DNA, 15 bp, Homo sapiens
acacaaaacaagacc

SEQ ID NO: 1133888 - DNA, 15 bp, Homo sapiens
aacacaaaacaagac

SEQ ID NO: 1133889 - DNA, 15 bp, Homo sapiens
caacacaaaacaaga

SEQ ID NO: 1133890 - DNA, 15 bp, Homo sapiens
acaacacaaaacaag

SEQ ID NO: 1133891 - DNA, 15 bp, Homo sapiens
aacaacacaaaacaa

SEQ ID NO: 1133892 - DNA, 15 bp, Homo sapiens
aaacaacacaaaaca

SEQ ID NO: 1133893 - DNA, 15 bp, Homo sapiens
aaaacaacacaaaac

SEQ ID NO: 1133894 - DNA, 15 bp, Homo sapiens
caaaacaacacaaaa

SEQ ID NO: 1133895 - DNA, 15 bp, Homo sapiens
acaaaacaacacaaa

SEQ ID NO: 1133896 - DNA, 15 bp, Homo sapiens
aacaaaacaacacaa

SEQ ID NO: 1133897 - DNA, 15 bp, Homo sapiens
aaacaaaacaacaca

SEQ ID NO: 1133898 - DNA, 15 bp, Homo sapiens
aaaacaaaacaacac

SEQ ID NO: 1133899 - DNA, 15 bp, Homo sapiens
caaaacaaaacaaca

SEQ ID NO: 1133900 - DNA, 15 bp, Homo sapiens
acaaaacaaaacaac

SEQ ID NO: 1133901 - DNA, 15 bp, Homo sapiens
taaaacaaaacaaaa

SEQ ID NO: 1133902 - DNA, 15 bp, Homo sapiens
ttaaaacaaaacaaa

SEQ ID NO: 1133903 - DNA, 15 bp, Homo sapiens
attaaaacaaaacaa

SEQ ID NO: 1133904 - DNA, 15 bp, Homo sapiens
gattaaaacaaaaca

SEQ ID NO: 1133905 - DNA, 15 bp, Homo sapiens
ggattaaaacaaaac

SEQ ID NO: 1133906 - DNA, 15 bp, Homo sapiens
tggattaaaacaaaa

SEQ ID NO: 1133907 - DNA, 15 bp, Homo sapiens
atggattaaaacaaa

SEQ ID NO: 1133908 - DNA, 15 bp, Homo sapiens
aatggattaaaacaa

SEQ ID NO: 1133909 - DNA, 15 bp, Homo sapiens
gaatggattaaaaca

SEQ ID NO: 1133910 - DNA, 15 bp, Homo sapiens
tgaatggattaaaac

SEQ ID NO: 1133911 - DNA, 15 bp, Homo sapiens
ctgaatggattaaaa

SEQ ID NO: 1133912 - DNA, 15 bp, Homo sapiens
actgaatggattaaa

SEQ ID NO: 1133913 - DNA, 15 bp, Homo sapiens
cactgaatggattaa

SEQ ID NO: 1133914 - DNA, 15 bp, Homo sapiens
tcactgaatggatta

SEQ ID NO: 1133915 - DNA, 15 bp, Homo sapiens
gtcactgaatggatt

SEQ ID NO: 1133916 - DNA, 15 bp, Homo sapiens
agtcactgaatggat

SEQ ID NO: 1133917 - DNA, 15 bp, Homo sapiens
gagtcactgaatgga

SEQ ID NO: 1133918 - DNA, 15 bp, Homo sapiens
agagtcactgaatgg

SEQ ID NO: 1133919 - DNA, 15 bp, Homo sapiens
tagagtcactgaatg

SEQ ID NO: 1133920 - DNA, 15 bp, Homo sapiens
atagagtcactgaat

SEQ ID NO: 1133921 - DNA, 15 bp, Homo sapiens
catagagtcactgaa

SEQ ID NO: 1133922 - DNA, 15 bp, Homo sapiens
tcatagagtcactga

SEQ ID NO: 1133923 - DNA, 15 bp, Homo sapiens
gtcatagagtcactg

SEQ ID NO: 1133924 - DNA, 15 bp, Homo sapiens
agtcatagagtcact

SEQ ID NO: 1133925 - DNA, 15 bp, Homo sapiens
aagtcatagagtcac

SEQ ID NO: 1133926 - DNA, 15 bp, Homo sapiens
aaagtcatagagtca

SEQ ID NO: 1133927 - DNA, 15 bp, Homo sapiens
aaaagtcatagagtc

SEQ ID NO: 1133928 - DNA, 15 bp, Homo sapiens
caaaagtcatagagt

SEQ ID NO: 1133929 - DNA, 15 bp, Homo sapiens
tcaaaagtcatagag

SEQ ID NO: 1133930 - DNA, 15 bp, Homo sapiens
atcaaaagtcataga

SEQ ID NO: 1133931 - DNA, 15 bp, Homo sapiens
aatcaaaagtcatag

SEQ ID NO: 1133932 - DNA, 15 bp, Homo sapiens
caatcaaaagtcata

SEQ ID NO: 1133933 - DNA, 15 bp, Homo sapiens
ccaatcaaaagtcat

SEQ ID NO: 1133934 - DNA, 15 bp, Homo sapiens
tccaatcaaaagtca

SEQ ID NO: 1133935 - DNA, 15 bp, Homo sapiens
ctccaatcaaaagtc

SEQ ID NO: 1133936 - DNA, 15 bp, Homo sapiens
tctccaatcaaaagt

SEQ ID NO: 1133937 - DNA, 15 bp, Homo sapiens
ctctccaatcaaaag

SEQ ID NO: 1133938 - DNA, 15 bp, Homo sapiens
actctccaatcaaaa

SEQ ID NO: 1133939 - DNA, 15 bp, Homo sapiens
gactctccaatcaaa

SEQ ID NO: 1133940 - DNA, 15 bp, Homo sapiens
agactctccaatcaa

SEQ ID NO: 1133941 - DNA, 15 bp, Homo sapiens
tagactctccaatca

SEQ ID NO: 1133942 - DNA, 15 bp, Homo sapiens
ctagactctccaatc

SEQ ID NO: 1133943 - DNA, 15 bp, Homo sapiens
cctagactctccaat

SEQ ID NO: 1133944 - DNA, 15 bp, Homo sapiens
gcctagactctccaa

SEQ ID NO: 1133945 - DNA, 15 bp, Homo sapiens
ggcctagactctcca

SEQ ID NO: 1133946 - DNA, 15 bp, Homo sapiens
tggcctagactctcc

SEQ ID NO: 1133947 - DNA, 15 bp, Homo sapiens
atggcctagactctc

SEQ ID NO: 1133948 - DNA, 15 bp, Homo sapiens
aatggcctagactct

SEQ ID NO: 1133949 - DNA, 15 bp, Homo sapiens
aaatggcctagactc

SEQ ID NO: 1133950 - DNA, 15 bp, Homo sapiens
taaatggcctagact

SEQ ID NO: 1133951 - DNA, 15 bp, Homo sapiens
ataaatggcctagac

SEQ ID NO: 1133952 - DNA, 15 bp, Homo sapiens
tataaatggcctaga

SEQ ID NO: 1133953 - DNA, 15 bp, Homo sapiens
atataaatggcctag

SEQ ID NO: 1133954 - DNA, 15 bp, Homo sapiens
aatataaatggccta

SEQ ID NO: 1133955 - DNA, 15 bp, Homo sapiens
gaatataaatggcct

SEQ ID NO: 1133956 - DNA, 15 bp, Homo sapiens
tgaatataaatggcc

SEQ ID NO: 1133957 - DNA, 15 bp, Homo sapiens
ttgaatataaatggc

SEQ ID NO: 1133958 - DNA, 15 bp, Homo sapiens
attgaatataaatgg

SEQ ID NO: 1133959 - DNA, 15 bp, Homo sapiens
cattgaatataaatg

SEQ ID NO: 1133960 - DNA, 15 bp, Homo sapiens
acattgaatataaat

SEQ ID NO: 1133961 - DNA, 15 bp, Homo sapiens
aacattgaatataaa

SEQ ID NO: 1133962 - DNA, 15 bp, Homo sapiens
taacattgaatataa

SEQ ID NO: 1133963 - DNA, 15 bp, Homo sapiens
ataacattgaatata

SEQ ID NO: 1133964 - DNA, 15 bp, Homo sapiens
aataacattgaatat

SEQ ID NO: 1133965 - DNA, 15 bp, Homo sapiens
taataacattgaata

SEQ ID NO: 1133966 - DNA, 15 bp, Homo sapiens
ataataacattgaat

SEQ ID NO: 1133967 - DNA, 15 bp, Homo sapiens
aataataacattgaa

SEQ ID NO: 1133968 - DNA, 15 bp, Homo sapiens
caataataacattga

SEQ ID NO: 1133969 - DNA, 15 bp, Homo sapiens
tcaataataacattg

SEQ ID NO: 1133970 - DNA, 15 bp, Homo sapiens
atcaataataacatt

SEQ ID NO: 1133971 - DNA, 15 bp, Homo sapiens
tatcaataataacat

SEQ ID NO: 1133972 - DNA, 15 bp, Homo sapiens
ttatcaataataaca

SEQ ID NO: 1133973 - DNA, 15 bp, Homo sapiens
cttatcaataataac

SEQ ID NO: 1133974 - DNA, 15 bp, Homo sapiens
acttatcaataataa

SEQ ID NO: 1133975 - DNA, 15 bp, Homo sapiens
tacttatcaataata

SEQ ID NO: 1133976 - DNA, 15 bp, Homo sapiens
ttacttatcaataat

SEQ ID NO: 1133977 - DNA, 15 bp, Homo sapiens
tttacttatcaataa

SEQ ID NO: 1133978 - DNA, 15 bp, Homo sapiens
ctttacttatcaata

SEQ ID NO: 1133979 - DNA, 15 bp, Homo sapiens
tctttacttatcaat

SEQ ID NO: 1133980 - DNA, 15 bp, Homo sapiens
gtctttacttatcaa

SEQ ID NO: 1133981 - DNA, 15 bp, Homo sapiens
agtctttacttatca

SEQ ID NO: 1133982 - DNA, 15 bp, Homo sapiens
aagtctttacttatc

SEQ ID NO: 1133983 - DNA, 15 bp, Homo sapiens
taagtctttacttat

SEQ ID NO: 1133984 - DNA, 15 bp, Homo sapiens
gtaagtctttactta

SEQ ID NO: 1133985 - DNA, 15 bp, Homo sapiens
agtaagtctttactt

SEQ ID NO: 1133986 - DNA, 15 bp, Homo sapiens
gagtaagtctttact

SEQ ID NO: 1133987 - DNA, 15 bp, Homo sapiens
ggagtaagtctttac

SEQ ID NO: 1133988 - DNA, 15 bp, Homo sapiens
aggagtaagtcttta

SEQ ID NO: 1133989 - DNA, 15 bp, Homo sapiens
caggagtaagtcttt

SEQ ID NO: 1133990 - DNA, 15 bp, Homo sapiens
gcaggagtaagtctt

SEQ ID NO: 1133991 - DNA, 15 bp, Homo sapiens
ggcaggagtaagtct

SEQ ID NO: 1133992 - DNA, 15 bp, Homo sapiens
tggcaggagtaagtc

SEQ ID NO: 1133993 - DNA, 15 bp, Homo sapiens
atggcaggagtaagt

SEQ ID NO: 1133994 - DNA, 15 bp, Homo sapiens
aatggcaggagtaag

SEQ ID NO: 1133995 - DNA, 15 bp, Homo sapiens
aaatggcaggagtaa

SEQ ID NO: 1133996 - DNA, 15 bp, Homo sapiens
aaaatggcaggagta

SEQ ID NO: 1133997 - DNA, 15 bp, Homo sapiens
taaaatggcaggagt

SEQ ID NO: 1133998 - DNA, 15 bp, Homo sapiens
ataaaatggcaggag

SEQ ID NO: 1133999 - DNA, 15 bp, Homo sapiens
aataaaatggcagga

SEQ ID NO: 1134000 - DNA, 15 bp, Homo sapiens
taataaaatggcagg

SEQ ID NO: 1134001 - DNA, 15 bp, Homo sapiens
ataataaaatggcag

SEQ ID NO: 1134002 - DNA, 15 bp, Homo sapiens
aataataaaatggca

SEQ ID NO: 1134003 - DNA, 15 bp, Homo sapiens
aaataataaaatggc

SEQ ID NO: 1134004 - DNA, 15 bp, Homo sapiens
caaataataaaatgg

SEQ ID NO: 1134005 - DNA, 15 bp, Homo sapiens
acaaataataaaatg

SEQ ID NO: 1134006 - DNA, 15 bp, Homo sapiens
aacaaataataaaat

SEQ ID NO: 1134007 - DNA, 15 bp, Homo sapiens
aaacaaataataaaa

SEQ ID NO: 1134008 - DNA, 15 bp, Homo sapiens
aaaacaaataataaa

SEQ ID NO: 1134009 - DNA, 15 bp, Homo sapiens
gaaaacaaataataa

SEQ ID NO: 1134010 - DNA, 15 bp, Homo sapiens
agaaaacaaataata

SEQ ID NO: 1134011 - DNA, 15 bp, Homo sapiens
cagaaaacaaataat

SEQ ID NO: 1134012 - DNA, 15 bp, Homo sapiens
ccagaaaacaaataa

SEQ ID NO: 1134013 - DNA, 15 bp, Homo sapiens
accagaaaacaaata

SEQ ID NO: 1134014 - DNA, 15 bp, Homo sapiens
aaccagaaaacaaat

SEQ ID NO: 1134015 - DNA, 15 bp, Homo sapiens
caaccagaaaacaaa

SEQ ID NO: 1134016 - DNA, 15 bp, Homo sapiens
acaaccagaaaacaa

SEQ ID NO: 1134017 - DNA, 15 bp, Homo sapiens
aacaaccagaaaaca

SEQ ID NO: 1134018 - DNA, 15 bp, Homo sapiens
aaacaaccagaaaac

SEQ ID NO: 1134019 - DNA, 15 bp, Homo sapiens
aaaacaaccagaaaa

SEQ ID NO: 1134020 - DNA, 15 bp, Homo sapiens
caaaacaaccagaaa

SEQ ID NO: 1134021 - DNA, 15 bp, Homo sapiens
acaaaacaaccagaa

SEQ ID NO: 1134022 - DNA, 15 bp, Homo sapiens
cacaaaacaaccaga

SEQ ID NO: 1134023 - DNA, 15 bp, Homo sapiens
tcacaaaacaaccag

SEQ ID NO: 1134024 - DNA, 15 bp, Homo sapiens
atcacaaaacaacca

SEQ ID NO: 1134025 - DNA, 15 bp, Homo sapiens
gatcacaaaacaacc

SEQ ID NO: 1134026 - DNA, 15 bp, Homo sapiens
agatcacaaaacaac

SEQ ID NO: 1134027 - DNA, 15 bp, Homo sapiens
aagatcacaaaacaa

SEQ ID NO: 1134028 - DNA, 15 bp, Homo sapiens
gaagatcacaaaaca

SEQ ID NO: 1134029 - DNA, 15 bp, Homo sapiens
agaagatcacaaaac

SEQ ID NO: 1134030 - DNA, 15 bp, Homo sapiens
gagaagatcacaaaa

SEQ ID NO: 1134031 - DNA, 15 bp, Homo sapiens
agagaagatcacaaa

SEQ ID NO: 1134032 - DNA, 15 bp, Homo sapiens
tagagaagatcacaa

SEQ ID NO: 1134033 - DNA, 15 bp, Homo sapiens
atagagaagatcaca

SEQ ID NO: 1134034 - DNA, 15 bp, Homo sapiens
aatagagaagatcac

SEQ ID NO: 1134035 - DNA, 15 bp, Homo sapiens
aaatagagaagatca

SEQ ID NO: 1134036 - DNA, 15 bp, Homo sapiens
aaaatagagaagatc

SEQ ID NO: 1134037 - DNA, 15 bp, Homo sapiens
gaaaatagagaagat

SEQ ID NO: 1134038 - DNA, 15 bp, Homo sapiens
agaaaatagagaaga

SEQ ID NO: 1134039 - DNA, 15 bp, Homo sapiens
aagaaaatagagaag

SEQ ID NO: 1134040 - DNA, 15 bp, Homo sapiens
aaagaaaatagagaa

SEQ ID NO: 1134041 - DNA, 15 bp, Homo sapiens
gaaagaaaatagaga

SEQ ID NO: 1134042 - DNA, 15 bp, Homo sapiens
ggaaagaaaatagag

SEQ ID NO: 1134043 - DNA, 15 bp, Homo sapiens
aggaaagaaaataga

SEQ ID NO: 1134044 - DNA, 15 bp, Homo sapiens
caggaaagaaaatag

SEQ ID NO: 1134045 - DNA, 15 bp, Homo sapiens
acaggaaagaaaata

SEQ ID NO: 1134046 - DNA, 15 bp, Homo sapiens
gacaggaaagaaaat

SEQ ID NO: 1134047 - DNA, 15 bp, Homo sapiens
agacaggaaagaaaa

SEQ ID NO: 1134048 - DNA, 15 bp, Homo sapiens
aagacaggaaagaaa

SEQ ID NO: 1134049 - DNA, 15 bp, Homo sapiens
gaagacaggaaagaa

SEQ ID NO: 1134050 - DNA, 15 bp, Homo sapiens
ggaagacaggaaaga

SEQ ID NO: 1134051 - DNA, 15 bp, Homo sapiens
aggaagacaggaaag

SEQ ID NO: 1134052 - DNA, 15 bp, Homo sapiens
aaggaagacaggaaa

SEQ ID NO: 1134053 - DNA, 15 bp, Homo sapiens
aaaggaagacaggaa

SEQ ID NO: 1134054 - DNA, 15 bp, Homo sapiens
aaaaggaagacagga

SEQ ID NO: 1134055 - DNA, 15 bp, Homo sapiens
taaaaggaagacagg

SEQ ID NO: 1134056 - DNA, 15 bp, Homo sapiens
ctaaaaggaagacag

SEQ ID NO: 1134057 - DNA, 15 bp, Homo sapiens
actaaaaggaagaca

SEQ ID NO: 1134058 - DNA, 15 bp, Homo sapiens
cactaaaaggaagac

SEQ ID NO: 1134059 - DNA, 15 bp, Homo sapiens
tcactaaaaggaaga

SEQ ID NO: 1134060 - DNA, 15 bp, Homo sapiens
ttcactaaaaggaag

SEQ ID NO: 1134061 - DNA, 15 bp, Homo sapiens
cttcactaaaaggaa

SEQ ID NO: 1134062 - DNA, 15 bp, Homo sapiens
ccttcactaaaagga

SEQ ID NO: 1134063 - DNA, 15 bp, Homo sapiens
accttcactaaaagg

SEQ ID NO: 1134064 - DNA, 15 bp, Homo sapiens
taccttcactaaaag

SEQ ID NO: 1134065 - DNA, 15 bp, Homo sapiens
ctaccttcactaaaa

SEQ ID NO: 1134066 - DNA, 15 bp, Homo sapiens
actaccttcactaaa

SEQ ID NO: 1134067 - DNA, 15 bp, Homo sapiens
aactaccttcactaa

SEQ ID NO: 1134068 - DNA, 15 bp, Homo sapiens
aaactaccttcacta

SEQ ID NO: 1134069 - DNA, 15 bp, Homo sapiens
gaaactaccttcact

SEQ ID NO: 1134070 - DNA, 15 bp, Homo sapiens
agaaactaccttcac

SEQ ID NO: 1134071 - DNA, 15 bp, Homo sapiens
gagaaactaccttca

SEQ ID NO: 1134072 - DNA, 15 bp, Homo sapiens
agagaaactaccttc

SEQ ID NO: 1134073 - DNA, 15 bp, Homo sapiens
cagagaaactacctt

SEQ ID NO: 1134074 - DNA, 15 bp, Homo sapiens
tcagagaaactacct

SEQ ID NO: 1134075 - DNA, 15 bp, Homo sapiens
ttcagagaaactacc

SEQ ID NO: 1134076 - DNA, 15 bp, Homo sapiens
cttcagagaaactac

SEQ ID NO: 1134077 - DNA, 15 bp, Homo sapiens
ccttcagagaaacta

SEQ ID NO: 1134078 - DNA, 15 bp, Homo sapiens
accttcagagaaact

SEQ ID NO: 1134079 - DNA, 15 bp, Homo sapiens
taccttcagagaaac

SEQ ID NO: 1134080 - DNA, 15 bp, Homo sapiens
ataccttcagagaaa

SEQ ID NO: 1134081 - DNA, 15 bp, Homo sapiens
cataccttcagagaa

SEQ ID NO: 1134082 - DNA, 15 bp, Homo sapiens
acataccttcagaga

SEQ ID NO: 1134083 - DNA, 15 bp, Homo sapiens
aacataccttcagag

SEQ ID NO: 1134084 - DNA, 15 bp, Homo sapiens
aaacataccttcaga

SEQ ID NO: 1134085 - DNA, 15 bp, Homo sapiens
aaaacataccttcag

SEQ ID NO: 1134086 - DNA, 15 bp, Homo sapiens
taaaacataccttca

SEQ ID NO: 1134087 - DNA, 15 bp, Homo sapiens
ttaaaacataccttc

SEQ ID NO: 1134088 - DNA, 15 bp, Homo sapiens
attaaaacatacctt

SEQ ID NO: 1134089 - DNA, 15 bp, Homo sapiens
aattaaaacatacct

SEQ ID NO: 1134090 - DNA, 15 bp, Homo sapiens
aaattaaaacatacc

SEQ ID NO: 1134091 - DNA, 15 bp, Homo sapiens
gaaattaaaacatac

SEQ ID NO: 1134092 - DNA, 15 bp, Homo sapiens
agaaattaaaacata

SEQ ID NO: 1134093 - DNA, 15 bp, Homo sapiens
aagaaattaaaacat

SEQ ID NO: 1134094 - DNA, 15 bp, Homo sapiens
caagaaattaaaaca

SEQ ID NO: 1134095 - DNA, 15 bp, Homo sapiens
gcaagaaattaaaac

SEQ ID NO: 1134096 - DNA, 15 bp, Homo sapiens
agcaagaaattaaaa

SEQ ID NO: 1134097 - DNA, 15 bp, Homo sapiens
aagcaagaaattaaa

SEQ ID NO: 1134098 - DNA, 15 bp, Homo sapiens
aaagcaagaaattaa

SEQ ID NO: 1134099 - DNA, 15 bp, Homo sapiens
taaagcaagaaatta

SEQ ID NO: 1134100 - DNA, 15 bp, Homo sapiens
ataaagcaagaaatt

SEQ ID NO: 1134101 - DNA, 15 bp, Homo sapiens
tataaagcaagaaat

SEQ ID NO: 1134102 - DNA, 15 bp, Homo sapiens
atataaagcaagaaa

SEQ ID NO: 1134103 - DNA, 15 bp, Homo sapiens
gatataaagcaagaa

SEQ ID NO: 1134104 - DNA, 15 bp, Homo sapiens
agatataaagcaaga

SEQ ID NO: 1134105 - DNA, 15 bp, Homo sapiens
aagatataaagcaag

SEQ ID NO: 1134106 - DNA, 15 bp, Homo sapiens
aaagatataaagcaa

SEQ ID NO: 1134107 - DNA, 15 bp, Homo sapiens
aaaagatataaagca

SEQ ID NO: 1134108 - DNA, 15 bp, Homo sapiens
caaaagatataaagc

SEQ ID NO: 1134109 - DNA, 15 bp, Homo sapiens
acaaaagatataaag

SEQ ID NO: 1134110 - DNA, 15 bp, Homo sapiens
cacaaaagatataaa

SEQ ID NO: 1134111 - DNA, 15 bp, Homo sapiens
acacaaaagatataa

SEQ ID NO: 1134112 - DNA, 15 bp, Homo sapiens
tacacaaaagatata

SEQ ID NO: 1134113 - DNA, 15 bp, Homo sapiens
ttacacaaaagatat

SEQ ID NO: 1134114 - DNA, 15 bp, Homo sapiens
gttacacaaaagata

SEQ ID NO: 1134115 - DNA, 15 bp, Homo sapiens
agttacacaaaagat

SEQ ID NO: 1134116 - DNA, 15 bp, Homo sapiens
cagttacacaaaaga

SEQ ID NO: 1134117 - DNA, 15 bp, Homo sapiens
acagttacacaaaag

SEQ ID NO: 1134118 - DNA, 15 bp, Homo sapiens
aacagttacacaaaa

SEQ ID NO: 1134119 - DNA, 15 bp, Homo sapiens
caacagttacacaaa

SEQ ID NO: 1134120 - DNA, 15 bp, Homo sapiens
acaacagttacacaa

SEQ ID NO: 1134121 - DNA, 15 bp, Homo sapiens
tacaacagttacaca

SEQ ID NO: 1134122 - DNA, 15 bp, Homo sapiens
ctacaacagttacac

SEQ ID NO: 1134123 - DNA, 15 bp, Homo sapiens
cctacaacagttaca

SEQ ID NO: 1134124 - DNA, 15 bp, Homo sapiens
acctacaacagttac

SEQ ID NO: 1134125 - DNA, 15 bp, Homo sapiens
aacctacaacagtta

SEQ ID NO: 1134126 - DNA, 15 bp, Homo sapiens
aaacctacaacagtt

SEQ ID NO: 1134127 - DNA, 15 bp, Homo sapiens
caaacctacaacagt

SEQ ID NO: 1134128 - DNA, 15 bp, Homo sapiens
acaaacctacaacag

SEQ ID NO: 1134129 - DNA, 15 bp, Homo sapiens
aacaaacctacaaca

SEQ ID NO: 1134130 - DNA, 15 bp, Homo sapiens
caacaaacctacaac

SEQ ID NO: 1134131 - DNA, 15 bp, Homo sapiens
tcaacaaacctacaa

SEQ ID NO: 1134132 - DNA, 15 bp, Homo sapiens
atcaacaaacctaca

SEQ ID NO: 1134133 - DNA, 15 bp, Homo sapiens
aatcaacaaacctac

SEQ ID NO: 1134134 - DNA, 15 bp, Homo sapiens
aaatcaacaaaccta

SEQ ID NO: 1134135 - DNA, 15 bp, Homo sapiens
caaatcaacaaacct

SEQ ID NO: 1134136 - DNA, 15 bp, Homo sapiens
tcaaatcaacaaacc

SEQ ID NO: 1134137 - DNA, 15 bp, Homo sapiens
ctcaaatcaacaaac

SEQ ID NO: 1134138 - DNA, 15 bp, Homo sapiens
cctcaaatcaacaaa

SEQ ID NO: 1134139 - DNA, 15 bp, Homo sapiens
acctcaaatcaacaa

SEQ ID NO: 1134140 - DNA, 15 bp, Homo sapiens
aacctcaaatcaaca

SEQ ID NO: 1134141 - DNA, 15 bp, Homo sapiens
taacctcaaatcaac

SEQ ID NO: 1134142 - DNA, 15 bp, Homo sapiens
gtaacctcaaatcaa

SEQ ID NO: 1134143 - DNA, 15 bp, Homo sapiens
agtaacctcaaatca

SEQ ID NO: 1134144 - DNA, 15 bp, Homo sapiens
gagtaacctcaaatc

SEQ ID NO: 1134145 - DNA, 15 bp, Homo sapiens
agagtaacctcaaat

SEQ ID NO: 1134146 - DNA, 15 bp, Homo sapiens
cagagtaacctcaaa

SEQ ID NO: 1134147 - DNA, 15 bp, Homo sapiens
ccagagtaacctcaa

SEQ ID NO: 1134148 - DNA, 15 bp, Homo sapiens
cccagagtaacctca

SEQ ID NO: 1134149 - DNA, 15 bp, Homo sapiens
ccccagagtaacctc

SEQ ID NO: 1134150 - DNA, 15 bp, Homo sapiens
gccccagagtaacct

SEQ ID NO: 1134151 - DNA, 15 bp, Homo sapiens
agccccagagtaacc

SEQ ID NO: 1134152 - DNA, 15 bp, Homo sapiens
aagccccagagtaac

SEQ ID NO: 1134153 - DNA, 15 bp, Homo sapiens
caagccccagagtaa

SEQ ID NO: 1134154 - DNA, 15 bp, Homo sapiens
acaagccccagagta

SEQ ID NO: 1134155 - DNA, 15 bp, Homo sapiens
tacaagccccagagt

SEQ ID NO: 1134156 - DNA, 15 bp, Homo sapiens
ttacaagccccagag

SEQ ID NO: 1134157 - DNA, 15 bp, Homo sapiens
tttacaagccccaga

SEQ ID NO: 1134158 - DNA, 15 bp, Homo sapiens
atttacaagccccag

SEQ ID NO: 1134159 - DNA, 15 bp, Homo sapiens
tatttacaagcccca

SEQ ID NO: 1134160 - DNA, 15 bp, Homo sapiens
gtatttacaagcccc

SEQ ID NO: 1134161 - DNA, 15 bp, Homo sapiens
agtatttacaagccc

SEQ ID NO: 1134162 - DNA, 15 bp, Homo sapiens
tagtatttacaagcc

SEQ ID NO: 1134163 - DNA, 15 bp, Homo sapiens
atagtatttacaagc

SEQ ID NO: 1134164 - DNA, 15 bp, Homo sapiens
gatagtatttacaag

SEQ ID NO: 1134165 - DNA, 15 bp, Homo sapiens
agatagtatttacaa

SEQ ID NO: 1134166 - DNA, 15 bp, Homo sapiens
aagatagtatttaca

SEQ ID NO: 1134167 - DNA, 15 bp, Homo sapiens
taagatagtatttac

SEQ ID NO: 1134168 - DNA, 15 bp, Homo sapiens
ataagatagtattta

SEQ ID NO: 1134169 - DNA, 15 bp, Homo sapiens
tataagatagtattt

SEQ ID NO: 1134170 - DNA, 15 bp, Homo sapiens
ttataagatagtatt

SEQ ID NO: 1134171 - DNA, 15 bp, Homo sapiens
gttataagatagtat

SEQ ID NO: 1134172 - DNA, 15 bp, Homo sapiens
agttataagatagta

SEQ ID NO: 1134173 - DNA, 15 bp, Homo sapiens
cagttataagatagt

SEQ ID NO: 1134174 - DNA, 15 bp, Homo sapiens
tcagttataagatag

SEQ ID NO: 1134175 - DNA, 15 bp, Homo sapiens
atcagttataagata

SEQ ID NO: 1134176 - DNA, 15 bp, Homo sapiens
aatcagttataagat

SEQ ID NO: 1134177 - DNA, 15 bp, Homo sapiens
taatcagttataaga

SEQ ID NO: 1134178 - DNA, 15 bp, Homo sapiens
ataatcagttataag

SEQ ID NO: 1134179 - DNA, 15 bp, Homo sapiens
aataatcagttataa

SEQ ID NO: 1134180 - DNA, 15 bp, Homo sapiens
aaataatcagttata

SEQ ID NO: 1134181 - DNA, 15 bp, Homo sapiens
aaaataatcagttat

SEQ ID NO: 1134182 - DNA, 15 bp, Homo sapiens
taaaataatcagtta

SEQ ID NO: 1134183 - DNA, 15 bp, Homo sapiens
ttaaaataatcagtt

SEQ ID NO: 1134184 - DNA, 15 bp, Homo sapiens
cttaaaataatcagt

SEQ ID NO: 1134185 - DNA, 15 bp, Homo sapiens
gcttaaaataatcag

SEQ ID NO: 1134186 - DNA, 15 bp, Homo sapiens
agcttaaaataatca

SEQ ID NO: 1134187 - DNA, 15 bp, Homo sapiens
cagcttaaaataatc

SEQ ID NO: 1134188 - DNA, 15 bp, Homo sapiens
tcagcttaaaataat

SEQ ID NO: 1134189 - DNA, 15 bp, Homo sapiens
atcagcttaaaataa

SEQ ID NO: 1134190 - DNA, 15 bp, Homo sapiens
tatcagcttaaaata

SEQ ID NO: 1134191 - DNA, 15 bp, Homo sapiens
ttatcagcttaaaat

SEQ ID NO: 1134192 - DNA, 15 bp, Homo sapiens
gttatcagcttaaaa

SEQ ID NO: 1134193 - DNA, 15 bp, Homo sapiens
tgttatcagcttaaa

SEQ ID NO: 1134194 - DNA, 15 bp, Homo sapiens
ttgttatcagcttaa

SEQ ID NO: 1134195 - DNA, 15 bp, Homo sapiens
gttgttatcagctta

SEQ ID NO: 1134196 - DNA, 15 bp, Homo sapiens
agttgttatcagctt

SEQ ID NO: 1134197 - DNA, 15 bp, Homo sapiens
aagttgttatcagct

SEQ ID NO: 1134198 - DNA, 15 bp, Homo sapiens
taagttgttatcagc

SEQ ID NO: 1134199 - DNA, 15 bp, Homo sapiens
ttaagttgttatcag

SEQ ID NO: 1134200 - DNA, 15 bp, Homo sapiens
gttaagttgttatca

SEQ ID NO: 1134201 - DNA, 15 bp, Homo sapiens
tgttaagttgttatc

SEQ ID NO: 1134202 - DNA, 15 bp, Homo sapiens
gtgttaagttgttat

SEQ ID NO: 1134203 - DNA, 15 bp, Homo sapiens
agtgttaagttgtta

SEQ ID NO: 1134204 - DNA, 15 bp, Homo sapiens
cagtgttaagttgtt

SEQ ID NO: 1134205 - DNA, 15 bp, Homo sapiens
acagtgttaagttgt

SEQ ID NO: 1134206 - DNA, 15 bp, Homo sapiens
aacagtgttaagttg

SEQ ID NO: 1134207 - DNA, 15 bp, Homo sapiens
aaacagtgttaagtt

SEQ ID NO: 1134208 - DNA, 15 bp, Homo sapiens
caaacagtgttaagt

SEQ ID NO: 1134209 - DNA, 15 bp, Homo sapiens
gcaaacagtgttaag

SEQ ID NO: 1134210 - DNA, 15 bp, Homo sapiens
tgcaaacagtgttaa

SEQ ID NO: 1134211 - DNA, 15 bp, Homo sapiens
gtgcaaacagtgtta

SEQ ID NO: 1134212 - DNA, 15 bp, Homo sapiens
tgtgcaaacagtgtt

SEQ ID NO: 1134213 - DNA, 15 bp, Homo sapiens
ttgtgcaaacagtgt

SEQ ID NO: 1134214 - DNA, 15 bp, Homo sapiens
tttgtgcaaacagtg

SEQ ID NO: 1134215 - DNA, 15 bp, Homo sapiens
gtttgtgcaaacagt

SEQ ID NO: 1134216 - DNA, 15 bp, Homo sapiens
tgtttgtgcaaacag

SEQ ID NO: 1134217 - DNA, 15 bp, Homo sapiens
ttgtttgtgcaaaca

SEQ ID NO: 1134218 - DNA, 15 bp, Homo sapiens
tttgtttgtgcaaac

SEQ ID NO: 1134219 - DNA, 15 bp, Homo sapiens
gtttgtttgtgcaaa

SEQ ID NO: 1134220 - DNA, 15 bp, Homo sapiens
tgtttgtttgtgcaa

SEQ ID NO: 1134221 - DNA, 15 bp, Homo sapiens
ttgtttgtttgtgca

SEQ ID NO: 1134222 - DNA, 15 bp, Homo sapiens
cttgtttgtttgtgc

SEQ ID NO: 1134223 - DNA, 15 bp, Homo sapiens
gcttgtttgtttgtg

SEQ ID NO: 1134224 - DNA, 15 bp, Homo sapiens
tgcttgtttgtttgt

SEQ ID NO: 1134225 - DNA, 15 bp, Homo sapiens
tttttgcttgtttgt

SEQ ID NO: 1134226 - DNA, 15 bp, Homo sapiens
ctttttgcttgtttg

SEQ ID NO: 1134227 - DNA, 15 bp, Homo sapiens
tctttttgcttgttt

SEQ ID NO: 1134228 - DNA, 15 bp, Homo sapiens
ttctttttgcttgtt

SEQ ID NO: 1134229 - DNA, 15 bp, Homo sapiens
tttctttttgcttgt

SEQ ID NO: 1134230 - DNA, 15 bp, Homo sapiens
ttttctttttgcttg

SEQ ID NO: 1134231 - DNA, 15 bp, Homo sapiens
gttttctttttgctt

SEQ ID NO: 1134232 - DNA, 15 bp, Homo sapiens
agttttctttttgct

SEQ ID NO: 1134233 - DNA, 15 bp, Homo sapiens
cagttttctttttgc

SEQ ID NO: 1134234 - DNA, 15 bp, Homo sapiens
tcagttttctttttg

SEQ ID NO: 1134235 - DNA, 15 bp, Homo sapiens
ttcagttttcttttt

SEQ ID NO: 1134236 - DNA, 15 bp, Homo sapiens
tttcagttttctttt

SEQ ID NO: 1134237 - DNA, 15 bp, Homo sapiens
ttttcagttttcttt

SEQ ID NO: 1134238 - DNA, 15 bp, Homo sapiens
tttttcagttttctt

SEQ ID NO: 1134239 - DNA, 15 bp, Homo sapiens
ttttttcagttttct

SEQ ID NO: 1134240 - DNA, 15 bp, Homo sapiens
gttttttcagttttc

SEQ ID NO: 1134241 - DNA, 15 bp, Homo sapiens
ggttttttcagtttt

SEQ ID NO: 1134242 - DNA, 15 bp, Homo sapiens
aggttttttcagttt

SEQ ID NO: 1134243 - DNA, 15 bp, Homo sapiens
aaggttttttcagtt

SEQ ID NO: 1134244 - DNA, 15 bp, Homo sapiens
aaaggttttttcagt

SEQ ID NO: 1134245 - DNA, 15 bp, Homo sapiens
taaaggttttttcag

SEQ ID NO: 1134246 - DNA, 15 bp, Homo sapiens
gtaaaggttttttca

SEQ ID NO: 1134247 - DNA, 15 bp, Homo sapiens
tgtaaaggttttttc

SEQ ID NO: 1134248 - DNA, 15 bp, Homo sapiens
gtgtaaaggtttttt

SEQ ID NO: 1134249 - DNA, 15 bp, Homo sapiens
ggtgtaaaggttttt

SEQ ID NO: 1134250 - DNA, 15 bp, Homo sapiens
aggtgtaaaggtttt

SEQ ID NO: 1134251 - DNA, 15 bp, Homo sapiens
aaggtgtaaaggttt

SEQ ID NO: 1134252 - DNA, 15 bp, Homo sapiens
taaggtgtaaaggtt

SEQ ID NO: 1134253 - DNA, 15 bp, Homo sapiens
ttaaggtgtaaaggt

SEQ ID NO: 1134254 - DNA, 15 bp, Homo sapiens
tttaaggtgtaaagg

SEQ ID NO: 1134255 - DNA, 15 bp, Homo sapiens
gtttaaggtgtaaag

SEQ ID NO: 1134256 - DNA, 15 bp, Homo sapiens
agtttaaggtgtaaa

SEQ ID NO: 1134257 - DNA, 15 bp, Homo sapiens
gagtttaaggtgtaa

SEQ ID NO: 1134258 - DNA, 15 bp, Homo sapiens
tgagtttaaggtgta

SEQ ID NO: 1134259 - DNA, 15 bp, Homo sapiens
atgagtttaaggtgt

SEQ ID NO: 1134260 - DNA, 15 bp, Homo sapiens
aatgagtttaaggtg

SEQ ID NO: 1134261 - DNA, 15 bp, Homo sapiens
gaatgagtttaaggt

SEQ ID NO: 1134262 - DNA, 15 bp, Homo sapiens
agaatgagtttaagg

SEQ ID NO: 1134263 - DNA, 15 bp, Homo sapiens
gagaatgagtttaag

SEQ ID NO: 1134264 - DNA, 15 bp, Homo sapiens
agagaatgagtttaa

SEQ ID NO: 1134265 - DNA, 15 bp, Homo sapiens
cagagaatgagttta

SEQ ID NO: 1134266 - DNA, 15 bp, Homo sapiens
gcagagaatgagttt

SEQ ID NO: 1134267 - DNA, 15 bp, Homo sapiens
agcagagaatgagtt

SEQ ID NO: 1134268 - DNA, 15 bp, Homo sapiens
aagcagagaatgagt

SEQ ID NO: 1134269 - DNA, 15 bp, Homo sapiens
aaagcagagaatgag

SEQ ID NO: 1134270 - DNA, 15 bp, Homo sapiens
aaaagcagagaatga

SEQ ID NO: 1134271 - DNA, 15 bp, Homo sapiens
taaaagcagagaatg

SEQ ID NO: 1134272 - DNA, 15 bp, Homo sapiens
ttaaaagcagagaat

SEQ ID NO: 1134273 - DNA, 15 bp, Homo sapiens
tttaaaagcagagaa

SEQ ID NO: 1134274 - DNA, 15 bp, Homo sapiens
atttaaaagcagaga

SEQ ID NO: 1134275 - DNA, 15 bp, Homo sapiens
aatttaaaagcagag

SEQ ID NO: 1134276 - DNA, 15 bp, Homo sapiens
aaatttaaaagcaga

SEQ ID NO: 1134277 - DNA, 15 bp, Homo sapiens
aaaatttaaaagcag

SEQ ID NO: 1134278 - DNA, 15 bp, Homo sapiens
aaaaatttaaaagca

SEQ ID NO: 1134279 - DNA, 15 bp, Homo sapiens
taaaaaatttaaaag

SEQ ID NO: 1134280 - DNA, 15 bp, Homo sapiens
ataaaaaatttaaaa

SEQ ID NO: 1134281 - DNA, 15 bp, Homo sapiens
caataaaaaatttaa

SEQ ID NO: 1134282 - DNA, 15 bp, Homo sapiens
acaataaaaaattta

SEQ ID NO: 1134283 - DNA, 15 bp, Homo sapiens
aaacaataaaaaatt

SEQ ID NO: 1134284 - DNA, 15 bp, Homo sapiens
gaaacaataaaaaat

SEQ ID NO: 1134285 - DNA, 15 bp, Homo sapiens
aatagaaacaataaa

SEQ ID NO: 1134286 - DNA, 15 bp, Homo sapiens
aaatagaaacaataa

SEQ ID NO: 1134287 - DNA, 15 bp, Homo sapiens
taaatagaaacaata

SEQ ID NO: 1134288 - DNA, 15 bp, Homo sapiens
ataaatagaaacaat

SEQ ID NO: 1134289 - DNA, 15 bp, Homo sapiens
tataaatagaaacaa

SEQ ID NO: 1134290 - DNA, 15 bp, Homo sapiens
gtataaatagaaaca

SEQ ID NO: 1134291 - DNA, 15 bp, Homo sapiens
cgtataaatagaaac

SEQ ID NO: 1134292 - DNA, 15 bp, Homo sapiens
acgtataaatagaaa

SEQ ID NO: 1134293 - DNA, 15 bp, Homo sapiens
aacgtataaatagaa

SEQ ID NO: 1134294 - DNA, 15 bp, Homo sapiens
taacgtataaataga

SEQ ID NO: 1134295 - DNA, 15 bp, Homo sapiens
ataacgtataaatag

SEQ ID NO: 1134296 - DNA, 15 bp, Homo sapiens
aataacgtataaata

SEQ ID NO: 1134297 - DNA, 15 bp, Homo sapiens
caataacgtataaat

SEQ ID NO: 1134298 - DNA, 15 bp, Homo sapiens
acaataacgtataaa

SEQ ID NO: 1134299 - DNA, 15 bp, Homo sapiens
cacaataacgtataa

SEQ ID NO: 1134300 - DNA, 15 bp, Homo sapiens
gcacaataacgtata

SEQ ID NO: 1134301 - DNA, 15 bp, Homo sapiens
agcacaataacgtat

SEQ ID NO: 1134302 - DNA, 15 bp, Homo sapiens
cagcacaataacgta

SEQ ID NO: 1134303 - DNA, 15 bp, Homo sapiens
gcagcacaataacgt

SEQ ID NO: 1134304 - DNA, 15 bp, Homo sapiens
ggcagcacaataacg

SEQ ID NO: 1134305 - DNA, 15 bp, Homo sapiens
aggcagcacaataac

SEQ ID NO: 1134306 - DNA, 15 bp, Homo sapiens
taggcagcacaataa

SEQ ID NO: 1134307 - DNA, 15 bp, Homo sapiens
ataggcagcacaata

SEQ ID NO: 1134308 - DNA, 15 bp, Homo sapiens
cataggcagcacaat

SEQ ID NO: 1134309 - DNA, 15 bp, Homo sapiens
acataggcagcacaa

SEQ ID NO: 1134310 - DNA, 15 bp, Homo sapiens
gacataggcagcaca

SEQ ID NO: 1134311 - DNA, 15 bp, Homo sapiens
agacataggcagcac

SEQ ID NO: 1134312 - DNA, 15 bp, Homo sapiens
aagacataggcagca

SEQ ID NO: 1134313 - DNA, 15 bp, Homo sapiens
caagacataggcagc

SEQ ID NO: 1134314 - DNA, 15 bp, Homo sapiens
tcaagacataggcag

SEQ ID NO: 1134315 - DNA, 15 bp, Homo sapiens
ttcaagacataggca

SEQ ID NO: 1134316 - DNA, 15 bp, Homo sapiens
tttcaagacataggc

SEQ ID NO: 1134317 - DNA, 15 bp, Homo sapiens
ttttcaagacatagg

SEQ ID NO: 1134318 - DNA, 15 bp, Homo sapiens
tttttcaagacatag

SEQ ID NO: 1134319 - DNA, 15 bp, Homo sapiens
ttttttcaagacata

SEQ ID NO: 1134320 - DNA, 15 bp, Homo sapiens
cttttttcaagacat

SEQ ID NO: 1134321 - DNA, 15 bp, Homo sapiens
tcttttttcaagaca

SEQ ID NO: 1134322 - DNA, 15 bp, Homo sapiens
atcttttttcaagac

SEQ ID NO: 1134323 - DNA, 15 bp, Homo sapiens
aatcttttttcaaga

SEQ ID NO: 1134324 - DNA, 15 bp, Homo sapiens
caatcttttttcaag

SEQ ID NO: 1134325 - DNA, 15 bp, Homo sapiens
ccaatcttttttcaa

SEQ ID NO: 1134326 - DNA, 15 bp, Homo sapiens
accaatcttttttca

SEQ ID NO: 1134327 - DNA, 15 bp, Homo sapiens
aaccaatcttttttc

SEQ ID NO: 1134328 - DNA, 15 bp, Homo sapiens
gaaccaatctttttt

SEQ ID NO: 1134329 - DNA, 15 bp, Homo sapiens
tgaaccaatcttttt

SEQ ID NO: 1134330 - DNA, 15 bp, Homo sapiens
gtgaaccaatctttt

SEQ ID NO: 1134331 - DNA, 15 bp, Homo sapiens
ggtgaaccaatcttt

SEQ ID NO: 1134332 - DNA, 15 bp, Homo sapiens
aggtgaaccaatctt

SEQ ID NO: 1134333 - DNA, 15 bp, Homo sapiens
aaggtgaaccaatct

SEQ ID NO: 1134334 - DNA, 15 bp, Homo sapiens
aaaggtgaaccaatc

SEQ ID NO: 1134335 - DNA, 15 bp, Homo sapiens
aaaaggtgaaccaat

SEQ ID NO: 1134336 - DNA, 15 bp, Homo sapiens
taaaaggtgaaccaa

SEQ ID NO: 1134337 - DNA, 15 bp, Homo sapiens
ctaaaaggtgaacca

SEQ ID NO: 1134338 - DNA, 15 bp, Homo sapiens
actaaaaggtgaacc

SEQ ID NO: 1134339 - DNA, 15 bp, Homo sapiens
gactaaaaggtgaac

SEQ ID NO: 1134340 - DNA, 15 bp, Homo sapiens
agactaaaaggtgaa

SEQ ID NO: 1134341 - DNA, 15 bp, Homo sapiens
aagactaaaaggtga

SEQ ID NO: 1134342 - DNA, 15 bp, Homo sapiens
aaagactaaaaggtg

SEQ ID NO: 1134343 - DNA, 15 bp, Homo sapiens
gaaagactaaaaggt

SEQ ID NO: 1134344 - DNA, 15 bp, Homo sapiens
agaaagactaaaagg

SEQ ID NO: 1134345 - DNA, 15 bp, Homo sapiens
tagaaagactaaaag

SEQ ID NO: 1134346 - DNA, 15 bp, Homo sapiens
gtagaaagactaaaa

SEQ ID NO: 1134347 - DNA, 15 bp, Homo sapiens
agtagaaagactaaa

SEQ ID NO: 1134348 - DNA, 15 bp, Homo sapiens
aagtagaaagactaa

SEQ ID NO: 1134349 - DNA, 15 bp, Homo sapiens
taagtagaaagacta

SEQ ID NO: 1134350 - DNA, 15 bp, Homo sapiens
ttaagtagaaagact

SEQ ID NO: 1134351 - DNA, 15 bp, Homo sapiens
cttaagtagaaagac

SEQ ID NO: 1134352 - DNA, 15 bp, Homo sapiens
tcttaagtagaaaga

SEQ ID NO: 1134353 - DNA, 15 bp, Homo sapiens
atcttaagtagaaag

SEQ ID NO: 1134354 - DNA, 15 bp, Homo sapiens
tatcttaagtagaaa

SEQ ID NO: 1134355 - DNA, 15 bp, Homo sapiens
ttatcttaagtagaa

SEQ ID NO: 1134356 - DNA, 15 bp, Homo sapiens
cttatcttaagtaga

SEQ ID NO: 1134357 - DNA, 15 bp, Homo sapiens
tcttatcttaagtag

SEQ ID NO: 1134358 - DNA, 15 bp, Homo sapiens
ctcttatcttaagta

SEQ ID NO: 1134359 - DNA, 15 bp, Homo sapiens
actcttatcttaagt

SEQ ID NO: 1134360 - DNA, 15 bp, Homo sapiens
tactcttatcttaag

SEQ ID NO: 1134361 - DNA, 15 bp, Homo sapiens
ctactcttatcttaa

SEQ ID NO: 1134362 - DNA, 15 bp, Homo sapiens
actactcttatctta

SEQ ID NO: 1134363 - DNA, 15 bp, Homo sapiens
aactactcttatctt

SEQ ID NO: 1134364 - DNA, 15 bp, Homo sapiens
aaactactcttatct

SEQ ID NO: 1134365 - DNA, 15 bp, Homo sapiens
taaactactcttatc

SEQ ID NO: 1134366 - DNA, 15 bp, Homo sapiens
gtaaactactcttat

SEQ ID NO: 1134367 - DNA, 15 bp, Homo sapiens
tgtaaactactctta

SEQ ID NO: 1134368 - DNA, 15 bp, Homo sapiens
gtgtaaactactctt

SEQ ID NO: 1134369 - DNA, 15 bp, Homo sapiens
tgtgtaaactactct

SEQ ID NO: 1134370 - DNA, 15 bp, Homo sapiens
gtgtgtaaactactc

SEQ ID NO: 1134371 - DNA, 15 bp, Homo sapiens
ggtgtgtaaactact

SEQ ID NO: 1134372 - DNA, 15 bp, Homo sapiens
tggtgtgtaaactac

SEQ ID NO: 1134373 - DNA, 15 bp, Homo sapiens
gtggtgtgtaaacta

SEQ ID NO: 1134374 - DNA, 15 bp, Homo sapiens
tgtggtgtgtaaact

SEQ ID NO: 1134375 - DNA, 15 bp, Homo sapiens
ctgtggtgtgtaaac

SEQ ID NO: 1134376 - DNA, 15 bp, Homo sapiens
actgtggtgtgtaaa

SEQ ID NO: 1134377 - DNA, 15 bp, Homo sapiens
aactgtggtgtgtaa

SEQ ID NO: 1134378 - DNA, 15 bp, Homo sapiens
taactgtggtgtgta

SEQ ID NO: 1134379 - DNA, 15 bp, Homo sapiens
gtaactgtggtgtgt

SEQ ID NO: 1134380 - DNA, 15 bp, Homo sapiens
tgtaactgtggtgtg

SEQ ID NO: 1134381 - DNA, 15 bp, Homo sapiens
atgtaactgtggtgt

SEQ ID NO: 1134382 - DNA, 15 bp, Homo sapiens
aatgtaactgtggtg

SEQ ID NO: 1134383 - DNA, 15 bp, Homo sapiens
caatgtaactgtggt

SEQ ID NO: 1134384 - DNA, 15 bp, Homo sapiens
acaatgtaactgtgg

SEQ ID NO: 1134385 - DNA, 15 bp, Homo sapiens
aacaatgtaactgtg

SEQ ID NO: 1134386 - DNA, 15 bp, Homo sapiens
taacaatgtaactgt

SEQ ID NO: 1134387 - DNA, 15 bp, Homo sapiens
ttaacaatgtaactg

SEQ ID NO: 1134388 - DNA, 15 bp, Homo sapiens
tttaacaatgtaact

SEQ ID NO: 1134389 - DNA, 15 bp, Homo sapiens
ttttaacaatgtaac

SEQ ID NO: 1134390 - DNA, 15 bp, Homo sapiens
attttaacaatgtaa

SEQ ID NO: 1134391 - DNA, 15 bp, Homo sapiens
tattttaacaatgta

SEQ ID NO: 1134392 - DNA, 15 bp, Homo sapiens
ctattttaacaatgt

SEQ ID NO: 1134393 - DNA, 15 bp, Homo sapiens
actattttaacaatg

SEQ ID NO: 1134394 - DNA, 15 bp, Homo sapiens
gactattttaacaat

SEQ ID NO: 1134395 - DNA, 15 bp, Homo sapiens
agactattttaacaa

SEQ ID NO: 1134396 - DNA, 15 bp, Homo sapiens
cagactattttaaca

SEQ ID NO: 1134397 - DNA, 15 bp, Homo sapiens
acagactattttaac

SEQ ID NO: 1134398 - DNA, 15 bp, Homo sapiens
cacagactattttaa

SEQ ID NO: 1134399 - DNA, 15 bp, Homo sapiens
acacagactatttta

SEQ ID NO: 1134400 - DNA, 15 bp, Homo sapiens
aacacagactatttt

SEQ ID NO: 1134401 - DNA, 15 bp, Homo sapiens
gaacacagactattt

SEQ ID NO: 1134402 - DNA, 15 bp, Homo sapiens
agaacacagactatt

SEQ ID NO: 1134403 - DNA, 15 bp, Homo sapiens
tagaacacagactat

SEQ ID NO: 1134404 - DNA, 15 bp, Homo sapiens
atagaacacagacta

SEQ ID NO: 1134405 - DNA, 15 bp, Homo sapiens
catagaacacagact

SEQ ID NO: 1134406 - DNA, 15 bp, Homo sapiens
acatagaacacagac

SEQ ID NO: 1134407 - DNA, 15 bp, Homo sapiens
cacatagaacacaga

SEQ ID NO: 1134408 - DNA, 15 bp, Homo sapiens
gcacatagaacacag

SEQ ID NO: 1134409 - DNA, 15 bp, Homo sapiens
agcacatagaacaca

SEQ ID NO: 1134410 - DNA, 15 bp, Homo sapiens
aagcacatagaacac

SEQ ID NO: 1134411 - DNA, 15 bp, Homo sapiens
taagcacatagaaca

SEQ ID NO: 1134412 - DNA, 15 bp, Homo sapiens
ataagcacatagaac

SEQ ID NO: 1134413 - DNA, 15 bp, Homo sapiens
aataagcacatagaa

SEQ ID NO: 1134414 - DNA, 15 bp, Homo sapiens
taataagcacataga

SEQ ID NO: 1134415 - DNA, 15 bp, Homo sapiens
ataataagcacatag

SEQ ID NO: 1134416 - DNA, 15 bp, Homo sapiens
aataataagcacata

SEQ ID NO: 1134417 - DNA, 15 bp, Homo sapiens
taataataagcacat

SEQ ID NO: 1134418 - DNA, 15 bp, Homo sapiens
gtaataataagcaca

SEQ ID NO: 1134419 - DNA, 15 bp, Homo sapiens
ggtaataataagcac

SEQ ID NO: 1134420 - DNA, 15 bp, Homo sapiens
tggtaataataagca

SEQ ID NO: 1134421 - DNA, 15 bp, Homo sapiens
atggtaataataagc

SEQ ID NO: 1134422 - DNA, 15 bp, Homo sapiens
catggtaataataag

SEQ ID NO: 1134423 - DNA, 15 bp, Homo sapiens
tcatggtaataataa

SEQ ID NO: 1134424 - DNA, 15 bp, Homo sapiens
ctcatggtaataata

SEQ ID NO: 1134425 - DNA, 15 bp, Homo sapiens
actcatggtaataat

SEQ ID NO: 1134426 - DNA, 15 bp, Homo sapiens
aactcatggtaataa

SEQ ID NO: 1134427 - DNA, 15 bp, Homo sapiens
aaactcatggtaata

SEQ ID NO: 1134428 - DNA, 15 bp, Homo sapiens
aaaactcatggtaat

SEQ ID NO: 1134429 - DNA, 15 bp, Homo sapiens
caaaactcatggtaa

SEQ ID NO: 1134430 - DNA, 15 bp, Homo sapiens
acaaaactcatggta

SEQ ID NO: 1134431 - DNA, 15 bp, Homo sapiens
tacaaaactcatggt

SEQ ID NO: 1134432 - DNA, 15 bp, Homo sapiens
ctacaaaactcatgg

SEQ ID NO: 1134433 - DNA, 15 bp, Homo sapiens
gctacaaaactcatg

SEQ ID NO: 1134434 - DNA, 15 bp, Homo sapiens
agctacaaaactcat

SEQ ID NO: 1134435 - DNA, 15 bp, Homo sapiens
aagctacaaaactca

SEQ ID NO: 1134436 - DNA, 15 bp, Homo sapiens
gaagctacaaaactc

SEQ ID NO: 1134437 - DNA, 15 bp, Homo sapiens
tgaagctacaaaact

SEQ ID NO: 1134438 - DNA, 15 bp, Homo sapiens
ctgaagctacaaaac

SEQ ID NO: 1134439 - DNA, 15 bp, Homo sapiens
tctgaagctacaaaa

SEQ ID NO: 1134440 - DNA, 15 bp, Homo sapiens
atctgaagctacaaa

SEQ ID NO: 1134441 - DNA, 15 bp, Homo sapiens
catctgaagctacaa

SEQ ID NO: 1134442 - DNA, 15 bp, Homo sapiens
tcatctgaagctaca

SEQ ID NO: 1134443 - DNA, 15 bp, Homo sapiens
atcatctgaagctac

SEQ ID NO: 1134444 - DNA, 15 bp, Homo sapiens
gatcatctgaagcta

SEQ ID NO: 1134445 - DNA, 15 bp, Homo sapiens
agatcatctgaagct

SEQ ID NO: 1134446 - DNA, 15 bp, Homo sapiens
aagatcatctgaagc

SEQ ID NO: 1134447 - DNA, 15 bp, Homo sapiens
taagatcatctgaag

SEQ ID NO: 1134448 - DNA, 15 bp, Homo sapiens
gtaagatcatctgaa

SEQ ID NO: 1134449 - DNA, 15 bp, Homo sapiens
agtaagatcatctga

SEQ ID NO: 1134450 - DNA, 15 bp, Homo sapiens
cagtaagatcatctg

SEQ ID NO: 1134451 - DNA, 15 bp, Homo sapiens
gcagtaagatcatct

SEQ ID NO: 1134452 - DNA, 15 bp, Homo sapiens
agcagtaagatcatc

SEQ ID NO: 1134453 - DNA, 15 bp, Homo sapiens
gagcagtaagatcat

SEQ ID NO: 1134454 - DNA, 15 bp, Homo sapiens
tgagcagtaagatca

SEQ ID NO: 1134455 - DNA, 15 bp, Homo sapiens
atgagcagtaagatc

SEQ ID NO: 1134456 - DNA, 15 bp, Homo sapiens
aatgagcagtaagat

SEQ ID NO: 1134457 - DNA, 15 bp, Homo sapiens
taatgagcagtaaga

SEQ ID NO: 1134458 - DNA, 15 bp, Homo sapiens
ttaatgagcagtaag

SEQ ID NO: 1134459 - DNA, 15 bp, Homo sapiens
gttaatgagcagtaa

SEQ ID NO: 1134460 - DNA, 15 bp, Homo sapiens
tgttaatgagcagta

SEQ ID NO: 1134461 - DNA, 15 bp, Homo sapiens
atgttaatgagcagt

SEQ ID NO: 1134462 - DNA, 15 bp, Homo sapiens
gatgttaatgagcag

SEQ ID NO: 1134463 - DNA, 15 bp, Homo sapiens
ggatgttaatgagca

SEQ ID NO: 1134464 - DNA, 15 bp, Homo sapiens
gggatgttaatgagc

SEQ ID NO: 1134465 - DNA, 15 bp, Homo sapiens
agggatgttaatgag

SEQ ID NO: 1134466 - DNA, 15 bp, Homo sapiens
aagggatgttaatga

SEQ ID NO: 1134467 - DNA, 15 bp, Homo sapiens
aaagggatgttaatg

SEQ ID NO: 1134468 - DNA, 15 bp, Homo sapiens
gaaagggatgttaat

SEQ ID NO: 1134469 - DNA, 15 bp, Homo sapiens
agaaagggatgttaa

SEQ ID NO: 1134470 - DNA, 15 bp, Homo sapiens
aagaaagggatgtta

SEQ ID NO: 1134471 - DNA, 15 bp, Homo sapiens
aaagaaagggatgtt

SEQ ID NO: 1134472 - DNA, 15 bp, Homo sapiens
gaaagaaagggatgt

SEQ ID NO: 1134473 - DNA, 15 bp, Homo sapiens
agaaagaaagggatg

SEQ ID NO: 1134474 - DNA, 15 bp, Homo sapiens
cagaaagaaagggat

SEQ ID NO: 1134475 - DNA, 15 bp, Homo sapiens
tcagaaagaaaggga

SEQ ID NO: 1134476 - DNA, 15 bp, Homo sapiens
atcagaaagaaaggg

SEQ ID NO: 1134477 - DNA, 15 bp, Homo sapiens
aatcagaaagaaagg

SEQ ID NO: 1134478 - DNA, 15 bp, Homo sapiens
caatcagaaagaaag

SEQ ID NO: 1134479 - DNA, 15 bp, Homo sapiens
acaatcagaaagaaa

SEQ ID NO: 1134480 - DNA, 15 bp, Homo sapiens
tacaatcagaaagaa

SEQ ID NO: 1134481 - DNA, 15 bp, Homo sapiens
ctacaatcagaaaga

SEQ ID NO: 1134482 - DNA, 15 bp, Homo sapiens
actacaatcagaaag

SEQ ID NO: 1134483 - DNA, 15 bp, Homo sapiens
tactacaatcagaaa

SEQ ID NO: 1134484 - DNA, 15 bp, Homo sapiens
gtactacaatcagaa

SEQ ID NO: 1134485 - DNA, 15 bp, Homo sapiens
agtactacaatcaga

SEQ ID NO: 1134486 - DNA, 15 bp, Homo sapiens
gagtactacaatcag

SEQ ID NO: 1134487 - DNA, 15 bp, Homo sapiens
ggagtactacaatca

SEQ ID NO: 1134488 - DNA, 15 bp, Homo sapiens
gggagtactacaatc

SEQ ID NO: 1134489 - DNA, 15 bp, Homo sapiens
cgggagtactacaat

SEQ ID NO: 1134490 - DNA, 15 bp, Homo sapiens
acgggagtactacaa

SEQ ID NO: 1134491 - DNA, 15 bp, Homo sapiens
gacgggagtactaca

SEQ ID NO: 1134492 - DNA, 15 bp, Homo sapiens
tgacgggagtactac

SEQ ID NO: 1134493 - DNA, 15 bp, Homo sapiens
ctgacgggagtacta

SEQ ID NO: 1134494 - DNA, 15 bp, Homo sapiens
gctgacgggagtact

SEQ ID NO: 1134495 - DNA, 15 bp, Homo sapiens
tgctgacgggagtac

SEQ ID NO: 1134496 - DNA, 15 bp, Homo sapiens
atgctgacgggagta

SEQ ID NO: 1134497 - DNA, 15 bp, Homo sapiens
aatgctgacgggagt

SEQ ID NO: 1134498 - DNA, 15 bp, Homo sapiens
aaatgctgacgggag

SEQ ID NO: 1134499 - DNA, 15 bp, Homo sapiens
gaaatgctgacggga

SEQ ID NO: 1134500 - DNA, 15 bp, Homo sapiens
agaaatgctgacggg

SEQ ID NO: 1134501 - DNA, 15 bp, Homo sapiens
aagaaatgctgacgg

SEQ ID NO: 1134502 - DNA, 15 bp, Homo sapiens
caagaaatgctgacg

SEQ ID NO: 1134503 - DNA, 15 bp, Homo sapiens
acaagaaatgctgac

SEQ ID NO: 1134504 - DNA, 15 bp, Homo sapiens
cacaagaaatgctga

SEQ ID NO: 1134505 - DNA, 15 bp, Homo sapiens
ccacaagaaatgctg

SEQ ID NO: 1134506 - DNA, 15 bp, Homo sapiens
cccacaagaaatgct

SEQ ID NO: 1134507 - DNA, 15 bp, Homo sapiens
tcccacaagaaatgc

SEQ ID NO: 1134508 - DNA, 15 bp, Homo sapiens
gtcccacaagaaatg

SEQ ID NO: 1134509 - DNA, 15 bp, Homo sapiens
tgtcccacaagaaat

SEQ ID NO: 1134510 - DNA, 15 bp, Homo sapiens
ctgtcccacaagaaa

SEQ ID NO: 1134511 - DNA, 15 bp, Homo sapiens
tctgtcccacaagaa

SEQ ID NO: 1134512 - DNA, 15 bp, Homo sapiens
atctgtcccacaaga

SEQ ID NO: 1134513 - DNA, 15 bp, Homo sapiens
gatctgtcccacaag

SEQ ID NO: 1134514 - DNA, 15 bp, Homo sapiens
ggatctgtcccacaa

SEQ ID NO: 1134515 - DNA, 15 bp, Homo sapiens
tggatctgtcccaca

SEQ ID NO: 1134516 - DNA, 15 bp, Homo sapiens
ctggatctgtcccac

SEQ ID NO: 1134517 - DNA, 15 bp, Homo sapiens
actggatctgtccca

SEQ ID NO: 1134518 - DNA, 15 bp, Homo sapiens
cactggatctgtccc

SEQ ID NO: 1134519 - DNA, 15 bp, Homo sapiens
acactggatctgtcc

SEQ ID NO: 1134520 - DNA, 15 bp, Homo sapiens
aacactggatctgtc

SEQ ID NO: 1134521 - DNA, 15 bp, Homo sapiens
caacactggatctgt

SEQ ID NO: 1134522 - DNA, 15 bp, Homo sapiens
tcaacactggatctg

SEQ ID NO: 1134523 - DNA, 15 bp, Homo sapiens
atcaacactggatct

SEQ ID NO: 1134524 - DNA, 15 bp, Homo sapiens
catcaacactggatc

SEQ ID NO: 1134525 - DNA, 15 bp, Homo sapiens
tcatcaacactggat

SEQ ID NO: 1134526 - DNA, 15 bp, Homo sapiens
ttcatcaacactgga

SEQ ID NO: 1134527 - DNA, 15 bp, Homo sapiens
tttcatcaacactgg

SEQ ID NO: 1134528 - DNA, 15 bp, Homo sapiens
atttcatcaacactg

SEQ ID NO: 1134529 - DNA, 15 bp, Homo sapiens
gatttcatcaacact

SEQ ID NO: 1134530 - DNA, 15 bp, Homo sapiens
ggatttcatcaacac

SEQ ID NO: 1134531 - DNA, 15 bp, Homo sapiens
gggatttcatcaaca

SEQ ID NO: 1134532 - DNA, 15 bp, Homo sapiens
agggatttcatcaac

SEQ ID NO: 1134533 - DNA, 15 bp, Homo sapiens
gagggatttcatcaa

SEQ ID NO: 1134534 - DNA, 15 bp, Homo sapiens
agagggatttcatca

SEQ ID NO: 1134535 - DNA, 15 bp, Homo sapiens
aagagggatttcatc

SEQ ID NO: 1134536 - DNA, 15 bp, Homo sapiens
taagagggatttcat

SEQ ID NO: 1134537 - DNA, 15 bp, Homo sapiens
gtaagagggatttca

SEQ ID NO: 1134538 - DNA, 15 bp, Homo sapiens
cgtaagagggatttc

SEQ ID NO: 1134539 - DNA, 15 bp, Homo sapiens
tcgtaagagggattt

SEQ ID NO: 1134540 - DNA, 15 bp, Homo sapiens
atcgtaagagggatt

SEQ ID NO: 1134541 - DNA, 15 bp, Homo sapiens
aatcgtaagagggat

SEQ ID NO: 1134542 - DNA, 15 bp, Homo sapiens
gaatcgtaagaggga

SEQ ID NO: 1134543 - DNA, 15 bp, Homo sapiens
ggaatcgtaagaggg

SEQ ID NO: 1134544 - DNA, 15 bp, Homo sapiens
aggaatcgtaagagg

SEQ ID NO: 1134545 - DNA, 15 bp, Homo sapiens
aaggaatcgtaagag

SEQ ID NO: 1134546 - DNA, 15 bp, Homo sapiens
aaaggaatcgtaaga

SEQ ID NO: 1134547 - DNA, 15 bp, Homo sapiens
caaaggaatcgtaag

SEQ ID NO: 1134548 - DNA, 15 bp, Homo sapiens
tcaaaggaatcgtaa

SEQ ID NO: 1134549 - DNA, 15 bp, Homo sapiens
ttcaaaggaatcgta

SEQ ID NO: 1134550 - DNA, 15 bp, Homo sapiens
attcaaaggaatcgt

SEQ ID NO: 1134551 - DNA, 15 bp, Homo sapiens
tattcaaaggaatcg

SEQ ID NO: 1134552 - DNA, 15 bp, Homo sapiens
ttattcaaaggaatc

SEQ ID NO: 1134553 - DNA, 15 bp, Homo sapiens
tttattcaaaggaat

SEQ ID NO: 1134554 - DNA, 15 bp, Homo sapiens
gtttattcaaaggaa

SEQ ID NO: 1134555 - DNA, 15 bp, Homo sapiens
agtttattcaaagga

SEQ ID NO: 1134556 - DNA, 15 bp, Homo sapiens
aagtttattcaaagg

SEQ ID NO: 1134557 - DNA, 15 bp, Homo sapiens
aaagtttattcaaag

SEQ ID NO: 1134558 - DNA, 15 bp, Homo sapiens
gaaagtttattcaaa

SEQ ID NO: 1134559 - DNA, 15 bp, Homo sapiens
agaaagtttattcaa

SEQ ID NO: 1134560 - DNA, 15 bp, Homo sapiens
tagaaagtttattca

SEQ ID NO: 1134561 - DNA, 15 bp, Homo sapiens
gtagaaagtttattc

SEQ ID NO: 1134562 - DNA, 15 bp, Homo sapiens
ggtagaaagtttatt

SEQ ID NO: 1134563 - DNA, 15 bp, Homo sapiens
gggtagaaagtttat

SEQ ID NO: 1134564 - DNA, 15 bp, Homo sapiens
ggggtagaaagttta

SEQ ID NO: 1134565 - DNA, 15 bp, Homo sapiens
tggggtagaaagttt

SEQ ID NO: 1134566 - DNA, 15 bp, Homo sapiens
atggggtagaaagtt

SEQ ID NO: 1134567 - DNA, 15 bp, Homo sapiens
gatggggtagaaagt

SEQ ID NO: 1134568 - DNA, 15 bp, Homo sapiens
tgatggggtagaaag

SEQ ID NO: 1134569 - DNA, 15 bp, Homo sapiens
gtgatggggtagaaa

SEQ ID NO: 1134570 - DNA, 15 bp, Homo sapiens
agtgatggggtagaa

SEQ ID NO: 1134571 - DNA, 15 bp, Homo sapiens
gagtgatggggtaga

SEQ ID NO: 1134572 - DNA, 15 bp, Homo sapiens
agagtgatggggtag

SEQ ID NO: 1134573 - DNA, 15 bp, Homo sapiens
gagagtgatggggta

SEQ ID NO: 1134574 - DNA, 15 bp, Homo sapiens
agagagtgatggggt

SEQ ID NO: 1134575 - DNA, 15 bp, Homo sapiens
gagagagtgatgggg

SEQ ID NO: 1134576 - DNA, 15 bp, Homo sapiens
agagagagtgatggg

SEQ ID NO: 1134577 - DNA, 15 bp, Homo sapiens
tagagagagtgatgg

SEQ ID NO: 1134578 - DNA, 15 bp, Homo sapiens
gtagagagagtgatg

SEQ ID NO: 1134579 - DNA, 15 bp, Homo sapiens
ggtagagagagtgat

SEQ ID NO: 1134580 - DNA, 15 bp, Homo sapiens
aggtagagagagtga

SEQ ID NO: 1134581 - DNA, 15 bp, Homo sapiens
taggtagagagagtg

SEQ ID NO: 1134582 - DNA, 15 bp, Homo sapiens
gtaggtagagagagt

SEQ ID NO: 1134583 - DNA, 15 bp, Homo sapiens
agtaggtagagagag

SEQ ID NO: 1134584 - DNA, 15 bp, Homo sapiens
aagtaggtagagaga

SEQ ID NO: 1134585 - DNA, 15 bp, Homo sapiens
aaagtaggtagagag

SEQ ID NO: 1134586 - DNA, 15 bp, Homo sapiens
aaaagtaggtagaga

SEQ ID NO: 1134587 - DNA, 15 bp, Homo sapiens
taaaaagtaggtaga

SEQ ID NO: 1134588 - DNA, 15 bp, Homo sapiens
ttaaaaagtaggtag

SEQ ID NO: 1134589 - DNA, 15 bp, Homo sapiens
cttaaaaagtaggta

SEQ ID NO: 1134590 - DNA, 15 bp, Homo sapiens
ccttaaaaagtaggt

SEQ ID NO: 1134591 - DNA, 15 bp, Homo sapiens
gccttaaaaagtagg

SEQ ID NO: 1134592 - DNA, 15 bp, Homo sapiens
ggccttaaaaagtag

SEQ ID NO: 1134593 - DNA, 15 bp, Homo sapiens
tggccttaaaaagta

SEQ ID NO: 1134594 - DNA, 15 bp, Homo sapiens
ttggccttaaaaagt

SEQ ID NO: 1134595 - DNA, 15 bp, Homo sapiens
attggccttaaaaag

SEQ ID NO: 1134596 - DNA, 15 bp, Homo sapiens
tattggccttaaaaa

SEQ ID NO: 1134597 - DNA, 15 bp, Homo sapiens
ttattggccttaaaa

SEQ ID NO: 1134598 - DNA, 15 bp, Homo sapiens
gttattggccttaaa

SEQ ID NO: 1134599 - DNA, 15 bp, Homo sapiens
agttattggccttaa

SEQ ID NO: 1134600 - DNA, 15 bp, Homo sapiens
tagttattggcctta

SEQ ID NO: 1134601 - DNA, 15 bp, Homo sapiens
atagttattggcctt

SEQ ID NO: 1134602 - DNA, 15 bp, Homo sapiens
aatagttattggcct

SEQ ID NO: 1134603 - DNA, 15 bp, Homo sapiens
taatagttattggcc

SEQ ID NO: 1134604 - DNA, 15 bp, Homo sapiens
ctaatagttattggc

SEQ ID NO: 1134605 - DNA, 15 bp, Homo sapiens
tctaatagttattgg

SEQ ID NO: 1134606 - DNA, 15 bp, Homo sapiens
atctaatagttattg

SEQ ID NO: 1134607 - DNA, 15 bp, Homo sapiens
aatctaatagttatt

SEQ ID NO: 1134608 - DNA, 15 bp, Homo sapiens
aaatctaatagttat

SEQ ID NO: 1134609 - DNA, 15 bp, Homo sapiens
caaatctaatagtta

SEQ ID NO: 1134610 - DNA, 15 bp, Homo sapiens
gcaaatctaatagtt

SEQ ID NO: 1134611 - DNA, 15 bp, Homo sapiens
ggcaaatctaatagt

SEQ ID NO: 1134612 - DNA, 15 bp, Homo sapiens
gggcaaatctaatag

SEQ ID NO: 1134613 - DNA, 15 bp, Homo sapiens
agggcaaatctaata

SEQ ID NO: 1134614 - DNA, 15 bp, Homo sapiens
aagggcaaatctaat

SEQ ID NO: 1134615 - DNA, 15 bp, Homo sapiens
aaagggcaaatctaa

SEQ ID NO: 1134616 - DNA, 15 bp, Homo sapiens
aaaagggcaaatcta

SEQ ID NO: 1134617 - DNA, 15 bp, Homo sapiens
caaaagggcaaatct

SEQ ID NO: 1134618 - DNA, 15 bp, Homo sapiens
tcaaaagggcaaatc

SEQ ID NO: 1134619 - DNA, 15 bp, Homo sapiens
atcaaaagggcaaat

SEQ ID NO: 1134620 - DNA, 15 bp, Homo sapiens
catcaaaagggcaaa

SEQ ID NO: 1134621 - DNA, 15 bp, Homo sapiens
gcatcaaaagggcaa

SEQ ID NO: 1134622 - DNA, 15 bp, Homo sapiens
agcatcaaaagggca

SEQ ID NO: 1134623 - DNA, 15 bp, Homo sapiens
tagcatcaaaagggc

SEQ ID NO: 1134624 - DNA, 15 bp, Homo sapiens
atagcatcaaaaggg

SEQ ID NO: 1134625 - DNA, 15 bp, Homo sapiens
aatagcatcaaaagg

SEQ ID NO: 1134626 - DNA, 15 bp, Homo sapiens
aaatagcatcaaaag

SEQ ID NO: 1134627 - DNA, 15 bp, Homo sapiens
aaaatagcatcaaaa

SEQ ID NO: 1134628 - DNA, 15 bp, Homo sapiens
gaaaatagcatcaaa

SEQ ID NO: 1134629 - DNA, 15 bp, Homo sapiens
agaaaatagcatcaa

SEQ ID NO: 1134630 - DNA, 15 bp, Homo sapiens
tagaaaatagcatca

SEQ ID NO: 1134631 - DNA, 15 bp, Homo sapiens
ctagaaaatagcatc

SEQ ID NO: 1134632 - DNA, 15 bp, Homo sapiens
tctagaaaatagcat

SEQ ID NO: 1134633 - DNA, 15 bp, Homo sapiens
atctagaaaatagca

SEQ ID NO: 1134634 - DNA, 15 bp, Homo sapiens
gatctagaaaatagc

SEQ ID NO: 1134635 - DNA, 15 bp, Homo sapiens
agatctagaaaatag

SEQ ID NO: 1134636 - DNA, 15 bp, Homo sapiens
aagatctagaaaata

SEQ ID NO: 1134637 - DNA, 15 bp, Homo sapiens
taagatctagaaaat

SEQ ID NO: 1134638 - DNA, 15 bp, Homo sapiens
ataagatctagaaaa

SEQ ID NO: 1134639 - DNA, 15 bp, Homo sapiens
tataagatctagaaa

SEQ ID NO: 1134640 - DNA, 15 bp, Homo sapiens
ctataagatctagaa

SEQ ID NO: 1134641 - DNA, 15 bp, Homo sapiens
actataagatctaga

SEQ ID NO: 1134642 - DNA, 15 bp, Homo sapiens
aactataagatctag

SEQ ID NO: 1134643 - DNA, 15 bp, Homo sapiens
caactataagatcta

SEQ ID NO: 1134644 - DNA, 15 bp, Homo sapiens
acaactataagatct

SEQ ID NO: 1134645 - DNA, 15 bp, Homo sapiens
cacaactataagatc

SEQ ID NO: 1134646 - DNA, 15 bp, Homo sapiens
acacaactataagat

SEQ ID NO: 1134647 - DNA, 15 bp, Homo sapiens
aacacaactataaga

SEQ ID NO: 1134648 - DNA, 15 bp, Homo sapiens
aaacacaactataag

SEQ ID NO: 1134649 - DNA, 15 bp, Homo sapiens
gaaacacaactataa

SEQ ID NO: 1134650 - DNA, 15 bp, Homo sapiens
tgaaacacaactata

SEQ ID NO: 1134651 - DNA, 15 bp, Homo sapiens
atgaaacacaactat

SEQ ID NO: 1134652 - DNA, 15 bp, Homo sapiens
aatgaaacacaacta

SEQ ID NO: 1134653 - DNA, 15 bp, Homo sapiens
aaatgaaacacaact

SEQ ID NO: 1134654 - DNA, 15 bp, Homo sapiens
aaaatgaaacacaac

SEQ ID NO: 1134655 - DNA, 15 bp, Homo sapiens
aaaaatgaaacacaa

SEQ ID NO: 1134656 - DNA, 15 bp, Homo sapiens
aaaaaatgaaacaca

SEQ ID NO: 1134657 - DNA, 15 bp, Homo sapiens
taaaaaatgaaacac

SEQ ID NO: 1134658 - DNA, 15 bp, Homo sapiens
ttaaaaaatgaaaca

SEQ ID NO: 1134659 - DNA, 15 bp, Homo sapiens
tttaaaaaatgaaac

SEQ ID NO: 1134660 - DNA, 15 bp, Homo sapiens
atttaaaaaatgaaa

SEQ ID NO: 1134661 - DNA, 15 bp, Homo sapiens
aatttaaaaaatgaa

SEQ ID NO: 1134662 - DNA, 15 bp, Homo sapiens
gaatttaaaaaatga

SEQ ID NO: 1134663 - DNA, 15 bp, Homo sapiens
agaatttaaaaaatg

SEQ ID NO: 1134664 - DNA, 15 bp, Homo sapiens
aagaatttaaaaaat

SEQ ID NO: 1134665 - DNA, 15 bp, Homo sapiens
aaagaatttaaaaaa

SEQ ID NO: 1134666 - DNA, 15 bp, Homo sapiens
aaaagaatttaaaaa

SEQ ID NO: 1134667 - DNA, 15 bp, Homo sapiens
aaaaagaatttaaaa

SEQ ID NO: 1134668 - DNA, 15 bp, Homo sapiens
caaaaagaatttaaa

SEQ ID NO: 1134669 - DNA, 15 bp, Homo sapiens
acaaaaagaatttaa

SEQ ID NO: 1134670 - DNA, 15 bp, Homo sapiens
cacaaaaagaattta

SEQ ID NO: 1134671 - DNA, 15 bp, Homo sapiens
acacaaaaagaattt

SEQ ID NO: 1134672 - DNA, 15 bp, Homo sapiens
cacacaaaaagaatt

SEQ ID NO: 1134673 - DNA, 15 bp, Homo sapiens
acacacaaaaagaat

SEQ ID NO: 1134674 - DNA, 15 bp, Homo sapiens
cacacacaaaaagaa

SEQ ID NO: 1134675 - DNA, 15 bp, Homo sapiens
acacacacaaaaaga

SEQ ID NO: 1134676 - DNA, 15 bp, Homo sapiens
tacacacacaaaaag

SEQ ID NO: 1134677 - DNA, 15 bp, Homo sapiens
ctacacacacaaaaa

SEQ ID NO: 1134678 - DNA, 15 bp, Homo sapiens
actacacacacaaaa

SEQ ID NO: 1134679 - DNA, 15 bp, Homo sapiens
aactacacacacaaa

SEQ ID NO: 1134680 - DNA, 15 bp, Homo sapiens
aaactacacacacaa

SEQ ID NO: 1134681 - DNA, 15 bp, Homo sapiens
aaaactacacacaca

SEQ ID NO: 1134682 - DNA, 15 bp, Homo sapiens
caaaactacacacac

SEQ ID NO: 1134683 - DNA, 15 bp, Homo sapiens
acaaaactacacaca

SEQ ID NO: 1134684 - DNA, 15 bp, Homo sapiens
cacaaaactacacac

SEQ ID NO: 1134685 - DNA, 15 bp, Homo sapiens
acacaaaactacaca

SEQ ID NO: 1134686 - DNA, 15 bp, Homo sapiens
tacacaaaactacac

SEQ ID NO: 1134687 - DNA, 15 bp, Homo sapiens
atacacaaaactaca

SEQ ID NO: 1134688 - DNA, 15 bp, Homo sapiens
aatacacaaaactac

SEQ ID NO: 1134689 - DNA, 15 bp, Homo sapiens
gaatacacaaaacta

SEQ ID NO: 1134690 - DNA, 15 bp, Homo sapiens
tgaatacacaaaact

SEQ ID NO: 1134691 - DNA, 15 bp, Homo sapiens
gtgaatacacaaaac

SEQ ID NO: 1134692 - DNA, 15 bp, Homo sapiens
agtgaatacacaaaa

SEQ ID NO: 1134693 - DNA, 15 bp, Homo sapiens
cagtgaatacacaaa

SEQ ID NO: 1134694 - DNA, 15 bp, Homo sapiens
acagtgaatacacaa

SEQ ID NO: 1134695 - DNA, 15 bp, Homo sapiens
cacagtgaatacaca

SEQ ID NO: 1134696 - DNA, 15 bp, Homo sapiens
acacagtgaatacac

SEQ ID NO: 1134697 - DNA, 15 bp, Homo sapiens
tacacagtgaataca

SEQ ID NO: 1134698 - DNA, 15 bp, Homo sapiens
atacacagtgaatac

SEQ ID NO: 1134699 - DNA, 15 bp, Homo sapiens
aatacacagtgaata

SEQ ID NO: 1134700 - DNA, 15 bp, Homo sapiens
aaatacacagtgaat

SEQ ID NO: 1134701 - DNA, 15 bp, Homo sapiens
aaaatacacagtgaa

SEQ ID NO: 1134702 - DNA, 15 bp, Homo sapiens
gaaaatacacagtga

SEQ ID NO: 1134703 - DNA, 15 bp, Homo sapiens
tgaaaatacacagtg

SEQ ID NO: 1134704 - DNA, 15 bp, Homo sapiens
ttgaaaatacacagt

SEQ ID NO: 1134705 - DNA, 15 bp, Homo sapiens
tttgaaaatacacag

SEQ ID NO: 1134706 - DNA, 15 bp, Homo sapiens
atttgaaaatacaca

SEQ ID NO: 1134707 - DNA, 15 bp, Homo sapiens
tatttgaaaatacac

SEQ ID NO: 1134708 - DNA, 15 bp, Homo sapiens
ttatttgaaaataca

SEQ ID NO: 1134709 - DNA, 15 bp, Homo sapiens
gttatttgaaaatac

SEQ ID NO: 1134710 - DNA, 15 bp, Homo sapiens
agttatttgaaaata

SEQ ID NO: 1134711 - DNA, 15 bp, Homo sapiens
gagttatttgaaaat

SEQ ID NO: 1134712 - DNA, 15 bp, Homo sapiens
tgagttatttgaaaa

SEQ ID NO: 1134713 - DNA, 15 bp, Homo sapiens
gtgagttatttgaaa

SEQ ID NO: 1134714 - DNA, 15 bp, Homo sapiens
agtgagttatttgaa

SEQ ID NO: 1134715 - DNA, 15 bp, Homo sapiens
tagtgagttatttga

SEQ ID NO: 1134716 - DNA, 15 bp, Homo sapiens
ttagtgagttatttg

SEQ ID NO: 1134717 - DNA, 15 bp, Homo sapiens
attagtgagttattt

SEQ ID NO: 1134718 - DNA, 15 bp, Homo sapiens
aattagtgagttatt

SEQ ID NO: 1134719 - DNA, 15 bp, Homo sapiens
gaattagtgagttat

SEQ ID NO: 1134720 - DNA, 15 bp, Homo sapiens
agaattagtgagtta

SEQ ID NO: 1134721 - DNA, 15 bp, Homo sapiens
aagaattagtgagtt

SEQ ID NO: 1134722 - DNA, 15 bp, Homo sapiens
aaagaattagtgagt

SEQ ID NO: 1134723 - DNA, 15 bp, Homo sapiens
gaaagaattagtgag

SEQ ID NO: 1134724 - DNA, 15 bp, Homo sapiens
agaaagaattagtga

SEQ ID NO: 1134725 - DNA, 15 bp, Homo sapiens
aagaaagaattagtg

SEQ ID NO: 1134726 - DNA, 15 bp, Homo sapiens
gaagaaagaattagt

SEQ ID NO: 1134727 - DNA, 15 bp, Homo sapiens
agaagaaagaattag

SEQ ID NO: 1134728 - DNA, 15 bp, Homo sapiens
cagaagaaagaatta

SEQ ID NO: 1134729 - DNA, 15 bp, Homo sapiens
gcagaagaaagaatt

SEQ ID NO: 1134730 - DNA, 15 bp, Homo sapiens
agcagaagaaagaat

SEQ ID NO: 1134731 - DNA, 15 bp, Homo sapiens
aagcagaagaaagaa

SEQ ID NO: 1134732 - DNA, 15 bp, Homo sapiens
caagcagaagaaaga

SEQ ID NO: 1134733 - DNA, 15 bp, Homo sapiens
tcaagcagaagaaag

SEQ ID NO: 1134734 - DNA, 15 bp, Homo sapiens
atcaagcagaagaaa

SEQ ID NO: 1134735 - DNA, 15 bp, Homo sapiens
gatcaagcagaagaa

SEQ ID NO: 1134736 - DNA, 15 bp, Homo sapiens
tgatcaagcagaaga

SEQ ID NO: 1134737 - DNA, 15 bp, Homo sapiens
ttgatcaagcagaag

SEQ ID NO: 1134738 - DNA, 15 bp, Homo sapiens
attgatcaagcagaa

SEQ ID NO: 1134739 - DNA, 15 bp, Homo sapiens
aattgatcaagcaga

SEQ ID NO: 1134740 - DNA, 15 bp, Homo sapiens
gaattgatcaagcag

SEQ ID NO: 1134741 - DNA, 15 bp, Homo sapiens
agaattgatcaagca

SEQ ID NO: 1134742 - DNA, 15 bp, Homo sapiens
cagaattgatcaagc

SEQ ID NO: 1134743 - DNA, 15 bp, Homo sapiens
gcagaattgatcaag

SEQ ID NO: 1134744 - DNA, 15 bp, Homo sapiens
ggcagaattgatcaa

SEQ ID NO: 1134745 - DNA, 15 bp, Homo sapiens
tggcagaattgatca

SEQ ID NO: 1134746 - DNA, 15 bp, Homo sapiens
atggcagaattgatc

SEQ ID NO: 1134747 - DNA, 15 bp, Homo sapiens
aatggcagaattgat

SEQ ID NO: 1134748 - DNA, 15 bp, Homo sapiens
taatggcagaattga

SEQ ID NO: 1134749 - DNA, 15 bp, Homo sapiens
ttaatggcagaattg

SEQ ID NO: 1134750 - DNA, 15 bp, Homo sapiens
tttaatggcagaatt

SEQ ID NO: 1134751 - DNA, 15 bp, Homo sapiens
ttttaatggcagaat

SEQ ID NO: 1134752 - DNA, 15 bp, Homo sapiens
cttttaatggcagaa

SEQ ID NO: 1134753 - DNA, 15 bp, Homo sapiens
tcttttaatggcaga

SEQ ID NO: 1134754 - DNA, 15 bp, Homo sapiens
gtcttttaatggcag

SEQ ID NO: 1134755 - DNA, 15 bp, Homo sapiens
ggtcttttaatggca

SEQ ID NO: 1134756 - DNA, 15 bp, Homo sapiens
aggtcttttaatggc

SEQ ID NO: 1134757 - DNA, 15 bp, Homo sapiens
gaggtcttttaatgg

SEQ ID NO: 1134758 - DNA, 15 bp, Homo sapiens
cgaggtcttttaatg

SEQ ID NO: 1134759 - DNA, 15 bp, Homo sapiens
tcgaggtcttttaat

SEQ ID NO: 1134760 - DNA, 15 bp, Homo sapiens
atcgaggtcttttaa

SEQ ID NO: 1134761 - DNA, 15 bp, Homo sapiens
catcgaggtctttta

SEQ ID NO: 1134762 - DNA, 15 bp, Homo sapiens
gcatcgaggtctttt

SEQ ID NO: 1134763 - DNA, 15 bp, Homo sapiens
tgcatcgaggtcttt

SEQ ID NO: 1134764 - DNA, 15 bp, Homo sapiens
atgcatcgaggtctt

SEQ ID NO: 1134765 - DNA, 15 bp, Homo sapiens
aatgcatcgaggtct

SEQ ID NO: 1134766 - DNA, 15 bp, Homo sapiens
aaatgcatcgaggtc

SEQ ID NO: 1134767 - DNA, 15 bp, Homo sapiens
aaaatgcatcgaggt

SEQ ID NO: 1134768 - DNA, 15 bp, Homo sapiens
gaaaatgcatcgagg

SEQ ID NO: 1134769 - DNA, 15 bp, Homo sapiens
tgaaaatgcatcgag

SEQ ID NO: 1134770 - DNA, 15 bp, Homo sapiens
ctgaaaatgcatcga

SEQ ID NO: 1134771 - DNA, 15 bp, Homo sapiens
actgaaaatgcatcg

SEQ ID NO: 1134772 - DNA, 15 bp, Homo sapiens
tactgaaaatgcatc

SEQ ID NO: 1134773 - DNA, 15 bp, Homo sapiens
ttactgaaaatgcat

SEQ ID NO: 1134774 - DNA, 15 bp, Homo sapiens
cttactgaaaatgca

SEQ ID NO: 1134775 - DNA, 15 bp, Homo sapiens
acttactgaaaatgc

SEQ ID NO: 1134776 - DNA, 15 bp, Homo sapiens
gacttactgaaaatg

SEQ ID NO: 1134777 - DNA, 15 bp, Homo sapiens
tgacttactgaaaat

SEQ ID NO: 1134778 - DNA, 15 bp, Homo sapiens
ttgacttactgaaaa

SEQ ID NO: 1134779 - DNA, 15 bp, Homo sapiens
attgacttactgaaa

SEQ ID NO: 1134780 - DNA, 15 bp, Homo sapiens
aattgacttactgaa

SEQ ID NO: 1134781 - DNA, 15 bp, Homo sapiens
caattgacttactga

SEQ ID NO: 1134782 - DNA, 15 bp, Homo sapiens
gcaattgacttactg

SEQ ID NO: 1134783 - DNA, 15 bp, Homo sapiens
tgcaattgacttact

SEQ ID NO: 1134784 - DNA, 15 bp, Homo sapiens
atgcaattgacttac

SEQ ID NO: 1134785 - DNA, 15 bp, Homo sapiens
aatgcaattgactta

SEQ ID NO: 1134786 - DNA, 15 bp, Homo sapiens
aaatgcaattgactt

SEQ ID NO: 1134787 - DNA, 15 bp, Homo sapiens
aaaatgcaattgact

SEQ ID NO: 1134788 - DNA, 15 bp, Homo sapiens
aaaaatgcaattgac

SEQ ID NO: 1134789 - DNA, 15 bp, Homo sapiens
gaaaaatgcaattga

SEQ ID NO: 1134790 - DNA, 15 bp, Homo sapiens
tgaaaaatgcaattg

SEQ ID NO: 1134791 - DNA, 15 bp, Homo sapiens
ttgaaaaatgcaatt

SEQ ID NO: 1134792 - DNA, 15 bp, Homo sapiens
gttgaaaaatgcaat

SEQ ID NO: 1134793 - DNA, 15 bp, Homo sapiens
agttgaaaaatgcaa

SEQ ID NO: 1134794 - DNA, 15 bp, Homo sapiens
gagttgaaaaatgca

SEQ ID NO: 1134795 - DNA, 15 bp, Homo sapiens
ggagttgaaaaatgc

SEQ ID NO: 1134796 - DNA, 15 bp, Homo sapiens
tggagttgaaaaatg

SEQ ID NO: 1134797 - DNA, 15 bp, Homo sapiens
ctggagttgaaaaat

SEQ ID NO: 1134798 - DNA, 15 bp, Homo sapiens
tctggagttgaaaaa

SEQ ID NO: 1134799 - DNA, 15 bp, Homo sapiens
ttctggagttgaaaa

SEQ ID NO: 1134800 - DNA, 15 bp, Homo sapiens
attctggagttgaaa

SEQ ID NO: 1134801 - DNA, 15 bp, Homo sapiens
aattctggagttgaa

SEQ ID NO: 1134802 - DNA, 15 bp, Homo sapiens
aaattctggagttga

SEQ ID NO: 1134803 - DNA, 15 bp, Homo sapiens
gaaattctggagttg

SEQ ID NO: 1134804 - DNA, 15 bp, Homo sapiens
agaaattctggagtt

SEQ ID NO: 1134805 - DNA, 15 bp, Homo sapiens
cagaaattctggagt

SEQ ID NO: 1134806 - DNA, 15 bp, Homo sapiens
gcagaaattctggag

SEQ ID NO: 1134807 - DNA, 15 bp, Homo sapiens
agcagaaattctgga

SEQ ID NO: 1134808 - DNA, 15 bp, Homo sapiens
aagcagaaattctgg

SEQ ID NO: 1134809 - DNA, 15 bp, Homo sapiens
caagcagaaattctg

SEQ ID NO: 1134810 - DNA, 15 bp, Homo sapiens
tcaagcagaaattct

SEQ ID NO: 1134811 - DNA, 15 bp, Homo sapiens
gtcaagcagaaattc

SEQ ID NO: 1134812 - DNA, 15 bp, Homo sapiens
acagtcaagcagaaa

SEQ ID NO: 1134813 - DNA, 15 bp, Homo sapiens
aacagtcaagcagaa

SEQ ID NO: 1134814 - DNA, 15 bp, Homo sapiens
aaacagtcaagcaga

SEQ ID NO: 1134815 - DNA, 15 bp, Homo sapiens
aaaacagtcaagcag

SEQ ID NO: 1134816 - DNA, 15 bp, Homo sapiens
taaaacagtcaagca

SEQ ID NO: 1134817 - DNA, 15 bp, Homo sapiens
ttaaaacagtcaagc

SEQ ID NO: 1134818 - DNA, 15 bp, Homo sapiens
tttaaaacagtcaag

SEQ ID NO: 1134819 - DNA, 15 bp, Homo sapiens
atttaaaacagtcaa

SEQ ID NO: 1134820 - DNA, 15 bp, Homo sapiens
aatttaaaacagtca

SEQ ID NO: 1134821 - DNA, 15 bp, Homo sapiens
taatttaaaacagtc

SEQ ID NO: 1134822 - DNA, 15 bp, Homo sapiens
ataatttaaaacagt

SEQ ID NO: 1134823 - DNA, 15 bp, Homo sapiens
aataatttaaaacag

SEQ ID NO: 1134824 - DNA, 15 bp, Homo sapiens
aaataatttaaaaca

SEQ ID NO: 1134825 - DNA, 15 bp, Homo sapiens
gaaataatttaaaac

SEQ ID NO: 1134826 - DNA, 15 bp, Homo sapiens
tgaaataatttaaaa

SEQ ID NO: 1134827 - DNA, 15 bp, Homo sapiens
ttgaaataatttaaa

SEQ ID NO: 1134828 - DNA, 15 bp, Homo sapiens
attgaaataatttaa

SEQ ID NO: 1134829 - DNA, 15 bp, Homo sapiens
gattgaaataattta

SEQ ID NO: 1134830 - DNA, 15 bp, Homo sapiens
agattgaaataattt

SEQ ID NO: 1134831 - DNA, 15 bp, Homo sapiens
gagattgaaataatt

SEQ ID NO: 1134832 - DNA, 15 bp, Homo sapiens
agagattgaaataat

SEQ ID NO: 1134833 - DNA, 15 bp, Homo sapiens
aagagattgaaataa

SEQ ID NO: 1134834 - DNA, 15 bp, Homo sapiens
aaagagattgaaata

SEQ ID NO: 1134835 - DNA, 15 bp, Homo sapiens
caaagagattgaaat

SEQ ID NO: 1134836 - DNA, 15 bp, Homo sapiens
acaaagagattgaaa

SEQ ID NO: 1134837 - DNA, 15 bp, Homo sapiens
aacaaagagattgaa

SEQ ID NO: 1134838 - DNA, 15 bp, Homo sapiens
taacaaagagattga

SEQ ID NO: 1134839 - DNA, 15 bp, Homo sapiens
ttaacaaagagattg

SEQ ID NO: 1134840 - DNA, 15 bp, Homo sapiens
gttaacaaagagatt

SEQ ID NO: 1134841 - DNA, 15 bp, Homo sapiens
agttaacaaagagat

SEQ ID NO: 1134842 - DNA, 15 bp, Homo sapiens
aagttaacaaagaga

SEQ ID NO: 1134843 - DNA, 15 bp, Homo sapiens
aaagttaacaaagag

SEQ ID NO: 1134844 - DNA, 15 bp, Homo sapiens
taaagttaacaaaga

SEQ ID NO: 1134845 - DNA, 15 bp, Homo sapiens
ataaagttaacaaag

SEQ ID NO: 1134846 - DNA, 15 bp, Homo sapiens
gataaagttaacaaa

SEQ ID NO: 1134847 - DNA, 15 bp, Homo sapiens
ggataaagttaacaa

SEQ ID NO: 1134848 - DNA, 15 bp, Homo sapiens
cggataaagttaaca

SEQ ID NO: 1134849 - DNA, 15 bp, Homo sapiens
tcggataaagttaac

SEQ ID NO: 1134850 - DNA, 15 bp, Homo sapiens
atcggataaagttaa

SEQ ID NO: 1134851 - DNA, 15 bp, Homo sapiens
tatcggataaagtta

SEQ ID NO: 1134852 - DNA, 15 bp, Homo sapiens
ctatcggataaagtt

SEQ ID NO: 1134853 - DNA, 15 bp, Homo sapiens
tctatcggataaagt

SEQ ID NO: 1134854 - DNA, 15 bp, Homo sapiens
ttctatcggataaag

SEQ ID NO: 1134855 - DNA, 15 bp, Homo sapiens
tttctatcggataaa

SEQ ID NO: 1134856 - DNA, 15 bp, Homo sapiens
atttctatcggataa

SEQ ID NO: 1134857 - DNA, 15 bp, Homo sapiens
gatttctatcggata

SEQ ID NO: 1134858 - DNA, 15 bp, Homo sapiens
agatttctatcggat

SEQ ID NO: 1134859 - DNA, 15 bp, Homo sapiens
cagatttctatcgga

SEQ ID NO: 1134860 - DNA, 15 bp, Homo sapiens
tcagatttctatcgg

SEQ ID NO: 1134861 - DNA, 15 bp, Homo sapiens
ttcagatttctatcg

SEQ ID NO: 1134862 - DNA, 15 bp, Homo sapiens
attcagatttctatc

SEQ ID NO: 1134863 - DNA, 15 bp, Homo sapiens
aattcagatttctat

SEQ ID NO: 1134864 - DNA, 15 bp, Homo sapiens
gaattcagatttcta

SEQ ID NO: 1134865 - DNA, 15 bp, Homo sapiens
ggaattcagatttct

SEQ ID NO: 1134866 - DNA, 15 bp, Homo sapiens
aggaattcagatttc

SEQ ID NO: 1134867 - DNA, 15 bp, Homo sapiens
aaggaattcagattt

SEQ ID NO: 1134868 - DNA, 15 bp, Homo sapiens
gaaggaattcagatt

SEQ ID NO: 1134869 - DNA, 15 bp, Homo sapiens
agaaggaattcagat

SEQ ID NO: 1134870 - DNA, 15 bp, Homo sapiens
gagaaggaattcaga

SEQ ID NO: 1134871 - DNA, 15 bp, Homo sapiens
agagaaggaattcag

SEQ ID NO: 1134872 - DNA, 15 bp, Homo sapiens
cagagaaggaattca

SEQ ID NO: 1134873 - DNA, 15 bp, Homo sapiens
acagagaaggaattc

SEQ ID NO: 1134874 - DNA, 15 bp, Homo sapiens
cacagagaaggaatt

SEQ ID NO: 1134875 - DNA, 15 bp, Homo sapiens
acacagagaaggaat

SEQ ID NO: 1134876 - DNA, 15 bp, Homo sapiens
aacacagagaaggaa

SEQ ID NO: 1134877 - DNA, 15 bp, Homo sapiens
taacacagagaagga

SEQ ID NO: 1134878 - DNA, 15 bp, Homo sapiens
ataacacagagaagg

SEQ ID NO: 1134879 - DNA, 15 bp, Homo sapiens
gataacacagagaag

SEQ ID NO: 1134880 - DNA, 15 bp, Homo sapiens
agataacacagagaa

SEQ ID NO: 1134881 - DNA, 15 bp, Homo sapiens
aagataacacagaga

SEQ ID NO: 1134882 - DNA, 15 bp, Homo sapiens
caagataacacagag

SEQ ID NO: 1134883 - DNA, 15 bp, Homo sapiens
tcaagataacacaga

SEQ ID NO: 1134884 - DNA, 15 bp, Homo sapiens
gtcaagataacacag

SEQ ID NO: 1134885 - DNA, 15 bp, Homo sapiens
agtcaagataacaca

SEQ ID NO: 1134886 - DNA, 15 bp, Homo sapiens
aagtcaagataacac

SEQ ID NO: 1134887 - DNA, 15 bp, Homo sapiens
aaagtcaagataaca

SEQ ID NO: 1134888 - DNA, 15 bp, Homo sapiens
gaaagtcaagataac

SEQ ID NO: 1134889 - DNA, 15 bp, Homo sapiens
agaaagtcaagataa

SEQ ID NO: 1134890 - DNA, 15 bp, Homo sapiens
aagaaagtcaagata

SEQ ID NO: 1134891 - DNA, 15 bp, Homo sapiens
aaagaaagtcaagat

SEQ ID NO: 1134892 - DNA, 15 bp, Homo sapiens
caaagaaagtcaaga

SEQ ID NO: 1134893 - DNA, 15 bp, Homo sapiens
tcaaagaaagtcaag

SEQ ID NO: 1134894 - DNA, 15 bp, Homo sapiens
ctcaaagaaagtcaa

SEQ ID NO: 1134895 - DNA, 15 bp, Homo sapiens
actcaaagaaagtca

SEQ ID NO: 1134896 - DNA, 15 bp, Homo sapiens
aactcaaagaaagtc

SEQ ID NO: 1134897 - DNA, 15 bp, Homo sapiens
aaactcaaagaaagt

SEQ ID NO: 1134898 - DNA, 15 bp, Homo sapiens
aaaactcaaagaaag

SEQ ID NO: 1134899 - DNA, 15 bp, Homo sapiens
gaaaactcaaagaaa

SEQ ID NO: 1134900 - DNA, 15 bp, Homo sapiens
agaaaactcaaagaa

SEQ ID NO: 1134901 - DNA, 15 bp, Homo sapiens
gagaaaactcaaaga

SEQ ID NO: 1134902 - DNA, 15 bp, Homo sapiens
tgagaaaactcaaag

SEQ ID NO: 1134903 - DNA, 15 bp, Homo sapiens
ttgagaaaactcaaa

SEQ ID NO: 1134904 - DNA, 15 bp, Homo sapiens
tttgagaaaactcaa

SEQ ID NO: 1134905 - DNA, 15 bp, Homo sapiens
ttttgagaaaactca

SEQ ID NO: 1134906 - DNA, 15 bp, Homo sapiens
attttgagaaaactc

SEQ ID NO: 1134907 - DNA, 15 bp, Homo sapiens
tattttgagaaaact

SEQ ID NO: 1134908 - DNA, 15 bp, Homo sapiens
ctattttgagaaaac

SEQ ID NO: 1134909 - DNA, 15 bp, Homo sapiens
gctattttgagaaaa

SEQ ID NO: 1134910 - DNA, 15 bp, Homo sapiens
agctattttgagaaa

SEQ ID NO: 1134911 - DNA, 15 bp, Homo sapiens
tagctattttgagaa

SEQ ID NO: 1134912 - DNA, 15 bp, Homo sapiens
atagctattttgaga

SEQ ID NO: 1134913 - DNA, 15 bp, Homo sapiens
aatagctattttgag

SEQ ID NO: 1134914 - DNA, 15 bp, Homo sapiens
aaatagctattttga

SEQ ID NO: 1134915 - DNA, 15 bp, Homo sapiens
aaaatagctattttg

SEQ ID NO: 1134916 - DNA, 15 bp, Homo sapiens
taaaatagctatttt

SEQ ID NO: 1134917 - DNA, 15 bp, Homo sapiens
ataaaatagctattt

SEQ ID NO: 1134918 - DNA, 15 bp, Homo sapiens
aaataaaatagctat

SEQ ID NO: 1134919 - DNA, 15 bp, Homo sapiens
taaataaaatagcta

SEQ ID NO: 1134920 - DNA, 15 bp, Homo sapiens
ataaataaaatagct

SEQ ID NO: 1134921 - DNA, 15 bp, Homo sapiens
aataaataaaatagc

SEQ ID NO: 1134922 - DNA, 15 bp, Homo sapiens
aaataaataaaatag

SEQ ID NO: 1134923 - DNA, 15 bp, Homo sapiens
agtaaaaaataaata

SEQ ID NO: 1134924 - DNA, 15 bp, Homo sapiens
aagtaaaaaataaat

SEQ ID NO: 1134925 - DNA, 15 bp, Homo sapiens
aaagtaaaaaataaa

SEQ ID NO: 1134926 - DNA, 15 bp, Homo sapiens
taaagtaaaaaataa

SEQ ID NO: 1134927 - DNA, 15 bp, Homo sapiens
ttaaagtaaaaaata

SEQ ID NO: 1134928 - DNA, 15 bp, Homo sapiens
cttaaagtaaaaaat

SEQ ID NO: 1134929 - DNA, 15 bp, Homo sapiens
agaacttaaagtaaa

SEQ ID NO: 1134930 - DNA, 15 bp, Homo sapiens
cagaacttaaagtaa

SEQ ID NO: 1134931 - DNA, 15 bp, Homo sapiens
ccagaacttaaagta

SEQ ID NO: 1134932 - DNA, 15 bp, Homo sapiens
tcccagaacttaaag

SEQ ID NO: 1134933 - DNA, 15 bp, Homo sapiens
ctcccagaacttaaa

SEQ ID NO: 1134934 - DNA, 15 bp, Homo sapiens
tctcccagaacttaa

SEQ ID NO: 1134935 - DNA, 15 bp, Homo sapiens
atctcccagaactta

SEQ ID NO: 1134936 - DNA, 15 bp, Homo sapiens
tatctcccagaactt

SEQ ID NO: 1134937 - DNA, 15 bp, Homo sapiens
ttatctcccagaact

SEQ ID NO: 1134938 - DNA, 15 bp, Homo sapiens
cttatctcccagaac

SEQ ID NO: 1134939 - DNA, 15 bp, Homo sapiens
acttatctcccagaa

SEQ ID NO: 1134940 - DNA, 15 bp, Homo sapiens
tacttatctcccaga

SEQ ID NO: 1134941 - DNA, 15 bp, Homo sapiens
gtacttatctcccag

SEQ ID NO: 1134942 - DNA, 15 bp, Homo sapiens
tgtacttatctccca

SEQ ID NO: 1134943 - DNA, 15 bp, Homo sapiens
ctgtacttatctccc

SEQ ID NO: 1134944 - DNA, 15 bp, Homo sapiens
tctgtacttatctcc

SEQ ID NO: 1134945 - DNA, 15 bp, Homo sapiens
ttctgtacttatctc

SEQ ID NO: 1134946 - DNA, 15 bp, Homo sapiens
attctgtacttatct

SEQ ID NO: 1134947 - DNA, 15 bp, Homo sapiens
cattctgtacttatc

SEQ ID NO: 1134948 - DNA, 15 bp, Homo sapiens
acattctgtacttat

SEQ ID NO: 1134949 - DNA, 15 bp, Homo sapiens
cacattctgtactta

SEQ ID NO: 1134950 - DNA, 15 bp, Homo sapiens
acacattctgtactt

SEQ ID NO: 1134951 - DNA, 15 bp, Homo sapiens
tacacattctgtact

SEQ ID NO: 1134952 - DNA, 15 bp, Homo sapiens
ctacacattctgtac

SEQ ID NO: 1134953 - DNA, 15 bp, Homo sapiens
cctacacattctgta

SEQ ID NO: 1134954 - DNA, 15 bp, Homo sapiens
acctacacattctgt

SEQ ID NO: 1134955 - DNA, 15 bp, Homo sapiens
aacctacacattctg

SEQ ID NO: 1134956 - DNA, 15 bp, Homo sapiens
aaacctacacattct

SEQ ID NO: 1134957 - DNA, 15 bp, Homo sapiens
caaacctacacattc

SEQ ID NO: 1134958 - DNA, 15 bp, Homo sapiens
acaaacctacacatt

SEQ ID NO: 1134959 - DNA, 15 bp, Homo sapiens
aacaaacctacacat

SEQ ID NO: 1134960 - DNA, 15 bp, Homo sapiens
taacaaacctacaca

SEQ ID NO: 1134961 - DNA, 15 bp, Homo sapiens
gtaacaaacctacac

SEQ ID NO: 1134962 - DNA, 15 bp, Homo sapiens
tgtaacaaacctaca

SEQ ID NO: 1134963 - DNA, 15 bp, Homo sapiens
gtgtaacaaacctac

SEQ ID NO: 1134964 - DNA, 15 bp, Homo sapiens
tgtgtaacaaaccta

SEQ ID NO: 1134965 - DNA, 15 bp, Homo sapiens
ctgtgtaacaaacct

SEQ ID NO: 1134966 - DNA, 15 bp, Homo sapiens
cctgtgtaacaaacc

SEQ ID NO: 1134967 - DNA, 15 bp, Homo sapiens
acctgtgtaacaaac

SEQ ID NO: 1134968 - DNA, 15 bp, Homo sapiens
cacctgtgtaacaaa

SEQ ID NO: 1134969 - DNA, 15 bp, Homo sapiens
acacctgtgtaacaa

SEQ ID NO: 1134970 - DNA, 15 bp, Homo sapiens
tacacctgtgtaaca

SEQ ID NO: 1134971 - DNA, 15 bp, Homo sapiens
gtacacctgtgtaac

SEQ ID NO: 1134972 - DNA, 15 bp, Homo sapiens
cgtacacctgtgtaa

SEQ ID NO: 1134973 - DNA, 15 bp, Homo sapiens
acgtacacctgtgta

SEQ ID NO: 1134974 - DNA, 15 bp, Homo sapiens
tacgtacacctgtgt

SEQ ID NO: 1134975 - DNA, 15 bp, Homo sapiens
atacgtacacctgtg

SEQ ID NO: 1134976 - DNA, 15 bp, Homo sapiens
catacgtacacctgt

SEQ ID NO: 1134977 - DNA, 15 bp, Homo sapiens
gcatacgtacacctg

SEQ ID NO: 1134978 - DNA, 15 bp, Homo sapiens
ggcatacgtacacct

SEQ ID NO: 1134979 - DNA, 15 bp, Homo sapiens
tggcatacgtacacc

SEQ ID NO: 1134980 - DNA, 15 bp, Homo sapiens
atggcatacgtacac

SEQ ID NO: 1134981 - DNA, 15 bp, Homo sapiens
catggcatacgtaca

SEQ ID NO: 1134982 - DNA, 15 bp, Homo sapiens
ccatggcatacgtac

SEQ ID NO: 1134983 - DNA, 15 bp, Homo sapiens
accatggcatacgta

SEQ ID NO: 1134984 - DNA, 15 bp, Homo sapiens
caccatggcatacgt

SEQ ID NO: 1134985 - DNA, 15 bp, Homo sapiens
ccaccatggcatacg

SEQ ID NO: 1134986 - DNA, 15 bp, Homo sapiens
accaccatggcatac

SEQ ID NO: 1134987 - DNA, 15 bp, Homo sapiens
aaccaccatggcata

SEQ ID NO: 1134988 - DNA, 15 bp, Homo sapiens
aaaccaccatggcat

SEQ ID NO: 1134989 - DNA, 15 bp, Homo sapiens
caaaccaccatggca

SEQ ID NO: 1134990 - DNA, 15 bp, Homo sapiens
gcaaaccaccatggc

SEQ ID NO: 1134991 - DNA, 15 bp, Homo sapiens
agcaaaccaccatgg

SEQ ID NO: 1134992 - DNA, 15 bp, Homo sapiens
aggtgcagcaaacca

SEQ ID NO: 1134993 - DNA, 15 bp, Homo sapiens
taggtgcagcaaacc

SEQ ID NO: 1134994 - DNA, 15 bp, Homo sapiens
ataggtgcagcaaac

SEQ ID NO: 1134995 - DNA, 15 bp, Homo sapiens
gataggtgcagcaaa

SEQ ID NO: 1134996 - DNA, 15 bp, Homo sapiens
tgataggtgcagcaa

SEQ ID NO: 1134997 - DNA, 15 bp, Homo sapiens
ttgataggtgcagca

SEQ ID NO: 1134998 - DNA, 15 bp, Homo sapiens
attgataggtgcagc

SEQ ID NO: 1134999 - DNA, 15 bp, Homo sapiens
gattgataggtgcag

SEQ ID NO: 1135000 - DNA, 15 bp, Homo sapiens
ggattgataggtgca

SEQ ID NO: 1135001 - DNA, 15 bp, Homo sapiens
tggattgataggtgc

SEQ ID NO: 1135002 - DNA, 15 bp, Homo sapiens
atggattgataggtg

SEQ ID NO: 1135003 - DNA, 15 bp, Homo sapiens
gatggattgataggt

SEQ ID NO: 1135004 - DNA, 15 bp, Homo sapiens
tgatggattgatagg

SEQ ID NO: 1135005 - DNA, 15 bp, Homo sapiens
atgatggattgatag

SEQ ID NO: 1135006 - DNA, 15 bp, Homo sapiens
aatgatggattgata

SEQ ID NO: 1135007 - DNA, 15 bp, Homo sapiens
gaatgatggattgat

SEQ ID NO: 1135008 - DNA, 15 bp, Homo sapiens
agaatgatggattga

SEQ ID NO: 1135009 - DNA, 15 bp, Homo sapiens
tagaatgatggattg

SEQ ID NO: 1135010 - DNA, 15 bp, Homo sapiens
ctagaatgatggatt

SEQ ID NO: 1135011 - DNA, 15 bp, Homo sapiens
cctagaatgatggat

SEQ ID NO: 1135012 - DNA, 15 bp, Homo sapiens
acctagaatgatgga

SEQ ID NO: 1135013 - DNA, 15 bp, Homo sapiens
aacctagaatgatgg

SEQ ID NO: 1135014 - DNA, 15 bp, Homo sapiens
aaacctagaatgatg

SEQ ID NO: 1135015 - DNA, 15 bp, Homo sapiens
aaaacctagaatgat

SEQ ID NO: 1135016 - DNA, 15 bp, Homo sapiens
taaaacctagaatga

SEQ ID NO: 1135017 - DNA, 15 bp, Homo sapiens
ttaaaacctagaatg

SEQ ID NO: 1135018 - DNA, 15 bp, Homo sapiens
cttaaaacctagaat

SEQ ID NO: 1135019 - DNA, 15 bp, Homo sapiens
gcttaaaacctagaa

SEQ ID NO: 1135020 - DNA, 15 bp, Homo sapiens
ggcttaaaacctaga

SEQ ID NO: 1135021 - DNA, 15 bp, Homo sapiens
aggcttaaaacctag

SEQ ID NO: 1135022 - DNA, 15 bp, Homo sapiens
aaggcttaaaaccta

SEQ ID NO: 1135023 - DNA, 15 bp, Homo sapiens
caaggcttaaaacct

SEQ ID NO: 1135024 - DNA, 15 bp, Homo sapiens
gcaaggcttaaaacc

SEQ ID NO: 1135025 - DNA, 15 bp, Homo sapiens
tgcaaggcttaaaac

SEQ ID NO: 1135026 - DNA, 15 bp, Homo sapiens
atgcaaggcttaaaa

SEQ ID NO: 1135027 - DNA, 15 bp, Homo sapiens
catgcaaggcttaaa

SEQ ID NO: 1135028 - DNA, 15 bp, Homo sapiens
gcatgcaaggcttaa

SEQ ID NO: 1135029 - DNA, 15 bp, Homo sapiens
tgcatgcaaggctta

SEQ ID NO: 1135030 - DNA, 15 bp, Homo sapiens
atgcatgcaaggctt

SEQ ID NO: 1135031 - DNA, 15 bp, Homo sapiens
aatgcatgcaaggct

SEQ ID NO: 1135032 - DNA, 15 bp, Homo sapiens
taatgcatgcaaggc

SEQ ID NO: 1135033 - DNA, 15 bp, Homo sapiens
ctaatgcatgcaagg

SEQ ID NO: 1135034 - DNA, 15 bp, Homo sapiens
gctaatgcatgcaag

SEQ ID NO: 1135035 - DNA, 15 bp, Homo sapiens
agctaatgcatgcaa

SEQ ID NO: 1135036 - DNA, 15 bp, Homo sapiens
tagctaatgcatgca

SEQ ID NO: 1135037 - DNA, 15 bp, Homo sapiens
atagctaatgcatgc

SEQ ID NO: 1135038 - DNA, 15 bp, Homo sapiens
aatagctaatgcatg

SEQ ID NO: 1135039 - DNA, 15 bp, Homo sapiens
aaatagctaatgcat

SEQ ID NO: 1135040 - DNA, 15 bp, Homo sapiens
caaatagctaatgca

SEQ ID NO: 1135041 - DNA, 15 bp, Homo sapiens
acaaatagctaatgc

SEQ ID NO: 1135042 - DNA, 15 bp, Homo sapiens
gacaaatagctaatg

SEQ ID NO: 1135043 - DNA, 15 bp, Homo sapiens
ggacaaatagctaat

SEQ ID NO: 1135044 - DNA, 15 bp, Homo sapiens
aggacaaatagctaa

SEQ ID NO: 1135045 - DNA, 15 bp, Homo sapiens
taggacaaatagcta

SEQ ID NO: 1135046 - DNA, 15 bp, Homo sapiens
ttaggacaaatagct

SEQ ID NO: 1135047 - DNA, 15 bp, Homo sapiens
attaggacaaatagc

SEQ ID NO: 1135048 - DNA, 15 bp, Homo sapiens
tattaggacaaatag

SEQ ID NO: 1135049 - DNA, 15 bp, Homo sapiens
gtattaggacaaata

SEQ ID NO: 1135050 - DNA, 15 bp, Homo sapiens
tgtattaggacaaat

SEQ ID NO: 1135051 - DNA, 15 bp, Homo sapiens
gtgtattaggacaaa

SEQ ID NO: 1135052 - DNA, 15 bp, Homo sapiens
agtgtattaggacaa

SEQ ID NO: 1135053 - DNA, 15 bp, Homo sapiens
gagtgtattaggaca

SEQ ID NO: 1135054 - DNA, 15 bp, Homo sapiens
ggagtgtattaggac

SEQ ID NO: 1135055 - DNA, 15 bp, Homo sapiens
gggagtgtattagga

SEQ ID NO: 1135056 - DNA, 15 bp, Homo sapiens
agggagtgtattagg

SEQ ID NO: 1135057 - DNA, 15 bp, Homo sapiens
gagggagtgtattag

SEQ ID NO: 1135058 - DNA, 15 bp, Homo sapiens
agagggagtgtatta

SEQ ID NO: 1135059 - DNA, 15 bp, Homo sapiens
aagagggagtgtatt

SEQ ID NO: 1135060 - DNA, 15 bp, Homo sapiens
gaagagggagtgtat

SEQ ID NO: 1135061 - DNA, 15 bp, Homo sapiens
agaagagggagtgta

SEQ ID NO: 1135062 - DNA, 15 bp, Homo sapiens
aagaagagggagtgt

SEQ ID NO: 1135063 - DNA, 15 bp, Homo sapiens
caagaagagggagtg

SEQ ID NO: 1135064 - DNA, 15 bp, Homo sapiens
gcaagaagagggagt

SEQ ID NO: 1135065 - DNA, 15 bp, Homo sapiens
ggcaagaagagggag

SEQ ID NO: 1135066 - DNA, 15 bp, Homo sapiens
gggcaagaagaggga

SEQ ID NO: 1135067 - DNA, 15 bp, Homo sapiens
ggggcaagaagaggg

SEQ ID NO: 1135068 - DNA, 15 bp, Homo sapiens
aggggcaagaagagg

SEQ ID NO: 1135069 - DNA, 15 bp, Homo sapiens
gaggggcaagaagag

SEQ ID NO: 1135070 - DNA, 15 bp, Homo sapiens
ggaggggcaagaaga

SEQ ID NO: 1135071 - DNA, 15 bp, Homo sapiens
tggaggggcaagaag

SEQ ID NO: 1135072 - DNA, 15 bp, Homo sapiens
gtggaggggcaagaa

SEQ ID NO: 1135073 - DNA, 15 bp, Homo sapiens
ggtggaggggcaaga

SEQ ID NO: 1135074 - DNA, 15 bp, Homo sapiens
gggtggaggggcaag

SEQ ID NO: 1135075 - DNA, 15 bp, Homo sapiens
ggggtggaggggcaa

SEQ ID NO: 1135076 - DNA, 15 bp, Homo sapiens
gggggtggaggggca

SEQ ID NO: 1135077 - DNA, 15 bp, Homo sapiens
tgggggtggaggggc

SEQ ID NO: 1135078 - DNA, 15 bp, Homo sapiens
ttgggggtggagggg

SEQ ID NO: 1135079 - DNA, 15 bp, Homo sapiens
attgggggtggaggg

SEQ ID NO: 1135080 - DNA, 15 bp, Homo sapiens
aattgggggtggagg

SEQ ID NO: 1135081 - DNA, 15 bp, Homo sapiens
caattgggggtggag

SEQ ID NO: 1135082 - DNA, 15 bp, Homo sapiens
ccaattgggggtgga

SEQ ID NO: 1135083 - DNA, 15 bp, Homo sapiens
gccaattgggggtgg

SEQ ID NO: 1135084 - DNA, 15 bp, Homo sapiens
agccaattgggggtg

SEQ ID NO: 1135085 - DNA, 15 bp, Homo sapiens
gagccaattgggggt

SEQ ID NO: 1135086 - DNA, 15 bp, Homo sapiens
agagccaattggggg

SEQ ID NO: 1135087 - DNA, 15 bp, Homo sapiens
tagagccaattgggg

SEQ ID NO: 1135088 - DNA, 15 bp, Homo sapiens
ctagagccaattggg

SEQ ID NO: 1135089 - DNA, 15 bp, Homo sapiens
actagagccaattgg

SEQ ID NO: 1135090 - DNA, 15 bp, Homo sapiens
cactagagccaattg

SEQ ID NO: 1135091 - DNA, 15 bp, Homo sapiens
acactagagccaatt

SEQ ID NO: 1135092 - DNA, 15 bp, Homo sapiens
cacactagagccaat

SEQ ID NO: 1135093 - DNA, 15 bp, Homo sapiens
acacactagagccaa

SEQ ID NO: 1135094 - DNA, 15 bp, Homo sapiens
cacacactagagcca

SEQ ID NO: 1135095 - DNA, 15 bp, Homo sapiens
acacacactagagcc

SEQ ID NO: 1135096 - DNA, 15 bp, Homo sapiens
aacacacactagagc

SEQ ID NO: 1135097 - DNA, 15 bp, Homo sapiens
caacacacactagag

SEQ ID NO: 1135098 - DNA, 15 bp, Homo sapiens
acaacacacactaga

SEQ ID NO: 1135099 - DNA, 15 bp, Homo sapiens
aacaacacacactag

SEQ ID NO: 1135100 - DNA, 15 bp, Homo sapiens
gaacaacacacacta

SEQ ID NO: 1135101 - DNA, 15 bp, Homo sapiens
aaggggaacaacaca

SEQ ID NO: 1135102 - DNA, 15 bp, Homo sapiens
gaaggggaacaacac

SEQ ID NO: 1135103 - DNA, 15 bp, Homo sapiens
ggaaggggaacaaca

SEQ ID NO: 1135104 - DNA, 15 bp, Homo sapiens
aggaaggggaacaac

SEQ ID NO: 1135105 - DNA, 15 bp, Homo sapiens
caggaaggggaacaa

SEQ ID NO: 1135106 - DNA, 15 bp, Homo sapiens
gttgaacaatgagaa

SEQ ID NO: 1135107 - DNA, 15 bp, Homo sapiens
agttgaacaatgaga

SEQ ID NO: 1135108 - DNA, 15 bp, Homo sapiens
gagttgaacaatgag

SEQ ID NO: 1135109 - DNA, 15 bp, Homo sapiens
ggagttgaacaatga

SEQ ID NO: 1135110 - DNA, 15 bp, Homo sapiens
tggagttgaacaatg

SEQ ID NO: 1135111 - DNA, 15 bp, Homo sapiens
ttggagttgaacaat

SEQ ID NO: 1135112 - DNA, 15 bp, Homo sapiens
gttggagttgaacaa

SEQ ID NO: 1135113 - DNA, 15 bp, Homo sapiens
agttggagttgaaca

SEQ ID NO: 1135114 - DNA, 15 bp, Homo sapiens
aagttggagttgaac

SEQ ID NO: 1135115 - DNA, 15 bp, Homo sapiens
taagttggagttgaa

SEQ ID NO: 1135116 - DNA, 15 bp, Homo sapiens
ataagttggagttga

SEQ ID NO: 1135117 - DNA, 15 bp, Homo sapiens
cataagttggagttg

SEQ ID NO: 1135118 - DNA, 15 bp, Homo sapiens
tcataagttggagtt

SEQ ID NO: 1135119 - DNA, 15 bp, Homo sapiens
ctcataagttggagt

SEQ ID NO: 1135120 - DNA, 15 bp, Homo sapiens
actcataagttggag

SEQ ID NO: 1135121 - DNA, 15 bp, Homo sapiens
cactcataagttgga

SEQ ID NO: 1135122 - DNA, 15 bp, Homo sapiens
tcactcataagttgg

SEQ ID NO: 1135123 - DNA, 15 bp, Homo sapiens
ctcactcataagttg

SEQ ID NO: 1135124 - DNA, 15 bp, Homo sapiens
tctcactcataagtt

SEQ ID NO: 1135125 - DNA, 15 bp, Homo sapiens
attctcactcataag

SEQ ID NO: 1135126 - DNA, 15 bp, Homo sapiens
tattctcactcataa

SEQ ID NO: 1135127 - DNA, 15 bp, Homo sapiens
tgcatattctcactc

SEQ ID NO: 1135128 - DNA, 15 bp, Homo sapiens
cactgcatattctca

SEQ ID NO: 1135129 - DNA, 15 bp, Homo sapiens
acactgcatattctc

SEQ ID NO: 1135130 - DNA, 15 bp, Homo sapiens
aacactgcatattct

SEQ ID NO: 1135131 - DNA, 15 bp, Homo sapiens
aaacactgcatattc

SEQ ID NO: 1135132 - DNA, 15 bp, Homo sapiens
taaacactgcatatt

SEQ ID NO: 1135133 - DNA, 15 bp, Homo sapiens
ctaaacactgcatat

SEQ ID NO: 1135134 - DNA, 15 bp, Homo sapiens
actaaacactgcata

SEQ ID NO: 1135135 - DNA, 15 bp, Homo sapiens
aactaaacactgcat

SEQ ID NO: 1135136 - DNA, 15 bp, Homo sapiens
aaactaaacactgca

SEQ ID NO: 1135137 - DNA, 15 bp, Homo sapiens
aaaactaaacactgc

SEQ ID NO: 1135138 - DNA, 15 bp, Homo sapiens
gaaaactaaacactg

SEQ ID NO: 1135139 - DNA, 15 bp, Homo sapiens
agaaaactaaacact

SEQ ID NO: 1135140 - DNA, 15 bp, Homo sapiens
cagaaaactaaacac

SEQ ID NO: 1135141 - DNA, 15 bp, Homo sapiens
acagaaaactaaaca

SEQ ID NO: 1135142 - DNA, 15 bp, Homo sapiens
aacagaaaactaaac

SEQ ID NO: 1135143 - DNA, 15 bp, Homo sapiens
gaacagaaaactaaa

SEQ ID NO: 1135144 - DNA, 15 bp, Homo sapiens
ggaacagaaaactaa

SEQ ID NO: 1135145 - DNA, 15 bp, Homo sapiens
aggaacagaaaacta

SEQ ID NO: 1135146 - DNA, 15 bp, Homo sapiens
taggaacagaaaact

SEQ ID NO: 1135147 - DNA, 15 bp, Homo sapiens
ataggaacagaaaac

SEQ ID NO: 1135148 - DNA, 15 bp, Homo sapiens
cataggaacagaaaa

SEQ ID NO: 1135149 - DNA, 15 bp, Homo sapiens
acataggaacagaaa

SEQ ID NO: 1135150 - DNA, 15 bp, Homo sapiens
aacataggaacagaa

SEQ ID NO: 1135151 - DNA, 15 bp, Homo sapiens
taacataggaacaga

SEQ ID NO: 1135152 - DNA, 15 bp, Homo sapiens
ctaacataggaacag

SEQ ID NO: 1135153 - DNA, 15 bp, Homo sapiens
actaacataggaaca

SEQ ID NO: 1135154 - DNA, 15 bp, Homo sapiens
aactaacataggaac

SEQ ID NO: 1135155 - DNA, 15 bp, Homo sapiens
aaactaacataggaa

SEQ ID NO: 1135156 - DNA, 15 bp, Homo sapiens
caaactaacatagga

SEQ ID NO: 1135157 - DNA, 15 bp, Homo sapiens
gcaaactaacatagg

SEQ ID NO: 1135158 - DNA, 15 bp, Homo sapiens
agcaaactaacatag

SEQ ID NO: 1135159 - DNA, 15 bp, Homo sapiens
cagcaaactaacata

SEQ ID NO: 1135160 - DNA, 15 bp, Homo sapiens
tcagcaaactaacat

SEQ ID NO: 1135161 - DNA, 15 bp, Homo sapiens
gccatcattctcagc

SEQ ID NO: 1135162 - DNA, 15 bp, Homo sapiens
agccatcattctcag

SEQ ID NO: 1135163 - DNA, 15 bp, Homo sapiens
aagccatcattctca

SEQ ID NO: 1135164 - DNA, 15 bp, Homo sapiens
gaagccatcattctc

SEQ ID NO: 1135165 - DNA, 15 bp, Homo sapiens
ggaagccatcattct

SEQ ID NO: 1135166 - DNA, 15 bp, Homo sapiens
tggaagccatcattc

SEQ ID NO: 1135167 - DNA, 15 bp, Homo sapiens
ctggaagccatcatt

SEQ ID NO: 1135168 - DNA, 15 bp, Homo sapiens
gctggaagccatcat

SEQ ID NO: 1135169 - DNA, 15 bp, Homo sapiens
agctggaagccatca

SEQ ID NO: 1135170 - DNA, 15 bp, Homo sapiens
aagctggaagccatc

SEQ ID NO: 1135171 - DNA, 15 bp, Homo sapiens
gaagctggaagccat

SEQ ID NO: 1135172 - DNA, 15 bp, Homo sapiens
tgaagctggaagcca

SEQ ID NO: 1135173 - DNA, 15 bp, Homo sapiens
atgaagctggaagcc

SEQ ID NO: 1135174 - DNA, 15 bp, Homo sapiens
gatgaagctggaagc

SEQ ID NO: 1135175 - DNA, 15 bp, Homo sapiens
ggatgaagctggaag

SEQ ID NO: 1135176 - DNA, 15 bp, Homo sapiens
tggatgaagctggaa

SEQ ID NO: 1135177 - DNA, 15 bp, Homo sapiens
atggatgaagctgga

SEQ ID NO: 1135178 - DNA, 15 bp, Homo sapiens
catggatgaagctgg

SEQ ID NO: 1135179 - DNA, 15 bp, Homo sapiens
acatggatgaagctg

SEQ ID NO: 1135180 - DNA, 15 bp, Homo sapiens
gacatggatgaagct

SEQ ID NO: 1135181 - DNA, 15 bp, Homo sapiens
ggacatggatgaagc

SEQ ID NO: 1135182 - DNA, 15 bp, Homo sapiens
gggacatggatgaag

SEQ ID NO: 1135183 - DNA, 15 bp, Homo sapiens
cagggacatggatga

SEQ ID NO: 1135184 - DNA, 15 bp, Homo sapiens
gatgagatcatgtcc

SEQ ID NO: 1135185 - DNA, 15 bp, Homo sapiens
ggatgagatcatgtc

SEQ ID NO: 1135186 - DNA, 15 bp, Homo sapiens
gggatgagatcatgt

SEQ ID NO: 1135187 - DNA, 15 bp, Homo sapiens
agggatgagatcatg

SEQ ID NO: 1135188 - DNA, 15 bp, Homo sapiens
aagggatgagatcat

SEQ ID NO: 1135189 - DNA, 15 bp, Homo sapiens
aaagggatgagatca

SEQ ID NO: 1135190 - DNA, 15 bp, Homo sapiens
aaaagggatgagatc

SEQ ID NO: 1135191 - DNA, 15 bp, Homo sapiens
aaaaagggatgagat

SEQ ID NO: 1135192 - DNA, 15 bp, Homo sapiens
taaaaagggatgaga

SEQ ID NO: 1135193 - DNA, 15 bp, Homo sapiens
ataaaaagggatgag

SEQ ID NO: 1135194 - DNA, 15 bp, Homo sapiens
cataaaaagggatga

SEQ ID NO: 1135195 - DNA, 15 bp, Homo sapiens
ccataaaaagggatg

SEQ ID NO: 1135196 - DNA, 15 bp, Homo sapiens
accataaaaagggat

SEQ ID NO: 1135197 - DNA, 15 bp, Homo sapiens
aaccataaaaaggga

SEQ ID NO: 1135198 - DNA, 15 bp, Homo sapiens
caaccataaaaaggg

SEQ ID NO: 1135199 - DNA, 15 bp, Homo sapiens
gcaaccataaaaagg

SEQ ID NO: 1135200 - DNA, 15 bp, Homo sapiens
tgcaaccataaaaag

SEQ ID NO: 1135201 - DNA, 15 bp, Homo sapiens
atgcaaccataaaaa

SEQ ID NO: 1135202 - DNA, 15 bp, Homo sapiens
tatgcaaccataaaa

SEQ ID NO: 1135203 - DNA, 15 bp, Homo sapiens
ctatgcaaccataaa

SEQ ID NO: 1135204 - DNA, 15 bp, Homo sapiens
actatgcaaccataa

SEQ ID NO: 1135205 - DNA, 15 bp, Homo sapiens
tactatgcaaccata

SEQ ID NO: 1135206 - DNA, 15 bp, Homo sapiens
atactatgcaaccat

SEQ ID NO: 1135207 - DNA, 15 bp, Homo sapiens
gcaccatggaatact

SEQ ID NO: 1135208 - DNA, 15 bp, Homo sapiens
tgcaccatggaatac

SEQ ID NO: 1135209 - DNA, 15 bp, Homo sapiens
atgcaccatggaata

SEQ ID NO: 1135210 - DNA, 15 bp, Homo sapiens
tatgcaccatggaat

SEQ ID NO: 1135211 - DNA, 15 bp, Homo sapiens
atatgcaccatggaa

SEQ ID NO: 1135212 - DNA, 15 bp, Homo sapiens
catatgcaccatgga

SEQ ID NO: 1135213 - DNA, 15 bp, Homo sapiens
acatatgcaccatgg

SEQ ID NO: 1135214 - DNA, 15 bp, Homo sapiens
aacatatgcaccatg

SEQ ID NO: 1135215 - DNA, 15 bp, Homo sapiens
gaacatatgcaccat

SEQ ID NO: 1135216 - DNA, 15 bp, Homo sapiens
ggaacatatgcacca

SEQ ID NO: 1135217 - DNA, 15 bp, Homo sapiens
tggaacatatgcacc

SEQ ID NO: 1135218 - DNA, 15 bp, Homo sapiens
gtggaacatatgcac

SEQ ID NO: 1135219 - DNA, 15 bp, Homo sapiens
tgtggaacatatgca

SEQ ID NO: 1135220 - DNA, 15 bp, Homo sapiens
atgtggaacatatgc

SEQ ID NO: 1135221 - DNA, 15 bp, Homo sapiens
aatgtggaacatatg

SEQ ID NO: 1135222 - DNA, 15 bp, Homo sapiens
aaatgtggaacatat

SEQ ID NO: 1135223 - DNA, 15 bp, Homo sapiens
aaaatgtggaacata

SEQ ID NO: 1135224 - DNA, 15 bp, Homo sapiens
gaaaatgtggaacat

SEQ ID NO: 1135225 - DNA, 15 bp, Homo sapiens
agaaaatgtggaaca

SEQ ID NO: 1135226 - DNA, 15 bp, Homo sapiens
aagaaaatgtggaac

SEQ ID NO: 1135227 - DNA, 15 bp, Homo sapiens
aaagaaaatgtggaa

SEQ ID NO: 1135228 - DNA, 15 bp, Homo sapiens
taaagaaaatgtgga

SEQ ID NO: 1135229 - DNA, 15 bp, Homo sapiens
ataaagaaaatgtgg

SEQ ID NO: 1135230 - DNA, 15 bp, Homo sapiens
gataaagaaaatgtg

SEQ ID NO: 1135231 - DNA, 15 bp, Homo sapiens
gactggataaagaaa

SEQ ID NO: 1135232 - DNA, 15 bp, Homo sapiens
agactggataaagaa

SEQ ID NO: 1135233 - DNA, 15 bp, Homo sapiens
tagactggataaaga

SEQ ID NO: 1135234 - DNA, 15 bp, Homo sapiens
atagactggataaag

SEQ ID NO: 1135235 - DNA, 15 bp, Homo sapiens
aatagactggataaa

SEQ ID NO: 1135236 - DNA, 15 bp, Homo sapiens
taatagactggataa

SEQ ID NO: 1135237 - DNA, 15 bp, Homo sapiens
ataatagactggata

SEQ ID NO: 1135238 - DNA, 15 bp, Homo sapiens
aataatagactggat

SEQ ID NO: 1135239 - DNA, 15 bp, Homo sapiens
caataatagactgga

SEQ ID NO: 1135240 - DNA, 15 bp, Homo sapiens
tcaataatagactgg

SEQ ID NO: 1135241 - DNA, 15 bp, Homo sapiens
atcaataatagactg

SEQ ID NO: 1135242 - DNA, 15 bp, Homo sapiens
catcaataatagact

SEQ ID NO: 1135243 - DNA, 15 bp, Homo sapiens
ccatcaataatagac

SEQ ID NO: 1135244 - DNA, 15 bp, Homo sapiens
cccatcaataataga

SEQ ID NO: 1135245 - DNA, 15 bp, Homo sapiens
gcccatcaataatag

SEQ ID NO: 1135246 - DNA, 15 bp, Homo sapiens
tgcccatcaataata

SEQ ID NO: 1135247 - DNA, 15 bp, Homo sapiens
atgcccatcaataat

SEQ ID NO: 1135248 - DNA, 15 bp, Homo sapiens
aatgcccatcaataa

SEQ ID NO: 1135249 - DNA, 15 bp, Homo sapiens
aaatgcccatcaata

SEQ ID NO: 1135250 - DNA, 15 bp, Homo sapiens
caaatgcccatcaat

SEQ ID NO: 1135251 - DNA, 15 bp, Homo sapiens
ccaaatgcccatcaa

SEQ ID NO: 1135252 - DNA, 15 bp, Homo sapiens
cccaaatgcccatca

SEQ ID NO: 1135253 - DNA, 15 bp, Homo sapiens
acccaaatgcccatc

SEQ ID NO: 1135254 - DNA, 15 bp, Homo sapiens
caacccaaatgccca

SEQ ID NO: 1135255 - DNA, 15 bp, Homo sapiens
ccaacccaaatgccc

SEQ ID NO: 1135256 - DNA, 15 bp, Homo sapiens
accaacccaaatgcc

SEQ ID NO: 1135257 - DNA, 15 bp, Homo sapiens
aaccaacccaaatgc

SEQ ID NO: 1135258 - DNA, 15 bp, Homo sapiens
atggaaccaacccaa

SEQ ID NO: 1135259 - DNA, 15 bp, Homo sapiens
catggaaccaaccca

SEQ ID NO: 1135260 - DNA, 15 bp, Homo sapiens
acatggaaccaaccc

SEQ ID NO: 1135261 - DNA, 15 bp, Homo sapiens
gacatggaaccaacc

SEQ ID NO: 1135262 - DNA, 15 bp, Homo sapiens
agacatggaaccaac

SEQ ID NO: 1135263 - DNA, 15 bp, Homo sapiens
aagacatggaaccaa

SEQ ID NO: 1135264 - DNA, 15 bp, Homo sapiens
aaagacatggaacca

SEQ ID NO: 1135265 - DNA, 15 bp, Homo sapiens
caaagacatggaacc

SEQ ID NO: 1135266 - DNA, 15 bp, Homo sapiens
gcaaagacatggaac

SEQ ID NO: 1135267 - DNA, 15 bp, Homo sapiens
agcaaagacatggaa

SEQ ID NO: 1135268 - DNA, 15 bp, Homo sapiens
tagcaaagacatgga

SEQ ID NO: 1135269 - DNA, 15 bp, Homo sapiens
atagcaaagacatgg

SEQ ID NO: 1135270 - DNA, 15 bp, Homo sapiens
aatagcaaagacatg

SEQ ID NO: 1135271 - DNA, 15 bp, Homo sapiens
tacaatagcaaagac

SEQ ID NO: 1135272 - DNA, 15 bp, Homo sapiens
ttacaatagcaaaga

SEQ ID NO: 1135273 - DNA, 15 bp, Homo sapiens
tttacaatagcaaag

SEQ ID NO: 1135274 - DNA, 15 bp, Homo sapiens
atttacaatagcaaa

SEQ ID NO: 1135275 - DNA, 15 bp, Homo sapiens
tatttacaatagcaa

SEQ ID NO: 1135276 - DNA, 15 bp, Homo sapiens
ctatttacaatagca

SEQ ID NO: 1135277 - DNA, 15 bp, Homo sapiens
actatttacaatagc

SEQ ID NO: 1135278 - DNA, 15 bp, Homo sapiens
cactatttacaatag

SEQ ID NO: 1135279 - DNA, 15 bp, Homo sapiens
gcactatttacaata

SEQ ID NO: 1135280 - DNA, 15 bp, Homo sapiens
agcactatttacaat

SEQ ID NO: 1135281 - DNA, 15 bp, Homo sapiens
cagcactatttacaa

SEQ ID NO: 1135282 - DNA, 15 bp, Homo sapiens
gcagcactatttaca

SEQ ID NO: 1135283 - DNA, 15 bp, Homo sapiens
tgcagcactatttac

SEQ ID NO: 1135284 - DNA, 15 bp, Homo sapiens
ttgcagcactattta

SEQ ID NO: 1135285 - DNA, 15 bp, Homo sapiens
attgcagcactattt

SEQ ID NO: 1135286 - DNA, 15 bp, Homo sapiens
tattgcagcactatt

SEQ ID NO: 1135287 - DNA, 15 bp, Homo sapiens
ttattgcagcactat

SEQ ID NO: 1135288 - DNA, 15 bp, Homo sapiens
tttattgcagcacta

SEQ ID NO: 1135289 - DNA, 15 bp, Homo sapiens
gtttattgcagcact

SEQ ID NO: 1135290 - DNA, 15 bp, Homo sapiens
tgtttattgcagcac

SEQ ID NO: 1135291 - DNA, 15 bp, Homo sapiens
atgtttattgcagca

SEQ ID NO: 1135292 - DNA, 15 bp, Homo sapiens
tatgtttattgcagc

SEQ ID NO: 1135293 - DNA, 15 bp, Homo sapiens
gtatgtttattgcag

SEQ ID NO: 1135294 - DNA, 15 bp, Homo sapiens
cgtatgtttattgca

SEQ ID NO: 1135295 - DNA, 15 bp, Homo sapiens
acgtatgtttattgc

SEQ ID NO: 1135296 - DNA, 15 bp, Homo sapiens
gtgcacacgtatgtt

SEQ ID NO: 1135297 - DNA, 15 bp, Homo sapiens
cgtgcacacgtatgt

SEQ ID NO: 1135298 - DNA, 15 bp, Homo sapiens
acgtgcacacgtatg

SEQ ID NO: 1135299 - DNA, 15 bp, Homo sapiens
cacgtgcacacgtat

SEQ ID NO: 1135300 - DNA, 15 bp, Homo sapiens
acacgtgcacacgta

SEQ ID NO: 1135301 - DNA, 15 bp, Homo sapiens
gacacgtgcacacgt

SEQ ID NO: 1135302 - DNA, 15 bp, Homo sapiens
agacacgtgcacacg

SEQ ID NO: 1135303 - DNA, 15 bp, Homo sapiens
aagacacgtgcacac

SEQ ID NO: 1135304 - DNA, 15 bp, Homo sapiens
aaagacacgtgcaca

SEQ ID NO: 1135305 - DNA, 15 bp, Homo sapiens
taaagacacgtgcac

SEQ ID NO: 1135306 - DNA, 15 bp, Homo sapiens
ataaagacacgtgca

SEQ ID NO: 1135307 - DNA, 15 bp, Homo sapiens
tataaagacacgtgc

SEQ ID NO: 1135308 - DNA, 15 bp, Homo sapiens
ctataaagacacgtg

SEQ ID NO: 1135309 - DNA, 15 bp, Homo sapiens
actataaagacacgt

SEQ ID NO: 1135310 - DNA, 15 bp, Homo sapiens
tactataaagacacg

SEQ ID NO: 1135311 - DNA, 15 bp, Homo sapiens
ctactataaagacac

SEQ ID NO: 1135312 - DNA, 15 bp, Homo sapiens
tctactataaagaca

SEQ ID NO: 1135313 - DNA, 15 bp, Homo sapiens
ttctactataaagac

SEQ ID NO: 1135314 - DNA, 15 bp, Homo sapiens
attctactataaaga

SEQ ID NO: 1135315 - DNA, 15 bp, Homo sapiens
cattctactataaag

SEQ ID NO: 1135316 - DNA, 15 bp, Homo sapiens
tcattctactataaa

SEQ ID NO: 1135317 - DNA, 15 bp, Homo sapiens
atcattctactataa

SEQ ID NO: 1135318 - DNA, 15 bp, Homo sapiens
aatcattctactata

SEQ ID NO: 1135319 - DNA, 15 bp, Homo sapiens
aaatcattctactat

SEQ ID NO: 1135320 - DNA, 15 bp, Homo sapiens
taaatcattctacta

SEQ ID NO: 1135321 - DNA, 15 bp, Homo sapiens
ataaatcattctact

SEQ ID NO: 1135322 - DNA, 15 bp, Homo sapiens
tataaatcattctac

SEQ ID NO: 1135323 - DNA, 15 bp, Homo sapiens
atataaatcattcta

SEQ ID NO: 1135324 - DNA, 15 bp, Homo sapiens
aatataaatcattct

SEQ ID NO: 1135325 - DNA, 15 bp, Homo sapiens
gaatataaatcattc

SEQ ID NO: 1135326 - DNA, 15 bp, Homo sapiens
ggaatataaatcatt

SEQ ID NO: 1135327 - DNA, 15 bp, Homo sapiens
aggaatataaatcat

SEQ ID NO: 1135328 - DNA, 15 bp, Homo sapiens
aaggaatataaatca

SEQ ID NO: 1135329 - DNA, 15 bp, Homo sapiens
aaaggaatataaatc

SEQ ID NO: 1135330 - DNA, 15 bp, Homo sapiens
caaaggaatataaat

SEQ ID NO: 1135331 - DNA, 15 bp, Homo sapiens
ccaaaggaatataaa

SEQ ID NO: 1135332 - DNA, 15 bp, Homo sapiens
cccaaaggaatataa

SEQ ID NO: 1135333 - DNA, 15 bp, Homo sapiens
acccaaaggaatata

SEQ ID NO: 1135334 - DNA, 15 bp, Homo sapiens
cacccaaaggaatat

SEQ ID NO: 1135335 - DNA, 15 bp, Homo sapiens
acacccaaaggaata

SEQ ID NO: 1135336 - DNA, 15 bp, Homo sapiens
tacacccaaaggaat

SEQ ID NO: 1135337 - DNA, 15 bp, Homo sapiens
atacacccaaaggaa

SEQ ID NO: 1135338 - DNA, 15 bp, Homo sapiens
tatacacccaaagga

SEQ ID NO: 1135339 - DNA, 15 bp, Homo sapiens
gtatacacccaaagg

SEQ ID NO: 1135340 - DNA, 15 bp, Homo sapiens
ggtatacacccaaag

SEQ ID NO: 1135341 - DNA, 15 bp, Homo sapiens
aggtatacacccaaa

SEQ ID NO: 1135342 - DNA, 15 bp, Homo sapiens
taggtatacacccaa

SEQ ID NO: 1135343 - DNA, 15 bp, Homo sapiens
ctaggtatacaccca

SEQ ID NO: 1135344 - DNA, 15 bp, Homo sapiens
actaggtatacaccc

SEQ ID NO: 1135345 - DNA, 15 bp, Homo sapiens
tactaggtatacacc

SEQ ID NO: 1135346 - DNA, 15 bp, Homo sapiens
ttactaggtatacac

SEQ ID NO: 1135347 - DNA, 15 bp, Homo sapiens
attactaggtataca

SEQ ID NO: 1135348 - DNA, 15 bp, Homo sapiens
cattactaggtatac

SEQ ID NO: 1135349 - DNA, 15 bp, Homo sapiens
ccattactaggtata

SEQ ID NO: 1135350 - DNA, 15 bp, Homo sapiens
cccattactaggtat

SEQ ID NO: 1135351 - DNA, 15 bp, Homo sapiens
gcaatcccattacta

SEQ ID NO: 1135352 - DNA, 15 bp, Homo sapiens
agcaatcccattact

SEQ ID NO: 1135353 - DNA, 15 bp, Homo sapiens
cagcaatcccattac

SEQ ID NO: 1135354 - DNA, 15 bp, Homo sapiens
ccagcaatcccatta

SEQ ID NO: 1135355 - DNA, 15 bp, Homo sapiens
cccagcaatcccatt

SEQ ID NO: 1135356 - DNA, 15 bp, Homo sapiens
acccagcaatcccat

SEQ ID NO: 1135357 - DNA, 15 bp, Homo sapiens
ccatttgacccagca

SEQ ID NO: 1135358 - DNA, 15 bp, Homo sapiens
cagaaataccatttg

SEQ ID NO: 1135359 - DNA, 15 bp, Homo sapiens
ccagaaataccattt

SEQ ID NO: 1135360 - DNA, 15 bp, Homo sapiens
accagaaataccatt

SEQ ID NO: 1135361 - DNA, 15 bp, Homo sapiens
aaccagaaataccat

SEQ ID NO: 1135362 - DNA, 15 bp, Homo sapiens
gaaccagaaatacca

SEQ ID NO: 1135363 - DNA, 15 bp, Homo sapiens
agaaccagaaatacc

SEQ ID NO: 1135364 - DNA, 15 bp, Homo sapiens
tagaaccagaaatac

SEQ ID NO: 1135365 - DNA, 15 bp, Homo sapiens
ctagaaccagaaata

SEQ ID NO: 1135366 - DNA, 15 bp, Homo sapiens
tctagaaccagaaat

SEQ ID NO: 1135367 - DNA, 15 bp, Homo sapiens
atctagaaccagaaa

SEQ ID NO: 1135368 - DNA, 15 bp, Homo sapiens
gatctagaaccagaa

SEQ ID NO: 1135369 - DNA, 15 bp, Homo sapiens
agatctagaaccaga

SEQ ID NO: 1135370 - DNA, 15 bp, Homo sapiens
aagatctagaaccag

SEQ ID NO: 1135371 - DNA, 15 bp, Homo sapiens
aaagatctagaacca

SEQ ID NO: 1135372 - DNA, 15 bp, Homo sapiens
caaagatctagaacc

SEQ ID NO: 1135373 - DNA, 15 bp, Homo sapiens
tcaaagatctagaac

SEQ ID NO: 1135374 - DNA, 15 bp, Homo sapiens
ctcaaagatctagaa

SEQ ID NO: 1135375 - DNA, 15 bp, Homo sapiens
cctcaaagatctaga

SEQ ID NO: 1135376 - DNA, 15 bp, Homo sapiens
tcctcaaagatctag

SEQ ID NO: 1135377 - DNA, 15 bp, Homo sapiens
ttcctcaaagatcta

SEQ ID NO: 1135378 - DNA, 15 bp, Homo sapiens
attcctcaaagatct

SEQ ID NO: 1135379 - DNA, 15 bp, Homo sapiens
gattcctcaaagatc

SEQ ID NO: 1135380 - DNA, 15 bp, Homo sapiens
tgattcctcaaagat

SEQ ID NO: 1135381 - DNA, 15 bp, Homo sapiens
gtgattcctcaaaga

SEQ ID NO: 1135382 - DNA, 15 bp, Homo sapiens
ggtgattcctcaaag

SEQ ID NO: 1135383 - DNA, 15 bp, Homo sapiens
tggtgattcctcaaa

SEQ ID NO: 1135384 - DNA, 15 bp, Homo sapiens
gtggtgattcctcaa

SEQ ID NO: 1135385 - DNA, 15 bp, Homo sapiens
tgtggtgattcctca

SEQ ID NO: 1135386 - DNA, 15 bp, Homo sapiens
gtgtggtgattcctc

SEQ ID NO: 1135387 - DNA, 15 bp, Homo sapiens
agtgtggtgattcct

SEQ ID NO: 1135388 - DNA, 15 bp, Homo sapiens
cagtgtggtgattcc

SEQ ID NO: 1135389 - DNA, 15 bp, Homo sapiens
acagtgtggtgattc

SEQ ID NO: 1135390 - DNA, 15 bp, Homo sapiens
gacagtgtggtgatt

SEQ ID NO: 1135391 - DNA, 15 bp, Homo sapiens
agacagtgtggtgat

SEQ ID NO: 1135392 - DNA, 15 bp, Homo sapiens
aagacagtgtggtga

SEQ ID NO: 1135393 - DNA, 15 bp, Homo sapiens
gaagacagtgtggtg

SEQ ID NO: 1135394 - DNA, 15 bp, Homo sapiens
ggaagacagtgtggt

SEQ ID NO: 1135395 - DNA, 15 bp, Homo sapiens
tggaagacagtgtgg

SEQ ID NO: 1135396 - DNA, 15 bp, Homo sapiens
gtggaagacagtgtg

SEQ ID NO: 1135397 - DNA, 15 bp, Homo sapiens
tgtggaagacagtgt

SEQ ID NO: 1135398 - DNA, 15 bp, Homo sapiens
ttgtggaagacagtg

SEQ ID NO: 1135399 - DNA, 15 bp, Homo sapiens
attgtggaagacagt

SEQ ID NO: 1135400 - DNA, 15 bp, Homo sapiens
tcattgtggaagaca

SEQ ID NO: 1135401 - DNA, 15 bp, Homo sapiens
atcattgtggaagac

SEQ ID NO: 1135402 - DNA, 15 bp, Homo sapiens
aatcattgtggaaga

SEQ ID NO: 1135403 - DNA, 15 bp, Homo sapiens
caatcattgtggaag

SEQ ID NO: 1135404 - DNA, 15 bp, Homo sapiens
tcaatcattgtggaa

SEQ ID NO: 1135405 - DNA, 15 bp, Homo sapiens
ttcaatcattgtgga

SEQ ID NO: 1135406 - DNA, 15 bp, Homo sapiens
gttcaatcattgtgg

SEQ ID NO: 1135407 - DNA, 15 bp, Homo sapiens
agttcaatcattgtg

SEQ ID NO: 1135408 - DNA, 15 bp, Homo sapiens
tagttcaatcattgt

SEQ ID NO: 1135409 - DNA, 15 bp, Homo sapiens
ttagttcaatcattg

SEQ ID NO: 1135410 - DNA, 15 bp, Homo sapiens
gttagttcaatcatt

SEQ ID NO: 1135411 - DNA, 15 bp, Homo sapiens
agttagttcaatcat

SEQ ID NO: 1135412 - DNA, 15 bp, Homo sapiens
aagttagttcaatca

SEQ ID NO: 1135413 - DNA, 15 bp, Homo sapiens
taagttagttcaatc

SEQ ID NO: 1135414 - DNA, 15 bp, Homo sapiens
gtaagttagttcaat

SEQ ID NO: 1135415 - DNA, 15 bp, Homo sapiens
tgtaagttagttcaa

SEQ ID NO: 1135416 - DNA, 15 bp, Homo sapiens
atgtaagttagttca

SEQ ID NO: 1135417 - DNA, 15 bp, Homo sapiens
aatgtaagttagttc

SEQ ID NO: 1135418 - DNA, 15 bp, Homo sapiens
gaatgtaagttagtt

SEQ ID NO: 1135419 - DNA, 15 bp, Homo sapiens
agaatgtaagttagt

SEQ ID NO: 1135420 - DNA, 15 bp, Homo sapiens
gagaatgtaagttag

SEQ ID NO: 1135421 - DNA, 15 bp, Homo sapiens
tgagaatgtaagtta

SEQ ID NO: 1135422 - DNA, 15 bp, Homo sapiens
gtgagaatgtaagtt

SEQ ID NO: 1135423 - DNA, 15 bp, Homo sapiens
ggtgagaatgtaagt

SEQ ID NO: 1135424 - DNA, 15 bp, Homo sapiens
tggtgagaatgtaag

SEQ ID NO: 1135425 - DNA, 15 bp, Homo sapiens
ttggtgagaatgtaa

SEQ ID NO: 1135426 - DNA, 15 bp, Homo sapiens
gttggtgagaatgta

SEQ ID NO: 1135427 - DNA, 15 bp, Homo sapiens
cgttggtgagaatgt

SEQ ID NO: 1135428 - DNA, 15 bp, Homo sapiens
ccgttggtgagaatg

SEQ ID NO: 1135429 - DNA, 15 bp, Homo sapiens
accgttggtgagaat

SEQ ID NO: 1135430 - DNA, 15 bp, Homo sapiens
caccgttggtgagaa

SEQ ID NO: 1135431 - DNA, 15 bp, Homo sapiens
acaccgttggtgaga

SEQ ID NO: 1135432 - DNA, 15 bp, Homo sapiens
tacaccgttggtgag

SEQ ID NO: 1135433 - DNA, 15 bp, Homo sapiens
ttacaccgttggtga

SEQ ID NO: 1135434 - DNA, 15 bp, Homo sapiens
tttacaccgttggtg

SEQ ID NO: 1135435 - DNA, 15 bp, Homo sapiens
ttttacaccgttggt

SEQ ID NO: 1135436 - DNA, 15 bp, Homo sapiens
cttttacaccgttgg

SEQ ID NO: 1135437 - DNA, 15 bp, Homo sapiens
acttttacaccgttg

SEQ ID NO: 1135438 - DNA, 15 bp, Homo sapiens
cacttttacaccgtt

SEQ ID NO: 1135439 - DNA, 15 bp, Homo sapiens
acacttttacaccgt

SEQ ID NO: 1135440 - DNA, 15 bp, Homo sapiens
aacacttttacaccg

SEQ ID NO: 1135441 - DNA, 15 bp, Homo sapiens
gaacacttttacacc

SEQ ID NO: 1135442 - DNA, 15 bp, Homo sapiens
ggaacacttttacac

SEQ ID NO: 1135443 - DNA, 15 bp, Homo sapiens
aggaacacttttaca

SEQ ID NO: 1135444 - DNA, 15 bp, Homo sapiens
taggaacacttttac

SEQ ID NO: 1135445 - DNA, 15 bp, Homo sapiens
ataggaacactttta

SEQ ID NO: 1135446 - DNA, 15 bp, Homo sapiens
aataggaacactttt

SEQ ID NO: 1135447 - DNA, 15 bp, Homo sapiens
aaataggaacacttt

SEQ ID NO: 1135448 - DNA, 15 bp, Homo sapiens
gaaataggaacactt

SEQ ID NO: 1135449 - DNA, 15 bp, Homo sapiens
agaaataggaacact

SEQ ID NO: 1135450 - DNA, 15 bp, Homo sapiens
gagaaataggaacac

SEQ ID NO: 1135451 - DNA, 15 bp, Homo sapiens
ggagaaataggaaca

SEQ ID NO: 1135452 - DNA, 15 bp, Homo sapiens
tggagaaataggaac

SEQ ID NO: 1135453 - DNA, 15 bp, Homo sapiens
gtggagaaataggaa

SEQ ID NO: 1135454 - DNA, 15 bp, Homo sapiens
tgtggagaaatagga

SEQ ID NO: 1135455 - DNA, 15 bp, Homo sapiens
ctgtggagaaatagg

SEQ ID NO: 1135456 - DNA, 15 bp, Homo sapiens
gctgtggagaaatag

SEQ ID NO: 1135457 - DNA, 15 bp, Homo sapiens
ggctgtggagaaata

SEQ ID NO: 1135458 - DNA, 15 bp, Homo sapiens
aggctgtggagaaat

SEQ ID NO: 1135459 - DNA, 15 bp, Homo sapiens
gaggctgtggagaaa

SEQ ID NO: 1135460 - DNA, 15 bp, Homo sapiens
tgaggctgtggagaa

SEQ ID NO: 1135461 - DNA, 15 bp, Homo sapiens
gtgaggctgtggaga

SEQ ID NO: 1135462 - DNA, 15 bp, Homo sapiens
agtgaggctgtggag

SEQ ID NO: 1135463 - DNA, 15 bp, Homo sapiens
tagtgaggctgtgga

SEQ ID NO: 1135464 - DNA, 15 bp, Homo sapiens
ctagtgaggctgtgg

SEQ ID NO: 1135465 - DNA, 15 bp, Homo sapiens
gctagtgaggctgtg

SEQ ID NO: 1135466 - DNA, 15 bp, Homo sapiens
tgctagtgaggctgt

SEQ ID NO: 1135467 - DNA, 15 bp, Homo sapiens
atgctagtgaggctg

SEQ ID NO: 1135468 - DNA, 15 bp, Homo sapiens
gatgctagtgaggct

SEQ ID NO: 1135469 - DNA, 15 bp, Homo sapiens
agatgctagtgaggc

SEQ ID NO: 1135470 - DNA, 15 bp, Homo sapiens
tagatgctagtgagg

SEQ ID NO: 1135471 - DNA, 15 bp, Homo sapiens
gtagatgctagtgag

SEQ ID NO: 1135472 - DNA, 15 bp, Homo sapiens
agtagatgctagtga

SEQ ID NO: 1135473 - DNA, 15 bp, Homo sapiens
cagtagatgctagtg

SEQ ID NO: 1135474 - DNA, 15 bp, Homo sapiens
acagtagatgctagt

SEQ ID NO: 1135475 - DNA, 15 bp, Homo sapiens
gacagtagatgctag

SEQ ID NO: 1135476 - DNA, 15 bp, Homo sapiens
agacagtagatgcta

SEQ ID NO: 1135477 - DNA, 15 bp, Homo sapiens
gagacagtagatgct

SEQ ID NO: 1135478 - DNA, 15 bp, Homo sapiens
agagacagtagatgc

SEQ ID NO: 1135479 - DNA, 15 bp, Homo sapiens
aagagacagtagatg

SEQ ID NO: 1135480 - DNA, 15 bp, Homo sapiens
caagagacagtagat

SEQ ID NO: 1135481 - DNA, 15 bp, Homo sapiens
tcaagagacagtaga

SEQ ID NO: 1135482 - DNA, 15 bp, Homo sapiens
gtcaagagacagtag

SEQ ID NO: 1135483 - DNA, 15 bp, Homo sapiens
agtcaagagacagta

SEQ ID NO: 1135484 - DNA, 15 bp, Homo sapiens
aagtcaagagacagt

SEQ ID NO: 1135485 - DNA, 15 bp, Homo sapiens
aaagtcaagagacag

SEQ ID NO: 1135486 - DNA, 15 bp, Homo sapiens
aaaagtcaagagaca

SEQ ID NO: 1135487 - DNA, 15 bp, Homo sapiens
aaaaagtcaagagac

SEQ ID NO: 1135488 - DNA, 15 bp, Homo sapiens
taaaaagtcaagaga

SEQ ID NO: 1135489 - DNA, 15 bp, Homo sapiens
ttaaaaagtcaagag

SEQ ID NO: 1135490 - DNA, 15 bp, Homo sapiens
attaaaaagtcaaga

SEQ ID NO: 1135491 - DNA, 15 bp, Homo sapiens
cattaaaaagtcaag

SEQ ID NO: 1135492 - DNA, 15 bp, Homo sapiens
tcattaaaaagtcaa

SEQ ID NO: 1135493 - DNA, 15 bp, Homo sapiens
atcattaaaaagtca

SEQ ID NO: 1135494 - DNA, 15 bp, Homo sapiens
gatcattaaaaagtc

SEQ ID NO: 1135495 - DNA, 15 bp, Homo sapiens
tgatcattaaaaagt

SEQ ID NO: 1135496 - DNA, 15 bp, Homo sapiens
gtgatcattaaaaag

SEQ ID NO: 1135497 - DNA, 15 bp, Homo sapiens
agtgatcattaaaaa

SEQ ID NO: 1135498 - DNA, 15 bp, Homo sapiens
tagtgatcattaaaa

SEQ ID NO: 1135499 - DNA, 15 bp, Homo sapiens
atagtgatcattaaa

SEQ ID NO: 1135500 - DNA, 15 bp, Homo sapiens
aatagtgatcattaa

SEQ ID NO: 1135501 - DNA, 15 bp, Homo sapiens
gaatagtgatcatta

SEQ ID NO: 1135502 - DNA, 15 bp, Homo sapiens
tgaatagtgatcatt

SEQ ID NO: 1135503 - DNA, 15 bp, Homo sapiens
ctgaatagtgatcat

SEQ ID NO: 1135504 - DNA, 15 bp, Homo sapiens
tctgaatagtgatca

SEQ ID NO: 1135505 - DNA, 15 bp, Homo sapiens
gtctgaatagtgatc

SEQ ID NO: 1135506 - DNA, 15 bp, Homo sapiens
agtctgaatagtgat

SEQ ID NO: 1135507 - DNA, 15 bp, Homo sapiens
cagtctgaatagtga

SEQ ID NO: 1135508 - DNA, 15 bp, Homo sapiens
ccagtctgaatagtg

SEQ ID NO: 1135509 - DNA, 15 bp, Homo sapiens
gccagtctgaatagt

SEQ ID NO: 1135510 - DNA, 15 bp, Homo sapiens
tgccagtctgaatag

SEQ ID NO: 1135511 - DNA, 15 bp, Homo sapiens
atgccagtctgaata

SEQ ID NO: 1135512 - DNA, 15 bp, Homo sapiens
catgccagtctgaat

SEQ ID NO: 1135513 - DNA, 15 bp, Homo sapiens
tcatgccagtctgaa

SEQ ID NO: 1135514 - DNA, 15 bp, Homo sapiens
ctcatgccagtctga

SEQ ID NO: 1135515 - DNA, 15 bp, Homo sapiens
tctcatgccagtctg

SEQ ID NO: 1135516 - DNA, 15 bp, Homo sapiens
atctcatgccagtct

SEQ ID NO: 1135517 - DNA, 15 bp, Homo sapiens
catctcatgccagtc

SEQ ID NO: 1135518 - DNA, 15 bp, Homo sapiens
ccatctcatgccagt

SEQ ID NO: 1135519 - DNA, 15 bp, Homo sapiens
accatctcatgccag

SEQ ID NO: 1135520 - DNA, 15 bp, Homo sapiens
caccatctcatgcca

SEQ ID NO: 1135521 - DNA, 15 bp, Homo sapiens
acaccatctcatgcc

SEQ ID NO: 1135522 - DNA, 15 bp, Homo sapiens
gacaccatctcatgc

SEQ ID NO: 1135523 - DNA, 15 bp, Homo sapiens
agacaccatctcatg

SEQ ID NO: 1135524 - DNA, 15 bp, Homo sapiens
gagacaccatctcat

SEQ ID NO: 1135525 - DNA, 15 bp, Homo sapiens
tgagacaccatctca

SEQ ID NO: 1135526 - DNA, 15 bp, Homo sapiens
atgagacaccatctc

SEQ ID NO: 1135527 - DNA, 15 bp, Homo sapiens
aatgagacaccatct

SEQ ID NO: 1135528 - DNA, 15 bp, Homo sapiens
caatgagacaccatc

SEQ ID NO: 1135529 - DNA, 15 bp, Homo sapiens
acaatgagacaccat

SEQ ID NO: 1135530 - DNA, 15 bp, Homo sapiens
cacaatgagacacca

SEQ ID NO: 1135531 - DNA, 15 bp, Homo sapiens
ccacaatgagacacc

SEQ ID NO: 1135532 - DNA, 15 bp, Homo sapiens
accacaatgagacac

SEQ ID NO: 1135533 - DNA, 15 bp, Homo sapiens
aaccacaatgagaca

SEQ ID NO: 1135534 - DNA, 15 bp, Homo sapiens
aaaccacaatgagac

SEQ ID NO: 1135535 - DNA, 15 bp, Homo sapiens
tagagaaatgcaaat

SEQ ID NO: 1135536 - DNA, 15 bp, Homo sapiens
ttagagaaatgcaaa

SEQ ID NO: 1135537 - DNA, 15 bp, Homo sapiens
attagagaaatgcaa

SEQ ID NO: 1135538 - DNA, 15 bp, Homo sapiens
cattagagaaatgca

SEQ ID NO: 1135539 - DNA, 15 bp, Homo sapiens
tcattagagaaatgc

SEQ ID NO: 1135540 - DNA, 15 bp, Homo sapiens
atcattagagaaatg

SEQ ID NO: 1135541 - DNA, 15 bp, Homo sapiens
gatcattagagaaat

SEQ ID NO: 1135542 - DNA, 15 bp, Homo sapiens
tgatcattagagaaa

SEQ ID NO: 1135543 - DNA, 15 bp, Homo sapiens
ctgatcattagagaa

SEQ ID NO: 1135544 - DNA, 15 bp, Homo sapiens
actgatcattagaga

SEQ ID NO: 1135545 - DNA, 15 bp, Homo sapiens
cactgatcattagag

SEQ ID NO: 1135546 - DNA, 15 bp, Homo sapiens
tcactgatcattaga

SEQ ID NO: 1135547 - DNA, 15 bp, Homo sapiens
atcactgatcattag

SEQ ID NO: 1135548 - DNA, 15 bp, Homo sapiens
catcactgatcatta

SEQ ID NO: 1135549 - DNA, 15 bp, Homo sapiens
acatcactgatcatt

SEQ ID NO: 1135550 - DNA, 15 bp, Homo sapiens
agctcaacatcactg

SEQ ID NO: 1135551 - DNA, 15 bp, Homo sapiens
aagctcaacatcact

SEQ ID NO: 1135552 - DNA, 15 bp, Homo sapiens
gaagctcaacatcac

SEQ ID NO: 1135553 - DNA, 15 bp, Homo sapiens
agaagctcaacatca

SEQ ID NO: 1135554 - DNA, 15 bp, Homo sapiens
aagaagctcaacatc

SEQ ID NO: 1135555 - DNA, 15 bp, Homo sapiens
aaagaagctcaacat

SEQ ID NO: 1135556 - DNA, 15 bp, Homo sapiens
aaaagaagctcaaca

SEQ ID NO: 1135557 - DNA, 15 bp, Homo sapiens
aaaaagaagctcaac

SEQ ID NO: 1135558 - DNA, 15 bp, Homo sapiens
taaaaagaagctcaa

SEQ ID NO: 1135559 - DNA, 15 bp, Homo sapiens
ataaaaagaagctca

SEQ ID NO: 1135560 - DNA, 15 bp, Homo sapiens
tataaaaagaagctc

SEQ ID NO: 1135561 - DNA, 15 bp, Homo sapiens
atataaaaagaagct

SEQ ID NO: 1135562 - DNA, 15 bp, Homo sapiens
catataaaaagaagc

SEQ ID NO: 1135563 - DNA, 15 bp, Homo sapiens
acatataaaaagaag

SEQ ID NO: 1135564 - DNA, 15 bp, Homo sapiens
aacatataaaaagaa

SEQ ID NO: 1135565 - DNA, 15 bp, Homo sapiens
aaacatataaaaaga

SEQ ID NO: 1135566 - DNA, 15 bp, Homo sapiens
caaacatataaaaag

SEQ ID NO: 1135567 - DNA, 15 bp, Homo sapiens
acaaacatataaaaa

SEQ ID NO: 1135568 - DNA, 15 bp, Homo sapiens
aacaaacatataaaa

SEQ ID NO: 1135569 - DNA, 15 bp, Homo sapiens
caacaaacatataaa

SEQ ID NO: 1135570 - DNA, 15 bp, Homo sapiens
ccaacaaacatataa

SEQ ID NO: 1135571 - DNA, 15 bp, Homo sapiens
gccaacaaacatata

SEQ ID NO: 1135572 - DNA, 15 bp, Homo sapiens
agccaacaaacatat

SEQ ID NO: 1135573 - DNA, 15 bp, Homo sapiens
cagccaacaaacata

SEQ ID NO: 1135574 - DNA, 15 bp, Homo sapiens
gcagccaacaaacat

SEQ ID NO: 1135575 - DNA, 15 bp, Homo sapiens
tgcagccaacaaaca

SEQ ID NO: 1135576 - DNA, 15 bp, Homo sapiens
atgcagccaacaaac

SEQ ID NO: 1135577 - DNA, 15 bp, Homo sapiens
tatgcagccaacaaa

SEQ ID NO: 1135578 - DNA, 15 bp, Homo sapiens
ttatgcagccaacaa

SEQ ID NO: 1135579 - DNA, 15 bp, Homo sapiens
tttatgcagccaaca

SEQ ID NO: 1135580 - DNA, 15 bp, Homo sapiens
atttatgcagccaac

SEQ ID NO: 1135581 - DNA, 15 bp, Homo sapiens
catttatgcagccaa

SEQ ID NO: 1135582 - DNA, 15 bp, Homo sapiens
acatttatgcagcca

SEQ ID NO: 1135583 - DNA, 15 bp, Homo sapiens
gacatttatgcagcc

SEQ ID NO: 1135584 - DNA, 15 bp, Homo sapiens
agacatttatgcagc

SEQ ID NO: 1135585 - DNA, 15 bp, Homo sapiens
aagacatttatgcag

SEQ ID NO: 1135586 - DNA, 15 bp, Homo sapiens
gaagacatttatgca

SEQ ID NO: 1135587 - DNA, 15 bp, Homo sapiens
agaagacatttatgc

SEQ ID NO: 1135588 - DNA, 15 bp, Homo sapiens
aagaagacatttatg

SEQ ID NO: 1135589 - DNA, 15 bp, Homo sapiens
aaagaagacatttat

SEQ ID NO: 1135590 - DNA, 15 bp, Homo sapiens
caaagaagacattta

SEQ ID NO: 1135591 - DNA, 15 bp, Homo sapiens
ccaaagaagacattt

SEQ ID NO: 1135592 - DNA, 15 bp, Homo sapiens
tccaaagaagacatt

SEQ ID NO: 1135593 - DNA, 15 bp, Homo sapiens
ctccaaagaagacat

SEQ ID NO: 1135594 - DNA, 15 bp, Homo sapiens
tctccaaagaagaca

SEQ ID NO: 1135595 - DNA, 15 bp, Homo sapiens
ttctccaaagaagac

SEQ ID NO: 1135596 - DNA, 15 bp, Homo sapiens
cttctccaaagaaga

SEQ ID NO: 1135597 - DNA, 15 bp, Homo sapiens
acttctccaaagaag

SEQ ID NO: 1135598 - DNA, 15 bp, Homo sapiens
cacttctccaaagaa

SEQ ID NO: 1135599 - DNA, 15 bp, Homo sapiens
acacttctccaaaga

SEQ ID NO: 1135600 - DNA, 15 bp, Homo sapiens
gacacttctccaaag

SEQ ID NO: 1135601 - DNA, 15 bp, Homo sapiens
agacacttctccaaa

SEQ ID NO: 1135602 - DNA, 15 bp, Homo sapiens
gagacacttctccaa

SEQ ID NO: 1135603 - DNA, 15 bp, Homo sapiens
agagacacttctcca

SEQ ID NO: 1135604 - DNA, 15 bp, Homo sapiens
aagagacacttctcc

SEQ ID NO: 1135605 - DNA, 15 bp, Homo sapiens
gaagagacacttctc

SEQ ID NO: 1135606 - DNA, 15 bp, Homo sapiens
tgaagagacacttct

SEQ ID NO: 1135607 - DNA, 15 bp, Homo sapiens
atgaagagacacttc

SEQ ID NO: 1135608 - DNA, 15 bp, Homo sapiens
tatgaagagacactt

SEQ ID NO: 1135609 - DNA, 15 bp, Homo sapiens
atatgaagagacact

SEQ ID NO: 1135610 - DNA, 15 bp, Homo sapiens
gatatgaagagacac

SEQ ID NO: 1135611 - DNA, 15 bp, Homo sapiens
ggatatgaagagaca

SEQ ID NO: 1135612 - DNA, 15 bp, Homo sapiens
aggatatgaagagac

SEQ ID NO: 1135613 - DNA, 15 bp, Homo sapiens
aaggatatgaagaga

SEQ ID NO: 1135614 - DNA, 15 bp, Homo sapiens
aaaggatatgaagag

SEQ ID NO: 1135615 - DNA, 15 bp, Homo sapiens
caaaggatatgaaga

SEQ ID NO: 1135616 - DNA, 15 bp, Homo sapiens
gcaaaggatatgaag

SEQ ID NO: 1135617 - DNA, 15 bp, Homo sapiens
ggcaaaggatatgaa

SEQ ID NO: 1135618 - DNA, 15 bp, Homo sapiens
tggcaaaggatatga

SEQ ID NO: 1135619 - DNA, 15 bp, Homo sapiens
ttggcaaaggatatg

SEQ ID NO: 1135620 - DNA, 15 bp, Homo sapiens
gttggcaaaggatat

SEQ ID NO: 1135621 - DNA, 15 bp, Homo sapiens
agttggcaaaggata

SEQ ID NO: 1135622 - DNA, 15 bp, Homo sapiens
aagttggcaaaggat

SEQ ID NO: 1135623 - DNA, 15 bp, Homo sapiens
aaagttggcaaagga

SEQ ID NO: 1135624 - DNA, 15 bp, Homo sapiens
aaaagttggcaaagg

SEQ ID NO: 1135625 - DNA, 15 bp, Homo sapiens
aaaaagttggcaaag

SEQ ID NO: 1135626 - DNA, 15 bp, Homo sapiens
aaaaaagttggcaaa

SEQ ID NO: 1135627 - DNA, 15 bp, Homo sapiens
taaaaaagttggcaa

SEQ ID NO: 1135628 - DNA, 15 bp, Homo sapiens
ataaaaaagttggca

SEQ ID NO: 1135629 - DNA, 15 bp, Homo sapiens
cataaaaaagttggc

SEQ ID NO: 1135630 - DNA, 15 bp, Homo sapiens
ccataaaaaagttgg

SEQ ID NO: 1135631 - DNA, 15 bp, Homo sapiens
cccataaaaaagttg

SEQ ID NO: 1135632 - DNA, 15 bp, Homo sapiens
ccccataaaaaagtt

SEQ ID NO: 1135633 - DNA, 15 bp, Homo sapiens
accccataaaaaagt

SEQ ID NO: 1135634 - DNA, 15 bp, Homo sapiens
aaccccataaaaaag

SEQ ID NO: 1135635 - DNA, 15 bp, Homo sapiens
taaccccataaaaaa

SEQ ID NO: 1135636 - DNA, 15 bp, Homo sapiens
ataaccccataaaaa

SEQ ID NO: 1135637 - DNA, 15 bp, Homo sapiens
aataaccccataaaa

SEQ ID NO: 1135638 - DNA, 15 bp, Homo sapiens
aaataaccccataaa

SEQ ID NO: 1135639 - DNA, 15 bp, Homo sapiens
caaataaccccataa

SEQ ID NO: 1135640 - DNA, 15 bp, Homo sapiens
acaaataaccccata

SEQ ID NO: 1135641 - DNA, 15 bp, Homo sapiens
aacaaataaccccat

SEQ ID NO: 1135642 - DNA, 15 bp, Homo sapiens
aaacaaataacccca

SEQ ID NO: 1135643 - DNA, 15 bp, Homo sapiens
aaaacaaataacccc

SEQ ID NO: 1135644 - DNA, 15 bp, Homo sapiens
aaaaacaaataaccc

SEQ ID NO: 1135645 - DNA, 15 bp, Homo sapiens
aaaaaacaaataacc

SEQ ID NO: 1135646 - DNA, 15 bp, Homo sapiens
aaaaaaacaaataac

SEQ ID NO: 1135647 - DNA, 15 bp, Homo sapiens
gaaaaaaacaaataa

SEQ ID NO: 1135648 - DNA, 15 bp, Homo sapiens
agaaaaaaacaaata

SEQ ID NO: 1135649 - DNA, 15 bp, Homo sapiens
aagaaaaaaacaaat

SEQ ID NO: 1135650 - DNA, 15 bp, Homo sapiens
caagaaaaaaacaaa

SEQ ID NO: 1135651 - DNA, 15 bp, Homo sapiens
acaagaaaaaaacaa

SEQ ID NO: 1135652 - DNA, 15 bp, Homo sapiens
tacaagaaaaaaaca

SEQ ID NO: 1135653 - DNA, 15 bp, Homo sapiens
ttacaagaaaaaaac

SEQ ID NO: 1135654 - DNA, 15 bp, Homo sapiens
tttacaagaaaaaaa

SEQ ID NO: 1135655 - DNA, 15 bp, Homo sapiens
atttacaagaaaaaa

SEQ ID NO: 1135656 - DNA, 15 bp, Homo sapiens
aatttacaagaaaaa

SEQ ID NO: 1135657 - DNA, 15 bp, Homo sapiens
aaatttacaagaaaa

SEQ ID NO: 1135658 - DNA, 15 bp, Homo sapiens
caaatttacaagaaa

SEQ ID NO: 1135659 - DNA, 15 bp, Homo sapiens
acaaatttacaagaa

SEQ ID NO: 1135660 - DNA, 15 bp, Homo sapiens
aacaaatttacaaga

SEQ ID NO: 1135661 - DNA, 15 bp, Homo sapiens
aaacaaatttacaag

SEQ ID NO: 1135662 - DNA, 15 bp, Homo sapiens
taaacaaatttacaa

SEQ ID NO: 1135663 - DNA, 15 bp, Homo sapiens
ttaaacaaatttaca

SEQ ID NO: 1135664 - DNA, 15 bp, Homo sapiens
cttaaacaaatttac

SEQ ID NO: 1135665 - DNA, 15 bp, Homo sapiens
acttaaacaaattta

SEQ ID NO: 1135666 - DNA, 15 bp, Homo sapiens
aacttaaacaaattt

SEQ ID NO: 1135667 - DNA, 15 bp, Homo sapiens
gaacttaaacaaatt

SEQ ID NO: 1135668 - DNA, 15 bp, Homo sapiens
ggaacttaaacaaat

SEQ ID NO: 1135669 - DNA, 15 bp, Homo sapiens
aggaacttaaacaaa

SEQ ID NO: 1135670 - DNA, 15 bp, Homo sapiens
aaggaacttaaacaa

SEQ ID NO: 1135671 - DNA, 15 bp, Homo sapiens
caaggaacttaaaca

SEQ ID NO: 1135672 - DNA, 15 bp, Homo sapiens
acaaggaacttaaac

SEQ ID NO: 1135673 - DNA, 15 bp, Homo sapiens
tacaaggaacttaaa

SEQ ID NO: 1135674 - DNA, 15 bp, Homo sapiens
ctacaaggaacttaa

SEQ ID NO: 1135675 - DNA, 15 bp, Homo sapiens
tctacaaggaactta

SEQ ID NO: 1135676 - DNA, 15 bp, Homo sapiens
atctacaaggaactt

SEQ ID NO: 1135677 - DNA, 15 bp, Homo sapiens
aatctacaaggaact

SEQ ID NO: 1135678 - DNA, 15 bp, Homo sapiens
gaatctacaaggaac

SEQ ID NO: 1135679 - DNA, 15 bp, Homo sapiens
agaatctacaaggaa

SEQ ID NO: 1135680 - DNA, 15 bp, Homo sapiens
cagaatctacaagga

SEQ ID NO: 1135681 - DNA, 15 bp, Homo sapiens
ccagaatctacaagg

SEQ ID NO: 1135682 - DNA, 15 bp, Homo sapiens
tccagaatctacaag

SEQ ID NO: 1135683 - DNA, 15 bp, Homo sapiens
atccagaatctacaa

SEQ ID NO: 1135684 - DNA, 15 bp, Homo sapiens
tatccagaatctaca

SEQ ID NO: 1135685 - DNA, 15 bp, Homo sapiens
atatccagaatctac

SEQ ID NO: 1135686 - DNA, 15 bp, Homo sapiens
aaatatccagaatct

SEQ ID NO: 1135687 - DNA, 15 bp, Homo sapiens
caaatatccagaatc

SEQ ID NO: 1135688 - DNA, 15 bp, Homo sapiens
tcaaatatccagaat

SEQ ID NO: 1135689 - DNA, 15 bp, Homo sapiens
gtcaaatatccagaa

SEQ ID NO: 1135690 - DNA, 15 bp, Homo sapiens
ggtcaaatatccaga

SEQ ID NO: 1135691 - DNA, 15 bp, Homo sapiens
aggtcaaatatccag

SEQ ID NO: 1135692 - DNA, 15 bp, Homo sapiens
aaggtcaaatatcca

SEQ ID NO: 1135693 - DNA, 15 bp, Homo sapiens
aaaggtcaaatatcc

SEQ ID NO: 1135694 - DNA, 15 bp, Homo sapiens
caaaggtcaaatatc

SEQ ID NO: 1135695 - DNA, 15 bp, Homo sapiens
acaaaggtcaaatat

SEQ ID NO: 1135696 - DNA, 15 bp, Homo sapiens
gacaaaggtcaaata

SEQ ID NO: 1135697 - DNA, 15 bp, Homo sapiens
tgacaaaggtcaaat

SEQ ID NO: 1135698 - DNA, 15 bp, Homo sapiens
ctgacaaaggtcaaa

SEQ ID NO: 1135699 - DNA, 15 bp, Homo sapiens
tctgacaaaggtcaa

SEQ ID NO: 1135700 - DNA, 15 bp, Homo sapiens
atctgacaaaggtca

SEQ ID NO: 1135701 - DNA, 15 bp, Homo sapiens
aatctgacaaaggtc

SEQ ID NO: 1135702 - DNA, 15 bp, Homo sapiens
gaatctgacaaaggt

SEQ ID NO: 1135703 - DNA, 15 bp, Homo sapiens
agaatctgacaaagg

SEQ ID NO: 1135704 - DNA, 15 bp, Homo sapiens
tagaatctgacaaag

SEQ ID NO: 1135705 - DNA, 15 bp, Homo sapiens
atagaatctgacaaa

SEQ ID NO: 1135706 - DNA, 15 bp, Homo sapiens
tatagaatctgacaa

SEQ ID NO: 1135707 - DNA, 15 bp, Homo sapiens
ctatagaatctgaca

SEQ ID NO: 1135708 - DNA, 15 bp, Homo sapiens
cctatagaatctgac

SEQ ID NO: 1135709 - DNA, 15 bp, Homo sapiens
acctatagaatctga

SEQ ID NO: 1135710 - DNA, 15 bp, Homo sapiens
aacctatagaatctg

SEQ ID NO: 1135711 - DNA, 15 bp, Homo sapiens
caacctatagaatct

SEQ ID NO: 1135712 - DNA, 15 bp, Homo sapiens
gcaacctatagaatc

SEQ ID NO: 1135713 - DNA, 15 bp, Homo sapiens
ggcaacctatagaat

SEQ ID NO: 1135714 - DNA, 15 bp, Homo sapiens
aggcaacctatagaa

SEQ ID NO: 1135715 - DNA, 15 bp, Homo sapiens
caggcaacctataga

SEQ ID NO: 1135716 - DNA, 15 bp, Homo sapiens
acaggcaacctatag

SEQ ID NO: 1135717 - DNA, 15 bp, Homo sapiens
aacaggcaacctata

SEQ ID NO: 1135718 - DNA, 15 bp, Homo sapiens
taacaggcaacctat

SEQ ID NO: 1135719 - DNA, 15 bp, Homo sapiens
ttaacaggcaaccta

SEQ ID NO: 1135720 - DNA, 15 bp, Homo sapiens
gttaacaggcaacct

SEQ ID NO: 1135721 - DNA, 15 bp, Homo sapiens
agttaacaggcaacc

SEQ ID NO: 1135722 - DNA, 15 bp, Homo sapiens
gagttaacaggcaac

SEQ ID NO: 1135723 - DNA, 15 bp, Homo sapiens
agagttaacaggcaa

SEQ ID NO: 1135724 - DNA, 15 bp, Homo sapiens
cagagttaacaggca

SEQ ID NO: 1135725 - DNA, 15 bp, Homo sapiens
tcagagttaacaggc

SEQ ID NO: 1135726 - DNA, 15 bp, Homo sapiens
atcagagttaacagg

SEQ ID NO: 1135727 - DNA, 15 bp, Homo sapiens
catcagagttaacag

SEQ ID NO: 1135728 - DNA, 15 bp, Homo sapiens
tcatcagagttaaca

SEQ ID NO: 1135729 - DNA, 15 bp, Homo sapiens
atcatcagagttaac

SEQ ID NO: 1135730 - DNA, 15 bp, Homo sapiens
tatcatcagagttaa

SEQ ID NO: 1135731 - DNA, 15 bp, Homo sapiens
ctatcatcagagtta

SEQ ID NO: 1135732 - DNA, 15 bp, Homo sapiens
actatcatcagagtt

SEQ ID NO: 1135733 - DNA, 15 bp, Homo sapiens
aactatcatcagagt

SEQ ID NO: 1135734 - DNA, 15 bp, Homo sapiens
aaactatcatcagag

SEQ ID NO: 1135735 - DNA, 15 bp, Homo sapiens
gaaactatcatcaga

SEQ ID NO: 1135736 - DNA, 15 bp, Homo sapiens
agaaactatcatcag

SEQ ID NO: 1135737 - DNA, 15 bp, Homo sapiens
aagaaactatcatca

SEQ ID NO: 1135738 - DNA, 15 bp, Homo sapiens
aaagaaactatcatc

SEQ ID NO: 1135739 - DNA, 15 bp, Homo sapiens
aaaagaaactatcat

SEQ ID NO: 1135740 - DNA, 15 bp, Homo sapiens
caaaagaaactatca

SEQ ID NO: 1135741 - DNA, 15 bp, Homo sapiens
gcaaaagaaactatc

SEQ ID NO: 1135742 - DNA, 15 bp, Homo sapiens
agcaaaagaaactat

SEQ ID NO: 1135743 - DNA, 15 bp, Homo sapiens
cagcaaaagaaacta

SEQ ID NO: 1135744 - DNA, 15 bp, Homo sapiens
acagcaaaagaaact

SEQ ID NO: 1135745 - DNA, 15 bp, Homo sapiens
cacagcaaaagaaac

SEQ ID NO: 1135746 - DNA, 15 bp, Homo sapiens
gcacagcaaaagaaa

SEQ ID NO: 1135747 - DNA, 15 bp, Homo sapiens
tgcacagcaaaagaa

SEQ ID NO: 1135748 - DNA, 15 bp, Homo sapiens
ctgcacagcaaaaga

SEQ ID NO: 1135749 - DNA, 15 bp, Homo sapiens
tctgcacagcaaaag

SEQ ID NO: 1135750 - DNA, 15 bp, Homo sapiens
ctctgcacagcaaaa

SEQ ID NO: 1135751 - DNA, 15 bp, Homo sapiens
gctctgcacagcaaa

SEQ ID NO: 1135752 - DNA, 15 bp, Homo sapiens
agctctgcacagcaa

SEQ ID NO: 1135753 - DNA, 15 bp, Homo sapiens
gagctctgcacagca

SEQ ID NO: 1135754 - DNA, 15 bp, Homo sapiens
agagctctgcacagc

SEQ ID NO: 1135755 - DNA, 15 bp, Homo sapiens
aagagctctgcacag

SEQ ID NO: 1135756 - DNA, 15 bp, Homo sapiens
aaagagctctgcaca

SEQ ID NO: 1135757 - DNA, 15 bp, Homo sapiens
taaagagctctgcac

SEQ ID NO: 1135758 - DNA, 15 bp, Homo sapiens
ctaaagagctctgca

SEQ ID NO: 1135759 - DNA, 15 bp, Homo sapiens
actaaagagctctgc

SEQ ID NO: 1135760 - DNA, 15 bp, Homo sapiens
aactaaagagctctg

SEQ ID NO: 1135761 - DNA, 15 bp, Homo sapiens
aaactaaagagctct

SEQ ID NO: 1135762 - DNA, 15 bp, Homo sapiens
taaactaaagagctc

SEQ ID NO: 1135763 - DNA, 15 bp, Homo sapiens
ttaaactaaagagct

SEQ ID NO: 1135764 - DNA, 15 bp, Homo sapiens
attaaactaaagagc

SEQ ID NO: 1135765 - DNA, 15 bp, Homo sapiens
aattaaactaaagag

SEQ ID NO: 1135766 - DNA, 15 bp, Homo sapiens
taattaaactaaaga

SEQ ID NO: 1135767 - DNA, 15 bp, Homo sapiens
ctaattaaactaaag

SEQ ID NO: 1135768 - DNA, 15 bp, Homo sapiens
tctaattaaactaaa

SEQ ID NO: 1135769 - DNA, 15 bp, Homo sapiens
atctaattaaactaa

SEQ ID NO: 1135770 - DNA, 15 bp, Homo sapiens
gatctaattaaacta

SEQ ID NO: 1135771 - DNA, 15 bp, Homo sapiens
ggatctaattaaact

SEQ ID NO: 1135772 - DNA, 15 bp, Homo sapiens
gggatctaattaaac

SEQ ID NO: 1135773 - DNA, 15 bp, Homo sapiens
tgggatctaattaaa

SEQ ID NO: 1135774 - DNA, 15 bp, Homo sapiens
atgggatctaattaa

SEQ ID NO: 1135775 - DNA, 15 bp, Homo sapiens
aatgggatctaatta

SEQ ID NO: 1135776 - DNA, 15 bp, Homo sapiens
caatgggatctaatt

SEQ ID NO: 1135777 - DNA, 15 bp, Homo sapiens
ccaatgggatctaat

SEQ ID NO: 1135778 - DNA, 15 bp, Homo sapiens
accaatgggatctaa

SEQ ID NO: 1135779 - DNA, 15 bp, Homo sapiens
gaccaatgggatcta

SEQ ID NO: 1135780 - DNA, 15 bp, Homo sapiens
tgaccaatgggatct

SEQ ID NO: 1135781 - DNA, 15 bp, Homo sapiens
ctgaccaatgggatc

SEQ ID NO: 1135782 - DNA, 15 bp, Homo sapiens
actgaccaatgggat

SEQ ID NO: 1135783 - DNA, 15 bp, Homo sapiens
aactgaccaatggga

SEQ ID NO: 1135784 - DNA, 15 bp, Homo sapiens
aaactgaccaatggg

SEQ ID NO: 1135785 - DNA, 15 bp, Homo sapiens
aaaactgaccaatgg

SEQ ID NO: 1135786 - DNA, 15 bp, Homo sapiens
caaaactgaccaatg

SEQ ID NO: 1135787 - DNA, 15 bp, Homo sapiens
ccaaaactgaccaat

SEQ ID NO: 1135788 - DNA, 15 bp, Homo sapiens
gccaaaactgaccaa

SEQ ID NO: 1135789 - DNA, 15 bp, Homo sapiens
agccaaaactgacca

SEQ ID NO: 1135790 - DNA, 15 bp, Homo sapiens
aagccaaaactgacc

SEQ ID NO: 1135791 - DNA, 15 bp, Homo sapiens
aaagccaaaactgac

SEQ ID NO: 1135792 - DNA, 15 bp, Homo sapiens
aaaagccaaaactga

SEQ ID NO: 1135793 - DNA, 15 bp, Homo sapiens
caaaagccaaaactg

SEQ ID NO: 1135794 - DNA, 15 bp, Homo sapiens
acaaaagccaaaact

SEQ ID NO: 1135795 - DNA, 15 bp, Homo sapiens
aacaaaagccaaaac

SEQ ID NO: 1135796 - DNA, 15 bp, Homo sapiens
caacaaaagccaaaa

SEQ ID NO: 1135797 - DNA, 15 bp, Homo sapiens
gcaacaaaagccaaa

SEQ ID NO: 1135798 - DNA, 15 bp, Homo sapiens
tgcaacaaaagccaa

SEQ ID NO: 1135799 - DNA, 15 bp, Homo sapiens
ttgcaacaaaagcca

SEQ ID NO: 1135800 - DNA, 15 bp, Homo sapiens
attgcaacaaaagcc

SEQ ID NO: 1135801 - DNA, 15 bp, Homo sapiens
aattgcaacaaaagc

SEQ ID NO: 1135802 - DNA, 15 bp, Homo sapiens
gaattgcaacaaaag

SEQ ID NO: 1135803 - DNA, 15 bp, Homo sapiens
ggaattgcaacaaaa

SEQ ID NO: 1135804 - DNA, 15 bp, Homo sapiens
aggaattgcaacaaa

SEQ ID NO: 1135805 - DNA, 15 bp, Homo sapiens
aaggaattgcaacaa

SEQ ID NO: 1135806 - DNA, 15 bp, Homo sapiens
aaaggaattgcaaca

SEQ ID NO: 1135807 - DNA, 15 bp, Homo sapiens
aaaaggaattgcaac

SEQ ID NO: 1135808 - DNA, 15 bp, Homo sapiens
caaaaggaattgcaa

SEQ ID NO: 1135809 - DNA, 15 bp, Homo sapiens
ccaaaaggaattgca

SEQ ID NO: 1135810 - DNA, 15 bp, Homo sapiens
gccaaaaggaattgc

SEQ ID NO: 1135811 - DNA, 15 bp, Homo sapiens
tgccaaaaggaattg

SEQ ID NO: 1135812 - DNA, 15 bp, Homo sapiens
atgccaaaaggaatt

SEQ ID NO: 1135813 - DNA, 15 bp, Homo sapiens
aatgccaaaaggaat

SEQ ID NO: 1135814 - DNA, 15 bp, Homo sapiens
aaatgccaaaaggaa

SEQ ID NO: 1135815 - DNA, 15 bp, Homo sapiens
aaaatgccaaaagga

SEQ ID NO: 1135816 - DNA, 15 bp, Homo sapiens
gaaaatgccaaaagg

SEQ ID NO: 1135817 - DNA, 15 bp, Homo sapiens
tgaaaatgccaaaag

SEQ ID NO: 1135818 - DNA, 15 bp, Homo sapiens
atgaaaatgccaaaa

SEQ ID NO: 1135819 - DNA, 15 bp, Homo sapiens
gatgaaaatgccaaa

SEQ ID NO: 1135820 - DNA, 15 bp, Homo sapiens
tgatgaaaatgccaa

SEQ ID NO: 1135821 - DNA, 15 bp, Homo sapiens
atgatgaaaatgcca

SEQ ID NO: 1135822 - DNA, 15 bp, Homo sapiens
catgatgaaaatgcc

SEQ ID NO: 1135823 - DNA, 15 bp, Homo sapiens
tcatgatgaaaatgc

SEQ ID NO: 1135824 - DNA, 15 bp, Homo sapiens
ttcatgatgaaaatg

SEQ ID NO: 1135825 - DNA, 15 bp, Homo sapiens
cttcatgatgaaaat

SEQ ID NO: 1135826 - DNA, 15 bp, Homo sapiens
acttcatgatgaaaa

SEQ ID NO: 1135827 - DNA, 15 bp, Homo sapiens
gacttcatgatgaaa

SEQ ID NO: 1135828 - DNA, 15 bp, Homo sapiens
agacttcatgatgaa

SEQ ID NO: 1135829 - DNA, 15 bp, Homo sapiens
aagacttcatgatga

SEQ ID NO: 1135830 - DNA, 15 bp, Homo sapiens
aaagacttcatgatg

SEQ ID NO: 1135831 - DNA, 15 bp, Homo sapiens
caaagacttcatgat

SEQ ID NO: 1135832 - DNA, 15 bp, Homo sapiens
gcaaagacttcatga

SEQ ID NO: 1135833 - DNA, 15 bp, Homo sapiens
ggcaaagacttcatg

SEQ ID NO: 1135834 - DNA, 15 bp, Homo sapiens
gggcaaagacttcat

SEQ ID NO: 1135835 - DNA, 15 bp, Homo sapiens
tgggcaaagacttca

SEQ ID NO: 1135836 - DNA, 15 bp, Homo sapiens
atgggcaaagacttc

SEQ ID NO: 1135837 - DNA, 15 bp, Homo sapiens
aatgggcaaagactt

SEQ ID NO: 1135838 - DNA, 15 bp, Homo sapiens
gaatgggcaaagact

SEQ ID NO: 1135839 - DNA, 15 bp, Homo sapiens
ggaatgggcaaagac

SEQ ID NO: 1135840 - DNA, 15 bp, Homo sapiens
aggaatgggcaaaga

SEQ ID NO: 1135841 - DNA, 15 bp, Homo sapiens
taggaatgggcaaag

SEQ ID NO: 1135842 - DNA, 15 bp, Homo sapiens
ataggaatgggcaaa

SEQ ID NO: 1135843 - DNA, 15 bp, Homo sapiens
cataggaatgggcaa

SEQ ID NO: 1135844 - DNA, 15 bp, Homo sapiens
acataggaatgggca

SEQ ID NO: 1135845 - DNA, 15 bp, Homo sapiens
gacataggaatgggc

SEQ ID NO: 1135846 - DNA, 15 bp, Homo sapiens
ggacataggaatggg

SEQ ID NO: 1135847 - DNA, 15 bp, Homo sapiens
aggacataggaatgg

SEQ ID NO: 1135848 - DNA, 15 bp, Homo sapiens
caggacataggaatg

SEQ ID NO: 1135849 - DNA, 15 bp, Homo sapiens
tcaggacataggaat

SEQ ID NO: 1135850 - DNA, 15 bp, Homo sapiens
ttcaggacataggaa

SEQ ID NO: 1135851 - DNA, 15 bp, Homo sapiens
attcaggacatagga

SEQ ID NO: 1135852 - DNA, 15 bp, Homo sapiens
cattcaggacatagg

SEQ ID NO: 1135853 - DNA, 15 bp, Homo sapiens
ccattcaggacatag

SEQ ID NO: 1135854 - DNA, 15 bp, Homo sapiens
accattcaggacata

SEQ ID NO: 1135855 - DNA, 15 bp, Homo sapiens
taccattcaggacat

SEQ ID NO: 1135856 - DNA, 15 bp, Homo sapiens
ataccattcaggaca

SEQ ID NO: 1135857 - DNA, 15 bp, Homo sapiens
aataccattcaggac

SEQ ID NO: 1135858 - DNA, 15 bp, Homo sapiens
caataccattcagga

SEQ ID NO: 1135859 - DNA, 15 bp, Homo sapiens
gcaataccattcagg

SEQ ID NO: 1135860 - DNA, 15 bp, Homo sapiens
ggcaataccattcag

SEQ ID NO: 1135861 - DNA, 15 bp, Homo sapiens
aggcaataccattca

SEQ ID NO: 1135862 - DNA, 15 bp, Homo sapiens
taggcaataccattc

SEQ ID NO: 1135863 - DNA, 15 bp, Homo sapiens
ctaggcaataccatt

SEQ ID NO: 1135864 - DNA, 15 bp, Homo sapiens
cctaggcaataccat

SEQ ID NO: 1135865 - DNA, 15 bp, Homo sapiens
acctaggcaatacca

SEQ ID NO: 1135866 - DNA, 15 bp, Homo sapiens
aacctaggcaatacc

SEQ ID NO: 1135867 - DNA, 15 bp, Homo sapiens
aaacctaggcaatac

SEQ ID NO: 1135868 - DNA, 15 bp, Homo sapiens
aaaacctaggcaata

SEQ ID NO: 1135869 - DNA, 15 bp, Homo sapiens
gaaaacctaggcaat

SEQ ID NO: 1135870 - DNA, 15 bp, Homo sapiens
agaaaacctaggcaa

SEQ ID NO: 1135871 - DNA, 15 bp, Homo sapiens
aagaaaacctaggca

SEQ ID NO: 1135872 - DNA, 15 bp, Homo sapiens
gaagaaaacctaggc

SEQ ID NO: 1135873 - DNA, 15 bp, Homo sapiens
agaagaaaacctagg

SEQ ID NO: 1135874 - DNA, 15 bp, Homo sapiens
tagaagaaaacctag

SEQ ID NO: 1135875 - DNA, 15 bp, Homo sapiens
actagaagaaaacct

SEQ ID NO: 1135876 - DNA, 15 bp, Homo sapiens
cactagaagaaaacc

SEQ ID NO: 1135877 - DNA, 15 bp, Homo sapiens
acactagaagaaaac

SEQ ID NO: 1135878 - DNA, 15 bp, Homo sapiens
aacactagaagaaaa

SEQ ID NO: 1135879 - DNA, 15 bp, Homo sapiens
aaacactagaagaaa

SEQ ID NO: 1135880 - DNA, 15 bp, Homo sapiens
aaaacactagaagaa

SEQ ID NO: 1135881 - DNA, 15 bp, Homo sapiens
taaaacactagaaga

SEQ ID NO: 1135882 - DNA, 15 bp, Homo sapiens
ataaaacactagaag

SEQ ID NO: 1135883 - DNA, 15 bp, Homo sapiens
cataaaacactagaa

SEQ ID NO: 1135884 - DNA, 15 bp, Homo sapiens
ccataaaacactaga

SEQ ID NO: 1135885 - DNA, 15 bp, Homo sapiens
accataaaacactag

SEQ ID NO: 1135886 - DNA, 15 bp, Homo sapiens
aaccataaaacacta

SEQ ID NO: 1135887 - DNA, 15 bp, Homo sapiens
aaaccataaaacact

SEQ ID NO: 1135888 - DNA, 15 bp, Homo sapiens
aaaaccataaaacac

SEQ ID NO: 1135889 - DNA, 15 bp, Homo sapiens
caaaaccataaaaca

SEQ ID NO: 1135890 - DNA, 15 bp, Homo sapiens
ccaaaaccataaaac

SEQ ID NO: 1135891 - DNA, 15 bp, Homo sapiens
cccaaaaccataaaa

SEQ ID NO: 1135892 - DNA, 15 bp, Homo sapiens
acccaaaaccataaa

SEQ ID NO: 1135893 - DNA, 15 bp, Homo sapiens
aacccaaaaccataa

SEQ ID NO: 1135894 - DNA, 15 bp, Homo sapiens
aaacccaaaaccata

SEQ ID NO: 1135895 - DNA, 15 bp, Homo sapiens
aaaacccaaaaccat

SEQ ID NO: 1135896 - DNA, 15 bp, Homo sapiens
taaaacccaaaacca

SEQ ID NO: 1135897 - DNA, 15 bp, Homo sapiens
ttaaaacccaaaacc

SEQ ID NO: 1135898 - DNA, 15 bp, Homo sapiens
cttaaaacccaaaac

SEQ ID NO: 1135899 - DNA, 15 bp, Homo sapiens
acttaaaacccaaaa

SEQ ID NO: 1135900 - DNA, 15 bp, Homo sapiens
gacttaaaacccaaa

SEQ ID NO: 1135901 - DNA, 15 bp, Homo sapiens
agacttaaaacccaa

SEQ ID NO: 1135902 - DNA, 15 bp, Homo sapiens
aagacttaaaaccca

SEQ ID NO: 1135903 - DNA, 15 bp, Homo sapiens
aaagacttaaaaccc

SEQ ID NO: 1135904 - DNA, 15 bp, Homo sapiens
taaagacttaaaacc

SEQ ID NO: 1135905 - DNA, 15 bp, Homo sapiens
ttaaagacttaaaac

SEQ ID NO: 1135906 - DNA, 15 bp, Homo sapiens
attaaagacttaaaa

SEQ ID NO: 1135907 - DNA, 15 bp, Homo sapiens
gattaaagacttaaa

SEQ ID NO: 1135908 - DNA, 15 bp, Homo sapiens
caagatggattaaag

SEQ ID NO: 1135909 - DNA, 15 bp, Homo sapiens
tcaagatggattaaa

SEQ ID NO: 1135910 - DNA, 15 bp, Homo sapiens
ctcaagatggattaa

SEQ ID NO: 1135911 - DNA, 15 bp, Homo sapiens
actcaagatggatta

SEQ ID NO: 1135912 - DNA, 15 bp, Homo sapiens
aactcaagatggatt

SEQ ID NO: 1135913 - DNA, 15 bp, Homo sapiens
taactcaagatggat

SEQ ID NO: 1135914 - DNA, 15 bp, Homo sapiens
ttaactcaagatgga

SEQ ID NO: 1135915 - DNA, 15 bp, Homo sapiens
gttaactcaagatgg

SEQ ID NO: 1135916 - DNA, 15 bp, Homo sapiens
agttaactcaagatg

SEQ ID NO: 1135917 - DNA, 15 bp, Homo sapiens
aagttaactcaagat

SEQ ID NO: 1135918 - DNA, 15 bp, Homo sapiens
aaagttaactcaaga

SEQ ID NO: 1135919 - DNA, 15 bp, Homo sapiens
aaaagttaactcaag

SEQ ID NO: 1135920 - DNA, 15 bp, Homo sapiens
caaaagttaactcaa

SEQ ID NO: 1135921 - DNA, 15 bp, Homo sapiens
acaaaagttaactca

SEQ ID NO: 1135922 - DNA, 15 bp, Homo sapiens
tacaaaagttaactc

SEQ ID NO: 1135923 - DNA, 15 bp, Homo sapiens
atacaaaagttaact

SEQ ID NO: 1135924 - DNA, 15 bp, Homo sapiens
tatacaaaagttaac

SEQ ID NO: 1135925 - DNA, 15 bp, Homo sapiens
ttatacaaaagttaa

SEQ ID NO: 1135926 - DNA, 15 bp, Homo sapiens
cttatacaaaagtta

SEQ ID NO: 1135927 - DNA, 15 bp, Homo sapiens
acttatacaaaagtt

SEQ ID NO: 1135928 - DNA, 15 bp, Homo sapiens
aacttatacaaaagt

SEQ ID NO: 1135929 - DNA, 15 bp, Homo sapiens
caacttatacaaaag

SEQ ID NO: 1135930 - DNA, 15 bp, Homo sapiens
acaacttatacaaaa

SEQ ID NO: 1135931 - DNA, 15 bp, Homo sapiens
tacaacttatacaaa

SEQ ID NO: 1135932 - DNA, 15 bp, Homo sapiens
ttacaacttatacaa

SEQ ID NO: 1135933 - DNA, 15 bp, Homo sapiens
cttacaacttataca

SEQ ID NO: 1135934 - DNA, 15 bp, Homo sapiens
ccttacaacttatac

SEQ ID NO: 1135935 - DNA, 15 bp, Homo sapiens
tccttacaacttata

SEQ ID NO: 1135936 - DNA, 15 bp, Homo sapiens
ttccttacaacttat

SEQ ID NO: 1135937 - DNA, 15 bp, Homo sapiens
cttccttacaactta

SEQ ID NO: 1135938 - DNA, 15 bp, Homo sapiens
ccttccttacaactt

SEQ ID NO: 1135939 - DNA, 15 bp, Homo sapiens
tccttccttacaact

SEQ ID NO: 1135940 - DNA, 15 bp, Homo sapiens
ctccttccttacaac

SEQ ID NO: 1135941 - DNA, 15 bp, Homo sapiens
actccttccttacaa

SEQ ID NO: 1135942 - DNA, 15 bp, Homo sapiens
gactccttccttaca

SEQ ID NO: 1135943 - DNA, 15 bp, Homo sapiens
ggactccttccttac

SEQ ID NO: 1135944 - DNA, 15 bp, Homo sapiens
tggactccttcctta

SEQ ID NO: 1135945 - DNA, 15 bp, Homo sapiens
gtggactccttcctt

SEQ ID NO: 1135946 - DNA, 15 bp, Homo sapiens
agtggactccttcct

SEQ ID NO: 1135947 - DNA, 15 bp, Homo sapiens
aagtggactccttcc

SEQ ID NO: 1135948 - DNA, 15 bp, Homo sapiens
aaagtggactccttc

SEQ ID NO: 1135949 - DNA, 15 bp, Homo sapiens
gaaagtggactcctt

SEQ ID NO: 1135950 - DNA, 15 bp, Homo sapiens
tgaaagtggactcct

SEQ ID NO: 1135951 - DNA, 15 bp, Homo sapiens
ctgaaagtggactcc

SEQ ID NO: 1135952 - DNA, 15 bp, Homo sapiens
actgaaagtggactc

SEQ ID NO: 1135953 - DNA, 15 bp, Homo sapiens
aactgaaagtggact

SEQ ID NO: 1135954 - DNA, 15 bp, Homo sapiens
aaactgaaagtggac

SEQ ID NO: 1135955 - DNA, 15 bp, Homo sapiens
aaaactgaaagtgga

SEQ ID NO: 1135956 - DNA, 15 bp, Homo sapiens
gaaaactgaaagtgg

SEQ ID NO: 1135957 - DNA, 15 bp, Homo sapiens
agaaaactgaaagtg

SEQ ID NO: 1135958 - DNA, 15 bp, Homo sapiens
cagaaaactgaaagt

SEQ ID NO: 1135959 - DNA, 15 bp, Homo sapiens
gcagaaaactgaaag

SEQ ID NO: 1135960 - DNA, 15 bp, Homo sapiens
tgcagaaaactgaaa

SEQ ID NO: 1135961 - DNA, 15 bp, Homo sapiens
atgcagaaaactgaa

SEQ ID NO: 1135962 - DNA, 15 bp, Homo sapiens
tatgcagaaaactga

SEQ ID NO: 1135963 - DNA, 15 bp, Homo sapiens
atatgcagaaaactg

SEQ ID NO: 1135964 - DNA, 15 bp, Homo sapiens
catatgcagaaaact

SEQ ID NO: 1135965 - DNA, 15 bp, Homo sapiens
ccatatgcagaaaac

SEQ ID NO: 1135966 - DNA, 15 bp, Homo sapiens
gccatatgcagaaaa

SEQ ID NO: 1135967 - DNA, 15 bp, Homo sapiens
agccatatgcagaaa

SEQ ID NO: 1135968 - DNA, 15 bp, Homo sapiens
tagccatatgcagaa

SEQ ID NO: 1135969 - DNA, 15 bp, Homo sapiens
ctagccatatgcaga

SEQ ID NO: 1135970 - DNA, 15 bp, Homo sapiens
gctagccatatgcag

SEQ ID NO: 1135971 - DNA, 15 bp, Homo sapiens
ggctagccatatgca

SEQ ID NO: 1135972 - DNA, 15 bp, Homo sapiens
tggctagccatatgc

SEQ ID NO: 1135973 - DNA, 15 bp, Homo sapiens
ctggctagccatatg

SEQ ID NO: 1135974 - DNA, 15 bp, Homo sapiens
actggctagccatat

SEQ ID NO: 1135975 - DNA, 15 bp, Homo sapiens
aactggctagccata

SEQ ID NO: 1135976 - DNA, 15 bp, Homo sapiens
aaactggctagccat

SEQ ID NO: 1135977 - DNA, 15 bp, Homo sapiens
aaaactggctagcca

SEQ ID NO: 1135978 - DNA, 15 bp, Homo sapiens
gaaaactggctagcc

SEQ ID NO: 1135979 - DNA, 15 bp, Homo sapiens
ggaaaactggctagc

SEQ ID NO: 1135980 - DNA, 15 bp, Homo sapiens
gggaaaactggctag

SEQ ID NO: 1135981 - DNA, 15 bp, Homo sapiens
tgggaaaactggcta

SEQ ID NO: 1135982 - DNA, 15 bp, Homo sapiens
ctgggaaaactggct

SEQ ID NO: 1135983 - DNA, 15 bp, Homo sapiens
gctgggaaaactggc

SEQ ID NO: 1135984 - DNA, 15 bp, Homo sapiens
tgctgggaaaactgg

SEQ ID NO: 1135985 - DNA, 15 bp, Homo sapiens
gtgctgggaaaactg

SEQ ID NO: 1135986 - DNA, 15 bp, Homo sapiens
ggtgctgggaaaact

SEQ ID NO: 1135987 - DNA, 15 bp, Homo sapiens
tggtgctgggaaaac

SEQ ID NO: 1135988 - DNA, 15 bp, Homo sapiens
atggtgctgggaaaa

SEQ ID NO: 1135989 - DNA, 15 bp, Homo sapiens
aatggtgctgggaaa

SEQ ID NO: 1135990 - DNA, 15 bp, Homo sapiens
aaatggtgctgggaa

SEQ ID NO: 1135991 - DNA, 15 bp, Homo sapiens
taaatggtgctggga

SEQ ID NO: 1135992 - DNA, 15 bp, Homo sapiens
ataaatggtgctggg

SEQ ID NO: 1135993 - DNA, 15 bp, Homo sapiens
aataaatggtgctgg

SEQ ID NO: 1135994 - DNA, 15 bp, Homo sapiens
caataaatggtgctg

SEQ ID NO: 1135995 - DNA, 15 bp, Homo sapiens
tcaataaatggtgct

SEQ ID NO: 1135996 - DNA, 15 bp, Homo sapiens
ttcaataaatggtgc

SEQ ID NO: 1135997 - DNA, 15 bp, Homo sapiens
attcaataaatggtg

SEQ ID NO: 1135998 - DNA, 15 bp, Homo sapiens
tattcaataaatggt

SEQ ID NO: 1135999 - DNA, 15 bp, Homo sapiens
ctattcaataaatgg

SEQ ID NO: 1136000 - DNA, 15 bp, Homo sapiens
cctattcaataaatg

SEQ ID NO: 1136001 - DNA, 15 bp, Homo sapiens
tcctattcaataaat

SEQ ID NO: 1136002 - DNA, 15 bp, Homo sapiens
ctcctattcaataaa

SEQ ID NO: 1136003 - DNA, 15 bp, Homo sapiens
tctcctattcaataa

SEQ ID NO: 1136004 - DNA, 15 bp, Homo sapiens
atctcctattcaata

SEQ ID NO: 1136005 - DNA, 15 bp, Homo sapiens
gatctcctattcaat

SEQ ID NO: 1136006 - DNA, 15 bp, Homo sapiens
ggatctcctattcaa

SEQ ID NO: 1136007 - DNA, 15 bp, Homo sapiens
aggatctcctattca

SEQ ID NO: 1136008 - DNA, 15 bp, Homo sapiens
aaggatctcctattc

SEQ ID NO: 1136009 - DNA, 15 bp, Homo sapiens
aaaggatctcctatt

SEQ ID NO: 1136010 - DNA, 15 bp, Homo sapiens
gaaaggatctcctat

SEQ ID NO: 1136011 - DNA, 15 bp, Homo sapiens
ggaaaggatctccta

SEQ ID NO: 1136012 - DNA, 15 bp, Homo sapiens
gggaaaggatctcct

SEQ ID NO: 1136013 - DNA, 15 bp, Homo sapiens
ggggaaaggatctcc

SEQ ID NO: 1136014 - DNA, 15 bp, Homo sapiens
gggggaaaggatctc

SEQ ID NO: 1136015 - DNA, 15 bp, Homo sapiens
tgggggaaaggatct

SEQ ID NO: 1136016 - DNA, 15 bp, Homo sapiens
atgggggaaaggatc

SEQ ID NO: 1136017 - DNA, 15 bp, Homo sapiens
aatgggggaaaggat

SEQ ID NO: 1136018 - DNA, 15 bp, Homo sapiens
caatgggggaaagga

SEQ ID NO: 1136019 - DNA, 15 bp, Homo sapiens
gcaatgggggaaagg

SEQ ID NO: 1136020 - DNA, 15 bp, Homo sapiens
agcaatgggggaaag

SEQ ID NO: 1136021 - DNA, 15 bp, Homo sapiens
aagcaatgggggaaa

SEQ ID NO: 1136022 - DNA, 15 bp, Homo sapiens
caagcaatgggggaa

SEQ ID NO: 1136023 - DNA, 15 bp, Homo sapiens
acaagcaatggggga

SEQ ID NO: 1136024 - DNA, 15 bp, Homo sapiens
aacaagcaatggggg

SEQ ID NO: 1136025 - DNA, 15 bp, Homo sapiens
caacaagcaatgggg

SEQ ID NO: 1136026 - DNA, 15 bp, Homo sapiens
acaacaagcaatggg

SEQ ID NO: 1136027 - DNA, 15 bp, Homo sapiens
aacaacaagcaatgg

SEQ ID NO: 1136028 - DNA, 15 bp, Homo sapiens
caacaacaagcaatg

SEQ ID NO: 1136029 - DNA, 15 bp, Homo sapiens
acaacaacaagcaat

SEQ ID NO: 1136030 - DNA, 15 bp, Homo sapiens
gacaacaacaagcaa

SEQ ID NO: 1136031 - DNA, 15 bp, Homo sapiens
tgacaacaacaagca

SEQ ID NO: 1136032 - DNA, 15 bp, Homo sapiens
ctgacaacaacaagc

SEQ ID NO: 1136033 - DNA, 15 bp, Homo sapiens
cctgacaacaacaag

SEQ ID NO: 1136034 - DNA, 15 bp, Homo sapiens
acctgacaacaacaa

SEQ ID NO: 1136035 - DNA, 15 bp, Homo sapiens
aacctgacaacaaca

SEQ ID NO: 1136036 - DNA, 15 bp, Homo sapiens
aaacctgacaacaac

SEQ ID NO: 1136037 - DNA, 15 bp, Homo sapiens
caaacctgacaacaa

SEQ ID NO: 1136038 - DNA, 15 bp, Homo sapiens
acaaacctgacaaca

SEQ ID NO: 1136039 - DNA, 15 bp, Homo sapiens
gacaaacctgacaac

SEQ ID NO: 1136040 - DNA, 15 bp, Homo sapiens
tgacaaacctgacaa

SEQ ID NO: 1136041 - DNA, 15 bp, Homo sapiens
ttgacaaacctgaca

SEQ ID NO: 1136042 - DNA, 15 bp, Homo sapiens
tttgacaaacctgac

SEQ ID NO: 1136043 - DNA, 15 bp, Homo sapiens
ctttgacaaacctga

SEQ ID NO: 1136044 - DNA, 15 bp, Homo sapiens
tctttgacaaacctg

SEQ ID NO: 1136045 - DNA, 15 bp, Homo sapiens
atctttgacaaacct

SEQ ID NO: 1136046 - DNA, 15 bp, Homo sapiens
ctgatctttgacaaa

SEQ ID NO: 1136047 - DNA, 15 bp, Homo sapiens
tctgatctttgacaa

SEQ ID NO: 1136048 - DNA, 15 bp, Homo sapiens
atctgatctttgaca

SEQ ID NO: 1136049 - DNA, 15 bp, Homo sapiens
catctgatctttgac

SEQ ID NO: 1136050 - DNA, 15 bp, Homo sapiens
ccatctgatctttga

SEQ ID NO: 1136051 - DNA, 15 bp, Homo sapiens
accatctgatctttg

SEQ ID NO: 1136052 - DNA, 15 bp, Homo sapiens
aaccatctgatcttt

SEQ ID NO: 1136053 - DNA, 15 bp, Homo sapiens
caaccatctgatctt

SEQ ID NO: 1136054 - DNA, 15 bp, Homo sapiens
acaaccatctgatct

SEQ ID NO: 1136055 - DNA, 15 bp, Homo sapiens
tacaaccatctgatc

SEQ ID NO: 1136056 - DNA, 15 bp, Homo sapiens
ctacaaccatctgat

SEQ ID NO: 1136057 - DNA, 15 bp, Homo sapiens
tctacaaccatctga

SEQ ID NO: 1136058 - DNA, 15 bp, Homo sapiens
atctacaaccatctg

SEQ ID NO: 1136059 - DNA, 15 bp, Homo sapiens
catctacaaccatct

SEQ ID NO: 1136060 - DNA, 15 bp, Homo sapiens
acatctacaaccatc

SEQ ID NO: 1136061 - DNA, 15 bp, Homo sapiens
cacatctacaaccat

SEQ ID NO: 1136062 - DNA, 15 bp, Homo sapiens
gcacatctacaacca

SEQ ID NO: 1136063 - DNA, 15 bp, Homo sapiens
cgcacatctacaacc

SEQ ID NO: 1136064 - DNA, 15 bp, Homo sapiens
tcgcacatctacaac

SEQ ID NO: 1136065 - DNA, 15 bp, Homo sapiens
atcgcacatctacaa

SEQ ID NO: 1136066 - DNA, 15 bp, Homo sapiens
tatcgcacatctaca

SEQ ID NO: 1136067 - DNA, 15 bp, Homo sapiens
atatcgcacatctac

SEQ ID NO: 1136068 - DNA, 15 bp, Homo sapiens
aatatcgcacatcta

SEQ ID NO: 1136069 - DNA, 15 bp, Homo sapiens
taatatcgcacatct

SEQ ID NO: 1136070 - DNA, 15 bp, Homo sapiens
ataatatcgcacatc

SEQ ID NO: 1136071 - DNA, 15 bp, Homo sapiens
aataatatcgcacat

SEQ ID NO: 1136072 - DNA, 15 bp, Homo sapiens
aaataatatcgcaca

SEQ ID NO: 1136073 - DNA, 15 bp, Homo sapiens
gaaataatatcgcac

SEQ ID NO: 1136074 - DNA, 15 bp, Homo sapiens
agaaataatatcgca

SEQ ID NO: 1136075 - DNA, 15 bp, Homo sapiens
cagaaataatatcgc

SEQ ID NO: 1136076 - DNA, 15 bp, Homo sapiens
tcagaaataatatcg

SEQ ID NO: 1136077 - DNA, 15 bp, Homo sapiens
ctcagaaataatatc

SEQ ID NO: 1136078 - DNA, 15 bp, Homo sapiens
cctcagaaataatat

SEQ ID NO: 1136079 - DNA, 15 bp, Homo sapiens
acctcagaaataata

SEQ ID NO: 1136080 - DNA, 15 bp, Homo sapiens
gacctcagaaataat

SEQ ID NO: 1136081 - DNA, 15 bp, Homo sapiens
agacctcagaaataa

SEQ ID NO: 1136082 - DNA, 15 bp, Homo sapiens
gagacctcagaaata

SEQ ID NO: 1136083 - DNA, 15 bp, Homo sapiens
agagacctcagaaat

SEQ ID NO: 1136084 - DNA, 15 bp, Homo sapiens
cagagacctcagaaa

SEQ ID NO: 1136085 - DNA, 15 bp, Homo sapiens
acagagacctcagaa

SEQ ID NO: 1136086 - DNA, 15 bp, Homo sapiens
aacagagacctcaga

SEQ ID NO: 1136087 - DNA, 15 bp, Homo sapiens
gaacagagacctcag

SEQ ID NO: 1136088 - DNA, 15 bp, Homo sapiens
agaacagagacctca

SEQ ID NO: 1136089 - DNA, 15 bp, Homo sapiens
cagaacagagacctc

SEQ ID NO: 1136090 - DNA, 15 bp, Homo sapiens
acagaacagagacct

SEQ ID NO: 1136091 - DNA, 15 bp, Homo sapiens
aacagaacagagacc

SEQ ID NO: 1136092 - DNA, 15 bp, Homo sapiens
aaacagaacagagac

SEQ ID NO: 1136093 - DNA, 15 bp, Homo sapiens
gaaacagaacagaga

SEQ ID NO: 1136094 - DNA, 15 bp, Homo sapiens
tgaaacagaacagag

SEQ ID NO: 1136095 - DNA, 15 bp, Homo sapiens
atgaaacagaacaga

SEQ ID NO: 1136096 - DNA, 15 bp, Homo sapiens
aatgaaacagaacag

SEQ ID NO: 1136097 - DNA, 15 bp, Homo sapiens
caatgaaacagaaca

SEQ ID NO: 1136098 - DNA, 15 bp, Homo sapiens
ccaatgaaacagaac

SEQ ID NO: 1136099 - DNA, 15 bp, Homo sapiens
accaatgaaacagaa

SEQ ID NO: 1136100 - DNA, 15 bp, Homo sapiens
gaccaatgaaacaga

SEQ ID NO: 1136101 - DNA, 15 bp, Homo sapiens
agaccaatgaaacag

SEQ ID NO: 1136102 - DNA, 15 bp, Homo sapiens
tagaccaatgaaaca

SEQ ID NO: 1136103 - DNA, 15 bp, Homo sapiens
atagaccaatgaaac

SEQ ID NO: 1136104 - DNA, 15 bp, Homo sapiens
tatagaccaatgaaa

SEQ ID NO: 1136105 - DNA, 15 bp, Homo sapiens
atatagaccaatgaa

SEQ ID NO: 1136106 - DNA, 15 bp, Homo sapiens
catatagaccaatga

SEQ ID NO: 1136107 - DNA, 15 bp, Homo sapiens
acatatagaccaatg

SEQ ID NO: 1136108 - DNA, 15 bp, Homo sapiens
gacatatagaccaat

SEQ ID NO: 1136109 - DNA, 15 bp, Homo sapiens
tgacatatagaccaa

SEQ ID NO: 1136110 - DNA, 15 bp, Homo sapiens
ttgacatatagacca

SEQ ID NO: 1136111 - DNA, 15 bp, Homo sapiens
tttgacatatagacc

SEQ ID NO: 1136112 - DNA, 15 bp, Homo sapiens
ttttgacatatagac

SEQ ID NO: 1136113 - DNA, 15 bp, Homo sapiens
gttttgacatataga

SEQ ID NO: 1136114 - DNA, 15 bp, Homo sapiens
tgttttgacatatag

SEQ ID NO: 1136115 - DNA, 15 bp, Homo sapiens
ctgttttgacatata

SEQ ID NO: 1136116 - DNA, 15 bp, Homo sapiens
gctgttttgacatat

SEQ ID NO: 1136117 - DNA, 15 bp, Homo sapiens
agctgttttgacata

SEQ ID NO: 1136118 - DNA, 15 bp, Homo sapiens
tagctgttttgacat

SEQ ID NO: 1136119 - DNA, 15 bp, Homo sapiens
atagctgttttgaca

SEQ ID NO: 1136120 - DNA, 15 bp, Homo sapiens
aatagctgttttgac

SEQ ID NO: 1136121 - DNA, 15 bp, Homo sapiens
aaatagctgttttga

SEQ ID NO: 1136122 - DNA, 15 bp, Homo sapiens
aaaatagctgttttg

SEQ ID NO: 1136123 - DNA, 15 bp, Homo sapiens
caaaatagctgtttt

SEQ ID NO: 1136124 - DNA, 15 bp, Homo sapiens
tcaaaatagctgttt

SEQ ID NO: 1136125 - DNA, 15 bp, Homo sapiens
ttcaaaatagctgtt

SEQ ID NO: 1136126 - DNA, 15 bp, Homo sapiens
attcaaaatagctgt

SEQ ID NO: 1136127 - DNA, 15 bp, Homo sapiens
aattcaaaatagctg

SEQ ID NO: 1136128 - DNA, 15 bp, Homo sapiens
gaattcaaaatagct

SEQ ID NO: 1136129 - DNA, 15 bp, Homo sapiens
agaattcaaaatagc

SEQ ID NO: 1136130 - DNA, 15 bp, Homo sapiens
gagaattcaaaatag

SEQ ID NO: 1136131 - DNA, 15 bp, Homo sapiens
agagaattcaaaata

SEQ ID NO: 1136132 - DNA, 15 bp, Homo sapiens
cagagaattcaaaat

SEQ ID NO: 1136133 - DNA, 15 bp, Homo sapiens
gcagagaattcaaaa

SEQ ID NO: 1136134 - DNA, 15 bp, Homo sapiens
ggcagagaattcaaa

SEQ ID NO: 1136135 - DNA, 15 bp, Homo sapiens
aggcagagaattcaa

SEQ ID NO: 1136136 - DNA, 15 bp, Homo sapiens
caggcagagaattca

SEQ ID NO: 1136137 - DNA, 15 bp, Homo sapiens
tcaggcagagaattc

SEQ ID NO: 1136138 - DNA, 15 bp, Homo sapiens
gtcaggcagagaatt

SEQ ID NO: 1136139 - DNA, 15 bp, Homo sapiens
tgtcaggcagagaat

SEQ ID NO: 1136140 - DNA, 15 bp, Homo sapiens
ctgtcaggcagagaa

SEQ ID NO: 1136141 - DNA, 15 bp, Homo sapiens
cctgtcaggcagaga

SEQ ID NO: 1136142 - DNA, 15 bp, Homo sapiens
acctgtcaggcagag

SEQ ID NO: 1136143 - DNA, 15 bp, Homo sapiens
gacctgtcaggcaga

SEQ ID NO: 1136144 - DNA, 15 bp, Homo sapiens
tgacctgtcaggcag

SEQ ID NO: 1136145 - DNA, 15 bp, Homo sapiens
gtgacctgtcaggca

SEQ ID NO: 1136146 - DNA, 15 bp, Homo sapiens
tgtgacctgtcaggc

SEQ ID NO: 1136147 - DNA, 15 bp, Homo sapiens
atgtgacctgtcagg

SEQ ID NO: 1136148 - DNA, 15 bp, Homo sapiens
tatgtgacctgtcag

SEQ ID NO: 1136149 - DNA, 15 bp, Homo sapiens
atatgtgacctgtca

SEQ ID NO: 1136150 - DNA, 15 bp, Homo sapiens
gatatgtgacctgtc

SEQ ID NO: 1136151 - DNA, 15 bp, Homo sapiens
agatatgtgacctgt

SEQ ID NO: 1136152 - DNA, 15 bp, Homo sapiens
gagatatgtgacctg

SEQ ID NO: 1136153 - DNA, 15 bp, Homo sapiens
agagatatgtgacct

SEQ ID NO: 1136154 - DNA, 15 bp, Homo sapiens
aagagatatgtgacc

SEQ ID NO: 1136155 - DNA, 15 bp, Homo sapiens
aaagagatatgtgac

SEQ ID NO: 1136156 - DNA, 15 bp, Homo sapiens
gaaagagatatgtga

SEQ ID NO: 1136157 - DNA, 15 bp, Homo sapiens
agaaagagatatgtg

SEQ ID NO: 1136158 - DNA, 15 bp, Homo sapiens
aagaaagagatatgt

SEQ ID NO: 1136159 - DNA, 15 bp, Homo sapiens
gaagaaagagatatg

SEQ ID NO: 1136160 - DNA, 15 bp, Homo sapiens
tgaagaaagagatat

SEQ ID NO: 1136161 - DNA, 15 bp, Homo sapiens
ctgaagaaagagata

SEQ ID NO: 1136162 - DNA, 15 bp, Homo sapiens
actgaagaaagagat

SEQ ID NO: 1136163 - DNA, 15 bp, Homo sapiens
tactgaagaaagaga

SEQ ID NO: 1136164 - DNA, 15 bp, Homo sapiens
atactgaagaaagag

SEQ ID NO: 1136165 - DNA, 15 bp, Homo sapiens
aatactgaagaaaga

SEQ ID NO: 1136166 - DNA, 15 bp, Homo sapiens
caatactgaagaaag

SEQ ID NO: 1136167 - DNA, 15 bp, Homo sapiens
acaatactgaagaaa

SEQ ID NO: 1136168 - DNA, 15 bp, Homo sapiens
aacaatactgaagaa

SEQ ID NO: 1136169 - DNA, 15 bp, Homo sapiens
gaacaatactgaaga

SEQ ID NO: 1136170 - DNA, 15 bp, Homo sapiens
ggaacaatactgaag

SEQ ID NO: 1136171 - DNA, 15 bp, Homo sapiens
gggaacaatactgaa

SEQ ID NO: 1136172 - DNA, 15 bp, Homo sapiens
tgggaacaatactga

SEQ ID NO: 1136173 - DNA, 15 bp, Homo sapiens
ctgggaacaatactg

SEQ ID NO: 1136174 - DNA, 15 bp, Homo sapiens
cctgggaacaatact

SEQ ID NO: 1136175 - DNA, 15 bp, Homo sapiens
acctgggaacaatac

SEQ ID NO: 1136176 - DNA, 15 bp, Homo sapiens
cacctgggaacaata

SEQ ID NO: 1136177 - DNA, 15 bp, Homo sapiens
tcacctgggaacaat

SEQ ID NO: 1136178 - DNA, 15 bp, Homo sapiens
gtcacctgggaacaa

SEQ ID NO: 1136179 - DNA, 15 bp, Homo sapiens
agtcacctgggaaca

SEQ ID NO: 1136180 - DNA, 15 bp, Homo sapiens
aagtcacctgggaac

SEQ ID NO: 1136181 - DNA, 15 bp, Homo sapiens
taagtcacctgggaa

SEQ ID NO: 1136182 - DNA, 15 bp, Homo sapiens
ataagtcacctggga

SEQ ID NO: 1136183 - DNA, 15 bp, Homo sapiens
aataagtcacctggg

SEQ ID NO: 1136184 - DNA, 15 bp, Homo sapiens
aaataagtcacctgg

SEQ ID NO: 1136185 - DNA, 15 bp, Homo sapiens
taaataagtcacctg

SEQ ID NO: 1136186 - DNA, 15 bp, Homo sapiens
ctaaataagtcacct

SEQ ID NO: 1136187 - DNA, 15 bp, Homo sapiens
actaaataagtcacc

SEQ ID NO: 1136188 - DNA, 15 bp, Homo sapiens
aactaaataagtcac

SEQ ID NO: 1136189 - DNA, 15 bp, Homo sapiens
gaactaaataagtca

SEQ ID NO: 1136190 - DNA, 15 bp, Homo sapiens
tgaactaaataagtc

SEQ ID NO: 1136191 - DNA, 15 bp, Homo sapiens
atgaactaaataagt

SEQ ID NO: 1136192 - DNA, 15 bp, Homo sapiens
aatgaactaaataag

SEQ ID NO: 1136193 - DNA, 15 bp, Homo sapiens
aaatgaactaaataa

SEQ ID NO: 1136194 - DNA, 15 bp, Homo sapiens
caaatgaactaaata

SEQ ID NO: 1136195 - DNA, 15 bp, Homo sapiens
ccaaatgaactaaat

SEQ ID NO: 1136196 - DNA, 15 bp, Homo sapiens
accaaatgaactaaa

SEQ ID NO: 1136197 - DNA, 15 bp, Homo sapiens
caccaaatgaactaa

SEQ ID NO: 1136198 - DNA, 15 bp, Homo sapiens
tcaccaaatgaacta

SEQ ID NO: 1136199 - DNA, 15 bp, Homo sapiens
ctcaccaaatgaact

SEQ ID NO: 1136200 - DNA, 15 bp, Homo sapiens
cctcaccaaatgaac

SEQ ID NO: 1136201 - DNA, 15 bp, Homo sapiens
acctcaccaaatgaa

SEQ ID NO: 1136202 - DNA, 15 bp, Homo sapiens
gacctcaccaaatga

SEQ ID NO: 1136203 - DNA, 15 bp, Homo sapiens
tgacctcaccaaatg

SEQ ID NO: 1136204 - DNA, 15 bp, Homo sapiens
atgacctcaccaaat

SEQ ID NO: 1136205 - DNA, 15 bp, Homo sapiens
catgacctcaccaaa

SEQ ID NO: 1136206 - DNA, 15 bp, Homo sapiens
acatgacctcaccaa

SEQ ID NO: 1136207 - DNA, 15 bp, Homo sapiens
aacatgacctcacca

SEQ ID NO: 1136208 - DNA, 15 bp, Homo sapiens
aaacatgacctcacc

SEQ ID NO: 1136209 - DNA, 15 bp, Homo sapiens
aaaacatgacctcac

SEQ ID NO: 1136210 - DNA, 15 bp, Homo sapiens
gaaaacatgacctca

SEQ ID NO: 1136211 - DNA, 15 bp, Homo sapiens
ggaaaacatgacctc

SEQ ID NO: 1136212 - DNA, 15 bp, Homo sapiens
aggaaaacatgacct

SEQ ID NO: 1136213 - DNA, 15 bp, Homo sapiens
caggaaaacatgacc

SEQ ID NO: 1136214 - DNA, 15 bp, Homo sapiens
ccaggaaaacatgac

SEQ ID NO: 1136215 - DNA, 15 bp, Homo sapiens
tccaggaaaacatga

SEQ ID NO: 1136216 - DNA, 15 bp, Homo sapiens
atccaggaaaacatg

SEQ ID NO: 1136217 - DNA, 15 bp, Homo sapiens
catccaggaaaacat

SEQ ID NO: 1136218 - DNA, 15 bp, Homo sapiens
ccatccaggaaaaca

SEQ ID NO: 1136219 - DNA, 15 bp, Homo sapiens
accatccaggaaaac

SEQ ID NO: 1136220 - DNA, 15 bp, Homo sapiens
taccatccaggaaaa

SEQ ID NO: 1136221 - DNA, 15 bp, Homo sapiens
ataccatccaggaaa

SEQ ID NO: 1136222 - DNA, 15 bp, Homo sapiens
aataccatccaggaa

SEQ ID NO: 1136223 - DNA, 15 bp, Homo sapiens
caataccatccagga

SEQ ID NO: 1136224 - DNA, 15 bp, Homo sapiens
tcaataccatccagg

SEQ ID NO: 1136225 - DNA, 15 bp, Homo sapiens
atcaataccatccag

SEQ ID NO: 1136226 - DNA, 15 bp, Homo sapiens
tatcaataccatcca

SEQ ID NO: 1136227 - DNA, 15 bp, Homo sapiens
gtatcaataccatcc

SEQ ID NO: 1136228 - DNA, 15 bp, Homo sapiens
agtatcaataccatc

SEQ ID NO: 1136229 - DNA, 15 bp, Homo sapiens
aagtatcaataccat

SEQ ID NO: 1136230 - DNA, 15 bp, Homo sapiens
caagtatcaatacca

SEQ ID NO: 1136231 - DNA, 15 bp, Homo sapiens
acaagtatcaatacc

SEQ ID NO: 1136232 - DNA, 15 bp, Homo sapiens
tacaagtatcaatac

SEQ ID NO: 1136233 - DNA, 15 bp, Homo sapiens
ctacaagtatcaata

SEQ ID NO: 1136234 - DNA, 15 bp, Homo sapiens
cctacaagtatcaat

SEQ ID NO: 1136235 - DNA, 15 bp, Homo sapiens
acctacaagtatcaa

SEQ ID NO: 1136236 - DNA, 15 bp, Homo sapiens
tacctacaagtatca

SEQ ID NO: 1136237 - DNA, 15 bp, Homo sapiens
atacctacaagtatc

SEQ ID NO: 1136238 - DNA, 15 bp, Homo sapiens
gatacctacaagtat

SEQ ID NO: 1136239 - DNA, 15 bp, Homo sapiens
cgatacctacaagta

SEQ ID NO: 1136240 - DNA, 15 bp, Homo sapiens
ccgatacctacaagt

SEQ ID NO: 1136241 - DNA, 15 bp, Homo sapiens
accgatacctacaag

SEQ ID NO: 1136242 - DNA, 15 bp, Homo sapiens
gaccgatacctacaa

SEQ ID NO: 1136243 - DNA, 15 bp, Homo sapiens
tgaccgatacctaca

SEQ ID NO: 1136244 - DNA, 15 bp, Homo sapiens
ctgaccgatacctac

SEQ ID NO: 1136245 - DNA, 15 bp, Homo sapiens
actgaccgataccta

SEQ ID NO: 1136246 - DNA, 15 bp, Homo sapiens
tactgaccgatacct

SEQ ID NO: 1136247 - DNA, 15 bp, Homo sapiens
atactgaccgatacc

SEQ ID NO: 1136248 - DNA, 15 bp, Homo sapiens
tatactgaccgatac

SEQ ID NO: 1136249 - DNA, 15 bp, Homo sapiens
atatactgaccgata

SEQ ID NO: 1136250 - DNA, 15 bp, Homo sapiens
catatactgaccgat

SEQ ID NO: 1136251 - DNA, 15 bp, Homo sapiens
ccatatactgaccga

SEQ ID NO: 1136252 - DNA, 15 bp, Homo sapiens
cccatatactgaccg

SEQ ID NO: 1136253 - DNA, 15 bp, Homo sapiens
gcccatatactgacc

SEQ ID NO: 1136254 - DNA, 15 bp, Homo sapiens
tgcccatatactgac

SEQ ID NO: 1136255 - DNA, 15 bp, Homo sapiens
atgcccatatactga

SEQ ID NO: 1136256 - DNA, 15 bp, Homo sapiens
aatgcccatatactg

SEQ ID NO: 1136257 - DNA, 15 bp, Homo sapiens
caatgcccatatact

SEQ ID NO: 1136258 - DNA, 15 bp, Homo sapiens
tcaatgcccatatac

SEQ ID NO: 1136259 - DNA, 15 bp, Homo sapiens
ttcaatgcccatata

SEQ ID NO: 1136260 - DNA, 15 bp, Homo sapiens
cttcaatgcccatat

SEQ ID NO: 1136261 - DNA, 15 bp, Homo sapiens
acttcaatgcccata

SEQ ID NO: 1136262 - DNA, 15 bp, Homo sapiens
cacttcaatgcccat

SEQ ID NO: 1136263 - DNA, 15 bp, Homo sapiens
acacttcaatgccca

SEQ ID NO: 1136264 - DNA, 15 bp, Homo sapiens
aacacttcaatgccc

SEQ ID NO: 1136265 - DNA, 15 bp, Homo sapiens
taacacttcaatgcc

SEQ ID NO: 1136266 - DNA, 15 bp, Homo sapiens
ctaacacttcaatgc

SEQ ID NO: 1136267 - DNA, 15 bp, Homo sapiens
cctaacacttcaatg

SEQ ID NO: 1136268 - DNA, 15 bp, Homo sapiens
acctaacacttcaat

SEQ ID NO: 1136269 - DNA, 15 bp, Homo sapiens
tacctaacacttcaa

SEQ ID NO: 1136270 - DNA, 15 bp, Homo sapiens
atacctaacacttca

SEQ ID NO: 1136271 - DNA, 15 bp, Homo sapiens
aatacctaacacttc

SEQ ID NO: 1136272 - DNA, 15 bp, Homo sapiens
aaatacctaacactt

SEQ ID NO: 1136273 - DNA, 15 bp, Homo sapiens
taaatacctaacact

SEQ ID NO: 1136274 - DNA, 15 bp, Homo sapiens
ataaatacctaacac

SEQ ID NO: 1136275 - DNA, 15 bp, Homo sapiens
aataaatacctaaca

SEQ ID NO: 1136276 - DNA, 15 bp, Homo sapiens
aaataaatacctaac

SEQ ID NO: 1136277 - DNA, 15 bp, Homo sapiens
aaaataaatacctaa

SEQ ID NO: 1136278 - DNA, 15 bp, Homo sapiens
caaaataaataccta

SEQ ID NO: 1136279 - DNA, 15 bp, Homo sapiens
ccaaaataaatacct

SEQ ID NO: 1136280 - DNA, 15 bp, Homo sapiens
accaaaataaatacc

SEQ ID NO: 1136281 - DNA, 15 bp, Homo sapiens
gaccaaaataaatac

SEQ ID NO: 1136282 - DNA, 15 bp, Homo sapiens
agaccaaaataaata

SEQ ID NO: 1136283 - DNA, 15 bp, Homo sapiens
aagaccaaaataaat

SEQ ID NO: 1136284 - DNA, 15 bp, Homo sapiens
aaagaccaaaataaa

SEQ ID NO: 1136285 - DNA, 15 bp, Homo sapiens
gcaaagaccaaaata

SEQ ID NO: 1136286 - DNA, 15 bp, Homo sapiens
tgcaaagaccaaaat

SEQ ID NO: 1136287 - DNA, 15 bp, Homo sapiens
ctgcaaagaccaaaa

SEQ ID NO: 1136288 - DNA, 15 bp, Homo sapiens
gctgcaaagaccaaa

SEQ ID NO: 1136289 - DNA, 15 bp, Homo sapiens
ggctgcaaagaccaa

SEQ ID NO: 1136290 - DNA, 15 bp, Homo sapiens
gggctgcaaagacca

SEQ ID NO: 1136291 - DNA, 15 bp, Homo sapiens
cgggctgcaaagacc

SEQ ID NO: 1136292 - DNA, 15 bp, Homo sapiens
tcgggctgcaaagac

SEQ ID NO: 1136293 - DNA, 15 bp, Homo sapiens
ctcgggctgcaaaga

SEQ ID NO: 1136294 - DNA, 15 bp, Homo sapiens
gctcgggctgcaaag

SEQ ID NO: 1136295 - DNA, 15 bp, Homo sapiens
agctcgggctgcaaa

SEQ ID NO: 1136296 - DNA, 15 bp, Homo sapiens
aagctcgggctgcaa

SEQ ID NO: 1136297 - DNA, 15 bp, Homo sapiens
caagctcgggctgca

SEQ ID NO: 1136298 - DNA, 15 bp, Homo sapiens
acaagctcgggctgc

SEQ ID NO: 1136299 - DNA, 15 bp, Homo sapiens
aacaagctcgggctg

SEQ ID NO: 1136300 - DNA, 15 bp, Homo sapiens
aaacaagctcgggct

SEQ ID NO: 1136301 - DNA, 15 bp, Homo sapiens
caaacaagctcgggc

SEQ ID NO: 1136302 - DNA, 15 bp, Homo sapiens
acaaacaagctcggg

SEQ ID NO: 1136303 - DNA, 15 bp, Homo sapiens
tacaaacaagctcgg

SEQ ID NO: 1136304 - DNA, 15 bp, Homo sapiens
gtacaaacaagctcg

SEQ ID NO: 1136305 - DNA, 15 bp, Homo sapiens
ggtacaaacaagctc

SEQ ID NO: 1136306 - DNA, 15 bp, Homo sapiens
gggtacaaacaagct

SEQ ID NO: 1136307 - DNA, 15 bp, Homo sapiens
tgggtacaaacaagc

SEQ ID NO: 1136308 - DNA, 15 bp, Homo sapiens
atgggtacaaacaag

SEQ ID NO: 1136309 - DNA, 15 bp, Homo sapiens
gatgggtacaaacaa

SEQ ID NO: 1136310 - DNA, 15 bp, Homo sapiens
agatgggtacaaaca

SEQ ID NO: 1136311 - DNA, 15 bp, Homo sapiens
aagatgggtacaaac

SEQ ID NO: 1136312 - DNA, 15 bp, Homo sapiens
aaagatgggtacaaa

SEQ ID NO: 1136313 - DNA, 15 bp, Homo sapiens
gaaagatgggtacaa

SEQ ID NO: 1136314 - DNA, 15 bp, Homo sapiens
agaaagatgggtaca

SEQ ID NO: 1136315 - DNA, 15 bp, Homo sapiens
aagaaagatgggtac

SEQ ID NO: 1136316 - DNA, 15 bp, Homo sapiens
caagaaagatgggta

SEQ ID NO: 1136317 - DNA, 15 bp, Homo sapiens
tcaagaaagatgggt

SEQ ID NO: 1136318 - DNA, 15 bp, Homo sapiens
ctcaagaaagatggg

SEQ ID NO: 1136319 - DNA, 15 bp, Homo sapiens
tctcaagaaagatgg

SEQ ID NO: 1136320 - DNA, 15 bp, Homo sapiens
ttctcaagaaagatg

SEQ ID NO: 1136321 - DNA, 15 bp, Homo sapiens
cttctcaagaaagat

SEQ ID NO: 1136322 - DNA, 15 bp, Homo sapiens
ccttctcaagaaaga

SEQ ID NO: 1136323 - DNA, 15 bp, Homo sapiens
gccttctcaagaaag

SEQ ID NO: 1136324 - DNA, 15 bp, Homo sapiens
agccttctcaagaaa

SEQ ID NO: 1136325 - DNA, 15 bp, Homo sapiens
aagccttctcaagaa

SEQ ID NO: 1136326 - DNA, 15 bp, Homo sapiens
aaagccttctcaaga

SEQ ID NO: 1136327 - DNA, 15 bp, Homo sapiens
aaaagccttctcaag

SEQ ID NO: 1136328 - DNA, 15 bp, Homo sapiens
gaaaagccttctcaa

SEQ ID NO: 1136329 - DNA, 15 bp, Homo sapiens
agaaaagccttctca

SEQ ID NO: 1136330 - DNA, 15 bp, Homo sapiens
ctagaaaagccttct

SEQ ID NO: 1136331 - DNA, 15 bp, Homo sapiens
cctagaaaagccttc

SEQ ID NO: 1136332 - DNA, 15 bp, Homo sapiens
acctagaaaagcctt

SEQ ID NO: 1136333 - DNA, 15 bp, Homo sapiens
cacctagaaaagcct

SEQ ID NO: 1136334 - DNA, 15 bp, Homo sapiens
acacctagaaaagcc

SEQ ID NO: 1136335 - DNA, 15 bp, Homo sapiens
aacacctagaaaagc

SEQ ID NO: 1136336 - DNA, 15 bp, Homo sapiens
aaacacctagaaaag

SEQ ID NO: 1136337 - DNA, 15 bp, Homo sapiens
caaacacctagaaaa

SEQ ID NO: 1136338 - DNA, 15 bp, Homo sapiens
tcaaacacctagaaa

SEQ ID NO: 1136339 - DNA, 15 bp, Homo sapiens
ttcaaacacctagaa

SEQ ID NO: 1136340 - DNA, 15 bp, Homo sapiens
tttcaaacacctaga

SEQ ID NO: 1136341 - DNA, 15 bp, Homo sapiens
ctttcaaacacctag

SEQ ID NO: 1136342 - DNA, 15 bp, Homo sapiens
actttcaaacaccta

SEQ ID NO: 1136343 - DNA, 15 bp, Homo sapiens
tactttcaaacacct

SEQ ID NO: 1136344 - DNA, 15 bp, Homo sapiens
gtactttcaaacacc

SEQ ID NO: 1136345 - DNA, 15 bp, Homo sapiens
agtactttcaaacac

SEQ ID NO: 1136346 - DNA, 15 bp, Homo sapiens
aagtactttcaaaca

SEQ ID NO: 1136347 - DNA, 15 bp, Homo sapiens
caagtactttcaaac

SEQ ID NO: 1136348 - DNA, 15 bp, Homo sapiens
ccaagtactttcaaa

SEQ ID NO: 1136349 - DNA, 15 bp, Homo sapiens
cccaagtactttcaa

SEQ ID NO: 1136350 - DNA, 15 bp, Homo sapiens
acccaagtactttca

SEQ ID NO: 1136351 - DNA, 15 bp, Homo sapiens
tacccaagtactttc

SEQ ID NO: 1136352 - DNA, 15 bp, Homo sapiens
atacccaagtacttt

SEQ ID NO: 1136353 - DNA, 15 bp, Homo sapiens
aatacccaagtactt

SEQ ID NO: 1136354 - DNA, 15 bp, Homo sapiens
aaatacccaagtact

SEQ ID NO: 1136355 - DNA, 15 bp, Homo sapiens
aaaatacccaagtac

SEQ ID NO: 1136356 - DNA, 15 bp, Homo sapiens
caaaatacccaagta

SEQ ID NO: 1136357 - DNA, 15 bp, Homo sapiens
tcaaaatacccaagt

SEQ ID NO: 1136358 - DNA, 15 bp, Homo sapiens
atcaaaatacccaag

SEQ ID NO: 1136359 - DNA, 15 bp, Homo sapiens
gatcaaaatacccaa

SEQ ID NO: 1136360 - DNA, 15 bp, Homo sapiens
agatcaaaataccca

SEQ ID NO: 1136361 - DNA, 15 bp, Homo sapiens
tagatcaaaataccc

SEQ ID NO: 1136362 - DNA, 15 bp, Homo sapiens
ttagatcaaaatacc

SEQ ID NO: 1136363 - DNA, 15 bp, Homo sapiens
cttagatcaaaatac

SEQ ID NO: 1136364 - DNA, 15 bp, Homo sapiens
gcttagatcaaaata

SEQ ID NO: 1136365 - DNA, 15 bp, Homo sapiens
agcttagatcaaaat

SEQ ID NO: 1136366 - DNA, 15 bp, Homo sapiens
cagcttagatcaaaa

SEQ ID NO: 1136367 - DNA, 15 bp, Homo sapiens
acagcttagatcaaa

SEQ ID NO: 1136368 - DNA, 15 bp, Homo sapiens
tacagcttagatcaa

SEQ ID NO: 1136369 - DNA, 15 bp, Homo sapiens
atacagcttagatca

SEQ ID NO: 1136370 - DNA, 15 bp, Homo sapiens
gatacagcttagatc

SEQ ID NO: 1136371 - DNA, 15 bp, Homo sapiens
agatacagcttagat

SEQ ID NO: 1136372 - DNA, 15 bp, Homo sapiens
cagatacagcttaga

SEQ ID NO: 1136373 - DNA, 15 bp, Homo sapiens
gcagatacagcttag

SEQ ID NO: 1136374 - DNA, 15 bp, Homo sapiens
tgcagatacagctta

SEQ ID NO: 1136375 - DNA, 15 bp, Homo sapiens
atgcagatacagctt

SEQ ID NO: 1136376 - DNA, 15 bp, Homo sapiens
aatgcagatacagct

SEQ ID NO: 1136377 - DNA, 15 bp, Homo sapiens
taatgcagatacagc

SEQ ID NO: 1136378 - DNA, 15 bp, Homo sapiens
ctaatgcagatacag

SEQ ID NO: 1136379 - DNA, 15 bp, Homo sapiens
cctaatgcagataca

SEQ ID NO: 1136380 - DNA, 15 bp, Homo sapiens
ccctaatgcagatac

SEQ ID NO: 1136381 - DNA, 15 bp, Homo sapiens
tccctaatgcagata

SEQ ID NO: 1136382 - DNA, 15 bp, Homo sapiens
ctccctaatgcagat

SEQ ID NO: 1136383 - DNA, 15 bp, Homo sapiens
gctccctaatgcaga

SEQ ID NO: 1136384 - DNA, 15 bp, Homo sapiens
tgctccctaatgcag

SEQ ID NO: 1136385 - DNA, 15 bp, Homo sapiens
gtgctccctaatgca

SEQ ID NO: 1136386 - DNA, 15 bp, Homo sapiens
ggtgctccctaatgc

SEQ ID NO: 1136387 - DNA, 15 bp, Homo sapiens
gggtgctccctaatg

SEQ ID NO: 1136388 - DNA, 15 bp, Homo sapiens
agggtgctccctaat

SEQ ID NO: 1136389 - DNA, 15 bp, Homo sapiens
tagggtgctccctaa

SEQ ID NO: 1136390 - DNA, 15 bp, Homo sapiens
ttagggtgctcccta

SEQ ID NO: 1136391 - DNA, 15 bp, Homo sapiens
cttagggtgctccct

SEQ ID NO: 1136392 - DNA, 15 bp, Homo sapiens
gcttagggtgctccc

SEQ ID NO: 1136393 - DNA, 15 bp, Homo sapiens
ggcttagggtgctcc

SEQ ID NO: 1136394 - DNA, 15 bp, Homo sapiens
gggcttagggtgctc

SEQ ID NO: 1136395 - DNA, 15 bp, Homo sapiens
tgggcttagggtgct

SEQ ID NO: 1136396 - DNA, 15 bp, Homo sapiens
ctgggcttagggtgc

SEQ ID NO: 1136397 - DNA, 15 bp, Homo sapiens
actgggcttagggtg

SEQ ID NO: 1136398 - DNA, 15 bp, Homo sapiens
tactgggcttagggt

SEQ ID NO: 1136399 - DNA, 15 bp, Homo sapiens
ttactgggcttaggg

SEQ ID NO: 1136400 - DNA, 15 bp, Homo sapiens
gttactgggcttagg

SEQ ID NO: 1136401 - DNA, 15 bp, Homo sapiens
tgttactgggcttag

SEQ ID NO: 1136402 - DNA, 15 bp, Homo sapiens
atgttactgggctta

SEQ ID NO: 1136403 - DNA, 15 bp, Homo sapiens
aatgttactgggctt

SEQ ID NO: 1136404 - DNA, 15 bp, Homo sapiens
caatgttactgggct

SEQ ID NO: 1136405 - DNA, 15 bp, Homo sapiens
acaatgttactgggc

SEQ ID NO: 1136406 - DNA, 15 bp, Homo sapiens
cacaatgttactggg

SEQ ID NO: 1136407 - DNA, 15 bp, Homo sapiens
ccacaatgttactgg

SEQ ID NO: 1136408 - DNA, 15 bp, Homo sapiens
accacaatgttactg

SEQ ID NO: 1136409 - DNA, 15 bp, Homo sapiens
aaccacaatgttact

SEQ ID NO: 1136410 - DNA, 15 bp, Homo sapiens
aaaccacaatgttac

SEQ ID NO: 1136411 - DNA, 15 bp, Homo sapiens
gaaaccacaatgtta

SEQ ID NO: 1136412 - DNA, 15 bp, Homo sapiens
agaaaccacaatgtt

SEQ ID NO: 1136413 - DNA, 15 bp, Homo sapiens
aagaaaccacaatgt

SEQ ID NO: 1136414 - DNA, 15 bp, Homo sapiens
taagaaaccacaatg

SEQ ID NO: 1136415 - DNA, 15 bp, Homo sapiens
gtaagaaaccacaat

SEQ ID NO: 1136416 - DNA, 15 bp, Homo sapiens
tgtaagaaaccacaa

SEQ ID NO: 1136417 - DNA, 15 bp, Homo sapiens
ctgtaagaaaccaca

SEQ ID NO: 1136418 - DNA, 15 bp, Homo sapiens
tctgtaagaaaccac

SEQ ID NO: 1136419 - DNA, 15 bp, Homo sapiens
gtctgtaagaaacca

SEQ ID NO: 1136420 - DNA, 15 bp, Homo sapiens
agtctgtaagaaacc

SEQ ID NO: 1136421 - DNA, 15 bp, Homo sapiens
aagtctgtaagaaac

SEQ ID NO: 1136422 - DNA, 15 bp, Homo sapiens
taagtctgtaagaaa

SEQ ID NO: 1136423 - DNA, 15 bp, Homo sapiens
ataagtctgtaagaa

SEQ ID NO: 1136424 - DNA, 15 bp, Homo sapiens
tataagtctgtaaga

SEQ ID NO: 1136425 - DNA, 15 bp, Homo sapiens
ctataagtctgtaag

SEQ ID NO: 1136426 - DNA, 15 bp, Homo sapiens
tctataagtctgtaa

SEQ ID NO: 1136427 - DNA, 15 bp, Homo sapiens
ctctataagtctgta

SEQ ID NO: 1136428 - DNA, 15 bp, Homo sapiens
cctctataagtctgt

SEQ ID NO: 1136429 - DNA, 15 bp, Homo sapiens
acctctataagtctg

SEQ ID NO: 1136430 - DNA, 15 bp, Homo sapiens
tacctctataagtct

SEQ ID NO: 1136431 - DNA, 15 bp, Homo sapiens
gtacctctataagtc

SEQ ID NO: 1136432 - DNA, 15 bp, Homo sapiens
agtacctctataagt

SEQ ID NO: 1136433 - DNA, 15 bp, Homo sapiens
cagtacctctataag

SEQ ID NO: 1136434 - DNA, 15 bp, Homo sapiens
gcagtacctctataa

SEQ ID NO: 1136435 - DNA, 15 bp, Homo sapiens
ggcagtacctctata

SEQ ID NO: 1136436 - DNA, 15 bp, Homo sapiens
aggcagtacctctat

SEQ ID NO: 1136437 - DNA, 15 bp, Homo sapiens
aaggcagtacctcta

SEQ ID NO: 1136438 - DNA, 15 bp, Homo sapiens
caaggcagtacctct

SEQ ID NO: 1136439 - DNA, 15 bp, Homo sapiens
tcaaggcagtacctc

SEQ ID NO: 1136440 - DNA, 15 bp, Homo sapiens
atcaaggcagtacct

SEQ ID NO: 1136441 - DNA, 15 bp, Homo sapiens
catcaaggcagtacc

SEQ ID NO: 1136442 - DNA, 15 bp, Homo sapiens
ccatcaaggcagtac

SEQ ID NO: 1136443 - DNA, 15 bp, Homo sapiens
accatcaaggcagta

SEQ ID NO: 1136444 - DNA, 15 bp, Homo sapiens
gaccatcaaggcagt

SEQ ID NO: 1136445 - DNA, 15 bp, Homo sapiens
agaccatcaaggcag

SEQ ID NO: 1136446 - DNA, 15 bp, Homo sapiens
aagaccatcaaggca

SEQ ID NO: 1136447 - DNA, 15 bp, Homo sapiens
caagaccatcaaggc

SEQ ID NO: 1136448 - DNA, 15 bp, Homo sapiens
ccaagaccatcaagg

SEQ ID NO: 1136449 - DNA, 15 bp, Homo sapiens
tccaagaccatcaag

SEQ ID NO: 1136450 - DNA, 15 bp, Homo sapiens
atccaagaccatcaa

SEQ ID NO: 1136451 - DNA, 15 bp, Homo sapiens
tatccaagaccatca

SEQ ID NO: 1136452 - DNA, 15 bp, Homo sapiens
ttatccaagaccatc

SEQ ID NO: 1136453 - DNA, 15 bp, Homo sapiens
cttatccaagaccat

SEQ ID NO: 1136454 - DNA, 15 bp, Homo sapiens
tcttatccaagacca

SEQ ID NO: 1136455 - DNA, 15 bp, Homo sapiens
atcttatccaagacc

SEQ ID NO: 1136456 - DNA, 15 bp, Homo sapiens
gatcttatccaagac

SEQ ID NO: 1136457 - DNA, 15 bp, Homo sapiens
ggatcttatccaaga

SEQ ID NO: 1136458 - DNA, 15 bp, Homo sapiens
tggatcttatccaag

SEQ ID NO: 1136459 - DNA, 15 bp, Homo sapiens
ctggatcttatccaa

SEQ ID NO: 1136460 - DNA, 15 bp, Homo sapiens
tctggatcttatcca

SEQ ID NO: 1136461 - DNA, 15 bp, Homo sapiens
ttctggatcttatcc

SEQ ID NO: 1136462 - DNA, 15 bp, Homo sapiens
tttctggatcttatc

SEQ ID NO: 1136463 - DNA, 15 bp, Homo sapiens
ttttctggatcttat

SEQ ID NO: 1136464 - DNA, 15 bp, Homo sapiens
attttctggatctta

SEQ ID NO: 1136465 - DNA, 15 bp, Homo sapiens
aattttctggatctt

SEQ ID NO: 1136466 - DNA, 15 bp, Homo sapiens
aaattttctggatct

SEQ ID NO: 1136467 - DNA, 15 bp, Homo sapiens
gaaattttctggatc

SEQ ID NO: 1136468 - DNA, 15 bp, Homo sapiens
agaaattttctggat

SEQ ID NO: 1136469 - DNA, 15 bp, Homo sapiens
aagaaattttctgga

SEQ ID NO: 1136470 - DNA, 15 bp, Homo sapiens
taagaaattttctgg

SEQ ID NO: 1136471 - DNA, 15 bp, Homo sapiens
gtaagaaattttctg

SEQ ID NO: 1136472 - DNA, 15 bp, Homo sapiens
ggtaagaaattttct

SEQ ID NO: 1136473 - DNA, 15 bp, Homo sapiens
tggtaagaaattttc

SEQ ID NO: 1136474 - DNA, 15 bp, Homo sapiens
ctggtaagaaatttt

SEQ ID NO: 1136475 - DNA, 15 bp, Homo sapiens
cctggtaagaaattt

SEQ ID NO: 1136476 - DNA, 15 bp, Homo sapiens
gcctggtaagaaatt

SEQ ID NO: 1136477 - DNA, 15 bp, Homo sapiens
tgcctggtaagaaat

SEQ ID NO: 1136478 - DNA, 15 bp, Homo sapiens
ctgcctggtaagaaa

SEQ ID NO: 1136479 - DNA, 15 bp, Homo sapiens
tctgcctggtaagaa

SEQ ID NO: 1136480 - DNA, 15 bp, Homo sapiens
ctctgcctggtaaga

SEQ ID NO: 1136481 - DNA, 15 bp, Homo sapiens
tctctgcctggtaag

SEQ ID NO: 1136482 - DNA, 15 bp, Homo sapiens
gtctctgcctggtaa

SEQ ID NO: 1136483 - DNA, 15 bp, Homo sapiens
agtctctgcctggta

SEQ ID NO: 1136484 - DNA, 15 bp, Homo sapiens
gagtctctgcctggt

SEQ ID NO: 1136485 - DNA, 15 bp, Homo sapiens
agagtctctgcctgg

SEQ ID NO: 1136486 - DNA, 15 bp, Homo sapiens
aagagtctctgcctg

SEQ ID NO: 1136487 - DNA, 15 bp, Homo sapiens
caagagtctctgcct

SEQ ID NO: 1136488 - DNA, 15 bp, Homo sapiens
acaagagtctctgcc

SEQ ID NO: 1136489 - DNA, 15 bp, Homo sapiens
aacaagagtctctgc

SEQ ID NO: 1136490 - DNA, 15 bp, Homo sapiens
caacaagagtctctg

SEQ ID NO: 1136491 - DNA, 15 bp, Homo sapiens
acaacaagagtctct

SEQ ID NO: 1136492 - DNA, 15 bp, Homo sapiens
gacaacaagagtctc

SEQ ID NO: 1136493 - DNA, 15 bp, Homo sapiens
agacaacaagagtct

SEQ ID NO: 1136494 - DNA, 15 bp, Homo sapiens
aagacaacaagagtc

SEQ ID NO: 1136495 - DNA, 15 bp, Homo sapiens
gaagacaacaagagt

SEQ ID NO: 1136496 - DNA, 15 bp, Homo sapiens
agaagacaacaagag

SEQ ID NO: 1136497 - DNA, 15 bp, Homo sapiens
aagaagacaacaaga

SEQ ID NO: 1136498 - DNA, 15 bp, Homo sapiens
aaagaagacaacaag

SEQ ID NO: 1136499 - DNA, 15 bp, Homo sapiens
aaaagaagacaacaa

SEQ ID NO: 1136500 - DNA, 15 bp, Homo sapiens
taaaagaagacaaca

SEQ ID NO: 1136501 - DNA, 15 bp, Homo sapiens
gtaaaagaagacaac

SEQ ID NO: 1136502 - DNA, 15 bp, Homo sapiens
agtaaaagaagacaa

SEQ ID NO: 1136503 - DNA, 15 bp, Homo sapiens
aagtaaaagaagaca

SEQ ID NO: 1136504 - DNA, 15 bp, Homo sapiens
aaagtaaaagaagac

SEQ ID NO: 1136505 - DNA, 15 bp, Homo sapiens
gaaagtaaaagaaga

SEQ ID NO: 1136506 - DNA, 15 bp, Homo sapiens
agaaagtaaaagaag

SEQ ID NO: 1136507 - DNA, 15 bp, Homo sapiens
gagaaagtaaaagaa

SEQ ID NO: 1136508 - DNA, 15 bp, Homo sapiens
ggagaaagtaaaaga

SEQ ID NO: 1136509 - DNA, 15 bp, Homo sapiens
gggagaaagtaaaag

SEQ ID NO: 1136510 - DNA, 15 bp, Homo sapiens
tgggagaaagtaaaa

SEQ ID NO: 1136511 - DNA, 15 bp, Homo sapiens
ttgggagaaagtaaa

SEQ ID NO: 1136512 - DNA, 15 bp, Homo sapiens
tttgggagaaagtaa

SEQ ID NO: 1136513 - DNA, 15 bp, Homo sapiens
gtttgggagaaagta

SEQ ID NO: 1136514 - DNA, 15 bp, Homo sapiens
tgtttgggagaaagt

SEQ ID NO: 1136515 - DNA, 15 bp, Homo sapiens
ttgtttgggagaaag

SEQ ID NO: 1136516 - DNA, 15 bp, Homo sapiens
tttgtttgggagaaa

SEQ ID NO: 1136517 - DNA, 15 bp, Homo sapiens
gtttgtttgggagaa

SEQ ID NO: 1136518 - DNA, 15 bp, Homo sapiens
tgtttgtttgggaga

SEQ ID NO: 1136519 - DNA, 15 bp, Homo sapiens
ttgtttgtttgggag

SEQ ID NO: 1136520 - DNA, 15 bp, Homo sapiens
tttgtttgtttggga

SEQ ID NO: 1136521 - DNA, 15 bp, Homo sapiens
atttgtttgtttggg

SEQ ID NO: 1136522 - DNA, 15 bp, Homo sapiens
aatttgtttgtttgg

SEQ ID NO: 1136523 - DNA, 15 bp, Homo sapiens
gaatttgtttgtttg

SEQ ID NO: 1136524 - DNA, 15 bp, Homo sapiens
agaatttgtttgttt

SEQ ID NO: 1136525 - DNA, 15 bp, Homo sapiens
gagaatttgtttgtt

SEQ ID NO: 1136526 - DNA, 15 bp, Homo sapiens
agagaatttgtttgt

SEQ ID NO: 1136527 - DNA, 15 bp, Homo sapiens
gagagaatttgtttg

SEQ ID NO: 1136528 - DNA, 15 bp, Homo sapiens
agagagaatttgttt

SEQ ID NO: 1136529 - DNA, 15 bp, Homo sapiens
gagagagaatttgtt

SEQ ID NO: 1136530 - DNA, 15 bp, Homo sapiens
agagagagaatttgt

SEQ ID NO: 1136531 - DNA, 15 bp, Homo sapiens
gagagagagaatttg

SEQ ID NO: 1136532 - DNA, 15 bp, Homo sapiens
agagagagagaattt

SEQ ID NO: 1136533 - DNA, 15 bp, Homo sapiens
gagagagagagaatt

SEQ ID NO: 1136534 - DNA, 15 bp, Homo sapiens
ggagagagagagaga

SEQ ID NO: 1136535 - DNA, 15 bp, Homo sapiens
gggagagagagagag

SEQ ID NO: 1136536 - DNA, 15 bp, Homo sapiens
agggagagagagaga

SEQ ID NO: 1136537 - DNA, 15 bp, Homo sapiens
agagggagagagaga

SEQ ID NO: 1136538 - DNA, 15 bp, Homo sapiens
agagagggagagaga

SEQ ID NO: 1136539 - DNA, 15 bp, Homo sapiens
aagagagagggagag

SEQ ID NO: 1136540 - DNA, 15 bp, Homo sapiens
aaagagagagggaga

SEQ ID NO: 1136541 - DNA, 15 bp, Homo sapiens
aaaagagagagggag

SEQ ID NO: 1136542 - DNA, 15 bp, Homo sapiens
aaaaagagagaggga

SEQ ID NO: 1136543 - DNA, 15 bp, Homo sapiens
gaaaaagagagaggg

SEQ ID NO: 1136544 - DNA, 15 bp, Homo sapiens
agaaaaagagagagg

SEQ ID NO: 1136545 - DNA, 15 bp, Homo sapiens
cagaaaaagagagag

SEQ ID NO: 1136546 - DNA, 15 bp, Homo sapiens
acagaaaaagagaga

SEQ ID NO: 1136547 - DNA, 15 bp, Homo sapiens
cacagaaaaagagag

SEQ ID NO: 1136548 - DNA, 15 bp, Homo sapiens
gcacagaaaaagaga

SEQ ID NO: 1136549 - DNA, 15 bp, Homo sapiens
agcacagaaaaagag

SEQ ID NO: 1136550 - DNA, 15 bp, Homo sapiens
cagcacagaaaaaga

SEQ ID NO: 1136551 - DNA, 15 bp, Homo sapiens
ccagcacagaaaaag

SEQ ID NO: 1136552 - DNA, 15 bp, Homo sapiens
tccagcacagaaaaa

SEQ ID NO: 1136553 - DNA, 15 bp, Homo sapiens
gtccagcacagaaaa

SEQ ID NO: 1136554 - DNA, 15 bp, Homo sapiens
tgtccagcacagaaa

SEQ ID NO: 1136555 - DNA, 15 bp, Homo sapiens
atgtccagcacagaa

SEQ ID NO: 1136556 - DNA, 15 bp, Homo sapiens
gatgtccagcacaga

SEQ ID NO: 1136557 - DNA, 15 bp, Homo sapiens
ggatgtccagcacag

SEQ ID NO: 1136558 - DNA, 15 bp, Homo sapiens
aggatgtccagcaca

SEQ ID NO: 1136559 - DNA, 15 bp, Homo sapiens
caggatgtccagcac

SEQ ID NO: 1136560 - DNA, 15 bp, Homo sapiens
ccaggatgtccagca

SEQ ID NO: 1136561 - DNA, 15 bp, Homo sapiens
tccaggatgtccagc

SEQ ID NO: 1136562 - DNA, 15 bp, Homo sapiens
ctccaggatgtccag

SEQ ID NO: 1136563 - DNA, 15 bp, Homo sapiens
gctccaggatgtcca

SEQ ID NO: 1136564 - DNA, 15 bp, Homo sapiens
agctccaggatgtcc

SEQ ID NO: 1136565 - DNA, 15 bp, Homo sapiens
aagctccaggatgtc

SEQ ID NO: 1136566 - DNA, 15 bp, Homo sapiens
caagctccaggatgt

SEQ ID NO: 1136567 - DNA, 15 bp, Homo sapiens
ccaagctccaggatg

SEQ ID NO: 1136568 - DNA, 15 bp, Homo sapiens
cccaagctccaggat

SEQ ID NO: 1136569 - DNA, 15 bp, Homo sapiens
ccccaagctccagga

SEQ ID NO: 1136570 - DNA, 15 bp, Homo sapiens
accccaagctccagg

SEQ ID NO: 1136571 - DNA, 15 bp, Homo sapiens
caccccaagctccag

SEQ ID NO: 1136572 - DNA, 15 bp, Homo sapiens
ccaccccaagctcca

SEQ ID NO: 1136573 - DNA, 15 bp, Homo sapiens
cccaccccaagctcc

SEQ ID NO: 1136574 - DNA, 15 bp, Homo sapiens
tcccaccccaagctc

SEQ ID NO: 1136575 - DNA, 15 bp, Homo sapiens
atcccaccccaagct

SEQ ID NO: 1136576 - DNA, 15 bp, Homo sapiens
catcccaccccaagc

SEQ ID NO: 1136577 - DNA, 15 bp, Homo sapiens
tcatcccaccccaag

SEQ ID NO: 1136578 - DNA, 15 bp, Homo sapiens
gtcatcccaccccaa

SEQ ID NO: 1136579 - DNA, 15 bp, Homo sapiens
tgtcatcccacccca

SEQ ID NO: 1136580 - DNA, 15 bp, Homo sapiens
gtgtcatcccacccc

SEQ ID NO: 1136581 - DNA, 15 bp, Homo sapiens
tgtgtcatcccaccc

SEQ ID NO: 1136582 - DNA, 15 bp, Homo sapiens
ttgtgtcatcccacc

SEQ ID NO: 1136583 - DNA, 15 bp, Homo sapiens
cttgtgtcatcccac

SEQ ID NO: 1136584 - DNA, 15 bp, Homo sapiens
acttgtgtcatccca

SEQ ID NO: 1136585 - DNA, 15 bp, Homo sapiens
aacttgtgtcatccc

SEQ ID NO: 1136586 - DNA, 15 bp, Homo sapiens
gaacttgtgtcatcc

SEQ ID NO: 1136587 - DNA, 15 bp, Homo sapiens
ggaacttgtgtcatc

SEQ ID NO: 1136588 - DNA, 15 bp, Homo sapiens
aggaacttgtgtcat

SEQ ID NO: 1136589 - DNA, 15 bp, Homo sapiens
gaggaacttgtgtca

SEQ ID NO: 1136590 - DNA, 15 bp, Homo sapiens
agaggaacttgtgtc

SEQ ID NO: 1136591 - DNA, 15 bp, Homo sapiens
cagaggaacttgtgt

SEQ ID NO: 1136592 - DNA, 15 bp, Homo sapiens
acagaggaacttgtg

SEQ ID NO: 1136593 - DNA, 15 bp, Homo sapiens
cacagaggaacttgt

SEQ ID NO: 1136594 - DNA, 15 bp, Homo sapiens
ccacagaggaacttg

SEQ ID NO: 1136595 - DNA, 15 bp, Homo sapiens
gccacagaggaactt

SEQ ID NO: 1136596 - DNA, 15 bp, Homo sapiens
agccacagaggaact

SEQ ID NO: 1136597 - DNA, 15 bp, Homo sapiens
tagccacagaggaac

SEQ ID NO: 1136598 - DNA, 15 bp, Homo sapiens
gtagccacagaggaa

SEQ ID NO: 1136599 - DNA, 15 bp, Homo sapiens
tgtagccacagagga

SEQ ID NO: 1136600 - DNA, 15 bp, Homo sapiens
gtgtagccacagagg

SEQ ID NO: 1136601 - DNA, 15 bp, Homo sapiens
ggtgtagccacagag

SEQ ID NO: 1136602 - DNA, 15 bp, Homo sapiens
tggtgtagccacaga

SEQ ID NO: 1136603 - DNA, 15 bp, Homo sapiens
gtggtgtagccacag

SEQ ID NO: 1136604 - DNA, 15 bp, Homo sapiens
agtggtgtagccaca

SEQ ID NO: 1136605 - DNA, 15 bp, Homo sapiens
cagtggtgtagccac

SEQ ID NO: 1136606 - DNA, 15 bp, Homo sapiens
ccagtggtgtagcca

SEQ ID NO: 1136607 - DNA, 15 bp, Homo sapiens
cccagtggtgtagcc

SEQ ID NO: 1136608 - DNA, 15 bp, Homo sapiens
ccccagtggtgtagc

SEQ ID NO: 1136609 - DNA, 15 bp, Homo sapiens
gccccagtggtgtag

SEQ ID NO: 1136610 - DNA, 15 bp, Homo sapiens
agccccagtggtgta

SEQ ID NO: 1136611 - DNA, 15 bp, Homo sapiens
cagccccagtggtgt

SEQ ID NO: 1136612 - DNA, 15 bp, Homo sapiens
gcagccccagtggtg

SEQ ID NO: 1136613 - DNA, 15 bp, Homo sapiens
tgcagccccagtggt

SEQ ID NO: 1136614 - DNA, 15 bp, Homo sapiens
gtgcagccccagtgg

SEQ ID NO: 1136615 - DNA, 15 bp, Homo sapiens
agtgcagccccagtg

SEQ ID NO: 1136616 - DNA, 15 bp, Homo sapiens
tagtgcagccccagt

SEQ ID NO: 1136617 - DNA, 15 bp, Homo sapiens
ctagtgcagccccag

SEQ ID NO: 1136618 - DNA, 15 bp, Homo sapiens
cctagtgcagcccca

SEQ ID NO: 1136619 - DNA, 15 bp, Homo sapiens
tcctagtgcagcccc

SEQ ID NO: 1136620 - DNA, 15 bp, Homo sapiens
gtcctagtgcagccc

SEQ ID NO: 1136621 - DNA, 15 bp, Homo sapiens
tgtcctagtgcagcc

SEQ ID NO: 1136622 - DNA, 15 bp, Homo sapiens
ctgtcctagtgcagc

SEQ ID NO: 1136623 - DNA, 15 bp, Homo sapiens
tctgtcctagtgcag

SEQ ID NO: 1136624 - DNA, 15 bp, Homo sapiens
gtctgtcctagtgca

SEQ ID NO: 1136625 - DNA, 15 bp, Homo sapiens
ggtctgtcctagtgc

SEQ ID NO: 1136626 - DNA, 15 bp, Homo sapiens
aggtctgtcctagtg

SEQ ID NO: 1136627 - DNA, 15 bp, Homo sapiens
caggtctgtcctagt

SEQ ID NO: 1136628 - DNA, 15 bp, Homo sapiens
tcaggtctgtcctag

SEQ ID NO: 1136629 - DNA, 15 bp, Homo sapiens
ttcaggtctgtccta

SEQ ID NO: 1136630 - DNA, 15 bp, Homo sapiens
tttcaggtctgtcct

SEQ ID NO: 1136631 - DNA, 15 bp, Homo sapiens
atttcaggtctgtcc

SEQ ID NO: 1136632 - DNA, 15 bp, Homo sapiens
gatttcaggtctgtc

SEQ ID NO: 1136633 - DNA, 15 bp, Homo sapiens
tgatttcaggtctgt

SEQ ID NO: 1136634 - DNA, 15 bp, Homo sapiens
ctgatttcaggtctg

SEQ ID NO: 1136635 - DNA, 15 bp, Homo sapiens
gctgatttcaggtct

SEQ ID NO: 1136636 - DNA, 15 bp, Homo sapiens
tgctgatttcaggtc

SEQ ID NO: 1136637 - DNA, 15 bp, Homo sapiens
gtgctgatttcaggt

SEQ ID NO: 1136638 - DNA, 15 bp, Homo sapiens
tgtgctgatttcagg

SEQ ID NO: 1136639 - DNA, 15 bp, Homo sapiens
ctgtgctgatttcag

SEQ ID NO: 1136640 - DNA, 15 bp, Homo sapiens
actgtgctgatttca

SEQ ID NO: 1136641 - DNA, 15 bp, Homo sapiens
tactgtgctgatttc

SEQ ID NO: 1136642 - DNA, 15 bp, Homo sapiens
gtactgtgctgattt

SEQ ID NO: 1136643 - DNA, 15 bp, Homo sapiens
agtactgtgctgatt

SEQ ID NO: 1136644 - DNA, 15 bp, Homo sapiens
cagtactgtgctgat

SEQ ID NO: 1136645 - DNA, 15 bp, Homo sapiens
gcagtactgtgctga

SEQ ID NO: 1136646 - DNA, 15 bp, Homo sapiens
tgcagtactgtgctg

SEQ ID NO: 1136647 - DNA, 15 bp, Homo sapiens
atgcagtactgtgct

SEQ ID NO: 1136648 - DNA, 15 bp, Homo sapiens
gatgcagtactgtgc

SEQ ID NO: 1136649 - DNA, 15 bp, Homo sapiens
agatgcagtactgtg

SEQ ID NO: 1136650 - DNA, 15 bp, Homo sapiens
aagatgcagtactgt

SEQ ID NO: 1136651 - DNA, 15 bp, Homo sapiens
caagatgcagtactg

SEQ ID NO: 1136652 - DNA, 15 bp, Homo sapiens
gcaagatgcagtact

SEQ ID NO: 1136653 - DNA, 15 bp, Homo sapiens
agcaagatgcagtac

SEQ ID NO: 1136654 - DNA, 15 bp, Homo sapiens
gagcaagatgcagta

SEQ ID NO: 1136655 - DNA, 15 bp, Homo sapiens
tgagcaagatgcagt

SEQ ID NO: 1136656 - DNA, 15 bp, Homo sapiens
ttgagcaagatgcag

SEQ ID NO: 1136657 - DNA, 15 bp, Homo sapiens
cttgagcaagatgca

SEQ ID NO: 1136658 - DNA, 15 bp, Homo sapiens
ccttgagcaagatgc

SEQ ID NO: 1136659 - DNA, 15 bp, Homo sapiens
gccttgagcaagatg

SEQ ID NO: 1136660 - DNA, 15 bp, Homo sapiens
ggccttgagcaagat

SEQ ID NO: 1136661 - DNA, 15 bp, Homo sapiens
aggccttgagcaaga

SEQ ID NO: 1136662 - DNA, 15 bp, Homo sapiens
caggccttgagcaag

SEQ ID NO: 1136663 - DNA, 15 bp, Homo sapiens
tcaggccttgagcaa

SEQ ID NO: 1136664 - DNA, 15 bp, Homo sapiens
atcaggccttgagca

SEQ ID NO: 1136665 - DNA, 15 bp, Homo sapiens
catcaggccttgagc

SEQ ID NO: 1136666 - DNA, 15 bp, Homo sapiens
acatcaggccttgag

SEQ ID NO: 1136667 - DNA, 15 bp, Homo sapiens
tacatcaggccttga

SEQ ID NO: 1136668 - DNA, 15 bp, Homo sapiens
ttacatcaggccttg

SEQ ID NO: 1136669 - DNA, 15 bp, Homo sapiens
gttacatcaggcctt

SEQ ID NO: 1136670 - DNA, 15 bp, Homo sapiens
ggttacatcaggcct

SEQ ID NO: 1136671 - DNA, 15 bp, Homo sapiens
tggttacatcaggcc

SEQ ID NO: 1136672 - DNA, 15 bp, Homo sapiens
gtggttacatcaggc

SEQ ID NO: 1136673 - DNA, 15 bp, Homo sapiens
agtggttacatcagg

SEQ ID NO: 1136674 - DNA, 15 bp, Homo sapiens
tagtggttacatcag

SEQ ID NO: 1136675 - DNA, 15 bp, Homo sapiens
gtagtggttacatca

SEQ ID NO: 1136676 - DNA, 15 bp, Homo sapiens
ggtagtggttacatc

SEQ ID NO: 1136677 - DNA, 15 bp, Homo sapiens
aggtagtggttacat

SEQ ID NO: 1136678 - DNA, 15 bp, Homo sapiens
caggtagtggttaca

SEQ ID NO: 1136679 - DNA, 15 bp, Homo sapiens
ccaggtagtggttac

SEQ ID NO: 1136680 - DNA, 15 bp, Homo sapiens
gccaggtagtggtta

SEQ ID NO: 1136681 - DNA, 15 bp, Homo sapiens
agccaggtagtggtt

SEQ ID NO: 1136682 - DNA, 15 bp, Homo sapiens
tagccaggtagtggt

SEQ ID NO: 1136683 - DNA, 15 bp, Homo sapiens
gtagccaggtagtgg

SEQ ID NO: 1136684 - DNA, 15 bp, Homo sapiens
ggtagccaggtagtg

SEQ ID NO: 1136685 - DNA, 15 bp, Homo sapiens
tggtagccaggtagt

SEQ ID NO: 1136686 - DNA, 15 bp, Homo sapiens
ttggtagccaggtag

SEQ ID NO: 1136687 - DNA, 15 bp, Homo sapiens
attggtagccaggta

SEQ ID NO: 1136688 - DNA, 15 bp, Homo sapiens
cattggtagccaggt

SEQ ID NO: 1136689 - DNA, 15 bp, Homo sapiens
acattggtagccagg

SEQ ID NO: 1136690 - DNA, 15 bp, Homo sapiens
cacattggtagccag

SEQ ID NO: 1136691 - DNA, 15 bp, Homo sapiens
acacattggtagcca

SEQ ID NO: 1136692 - DNA, 15 bp, Homo sapiens
cacacattggtagcc

SEQ ID NO: 1136693 - DNA, 15 bp, Homo sapiens
gcacacattggtagc

SEQ ID NO: 1136694 - DNA, 15 bp, Homo sapiens
agcacacattggtag

SEQ ID NO: 1136695 - DNA, 15 bp, Homo sapiens
gagcacacattggta

SEQ ID NO: 1136696 - DNA, 15 bp, Homo sapiens
tgagcacacattggt

SEQ ID NO: 1136697 - DNA, 15 bp, Homo sapiens
ttgagcacacattgg

SEQ ID NO: 1136698 - DNA, 15 bp, Homo sapiens
cttgagcacacattg

SEQ ID NO: 1136699 - DNA, 15 bp, Homo sapiens
tcttgagcacacatt

SEQ ID NO: 1136700 - DNA, 15 bp, Homo sapiens
gtcttgagcacacat

SEQ ID NO: 1136701 - DNA, 15 bp, Homo sapiens
ggtcttgagcacaca

SEQ ID NO: 1136702 - DNA, 15 bp, Homo sapiens
aggtcttgagcacac

SEQ ID NO: 1136703 - DNA, 15 bp, Homo sapiens
aaggtcttgagcaca

SEQ ID NO: 1136704 - DNA, 15 bp, Homo sapiens
caaggtcttgagcac

SEQ ID NO: 1136705 - DNA, 15 bp, Homo sapiens
ccaaggtcttgagca

SEQ ID NO: 1136706 - DNA, 15 bp, Homo sapiens
cccaaggtcttgagc

SEQ ID NO: 1136707 - DNA, 15 bp, Homo sapiens
ccccaaggtcttgag

SEQ ID NO: 1136708 - DNA, 15 bp, Homo sapiens
gccccaaggtcttga

SEQ ID NO: 1136709 - DNA, 15 bp, Homo sapiens
agccccaaggtcttg

SEQ ID NO: 1136710 - DNA, 15 bp, Homo sapiens
gagccccaaggtctt

SEQ ID NO: 1136711 - DNA, 15 bp, Homo sapiens
agagccccaaggtct

SEQ ID NO: 1136712 - DNA, 15 bp, Homo sapiens
tagagccccaaggtc

SEQ ID NO: 1136713 - DNA, 15 bp, Homo sapiens
atagagccccaaggt

SEQ ID NO: 1136714 - DNA, 15 bp, Homo sapiens
tatagagccccaagg

SEQ ID NO: 1136715 - DNA, 15 bp, Homo sapiens
ttatagagccccaag

SEQ ID NO: 1136716 - DNA, 15 bp, Homo sapiens
attatagagccccaa

SEQ ID NO: 1136717 - DNA, 15 bp, Homo sapiens
gattatagagcccca

SEQ ID NO: 1136718 - DNA, 15 bp, Homo sapiens
tgattatagagcccc

SEQ ID NO: 1136719 - DNA, 15 bp, Homo sapiens
ctgattatagagccc

SEQ ID NO: 1136720 - DNA, 15 bp, Homo sapiens
gctgattatagagcc

SEQ ID NO: 1136721 - DNA, 15 bp, Homo sapiens
agctgattatagagc

SEQ ID NO: 1136722 - DNA, 15 bp, Homo sapiens
cagctgattatagag

SEQ ID NO: 1136723 - DNA, 15 bp, Homo sapiens
ccagctgattataga

SEQ ID NO: 1136724 - DNA, 15 bp, Homo sapiens
accagctgattatag

SEQ ID NO: 1136725 - DNA, 15 bp, Homo sapiens
taccagctgattata

SEQ ID NO: 1136726 - DNA, 15 bp, Homo sapiens
ctaccagctgattat

SEQ ID NO: 1136727 - DNA, 15 bp, Homo sapiens
actaccagctgatta

SEQ ID NO: 1136728 - DNA, 15 bp, Homo sapiens
tactaccagctgatt

SEQ ID NO: 1136729 - DNA, 15 bp, Homo sapiens
ttactaccagctgat

SEQ ID NO: 1136730 - DNA, 15 bp, Homo sapiens
tttactaccagctga

SEQ ID NO: 1136731 - DNA, 15 bp, Homo sapiens
atttactaccagctg

SEQ ID NO: 1136732 - DNA, 15 bp, Homo sapiens
gatttactaccagct

SEQ ID NO: 1136733 - DNA, 15 bp, Homo sapiens
agatttactaccagc

SEQ ID NO: 1136734 - DNA, 15 bp, Homo sapiens
tagatttactaccag

SEQ ID NO: 1136735 - DNA, 15 bp, Homo sapiens
ctagatttactacca

SEQ ID NO: 1136736 - DNA, 15 bp, Homo sapiens
gctagatttactacc

SEQ ID NO: 1136737 - DNA, 15 bp, Homo sapiens
ggctagatttactac

SEQ ID NO: 1136738 - DNA, 15 bp, Homo sapiens
tggctagatttacta

SEQ ID NO: 1136739 - DNA, 15 bp, Homo sapiens
gtggctagatttact

SEQ ID NO: 1136740 - DNA, 15 bp, Homo sapiens
cgtggctagatttac

SEQ ID NO: 1136741 - DNA, 15 bp, Homo sapiens
acgtggctagattta

SEQ ID NO: 1136742 - DNA, 15 bp, Homo sapiens
aacgtggctagattt

SEQ ID NO: 1136743 - DNA, 15 bp, Homo sapiens
aaacgtggctagatt

SEQ ID NO: 1136744 - DNA, 15 bp, Homo sapiens
caaacgtggctagat

SEQ ID NO: 1136745 - DNA, 15 bp, Homo sapiens
acaaacgtggctaga

SEQ ID NO: 1136746 - DNA, 15 bp, Homo sapiens
tacaaacgtggctag

SEQ ID NO: 1136747 - DNA, 15 bp, Homo sapiens
atacaaacgtggcta

SEQ ID NO: 1136748 - DNA, 15 bp, Homo sapiens
gatacaaacgtggct

SEQ ID NO: 1136749 - DNA, 15 bp, Homo sapiens
ggatacaaacgtggc

SEQ ID NO: 1136750 - DNA, 15 bp, Homo sapiens
aggatacaaacgtgg

SEQ ID NO: 1136751 - DNA, 15 bp, Homo sapiens
aaggatacaaacgtg

SEQ ID NO: 1136752 - DNA, 15 bp, Homo sapiens
gaaggatacaaacgt

SEQ ID NO: 1136753 - DNA, 15 bp, Homo sapiens
ggaaggatacaaacg

SEQ ID NO: 1136754 - DNA, 15 bp, Homo sapiens
gggaaggatacaaac

SEQ ID NO: 1136755 - DNA, 15 bp, Homo sapiens
agggaaggatacaaa

SEQ ID NO: 1136756 - DNA, 15 bp, Homo sapiens
aagggaaggatacaa

SEQ ID NO: 1136757 - DNA, 15 bp, Homo sapiens
gaagggaaggataca

SEQ ID NO: 1136758 - DNA, 15 bp, Homo sapiens
tgaagggaaggatac

SEQ ID NO: 1136759 - DNA, 15 bp, Homo sapiens
ctgaagggaaggata

SEQ ID NO: 1136760 - DNA, 15 bp, Homo sapiens
cctgaagggaaggat

SEQ ID NO: 1136761 - DNA, 15 bp, Homo sapiens
ccctgaagggaagga

SEQ ID NO: 1136762 - DNA, 15 bp, Homo sapiens
accctgaagggaagg

SEQ ID NO: 1136763 - DNA, 15 bp, Homo sapiens
caccctgaagggaag

SEQ ID NO: 1136764 - DNA, 15 bp, Homo sapiens
ccaccctgaagggaa

SEQ ID NO: 1136765 - DNA, 15 bp, Homo sapiens
accaccctgaaggga

SEQ ID NO: 1136766 - DNA, 15 bp, Homo sapiens
caccaccctgaaggg

SEQ ID NO: 1136767 - DNA, 15 bp, Homo sapiens
tcaccaccctgaagg

SEQ ID NO: 1136768 - DNA, 15 bp, Homo sapiens
ctcaccaccctgaag

SEQ ID NO: 1136769 - DNA, 15 bp, Homo sapiens
actcaccaccctgaa

SEQ ID NO: 1136770 - DNA, 15 bp, Homo sapiens
aactcaccaccctga

SEQ ID NO: 1136771 - DNA, 15 bp, Homo sapiens
gaactcaccaccctg

SEQ ID NO: 1136772 - DNA, 15 bp, Homo sapiens
ggaactcaccaccct

SEQ ID NO: 1136773 - DNA, 15 bp, Homo sapiens
gggaactcaccaccc

SEQ ID NO: 1136774 - DNA, 15 bp, Homo sapiens
ggggaactcaccacc

SEQ ID NO: 1136775 - DNA, 15 bp, Homo sapiens
gggggaactcaccac

SEQ ID NO: 1136776 - DNA, 15 bp, Homo sapiens
tgggggaactcacca

SEQ ID NO: 1136777 - DNA, 15 bp, Homo sapiens
ctgggggaactcacc

SEQ ID NO: 1136778 - DNA, 15 bp, Homo sapiens
cctgggggaactcac

SEQ ID NO: 1136779 - DNA, 15 bp, Homo sapiens
gcctgggggaactca

SEQ ID NO: 1136780 - DNA, 15 bp, Homo sapiens
ggcctgggggaactc

SEQ ID NO: 1136781 - DNA, 15 bp, Homo sapiens
gggcctgggggaact

SEQ ID NO: 1136782 - DNA, 15 bp, Homo sapiens
agggcctgggggaac

SEQ ID NO: 1136783 - DNA, 15 bp, Homo sapiens
cagggcctgggggaa

SEQ ID NO: 1136784 - DNA, 15 bp, Homo sapiens
ccagggcctggggga

SEQ ID NO: 1136785 - DNA, 15 bp, Homo sapiens
cccagggcctggggg

SEQ ID NO: 1136786 - DNA, 15 bp, Homo sapiens
acccagggcctgggg

SEQ ID NO: 1136787 - DNA, 15 bp, Homo sapiens
tacccagggcctggg

SEQ ID NO: 1136788 - DNA, 15 bp, Homo sapiens
ctacccagggcctgg

SEQ ID NO: 1136789 - DNA, 15 bp, Homo sapiens
cctacccagggcctg

SEQ ID NO: 1136790 - DNA, 15 bp, Homo sapiens
acctacccagggcct

SEQ ID NO: 1136791 - DNA, 15 bp, Homo sapiens
aacctacccagggcc

SEQ ID NO: 1136792 - DNA, 15 bp, Homo sapiens
caacctacccagggc

SEQ ID NO: 1136793 - DNA, 15 bp, Homo sapiens
tcaacctacccaggg

SEQ ID NO: 1136794 - DNA, 15 bp, Homo sapiens
ctcaacctacccagg

SEQ ID NO: 1136795 - DNA, 15 bp, Homo sapiens
tctcaacctacccag

SEQ ID NO: 1136796 - DNA, 15 bp, Homo sapiens
ctctcaacctaccca

SEQ ID NO: 1136797 - DNA, 15 bp, Homo sapiens
cctctcaacctaccc

SEQ ID NO: 1136798 - DNA, 15 bp, Homo sapiens
acctctcaacctacc

SEQ ID NO: 1136799 - DNA, 15 bp, Homo sapiens
cacctctcaacctac

SEQ ID NO: 1136800 - DNA, 15 bp, Homo sapiens
acacctctcaaccta

SEQ ID NO: 1136801 - DNA, 15 bp, Homo sapiens
tacacctctcaacct

SEQ ID NO: 1136802 - DNA, 15 bp, Homo sapiens
ctacacctctcaacc

SEQ ID NO: 1136803 - DNA, 15 bp, Homo sapiens
actacacctctcaac

SEQ ID NO: 1136804 - DNA, 15 bp, Homo sapiens
gactacacctctcaa

SEQ ID NO: 1136805 - DNA, 15 bp, Homo sapiens
agactacacctctca

SEQ ID NO: 1136806 - DNA, 15 bp, Homo sapiens
cagactacacctctc

SEQ ID NO: 1136807 - DNA, 15 bp, Homo sapiens
tcagactacacctct

SEQ ID NO: 1136808 - DNA, 15 bp, Homo sapiens
ctcagactacacctc

SEQ ID NO: 1136809 - DNA, 15 bp, Homo sapiens
tctcagactacacct

SEQ ID NO: 1136810 - DNA, 15 bp, Homo sapiens
ctctcagactacacc

SEQ ID NO: 1136811 - DNA, 15 bp, Homo sapiens
gctctcagactacac

SEQ ID NO: 1136812 - DNA, 15 bp, Homo sapiens
ggctctcagactaca

SEQ ID NO: 1136813 - DNA, 15 bp, Homo sapiens
tggctctcagactac

SEQ ID NO: 1136814 - DNA, 15 bp, Homo sapiens
ctggctctcagacta

SEQ ID NO: 1136815 - DNA, 15 bp, Homo sapiens
tctggctctcagact

SEQ ID NO: 1136816 - DNA, 15 bp, Homo sapiens
ctctggctctcagac

SEQ ID NO: 1136817 - DNA, 15 bp, Homo sapiens
tctctggctctcaga

SEQ ID NO: 1136818 - DNA, 15 bp, Homo sapiens
gtctctggctctcag

SEQ ID NO: 1136819 - DNA, 15 bp, Homo sapiens
agtctctggctctca

SEQ ID NO: 1136820 - DNA, 15 bp, Homo sapiens
cagtctctggctctc

SEQ ID NO: 1136821 - DNA, 15 bp, Homo sapiens
ccagtctctggctct

SEQ ID NO: 1136822 - DNA, 15 bp, Homo sapiens
tccagtctctggctc

SEQ ID NO: 1136823 - DNA, 15 bp, Homo sapiens
ctccagtctctggct

SEQ ID NO: 1136824 - DNA, 15 bp, Homo sapiens
actccagtctctggc

SEQ ID NO: 1136825 - DNA, 15 bp, Homo sapiens
gactccagtctctgg

SEQ ID NO: 1136826 - DNA, 15 bp, Homo sapiens
tgactccagtctctg

SEQ ID NO: 1136827 - DNA, 15 bp, Homo sapiens
ctgactccagtctct

SEQ ID NO: 1136828 - DNA, 15 bp, Homo sapiens
tctgactccagtctc

SEQ ID NO: 1136829 - DNA, 15 bp, Homo sapiens
ttctgactccagtct

SEQ ID NO: 1136830 - DNA, 15 bp, Homo sapiens
attctgactccagtc

SEQ ID NO: 1136831 - DNA, 15 bp, Homo sapiens
gattctgactccagt

SEQ ID NO: 1136832 - DNA, 15 bp, Homo sapiens
ggattctgactccag

SEQ ID NO: 1136833 - DNA, 15 bp, Homo sapiens
aggattctgactcca

SEQ ID NO: 1136834 - DNA, 15 bp, Homo sapiens
aaggattctgactcc

SEQ ID NO: 1136835 - DNA, 15 bp, Homo sapiens
taaggattctgactc

SEQ ID NO: 1136836 - DNA, 15 bp, Homo sapiens
ctaaggattctgact

SEQ ID NO: 1136837 - DNA, 15 bp, Homo sapiens
tctaaggattctgac

SEQ ID NO: 1136838 - DNA, 15 bp, Homo sapiens
ttctaaggattctga

SEQ ID NO: 1136839 - DNA, 15 bp, Homo sapiens
tttctaaggattctg

SEQ ID NO: 1136840 - DNA, 15 bp, Homo sapiens
atttctaaggattct

SEQ ID NO: 1136841 - DNA, 15 bp, Homo sapiens
gatttctaaggattc

SEQ ID NO: 1136842 - DNA, 15 bp, Homo sapiens
agatttctaaggatt

SEQ ID NO: 1136843 - DNA, 15 bp, Homo sapiens
tagatttctaaggat

SEQ ID NO: 1136844 - DNA, 15 bp, Homo sapiens
gtagatttctaagga

SEQ ID NO: 1136845 - DNA, 15 bp, Homo sapiens
agtagatttctaagg

SEQ ID NO: 1136846 - DNA, 15 bp, Homo sapiens
aagtagatttctaag

SEQ ID NO: 1136847 - DNA, 15 bp, Homo sapiens
caagtagatttctaa

SEQ ID NO: 1136848 - DNA, 15 bp, Homo sapiens
ccaagtagatttcta

SEQ ID NO: 1136849 - DNA, 15 bp, Homo sapiens
accaagtagatttct

SEQ ID NO: 1136850 - DNA, 15 bp, Homo sapiens
caccaagtagatttc

SEQ ID NO: 1136851 - DNA, 15 bp, Homo sapiens
acaccaagtagattt

SEQ ID NO: 1136852 - DNA, 15 bp, Homo sapiens
cacaccaagtagatt

SEQ ID NO: 1136853 - DNA, 15 bp, Homo sapiens
gcacaccaagtagat

SEQ ID NO: 1136854 - DNA, 15 bp, Homo sapiens
tgcacaccaagtaga

SEQ ID NO: 1136855 - DNA, 15 bp, Homo sapiens
ctgcacaccaagtag

SEQ ID NO: 1136856 - DNA, 15 bp, Homo sapiens
actgcacaccaagta

SEQ ID NO: 1136857 - DNA, 15 bp, Homo sapiens
aactgcacaccaagt

SEQ ID NO: 1136858 - DNA, 15 bp, Homo sapiens
aaactgcacaccaag

SEQ ID NO: 1136859 - DNA, 15 bp, Homo sapiens
taaactgcacaccaa

SEQ ID NO: 1136860 - DNA, 15 bp, Homo sapiens
ctaaactgcacacca

SEQ ID NO: 1136861 - DNA, 15 bp, Homo sapiens
actaaactgcacacc

SEQ ID NO: 1136862 - DNA, 15 bp, Homo sapiens
aactaaactgcacac

SEQ ID NO: 1136863 - DNA, 15 bp, Homo sapiens
caactaaactgcaca

SEQ ID NO: 1136864 - DNA, 15 bp, Homo sapiens
ccaactaaactgcac

SEQ ID NO: 1136865 - DNA, 15 bp, Homo sapiens
gccaactaaactgca

SEQ ID NO: 1136866 - DNA, 15 bp, Homo sapiens
tgccaactaaactgc

SEQ ID NO: 1136867 - DNA, 15 bp, Homo sapiens
gtgccaactaaactg

SEQ ID NO: 1136868 - DNA, 15 bp, Homo sapiens
agtgccaactaaact

SEQ ID NO: 1136869 - DNA, 15 bp, Homo sapiens
gagtgccaactaaac

SEQ ID NO: 1136870 - DNA, 15 bp, Homo sapiens
tgagtgccaactaaa

SEQ ID NO: 1136871 - DNA, 15 bp, Homo sapiens
ttgagtgccaactaa

SEQ ID NO: 1136872 - DNA, 15 bp, Homo sapiens
tttgagtgccaacta

SEQ ID NO: 1136873 - DNA, 15 bp, Homo sapiens
gtttgagtgccaact

SEQ ID NO: 1136874 - DNA, 15 bp, Homo sapiens
ggtttgagtgccaac

SEQ ID NO: 1136875 - DNA, 15 bp, Homo sapiens
tggtttgagtgccaa

SEQ ID NO: 1136876 - DNA, 15 bp, Homo sapiens
gtggtttgagtgcca

SEQ ID NO: 1136877 - DNA, 15 bp, Homo sapiens
agtggtttgagtgcc

SEQ ID NO: 1136878 - DNA, 15 bp, Homo sapiens
tagtggtttgagtgc

SEQ ID NO: 1136879 - DNA, 15 bp, Homo sapiens
ctagtggtttgagtg

SEQ ID NO: 1136880 - DNA, 15 bp, Homo sapiens
tctagtggtttgagt

SEQ ID NO: 1136881 - DNA, 15 bp, Homo sapiens
gtctagtggtttgag

SEQ ID NO: 1136882 - DNA, 15 bp, Homo sapiens
tgtctagtggtttga

SEQ ID NO: 1136883 - DNA, 15 bp, Homo sapiens
gtgtctagtggtttg

SEQ ID NO: 1136884 - DNA, 15 bp, Homo sapiens
tgtgtctagtggttt

SEQ ID NO: 1136885 - DNA, 15 bp, Homo sapiens
atgtgtctagtggtt

SEQ ID NO: 1136886 - DNA, 15 bp, Homo sapiens
aatgtgtctagtggt

SEQ ID NO: 1136887 - DNA, 15 bp, Homo sapiens
gaatgtgtctagtgg

SEQ ID NO: 1136888 - DNA, 15 bp, Homo sapiens
agaatgtgtctagtg

SEQ ID NO: 1136889 - DNA, 15 bp, Homo sapiens
aagaatgtgtctagt

SEQ ID NO: 1136890 - DNA, 15 bp, Homo sapiens
gaagaatgtgtctag

SEQ ID NO: 1136891 - DNA, 15 bp, Homo sapiens
ggaagaatgtgtcta

SEQ ID NO: 1136892 - DNA, 15 bp, Homo sapiens
gggaagaatgtgtct

SEQ ID NO: 1136893 - DNA, 15 bp, Homo sapiens
agggaagaatgtgtc

SEQ ID NO: 1136894 - DNA, 15 bp, Homo sapiens
gagggaagaatgtgt

SEQ ID NO: 1136895 - DNA, 15 bp, Homo sapiens
ggagggaagaatgtg

SEQ ID NO: 1136896 - DNA, 15 bp, Homo sapiens
gggagggaagaatgt

SEQ ID NO: 1136897 - DNA, 15 bp, Homo sapiens
ggggagggaagaatg

SEQ ID NO: 1136898 - DNA, 15 bp, Homo sapiens
aggggagggaagaat

SEQ ID NO: 1136899 - DNA, 15 bp, Homo sapiens
aaggggagggaagaa

SEQ ID NO: 1136900 - DNA, 15 bp, Homo sapiens
aaaggggagggaaga

SEQ ID NO: 1136901 - DNA, 15 bp, Homo sapiens
gaaaggggagggaag

SEQ ID NO: 1136902 - DNA, 15 bp, Homo sapiens
ggaaaggggagggaa

SEQ ID NO: 1136903 - DNA, 15 bp, Homo sapiens
tggaaaggggaggga

SEQ ID NO: 1136904 - DNA, 15 bp, Homo sapiens
gtggaaaggggaggg

SEQ ID NO: 1136905 - DNA, 15 bp, Homo sapiens
tgtggaaaggggagg

SEQ ID NO: 1136906 - DNA, 15 bp, Homo sapiens
ctgtggaaaggggag

SEQ ID NO: 1136907 - DNA, 15 bp, Homo sapiens
cctgtggaaagggga

SEQ ID NO: 1136908 - DNA, 15 bp, Homo sapiens
gcctgtggaaagggg

SEQ ID NO: 1136909 - DNA, 15 bp, Homo sapiens
tgcctgtggaaaggg

SEQ ID NO: 1136910 - DNA, 15 bp, Homo sapiens
ctgcctgtggaaagg

SEQ ID NO: 1136911 - DNA, 15 bp, Homo sapiens
cctgcctgtggaaag

SEQ ID NO: 1136912 - DNA, 15 bp, Homo sapiens
tcctgcctgtggaaa

SEQ ID NO: 1136913 - DNA, 15 bp, Homo sapiens
ctcctgcctgtggaa

SEQ ID NO: 1136914 - DNA, 15 bp, Homo sapiens
tctcctgcctgtgga

SEQ ID NO: 1136915 - DNA, 15 bp, Homo sapiens
ctctcctgcctgtgg

SEQ ID NO: 1136916 - DNA, 15 bp, Homo sapiens
gctctcctgcctgtg

SEQ ID NO: 1136917 - DNA, 15 bp, Homo sapiens
ggctctcctgcctgt

SEQ ID NO: 1136918 - DNA, 15 bp, Homo sapiens
aggctctcctgcctg

SEQ ID NO: 1136919 - DNA, 15 bp, Homo sapiens
gaggctctcctgcct

SEQ ID NO: 1136920 - DNA, 15 bp, Homo sapiens
cgaggctctcctgcc

SEQ ID NO: 1136921 - DNA, 15 bp, Homo sapiens
gcgaggctctcctgc

SEQ ID NO: 1136922 - DNA, 15 bp, Homo sapiens
ggcgaggctctcctg

SEQ ID NO: 1136923 - DNA, 15 bp, Homo sapiens
gggcgaggctctcct

SEQ ID NO: 1136924 - DNA, 15 bp, Homo sapiens
ggggcgaggctctcc

SEQ ID NO: 1136925 - DNA, 15 bp, Homo sapiens
gggggcgaggctctc

SEQ ID NO: 1136926 - DNA, 15 bp, Homo sapiens
agggggcgaggctct

SEQ ID NO: 1136927 - DNA, 15 bp, Homo sapiens
cagggggcgaggctc

SEQ ID NO: 1136928 - DNA, 15 bp, Homo sapiens
ccagggggcgaggct

SEQ ID NO: 1136929 - DNA, 15 bp, Homo sapiens
gccagggggcgaggc

SEQ ID NO: 1136930 - DNA, 15 bp, Homo sapiens
ggccagggggcgagg

SEQ ID NO: 1136931 - DNA, 15 bp, Homo sapiens
aggccagggggcgag

SEQ ID NO: 1136932 - DNA, 15 bp, Homo sapiens
aaggccagggggcga

SEQ ID NO: 1136933 - DNA, 15 bp, Homo sapiens
gaaggccagggggcg

SEQ ID NO: 1136934 - DNA, 15 bp, Homo sapiens
tgaaggccagggggc

SEQ ID NO: 1136935 - DNA, 15 bp, Homo sapiens
gtgaaggccaggggg

SEQ ID NO: 1136936 - DNA, 15 bp, Homo sapiens
ggtgaaggccagggg

SEQ ID NO: 1136937 - DNA, 15 bp, Homo sapiens
tggtgaaggccaggg

SEQ ID NO: 1136938 - DNA, 15 bp, Homo sapiens
gtggtgaaggccagg

SEQ ID NO: 1136939 - DNA, 15 bp, Homo sapiens
ggtggtgaaggccag

SEQ ID NO: 1136940 - DNA, 15 bp, Homo sapiens
tggtggtgaaggcca

SEQ ID NO: 1136941 - DNA, 15 bp, Homo sapiens
gtggtggtgaaggcc

SEQ ID NO: 1136942 - DNA, 15 bp, Homo sapiens
tgtggtggtgaaggc

SEQ ID NO: 1136943 - DNA, 15 bp, Homo sapiens
ctgtggtggtgaagg

SEQ ID NO: 1136944 - DNA, 15 bp, Homo sapiens
cctgtggtggtgaag

SEQ ID NO: 1136945 - DNA, 15 bp, Homo sapiens
gcctgtggtggtgaa

SEQ ID NO: 1136946 - DNA, 15 bp, Homo sapiens
ggcctgtggtggtga

SEQ ID NO: 1136947 - DNA, 15 bp, Homo sapiens
gggcctgtggtggtg

SEQ ID NO: 1136948 - DNA, 15 bp, Homo sapiens
tgggcctgtggtggt

SEQ ID NO: 1136949 - DNA, 15 bp, Homo sapiens
ctgggcctgtggtgg

SEQ ID NO: 1136950 - DNA, 15 bp, Homo sapiens
cctgggcctgtggtg

SEQ ID NO: 1136951 - DNA, 15 bp, Homo sapiens
ccctgggcctgtggt

SEQ ID NO: 1136952 - DNA, 15 bp, Homo sapiens
cccctgggcctgtgg

SEQ ID NO: 1136953 - DNA, 15 bp, Homo sapiens
tcccctgggcctgtg

SEQ ID NO: 1136954 - DNA, 15 bp, Homo sapiens
ctcccctgggcctgt

SEQ ID NO: 1136955 - DNA, 15 bp, Homo sapiens
actcccctgggcctg

SEQ ID NO: 1136956 - DNA, 15 bp, Homo sapiens
tactcccctgggcct

SEQ ID NO: 1136957 - DNA, 15 bp, Homo sapiens
gtactcccctgggcc

SEQ ID NO: 1136958 - DNA, 15 bp, Homo sapiens
agtactcccctgggc

SEQ ID NO: 1136959 - DNA, 15 bp, Homo sapiens
aagtactcccctggg

SEQ ID NO: 1136960 - DNA, 15 bp, Homo sapiens
gaagtactcccctgg

SEQ ID NO: 1136961 - DNA, 15 bp, Homo sapiens
ggaagtactcccctg

SEQ ID NO: 1136962 - DNA, 15 bp, Homo sapiens
tggaagtactcccct

SEQ ID NO: 1136963 - DNA, 15 bp, Homo sapiens
ctggaagtactcccc

SEQ ID NO: 1136964 - DNA, 15 bp, Homo sapiens
cctggaagtactccc

SEQ ID NO: 1136965 - DNA, 15 bp, Homo sapiens
gcctggaagtactcc

SEQ ID NO: 1136966 - DNA, 15 bp, Homo sapiens
agcctggaagtactc

SEQ ID NO: 1136967 - DNA, 15 bp, Homo sapiens
tagcctggaagtact

SEQ ID NO: 1136968 - DNA, 15 bp, Homo sapiens
gtagcctggaagtac

SEQ ID NO: 1136969 - DNA, 15 bp, Homo sapiens
agtagcctggaagta

SEQ ID NO: 1136970 - DNA, 15 bp, Homo sapiens
cagtagcctggaagt

SEQ ID NO: 1136971 - DNA, 15 bp, Homo sapiens
gcagtagcctggaag

SEQ ID NO: 1136972 - DNA, 15 bp, Homo sapiens
ggcagtagcctggaa

SEQ ID NO: 1136973 - DNA, 15 bp, Homo sapiens
tggcagtagcctgga

SEQ ID NO: 1136974 - DNA, 15 bp, Homo sapiens
gtggcagtagcctgg

SEQ ID NO: 1136975 - DNA, 15 bp, Homo sapiens
cgtggcagtagcctg

SEQ ID NO: 1136976 - DNA, 15 bp, Homo sapiens
ccgtggcagtagcct

SEQ ID NO: 1136977 - DNA, 15 bp, Homo sapiens
accgtggcagtagcc

SEQ ID NO: 1136978 - DNA, 15 bp, Homo sapiens
aaccgtggcagtagc

SEQ ID NO: 1136979 - DNA, 15 bp, Homo sapiens
gaaccgtggcagtag

SEQ ID NO: 1136980 - DNA, 15 bp, Homo sapiens
tgaaccgtggcagta

SEQ ID NO: 1136981 - DNA, 15 bp, Homo sapiens
gtgaaccgtggcagt

SEQ ID NO: 1136982 - DNA, 15 bp, Homo sapiens
agtgaaccgtggcag

SEQ ID NO: 1136983 - DNA, 15 bp, Homo sapiens
aagtgaaccgtggca

SEQ ID NO: 1136984 - DNA, 15 bp, Homo sapiens
taagtgaaccgtggc

SEQ ID NO: 1136985 - DNA, 15 bp, Homo sapiens
ttaagtgaaccgtgg

SEQ ID NO: 1136986 - DNA, 15 bp, Homo sapiens
cttaagtgaaccgtg

SEQ ID NO: 1136987 - DNA, 15 bp, Homo sapiens
ccttaagtgaaccgt

SEQ ID NO: 1136988 - DNA, 15 bp, Homo sapiens
gccttaagtgaaccg

SEQ ID NO: 1136989 - DNA, 15 bp, Homo sapiens
tgccttaagtgaacc

SEQ ID NO: 1136990 - DNA, 15 bp, Homo sapiens
gtgccttaagtgaac

SEQ ID NO: 1136991 - DNA, 15 bp, Homo sapiens
tgtgccttaagtgaa

SEQ ID NO: 1136992 - DNA, 15 bp, Homo sapiens
ttgtgccttaagtga

SEQ ID NO: 1136993 - DNA, 15 bp, Homo sapiens
tttgtgccttaagtg

SEQ ID NO: 1136994 - DNA, 15 bp, Homo sapiens
ctttgtgccttaagt

SEQ ID NO: 1136995 - DNA, 15 bp, Homo sapiens
cctttgtgccttaag

SEQ ID NO: 1136996 - DNA, 15 bp, Homo sapiens
acctttgtgccttaa

SEQ ID NO: 1136997 - DNA, 15 bp, Homo sapiens
aacctttgtgcctta

SEQ ID NO: 1136998 - DNA, 15 bp, Homo sapiens
aaacctttgtgcctt

SEQ ID NO: 1136999 - DNA, 15 bp, Homo sapiens
aaaacctttgtgcct

SEQ ID NO: 1137000 - DNA, 15 bp, Homo sapiens
aaaaacctttgtgcc

SEQ ID NO: 1137001 - DNA, 15 bp, Homo sapiens
gaaaaacctttgtgc

SEQ ID NO: 1137002 - DNA, 15 bp, Homo sapiens
tgaaaaacctttgtg

SEQ ID NO: 1137003 - DNA, 15 bp, Homo sapiens
ttgaaaaacctttgt

SEQ ID NO: 1137004 - DNA, 15 bp, Homo sapiens
attgaaaaacctttg

SEQ ID NO: 1137005 - DNA, 15 bp, Homo sapiens
gattgaaaaaccttt

SEQ ID NO: 1137006 - DNA, 15 bp, Homo sapiens
tgattgaaaaacctt

SEQ ID NO: 1137007 - DNA, 15 bp, Homo sapiens
ctgattgaaaaacct

SEQ ID NO: 1137008 - DNA, 15 bp, Homo sapiens
gctgattgaaaaacc

SEQ ID NO: 1137009 - DNA, 15 bp, Homo sapiens
agctgattgaaaaac

SEQ ID NO: 1137010 - DNA, 15 bp, Homo sapiens
aagctgattgaaaaa

SEQ ID NO: 1137011 - DNA, 15 bp, Homo sapiens
caagctgattgaaaa

SEQ ID NO: 1137012 - DNA, 15 bp, Homo sapiens
acaagctgattgaaa

SEQ ID NO: 1137013 - DNA, 15 bp, Homo sapiens
cacaagctgattgaa

SEQ ID NO: 1137014 - DNA, 15 bp, Homo sapiens
ccacaagctgattga

SEQ ID NO: 1137015 - DNA, 15 bp, Homo sapiens
accacaagctgattg

SEQ ID NO: 1137016 - DNA, 15 bp, Homo sapiens
caccacaagctgatt

SEQ ID NO: 1137017 - DNA, 15 bp, Homo sapiens
tcaccacaagctgat

SEQ ID NO: 1137018 - DNA, 15 bp, Homo sapiens
ttcaccacaagctga

SEQ ID NO: 1137019 - DNA, 15 bp, Homo sapiens
attcaccacaagctg

SEQ ID NO: 1137020 - DNA, 15 bp, Homo sapiens
cattcaccacaagct

SEQ ID NO: 1137021 - DNA, 15 bp, Homo sapiens
gcattcaccacaagc

SEQ ID NO: 1137022 - DNA, 15 bp, Homo sapiens
agcattcaccacaag

SEQ ID NO: 1137023 - DNA, 15 bp, Homo sapiens
cagcattcaccacaa

SEQ ID NO: 1137024 - DNA, 15 bp, Homo sapiens
gcagcattcaccaca

SEQ ID NO: 1137025 - DNA, 15 bp, Homo sapiens
ggcagcattcaccac

SEQ ID NO: 1137026 - DNA, 15 bp, Homo sapiens
gggcagcattcacca

SEQ ID NO: 1137027 - DNA, 15 bp, Homo sapiens
cgggcagcattcacc

SEQ ID NO: 1137028 - DNA, 15 bp, Homo sapiens
ccgggcagcattcac

SEQ ID NO: 1137029 - DNA, 15 bp, Homo sapiens
accgggcagcattca

SEQ ID NO: 1137030 - DNA, 15 bp, Homo sapiens
gaccgggcagcattc

SEQ ID NO: 1137031 - DNA, 15 bp, Homo sapiens
agaccgggcagcatt

SEQ ID NO: 1137032 - DNA, 15 bp, Homo sapiens
cagaccgggcagcat

SEQ ID NO: 1137033 - DNA, 15 bp, Homo sapiens
ccagaccgggcagca

SEQ ID NO: 1137034 - DNA, 15 bp, Homo sapiens
tccagaccgggcagc

SEQ ID NO: 1137035 - DNA, 15 bp, Homo sapiens
ttccagaccgggcag

SEQ ID NO: 1137036 - DNA, 15 bp, Homo sapiens
gttccagaccgggca

SEQ ID NO: 1137037 - DNA, 15 bp, Homo sapiens
agttccagaccgggc

SEQ ID NO: 1137038 - DNA, 15 bp, Homo sapiens
gagttccagaccggg

SEQ ID NO: 1137039 - DNA, 15 bp, Homo sapiens
tgagttccagaccgg

SEQ ID NO: 1137040 - DNA, 15 bp, Homo sapiens
atgagttccagaccg

SEQ ID NO: 1137041 - DNA, 15 bp, Homo sapiens
aatgagttccagacc

SEQ ID NO: 1137042 - DNA, 15 bp, Homo sapiens
gaatgagttccagac

SEQ ID NO: 1137043 - DNA, 15 bp, Homo sapiens
agaatgagttccaga

SEQ ID NO: 1137044 - DNA, 15 bp, Homo sapiens
aagaatgagttccag

SEQ ID NO: 1137045 - DNA, 15 bp, Homo sapiens
aaagaatgagttcca

SEQ ID NO: 1137046 - DNA, 15 bp, Homo sapiens
taaagaatgagttcc

SEQ ID NO: 1137047 - DNA, 15 bp, Homo sapiens
ctaaagaatgagttc

SEQ ID NO: 1137048 - DNA, 15 bp, Homo sapiens
cctaaagaatgagtt

SEQ ID NO: 1137049 - DNA, 15 bp, Homo sapiens
ccctaaagaatgagt

SEQ ID NO: 1137050 - DNA, 15 bp, Homo sapiens
gccctaaagaatgag

SEQ ID NO: 1137051 - DNA, 15 bp, Homo sapiens
tgccctaaagaatga

SEQ ID NO: 1137052 - DNA, 15 bp, Homo sapiens
ctgccctaaagaatg

SEQ ID NO: 1137053 - DNA, 15 bp, Homo sapiens
actgccctaaagaat

SEQ ID NO: 1137054 - DNA, 15 bp, Homo sapiens
cactgccctaaagaa

SEQ ID NO: 1137055 - DNA, 15 bp, Homo sapiens
ccactgccctaaaga

SEQ ID NO: 1137056 - DNA, 15 bp, Homo sapiens
cccactgccctaaag

SEQ ID NO: 1137057 - DNA, 15 bp, Homo sapiens
gcccactgccctaaa

SEQ ID NO: 1137058 - DNA, 15 bp, Homo sapiens
tgcccactgccctaa

SEQ ID NO: 1137059 - DNA, 15 bp, Homo sapiens
gtgcccactgcccta

SEQ ID NO: 1137060 - DNA, 15 bp, Homo sapiens
ggtgcccactgccct

SEQ ID NO: 1137061 - DNA, 15 bp, Homo sapiens
gggtgcccactgccc

SEQ ID NO: 1137062 - DNA, 15 bp, Homo sapiens
agggtgcccactgcc

SEQ ID NO: 1137063 - DNA, 15 bp, Homo sapiens
gagggtgcccactgc

SEQ ID NO: 1137064 - DNA, 15 bp, Homo sapiens
agagggtgcccactg

SEQ ID NO: 1137065 - DNA, 15 bp, Homo sapiens
cagagggtgcccact

SEQ ID NO: 1137066 - DNA, 15 bp, Homo sapiens
gcagagggtgcccac

SEQ ID NO: 1137067 - DNA, 15 bp, Homo sapiens
agcagagggtgccca

SEQ ID NO: 1137068 - DNA, 15 bp, Homo sapiens
gagcagagggtgccc

SEQ ID NO: 1137069 - DNA, 15 bp, Homo sapiens
tgagcagagggtgcc

SEQ ID NO: 1137070 - DNA, 15 bp, Homo sapiens
atgagcagagggtgc

SEQ ID NO: 1137071 - DNA, 15 bp, Homo sapiens
catgagcagagggtg

SEQ ID NO: 1137072 - DNA, 15 bp, Homo sapiens
ccatgagcagagggt

SEQ ID NO: 1137073 - DNA, 15 bp, Homo sapiens
gccatgagcagaggg

SEQ ID NO: 1137074 - DNA, 15 bp, Homo sapiens
cgccatgagcagagg

SEQ ID NO: 1137075 - DNA, 15 bp, Homo sapiens
ccgccatgagcagag

SEQ ID NO: 1137076 - DNA, 15 bp, Homo sapiens
cccgccatgagcaga

SEQ ID NO: 1137077 - DNA, 15 bp, Homo sapiens
acccgccatgagcag

SEQ ID NO: 1137078 - DNA, 15 bp, Homo sapiens
gacccgccatgagca

SEQ ID NO: 1137079 - DNA, 15 bp, Homo sapiens
ggacccgccatgagc

SEQ ID NO: 1137080 - DNA, 15 bp, Homo sapiens
tggacccgccatgag

SEQ ID NO: 1137081 - DNA, 15 bp, Homo sapiens
ctggacccgccatga

SEQ ID NO: 1137082 - DNA, 15 bp, Homo sapiens
tctggacccgccatg

SEQ ID NO: 1137083 - DNA, 15 bp, Homo sapiens
ttctggacccgccat

SEQ ID NO: 1137084 - DNA, 15 bp, Homo sapiens
tttctggacccgcca

SEQ ID NO: 1137085 - DNA, 15 bp, Homo sapiens
atttctggacccgcc

SEQ ID NO: 1137086 - DNA, 15 bp, Homo sapiens
catttctggacccgc

SEQ ID NO: 1137087 - DNA, 15 bp, Homo sapiens
gcatttctggacccg

SEQ ID NO: 1137088 - DNA, 15 bp, Homo sapiens
ggcatttctggaccc

SEQ ID NO: 1137089 - DNA, 15 bp, Homo sapiens
tggcatttctggacc

SEQ ID NO: 1137090 - DNA, 15 bp, Homo sapiens
atggcatttctggac

SEQ ID NO: 1137091 - DNA, 15 bp, Homo sapiens
tatggcatttctgga

SEQ ID NO: 1137092 - DNA, 15 bp, Homo sapiens
ttatggcatttctgg

SEQ ID NO: 1137093 - DNA, 15 bp, Homo sapiens
tttatggcatttctg

SEQ ID NO: 1137094 - DNA, 15 bp, Homo sapiens
ttttatggcatttct

SEQ ID NO: 1137095 - DNA, 15 bp, Homo sapiens
cttttatggcatttc

SEQ ID NO: 1137096 - DNA, 15 bp, Homo sapiens
tcttttatggcattt

SEQ ID NO: 1137097 - DNA, 15 bp, Homo sapiens
ctcttttatggcatt

SEQ ID NO: 1137098 - DNA, 15 bp, Homo sapiens
gctcttttatggcat

SEQ ID NO: 1137099 - DNA, 15 bp, Homo sapiens
ggctcttttatggca

SEQ ID NO: 1137100 - DNA, 15 bp, Homo sapiens
tggctcttttatggc

SEQ ID NO: 1137101 - DNA, 15 bp, Homo sapiens
ttggctcttttatgg

SEQ ID NO: 1137102 - DNA, 15 bp, Homo sapiens
cttggctcttttatg

SEQ ID NO: 1137103 - DNA, 15 bp, Homo sapiens
ccttggctcttttat

SEQ ID NO: 1137104 - DNA, 15 bp, Homo sapiens
gccttggctctttta

SEQ ID NO: 1137105 - DNA, 15 bp, Homo sapiens
ggccttggctctttt

SEQ ID NO: 1137106 - DNA, 15 bp, Homo sapiens
aggccttggctcttt

SEQ ID NO: 1137107 - DNA, 15 bp, Homo sapiens
caggccttggctctt

SEQ ID NO: 1137108 - DNA, 15 bp, Homo sapiens
ccaggccttggctct

SEQ ID NO: 1137109 - DNA, 15 bp, Homo sapiens
tccaggccttggctc

SEQ ID NO: 1137110 - DNA, 15 bp, Homo sapiens
atccaggccttggct

SEQ ID NO: 1137111 - DNA, 15 bp, Homo sapiens
aatccaggccttggc

SEQ ID NO: 1137112 - DNA, 15 bp, Homo sapiens
gaatccaggccttgg

SEQ ID NO: 1137113 - DNA, 15 bp, Homo sapiens
ggaatccaggccttg

SEQ ID NO: 1137114 - DNA, 15 bp, Homo sapiens
tggaatccaggcctt

SEQ ID NO: 1137115 - DNA, 15 bp, Homo sapiens
ttggaatccaggcct

SEQ ID NO: 1137116 - DNA, 15 bp, Homo sapiens
cttggaatccaggcc

SEQ ID NO: 1137117 - DNA, 15 bp, Homo sapiens
tcttggaatccaggc

SEQ ID NO: 1137118 - DNA, 15 bp, Homo sapiens
ctcttggaatccagg

SEQ ID NO: 1137119 - DNA, 15 bp, Homo sapiens
gctcttggaatccag

SEQ ID NO: 1137120 - DNA, 15 bp, Homo sapiens
ggctcttggaatcca

SEQ ID NO: 1137121 - DNA, 15 bp, Homo sapiens
aggctcttggaatcc

SEQ ID NO: 1137122 - DNA, 15 bp, Homo sapiens
caggctcttggaatc

SEQ ID NO: 1137123 - DNA, 15 bp, Homo sapiens
gcaggctcttggaat

SEQ ID NO: 1137124 - DNA, 15 bp, Homo sapiens
agcaggctcttggaa

SEQ ID NO: 1137125 - DNA, 15 bp, Homo sapiens
aagcaggctcttgga

SEQ ID NO: 1137126 - DNA, 15 bp, Homo sapiens
caagcaggctcttgg

SEQ ID NO: 1137127 - DNA, 15 bp, Homo sapiens
ccaagcaggctcttg

SEQ ID NO: 1137128 - DNA, 15 bp, Homo sapiens
accaagcaggctctt

SEQ ID NO: 1137129 - DNA, 15 bp, Homo sapiens
caccaagcaggctct

SEQ ID NO: 1137130 - DNA, 15 bp, Homo sapiens
gcaccaagcaggctc

SEQ ID NO: 1137131 - DNA, 15 bp, Homo sapiens
agcaccaagcaggct

SEQ ID NO: 1137132 - DNA, 15 bp, Homo sapiens
aagcaccaagcaggc

SEQ ID NO: 1137133 - DNA, 15 bp, Homo sapiens
aaagcaccaagcagg

SEQ ID NO: 1137134 - DNA, 15 bp, Homo sapiens
caaagcaccaagcag

SEQ ID NO: 1137135 - DNA, 15 bp, Homo sapiens
tcaaagcaccaagca

SEQ ID NO: 1137136 - DNA, 15 bp, Homo sapiens
gtcaaagcaccaagc

SEQ ID NO: 1137137 - DNA, 15 bp, Homo sapiens
ggtcaaagcaccaag

SEQ ID NO: 1137138 - DNA, 15 bp, Homo sapiens
gggtcaaagcaccaa

SEQ ID NO: 1137139 - DNA, 15 bp, Homo sapiens
agggtcaaagcacca

SEQ ID NO: 1137140 - DNA, 15 bp, Homo sapiens
cagggtcaaagcacc

SEQ ID NO: 1137141 - DNA, 15 bp, Homo sapiens
acagggtcaaagcac

SEQ ID NO: 1137142 - DNA, 15 bp, Homo sapiens
cacagggtcaaagca

SEQ ID NO: 1137143 - DNA, 15 bp, Homo sapiens
ccacagggtcaaagc

SEQ ID NO: 1137144 - DNA, 15 bp, Homo sapiens
gccacagggtcaaag

SEQ ID NO: 1137145 - DNA, 15 bp, Homo sapiens
ggccacagggtcaaa

SEQ ID NO: 1137146 - DNA, 15 bp, Homo sapiens
cggccacagggtcaa

SEQ ID NO: 1137147 - DNA, 15 bp, Homo sapiens
tcggccacagggtca

SEQ ID NO: 1137148 - DNA, 15 bp, Homo sapiens
ttcggccacagggtc

SEQ ID NO: 1137149 - DNA, 15 bp, Homo sapiens
attcggccacagggt

SEQ ID NO: 1137150 - DNA, 15 bp, Homo sapiens
aattcggccacaggg

SEQ ID NO: 1137151 - DNA, 15 bp, Homo sapiens
caattcggccacagg

SEQ ID NO: 1137152 - DNA, 15 bp, Homo sapiens
ccaattcggccacag

SEQ ID NO: 1137153 - DNA, 15 bp, Homo sapiens
accaattcggccaca

SEQ ID NO: 1137154 - DNA, 15 bp, Homo sapiens
taccaattcggccac

SEQ ID NO: 1137155 - DNA, 15 bp, Homo sapiens
gtaccaattcggcca

SEQ ID NO: 1137156 - DNA, 15 bp, Homo sapiens
ggtaccaattcggcc

SEQ ID NO: 1137157 - DNA, 15 bp, Homo sapiens
aggtaccaattcggc

SEQ ID NO: 1137158 - DNA, 15 bp, Homo sapiens
taggtaccaattcgg

SEQ ID NO: 1137159 - DNA, 15 bp, Homo sapiens
ttaggtaccaattcg

SEQ ID NO: 1137160 - DNA, 15 bp, Homo sapiens
cttaggtaccaattc

SEQ ID NO: 1137161 - DNA, 15 bp, Homo sapiens
ccttaggtaccaatt

SEQ ID NO: 1137162 - DNA, 15 bp, Homo sapiens
accttaggtaccaat

SEQ ID NO: 1137163 - DNA, 15 bp, Homo sapiens
caccttaggtaccaa

SEQ ID NO: 1137164 - DNA, 15 bp, Homo sapiens
gcaccttaggtacca

SEQ ID NO: 1137165 - DNA, 15 bp, Homo sapiens
tgcaccttaggtacc

SEQ ID NO: 1137166 - DNA, 15 bp, Homo sapiens
ttgcaccttaggtac

SEQ ID NO: 1137167 - DNA, 15 bp, Homo sapiens
attgcaccttaggta

SEQ ID NO: 1137168 - DNA, 15 bp, Homo sapiens
tattgcaccttaggt

SEQ ID NO: 1137169 - DNA, 15 bp, Homo sapiens
gtattgcaccttagg

SEQ ID NO: 1137170 - DNA, 15 bp, Homo sapiens
tgtattgcaccttag

SEQ ID NO: 1137171 - DNA, 15 bp, Homo sapiens
ttgtattgcacctta

SEQ ID NO: 1137172 - DNA, 15 bp, Homo sapiens
tttgtattgcacctt

SEQ ID NO: 1137173 - DNA, 15 bp, Homo sapiens
ctttgtattgcacct

SEQ ID NO: 1137174 - DNA, 15 bp, Homo sapiens
actttgtattgcacc

SEQ ID NO: 1137175 - DNA, 15 bp, Homo sapiens
gactttgtattgcac

SEQ ID NO: 1137176 - DNA, 15 bp, Homo sapiens
agactttgtattgca

SEQ ID NO: 1137177 - DNA, 15 bp, Homo sapiens
gagactttgtattgc

SEQ ID NO: 1137178 - DNA, 15 bp, Homo sapiens
ggagactttgtattg

SEQ ID NO: 1137179 - DNA, 15 bp, Homo sapiens
aggagactttgtatt

SEQ ID NO: 1137180 - DNA, 15 bp, Homo sapiens
aaggagactttgtat

SEQ ID NO: 1137181 - DNA, 15 bp, Homo sapiens
aaaggagactttgta

SEQ ID NO: 1137182 - DNA, 15 bp, Homo sapiens
taaaggagactttgt

SEQ ID NO: 1137183 - DNA, 15 bp, Homo sapiens
gtaaaggagactttg

SEQ ID NO: 1137184 - DNA, 15 bp, Homo sapiens
agtaaaggagacttt

SEQ ID NO: 1137185 - DNA, 15 bp, Homo sapiens
aagtaaaggagactt

SEQ ID NO: 1137186 - DNA, 15 bp, Homo sapiens
aaagtaaaggagact

SEQ ID NO: 1137187 - DNA, 15 bp, Homo sapiens
aaaagtaaaggagac

SEQ ID NO: 1137188 - DNA, 15 bp, Homo sapiens
gaaaagtaaaggaga

SEQ ID NO: 1137189 - DNA, 15 bp, Homo sapiens
ggaaaagtaaaggag

SEQ ID NO: 1137190 - DNA, 15 bp, Homo sapiens
tggaaaagtaaagga

SEQ ID NO: 1137191 - DNA, 15 bp, Homo sapiens
gtggaaaagtaaagg

SEQ ID NO: 1137192 - DNA, 15 bp, Homo sapiens
ggtggaaaagtaaag

SEQ ID NO: 1137193 - DNA, 15 bp, Homo sapiens
aggtggaaaagtaaa

SEQ ID NO: 1137194 - DNA, 15 bp, Homo sapiens
caggtggaaaagtaa

SEQ ID NO: 1137195 - DNA, 15 bp, Homo sapiens
gcaggtggaaaagta

SEQ ID NO: 1137196 - DNA, 15 bp, Homo sapiens
agcaggtggaaaagt

SEQ ID NO: 1137197 - DNA, 15 bp, Homo sapiens
aagcaggtggaaaag

SEQ ID NO: 1137198 - DNA, 15 bp, Homo sapiens
aaagcaggtggaaaa

SEQ ID NO: 1137199 - DNA, 15 bp, Homo sapiens
aaaagcaggtggaaa

SEQ ID NO: 1137200 - DNA, 15 bp, Homo sapiens
gaaaagcaggtggaa

SEQ ID NO: 1137201 - DNA, 15 bp, Homo sapiens
agaaaagcaggtgga

SEQ ID NO: 1137202 - DNA, 15 bp, Homo sapiens
gagaaaagcaggtgg

SEQ ID NO: 1137203 - DNA, 15 bp, Homo sapiens
tgagaaaagcaggtg

SEQ ID NO: 1137204 - DNA, 15 bp, Homo sapiens
ttgagaaaagcaggt

SEQ ID NO: 1137205 - DNA, 15 bp, Homo sapiens
cttgagaaaagcagg

SEQ ID NO: 1137206 - DNA, 15 bp, Homo sapiens
gcttgagaaaagcag

SEQ ID NO: 1137207 - DNA, 15 bp, Homo sapiens
tgcttgagaaaagca

SEQ ID NO: 1137208 - DNA, 15 bp, Homo sapiens
ttgcttgagaaaagc

SEQ ID NO: 1137209 - DNA, 15 bp, Homo sapiens
tttgcttgagaaaag

SEQ ID NO: 1137210 - DNA, 15 bp, Homo sapiens
ctttgcttgagaaaa

SEQ ID NO: 1137211 - DNA, 15 bp, Homo sapiens
tctttgcttgagaaa

SEQ ID NO: 1137212 - DNA, 15 bp, Homo sapiens
ctctttgcttgagaa

SEQ ID NO: 1137213 - DNA, 15 bp, Homo sapiens
actctttgcttgaga

SEQ ID NO: 1137214 - DNA, 15 bp, Homo sapiens
gactctttgcttgag

SEQ ID NO: 1137215 - DNA, 15 bp, Homo sapiens
agactctttgcttga

SEQ ID NO: 1137216 - DNA, 15 bp, Homo sapiens
gagactctttgcttg

SEQ ID NO: 1137217 - DNA, 15 bp, Homo sapiens
agagactctttgctt

SEQ ID NO: 1137218 - DNA, 15 bp, Homo sapiens
gagagactctttgct

SEQ ID NO: 1137219 - DNA, 15 bp, Homo sapiens
tgagagactctttgc

SEQ ID NO: 1137220 - DNA, 15 bp, Homo sapiens
gtgagagactctttg

SEQ ID NO: 1137221 - DNA, 15 bp, Homo sapiens
ggtgagagactcttt

SEQ ID NO: 1137222 - DNA, 15 bp, Homo sapiens
tggtgagagactctt

SEQ ID NO: 1137223 - DNA, 15 bp, Homo sapiens
gtggtgagagactct

SEQ ID NO: 1137224 - DNA, 15 bp, Homo sapiens
ggtggtgagagactc

SEQ ID NO: 1137225 - DNA, 15 bp, Homo sapiens
cggtggtgagagact

SEQ ID NO: 1137226 - DNA, 15 bp, Homo sapiens
gcggtggtgagagac

SEQ ID NO: 1137227 - DNA, 15 bp, Homo sapiens
ggcggtggtgagaga

SEQ ID NO: 1137228 - DNA, 15 bp, Homo sapiens
tggcggtggtgagag

SEQ ID NO: 1137229 - DNA, 15 bp, Homo sapiens
gtggcggtggtgaga

SEQ ID NO: 1137230 - DNA, 15 bp, Homo sapiens
ggtggcggtggtgag

SEQ ID NO: 1137231 - DNA, 15 bp, Homo sapiens
tggtggcggtggtga

SEQ ID NO: 1137232 - DNA, 15 bp, Homo sapiens
atggtggcggtggtg

SEQ ID NO: 1137233 - DNA, 15 bp, Homo sapiens
tatggtggcggtggt

SEQ ID NO: 1137234 - DNA, 15 bp, Homo sapiens
ctatggtggcggtgg

SEQ ID NO: 1137235 - DNA, 15 bp, Homo sapiens
gctatggtggcggtg

SEQ ID NO: 1137236 - DNA, 15 bp, Homo sapiens
cgctatggtggcggt

SEQ ID NO: 1137237 - DNA, 15 bp, Homo sapiens
ccgctatggtggcgg

SEQ ID NO: 1137238 - DNA, 15 bp, Homo sapiens
cccgctatggtggcg

SEQ ID NO: 1137239 - DNA, 15 bp, Homo sapiens
acccgctatggtggc

SEQ ID NO: 1137240 - DNA, 15 bp, Homo sapiens
tacccgctatggtgg

SEQ ID NO: 1137241 - DNA, 15 bp, Homo sapiens
ttacccgctatggtg

SEQ ID NO: 1137242 - DNA, 15 bp, Homo sapiens
attacccgctatggt

SEQ ID NO: 1137243 - DNA, 15 bp, Homo sapiens
cattacccgctatgg

SEQ ID NO: 1137244 - DNA, 15 bp, Homo sapiens
acattacccgctatg

SEQ ID NO: 1137245 - DNA, 15 bp, Homo sapiens
cacattacccgctat

SEQ ID NO: 1137246 - DNA, 15 bp, Homo sapiens
gcacattacccgcta

SEQ ID NO: 1137247 - DNA, 15 bp, Homo sapiens
agcacattacccgct

SEQ ID NO: 1137248 - DNA, 15 bp, Homo sapiens
cagcacattacccgc

SEQ ID NO: 1137249 - DNA, 15 bp, Homo sapiens
ccagcacattacccg

SEQ ID NO: 1137250 - DNA, 15 bp, Homo sapiens
tccagcacattaccc

SEQ ID NO: 1137251 - DNA, 15 bp, Homo sapiens
atccagcacattacc

SEQ ID NO: 1137252 - DNA, 15 bp, Homo sapiens
gatccagcacattac

SEQ ID NO: 1137253 - DNA, 15 bp, Homo sapiens
agatccagcacatta

SEQ ID NO: 1137254 - DNA, 15 bp, Homo sapiens
aagatccagcacatt

SEQ ID NO: 1137255 - DNA, 15 bp, Homo sapiens
taagatccagcacat

SEQ ID NO: 1137256 - DNA, 15 bp, Homo sapiens
gtaagatccagcaca

SEQ ID NO: 1137257 - DNA, 15 bp, Homo sapiens
ggtaagatccagcac

SEQ ID NO: 1137258 - DNA, 15 bp, Homo sapiens
aggtaagatccagca

SEQ ID NO: 1137259 - DNA, 15 bp, Homo sapiens
taggtaagatccagc

SEQ ID NO: 1137260 - DNA, 15 bp, Homo sapiens
ttaggtaagatccag

SEQ ID NO: 1137261 - DNA, 15 bp, Homo sapiens
tttaggtaagatcca

SEQ ID NO: 1137262 - DNA, 15 bp, Homo sapiens
ctttaggtaagatcc

SEQ ID NO: 1137263 - DNA, 15 bp, Homo sapiens
gctttaggtaagatc

SEQ ID NO: 1137264 - DNA, 15 bp, Homo sapiens
ggctttaggtaagat

SEQ ID NO: 1137265 - DNA, 15 bp, Homo sapiens
tggctttaggtaaga

SEQ ID NO: 1137266 - DNA, 15 bp, Homo sapiens
ctggctttaggtaag

SEQ ID NO: 1137267 - DNA, 15 bp, Homo sapiens
gctggctttaggtaa

SEQ ID NO: 1137268 - DNA, 15 bp, Homo sapiens
tgctggctttaggta

SEQ ID NO: 1137269 - DNA, 15 bp, Homo sapiens
gtgctggctttaggt

SEQ ID NO: 1137270 - DNA, 15 bp, Homo sapiens
tgtgctggctttagg

SEQ ID NO: 1137271 - DNA, 15 bp, Homo sapiens
atgtgctggctttag

SEQ ID NO: 1137272 - DNA, 15 bp, Homo sapiens
gatgtgctggcttta

SEQ ID NO: 1137273 - DNA, 15 bp, Homo sapiens
agatgtgctggcttt

SEQ ID NO: 1137274 - DNA, 15 bp, Homo sapiens
gagatgtgctggctt

SEQ ID NO: 1137275 - DNA, 15 bp, Homo sapiens
tgagatgtgctggct

SEQ ID NO: 1137276 - DNA, 15 bp, Homo sapiens
ctgagatgtgctggc

SEQ ID NO: 1137277 - DNA, 15 bp, Homo sapiens
tctgagatgtgctgg

SEQ ID NO: 1137278 - DNA, 15 bp, Homo sapiens
ctctgagatgtgctg

SEQ ID NO: 1137279 - DNA, 15 bp, Homo sapiens
actctgagatgtgct

SEQ ID NO: 1137280 - DNA, 15 bp, Homo sapiens
gactctgagatgtgc

SEQ ID NO: 1137281 - DNA, 15 bp, Homo sapiens
ggactctgagatgtg

SEQ ID NO: 1137282 - DNA, 15 bp, Homo sapiens
aggactctgagatgt

SEQ ID NO: 1137283 - DNA, 15 bp, Homo sapiens
taggactctgagatg

SEQ ID NO: 1137284 - DNA, 15 bp, Homo sapiens
gtaggactctgagat

SEQ ID NO: 1137285 - DNA, 15 bp, Homo sapiens
ggtaggactctgaga

SEQ ID NO: 1137286 - DNA, 15 bp, Homo sapiens
gggtaggactctgag

SEQ ID NO: 1137287 - DNA, 15 bp, Homo sapiens
tgggtaggactctga

SEQ ID NO: 1137288 - DNA, 15 bp, Homo sapiens
ttgggtaggactctg

SEQ ID NO: 1137289 - DNA, 15 bp, Homo sapiens
cttgggtaggactct

SEQ ID NO: 1137290 - DNA, 15 bp, Homo sapiens
ccttgggtaggactc

SEQ ID NO: 1137291 - DNA, 15 bp, Homo sapiens
accttgggtaggact

SEQ ID NO: 1137292 - DNA, 15 bp, Homo sapiens
gaccttgggtaggac

SEQ ID NO: 1137293 - DNA, 15 bp, Homo sapiens
ggaccttgggtagga

SEQ ID NO: 1137294 - DNA, 15 bp, Homo sapiens
tggaccttgggtagg

SEQ ID NO: 1137295 - DNA, 15 bp, Homo sapiens
atggaccttgggtag

SEQ ID NO: 1137296 - DNA, 15 bp, Homo sapiens
catggaccttgggta

SEQ ID NO: 1137297 - DNA, 15 bp, Homo sapiens
acatggaccttgggt

SEQ ID NO: 1137298 - DNA, 15 bp, Homo sapiens
gacatggaccttggg

SEQ ID NO: 1137299 - DNA, 15 bp, Homo sapiens
ggacatggaccttgg

SEQ ID NO: 1137300 - DNA, 15 bp, Homo sapiens
tggacatggaccttg

SEQ ID NO: 1137301 - DNA, 15 bp, Homo sapiens
atggacatggacctt

SEQ ID NO: 1137302 - DNA, 15 bp, Homo sapiens
catggacatggacct

SEQ ID NO: 1137303 - DNA, 15 bp, Homo sapiens
ccatggacatggacc

SEQ ID NO: 1137304 - DNA, 15 bp, Homo sapiens
gccatggacatggac

SEQ ID NO: 1137305 - DNA, 15 bp, Homo sapiens
cgccatggacatgga

SEQ ID NO: 1137306 - DNA, 15 bp, Homo sapiens
acgccatggacatgg

SEQ ID NO: 1137307 - DNA, 15 bp, Homo sapiens
tacgccatggacatg

SEQ ID NO: 1137308 - DNA, 15 bp, Homo sapiens
gtacgccatggacat

SEQ ID NO: 1137309 - DNA, 15 bp, Homo sapiens
agtacgccatggaca

SEQ ID NO: 1137310 - DNA, 15 bp, Homo sapiens
tagtacgccatggac

SEQ ID NO: 1137311 - DNA, 15 bp, Homo sapiens
atagtacgccatgga

SEQ ID NO: 1137312 - DNA, 15 bp, Homo sapiens
gatagtacgccatgg

SEQ ID NO: 1137313 - DNA, 15 bp, Homo sapiens
agatagtacgccatg

SEQ ID NO: 1137314 - DNA, 15 bp, Homo sapiens
cagatagtacgccat

SEQ ID NO: 1137315 - DNA, 15 bp, Homo sapiens
ccagatagtacgcca

SEQ ID NO: 1137316 - DNA, 15 bp, Homo sapiens
cccagatagtacgcc

SEQ ID NO: 1137317 - DNA, 15 bp, Homo sapiens
gcccagatagtacgc

SEQ ID NO: 1137318 - DNA, 15 bp, Homo sapiens
tgcccagatagtacg

SEQ ID NO: 1137319 - DNA, 15 bp, Homo sapiens
atgcccagatagtac

SEQ ID NO: 1137320 - DNA, 15 bp, Homo sapiens
gatgcccagatagta

SEQ ID NO: 1137321 - DNA, 15 bp, Homo sapiens
tgatgcccagatagt

SEQ ID NO: 1137322 - DNA, 15 bp, Homo sapiens
gtgatgcccagatag

SEQ ID NO: 1137323 - DNA, 15 bp, Homo sapiens
agtgatgcccagata

SEQ ID NO: 1137324 - DNA, 15 bp, Homo sapiens
cagtgatgcccagat

SEQ ID NO: 1137325 - DNA, 15 bp, Homo sapiens
tcagtgatgcccaga

SEQ ID NO: 1137326 - DNA, 15 bp, Homo sapiens
atcagtgatgcccag

SEQ ID NO: 1137327 - DNA, 15 bp, Homo sapiens
catcagtgatgccca

SEQ ID NO: 1137328 - DNA, 15 bp, Homo sapiens
ccatcagtgatgccc

SEQ ID NO: 1137329 - DNA, 15 bp, Homo sapiens
accatcagtgatgcc

SEQ ID NO: 1137330 - DNA, 15 bp, Homo sapiens
aaccatcagtgatgc

SEQ ID NO: 1137331 - DNA, 15 bp, Homo sapiens
taaccatcagtgatg

SEQ ID NO: 1137332 - DNA, 15 bp, Homo sapiens
ataaccatcagtgat

SEQ ID NO: 1137333 - DNA, 15 bp, Homo sapiens
aataaccatcagtga

SEQ ID NO: 1137334 - DNA, 15 bp, Homo sapiens
gaataaccatcagtg

SEQ ID NO: 1137335 - DNA, 15 bp, Homo sapiens
cgaataaccatcagt

SEQ ID NO: 1137336 - DNA, 15 bp, Homo sapiens
ccgaataaccatcag

SEQ ID NO: 1137337 - DNA, 15 bp, Homo sapiens
cccgaataaccatca

SEQ ID NO: 1137338 - DNA, 15 bp, Homo sapiens
ccccgaataaccatc

SEQ ID NO: 1137339 - DNA, 15 bp, Homo sapiens
gccccgaataaccat

SEQ ID NO: 1137340 - DNA, 15 bp, Homo sapiens
ggccccgaataacca

SEQ ID NO: 1137341 - DNA, 15 bp, Homo sapiens
gggccccgaataacc

SEQ ID NO: 1137342 - DNA, 15 bp, Homo sapiens
tgggccccgaataac

SEQ ID NO: 1137343 - DNA, 15 bp, Homo sapiens
ttgggccccgaataa

SEQ ID NO: 1137344 - DNA, 15 bp, Homo sapiens
tttgggccccgaata

SEQ ID NO: 1137345 - DNA, 15 bp, Homo sapiens
ctttgggccccgaat

SEQ ID NO: 1137346 - DNA, 15 bp, Homo sapiens
cctttgggccccgaa

SEQ ID NO: 1137347 - DNA, 15 bp, Homo sapiens
acctttgggccccga

SEQ ID NO: 1137348 - DNA, 15 bp, Homo sapiens
gacctttgggccccg

SEQ ID NO: 1137349 - DNA, 15 bp, Homo sapiens
tgacctttgggcccc

SEQ ID NO: 1137350 - DNA, 15 bp, Homo sapiens
ctgacctttgggccc

SEQ ID NO: 1137351 - DNA, 15 bp, Homo sapiens
gctgacctttgggcc

SEQ ID NO: 1137352 - DNA, 15 bp, Homo sapiens
tgctgacctttgggc

SEQ ID NO: 1137353 - DNA, 15 bp, Homo sapiens
ttgctgacctttggg

SEQ ID NO: 1137354 - DNA, 15 bp, Homo sapiens
cttgctgacctttgg

SEQ ID NO: 1137355 - DNA, 15 bp, Homo sapiens
acttgctgacctttg

SEQ ID NO: 1137356 - DNA, 15 bp, Homo sapiens
tacttgctgaccttt

SEQ ID NO: 1137357 - DNA, 15 bp, Homo sapiens
ttacttgctgacctt

SEQ ID NO: 1137358 - DNA, 15 bp, Homo sapiens
attacttgctgacct

SEQ ID NO: 1137359 - DNA, 15 bp, Homo sapiens
cattacttgctgacc

SEQ ID NO: 1137360 - DNA, 15 bp, Homo sapiens
tcattacttgctgac

SEQ ID NO: 1137361 - DNA, 15 bp, Homo sapiens
ctcattacttgctga

SEQ ID NO: 1137362 - DNA, 15 bp, Homo sapiens
actcattacttgctg

SEQ ID NO: 1137363 - DNA, 15 bp, Homo sapiens
gactcattacttgct

SEQ ID NO: 1137364 - DNA, 15 bp, Homo sapiens
ggactcattacttgc

SEQ ID NO: 1137365 - DNA, 15 bp, Homo sapiens
aggactcattacttg

SEQ ID NO: 1137366 - DNA, 15 bp, Homo sapiens
caggactcattactt

SEQ ID NO: 1137367 - DNA, 15 bp, Homo sapiens
gcaggactcattact

SEQ ID NO: 1137368 - DNA, 15 bp, Homo sapiens
agcaggactcattac

SEQ ID NO: 1137369 - DNA, 15 bp, Homo sapiens
tagcaggactcatta

SEQ ID NO: 1137370 - DNA, 15 bp, Homo sapiens
ctagcaggactcatt

SEQ ID NO: 1137371 - DNA, 15 bp, Homo sapiens
cctagcaggactcat

SEQ ID NO: 1137372 - DNA, 15 bp, Homo sapiens
tcctagcaggactca

SEQ ID NO: 1137373 - DNA, 15 bp, Homo sapiens
gtcctagcaggactc

SEQ ID NO: 1137374 - DNA, 15 bp, Homo sapiens
agtcctagcaggact

SEQ ID NO: 1137375 - DNA, 15 bp, Homo sapiens
cagtcctagcaggac

SEQ ID NO: 1137376 - DNA, 15 bp, Homo sapiens
ccagtcctagcagga

SEQ ID NO: 1137377 - DNA, 15 bp, Homo sapiens
accagtcctagcagg

SEQ ID NO: 1137378 - DNA, 15 bp, Homo sapiens
aaccagtcctagcag

SEQ ID NO: 1137379 - DNA, 15 bp, Homo sapiens
gaaccagtcctagca

SEQ ID NO: 1137380 - DNA, 15 bp, Homo sapiens
ggaaccagtcctagc

SEQ ID NO: 1137381 - DNA, 15 bp, Homo sapiens
aggaaccagtcctag

SEQ ID NO: 1137382 - DNA, 15 bp, Homo sapiens
aaggaaccagtccta

SEQ ID NO: 1137383 - DNA, 15 bp, Homo sapiens
gaaggaaccagtcct

SEQ ID NO: 1137384 - DNA, 15 bp, Homo sapiens
ggaaggaaccagtcc

SEQ ID NO: 1137385 - DNA, 15 bp, Homo sapiens
gggaaggaaccagtc

SEQ ID NO: 1137386 - DNA, 15 bp, Homo sapiens
agggaaggaaccagt

SEQ ID NO: 1137387 - DNA, 15 bp, Homo sapiens
aagggaaggaaccag

SEQ ID NO: 1137388 - DNA, 15 bp, Homo sapiens
gaagggaaggaacca

SEQ ID NO: 1137389 - DNA, 15 bp, Homo sapiens
tgaagggaaggaacc

SEQ ID NO: 1137390 - DNA, 15 bp, Homo sapiens
ttgaagggaaggaac

SEQ ID NO: 1137391 - DNA, 15 bp, Homo sapiens
tttgaagggaaggaa

SEQ ID NO: 1137392 - DNA, 15 bp, Homo sapiens
ctttgaagggaagga

SEQ ID NO: 1137393 - DNA, 15 bp, Homo sapiens
gctttgaagggaagg

SEQ ID NO: 1137394 - DNA, 15 bp, Homo sapiens
tgctttgaagggaag

SEQ ID NO: 1137395 - DNA, 15 bp, Homo sapiens
ctgctttgaagggaa

SEQ ID NO: 1137396 - DNA, 15 bp, Homo sapiens
actgctttgaaggga

SEQ ID NO: 1137397 - DNA, 15 bp, Homo sapiens
tactgctttgaaggg

SEQ ID NO: 1137398 - DNA, 15 bp, Homo sapiens
ctactgctttgaagg

SEQ ID NO: 1137399 - DNA, 15 bp, Homo sapiens
tctactgctttgaag

SEQ ID NO: 1137400 - DNA, 15 bp, Homo sapiens
atctactgctttgaa

SEQ ID NO: 1137401 - DNA, 15 bp, Homo sapiens
aatctactgctttga

SEQ ID NO: 1137402 - DNA, 15 bp, Homo sapiens
gaatctactgctttg

SEQ ID NO: 1137403 - DNA, 15 bp, Homo sapiens
ggaatctactgcttt

SEQ ID NO: 1137404 - DNA, 15 bp, Homo sapiens
gggaatctactgctt

SEQ ID NO: 1137405 - DNA, 15 bp, Homo sapiens
agggaatctactgct

SEQ ID NO: 1137406 - DNA, 15 bp, Homo sapiens
aagggaatctactgc

SEQ ID NO: 1137407 - DNA, 15 bp, Homo sapiens
gaagggaatctactg

SEQ ID NO: 1137408 - DNA, 15 bp, Homo sapiens
agaagggaatctact

SEQ ID NO: 1137409 - DNA, 15 bp, Homo sapiens
aagaagggaatctac

SEQ ID NO: 1137410 - DNA, 15 bp, Homo sapiens
caagaagggaatcta

SEQ ID NO: 1137411 - DNA, 15 bp, Homo sapiens
acaagaagggaatct

SEQ ID NO: 1137412 - DNA, 15 bp, Homo sapiens
gacaagaagggaatc

SEQ ID NO: 1137413 - DNA, 15 bp, Homo sapiens
ggacaagaagggaat

SEQ ID NO: 1137414 - DNA, 15 bp, Homo sapiens
tggacaagaagggaa

SEQ ID NO: 1137415 - DNA, 15 bp, Homo sapiens
ctggacaagaaggga

SEQ ID NO: 1137416 - DNA, 15 bp, Homo sapiens
gctggacaagaaggg

SEQ ID NO: 1137417 - DNA, 15 bp, Homo sapiens
cgctggacaagaagg

SEQ ID NO: 1137418 - DNA, 15 bp, Homo sapiens
acgctggacaagaag

SEQ ID NO: 1137419 - DNA, 15 bp, Homo sapiens
tacgctggacaagaa

SEQ ID NO: 1137420 - DNA, 15 bp, Homo sapiens
atacgctggacaaga

SEQ ID NO: 1137421 - DNA, 15 bp, Homo sapiens
catacgctggacaag

SEQ ID NO: 1137422 - DNA, 15 bp, Homo sapiens
acatacgctggacaa

SEQ ID NO: 1137423 - DNA, 15 bp, Homo sapiens
gacatacgctggaca

SEQ ID NO: 1137424 - DNA, 15 bp, Homo sapiens
agacatacgctggac

SEQ ID NO: 1137425 - DNA, 15 bp, Homo sapiens
tagacatacgctgga

SEQ ID NO: 1137426 - DNA, 15 bp, Homo sapiens
ctagacatacgctgg

SEQ ID NO: 1137427 - DNA, 15 bp, Homo sapiens
tctagacatacgctg

SEQ ID NO: 1137428 - DNA, 15 bp, Homo sapiens
ttctagacatacgct

SEQ ID NO: 1137429 - DNA, 15 bp, Homo sapiens
tttctagacatacgc

SEQ ID NO: 1137430 - DNA, 15 bp, Homo sapiens
atttctagacatacg

SEQ ID NO: 1137431 - DNA, 15 bp, Homo sapiens
catttctagacatac

SEQ ID NO: 1137432 - DNA, 15 bp, Homo sapiens
acatttctagacata

SEQ ID NO: 1137433 - DNA, 15 bp, Homo sapiens
gacatttctagacat

SEQ ID NO: 1137434 - DNA, 15 bp, Homo sapiens
ggacatttctagaca

SEQ ID NO: 1137435 - DNA, 15 bp, Homo sapiens
tggacatttctagac

SEQ ID NO: 1137436 - DNA, 15 bp, Homo sapiens
ctggacatttctaga

SEQ ID NO: 1137437 - DNA, 15 bp, Homo sapiens
cctggacatttctag

SEQ ID NO: 1137438 - DNA, 15 bp, Homo sapiens
tcctggacatttcta

SEQ ID NO: 1137439 - DNA, 15 bp, Homo sapiens
ctcctggacatttct

SEQ ID NO: 1137440 - DNA, 15 bp, Homo sapiens
gctcctggacatttc

SEQ ID NO: 1137441 - DNA, 15 bp, Homo sapiens
agctcctggacattt

SEQ ID NO: 1137442 - DNA, 15 bp, Homo sapiens
tagctcctggacatt

SEQ ID NO: 1137443 - DNA, 15 bp, Homo sapiens
ctagctcctggacat

SEQ ID NO: 1137444 - DNA, 15 bp, Homo sapiens
cctagctcctggaca

SEQ ID NO: 1137445 - DNA, 15 bp, Homo sapiens
ccctagctcctggac

SEQ ID NO: 1137446 - DNA, 15 bp, Homo sapiens
gccctagctcctgga

SEQ ID NO: 1137447 - DNA, 15 bp, Homo sapiens
ggccctagctcctgg

SEQ ID NO: 1137448 - DNA, 15 bp, Homo sapiens
aggccctagctcctg

SEQ ID NO: 1137449 - DNA, 15 bp, Homo sapiens
caggccctagctcct

SEQ ID NO: 1137450 - DNA, 15 bp, Homo sapiens
ccaggccctagctcc

SEQ ID NO: 1137451 - DNA, 15 bp, Homo sapiens
cccaggccctagctc

SEQ ID NO: 1137452 - DNA, 15 bp, Homo sapiens
tcccaggccctagct

SEQ ID NO: 1137453 - DNA, 15 bp, Homo sapiens
atcccaggccctagc

SEQ ID NO: 1137454 - DNA, 15 bp, Homo sapiens
catcccaggccctag

SEQ ID NO: 1137455 - DNA, 15 bp, Homo sapiens
acatcccaggcccta

SEQ ID NO: 1137456 - DNA, 15 bp, Homo sapiens
cacatcccaggccct

SEQ ID NO: 1137457 - DNA, 15 bp, Homo sapiens
tcacatcccaggccc

SEQ ID NO: 1137458 - DNA, 15 bp, Homo sapiens
ctcacatcccaggcc

SEQ ID NO: 1137459 - DNA, 15 bp, Homo sapiens
actcacatcccaggc

SEQ ID NO: 1137460 - DNA, 15 bp, Homo sapiens
gactcacatcccagg

SEQ ID NO: 1137461 - DNA, 15 bp, Homo sapiens
agactcacatcccag

SEQ ID NO: 1137462 - DNA, 15 bp, Homo sapiens
gagactcacatccca

SEQ ID NO: 1137463 - DNA, 15 bp, Homo sapiens
tgagactcacatccc

SEQ ID NO: 1137464 - DNA, 15 bp, Homo sapiens
atgagactcacatcc

SEQ ID NO: 1137465 - DNA, 15 bp, Homo sapiens
catgagactcacatc

SEQ ID NO: 1137466 - DNA, 15 bp, Homo sapiens
tcatgagactcacat

SEQ ID NO: 1137467 - DNA, 15 bp, Homo sapiens
gtcatgagactcaca

SEQ ID NO: 1137468 - DNA, 15 bp, Homo sapiens
agtcatgagactcac

SEQ ID NO: 1137469 - DNA, 15 bp, Homo sapiens
gagtcatgagactca

SEQ ID NO: 1137470 - DNA, 15 bp, Homo sapiens
agagtcatgagactc

SEQ ID NO: 1137471 - DNA, 15 bp, Homo sapiens
cagagtcatgagact

SEQ ID NO: 1137472 - DNA, 15 bp, Homo sapiens
tcagagtcatgagac

SEQ ID NO: 1137473 - DNA, 15 bp, Homo sapiens
gtcagagtcatgaga

SEQ ID NO: 1137474 - DNA, 15 bp, Homo sapiens
ggtcagagtcatgag

SEQ ID NO: 1137475 - DNA, 15 bp, Homo sapiens
tggtcagagtcatga

SEQ ID NO: 1137476 - DNA, 15 bp, Homo sapiens
ctggtcagagtcatg

SEQ ID NO: 1137477 - DNA, 15 bp, Homo sapiens
actggtcagagtcat

SEQ ID NO: 1137478 - DNA, 15 bp, Homo sapiens
gactggtcagagtca

SEQ ID NO: 1137479 - DNA, 15 bp, Homo sapiens
ggactggtcagagtc

SEQ ID NO: 1137480 - DNA, 15 bp, Homo sapiens
gggactggtcagagt

SEQ ID NO: 1137481 - DNA, 15 bp, Homo sapiens
ggggactggtcagag

SEQ ID NO: 1137482 - DNA, 15 bp, Homo sapiens
aggggactggtcaga

SEQ ID NO: 1137483 - DNA, 15 bp, Homo sapiens
taggggactggtcag

SEQ ID NO: 1137484 - DNA, 15 bp, Homo sapiens
ataggggactggtca

SEQ ID NO: 1137485 - DNA, 15 bp, Homo sapiens
gataggggactggtc

SEQ ID NO: 1137486 - DNA, 15 bp, Homo sapiens
ggataggggactggt

SEQ ID NO: 1137487 - DNA, 15 bp, Homo sapiens
aggataggggactgg

SEQ ID NO: 1137488 - DNA, 15 bp, Homo sapiens
taggataggggactg

SEQ ID NO: 1137489 - DNA, 15 bp, Homo sapiens
gtaggataggggact

SEQ ID NO: 1137490 - DNA, 15 bp, Homo sapiens
agtaggataggggac

SEQ ID NO: 1137491 - DNA, 15 bp, Homo sapiens
cagtaggatagggga

SEQ ID NO: 1137492 - DNA, 15 bp, Homo sapiens
acagtaggatagggg

SEQ ID NO: 1137493 - DNA, 15 bp, Homo sapiens
cacagtaggataggg

SEQ ID NO: 1137494 - DNA, 15 bp, Homo sapiens
ccacagtaggatagg

SEQ ID NO: 1137495 - DNA, 15 bp, Homo sapiens
gccacagtaggatag

SEQ ID NO: 1137496 - DNA, 15 bp, Homo sapiens
agccacagtaggata

SEQ ID NO: 1137497 - DNA, 15 bp, Homo sapiens
tagccacagtaggat

SEQ ID NO: 1137498 - DNA, 15 bp, Homo sapiens
ttagccacagtagga

SEQ ID NO: 1137499 - DNA, 15 bp, Homo sapiens
cttagccacagtagg

SEQ ID NO: 1137500 - DNA, 15 bp, Homo sapiens
gcttagccacagtag

SEQ ID NO: 1137501 - DNA, 15 bp, Homo sapiens
agcttagccacagta

SEQ ID NO: 1137502 - DNA, 15 bp, Homo sapiens
cagcttagccacagt

SEQ ID NO: 1137503 - DNA, 15 bp, Homo sapiens
ccagcttagccacag

SEQ ID NO: 1137504 - DNA, 15 bp, Homo sapiens
accagcttagccaca

SEQ ID NO: 1137505 - DNA, 15 bp, Homo sapiens
taccagcttagccac

SEQ ID NO: 1137506 - DNA, 15 bp, Homo sapiens
ttaccagcttagcca

SEQ ID NO: 1137507 - DNA, 15 bp, Homo sapiens
gttaccagcttagcc

SEQ ID NO: 1137508 - DNA, 15 bp, Homo sapiens
ggttaccagcttagc

SEQ ID NO: 1137509 - DNA, 15 bp, Homo sapiens
tggttaccagcttag

SEQ ID NO: 1137510 - DNA, 15 bp, Homo sapiens
ttggttaccagctta

SEQ ID NO: 1137511 - DNA, 15 bp, Homo sapiens
cttggttaccagctt

SEQ ID NO: 1137512 - DNA, 15 bp, Homo sapiens
tcttggttaccagct

SEQ ID NO: 1137513 - DNA, 15 bp, Homo sapiens
atcttggttaccagc

SEQ ID NO: 1137514 - DNA, 15 bp, Homo sapiens
catcttggttaccag

SEQ ID NO: 1137515 - DNA, 15 bp, Homo sapiens
gcatcttggttacca

SEQ ID NO: 1137516 - DNA, 15 bp, Homo sapiens
tgcatcttggttacc

SEQ ID NO: 1137517 - DNA, 15 bp, Homo sapiens
ttgcatcttggttac

SEQ ID NO: 1137518 - DNA, 15 bp, Homo sapiens
tttgcatcttggtta

SEQ ID NO: 1137519 - DNA, 15 bp, Homo sapiens
ttttgcatcttggtt

SEQ ID NO: 1137520 - DNA, 15 bp, Homo sapiens
attttgcatcttggt

SEQ ID NO: 1137521 - DNA, 15 bp, Homo sapiens
tattttgcatcttgg

SEQ ID NO: 1137522 - DNA, 15 bp, Homo sapiens
ttattttgcatcttg

SEQ ID NO: 1137523 - DNA, 15 bp, Homo sapiens
tttattttgcatctt

SEQ ID NO: 1137524 - DNA, 15 bp, Homo sapiens
ctttattttgcatct

SEQ ID NO: 1137525 - DNA, 15 bp, Homo sapiens
actttattttgcatc

SEQ ID NO: 1137526 - DNA, 15 bp, Homo sapiens
gactttattttgcat

SEQ ID NO: 1137527 - DNA, 15 bp, Homo sapiens
ggactttattttgca

SEQ ID NO: 1137528 - DNA, 15 bp, Homo sapiens
aggactttattttgc

SEQ ID NO: 1137529 - DNA, 15 bp, Homo sapiens
gaggactttattttg

SEQ ID NO: 1137530 - DNA, 15 bp, Homo sapiens
agaggactttatttt

SEQ ID NO: 1137531 - DNA, 15 bp, Homo sapiens
aagaggactttattt

SEQ ID NO: 1137532 - DNA, 15 bp, Homo sapiens
aaagaggactttatt

SEQ ID NO: 1137533 - DNA, 15 bp, Homo sapiens
taaagaggactttat

SEQ ID NO: 1137534 - DNA, 15 bp, Homo sapiens
gtaaagaggacttta

SEQ ID NO: 1137535 - DNA, 15 bp, Homo sapiens
agtaaagaggacttt

SEQ ID NO: 1137536 - DNA, 15 bp, Homo sapiens
gagtaaagaggactt

SEQ ID NO: 1137537 - DNA, 15 bp, Homo sapiens
agagtaaagaggact

SEQ ID NO: 1137538 - DNA, 15 bp, Homo sapiens
aagagtaaagaggac

SEQ ID NO: 1137539 - DNA, 15 bp, Homo sapiens
gaagagtaaagagga

SEQ ID NO: 1137540 - DNA, 15 bp, Homo sapiens
ggaagagtaaagagg

SEQ ID NO: 1137541 - DNA, 15 bp, Homo sapiens
gggaagagtaaagag

SEQ ID NO: 1137542 - DNA, 15 bp, Homo sapiens
agggaagagtaaaga

SEQ ID NO: 1137543 - DNA, 15 bp, Homo sapiens
aagggaagagtaaag

SEQ ID NO: 1137544 - DNA, 15 bp, Homo sapiens
aaagggaagagtaaa

SEQ ID NO: 1137545 - DNA, 15 bp, Homo sapiens
gaaagggaagagtaa

SEQ ID NO: 1137546 - DNA, 15 bp, Homo sapiens
ggaaagggaagagta

SEQ ID NO: 1137547 - DNA, 15 bp, Homo sapiens
aggaaagggaagagt

SEQ ID NO: 1137548 - DNA, 15 bp, Homo sapiens
gaggaaagggaagag

SEQ ID NO: 1137549 - DNA, 15 bp, Homo sapiens
agaggaaagggaaga

SEQ ID NO: 1137550 - DNA, 15 bp, Homo sapiens
gagaggaaagggaag

SEQ ID NO: 1137551 - DNA, 15 bp, Homo sapiens
ggagaggaaagggaa

SEQ ID NO: 1137552 - DNA, 15 bp, Homo sapiens
aggagaggaaaggga

SEQ ID NO: 1137553 - DNA, 15 bp, Homo sapiens
gaggagaggaaaggg

SEQ ID NO: 1137554 - DNA, 15 bp, Homo sapiens
tgaggagaggaaagg

SEQ ID NO: 1137555 - DNA, 15 bp, Homo sapiens
ttgaggagaggaaag

SEQ ID NO: 1137556 - DNA, 15 bp, Homo sapiens
cttgaggagaggaaa

SEQ ID NO: 1137557 - DNA, 15 bp, Homo sapiens
gcttgaggagaggaa

SEQ ID NO: 1137558 - DNA, 15 bp, Homo sapiens
tgcttgaggagagga

SEQ ID NO: 1137559 - DNA, 15 bp, Homo sapiens
ctgcttgaggagagg

SEQ ID NO: 1137560 - DNA, 15 bp, Homo sapiens
tctgcttgaggagag

SEQ ID NO: 1137561 - DNA, 15 bp, Homo sapiens
ttctgcttgaggaga

SEQ ID NO: 1137562 - DNA, 15 bp, Homo sapiens
cttctgcttgaggag

SEQ ID NO: 1137563 - DNA, 15 bp, Homo sapiens
ccttctgcttgagga

SEQ ID NO: 1137564 - DNA, 15 bp, Homo sapiens
tccttctgcttgagg

SEQ ID NO: 1137565 - DNA, 15 bp, Homo sapiens
ttccttctgcttgag

SEQ ID NO: 1137566 - DNA, 15 bp, Homo sapiens
cttccttctgcttga

SEQ ID NO: 1137567 - DNA, 15 bp, Homo sapiens
ccttccttctgcttg

SEQ ID NO: 1137568 - DNA, 15 bp, Homo sapiens
tccttccttctgctt

SEQ ID NO: 1137569 - DNA, 15 bp, Homo sapiens
ttccttccttctgct

SEQ ID NO: 1137570 - DNA, 15 bp, Homo sapiens
attccttccttctgc

SEQ ID NO: 1137571 - DNA, 15 bp, Homo sapiens
gattccttccttctg

SEQ ID NO: 1137572 - DNA, 15 bp, Homo sapiens
agattccttccttct

SEQ ID NO: 1137573 - DNA, 15 bp, Homo sapiens
gagattccttccttc

SEQ ID NO: 1137574 - DNA, 15 bp, Homo sapiens
agagattccttcctt

SEQ ID NO: 1137575 - DNA, 15 bp, Homo sapiens
aagagattccttcct

SEQ ID NO: 1137576 - DNA, 15 bp, Homo sapiens
aaagagattccttcc

SEQ ID NO: 1137577 - DNA, 15 bp, Homo sapiens
aaaagagattccttc

SEQ ID NO: 1137578 - DNA, 15 bp, Homo sapiens
caaaagagattcctt

SEQ ID NO: 1137579 - DNA, 15 bp, Homo sapiens
ccaaaagagattcct

SEQ ID NO: 1137580 - DNA, 15 bp, Homo sapiens
tccaaaagagattcc

SEQ ID NO: 1137581 - DNA, 15 bp, Homo sapiens
ctccaaaagagattc

SEQ ID NO: 1137582 - DNA, 15 bp, Homo sapiens
gctccaaaagagatt

SEQ ID NO: 1137583 - DNA, 15 bp, Homo sapiens
ggctccaaaagagat

SEQ ID NO: 1137584 - DNA, 15 bp, Homo sapiens
tggctccaaaagaga

SEQ ID NO: 1137585 - DNA, 15 bp, Homo sapiens
tcatggctccaaaag

SEQ ID NO: 1137586 - DNA, 15 bp, Homo sapiens
ctcatggctccaaaa

SEQ ID NO: 1137587 - DNA, 15 bp, Homo sapiens
gctcatggctccaaa

SEQ ID NO: 1137588 - DNA, 15 bp, Homo sapiens
agctcatggctccaa

SEQ ID NO: 1137589 - DNA, 15 bp, Homo sapiens
tagctcatggctcca

SEQ ID NO: 1137590 - DNA, 15 bp, Homo sapiens
atagctcatggctcc

SEQ ID NO: 1137591 - DNA, 15 bp, Homo sapiens
catagctcatggctc

SEQ ID NO: 1137592 - DNA, 15 bp, Homo sapiens
gcatagctcatggct

SEQ ID NO: 1137593 - DNA, 15 bp, Homo sapiens
agcatagctcatggc

SEQ ID NO: 1137594 - DNA, 15 bp, Homo sapiens
cagcatagctcatgg

SEQ ID NO: 1137595 - DNA, 15 bp, Homo sapiens
gcagcatagctcatg

SEQ ID NO: 1137596 - DNA, 15 bp, Homo sapiens
ggcagcatagctcat

SEQ ID NO: 1137597 - DNA, 15 bp, Homo sapiens
aggcagcatagctca

SEQ ID NO: 1137598 - DNA, 15 bp, Homo sapiens
caggcagcatagctc

SEQ ID NO: 1137599 - DNA, 15 bp, Homo sapiens
ccaggcagcatagct

SEQ ID NO: 1137600 - DNA, 15 bp, Homo sapiens
cccaggcagcatagc

SEQ ID NO: 1137601 - DNA, 15 bp, Homo sapiens
ccccaggcagcatag

SEQ ID NO: 1137602 - DNA, 15 bp, Homo sapiens
accccaggcagcata

SEQ ID NO: 1137603 - DNA, 15 bp, Homo sapiens
aaccccaggcagcat

SEQ ID NO: 1137604 - DNA, 15 bp, Homo sapiens
caaccccaggcagca

SEQ ID NO: 1137605 - DNA, 15 bp, Homo sapiens
ccaaccccaggcagc

SEQ ID NO: 1137606 - DNA, 15 bp, Homo sapiens
cccaaccccaggcag

SEQ ID NO: 1137607 - DNA, 15 bp, Homo sapiens
ccccaaccccaggca

SEQ ID NO: 1137608 - DNA, 15 bp, Homo sapiens
cccccaaccccaggc

SEQ ID NO: 1137609 - DNA, 15 bp, Homo sapiens
tcccccaaccccagg

SEQ ID NO: 1137610 - DNA, 15 bp, Homo sapiens
ttcccccaaccccag

SEQ ID NO: 1137611 - DNA, 15 bp, Homo sapiens
cttcccccaacccca

SEQ ID NO: 1137612 - DNA, 15 bp, Homo sapiens
ccttcccccaacccc

SEQ ID NO: 1137613 - DNA, 15 bp, Homo sapiens
cccttcccccaaccc

SEQ ID NO: 1137614 - DNA, 15 bp, Homo sapiens
acccttcccccaacc

SEQ ID NO: 1137615 - DNA, 15 bp, Homo sapiens
cacccttcccccaac

SEQ ID NO: 1137616 - DNA, 15 bp, Homo sapiens
ccacccttcccccaa

SEQ ID NO: 1137617 - DNA, 15 bp, Homo sapiens
accacccttccccca

SEQ ID NO: 1137618 - DNA, 15 bp, Homo sapiens
caccacccttccccc

SEQ ID NO: 1137619 - DNA, 15 bp, Homo sapiens
gcaccacccttcccc

SEQ ID NO: 1137620 - DNA, 15 bp, Homo sapiens
tgcaccacccttccc

SEQ ID NO: 1137621 - DNA, 15 bp, Homo sapiens
ttgcaccacccttcc

SEQ ID NO: 1137622 - DNA, 15 bp, Homo sapiens
cttgcaccacccttc

SEQ ID NO: 1137623 - DNA, 15 bp, Homo sapiens
gcttgcaccaccctt

SEQ ID NO: 1137624 - DNA, 15 bp, Homo sapiens
ggcttgcaccaccct

SEQ ID NO: 1137625 - DNA, 15 bp, Homo sapiens
tggcttgcaccaccc

SEQ ID NO: 1137626 - DNA, 15 bp, Homo sapiens
atggcttgcaccacc

SEQ ID NO: 1137627 - DNA, 15 bp, Homo sapiens
aatggcttgcaccac

SEQ ID NO: 1137628 - DNA, 15 bp, Homo sapiens
aaatggcttgcacca

SEQ ID NO: 1137629 - DNA, 15 bp, Homo sapiens
gaaatggcttgcacc

SEQ ID NO: 1137630 - DNA, 15 bp, Homo sapiens
ggaaatggcttgcac

SEQ ID NO: 1137631 - DNA, 15 bp, Homo sapiens
aggaaatggcttgca

SEQ ID NO: 1137632 - DNA, 15 bp, Homo sapiens
aaggaaatggcttgc

SEQ ID NO: 1137633 - DNA, 15 bp, Homo sapiens
taaggaaatggcttg

SEQ ID NO: 1137634 - DNA, 15 bp, Homo sapiens
ctaaggaaatggctt

SEQ ID NO: 1137635 - DNA, 15 bp, Homo sapiens
gctaaggaaatggct

SEQ ID NO: 1137636 - DNA, 15 bp, Homo sapiens
agctaaggaaatggc

SEQ ID NO: 1137637 - DNA, 15 bp, Homo sapiens
cagctaaggaaatgg

SEQ ID NO: 1137638 - DNA, 15 bp, Homo sapiens
gcagctaaggaaatg

SEQ ID NO: 1137639 - DNA, 15 bp, Homo sapiens
ggcagctaaggaaat

SEQ ID NO: 1137640 - DNA, 15 bp, Homo sapiens
gggcagctaaggaaa

SEQ ID NO: 1137641 - DNA, 15 bp, Homo sapiens
ggggcagctaaggaa

SEQ ID NO: 1137642 - DNA, 15 bp, Homo sapiens
tggggcagctaagga

SEQ ID NO: 1137643 - DNA, 15 bp, Homo sapiens
ctggggcagctaagg

SEQ ID NO: 1137644 - DNA, 15 bp, Homo sapiens
gctggggcagctaag

SEQ ID NO: 1137645 - DNA, 15 bp, Homo sapiens
agctggggcagctaa

SEQ ID NO: 1137646 - DNA, 15 bp, Homo sapiens
cagctggggcagcta

SEQ ID NO: 1137647 - DNA, 15 bp, Homo sapiens
ccagctggggcagct

SEQ ID NO: 1137648 - DNA, 15 bp, Homo sapiens
accagctggggcagc

SEQ ID NO: 1137649 - DNA, 15 bp, Homo sapiens
caccagctggggcag

SEQ ID NO: 1137650 - DNA, 15 bp, Homo sapiens
acaccagctggggca

SEQ ID NO: 1137651 - DNA, 15 bp, Homo sapiens
gacaccagctggggc

SEQ ID NO: 1137652 - DNA, 15 bp, Homo sapiens
agacaccagctgggg

SEQ ID NO: 1137653 - DNA, 15 bp, Homo sapiens
gagacaccagctggg

SEQ ID NO: 1137654 - DNA, 15 bp, Homo sapiens
ggagacaccagctgg

SEQ ID NO: 1137655 - DNA, 15 bp, Homo sapiens
cggagacaccagctg

SEQ ID NO: 1137656 - DNA, 15 bp, Homo sapiens
acggagacaccagct

SEQ ID NO: 1137657 - DNA, 15 bp, Homo sapiens
tacggagacaccagc

SEQ ID NO: 1137658 - DNA, 15 bp, Homo sapiens
ctacggagacaccag

SEQ ID NO: 1137659 - DNA, 15 bp, Homo sapiens
cctacggagacacca

SEQ ID NO: 1137660 - DNA, 15 bp, Homo sapiens
acctacggagacacc

SEQ ID NO: 1137661 - DNA, 15 bp, Homo sapiens
gacctacggagacac

SEQ ID NO: 1137662 - DNA, 15 bp, Homo sapiens
tgacctacggagaca

SEQ ID NO: 1137663 - DNA, 15 bp, Homo sapiens
atgacctacggagac

SEQ ID NO: 1137664 - DNA, 15 bp, Homo sapiens
catgacctacggaga

SEQ ID NO: 1137665 - DNA, 15 bp, Homo sapiens
acatgacctacggag

SEQ ID NO: 1137666 - DNA, 15 bp, Homo sapiens
cacatgacctacgga

SEQ ID NO: 1137667 - DNA, 15 bp, Homo sapiens
gcacatgacctacgg

SEQ ID NO: 1137668 - DNA, 15 bp, Homo sapiens
ggcacatgacctacg

SEQ ID NO: 1137669 - DNA, 15 bp, Homo sapiens
aggcacatgacctac

SEQ ID NO: 1137670 - DNA, 15 bp, Homo sapiens
gaggcacatgaccta

SEQ ID NO: 1137671 - DNA, 15 bp, Homo sapiens
ggaggcacatgacct

SEQ ID NO: 1137672 - DNA, 15 bp, Homo sapiens
gggaggcacatgacc

SEQ ID NO: 1137673 - DNA, 15 bp, Homo sapiens
ggggaggcacatgac

SEQ ID NO: 1137674 - DNA, 15 bp, Homo sapiens
tggggaggcacatga

SEQ ID NO: 1137675 - DNA, 15 bp, Homo sapiens
ttggggaggcacatg

SEQ ID NO: 1137676 - DNA, 15 bp, Homo sapiens
cttggggaggcacat

SEQ ID NO: 1137677 - DNA, 15 bp, Homo sapiens
acttggggaggcaca

SEQ ID NO: 1137678 - DNA, 15 bp, Homo sapiens
gacttggggaggcac

SEQ ID NO: 1137679 - DNA, 15 bp, Homo sapiens
ggacttggggaggca

SEQ ID NO: 1137680 - DNA, 15 bp, Homo sapiens
tggacttggggaggc

SEQ ID NO: 1137681 - DNA, 15 bp, Homo sapiens
gtggacttggggagg

SEQ ID NO: 1137682 - DNA, 15 bp, Homo sapiens
agtggacttggggag

SEQ ID NO: 1137683 - DNA, 15 bp, Homo sapiens
cagtggacttgggga

SEQ ID NO: 1137684 - DNA, 15 bp, Homo sapiens
ccagtggacttgggg

SEQ ID NO: 1137685 - DNA, 15 bp, Homo sapiens
gccagtggacttggg

SEQ ID NO: 1137686 - DNA, 15 bp, Homo sapiens
agccagtggacttgg

SEQ ID NO: 1137687 - DNA, 15 bp, Homo sapiens
gagccagtggacttg

SEQ ID NO: 1137688 - DNA, 15 bp, Homo sapiens
agagccagtggactt

SEQ ID NO: 1137689 - DNA, 15 bp, Homo sapiens
cagagccagtggact

SEQ ID NO: 1137690 - DNA, 15 bp, Homo sapiens
tcagagccagtggac

SEQ ID NO: 1137691 - DNA, 15 bp, Homo sapiens
ctcagagccagtgga

SEQ ID NO: 1137692 - DNA, 15 bp, Homo sapiens
gctcagagccagtgg

SEQ ID NO: 1137693 - DNA, 15 bp, Homo sapiens
agctcagagccagtg

SEQ ID NO: 1137694 - DNA, 15 bp, Homo sapiens
gagctcagagccagt

SEQ ID NO: 1137695 - DNA, 15 bp, Homo sapiens
tgagctcagagccag

SEQ ID NO: 1137696 - DNA, 15 bp, Homo sapiens
ctgagctcagagcca

SEQ ID NO: 1137697 - DNA, 15 bp, Homo sapiens
gctgagctcagagcc

SEQ ID NO: 1137698 - DNA, 15 bp, Homo sapiens
agctgagctcagagc

SEQ ID NO: 1137699 - DNA, 15 bp, Homo sapiens
aagctgagctcagag

SEQ ID NO: 1137700 - DNA, 15 bp, Homo sapiens
taagctgagctcaga

SEQ ID NO: 1137701 - DNA, 15 bp, Homo sapiens
ctaagctgagctcag

SEQ ID NO: 1137702 - DNA, 15 bp, Homo sapiens
gctaagctgagctca

SEQ ID NO: 1137703 - DNA, 15 bp, Homo sapiens
tgctaagctgagctc

SEQ ID NO: 1137704 - DNA, 15 bp, Homo sapiens
gtgctaagctgagct

SEQ ID NO: 1137705 - DNA, 15 bp, Homo sapiens
agtgctaagctgagc

SEQ ID NO: 1137706 - DNA, 15 bp, Homo sapiens
tagtgctaagctgag

SEQ ID NO: 1137707 - DNA, 15 bp, Homo sapiens
ctagtgctaagctga

SEQ ID NO: 1137708 - DNA, 15 bp, Homo sapiens
tctagtgctaagctg

SEQ ID NO: 1137709 - DNA, 15 bp, Homo sapiens
ttctagtgctaagct

SEQ ID NO: 1137710 - DNA, 15 bp, Homo sapiens
tttctagtgctaagc

SEQ ID NO: 1137711 - DNA, 15 bp, Homo sapiens
atttctagtgctaag

SEQ ID NO: 1137712 - DNA, 15 bp, Homo sapiens
gatttctagtgctaa

SEQ ID NO: 1137713 - DNA, 15 bp, Homo sapiens
tgatttctagtgcta

SEQ ID NO: 1137714 - DNA, 15 bp, Homo sapiens
gtgatttctagtgct

SEQ ID NO: 1137715 - DNA, 15 bp, Homo sapiens
ggtgatttctagtgc

SEQ ID NO: 1137716 - DNA, 15 bp, Homo sapiens
aggtgatttctagtg

SEQ ID NO: 1137717 - DNA, 15 bp, Homo sapiens
taggtgatttctagt

SEQ ID NO: 1137718 - DNA, 15 bp, Homo sapiens
ctaggtgatttctag

SEQ ID NO: 1137719 - DNA, 15 bp, Homo sapiens
cctaggtgatttcta

SEQ ID NO: 1137720 - DNA, 15 bp, Homo sapiens
tcctaggtgatttct

SEQ ID NO: 1137721 - DNA, 15 bp, Homo sapiens
ctcctaggtgatttc

SEQ ID NO: 1137722 - DNA, 15 bp, Homo sapiens
actcctaggtgattt

SEQ ID NO: 1137723 - DNA, 15 bp, Homo sapiens
aactcctaggtgatt

SEQ ID NO: 1137724 - DNA, 15 bp, Homo sapiens
caactcctaggtgat

SEQ ID NO: 1137725 - DNA, 15 bp, Homo sapiens
gcaactcctaggtga

SEQ ID NO: 1137726 - DNA, 15 bp, Homo sapiens
tgcaactcctaggtg

SEQ ID NO: 1137727 - DNA, 15 bp, Homo sapiens
ctgcaactcctaggt

SEQ ID NO: 1137728 - DNA, 15 bp, Homo sapiens
actgcaactcctagg

SEQ ID NO: 1137729 - DNA, 15 bp, Homo sapiens
gactgcaactcctag

SEQ ID NO: 1137730 - DNA, 15 bp, Homo sapiens
ggactgcaactccta

SEQ ID NO: 1137731 - DNA, 15 bp, Homo sapiens
aggactgcaactcct

SEQ ID NO: 1137732 - DNA, 15 bp, Homo sapiens
aaggactgcaactcc

SEQ ID NO: 1137733 - DNA, 15 bp, Homo sapiens
caaggactgcaactc

SEQ ID NO: 1137734 - DNA, 15 bp, Homo sapiens
acaaggactgcaact

SEQ ID NO: 1137735 - DNA, 15 bp, Homo sapiens
cacaaggactgcaac

SEQ ID NO: 1137736 - DNA, 15 bp, Homo sapiens
ccacaaggactgcaa

SEQ ID NO: 1137737 - DNA, 15 bp, Homo sapiens
gccacaaggactgca

SEQ ID NO: 1137738 - DNA, 15 bp, Homo sapiens
ggccacaaggactgc

SEQ ID NO: 1137739 - DNA, 15 bp, Homo sapiens
aggccacaaggactg

SEQ ID NO: 1137740 - DNA, 15 bp, Homo sapiens
taggccacaaggact

SEQ ID NO: 1137741 - DNA, 15 bp, Homo sapiens
gtaggccacaaggac

SEQ ID NO: 1137742 - DNA, 15 bp, Homo sapiens
tgtaggccacaagga

SEQ ID NO: 1137743 - DNA, 15 bp, Homo sapiens
gtgtaggccacaagg

SEQ ID NO: 1137744 - DNA, 15 bp, Homo sapiens
agtgtaggccacaag

SEQ ID NO: 1137745 - DNA, 15 bp, Homo sapiens
cagtgtaggccacaa

SEQ ID NO: 1137746 - DNA, 15 bp, Homo sapiens
tcagtgtaggccaca

SEQ ID NO: 1137747 - DNA, 15 bp, Homo sapiens
gtcagtgtaggccac

SEQ ID NO: 1137748 - DNA, 15 bp, Homo sapiens
agtcagtgtaggcca

SEQ ID NO: 1137749 - DNA, 15 bp, Homo sapiens
aagtcagtgtaggcc

SEQ ID NO: 1137750 - DNA, 15 bp, Homo sapiens
aaagtcagtgtaggc

SEQ ID NO: 1137751 - DNA, 15 bp, Homo sapiens
gaaagtcagtgtagg

SEQ ID NO: 1137752 - DNA, 15 bp, Homo sapiens
tgaaagtcagtgtag

SEQ ID NO: 1137753 - DNA, 15 bp, Homo sapiens
ttgaaagtcagtgta

SEQ ID NO: 1137754 - DNA, 15 bp, Homo sapiens
cttgaaagtcagtgt

SEQ ID NO: 1137755 - DNA, 15 bp, Homo sapiens
acttgaaagtcagtg

SEQ ID NO: 1137756 - DNA, 15 bp, Homo sapiens
aacttgaaagtcagt

SEQ ID NO: 1137757 - DNA, 15 bp, Homo sapiens
aaacttgaaagtcag

SEQ ID NO: 1137758 - DNA, 15 bp, Homo sapiens
taaacttgaaagtca

SEQ ID NO: 1137759 - DNA, 15 bp, Homo sapiens
ataaacttgaaagtc

SEQ ID NO: 1137760 - DNA, 15 bp, Homo sapiens
aataaacttgaaagt

SEQ ID NO: 1137761 - DNA, 15 bp, Homo sapiens
aaataaacttgaaag

SEQ ID NO: 1137762 - DNA, 15 bp, Homo sapiens
taaataaacttgaaa

SEQ ID NO: 1137763 - DNA, 15 bp, Homo sapiens
ctaaataaacttgaa

SEQ ID NO: 1137764 - DNA, 15 bp, Homo sapiens
tctaaataaacttga

SEQ ID NO: 1137765 - DNA, 15 bp, Homo sapiens
ctctaaataaacttg

SEQ ID NO: 1137766 - DNA, 15 bp, Homo sapiens
gctctaaataaactt

SEQ ID NO: 1137767 - DNA, 15 bp, Homo sapiens
ggctctaaataaact

SEQ ID NO: 1137768 - DNA, 15 bp, Homo sapiens
gggctctaaataaac

SEQ ID NO: 1137769 - DNA, 15 bp, Homo sapiens
ggggctctaaataaa

SEQ ID NO: 1137770 - DNA, 15 bp, Homo sapiens
tggggctctaaataa

SEQ ID NO: 1137771 - DNA, 15 bp, Homo sapiens
ttggggctctaaata

SEQ ID NO: 1137772 - DNA, 15 bp, Homo sapiens
cttggggctctaaat

SEQ ID NO: 1137773 - DNA, 15 bp, Homo sapiens
ccttggggctctaaa

SEQ ID NO: 1137774 - DNA, 15 bp, Homo sapiens
gccttggggctctaa

SEQ ID NO: 1137775 - DNA, 15 bp, Homo sapiens
tgccttggggctcta

SEQ ID NO: 1137776 - DNA, 15 bp, Homo sapiens
atgccttggggctct

SEQ ID NO: 1137777 - DNA, 15 bp, Homo sapiens
aatgccttggggctc

SEQ ID NO: 1137778 - DNA, 15 bp, Homo sapiens
aaatgccttggggct

SEQ ID NO: 1137779 - DNA, 15 bp, Homo sapiens
aaaatgccttggggc

SEQ ID NO: 1137780 - DNA, 15 bp, Homo sapiens
taaaatgccttgggg

SEQ ID NO: 1137781 - DNA, 15 bp, Homo sapiens
ctaaaatgccttggg

SEQ ID NO: 1137782 - DNA, 15 bp, Homo sapiens
gctaaaatgccttgg

SEQ ID NO: 1137783 - DNA, 15 bp, Homo sapiens
ggctaaaatgccttg

SEQ ID NO: 1137784 - DNA, 15 bp, Homo sapiens
gggctaaaatgcctt

SEQ ID NO: 1137785 - DNA, 15 bp, Homo sapiens
tgggctaaaatgcct

SEQ ID NO: 1137786 - DNA, 15 bp, Homo sapiens
gtgggctaaaatgcc

SEQ ID NO: 1137787 - DNA, 15 bp, Homo sapiens
tgtgggctaaaatgc

SEQ ID NO: 1137788 - DNA, 15 bp, Homo sapiens
ctgtgggctaaaatg

SEQ ID NO: 1137789 - DNA, 15 bp, Homo sapiens
actgtgggctaaaat

SEQ ID NO: 1137790 - DNA, 15 bp, Homo sapiens
cactgtgggctaaaa

SEQ ID NO: 1137791 - DNA, 15 bp, Homo sapiens
tcactgtgggctaaa

SEQ ID NO: 1137792 - DNA, 15 bp, Homo sapiens
atcactgtgggctaa

SEQ ID NO: 1137793 - DNA, 15 bp, Homo sapiens
catcactgtgggcta

SEQ ID NO: 1137794 - DNA, 15 bp, Homo sapiens
tcatcactgtgggct

SEQ ID NO: 1137795 - DNA, 15 bp, Homo sapiens
ttcatcactgtgggc

SEQ ID NO: 1137796 - DNA, 15 bp, Homo sapiens
cttcatcactgtggg

SEQ ID NO: 1137797 - DNA, 15 bp, Homo sapiens
gcttcatcactgtgg

SEQ ID NO: 1137798 - DNA, 15 bp, Homo sapiens
agcttcatcactgtg

SEQ ID NO: 1137799 - DNA, 15 bp, Homo sapiens
aagcttcatcactgt

SEQ ID NO: 1137800 - DNA, 15 bp, Homo sapiens
caagcttcatcactg

SEQ ID NO: 1137801 - DNA, 15 bp, Homo sapiens
tcaagcttcatcact

SEQ ID NO: 1137802 - DNA, 15 bp, Homo sapiens
atcaagcttcatcac

SEQ ID NO: 1137803 - DNA, 15 bp, Homo sapiens
catcaagcttcatca

SEQ ID NO: 1137804 - DNA, 15 bp, Homo sapiens
ccatcaagcttcatc

SEQ ID NO: 1137805 - DNA, 15 bp, Homo sapiens
tccatcaagcttcat

SEQ ID NO: 1137806 - DNA, 15 bp, Homo sapiens
ttccatcaagcttca

SEQ ID NO: 1137807 - DNA, 15 bp, Homo sapiens
gttccatcaagcttc

SEQ ID NO: 1137808 - DNA, 15 bp, Homo sapiens
agttccatcaagctt

SEQ ID NO: 1137809 - DNA, 15 bp, Homo sapiens
gagttccatcaagct

SEQ ID NO: 1137810 - DNA, 15 bp, Homo sapiens
tgagttccatcaagc

SEQ ID NO: 1137811 - DNA, 15 bp, Homo sapiens
ttgagttccatcaag

SEQ ID NO: 1137812 - DNA, 15 bp, Homo sapiens
cttgagttccatcaa

SEQ ID NO: 1137813 - DNA, 15 bp, Homo sapiens
acttgagttccatca

SEQ ID NO: 1137814 - DNA, 15 bp, Homo sapiens
aacttgagttccatc

SEQ ID NO: 1137815 - DNA, 15 bp, Homo sapiens
gaacttgagttccat

SEQ ID NO: 1137816 - DNA, 15 bp, Homo sapiens
ggaacttgagttcca

SEQ ID NO: 1137817 - DNA, 15 bp, Homo sapiens
cggaacttgagttcc

SEQ ID NO: 1137818 - DNA, 15 bp, Homo sapiens
tcggaacttgagttc

SEQ ID NO: 1137819 - DNA, 15 bp, Homo sapiens
gtcggaacttgagtt

SEQ ID NO: 1137820 - DNA, 15 bp, Homo sapiens
tgtcggaacttgagt

SEQ ID NO: 1137821 - DNA, 15 bp, Homo sapiens
ttgtcggaacttgag

SEQ ID NO: 1137822 - DNA, 15 bp, Homo sapiens
gttgtcggaacttga

SEQ ID NO: 1137823 - DNA, 15 bp, Homo sapiens
agttgtcggaacttg

SEQ ID NO: 1137824 - DNA, 15 bp, Homo sapiens
cagttgtcggaactt

SEQ ID NO: 1137825 - DNA, 15 bp, Homo sapiens
ccagttgtcggaact

SEQ ID NO: 1137826 - DNA, 15 bp, Homo sapiens
cccagttgtcggaac

SEQ ID NO: 1137827 - DNA, 15 bp, Homo sapiens
tcccagttgtcggaa

SEQ ID NO: 1137828 - DNA, 15 bp, Homo sapiens
atcccagttgtcgga

SEQ ID NO: 1137829 - DNA, 15 bp, Homo sapiens
catcccagttgtcgg

SEQ ID NO: 1137830 - DNA, 15 bp, Homo sapiens
ccatcccagttgtcg

SEQ ID NO: 1137831 - DNA, 15 bp, Homo sapiens
cccatcccagttgtc

SEQ ID NO: 1137832 - DNA, 15 bp, Homo sapiens
acccatcccagttgt

SEQ ID NO: 1137833 - DNA, 15 bp, Homo sapiens
cacccatcccagttg

SEQ ID NO: 1137834 - DNA, 15 bp, Homo sapiens
tcacccatcccagtt

SEQ ID NO: 1137835 - DNA, 15 bp, Homo sapiens
atcacccatcccagt

SEQ ID NO: 1137836 - DNA, 15 bp, Homo sapiens
aatcacccatcccag

SEQ ID NO: 1137837 - DNA, 15 bp, Homo sapiens
gaatcacccatccca

SEQ ID NO: 1137838 - DNA, 15 bp, Homo sapiens
ggaatcacccatccc

SEQ ID NO: 1137839 - DNA, 15 bp, Homo sapiens
gggaatcacccatcc

SEQ ID NO: 1137840 - DNA, 15 bp, Homo sapiens
ggggaatcacccatc

SEQ ID NO: 1137841 - DNA, 15 bp, Homo sapiens
aggggaatcacccat

SEQ ID NO: 1137842 - DNA, 15 bp, Homo sapiens
gaggggaatcaccca

SEQ ID NO: 1137843 - DNA, 15 bp, Homo sapiens
agaggggaatcaccc

SEQ ID NO: 1137844 - DNA, 15 bp, Homo sapiens
cagaggggaatcacc

SEQ ID NO: 1137845 - DNA, 15 bp, Homo sapiens
ccagaggggaatcac

SEQ ID NO: 1137846 - DNA, 15 bp, Homo sapiens
gccagaggggaatca

SEQ ID NO: 1137847 - DNA, 15 bp, Homo sapiens
agccagaggggaatc

SEQ ID NO: 1137848 - DNA, 15 bp, Homo sapiens
tagccagaggggaat

SEQ ID NO: 1137849 - DNA, 15 bp, Homo sapiens
ctagccagaggggaa

SEQ ID NO: 1137850 - DNA, 15 bp, Homo sapiens
cctagccagagggga

SEQ ID NO: 1137851 - DNA, 15 bp, Homo sapiens
gcctagccagagggg

SEQ ID NO: 1137852 - DNA, 15 bp, Homo sapiens
ggcctagccagaggg

SEQ ID NO: 1137853 - DNA, 15 bp, Homo sapiens
aggcctagccagagg

SEQ ID NO: 1137854 - DNA, 15 bp, Homo sapiens
caggcctagccagag

SEQ ID NO: 1137855 - DNA, 15 bp, Homo sapiens
tcaggcctagccaga

SEQ ID NO: 1137856 - DNA, 15 bp, Homo sapiens
atcaggcctagccag

SEQ ID NO: 1137857 - DNA, 15 bp, Homo sapiens
gatcaggcctagcca

SEQ ID NO: 1137858 - DNA, 15 bp, Homo sapiens
agatcaggcctagcc

SEQ ID NO: 1137859 - DNA, 15 bp, Homo sapiens
tagatcaggcctagc

SEQ ID NO: 1137860 - DNA, 15 bp, Homo sapiens
ttagatcaggcctag

SEQ ID NO: 1137861 - DNA, 15 bp, Homo sapiens
tttagatcaggccta

SEQ ID NO: 1137862 - DNA, 15 bp, Homo sapiens
atttagatcaggcct

SEQ ID NO: 1137863 - DNA, 15 bp, Homo sapiens
catttagatcaggcc

SEQ ID NO: 1137864 - DNA, 15 bp, Homo sapiens
gcatttagatcaggc

SEQ ID NO: 1137865 - DNA, 15 bp, Homo sapiens
agcatttagatcagg

SEQ ID NO: 1137866 - DNA, 15 bp, Homo sapiens
gagcatttagatcag

SEQ ID NO: 1137867 - DNA, 15 bp, Homo sapiens
ggagcatttagatca

SEQ ID NO: 1137868 - DNA, 15 bp, Homo sapiens
gggagcatttagatc

SEQ ID NO: 1137869 - DNA, 15 bp, Homo sapiens
agggagcatttagat

SEQ ID NO: 1137870 - DNA, 15 bp, Homo sapiens
gagggagcatttaga

SEQ ID NO: 1137871 - DNA, 15 bp, Homo sapiens
agagggagcatttag

SEQ ID NO: 1137872 - DNA, 15 bp, Homo sapiens
cagagggagcattta

SEQ ID NO: 1137873 - DNA, 15 bp, Homo sapiens
acagagggagcattt

SEQ ID NO: 1137874 - DNA, 15 bp, Homo sapiens
cacagagggagcatt

SEQ ID NO: 1137875 - DNA, 15 bp, Homo sapiens
ccacagagggagcat

SEQ ID NO: 1137876 - DNA, 15 bp, Homo sapiens
cccacagagggagca

SEQ ID NO: 1137877 - DNA, 15 bp, Homo sapiens
gcccacagagggagc

SEQ ID NO: 1137878 - DNA, 15 bp, Homo sapiens
tgcccacagagggag

SEQ ID NO: 1137879 - DNA, 15 bp, Homo sapiens
ctgcccacagaggga

SEQ ID NO: 1137880 - DNA, 15 bp, Homo sapiens
cctgcccacagaggg

SEQ ID NO: 1137881 - DNA, 15 bp, Homo sapiens
acctgcccacagagg

SEQ ID NO: 1137882 - DNA, 15 bp, Homo sapiens
cacctgcccacagag

SEQ ID NO: 1137883 - DNA, 15 bp, Homo sapiens
acacctgcccacaga

SEQ ID NO: 1137884 - DNA, 15 bp, Homo sapiens
gacacctgcccacag

SEQ ID NO: 1137885 - DNA, 15 bp, Homo sapiens
tgacacctgcccaca

SEQ ID NO: 1137886 - DNA, 15 bp, Homo sapiens
ttgacacctgcccac

SEQ ID NO: 1137887 - DNA, 15 bp, Homo sapiens
gttgacacctgccca

SEQ ID NO: 1137888 - DNA, 15 bp, Homo sapiens
agttgacacctgccc

SEQ ID NO: 1137889 - DNA, 15 bp, Homo sapiens
cagttgacacctgcc

SEQ ID NO: 1137890 - DNA, 15 bp, Homo sapiens
tcagttgacacctgc

SEQ ID NO: 1137891 - DNA, 15 bp, Homo sapiens
ctcagttgacacctg

SEQ ID NO: 1137892 - DNA, 15 bp, Homo sapiens
actcagttgacacct

SEQ ID NO: 1137893 - DNA, 15 bp, Homo sapiens
aactcagttgacacc

SEQ ID NO: 1137894 - DNA, 15 bp, Homo sapiens
gaactcagttgacac

SEQ ID NO: 1137895 - DNA, 15 bp, Homo sapiens
tgaactcagttgaca

SEQ ID NO: 1137896 - DNA, 15 bp, Homo sapiens
ctgaactcagttgac

SEQ ID NO: 1137897 - DNA, 15 bp, Homo sapiens
gctgaactcagttga

SEQ ID NO: 1137898 - DNA, 15 bp, Homo sapiens
ggctgaactcagttg

SEQ ID NO: 1137899 - DNA, 15 bp, Homo sapiens
gggctgaactcagtt

SEQ ID NO: 1137900 - DNA, 15 bp, Homo sapiens
tgggctgaactcagt

SEQ ID NO: 1137901 - DNA, 15 bp, Homo sapiens
ctgggctgaactcag

SEQ ID NO: 1137902 - DNA, 15 bp, Homo sapiens
gctgggctgaactca

SEQ ID NO: 1137903 - DNA, 15 bp, Homo sapiens
agctgggctgaactc

SEQ ID NO: 1137904 - DNA, 15 bp, Homo sapiens
aagctgggctgaact

SEQ ID NO: 1137905 - DNA, 15 bp, Homo sapiens
aaagctgggctgaac

SEQ ID NO: 1137906 - DNA, 15 bp, Homo sapiens
caaagctgggctgaa

SEQ ID NO: 1137907 - DNA, 15 bp, Homo sapiens
gcaaagctgggctga

SEQ ID NO: 1137908 - DNA, 15 bp, Homo sapiens
agcaaagctgggctg

SEQ ID NO: 1137909 - DNA, 15 bp, Homo sapiens
aagcaaagctgggct

SEQ ID NO: 1137910 - DNA, 15 bp, Homo sapiens
aaagcaaagctgggc

SEQ ID NO: 1137911 - DNA, 15 bp, Homo sapiens
taaagcaaagctggg

SEQ ID NO: 1137912 - DNA, 15 bp, Homo sapiens
ataaagcaaagctgg

SEQ ID NO: 1137913 - DNA, 15 bp, Homo sapiens
tataaagcaaagctg

SEQ ID NO: 1137914 - DNA, 15 bp, Homo sapiens
gtataaagcaaagct

SEQ ID NO: 1137915 - DNA, 15 bp, Homo sapiens
agtataaagcaaagc

SEQ ID NO: 1137916 - DNA, 15 bp, Homo sapiens
cagtataaagcaaag

SEQ ID NO: 1137917 - DNA, 15 bp, Homo sapiens
acagtataaagcaaa

SEQ ID NO: 1137918 - DNA, 15 bp, Homo sapiens
cacagtataaagcaa

SEQ ID NO: 1137919 - DNA, 15 bp, Homo sapiens
tcacagtataaagca

SEQ ID NO: 1137920 - DNA, 15 bp, Homo sapiens
gtcacagtataaagc

SEQ ID NO: 1137921 - DNA, 15 bp, Homo sapiens
tgtcacagtataaag

SEQ ID NO: 1137922 - DNA, 15 bp, Homo sapiens
ctgtcacagtataaa

SEQ ID NO: 1137923 - DNA, 15 bp, Homo sapiens
cctgtcacagtataa

SEQ ID NO: 1137924 - DNA, 15 bp, Homo sapiens
ccctgtcacagtata

SEQ ID NO: 1137925 - DNA, 15 bp, Homo sapiens
tccctgtcacagtat

SEQ ID NO: 1137926 - DNA, 15 bp, Homo sapiens
ttccctgtcacagta

SEQ ID NO: 1137927 - DNA, 15 bp, Homo sapiens
cttccctgtcacagt

SEQ ID NO: 1137928 - DNA, 15 bp, Homo sapiens
gcttccctgtcacag

SEQ ID NO: 1137929 - DNA, 15 bp, Homo sapiens
tgcttccctgtcaca

SEQ ID NO: 1137930 - DNA, 15 bp, Homo sapiens
gtgcttccctgtcac

SEQ ID NO: 1137931 - DNA, 15 bp, Homo sapiens
agtgcttccctgtca

SEQ ID NO: 1137932 - DNA, 15 bp, Homo sapiens
cagtgcttccctgtc

SEQ ID NO: 1137933 - DNA, 15 bp, Homo sapiens
tcagtgcttccctgt

SEQ ID NO: 1137934 - DNA, 15 bp, Homo sapiens
ctcagtgcttccctg

SEQ ID NO: 1137935 - DNA, 15 bp, Homo sapiens
actcagtgcttccct

SEQ ID NO: 1137936 - DNA, 15 bp, Homo sapiens
aactcagtgcttccc

SEQ ID NO: 1137937 - DNA, 15 bp, Homo sapiens
gaactcagtgcttcc

SEQ ID NO: 1137938 - DNA, 15 bp, Homo sapiens
tgaactcagtgcttc

SEQ ID NO: 1137939 - DNA, 15 bp, Homo sapiens
ttgaactcagtgctt

SEQ ID NO: 1137940 - DNA, 15 bp, Homo sapiens
attgaactcagtgct

SEQ ID NO: 1137941 - DNA, 15 bp, Homo sapiens
cattgaactcagtgc

SEQ ID NO: 1137942 - DNA, 15 bp, Homo sapiens
gcattgaactcagtg

SEQ ID NO: 1137943 - DNA, 15 bp, Homo sapiens
tgcattgaactcagt

SEQ ID NO: 1137944 - DNA, 15 bp, Homo sapiens
gtgcattgaactcag

SEQ ID NO: 1137945 - DNA, 15 bp, Homo sapiens
tgtgcattgaactca

SEQ ID NO: 1137946 - DNA, 15 bp, Homo sapiens
ctgtgcattgaactc

SEQ ID NO: 1137947 - DNA, 15 bp, Homo sapiens
actgtgcattgaact

SEQ ID NO: 1137948 - DNA, 15 bp, Homo sapiens
gactgtgcattgaac

SEQ ID NO: 1137949 - DNA, 15 bp, Homo sapiens
agactgtgcattgaa

SEQ ID NO: 1137950 - DNA, 15 bp, Homo sapiens
gagactgtgcattga

SEQ ID NO: 1137951 - DNA, 15 bp, Homo sapiens
tgagactgtgcattg

SEQ ID NO: 1137952 - DNA, 15 bp, Homo sapiens
gtgagactgtgcatt

SEQ ID NO: 1137953 - DNA, 15 bp, Homo sapiens
tgtgagactgtgcat

SEQ ID NO: 1137954 - DNA, 15 bp, Homo sapiens
ttgtgagactgtgca

SEQ ID NO: 1137955 - DNA, 15 bp, Homo sapiens
attgtgagactgtgc

SEQ ID NO: 1137956 - DNA, 15 bp, Homo sapiens
gattgtgagactgtg

SEQ ID NO: 1137957 - DNA, 15 bp, Homo sapiens
agattgtgagactgt

SEQ ID NO: 1137958 - DNA, 15 bp, Homo sapiens
gagattgtgagactg

SEQ ID NO: 1137959 - DNA, 15 bp, Homo sapiens
agagattgtgagact

SEQ ID NO: 1137960 - DNA, 15 bp, Homo sapiens
cagagattgtgagac

SEQ ID NO: 1137961 - DNA, 15 bp, Homo sapiens
acagagattgtgaga

SEQ ID NO: 1137962 - DNA, 15 bp, Homo sapiens
cacagagattgtgag

SEQ ID NO: 1137963 - DNA, 15 bp, Homo sapiens
gcacagagattgtga

SEQ ID NO: 1137964 - DNA, 15 bp, Homo sapiens
agcacagagattgtg

SEQ ID NO: 1137965 - DNA, 15 bp, Homo sapiens
gagcacagagattgt

SEQ ID NO: 1137966 - DNA, 15 bp, Homo sapiens
agagcacagagattg

SEQ ID NO: 1137967 - DNA, 15 bp, Homo sapiens
gagagcacagagatt

SEQ ID NO: 1137968 - DNA, 15 bp, Homo sapiens
ggagagcacagagat

SEQ ID NO: 1137969 - DNA, 15 bp, Homo sapiens
gggagagcacagaga

SEQ ID NO: 1137970 - DNA, 15 bp, Homo sapiens
agggagagcacagag

SEQ ID NO: 1137971 - DNA, 15 bp, Homo sapiens
gagggagagcacaga

SEQ ID NO: 1137972 - DNA, 15 bp, Homo sapiens
agagggagagcacag

SEQ ID NO: 1137973 - DNA, 15 bp, Homo sapiens
gagagggagagcaca

SEQ ID NO: 1137974 - DNA, 15 bp, Homo sapiens
ggagagggagagcac

SEQ ID NO: 1137975 - DNA, 15 bp, Homo sapiens
gggagagggagagca

SEQ ID NO: 1137976 - DNA, 15 bp, Homo sapiens
tgggagagggagagc

SEQ ID NO: 1137977 - DNA, 15 bp, Homo sapiens
ttgggagagggagag

SEQ ID NO: 1137978 - DNA, 15 bp, Homo sapiens
tttgggagagggaga

SEQ ID NO: 1137979 - DNA, 15 bp, Homo sapiens
gtttgggagagggag

SEQ ID NO: 1137980 - DNA, 15 bp, Homo sapiens
tgtttgggagaggga

SEQ ID NO: 1137981 - DNA, 15 bp, Homo sapiens
gtgtttgggagaggg

SEQ ID NO: 1137982 - DNA, 15 bp, Homo sapiens
tgtgtttgggagagg

SEQ ID NO: 1137983 - DNA, 15 bp, Homo sapiens
atgtgtttgggagag

SEQ ID NO: 1137984 - DNA, 15 bp, Homo sapiens
tatgtgtttgggaga

SEQ ID NO: 1137985 - DNA, 15 bp, Homo sapiens
ctatgtgtttgggag

SEQ ID NO: 1137986 - DNA, 15 bp, Homo sapiens
gctatgtgtttggga

SEQ ID NO: 1137987 - DNA, 15 bp, Homo sapiens
agctatgtgtttggg

SEQ ID NO: 1137988 - DNA, 15 bp, Homo sapiens
aagctatgtgtttgg

SEQ ID NO: 1137989 - DNA, 15 bp, Homo sapiens
aaagctatgtgtttg

SEQ ID NO: 1137990 - DNA, 15 bp, Homo sapiens
aaaagctatgtgttt

SEQ ID NO: 1137991 - DNA, 15 bp, Homo sapiens
gaaaagctatgtgtt

SEQ ID NO: 1137992 - DNA, 15 bp, Homo sapiens
agaaaagctatgtgt

SEQ ID NO: 1137993 - DNA, 15 bp, Homo sapiens
gagaaaagctatgtg

SEQ ID NO: 1137994 - DNA, 15 bp, Homo sapiens
agagaaaagctatgt

SEQ ID NO: 1137995 - DNA, 15 bp, Homo sapiens
gagagaaaagctatg

SEQ ID NO: 1137996 - DNA, 15 bp, Homo sapiens
ggagagaaaagctat

SEQ ID NO: 1137997 - DNA, 15 bp, Homo sapiens
cggagagaaaagcta

SEQ ID NO: 1137998 - DNA, 15 bp, Homo sapiens
gcggagagaaaagct

SEQ ID NO: 1137999 - DNA, 15 bp, Homo sapiens
tgcggagagaaaagc

SEQ ID NO: 1138000 - DNA, 15 bp, Homo sapiens
gtgcggagagaaaag

SEQ ID NO: 1138001 - DNA, 15 bp, Homo sapiens
tgtgcggagagaaaa

SEQ ID NO: 1138002 - DNA, 15 bp, Homo sapiens
ttgtgcggagagaaa

SEQ ID NO: 1138003 - DNA, 15 bp, Homo sapiens
attgtgcggagagaa

SEQ ID NO: 1138004 - DNA, 15 bp, Homo sapiens
cattgtgcggagaga

SEQ ID NO: 1138005 - DNA, 15 bp, Homo sapiens
acattgtgcggagag

SEQ ID NO: 1138006 - DNA, 15 bp, Homo sapiens
cacattgtgcggaga

SEQ ID NO: 1138007 - DNA, 15 bp, Homo sapiens
ccacattgtgcggag

SEQ ID NO: 1138008 - DNA, 15 bp, Homo sapiens
gccacattgtgcgga

SEQ ID NO: 1138009 - DNA, 15 bp, Homo sapiens
ggccacattgtgcgg

SEQ ID NO: 1138010 - DNA, 15 bp, Homo sapiens
tggccacattgtgcg

SEQ ID NO: 1138011 - DNA, 15 bp, Homo sapiens
gtggccacattgtgc

SEQ ID NO: 1138012 - DNA, 15 bp, Homo sapiens
agtggccacattgtg

SEQ ID NO: 1138013 - DNA, 15 bp, Homo sapiens
cagtggccacattgt

SEQ ID NO: 1138014 - DNA, 15 bp, Homo sapiens
gcagtggccacattg

SEQ ID NO: 1138015 - DNA, 15 bp, Homo sapiens
agcagtggccacatt

SEQ ID NO: 1138016 - DNA, 15 bp, Homo sapiens
cagcagtggccacat

SEQ ID NO: 1138017 - DNA, 15 bp, Homo sapiens
ccagcagtggccaca

SEQ ID NO: 1138018 - DNA, 15 bp, Homo sapiens
cccagcagtggccac

SEQ ID NO: 1138019 - DNA, 15 bp, Homo sapiens
tcccagcagtggcca

SEQ ID NO: 1138020 - DNA, 15 bp, Homo sapiens
ctcccagcagtggcc

SEQ ID NO: 1138021 - DNA, 15 bp, Homo sapiens
cctcccagcagtggc

SEQ ID NO: 1138022 - DNA, 15 bp, Homo sapiens
tcctcccagcagtgg

SEQ ID NO: 1138023 - DNA, 15 bp, Homo sapiens
atcctcccagcagtg

SEQ ID NO: 1138024 - DNA, 15 bp, Homo sapiens
catcctcccagcagt

SEQ ID NO: 1138025 - DNA, 15 bp, Homo sapiens
tcatcctcccagcag

SEQ ID NO: 1138026 - DNA, 15 bp, Homo sapiens
cttcatcctcccagc

SEQ ID NO: 1138027 - DNA, 15 bp, Homo sapiens
ccttcatcctcccag

SEQ ID NO: 1138028 - DNA, 15 bp, Homo sapiens
cccttcatcctccca

SEQ ID NO: 1138029 - DNA, 15 bp, Homo sapiens
acccttcatcctccc

SEQ ID NO: 1138030 - DNA, 15 bp, Homo sapiens
cacccttcatcctcc

SEQ ID NO: 1138031 - DNA, 15 bp, Homo sapiens
ccacccttcatcctc

SEQ ID NO: 1138032 - DNA, 15 bp, Homo sapiens
gccacccttcatcct

SEQ ID NO: 1138033 - DNA, 15 bp, Homo sapiens
tgccacccttcatcc

SEQ ID NO: 1138034 - DNA, 15 bp, Homo sapiens
atgccacccttcatc

SEQ ID NO: 1138035 - DNA, 15 bp, Homo sapiens
gatgccacccttcat

SEQ ID NO: 1138036 - DNA, 15 bp, Homo sapiens
tgatgccacccttca

SEQ ID NO: 1138037 - DNA, 15 bp, Homo sapiens
ctgatgccacccttc

SEQ ID NO: 1138038 - DNA, 15 bp, Homo sapiens
gctgatgccaccctt

SEQ ID NO: 1138039 - DNA, 15 bp, Homo sapiens
tgctgatgccaccct

SEQ ID NO: 1138040 - DNA, 15 bp, Homo sapiens
ttgctgatgccaccc

SEQ ID NO: 1138041 - DNA, 15 bp, Homo sapiens
attgctgatgccacc

SEQ ID NO: 1138042 - DNA, 15 bp, Homo sapiens
aattgctgatgccac

SEQ ID NO: 1138043 - DNA, 15 bp, Homo sapiens
gaattgctgatgcca

SEQ ID NO: 1138044 - DNA, 15 bp, Homo sapiens
tgaattgctgatgcc

SEQ ID NO: 1138045 - DNA, 15 bp, Homo sapiens
ttgaattgctgatgc

SEQ ID NO: 1138046 - DNA, 15 bp, Homo sapiens
cttgaattgctgatg

SEQ ID NO: 1138047 - DNA, 15 bp, Homo sapiens
tcttgaattgctgat

SEQ ID NO: 1138048 - DNA, 15 bp, Homo sapiens
gtcttgaattgctga

SEQ ID NO: 1138049 - DNA, 15 bp, Homo sapiens
agtcttgaattgctg

SEQ ID NO: 1138050 - DNA, 15 bp, Homo sapiens
cagtcttgaattgct

SEQ ID NO: 1138051 - DNA, 15 bp, Homo sapiens
acagtcttgaattgc

SEQ ID NO: 1138052 - DNA, 15 bp, Homo sapiens
gacagtcttgaattg

SEQ ID NO: 1138053 - DNA, 15 bp, Homo sapiens
agacagtcttgaatt

SEQ ID NO: 1138054 - DNA, 15 bp, Homo sapiens
aagacagtcttgaat

SEQ ID NO: 1138055 - DNA, 15 bp, Homo sapiens
aaagacagtcttgaa

SEQ ID NO: 1138056 - DNA, 15 bp, Homo sapiens
gaaagacagtcttga

SEQ ID NO: 1138057 - DNA, 15 bp, Homo sapiens
ggaaagacagtcttg

SEQ ID NO: 1138058 - DNA, 15 bp, Homo sapiens
aggaaagacagtctt

SEQ ID NO: 1138059 - DNA, 15 bp, Homo sapiens
taggaaagacagtct

SEQ ID NO: 1138060 - DNA, 15 bp, Homo sapiens
gtaggaaagacagtc

SEQ ID NO: 1138061 - DNA, 15 bp, Homo sapiens
ggtaggaaagacagt

SEQ ID NO: 1138062 - DNA, 15 bp, Homo sapiens
gggtaggaaagacag

SEQ ID NO: 1138063 - DNA, 15 bp, Homo sapiens
agggtaggaaagaca

SEQ ID NO: 1138064 - DNA, 15 bp, Homo sapiens
gagggtaggaaagac

SEQ ID NO: 1138065 - DNA, 15 bp, Homo sapiens
agagggtaggaaaga

SEQ ID NO: 1138066 - DNA, 15 bp, Homo sapiens
aagagggtaggaaag

SEQ ID NO: 1138067 - DNA, 15 bp, Homo sapiens
gaagagggtaggaaa

SEQ ID NO: 1138068 - DNA, 15 bp, Homo sapiens
tgaagagggtaggaa

SEQ ID NO: 1138069 - DNA, 15 bp, Homo sapiens
ttgaagagggtagga

SEQ ID NO: 1138070 - DNA, 15 bp, Homo sapiens
attgaagagggtagg

SEQ ID NO: 1138071 - DNA, 15 bp, Homo sapiens
cattgaagagggtag

SEQ ID NO: 1138072 - DNA, 15 bp, Homo sapiens
gcattgaagagggta

SEQ ID NO: 1138073 - DNA, 15 bp, Homo sapiens
ggcattgaagagggt

SEQ ID NO: 1138074 - DNA, 15 bp, Homo sapiens
aggcattgaagaggg

SEQ ID NO: 1138075 - DNA, 15 bp, Homo sapiens
gaggcattgaagagg

SEQ ID NO: 1138076 - DNA, 15 bp, Homo sapiens
agaggcattgaagag

SEQ ID NO: 1138077 - DNA, 15 bp, Homo sapiens
aagaggcattgaaga

SEQ ID NO: 1138078 - DNA, 15 bp, Homo sapiens
aaagaggcattgaag

SEQ ID NO: 1138079 - DNA, 15 bp, Homo sapiens
gaaagaggcattgaa

SEQ ID NO: 1138080 - DNA, 15 bp, Homo sapiens
tgaaagaggcattga

SEQ ID NO: 1138081 - DNA, 15 bp, Homo sapiens
ctgaaagaggcattg

SEQ ID NO: 1138082 - DNA, 15 bp, Homo sapiens
gctgaaagaggcatt

SEQ ID NO: 1138083 - DNA, 15 bp, Homo sapiens
cgctgaaagaggcat

SEQ ID NO: 1138084 - DNA, 15 bp, Homo sapiens
tcgctgaaagaggca

SEQ ID NO: 1138085 - DNA, 15 bp, Homo sapiens
atcgctgaaagaggc

SEQ ID NO: 1138086 - DNA, 15 bp, Homo sapiens
tatcgctgaaagagg

SEQ ID NO: 1138087 - DNA, 15 bp, Homo sapiens
atatcgctgaaagag

SEQ ID NO: 1138088 - DNA, 15 bp, Homo sapiens
catatcgctgaaaga

SEQ ID NO: 1138089 - DNA, 15 bp, Homo sapiens
tcatatcgctgaaag

SEQ ID NO: 1138090 - DNA, 15 bp, Homo sapiens
ttcatatcgctgaaa

SEQ ID NO: 1138091 - DNA, 15 bp, Homo sapiens
cttcatatcgctgaa

SEQ ID NO: 1138092 - DNA, 15 bp, Homo sapiens
acttcatatcgctga

SEQ ID NO: 1138093 - DNA, 15 bp, Homo sapiens
aacttcatatcgctg

SEQ ID NO: 1138094 - DNA, 15 bp, Homo sapiens
taacttcatatcgct

SEQ ID NO: 1138095 - DNA, 15 bp, Homo sapiens
ttaacttcatatcgc

SEQ ID NO: 1138096 - DNA, 15 bp, Homo sapiens
tttaacttcatatcg

SEQ ID NO: 1138097 - DNA, 15 bp, Homo sapiens
gttttaacttcatat

SEQ ID NO: 1138098 - DNA, 15 bp, Homo sapiens
agttttaacttcata

SEQ ID NO: 1138099 - DNA, 15 bp, Homo sapiens
tagttttaacttcat

SEQ ID NO: 1138100 - DNA, 15 bp, Homo sapiens
ctagttttaacttca

SEQ ID NO: 1138101 - DNA, 15 bp, Homo sapiens
cctagttttaacttc

SEQ ID NO: 1138102 - DNA, 15 bp, Homo sapiens
tcctagttttaactt

SEQ ID NO: 1138103 - DNA, 15 bp, Homo sapiens
ttcctagttttaact

SEQ ID NO: 1138104 - DNA, 15 bp, Homo sapiens
gttcctagttttaac

SEQ ID NO: 1138105 - DNA, 15 bp, Homo sapiens
agttcctagttttaa

SEQ ID NO: 1138106 - DNA, 15 bp, Homo sapiens
tagttcctagtttta

SEQ ID NO: 1138107 - DNA, 15 bp, Homo sapiens
atagttcctagtttt

SEQ ID NO: 1138108 - DNA, 15 bp, Homo sapiens
catagttcctagttt

SEQ ID NO: 1138109 - DNA, 15 bp, Homo sapiens
tcatagttcctagtt

SEQ ID NO: 1138110 - DNA, 15 bp, Homo sapiens
ctcatagttcctagt

SEQ ID NO: 1138111 - DNA, 15 bp, Homo sapiens
actcatagttcctag

SEQ ID NO: 1138112 - DNA, 15 bp, Homo sapiens
cactcatagttccta

SEQ ID NO: 1138113 - DNA, 15 bp, Homo sapiens
gcactcatagttcct

SEQ ID NO: 1138114 - DNA, 15 bp, Homo sapiens
agcactcatagttcc

SEQ ID NO: 1138115 - DNA, 15 bp, Homo sapiens
gagcactcatagttc

SEQ ID NO: 1138116 - DNA, 15 bp, Homo sapiens
tgagcactcatagtt

SEQ ID NO: 1138117 - DNA, 15 bp, Homo sapiens
atgagcactcatagt

SEQ ID NO: 1138118 - DNA, 15 bp, Homo sapiens
gatgagcactcatag

SEQ ID NO: 1138119 - DNA, 15 bp, Homo sapiens
agatgagcactcata

SEQ ID NO: 1138120 - DNA, 15 bp, Homo sapiens
cagatgagcactcat

SEQ ID NO: 1138121 - DNA, 15 bp, Homo sapiens
tcagatgagcactca

SEQ ID NO: 1138122 - DNA, 15 bp, Homo sapiens
atcagatgagcactc

SEQ ID NO: 1138123 - DNA, 15 bp, Homo sapiens
aatcagatgagcact

SEQ ID NO: 1138124 - DNA, 15 bp, Homo sapiens
aaatcagatgagcac

SEQ ID NO: 1138125 - DNA, 15 bp, Homo sapiens
aaaatcagatgagca

SEQ ID NO: 1138126 - DNA, 15 bp, Homo sapiens
aaaaatcagatgagc

SEQ ID NO: 1138127 - DNA, 15 bp, Homo sapiens
caaaaatcagatgag

SEQ ID NO: 1138128 - DNA, 15 bp, Homo sapiens
ccaaaaatcagatga

SEQ ID NO: 1138129 - DNA, 15 bp, Homo sapiens
gccaaaaatcagatg

SEQ ID NO: 1138130 - DNA, 15 bp, Homo sapiens
agccaaaaatcagat

SEQ ID NO: 1138131 - DNA, 15 bp, Homo sapiens
aagccaaaaatcaga

SEQ ID NO: 1138132 - DNA, 15 bp, Homo sapiens
aaagccaaaaatcag

SEQ ID NO: 1138133 - DNA, 15 bp, Homo sapiens
aaaagccaaaaatca

SEQ ID NO: 1138134 - DNA, 15 bp, Homo sapiens
taaaagccaaaaatc

SEQ ID NO: 1138135 - DNA, 15 bp, Homo sapiens
ataaaagccaaaaat

SEQ ID NO: 1138136 - DNA, 15 bp, Homo sapiens
tataaaagccaaaaa

SEQ ID NO: 1138137 - DNA, 15 bp, Homo sapiens
ttataaaagccaaaa

SEQ ID NO: 1138138 - DNA, 15 bp, Homo sapiens
tttataaaagccaaa

SEQ ID NO: 1138139 - DNA, 15 bp, Homo sapiens
ctttataaaagccaa

SEQ ID NO: 1138140 - DNA, 15 bp, Homo sapiens
actttataaaagcca

SEQ ID NO: 1138141 - DNA, 15 bp, Homo sapiens
aactttataaaagcc

SEQ ID NO: 1138142 - DNA, 15 bp, Homo sapiens
caactttataaaagc

SEQ ID NO: 1138143 - DNA, 15 bp, Homo sapiens
gcaactttataaaag

SEQ ID NO: 1138144 - DNA, 15 bp, Homo sapiens
agcaactttataaaa

SEQ ID NO: 1138145 - DNA, 15 bp, Homo sapiens
aagcaactttataaa

SEQ ID NO: 1138146 - DNA, 15 bp, Homo sapiens
aaagcaactttataa

SEQ ID NO: 1138147 - DNA, 15 bp, Homo sapiens
aaaagcaactttata

SEQ ID NO: 1138148 - DNA, 15 bp, Homo sapiens
aaaaagcaactttat

SEQ ID NO: 1138149 - DNA, 15 bp, Homo sapiens
caaaaagcaacttta

SEQ ID NO: 1138150 - DNA, 15 bp, Homo sapiens
acaaaaagcaacttt

SEQ ID NO: 1138151 - DNA, 15 bp, Homo sapiens
cacaaaaagcaactt

SEQ ID NO: 1138152 - DNA, 15 bp, Homo sapiens
acacaaaaagcaact

SEQ ID NO: 1138153 - DNA, 15 bp, Homo sapiens
tacacaaaaagcaac

SEQ ID NO: 1138154 - DNA, 15 bp, Homo sapiens
atacacaaaaagcaa

SEQ ID NO: 1138155 - DNA, 15 bp, Homo sapiens
tatacacaaaaagca

SEQ ID NO: 1138156 - DNA, 15 bp, Homo sapiens
ctatacacaaaaagc

SEQ ID NO: 1138157 - DNA, 15 bp, Homo sapiens
tctatacacaaaaag

SEQ ID NO: 1138158 - DNA, 15 bp, Homo sapiens
atctatacacaaaaa

SEQ ID NO: 1138159 - DNA, 15 bp, Homo sapiens
tatctatacacaaaa

SEQ ID NO: 1138160 - DNA, 15 bp, Homo sapiens
ctatctatacacaaa

SEQ ID NO: 1138161 - DNA, 15 bp, Homo sapiens
actatctatacacaa

SEQ ID NO: 1138162 - DNA, 15 bp, Homo sapiens
aactatctatacaca

SEQ ID NO: 1138163 - DNA, 15 bp, Homo sapiens
caactatctatacac

SEQ ID NO: 1138164 - DNA, 15 bp, Homo sapiens
acaactatctataca

SEQ ID NO: 1138165 - DNA, 15 bp, Homo sapiens
aacaactatctatac

SEQ ID NO: 1138166 - DNA, 15 bp, Homo sapiens
aaacaactatctata

SEQ ID NO: 1138167 - DNA, 15 bp, Homo sapiens
taaacaactatctat

SEQ ID NO: 1138168 - DNA, 15 bp, Homo sapiens
ttaaacaactatcta

SEQ ID NO: 1138169 - DNA, 15 bp, Homo sapiens
tttaaacaactatct

SEQ ID NO: 1138170 - DNA, 15 bp, Homo sapiens
atttaaacaactatc

SEQ ID NO: 1138171 - DNA, 15 bp, Homo sapiens
aatttaaacaactat

SEQ ID NO: 1138172 - DNA, 15 bp, Homo sapiens
aaatttaaacaacta

SEQ ID NO: 1138173 - DNA, 15 bp, Homo sapiens
taaatttaaacaact

SEQ ID NO: 1138174 - DNA, 15 bp, Homo sapiens
ctaaatttaaacaac

SEQ ID NO: 1138175 - DNA, 15 bp, Homo sapiens
actaaatttaaacaa

SEQ ID NO: 1138176 - DNA, 15 bp, Homo sapiens
cactaaatttaaaca

SEQ ID NO: 1138177 - DNA, 15 bp, Homo sapiens
acactaaatttaaac

SEQ ID NO: 1138178 - DNA, 15 bp, Homo sapiens
aacactaaatttaaa

SEQ ID NO: 1138179 - DNA, 15 bp, Homo sapiens
gaacactaaatttaa

SEQ ID NO: 1138180 - DNA, 15 bp, Homo sapiens
agaacactaaattta

SEQ ID NO: 1138181 - DNA, 15 bp, Homo sapiens
aagaacactaaattt

SEQ ID NO: 1138182 - DNA, 15 bp, Homo sapiens
caagaacactaaatt

SEQ ID NO: 1138183 - DNA, 15 bp, Homo sapiens
acaagaacactaaat

SEQ ID NO: 1138184 - DNA, 15 bp, Homo sapiens
tacaagaacactaaa

SEQ ID NO: 1138185 - DNA, 15 bp, Homo sapiens
ctacaagaacactaa

SEQ ID NO: 1138186 - DNA, 15 bp, Homo sapiens
tctacaagaacacta

SEQ ID NO: 1138187 - DNA, 15 bp, Homo sapiens
ctctacaagaacact

SEQ ID NO: 1138188 - DNA, 15 bp, Homo sapiens
tctctacaagaacac

SEQ ID NO: 1138189 - DNA, 15 bp, Homo sapiens
ctctctacaagaaca

SEQ ID NO: 1138190 - DNA, 15 bp, Homo sapiens
cctctctacaagaac

SEQ ID NO: 1138191 - DNA, 15 bp, Homo sapiens
ccctctctacaagaa

SEQ ID NO: 1138192 - DNA, 15 bp, Homo sapiens
tccctctctacaaga

SEQ ID NO: 1138193 - DNA, 15 bp, Homo sapiens
gtccctctctacaag

SEQ ID NO: 1138194 - DNA, 15 bp, Homo sapiens
tgtccctctctacaa

SEQ ID NO: 1138195 - DNA, 15 bp, Homo sapiens
ttgtccctctctaca

SEQ ID NO: 1138196 - DNA, 15 bp, Homo sapiens
attgtccctctctac

SEQ ID NO: 1138197 - DNA, 15 bp, Homo sapiens
gattgtccctctcta

SEQ ID NO: 1138198 - DNA, 15 bp, Homo sapiens
tgattgtccctctct

SEQ ID NO: 1138199 - DNA, 15 bp, Homo sapiens
ctgattgtccctctc

SEQ ID NO: 1138200 - DNA, 15 bp, Homo sapiens
actgattgtccctct

SEQ ID NO: 1138201 - DNA, 15 bp, Homo sapiens
tactgattgtccctc

SEQ ID NO: 1138202 - DNA, 15 bp, Homo sapiens
ctactgattgtccct

SEQ ID NO: 1138203 - DNA, 15 bp, Homo sapiens
tctactgattgtccc

SEQ ID NO: 1138204 - DNA, 15 bp, Homo sapiens
atctactgattgtcc

SEQ ID NO: 1138205 - DNA, 15 bp, Homo sapiens
gatctactgattgtc

SEQ ID NO: 1138206 - DNA, 15 bp, Homo sapiens
ggatctactgattgt

SEQ ID NO: 1138207 - DNA, 15 bp, Homo sapiens
aggatctactgattg

SEQ ID NO: 1138208 - DNA, 15 bp, Homo sapiens
aaggatctactgatt

SEQ ID NO: 1138209 - DNA, 15 bp, Homo sapiens
gaaggatctactgat

SEQ ID NO: 1138210 - DNA, 15 bp, Homo sapiens
agaaggatctactga

SEQ ID NO: 1138211 - DNA, 15 bp, Homo sapiens
tagaaggatctactg

SEQ ID NO: 1138212 - DNA, 15 bp, Homo sapiens
atagaaggatctact

SEQ ID NO: 1138213 - DNA, 15 bp, Homo sapiens
aatagaaggatctac

SEQ ID NO: 1138214 - DNA, 15 bp, Homo sapiens
gaatagaaggatcta

SEQ ID NO: 1138215 - DNA, 15 bp, Homo sapiens
tgaatagaaggatct

SEQ ID NO: 1138216 - DNA, 15 bp, Homo sapiens
ctgaatagaaggatc

SEQ ID NO: 1138217 - DNA, 15 bp, Homo sapiens
gctgaatagaaggat

SEQ ID NO: 1138218 - DNA, 15 bp, Homo sapiens
ggctgaatagaagga

SEQ ID NO: 1138219 - DNA, 15 bp, Homo sapiens
tggctgaatagaagg

SEQ ID NO: 1138220 - DNA, 15 bp, Homo sapiens
atggctgaatagaag

SEQ ID NO: 1138221 - DNA, 15 bp, Homo sapiens
gatggctgaatagaa

SEQ ID NO: 1138222 - DNA, 15 bp, Homo sapiens
agatggctgaataga

SEQ ID NO: 1138223 - DNA, 15 bp, Homo sapiens
aagatggctgaatag

SEQ ID NO: 1138224 - DNA, 15 bp, Homo sapiens
caagatggctgaata

SEQ ID NO: 1138225 - DNA, 15 bp, Homo sapiens
gcaagatggctgaat

SEQ ID NO: 1138226 - DNA, 15 bp, Homo sapiens
ggcaagatggctgaa

SEQ ID NO: 1138227 - DNA, 15 bp, Homo sapiens
gggcaagatggctga

SEQ ID NO: 1138228 - DNA, 15 bp, Homo sapiens
agggcaagatggctg

SEQ ID NO: 1138229 - DNA, 15 bp, Homo sapiens
cagggcaagatggct

SEQ ID NO: 1138230 - DNA, 15 bp, Homo sapiens
gcagggcaagatggc

SEQ ID NO: 1138231 - DNA, 15 bp, Homo sapiens
ggcagggcaagatgg

SEQ ID NO: 1138232 - DNA, 15 bp, Homo sapiens
gggcagggcaagatg

SEQ ID NO: 1138233 - DNA, 15 bp, Homo sapiens
agggcagggcaagat

SEQ ID NO: 1138234 - DNA, 15 bp, Homo sapiens
aagggcagggcaaga

SEQ ID NO: 1138235 - DNA, 15 bp, Homo sapiens
gaagggcagggcaag

SEQ ID NO: 1138236 - DNA, 15 bp, Homo sapiens
agaagggcagggcaa

SEQ ID NO: 1138237 - DNA, 15 bp, Homo sapiens
aagaagggcagggca

SEQ ID NO: 1138238 - DNA, 15 bp, Homo sapiens
gaagaagggcagggc

SEQ ID NO: 1138239 - DNA, 15 bp, Homo sapiens
agaagaagggcaggg

SEQ ID NO: 1138240 - DNA, 15 bp, Homo sapiens
gagaagaagggcagg

SEQ ID NO: 1138241 - DNA, 15 bp, Homo sapiens
agagaagaagggcag

SEQ ID NO: 1138242 - DNA, 15 bp, Homo sapiens
tagagaagaagggca

SEQ ID NO: 1138243 - DNA, 15 bp, Homo sapiens
gtagagaagaagggc

SEQ ID NO: 1138244 - DNA, 15 bp, Homo sapiens
ggtagagaagaaggg

SEQ ID NO: 1138245 - DNA, 15 bp, Homo sapiens
aggtagagaagaagg

SEQ ID NO: 1138246 - DNA, 15 bp, Homo sapiens
caggtagagaagaag

SEQ ID NO: 1138247 - DNA, 15 bp, Homo sapiens
acaggtagagaagaa

SEQ ID NO: 1138248 - DNA, 15 bp, Homo sapiens
cacaggtagagaaga

SEQ ID NO: 1138249 - DNA, 15 bp, Homo sapiens
ccacaggtagagaag

SEQ ID NO: 1138250 - DNA, 15 bp, Homo sapiens
accacaggtagagaa

SEQ ID NO: 1138251 - DNA, 15 bp, Homo sapiens
taccacaggtagaga

SEQ ID NO: 1138252 - DNA, 15 bp, Homo sapiens
ctaccacaggtagag

SEQ ID NO: 1138253 - DNA, 15 bp, Homo sapiens
actaccacaggtaga

SEQ ID NO: 1138254 - DNA, 15 bp, Homo sapiens
gactaccacaggtag

SEQ ID NO: 1138255 - DNA, 15 bp, Homo sapiens
agactaccacaggta

SEQ ID NO: 1138256 - DNA, 15 bp, Homo sapiens
aagactaccacaggt

SEQ ID NO: 1138257 - DNA, 15 bp, Homo sapiens
caagactaccacagg

SEQ ID NO: 1138258 - DNA, 15 bp, Homo sapiens
tcaagactaccacag

SEQ ID NO: 1138259 - DNA, 15 bp, Homo sapiens
gtcaagactaccaca

SEQ ID NO: 1138260 - DNA, 15 bp, Homo sapiens
agtcaagactaccac

SEQ ID NO: 1138261 - DNA, 15 bp, Homo sapiens
tagtcaagactacca

SEQ ID NO: 1138262 - DNA, 15 bp, Homo sapiens
atagtcaagactacc

SEQ ID NO: 1138263 - DNA, 15 bp, Homo sapiens
tatagtcaagactac

SEQ ID NO: 1138264 - DNA, 15 bp, Homo sapiens
atatagtcaagacta

SEQ ID NO: 1138265 - DNA, 15 bp, Homo sapiens
gatatagtcaagact

SEQ ID NO: 1138266 - DNA, 15 bp, Homo sapiens
agatatagtcaagac

SEQ ID NO: 1138267 - DNA, 15 bp, Homo sapiens
tagatatagtcaaga

SEQ ID NO: 1138268 - DNA, 15 bp, Homo sapiens
atagatatagtcaag

SEQ ID NO: 1138269 - DNA, 15 bp, Homo sapiens
aatagatatagtcaa

SEQ ID NO: 1138270 - DNA, 15 bp, Homo sapiens
aaatagatatagtca

SEQ ID NO: 1138271 - DNA, 15 bp, Homo sapiens
caaatagatatagtc

SEQ ID NO: 1138272 - DNA, 15 bp, Homo sapiens
acaaatagatatagt

SEQ ID NO: 1138273 - DNA, 15 bp, Homo sapiens
cacaaatagatatag

SEQ ID NO: 1138274 - DNA, 15 bp, Homo sapiens
acacaaatagatata

SEQ ID NO: 1138275 - DNA, 15 bp, Homo sapiens
tacacaaatagatat

SEQ ID NO: 1138276 - DNA, 15 bp, Homo sapiens
ctacacaaatagata

SEQ ID NO: 1138277 - DNA, 15 bp, Homo sapiens
tctacacaaatagat

SEQ ID NO: 1138278 - DNA, 15 bp, Homo sapiens
atctacacaaataga

SEQ ID NO: 1138279 - DNA, 15 bp, Homo sapiens
aatctacacaaatag

SEQ ID NO: 1138280 - DNA, 15 bp, Homo sapiens
aaatctacacaaata

SEQ ID NO: 1138281 - DNA, 15 bp, Homo sapiens
aaaatctacacaaat

SEQ ID NO: 1138282 - DNA, 15 bp, Homo sapiens
aaaaatctacacaaa

SEQ ID NO: 1138283 - DNA, 15 bp, Homo sapiens
aaaaaatctacacaa

SEQ ID NO: 1138284 - DNA, 15 bp, Homo sapiens
taaaaaatctacaca

SEQ ID NO: 1138285 - DNA, 15 bp, Homo sapiens
ctaaaaaatctacac

SEQ ID NO: 1138286 - DNA, 15 bp, Homo sapiens
actaaaaaatctaca

SEQ ID NO: 1138287 - DNA, 15 bp, Homo sapiens
cactaaaaaatctac

SEQ ID NO: 1138288 - DNA, 15 bp, Homo sapiens
ccactaaaaaatcta

SEQ ID NO: 1138289 - DNA, 15 bp, Homo sapiens
accactaaaaaatct

SEQ ID NO: 1138290 - DNA, 15 bp, Homo sapiens
gaccactaaaaaatc

SEQ ID NO: 1138291 - DNA, 15 bp, Homo sapiens
ggaccactaaaaaat

SEQ ID NO: 1138292 - DNA, 15 bp, Homo sapiens
aggaccactaaaaaa

SEQ ID NO: 1138293 - DNA, 15 bp, Homo sapiens
gaggaccactaaaaa

SEQ ID NO: 1138294 - DNA, 15 bp, Homo sapiens
agaggaccactaaaa

SEQ ID NO: 1138295 - DNA, 15 bp, Homo sapiens
cagaggaccactaaa

SEQ ID NO: 1138296 - DNA, 15 bp, Homo sapiens
tcagaggaccactaa

SEQ ID NO: 1138297 - DNA, 15 bp, Homo sapiens
ctcagaggaccacta

SEQ ID NO: 1138298 - DNA, 15 bp, Homo sapiens
actcagaggaccact

SEQ ID NO: 1138299 - DNA, 15 bp, Homo sapiens
tactcagaggaccac

SEQ ID NO: 1138300 - DNA, 15 bp, Homo sapiens
atactcagaggacca

SEQ ID NO: 1138301 - DNA, 15 bp, Homo sapiens
aatactcagaggacc

SEQ ID NO: 1138302 - DNA, 15 bp, Homo sapiens
caatactcagaggac

SEQ ID NO: 1138303 - DNA, 15 bp, Homo sapiens
gcaatactcagagga

SEQ ID NO: 1138304 - DNA, 15 bp, Homo sapiens
tgcaatactcagagg

SEQ ID NO: 1138305 - DNA, 15 bp, Homo sapiens
atgcaatactcagag

SEQ ID NO: 1138306 - DNA, 15 bp, Homo sapiens
aatgcaatactcaga

SEQ ID NO: 1138307 - DNA, 15 bp, Homo sapiens
taatgcaatactcag

SEQ ID NO: 1138308 - DNA, 15 bp, Homo sapiens
ataatgcaatactca

SEQ ID NO: 1138309 - DNA, 15 bp, Homo sapiens
tataatgcaatactc

SEQ ID NO: 1138310 - DNA, 15 bp, Homo sapiens
atataatgcaatact

SEQ ID NO: 1138311 - DNA, 15 bp, Homo sapiens
tatataatgcaatac

SEQ ID NO: 1138312 - DNA, 15 bp, Homo sapiens
atatataatgcaata

SEQ ID NO: 1138313 - DNA, 15 bp, Homo sapiens
tatatataatgcaat

SEQ ID NO: 1138314 - DNA, 15 bp, Homo sapiens
ttatatataatgcaa

SEQ ID NO: 1138315 - DNA, 15 bp, Homo sapiens
tttatatataatgca

SEQ ID NO: 1138316 - DNA, 15 bp, Homo sapiens
atttatatataatgc

SEQ ID NO: 1138317 - DNA, 15 bp, Homo sapiens
tatttatatataatg

SEQ ID NO: 1138318 - DNA, 15 bp, Homo sapiens
ttatttatatataat

SEQ ID NO: 1138319 - DNA, 15 bp, Homo sapiens
gttatttatatataa

SEQ ID NO: 1138320 - DNA, 15 bp, Homo sapiens
agttatttatatata

SEQ ID NO: 1138321 - DNA, 15 bp, Homo sapiens
aagttatttatatat

SEQ ID NO: 1138322 - DNA, 15 bp, Homo sapiens
taagttatttatata

SEQ ID NO: 1138323 - DNA, 15 bp, Homo sapiens
ataagttatttatat

SEQ ID NO: 1138324 - DNA, 15 bp, Homo sapiens
gataagttatttata

SEQ ID NO: 1138325 - DNA, 15 bp, Homo sapiens
tgataagttatttat

SEQ ID NO: 1138326 - DNA, 15 bp, Homo sapiens
atgataagttattta

SEQ ID NO: 1138327 - DNA, 15 bp, Homo sapiens
tatgataagttattt

SEQ ID NO: 1138328 - DNA, 15 bp, Homo sapiens
gtatgataagttatt

SEQ ID NO: 1138329 - DNA, 15 bp, Homo sapiens
agtatgataagttat

SEQ ID NO: 1138330 - DNA, 15 bp, Homo sapiens
aagtatgataagtta

SEQ ID NO: 1138331 - DNA, 15 bp, Homo sapiens
aaagtatgataagtt

SEQ ID NO: 1138332 - DNA, 15 bp, Homo sapiens
taaagtatgataagt

SEQ ID NO: 1138333 - DNA, 15 bp, Homo sapiens
gtaaagtatgataag

SEQ ID NO: 1138334 - DNA, 15 bp, Homo sapiens
agtaaagtatgataa

SEQ ID NO: 1138335 - DNA, 15 bp, Homo sapiens
tagtaaagtatgata

SEQ ID NO: 1138336 - DNA, 15 bp, Homo sapiens
atagtaaagtatgat

SEQ ID NO: 1138337 - DNA, 15 bp, Homo sapiens
aatagtaaagtatga

SEQ ID NO: 1138338 - DNA, 15 bp, Homo sapiens
aaatagtaaagtatg

SEQ ID NO: 1138339 - DNA, 15 bp, Homo sapiens
aaaatagtaaagtat

SEQ ID NO: 1138340 - DNA, 15 bp, Homo sapiens
gaaaatagtaaagta

SEQ ID NO: 1138341 - DNA, 15 bp, Homo sapiens
tgaaaatagtaaagt

SEQ ID NO: 1138342 - DNA, 15 bp, Homo sapiens
atgaaaatagtaaag

SEQ ID NO: 1138343 - DNA, 15 bp, Homo sapiens
gatgaaaatagtaaa

SEQ ID NO: 1138344 - DNA, 15 bp, Homo sapiens
tgatgaaaatagtaa

SEQ ID NO: 1138345 - DNA, 15 bp, Homo sapiens
atgatgaaaatagta

SEQ ID NO: 1138346 - DNA, 15 bp, Homo sapiens
aatgatgaaaatagt

SEQ ID NO: 1138347 - DNA, 15 bp, Homo sapiens
aaatgatgaaaatag

SEQ ID NO: 1138348 - DNA, 15 bp, Homo sapiens
aaaatgatgaaaata

SEQ ID NO: 1138349 - DNA, 15 bp, Homo sapiens
taaaatgatgaaaat

SEQ ID NO: 1138350 - DNA, 15 bp, Homo sapiens
gtaaaatgatgaaaa

SEQ ID NO: 1138351 - DNA, 15 bp, Homo sapiens
agtaaaatgatgaaa

SEQ ID NO: 1138352 - DNA, 15 bp, Homo sapiens
aagtaaaatgatgaa

SEQ ID NO: 1138353 - DNA, 15 bp, Homo sapiens
caagtaaaatgatga

SEQ ID NO: 1138354 - DNA, 15 bp, Homo sapiens
acaagtaaaatgatg

SEQ ID NO: 1138355 - DNA, 15 bp, Homo sapiens
aacaagtaaaatgat

SEQ ID NO: 1138356 - DNA, 15 bp, Homo sapiens
aaacaagtaaaatga

SEQ ID NO: 1138357 - DNA, 15 bp, Homo sapiens
caaacaagtaaaatg

SEQ ID NO: 1138358 - DNA, 15 bp, Homo sapiens
tcaaacaagtaaaat

SEQ ID NO: 1138359 - DNA, 15 bp, Homo sapiens
ctcaaacaagtaaaa

SEQ ID NO: 1138360 - DNA, 15 bp, Homo sapiens
actcaaacaagtaaa

SEQ ID NO: 1138361 - DNA, 15 bp, Homo sapiens
cactcaaacaagtaa

SEQ ID NO: 1138362 - DNA, 15 bp, Homo sapiens
tcactcaaacaagta

SEQ ID NO: 1138363 - DNA, 15 bp, Homo sapiens
ttcactcaaacaagt

SEQ ID NO: 1138364 - DNA, 15 bp, Homo sapiens
cttcactcaaacaag

SEQ ID NO: 1138365 - DNA, 15 bp, Homo sapiens
acttcactcaaacaa

SEQ ID NO: 1138366 - DNA, 15 bp, Homo sapiens
cacttcactcaaaca

SEQ ID NO: 1138367 - DNA, 15 bp, Homo sapiens
acacttcactcaaac

SEQ ID NO: 1138368 - DNA, 15 bp, Homo sapiens
tacacttcactcaaa

SEQ ID NO: 1138369 - DNA, 15 bp, Homo sapiens
ctacacttcactcaa

SEQ ID NO: 1138370 - DNA, 15 bp, Homo sapiens
tctacacttcactca

SEQ ID NO: 1138371 - DNA, 15 bp, Homo sapiens
ttctacacttcactc

SEQ ID NO: 1138372 - DNA, 15 bp, Homo sapiens
tttctacacttcact

SEQ ID NO: 1138373 - DNA, 15 bp, Homo sapiens
atttctacacttcac

SEQ ID NO: 1138374 - DNA, 15 bp, Homo sapiens
gatttctacacttca

SEQ ID NO: 1138375 - DNA, 15 bp, Homo sapiens
agatttctacacttc

SEQ ID NO: 1138376 - DNA, 15 bp, Homo sapiens
aagatttctacactt

SEQ ID NO: 1138377 - DNA, 15 bp, Homo sapiens
taagatttctacact

SEQ ID NO: 1138378 - DNA, 15 bp, Homo sapiens
ataagatttctacac

SEQ ID NO: 1138379 - DNA, 15 bp, Homo sapiens
gataagatttctaca

SEQ ID NO: 1138380 - DNA, 15 bp, Homo sapiens
agataagatttctac

SEQ ID NO: 1138381 - DNA, 15 bp, Homo sapiens
gagataagatttcta

SEQ ID NO: 1138382 - DNA, 15 bp, Homo sapiens
ggagataagatttct

SEQ ID NO: 1138383 - DNA, 15 bp, Homo sapiens
gggagataagatttc

SEQ ID NO: 1138384 - DNA, 15 bp, Homo sapiens
agggagataagattt

SEQ ID NO: 1138385 - DNA, 15 bp, Homo sapiens
aagggagataagatt

SEQ ID NO: 1138386 - DNA, 15 bp, Homo sapiens
taagggagataagat

SEQ ID NO: 1138387 - DNA, 15 bp, Homo sapiens
ataagggagataaga

SEQ ID NO: 1138388 - DNA, 15 bp, Homo sapiens
tataagggagataag

SEQ ID NO: 1138389 - DNA, 15 bp, Homo sapiens
atataagggagataa

SEQ ID NO: 1138390 - DNA, 15 bp, Homo sapiens
gatataagggagata

SEQ ID NO: 1138391 - DNA, 15 bp, Homo sapiens
ggatataagggagat

SEQ ID NO: 1138392 - DNA, 15 bp, Homo sapiens
gggatataagggaga

SEQ ID NO: 1138393 - DNA, 15 bp, Homo sapiens
agggatataagggag

SEQ ID NO: 1138394 - DNA, 15 bp, Homo sapiens
aagggatataaggga

SEQ ID NO: 1138395 - DNA, 15 bp, Homo sapiens
aaagggatataaggg

SEQ ID NO: 1138396 - DNA, 15 bp, Homo sapiens
taaagggatataagg

SEQ ID NO: 1138397 - DNA, 15 bp, Homo sapiens
gtaaagggatataag

SEQ ID NO: 1138398 - DNA, 15 bp, Homo sapiens
agtaaagggatataa

SEQ ID NO: 1138399 - DNA, 15 bp, Homo sapiens
gagtaaagggatata

SEQ ID NO: 1138400 - DNA, 15 bp, Homo sapiens
agagtaaagggatat

SEQ ID NO: 1138401 - DNA, 15 bp, Homo sapiens
gagagtaaagggata

SEQ ID NO: 1138402 - DNA, 15 bp, Homo sapiens
agagagtaaagggat

SEQ ID NO: 1138403 - DNA, 15 bp, Homo sapiens
gagagagtaaaggga

SEQ ID NO: 1138404 - DNA, 15 bp, Homo sapiens
agagagagtaaaggg

SEQ ID NO: 1138405 - DNA, 15 bp, Homo sapiens
gagagagagtaaagg

SEQ ID NO: 1138406 - DNA, 15 bp, Homo sapiens
tgagagagagtaaag

SEQ ID NO: 1138407 - DNA, 15 bp, Homo sapiens
atgagagagagtaaa

SEQ ID NO: 1138408 - DNA, 15 bp, Homo sapiens
aatgagagagagtaa

SEQ ID NO: 1138409 - DNA, 15 bp, Homo sapiens
gaatgagagagagta

SEQ ID NO: 1138410 - DNA, 15 bp, Homo sapiens
tgaatgagagagagt

SEQ ID NO: 1138411 - DNA, 15 bp, Homo sapiens
gtgaatgagagagag

SEQ ID NO: 1138412 - DNA, 15 bp, Homo sapiens
agtgaatgagagaga

SEQ ID NO: 1138413 - DNA, 15 bp, Homo sapiens
aagtgaatgagagag

SEQ ID NO: 1138414 - DNA, 15 bp, Homo sapiens
caagtgaatgagaga

SEQ ID NO: 1138415 - DNA, 15 bp, Homo sapiens
acaagtgaatgagag

SEQ ID NO: 1138416 - DNA, 15 bp, Homo sapiens
tacaagtgaatgaga

SEQ ID NO: 1138417 - DNA, 15 bp, Homo sapiens
ttacaagtgaatgag

SEQ ID NO: 1138418 - DNA, 15 bp, Homo sapiens
attacaagtgaatga

SEQ ID NO: 1138419 - DNA, 15 bp, Homo sapiens
aattacaagtgaatg

SEQ ID NO: 1138420 - DNA, 15 bp, Homo sapiens
caattacaagtgaat

SEQ ID NO: 1138421 - DNA, 15 bp, Homo sapiens
acaattacaagtgaa

SEQ ID NO: 1138422 - DNA, 15 bp, Homo sapiens
gacaattacaagtga

SEQ ID NO: 1138423 - DNA, 15 bp, Homo sapiens
agacaattacaagtg

SEQ ID NO: 1138424 - DNA, 15 bp, Homo sapiens
aagacaattacaagt

SEQ ID NO: 1138425 - DNA, 15 bp, Homo sapiens
taagacaattacaag

SEQ ID NO: 1138426 - DNA, 15 bp, Homo sapiens
ataagacaattacaa

SEQ ID NO: 1138427 - DNA, 15 bp, Homo sapiens
cataagacaattaca

SEQ ID NO: 1138428 - DNA, 15 bp, Homo sapiens
acataagacaattac

SEQ ID NO: 1138429 - DNA, 15 bp, Homo sapiens
tacataagacaatta

SEQ ID NO: 1138430 - DNA, 15 bp, Homo sapiens
atacataagacaatt

SEQ ID NO: 1138431 - DNA, 15 bp, Homo sapiens
aatacataagacaat

SEQ ID NO: 1138432 - DNA, 15 bp, Homo sapiens
aaatacataagacaa

SEQ ID NO: 1138433 - DNA, 15 bp, Homo sapiens
gaaatacataagaca

SEQ ID NO: 1138434 - DNA, 15 bp, Homo sapiens
ggaaatacataagac

SEQ ID NO: 1138435 - DNA, 15 bp, Homo sapiens
gggaaatacataaga

SEQ ID NO: 1138436 - DNA, 15 bp, Homo sapiens
agggaaatacataag

SEQ ID NO: 1138437 - DNA, 15 bp, Homo sapiens
aagggaaatacataa

SEQ ID NO: 1138438 - DNA, 15 bp, Homo sapiens
taagggaaatacata

SEQ ID NO: 1138439 - DNA, 15 bp, Homo sapiens
gtaagggaaatacat

SEQ ID NO: 1138440 - DNA, 15 bp, Homo sapiens
agtaagggaaataca

SEQ ID NO: 1138441 - DNA, 15 bp, Homo sapiens
aagtaagggaaatac

SEQ ID NO: 1138442 - DNA, 15 bp, Homo sapiens
taagtaagggaaata

SEQ ID NO: 1138443 - DNA, 15 bp, Homo sapiens
ataagtaagggaaat

SEQ ID NO: 1138444 - DNA, 15 bp, Homo sapiens
tataagtaagggaaa

SEQ ID NO: 1138445 - DNA, 15 bp, Homo sapiens
atataagtaagggaa

SEQ ID NO: 1138446 - DNA, 15 bp, Homo sapiens
aatataagtaaggga

SEQ ID NO: 1138447 - DNA, 15 bp, Homo sapiens
aaatataagtaaggg

SEQ ID NO: 1138448 - DNA, 15 bp, Homo sapiens
taaatataagtaagg

SEQ ID NO: 1138449 - DNA, 15 bp, Homo sapiens
ctaaatataagtaag

SEQ ID NO: 1138450 - DNA, 15 bp, Homo sapiens
tctaaatataagtaa

SEQ ID NO: 1138451 - DNA, 15 bp, Homo sapiens
ttctaaatataagta

SEQ ID NO: 1138452 - DNA, 15 bp, Homo sapiens
gttctaaatataagt

SEQ ID NO: 1138453 - DNA, 15 bp, Homo sapiens
ggttctaaatataag

SEQ ID NO: 1138454 - DNA, 15 bp, Homo sapiens
tggttctaaatataa

SEQ ID NO: 1138455 - DNA, 15 bp, Homo sapiens
gtggttctaaatata

SEQ ID NO: 1138456 - DNA, 15 bp, Homo sapiens
tgtggttctaaatat

SEQ ID NO: 1138457 - DNA, 15 bp, Homo sapiens
atgtggttctaaata

SEQ ID NO: 1138458 - DNA, 15 bp, Homo sapiens
gatgtggttctaaat

SEQ ID NO: 1138459 - DNA, 15 bp, Homo sapiens
tgatgtggttctaaa

SEQ ID NO: 1138460 - DNA, 15 bp, Homo sapiens
ctgatgtggttctaa

SEQ ID NO: 1138461 - DNA, 15 bp, Homo sapiens
tctgatgtggttcta

SEQ ID NO: 1138462 - DNA, 15 bp, Homo sapiens
gtctgatgtggttct

SEQ ID NO: 1138463 - DNA, 15 bp, Homo sapiens
tgtctgatgtggttc

SEQ ID NO: 1138464 - DNA, 15 bp, Homo sapiens
ctgtctgatgtggtt

SEQ ID NO: 1138465 - DNA, 15 bp, Homo sapiens
actgtctgatgtggt

SEQ ID NO: 1138466 - DNA, 15 bp, Homo sapiens
cactgtctgatgtgg

SEQ ID NO: 1138467 - DNA, 15 bp, Homo sapiens
tcactgtctgatgtg

SEQ ID NO: 1138468 - DNA, 15 bp, Homo sapiens
atcactgtctgatgt

SEQ ID NO: 1138469 - DNA, 15 bp, Homo sapiens
tatcactgtctgatg

SEQ ID NO: 1138470 - DNA, 15 bp, Homo sapiens
atatcactgtctgat

SEQ ID NO: 1138471 - DNA, 15 bp, Homo sapiens
tatatcactgtctga

SEQ ID NO: 1138472 - DNA, 15 bp, Homo sapiens
ttatatcactgtctg

SEQ ID NO: 1138473 - DNA, 15 bp, Homo sapiens
attatatcactgtct

SEQ ID NO: 1138474 - DNA, 15 bp, Homo sapiens
aattatatcactgtc

SEQ ID NO: 1138475 - DNA, 15 bp, Homo sapiens
aaattatatcactgt

SEQ ID NO: 1138476 - DNA, 15 bp, Homo sapiens
aaaattatatcactg

SEQ ID NO: 1138477 - DNA, 15 bp, Homo sapiens
aaaaattatatcact

SEQ ID NO: 1138478 - DNA, 15 bp, Homo sapiens
caaaaattatatcac

SEQ ID NO: 1138479 - DNA, 15 bp, Homo sapiens
gcaaaaattatatca

SEQ ID NO: 1138480 - DNA, 15 bp, Homo sapiens
agcaaaaattatatc

SEQ ID NO: 1138481 - DNA, 15 bp, Homo sapiens
aagcaaaaattatat

SEQ ID NO: 1138482 - DNA, 15 bp, Homo sapiens
gaagcaaaaattata

SEQ ID NO: 1138483 - DNA, 15 bp, Homo sapiens
tgaagcaaaaattat

SEQ ID NO: 1138484 - DNA, 15 bp, Homo sapiens
gtgaagcaaaaatta

SEQ ID NO: 1138485 - DNA, 15 bp, Homo sapiens
ggtgaagcaaaaatt

SEQ ID NO: 1138486 - DNA, 15 bp, Homo sapiens
gggtgaagcaaaaat

SEQ ID NO: 1138487 - DNA, 15 bp, Homo sapiens
tgggtgaagcaaaaa

SEQ ID NO: 1138488 - DNA, 15 bp, Homo sapiens
atgggtgaagcaaaa

SEQ ID NO: 1138489 - DNA, 15 bp, Homo sapiens
tatgggtgaagcaaa

SEQ ID NO: 1138490 - DNA, 15 bp, Homo sapiens
ttatgggtgaagcaa

SEQ ID NO: 1138491 - DNA, 15 bp, Homo sapiens
tttatgggtgaagca

SEQ ID NO: 1138492 - DNA, 15 bp, Homo sapiens
ttttatgggtgaagc

SEQ ID NO: 1138493 - DNA, 15 bp, Homo sapiens
tttttatgggtgaag

SEQ ID NO: 1138494 - DNA, 15 bp, Homo sapiens
ttttttatgggtgaa

SEQ ID NO: 1138495 - DNA, 15 bp, Homo sapiens
attttttatgggtga

SEQ ID NO: 1138496 - DNA, 15 bp, Homo sapiens
tattttttatgggtg

SEQ ID NO: 1138497 - DNA, 15 bp, Homo sapiens
ttattttttatgggt

SEQ ID NO: 1138498 - DNA, 15 bp, Homo sapiens
attattttttatggg

SEQ ID NO: 1138499 - DNA, 15 bp, Homo sapiens
aattattttttatgg

SEQ ID NO: 1138500 - DNA, 15 bp, Homo sapiens
aaattattttttatg

SEQ ID NO: 1138501 - DNA, 15 bp, Homo sapiens
taaattattttttat

SEQ ID NO: 1138502 - DNA, 15 bp, Homo sapiens
ctaaattatttttta

SEQ ID NO: 1138503 - DNA, 15 bp, Homo sapiens
tctaaattatttttt

SEQ ID NO: 1138504 - DNA, 15 bp, Homo sapiens
ttctaaattattttt

SEQ ID NO: 1138505 - DNA, 15 bp, Homo sapiens
tttctaaattatttt

SEQ ID NO: 1138506 - DNA, 15 bp, Homo sapiens
ttttctaaattattt

SEQ ID NO: 1138507 - DNA, 15 bp, Homo sapiens
gttttctaaattatt

SEQ ID NO: 1138508 - DNA, 15 bp, Homo sapiens
agttttctaaattat

SEQ ID NO: 1138509 - DNA, 15 bp, Homo sapiens
gagttttctaaatta

SEQ ID NO: 1138510 - DNA, 15 bp, Homo sapiens
tgagttttctaaatt

SEQ ID NO: 1138511 - DNA, 15 bp, Homo sapiens
ttgagttttctaaat

SEQ ID NO: 1138512 - DNA, 15 bp, Homo sapiens
attgagttttctaaa

SEQ ID NO: 1138513 - DNA, 15 bp, Homo sapiens
tattgagttttctaa

SEQ ID NO: 1138514 - DNA, 15 bp, Homo sapiens
ctattgagttttcta

SEQ ID NO: 1138515 - DNA, 15 bp, Homo sapiens
cctattgagttttct

SEQ ID NO: 1138516 - DNA, 15 bp, Homo sapiens
tcctattgagttttc

SEQ ID NO: 1138517 - DNA, 15 bp, Homo sapiens
ttcctattgagtttt

SEQ ID NO: 1138518 - DNA, 15 bp, Homo sapiens
cttcctattgagttt

SEQ ID NO: 1138519 - DNA, 15 bp, Homo sapiens
tcttcctattgagtt

SEQ ID NO: 1138520 - DNA, 15 bp, Homo sapiens
ctcttcctattgagt

SEQ ID NO: 1138521 - DNA, 15 bp, Homo sapiens
cctcttcctattgag

SEQ ID NO: 1138522 - DNA, 15 bp, Homo sapiens
tcctcttcctattga

SEQ ID NO: 1138523 - DNA, 15 bp, Homo sapiens
ttcctcttcctattg

SEQ ID NO: 1138524 - DNA, 15 bp, Homo sapiens
tttcctcttcctatt

SEQ ID NO: 1138525 - DNA, 15 bp, Homo sapiens
ctttcctcttcctat

SEQ ID NO: 1138526 - DNA, 15 bp, Homo sapiens
actttcctcttccta

SEQ ID NO: 1138527 - DNA, 15 bp, Homo sapiens
aactttcctcttcct

SEQ ID NO: 1138528 - DNA, 15 bp, Homo sapiens
aaactttcctcttcc

SEQ ID NO: 1138529 - DNA, 15 bp, Homo sapiens
gaaactttcctcttc

SEQ ID NO: 1138530 - DNA, 15 bp, Homo sapiens
agaaactttcctctt

SEQ ID NO: 1138531 - DNA, 15 bp, Homo sapiens
aagaaactttcctct

SEQ ID NO: 1138532 - DNA, 15 bp, Homo sapiens
caagaaactttcctc

SEQ ID NO: 1138533 - DNA, 15 bp, Homo sapiens
acaagaaactttcct

SEQ ID NO: 1138534 - DNA, 15 bp, Homo sapiens
tacaagaaactttcc

SEQ ID NO: 1138535 - DNA, 15 bp, Homo sapiens
atacaagaaactttc

SEQ ID NO: 1138536 - DNA, 15 bp, Homo sapiens
aatacaagaaacttt

SEQ ID NO: 1138537 - DNA, 15 bp, Homo sapiens
aaatacaagaaactt

SEQ ID NO: 1138538 - DNA, 15 bp, Homo sapiens
taaatacaagaaact

SEQ ID NO: 1138539 - DNA, 15 bp, Homo sapiens
gtaaatacaagaaac

SEQ ID NO: 1138540 - DNA, 15 bp, Homo sapiens
ggtaaatacaagaaa

SEQ ID NO: 1138541 - DNA, 15 bp, Homo sapiens
tggtaaatacaagaa

SEQ ID NO: 1138542 - DNA, 15 bp, Homo sapiens
ttggtaaatacaaga

SEQ ID NO: 1138543 - DNA, 15 bp, Homo sapiens
attggtaaatacaag

SEQ ID NO: 1138544 - DNA, 15 bp, Homo sapiens
tattggtaaatacaa

SEQ ID NO: 1138545 - DNA, 15 bp, Homo sapiens
atattggtaaataca

SEQ ID NO: 1138546 - DNA, 15 bp, Homo sapiens
aatattggtaaatac

SEQ ID NO: 1138547 - DNA, 15 bp, Homo sapiens
aaatattggtaaata

SEQ ID NO: 1138548 - DNA, 15 bp, Homo sapiens
aaaatattggtaaat

SEQ ID NO: 1138549 - DNA, 15 bp, Homo sapiens
aaaaatattggtaaa

SEQ ID NO: 1138550 - DNA, 15 bp, Homo sapiens
gaaaaatattggtaa

SEQ ID NO: 1138551 - DNA, 15 bp, Homo sapiens
agaaaaatattggta

SEQ ID NO: 1138552 - DNA, 15 bp, Homo sapiens
aagaaaaatattggt

SEQ ID NO: 1138553 - DNA, 15 bp, Homo sapiens
caagaaaaatattgg

SEQ ID NO: 1138554 - DNA, 15 bp, Homo sapiens
tcaagaaaaatattg

SEQ ID NO: 1138555 - DNA, 15 bp, Homo sapiens
gtcaagaaaaatatt

SEQ ID NO: 1138556 - DNA, 15 bp, Homo sapiens
ggtcaagaaaaatat

SEQ ID NO: 1138557 - DNA, 15 bp, Homo sapiens
tggtcaagaaaaata

SEQ ID NO: 1138558 - DNA, 15 bp, Homo sapiens
atggtcaagaaaaat

SEQ ID NO: 1138559 - DNA, 15 bp, Homo sapiens
catggtcaagaaaaa

SEQ ID NO: 1138560 - DNA, 15 bp, Homo sapiens
acatggtcaagaaaa

SEQ ID NO: 1138561 - DNA, 15 bp, Homo sapiens
aacatggtcaagaaa

SEQ ID NO: 1138562 - DNA, 15 bp, Homo sapiens
gaacatggtcaagaa

SEQ ID NO: 1138563 - DNA, 15 bp, Homo sapiens
agaacatggtcaaga

SEQ ID NO: 1138564 - DNA, 15 bp, Homo sapiens
aagaacatggtcaag

SEQ ID NO: 1138565 - DNA, 15 bp, Homo sapiens
aaagaacatggtcaa

SEQ ID NO: 1138566 - DNA, 15 bp, Homo sapiens
taaagaacatggtca

SEQ ID NO: 1138567 - DNA, 15 bp, Homo sapiens
ataaagaacatggtc

SEQ ID NO: 1138568 - DNA, 15 bp, Homo sapiens
aataaagaacatggt

SEQ ID NO: 1138569 - DNA, 15 bp, Homo sapiens
gaataaagaacatgg

SEQ ID NO: 1138570 - DNA, 15 bp, Homo sapiens
agaataaagaacatg

SEQ ID NO: 1138571 - DNA, 15 bp, Homo sapiens
tagaataaagaacat

SEQ ID NO: 1138572 - DNA, 15 bp, Homo sapiens
ctagaataaagaaca

SEQ ID NO: 1138573 - DNA, 15 bp, Homo sapiens
tctagaataaagaac

SEQ ID NO: 1138574 - DNA, 15 bp, Homo sapiens
atctagaataaagaa

SEQ ID NO: 1138575 - DNA, 15 bp, Homo sapiens
tatctagaataaaga

SEQ ID NO: 1138576 - DNA, 15 bp, Homo sapiens
atatctagaataaag

SEQ ID NO: 1138577 - DNA, 15 bp, Homo sapiens
aatatctagaataaa

SEQ ID NO: 1138578 - DNA, 15 bp, Homo sapiens
gaatatctagaataa

SEQ ID NO: 1138579 - DNA, 15 bp, Homo sapiens
agaatatctagaata

SEQ ID NO: 1138580 - DNA, 15 bp, Homo sapiens
tagaatatctagaat

SEQ ID NO: 1138581 - DNA, 15 bp, Homo sapiens
ttagaatatctagaa

SEQ ID NO: 1138582 - DNA, 15 bp, Homo sapiens
cttagaatatctaga

SEQ ID NO: 1138583 - DNA, 15 bp, Homo sapiens
acttagaatatctag

SEQ ID NO: 1138584 - DNA, 15 bp, Homo sapiens
aacttagaatatcta

SEQ ID NO: 1138585 - DNA, 15 bp, Homo sapiens
aaacttagaatatct

SEQ ID NO: 1138586 - DNA, 15 bp, Homo sapiens
gaaacttagaatatc

SEQ ID NO: 1138587 - DNA, 15 bp, Homo sapiens
agaaacttagaatat

SEQ ID NO: 1138588 - DNA, 15 bp, Homo sapiens
gagaaacttagaata

SEQ ID NO: 1138589 - DNA, 15 bp, Homo sapiens
ggagaaacttagaat

SEQ ID NO: 1138590 - DNA, 15 bp, Homo sapiens
aggagaaacttagaa

SEQ ID NO: 1138591 - DNA, 15 bp, Homo sapiens
caggagaaacttaga

SEQ ID NO: 1138592 - DNA, 15 bp, Homo sapiens
acaggagaaacttag

SEQ ID NO: 1138593 - DNA, 15 bp, Homo sapiens
aacaggagaaactta

SEQ ID NO: 1138594 - DNA, 15 bp, Homo sapiens
aaacaggagaaactt

SEQ ID NO: 1138595 - DNA, 15 bp, Homo sapiens
taaacaggagaaact

SEQ ID NO: 1138596 - DNA, 15 bp, Homo sapiens
ataaacaggagaaac

SEQ ID NO: 1138597 - DNA, 15 bp, Homo sapiens
tataaacaggagaaa

SEQ ID NO: 1138598 - DNA, 15 bp, Homo sapiens
ttataaacaggagaa

SEQ ID NO: 1138599 - DNA, 15 bp, Homo sapiens
attataaacaggaga

SEQ ID NO: 1138600 - DNA, 15 bp, Homo sapiens
aattataaacaggag

SEQ ID NO: 1138601 - DNA, 15 bp, Homo sapiens
aaattataaacagga

SEQ ID NO: 1138602 - DNA, 15 bp, Homo sapiens
aaaattataaacagg

SEQ ID NO: 1138603 - DNA, 15 bp, Homo sapiens
gaaaattataaacag

SEQ ID NO: 1138604 - DNA, 15 bp, Homo sapiens
agaaaattataaaca

SEQ ID NO: 1138605 - DNA, 15 bp, Homo sapiens
tagaaaattataaac

SEQ ID NO: 1138606 - DNA, 15 bp, Homo sapiens
atagaaaattataaa

SEQ ID NO: 1138607 - DNA, 15 bp, Homo sapiens
aatagaaaattataa

SEQ ID NO: 1138608 - DNA, 15 bp, Homo sapiens
aaatagaaaattata

SEQ ID NO: 1138609 - DNA, 15 bp, Homo sapiens
taaatagaaaattat

SEQ ID NO: 1138610 - DNA, 15 bp, Homo sapiens
ctaaatagaaaatta

SEQ ID NO: 1138611 - DNA, 15 bp, Homo sapiens
tctaaatagaaaatt

SEQ ID NO: 1138612 - DNA, 15 bp, Homo sapiens
ctctaaatagaaaat

SEQ ID NO: 1138613 - DNA, 15 bp, Homo sapiens
tctctaaatagaaaa

SEQ ID NO: 1138614 - DNA, 15 bp, Homo sapiens
ttctctaaatagaaa

SEQ ID NO: 1138615 - DNA, 15 bp, Homo sapiens
gttctctaaatagaa

SEQ ID NO: 1138616 - DNA, 15 bp, Homo sapiens
agttctctaaataga

SEQ ID NO: 1138617 - DNA, 15 bp, Homo sapiens
aagttctctaaatag

SEQ ID NO: 1138618 - DNA, 15 bp, Homo sapiens
gaagttctctaaata

SEQ ID NO: 1138619 - DNA, 15 bp, Homo sapiens
ggaagttctctaaat

SEQ ID NO: 1138620 - DNA, 15 bp, Homo sapiens
aggaagttctctaaa

SEQ ID NO: 1138621 - DNA, 15 bp, Homo sapiens
aaggaagttctctaa

SEQ ID NO: 1138622 - DNA, 15 bp, Homo sapiens
aaaggaagttctcta

SEQ ID NO: 1138623 - DNA, 15 bp, Homo sapiens
taaaggaagttctct

SEQ ID NO: 1138624 - DNA, 15 bp, Homo sapiens
ctaaaggaagttctc

SEQ ID NO: 1138625 - DNA, 15 bp, Homo sapiens
actaaaggaagttct

SEQ ID NO: 1138626 - DNA, 15 bp, Homo sapiens
gactaaaggaagttc

SEQ ID NO: 1138627 - DNA, 15 bp, Homo sapiens
tgactaaaggaagtt

SEQ ID NO: 1138628 - DNA, 15 bp, Homo sapiens
atgactaaaggaagt

SEQ ID NO: 1138629 - DNA, 15 bp, Homo sapiens
aatgactaaaggaag

SEQ ID NO: 1138630 - DNA, 15 bp, Homo sapiens
gaatgactaaaggaa

SEQ ID NO: 1138631 - DNA, 15 bp, Homo sapiens
agaatgactaaagga

SEQ ID NO: 1138632 - DNA, 15 bp, Homo sapiens
aagaatgactaaagg

SEQ ID NO: 1138633 - DNA, 15 bp, Homo sapiens
aaagaatgactaaag

SEQ ID NO: 1138634 - DNA, 15 bp, Homo sapiens
aaaagaatgactaaa

SEQ ID NO: 1138635 - DNA, 15 bp, Homo sapiens
taaaagaatgactaa

SEQ ID NO: 1138636 - DNA, 15 bp, Homo sapiens
ataaaagaatgacta

SEQ ID NO: 1138637 - DNA, 15 bp, Homo sapiens
aataaaagaatgact

SEQ ID NO: 1138638 - DNA, 15 bp, Homo sapiens
aaataaaagaatgac

SEQ ID NO: 1138639 - DNA, 15 bp, Homo sapiens
aaaataaaagaatga

SEQ ID NO: 1138640 - DNA, 15 bp, Homo sapiens
caaaataaaagaatg

SEQ ID NO: 1138641 - DNA, 15 bp, Homo sapiens
tcaaaataaaagaat

SEQ ID NO: 1138642 - DNA, 15 bp, Homo sapiens
ttcaaaataaaagaa

SEQ ID NO: 1138643 - DNA, 15 bp, Homo sapiens
tttcaaaataaaaga

SEQ ID NO: 1138644 - DNA, 15 bp, Homo sapiens
ttttcaaaataaaag

SEQ ID NO: 1138645 - DNA, 15 bp, Homo sapiens
cttttcaaaataaaa

SEQ ID NO: 1138646 - DNA, 15 bp, Homo sapiens
gcttttcaaaataaa

SEQ ID NO: 1138647 - DNA, 15 bp, Homo sapiens
cgcttttcaaaataa

SEQ ID NO: 1138648 - DNA, 15 bp, Homo sapiens
acgcttttcaaaata

SEQ ID NO: 1138649 - DNA, 15 bp, Homo sapiens
aacgcttttcaaaat

SEQ ID NO: 1138650 - DNA, 15 bp, Homo sapiens
taacgcttttcaaaa

SEQ ID NO: 1138651 - DNA, 15 bp, Homo sapiens
ctaacgcttttcaaa

SEQ ID NO: 1138652 - DNA, 15 bp, Homo sapiens
gctaacgcttttcaa

SEQ ID NO: 1138653 - DNA, 15 bp, Homo sapiens
agctaacgcttttca

SEQ ID NO: 1138654 - DNA, 15 bp, Homo sapiens
aagctaacgcttttc

SEQ ID NO: 1138655 - DNA, 15 bp, Homo sapiens
aaagctaacgctttt

SEQ ID NO: 1138656 - DNA, 15 bp, Homo sapiens
taaagctaacgcttt

SEQ ID NO: 1138657 - DNA, 15 bp, Homo sapiens
ctaaagctaacgctt

SEQ ID NO: 1138658 - DNA, 15 bp, Homo sapiens
tctaaagctaacgct

SEQ ID NO: 1138659 - DNA, 15 bp, Homo sapiens
ttctaaagctaacgc

SEQ ID NO: 1138660 - DNA, 15 bp, Homo sapiens
attctaaagctaacg

SEQ ID NO: 1138661 - DNA, 15 bp, Homo sapiens
tattctaaagctaac

SEQ ID NO: 1138662 - DNA, 15 bp, Homo sapiens
ttattctaaagctaa

SEQ ID NO: 1138663 - DNA, 15 bp, Homo sapiens
gttattctaaagcta

SEQ ID NO: 1138664 - DNA, 15 bp, Homo sapiens
agttattctaaagct

SEQ ID NO: 1138665 - DNA, 15 bp, Homo sapiens
aagttattctaaagc

SEQ ID NO: 1138666 - DNA, 15 bp, Homo sapiens
aaagttattctaaag

SEQ ID NO: 1138667 - DNA, 15 bp, Homo sapiens
taaagttattctaaa

SEQ ID NO: 1138668 - DNA, 15 bp, Homo sapiens
ttaaagttattctaa

SEQ ID NO: 1138669 - DNA, 15 bp, Homo sapiens
cttaaagttattcta

SEQ ID NO: 1138670 - DNA, 15 bp, Homo sapiens
tcttaaagttattct

SEQ ID NO: 1138671 - DNA, 15 bp, Homo sapiens
ctcttaaagttattc

SEQ ID NO: 1138672 - DNA, 15 bp, Homo sapiens
actcttaaagttatt

SEQ ID NO: 1138673 - DNA, 15 bp, Homo sapiens
aactcttaaagttat

SEQ ID NO: 1138674 - DNA, 15 bp, Homo sapiens
taactcttaaagtta

SEQ ID NO: 1138675 - DNA, 15 bp, Homo sapiens
ctaactcttaaagtt

SEQ ID NO: 1138676 - DNA, 15 bp, Homo sapiens
actaactcttaaagt

SEQ ID NO: 1138677 - DNA, 15 bp, Homo sapiens
tactaactcttaaag

SEQ ID NO: 1138678 - DNA, 15 bp, Homo sapiens
ttactaactcttaaa

SEQ ID NO: 1138679 - DNA, 15 bp, Homo sapiens
tttactaactcttaa

SEQ ID NO: 1138680 - DNA, 15 bp, Homo sapiens
atttactaactctta

SEQ ID NO: 1138681 - DNA, 15 bp, Homo sapiens
catttactaactctt

SEQ ID NO: 1138682 - DNA, 15 bp, Homo sapiens
acatttactaactct

SEQ ID NO: 1138683 - DNA, 15 bp, Homo sapiens
gacatttactaactc

SEQ ID NO: 1138684 - DNA, 15 bp, Homo sapiens
tgacatttactaact

SEQ ID NO: 1138685 - DNA, 15 bp, Homo sapiens
ttgacatttactaac

SEQ ID NO: 1138686 - DNA, 15 bp, Homo sapiens
attgacatttactaa

SEQ ID NO: 1138687 - DNA, 15 bp, Homo sapiens
tattgacatttacta

SEQ ID NO: 1138688 - DNA, 15 bp, Homo sapiens
ttattgacatttact

SEQ ID NO: 1138689 - DNA, 15 bp, Homo sapiens
gttattgacatttac

SEQ ID NO: 1138690 - DNA, 15 bp, Homo sapiens
ggttattgacattta

SEQ ID NO: 1138691 - DNA, 15 bp, Homo sapiens
aggttattgacattt

SEQ ID NO: 1138692 - DNA, 15 bp, Homo sapiens
aaggttattgacatt

SEQ ID NO: 1138693 - DNA, 15 bp, Homo sapiens
taaggttattgacat

SEQ ID NO: 1138694 - DNA, 15 bp, Homo sapiens
ttaaggttattgaca

SEQ ID NO: 1138695 - DNA, 15 bp, Homo sapiens
cttaaggttattgac

SEQ ID NO: 1138696 - DNA, 15 bp, Homo sapiens
gcttaaggttattga

SEQ ID NO: 1138697 - DNA, 15 bp, Homo sapiens
ggcttaaggttattg

SEQ ID NO: 1138698 - DNA, 15 bp, Homo sapiens
aggcttaaggttatt

SEQ ID NO: 1138699 - DNA, 15 bp, Homo sapiens
taggcttaaggttat

SEQ ID NO: 1138700 - DNA, 15 bp, Homo sapiens
ctaggcttaaggtta

SEQ ID NO: 1138701 - DNA, 15 bp, Homo sapiens
actaggcttaaggtt

SEQ ID NO: 1138702 - DNA, 15 bp, Homo sapiens
cactaggcttaaggt

SEQ ID NO: 1138703 - DNA, 15 bp, Homo sapiens
tcactaggcttaagg

SEQ ID NO: 1138704 - DNA, 15 bp, Homo sapiens
gtcactaggcttaag

SEQ ID NO: 1138705 - DNA, 15 bp, Homo sapiens
ggtcactaggcttaa

SEQ ID NO: 1138706 - DNA, 15 bp, Homo sapiens
gggtcactaggctta

SEQ ID NO: 1138707 - DNA, 15 bp, Homo sapiens
agggtcactaggctt

SEQ ID NO: 1138708 - DNA, 15 bp, Homo sapiens
tagggtcactaggct

SEQ ID NO: 1138709 - DNA, 15 bp, Homo sapiens
gtagggtcactaggc

SEQ ID NO: 1138710 - DNA, 15 bp, Homo sapiens
agtagggtcactagg

SEQ ID NO: 1138711 - DNA, 15 bp, Homo sapiens
gagtagggtcactag

SEQ ID NO: 1138712 - DNA, 15 bp, Homo sapiens
agagtagggtcacta

SEQ ID NO: 1138713 - DNA, 15 bp, Homo sapiens
aagagtagggtcact

SEQ ID NO: 1138714 - DNA, 15 bp, Homo sapiens
caagagtagggtcac

SEQ ID NO: 1138715 - DNA, 15 bp, Homo sapiens
gcaagagtagggtca

SEQ ID NO: 1138716 - DNA, 15 bp, Homo sapiens
agcaagagtagggtc

SEQ ID NO: 1138717 - DNA, 15 bp, Homo sapiens
aagcaagagtagggt

SEQ ID NO: 1138718 - DNA, 15 bp, Homo sapiens
taagcaagagtaggg

SEQ ID NO: 1138719 - DNA, 15 bp, Homo sapiens
ataagcaagagtagg

SEQ ID NO: 1138720 - DNA, 15 bp, Homo sapiens
gataagcaagagtag

SEQ ID NO: 1138721 - DNA, 15 bp, Homo sapiens
ggataagcaagagta

SEQ ID NO: 1138722 - DNA, 15 bp, Homo sapiens
tggataagcaagagt

SEQ ID NO: 1138723 - DNA, 15 bp, Homo sapiens
atggataagcaagag

SEQ ID NO: 1138724 - DNA, 15 bp, Homo sapiens
aatggataagcaaga

SEQ ID NO: 1138725 - DNA, 15 bp, Homo sapiens
aaatggataagcaag

SEQ ID NO: 1138726 - DNA, 15 bp, Homo sapiens
gaaatggataagcaa

SEQ ID NO: 1138727 - DNA, 15 bp, Homo sapiens
tgaaatggataagca

SEQ ID NO: 1138728 - DNA, 15 bp, Homo sapiens
atgaaatggataagc

SEQ ID NO: 1138729 - DNA, 15 bp, Homo sapiens
gatgaaatggataag

SEQ ID NO: 1138730 - DNA, 15 bp, Homo sapiens
cgatgaaatggataa

SEQ ID NO: 1138731 - DNA, 15 bp, Homo sapiens
acgatgaaatggata

SEQ ID NO: 1138732 - DNA, 15 bp, Homo sapiens
aacgatgaaatggat

SEQ ID NO: 1138733 - DNA, 15 bp, Homo sapiens
caacgatgaaatgga

SEQ ID NO: 1138734 - DNA, 15 bp, Homo sapiens
ccaacgatgaaatgg

SEQ ID NO: 1138735 - DNA, 15 bp, Homo sapiens
gccaacgatgaaatg

SEQ ID NO: 1138736 - DNA, 15 bp, Homo sapiens
ggccaacgatgaaat

SEQ ID NO: 1138737 - DNA, 15 bp, Homo sapiens
aggccaacgatgaaa

SEQ ID NO: 1138738 - DNA, 15 bp, Homo sapiens
aaggccaacgatgaa

SEQ ID NO: 1138739 - DNA, 15 bp, Homo sapiens
caaggccaacgatga

SEQ ID NO: 1138740 - DNA, 15 bp, Homo sapiens
ccaaggccaacgatg

SEQ ID NO: 1138741 - DNA, 15 bp, Homo sapiens
gccaaggccaacgat

SEQ ID NO: 1138742 - DNA, 15 bp, Homo sapiens
tgccaaggccaacga

SEQ ID NO: 1138743 - DNA, 15 bp, Homo sapiens
gtgccaaggccaacg

SEQ ID NO: 1138744 - DNA, 15 bp, Homo sapiens
ggtgccaaggccaac

SEQ ID NO: 1138745 - DNA, 15 bp, Homo sapiens
aggtgccaaggccaa

SEQ ID NO: 1138746 - DNA, 15 bp, Homo sapiens
aaggtgccaaggcca

SEQ ID NO: 1138747 - DNA, 15 bp, Homo sapiens
caaggtgccaaggcc

SEQ ID NO: 1138748 - DNA, 15 bp, Homo sapiens
gcaaggtgccaaggc

SEQ ID NO: 1138749 - DNA, 15 bp, Homo sapiens
tgcaaggtgccaagg

SEQ ID NO: 1138750 - DNA, 15 bp, Homo sapiens
ctgcaaggtgccaag

SEQ ID NO: 1138751 - DNA, 15 bp, Homo sapiens
gctgcaaggtgccaa

SEQ ID NO: 1138752 - DNA, 15 bp, Homo sapiens
ggctgcaaggtgcca

SEQ ID NO: 1138753 - DNA, 15 bp, Homo sapiens
gggctgcaaggtgcc

SEQ ID NO: 1138754 - DNA, 15 bp, Homo sapiens
agggctgcaaggtgc

SEQ ID NO: 1138755 - DNA, 15 bp, Homo sapiens
gagggctgcaaggtg

SEQ ID NO: 1138756 - DNA, 15 bp, Homo sapiens
ggagggctgcaaggt

SEQ ID NO: 1138757 - DNA, 15 bp, Homo sapiens
gggagggctgcaagg

SEQ ID NO: 1138758 - DNA, 15 bp, Homo sapiens
agggagggctgcaag

SEQ ID NO: 1138759 - DNA, 15 bp, Homo sapiens
cagggagggctgcaa

SEQ ID NO: 1138760 - DNA, 15 bp, Homo sapiens
acagggagggctgca

SEQ ID NO: 1138761 - DNA, 15 bp, Homo sapiens
gacagggagggctgc

SEQ ID NO: 1138762 - DNA, 15 bp, Homo sapiens
ggacagggagggctg

SEQ ID NO: 1138763 - DNA, 15 bp, Homo sapiens
tggacagggagggct

SEQ ID NO: 1138764 - DNA, 15 bp, Homo sapiens
gtggacagggagggc

SEQ ID NO: 1138765 - DNA, 15 bp, Homo sapiens
ggtggacagggaggg

SEQ ID NO: 1138766 - DNA, 15 bp, Homo sapiens
gggtggacagggagg

SEQ ID NO: 1138767 - DNA, 15 bp, Homo sapiens
tgggtggacagggag

SEQ ID NO: 1138768 - DNA, 15 bp, Homo sapiens
ctgggtggacaggga

SEQ ID NO: 1138769 - DNA, 15 bp, Homo sapiens
actgggtggacaggg

SEQ ID NO: 1138770 - DNA, 15 bp, Homo sapiens
cactgggtggacagg

SEQ ID NO: 1138771 - DNA, 15 bp, Homo sapiens
ccactgggtggacag

SEQ ID NO: 1138772 - DNA, 15 bp, Homo sapiens
accactgggtggaca

SEQ ID NO: 1138773 - DNA, 15 bp, Homo sapiens
aaccactgggtggac

SEQ ID NO: 1138774 - DNA, 15 bp, Homo sapiens
aaaccactgggtgga

SEQ ID NO: 1138775 - DNA, 15 bp, Homo sapiens
aaaaccactgggtgg

SEQ ID NO: 1138776 - DNA, 15 bp, Homo sapiens
gaaaaccactgggtg

SEQ ID NO: 1138777 - DNA, 15 bp, Homo sapiens
tgaaaaccactgggt

SEQ ID NO: 1138778 - DNA, 15 bp, Homo sapiens
atgaaaaccactggg

SEQ ID NO: 1138779 - DNA, 15 bp, Homo sapiens
aatgaaaaccactgg

SEQ ID NO: 1138780 - DNA, 15 bp, Homo sapiens
taatgaaaaccactg

SEQ ID NO: 1138781 - DNA, 15 bp, Homo sapiens
gtaatgaaaaccact

SEQ ID NO: 1138782 - DNA, 15 bp, Homo sapiens
agtaatgaaaaccac

SEQ ID NO: 1138783 - DNA, 15 bp, Homo sapiens
gagtaatgaaaacca

SEQ ID NO: 1138784 - DNA, 15 bp, Homo sapiens
agagtaatgaaaacc

SEQ ID NO: 1138785 - DNA, 15 bp, Homo sapiens
gagagtaatgaaaac

SEQ ID NO: 1138786 - DNA, 15 bp, Homo sapiens
tgagagtaatgaaaa

SEQ ID NO: 1138787 - DNA, 15 bp, Homo sapiens
gtgagagtaatgaaa

SEQ ID NO: 1138788 - DNA, 15 bp, Homo sapiens
tgtgagagtaatgaa

SEQ ID NO: 1138789 - DNA, 15 bp, Homo sapiens
ctgtgagagtaatga

SEQ ID NO: 1138790 - DNA, 15 bp, Homo sapiens
cttagaagaaataca

SEQ ID NO: 1138791 - DNA, 15 bp, Homo sapiens
gcttagaagaaatac

SEQ ID NO: 1138792 - DNA, 15 bp, Homo sapiens
tgcttagaagaaata

SEQ ID NO: 1138793 - DNA, 15 bp, Homo sapiens
gtgcttagaagaaat

SEQ ID NO: 1138794 - DNA, 15 bp, Homo sapiens
ggtgcttagaagaaa

SEQ ID NO: 1138795 - DNA, 15 bp, Homo sapiens
tggtgcttagaagaa

SEQ ID NO: 1138796 - DNA, 15 bp, Homo sapiens
atggtgcttagaaga

SEQ ID NO: 1138797 - DNA, 15 bp, Homo sapiens
aatggtgcttagaag

SEQ ID NO: 1138798 - DNA, 15 bp, Homo sapiens
caatggtgcttagaa

SEQ ID NO: 1138799 - DNA, 15 bp, Homo sapiens
acaatggtgcttaga

SEQ ID NO: 1138800 - DNA, 15 bp, Homo sapiens
tacaatggtgcttag

SEQ ID NO: 1138801 - DNA, 15 bp, Homo sapiens
atacaatggtgctta

SEQ ID NO: 1138802 - DNA, 15 bp, Homo sapiens
aatacaatggtgctt

SEQ ID NO: 1138803 - DNA, 15 bp, Homo sapiens
aaatacaatggtgct

SEQ ID NO: 1138804 - DNA, 15 bp, Homo sapiens
aaaatacaatggtgc

SEQ ID NO: 1138805 - DNA, 15 bp, Homo sapiens
aaaaatacaatggtg

SEQ ID NO: 1138806 - DNA, 15 bp, Homo sapiens
aaaaaatacaatggt

SEQ ID NO: 1138807 - DNA, 15 bp, Homo sapiens
gaaaaaatacaatgg

SEQ ID NO: 1138808 - DNA, 15 bp, Homo sapiens
tgaaaaaatacaatg

SEQ ID NO: 1138809 - DNA, 15 bp, Homo sapiens
atgaaaaaatacaat

SEQ ID NO: 1138810 - DNA, 15 bp, Homo sapiens
tatgaaaaaatacaa

SEQ ID NO: 1138811 - DNA, 15 bp, Homo sapiens
ctatgaaaaaataca

SEQ ID NO: 1138812 - DNA, 15 bp, Homo sapiens
tctatgaaaaaatac

SEQ ID NO: 1138813 - DNA, 15 bp, Homo sapiens
ttctatgaaaaaata

SEQ ID NO: 1138814 - DNA, 15 bp, Homo sapiens
tttctatgaaaaaat

SEQ ID NO: 1138815 - DNA, 15 bp, Homo sapiens
ttttctatgaaaaaa

SEQ ID NO: 1138816 - DNA, 15 bp, Homo sapiens
attttctatgaaaaa

SEQ ID NO: 1138817 - DNA, 15 bp, Homo sapiens
aattttctatgaaaa

SEQ ID NO: 1138818 - DNA, 15 bp, Homo sapiens
aaattttctatgaaa

SEQ ID NO: 1138819 - DNA, 15 bp, Homo sapiens
taaattttctatgaa

SEQ ID NO: 1138820 - DNA, 15 bp, Homo sapiens
ctaaattttctatga

SEQ ID NO: 1138821 - DNA, 15 bp, Homo sapiens
actaaattttctatg

SEQ ID NO: 1138822 - DNA, 15 bp, Homo sapiens
aactaaattttctat

SEQ ID NO: 1138823 - DNA, 15 bp, Homo sapiens
aaactaaattttcta

SEQ ID NO: 1138824 - DNA, 15 bp, Homo sapiens
aaaactaaattttct

SEQ ID NO: 1138825 - DNA, 15 bp, Homo sapiens
caaaactaaattttc

SEQ ID NO: 1138826 - DNA, 15 bp, Homo sapiens
gcaaaactaaatttt

SEQ ID NO: 1138827 - DNA, 15 bp, Homo sapiens
ggcaaaactaaattt

SEQ ID NO: 1138828 - DNA, 15 bp, Homo sapiens
tggcaaaactaaatt

SEQ ID NO: 1138829 - DNA, 15 bp, Homo sapiens
atggcaaaactaaat

SEQ ID NO: 1138830 - DNA, 15 bp, Homo sapiens
catggcaaaactaaa

SEQ ID NO: 1138831 - DNA, 15 bp, Homo sapiens
acatggcaaaactaa

SEQ ID NO: 1138832 - DNA, 15 bp, Homo sapiens
tacatggcaaaacta

SEQ ID NO: 1138833 - DNA, 15 bp, Homo sapiens
ctacatggcaaaact

SEQ ID NO: 1138834 - DNA, 15 bp, Homo sapiens
tctacatggcaaaac

SEQ ID NO: 1138835 - DNA, 15 bp, Homo sapiens
ttctacatggcaaaa

SEQ ID NO: 1138836 - DNA, 15 bp, Homo sapiens
attctacatggcaaa

SEQ ID NO: 1138837 - DNA, 15 bp, Homo sapiens
aattctacatggcaa

SEQ ID NO: 1138838 - DNA, 15 bp, Homo sapiens
caattctacatggca

SEQ ID NO: 1138839 - DNA, 15 bp, Homo sapiens
tcaattctacatggc

SEQ ID NO: 1138840 - DNA, 15 bp, Homo sapiens
ttcaattctacatgg

SEQ ID NO: 1138841 - DNA, 15 bp, Homo sapiens
tttcaattctacatg

SEQ ID NO: 1138842 - DNA, 15 bp, Homo sapiens
ttttcaattctacat

SEQ ID NO: 1138843 - DNA, 15 bp, Homo sapiens
tttttcaattctaca

SEQ ID NO: 1138844 - DNA, 15 bp, Homo sapiens
ctttttcaattctac

SEQ ID NO: 1138845 - DNA, 15 bp, Homo sapiens
actttttcaattcta

SEQ ID NO: 1138846 - DNA, 15 bp, Homo sapiens
cactttttcaattct

SEQ ID NO: 1138847 - DNA, 15 bp, Homo sapiens
tcactttttcaattc

SEQ ID NO: 1138848 - DNA, 15 bp, Homo sapiens
atcactttttcaatt

SEQ ID NO: 1138849 - DNA, 15 bp, Homo sapiens
tatcactttttcaat

SEQ ID NO: 1138850 - DNA, 15 bp, Homo sapiens
ctatcactttttcaa

SEQ ID NO: 1138851 - DNA, 15 bp, Homo sapiens
tctatcactttttca

SEQ ID NO: 1138852 - DNA, 15 bp, Homo sapiens
atctatcactttttc

SEQ ID NO: 1138853 - DNA, 15 bp, Homo sapiens
catctatcacttttt

SEQ ID NO: 1138854 - DNA, 15 bp, Homo sapiens
ccatctatcactttt

SEQ ID NO: 1138855 - DNA, 15 bp, Homo sapiens
accatctatcacttt

SEQ ID NO: 1138856 - DNA, 15 bp, Homo sapiens
caccatctatcactt

SEQ ID NO: 1138857 - DNA, 15 bp, Homo sapiens
acaccatctatcact

SEQ ID NO: 1138858 - DNA, 15 bp, Homo sapiens
aacaccatctatcac

SEQ ID NO: 1138859 - DNA, 15 bp, Homo sapiens
taacaccatctatca

SEQ ID NO: 1138860 - DNA, 15 bp, Homo sapiens
gtaacaccatctatc

SEQ ID NO: 1138861 - DNA, 15 bp, Homo sapiens
agtaacaccatctat

SEQ ID NO: 1138862 - DNA, 15 bp, Homo sapiens
aagtaacaccatcta

SEQ ID NO: 1138863 - DNA, 15 bp, Homo sapiens
gaagtaacaccatct

SEQ ID NO: 1138864 - DNA, 15 bp, Homo sapiens
ggaagtaacaccatc

SEQ ID NO: 1138865 - DNA, 15 bp, Homo sapiens
tggaagtaacaccat

SEQ ID NO: 1138866 - DNA, 15 bp, Homo sapiens
ttggaagtaacacca

SEQ ID NO: 1138867 - DNA, 15 bp, Homo sapiens
attggaagtaacacc

SEQ ID NO: 1138868 - DNA, 15 bp, Homo sapiens
cattggaagtaacac

SEQ ID NO: 1138869 - DNA, 15 bp, Homo sapiens
ccattggaagtaaca

SEQ ID NO: 1138870 - DNA, 15 bp, Homo sapiens
tccattggaagtaac

SEQ ID NO: 1138871 - DNA, 15 bp, Homo sapiens
ttccattggaagtaa

SEQ ID NO: 1138872 - DNA, 15 bp, Homo sapiens
cttccattggaagta

SEQ ID NO: 1138873 - DNA, 15 bp, Homo sapiens
acttccattggaagt

SEQ ID NO: 1138874 - DNA, 15 bp, Homo sapiens
tacttccattggaag

SEQ ID NO: 1138875 - DNA, 15 bp, Homo sapiens
gtacttccattggaa

SEQ ID NO: 1138876 - DNA, 15 bp, Homo sapiens
agtacttccattgga

SEQ ID NO: 1138877 - DNA, 15 bp, Homo sapiens
aagtacttccattgg

SEQ ID NO: 1138878 - DNA, 15 bp, Homo sapiens
taagtacttccattg

SEQ ID NO: 1138879 - DNA, 15 bp, Homo sapiens
gtaagtacttccatt

SEQ ID NO: 1138880 - DNA, 15 bp, Homo sapiens
tgtaagtacttccat

SEQ ID NO: 1138881 - DNA, 15 bp, Homo sapiens
gtgtaagtacttcca

SEQ ID NO: 1138882 - DNA, 15 bp, Homo sapiens
tgtgtaagtacttcc

SEQ ID NO: 1138883 - DNA, 15 bp, Homo sapiens
gtgtgtaagtacttc

SEQ ID NO: 1138884 - DNA, 15 bp, Homo sapiens
cgtgtgtaagtactt

SEQ ID NO: 1138885 - DNA, 15 bp, Homo sapiens
gcgtgtgtaagtact

SEQ ID NO: 1138886 - DNA, 15 bp, Homo sapiens
tgcgtgtgtaagtac

SEQ ID NO: 1138887 - DNA, 15 bp, Homo sapiens
ttgcgtgtgtaagta

SEQ ID NO: 1138888 - DNA, 15 bp, Homo sapiens
attgcgtgtgtaagt

SEQ ID NO: 1138889 - DNA, 15 bp, Homo sapiens
tattgcgtgtgtaag

SEQ ID NO: 1138890 - DNA, 15 bp, Homo sapiens
ctattgcgtgtgtaa

SEQ ID NO: 1138891 - DNA, 15 bp, Homo sapiens
tctattgcgtgtgta

SEQ ID NO: 1138892 - DNA, 15 bp, Homo sapiens
ttctattgcgtgtgt

SEQ ID NO: 1138893 - DNA, 15 bp, Homo sapiens
tttctattgcgtgtg

SEQ ID NO: 1138894 - DNA, 15 bp, Homo sapiens
ttttctattgcgtgt

SEQ ID NO: 1138895 - DNA, 15 bp, Homo sapiens
tttttctattgcgtg

SEQ ID NO: 1138896 - DNA, 15 bp, Homo sapiens
atttttctattgcgt

SEQ ID NO: 1138897 - DNA, 15 bp, Homo sapiens
tatttttctattgcg

SEQ ID NO: 1138898 - DNA, 15 bp, Homo sapiens
atatttttctattgc

SEQ ID NO: 1138899 - DNA, 15 bp, Homo sapiens
catatttttctattg

SEQ ID NO: 1138900 - DNA, 15 bp, Homo sapiens
ccatatttttctatt

SEQ ID NO: 1138901 - DNA, 15 bp, Homo sapiens
accatatttttctat

SEQ ID NO: 1138902 - DNA, 15 bp, Homo sapiens
aaccatatttttcta

SEQ ID NO: 1138903 - DNA, 15 bp, Homo sapiens
aaaccatatttttct

SEQ ID NO: 1138904 - DNA, 15 bp, Homo sapiens
aaaaccatatttttc

SEQ ID NO: 1138905 - DNA, 15 bp, Homo sapiens
gaaaaccatattttt

SEQ ID NO: 1138906 - DNA, 15 bp, Homo sapiens
tgaaaaccatatttt

SEQ ID NO: 1138907 - DNA, 15 bp, Homo sapiens
atgaaaaccatattt

SEQ ID NO: 1138908 - DNA, 15 bp, Homo sapiens
gatgaaaaccatatt

SEQ ID NO: 1138909 - DNA, 15 bp, Homo sapiens
tgatgaaaaccatat

SEQ ID NO: 1138910 - DNA, 15 bp, Homo sapiens
ctgatgaaaaccata

SEQ ID NO: 1138911 - DNA, 15 bp, Homo sapiens
gctgatgaaaaccat

SEQ ID NO: 1138912 - DNA, 15 bp, Homo sapiens
agctgatgaaaacca

SEQ ID NO: 1138913 - DNA, 15 bp, Homo sapiens
cagctgatgaaaacc

SEQ ID NO: 1138914 - DNA, 15 bp, Homo sapiens
ccagctgatgaaaac

SEQ ID NO: 1138915 - DNA, 15 bp, Homo sapiens
gccagctgatgaaaa

SEQ ID NO: 1138916 - DNA, 15 bp, Homo sapiens
agccagctgatgaaa

SEQ ID NO: 1138917 - DNA, 15 bp, Homo sapiens
cagccagctgatgaa

SEQ ID NO: 1138918 - DNA, 15 bp, Homo sapiens
acagccagctgatga

SEQ ID NO: 1138919 - DNA, 15 bp, Homo sapiens
aacagccagctgatg

SEQ ID NO: 1138920 - DNA, 15 bp, Homo sapiens
aaacagccagctgat

SEQ ID NO: 1138921 - DNA, 15 bp, Homo sapiens
taaacagccagctga

SEQ ID NO: 1138922 - DNA, 15 bp, Homo sapiens
ctaaacagccagctg

SEQ ID NO: 1138923 - DNA, 15 bp, Homo sapiens
cctaaacagccagct

SEQ ID NO: 1138924 - DNA, 15 bp, Homo sapiens
gcctaaacagccagc

SEQ ID NO: 1138925 - DNA, 15 bp, Homo sapiens
tgcctaaacagccag

SEQ ID NO: 1138926 - DNA, 15 bp, Homo sapiens
ctgcctaaacagcca

SEQ ID NO: 1138927 - DNA, 15 bp, Homo sapiens
cctgcctaaacagcc

SEQ ID NO: 1138928 - DNA, 15 bp, Homo sapiens
ccctgcctaaacagc

SEQ ID NO: 1138929 - DNA, 15 bp, Homo sapiens
tccctgcctaaacag

SEQ ID NO: 1138930 - DNA, 15 bp, Homo sapiens
atccctgcctaaaca

SEQ ID NO: 1138931 - DNA, 15 bp, Homo sapiens
aatccctgcctaaac

SEQ ID NO: 1138932 - DNA, 15 bp, Homo sapiens
caatccctgcctaaa

SEQ ID NO: 1138933 - DNA, 15 bp, Homo sapiens
tcaatccctgcctaa

SEQ ID NO: 1138934 - DNA, 15 bp, Homo sapiens
gtcaatccctgccta

SEQ ID NO: 1138935 - DNA, 15 bp, Homo sapiens
agtcaatccctgcct

SEQ ID NO: 1138936 - DNA, 15 bp, Homo sapiens
cagtcaatccctgcc

SEQ ID NO: 1138937 - DNA, 15 bp, Homo sapiens
acagtcaatccctgc

SEQ ID NO: 1138938 - DNA, 15 bp, Homo sapiens
cacagtcaatccctg

SEQ ID NO: 1138939 - DNA, 15 bp, Homo sapiens
tcacagtcaatccct

SEQ ID NO: 1138940 - DNA, 15 bp, Homo sapiens
ctcacagtcaatccc

SEQ ID NO: 1138941 - DNA, 15 bp, Homo sapiens
actcacagtcaatcc

SEQ ID NO: 1138942 - DNA, 15 bp, Homo sapiens
gactcacagtcaatc

SEQ ID NO: 1138943 - DNA, 15 bp, Homo sapiens
agactcacagtcaat

SEQ ID NO: 1138944 - DNA, 15 bp, Homo sapiens
tagactcacagtcaa

SEQ ID NO: 1138945 - DNA, 15 bp, Homo sapiens
atagactcacagtca

SEQ ID NO: 1138946 - DNA, 15 bp, Homo sapiens
aatagactcacagtc

SEQ ID NO: 1138947 - DNA, 15 bp, Homo sapiens
taatagactcacagt

SEQ ID NO: 1138948 - DNA, 15 bp, Homo sapiens
ttaatagactcacag

SEQ ID NO: 1138949 - DNA, 15 bp, Homo sapiens
attaatagactcaca

SEQ ID NO: 1138950 - DNA, 15 bp, Homo sapiens
tattaatagactcac

SEQ ID NO: 1138951 - DNA, 15 bp, Homo sapiens
ctattaatagactca

SEQ ID NO: 1138952 - DNA, 15 bp, Homo sapiens
tctattaatagactc

SEQ ID NO: 1138953 - DNA, 15 bp, Homo sapiens
atctattaatagact

SEQ ID NO: 1138954 - DNA, 15 bp, Homo sapiens
catctattaatagac

SEQ ID NO: 1138955 - DNA, 15 bp, Homo sapiens
ccatctattaataga

SEQ ID NO: 1138956 - DNA, 15 bp, Homo sapiens
gccatctattaatag

SEQ ID NO: 1138957 - DNA, 15 bp, Homo sapiens
tgccatctattaata

SEQ ID NO: 1138958 - DNA, 15 bp, Homo sapiens
atgccatctattaat

SEQ ID NO: 1138959 - DNA, 15 bp, Homo sapiens
aatgccatctattaa

SEQ ID NO: 1138960 - DNA, 15 bp, Homo sapiens
aaatgccatctatta

SEQ ID NO: 1138961 - DNA, 15 bp, Homo sapiens
aaaatgccatctatt

SEQ ID NO: 1138962 - DNA, 15 bp, Homo sapiens
gaaaatgccatctat

SEQ ID NO: 1138963 - DNA, 15 bp, Homo sapiens
tgaaaatgccatcta

SEQ ID NO: 1138964 - DNA, 15 bp, Homo sapiens
atgaaaatgccatct

SEQ ID NO: 1138965 - DNA, 15 bp, Homo sapiens
catgaaaatgccatc

SEQ ID NO: 1138966 - DNA, 15 bp, Homo sapiens
tcatgaaaatgccat

SEQ ID NO: 1138967 - DNA, 15 bp, Homo sapiens
ttcatgaaaatgcca

SEQ ID NO: 1138968 - DNA, 15 bp, Homo sapiens
cttcatgaaaatgcc

SEQ ID NO: 1138969 - DNA, 15 bp, Homo sapiens
tcttcatgaaaatgc

SEQ ID NO: 1138970 - DNA, 15 bp, Homo sapiens
ttcttcatgaaaatg

SEQ ID NO: 1138971 - DNA, 15 bp, Homo sapiens
cttcttcatgaaaat

SEQ ID NO: 1138972 - DNA, 15 bp, Homo sapiens
acttcttcatgaaaa

SEQ ID NO: 1138973 - DNA, 15 bp, Homo sapiens
gacttcttcatgaaa

SEQ ID NO: 1138974 - DNA, 15 bp, Homo sapiens
agacttcttcatgaa

SEQ ID NO: 1138975 - DNA, 15 bp, Homo sapiens
tagacttcttcatga

SEQ ID NO: 1138976 - DNA, 15 bp, Homo sapiens
atagacttcttcatg

SEQ ID NO: 1138977 - DNA, 15 bp, Homo sapiens
aatagacttcttcat

SEQ ID NO: 1138978 - DNA, 15 bp, Homo sapiens
aaatagacttcttca

SEQ ID NO: 1138979 - DNA, 15 bp, Homo sapiens
taaatagacttcttc

SEQ ID NO: 1138980 - DNA, 15 bp, Homo sapiens
ataaatagacttctt

SEQ ID NO: 1138981 - DNA, 15 bp, Homo sapiens
cataaatagacttct

SEQ ID NO: 1138982 - DNA, 15 bp, Homo sapiens
acataaatagacttc

SEQ ID NO: 1138983 - DNA, 15 bp, Homo sapiens
tacataaatagactt

SEQ ID NO: 1138984 - DNA, 15 bp, Homo sapiens
atacataaatagact

SEQ ID NO: 1138985 - DNA, 15 bp, Homo sapiens
aatacataaatagac

SEQ ID NO: 1138986 - DNA, 15 bp, Homo sapiens
caatacataaataga

SEQ ID NO: 1138987 - DNA, 15 bp, Homo sapiens
gcaatacataaatag

SEQ ID NO: 1138988 - DNA, 15 bp, Homo sapiens
tgcaatacataaata

SEQ ID NO: 1138989 - DNA, 15 bp, Homo sapiens
gtgcaatacataaat

SEQ ID NO: 1138990 - DNA, 15 bp, Homo sapiens
agtgcaatacataaa

SEQ ID NO: 1138991 - DNA, 15 bp, Homo sapiens
cagtgcaatacataa

SEQ ID NO: 1138992 - DNA, 15 bp, Homo sapiens
ccagtgcaatacata

SEQ ID NO: 1138993 - DNA, 15 bp, Homo sapiens
gccagtgcaatacat

SEQ ID NO: 1138994 - DNA, 15 bp, Homo sapiens
agccagtgcaataca

SEQ ID NO: 1138995 - DNA, 15 bp, Homo sapiens
aagccagtgcaatac

SEQ ID NO: 1138996 - DNA, 15 bp, Homo sapiens
taagccagtgcaata

SEQ ID NO: 1138997 - DNA, 15 bp, Homo sapiens
ttaagccagtgcaat

SEQ ID NO: 1138998 - DNA, 15 bp, Homo sapiens
gttaagccagtgcaa

SEQ ID NO: 1138999 - DNA, 15 bp, Homo sapiens
tgttaagccagtgca

SEQ ID NO: 1139000 - DNA, 15 bp, Homo sapiens
atgttaagccagtgc

SEQ ID NO: 1139001 - DNA, 15 bp, Homo sapiens
aatgttaagccagtg

SEQ ID NO: 1139002 - DNA, 15 bp, Homo sapiens
aaatgttaagccagt

SEQ ID NO: 1139003 - DNA, 15 bp, Homo sapiens
caaatgttaagccag

SEQ ID NO: 1139004 - DNA, 15 bp, Homo sapiens
tcaaatgttaagcca

SEQ ID NO: 1139005 - DNA, 15 bp, Homo sapiens
atcaaatgttaagcc

SEQ ID NO: 1139006 - DNA, 15 bp, Homo sapiens
catcaaatgttaagc

SEQ ID NO: 1139007 - DNA, 15 bp, Homo sapiens
gcatcaaatgttaag

SEQ ID NO: 1139008 - DNA, 15 bp, Homo sapiens
cgcatcaaatgttaa

SEQ ID NO: 1139009 - DNA, 15 bp, Homo sapiens
acgcatcaaatgtta

SEQ ID NO: 1139010 - DNA, 15 bp, Homo sapiens
cacgcatcaaatgtt

SEQ ID NO: 1139011 - DNA, 15 bp, Homo sapiens
acacgcatcaaatgt

SEQ ID NO: 1139012 - DNA, 15 bp, Homo sapiens
cacacgcatcaaatg

SEQ ID NO: 1139013 - DNA, 15 bp, Homo sapiens
gcacacgcatcaaat

SEQ ID NO: 1139014 - DNA, 15 bp, Homo sapiens
tgcacacgcatcaaa

SEQ ID NO: 1139015 - DNA, 15 bp, Homo sapiens
ttgcacacgcatcaa

SEQ ID NO: 1139016 - DNA, 15 bp, Homo sapiens
tttgcacacgcatca

SEQ ID NO: 1139017 - DNA, 15 bp, Homo sapiens
ctttgcacacgcatc

SEQ ID NO: 1139018 - DNA, 15 bp, Homo sapiens
cctttgcacacgcat

SEQ ID NO: 1139019 - DNA, 15 bp, Homo sapiens
tcctttgcacacgca

SEQ ID NO: 1139020 - DNA, 15 bp, Homo sapiens
ctcctttgcacacgc

SEQ ID NO: 1139021 - DNA, 15 bp, Homo sapiens
gctcctttgcacacg

SEQ ID NO: 1139022 - DNA, 15 bp, Homo sapiens
agctcctttgcacac

SEQ ID NO: 1139023 - DNA, 15 bp, Homo sapiens
tagctcctttgcaca

SEQ ID NO: 1139024 - DNA, 15 bp, Homo sapiens
atagctcctttgcac

SEQ ID NO: 1139025 - DNA, 15 bp, Homo sapiens
aatagctcctttgca

SEQ ID NO: 1139026 - DNA, 15 bp, Homo sapiens
gaatagctcctttgc

SEQ ID NO: 1139027 - DNA, 15 bp, Homo sapiens
ggaatagctcctttg

SEQ ID NO: 1139028 - DNA, 15 bp, Homo sapiens
aggaatagctccttt

SEQ ID NO: 1139029 - DNA, 15 bp, Homo sapiens
taggaatagctcctt

SEQ ID NO: 1139030 - DNA, 15 bp, Homo sapiens
gtaggaatagctcct

SEQ ID NO: 1139031 - DNA, 15 bp, Homo sapiens
tgtaggaatagctcc

SEQ ID NO: 1139032 - DNA, 15 bp, Homo sapiens
ttgtaggaatagctc

SEQ ID NO: 1139033 - DNA, 15 bp, Homo sapiens
tttgtaggaatagct

SEQ ID NO: 1139034 - DNA, 15 bp, Homo sapiens
ttttgtaggaatagc

SEQ ID NO: 1139035 - DNA, 15 bp, Homo sapiens
cttttgtaggaatag

SEQ ID NO: 1139036 - DNA, 15 bp, Homo sapiens
ccttttgtaggaata

SEQ ID NO: 1139037 - DNA, 15 bp, Homo sapiens
accttttgtaggaat

SEQ ID NO: 1139038 - DNA, 15 bp, Homo sapiens
caccttttgtaggaa

SEQ ID NO: 1139039 - DNA, 15 bp, Homo sapiens
acaccttttgtagga

SEQ ID NO: 1139040 - DNA, 15 bp, Homo sapiens
tacaccttttgtagg

SEQ ID NO: 1139041 - DNA, 15 bp, Homo sapiens
ctacaccttttgtag

SEQ ID NO: 1139042 - DNA, 15 bp, Homo sapiens
actacaccttttgta

SEQ ID NO: 1139043 - DNA, 15 bp, Homo sapiens
tactacaccttttgt

SEQ ID NO: 1139044 - DNA, 15 bp, Homo sapiens
ttactacaccttttg

SEQ ID NO: 1139045 - DNA, 15 bp, Homo sapiens
gttactacacctttt

SEQ ID NO: 1139046 - DNA, 15 bp, Homo sapiens
tgttactacaccttt

SEQ ID NO: 1139047 - DNA, 15 bp, Homo sapiens
gtgttactacacctt

SEQ ID NO: 1139048 - DNA, 15 bp, Homo sapiens
agtgttactacacct

SEQ ID NO: 1139049 - DNA, 15 bp, Homo sapiens
aagtgttactacacc

SEQ ID NO: 1139050 - DNA, 15 bp, Homo sapiens
gaagtgttactacac

SEQ ID NO: 1139051 - DNA, 15 bp, Homo sapiens
tgaagtgttactaca

SEQ ID NO: 1139052 - DNA, 15 bp, Homo sapiens
ctgaagtgttactac

SEQ ID NO: 1139053 - DNA, 15 bp, Homo sapiens
tctgaagtgttacta

SEQ ID NO: 1139054 - DNA, 15 bp, Homo sapiens
ttctgaagtgttact

SEQ ID NO: 1139055 - DNA, 15 bp, Homo sapiens
gttctgaagtgttac

SEQ ID NO: 1139056 - DNA, 15 bp, Homo sapiens
ggttctgaagtgtta

SEQ ID NO: 1139057 - DNA, 15 bp, Homo sapiens
gggttctgaagtgtt

SEQ ID NO: 1139058 - DNA, 15 bp, Homo sapiens
tgggttctgaagtgt

SEQ ID NO: 1139059 - DNA, 15 bp, Homo sapiens
ctgggttctgaagtg

SEQ ID NO: 1139060 - DNA, 15 bp, Homo sapiens
cctgggttctgaagt

SEQ ID NO: 1139061 - DNA, 15 bp, Homo sapiens
tcctgggttctgaag

SEQ ID NO: 1139062 - DNA, 15 bp, Homo sapiens
ttcctgggttctgaa

SEQ ID NO: 1139063 - DNA, 15 bp, Homo sapiens
tttcctgggttctga

SEQ ID NO: 1139064 - DNA, 15 bp, Homo sapiens
ctttcctgggttctg

SEQ ID NO: 1139065 - DNA, 15 bp, Homo sapiens
actttcctgggttct

SEQ ID NO: 1139066 - DNA, 15 bp, Homo sapiens
gactttcctgggttc

SEQ ID NO: 1139067 - DNA, 15 bp, Homo sapiens
ggactttcctgggtt

SEQ ID NO: 1139068 - DNA, 15 bp, Homo sapiens
aggactttcctgggt

SEQ ID NO: 1139069 - DNA, 15 bp, Homo sapiens
gaggactttcctggg

SEQ ID NO: 1139070 - DNA, 15 bp, Homo sapiens
tgaggactttcctgg

SEQ ID NO: 1139071 - DNA, 15 bp, Homo sapiens
ctgaggactttcctg

SEQ ID NO: 1139072 - DNA, 15 bp, Homo sapiens
tctgaggactttcct

SEQ ID NO: 1139073 - DNA, 15 bp, Homo sapiens
ctctgaggactttcc

SEQ ID NO: 1139074 - DNA, 15 bp, Homo sapiens
cctctgaggactttc

SEQ ID NO: 1139075 - DNA, 15 bp, Homo sapiens
ccctctgaggacttt

SEQ ID NO: 1139076 - DNA, 15 bp, Homo sapiens
cccctctgaggactt

SEQ ID NO: 1139077 - DNA, 15 bp, Homo sapiens
tcccctctgaggact

SEQ ID NO: 1139078 - DNA, 15 bp, Homo sapiens
ttcccctctgaggac

SEQ ID NO: 1139079 - DNA, 15 bp, Homo sapiens
cttcccctctgagga

SEQ ID NO: 1139080 - DNA, 15 bp, Homo sapiens
gcttcccctctgagg

SEQ ID NO: 1139081 - DNA, 15 bp, Homo sapiens
ggcttcccctctgag

SEQ ID NO: 1139082 - DNA, 15 bp, Homo sapiens
gggcttcccctctga

SEQ ID NO: 1139083 - DNA, 15 bp, Homo sapiens
tgggcttcccctctg

SEQ ID NO: 1139084 - DNA, 15 bp, Homo sapiens
gtgggcttcccctct

SEQ ID NO: 1139085 - DNA, 15 bp, Homo sapiens
tgtgggcttcccctc

SEQ ID NO: 1139086 - DNA, 15 bp, Homo sapiens
ctgtgggcttcccct

SEQ ID NO: 1139087 - DNA, 15 bp, Homo sapiens
gctgtgggcttcccc

SEQ ID NO: 1139088 - DNA, 15 bp, Homo sapiens
agctgtgggcttccc

SEQ ID NO: 1139089 - DNA, 15 bp, Homo sapiens
aagctgtgggcttcc

SEQ ID NO: 1139090 - DNA, 15 bp, Homo sapiens
gaagctgtgggcttc

SEQ ID NO: 1139091 - DNA, 15 bp, Homo sapiens
agaagctgtgggctt

SEQ ID NO: 1139092 - DNA, 15 bp, Homo sapiens
cagaagctgtgggct

SEQ ID NO: 1139093 - DNA, 15 bp, Homo sapiens
gcagaagctgtgggc

SEQ ID NO: 1139094 - DNA, 15 bp, Homo sapiens
agcagaagctgtggg

SEQ ID NO: 1139095 - DNA, 15 bp, Homo sapiens
cagcagaagctgtgg

SEQ ID NO: 1139096 - DNA, 15 bp, Homo sapiens
ccagcagaagctgtg

SEQ ID NO: 1139097 - DNA, 15 bp, Homo sapiens
tccagcagaagctgt

SEQ ID NO: 1139098 - DNA, 15 bp, Homo sapiens
ttccagcagaagctg

SEQ ID NO: 1139099 - DNA, 15 bp, Homo sapiens
tttccagcagaagct

SEQ ID NO: 1139100 - DNA, 15 bp, Homo sapiens
ctttccagcagaagc

SEQ ID NO: 1139101 - DNA, 15 bp, Homo sapiens
tctttccagcagaag

SEQ ID NO: 1139102 - DNA, 15 bp, Homo sapiens
ttctttccagcagaa

SEQ ID NO: 1139103 - DNA, 15 bp, Homo sapiens
cttctttccagcaga

SEQ ID NO: 1139104 - DNA, 15 bp, Homo sapiens
tcttctttccagcag

SEQ ID NO: 1139105 - DNA, 15 bp, Homo sapiens
ttcttctttccagca

SEQ ID NO: 1139106 - DNA, 15 bp, Homo sapiens
tttcttctttccagc

SEQ ID NO: 1139107 - DNA, 15 bp, Homo sapiens
ctttcttctttccag

SEQ ID NO: 1139108 - DNA, 15 bp, Homo sapiens
gctttcttctttcca

SEQ ID NO: 1139109 - DNA, 15 bp, Homo sapiens
tgctttcttctttcc

SEQ ID NO: 1139110 - DNA, 15 bp, Homo sapiens
ctgctttcttctttc

SEQ ID NO: 1139111 - DNA, 15 bp, Homo sapiens
gctgctttcttcttt

SEQ ID NO: 1139112 - DNA, 15 bp, Homo sapiens
agctgctttcttctt

SEQ ID NO: 1139113 - DNA, 15 bp, Homo sapiens
gagctgctttcttct

SEQ ID NO: 1139114 - DNA, 15 bp, Homo sapiens
tgagctgctttcttc

SEQ ID NO: 1139115 - DNA, 15 bp, Homo sapiens
ttgagctgctttctt

SEQ ID NO: 1139116 - DNA, 15 bp, Homo sapiens
tttgagctgctttct

SEQ ID NO: 1139117 - DNA, 15 bp, Homo sapiens
ttttgagctgctttc

SEQ ID NO: 1139118 - DNA, 15 bp, Homo sapiens
cttttgagctgcttt

SEQ ID NO: 1139119 - DNA, 15 bp, Homo sapiens
tcttttgagctgctt

SEQ ID NO: 1139120 - DNA, 15 bp, Homo sapiens
ctcttttgagctgct

SEQ ID NO: 1139121 - DNA, 15 bp, Homo sapiens
tctcttttgagctgc

SEQ ID NO: 1139122 - DNA, 15 bp, Homo sapiens
ttctcttttgagctg

SEQ ID NO: 1139123 - DNA, 15 bp, Homo sapiens
tttctcttttgagct

SEQ ID NO: 1139124 - DNA, 15 bp, Homo sapiens
atttctcttttgagc

SEQ ID NO: 1139125 - DNA, 15 bp, Homo sapiens
tatttctcttttgag

SEQ ID NO: 1139126 - DNA, 15 bp, Homo sapiens
gtatttctcttttga

SEQ ID NO: 1139127 - DNA, 15 bp, Homo sapiens
tgtatttctcttttg

SEQ ID NO: 1139128 - DNA, 15 bp, Homo sapiens
ctgtatttctctttt

SEQ ID NO: 1139129 - DNA, 15 bp, Homo sapiens
tctgtatttctcttt

SEQ ID NO: 1139130 - DNA, 15 bp, Homo sapiens
ttctgtatttctctt

SEQ ID NO: 1139131 - DNA, 15 bp, Homo sapiens
tttctgtatttctct

SEQ ID NO: 1139132 - DNA, 15 bp, Homo sapiens
ctttctgtatttctc

SEQ ID NO: 1139133 - DNA, 15 bp, Homo sapiens
actttctgtatttct

SEQ ID NO: 1139134 - DNA, 15 bp, Homo sapiens
aactttctgtatttc

SEQ ID NO: 1139135 - DNA, 15 bp, Homo sapiens
taactttctgtattt

SEQ ID NO: 1139136 - DNA, 15 bp, Homo sapiens
ttaactttctgtatt

SEQ ID NO: 1139137 - DNA, 15 bp, Homo sapiens
gttaactttctgtat

SEQ ID NO: 1139138 - DNA, 15 bp, Homo sapiens
tgttaactttctgta

SEQ ID NO: 1139139 - DNA, 15 bp, Homo sapiens
ttgttaactttctgt

SEQ ID NO: 1139140 - DNA, 15 bp, Homo sapiens
attgttaactttctg

SEQ ID NO: 1139141 - DNA, 15 bp, Homo sapiens
tattgttaactttct

SEQ ID NO: 1139142 - DNA, 15 bp, Homo sapiens
ttattgttaactttc

SEQ ID NO: 1139143 - DNA, 15 bp, Homo sapiens
cttattgttaacttt

SEQ ID NO: 1139144 - DNA, 15 bp, Homo sapiens
acttattgttaactt

SEQ ID NO: 1139145 - DNA, 15 bp, Homo sapiens
aacttattgttaact

SEQ ID NO: 1139146 - DNA, 15 bp, Homo sapiens
taacttattgttaac

SEQ ID NO: 1139147 - DNA, 15 bp, Homo sapiens
ttaacttattgttaa

SEQ ID NO: 1139148 - DNA, 15 bp, Homo sapiens
cttaacttattgtta

SEQ ID NO: 1139149 - DNA, 15 bp, Homo sapiens
tcttaacttattgtt

SEQ ID NO: 1139150 - DNA, 15 bp, Homo sapiens
gtcttaacttattgt

SEQ ID NO: 1139151 - DNA, 15 bp, Homo sapiens
ggtcttaacttattg

SEQ ID NO: 1139152 - DNA, 15 bp, Homo sapiens
tggtcttaacttatt

SEQ ID NO: 1139153 - DNA, 15 bp, Homo sapiens
gtggtcttaacttat

SEQ ID NO: 1139154 - DNA, 15 bp, Homo sapiens
tgtggtcttaactta

SEQ ID NO: 1139155 - DNA, 15 bp, Homo sapiens
atgtggtcttaactt

SEQ ID NO: 1139156 - DNA, 15 bp, Homo sapiens
catgtggtcttaact

SEQ ID NO: 1139157 - DNA, 15 bp, Homo sapiens
tcatgtggtcttaac

SEQ ID NO: 1139158 - DNA, 15 bp, Homo sapiens
atcatgtggtcttaa

SEQ ID NO: 1139159 - DNA, 15 bp, Homo sapiens
aatcatgtggtctta

SEQ ID NO: 1139160 - DNA, 15 bp, Homo sapiens
taatcatgtggtctt

SEQ ID NO: 1139161 - DNA, 15 bp, Homo sapiens
ataatcatgtggtct

SEQ ID NO: 1139162 - DNA, 15 bp, Homo sapiens
cataatcatgtggtc

SEQ ID NO: 1139163 - DNA, 15 bp, Homo sapiens
tcataatcatgtggt

SEQ ID NO: 1139164 - DNA, 15 bp, Homo sapiens
ttcataatcatgtgg

SEQ ID NO: 1139165 - DNA, 15 bp, Homo sapiens
tttcataatcatgtg

SEQ ID NO: 1139166 - DNA, 15 bp, Homo sapiens
atttcataatcatgt

SEQ ID NO: 1139167 - DNA, 15 bp, Homo sapiens
gatttcataatcatg

SEQ ID NO: 1139168 - DNA, 15 bp, Homo sapiens
tgatttcataatcat

SEQ ID NO: 1139169 - DNA, 15 bp, Homo sapiens
ttgatttcataatca

SEQ ID NO: 1139170 - DNA, 15 bp, Homo sapiens
tttgatttcataatc

SEQ ID NO: 1139171 - DNA, 15 bp, Homo sapiens
atttgatttcataat

SEQ ID NO: 1139172 - DNA, 15 bp, Homo sapiens
catttgatttcataa

SEQ ID NO: 1139173 - DNA, 15 bp, Homo sapiens
acatttgatttcata

SEQ ID NO: 1139174 - DNA, 15 bp, Homo sapiens
tacatttgatttcat

SEQ ID NO: 1139175 - DNA, 15 bp, Homo sapiens
ctacatttgatttca

SEQ ID NO: 1139176 - DNA, 15 bp, Homo sapiens
actacatttgatttc

SEQ ID NO: 1139177 - DNA, 15 bp, Homo sapiens
cactacatttgattt

SEQ ID NO: 1139178 - DNA, 15 bp, Homo sapiens
tcactacatttgatt

SEQ ID NO: 1139179 - DNA, 15 bp, Homo sapiens
ttcactacatttgat

SEQ ID NO: 1139180 - DNA, 15 bp, Homo sapiens
tttcactacatttga

SEQ ID NO: 1139181 - DNA, 15 bp, Homo sapiens
gtttcactacatttg

SEQ ID NO: 1139182 - DNA, 15 bp, Homo sapiens
agtttcactacattt

SEQ ID NO: 1139183 - DNA, 15 bp, Homo sapiens
tagtttcactacatt

SEQ ID NO: 1139184 - DNA, 15 bp, Homo sapiens
ttagtttcactacat

SEQ ID NO: 1139185 - DNA, 15 bp, Homo sapiens
attagtttcactaca

SEQ ID NO: 1139186 - DNA, 15 bp, Homo sapiens
aattagtttcactac

SEQ ID NO: 1139187 - DNA, 15 bp, Homo sapiens
aaattagtttcacta

SEQ ID NO: 1139188 - DNA, 15 bp, Homo sapiens
aaaattagtttcact

SEQ ID NO: 1139189 - DNA, 15 bp, Homo sapiens
aaaaattagtttcac

SEQ ID NO: 1139190 - DNA, 15 bp, Homo sapiens
taaaaattagtttca

SEQ ID NO: 1139191 - DNA, 15 bp, Homo sapiens
ataaaaattagtttc

SEQ ID NO: 1139192 - DNA, 15 bp, Homo sapiens
tataaaaattagttt

SEQ ID NO: 1139193 - DNA, 15 bp, Homo sapiens
ttataaaaattagtt

SEQ ID NO: 1139194 - DNA, 15 bp, Homo sapiens
tttataaaaattagt

SEQ ID NO: 1139195 - DNA, 15 bp, Homo sapiens
ttttataaaaattag

SEQ ID NO: 1139196 - DNA, 15 bp, Homo sapiens
cttttataaaaatta

SEQ ID NO: 1139197 - DNA, 15 bp, Homo sapiens
gcttttataaaaatt

SEQ ID NO: 1139198 - DNA, 15 bp, Homo sapiens
tgcttttataaaaat

SEQ ID NO: 1139199 - DNA, 15 bp, Homo sapiens
ctgcttttataaaaa

SEQ ID NO: 1139200 - DNA, 15 bp, Homo sapiens
tctgcttttataaaa

SEQ ID NO: 1139201 - DNA, 15 bp, Homo sapiens
gtctgcttttataaa

SEQ ID NO: 1139202 - DNA, 15 bp, Homo sapiens
ggtctgcttttataa

SEQ ID NO: 1139203 - DNA, 15 bp, Homo sapiens
tggtctgcttttata

SEQ ID NO: 1139204 - DNA, 15 bp, Homo sapiens
ttggtctgcttttat

SEQ ID NO: 1139205 - DNA, 15 bp, Homo sapiens
tttggtctgctttta

SEQ ID NO: 1139206 - DNA, 15 bp, Homo sapiens
ctttggtctgctttt

SEQ ID NO: 1139207 - DNA, 15 bp, Homo sapiens
tctttggtctgcttt

SEQ ID NO: 1139208 - DNA, 15 bp, Homo sapiens
atctttggtctgctt

SEQ ID NO: 1139209 - DNA, 15 bp, Homo sapiens
tatctttggtctgct

SEQ ID NO: 1139210 - DNA, 15 bp, Homo sapiens
ttatctttggtctgc

SEQ ID NO: 1139211 - DNA, 15 bp, Homo sapiens
attatctttggtctg

SEQ ID NO: 1139212 - DNA, 15 bp, Homo sapiens
tattatctttggtct

SEQ ID NO: 1139213 - DNA, 15 bp, Homo sapiens
atattatctttggtc

SEQ ID NO: 1139214 - DNA, 15 bp, Homo sapiens
tatattatctttggt

SEQ ID NO: 1139215 - DNA, 15 bp, Homo sapiens
atatattatctttgg

SEQ ID NO: 1139216 - DNA, 15 bp, Homo sapiens
aatatattatctttg

SEQ ID NO: 1139217 - DNA, 15 bp, Homo sapiens
aaatatattatcttt

SEQ ID NO: 1139218 - DNA, 15 bp, Homo sapiens
taaatatattatctt

SEQ ID NO: 1139219 - DNA, 15 bp, Homo sapiens
ttaaatatattatct

SEQ ID NO: 1139220 - DNA, 15 bp, Homo sapiens
tttaaatatattatc

SEQ ID NO: 1139221 - DNA, 15 bp, Homo sapiens
ctttaaatatattat

SEQ ID NO: 1139222 - DNA, 15 bp, Homo sapiens
cctttaaatatatta

SEQ ID NO: 1139223 - DNA, 15 bp, Homo sapiens
tcctttaaatatatt

SEQ ID NO: 1139224 - DNA, 15 bp, Homo sapiens
ttcctttaaatatat

SEQ ID NO: 1139225 - DNA, 15 bp, Homo sapiens
cttcctttaaatata

SEQ ID NO: 1139226 - DNA, 15 bp, Homo sapiens
acttcctttaaatat

SEQ ID NO: 1139227 - DNA, 15 bp, Homo sapiens
aacttcctttaaata

SEQ ID NO: 1139228 - DNA, 15 bp, Homo sapiens
taacttcctttaaat

SEQ ID NO: 1139229 - DNA, 15 bp, Homo sapiens
ttaacttcctttaaa

SEQ ID NO: 1139230 - DNA, 15 bp, Homo sapiens
cttaacttcctttaa

SEQ ID NO: 1139231 - DNA, 15 bp, Homo sapiens
gcttaacttccttta

SEQ ID NO: 1139232 - DNA, 15 bp, Homo sapiens
ggcttaacttccttt

SEQ ID NO: 1139233 - DNA, 15 bp, Homo sapiens
aggcttaacttcctt

SEQ ID NO: 1139234 - DNA, 15 bp, Homo sapiens
caggcttaacttcct

SEQ ID NO: 1139235 - DNA, 15 bp, Homo sapiens
gcaggcttaacttcc

SEQ ID NO: 1139236 - DNA, 15 bp, Homo sapiens
agcaggcttaacttc

SEQ ID NO: 1139237 - DNA, 15 bp, Homo sapiens
aagcaggcttaactt

SEQ ID NO: 1139238 - DNA, 15 bp, Homo sapiens
gaagcaggcttaact

SEQ ID NO: 1139239 - DNA, 15 bp, Homo sapiens
tgaagcaggcttaac

SEQ ID NO: 1139240 - DNA, 15 bp, Homo sapiens
ttgaagcaggcttaa

SEQ ID NO: 1139241 - DNA, 15 bp, Homo sapiens
attgaagcaggctta

SEQ ID NO: 1139242 - DNA, 15 bp, Homo sapiens
gattgaagcaggctt

SEQ ID NO: 1139243 - DNA, 15 bp, Homo sapiens
tgattgaagcaggct

SEQ ID NO: 1139244 - DNA, 15 bp, Homo sapiens
ttgattgaagcaggc

SEQ ID NO: 1139245 - DNA, 15 bp, Homo sapiens
tttgattgaagcagg

SEQ ID NO: 1139246 - DNA, 15 bp, Homo sapiens
atttgattgaagcag

SEQ ID NO: 1139247 - DNA, 15 bp, Homo sapiens
aatttgattgaagca

SEQ ID NO: 1139248 - DNA, 15 bp, Homo sapiens
taatttgattgaagc

SEQ ID NO: 1139249 - DNA, 15 bp, Homo sapiens
ctaatttgattgaag

SEQ ID NO: 1139250 - DNA, 15 bp, Homo sapiens
actaatttgattgaa

SEQ ID NO: 1139251 - DNA, 15 bp, Homo sapiens
aactaatttgattga

SEQ ID NO: 1139252 - DNA, 15 bp, Homo sapiens
taactaatttgattg

SEQ ID NO: 1139253 - DNA, 15 bp, Homo sapiens
ataactaatttgatt

SEQ ID NO: 1139254 - DNA, 15 bp, Homo sapiens
tataactaatttgat

SEQ ID NO: 1139255 - DNA, 15 bp, Homo sapiens
atataactaatttga

SEQ ID NO: 1139256 - DNA, 15 bp, Homo sapiens
aatataactaatttg

SEQ ID NO: 1139257 - DNA, 15 bp, Homo sapiens
gaatataactaattt

SEQ ID NO: 1139258 - DNA, 15 bp, Homo sapiens
agaatataactaatt

SEQ ID NO: 1139259 - DNA, 15 bp, Homo sapiens
aagaatataactaat

SEQ ID NO: 1139260 - DNA, 15 bp, Homo sapiens
caagaatataactaa

SEQ ID NO: 1139261 - DNA, 15 bp, Homo sapiens
acaagaatataacta

SEQ ID NO: 1139262 - DNA, 15 bp, Homo sapiens
aacaagaatataact

SEQ ID NO: 1139263 - DNA, 15 bp, Homo sapiens
gaacaagaatataac

SEQ ID NO: 1139264 - DNA, 15 bp, Homo sapiens
agaacaagaatataa

SEQ ID NO: 1139265 - DNA, 15 bp, Homo sapiens
tagaacaagaatata

SEQ ID NO: 1139266 - DNA, 15 bp, Homo sapiens
ttagaacaagaatat

SEQ ID NO: 1139267 - DNA, 15 bp, Homo sapiens
attagaacaagaata

SEQ ID NO: 1139268 - DNA, 15 bp, Homo sapiens
aattagaacaagaat

SEQ ID NO: 1139269 - DNA, 15 bp, Homo sapiens
taattagaacaagaa

SEQ ID NO: 1139270 - DNA, 15 bp, Homo sapiens
ataattagaacaaga

SEQ ID NO: 1139271 - DNA, 15 bp, Homo sapiens
cataattagaacaag

SEQ ID NO: 1139272 - DNA, 15 bp, Homo sapiens
acataattagaacaa

SEQ ID NO: 1139273 - DNA, 15 bp, Homo sapiens
aacataattagaaca

SEQ ID NO: 1139274 - DNA, 15 bp, Homo sapiens
caacataattagaac

SEQ ID NO: 1139275 - DNA, 15 bp, Homo sapiens
gcaacataattagaa

SEQ ID NO: 1139276 - DNA, 15 bp, Homo sapiens
agcaacataattaga

SEQ ID NO: 1139277 - DNA, 15 bp, Homo sapiens
tagcaacataattag

SEQ ID NO: 1139278 - DNA, 15 bp, Homo sapiens
atagcaacataatta

SEQ ID NO: 1139279 - DNA, 15 bp, Homo sapiens
aatagcaacataatt

SEQ ID NO: 1139280 - DNA, 15 bp, Homo sapiens
caatagcaacataat

SEQ ID NO: 1139281 - DNA, 15 bp, Homo sapiens
gcaatagcaacataa

SEQ ID NO: 1139282 - DNA, 15 bp, Homo sapiens
ggcaatagcaacata

SEQ ID NO: 1139283 - DNA, 15 bp, Homo sapiens
gggcaatagcaacat

SEQ ID NO: 1139284 - DNA, 15 bp, Homo sapiens
tgggcaatagcaaca

SEQ ID NO: 1139285 - DNA, 15 bp, Homo sapiens
atgggcaatagcaac

SEQ ID NO: 1139286 - DNA, 15 bp, Homo sapiens
catgggcaatagcaa

SEQ ID NO: 1139287 - DNA, 15 bp, Homo sapiens
ccatgggcaatagca

SEQ ID NO: 1139288 - DNA, 15 bp, Homo sapiens
gccatgggcaatagc

SEQ ID NO: 1139289 - DNA, 15 bp, Homo sapiens
tgccatgggcaatag

SEQ ID NO: 1139290 - DNA, 15 bp, Homo sapiens
gtgccatgggcaata

SEQ ID NO: 1139291 - DNA, 15 bp, Homo sapiens
tgtgccatgggcaat

SEQ ID NO: 1139292 - DNA, 15 bp, Homo sapiens
atgtgccatgggcaa

SEQ ID NO: 1139293 - DNA, 15 bp, Homo sapiens
aatgtgccatgggca

SEQ ID NO: 1139294 - DNA, 15 bp, Homo sapiens
gaatgtgccatgggc

SEQ ID NO: 1139295 - DNA, 15 bp, Homo sapiens
agaatgtgccatggg

SEQ ID NO: 1139296 - DNA, 15 bp, Homo sapiens
aagaatgtgccatgg

SEQ ID NO: 1139297 - DNA, 15 bp, Homo sapiens
aaagaatgtgccatg

SEQ ID NO: 1139298 - DNA, 15 bp, Homo sapiens
aaaagaatgtgccat

SEQ ID NO: 1139299 - DNA, 15 bp, Homo sapiens
caaaagaatgtgcca

SEQ ID NO: 1139300 - DNA, 15 bp, Homo sapiens
tcaaaagaatgtgcc

SEQ ID NO: 1139301 - DNA, 15 bp, Homo sapiens
ttcaaaagaatgtgc

SEQ ID NO: 1139302 - DNA, 15 bp, Homo sapiens
gttcaaaagaatgtg

SEQ ID NO: 1139303 - DNA, 15 bp, Homo sapiens
tgttcaaaagaatgt

SEQ ID NO: 1139304 - DNA, 15 bp, Homo sapiens
atgttcaaaagaatg

SEQ ID NO: 1139305 - DNA, 15 bp, Homo sapiens
tatgttcaaaagaat

SEQ ID NO: 1139306 - DNA, 15 bp, Homo sapiens
atatgttcaaaagaa

SEQ ID NO: 1139307 - DNA, 15 bp, Homo sapiens
aatatgttcaaaaga

SEQ ID NO: 1139308 - DNA, 15 bp, Homo sapiens
aaatatgttcaaaag

SEQ ID NO: 1139309 - DNA, 15 bp, Homo sapiens
taaatatgttcaaaa

SEQ ID NO: 1139310 - DNA, 15 bp, Homo sapiens
ctaaatatgttcaaa

SEQ ID NO: 1139311 - DNA, 15 bp, Homo sapiens
actaaatatgttcaa

SEQ ID NO: 1139312 - DNA, 15 bp, Homo sapiens
cactaaatatgttca

SEQ ID NO: 1139313 - DNA, 15 bp, Homo sapiens
ccactaaatatgttc

SEQ ID NO: 1139314 - DNA, 15 bp, Homo sapiens
gccactaaatatgtt

SEQ ID NO: 1139315 - DNA, 15 bp, Homo sapiens
tgccactaaatatgt

SEQ ID NO: 1139316 - DNA, 15 bp, Homo sapiens
ctgccactaaatatg

SEQ ID NO: 1139317 - DNA, 15 bp, Homo sapiens
tctgccactaaatat

SEQ ID NO: 1139318 - DNA, 15 bp, Homo sapiens
atctgccactaaata

SEQ ID NO: 1139319 - DNA, 15 bp, Homo sapiens
catctgccactaaat

SEQ ID NO: 1139320 - DNA, 15 bp, Homo sapiens
acatctgccactaaa

SEQ ID NO: 1139321 - DNA, 15 bp, Homo sapiens
aacatctgccactaa

SEQ ID NO: 1139322 - DNA, 15 bp, Homo sapiens
aaacatctgccacta

SEQ ID NO: 1139323 - DNA, 15 bp, Homo sapiens
caaacatctgccact

SEQ ID NO: 1139324 - DNA, 15 bp, Homo sapiens
acaaacatctgccac

SEQ ID NO: 1139325 - DNA, 15 bp, Homo sapiens
gacaaacatctgcca

SEQ ID NO: 1139326 - DNA, 15 bp, Homo sapiens
ggacaaacatctgcc

SEQ ID NO: 1139327 - DNA, 15 bp, Homo sapiens
tggacaaacatctgc

SEQ ID NO: 1139328 - DNA, 15 bp, Homo sapiens
ctggacaaacatctg

SEQ ID NO: 1139329 - DNA, 15 bp, Homo sapiens
actggacaaacatct

SEQ ID NO: 1139330 - DNA, 15 bp, Homo sapiens
cactggacaaacatc

SEQ ID NO: 1139331 - DNA, 15 bp, Homo sapiens
tcactggacaaacat

SEQ ID NO: 1139332 - DNA, 15 bp, Homo sapiens
atcactggacaaaca

SEQ ID NO: 1139333 - DNA, 15 bp, Homo sapiens
aatcactggacaaac

SEQ ID NO: 1139334 - DNA, 15 bp, Homo sapiens
aaatcactggacaaa

SEQ ID NO: 1139335 - DNA, 15 bp, Homo sapiens
aaaatcactggacaa

SEQ ID NO: 1139336 - DNA, 15 bp, Homo sapiens
taaaatcactggaca

SEQ ID NO: 1139337 - DNA, 15 bp, Homo sapiens
ctaaaatcactggac

SEQ ID NO: 1139338 - DNA, 15 bp, Homo sapiens
actaaaatcactgga

SEQ ID NO: 1139339 - DNA, 15 bp, Homo sapiens
gactaaaatcactgg

SEQ ID NO: 1139340 - DNA, 15 bp, Homo sapiens
tgactaaaatcactg

SEQ ID NO: 1139341 - DNA, 15 bp, Homo sapiens
ttgactaaaatcact

SEQ ID NO: 1139342 - DNA, 15 bp, Homo sapiens
attgactaaaatcac

SEQ ID NO: 1139343 - DNA, 15 bp, Homo sapiens
tattgactaaaatca

SEQ ID NO: 1139344 - DNA, 15 bp, Homo sapiens
gtattgactaaaatc

SEQ ID NO: 1139345 - DNA, 15 bp, Homo sapiens
agtattgactaaaat

SEQ ID NO: 1139346 - DNA, 15 bp, Homo sapiens
aagtattgactaaaa

SEQ ID NO: 1139347 - DNA, 15 bp, Homo sapiens
aaagtattgactaaa

SEQ ID NO: 1139348 - DNA, 15 bp, Homo sapiens
taaagtattgactaa

SEQ ID NO: 1139349 - DNA, 15 bp, Homo sapiens
gtaaagtattgacta

SEQ ID NO: 1139350 - DNA, 15 bp, Homo sapiens
tgtaaagtattgact

SEQ ID NO: 1139351 - DNA, 15 bp, Homo sapiens
atgtaaagtattgac

SEQ ID NO: 1139352 - DNA, 15 bp, Homo sapiens
tatgtaaagtattga

SEQ ID NO: 1139353 - DNA, 15 bp, Homo sapiens
ttatgtaaagtattg

SEQ ID NO: 1139354 - DNA, 15 bp, Homo sapiens
attatgtaaagtatt

SEQ ID NO: 1139355 - DNA, 15 bp, Homo sapiens
aattatgtaaagtat

SEQ ID NO: 1139356 - DNA, 15 bp, Homo sapiens
aaattatgtaaagta

SEQ ID NO: 1139357 - DNA, 15 bp, Homo sapiens
caaattatgtaaagt

SEQ ID NO: 1139358 - DNA, 15 bp, Homo sapiens
ccaaattatgtaaag

SEQ ID NO: 1139359 - DNA, 15 bp, Homo sapiens
tccaaattatgtaaa

SEQ ID NO: 1139360 - DNA, 15 bp, Homo sapiens
ttccaaattatgtaa

SEQ ID NO: 1139361 - DNA, 15 bp, Homo sapiens
attccaaattatgta

SEQ ID NO: 1139362 - DNA, 15 bp, Homo sapiens
gattccaaattatgt

SEQ ID NO: 1139363 - DNA, 15 bp, Homo sapiens
tgattccaaattatg

SEQ ID NO: 1139364 - DNA, 15 bp, Homo sapiens
atgattccaaattat

SEQ ID NO: 1139365 - DNA, 15 bp, Homo sapiens
gatgattccaaatta

SEQ ID NO: 1139366 - DNA, 15 bp, Homo sapiens
agatgattccaaatt

SEQ ID NO: 1139367 - DNA, 15 bp, Homo sapiens
aagatgattccaaat

SEQ ID NO: 1139368 - DNA, 15 bp, Homo sapiens
taagatgattccaaa

SEQ ID NO: 1139369 - DNA, 15 bp, Homo sapiens
ataagatgattccaa

SEQ ID NO: 1139370 - DNA, 15 bp, Homo sapiens
cataagatgattcca

SEQ ID NO: 1139371 - DNA, 15 bp, Homo sapiens
tcataagatgattcc

SEQ ID NO: 1139372 - DNA, 15 bp, Homo sapiens
ctcataagatgattc

SEQ ID NO: 1139373 - DNA, 15 bp, Homo sapiens
actcataagatgatt

SEQ ID NO: 1139374 - DNA, 15 bp, Homo sapiens
tactcataagatgat

SEQ ID NO: 1139375 - DNA, 15 bp, Homo sapiens
ttactcataagatga

SEQ ID NO: 1139376 - DNA, 15 bp, Homo sapiens
tttactcataagatg

SEQ ID NO: 1139377 - DNA, 15 bp, Homo sapiens
ttttactcataagat

SEQ ID NO: 1139378 - DNA, 15 bp, Homo sapiens
gttttactcataaga

SEQ ID NO: 1139379 - DNA, 15 bp, Homo sapiens
agttttactcataag

SEQ ID NO: 1139380 - DNA, 15 bp, Homo sapiens
aagttttactcataa

SEQ ID NO: 1139381 - DNA, 15 bp, Homo sapiens
aaagttttactcata

SEQ ID NO: 1139382 - DNA, 15 bp, Homo sapiens
taaagttttactcat

SEQ ID NO: 1139383 - DNA, 15 bp, Homo sapiens
ataaagttttactca

SEQ ID NO: 1139384 - DNA, 15 bp, Homo sapiens
gataaagttttactc

SEQ ID NO: 1139385 - DNA, 15 bp, Homo sapiens
tgataaagttttact

SEQ ID NO: 1139386 - DNA, 15 bp, Homo sapiens
atgataaagttttac

SEQ ID NO: 1139387 - DNA, 15 bp, Homo sapiens
aatgataaagtttta

SEQ ID NO: 1139388 - DNA, 15 bp, Homo sapiens
aaatgataaagtttt

SEQ ID NO: 1139389 - DNA, 15 bp, Homo sapiens
taaatgataaagttt

SEQ ID NO: 1139390 - DNA, 15 bp, Homo sapiens
gtaaatgataaagtt

SEQ ID NO: 1139391 - DNA, 15 bp, Homo sapiens
ggtaaatgataaagt

SEQ ID NO: 1139392 - DNA, 15 bp, Homo sapiens
aggtaaatgataaag

SEQ ID NO: 1139393 - DNA, 15 bp, Homo sapiens
caggtaaatgataaa

SEQ ID NO: 1139394 - DNA, 15 bp, Homo sapiens
ccaggtaaatgataa

SEQ ID NO: 1139395 - DNA, 15 bp, Homo sapiens
tccaggtaaatgata

SEQ ID NO: 1139396 - DNA, 15 bp, Homo sapiens
atccaggtaaatgat

SEQ ID NO: 1139397 - DNA, 15 bp, Homo sapiens
tatccaggtaaatga

SEQ ID NO: 1139398 - DNA, 15 bp, Homo sapiens
ttatccaggtaaatg

SEQ ID NO: 1139399 - DNA, 15 bp, Homo sapiens
tttatccaggtaaat

SEQ ID NO: 1139400 - DNA, 15 bp, Homo sapiens
atttatccaggtaaa

SEQ ID NO: 1139401 - DNA, 15 bp, Homo sapiens
catttatccaggtaa

SEQ ID NO: 1139402 - DNA, 15 bp, Homo sapiens
gcatttatccaggta

SEQ ID NO: 1139403 - DNA, 15 bp, Homo sapiens
tgcatttatccaggt

SEQ ID NO: 1139404 - DNA, 15 bp, Homo sapiens
atgcatttatccagg

SEQ ID NO: 1139405 - DNA, 15 bp, Homo sapiens
gatgcatttatccag

SEQ ID NO: 1139406 - DNA, 15 bp, Homo sapiens
tgatgcatttatcca

SEQ ID NO: 1139407 - DNA, 15 bp, Homo sapiens
atgatgcatttatcc

SEQ ID NO: 1139408 - DNA, 15 bp, Homo sapiens
tatgatgcatttatc

SEQ ID NO: 1139409 - DNA, 15 bp, Homo sapiens
atatgatgcatttat

SEQ ID NO: 1139410 - DNA, 15 bp, Homo sapiens
aatatgatgcattta

SEQ ID NO: 1139411 - DNA, 15 bp, Homo sapiens
aaatatgatgcattt

SEQ ID NO: 1139412 - DNA, 15 bp, Homo sapiens
taaatatgatgcatt

SEQ ID NO: 1139413 - DNA, 15 bp, Homo sapiens
ataaatatgatgcat

SEQ ID NO: 1139414 - DNA, 15 bp, Homo sapiens
cataaatatgatgca

SEQ ID NO: 1139415 - DNA, 15 bp, Homo sapiens
acataaatatgatgc

SEQ ID NO: 1139416 - DNA, 15 bp, Homo sapiens
tacataaatatgatg

SEQ ID NO: 1139417 - DNA, 15 bp, Homo sapiens
ttacataaatatgat

SEQ ID NO: 1139418 - DNA, 15 bp, Homo sapiens
tttacataaatatga

SEQ ID NO: 1139419 - DNA, 15 bp, Homo sapiens
ttttacataaatatg

SEQ ID NO: 1139420 - DNA, 15 bp, Homo sapiens
tttttacataaatat

SEQ ID NO: 1139421 - DNA, 15 bp, Homo sapiens
atttttacataaata

SEQ ID NO: 1139422 - DNA, 15 bp, Homo sapiens
gatttttacataaat

SEQ ID NO: 1139423 - DNA, 15 bp, Homo sapiens
tgatttttacataaa

SEQ ID NO: 1139424 - DNA, 15 bp, Homo sapiens
atgatttttacataa

SEQ ID NO: 1139425 - DNA, 15 bp, Homo sapiens
gatgatttttacata

SEQ ID NO: 1139426 - DNA, 15 bp, Homo sapiens
tgatgatttttacat

SEQ ID NO: 1139427 - DNA, 15 bp, Homo sapiens
atgatgatttttaca

SEQ ID NO: 1139428 - DNA, 15 bp, Homo sapiens
tatgatgatttttac

SEQ ID NO: 1139429 - DNA, 15 bp, Homo sapiens
atatgatgattttta

SEQ ID NO: 1139430 - DNA, 15 bp, Homo sapiens
tatatgatgattttt

SEQ ID NO: 1139431 - DNA, 15 bp, Homo sapiens
atatatgatgatttt

SEQ ID NO: 1139432 - DNA, 15 bp, Homo sapiens
tatatatgatgattt

SEQ ID NO: 1139433 - DNA, 15 bp, Homo sapiens
atatatatgatgatt

SEQ ID NO: 1139434 - DNA, 15 bp, Homo sapiens
tatatatatgatgat

SEQ ID NO: 1139435 - DNA, 15 bp, Homo sapiens
atatatatatgatga

SEQ ID NO: 1139436 - DNA, 15 bp, Homo sapiens
tatatatatatgatg

SEQ ID NO: 1139437 - DNA, 15 bp, Homo sapiens
ttatatatatatgat

SEQ ID NO: 1139438 - DNA, 15 bp, Homo sapiens
tttatatatatatga

SEQ ID NO: 1139439 - DNA, 15 bp, Homo sapiens
atttatatatatatg

SEQ ID NO: 1139440 - DNA, 15 bp, Homo sapiens
gatttatatatatat

SEQ ID NO: 1139441 - DNA, 15 bp, Homo sapiens
tgatttatatatata

SEQ ID NO: 1139442 - DNA, 15 bp, Homo sapiens
atgatttatatatat

SEQ ID NO: 1139443 - DNA, 15 bp, Homo sapiens
gatgatttatatata

SEQ ID NO: 1139444 - DNA, 15 bp, Homo sapiens
tgatgatttatatat

SEQ ID NO: 1139445 - DNA, 15 bp, Homo sapiens
atgatgatttatata

SEQ ID NO: 1139446 - DNA, 15 bp, Homo sapiens
tatgatgatttatat

SEQ ID NO: 1139447 - DNA, 15 bp, Homo sapiens
gtatgatgatttata

SEQ ID NO: 1139448 - DNA, 15 bp, Homo sapiens
tgtatgatgatttat

SEQ ID NO: 1139449 - DNA, 15 bp, Homo sapiens
gtgtatgatgattta

SEQ ID NO: 1139450 - DNA, 15 bp, Homo sapiens
tgtgtatgatgattt

SEQ ID NO: 1139451 - DNA, 15 bp, Homo sapiens
gtgtgtatgatgatt

SEQ ID NO: 1139452 - DNA, 15 bp, Homo sapiens
tgtgtgtatgatgat

SEQ ID NO: 1139453 - DNA, 15 bp, Homo sapiens
gtgtgtgtatgatga

SEQ ID NO: 1139454 - DNA, 15 bp, Homo sapiens
tgtgtgtgtatgatg

SEQ ID NO: 1139455 - DNA, 15 bp, Homo sapiens
gtgtgtgtgtatgat

SEQ ID NO: 1139456 - DNA, 15 bp, Homo sapiens
tgtgtgtgtgtatga

SEQ ID NO: 1139457 - DNA, 15 bp, Homo sapiens
gtgtgtgtgtgtatg

SEQ ID NO: 1139458 - DNA, 15 bp, Homo sapiens
agggagtgtgtgtgt

SEQ ID NO: 1139459 - DNA, 15 bp, Homo sapiens
gagggagtgtgtgtg

SEQ ID NO: 1139460 - DNA, 15 bp, Homo sapiens
tgagggagtgtgtgt

SEQ ID NO: 1139461 - DNA, 15 bp, Homo sapiens
atgagggagtgtgtg

SEQ ID NO: 1139462 - DNA, 15 bp, Homo sapiens
tatgagggagtgtgt

SEQ ID NO: 1139463 - DNA, 15 bp, Homo sapiens
ctatgagggagtgtg

SEQ ID NO: 1139464 - DNA, 15 bp, Homo sapiens
tctatgagggagtgt

SEQ ID NO: 1139465 - DNA, 15 bp, Homo sapiens
ctctatgagggagtg

SEQ ID NO: 1139466 - DNA, 15 bp, Homo sapiens
actctatgagggagt

SEQ ID NO: 1139467 - DNA, 15 bp, Homo sapiens
aactctatgagggag

SEQ ID NO: 1139468 - DNA, 15 bp, Homo sapiens
aaactctatgaggga

SEQ ID NO: 1139469 - DNA, 15 bp, Homo sapiens
taaactctatgaggg

SEQ ID NO: 1139470 - DNA, 15 bp, Homo sapiens
ataaactctatgagg

SEQ ID NO: 1139471 - DNA, 15 bp, Homo sapiens
tataaactctatgag

SEQ ID NO: 1139472 - DNA, 15 bp, Homo sapiens
atataaactctatga

SEQ ID NO: 1139473 - DNA, 15 bp, Homo sapiens
aatataaactctatg

SEQ ID NO: 1139474 - DNA, 15 bp, Homo sapiens
taatataaactctat

SEQ ID NO: 1139475 - DNA, 15 bp, Homo sapiens
ataatataaactcta

SEQ ID NO: 1139476 - DNA, 15 bp, Homo sapiens
tataatataaactct

SEQ ID NO: 1139477 - DNA, 15 bp, Homo sapiens
ctataatataaactc

SEQ ID NO: 1139478 - DNA, 15 bp, Homo sapiens
actataatataaact

SEQ ID NO: 1139479 - DNA, 15 bp, Homo sapiens
tactataatataaac

SEQ ID NO: 1139480 - DNA, 15 bp, Homo sapiens
gtactataatataaa

SEQ ID NO: 1139481 - DNA, 15 bp, Homo sapiens
cgtactataatataa

SEQ ID NO: 1139482 - DNA, 15 bp, Homo sapiens
ccgtactataatata

SEQ ID NO: 1139483 - DNA, 15 bp, Homo sapiens
tccgtactataatat

SEQ ID NO: 1139484 - DNA, 15 bp, Homo sapiens
ctccgtactataata

SEQ ID NO: 1139485 - DNA, 15 bp, Homo sapiens
cctccgtactataat

SEQ ID NO: 1139486 - DNA, 15 bp, Homo sapiens
tcctccgtactataa

SEQ ID NO: 1139487 - DNA, 15 bp, Homo sapiens
gtcctccgtactata

SEQ ID NO: 1139488 - DNA, 15 bp, Homo sapiens
tgtcctccgtactat

SEQ ID NO: 1139489 - DNA, 15 bp, Homo sapiens
ctgtcctccgtacta

SEQ ID NO: 1139490 - DNA, 15 bp, Homo sapiens
tctgtcctccgtact

SEQ ID NO: 1139491 - DNA, 15 bp, Homo sapiens
gtctgtcctccgtac

SEQ ID NO: 1139492 - DNA, 15 bp, Homo sapiens
tgtctgtcctccgta

SEQ ID NO: 1139493 - DNA, 15 bp, Homo sapiens
atgtctgtcctccgt

SEQ ID NO: 1139494 - DNA, 15 bp, Homo sapiens
tatgtctgtcctccg

SEQ ID NO: 1139495 - DNA, 15 bp, Homo sapiens
ttatgtctgtcctcc

SEQ ID NO: 1139496 - DNA, 15 bp, Homo sapiens
tttatgtctgtcctc

SEQ ID NO: 1139497 - DNA, 15 bp, Homo sapiens
atttatgtctgtcct

SEQ ID NO: 1139498 - DNA, 15 bp, Homo sapiens
tatttatgtctgtcc

SEQ ID NO: 1139499 - DNA, 15 bp, Homo sapiens
ttatttatgtctgtc

SEQ ID NO: 1139500 - DNA, 15 bp, Homo sapiens
attatttatgtctgt

SEQ ID NO: 1139501 - DNA, 15 bp, Homo sapiens
cattatttatgtctg

SEQ ID NO: 1139502 - DNA, 15 bp, Homo sapiens
acattatttatgtct

SEQ ID NO: 1139503 - DNA, 15 bp, Homo sapiens
tacattatttatgtc

SEQ ID NO: 1139504 - DNA, 15 bp, Homo sapiens
gtacattatttatgt

SEQ ID NO: 1139505 - DNA, 15 bp, Homo sapiens
tgtacattatttatg

SEQ ID NO: 1139506 - DNA, 15 bp, Homo sapiens
atgtacattatttat

SEQ ID NO: 1139507 - DNA, 15 bp, Homo sapiens
tatgtacattattta

SEQ ID NO: 1139508 - DNA, 15 bp, Homo sapiens
gtatgtacattattt

SEQ ID NO: 1139509 - DNA, 15 bp, Homo sapiens
agtatgtacattatt

SEQ ID NO: 1139510 - DNA, 15 bp, Homo sapiens
tagtatgtacattat

SEQ ID NO: 1139511 - DNA, 15 bp, Homo sapiens
ttagtatgtacatta

SEQ ID NO: 1139512 - DNA, 15 bp, Homo sapiens
tttagtatgtacatt

SEQ ID NO: 1139513 - DNA, 15 bp, Homo sapiens
atttagtatgtacat

SEQ ID NO: 1139514 - DNA, 15 bp, Homo sapiens
tatttagtatgtaca

SEQ ID NO: 1139515 - DNA, 15 bp, Homo sapiens
ttatttagtatgtac

SEQ ID NO: 1139516 - DNA, 15 bp, Homo sapiens
cttatttagtatgta

SEQ ID NO: 1139517 - DNA, 15 bp, Homo sapiens
acttatttagtatgt

SEQ ID NO: 1139518 - DNA, 15 bp, Homo sapiens
tacttatttagtatg

SEQ ID NO: 1139519 - DNA, 15 bp, Homo sapiens
ttacttatttagtat

SEQ ID NO: 1139520 - DNA, 15 bp, Homo sapiens
tttacttatttagta

SEQ ID NO: 1139521 - DNA, 15 bp, Homo sapiens
gtttacttatttagt

SEQ ID NO: 1139522 - DNA, 15 bp, Homo sapiens
ggtttacttatttag

SEQ ID NO: 1139523 - DNA, 15 bp, Homo sapiens
tggtttacttattta

SEQ ID NO: 1139524 - DNA, 15 bp, Homo sapiens
gtggtttacttattt

SEQ ID NO: 1139525 - DNA, 15 bp, Homo sapiens
tgtggtttacttatt

SEQ ID NO: 1139526 - DNA, 15 bp, Homo sapiens
ctgtggtttacttat

SEQ ID NO: 1139527 - DNA, 15 bp, Homo sapiens
gctgtggtttactta

SEQ ID NO: 1139528 - DNA, 15 bp, Homo sapiens
ggctgtggtttactt

SEQ ID NO: 1139529 - DNA, 15 bp, Homo sapiens
tggctgtggtttact

SEQ ID NO: 1139530 - DNA, 15 bp, Homo sapiens
ttggctgtggtttac

SEQ ID NO: 1139531 - DNA, 15 bp, Homo sapiens
attggctgtggttta

SEQ ID NO: 1139532 - DNA, 15 bp, Homo sapiens
cattggctgtggttt

SEQ ID NO: 1139533 - DNA, 15 bp, Homo sapiens
acattggctgtggtt

SEQ ID NO: 1139534 - DNA, 15 bp, Homo sapiens
aacattggctgtggt

SEQ ID NO: 1139535 - DNA, 15 bp, Homo sapiens
taacattggctgtgg

SEQ ID NO: 1139536 - DNA, 15 bp, Homo sapiens
ctaacattggctgtg

SEQ ID NO: 1139537 - DNA, 15 bp, Homo sapiens
tctaacattggctgt

SEQ ID NO: 1139538 - DNA, 15 bp, Homo sapiens
ttctaacattggctg

SEQ ID NO: 1139539 - DNA, 15 bp, Homo sapiens
cttctaacattggct

SEQ ID NO: 1139540 - DNA, 15 bp, Homo sapiens
ccttctaacattggc

SEQ ID NO: 1139541 - DNA, 15 bp, Homo sapiens
accttctaacattgg

SEQ ID NO: 1139542 - DNA, 15 bp, Homo sapiens
taccttctaacattg

SEQ ID NO: 1139543 - DNA, 15 bp, Homo sapiens
ttaccttctaacatt

SEQ ID NO: 1139544 - DNA, 15 bp, Homo sapiens
attaccttctaacat

SEQ ID NO: 1139545 - DNA, 15 bp, Homo sapiens
aattaccttctaaca

SEQ ID NO: 1139546 - DNA, 15 bp, Homo sapiens
taattaccttctaac

SEQ ID NO: 1139547 - DNA, 15 bp, Homo sapiens
ttaattaccttctaa

SEQ ID NO: 1139548 - DNA, 15 bp, Homo sapiens
gttaattaccttcta

SEQ ID NO: 1139549 - DNA, 15 bp, Homo sapiens
cgttaattaccttct

SEQ ID NO: 1139550 - DNA, 15 bp, Homo sapiens
gcgttaattaccttc

SEQ ID NO: 1139551 - DNA, 15 bp, Homo sapiens
ggcgttaattacctt

SEQ ID NO: 1139552 - DNA, 15 bp, Homo sapiens
tggcgttaattacct

SEQ ID NO: 1139553 - DNA, 15 bp, Homo sapiens
atggcgttaattacc

SEQ ID NO: 1139554 - DNA, 15 bp, Homo sapiens
catggcgttaattac

SEQ ID NO: 1139555 - DNA, 15 bp, Homo sapiens
ccatggcgttaatta

SEQ ID NO: 1139556 - DNA, 15 bp, Homo sapiens
tccatggcgttaatt

SEQ ID NO: 1139557 - DNA, 15 bp, Homo sapiens
ttccatggcgttaat

SEQ ID NO: 1139558 - DNA, 15 bp, Homo sapiens
tttccatggcgttaa

SEQ ID NO: 1139559 - DNA, 15 bp, Homo sapiens
ttttccatggcgtta

SEQ ID NO: 1139560 - DNA, 15 bp, Homo sapiens
tttttccatggcgtt

SEQ ID NO: 1139561 - DNA, 15 bp, Homo sapiens
ttttttccatggcgt

SEQ ID NO: 1139562 - DNA, 15 bp, Homo sapiens
cttttttccatggcg

SEQ ID NO: 1139563 - DNA, 15 bp, Homo sapiens
gcttttttccatggc

SEQ ID NO: 1139564 - DNA, 15 bp, Homo sapiens
tgcttttttccatgg

SEQ ID NO: 1139565 - DNA, 15 bp, Homo sapiens
atgcttttttccatg

SEQ ID NO: 1139566 - DNA, 15 bp, Homo sapiens
aatgcttttttccat

SEQ ID NO: 1139567 - DNA, 15 bp, Homo sapiens
taatgcttttttcca

SEQ ID NO: 1139568 - DNA, 15 bp, Homo sapiens
ttaatgcttttttcc

SEQ ID NO: 1139569 - DNA, 15 bp, Homo sapiens
attaatgcttttttc

SEQ ID NO: 1139570 - DNA, 15 bp, Homo sapiens
gattaatgctttttt

SEQ ID NO: 1139571 - DNA, 15 bp, Homo sapiens
ggattaatgcttttt

SEQ ID NO: 1139572 - DNA, 15 bp, Homo sapiens
tggattaatgctttt

SEQ ID NO: 1139573 - DNA, 15 bp, Homo sapiens
ctggattaatgcttt

SEQ ID NO: 1139574 - DNA, 15 bp, Homo sapiens
cctggattaatgctt

SEQ ID NO: 1139575 - DNA, 15 bp, Homo sapiens
acctggattaatgct

SEQ ID NO: 1139576 - DNA, 15 bp, Homo sapiens
aacctggattaatgc

SEQ ID NO: 1139577 - DNA, 15 bp, Homo sapiens
taacctggattaatg

SEQ ID NO: 1139578 - DNA, 15 bp, Homo sapiens
ttaacctggattaat

SEQ ID NO: 1139579 - DNA, 15 bp, Homo sapiens
cttaacctggattaa

SEQ ID NO: 1139580 - DNA, 15 bp, Homo sapiens
ccttaacctggatta

SEQ ID NO: 1139581 - DNA, 15 bp, Homo sapiens
cccttaacctggatt

SEQ ID NO: 1139582 - DNA, 15 bp, Homo sapiens
ccccttaacctggat

SEQ ID NO: 1139583 - DNA, 15 bp, Homo sapiens
tccccttaacctgga

SEQ ID NO: 1139584 - DNA, 15 bp, Homo sapiens
atccccttaacctgg

SEQ ID NO: 1139585 - DNA, 15 bp, Homo sapiens
gatccccttaacctg

SEQ ID NO: 1139586 - DNA, 15 bp, Homo sapiens
tgatccccttaacct

SEQ ID NO: 1139587 - DNA, 15 bp, Homo sapiens
ctgatccccttaacc

SEQ ID NO: 1139588 - DNA, 15 bp, Homo sapiens
cctgatccccttaac

SEQ ID NO: 1139589 - DNA, 15 bp, Homo sapiens
tcctgatccccttaa

SEQ ID NO: 1139590 - DNA, 15 bp, Homo sapiens
ctcctgatcccctta

SEQ ID NO: 1139591 - DNA, 15 bp, Homo sapiens
actcctgatcccctt

SEQ ID NO: 1139592 - DNA, 15 bp, Homo sapiens
tactcctgatcccct

SEQ ID NO: 1139593 - DNA, 15 bp, Homo sapiens
gtactcctgatcccc

SEQ ID NO: 1139594 - DNA, 15 bp, Homo sapiens
tgtactcctgatccc

SEQ ID NO: 1139595 - DNA, 15 bp, Homo sapiens
ttgtactcctgatcc

SEQ ID NO: 1139596 - DNA, 15 bp, Homo sapiens
tttgtactcctgatc

SEQ ID NO: 1139597 - DNA, 15 bp, Homo sapiens
ttttgtactcctgat

SEQ ID NO: 1139598 - DNA, 15 bp, Homo sapiens
cttttgtactcctga

SEQ ID NO: 1139599 - DNA, 15 bp, Homo sapiens
ccttttgtactcctg

SEQ ID NO: 1139600 - DNA, 15 bp, Homo sapiens
cccttttgtactcct

SEQ ID NO: 1139601 - DNA, 15 bp, Homo sapiens
ccccttttgtactcc

SEQ ID NO: 1139602 - DNA, 15 bp, Homo sapiens
tccccttttgtactc

SEQ ID NO: 1139603 - DNA, 15 bp, Homo sapiens
ctccccttttgtact

SEQ ID NO: 1139604 - DNA, 15 bp, Homo sapiens
actccccttttgtac

SEQ ID NO: 1139605 - DNA, 15 bp, Homo sapiens
tactccccttttgta

SEQ ID NO: 1139606 - DNA, 15 bp, Homo sapiens
gtactccccttttgt

SEQ ID NO: 1139607 - DNA, 15 bp, Homo sapiens
agtactccccttttg

SEQ ID NO: 1139608 - DNA, 15 bp, Homo sapiens
aagtactcccctttt

SEQ ID NO: 1139609 - DNA, 15 bp, Homo sapiens
aaagtactccccttt

SEQ ID NO: 1139610 - DNA, 15 bp, Homo sapiens
caaagtactcccctt

SEQ ID NO: 1139611 - DNA, 15 bp, Homo sapiens
acaaagtactcccct

SEQ ID NO: 1139612 - DNA, 15 bp, Homo sapiens
tacaaagtactcccc

SEQ ID NO: 1139613 - DNA, 15 bp, Homo sapiens
ttacaaagtactccc

SEQ ID NO: 1139614 - DNA, 15 bp, Homo sapiens
attacaaagtactcc

SEQ ID NO: 1139615 - DNA, 15 bp, Homo sapiens
aattacaaagtactc

SEQ ID NO: 1139616 - DNA, 15 bp, Homo sapiens
aaattacaaagtact

SEQ ID NO: 1139617 - DNA, 15 bp, Homo sapiens
aaaattacaaagtac

SEQ ID NO: 1139618 - DNA, 15 bp, Homo sapiens
taaaattacaaagta

SEQ ID NO: 1139619 - DNA, 15 bp, Homo sapiens
ttaaaattacaaagt

SEQ ID NO: 1139620 - DNA, 15 bp, Homo sapiens
cttaaaattacaaag

SEQ ID NO: 1139621 - DNA, 15 bp, Homo sapiens
acttaaaattacaaa

SEQ ID NO: 1139622 - DNA, 15 bp, Homo sapiens
tacttaaaattacaa

SEQ ID NO: 1139623 - DNA, 15 bp, Homo sapiens
ctacttaaaattaca

SEQ ID NO: 1139624 - DNA, 15 bp, Homo sapiens
cctacttaaaattac

SEQ ID NO: 1139625 - DNA, 15 bp, Homo sapiens
ccctacttaaaatta

SEQ ID NO: 1139626 - DNA, 15 bp, Homo sapiens
accctacttaaaatt

SEQ ID NO: 1139627 - DNA, 15 bp, Homo sapiens
caccctacttaaaat

SEQ ID NO: 1139628 - DNA, 15 bp, Homo sapiens
ccaccctacttaaaa

SEQ ID NO: 1139629 - DNA, 15 bp, Homo sapiens
accaccctacttaaa

SEQ ID NO: 1139630 - DNA, 15 bp, Homo sapiens
aaccaccctacttaa

SEQ ID NO: 1139631 - DNA, 15 bp, Homo sapiens
taaccaccctactta

SEQ ID NO: 1139632 - DNA, 15 bp, Homo sapiens
ctaaccaccctactt

SEQ ID NO: 1139633 - DNA, 15 bp, Homo sapiens
cctaaccaccctact

SEQ ID NO: 1139634 - DNA, 15 bp, Homo sapiens
ccctaaccaccctac

SEQ ID NO: 1139635 - DNA, 15 bp, Homo sapiens
accctaaccacccta

SEQ ID NO: 1139636 - DNA, 15 bp, Homo sapiens
taccctaaccaccct

SEQ ID NO: 1139637 - DNA, 15 bp, Homo sapiens
ctaccctaaccaccc

SEQ ID NO: 1139638 - DNA, 15 bp, Homo sapiens
tctaccctaaccacc

SEQ ID NO: 1139639 - DNA, 15 bp, Homo sapiens
atctaccctaaccac

SEQ ID NO: 1139640 - DNA, 15 bp, Homo sapiens
gatctaccctaacca

SEQ ID NO: 1139641 - DNA, 15 bp, Homo sapiens
agatctaccctaacc

SEQ ID NO: 1139642 - DNA, 15 bp, Homo sapiens
aagatctaccctaac

SEQ ID NO: 1139643 - DNA, 15 bp, Homo sapiens
taagatctaccctaa

SEQ ID NO: 1139644 - DNA, 15 bp, Homo sapiens
ataagatctacccta

SEQ ID NO: 1139645 - DNA, 15 bp, Homo sapiens
aataagatctaccct

SEQ ID NO: 1139646 - DNA, 15 bp, Homo sapiens
aaataagatctaccc

SEQ ID NO: 1139647 - DNA, 15 bp, Homo sapiens
aaaataagatctacc

SEQ ID NO: 1139648 - DNA, 15 bp, Homo sapiens
taaaataagatctac

SEQ ID NO: 1139649 - DNA, 15 bp, Homo sapiens
ttaaaataagatcta

SEQ ID NO: 1139650 - DNA, 15 bp, Homo sapiens
tttaaaataagatct

SEQ ID NO: 1139651 - DNA, 15 bp, Homo sapiens
ctttaaaataagatc

SEQ ID NO: 1139652 - DNA, 15 bp, Homo sapiens
cctttaaaataagat

SEQ ID NO: 1139653 - DNA, 15 bp, Homo sapiens
acctttaaaataaga

SEQ ID NO: 1139654 - DNA, 15 bp, Homo sapiens
tacctttaaaataag

SEQ ID NO: 1139655 - DNA, 15 bp, Homo sapiens
ttacctttaaaataa

SEQ ID NO: 1139656 - DNA, 15 bp, Homo sapiens
attacctttaaaata

SEQ ID NO: 1139657 - DNA, 15 bp, Homo sapiens
tattacctttaaaat

SEQ ID NO: 1139658 - DNA, 15 bp, Homo sapiens
atattacctttaaaa

SEQ ID NO: 1139659 - DNA, 15 bp, Homo sapiens
aatattacctttaaa

SEQ ID NO: 1139660 - DNA, 15 bp, Homo sapiens
aaatattacctttaa

SEQ ID NO: 1139661 - DNA, 15 bp, Homo sapiens
caaatattaccttta

SEQ ID NO: 1139662 - DNA, 15 bp, Homo sapiens
tcaaatattaccttt

SEQ ID NO: 1139663 - DNA, 15 bp, Homo sapiens
ctcaaatattacctt

SEQ ID NO: 1139664 - DNA, 15 bp, Homo sapiens
gctcaaatattacct

SEQ ID NO: 1139665 - DNA, 15 bp, Homo sapiens
tgctcaaatattacc

SEQ ID NO: 1139666 - DNA, 15 bp, Homo sapiens
ttgctcaaatattac

SEQ ID NO: 1139667 - DNA, 15 bp, Homo sapiens
tttgctcaaatatta

SEQ ID NO: 1139668 - DNA, 15 bp, Homo sapiens
ctttgctcaaatatt

SEQ ID NO: 1139669 - DNA, 15 bp, Homo sapiens
tctttgctcaaatat

SEQ ID NO: 1139670 - DNA, 15 bp, Homo sapiens
gtctttgctcaaata

SEQ ID NO: 1139671 - DNA, 15 bp, Homo sapiens
agtctttgctcaaat

SEQ ID NO: 1139672 - DNA, 15 bp, Homo sapiens
aagtctttgctcaaa

SEQ ID NO: 1139673 - DNA, 15 bp, Homo sapiens
caagtctttgctcaa

SEQ ID NO: 1139674 - DNA, 15 bp, Homo sapiens
tcaagtctttgctca

SEQ ID NO: 1139675 - DNA, 15 bp, Homo sapiens
ttcaagtctttgctc

SEQ ID NO: 1139676 - DNA, 15 bp, Homo sapiens
tttcaagtctttgct

SEQ ID NO: 1139677 - DNA, 15 bp, Homo sapiens
ctttcaagtctttgc

SEQ ID NO: 1139678 - DNA, 15 bp, Homo sapiens
tctttcaagtctttg

SEQ ID NO: 1139679 - DNA, 15 bp, Homo sapiens
ttctttcaagtcttt

SEQ ID NO: 1139680 - DNA, 15 bp, Homo sapiens
tttctttcaagtctt

SEQ ID NO: 1139681 - DNA, 15 bp, Homo sapiens
atttctttcaagtct

SEQ ID NO: 1139682 - DNA, 15 bp, Homo sapiens
catttctttcaagtc

SEQ ID NO: 1139683 - DNA, 15 bp, Homo sapiens
tcatttctttcaagt

SEQ ID NO: 1139684 - DNA, 15 bp, Homo sapiens
ctcatttctttcaag

SEQ ID NO: 1139685 - DNA, 15 bp, Homo sapiens
tctcatttctttcaa

SEQ ID NO: 1139686 - DNA, 15 bp, Homo sapiens
ctctcatttctttca

SEQ ID NO: 1139687 - DNA, 15 bp, Homo sapiens
cctctcatttctttc

SEQ ID NO: 1139688 - DNA, 15 bp, Homo sapiens
tcctctcatttcttt

SEQ ID NO: 1139689 - DNA, 15 bp, Homo sapiens
ctcctctcatttctt

SEQ ID NO: 1139690 - DNA, 15 bp, Homo sapiens
tctcctctcatttct

SEQ ID NO: 1139691 - DNA, 15 bp, Homo sapiens
gtctcctctcatttc

SEQ ID NO: 1139692 - DNA, 15 bp, Homo sapiens
tgtctcctctcattt

SEQ ID NO: 1139693 - DNA, 15 bp, Homo sapiens
ctgtctcctctcatt

SEQ ID NO: 1139694 - DNA, 15 bp, Homo sapiens
gctgtctcctctcat

SEQ ID NO: 1139695 - DNA, 15 bp, Homo sapiens
agctgtctcctctca

SEQ ID NO: 1139696 - DNA, 15 bp, Homo sapiens
cagctgtctcctctc

SEQ ID NO: 1139697 - DNA, 15 bp, Homo sapiens
acagctgtctcctct

SEQ ID NO: 1139698 - DNA, 15 bp, Homo sapiens
cacagctgtctcctc

SEQ ID NO: 1139699 - DNA, 15 bp, Homo sapiens
acacagctgtctcct

SEQ ID NO: 1139700 - DNA, 15 bp, Homo sapiens
cacacagctgtctcc

SEQ ID NO: 1139701 - DNA, 15 bp, Homo sapiens
ccacacagctgtctc

SEQ ID NO: 1139702 - DNA, 15 bp, Homo sapiens
cccacacagctgtct

SEQ ID NO: 1139703 - DNA, 15 bp, Homo sapiens
acccacacagctgtc

SEQ ID NO: 1139704 - DNA, 15 bp, Homo sapiens
tacccacacagctgt

SEQ ID NO: 1139705 - DNA, 15 bp, Homo sapiens
atacccacacagctg

SEQ ID NO: 1139706 - DNA, 15 bp, Homo sapiens
gatacccacacagct

SEQ ID NO: 1139707 - DNA, 15 bp, Homo sapiens
agatacccacacagc

SEQ ID NO: 1139708 - DNA, 15 bp, Homo sapiens
tagatacccacacag

SEQ ID NO: 1139709 - DNA, 15 bp, Homo sapiens
ttagatacccacaca

SEQ ID NO: 1139710 - DNA, 15 bp, Homo sapiens
cttagatacccacac

SEQ ID NO: 1139711 - DNA, 15 bp, Homo sapiens
ccttagatacccaca

SEQ ID NO: 1139712 - DNA, 15 bp, Homo sapiens
cccttagatacccac

SEQ ID NO: 1139713 - DNA, 15 bp, Homo sapiens
ccccttagataccca

SEQ ID NO: 1139714 - DNA, 15 bp, Homo sapiens
tccccttagataccc

SEQ ID NO: 1139715 - DNA, 15 bp, Homo sapiens
ctccccttagatacc

SEQ ID NO: 1139716 - DNA, 15 bp, Homo sapiens
tctccccttagatac

SEQ ID NO: 1139717 - DNA, 15 bp, Homo sapiens
ctctccccttagata

SEQ ID NO: 1139718 - DNA, 15 bp, Homo sapiens
gctctccccttagat

SEQ ID NO: 1139719 - DNA, 15 bp, Homo sapiens
tgctctccccttaga

SEQ ID NO: 1139720 - DNA, 15 bp, Homo sapiens
atgctctccccttag

SEQ ID NO: 1139721 - DNA, 15 bp, Homo sapiens
aatgctctcccctta

SEQ ID NO: 1139722 - DNA, 15 bp, Homo sapiens
gaatgctctcccctt

SEQ ID NO: 1139723 - DNA, 15 bp, Homo sapiens
ggaatgctctcccct

SEQ ID NO: 1139724 - DNA, 15 bp, Homo sapiens
gggaatgctctcccc

SEQ ID NO: 1139725 - DNA, 15 bp, Homo sapiens
cgggaatgctctccc

SEQ ID NO: 1139726 - DNA, 15 bp, Homo sapiens
ccgggaatgctctcc

SEQ ID NO: 1139727 - DNA, 15 bp, Homo sapiens
tccgggaatgctctc

SEQ ID NO: 1139728 - DNA, 15 bp, Homo sapiens
ttccgggaatgctct

SEQ ID NO: 1139729 - DNA, 15 bp, Homo sapiens
tttccgggaatgctc

SEQ ID NO: 1139730 - DNA, 15 bp, Homo sapiens
ttttccgggaatgct

SEQ ID NO: 1139731 - DNA, 15 bp, Homo sapiens
cttttccgggaatgc

SEQ ID NO: 1139732 - DNA, 15 bp, Homo sapiens
ccttttccgggaatg

SEQ ID NO: 1139733 - DNA, 15 bp, Homo sapiens
accttttccgggaat

SEQ ID NO: 1139734 - DNA, 15 bp, Homo sapiens
taccttttccgggaa

SEQ ID NO: 1139735 - DNA, 15 bp, Homo sapiens
ttaccttttccggga

SEQ ID NO: 1139736 - DNA, 15 bp, Homo sapiens
gttaccttttccggg

SEQ ID NO: 1139737 - DNA, 15 bp, Homo sapiens
agttaccttttccgg

SEQ ID NO: 1139738 - DNA, 15 bp, Homo sapiens
cagttaccttttccg

SEQ ID NO: 1139739 - DNA, 15 bp, Homo sapiens
ccagttaccttttcc

SEQ ID NO: 1139740 - DNA, 15 bp, Homo sapiens
gccagttaccttttc

SEQ ID NO: 1139741 - DNA, 15 bp, Homo sapiens
tgccagttacctttt

SEQ ID NO: 1139742 - DNA, 15 bp, Homo sapiens
ttgccagttaccttt

SEQ ID NO: 1139743 - DNA, 15 bp, Homo sapiens
attgccagttacctt

SEQ ID NO: 1139744 - DNA, 15 bp, Homo sapiens
cattgccagttacct

SEQ ID NO: 1139745 - DNA, 15 bp, Homo sapiens
gcattgccagttacc

SEQ ID NO: 1139746 - DNA, 15 bp, Homo sapiens
tgcattgccagttac

SEQ ID NO: 1139747 - DNA, 15 bp, Homo sapiens
ttgcattgccagtta

SEQ ID NO: 1139748 - DNA, 15 bp, Homo sapiens
tttgcattgccagtt

SEQ ID NO: 1139749 - DNA, 15 bp, Homo sapiens
ctttgcattgccagt

SEQ ID NO: 1139750 - DNA, 15 bp, Homo sapiens
tctttgcattgccag

SEQ ID NO: 1139751 - DNA, 15 bp, Homo sapiens
gtctttgcattgcca

SEQ ID NO: 1139752 - DNA, 15 bp, Homo sapiens
ggtctttgcattgcc

SEQ ID NO: 1139753 - DNA, 15 bp, Homo sapiens
gggtctttgcattgc

SEQ ID NO: 1139754 - DNA, 15 bp, Homo sapiens
agggtctttgcattg

SEQ ID NO: 1139755 - DNA, 15 bp, Homo sapiens
cagggtctttgcatt

SEQ ID NO: 1139756 - DNA, 15 bp, Homo sapiens
tcagggtctttgcat

SEQ ID NO: 1139757 - DNA, 15 bp, Homo sapiens
actcagggtctttgc

SEQ ID NO: 1139758 - DNA, 15 bp, Homo sapiens
gactcagggtctttg

SEQ ID NO: 1139759 - DNA, 15 bp, Homo sapiens
tgactcagggtcttt

SEQ ID NO: 1139760 - DNA, 15 bp, Homo sapiens
ctgactcagggtctt

SEQ ID NO: 1139761 - DNA, 15 bp, Homo sapiens
cctgactcagggtct

SEQ ID NO: 1139762 - DNA, 15 bp, Homo sapiens
acctgactcagggtc

SEQ ID NO: 1139763 - DNA, 15 bp, Homo sapiens
tacctgactcagggt

SEQ ID NO: 1139764 - DNA, 15 bp, Homo sapiens
gtacctgactcaggg

SEQ ID NO: 1139765 - DNA, 15 bp, Homo sapiens
tgtacctgactcagg

SEQ ID NO: 1139766 - DNA, 15 bp, Homo sapiens
atgtacctgactcag

SEQ ID NO: 1139767 - DNA, 15 bp, Homo sapiens
catgtacctgactca

SEQ ID NO: 1139768 - DNA, 15 bp, Homo sapiens
acatgtacctgactc

SEQ ID NO: 1139769 - DNA, 15 bp, Homo sapiens
aacatgtacctgact

SEQ ID NO: 1139770 - DNA, 15 bp, Homo sapiens
aaacatgtacctgac

SEQ ID NO: 1139771 - DNA, 15 bp, Homo sapiens
caaacatgtacctga

SEQ ID NO: 1139772 - DNA, 15 bp, Homo sapiens
ccaaacatgtacctg

SEQ ID NO: 1139773 - DNA, 15 bp, Homo sapiens
accaaacatgtacct

SEQ ID NO: 1139774 - DNA, 15 bp, Homo sapiens
caccaaacatgtacc

SEQ ID NO: 1139775 - DNA, 15 bp, Homo sapiens
tcaccaaacatgtac

SEQ ID NO: 1139776 - DNA, 15 bp, Homo sapiens
ctcaccaaacatgta

SEQ ID NO: 1139777 - DNA, 15 bp, Homo sapiens
actcaccaaacatgt

SEQ ID NO: 1139778 - DNA, 15 bp, Homo sapiens
aactcaccaaacatg

SEQ ID NO: 1139779 - DNA, 15 bp, Homo sapiens
gaactcaccaaacat

SEQ ID NO: 1139780 - DNA, 15 bp, Homo sapiens
tgaactcaccaaaca

SEQ ID NO: 1139781 - DNA, 15 bp, Homo sapiens
atgaactcaccaaac

SEQ ID NO: 1139782 - DNA, 15 bp, Homo sapiens
catgaactcaccaaa

SEQ ID NO: 1139783 - DNA, 15 bp, Homo sapiens
ccatgaactcaccaa

SEQ ID NO: 1139784 - DNA, 15 bp, Homo sapiens
tccatgaactcacca

SEQ ID NO: 1139785 - DNA, 15 bp, Homo sapiens
ttccatgaactcacc

SEQ ID NO: 1139786 - DNA, 15 bp, Homo sapiens
gttccatgaactcac

SEQ ID NO: 1139787 - DNA, 15 bp, Homo sapiens
tgttccatgaactca

SEQ ID NO: 1139788 - DNA, 15 bp, Homo sapiens
ctgttccatgaactc

SEQ ID NO: 1139789 - DNA, 15 bp, Homo sapiens
gctgttccatgaact

SEQ ID NO: 1139790 - DNA, 15 bp, Homo sapiens
tgctgttccatgaac

SEQ ID NO: 1139791 - DNA, 15 bp, Homo sapiens
ctgctgttccatgaa

SEQ ID NO: 1139792 - DNA, 15 bp, Homo sapiens
tctgctgttccatga

SEQ ID NO: 1139793 - DNA, 15 bp, Homo sapiens
ctctgctgttccatg

SEQ ID NO: 1139794 - DNA, 15 bp, Homo sapiens
tctctgctgttccat

SEQ ID NO: 1139795 - DNA, 15 bp, Homo sapiens
ctctctgctgttcca

SEQ ID NO: 1139796 - DNA, 15 bp, Homo sapiens
actctctgctgttcc

SEQ ID NO: 1139797 - DNA, 15 bp, Homo sapiens
gactctctgctgttc

SEQ ID NO: 1139798 - DNA, 15 bp, Homo sapiens
ggactctctgctgtt

SEQ ID NO: 1139799 - DNA, 15 bp, Homo sapiens
tggactctctgctgt

SEQ ID NO: 1139800 - DNA, 15 bp, Homo sapiens
ctggactctctgctg

SEQ ID NO: 1139801 - DNA, 15 bp, Homo sapiens
cctggactctctgct

SEQ ID NO: 1139802 - DNA, 15 bp, Homo sapiens
gcctggactctctgc

SEQ ID NO: 1139803 - DNA, 15 bp, Homo sapiens
agcctggactctctg

SEQ ID NO: 1139804 - DNA, 15 bp, Homo sapiens
cagcctggactctct

SEQ ID NO: 1139805 - DNA, 15 bp, Homo sapiens
ccagcctggactctc

SEQ ID NO: 1139806 - DNA, 15 bp, Homo sapiens
accagcctggactct

SEQ ID NO: 1139807 - DNA, 15 bp, Homo sapiens
aaccagcctggactc

SEQ ID NO: 1139808 - DNA, 15 bp, Homo sapiens
caaccagcctggact

SEQ ID NO: 1139809 - DNA, 15 bp, Homo sapiens
ccaaccagcctggac

SEQ ID NO: 1139810 - DNA, 15 bp, Homo sapiens
tccaaccagcctgga

SEQ ID NO: 1139811 - DNA, 15 bp, Homo sapiens
ctccaaccagcctgg

SEQ ID NO: 1139812 - DNA, 15 bp, Homo sapiens
gctccaaccagcctg

SEQ ID NO: 1139813 - DNA, 15 bp, Homo sapiens
tgctccaaccagcct

SEQ ID NO: 1139814 - DNA, 15 bp, Homo sapiens
ctgctccaaccagcc

SEQ ID NO: 1139815 - DNA, 15 bp, Homo sapiens
tctgctccaaccagc

SEQ ID NO: 1139816 - DNA, 15 bp, Homo sapiens
ctctgctccaaccag

SEQ ID NO: 1139817 - DNA, 15 bp, Homo sapiens
actctgctccaacca

SEQ ID NO: 1139818 - DNA, 15 bp, Homo sapiens
tactctgctccaacc

SEQ ID NO: 1139819 - DNA, 15 bp, Homo sapiens
ttactctgctccaac

SEQ ID NO: 1139820 - DNA, 15 bp, Homo sapiens
cttactctgctccaa

SEQ ID NO: 1139821 - DNA, 15 bp, Homo sapiens
gcttactctgctcca

SEQ ID NO: 1139822 - DNA, 15 bp, Homo sapiens
tgcttactctgctcc

SEQ ID NO: 1139823 - DNA, 15 bp, Homo sapiens
ctgcttactctgctc

SEQ ID NO: 1139824 - DNA, 15 bp, Homo sapiens
cctgcttactctgct

SEQ ID NO: 1139825 - DNA, 15 bp, Homo sapiens
acctgcttactctgc

SEQ ID NO: 1139826 - DNA, 15 bp, Homo sapiens
aacctgcttactctg

SEQ ID NO: 1139827 - DNA, 15 bp, Homo sapiens
aaacctgcttactct

SEQ ID NO: 1139828 - DNA, 15 bp, Homo sapiens
caaacctgcttactc

SEQ ID NO: 1139829 - DNA, 15 bp, Homo sapiens
ccaaacctgcttact

SEQ ID NO: 1139830 - DNA, 15 bp, Homo sapiens
cccaaacctgcttac

SEQ ID NO: 1139831 - DNA, 15 bp, Homo sapiens
tcccaaacctgctta

SEQ ID NO: 1139832 - DNA, 15 bp, Homo sapiens
ctcccaaacctgctt

SEQ ID NO: 1139833 - DNA, 15 bp, Homo sapiens
actcccaaacctgct

SEQ ID NO: 1139834 - DNA, 15 bp, Homo sapiens
tactcccaaacctgc

SEQ ID NO: 1139835 - DNA, 15 bp, Homo sapiens
ctactcccaaacctg

SEQ ID NO: 1139836 - DNA, 15 bp, Homo sapiens
cctactcccaaacct

SEQ ID NO: 1139837 - DNA, 15 bp, Homo sapiens
ccctactcccaaacc

SEQ ID NO: 1139838 - DNA, 15 bp, Homo sapiens
tccctactcccaaac

SEQ ID NO: 1139839 - DNA, 15 bp, Homo sapiens
atccctactcccaaa

SEQ ID NO: 1139840 - DNA, 15 bp, Homo sapiens
catccctactcccaa

SEQ ID NO: 1139841 - DNA, 15 bp, Homo sapiens
acatccctactccca

SEQ ID NO: 1139842 - DNA, 15 bp, Homo sapiens
cacatccctactccc

SEQ ID NO: 1139843 - DNA, 15 bp, Homo sapiens
ccacatccctactcc

SEQ ID NO: 1139844 - DNA, 15 bp, Homo sapiens
accacatccctactc

SEQ ID NO: 1139845 - DNA, 15 bp, Homo sapiens
gaccacatccctact

SEQ ID NO: 1139846 - DNA, 15 bp, Homo sapiens
tgaccacatccctac

SEQ ID NO: 1139847 - DNA, 15 bp, Homo sapiens
ctgaccacatcccta

SEQ ID NO: 1139848 - DNA, 15 bp, Homo sapiens
tctgaccacatccct

SEQ ID NO: 1139849 - DNA, 15 bp, Homo sapiens
ctctgaccacatccc

SEQ ID NO: 1139850 - DNA, 15 bp, Homo sapiens
tctctgaccacatcc

SEQ ID NO: 1139851 - DNA, 15 bp, Homo sapiens
ctctctgaccacatc

SEQ ID NO: 1139852 - DNA, 15 bp, Homo sapiens
cctctctgaccacat

SEQ ID NO: 1139853 - DNA, 15 bp, Homo sapiens
tcctctctgaccaca

SEQ ID NO: 1139854 - DNA, 15 bp, Homo sapiens
ttcctctctgaccac

SEQ ID NO: 1139855 - DNA, 15 bp, Homo sapiens
tttcctctctgacca

SEQ ID NO: 1139856 - DNA, 15 bp, Homo sapiens
atttcctctctgacc

SEQ ID NO: 1139857 - DNA, 15 bp, Homo sapiens
tatttcctctctgac

SEQ ID NO: 1139858 - DNA, 15 bp, Homo sapiens
ttatttcctctctga

SEQ ID NO: 1139859 - DNA, 15 bp, Homo sapiens
cttatttcctctctg

SEQ ID NO: 1139860 - DNA, 15 bp, Homo sapiens
gcttatttcctctct

SEQ ID NO: 1139861 - DNA, 15 bp, Homo sapiens
tgcttatttcctctc

SEQ ID NO: 1139862 - DNA, 15 bp, Homo sapiens
ttgcttatttcctct

SEQ ID NO: 1139863 - DNA, 15 bp, Homo sapiens
tttgcttatttcctc

SEQ ID NO: 1139864 - DNA, 15 bp, Homo sapiens
gtttgcttatttcct

SEQ ID NO: 1139865 - DNA, 15 bp, Homo sapiens
tgtttgcttatttcc

SEQ ID NO: 1139866 - DNA, 15 bp, Homo sapiens
ctgtttgcttatttc

SEQ ID NO: 1139867 - DNA, 15 bp, Homo sapiens
tctgtttgcttattt

SEQ ID NO: 1139868 - DNA, 15 bp, Homo sapiens
atctgtttgcttatt

SEQ ID NO: 1139869 - DNA, 15 bp, Homo sapiens
gatctgtttgcttat

SEQ ID NO: 1139870 - DNA, 15 bp, Homo sapiens
cgatctgtttgctta

SEQ ID NO: 1139871 - DNA, 15 bp, Homo sapiens
acgatctgtttgctt

SEQ ID NO: 1139872 - DNA, 15 bp, Homo sapiens
cacgatctgtttgct

SEQ ID NO: 1139873 - DNA, 15 bp, Homo sapiens
acacgatctgtttgc

SEQ ID NO: 1139874 - DNA, 15 bp, Homo sapiens
tacacgatctgtttg

SEQ ID NO: 1139875 - DNA, 15 bp, Homo sapiens
ctacacgatctgttt

SEQ ID NO: 1139876 - DNA, 15 bp, Homo sapiens
cctacacgatctgtt

SEQ ID NO: 1139877 - DNA, 15 bp, Homo sapiens
tcctacacgatctgt

SEQ ID NO: 1139878 - DNA, 15 bp, Homo sapiens
gtcctacacgatctg

SEQ ID NO: 1139879 - DNA, 15 bp, Homo sapiens
ggtcctacacgatct

SEQ ID NO: 1139880 - DNA, 15 bp, Homo sapiens
aggtcctacacgatc

SEQ ID NO: 1139881 - DNA, 15 bp, Homo sapiens
gaggtcctacacgat

SEQ ID NO: 1139882 - DNA, 15 bp, Homo sapiens
tgaggtcctacacga

SEQ ID NO: 1139883 - DNA, 15 bp, Homo sapiens
ctgaggtcctacacg

SEQ ID NO: 1139884 - DNA, 15 bp, Homo sapiens
tctgaggtcctacac

SEQ ID NO: 1139885 - DNA, 15 bp, Homo sapiens
ctctgaggtcctaca

SEQ ID NO: 1139886 - DNA, 15 bp, Homo sapiens
cctctgaggtcctac

SEQ ID NO: 1139887 - DNA, 15 bp, Homo sapiens
acctctgaggtccta

SEQ ID NO: 1139888 - DNA, 15 bp, Homo sapiens
aacctctgaggtcct

SEQ ID NO: 1139889 - DNA, 15 bp, Homo sapiens
taacctctgaggtcc

SEQ ID NO: 1139890 - DNA, 15 bp, Homo sapiens
ttaacctctgaggtc

SEQ ID NO: 1139891 - DNA, 15 bp, Homo sapiens
attaacctctgaggt

SEQ ID NO: 1139892 - DNA, 15 bp, Homo sapiens
cattaacctctgagg

SEQ ID NO: 1139893 - DNA, 15 bp, Homo sapiens
gcattaacctctgag

SEQ ID NO: 1139894 - DNA, 15 bp, Homo sapiens
tgcattaacctctga

SEQ ID NO: 1139895 - DNA, 15 bp, Homo sapiens
ttgcattaacctctg

SEQ ID NO: 1139896 - DNA, 15 bp, Homo sapiens
cttgcattaacctct

SEQ ID NO: 1139897 - DNA, 15 bp, Homo sapiens
ccttgcattaacctc

SEQ ID NO: 1139898 - DNA, 15 bp, Homo sapiens
tccttgcattaacct

SEQ ID NO: 1139899 - DNA, 15 bp, Homo sapiens
atccttgcattaacc

SEQ ID NO: 1139900 - DNA, 15 bp, Homo sapiens
aatccttgcattaac

SEQ ID NO: 1139901 - DNA, 15 bp, Homo sapiens
aaatccttgcattaa

SEQ ID NO: 1139902 - DNA, 15 bp, Homo sapiens
aaaatccttgcatta

SEQ ID NO: 1139903 - DNA, 15 bp, Homo sapiens
caaaatccttgcatt

SEQ ID NO: 1139904 - DNA, 15 bp, Homo sapiens
ccaaaatccttgcat

SEQ ID NO: 1139905 - DNA, 15 bp, Homo sapiens
gccaaaatccttgca

SEQ ID NO: 1139906 - DNA, 15 bp, Homo sapiens
agccaaaatccttgc

SEQ ID NO: 1139907 - DNA, 15 bp, Homo sapiens
aagccaaaatccttg

SEQ ID NO: 1139908 - DNA, 15 bp, Homo sapiens
aaagccaaaatcctt

SEQ ID NO: 1139909 - DNA, 15 bp, Homo sapiens
aaaagccaaaatcct

SEQ ID NO: 1139910 - DNA, 15 bp, Homo sapiens
taaaagccaaaatcc

SEQ ID NO: 1139911 - DNA, 15 bp, Homo sapiens
ataaaagccaaaatc

SEQ ID NO: 1139912 - DNA, 15 bp, Homo sapiens
aataaaagccaaaat

SEQ ID NO: 1139913 - DNA, 15 bp, Homo sapiens
caataaaagccaaaa

SEQ ID NO: 1139914 - DNA, 15 bp, Homo sapiens
acaataaaagccaaa

SEQ ID NO: 1139915 - DNA, 15 bp, Homo sapiens
tacaataaaagccaa

SEQ ID NO: 1139916 - DNA, 15 bp, Homo sapiens
ttacaataaaagcca

SEQ ID NO: 1139917 - DNA, 15 bp, Homo sapiens
cttacaataaaagcc

SEQ ID NO: 1139918 - DNA, 15 bp, Homo sapiens
tcttacaataaaagc

SEQ ID NO: 1139919 - DNA, 15 bp, Homo sapiens
ttcttacaataaaag

SEQ ID NO: 1139920 - DNA, 15 bp, Homo sapiens
tttcttacaataaaa

SEQ ID NO: 1139921 - DNA, 15 bp, Homo sapiens
ttttcttacaataaa

SEQ ID NO: 1139922 - DNA, 15 bp, Homo sapiens
tttttcttacaataa

SEQ ID NO: 1139923 - DNA, 15 bp, Homo sapiens
ctttttcttacaata

SEQ ID NO: 1139924 - DNA, 15 bp, Homo sapiens
cctttttcttacaat

SEQ ID NO: 1139925 - DNA, 15 bp, Homo sapiens
tcctttttcttacaa

SEQ ID NO: 1139926 - DNA, 15 bp, Homo sapiens
ttcctttttcttaca

SEQ ID NO: 1139927 - DNA, 15 bp, Homo sapiens
tttcctttttcttac

SEQ ID NO: 1139928 - DNA, 15 bp, Homo sapiens
ctttcctttttctta

SEQ ID NO: 1139929 - DNA, 15 bp, Homo sapiens
gctttcctttttctt

SEQ ID NO: 1139930 - DNA, 15 bp, Homo sapiens
ggctttcctttttct

SEQ ID NO: 1139931 - DNA, 15 bp, Homo sapiens
tggctttcctttttc

SEQ ID NO: 1139932 - DNA, 15 bp, Homo sapiens
atggctttccttttt

SEQ ID NO: 1139933 - DNA, 15 bp, Homo sapiens
aatggctttcctttt

SEQ ID NO: 1139934 - DNA, 15 bp, Homo sapiens
caatggctttccttt

SEQ ID NO: 1139935 - DNA, 15 bp, Homo sapiens
acaatggctttcctt

SEQ ID NO: 1139936 - DNA, 15 bp, Homo sapiens
tacaatggctttcct

SEQ ID NO: 1139937 - DNA, 15 bp, Homo sapiens
ctacaatggctttcc

SEQ ID NO: 1139938 - DNA, 15 bp, Homo sapiens
cctacaatggctttc

SEQ ID NO: 1139939 - DNA, 15 bp, Homo sapiens
acctacaatggcttt

SEQ ID NO: 1139940 - DNA, 15 bp, Homo sapiens
aacctacaatggctt

SEQ ID NO: 1139941 - DNA, 15 bp, Homo sapiens
aaacctacaatggct

SEQ ID NO: 1139942 - DNA, 15 bp, Homo sapiens
aaaacctacaatggc

SEQ ID NO: 1139943 - DNA, 15 bp, Homo sapiens
aaaaacctacaatgg

SEQ ID NO: 1139944 - DNA, 15 bp, Homo sapiens
caaaaacctacaatg

SEQ ID NO: 1139945 - DNA, 15 bp, Homo sapiens
tcaaaaacctacaat

SEQ ID NO: 1139946 - DNA, 15 bp, Homo sapiens
ctcaaaaacctacaa

SEQ ID NO: 1139947 - DNA, 15 bp, Homo sapiens
gctcaaaaacctaca

SEQ ID NO: 1139948 - DNA, 15 bp, Homo sapiens
tgctcaaaaacctac

SEQ ID NO: 1139949 - DNA, 15 bp, Homo sapiens
ttgctcaaaaaccta

SEQ ID NO: 1139950 - DNA, 15 bp, Homo sapiens
tttgctcaaaaacct

SEQ ID NO: 1139951 - DNA, 15 bp, Homo sapiens
ctttgctcaaaaacc

SEQ ID NO: 1139952 - DNA, 15 bp, Homo sapiens
tctttgctcaaaaac

SEQ ID NO: 1139953 - DNA, 15 bp, Homo sapiens
ttctttgctcaaaaa

SEQ ID NO: 1139954 - DNA, 15 bp, Homo sapiens
cttctttgctcaaaa

SEQ ID NO: 1139955 - DNA, 15 bp, Homo sapiens
acttctttgctcaaa

SEQ ID NO: 1139956 - DNA, 15 bp, Homo sapiens
tacttctttgctcaa

SEQ ID NO: 1139957 - DNA, 15 bp, Homo sapiens
ctacttctttgctca

SEQ ID NO: 1139958 - DNA, 15 bp, Homo sapiens
actacttctttgctc

SEQ ID NO: 1139959 - DNA, 15 bp, Homo sapiens
cactacttctttgct

SEQ ID NO: 1139960 - DNA, 15 bp, Homo sapiens
acactacttctttgc

SEQ ID NO: 1139961 - DNA, 15 bp, Homo sapiens
tacactacttctttg

SEQ ID NO: 1139962 - DNA, 15 bp, Homo sapiens
atacactacttcttt

SEQ ID NO: 1139963 - DNA, 15 bp, Homo sapiens
catacactacttctt

SEQ ID NO: 1139964 - DNA, 15 bp, Homo sapiens
ccatacactacttct

SEQ ID NO: 1139965 - DNA, 15 bp, Homo sapiens
gccatacactacttc

SEQ ID NO: 1139966 - DNA, 15 bp, Homo sapiens
agccatacactactt

SEQ ID NO: 1139967 - DNA, 15 bp, Homo sapiens
aagccatacactact

SEQ ID NO: 1139968 - DNA, 15 bp, Homo sapiens
caagccatacactac

SEQ ID NO: 1139969 - DNA, 15 bp, Homo sapiens
ccaagccatacacta

SEQ ID NO: 1139970 - DNA, 15 bp, Homo sapiens
gccaagccatacact

SEQ ID NO: 1139971 - DNA, 15 bp, Homo sapiens
tgccaagccatacac

SEQ ID NO: 1139972 - DNA, 15 bp, Homo sapiens
atgccaagccataca

SEQ ID NO: 1139973 - DNA, 15 bp, Homo sapiens
aatgccaagccatac

SEQ ID NO: 1139974 - DNA, 15 bp, Homo sapiens
aaatgccaagccata

SEQ ID NO: 1139975 - DNA, 15 bp, Homo sapiens
aaaatgccaagccat

SEQ ID NO: 1139976 - DNA, 15 bp, Homo sapiens
caaaatgccaagcca

SEQ ID NO: 1139977 - DNA, 15 bp, Homo sapiens
tcaaaatgccaagcc

SEQ ID NO: 1139978 - DNA, 15 bp, Homo sapiens
ttcaaaatgccaagc

SEQ ID NO: 1139979 - DNA, 15 bp, Homo sapiens
tttcaaaatgccaag

SEQ ID NO: 1139980 - DNA, 15 bp, Homo sapiens
atttcaaaatgccaa

SEQ ID NO: 1139981 - DNA, 15 bp, Homo sapiens
tatttcaaaatgcca

SEQ ID NO: 1139982 - DNA, 15 bp, Homo sapiens
ttatttcaaaatgcc

SEQ ID NO: 1139983 - DNA, 15 bp, Homo sapiens
attatttcaaaatgc

SEQ ID NO: 1139984 - DNA, 15 bp, Homo sapiens
aattatttcaaaatg

SEQ ID NO: 1139985 - DNA, 15 bp, Homo sapiens
taattatttcaaaat

SEQ ID NO: 1139986 - DNA, 15 bp, Homo sapiens
gtaattatttcaaaa

SEQ ID NO: 1139987 - DNA, 15 bp, Homo sapiens
agtaattatttcaaa

SEQ ID NO: 1139988 - DNA, 15 bp, Homo sapiens
gagtaattatttcaa

SEQ ID NO: 1139989 - DNA, 15 bp, Homo sapiens
agagtaattatttca

SEQ ID NO: 1139990 - DNA, 15 bp, Homo sapiens
cagagtaattatttc

SEQ ID NO: 1139991 - DNA, 15 bp, Homo sapiens
tcagagtaattattt

SEQ ID NO: 1139992 - DNA, 15 bp, Homo sapiens
gtcagagtaattatt

SEQ ID NO: 1139993 - DNA, 15 bp, Homo sapiens
agtcagagtaattat

SEQ ID NO: 1139994 - DNA, 15 bp, Homo sapiens
cagtcagagtaatta

SEQ ID NO: 1139995 - DNA, 15 bp, Homo sapiens
gcagtcagagtaatt

SEQ ID NO: 1139996 - DNA, 15 bp, Homo sapiens
agcagtcagagtaat

SEQ ID NO: 1139997 - DNA, 15 bp, Homo sapiens
tagcagtcagagtaa

SEQ ID NO: 1139998 - DNA, 15 bp, Homo sapiens
ctagcagtcagagta

SEQ ID NO: 1139999 - DNA, 15 bp, Homo sapiens
actagcagtcagagt

SEQ ID NO: 1140000 - DNA, 15 bp, Homo sapiens
aactagcagtcagag

SEQ ID NO: 1140001 - DNA, 15 bp, Homo sapiens
caactagcagtcaga

SEQ ID NO: 1140002 - DNA, 15 bp, Homo sapiens
tcaactagcagtcag

SEQ ID NO: 1140003 - DNA, 15 bp, Homo sapiens
ttcaactagcagtca

SEQ ID NO: 1140004 - DNA, 15 bp, Homo sapiens
cttcaactagcagtc

SEQ ID NO: 1140005 - DNA, 15 bp, Homo sapiens
tcttcaactagcagt

SEQ ID NO: 1140006 - DNA, 15 bp, Homo sapiens
atcttcaactagcag

SEQ ID NO: 1140007 - DNA, 15 bp, Homo sapiens
tatcttcaactagca

SEQ ID NO: 1140008 - DNA, 15 bp, Homo sapiens
ctatcttcaactagc

SEQ ID NO: 1140009 - DNA, 15 bp, Homo sapiens
tctatcttcaactag

SEQ ID NO: 1140010 - DNA, 15 bp, Homo sapiens
gtctatcttcaacta

SEQ ID NO: 1140011 - DNA, 15 bp, Homo sapiens
agtctatcttcaact

SEQ ID NO: 1140012 - DNA, 15 bp, Homo sapiens
cagtctatcttcaac

SEQ ID NO: 1140013 - DNA, 15 bp, Homo sapiens
tcagtctatcttcaa

SEQ ID NO: 1140014 - DNA, 15 bp, Homo sapiens
ttcagtctatcttca

SEQ ID NO: 1140015 - DNA, 15 bp, Homo sapiens
cttcagtctatcttc

SEQ ID NO: 1140016 - DNA, 15 bp, Homo sapiens
gcttcagtctatctt

SEQ ID NO: 1140017 - DNA, 15 bp, Homo sapiens
cgcttcagtctatct

SEQ ID NO: 1140018 - DNA, 15 bp, Homo sapiens
ccgcttcagtctatc

SEQ ID NO: 1140019 - DNA, 15 bp, Homo sapiens
gccgcttcagtctat

SEQ ID NO: 1140020 - DNA, 15 bp, Homo sapiens
tgccgcttcagtcta

SEQ ID NO: 1140021 - DNA, 15 bp, Homo sapiens
atgccgcttcagtct

SEQ ID NO: 1140022 - DNA, 15 bp, Homo sapiens
tatgccgcttcagtc

SEQ ID NO: 1140023 - DNA, 15 bp, Homo sapiens
ctatgccgcttcagt

SEQ ID NO: 1140024 - DNA, 15 bp, Homo sapiens
cctatgccgcttcag

SEQ ID NO: 1140025 - DNA, 15 bp, Homo sapiens
acctatgccgcttca

SEQ ID NO: 1140026 - DNA, 15 bp, Homo sapiens
cacctatgccgcttc

SEQ ID NO: 1140027 - DNA, 15 bp, Homo sapiens
ccacctatgccgctt

SEQ ID NO: 1140028 - DNA, 15 bp, Homo sapiens
tccacctatgccgct

SEQ ID NO: 1140029 - DNA, 15 bp, Homo sapiens
ttccacctatgccgc

SEQ ID NO: 1140030 - DNA, 15 bp, Homo sapiens
cttccacctatgccg

SEQ ID NO: 1140031 - DNA, 15 bp, Homo sapiens
acttccacctatgcc

SEQ ID NO: 1140032 - DNA, 15 bp, Homo sapiens
cacttccacctatgc

SEQ ID NO: 1140033 - DNA, 15 bp, Homo sapiens
ccacttccacctatg

SEQ ID NO: 1140034 - DNA, 15 bp, Homo sapiens
tccacttccacctat

SEQ ID NO: 1140035 - DNA, 15 bp, Homo sapiens
ctccacttccaccta

SEQ ID NO: 1140036 - DNA, 15 bp, Homo sapiens
tctccacttccacct

SEQ ID NO: 1140037 - DNA, 15 bp, Homo sapiens
ctctccacttccacc

SEQ ID NO: 1140038 - DNA, 15 bp, Homo sapiens
tctctccacttccac

SEQ ID NO: 1140039 - DNA, 15 bp, Homo sapiens
gtctctccacttcca

SEQ ID NO: 1140040 - DNA, 15 bp, Homo sapiens
agtctctccacttcc

SEQ ID NO: 1140041 - DNA, 15 bp, Homo sapiens
tagtctctccacttc

SEQ ID NO: 1140042 - DNA, 15 bp, Homo sapiens
ctagtctctccactt

SEQ ID NO: 1140043 - DNA, 15 bp, Homo sapiens
cctagtctctccact

SEQ ID NO: 1140044 - DNA, 15 bp, Homo sapiens
gcctagtctctccac

SEQ ID NO: 1140045 - DNA, 15 bp, Homo sapiens
tgcctagtctctcca

SEQ ID NO: 1140046 - DNA, 15 bp, Homo sapiens
ctgcctagtctctcc

SEQ ID NO: 1140047 - DNA, 15 bp, Homo sapiens
cctgcctagtctctc

SEQ ID NO: 1140048 - DNA, 15 bp, Homo sapiens
tcctgcctagtctct

SEQ ID NO: 1140049 - DNA, 15 bp, Homo sapiens
ctcctgcctagtctc

SEQ ID NO: 1140050 - DNA, 15 bp, Homo sapiens
cctcctgcctagtct

SEQ ID NO: 1140051 - DNA, 15 bp, Homo sapiens
gcctcctgcctagtc

SEQ ID NO: 1140052 - DNA, 15 bp, Homo sapiens
agcctcctgcctagt

SEQ ID NO: 1140053 - DNA, 15 bp, Homo sapiens
cagcctcctgcctag

SEQ ID NO: 1140054 - DNA, 15 bp, Homo sapiens
gcagcctcctgccta

SEQ ID NO: 1140055 - DNA, 15 bp, Homo sapiens
ggcagcctcctgcct

SEQ ID NO: 1140056 - DNA, 15 bp, Homo sapiens
gggcagcctcctgcc

SEQ ID NO: 1140057 - DNA, 15 bp, Homo sapiens
agggcagcctcctgc

SEQ ID NO: 1140058 - DNA, 15 bp, Homo sapiens
tagggcagcctcctg

SEQ ID NO: 1140059 - DNA, 15 bp, Homo sapiens
gtagggcagcctcct

SEQ ID NO: 1140060 - DNA, 15 bp, Homo sapiens
agtagggcagcctcc

SEQ ID NO: 1140061 - DNA, 15 bp, Homo sapiens
cagtagggcagcctc

SEQ ID NO: 1140062 - DNA, 15 bp, Homo sapiens
ccagtagggcagcct

SEQ ID NO: 1140063 - DNA, 15 bp, Homo sapiens
accagtagggcagcc

SEQ ID NO: 1140064 - DNA, 15 bp, Homo sapiens
caccagtagggcagc

SEQ ID NO: 1140065 - DNA, 15 bp, Homo sapiens
tcaccagtagggcag

SEQ ID NO: 1140066 - DNA, 15 bp, Homo sapiens
gtcaccagtagggca

SEQ ID NO: 1140067 - DNA, 15 bp, Homo sapiens
tgtcaccagtagggc

SEQ ID NO: 1140068 - DNA, 15 bp, Homo sapiens
ctgtcaccagtaggg

SEQ ID NO: 1140069 - DNA, 15 bp, Homo sapiens
gctgtcaccagtagg

SEQ ID NO: 1140070 - DNA, 15 bp, Homo sapiens
tgctgtcaccagtag

SEQ ID NO: 1140071 - DNA, 15 bp, Homo sapiens
ttgctgtcaccagta

SEQ ID NO: 1140072 - DNA, 15 bp, Homo sapiens
attgctgtcaccagt

SEQ ID NO: 1140073 - DNA, 15 bp, Homo sapiens
cattgctgtcaccag

SEQ ID NO: 1140074 - DNA, 15 bp, Homo sapiens
tcattgctgtcacca

SEQ ID NO: 1140075 - DNA, 15 bp, Homo sapiens
ttcattgctgtcacc

SEQ ID NO: 1140076 - DNA, 15 bp, Homo sapiens
tttcattgctgtcac

SEQ ID NO: 1140077 - DNA, 15 bp, Homo sapiens
gtttcattgctgtca

SEQ ID NO: 1140078 - DNA, 15 bp, Homo sapiens
agtttcattgctgtc

SEQ ID NO: 1140079 - DNA, 15 bp, Homo sapiens
cagtttcattgctgt

SEQ ID NO: 1140080 - DNA, 15 bp, Homo sapiens
ccagtttcattgctg

SEQ ID NO: 1140081 - DNA, 15 bp, Homo sapiens
accagtttcattgct

SEQ ID NO: 1140082 - DNA, 15 bp, Homo sapiens
caccagtttcattgc

SEQ ID NO: 1140083 - DNA, 15 bp, Homo sapiens
tcaccagtttcattg

SEQ ID NO: 1140084 - DNA, 15 bp, Homo sapiens
atcaccagtttcatt

SEQ ID NO: 1140085 - DNA, 15 bp, Homo sapiens
tatcaccagtttcat

SEQ ID NO: 1140086 - DNA, 15 bp, Homo sapiens
ttatcaccagtttca

SEQ ID NO: 1140087 - DNA, 15 bp, Homo sapiens
cttatcaccagtttc

SEQ ID NO: 1140088 - DNA, 15 bp, Homo sapiens
acttatcaccagttt

SEQ ID NO: 1140089 - DNA, 15 bp, Homo sapiens
cacttatcaccagtt

SEQ ID NO: 1140090 - DNA, 15 bp, Homo sapiens
ccacttatcaccagt

SEQ ID NO: 1140091 - DNA, 15 bp, Homo sapiens
accacttatcaccag

SEQ ID NO: 1140092 - DNA, 15 bp, Homo sapiens
aaccacttatcacca

SEQ ID NO: 1140093 - DNA, 15 bp, Homo sapiens
taaccacttatcacc

SEQ ID NO: 1140094 - DNA, 15 bp, Homo sapiens
ttaaccacttatcac

SEQ ID NO: 1140095 - DNA, 15 bp, Homo sapiens
tttaaccacttatca

SEQ ID NO: 1140096 - DNA, 15 bp, Homo sapiens
atttaaccacttatc

SEQ ID NO: 1140097 - DNA, 15 bp, Homo sapiens
aatttaaccacttat

SEQ ID NO: 1140098 - DNA, 15 bp, Homo sapiens
gaatttaaccactta

SEQ ID NO: 1140099 - DNA, 15 bp, Homo sapiens
agaatttaaccactt

SEQ ID NO: 1140100 - DNA, 15 bp, Homo sapiens
catctagaatttaac

SEQ ID NO: 1140101 - DNA, 15 bp, Homo sapiens
acatctagaatttaa

SEQ ID NO: 1140102 - DNA, 15 bp, Homo sapiens
tacatctagaattta

SEQ ID NO: 1140103 - DNA, 15 bp, Homo sapiens
gtacatctagaattt

SEQ ID NO: 1140104 - DNA, 15 bp, Homo sapiens
agtacatctagaatt

SEQ ID NO: 1140105 - DNA, 15 bp, Homo sapiens
aagtacatctagaat

SEQ ID NO: 1140106 - DNA, 15 bp, Homo sapiens
aaagtacatctagaa

SEQ ID NO: 1140107 - DNA, 15 bp, Homo sapiens
caaagtacatctaga

SEQ ID NO: 1140108 - DNA, 15 bp, Homo sapiens
tcaaagtacatctag

SEQ ID NO: 1140109 - DNA, 15 bp, Homo sapiens
ttcaaagtacatcta

SEQ ID NO: 1140110 - DNA, 15 bp, Homo sapiens
attcaaagtacatct

SEQ ID NO: 1140111 - DNA, 15 bp, Homo sapiens
cattcaaagtacatc

SEQ ID NO: 1140112 - DNA, 15 bp, Homo sapiens
acattcaaagtacat

SEQ ID NO: 1140113 - DNA, 15 bp, Homo sapiens
tacattcaaagtaca

SEQ ID NO: 1140114 - DNA, 15 bp, Homo sapiens
atacattcaaagtac

SEQ ID NO: 1140115 - DNA, 15 bp, Homo sapiens
gatacattcaaagta

SEQ ID NO: 1140116 - DNA, 15 bp, Homo sapiens
tgatacattcaaagt

SEQ ID NO: 1140117 - DNA, 15 bp, Homo sapiens
gtgatacattcaaag

SEQ ID NO: 1140118 - DNA, 15 bp, Homo sapiens
ggtgatacattcaaa

SEQ ID NO: 1140119 - DNA, 15 bp, Homo sapiens
tggtgatacattcaa

SEQ ID NO: 1140120 - DNA, 15 bp, Homo sapiens
ttggtgatacattca

SEQ ID NO: 1140121 - DNA, 15 bp, Homo sapiens
gttggtgatacattc

SEQ ID NO: 1140122 - DNA, 15 bp, Homo sapiens
tgttggtgatacatt

SEQ ID NO: 1140123 - DNA, 15 bp, Homo sapiens
ttgttggtgatacat

SEQ ID NO: 1140124 - DNA, 15 bp, Homo sapiens
cttgttggtgataca

SEQ ID NO: 1140125 - DNA, 15 bp, Homo sapiens
tcttgttggtgatac

SEQ ID NO: 1140126 - DNA, 15 bp, Homo sapiens
atcttgttggtgata

SEQ ID NO: 1140127 - DNA, 15 bp, Homo sapiens
aatcttgttggtgat

SEQ ID NO: 1140128 - DNA, 15 bp, Homo sapiens
caatcttgttggtga

SEQ ID NO: 1140129 - DNA, 15 bp, Homo sapiens
gcaatcttgttggtg

SEQ ID NO: 1140130 - DNA, 15 bp, Homo sapiens
ggcaatcttgttggt

SEQ ID NO: 1140131 - DNA, 15 bp, Homo sapiens
aggcaatcttgttgg

SEQ ID NO: 1140132 - DNA, 15 bp, Homo sapiens
caggcaatcttgttg

SEQ ID NO: 1140133 - DNA, 15 bp, Homo sapiens
tcaggcaatcttgtt

SEQ ID NO: 1140134 - DNA, 15 bp, Homo sapiens
gtcaggcaatcttgt

SEQ ID NO: 1140135 - DNA, 15 bp, Homo sapiens
tgtcaggcaatcttg

SEQ ID NO: 1140136 - DNA, 15 bp, Homo sapiens
gtgtcaggcaatctt

SEQ ID NO: 1140137 - DNA, 15 bp, Homo sapiens
ggtgtcaggcaatct

SEQ ID NO: 1140138 - DNA, 15 bp, Homo sapiens
tggtgtcaggcaatc

SEQ ID NO: 1140139 - DNA, 15 bp, Homo sapiens
gtggtgtcaggcaat

SEQ ID NO: 1140140 - DNA, 15 bp, Homo sapiens
agtggtgtcaggcaa

SEQ ID NO: 1140141 - DNA, 15 bp, Homo sapiens
gagtggtgtcaggca

SEQ ID NO: 1140142 - DNA, 15 bp, Homo sapiens
agagtggtgtcaggc

SEQ ID NO: 1140143 - DNA, 15 bp, Homo sapiens
gagagtggtgtcagg

SEQ ID NO: 1140144 - DNA, 15 bp, Homo sapiens
ggagagtggtgtcag

SEQ ID NO: 1140145 - DNA, 15 bp, Homo sapiens
tggagagtggtgtca

SEQ ID NO: 1140146 - DNA, 15 bp, Homo sapiens
gtggagagtggtgtc

SEQ ID NO: 1140147 - DNA, 15 bp, Homo sapiens
tgtggagagtggtgt

SEQ ID NO: 1140148 - DNA, 15 bp, Homo sapiens
ttgtggagagtggtg

SEQ ID NO: 1140149 - DNA, 15 bp, Homo sapiens
attgtggagagtggt

SEQ ID NO: 1140150 - DNA, 15 bp, Homo sapiens
gattgtggagagtgg

SEQ ID NO: 1140151 - DNA, 15 bp, Homo sapiens
ggattgtggagagtg

SEQ ID NO: 1140152 - DNA, 15 bp, Homo sapiens
aggattgtggagagt

SEQ ID NO: 1140153 - DNA, 15 bp, Homo sapiens
aaggattgtggagag

SEQ ID NO: 1140154 - DNA, 15 bp, Homo sapiens
gaaggattgtggaga

SEQ ID NO: 1140155 - DNA, 15 bp, Homo sapiens
tgaaggattgtggag

SEQ ID NO: 1140156 - DNA, 15 bp, Homo sapiens
ctgaaggattgtgga

SEQ ID NO: 1140157 - DNA, 15 bp, Homo sapiens
tctgaaggattgtgg

SEQ ID NO: 1140158 - DNA, 15 bp, Homo sapiens
ttctgaaggattgtg

SEQ ID NO: 1140159 - DNA, 15 bp, Homo sapiens
cttctgaaggattgt

SEQ ID NO: 1140160 - DNA, 15 bp, Homo sapiens
tcttctgaaggattg

SEQ ID NO: 1140161 - DNA, 15 bp, Homo sapiens
ttcttctgaaggatt

SEQ ID NO: 1140162 - DNA, 15 bp, Homo sapiens
attcttctgaaggat

SEQ ID NO: 1140163 - DNA, 15 bp, Homo sapiens
tattcttctgaagga

SEQ ID NO: 1140164 - DNA, 15 bp, Homo sapiens
ctattcttctgaagg

SEQ ID NO: 1140165 - DNA, 15 bp, Homo sapiens
tctattcttctgaag

SEQ ID NO: 1140166 - DNA, 15 bp, Homo sapiens
gtctattcttctgaa

SEQ ID NO: 1140167 - DNA, 15 bp, Homo sapiens
tgtctattcttctga

SEQ ID NO: 1140168 - DNA, 15 bp, Homo sapiens
atgtctattcttctg

SEQ ID NO: 1140169 - DNA, 15 bp, Homo sapiens
aatgtctattcttct

SEQ ID NO: 1140170 - DNA, 15 bp, Homo sapiens
gaatgtctattcttc

SEQ ID NO: 1140171 - DNA, 15 bp, Homo sapiens
ggaatgtctattctt

SEQ ID NO: 1140172 - DNA, 15 bp, Homo sapiens
aggaatgtctattct

SEQ ID NO: 1140173 - DNA, 15 bp, Homo sapiens
taggaatgtctattc

SEQ ID NO: 1140174 - DNA, 15 bp, Homo sapiens
ttaggaatgtctatt

SEQ ID NO: 1140175 - DNA, 15 bp, Homo sapiens
attaggaatgtctat

SEQ ID NO: 1140176 - DNA, 15 bp, Homo sapiens
aattaggaatgtcta

SEQ ID NO: 1140177 - DNA, 15 bp, Homo sapiens
aaattaggaatgtct

SEQ ID NO: 1140178 - DNA, 15 bp, Homo sapiens
aaaattaggaatgtc

SEQ ID NO: 1140179 - DNA, 15 bp, Homo sapiens
taaaattaggaatgt

SEQ ID NO: 1140180 - DNA, 15 bp, Homo sapiens
ttaaaattaggaatg

SEQ ID NO: 1140181 - DNA, 15 bp, Homo sapiens
tttaaaattaggaat

SEQ ID NO: 1140182 - DNA, 15 bp, Homo sapiens
atttaaaattaggaa

SEQ ID NO: 1140183 - DNA, 15 bp, Homo sapiens
gatttaaaattagga

SEQ ID NO: 1140184 - DNA, 15 bp, Homo sapiens
tgatttaaaattagg

SEQ ID NO: 1140185 - DNA, 15 bp, Homo sapiens
atgatttaaaattag

SEQ ID NO: 1140186 - DNA, 15 bp, Homo sapiens
catgatttaaaatta

SEQ ID NO: 1140187 - DNA, 15 bp, Homo sapiens
tcatgatttaaaatt

SEQ ID NO: 1140188 - DNA, 15 bp, Homo sapiens
atcatgatttaaaat

SEQ ID NO: 1140189 - DNA, 15 bp, Homo sapiens
aatcatgatttaaaa

SEQ ID NO: 1140190 - DNA, 15 bp, Homo sapiens
aaatcatgatttaaa

SEQ ID NO: 1140191 - DNA, 15 bp, Homo sapiens
aaaatcatgatttaa

SEQ ID NO: 1140192 - DNA, 15 bp, Homo sapiens
aaaaatcatgattta

SEQ ID NO: 1140193 - DNA, 15 bp, Homo sapiens
aaaaaatcatgattt

SEQ ID NO: 1140194 - DNA, 15 bp, Homo sapiens
aaaaaaatcatgatt

SEQ ID NO: 1140195 - DNA, 15 bp, Homo sapiens
aaaaaaaatcatgat

SEQ ID NO: 1140196 - DNA, 15 bp, Homo sapiens
taaaaaaaatcatga

SEQ ID NO: 1140197 - DNA, 15 bp, Homo sapiens
ttaaaaaaaatcatg

SEQ ID NO: 1140198 - DNA, 15 bp, Homo sapiens
attaaaaaaaatcat

SEQ ID NO: 1140199 - DNA, 15 bp, Homo sapiens
aattaaaaaaaatca

SEQ ID NO: 1140200 - DNA, 15 bp, Homo sapiens
aaaattaaaaaaaat

SEQ ID NO: 1140201 - DNA, 15 bp, Homo sapiens
taaaattaaaaaaaa

SEQ ID NO: 1140202 - DNA, 15 bp, Homo sapiens
ctaaaattaaaaaaa

SEQ ID NO: 1140203 - DNA, 15 bp, Homo sapiens
tctaaaattaaaaaa

SEQ ID NO: 1140204 - DNA, 15 bp, Homo sapiens
ttctaaaattaaaaa

SEQ ID NO: 1140205 - DNA, 15 bp, Homo sapiens
tttctaaaattaaaa

SEQ ID NO: 1140206 - DNA, 15 bp, Homo sapiens
ttttctaaaattaaa

SEQ ID NO: 1140207 - DNA, 15 bp, Homo sapiens
gttttctaaaattaa

SEQ ID NO: 1140208 - DNA, 15 bp, Homo sapiens
tgttttctaaaatta

SEQ ID NO: 1140209 - DNA, 15 bp, Homo sapiens
ttgttttctaaaatt

SEQ ID NO: 1140210 - DNA, 15 bp, Homo sapiens
tttgttttctaaaat

SEQ ID NO: 1140211 - DNA, 15 bp, Homo sapiens
atttgttttctaaaa

SEQ ID NO: 1140212 - DNA, 15 bp, Homo sapiens
tatttgttttctaaa

SEQ ID NO: 1140213 - DNA, 15 bp, Homo sapiens
ttatttgttttctaa

SEQ ID NO: 1140214 - DNA, 15 bp, Homo sapiens
gttatttgttttcta

SEQ ID NO: 1140215 - DNA, 15 bp, Homo sapiens
agttatttgttttct

SEQ ID NO: 1140216 - DNA, 15 bp, Homo sapiens
aagttatttgttttc

SEQ ID NO: 1140217 - DNA, 15 bp, Homo sapiens
taagttatttgtttt

SEQ ID NO: 1140218 - DNA, 15 bp, Homo sapiens
ttaagttatttgttt

SEQ ID NO: 1140219 - DNA, 15 bp, Homo sapiens
attaagttatttgtt

SEQ ID NO: 1140220 - DNA, 15 bp, Homo sapiens
aattaagttatttgt

SEQ ID NO: 1140221 - DNA, 15 bp, Homo sapiens
caattaagttatttg

SEQ ID NO: 1140222 - DNA, 15 bp, Homo sapiens
tcaattaagttattt

SEQ ID NO: 1140223 - DNA, 15 bp, Homo sapiens
gtcaattaagttatt

SEQ ID NO: 1140224 - DNA, 15 bp, Homo sapiens
agtcaattaagttat

SEQ ID NO: 1140225 - DNA, 15 bp, Homo sapiens
aagtcaattaagtta

SEQ ID NO: 1140226 - DNA, 15 bp, Homo sapiens
taagtcaattaagtt

SEQ ID NO: 1140227 - DNA, 15 bp, Homo sapiens
ctaagtcaattaagt

SEQ ID NO: 1140228 - DNA, 15 bp, Homo sapiens
gctaagtcaattaag

SEQ ID NO: 1140229 - DNA, 15 bp, Homo sapiens
cgctaagtcaattaa

SEQ ID NO: 1140230 - DNA, 15 bp, Homo sapiens
tcgctaagtcaatta

SEQ ID NO: 1140231 - DNA, 15 bp, Homo sapiens
gtcgctaagtcaatt

SEQ ID NO: 1140232 - DNA, 15 bp, Homo sapiens
tgtcgctaagtcaat

SEQ ID NO: 1140233 - DNA, 15 bp, Homo sapiens
gtgtcgctaagtcaa

SEQ ID NO: 1140234 - DNA, 15 bp, Homo sapiens
agtgtcgctaagtca

SEQ ID NO: 1140235 - DNA, 15 bp, Homo sapiens
cagtgtcgctaagtc

SEQ ID NO: 1140236 - DNA, 15 bp, Homo sapiens
acagtgtcgctaagt

SEQ ID NO: 1140237 - DNA, 15 bp, Homo sapiens
aacagtgtcgctaag

SEQ ID NO: 1140238 - DNA, 15 bp, Homo sapiens
taacagtgtcgctaa

SEQ ID NO: 1140239 - DNA, 15 bp, Homo sapiens
ctaacagtgtcgcta

SEQ ID NO: 1140240 - DNA, 15 bp, Homo sapiens
gctaacagtgtcgct

SEQ ID NO: 1140241 - DNA, 15 bp, Homo sapiens
tgctaacagtgtcgc

SEQ ID NO: 1140242 - DNA, 15 bp, Homo sapiens
atgctaacagtgtcg

SEQ ID NO: 1140243 - DNA, 15 bp, Homo sapiens
tatgctaacagtgtc

SEQ ID NO: 1140244 - DNA, 15 bp, Homo sapiens
gtatgctaacagtgt

SEQ ID NO: 1140245 - DNA, 15 bp, Homo sapiens
agtatgctaacagtg

SEQ ID NO: 1140246 - DNA, 15 bp, Homo sapiens
aagtatgctaacagt

SEQ ID NO: 1140247 - DNA, 15 bp, Homo sapiens
taagtatgctaacag

SEQ ID NO: 1140248 - DNA, 15 bp, Homo sapiens
ataagtatgctaaca

SEQ ID NO: 1140249 - DNA, 15 bp, Homo sapiens
gataagtatgctaac

SEQ ID NO: 1140250 - DNA, 15 bp, Homo sapiens
agataagtatgctaa

SEQ ID NO: 1140251 - DNA, 15 bp, Homo sapiens
aagataagtatgcta

SEQ ID NO: 1140252 - DNA, 15 bp, Homo sapiens
aaagataagtatgct

SEQ ID NO: 1140253 - DNA, 15 bp, Homo sapiens
gaaagataagtatgc

SEQ ID NO: 1140254 - DNA, 15 bp, Homo sapiens
ggaaagataagtatg

SEQ ID NO: 1140255 - DNA, 15 bp, Homo sapiens
aggaaagataagtat

SEQ ID NO: 1140256 - DNA, 15 bp, Homo sapiens
caggaaagataagta

SEQ ID NO: 1140257 - DNA, 15 bp, Homo sapiens
acaggaaagataagt

SEQ ID NO: 1140258 - DNA, 15 bp, Homo sapiens
cacaggaaagataag

SEQ ID NO: 1140259 - DNA, 15 bp, Homo sapiens
acacaggaaagataa

SEQ ID NO: 1140260 - DNA, 15 bp, Homo sapiens
tacacaggaaagata

SEQ ID NO: 1140261 - DNA, 15 bp, Homo sapiens
atacacaggaaagat

SEQ ID NO: 1140262 - DNA, 15 bp, Homo sapiens
catacacaggaaaga

SEQ ID NO: 1140263 - DNA, 15 bp, Homo sapiens
acatacacaggaaag

SEQ ID NO: 1140264 - DNA, 15 bp, Homo sapiens
cacatacacaggaaa

SEQ ID NO: 1140265 - DNA, 15 bp, Homo sapiens
tcacatacacaggaa

SEQ ID NO: 1140266 - DNA, 15 bp, Homo sapiens
ctcacatacacagga

SEQ ID NO: 1140267 - DNA, 15 bp, Homo sapiens
gctcacatacacagg

SEQ ID NO: 1140268 - DNA, 15 bp, Homo sapiens
agctcacatacacag

SEQ ID NO: 1140269 - DNA, 15 bp, Homo sapiens
gagctcacatacaca

SEQ ID NO: 1140270 - DNA, 15 bp, Homo sapiens
agagctcacatacac

SEQ ID NO: 1140271 - DNA, 15 bp, Homo sapiens
cagagctcacataca

SEQ ID NO: 1140272 - DNA, 15 bp, Homo sapiens
acagagctcacatac

SEQ ID NO: 1140273 - DNA, 15 bp, Homo sapiens
tacagagctcacata

SEQ ID NO: 1140274 - DNA, 15 bp, Homo sapiens
ttacagagctcacat

SEQ ID NO: 1140275 - DNA, 15 bp, Homo sapiens
cttacagagctcaca

SEQ ID NO: 1140276 - DNA, 15 bp, Homo sapiens
ccttacagagctcac

SEQ ID NO: 1140277 - DNA, 15 bp, Homo sapiens
gccttacagagctca

SEQ ID NO: 1140278 - DNA, 15 bp, Homo sapiens
tgccttacagagctc

SEQ ID NO: 1140279 - DNA, 15 bp, Homo sapiens
ctgccttacagagct

SEQ ID NO: 1140280 - DNA, 15 bp, Homo sapiens
cctgccttacagagc

SEQ ID NO: 1140281 - DNA, 15 bp, Homo sapiens
gcctgccttacagag

SEQ ID NO: 1140282 - DNA, 15 bp, Homo sapiens
cgcctgccttacaga

SEQ ID NO: 1140283 - DNA, 15 bp, Homo sapiens
tcgcctgccttacag

SEQ ID NO: 1140284 - DNA, 15 bp, Homo sapiens
gtcgcctgccttaca

SEQ ID NO: 1140285 - DNA, 15 bp, Homo sapiens
ggtcgcctgccttac

SEQ ID NO: 1140286 - DNA, 15 bp, Homo sapiens
tggtcgcctgcctta

SEQ ID NO: 1140287 - DNA, 15 bp, Homo sapiens
atggtcgcctgcctt

SEQ ID NO: 1140288 - DNA, 15 bp, Homo sapiens
aatggtcgcctgcct

SEQ ID NO: 1140289 - DNA, 15 bp, Homo sapiens
aaatggtcgcctgcc

SEQ ID NO: 1140290 - DNA, 15 bp, Homo sapiens
gaaatggtcgcctgc

SEQ ID NO: 1140291 - DNA, 15 bp, Homo sapiens
agaaatggtcgcctg

SEQ ID NO: 1140292 - DNA, 15 bp, Homo sapiens
aagaaatggtcgcct

SEQ ID NO: 1140293 - DNA, 15 bp, Homo sapiens
taagaaatggtcgcc

SEQ ID NO: 1140294 - DNA, 15 bp, Homo sapiens
ataagaaatggtcgc

SEQ ID NO: 1140295 - DNA, 15 bp, Homo sapiens
cataagaaatggtcg

SEQ ID NO: 1140296 - DNA, 15 bp, Homo sapiens
acataagaaatggtc

SEQ ID NO: 1140297 - DNA, 15 bp, Homo sapiens
tacataagaaatggt

SEQ ID NO: 1140298 - DNA, 15 bp, Homo sapiens
atacataagaaatgg

SEQ ID NO: 1140299 - DNA, 15 bp, Homo sapiens
gatacataagaaatg

SEQ ID NO: 1140300 - DNA, 15 bp, Homo sapiens
ggatacataagaaat

SEQ ID NO: 1140301 - DNA, 15 bp, Homo sapiens
tggatacataagaaa

SEQ ID NO: 1140302 - DNA, 15 bp, Homo sapiens
atggatacataagaa

SEQ ID NO: 1140303 - DNA, 15 bp, Homo sapiens
catggatacataaga

SEQ ID NO: 1140304 - DNA, 15 bp, Homo sapiens
acatggatacataag

SEQ ID NO: 1140305 - DNA, 15 bp, Homo sapiens
tacatggatacataa

SEQ ID NO: 1140306 - DNA, 15 bp, Homo sapiens
atacatggatacata

SEQ ID NO: 1140307 - DNA, 15 bp, Homo sapiens
gatacatggatacat

SEQ ID NO: 1140308 - DNA, 15 bp, Homo sapiens
agatacatggataca

SEQ ID NO: 1140309 - DNA, 15 bp, Homo sapiens
aagatacatggatac

SEQ ID NO: 1140310 - DNA, 15 bp, Homo sapiens
aaagatacatggata

SEQ ID NO: 1140311 - DNA, 15 bp, Homo sapiens
caaagatacatggat

SEQ ID NO: 1140312 - DNA, 15 bp, Homo sapiens
acaaagatacatgga

SEQ ID NO: 1140313 - DNA, 15 bp, Homo sapiens
tacaaagatacatgg

SEQ ID NO: 1140314 - DNA, 15 bp, Homo sapiens
ctacaaagatacatg

SEQ ID NO: 1140315 - DNA, 15 bp, Homo sapiens
actacaaagatacat

SEQ ID NO: 1140316 - DNA, 15 bp, Homo sapiens
tactacaaagataca

SEQ ID NO: 1140317 - DNA, 15 bp, Homo sapiens
gtactacaaagatac

SEQ ID NO: 1140318 - DNA, 15 bp, Homo sapiens
ggtactacaaagata

SEQ ID NO: 1140319 - DNA, 15 bp, Homo sapiens
aggtactacaaagat

SEQ ID NO: 1140320 - DNA, 15 bp, Homo sapiens
aaggtactacaaaga

SEQ ID NO: 1140321 - DNA, 15 bp, Homo sapiens
gaaggtactacaaag

SEQ ID NO: 1140322 - DNA, 15 bp, Homo sapiens
cgaaggtactacaaa

SEQ ID NO: 1140323 - DNA, 15 bp, Homo sapiens
tcgaaggtactacaa

SEQ ID NO: 1140324 - DNA, 15 bp, Homo sapiens
gtcgaaggtactaca

SEQ ID NO: 1140325 - DNA, 15 bp, Homo sapiens
tgtcgaaggtactac

SEQ ID NO: 1140326 - DNA, 15 bp, Homo sapiens
ctgtcgaaggtacta

SEQ ID NO: 1140327 - DNA, 15 bp, Homo sapiens
actgtcgaaggtact

SEQ ID NO: 1140328 - DNA, 15 bp, Homo sapiens
aactgtcgaaggtac

SEQ ID NO: 1140329 - DNA, 15 bp, Homo sapiens
taactgtcgaaggta

SEQ ID NO: 1140330 - DNA, 15 bp, Homo sapiens
gtaactgtcgaaggt

SEQ ID NO: 1140331 - DNA, 15 bp, Homo sapiens
agtaactgtcgaagg

SEQ ID NO: 1140332 - DNA, 15 bp, Homo sapiens
aagtaactgtcgaag

SEQ ID NO: 1140333 - DNA, 15 bp, Homo sapiens
aaagtaactgtcgaa

SEQ ID NO: 1140334 - DNA, 15 bp, Homo sapiens
aaaagtaactgtcga

SEQ ID NO: 1140335 - DNA, 15 bp, Homo sapiens
caaaagtaactgtcg

SEQ ID NO: 1140336 - DNA, 15 bp, Homo sapiens
acaaaagtaactgtc

SEQ ID NO: 1140337 - DNA, 15 bp, Homo sapiens
cacaaaagtaactgt

SEQ ID NO: 1140338 - DNA, 15 bp, Homo sapiens
gcacaaaagtaactg

SEQ ID NO: 1140339 - DNA, 15 bp, Homo sapiens
agcacaaaagtaact

SEQ ID NO: 1140340 - DNA, 15 bp, Homo sapiens
aagcacaaaagtaac

SEQ ID NO: 1140341 - DNA, 15 bp, Homo sapiens
caagcacaaaagtaa

SEQ ID NO: 1140342 - DNA, 15 bp, Homo sapiens
gcaagcacaaaagta

SEQ ID NO: 1140343 - DNA, 15 bp, Homo sapiens
agcaagcacaaaagt

SEQ ID NO: 1140344 - DNA, 15 bp, Homo sapiens
tagcaagcacaaaag

SEQ ID NO: 1140345 - DNA, 15 bp, Homo sapiens
atagcaagcacaaaa

SEQ ID NO: 1140346 - DNA, 15 bp, Homo sapiens
catagcaagcacaaa

SEQ ID NO: 1140347 - DNA, 15 bp, Homo sapiens
acatagcaagcacaa

SEQ ID NO: 1140348 - DNA, 15 bp, Homo sapiens
aacatagcaagcaca

SEQ ID NO: 1140349 - DNA, 15 bp, Homo sapiens
aaacatagcaagcac

SEQ ID NO: 1140350 - DNA, 15 bp, Homo sapiens
caaacatagcaagca

SEQ ID NO: 1140351 - DNA, 15 bp, Homo sapiens
acaaacatagcaagc

SEQ ID NO: 1140352 - DNA, 15 bp, Homo sapiens
aacaaacatagcaag

SEQ ID NO: 1140353 - DNA, 15 bp, Homo sapiens
caacaaacatagcaa

SEQ ID NO: 1140354 - DNA, 15 bp, Homo sapiens
tcaacaaacatagca

SEQ ID NO: 1140355 - DNA, 15 bp, Homo sapiens
ttcaacaaacatagc

SEQ ID NO: 1140356 - DNA, 15 bp, Homo sapiens
gttcaacaaacatag

SEQ ID NO: 1140357 - DNA, 15 bp, Homo sapiens
agttcaacaaacata

SEQ ID NO: 1140358 - DNA, 15 bp, Homo sapiens
cagttcaacaaacat

SEQ ID NO: 1140359 - DNA, 15 bp, Homo sapiens
tcagttcaacaaaca

SEQ ID NO: 1140360 - DNA, 15 bp, Homo sapiens
ttcagttcaacaaac

SEQ ID NO: 1140361 - DNA, 15 bp, Homo sapiens
attcagttcaacaaa

SEQ ID NO: 1140362 - DNA, 15 bp, Homo sapiens
tattcagttcaacaa

SEQ ID NO: 1140363 - DNA, 15 bp, Homo sapiens
ttattcagttcaaca

SEQ ID NO: 1140364 - DNA, 15 bp, Homo sapiens
attattcagttcaac

SEQ ID NO: 1140365 - DNA, 15 bp, Homo sapiens
aattattcagttcaa

SEQ ID NO: 1140366 - DNA, 15 bp, Homo sapiens
aaattattcagttca

SEQ ID NO: 1140367 - DNA, 15 bp, Homo sapiens
aaaattattcagttc

SEQ ID NO: 1140368 - DNA, 15 bp, Homo sapiens
caaaattattcagtt

SEQ ID NO: 1140369 - DNA, 15 bp, Homo sapiens
tcaaaattattcagt

SEQ ID NO: 1140370 - DNA, 15 bp, Homo sapiens
gtcaaaattattcag

SEQ ID NO: 1140371 - DNA, 15 bp, Homo sapiens
tgtcaaaattattca

SEQ ID NO: 1140372 - DNA, 15 bp, Homo sapiens
atgtcaaaattattc

SEQ ID NO: 1140373 - DNA, 15 bp, Homo sapiens
aatgtcaaaattatt

SEQ ID NO: 1140374 - DNA, 15 bp, Homo sapiens
aaatgtcaaaattat

SEQ ID NO: 1140375 - DNA, 15 bp, Homo sapiens
aaaatgtcaaaatta

SEQ ID NO: 1140376 - DNA, 15 bp, Homo sapiens
caaaatgtcaaaatt

SEQ ID NO: 1140377 - DNA, 15 bp, Homo sapiens
acaaaatgtcaaaat

SEQ ID NO: 1140378 - DNA, 15 bp, Homo sapiens
cacaaaatgtcaaaa

SEQ ID NO: 1140379 - DNA, 15 bp, Homo sapiens
tcacaaaatgtcaaa

SEQ ID NO: 1140380 - DNA, 15 bp, Homo sapiens
ttcacaaaatgtcaa

SEQ ID NO: 1140381 - DNA, 15 bp, Homo sapiens
gttcacaaaatgtca

SEQ ID NO: 1140382 - DNA, 15 bp, Homo sapiens
tgttcacaaaatgtc

SEQ ID NO: 1140383 - DNA, 15 bp, Homo sapiens
atgttcacaaaatgt

SEQ ID NO: 1140384 - DNA, 15 bp, Homo sapiens
gatgttcacaaaatg

SEQ ID NO: 1140385 - DNA, 15 bp, Homo sapiens
tgatgttcacaaaat

SEQ ID NO: 1140386 - DNA, 15 bp, Homo sapiens
gtgatgttcacaaaa

SEQ ID NO: 1140387 - DNA, 15 bp, Homo sapiens
agtgatgttcacaaa

SEQ ID NO: 1140388 - DNA, 15 bp, Homo sapiens
gagtgatgttcacaa

SEQ ID NO: 1140389 - DNA, 15 bp, Homo sapiens
agagtgatgttcaca

SEQ ID NO: 1140390 - DNA, 15 bp, Homo sapiens
aagagtgatgttcac

SEQ ID NO: 1140391 - DNA, 15 bp, Homo sapiens
taagagtgatgttca

SEQ ID NO: 1140392 - DNA, 15 bp, Homo sapiens
ataagagtgatgttc

SEQ ID NO: 1140393 - DNA, 15 bp, Homo sapiens
tataagagtgatgtt

SEQ ID NO: 1140394 - DNA, 15 bp, Homo sapiens
atataagagtgatgt

SEQ ID NO: 1140395 - DNA, 15 bp, Homo sapiens
aatataagagtgatg

SEQ ID NO: 1140396 - DNA, 15 bp, Homo sapiens
aaatataagagtgat

SEQ ID NO: 1140397 - DNA, 15 bp, Homo sapiens
caaatataagagtga

SEQ ID NO: 1140398 - DNA, 15 bp, Homo sapiens
tcaaatataagagtg

SEQ ID NO: 1140399 - DNA, 15 bp, Homo sapiens
ttcaaatataagagt

SEQ ID NO: 1140400 - DNA, 15 bp, Homo sapiens
tttcaaatataagag

SEQ ID NO: 1140401 - DNA, 15 bp, Homo sapiens
ttttcaaatataaga

SEQ ID NO: 1140402 - DNA, 15 bp, Homo sapiens
attttcaaatataag

SEQ ID NO: 1140403 - DNA, 15 bp, Homo sapiens
tattttcaaatataa

SEQ ID NO: 1140404 - DNA, 15 bp, Homo sapiens
atattttcaaatata

SEQ ID NO: 1140405 - DNA, 15 bp, Homo sapiens
tatattttcaaatat

SEQ ID NO: 1140406 - DNA, 15 bp, Homo sapiens
ttatattttcaaata

SEQ ID NO: 1140407 - DNA, 15 bp, Homo sapiens
attatattttcaaat

SEQ ID NO: 1140408 - DNA, 15 bp, Homo sapiens
tattatattttcaaa

SEQ ID NO: 1140409 - DNA, 15 bp, Homo sapiens
ctattatattttcaa

SEQ ID NO: 1140410 - DNA, 15 bp, Homo sapiens
actattatattttca

SEQ ID NO: 1140411 - DNA, 15 bp, Homo sapiens
aactattatattttc

SEQ ID NO: 1140412 - DNA, 15 bp, Homo sapiens
caactattatatttt

SEQ ID NO: 1140413 - DNA, 15 bp, Homo sapiens
tcaactattatattt

SEQ ID NO: 1140414 - DNA, 15 bp, Homo sapiens
ttcaactattatatt

SEQ ID NO: 1140415 - DNA, 15 bp, Homo sapiens
attcaactattatat

SEQ ID NO: 1140416 - DNA, 15 bp, Homo sapiens
tattcaactattata

SEQ ID NO: 1140417 - DNA, 15 bp, Homo sapiens
atattcaactattat

SEQ ID NO: 1140418 - DNA, 15 bp, Homo sapiens
aatattcaactatta

SEQ ID NO: 1140419 - DNA, 15 bp, Homo sapiens
caatattcaactatt

SEQ ID NO: 1140420 - DNA, 15 bp, Homo sapiens
acaatattcaactat

SEQ ID NO: 1140421 - DNA, 15 bp, Homo sapiens
tacaatattcaacta

SEQ ID NO: 1140422 - DNA, 15 bp, Homo sapiens
ttacaatattcaact

SEQ ID NO: 1140423 - DNA, 15 bp, Homo sapiens
gttacaatattcaac

SEQ ID NO: 1140424 - DNA, 15 bp, Homo sapiens
agttacaatattcaa

SEQ ID NO: 1140425 - DNA, 15 bp, Homo sapiens
tagttacaatattca

SEQ ID NO: 1140426 - DNA, 15 bp, Homo sapiens
ttagttacaatattc

SEQ ID NO: 1140427 - DNA, 15 bp, Homo sapiens
tttagttacaatatt

SEQ ID NO: 1140428 - DNA, 15 bp, Homo sapiens
gtttagttacaatat

SEQ ID NO: 1140429 - DNA, 15 bp, Homo sapiens
tgtttagttacaata

SEQ ID NO: 1140430 - DNA, 15 bp, Homo sapiens
atgtttagttacaat

SEQ ID NO: 1140431 - DNA, 15 bp, Homo sapiens
tatgtttagttacaa

SEQ ID NO: 1140432 - DNA, 15 bp, Homo sapiens
atatgtttagttaca

SEQ ID NO: 1140433 - DNA, 15 bp, Homo sapiens
aatatgtttagttac

SEQ ID NO: 1140434 - DNA, 15 bp, Homo sapiens
aaatatgtttagtta

SEQ ID NO: 1140435 - DNA, 15 bp, Homo sapiens
taaatatgtttagtt

SEQ ID NO: 1140436 - DNA, 15 bp, Homo sapiens
ataaatatgtttagt

SEQ ID NO: 1140437 - DNA, 15 bp, Homo sapiens
cataaatatgtttag

SEQ ID NO: 1140438 - DNA, 15 bp, Homo sapiens
acataaatatgttta

SEQ ID NO: 1140439 - DNA, 15 bp, Homo sapiens
aacataaatatgttt

SEQ ID NO: 1140440 - DNA, 15 bp, Homo sapiens
gaacataaatatgtt

SEQ ID NO: 1140441 - DNA, 15 bp, Homo sapiens
tgaacataaatatgt

SEQ ID NO: 1140442 - DNA, 15 bp, Homo sapiens
ttgaacataaatatg

SEQ ID NO: 1140443 - DNA, 15 bp, Homo sapiens
attgaacataaatat

SEQ ID NO: 1140444 - DNA, 15 bp, Homo sapiens
aattgaacataaata

SEQ ID NO: 1140445 - DNA, 15 bp, Homo sapiens
caattgaacataaat

SEQ ID NO: 1140446 - DNA, 15 bp, Homo sapiens
tcaattgaacataaa

SEQ ID NO: 1140447 - DNA, 15 bp, Homo sapiens
atcaattgaacataa

SEQ ID NO: 1140448 - DNA, 15 bp, Homo sapiens
aatcaattgaacata

SEQ ID NO: 1140449 - DNA, 15 bp, Homo sapiens
caatcaattgaacat

SEQ ID NO: 1140450 - DNA, 15 bp, Homo sapiens
acaatcaattgaaca

SEQ ID NO: 1140451 - DNA, 15 bp, Homo sapiens
tacaatcaattgaac

SEQ ID NO: 1140452 - DNA, 15 bp, Homo sapiens
ttacaatcaattgaa

SEQ ID NO: 1140453 - DNA, 15 bp, Homo sapiens
tttacaatcaattga

SEQ ID NO: 1140454 - DNA, 15 bp, Homo sapiens
ttttacaatcaattg

SEQ ID NO: 1140455 - DNA, 15 bp, Homo sapiens
gttttacaatcaatt

SEQ ID NO: 1140456 - DNA, 15 bp, Homo sapiens
tgttttacaatcaat

SEQ ID NO: 1140457 - DNA, 15 bp, Homo sapiens
atgttttacaatcaa

SEQ ID NO: 1140458 - DNA, 15 bp, Homo sapiens
aatgttttacaatca

SEQ ID NO: 1140459 - DNA, 15 bp, Homo sapiens
aaatgttttacaatc

SEQ ID NO: 1140460 - DNA, 15 bp, Homo sapiens
aaaatgttttacaat

SEQ ID NO: 1140461 - DNA, 15 bp, Homo sapiens
caaaatgttttacaa

SEQ ID NO: 1140462 - DNA, 15 bp, Homo sapiens
acaaaatgttttaca

SEQ ID NO: 1140463 - DNA, 15 bp, Homo sapiens
tacaaaatgttttac

SEQ ID NO: 1140464 - DNA, 15 bp, Homo sapiens
ttacaaaatgtttta

SEQ ID NO: 1140465 - DNA, 15 bp, Homo sapiens
gttacaaaatgtttt

SEQ ID NO: 1140466 - DNA, 15 bp, Homo sapiens
tgttacaaaatgttt

SEQ ID NO: 1140467 - DNA, 15 bp, Homo sapiens
ctgttacaaaatgtt

SEQ ID NO: 1140468 - DNA, 15 bp, Homo sapiens
actgttacaaaatgt

SEQ ID NO: 1140469 - DNA, 15 bp, Homo sapiens
aactgttacaaaatg

SEQ ID NO: 1140470 - DNA, 15 bp, Homo sapiens
aaactgttacaaaat

SEQ ID NO: 1140471 - DNA, 15 bp, Homo sapiens
aaaactgttacaaaa

SEQ ID NO: 1140472 - DNA, 15 bp, Homo sapiens
taaaactgttacaaa

SEQ ID NO: 1140473 - DNA, 15 bp, Homo sapiens
ttaaaactgttacaa

SEQ ID NO: 1140474 - DNA, 15 bp, Homo sapiens
tttaaaactgttaca

SEQ ID NO: 1140475 - DNA, 15 bp, Homo sapiens
atttaaaactgttac

SEQ ID NO: 1140476 - DNA, 15 bp, Homo sapiens
aatttaaaactgtta

SEQ ID NO: 1140477 - DNA, 15 bp, Homo sapiens
caatttaaaactgtt

SEQ ID NO: 1140478 - DNA, 15 bp, Homo sapiens
tcaatttaaaactgt

SEQ ID NO: 1140479 - DNA, 15 bp, Homo sapiens
ttcaatttaaaactg

SEQ ID NO: 1140480 - DNA, 15 bp, Homo sapiens
cttcaatttaaaact

SEQ ID NO: 1140481 - DNA, 15 bp, Homo sapiens
gcttcaatttaaaac

SEQ ID NO: 1140482 - DNA, 15 bp, Homo sapiens
tgcttcaatttaaaa

SEQ ID NO: 1140483 - DNA, 15 bp, Homo sapiens
ttgcttcaatttaaa

SEQ ID NO: 1140484 - DNA, 15 bp, Homo sapiens
attgcttcaatttaa

SEQ ID NO: 1140485 - DNA, 15 bp, Homo sapiens
aattgcttcaattta

SEQ ID NO: 1140486 - DNA, 15 bp, Homo sapiens
gaattgcttcaattt

SEQ ID NO: 1140487 - DNA, 15 bp, Homo sapiens
agaattgcttcaatt

SEQ ID NO: 1140488 - DNA, 15 bp, Homo sapiens
tagaattgcttcaat

SEQ ID NO: 1140489 - DNA, 15 bp, Homo sapiens
atagaattgcttcaa

SEQ ID NO: 1140490 - DNA, 15 bp, Homo sapiens
aatagaattgcttca

SEQ ID NO: 1140491 - DNA, 15 bp, Homo sapiens
aaatagaattgcttc

SEQ ID NO: 1140492 - DNA, 15 bp, Homo sapiens
aaaatagaattgctt

SEQ ID NO: 1140493 - DNA, 15 bp, Homo sapiens
aaaaatagaattgct

SEQ ID NO: 1140494 - DNA, 15 bp, Homo sapiens
aaaaaatagaattgc

SEQ ID NO: 1140495 - DNA, 15 bp, Homo sapiens
taaaaaatagaattg

SEQ ID NO: 1140496 - DNA, 15 bp, Homo sapiens
gtaaaaaatagaatt

SEQ ID NO: 1140497 - DNA, 15 bp, Homo sapiens
tgtaaaaaatagaat

SEQ ID NO: 1140498 - DNA, 15 bp, Homo sapiens
ctgtaaaaaatagaa

SEQ ID NO: 1140499 - DNA, 15 bp, Homo sapiens
gctgtaaaaaataga

SEQ ID NO: 1140500 - DNA, 15 bp, Homo sapiens
tgctgtaaaaaatag

SEQ ID NO: 1140501 - DNA, 15 bp, Homo sapiens
ttgctgtaaaaaata

SEQ ID NO: 1140502 - DNA, 15 bp, Homo sapiens
tttgctgtaaaaaat

SEQ ID NO: 1140503 - DNA, 15 bp, Homo sapiens
gtttgctgtaaaaaa

SEQ ID NO: 1140504 - DNA, 15 bp, Homo sapiens
tgtttgctgtaaaaa

SEQ ID NO: 1140505 - DNA, 15 bp, Homo sapiens
ttgtttgctgtaaaa

SEQ ID NO: 1140506 - DNA, 15 bp, Homo sapiens
tttgtttgctgtaaa

SEQ ID NO: 1140507 - DNA, 15 bp, Homo sapiens
ttttgtttgctgtaa

SEQ ID NO: 1140508 - DNA, 15 bp, Homo sapiens
tttttgtttgctgta

SEQ ID NO: 1140509 - DNA, 15 bp, Homo sapiens
ttttttgtttgctgt

SEQ ID NO: 1140510 - DNA, 15 bp, Homo sapiens
cttttttgtttgctg

SEQ ID NO: 1140511 - DNA, 15 bp, Homo sapiens
ccttttttgtttgct

SEQ ID NO: 1140512 - DNA, 15 bp, Homo sapiens
tccttttttgtttgc

SEQ ID NO: 1140513 - DNA, 15 bp, Homo sapiens
ttccttttttgtttg

SEQ ID NO: 1140514 - DNA, 15 bp, Homo sapiens
tttccttttttgttt

SEQ ID NO: 1140515 - DNA, 15 bp, Homo sapiens
ttttccttttttgtt

SEQ ID NO: 1140516 - DNA, 15 bp, Homo sapiens
tttttccttttttgt

SEQ ID NO: 1140517 - DNA, 15 bp, Homo sapiens
ttttttccttttttg

SEQ ID NO: 1140518 - DNA, 15 bp, Homo sapiens
gtttttttccttttt

SEQ ID NO: 1140519 - DNA, 15 bp, Homo sapiens
cgtttttttcctttt

SEQ ID NO: 1140520 - DNA, 15 bp, Homo sapiens
tcgtttttttccttt

SEQ ID NO: 1140521 - DNA, 15 bp, Homo sapiens
ttcgtttttttcctt

SEQ ID NO: 1140522 - DNA, 15 bp, Homo sapiens
cttcgtttttttcct

SEQ ID NO: 1140523 - DNA, 15 bp, Homo sapiens
tcttcgtttttttcc

SEQ ID NO: 1140524 - DNA, 15 bp, Homo sapiens
gtcttcgtttttttc

SEQ ID NO: 1140525 - DNA, 15 bp, Homo sapiens
tgtcttcgttttttt

SEQ ID NO: 1140526 - DNA, 15 bp, Homo sapiens
ctgtcttcgtttttt

SEQ ID NO: 1140527 - DNA, 15 bp, Homo sapiens
actgtcttcgttttt

SEQ ID NO: 1140528 - DNA, 15 bp, Homo sapiens
cactgtcttcgtttt

SEQ ID NO: 1140529 - DNA, 15 bp, Homo sapiens
tcactgtcttcgttt

SEQ ID NO: 1140530 - DNA, 15 bp, Homo sapiens
ttcactgtcttcgtt

SEQ ID NO: 1140531 - DNA, 15 bp, Homo sapiens
tttcactgtcttcgt

SEQ ID NO: 1140532 - DNA, 15 bp, Homo sapiens
ttttcactgtcttcg

SEQ ID NO: 1140533 - DNA, 15 bp, Homo sapiens
attttcactgtcttc

SEQ ID NO: 1140534 - DNA, 15 bp, Homo sapiens
cattttcactgtctt

SEQ ID NO: 1140535 - DNA, 15 bp, Homo sapiens
tcattttcactgtct

SEQ ID NO: 1140536 - DNA, 15 bp, Homo sapiens
atcattttcactgtc

SEQ ID NO: 1140537 - DNA, 15 bp, Homo sapiens
aatcattttcactgt

SEQ ID NO: 1140538 - DNA, 15 bp, Homo sapiens
caatcattttcactg

SEQ ID NO: 1140539 - DNA, 15 bp, Homo sapiens
ccaatcattttcact

SEQ ID NO: 1140540 - DNA, 15 bp, Homo sapiens
tccaatcattttcac

SEQ ID NO: 1140541 - DNA, 15 bp, Homo sapiens
ctccaatcattttca

SEQ ID NO: 1140542 - DNA, 15 bp, Homo sapiens
actccaatcattttc

SEQ ID NO: 1140543 - DNA, 15 bp, Homo sapiens
tactccaatcatttt

SEQ ID NO: 1140544 - DNA, 15 bp, Homo sapiens
atactccaatcattt

SEQ ID NO: 1140545 - DNA, 15 bp, Homo sapiens
aatactccaatcatt

SEQ ID NO: 1140546 - DNA, 15 bp, Homo sapiens
taatactccaatcat

SEQ ID NO: 1140547 - DNA, 15 bp, Homo sapiens
ttaatactccaatca

SEQ ID NO: 1140548 - DNA, 15 bp, Homo sapiens
gttaatactccaatc

SEQ ID NO: 1140549 - DNA, 15 bp, Homo sapiens
tgttaatactccaat

SEQ ID NO: 1140550 - DNA, 15 bp, Homo sapiens
atgttaatactccaa

SEQ ID NO: 1140551 - DNA, 15 bp, Homo sapiens
aatgttaatactcca

SEQ ID NO: 1140552 - DNA, 15 bp, Homo sapiens
caatgttaatactcc

SEQ ID NO: 1140553 - DNA, 15 bp, Homo sapiens
ccaatgttaatactc

SEQ ID NO: 1140554 - DNA, 15 bp, Homo sapiens
accaatgttaatact

SEQ ID NO: 1140555 - DNA, 15 bp, Homo sapiens
taccaatgttaatac

SEQ ID NO: 1140556 - DNA, 15 bp, Homo sapiens
ttaccaatgttaata

SEQ ID NO: 1140557 - DNA, 15 bp, Homo sapiens
cttaccaatgttaat

SEQ ID NO: 1140558 - DNA, 15 bp, Homo sapiens
gcttaccaatgttaa

SEQ ID NO: 1140559 - DNA, 15 bp, Homo sapiens
agcttaccaatgtta

SEQ ID NO: 1140560 - DNA, 15 bp, Homo sapiens
cagcttaccaatgtt

SEQ ID NO: 1140561 - DNA, 15 bp, Homo sapiens
acagcttaccaatgt

SEQ ID NO: 1140562 - DNA, 15 bp, Homo sapiens
cacagcttaccaatg

SEQ ID NO: 1140563 - DNA, 15 bp, Homo sapiens
tcacagcttaccaat

SEQ ID NO: 1140564 - DNA, 15 bp, Homo sapiens
ttcacagcttaccaa

SEQ ID NO: 1140565 - DNA, 15 bp, Homo sapiens
tttcacagcttacca

SEQ ID NO: 1140566 - DNA, 15 bp, Homo sapiens
atttcacagcttacc

SEQ ID NO: 1140567 - DNA, 15 bp, Homo sapiens
catttcacagcttac

SEQ ID NO: 1140568 - DNA, 15 bp, Homo sapiens
acatttcacagctta

SEQ ID NO: 1140569 - DNA, 15 bp, Homo sapiens
aacatttcacagctt

SEQ ID NO: 1140570 - DNA, 15 bp, Homo sapiens
taacatttcacagct

SEQ ID NO: 1140571 - DNA, 15 bp, Homo sapiens
ttaacatttcacagc

SEQ ID NO: 1140572 - DNA, 15 bp, Homo sapiens
tttaacatttcacag

SEQ ID NO: 1140573 - DNA, 15 bp, Homo sapiens
atttaacatttcaca

SEQ ID NO: 1140574 - DNA, 15 bp, Homo sapiens
catttaacatttcac

SEQ ID NO: 1140575 - DNA, 15 bp, Homo sapiens
acatttaacatttca

SEQ ID NO: 1140576 - DNA, 15 bp, Homo sapiens
cacatttaacatttc

SEQ ID NO: 1140577 - DNA, 15 bp, Homo sapiens
tcacatttaacattt

SEQ ID NO: 1140578 - DNA, 15 bp, Homo sapiens
ttcacatttaacatt

SEQ ID NO: 1140579 - DNA, 15 bp, Homo sapiens
attcacatttaacat

SEQ ID NO: 1140580 - DNA, 15 bp, Homo sapiens
tattcacatttaaca

SEQ ID NO: 1140581 - DNA, 15 bp, Homo sapiens
ttattcacatttaac

SEQ ID NO: 1140582 - DNA, 15 bp, Homo sapiens
attattcacatttaa

SEQ ID NO: 1140583 - DNA, 15 bp, Homo sapiens
gattattcacattta

SEQ ID NO: 1140584 - DNA, 15 bp, Homo sapiens
ggattattcacattt

SEQ ID NO: 1140585 - DNA, 15 bp, Homo sapiens
aggattattcacatt

SEQ ID NO: 1140586 - DNA, 15 bp, Homo sapiens
taggattattcacat

SEQ ID NO: 1140587 - DNA, 15 bp, Homo sapiens
gtaggattattcaca

SEQ ID NO: 1140588 - DNA, 15 bp, Homo sapiens
ggtaggattattcac

SEQ ID NO: 1140589 - DNA, 15 bp, Homo sapiens
aggtaggattattca

SEQ ID NO: 1140590 - DNA, 15 bp, Homo sapiens
aaggtaggattattc

SEQ ID NO: 1140591 - DNA, 15 bp, Homo sapiens
aaaggtaggattatt

SEQ ID NO: 1140592 - DNA, 15 bp, Homo sapiens
aaaaggtaggattat

SEQ ID NO: 1140593 - DNA, 15 bp, Homo sapiens
taaaaggtaggatta

SEQ ID NO: 1140594 - DNA, 15 bp, Homo sapiens
ataaaaggtaggatt

SEQ ID NO: 1140595 - DNA, 15 bp, Homo sapiens
aataaaaggtaggat

SEQ ID NO: 1140596 - DNA, 15 bp, Homo sapiens
gaataaaaggtagga

SEQ ID NO: 1140597 - DNA, 15 bp, Homo sapiens
tgaataaaaggtagg

SEQ ID NO: 1140598 - DNA, 15 bp, Homo sapiens
ttgaataaaaggtag

SEQ ID NO: 1140599 - DNA, 15 bp, Homo sapiens
tttgaataaaaggta

SEQ ID NO: 1140600 - DNA, 15 bp, Homo sapiens
atttgaataaaaggt

SEQ ID NO: 1140601 - DNA, 15 bp, Homo sapiens
aatttgaataaaagg

SEQ ID NO: 1140602 - DNA, 15 bp, Homo sapiens
aaatttgaataaaag

SEQ ID NO: 1140603 - DNA, 15 bp, Homo sapiens
caaatttgaataaaa

SEQ ID NO: 1140604 - DNA, 15 bp, Homo sapiens
tcaaatttgaataaa

SEQ ID NO: 1140605 - DNA, 15 bp, Homo sapiens
ctcaaatttgaataa

SEQ ID NO: 1140606 - DNA, 15 bp, Homo sapiens
cctcaaatttgaata

SEQ ID NO: 1140607 - DNA, 15 bp, Homo sapiens
acctcaaatttgaat

SEQ ID NO: 1140608 - DNA, 15 bp, Homo sapiens
tacctcaaatttgaa

SEQ ID NO: 1140609 - DNA, 15 bp, Homo sapiens
atacctcaaatttga

SEQ ID NO: 1140610 - DNA, 15 bp, Homo sapiens
aatacctcaaatttg

SEQ ID NO: 1140611 - DNA, 15 bp, Homo sapiens
caatacctcaaattt

SEQ ID NO: 1140612 - DNA, 15 bp, Homo sapiens
tcaatacctcaaatt

SEQ ID NO: 1140613 - DNA, 15 bp, Homo sapiens
ttcaatacctcaaat

SEQ ID NO: 1140614 - DNA, 15 bp, Homo sapiens
attcaatacctcaaa

SEQ ID NO: 1140615 - DNA, 15 bp, Homo sapiens
gattcaatacctcaa

SEQ ID NO: 1140616 - DNA, 15 bp, Homo sapiens
tgattcaatacctca

SEQ ID NO: 1140617 - DNA, 15 bp, Homo sapiens
ttgattcaatacctc

SEQ ID NO: 1140618 - DNA, 15 bp, Homo sapiens
attgattcaatacct

SEQ ID NO: 1140619 - DNA, 15 bp, Homo sapiens
aattgattcaatacc

SEQ ID NO: 1140620 - DNA, 15 bp, Homo sapiens
taattgattcaatac

SEQ ID NO: 1140621 - DNA, 15 bp, Homo sapiens
gtaattgattcaata

SEQ ID NO: 1140622 - DNA, 15 bp, Homo sapiens
ggtaattgattcaat

SEQ ID NO: 1140623 - DNA, 15 bp, Homo sapiens
aggtaattgattcaa

SEQ ID NO: 1140624 - DNA, 15 bp, Homo sapiens
aaggtaattgattca

SEQ ID NO: 1140625 - DNA, 15 bp, Homo sapiens
aaaggtaattgattc

SEQ ID NO: 1140626 - DNA, 15 bp, Homo sapiens
taaaggtaattgatt

SEQ ID NO: 1140627 - DNA, 15 bp, Homo sapiens
ttaaaggtaattgat

SEQ ID NO: 1140628 - DNA, 15 bp, Homo sapiens
tttaaaggtaattga

SEQ ID NO: 1140629 - DNA, 15 bp, Homo sapiens
ctttaaaggtaattg

SEQ ID NO: 1140630 - DNA, 15 bp, Homo sapiens
gctttaaaggtaatt

SEQ ID NO: 1140631 - DNA, 15 bp, Homo sapiens
tgctttaaaggtaat

SEQ ID NO: 1140632 - DNA, 15 bp, Homo sapiens
ttgctttaaaggtaa

SEQ ID NO: 1140633 - DNA, 15 bp, Homo sapiens
tttgctttaaaggta

SEQ ID NO: 1140634 - DNA, 15 bp, Homo sapiens
atttgctttaaaggt

SEQ ID NO: 1140635 - DNA, 15 bp, Homo sapiens
tatttgctttaaagg

SEQ ID NO: 1140636 - DNA, 15 bp, Homo sapiens
gtatttgctttaaag

SEQ ID NO: 1140637 - DNA, 15 bp, Homo sapiens
agtatttgctttaaa

SEQ ID NO: 1140638 - DNA, 15 bp, Homo sapiens
aagtatttgctttaa

SEQ ID NO: 1140639 - DNA, 15 bp, Homo sapiens
aggacacaaacaaat

SEQ ID NO: 1140640 - DNA, 15 bp, Homo sapiens
gaggacacaaacaaa

SEQ ID NO: 1140641 - DNA, 15 bp, Homo sapiens
agaggacacaaacaa

SEQ ID NO: 1140642 - DNA, 15 bp, Homo sapiens
aagaggacacaaaca

SEQ ID NO: 1140643 - DNA, 15 bp, Homo sapiens
aaagaggacacaaac

SEQ ID NO: 1140644 - DNA, 15 bp, Homo sapiens
aaaagaggacacaaa

SEQ ID NO: 1140645 - DNA, 15 bp, Homo sapiens
taaaagaggacacaa

SEQ ID NO: 1140646 - DNA, 15 bp, Homo sapiens
ataaaagaggacaca

SEQ ID NO: 1140647 - DNA, 15 bp, Homo sapiens
aataaaagaggacac

SEQ ID NO: 1140648 - DNA, 15 bp, Homo sapiens
aaataaaagaggaca

SEQ ID NO: 1140649 - DNA, 15 bp, Homo sapiens
gaaataaaagaggac

SEQ ID NO: 1140650 - DNA, 15 bp, Homo sapiens
cgaaataaaagagga

SEQ ID NO: 1140651 - DNA, 15 bp, Homo sapiens
acgaaataaaagagg

SEQ ID NO: 1140652 - DNA, 15 bp, Homo sapiens
aacgaaataaaagag

SEQ ID NO: 1140653 - DNA, 15 bp, Homo sapiens
caacgaaataaaaga

SEQ ID NO: 1140654 - DNA, 15 bp, Homo sapiens
tcaacgaaataaaag

SEQ ID NO: 1140655 - DNA, 15 bp, Homo sapiens
ctcaacgaaataaaa

SEQ ID NO: 1140656 - DNA, 15 bp, Homo sapiens
gctcaacgaaataaa

SEQ ID NO: 1140657 - DNA, 15 bp, Homo sapiens
tgctcaacgaaataa

SEQ ID NO: 1140658 - DNA, 15 bp, Homo sapiens
ctgctcaacgaaata

SEQ ID NO: 1140659 - DNA, 15 bp, Homo sapiens
actgctcaacgaaat

SEQ ID NO: 1140660 - DNA, 15 bp, Homo sapiens
cactgctcaacgaaa

SEQ ID NO: 1140661 - DNA, 15 bp, Homo sapiens
ccactgctcaacgaa

SEQ ID NO: 1140662 - DNA, 15 bp, Homo sapiens
accactgctcaacga

SEQ ID NO: 1140663 - DNA, 15 bp, Homo sapiens
aaccactgctcaacg

SEQ ID NO: 1140664 - DNA, 15 bp, Homo sapiens
aaaccactgctcaac

SEQ ID NO: 1140665 - DNA, 15 bp, Homo sapiens
acttacaagggatgt

SEQ ID NO: 1140666 - DNA, 15 bp, Homo sapiens
aacttacaagggatg

SEQ ID NO: 1140667 - DNA, 15 bp, Homo sapiens
caacttacaagggat

SEQ ID NO: 1140668 - DNA, 15 bp, Homo sapiens
ccaacttacaaggga

SEQ ID NO: 1140669 - DNA, 15 bp, Homo sapiens
tccaacttacaaggg

SEQ ID NO: 1140670 - DNA, 15 bp, Homo sapiens
atccaacttacaagg

SEQ ID NO: 1140671 - DNA, 15 bp, Homo sapiens
aatccaacttacaag

SEQ ID NO: 1140672 - DNA, 15 bp, Homo sapiens
gaatccaacttacaa

SEQ ID NO: 1140673 - DNA, 15 bp, Homo sapiens
ggaatccaacttaca

SEQ ID NO: 1140674 - DNA, 15 bp, Homo sapiens
aggaatccaacttac

SEQ ID NO: 1140675 - DNA, 15 bp, Homo sapiens
taggaatccaactta

SEQ ID NO: 1140676 - DNA, 15 bp, Homo sapiens
ctaggaatccaactt

SEQ ID NO: 1140677 - DNA, 15 bp, Homo sapiens
cctaggaatccaact

SEQ ID NO: 1140678 - DNA, 15 bp, Homo sapiens
acctaggaatccaac

SEQ ID NO: 1140679 - DNA, 15 bp, Homo sapiens
tacctaggaatccaa

SEQ ID NO: 1140680 - DNA, 15 bp, Homo sapiens
cccattcacaattgc

SEQ ID NO: 1140681 - DNA, 15 bp, Homo sapiens
gacagagagccaaat

SEQ ID NO: 1140682 - DNA, 15 bp, Homo sapiens
agacagagagccaaa

SEQ ID NO: 1140683 - DNA, 15 bp, Homo sapiens
cagacagagagccaa

SEQ ID NO: 1140684 - DNA, 15 bp, Homo sapiens
acagacagagagcca

SEQ ID NO: 1140685 - DNA, 15 bp, Homo sapiens
aacagacagagagcc

SEQ ID NO: 1140686 - DNA, 15 bp, Homo sapiens
taacagacagagagc

SEQ ID NO: 1140687 - DNA, 15 bp, Homo sapiens
ataacagacagagag

SEQ ID NO: 1140688 - DNA, 15 bp, Homo sapiens
aataacagacagaga

SEQ ID NO: 1140689 - DNA, 15 bp, Homo sapiens
caataacagacagag

SEQ ID NO: 1140690 - DNA, 15 bp, Homo sapiens
tcaataacagacaga

SEQ ID NO: 1140691 - DNA, 15 bp, Homo sapiens
atcaataacagacag

SEQ ID NO: 1140692 - DNA, 15 bp, Homo sapiens
catcaataacagaca

SEQ ID NO: 1140693 - DNA, 15 bp, Homo sapiens
acatcaataacagac

SEQ ID NO: 1140694 - DNA, 15 bp, Homo sapiens
tacatcaataacaga

SEQ ID NO: 1140695 - DNA, 15 bp, Homo sapiens
atacatcaataacag

SEQ ID NO: 1140696 - DNA, 15 bp, Homo sapiens
tatacatcaataaca

SEQ ID NO: 1140697 - DNA, 15 bp, Homo sapiens
ttatacatcaataac

SEQ ID NO: 1140698 - DNA, 15 bp, Homo sapiens
cttatacatcaataa

SEQ ID NO: 1140699 - DNA, 15 bp, Homo sapiens
tcttatacatcaata

SEQ ID NO: 1140700 - DNA, 15 bp, Homo sapiens
ttcttatacatcaat

SEQ ID NO: 1140701 - DNA, 15 bp, Homo sapiens
attcttatacatcaa

SEQ ID NO: 1140702 - DNA, 15 bp, Homo sapiens
cattcttatacatca

SEQ ID NO: 1140703 - DNA, 15 bp, Homo sapiens
gcattcttatacatc

SEQ ID NO: 1140704 - DNA, 15 bp, Homo sapiens
agcattcttatacat

SEQ ID NO: 1140705 - DNA, 15 bp, Homo sapiens
aagcattcttataca

SEQ ID NO: 1140706 - DNA, 15 bp, Homo sapiens
caagcattcttatac

SEQ ID NO: 1140707 - DNA, 15 bp, Homo sapiens
acaagcattcttata

SEQ ID NO: 1140708 - DNA, 15 bp, Homo sapiens
cacaagcattcttat

SEQ ID NO: 1140709 - DNA, 15 bp, Homo sapiens
tcacaagcattctta

SEQ ID NO: 1140710 - DNA, 15 bp, Homo sapiens
atcacaagcattctt

SEQ ID NO: 1140711 - DNA, 15 bp, Homo sapiens
aatcacaagcattct

SEQ ID NO: 1140712 - DNA, 15 bp, Homo sapiens
aaatcacaagcattc

SEQ ID NO: 1140713 - DNA, 15 bp, Homo sapiens
aaaatcacaagcatt

SEQ ID NO: 1140714 - DNA, 15 bp, Homo sapiens
aaaaatcacaagcat

SEQ ID NO: 1140715 - DNA, 15 bp, Homo sapiens
caaaaatcacaagca

SEQ ID NO: 1140716 - DNA, 15 bp, Homo sapiens
gcaaaaatcacaagc

SEQ ID NO: 1140717 - DNA, 15 bp, Homo sapiens
tgcaaaaatcacaag

SEQ ID NO: 1140718 - DNA, 15 bp, Homo sapiens
gtgcaaaaatcacaa

SEQ ID NO: 1140719 - DNA, 15 bp, Homo sapiens
tgtgcaaaaatcaca

SEQ ID NO: 1140720 - DNA, 15 bp, Homo sapiens
atgtgcaaaaatcac

SEQ ID NO: 1140721 - DNA, 15 bp, Homo sapiens
aatgtgcaaaaatca

SEQ ID NO: 1140722 - DNA, 15 bp, Homo sapiens
caatgtgcaaaaatc

SEQ ID NO: 1140723 - DNA, 15 bp, Homo sapiens
tcaatgtgcaaaaat

SEQ ID NO: 1140724 - DNA, 15 bp, Homo sapiens
atcaatgtgcaaaaa

SEQ ID NO: 1140725 - DNA, 15 bp, Homo sapiens
aatcaatgtgcaaaa

SEQ ID NO: 1140726 - DNA, 15 bp, Homo sapiens
aaatcaatgtgcaaa

SEQ ID NO: 1140727 - DNA, 15 bp, Homo sapiens
aaaatcaatgtgcaa

SEQ ID NO: 1140728 - DNA, 15 bp, Homo sapiens
caaaatcaatgtgca

SEQ ID NO: 1140729 - DNA, 15 bp, Homo sapiens
acaaaatcaatgtgc

SEQ ID NO: 1140730 - DNA, 15 bp, Homo sapiens
tacaaaatcaatgtg

SEQ ID NO: 1140731 - DNA, 15 bp, Homo sapiens
atacaaaatcaatgt

SEQ ID NO: 1140732 - DNA, 15 bp, Homo sapiens
gatacaaaatcaatg

SEQ ID NO: 1140733 - DNA, 15 bp, Homo sapiens
ggatacaaaatcaat

SEQ ID NO: 1140734 - DNA, 15 bp, Homo sapiens
aggatacaaaatcaa

SEQ ID NO: 1140735 - DNA, 15 bp, Homo sapiens
caggatacaaaatca

SEQ ID NO: 1140736 - DNA, 15 bp, Homo sapiens
tcaggatacaaaatc

SEQ ID NO: 1140737 - DNA, 15 bp, Homo sapiens
ctcaggatacaaaat

SEQ ID NO: 1140738 - DNA, 15 bp, Homo sapiens
tctcaggatacaaaa

SEQ ID NO: 1140739 - DNA, 15 bp, Homo sapiens
gtctcaggatacaaa

SEQ ID NO: 1140740 - DNA, 15 bp, Homo sapiens
agtctcaggatacaa

SEQ ID NO: 1140741 - DNA, 15 bp, Homo sapiens
aagtctcaggataca

SEQ ID NO: 1140742 - DNA, 15 bp, Homo sapiens
aaagtctcaggatac

SEQ ID NO: 1140743 - DNA, 15 bp, Homo sapiens
caaagtctcaggata

SEQ ID NO: 1140744 - DNA, 15 bp, Homo sapiens
gcaaagtctcaggat

SEQ ID NO: 1140745 - DNA, 15 bp, Homo sapiens
agcaaagtctcagga

SEQ ID NO: 1140746 - DNA, 15 bp, Homo sapiens
cagcaaagtctcagg

SEQ ID NO: 1140747 - DNA, 15 bp, Homo sapiens
tcagcaaagtctcag

SEQ ID NO: 1140748 - DNA, 15 bp, Homo sapiens
ttcagcaaagtctca

SEQ ID NO: 1140749 - DNA, 15 bp, Homo sapiens
cctccttaagctgat

SEQ ID NO: 1140750 - DNA, 15 bp, Homo sapiens
gcctccttaagctga

SEQ ID NO: 1140751 - DNA, 15 bp, Homo sapiens
agcctccttaagctg

SEQ ID NO: 1140752 - DNA, 15 bp, Homo sapiens
aagcctccttaagct

SEQ ID NO: 1140753 - DNA, 15 bp, Homo sapiens
aaagcctccttaagc

SEQ ID NO: 1140754 - DNA, 15 bp, Homo sapiens
caaagcctccttaag

SEQ ID NO: 1140755 - DNA, 15 bp, Homo sapiens
ccaaagcctccttaa

SEQ ID NO: 1140756 - DNA, 15 bp, Homo sapiens
cccaaagcctcctta

SEQ ID NO: 1140757 - DNA, 15 bp, Homo sapiens
gcccaaagcctcctt

SEQ ID NO: 1140758 - DNA, 15 bp, Homo sapiens
agcccaaagcctcct

SEQ ID NO: 1140759 - DNA, 15 bp, Homo sapiens
cagcccaaagcctcc

SEQ ID NO: 1140760 - DNA, 15 bp, Homo sapiens
tcagcccaaagcctc

SEQ ID NO: 1140761 - DNA, 15 bp, Homo sapiens
ctcagcccaaagcct

SEQ ID NO: 1140762 - DNA, 15 bp, Homo sapiens
tctcagcccaaagcc

SEQ ID NO: 1140763 - DNA, 15 bp, Homo sapiens
gtctcagcccaaagc

SEQ ID NO: 1140764 - DNA, 15 bp, Homo sapiens
tgtctcagcccaaag

SEQ ID NO: 1140765 - DNA, 15 bp, Homo sapiens
ttgtctcagcccaaa

SEQ ID NO: 1140766 - DNA, 15 bp, Homo sapiens
attgtctcagcccaa

SEQ ID NO: 1140767 - DNA, 15 bp, Homo sapiens
cattgtctcagccca

SEQ ID NO: 1140768 - DNA, 15 bp, Homo sapiens
tctagaaaaccccat

SEQ ID NO: 1140769 - DNA, 15 bp, Homo sapiens
atctagaaaacccca

SEQ ID NO: 1140770 - DNA, 15 bp, Homo sapiens
tatctagaaaacccc

SEQ ID NO: 1140771 - DNA, 15 bp, Homo sapiens
atatctagaaaaccc

SEQ ID NO: 1140772 - DNA, 15 bp, Homo sapiens
tatatctagaaaacc

SEQ ID NO: 1140773 - DNA, 15 bp, Homo sapiens
ctgtatatctagaaa

SEQ ID NO: 1140774 - DNA, 15 bp, Homo sapiens
actgtatatctagaa

SEQ ID NO: 1140775 - DNA, 15 bp, Homo sapiens
gactgtatatctaga

SEQ ID NO: 1140776 - DNA, 15 bp, Homo sapiens
tgactgtatatctag

SEQ ID NO: 1140777 - DNA, 15 bp, Homo sapiens
atgactgtatatcta

SEQ ID NO: 1140778 - DNA, 15 bp, Homo sapiens
catgactgtatatct

SEQ ID NO: 1140779 - DNA, 15 bp, Homo sapiens
acatgactgtatatc

SEQ ID NO: 1140780 - DNA, 15 bp, Homo sapiens
gacatgactgtatat

SEQ ID NO: 1140781 - DNA, 15 bp, Homo sapiens
tgacatgactgtata

SEQ ID NO: 1140782 - DNA, 15 bp, Homo sapiens
atgacatgactgtat

SEQ ID NO: 1140783 - DNA, 15 bp, Homo sapiens
gatgacatgactgta

SEQ ID NO: 1140784 - DNA, 15 bp, Homo sapiens
agatgacatgactgt

SEQ ID NO: 1140785 - DNA, 15 bp, Homo sapiens
cagatgacatgactg

SEQ ID NO: 1140786 - DNA, 15 bp, Homo sapiens
gcagatgacatgact

SEQ ID NO: 1140787 - DNA, 15 bp, Homo sapiens
tgcagatgacatgac

SEQ ID NO: 1140788 - DNA, 15 bp, Homo sapiens
ttgcagatgacatga

SEQ ID NO: 1140789 - DNA, 15 bp, Homo sapiens
tttgcagatgacatg

SEQ ID NO: 1140790 - DNA, 15 bp, Homo sapiens
gtttgcagatgacat

SEQ ID NO: 1140791 - DNA, 15 bp, Homo sapiens
tgtttgcagatgaca

SEQ ID NO: 1140792 - DNA, 15 bp, Homo sapiens
ctgtttgcagatgac

SEQ ID NO: 1140793 - DNA, 15 bp, Homo sapiens
cctgtttgcagatga

SEQ ID NO: 1140794 - DNA, 15 bp, Homo sapiens
ccctgtttgcagatg

SEQ ID NO: 1140795 - DNA, 15 bp, Homo sapiens
tccctgtttgcagat

SEQ ID NO: 1140796 - DNA, 15 bp, Homo sapiens
gtccctgtttgcaga

SEQ ID NO: 1140797 - DNA, 15 bp, Homo sapiens
tgtccctgtttgcag

SEQ ID NO: 1140798 - DNA, 15 bp, Homo sapiens
ctgtccctgtttgca

SEQ ID NO: 1140799 - DNA, 15 bp, Homo sapiens
actgtccctgtttgc

SEQ ID NO: 1140800 - DNA, 15 bp, Homo sapiens
aactgtccctgtttg

SEQ ID NO: 1140801 - DNA, 15 bp, Homo sapiens
aaactgtccctgttt

SEQ ID NO: 1140802 - DNA, 15 bp, Homo sapiens
aaaactgtccctgtt

SEQ ID NO: 1140803 - DNA, 15 bp, Homo sapiens
taaaactgtccctgt

SEQ ID NO: 1140804 - DNA, 15 bp, Homo sapiens
gtaaaactgtccctg

SEQ ID NO: 1140805 - DNA, 15 bp, Homo sapiens
agtaaaactgtccct

SEQ ID NO: 1140806 - DNA, 15 bp, Homo sapiens
aagtaaaactgtccc

SEQ ID NO: 1140807 - DNA, 15 bp, Homo sapiens
gaagtaaaactgtcc

SEQ ID NO: 1140808 - DNA, 15 bp, Homo sapiens
ggaagtaaaactgtc

SEQ ID NO: 1140809 - DNA, 15 bp, Homo sapiens
aggaagtaaaactgt

SEQ ID NO: 1140810 - DNA, 15 bp, Homo sapiens
gaggaagtaaaactg

SEQ ID NO: 1140811 - DNA, 15 bp, Homo sapiens
agaggaagtaaaact

SEQ ID NO: 1140812 - DNA, 15 bp, Homo sapiens
aagaggaagtaaaac

SEQ ID NO: 1140813 - DNA, 15 bp, Homo sapiens
aaagaggaagtaaaa

SEQ ID NO: 1140814 - DNA, 15 bp, Homo sapiens
aaaagaggaagtaaa

SEQ ID NO: 1140815 - DNA, 15 bp, Homo sapiens
gaaaagaggaagtaa

SEQ ID NO: 1140816 - DNA, 15 bp, Homo sapiens
ggaaaagaggaagta

SEQ ID NO: 1140817 - DNA, 15 bp, Homo sapiens
gggtattcaattagg

SEQ ID NO: 1140818 - DNA, 15 bp, Homo sapiens
agggtattcaattag

SEQ ID NO: 1140819 - DNA, 15 bp, Homo sapiens
aagggtattcaatta

SEQ ID NO: 1140820 - DNA, 15 bp, Homo sapiens
aaagggtattcaatt

SEQ ID NO: 1140821 - DNA, 15 bp, Homo sapiens
gaaagggtattcaat

SEQ ID NO: 1140822 - DNA, 15 bp, Homo sapiens
agaaagggtattcaa

SEQ ID NO: 1140823 - DNA, 15 bp, Homo sapiens
aagaaagggtattca

SEQ ID NO: 1140824 - DNA, 15 bp, Homo sapiens
aaagaaagggtattc

SEQ ID NO: 1140825 - DNA, 15 bp, Homo sapiens
gaaagaaagggtatt

SEQ ID NO: 1140826 - DNA, 15 bp, Homo sapiens
agaaagaaagggtat

SEQ ID NO: 1140827 - DNA, 15 bp, Homo sapiens
aagaaagaaagggta

SEQ ID NO: 1140828 - DNA, 15 bp, Homo sapiens
aaagaaagaaagggt

SEQ ID NO: 1140829 - DNA, 15 bp, Homo sapiens
gaaagaaagaaaggg

SEQ ID NO: 1140830 - DNA, 15 bp, Homo sapiens
gaagaaagaaagaaa

SEQ ID NO: 1140831 - DNA, 15 bp, Homo sapiens
agaagaaagaaagaa

SEQ ID NO: 1140832 - DNA, 15 bp, Homo sapiens
cagaagaaagaaaga

SEQ ID NO: 1140833 - DNA, 15 bp, Homo sapiens
gcagaagaaagaaag

SEQ ID NO: 1140834 - DNA, 15 bp, Homo sapiens
ggcagaagaaagaaa

SEQ ID NO: 1140835 - DNA, 15 bp, Homo sapiens
aggcagaagaaagaa

SEQ ID NO: 1140836 - DNA, 15 bp, Homo sapiens
caggcagaagaaaga

SEQ ID NO: 1140837 - DNA, 15 bp, Homo sapiens
tcaggcagaagaaag

SEQ ID NO: 1140838 - DNA, 15 bp, Homo sapiens
atcaggcagaagaaa

SEQ ID NO: 1140839 - DNA, 15 bp, Homo sapiens
aatcaggcagaagaa

SEQ ID NO: 1140840 - DNA, 15 bp, Homo sapiens
caatcaggcagaaga

SEQ ID NO: 1140841 - DNA, 15 bp, Homo sapiens
gcaatcaggcagaag

SEQ ID NO: 1140842 - DNA, 15 bp, Homo sapiens
ggcaatcaggcagaa

SEQ ID NO: 1140843 - DNA, 15 bp, Homo sapiens
gggcaatcaggcaga

SEQ ID NO: 1140844 - DNA, 15 bp, Homo sapiens
agggcaatcaggcag

SEQ ID NO: 1140845 - DNA, 15 bp, Homo sapiens
cagggcaatcaggca

SEQ ID NO: 1140846 - DNA, 15 bp, Homo sapiens
ccagggcaatcaggc

SEQ ID NO: 1140847 - DNA, 15 bp, Homo sapiens
gccagggcaatcagg

SEQ ID NO: 1140848 - DNA, 15 bp, Homo sapiens
ggccagggcaatcag

SEQ ID NO: 1140849 - DNA, 15 bp, Homo sapiens
tggccagggcaatca

SEQ ID NO: 1140850 - DNA, 15 bp, Homo sapiens
ctggccagggcaatc

SEQ ID NO: 1140851 - DNA, 15 bp, Homo sapiens
tctggccagggcaat

SEQ ID NO: 1140852 - DNA, 15 bp, Homo sapiens
ttctggccagggcaa

SEQ ID NO: 1140853 - DNA, 15 bp, Homo sapiens
gttctggccagggca

SEQ ID NO: 1140854 - DNA, 15 bp, Homo sapiens
agttctggccagggc

SEQ ID NO: 1140855 - DNA, 15 bp, Homo sapiens
aagttctggccaggg

SEQ ID NO: 1140856 - DNA, 15 bp, Homo sapiens
gaagttctggccagg

SEQ ID NO: 1140857 - DNA, 15 bp, Homo sapiens
ggaagttctggccag

SEQ ID NO: 1140858 - DNA, 15 bp, Homo sapiens
tggaagttctggcca

SEQ ID NO: 1140859 - DNA, 15 bp, Homo sapiens
ttggaagttctggcc

SEQ ID NO: 1140860 - DNA, 15 bp, Homo sapiens
gttggaagttctggc

SEQ ID NO: 1140861 - DNA, 15 bp, Homo sapiens
tgttggaagttctgg

SEQ ID NO: 1140862 - DNA, 15 bp, Homo sapiens
gtgttggaagttctg

SEQ ID NO: 1140863 - DNA, 15 bp, Homo sapiens
agtgttggaagttct

SEQ ID NO: 1140864 - DNA, 15 bp, Homo sapiens
tagtgttggaagttc

SEQ ID NO: 1140865 - DNA, 15 bp, Homo sapiens
atagtgttggaagtt

SEQ ID NO: 1140866 - DNA, 15 bp, Homo sapiens
catagtgttggaagt

SEQ ID NO: 1140867 - DNA, 15 bp, Homo sapiens
acatagtgttggaag

SEQ ID NO: 1140868 - DNA, 15 bp, Homo sapiens
aacatagtgttggaa

SEQ ID NO: 1140869 - DNA, 15 bp, Homo sapiens
caacatagtgttgga

SEQ ID NO: 1140870 - DNA, 15 bp, Homo sapiens
tcaacatagtgttgg

SEQ ID NO: 1140871 - DNA, 15 bp, Homo sapiens
ttcaacatagtgttg

SEQ ID NO: 1140872 - DNA, 15 bp, Homo sapiens
attcaacatagtgtt

SEQ ID NO: 1140873 - DNA, 15 bp, Homo sapiens
tattcaacatagtgt

SEQ ID NO: 1140874 - DNA, 15 bp, Homo sapiens
ctattcaacatagtg

SEQ ID NO: 1140875 - DNA, 15 bp, Homo sapiens
cctattcaacatagt

SEQ ID NO: 1140876 - DNA, 15 bp, Homo sapiens
tcctattcaacatag

SEQ ID NO: 1140877 - DNA, 15 bp, Homo sapiens
ctcctattcaacata

SEQ ID NO: 1140878 - DNA, 15 bp, Homo sapiens
actcctattcaacat

SEQ ID NO: 1140879 - DNA, 15 bp, Homo sapiens
cactcctattcaaca

SEQ ID NO: 1140880 - DNA, 15 bp, Homo sapiens
ccactcctattcaac

SEQ ID NO: 1140881 - DNA, 15 bp, Homo sapiens
accactcctattcaa

SEQ ID NO: 1140882 - DNA, 15 bp, Homo sapiens
caccactcctattca

SEQ ID NO: 1140883 - DNA, 15 bp, Homo sapiens
tcaccactcctattc

SEQ ID NO: 1140884 - DNA, 15 bp, Homo sapiens
ctcaccactcctatt

SEQ ID NO: 1140885 - DNA, 15 bp, Homo sapiens
tctcaccactcctat

SEQ ID NO: 1140886 - DNA, 15 bp, Homo sapiens
ctctcaccactccta

SEQ ID NO: 1140887 - DNA, 15 bp, Homo sapiens
tctctcaccactcct

SEQ ID NO: 1140888 - DNA, 15 bp, Homo sapiens
ctctctcaccactcc

SEQ ID NO: 1140889 - DNA, 15 bp, Homo sapiens
cctctctcaccactc

SEQ ID NO: 1140890 - DNA, 15 bp, Homo sapiens
ccctctctcaccact

SEQ ID NO: 1140891 - DNA, 15 bp, Homo sapiens
gccctctctcaccac

SEQ ID NO: 1140892 - DNA, 15 bp, Homo sapiens
tgccctctctcacca

SEQ ID NO: 1140893 - DNA, 15 bp, Homo sapiens
atgccctctctcacc

SEQ ID NO: 1140894 - DNA, 15 bp, Homo sapiens
gatgccctctctcac

SEQ ID NO: 1140895 - DNA, 15 bp, Homo sapiens
ggatgccctctctca

SEQ ID NO: 1140896 - DNA, 15 bp, Homo sapiens
aggatgccctctctc

SEQ ID NO: 1140897 - DNA, 15 bp, Homo sapiens
caggatgccctctct

SEQ ID NO: 1140898 - DNA, 15 bp, Homo sapiens
acaggatgccctctc

SEQ ID NO: 1140899 - DNA, 15 bp, Homo sapiens
gacaggatgccctct

SEQ ID NO: 1140900 - DNA, 15 bp, Homo sapiens
agacaggatgccctc

SEQ ID NO: 1140901 - DNA, 15 bp, Homo sapiens
aagacaggatgccct

SEQ ID NO: 1140902 - DNA, 15 bp, Homo sapiens
caagacaggatgccc

SEQ ID NO: 1140903 - DNA, 15 bp, Homo sapiens
acaagacaggatgcc

SEQ ID NO: 1140904 - DNA, 15 bp, Homo sapiens
cacaagacaggatgc

SEQ ID NO: 1140905 - DNA, 15 bp, Homo sapiens
gcacaagacaggatg

SEQ ID NO: 1140906 - DNA, 15 bp, Homo sapiens
ggcacaagacaggat

SEQ ID NO: 1140907 - DNA, 15 bp, Homo sapiens
tggcacaagacagga

SEQ ID NO: 1140908 - DNA, 15 bp, Homo sapiens
ttggcacaagacagg

SEQ ID NO: 1140909 - DNA, 15 bp, Homo sapiens
attggcacaagacag

SEQ ID NO: 1140910 - DNA, 15 bp, Homo sapiens
aattggcacaagaca

SEQ ID NO: 1140911 - DNA, 15 bp, Homo sapiens
aaattggcacaagac

SEQ ID NO: 1140912 - DNA, 15 bp, Homo sapiens
aaaattggcacaaga

SEQ ID NO: 1140913 - DNA, 15 bp, Homo sapiens
gaaaattggcacaag

SEQ ID NO: 1140914 - DNA, 15 bp, Homo sapiens
tgaaaattggcacaa

SEQ ID NO: 1140915 - DNA, 15 bp, Homo sapiens
ttgaaaattggcaca

SEQ ID NO: 1140916 - DNA, 15 bp, Homo sapiens
tttgaaaattggcac

SEQ ID NO: 1140917 - DNA, 15 bp, Homo sapiens
ctttgaaaattggca

SEQ ID NO: 1140918 - DNA, 15 bp, Homo sapiens
cctttgaaaattggc

SEQ ID NO: 1140919 - DNA, 15 bp, Homo sapiens
ccctttgaaaattgg

SEQ ID NO: 1140920 - DNA, 15 bp, Homo sapiens
tccctttgaaaattg

SEQ ID NO: 1140921 - DNA, 15 bp, Homo sapiens
ttccctttgaaaatt

SEQ ID NO: 1140922 - DNA, 15 bp, Homo sapiens
attccctttgaaaat

SEQ ID NO: 1140923 - DNA, 15 bp, Homo sapiens
cattccctttgaaaa

SEQ ID NO: 1140924 - DNA, 15 bp, Homo sapiens
gcattccctttgaaa

SEQ ID NO: 1140925 - DNA, 15 bp, Homo sapiens
agcattccctttgaa

SEQ ID NO: 1140926 - DNA, 15 bp, Homo sapiens
aagcattccctttga

SEQ ID NO: 1140927 - DNA, 15 bp, Homo sapiens
gaagcattccctttg

SEQ ID NO: 1140928 - DNA, 15 bp, Homo sapiens
ggaagcattcccttt

SEQ ID NO: 1140929 - DNA, 15 bp, Homo sapiens
tggaagcattccctt

SEQ ID NO: 1140930 - DNA, 15 bp, Homo sapiens
ctggaagcattccct

SEQ ID NO: 1140931 - DNA, 15 bp, Homo sapiens
actggaagcattccc

SEQ ID NO: 1140932 - DNA, 15 bp, Homo sapiens
aactggaagcattcc

SEQ ID NO: 1140933 - DNA, 15 bp, Homo sapiens
aaactggaagcattc

SEQ ID NO: 1140934 - DNA, 15 bp, Homo sapiens
aaaactggaagcatt

SEQ ID NO: 1140935 - DNA, 15 bp, Homo sapiens
aaaaactggaagcat

SEQ ID NO: 1140936 - DNA, 15 bp, Homo sapiens
gaaaaactggaagca

SEQ ID NO: 1140937 - DNA, 15 bp, Homo sapiens
ggaaaaactggaagc

SEQ ID NO: 1140938 - DNA, 15 bp, Homo sapiens
gggaaaaactggaag

SEQ ID NO: 1140939 - DNA, 15 bp, Homo sapiens
tgggaaaaactggaa

SEQ ID NO: 1140940 - DNA, 15 bp, Homo sapiens
atgggaaaaactgga

SEQ ID NO: 1140941 - DNA, 15 bp, Homo sapiens
aatgggaaaaactgg

SEQ ID NO: 1140942 - DNA, 15 bp, Homo sapiens
gaatgggaaaaactg

SEQ ID NO: 1140943 - DNA, 15 bp, Homo sapiens
tgaatgggaaaaact

SEQ ID NO: 1140944 - DNA, 15 bp, Homo sapiens
ctgaatgggaaaaac

SEQ ID NO: 1140945 - DNA, 15 bp, Homo sapiens
actgaatgggaaaaa

SEQ ID NO: 1140946 - DNA, 15 bp, Homo sapiens
tactgaatgggaaaa

SEQ ID NO: 1140947 - DNA, 15 bp, Homo sapiens
atactgaatgggaaa

SEQ ID NO: 1140948 - DNA, 15 bp, Homo sapiens
catactgaatgggaa

SEQ ID NO: 1140949 - DNA, 15 bp, Homo sapiens
tcatactgaatggga

SEQ ID NO: 1140950 - DNA, 15 bp, Homo sapiens
agccaatatcatact

SEQ ID NO: 1140951 - DNA, 15 bp, Homo sapiens
tagccaatatcatac

SEQ ID NO: 1140952 - DNA, 15 bp, Homo sapiens
atagccaatatcata

SEQ ID NO: 1140953 - DNA, 15 bp, Homo sapiens
catagccaatatcat

SEQ ID NO: 1140954 - DNA, 15 bp, Homo sapiens
ccatagccaatatca

SEQ ID NO: 1140955 - DNA, 15 bp, Homo sapiens
cccatagccaatatc

SEQ ID NO: 1140956 - DNA, 15 bp, Homo sapiens
acccatagccaatat

SEQ ID NO: 1140957 - DNA, 15 bp, Homo sapiens
aacccatagccaata

SEQ ID NO: 1140958 - DNA, 15 bp, Homo sapiens
aaacccatagccaat

SEQ ID NO: 1140959 - DNA, 15 bp, Homo sapiens
caaacccatagccaa

SEQ ID NO: 1140960 - DNA, 15 bp, Homo sapiens
acaaacccatagcca

SEQ ID NO: 1140961 - DNA, 15 bp, Homo sapiens
gacaaacccatagcc

SEQ ID NO: 1140962 - DNA, 15 bp, Homo sapiens
tgacaaacccatagc

SEQ ID NO: 1140963 - DNA, 15 bp, Homo sapiens
atgacaaacccatag

SEQ ID NO: 1140964 - DNA, 15 bp, Homo sapiens
tatgacaaacccata

SEQ ID NO: 1140965 - DNA, 15 bp, Homo sapiens
ttatgacaaacccat

SEQ ID NO: 1140966 - DNA, 15 bp, Homo sapiens
tttatgacaaaccca

SEQ ID NO: 1140967 - DNA, 15 bp, Homo sapiens
atttatgacaaaccc

SEQ ID NO: 1140968 - DNA, 15 bp, Homo sapiens
tatttatgacaaacc

SEQ ID NO: 1140969 - DNA, 15 bp, Homo sapiens
ctatttatgacaaac

SEQ ID NO: 1140970 - DNA, 15 bp, Homo sapiens
gctatttatgacaaa

SEQ ID NO: 1140971 - DNA, 15 bp, Homo sapiens
agctatttatgacaa

SEQ ID NO: 1140972 - DNA, 15 bp, Homo sapiens
gagctatttatgaca

SEQ ID NO: 1140973 - DNA, 15 bp, Homo sapiens
agagctatttatgac

SEQ ID NO: 1140974 - DNA, 15 bp, Homo sapiens
aagagctatttatga

SEQ ID NO: 1140975 - DNA, 15 bp, Homo sapiens
taagagctatttatg

SEQ ID NO: 1140976 - DNA, 15 bp, Homo sapiens
ataagagctatttat

SEQ ID NO: 1140977 - DNA, 15 bp, Homo sapiens
aataagagctattta

SEQ ID NO: 1140978 - DNA, 15 bp, Homo sapiens
taataagagctattt

SEQ ID NO: 1140979 - DNA, 15 bp, Homo sapiens
ataataagagctatt

SEQ ID NO: 1140980 - DNA, 15 bp, Homo sapiens
cataataagagctat

SEQ ID NO: 1140981 - DNA, 15 bp, Homo sapiens
acataataagagcta

SEQ ID NO: 1140982 - DNA, 15 bp, Homo sapiens
aacataataagagct

SEQ ID NO: 1140983 - DNA, 15 bp, Homo sapiens
aaacataataagagc

SEQ ID NO: 1140984 - DNA, 15 bp, Homo sapiens
taaacataataagag

SEQ ID NO: 1140985 - DNA, 15 bp, Homo sapiens
ctaaacataataaga

SEQ ID NO: 1140986 - DNA, 15 bp, Homo sapiens
tctaaacataataag

SEQ ID NO: 1140987 - DNA, 15 bp, Homo sapiens
atctaaacataataa

SEQ ID NO: 1140988 - DNA, 15 bp, Homo sapiens
tatctaaacataata

SEQ ID NO: 1140989 - DNA, 15 bp, Homo sapiens
gtatctaaacataat

SEQ ID NO: 1140990 - DNA, 15 bp, Homo sapiens
ggtatctaaacataa

SEQ ID NO: 1140991 - DNA, 15 bp, Homo sapiens
aggtatctaaacata

SEQ ID NO: 1140992 - DNA, 15 bp, Homo sapiens
gaggtatctaaacat

SEQ ID NO: 1140993 - DNA, 15 bp, Homo sapiens
ggaggtatctaaaca

SEQ ID NO: 1140994 - DNA, 15 bp, Homo sapiens
gggaggtatctaaac

SEQ ID NO: 1140995 - DNA, 15 bp, Homo sapiens
tgggaggtatctaaa

SEQ ID NO: 1140996 - DNA, 15 bp, Homo sapiens
atgggaggtatctaa

SEQ ID NO: 1140997 - DNA, 15 bp, Homo sapiens
gatgggaggtatcta

SEQ ID NO: 1140998 - DNA, 15 bp, Homo sapiens
tgatgggaggtatct

SEQ ID NO: 1140999 - DNA, 15 bp, Homo sapiens
ttgatgggaggtatc

SEQ ID NO: 1141000 - DNA, 15 bp, Homo sapiens
attgatgggaggtat

SEQ ID NO: 1141001 - DNA, 15 bp, Homo sapiens
tattgatgggaggta

SEQ ID NO: 1141002 - DNA, 15 bp, Homo sapiens
gtattgatgggaggt

SEQ ID NO: 1141003 - DNA, 15 bp, Homo sapiens
ggtattgatgggagg

SEQ ID NO: 1141004 - DNA, 15 bp, Homo sapiens
aggtattgatgggag

SEQ ID NO: 1141005 - DNA, 15 bp, Homo sapiens
taggtattgatggga

SEQ ID NO: 1141006 - DNA, 15 bp, Homo sapiens
ttaggtattgatggg

SEQ ID NO: 1141007 - DNA, 15 bp, Homo sapiens
attaggtattgatgg

SEQ ID NO: 1141008 - DNA, 15 bp, Homo sapiens
aattaggtattgatg

SEQ ID NO: 1141009 - DNA, 15 bp, Homo sapiens
aaattaggtattgat

SEQ ID NO: 1141010 - DNA, 15 bp, Homo sapiens
taaattaggtattga

SEQ ID NO: 1141011 - DNA, 15 bp, Homo sapiens
ataaattaggtattg

SEQ ID NO: 1141012 - DNA, 15 bp, Homo sapiens
aataaattaggtatt

SEQ ID NO: 1141013 - DNA, 15 bp, Homo sapiens
caataaattaggtat

SEQ ID NO: 1141014 - DNA, 15 bp, Homo sapiens
tcaataaattaggta

SEQ ID NO: 1141015 - DNA, 15 bp, Homo sapiens
ctcaataaattaggt

SEQ ID NO: 1141016 - DNA, 15 bp, Homo sapiens
tctcaataaattagg

SEQ ID NO: 1141017 - DNA, 15 bp, Homo sapiens
ctctcaataaattag

SEQ ID NO: 1141018 - DNA, 15 bp, Homo sapiens
actctcaataaatta

SEQ ID NO: 1141019 - DNA, 15 bp, Homo sapiens
aactctcaataaatt

SEQ ID NO: 1141020 - DNA, 15 bp, Homo sapiens
aaactctcaataaat

SEQ ID NO: 1141021 - DNA, 15 bp, Homo sapiens
ctaaaaactctcaat

SEQ ID NO: 1141022 - DNA, 15 bp, Homo sapiens
gctaaaaactctcaa

SEQ ID NO: 1141023 - DNA, 15 bp, Homo sapiens
tgctaaaaactctca

SEQ ID NO: 1141024 - DNA, 15 bp, Homo sapiens
atgctaaaaactctc

SEQ ID NO: 1141025 - DNA, 15 bp, Homo sapiens
catgctaaaaactct

SEQ ID NO: 1141026 - DNA, 15 bp, Homo sapiens
tcatgctaaaaactc

SEQ ID NO: 1141027 - DNA, 15 bp, Homo sapiens
ttcatgctaaaaact

SEQ ID NO: 1141028 - DNA, 15 bp, Homo sapiens
attcatgctaaaaac

SEQ ID NO: 1141029 - DNA, 15 bp, Homo sapiens
cattcatgctaaaaa

SEQ ID NO: 1141030 - DNA, 15 bp, Homo sapiens
ccattcatgctaaaa

SEQ ID NO: 1141031 - DNA, 15 bp, Homo sapiens
gccattcatgctaaa

SEQ ID NO: 1141032 - DNA, 15 bp, Homo sapiens
agccattcatgctaa

SEQ ID NO: 1141033 - DNA, 15 bp, Homo sapiens
cagccattcatgcta

SEQ ID NO: 1141034 - DNA, 15 bp, Homo sapiens
acagccattcatgct

SEQ ID NO: 1141035 - DNA, 15 bp, Homo sapiens
aacagccattcatgc

SEQ ID NO: 1141036 - DNA, 15 bp, Homo sapiens
caacagccattcatg

SEQ ID NO: 1141037 - DNA, 15 bp, Homo sapiens
tcaacagccattcat

SEQ ID NO: 1141038 - DNA, 15 bp, Homo sapiens
ttcaacagccattca

SEQ ID NO: 1141039 - DNA, 15 bp, Homo sapiens
attcaacagccattc

SEQ ID NO: 1141040 - DNA, 15 bp, Homo sapiens
aattcaacagccatt

SEQ ID NO: 1141041 - DNA, 15 bp, Homo sapiens
aaattcaacagccat

SEQ ID NO: 1141042 - DNA, 15 bp, Homo sapiens
aaaattcaacagcca

SEQ ID NO: 1141043 - DNA, 15 bp, Homo sapiens
caaaattcaacagcc

SEQ ID NO: 1141044 - DNA, 15 bp, Homo sapiens
acaaaattcaacagc

SEQ ID NO: 1141045 - DNA, 15 bp, Homo sapiens
gacaaaattcaacag

SEQ ID NO: 1141046 - DNA, 15 bp, Homo sapiens
tgacaaaattcaaca

SEQ ID NO: 1141047 - DNA, 15 bp, Homo sapiens
ttgacaaaattcaac

SEQ ID NO: 1141048 - DNA, 15 bp, Homo sapiens
tttgacaaaattcaa

SEQ ID NO: 1141049 - DNA, 15 bp, Homo sapiens
ctttgacaaaattca

SEQ ID NO: 1141050 - DNA, 15 bp, Homo sapiens
cctttgacaaaattc

SEQ ID NO: 1141051 - DNA, 15 bp, Homo sapiens
gcctttgacaaaatt

SEQ ID NO: 1141052 - DNA, 15 bp, Homo sapiens
ggcctttgacaaaat

SEQ ID NO: 1141053 - DNA, 15 bp, Homo sapiens
aggcctttgacaaaa

SEQ ID NO: 1141054 - DNA, 15 bp, Homo sapiens
aaggcctttgacaaa

SEQ ID NO: 1141055 - DNA, 15 bp, Homo sapiens
aaaggcctttgacaa

SEQ ID NO: 1141056 - DNA, 15 bp, Homo sapiens
aaaaggcctttgaca

SEQ ID NO: 1141057 - DNA, 15 bp, Homo sapiens
gaaaaggcctttgac

SEQ ID NO: 1141058 - DNA, 15 bp, Homo sapiens
cagaaaaggcctttg

SEQ ID NO: 1141059 - DNA, 15 bp, Homo sapiens
gcagaaaaggccttt

SEQ ID NO: 1141060 - DNA, 15 bp, Homo sapiens
tgcagaaaaggcctt

SEQ ID NO: 1141061 - DNA, 15 bp, Homo sapiens
atgcagaaaaggcct

SEQ ID NO: 1141062 - DNA, 15 bp, Homo sapiens
gatgcagaaaaggcc

SEQ ID NO: 1141063 - DNA, 15 bp, Homo sapiens
agatgcagaaaaggc

SEQ ID NO: 1141064 - DNA, 15 bp, Homo sapiens
tagatgcagaaaagg

SEQ ID NO: 1141065 - DNA, 15 bp, Homo sapiens
atagatgcagaaaag

SEQ ID NO: 1141066 - DNA, 15 bp, Homo sapiens
aatagatgcagaaaa

SEQ ID NO: 1141067 - DNA, 15 bp, Homo sapiens
caatagatgcagaaa

SEQ ID NO: 1141068 - DNA, 15 bp, Homo sapiens
tcaatagatgcagaa

SEQ ID NO: 1141069 - DNA, 15 bp, Homo sapiens
ctcaatagatgcaga

SEQ ID NO: 1141070 - DNA, 15 bp, Homo sapiens
tctcaatagatgcag

SEQ ID NO: 1141071 - DNA, 15 bp, Homo sapiens
atctcaatagatgca

SEQ ID NO: 1141072 - DNA, 15 bp, Homo sapiens
tatctcaatagatgc

SEQ ID NO: 1141073 - DNA, 15 bp, Homo sapiens
tattatctcaataga

SEQ ID NO: 1141074 - DNA, 15 bp, Homo sapiens
ttattatctcaatag

SEQ ID NO: 1141075 - DNA, 15 bp, Homo sapiens
attattatctcaata

SEQ ID NO: 1141076 - DNA, 15 bp, Homo sapiens
cattattatctcaat

SEQ ID NO: 1141077 - DNA, 15 bp, Homo sapiens
acattattatctcaa

SEQ ID NO: 1141078 - DNA, 15 bp, Homo sapiens
cacattattatctca

SEQ ID NO: 1141079 - DNA, 15 bp, Homo sapiens
ccacattattatctc

SEQ ID NO: 1141080 - DNA, 15 bp, Homo sapiens
accacattattatct

SEQ ID NO: 1141081 - DNA, 15 bp, Homo sapiens
aaccacattattatc

SEQ ID NO: 1141082 - DNA, 15 bp, Homo sapiens
aaaccacattattat

SEQ ID NO: 1141083 - DNA, 15 bp, Homo sapiens
aaaaccacattatta

SEQ ID NO: 1141084 - DNA, 15 bp, Homo sapiens
aaaaaccacattatt

SEQ ID NO: 1141085 - DNA, 15 bp, Homo sapiens
aaaaaaccacattat

SEQ ID NO: 1141086 - DNA, 15 bp, Homo sapiens
aaaaaaaccacatta

SEQ ID NO: 1141087 - DNA, 15 bp, Homo sapiens
gaaaaaaaccacatt

SEQ ID NO: 1141088 - DNA, 15 bp, Homo sapiens
agaaaaaaaccacat

SEQ ID NO: 1141089 - DNA, 15 bp, Homo sapiens
aagaaaaaaaccaca

SEQ ID NO: 1141090 - DNA, 15 bp, Homo sapiens
aaagaaaaaaaccac

SEQ ID NO: 1141091 - DNA, 15 bp, Homo sapiens
caaagaaaaaaacca

SEQ ID NO: 1141092 - DNA, 15 bp, Homo sapiens
ccaaagaaaaaaacc

SEQ ID NO: 1141093 - DNA, 15 bp, Homo sapiens
accaaagaaaaaaac

SEQ ID NO: 1141094 - DNA, 15 bp, Homo sapiens
aaccaaagaaaaaaa

SEQ ID NO: 1141095 - DNA, 15 bp, Homo sapiens
gaaccaaagaaaaaa

SEQ ID NO: 1141096 - DNA, 15 bp, Homo sapiens
agaaccaaagaaaaa

SEQ ID NO: 1141097 - DNA, 15 bp, Homo sapiens
cagaaccaaagaaaa

SEQ ID NO: 1141098 - DNA, 15 bp, Homo sapiens
acagaaccaaagaaa

SEQ ID NO: 1141099 - DNA, 15 bp, Homo sapiens
aacagaaccaaagaa

SEQ ID NO: 1141100 - DNA, 15 bp, Homo sapiens
aaacagaaccaaaga

SEQ ID NO: 1141101 - DNA, 15 bp, Homo sapiens
taaacagaaccaaag

SEQ ID NO: 1141102 - DNA, 15 bp, Homo sapiens
ataaacagaaccaaa

SEQ ID NO: 1141103 - DNA, 15 bp, Homo sapiens
tataaacagaaccaa

SEQ ID NO: 1141104 - DNA, 15 bp, Homo sapiens
atataaacagaacca

SEQ ID NO: 1141105 - DNA, 15 bp, Homo sapiens
catataaacagaacc

SEQ ID NO: 1141106 - DNA, 15 bp, Homo sapiens
gcatataaacagaac

SEQ ID NO: 1141107 - DNA, 15 bp, Homo sapiens
agcatataaacagaa

SEQ ID NO: 1141108 - DNA, 15 bp, Homo sapiens
cagcatataaacaga

SEQ ID NO: 1141109 - DNA, 15 bp, Homo sapiens
acagcatataaacag

SEQ ID NO: 1141110 - DNA, 15 bp, Homo sapiens
tacagcatataaaca

SEQ ID NO: 1141111 - DNA, 15 bp, Homo sapiens
atacagcatataaac

SEQ ID NO: 1141112 - DNA, 15 bp, Homo sapiens
aatacagcatataaa

SEQ ID NO: 1141113 - DNA, 15 bp, Homo sapiens
taatacagcatataa

SEQ ID NO: 1141114 - DNA, 15 bp, Homo sapiens
gtaatacagcatata

SEQ ID NO: 1141115 - DNA, 15 bp, Homo sapiens
cgtaatacagcatat

SEQ ID NO: 1141116 - DNA, 15 bp, Homo sapiens
acgtaatacagcata

SEQ ID NO: 1141117 - DNA, 15 bp, Homo sapiens
aacgtaatacagcat

SEQ ID NO: 1141118 - DNA, 15 bp, Homo sapiens
aaacgtaatacagca

SEQ ID NO: 1141119 - DNA, 15 bp, Homo sapiens
taaacgtaatacagc

SEQ ID NO: 1141120 - DNA, 15 bp, Homo sapiens
ataaacgtaatacag

SEQ ID NO: 1141121 - DNA, 15 bp, Homo sapiens
aataaacgtaataca

SEQ ID NO: 1141122 - DNA, 15 bp, Homo sapiens
caataaacgtaatac

SEQ ID NO: 1141123 - DNA, 15 bp, Homo sapiens
tcaataaacgtaata

SEQ ID NO: 1141124 - DNA, 15 bp, Homo sapiens
atcaataaacgtaat

SEQ ID NO: 1141125 - DNA, 15 bp, Homo sapiens
aatcaataaacgtaa

SEQ ID NO: 1141126 - DNA, 15 bp, Homo sapiens
aaatcaataaacgta

SEQ ID NO: 1141127 - DNA, 15 bp, Homo sapiens
caaatcaataaacgt

SEQ ID NO: 1141128 - DNA, 15 bp, Homo sapiens
acaaatcaataaacg

SEQ ID NO: 1141129 - DNA, 15 bp, Homo sapiens
cacaaatcaataaac

SEQ ID NO: 1141130 - DNA, 15 bp, Homo sapiens
acacaaatcaataaa

SEQ ID NO: 1141131 - DNA, 15 bp, Homo sapiens
tacacaaatcaataa

SEQ ID NO: 1141132 - DNA, 15 bp, Homo sapiens
atacacaaatcaata

SEQ ID NO: 1141133 - DNA, 15 bp, Homo sapiens
catacacaaatcaat

SEQ ID NO: 1141134 - DNA, 15 bp, Homo sapiens
acatacacaaatcaa

SEQ ID NO: 1141135 - DNA, 15 bp, Homo sapiens
aacatacacaaatca

SEQ ID NO: 1141136 - DNA, 15 bp, Homo sapiens
caacatacacaaatc

SEQ ID NO: 1141137 - DNA, 15 bp, Homo sapiens
tcaacatacacaaat

SEQ ID NO: 1141138 - DNA, 15 bp, Homo sapiens
ttcaacatacacaaa

SEQ ID NO: 1141139 - DNA, 15 bp, Homo sapiens
gttcaacatacacaa

SEQ ID NO: 1141140 - DNA, 15 bp, Homo sapiens
ggttcaacatacaca

SEQ ID NO: 1141141 - DNA, 15 bp, Homo sapiens
tggttcaacatacac

SEQ ID NO: 1141142 - DNA, 15 bp, Homo sapiens
ctggttcaacataca

SEQ ID NO: 1141143 - DNA, 15 bp, Homo sapiens
gctggttcaacatac

SEQ ID NO: 1141144 - DNA, 15 bp, Homo sapiens
ggctggttcaacata

SEQ ID NO: 1141145 - DNA, 15 bp, Homo sapiens
aggctggttcaacat

SEQ ID NO: 1141146 - DNA, 15 bp, Homo sapiens
aaggctggttcaaca

SEQ ID NO: 1141147 - DNA, 15 bp, Homo sapiens
caaggctggttcaac

SEQ ID NO: 1141148 - DNA, 15 bp, Homo sapiens
gcaaggctggttcaa

SEQ ID NO: 1141149 - DNA, 15 bp, Homo sapiens
tgcaaggctggttca

SEQ ID NO: 1141150 - DNA, 15 bp, Homo sapiens
atgcaaggctggttc

SEQ ID NO: 1141151 - DNA, 15 bp, Homo sapiens
gatgcaaggctggtt

SEQ ID NO: 1141152 - DNA, 15 bp, Homo sapiens
ggatgcaaggctggt

SEQ ID NO: 1141153 - DNA, 15 bp, Homo sapiens
cctgggatgcaaggc

SEQ ID NO: 1141154 - DNA, 15 bp, Homo sapiens
ccctgggatgcaagg

SEQ ID NO: 1141155 - DNA, 15 bp, Homo sapiens
cccctgggatgcaag

SEQ ID NO: 1141156 - DNA, 15 bp, Homo sapiens
acccctgggatgcaa

SEQ ID NO: 1141157 - DNA, 15 bp, Homo sapiens
cacccctgggatgca

SEQ ID NO: 1141158 - DNA, 15 bp, Homo sapiens
tcacccctgggatgc

SEQ ID NO: 1141159 - DNA, 15 bp, Homo sapiens
ttcacccctgggatg

SEQ ID NO: 1141160 - DNA, 15 bp, Homo sapiens
cttcacccctgggat

SEQ ID NO: 1141161 - DNA, 15 bp, Homo sapiens
gcttcacccctggga

SEQ ID NO: 1141162 - DNA, 15 bp, Homo sapiens
ggcttcacccctggg

SEQ ID NO: 1141163 - DNA, 15 bp, Homo sapiens
gggcttcacccctgg

SEQ ID NO: 1141164 - DNA, 15 bp, Homo sapiens
tgggcttcacccctg

SEQ ID NO: 1141165 - DNA, 15 bp, Homo sapiens
gtgggcttcacccct

SEQ ID NO: 1141166 - DNA, 15 bp, Homo sapiens
agtgggcttcacccc

SEQ ID NO: 1141167 - DNA, 15 bp, Homo sapiens
aagtgggcttcaccc

SEQ ID NO: 1141168 - DNA, 15 bp, Homo sapiens
caagtgggcttcacc

SEQ ID NO: 1141169 - DNA, 15 bp, Homo sapiens
tcaagtgggcttcac

SEQ ID NO: 1141170 - DNA, 15 bp, Homo sapiens
atcaagtgggcttca

SEQ ID NO: 1141171 - DNA, 15 bp, Homo sapiens
gatcaagtgggcttc

SEQ ID NO: 1141172 - DNA, 15 bp, Homo sapiens
tgatcaagtgggctt

SEQ ID NO: 1141173 - DNA, 15 bp, Homo sapiens
atgatcaagtgggct

SEQ ID NO: 1141174 - DNA, 15 bp, Homo sapiens
catgatcaagtgggc

SEQ ID NO: 1141175 - DNA, 15 bp, Homo sapiens
ccatgatcaagtggg

SEQ ID NO: 1141176 - DNA, 15 bp, Homo sapiens
accatgatcaagtgg

SEQ ID NO: 1141177 - DNA, 15 bp, Homo sapiens
caccatgatcaagtg

SEQ ID NO: 1141178 - DNA, 15 bp, Homo sapiens
ccaccatgatcaagt

SEQ ID NO: 1141179 - DNA, 15 bp, Homo sapiens
tccaccatgatcaag

SEQ ID NO: 1141180 - DNA, 15 bp, Homo sapiens
atccaccatgatcaa

SEQ ID NO: 1141181 - DNA, 15 bp, Homo sapiens
tatccaccatgatca

SEQ ID NO: 1141182 - DNA, 15 bp, Homo sapiens
ttatccaccatgatc

SEQ ID NO: 1141183 - DNA, 15 bp, Homo sapiens
cttatccaccatgat

SEQ ID NO: 1141184 - DNA, 15 bp, Homo sapiens
gcttatccaccatga

SEQ ID NO: 1141185 - DNA, 15 bp, Homo sapiens
agcttatccaccatg

SEQ ID NO: 1141186 - DNA, 15 bp, Homo sapiens
aagcttatccaccat

SEQ ID NO: 1141187 - DNA, 15 bp, Homo sapiens
aaagcttatccacca

SEQ ID NO: 1141188 - DNA, 15 bp, Homo sapiens
aaaagcttatccacc

SEQ ID NO: 1141189 - DNA, 15 bp, Homo sapiens
aaaaagcttatccac

SEQ ID NO: 1141190 - DNA, 15 bp, Homo sapiens
caaaaagcttatcca

SEQ ID NO: 1141191 - DNA, 15 bp, Homo sapiens
tcaaaaagcttatcc

SEQ ID NO: 1141192 - DNA, 15 bp, Homo sapiens
atcaaaaagcttatc

SEQ ID NO: 1141193 - DNA, 15 bp, Homo sapiens
catcaaaaagcttat

SEQ ID NO: 1141194 - DNA, 15 bp, Homo sapiens
acatcaaaaagctta

SEQ ID NO: 1141195 - DNA, 15 bp, Homo sapiens
cacatcaaaaagctt

SEQ ID NO: 1141196 - DNA, 15 bp, Homo sapiens
gcacatcaaaaagct

SEQ ID NO: 1141197 - DNA, 15 bp, Homo sapiens
agcacatcaaaaagc

SEQ ID NO: 1141198 - DNA, 15 bp, Homo sapiens
cagcacatcaaaaag

SEQ ID NO: 1141199 - DNA, 15 bp, Homo sapiens
gcagcacatcaaaaa

SEQ ID NO: 1141200 - DNA, 15 bp, Homo sapiens
agcagcacatcaaaa

SEQ ID NO: 1141201 - DNA, 15 bp, Homo sapiens
cagcagcacatcaaa

SEQ ID NO: 1141202 - DNA, 15 bp, Homo sapiens
ccagcagcacatcaa

SEQ ID NO: 1141203 - DNA, 15 bp, Homo sapiens
tccagcagcacatca

SEQ ID NO: 1141204 - DNA, 15 bp, Homo sapiens
atccagcagcacatc

SEQ ID NO: 1141205 - DNA, 15 bp, Homo sapiens
aatccagcagcacat

SEQ ID NO: 1141206 - DNA, 15 bp, Homo sapiens
gaatccagcagcaca

SEQ ID NO: 1141207 - DNA, 15 bp, Homo sapiens
cgaatccagcagcac

SEQ ID NO: 1141208 - DNA, 15 bp, Homo sapiens
ccgaatccagcagca

SEQ ID NO: 1141209 - DNA, 15 bp, Homo sapiens
accgaatccagcagc

SEQ ID NO: 1141210 - DNA, 15 bp, Homo sapiens
ctggcaaaccgaatc

SEQ ID NO: 1141211 - DNA, 15 bp, Homo sapiens
actggcaaaccgaat

SEQ ID NO: 1141212 - DNA, 15 bp, Homo sapiens
tactggcaaaccgaa

SEQ ID NO: 1141213 - DNA, 15 bp, Homo sapiens
atactggcaaaccga

SEQ ID NO: 1141214 - DNA, 15 bp, Homo sapiens
aatactggcaaaccg

SEQ ID NO: 1141215 - DNA, 15 bp, Homo sapiens
aaatactggcaaacc

SEQ ID NO: 1141216 - DNA, 15 bp, Homo sapiens
aaaatactggcaaac

SEQ ID NO: 1141217 - DNA, 15 bp, Homo sapiens
taaaatactggcaaa

SEQ ID NO: 1141218 - DNA, 15 bp, Homo sapiens
ataaaatactggcaa

SEQ ID NO: 1141219 - DNA, 15 bp, Homo sapiens
aataaaatactggca

SEQ ID NO: 1141220 - DNA, 15 bp, Homo sapiens
aaataaaatactggc

SEQ ID NO: 1141221 - DNA, 15 bp, Homo sapiens
aaaataaaatactgg

SEQ ID NO: 1141222 - DNA, 15 bp, Homo sapiens
taaaataaaatactg

SEQ ID NO: 1141223 - DNA, 15 bp, Homo sapiens
ataaaataaaatact

SEQ ID NO: 1141224 - DNA, 15 bp, Homo sapiens
aataaaataaaatac

SEQ ID NO: 1141225 - DNA, 15 bp, Homo sapiens
taaataaaataaaat

SEQ ID NO: 1141226 - DNA, 15 bp, Homo sapiens
ataaataaaataaaa

SEQ ID NO: 1141227 - DNA, 15 bp, Homo sapiens
gtctcaaaaaataaa

SEQ ID NO: 1141228 - DNA, 15 bp, Homo sapiens
cgtctcaaaaaataa

SEQ ID NO: 1141229 - DNA, 15 bp, Homo sapiens
ccgtctcaaaaaata

SEQ ID NO: 1141230 - DNA, 15 bp, Homo sapiens
tccgtctcaaaaaat

SEQ ID NO: 1141231 - DNA, 15 bp, Homo sapiens
caactccgtctcaaa

SEQ ID NO: 1141232 - DNA, 15 bp, Homo sapiens
gcaactccgtctcaa

SEQ ID NO: 1141233 - DNA, 15 bp, Homo sapiens
cgcaactccgtctca

SEQ ID NO: 1141234 - DNA, 15 bp, Homo sapiens
gcgcaactccgtctc

SEQ ID NO: 1141235 - DNA, 15 bp, Homo sapiens
agcgcaactccgtct

SEQ ID NO: 1141236 - DNA, 15 bp, Homo sapiens
cagcgcaactccgtc

SEQ ID NO: 1141237 - DNA, 15 bp, Homo sapiens
acagcgcaactccgt

SEQ ID NO: 1141238 - DNA, 15 bp, Homo sapiens
aacagcgcaactccg

SEQ ID NO: 1141239 - DNA, 15 bp, Homo sapiens
aaacagcgcaactcc

SEQ ID NO: 1141240 - DNA, 15 bp, Homo sapiens
gaaacagcgcaactc

SEQ ID NO: 1141241 - DNA, 15 bp, Homo sapiens
cgaaacagcgcaact

SEQ ID NO: 1141242 - DNA, 15 bp, Homo sapiens
gcgaaacagcgcaac

SEQ ID NO: 1141243 - DNA, 15 bp, Homo sapiens
ggcgaaacagcgcaa

SEQ ID NO: 1141244 - DNA, 15 bp, Homo sapiens
gggcgaaacagcgca

SEQ ID NO: 1141245 - DNA, 15 bp, Homo sapiens
tgggcgaaacagcgc

SEQ ID NO: 1141246 - DNA, 15 bp, Homo sapiens
ctgggcgaaacagcg

SEQ ID NO: 1141247 - DNA, 15 bp, Homo sapiens
cctgggcgaaacagc

SEQ ID NO: 1141248 - DNA, 15 bp, Homo sapiens
gcctgggcgaaacag

SEQ ID NO: 1141249 - DNA, 15 bp, Homo sapiens
ggcctgggcgaaaca

SEQ ID NO: 1141250 - DNA, 15 bp, Homo sapiens
cggcctgggcgaaac

SEQ ID NO: 1141251 - DNA, 15 bp, Homo sapiens
ccggcctgggcgaaa

SEQ ID NO: 1141252 - DNA, 15 bp, Homo sapiens
tccggcctgggcgaa

SEQ ID NO: 1141253 - DNA, 15 bp, Homo sapiens
gtccggcctgggcga

SEQ ID NO: 1141254 - DNA, 15 bp, Homo sapiens
agtccggcctgggcg

SEQ ID NO: 1141255 - DNA, 15 bp, Homo sapiens
cagtccggcctgggc

SEQ ID NO: 1141256 - DNA, 15 bp, Homo sapiens
acagtccggcctggg

SEQ ID NO: 1141257 - DNA, 15 bp, Homo sapiens
tacagtccggcctgg

SEQ ID NO: 1141258 - DNA, 15 bp, Homo sapiens
ctacagtccggcctg

SEQ ID NO: 1141259 - DNA, 15 bp, Homo sapiens
actacagtccggcct

SEQ ID NO: 1141260 - DNA, 15 bp, Homo sapiens
cactacagtccggcc

SEQ ID NO: 1141261 - DNA, 15 bp, Homo sapiens
ccactacagtccggc

SEQ ID NO: 1141262 - DNA, 15 bp, Homo sapiens
gccactacagtccgg

SEQ ID NO: 1141263 - DNA, 15 bp, Homo sapiens
cgccactacagtccg

SEQ ID NO: 1141264 - DNA, 15 bp, Homo sapiens
gcgccactacagtcc

SEQ ID NO: 1141265 - DNA, 15 bp, Homo sapiens
agcgccactacagtc

SEQ ID NO: 1141266 - DNA, 15 bp, Homo sapiens
tagcgccactacagt

SEQ ID NO: 1141267 - DNA, 15 bp, Homo sapiens
atagcgccactacag

SEQ ID NO: 1141268 - DNA, 15 bp, Homo sapiens
gatagcgccactaca

SEQ ID NO: 1141269 - DNA, 15 bp, Homo sapiens
agatagcgccactac

SEQ ID NO: 1141270 - DNA, 15 bp, Homo sapiens
cagatagcgccacta

SEQ ID NO: 1141271 - DNA, 15 bp, Homo sapiens
ccagatagcgccact

SEQ ID NO: 1141272 - DNA, 15 bp, Homo sapiens
cccagatagcgccac

SEQ ID NO: 1141273 - DNA, 15 bp, Homo sapiens
gcccagatagcgcca

SEQ ID NO: 1141274 - DNA, 15 bp, Homo sapiens
agcccagatagcgcc

SEQ ID NO: 1141275 - DNA, 15 bp, Homo sapiens
gagcccagatagcgc

SEQ ID NO: 1141276 - DNA, 15 bp, Homo sapiens
tgagcccagatagcg

SEQ ID NO: 1141277 - DNA, 15 bp, Homo sapiens
gtgagcccagatagc

SEQ ID NO: 1141278 - DNA, 15 bp, Homo sapiens
agtgagcccagatag

SEQ ID NO: 1141279 - DNA, 15 bp, Homo sapiens
cagtgagcccagata

SEQ ID NO: 1141280 - DNA, 15 bp, Homo sapiens
tgcagtgagcccaga

SEQ ID NO: 1141281 - DNA, 15 bp, Homo sapiens
ttgcagtgagcccag

SEQ ID NO: 1141282 - DNA, 15 bp, Homo sapiens
cttgcagtgagccca

SEQ ID NO: 1141283 - DNA, 15 bp, Homo sapiens
gcttgcagtgagccc

SEQ ID NO: 1141284 - DNA, 15 bp, Homo sapiens
cagcttgcagtgagc

SEQ ID NO: 1141285 - DNA, 15 bp, Homo sapiens
gcagcttgcagtgag

SEQ ID NO: 1141286 - DNA, 15 bp, Homo sapiens
cgcagcttgcagtga

SEQ ID NO: 1141287 - DNA, 15 bp, Homo sapiens
gcgcagcttgcagtg

SEQ ID NO: 1141288 - DNA, 15 bp, Homo sapiens
ggcgcagcttgcagt

SEQ ID NO: 1141289 - DNA, 15 bp, Homo sapiens
aggcgcagcttgcag

SEQ ID NO: 1141290 - DNA, 15 bp, Homo sapiens
gaggcgcagcttgca

SEQ ID NO: 1141291 - DNA, 15 bp, Homo sapiens
ggaggcgcagcttgc

SEQ ID NO: 1141292 - DNA, 15 bp, Homo sapiens
gggaggcgcagcttg

SEQ ID NO: 1141293 - DNA, 15 bp, Homo sapiens
cgggaggcgcagctt

SEQ ID NO: 1141294 - DNA, 15 bp, Homo sapiens
ccgggaggcgcagct

SEQ ID NO: 1141295 - DNA, 15 bp, Homo sapiens
cccgggaggcgcagc

SEQ ID NO: 1141296 - DNA, 15 bp, Homo sapiens
acccgggaggcgcag

SEQ ID NO: 1141297 - DNA, 15 bp, Homo sapiens
aacccgggaggcgca

SEQ ID NO: 1141298 - DNA, 15 bp, Homo sapiens
gaacccgggaggcgc

SEQ ID NO: 1141299 - DNA, 15 bp, Homo sapiens
agaggctgaggcagg

SEQ ID NO: 1141300 - DNA, 15 bp, Homo sapiens
gagaggctgaggcag

SEQ ID NO: 1141301 - DNA, 15 bp, Homo sapiens
cgagaggctgaggca

SEQ ID NO: 1141302 - DNA, 15 bp, Homo sapiens
tcgagaggctgaggc

SEQ ID NO: 1141303 - DNA, 15 bp, Homo sapiens
ctcgagaggctgagg

SEQ ID NO: 1141304 - DNA, 15 bp, Homo sapiens
actcgagaggctgag

SEQ ID NO: 1141305 - DNA, 15 bp, Homo sapiens
tactcgagaggctga

SEQ ID NO: 1141306 - DNA, 15 bp, Homo sapiens
ctactcgagaggctg

SEQ ID NO: 1141307 - DNA, 15 bp, Homo sapiens
gctactcgagaggct

SEQ ID NO: 1141308 - DNA, 15 bp, Homo sapiens
agctactcgagaggc

SEQ ID NO: 1141309 - DNA, 15 bp, Homo sapiens
cagctactcgagagg

SEQ ID NO: 1141310 - DNA, 15 bp, Homo sapiens
tcagctactcgagag

SEQ ID NO: 1141311 - DNA, 15 bp, Homo sapiens
ctcagctactcgaga

SEQ ID NO: 1141312 - DNA, 15 bp, Homo sapiens
tctcagctactcgag

SEQ ID NO: 1141313 - DNA, 15 bp, Homo sapiens
gtctcagctactcga

SEQ ID NO: 1141314 - DNA, 15 bp, Homo sapiens
agtctcagctactcg

SEQ ID NO: 1141315 - DNA, 15 bp, Homo sapiens
acctgtagtctcagc

SEQ ID NO: 1141316 - DNA, 15 bp, Homo sapiens
gacctgtagtctcag

SEQ ID NO: 1141317 - DNA, 15 bp, Homo sapiens
ggacctgtagtctca

SEQ ID NO: 1141318 - DNA, 15 bp, Homo sapiens
gggacctgtagtctc

SEQ ID NO: 1141319 - DNA, 15 bp, Homo sapiens
ggggacctgtagtct

SEQ ID NO: 1141320 - DNA, 15 bp, Homo sapiens
tggggacctgtagtc

SEQ ID NO: 1141321 - DNA, 15 bp, Homo sapiens
gtggggacctgtagt

SEQ ID NO: 1141322 - DNA, 15 bp, Homo sapiens
ggtggggacctgtag

SEQ ID NO: 1141323 - DNA, 15 bp, Homo sapiens
tggtggggacctgta

SEQ ID NO: 1141324 - DNA, 15 bp, Homo sapiens
gtggtggggacctgt

SEQ ID NO: 1141325 - DNA, 15 bp, Homo sapiens
ggtggtggggacctg

SEQ ID NO: 1141326 - DNA, 15 bp, Homo sapiens
tggtggtggggacct

SEQ ID NO: 1141327 - DNA, 15 bp, Homo sapiens
gtggtggtggggacc

SEQ ID NO: 1141328 - DNA, 15 bp, Homo sapiens
cgtggtggtggggac

SEQ ID NO: 1141329 - DNA, 15 bp, Homo sapiens
gcgtggtggtgggga

SEQ ID NO: 1141330 - DNA, 15 bp, Homo sapiens
ggcgtggtggtgggg

SEQ ID NO: 1141331 - DNA, 15 bp, Homo sapiens
ctagccaggcgtggt

SEQ ID NO: 1141332 - DNA, 15 bp, Homo sapiens
actagccaggcgtgg

SEQ ID NO: 1141333 - DNA, 15 bp, Homo sapiens
aactagccaggcgtg

SEQ ID NO: 1141334 - DNA, 15 bp, Homo sapiens
aaactagccaggcgt

SEQ ID NO: 1141335 - DNA, 15 bp, Homo sapiens
aaaactagccaggcg

SEQ ID NO: 1141336 - DNA, 15 bp, Homo sapiens
aaaaactagccaggc

SEQ ID NO: 1141337 - DNA, 15 bp, Homo sapiens
agagatcaagaccat

SEQ ID NO: 1141338 - DNA, 15 bp, Homo sapiens
aagagatcaagacca

SEQ ID NO: 1141339 - DNA, 15 bp, Homo sapiens
caagagatcaagacc

SEQ ID NO: 1141340 - DNA, 15 bp, Homo sapiens
tcaagagatcaagac

SEQ ID NO: 1141341 - DNA, 15 bp, Homo sapiens
gtcaagagatcaaga

SEQ ID NO: 1141342 - DNA, 15 bp, Homo sapiens
ggtcaagagatcaag

SEQ ID NO: 1141343 - DNA, 15 bp, Homo sapiens
aggtcaagagatcaa

SEQ ID NO: 1141344 - DNA, 15 bp, Homo sapiens
aaggtcaagagatca

SEQ ID NO: 1141345 - DNA, 15 bp, Homo sapiens
caaggtcaagagatc

SEQ ID NO: 1141346 - DNA, 15 bp, Homo sapiens
gcgggcggatcacaa

SEQ ID NO: 1141347 - DNA, 15 bp, Homo sapiens
gcagcactttgggag

SEQ ID NO: 1141348 - DNA, 15 bp, Homo sapiens
cgcagcactttggga

SEQ ID NO: 1141349 - DNA, 15 bp, Homo sapiens
tcgcagcactttggg

SEQ ID NO: 1141350 - DNA, 15 bp, Homo sapiens
atcgcagcactttgg

SEQ ID NO: 1141351 - DNA, 15 bp, Homo sapiens
aatcgcagcactttg

SEQ ID NO: 1141352 - DNA, 15 bp, Homo sapiens
taatcgcagcacttt

SEQ ID NO: 1141353 - DNA, 15 bp, Homo sapiens
ataatcgcagcactt

SEQ ID NO: 1141354 - DNA, 15 bp, Homo sapiens
tataatcgcagcact

SEQ ID NO: 1141355 - DNA, 15 bp, Homo sapiens
ctataatcgcagcac

SEQ ID NO: 1141356 - DNA, 15 bp, Homo sapiens
cctataatcgcagca

SEQ ID NO: 1141357 - DNA, 15 bp, Homo sapiens
gcctataatcgcagc

SEQ ID NO: 1141358 - DNA, 15 bp, Homo sapiens
cgcctataatcgcag

SEQ ID NO: 1141359 - DNA, 15 bp, Homo sapiens
acgcctataatcgca

SEQ ID NO: 1141360 - DNA, 15 bp, Homo sapiens
cacgcctataatcgc

SEQ ID NO: 1141361 - DNA, 15 bp, Homo sapiens
tcacgcctataatcg

SEQ ID NO: 1141362 - DNA, 15 bp, Homo sapiens
gtggctcacgcctat

SEQ ID NO: 1141363 - DNA, 15 bp, Homo sapiens
ggtggctcacgccta

SEQ ID NO: 1141364 - DNA, 15 bp, Homo sapiens
tgattgaagatcaaa

SEQ ID NO: 1141365 - DNA, 15 bp, Homo sapiens
gtgattgaagatcaa

SEQ ID NO: 1141366 - DNA, 15 bp, Homo sapiens
agtgattgaagatca

SEQ ID NO: 1141367 - DNA, 15 bp, Homo sapiens
cagtgattgaagatc

SEQ ID NO: 1141368 - DNA, 15 bp, Homo sapiens
tcagtgattgaagat

SEQ ID NO: 1141369 - DNA, 15 bp, Homo sapiens
atcagtgattgaaga

SEQ ID NO: 1141370 - DNA, 15 bp, Homo sapiens
tatcagtgattgaag

SEQ ID NO: 1141371 - DNA, 15 bp, Homo sapiens
gtatcagtgattgaa

SEQ ID NO: 1141372 - DNA, 15 bp, Homo sapiens
ggtatcagtgattga

SEQ ID NO: 1141373 - DNA, 15 bp, Homo sapiens
gggtatcagtgattg

SEQ ID NO: 1141374 - DNA, 15 bp, Homo sapiens
agggtatcagtgatt

SEQ ID NO: 1141375 - DNA, 15 bp, Homo sapiens
aagggtatcagtgat

SEQ ID NO: 1141376 - DNA, 15 bp, Homo sapiens
aaagggtatcagtga

SEQ ID NO: 1141377 - DNA, 15 bp, Homo sapiens
gaaagggtatcagtg

SEQ ID NO: 1141378 - DNA, 15 bp, Homo sapiens
agaaagggtatcagt

SEQ ID NO: 1141379 - DNA, 15 bp, Homo sapiens
aagaaagggtatcag

SEQ ID NO: 1141380 - DNA, 15 bp, Homo sapiens
gaagaaagggtatca

SEQ ID NO: 1141381 - DNA, 15 bp, Homo sapiens
ggaagaaagggtatc

SEQ ID NO: 1141382 - DNA, 15 bp, Homo sapiens
tggaagaaagggtat

SEQ ID NO: 1141383 - DNA, 15 bp, Homo sapiens
gtggaagaaagggta

SEQ ID NO: 1141384 - DNA, 15 bp, Homo sapiens
agtggaagaaagggt

SEQ ID NO: 1141385 - DNA, 15 bp, Homo sapiens
aagtggaagaaaggg

SEQ ID NO: 1141386 - DNA, 15 bp, Homo sapiens
caagtggaagaaagg

SEQ ID NO: 1141387 - DNA, 15 bp, Homo sapiens
tcaagtggaagaaag

SEQ ID NO: 1141388 - DNA, 15 bp, Homo sapiens
atcaagtggaagaaa

SEQ ID NO: 1141389 - DNA, 15 bp, Homo sapiens
gatcaagtggaagaa

SEQ ID NO: 1141390 - DNA, 15 bp, Homo sapiens
cgatcaagtggaaga

SEQ ID NO: 1141391 - DNA, 15 bp, Homo sapiens
tcgatcaagtggaag

SEQ ID NO: 1141392 - DNA, 15 bp, Homo sapiens
ttcgatcaagtggaa

SEQ ID NO: 1141393 - DNA, 15 bp, Homo sapiens
attcgatcaagtgga

SEQ ID NO: 1141394 - DNA, 15 bp, Homo sapiens
aattcgatcaagtgg

SEQ ID NO: 1141395 - DNA, 15 bp, Homo sapiens
caattcgatcaagtg

SEQ ID NO: 1141396 - DNA, 15 bp, Homo sapiens
ccaattcgatcaagt

SEQ ID NO: 1141397 - DNA, 15 bp, Homo sapiens
gccaattcgatcaag

SEQ ID NO: 1141398 - DNA, 15 bp, Homo sapiens
agccaattcgatcaa

SEQ ID NO: 1141399 - DNA, 15 bp, Homo sapiens
tagccaattcgatca

SEQ ID NO: 1141400 - DNA, 15 bp, Homo sapiens
gtagccaattcgatc

SEQ ID NO: 1141401 - DNA, 15 bp, Homo sapiens
agtagccaattcgat

SEQ ID NO: 1141402 - DNA, 15 bp, Homo sapiens
cagtagccaattcga

SEQ ID NO: 1141403 - DNA, 15 bp, Homo sapiens
tcagtagccaattcg

SEQ ID NO: 1141404 - DNA, 15 bp, Homo sapiens
ttcagtagccaattc

SEQ ID NO: 1141405 - DNA, 15 bp, Homo sapiens
cttcagtagccaatt

SEQ ID NO: 1141406 - DNA, 15 bp, Homo sapiens
gcttcagtagccaat

SEQ ID NO: 1141407 - DNA, 15 bp, Homo sapiens
agcttcagtagccaa

SEQ ID NO: 1141408 - DNA, 15 bp, Homo sapiens
aagcttcagtagcca

SEQ ID NO: 1141409 - DNA, 15 bp, Homo sapiens
caagcttcagtagcc

SEQ ID NO: 1141410 - DNA, 15 bp, Homo sapiens
acaagcttcagtagc

SEQ ID NO: 1141411 - DNA, 15 bp, Homo sapiens
cacaagcttcagtag

SEQ ID NO: 1141412 - DNA, 15 bp, Homo sapiens
gcacaagcttcagta

SEQ ID NO: 1141413 - DNA, 15 bp, Homo sapiens
agcacaagcttcagt

SEQ ID NO: 1141414 - DNA, 15 bp, Homo sapiens
aagcacaagcttcag

SEQ ID NO: 1141415 - DNA, 15 bp, Homo sapiens
aaagcacaagcttca

SEQ ID NO: 1141416 - DNA, 15 bp, Homo sapiens
gaaagcacaagcttc

SEQ ID NO: 1141417 - DNA, 15 bp, Homo sapiens
cgaaagcacaagctt

SEQ ID NO: 1141418 - DNA, 15 bp, Homo sapiens
acgaaagcacaagct

SEQ ID NO: 1141419 - DNA, 15 bp, Homo sapiens
gacgaaagcacaagc

SEQ ID NO: 1141420 - DNA, 15 bp, Homo sapiens
tgacgaaagcacaag

SEQ ID NO: 1141421 - DNA, 15 bp, Homo sapiens
gtgacgaaagcacaa

SEQ ID NO: 1141422 - DNA, 15 bp, Homo sapiens
tgtgacgaaagcaca

SEQ ID NO: 1141423 - DNA, 15 bp, Homo sapiens
atgtgacgaaagcac

SEQ ID NO: 1141424 - DNA, 15 bp, Homo sapiens
tatgtgacgaaagca

SEQ ID NO: 1141425 - DNA, 15 bp, Homo sapiens
ctatgtgacgaaagc

SEQ ID NO: 1141426 - DNA, 15 bp, Homo sapiens
actatgtgacgaaag

SEQ ID NO: 1141427 - DNA, 15 bp, Homo sapiens
aactatgtgacgaaa

SEQ ID NO: 1141428 - DNA, 15 bp, Homo sapiens
gaactatgtgacgaa

SEQ ID NO: 1141429 - DNA, 15 bp, Homo sapiens
agaactatgtgacga

SEQ ID NO: 1141430 - DNA, 15 bp, Homo sapiens
aagaactatgtgacg

SEQ ID NO: 1141431 - DNA, 15 bp, Homo sapiens
caagaactatgtgac

SEQ ID NO: 1141432 - DNA, 15 bp, Homo sapiens
acaagaactatgtga

SEQ ID NO: 1141433 - DNA, 15 bp, Homo sapiens
cacaagaactatgtg

SEQ ID NO: 1141434 - DNA, 15 bp, Homo sapiens
gcacaagaactatgt

SEQ ID NO: 1141435 - DNA, 15 bp, Homo sapiens
ggcacaagaactatg

SEQ ID NO: 1141436 - DNA, 15 bp, Homo sapiens
tggcacaagaactat

SEQ ID NO: 1141437 - DNA, 15 bp, Homo sapiens
atggcacaagaacta

SEQ ID NO: 1141438 - DNA, 15 bp, Homo sapiens
catggcacaagaact

SEQ ID NO: 1141439 - DNA, 15 bp, Homo sapiens
ccatggcacaagaac

SEQ ID NO: 1141440 - DNA, 15 bp, Homo sapiens
accatggcacaagaa

SEQ ID NO: 1141441 - DNA, 15 bp, Homo sapiens
aaccatggcacaaga

SEQ ID NO: 1141442 - DNA, 15 bp, Homo sapiens
aaaccatggcacaag

SEQ ID NO: 1141443 - DNA, 15 bp, Homo sapiens
aaaaccatggcacaa

SEQ ID NO: 1141444 - DNA, 15 bp, Homo sapiens
gaaaaccatggcaca

SEQ ID NO: 1141445 - DNA, 15 bp, Homo sapiens
tgaaaaccatggcac

SEQ ID NO: 1141446 - DNA, 15 bp, Homo sapiens
ctgaaaaccatggca

SEQ ID NO: 1141447 - DNA, 15 bp, Homo sapiens
gctgaaaaccatggc

SEQ ID NO: 1141448 - DNA, 15 bp, Homo sapiens
agctgaaaaccatgg

SEQ ID NO: 1141449 - DNA, 15 bp, Homo sapiens
gagctgaaaaccatg

SEQ ID NO: 1141450 - DNA, 15 bp, Homo sapiens
ggagctgaaaaccat

SEQ ID NO: 1141451 - DNA, 15 bp, Homo sapiens
tggagctgaaaacca

SEQ ID NO: 1141452 - DNA, 15 bp, Homo sapiens
atggagctgaaaacc

SEQ ID NO: 1141453 - DNA, 15 bp, Homo sapiens
gatggagctgaaaac

SEQ ID NO: 1141454 - DNA, 15 bp, Homo sapiens
tgatggagctgaaaa

SEQ ID NO: 1141455 - DNA, 15 bp, Homo sapiens
ctgatggagctgaaa

SEQ ID NO: 1141456 - DNA, 15 bp, Homo sapiens
cctgatggagctgaa

SEQ ID NO: 1141457 - DNA, 15 bp, Homo sapiens
acctgatggagctga

SEQ ID NO: 1141458 - DNA, 15 bp, Homo sapiens
gacctgatggagctg

SEQ ID NO: 1141459 - DNA, 15 bp, Homo sapiens
ggacctgatggagct

SEQ ID NO: 1141460 - DNA, 15 bp, Homo sapiens
aggacctgatggagc

SEQ ID NO: 1141461 - DNA, 15 bp, Homo sapiens
aaggacctgatggag

SEQ ID NO: 1141462 - DNA, 15 bp, Homo sapiens
aaaggacctgatgga

SEQ ID NO: 1141463 - DNA, 15 bp, Homo sapiens
taaaggacctgatgg

SEQ ID NO: 1141464 - DNA, 15 bp, Homo sapiens
ttaaaggacctgatg

SEQ ID NO: 1141465 - DNA, 15 bp, Homo sapiens
cttaaaggacctgat

SEQ ID NO: 1141466 - DNA, 15 bp, Homo sapiens
ccttaaaggacctga

SEQ ID NO: 1141467 - DNA, 15 bp, Homo sapiens
tccttaaaggacctg

SEQ ID NO: 1141468 - DNA, 15 bp, Homo sapiens
gtccttaaaggacct

SEQ ID NO: 1141469 - DNA, 15 bp, Homo sapiens
agtccttaaaggacc

SEQ ID NO: 1141470 - DNA, 15 bp, Homo sapiens
aagtccttaaaggac

SEQ ID NO: 1141471 - DNA, 15 bp, Homo sapiens
gaagtccttaaagga

SEQ ID NO: 1141472 - DNA, 15 bp, Homo sapiens
agaagtccttaaagg

SEQ ID NO: 1141473 - DNA, 15 bp, Homo sapiens
gagaagtccttaaag

SEQ ID NO: 1141474 - DNA, 15 bp, Homo sapiens
agagaagtccttaaa

SEQ ID NO: 1141475 - DNA, 15 bp, Homo sapiens
cagagaagtccttaa

SEQ ID NO: 1141476 - DNA, 15 bp, Homo sapiens
gcagagaagtcctta

SEQ ID NO: 1141477 - DNA, 15 bp, Homo sapiens
tgcagagaagtcctt

SEQ ID NO: 1141478 - DNA, 15 bp, Homo sapiens
atgcagagaagtcct

SEQ ID NO: 1141479 - DNA, 15 bp, Homo sapiens
gatgcagagaagtcc

SEQ ID NO: 1141480 - DNA, 15 bp, Homo sapiens
cgatgcagagaagtc

SEQ ID NO: 1141481 - DNA, 15 bp, Homo sapiens
ccgatgcagagaagt

SEQ ID NO: 1141482 - DNA, 15 bp, Homo sapiens
accgatgcagagaag

SEQ ID NO: 1141483 - DNA, 15 bp, Homo sapiens
aaccgatgcagagaa

SEQ ID NO: 1141484 - DNA, 15 bp, Homo sapiens
taaccgatgcagaga

SEQ ID NO: 1141485 - DNA, 15 bp, Homo sapiens
ataaccgatgcagag

SEQ ID NO: 1141486 - DNA, 15 bp, Homo sapiens
aataaccgatgcaga

SEQ ID NO: 1141487 - DNA, 15 bp, Homo sapiens
gaataaccgatgcag

SEQ ID NO: 1141488 - DNA, 15 bp, Homo sapiens
agaataaccgatgca

SEQ ID NO: 1141489 - DNA, 15 bp, Homo sapiens
tagaataaccgatgc

SEQ ID NO: 1141490 - DNA, 15 bp, Homo sapiens
ctagaataaccgatg

SEQ ID NO: 1141491 - DNA, 15 bp, Homo sapiens
actagaataaccgat

SEQ ID NO: 1141492 - DNA, 15 bp, Homo sapiens
aactagaataaccga

SEQ ID NO: 1141493 - DNA, 15 bp, Homo sapiens
taactagaataaccg

SEQ ID NO: 1141494 - DNA, 15 bp, Homo sapiens
ctaactagaataacc

SEQ ID NO: 1141495 - DNA, 15 bp, Homo sapiens
gctaactagaataac

SEQ ID NO: 1141496 - DNA, 15 bp, Homo sapiens
ggctaactagaataa

SEQ ID NO: 1141497 - DNA, 15 bp, Homo sapiens
tggctaactagaata

SEQ ID NO: 1141498 - DNA, 15 bp, Homo sapiens
atggctaactagaat

SEQ ID NO: 1141499 - DNA, 15 bp, Homo sapiens
aatggctaactagaa

SEQ ID NO: 1141500 - DNA, 15 bp, Homo sapiens
gaatggctaactaga

SEQ ID NO: 1141501 - DNA, 15 bp, Homo sapiens
tgaatggctaactag

SEQ ID NO: 1141502 - DNA, 15 bp, Homo sapiens
atgaatggctaacta

SEQ ID NO: 1141503 - DNA, 15 bp, Homo sapiens
gatgaatggctaact

SEQ ID NO: 1141504 - DNA, 15 bp, Homo sapiens
agatgaatggctaac

SEQ ID NO: 1141505 - DNA, 15 bp, Homo sapiens
tagatgaatggctaa

SEQ ID NO: 1141506 - DNA, 15 bp, Homo sapiens
atagatgaatggcta

SEQ ID NO: 1141507 - DNA, 15 bp, Homo sapiens
aatagatgaatggct

SEQ ID NO: 1141508 - DNA, 15 bp, Homo sapiens
gaatagatgaatggc

SEQ ID NO: 1141509 - DNA, 15 bp, Homo sapiens
agaatagatgaatgg

SEQ ID NO: 1141510 - DNA, 15 bp, Homo sapiens
aagaatagatgaatg

SEQ ID NO: 1141511 - DNA, 15 bp, Homo sapiens
aaagaatagatgaat

SEQ ID NO: 1141512 - DNA, 15 bp, Homo sapiens
aaaagaatagatgaa

SEQ ID NO: 1141513 - DNA, 15 bp, Homo sapiens
aaaaagaatagatga

SEQ ID NO: 1141514 - DNA, 15 bp, Homo sapiens
aaaaaagaatagatg

SEQ ID NO: 1141515 - DNA, 15 bp, Homo sapiens
gaaaaaagaatagat

SEQ ID NO: 1141516 - DNA, 15 bp, Homo sapiens
agaaaaaagaataga

SEQ ID NO: 1141517 - DNA, 15 bp, Homo sapiens
tagaaaaaagaatag

SEQ ID NO: 1141518 - DNA, 15 bp, Homo sapiens
ctagaaaaaagaata

SEQ ID NO: 1141519 - DNA, 15 bp, Homo sapiens
cctagaaaaaagaat

SEQ ID NO: 1141520 - DNA, 15 bp, Homo sapiens
acctagaaaaaagaa

SEQ ID NO: 1141521 - DNA, 15 bp, Homo sapiens
aacctagaaaaaaga

SEQ ID NO: 1141522 - DNA, 15 bp, Homo sapiens
aaacctagaaaaaag

SEQ ID NO: 1141523 - DNA, 15 bp, Homo sapiens
aaaacctagaaaaaa

SEQ ID NO: 1141524 - DNA, 15 bp, Homo sapiens
aaaaacctagaaaaa

SEQ ID NO: 1141525 - DNA, 15 bp, Homo sapiens
taaaaacctagaaaa

SEQ ID NO: 1141526 - DNA, 15 bp, Homo sapiens
ttaaaaacctagaaa

SEQ ID NO: 1141527 - DNA, 15 bp, Homo sapiens
gttaaaaacctagaa

SEQ ID NO: 1141528 - DNA, 15 bp, Homo sapiens
agttaaaaacctaga

SEQ ID NO: 1141529 - DNA, 15 bp, Homo sapiens
aagttaaaaacctag

SEQ ID NO: 1141530 - DNA, 15 bp, Homo sapiens
gaagttaaaaaccta

SEQ ID NO: 1141531 - DNA, 15 bp, Homo sapiens
agaagttaaaaacct

SEQ ID NO: 1141532 - DNA, 15 bp, Homo sapiens
aagaagttaaaaacc

SEQ ID NO: 1141533 - DNA, 15 bp, Homo sapiens
aaagaagttaaaaac

SEQ ID NO: 1141534 - DNA, 15 bp, Homo sapiens
caaagaagttaaaaa

SEQ ID NO: 1141535 - DNA, 15 bp, Homo sapiens
gcaaagaagttaaaa

SEQ ID NO: 1141536 - DNA, 15 bp, Homo sapiens
ggcaaagaagttaaa

SEQ ID NO: 1141537 - DNA, 15 bp, Homo sapiens
tggcaaagaagttaa

SEQ ID NO: 1141538 - DNA, 15 bp, Homo sapiens
atggcaaagaagtta

SEQ ID NO: 1141539 - DNA, 15 bp, Homo sapiens
catggcaaagaagtt

SEQ ID NO: 1141540 - DNA, 15 bp, Homo sapiens
ccatggcaaagaagt

SEQ ID NO: 1141541 - DNA, 15 bp, Homo sapiens
cccatggcaaagaag

SEQ ID NO: 1141542 - DNA, 15 bp, Homo sapiens
acccatggcaaagaa

SEQ ID NO: 1141543 - DNA, 15 bp, Homo sapiens
aacccatggcaaaga

SEQ ID NO: 1141544 - DNA, 15 bp, Homo sapiens
gaacccatggcaaag

SEQ ID NO: 1141545 - DNA, 15 bp, Homo sapiens
cgaacccatggcaaa

SEQ ID NO: 1141546 - DNA, 15 bp, Homo sapiens
tcgaacccatggcaa

SEQ ID NO: 1141547 - DNA, 15 bp, Homo sapiens
ttcgaacccatggca

SEQ ID NO: 1141548 - DNA, 15 bp, Homo sapiens
gttcgaacccatggc

SEQ ID NO: 1141549 - DNA, 15 bp, Homo sapiens
agttcgaacccatgg

SEQ ID NO: 1141550 - DNA, 15 bp, Homo sapiens
aagttcgaacccatg

SEQ ID NO: 1141551 - DNA, 15 bp, Homo sapiens
gaagttcgaacccat

SEQ ID NO: 1141552 - DNA, 15 bp, Homo sapiens
ggaagttcgaaccca

SEQ ID NO: 1141553 - DNA, 15 bp, Homo sapiens
cggaagttcgaaccc

SEQ ID NO: 1141554 - DNA, 15 bp, Homo sapiens
acggaagttcgaacc

SEQ ID NO: 1141555 - DNA, 15 bp, Homo sapiens
gacggaagttcgaac

SEQ ID NO: 1141556 - DNA, 15 bp, Homo sapiens
agacggaagttcgaa

SEQ ID NO: 1141557 - DNA, 15 bp, Homo sapiens
aagacggaagttcga

SEQ ID NO: 1141558 - DNA, 15 bp, Homo sapiens
aaagacggaagttcg

SEQ ID NO: 1141559 - DNA, 15 bp, Homo sapiens
taaagacggaagttc

SEQ ID NO: 1141560 - DNA, 15 bp, Homo sapiens
ctaaagacggaagtt

SEQ ID NO: 1141561 - DNA, 15 bp, Homo sapiens
gctaaagacggaagt

SEQ ID NO: 1141562 - DNA, 15 bp, Homo sapiens
agctaaagacggaag

SEQ ID NO: 1141563 - DNA, 15 bp, Homo sapiens
gagctaaagacggaa

SEQ ID NO: 1141564 - DNA, 15 bp, Homo sapiens
tgagctaaagacgga

SEQ ID NO: 1141565 - DNA, 15 bp, Homo sapiens
ctgagctaaagacgg

SEQ ID NO: 1141566 - DNA, 15 bp, Homo sapiens
tctgagctaaagacg

SEQ ID NO: 1141567 - DNA, 15 bp, Homo sapiens
ctctgagctaaagac

SEQ ID NO: 1141568 - DNA, 15 bp, Homo sapiens
tctctgagctaaaga

SEQ ID NO: 1141569 - DNA, 15 bp, Homo sapiens
ttctctgagctaaag

SEQ ID NO: 1141570 - DNA, 15 bp, Homo sapiens
cttctctgagctaaa

SEQ ID NO: 1141571 - DNA, 15 bp, Homo sapiens
acttctctgagctaa

SEQ ID NO: 1141572 - DNA, 15 bp, Homo sapiens
aacttctctgagcta

SEQ ID NO: 1141573 - DNA, 15 bp, Homo sapiens
aaacttctctgagct

SEQ ID NO: 1141574 - DNA, 15 bp, Homo sapiens
caaacttctctgagc

SEQ ID NO: 1141575 - DNA, 15 bp, Homo sapiens
tcaaacttctctgag

SEQ ID NO: 1141576 - DNA, 15 bp, Homo sapiens
atcaaacttctctga

SEQ ID NO: 1141577 - DNA, 15 bp, Homo sapiens
gatcaaacttctctg

SEQ ID NO: 1141578 - DNA, 15 bp, Homo sapiens
tgatcaaacttctct

SEQ ID NO: 1141579 - DNA, 15 bp, Homo sapiens
atgatcaaacttctc

SEQ ID NO: 1141580 - DNA, 15 bp, Homo sapiens
gatgatcaaacttct

SEQ ID NO: 1141581 - DNA, 15 bp, Homo sapiens
agatgatcaaacttc

SEQ ID NO: 1141582 - DNA, 15 bp, Homo sapiens
cagatgatcaaactt

SEQ ID NO: 1141583 - DNA, 15 bp, Homo sapiens
acagatgatcaaact

SEQ ID NO: 1141584 - DNA, 15 bp, Homo sapiens
tacagatgatcaaac

SEQ ID NO: 1141585 - DNA, 15 bp, Homo sapiens
ctacagatgatcaaa

SEQ ID NO: 1141586 - DNA, 15 bp, Homo sapiens
gctacagatgatcaa

SEQ ID NO: 1141587 - DNA, 15 bp, Homo sapiens
ggctacagatgatca

SEQ ID NO: 1141588 - DNA, 15 bp, Homo sapiens
aggctacagatgatc

SEQ ID NO: 1141589 - DNA, 15 bp, Homo sapiens
aaggctacagatgat

SEQ ID NO: 1141590 - DNA, 15 bp, Homo sapiens
gaaggctacagatga

SEQ ID NO: 1141591 - DNA, 15 bp, Homo sapiens
agaaggctacagatg

SEQ ID NO: 1141592 - DNA, 15 bp, Homo sapiens
aagaaggctacagat

SEQ ID NO: 1141593 - DNA, 15 bp, Homo sapiens
gaagaaggctacaga

SEQ ID NO: 1141594 - DNA, 15 bp, Homo sapiens
agaagaaggctacag

SEQ ID NO: 1141595 - DNA, 15 bp, Homo sapiens
gagaagaaggctaca

SEQ ID NO: 1141596 - DNA, 15 bp, Homo sapiens
agagaagaaggctac

SEQ ID NO: 1141597 - DNA, 15 bp, Homo sapiens
gagagaagaaggcta

SEQ ID NO: 1141598 - DNA, 15 bp, Homo sapiens
tgagagaagaaggct

SEQ ID NO: 1141599 - DNA, 15 bp, Homo sapiens
ttgagagaagaaggc

SEQ ID NO: 1141600 - DNA, 15 bp, Homo sapiens
gttgagagaagaagg

SEQ ID NO: 1141601 - DNA, 15 bp, Homo sapiens
agttgagagaagaag

SEQ ID NO: 1141602 - DNA, 15 bp, Homo sapiens
gagttgagagaagaa

SEQ ID NO: 1141603 - DNA, 15 bp, Homo sapiens
tgagttgagagaaga

SEQ ID NO: 1141604 - DNA, 15 bp, Homo sapiens
atgagttgagagaag

SEQ ID NO: 1141605 - DNA, 15 bp, Homo sapiens
gatgagttgagagaa

SEQ ID NO: 1141606 - DNA, 15 bp, Homo sapiens
tgatgagttgagaga

SEQ ID NO: 1141607 - DNA, 15 bp, Homo sapiens
ttgatgagttgagag

SEQ ID NO: 1141608 - DNA, 15 bp, Homo sapiens
tttgatgagttgaga

SEQ ID NO: 1141609 - DNA, 15 bp, Homo sapiens
ctttgatgagttgag

SEQ ID NO: 1141610 - DNA, 15 bp, Homo sapiens
actttgatgagttga

SEQ ID NO: 1141611 - DNA, 15 bp, Homo sapiens
gactttgatgagttg

SEQ ID NO: 1141612 - DNA, 15 bp, Homo sapiens
tgactttgatgagtt

SEQ ID NO: 1141613 - DNA, 15 bp, Homo sapiens
atgactttgatgagt

SEQ ID NO: 1141614 - DNA, 15 bp, Homo sapiens
aatgactttgatgag

SEQ ID NO: 1141615 - DNA, 15 bp, Homo sapiens
gaatgactttgatga

SEQ ID NO: 1141616 - DNA, 15 bp, Homo sapiens
agaatgactttgatg

SEQ ID NO: 1141617 - DNA, 15 bp, Homo sapiens
gagaatgactttgat

SEQ ID NO: 1141618 - DNA, 15 bp, Homo sapiens
ggagaatgactttga

SEQ ID NO: 1141619 - DNA, 15 bp, Homo sapiens
cggagaatgactttg

SEQ ID NO: 1141620 - DNA, 15 bp, Homo sapiens
acggagaatgacttt

SEQ ID NO: 1141621 - DNA, 15 bp, Homo sapiens
gacggagaatgactt

SEQ ID NO: 1141622 - DNA, 15 bp, Homo sapiens
ggacggagaatgact

SEQ ID NO: 1141623 - DNA, 15 bp, Homo sapiens
aggacggagaatgac

SEQ ID NO: 1141624 - DNA, 15 bp, Homo sapiens
caggacggagaatga

SEQ ID NO: 1141625 - DNA, 15 bp, Homo sapiens
gcaggacggagaatg

SEQ ID NO: 1141626 - DNA, 15 bp, Homo sapiens
agcaggacggagaat

SEQ ID NO: 1141627 - DNA, 15 bp, Homo sapiens
aagcaggacggagaa

SEQ ID NO: 1141628 - DNA, 15 bp, Homo sapiens
aaagcaggacggaga

SEQ ID NO: 1141629 - DNA, 15 bp, Homo sapiens
caaagcaggacggag

SEQ ID NO: 1141630 - DNA, 15 bp, Homo sapiens
acaaagcaggacgga

SEQ ID NO: 1141631 - DNA, 15 bp, Homo sapiens
aacaaagcaggacgg

SEQ ID NO: 1141632 - DNA, 15 bp, Homo sapiens
gaacaaagcaggacg

SEQ ID NO: 1141633 - DNA, 15 bp, Homo sapiens
ggaacaaagcaggac

SEQ ID NO: 1141634 - DNA, 15 bp, Homo sapiens
tggaacaaagcagga

SEQ ID NO: 1141635 - DNA, 15 bp, Homo sapiens
atggaacaaagcagg

SEQ ID NO: 1141636 - DNA, 15 bp, Homo sapiens
aatggaacaaagcag

SEQ ID NO: 1141637 - DNA, 15 bp, Homo sapiens
caatggaacaaagca

SEQ ID NO: 1141638 - DNA, 15 bp, Homo sapiens
gcaatggaacaaagc

SEQ ID NO: 1141639 - DNA, 15 bp, Homo sapiens
agcaatggaacaaag

SEQ ID NO: 1141640 - DNA, 15 bp, Homo sapiens
cagcaatggaacaaa

SEQ ID NO: 1141641 - DNA, 15 bp, Homo sapiens
ccagcaatggaacaa

SEQ ID NO: 1141642 - DNA, 15 bp, Homo sapiens
accagcaatggaaca

SEQ ID NO: 1141643 - DNA, 15 bp, Homo sapiens
caccagcaatggaac

SEQ ID NO: 1141644 - DNA, 15 bp, Homo sapiens
tcaccagcaatggaa

SEQ ID NO: 1141645 - DNA, 15 bp, Homo sapiens
ctcaccagcaatgga

SEQ ID NO: 1141646 - DNA, 15 bp, Homo sapiens
cctcaccagcaatgg

SEQ ID NO: 1141647 - DNA, 15 bp, Homo sapiens
tcctcaccagcaatg

SEQ ID NO: 1141648 - DNA, 15 bp, Homo sapiens
ctcctcaccagcaat

SEQ ID NO: 1141649 - DNA, 15 bp, Homo sapiens
gctcctcaccagcaa

SEQ ID NO: 1141650 - DNA, 15 bp, Homo sapiens
agctcctcaccagca

SEQ ID NO: 1141651 - DNA, 15 bp, Homo sapiens
cagctcctcaccagc

SEQ ID NO: 1141652 - DNA, 15 bp, Homo sapiens
gcagctcctcaccag

SEQ ID NO: 1141653 - DNA, 15 bp, Homo sapiens
tgcagctcctcacca

SEQ ID NO: 1141654 - DNA, 15 bp, Homo sapiens
atgcagctcctcacc

SEQ ID NO: 1141655 - DNA, 15 bp, Homo sapiens
aatgcagctcctcac

SEQ ID NO: 1141656 - DNA, 15 bp, Homo sapiens
gaatgcagctcctca

SEQ ID NO: 1141657 - DNA, 15 bp, Homo sapiens
ggaatgcagctcctc

SEQ ID NO: 1141658 - DNA, 15 bp, Homo sapiens
aggaatgcagctcct

SEQ ID NO: 1141659 - DNA, 15 bp, Homo sapiens
aaggaatgcagctcc

SEQ ID NO: 1141660 - DNA, 15 bp, Homo sapiens
aaaggaatgcagctc

SEQ ID NO: 1141661 - DNA, 15 bp, Homo sapiens
caaaggaatgcagct

SEQ ID NO: 1141662 - DNA, 15 bp, Homo sapiens
ccaaaggaatgcagc

SEQ ID NO: 1141663 - DNA, 15 bp, Homo sapiens
tccaaaggaatgcag

SEQ ID NO: 1141664 - DNA, 15 bp, Homo sapiens
ctccaaaggaatgca

SEQ ID NO: 1141665 - DNA, 15 bp, Homo sapiens
cctccaaaggaatgc

SEQ ID NO: 1141666 - DNA, 15 bp, Homo sapiens
tcctccaaaggaatg

SEQ ID NO: 1141667 - DNA, 15 bp, Homo sapiens
ctcctccaaaggaat

SEQ ID NO: 1141668 - DNA, 15 bp, Homo sapiens
cctcctccaaaggaa

SEQ ID NO: 1141669 - DNA, 15 bp, Homo sapiens
tcctcctccaaagga

SEQ ID NO: 1141670 - DNA, 15 bp, Homo sapiens
ctcctcctccaaagg

SEQ ID NO: 1141671 - DNA, 15 bp, Homo sapiens
tctcctcctccaaag

SEQ ID NO: 1141672 - DNA, 15 bp, Homo sapiens
cctctcctcctccaa

SEQ ID NO: 1141673 - DNA, 15 bp, Homo sapiens
gcctctcctcctcca

SEQ ID NO: 1141674 - DNA, 15 bp, Homo sapiens
cgcctctcctcctcc

SEQ ID NO: 1141675 - DNA, 15 bp, Homo sapiens
gcgcctctcctcctc

SEQ ID NO: 1141676 - DNA, 15 bp, Homo sapiens
agcgcctctcctcct

SEQ ID NO: 1141677 - DNA, 15 bp, Homo sapiens
gagcgcctctcctcc

SEQ ID NO: 1141678 - DNA, 15 bp, Homo sapiens
agagcgcctctcctc

SEQ ID NO: 1141679 - DNA, 15 bp, Homo sapiens
cagagcgcctctcct

SEQ ID NO: 1141680 - DNA, 15 bp, Homo sapiens
tcagagcgcctctcc

SEQ ID NO: 1141681 - DNA, 15 bp, Homo sapiens
atcagagcgcctctc

SEQ ID NO: 1141682 - DNA, 15 bp, Homo sapiens
aatcagagcgcctct

SEQ ID NO: 1141683 - DNA, 15 bp, Homo sapiens
aaatcagagcgcctc

SEQ ID NO: 1141684 - DNA, 15 bp, Homo sapiens
aaaatcagagcgcct

SEQ ID NO: 1141685 - DNA, 15 bp, Homo sapiens
aaaaatcagagcgcc

SEQ ID NO: 1141686 - DNA, 15 bp, Homo sapiens
taaaaatcagagcgc

SEQ ID NO: 1141687 - DNA, 15 bp, Homo sapiens
ctaaaaatcagagcg

SEQ ID NO: 1141688 - DNA, 15 bp, Homo sapiens
tctaaaaatcagagc

SEQ ID NO: 1141689 - DNA, 15 bp, Homo sapiens
ttctaaaaatcagag

SEQ ID NO: 1141690 - DNA, 15 bp, Homo sapiens
attctaaaaatcaga

SEQ ID NO: 1141691 - DNA, 15 bp, Homo sapiens
aattctaaaaatcag

SEQ ID NO: 1141692 - DNA, 15 bp, Homo sapiens
aaattctaaaaatca

SEQ ID NO: 1141693 - DNA, 15 bp, Homo sapiens
aaaattctaaaaatc

SEQ ID NO: 1141694 - DNA, 15 bp, Homo sapiens
gaaaattctaaaaat

SEQ ID NO: 1141695 - DNA, 15 bp, Homo sapiens
tgaaaattctaaaaa

SEQ ID NO: 1141696 - DNA, 15 bp, Homo sapiens
ctgaaaattctaaaa

SEQ ID NO: 1141697 - DNA, 15 bp, Homo sapiens
actgaaaattctaaa

SEQ ID NO: 1141698 - DNA, 15 bp, Homo sapiens
aactgaaaattctaa

SEQ ID NO: 1141699 - DNA, 15 bp, Homo sapiens
aaactgaaaattcta

SEQ ID NO: 1141700 - DNA, 15 bp, Homo sapiens
aaaactgaaaattct

SEQ ID NO: 1141701 - DNA, 15 bp, Homo sapiens
aaaaactgaaaattc

SEQ ID NO: 1141702 - DNA, 15 bp, Homo sapiens
gaaaaactgaaaatt

SEQ ID NO: 1141703 - DNA, 15 bp, Homo sapiens
agaaaaactgaaaat

SEQ ID NO: 1141704 - DNA, 15 bp, Homo sapiens
cagaaaaactgaaaa

SEQ ID NO: 1141705 - DNA, 15 bp, Homo sapiens
acagaaaaactgaaa

SEQ ID NO: 1141706 - DNA, 15 bp, Homo sapiens
aacagaaaaactgaa

SEQ ID NO: 1141707 - DNA, 15 bp, Homo sapiens
gaacagaaaaactga

SEQ ID NO: 1141708 - DNA, 15 bp, Homo sapiens
agaacagaaaaactg

SEQ ID NO: 1141709 - DNA, 15 bp, Homo sapiens
cagaacagaaaaact

SEQ ID NO: 1141710 - DNA, 15 bp, Homo sapiens
acagaacagaaaaac

SEQ ID NO: 1141711 - DNA, 15 bp, Homo sapiens
aacagaacagaaaaa

SEQ ID NO: 1141712 - DNA, 15 bp, Homo sapiens
aaacagaacagaaaa

SEQ ID NO: 1141713 - DNA, 15 bp, Homo sapiens
aaaacagaacagaaa

SEQ ID NO: 1141714 - DNA, 15 bp, Homo sapiens
aaaaacagaacagaa

SEQ ID NO: 1141715 - DNA, 15 bp, Homo sapiens
aaaaaacagaacaga

SEQ ID NO: 1141716 - DNA, 15 bp, Homo sapiens
gaaaaaacagaacag

SEQ ID NO: 1141717 - DNA, 15 bp, Homo sapiens
ggaaaaaacagaaca

SEQ ID NO: 1141718 - DNA, 15 bp, Homo sapiens
gggaaaaaacagaac

SEQ ID NO: 1141719 - DNA, 15 bp, Homo sapiens
ggggaaaaaacagaa

SEQ ID NO: 1141720 - DNA, 15 bp, Homo sapiens
tggggaaaaaacaga

SEQ ID NO: 1141721 - DNA, 15 bp, Homo sapiens
atggggaaaaaacag

SEQ ID NO: 1141722 - DNA, 15 bp, Homo sapiens
gatggggaaaaaaca

SEQ ID NO: 1141723 - DNA, 15 bp, Homo sapiens
agatggggaaaaaac

SEQ ID NO: 1141724 - DNA, 15 bp, Homo sapiens
aagatggggaaaaaa

SEQ ID NO: 1141725 - DNA, 15 bp, Homo sapiens
aaagatggggaaaaa

SEQ ID NO: 1141726 - DNA, 15 bp, Homo sapiens
caaagatggggaaaa

SEQ ID NO: 1141727 - DNA, 15 bp, Homo sapiens
acaaagatggggaaa

SEQ ID NO: 1141728 - DNA, 15 bp, Homo sapiens
cacaaagatggggaa

SEQ ID NO: 1141729 - DNA, 15 bp, Homo sapiens
ccacaaagatgggga

SEQ ID NO: 1141730 - DNA, 15 bp, Homo sapiens
accacaaagatgggg

SEQ ID NO: 1141731 - DNA, 15 bp, Homo sapiens
aaccacaaagatggg

SEQ ID NO: 1141732 - DNA, 15 bp, Homo sapiens
aaaccacaaagatgg

SEQ ID NO: 1141733 - DNA, 15 bp, Homo sapiens
aaaaccacaaagatg

SEQ ID NO: 1141734 - DNA, 15 bp, Homo sapiens
taaaaccacaaagat

SEQ ID NO: 1141735 - DNA, 15 bp, Homo sapiens
ataaaaccacaaaga

SEQ ID NO: 1141736 - DNA, 15 bp, Homo sapiens
gataaaaccacaaag

SEQ ID NO: 1141737 - DNA, 15 bp, Homo sapiens
agataaaaccacaaa

SEQ ID NO: 1141738 - DNA, 15 bp, Homo sapiens
tagataaaaccacaa

SEQ ID NO: 1141739 - DNA, 15 bp, Homo sapiens
gtagataaaaccaca

SEQ ID NO: 1141740 - DNA, 15 bp, Homo sapiens
ggtagataaaaccac

SEQ ID NO: 1141741 - DNA, 15 bp, Homo sapiens
aggtagataaaacca

SEQ ID NO: 1141742 - DNA, 15 bp, Homo sapiens
aaggtagataaaacc

SEQ ID NO: 1141743 - DNA, 15 bp, Homo sapiens
aaaggtagataaaac

SEQ ID NO: 1141744 - DNA, 15 bp, Homo sapiens
caaaggtagataaaa

SEQ ID NO: 1141745 - DNA, 15 bp, Homo sapiens
ccaaaggtagataaa

SEQ ID NO: 1141746 - DNA, 15 bp, Homo sapiens
accaaaggtagataa

SEQ ID NO: 1141747 - DNA, 15 bp, Homo sapiens
aaccaaaggtagata

SEQ ID NO: 1141748 - DNA, 15 bp, Homo sapiens
aaaccaaaggtagat

SEQ ID NO: 1141749 - DNA, 15 bp, Homo sapiens
aaaaccaaaggtaga

SEQ ID NO: 1141750 - DNA, 15 bp, Homo sapiens
aaaaaccaaaggtag

SEQ ID NO: 1141751 - DNA, 15 bp, Homo sapiens
caaaaaccaaaggta

SEQ ID NO: 1141752 - DNA, 15 bp, Homo sapiens
tcaaaaaccaaaggt

SEQ ID NO: 1141753 - DNA, 15 bp, Homo sapiens
atcaaaaaccaaagg

SEQ ID NO: 1141754 - DNA, 15 bp, Homo sapiens
catcaaaaaccaaag

SEQ ID NO: 1141755 - DNA, 15 bp, Homo sapiens
tcatcaaaaaccaaa

SEQ ID NO: 1141756 - DNA, 15 bp, Homo sapiens
atcatcaaaaaccaa

SEQ ID NO: 1141757 - DNA, 15 bp, Homo sapiens
catcatcaaaaacca

SEQ ID NO: 1141758 - DNA, 15 bp, Homo sapiens
ccatcatcaaaaacc

SEQ ID NO: 1141759 - DNA, 15 bp, Homo sapiens
accatcatcaaaaac

SEQ ID NO: 1141760 - DNA, 15 bp, Homo sapiens
caccatcatcaaaaa

SEQ ID NO: 1141761 - DNA, 15 bp, Homo sapiens
tcaccatcatcaaaa

SEQ ID NO: 1141762 - DNA, 15 bp, Homo sapiens
gtcaccatcatcaaa

SEQ ID NO: 1141763 - DNA, 15 bp, Homo sapiens
cgtcaccatcatcaa

SEQ ID NO: 1141764 - DNA, 15 bp, Homo sapiens
acgtcaccatcatca

SEQ ID NO: 1141765 - DNA, 15 bp, Homo sapiens
tacgtcaccatcatc

SEQ ID NO: 1141766 - DNA, 15 bp, Homo sapiens
gtacgtcaccatcat

SEQ ID NO: 1141767 - DNA, 15 bp, Homo sapiens
tgtacgtcaccatca

SEQ ID NO: 1141768 - DNA, 15 bp, Homo sapiens
ctgtacgtcaccatc

SEQ ID NO: 1141769 - DNA, 15 bp, Homo sapiens
tctgtacgtcaccat

SEQ ID NO: 1141770 - DNA, 15 bp, Homo sapiens
atctgtacgtcacca

SEQ ID NO: 1141771 - DNA, 15 bp, Homo sapiens
catctgtacgtcacc

SEQ ID NO: 1141772 - DNA, 15 bp, Homo sapiens
ccatctgtacgtcac

SEQ ID NO: 1141773 - DNA, 15 bp, Homo sapiens
cccatctgtacgtca

SEQ ID NO: 1141774 - DNA, 15 bp, Homo sapiens
acccatctgtacgtc

SEQ ID NO: 1141775 - DNA, 15 bp, Homo sapiens
aacccatctgtacgt

SEQ ID NO: 1141776 - DNA, 15 bp, Homo sapiens
aaacccatctgtacg

SEQ ID NO: 1141777 - DNA, 15 bp, Homo sapiens
aaaacccatctgtac

SEQ ID NO: 1141778 - DNA, 15 bp, Homo sapiens
caaaacccatctgta

SEQ ID NO: 1141779 - DNA, 15 bp, Homo sapiens
ccaaaacccatctgt

SEQ ID NO: 1141780 - DNA, 15 bp, Homo sapiens
gccaaaacccatctg

SEQ ID NO: 1141781 - DNA, 15 bp, Homo sapiens
cgccaaaacccatct

SEQ ID NO: 1141782 - DNA, 15 bp, Homo sapiens
acgccaaaacccatc

SEQ ID NO: 1141783 - DNA, 15 bp, Homo sapiens
cacgccaaaacccat

SEQ ID NO: 1141784 - DNA, 15 bp, Homo sapiens
ccacgccaaaaccca

SEQ ID NO: 1141785 - DNA, 15 bp, Homo sapiens
tccacgccaaaaccc

SEQ ID NO: 1141786 - DNA, 15 bp, Homo sapiens
atccacgccaaaacc

SEQ ID NO: 1141787 - DNA, 15 bp, Homo sapiens
catccacgccaaaac

SEQ ID NO: 1141788 - DNA, 15 bp, Homo sapiens
acatccacgccaaaa

SEQ ID NO: 1141789 - DNA, 15 bp, Homo sapiens
gacatccacgccaaa

SEQ ID NO: 1141790 - DNA, 15 bp, Homo sapiens
ggacatccacgccaa

SEQ ID NO: 1141791 - DNA, 15 bp, Homo sapiens
aggacatccacgcca

SEQ ID NO: 1141792 - DNA, 15 bp, Homo sapiens
aaggacatccacgcc

SEQ ID NO: 1141793 - DNA, 15 bp, Homo sapiens
aaaggacatccacgc

SEQ ID NO: 1141794 - DNA, 15 bp, Homo sapiens
gaaaggacatccacg

SEQ ID NO: 1141795 - DNA, 15 bp, Homo sapiens
agaaaggacatccac

SEQ ID NO: 1141796 - DNA, 15 bp, Homo sapiens
cagaaaggacatcca

SEQ ID NO: 1141797 - DNA, 15 bp, Homo sapiens
acagaaaggacatcc

SEQ ID NO: 1141798 - DNA, 15 bp, Homo sapiens
aacagaaaggacatc

SEQ ID NO: 1141799 - DNA, 15 bp, Homo sapiens
aaacagaaaggacat

SEQ ID NO: 1141800 - DNA, 15 bp, Homo sapiens
caaacagaaaggaca

SEQ ID NO: 1141801 - DNA, 15 bp, Homo sapiens
acaaacagaaaggac

SEQ ID NO: 1141802 - DNA, 15 bp, Homo sapiens
aacaaacagaaagga

SEQ ID NO: 1141803 - DNA, 15 bp, Homo sapiens
taacaaacagaaagg

SEQ ID NO: 1141804 - DNA, 15 bp, Homo sapiens
ctaacaaacagaaag

SEQ ID NO: 1141805 - DNA, 15 bp, Homo sapiens
actaacaaacagaaa

SEQ ID NO: 1141806 - DNA, 15 bp, Homo sapiens
aactaacaaacagaa

SEQ ID NO: 1141807 - DNA, 15 bp, Homo sapiens
aaactaacaaacaga

SEQ ID NO: 1141808 - DNA, 15 bp, Homo sapiens
aaaactaacaaacag

SEQ ID NO: 1141809 - DNA, 15 bp, Homo sapiens
gaaaactaacaaaca

SEQ ID NO: 1141810 - DNA, 15 bp, Homo sapiens
ggaaaactaacaaac

SEQ ID NO: 1141811 - DNA, 15 bp, Homo sapiens
aggaaaactaacaaa

SEQ ID NO: 1141812 - DNA, 15 bp, Homo sapiens
aaggaaaactaacaa

SEQ ID NO: 1141813 - DNA, 15 bp, Homo sapiens
gaaggaaaactaaca

SEQ ID NO: 1141814 - DNA, 15 bp, Homo sapiens
agaaggaaaactaac

SEQ ID NO: 1141815 - DNA, 15 bp, Homo sapiens
tagaaggaaaactaa

SEQ ID NO: 1141816 - DNA, 15 bp, Homo sapiens
ttagaaggaaaacta

SEQ ID NO: 1141817 - DNA, 15 bp, Homo sapiens
gttagaaggaaaact

SEQ ID NO: 1141818 - DNA, 15 bp, Homo sapiens
tgttagaaggaaaac

SEQ ID NO: 1141819 - DNA, 15 bp, Homo sapiens
ctgttagaaggaaaa

SEQ ID NO: 1141820 - DNA, 15 bp, Homo sapiens
actgttagaaggaaa

SEQ ID NO: 1141821 - DNA, 15 bp, Homo sapiens
gactgttagaaggaa

SEQ ID NO: 1141822 - DNA, 15 bp, Homo sapiens
tgactgttagaagga

SEQ ID NO: 1141823 - DNA, 15 bp, Homo sapiens
ctgactgttagaagg

SEQ ID NO: 1141824 - DNA, 15 bp, Homo sapiens
cctgactgttagaag

SEQ ID NO: 1141825 - DNA, 15 bp, Homo sapiens
tcctgactgttagaa

SEQ ID NO: 1141826 - DNA, 15 bp, Homo sapiens
gtcctgactgttaga

SEQ ID NO: 1141827 - DNA, 15 bp, Homo sapiens
ggtcctgactgttag

SEQ ID NO: 1141828 - DNA, 15 bp, Homo sapiens
gggtcctgactgtta

SEQ ID NO: 1141829 - DNA, 15 bp, Homo sapiens
agggtcctgactgtt

SEQ ID NO: 1141830 - DNA, 15 bp, Homo sapiens
gagggtcctgactgt

SEQ ID NO: 1141831 - DNA, 15 bp, Homo sapiens
tgagggtcctgactg

SEQ ID NO: 1141832 - DNA, 15 bp, Homo sapiens
ctgagggtcctgact

SEQ ID NO: 1141833 - DNA, 15 bp, Homo sapiens
gctgagggtcctgac

SEQ ID NO: 1141834 - DNA, 15 bp, Homo sapiens
ggctgagggtcctga

SEQ ID NO: 1141835 - DNA, 15 bp, Homo sapiens
cggctgagggtcctg

SEQ ID NO: 1141836 - DNA, 15 bp, Homo sapiens
gcggctgagggtcct

SEQ ID NO: 1141837 - DNA, 15 bp, Homo sapiens
tgcggctgagggtcc

SEQ ID NO: 1141838 - DNA, 15 bp, Homo sapiens
ctgcggctgagggtc

SEQ ID NO: 1141839 - DNA, 15 bp, Homo sapiens
cctgcggctgagggt

SEQ ID NO: 1141840 - DNA, 15 bp, Homo sapiens
acctgcggctgaggg

SEQ ID NO: 1141841 - DNA, 15 bp, Homo sapiens
gacctgcggctgagg

SEQ ID NO: 1141842 - DNA, 15 bp, Homo sapiens
agacctgcggctgag

SEQ ID NO: 1141843 - DNA, 15 bp, Homo sapiens
cagacctgcggctga

SEQ ID NO: 1141844 - DNA, 15 bp, Homo sapiens
acagacctgcggctg

SEQ ID NO: 1141845 - DNA, 15 bp, Homo sapiens
aacagacctgcggct

SEQ ID NO: 1141846 - DNA, 15 bp, Homo sapiens
caacagacctgcggc

SEQ ID NO: 1141847 - DNA, 15 bp, Homo sapiens
ccaacagacctgcgg

SEQ ID NO: 1141848 - DNA, 15 bp, Homo sapiens
tccaacagacctgcg

SEQ ID NO: 1141849 - DNA, 15 bp, Homo sapiens
ctccaacagacctgc

SEQ ID NO: 1141850 - DNA, 15 bp, Homo sapiens
actccaacagacctg

SEQ ID NO: 1141851 - DNA, 15 bp, Homo sapiens
aactccaacagacct

SEQ ID NO: 1141852 - DNA, 15 bp, Homo sapiens
aaactccaacagacc

SEQ ID NO: 1141853 - DNA, 15 bp, Homo sapiens
caaactccaacagac

SEQ ID NO: 1141854 - DNA, 15 bp, Homo sapiens
gcaaactccaacaga

SEQ ID NO: 1141855 - DNA, 15 bp, Homo sapiens
agcaaactccaacag

SEQ ID NO: 1141856 - DNA, 15 bp, Homo sapiens
cagcaaactccaaca

SEQ ID NO: 1141857 - DNA, 15 bp, Homo sapiens
ccagcaaactccaac

SEQ ID NO: 1141858 - DNA, 15 bp, Homo sapiens
tccagcaaactccaa

SEQ ID NO: 1141859 - DNA, 15 bp, Homo sapiens
ctccagcaaactcca

SEQ ID NO: 1141860 - DNA, 15 bp, Homo sapiens
cctccagcaaactcc

SEQ ID NO: 1141861 - DNA, 15 bp, Homo sapiens
acctccagcaaactc

SEQ ID NO: 1141862 - DNA, 15 bp, Homo sapiens
gacctccagcaaact

SEQ ID NO: 1141863 - DNA, 15 bp, Homo sapiens
ggacctccagcaaac

SEQ ID NO: 1141864 - DNA, 15 bp, Homo sapiens
tggacctccagcaaa

SEQ ID NO: 1141865 - DNA, 15 bp, Homo sapiens
gtggacctccagcaa

SEQ ID NO: 1141866 - DNA, 15 bp, Homo sapiens
agtggacctccagca

SEQ ID NO: 1141867 - DNA, 15 bp, Homo sapiens
gagtggacctccagc

SEQ ID NO: 1141868 - DNA, 15 bp, Homo sapiens
ggagtggacctccag

SEQ ID NO: 1141869 - DNA, 15 bp, Homo sapiens
tggagtggacctcca

SEQ ID NO: 1141870 - DNA, 15 bp, Homo sapiens
ctggagtggacctcc

SEQ ID NO: 1141871 - DNA, 15 bp, Homo sapiens
tctggagtggacctc

SEQ ID NO: 1141872 - DNA, 15 bp, Homo sapiens
gtctggagtggacct

SEQ ID NO: 1141873 - DNA, 15 bp, Homo sapiens
ggtctggagtggacc

SEQ ID NO: 1141874 - DNA, 15 bp, Homo sapiens
gggtctggagtggac

SEQ ID NO: 1141875 - DNA, 15 bp, Homo sapiens
agggtctggagtgga

SEQ ID NO: 1141876 - DNA, 15 bp, Homo sapiens
cagggtctggagtgg

SEQ ID NO: 1141877 - DNA, 15 bp, Homo sapiens
acagggtctggagtg

SEQ ID NO: 1141878 - DNA, 15 bp, Homo sapiens
aacagggtctggagt

SEQ ID NO: 1141879 - DNA, 15 bp, Homo sapiens
aaacagggtctggag

SEQ ID NO: 1141880 - DNA, 15 bp, Homo sapiens
aaaacagggtctgga

SEQ ID NO: 1141881 - DNA, 15 bp, Homo sapiens
gaaaacagggtctgg

SEQ ID NO: 1141882 - DNA, 15 bp, Homo sapiens
ggaaaacagggtctg

SEQ ID NO: 1141883 - DNA, 15 bp, Homo sapiens
aggaaaacagggtct

SEQ ID NO: 1141884 - DNA, 15 bp, Homo sapiens
caggaaaacagggtc

SEQ ID NO: 1141885 - DNA, 15 bp, Homo sapiens
ccaggaaaacagggt

SEQ ID NO: 1141886 - DNA, 15 bp, Homo sapiens
cccaggaaaacaggg

SEQ ID NO: 1141887 - DNA, 15 bp, Homo sapiens
acccaggaaaacagg

SEQ ID NO: 1141888 - DNA, 15 bp, Homo sapiens
tacccaggaaaacag

SEQ ID NO: 1141889 - DNA, 15 bp, Homo sapiens
atacccaggaaaaca

SEQ ID NO: 1141890 - DNA, 15 bp, Homo sapiens
gatacccaggaaaac

SEQ ID NO: 1141891 - DNA, 15 bp, Homo sapiens
tgatacccaggaaaa

SEQ ID NO: 1141892 - DNA, 15 bp, Homo sapiens
ctgatacccaggaaa

SEQ ID NO: 1141893 - DNA, 15 bp, Homo sapiens
gctgatacccaggaa

SEQ ID NO: 1141894 - DNA, 15 bp, Homo sapiens
tgctgatacccagga

SEQ ID NO: 1141895 - DNA, 15 bp, Homo sapiens
ctgctgatacccagg

SEQ ID NO: 1141896 - DNA, 15 bp, Homo sapiens
gctgctgatacccag

SEQ ID NO: 1141897 - DNA, 15 bp, Homo sapiens
cgctgctgataccca

SEQ ID NO: 1141898 - DNA, 15 bp, Homo sapiens
ccgctgctgataccc

SEQ ID NO: 1141899 - DNA, 15 bp, Homo sapiens
tccgctgctgatacc

SEQ ID NO: 1141900 - DNA, 15 bp, Homo sapiens
ctccgctgctgatac

SEQ ID NO: 1141901 - DNA, 15 bp, Homo sapiens
cctccgctgctgata

SEQ ID NO: 1141902 - DNA, 15 bp, Homo sapiens
gcctccgctgctgat

SEQ ID NO: 1141903 - DNA, 15 bp, Homo sapiens
agcctccgctgctga

SEQ ID NO: 1141904 - DNA, 15 bp, Homo sapiens
cagcctccgctgctg

SEQ ID NO: 1141905 - DNA, 15 bp, Homo sapiens
gcagcctccgctgct

SEQ ID NO: 1141906 - DNA, 15 bp, Homo sapiens
tgcagcctccgctgc

SEQ ID NO: 1141907 - DNA, 15 bp, Homo sapiens
ctgcagcctccgctg

SEQ ID NO: 1141908 - DNA, 15 bp, Homo sapiens
tctgcagcctccgct

SEQ ID NO: 1141909 - DNA, 15 bp, Homo sapiens
ttctgcagcctccgc

SEQ ID NO: 1141910 - DNA, 15 bp, Homo sapiens
gttctgcagcctccg

SEQ ID NO: 1141911 - DNA, 15 bp, Homo sapiens
tgttctgcagcctcc

SEQ ID NO: 1141912 - DNA, 15 bp, Homo sapiens
ctgttctgcagcctc

SEQ ID NO: 1141913 - DNA, 15 bp, Homo sapiens
gctgttctgcagcct

SEQ ID NO: 1141914 - DNA, 15 bp, Homo sapiens
cgctgttctgcagcc

SEQ ID NO: 1141915 - DNA, 15 bp, Homo sapiens
tcgctgttctgcagc

SEQ ID NO: 1141916 - DNA, 15 bp, Homo sapiens
ttcgctgttctgcag

SEQ ID NO: 1141917 - DNA, 15 bp, Homo sapiens
attcgctgttctgca

SEQ ID NO: 1141918 - DNA, 15 bp, Homo sapiens
tattcgctgttctgc

SEQ ID NO: 1141919 - DNA, 15 bp, Homo sapiens
atattcgctgttctg

SEQ ID NO: 1141920 - DNA, 15 bp, Homo sapiens
aatattcgctgttct

SEQ ID NO: 1141921 - DNA, 15 bp, Homo sapiens
caatattcgctgttc

SEQ ID NO: 1141922 - DNA, 15 bp, Homo sapiens
tcaatattcgctgtt

SEQ ID NO: 1141923 - DNA, 15 bp, Homo sapiens
atcaatattcgctgt

SEQ ID NO: 1141924 - DNA, 15 bp, Homo sapiens
catcaatattcgctg

SEQ ID NO: 1141925 - DNA, 15 bp, Homo sapiens
tcatcaatattcgct

SEQ ID NO: 1141926 - DNA, 15 bp, Homo sapiens
ttcatcaatattcgc

SEQ ID NO: 1141927 - DNA, 15 bp, Homo sapiens
gttcatcaatattcg

SEQ ID NO: 1141928 - DNA, 15 bp, Homo sapiens
tgttcatcaatattc

SEQ ID NO: 1141929 - DNA, 15 bp, Homo sapiens
ctgttcatcaatatt

SEQ ID NO: 1141930 - DNA, 15 bp, Homo sapiens
gctgttcatcaatat

SEQ ID NO: 1141931 - DNA, 15 bp, Homo sapiens
cgctgttcatcaata

SEQ ID NO: 1141932 - DNA, 15 bp, Homo sapiens
tcgctgttcatcaat

SEQ ID NO: 1141933 - DNA, 15 bp, Homo sapiens
ttcgctgttcatcaa

SEQ ID NO: 1141934 - DNA, 15 bp, Homo sapiens
attcgctgttcatca

SEQ ID NO: 1141935 - DNA, 15 bp, Homo sapiens
cattcgctgttcatc

SEQ ID NO: 1141936 - DNA, 15 bp, Homo sapiens
acattcgctgttcat

SEQ ID NO: 1141937 - DNA, 15 bp, Homo sapiens
aacattcgctgttca

SEQ ID NO: 1141938 - DNA, 15 bp, Homo sapiens
caacattcgctgttc

SEQ ID NO: 1141939 - DNA, 15 bp, Homo sapiens
gcaacattcgctgtt

SEQ ID NO: 1141940 - DNA, 15 bp, Homo sapiens
agcaacattcgctgt

SEQ ID NO: 1141941 - DNA, 15 bp, Homo sapiens
cagcaacattcgctg

SEQ ID NO: 1141942 - DNA, 15 bp, Homo sapiens
gcagcaacattcgct

SEQ ID NO: 1141943 - DNA, 15 bp, Homo sapiens
ggcagcaacattcgc

SEQ ID NO: 1141944 - DNA, 15 bp, Homo sapiens
aggcagcaacattcg

SEQ ID NO: 1141945 - DNA, 15 bp, Homo sapiens
caggcagcaacattc

SEQ ID NO: 1141946 - DNA, 15 bp, Homo sapiens
tcaggcagcaacatt

SEQ ID NO: 1141947 - DNA, 15 bp, Homo sapiens
atcaggcagcaacat

SEQ ID NO: 1141948 - DNA, 15 bp, Homo sapiens
aatcaggcagcaaca

SEQ ID NO: 1141949 - DNA, 15 bp, Homo sapiens
caatcaggcagcaac

SEQ ID NO: 1141950 - DNA, 15 bp, Homo sapiens
acaatcaggcagcaa

SEQ ID NO: 1141951 - DNA, 15 bp, Homo sapiens
aacaatcaggcagca

SEQ ID NO: 1141952 - DNA, 15 bp, Homo sapiens
gaacaatcaggcagc

SEQ ID NO: 1141953 - DNA, 15 bp, Homo sapiens
ggaacaatcaggcag

SEQ ID NO: 1141954 - DNA, 15 bp, Homo sapiens
aggaacaatcaggca

SEQ ID NO: 1141955 - DNA, 15 bp, Homo sapiens
gaggaacaatcaggc

SEQ ID NO: 1141956 - DNA, 15 bp, Homo sapiens
agaggaacaatcagg

SEQ ID NO: 1141957 - DNA, 15 bp, Homo sapiens
cagaggaacaatcag

SEQ ID NO: 1141958 - DNA, 15 bp, Homo sapiens
ccagaggaacaatca

SEQ ID NO: 1141959 - DNA, 15 bp, Homo sapiens
tccagaggaacaatc

SEQ ID NO: 1141960 - DNA, 15 bp, Homo sapiens
ttccagaggaacaat

SEQ ID NO: 1141961 - DNA, 15 bp, Homo sapiens
cttccagaggaacaa

SEQ ID NO: 1141962 - DNA, 15 bp, Homo sapiens
acttccagaggaaca

SEQ ID NO: 1141963 - DNA, 15 bp, Homo sapiens
aacttccagaggaac

SEQ ID NO: 1141964 - DNA, 15 bp, Homo sapiens
aaacttccagaggaa

SEQ ID NO: 1141965 - DNA, 15 bp, Homo sapiens
gaaacttccagagga

SEQ ID NO: 1141966 - DNA, 15 bp, Homo sapiens
cgaaacttccagagg

SEQ ID NO: 1141967 - DNA, 15 bp, Homo sapiens
acgaaacttccagag

SEQ ID NO: 1141968 - DNA, 15 bp, Homo sapiens
gacgaaacttccaga

SEQ ID NO: 1141969 - DNA, 15 bp, Homo sapiens
agacgaaacttccag

SEQ ID NO: 1141970 - DNA, 15 bp, Homo sapiens
gagacgaaacttcca

SEQ ID NO: 1141971 - DNA, 15 bp, Homo sapiens
tgagacgaaacttcc

SEQ ID NO: 1141972 - DNA, 15 bp, Homo sapiens
ctgagacgaaacttc

SEQ ID NO: 1141973 - DNA, 15 bp, Homo sapiens
tctgagacgaaactt

SEQ ID NO: 1141974 - DNA, 15 bp, Homo sapiens
ctctgagacgaaact

SEQ ID NO: 1141975 - DNA, 15 bp, Homo sapiens
cctctgagacgaaac

SEQ ID NO: 1141976 - DNA, 15 bp, Homo sapiens
ccctctgagacgaaa

SEQ ID NO: 1141977 - DNA, 15 bp, Homo sapiens
gccctctgagacgaa

SEQ ID NO: 1141978 - DNA, 15 bp, Homo sapiens
agccctctgagacga

SEQ ID NO: 1141979 - DNA, 15 bp, Homo sapiens
cagccctctgagacg

SEQ ID NO: 1141980 - DNA, 15 bp, Homo sapiens
gcagccctctgagac

SEQ ID NO: 1141981 - DNA, 15 bp, Homo sapiens
ggcagccctctgaga

SEQ ID NO: 1141982 - DNA, 15 bp, Homo sapiens
gggcagccctctgag

SEQ ID NO: 1141983 - DNA, 15 bp, Homo sapiens
cgggcagccctctga

SEQ ID NO: 1141984 - DNA, 15 bp, Homo sapiens
ccgggcagccctctg

SEQ ID NO: 1141985 - DNA, 15 bp, Homo sapiens
gccgggcagccctct

SEQ ID NO: 1141986 - DNA, 15 bp, Homo sapiens
ggccgggcagccctc

SEQ ID NO: 1141987 - DNA, 15 bp, Homo sapiens
tggccgggcagccct

SEQ ID NO: 1141988 - DNA, 15 bp, Homo sapiens
atggccgggcagccc

SEQ ID NO: 1141989 - DNA, 15 bp, Homo sapiens
catggccgggcagcc

SEQ ID NO: 1141990 - DNA, 15 bp, Homo sapiens
acatggccgggcagc

SEQ ID NO: 1141991 - DNA, 15 bp, Homo sapiens
cacatggccgggcag

SEQ ID NO: 1141992 - DNA, 15 bp, Homo sapiens
tcacatggccgggca

SEQ ID NO: 1141993 - DNA, 15 bp, Homo sapiens
ctcacatggccgggc

SEQ ID NO: 1141994 - DNA, 15 bp, Homo sapiens
cctcacatggccggg

SEQ ID NO: 1141995 - DNA, 15 bp, Homo sapiens
acctcacatggccgg

SEQ ID NO: 1141996 - DNA, 15 bp, Homo sapiens
cacctcacatggccg

SEQ ID NO: 1141997 - DNA, 15 bp, Homo sapiens
acacctcacatggcc

SEQ ID NO: 1141998 - DNA, 15 bp, Homo sapiens
gacacctcacatggc

SEQ ID NO: 1141999 - DNA, 15 bp, Homo sapiens
tgacacctcacatgg

SEQ ID NO: 1142000 - DNA, 15 bp, Homo sapiens
ctgacacctcacatg

SEQ ID NO: 1142001 - DNA, 15 bp, Homo sapiens
actgacacctcacat

SEQ ID NO: 1142002 - DNA, 15 bp, Homo sapiens
gactgacacctcaca

SEQ ID NO: 1142003 - DNA, 15 bp, Homo sapiens
agactgacacctcac

SEQ ID NO: 1142004 - DNA, 15 bp, Homo sapiens
cagactgacacctca

SEQ ID NO: 1142005 - DNA, 15 bp, Homo sapiens
gcagactgacacctc

SEQ ID NO: 1142006 - DNA, 15 bp, Homo sapiens
ggcagactgacacct

SEQ ID NO: 1142007 - DNA, 15 bp, Homo sapiens
gggcagactgacacc

SEQ ID NO: 1142008 - DNA, 15 bp, Homo sapiens
ggggcagactgacac

SEQ ID NO: 1142009 - DNA, 15 bp, Homo sapiens
aggggcagactgaca

SEQ ID NO: 1142010 - DNA, 15 bp, Homo sapiens
taggggcagactgac

SEQ ID NO: 1142011 - DNA, 15 bp, Homo sapiens
gtaggggcagactga

SEQ ID NO: 1142012 - DNA, 15 bp, Homo sapiens
agtaggggcagactg

SEQ ID NO: 1142013 - DNA, 15 bp, Homo sapiens
cagtaggggcagact

SEQ ID NO: 1142014 - DNA, 15 bp, Homo sapiens
ccagtaggggcagac

SEQ ID NO: 1142015 - DNA, 15 bp, Homo sapiens
cccagtaggggcaga

SEQ ID NO: 1142016 - DNA, 15 bp, Homo sapiens
acccagtaggggcag

SEQ ID NO: 1142017 - DNA, 15 bp, Homo sapiens
cacccagtaggggca

SEQ ID NO: 1142018 - DNA, 15 bp, Homo sapiens
ccacccagtaggggc

SEQ ID NO: 1142019 - DNA, 15 bp, Homo sapiens
accacccagtagggg

SEQ ID NO: 1142020 - DNA, 15 bp, Homo sapiens
caccacccagtaggg

SEQ ID NO: 1142021 - DNA, 15 bp, Homo sapiens
gcaccacccagtagg

SEQ ID NO: 1142022 - DNA, 15 bp, Homo sapiens
ggcaccacccagtag

SEQ ID NO: 1142023 - DNA, 15 bp, Homo sapiens
aggcaccacccagta

SEQ ID NO: 1142024 - DNA, 15 bp, Homo sapiens
gaggcaccacccagt

SEQ ID NO: 1142025 - DNA, 15 bp, Homo sapiens
ggaggcaccacccag

SEQ ID NO: 1142026 - DNA, 15 bp, Homo sapiens
gggaggcaccaccca

SEQ ID NO: 1142027 - DNA, 15 bp, Homo sapiens
tgggaggcaccaccc

SEQ ID NO: 1142028 - DNA, 15 bp, Homo sapiens
ctgggaggcaccacc

SEQ ID NO: 1142029 - DNA, 15 bp, Homo sapiens
actgggaggcaccac

SEQ ID NO: 1142030 - DNA, 15 bp, Homo sapiens
aactgggaggcacca

SEQ ID NO: 1142031 - DNA, 15 bp, Homo sapiens
taactgggaggcacc

SEQ ID NO: 1142032 - DNA, 15 bp, Homo sapiens
ctaactgggaggcac

SEQ ID NO: 1142033 - DNA, 15 bp, Homo sapiens
cctaactgggaggca

SEQ ID NO: 1142034 - DNA, 15 bp, Homo sapiens
gcctaactgggaggc

SEQ ID NO: 1142035 - DNA, 15 bp, Homo sapiens
agcctaactgggagg

SEQ ID NO: 1142036 - DNA, 15 bp, Homo sapiens
tagcctaactgggag

SEQ ID NO: 1142037 - DNA, 15 bp, Homo sapiens
gtagcctaactggga

SEQ ID NO: 1142038 - DNA, 15 bp, Homo sapiens
agtagcctaactggg

SEQ ID NO: 1142039 - DNA, 15 bp, Homo sapiens
gagtagcctaactgg

SEQ ID NO: 1142040 - DNA, 15 bp, Homo sapiens
cgagtagcctaactg

SEQ ID NO: 1142041 - DNA, 15 bp, Homo sapiens
ccgagtagcctaact

SEQ ID NO: 1142042 - DNA, 15 bp, Homo sapiens
cccgagtagcctaac

SEQ ID NO: 1142043 - DNA, 15 bp, Homo sapiens
ccccgagtagcctaa

SEQ ID NO: 1142044 - DNA, 15 bp, Homo sapiens
cccccgagtagccta

SEQ ID NO: 1142045 - DNA, 15 bp, Homo sapiens
acccccgagtagcct

SEQ ID NO: 1142046 - DNA, 15 bp, Homo sapiens
gacccccgagtagcc

SEQ ID NO: 1142047 - DNA, 15 bp, Homo sapiens
tgacccccgagtagc

SEQ ID NO: 1142048 - DNA, 15 bp, Homo sapiens
ctgacccccgagtag

SEQ ID NO: 1142049 - DNA, 15 bp, Homo sapiens
cctgacccccgagta

SEQ ID NO: 1142050 - DNA, 15 bp, Homo sapiens
ccctgacccccgagt

SEQ ID NO: 1142051 - DNA, 15 bp, Homo sapiens
tccctgacccccgag

SEQ ID NO: 1142052 - DNA, 15 bp, Homo sapiens
gtccctgacccccga

SEQ ID NO: 1142053 - DNA, 15 bp, Homo sapiens
ggtccctgacccccg

SEQ ID NO: 1142054 - DNA, 15 bp, Homo sapiens
gggtccctgaccccc

SEQ ID NO: 1142055 - DNA, 15 bp, Homo sapiens
tgggtccctgacccc

SEQ ID NO: 1142056 - DNA, 15 bp, Homo sapiens
gtgggtccctgaccc

SEQ ID NO: 1142057 - DNA, 15 bp, Homo sapiens
agtgggtccctgacc

SEQ ID NO: 1142058 - DNA, 15 bp, Homo sapiens
aagtgggtccctgac

SEQ ID NO: 1142059 - DNA, 15 bp, Homo sapiens
caagtgggtccctga

SEQ ID NO: 1142060 - DNA, 15 bp, Homo sapiens
tcaagtgggtccctg

SEQ ID NO: 1142061 - DNA, 15 bp, Homo sapiens
ctcaagtgggtccct

SEQ ID NO: 1142062 - DNA, 15 bp, Homo sapiens
tctcaagtgggtccc

SEQ ID NO: 1142063 - DNA, 15 bp, Homo sapiens
ttctcaagtgggtcc

SEQ ID NO: 1142064 - DNA, 15 bp, Homo sapiens
cttctcaagtgggtc

SEQ ID NO: 1142065 - DNA, 15 bp, Homo sapiens
ccttctcaagtgggt

SEQ ID NO: 1142066 - DNA, 15 bp, Homo sapiens
gccttctcaagtggg

SEQ ID NO: 1142067 - DNA, 15 bp, Homo sapiens
tgccttctcaagtgg

SEQ ID NO: 1142068 - DNA, 15 bp, Homo sapiens
ctgccttctcaagtg

SEQ ID NO: 1142069 - DNA, 15 bp, Homo sapiens
actgccttctcaagt

SEQ ID NO: 1142070 - DNA, 15 bp, Homo sapiens
gactgccttctcaag

SEQ ID NO: 1142071 - DNA, 15 bp, Homo sapiens
agactgccttctcaa

SEQ ID NO: 1142072 - DNA, 15 bp, Homo sapiens
cagactgccttctca

SEQ ID NO: 1142073 - DNA, 15 bp, Homo sapiens
acagactgccttctc

SEQ ID NO: 1142074 - DNA, 15 bp, Homo sapiens
gacagactgccttct

SEQ ID NO: 1142075 - DNA, 15 bp, Homo sapiens
ggacagactgccttc

SEQ ID NO: 1142076 - DNA, 15 bp, Homo sapiens
tggacagactgcctt

SEQ ID NO: 1142077 - DNA, 15 bp, Homo sapiens
atggacagactgcct

SEQ ID NO: 1142078 - DNA, 15 bp, Homo sapiens
aatggacagactgcc

SEQ ID NO: 1142079 - DNA, 15 bp, Homo sapiens
gaatggacagactgc

SEQ ID NO: 1142080 - DNA, 15 bp, Homo sapiens
agaatggacagactg

SEQ ID NO: 1142081 - DNA, 15 bp, Homo sapiens
gagaatggacagact

SEQ ID NO: 1142082 - DNA, 15 bp, Homo sapiens
tgagaatggacagac

SEQ ID NO: 1142083 - DNA, 15 bp, Homo sapiens
ctgagaatggacaga

SEQ ID NO: 1142084 - DNA, 15 bp, Homo sapiens
tctgagaatggacag

SEQ ID NO: 1142085 - DNA, 15 bp, Homo sapiens
atctgagaatggaca

SEQ ID NO: 1142086 - DNA, 15 bp, Homo sapiens
gatctgagaatggac

SEQ ID NO: 1142087 - DNA, 15 bp, Homo sapiens
agatctgagaatgga

SEQ ID NO: 1142088 - DNA, 15 bp, Homo sapiens
gagatctgagaatgg

SEQ ID NO: 1142089 - DNA, 15 bp, Homo sapiens
tgagatctgagaatg

SEQ ID NO: 1142090 - DNA, 15 bp, Homo sapiens
ttgagatctgagaat

SEQ ID NO: 1142091 - DNA, 15 bp, Homo sapiens
tttgagatctgagaa

SEQ ID NO: 1142092 - DNA, 15 bp, Homo sapiens
atttgagatctgaga

SEQ ID NO: 1142093 - DNA, 15 bp, Homo sapiens
catttgagatctgag

SEQ ID NO: 1142094 - DNA, 15 bp, Homo sapiens
gcatttgagatctga

SEQ ID NO: 1142095 - DNA, 15 bp, Homo sapiens
agcatttgagatctg

SEQ ID NO: 1142096 - DNA, 15 bp, Homo sapiens
cagcatttgagatct

SEQ ID NO: 1142097 - DNA, 15 bp, Homo sapiens
acagcatttgagatc

SEQ ID NO: 1142098 - DNA, 15 bp, Homo sapiens
cacagcatttgagat

SEQ ID NO: 1142099 - DNA, 15 bp, Homo sapiens
gcacagcatttgaga

SEQ ID NO: 1142100 - DNA, 15 bp, Homo sapiens
agcacagcatttgag

SEQ ID NO: 1142101 - DNA, 15 bp, Homo sapiens
cagcacagcatttga

SEQ ID NO: 1142102 - DNA, 15 bp, Homo sapiens
ccagcacagcatttg

SEQ ID NO: 1142103 - DNA, 15 bp, Homo sapiens
cccagcacagcattt

SEQ ID NO: 1142104 - DNA, 15 bp, Homo sapiens
tcccagcacagcatt

SEQ ID NO: 1142105 - DNA, 15 bp, Homo sapiens
ctcccagcacagcat

SEQ ID NO: 1142106 - DNA, 15 bp, Homo sapiens
tctcccagcacagca

SEQ ID NO: 1142107 - DNA, 15 bp, Homo sapiens
ttctcccagcacagc

SEQ ID NO: 1142108 - DNA, 15 bp, Homo sapiens
gttctcccagcacag

SEQ ID NO: 1142109 - DNA, 15 bp, Homo sapiens
ggttctcccagcaca

SEQ ID NO: 1142110 - DNA, 15 bp, Homo sapiens
tggttctcccagcac

SEQ ID NO: 1142111 - DNA, 15 bp, Homo sapiens
gtggttctcccagca

SEQ ID NO: 1142112 - DNA, 15 bp, Homo sapiens
agtggttctcccagc

SEQ ID NO: 1142113 - DNA, 15 bp, Homo sapiens
tagtggttctcccag

SEQ ID NO: 1142114 - DNA, 15 bp, Homo sapiens
gtagtggttctccca

SEQ ID NO: 1142115 - DNA, 15 bp, Homo sapiens
agtagtggttctccc

SEQ ID NO: 1142116 - DNA, 15 bp, Homo sapiens
gagtagtggttctcc

SEQ ID NO: 1142117 - DNA, 15 bp, Homo sapiens
agagtagtggttctc

SEQ ID NO: 1142118 - DNA, 15 bp, Homo sapiens
gagagtagtggttct

SEQ ID NO: 1142119 - DNA, 15 bp, Homo sapiens
agagagtagtggttc

SEQ ID NO: 1142120 - DNA, 15 bp, Homo sapiens
aagagagtagtggtt

SEQ ID NO: 1142121 - DNA, 15 bp, Homo sapiens
caagagagtagtggt

SEQ ID NO: 1142122 - DNA, 15 bp, Homo sapiens
tcaagagagtagtgg

SEQ ID NO: 1142123 - DNA, 15 bp, Homo sapiens
ttcaagagagtagtg

SEQ ID NO: 1142124 - DNA, 15 bp, Homo sapiens
tttcaagagagtagt

SEQ ID NO: 1142125 - DNA, 15 bp, Homo sapiens
gtttcaagagagtag

SEQ ID NO: 1142126 - DNA, 15 bp, Homo sapiens
ggtttcaagagagta

SEQ ID NO: 1142127 - DNA, 15 bp, Homo sapiens
aggtttcaagagagt

SEQ ID NO: 1142128 - DNA, 15 bp, Homo sapiens
caggtttcaagagag

SEQ ID NO: 1142129 - DNA, 15 bp, Homo sapiens
acaggtttcaagaga

SEQ ID NO: 1142130 - DNA, 15 bp, Homo sapiens
gacaggtttcaagag

SEQ ID NO: 1142131 - DNA, 15 bp, Homo sapiens
tgacaggtttcaaga

SEQ ID NO: 1142132 - DNA, 15 bp, Homo sapiens
ctgacaggtttcaag

SEQ ID NO: 1142133 - DNA, 15 bp, Homo sapiens
tctgacaggtttcaa

SEQ ID NO: 1142134 - DNA, 15 bp, Homo sapiens
gtctgacaggtttca

SEQ ID NO: 1142135 - DNA, 15 bp, Homo sapiens
tgtctgacaggtttc

SEQ ID NO: 1142136 - DNA, 15 bp, Homo sapiens
ctgtctgacaggttt

SEQ ID NO: 1142137 - DNA, 15 bp, Homo sapiens
cctgtctgacaggtt

SEQ ID NO: 1142138 - DNA, 15 bp, Homo sapiens
ccctgtctgacaggt

SEQ ID NO: 1142139 - DNA, 15 bp, Homo sapiens
tccctgtctgacagg

SEQ ID NO: 1142140 - DNA, 15 bp, Homo sapiens
gtccctgtctgacag

SEQ ID NO: 1142141 - DNA, 15 bp, Homo sapiens
tgtccctgtctgaca

SEQ ID NO: 1142142 - DNA, 15 bp, Homo sapiens
atgtccctgtctgac

SEQ ID NO: 1142143 - DNA, 15 bp, Homo sapiens
aatgtccctgtctga

SEQ ID NO: 1142144 - DNA, 15 bp, Homo sapiens
aaatgtccctgtctg

SEQ ID NO: 1142145 - DNA, 15 bp, Homo sapiens
taaatgtccctgtct

SEQ ID NO: 1142146 - DNA, 15 bp, Homo sapiens
ttaaatgtccctgtc

SEQ ID NO: 1142147 - DNA, 15 bp, Homo sapiens
cttaaatgtccctgt

SEQ ID NO: 1142148 - DNA, 15 bp, Homo sapiens
acttaaatgtccctg

SEQ ID NO: 1142149 - DNA, 15 bp, Homo sapiens
gacttaaatgtccct

SEQ ID NO: 1142150 - DNA, 15 bp, Homo sapiens
agacttaaatgtccc

SEQ ID NO: 1142151 - DNA, 15 bp, Homo sapiens
cagacttaaatgtcc

SEQ ID NO: 1142152 - DNA, 15 bp, Homo sapiens
gcagacttaaatgtc

SEQ ID NO: 1142153 - DNA, 15 bp, Homo sapiens
tgcagacttaaatgt

SEQ ID NO: 1142154 - DNA, 15 bp, Homo sapiens
ctgcagacttaaatg

SEQ ID NO: 1142155 - DNA, 15 bp, Homo sapiens
tctgcagacttaaat

SEQ ID NO: 1142156 - DNA, 15 bp, Homo sapiens
ctctgcagacttaaa

SEQ ID NO: 1142157 - DNA, 15 bp, Homo sapiens
cctctgcagacttaa

SEQ ID NO: 1142158 - DNA, 15 bp, Homo sapiens
acctctgcagactta

SEQ ID NO: 1142159 - DNA, 15 bp, Homo sapiens
aacctctgcagactt

SEQ ID NO: 1142160 - DNA, 15 bp, Homo sapiens
aaacctctgcagact

SEQ ID NO: 1142161 - DNA, 15 bp, Homo sapiens
gaaacctctgcagac

SEQ ID NO: 1142162 - DNA, 15 bp, Homo sapiens
agaaacctctgcaga

SEQ ID NO: 1142163 - DNA, 15 bp, Homo sapiens
cagaaacctctgcag

SEQ ID NO: 1142164 - DNA, 15 bp, Homo sapiens
gcagaaacctctgca

SEQ ID NO: 1142165 - DNA, 15 bp, Homo sapiens
agcagaaacctctgc

SEQ ID NO: 1142166 - DNA, 15 bp, Homo sapiens
cagcagaaacctctg

SEQ ID NO: 1142167 - DNA, 15 bp, Homo sapiens
gcagcagaaacctct

SEQ ID NO: 1142168 - DNA, 15 bp, Homo sapiens
ggcagcagaaacctc

SEQ ID NO: 1142169 - DNA, 15 bp, Homo sapiens
aggcagcagaaacct

SEQ ID NO: 1142170 - DNA, 15 bp, Homo sapiens
aaggcagcagaaacc

SEQ ID NO: 1142171 - DNA, 15 bp, Homo sapiens
aaaggcagcagaaac

SEQ ID NO: 1142172 - DNA, 15 bp, Homo sapiens
aaaaggcagcagaaa

SEQ ID NO: 1142173 - DNA, 15 bp, Homo sapiens
caaaaggcagcagaa

SEQ ID NO: 1142174 - DNA, 15 bp, Homo sapiens
acaaaaggcagcaga

SEQ ID NO: 1142175 - DNA, 15 bp, Homo sapiens
aacaaaaggcagcag

SEQ ID NO: 1142176 - DNA, 15 bp, Homo sapiens
gaacaaaaggcagca

SEQ ID NO: 1142177 - DNA, 15 bp, Homo sapiens
tgaacaaaaggcagc

SEQ ID NO: 1142178 - DNA, 15 bp, Homo sapiens
ctgaacaaaaggcag

SEQ ID NO: 1142179 - DNA, 15 bp, Homo sapiens
gctgaacaaaaggca

SEQ ID NO: 1142180 - DNA, 15 bp, Homo sapiens
agctgaacaaaaggc

SEQ ID NO: 1142181 - DNA, 15 bp, Homo sapiens
tagctgaacaaaagg

SEQ ID NO: 1142182 - DNA, 15 bp, Homo sapiens
atagctgaacaaaag

SEQ ID NO: 1142183 - DNA, 15 bp, Homo sapiens
catagctgaacaaaa

SEQ ID NO: 1142184 - DNA, 15 bp, Homo sapiens
gcatagctgaacaaa

SEQ ID NO: 1142185 - DNA, 15 bp, Homo sapiens
ggcatagctgaacaa

SEQ ID NO: 1142186 - DNA, 15 bp, Homo sapiens
gggcatagctgaaca

SEQ ID NO: 1142187 - DNA, 15 bp, Homo sapiens
agggcatagctgaac

SEQ ID NO: 1142188 - DNA, 15 bp, Homo sapiens
tagggcatagctgaa

SEQ ID NO: 1142189 - DNA, 15 bp, Homo sapiens
gtagggcatagctga

SEQ ID NO: 1142190 - DNA, 15 bp, Homo sapiens
ggtagggcatagctg

SEQ ID NO: 1142191 - DNA, 15 bp, Homo sapiens
gggtagggcatagct

SEQ ID NO: 1142192 - DNA, 15 bp, Homo sapiens
ggggtagggcatagc

SEQ ID NO: 1142193 - DNA, 15 bp, Homo sapiens
aggggtagggcatag

SEQ ID NO: 1142194 - DNA, 15 bp, Homo sapiens
taggggtagggcata

SEQ ID NO: 1142195 - DNA, 15 bp, Homo sapiens
ctaggggtagggcat

SEQ ID NO: 1142196 - DNA, 15 bp, Homo sapiens
tctaggggtagggca

SEQ ID NO: 1142197 - DNA, 15 bp, Homo sapiens
ctctaggggtagggc

SEQ ID NO: 1142198 - DNA, 15 bp, Homo sapiens
cctctaggggtaggg

SEQ ID NO: 1142199 - DNA, 15 bp, Homo sapiens
gcctctaggggtagg

SEQ ID NO: 1142200 - DNA, 15 bp, Homo sapiens
tgcctctaggggtag

SEQ ID NO: 1142201 - DNA, 15 bp, Homo sapiens
ctgcctctaggggta

SEQ ID NO: 1142202 - DNA, 15 bp, Homo sapiens
tctgcctctaggggt

SEQ ID NO: 1142203 - DNA, 15 bp, Homo sapiens
ctctgcctctagggg

SEQ ID NO: 1142204 - DNA, 15 bp, Homo sapiens
actctgcctctaggg

SEQ ID NO: 1142205 - DNA, 15 bp, Homo sapiens
gactctgcctctagg

SEQ ID NO: 1142206 - DNA, 15 bp, Homo sapiens
agactctgcctctag

SEQ ID NO: 1142207 - DNA, 15 bp, Homo sapiens
tagactctgcctcta

SEQ ID NO: 1142208 - DNA, 15 bp, Homo sapiens
gtagactctgcctct

SEQ ID NO: 1142209 - DNA, 15 bp, Homo sapiens
tgtagactctgcctc

SEQ ID NO: 1142210 - DNA, 15 bp, Homo sapiens
ctgtagactctgcct

SEQ ID NO: 1142211 - DNA, 15 bp, Homo sapiens
tctgtagactctgcc

SEQ ID NO: 1142212 - DNA, 15 bp, Homo sapiens
ctctgtagactctgc

SEQ ID NO: 1142213 - DNA, 15 bp, Homo sapiens
cctctgtagactctg

SEQ ID NO: 1142214 - DNA, 15 bp, Homo sapiens
gcctctgtagactct

SEQ ID NO: 1142215 - DNA, 15 bp, Homo sapiens
tgcctctgtagactc

SEQ ID NO: 1142216 - DNA, 15 bp, Homo sapiens
ctgcctctgtagact

SEQ ID NO: 1142217 - DNA, 15 bp, Homo sapiens
cctgcctctgtagac

SEQ ID NO: 1142218 - DNA, 15 bp, Homo sapiens
gcctgcctctgtaga

SEQ ID NO: 1142219 - DNA, 15 bp, Homo sapiens
tgcctgcctctgtag

SEQ ID NO: 1142220 - DNA, 15 bp, Homo sapiens
ctgcctgcctctgta

SEQ ID NO: 1142221 - DNA, 15 bp, Homo sapiens
cctgcctgcctctgt

SEQ ID NO: 1142222 - DNA, 15 bp, Homo sapiens
acctgcctgcctctg

SEQ ID NO: 1142223 - DNA, 15 bp, Homo sapiens
gacctgcctgcctct

SEQ ID NO: 1142224 - DNA, 15 bp, Homo sapiens
agacctgcctgcctc

SEQ ID NO: 1142225 - DNA, 15 bp, Homo sapiens
gagacctgcctgcct

SEQ ID NO: 1142226 - DNA, 15 bp, Homo sapiens
agagacctgcctgcc

SEQ ID NO: 1142227 - DNA, 15 bp, Homo sapiens
aagagacctgcctgc

SEQ ID NO: 1142228 - DNA, 15 bp, Homo sapiens
aaagagacctgcctg

SEQ ID NO: 1142229 - DNA, 15 bp, Homo sapiens
caaagagacctgcct

SEQ ID NO: 1142230 - DNA, 15 bp, Homo sapiens
tcaaagagacctgcc

SEQ ID NO: 1142231 - DNA, 15 bp, Homo sapiens
ctcaaagagacctgc

SEQ ID NO: 1142232 - DNA, 15 bp, Homo sapiens
gctcaaagagacctg

SEQ ID NO: 1142233 - DNA, 15 bp, Homo sapiens
agctcaaagagacct

SEQ ID NO: 1142234 - DNA, 15 bp, Homo sapiens
cagctcaaagagacc

SEQ ID NO: 1142235 - DNA, 15 bp, Homo sapiens
acagctcaaagagac

SEQ ID NO: 1142236 - DNA, 15 bp, Homo sapiens
cacagctcaaagaga

SEQ ID NO: 1142237 - DNA, 15 bp, Homo sapiens
ccacagctcaaagag

SEQ ID NO: 1142238 - DNA, 15 bp, Homo sapiens
accacagctcaaaga

SEQ ID NO: 1142239 - DNA, 15 bp, Homo sapiens
caccacagctcaaag

SEQ ID NO: 1142240 - DNA, 15 bp, Homo sapiens
ccaccacagctcaaa

SEQ ID NO: 1142241 - DNA, 15 bp, Homo sapiens
cccaccacagctcaa

SEQ ID NO: 1142242 - DNA, 15 bp, Homo sapiens
gcccaccacagctca

SEQ ID NO: 1142243 - DNA, 15 bp, Homo sapiens
agcccaccacagctc

SEQ ID NO: 1142244 - DNA, 15 bp, Homo sapiens
gagcccaccacagct

SEQ ID NO: 1142245 - DNA, 15 bp, Homo sapiens
ggagcccaccacagc

SEQ ID NO: 1142246 - DNA, 15 bp, Homo sapiens
tggagcccaccacag

SEQ ID NO: 1142247 - DNA, 15 bp, Homo sapiens
gtggagcccaccaca

SEQ ID NO: 1142248 - DNA, 15 bp, Homo sapiens
ggtggagcccaccac

SEQ ID NO: 1142249 - DNA, 15 bp, Homo sapiens
gggtggagcccacca

SEQ ID NO: 1142250 - DNA, 15 bp, Homo sapiens
tgggtggagcccacc

SEQ ID NO: 1142251 - DNA, 15 bp, Homo sapiens
ctgggtggagcccac

SEQ ID NO: 1142252 - DNA, 15 bp, Homo sapiens
actgggtggagccca

SEQ ID NO: 1142253 - DNA, 15 bp, Homo sapiens
aactgggtggagccc

SEQ ID NO: 1142254 - DNA, 15 bp, Homo sapiens
gaactgggtggagcc

SEQ ID NO: 1142255 - DNA, 15 bp, Homo sapiens
ggaactgggtggagc

SEQ ID NO: 1142256 - DNA, 15 bp, Homo sapiens
aggaactgggtggag

SEQ ID NO: 1142257 - DNA, 15 bp, Homo sapiens
caggaactgggtgga

SEQ ID NO: 1142258 - DNA, 15 bp, Homo sapiens
ccaggaactgggtgg

SEQ ID NO: 1142259 - DNA, 15 bp, Homo sapiens
gccaggaactgggtg

SEQ ID NO: 1142260 - DNA, 15 bp, Homo sapiens
ggccaggaactgggt

SEQ ID NO: 1142261 - DNA, 15 bp, Homo sapiens
cggccaggaactggg

SEQ ID NO: 1142262 - DNA, 15 bp, Homo sapiens
gcggccaggaactgg

SEQ ID NO: 1142263 - DNA, 15 bp, Homo sapiens
agcggccaggaactg

SEQ ID NO: 1142264 - DNA, 15 bp, Homo sapiens
aagcggccaggaact

SEQ ID NO: 1142265 - DNA, 15 bp, Homo sapiens
aaagcggccaggaac

SEQ ID NO: 1142266 - DNA, 15 bp, Homo sapiens
caaagcggccaggaa

SEQ ID NO: 1142267 - DNA, 15 bp, Homo sapiens
acaaagcggccagga

SEQ ID NO: 1142268 - DNA, 15 bp, Homo sapiens
aacaaagcggccagg

SEQ ID NO: 1142269 - DNA, 15 bp, Homo sapiens
aaacaaagcggccag

SEQ ID NO: 1142270 - DNA, 15 bp, Homo sapiens
taaacaaagcggcca

SEQ ID NO: 1142271 - DNA, 15 bp, Homo sapiens
gtaaacaaagcggcc

SEQ ID NO: 1142272 - DNA, 15 bp, Homo sapiens
ggtaaacaaagcggc

SEQ ID NO: 1142273 - DNA, 15 bp, Homo sapiens
aggtaaacaaagcgg

SEQ ID NO: 1142274 - DNA, 15 bp, Homo sapiens
taggtaaacaaagcg

SEQ ID NO: 1142275 - DNA, 15 bp, Homo sapiens
gtaggtaaacaaagc

SEQ ID NO: 1142276 - DNA, 15 bp, Homo sapiens
agtaggtaaacaaag

SEQ ID NO: 1142277 - DNA, 15 bp, Homo sapiens
gagtaggtaaacaaa

SEQ ID NO: 1142278 - DNA, 15 bp, Homo sapiens
tgagtaggtaaacaa

SEQ ID NO: 1142279 - DNA, 15 bp, Homo sapiens
ttgagtaggtaaaca

SEQ ID NO: 1142280 - DNA, 15 bp, Homo sapiens
cttgagtaggtaaac

SEQ ID NO: 1142281 - DNA, 15 bp, Homo sapiens
tcttgagtaggtaaa

SEQ ID NO: 1142282 - DNA, 15 bp, Homo sapiens
ctcttgagtaggtaa

SEQ ID NO: 1142283 - DNA, 15 bp, Homo sapiens
gctcttgagtaggta

SEQ ID NO: 1142284 - DNA, 15 bp, Homo sapiens
agctcttgagtaggt

SEQ ID NO: 1142285 - DNA, 15 bp, Homo sapiens
aagctcttgagtagg

SEQ ID NO: 1142286 - DNA, 15 bp, Homo sapiens
gaagctcttgagtag

SEQ ID NO: 1142287 - DNA, 15 bp, Homo sapiens
ggaagctcttgagta

SEQ ID NO: 1142288 - DNA, 15 bp, Homo sapiens
aggaagctcttgagt

SEQ ID NO: 1142289 - DNA, 15 bp, Homo sapiens
caggaagctcttgag

SEQ ID NO: 1142290 - DNA, 15 bp, Homo sapiens
ccaggaagctcttga

SEQ ID NO: 1142291 - DNA, 15 bp, Homo sapiens
gccaggaagctcttg

SEQ ID NO: 1142292 - DNA, 15 bp, Homo sapiens
ggccaggaagctctt

SEQ ID NO: 1142293 - DNA, 15 bp, Homo sapiens
cggccaggaagctct

SEQ ID NO: 1142294 - DNA, 15 bp, Homo sapiens
gcggccaggaagctc

SEQ ID NO: 1142295 - DNA, 15 bp, Homo sapiens
agcggccaggaagct

SEQ ID NO: 1142296 - DNA, 15 bp, Homo sapiens
aagcggccaggaagc

SEQ ID NO: 1142297 - DNA, 15 bp, Homo sapiens
aaagcggccaggaag

SEQ ID NO: 1142298 - DNA, 15 bp, Homo sapiens
acttgagtaggtaaa

SEQ ID NO: 1142299 - DNA, 15 bp, Homo sapiens
gacttgagtaggtaa

SEQ ID NO: 1142300 - DNA, 15 bp, Homo sapiens
agacttgagtaggta

SEQ ID NO: 1142301 - DNA, 15 bp, Homo sapiens
gagacttgagtaggt

SEQ ID NO: 1142302 - DNA, 15 bp, Homo sapiens
tgagacttgagtagg

SEQ ID NO: 1142303 - DNA, 15 bp, Homo sapiens
ctgagacttgagtag

SEQ ID NO: 1142304 - DNA, 15 bp, Homo sapiens
gctgagacttgagta

SEQ ID NO: 1142305 - DNA, 15 bp, Homo sapiens
agctgagacttgagt

SEQ ID NO: 1142306 - DNA, 15 bp, Homo sapiens
tagctgagacttgag

SEQ ID NO: 1142307 - DNA, 15 bp, Homo sapiens
atagctgagacttga

SEQ ID NO: 1142308 - DNA, 15 bp, Homo sapiens
catagctgagacttg

SEQ ID NO: 1142309 - DNA, 15 bp, Homo sapiens
ccatagctgagactt

SEQ ID NO: 1142310 - DNA, 15 bp, Homo sapiens
tccatagctgagact

SEQ ID NO: 1142311 - DNA, 15 bp, Homo sapiens
ctccatagctgagac

SEQ ID NO: 1142312 - DNA, 15 bp, Homo sapiens
cctccatagctgaga

SEQ ID NO: 1142313 - DNA, 15 bp, Homo sapiens
ccctccatagctgag

SEQ ID NO: 1142314 - DNA, 15 bp, Homo sapiens
gccctccatagctga

SEQ ID NO: 1142315 - DNA, 15 bp, Homo sapiens
tgccctccatagctg

SEQ ID NO: 1142316 - DNA, 15 bp, Homo sapiens
gtgccctccatagct

SEQ ID NO: 1142317 - DNA, 15 bp, Homo sapiens
ggtgccctccatagc

SEQ ID NO: 1142318 - DNA, 15 bp, Homo sapiens
gggtgccctccatag

SEQ ID NO: 1142319 - DNA, 15 bp, Homo sapiens
agggtgccctccata

SEQ ID NO: 1142320 - DNA, 15 bp, Homo sapiens
aagggtgccctccat

SEQ ID NO: 1142321 - DNA, 15 bp, Homo sapiens
gaagggtgccctcca

SEQ ID NO: 1142322 - DNA, 15 bp, Homo sapiens
ggaagggtgccctcc

SEQ ID NO: 1142323 - DNA, 15 bp, Homo sapiens
gggaagggtgccctc

SEQ ID NO: 1142324 - DNA, 15 bp, Homo sapiens
ggggaagggtgccct

SEQ ID NO: 1142325 - DNA, 15 bp, Homo sapiens
gggggaagggtgccc

SEQ ID NO: 1142326 - DNA, 15 bp, Homo sapiens
tgggggaagggtgcc

SEQ ID NO: 1142327 - DNA, 15 bp, Homo sapiens
ctgggggaagggtgc

SEQ ID NO: 1142328 - DNA, 15 bp, Homo sapiens
gctgggggaagggtg

SEQ ID NO: 1142329 - DNA, 15 bp, Homo sapiens
ggctgggggaagggt

SEQ ID NO: 1142330 - DNA, 15 bp, Homo sapiens
aggctgggggaaggg

SEQ ID NO: 1142331 - DNA, 15 bp, Homo sapiens
gaggctgggggaagg

SEQ ID NO: 1142332 - DNA, 15 bp, Homo sapiens
cgaggctgggggaag

SEQ ID NO: 1142333 - DNA, 15 bp, Homo sapiens
gcgaggctgggggaa

SEQ ID NO: 1142334 - DNA, 15 bp, Homo sapiens
agcgaggctggggga

SEQ ID NO: 1142335 - DNA, 15 bp, Homo sapiens
cagcgaggctggggg

SEQ ID NO: 1142336 - DNA, 15 bp, Homo sapiens
gcagcgaggctgggg

SEQ ID NO: 1142337 - DNA, 15 bp, Homo sapiens
ggcagcgaggctggg

SEQ ID NO: 1142338 - DNA, 15 bp, Homo sapiens
tggcagcgaggctgg

SEQ ID NO: 1142339 - DNA, 15 bp, Homo sapiens
gtggcagcgaggctg

SEQ ID NO: 1142340 - DNA, 15 bp, Homo sapiens
ggtggcagcgaggct

SEQ ID NO: 1142341 - DNA, 15 bp, Homo sapiens
aggtggcagcgaggc

SEQ ID NO: 1142342 - DNA, 15 bp, Homo sapiens
aaggtggcagcgagg

SEQ ID NO: 1142343 - DNA, 15 bp, Homo sapiens
caaggtggcagcgag

SEQ ID NO: 1142344 - DNA, 15 bp, Homo sapiens
gcaaggtggcagcga

SEQ ID NO: 1142345 - DNA, 15 bp, Homo sapiens
tgcaaggtggcagcg

SEQ ID NO: 1142346 - DNA, 15 bp, Homo sapiens
ctgcaaggtggcagc

SEQ ID NO: 1142347 - DNA, 15 bp, Homo sapiens
tctgcaaggtggcag

SEQ ID NO: 1142348 - DNA, 15 bp, Homo sapiens
atctgcaaggtggca

SEQ ID NO: 1142349 - DNA, 15 bp, Homo sapiens
aatctgcaaggtggc

SEQ ID NO: 1142350 - DNA, 15 bp, Homo sapiens
caatctgcaaggtgg

SEQ ID NO: 1142351 - DNA, 15 bp, Homo sapiens
tcaatctgcaaggtg

SEQ ID NO: 1142352 - DNA, 15 bp, Homo sapiens
atcaatctgcaaggt

SEQ ID NO: 1142353 - DNA, 15 bp, Homo sapiens
aatcaatctgcaagg

SEQ ID NO: 1142354 - DNA, 15 bp, Homo sapiens
aaatcaatctgcaag

SEQ ID NO: 1142355 - DNA, 15 bp, Homo sapiens
gaaatcaatctgcaa

SEQ ID NO: 1142356 - DNA, 15 bp, Homo sapiens
tgaaatcaatctgca

SEQ ID NO: 1142357 - DNA, 15 bp, Homo sapiens
ctgaaatcaatctgc

SEQ ID NO: 1142358 - DNA, 15 bp, Homo sapiens
tctgaaatcaatctg

SEQ ID NO: 1142359 - DNA, 15 bp, Homo sapiens
gtctgaaatcaatct

SEQ ID NO: 1142360 - DNA, 15 bp, Homo sapiens
agtctgaaatcaatc

SEQ ID NO: 1142361 - DNA, 15 bp, Homo sapiens
cagtctgaaatcaat

SEQ ID NO: 1142362 - DNA, 15 bp, Homo sapiens
gcagtctgaaatcaa

SEQ ID NO: 1142363 - DNA, 15 bp, Homo sapiens
agcagtctgaaatca

SEQ ID NO: 1142364 - DNA, 15 bp, Homo sapiens
cagcagtctgaaatc

SEQ ID NO: 1142365 - DNA, 15 bp, Homo sapiens
acagcagtctgaaat

SEQ ID NO: 1142366 - DNA, 15 bp, Homo sapiens
cacagcagtctgaaa

SEQ ID NO: 1142367 - DNA, 15 bp, Homo sapiens
gcacagcagtctgaa

SEQ ID NO: 1142368 - DNA, 15 bp, Homo sapiens
agcacagcagtctga

SEQ ID NO: 1142369 - DNA, 15 bp, Homo sapiens
tagcacagcagtctg

SEQ ID NO: 1142370 - DNA, 15 bp, Homo sapiens
ctagcacagcagtct

SEQ ID NO: 1142371 - DNA, 15 bp, Homo sapiens
gctagcacagcagtc

SEQ ID NO: 1142372 - DNA, 15 bp, Homo sapiens
tgctagcacagcagt

SEQ ID NO: 1142373 - DNA, 15 bp, Homo sapiens
ttgctagcacagcag

SEQ ID NO: 1142374 - DNA, 15 bp, Homo sapiens
attgctagcacagca

SEQ ID NO: 1142375 - DNA, 15 bp, Homo sapiens
cattgctagcacagc

SEQ ID NO: 1142376 - DNA, 15 bp, Homo sapiens
tcattgctagcacag

SEQ ID NO: 1142377 - DNA, 15 bp, Homo sapiens
ctcattgctagcaca

SEQ ID NO: 1142378 - DNA, 15 bp, Homo sapiens
gctcattgctagcac

SEQ ID NO: 1142379 - DNA, 15 bp, Homo sapiens
cgctcattgctagca

SEQ ID NO: 1142380 - DNA, 15 bp, Homo sapiens
tcgctcattgctagc

SEQ ID NO: 1142381 - DNA, 15 bp, Homo sapiens
ctcgctcattgctag

SEQ ID NO: 1142382 - DNA, 15 bp, Homo sapiens
cctcgctcattgcta

SEQ ID NO: 1142383 - DNA, 15 bp, Homo sapiens
gcctcgctcattgct

SEQ ID NO: 1142384 - DNA, 15 bp, Homo sapiens
agcctcgctcattgc

SEQ ID NO: 1142385 - DNA, 15 bp, Homo sapiens
aagcctcgctcattg

SEQ ID NO: 1142386 - DNA, 15 bp, Homo sapiens
gaagcctcgctcatt

SEQ ID NO: 1142387 - DNA, 15 bp, Homo sapiens
cgaagcctcgctcat

SEQ ID NO: 1142388 - DNA, 15 bp, Homo sapiens
acgaagcctcgctca

SEQ ID NO: 1142389 - DNA, 15 bp, Homo sapiens
cacgaagcctcgctc

SEQ ID NO: 1142390 - DNA, 15 bp, Homo sapiens
ccacgaagcctcgct

SEQ ID NO: 1142391 - DNA, 15 bp, Homo sapiens
cccacgaagcctcgc

SEQ ID NO: 1142392 - DNA, 15 bp, Homo sapiens
acccacgaagcctcg

SEQ ID NO: 1142393 - DNA, 15 bp, Homo sapiens
cacccacgaagcctc

SEQ ID NO: 1142394 - DNA, 15 bp, Homo sapiens
acacccacgaagcct

SEQ ID NO: 1142395 - DNA, 15 bp, Homo sapiens
cacacccacgaagcc

SEQ ID NO: 1142396 - DNA, 15 bp, Homo sapiens
ccacacccacgaagc

SEQ ID NO: 1142397 - DNA, 15 bp, Homo sapiens
cccacacccacgaag

SEQ ID NO: 1142398 - DNA, 15 bp, Homo sapiens
tcccacacccacgaa

SEQ ID NO: 1142399 - DNA, 15 bp, Homo sapiens
gtcccacacccacga

SEQ ID NO: 1142400 - DNA, 15 bp, Homo sapiens
ggtcccacacccacg

SEQ ID NO: 1142401 - DNA, 15 bp, Homo sapiens
gggtcccacacccac

SEQ ID NO: 1142402 - DNA, 15 bp, Homo sapiens
agggtcccacaccca

SEQ ID NO: 1142403 - DNA, 15 bp, Homo sapiens
gagggtcccacaccc

SEQ ID NO: 1142404 - DNA, 15 bp, Homo sapiens
agagggtcccacacc

SEQ ID NO: 1142405 - DNA, 15 bp, Homo sapiens
cagagggtcccacac

SEQ ID NO: 1142406 - DNA, 15 bp, Homo sapiens
tcagagggtcccaca

SEQ ID NO: 1142407 - DNA, 15 bp, Homo sapiens
ctcagagggtcccac

SEQ ID NO: 1142408 - DNA, 15 bp, Homo sapiens
gctcagagggtccca

SEQ ID NO: 1142409 - DNA, 15 bp, Homo sapiens
ggctcagagggtccc

SEQ ID NO: 1142410 - DNA, 15 bp, Homo sapiens
tggctcagagggtcc

SEQ ID NO: 1142411 - DNA, 15 bp, Homo sapiens
ctggctcagagggtc

SEQ ID NO: 1142412 - DNA, 15 bp, Homo sapiens
cctggctcagagggt

SEQ ID NO: 1142413 - DNA, 15 bp, Homo sapiens
gcctggctcagaggg

SEQ ID NO: 1142414 - DNA, 15 bp, Homo sapiens
cgcctggctcagagg

SEQ ID NO: 1142415 - DNA, 15 bp, Homo sapiens
acgcctggctcagag

SEQ ID NO: 1142416 - DNA, 15 bp, Homo sapiens
cacgcctggctcaga

SEQ ID NO: 1142417 - DNA, 15 bp, Homo sapiens
ccacgcctggctcag

SEQ ID NO: 1142418 - DNA, 15 bp, Homo sapiens
cccacgcctggctca

SEQ ID NO: 1142419 - DNA, 15 bp, Homo sapiens
tcccacgcctggctc

SEQ ID NO: 1142420 - DNA, 15 bp, Homo sapiens
atcccacgcctggct

SEQ ID NO: 1142421 - DNA, 15 bp, Homo sapiens
catcccacgcctggc

SEQ ID NO: 1142422 - DNA, 15 bp, Homo sapiens
acatcccacgcctgg

SEQ ID NO: 1142423 - DNA, 15 bp, Homo sapiens
tacatcccacgcctg

SEQ ID NO: 1142424 - DNA, 15 bp, Homo sapiens
ttacatcccacgcct

SEQ ID NO: 1142425 - DNA, 15 bp, Homo sapiens
attacatcccacgcc

SEQ ID NO: 1142426 - DNA, 15 bp, Homo sapiens
gattacatcccacgc

SEQ ID NO: 1142427 - DNA, 15 bp, Homo sapiens
agattacatcccacg

SEQ ID NO: 1142428 - DNA, 15 bp, Homo sapiens
gagattacatcccac

SEQ ID NO: 1142429 - DNA, 15 bp, Homo sapiens
ggagattacatccca

SEQ ID NO: 1142430 - DNA, 15 bp, Homo sapiens
aggagattacatccc

SEQ ID NO: 1142431 - DNA, 15 bp, Homo sapiens
caggagattacatcc

SEQ ID NO: 1142432 - DNA, 15 bp, Homo sapiens
tcaggagattacatc

SEQ ID NO: 1142433 - DNA, 15 bp, Homo sapiens
atcaggagattacat

SEQ ID NO: 1142434 - DNA, 15 bp, Homo sapiens
catcaggagattaca

SEQ ID NO: 1142435 - DNA, 15 bp, Homo sapiens
acatcaggagattac

SEQ ID NO: 1142436 - DNA, 15 bp, Homo sapiens
cacatcaggagatta

SEQ ID NO: 1142437 - DNA, 15 bp, Homo sapiens
gcacatcaggagatt

SEQ ID NO: 1142438 - DNA, 15 bp, Homo sapiens
ggcacatcaggagat

SEQ ID NO: 1142439 - DNA, 15 bp, Homo sapiens
cggcacatcaggaga

SEQ ID NO: 1142440 - DNA, 15 bp, Homo sapiens
acggcacatcaggag

SEQ ID NO: 1142441 - DNA, 15 bp, Homo sapiens
aacggcacatcagga

SEQ ID NO: 1142442 - DNA, 15 bp, Homo sapiens
aaacggcacatcagg

SEQ ID NO: 1142443 - DNA, 15 bp, Homo sapiens
caaacggcacatcag

SEQ ID NO: 1142444 - DNA, 15 bp, Homo sapiens
gcaaacggcacatca

SEQ ID NO: 1142445 - DNA, 15 bp, Homo sapiens
agcaaacggcacatc

SEQ ID NO: 1142446 - DNA, 15 bp, Homo sapiens
tagcaaacggcacat

SEQ ID NO: 1142447 - DNA, 15 bp, Homo sapiens
ttagcaaacggcaca

SEQ ID NO: 1142448 - DNA, 15 bp, Homo sapiens
cttagcaaacggcac

SEQ ID NO: 1142449 - DNA, 15 bp, Homo sapiens
tcttagcaaacggca

SEQ ID NO: 1142450 - DNA, 15 bp, Homo sapiens
gtcttagcaaacggc

SEQ ID NO: 1142451 - DNA, 15 bp, Homo sapiens
ggtcttagcaaacgg

SEQ ID NO: 1142452 - DNA, 15 bp, Homo sapiens
tggtcttagcaaacg

SEQ ID NO: 1142453 - DNA, 15 bp, Homo sapiens
atggtcttagcaaac

SEQ ID NO: 1142454 - DNA, 15 bp, Homo sapiens
aatggtcttagcaaa

SEQ ID NO: 1142455 - DNA, 15 bp, Homo sapiens
caatggtcttagcaa

SEQ ID NO: 1142456 - DNA, 15 bp, Homo sapiens
ccaatggtcttagca

SEQ ID NO: 1142457 - DNA, 15 bp, Homo sapiens
tccaatggtcttagc

SEQ ID NO: 1142458 - DNA, 15 bp, Homo sapiens
ttccaatggtcttag

SEQ ID NO: 1142459 - DNA, 15 bp, Homo sapiens
tttccaatggtctta

SEQ ID NO: 1142460 - DNA, 15 bp, Homo sapiens
ttttccaatggtctt

SEQ ID NO: 1142461 - DNA, 15 bp, Homo sapiens
cttttccaatggtct

SEQ ID NO: 1142462 - DNA, 15 bp, Homo sapiens
gcttttccaatggtc

SEQ ID NO: 1142463 - DNA, 15 bp, Homo sapiens
cgcttttccaatggt

SEQ ID NO: 1142464 - DNA, 15 bp, Homo sapiens
gcgcttttccaatgg

SEQ ID NO: 1142465 - DNA, 15 bp, Homo sapiens
tgcgcttttccaatg

SEQ ID NO: 1142466 - DNA, 15 bp, Homo sapiens
ctgcgcttttccaat

SEQ ID NO: 1142467 - DNA, 15 bp, Homo sapiens
actgcgcttttccaa

SEQ ID NO: 1142468 - DNA, 15 bp, Homo sapiens
tactgcgcttttcca

SEQ ID NO: 1142469 - DNA, 15 bp, Homo sapiens
atactgcgcttttcc

SEQ ID NO: 1142470 - DNA, 15 bp, Homo sapiens
aatactgcgcttttc

SEQ ID NO: 1142471 - DNA, 15 bp, Homo sapiens
taatactgcgctttt

SEQ ID NO: 1142472 - DNA, 15 bp, Homo sapiens
ctaatactgcgcttt

SEQ ID NO: 1142473 - DNA, 15 bp, Homo sapiens
cctaatactgcgctt

SEQ ID NO: 1142474 - DNA, 15 bp, Homo sapiens
ccctaatactgcgct

SEQ ID NO: 1142475 - DNA, 15 bp, Homo sapiens
accctaatactgcgc

SEQ ID NO: 1142476 - DNA, 15 bp, Homo sapiens
caccctaatactgcg

SEQ ID NO: 1142477 - DNA, 15 bp, Homo sapiens
tcaccctaatactgc

SEQ ID NO: 1142478 - DNA, 15 bp, Homo sapiens
ctcaccctaatactg

SEQ ID NO: 1142479 - DNA, 15 bp, Homo sapiens
tctcaccctaatact

SEQ ID NO: 1142480 - DNA, 15 bp, Homo sapiens
ctctcaccctaatac

SEQ ID NO: 1142481 - DNA, 15 bp, Homo sapiens
actctcaccctaata

SEQ ID NO: 1142482 - DNA, 15 bp, Homo sapiens
cactctcaccctaat

SEQ ID NO: 1142483 - DNA, 15 bp, Homo sapiens
tcactctcaccctaa

SEQ ID NO: 1142484 - DNA, 15 bp, Homo sapiens
gtcactctcacccta

SEQ ID NO: 1142485 - DNA, 15 bp, Homo sapiens
ggtcactctcaccct

SEQ ID NO: 1142486 - DNA, 15 bp, Homo sapiens
gggtcactctcaccc

SEQ ID NO: 1142487 - DNA, 15 bp, Homo sapiens
cgggtcactctcacc

SEQ ID NO: 1142488 - DNA, 15 bp, Homo sapiens
tcgggtcactctcac

SEQ ID NO: 1142489 - DNA, 15 bp, Homo sapiens
atcgggtcactctca

SEQ ID NO: 1142490 - DNA, 15 bp, Homo sapiens
aatcgggtcactctc

SEQ ID NO: 1142491 - DNA, 15 bp, Homo sapiens
aaatcgggtcactct

SEQ ID NO: 1142492 - DNA, 15 bp, Homo sapiens
aaaatcgggtcactc

SEQ ID NO: 1142493 - DNA, 15 bp, Homo sapiens
gaaaatcgggtcact

SEQ ID NO: 1142494 - DNA, 15 bp, Homo sapiens
ggaaaatcgggtcac

SEQ ID NO: 1142495 - DNA, 15 bp, Homo sapiens
tggaaaatcgggtca

SEQ ID NO: 1142496 - DNA, 15 bp, Homo sapiens
ctggaaaatcgggtc

SEQ ID NO: 1142497 - DNA, 15 bp, Homo sapiens
cctggaaaatcgggt

SEQ ID NO: 1142498 - DNA, 15 bp, Homo sapiens
acctggaaaatcggg

SEQ ID NO: 1142499 - DNA, 15 bp, Homo sapiens
cacctggaaaatcgg

SEQ ID NO: 1142500 - DNA, 15 bp, Homo sapiens
gcacctggaaaatcg

SEQ ID NO: 1142501 - DNA, 15 bp, Homo sapiens
ggcacctggaaaatc

SEQ ID NO: 1142502 - DNA, 15 bp, Homo sapiens
cggcacctggaaaat

SEQ ID NO: 1142503 - DNA, 15 bp, Homo sapiens
acggcacctggaaaa

SEQ ID NO: 1142504 - DNA, 15 bp, Homo sapiens
gacggcacctggaaa

SEQ ID NO: 1142505 - DNA, 15 bp, Homo sapiens
agacggcacctggaa

SEQ ID NO: 1142506 - DNA, 15 bp, Homo sapiens
cagacggcacctgga

SEQ ID NO: 1142507 - DNA, 15 bp, Homo sapiens
acagacggcacctgg

SEQ ID NO: 1142508 - DNA, 15 bp, Homo sapiens
gacagacggcacctg

SEQ ID NO: 1142509 - DNA, 15 bp, Homo sapiens
tgacagacggcacct

SEQ ID NO: 1142510 - DNA, 15 bp, Homo sapiens
gtgacagacggcacc

SEQ ID NO: 1142511 - DNA, 15 bp, Homo sapiens
tgtgacagacggcac

SEQ ID NO: 1142512 - DNA, 15 bp, Homo sapiens
ctgtgacagacggca

SEQ ID NO: 1142513 - DNA, 15 bp, Homo sapiens
gctgtgacagacggc

SEQ ID NO: 1142514 - DNA, 15 bp, Homo sapiens
agctgtgacagacgg

SEQ ID NO: 1142515 - DNA, 15 bp, Homo sapiens
aagctgtgacagacg

SEQ ID NO: 1142516 - DNA, 15 bp, Homo sapiens
aaagctgtgacagac

SEQ ID NO: 1142517 - DNA, 15 bp, Homo sapiens
caaagctgtgacaga

SEQ ID NO: 1142518 - DNA, 15 bp, Homo sapiens
gcaaagctgtgacag

SEQ ID NO: 1142519 - DNA, 15 bp, Homo sapiens
agcaaagctgtgaca

SEQ ID NO: 1142520 - DNA, 15 bp, Homo sapiens
aagcaaagctgtgac

SEQ ID NO: 1142521 - DNA, 15 bp, Homo sapiens
caagcaaagctgtga

SEQ ID NO: 1142522 - DNA, 15 bp, Homo sapiens
ccaagcaaagctgtg

SEQ ID NO: 1142523 - DNA, 15 bp, Homo sapiens
gccaagcaaagctgt

SEQ ID NO: 1142524 - DNA, 15 bp, Homo sapiens
agccaagcaaagctg

SEQ ID NO: 1142525 - DNA, 15 bp, Homo sapiens
tagccaagcaaagct

SEQ ID NO: 1142526 - DNA, 15 bp, Homo sapiens
ctagccaagcaaagc

SEQ ID NO: 1142527 - DNA, 15 bp, Homo sapiens
cctagccaagcaaag

SEQ ID NO: 1142528 - DNA, 15 bp, Homo sapiens
tcctagccaagcaaa

SEQ ID NO: 1142529 - DNA, 15 bp, Homo sapiens
ttcctagccaagcaa

SEQ ID NO: 1142530 - DNA, 15 bp, Homo sapiens
tttcctagccaagca

SEQ ID NO: 1142531 - DNA, 15 bp, Homo sapiens
ctttcctagccaagc

SEQ ID NO: 1142532 - DNA, 15 bp, Homo sapiens
cctttcctagccaag

SEQ ID NO: 1142533 - DNA, 15 bp, Homo sapiens
ccctttcctagccaa

SEQ ID NO: 1142534 - DNA, 15 bp, Homo sapiens
tccctttcctagcca

SEQ ID NO: 1142535 - DNA, 15 bp, Homo sapiens
ttccctttcctagcc

SEQ ID NO: 1142536 - DNA, 15 bp, Homo sapiens
attccctttcctagc

SEQ ID NO: 1142537 - DNA, 15 bp, Homo sapiens
aattccctttcctag

SEQ ID NO: 1142538 - DNA, 15 bp, Homo sapiens
gaattccctttccta

SEQ ID NO: 1142539 - DNA, 15 bp, Homo sapiens
ggaattccctttcct

SEQ ID NO: 1142540 - DNA, 15 bp, Homo sapiens
gggaattccctttcc

SEQ ID NO: 1142541 - DNA, 15 bp, Homo sapiens
agggaattccctttc

SEQ ID NO: 1142542 - DNA, 15 bp, Homo sapiens
cagggaattcccttt

SEQ ID NO: 1142543 - DNA, 15 bp, Homo sapiens
tcagggaattccctt

SEQ ID NO: 1142544 - DNA, 15 bp, Homo sapiens
gtcagggaattccct

SEQ ID NO: 1142545 - DNA, 15 bp, Homo sapiens
ggtcagggaattccc

SEQ ID NO: 1142546 - DNA, 15 bp, Homo sapiens
aggtcagggaattcc

SEQ ID NO: 1142547 - DNA, 15 bp, Homo sapiens
gaggtcagggaattc

SEQ ID NO: 1142548 - DNA, 15 bp, Homo sapiens
agaggtcagggaatt

SEQ ID NO: 1142549 - DNA, 15 bp, Homo sapiens
aagaggtcagggaat

SEQ ID NO: 1142550 - DNA, 15 bp, Homo sapiens
caagaggtcagggaa

SEQ ID NO: 1142551 - DNA, 15 bp, Homo sapiens
acaagaggtcaggga

SEQ ID NO: 1142552 - DNA, 15 bp, Homo sapiens
cacaagaggtcaggg

SEQ ID NO: 1142553 - DNA, 15 bp, Homo sapiens
gcacaagaggtcagg

SEQ ID NO: 1142554 - DNA, 15 bp, Homo sapiens
agcacaagaggtcag

SEQ ID NO: 1142555 - DNA, 15 bp, Homo sapiens
aagcacaagaggtca

SEQ ID NO: 1142556 - DNA, 15 bp, Homo sapiens
gaagcacaagaggtc

SEQ ID NO: 1142557 - DNA, 15 bp, Homo sapiens
agaagcacaagaggt

SEQ ID NO: 1142558 - DNA, 15 bp, Homo sapiens
gagaagcacaagagg

SEQ ID NO: 1142559 - DNA, 15 bp, Homo sapiens
cgagaagcacaagag

SEQ ID NO: 1142560 - DNA, 15 bp, Homo sapiens
ccgagaagcacaaga

SEQ ID NO: 1142561 - DNA, 15 bp, Homo sapiens
cccgagaagcacaag

SEQ ID NO: 1142562 - DNA, 15 bp, Homo sapiens
acccgagaagcacaa

SEQ ID NO: 1142563 - DNA, 15 bp, Homo sapiens
cacccgagaagcaca

SEQ ID NO: 1142564 - DNA, 15 bp, Homo sapiens
tcacccgagaagcac

SEQ ID NO: 1142565 - DNA, 15 bp, Homo sapiens
ctcacccgagaagca

SEQ ID NO: 1142566 - DNA, 15 bp, Homo sapiens
cctcacccgagaagc

SEQ ID NO: 1142567 - DNA, 15 bp, Homo sapiens
ccctcacccgagaag

SEQ ID NO: 1142568 - DNA, 15 bp, Homo sapiens
cccctcacccgagaa

SEQ ID NO: 1142569 - DNA, 15 bp, Homo sapiens
tcccctcacccgaga

SEQ ID NO: 1142570 - DNA, 15 bp, Homo sapiens
atcccctcacccgag

SEQ ID NO: 1142571 - DNA, 15 bp, Homo sapiens
catcccctcacccga

SEQ ID NO: 1142572 - DNA, 15 bp, Homo sapiens
gcatcccctcacccg

SEQ ID NO: 1142573 - DNA, 15 bp, Homo sapiens
agcatcccctcaccc

SEQ ID NO: 1142574 - DNA, 15 bp, Homo sapiens
aagcatcccctcacc

SEQ ID NO: 1142575 - DNA, 15 bp, Homo sapiens
gaagcatcccctcac

SEQ ID NO: 1142576 - DNA, 15 bp, Homo sapiens
ggaagcatcccctca

SEQ ID NO: 1142577 - DNA, 15 bp, Homo sapiens
gggaagcatcccctc

SEQ ID NO: 1142578 - DNA, 15 bp, Homo sapiens
ggggaagcatcccct

SEQ ID NO: 1142579 - DNA, 15 bp, Homo sapiens
gggggaagcatcccc

SEQ ID NO: 1142580 - DNA, 15 bp, Homo sapiens
agggggaagcatccc

SEQ ID NO: 1142581 - DNA, 15 bp, Homo sapiens
cagggggaagcatcc

SEQ ID NO: 1142582 - DNA, 15 bp, Homo sapiens
gcagggggaagcatc

SEQ ID NO: 1142583 - DNA, 15 bp, Homo sapiens
agcagggggaagcat

SEQ ID NO: 1142584 - DNA, 15 bp, Homo sapiens
aagcagggggaagca

SEQ ID NO: 1142585 - DNA, 15 bp, Homo sapiens
aaagcagggggaagc

SEQ ID NO: 1142586 - DNA, 15 bp, Homo sapiens
caaagcagggggaag

SEQ ID NO: 1142587 - DNA, 15 bp, Homo sapiens
ccaaagcagggggaa

SEQ ID NO: 1142588 - DNA, 15 bp, Homo sapiens
gccaaagcaggggga

SEQ ID NO: 1142589 - DNA, 15 bp, Homo sapiens
agccaaagcaggggg

SEQ ID NO: 1142590 - DNA, 15 bp, Homo sapiens
gagccaaagcagggg

SEQ ID NO: 1142591 - DNA, 15 bp, Homo sapiens
tgagccaaagcaggg

SEQ ID NO: 1142592 - DNA, 15 bp, Homo sapiens
atgagccaaagcagg

SEQ ID NO: 1142593 - DNA, 15 bp, Homo sapiens
catgagccaaagcag

SEQ ID NO: 1142594 - DNA, 15 bp, Homo sapiens
gcatgagccaaagca

SEQ ID NO: 1142595 - DNA, 15 bp, Homo sapiens
agcatgagccaaagc

SEQ ID NO: 1142596 - DNA, 15 bp, Homo sapiens
gagcatgagccaaag

SEQ ID NO: 1142597 - DNA, 15 bp, Homo sapiens
cgagcatgagccaaa

SEQ ID NO: 1142598 - DNA, 15 bp, Homo sapiens
ccgagcatgagccaa

SEQ ID NO: 1142599 - DNA, 15 bp, Homo sapiens
accgagcatgagcca

SEQ ID NO: 1142600 - DNA, 15 bp, Homo sapiens
caccgagcatgagcc

SEQ ID NO: 1142601 - DNA, 15 bp, Homo sapiens
gcaccgagcatgagc

SEQ ID NO: 1142602 - DNA, 15 bp, Homo sapiens
cgcaccgagcatgag

SEQ ID NO: 1142603 - DNA, 15 bp, Homo sapiens
gcgcaccgagcatga

SEQ ID NO: 1142604 - DNA, 15 bp, Homo sapiens
agcgcaccgagcatg

SEQ ID NO: 1142605 - DNA, 15 bp, Homo sapiens
cagcgcaccgagcat

SEQ ID NO: 1142606 - DNA, 15 bp, Homo sapiens
gcagcgcaccgagca

SEQ ID NO: 1142607 - DNA, 15 bp, Homo sapiens
tgcagcgcaccgagc

SEQ ID NO: 1142608 - DNA, 15 bp, Homo sapiens
gtgcagcgcaccgag

SEQ ID NO: 1142609 - DNA, 15 bp, Homo sapiens
ggtgcagcgcaccga

SEQ ID NO: 1142610 - DNA, 15 bp, Homo sapiens
aggtgcagcgcaccg

SEQ ID NO: 1142611 - DNA, 15 bp, Homo sapiens
taggtgcagcgcacc

SEQ ID NO: 1142612 - DNA, 15 bp, Homo sapiens
gtaggtgcagcgcac

SEQ ID NO: 1142613 - DNA, 15 bp, Homo sapiens
agtaggtgcagcgca

SEQ ID NO: 1142614 - DNA, 15 bp, Homo sapiens
cagtaggtgcagcgc

SEQ ID NO: 1142615 - DNA, 15 bp, Homo sapiens
acagtaggtgcagcg

SEQ ID NO: 1142616 - DNA, 15 bp, Homo sapiens
gacagtaggtgcagc

SEQ ID NO: 1142617 - DNA, 15 bp, Homo sapiens
ggacagtaggtgcag

SEQ ID NO: 1142618 - DNA, 15 bp, Homo sapiens
aggacagtaggtgca

SEQ ID NO: 1142619 - DNA, 15 bp, Homo sapiens
caggacagtaggtgc

SEQ ID NO: 1142620 - DNA, 15 bp, Homo sapiens
gcaggacagtaggtg

SEQ ID NO: 1142621 - DNA, 15 bp, Homo sapiens
tgcaggacagtaggt

SEQ ID NO: 1142622 - DNA, 15 bp, Homo sapiens
gtgcaggacagtagg

SEQ ID NO: 1142623 - DNA, 15 bp, Homo sapiens
ggtgcaggacagtag

SEQ ID NO: 1142624 - DNA, 15 bp, Homo sapiens
gggtgcaggacagta

SEQ ID NO: 1142625 - DNA, 15 bp, Homo sapiens
tgggtgcaggacagt

SEQ ID NO: 1142626 - DNA, 15 bp, Homo sapiens
gtgggtgcaggacag

SEQ ID NO: 1142627 - DNA, 15 bp, Homo sapiens
agtgggtgcaggaca

SEQ ID NO: 1142628 - DNA, 15 bp, Homo sapiens
cagtgggtgcaggac

SEQ ID NO: 1142629 - DNA, 15 bp, Homo sapiens
acagtgggtgcagga

SEQ ID NO: 1142630 - DNA, 15 bp, Homo sapiens
gacagtgggtgcagg

SEQ ID NO: 1142631 - DNA, 15 bp, Homo sapiens
ggacagtgggtgcag

SEQ ID NO: 1142632 - DNA, 15 bp, Homo sapiens
cggacagtgggtgca

SEQ ID NO: 1142633 - DNA, 15 bp, Homo sapiens
tcggacagtgggtgc

SEQ ID NO: 1142634 - DNA, 15 bp, Homo sapiens
gtcggacagtgggtg

SEQ ID NO: 1142635 - DNA, 15 bp, Homo sapiens
tgtcggacagtgggt

SEQ ID NO: 1142636 - DNA, 15 bp, Homo sapiens
ttgtcggacagtggg

SEQ ID NO: 1142637 - DNA, 15 bp, Homo sapiens
cttgtcggacagtgg

SEQ ID NO: 1142638 - DNA, 15 bp, Homo sapiens
gcttgtcggacagtg

SEQ ID NO: 1142639 - DNA, 15 bp, Homo sapiens
ggcttgtcggacagt

SEQ ID NO: 1142640 - DNA, 15 bp, Homo sapiens
cggcttgtcggacag

SEQ ID NO: 1142641 - DNA, 15 bp, Homo sapiens
gcggcttgtcggaca

SEQ ID NO: 1142642 - DNA, 15 bp, Homo sapiens
tgcggcttgtcggac

SEQ ID NO: 1142643 - DNA, 15 bp, Homo sapiens
ctgcggcttgtcgga

SEQ ID NO: 1142644 - DNA, 15 bp, Homo sapiens
actgcggcttgtcgg

SEQ ID NO: 1142645 - DNA, 15 bp, Homo sapiens
cactgcggcttgtcg

SEQ ID NO: 1142646 - DNA, 15 bp, Homo sapiens
tcactgcggcttgtc

SEQ ID NO: 1142647 - DNA, 15 bp, Homo sapiens
ctcactgcggcttgt

SEQ ID NO: 1142648 - DNA, 15 bp, Homo sapiens
tctcactgcggcttg

SEQ ID NO: 1142649 - DNA, 15 bp, Homo sapiens
atctcactgcggctt

SEQ ID NO: 1142650 - DNA, 15 bp, Homo sapiens
catctcactgcggct

SEQ ID NO: 1142651 - DNA, 15 bp, Homo sapiens
tcatctcactgcggc

SEQ ID NO: 1142652 - DNA, 15 bp, Homo sapiens
ttcatctcactgcgg

SEQ ID NO: 1142653 - DNA, 15 bp, Homo sapiens
gttcatctcactgcg

SEQ ID NO: 1142654 - DNA, 15 bp, Homo sapiens
ggttcatctcactgc

SEQ ID NO: 1142655 - DNA, 15 bp, Homo sapiens
aggttcatctcactg

SEQ ID NO: 1142656 - DNA, 15 bp, Homo sapiens
caggttcatctcact

SEQ ID NO: 1142657 - DNA, 15 bp, Homo sapiens
ccaggttcatctcac

SEQ ID NO: 1142658 - DNA, 15 bp, Homo sapiens
cccaggttcatctca

SEQ ID NO: 1142659 - DNA, 15 bp, Homo sapiens
ccccaggttcatctc

SEQ ID NO: 1142660 - DNA, 15 bp, Homo sapiens
gccccaggttcatct

SEQ ID NO: 1142661 - DNA, 15 bp, Homo sapiens
ggccccaggttcatc

SEQ ID NO: 1142662 - DNA, 15 bp, Homo sapiens
aggccccaggttcat

SEQ ID NO: 1142663 - DNA, 15 bp, Homo sapiens
gaggccccaggttca

SEQ ID NO: 1142664 - DNA, 15 bp, Homo sapiens
tgaggccccaggttc

SEQ ID NO: 1142665 - DNA, 15 bp, Homo sapiens
ctgaggccccaggtt

SEQ ID NO: 1142666 - DNA, 15 bp, Homo sapiens
actgaggccccaggt

SEQ ID NO: 1142667 - DNA, 15 bp, Homo sapiens
tactgaggccccagg

SEQ ID NO: 1142668 - DNA, 15 bp, Homo sapiens
ctactgaggccccag

SEQ ID NO: 1142669 - DNA, 15 bp, Homo sapiens
cctactgaggcccca

SEQ ID NO: 1142670 - DNA, 15 bp, Homo sapiens
tcctactgaggcccc

SEQ ID NO: 1142671 - DNA, 15 bp, Homo sapiens
ttcctactgaggccc

SEQ ID NO: 1142672 - DNA, 15 bp, Homo sapiens
tttcctactgaggcc

SEQ ID NO: 1142673 - DNA, 15 bp, Homo sapiens
atttcctactgaggc

SEQ ID NO: 1142674 - DNA, 15 bp, Homo sapiens
catttcctactgagg

SEQ ID NO: 1142675 - DNA, 15 bp, Homo sapiens
gcatttcctactgag

SEQ ID NO: 1142676 - DNA, 15 bp, Homo sapiens
tgcatttcctactga

SEQ ID NO: 1142677 - DNA, 15 bp, Homo sapiens
ctgcatttcctactg

SEQ ID NO: 1142678 - DNA, 15 bp, Homo sapiens
tctgcatttcctact

SEQ ID NO: 1142679 - DNA, 15 bp, Homo sapiens
ttctgcatttcctac

SEQ ID NO: 1142680 - DNA, 15 bp, Homo sapiens
tttctgcatttccta

SEQ ID NO: 1142681 - DNA, 15 bp, Homo sapiens
gatttctgcatttcc

SEQ ID NO: 1142682 - DNA, 15 bp, Homo sapiens
tgatttctgcatttc

SEQ ID NO: 1142683 - DNA, 15 bp, Homo sapiens
gtgatttctgcattt

SEQ ID NO: 1142684 - DNA, 15 bp, Homo sapiens
ggtgatttctgcatt

SEQ ID NO: 1142685 - DNA, 15 bp, Homo sapiens
aggtgatttctgcat

SEQ ID NO: 1142686 - DNA, 15 bp, Homo sapiens
caggtgatttctgca

SEQ ID NO: 1142687 - DNA, 15 bp, Homo sapiens
acaggtgatttctgc

SEQ ID NO: 1142688 - DNA, 15 bp, Homo sapiens
aacaggtgatttctg

SEQ ID NO: 1142689 - DNA, 15 bp, Homo sapiens
taacaggtgatttct

SEQ ID NO: 1142690 - DNA, 15 bp, Homo sapiens
ataacaggtgatttc

SEQ ID NO: 1142691 - DNA, 15 bp, Homo sapiens
gataacaggtgattt

SEQ ID NO: 1142692 - DNA, 15 bp, Homo sapiens
agataacaggtgatt

SEQ ID NO: 1142693 - DNA, 15 bp, Homo sapiens
cagataacaggtgat

SEQ ID NO: 1142694 - DNA, 15 bp, Homo sapiens
acagataacaggtga

SEQ ID NO: 1142695 - DNA, 15 bp, Homo sapiens
cacagataacaggtg

SEQ ID NO: 1142696 - DNA, 15 bp, Homo sapiens
acacagataacaggt

SEQ ID NO: 1142697 - DNA, 15 bp, Homo sapiens
gacacagataacagg

SEQ ID NO: 1142698 - DNA, 15 bp, Homo sapiens
tgacacagataacag

SEQ ID NO: 1142699 - DNA, 15 bp, Homo sapiens
gtgacacagataaca

SEQ ID NO: 1142700 - DNA, 15 bp, Homo sapiens
agtgacacagataac

SEQ ID NO: 1142701 - DNA, 15 bp, Homo sapiens
aagtgacacagataa

SEQ ID NO: 1142702 - DNA, 15 bp, Homo sapiens
caagtgacacagata

SEQ ID NO: 1142703 - DNA, 15 bp, Homo sapiens
gcaagtgacacagat

SEQ ID NO: 1142704 - DNA, 15 bp, Homo sapiens
tgcaagtgacacaga

SEQ ID NO: 1142705 - DNA, 15 bp, Homo sapiens
gtgcaagtgacacag

SEQ ID NO: 1142706 - DNA, 15 bp, Homo sapiens
agtgcaagtgacaca

SEQ ID NO: 1142707 - DNA, 15 bp, Homo sapiens
cagtgcaagtgacac

SEQ ID NO: 1142708 - DNA, 15 bp, Homo sapiens
ccagtgcaagtgaca

SEQ ID NO: 1142709 - DNA, 15 bp, Homo sapiens
cccagtgcaagtgac

SEQ ID NO: 1142710 - DNA, 15 bp, Homo sapiens
tcccagtgcaagtga

SEQ ID NO: 1142711 - DNA, 15 bp, Homo sapiens
ctcccagtgcaagtg

SEQ ID NO: 1142712 - DNA, 15 bp, Homo sapiens
gctcccagtgcaagt

SEQ ID NO: 1142713 - DNA, 15 bp, Homo sapiens
agctcccagtgcaag

SEQ ID NO: 1142714 - DNA, 15 bp, Homo sapiens
cagctcccagtgcaa

SEQ ID NO: 1142715 - DNA, 15 bp, Homo sapiens
acagctcccagtgca

SEQ ID NO: 1142716 - DNA, 15 bp, Homo sapiens
aacagctcccagtgc

SEQ ID NO: 1142717 - DNA, 15 bp, Homo sapiens
caacagctcccagtg

SEQ ID NO: 1142718 - DNA, 15 bp, Homo sapiens
tcaacagctcccagt

SEQ ID NO: 1142719 - DNA, 15 bp, Homo sapiens
gtcaacagctcccag

SEQ ID NO: 1142720 - DNA, 15 bp, Homo sapiens
agtcaacagctccca

SEQ ID NO: 1142721 - DNA, 15 bp, Homo sapiens
cagtcaacagctccc

SEQ ID NO: 1142722 - DNA, 15 bp, Homo sapiens
ccagtcaacagctcc

SEQ ID NO: 1142723 - DNA, 15 bp, Homo sapiens
tccagtcaacagctc

SEQ ID NO: 1142724 - DNA, 15 bp, Homo sapiens
ctccagtcaacagct

SEQ ID NO: 1142725 - DNA, 15 bp, Homo sapiens
gctccagtcaacagc

SEQ ID NO: 1142726 - DNA, 15 bp, Homo sapiens
agctccagtcaacag

SEQ ID NO: 1142727 - DNA, 15 bp, Homo sapiens
cagctccagtcaaca

SEQ ID NO: 1142728 - DNA, 15 bp, Homo sapiens
acagctccagtcaac

SEQ ID NO: 1142729 - DNA, 15 bp, Homo sapiens
aacagctccagtcaa

SEQ ID NO: 1142730 - DNA, 15 bp, Homo sapiens
gaacagctccagtca

SEQ ID NO: 1142731 - DNA, 15 bp, Homo sapiens
ggaacagctccagtc

SEQ ID NO: 1142732 - DNA, 15 bp, Homo sapiens
aggaacagctccagt

SEQ ID NO: 1142733 - DNA, 15 bp, Homo sapiens
taggaacagctccag

SEQ ID NO: 1142734 - DNA, 15 bp, Homo sapiens
ttaggaacagctcca

SEQ ID NO: 1142735 - DNA, 15 bp, Homo sapiens
attaggaacagctcc

SEQ ID NO: 1142736 - DNA, 15 bp, Homo sapiens
gattaggaacagctc

SEQ ID NO: 1142737 - DNA, 15 bp, Homo sapiens
tgattaggaacagct

SEQ ID NO: 1142738 - DNA, 15 bp, Homo sapiens
ctgattaggaacagc

SEQ ID NO: 1142739 - DNA, 15 bp, Homo sapiens
gctgattaggaacag

SEQ ID NO: 1142740 - DNA, 15 bp, Homo sapiens
agctgattaggaaca

SEQ ID NO: 1142741 - DNA, 15 bp, Homo sapiens
tagctgattaggaac

SEQ ID NO: 1142742 - DNA, 15 bp, Homo sapiens
atagctgattaggaa

SEQ ID NO: 1142743 - DNA, 15 bp, Homo sapiens
gatagctgattagga

SEQ ID NO: 1142744 - DNA, 15 bp, Homo sapiens
agatagctgattagg

SEQ ID NO: 1142745 - DNA, 15 bp, Homo sapiens
aagatagctgattag

SEQ ID NO: 1142746 - DNA, 15 bp, Homo sapiens
caagatagctgatta

SEQ ID NO: 1142747 - DNA, 15 bp, Homo sapiens
ccaagatagctgatt

SEQ ID NO: 1142748 - DNA, 15 bp, Homo sapiens
tccaagatagctgat

SEQ ID NO: 1142749 - DNA, 15 bp, Homo sapiens
ttccaagatagctga

SEQ ID NO: 1142750 - DNA, 15 bp, Homo sapiens
gttccaagatagctg

SEQ ID NO: 1142751 - DNA, 15 bp, Homo sapiens
ggttccaagatagct

SEQ ID NO: 1142752 - DNA, 15 bp, Homo sapiens
cggttccaagatagc

SEQ ID NO: 1142753 - DNA, 15 bp, Homo sapiens
gcggttccaagatag

SEQ ID NO: 1142754 - DNA, 15 bp, Homo sapiens
ggcggttccaagata

SEQ ID NO: 1142755 - DNA, 15 bp, Homo sapiens
aggcggttccaagat

SEQ ID NO: 1142756 - DNA, 15 bp, Homo sapiens
gaggcggttccaaga

SEQ ID NO: 1142757 - DNA, 15 bp, Homo sapiens
agaggcggttccaag

SEQ ID NO: 1142758 - DNA, 15 bp, Homo sapiens
cagaggcggttccaa

SEQ ID NO: 1142759 - DNA, 15 bp, Homo sapiens
tcagaggcggttcca

SEQ ID NO: 1142760 - DNA, 15 bp, Homo sapiens
ttcagaggcggttcc

SEQ ID NO: 1142761 - DNA, 15 bp, Homo sapiens
tttcagaggcggttc

SEQ ID NO: 1142762 - DNA, 15 bp, Homo sapiens
ctttcagaggcggtt

SEQ ID NO: 1142763 - DNA, 15 bp, Homo sapiens
gctttcagaggcggt

SEQ ID NO: 1142764 - DNA, 15 bp, Homo sapiens
agctttcagaggcgg

SEQ ID NO: 1142765 - DNA, 15 bp, Homo sapiens
cagctttcagaggcg

SEQ ID NO: 1142766 - DNA, 15 bp, Homo sapiens
ccagctttcagaggc

SEQ ID NO: 1142767 - DNA, 15 bp, Homo sapiens
accagctttcagagg

SEQ ID NO: 1142768 - DNA, 15 bp, Homo sapiens
aaccagctttcagag

SEQ ID NO: 1142769 - DNA, 15 bp, Homo sapiens
aaaccagctttcaga

SEQ ID NO: 1142770 - DNA, 15 bp, Homo sapiens
aaaaccagctttcag

SEQ ID NO: 1142771 - DNA, 15 bp, Homo sapiens
ttaaaaccagctttc

SEQ ID NO: 1142772 - DNA, 15 bp, Homo sapiens
attaaaaccagcttt

SEQ ID NO: 1142773 - DNA, 15 bp, Homo sapiens
cattaaaaccagctt

SEQ ID NO: 1142774 - DNA, 15 bp, Homo sapiens
gcattaaaaccagct

SEQ ID NO: 1142775 - DNA, 15 bp, Homo sapiens
tgcattaaaaccagc

SEQ ID NO: 1142776 - DNA, 15 bp, Homo sapiens
atgcattaaaaccag

SEQ ID NO: 1142777 - DNA, 15 bp, Homo sapiens
tatgcattaaaacca

SEQ ID NO: 1142778 - DNA, 15 bp, Homo sapiens
ctatgcattaaaacc

SEQ ID NO: 1142779 - DNA, 15 bp, Homo sapiens
cctatgcattaaaac

SEQ ID NO: 1142780 - DNA, 15 bp, Homo sapiens
acctatgcattaaaa

SEQ ID NO: 1142781 - DNA, 15 bp, Homo sapiens
aacctatgcattaaa

SEQ ID NO: 1142782 - DNA, 15 bp, Homo sapiens
aaacctatgcattaa

SEQ ID NO: 1142783 - DNA, 15 bp, Homo sapiens
aaaacctatgcatta

SEQ ID NO: 1142784 - DNA, 15 bp, Homo sapiens
taaaacctatgcatt

SEQ ID NO: 1142785 - DNA, 15 bp, Homo sapiens
ttaaaacctatgcat

SEQ ID NO: 1142786 - DNA, 15 bp, Homo sapiens
tttaaaacctatgca

SEQ ID NO: 1142787 - DNA, 15 bp, Homo sapiens
atttaaaacctatgc

SEQ ID NO: 1142788 - DNA, 15 bp, Homo sapiens
gatttaaaacctatg

SEQ ID NO: 1142789 - DNA, 15 bp, Homo sapiens
agatttaaaacctat

SEQ ID NO: 1142790 - DNA, 15 bp, Homo sapiens
cagatttaaaaccta

SEQ ID NO: 1142791 - DNA, 15 bp, Homo sapiens
gcagatttaaaacct

SEQ ID NO: 1142792 - DNA, 15 bp, Homo sapiens
ggcagatttaaaacc

SEQ ID NO: 1142793 - DNA, 15 bp, Homo sapiens
aggcagatttaaaac

SEQ ID NO: 1142794 - DNA, 15 bp, Homo sapiens
gaggcagatttaaaa

SEQ ID NO: 1142795 - DNA, 15 bp, Homo sapiens
ggaggcagatttaaa

SEQ ID NO: 1142796 - DNA, 15 bp, Homo sapiens
aggaggcagatttaa

SEQ ID NO: 1142797 - DNA, 15 bp, Homo sapiens
taggaggcagattta

SEQ ID NO: 1142798 - DNA, 15 bp, Homo sapiens
gtaggaggcagattt

SEQ ID NO: 1142799 - DNA, 15 bp, Homo sapiens
tgtaggaggcagatt

SEQ ID NO: 1142800 - DNA, 15 bp, Homo sapiens
ctgtaggaggcagat

SEQ ID NO: 1142801 - DNA, 15 bp, Homo sapiens
tctgtaggaggcaga

SEQ ID NO: 1142802 - DNA, 15 bp, Homo sapiens
ttctgtaggaggcag

SEQ ID NO: 1142803 - DNA, 15 bp, Homo sapiens
tttctgtaggaggca

SEQ ID NO: 1142804 - DNA, 15 bp, Homo sapiens
ttttctgtaggaggc

SEQ ID NO: 1142805 - DNA, 15 bp, Homo sapiens
attttctgtaggagg

SEQ ID NO: 1142806 - DNA, 15 bp, Homo sapiens
tattttctgtaggag

SEQ ID NO: 1142807 - DNA, 15 bp, Homo sapiens
gtattttctgtagga

SEQ ID NO: 1142808 - DNA, 15 bp, Homo sapiens
tgtattttctgtagg

SEQ ID NO: 1142809 - DNA, 15 bp, Homo sapiens
ttgtattttctgtag

SEQ ID NO: 1142810 - DNA, 15 bp, Homo sapiens
attgtattttctgta

SEQ ID NO: 1142811 - DNA, 15 bp, Homo sapiens
gattgtattttctgt

SEQ ID NO: 1142812 - DNA, 15 bp, Homo sapiens
ggattgtattttctg

SEQ ID NO: 1142813 - DNA, 15 bp, Homo sapiens
aggattgtattttct

SEQ ID NO: 1142814 - DNA, 15 bp, Homo sapiens
taggattgtattttc

SEQ ID NO: 1142815 - DNA, 15 bp, Homo sapiens
gtaggattgtatttt

SEQ ID NO: 1142816 - DNA, 15 bp, Homo sapiens
tgtaggattgtattt

SEQ ID NO: 1142817 - DNA, 15 bp, Homo sapiens
ttgtaggattgtatt

SEQ ID NO: 1142818 - DNA, 15 bp, Homo sapiens
tttgtaggattgtat

SEQ ID NO: 1142819 - DNA, 15 bp, Homo sapiens
gtttgtaggattgta

SEQ ID NO: 1142820 - DNA, 15 bp, Homo sapiens
ggtttgtaggattgt

SEQ ID NO: 1142821 - DNA, 15 bp, Homo sapiens
aggtttgtaggattg

SEQ ID NO: 1142822 - DNA, 15 bp, Homo sapiens
aaggtttgtaggatt

SEQ ID NO: 1142823 - DNA, 15 bp, Homo sapiens
taaggtttgtaggat

SEQ ID NO: 1142824 - DNA, 15 bp, Homo sapiens
ttaaggtttgtagga

SEQ ID NO: 1142825 - DNA, 15 bp, Homo sapiens
attaaggtttgtagg

SEQ ID NO: 1142826 - DNA, 15 bp, Homo sapiens
cattaaggtttgtag

SEQ ID NO: 1142827 - DNA, 15 bp, Homo sapiens
acattaaggtttgta

SEQ ID NO: 1142828 - DNA, 15 bp, Homo sapiens
tacattaaggtttgt

SEQ ID NO: 1142829 - DNA, 15 bp, Homo sapiens
ctacattaaggtttg

SEQ ID NO: 1142830 - DNA, 15 bp, Homo sapiens
cctacattaaggttt

SEQ ID NO: 1142831 - DNA, 15 bp, Homo sapiens
tcctacattaaggtt

SEQ ID NO: 1142832 - DNA, 15 bp, Homo sapiens
ttcctacattaaggt

SEQ ID NO: 1142833 - DNA, 15 bp, Homo sapiens
gttcctacattaagg

SEQ ID NO: 1142834 - DNA, 15 bp, Homo sapiens
tgttcctacattaag

SEQ ID NO: 1142835 - DNA, 15 bp, Homo sapiens
ctgttcctacattaa

SEQ ID NO: 1142836 - DNA, 15 bp, Homo sapiens
tctgttcctacatta

SEQ ID NO: 1142837 - DNA, 15 bp, Homo sapiens
ttctgttcctacatt

SEQ ID NO: 1142838 - DNA, 15 bp, Homo sapiens
tttctgttcctacat

SEQ ID NO: 1142839 - DNA, 15 bp, Homo sapiens
atttctgttcctaca

SEQ ID NO: 1142840 - DNA, 15 bp, Homo sapiens
aatttctgttcctac

SEQ ID NO: 1142841 - DNA, 15 bp, Homo sapiens
aaatttctgttccta

SEQ ID NO: 1142842 - DNA, 15 bp, Homo sapiens
aaaatttctgttcct

SEQ ID NO: 1142843 - DNA, 15 bp, Homo sapiens
gaaaatttctgttcc

SEQ ID NO: 1142844 - DNA, 15 bp, Homo sapiens
tgaaaatttctgttc

SEQ ID NO: 1142845 - DNA, 15 bp, Homo sapiens
atgaaaatttctgtt

SEQ ID NO: 1142846 - DNA, 15 bp, Homo sapiens
aatgaaaatttctgt

SEQ ID NO: 1142847 - DNA, 15 bp, Homo sapiens
aaatgaaaatttctg

SEQ ID NO: 1142848 - DNA, 15 bp, Homo sapiens
caaatgaaaatttct

SEQ ID NO: 1142849 - DNA, 15 bp, Homo sapiens
tcaaatgaaaatttc

SEQ ID NO: 1142850 - DNA, 15 bp, Homo sapiens
ttcaaatgaaaattt

SEQ ID NO: 1142851 - DNA, 15 bp, Homo sapiens
attcaaatgaaaatt

SEQ ID NO: 1142852 - DNA, 15 bp, Homo sapiens
aattcaaatgaaaat

SEQ ID NO: 1142853 - DNA, 15 bp, Homo sapiens
aaattcaaatgaaaa

SEQ ID NO: 1142854 - DNA, 15 bp, Homo sapiens
taaattcaaatgaaa

SEQ ID NO: 1142855 - DNA, 15 bp, Homo sapiens
ctaaattcaaatgaa

SEQ ID NO: 1142856 - DNA, 15 bp, Homo sapiens
tctaaattcaaatga

SEQ ID NO: 1142857 - DNA, 15 bp, Homo sapiens
ttctaaattcaaatg

SEQ ID NO: 1142858 - DNA, 15 bp, Homo sapiens
cttctaaattcaaat

SEQ ID NO: 1142859 - DNA, 15 bp, Homo sapiens
acttctaaattcaaa

SEQ ID NO: 1142860 - DNA, 15 bp, Homo sapiens
aacttctaaattcaa

SEQ ID NO: 1142861 - DNA, 15 bp, Homo sapiens
aaacttctaaattca

SEQ ID NO: 1142862 - DNA, 15 bp, Homo sapiens
aaaacttctaaattc

SEQ ID NO: 1142863 - DNA, 15 bp, Homo sapiens
taaaacttctaaatt

SEQ ID NO: 1142864 - DNA, 15 bp, Homo sapiens
ctaaaacttctaaat

SEQ ID NO: 1142865 - DNA, 15 bp, Homo sapiens
gctaaaacttctaaa

SEQ ID NO: 1142866 - DNA, 15 bp, Homo sapiens
agctaaaacttctaa

SEQ ID NO: 1142867 - DNA, 15 bp, Homo sapiens
aagctaaaacttcta

SEQ ID NO: 1142868 - DNA, 15 bp, Homo sapiens
taagctaaaacttct

SEQ ID NO: 1142869 - DNA, 15 bp, Homo sapiens
ttaagctaaaacttc

SEQ ID NO: 1142870 - DNA, 15 bp, Homo sapiens
cttaagctaaaactt

SEQ ID NO: 1142871 - DNA, 15 bp, Homo sapiens
acttaagctaaaact

SEQ ID NO: 1142872 - DNA, 15 bp, Homo sapiens
aacttaagctaaaac

SEQ ID NO: 1142873 - DNA, 15 bp, Homo sapiens
taacttaagctaaaa

SEQ ID NO: 1142874 - DNA, 15 bp, Homo sapiens
ttaacttaagctaaa

SEQ ID NO: 1142875 - DNA, 15 bp, Homo sapiens
tttaacttaagctaa

SEQ ID NO: 1142876 - DNA, 15 bp, Homo sapiens
gtttaacttaagcta

SEQ ID NO: 1142877 - DNA, 15 bp, Homo sapiens
agtttaacttaagct

SEQ ID NO: 1142878 - DNA, 15 bp, Homo sapiens
aagtttaacttaagc

SEQ ID NO: 1142879 - DNA, 15 bp, Homo sapiens
taagtttaacttaag

SEQ ID NO: 1142880 - DNA, 15 bp, Homo sapiens
ttaagtttaacttaa

SEQ ID NO: 1142881 - DNA, 15 bp, Homo sapiens
tttaagtttaactta

SEQ ID NO: 1142882 - DNA, 15 bp, Homo sapiens
atttaagtttaactt

SEQ ID NO: 1142883 - DNA, 15 bp, Homo sapiens
aatttaagtttaact

SEQ ID NO: 1142884 - DNA, 15 bp, Homo sapiens
aaatttaagtttaac

SEQ ID NO: 1142885 - DNA, 15 bp, Homo sapiens
taaatttaagtttaa

SEQ ID NO: 1142886 - DNA, 15 bp, Homo sapiens
ttaaatttaagttta

SEQ ID NO: 1142887 - DNA, 15 bp, Homo sapiens
attaaatttaagttt

SEQ ID NO: 1142888 - DNA, 15 bp, Homo sapiens
tattaaatttaagtt

SEQ ID NO: 1142889 - DNA, 15 bp, Homo sapiens
atattaaatttaagt

SEQ ID NO: 1142890 - DNA, 15 bp, Homo sapiens
aatattaaatttaag

SEQ ID NO: 1142891 - DNA, 15 bp, Homo sapiens
aaatattaaatttaa

SEQ ID NO: 1142892 - DNA, 15 bp, Homo sapiens
taaatattaaattta

SEQ ID NO: 1142893 - DNA, 15 bp, Homo sapiens
ataaatattaaattt

SEQ ID NO: 1142894 - DNA, 15 bp, Homo sapiens
aataaatattaaatt

SEQ ID NO: 1142895 - DNA, 15 bp, Homo sapiens
aaataaatattaaat

SEQ ID NO: 1142896 - DNA, 15 bp, Homo sapiens
aaaataaatattaaa

SEQ ID NO: 1142897 - DNA, 15 bp, Homo sapiens
gaaaataaatattaa

SEQ ID NO: 1142898 - DNA, 15 bp, Homo sapiens
tgaaaataaatatta

SEQ ID NO: 1142899 - DNA, 15 bp, Homo sapiens
gtgaaaataaatatt

SEQ ID NO: 1142900 - DNA, 15 bp, Homo sapiens
ggtgaaaataaatat

SEQ ID NO: 1142901 - DNA, 15 bp, Homo sapiens
aggtgaaaataaata

SEQ ID NO: 1142902 - DNA, 15 bp, Homo sapiens
gaggtgaaaataaat

SEQ ID NO: 1142903 - DNA, 15 bp, Homo sapiens
agaggtgaaaataaa

SEQ ID NO: 1142904 - DNA, 15 bp, Homo sapiens
aagaggtgaaaataa

SEQ ID NO: 1142905 - DNA, 15 bp, Homo sapiens
taagaggtgaaaata

SEQ ID NO: 1142906 - DNA, 15 bp, Homo sapiens
gtaagaggtgaaaat

SEQ ID NO: 1142907 - DNA, 15 bp, Homo sapiens
agtaagaggtgaaaa

SEQ ID NO: 1142908 - DNA, 15 bp, Homo sapiens
tagtaagaggtgaaa

SEQ ID NO: 1142909 - DNA, 15 bp, Homo sapiens
ctagtaagaggtgaa

SEQ ID NO: 1142910 - DNA, 15 bp, Homo sapiens
tctagtaagaggtga

SEQ ID NO: 1142911 - DNA, 15 bp, Homo sapiens
atctagtaagaggtg

SEQ ID NO: 1142912 - DNA, 15 bp, Homo sapiens
tatctagtaagaggt

SEQ ID NO: 1142913 - DNA, 15 bp, Homo sapiens
atatctagtaagagg

SEQ ID NO: 1142914 - DNA, 15 bp, Homo sapiens
gatatctagtaagag

SEQ ID NO: 1142915 - DNA, 15 bp, Homo sapiens
agatatctagtaaga

SEQ ID NO: 1142916 - DNA, 15 bp, Homo sapiens
aagatatctagtaag

SEQ ID NO: 1142917 - DNA, 15 bp, Homo sapiens
taagatatctagtaa

SEQ ID NO: 1142918 - DNA, 15 bp, Homo sapiens
ttaagatatctagta

SEQ ID NO: 1142919 - DNA, 15 bp, Homo sapiens
attaagatatctagt

SEQ ID NO: 1142920 - DNA, 15 bp, Homo sapiens
tattaagatatctag

SEQ ID NO: 1142921 - DNA, 15 bp, Homo sapiens
ctattaagatatcta

SEQ ID NO: 1142922 - DNA, 15 bp, Homo sapiens
tctattaagatatct

SEQ ID NO: 1142923 - DNA, 15 bp, Homo sapiens
atctattaagatatc

SEQ ID NO: 1142924 - DNA, 15 bp, Homo sapiens
tatctattaagatat

SEQ ID NO: 1142925 - DNA, 15 bp, Homo sapiens
atatctattaagata

SEQ ID NO: 1142926 - DNA, 15 bp, Homo sapiens
aatatctattaagat

SEQ ID NO: 1142927 - DNA, 15 bp, Homo sapiens
aaatatctattaaga

SEQ ID NO: 1142928 - DNA, 15 bp, Homo sapiens
aaaatatctattaag

SEQ ID NO: 1142929 - DNA, 15 bp, Homo sapiens
aaaaatatctattaa

SEQ ID NO: 1142930 - DNA, 15 bp, Homo sapiens
aaaaaatatctatta

SEQ ID NO: 1142931 - DNA, 15 bp, Homo sapiens
caaaaaatatctatt

SEQ ID NO: 1142932 - DNA, 15 bp, Homo sapiens
acaaaaaatatctat

SEQ ID NO: 1142933 - DNA, 15 bp, Homo sapiens
gacaaaaaatatcta

SEQ ID NO: 1142934 - DNA, 15 bp, Homo sapiens
ggacaaaaaatatct

SEQ ID NO: 1142935 - DNA, 15 bp, Homo sapiens
aggacaaaaaatatc

SEQ ID NO: 1142936 - DNA, 15 bp, Homo sapiens
caggacaaaaaatat

SEQ ID NO: 1142937 - DNA, 15 bp, Homo sapiens
tcaggacaaaaaata

SEQ ID NO: 1142938 - DNA, 15 bp, Homo sapiens
ttcaggacaaaaaat

SEQ ID NO: 1142939 - DNA, 15 bp, Homo sapiens
tttcaggacaaaaaa

SEQ ID NO: 1142940 - DNA, 15 bp, Homo sapiens
ctttcaggacaaaaa

SEQ ID NO: 1142941 - DNA, 15 bp, Homo sapiens
tctttcaggacaaaa

SEQ ID NO: 1142942 - DNA, 15 bp, Homo sapiens
ctctttcaggacaaa

SEQ ID NO: 1142943 - DNA, 15 bp, Homo sapiens
cctctttcaggacaa

SEQ ID NO: 1142944 - DNA, 15 bp, Homo sapiens
acctctttcaggaca

SEQ ID NO: 1142945 - DNA, 15 bp, Homo sapiens
aacctctttcaggac

SEQ ID NO: 1142946 - DNA, 15 bp, Homo sapiens
caacctctttcagga

SEQ ID NO: 1142947 - DNA, 15 bp, Homo sapiens
tcaacctctttcagg

SEQ ID NO: 1142948 - DNA, 15 bp, Homo sapiens
ctcaacctctttcag

SEQ ID NO: 1142949 - DNA, 15 bp, Homo sapiens
cctcaacctctttca

SEQ ID NO: 1142950 - DNA, 15 bp, Homo sapiens
tcctcaacctctttc

SEQ ID NO: 1142951 - DNA, 15 bp, Homo sapiens
atcctcaacctcttt

SEQ ID NO: 1142952 - DNA, 15 bp, Homo sapiens
tatcctcaacctctt

SEQ ID NO: 1142953 - DNA, 15 bp, Homo sapiens
ttatcctcaacctct

SEQ ID NO: 1142954 - DNA, 15 bp, Homo sapiens
tttatcctcaacctc

SEQ ID NO: 1142955 - DNA, 15 bp, Homo sapiens
ttttatcctcaacct

SEQ ID NO: 1142956 - DNA, 15 bp, Homo sapiens
gttttatcctcaacc

SEQ ID NO: 1142957 - DNA, 15 bp, Homo sapiens
agttttatcctcaac

SEQ ID NO: 1142958 - DNA, 15 bp, Homo sapiens
cagttttatcctcaa

SEQ ID NO: 1142959 - DNA, 15 bp, Homo sapiens
acagttttatcctca

SEQ ID NO: 1142960 - DNA, 15 bp, Homo sapiens
cacagttttatcctc

SEQ ID NO: 1142961 - DNA, 15 bp, Homo sapiens
gcacagttttatcct

SEQ ID NO: 1142962 - DNA, 15 bp, Homo sapiens
agcacagttttatcc

SEQ ID NO: 1142963 - DNA, 15 bp, Homo sapiens
gagcacagttttatc

SEQ ID NO: 1142964 - DNA, 15 bp, Homo sapiens
agagcacagttttat

SEQ ID NO: 1142965 - DNA, 15 bp, Homo sapiens
tagagcacagtttta

SEQ ID NO: 1142966 - DNA, 15 bp, Homo sapiens
ttagagcacagtttt

SEQ ID NO: 1142967 - DNA, 15 bp, Homo sapiens
gttagagcacagttt

SEQ ID NO: 1142968 - DNA, 15 bp, Homo sapiens
tgttagagcacagtt

SEQ ID NO: 1142969 - DNA, 15 bp, Homo sapiens
ctgttagagcacagt

SEQ ID NO: 1142970 - DNA, 15 bp, Homo sapiens
cctgttagagcacag

SEQ ID NO: 1142971 - DNA, 15 bp, Homo sapiens
tcctgttagagcaca

SEQ ID NO: 1142972 - DNA, 15 bp, Homo sapiens
ctcctgttagagcac

SEQ ID NO: 1142973 - DNA, 15 bp, Homo sapiens
actcctgttagagca

SEQ ID NO: 1142974 - DNA, 15 bp, Homo sapiens
aactcctgttagagc

SEQ ID NO: 1142975 - DNA, 15 bp, Homo sapiens
taactcctgttagag

SEQ ID NO: 1142976 - DNA, 15 bp, Homo sapiens
ctaactcctgttaga

SEQ ID NO: 1142977 - DNA, 15 bp, Homo sapiens
tctaactcctgttag

SEQ ID NO: 1142978 - DNA, 15 bp, Homo sapiens
ttctaactcctgtta

SEQ ID NO: 1142979 - DNA, 15 bp, Homo sapiens
tttctaactcctgtt

SEQ ID NO: 1142980 - DNA, 15 bp, Homo sapiens
atttctaactcctgt

SEQ ID NO: 1142981 - DNA, 15 bp, Homo sapiens
tatttctaactcctg

SEQ ID NO: 1142982 - DNA, 15 bp, Homo sapiens
atatttctaactcct

SEQ ID NO: 1142983 - DNA, 15 bp, Homo sapiens
tatatttctaactcc

SEQ ID NO: 1142984 - DNA, 15 bp, Homo sapiens
atatatttctaactc

SEQ ID NO: 1142985 - DNA, 15 bp, Homo sapiens
aatatatttctaact

SEQ ID NO: 1142986 - DNA, 15 bp, Homo sapiens
taatatatttctaac

SEQ ID NO: 1142987 - DNA, 15 bp, Homo sapiens
ataatatatttctaa

SEQ ID NO: 1142988 - DNA, 15 bp, Homo sapiens
aataatatatttcta

SEQ ID NO: 1142989 - DNA, 15 bp, Homo sapiens
aaataatatatttct

SEQ ID NO: 1142990 - DNA, 15 bp, Homo sapiens
aaaataatatatttc

SEQ ID NO: 1142991 - DNA, 15 bp, Homo sapiens
gaaaataatatattt

SEQ ID NO: 1142992 - DNA, 15 bp, Homo sapiens
agaaaataatatatt

SEQ ID NO: 1142993 - DNA, 15 bp, Homo sapiens
cagaaaataatatat

SEQ ID NO: 1142994 - DNA, 15 bp, Homo sapiens
ccagaaaataatata

SEQ ID NO: 1142995 - DNA, 15 bp, Homo sapiens
tccagaaaataatat

SEQ ID NO: 1142996 - DNA, 15 bp, Homo sapiens
ttccagaaaataata

SEQ ID NO: 1142997 - DNA, 15 bp, Homo sapiens
tttccagaaaataat

SEQ ID NO: 1142998 - DNA, 15 bp, Homo sapiens
ttttccagaaaataa

SEQ ID NO: 1142999 - DNA, 15 bp, Homo sapiens
attttccagaaaata

SEQ ID NO: 1143000 - DNA, 15 bp, Homo sapiens
gattttccagaaaat

SEQ ID NO: 1143001 - DNA, 15 bp, Homo sapiens
tgattttccagaaaa

SEQ ID NO: 1143002 - DNA, 15 bp, Homo sapiens
gtgattttccagaaa

SEQ ID NO: 1143003 - DNA, 15 bp, Homo sapiens
agtgattttccagaa

SEQ ID NO: 1143004 - DNA, 15 bp, Homo sapiens
cagtgattttccaga

SEQ ID NO: 1143005 - DNA, 15 bp, Homo sapiens
tcagtgattttccag

SEQ ID NO: 1143006 - DNA, 15 bp, Homo sapiens
ttcagtgattttcca

SEQ ID NO: 1143007 - DNA, 15 bp, Homo sapiens
tttcagtgattttcc

SEQ ID NO: 1143008 - DNA, 15 bp, Homo sapiens
ttttcagtgattttc

SEQ ID NO: 1143009 - DNA, 15 bp, Homo sapiens
gttttcagtgatttt

SEQ ID NO: 1143010 - DNA, 15 bp, Homo sapiens
tgttttcagtgattt

SEQ ID NO: 1143011 - DNA, 15 bp, Homo sapiens
ttgttttcagtgatt

SEQ ID NO: 1143012 - DNA, 15 bp, Homo sapiens
tttgttttcagtgat

SEQ ID NO: 1143013 - DNA, 15 bp, Homo sapiens
gtttgttttcagtga

SEQ ID NO: 1143014 - DNA, 15 bp, Homo sapiens
ggtttgttttcagtg

SEQ ID NO: 1143015 - DNA, 15 bp, Homo sapiens
aggtttgttttcagt

SEQ ID NO: 1143016 - DNA, 15 bp, Homo sapiens
taggtttgttttcag

SEQ ID NO: 1143017 - DNA, 15 bp, Homo sapiens
ctaggtttgttttca

SEQ ID NO: 1143018 - DNA, 15 bp, Homo sapiens
cctaggtttgttttc

SEQ ID NO: 1143019 - DNA, 15 bp, Homo sapiens
acctaggtttgtttt

SEQ ID NO: 1143020 - DNA, 15 bp, Homo sapiens
aacctaggtttgttt

SEQ ID NO: 1143021 - DNA, 15 bp, Homo sapiens
aaacctaggtttgtt

SEQ ID NO: 1143022 - DNA, 15 bp, Homo sapiens
taaacctaggtttgt

SEQ ID NO: 1143023 - DNA, 15 bp, Homo sapiens
gtaaacctaggtttg

SEQ ID NO: 1143024 - DNA, 15 bp, Homo sapiens
agtaaacctaggttt

SEQ ID NO: 1143025 - DNA, 15 bp, Homo sapiens
aagtaaacctaggtt

SEQ ID NO: 1143026 - DNA, 15 bp, Homo sapiens
taagtaaacctaggt

SEQ ID NO: 1143027 - DNA, 15 bp, Homo sapiens
ctaagtaaacctagg

SEQ ID NO: 1143028 - DNA, 15 bp, Homo sapiens
cctaagtaaacctag

SEQ ID NO: 1143029 - DNA, 15 bp, Homo sapiens
tcctaagtaaaccta

SEQ ID NO: 1143030 - DNA, 15 bp, Homo sapiens
atcctaagtaaacct

SEQ ID NO: 1143031 - DNA, 15 bp, Homo sapiens
catcctaagtaaacc

SEQ ID NO: 1143032 - DNA, 15 bp, Homo sapiens
acatcctaagtaaac

SEQ ID NO: 1143033 - DNA, 15 bp, Homo sapiens
aacatcctaagtaaa

SEQ ID NO: 1143034 - DNA, 15 bp, Homo sapiens
caacatcctaagtaa
